United States Patent Application Publication US 2005/0244851 A1 - sequence listing, part 35

SEQ ID NO: 1351310 - DNA, 25 bp, Homo sapien
tgaggttctgctacaatcagggtct

SEQ ID NO: 1351311 - DNA, 25 bp, Homo sapien
ggttctgctacaatcagggtcttta

SEQ ID NO: 1351312 - DNA, 25 bp, Homo sapien
cacatccggctaattttttatattt

SEQ ID NO: 1351313 - DNA, 25 bp, Homo sapien
ttacaggagcgcgccaccacatccg

SEQ ID NO: 1351314 - DNA, 25 bp, Homo sapien
cagcctcccaaagtggtggaattac

SEQ ID NO: 1351315 - DNA, 25 bp, Homo sapien
ttggtaaagacagggtttcaccatg

SEQ ID NO: 1351316 - DNA, 25 bp, Homo sapien
ccatttgatggaacgtttgctgcct

SEQ ID NO: 1351317 - DNA, 25 bp, Homo sapien
tgttcacggagtagtttgtcagatg

SEQ ID NO: 1351318 - DNA, 25 bp, Homo sapien
ttgtcagatgcatgtataactgggt

SEQ ID NO: 1351319 - DNA, 25 bp, Homo sapien
agtttcatcccgttcaaaatgctca

SEQ ID NO: 1351320 - DNA, 25 bp, Homo sapien
accaaagttgttaccacctatgaca

SEQ ID NO: 1351321 - DNA, 25 bp, Homo sapien
ctgtaacaagtaagaaccaaagttg

SEQ ID NO: 1351322 - DNA, 25 bp, Homo sapien
agaaccaaagttgttaccacctatg

SEQ ID NO: 1351323 - DNA, 25 bp, Homo sapien
caaagttgttaccacctatgacatc

SEQ ID NO: 1351324 - DNA, 25 bp, Homo sapien
caaattggactcattaggtggaatg

SEQ ID NO: 1351325 - DNA, 25 bp, Homo sapien
ccattcgcacaagcccatcatggta

SEQ ID NO: 1351326 - DNA, 25 bp, Homo sapien
tagtggatcacacgatgtaaccaga

SEQ ID NO: 1351327 - DNA, 25 bp, Homo sapien
cattaggaaaggcttttcaatgtat

SEQ ID NO: 1351328 - DNA, 25 bp, Homo sapien
tgagatggaagtttgtcaccatttc

SEQ ID NO: 1351329 - DNA, 25 bp, Homo sapien
gagatggaagtttgtcaccatttct

SEQ ID NO: 1351330 - DNA, 25 bp, Homo sapien
tctttgaaaaagtacattgcagaaa

SEQ ID NO: 1351331 - DNA, 25 bp, Homo sapien
aaaagcagcctcagccacattttct

SEQ ID NO: 1351332 - DNA, 25 bp, Homo sapien
ttttattaaaagcagcctcagccac

SEQ ID NO: 1351333 - DNA, 25 bp, Homo sapien
ctggtagctatatttccaaatatct

SEQ ID NO: 1351334 - DNA, 25 bp, Homo sapien
caaaggtataatccagaggccgaga

SEQ ID NO: 1351335 - DNA, 25 bp, Homo sapien
tgacccattgcaccattagctggtt

SEQ ID NO: 1351336 - DNA, 25 bp, Homo sapien
ggaattgagtatattcagcaggaaa

SEQ ID NO: 1351337 - DNA, 25 bp, Homo sapien
gatccaagttcgaggaacaaaggta

SEQ ID NO: 1351338 - DNA, 25 bp, Homo sapien
gggctactgatatttgccacaaaga

SEQ ID NO: 1351339 - DNA, 25 bp, Homo sapien
cactattctggactatggattcatc

SEQ ID NO: 1351340 - DNA, 25 bp, Homo sapien
ctgtaaattggacataataggaaaa

SEQ ID NO: 1351341 - DNA, 25 bp, Homo sapien
agagtacacactctgtgctaggtac

SEQ ID NO: 1351342 - DNA, 25 bp, Homo sapien
ccattcctggaaaatggttgatcct

SEQ ID NO: 1351343 - DNA, 25 bp, Homo sapien
cttcctacagatctcccccattcct

SEQ ID NO: 1351344 - DNA, 25 bp, Homo sapien
cccattcctggaaaatggttgatcc

SEQ ID NO: 1351345 - DNA, 25 bp, Homo sapien
taagaaatccttcctacagatctcc

SEQ ID NO: 1351346 - DNA, 25 bp, Homo sapien
taatgttaaatgacctacagtgaat

SEQ ID NO: 1351347 - DNA, 25 bp, Homo sapien
taaagagtatggtaatcagagaata

SEQ ID NO: 1351348 - DNA, 25 bp, Homo sapien
tacgacaatacaattctatccatcc

SEQ ID NO: 1351349 - DNA, 25 bp, Homo sapien
tattctcagcgaattaattatattc

SEQ ID NO: 1351350 - DNA, 25 bp, Homo sapien
tttctgcatcctggtctccctatgc

SEQ ID NO: 1351351 - DNA, 25 bp, Homo sapien
aaaccagattacatatagctgacat

SEQ ID NO: 1351352 - DNA, 25 bp, Homo sapien
tagctgacatcacaagtatttctgc

SEQ ID NO: 1351353 - DNA, 25 bp, Homo sapien
tatgcaatctactctacatctttaa

SEQ ID NO: 1351354 - DNA, 25 bp, Homo sapien
acttaagtctgcaaaagatgcaggc

SEQ ID NO: 1351355 - DNA, 25 bp, Homo sapien
caaaacaggctattcaggtgagtaa

SEQ ID NO: 1351356 - DNA, 25 bp, Homo sapien
gattcttccctaaagatagaaagag

SEQ ID NO: 1351357 - DNA, 25 bp, Homo sapien
catgcaaagagccaatacaactgga

SEQ ID NO: 1351358 - DNA, 25 bp, Homo sapien
gaaattttctcctgctgaacagcag

SEQ ID NO: 1351359 - DNA, 25 bp, Homo sapien
gcagaatcacaccatataagattac

SEQ ID NO: 1351360 - DNA, 25 bp, Homo sapien
tcatctggagttttcataaatccca

SEQ ID NO: 1351361 - DNA, 25 bp, Homo sapien
tataagattacttgtttcatcctca

SEQ ID NO: 1351362 - DNA, 25 bp, Homo sapien
catttgctgtaatggttcccttctt

SEQ ID NO: 1351363 - DNA, 25 bp, Homo sapien
tcccggcaacatttgctgtaatggt

SEQ ID NO: 1351364 - DNA, 25 bp, Homo sapien
tttcattgtgctttgataaggtaat

SEQ ID NO: 1351365 - DNA, 25 bp, Homo sapien
actttgtcccggcaacatttgctgt

SEQ ID NO: 1351366 - DNA, 25 bp, Homo sapien
ctccttcttgaggcagagatggcat

SEQ ID NO: 1351367 - DNA, 25 bp, Homo sapien
tcttggtggaatcctcagatttcag

SEQ ID NO: 1351368 - DNA, 25 bp, Homo sapien
cagatttcaggataccaaagttatg

SEQ ID NO: 1351369 - DNA, 25 bp, Homo sapien
attagtctaagtaggatatggcccc

SEQ ID NO: 1351370 - DNA, 25 bp, Homo sapien
tattgcctgtgctgattagcaagca

SEQ ID NO: 1351371 - DNA, 25 bp, Homo sapien
aagctcttcatgtgattccagtgca

SEQ ID NO: 1351372 - DNA, 25 bp, Homo sapien
gatttgagatgacggatttatccca

SEQ ID NO: 1351373 - DNA, 25 bp, Homo sapien
catagaactgtcaagcaccaataga

SEQ ID NO: 1351374 - DNA, 25 bp, Homo sapien
tactgtaagcacacgatgacaatgc

SEQ ID NO: 1351375 - DNA, 25 bp, Homo sapien
ctttagtactctgtatatgtattac

SEQ ID NO: 1351376 - DNA, 25 bp, Homo sapien
ttttttcataatctgctttggaaag

SEQ ID NO: 1351377 - DNA, 25 bp, Homo sapien
ttttcataatctgctttggaaagca

SEQ ID NO: 1351378 - DNA, 25 bp, Homo sapien
ttttttttcataatctgctttggaa

SEQ ID NO: 1351379 - DNA, 25 bp, Homo sapien
tttcataatctgctttggaaagcat

SEQ ID NO: 1351380 - DNA, 25 bp, Homo sapien
tgcagctttcagagcttcacagctc

SEQ ID NO: 1351381 - DNA, 25 bp, Homo sapien
tcatcttattgggtgttccagcaag

SEQ ID NO: 1351382 - DNA, 25 bp, Homo sapien
actgtagaaatgtatcaccaatctg

SEQ ID NO: 1351383 - DNA, 25 bp, Homo sapien
cctcctggcttcaacgtatacattt

SEQ ID NO: 1351384 - DNA, 25 bp, Homo sapien
tggagtttgctagcctcttggttct

SEQ ID NO: 1351385 - DNA, 25 bp, Homo sapien
gctggagtttgctagcctcttggtt

SEQ ID NO: 1351386 - DNA, 25 bp, Homo sapien
ctggagtttgctagcctcttggttc

SEQ ID NO: 1351387 - DNA, 25 bp, Homo sapien
gatactaccagatgtcccatgaaag

SEQ ID NO: 1351388 - DNA, 25 bp, Homo sapien
taatatccggatcaatggctggttg

SEQ ID NO: 1351389 - DNA, 25 bp, Homo sapien
tttaattaacgggaggccagccaca

SEQ ID NO: 1351390 - DNA, 25 bp, Homo sapien
gtgtatatccaccaaacaagatggc

SEQ ID NO: 1351391 - DNA, 25 bp, Homo sapien
ctgtgatcttgcaatttggaaggcc

SEQ ID NO: 1351392 - DNA, 25 bp, Homo sapien
gaaggccgacgcaggaagagagctg

SEQ ID NO: 1351393 - DNA, 25 bp, Homo sapien
gctgagatagaaggactgcttcagc

SEQ ID NO: 1351394 - DNA, 25 bp, Homo sapien
ctgagatagaaggactgcttcagcc

SEQ ID NO: 1351395 - DNA, 25 bp, Homo sapien
gatttaccaccttctaagagcttac

SEQ ID NO: 1351396 - DNA, 25 bp, Homo sapien
aaagattagtggagaatactcaagc

SEQ ID NO: 1351397 - DNA, 25 bp, Homo sapien
caactactgtgtgtactatggacag

SEQ ID NO: 1351398 - DNA, 25 bp, Homo sapien
ttacttatcactcaccatcccagag

SEQ ID NO: 1351399 - DNA, 25 bp, Homo sapien
agttgacaatccttttagtacccag

SEQ ID NO: 1351400 - DNA, 25 bp, Homo sapien
tatagcagtaggtctgcaccaccct

SEQ ID NO: 1351401 - DNA, 25 bp, Homo sapien
tagatgagcacttcttagctgaacc

SEQ ID NO: 1351402 - DNA, 25 bp, Homo sapien
tctcttaaggtaccgctatagcagt

SEQ ID NO: 1351403 - DNA, 25 bp, Homo sapien
actggtggtccggtgctctcctccg

SEQ ID NO: 1351404 - DNA, 25 bp, Homo sapien
ggcggctaccgacgggccagaccat

SEQ ID NO: 1351405 - DNA, 25 bp, Homo sapien
agccacggctcgggactccggtgct

SEQ ID NO: 1351406 - DNA, 25 bp, Homo sapien
tgctcgacgcggagtgcctggaaca

SEQ ID NO: 1351407 - DNA, 25 bp, Homo sapien
ttctgtgagcagtaacttatcattg

SEQ ID NO: 1351408 - DNA, 25 bp, Homo sapien
cattgacattagcagtacccgcaaa

SEQ ID NO: 1351409 - DNA, 25 bp, Homo sapien
tgtgagcagtaacttatcattgaca

SEQ ID NO: 1351410 - DNA, 25 bp, Homo sapien
cttatcattgacattagcagtaccc

SEQ ID NO: 1351411 - DNA, 25 bp, Homo sapien
tcaaagtcactaaagccatgcagta

SEQ ID NO: 1351412 - DNA, 25 bp, Homo sapien
caaaggacataggaccagtctggta

SEQ ID NO: 1351413 - DNA, 25 bp, Homo sapien
gcagtacctttccatagctggggat

SEQ ID NO: 1351414 - DNA, 25 bp, Homo sapien
gaccagtctggtatagccttccagg

SEQ ID NO: 1351415 - DNA, 25 bp, Homo sapien
attctgagtacttgggctactgaac

SEQ ID NO: 1351416 - DNA, 25 bp, Homo sapien
tacttgggctactgaacctggagtt

SEQ ID NO: 1351417 - DNA, 25 bp, Homo sapien
tgagtacttgggctactgaacctgg

SEQ ID NO: 1351418 - DNA, 25 bp, Homo sapien
ttgggctactgaacctggagttgga

SEQ ID NO: 1351419 - DNA, 25 bp, Homo sapien
gggactgggtgattactccaggcat

SEQ ID NO: 1351420 - DNA, 25 bp, Homo sapien
ctgggaataagtgggactgggtgat

SEQ ID NO: 1351421 - DNA, 25 bp, Homo sapien
gaataagtgggactgggtgattact

SEQ ID NO: 1351422 - DNA, 25 bp, Homo sapien
aagtgggactgggtgattactccag

SEQ ID NO: 1351423 - DNA, 25 bp, Homo sapien
tccagctctgttcctgtgctttacc

SEQ ID NO: 1351424 - DNA, 25 bp, Homo sapien
ctttgtctccagcactccagctctg

SEQ ID NO: 1351425 - DNA, 25 bp, Homo sapien
cactccagctctgttcctgtgcttt

SEQ ID NO: 1351426 - DNA, 25 bp, Homo sapien
agctctgttcctgtgctttacccat

SEQ ID NO: 1351427 - DNA, 25 bp, Homo sapien
gcgccgtttcttaagccggtctgaa

SEQ ID NO: 1351428 - DNA, 25 bp, Homo sapien
cttaagccggtctgaaaagcgcaat

SEQ ID NO: 1351429 - DNA, 25 bp, Homo sapien
cgcgcacggtgcgcacacacactgg

SEQ ID NO: 1351430 - DNA, 25 bp, Homo sapien
cgcacggtgcgcacacacactggcc

SEQ ID NO: 1351431 - DNA, 25 bp, Homo sapien
ctttggagcccaattgccagggttc

SEQ ID NO: 1351432 - DNA, 25 bp, Homo sapien
tgcttccaccagataatagctgtgt

SEQ ID NO: 1351433 - DNA, 25 bp, Homo sapien
ttgtgacactgttgcatgctgacac

SEQ ID NO: 1351434 - DNA, 25 bp, Homo sapien
ccttgggacgtatactcactatgcg

SEQ ID NO: 1351435 - DNA, 25 bp, Homo sapien
aacaacaaaaatgctagagtgccac

SEQ ID NO: 1351436 - DNA, 25 bp, Homo sapien
cacagagcaaagttcaatggaacat

SEQ ID NO: 1351437 - DNA, 25 bp, Homo sapien
tttacctaagtaaagctaacagcaa

SEQ ID NO: 1351438 - DNA, 25 bp, Homo sapien
cctactatgcctggtgccttgggaa

SEQ ID NO: 1351439 - DNA, 25 bp, Homo sapien
ccccgaggacaacgtggtgggctga

SEQ ID NO: 1351440 - DNA, 25 bp, Homo sapien
caacgtggtgggctgagcgaatacc

SEQ ID NO: 1351441 - DNA, 25 bp, Homo sapien
taaatacaatgctgtacatcaacag

SEQ ID NO: 1351442 - DNA, 25 bp, Homo sapien
gaaaacatcatagggcttgtgactg

SEQ ID NO: 1351443 - DNA, 25 bp, Homo sapien
gatctccaacccgacggtgcggctc

SEQ ID NO: 1351444 - DNA, 25 bp, Homo sapien
aaccacgaccgtgcctagggaccag

SEQ ID NO: 1351445 - DNA, 25 bp, Homo sapien
gagagaacgaaaagctcgaaccacg

SEQ ID NO: 1351446 - DNA, 25 bp, Homo sapien
tcaatgtgcgagagaacgaaaagct

SEQ ID NO: 1351447 - DNA, 25 bp, Homo sapien
cgttctgcaaagctagcggttccca

SEQ ID NO: 1351448 - DNA, 25 bp, Homo sapien
gcagccttttagtgaggagccgccg

SEQ ID NO: 1351449 - DNA, 25 bp, Homo sapien
tgaggagggactctgcgttctgcaa

SEQ ID NO: 1351450 - DNA, 25 bp, Homo sapien
cactatctcagcgatgggcacgcga

SEQ ID NO: 1351451 - DNA, 25 bp, Homo sapien
tgcagacgcgggagttgtcccagac

SEQ ID NO: 1351452 - DNA, 25 bp, Homo sapien
agcggccgccgggagtcgttctggg

SEQ ID NO: 1351453 - DNA, 25 bp, Homo sapien
cggcgaccgccaagaaaggcagcga

SEQ ID NO: 1351454 - DNA, 25 bp, Homo sapien
ttgaaggccgggtctgggtatccgc

SEQ ID NO: 1351455 - DNA, 25 bp, Homo sapien
cactctagcgaggaggacttgcaca

SEQ ID NO: 1351456 - DNA, 25 bp, Homo sapien
tcgccgactctttgggagctacagg

SEQ ID NO: 1351457 - DNA, 25 bp, Homo sapien
tagtctggctctacgcaagtgaggc

SEQ ID NO: 1351458 - DNA, 25 bp, Homo sapien
gagtggacaaccctgccttagagat

SEQ ID NO: 1351459 - DNA, 25 bp, Homo sapien
gcatcagtgacccaaaaatcttcaa

SEQ ID NO: 1351460 - DNA, 25 bp, Homo sapien
ttaatctttattgtactcaggggca

SEQ ID NO: 1351461 - DNA, 25 bp, Homo sapien
tcaggggcatcagtgacccaaaaat

SEQ ID NO: 1351462 - DNA, 25 bp, Homo sapien
cttcaaatgttttttcgcagtgata

SEQ ID NO: 1351463 - DNA, 25 bp, Homo sapien
tgttggcactgtctacacatgtagc

SEQ ID NO: 1351464 - DNA, 25 bp, Homo sapien
ctattgcccagttttgcccatgtaa

SEQ ID NO: 1351465 - DNA, 25 bp, Homo sapien
agttgagccatacacaaaactagtg

SEQ ID NO: 1351466 - DNA, 25 bp, Homo sapien
taatgatctcgttcagcagaagagg

SEQ ID NO: 1351467 - DNA, 25 bp, Homo sapien
tataacatgcctagcgtatgaaaag

SEQ ID NO: 1351468 - DNA, 25 bp, Homo sapien
tgcttcttggctgtatataaaccct

SEQ ID NO: 1351469 - DNA, 25 bp, Homo sapien
tatgaggtagtgtggaactcggcac

SEQ ID NO: 1351470 - DNA, 25 bp, Homo sapien
aatttatctcaacatgctcgtagcc

SEQ ID NO: 1351471 - DNA, 25 bp, Homo sapien
ccatattcgaagtagtgggaagaca

SEQ ID NO: 1351472 - DNA, 25 bp, Homo sapien
taacaattctctaattctaaaagag

SEQ ID NO: 1351473 - DNA, 25 bp, Homo sapien
gagatttagctgtaacttgaggaga

SEQ ID NO: 1351474 - DNA, 25 bp, Homo sapien
cagaaagttttgatggccagatatt

SEQ ID NO: 1351475 - DNA, 25 bp, Homo sapien
agagtttttagcgtgttgaattttg

SEQ ID NO: 1351476 - DNA, 25 bp, Homo sapien
gtttttagcgtgttgaattttgtca

SEQ ID NO: 1351477 - DNA, 25 bp, Homo sapien
ttgagagtttttagcgtgttgaatt

SEQ ID NO: 1351478 - DNA, 25 bp, Homo sapien
tgagagtttttagcgtgttgaattt

SEQ ID NO: 1351479 - DNA, 25 bp, Homo sapien
gccaactgacttaacaacattgctg

SEQ ID NO: 1351480 - DNA, 25 bp, Homo sapien
gatcgatcatgcagatacaatgttg

SEQ ID NO: 1351481 - DNA, 25 bp, Homo sapien
tatctctgcgtttcagtgacctacc

SEQ ID NO: 1351482 - DNA, 25 bp, Homo sapien
caacacacgagaagagttaaactgg

SEQ ID NO: 1351483 - DNA, 25 bp, Homo sapien
caccgatgctgaatacccagttgaa

SEQ ID NO: 1351484 - DNA, 25 bp, Homo sapien
gcccattggcctgaaaatactcatt

SEQ ID NO: 1351485 - DNA, 25 bp, Homo sapien
ggtatattcttgtgttaactgccca

SEQ ID NO: 1351486 - DNA, 25 bp, Homo sapien
cactactgtagctaggaaatgctga

SEQ ID NO: 1351487 - DNA, 25 bp, Homo sapien
gattcagtattcctggcccagaggg

SEQ ID NO: 1351488 - DNA, 25 bp, Homo sapien
cccagagggcccttgctgactattg

SEQ ID NO: 1351489 - DNA, 25 bp, Homo sapien
gatgttagtttggagtcctgtgtgc

SEQ ID NO: 1351490 - DNA, 25 bp, Homo sapien
actattggatgttagtttggagtcc

SEQ ID NO: 1351491 - DNA, 25 bp, Homo sapien
gggctcaacgactgcgtggattgaa

SEQ ID NO: 1351492 - DNA, 25 bp, Homo sapien
caacgactgcgtggattgaatgagt

SEQ ID NO: 1351493 - DNA, 25 bp, Homo sapien
gctatatgcgttcatgtcagtgatg

SEQ ID NO: 1351494 - DNA, 25 bp, Homo sapien
tgaaagggagagctatatgcgttca

SEQ ID NO: 1351495 - DNA, 25 bp, Homo sapien
gctgccaagtggagaatgtcaagga

SEQ ID NO: 1351496 - DNA, 25 bp, Homo sapien
tgccaagtggagaatgtcaaggaca

SEQ ID NO: 1351497 - DNA, 25 bp, Homo sapien
aggctgccaagtggagaatgtcaag

SEQ ID NO: 1351498 - DNA, 25 bp, Homo sapien
ctgccaagtggagaatgtcaaggac

SEQ ID NO: 1351499 - DNA, 25 bp, Homo sapien
tggccccatctcatgtgctctatag

SEQ ID NO: 1351500 - DNA, 25 bp, Homo sapien
agcattactgtagagcttgatgggc

SEQ ID NO: 1351501 - DNA, 25 bp, Homo sapien
ccacatgtggcctgttgtgactgcc

SEQ ID NO: 1351502 - DNA, 25 bp, Homo sapien
gatgggcttttgtaaggcctttcaa

SEQ ID NO: 1351503 - DNA, 25 bp, Homo sapien
aacccctgaagtttaggctctggct

SEQ ID NO: 1351504 - DNA, 25 bp, Homo sapien
taagcagttcctcctaagagcagac

SEQ ID NO: 1351505 - DNA, 25 bp, Homo sapien
ttaggctctggctaagcagttcctc

SEQ ID NO: 1351506 - DNA, 25 bp, Homo sapien
cagaccacgttcagaagaacagagt

SEQ ID NO: 1351507 - DNA, 25 bp, Homo sapien
caaccagtaggtaggtagatgtgag

SEQ ID NO: 1351508 - DNA, 25 bp, Homo sapien
tgtgacagctgcagtttagaggagt

SEQ ID NO: 1351509 - DNA, 25 bp, Homo sapien
ggagtgaggtaattagcttaggatc

SEQ ID NO: 1351510 - DNA, 25 bp, Homo sapien
cctgcttatgtgacagctgcagttt

SEQ ID NO: 1351511 - DNA, 25 bp, Homo sapien
ttaggtactcacacgatatggtttg

SEQ ID NO: 1351512 - DNA, 25 bp, Homo sapien
ctcacaatagtgaatgagtcctggt

SEQ ID NO: 1351513 - DNA, 25 bp, Homo sapien
taatagttttacatcatccccttgg

SEQ ID NO: 1351514 - DNA, 25 bp, Homo sapien
gtcctggtgagatctagctgtttaa

SEQ ID NO: 1351515 - DNA, 25 bp, Homo sapien
actcattagggtagtcggttgctga

SEQ ID NO: 1351516 - DNA, 25 bp, Homo sapien
taagataacagtaaagtttgccaca

SEQ ID NO: 1351517 - DNA, 25 bp, Homo sapien
ctctgttgtcacttgaacaatgttc

SEQ ID NO: 1351518 - DNA, 25 bp, Homo sapien
aaaatgctaacgatcttaaagcctt

SEQ ID NO: 1351519 - DNA, 25 bp, Homo sapien
gaagtgagagaagtatgactcttcc

SEQ ID NO: 1351520 - DNA, 25 bp, Homo sapien
ggcatggtctgtggcaccctaaaac

SEQ ID NO: 1351521 - DNA, 25 bp, Homo sapien
catttatagattaatgggcatggtc

SEQ ID NO: 1351522 - DNA, 25 bp, Homo sapien
taactgtttggcaccggacgtctaa

SEQ ID NO: 1351523 - DNA, 25 bp, Homo sapien
ctcgggcgacttcaggctggctgca

SEQ ID NO: 1351524 - DNA, 25 bp, Homo sapien
cagcgaactgcctctccgtgaaagt

SEQ ID NO: 1351525 - DNA, 25 bp, Homo sapien
gaatgccgcaatgaaaaccgctctg

SEQ ID NO: 1351526 - DNA, 25 bp, Homo sapien
cgctttgtcgccagtgccacagaga

SEQ ID NO: 1351527 - DNA, 25 bp, Homo sapien
tccacttttttatctctgggctcca

SEQ ID NO: 1351528 - DNA, 25 bp, Homo sapien
ccagacagtaaatggcaagagagtt

SEQ ID NO: 1351529 - DNA, 25 bp, Homo sapien
tctttgatgtggctcccatattgga

SEQ ID NO: 1351530 - DNA, 25 bp, Homo sapien
gagcaagtacctctacctctgagac

SEQ ID NO: 1351531 - DNA, 25 bp, Homo sapien
gatgatctttgacacgattagacac

SEQ ID NO: 1351532 - DNA, 25 bp, Homo sapien
ccccacaaaggctttgaaatcataa

SEQ ID NO: 1351533 - DNA, 25 bp, Homo sapien
ggttttcctcatggattttgtcaaa

SEQ ID NO: 1351534 - DNA, 25 bp, Homo sapien
cacaaaggctttgaaatcataagga

SEQ ID NO: 1351535 - DNA, 25 bp, Homo sapien
attatagccataaagcctgttataa

SEQ ID NO: 1351536 - DNA, 25 bp, Homo sapien
ttatagccataaagcctgttataat

SEQ ID NO: 1351537 - DNA, 25 bp, Homo sapien
aattatagccataaagcctgttata

SEQ ID NO: 1351538 - DNA, 25 bp, Homo sapien
acaaatgacttaaggaattcctcag

SEQ ID NO: 1351539 - DNA, 25 bp, Homo sapien
tggactcctattggtggccacaatg

SEQ ID NO: 1351540 - DNA, 25 bp, Homo sapien
tgagagtggactcctattggtggcc

SEQ ID NO: 1351541 - DNA, 25 bp, Homo sapien
cacaaatgacttaaggaattcctca

SEQ ID NO: 1351542 - DNA, 25 bp, Homo sapien
ttttccatatggattgtctaatggc

SEQ ID NO: 1351543 - DNA, 25 bp, Homo sapien
taatttttccatatggattgtctaa

SEQ ID NO: 1351544 - DNA, 25 bp, Homo sapien
tatggattgtctaatggcagcaaga

SEQ ID NO: 1351545 - DNA, 25 bp, Homo sapien
tccatatggattgtctaatggcagc

SEQ ID NO: 1351546 - DNA, 25 bp, Homo sapien
tccactaaagttacttcaagcatgg

SEQ ID NO: 1351547 - DNA, 25 bp, Homo sapien
tctggcaatagttgagagatgagtc

SEQ ID NO: 1351548 - DNA, 25 bp, Homo sapien
caagcatggtaatgccttattattc

SEQ ID NO: 1351549 - DNA, 25 bp, Homo sapien
ggaaaatgtgtatgtcctccactaa

SEQ ID NO: 1351550 - DNA, 25 bp, Homo sapien
agtagtgaatgtttggcaggctgat

SEQ ID NO: 1351551 - DNA, 25 bp, Homo sapien
tccttgttgatcagacccattttgg

SEQ ID NO: 1351552 - DNA, 25 bp, Homo sapien
gacatgtctatgttgaagtagtgaa

SEQ ID NO: 1351553 - DNA, 25 bp, Homo sapien
gttgatcagacccattttggacatg

SEQ ID NO: 1351554 - DNA, 25 bp, Homo sapien
tgattagatggtgggtctgctcttc

SEQ ID NO: 1351555 - DNA, 25 bp, Homo sapien
ctcccctcagtgtacaaaatctgtt

SEQ ID NO: 1351556 - DNA, 25 bp, Homo sapien
agttctgtgattagatggtgggtct

SEQ ID NO: 1351557 - DNA, 25 bp, Homo sapien
gagacaccctctgatgttcctccac

SEQ ID NO: 1351558 - DNA, 25 bp, Homo sapien
gtcatagggcccagcagatttctcc

SEQ ID NO: 1351559 - DNA, 25 bp, Homo sapien
tatcacagagggtcttctgcacaga

SEQ ID NO: 1351560 - DNA, 25 bp, Homo sapien
cagaggtcaagtattcacctttgtc

SEQ ID NO: 1351561 - DNA, 25 bp, Homo sapien
tccatgacaaggtcccgaatggtgt

SEQ ID NO: 1351562 - DNA, 25 bp, Homo sapien
tggtggtagcgccacttgcagtaca

SEQ ID NO: 1351563 - DNA, 25 bp, Homo sapien
actggtggtagcgccacttgcagta

SEQ ID NO: 1351564 - DNA, 25 bp, Homo sapien
ctggtggtagcgccacttgcagtac

SEQ ID NO: 1351565 - DNA, 25 bp, Homo sapien
ctgcactggtggtagcgccacttgc

SEQ ID NO: 1351566 - DNA, 25 bp, Homo sapien
gggtggcaaagcatcagtccttcac

SEQ ID NO: 1351567 - DNA, 25 bp, Homo sapien
tgggtggcaaagcatcagtccttca

SEQ ID NO: 1351568 - DNA, 25 bp, Homo sapien
cttgggtggcaaagcatcagtcctt

SEQ ID NO: 1351569 - DNA, 25 bp, Homo sapien
ttgggtggcaaagcatcagtccttc

SEQ ID NO: 1351570 - DNA, 25 bp, Homo sapien
ctcagggagggtagtgaactggtcc

SEQ ID NO: 1351571 - DNA, 25 bp, Homo sapien
ggagggtagtgaactggtccttgat

SEQ ID NO: 1351572 - DNA, 25 bp, Homo sapien
ctgtgttgttttcaagaccttgagg

SEQ ID NO: 1351573 - DNA, 25 bp, Homo sapien
agaccttgaggtctttgattccaga

SEQ ID NO: 1351574 - DNA, 25 bp, Homo sapien
agaagggacgaacttggttcatggg

SEQ ID NO: 1351575 - DNA, 25 bp, Homo sapien
aggagaagggacgaacttggttcat

SEQ ID NO: 1351576 - DNA, 25 bp, Homo sapien
gctgaaggagaagggacgaacttgg

SEQ ID NO: 1351577 - DNA, 25 bp, Homo sapien
tgctgaaggagaagggacgaacttg

SEQ ID NO: 1351578 - DNA, 25 bp, Homo sapien
tcaaaacgacataaacagacttctt

SEQ ID NO: 1351579 - DNA, 25 bp, Homo sapien
agaggaaccgaagagcactttagtc

SEQ ID NO: 1351580 - DNA, 25 bp, Homo sapien
cgaagagcactttagtcttgatatc

SEQ ID NO: 1351581 - DNA, 25 bp, Homo sapien
tcttgatatcaaaacgacataaaca

SEQ ID NO: 1351582 - DNA, 25 bp, Homo sapien
tcagctgttcaacttcacagaagtg

SEQ ID NO: 1351583 - DNA, 25 bp, Homo sapien
ttccagtgggagtgtgaataaatgc

SEQ ID NO: 1351584 - DNA, 25 bp, Homo sapien
tccagtgggagtgtgaataaatgca

SEQ ID NO: 1351585 - DNA, 25 bp, Homo sapien
acttcacagaagtgtgttccagtgg

SEQ ID NO: 1351586 - DNA, 25 bp, Homo sapien
catgtagacttgagctcggattaca

SEQ ID NO: 1351587 - DNA, 25 bp, Homo sapien
tgcttccaagggatttcttccatgt

SEQ ID NO: 1351588 - DNA, 25 bp, Homo sapien
atgcttccaagggatttcttccatg

SEQ ID NO: 1351589 - DNA, 25 bp, Homo sapien
gacttgagctcggattacatggtta

SEQ ID NO: 1351590 - DNA, 25 bp, Homo sapien
caccaaaggcttctatgcttttgat

SEQ ID NO: 1351591 - DNA, 25 bp, Homo sapien
cacaccaaaggcttctatgcttttg

SEQ ID NO: 1351592 - DNA, 25 bp, Homo sapien
tcacaccaaaggcttctatgctttt

SEQ ID NO: 1351593 - DNA, 25 bp, Homo sapien
tattcacaccaaaggcttctatgct

SEQ ID NO: 1351594 - DNA, 25 bp, Homo sapien
tctccatgcaggtaatcttttttgg

SEQ ID NO: 1351595 - DNA, 25 bp, Homo sapien
ctgaattatctccatgcaggtaatc

SEQ ID NO: 1351596 - DNA, 25 bp, Homo sapien
tgcactgaagttgccacctctttaa

SEQ ID NO: 1351597 - DNA, 25 bp, Homo sapien
ttggaacttagagtaagttgcactg

SEQ ID NO: 1351598 - DNA, 25 bp, Homo sapien
gttcggacaaactccacctcatcat

SEQ ID NO: 1351599 - DNA, 25 bp, Homo sapien
agttcggacaaactccacctcatca

SEQ ID NO: 1351600 - DNA, 25 bp, Homo sapien
ccttcccatagccagttcggacaaa

SEQ ID NO: 1351601 - DNA, 25 bp, Homo sapien
tcccatagccagttcggacaaactc

SEQ ID NO: 1351602 - DNA, 25 bp, Homo sapien
cccttgagcaaagtttgagtaatca

SEQ ID NO: 1351603 - DNA, 25 bp, Homo sapien
acaggtcggcgctcctttgcaggac

SEQ ID NO: 1351604 - DNA, 25 bp, Homo sapien
catgcaagacatgtgcgggacaggt

SEQ ID NO: 1351605 - DNA, 25 bp, Homo sapien
tgactggactaagcagagttggccc

SEQ ID NO: 1351606 - DNA, 25 bp, Homo sapien
cccactactgatcagtacaggagtt

SEQ ID NO: 1351607 - DNA, 25 bp, Homo sapien
ccaggctggagcatagtggttattc

SEQ ID NO: 1351608 - DNA, 25 bp, Homo sapien
gcgtgatcccactactgatcagtac

SEQ ID NO: 1351609 - DNA, 25 bp, Homo sapien
gctggagcatagtggttattcacag

SEQ ID NO: 1351610 - DNA, 25 bp, Homo sapien
atgcaccaggtaccaaatgaatttc

SEQ ID NO: 1351611 - DNA, 25 bp, Homo sapien
caccaggtaccaaatgaatttctcc

SEQ ID NO: 1351612 - DNA, 25 bp, Homo sapien
ccaggtaccaaatgaatttctccat

SEQ ID NO: 1351613 - DNA, 25 bp, Homo sapien
tgcaccaggtaccaaatgaatttct

SEQ ID NO: 1351614 - DNA, 25 bp, Homo sapien
acaccaagagctgcccctgcacaaa

SEQ ID NO: 1351615 - DNA, 25 bp, Homo sapien
ccatccctttttctagcacttcagt

SEQ ID NO: 1351616 - DNA, 25 bp, Homo sapien
tgcccctgcacaaaccatccctttt

SEQ ID NO: 1351617 - DNA, 25 bp, Homo sapien
tccctttttctagcacttcagtcat

SEQ ID NO: 1351618 - DNA, 25 bp, Homo sapien
tatagttgttatggtagtgggccat

SEQ ID NO: 1351619 - DNA, 25 bp, Homo sapien
ttatagttgttatggtagtgggcca

SEQ ID NO: 1351620 - DNA, 25 bp, Homo sapien
tagttgttatggtagtgggccattt

SEQ ID NO: 1351621 - DNA, 25 bp, Homo sapien
ttgttatggtagtgggccattttat

SEQ ID NO: 1351622 - DNA, 25 bp, Homo sapien
agtagaggtaccaagactgagcttc

SEQ ID NO: 1351623 - DNA, 25 bp, Homo sapien
gaccaagagtggtttgtgacaccaa

SEQ ID NO: 1351624 - DNA, 25 bp, Homo sapien
tatatgcatgccacagcagaaaatg

SEQ ID NO: 1351625 - DNA, 25 bp, Homo sapien
gacacttgatctgaaggtcatgtgc

SEQ ID NO: 1351626 - DNA, 25 bp, Homo sapien
tccttgttaactggcctctcttttc

SEQ ID NO: 1351627 - DNA, 25 bp, Homo sapien
cttctctttccacatgcccgattta

SEQ ID NO: 1351628 - DNA, 25 bp, Homo sapien
ccacatgcccgatttatttctaata

SEQ ID NO: 1351629 - DNA, 25 bp, Homo sapien
cttccttgttaactggcctctcttt

SEQ ID NO: 1351630 - DNA, 25 bp, Homo sapien
cagtccattcctcggcccagtagga

SEQ ID NO: 1351631 - DNA, 25 bp, Homo sapien
gctgcaagccagttgtttccctata

SEQ ID NO: 1351632 - DNA, 25 bp, Homo sapien
agatggagcagtgtctggtgaccaa

SEQ ID NO: 1351633 - DNA, 25 bp, Homo sapien
ccaaggagagactggtacatgctgc

SEQ ID NO: 1351634 - DNA, 25 bp, Homo sapien
tcagagctgaccctctagagcatgg

SEQ ID NO: 1351635 - DNA, 25 bp, Homo sapien
ctggacccggtgtagtactgctgac

SEQ ID NO: 1351636 - DNA, 25 bp, Homo sapien
tccatgttggtttacgttcatctgg

SEQ ID NO: 1351637 - DNA, 25 bp, Homo sapien
tactgctgacttccagtcagttgca

SEQ ID NO: 1351638 - DNA, 25 bp, Homo sapien
ctctgtacagcaaagttccaagttt

SEQ ID NO: 1351639 - DNA, 25 bp, Homo sapien
cttctctgtacagcaaagttccaag

SEQ ID NO: 1351640 - DNA, 25 bp, Homo sapien
cagtcttctctgtacagcaaagttc

SEQ ID NO: 1351641 - DNA, 25 bp, Homo sapien
ctcagtcttctctgtacagcaaagt

SEQ ID NO: 1351642 - DNA, 25 bp, Homo sapien
caagaggctagggagcacattgcta

SEQ ID NO: 1351643 - DNA, 25 bp, Homo sapien
gctgtgcaccaagtgatgggacccc

SEQ ID NO: 1351644 - DNA, 25 bp, Homo sapien
gaggcccttgtatggcttcctgaag

SEQ ID NO: 1351645 - DNA, 25 bp, Homo sapien
tgtcccgcataagggaactgtgcag

SEQ ID NO: 1351646 - DNA, 25 bp, Homo sapien
gatacctaagaataacatttgatgc

SEQ ID NO: 1351647 - DNA, 25 bp, Homo sapien
taaaagaattccttgtactatcgac

SEQ ID NO: 1351648 - DNA, 25 bp, Homo sapien
cgacttttgtagtatttgttagaca

SEQ ID NO: 1351649 - DNA, 25 bp, Homo sapien
tccttagatagttggcaacagtgca

SEQ ID NO: 1351650 - DNA, 25 bp, Homo sapien
tctcctggtatagtcatacactgat

SEQ ID NO: 1351651 - DNA, 25 bp, Homo sapien
atatctcctggtatagtcatacact

SEQ ID NO: 1351652 - DNA, 25 bp, Homo sapien
cctggtatagtcatacactgatttc

SEQ ID NO: 1351653 - DNA, 25 bp, Homo sapien
ggtatagtcatacactgatttctgt

SEQ ID NO: 1351654 - DNA, 25 bp, Homo sapien
gaacagtacgactctgtgaacagct

SEQ ID NO: 1351655 - DNA, 25 bp, Homo sapien
tgaagatcgtaaaaccccaagtatc

SEQ ID NO: 1351656 - DNA, 25 bp, Homo sapien
cagttataccaaactcacatgttta

SEQ ID NO: 1351657 - DNA, 25 bp, Homo sapien
tgcatcgcaagagatttcacagacc

SEQ ID NO: 1351658 - DNA, 25 bp, Homo sapien
ccttggctcatctgaagtataaaca

SEQ ID NO: 1351659 - DNA, 25 bp, Homo sapien
tgaatgggtccataaggtatgtgct

SEQ ID NO: 1351660 - DNA, 25 bp, Homo sapien
agtgggaattcaggaacttggacca

SEQ ID NO: 1351661 - DNA, 25 bp, Homo sapien
tctgggtctggtgattaaccttggc

SEQ ID NO: 1351662 - DNA, 25 bp, Homo sapien
ttttattgtatgctgctgccagtgt

SEQ ID NO: 1351663 - DNA, 25 bp, Homo sapien
gttttattgtatgctgctgccagtg

SEQ ID NO: 1351664 - DNA, 25 bp, Homo sapien
ctaagttttattgtatgctgctgcc

SEQ ID NO: 1351665 - DNA, 25 bp, Homo sapien
catactaagttttattgtatgctgc

SEQ ID NO: 1351666 - DNA, 25 bp, Homo sapien
tagaagtttgtatattatggcacat

SEQ ID NO: 1351667 - DNA, 25 bp, Homo sapien
gtagaagtttgtatattatggcaca

SEQ ID NO: 1351668 - DNA, 25 bp, Homo sapien
agaagtttgtatattatggcacatg

SEQ ID NO: 1351669 - DNA, 25 bp, Homo sapien
gaagtttgtatattatggcacatgt

SEQ ID NO: 1351670 - DNA, 25 bp, Homo sapien
ggaaatgcctatggtccagtaacag

SEQ ID NO: 1351671 - DNA, 25 bp, Homo sapien
atgggaaatgcctatggtccagtaa

SEQ ID NO: 1351672 - DNA, 25 bp, Homo sapien
gtgagttagggtaaagtatcaaaga

SEQ ID NO: 1351673 - DNA, 25 bp, Homo sapien
tgagttagggtaaagtatcaaagaa

SEQ ID NO: 1351674 - DNA, 25 bp, Homo sapien
gtttaatctcacctaaaatagtgac

SEQ ID NO: 1351675 - DNA, 25 bp, Homo sapien
aaacatgagcatactaactttagga

SEQ ID NO: 1351676 - DNA, 25 bp, Homo sapien
gtgttaatctgagatagtctgtgac

SEQ ID NO: 1351677 - DNA, 25 bp, Homo sapien
gaaaaggcataaacagaatgctgtg

SEQ ID NO: 1351678 - DNA, 25 bp, Homo sapien
catcagtgtaggtgggcagttgtaa

SEQ ID NO: 1351679 - DNA, 25 bp, Homo sapien
gaagcaatgctttgatgcccaatta

SEQ ID NO: 1351680 - DNA, 25 bp, Homo sapien
aatgcaagttctagggactcacctc

SEQ ID NO: 1351681 - DNA, 25 bp, Homo sapien
tgccactcagtgtaggtccagtact

SEQ ID NO: 1351682 - DNA, 25 bp, Homo sapien
agcttaattaaggagggcacaacta

SEQ ID NO: 1351683 - DNA, 25 bp, Homo sapien
tggacactcccaggtctaggaagct

SEQ ID NO: 1351684 - DNA, 25 bp, Homo sapien
taaggagggcacaactatgtaacaa

SEQ ID NO: 1351685 - DNA, 25 bp, Homo sapien
caaggtattttaggaagcagcttcc

SEQ ID NO: 1351686 - DNA, 25 bp, Homo sapien
gggatttgtacttgaagatactcca

SEQ ID NO: 1351687 - DNA, 25 bp, Homo sapien
gaactgtttcaagtctgcagctgcc

SEQ ID NO: 1351688 - DNA, 25 bp, Homo sapien
cagcagagggtcatgttgagcattc

SEQ ID NO: 1351689 - DNA, 25 bp, Homo sapien
cttgaagatactccagtcagcagag

SEQ ID NO: 1351690 - DNA, 25 bp, Homo sapien
aaatattgtacttacaataaaacag

SEQ ID NO: 1351691 - DNA, 25 bp, Homo sapien
aaaacagtacttctcttgcttcaaa

SEQ ID NO: 1351692 - DNA, 25 bp, Homo sapien
aataaaacagtacttctcttgcttc

SEQ ID NO: 1351693 - DNA, 25 bp, Homo sapien
ctcttgcttcaaaagaagatactat

SEQ ID NO: 1351694 - DNA, 25 bp, Homo sapien
cgcccagcctagtgagctcttaata

SEQ ID NO: 1351695 - DNA, 25 bp, Homo sapien
caagtgcaaacctgagggtacttaa

SEQ ID NO: 1351696 - DNA, 25 bp, Homo sapien
gatttttgcaaagcgtagcacatct

SEQ ID NO: 1351697 - DNA, 25 bp, Homo sapien
tggttactagaagcatcagatgact

SEQ ID NO: 1351698 - DNA, 25 bp, Homo sapien
ggcctcagggaattaatagcatcac

SEQ ID NO: 1351699 - DNA, 25 bp, Homo sapien
tccagctggatatgtggcctcaggg

SEQ ID NO: 1351700 - DNA, 25 bp, Homo sapien
gaacccctgcagattacagctgtac

SEQ ID NO: 1351701 - DNA, 25 bp, Homo sapien
gtctttatccgcaaggaggctggga

SEQ ID NO: 1351702 - DNA, 25 bp, Homo sapien
tttcattcatattaaccagcaggaa

SEQ ID NO: 1351703 - DNA, 25 bp, Homo sapien
cattcatattaaccagcaggaagca

SEQ ID NO: 1351704 - DNA, 25 bp, Homo sapien
tcatattaaccagcaggaagcataa

SEQ ID NO: 1351705 - DNA, 25 bp, Homo sapien
tattgtaatagtgtttagtgttttc

SEQ ID NO: 1351706 - DNA, 25 bp, Homo sapien
gaatacataagaacagccagagccc

SEQ ID NO: 1351707 - DNA, 25 bp, Homo sapien
gttgaaaccctgtaatcctggccta

SEQ ID NO: 1351708 - DNA, 25 bp, Homo sapien
ggtgcctttaatgatcccgaccaga

SEQ ID NO: 1351709 - DNA, 25 bp, Homo sapien
tgacaagagatccagccaaataacc

SEQ ID NO: 1351710 - DNA, 25 bp, Homo sapien
ggttgagtccggcctccagccggag

SEQ ID NO: 1351711 - DNA, 25 bp, Homo sapien
cggttgagtccggcctccagccgga

SEQ ID NO: 1351712 - DNA, 25 bp, Homo sapien
gcggttgagtccggcctccagccgg

SEQ ID NO: 1351713 - DNA, 25 bp, Homo sapien
gcggggctccgaactttgtctctaa

SEQ ID NO: 1351714 - DNA, 25 bp, Homo sapien
tgtctctaagtttccggttctgtgc

SEQ ID NO: 1351715 - DNA, 25 bp, Homo sapien
cggctccaccctcggtgcgcatgcg

SEQ ID NO: 1351716 - DNA, 25 bp, Homo sapien
gggccagacaactcagcggcgcgcg

SEQ ID NO: 1351717 - DNA, 25 bp, Homo sapien
ggccgattagggagaggtaaggaga

SEQ ID NO: 1351718 - DNA, 25 bp, Homo sapien
gcggctgctggaggctagcgcgacc

SEQ ID NO: 1351719 - DNA, 25 bp, Homo sapien
ggaggctagcgcgacccgactctta

SEQ ID NO: 1351720 - DNA, 25 bp, Homo sapien
ctagcgcgacccgactcttaagttt

SEQ ID NO: 1351721 - DNA, 25 bp, Homo sapien
aaggcagagcttgtgggagtttcta

SEQ ID NO: 1351722 - DNA, 25 bp, Homo sapien
aggcccggcggcgggtgaccaggag

SEQ ID NO: 1351723 - DNA, 25 bp, Homo sapien
gagcttgtgggagtttctaaaaggc

SEQ ID NO: 1351724 - DNA, 25 bp, Homo sapien
cgttagccgcgaagaactaagaggg

SEQ ID NO: 1351725 - DNA, 25 bp, Homo sapien
caggtagatttctcgaacccaggag

SEQ ID NO: 1351726 - DNA, 25 bp, Homo sapien
caagttaaaaacctgcacagggcca

SEQ ID NO: 1351727 - DNA, 25 bp, Homo sapien
tgaataatgccctacaagcacaggc

SEQ ID NO: 1351728 - DNA, 25 bp, Homo sapien
actttccaggacattggattgggta

SEQ ID NO: 1351729 - DNA, 25 bp, Homo sapien
taaagatttgttctgggacgggcac

SEQ ID NO: 1351730 - DNA, 25 bp, Homo sapien
tcaggacaacaataaagcaggtctt

SEQ ID NO: 1351731 - DNA, 25 bp, Homo sapien
tgtttctagccagcccaggatttgg

SEQ ID NO: 1351732 - DNA, 25 bp, Homo sapien
tggtctccagcattggtctcatcag

SEQ ID NO: 1351733 - DNA, 25 bp, Homo sapien
ctgactaactgacatcgccacttgg

SEQ ID NO: 1351734 - DNA, 25 bp, Homo sapien
cacttggatggccaatagatatctc

SEQ ID NO: 1351735 - DNA, 25 bp, Homo sapien
caaattccagattcacgtaggccta

SEQ ID NO: 1351736 - DNA, 25 bp, Homo sapien
catgacttttgccatctcaggtgat

SEQ ID NO: 1351737 - DNA, 25 bp, Homo sapien
tcttcaaaagtgataggggccagga

SEQ ID NO: 1351738 - DNA, 25 bp, Homo sapien
gatggcaccatcaccctccagtctg

SEQ ID NO: 1351739 - DNA, 25 bp, Homo sapien
actcaattcttcaaaagtgataggg

SEQ ID NO: 1351740 - DNA, 25 bp, Homo sapien
taattactaataactcaattcttca

SEQ ID NO: 1351741 - DNA, 25 bp, Homo sapien
gctacagtgtatggccatgcagatt

SEQ ID NO: 1351742 - DNA, 25 bp, Homo sapien
ctggccgagcctaagattcttaagg

SEQ ID NO: 1351743 - DNA, 25 bp, Homo sapien
tagagaactcttcaaatccagggct

SEQ ID NO: 1351744 - DNA, 25 bp, Homo sapien
tgcgcccggctgaagcctaaactct

SEQ ID NO: 1351745 - DNA, 25 bp, Homo sapien
tttctttagagatgacagtatcccc

SEQ ID NO: 1351746 - DNA, 25 bp, Homo sapien
ttagagatgacagtatccccgaaga

SEQ ID NO: 1351747 - DNA, 25 bp, Homo sapien
tctttagagatgacagtatccccga

SEQ ID NO: 1351748 - DNA, 25 bp, Homo sapien
tttagagatgacagtatccccgaag

SEQ ID NO: 1351749 - DNA, 25 bp, Homo sapien
aaatcagaaatcagaaattgtttta

SEQ ID NO: 1351750 - DNA, 25 bp, Homo sapien
tataattttaaatagatctgtttca

SEQ ID NO: 1351751 - DNA, 25 bp, Homo sapien
tcaatatgaaaatcagaaatcagaa

SEQ ID NO: 1351752 - DNA, 25 bp, Homo sapien
tgttttatttcaaggatgttttcta

SEQ ID NO: 1351753 - DNA, 25 bp, Homo sapien
gcattatcaaatacctacgggcaag

SEQ ID NO: 1351754 - DNA, 25 bp, Homo sapien
gaaaaagagtacatcaccctaccag

SEQ ID NO: 1351755 - DNA, 25 bp, Homo sapien
tgtgacagtgtagccgatcttactc

SEQ ID NO: 1351756 - DNA, 25 bp, Homo sapien
cattttcacgtttgcttacagacag

SEQ ID NO: 1351757 - DNA, 25 bp, Homo sapien
tatcagacagatttgaacaatggac

SEQ ID NO: 1351758 - DNA, 25 bp, Homo sapien
tgaaagtggtggcaatgagtcagcc

SEQ ID NO: 1351759 - DNA, 25 bp, Homo sapien
gcactagaactgattgaaggttata

SEQ ID NO: 1351760 - DNA, 25 bp, Homo sapien
gagtcagccttgttgtaatgttaaa

SEQ ID NO: 1351761 - DNA, 25 bp, Homo sapien
gagaaacctctctctgaatcatgga

SEQ ID NO: 1351762 - DNA, 25 bp, Homo sapien
tacagtcagcagcttaatgttgcct

SEQ ID NO: 1351763 - DNA, 25 bp, Homo sapien
tacccctggatgagaaatagttgcc

SEQ ID NO: 1351764 - DNA, 25 bp, Homo sapien
tagtagcaatagagtggtcaagggc

SEQ ID NO: 1351765 - DNA, 25 bp, Homo sapien
aataacttctttagcgaggaccact

SEQ ID NO: 1351766 - DNA, 25 bp, Homo sapien
caagtaatggtttgtccatagtagt

SEQ ID NO: 1351767 - DNA, 25 bp, Homo sapien
taatataaagtccaaataggctcaa

SEQ ID NO: 1351768 - DNA, 25 bp, Homo sapien
tagcatagcttatactttatcttac

SEQ ID NO: 1351769 - DNA, 25 bp, Homo sapien
cccatgggaccttttgtatagcaga

SEQ ID NO: 1351770 - DNA, 25 bp, Homo sapien
gcatgcaattgaccagcttaagaga

SEQ ID NO: 1351771 - DNA, 25 bp, Homo sapien
tgtcaataatataagggtagccagg

SEQ ID NO: 1351772 - DNA, 25 bp, Homo sapien
gatgttaagtttccttcctggcaga

SEQ ID NO: 1351773 - DNA, 25 bp, Homo sapien
gggtattgaagttgcattctgagct

SEQ ID NO: 1351774 - DNA, 25 bp, Homo sapien
gctatgatagagataagcatctaag

SEQ ID NO: 1351775 - DNA, 25 bp, Homo sapien
agttgcattctgagctatgatagag

SEQ ID NO: 1351776 - DNA, 25 bp, Homo sapien
taagagctaatataactaaaatcta

SEQ ID NO: 1351777 - DNA, 25 bp, Homo sapien
caatgttgttcttaattccctggag

SEQ ID NO: 1351778 - DNA, 25 bp, Homo sapien
taaccatgtaagcaagctagccaag

SEQ ID NO: 1351779 - DNA, 25 bp, Homo sapien
taaaagcacaatgcagctcatgcct

SEQ ID NO: 1351780 - DNA, 25 bp, Homo sapien
tactatatggagtcaggaagcagaa

SEQ ID NO: 1351781 - DNA, 25 bp, Homo sapien
aaaaatcagcattgattcgtgagca

SEQ ID NO: 1351782 - DNA, 25 bp, Homo sapien
tagtgttgaaacatctaatagagga

SEQ ID NO: 1351783 - DNA, 25 bp, Homo sapien
gcaaacaatttccacttcagattat

SEQ ID NO: 1351784 - DNA, 25 bp, Homo sapien
tactataatgaagggaaatatggca

SEQ ID NO: 1351785 - DNA, 25 bp, Homo sapien
ttgatacagatcatctttctaactc

SEQ ID NO: 1351786 - DNA, 25 bp, Homo sapien
ttagtatacggataacaaaagtata

SEQ ID NO: 1351787 - DNA, 25 bp, Homo sapien
atctgttgatacagatcatctttct

SEQ ID NO: 1351788 - DNA, 25 bp, Homo sapien
tagtatacggataacaaaagtatat

SEQ ID NO: 1351789 - DNA, 25 bp, Homo sapien
ctgtaacagctttggctttaagact

SEQ ID NO: 1351790 - DNA, 25 bp, Homo sapien
acagctttggctttaagacttccca

SEQ ID NO: 1351791 - DNA, 25 bp, Homo sapien
taacagctttggctttaagacttcc

SEQ ID NO: 1351792 - DNA, 25 bp, Homo sapien
tcatctctgtaacagctttggcttt

SEQ ID NO: 1351793 - DNA, 25 bp, Homo sapien
gccccgtaagcgatagttttgtata

SEQ ID NO: 1351794 - DNA, 25 bp, Homo sapien
gcatctccagagtagtcaagacagt

SEQ ID NO: 1351795 - DNA, 25 bp, Homo sapien
catacttgatgaaagtggccagcag

SEQ ID NO: 1351796 - DNA, 25 bp, Homo sapien
tcaagacagtttgcattccacatgc

SEQ ID NO: 1351797 - DNA, 25 bp, Homo sapien
caatttttagactttacgatggatt

SEQ ID NO: 1351798 - DNA, 25 bp, Homo sapien
tctatatttgatacaaatggtccct

SEQ ID NO: 1351799 - DNA, 25 bp, Homo sapien
tttagtacaattcagcaccacagga

SEQ ID NO: 1351800 - DNA, 25 bp, Homo sapien
tcagggtatttcgttcattttcaac

SEQ ID NO: 1351801 - DNA, 25 bp, Homo sapien
taacaaaccatatccatgaaacagt

SEQ ID NO: 1351802 - DNA, 25 bp, Homo sapien
tggtggtctagaactgactctgcaa

SEQ ID NO: 1351803 - DNA, 25 bp, Homo sapien
cactgtttaggaaagataagattac

SEQ ID NO: 1351804 - DNA, 25 bp, Homo sapien
tcccaggacagactaatataaacac

SEQ ID NO: 1351805 - DNA, 25 bp, Homo sapien
atttatgacatgtagtgtgtttgca

SEQ ID NO: 1351806 - DNA, 25 bp, Homo sapien
tgtacttagatttttgagctgtgga

SEQ ID NO: 1351807 - DNA, 25 bp, Homo sapien
gggtaccagaccattaattaagcat

SEQ ID NO: 1351808 - DNA, 25 bp, Homo sapien
ttaagcatataaatccttgctgaac

SEQ ID NO: 1351809 - DNA, 25 bp, Homo sapien
ggaaagggacttttgcaatggtaca

SEQ ID NO: 1351810 - DNA, 25 bp, Homo sapien
tcctgcagcgtcactacaaggagcc

SEQ ID NO: 1351811 - DNA, 25 bp, Homo sapien
aaggagcccgctgatctttatccca

SEQ ID NO: 1351812 - DNA, 25 bp, Homo sapien
catgatcgttttgtagggcacctga

SEQ ID NO: 1351813 - DNA, 25 bp, Homo sapien
caagtttcttaggattaatgctcat

SEQ ID NO: 1351814 - DNA, 25 bp, Homo sapien
tataatcataaccataccaaggaac

SEQ ID NO: 1351815 - DNA, 25 bp, Homo sapien
cataccaaggaacacccattacaag

SEQ ID NO: 1351816 - DNA, 25 bp, Homo sapien
gattcaggcaggtataatcataacc

SEQ ID NO: 1351817 - DNA, 25 bp, Homo sapien
cattggctgctgcaatacattctga

SEQ ID NO: 1351818 - DNA, 25 bp, Homo sapien
gaggaagtcacaagcatctgcgatt

SEQ ID NO: 1351819 - DNA, 25 bp, Homo sapien
tctgattatagggagcattggctgc

SEQ ID NO: 1351820 - DNA, 25 bp, Homo sapien
cagtataattatagcatcttctgtc

SEQ ID NO: 1351821 - DNA, 25 bp, Homo sapien
caggtataatgacaacagggtatgg

SEQ ID NO: 1351822 - DNA, 25 bp, Homo sapien
taggctggtacctcagctgattaaa

SEQ ID NO: 1351823 - DNA, 25 bp, Homo sapien
ggtataatgacaacagggtatggtg

SEQ ID NO: 1351824 - DNA, 25 bp, Homo sapien
cttcaaacgctaggctggtacctca

SEQ ID NO: 1351825 - DNA, 25 bp, Homo sapien
tgtgcaggttaaatatgtcacctgt

SEQ ID NO: 1351826 - DNA, 25 bp, Homo sapien
ttacagttaagacaatagtggtgtc

SEQ ID NO: 1351827 - DNA, 25 bp, Homo sapien
caccttatatggtagatttggccca

SEQ ID NO: 1351828 - DNA, 25 bp, Homo sapien
tcacctgttggcacaacctgactgg

SEQ ID NO: 1351829 - DNA, 25 bp, Homo sapien
ctttgactaaagcagttaatgcatc

SEQ ID NO: 1351830 - DNA, 25 bp, Homo sapien
gcagttaatgcatcatattcaggtg

SEQ ID NO: 1351831 - DNA, 25 bp, Homo sapien
taagtttttgagctatccaggatgc

SEQ ID NO: 1351832 - DNA, 25 bp, Homo sapien
tcaatttcacgatggaaagagtctg

SEQ ID NO: 1351833 - DNA, 25 bp, Homo sapien
taagtactactctggctccttttga

SEQ ID NO: 1351834 - DNA, 25 bp, Homo sapien
ccacagttgtaatctgtgaccaatc

SEQ ID NO: 1351835 - DNA, 25 bp, Homo sapien
tccttttgaatgagcgtagcacata

SEQ ID NO: 1351836 - DNA, 25 bp, Homo sapien
caatcataagatttccaagttttct

SEQ ID NO: 1351837 - DNA, 25 bp, Homo sapien
cctcatcgagtggtcaaagctggtt

SEQ ID NO: 1351838 - DNA, 25 bp, Homo sapien
tggtttgaactctcgcctgcctacg

SEQ ID NO: 1351839 - DNA, 25 bp, Homo sapien
tgaaggatccgtaaacaggaaggcc

SEQ ID NO: 1351840 - DNA, 25 bp, Homo sapien
tgaagcccagacctagaggagcaga

SEQ ID NO: 1351841 - DNA, 25 bp, Homo sapien
ctggatggtggcgaatcgggcggca

SEQ ID NO: 1351842 - DNA, 25 bp, Homo sapien
tcgaaatctggatggtggcgaatcg

SEQ ID NO: 1351843 - DNA, 25 bp, Homo sapien
ctcgaaatctggatggtggcgaatc

SEQ ID NO: 1351844 - DNA, 25 bp, Homo sapien
atggtggcgaatcgggcggcagagc

SEQ ID NO: 1351845 - DNA, 25 bp, Homo sapien
gcgccagcgtcgaagctgcggccgg

SEQ ID NO: 1351846 - DNA, 25 bp, Homo sapien
ccgggcatgggcagtcggtcccggc

SEQ ID NO: 1351847 - DNA, 25 bp, Homo sapien
cgggacgccgctcggcgggctagag

SEQ ID NO: 1351848 - DNA, 25 bp, Homo sapien
agcgccagcagcgctagacccggga

SEQ ID NO: 1351849 - DNA, 25 bp, Homo sapien
tctagcgggccggagtgggttccta

SEQ ID NO: 1351850 - DNA, 25 bp, Homo sapien
caggtctagcgggccggagtgggtt

SEQ ID NO: 1351851 - DNA, 25 bp, Homo sapien
agcagcaggtctagcgggccggagt

SEQ ID NO: 1351852 - DNA, 25 bp, Homo sapien
agcaggtctagcgggccggagtggg

SEQ ID NO: 1351853 - DNA, 25 bp, Homo sapien
gataagctattggagtgcaggtgca

SEQ ID NO: 1351854 - DNA, 25 bp, Homo sapien
tggccaacatttgctgactggatgc

SEQ ID NO: 1351855 - DNA, 25 bp, Homo sapien
gactggatgcagttggttggcacca

SEQ ID NO: 1351856 - DNA, 25 bp, Homo sapien
ttcaaggtggctcaaaccaggctgg

SEQ ID NO: 1351857 - DNA, 25 bp, Homo sapien
ggattactccattcatcaacaccag

SEQ ID NO: 1351858 - DNA, 25 bp, Homo sapien
ccaccagatcctccggcttgtggat

SEQ ID NO: 1351859 - DNA, 25 bp, Homo sapien
aatgtgatgtgtgagcaccgatgtt

SEQ ID NO: 1351860 - DNA, 25 bp, Homo sapien
tgagcaccgatgtttccaccagatc

SEQ ID NO: 1351861 - DNA, 25 bp, Homo sapien
tggctgacttcaaggcctgcacagc

SEQ ID NO: 1351862 - DNA, 25 bp, Homo sapien
gcccaagaagcaagtgaccgcaatg

SEQ ID NO: 1351863 - DNA, 25 bp, Homo sapien
tcaagctaagcacacaggatgactg

SEQ ID NO: 1351864 - DNA, 25 bp, Homo sapien
ccaatcatgttcagaatggtggctc

SEQ ID NO: 1351865 - DNA, 25 bp, Homo sapien
gaagtccgaattcctctgccggact

SEQ ID NO: 1351866 - DNA, 25 bp, Homo sapien
tccgaattcctctgccggactttta

SEQ ID NO: 1351867 - DNA, 25 bp, Homo sapien
gtgaagtccgaattcctctgccgga

SEQ ID NO: 1351868 - DNA, 25 bp, Homo sapien
cctgagtgaagtccgaattcctctg

SEQ ID NO: 1351869 - DNA, 25 bp, Homo sapien
aagtctgtatttccgcgctgcaggc

SEQ ID NO: 1351870 - DNA, 25 bp, Homo sapien
tctctgtgatctggcctaatgtgga

SEQ ID NO: 1351871 - DNA, 25 bp, Homo sapien
tggacaagtctgtatttccgcgctg

SEQ ID NO: 1351872 - DNA, 25 bp, Homo sapien
ttctctgtgatctggcctaatgtgg

SEQ ID NO: 1351873 - DNA, 25 bp, Homo sapien
cttgcaaggatgaacaactggactt

SEQ ID NO: 1351874 - DNA, 25 bp, Homo sapien
gcaaggatgaacaactggactttat

SEQ ID NO: 1351875 - DNA, 25 bp, Homo sapien
aaggatgaacaactggactttatca

SEQ ID NO: 1351876 - DNA, 25 bp, Homo sapien
ttgcaaggatgaacaactggacttt

SEQ ID NO: 1351877 - DNA, 25 bp, Homo sapien
tagaatgtcgttcatgtacatagtc

SEQ ID NO: 1351878 - DNA, 25 bp, Homo sapien
gtcttgttcacaatcatcctgctgt

SEQ ID NO: 1351879 - DNA, 25 bp, Homo sapien
tcgttcatgtacatagtcttcaacc

SEQ ID NO: 1351880 - DNA, 25 bp, Homo sapien
tggtcttgttcacaatcatcctgct

SEQ ID NO: 1351881 - DNA, 25 bp, Homo sapien
ttttggagactccccaggggctcca

SEQ ID NO: 1351882 - DNA, 25 bp, Homo sapien
tccccaggggctccagtggtcctca

SEQ ID NO: 1351883 - DNA, 25 bp, Homo sapien
gactccccaggggctccagtggtcc

SEQ ID NO: 1351884 - DNA, 25 bp, Homo sapien
ccccaggggctccagtggtcctcat

SEQ ID NO: 1351885 - DNA, 25 bp, Homo sapien
tctgggctccctttaggaatgctat

SEQ ID NO: 1351886 - DNA, 25 bp, Homo sapien
tatagacttagctctccctgcaaac

SEQ ID NO: 1351887 - DNA, 25 bp, Homo sapien
ttccaccttacaggacctctctggg

SEQ ID NO: 1351888 - DNA, 25 bp, Homo sapien
gggcgagtctcctccagtgttaact

SEQ ID NO: 1351889 - DNA, 25 bp, Homo sapien
cagaaagttccagaggtaggtactc

SEQ ID NO: 1351890 - DNA, 25 bp, Homo sapien
gttgggcccatttcatttctcacag

SEQ ID NO: 1351891 - DNA, 25 bp, Homo sapien
tgctgcagccaagttatgagagctc

SEQ ID NO: 1351892 - DNA, 25 bp, Homo sapien
tacagaactttgtcacctggccaca

SEQ ID NO: 1351893 - DNA, 25 bp, Homo sapien
tattgaaacattacactgtacccac

SEQ ID NO: 1351894 - DNA, 25 bp, Homo sapien
ttgaaacattacactgtacccacag

SEQ ID NO: 1351895 - DNA, 25 bp, Homo sapien
attgaaacattacactgtacccaca

SEQ ID NO: 1351896 - DNA, 25 bp, Homo sapien
tgaaacattacactgtacccacaga

SEQ ID NO: 1351897 - DNA, 25 bp, Homo sapien
gcagttgccctagtccaggtgagaa

SEQ ID NO: 1351898 - DNA, 25 bp, Homo sapien
gctgacaccagggtttttggctgga

SEQ ID NO: 1351899 - DNA, 25 bp, Homo sapien
tgaagaaggctgctgatagcaagca

SEQ ID NO: 1351900 - DNA, 25 bp, Homo sapien
taaatgacactgctactaaccaaaa

SEQ ID NO: 1351901 - DNA, 25 bp, Homo sapien
atgtacaaagtcaaaccagaacacc

SEQ ID NO: 1351902 - DNA, 25 bp, Homo sapien
ttacccagggaacctaaagtgctgc

SEQ ID NO: 1351903 - DNA, 25 bp, Homo sapien
tctccgtgcacgataaaaagacaga

SEQ ID NO: 1351904 - DNA, 25 bp, Homo sapien
taggtgggagatgattaatctctcc

SEQ ID NO: 1351905 - DNA, 25 bp, Homo sapien
gaacctaaagtgctgcttggtgtag

SEQ ID NO: 1351906 - DNA, 25 bp, Homo sapien
cgcgctcggcgaggcgggcccgcgg

SEQ ID NO: 1351907 - DNA, 25 bp, Homo sapien
gcagggaagcgggtggcgcacgcat

SEQ ID NO: 1351908 - DNA, 25 bp, Homo sapien
ggcgccctctgcagggaagcgggtg

SEQ ID NO: 1351909 - DNA, 25 bp, Homo sapien
cccgcggcgccctctgcagggaagc

SEQ ID NO: 1351910 - DNA, 25 bp, Homo sapien
taagactgccatgcaaaggaccttg

SEQ ID NO: 1351911 - DNA, 25 bp, Homo sapien
taggagactcccctcatggtgtcca

SEQ ID NO: 1351912 - DNA, 25 bp, Homo sapien
tgtattgacctaaaagatccccact

SEQ ID NO: 1351913 - DNA, 25 bp, Homo sapien
tgagccaacgttgacatggtcctgg

SEQ ID NO: 1351914 - DNA, 25 bp, Homo sapien
ggacctgattggcaacctgagcatg

SEQ ID NO: 1351915 - DNA, 25 bp, Homo sapien
taactgataggtgccaagcgttctg

SEQ ID NO: 1351916 - DNA, 25 bp, Homo sapien
aatagctctgtctacgagttggccg

SEQ ID NO: 1351917 - DNA, 25 bp, Homo sapien
gacttaagagggctgattctcgctc

SEQ ID NO: 1351918 - DNA, 25 bp, Homo sapien
tgcaaacaacctaggtgagcttgga

SEQ ID NO: 1351919 - DNA, 25 bp, Homo sapien
ccaggtaagctgtgtacaggctgct

SEQ ID NO: 1351920 - DNA, 25 bp, Homo sapien
gcaaagaaccgaattttgcaaacaa

SEQ ID NO: 1351921 - DNA, 25 bp, Homo sapien
ctttcccacggagcctcagtggaga

SEQ ID NO: 1351922 - DNA, 25 bp, Homo sapien
ctatgttgacagtgttgcgtgtcta

SEQ ID NO: 1351923 - DNA, 25 bp, Homo sapien
taacaacaggtgatctaaatggtcg

SEQ ID NO: 1351924 - DNA, 25 bp, Homo sapien
gagccacaactacagtcacttgggc

SEQ ID NO: 1351925 - DNA, 25 bp, Homo sapien
gatctaaatggtcgggtcctggctg

SEQ ID NO: 1351926 - DNA, 25 bp, Homo sapien
caccatcatgccagaagagctgttt

SEQ ID NO: 1351927 - DNA, 25 bp, Homo sapien
gcaggtcaccatcatgccagaagag

SEQ ID NO: 1351928 - DNA, 25 bp, Homo sapien
aggtcaccatcatgccagaagagct

SEQ ID NO: 1351929 - DNA, 25 bp, Homo sapien
atggcaggtcaccatcatgccagaa

SEQ ID NO: 1351930 - DNA, 25 bp, Homo sapien
aatcactcttagcaggcagaatgtg

SEQ ID NO: 1351931 - DNA, 25 bp, Homo sapien
gcaaaatcactcttagcaggcagaa

SEQ ID NO: 1351932 - DNA, 25 bp, Homo sapien
gcatggcccgaggcctcaggcatgc

SEQ ID NO: 1351933 - DNA, 25 bp, Homo sapien
ggcatgcaaaatcactcttagcagg

SEQ ID NO: 1351934 - DNA, 25 bp, Homo sapien
cctggctgggatgaacaattgacca

SEQ ID NO: 1351935 - DNA, 25 bp, Homo sapien
tttctaatgagtacactgggctggg

SEQ ID NO: 1351936 - DNA, 25 bp, Homo sapien
taatcctagggaactcagctgtctg

SEQ ID NO: 1351937 - DNA, 25 bp, Homo sapien
gctgtctgatcctatgcctggctgg

SEQ ID NO: 1351938 - DNA, 25 bp, Homo sapien
acaaatattatgtgctgttaagcat

SEQ ID NO: 1351939 - DNA, 25 bp, Homo sapien
ttatcaggagcttcatatgtcactg

SEQ ID NO: 1351940 - DNA, 25 bp, Homo sapien
aatatatgaatgaggtggatcttta

SEQ ID NO: 1351941 - DNA, 25 bp, Homo sapien
tactaggtacatgtatttctgaagc

SEQ ID NO: 1351942 - DNA, 25 bp, Homo sapien
tcagattcctaatagcaggcagcgt

SEQ ID NO: 1351943 - DNA, 25 bp, Homo sapien
gagaaaatcctacactgctttgcag

SEQ ID NO: 1351944 - DNA, 25 bp, Homo sapien
tagtaagccttgacatacagcaggt

SEQ ID NO: 1351945 - DNA, 25 bp, Homo sapien
gaagcctagccacgttactgttaaa

SEQ ID NO: 1351946 - DNA, 25 bp, Homo sapien
ctgtgtatctaatcatttaatacat

SEQ ID NO: 1351947 - DNA, 25 bp, Homo sapien
tgtatctaatcatttaatacattgc

SEQ ID NO: 1351948 - DNA, 25 bp, Homo sapien
gaaagcacttatcaggaggacttac

SEQ ID NO: 1351949 - DNA, 25 bp, Homo sapien
tttcagatttacatagtgataaaca

SEQ ID NO: 1351950 - DNA, 25 bp, Homo sapien
tgcagatgcaaacatttaatggtga

SEQ ID NO: 1351951 - DNA, 25 bp, Homo sapien
tacatagtgataaacaagaaagcac

SEQ ID NO: 1351952 - DNA, 25 bp, Homo sapien
catcatctatcatggctaaatgtga

SEQ ID NO: 1351953 - DNA, 25 bp, Homo sapien
tcatggctaaatgtgagattagcac

SEQ ID NO: 1351954 - DNA, 25 bp, Homo sapien
actctagaaccatcatctatcatgg

SEQ ID NO: 1351955 - DNA, 25 bp, Homo sapien
ctaaatgtgagattagcacagctgt

SEQ ID NO: 1351956 - DNA, 25 bp, Homo sapien
gatgctgctttctagaactccattg

SEQ ID NO: 1351957 - DNA, 25 bp, Homo sapien
cccaggagttttgtgtgtggagtcc

SEQ ID NO: 1351958 - DNA, 25 bp, Homo sapien
tacaacttctggatctatgcagaca

SEQ ID NO: 1351959 - DNA, 25 bp, Homo sapien
ggctgctgctatgcaactccaaaga

SEQ ID NO: 1351960 - DNA, 25 bp, Homo sapien
caagcagggttaggcacttaaagct

SEQ ID NO: 1351961 - DNA, 25 bp, Homo sapien
aatgggcctaaactatgatacctag

SEQ ID NO: 1351962 - DNA, 25 bp, Homo sapien
caagggttggatctgtgcaggcttc

SEQ ID NO: 1351963 - DNA, 25 bp, Homo sapien
gagtgcatgtaagcggctgaactgc

SEQ ID NO: 1351964 - DNA, 25 bp, Homo sapien
gaactcagcttcatggaataccttt

SEQ ID NO: 1351965 - DNA, 25 bp, Homo sapien
tacaaagccctagttagtatacaga

SEQ ID NO: 1351966 - DNA, 25 bp, Homo sapien
gatattactatactggtacccatct

SEQ ID NO: 1351967 - DNA, 25 bp, Homo sapien
tgcatcaatggtcctaatacatctg

SEQ ID NO: 1351968 - DNA, 25 bp, Homo sapien
tatagaactcgctttgttaaaaatc

SEQ ID NO: 1351969 - DNA, 25 bp, Homo sapien
gtaatttcaaaccacactaaacata

SEQ ID NO: 1351970 - DNA, 25 bp, Homo sapien
tctacagtatacattcaagtaaagg

SEQ ID NO: 1351971 - DNA, 25 bp, Homo sapien
taaaggctaaacttccaatgccaac

SEQ ID NO: 1351972 - DNA, 25 bp, Homo sapien
cagggaagtccaaacaaacaactca

SEQ ID NO: 1351973 - DNA, 25 bp, Homo sapien
tataagaggaaactcagtctagtgc

SEQ ID NO: 1351974 - DNA, 25 bp, Homo sapien
gagataactgactttatgacacacc

SEQ ID NO: 1351975 - DNA, 25 bp, Homo sapien
ctttattcacagaaccagatgcttc

SEQ ID NO: 1351976 - DNA, 25 bp, Homo sapien
actatagcaaccttcctgtgatcca

SEQ ID NO: 1351977 - DNA, 25 bp, Homo sapien
tgatccaggtcttgatgccacactc

SEQ ID NO: 1351978 - DNA, 25 bp, Homo sapien
gtgtagctcaaggagcatccactat

SEQ ID NO: 1351979 - DNA, 25 bp, Homo sapien
tttgtacattctcctccaacctgat

SEQ ID NO: 1351980 - DNA, 25 bp, Homo sapien
tatgaccctagtccaattaccattg

SEQ ID NO: 1351981 - DNA, 25 bp, Homo sapien
taacttgcaacaccctatgatttag

SEQ ID NO: 1351982 - DNA, 25 bp, Homo sapien
tgtctttcgtttccactccaatagt

SEQ ID NO: 1351983 - DNA, 25 bp, Homo sapien
tctatacagatagttctgactggtc

SEQ ID NO: 1351984 - DNA, 25 bp, Homo sapien
aaactaatcttggaattggcactga

SEQ ID NO: 1351985 - DNA, 25 bp, Homo sapien
taacttgagatacaggaaaacacca

SEQ ID NO: 1351986 - DNA, 25 bp, Homo sapien
ctttttcactcaacaggaacaggct

SEQ ID NO: 1351987 - DNA, 25 bp, Homo sapien
taagagcaacatatgggtttcccag

SEQ ID NO: 1351988 - DNA, 25 bp, Homo sapien
gaaacacgtgaaaagatcacctata

SEQ ID NO: 1351989 - DNA, 25 bp, Homo sapien
aaacacgtgaaaagatcacctatag

SEQ ID NO: 1351990 - DNA, 25 bp, Homo sapien
ttagaaacacgtgaaaagatcacct

SEQ ID NO: 1351991 - DNA, 25 bp, Homo sapien
gaaaagatcacctatagacaaatac

SEQ ID NO: 1351992 - DNA, 25 bp, Homo sapien
cagatatgcaggaacgtgtctggca

SEQ ID NO: 1351993 - DNA, 25 bp, Homo sapien
ttcttttgcggctgcctcgagtgca

SEQ ID NO: 1351994 - DNA, 25 bp, Homo sapien
gaagcaggaagagatttagtaagtt

SEQ ID NO: 1351995 - DNA, 25 bp, Homo sapien
ggcaaaagtctgaagtggaaggtga

SEQ ID NO: 1351996 - DNA, 25 bp, Homo sapien
tcatatttagaaactgctgctttaa

SEQ ID NO: 1351997 - DNA, 25 bp, Homo sapien
ttctgagttctggtggtcaaaggta

SEQ ID NO: 1351998 - DNA, 25 bp, Homo sapien
ggtcaaaggtagtcatatttagaaa

SEQ ID NO: 1351999 - DNA, 25 bp, Homo sapien
tgctgctttaaccaactggctcttt

SEQ ID NO: 1352000 - DNA, 25 bp, Homo sapien
tgctctctggctatctattcgtact

SEQ ID NO: 1352001 - DNA, 25 bp, Homo sapien
gccatttcacatgattgctctagct

SEQ ID NO: 1352002 - DNA, 25 bp, Homo sapien
ggtggcacaggactacagtctcagc

SEQ ID NO: 1352003 - DNA, 25 bp, Homo sapien
taatttcagcactcgtctgtaatcc

SEQ ID NO: 1352004 - DNA, 25 bp, Homo sapien
gctgtagagcgtatatataacaatg

SEQ ID NO: 1352005 - DNA, 25 bp, Homo sapien
gcaagctgtagagcgtatatataac

SEQ ID NO: 1352006 - DNA, 25 bp, Homo sapien
aaagcaagctgtagagcgtatatat

SEQ ID NO: 1352007 - DNA, 25 bp, Homo sapien
tgaagggggaatatgtagatgacac

SEQ ID NO: 1352008 - DNA, 25 bp, Homo sapien
aagagatttcttgtgtaaaacactt

SEQ ID NO: 1352009 - DNA, 25 bp, Homo sapien
aaacacttagcaggagaaagccaat

SEQ ID NO: 1352010 - DNA, 25 bp, Homo sapien
caccacacctactgaccgtggatga

SEQ ID NO: 1352011 - DNA, 25 bp, Homo sapien
cagcaaatatagtcttggttgcact

SEQ ID NO: 1352012 - DNA, 25 bp, Homo sapien
ggcttctgtaaagcttcgtctctcc

SEQ ID NO: 1352013 - DNA, 25 bp, Homo sapien
ccaatcccaggcgaatagcggcttc

SEQ ID NO: 1352014 - DNA, 25 bp, Homo sapien
gaatagcggcttctgtaaagcttcg

SEQ ID NO: 1352015 - DNA, 25 bp, Homo sapien
cccaggcgaatagcggcttctgtaa

SEQ ID NO: 1352016 - DNA, 25 bp, Homo sapien
taacagtctcgtaatagtgaagtgg

SEQ ID NO: 1352017 - DNA, 25 bp, Homo sapien
gtctcgtaatagtgaagtggtatca

SEQ ID NO: 1352018 - DNA, 25 bp, Homo sapien
ccaacaaataacagtctcgtaatag

SEQ ID NO: 1352019 - DNA, 25 bp, Homo sapien
tttcttccaacaaataacagtctcg

SEQ ID NO: 1352020 - DNA, 25 bp, Homo sapien
tgttcatggtcttgtcgtgagatta

SEQ ID NO: 1352021 - DNA, 25 bp, Homo sapien
gctgaatttctaactcgagtttttc

SEQ ID NO: 1352022 - DNA, 25 bp, Homo sapien
tgaatttctaactcgagtttttcag

SEQ ID NO: 1352023 - DNA, 25 bp, Homo sapien
gtcttgtcgtgagattacatcttca

SEQ ID NO: 1352024 - DNA, 25 bp, Homo sapien
ctaggaacatagtaatctgcaagca

SEQ ID NO: 1352025 - DNA, 25 bp, Homo sapien
gagaccaggatattctactttatat

SEQ ID NO: 1352026 - DNA, 25 bp, Homo sapien
tatatgtatggaatagagaccagga

SEQ ID NO: 1352027 - DNA, 25 bp, Homo sapien
tatagaaaaatatgcaccaaactgt

SEQ ID NO: 1352028 - DNA, 25 bp, Homo sapien
ttacatgcatagaagcagtggttac

SEQ ID NO: 1352029 - DNA, 25 bp, Homo sapien
tttacatgcatagaagcagtggtta

SEQ ID NO: 1352030 - DNA, 25 bp, Homo sapien
ctgcttagttccccggcatcttctt

SEQ ID NO: 1352031 - DNA, 25 bp, Homo sapien
tagttccccggcatcttcttcaaca

SEQ ID NO: 1352032 - DNA, 25 bp, Homo sapien
gcttagttccccggcatcttcttca

SEQ ID NO: 1352033 - DNA, 25 bp, Homo sapien
ttagttccccggcatcttcttcaac

SEQ ID NO: 1352034 - DNA, 25 bp, Homo sapien
tctccacgtctgtctttcccaaaaa

SEQ ID NO: 1352035 - DNA, 25 bp, Homo sapien
ctctggagtgagaaacttggattca

SEQ ID NO: 1352036 - DNA, 25 bp, Homo sapien
tttctctgtgatgccttgattgcca

SEQ ID NO: 1352037 - DNA, 25 bp, Homo sapien
tcatgtgtgatactgggctactaaa

SEQ ID NO: 1352038 - DNA, 25 bp, Homo sapien
gatttgtttctgacgatattcataa

SEQ ID NO: 1352039 - DNA, 25 bp, Homo sapien
tcataatcattcaagagaattttat

SEQ ID NO: 1352040 - DNA, 25 bp, Homo sapien
tgtttctgacgatattcataatcat

SEQ ID NO: 1352041 - DNA, 25 bp, Homo sapien
aggatttgtttctgacgatattcat

SEQ ID NO: 1352042 - DNA, 25 bp, Homo sapien
caggatagaaggaagtctgattaca

SEQ ID NO: 1352043 - DNA, 25 bp, Homo sapien
aaaatgcaggatagaaggaagtctg

SEQ ID NO: 1352044 - DNA, 25 bp, Homo sapien
gatagaaggaagtctgattacattt

SEQ ID NO: 1352045 - DNA, 25 bp, Homo sapien
tgcaggatagaaggaagtctgatta

SEQ ID NO: 1352046 - DNA, 25 bp, Homo sapien
tccatcagctctcccgacataattc

SEQ ID NO: 1352047 - DNA, 25 bp, Homo sapien
gctctcccgacataattcaaaatgt

SEQ ID NO: 1352048 - DNA, 25 bp, Homo sapien
tcagctctcccgacataattcaaaa

SEQ ID NO: 1352049 - DNA, 25 bp, Homo sapien
atcagctctcccgacataattcaaa

SEQ ID NO: 1352050 - DNA, 25 bp, Homo sapien
atttccaatcttaacggcgcattac

SEQ ID NO: 1352051 - DNA, 25 bp, Homo sapien
gattctccaaatgagtaagattaac

SEQ ID NO: 1352052 - DNA, 25 bp, Homo sapien
gattaactcaggatacctaaagatt

SEQ ID NO: 1352053 - DNA, 25 bp, Homo sapien
taacggcgcattactgaatcttcat

SEQ ID NO: 1352054 - DNA, 25 bp, Homo sapien
tagctgatctttgccagctgtttac

SEQ ID NO: 1352055 - DNA, 25 bp, Homo sapien
ttagctgatctttgccagctgttta

SEQ ID NO: 1352056 - DNA, 25 bp, Homo sapien
cagtttattatattcacgctctttt

SEQ ID NO: 1352057 - DNA, 25 bp, Homo sapien
tctcttcatatcatgattatactga

SEQ ID NO: 1352058 - DNA, 25 bp, Homo sapien
ctgagtagctcgacttgcaatgata

SEQ ID NO: 1352059 - DNA, 25 bp, Homo sapien
cataacaagttgatgtagacgttcc

SEQ ID NO: 1352060 - DNA, 25 bp, Homo sapien
caaattcctgttcttacattgtaac

SEQ ID NO: 1352061 - DNA, 25 bp, Homo sapien
tctttctcattctttagtagctgat

SEQ ID NO: 1352062 - DNA, 25 bp, Homo sapien
tctttcctgaagcccaatcatttcc

SEQ ID NO: 1352063 - DNA, 25 bp, Homo sapien
gcaaattcctgttcttacattgtaa

SEQ ID NO: 1352064 - DNA, 25 bp, Homo sapien
gagtagcagctctgtagatggtcca

SEQ ID NO: 1352065 - DNA, 25 bp, Homo sapien
gcttcaaattctgtgtctccacatt

SEQ ID NO: 1352066 - DNA, 25 bp, Homo sapien
aggttcttccgctgaagcacaagca

SEQ ID NO: 1352067 - DNA, 25 bp, Homo sapien
caagcagctcattcatacaatttag

SEQ ID NO: 1352068 - DNA, 25 bp, Homo sapien
tatgggaggtatgcacactgagcca

SEQ ID NO: 1352069 - DNA, 25 bp, Homo sapien
cggtgacctcagctaataactacgt

SEQ ID NO: 1352070 - DNA, 25 bp, Homo sapien
tctgctataaatctgtgacatggag

SEQ ID NO: 1352071 - DNA, 25 bp, Homo sapien
tacagttgaggagatactggtcaga

SEQ ID NO: 1352072 - DNA, 25 bp, Homo sapien
caagatatgagatactctgttcaat

SEQ ID NO: 1352073 - DNA, 25 bp, Homo sapien
taaaggtattgaagaacatagcact

SEQ ID NO: 1352074 - DNA, 25 bp, Homo sapien
gcacttgctgtgagtataaacttga

SEQ ID NO: 1352075 - DNA, 25 bp, Homo sapien
ctgtgcacatttttcgataaaggta

SEQ ID NO: 1352076 - DNA, 25 bp, Homo sapien
ggatctgtaacagtcatccaatctc

SEQ ID NO: 1352077 - DNA, 25 bp, Homo sapien
atctgtaacagtcatccaatctccc

SEQ ID NO: 1352078 - DNA, 25 bp, Homo sapien
ctggatctgtaacagtcatccaatc

SEQ ID NO: 1352079 - DNA, 25 bp, Homo sapien
ctgtaacagtcatccaatctcccat

SEQ ID NO: 1352080 - DNA, 25 bp, Homo sapien
cagttaaacatttagtctagctgct

SEQ ID NO: 1352081 - DNA, 25 bp, Homo sapien
tgtcactcttctatgtaggcatctc

SEQ ID NO: 1352082 - DNA, 25 bp, Homo sapien
ctagttcagcagttaaacatttagt

SEQ ID NO: 1352083 - DNA, 25 bp, Homo sapien
catttagtctagctgctgtcactct

SEQ ID NO: 1352084 - DNA, 25 bp, Homo sapien
gacagcctagtcagacaccctgagc

SEQ ID NO: 1352085 - DNA, 25 bp, Homo sapien
cctagtcagacaccctgagccagag

SEQ ID NO: 1352086 - DNA, 25 bp, Homo sapien
gactcatctgttctaagctggctgt

SEQ ID NO: 1352087 - DNA, 25 bp, Homo sapien
aaagctgctaaatttcggagtaatt

SEQ ID NO: 1352088 - DNA, 25 bp, Homo sapien
ttacaaaacagtgcacaaccgccat

SEQ ID NO: 1352089 - DNA, 25 bp, Homo sapien
tgcttttacaaaacagtgcacaacc

SEQ ID NO: 1352090 - DNA, 25 bp, Homo sapien
cacgtatttcaaaactaatgctttt

SEQ ID NO: 1352091 - DNA, 25 bp, Homo sapien
gcttccttcttgcacgtatttcaaa

SEQ ID NO: 1352092 - DNA, 25 bp, Homo sapien
tcctcagcttagaaagcagggagct

SEQ ID NO: 1352093 - DNA, 25 bp, Homo sapien
tcatgtgtatctctgggttgaggga

SEQ ID NO: 1352094 - DNA, 25 bp, Homo sapien
cattgctgcagtatgagaaacagta

SEQ ID NO: 1352095 - DNA, 25 bp, Homo sapien
gcagggagctacatgctgttcttta

SEQ ID NO: 1352096 - DNA, 25 bp, Homo sapien
actaaatggtcctgaacataaatct

SEQ ID NO: 1352097 - DNA, 25 bp, Homo sapien
ctaaatggtcctgaacataaatctt

SEQ ID NO: 1352098 - DNA, 25 bp, Homo sapien
agactaaatggtcctgaacataaat

SEQ ID NO: 1352099 - DNA, 25 bp, Homo sapien
gactaaatggtcctgaacataaatc

SEQ ID NO: 1352100 - DNA, 25 bp, Homo sapien
ctgagggaatgtctgtgggaatctg

SEQ ID NO: 1352101 - DNA, 25 bp, Homo sapien
agggaatgtctgtgggaatctggcc

SEQ ID NO: 1352102 - DNA, 25 bp, Homo sapien
gaatgtctgtgggaatctggcccat

SEQ ID NO: 1352103 - DNA, 25 bp, Homo sapien
ggaatgtctgtgggaatctggccca

SEQ ID NO: 1352104 - DNA, 25 bp, Homo sapien
tggcggggcgcgtcacaatccccga

SEQ ID NO: 1352105 - DNA, 25 bp, Homo sapien
tcccgccgaacaacggggcgctgag

SEQ ID NO: 1352106 - DNA, 25 bp, Homo sapien
cgggtcgacgctcgcccgcaccctg

SEQ ID NO: 1352107 - DNA, 25 bp, Homo sapien
aggtgccggctctcacctccgcgcg

SEQ ID NO: 1352108 - DNA, 25 bp, Homo sapien
gagcggcggggagtcaccgctcggc

SEQ ID NO: 1352109 - DNA, 25 bp, Homo sapien
gggagtcaccgctcggcgtcctagc

SEQ ID NO: 1352110 - DNA, 25 bp, Homo sapien
cctccgctgcgggctcccgccttcc

SEQ ID NO: 1352111 - DNA, 25 bp, Homo sapien
cttccccgccccttgcagccgcctc

SEQ ID NO: 1352112 - DNA, 25 bp, Homo sapien
ttgctaggcgatgaacaaccgtggc

SEQ ID NO: 1352113 - DNA, 25 bp, Homo sapien
cattggctccgccagttgctaggcg

SEQ ID NO: 1352114 - DNA, 25 bp, Homo sapien
tccgccagttgctaggcgatgaaca

SEQ ID NO: 1352115 - DNA, 25 bp, Homo sapien
ggcgatgaacaaccgtggcctgcat

SEQ ID NO: 1352116 - DNA, 25 bp, Homo sapien
agaaaaagaagaccttatccctgcg

SEQ ID NO: 1352117 - DNA, 25 bp, Homo sapien
aagaagaccttatccctgcggtccg

SEQ ID NO: 1352118 - DNA, 25 bp, Homo sapien
tgttacgcccagtgattcacccggc

SEQ ID NO: 1352119 - DNA, 25 bp, Homo sapien
ggctgcggcacctgttacgcccagt

SEQ ID NO: 1352120 - DNA, 25 bp, Homo sapien
cataagccctctgaagggagggtcc

SEQ ID NO: 1352121 - DNA, 25 bp, Homo sapien
ttggtcatgtttgcctctgtagccc

SEQ ID NO: 1352122 - DNA, 25 bp, Homo sapien
gaagagctgacacctcatcggaaac

SEQ ID NO: 1352123 - DNA, 25 bp, Homo sapien
ttgagggccaaaaagatgaagagct

SEQ ID NO: 1352124 - DNA, 25 bp, Homo sapien
tataaagtgataaacgctgccaccg

SEQ ID NO: 1352125 - DNA, 25 bp, Homo sapien
tccaaattgagttagacaaagtctc

SEQ ID NO: 1352126 - DNA, 25 bp, Homo sapien
catgatggtagctcagtggagatga

SEQ ID NO: 1352127 - DNA, 25 bp, Homo sapien
gatgagcatcaaggtagagaagact

SEQ ID NO: 1352128 - DNA, 25 bp, Homo sapien
gcagacagcgatcaaacagagcatc

SEQ ID NO: 1352129 - DNA, 25 bp, Homo sapien
cagagcatcacagacgagtaaggag

SEQ ID NO: 1352130 - DNA, 25 bp, Homo sapien
taaggatacctcgtagttagcagac

SEQ ID NO: 1352131 - DNA, 25 bp, Homo sapien
cacagacgagtaaggagaaagggcc

SEQ ID NO: 1352132 - DNA, 25 bp, Homo sapien
ttgtggatgcggaaagctcagcaga

SEQ ID NO: 1352133 - DNA, 25 bp, Homo sapien
catgggattcaaggttcaacaatac

SEQ ID NO: 1352134 - DNA, 25 bp, Homo sapien
agagctgcggctagtgatgatgcgt

SEQ ID NO: 1352135 - DNA, 25 bp, Homo sapien
atgcgtggcaaggtccgggcccacc

SEQ ID NO: 1352136 - DNA, 25 bp, Homo sapien
ctggtttaggaacatttacatccct

SEQ ID NO: 1352137 - DNA, 25 bp, Homo sapien
gaacatttacatcccttatttctct

SEQ ID NO: 1352138 - DNA, 25 bp, Homo sapien
taggaacatttacatcccttatttc

SEQ ID NO: 1352139 - DNA, 25 bp, Homo sapien
catttacatcccttatttctcttcc

SEQ ID NO: 1352140 - DNA, 25 bp, Homo sapien
tgagcagttgggtcagggacttttt

SEQ ID NO: 1352141 - DNA, 25 bp, Homo sapien
tacaccctgtggatatgcatctgga

SEQ ID NO: 1352142 - DNA, 25 bp, Homo sapien
gaatgatcccgacagagacttaagg

SEQ ID NO: 1352143 - DNA, 25 bp, Homo sapien
gtgataccagagtgggtcatctcca

SEQ ID NO: 1352144 - DNA, 25 bp, Homo sapien
gaagtgaaaatgtgcggcatgcctc

SEQ ID NO: 1352145 - DNA, 25 bp, Homo sapien
ataatgcaaaggcttctatgagaca

SEQ ID NO: 1352146 - DNA, 25 bp, Homo sapien
aaatgtgcggcatgcctcacattcc

SEQ ID NO: 1352147 - DNA, 25 bp, Homo sapien
caataatgcaaaggcttctatgaga

SEQ ID NO: 1352148 - DNA, 25 bp, Homo sapien
tgcagaacccagcagcggaacaaca

SEQ ID NO: 1352149 - DNA, 25 bp, Homo sapien
agcagcggaacaacagcgacaccaa

SEQ ID NO: 1352150 - DNA, 25 bp, Homo sapien
aacaacagcgacaccaagtggccag

SEQ ID NO: 1352151 - DNA, 25 bp, Homo sapien
agcggaacaacagcgacaccaagtg

SEQ ID NO: 1352152 - DNA, 25 bp, Homo sapien
tcaagtctttaggtgatgctgaaaa

SEQ ID NO: 1352153 - DNA, 25 bp, Homo sapien
tgcttgctatctctcgtcggtcacc

SEQ ID NO: 1352154 - DNA, 25 bp, Homo sapien
ctgtcctcggtgtgaaaaggtgacc

SEQ ID NO: 1352155 - DNA, 25 bp, Homo sapien
ccagcgaatcgttctttgctgctgc

SEQ ID NO: 1352156 - DNA, 25 bp, Homo sapien
tgaggcctgtccatcgcggatttga

SEQ ID NO: 1352157 - DNA, 25 bp, Homo sapien
cgcttcagtcatagggccgggaaat

SEQ ID NO: 1352158 - DNA, 25 bp, Homo sapien
atttagtgacgctgccaatgcccga

SEQ ID NO: 1352159 - DNA, 25 bp, Homo sapien
attaggcgataatggcccgggcccg

SEQ ID NO: 1352160 - DNA, 25 bp, Homo sapien
ctgtgtcttgtatcccagcatcctc

SEQ ID NO: 1352161 - DNA, 25 bp, Homo sapien
tcacagaactgtgtcttgtatccca

SEQ ID NO: 1352162 - DNA, 25 bp, Homo sapien
gaactgtgtcttgtatcccagcatc

SEQ ID NO: 1352163 - DNA, 25 bp, Homo sapien
cagaactgtgtcttgtatcccagca

SEQ ID NO: 1352164 - DNA, 25 bp, Homo sapien
aatgcagctcggagtggaaagaact

SEQ ID NO: 1352165 - DNA, 25 bp, Homo sapien
cagctcggagtggaaagaactggca

SEQ ID NO: 1352166 - DNA, 25 bp, Homo sapien
caattagaatgcagctcggagtgga

SEQ ID NO: 1352167 - DNA, 25 bp, Homo sapien
ttcacaattagaatgcagctcggag

SEQ ID NO: 1352168 - DNA, 25 bp, Homo sapien
tcaaagtgccccaattgttccctga

SEQ ID NO: 1352169 - DNA, 25 bp, Homo sapien
gggagcgccatatgtcagagctgcc

SEQ ID NO: 1352170 - DNA, 25 bp, Homo sapien
agagcttgccggcagtccttgtggc

SEQ ID NO: 1352171 - DNA, 25 bp, Homo sapien
ccactcctcggcagcaagaactggg

SEQ ID NO: 1352172 - DNA, 25 bp, Homo sapien
aacagaacacagctcggatgccaat

SEQ ID NO: 1352173 - DNA, 25 bp, Homo sapien
acacagctcggatgccaatgctccg

SEQ ID NO: 1352174 - DNA, 25 bp, Homo sapien
gaacacagctcggatgccaatgctc

SEQ ID NO: 1352175 - DNA, 25 bp, Homo sapien
cagaacacagctcggatgccaatgc

SEQ ID NO: 1352176 - DNA, 25 bp, Homo sapien
tgccatttgaattgatgctttttaa

SEQ ID NO: 1352177 - DNA, 25 bp, Homo sapien
ggaggcggctgccatttgaattgat

SEQ ID NO: 1352178 - DNA, 25 bp, Homo sapien
gaggcggctgccatttgaattgatg

SEQ ID NO: 1352179 - DNA, 25 bp, Homo sapien
gcggctgccatttgaattgatgctt

SEQ ID NO: 1352180 - DNA, 25 bp, Homo sapien
gggtgtcagaagcactaggctgtcc

SEQ ID NO: 1352181 - DNA, 25 bp, Homo sapien
tgacagggtttcgtccattcaggag

SEQ ID NO: 1352182 - DNA, 25 bp, Homo sapien
tccttaagcgcatcagtaaagcccc

SEQ ID NO: 1352183 - DNA, 25 bp, Homo sapien
aggtaacatattcgctgaatccagg

SEQ ID NO: 1352184 - DNA, 25 bp, Homo sapien
agctctagcctggttggagtcacta

SEQ ID NO: 1352185 - DNA, 25 bp, Homo sapien
ttggagtcactaatttcagaggcta

SEQ ID NO: 1352186 - DNA, 25 bp, Homo sapien
tctagcctggttggagtcactaatt

SEQ ID NO: 1352187 - DNA, 25 bp, Homo sapien
agcctggttggagtcactaatttca

SEQ ID NO: 1352188 - DNA, 25 bp, Homo sapien
ctagtggtggactcagaggcctttt

SEQ ID NO: 1352189 - DNA, 25 bp, Homo sapien
ttttctcccttctgcgttcaggtcc

SEQ ID NO: 1352190 - DNA, 25 bp, Homo sapien
ggtagagctcttgcgccacctagtg

SEQ ID NO: 1352191 - DNA, 25 bp, Homo sapien
ggtggactcagaggcctttttctcc

SEQ ID NO: 1352192 - DNA, 25 bp, Homo sapien
agctgtgaggaggagaggtgcaccc

SEQ ID NO: 1352193 - DNA, 25 bp, Homo sapien
gtgaggaggagaggtgcaccccagg

SEQ ID NO: 1352194 - DNA, 25 bp, Homo sapien
ctgtgaggaggagaggtgcacccca

SEQ ID NO: 1352195 - DNA, 25 bp, Homo sapien
gcagcagctgtgaggaggagaggtg

SEQ ID NO: 1352196 - DNA, 25 bp, Homo sapien
caagggccctgacggctttctcatg

SEQ ID NO: 1352197 - DNA, 25 bp, Homo sapien
tatgttcccacagagaaggcttgcc

SEQ ID NO: 1352198 - DNA, 25 bp, Homo sapien
ttgcccgtggcggtccatccatctt

SEQ ID NO: 1352199 - DNA, 25 bp, Homo sapien
ctgacggctttctcatggggcaccc

SEQ ID NO: 1352200 - DNA, 25 bp, Homo sapien
aagtatcaccctttacaggtcctgg

SEQ ID NO: 1352201 - DNA, 25 bp, Homo sapien
tggctctttgagctaacgaagtatc

SEQ ID NO: 1352202 - DNA, 25 bp, Homo sapien
tcctggttctgatgcaccaagatgt

SEQ ID NO: 1352203 - DNA, 25 bp, Homo sapien
aggtcctggttctgatgcaccaaga

SEQ ID NO: 1352204 - DNA, 25 bp, Homo sapien
tggccctcagttactctggccttca

SEQ ID NO: 1352205 - DNA, 25 bp, Homo sapien
cttgtctccatctaccaggtgccgt

SEQ ID NO: 1352206 - DNA, 25 bp, Homo sapien
tgtggagctgccttgtctccatcta

SEQ ID NO: 1352207 - DNA, 25 bp, Homo sapien
ccatctaccaggtgccgtccatggg

SEQ ID NO: 1352208 - DNA, 25 bp, Homo sapien
ctctgtccgctgttttcagcggcga

SEQ ID NO: 1352209 - DNA, 25 bp, Homo sapien
aatatgcttcttgcaaaggatttcc

SEQ ID NO: 1352210 - DNA, 25 bp, Homo sapien
cgatgacacccccatgagaatatgc

SEQ ID NO: 1352211 - DNA, 25 bp, Homo sapien
tccgctgttttcagcggcgatgaca

SEQ ID NO: 1352212 - DNA, 25 bp, Homo sapien
cataagaaaggaggaaacaagatga

SEQ ID NO: 1352213 - DNA, 25 bp, Homo sapien
cccataagaaaggaggaaacaagat

SEQ ID NO: 1352214 - DNA, 25 bp, Homo sapien
tctccccataagaaaggaggaaaca

SEQ ID NO: 1352215 - DNA, 25 bp, Homo sapien
taagaaaggaggaaacaagatgaaa

SEQ ID NO: 1352216 - DNA, 25 bp, Homo sapien
tctgcaggcagaagcagcactgaag

SEQ ID NO: 1352217 - DNA, 25 bp, Homo sapien
ctggaggacatctctgcaggcagaa

SEQ ID NO: 1352218 - DNA, 25 bp, Homo sapien
cggaggcaaagtatggtgactggag

SEQ ID NO: 1352219 - DNA, 25 bp, Homo sapien
tatggtgactggaggacatctctgc

SEQ ID NO: 1352220 - DNA, 25 bp, Homo sapien
gggcataggacagcgtggcaatgtg

SEQ ID NO: 1352221 - DNA, 25 bp, Homo sapien
cttggcagacatgtggcaggttccc

SEQ ID NO: 1352222 - DNA, 25 bp, Homo sapien
acatgtggcaggttccccgggactg

SEQ ID NO: 1352223 - DNA, 25 bp, Homo sapien
gcataggacagcgtggcaatgtgcc

SEQ ID NO: 1352224 - DNA, 25 bp, Homo sapien
gtaggtggtcagcacacgcactgag

SEQ ID NO: 1352225 - DNA, 25 bp, Homo sapien
tcagtgctactggtgcgtgaacgct

SEQ ID NO: 1352226 - DNA, 25 bp, Homo sapien
cagtcagtgctactggtgcgtgaac

SEQ ID NO: 1352227 - DNA, 25 bp, Homo sapien
cacacgcactgagctgatagatgga

SEQ ID NO: 1352228 - DNA, 25 bp, Homo sapien
ccagtatcataatatgacatcctgg

SEQ ID NO: 1352229 - DNA, 25 bp, Homo sapien
gtatcataatatgacatcctggatc

SEQ ID NO: 1352230 - DNA, 25 bp, Homo sapien
ggaccagtatcataatatgacatcc

SEQ ID NO: 1352231 - DNA, 25 bp, Homo sapien
tcataatatgacatcctggatcaac

SEQ ID NO: 1352232 - DNA, 25 bp, Homo sapien
caagttggggcagactactttggct

SEQ ID NO: 1352233 - DNA, 25 bp, Homo sapien
ctcctccaaaggtcaggagaggccc

SEQ ID NO: 1352234 - DNA, 25 bp, Homo sapien
gctaaggtgcgtatgactcctccaa

SEQ ID NO: 1352235 - DNA, 25 bp, Homo sapien
tgggtatcacttgcaacaagttggg

SEQ ID NO: 1352236 - DNA, 25 bp, Homo sapien
gagcaccacaagttgatttgagcaa

SEQ ID NO: 1352237 - DNA, 25 bp, Homo sapien
aaccaattaatatgagcaccacaag

SEQ ID NO: 1352238 - DNA, 25 bp, Homo sapien
aaataataggccattcagtcttggg

SEQ ID NO: 1352239 - DNA, 25 bp, Homo sapien
agagaaatgaatcagcaaccccagg

SEQ ID NO: 1352240 - DNA, 25 bp, Homo sapien
gatgataggggcctttccccgcaag

SEQ ID NO: 1352241 - DNA, 25 bp, Homo sapien
tgagtctcaattcatcattcactgc

SEQ ID NO: 1352242 - DNA, 25 bp, Homo sapien
tttcttgttctagctaaagtagcag

SEQ ID NO: 1352243 - DNA, 25 bp, Homo sapien
tagcagtaaacagagtgaattcagc

SEQ ID NO: 1352244 - DNA, 25 bp, Homo sapien
gatgaagaggcagtatagcagacat

SEQ ID NO: 1352245 - DNA, 25 bp, Homo sapien
ctgatgaagaggcagtatagcagac

SEQ ID NO: 1352246 - DNA, 25 bp, Homo sapien
tgatgaagaggcagtatagcagaca

SEQ ID NO: 1352247 - DNA, 25 bp, Homo sapien
cctatcactgctgatttcctttgat

SEQ ID NO: 1352248 - DNA, 25 bp, Homo sapien
cgaggaacactttgactcagaacaa

SEQ ID NO: 1352249 - DNA, 25 bp, Homo sapien
aacaaaggcactcgccggcaaagtt

SEQ ID NO: 1352250 - DNA, 25 bp, Homo sapien
tcagaacaaaggcactcgccggcaa

SEQ ID NO: 1352251 - DNA, 25 bp, Homo sapien
agaacaaaggcactcgccggcaaag

SEQ ID NO: 1352252 - DNA, 25 bp, Homo sapien
acatgcttcgttctatttatagcgg

SEQ ID NO: 1352253 - DNA, 25 bp, Homo sapien
tctgggaagctaactgccttgccat

SEQ ID NO: 1352254 - DNA, 25 bp, Homo sapien
tcagcaatgctgctggaacatgctt

SEQ ID NO: 1352255 - DNA, 25 bp, Homo sapien
catgagtcatggtaacgcccagagg

SEQ ID NO: 1352256 - DNA, 25 bp, Homo sapien
gcagataagctttggatcctagaat

SEQ ID NO: 1352257 - DNA, 25 bp, Homo sapien
taacttgcagataagctttggatcc

SEQ ID NO: 1352258 - DNA, 25 bp, Homo sapien
ccatattgataacttgcagataagc

SEQ ID NO: 1352259 - DNA, 25 bp, Homo sapien
aggaccaccatattgataacttgca

SEQ ID NO: 1352260 - DNA, 25 bp, Homo sapien
atacacaaagcaataatgcacctca

SEQ ID NO: 1352261 - DNA, 25 bp, Homo sapien
tatgctgtagttaccacaaactata

SEQ ID NO: 1352262 - DNA, 25 bp, Homo sapien
tttatgctgtagttaccacaaacta

SEQ ID NO: 1352263 - DNA, 25 bp, Homo sapien
caataatgcacctcaacaagagaga

SEQ ID NO: 1352264 - DNA, 25 bp, Homo sapien
taagccaggtaccagaaggatgcca

SEQ ID NO: 1352265 - DNA, 25 bp, Homo sapien
tatatggaagggattcagcctgctc

SEQ ID NO: 1352266 - DNA, 25 bp, Homo sapien
aaattcagttcacatgtaagccagg

SEQ ID NO: 1352267 - DNA, 25 bp, Homo sapien
ctggaaagtctaggtggcccgtgaa

SEQ ID NO: 1352268 - DNA, 25 bp, Homo sapien
tttgaacaaaatcaataaaaatcag

SEQ ID NO: 1352269 - DNA, 25 bp, Homo sapien
tcaataaaaatcagtaaaaacagga

SEQ ID NO: 1352270 - DNA, 25 bp, Homo sapien
atcagtaaaaacaggaatatatata

SEQ ID NO: 1352271 - DNA, 25 bp, Homo sapien
aaaatcagtaaaaacaggaatatat

SEQ ID NO: 1352272 - DNA, 25 bp, Homo sapien
tctagcagtgattaatggagacctc

SEQ ID NO: 1352273 - DNA, 25 bp, Homo sapien
catgggctttgttagagacaggtaa

SEQ ID NO: 1352274 - DNA, 25 bp, Homo sapien
tctgagcagttcataggacaagcag

SEQ ID NO: 1352275 - DNA, 25 bp, Homo sapien
aaagagaatggctacgaaatggtgc

SEQ ID NO: 1352276 - DNA, 25 bp, Homo sapien
taggaagtgcttttattgcagactg

SEQ ID NO: 1352277 - DNA, 25 bp, Homo sapien
ttaggaagtgcttttattgcagact

SEQ ID NO: 1352278 - DNA, 25 bp, Homo sapien
gttcaggccgtcgaggagcagaacc

SEQ ID NO: 1352279 - DNA, 25 bp, Homo sapien
gttcacgacggagttgagcagcgcc

SEQ ID NO: 1352280 - DNA, 25 bp, Homo sapien
ttttcacatgctgcacgccacactg

SEQ ID NO: 1352281 - DNA, 25 bp, Homo sapien
tatcctctatgtactggctgcctgt

SEQ ID NO: 1352282 - DNA, 25 bp, Homo sapien
gccttctccactggagctctcccat

SEQ ID NO: 1352283 - DNA, 25 bp, Homo sapien
ctgcgctaacagtgctgtactgccg

SEQ ID NO: 1352284 - DNA, 25 bp, Homo sapien
taacagtgctgtactgccgatccac

SEQ ID NO: 1352285 - DNA, 25 bp, Homo sapien
cagtgctgtactgccgatccaccat

SEQ ID NO: 1352286 - DNA, 25 bp, Homo sapien
gctaacagtgctgtactgccgatcc

SEQ ID NO: 1352287 - DNA, 25 bp, Homo sapien
caagttcaagatcacatttggcatg

SEQ ID NO: 1352288 - DNA, 25 bp, Homo sapien
aagttcaagatcacatttggcatgg

SEQ ID NO: 1352289 - DNA, 25 bp, Homo sapien
agttcaagatcacatttggcatgga

SEQ ID NO: 1352290 - DNA, 25 bp, Homo sapien
tcaagttcaagatcacatttggcat

SEQ ID NO: 1352291 - DNA, 25 bp, Homo sapien
tcctgattcccaacctggcctacag

SEQ ID NO: 1352292 - DNA, 25 bp, Homo sapien
catggccaggcctcattaactgctg

SEQ ID NO: 1352293 - DNA, 25 bp, Homo sapien
gaggatgcatctacccttcctgatt

SEQ ID NO: 1352294 - DNA, 25 bp, Homo sapien
tgctgccaggtttccctgacgctga

SEQ ID NO: 1352295 - DNA, 25 bp, Homo sapien
gtttctaagctgcatgcaaactcag

SEQ ID NO: 1352296 - DNA, 25 bp, Homo sapien
cagcatcttcactagttctcccagt

SEQ ID NO: 1352297 - DNA, 25 bp, Homo sapien
aacctgggtctgctgtgtcacctca

SEQ ID NO: 1352298 - DNA, 25 bp, Homo sapien
gacaatctctatgtccttctgagag

SEQ ID NO: 1352299 - DNA, 25 bp, Homo sapien
ggtctctgccacgtagcaccagtgt

SEQ ID NO: 1352300 - DNA, 25 bp, Homo sapien
tatcataagccttgtcatgggccca

SEQ ID NO: 1352301 - DNA, 25 bp, Homo sapien
tgctcgagcctggtgataaggagtc

SEQ ID NO: 1352302 - DNA, 25 bp, Homo sapien
agtgtccctcctgctagtgctcgag

SEQ ID NO: 1352303 - DNA, 25 bp, Homo sapien
acactcaagatcctacatgggctct

SEQ ID NO: 1352304 - DNA, 25 bp, Homo sapien
caggcctatttaattgggcctgcat

SEQ ID NO: 1352305 - DNA, 25 bp, Homo sapien
ctcaagatcctacatgggctctttc

SEQ ID NO: 1352306 - DNA, 25 bp, Homo sapien
gctctttcttgccagatgaggcagt

SEQ ID NO: 1352307 - DNA, 25 bp, Homo sapien
gaggtaatgggatctttccgccaca

SEQ ID NO: 1352308 - DNA, 25 bp, Homo sapien
gaagcaggaactagaaggtccagag

SEQ ID NO: 1352309 - DNA, 25 bp, Homo sapien
caaagtgaacttggtcaaatctctc

SEQ ID NO: 1352310 - DNA, 25 bp, Homo sapien
gcaagaagttgggacccactagaag

SEQ ID NO: 1352311 - DNA, 25 bp, Homo sapien
tgtcaaacagcagcgtaggggcagc

SEQ ID NO: 1352312 - DNA, 25 bp, Homo sapien
tttgcacccaccgattgacggcctg

SEQ ID NO: 1352313 - DNA, 25 bp, Homo sapien
gattgacggcctgccctgaaaacaa

SEQ ID NO: 1352314 - DNA, 25 bp, Homo sapien
taggggcagcaactgagtggcaact

SEQ ID NO: 1352315 - DNA, 25 bp, Homo sapien
cgttgcttactgctactttgccttc

SEQ ID NO: 1352316 - DNA, 25 bp, Homo sapien
tcacccatttcctcctagcatgaga

SEQ ID NO: 1352317 - DNA, 25 bp, Homo sapien
catgagaacttgagctatcgtttcg

SEQ ID NO: 1352318 - DNA, 25 bp, Homo sapien
gctatcgtttcgttgcttactgcta

SEQ ID NO: 1352319 - DNA, 25 bp, Homo sapien
tgttctctccacctaggattttgga

SEQ ID NO: 1352320 - DNA, 25 bp, Homo sapien
acaaagggtcctgttctctccacct

SEQ ID NO: 1352321 - DNA, 25 bp, Homo sapien
tgtgaccatgactgtctcacaaagg

SEQ ID NO: 1352322 - DNA, 25 bp, Homo sapien
aatccttgtctctatcatgctgtat

SEQ ID NO: 1352323 - DNA, 25 bp, Homo sapien
caggtacaccacaaccatgatgagg

SEQ ID NO: 1352324 - DNA, 25 bp, Homo sapien
tgacgtacacgtagatccgcaggta

SEQ ID NO: 1352325 - DNA, 25 bp, Homo sapien
cattagcttcatgggtgtcctccgg

SEQ ID NO: 1352326 - DNA, 25 bp, Homo sapien
gatggacccacttgtatgcggagac

SEQ ID NO: 1352327 - DNA, 25 bp, Homo sapien
caaggtaactcctgctgtaaatggg

SEQ ID NO: 1352328 - DNA, 25 bp, Homo sapien
cagaaaacaaggtaactcctgctgt

SEQ ID NO: 1352329 - DNA, 25 bp, Homo sapien
cccagacaagcaaaatgagcagtgt

SEQ ID NO: 1352330 - DNA, 25 bp, Homo sapien
gaccgcccccataaaaatggcgatg

SEQ ID NO: 1352331 - DNA, 25 bp, Homo sapien
tatggacccgcatcctcatgattga

SEQ ID NO: 1352332 - DNA, 25 bp, Homo sapien
tgccgcgatgaccagagaattagaa

SEQ ID NO: 1352333 - DNA, 25 bp, Homo sapien
tctccacggcgataaccagcaagtt

SEQ ID NO: 1352334 - DNA, 25 bp, Homo sapien
caattccagcgaagaaatcggcagc

SEQ ID NO: 1352335 - DNA, 25 bp, Homo sapien
cccagttgcttgtgacccagtattt

SEQ ID NO: 1352336 - DNA, 25 bp, Homo sapien
tccatcagagctacccagttgcttg

SEQ ID NO: 1352337 - DNA, 25 bp, Homo sapien
tgttgcttaagaatttattgtccat

SEQ ID NO: 1352338 - DNA, 25 bp, Homo sapien
gcttgtgacccagtattttcttttg

SEQ ID NO: 1352339 - DNA, 25 bp, Homo sapien
tcttaaacagattccggtgaacaca

SEQ ID NO: 1352340 - DNA, 25 bp, Homo sapien
gatctccacaggataactagttcct

SEQ ID NO: 1352341 - DNA, 25 bp, Homo sapien
gcctggctacaatgctgtgtgtgca

SEQ ID NO: 1352342 - DNA, 25 bp, Homo sapien
caaatagttagacgtccagatctcc

SEQ ID NO: 1352343 - DNA, 25 bp, Homo sapien
cgctcacgttcacccgcgccgccga

SEQ ID NO: 1352344 - DNA, 25 bp, Homo sapien
ctcacgttcacccgcgccgccgagc

SEQ ID NO: 1352345 - DNA, 25 bp, Homo sapien
cacgttcacccgcgccgccgagccc

SEQ ID NO: 1352346 - DNA, 25 bp, Homo sapien
gctcacgttcacccgcgccgccgag

SEQ ID NO: 1352347 - DNA, 25 bp, Homo sapien
tgccgcatgccctcggggtcgagcg

SEQ ID NO: 1352348 - DNA, 25 bp, Homo sapien
ggcgggcggagcgcctcctctccag

SEQ ID NO: 1352349 - DNA, 25 bp, Homo sapien
cctcggggtcgagcgcgacggggcg

SEQ ID NO: 1352350 - DNA, 25 bp, Homo sapien
gcgcggagaagcagcggaggacgcg

SEQ ID NO: 1352351 - DNA, 25 bp, Homo sapien
gaactcgaggtaattgcaaagcaga

SEQ ID NO: 1352352 - DNA, 25 bp, Homo sapien
caaagcagaacagggatcccacaga

SEQ ID NO: 1352353 - DNA, 25 bp, Homo sapien
cttgggaacttcctgaactcgaggt

SEQ ID NO: 1352354 - DNA, 25 bp, Homo sapien
agggatcccacagagttgaatctga

SEQ ID NO: 1352355 - DNA, 25 bp, Homo sapien
agcatcactgggactggtctcaaca

SEQ ID NO: 1352356 - DNA, 25 bp, Homo sapien
atcactgggactggtctcaacacaa

SEQ ID NO: 1352357 - DNA, 25 bp, Homo sapien
agagtcggaaggagcatcactggga

SEQ ID NO: 1352358 - DNA, 25 bp, Homo sapien
tgggagagtcggaaggagcatcact

SEQ ID NO: 1352359 - DNA, 25 bp, Homo sapien
gatgggggacttttgcacacttaaa

SEQ ID NO: 1352360 - DNA, 25 bp, Homo sapien
gctgctcctctatggctaggtgtga

SEQ ID NO: 1352361 - DNA, 25 bp, Homo sapien
ttgtgacagcttgtgcacctcctgg

SEQ ID NO: 1352362 - DNA, 25 bp, Homo sapien
ctcttccatcaggactgacagctgt

SEQ ID NO: 1352363 - DNA, 25 bp, Homo sapien
cattagcacaagtgacgaggcagcc

SEQ ID NO: 1352364 - DNA, 25 bp, Homo sapien
aaggtaaatacccaacccagcagag

SEQ ID NO: 1352365 - DNA, 25 bp, Homo sapien
gaaatgtccactgcatgagcatgag

SEQ ID NO: 1352366 - DNA, 25 bp, Homo sapien
taaaatgagtgaccgctgctacagg

SEQ ID NO: 1352367 - DNA, 25 bp, Homo sapien
tgctcagccgctggataaggatgcc

SEQ ID NO: 1352368 - DNA, 25 bp, Homo sapien
tagttcaccagcttggactctctag

SEQ ID NO: 1352369 - DNA, 25 bp, Homo sapien
ggccaagggtgatctttaaacagct

SEQ ID NO: 1352370 - DNA, 25 bp, Homo sapien
tcatggtcagctggctaactgtgag

SEQ ID NO: 1352371 - DNA, 25 bp, Homo sapien
gctaataggtatcaagtgatcatca

SEQ ID NO: 1352372 - DNA, 25 bp, Homo sapien
ggtatcaagtgatcatcacttcttt

SEQ ID NO: 1352373 - DNA, 25 bp, Homo sapien
taataggtatcaagtgatcatcact

SEQ ID NO: 1352374 - DNA, 25 bp, Homo sapien
ttagctaataggtatcaagtgatca

SEQ ID NO: 1352375 - DNA, 25 bp, Homo sapien
tggggtccacgccttaaatctttca

SEQ ID NO: 1352376 - DNA, 25 bp, Homo sapien
tctttcacttgttccatagggctgc

SEQ ID NO: 1352377 - DNA, 25 bp, Homo sapien
aaatctttcacttgttccatagggc

SEQ ID NO: 1352378 - DNA, 25 bp, Homo sapien
tttcacttgttccatagggctgcat

SEQ ID NO: 1352379 - DNA, 25 bp, Homo sapien
aattcctgcaaatccgtttcaggaa

SEQ ID NO: 1352380 - DNA, 25 bp, Homo sapien
tctttgctactgcattccttcagga

SEQ ID NO: 1352381 - DNA, 25 bp, Homo sapien
gaattcctgcaaatccgtttcagga

SEQ ID NO: 1352382 - DNA, 25 bp, Homo sapien
tggaggctataatgaggtaggatta

SEQ ID NO: 1352383 - DNA, 25 bp, Homo sapien
gtaggattataccactgtcctccag

SEQ ID NO: 1352384 - DNA, 25 bp, Homo sapien
gaggtaggattataccactgtcctc

SEQ ID NO: 1352385 - DNA, 25 bp, Homo sapien
gagttggaggctataatgaggtagg

SEQ ID NO: 1352386 - DNA, 25 bp, Homo sapien
aatacagacgactgaacagccacac

SEQ ID NO: 1352387 - DNA, 25 bp, Homo sapien
ggaatataaatacagacgactgaac

SEQ ID NO: 1352388 - DNA, 25 bp, Homo sapien
taatggtgtcataagaatctgtaat

SEQ ID NO: 1352389 - DNA, 25 bp, Homo sapien
tgtaataagtgcaataaaaagactg

SEQ ID NO: 1352390 - DNA, 25 bp, Homo sapien
gtcatcaccgttgaccagagaaaac

SEQ ID NO: 1352391 - DNA, 25 bp, Homo sapien
catgtcatcaccgttgaccagagaa

SEQ ID NO: 1352392 - DNA, 25 bp, Homo sapien
aacatgtcatcaccgttgaccagag

SEQ ID NO: 1352393 - DNA, 25 bp, Homo sapien
gcaaacatgtcatcaccgttgacca

SEQ ID NO: 1352394 - DNA, 25 bp, Homo sapien
gctacacacaatatctgtctcaaca

SEQ ID NO: 1352395 - DNA, 25 bp, Homo sapien
ggctacacacaatatctgtctcaac

SEQ ID NO: 1352396 - DNA, 25 bp, Homo sapien
caggctacacacaatatctgtctca

SEQ ID NO: 1352397 - DNA, 25 bp, Homo sapien
acacacaatatctgtctcaacatta

SEQ ID NO: 1352398 - DNA, 25 bp, Homo sapien
caaattgagacgtgctatgtggata

SEQ ID NO: 1352399 - DNA, 25 bp, Homo sapien
gaatagccagcatccaatagatagc

SEQ ID NO: 1352400 - DNA, 25 bp, Homo sapien
gaatgaagccgattacatggctgtc

SEQ ID NO: 1352401 - DNA, 25 bp, Homo sapien
tataggcaaggctctcaattgtagc

SEQ ID NO: 1352402 - DNA, 25 bp, Homo sapien
caatatcctgtagtcacttctatat

SEQ ID NO: 1352403 - DNA, 25 bp, Homo sapien
tcaatatcctgtagtcacttctata

SEQ ID NO: 1352404 - DNA, 25 bp, Homo sapien
aatatcctgtagtcacttctatatc

SEQ ID NO: 1352405 - DNA, 25 bp, Homo sapien
agacaatccagccacagaatgtgta

SEQ ID NO: 1352406 - DNA, 25 bp, Homo sapien
gataaatcataccagcacaagcaca

SEQ ID NO: 1352407 - DNA, 25 bp, Homo sapien
gaggcctgcattgttaaaatcagca

SEQ ID NO: 1352408 - DNA, 25 bp, Homo sapien
ccgaagaacttttggcagtgaggcc

SEQ ID NO: 1352409 - DNA, 25 bp, Homo sapien
gctgcagagatcatagtttgtgaga

SEQ ID NO: 1352410 - DNA, 25 bp, Homo sapien
tccaacccaaaccaagagcgtagag

SEQ ID NO: 1352411 - DNA, 25 bp, Homo sapien
ccaagagcgtagaggttccaagaaa

SEQ ID NO: 1352412 - DNA, 25 bp, Homo sapien
aataacccaggtatctgatgactcc

SEQ ID NO: 1352413 - DNA, 25 bp, Homo sapien
ccaggacataccagccgttgatgaa

SEQ ID NO: 1352414 - DNA, 25 bp, Homo sapien
ttttaatatggagccaatgattgtc

SEQ ID NO: 1352415 - DNA, 25 bp, Homo sapien
tcggtgtcacacacaggccgcttgt

SEQ ID NO: 1352416 - DNA, 25 bp, Homo sapien
taggtcgctgataatcaccaggaca

SEQ ID NO: 1352417 - DNA, 25 bp, Homo sapien
tggaggttacggcacacactttccc

SEQ ID NO: 1352418 - DNA, 25 bp, Homo sapien
cagatccacctcgaaagtggaggtt

SEQ ID NO: 1352419 - DNA, 25 bp, Homo sapien
tgccagatccacctcgaaagtggag

SEQ ID NO: 1352420 - DNA, 25 bp, Homo sapien
atccacctcgaaagtggaggttacg

SEQ ID NO: 1352421 - DNA, 25 bp, Homo sapien
aaacaccaggacatactgagcattt

SEQ ID NO: 1352422 - DNA, 25 bp, Homo sapien
atgcatcaaacaccaggacatactg

SEQ ID NO: 1352423 - DNA, 25 bp, Homo sapien
aatgcatcaaacaccaggacatact

SEQ ID NO: 1352424 - DNA, 25 bp, Homo sapien
acaccaggacatactgagcattttt

SEQ ID NO: 1352425 - DNA, 25 bp, Homo sapien
tagatccaaatatgttcaagtcttt

SEQ ID NO: 1352426 - DNA, 25 bp, Homo sapien
gtctttacattcttcaattttggca

SEQ ID NO: 1352427 - DNA, 25 bp, Homo sapien
tttacattcttcaattttggcatca

SEQ ID NO: 1352428 - DNA, 25 bp, Homo sapien
tccaaatatgttcaagtctttacat

SEQ ID NO: 1352429 - DNA, 25 bp, Homo sapien
cactgtgagctttattgtcaaagat

SEQ ID NO: 1352430 - DNA, 25 bp, Homo sapien
ccactgtgagctttattgtcaaaga

SEQ ID NO: 1352431 - DNA, 25 bp, Homo sapien
gccactgtgagctttattgtcaaag

SEQ ID NO: 1352432 - DNA, 25 bp, Homo sapien
tattctgaaagacataacagtctgg

SEQ ID NO: 1352433 - DNA, 25 bp, Homo sapien
gacataacagtctggtaactcacgg

SEQ ID NO: 1352434 - DNA, 25 bp, Homo sapien
taactcacgggaatgaattgtctgt

SEQ ID NO: 1352435 - DNA, 25 bp, Homo sapien
cagtctggtaactcacgggaatgaa

SEQ ID NO: 1352436 - DNA, 25 bp, Homo sapien
ctttaagatgaaaggagatttcaac

SEQ ID NO: 1352437 - DNA, 25 bp, Homo sapien
gagttcttccagtccggaggcttct

SEQ ID NO: 1352438 - DNA, 25 bp, Homo sapien
ggtcctgaaggtctaattgaacaca

SEQ ID NO: 1352439 - DNA, 25 bp, Homo sapien
tgaagaatgatgagttcttccagtc

SEQ ID NO: 1352440 - DNA, 25 bp, Homo sapien
gcttcttggagaggtcctgaaggtc

SEQ ID NO: 1352441 - DNA, 25 bp, Homo sapien
tacaaggtaatttcacagtgtgaga

SEQ ID NO: 1352442 - DNA, 25 bp, Homo sapien
tgaacaagaataactaagagggtga

SEQ ID NO: 1352443 - DNA, 25 bp, Homo sapien
gaacaagacagacatggttaccatc

SEQ ID NO: 1352444 - DNA, 25 bp, Homo sapien
ctaggcactgaaggtaaagcaatga

SEQ ID NO: 1352445 - DNA, 25 bp, Homo sapien
gtaatgctgcttacagacttttaag

SEQ ID NO: 1352446 - DNA, 25 bp, Homo sapien
tcaacgtcgttgtcaatattcagtg

SEQ ID NO: 1352447 - DNA, 25 bp, Homo sapien
ttcagtgtctcattagaaggaaaca

SEQ ID NO: 1352448 - DNA, 25 bp, Homo sapien
gaaacatggtccctttcttgtaatg

SEQ ID NO: 1352449 - DNA, 25 bp, Homo sapien
tctagatacaactattttatattcc

SEQ ID NO: 1352450 - DNA, 25 bp, Homo sapien
tagatacaactattttatattccat

SEQ ID NO: 1352451 - DNA, 25 bp, Homo sapien
gtctagatacaactattttatattc

SEQ ID NO: 1352452 - DNA, 25 bp, Homo sapien
ctgtctagatacaactattttatat

SEQ ID NO: 1352453 - DNA, 25 bp, Homo sapien
tacactgcagctgtagtcatcttca

SEQ ID NO: 1352454 - DNA, 25 bp, Homo sapien
ctttgaaagcaaccaccagctggtt

SEQ ID NO: 1352455 - DNA, 25 bp, Homo sapien
catctgtaccagaatatcctttcaa

SEQ ID NO: 1352456 - DNA, 25 bp, Homo sapien
gatgctctcataggcatcctcttga

SEQ ID NO: 1352457 - DNA, 25 bp, Homo sapien
tccacggaatctggcgtctggctcg

SEQ ID NO: 1352458 - DNA, 25 bp, Homo sapien
tttcatctcagaatcacgatgtgcc

SEQ ID NO: 1352459 - DNA, 25 bp, Homo sapien
tgcaaacccagtttccacggaatct

SEQ ID NO: 1352460 - DNA, 25 bp, Homo sapien
tggctcggtatttttcacaagggct

SEQ ID NO: 1352461 - DNA, 25 bp, Homo sapien
gctaataagagagataggccccaat

SEQ ID NO: 1352462 - DNA, 25 bp, Homo sapien
ggacacttcatccaatggctacaga

SEQ ID NO: 1352463 - DNA, 25 bp, Homo sapien
taaagtggcaagagtaggtccttaa

SEQ ID NO: 1352464 - DNA, 25 bp, Homo sapien
tagggttaggttgttatcagctcaa

SEQ ID NO: 1352465 - DNA, 25 bp, Homo sapien
tgtgtccagcccacctgaggatttt

SEQ ID NO: 1352466 - DNA, 25 bp, Homo sapien
ctgtgtccagcccacctgaggattt

SEQ ID NO: 1352467 - DNA, 25 bp, Homo sapien
ccactgtgtccagcccacctgagga

SEQ ID NO: 1352468 - DNA, 25 bp, Homo sapien
actgtgtccagcccacctgaggatt

SEQ ID NO: 1352469 - DNA, 25 bp, Homo sapien
taaaattacaggcacacctcagaga

SEQ ID NO: 1352470 - DNA, 25 bp, Homo sapien
aagtacttcatactaaaaaatgcta

SEQ ID NO: 1352471 - DNA, 25 bp, Homo sapien
tagtttgataagatgaagtctggaa

SEQ ID NO: 1352472 - DNA, 25 bp, Homo sapien
cattgtagtttgataagatgaagtc

SEQ ID NO: 1352473 - DNA, 25 bp, Homo sapien
ttccagggctctcgggattcggaac

SEQ ID NO: 1352474 - DNA, 25 bp, Homo sapien
ggaaaacgataaggctgccgggcca

SEQ ID NO: 1352475 - DNA, 25 bp, Homo sapien
gaaacaccgttcacggccgactcat

SEQ ID NO: 1352476 - DNA, 25 bp, Homo sapien
cgccgtaacgcgtccgccgaagttg

SEQ ID NO: 1352477 - DNA, 25 bp, Homo sapien
tgcaaagcggggttcccttctctta

SEQ ID NO: 1352478 - DNA, 25 bp, Homo sapien
ctgcaaagcggggttcccttctctt

SEQ ID NO: 1352479 - DNA, 25 bp, Homo sapien
ggcccgagagcaggcgccgcagtcg

SEQ ID NO: 1352480 - DNA, 25 bp, Homo sapien
gcgggcagttctcgggcggctgaaa

SEQ ID NO: 1352481 - DNA, 25 bp, Homo sapien
cagtcgtggagtgcggcgggcagtt

SEQ ID NO: 1352482 - DNA, 25 bp, Homo sapien
tttctgccggccgcgtggtgcgcgc

SEQ ID NO: 1352483 - DNA, 25 bp, Homo sapien
ccgaggcgcggttgcacaccggcag

SEQ ID NO: 1352484 - DNA, 25 bp, Homo sapien
ggacaggcccgaggcgcggttgcac

SEQ ID NO: 1352485 - DNA, 25 bp, Homo sapien
acaggcccgaggcgcggttgcacac

SEQ ID NO: 1352486 - DNA, 25 bp, Homo sapien
cgcggttgcacaccggcaggtccag

SEQ ID NO: 1352487 - DNA, 25 bp, Homo sapien
aacgctgcggtacggcccgctttgg

SEQ ID NO: 1352488 - DNA, 25 bp, Homo sapien
ggtgtctgccggagaagcgccttac

SEQ ID NO: 1352489 - DNA, 25 bp, Homo sapien
ggagaagcgccttacagagggaccc

SEQ ID NO: 1352490 - DNA, 25 bp, Homo sapien
aggacacctagcgtgggacggctac

SEQ ID NO: 1352491 - DNA, 25 bp, Homo sapien
tccacgttgatatctataagcccat

SEQ ID NO: 1352492 - DNA, 25 bp, Homo sapien
ttatctgttcctggttgagctctgg

SEQ ID NO: 1352493 - DNA, 25 bp, Homo sapien
tgtagcccaacaaagggatttatct

SEQ ID NO: 1352494 - DNA, 25 bp, Homo sapien
tcttgagtgatagaagaccattctg

SEQ ID NO: 1352495 - DNA, 25 bp, Homo sapien
gaagagctattctctcatggacatc

SEQ ID NO: 1352496 - DNA, 25 bp, Homo sapien
ctctcatggacatcattactaaaaa

SEQ ID NO: 1352497 - DNA, 25 bp, Homo sapien
tctcatggacatcattactaaaaat

SEQ ID NO: 1352498 - DNA, 25 bp, Homo sapien
ctcatggacatcattactaaaaatt

SEQ ID NO: 1352499 - DNA, 25 bp, Homo sapien
tatcacattgttagctggtgcgctc

SEQ ID NO: 1352500 - DNA, 25 bp, Homo sapien
tagcaggagcaacagtatcagagca

SEQ ID NO: 1352501 - DNA, 25 bp, Homo sapien
agatttgtaccccaggaccaacagg

SEQ ID NO: 1352502 - DNA, 25 bp, Homo sapien
catccttaagtgacatatggccgta

SEQ ID NO: 1352503 - DNA, 25 bp, Homo sapien
ataaatgtacgaagttcagtctctg

SEQ ID NO: 1352504 - DNA, 25 bp, Homo sapien
gatactggagggtcatcttctaatc

SEQ ID NO: 1352505 - DNA, 25 bp, Homo sapien
tctgatataaatgtacgaagttcag

SEQ ID NO: 1352506 - DNA, 25 bp, Homo sapien
agttgggtagatctttgcattctga

SEQ ID NO: 1352507 - DNA, 25 bp, Homo sapien
tgtagcctctagagtcactcaggtt

SEQ ID NO: 1352508 - DNA, 25 bp, Homo sapien
gatgtagcctctagagtcactcagg

SEQ ID NO: 1352509 - DNA, 25 bp, Homo sapien
aggagatgtagcctctagagtcact

SEQ ID NO: 1352510 - DNA, 25 bp, Homo sapien
caaaggagatgtagcctctagagtc

SEQ ID NO: 1352511 - DNA, 25 bp, Homo sapien
aaatgggcacactgagtcgaagtct

SEQ ID NO: 1352512 - DNA, 25 bp, Homo sapien
tgggcacactgagtcgaagtctgag

SEQ ID NO: 1352513 - DNA, 25 bp, Homo sapien
ggcacactgagtcgaagtctgagtc

SEQ ID NO: 1352514 - DNA, 25 bp, Homo sapien
acactgagtcgaagtctgagtcgtc

SEQ ID NO: 1352515 - DNA, 25 bp, Homo sapien
gagaattgagctagccccatcccaa

SEQ ID NO: 1352516 - DNA, 25 bp, Homo sapien
tccgagaacctctgtcactactctg

SEQ ID NO: 1352517 - DNA, 25 bp, Homo sapien
acttccagaccagtgtgatgcaggc

SEQ ID NO: 1352518 - DNA, 25 bp, Homo sapien
agccccatcccaagtccgagaacct

SEQ ID NO: 1352519 - DNA, 25 bp, Homo sapien
cagtgatcagtgcaatgaaaagact

SEQ ID NO: 1352520 - DNA, 25 bp, Homo sapien
tgctgcatttttgcaaacgtggcaa

SEQ ID NO: 1352521 - DNA, 25 bp, Homo sapien
ttaattgtttcgtatgtatcagtga

SEQ ID NO: 1352522 - DNA, 25 bp, Homo sapien
tactaaacagccagactaagtaact

SEQ ID NO: 1352523 - DNA, 25 bp, Homo sapien
gactgcttttggatatatcgatgaa

SEQ ID NO: 1352524 - DNA, 25 bp, Homo sapien
tttgagaaggcttatctgaagagac

SEQ ID NO: 1352525 - DNA, 25 bp, Homo sapien
tcgatgaatcaaattgactaaactt

SEQ ID NO: 1352526 - DNA, 25 bp, Homo sapien
gaaggcttatctgaagagactgctt

SEQ ID NO: 1352527 - DNA, 25 bp, Homo sapien
tccacagaagcagtaacctaagtaa

SEQ ID NO: 1352528 - DNA, 25 bp, Homo sapien
ctaagtaaatcatagctgcacagca

SEQ ID NO: 1352529 - DNA, 25 bp, Homo sapien
acctgatgacattgggcagcgctgc

SEQ ID NO: 1352530 - DNA, 25 bp, Homo sapien
gaacctgatgacattgggcagcgct

SEQ ID NO: 1352531 - DNA, 25 bp, Homo sapien
tgtactttgcaaagaaaccgaggta

SEQ ID NO: 1352532 - DNA, 25 bp, Homo sapien
cacgagcatggtagaagtcccaaga

SEQ ID NO: 1352533 - DNA, 25 bp, Homo sapien
tcccaagaagtatgctacagacatc

SEQ ID NO: 1352534 - DNA, 25 bp, Homo sapien
tgactccaagccacacgagcatggt

SEQ ID NO: 1352535 - DNA, 25 bp, Homo sapien
caaggatattgcatctggctggagt

SEQ ID NO: 1352536 - DNA, 25 bp, Homo sapien
agacacatgccaccttgactgctaa

SEQ ID NO: 1352537 - DNA, 25 bp, Homo sapien
ggtggcactcaccaagtttgtcttt

SEQ ID NO: 1352538 - DNA, 25 bp, Homo sapien
cagttatagagataaggtggcactc

SEQ ID NO: 1352539 - DNA, 25 bp, Homo sapien
caacctgtttgaggcaacacggcaa

SEQ ID NO: 1352540 - DNA, 25 bp, Homo sapien
tgtacagaaataaagtcggccactc

SEQ ID NO: 1352541 - DNA, 25 bp, Homo sapien
tagtggcagctgctaagtgtcaacc

SEQ ID NO: 1352542 - DNA, 25 bp, Homo sapien
tgggagagcttctaccataccgtgt

SEQ ID NO: 1352543 - DNA, 25 bp, Homo sapien
ccaatgattgtcaatatgtcactaa

SEQ ID NO: 1352544 - DNA, 25 bp, Homo sapien
taataatcataatgtaccatccatt

SEQ ID NO: 1352545 - DNA, 25 bp, Homo sapien
atcataatgtaccatccattgacaa

SEQ ID NO: 1352546 - DNA, 25 bp, Homo sapien
ccatttttagaattgatccaatgat

SEQ ID NO: 1352547 - DNA, 25 bp, Homo sapien
aagaggggaggcacagtgaatgtct

SEQ ID NO: 1352548 - DNA, 25 bp, Homo sapien
agaggggaggcacagtgaatgtctc

SEQ ID NO: 1352549 - DNA, 25 bp, Homo sapien
aaagaggggaggcacagtgaatgtc

SEQ ID NO: 1352550 - DNA, 25 bp, Homo sapien
gaggggaggcacagtgaatgtctct

SEQ ID NO: 1352551 - DNA, 25 bp, Homo sapien
ctgctgaagctgaagtcctctaatc

SEQ ID NO: 1352552 - DNA, 25 bp, Homo sapien
ccaagcaagtcagaatgacaaaggc

SEQ ID NO: 1352553 - DNA, 25 bp, Homo sapien
gacaaaggcatcaaagatcatcatg

SEQ ID NO: 1352554 - DNA, 25 bp, Homo sapien
tcctctaatcacagatctaatgcag

SEQ ID NO: 1352555 - DNA, 25 bp, Homo sapien
ttgatccagatacatgccagtcttt

SEQ ID NO: 1352556 - DNA, 25 bp, Homo sapien
atccagatacatgccagtctttaca

SEQ ID NO: 1352557 - DNA, 25 bp, Homo sapien
gatacatgccagtctttacattctc

SEQ ID NO: 1352558 - DNA, 25 bp, Homo sapien
cagatacatgccagtctttacattc

SEQ ID NO: 1352559 - DNA, 25 bp, Homo sapien
gcaggacaaagctaggccagaacac

SEQ ID NO: 1352560 - DNA, 25 bp, Homo sapien
tctgttcaaccatgggaagttctct

SEQ ID NO: 1352561 - DNA, 25 bp, Homo sapien
ttgcttcaagaataaccacttcagg

SEQ ID NO: 1352562 - DNA, 25 bp, Homo sapien
taaaacattatatgtctagggcagc

SEQ ID NO: 1352563 - DNA, 25 bp, Homo sapien
tagccaaggaaactacctttagcaa

SEQ ID NO: 1352564 - DNA, 25 bp, Homo sapien
tcaacctacaattctatagccaagg

SEQ ID NO: 1352565 - DNA, 25 bp, Homo sapien
gatccaagatgctcaatgaacctta

SEQ ID NO: 1352566 - DNA, 25 bp, Homo sapien
taatgcaagctagaagcaacatctt

SEQ ID NO: 1352567 - DNA, 25 bp, Homo sapien
cagtcagggagttcttgatgacgaa

SEQ ID NO: 1352568 - DNA, 25 bp, Homo sapien
actgtctgcagattaatggctttca

SEQ ID NO: 1352569 - DNA, 25 bp, Homo sapien
agtcagagtaaagtcataacagtca

SEQ ID NO: 1352570 - DNA, 25 bp, Homo sapien
tcagtttaaactgaagctccactgt

SEQ ID NO: 1352571 - DNA, 25 bp, Homo sapien
tgtcccaatgtgaaaaggttcatct

SEQ ID NO: 1352572 - DNA, 25 bp, Homo sapien
tggtgtcccaatgtgaaaaggttca

SEQ ID NO: 1352573 - DNA, 25 bp, Homo sapien
tgctggtgtcccaatgtgaaaaggt

SEQ ID NO: 1352574 - DNA, 25 bp, Homo sapien
cccaatgtgaaaaggttcatctggc

SEQ ID NO: 1352575 - DNA, 25 bp, Homo sapien
gtttcctcgcttgtagaagtgctga

SEQ ID NO: 1352576 - DNA, 25 bp, Homo sapien
cataagcatgattcccaacggagac

SEQ ID NO: 1352577 - DNA, 25 bp, Homo sapien
tcaatttctggatcgatgtcaaagg

SEQ ID NO: 1352578 - DNA, 25 bp, Homo sapien
catttccagggtagatgtttcctcg

SEQ ID NO: 1352579 - DNA, 25 bp, Homo sapien
agggccttctgttgccacgccttca

SEQ ID NO: 1352580 - DNA, 25 bp, Homo sapien
gactactgttattgccttatgctag

SEQ ID NO: 1352581 - DNA, 25 bp, Homo sapien
tgttgccacgccttcagcttgaaat

SEQ ID NO: 1352582 - DNA, 25 bp, Homo sapien
cattttctgaccactccgagactac

SEQ ID NO: 1352583 - DNA, 25 bp, Homo sapien
ggtttactgcgaagattaactgatc

SEQ ID NO: 1352584 - DNA, 25 bp, Homo sapien
aactgatcatacacgtcactttgtg

SEQ ID NO: 1352585 - DNA, 25 bp, Homo sapien
cttccttgaaagctaccaccatctg

SEQ ID NO: 1352586 - DNA, 25 bp, Homo sapien
gcatatgtgtcatccattcggtcca

SEQ ID NO: 1352587 - DNA, 25 bp, Homo sapien
catggttttctacctcgagcccaga

SEQ ID NO: 1352588 - DNA, 25 bp, Homo sapien
tcctcttcatgagagctgcagctac

SEQ ID NO: 1352589 - DNA, 25 bp, Homo sapien
tgcagctactcacaactacctcagg

SEQ ID NO: 1352590 - DNA, 25 bp, Homo sapien
ggatagtcaccattgcaatttttag

SEQ ID NO: 1352591 - DNA, 25 bp, Homo sapien
ctgaaggaggtattcgcagccagcc

SEQ ID NO: 1352592 - DNA, 25 bp, Homo sapien
gccatccggagaggctaccgaagta

SEQ ID NO: 1352593 - DNA, 25 bp, Homo sapien
gaaaagtcaggtttacccagtctga

SEQ ID NO: 1352594 - DNA, 25 bp, Homo sapien
taccgaagtatctatcaggcatgct

SEQ ID NO: 1352595 - DNA, 25 bp, Homo sapien
tcctggcgggcagaggcttgattgg

SEQ ID NO: 1352596 - DNA, 25 bp, Homo sapien
cgggcagaggcttgattggagtaag

SEQ ID NO: 1352597 - DNA, 25 bp, Homo sapien
ggcgggcagaggcttgattggagta

SEQ ID NO: 1352598 - DNA, 25 bp, Homo sapien
ctgttcctggcgggcagaggcttga

SEQ ID NO: 1352599 - DNA, 25 bp, Homo sapien
agccagcgcagcgacccgggcctga

SEQ ID NO: 1352600 - DNA, 25 bp, Homo sapien
ccagcgcagcgacccgggcctgagc

SEQ ID NO: 1352601 - DNA, 25 bp, Homo sapien
ggcggctgctttcagccagcgcagc

SEQ ID NO: 1352602 - DNA, 25 bp, Homo sapien
ctggcggctgctttcagccagcgca

SEQ ID NO: 1352603 - DNA, 25 bp, Homo sapien
agccgagccgcgtcaaggccatctg

SEQ ID NO: 1352604 - DNA, 25 bp, Homo sapien
tccgccttgaaaggggccagccgag

SEQ ID NO: 1352605 - DNA, 25 bp, Homo sapien
cgagccgcgtcaaggccatctggag

SEQ ID NO: 1352606 - DNA, 25 bp, Homo sapien
ctctaacagggggacagtccgcctt

SEQ ID NO: 1352607 - DNA, 25 bp, Homo sapien
ggcgcggaacagctgcatctcgcgc

SEQ ID NO: 1352608 - DNA, 25 bp, Homo sapien
gcggcgcggaacagctgcatctcgc

SEQ ID NO: 1352609 - DNA, 25 bp, Homo sapien
gggggcggcgcggaacagctgcatc

SEQ ID NO: 1352610 - DNA, 25 bp, Homo sapien
gaacagctgcatctcgcgcccagct

SEQ ID NO: 1352611 - DNA, 25 bp, Homo sapien
ggcgagggcgcagggcgagtcagcg

SEQ ID NO: 1352612 - DNA, 25 bp, Homo sapien
gcgagtcagcgagcgactccagcag

SEQ ID NO: 1352613 - DNA, 25 bp, Homo sapien
gcagctccggtgtccgcggcgaggg

SEQ ID NO: 1352614 - DNA, 25 bp, Homo sapien
gcgcagggcgagtcagcgagcgact

SEQ ID NO: 1352615 - DNA, 25 bp, Homo sapien
cacatgtcaacggagagaccctgtg

SEQ ID NO: 1352616 - DNA, 25 bp, Homo sapien
acatgtcaacggagagaccctgtgg

SEQ ID NO: 1352617 - DNA, 25 bp, Homo sapien
catgtcaacggagagaccctgtggg

SEQ ID NO: 1352618 - DNA, 25 bp, Homo sapien
ccatgtgggcggtttcccccaggct

SEQ ID NO: 1352619 - DNA, 25 bp, Homo sapien
tctgactcagtaagtcgggtggagc

SEQ ID NO: 1352620 - DNA, 25 bp, Homo sapien
tcactggatcacactttaagtggcc

SEQ ID NO: 1352621 - DNA, 25 bp, Homo sapien
gactcaattaggcaatgactggtag

SEQ ID NO: 1352622 - DNA, 25 bp, Homo sapien
gactggtagtgtaatgatcaatgac

SEQ ID NO: 1352623 - DNA, 25 bp, Homo sapien
ccagacttggccctgttaactagaa

SEQ ID NO: 1352624 - DNA, 25 bp, Homo sapien
ttctgaccagacttggccctgttaa

SEQ ID NO: 1352625 - DNA, 25 bp, Homo sapien
tttggtcacactgccgactatccgc

SEQ ID NO: 1352626 - DNA, 25 bp, Homo sapien
tgttaactagaatatactcataagg

SEQ ID NO: 1352627 - DNA, 25 bp, Homo sapien
tgaactttagcttcagctgtgtact

SEQ ID NO: 1352628 - DNA, 25 bp, Homo sapien
tttcctcattggtaacacagtctac

SEQ ID NO: 1352629 - DNA, 25 bp, Homo sapien
tagcttcagctgtgtactttcctca

SEQ ID NO: 1352630 - DNA, 25 bp, Homo sapien
tcagctgtgtactttcctcattggt

SEQ ID NO: 1352631 - DNA, 25 bp, Homo sapien
ggaaccgacaaaggctcagtcttag

SEQ ID NO: 1352632 - DNA, 25 bp, Homo sapien
tcaagtatgcccagtgggcccagcc

SEQ ID NO: 1352633 - DNA, 25 bp, Homo sapien
gaaatacaagttttgaggcagcagg

SEQ ID NO: 1352634 - DNA, 25 bp, Homo sapien
agagagagtcaacttcagccaggag

SEQ ID NO: 1352635 - DNA, 25 bp, Homo sapien
caacagcagtgtcataaccaggtat

SEQ ID NO: 1352636 - DNA, 25 bp, Homo sapien
gggtccccagtgttgctagagccag

SEQ ID NO: 1352637 - DNA, 25 bp, Homo sapien
gcacttagacctgttgatggctggg

SEQ ID NO: 1352638 - DNA, 25 bp, Homo sapien
tccaatgcagtttaagacacacagc

SEQ ID NO: 1352639 - DNA, 25 bp, Homo sapien
tcatacatgatatagcaacaaaagg

SEQ ID NO: 1352640 - DNA, 25 bp, Homo sapien
tttttcaatggctgccatgtcttaa

SEQ ID NO: 1352641 - DNA, 25 bp, Homo sapien
tgccatgtcttaaaagttggtaact

SEQ ID NO: 1352642 - DNA, 25 bp, Homo sapien
gtactttcctttgactgtttactca

SEQ ID NO: 1352643 - DNA, 25 bp, Homo sapien
catgtgattctacaataacccctcc

SEQ ID NO: 1352644 - DNA, 25 bp, Homo sapien
gaccaaaggatgttgcagtgtacca

SEQ ID NO: 1352645 - DNA, 25 bp, Homo sapien
ctaaaagaacatctagaggccaggc

SEQ ID NO: 1352646 - DNA, 25 bp, Homo sapien
cagtgtaccaggaccagtactgcaa

SEQ ID NO: 1352647 - DNA, 25 bp, Homo sapien
taagtgcatttgaaagttatctcca

SEQ ID NO: 1352648 - DNA, 25 bp, Homo sapien
tctcagctacagaagagtggttccc

SEQ ID NO: 1352649 - DNA, 25 bp, Homo sapien
tctccatagagttggcaagatttag

SEQ ID NO: 1352650 - DNA, 25 bp, Homo sapien
gaagtccaagttttattgatcccca

SEQ ID NO: 1352651 - DNA, 25 bp, Homo sapien
aaacagatttgaaactttaagacat

SEQ ID NO: 1352652 - DNA, 25 bp, Homo sapien
gatttgaaactttaagacattacaa

SEQ ID NO: 1352653 - DNA, 25 bp, Homo sapien
cagatttgaaactttaagacattac

SEQ ID NO: 1352654 - DNA, 25 bp, Homo sapien
aacagatttgaaactttaagacatt

SEQ ID NO: 1352655 - DNA, 25 bp, Homo sapien
tcaaaaactcatattaagcttgttt

SEQ ID NO: 1352656 - DNA, 25 bp, Homo sapien
ttaagcttgtttttgttgagctcac

SEQ ID NO: 1352657 - DNA, 25 bp, Homo sapien
caaaaactcatattaagcttgtttt

SEQ ID NO: 1352658 - DNA, 25 bp, Homo sapien
tcatattaagcttgtttttgttgag

SEQ ID NO: 1352659 - DNA, 25 bp, Homo sapien
actttcttgtagatctttgagattg

SEQ ID NO: 1352660 - DNA, 25 bp, Homo sapien
ttgagattgttttttcgatccactg

SEQ ID NO: 1352661 - DNA, 25 bp, Homo sapien
gactcaactgtctgcattgtcaaat

SEQ ID NO: 1352662 - DNA, 25 bp, Homo sapien
tttttcgatccactgtagactcaac

SEQ ID NO: 1352663 - DNA, 25 bp, Homo sapien
tttggacatgggaattggctgttca

SEQ ID NO: 1352664 - DNA, 25 bp, Homo sapien
tgggaattggctgttcaatcattac

SEQ ID NO: 1352665 - DNA, 25 bp, Homo sapien
gacatgggaattggctgttcaatca

SEQ ID NO: 1352666 - DNA, 25 bp, Homo sapien
gaattggctgttcaatcattacttc

SEQ ID NO: 1352667 - DNA, 25 bp, Homo sapien
tcaaatttaacatatgaggtcgttc

SEQ ID NO: 1352668 - DNA, 25 bp, Homo sapien
cctaagtactcctgatgaatcagta

SEQ ID NO: 1352669 - DNA, 25 bp, Homo sapien
ccagtctcctgcataacgattgcta

SEQ ID NO: 1352670 - DNA, 25 bp, Homo sapien
agtggactgtctaatcggttttgcc

SEQ ID NO: 1352671 - DNA, 25 bp, Homo sapien
ctgttgattttttgacagttaaacg

SEQ ID NO: 1352672 - DNA, 25 bp, Homo sapien
atctaaagggcaggtatcaattcac

SEQ ID NO: 1352673 - DNA, 25 bp, Homo sapien
aaagatgatacaaggctctaagacg

SEQ ID NO: 1352674 - DNA, 25 bp, Homo sapien
tgtcaagagctacactgagcacatt

SEQ ID NO: 1352675 - DNA, 25 bp, Homo sapien
cccaaggtcagattgctaataagtg

SEQ ID NO: 1352676 - DNA, 25 bp, Homo sapien
ctggccagagttggagtaagtaatg

SEQ ID NO: 1352677 - DNA, 25 bp, Homo sapien
aataatactggtccaaagcacacag

SEQ ID NO: 1352678 - DNA, 25 bp, Homo sapien
caaagcacttgcaagttcttctgaa

SEQ ID NO: 1352679 - DNA, 25 bp, Homo sapien
taagtaatgaagaacttcaatgtgt

SEQ ID NO: 1352680 - DNA, 25 bp, Homo sapien
cttcatgataggaagccaccaattt

SEQ ID NO: 1352681 - DNA, 25 bp, Homo sapien
acttcatgataggaagccaccaatt

SEQ ID NO: 1352682 - DNA, 25 bp, Homo sapien
ttcatgataggaagccaccaatttc

SEQ ID NO: 1352683 - DNA, 25 bp, Homo sapien
cacttcatgataggaagccaccaat

SEQ ID NO: 1352684 - DNA, 25 bp, Homo sapien
ccaaatttcagctggaatccctggg

SEQ ID NO: 1352685 - DNA, 25 bp, Homo sapien
atccctgggaaaatgcgtccattac

SEQ ID NO: 1352686 - DNA, 25 bp, Homo sapien
caaatttcagctggaatccctggga

SEQ ID NO: 1352687 - DNA, 25 bp, Homo sapien
tggaatccctgggaaaatgcgtcca

SEQ ID NO: 1352688 - DNA, 25 bp, Homo sapien
tctttctcttctaacatggcaacag

SEQ ID NO: 1352689 - DNA, 25 bp, Homo sapien
gttcatttttaagtacagataagtc

SEQ ID NO: 1352690 - DNA, 25 bp, Homo sapien
acatggcaacagcaaaggctgtgat

SEQ ID NO: 1352691 - DNA, 25 bp, Homo sapien
gctgtgatgaaaaggggattagggt

SEQ ID NO: 1352692 - DNA, 25 bp, Homo sapien
ctcaatctctggcagacaatccagc

SEQ ID NO: 1352693 - DNA, 25 bp, Homo sapien
aggtcaacagtgtacttagagtcac

SEQ ID NO: 1352694 - DNA, 25 bp, Homo sapien
gcaggtcaacagtgtacttagagtc

SEQ ID NO: 1352695 - DNA, 25 bp, Homo sapien
caatctctggcagacaatccagcag

SEQ ID NO: 1352696 - DNA, 25 bp, Homo sapien
tgctttgttatcagaggagaaggga

SEQ ID NO: 1352697 - DNA, 25 bp, Homo sapien
cagaggagaagggagttctcttaaa

SEQ ID NO: 1352698 - DNA, 25 bp, Homo sapien
tttgccattgcatctaatacagcct

SEQ ID NO: 1352699 - DNA, 25 bp, Homo sapien
tctcacaaccatttgatgacatttt

SEQ ID NO: 1352700 - DNA, 25 bp, Homo sapien
caaaccgcagacagttggtgattgg

SEQ ID NO: 1352701 - DNA, 25 bp, Homo sapien
aaaccgcagacagttggtgattgga

SEQ ID NO: 1352702 - DNA, 25 bp, Homo sapien
gagttaatgttccagaggtcagaga

SEQ ID NO: 1352703 - DNA, 25 bp, Homo sapien
tgcaatctaggtaaaggaaaacgga

SEQ ID NO: 1352704 - DNA, 25 bp, Homo sapien
ggtgcttgcacagttttgacatcta

SEQ ID NO: 1352705 - DNA, 25 bp, Homo sapien
aagaattatgaataggctgggcgca

SEQ ID NO: 1352706 - DNA, 25 bp, Homo sapien
tataagacaaagcttcaccaagacc

SEQ ID NO: 1352707 - DNA, 25 bp, Homo sapien
cactggctaactcctcaaatcaaca

SEQ ID NO: 1352708 - DNA, 25 bp, Homo sapien
tttttagccatgaaaaccttgtgtc

SEQ ID NO: 1352709 - DNA, 25 bp, Homo sapien
cacattaagcatcactgtcactggc

SEQ ID NO: 1352710 - DNA, 25 bp, Homo sapien
cacataatcgatacaggcctactac

SEQ ID NO: 1352711 - DNA, 25 bp, Homo sapien
ttcttgactgctgccgaaccacata

SEQ ID NO: 1352712 - DNA, 25 bp, Homo sapien
tatatctgggtactggttttcacac

SEQ ID NO: 1352713 - DNA, 25 bp, Homo sapien
aagcctctcgcagttctttcttgac

SEQ ID NO: 1352714 - DNA, 25 bp, Homo sapien
taagtgattgtcagccatacttcca

SEQ ID NO: 1352715 - DNA, 25 bp, Homo sapien
gagaaaacacgcctgattaagctat

SEQ ID NO: 1352716 - DNA, 25 bp, Homo sapien
gaaagctcagtcactttgaactgaa

SEQ ID NO: 1352717 - DNA, 25 bp, Homo sapien
aaagattctcaggaagacccagaag

SEQ ID NO: 1352718 - DNA, 25 bp, Homo sapien
ttatagatacaagcaagtaagaccc

SEQ ID NO: 1352719 - DNA, 25 bp, Homo sapien
tctagcatgctctcaataatggaca

SEQ ID NO: 1352720 - DNA, 25 bp, Homo sapien
ttataagacccatgaagctctgtgt

SEQ ID NO: 1352721 - DNA, 25 bp, Homo sapien
agtaagacccacagagattaagtga

SEQ ID NO: 1352722 - DNA, 25 bp, Homo sapien
gaagtagtagggaaccatagtaaga

SEQ ID NO: 1352723 - DNA, 25 bp, Homo sapien
tagaaatgtacactcatgagcccag

SEQ ID NO: 1352724 - DNA, 25 bp, Homo sapien
tataacattcctcttagcagcggtg

SEQ ID NO: 1352725 - DNA, 25 bp, Homo sapien
tcccagagggcagaatatcagtatg

SEQ ID NO: 1352726 - DNA, 25 bp, Homo sapien
tcagtactatttgtagcagccagga

SEQ ID NO: 1352727 - DNA, 25 bp, Homo sapien
aaaatatattcacttcacaagaaaa

SEQ ID NO: 1352728 - DNA, 25 bp, Homo sapien
tatttagttttagctattatcaaat

SEQ ID NO: 1352729 - DNA, 25 bp, Homo sapien
gaaaaagtacatgaatataacaaac

SEQ ID NO: 1352730 - DNA, 25 bp, Homo sapien
tacatgaatataacaaacatctttt

SEQ ID NO: 1352731 - DNA, 25 bp, Homo sapien
tgtgtcttgtgtcctagcttttgct

SEQ ID NO: 1352732 - DNA, 25 bp, Homo sapien
agcttttgcttgtactgctgcacaa

SEQ ID NO: 1352733 - DNA, 25 bp, Homo sapien
gctgcacaaattctgtggaatgggc

SEQ ID NO: 1352734 - DNA, 25 bp, Homo sapien
ggcaggatgtataggattcattcca

SEQ ID NO: 1352735 - DNA, 25 bp, Homo sapien
tgacagcagggagcttcagaacagc

SEQ ID NO: 1352736 - DNA, 25 bp, Homo sapien
tcaaggcacttgatataccaaggtc

SEQ ID NO: 1352737 - DNA, 25 bp, Homo sapien
catgttcggaagagcacagtgagtc

SEQ ID NO: 1352738 - DNA, 25 bp, Homo sapien
cagtgagtcttcagtatgccgctct

SEQ ID NO: 1352739 - DNA, 25 bp, Homo sapien
tcattgaagacccataggcattttc

SEQ ID NO: 1352740 - DNA, 25 bp, Homo sapien
taagtggcttatgacctctgaattc

SEQ ID NO: 1352741 - DNA, 25 bp, Homo sapien
gacacaggtgagatggataaatgac

SEQ ID NO: 1352742 - DNA, 25 bp, Homo sapien
tccagattaagaggcctcagagtac

SEQ ID NO: 1352743 - DNA, 25 bp, Homo sapien
ctgttgcaaagatagaatagaaggt

SEQ ID NO: 1352744 - DNA, 25 bp, Homo sapien
tgttgcaaagatagaatagaaggta

SEQ ID NO: 1352745 - DNA, 25 bp, Homo sapien
tcttaagacagaagcccagtcggta

SEQ ID NO: 1352746 - DNA, 25 bp, Homo sapien
ttcgcccggtaacgtacctgtcgca

SEQ ID NO: 1352747 - DNA, 25 bp, Homo sapien
tcgcggtgctagcattttcatcgca

SEQ ID NO: 1352748 - DNA, 25 bp, Homo sapien
taaacagtaaggctcgcggtgctag

SEQ ID NO: 1352749 - DNA, 25 bp, Homo sapien
tgtgactttgggagccgtcccacgg

SEQ ID NO: 1352750 - DNA, 25 bp, Homo sapien
ggttttcacgcactttcaaagcgcc

SEQ ID NO: 1352751 - DNA, 25 bp, Homo sapien
ctggaggcaccgacaggacacggtt

SEQ ID NO: 1352752 - DNA, 25 bp, Homo sapien
gcagacgccctttgtacatccactt

SEQ ID NO: 1352753 - DNA, 25 bp, Homo sapien
cactgcgtatcacagaggaccccgc

SEQ ID NO: 1352754 - DNA, 25 bp, Homo sapien
tgccactgcgtatcacagaggaccc

SEQ ID NO: 1352755 - DNA, 25 bp, Homo sapien
ctcctttgccactgcgtatcacaga

SEQ ID NO: 1352756 - DNA, 25 bp, Homo sapien
tttgccactgcgtatcacagaggac

SEQ ID NO: 1352757 - DNA, 25 bp, Homo sapien
actccagccgtccatcctgcctcca

SEQ ID NO: 1352758 - DNA, 25 bp, Homo sapien
tggatccctgaaagggcttcccgag

SEQ ID NO: 1352759 - DNA, 25 bp, Homo sapien
ggctcgtcccagtcccggtgcgcgc

SEQ ID NO: 1352760 - DNA, 25 bp, Homo sapien
ccgtggtccttgcagcctggaggct

SEQ ID NO: 1352761 - DNA, 25 bp, Homo sapien
catccgaggagtccgcagctggcct

SEQ ID NO: 1352762 - DNA, 25 bp, Homo sapien
ggaagctgtgatccgccaagcccct

SEQ ID NO: 1352763 - DNA, 25 bp, Homo sapien
gataataggcctctcgcaactgggt

SEQ ID NO: 1352764 - DNA, 25 bp, Homo sapien
caggtcgtgcatggcctggatcagc

SEQ ID NO: 1352765 - DNA, 25 bp, Homo sapien
ttccccggagcctggacagcgtcct

SEQ ID NO: 1352766 - DNA, 25 bp, Homo sapien
caccccaggcgtctcccgcggctgc

SEQ ID NO: 1352767 - DNA, 25 bp, Homo sapien
tgccgaagaggccgccaccgcagct

SEQ ID NO: 1352768 - DNA, 25 bp, Homo sapien
gtgggagggtgtctgcggcacccca

SEQ ID NO: 1352769 - DNA, 25 bp, Homo sapien
ctggggagaaaaccgcgctcgcgga

SEQ ID NO: 1352770 - DNA, 25 bp, Homo sapien
gaaaaccgcgctcgcggaggcggag

SEQ ID NO: 1352771 - DNA, 25 bp, Homo sapien
gggagaaaaccgcgctcgcggaggc

SEQ ID NO: 1352772 - DNA, 25 bp, Homo sapien
gagaaaaccgcgctcgcggaggcgg

SEQ ID NO: 1352773 - DNA, 25 bp, Homo sapien
gcaaactgctgtgtcttaggcctct

SEQ ID NO: 1352774 - DNA, 25 bp, Homo sapien
gaaatgaagacattggcaaactgct

SEQ ID NO: 1352775 - DNA, 25 bp, Homo sapien
gaatccagccttggttagcgtccct

SEQ ID NO: 1352776 - DNA, 25 bp, Homo sapien
tgaggtacaggagtcagaatccagc

SEQ ID NO: 1352777 - DNA, 25 bp, Homo sapien
gaaatgtaaggctccagtgcactct

SEQ ID NO: 1352778 - DNA, 25 bp, Homo sapien
ctttattgggagctctagttgtgga

SEQ ID NO: 1352779 - DNA, 25 bp, Homo sapien
tccacaagccaagataaggaggtat

SEQ ID NO: 1352780 - DNA, 25 bp, Homo sapien
ggcaagatgagacttaggataatgt

SEQ ID NO: 1352781 - DNA, 25 bp, Homo sapien
tcactgtaccctcgaagtcctaggc

SEQ ID NO: 1352782 - DNA, 25 bp, Homo sapien
gattctctcacattggcctcctaag

SEQ ID NO: 1352783 - DNA, 25 bp, Homo sapien
aaggcctaacacagtcacccagctg

SEQ ID NO: 1352784 - DNA, 25 bp, Homo sapien
tagcaacaaaaaaaggcctaacaca

SEQ ID NO: 1352785 - DNA, 25 bp, Homo sapien
taacggatctccaggtacaacagaa

SEQ ID NO: 1352786 - DNA, 25 bp, Homo sapien
tgtgcaaacacgttcccaggacatc

SEQ ID NO: 1352787 - DNA, 25 bp, Homo sapien
catgcctaggtaaacaaatctcgcg

SEQ ID NO: 1352788 - DNA, 25 bp, Homo sapien
taaactcgatgatatactggaagcc

SEQ ID NO: 1352789 - DNA, 25 bp, Homo sapien
tgttgaaaagcaccctacaagttca

SEQ ID NO: 1352790 - DNA, 25 bp, Homo sapien
tcacaatcacaagtcaccagttgag

SEQ ID NO: 1352791 - DNA, 25 bp, Homo sapien
gcaagaatgcatccaagtgttatca

SEQ ID NO: 1352792 - DNA, 25 bp, Homo sapien
catgtcaccaattctgtgagagcaa

SEQ ID NO: 1352793 - DNA, 25 bp, Homo sapien
cctggctctactttgcgctttttag

SEQ ID NO: 1352794 - DNA, 25 bp, Homo sapien
tctcctggctctactttgcgctttt

SEQ ID NO: 1352795 - DNA, 25 bp, Homo sapien
tactttgcgctttttagaagtatgc

SEQ ID NO: 1352796 - DNA, 25 bp, Homo sapien
ctctactttgcgctttttagaagta

SEQ ID NO: 1352797 - DNA, 25 bp, Homo sapien
tgtcaaacctggaaaagtgaactct

SEQ ID NO: 1352798 - DNA, 25 bp, Homo sapien
caacaggttatcatgtggagatcta

SEQ ID NO: 1352799 - DNA, 25 bp, Homo sapien
gcactcacaagtaggtttccccaaa

SEQ ID NO: 1352800 - DNA, 25 bp, Homo sapien
gaaaaaggctcccaaatactcagca

SEQ ID NO: 1352801 - DNA, 25 bp, Homo sapien
gtcacttgctaatctaaaatctggg

SEQ ID NO: 1352802 - DNA, 25 bp, Homo sapien
gaccatcatgtgatcaaaaagacag

SEQ ID NO: 1352803 - DNA, 25 bp, Homo sapien
aaacccgaagggctgataagcagca

SEQ ID NO: 1352804 - DNA, 25 bp, Homo sapien
agcagcaagacccaatgatgagttc

SEQ ID NO: 1352805 - DNA, 25 bp, Homo sapien
aggtctgcaaaaagatgctacttac

SEQ ID NO: 1352806 - DNA, 25 bp, Homo sapien
tattagaagtcagcaaaagtaatgg

SEQ ID NO: 1352807 - DNA, 25 bp, Homo sapien
gctaagtagcccttgtattgtggga

SEQ ID NO: 1352808 - DNA, 25 bp, Homo sapien
cctgcatgactgttaaaaacgggct

SEQ ID NO: 1352809 - DNA, 25 bp, Homo sapien
aggaactcatcataaagcagacaga

SEQ ID NO: 1352810 - DNA, 25 bp, Homo sapien
gaggaactcatcataaagcagacag

SEQ ID NO: 1352811 - DNA, 25 bp, Homo sapien
ctgtttgaggaactcatcataaagc

SEQ ID NO: 1352812 - DNA, 25 bp, Homo sapien
tgctgtttgaggaactcatcataaa

SEQ ID NO: 1352813 - DNA, 25 bp, Homo sapien
ggcagggaaccatacaattcagttc

SEQ ID NO: 1352814 - DNA, 25 bp, Homo sapien
tgagggcaatcaacagcattagcat

SEQ ID NO: 1352815 - DNA, 25 bp, Homo sapien
tagcataaacaaggtacaaaggagc

SEQ ID NO: 1352816 - DNA, 25 bp, Homo sapien
caacgtatactgaaaggcagggaac

SEQ ID NO: 1352817 - DNA, 25 bp, Homo sapien
tttagaaactcaacactagctgcag

SEQ ID NO: 1352818 - DNA, 25 bp, Homo sapien
aggccttgactttatcccgttgaag

SEQ ID NO: 1352819 - DNA, 25 bp, Homo sapien
cagtgaaggatggtacagattggat

SEQ ID NO: 1352820 - DNA, 25 bp, Homo sapien
gagaaagggcctattaatacaaggc

SEQ ID NO: 1352821 - DNA, 25 bp, Homo sapien
tcctccccttctggtagaagcctag

SEQ ID NO: 1352822 - DNA, 25 bp, Homo sapien
ttattgccatgtcaagctctggagg

SEQ ID NO: 1352823 - DNA, 25 bp, Homo sapien
tcaggaggtggtacataatttgact

SEQ ID NO: 1352824 - DNA, 25 bp, Homo sapien
tcttctcagtggtgtaggtctcagg

SEQ ID NO: 1352825 - DNA, 25 bp, Homo sapien
aggctgaccccttcaggaggctgca

SEQ ID NO: 1352826 - DNA, 25 bp, Homo sapien
aggcagcaccgcaggcacttcggcg

SEQ ID NO: 1352827 - DNA, 25 bp, Homo sapien
gagatactacgccaaggctgacccc

SEQ ID NO: 1352828 - DNA, 25 bp, Homo sapien
gaagaatccagtctcagagatacta

SEQ ID NO: 1352829 - DNA, 25 bp, Homo sapien
tcaaagggaaggggtctcagggaga

SEQ ID NO: 1352830 - DNA, 25 bp, Homo sapien
taaacagctcgtcaggtcccgggag

SEQ ID NO: 1352831 - DNA, 25 bp, Homo sapien
tcaggcgccttgacgacgtgcctct

SEQ ID NO: 1352832 - DNA, 25 bp, Homo sapien
gggcgagtcacgctcctaaacagct

SEQ ID NO: 1352833 - DNA, 25 bp, Homo sapien
gggttctgcgactcgtctcctccgg

SEQ ID NO: 1352834 - DNA, 25 bp, Homo sapien
gctgctgctcccgtatgccgcaaaa

SEQ ID NO: 1352835 - DNA, 25 bp, Homo sapien
ccgtatgccgcaaaatagctcagag

SEQ ID NO: 1352836 - DNA, 25 bp, Homo sapien
gccgcaaaatagctcagagggtcct

SEQ ID NO: 1352837 - DNA, 25 bp, Homo sapien
tcctcgtccgaggagcctgagctgc

SEQ ID NO: 1352838 - DNA, 25 bp, Homo sapien
cggctgcgagcgacaacccagcact

SEQ ID NO: 1352839 - DNA, 25 bp, Homo sapien
ggctgcgagcgacaacccagcactc

SEQ ID NO: 1352840 - DNA, 25 bp, Homo sapien
gacggctgcgagcgacaacccagca

SEQ ID NO: 1352841 - DNA, 25 bp, Homo sapien
gctgcgagcgacaacccagcactcc

SEQ ID NO: 1352842 - DNA, 25 bp, Homo sapien
gttaattgcccacgagtgacctcag

SEQ ID NO: 1352843 - DNA, 25 bp, Homo sapien
gaagctgagctgatacattgtgacc

SEQ ID NO: 1352844 - DNA, 25 bp, Homo sapien
tatgaacttctcgtggcagagacac

SEQ ID NO: 1352845 - DNA, 25 bp, Homo sapien
cagagacacgtgacagtatgcatgg

SEQ ID NO: 1352846 - DNA, 25 bp, Homo sapien
gccaatcttcttcatgtcggataaa

SEQ ID NO: 1352847 - DNA, 25 bp, Homo sapien
gaggtgaaacatttctctataatcc

SEQ ID NO: 1352848 - DNA, 25 bp, Homo sapien
gaaatgcaactcaatctcacaacct

SEQ ID NO: 1352849 - DNA, 25 bp, Homo sapien
cactatttttgctatgcattggagg

SEQ ID NO: 1352850 - DNA, 25 bp, Homo sapien
caaaccgagatcttaggtggctcac

SEQ ID NO: 1352851 - DNA, 25 bp, Homo sapien
catgcctatacgacaatggagtgga

SEQ ID NO: 1352852 - DNA, 25 bp, Homo sapien
gatcacgtaagcatgggaggcagaa

SEQ ID NO: 1352853 - DNA, 25 bp, Homo sapien
caagtgttcctccagtatcaaaaag

SEQ ID NO: 1352854 - DNA, 25 bp, Homo sapien
cgtgatcttaagggaagaaacatct

SEQ ID NO: 1352855 - DNA, 25 bp, Homo sapien
agaagatggtattttcagttctgcc

SEQ ID NO: 1352856 - DNA, 25 bp, Homo sapien
gaaacatctcactagagtttgcaca

SEQ ID NO: 1352857 - DNA, 25 bp, Homo sapien
cattgtcgtgaaacagtacgtgatc

SEQ ID NO: 1352858 - DNA, 25 bp, Homo sapien
gaggttgttcgtggctccatctgga

SEQ ID NO: 1352859 - DNA, 25 bp, Homo sapien
aaaagggcgtcgtgctggattctcc

SEQ ID NO: 1352860 - DNA, 25 bp, Homo sapien
tctgaatttgatctggagaggttgt

SEQ ID NO: 1352861 - DNA, 25 bp, Homo sapien
ggatggtacatgacagtggatgccc

SEQ ID NO: 1352862 - DNA, 25 bp, Homo sapien
aattctcatttaaggtacagcgtac

SEQ ID NO: 1352863 - DNA, 25 bp, Homo sapien
tttagaggtcacctaggatagtctc

SEQ ID NO: 1352864 - DNA, 25 bp, Homo sapien
tataacaaaatagtctcgtggaagt

SEQ ID NO: 1352865 - DNA, 25 bp, Homo sapien
gcttttctcaacaaccatgaagtat

SEQ ID NO: 1352866 - DNA, 25 bp, Homo sapien
ttaaattagctcttagataattaag

SEQ ID NO: 1352867 - DNA, 25 bp, Homo sapien
ttagctcttagataattaagatatc

SEQ ID NO: 1352868 - DNA, 25 bp, Homo sapien
taaattagctcttagataattaaga

SEQ ID NO: 1352869 - DNA, 25 bp, Homo sapien
ctcttagataattaagatatcttac

SEQ ID NO: 1352870 - DNA, 25 bp, Homo sapien
ctgtaatcttctgtatcaggaagtt

SEQ ID NO: 1352871 - DNA, 25 bp, Homo sapien
atcttctgtatcaggaagttctgtg

SEQ ID NO: 1352872 - DNA, 25 bp, Homo sapien
tgtgttttttctcgccgaatagatt

SEQ ID NO: 1352873 - DNA, 25 bp, Homo sapien
tctgtgttttttctcgccgaataga

SEQ ID NO: 1352874 - DNA, 25 bp, Homo sapien
caacaagggtgtccagaccttttgg

SEQ ID NO: 1352875 - DNA, 25 bp, Homo sapien
tcctgtaagtagtctaacaattttc

SEQ ID NO: 1352876 - DNA, 25 bp, Homo sapien
tgatgttcgacaagaaatttcttca

SEQ ID NO: 1352877 - DNA, 25 bp, Homo sapien
gagtattttttttgcacgtagatga

SEQ ID NO: 1352878 - DNA, 25 bp, Homo sapien
cagtgtcttctctactgagtatttt

SEQ ID NO: 1352879 - DNA, 25 bp, Homo sapien
tacttgatgttcgacaagaaatttc

SEQ ID NO: 1352880 - DNA, 25 bp, Homo sapien
aggctgttgtgaagagggaccagct

SEQ ID NO: 1352881 - DNA, 25 bp, Homo sapien
tggaaacagggaggtctgttgaggg

SEQ ID NO: 1352882 - DNA, 25 bp, Homo sapien
ttggaaacagggaggtctgttgagg

SEQ ID NO: 1352883 - DNA, 25 bp, Homo sapien
cagctgaatctagagggcctgggtc

SEQ ID NO: 1352884 - DNA, 25 bp, Homo sapien
tggatcaacctcagtgcaaatcttg

SEQ ID NO: 1352885 - DNA, 25 bp, Homo sapien
tcacccttgtgagagctgggccaag

SEQ ID NO: 1352886 - DNA, 25 bp, Homo sapien
taaagttcctttacgtggcagaaga

SEQ ID NO: 1352887 - DNA, 25 bp, Homo sapien
gcatggctctaaagttggatcaacc

SEQ ID NO: 1352888 - DNA, 25 bp, Homo sapien
tttgaactgttagaaccaaccacag

SEQ ID NO: 1352889 - DNA, 25 bp, Homo sapien
ttttgaactgttagaaccaaccaca

SEQ ID NO: 1352890 - DNA, 25 bp, Homo sapien
aaagcccaagctctgcgtttagcga

SEQ ID NO: 1352891 - DNA, 25 bp, Homo sapien
taaggatgaatctgagccgccagtc

SEQ ID NO: 1352892 - DNA, 25 bp, Homo sapien
gcttgggatccttcacctggtacag

SEQ ID NO: 1352893 - DNA, 25 bp, Homo sapien
caatttaaatatgtgggcgtctgct

SEQ ID NO: 1352894 - DNA, 25 bp, Homo sapien
gcttccgctttcgtctcccgctggg

SEQ ID NO: 1352895 - DNA, 25 bp, Homo sapien
ccctgggcacagctgcgttactcac

SEQ ID NO: 1352896 - DNA, 25 bp, Homo sapien
caaggtccctcggatgcagggctcg

SEQ ID NO: 1352897 - DNA, 25 bp, Homo sapien
tccttgtcctcggactccaggcttc

SEQ ID NO: 1352898 - DNA, 25 bp, Homo sapien
tcctcctcggtgagggacggtgcgg

SEQ ID NO: 1352899 - DNA, 25 bp, Homo sapien
ggtcctcctcggtgagggacggtgc

SEQ ID NO: 1352900 - DNA, 25 bp, Homo sapien
cggtgagggacggtgcggtgggctc

SEQ ID NO: 1352901 - DNA, 25 bp, Homo sapien
tcctcggtgagggacggtgcggtgg

SEQ ID NO: 1352902 - DNA, 25 bp, Homo sapien
ggagatggcgcttcttccgggtccg

SEQ ID NO: 1352903 - DNA, 25 bp, Homo sapien
cgggagatggcgcttcttccgggtc

SEQ ID NO: 1352904 - DNA, 25 bp, Homo sapien
atggcgcttcttccgggtccgggag

SEQ ID NO: 1352905 - DNA, 25 bp, Homo sapien
cgcttcttccgggtccgggagctcg

SEQ ID NO: 1352906 - DNA, 25 bp, Homo sapien
ctctgaggtcgacggcgacgcgaat

SEQ ID NO: 1352907 - DNA, 25 bp, Homo sapien
acagcgggcgtttcctcaagccacg

SEQ ID NO: 1352908 - DNA, 25 bp, Homo sapien
cgcggagctcggagcagcgttcctt

SEQ ID NO: 1352909 - DNA, 25 bp, Homo sapien
tgtctctgcggcagcctatcgacgc

SEQ ID NO: 1352910 - DNA, 25 bp, Homo sapien
cctcataaggcatcgtttccgtggg

SEQ ID NO: 1352911 - DNA, 25 bp, Homo sapien
taagtggcccgggttagcttcctca

SEQ ID NO: 1352912 - DNA, 25 bp, Homo sapien
gcccgggttagcttcctcataaggc

SEQ ID NO: 1352913 - DNA, 25 bp, Homo sapien
cataaggcatcgtttccgtgggtgg

SEQ ID NO: 1352914 - DNA, 25 bp, Homo sapien
gacggtggcttggacaacatgctaa

SEQ ID NO: 1352915 - DNA, 25 bp, Homo sapien
tgaaaagctacaggtagagccctgg

SEQ ID NO: 1352916 - DNA, 25 bp, Homo sapien
tgatgaagagacgactatccccaga

SEQ ID NO: 1352917 - DNA, 25 bp, Homo sapien
ctatggcgctgtgtaagaagcaacc

SEQ ID NO: 1352918 - DNA, 25 bp, Homo sapien
tccactaccttgcaataatcctact

SEQ ID NO: 1352919 - DNA, 25 bp, Homo sapien
catccactaccttgcaataatccta

SEQ ID NO: 1352920 - DNA, 25 bp, Homo sapien
taccttgcaataatcctacttcttc

SEQ ID NO: 1352921 - DNA, 25 bp, Homo sapien
cactaccttgcaataatcctacttc

SEQ ID NO: 1352922 - DNA, 25 bp, Homo sapien
cgtggttcctctcaacaaccattct

SEQ ID NO: 1352923 - DNA, 25 bp, Homo sapien
tactttcgtggttcctctcaacaac

SEQ ID NO: 1352924 - DNA, 25 bp, Homo sapien
ttctattactttcgtggttcctctc

SEQ ID NO: 1352925 - DNA, 25 bp, Homo sapien
gcgcccagcctcaattggaggtcat

SEQ ID NO: 1352926 - DNA, 25 bp, Homo sapien
gtttacttctgtcaatgaccttaga

SEQ ID NO: 1352927 - DNA, 25 bp, Homo sapien
gtcaatgaccttagaatctttgctg

SEQ ID NO: 1352928 - DNA, 25 bp, Homo sapien
tgcttggtgacagctctaaagcccc

SEQ ID NO: 1352929 - DNA, 25 bp, Homo sapien
accaaccactcgtggttatctggat

SEQ ID NO: 1352930 - DNA, 25 bp, Homo sapien
tccttgatgcccaggcacattgctg

SEQ ID NO: 1352931 - DNA, 25 bp, Homo sapien
gctgttggtgacacttgagaggtca

SEQ ID NO: 1352932 - DNA, 25 bp, Homo sapien
gaggtcaccccgctgctaagcacag

SEQ ID NO: 1352933 - DNA, 25 bp, Homo sapien
tcttaagtgaaagcaagatgagtcc

SEQ ID NO: 1352934 - DNA, 25 bp, Homo sapien
cagctgccacacctatacagtgtga

SEQ ID NO: 1352935 - DNA, 25 bp, Homo sapien
agctgccacacctatacagtgtgac

SEQ ID NO: 1352936 - DNA, 25 bp, Homo sapien
tcagctgccacacctatacagtgtg

SEQ ID NO: 1352937 - DNA, 25 bp, Homo sapien
gatgtagacactggacccaagctgg

SEQ ID NO: 1352938 - DNA, 25 bp, Homo sapien
tcatagttgagtggacaagatgtag

SEQ ID NO: 1352939 - DNA, 25 bp, Homo sapien
tgagtggacaagatgtagacactgg

SEQ ID NO: 1352940 - DNA, 25 bp, Homo sapien
acaagatgtagacactggacccaag

SEQ ID NO: 1352941 - DNA, 25 bp, Homo sapien
tcccttgtggaattgggaaatgggc

SEQ ID NO: 1352942 - DNA, 25 bp, Homo sapien
ccactttcctgacggtgttcttttg

SEQ ID NO: 1352943 - DNA, 25 bp, Homo sapien
gtgtctgtgaaacgtatgttccctg

SEQ ID NO: 1352944 - DNA, 25 bp, Homo sapien
tagaagggctctgcacgtgagcatc

SEQ ID NO: 1352945 - DNA, 25 bp, Homo sapien
ggtgtggctggaaccatttctagaa

SEQ ID NO: 1352946 - DNA, 25 bp, Homo sapien
ttccattgtgattggtatacatgta

SEQ ID NO: 1352947 - DNA, 25 bp, Homo sapien
cattgtgattggtatacatgtaaga

SEQ ID NO: 1352948 - DNA, 25 bp, Homo sapien
agagactaaaaatcagtgcagaact

SEQ ID NO: 1352949 - DNA, 25 bp, Homo sapien
ctaaaaatcagtgcagaacttctct

SEQ ID NO: 1352950 - DNA, 25 bp, Homo sapien
taaccatacattggctggaatgagg

SEQ ID NO: 1352951 - DNA, 25 bp, Homo sapien
aatgcacaaatctaacaccatgttg

SEQ ID NO: 1352952 - DNA, 25 bp, Homo sapien
gcatgattggttttggcacacagag

SEQ ID NO: 1352953 - DNA, 25 bp, Homo sapien
aaagatctgcctgatttctatagca

SEQ ID NO: 1352954 - DNA, 25 bp, Homo sapien
gaagccagcctagcaggtaacatag

SEQ ID NO: 1352955 - DNA, 25 bp, Homo sapien
catatagggagtccaaagaagccag

SEQ ID NO: 1352956 - DNA, 25 bp, Homo sapien
tatatgctggtaagcctaaactggc

SEQ ID NO: 1352957 - DNA, 25 bp, Homo sapien
cattgaccatgaggagctgtttact

SEQ ID NO: 1352958 - DNA, 25 bp, Homo sapien
cacagcttaggtaccacctcgaggg

SEQ ID NO: 1352959 - DNA, 25 bp, Homo sapien
ctgtgatagaagagcgaaaggcaaa

SEQ ID NO: 1352960 - DNA, 25 bp, Homo sapien
caagagttagtagcacagtggcaca

SEQ ID NO: 1352961 - DNA, 25 bp, Homo sapien
gcaagcttatctgactgatcaagaa

SEQ ID NO: 1352962 - DNA, 25 bp, Homo sapien
atcggccttgcctgtgcggtcttgc

SEQ ID NO: 1352963 - DNA, 25 bp, Homo sapien
cctgtgcggtcttgccggcaaccgg

SEQ ID NO: 1352964 - DNA, 25 bp, Homo sapien
agagtcatcggccttgcctgtgcgg

SEQ ID NO: 1352965 - DNA, 25 bp, Homo sapien
gagtgggcacagagtcatcggcctt

SEQ ID NO: 1352966 - DNA, 25 bp, Homo sapien
tcaggagtctactttcttgttaatt

SEQ ID NO: 1352967 - DNA, 25 bp, Homo sapien
caggagtctactttcttgttaatta

SEQ ID NO: 1352968 - DNA, 25 bp, Homo sapien
gttcagacatgctcacggggatcag

SEQ ID NO: 1352969 - DNA, 25 bp, Homo sapien
catgctcacggggatcagcatatgg

SEQ ID NO: 1352970 - DNA, 25 bp, Homo sapien
tcagacatgctcacggggatcagca

SEQ ID NO: 1352971 - DNA, 25 bp, Homo sapien
cagttcagacatgctcacggggatc

SEQ ID NO: 1352972 - DNA, 25 bp, Homo sapien
tttgctacctagcacgggcagtttc

SEQ ID NO: 1352973 - DNA, 25 bp, Homo sapien
tttttgctacctagcacgggcagtt

SEQ ID NO: 1352974 - DNA, 25 bp, Homo sapien
ttttgctacctagcacgggcagttt

SEQ ID NO: 1352975 - DNA, 25 bp, Homo sapien
ttgctacctagcacgggcagtttct

SEQ ID NO: 1352976 - DNA, 25 bp, Homo sapien
ggttcggtgcagcaagacgtgccct

SEQ ID NO: 1352977 - DNA, 25 bp, Homo sapien
tgcactttctggatactcttccggg

SEQ ID NO: 1352978 - DNA, 25 bp, Homo sapien
gcagcaagacgtgccctttgttggg

SEQ ID NO: 1352979 - DNA, 25 bp, Homo sapien
atacagtttgctgctatgtcatcag

SEQ ID NO: 1352980 - DNA, 25 bp, Homo sapien
tgagtttgtcgtagcggtggtcact

SEQ ID NO: 1352981 - DNA, 25 bp, Homo sapien
tttgtcgtagcggtggtcactcatc

SEQ ID NO: 1352982 - DNA, 25 bp, Homo sapien
gtcgtagcggtggtcactcatctgt

SEQ ID NO: 1352983 - DNA, 25 bp, Homo sapien
gcacagtgagtttgtcgtagcggtg

SEQ ID NO: 1352984 - DNA, 25 bp, Homo sapien
cgatatgcaaggtggcagttaggat

SEQ ID NO: 1352985 - DNA, 25 bp, Homo sapien
ttcttcatagtagagtggggctgcc

SEQ ID NO: 1352986 - DNA, 25 bp, Homo sapien
gacaatagcttttggtcagtctcac

SEQ ID NO: 1352987 - DNA, 25 bp, Homo sapien
tttgtgaaacttctagacaatagct

SEQ ID NO: 1352988 - DNA, 25 bp, Homo sapien
ctcatgtttgcagtcagaactggac

SEQ ID NO: 1352989 - DNA, 25 bp, Homo sapien
tgctgttgagggtggaccaagatgg

SEQ ID NO: 1352990 - DNA, 25 bp, Homo sapien
ttgcagtcagaactggacggtcatc

SEQ ID NO: 1352991 - DNA, 25 bp, Homo sapien
tgtttgcagtcagaactggacggtc

SEQ ID NO: 1352992 - DNA, 25 bp, Homo sapien
tccttaacgaagaaggcacgcagct

SEQ ID NO: 1352993 - DNA, 25 bp, Homo sapien
cacgcagctgtagggaggaaatagc

SEQ ID NO: 1352994 - DNA, 25 bp, Homo sapien
ggctttcagcccaagagaatctgca

SEQ ID NO: 1352995 - DNA, 25 bp, Homo sapien
aaccaggcatttccggcagttccca

SEQ ID NO: 1352996 - DNA, 25 bp, Homo sapien
tctggaactgtaagatcccactcaa

SEQ ID NO: 1352997 - DNA, 25 bp, Homo sapien
tatttcatcaggtctcagtattttg

SEQ ID NO: 1352998 - DNA, 25 bp, Homo sapien
aacttgtttctggaactgtaagatc

SEQ ID NO: 1352999 - DNA, 25 bp, Homo sapien
tgattatttcatcaggtctcagtat

SEQ ID NO: 1353000 - DNA, 25 bp, Homo sapien
ttgcgatcaggttaggcccagccat

SEQ ID NO: 1353001 - DNA, 25 bp, Homo sapien
tgtgcagattcactagacccaattg

SEQ ID NO: 1353002 - DNA, 25 bp, Homo sapien
ttcactagacccaattgcgatcagg

SEQ ID NO: 1353003 - DNA, 25 bp, Homo sapien
tcaaatgcaacccatctgccactgg

SEQ ID NO: 1353004 - DNA, 25 bp, Homo sapien
gccaagatttcagcacctcgttgat

SEQ ID NO: 1353005 - DNA, 25 bp, Homo sapien
cttaaaagtatcagccaagatttca

SEQ ID NO: 1353006 - DNA, 25 bp, Homo sapien
tatcagccaagatttcagcacctcg

SEQ ID NO: 1353007 - DNA, 25 bp, Homo sapien
tcagcacctcgttgatttgtccttt

SEQ ID NO: 1353008 - DNA, 25 bp, Homo sapien
tcgtaggaaagtgctcaatgagccc

SEQ ID NO: 1353009 - DNA, 25 bp, Homo sapien
taaaatgatcacgtgaggcctgagg

SEQ ID NO: 1353010 - DNA, 25 bp, Homo sapien
caggtctgacctctaaaagccgtgt

SEQ ID NO: 1353011 - DNA, 25 bp, Homo sapien
cacccttgatgaccctgaactggaa

SEQ ID NO: 1353012 - DNA, 25 bp, Homo sapien
gaataaaacatctccgccatctaaa

SEQ ID NO: 1353013 - DNA, 25 bp, Homo sapien
tgagctgaagtttttctaatgcttc

SEQ ID NO: 1353014 - DNA, 25 bp, Homo sapien
tctttcatctctactatattgagct

SEQ ID NO: 1353015 - DNA, 25 bp, Homo sapien
ctgtgaataaaacatctccgccatc

SEQ ID NO: 1353016 - DNA, 25 bp, Homo sapien
cctcaacctccctggctcaaacaat

SEQ ID NO: 1353017 - DNA, 25 bp, Homo sapien
aatcctcccacctcagcctcctgag

SEQ ID NO: 1353018 - DNA, 25 bp, Homo sapien
tataagaagagcagactaggataaa

SEQ ID NO: 1353019 - DNA, 25 bp, Homo sapien
ctaggataaagagacatagatgaaa

SEQ ID NO: 1353020 - DNA, 25 bp, Homo sapien
agagggcaagtgttatgggctatgt

SEQ ID NO: 1353021 - DNA, 25 bp, Homo sapien
taccttgatatcagactgctagcct

SEQ ID NO: 1353022 - DNA, 25 bp, Homo sapien
tccagaggtaacaggtagtgaagtc

SEQ ID NO: 1353023 - DNA, 25 bp, Homo sapien
ggattgtaatgaactttccagaggt

SEQ ID NO: 1353024 - DNA, 25 bp, Homo sapien
ataaatggattgtaatgaactttcc

SEQ ID NO: 1353025 - DNA, 25 bp, Homo sapien
tcaagtgctacttcttgccacttgc

SEQ ID NO: 1353026 - DNA, 25 bp, Homo sapien
agtcaagtccagtaatttctcaatt

SEQ ID NO: 1353027 - DNA, 25 bp, Homo sapien
tataagtagataatccgggtaaaca

SEQ ID NO: 1353028 - DNA, 25 bp, Homo sapien
cgggtaaacacagtcaagtccagta

SEQ ID NO: 1353029 - DNA, 25 bp, Homo sapien
tagataatccgggtaaacacagtca

SEQ ID NO: 1353030 - DNA, 25 bp, Homo sapien
tacaagcatcccaacatagtctcag

SEQ ID NO: 1353031 - DNA, 25 bp, Homo sapien
cactggcctctggttacatgatcca

SEQ ID NO: 1353032 - DNA, 25 bp, Homo sapien
catcttccaggatgtacaagcatcc

SEQ ID NO: 1353033 - DNA, 25 bp, Homo sapien
cagattcttggtccctggcactggc

SEQ ID NO: 1353034 - DNA, 25 bp, Homo sapien
gagaagtatacacgttacccaatgt

SEQ ID NO: 1353035 - DNA, 25 bp, Homo sapien
tcttatgcctttacgcctgcattgt

SEQ ID NO: 1353036 - DNA, 25 bp, Homo sapien
tgggaattccgctgtcatcctagtc

SEQ ID NO: 1353037 - DNA, 25 bp, Homo sapien
ggtgcacctgtcaccgagaagtata

SEQ ID NO: 1353038 - DNA, 25 bp, Homo sapien
tatgatgcaacatgagacactcacc

SEQ ID NO: 1353039 - DNA, 25 bp, Homo sapien
caggttgttataaggtgaggtcacg

SEQ ID NO: 1353040 - DNA, 25 bp, Homo sapien
ttaactgccaatataacaatgtggg

SEQ ID NO: 1353041 - DNA, 25 bp, Homo sapien
gactaggttaattccacaagactgg

SEQ ID NO: 1353042 - DNA, 25 bp, Homo sapien
gaaataacttgagatagtggccagc

SEQ ID NO: 1353043 - DNA, 25 bp, Homo sapien
tgtttaacgaccaattgaagcataa

SEQ ID NO: 1353044 - DNA, 25 bp, Homo sapien
ccaagtaagttagaatactgaccca

SEQ ID NO: 1353045 - DNA, 25 bp, Homo sapien
ggtagcaactaacattggcatactg

SEQ ID NO: 1353046 - DNA, 25 bp, Homo sapien
caggtgaagtttaatgagacgaaac

SEQ ID NO: 1353047 - DNA, 25 bp, Homo sapien
tagacaaagtctgatgtcggccttg

SEQ ID NO: 1353048 - DNA, 25 bp, Homo sapien
tacacacagcattacagtgagtgag

SEQ ID NO: 1353049 - DNA, 25 bp, Homo sapien
aacacaaagtggacttacacacagc

SEQ ID NO: 1353050 - DNA, 25 bp, Homo sapien
caaggccatcagacgaagacttctt

SEQ ID NO: 1353051 - DNA, 25 bp, Homo sapien
ttcgcttggcagaataaggctatgg

SEQ ID NO: 1353052 - DNA, 25 bp, Homo sapien
gctatatgatagaattgctaccgac

SEQ ID NO: 1353053 - DNA, 25 bp, Homo sapien
gatataatgagtatccggcctggct

SEQ ID NO: 1353054 - DNA, 25 bp, Homo sapien
actgcacctgactaagaagcagctt

SEQ ID NO: 1353055 - DNA, 25 bp, Homo sapien
tcttaaaattcctattattgaactg

SEQ ID NO: 1353056 - DNA, 25 bp, Homo sapien
gaagcagcttttgagctcttaaaat

SEQ ID NO: 1353057 - DNA, 25 bp, Homo sapien
ggagtacagtcgcatgaccaaggtt

SEQ ID NO: 1353058 - DNA, 25 bp, Homo sapien
tgtgcccaggcctgaaagtacagtc

SEQ ID NO: 1353059 - DNA, 25 bp, Homo sapien
tcaaaacgtgcgagacacactgtac

SEQ ID NO: 1353060 - DNA, 25 bp, Homo sapien
tctgtaagggttgcctaaacatccc

SEQ ID NO: 1353061 - DNA, 25 bp, Homo sapien
tatgtacccatggaggagtgtctgt

SEQ ID NO: 1353062 - DNA, 25 bp, Homo sapien
gtcaatataacgctgaacatttctg

SEQ ID NO: 1353063 - DNA, 25 bp, Homo sapien
tagtcaatataacgctgaacatttc

SEQ ID NO: 1353064 - DNA, 25 bp, Homo sapien
agtcaatataacgctgaacatttct

SEQ ID NO: 1353065 - DNA, 25 bp, Homo sapien
ttagtcaatataacgctgaacattt

SEQ ID NO: 1353066 - DNA, 25 bp, Homo sapien
gcagatcaacattacaattcgcaag

SEQ ID NO: 1353067 - DNA, 25 bp, Homo sapien
gttttccctgtgtgcttacttacaa

SEQ ID NO: 1353068 - DNA, 25 bp, Homo sapien
aatggatacatgttgtactcttggc

SEQ ID NO: 1353069 - DNA, 25 bp, Homo sapien
ctgtggttcaggcaagtcctaaact

SEQ ID NO: 1353070 - DNA, 25 bp, Homo sapien
ttgggaagcagttcctccgcaatct

SEQ ID NO: 1353071 - DNA, 25 bp, Homo sapien
ccctgttttaacatccacctgtgtt

SEQ ID NO: 1353072 - DNA, 25 bp, Homo sapien
agaacagtctgacccggattgagcc

SEQ ID NO: 1353073 - DNA, 25 bp, Homo sapien
tgactgccatcaaattgccatccag

SEQ ID NO: 1353074 - DNA, 25 bp, Homo sapien
caggcccgggcttacaaatggatat

SEQ ID NO: 1353075 - DNA, 25 bp, Homo sapien
tagaactggaagaccacgcatgtgg

SEQ ID NO: 1353076 - DNA, 25 bp, Homo sapien
tttcccaagtagaaaggcctccagc

SEQ ID NO: 1353077 - DNA, 25 bp, Homo sapien
gtattcaaatcaagtgcaggcccgg

SEQ ID NO: 1353078 - DNA, 25 bp, Homo sapien
aatagcaccagaggcaatgaatggg

SEQ ID NO: 1353079 - DNA, 25 bp, Homo sapien
tgggcttgttacactggatgctaaa

SEQ ID NO: 1353080 - DNA, 25 bp, Homo sapien
ctcttgacaattatatgtatccaat

SEQ ID NO: 1353081 - DNA, 25 bp, Homo sapien
gctaaaatccaagtagtaagacgaa

SEQ ID NO: 1353082 - DNA, 25 bp, Homo sapien
catgggggtaacagtctaactctta

SEQ ID NO: 1353083 - DNA, 25 bp, Homo sapien
cagtctaactcttaaagaccttcca

SEQ ID NO: 1353084 - DNA, 25 bp, Homo sapien
cctgccctcatgggggtaacagtct

SEQ ID NO: 1353085 - DNA, 25 bp, Homo sapien
gccctcatgggggtaacagtctaac

SEQ ID NO: 1353086 - DNA, 25 bp, Homo sapien
ggtaaagggctacctgacttccaca

SEQ ID NO: 1353087 - DNA, 25 bp, Homo sapien
tctgtgctcccaaagcaggttgcat

SEQ ID NO: 1353088 - DNA, 25 bp, Homo sapien
gaactattgcaggaacccctatgtg

SEQ ID NO: 1353089 - DNA, 25 bp, Homo sapien
cctactggtctgtggagattctacg

SEQ ID NO: 1353090 - DNA, 25 bp, Homo sapien
caattagaaaggtaacaggcctgcc

SEQ ID NO: 1353091 - DNA, 25 bp, Homo sapien
taaggtcaagtaggtcaaacagagg

SEQ ID NO: 1353092 - DNA, 25 bp, Homo sapien
tagtctagcccacaagttatcacag

SEQ ID NO: 1353093 - DNA, 25 bp, Homo sapien
caactgctgagccatttgaaggtaa

SEQ ID NO: 1353094 - DNA, 25 bp, Homo sapien
tttaacctttctaagagactgcaga

SEQ ID NO: 1353095 - DNA, 25 bp, Homo sapien
tccaagaccaacagggcaaagaaca

SEQ ID NO: 1353096 - DNA, 25 bp, Homo sapien
tcaaaaatctaatgctctggccctt

SEQ ID NO: 1353097 - DNA, 25 bp, Homo sapien
tccgaaaaacaatcgaagtcaagcc

SEQ ID NO: 1353098 - DNA, 25 bp, Homo sapien
ttctaggcctcatcccttccatcat

SEQ ID NO: 1353099 - DNA, 25 bp, Homo sapien
catcccttccatcatgccagtctcc

SEQ ID NO: 1353100 - DNA, 25 bp, Homo sapien
gcctcatcccttccatcatgccagt

SEQ ID NO: 1353101 - DNA, 25 bp, Homo sapien
cccttccatcatgccagtctccatc

SEQ ID NO: 1353102 - DNA, 25 bp, Homo sapien
caccactcttacagctcagttgact

SEQ ID NO: 1353103 - DNA, 25 bp, Homo sapien
taaatgttgacaggtcccttcctga

SEQ ID NO: 1353104 - DNA, 25 bp, Homo sapien
caggttcttcaccactcttacagct

SEQ ID NO: 1353105 - DNA, 25 bp, Homo sapien
ctaaatgttgacaggtcccttcctg

SEQ ID NO: 1353106 - DNA, 25 bp, Homo sapien
tagtatgtatttgccctataaaagc

SEQ ID NO: 1353107 - DNA, 25 bp, Homo sapien
tgtcctctctaatgcccaaatagta

SEQ ID NO: 1353108 - DNA, 25 bp, Homo sapien
taactctccttgtaatcagcagcag

SEQ ID NO: 1353109 - DNA, 25 bp, Homo sapien
aagttggaatgtaaatcctatctcc

SEQ ID NO: 1353110 - DNA, 25 bp, Homo sapien
tgctgcaggcagataagatccaaga

SEQ ID NO: 1353111 - DNA, 25 bp, Homo sapien
catacatttgattcagcaggaggct

SEQ ID NO: 1353112 - DNA, 25 bp, Homo sapien
ttcagggtctctctacaatgtaaca

SEQ ID NO: 1353113 - DNA, 25 bp, Homo sapien
gaacctcatttgctattaagcttgc

SEQ ID NO: 1353114 - DNA, 25 bp, Homo sapien
ctatgtagaatgtactccctcttta

SEQ ID NO: 1353115 - DNA, 25 bp, Homo sapien
gtagaatgtactccctctttaggcc

SEQ ID NO: 1353116 - DNA, 25 bp, Homo sapien
atgtagaatgtactccctctttagg

SEQ ID NO: 1353117 - DNA, 25 bp, Homo sapien
agaatgtactccctctttaggccca

SEQ ID NO: 1353118 - DNA, 25 bp, Homo sapien
tgagaaaactcagtacctttggact

SEQ ID NO: 1353119 - DNA, 25 bp, Homo sapien
gactgtaatcaactgagaaaactca

SEQ ID NO: 1353120 - DNA, 25 bp, Homo sapien
tgactgtaatcaactgagaaaactc

SEQ ID NO: 1353121 - DNA, 25 bp, Homo sapien
gaaaactcagtacctttggactagc

SEQ ID NO: 1353122 - DNA, 25 bp, Homo sapien
gcatcaaccacttggaaagtttcca

SEQ ID NO: 1353123 - DNA, 25 bp, Homo sapien
gagcctcactatcctcggtgaaggc

SEQ ID NO: 1353124 - DNA, 25 bp, Homo sapien
aaattcacaaggctcaatggcatca

SEQ ID NO: 1353125 - DNA, 25 bp, Homo sapien
ttttagagcctcactatcctcggtg

SEQ ID NO: 1353126 - DNA, 25 bp, Homo sapien
tgatgtacactattcctgcagcaac

SEQ ID NO: 1353127 - DNA, 25 bp, Homo sapien
tcttcctgatgtacactattcctgc

SEQ ID NO: 1353128 - DNA, 25 bp, Homo sapien
tgtacactattcctgcagcaacagc

SEQ ID NO: 1353129 - DNA, 25 bp, Homo sapien
cctgatgtacactattcctgcagca

SEQ ID NO: 1353130 - DNA, 25 bp, Homo sapien
gttctgagtcccgtcagtaaaatgg

SEQ ID NO: 1353131 - DNA, 25 bp, Homo sapien
taaaatggcccaatagcacaaggcc

SEQ ID NO: 1353132 - DNA, 25 bp, Homo sapien
tataaaagcacacattggttctgag

SEQ ID NO: 1353133 - DNA, 25 bp, Homo sapien
tggttccgactctgggcaaaacaaa

SEQ ID NO: 1353134 - DNA, 25 bp, Homo sapien
agtgagaggtatgcatgctagaggg

SEQ ID NO: 1353135 - DNA, 25 bp, Homo sapien
ctagaggggtgatgaagactgaatc

SEQ ID NO: 1353136 - DNA, 25 bp, Homo sapien
tttgatatctcgagtgattgtgggt

SEQ ID NO: 1353137 - DNA, 25 bp, Homo sapien
gctgatttgatatctcgagtgattg

SEQ ID NO: 1353138 - DNA, 25 bp, Homo sapien
gccatcctgggctataatatcacaa

SEQ ID NO: 1353139 - DNA, 25 bp, Homo sapien
cagaaatactctgtagcattaatgc

SEQ ID NO: 1353140 - DNA, 25 bp, Homo sapien
tacaaatgagtgtatcacttcaaag

SEQ ID NO: 1353141 - DNA, 25 bp, Homo sapien
aaatgtactaggctttcatatggcc

SEQ ID NO: 1353142 - DNA, 25 bp, Homo sapien
ggtagaatcagcttctagcaaatgg

SEQ ID NO: 1353143 - DNA, 25 bp, Homo sapien
ttgtcaccaaagaaggaaaggtaga

SEQ ID NO: 1353144 - DNA, 25 bp, Homo sapien
atgttccccgatcacacctaccagg

SEQ ID NO: 1353145 - DNA, 25 bp, Homo sapien
gccacatagaactatggactcatca

SEQ ID NO: 1353146 - DNA, 25 bp, Homo sapien
cacaacttacagcaatacctcatca

SEQ ID NO: 1353147 - DNA, 25 bp, Homo sapien
gaattaccatgggtaagtcaagact

SEQ ID NO: 1353148 - DNA, 25 bp, Homo sapien
cagtatgtgggtctaggatcttaca

SEQ ID NO: 1353149 - DNA, 25 bp, Homo sapien
tcaggccactggttcacattcacca

SEQ ID NO: 1353150 - DNA, 25 bp, Homo sapien
aaatgtaagttatcatcagctcccc

SEQ ID NO: 1353151 - DNA, 25 bp, Homo sapien
gcaaaaatcaaaaccagtgtctcct

SEQ ID NO: 1353152 - DNA, 25 bp, Homo sapien
cagtttacgctgcacttgagattca

SEQ ID NO: 1353153 - DNA, 25 bp, Homo sapien
gacagtgggtatccccacctggctg

SEQ ID NO: 1353154 - DNA, 25 bp, Homo sapien
gcttcggtgtcacgactggcgctgc

SEQ ID NO: 1353155 - DNA, 25 bp, Homo sapien
gggcttcggtgtcacgactggcgct

SEQ ID NO: 1353156 - DNA, 25 bp, Homo sapien
gggggcttcggtgtcacgactggcg

SEQ ID NO: 1353157 - DNA, 25 bp, Homo sapien
ttcggtgtcacgactggcgctgccc

SEQ ID NO: 1353158 - DNA, 25 bp, Homo sapien
gaaggctctcgtcggccggcagctc

SEQ ID NO: 1353159 - DNA, 25 bp, Homo sapien
acgaagacgcagtccggaaggctct

SEQ ID NO: 1353160 - DNA, 25 bp, Homo sapien
ttctcagcgcgtgctggccgagcga

SEQ ID NO: 1353161 - DNA, 25 bp, Homo sapien
cagcacgcccacgtagagctggtgc

SEQ ID NO: 1353162 - DNA, 25 bp, Homo sapien
cggccgggtcctgccgcgggcagcg

SEQ ID NO: 1353163 - DNA, 25 bp, Homo sapien
cagcgcgcgctgagcctgcgagcgc

SEQ ID NO: 1353164 - DNA, 25 bp, Homo sapien
agcgcccgtcggctcctcttggcag

SEQ ID NO: 1353165 - DNA, 25 bp, Homo sapien
ctgagcctgcgagcgcccgtcggct

SEQ ID NO: 1353166 - DNA, 25 bp, Homo sapien
ggcttacttcaactgctgcctcccc

SEQ ID NO: 1353167 - DNA, 25 bp, Homo sapien
cttacttcaactgctgcctccccag

SEQ ID NO: 1353168 - DNA, 25 bp, Homo sapien
ccaccactcgcggctaatttgtatt

SEQ ID NO: 1353169 - DNA, 25 bp, Homo sapien
tacttcaactgctgcctccccagtt

SEQ ID NO: 1353170 - DNA, 25 bp, Homo sapien
accatctagcaatcttcattcatgc

SEQ ID NO: 1353171 - DNA, 25 bp, Homo sapien
gcagactttaccagacattgaggct

SEQ ID NO: 1353172 - DNA, 25 bp, Homo sapien
tctgtctctagctggccaccatcta

SEQ ID NO: 1353173 - DNA, 25 bp, Homo sapien
gctggccaccatctagcaatcttca

SEQ ID NO: 1353174 - DNA, 25 bp, Homo sapien
caccatgttatgcacttcagagtca

SEQ ID NO: 1353175 - DNA, 25 bp, Homo sapien
gacatgatccttaccttgaagagct

SEQ ID NO: 1353176 - DNA, 25 bp, Homo sapien
tctctaagcagtggtcaaaaagtgt

SEQ ID NO: 1353177 - DNA, 25 bp, Homo sapien
tctcactaggagaacaagacatcca

SEQ ID NO: 1353178 - DNA, 25 bp, Homo sapien
attatggcagaagacgaaagaagag

SEQ ID NO: 1353179 - DNA, 25 bp, Homo sapien
tcctcaaactgaaagaacaagaaag

SEQ ID NO: 1353180 - DNA, 25 bp, Homo sapien
gcgcctagccgggaactctccttta

SEQ ID NO: 1353181 - DNA, 25 bp, Homo sapien
ggaaagactcgttaccatgattcaa

SEQ ID NO: 1353182 - DNA, 25 bp, Homo sapien
catagcattggtatacacatgtcca

SEQ ID NO: 1353183 - DNA, 25 bp, Homo sapien
gaaatgccagtttcgcaatgccagg

SEQ ID NO: 1353184 - DNA, 25 bp, Homo sapien
taacgcacaatggttttaacatagc

SEQ ID NO: 1353185 - DNA, 25 bp, Homo sapien
acgcacgcgcacagggctctgataa

SEQ ID NO: 1353186 - DNA, 25 bp, Homo sapien
aaaaaacatgttcggactgagccac

SEQ ID NO: 1353187 - DNA, 25 bp, Homo sapien
cagcattcacaccacaccagaattt

SEQ ID NO: 1353188 - DNA, 25 bp, Homo sapien
aacaaaactgatattgcaatcgtgt

SEQ ID NO: 1353189 - DNA, 25 bp, Homo sapien
tgatattgcaatcgtgtaataatga

SEQ ID NO: 1353190 - DNA, 25 bp, Homo sapien
tcatgctggctagaaacttccatcc

SEQ ID NO: 1353191 - DNA, 25 bp, Homo sapien
ggttcatgctggctagaaacttcca

SEQ ID NO: 1353192 - DNA, 25 bp, Homo sapien
ctgtaacgaaacagtgaattttgtc

SEQ ID NO: 1353193 - DNA, 25 bp, Homo sapien
cgaaacagtgaattttgtctcaaaa

SEQ ID NO: 1353194 - DNA, 25 bp, Homo sapien
tatcaatagagctggcaaaaatgca

SEQ ID NO: 1353195 - DNA, 25 bp, Homo sapien
gtcttaaagacatggtgcctaaggg

SEQ ID NO: 1353196 - DNA, 25 bp, Homo sapien
tcaagaagtatgtgggtcatctagg

SEQ ID NO: 1353197 - DNA, 25 bp, Homo sapien
ctctcttggaagaatactggcggca

SEQ ID NO: 1353198 - DNA, 25 bp, Homo sapien
gtcactctcaggcaccatctgagca

SEQ ID NO: 1353199 - DNA, 25 bp, Homo sapien
gaacttgtggctatcacctttcaat

SEQ ID NO: 1353200 - DNA, 25 bp, Homo sapien
gcctacactgtcatgggagttatta

SEQ ID NO: 1353201 - DNA, 25 bp, Homo sapien
tggcagtagccaacgcagatccaag

SEQ ID NO: 1353202 - DNA, 25 bp, Homo sapien
cagggcaccagcatggtcagattct

SEQ ID NO: 1353203 - DNA, 25 bp, Homo sapien
atcagggcaccagcatggtcagatt

SEQ ID NO: 1353204 - DNA, 25 bp, Homo sapien
tcagggcaccagcatggtcagattc

SEQ ID NO: 1353205 - DNA, 25 bp, Homo sapien
taagtggaacattgtgactacccaa

SEQ ID NO: 1353206 - DNA, 25 bp, Homo sapien
gcctgtaataactaggtgacctaac

SEQ ID NO: 1353207 - DNA, 25 bp, Homo sapien
tcaggtgctggtctaacacttaaca

SEQ ID NO: 1353208 - DNA, 25 bp, Homo sapien
gaattcagattcatactcaggcttg

SEQ ID NO: 1353209 - DNA, 25 bp, Homo sapien
gcatgaatacatgccaacgcatcta

SEQ ID NO: 1353210 - DNA, 25 bp, Homo sapien
tcagaggttgctccaatattgaaca

SEQ ID NO: 1353211 - DNA, 25 bp, Homo sapien
gtgcctggaacgctagacctgctgc

SEQ ID NO: 1353212 - DNA, 25 bp, Homo sapien
aaaatgtgggcttatacttggagcc

SEQ ID NO: 1353213 - DNA, 25 bp, Homo sapien
gttcagctgtctgccatccatcaga

SEQ ID NO: 1353214 - DNA, 25 bp, Homo sapien
gctgtctgccatccatcagatggtt

SEQ ID NO: 1353215 - DNA, 25 bp, Homo sapien
ctggttcagctgtctgccatccatc

SEQ ID NO: 1353216 - DNA, 25 bp, Homo sapien
agctgtctgccatccatcagatggt

SEQ ID NO: 1353217 - DNA, 25 bp, Homo sapien
cactgaagcttggttggcattccgg

SEQ ID NO: 1353218 - DNA, 25 bp, Homo sapien
caattagtgcagagaagtgagactc

SEQ ID NO: 1353219 - DNA, 25 bp, Homo sapien
aatgaaggcgctgggacactgaagc

SEQ ID NO: 1353220 - DNA, 25 bp, Homo sapien
tgtaaacaggcttgggtaacagtcc

SEQ ID NO: 1353221 - DNA, 25 bp, Homo sapien
ggaaccaaggagacatgctgaaacc

SEQ ID NO: 1353222 - DNA, 25 bp, Homo sapien
gagtggcaacgttacagacgcttaa

SEQ ID NO: 1353223 - DNA, 25 bp, Homo sapien
gctgggaaccaaggagacatgctga

SEQ ID NO: 1353224 - DNA, 25 bp, Homo sapien
aggagcctcagcgacgagtggcaac

SEQ ID NO: 1353225 - DNA, 25 bp, Homo sapien
ttggccaaagttaccagagctcctt

SEQ ID NO: 1353226 - DNA, 25 bp, Homo sapien
agcatttcctactgaaaagtcttgg

SEQ ID NO: 1353227 - DNA, 25 bp, Homo sapien
ttttgaagcatttcctactgaaaag

SEQ ID NO: 1353228 - DNA, 25 bp, Homo sapien
agagctccttttccatacagatgaa

SEQ ID NO: 1353229 - DNA, 25 bp, Homo sapien
tagccaacaggactatagcggtgac

SEQ ID NO: 1353230 - DNA, 25 bp, Homo sapien
gattctgctaagctaaggatgcaca

SEQ ID NO: 1353231 - DNA, 25 bp, Homo sapien
ttaaaacattttcgagccctgtgtg

SEQ ID NO: 1353232 - DNA, 25 bp, Homo sapien
caggtagggcctgtaaaggacttca

SEQ ID NO: 1353233 - DNA, 25 bp, Homo sapien
acttcttagggtgtagaaatctagc

SEQ ID NO: 1353234 - DNA, 25 bp, Homo sapien
taaaatttgtggaatctttgtactc

SEQ ID NO: 1353235 - DNA, 25 bp, Homo sapien
gactgagcactcttcgaatactgtt

SEQ ID NO: 1353236 - DNA, 25 bp, Homo sapien
tgaatttagaaacctgagtatgact

SEQ ID NO: 1353237 - DNA, 25 bp, Homo sapien
ttaaaggtagacatggaactagggc

SEQ ID NO: 1353238 - DNA, 25 bp, Homo sapien
tagagatgctgacctaatggcacgt

SEQ ID NO: 1353239 - DNA, 25 bp, Homo sapien
gattttggaagttttggtgcaccca

SEQ ID NO: 1353240 - DNA, 25 bp, Homo sapien
cacccaagcagtacccaatgtgtag

SEQ ID NO: 1353241 - DNA, 25 bp, Homo sapien
tgttaagttacctctccagggccag

SEQ ID NO: 1353242 - DNA, 25 bp, Homo sapien
tattttgggtgatgcagacagccac

SEQ ID NO: 1353243 - DNA, 25 bp, Homo sapien
cactgattggaaacttgagtccgtc

SEQ ID NO: 1353244 - DNA, 25 bp, Homo sapien
gagtccgtccagatctcgtggctta

SEQ ID NO: 1353245 - DNA, 25 bp, Homo sapien
atcccattttgccccaacactgtgg

SEQ ID NO: 1353246 - DNA, 25 bp, Homo sapien
ccattttgccccaacactgtggcag

SEQ ID NO: 1353247 - DNA, 25 bp, Homo sapien
gctcatcccattttgccccaacact

SEQ ID NO: 1353248 - DNA, 25 bp, Homo sapien
ttgtttcagatctgggctcatccca

SEQ ID NO: 1353249 - DNA, 25 bp, Homo sapien
caggccatttgctactaataataaa

SEQ ID NO: 1353250 - DNA, 25 bp, Homo sapien
taatggccaatctgaaagatccctg

SEQ ID NO: 1353251 - DNA, 25 bp, Homo sapien
tgctgaaaaccttcgtaagagagcc

SEQ ID NO: 1353252 - DNA, 25 bp, Homo sapien
taagagagccttaccacggattgcc

SEQ ID NO: 1353253 - DNA, 25 bp, Homo sapien
gccttcccccgtcgctgagtcacca

SEQ ID NO: 1353254 - DNA, 25 bp, Homo sapien
tcctgtatctagatgccttcccccg

SEQ ID NO: 1353255 - DNA, 25 bp, Homo sapien
ccccgtcgctgagtcaccagctgtg

SEQ ID NO: 1353256 - DNA, 25 bp, Homo sapien
tgtatctagatgccttcccccgtcg

SEQ ID NO: 1353257 - DNA, 25 bp, Homo sapien
tgctgtgctttgtatagacttccat

SEQ ID NO: 1353258 - DNA, 25 bp, Homo sapien
gctctctctgtgaatccataatccg

SEQ ID NO: 1353259 - DNA, 25 bp, Homo sapien
tgtgaatccataatccgcagtgccc

SEQ ID NO: 1353260 - DNA, 25 bp, Homo sapien
gctcacgtccttctcctacaggctt

SEQ ID NO: 1353261 - DNA, 25 bp, Homo sapien
tcagcaacgagtatcccataggcca

SEQ ID NO: 1353262 - DNA, 25 bp, Homo sapien
aatgtttgatatcgattttccctgg

SEQ ID NO: 1353263 - DNA, 25 bp, Homo sapien
gggattcagtcatatgtgaaagaag

SEQ ID NO: 1353264 - DNA, 25 bp, Homo sapien
tgtgaagggattcagtcatatgtga

SEQ ID NO: 1353265 - DNA, 25 bp, Homo sapien
cactgtgctgctggaaactctgcct

SEQ ID NO: 1353266 - DNA, 25 bp, Homo sapien
actgtgctgctggaaactctgcctc

SEQ ID NO: 1353267 - DNA, 25 bp, Homo sapien
tcactgtgctgctggaaactctgcc

SEQ ID NO: 1353268 - DNA, 25 bp, Homo sapien
tgtgctgctggaaactctgcctcac

SEQ ID NO: 1353269 - DNA, 25 bp, Homo sapien
gatggactctgggtgagtaaagcaa

SEQ ID NO: 1353270 - DNA, 25 bp, Homo sapien
taccccttgaaaagcgagtttgatg

SEQ ID NO: 1353271 - DNA, 25 bp, Homo sapien
ctcatctaccccttgaaaagcgagt

SEQ ID NO: 1353272 - DNA, 25 bp, Homo sapien
gaaaagcgagtttgatggactctgg

SEQ ID NO: 1353273 - DNA, 25 bp, Homo sapien
gtttgcaagaagcctttatggttca

SEQ ID NO: 1353274 - DNA, 25 bp, Homo sapien
agtttgcaagaagcctttatggttc

SEQ ID NO: 1353275 - DNA, 25 bp, Homo sapien
gagtttgcaagaagcctttatggtt

SEQ ID NO: 1353276 - DNA, 25 bp, Homo sapien
tcctgggaggctgtacaagaacaaa

SEQ ID NO: 1353277 - DNA, 25 bp, Homo sapien
gcatgggctcactaattagatatgt

SEQ ID NO: 1353278 - DNA, 25 bp, Homo sapien
tgagaatttgcacctaaagacaagc

SEQ ID NO: 1353279 - DNA, 25 bp, Homo sapien
tgtgacctagtgcaagatacctatt

SEQ ID NO: 1353280 - DNA, 25 bp, Homo sapien
cacagattcagcgttaaaaagcctc

SEQ ID NO: 1353281 - DNA, 25 bp, Homo sapien
gaatcaagacacctttgcctgcaca

SEQ ID NO: 1353282 - DNA, 25 bp, Homo sapien
tgaagactgattgctcaacaagggc

SEQ ID NO: 1353283 - DNA, 25 bp, Homo sapien
tatttaagagggagtgctaagtccc

SEQ ID NO: 1353284 - DNA, 25 bp, Homo sapien
agctcacggaactaaactttattgg

SEQ ID NO: 1353285 - DNA, 25 bp, Homo sapien
tttgaccgtgcttctgccattgatg

SEQ ID NO: 1353286 - DNA, 25 bp, Homo sapien
gccattgatgatactagctcacgga

SEQ ID NO: 1353287 - DNA, 25 bp, Homo sapien
tgaagccagaattgactacacattt

SEQ ID NO: 1353288 - DNA, 25 bp, Homo sapien
gactaagttacagtagacggatctc

SEQ ID NO: 1353289 - DNA, 25 bp, Homo sapien
ccttgcgtaaggcacatgcagggtg

SEQ ID NO: 1353290 - DNA, 25 bp, Homo sapien
tggagggctccgtgcttagtaactc

SEQ ID NO: 1353291 - DNA, 25 bp, Homo sapien
gtaactctgttgtgaggataaccac

SEQ ID NO: 1353292 - DNA, 25 bp, Homo sapien
tgctaaggccaagtgtcagccggca

SEQ ID NO: 1353293 - DNA, 25 bp, Homo sapien
ggcaacttcctgaactttaaggcag

SEQ ID NO: 1353294 - DNA, 25 bp, Homo sapien
catgctctccccgaaaggaatggtc

SEQ ID NO: 1353295 - DNA, 25 bp, Homo sapien
cagattcacagtcagttgttaaggg

SEQ ID NO: 1353296 - DNA, 25 bp, Homo sapien
caaccaagaggtaagtagcagccct

SEQ ID NO: 1353297 - DNA, 25 bp, Homo sapien
taaacagataagagttcccacggga

SEQ ID NO: 1353298 - DNA, 25 bp, Homo sapien
cctacaatttcacaggtggctggga

SEQ ID NO: 1353299 - DNA, 25 bp, Homo sapien
caattaaatggagcccagggtgctg

SEQ ID NO: 1353300 - DNA, 25 bp, Homo sapien
tagaaaatggtgttactcaggaaag

SEQ ID NO: 1353301 - DNA, 25 bp, Homo sapien
ttagatagaaaatggtgttactcag

SEQ ID NO: 1353302 - DNA, 25 bp, Homo sapien
agaaaatggtgttactcaggaaagg

SEQ ID NO: 1353303 - DNA, 25 bp, Homo sapien
gatagaaaatggtgttactcaggaa

SEQ ID NO: 1353304 - DNA, 25 bp, Homo sapien
agtgacacaactgggccgcggcgcc

SEQ ID NO: 1353305 - DNA, 25 bp, Homo sapien
ggcacagcacggcaactcgctgccc

SEQ ID NO: 1353306 - DNA, 25 bp, Homo sapien
ccacgcagcgcagggcggacttcgg

SEQ ID NO: 1353307 - DNA, 25 bp, Homo sapien
cccgctgggaggactagtcaacagg

SEQ ID NO: 1353308 - DNA, 25 bp, Homo sapien
tcaacttggactgatctgcggctcc

SEQ ID NO: 1353309 - DNA, 25 bp, Homo sapien
taatgtcgtcgattactagcaggcg

SEQ ID NO: 1353310 - DNA, 25 bp, Homo sapien
catggtatatggagaggctgtgcac

SEQ ID NO: 1353311 - DNA, 25 bp, Homo sapien
tagcaggcgcaacagcacatggtat

SEQ ID NO: 1353312 - DNA, 25 bp, Homo sapien
taagggccttttcaagcaagactgc

SEQ ID NO: 1353313 - DNA, 25 bp, Homo sapien
tagaaaagacgccacaacagaagcc

SEQ ID NO: 1353314 - DNA, 25 bp, Homo sapien
aaatgttaaaaacgcaggctactgc

SEQ ID NO: 1353315 - DNA, 25 bp, Homo sapien
ggctactgctatacccaaatatgga

SEQ ID NO: 1353316 - DNA, 25 bp, Homo sapien
caagtacaacatacccaaaagaggg

SEQ ID NO: 1353317 - DNA, 25 bp, Homo sapien
gagacctctgcctgggaatttgcca

SEQ ID NO: 1353318 - DNA, 25 bp, Homo sapien
tgcttggttagcatagcctcctgcc

SEQ ID NO: 1353319 - DNA, 25 bp, Homo sapien
ggaagtataagtcagcctcccggag

SEQ ID NO: 1353320 - DNA, 25 bp, Homo sapien
gttcctccctctcaggtcctcccac

SEQ ID NO: 1353321 - DNA, 25 bp, Homo sapien
ctccctctcaggtcctcccacccac

SEQ ID NO: 1353322 - DNA, 25 bp, Homo sapien
gcatcaccaaacaaaacgacttttg

SEQ ID NO: 1353323 - DNA, 25 bp, Homo sapien
aacgacttttgttcctccctctcag

SEQ ID NO: 1353324 - DNA, 25 bp, Homo sapien
gatagtatcaaggaccccatggagg

SEQ ID NO: 1353325 - DNA, 25 bp, Homo sapien
tgggtctgtgacgaggatagtatca

SEQ ID NO: 1353326 - DNA, 25 bp, Homo sapien
tggtcaaagttaccgggcagtgctg

SEQ ID NO: 1353327 - DNA, 25 bp, Homo sapien
aaggagctgggattcgatgcctccg

SEQ ID NO: 1353328 - DNA, 25 bp, Homo sapien
tcccagtgctcaaagacctgtggaa

SEQ ID NO: 1353329 - DNA, 25 bp, Homo sapien
tcaaacaacttcatggtcccagtgc

SEQ ID NO: 1353330 - DNA, 25 bp, Homo sapien
ttaccaatgacaaccctgagtgccg

SEQ ID NO: 1353331 - DNA, 25 bp, Homo sapien
ggtatctccacacgagttaccaatg

SEQ ID NO: 1353332 - DNA, 25 bp, Homo sapien
tacaactgcccgcatgccaatgaag

SEQ ID NO: 1353333 - DNA, 25 bp, Homo sapien
gactgtgaagatgcggttccgctgc

SEQ ID NO: 1353334 - DNA, 25 bp, Homo sapien
gacactaatgcagccacgattggag

SEQ ID NO: 1353335 - DNA, 25 bp, Homo sapien
cagggcacacctagacaaacaaggg

SEQ ID NO: 1353336 - DNA, 25 bp, Homo sapien
cacacaacagggcatcagtgggcat

SEQ ID NO: 1353337 - DNA, 25 bp, Homo sapien
caccaggtagtgaggcaacatgtac

SEQ ID NO: 1353338 - DNA, 25 bp, Homo sapien
tgtgtactgagcaactgaggcatcc

SEQ ID NO: 1353339 - DNA, 25 bp, Homo sapien
gggcccataattgcaaggtctccag

SEQ ID NO: 1353340 - DNA, 25 bp, Homo sapien
cccatattgttaagctccaaacaaa

SEQ ID NO: 1353341 - DNA, 25 bp, Homo sapien
agttgcttgtggcttcttggtccat

SEQ ID NO: 1353342 - DNA, 25 bp, Homo sapien
ctaaccccatattgttaagctccaa

SEQ ID NO: 1353343 - DNA, 25 bp, Homo sapien
ggtccatgaagttctgctgaaatgg

SEQ ID NO: 1353344 - DNA, 25 bp, Homo sapien
agacacccacggcacaattattaag

SEQ ID NO: 1353345 - DNA, 25 bp, Homo sapien
attaagttcattagacagagaggaa

SEQ ID NO: 1353346 - DNA, 25 bp, Homo sapien
taagttcattagacagagaggaatc

SEQ ID NO: 1353347 - DNA, 25 bp, Homo sapien
ttaagttcattagacagagaggaat

SEQ ID NO: 1353348 - DNA, 25 bp, Homo sapien
catacacataccataaaaagtctgt

SEQ ID NO: 1353349 - DNA, 25 bp, Homo sapien
ggcagttgttcagtatgaatccttc

SEQ ID NO: 1353350 - DNA, 25 bp, Homo sapien
tggatctttcctatgcacatttaga

SEQ ID NO: 1353351 - DNA, 25 bp, Homo sapien
tcctcacgagtaaccactggcagtt

SEQ ID NO: 1353352 - DNA, 25 bp, Homo sapien
tagacaacctcaccggcaacatgct

SEQ ID NO: 1353353 - DNA, 25 bp, Homo sapien
ttaccttgtaaacctgtcagtgccc

SEQ ID NO: 1353354 - DNA, 25 bp, Homo sapien
accttgtaaacctgtcagtgcccag

SEQ ID NO: 1353355 - DNA, 25 bp, Homo sapien
cagtcactgtagacaacctcaccgg

SEQ ID NO: 1353356 - DNA, 25 bp, Homo sapien
ctctccggtgagaggaaacgctttc

SEQ ID NO: 1353357 - DNA, 25 bp, Homo sapien
cgctgctgcccgtaaaggcctcaat

SEQ ID NO: 1353358 - DNA, 25 bp, Homo sapien
tatgatcctagttctgaccgctgct

SEQ ID NO: 1353359 - DNA, 25 bp, Homo sapien
taaattaccgagcttcatggcccag

SEQ ID NO: 1353360 - DNA, 25 bp, Homo sapien
tcagaactgccagaatggaatgtac

SEQ ID NO: 1353361 - DNA, 25 bp, Homo sapien
tggataaccacttgagagagatgct

SEQ ID NO: 1353362 - DNA, 25 bp, Homo sapien
ccatcactgcgggtattgaagtaga

SEQ ID NO: 1353363 - DNA, 25 bp, Homo sapien
ctagggtcccttccagttacaagat

SEQ ID NO: 1353364 - DNA, 25 bp, Homo sapien
ggaacatggaaaaagttgctgtctc

SEQ ID NO: 1353365 - DNA, 25 bp, Homo sapien
caggaacatggaaaaagttgctgtc

SEQ ID NO: 1353366 - DNA, 25 bp, Homo sapien
tgaccaacctttccagggaaagatc

SEQ ID NO: 1353367 - DNA, 25 bp, Homo sapien
aaggatgttggctgaacaactgacc

SEQ ID NO: 1353368 - DNA, 25 bp, Homo sapien
ttttcaaggcctttaatttgtctgc

SEQ ID NO: 1353369 - DNA, 25 bp, Homo sapien
tttcaaggcctttaatttgtctgct

SEQ ID NO: 1353370 - DNA, 25 bp, Homo sapien
ttttcatggatgttctccaaccact

SEQ ID NO: 1353371 - DNA, 25 bp, Homo sapien
acaggctctaaaattgtggcaatga

SEQ ID NO: 1353372 - DNA, 25 bp, Homo sapien
aacaggctctaaaattgtggcaatg

SEQ ID NO: 1353373 - DNA, 25 bp, Homo sapien
ctctaaaattgtggcaatgatcaat

SEQ ID NO: 1353374 - DNA, 25 bp, Homo sapien
ggctctaaaattgtggcaatgatca

SEQ ID NO: 1353375 - DNA, 25 bp, Homo sapien
ttagctcaggaacggaatgtgatcc

SEQ ID NO: 1353376 - DNA, 25 bp, Homo sapien
tgctactcaaattcaaacagggtgc

SEQ ID NO: 1353377 - DNA, 25 bp, Homo sapien
ttagtcaagtacagatccccaaagg

SEQ ID NO: 1353378 - DNA, 25 bp, Homo sapien
tactgaaacctacaagccatcgatg

SEQ ID NO: 1353379 - DNA, 25 bp, Homo sapien
tgcttttgacgtttggacccaggac

SEQ ID NO: 1353380 - DNA, 25 bp, Homo sapien
gaactgcccttcatgctgacactat

SEQ ID NO: 1353381 - DNA, 25 bp, Homo sapien
aataatcagagccaagtgtgtagga

SEQ ID NO: 1353382 - DNA, 25 bp, Homo sapien
taatgcaacagagtacagcttagtc

SEQ ID NO: 1353383 - DNA, 25 bp, Homo sapien
tgaaacccaaatcccactacttgct

SEQ ID NO: 1353384 - DNA, 25 bp, Homo sapien
gggaaacaaactggatcaactacat

SEQ ID NO: 1353385 - DNA, 25 bp, Homo sapien
taaaaatagaccagcatctttatgt

SEQ ID NO: 1353386 - DNA, 25 bp, Homo sapien
ggtacaacacaaagtatatgtcaac

SEQ ID NO: 1353387 - DNA, 25 bp, Homo sapien
tctcaagttgcaaggactcactttc

SEQ ID NO: 1353388 - DNA, 25 bp, Homo sapien
cattagtactttcataccaagggtc

SEQ ID NO: 1353389 - DNA, 25 bp, Homo sapien
aagtctccttaactaacgtctctgg

SEQ ID NO: 1353390 - DNA, 25 bp, Homo sapien
accaagggtccttctggcattattg

SEQ ID NO: 1353391 - DNA, 25 bp, Homo sapien
gccagggcctaataagtactatgct

SEQ ID NO: 1353392 - DNA, 25 bp, Homo sapien
tgcagtgagaggaccattcgagccc

SEQ ID NO: 1353393 - DNA, 25 bp, Homo sapien
tagacggtgcgttgtacagcctttc

SEQ ID NO: 1353394 - DNA, 25 bp, Homo sapien
gatccttgggtttcgtcacgcatga

SEQ ID NO: 1353395 - DNA, 25 bp, Homo sapien
ttgccaacgttcttggtagattcac

SEQ ID NO: 1353396 - DNA, 25 bp, Homo sapien
ttcattgccaacgttcttggtagat

SEQ ID NO: 1353397 - DNA, 25 bp, Homo sapien
ccaacgttcttggtagattcactct

SEQ ID NO: 1353398 - DNA, 25 bp, Homo sapien
cattgccaacgttcttggtagattc

SEQ ID NO: 1353399 - DNA, 25 bp, Homo sapien
gagcaaatgctcaagggaccacagc

SEQ ID NO: 1353400 - DNA, 25 bp, Homo sapien
ctgcaaaatgggaaccggagtaagt

SEQ ID NO: 1353401 - DNA, 25 bp, Homo sapien
tggaggacagaaactcgacctttct

SEQ ID NO: 1353402 - DNA, 25 bp, Homo sapien
ggcttatagctgttatctccactga

SEQ ID NO: 1353403 - DNA, 25 bp, Homo sapien
taagttccatccaagatatcatccc

SEQ ID NO: 1353404 - DNA, 25 bp, Homo sapien
aaccacaatggtgtttactgagccc

SEQ ID NO: 1353405 - DNA, 25 bp, Homo sapien
ccctttctaagagtaaggcactgaa

SEQ ID NO: 1353406 - DNA, 25 bp, Homo sapien
cctagacttcagattgtaccagcaa

SEQ ID NO: 1353407 - DNA, 25 bp, Homo sapien
tcaggtaaactctattttagcatct

SEQ ID NO: 1353408 - DNA, 25 bp, Homo sapien
caggtaaactctattttagcatcta

SEQ ID NO: 1353409 - DNA, 25 bp, Homo sapien
aaactctattttagcatctattgta

SEQ ID NO: 1353410 - DNA, 25 bp, Homo sapien
ggtaaactctattttagcatctatt

SEQ ID NO: 1353411 - DNA, 25 bp, Homo sapien
cagtgccaaaaatcctcctctctct

SEQ ID NO: 1353412 - DNA, 25 bp, Homo sapien
gcgtgttccagtgccaaaaatcctc

SEQ ID NO: 1353413 - DNA, 25 bp, Homo sapien
atgcgtgttccagtgccaaaaatcc

SEQ ID NO: 1353414 - DNA, 25 bp, Homo sapien
gtgccaaaaatcctcctctctctcc

SEQ ID NO: 1353415 - DNA, 25 bp, Homo sapien
taaggctcccagtacgctagtaaag

SEQ ID NO: 1353416 - DNA, 25 bp, Homo sapien
tgtacttacgatgtgacaaaactgg

SEQ ID NO: 1353417 - DNA, 25 bp, Homo sapien
caaaaccaacatttgagagagcact

SEQ ID NO: 1353418 - DNA, 25 bp, Homo sapien
tacagaagatgtttgccctagctac

SEQ ID NO: 1353419 - DNA, 25 bp, Homo sapien
ccacatgtaatgttggatactcaat

SEQ ID NO: 1353420 - DNA, 25 bp, Homo sapien
gaactttcatgtcattattggatcc

SEQ ID NO: 1353421 - DNA, 25 bp, Homo sapien
tgtctaggagacttttataaggatc

SEQ ID NO: 1353422 - DNA, 25 bp, Homo sapien
tattggatcctttcaataccacatg

SEQ ID NO: 1353423 - DNA, 25 bp, Homo sapien
tatctcatgagatccagcctaatgg

SEQ ID NO: 1353424 - DNA, 25 bp, Homo sapien
catagctgagtaagacatgcaggac

SEQ ID NO: 1353425 - DNA, 25 bp, Homo sapien
gagtttatcgtgacatagctgccaa

SEQ ID NO: 1353426 - DNA, 25 bp, Homo sapien
gaggtggctgaaaatgcatccccag

SEQ ID NO: 1353427 - DNA, 25 bp, Homo sapien
tcatggacgatatcttaaaatgtgt

SEQ ID NO: 1353428 - DNA, 25 bp, Homo sapien
tctgtagccactctgtaggtgacct

SEQ ID NO: 1353429 - DNA, 25 bp, Homo sapien
tgttaacctatctagcaaggatggg

SEQ ID NO: 1353430 - DNA, 25 bp, Homo sapien
gctgttagcccggtgtaggtgatcc

SEQ ID NO: 1353431 - DNA, 25 bp, Homo sapien
ttcactatctaggtaattcagttcc

SEQ ID NO: 1353432 - DNA, 25 bp, Homo sapien
ttcagttcctaaccctagctaacac

SEQ ID NO: 1353433 - DNA, 25 bp, Homo sapien
taacacctctccttaattggttcat

SEQ ID NO: 1353434 - DNA, 25 bp, Homo sapien
tagctaacacctctccttaattggt

SEQ ID NO: 1353435 - DNA, 25 bp, Homo sapien
cagtcaaacttgactctgacaaaat

SEQ ID NO: 1353436 - DNA, 25 bp, Homo sapien
ccagtcaaacttgactctgacaaaa

SEQ ID NO: 1353437 - DNA, 25 bp, Homo sapien
tctgacaaaatagcctcttcttcca

SEQ ID NO: 1353438 - DNA, 25 bp, Homo sapien
ctctgacaaaatagcctcttcttcc

SEQ ID NO: 1353439 - DNA, 25 bp, Homo sapien
aaatctgaaccccagtctgagagcg

SEQ ID NO: 1353440 - DNA, 25 bp, Homo sapien
ctgagagcgaatgtaggctttcaac

SEQ ID NO: 1353441 - DNA, 25 bp, Homo sapien
gctgcatatattcaatcttcattaa

SEQ ID NO: 1353442 - DNA, 25 bp, Homo sapien
cccagtctgagagcgaatgtaggct

SEQ ID NO: 1353443 - DNA, 25 bp, Homo sapien
ctttgacgaattacaggatcagact

SEQ ID NO: 1353444 - DNA, 25 bp, Homo sapien
aattacaggatcagacttttcagga

SEQ ID NO: 1353445 - DNA, 25 bp, Homo sapien
caatgtaaggttttaggatttcatt

SEQ ID NO: 1353446 - DNA, 25 bp, Homo sapien
caggatcagacttttcaggatcaat

SEQ ID NO: 1353447 - DNA, 25 bp, Homo sapien
actttgaggaaactggagcttcaca

SEQ ID NO: 1353448 - DNA, 25 bp, Homo sapien
tgactttgaggaaactggagcttca

SEQ ID NO: 1353449 - DNA, 25 bp, Homo sapien
ctatgtactcagcttgactttgagg

SEQ ID NO: 1353450 - DNA, 25 bp, Homo sapien
cttttttctatgtactcagcttgac

SEQ ID NO: 1353451 - DNA, 25 bp, Homo sapien
ggaggttgcagagagaagactgaga

SEQ ID NO: 1353452 - DNA, 25 bp, Homo sapien
cagagagaagactgagattgcacca

SEQ ID NO: 1353453 - DNA, 25 bp, Homo sapien
aaaatgaaaataagatgggcacagt

SEQ ID NO: 1353454 - DNA, 25 bp, Homo sapien
aaatgaaaataagatgggcacagtg

SEQ ID NO: 1353455 - DNA, 25 bp, Homo sapien
aaggctgtttaataccgtgttatgt

SEQ ID NO: 1353456 - DNA, 25 bp, Homo sapien
atgttcatgaatatcggaataatta

SEQ ID NO: 1353457 - DNA, 25 bp, Homo sapien
catgaatatcggaataattaaatga

SEQ ID NO: 1353458 - DNA, 25 bp, Homo sapien
ggctgtttaataccgtgttatgtat

SEQ ID NO: 1353459 - DNA, 25 bp, Homo sapien
tttcagacagcagcaaactaatctc

SEQ ID NO: 1353460 - DNA, 25 bp, Homo sapien
acccaacattttcagacagcagcaa

SEQ ID NO: 1353461 - DNA, 25 bp, Homo sapien
ctgttatattatctgtactcaagag

SEQ ID NO: 1353462 - DNA, 25 bp, Homo sapien
tcaagagttcaaagtccccttcttc

SEQ ID NO: 1353463 - DNA, 25 bp, Homo sapien
cttcctcttggtgaatccattgggt

SEQ ID NO: 1353464 - DNA, 25 bp, Homo sapien
taagttaataccttgcctccgggca

SEQ ID NO: 1353465 - DNA, 25 bp, Homo sapien
tgaatccattgggtagaagttttaa

SEQ ID NO: 1353466 - DNA, 25 bp, Homo sapien
cgggcacgatttttcataaagtaca

SEQ ID NO: 1353467 - DNA, 25 bp, Homo sapien
aagcatctctagaaatatggtccgc

SEQ ID NO: 1353468 - DNA, 25 bp, Homo sapien
tctctagaaatatggtccgctgttc

SEQ ID NO: 1353469 - DNA, 25 bp, Homo sapien
gcatctctagaaatatggtccgctg

SEQ ID NO: 1353470 - DNA, 25 bp, Homo sapien
tagaaatatggtccgctgttcttgc

SEQ ID NO: 1353471 - DNA, 25 bp, Homo sapien
actccattacatgtcagttctgctt

SEQ ID NO: 1353472 - DNA, 25 bp, Homo sapien
cacttaggagattcatttcagtaaa

SEQ ID NO: 1353473 - DNA, 25 bp, Homo sapien
aaatgtatgcagttttatctcgaac

SEQ ID NO: 1353474 - DNA, 25 bp, Homo sapien
gttttatctcgaactccattacatg

SEQ ID NO: 1353475 - DNA, 25 bp, Homo sapien
caacgtggacatctgtactttgctt

SEQ ID NO: 1353476 - DNA, 25 bp, Homo sapien
gcttcttctgtaccacaagtctcac

SEQ ID NO: 1353477 - DNA, 25 bp, Homo sapien
gcaggaatatcgcatacaacgtgga

SEQ ID NO: 1353478 - DNA, 25 bp, Homo sapien
tactttgcttcttctgtaccacaag

SEQ ID NO: 1353479 - DNA, 25 bp, Homo sapien
tgacatggccagtttccgcttgcag

SEQ ID NO: 1353480 - DNA, 25 bp, Homo sapien
tacctggccagtctataatttcctg

SEQ ID NO: 1353481 - DNA, 25 bp, Homo sapien
cagcccaccgggtgatttatcggag

SEQ ID NO: 1353482 - DNA, 25 bp, Homo sapien
taggtccatcggtatttcctctggc

SEQ ID NO: 1353483 - DNA, 25 bp, Homo sapien
tcctctccgccgccgaactcctccg

SEQ ID NO: 1353484 - DNA, 25 bp, Homo sapien
tagccgcaccccctcagctacgctg

SEQ ID NO: 1353485 - DNA, 25 bp, Homo sapien
tcagctacgctgtggagacctcccc

SEQ ID NO: 1353486 - DNA, 25 bp, Homo sapien
tgccaggctctggacttagccgcac

SEQ ID NO: 1353487 - DNA, 25 bp, Homo sapien
gtaactgcgtgacttgcccgctggg

SEQ ID NO: 1353488 - DNA, 25 bp, Homo sapien
gaatagcctgcttgacgcgactgct

SEQ ID NO: 1353489 - DNA, 25 bp, Homo sapien
tctgggcgaacaagcgtaactgcgt

SEQ ID NO: 1353490 - DNA, 25 bp, Homo sapien
tgcacaccaataggaggaattaccg

SEQ ID NO: 1353491 - DNA, 25 bp, Homo sapien
tgtaaagagtgtaggagaccggcag

SEQ ID NO: 1353492 - DNA, 25 bp, Homo sapien
taaagagtgtaggagaccggcagag

SEQ ID NO: 1353493 - DNA, 25 bp, Homo sapien
ggtgtaaagagtgtaggagaccggc

SEQ ID NO: 1353494 - DNA, 25 bp, Homo sapien
ctgggtgtaaagagtgtaggagacc

SEQ ID NO: 1353495 - DNA, 25 bp, Homo sapien
gaattgcctggattgattactggca

SEQ ID NO: 1353496 - DNA, 25 bp, Homo sapien
tgtaggccttccagagaagcttgca

SEQ ID NO: 1353497 - DNA, 25 bp, Homo sapien
tgatcaaaaatcaggtcaccaaggc

SEQ ID NO: 1353498 - DNA, 25 bp, Homo sapien
gatttggatggacctattatgacca

SEQ ID NO: 1353499 - DNA, 25 bp, Homo sapien
tataacttaggaacagcccgctgga

SEQ ID NO: 1353500 - DNA, 25 bp, Homo sapien
aactattcagtgcaacggttgtacc

SEQ ID NO: 1353501 - DNA, 25 bp, Homo sapien
attgcaagtcccaggccatcggtaa

SEQ ID NO: 1353502 - DNA, 25 bp, Homo sapien
caccagctatgcataaggctttcaa

SEQ ID NO: 1353503 - DNA, 25 bp, Homo sapien
atggctcaccataacttcaacttct

SEQ ID NO: 1353504 - DNA, 25 bp, Homo sapien
tcatggctcaccataacttcaactt

SEQ ID NO: 1353505 - DNA, 25 bp, Homo sapien
tcaccataacttcaacttcttgggc

SEQ ID NO: 1353506 - DNA, 25 bp, Homo sapien
caccataacttcaacttcttgggct

SEQ ID NO: 1353507 - DNA, 25 bp, Homo sapien
tatcaccggctaagatgtatatgcc

SEQ ID NO: 1353508 - DNA, 25 bp, Homo sapien
cagctgtctaatgggtactacgcac

SEQ ID NO: 1353509 - DNA, 25 bp, Homo sapien
gagacattgaactggctgagcctat

SEQ ID NO: 1353510 - DNA, 25 bp, Homo sapien
cagtattgctccatagtgctctgca

SEQ ID NO: 1353511 - DNA, 25 bp, Homo sapien
aaagaaatgttgccttatgccagct

SEQ ID NO: 1353512 - DNA, 25 bp, Homo sapien
tcaatcactggaagttgattaggtt

SEQ ID NO: 1353513 - DNA, 25 bp, Homo sapien
tgtacttcaatcactggaagttgat

SEQ ID NO: 1353514 - DNA, 25 bp, Homo sapien
gaagtttttgtacttcaatcactgg

SEQ ID NO: 1353515 - DNA, 25 bp, Homo sapien
gcttagcatggcgtttaaattcacg

SEQ ID NO: 1353516 - DNA, 25 bp, Homo sapien
aacagaagggcaagtagaaagtggc

SEQ ID NO: 1353517 - DNA, 25 bp, Homo sapien
tcactagcagtacagtaaggcctgg

SEQ ID NO: 1353518 - DNA, 25 bp, Homo sapien
taaattcacggatttgacctgggac

SEQ ID NO: 1353519 - DNA, 25 bp, Homo sapien
ccttgaaaccaataggcaatcctgg

SEQ ID NO: 1353520 - DNA, 25 bp, Homo sapien
gaagttcatctggactttcccaact

SEQ ID NO: 1353521 - DNA, 25 bp, Homo sapien
gtgatgatatgggtggcttccgaac

SEQ ID NO: 1353522 - DNA, 25 bp, Homo sapien
tccgaactcagtaaatgaaggaagt

SEQ ID NO: 1353523 - DNA, 25 bp, Homo sapien
aacaggaggtaagcatgtctggcca

SEQ ID NO: 1353524 - DNA, 25 bp, Homo sapien
aaacaggaggtaagcatgtctggcc

SEQ ID NO: 1353525 - DNA, 25 bp, Homo sapien
caggaggtaagcatgtctggccacc

SEQ ID NO: 1353526 - DNA, 25 bp, Homo sapien
ggaggtaagcatgtctggccaccag

SEQ ID NO: 1353527 - DNA, 25 bp, Homo sapien
agatttgggtcaatccagtattttc

SEQ ID NO: 1353528 - DNA, 25 bp, Homo sapien
gaaggacagccaagatttgggtcaa

SEQ ID NO: 1353529 - DNA, 25 bp, Homo sapien
ctgaaggacagccaagatttgggtc

SEQ ID NO: 1353530 - DNA, 25 bp, Homo sapien
agccaagatttgggtcaatccagta

SEQ ID NO: 1353531 - DNA, 25 bp, Homo sapien
tgggttatctcgtgtgccaagagga

SEQ ID NO: 1353532 - DNA, 25 bp, Homo sapien
caataaattgctaaggtagttcagg

SEQ ID NO: 1353533 - DNA, 25 bp, Homo sapien
tcttcactgtggtcaattaaagtca

SEQ ID NO: 1353534 - DNA, 25 bp, Homo sapien
gtaaatctttgcagattcgtgctgg

SEQ ID NO: 1353535 - DNA, 25 bp, Homo sapien
aagtcatcataagaattatataagc

SEQ ID NO: 1353536 - DNA, 25 bp, Homo sapien
ctgccaagtcatcataagaattata

SEQ ID NO: 1353537 - DNA, 25 bp, Homo sapien
ccaagtcatcataagaattatataa

SEQ ID NO: 1353538 - DNA, 25 bp, Homo sapien
tgccaagtcatcataagaattatat

SEQ ID NO: 1353539 - DNA, 25 bp, Homo sapien
ggcagtatttgattcaatcaaggct

SEQ ID NO: 1353540 - DNA, 25 bp, Homo sapien
gggcagtatttgattcaatcaaggc

SEQ ID NO: 1353541 - DNA, 25 bp, Homo sapien
agcaataagatcaacactgagtgcc

SEQ ID NO: 1353542 - DNA, 25 bp, Homo sapien
agattagcaataagatcaacactga

SEQ ID NO: 1353543 - DNA, 25 bp, Homo sapien
gattagcaataagatcaacactgag

SEQ ID NO: 1353544 - DNA, 25 bp, Homo sapien
ttagcaataagatcaacactgagtg

SEQ ID NO: 1353545 - DNA, 25 bp, Homo sapien
ttgggcctggtgctccaggtggacc

SEQ ID NO: 1353546 - DNA, 25 bp, Homo sapien
tcttgggcctggtgctccaggtgga

SEQ ID NO: 1353547 - DNA, 25 bp, Homo sapien
cttgggcctggtgctccaggtggac

SEQ ID NO: 1353548 - DNA, 25 bp, Homo sapien
ctggttgacctcttggtccttgagg

SEQ ID NO: 1353549 - DNA, 25 bp, Homo sapien
aggccctggttgacctcttggtcct

SEQ ID NO: 1353550 - DNA, 25 bp, Homo sapien
tggaggccctggttgacctcttggt

SEQ ID NO: 1353551 - DNA, 25 bp, Homo sapien
gttgacctcttggtccttgaggacc

SEQ ID NO: 1353552 - DNA, 25 bp, Homo sapien
tctgccactggtgaagaaaacccat

SEQ ID NO: 1353553 - DNA, 25 bp, Homo sapien
gatctctttggtgctgactggacat

SEQ ID NO: 1353554 - DNA, 25 bp, Homo sapien
taatgatttgcctctgcattgcaga

SEQ ID NO: 1353555 - DNA, 25 bp, Homo sapien
tgggtatatgcctaaagcgaattgg

SEQ ID NO: 1353556 - DNA, 25 bp, Homo sapien
acctctaaagcccttttcacctctg

SEQ ID NO: 1353557 - DNA, 25 bp, Homo sapien
tcacctctaaagcccttttcacctc

SEQ ID NO: 1353558 - DNA, 25 bp, Homo sapien
cctctaaagcccttttcacctctgg

SEQ ID NO: 1353559 - DNA, 25 bp, Homo sapien
ctctaaagcccttttcacctctggg

SEQ ID NO: 1353560 - DNA, 25 bp, Homo sapien
tacctgttgggcctattataccttc

SEQ ID NO: 1353561 - DNA, 25 bp, Homo sapien
cctgttgggcctattataccttctc

SEQ ID NO: 1353562 - DNA, 25 bp, Homo sapien
ggcctattataccttctctgccaag

SEQ ID NO: 1353563 - DNA, 25 bp, Homo sapien
ttctacctgttgggcctattatacc

SEQ ID NO: 1353564 - DNA, 25 bp, Homo sapien
tctgtgtccaataggacctttagga

SEQ ID NO: 1353565 - DNA, 25 bp, Homo sapien
tccaataggacctttaggacctgat

SEQ ID NO: 1353566 - DNA, 25 bp, Homo sapien
tgtccaataggacctttaggacctg

SEQ ID NO: 1353567 - DNA, 25 bp, Homo sapien
tgatatcccaacaatgccagcatcc

SEQ ID NO: 1353568 - DNA, 25 bp, Homo sapien
tgggaatccttggaaacctgtcaaa

SEQ ID NO: 1353569 - DNA, 25 bp, Homo sapien
gcctgggaatccttggaaacctgtc

SEQ ID NO: 1353570 - DNA, 25 bp, Homo sapien
cctgggaatccttggaaacctgtca

SEQ ID NO: 1353571 - DNA, 25 bp, Homo sapien
ctgggaatccttggaaacctgtcaa

SEQ ID NO: 1353572 - DNA, 25 bp, Homo sapien
aggttgaccaggtagcccttgttca

SEQ ID NO: 1353573 - DNA, 25 bp, Homo sapien
atggtccttgatcaccttgtgctcc

SEQ ID NO: 1353574 - DNA, 25 bp, Homo sapien
gttgaccaggtagcccttgttcacc

SEQ ID NO: 1353575 - DNA, 25 bp, Homo sapien
ccaggttgaccaggtagcccttgtt

SEQ ID NO: 1353576 - DNA, 25 bp, Homo sapien
cctggcaagcctgatgaacccttta

SEQ ID NO: 1353577 - DNA, 25 bp, Homo sapien
ccccagcaagacctgttcttcctgg

SEQ ID NO: 1353578 - DNA, 25 bp, Homo sapien
cccagcaagacctgttcttcctggg

SEQ ID NO: 1353579 - DNA, 25 bp, Homo sapien
ctggcaagcctgatgaaccctttac

SEQ ID NO: 1353580 - DNA, 25 bp, Homo sapien
ccctggagtcatgagatggtgccat

SEQ ID NO: 1353581 - DNA, 25 bp, Homo sapien
ccatgctgtggacttaggattcagg

SEQ ID NO: 1353582 - DNA, 25 bp, Homo sapien
tataggttcatgttcctcagcttga

SEQ ID NO: 1353583 - DNA, 25 bp, Homo sapien
catgaatgatgagaaccctggagtc

SEQ ID NO: 1353584 - DNA, 25 bp, Homo sapien
ttgtcagttttgacaggactgaaac

SEQ ID NO: 1353585 - DNA, 25 bp, Homo sapien
gtcagttttgacaggactgaaaccc

SEQ ID NO: 1353586 - DNA, 25 bp, Homo sapien
gtgttgtcagttttgacaggactga

SEQ ID NO: 1353587 - DNA, 25 bp, Homo sapien
cctagcaggaaagtgttgtcagttt

SEQ ID NO: 1353588 - DNA, 25 bp, Homo sapien
gcagaactgcacaagaggaacaaca

SEQ ID NO: 1353589 - DNA, 25 bp, Homo sapien
gaaactttagtcatccaatggaaat

SEQ ID NO: 1353590 - DNA, 25 bp, Homo sapien
gatacaggtagtgatacgttcaaca

SEQ ID NO: 1353591 - DNA, 25 bp, Homo sapien
agaagtaatttttaagccagcagaa

SEQ ID NO: 1353592 - DNA, 25 bp, Homo sapien
tgccatctgctccatggtatccttg

SEQ ID NO: 1353593 - DNA, 25 bp, Homo sapien
catggtatccttgtatgccttttgg

SEQ ID NO: 1353594 - DNA, 25 bp, Homo sapien
tgtatgccttttggcccaagtaggc

SEQ ID NO: 1353595 - DNA, 25 bp, Homo sapien
tgaaatgccatctgctccatggtat

SEQ ID NO: 1353596 - DNA, 25 bp, Homo sapien
ttcccagaaggaccaggagctcctt

SEQ ID NO: 1353597 - DNA, 25 bp, Homo sapien
atcccaggtttcccagaaggaccag

SEQ ID NO: 1353598 - DNA, 25 bp, Homo sapien
cccagaaggaccaggagctcctttt

SEQ ID NO: 1353599 - DNA, 25 bp, Homo sapien
cagaaggaccaggagctcctttttt

SEQ ID NO: 1353600 - DNA, 25 bp, Homo sapien
ttagtccttgttcaccctggtcacc

SEQ ID NO: 1353601 - DNA, 25 bp, Homo sapien
tagtccttgttcaccctggtcacct

SEQ ID NO: 1353602 - DNA, 25 bp, Homo sapien
tttagtccttgttcaccctggtcac

SEQ ID NO: 1353603 - DNA, 25 bp, Homo sapien
cacctcttagtcctggtacacccac

SEQ ID NO: 1353604 - DNA, 25 bp, Homo sapien
agtggcacctcttagtcctggtaca

SEQ ID NO: 1353605 - DNA, 25 bp, Homo sapien
cctcttagtcctggtacacccacat

SEQ ID NO: 1353606 - DNA, 25 bp, Homo sapien
tggcacctcttagtcctggtacacc

SEQ ID NO: 1353607 - DNA, 25 bp, Homo sapien
tctctctccttggtcccccactgga

SEQ ID NO: 1353608 - DNA, 25 bp, Homo sapien
cctctctctccttggtcccccactg

SEQ ID NO: 1353609 - DNA, 25 bp, Homo sapien
tctctccttggtcccccactggacc

SEQ ID NO: 1353610 - DNA, 25 bp, Homo sapien
cttatatccctctgctccaggctct

SEQ ID NO: 1353611 - DNA, 25 bp, Homo sapien
ggtcctaggactgtgctatcttctc

SEQ ID NO: 1353612 - DNA, 25 bp, Homo sapien
gtggtcctaggactgtgctatcttc

SEQ ID NO: 1353613 - DNA, 25 bp, Homo sapien
gtcctaggactgtgctatcttctcc

SEQ ID NO: 1353614 - DNA, 25 bp, Homo sapien
cctaggactgtgctatcttctcctg

SEQ ID NO: 1353615 - DNA, 25 bp, Homo sapien
gtcctggcaatccagagggtcctgg

SEQ ID NO: 1353616 - DNA, 25 bp, Homo sapien
ggtcctggcaatccagagggtcctg

SEQ ID NO: 1353617 - DNA, 25 bp, Homo sapien
tggttctccatcaggtcccatcaat

SEQ ID NO: 1353618 - DNA, 25 bp, Homo sapien
tgtaccctggaattcctggttctcc

SEQ ID NO: 1353619 - DNA, 25 bp, Homo sapien
cctgtaccctggaattcctggttct

SEQ ID NO: 1353620 - DNA, 25 bp, Homo sapien
taccctggaattcctggttctccat

SEQ ID NO: 1353621 - DNA, 25 bp, Homo sapien
ctctagttcctctggcacccttagg

SEQ ID NO: 1353622 - DNA, 25 bp, Homo sapien
tctggcacccttaggaccacttttc

SEQ ID NO: 1353623 - DNA, 25 bp, Homo sapien
agttcctctggcacccttaggacca

SEQ ID NO: 1353624 - DNA, 25 bp, Homo sapien
tctcctgtgggtcctatttgtcctt

SEQ ID NO: 1353625 - DNA, 25 bp, Homo sapien
cctggaattcccacaattccttcag

SEQ ID NO: 1353626 - DNA, 25 bp, Homo sapien
gccctggaattcccacaattccttc

SEQ ID NO: 1353627 - DNA, 25 bp, Homo sapien
taattcctggtaagcccatctctcc

SEQ ID NO: 1353628 - DNA, 25 bp, Homo sapien
ctacccaagggtcctataattcctg

SEQ ID NO: 1353629 - DNA, 25 bp, Homo sapien
gtttggcctgatctacccaagggtc

SEQ ID NO: 1353630 - DNA, 25 bp, Homo sapien
ggtcctataattcctggtaagccca

SEQ ID NO: 1353631 - DNA, 25 bp, Homo sapien
tcttttccctggagaccttcttctc

SEQ ID NO: 1353632 - DNA, 25 bp, Homo sapien
cttctccaggagctcctggttcacc

SEQ ID NO: 1353633 - DNA, 25 bp, Homo sapien
catcttttccctggagaccttcttc

SEQ ID NO: 1353634 - DNA, 25 bp, Homo sapien
cccatcttttccctggagaccttct

SEQ ID NO: 1353635 - DNA, 25 bp, Homo sapien
tggttccccagttcctccaacactg

SEQ ID NO: 1353636 - DNA, 25 bp, Homo sapien
ttcctccaacactgccagcagttcc

SEQ ID NO: 1353637 - DNA, 25 bp, Homo sapien
tccaacactgccagcagttccaaca

SEQ ID NO: 1353638 - DNA, 25 bp, Homo sapien
aacactgccagcagttccaacatct

SEQ ID NO: 1353639 - DNA, 25 bp, Homo sapien
ggttcaccttgcagaccagactctc

SEQ ID NO: 1353640 - DNA, 25 bp, Homo sapien
gcacctggttcaccttgcagaccag

SEQ ID NO: 1353641 - DNA, 25 bp, Homo sapien
tttgcacctggttcaccttgcagac

SEQ ID NO: 1353642 - DNA, 25 bp, Homo sapien
ttgcagaccagactctccctcagtg

SEQ ID NO: 1353643 - DNA, 25 bp, Homo sapien
aacatcaccttgcagtcctcgcagt

SEQ ID NO: 1353644 - DNA, 25 bp, Homo sapien
tccaggaggtccaacatcaccttgc

SEQ ID NO: 1353645 - DNA, 25 bp, Homo sapien
gtccaacatcaccttgcagtcctcg

SEQ ID NO: 1353646 - DNA, 25 bp, Homo sapien
aggaggtccaacatcaccttgcagt

SEQ ID NO: 1353647 - DNA, 25 bp, Homo sapien
gtggtattcctaggccatctccaat

SEQ ID NO: 1353648 - DNA, 25 bp, Homo sapien
acagcacgtggtattcctaggccat

SEQ ID NO: 1353649 - DNA, 25 bp, Homo sapien
gattgagaacattcagggtgctatg

SEQ ID NO: 1353650 - DNA, 25 bp, Homo sapien
gagattgagaacattcagggtgcta

SEQ ID NO: 1353651 - DNA, 25 bp, Homo sapien
tctgtcacctgtacttccaggcaat

SEQ ID NO: 1353652 - DNA, 25 bp, Homo sapien
cacctgtacttccaggcaatccctg

SEQ ID NO: 1353653 - DNA, 25 bp, Homo sapien
tgtcacctgtacttccaggcaatcc

SEQ ID NO: 1353654 - DNA, 25 bp, Homo sapien
cctgtacttccaggcaatccctgta

SEQ ID NO: 1353655 - DNA, 25 bp, Homo sapien
gagtcttggaacctagataactgga

SEQ ID NO: 1353656 - DNA, 25 bp, Homo sapien
tgttttccacagcagttcccctatt

SEQ ID NO: 1353657 - DNA, 25 bp, Homo sapien
cctttaaaccctggcaaggcacagg

SEQ ID NO: 1353658 - DNA, 25 bp, Homo sapien
ggaaataaccatactggacctgtaa

SEQ ID NO: 1353659 - DNA, 25 bp, Homo sapien
atcctctttctccagggtttccagt

SEQ ID NO: 1353660 - DNA, 25 bp, Homo sapien
cttgaaatcctctttctccagggtt

SEQ ID NO: 1353661 - DNA, 25 bp, Homo sapien
tttcccttgaaatcctctttctcca

SEQ ID NO: 1353662 - DNA, 25 bp, Homo sapien
tgaaatcctctttctccagggtttc

SEQ ID NO: 1353663 - DNA, 25 bp, Homo sapien
aagaccatgaggccctctttttcct

SEQ ID NO: 1353664 - DNA, 25 bp, Homo sapien
catgaggccctctttttccttgatc

SEQ ID NO: 1353665 - DNA, 25 bp, Homo sapien
aataagaccatgaggccctcttttt

SEQ ID NO: 1353666 - DNA, 25 bp, Homo sapien
ccatgaggccctctttttccttgat

SEQ ID NO: 1353667 - DNA, 25 bp, Homo sapien
ttggcaccttgtataccttgttccc

SEQ ID NO: 1353668 - DNA, 25 bp, Homo sapien
cttggcaccttgtataccttgttcc

SEQ ID NO: 1353669 - DNA, 25 bp, Homo sapien
tggcaccttgtataccttgttcccc

SEQ ID NO: 1353670 - DNA, 25 bp, Homo sapien
gcaccttgtataccttgttccccta

SEQ ID NO: 1353671 - DNA, 25 bp, Homo sapien
taactaaatattgaatgctggcagg

SEQ ID NO: 1353672 - DNA, 25 bp, Homo sapien
gagtataaatctgtaacccaggaag

SEQ ID NO: 1353673 - DNA, 25 bp, Homo sapien
tcttcaagcttcaccgaaaacacag

SEQ ID NO: 1353674 - DNA, 25 bp, Homo sapien
cactaaatggcagtttgggtacaaa

SEQ ID NO: 1353675 - DNA, 25 bp, Homo sapien
ccctcaactataatagctaagatat

SEQ ID NO: 1353676 - DNA, 25 bp, Homo sapien
ggcatgcaataaatagtggctctta

SEQ ID NO: 1353677 - DNA, 25 bp, Homo sapien
ctctctagtggttttgagtattgag

SEQ ID NO: 1353678 - DNA, 25 bp, Homo sapien
tagacaatgatgattataataactt

SEQ ID NO: 1353679 - DNA, 25 bp, Homo sapien
tgtcctttaggaccttgactcccag

SEQ ID NO: 1353680 - DNA, 25 bp, Homo sapien
ttgtcctttaggaccttgactccca

SEQ ID NO: 1353681 - DNA, 25 bp, Homo sapien
gtggtcctcttgcccccacatgacc

SEQ ID NO: 1353682 - DNA, 25 bp, Homo sapien
caggtggtcctcttgcccccacatg

SEQ ID NO: 1353683 - DNA, 25 bp, Homo sapien
caatggaccgataggtcctggaacc

SEQ ID NO: 1353684 - DNA, 25 bp, Homo sapien
taatcccaatggaccgataggtcct

SEQ ID NO: 1353685 - DNA, 25 bp, Homo sapien
aggtaatcccaatggaccgataggt

SEQ ID NO: 1353686 - DNA, 25 bp, Homo sapien
tggaccgataggtcctggaacccca

SEQ ID NO: 1353687 - DNA, 25 bp, Homo sapien
cctagtgggcctggacttccacgtt

SEQ ID NO: 1353688 - DNA, 25 bp, Homo sapien
gacctagtgggcctggacttccacg

SEQ ID NO: 1353689 - DNA, 25 bp, Homo sapien
gtgggcctggacttccacgttctcc

SEQ ID NO: 1353690 - DNA, 25 bp, Homo sapien
tagtgggcctggacttccacgttct

SEQ ID NO: 1353691 - DNA, 25 bp, Homo sapien
cccaacttctccaggtaagccaaca

SEQ ID NO: 1353692 - DNA, 25 bp, Homo sapien
caacttctccaggtaagccaacagg

SEQ ID NO: 1353693 - DNA, 25 bp, Homo sapien
cttctccaggtaagccaacaggtcc

SEQ ID NO: 1353694 - DNA, 25 bp, Homo sapien
aacttctccaggtaagccaacaggt

SEQ ID NO: 1353695 - DNA, 25 bp, Homo sapien
acagggatgccctctctcaccgctc

SEQ ID NO: 1353696 - DNA, 25 bp, Homo sapien
gagagccaaatcatgggtgaactcc

SEQ ID NO: 1353697 - DNA, 25 bp, Homo sapien
ccaaatcatgggtgaactcccattc

SEQ ID NO: 1353698 - DNA, 25 bp, Homo sapien
tgctcaaggaaataaaagaggacac

SEQ ID NO: 1353699 - DNA, 25 bp, Homo sapien
tctgggtaagaactgttgctatcct

SEQ ID NO: 1353700 - DNA, 25 bp, Homo sapien
ctgttgctatccttaggaaacacag

SEQ ID NO: 1353701 - DNA, 25 bp, Homo sapien
taagaactgttgctatccttaggaa

SEQ ID NO: 1353702 - DNA, 25 bp, Homo sapien
ttcaatgtctgggtaagaactgttg

SEQ ID NO: 1353703 - DNA, 25 bp, Homo sapien
cgaaggtctttagaggtgacagaaa

SEQ ID NO: 1353704 - DNA, 25 bp, Homo sapien
aagttgatgcttggtggacaatgag

SEQ ID NO: 1353705 - DNA, 25 bp, Homo sapien
ttgagaaggtaatttaagatggatc

SEQ ID NO: 1353706 - DNA, 25 bp, Homo sapien
aaagcgaaggtctttagaggtgaca

SEQ ID NO: 1353707 - DNA, 25 bp, Homo sapien
aaataagagcataaaataagcttac

SEQ ID NO: 1353708 - DNA, 25 bp, Homo sapien
aaaaaataagagcataaaataagct

SEQ ID NO: 1353709 - DNA, 25 bp, Homo sapien
taaaaaataagagcataaaataagc

SEQ ID NO: 1353710 - DNA, 25 bp, Homo sapien
aaaaataagagcataaaataagctt

SEQ ID NO: 1353711 - DNA, 25 bp, Homo sapien
tccaatatttccttgatctcctact

SEQ ID NO: 1353712 - DNA, 25 bp, Homo sapien
ccaatatttccttgatctcctactt

SEQ ID NO: 1353713 - DNA, 25 bp, Homo sapien
aagccttctggtcctggttcacctg

SEQ ID NO: 1353714 - DNA, 25 bp, Homo sapien
agccttctggtcctggttcacctgc

SEQ ID NO: 1353715 - DNA, 25 bp, Homo sapien
aaaggctccaattggtccttcttct

SEQ ID NO: 1353716 - DNA, 25 bp, Homo sapien
aaggctccaattggtccttcttctc

SEQ ID NO: 1353717 - DNA, 25 bp, Homo sapien
ggaggtcctctatttccaaggagtc

SEQ ID NO: 1353718 - DNA, 25 bp, Homo sapien
gaggtcctctatttccaaggagtcc

SEQ ID NO: 1353719 - DNA, 25 bp, Homo sapien
gaatcccaatatctcctggaaaacc

SEQ ID NO: 1353720 - DNA, 25 bp, Homo sapien
tggtccttcagggccgttttgtcca

SEQ ID NO: 1353721 - DNA, 25 bp, Homo sapien
caggaatcccaatatctcctggaaa

SEQ ID NO: 1353722 - DNA, 25 bp, Homo sapien
tcagggccgttttgtccaggaatcc

SEQ ID NO: 1353723 - DNA, 25 bp, Homo sapien
tccaaccatcctgctaccatataag

SEQ ID NO: 1353724 - DNA, 25 bp, Homo sapien
tgctaccatataagaaggtgctctg

SEQ ID NO: 1353725 - DNA, 25 bp, Homo sapien
tagctgaatcaacaaacattccaac

SEQ ID NO: 1353726 - DNA, 25 bp, Homo sapien
gcccagggggcttaatagctgaatc

SEQ ID NO: 1353727 - DNA, 25 bp, Homo sapien
aaaatccattaatataccatacaca

SEQ ID NO: 1353728 - DNA, 25 bp, Homo sapien
gaggataataggatcactacaatca

SEQ ID NO: 1353729 - DNA, 25 bp, Homo sapien
aataggatcactacaatcaagtaga

SEQ ID NO: 1353730 - DNA, 25 bp, Homo sapien
taattatctccatacatgtaggaaa

SEQ ID NO: 1353731 - DNA, 25 bp, Homo sapien
atggtccttggagtcctgggtcacc

SEQ ID NO: 1353732 - DNA, 25 bp, Homo sapien
gggccagatggtccttggagtcctg

SEQ ID NO: 1353733 - DNA, 25 bp, Homo sapien
gtcctggagggccagatggtccttg

SEQ ID NO: 1353734 - DNA, 25 bp, Homo sapien
ccagatggtccttggagtcctgggt

SEQ ID NO: 1353735 - DNA, 25 bp, Homo sapien
ggtggtcctggtaaaccaacagcac

SEQ ID NO: 1353736 - DNA, 25 bp, Homo sapien
ggatacccgggttctcctagctctc

SEQ ID NO: 1353737 - DNA, 25 bp, Homo sapien
tgtctccaggatacccgggttctcc

SEQ ID NO: 1353738 - DNA, 25 bp, Homo sapien
cttgtctccaggatacccgggttct

SEQ ID NO: 1353739 - DNA, 25 bp, Homo sapien
caggatacccgggttctcctagctc

SEQ ID NO: 1353740 - DNA, 25 bp, Homo sapien
attccaggtagtcctttattccctg

SEQ ID NO: 1353741 - DNA, 25 bp, Homo sapien
tgattccaggtagtcctttattccc

SEQ ID NO: 1353742 - DNA, 25 bp, Homo sapien
ggtccaattggtcccacagggccaa

SEQ ID NO: 1353743 - DNA, 25 bp, Homo sapien
aggtccaattggtcccacagggcca

SEQ ID NO: 1353744 - DNA, 25 bp, Homo sapien
tccaattggtcccacagggccaaca

SEQ ID NO: 1353745 - DNA, 25 bp, Homo sapien
ccagcaggtccaattggtcccacag

SEQ ID NO: 1353746 - DNA, 25 bp, Homo sapien
gagaaacaataggtactgaaccgga

SEQ ID NO: 1353747 - DNA, 25 bp, Homo sapien
agaaacaataggtactgaaccggag

SEQ ID NO: 1353748 - DNA, 25 bp, Homo sapien
aggagaaacaataggtactgaaccg

SEQ ID NO: 1353749 - DNA, 25 bp, Homo sapien
aacatgctgaagacagggccctggg

SEQ ID NO: 1353750 - DNA, 25 bp, Homo sapien
cataaagccttagcaagaatttcca

SEQ ID NO: 1353751 - DNA, 25 bp, Homo sapien
ctctgaggctttgtaacatgctgaa

SEQ ID NO: 1353752 - DNA, 25 bp, Homo sapien
tccccttcaagccatggaagaaaaa

SEQ ID NO: 1353753 - DNA, 25 bp, Homo sapien
ccccggaggaccagtgccacctaca

SEQ ID NO: 1353754 - DNA, 25 bp, Homo sapien
gaggaccagtgccacctacaagtcc

SEQ ID NO: 1353755 - DNA, 25 bp, Homo sapien
cggaggaccagtgccacctacaagt

SEQ ID NO: 1353756 - DNA, 25 bp, Homo sapien
ccggaggaccagtgccacctacaag

SEQ ID NO: 1353757 - DNA, 25 bp, Homo sapien
tactatagctaacttctgaaactcc

SEQ ID NO: 1353758 - DNA, 25 bp, Homo sapien
ctactatagctaacttctgaaactc

SEQ ID NO: 1353759 - DNA, 25 bp, Homo sapien
tctactatagctaacttctgaaact

SEQ ID NO: 1353760 - DNA, 25 bp, Homo sapien
accagcagggcctctgtctccaaag

SEQ ID NO: 1353761 - DNA, 25 bp, Homo sapien
cagcagggcctctgtctccaaagtc

SEQ ID NO: 1353762 - DNA, 25 bp, Homo sapien
agaccagcagggcctctgtctccaa

SEQ ID NO: 1353763 - DNA, 25 bp, Homo sapien
aggactgccatcaagaccagcaggg

SEQ ID NO: 1353764 - DNA, 25 bp, Homo sapien
ttctttccacggatcccaggaatgc

SEQ ID NO: 1353765 - DNA, 25 bp, Homo sapien
tctttccacggatcccaggaatgcc

SEQ ID NO: 1353766 - DNA, 25 bp, Homo sapien
ccttctttccacggatcccaggaat

SEQ ID NO: 1353767 - DNA, 25 bp, Homo sapien
cttctttccacggatcccaggaatg

SEQ ID NO: 1353768 - DNA, 25 bp, Homo sapien
gggtgaaggctgaatgactctctaa

SEQ ID NO: 1353769 - DNA, 25 bp, Homo sapien
tctcaccaaagatggctagacattt

SEQ ID NO: 1353770 - DNA, 25 bp, Homo sapien
gataaattactgcatacagattgca

SEQ ID NO: 1353771 - DNA, 25 bp, Homo sapien
tcatttagcaatgaatctggttcac

SEQ ID NO: 1353772 - DNA, 25 bp, Homo sapien
agttgtcccgcttctccaggagagc

SEQ ID NO: 1353773 - DNA, 25 bp, Homo sapien
cttctccaggagagccaataaaacc

SEQ ID NO: 1353774 - DNA, 25 bp, Homo sapien
ttcaggtcccagttgtcccgcttct

SEQ ID NO: 1353775 - DNA, 25 bp, Homo sapien
ggtcccagttgtcccgcttctccag

SEQ ID NO: 1353776 - DNA, 25 bp, Homo sapien
gatgacttccttaggtctgtatcca

SEQ ID NO: 1353777 - DNA, 25 bp, Homo sapien
ttttccatgatgacttccttaggtc

SEQ ID NO: 1353778 - DNA, 25 bp, Homo sapien
attttttccatgatgacttccttag

SEQ ID NO: 1353779 - DNA, 25 bp, Homo sapien
catgatgacttccttaggtctgtat

SEQ ID NO: 1353780 - DNA, 25 bp, Homo sapien
ttaggacctggattaccttctggtc

SEQ ID NO: 1353781 - DNA, 25 bp, Homo sapien
cctttaggacctggattaccttctg

SEQ ID NO: 1353782 - DNA, 25 bp, Homo sapien
tgcacctttaggacctggattacct

SEQ ID NO: 1353783 - DNA, 25 bp, Homo sapien
aggacctggattaccttctggtcca

SEQ ID NO: 1353784 - DNA, 25 bp, Homo sapien
accgggtgaaccaatattaccagca

SEQ ID NO: 1353785 - DNA, 25 bp, Homo sapien
cctgggagtccaggatgtcctttga

SEQ ID NO: 1353786 - DNA, 25 bp, Homo sapien
tgggagtccaggatgtcctttgaga

SEQ ID NO: 1353787 - DNA, 25 bp, Homo sapien
ggagtccaggatgtcctttgagacc

SEQ ID NO: 1353788 - DNA, 25 bp, Homo sapien
ttgttcacctggaagtcctgggagt

SEQ ID NO: 1353789 - DNA, 25 bp, Homo sapien
aaggagtatgacacaaacttgtccc

SEQ ID NO: 1353790 - DNA, 25 bp, Homo sapien
gagtatgacacaaacttgtcccaag

SEQ ID NO: 1353791 - DNA, 25 bp, Homo sapien
agtatgacacaaacttgtcccaagc

SEQ ID NO: 1353792 - DNA, 25 bp, Homo sapien
ggagtatgacacaaacttgtcccaa

SEQ ID NO: 1353793 - DNA, 25 bp, Homo sapien
tctgccttttgtgggcaccagtttc

SEQ ID NO: 1353794 - DNA, 25 bp, Homo sapien
accagtttccgggatgatgatggca

SEQ ID NO: 1353795 - DNA, 25 bp, Homo sapien
tttgtgggcaccagtttccgggatg

SEQ ID NO: 1353796 - DNA, 25 bp, Homo sapien
tgatgatggcatcctaattttcttt

SEQ ID NO: 1353797 - DNA, 25 bp, Homo sapien
atcaccttgcataccaggggggccc

SEQ ID NO: 1353798 - DNA, 25 bp, Homo sapien
tatcaccttgcataccaggggggcc

SEQ ID NO: 1353799 - DNA, 25 bp, Homo sapien
accttgcataccaggggggcccatt

SEQ ID NO: 1353800 - DNA, 25 bp, Homo sapien
tcaccttgcataccaggggggccca

SEQ ID NO: 1353801 - DNA, 25 bp, Homo sapien
gacctggggaaaatcctggatctcc

SEQ ID NO: 1353802 - DNA, 25 bp, Homo sapien
acaggttgacctggggaaaatcctg

SEQ ID NO: 1353803 - DNA, 25 bp, Homo sapien
tttctccaggaacaggttgacctgg

SEQ ID NO: 1353804 - DNA, 25 bp, Homo sapien
gaaaatcctggatctcctttggggc

SEQ ID NO: 1353805 - DNA, 25 bp, Homo sapien
aaaccaggatttccatgtggccctg

SEQ ID NO: 1353806 - DNA, 25 bp, Homo sapien
caggtaatccaggtaaaccaggatt

SEQ ID NO: 1353807 - DNA, 25 bp, Homo sapien
caggtaaaccaggatttccatgtgg

SEQ ID NO: 1353808 - DNA, 25 bp, Homo sapien
ggtaaaccaggatttccatgtggcc

SEQ ID NO: 1353809 - DNA, 25 bp, Homo sapien
gacctgggatacctgctggaccagg

SEQ ID NO: 1353810 - DNA, 25 bp, Homo sapien
cctgacggacctgggatacctgctg

SEQ ID NO: 1353811 - DNA, 25 bp, Homo sapien
gacctctcttccctgacggacctgg

SEQ ID NO: 1353812 - DNA, 25 bp, Homo sapien
acggacctgggatacctgctggacc

SEQ ID NO: 1353813 - DNA, 25 bp, Homo sapien
caaggtgattatccacagatggctc

SEQ ID NO: 1353814 - DNA, 25 bp, Homo sapien
gatttgctgtgatagccttcttgag

SEQ ID NO: 1353815 - DNA, 25 bp, Homo sapien
tcatagctattttcgatgggataag

SEQ ID NO: 1353816 - DNA, 25 bp, Homo sapien
gatggctcatttgtcactctatgca

SEQ ID NO: 1353817 - DNA, 25 bp, Homo sapien
taatattgtaaacggctgccccaag

SEQ ID NO: 1353818 - DNA, 25 bp, Homo sapien
gaaatgcattgttcacccgatgtga

SEQ ID NO: 1353819 - DNA, 25 bp, Homo sapien
tctgcttggcgacactgctgtttca

SEQ ID NO: 1353820 - DNA, 25 bp, Homo sapien
cccctgaggtaacggtgtagatgct

SEQ ID NO: 1353821 - DNA, 25 bp, Homo sapien
gaccttattccatatggcatctgct

SEQ ID NO: 1353822 - DNA, 25 bp, Homo sapien
tattgaccttattccatatggcatc

SEQ ID NO: 1353823 - DNA, 25 bp, Homo sapien
ccttattccatatggcatctgcttt

SEQ ID NO: 1353824 - DNA, 25 bp, Homo sapien
actattgaccttattccatatggca

SEQ ID NO: 1353825 - DNA, 25 bp, Homo sapien
accccagccacacatagtacaataa

SEQ ID NO: 1353826 - DNA, 25 bp, Homo sapien
cacatagtacaataaaatgaagaag

SEQ ID NO: 1353827 - DNA, 25 bp, Homo sapien
gttcttgtgcatgaacaaccacccc

SEQ ID NO: 1353828 - DNA, 25 bp, Homo sapien
tcttgtgcatgaacaaccaccccag

SEQ ID NO: 1353829 - DNA, 25 bp, Homo sapien
gatgactaatggactggtagagatc

SEQ ID NO: 1353830 - DNA, 25 bp, Homo sapien
ctgtgtatgaaagctgatgactaat

SEQ ID NO: 1353831 - DNA, 25 bp, Homo sapien
tgactgaaatagattctctttctct

SEQ ID NO: 1353832 - DNA, 25 bp, Homo sapien
ggactggtagagatcaatgactgaa

SEQ ID NO: 1353833 - DNA, 25 bp, Homo sapien
cactttgacaccagcaacagtccaa

SEQ ID NO: 1353834 - DNA, 25 bp, Homo sapien
gacaccagcaacagtccaaacataa

SEQ ID NO: 1353835 - DNA, 25 bp, Homo sapien
attttcactttgacaccagcaacag

SEQ ID NO: 1353836 - DNA, 25 bp, Homo sapien
aacataaccagacatgtgagggtaa

SEQ ID NO: 1353837 - DNA, 25 bp, Homo sapien
gcagatctgctttaactccggtggt

SEQ ID NO: 1353838 - DNA, 25 bp, Homo sapien
gagtgttagtcaccagcgtgggcct

SEQ ID NO: 1353839 - DNA, 25 bp, Homo sapien
tctggtggtcatgggagacaaacac

SEQ ID NO: 1353840 - DNA, 25 bp, Homo sapien
tcaaactccgaagggttggtggcat

SEQ ID NO: 1353841 - DNA, 25 bp, Homo sapien
cagggctagagcctctctgcatccg

SEQ ID NO: 1353842 - DNA, 25 bp, Homo sapien
tgcatccgcccctgatcagcgggaa

SEQ ID NO: 1353843 - DNA, 25 bp, Homo sapien
tcagttccgcaggatcggctgcaac

SEQ ID NO: 1353844 - DNA, 25 bp, Homo sapien
tcagcgggaagatctgtcagttccg

SEQ ID NO: 1353845 - DNA, 25 bp, Homo sapien
ccacacagagggatgtttatcgaga

SEQ ID NO: 1353846 - DNA, 25 bp, Homo sapien
gaacagtggcgggaaatcttctgcc

SEQ ID NO: 1353847 - DNA, 25 bp, Homo sapien
tctgagaaggcaacccgcagagctt

SEQ ID NO: 1353848 - DNA, 25 bp, Homo sapien
acagggcaatgatcagggcgcagcc

SEQ ID NO: 1353849 - DNA, 25 bp, Homo sapien
agtccagtggtccaggctgcgcaca

SEQ ID NO: 1353850 - DNA, 25 bp, Homo sapien
tccagtggtccaggctgcgcacact

SEQ ID NO: 1353851 - DNA, 25 bp, Homo sapien
cctgagtccagtggtccaggctgcg

SEQ ID NO: 1353852 - DNA, 25 bp, Homo sapien
cagtggtccaggctgcgcacactga

SEQ ID NO: 1353853 - DNA, 25 bp, Homo sapien
gggacctctagcgtcacagcaatcg

SEQ ID NO: 1353854 - DNA, 25 bp, Homo sapien
gcgtcacagcaatcgccaggctgga

SEQ ID NO: 1353855 - DNA, 25 bp, Homo sapien
cctgggggacctctagcgtcacagc

SEQ ID NO: 1353856 - DNA, 25 bp, Homo sapien
ctctagcgtcacagcaatcgccagg

SEQ ID NO: 1353857 - DNA, 25 bp, Homo sapien
ttcctctcgagccaaaagatcgctt

SEQ ID NO: 1353858 - DNA, 25 bp, Homo sapien
agagatcgtcggagcccagctctgg

SEQ ID NO: 1353859 - DNA, 25 bp, Homo sapien
tctgagatctgctggcacgaggcat

SEQ ID NO: 1353860 - DNA, 25 bp, Homo sapien
aagataccgcgggtactcggccgct

SEQ ID NO: 1353861 - DNA, 25 bp, Homo sapien
gggctcttaaatgcatttgtatgca

SEQ ID NO: 1353862 - DNA, 25 bp, Homo sapien
ttgtccgtgcagcaaagcgctaacg

SEQ ID NO: 1353863 - DNA, 25 bp, Homo sapien
cacgccttgttctgtgggctcttaa

SEQ ID NO: 1353864 - DNA, 25 bp, Homo sapien
ccaactctgaactgcttagggtgca

SEQ ID NO: 1353865 - DNA, 25 bp, Homo sapien
agcactcaagttcacttgcggttca

SEQ ID NO: 1353866 - DNA, 25 bp, Homo sapien
tcacttgcggttcaaaggcgactct

SEQ ID NO: 1353867 - DNA, 25 bp, Homo sapien
gccgggctgctagtgcagcactcaa

SEQ ID NO: 1353868 - DNA, 25 bp, Homo sapien
gactctgtgactccagtggagtcct

SEQ ID NO: 1353869 - DNA, 25 bp, Homo sapien
caggcgctcggcgttgactgccgcc

SEQ ID NO: 1353870 - DNA, 25 bp, Homo sapien
tcggcgttgactgccgccggctgct

SEQ ID NO: 1353871 - DNA, 25 bp, Homo sapien
ttcggaaatcaagtcggtgcgaggg

SEQ ID NO: 1353872 - DNA, 25 bp, Homo sapien
cgagggggccggtggcaactgcagg

SEQ ID NO: 1353873 - DNA, 25 bp, Homo sapien
gagctccacataatgcgttcttctt

SEQ ID NO: 1353874 - DNA, 25 bp, Homo sapien
gctttgggtcacgtgctgccaaaaa

SEQ ID NO: 1353875 - DNA, 25 bp, Homo sapien
cctggatctagtgagctccacataa

SEQ ID NO: 1353876 - DNA, 25 bp, Homo sapien
cacgtgctgccaaaaaggtgtttga

SEQ ID NO: 1353877 - DNA, 25 bp, Homo sapien
aacaaaagctggaattgccaggaac

SEQ ID NO: 1353878 - DNA, 25 bp, Homo sapien
tgccaggaactaagatgagcccatt

SEQ ID NO: 1353879 - DNA, 25 bp, Homo sapien
acctactgtagcctagcttgcctgt

SEQ ID NO: 1353880 - DNA, 25 bp, Homo sapien
gtagcctagcttgcctgtgcaaaca

SEQ ID NO: 1353881 - DNA, 25 bp, Homo sapien
agcctagattcatactgttcatttg

SEQ ID NO: 1353882 - DNA, 25 bp, Homo sapien
cacaattctagccatttagcctaga

SEQ ID NO: 1353883 - DNA, 25 bp, Homo sapien
cttattcttcttgtatgctgtctca

SEQ ID NO: 1353884 - DNA, 25 bp, Homo sapien
aaaagggaaacatatgtacagcaga

SEQ ID NO: 1353885 - DNA, 25 bp, Homo sapien
tttccaacagtcctttgtggagcct

SEQ ID NO: 1353886 - DNA, 25 bp, Homo sapien
ttttccaacagtcctttgtggagcc

SEQ ID NO: 1353887 - DNA, 25 bp, Homo sapien
ttcttttccaacagtcctttgtgga

SEQ ID NO: 1353888 - DNA, 25 bp, Homo sapien
cctttgtggagcctgaaaggctttt

SEQ ID NO: 1353889 - DNA, 25 bp, Homo sapien
tgtagccctcactcggggaactgcc

SEQ ID NO: 1353890 - DNA, 25 bp, Homo sapien
cagtgaaagaatcaaaagcagctgg

SEQ ID NO: 1353891 - DNA, 25 bp, Homo sapien
gaactgccatcagtgaaagaatcaa

SEQ ID NO: 1353892 - DNA, 25 bp, Homo sapien
tgccatcagtgaaagaatcaaaagc

SEQ ID NO: 1353893 - DNA, 25 bp, Homo sapien
ggtgaaacctctataagcctgtcca

SEQ ID NO: 1353894 - DNA, 25 bp, Homo sapien
atttccccaacgctatatttcctgg

SEQ ID NO: 1353895 - DNA, 25 bp, Homo sapien
cagccttgtaattgttggtgaaacc

SEQ ID NO: 1353896 - DNA, 25 bp, Homo sapien
cctggcgacagccttgtaattgttg

SEQ ID NO: 1353897 - DNA, 25 bp, Homo sapien
catacagacaccctgtgctccagcc

SEQ ID NO: 1353898 - DNA, 25 bp, Homo sapien
tccatacagacaccctgtgctccag

SEQ ID NO: 1353899 - DNA, 25 bp, Homo sapien
ttctccatacagacaccctgtgctc

SEQ ID NO: 1353900 - DNA, 25 bp, Homo sapien
tgcttgcactcaccccagtcctcag

SEQ ID NO: 1353901 - DNA, 25 bp, Homo sapien
tgttgtttggcatcaggggcatttt

SEQ ID NO: 1353902 - DNA, 25 bp, Homo sapien
tgtttggcatcaggggcatttttcc

SEQ ID NO: 1353903 - DNA, 25 bp, Homo sapien
ttctctgttgtttggcatcaggggc

SEQ ID NO: 1353904 - DNA, 25 bp, Homo sapien
gcatcaggggcatttttccttagga

SEQ ID NO: 1353905 - DNA, 25 bp, Homo sapien
aaccttggcccataggaggaggaga

SEQ ID NO: 1353906 - DNA, 25 bp, Homo sapien
gaggagaatgacaagcaaactggag

SEQ ID NO: 1353907 - DNA, 25 bp, Homo sapien
agaggggtggacagcaaccggagca

SEQ ID NO: 1353908 - DNA, 25 bp, Homo sapien
gacagcaaccggagcaaccttggcc

SEQ ID NO: 1353909 - DNA, 25 bp, Homo sapien
cttctcacatgagaaatcgtatggc

SEQ ID NO: 1353910 - DNA, 25 bp, Homo sapien
catgagaaatcgtatggcttagttt

SEQ ID NO: 1353911 - DNA, 25 bp, Homo sapien
aaatcgtatggcttagtttttcctg

SEQ ID NO: 1353912 - DNA, 25 bp, Homo sapien
tcacatgagaaatcgtatggcttag

SEQ ID NO: 1353913 - DNA, 25 bp, Homo sapien
accccagatttggactcttactgcc

SEQ ID NO: 1353914 - DNA, 25 bp, Homo sapien
cccagatttggactcttactgccat

SEQ ID NO: 1353915 - DNA, 25 bp, Homo sapien
ccccagatttggactcttactgcca

SEQ ID NO: 1353916 - DNA, 25 bp, Homo sapien
ccatccctccgctatgtgacagaaa

SEQ ID NO: 1353917 - DNA, 25 bp, Homo sapien
ggactatattacatgacctactagg

SEQ ID NO: 1353918 - DNA, 25 bp, Homo sapien
tgaaacacatcaaatcccaagaagc

SEQ ID NO: 1353919 - DNA, 25 bp, Homo sapien
tatttacttacgctggagggatttc

SEQ ID NO: 1353920 - DNA, 25 bp, Homo sapien
aaaataaaagtgaccgctgggactg

SEQ ID NO: 1353921 - DNA, 25 bp, Homo sapien
gtgattggtccttctggcactgtcc

SEQ ID NO: 1353922 - DNA, 25 bp, Homo sapien
ggcactgtcctaggtagatactgtt

SEQ ID NO: 1353923 - DNA, 25 bp, Homo sapien
tagcaccaccgcttctggagaagga

SEQ ID NO: 1353924 - DNA, 25 bp, Homo sapien
gtggtgggcacagactacaggggaa

SEQ ID NO: 1353925 - DNA, 25 bp, Homo sapien
gggcacagactacaggggaagaatt

SEQ ID NO: 1353926 - DNA, 25 bp, Homo sapien
ggtgggcacagactacaggggaaga

SEQ ID NO: 1353927 - DNA, 25 bp, Homo sapien
tgggcacagactacaggggaagaat

SEQ ID NO: 1353928 - DNA, 25 bp, Homo sapien
gtagaactgccaattgccactctgg

SEQ ID NO: 1353929 - DNA, 25 bp, Homo sapien
gtgtgtgtccttggagaccaaggta

SEQ ID NO: 1353930 - DNA, 25 bp, Homo sapien
ctgccaattgccactctggctgagg

SEQ ID NO: 1353931 - DNA, 25 bp, Homo sapien
gtgtccttggagaccaaggtagaac

SEQ ID NO: 1353932 - DNA, 25 bp, Homo sapien
ttgcccggaattcgtattgtgagtt

SEQ ID NO: 1353933 - DNA, 25 bp, Homo sapien
cccggaattcgtattgtgagttgtc

SEQ ID NO: 1353934 - DNA, 25 bp, Homo sapien
ccggaattcgtattgtgagttgtct

SEQ ID NO: 1353935 - DNA, 25 bp, Homo sapien
ttgtgagttgtctgttgttggatag

SEQ ID NO: 1353936 - DNA, 25 bp, Homo sapien
ccccttgcgagcatggaattgccac

SEQ ID NO: 1353937 - DNA, 25 bp, Homo sapien
gccaatagctgtgctgaatcgcccc

SEQ ID NO: 1353938 - DNA, 25 bp, Homo sapien
gctgaatcgccccttgcgagcatgg

SEQ ID NO: 1353939 - DNA, 25 bp, Homo sapien
ccccagggccaagccaatagctgtg

SEQ ID NO: 1353940 - DNA, 25 bp, Homo sapien
taagacataggcacaaattggatcg

SEQ ID NO: 1353941 - DNA, 25 bp, Homo sapien
tgcagttctatgacaggccctctgg

SEQ ID NO: 1353942 - DNA, 25 bp, Homo sapien
caattgtcagatgtgcaggactcgg

SEQ ID NO: 1353943 - DNA, 25 bp, Homo sapien
caagcatgtccaaggtctgaagcaa

SEQ ID NO: 1353944 - DNA, 25 bp, Homo sapien
cataaactcatgtgattagtgaacc

SEQ ID NO: 1353945 - DNA, 25 bp, Homo sapien
gaatgcatcgtcatttattgagcca

SEQ ID NO: 1353946 - DNA, 25 bp, Homo sapien
taacacaaacagcatggaaagcacg

SEQ ID NO: 1353947 - DNA, 25 bp, Homo sapien
gaatatgctcagctttaggcaaaaa

SEQ ID NO: 1353948 - DNA, 25 bp, Homo sapien
gaggagtacgctttctgatctttcc

SEQ ID NO: 1353949 - DNA, 25 bp, Homo sapien
tgatctttccactgctctgcggctt

SEQ ID NO: 1353950 - DNA, 25 bp, Homo sapien
aagagggtaaaaatagctatggcca

SEQ ID NO: 1353951 - DNA, 25 bp, Homo sapien
ctcactgctacttaggtagagggac

SEQ ID NO: 1353952 - DNA, 25 bp, Homo sapien
tgccagcggagaccctgactgtagt

SEQ ID NO: 1353953 - DNA, 25 bp, Homo sapien
atctgcgaagagtatgggagctgcc

SEQ ID NO: 1353954 - DNA, 25 bp, Homo sapien
ggagctgcccatagtgctctgctga

SEQ ID NO: 1353955 - DNA, 25 bp, Homo sapien
tatatgctggcttgttgatctgcga

SEQ ID NO: 1353956 - DNA, 25 bp, Homo sapien
caccagatgctcactaactgacacc

SEQ ID NO: 1353957 - DNA, 25 bp, Homo sapien
accagatgctcactaactgacaccc

SEQ ID NO: 1353958 - DNA, 25 bp, Homo sapien
cagatgctcactaactgacaccctg

SEQ ID NO: 1353959 - DNA, 25 bp, Homo sapien
ccagatgctcactaactgacaccct

SEQ ID NO: 1353960 - DNA, 25 bp, Homo sapien
atcccaaataaccatctaccctctc

SEQ ID NO: 1353961 - DNA, 25 bp, Homo sapien
ccaaataaccatctaccctctctcc

SEQ ID NO: 1353962 - DNA, 25 bp, Homo sapien
ccataccgccatcccaaataaccat

SEQ ID NO: 1353963 - DNA, 25 bp, Homo sapien
aaataaccatctaccctctctccct

SEQ ID NO: 1353964 - DNA, 25 bp, Homo sapien
ttttcactcctcttaacctacatct

SEQ ID NO: 1353965 - DNA, 25 bp, Homo sapien
cactcctcttaacctacatcttagg

SEQ ID NO: 1353966 - DNA, 25 bp, Homo sapien
ttcactcctcttaacctacatctta

SEQ ID NO: 1353967 - DNA, 25 bp, Homo sapien
tttttcactcctcttaacctacatc

SEQ ID NO: 1353968 - DNA, 25 bp, Homo sapien
caaagcgttcttcataaagctggaa

SEQ ID NO: 1353969 - DNA, 25 bp, Homo sapien
ggaagcaaggacagtgttccctttg

SEQ ID NO: 1353970 - DNA, 25 bp, Homo sapien
ccaaagactccaagccacaggagtc

SEQ ID NO: 1353971 - DNA, 25 bp, Homo sapien
gctcagtgactggatctctaatatc

SEQ ID NO: 1353972 - DNA, 25 bp, Homo sapien
ttcttgaagtagctctgataaacat

SEQ ID NO: 1353973 - DNA, 25 bp, Homo sapien
tctcttcttgaagtagctctgataa

SEQ ID NO: 1353974 - DNA, 25 bp, Homo sapien
tcttcttgaagtagctctgataaac

SEQ ID NO: 1353975 - DNA, 25 bp, Homo sapien
aatgggaggcactggaaaaaactgg

SEQ ID NO: 1353976 - DNA, 25 bp, Homo sapien
cacatttttgggagggtggatcata

SEQ ID NO: 1353977 - DNA, 25 bp, Homo sapien
taggaggtccacagttagtacagta

SEQ ID NO: 1353978 - DNA, 25 bp, Homo sapien
taacacaagagaagtacagggccct

SEQ ID NO: 1353979 - DNA, 25 bp, Homo sapien
tagtacagtaggtcaagagcacctt

SEQ ID NO: 1353980 - DNA, 25 bp, Homo sapien
ctatctcagatccaaaggcatctag

SEQ ID NO: 1353981 - DNA, 25 bp, Homo sapien
caaaggcatctagaggaagcaccag

SEQ ID NO: 1353982 - DNA, 25 bp, Homo sapien
accagttctcccaccgggaacatga

SEQ ID NO: 1353983 - DNA, 25 bp, Homo sapien
gatgttcaccggatcttttgtaaaa

SEQ ID NO: 1353984 - DNA, 25 bp, Homo sapien
cttcatttgccgtttgctgcaacag

SEQ ID NO: 1353985 - DNA, 25 bp, Homo sapien
ggggctctctagtgaagggctttcc

SEQ ID NO: 1353986 - DNA, 25 bp, Homo sapien
tttgtagttgggaaagaactgctgc

SEQ ID NO: 1353987 - DNA, 25 bp, Homo sapien
gacctgctgacctcagaaaaccttg

SEQ ID NO: 1353988 - DNA, 25 bp, Homo sapien
taagatacatttcggcccttaagga

SEQ ID NO: 1353989 - DNA, 25 bp, Homo sapien
taaagaaagggctgcaagggtcaag

SEQ ID NO: 1353990 - DNA, 25 bp, Homo sapien
tgggaaaacggctctgtacacagaa

SEQ ID NO: 1353991 - DNA, 25 bp, Homo sapien
ttaatcaatcatagcagcgctgctg

SEQ ID NO: 1353992 - DNA, 25 bp, Homo sapien
cagaaattataatggcaactcagca

SEQ ID NO: 1353993 - DNA, 25 bp, Homo sapien
taatgcatgaccacgttttcatctg

SEQ ID NO: 1353994 - DNA, 25 bp, Homo sapien
gaatggtggctacaaacatcacaaa

SEQ ID NO: 1353995 - DNA, 25 bp, Homo sapien
tagcagttggtacttaatagcgatg

SEQ ID NO: 1353996 - DNA, 25 bp, Homo sapien
atcacattttagactcataataaaa

SEQ ID NO: 1353997 - DNA, 25 bp, Homo sapien
tttacccaatcacattttagactca

SEQ ID NO: 1353998 - DNA, 25 bp, Homo sapien
ttacccaatcacattttagactcat

SEQ ID NO: 1353999 - DNA, 25 bp, Homo sapien
ttttacccaatcacattttagactc

SEQ ID NO: 1354000 - DNA, 25 bp, Homo sapien
ctctcattttgattttccgacttct

SEQ ID NO: 1354001 - DNA, 25 bp, Homo sapien
actgtaaataattcttaatactctc

SEQ ID NO: 1354002 - DNA, 25 bp, Homo sapien
gattttccgacttctcaagactatt

SEQ ID NO: 1354003 - DNA, 25 bp, Homo sapien
cattgttacataagaagttttaaga

SEQ ID NO: 1354004 - DNA, 25 bp, Homo sapien
tagctttagccaagtactagggaca

SEQ ID NO: 1354005 - DNA, 25 bp, Homo sapien
gacaccagggatacagacgactatg

SEQ ID NO: 1354006 - DNA, 25 bp, Homo sapien
gattaagctgctgaggtcatccaca

SEQ ID NO: 1354007 - DNA, 25 bp, Homo sapien
gctaggctgggcagtacaaagtcac

SEQ ID NO: 1354008 - DNA, 25 bp, Homo sapien
gactgtttcatgagtattcaggaaa

SEQ ID NO: 1354009 - DNA, 25 bp, Homo sapien
catgagtaatgctagctttcagaat

SEQ ID NO: 1354010 - DNA, 25 bp, Homo sapien
ggactaaagcatccatctcacatgt

SEQ ID NO: 1354011 - DNA, 25 bp, Homo sapien
cagaagactaattaagcacagtcac

SEQ ID NO: 1354012 - DNA, 25 bp, Homo sapien
caaaagtaatatgtagggaaagtgc

SEQ ID NO: 1354013 - DNA, 25 bp, Homo sapien
aaagtgcctgatgagatttgatggc

SEQ ID NO: 1354014 - DNA, 25 bp, Homo sapien
ttttcattaagcagatgtcattgca

SEQ ID NO: 1354015 - DNA, 25 bp, Homo sapien
tattcaagacagatataaaactcac

SEQ ID NO: 1354016 - DNA, 25 bp, Homo sapien
agcactctctctagatgacattttc

SEQ ID NO: 1354017 - DNA, 25 bp, Homo sapien
gcactctctctagatgacattttct

SEQ ID NO: 1354018 - DNA, 25 bp, Homo sapien
tttttctaaacagatattacttgta

SEQ ID NO: 1354019 - DNA, 25 bp, Homo sapien
atattacttgtatgttatatccaag

SEQ ID NO: 1354020 - DNA, 25 bp, Homo sapien
atttaaagccttgacagttatattg

SEQ ID NO: 1354021 - DNA, 25 bp, Homo sapien
gccttgacagttatattgtaccttt

SEQ ID NO: 1354022 - DNA, 25 bp, Homo sapien
taaacttaagattgctgtgcttaag

SEQ ID NO: 1354023 - DNA, 25 bp, Homo sapien
ctctttattttctgcgtccatctgt

SEQ ID NO: 1354024 - DNA, 25 bp, Homo sapien
tctggccaatgctgtatactctgca

SEQ ID NO: 1354025 - DNA, 25 bp, Homo sapien
gatttctctttaaacttaagattgc

SEQ ID NO: 1354026 - DNA, 25 bp, Homo sapien
ggttttcacacttcagctgaataag

SEQ ID NO: 1354027 - DNA, 25 bp, Homo sapien
cacacttcagctgaataagacagtt

SEQ ID NO: 1354028 - DNA, 25 bp, Homo sapien
ttcacacttcagctgaataagacag

SEQ ID NO: 1354029 - DNA, 25 bp, Homo sapien
cacttcagctgaataagacagtttt

SEQ ID NO: 1354030 - DNA, 25 bp, Homo sapien
tcaggatgatggctattaaaacact

SEQ ID NO: 1354031 - DNA, 25 bp, Homo sapien
tagaacaaccacaagcaacgagaag

SEQ ID NO: 1354032 - DNA, 25 bp, Homo sapien
gagtatctgtgaagtcgaaactgta

SEQ ID NO: 1354033 - DNA, 25 bp, Homo sapien
agaagttatgttgcctgtattggaa

SEQ ID NO: 1354034 - DNA, 25 bp, Homo sapien
gaatattcttcccactgcttcaaaa

SEQ ID NO: 1354035 - DNA, 25 bp, Homo sapien
acagaatattcttcccactgcttca

SEQ ID NO: 1354036 - DNA, 25 bp, Homo sapien
catgccaagacagaatattcttccc

SEQ ID NO: 1354037 - DNA, 25 bp, Homo sapien
ccatgccaagacagaatattcttcc

SEQ ID NO: 1354038 - DNA, 25 bp, Homo sapien
tggaagatagacagggaatgcttcc

SEQ ID NO: 1354039 - DNA, 25 bp, Homo sapien
gaaaaaagacttgtcaccatctttg

SEQ ID NO: 1354040 - DNA, 25 bp, Homo sapien
tttggaagatagacagggaatgctt

SEQ ID NO: 1354041 - DNA, 25 bp, Homo sapien
tatttggaagatagacagggaatgc

SEQ ID NO: 1354042 - DNA, 25 bp, Homo sapien
agaaggctatgtggctactaacagg

SEQ ID NO: 1354043 - DNA, 25 bp, Homo sapien
ggctatgtggctactaacaggatac

SEQ ID NO: 1354044 - DNA, 25 bp, Homo sapien
gctaggagaaggctatgtggctact

SEQ ID NO: 1354045 - DNA, 25 bp, Homo sapien
ggagaaggctatgtggctactaaca

SEQ ID NO: 1354046 - DNA, 25 bp, Homo sapien
gatgttttacgaactaagtagatgg

SEQ ID NO: 1354047 - DNA, 25 bp, Homo sapien
caaagcattcttttaacgcatctag

SEQ ID NO: 1354048 - DNA, 25 bp, Homo sapien
aaaatcaagccctgacatgagtgcc

SEQ ID NO: 1354049 - DNA, 25 bp, Homo sapien
tgagtgccctcaactggtgaaatca

SEQ ID NO: 1354050 - DNA, 25 bp, Homo sapien
gttccgccgccgtcaaggaatcgca

SEQ ID NO: 1354051 - DNA, 25 bp, Homo sapien
gcagacacgctctaactccttcaga

SEQ ID NO: 1354052 - DNA, 25 bp, Homo sapien
tcctgacactcgtgaagcctccgtt

SEQ ID NO: 1354053 - DNA, 25 bp, Homo sapien
ctggccctgaagctccctaatggtg

SEQ ID NO: 1354054 - DNA, 25 bp, Homo sapien
aaataagtgcaagatcacacattca

SEQ ID NO: 1354055 - DNA, 25 bp, Homo sapien
cagtagggaaataagtgcaagatca

SEQ ID NO: 1354056 - DNA, 25 bp, Homo sapien
gggaaataagtgcaagatcacacat

SEQ ID NO: 1354057 - DNA, 25 bp, Homo sapien
tagggaaataagtgcaagatcacac

SEQ ID NO: 1354058 - DNA, 25 bp, Homo sapien
cactttcgtggagatgtgaaaagca

SEQ ID NO: 1354059 - DNA, 25 bp, Homo sapien
catcttagccaaaactgatagggtt

SEQ ID NO: 1354060 - DNA, 25 bp, Homo sapien
aaagccgtaattgtctactgcccag

SEQ ID NO: 1354061 - DNA, 25 bp, Homo sapien
tgcccagctataggttctaaaggaa

SEQ ID NO: 1354062 - DNA, 25 bp, Homo sapien
tctgtataactggaggacgcttgct

SEQ ID NO: 1354063 - DNA, 25 bp, Homo sapien
tcagtgagctatctttatgtctgta

SEQ ID NO: 1354064 - DNA, 25 bp, Homo sapien
cagtaagttgtgcattcagtgagct

SEQ ID NO: 1354065 - DNA, 25 bp, Homo sapien
attccatgaaagcagtaagttgtgc

SEQ ID NO: 1354066 - DNA, 25 bp, Homo sapien
tgctttttactatttcagctgcttc

SEQ ID NO: 1354067 - DNA, 25 bp, Homo sapien
ttatttttatgtagcaaattttcac

SEQ ID NO: 1354068 - DNA, 25 bp, Homo sapien
tcagctgcttcttgcaacttttgta

SEQ ID NO: 1354069 - DNA, 25 bp, Homo sapien
tgtagcaaattttcacatctgcttt

SEQ ID NO: 1354070 - DNA, 25 bp, Homo sapien
ctgagttttatacatttcaataagg

SEQ ID NO: 1354071 - DNA, 25 bp, Homo sapien
tttctacttcttgcaattctgagag

SEQ ID NO: 1354072 - DNA, 25 bp, Homo sapien
ttttttctacttcttgcaattctga

SEQ ID NO: 1354073 - DNA, 25 bp, Homo sapien
tatacatttcaataagggttttctg

SEQ ID NO: 1354074 - DNA, 25 bp, Homo sapien
ttcatccttcaaagcagcaagtgta

SEQ ID NO: 1354075 - DNA, 25 bp, Homo sapien
tcattttcaacagatacaacttcat

SEQ ID NO: 1354076 - DNA, 25 bp, Homo sapien
catccttcaaagcagcaagtgtagt

SEQ ID NO: 1354077 - DNA, 25 bp, Homo sapien
ttcaacagatacaacttcatccttc

SEQ ID NO: 1354078 - DNA, 25 bp, Homo sapien
caatagaatacagaggttactggaa

SEQ ID NO: 1354079 - DNA, 25 bp, Homo sapien
tatactccagtgctacagaattatt

SEQ ID NO: 1354080 - DNA, 25 bp, Homo sapien
tccttattaagatttacacaggaca

SEQ ID NO: 1354081 - DNA, 25 bp, Homo sapien
aaaaaacttggaaatgtgcctagat

SEQ ID NO: 1354082 - DNA, 25 bp, Homo sapien
ggacacgtcagaactcagcacctgg

SEQ ID NO: 1354083 - DNA, 25 bp, Homo sapien
tgacatgtgggcgaaggcctcctga

SEQ ID NO: 1354084 - DNA, 25 bp, Homo sapien
cagcacctggaatcactatgagggc

SEQ ID NO: 1354085 - DNA, 25 bp, Homo sapien
caaaagcagctaggaatgacatgtg

SEQ ID NO: 1354086 - DNA, 25 bp, Homo sapien
taatacaatcagcagtacacccaga

SEQ ID NO: 1354087 - DNA, 25 bp, Homo sapien
tccagaggtaaaggacatgagtctt

SEQ ID NO: 1354088 - DNA, 25 bp, Homo sapien
gagtatcaatctaggaggtccaaca

SEQ ID NO: 1354089 - DNA, 25 bp, Homo sapien
cacacaaattagctatgggctgtgg

SEQ ID NO: 1354090 - DNA, 25 bp, Homo sapien
tagtgctcgactaattagaaggtta

SEQ ID NO: 1354091 - DNA, 25 bp, Homo sapien
aatttaaaactagctcctcaaagag

SEQ ID NO: 1354092 - DNA, 25 bp, Homo sapien
tatagagaactaatggcagtatgag

SEQ ID NO: 1354093 - DNA, 25 bp, Homo sapien
cagatatgcagataactatcagaag

SEQ ID NO: 1354094 - DNA, 25 bp, Homo sapien
gcatatcaagaacaatcaaaatgtt

SEQ ID NO: 1354095 - DNA, 25 bp, Homo sapien
gcaaagcatatcaagaacaatcaaa

SEQ ID NO: 1354096 - DNA, 25 bp, Homo sapien
ttgactcagtaattctacatgggaa

SEQ ID NO: 1354097 - DNA, 25 bp, Homo sapien
ttttcagaagaaatgtagcaaagca

SEQ ID NO: 1354098 - DNA, 25 bp, Homo sapien
tcccacaaagacagatcagtacgta

SEQ ID NO: 1354099 - DNA, 25 bp, Homo sapien
tagcaaacagattggctcctgagaa

SEQ ID NO: 1354100 - DNA, 25 bp, Homo sapien
ctatacactgtactgcataacacta

SEQ ID NO: 1354101 - DNA, 25 bp, Homo sapien
tgcataacactatgtatctcccaca

SEQ ID NO: 1354102 - DNA, 25 bp, Homo sapien
tggataaaattctcttttcaggcca

SEQ ID NO: 1354103 - DNA, 25 bp, Homo sapien
aattctcttttcaggccacaacatt

SEQ ID NO: 1354104 - DNA, 25 bp, Homo sapien
taaaattctcttttcaggccacaac

SEQ ID NO: 1354105 - DNA, 25 bp, Homo sapien
aatggataaaattctcttttcaggc

SEQ ID NO: 1354106 - DNA, 25 bp, Homo sapien
tataatgcataattctaaacagcca

SEQ ID NO: 1354107 - DNA, 25 bp, Homo sapien
aattcagaaccttaaagcctggaat

SEQ ID NO: 1354108 - DNA, 25 bp, Homo sapien
taattctaaacagccagtaattatg

SEQ ID NO: 1354109 - DNA, 25 bp, Homo sapien
acccactgcaagctttatataatgc

SEQ ID NO: 1354110 - DNA, 25 bp, Homo sapien
tggtttcaaacagaccaggcctgag

SEQ ID NO: 1354111 - DNA, 25 bp, Homo sapien
tctggttatgaagcagccaagaaca

SEQ ID NO: 1354112 - DNA, 25 bp, Homo sapien
tatggaaagcaattaccccttggat

SEQ ID NO: 1354113 - DNA, 25 bp, Homo sapien
tggtcattacacaatacatgcctgc

SEQ ID NO: 1354114 - DNA, 25 bp, Homo sapien
tcatattcaattgagtgaacttttc

SEQ ID NO: 1354115 - DNA, 25 bp, Homo sapien
cattttcatattcaattgagtgaac

SEQ ID NO: 1354116 - DNA, 25 bp, Homo sapien
ttttcatattcaattgagtgaactt

SEQ ID NO: 1354117 - DNA, 25 bp, Homo sapien
tcattttcatattcaattgagtgaa

SEQ ID NO: 1354118 - DNA, 25 bp, Homo sapien
actacaaataatagatggcatactg

SEQ ID NO: 1354119 - DNA, 25 bp, Homo sapien
gaaatattgaatgataatctacaag

SEQ ID NO: 1354120 - DNA, 25 bp, Homo sapien
taatagatggcatactgaaatattg

SEQ ID NO: 1354121 - DNA, 25 bp, Homo sapien
ctgaaatattgaatgataatctaca

SEQ ID NO: 1354122 - DNA, 25 bp, Homo sapien
tgtttcaatctgtacttccaattcg

SEQ ID NO: 1354123 - DNA, 25 bp, Homo sapien
cattgtttcaatctgtacttccaat

SEQ ID NO: 1354124 - DNA, 25 bp, Homo sapien
ttcaatctgtacttccaattcggtt

SEQ ID NO: 1354125 - DNA, 25 bp, Homo sapien
caatctgtacttccaattcggtttt

SEQ ID NO: 1354126 - DNA, 25 bp, Homo sapien
tagctagggctacaaatgtctgcca

SEQ ID NO: 1354127 - DNA, 25 bp, Homo sapien
gtatatatatagtagagacagcatc

SEQ ID NO: 1354128 - DNA, 25 bp, Homo sapien
ccataacatttggtgatgtacctta

SEQ ID NO: 1354129 - DNA, 25 bp, Homo sapien
ggagaaagcccctgtgatatacaca

SEQ ID NO: 1354130 - DNA, 25 bp, Homo sapien
tgtaaaatggtcaagcctttgtttg

SEQ ID NO: 1354131 - DNA, 25 bp, Homo sapien
ctgatctctaatttgggaagtaagc

SEQ ID NO: 1354132 - DNA, 25 bp, Homo sapien
gggaagtaagcttttcaatagctcc

SEQ ID NO: 1354133 - DNA, 25 bp, Homo sapien
cctgtaaaatggtcaagcctttgtt

SEQ ID NO: 1354134 - DNA, 25 bp, Homo sapien
ggttccacttggctatcttggtttc

SEQ ID NO: 1354135 - DNA, 25 bp, Homo sapien
gctacagttttttgcctacttgctt

SEQ ID NO: 1354136 - DNA, 25 bp, Homo sapien
catcactatagcctcattcttattc

SEQ ID NO: 1354137 - DNA, 25 bp, Homo sapien
gattgcaggttccacttggctatct

SEQ ID NO: 1354138 - DNA, 25 bp, Homo sapien
tagttaggccacaaatattaagatt

SEQ ID NO: 1354139 - DNA, 25 bp, Homo sapien
tccttcctagattggtattaaacag

SEQ ID NO: 1354140 - DNA, 25 bp, Homo sapien
ttatcacttaagctataaaaatgga

SEQ ID NO: 1354141 - DNA, 25 bp, Homo sapien
gctttatggcctttcattaatttta

SEQ ID NO: 1354142 - DNA, 25 bp, Homo sapien
cccttttatgaatttggatctgtag

SEQ ID NO: 1354143 - DNA, 25 bp, Homo sapien
atgtactacttttactgattgggaa

SEQ ID NO: 1354144 - DNA, 25 bp, Homo sapien
attctttcaacttatcgttctcggc

SEQ ID NO: 1354145 - DNA, 25 bp, Homo sapien
ggatctgtagtcgttcatgtactac

SEQ ID NO: 1354146 - DNA, 25 bp, Homo sapien
gaaagttcttggatatgggcctcct

SEQ ID NO: 1354147 - DNA, 25 bp, Homo sapien
aacaagaaagttcttggatatgggc

SEQ ID NO: 1354148 - DNA, 25 bp, Homo sapien
caagaaagttcttggatatgggcct

SEQ ID NO: 1354149 - DNA, 25 bp, Homo sapien
agaaagttcttggatatgggcctcc

SEQ ID NO: 1354150 - DNA, 25 bp, Homo sapien
tcacaacttggataatattggctaa

SEQ ID NO: 1354151 - DNA, 25 bp, Homo sapien
ctttataaaaccaagcagcatgcaa

SEQ ID NO: 1354152 - DNA, 25 bp, Homo sapien
ttcactttcattatcagttagattt

SEQ ID NO: 1354153 - DNA, 25 bp, Homo sapien
ttcattatcagttagattttctagc

SEQ ID NO: 1354154 - DNA, 25 bp, Homo sapien
cactttcattatcagttagattttc

SEQ ID NO: 1354155 - DNA, 25 bp, Homo sapien
tatcagttagattttctagcaacat

SEQ ID NO: 1354156 - DNA, 25 bp, Homo sapien
tgtatagagtatagaatgcaacaca

SEQ ID NO: 1354157 - DNA, 25 bp, Homo sapien
cttcagaaagtataggccaatgaca

SEQ ID NO: 1354158 - DNA, 25 bp, Homo sapien
agtgctgtttacaaataggcaaaaa

SEQ ID NO: 1354159 - DNA, 25 bp, Homo sapien
agatttttgccctagtattccaaat

SEQ ID NO: 1354160 - DNA, 25 bp, Homo sapien
aaataatgtatccttcaaatgagaa

SEQ ID NO: 1354161 - DNA, 25 bp, Homo sapien
tgagtgcttagtgttgatgccttac

SEQ ID NO: 1354162 - DNA, 25 bp, Homo sapien
gtatccttcaaatgagaaatatcac

SEQ ID NO: 1354163 - DNA, 25 bp, Homo sapien
tattaaaatgagtgcttagtgttga

SEQ ID NO: 1354164 - DNA, 25 bp, Homo sapien
tcaaattcaatgcagaaagattcgc

SEQ ID NO: 1354165 - DNA, 25 bp, Homo sapien
gatgttctaaagctagttttacact

SEQ ID NO: 1354166 - DNA, 25 bp, Homo sapien
tgtagtctctctttctaagaagatg

SEQ ID NO: 1354167 - DNA, 25 bp, Homo sapien
tacacttttgaaggtgtctaattct

SEQ ID NO: 1354168 - DNA, 25 bp, Homo sapien
taagatatgagacctcagttaatgc

SEQ ID NO: 1354169 - DNA, 25 bp, Homo sapien
tcaactccgggtaattcaaacatcc

SEQ ID NO: 1354170 - DNA, 25 bp, Homo sapien
gtttctagcttagcctcttatcagg

SEQ ID NO: 1354171 - DNA, 25 bp, Homo sapien
gaaatactcataagtgagcatacct

SEQ ID NO: 1354172 - DNA, 25 bp, Homo sapien
agcaattctacagaatgagttacca

SEQ ID NO: 1354173 - DNA, 25 bp, Homo sapien
aagcaattctacagaatgagttacc

SEQ ID NO: 1354174 - DNA, 25 bp, Homo sapien
ctacagaatgagttaccaactccgc

SEQ ID NO: 1354175 - DNA, 25 bp, Homo sapien
accaactccgcttccttaagtgttg

SEQ ID NO: 1354176 - DNA, 25 bp, Homo sapien
ccatttcatttaaagatgctcctca

SEQ ID NO: 1354177 - DNA, 25 bp, Homo sapien
tccatttcatttaaagatgctcctc

SEQ ID NO: 1354178 - DNA, 25 bp, Homo sapien
ctaattacaaatgcacatacaaaat

SEQ ID NO: 1354179 - DNA, 25 bp, Homo sapien
tgcacatacaaaatttaagttaaat

SEQ ID NO: 1354180 - DNA, 25 bp, Homo sapien
gaattctgctagatgagtacacttg

SEQ ID NO: 1354181 - DNA, 25 bp, Homo sapien
tatactaagattgccatttgacggg

SEQ ID NO: 1354182 - DNA, 25 bp, Homo sapien
ggactaagctatccatactgacagt

SEQ ID NO: 1354183 - DNA, 25 bp, Homo sapien
gcacaactggcttaaagtaatgagc

SEQ ID NO: 1354184 - DNA, 25 bp, Homo sapien
ctggtacaccgtggtaaatcttctt

SEQ ID NO: 1354185 - DNA, 25 bp, Homo sapien
cactggtacaccgtggtaaatcttc

SEQ ID NO: 1354186 - DNA, 25 bp, Homo sapien
ttcactggtacaccgtggtaaatct

SEQ ID NO: 1354187 - DNA, 25 bp, Homo sapien
ctttcactggtacaccgtggtaaat

SEQ ID NO: 1354188 - DNA, 25 bp, Homo sapien
taaatggatttataggtggcttcac

SEQ ID NO: 1354189 - DNA, 25 bp, Homo sapien
ggatttataggtggcttcacagcga

SEQ ID NO: 1354190 - DNA, 25 bp, Homo sapien
ttcagtaaatggatttataggtggc

SEQ ID NO: 1354191 - DNA, 25 bp, Homo sapien
ttataggtggcttcacagcgacttc

SEQ ID NO: 1354192 - DNA, 25 bp, Homo sapien
aaaagggtcagaggcgccacggctg

SEQ ID NO: 1354193 - DNA, 25 bp, Homo sapien
gctgcgtccgcacgtcgtcgtgacg

SEQ ID NO: 1354194 - DNA, 25 bp, Homo sapien
cgccgtcgccgcgatataaaaaaag

SEQ ID NO: 1354195 - DNA, 25 bp, Homo sapien
gctgcaatggaaaccgtggcaatcc

SEQ ID NO: 1354196 - DNA, 25 bp, Homo sapien
ggacgcagggggcactacagtgggt

SEQ ID NO: 1354197 - DNA, 25 bp, Homo sapien
cgggacgcagggggcactacagtgg

SEQ ID NO: 1354198 - DNA, 25 bp, Homo sapien
acgcagggggcactacagtgggtag

SEQ ID NO: 1354199 - DNA, 25 bp, Homo sapien
cgcagggggcactacagtgggtaga

SEQ ID NO: 1354200 - DNA, 25 bp, Homo sapien
cgaggtgggaaccaggcgaattcct

SEQ ID NO: 1354201 - DNA, 25 bp, Homo sapien
gagtgcccgctcaagtggaacaaaa

SEQ ID NO: 1354202 - DNA, 25 bp, Homo sapien
gaacaaaagcgcagctagtaaccgg

SEQ ID NO: 1354203 - DNA, 25 bp, Homo sapien
gctagtaaccggctagtggcttctc

SEQ ID NO: 1354204 - DNA, 25 bp, Homo sapien
gctgccgattggtccgggttaggga

SEQ ID NO: 1354205 - DNA, 25 bp, Homo sapien
agcaggctgccgattggtccgggtt

SEQ ID NO: 1354206 - DNA, 25 bp, Homo sapien
tagggacggcgggcagcgcctatag

SEQ ID NO: 1354207 - DNA, 25 bp, Homo sapien
ggttagggacggcgggcagcgccta

SEQ ID NO: 1354208 - DNA, 25 bp, Homo sapien
tcttggtagcatgataggccacaag

SEQ ID NO: 1354209 - DNA, 25 bp, Homo sapien
gacgtcttttaagcaaataacgcca

SEQ ID NO: 1354210 - DNA, 25 bp, Homo sapien
gaagacaatttcgtgaatgacgtct

SEQ ID NO: 1354211 - DNA, 25 bp, Homo sapien
catgataggccacaaggaggtggaa

SEQ ID NO: 1354212 - DNA, 25 bp, Homo sapien
tgaaaatccccaggtcacgtaatgt

SEQ ID NO: 1354213 - DNA, 25 bp, Homo sapien
ttgaaaatccccaggtcacgtaatg

SEQ ID NO: 1354214 - DNA, 25 bp, Homo sapien
tatgatgattctctgcaccagcaaa

SEQ ID NO: 1354215 - DNA, 25 bp, Homo sapien
gcaccagcaaactcacatcattaat

SEQ ID NO: 1354216 - DNA, 25 bp, Homo sapien
caccagcaaactcacatcattaatc

SEQ ID NO: 1354217 - DNA, 25 bp, Homo sapien
ttatgatgattctctgcaccagcaa

SEQ ID NO: 1354218 - DNA, 25 bp, Homo sapien
ctgacagtcacagagcctccctgag

SEQ ID NO: 1354219 - DNA, 25 bp, Homo sapien
agcctccctgagcttctgacgccat

SEQ ID NO: 1354220 - DNA, 25 bp, Homo sapien
agtcacagagcctccctgagcttct

SEQ ID NO: 1354221 - DNA, 25 bp, Homo sapien
cagagcctccctgagcttctgacgc

SEQ ID NO: 1354222 - DNA, 25 bp, Homo sapien
ttatgtggaagtggataggagaact

SEQ ID NO: 1354223 - DNA, 25 bp, Homo sapien
cagagacacctagtcctgatgaaac

SEQ ID NO: 1354224 - DNA, 25 bp, Homo sapien
gaaacgtctgctccttgtcctaata

SEQ ID NO: 1354225 - DNA, 25 bp, Homo sapien
catatcaacagcaccattcctggca

SEQ ID NO: 1354226 - DNA, 25 bp, Homo sapien
cacacatattcgctctcattctggg

SEQ ID NO: 1354227 - DNA, 25 bp, Homo sapien
gcttttttgcgagctcaagctgatc

SEQ ID NO: 1354228 - DNA, 25 bp, Homo sapien
aaaggaatgcttgagctgatgctct

SEQ ID NO: 1354229 - DNA, 25 bp, Homo sapien
tgatgctctggtacgaccacagatg

SEQ ID NO: 1354230 - DNA, 25 bp, Homo sapien
aagggcctgatcttcctatatgccg

SEQ ID NO: 1354231 - DNA, 25 bp, Homo sapien
tctaatgaagctacacaagggcctg

SEQ ID NO: 1354232 - DNA, 25 bp, Homo sapien
aagtttgatgtcgtccagtgttcgc

SEQ ID NO: 1354233 - DNA, 25 bp, Homo sapien
tatatgccgtctgagtagagactgg

SEQ ID NO: 1354234 - DNA, 25 bp, Homo sapien
atgtggtccagctcgcccagatcgg

SEQ ID NO: 1354235 - DNA, 25 bp, Homo sapien
gtccagctcgcccagatcggacttg

SEQ ID NO: 1354236 - DNA, 25 bp, Homo sapien
gctcgcccagatcggacttgcagat

SEQ ID NO: 1354237 - DNA, 25 bp, Homo sapien
tccaccaggatctccaccatgtggt

SEQ ID NO: 1354238 - DNA, 25 bp, Homo sapien
atgaagaccaagtggtccagcggcg

SEQ ID NO: 1354239 - DNA, 25 bp, Homo sapien
gggtgtgcgccgtatcccatcctgc

SEQ ID NO: 1354240 - DNA, 25 bp, Homo sapien
gaagaccaagtggtccagcggcgcc

SEQ ID NO: 1354241 - DNA, 25 bp, Homo sapien
agaccaagtggtccagcggcgccca

SEQ ID NO: 1354242 - DNA, 25 bp, Homo sapien
ccagggacatgtccaagagggactg

SEQ ID NO: 1354243 - DNA, 25 bp, Homo sapien
tgtccaagagggactgccgctgcaa

SEQ ID NO: 1354244 - DNA, 25 bp, Homo sapien
ggacatgtccaagagggactgccgc

SEQ ID NO: 1354245 - DNA, 25 bp, Homo sapien
gtccaagagggactgccgctgcaag

SEQ ID NO: 1354246 - DNA, 25 bp, Homo sapien
ctacatatcctctgggaggaacttc

SEQ ID NO: 1354247 - DNA, 25 bp, Homo sapien
tcctctgggaggaacttccatctgc

SEQ ID NO: 1354248 - DNA, 25 bp, Homo sapien
cctctgggaggaacttccatctgct

SEQ ID NO: 1354249 - DNA, 25 bp, Homo sapien
atatcctctgggaggaacttccatc

SEQ ID NO: 1354250 - DNA, 25 bp, Homo sapien
aaaacacgatccatttattccaggc

SEQ ID NO: 1354251 - DNA, 25 bp, Homo sapien
ttctcgtggcacttggagtccagtt

SEQ ID NO: 1354252 - DNA, 25 bp, Homo sapien
tgacagttcaacaacgtctcttgag

SEQ ID NO: 1354253 - DNA, 25 bp, Homo sapien
ttctgccttggaggcactgaagctg

SEQ ID NO: 1354254 - DNA, 25 bp, Homo sapien
gatcacaagtctaaggtggtctgcc

SEQ ID NO: 1354255 - DNA, 25 bp, Homo sapien
taatgcctggatgaacgacactgtc

SEQ ID NO: 1354256 - DNA, 25 bp, Homo sapien
catttataagcttgttctcaggcca

SEQ ID NO: 1354257 - DNA, 25 bp, Homo sapien
tgaatgcttgccaagacaaccggga

SEQ ID NO: 1354258 - DNA, 25 bp, Homo sapien
tctgctctcttccagttatcacctc

SEQ ID NO: 1354259 - DNA, 25 bp, Homo sapien
ctcagtagaggccttgcagaatcac

SEQ ID NO: 1354260 - DNA, 25 bp, Homo sapien
caccaattgttaggctaggctggga

SEQ ID NO: 1354261 - DNA, 25 bp, Homo sapien
gctgagccccaaggaatatggcagt

SEQ ID NO: 1354262 - DNA, 25 bp, Homo sapien
gagcagtcatgggacggttttccct

SEQ ID NO: 1354263 - DNA, 25 bp, Homo sapien
ttgtaactctggccgggtgaggtgg

SEQ ID NO: 1354264 - DNA, 25 bp, Homo sapien
acttgtaactctggccgggtgaggt

SEQ ID NO: 1354265 - DNA, 25 bp, Homo sapien
aacttgtaactctggccgggtgagg

SEQ ID NO: 1354266 - DNA, 25 bp, Homo sapien
aaacttgtaactctggccgggtgag

SEQ ID NO: 1354267 - DNA, 25 bp, Homo sapien
gggaggtcttacaatcattgcgaaa

SEQ ID NO: 1354268 - DNA, 25 bp, Homo sapien
ggtggggaggtcttacaatcattgc

SEQ ID NO: 1354269 - DNA, 25 bp, Homo sapien
gaggtcttacaatcattgcgaaagg

SEQ ID NO: 1354270 - DNA, 25 bp, Homo sapien
tggggaggtcttacaatcattgcga

SEQ ID NO: 1354271 - DNA, 25 bp, Homo sapien
ttcctcaatttaaatgttggcctgc

SEQ ID NO: 1354272 - DNA, 25 bp, Homo sapien
tatttcctcaatttaaatgttggcc

SEQ ID NO: 1354273 - DNA, 25 bp, Homo sapien
cctcaatttaaatgttggcctgcct

SEQ ID NO: 1354274 - DNA, 25 bp, Homo sapien
tgtatttcctcaatttaaatgttgg

SEQ ID NO: 1354275 - DNA, 25 bp, Homo sapien
aacctgcctcaagaagctgatggtg

SEQ ID NO: 1354276 - DNA, 25 bp, Homo sapien
gaccgtctctttcgaatgaatcaag

SEQ ID NO: 1354277 - DNA, 25 bp, Homo sapien
ggtccataaatggtttgccgttcat

SEQ ID NO: 1354278 - DNA, 25 bp, Homo sapien
cttggttgggttggtcacatttgac

SEQ ID NO: 1354279 - DNA, 25 bp, Homo sapien
ggcacttggacttacagcgttcgaa

SEQ ID NO: 1354280 - DNA, 25 bp, Homo sapien
tgaactaaatattcggtctgcccgt

SEQ ID NO: 1354281 - DNA, 25 bp, Homo sapien
tgacaatgaccactcgagcaagaag

SEQ ID NO: 1354282 - DNA, 25 bp, Homo sapien
catgagtcagtcaagggtttcttcc

SEQ ID NO: 1354283 - DNA, 25 bp, Homo sapien
taaaattgtagacctcgaggctaag

SEQ ID NO: 1354284 - DNA, 25 bp, Homo sapien
ctctggagggtcgtttactgtatca

SEQ ID NO: 1354285 - DNA, 25 bp, Homo sapien
cgtttactgtatcaggagtgcctcc

SEQ ID NO: 1354286 - DNA, 25 bp, Homo sapien
tcaggtgttctcacctggtaaaatt

SEQ ID NO: 1354287 - DNA, 25 bp, Homo sapien
gatgtgccaccttctgattgtagag

SEQ ID NO: 1354288 - DNA, 25 bp, Homo sapien
aattcactgcaagctgactaaagag

SEQ ID NO: 1354289 - DNA, 25 bp, Homo sapien
tgcagtaaaatagggcaccaggtag

SEQ ID NO: 1354290 - DNA, 25 bp, Homo sapien
caatggtggccgtaggaataggccc

SEQ ID NO: 1354291 - DNA, 25 bp, Homo sapien
cctctcttcatcaaattaacaacat

SEQ ID NO: 1354292 - DNA, 25 bp, Homo sapien
caacatgagaatcatctaaccagtc

SEQ ID NO: 1354293 - DNA, 25 bp, Homo sapien
ttaacaacatgagaatcatctaacc

SEQ ID NO: 1354294 - DNA, 25 bp, Homo sapien
gagaatcatctaaccagtcaactga

SEQ ID NO: 1354295 - DNA, 25 bp, Homo sapien
tatgccgttagttagtccattaagt

SEQ ID NO: 1354296 - DNA, 25 bp, Homo sapien
cccttcattggtatctaatatgccg

SEQ ID NO: 1354297 - DNA, 25 bp, Homo sapien
caaatgcaatagacaccagccaggt

SEQ ID NO: 1354298 - DNA, 25 bp, Homo sapien
tattattgctctattgctgacctaa

SEQ ID NO: 1354299 - DNA, 25 bp, Homo sapien
tggcaatagccagtgtaggtcctct

SEQ ID NO: 1354300 - DNA, 25 bp, Homo sapien
tacttggcaatagccagtgtaggtc

SEQ ID NO: 1354301 - DNA, 25 bp, Homo sapien
tctttgcatgtgaataggactgcat

SEQ ID NO: 1354302 - DNA, 25 bp, Homo sapien
cttgatacttggcaatagccagtgt

SEQ ID NO: 1354303 - DNA, 25 bp, Homo sapien
cttgaggccccattcatatatagtg

SEQ ID NO: 1354304 - DNA, 25 bp, Homo sapien
tacatctatgagtagtgaattccag

SEQ ID NO: 1354305 - DNA, 25 bp, Homo sapien
tatacatcagcacttacagacacat

SEQ ID NO: 1354306 - DNA, 25 bp, Homo sapien
ttaaagctgccaaccacttacgctg

SEQ ID NO: 1354307 - DNA, 25 bp, Homo sapien
ccctttaatggtggacacggtggtg

SEQ ID NO: 1354308 - DNA, 25 bp, Homo sapien
ttgtagagacgagcataggttatgg

SEQ ID NO: 1354309 - DNA, 25 bp, Homo sapien
gacacggtggtgtgatccttttgta

SEQ ID NO: 1354310 - DNA, 25 bp, Homo sapien
ggttatggcaaatatacctacttta

SEQ ID NO: 1354311 - DNA, 25 bp, Homo sapien
tatgatagcaacgtctccttccatg

SEQ ID NO: 1354312 - DNA, 25 bp, Homo sapien
caggatttggaacggatgtcacatc

SEQ ID NO: 1354313 - DNA, 25 bp, Homo sapien
caagcagaggctgtatcgtgaaaga

SEQ ID NO: 1354314 - DNA, 25 bp, Homo sapien
taagaagttacttggaacgacagga

SEQ ID NO: 1354315 - DNA, 25 bp, Homo sapien
aggactatcctgtgtcgctcgccat

SEQ ID NO: 1354316 - DNA, 25 bp, Homo sapien
cacatagcgttgaggtcccggaagg

SEQ ID NO: 1354317 - DNA, 25 bp, Homo sapien
aggttgtcaagtaaccggccaggag

SEQ ID NO: 1354318 - DNA, 25 bp, Homo sapien
cacagtaggcacatagcgttgaggt

SEQ ID NO: 1354319 - DNA, 25 bp, Homo sapien
taagtgcaagcatacagaggcgccg

SEQ ID NO: 1354320 - DNA, 25 bp, Homo sapien
gaacgtttgctgagcggcatccagg

SEQ ID NO: 1354321 - DNA, 25 bp, Homo sapien
tgccataccgtgaccgggacctgtt

SEQ ID NO: 1354322 - DNA, 25 bp, Homo sapien
cctcagggaccaagtgtgtcgcgcg

SEQ ID NO: 1354323 - DNA, 25 bp, Homo sapien
aggcaccttcctcagtcgcgccgtg

SEQ ID NO: 1354324 - DNA, 25 bp, Homo sapien
catggacttcaacgtgaagaagctg

SEQ ID NO: 1354325 - DNA, 25 bp, Homo sapien
ggctgccgcctaggatgaatatcat

SEQ ID NO: 1354326 - DNA, 25 bp, Homo sapien
agtcgcgccgtgcaggtaccctggt

SEQ ID NO: 1354327 - DNA, 25 bp, Homo sapien
ccgggcctcgccgaccacccagcgg

SEQ ID NO: 1354328 - DNA, 25 bp, Homo sapien
ggaggggaccgcagctcgacgcggc

SEQ ID NO: 1354329 - DNA, 25 bp, Homo sapien
ggaccgcagctcgacgcggcgcccc

SEQ ID NO: 1354330 - DNA, 25 bp, Homo sapien
gggcctcgccgaccacccagcgggc

SEQ ID NO: 1354331 - DNA, 25 bp, Homo sapien
ctcccctcggagtccaagaagggag

SEQ ID NO: 1354332 - DNA, 25 bp, Homo sapien
ccgcgggggaaatggagatcgccag

SEQ ID NO: 1354333 - DNA, 25 bp, Homo sapien
aatggagatcgccagttggcgttga

SEQ ID NO: 1354334 - DNA, 25 bp, Homo sapien
tgccaacacagttccctccggccct

SEQ ID NO: 1354335 - DNA, 25 bp, Homo sapien
ctgggcttggcagcccgcgggggaa

SEQ ID NO: 1354336 - DNA, 25 bp, Homo sapien
ctctttttcaaaatgggaagcacca

SEQ ID NO: 1354337 - DNA, 25 bp, Homo sapien
tctttttcaaaatgggaagcaccag

SEQ ID NO: 1354338 - DNA, 25 bp, Homo sapien
ttcactctttttcaaaatgggaagc

SEQ ID NO: 1354339 - DNA, 25 bp, Homo sapien
cactctttttcaaaatgggaagcac

SEQ ID NO: 1354340 - DNA, 25 bp, Homo sapien
ctctcgatattctacaatcaaggaa

SEQ ID NO: 1354341 - DNA, 25 bp, Homo sapien
gaacttgggccgtttcccacagtca

SEQ ID NO: 1354342 - DNA, 25 bp, Homo sapien
caatcaaggaagtgtcagtactaag

SEQ ID NO: 1354343 - DNA, 25 bp, Homo sapien
tgtcagtactaaggaacttgggccg

SEQ ID NO: 1354344 - DNA, 25 bp, Homo sapien
gaatggattcagactggctaatggg

SEQ ID NO: 1354345 - DNA, 25 bp, Homo sapien
ccagaagggcaaggtgccaattacc

SEQ ID NO: 1354346 - DNA, 25 bp, Homo sapien
gaactgctcaattaagtaggtggac

SEQ ID NO: 1354347 - DNA, 25 bp, Homo sapien
taggtggactatggaaaggttgccc

SEQ ID NO: 1354348 - DNA, 25 bp, Homo sapien
tattcagttggcacaatttaatgca

SEQ ID NO: 1354349 - DNA, 25 bp, Homo sapien
tggttttccaacagaaatcaaatga

SEQ ID NO: 1354350 - DNA, 25 bp, Homo sapien
taatgcataattgggattggatcca

SEQ ID NO: 1354351 - DNA, 25 bp, Homo sapien
gatccatttactgtactgtggtaca

SEQ ID NO: 1354352 - DNA, 25 bp, Homo sapien
tcaataatgttaagcttcaaaggct

SEQ ID NO: 1354353 - DNA, 25 bp, Homo sapien
ctctgtgccactgagcttaatctga

SEQ ID NO: 1354354 - DNA, 25 bp, Homo sapien
tacgtttgtctaccacagaaccacc

SEQ ID NO: 1354355 - DNA, 25 bp, Homo sapien
tacccagtaatgtacagaaaccttc

SEQ ID NO: 1354356 - DNA, 25 bp, Homo sapien
tcttaattgtgttctagcagtagtc

SEQ ID NO: 1354357 - DNA, 25 bp, Homo sapien
caagggctcatggaatcagtcttcc

SEQ ID NO: 1354358 - DNA, 25 bp, Homo sapien
gtgagaccccagaccggcaatattg

SEQ ID NO: 1354359 - DNA, 25 bp, Homo sapien
agtgattggcaaagtgtgagacccc

SEQ ID NO: 1354360 - DNA, 25 bp, Homo sapien
gaagtattgcttagaatgccagtac

SEQ ID NO: 1354361 - DNA, 25 bp, Homo sapien
gaaaccatgtgtacatccctgtgcc

SEQ ID NO: 1354362 - DNA, 25 bp, Homo sapien
tgtaacccttaaccaacaacagtgc

SEQ ID NO: 1354363 - DNA, 25 bp, Homo sapien
acaacagtgccctgtccatgtaggg

SEQ ID NO: 1354364 - DNA, 25 bp, Homo sapien
gaaacacaatgtcgctgagccgtgg

SEQ ID NO: 1354365 - DNA, 25 bp, Homo sapien
acatccacagtcaatcctcttcttt

SEQ ID NO: 1354366 - DNA, 25 bp, Homo sapien
tcatcagcaagtggaggattcccct

SEQ ID NO: 1354367 - DNA, 25 bp, Homo sapien
tgagccgtggcctgtccgatcatca

SEQ ID NO: 1354368 - DNA, 25 bp, Homo sapien
actgctgcttaaccaactaaagaaa

SEQ ID NO: 1354369 - DNA, 25 bp, Homo sapien
aactgctgcttaaccaactaaagaa

SEQ ID NO: 1354370 - DNA, 25 bp, Homo sapien
ctgctgcttaaccaactaaagaaac

SEQ ID NO: 1354371 - DNA, 25 bp, Homo sapien
tgctgcttaaccaactaaagaaacc

SEQ ID NO: 1354372 - DNA, 25 bp, Homo sapien
aaaggtcatcaagccaagcagggag

SEQ ID NO: 1354373 - DNA, 25 bp, Homo sapien
cagcatgagcccactctagctaatt

SEQ ID NO: 1354374 - DNA, 25 bp, Homo sapien
gggctgctgagactaaaggatctat

SEQ ID NO: 1354375 - DNA, 25 bp, Homo sapien
tttctgcaaacttgaggtccccaac

SEQ ID NO: 1354376 - DNA, 25 bp, Homo sapien
tctagaccttccttcatggcccatt

SEQ ID NO: 1354377 - DNA, 25 bp, Homo sapien
gcgtaataaactggcttgagtccca

SEQ ID NO: 1354378 - DNA, 25 bp, Homo sapien
gcaccaccaacaagaggcgtaataa

SEQ ID NO: 1354379 - DNA, 25 bp, Homo sapien
ctgatgagggccgtagttccagttt

SEQ ID NO: 1354380 - DNA, 25 bp, Homo sapien
gatgagggccgtagttccagtttcc

SEQ ID NO: 1354381 - DNA, 25 bp, Homo sapien
aaatgaaggaatgcccgttggcaag

SEQ ID NO: 1354382 - DNA, 25 bp, Homo sapien
ggaatgcccgttggcaagaagaaaa

SEQ ID NO: 1354383 - DNA, 25 bp, Homo sapien
gaaatgaaggaatgcccgttggcaa

SEQ ID NO: 1354384 - DNA, 25 bp, Homo sapien
gaaggaatgcccgttggcaagaaga

SEQ ID NO: 1354385 - DNA, 25 bp, Homo sapien
ggcacagacagttaagtgttgtgaa

SEQ ID NO: 1354386 - DNA, 25 bp, Homo sapien
agctggatacggctggcacagacag

SEQ ID NO: 1354387 - DNA, 25 bp, Homo sapien
cagattttcttgtcgtagctggata

SEQ ID NO: 1354388 - DNA, 25 bp, Homo sapien
taagtgttgtgaaatggagcggact

SEQ ID NO: 1354389 - DNA, 25 bp, Homo sapien
caccagagcggtgcgttgcttacaa

SEQ ID NO: 1354390 - DNA, 25 bp, Homo sapien
gaaaaattatcagagggcttacact

SEQ ID NO: 1354391 - DNA, 25 bp, Homo sapien
gcaattacgcctcaataaagctggt

SEQ ID NO: 1354392 - DNA, 25 bp, Homo sapien
tacaactgataaccctacgtggaca

SEQ ID NO: 1354393 - DNA, 25 bp, Homo sapien
catatgctgagtggggaaattattc

SEQ ID NO: 1354394 - DNA, 25 bp, Homo sapien
tggtgcatatgctgagtggggaaat

SEQ ID NO: 1354395 - DNA, 25 bp, Homo sapien
ctgagtggggaaattattctgttta

SEQ ID NO: 1354396 - DNA, 25 bp, Homo sapien
tttggtgcatatgctgagtggggaa

SEQ ID NO: 1354397 - DNA, 25 bp, Homo sapien
tataaagcactattaccaacaataa

SEQ ID NO: 1354398 - DNA, 25 bp, Homo sapien
tctatatcaagagatattccttaaa

SEQ ID NO: 1354399 - DNA, 25 bp, Homo sapien
agcactattaccaacaataagatgt

SEQ ID NO: 1354400 - DNA, 25 bp, Homo sapien
ttggctaaaaaaagggcttacatga

SEQ ID NO: 1354401 - DNA, 25 bp, Homo sapien
taatgcctcaagtaaaagactgatc

SEQ ID NO: 1354402 - DNA, 25 bp, Homo sapien
gcaggcaatctgttgaggctcagta

SEQ ID NO: 1354403 - DNA, 25 bp, Homo sapien
tctgttgttcgtaaaactggaccaa

SEQ ID NO: 1354404 - DNA, 25 bp, Homo sapien
tgatccacacaaatccctagaaagg

SEQ ID NO: 1354405 - DNA, 25 bp, Homo sapien
ctgtgttccatttgagaatgctcag

SEQ ID NO: 1354406 - DNA, 25 bp, Homo sapien
tcttctacactgtctgtgttccatt

SEQ ID NO: 1354407 - DNA, 25 bp, Homo sapien
tgttccatttgagaatgctcagttc

SEQ ID NO: 1354408 - DNA, 25 bp, Homo sapien
gttccatttgagaatgctcagttct

SEQ ID NO: 1354409 - DNA, 25 bp, Homo sapien
taatacagggtctgaaccacggaca

SEQ ID NO: 1354410 - DNA, 25 bp, Homo sapien
tgtcgtccaaaagctttaatacagg

SEQ ID NO: 1354411 - DNA, 25 bp, Homo sapien
agcaatgttcccattgtcgtccaaa

SEQ ID NO: 1354412 - DNA, 25 bp, Homo sapien
tccaaaagctttaatacagggtctg

SEQ ID NO: 1354413 - DNA, 25 bp, Homo sapien
ccatccaggctaatgaatcaataat

SEQ ID NO: 1354414 - DNA, 25 bp, Homo sapien
tttgtggagtttagaaaataggcca

SEQ ID NO: 1354415 - DNA, 25 bp, Homo sapien
aggccatccaggctaatgaatcaat

SEQ ID NO: 1354416 - DNA, 25 bp, Homo sapien
ttgtggagtttagaaaataggccat

SEQ ID NO: 1354417 - DNA, 25 bp, Homo sapien
tgtgtataaggaattatatgccaca

SEQ ID NO: 1354418 - DNA, 25 bp, Homo sapien
cagcaatgtgtataaggaattatat

SEQ ID NO: 1354419 - DNA, 25 bp, Homo sapien
acaggaccactcaaacttataaact

SEQ ID NO: 1354420 - DNA, 25 bp, Homo sapien
cagtaacaggaccactcaaacttat

SEQ ID NO: 1354421 - DNA, 25 bp, Homo sapien
caatgaaatatcatcacatacttat

SEQ ID NO: 1354422 - DNA, 25 bp, Homo sapien
atcatcacatacttattagaacaac

SEQ ID NO: 1354423 - DNA, 25 bp, Homo sapien
atatcatcacatacttattagaaca

SEQ ID NO: 1354424 - DNA, 25 bp, Homo sapien
gaaatatcatcacatacttattaga

SEQ ID NO: 1354425 - DNA, 25 bp, Homo sapien
ggagcaataggacctcttaatcact

SEQ ID NO: 1354426 - DNA, 25 bp, Homo sapien
tggagcaataggacctcttaatcac

SEQ ID NO: 1354427 - DNA, 25 bp, Homo sapien
gagcaataggacctcttaatcactg

SEQ ID NO: 1354428 - DNA, 25 bp, Homo sapien
tgtggagcaataggacctcttaatc

SEQ ID NO: 1354429 - DNA, 25 bp, Homo sapien
aaacaatcttaactgtatgacccag

SEQ ID NO: 1354430 - DNA, 25 bp, Homo sapien
ccttccacaggtgaatgacaaaact

SEQ ID NO: 1354431 - DNA, 25 bp, Homo sapien
tcaaaattgccccaaattggaagca

SEQ ID NO: 1354432 - DNA, 25 bp, Homo sapien
tagggcaaatgcaacatgatgtcat

SEQ ID NO: 1354433 - DNA, 25 bp, Homo sapien
gtcctctgaacagtttgggtttatc

SEQ ID NO: 1354434 - DNA, 25 bp, Homo sapien
ggtactcacattcggaattacaaag

SEQ ID NO: 1354435 - DNA, 25 bp, Homo sapien
tctactcctaagcatgacccaaaag

SEQ ID NO: 1354436 - DNA, 25 bp, Homo sapien
gcctacagcacagagaacttacata

SEQ ID NO: 1354437 - DNA, 25 bp, Homo sapien
aacacttctgagaaaggtgccaaac

SEQ ID NO: 1354438 - DNA, 25 bp, Homo sapien
ggcgaatattttcccgtgcaaatga

SEQ ID NO: 1354439 - DNA, 25 bp, Homo sapien
caattttcaataatgatcatgccta

SEQ ID NO: 1354440 - DNA, 25 bp, Homo sapien
tattttaatagaggcctatacatgg

SEQ ID NO: 1354441 - DNA, 25 bp, Homo sapien
tcccgttttggttgttatcaatcta

SEQ ID NO: 1354442 - DNA, 25 bp, Homo sapien
ctgtatttaatttctcaatgtaaac

SEQ ID NO: 1354443 - DNA, 25 bp, Homo sapien
aatttctcaatgtaaacatacatca

SEQ ID NO: 1354444 - DNA, 25 bp, Homo sapien
cactgtatttaatttctcaatgtaa

SEQ ID NO: 1354445 - DNA, 25 bp, Homo sapien
tttaatttctcaatgtaaacataca

SEQ ID NO: 1354446 - DNA, 25 bp, Homo sapien
catgaaatgggaacacagccaagct

SEQ ID NO: 1354447 - DNA, 25 bp, Homo sapien
gagtattaaccacataaacgcaaat

SEQ ID NO: 1354448 - DNA, 25 bp, Homo sapien
tattaataactttcggtatacaaga

SEQ ID NO: 1354449 - DNA, 25 bp, Homo sapien
ataggctgtaactttttactctggc

SEQ ID NO: 1354450 - DNA, 25 bp, Homo sapien
gaatgtcaagggatttagagctaac

SEQ ID NO: 1354451 - DNA, 25 bp, Homo sapien
ccttgcccagccaccaatttggaga

SEQ ID NO: 1354452 - DNA, 25 bp, Homo sapien
gttttgctatacacactgctcagaa

SEQ ID NO: 1354453 - DNA, 25 bp, Homo sapien
cccctagaagagctaagttttgcta

SEQ ID NO: 1354454 - DNA, 25 bp, Homo sapien
catcaatatagagaatggcaacaat

SEQ ID NO: 1354455 - DNA, 25 bp, Homo sapien
aataacaatgtcataccatatccag

SEQ ID NO: 1354456 - DNA, 25 bp, Homo sapien
tgtgttcaacaaaagctattcagta

SEQ ID NO: 1354457 - DNA, 25 bp, Homo sapien
tggcaacaatagacaacctaattct

SEQ ID NO: 1354458 - DNA, 25 bp, Homo sapien
gaggcagactagataacaagtacct

SEQ ID NO: 1354459 - DNA, 25 bp, Homo sapien
tctaaatggaaatgtcccatggaag

SEQ ID NO: 1354460 - DNA, 25 bp, Homo sapien
ggtgactaactggatataacgtgtg

SEQ ID NO: 1354461 - DNA, 25 bp, Homo sapien
gaagagacacaacatggtgactaac

SEQ ID NO: 1354462 - DNA, 25 bp, Homo sapien
tataagctagagtataatgtaggtt

SEQ ID NO: 1354463 - DNA, 25 bp, Homo sapien
catgataatcccagaagctacttga

SEQ ID NO: 1354464 - DNA, 25 bp, Homo sapien
tcccagaagctacttgatgttgaag

SEQ ID NO: 1354465 - DNA, 25 bp, Homo sapien
taatgtaggttatcatgataatccc

SEQ ID NO: 1354466 - DNA, 25 bp, Homo sapien
ctccagtgtgggcgacagtgagact

SEQ ID NO: 1354467 - DNA, 25 bp, Homo sapien
actccagtgtgggcgacagtgagac

SEQ ID NO: 1354468 - DNA, 25 bp, Homo sapien
aatgactgaacagtttactggagta

SEQ ID NO: 1354469 - DNA, 25 bp, Homo sapien
taaatgactgaacagtttactggag

SEQ ID NO: 1354470 - DNA, 25 bp, Homo sapien
gactgaacagtttactggagtaaat

SEQ ID NO: 1354471 - DNA, 25 bp, Homo sapien
tttaaatgactgaacagtttactgg

SEQ ID NO: 1354472 - DNA, 25 bp, Homo sapien
cacaaacttcaagaatagctcctgc

SEQ ID NO: 1354473 - DNA, 25 bp, Homo sapien
catccacaaacttcaagaatagctc

SEQ ID NO: 1354474 - DNA, 25 bp, Homo sapien
tccacaaacttcaagaatagctcct

SEQ ID NO: 1354475 - DNA, 25 bp, Homo sapien
tcatccacaaacttcaagaatagct

SEQ ID NO: 1354476 - DNA, 25 bp, Homo sapien
tgattaatgacactttcatactcac

SEQ ID NO: 1354477 - DNA, 25 bp, Homo sapien
ttcatcttcaagtcttccccatact

SEQ ID NO: 1354478 - DNA, 25 bp, Homo sapien
ttccccatactttctgattaatgac

SEQ ID NO: 1354479 - DNA, 25 bp, Homo sapien
taaatttgctgttcatcttcaagtc

SEQ ID NO: 1354480 - DNA, 25 bp, Homo sapien
tttgagtgatggcattcttgcttag

SEQ ID NO: 1354481 - DNA, 25 bp, Homo sapien
gagtgatggcattcttgcttagaaa

SEQ ID NO: 1354482 - DNA, 25 bp, Homo sapien
tgagtgatggcattcttgcttagaa

SEQ ID NO: 1354483 - DNA, 25 bp, Homo sapien
agtgatggcattcttgcttagaaac

SEQ ID NO: 1354484 - DNA, 25 bp, Homo sapien
tatcatcagcaaaccagattactac

SEQ ID NO: 1354485 - DNA, 25 bp, Homo sapien
tattatcatgctattctgagttctc

SEQ ID NO: 1354486 - DNA, 25 bp, Homo sapien
ctactttgtcaatagcaattattat

SEQ ID NO: 1354487 - DNA, 25 bp, Homo sapien
gctattctgagttctccaaattttc

SEQ ID NO: 1354488 - DNA, 25 bp, Homo sapien
ccatccaatggaaggaatatactag

SEQ ID NO: 1354489 - DNA, 25 bp, Homo sapien
cttatctcaactaaaccatccaatg

SEQ ID NO: 1354490 - DNA, 25 bp, Homo sapien
catccaatggaaggaatatactaga

SEQ ID NO: 1354491 - DNA, 25 bp, Homo sapien
tctcaactaaaccatccaatggaag

SEQ ID NO: 1354492 - DNA, 25 bp, Homo sapien
caatcaggatccagctgaagcaggt

SEQ ID NO: 1354493 - DNA, 25 bp, Homo sapien
gaaaagcctaactctctgcatgcct

SEQ ID NO: 1354494 - DNA, 25 bp, Homo sapien
tgaagcaggttgaactgtccgagaa

SEQ ID NO: 1354495 - DNA, 25 bp, Homo sapien
tccgatgaaaactctgccccaaaag

SEQ ID NO: 1354496 - DNA, 25 bp, Homo sapien
tggcagctgcgaaggtgatctacac

SEQ ID NO: 1354497 - DNA, 25 bp, Homo sapien
taagccacgttgcattctggccgca

SEQ ID NO: 1354498 - DNA, 25 bp, Homo sapien
ggatcaaccgagaaattaagccacg

SEQ ID NO: 1354499 - DNA, 25 bp, Homo sapien
tctggccgcagcagtcattaaggaa

SEQ ID NO: 1354500 - DNA, 25 bp, Homo sapien
gcacagtcgccaacaacaaccgtag

SEQ ID NO: 1354501 - DNA, 25 bp, Homo sapien
cgcttgaagcacagtcgccaacaac

SEQ ID NO: 1354502 - DNA, 25 bp, Homo sapien
accgtagcccaaacgccggcaccag

SEQ ID NO: 1354503 - DNA, 25 bp, Homo sapien
ttgaagcacagtcgccaacaacaac

SEQ ID NO: 1354504 - DNA, 25 bp, Homo sapien
gctaacggccgttgcccttacatct

SEQ ID NO: 1354505 - DNA, 25 bp, Homo sapien
tcgattacccaaatcaggcacttgc

SEQ ID NO: 1354506 - DNA, 25 bp, Homo sapien
tgatccaaaacagaacgctaacggc

SEQ ID NO: 1354507 - DNA, 25 bp, Homo sapien
tccgcaggtttctggctgcctagaa

SEQ ID NO: 1354508 - DNA, 25 bp, Homo sapien
tctttacttctgcggtctcctttct

SEQ ID NO: 1354509 - DNA, 25 bp, Homo sapien
gaagccacgccttcgccagttttag

SEQ ID NO: 1354510 - DNA, 25 bp, Homo sapien
gacacttcgtcaagcagccaagaag

SEQ ID NO: 1354511 - DNA, 25 bp, Homo sapien
cctttcttttattcacgacacttcg

SEQ ID NO: 1354512 - DNA, 25 bp, Homo sapien
ccgtttagtcggctgaggagaagcg

SEQ ID NO: 1354513 - DNA, 25 bp, Homo sapien
gtcgctgcggtggttctctcgctgt

SEQ ID NO: 1354514 - DNA, 25 bp, Homo sapien
cggcagccgcttcgcgctgtttgct

SEQ ID NO: 1354515 - DNA, 25 bp, Homo sapien
caccagcggcgttggtgatagcgcc

SEQ ID NO: 1354516 - DNA, 25 bp, Homo sapien
taaatagttctgttcagaggcttct

SEQ ID NO: 1354517 - DNA, 25 bp, Homo sapien
ggtgtggctggataaatagttctgt

SEQ ID NO: 1354518 - DNA, 25 bp, Homo sapien
ctggtcacattcttgctgggtgtgg

SEQ ID NO: 1354519 - DNA, 25 bp, Homo sapien
ttagtatggttcttgagctaactgg

SEQ ID NO: 1354520 - DNA, 25 bp, Homo sapien
acatgcagacagacggaataaattt

SEQ ID NO: 1354521 - DNA, 25 bp, Homo sapien
aatttgatcacatgagagtagagag

SEQ ID NO: 1354522 - DNA, 25 bp, Homo sapien
catataattcatgtaatataccctc

SEQ ID NO: 1354523 - DNA, 25 bp, Homo sapien
ttctcctggttgttcatgatatacc

SEQ ID NO: 1354524 - DNA, 25 bp, Homo sapien
tctattgggtctaagaagagttaac

SEQ ID NO: 1354525 - DNA, 25 bp, Homo sapien
tgtgatacccgtagctgtggttttc

SEQ ID NO: 1354526 - DNA, 25 bp, Homo sapien
caagctagtccacgttgaacctcca

SEQ ID NO: 1354527 - DNA, 25 bp, Homo sapien
cagtgttcctatggatactggctcc

SEQ ID NO: 1354528 - DNA, 25 bp, Homo sapien
ttcaggttaaacactatttgcaaac

SEQ ID NO: 1354529 - DNA, 25 bp, Homo sapien
gatcaaaatactgagcctgcacctt

SEQ ID NO: 1354530 - DNA, 25 bp, Homo sapien
tatttgcaaactgatattcccgaat

SEQ ID NO: 1354531 - DNA, 25 bp, Homo sapien
taagtatagcccctattgagaacct

SEQ ID NO: 1354532 - DNA, 25 bp, Homo sapien
taaggacaggagttaaatataagtc

SEQ ID NO: 1354533 - DNA, 25 bp, Homo sapien
tttttctcagatagcgatgaaccat

SEQ ID NO: 1354534 - DNA, 25 bp, Homo sapien
tattatatttaaggacaggagttaa

SEQ ID NO: 1354535 - DNA, 25 bp, Homo sapien
cattattgtttggacttttattata

SEQ ID NO: 1354536 - DNA, 25 bp, Homo sapien
agaagataatttgagtccaggaggt

SEQ ID NO: 1354537 - DNA, 25 bp, Homo sapien
gctcacaggtaactgccaagtagag

SEQ ID NO: 1354538 - DNA, 25 bp, Homo sapien
ttttcctctgttctgctcacaggta

SEQ ID NO: 1354539 - DNA, 25 bp, Homo sapien
tctgttctgctcacaggtaactgcc

SEQ ID NO: 1354540 - DNA, 25 bp, Homo sapien
taactgccaagtagagtttatcttt

SEQ ID NO: 1354541 - DNA, 25 bp, Homo sapien
catttaatgttgtttatttccttca

SEQ ID NO: 1354542 - DNA, 25 bp, Homo sapien
atatgccaggcatcggaagaacttc

SEQ ID NO: 1354543 - DNA, 25 bp, Homo sapien
ggttttcatcgctctttctaagtct

SEQ ID NO: 1354544 - DNA, 25 bp, Homo sapien
ggaatatgaactgatggcctgaaaa

SEQ ID NO: 1354545 - DNA, 25 bp, Homo sapien
tgattactttaacagggaagaacca

SEQ ID NO: 1354546 - DNA, 25 bp, Homo sapien
tgtctgtggccactgaatcaccatt

SEQ ID NO: 1354547 - DNA, 25 bp, Homo sapien
cttttttgtctgtggccactgaatc

SEQ ID NO: 1354548 - DNA, 25 bp, Homo sapien
tctgtggccactgaatcaccattca

SEQ ID NO: 1354549 - DNA, 25 bp, Homo sapien
tttgtctgtggccactgaatcacca

SEQ ID NO: 1354550 - DNA, 25 bp, Homo sapien
ttctgctctgtacccgcttattctg

SEQ ID NO: 1354551 - DNA, 25 bp, Homo sapien
tatttgttctcgtttactgtgtgaa

SEQ ID NO: 1354552 - DNA, 25 bp, Homo sapien
tgtgttctgctctgtacccgcttat

SEQ ID NO: 1354553 - DNA, 25 bp, Homo sapien
gttctcgtttactgtgtgaatctgc

SEQ ID NO: 1354554 - DNA, 25 bp, Homo sapien
cttgaggaattgatattgtaacttt

SEQ ID NO: 1354555 - DNA, 25 bp, Homo sapien
aggaattgatattgtaactttcttc

SEQ ID NO: 1354556 - DNA, 25 bp, Homo sapien
gaggaattgatattgtaactttctt

SEQ ID NO: 1354557 - DNA, 25 bp, Homo sapien
tgaggaattgatattgtaactttct

SEQ ID NO: 1354558 - DNA, 25 bp, Homo sapien
aaggctgacctccatcattactgcc

SEQ ID NO: 1354559 - DNA, 25 bp, Homo sapien
ggaaggctgacctccatcattactg

SEQ ID NO: 1354560 - DNA, 25 bp, Homo sapien
gaaggctgacctccatcattactgc

SEQ ID NO: 1354561 - DNA, 25 bp, Homo sapien
cttcagcttgttttggccccacttt

SEQ ID NO: 1354562 - DNA, 25 bp, Homo sapien
tcaacatcctttcctaggtcttcac

SEQ ID NO: 1354563 - DNA, 25 bp, Homo sapien
aattcaacatcctttcctaggtctt

SEQ ID NO: 1354564 - DNA, 25 bp, Homo sapien
ctggggcatcaccaacacttcaaat

SEQ ID NO: 1354565 - DNA, 25 bp, Homo sapien
tcaaattcaacatcctttcctaggt

SEQ ID NO: 1354566 - DNA, 25 bp, Homo sapien
tgtttcactaccttgtctcgtaagg

SEQ ID NO: 1354567 - DNA, 25 bp, Homo sapien
tttgtttcactaccttgtctcgtaa

SEQ ID NO: 1354568 - DNA, 25 bp, Homo sapien
cactaccttgtctcgtaaggtgaga

SEQ ID NO: 1354569 - DNA, 25 bp, Homo sapien
tttcactaccttgtctcgtaaggtg

SEQ ID NO: 1354570 - DNA, 25 bp, Homo sapien
ctttatggacattcagccgtacagt

SEQ ID NO: 1354571 - DNA, 25 bp, Homo sapien
ttatggacattcagccgtacagtca

SEQ ID NO: 1354572 - DNA, 25 bp, Homo sapien
tttatggacattcagccgtacagtc

SEQ ID NO: 1354573 - DNA, 25 bp, Homo sapien
tatggacattcagccgtacagtcac

SEQ ID NO: 1354574 - DNA, 25 bp, Homo sapien
tgtttattcaaaacaattgttctgc

SEQ ID NO: 1354575 - DNA, 25 bp, Homo sapien
caggaataatattccctgccactga

SEQ ID NO: 1354576 - DNA, 25 bp, Homo sapien
gcttctcccacgtcgacctgattga

SEQ ID NO: 1354577 - DNA, 25 bp, Homo sapien
tgatgtcagcaacctcaacagtttt

SEQ ID NO: 1354578 - DNA, 25 bp, Homo sapien
gatcaaaggcacaggttgccaggga

SEQ ID NO: 1354579 - DNA, 25 bp, Homo sapien
ttgccagggaaagtgcactgcagtt

SEQ ID NO: 1354580 - DNA, 25 bp, Homo sapien
ccaggtgcagttgttgaagtgtgaa

SEQ ID NO: 1354581 - DNA, 25 bp, Homo sapien
caggtgcagttgttgaagtgtgaaa

SEQ ID NO: 1354582 - DNA, 25 bp, Homo sapien
ggtgcagttgttgaagtgtgaaaat

SEQ ID NO: 1354583 - DNA, 25 bp, Homo sapien
aggtgcagttgttgaagtgtgaaaa

SEQ ID NO: 1354584 - DNA, 25 bp, Homo sapien
cagtgtcttttgttaggttatcatc

SEQ ID NO: 1354585 - DNA, 25 bp, Homo sapien
gtgtcttttgttaggttatcatcag

SEQ ID NO: 1354586 - DNA, 25 bp, Homo sapien
ttttgttaggttatcatcaggcctc

SEQ ID NO: 1354587 - DNA, 25 bp, Homo sapien
ttgttaggttatcatcaggcctcat

SEQ ID NO: 1354588 - DNA, 25 bp, Homo sapien
cggtgactccgtattatgactccat

SEQ ID NO: 1354589 - DNA, 25 bp, Homo sapien
tgtaaactgagatatcggtgactcc

SEQ ID NO: 1354590 - DNA, 25 bp, Homo sapien
ttctccatgggttatttgtaaagct

SEQ ID NO: 1354591 - DNA, 25 bp, Homo sapien
tagacaaaagtggttttgcaccaat

SEQ ID NO: 1354592 - DNA, 25 bp, Homo sapien
tcagtaaactttctgtggaagggcc

SEQ ID NO: 1354593 - DNA, 25 bp, Homo sapien
agatgcagaccatgggcaaccaacc

SEQ ID NO: 1354594 - DNA, 25 bp, Homo sapien
tgattcgtgtagtctctcccacaga

SEQ ID NO: 1354595 - DNA, 25 bp, Homo sapien
cttggtgaactagatcaggaggtca

SEQ ID NO: 1354596 - DNA, 25 bp, Homo sapien
tctgatagcaacacttaagatattg

SEQ ID NO: 1354597 - DNA, 25 bp, Homo sapien
tggttaatgcctataatctgttgct

SEQ ID NO: 1354598 - DNA, 25 bp, Homo sapien
aacatattgggtgcttctgaattcc

SEQ ID NO: 1354599 - DNA, 25 bp, Homo sapien
tcagtattttgaccatagggagata

SEQ ID NO: 1354600 - DNA, 25 bp, Homo sapien
tattgttaccaagctgatgtgccgt

SEQ ID NO: 1354601 - DNA, 25 bp, Homo sapien
catgatgtatgcaaagtactggcca

SEQ ID NO: 1354602 - DNA, 25 bp, Homo sapien
ttttatctggactgacatgcctctg

SEQ ID NO: 1354603 - DNA, 25 bp, Homo sapien
tactggccagggtagactaataact

SEQ ID NO: 1354604 - DNA, 25 bp, Homo sapien
aaagactggttgtctcctggtgtcc

SEQ ID NO: 1354605 - DNA, 25 bp, Homo sapien
cagcggttcagccagcgtgtcttgt

SEQ ID NO: 1354606 - DNA, 25 bp, Homo sapien
tggcaggaggttgaccaagctgttc

SEQ ID NO: 1354607 - DNA, 25 bp, Homo sapien
tcttgtgaattctcccagggctctc

SEQ ID NO: 1354608 - DNA, 25 bp, Homo sapien
tctgcaaagaggggttcagagatat

SEQ ID NO: 1354609 - DNA, 25 bp, Homo sapien
tgcaaagaggggttcagagatatcc

SEQ ID NO: 1354610 - DNA, 25 bp, Homo sapien
tttctgcaaagaggggttcagagat

SEQ ID NO: 1354611 - DNA, 25 bp, Homo sapien
caaagaggggttcagagatatccat

SEQ ID NO: 1354612 - DNA, 25 bp, Homo sapien
aaattactgtgtctctaggcccctc

SEQ ID NO: 1354613 - DNA, 25 bp, Homo sapien
catgcagagccctggttctagccga

SEQ ID NO: 1354614 - DNA, 25 bp, Homo sapien
tgtgtgccacacaggagaagacgta

SEQ ID NO: 1354615 - DNA, 25 bp, Homo sapien
tgtaggttaccccacaaagccaatg

SEQ ID NO: 1354616 - DNA, 25 bp, Homo sapien
gaacacctattgtgaggccagcacc

SEQ ID NO: 1354617 - DNA, 25 bp, Homo sapien
tgctcagtagttgaccccaagtgat

SEQ ID NO: 1354618 - DNA, 25 bp, Homo sapien
ttcacagtgggtacagctcagatcc

SEQ ID NO: 1354619 - DNA, 25 bp, Homo sapien
ttctgcagaatacagctcaactggg

SEQ ID NO: 1354620 - DNA, 25 bp, Homo sapien
caagtgcctccgcatgtgccgggct

SEQ ID NO: 1354621 - DNA, 25 bp, Homo sapien
ctccttgtcatagcgcagtggcagc

SEQ ID NO: 1354622 - DNA, 25 bp, Homo sapien
gaaatctgcaatgcaattagcgtca

SEQ ID NO: 1354623 - DNA, 25 bp, Homo sapien
ttggatttggcgctcctccgaaggc

SEQ ID NO: 1354624 - DNA, 25 bp, Homo sapien
tgtctaagtgaattatcgtgcatcc

SEQ ID NO: 1354625 - DNA, 25 bp, Homo sapien
agacacatggatgcgtatttctgct

SEQ ID NO: 1354626 - DNA, 25 bp, Homo sapien
gatgacgtcccctttcaagtctctt

SEQ ID NO: 1354627 - DNA, 25 bp, Homo sapien
gacggcgctgctgccgatgacgtcc

SEQ ID NO: 1354628 - DNA, 25 bp, Homo sapien
tcgcagtctctctccatagtaacag

SEQ ID NO: 1354629 - DNA, 25 bp, Homo sapien
cctggaccagcgtcatcatcctggg

SEQ ID NO: 1354630 - DNA, 25 bp, Homo sapien
tgcccatcgcatacaggaggcctaa

SEQ ID NO: 1354631 - DNA, 25 bp, Homo sapien
gctgtgtgtggcatgactccttcga

SEQ ID NO: 1354632 - DNA, 25 bp, Homo sapien
tttcagtcgttgtatcattacttag

SEQ ID NO: 1354633 - DNA, 25 bp, Homo sapien
ttgatttcagtcgttgtatcattac

SEQ ID NO: 1354634 - DNA, 25 bp, Homo sapien
ggtgtgaggccattcatgggaaggc

SEQ ID NO: 1354635 - DNA, 25 bp, Homo sapien
gggaaggccacgatgaattttgatt

SEQ ID NO: 1354636 - DNA, 25 bp, Homo sapien
ctttctggacatcctaggggacctg

SEQ ID NO: 1354637 - DNA, 25 bp, Homo sapien
tctggacatcctaggggacctgcag

SEQ ID NO: 1354638 - DNA, 25 bp, Homo sapien
cagttcagccacagcgaggcccagg

SEQ ID NO: 1354639 - DNA, 25 bp, Homo sapien
tgcagttcagccacagcgaggccca

SEQ ID NO: 1354640 - DNA, 25 bp, Homo sapien
caggataagcttgcagagtggcccc

SEQ ID NO: 1354641 - DNA, 25 bp, Homo sapien
gccgccgtcctgaactttctcggga

SEQ ID NO: 1354642 - DNA, 25 bp, Homo sapien
attaaagcgaatggtgcttgggtcc

SEQ ID NO: 1354643 - DNA, 25 bp, Homo sapien
aacctcagggcggtgctcgcctctg

SEQ ID NO: 1354644 - DNA, 25 bp, Homo sapien
tcgagcaggcttgccgatgacaaca

SEQ ID NO: 1354645 - DNA, 25 bp, Homo sapien
taaattgcctttatgagagtcgagc

SEQ ID NO: 1354646 - DNA, 25 bp, Homo sapien
tttgtaaggcaaatccaggcccgcg

SEQ ID NO: 1354647 - DNA, 25 bp, Homo sapien
cgcgcacacgttgctcgaatgtcag

SEQ ID NO: 1354648 - DNA, 25 bp, Homo sapien
caagtggatcacttggtactgtctg

SEQ ID NO: 1354649 - DNA, 25 bp, Homo sapien
ggtactgtctgacttgataaccagc

SEQ ID NO: 1354650 - DNA, 25 bp, Homo sapien
atggaggtagaaagcaagtggatca

SEQ ID NO: 1354651 - DNA, 25 bp, Homo sapien
gatggaggtagaaagcaagtggatc

SEQ ID NO: 1354652 - DNA, 25 bp, Homo sapien
tcactacaagaatggggaaactgtt

SEQ ID NO: 1354653 - DNA, 25 bp, Homo sapien
ttcactacaagaatggggaaactgt

SEQ ID NO: 1354654 - DNA, 25 bp, Homo sapien
tataattaagaattggtaatctcct

SEQ ID NO: 1354655 - DNA, 25 bp, Homo sapien
cattaggagaaactacccacctggt

SEQ ID NO: 1354656 - DNA, 25 bp, Homo sapien
ggcttctttaagactgtcattagtt

SEQ ID NO: 1354657 - DNA, 25 bp, Homo sapien
tggaaagacaaaggcttctttaaga

SEQ ID NO: 1354658 - DNA, 25 bp, Homo sapien
aattgttagcatgaatagtaagtac

SEQ ID NO: 1354659 - DNA, 25 bp, Homo sapien
tgtaaaattgttagcatgaatagta

SEQ ID NO: 1354660 - DNA, 25 bp, Homo sapien
ttgtttgtaaaattgttagcatgaa

SEQ ID NO: 1354661 - DNA, 25 bp, Homo sapien
tagcatgaatagtaagtaccgtggg

SEQ ID NO: 1354662 - DNA, 25 bp, Homo sapien
agcaaactaggctcaggccatggca

SEQ ID NO: 1354663 - DNA, 25 bp, Homo sapien
aatgtctcaggatgggttatttcag

SEQ ID NO: 1354664 - DNA, 25 bp, Homo sapien
tgctgaatgtctcaggatgggttat

SEQ ID NO: 1354665 - DNA, 25 bp, Homo sapien
cagcaaactaggctcaggccatggc

SEQ ID NO: 1354666 - DNA, 25 bp, Homo sapien
gggcaagaaacactgcagcggccag

SEQ ID NO: 1354667 - DNA, 25 bp, Homo sapien
ctgggcaagaaacactgcagcggcc

SEQ ID NO: 1354668 - DNA, 25 bp, Homo sapien
ctagtctacttctgggcaagaaaca

SEQ ID NO: 1354669 - DNA, 25 bp, Homo sapien
ctcctagtctacttctgggcaagaa

SEQ ID NO: 1354670 - DNA, 25 bp, Homo sapien
ggaaccagaaactcgggagaggcca

SEQ ID NO: 1354671 - DNA, 25 bp, Homo sapien
tacagggaatttactgtcttgcgct

SEQ ID NO: 1354672 - DNA, 25 bp, Homo sapien
tactgtcttgcgctttgtgtttgtg

SEQ ID NO: 1354673 - DNA, 25 bp, Homo sapien
tacagactccttggtgacggtcgat

SEQ ID NO: 1354674 - DNA, 25 bp, Homo sapien
tgcagtatgatgacctgcaaaagca

SEQ ID NO: 1354675 - DNA, 25 bp, Homo sapien
tgcacagtcctgctataattgctaa

SEQ ID NO: 1354676 - DNA, 25 bp, Homo sapien
agtgttccaggaatggactttctgc

SEQ ID NO: 1354677 - DNA, 25 bp, Homo sapien
aactccaagtcagccgtgtcaaagt

SEQ ID NO: 1354678 - DNA, 25 bp, Homo sapien
ccacaagtgcctggaaaaaagctag

SEQ ID NO: 1354679 - DNA, 25 bp, Homo sapien
ctagagggccgatttccacaagtgc

SEQ ID NO: 1354680 - DNA, 25 bp, Homo sapien
gcctggaaaaaagctagataagaac

SEQ ID NO: 1354681 - DNA, 25 bp, Homo sapien
aaagctagataagaacccaatcttc

SEQ ID NO: 1354682 - DNA, 25 bp, Homo sapien
ctgacttaacagagctgcggagggt

SEQ ID NO: 1354683 - DNA, 25 bp, Homo sapien
tgctgacttaacagagctgcggagg

SEQ ID NO: 1354684 - DNA, 25 bp, Homo sapien
tctgctgacttaacagagctgcgga

SEQ ID NO: 1354685 - DNA, 25 bp, Homo sapien
tggctctggaggtgaaaagatcatt

SEQ ID NO: 1354686 - DNA, 25 bp, Homo sapien
aactccagaggataaatatgaccag

SEQ ID NO: 1354687 - DNA, 25 bp, Homo sapien
tttctcactgctgacaagaagggcc

SEQ ID NO: 1354688 - DNA, 25 bp, Homo sapien
tgcgtaaatggggagttcaaacttg

SEQ ID NO: 1354689 - DNA, 25 bp, Homo sapien
tatgaccagccttttccgagtggac

SEQ ID NO: 1354690 - DNA, 25 bp, Homo sapien
tggtgtgcactgtaataaccctcac

SEQ ID NO: 1354691 - DNA, 25 bp, Homo sapien
tctttggagtcctatagtaatgtca

SEQ ID NO: 1354692 - DNA, 25 bp, Homo sapien
tctggaaaatgtcagctgaaaccaa

SEQ ID NO: 1354693 - DNA, 25 bp, Homo sapien
tgtccactataaccaattgtccata

SEQ ID NO: 1354694 - DNA, 25 bp, Homo sapien
cattccttgtcacgcttcttttgca

SEQ ID NO: 1354695 - DNA, 25 bp, Homo sapien
caaacgttctatttgtggtgcaaag

SEQ ID NO: 1354696 - DNA, 25 bp, Homo sapien
ttctgtctaacttgggtaaccacac

SEQ ID NO: 1354697 - DNA, 25 bp, Homo sapien
actgtctgttgttccaaacgttcta

SEQ ID NO: 1354698 - DNA, 25 bp, Homo sapien
atgacccccttgatagacgaagatg

SEQ ID NO: 1354699 - DNA, 25 bp, Homo sapien
ggaaggccctccaggtcttcagaga

SEQ ID NO: 1354700 - DNA, 25 bp, Homo sapien
ccctccaggtcttcagagaatggga

SEQ ID NO: 1354701 - DNA, 25 bp, Homo sapien
atgaggaaggccctccaggtcttca

SEQ ID NO: 1354702 - DNA, 25 bp, Homo sapien
gatagctcagctccgatgctatcaa

SEQ ID NO: 1354703 - DNA, 25 bp, Homo sapien
actggcaggagatagctcagctccg

SEQ ID NO: 1354704 - DNA, 25 bp, Homo sapien
gctcagctccgatgctatcaaatat

SEQ ID NO: 1354705 - DNA, 25 bp, Homo sapien
caggagatagctcagctccgatgct

SEQ ID NO: 1354706 - DNA, 25 bp, Homo sapien
gattatctgtcctggcaataaagtc

SEQ ID NO: 1354707 - DNA, 25 bp, Homo sapien
cccctttttggtatgattatctgtc

SEQ ID NO: 1354708 - DNA, 25 bp, Homo sapien
tatttgcccggagatttgaatgcct

SEQ ID NO: 1354709 - DNA, 25 bp, Homo sapien
taataaattgcaagtcatatttgcc

SEQ ID NO: 1354710 - DNA, 25 bp, Homo sapien
tccttcaaaatttactgctttcttc

SEQ ID NO: 1354711 - DNA, 25 bp, Homo sapien
gtttcagcctgtgatactttggggt

SEQ ID NO: 1354712 - DNA, 25 bp, Homo sapien
tttcccattagtctcagacccacag

SEQ ID NO: 1354713 - DNA, 25 bp, Homo sapien
ccattagtctcagacccacagatat

SEQ ID NO: 1354714 - DNA, 25 bp, Homo sapien
gttgatctttaagtccttgataatc

SEQ ID NO: 1354715 - DNA, 25 bp, Homo sapien
gtccttgataatcacttcttaacat

SEQ ID NO: 1354716 - DNA, 25 bp, Homo sapien
gttctttgtgttgatctttaagtcc

SEQ ID NO: 1354717 - DNA, 25 bp, Homo sapien
ttaatgtggttctttgtgttgatct

SEQ ID NO: 1354718 - DNA, 25 bp, Homo sapien
tcacccagcctttgatttgagagag

SEQ ID NO: 1354719 - DNA, 25 bp, Homo sapien
caagaatatactggtcctggccagg

SEQ ID NO: 1354720 - DNA, 25 bp, Homo sapien
gatggcctgtcacgatccacctgta

SEQ ID NO: 1354721 - DNA, 25 bp, Homo sapien
tcccttcccaggatttgagatggcc

SEQ ID NO: 1354722 - DNA, 25 bp, Homo sapien
tcttctggctttaaccggaaggcaa

SEQ ID NO: 1354723 - DNA, 25 bp, Homo sapien
gcaaaagccactaaattgttaactg

SEQ ID NO: 1354724 - DNA, 25 bp, Homo sapien
ttcttctggctttaaccggaaggca

SEQ ID NO: 1354725 - DNA, 25 bp, Homo sapien
taggcagaatactccccttctctag

SEQ ID NO: 1354726 - DNA, 25 bp, Homo sapien
tctgccttgatagagtcctgctttg

SEQ ID NO: 1354727 - DNA, 25 bp, Homo sapien
tgtcctctgccttgatagagtcctg

SEQ ID NO: 1354728 - DNA, 25 bp, Homo sapien
gaaacacaggcatcttgttgatttt

SEQ ID NO: 1354729 - DNA, 25 bp, Homo sapien
tctttacttccatctggtgagaaac

SEQ ID NO: 1354730 - DNA, 25 bp, Homo sapien
tggctggaacggcaacttctgagtt

SEQ ID NO: 1354731 - DNA, 25 bp, Homo sapien
cttctgagttgtgccttgctgagtg

SEQ ID NO: 1354732 - DNA, 25 bp, Homo sapien
gagtctgactttcaccctgggttcc

SEQ ID NO: 1354733 - DNA, 25 bp, Homo sapien
tgtgagtctgactttcaccctgggt

SEQ ID NO: 1354734 - DNA, 25 bp, Homo sapien
tcgggaccacattgttatgcccaag

SEQ ID NO: 1354735 - DNA, 25 bp, Homo sapien
tgtatgtcttgctattaatgctctg

SEQ ID NO: 1354736 - DNA, 25 bp, Homo sapien
atgtatgtcttgctattaatgctct

SEQ ID NO: 1354737 - DNA, 25 bp, Homo sapien
tatgtcttgctattaatgctctgta

SEQ ID NO: 1354738 - DNA, 25 bp, Homo sapien
ttggtggtggaaggagcctctcact

SEQ ID NO: 1354739 - DNA, 25 bp, Homo sapien
ttggaggaagcagcgccttggtggt

SEQ ID NO: 1354740 - DNA, 25 bp, Homo sapien
aggaagcagcgccttggtggtggaa

SEQ ID NO: 1354741 - DNA, 25 bp, Homo sapien
cagcgccttggtggtggaaggagcc

SEQ ID NO: 1354742 - DNA, 25 bp, Homo sapien
tctggaaaaggatccttcatgtgga

SEQ ID NO: 1354743 - DNA, 25 bp, Homo sapien
gatccttcatgtggagcatatgaaa

SEQ ID NO: 1354744 - DNA, 25 bp, Homo sapien
gaaaaggatccttcatgtggagcat

SEQ ID NO: 1354745 - DNA, 25 bp, Homo sapien
aaggatccttcatgtggagcatatg

SEQ ID NO: 1354746 - DNA, 25 bp, Homo sapien
gaacaagtgcgcatctgtttcttct

SEQ ID NO: 1354747 - DNA, 25 bp, Homo sapien
tggaaagaacaagtgcgcatctgtt

SEQ ID NO: 1354748 - DNA, 25 bp, Homo sapien
tggtagcttacgaagttaaatggaa

SEQ ID NO: 1354749 - DNA, 25 bp, Homo sapien
agacaaattggctggtagcttacga

SEQ ID NO: 1354750 - DNA, 25 bp, Homo sapien
caagaaagagtaaattgtaggtcct

SEQ ID NO: 1354751 - DNA, 25 bp, Homo sapien
gtctgtgctgacaaatgaacacttt

SEQ ID NO: 1354752 - DNA, 25 bp, Homo sapien
ggtcctcatcagcaacggaactaat

SEQ ID NO: 1354753 - DNA, 25 bp, Homo sapien
taggtcctgattatcaacagataac

SEQ ID NO: 1354754 - DNA, 25 bp, Homo sapien
gagagaatttggagcactgtcttca

SEQ ID NO: 1354755 - DNA, 25 bp, Homo sapien
gttcttggacgcagatgatgaatag

SEQ ID NO: 1354756 - DNA, 25 bp, Homo sapien
ggagagaatttggagcactgtcttc

SEQ ID NO: 1354757 - DNA, 25 bp, Homo sapien
cttgggctgtgtgggtgttcttgga

SEQ ID NO: 1354758 - DNA, 25 bp, Homo sapien
tctctagaaaccaaggacccagaga

SEQ ID NO: 1354759 - DNA, 25 bp, Homo sapien
tctagaaaccaaggacccagagaat

SEQ ID NO: 1354760 - DNA, 25 bp, Homo sapien
tagaaaccaaggacccagagaatct

SEQ ID NO: 1354761 - DNA, 25 bp, Homo sapien
agaaaccaaggacccagagaatctg

SEQ ID NO: 1354762 - DNA, 25 bp, Homo sapien
tgctgataatgctggctaaaggaga

SEQ ID NO: 1354763 - DNA, 25 bp, Homo sapien
tgaagccatcaaacaccaagttgct

SEQ ID NO: 1354764 - DNA, 25 bp, Homo sapien
cacactcatgaaaggagtgaagcca

SEQ ID NO: 1354765 - DNA, 25 bp, Homo sapien
gataatgctggctaaaggagacaag

SEQ ID NO: 1354766 - DNA, 25 bp, Homo sapien
aatttgtgaggtgagcactcagggc

SEQ ID NO: 1354767 - DNA, 25 bp, Homo sapien
tggcagtgacccctcttgaaaccat

SEQ ID NO: 1354768 - DNA, 25 bp, Homo sapien
tgtgccactctcgattagtcctctg

SEQ ID NO: 1354769 - DNA, 25 bp, Homo sapien
tttaagccaacaatagggagataaa

SEQ ID NO: 1354770 - DNA, 25 bp, Homo sapien
tgctgctggagtaaacctgaggcct

SEQ ID NO: 1354771 - DNA, 25 bp, Homo sapien
ccttgtgctgataggatggagcctc

SEQ ID NO: 1354772 - DNA, 25 bp, Homo sapien
tataagggaaagtgacgtctccagc

SEQ ID NO: 1354773 - DNA, 25 bp, Homo sapien
gagcctctgtgagtctgatcttgag

SEQ ID NO: 1354774 - DNA, 25 bp, Homo sapien
tttcacatcacatgtgtgtctgttc

SEQ ID NO: 1354775 - DNA, 25 bp, Homo sapien
catgtgtgtctgttctgaaatcgaa

SEQ ID NO: 1354776 - DNA, 25 bp, Homo sapien
gaaatcgaacatgaccagtggtccc

SEQ ID NO: 1354777 - DNA, 25 bp, Homo sapien
tgttctgaaatcgaacatgaccagt

SEQ ID NO: 1354778 - DNA, 25 bp, Homo sapien
ttgcttcacagcctaatgaatgctt

SEQ ID NO: 1354779 - DNA, 25 bp, Homo sapien
catttgcttcacagcctaatgaatg

SEQ ID NO: 1354780 - DNA, 25 bp, Homo sapien
agcctaatgaatgctttatggctga

SEQ ID NO: 1354781 - DNA, 25 bp, Homo sapien
atttgcttcacagcctaatgaatgc

SEQ ID NO: 1354782 - DNA, 25 bp, Homo sapien
tgcacatgtggccaagtaggaaatt

SEQ ID NO: 1354783 - DNA, 25 bp, Homo sapien
gagaggcaggcacataatacccagg

SEQ ID NO: 1354784 - DNA, 25 bp, Homo sapien
gcttttgtgatctggcctgtgagac

SEQ ID NO: 1354785 - DNA, 25 bp, Homo sapien
tgtctcctgtattgaaagctggctg

SEQ ID NO: 1354786 - DNA, 25 bp, Homo sapien
gaacgagatttttgcatggtgccac

SEQ ID NO: 1354787 - DNA, 25 bp, Homo sapien
tgtacaagttgcacctctagcctga

SEQ ID NO: 1354788 - DNA, 25 bp, Homo sapien
tctagcctgatgtgctgagaaagga

SEQ ID NO: 1354789 - DNA, 25 bp, Homo sapien
tagagcaggctcacaaatccccttg

SEQ ID NO: 1354790 - DNA, 25 bp, Homo sapien
gtctatcaagccattcgttccaatg

SEQ ID NO: 1354791 - DNA, 25 bp, Homo sapien
ccattcgttccaatgatacactgca

SEQ ID NO: 1354792 - DNA, 25 bp, Homo sapien
caagccattcgttccaatgatacac

SEQ ID NO: 1354793 - DNA, 25 bp, Homo sapien
ctctgagagtctatcaagccattcg

SEQ ID NO: 1354794 - DNA, 25 bp, Homo sapien
cttctcctgtgcatccgcctaattt

SEQ ID NO: 1354795 - DNA, 25 bp, Homo sapien
ttctcctgtgcatccgcctaatttt

SEQ ID NO: 1354796 - DNA, 25 bp, Homo sapien
ctcctgtgcatccgcctaatttttc

SEQ ID NO: 1354797 - DNA, 25 bp, Homo sapien
tctcctgtgcatccgcctaattttt

SEQ ID NO: 1354798 - DNA, 25 bp, Homo sapien
agtaaatgaaatgcatcgtgggccc

SEQ ID NO: 1354799 - DNA, 25 bp, Homo sapien
tctattattggactgaaaacctcca

SEQ ID NO: 1354800 - DNA, 25 bp, Homo sapien
tcgtgggccccgaatcttgcctcta

SEQ ID NO: 1354801 - DNA, 25 bp, Homo sapien
aatcttgcctctattattggactga

SEQ ID NO: 1354802 - DNA, 25 bp, Homo sapien
cctgtactgttagtgcttgcccatg

SEQ ID NO: 1354803 - DNA, 25 bp, Homo sapien
tggtgctgtgtatccttctgaggct

SEQ ID NO: 1354804 - DNA, 25 bp, Homo sapien
gaatcctcacgctcaagagggtcga

SEQ ID NO: 1354805 - DNA, 25 bp, Homo sapien
ccactctggcgagctgactgttcag

SEQ ID NO: 1354806 - DNA, 25 bp, Homo sapien
tattttccatacaaggatggagact

SEQ ID NO: 1354807 - DNA, 25 bp, Homo sapien
attttccatacaaggatggagactc

SEQ ID NO: 1354808 - DNA, 25 bp, Homo sapien
tgaacttggatatggattcttctcc

SEQ ID NO: 1354809 - DNA, 25 bp, Homo sapien
tctgatacggccaccacgtgttggg

SEQ ID NO: 1354810 - DNA, 25 bp, Homo sapien
gctagctgacttgcaagagactttg

SEQ ID NO: 1354811 - DNA, 25 bp, Homo sapien
gctgacttgatggagtggccgttta

SEQ ID NO: 1354812 - DNA, 25 bp, Homo sapien
ggtttgttaccctgcaattctccca

SEQ ID NO: 1354813 - DNA, 25 bp, Homo sapien
gacatcctggtttgttaccctgcaa

SEQ ID NO: 1354814 - DNA, 25 bp, Homo sapien
gttaccctgcaattctcccatgcta

SEQ ID NO: 1354815 - DNA, 25 bp, Homo sapien
ccttctaacatgacatcctggtttg

SEQ ID NO: 1354816 - DNA, 25 bp, Homo sapien
atcctcctgccgagatgcatcttgg

SEQ ID NO: 1354817 - DNA, 25 bp, Homo sapien
cctgccgagatgcatcttggctgga

SEQ ID NO: 1354818 - DNA, 25 bp, Homo sapien
cctcctgccgagatgcatcttggct

SEQ ID NO: 1354819 - DNA, 25 bp, Homo sapien
gttcatcctcctgccgagatgcatc

SEQ ID NO: 1354820 - DNA, 25 bp, Homo sapien
cagcttggtccattgcaaacgaggc

SEQ ID NO: 1354821 - DNA, 25 bp, Homo sapien
tatcatcaatgaagcctggaggatt

SEQ ID NO: 1354822 - DNA, 25 bp, Homo sapien
gatttgactggtaatgggctcctgg

SEQ ID NO: 1354823 - DNA, 25 bp, Homo sapien
aatctggcgctgcaactgaatccgg

SEQ ID NO: 1354824 - DNA, 25 bp, Homo sapien
gggtaaccgtgggatgatattgtat

SEQ ID NO: 1354825 - DNA, 25 bp, Homo sapien
cagtaggtcacgatttaatgctggg

SEQ ID NO: 1354826 - DNA, 25 bp, Homo sapien
ctctggaaggtcccctgagagagcc

SEQ ID NO: 1354827 - DNA, 25 bp, Homo sapien
taaccgtgggatgatattgtatgat

SEQ ID NO: 1354828 - DNA, 25 bp, Homo sapien
taagaggcaagcttgcttgtttctg

SEQ ID NO: 1354829 - DNA, 25 bp, Homo sapien
gtttcaatggcagactctagcttcc

SEQ ID NO: 1354830 - DNA, 25 bp, Homo sapien
aaacactgaggtttcaatggcagac

SEQ ID NO: 1354831 - DNA, 25 bp, Homo sapien
tgaggtttcaatggcagactctagc

SEQ ID NO: 1354832 - DNA, 25 bp, Homo sapien
tcttatgacagctgtcaagagccat

SEQ ID NO: 1354833 - DNA, 25 bp, Homo sapien
ctgaagattgtaaatgaagggtctt

SEQ ID NO: 1354834 - DNA, 25 bp, Homo sapien
taaatgaagggtcttatgacagctg

SEQ ID NO: 1354835 - DNA, 25 bp, Homo sapien
aatgaagggtcttatgacagctgtc

SEQ ID NO: 1354836 - DNA, 25 bp, Homo sapien
cagctgctctggagaggcctgcgct

SEQ ID NO: 1354837 - DNA, 25 bp, Homo sapien
gcctctgtaggctggtgttcatgta

SEQ ID NO: 1354838 - DNA, 25 bp, Homo sapien
tcatgtatggtgcagatgggttctc

SEQ ID NO: 1354839 - DNA, 25 bp, Homo sapien
catagagcctctcacatatggcagt

SEQ ID NO: 1354840 - DNA, 25 bp, Homo sapien
cccttgcagaacaacaggagagcat

SEQ ID NO: 1354841 - DNA, 25 bp, Homo sapien
gagctgagtgtggatatgtttaccc

SEQ ID NO: 1354842 - DNA, 25 bp, Homo sapien
aaagatcccagtgcagttccgagct

SEQ ID NO: 1354843 - DNA, 25 bp, Homo sapien
caacctgtgtcgattctgctggcat

SEQ ID NO: 1354844 - DNA, 25 bp, Homo sapien
cagttgatactagaaaaccgcacac

SEQ ID NO: 1354845 - DNA, 25 bp, Homo sapien
agtctgcccactcaagcacaatgac

SEQ ID NO: 1354846 - DNA, 25 bp, Homo sapien
tataggaacctgctggaaaaccaat

SEQ ID NO: 1354847 - DNA, 25 bp, Homo sapien
taatgcagttgaaaataagcccacc

SEQ ID NO: 1354848 - DNA, 25 bp, Homo sapien
cagccaggtagcgtttcatattgca

SEQ ID NO: 1354849 - DNA, 25 bp, Homo sapien
aaccaattgcttctggatcagtagc

SEQ ID NO: 1354850 - DNA, 25 bp, Homo sapien
tcaatgtgtcgtggatctcagacta

SEQ ID NO: 1354851 - DNA, 25 bp, Homo sapien
ttgaactcttcaaatcgatgctgct

SEQ ID NO: 1354852 - DNA, 25 bp, Homo sapien
gaactcttcaaatcgatgctgctgc

SEQ ID NO: 1354853 - DNA, 25 bp, Homo sapien
gatctcagactaattagttttgaaa

SEQ ID NO: 1354854 - DNA, 25 bp, Homo sapien
tgttcatcacaggtggatcccatgt

SEQ ID NO: 1354855 - DNA, 25 bp, Homo sapien
cttgcaggtctgctaaaaggtcaga

SEQ ID NO: 1354856 - DNA, 25 bp, Homo sapien
cagaatgcgtgccttcatctcagat

SEQ ID NO: 1354857 - DNA, 25 bp, Homo sapien
aagtcacctttgtagctagcaccag

SEQ ID NO: 1354858 - DNA, 25 bp, Homo sapien
ggcactggccagagtttgtaccctg

SEQ ID NO: 1354859 - DNA, 25 bp, Homo sapien
tctaccctcattaacaattagcagg

SEQ ID NO: 1354860 - DNA, 25 bp, Homo sapien
catgaacctgggctaatgggagact

SEQ ID NO: 1354861 - DNA, 25 bp, Homo sapien
tgaaaaaagatccaccagaggacat

SEQ ID NO: 1354862 - DNA, 25 bp, Homo sapien
gattggtgaagtagccatttcctgg

SEQ ID NO: 1354863 - DNA, 25 bp, Homo sapien
cttaaccacgccattattggcaggg

SEQ ID NO: 1354864 - DNA, 25 bp, Homo sapien
ttgaagctcacttagttgtagggac

SEQ ID NO: 1354865 - DNA, 25 bp, Homo sapien
tctcaatagcaaacaaagccttggg

SEQ ID NO: 1354866 - DNA, 25 bp, Homo sapien
ttgcaggcagcagagtgtccaccac

SEQ ID NO: 1354867 - DNA, 25 bp, Homo sapien
tgcaggcagcagagtgtccaccaca

SEQ ID NO: 1354868 - DNA, 25 bp, Homo sapien
ataagattacaaatgtcactcatgt

SEQ ID NO: 1354869 - DNA, 25 bp, Homo sapien
agttgcagacctataagattacaaa

SEQ ID NO: 1354870 - DNA, 25 bp, Homo sapien
actcatgttagtataatccacatgc

SEQ ID NO: 1354871 - DNA, 25 bp, Homo sapien
tccacatgcaagtgatgaagccttc

SEQ ID NO: 1354872 - DNA, 25 bp, Homo sapien
caaagtgtagcacattcgccgatgc

SEQ ID NO: 1354873 - DNA, 25 bp, Homo sapien
ttgtagccctctgctcccatcgtga

SEQ ID NO: 1354874 - DNA, 25 bp, Homo sapien
cgccgatgctgggtacctagttaaa

SEQ ID NO: 1354875 - DNA, 25 bp, Homo sapien
ggcagtgctctgaacgcatgttaaa

SEQ ID NO: 1354876 - DNA, 25 bp, Homo sapien
ccttcactctggaacaaccccccat

SEQ ID NO: 1354877 - DNA, 25 bp, Homo sapien
tccttcactctggaacaacccccca

SEQ ID NO: 1354878 - DNA, 25 bp, Homo sapien
ccagggttgctgctagatgttctat

SEQ ID NO: 1354879 - DNA, 25 bp, Homo sapien
gggttgctgctagatgttctatgaa

SEQ ID NO: 1354880 - DNA, 25 bp, Homo sapien
tgctgctagatgttctatgaaacaa

SEQ ID NO: 1354881 - DNA, 25 bp, Homo sapien
ttgctgctagatgttctatgaaaca

SEQ ID NO: 1354882 - DNA, 25 bp, Homo sapien
catagagacttgtagaactgtgtgc

SEQ ID NO: 1354883 - DNA, 25 bp, Homo sapien
gtagaactgtgtgctttccagaagg

SEQ ID NO: 1354884 - DNA, 25 bp, Homo sapien
tccagaaggtgtgtgatcaatttca

SEQ ID NO: 1354885 - DNA, 25 bp, Homo sapien
ctgcgtacatagagacttgtagaac

SEQ ID NO: 1354886 - DNA, 25 bp, Homo sapien
ttatccccagcatacaactttgagg

SEQ ID NO: 1354887 - DNA, 25 bp, Homo sapien
gagtcacaccgctagagttgtctga

SEQ ID NO: 1354888 - DNA, 25 bp, Homo sapien
taaataattatatggcccaggcatc

SEQ ID NO: 1354889 - DNA, 25 bp, Homo sapien
tctgaacagagatgaatctgacccc

SEQ ID NO: 1354890 - DNA, 25 bp, Homo sapien
tctcttctgaacttgcttatgggct

SEQ ID NO: 1354891 - DNA, 25 bp, Homo sapien
cacatggattctacagcaatggaat

SEQ ID NO: 1354892 - DNA, 25 bp, Homo sapien
aaaactagattccagtgtagcggtc

SEQ ID NO: 1354893 - DNA, 25 bp, Homo sapien
tgtagcggtcttcaacacatggatt

SEQ ID NO: 1354894 - DNA, 25 bp, Homo sapien
ggattctaggttgacttaattctga

SEQ ID NO: 1354895 - DNA, 25 bp, Homo sapien
aggttgacttaattctgagctgctg

SEQ ID NO: 1354896 - DNA, 25 bp, Homo sapien
cagtactcctgccttatgtgaaggt

SEQ ID NO: 1354897 - DNA, 25 bp, Homo sapien
ggaattacagtctgctcttagacat

SEQ ID NO: 1354898 - DNA, 25 bp, Homo sapien
gctatctggcgtgtgactatctgga

SEQ ID NO: 1354899 - DNA, 25 bp, Homo sapien
actgtcatcaggtacttggattggg

SEQ ID NO: 1354900 - DNA, 25 bp, Homo sapien
tatttttaaaagtcgctatctggcg

SEQ ID NO: 1354901 - DNA, 25 bp, Homo sapien
gactatctggaaaaggccgtcactg

SEQ ID NO: 1354902 - DNA, 25 bp, Homo sapien
gtaatctagcgcaaggatacaagcc

SEQ ID NO: 1354903 - DNA, 25 bp, Homo sapien
gacgccaaacgctgtccatgaacac

SEQ ID NO: 1354904 - DNA, 25 bp, Homo sapien
tagctgcgctggaccttcaatcaga

SEQ ID NO: 1354905 - DNA, 25 bp, Homo sapien
tgaacacagacctcatgtaatctag

SEQ ID NO: 1354906 - DNA, 25 bp, Homo sapien
tctggtccatgagcgaagttagtca

SEQ ID NO: 1354907 - DNA, 25 bp, Homo sapien
gagccacagtgattctggtccatga

SEQ ID NO: 1354908 - DNA, 25 bp, Homo sapien
tgtggtagttacatttcagtgaagt

SEQ ID NO: 1354909 - DNA, 25 bp, Homo sapien
aagttagtcacatggaaaggatgca

SEQ ID NO: 1354910 - DNA, 25 bp, Homo sapien
gtagcactgttcttgccgccataga

SEQ ID NO: 1354911 - DNA, 25 bp, Homo sapien
gcatcccacattgaatctgggccca

SEQ ID NO: 1354912 - DNA, 25 bp, Homo sapien
tacaactgggctgtaaaactgcatc

SEQ ID NO: 1354913 - DNA, 25 bp, Homo sapien
gttcttgccgccatagataaaagtt

SEQ ID NO: 1354914 - DNA, 25 bp, Homo sapien
tagccctaatctaacagcaatgtgt

SEQ ID NO: 1354915 - DNA, 25 bp, Homo sapien
aatgtgtaaaagcaagacttttgct

SEQ ID NO: 1354916 - DNA, 25 bp, Homo sapien
ttcaaaacttccagtccaacatcac

SEQ ID NO: 1354917 - DNA, 25 bp, Homo sapien
tgttttccagctactaaatccagtt

SEQ ID NO: 1354918 - DNA, 25 bp, Homo sapien
gtgtagggaaatgattccaggttga

SEQ ID NO: 1354919 - DNA, 25 bp, Homo sapien
ctctgaaaactcattaacagtcctt

SEQ ID NO: 1354920 - DNA, 25 bp, Homo sapien
gaaaggtgtagggaaatgattccag

SEQ ID NO: 1354921 - DNA, 25 bp, Homo sapien
tcattaacagtcctttgaggaaagg

SEQ ID NO: 1354922 - DNA, 25 bp, Homo sapien
agcctcagagtcacagtcattcctt

SEQ ID NO: 1354923 - DNA, 25 bp, Homo sapien
cctttgaccctgtctactctcccag

SEQ ID NO: 1354924 - DNA, 25 bp, Homo sapien
ctcagagtcacagtcattcctttga

SEQ ID NO: 1354925 - DNA, 25 bp, Homo sapien
tgaccctgtctactctcccagtcct

SEQ ID NO: 1354926 - DNA, 25 bp, Homo sapien
ggacaggatccatatgacttatgct

SEQ ID NO: 1354927 - DNA, 25 bp, Homo sapien
gaaagcataatgctaggacaggatc

SEQ ID NO: 1354928 - DNA, 25 bp, Homo sapien
attgccaagctcaccgtactcccta

SEQ ID NO: 1354929 - DNA, 25 bp, Homo sapien
agagttcagcatgcccattgccaag

SEQ ID NO: 1354930 - DNA, 25 bp, Homo sapien
ctaggcaggtgtatcgttttgtact

SEQ ID NO: 1354931 - DNA, 25 bp, Homo sapien
tgtacttgagcagtgtgttctcttg

SEQ ID NO: 1354932 - DNA, 25 bp, Homo sapien
tacttgagcagtgtgttctcttgca

SEQ ID NO: 1354933 - DNA, 25 bp, Homo sapien
aggtgtatcgttttgtacttgagca

SEQ ID NO: 1354934 - DNA, 25 bp, Homo sapien
ggacttgtcaaaggctgttgcgcat

SEQ ID NO: 1354935 - DNA, 25 bp, Homo sapien
ctgttgcgcatagtcccattgtgga

SEQ ID NO: 1354936 - DNA, 25 bp, Homo sapien
cattgtggatttagtcaactctgca

SEQ ID NO: 1354937 - DNA, 25 bp, Homo sapien
tttcctgttcctgggactcacattg

SEQ ID NO: 1354938 - DNA, 25 bp, Homo sapien
agagctgggaagcaaagctagtgac

SEQ ID NO: 1354939 - DNA, 25 bp, Homo sapien
gggagtttccatgtgcaaatgtcca

SEQ ID NO: 1354940 - DNA, 25 bp, Homo sapien
agctagtgacatgtggggagtttcc

SEQ ID NO: 1354941 - DNA, 25 bp, Homo sapien
ttttatggctacagagctgggaagc

SEQ ID NO: 1354942 - DNA, 25 bp, Homo sapien
tagttactttctgaatgtagtttat

SEQ ID NO: 1354943 - DNA, 25 bp, Homo sapien
cttggtgagtagttactttctgaat

SEQ ID NO: 1354944 - DNA, 25 bp, Homo sapien
ttactttctgaatgtagtttattac

SEQ ID NO: 1354945 - DNA, 25 bp, Homo sapien
tggtgagtagttactttctgaatgt

SEQ ID NO: 1354946 - DNA, 25 bp, Homo sapien
catgtgcacgccaaaaatgtctgac

SEQ ID NO: 1354947 - DNA, 25 bp, Homo sapien
aggcattagacagtgtacccagccc

SEQ ID NO: 1354948 - DNA, 25 bp, Homo sapien
aaatgcaagtgcacaacacgcagtt

SEQ ID NO: 1354949 - DNA, 25 bp, Homo sapien
cctgggctcgggctatctttctgct

SEQ ID NO: 1354950 - DNA, 25 bp, Homo sapien
tgaaataatccacgctcagacagtc

SEQ ID NO: 1354951 - DNA, 25 bp, Homo sapien
gatagaagcacacaggcgtgagctc

SEQ ID NO: 1354952 - DNA, 25 bp, Homo sapien
ctaggctccctcgtgaaggtagggt

SEQ ID NO: 1354953 - DNA, 25 bp, Homo sapien
ttctgagctgccgtttggagtccca

SEQ ID NO: 1354954 - DNA, 25 bp, Homo sapien
gattacataaatcacgcactgctgc

SEQ ID NO: 1354955 - DNA, 25 bp, Homo sapien
ttcagagaacacctcgggatgagtg

SEQ ID NO: 1354956 - DNA, 25 bp, Homo sapien
ccaaagtaggagtaacagaagccca

SEQ ID NO: 1354957 - DNA, 25 bp, Homo sapien
ggtgaccgtccctacaaatgcttgc

SEQ ID NO: 1354958 - DNA, 25 bp, Homo sapien
gggtagcacaatgcgatgtttgtaa

SEQ ID NO: 1354959 - DNA, 25 bp, Homo sapien
cagagaatggggtctgcttgtttgc

SEQ ID NO: 1354960 - DNA, 25 bp, Homo sapien
ttgcaaatccagagtaccaagtggg

SEQ ID NO: 1354961 - DNA, 25 bp, Homo sapien
tgataaaccattacaatattatagc

SEQ ID NO: 1354962 - DNA, 25 bp, Homo sapien
aattgtgagcactctgcactcatgc

SEQ ID NO: 1354963 - DNA, 25 bp, Homo sapien
tcaaatgcagcaattgtgagcactc

SEQ ID NO: 1354964 - DNA, 25 bp, Homo sapien
tcaggggtataaacttaactcatca

SEQ ID NO: 1354965 - DNA, 25 bp, Homo sapien
aaacttaactcatcaaatgcagcaa

SEQ ID NO: 1354966 - DNA, 25 bp, Homo sapien
ctccatgtgttctagtggtacagag

SEQ ID NO: 1354967 - DNA, 25 bp, Homo sapien
ccatgtgttctagtggtacagagaa

SEQ ID NO: 1354968 - DNA, 25 bp, Homo sapien
ctgccatcctggttccgtcatctgg

SEQ ID NO: 1354969 - DNA, 25 bp, Homo sapien
ctggttccgtcatctggcatgttgt

SEQ ID NO: 1354970 - DNA, 25 bp, Homo sapien
tagatgaaggtgtttggcatgcttt

SEQ ID NO: 1354971 - DNA, 25 bp, Homo sapien
atgaaggtgtttggcatgctttttc

SEQ ID NO: 1354972 - DNA, 25 bp, Homo sapien
gctagatgaaggtgtttggcatgct

SEQ ID NO: 1354973 - DNA, 25 bp, Homo sapien
ggctagatgaaggtgtttggcatgc

SEQ ID NO: 1354974 - DNA, 25 bp, Homo sapien
agaggaaggcccacaagcagagtgt

SEQ ID NO: 1354975 - DNA, 25 bp, Homo sapien
gtccaaatggagtccttggagccag

SEQ ID NO: 1354976 - DNA, 25 bp, Homo sapien
tagttgaggccgtgctttgacagaa

SEQ ID NO: 1354977 - DNA, 25 bp, Homo sapien
cactttccgctgtccagttttcaga

SEQ ID NO: 1354978 - DNA, 25 bp, Homo sapien
caatgatgataacatcgttgtgttc

SEQ ID NO: 1354979 - DNA, 25 bp, Homo sapien
atgatgataacatcgttgtgttccc

SEQ ID NO: 1354980 - DNA, 25 bp, Homo sapien
aatgatgataacatcgttgtgttcc

SEQ ID NO: 1354981 - DNA, 25 bp, Homo sapien
gcaatgatgataacatcgttgtgtt

SEQ ID NO: 1354982 - DNA, 25 bp, Homo sapien
cgtgttgaaacttgctgtcctcagg

SEQ ID NO: 1354983 - DNA, 25 bp, Homo sapien
tgccccctcccttgtctggcttgtt

SEQ ID NO: 1354984 - DNA, 25 bp, Homo sapien
ctgccccctcccttgtctggcttgt

SEQ ID NO: 1354985 - DNA, 25 bp, Homo sapien
gcttccgcacagctcagcaggactt

SEQ ID NO: 1354986 - DNA, 25 bp, Homo sapien
catccttctgggcaattggcaaatc

SEQ ID NO: 1354987 - DNA, 25 bp, Homo sapien
gcaggacttgacaatgattgcactg

SEQ ID NO: 1354988 - DNA, 25 bp, Homo sapien
caatgattgcactgtgtggctttca

SEQ ID NO: 1354989 - DNA, 25 bp, Homo sapien
ttctgccatccgagtactaaccaga

SEQ ID NO: 1354990 - DNA, 25 bp, Homo sapien
gacaagattgggtgtgttcagggtg

SEQ ID NO: 1354991 - DNA, 25 bp, Homo sapien
aagatcagacaagattgggtgtgtt

SEQ ID NO: 1354992 - DNA, 25 bp, Homo sapien
gccatccgagtactaaccagacccg

SEQ ID NO: 1354993 - DNA, 25 bp, Homo sapien
atctcttctgcatccaaaagtgcat

SEQ ID NO: 1354994 - DNA, 25 bp, Homo sapien
agatctcttctgcatccaaaagtgc

SEQ ID NO: 1354995 - DNA, 25 bp, Homo sapien
gatctcttctgcatccaaaagtgca

SEQ ID NO: 1354996 - DNA, 25 bp, Homo sapien
tctcttctgcatccaaaagtgcatg

SEQ ID NO: 1354997 - DNA, 25 bp, Homo sapien
gaggattctaatttgtcttgccaac

SEQ ID NO: 1354998 - DNA, 25 bp, Homo sapien
gtcggtcatagccttcagaagagaa

SEQ ID NO: 1354999 - DNA, 25 bp, Homo sapien
ctgctgaatgatgagagtcggtcat

SEQ ID NO: 1355000 - DNA, 25 bp, Homo sapien
aagtatcatcatagaggattctaat

SEQ ID NO: 1355001 - DNA, 25 bp, Homo sapien
tgtgcctgccgacagttcactcgct

SEQ ID NO: 1355002 - DNA, 25 bp, Homo sapien
gtcctattccatatacgagggtggt

SEQ ID NO: 1355003 - DNA, 25 bp, Homo sapien
attccatatacgagggtggtcaaag

SEQ ID NO: 1355004 - DNA, 25 bp, Homo sapien
agttcactcgctccattatattcca

SEQ ID NO: 1355005 - DNA, 25 bp, Homo sapien
gaattggaactactggatttctcag

SEQ ID NO: 1355006 - DNA, 25 bp, Homo sapien
acacagaaatagagccctgatataa

SEQ ID NO: 1355007 - DNA, 25 bp, Homo sapien
tttcaaaacaacaagctatacaatt

SEQ ID NO: 1355008 - DNA, 25 bp, Homo sapien
aattctttcagtttatgctcctaac

SEQ ID NO: 1355009 - DNA, 25 bp, Homo sapien
atcaactgtcatatttaatctgctg

SEQ ID NO: 1355010 - DNA, 25 bp, Homo sapien
agctgcaggtgtcctctaattataa

SEQ ID NO: 1355011 - DNA, 25 bp, Homo sapien
taatctgctgtattcaccatatagc

SEQ ID NO: 1355012 - DNA, 25 bp, Homo sapien
caccatatagcctactgttgcagca

SEQ ID NO: 1355013 - DNA, 25 bp, Homo sapien
tgcctatattaaccagttgaagcat

SEQ ID NO: 1355014 - DNA, 25 bp, Homo sapien
ttgcgtgctgtgtttgatgcctata

SEQ ID NO: 1355015 - DNA, 25 bp, Homo sapien
tctccttcttgcgtgctgtgtttga

SEQ ID NO: 1355016 - DNA, 25 bp, Homo sapien
ccttcttgcgtgctgtgtttgatgc

SEQ ID NO: 1355017 - DNA, 25 bp, Homo sapien
gagtaggtgtcctgagttcaccaga

SEQ ID NO: 1355018 - DNA, 25 bp, Homo sapien
cagagtttcagagctttcttgagta

SEQ ID NO: 1355019 - DNA, 25 bp, Homo sapien
ttcaccagacttgctgtcatctgga

SEQ ID NO: 1355020 - DNA, 25 bp, Homo sapien
tctacttatttggttgtcaacagca

SEQ ID NO: 1355021 - DNA, 25 bp, Homo sapien
gccataacctatcccctgagaacgg

SEQ ID NO: 1355022 - DNA, 25 bp, Homo sapien
tcacatctctttacgccataaccta

SEQ ID NO: 1355023 - DNA, 25 bp, Homo sapien
tttacgccataacctatcccctgag

SEQ ID NO: 1355024 - DNA, 25 bp, Homo sapien
ataacctatcccctgagaacggtgt

SEQ ID NO: 1355025 - DNA, 25 bp, Homo sapien
aacggcttgctgataacaagatgca

SEQ ID NO: 1355026 - DNA, 25 bp, Homo sapien
ggcaagtgccattgagctatctgca

SEQ ID NO: 1355027 - DNA, 25 bp, Homo sapien
tgcatccatcttcattactcggcca

SEQ ID NO: 1355028 - DNA, 25 bp, Homo sapien
tgtttaaggttacatcaagccctag

SEQ ID NO: 1355029 - DNA, 25 bp, Homo sapien
gacgtgctgcaggataaaacacact

SEQ ID NO: 1355030 - DNA, 25 bp, Homo sapien
aagtaagagccctttgaagctgacg

SEQ ID NO: 1355031 - DNA, 25 bp, Homo sapien
cagaatgatgcgctggacacttgaa

SEQ ID NO: 1355032 - DNA, 25 bp, Homo sapien
gtgctgcaggataaaacacactctt

SEQ ID NO: 1355033 - DNA, 25 bp, Homo sapien
gtaattgcatggcttcaacgtccat

SEQ ID NO: 1355034 - DNA, 25 bp, Homo sapien
aacccataacatggtcgggatcaca

SEQ ID NO: 1355035 - DNA, 25 bp, Homo sapien
gatgtttcaatccaatgtactgcaa

SEQ ID NO: 1355036 - DNA, 25 bp, Homo sapien
gacctcactggttgtacatctgtaa

SEQ ID NO: 1355037 - DNA, 25 bp, Homo sapien
tgaacacttctgaagagagtactcc

SEQ ID NO: 1355038 - DNA, 25 bp, Homo sapien
gacaacagaagacctcaatttgaac

SEQ ID NO: 1355039 - DNA, 25 bp, Homo sapien
tgttgagaaagttattccatgacaa

SEQ ID NO: 1355040 - DNA, 25 bp, Homo sapien
ggttcagtaactgagacaaaaacca

SEQ ID NO: 1355041 - DNA, 25 bp, Homo sapien
taggtagcccaagacagtgttaaaa

SEQ ID NO: 1355042 - DNA, 25 bp, Homo sapien
taggcattccctgactggatatgag

SEQ ID NO: 1355043 - DNA, 25 bp, Homo sapien
tagcattcatcaactctaggcattc

SEQ ID NO: 1355044 - DNA, 25 bp, Homo sapien
gactggctgaatatgagaaggtccc

SEQ ID NO: 1355045 - DNA, 25 bp, Homo sapien
aataaatcttggtacattgttcagg

SEQ ID NO: 1355046 - DNA, 25 bp, Homo sapien
cagacctccctgactctacggttgt

SEQ ID NO: 1355047 - DNA, 25 bp, Homo sapien
tggataagagaaagagccatgaact

SEQ ID NO: 1355048 - DNA, 25 bp, Homo sapien
caccagttttcatagggacctcaga

SEQ ID NO: 1355049 - DNA, 25 bp, Homo sapien
gctgcacttgctaacatcctaataa

SEQ ID NO: 1355050 - DNA, 25 bp, Homo sapien
atcctgttggatctcacagcgcctg

SEQ ID NO: 1355051 - DNA, 25 bp, Homo sapien
ttggatctcacagcgcctgtggacc

SEQ ID NO: 1355052 - DNA, 25 bp, Homo sapien
ggaagtgtccatgagtgtttctcag

SEQ ID NO: 1355053 - DNA, 25 bp, Homo sapien
tccagcctttgaatgtgatatcttt

SEQ ID NO: 1355054 - DNA, 25 bp, Homo sapien
gaagcctttgccaagaaggactgca

SEQ ID NO: 1355055 - DNA, 25 bp, Homo sapien
taatggtagacctttagccggacac

SEQ ID NO: 1355056 - DNA, 25 bp, Homo sapien
aaataatgcaagtctgatttcagcc

SEQ ID NO: 1355057 - DNA, 25 bp, Homo sapien
tcccatttttggatacactaatacc

SEQ ID NO: 1355058 - DNA, 25 bp, Homo sapien
catttcatcatacgaggaaacaggc

SEQ ID NO: 1355059 - DNA, 25 bp, Homo sapien
ttcatcatacgaggaaacaggcagc

SEQ ID NO: 1355060 - DNA, 25 bp, Homo sapien
ttaggcatttcatcatacgaggaaa

SEQ ID NO: 1355061 - DNA, 25 bp, Homo sapien
gaaatacgcttcaaagagcctgctc

SEQ ID NO: 1355062 - DNA, 25 bp, Homo sapien
cccagacttctttctctatggtagc

SEQ ID NO: 1355063 - DNA, 25 bp, Homo sapien
aactggtctagctatgccccgacag

SEQ ID NO: 1355064 - DNA, 25 bp, Homo sapien
cactacgacccttaagtgttcccag

SEQ ID NO: 1355065 - DNA, 25 bp, Homo sapien
cattcaaactcatcagtctgtgtcc

SEQ ID NO: 1355066 - DNA, 25 bp, Homo sapien
aggattgggctctgaatctttgtct

SEQ ID NO: 1355067 - DNA, 25 bp, Homo sapien
tcaggtgaattactgtgaggattgg

SEQ ID NO: 1355068 - DNA, 25 bp, Homo sapien
gtgaggattgggctctgaatctttg

SEQ ID NO: 1355069 - DNA, 25 bp, Homo sapien
tctttcaggtgaattactgtgagga

SEQ ID NO: 1355070 - DNA, 25 bp, Homo sapien
ggtgaaggaagcagcgttgaggatc

SEQ ID NO: 1355071 - DNA, 25 bp, Homo sapien
tgctgaacacttgcctcgtaagagc

SEQ ID NO: 1355072 - DNA, 25 bp, Homo sapien
tgctggactcctgcttgtctggtct

SEQ ID NO: 1355073 - DNA, 25 bp, Homo sapien
tcctggtgggaacaaaagtggtgaa

SEQ ID NO: 1355074 - DNA, 25 bp, Homo sapien
aaggaaggctggtgccaaaacaact

SEQ ID NO: 1355075 - DNA, 25 bp, Homo sapien
gaagtgattaagaggtggtgaaagg

SEQ ID NO: 1355076 - DNA, 25 bp, Homo sapien
tgtgactgacccataaattttggaa

SEQ ID NO: 1355077 - DNA, 25 bp, Homo sapien
tcctgtgactgacccataaattttg

SEQ ID NO: 1355078 - DNA, 25 bp, Homo sapien
taggaccaggtatcattatcagtgc

SEQ ID NO: 1355079 - DNA, 25 bp, Homo sapien
tattttcacattgcacccacttctg

SEQ ID NO: 1355080 - DNA, 25 bp, Homo sapien
cagggtgtagtgtcctccataggac

SEQ ID NO: 1355081 - DNA, 25 bp, Homo sapien
ttgattcagggtgtagtgtcctcca

SEQ ID NO: 1355082 - DNA, 25 bp, Homo sapien
tagtattacctttgattagggcttc

SEQ ID NO: 1355083 - DNA, 25 bp, Homo sapien
gggcttctaccatcacactgacttc

SEQ ID NO: 1355084 - DNA, 25 bp, Homo sapien
gataaaaggcggaactgagggacta

SEQ ID NO: 1355085 - DNA, 25 bp, Homo sapien
tcttattgaaaccaatgtatattgg

SEQ ID NO: 1355086 - DNA, 25 bp, Homo sapien
acttctgtagaagttttcctgtaca

SEQ ID NO: 1355087 - DNA, 25 bp, Homo sapien
tgtacagactaacagggaaggaagc

SEQ ID NO: 1355088 - DNA, 25 bp, Homo sapien
tttgcagaaaggtgagatttacaac

SEQ ID NO: 1355089 - DNA, 25 bp, Homo sapien
ggaagctataacttcttgaattagc

SEQ ID NO: 1355090 - DNA, 25 bp, Homo sapien
tggttagctggcgaaaatatatgcc

SEQ ID NO: 1355091 - DNA, 25 bp, Homo sapien
tggccagaggtttcaggtcaaccac

SEQ ID NO: 1355092 - DNA, 25 bp, Homo sapien
ttcactggtgtggtatgtctgcaca

SEQ ID NO: 1355093 - DNA, 25 bp, Homo sapien
cgtgaaatctcaacgggcagcagag

SEQ ID NO: 1355094 - DNA, 25 bp, Homo sapien
tgcagaaatgcagaacgcaatgcct

SEQ ID NO: 1355095 - DNA, 25 bp, Homo sapien
gggagcattcctagggatgcagaaa

SEQ ID NO: 1355096 - DNA, 25 bp, Homo sapien
gaaacctggtgggatcgagttcata

SEQ ID NO: 1355097 - DNA, 25 bp, Homo sapien
aatgccttcgtcgacgtctctgaaa

SEQ ID NO: 1355098 - DNA, 25 bp, Homo sapien
tgcaattgtgttgaatgatggcagg

SEQ ID NO: 1355099 - DNA, 25 bp, Homo sapien
catgaagagattagcgtctgtgcaa

SEQ ID NO: 1355100 - DNA, 25 bp, Homo sapien
tagcgtctgtgcaattgtgttgaat

SEQ ID NO: 1355101 - DNA, 25 bp, Homo sapien
gtttggtatttggcaaaggtcttca

SEQ ID NO: 1355102 - DNA, 25 bp, Homo sapien
aagacctgtacagggattattggtg

SEQ ID NO: 1355103 - DNA, 25 bp, Homo sapien
tgaagacctgtacagggattattgg

SEQ ID NO: 1355104 - DNA, 25 bp, Homo sapien
gtttgaagacctgtacagggattat

SEQ ID NO: 1355105 - DNA, 25 bp, Homo sapien
ttgaagacctgtacagggattattg

SEQ ID NO: 1355106 - DNA, 25 bp, Homo sapien
gcagaagaatggtaggagaagttgt

SEQ ID NO: 1355107 - DNA, 25 bp, Homo sapien
agcatagtcgaacctgggcagaaga

SEQ ID NO: 1355108 - DNA, 25 bp, Homo sapien
ggacagtgctcatcctgtcagcata

SEQ ID NO: 1355109 - DNA, 25 bp, Homo sapien
ccttggataagtggcgaggaagtgg

SEQ ID NO: 1355110 - DNA, 25 bp, Homo sapien
aatggcagttctttatccgttctga

SEQ ID NO: 1355111 - DNA, 25 bp, Homo sapien
agacatttctggcagcggctgtagt

SEQ ID NO: 1355112 - DNA, 25 bp, Homo sapien
tgtaatggcattaggcgctgagttg

SEQ ID NO: 1355113 - DNA, 25 bp, Homo sapien
tatctgtgcagctgttgtagaacat

SEQ ID NO: 1355114 - DNA, 25 bp, Homo sapien
gaagtttctcttcttccagggaagc

SEQ ID NO: 1355115 - DNA, 25 bp, Homo sapien
ttagagaagtttctcttcttccagg

SEQ ID NO: 1355116 - DNA, 25 bp, Homo sapien
agagaagtttctcttcttccaggga

SEQ ID NO: 1355117 - DNA, 25 bp, Homo sapien
gagaagtttctcttcttccagggaa

SEQ ID NO: 1355118 - DNA, 25 bp, Homo sapien
tggattcctcagacactgggttttt

SEQ ID NO: 1355119 - DNA, 25 bp, Homo sapien
ttttggtttcagaatgatctgaatc

SEQ ID NO: 1355120 - DNA, 25 bp, Homo sapien
ccagttagctctggattcctcagac

SEQ ID NO: 1355121 - DNA, 25 bp, Homo sapien
tcctgttggcctgctttttgatcat

SEQ ID NO: 1355122 - DNA, 25 bp, Homo sapien
tatcattaagtaacacttcgctttt

SEQ ID NO: 1355123 - DNA, 25 bp, Homo sapien
aattcagtgtgcttgacggagcagt

SEQ ID NO: 1355124 - DNA, 25 bp, Homo sapien
atttatcattaagtaacacttcgct

SEQ ID NO: 1355125 - DNA, 25 bp, Homo sapien
tgtgcttgacggagcagtactccat

SEQ ID NO: 1355126 - DNA, 25 bp, Homo sapien
tagaggcacctgtcctaatggctgc

SEQ ID NO: 1355127 - DNA, 25 bp, Homo sapien
gcccaccagtgcacgttacattgat

SEQ ID NO: 1355128 - DNA, 25 bp, Homo sapien
gacaaggtggaataagtgactggct

SEQ ID NO: 1355129 - DNA, 25 bp, Homo sapien
actggctgtgatggatagaggcacc

SEQ ID NO: 1355130 - DNA, 25 bp, Homo sapien
tctcagataagttgagagcattcgg

SEQ ID NO: 1355131 - DNA, 25 bp, Homo sapien
tgggtggatcagctcacatcgctgg

SEQ ID NO: 1355132 - DNA, 25 bp, Homo sapien
agcagcaatctcgacacggtccctc

SEQ ID NO: 1355133 - DNA, 25 bp, Homo sapien
cttcacaacgtcctccctctcagat

SEQ ID NO: 1355134 - DNA, 25 bp, Homo sapien
gaaacagctactcgtatcacaacaa

SEQ ID NO: 1355135 - DNA, 25 bp, Homo sapien
tacaggaaaatccggcccacttaca

SEQ ID NO: 1355136 - DNA, 25 bp, Homo sapien
tcttagatagcgatatgaaacagtt

SEQ ID NO: 1355137 - DNA, 25 bp, Homo sapien
ctggtgtttctcatgcaaattacag

SEQ ID NO: 1355138 - DNA, 25 bp, Homo sapien
gagagctctctcaagcgttctgggc

SEQ ID NO: 1355139 - DNA, 25 bp, Homo sapien
gaatatcatccatgacaacaggcag

SEQ ID NO: 1355140 - DNA, 25 bp, Homo sapien
caagtggagatgaatcgcacaagag

SEQ ID NO: 1355141 - DNA, 25 bp, Homo sapien
aacctccgtaatcgtaagcggcaag

SEQ ID NO: 1355142 - DNA, 25 bp, Homo sapien
gttgaggttgcctacattggcaacc

SEQ ID NO: 1355143 - DNA, 25 bp, Homo sapien
tgaggttgcctacattggcaacctg

SEQ ID NO: 1355144 - DNA, 25 bp, Homo sapien
ggttgcctacattggcaacctgcat

SEQ ID NO: 1355145 - DNA, 25 bp, Homo sapien
tgttgaggttgcctacattggcaac

SEQ ID NO: 1355146 - DNA, 25 bp, Homo sapien
tggcagctgcattaagagatttgaa

SEQ ID NO: 1355147 - DNA, 25 bp, Homo sapien
gcagctgcattaagagatttgaaat

SEQ ID NO: 1355148 - DNA, 25 bp, Homo sapien
gctgcattaagagatttgaaatgca

SEQ ID NO: 1355149 - DNA, 25 bp, Homo sapien
tatggcagctgcattaagagatttg

SEQ ID NO: 1355150 - DNA, 25 bp, Homo sapien
ggagatgggaagctctctttagcat

SEQ ID NO: 1355151 - DNA, 25 bp, Homo sapien
ggggagatgggaagctctctttagc

SEQ ID NO: 1355152 - DNA, 25 bp, Homo sapien
cagaggggagatgggaagctctctt

SEQ ID NO: 1355153 - DNA, 25 bp, Homo sapien
gaggggagatgggaagctctcttta

SEQ ID NO: 1355154 - DNA, 25 bp, Homo sapien
cactttctctgcgtatggatccatg

SEQ ID NO: 1355155 - DNA, 25 bp, Homo sapien
ttttctaccagatagagcactttct

SEQ ID NO: 1355156 - DNA, 25 bp, Homo sapien
tgcgtatggatccatgtcatcattc

SEQ ID NO: 1355157 - DNA, 25 bp, Homo sapien
ccacagagagaatctttccacgttt

SEQ ID NO: 1355158 - DNA, 25 bp, Homo sapien
gctgccgactgcgaggtgtgggttt

SEQ ID NO: 1355159 - DNA, 25 bp, Homo sapien
agggcggctgccgactgcgaggtgt

SEQ ID NO: 1355160 - DNA, 25 bp, Homo sapien
ggcagggcggctgccgactgcgagg

SEQ ID NO: 1355161 - DNA, 25 bp, Homo sapien
ctgccgactgcgaggtgtgggtttt

SEQ ID NO: 1355162 - DNA, 25 bp, Homo sapien
catcttgccggtgcttggcaactgt

SEQ ID NO: 1355163 - DNA, 25 bp, Homo sapien
gcttggcaactgtgctcgggtgaaa

SEQ ID NO: 1355164 - DNA, 25 bp, Homo sapien
tgtgctcgggtgaaaaatgatatgc

SEQ ID NO: 1355165 - DNA, 25 bp, Homo sapien
cagggcatcttgccggtgcttggca

SEQ ID NO: 1355166 - DNA, 25 bp, Homo sapien
ggaaaggagaaatagagtcaacatt

SEQ ID NO: 1355167 - DNA, 25 bp, Homo sapien
tgatggataagcatgcctgcaaacc

SEQ ID NO: 1355168 - DNA, 25 bp, Homo sapien
cagggataactaccatctttgtatc

SEQ ID NO: 1355169 - DNA, 25 bp, Homo sapien
tatcgttagcttgcaggaaaggaga

SEQ ID NO: 1355170 - DNA, 25 bp, Homo sapien
catgccagggatatgattaatctgg

SEQ ID NO: 1355171 - DNA, 25 bp, Homo sapien
gagcatgccagggatatgattaatc

SEQ ID NO: 1355172 - DNA, 25 bp, Homo sapien
cagggatatgattaatctggaaaac

SEQ ID NO: 1355173 - DNA, 25 bp, Homo sapien
gccagggatatgattaatctggaaa

SEQ ID NO: 1355174 - DNA, 25 bp, Homo sapien
agcagtgagtaaacatctggttctc

SEQ ID NO: 1355175 - DNA, 25 bp, Homo sapien
cagtgagtaaacatctggttctccc

SEQ ID NO: 1355176 - DNA, 25 bp, Homo sapien
agtgagtaaacatctggttctccca

SEQ ID NO: 1355177 - DNA, 25 bp, Homo sapien
gcagtgagtaaacatctggttctcc

SEQ ID NO: 1355178 - DNA, 25 bp, Homo sapien
gttttgtcaggccagagcctgaagg

SEQ ID NO: 1355179 - DNA, 25 bp, Homo sapien
ggttttgtcaggccagagcctgaag

SEQ ID NO: 1355180 - DNA, 25 bp, Homo sapien
gccagagcctgaaggaatgccacat

SEQ ID NO: 1355181 - DNA, 25 bp, Homo sapien
caggccagagcctgaaggaatgcca

SEQ ID NO: 1355182 - DNA, 25 bp, Homo sapien
tgaatgcaggacagagaccagcagt

SEQ ID NO: 1355183 - DNA, 25 bp, Homo sapien
gaaagatatcacctgttcagcccta

SEQ ID NO: 1355184 - DNA, 25 bp, Homo sapien
cctaagatactaatgaccgaatgac

SEQ ID NO: 1355185 - DNA, 25 bp, Homo sapien
gatgctgagccgatttctctctagg

SEQ ID NO: 1355186 - DNA, 25 bp, Homo sapien
tacttagacttatgcttgtgccagc

SEQ ID NO: 1355187 - DNA, 25 bp, Homo sapien
agggcttcagacacatacttcctgt

SEQ ID NO: 1355188 - DNA, 25 bp, Homo sapien
tgccagcaactattcctactattag

SEQ ID NO: 1355189 - DNA, 25 bp, Homo sapien
caaagatttagtcaaatgctaggcc

SEQ ID NO: 1355190 - DNA, 25 bp, Homo sapien
gagtgcatatgtcttacagagccca

SEQ ID NO: 1355191 - DNA, 25 bp, Homo sapien
gattcctccgatgctcaaggtatgg

SEQ ID NO: 1355192 - DNA, 25 bp, Homo sapien
caaagaacttgctagccgctgacca

SEQ ID NO: 1355193 - DNA, 25 bp, Homo sapien
tgtggatgccatacagttcagcagt

SEQ ID NO: 1355194 - DNA, 25 bp, Homo sapien
tctcgcagtgctccacagtttgact

SEQ ID NO: 1355195 - DNA, 25 bp, Homo sapien
ttatatacatgaacagagccaagac

SEQ ID NO: 1355196 - DNA, 25 bp, Homo sapien
gacactttgacattcgctttgggtg

SEQ ID NO: 1355197 - DNA, 25 bp, Homo sapien
tgtccccgacacatacacagtggta

SEQ ID NO: 1355198 - DNA, 25 bp, Homo sapien
ccttgtagtctcgtaagtatgggag

SEQ ID NO: 1355199 - DNA, 25 bp, Homo sapien
tgaacagtgaactcttggtgagcaa

SEQ ID NO: 1355200 - DNA, 25 bp, Homo sapien
tcttggtgagcaatcaggccttgta

SEQ ID NO: 1355201 - DNA, 25 bp, Homo sapien
ttgtggccccaggtgaacagtgaac

SEQ ID NO: 1355202 - DNA, 25 bp, Homo sapien
tgaagaataaccagtatgagataca

SEQ ID NO: 1355203 - DNA, 25 bp, Homo sapien
gaaatccatcacgtgggtcctcagg

SEQ ID NO: 1355204 - DNA, 25 bp, Homo sapien
tctgtgtcagtcagagtttaaccac

SEQ ID NO: 1355205 - DNA, 25 bp, Homo sapien
caggaaaggtagactgaagctgtcc

SEQ ID NO: 1355206 - DNA, 25 bp, Homo sapien
taatgtgtcaagttaatacaacaaa

SEQ ID NO: 1355207 - DNA, 25 bp, Homo sapien
tcctaaaccatatttaatctccaag

SEQ ID NO: 1355208 - DNA, 25 bp, Homo sapien
aaaatcgtactgtctatcccttgaa

SEQ ID NO: 1355209 - DNA, 25 bp, Homo sapien
tctttcatataactgaaaacacagt

SEQ ID NO: 1355210 - DNA, 25 bp, Homo sapien
aagtgcactgaaacctatgtaagca

SEQ ID NO: 1355211 - DNA, 25 bp, Homo sapien
gaataattactaacaaagtgcactg

SEQ ID NO: 1355212 - DNA, 25 bp, Homo sapien
tatcaccattaagcagatgagacga

SEQ ID NO: 1355213 - DNA, 25 bp, Homo sapien
taaaagagatcacttaaccaatgtc

SEQ ID NO: 1355214 - DNA, 25 bp, Homo sapien
caggcacagccttggaagcggtgac

SEQ ID NO: 1355215 - DNA, 25 bp, Homo sapien
gcacagccttggaagcggtgaccgt

SEQ ID NO: 1355216 - DNA, 25 bp, Homo sapien
acagccttggaagcggtgaccgtgg

SEQ ID NO: 1355217 - DNA, 25 bp, Homo sapien
aggcacagccttggaagcggtgacc

SEQ ID NO: 1355218 - DNA, 25 bp, Homo sapien
gttttgaagcctcctttgagcaatg

SEQ ID NO: 1355219 - DNA, 25 bp, Homo sapien
ttccctttgccacagcagggtaaag

SEQ ID NO: 1355220 - DNA, 25 bp, Homo sapien
cagggtaaagttgataaactgctaa

SEQ ID NO: 1355221 - DNA, 25 bp, Homo sapien
gcctcctttgagcaatgttattgtc

SEQ ID NO: 1355222 - DNA, 25 bp, Homo sapien
tccacataatctctggcttcaacca

SEQ ID NO: 1355223 - DNA, 25 bp, Homo sapien
cttccacataatctctggcttcaac

SEQ ID NO: 1355224 - DNA, 25 bp, Homo sapien
ccacataatctctggcttcaaccat

SEQ ID NO: 1355225 - DNA, 25 bp, Homo sapien
ttccacataatctctggcttcaacc

SEQ ID NO: 1355226 - DNA, 25 bp, Homo sapien
tcttattctcctgtcccaagcattg

SEQ ID NO: 1355227 - DNA, 25 bp, Homo sapien
ccttcttattctcctgtcccaagca

SEQ ID NO: 1355228 - DNA, 25 bp, Homo sapien
ttattctcctgtcccaagcattgca

SEQ ID NO: 1355229 - DNA, 25 bp, Homo sapien
ttcttattctcctgtcccaagcatt

SEQ ID NO: 1355230 - DNA, 25 bp, Homo sapien
tctactttgctgtggaactgaaagc

SEQ ID NO: 1355231 - DNA, 25 bp, Homo sapien
ccctgtccgggtgctgacttataaa

SEQ ID NO: 1355232 - DNA, 25 bp, Homo sapien
caacactgattgtggtatgcaggat

SEQ ID NO: 1355233 - DNA, 25 bp, Homo sapien
taaacatatgttagtccctgtcccc

SEQ ID NO: 1355234 - DNA, 25 bp, Homo sapien
aaagaattgttagagaagtgaggcc

SEQ ID NO: 1355235 - DNA, 25 bp, Homo sapien
gaagatatgccctgtgtaacctctg

SEQ ID NO: 1355236 - DNA, 25 bp, Homo sapien
cataggccgtagtagaacatagagg

SEQ ID NO: 1355237 - DNA, 25 bp, Homo sapien
tcagcagactctcctacactctggg

SEQ ID NO: 1355238 - DNA, 25 bp, Homo sapien
ccttatcatgcagctggctctcaaa

SEQ ID NO: 1355239 - DNA, 25 bp, Homo sapien
cgatgaaatatatcattacaggaag

SEQ ID NO: 1355240 - DNA, 25 bp, Homo sapien
aggaagatgtaagtgcagagatgcc

SEQ ID NO: 1355241 - DNA, 25 bp, Homo sapien
ccttctttctccaaacgatgaaata

SEQ ID NO: 1355242 - DNA, 25 bp, Homo sapien
tcaatatcacaagctaagatggcag

SEQ ID NO: 1355243 - DNA, 25 bp, Homo sapien
ctgaatataccccacttggttattt

SEQ ID NO: 1355244 - DNA, 25 bp, Homo sapien
catttcaatatcacaagctaagatg

SEQ ID NO: 1355245 - DNA, 25 bp, Homo sapien
tcacaagctaagatggcagatttag

SEQ ID NO: 1355246 - DNA, 25 bp, Homo sapien
tgagttctccacaactgcatctatg

SEQ ID NO: 1355247 - DNA, 25 bp, Homo sapien
ccacaactgcatctatgtgttccat

SEQ ID NO: 1355248 - DNA, 25 bp, Homo sapien
gttctccacaactgcatctatgtgt

SEQ ID NO: 1355249 - DNA, 25 bp, Homo sapien
tccacaactgcatctatgtgttcca

SEQ ID NO: 1355250 - DNA, 25 bp, Homo sapien
tatgtcccttgtcaggtcaactgtc

SEQ ID NO: 1355251 - DNA, 25 bp, Homo sapien
gagtaaggacattggaatcaggcct

SEQ ID NO: 1355252 - DNA, 25 bp, Homo sapien
tgagagctgcaagaaagaatgccct

SEQ ID NO: 1355253 - DNA, 25 bp, Homo sapien
gctcccatttgactggaaagccttg

SEQ ID NO: 1355254 - DNA, 25 bp, Homo sapien
ctccagggagcaaatcacataaggc

SEQ ID NO: 1355255 - DNA, 25 bp, Homo sapien
tgtgtcaggtgtaatgtctacgatc

SEQ ID NO: 1355256 - DNA, 25 bp, Homo sapien
cgtcattgctttgctaatcgagtcc

SEQ ID NO: 1355257 - DNA, 25 bp, Homo sapien
aatcgagtccttgtatctttctaaa

SEQ ID NO: 1355258 - DNA, 25 bp, Homo sapien
caggtgtaatgtctacgatcataaa

SEQ ID NO: 1355259 - DNA, 25 bp, Homo sapien
caacatcagtgttccatagatcttc

SEQ ID NO: 1355260 - DNA, 25 bp, Homo sapien
caaagagctgcaagtatggcttaga

SEQ ID NO: 1355261 - DNA, 25 bp, Homo sapien
tgatgtccagaaatcttagtaatgc

SEQ ID NO: 1355262 - DNA, 25 bp, Homo sapien
caagtatggcttagaggctttgtga

SEQ ID NO: 1355263 - DNA, 25 bp, Homo sapien
ccttgctcgctggatgtttaagaaa

SEQ ID NO: 1355264 - DNA, 25 bp, Homo sapien
gaccttgcattttcagggttcagaa

SEQ ID NO: 1355265 - DNA, 25 bp, Homo sapien
aacatgtaggcttgttgtcttcaga

SEQ ID NO: 1355266 - DNA, 25 bp, Homo sapien
tgggaatttgccagatcactgggat

SEQ ID NO: 1355267 - DNA, 25 bp, Homo sapien
tacttacgaagttgaatggctagac

SEQ ID NO: 1355268 - DNA, 25 bp, Homo sapien
gactgacgtgacatgttggaaagga

SEQ ID NO: 1355269 - DNA, 25 bp, Homo sapien
gaagaaagcatacacagtactgcca

SEQ ID NO: 1355270 - DNA, 25 bp, Homo sapien
tggaaacccaaggacctcagagatt

SEQ ID NO: 1355271 - DNA, 25 bp, Homo sapien
agggcacctgattattagtccaccg

SEQ ID NO: 1355272 - DNA, 25 bp, Homo sapien
gggcacctgattattagtccaccga

SEQ ID NO: 1355273 - DNA, 25 bp, Homo sapien
ggcacctgattattagtccaccgaa

SEQ ID NO: 1355274 - DNA, 25 bp, Homo sapien
gcacctgattattagtccaccgaat

SEQ ID NO: 1355275 - DNA, 25 bp, Homo sapien
aaatcaggttcatagcgccataaga

SEQ ID NO: 1355276 - DNA, 25 bp, Homo sapien
gaagaacttgcaattccattaatcc

SEQ ID NO: 1355277 - DNA, 25 bp, Homo sapien
ccttcttcatgcctcatttgggctg

SEQ ID NO: 1355278 - DNA, 25 bp, Homo sapien
catgtggtagttctgacccagcctc

SEQ ID NO: 1355279 - DNA, 25 bp, Homo sapien
atgggccgactgcactgcctgtgtt

SEQ ID NO: 1355280 - DNA, 25 bp, Homo sapien
tgggccgactgcactgcctgtgttt

SEQ ID NO: 1355281 - DNA, 25 bp, Homo sapien
gggccgactgcactgcctgtgtttc

SEQ ID NO: 1355282 - DNA, 25 bp, Homo sapien
caatagattcttctggtttaagtaa

SEQ ID NO: 1355283 - DNA, 25 bp, Homo sapien
catgtaatcctctctgtagcactgt

SEQ ID NO: 1355284 - DNA, 25 bp, Homo sapien
gtttcccaaggcaatgagagtaaaa

SEQ ID NO: 1355285 - DNA, 25 bp, Homo sapien
gtagcactgtgaagtaaagagggca

SEQ ID NO: 1355286 - DNA, 25 bp, Homo sapien
aactgtaatacaaaactgccagaga

SEQ ID NO: 1355287 - DNA, 25 bp, Homo sapien
cagagaaatacctaaacgcaaatga

SEQ ID NO: 1355288 - DNA, 25 bp, Homo sapien
tcaaaataccatagccaacatgagc

SEQ ID NO: 1355289 - DNA, 25 bp, Homo sapien
ttctatggaagtttttcttgctgcc

SEQ ID NO: 1355290 - DNA, 25 bp, Homo sapien
cactggaaacttccgcaggagagga

SEQ ID NO: 1355291 - DNA, 25 bp, Homo sapien
ggagccatacttgtttgtacaaata

SEQ ID NO: 1355292 - DNA, 25 bp, Homo sapien
tagcattctgggtttgccctgtgtc

SEQ ID NO: 1355293 - DNA, 25 bp, Homo sapien
aatggatggcaaagacattggcatc

SEQ ID NO: 1355294 - DNA, 25 bp, Homo sapien
ggaagataagaacctaatcgcatct

SEQ ID NO: 1355295 - DNA, 25 bp, Homo sapien
tccagcaactgcacccatagatgtg

SEQ ID NO: 1355296 - DNA, 25 bp, Homo sapien
cagaaagacacattacgaaaggaag

SEQ ID NO: 1355297 - DNA, 25 bp, Homo sapien
cacggttggcacaaatggagctgtg

SEQ ID NO: 1355298 - DNA, 25 bp, Homo sapien
caactaaggtttattatacgtaatg

SEQ ID NO: 1355299 - DNA, 25 bp, Homo sapien
gctgtcacaacgaaactcttgggtt

SEQ ID NO: 1355300 - DNA, 25 bp, Homo sapien
aaaggatgagaacttcggcatgctg

SEQ ID NO: 1355301 - DNA, 25 bp, Homo sapien
ctgagtaaggtgaagaagggcttgt

SEQ ID NO: 1355302 - DNA, 25 bp, Homo sapien
gattggccccaaagatactgcctga

SEQ ID NO: 1355303 - DNA, 25 bp, Homo sapien
tgaatttcccagcattcgtacaagg

SEQ ID NO: 1355304 - DNA, 25 bp, Homo sapien
caaggcccgctattggtaacccaag

SEQ ID NO: 1355305 - DNA, 25 bp, Homo sapien
gaacttgaagaactgccttctggaa

SEQ ID NO: 1355306 - DNA, 25 bp, Homo sapien
tacactcaacattgccttcagcttc

SEQ ID NO: 1355307 - DNA, 25 bp, Homo sapien
tcaacattgccttcagcttctttgg

SEQ ID NO: 1355308 - DNA, 25 bp, Homo sapien
tagaaaggagtacttagaagattct

SEQ ID NO: 1355309 - DNA, 25 bp, Homo sapien
tgtacactcaacattgccttcagct

SEQ ID NO: 1355310 - DNA, 25 bp, Homo sapien
cgagtatcagggtaagattggaaag

SEQ ID NO: 1355311 - DNA, 25 bp, Homo sapien
tacacgagtatcagggtaagattgg

SEQ ID NO: 1355312 - DNA, 25 bp, Homo sapien
tcatttgcatacacgagtatcaggg

SEQ ID NO: 1355313 - DNA, 25 bp, Homo sapien
ttgcatacacgagtatcagggtaag

SEQ ID NO: 1355314 - DNA, 25 bp, Homo sapien
tcaatacaacggaatgtgttcccaa

SEQ ID NO: 1355315 - DNA, 25 bp, Homo sapien
aaaggtatcttgctcttctacagct

SEQ ID NO: 1355316 - DNA, 25 bp, Homo sapien
caattcccatattgggtggtccctc

SEQ ID NO: 1355317 - DNA, 25 bp, Homo sapien
ggaaacaggaatacaaggtcaatac

SEQ ID NO: 1355318 - DNA, 25 bp, Homo sapien
cagttgtctctgcatctttgggccc

SEQ ID NO: 1355319 - DNA, 25 bp, Homo sapien
gatttcgctgctatctgcatgccta

SEQ ID NO: 1355320 - DNA, 25 bp, Homo sapien
tttgggccccatgagagcttgctga

SEQ ID NO: 1355321 - DNA, 25 bp, Homo sapien
gcatgcctagatgggctatttaccc

SEQ ID NO: 1355322 - DNA, 25 bp, Homo sapien
aactaatgattgcagaccactttgg

SEQ ID NO: 1355323 - DNA, 25 bp, Homo sapien
gaaaatgagaactcccaactctgag

SEQ ID NO: 1355324 - DNA, 25 bp, Homo sapien
tcttgtgggtacaggcttggctccc

SEQ ID NO: 1355325 - DNA, 25 bp, Homo sapien
ggctcccactgtagactaaccaggt

SEQ ID NO: 1355326 - DNA, 25 bp, Homo sapien
atatttctgccaatttctatctctt

SEQ ID NO: 1355327 - DNA, 25 bp, Homo sapien
ctagaggttttcacggtattttcat

SEQ ID NO: 1355328 - DNA, 25 bp, Homo sapien
atttctgccaatttctatctcttgt

SEQ ID NO: 1355329 - DNA, 25 bp, Homo sapien
tgccaatttctatctcttgtgcttt

SEQ ID NO: 1355330 - DNA, 25 bp, Homo sapien
aagtgctgcatttatcgtcggttgt

SEQ ID NO: 1355331 - DNA, 25 bp, Homo sapien
taaaaagtgctgcatttatcgtcgg

SEQ ID NO: 1355332 - DNA, 25 bp, Homo sapien
aaaagtgctgcatttatcgtcggtt

SEQ ID NO: 1355333 - DNA, 25 bp, Homo sapien
taacagagaaaggacaagctttaaa

SEQ ID NO: 1355334 - DNA, 25 bp, Homo sapien
gcctgccaagtccagtgaccagtac

SEQ ID NO: 1355335 - DNA, 25 bp, Homo sapien
aagtccagtgaccagtaccgccgct

SEQ ID NO: 1355336 - DNA, 25 bp, Homo sapien
cagtaccgccgctcctgatggtggg

SEQ ID NO: 1355337 - DNA, 25 bp, Homo sapien
aaagagaaaactcctactgtggtct

SEQ ID NO: 1355338 - DNA, 25 bp, Homo sapien
gcccagagatcccctagctggtacg

SEQ ID NO: 1355339 - DNA, 25 bp, Homo sapien
agagatcccctagctggtacggcat

SEQ ID NO: 1355340 - DNA, 25 bp, Homo sapien
ttgcccagagatcccctagctggta

SEQ ID NO: 1355341 - DNA, 25 bp, Homo sapien
ccagagatcccctagctggtacggc

SEQ ID NO: 1355342 - DNA, 25 bp, Homo sapien
aactgcagcattcacttcgtatccc

SEQ ID NO: 1355343 - DNA, 25 bp, Homo sapien
ctgcagcattcacttcgtatcccat

SEQ ID NO: 1355344 - DNA, 25 bp, Homo sapien
gataaatatgatgcttgtggtaact

SEQ ID NO: 1355345 - DNA, 25 bp, Homo sapien
taaatatgatgcttgtggtaactgc

SEQ ID NO: 1355346 - DNA, 25 bp, Homo sapien
caaagtgggctatctgaggatcagc

SEQ ID NO: 1355347 - DNA, 25 bp, Homo sapien
ctctgagaagcctgagatagtgcat

SEQ ID NO: 1355348 - DNA, 25 bp, Homo sapien
tcctgggagaagctgtccaacattg

SEQ ID NO: 1355349 - DNA, 25 bp, Homo sapien
gcacatttggagtctgtctgaccca

SEQ ID NO: 1355350 - DNA, 25 bp, Homo sapien
tcccagtgagtataagaggaggaga

SEQ ID NO: 1355351 - DNA, 25 bp, Homo sapien
tatgttcagtgaaggaaagtcgagt

SEQ ID NO: 1355352 - DNA, 25 bp, Homo sapien
ttcagtgaaggaaagtcgagtgtat

SEQ ID NO: 1355353 - DNA, 25 bp, Homo sapien
gaggaggagagccaaagtttttcag

SEQ ID NO: 1355354 - DNA, 25 bp, Homo sapien
caggtgcctgaaactcgactgtacc

SEQ ID NO: 1355355 - DNA, 25 bp, Homo sapien
gaaactcgactgtacctctgagaga

SEQ ID NO: 1355356 - DNA, 25 bp, Homo sapien
actcgactgtacctctgagagagaa

SEQ ID NO: 1355357 - DNA, 25 bp, Homo sapien
gcctgaaactcgactgtacctctga

SEQ ID NO: 1355358 - DNA, 25 bp, Homo sapien
aaccatcaacgtccatgtttagttc

SEQ ID NO: 1355359 - DNA, 25 bp, Homo sapien
attcccttgtggtatgagaattagt

SEQ ID NO: 1355360 - DNA, 25 bp, Homo sapien
catcaacgtccatgtttagttcttc

SEQ ID NO: 1355361 - DNA, 25 bp, Homo sapien
atgagaattagtgggccttgggttt

SEQ ID NO: 1355362 - DNA, 25 bp, Homo sapien
ccacaggccataacaagggacaaca

SEQ ID NO: 1355363 - DNA, 25 bp, Homo sapien
aacagtcagcagcaattcaatttcg

SEQ ID NO: 1355364 - DNA, 25 bp, Homo sapien
tcaattgtcatatctccacaggcca

SEQ ID NO: 1355365 - DNA, 25 bp, Homo sapien
gcagcaattcaatttcgacctccat

SEQ ID NO: 1355366 - DNA, 25 bp, Homo sapien
agtattttcatctttgtattctcta

SEQ ID NO: 1355367 - DNA, 25 bp, Homo sapien
ttttcatctttgtattctctagcac

SEQ ID NO: 1355368 - DNA, 25 bp, Homo sapien
tattttcatctttgtattctctagc

SEQ ID NO: 1355369 - DNA, 25 bp, Homo sapien
attttcatctttgtattctctagca

SEQ ID NO: 1355370 - DNA, 25 bp, Homo sapien
cagtggagaagaacatatggagccc

SEQ ID NO: 1355371 - DNA, 25 bp, Homo sapien
cactgggtgaatggctggaatctaa

SEQ ID NO: 1355372 - DNA, 25 bp, Homo sapien
caaggacttgaccacctggtaggga

SEQ ID NO: 1355373 - DNA, 25 bp, Homo sapien
taattaaagctagcgactggaccag

SEQ ID NO: 1355374 - DNA, 25 bp, Homo sapien
aatgtcactgatacatattccccta

SEQ ID NO: 1355375 - DNA, 25 bp, Homo sapien
atgccacctgattcgctctgccatg

SEQ ID NO: 1355376 - DNA, 25 bp, Homo sapien
tggagacacagtccaaggtaaatgt

SEQ ID NO: 1355377 - DNA, 25 bp, Homo sapien
gatgacccatgccacctgattcgct

SEQ ID NO: 1355378 - DNA, 25 bp, Homo sapien
ttatccaggaggaactcattttgca

SEQ ID NO: 1355379 - DNA, 25 bp, Homo sapien
tataaagtgtaattctccaggattt

SEQ ID NO: 1355380 - DNA, 25 bp, Homo sapien
atgttgatataaagtgtaattctcc

SEQ ID NO: 1355381 - DNA, 25 bp, Homo sapien
aaaattatccaggaggaactcattt

SEQ ID NO: 1355382 - DNA, 25 bp, Homo sapien
tatctttgatataattgccagggtg

SEQ ID NO: 1355383 - DNA, 25 bp, Homo sapien
tgtccaataatatacttcctggcct

SEQ ID NO: 1355384 - DNA, 25 bp, Homo sapien
atctttgatataattgccagggtga

SEQ ID NO: 1355385 - DNA, 25 bp, Homo sapien
cttgtgtccaataatatacttcctg

SEQ ID NO: 1355386 - DNA, 25 bp, Homo sapien
actatgccttgagagtcatactggc

SEQ ID NO: 1355387 - DNA, 25 bp, Homo sapien
tcatcatattctactatgccttgag

SEQ ID NO: 1355388 - DNA, 25 bp, Homo sapien
taccagttcatcatattctactatg

SEQ ID NO: 1355389 - DNA, 25 bp, Homo sapien
catattctactatgccttgagagtc

SEQ ID NO: 1355390 - DNA, 25 bp, Homo sapien
ggaagattagtaccaatttggagac

SEQ ID NO: 1355391 - DNA, 25 bp, Homo sapien
tcttaaatctacatggaagattagt

SEQ ID NO: 1355392 - DNA, 25 bp, Homo sapien
tctacatggaagattagtaccaatt

SEQ ID NO: 1355393 - DNA, 25 bp, Homo sapien
taccaatttggagacagatgaaaga

SEQ ID NO: 1355394 - DNA, 25 bp, Homo sapien
tctgtgaagatgtgacagcacaccc

SEQ ID NO: 1355395 - DNA, 25 bp, Homo sapien
aaatctcgaggatactctgggctag

SEQ ID NO: 1355396 - DNA, 25 bp, Homo sapien
tctcatgactcaaagataagacact

SEQ ID NO: 1355397 - DNA, 25 bp, Homo sapien
gcaagctaagtaataaaatctcgag

SEQ ID NO: 1355398 - DNA, 25 bp, Homo sapien
gagccaccttaagcagaaacaactg

SEQ ID NO: 1355399 - DNA, 25 bp, Homo sapien
tgaaaaccatatatcctagtcttgg

SEQ ID NO: 1355400 - DNA, 25 bp, Homo sapien
ttaggtacccttctcatgcttttgg

SEQ ID NO: 1355401 - DNA, 25 bp, Homo sapien
cctgataatgtgttctggatatggc

SEQ ID NO: 1355402 - DNA, 25 bp, Homo sapien
tttccgccttataaacagataggac

SEQ ID NO: 1355403 - DNA, 25 bp, Homo sapien
gatgactggtcatgcttcccttaaa

SEQ ID NO: 1355404 - DNA, 25 bp, Homo sapien
tgtgcttacacctgctgccctatgt

SEQ ID NO: 1355405 - DNA, 25 bp, Homo sapien
gttaggaccctctctcttaagaata

SEQ ID NO: 1355406 - DNA, 25 bp, Homo sapien
tacgcatgctgattagaatgtggca

SEQ ID NO: 1355407 - DNA, 25 bp, Homo sapien
tttaatgcattcatgctcatgcagg

SEQ ID NO: 1355408 - DNA, 25 bp, Homo sapien
caggctattcgatggtcagcttgac

SEQ ID NO: 1355409 - DNA, 25 bp, Homo sapien
gcaaaattaatgaaagcaggtacgc

SEQ ID NO: 1355410 - DNA, 25 bp, Homo sapien
gaaggatataagcactgccatccca

SEQ ID NO: 1355411 - DNA, 25 bp, Homo sapien
aataggcttttccacaacactgtca

SEQ ID NO: 1355412 - DNA, 25 bp, Homo sapien
cacaacactgtcatggtgtccatga

SEQ ID NO: 1355413 - DNA, 25 bp, Homo sapien
ctgccatcccactttttgcagtcat

SEQ ID NO: 1355414 - DNA, 25 bp, Homo sapien
acaagtgcctaaggactgagcagca

SEQ ID NO: 1355415 - DNA, 25 bp, Homo sapien
tacagccaaacaagtgcctaaggac

SEQ ID NO: 1355416 - DNA, 25 bp, Homo sapien
tcttccattggcctgtacagccaaa

SEQ ID NO: 1355417 - DNA, 25 bp, Homo sapien
gatccttgtcagtctggtctttctt

SEQ ID NO: 1355418 - DNA, 25 bp, Homo sapien
tttcatgacatacatcacctaccaa

SEQ ID NO: 1355419 - DNA, 25 bp, Homo sapien
gacatacatcacctaccaaagagaa

SEQ ID NO: 1355420 - DNA, 25 bp, Homo sapien
cctttgctttttgagttacttcata

SEQ ID NO: 1355421 - DNA, 25 bp, Homo sapien
ttttgagttacttcatagccaaata

SEQ ID NO: 1355422 - DNA, 25 bp, Homo sapien
cctctgactgggctaacagagccat

SEQ ID NO: 1355423 - DNA, 25 bp, Homo sapien
cagatgggcaccttgcagagaagcc

SEQ ID NO: 1355424 - DNA, 25 bp, Homo sapien
aagcctctgactgggctaacagagc

SEQ ID NO: 1355425 - DNA, 25 bp, Homo sapien
gtatcagatgggcaccttgcagaga

SEQ ID NO: 1355426 - DNA, 25 bp, Homo sapien
tagtcagactgacaggaagtaccga

SEQ ID NO: 1355427 - DNA, 25 bp, Homo sapien
taccgaaggaatgacagttgggcct

SEQ ID NO: 1355428 - DNA, 25 bp, Homo sapien
gagggatgacagagtttagtcagac

SEQ ID NO: 1355429 - DNA, 25 bp, Homo sapien
tgacaggaagtaccgaaggaatgac

SEQ ID NO: 1355430 - DNA, 25 bp, Homo sapien
tttgcagctatcatcgagtaaaggc

SEQ ID NO: 1355431 - DNA, 25 bp, Homo sapien
acacttatttgcagctatcatcgag

SEQ ID NO: 1355432 - DNA, 25 bp, Homo sapien
cttatttgcagctatcatcgagtaa

SEQ ID NO: 1355433 - DNA, 25 bp, Homo sapien
aaacacacttatttgcagctatcat

SEQ ID NO: 1355434 - DNA, 25 bp, Homo sapien
ccagcctgctatctgatgtggccag

SEQ ID NO: 1355435 - DNA, 25 bp, Homo sapien
gcactaagggagttgccagacaaca

SEQ ID NO: 1355436 - DNA, 25 bp, Homo sapien
ttcccagcactaagggagttgccag

SEQ ID NO: 1355437 - DNA, 25 bp, Homo sapien
gctatctgatgtggccagctctcta

SEQ ID NO: 1355438 - DNA, 25 bp, Homo sapien
gaaagggacatttcaactgagatct

SEQ ID NO: 1355439 - DNA, 25 bp, Homo sapien
aagaaagggacatttcaactgagat

SEQ ID NO: 1355440 - DNA, 25 bp, Homo sapien
aggagtctggataagaaagggacat

SEQ ID NO: 1355441 - DNA, 25 bp, Homo sapien
agggacatttcaactgagatctgag

SEQ ID NO: 1355442 - DNA, 25 bp, Homo sapien
tgctgtgaaactgaaagcaactgaa

SEQ ID NO: 1355443 - DNA, 25 bp, Homo sapien
tgtgctgtgaaactgaaagcaactg

SEQ ID NO: 1355444 - DNA, 25 bp, Homo sapien
actgaaagcaactgaaagagccact

SEQ ID NO: 1355445 - DNA, 25 bp, Homo sapien
agagccactcatgttccagagggca

SEQ ID NO: 1355446 - DNA, 25 bp, Homo sapien
ttcattgatcaccagagtgaatgct

SEQ ID NO: 1355447 - DNA, 25 bp, Homo sapien
aaggctttcattgatcaccagagtg

SEQ ID NO: 1355448 - DNA, 25 bp, Homo sapien
agagtgaatgctgctccctgaccca

SEQ ID NO: 1355449 - DNA, 25 bp, Homo sapien
cagaaaaggctttcattgatcacca

SEQ ID NO: 1355450 - DNA, 25 bp, Homo sapien
aaaagcatcaaaattggtgtggtca

SEQ ID NO: 1355451 - DNA, 25 bp, Homo sapien
catcaaaattggtgtggtcaactga

SEQ ID NO: 1355452 - DNA, 25 bp, Homo sapien
gcatcaaaattggtgtggtcaactg

SEQ ID NO: 1355453 - DNA, 25 bp, Homo sapien
aagcatcaaaattggtgtggtcaac

SEQ ID NO: 1355454 - DNA, 25 bp, Homo sapien
tttctctccgaaaccatggctagtg

SEQ ID NO: 1355455 - DNA, 25 bp, Homo sapien
taaactagtgcagtaaaaagaggcc

SEQ ID NO: 1355456 - DNA, 25 bp, Homo sapien
attgaaaccgttttgctgctgttgc

SEQ ID NO: 1355457 - DNA, 25 bp, Homo sapien
gctgttgctggatattgactgttct

SEQ ID NO: 1355458 - DNA, 25 bp, Homo sapien
agatgcttaatgcagctctgagtaa

SEQ ID NO: 1355459 - DNA, 25 bp, Homo sapien
tggggatccccttagtctgcgtcat

SEQ ID NO: 1355460 - DNA, 25 bp, Homo sapien
gcagctctgagtaaatatcagcatg

SEQ ID NO: 1355461 - DNA, 25 bp, Homo sapien
taaatatcagcatggggatcccctt

SEQ ID NO: 1355462 - DNA, 25 bp, Homo sapien
ggcattgtgctaagctgtgagaaaa

SEQ ID NO: 1355463 - DNA, 25 bp, Homo sapien
aaagattagtgataccccacccctg

SEQ ID NO: 1355464 - DNA, 25 bp, Homo sapien
cattgactacatgcttaccatgtgc

SEQ ID NO: 1355465 - DNA, 25 bp, Homo sapien
cccctgcccctagtgaggtagaaag

SEQ ID NO: 1355466 - DNA, 25 bp, Homo sapien
tctctaaaggtgagtagtttgcggc

SEQ ID NO: 1355467 - DNA, 25 bp, Homo sapien
tctaaaggtgagtagtttgcggcag

SEQ ID NO: 1355468 - DNA, 25 bp, Homo sapien
tgggtctctaaaggtgagtagtttg

SEQ ID NO: 1355469 - DNA, 25 bp, Homo sapien
gtagtttgcggcaggtgaggaactg

SEQ ID NO: 1355470 - DNA, 25 bp, Homo sapien
tggcttcatcagaaatccgaaaata

SEQ ID NO: 1355471 - DNA, 25 bp, Homo sapien
ttcatcagaaatccgaaaataaaga

SEQ ID NO: 1355472 - DNA, 25 bp, Homo sapien
tgtggcttcatcagaaatccgaaaa

SEQ ID NO: 1355473 - DNA, 25 bp, Homo sapien
gcttcatcagaaatccgaaaataaa

SEQ ID NO: 1355474 - DNA, 25 bp, Homo sapien
ttggaaaaacgctgaagttcaggaa

SEQ ID NO: 1355475 - DNA, 25 bp, Homo sapien
aaagaaatgggttatgggaacacat

SEQ ID NO: 1355476 - DNA, 25 bp, Homo sapien
gttgttccacatcaatgcacttttc

SEQ ID NO: 1355477 - DNA, 25 bp, Homo sapien
aaacaggaggtaattcattactcat

SEQ ID NO: 1355478 - DNA, 25 bp, Homo sapien
tattcaggcgtattgcatattctaa

SEQ ID NO: 1355479 - DNA, 25 bp, Homo sapien
caaaaaagatcctgacgttacagtc

SEQ ID NO: 1355480 - DNA, 25 bp, Homo sapien
tcattttgcatctaatgtgctgcct

SEQ ID NO: 1355481 - DNA, 25 bp, Homo sapien
gatcctgacgttacagtcataaaat

SEQ ID NO: 1355482 - DNA, 25 bp, Homo sapien
tagtttaattactccagctcaccaa

SEQ ID NO: 1355483 - DNA, 25 bp, Homo sapien
gatttgctcccaccgaatagtttaa

SEQ ID NO: 1355484 - DNA, 25 bp, Homo sapien
agcatccggcttgattttgtgtgaa

SEQ ID NO: 1355485 - DNA, 25 bp, Homo sapien
tgatcacagtataacagcatccggc

SEQ ID NO: 1355486 - DNA, 25 bp, Homo sapien
gagtaacagaagtaattaaggacaa

SEQ ID NO: 1355487 - DNA, 25 bp, Homo sapien
gaaggtgaatatcaagaccatacaa

SEQ ID NO: 1355488 - DNA, 25 bp, Homo sapien
gccctatgtctagtaggaatcaaag

SEQ ID NO: 1355489 - DNA, 25 bp, Homo sapien
gatatttatgctgaccccttcatag

SEQ ID NO: 1355490 - DNA, 25 bp, Homo sapien
ctgcagtcacaagccctaatggagt

SEQ ID NO: 1355491 - DNA, 25 bp, Homo sapien
agctgcagtcacaagccctaatgga

SEQ ID NO: 1355492 - DNA, 25 bp, Homo sapien
gcagtcacaagccctaatggagtct

SEQ ID NO: 1355493 - DNA, 25 bp, Homo sapien
gcagctgcagtcacaagccctaatg

SEQ ID NO: 1355494 - DNA, 25 bp, Homo sapien
ggcacctcggtctcaagattctcca

SEQ ID NO: 1355495 - DNA, 25 bp, Homo sapien
aagggatgggcctcaaggcacctcg

SEQ ID NO: 1355496 - DNA, 25 bp, Homo sapien
ttacacctgaacactctggtgctgc

SEQ ID NO: 1355497 - DNA, 25 bp, Homo sapien
cgctgctcgtaatgtgccatcactg

SEQ ID NO: 1355498 - DNA, 25 bp, Homo sapien
attctatctcagcaggctctatagc

SEQ ID NO: 1355499 - DNA, 25 bp, Homo sapien
ggctctatagcctcctgaaataatg

SEQ ID NO: 1355500 - DNA, 25 bp, Homo sapien
tcagcaggctctatagcctcctgaa

SEQ ID NO: 1355501 - DNA, 25 bp, Homo sapien
tatctcagcaggctctatagcctcc

SEQ ID NO: 1355502 - DNA, 25 bp, Homo sapien
aatatgggccatcaatttttccttc

SEQ ID NO: 1355503 - DNA, 25 bp, Homo sapien
aaagctgaatatgggccatcaattt

SEQ ID NO: 1355504 - DNA, 25 bp, Homo sapien
ctgaatatgggccatcaatttttcc

SEQ ID NO: 1355505 - DNA, 25 bp, Homo sapien
ctgtgctgcttccagttacatcagt

SEQ ID NO: 1355506 - DNA, 25 bp, Homo sapien
atgagaacggctgtaaagtggttcc

SEQ ID NO: 1355507 - DNA, 25 bp, Homo sapien
ttcctaggaaacttctcacagcctt

SEQ ID NO: 1355508 - DNA, 25 bp, Homo sapien
ggccagaaatgagaacggctgtaaa

SEQ ID NO: 1355509 - DNA, 25 bp, Homo sapien
ggttcctaggaaacttctcacagcc

SEQ ID NO: 1355510 - DNA, 25 bp, Homo sapien
ctgtctctctttcacgatgtctgta

SEQ ID NO: 1355511 - DNA, 25 bp, Homo sapien
tctctttcacgatgtctgtagtcgt

SEQ ID NO: 1355512 - DNA, 25 bp, Homo sapien
tctctctttcacgatgtctgtagtc

SEQ ID NO: 1355513 - DNA, 25 bp, Homo sapien
tgtctctctttcacgatgtctgtag

SEQ ID NO: 1355514 - DNA, 25 bp, Homo sapien
gagggagggtgctgcgtaaactgag

SEQ ID NO: 1355515 - DNA, 25 bp, Homo sapien
ggagggtgctgcgtaaactgaggaa

SEQ ID NO: 1355516 - DNA, 25 bp, Homo sapien
tgttaaagggcccataggcaatgta

SEQ ID NO: 1355517 - DNA, 25 bp, Homo sapien
taaagggcccataggcaatgtaggg

SEQ ID NO: 1355518 - DNA, 25 bp, Homo sapien
taaactttgccaaaatctgaggcac

SEQ ID NO: 1355519 - DNA, 25 bp, Homo sapien
tttgttaaatcctgatgacaacttt

SEQ ID NO: 1355520 - DNA, 25 bp, Homo sapien
ggcactcttataagcatgtaaaccc

SEQ ID NO: 1355521 - DNA, 25 bp, Homo sapien
aaatcctgatgacaacttttatgca

SEQ ID NO: 1355522 - DNA, 25 bp, Homo sapien
atttgacaaagcgtgggcattccct

SEQ ID NO: 1355523 - DNA, 25 bp, Homo sapien
gaaggtgtggcctctagctcatagg

SEQ ID NO: 1355524 - DNA, 25 bp, Homo sapien
cagaaggcgtgtgcgaatttgacaa

SEQ ID NO: 1355525 - DNA, 25 bp, Homo sapien
tcagggcaggccctattcagaaggc

SEQ ID NO: 1355526 - DNA, 25 bp, Homo sapien
ttccaaattctcatcttgttccacc

SEQ ID NO: 1355527 - DNA, 25 bp, Homo sapien
cctgctgagctcctattgacttcaa

SEQ ID NO: 1355528 - DNA, 25 bp, Homo sapien
gttccaccccctgctgagctcctat

SEQ ID NO: 1355529 - DNA, 25 bp, Homo sapien
ctgagctcctattgacttcaaagag

SEQ ID NO: 1355530 - DNA, 25 bp, Homo sapien
tcttcatatgctctggggcttatcc

SEQ ID NO: 1355531 - DNA, 25 bp, Homo sapien
ggcttatccaggctaatggagtatc

SEQ ID NO: 1355532 - DNA, 25 bp, Homo sapien
tatccaggctaatggagtatcacag

SEQ ID NO: 1355533 - DNA, 25 bp, Homo sapien
caggctaatggagtatcacagttca

SEQ ID NO: 1355534 - DNA, 25 bp, Homo sapien
caggataaacaacacttggttgaca

SEQ ID NO: 1355535 - DNA, 25 bp, Homo sapien
caagacatgtatcagagaagttcag

SEQ ID NO: 1355536 - DNA, 25 bp, Homo sapien
cttcctcttgccattcgagctacat

SEQ ID NO: 1355537 - DNA, 25 bp, Homo sapien
tgagcatgaatgtaatccacaggat

SEQ ID NO: 1355538 - DNA, 25 bp, Homo sapien
gcttacaggcactacagcaccagtg

SEQ ID NO: 1355539 - DNA, 25 bp, Homo sapien
tcctgctcgaatgaattacccagct

SEQ ID NO: 1355540 - DNA, 25 bp, Homo sapien
tctgtggtaagtggttcctgctcga

SEQ ID NO: 1355541 - DNA, 25 bp, Homo sapien
cagctttcatgaacagccatgcaga

SEQ ID NO: 1355542 - DNA, 25 bp, Homo sapien
actggacacaatttagacttgcttt

SEQ ID NO: 1355543 - DNA, 25 bp, Homo sapien
ccactggacacaatttagacttgct

SEQ ID NO: 1355544 - DNA, 25 bp, Homo sapien
tgctactctaagtgcccccactgga

SEQ ID NO: 1355545 - DNA, 25 bp, Homo sapien
gccaaagcctgctactctaagtgcc

SEQ ID NO: 1355546 - DNA, 25 bp, Homo sapien
cccagcagtatggatcgtgttattg

SEQ ID NO: 1355547 - DNA, 25 bp, Homo sapien
tagaagccttgtcattacccagcag

SEQ ID NO: 1355548 - DNA, 25 bp, Homo sapien
tattgtgtctgaccctgagttctgc

SEQ ID NO: 1355549 - DNA, 25 bp, Homo sapien
tcggtgaaacataaaggcgcccagg

SEQ ID NO: 1355550 - DNA, 25 bp, Homo sapien
actattcattacaatttcctcgtac

SEQ ID NO: 1355551 - DNA, 25 bp, Homo sapien
tcctcgtactcagtgctacactgct

SEQ ID NO: 1355552 - DNA, 25 bp, Homo sapien
atttcctcgtactcagtgctacact

SEQ ID NO: 1355553 - DNA, 25 bp, Homo sapien
gtactattcattacaatttcctcgt

SEQ ID NO: 1355554 - DNA, 25 bp, Homo sapien
aagctctccctgtgtctaaatgtct

SEQ ID NO: 1355555 - DNA, 25 bp, Homo sapien
gtctaaatgtctatctctctcagtg

SEQ ID NO: 1355556 - DNA, 25 bp, Homo sapien
tctaaatgtctatctctctcagtgg

SEQ ID NO: 1355557 - DNA, 25 bp, Homo sapien
tccctgtgtctaaatgtctatctct

SEQ ID NO: 1355558 - DNA, 25 bp, Homo sapien
ctaataaggtctattcctggagtca

SEQ ID NO: 1355559 - DNA, 25 bp, Homo sapien
taaatttgccctcttgagattcctc

SEQ ID NO: 1355560 - DNA, 25 bp, Homo sapien
actggaaagaaggagtacaagtctc

SEQ ID NO: 1355561 - DNA, 25 bp, Homo sapien
ccagaaatgtcaagccttcttcaaa

SEQ ID NO: 1355562 - DNA, 25 bp, Homo sapien
tcttgcaggtaggccatctctgttt

SEQ ID NO: 1355563 - DNA, 25 bp, Homo sapien
ttgcaggtaggccatctctgtttcc

SEQ ID NO: 1355564 - DNA, 25 bp, Homo sapien
tctcttgcaggtaggccatctctgt

SEQ ID NO: 1355565 - DNA, 25 bp, Homo sapien
tccttttcctcagccactgtgcaca

SEQ ID NO: 1355566 - DNA, 25 bp, Homo sapien
tgttgagctccagtcacatggtcat

SEQ ID NO: 1355567 - DNA, 25 bp, Homo sapien
gtctaaaagtattttcgctcatatt

SEQ ID NO: 1355568 - DNA, 25 bp, Homo sapien
catggtcatacactagtctaaaagt

SEQ ID NO: 1355569 - DNA, 25 bp, Homo sapien
aatgtaaaaacatctcggtccttct

SEQ ID NO: 1355570 - DNA, 25 bp, Homo sapien
tactccattcttaacagtaatgccc

SEQ ID NO: 1355571 - DNA, 25 bp, Homo sapien
tctactccattcttaacagtaatgc

SEQ ID NO: 1355572 - DNA, 25 bp, Homo sapien
ctccattcttaacagtaatgcccat

SEQ ID NO: 1355573 - DNA, 25 bp, Homo sapien
ttggttctactccattcttaacagt

SEQ ID NO: 1355574 - DNA, 25 bp, Homo sapien
ctaatttgcagttccatgggtctct

SEQ ID NO: 1355575 - DNA, 25 bp, Homo sapien
aatttgcagttccatgggtctctgc

SEQ ID NO: 1355576 - DNA, 25 bp, Homo sapien
tctctgcaatgctgattctaatagt

SEQ ID NO: 1355577 - DNA, 25 bp, Homo sapien
tctgcaatgctgattctaatagtta

SEQ ID NO: 1355578 - DNA, 25 bp, Homo sapien
agtgaaccgcactataaacagatgt

SEQ ID NO: 1355579 - DNA, 25 bp, Homo sapien
tccatgggtttcacaatagatattg

SEQ ID NO: 1355580 - DNA, 25 bp, Homo sapien
tcaacattactccatgatccatggg

SEQ ID NO: 1355581 - DNA, 25 bp, Homo sapien
tattgtgttaacaggcatgacaaca

SEQ ID NO: 1355582 - DNA, 25 bp, Homo sapien
ttcttctacttgtgcactgatagtc

SEQ ID NO: 1355583 - DNA, 25 bp, Homo sapien
gtttgagcacctccatcatctttca

SEQ ID NO: 1355584 - DNA, 25 bp, Homo sapien
tattgagcatgatcttctatttgct

SEQ ID NO: 1355585 - DNA, 25 bp, Homo sapien
tcattccccattcctgtttgagcac

SEQ ID NO: 1355586 - DNA, 25 bp, Homo sapien
attcctgtttgagcacctccatcat

SEQ ID NO: 1355587 - DNA, 25 bp, Homo sapien
aattatctgggcagaaatgaagctc

SEQ ID NO: 1355588 - DNA, 25 bp, Homo sapien
atctgggcagaaatgaagctcttca

SEQ ID NO: 1355589 - DNA, 25 bp, Homo sapien
aaattatctgggcagaaatgaagct

SEQ ID NO: 1355590 - DNA, 25 bp, Homo sapien
tatctgggcagaaatgaagctcttc

SEQ ID NO: 1355591 - DNA, 25 bp, Homo sapien
tactaaagtcacctgaagcaccctg

SEQ ID NO: 1355592 - DNA, 25 bp, Homo sapien
tctacatactgggatcttgaggaat

SEQ ID NO: 1355593 - DNA, 25 bp, Homo sapien
cacttggaaatgtaacaaagaccac

SEQ ID NO: 1355594 - DNA, 25 bp, Homo sapien
aaggattctgaaaccgataagcagg

SEQ ID NO: 1355595 - DNA, 25 bp, Homo sapien
cctggcccacatattcccttttctt

SEQ ID NO: 1355596 - DNA, 25 bp, Homo sapien
tgtctcctggcccacatattccctt

SEQ ID NO: 1355597 - DNA, 25 bp, Homo sapien
ttcttgtctcctggcccacatattc

SEQ ID NO: 1355598 - DNA, 25 bp, Homo sapien
tttcttgtctcctggcccacatatt

SEQ ID NO: 1355599 - DNA, 25 bp, Homo sapien
taaggtcactcctgaaggaactgca

SEQ ID NO: 1355600 - DNA, 25 bp, Homo sapien
ttggaacaaacatcttctaaggtca

SEQ ID NO: 1355601 - DNA, 25 bp, Homo sapien
gcatatgcagatagagtgctttgca

SEQ ID NO: 1355602 - DNA, 25 bp, Homo sapien
tataccacagtgaacagcttgaagt

SEQ ID NO: 1355603 - DNA, 25 bp, Homo sapien
taattgaagtcaattccgaacaaac

SEQ ID NO: 1355604 - DNA, 25 bp, Homo sapien
ttaaattgaatgtgctctgcgttcc

SEQ ID NO: 1355605 - DNA, 25 bp, Homo sapien
gtcaattccgaacaaacttgaattc

SEQ ID NO: 1355606 - DNA, 25 bp, Homo sapien
cattaaattgaatgtgctctgcgtt

SEQ ID NO: 1355607 - DNA, 25 bp, Homo sapien
cagagccgctttgatgaggagctgt

SEQ ID NO: 1355608 - DNA, 25 bp, Homo sapien
atgccagagccgctttgatgaggag

SEQ ID NO: 1355609 - DNA, 25 bp, Homo sapien
tcacatgccagagccgctttgatga

SEQ ID NO: 1355610 - DNA, 25 bp, Homo sapien
gctttgatgaggagctgttttggca

SEQ ID NO: 1355611 - DNA, 25 bp, Homo sapien
aatagcggcaaatgaagtaatctgc

SEQ ID NO: 1355612 - DNA, 25 bp, Homo sapien
ctcttgcaaatcagcaccgagaggg

SEQ ID NO: 1355613 - DNA, 25 bp, Homo sapien
taaccgcgccgaggactgcagcagg

SEQ ID NO: 1355614 - DNA, 25 bp, Homo sapien
gctctctgattaatctgctcttgca

SEQ ID NO: 1355615 - DNA, 25 bp, Homo sapien
taacagcaaatttcatcaagccgcg

SEQ ID NO: 1355616 - DNA, 25 bp, Homo sapien
tcagtatgttaagcagatgtggtct

SEQ ID NO: 1355617 - DNA, 25 bp, Homo sapien
tccacctagtaagttgcgttagacc

SEQ ID NO: 1355618 - DNA, 25 bp, Homo sapien
tctaaacttctgctcaattctggtg

SEQ ID NO: 1355619 - DNA, 25 bp, Homo sapien
tacaacaggttctaagcacagggtc

SEQ ID NO: 1355620 - DNA, 25 bp, Homo sapien
ttttaaatgttccactttcatgcac

SEQ ID NO: 1355621 - DNA, 25 bp, Homo sapien
ttacatagccaaagctaaattattt

SEQ ID NO: 1355622 - DNA, 25 bp, Homo sapien
acatagccaaagctaaattattttt

SEQ ID NO: 1355623 - DNA, 25 bp, Homo sapien
ttcttttaaatgttccactttcatg

SEQ ID NO: 1355624 - DNA, 25 bp, Homo sapien
tggattctgaaacatctggacactg

SEQ ID NO: 1355625 - DNA, 25 bp, Homo sapien
gattcttaggccatctggattctga

SEQ ID NO: 1355626 - DNA, 25 bp, Homo sapien
tagaggattcttaggccatctggat

SEQ ID NO: 1355627 - DNA, 25 bp, Homo sapien
ctgggtgatagaggattcttaggcc

SEQ ID NO: 1355628 - DNA, 25 bp, Homo sapien
cccactacgaatcagtgcaggagtt

SEQ ID NO: 1355629 - DNA, 25 bp, Homo sapien
ctcctcagccaactgaattgctggg

SEQ ID NO: 1355630 - DNA, 25 bp, Homo sapien
gccaactgaattgctggggctgcac

SEQ ID NO: 1355631 - DNA, 25 bp, Homo sapien
tggaatagcacactacatcctagaa

SEQ ID NO: 1355632 - DNA, 25 bp, Homo sapien
gtatacacagtgattttgcaggccc

SEQ ID NO: 1355633 - DNA, 25 bp, Homo sapien
aacaactccaggtatacacagtgat

SEQ ID NO: 1355634 - DNA, 25 bp, Homo sapien
atacacagtgattttgcaggcccct

SEQ ID NO: 1355635 - DNA, 25 bp, Homo sapien
tcaacaactccaggtatacacagtg

SEQ ID NO: 1355636 - DNA, 25 bp, Homo sapien
tacccaattaggcagctgagtgtcc

SEQ ID NO: 1355637 - DNA, 25 bp, Homo sapien
ccacaggggacaccatgatttaccc

SEQ ID NO: 1355638 - DNA, 25 bp, Homo sapien
ccatgatttacccaattaggcagct

SEQ ID NO: 1355639 - DNA, 25 bp, Homo sapien
gcagctgagtgtcccgatcgcaggt

SEQ ID NO: 1355640 - DNA, 25 bp, Homo sapien
aaccaactgctcttgccttaattta

SEQ ID NO: 1355641 - DNA, 25 bp, Homo sapien
ttatgcaagtgtagcctatagctaa

SEQ ID NO: 1355642 - DNA, 25 bp, Homo sapien
tgcaagtgtagcctatagctaaaag

SEQ ID NO: 1355643 - DNA, 25 bp, Homo sapien
cttgccttaatttatgcaagtgtag

SEQ ID NO: 1355644 - DNA, 25 bp, Homo sapien
tagtgtggttattaagtgtgagttt

SEQ ID NO: 1355645 - DNA, 25 bp, Homo sapien
aaatccagatggaagccgcttttag

SEQ ID NO: 1355646 - DNA, 25 bp, Homo sapien
taagtgtgagtttattaatgttatc

SEQ ID NO: 1355647 - DNA, 25 bp, Homo sapien
gtattcggcgccttgatcaaattcc

SEQ ID NO: 1355648 - DNA, 25 bp, Homo sapien
aggagagactggtttttagaatagc

SEQ ID NO: 1355649 - DNA, 25 bp, Homo sapien
ggagagactggtttttagaatagca

SEQ ID NO: 1355650 - DNA, 25 bp, Homo sapien
tagcatgatatggaacaacaagatg

SEQ ID NO: 1355651 - DNA, 25 bp, Homo sapien
ttttagaatagcatgatatggaaca

SEQ ID NO: 1355652 - DNA, 25 bp, Homo sapien
gcacgggtgtgcagctatggcaaca

SEQ ID NO: 1355653 - DNA, 25 bp, Homo sapien
taaacaatgagtggaataaagccct

SEQ ID NO: 1355654 - DNA, 25 bp, Homo sapien
gtgtcacagtcccatccgcaggtgt

SEQ ID NO: 1355655 - DNA, 25 bp, Homo sapien
caaatgtgttttgtggcctggtacc

SEQ ID NO: 1355656 - DNA, 25 bp, Homo sapien
actagaaattggatttagcatccat

SEQ ID NO: 1355657 - DNA, 25 bp, Homo sapien
catttttccaaccaatggactgtgc

SEQ ID NO: 1355658 - DNA, 25 bp, Homo sapien
ctgtgctattagagacgccagcttc

SEQ ID NO: 1355659 - DNA, 25 bp, Homo sapien
tgttcctatagagatgtcactagaa

SEQ ID NO: 1355660 - DNA, 25 bp, Homo sapien
tgctttgccctcaacccaggctagt

SEQ ID NO: 1355661 - DNA, 25 bp, Homo sapien
ggtctcactaaatcaccccaactgg

SEQ ID NO: 1355662 - DNA, 25 bp, Homo sapien
ttttcacctgccaaacagtaaaggc

SEQ ID NO: 1355663 - DNA, 25 bp, Homo sapien
tctggtgaggaatgttgacgttaac

SEQ ID NO: 1355664 - DNA, 25 bp, Homo sapien
caccttgttggaactcagctgagaa

SEQ ID NO: 1355665 - DNA, 25 bp, Homo sapien
tgagaacgtacatgtgtgccagaca

SEQ ID NO: 1355666 - DNA, 25 bp, Homo sapien
gttccataaagttgccacacacagt

SEQ ID NO: 1355667 - DNA, 25 bp, Homo sapien
cattgaagtcacagccaacagcact

SEQ ID NO: 1355668 - DNA, 25 bp, Homo sapien
ggagccaaaccctgtccatggccgt

SEQ ID NO: 1355669 - DNA, 25 bp, Homo sapien
tgctggttccagaggagaaggcccg

SEQ ID NO: 1355670 - DNA, 25 bp, Homo sapien
gaccacagtgtgttatccaccagca

SEQ ID NO: 1355671 - DNA, 25 bp, Homo sapien
atggccgtcaaaactcgccaccagg

SEQ ID NO: 1355672 - DNA, 25 bp, Homo sapien
ctgctcgggactactgcttgagggc

SEQ ID NO: 1355673 - DNA, 25 bp, Homo sapien
ttcacttttaaagaccgcagtctct

SEQ ID NO: 1355674 - DNA, 25 bp, Homo sapien
ttccaagtctttacaagcagcgtct

SEQ ID NO: 1355675 - DNA, 25 bp, Homo sapien
ttcgcctctgcggtcttggggccct

SEQ ID NO: 1355676 - DNA, 25 bp, Homo sapien
aagtctttacaagcagcgtcttgag

SEQ ID NO: 1355677 - DNA, 25 bp, Homo sapien
ctggtgcttctggctgagctgccag

SEQ ID NO: 1355678 - DNA, 25 bp, Homo sapien
ggtgcttctggctgagctgccaggg

SEQ ID NO: 1355679 - DNA, 25 bp, Homo sapien
gcttctggctgagctgccagggcag

SEQ ID NO: 1355680 - DNA, 25 bp, Homo sapien
tgcttctggctgagctgccagggca

SEQ ID NO: 1355681 - DNA, 25 bp, Homo sapien
tttgtcccatgctgaatcctctcct

SEQ ID NO: 1355682 - DNA, 25 bp, Homo sapien
ctcctttgtcccatgctgaatcctc

SEQ ID NO: 1355683 - DNA, 25 bp, Homo sapien
cctttgtcccatgctgaatcctctc

SEQ ID NO: 1355684 - DNA, 25 bp, Homo sapien
ctgcctcctttgtcccatgctgaat

SEQ ID NO: 1355685 - DNA, 25 bp, Homo sapien
tctgagaaagggtgcttgcctcctc

SEQ ID NO: 1355686 - DNA, 25 bp, Homo sapien
tacgtgagtgtagccaaggacagtg

SEQ ID NO: 1355687 - DNA, 25 bp, Homo sapien
tagttggcagccctatctcagagga

SEQ ID NO: 1355688 - DNA, 25 bp, Homo sapien
tgaggcagtcccctaaaggtcatca

SEQ ID NO: 1355689 - DNA, 25 bp, Homo sapien
tagccacacaagaaagtagggggca

SEQ ID NO: 1355690 - DNA, 25 bp, Homo sapien
cggtgtgttggcctttatagccaca

SEQ ID NO: 1355691 - DNA, 25 bp, Homo sapien
cacagctaccaactcggtgtgttgg

SEQ ID NO: 1355692 - DNA, 25 bp, Homo sapien
ttgagatccgcaagagttttgtgtc

SEQ ID NO: 1355693 - DNA, 25 bp, Homo sapien
atgcctccacattatcccatgttta

SEQ ID NO: 1355694 - DNA, 25 bp, Homo sapien
ctccacattatcccatgtttaaatg

SEQ ID NO: 1355695 - DNA, 25 bp, Homo sapien
tgcctccacattatcccatgtttaa

SEQ ID NO: 1355696 - DNA, 25 bp, Homo sapien
gcctccacattatcccatgtttaaa

SEQ ID NO: 1355697 - DNA, 25 bp, Homo sapien
tctattctctgctactaaaggagcc

SEQ ID NO: 1355698 - DNA, 25 bp, Homo sapien
accacaattcctctacagctgtttc

SEQ ID NO: 1355699 - DNA, 25 bp, Homo sapien
gacaataggctttattttcgagatc

SEQ ID NO: 1355700 - DNA, 25 bp, Homo sapien
tttcgacagttcttcacaggtccag

SEQ ID NO: 1355701 - DNA, 25 bp, Homo sapien
tcataggccacttttggtgaagtgt

SEQ ID NO: 1355702 - DNA, 25 bp, Homo sapien
gaagtgtccttgtcctgagtgtgag

SEQ ID NO: 1355703 - DNA, 25 bp, Homo sapien
tgaaaaatctgctaccaagaagact

SEQ ID NO: 1355704 - DNA, 25 bp, Homo sapien
tcgatataagtgcactctgagatcc

SEQ ID NO: 1355705 - DNA, 25 bp, Homo sapien
gctgctgaagctgacagtcagtcaa

SEQ ID NO: 1355706 - DNA, 25 bp, Homo sapien
gacagtcagtcaagtaagagtaatg

SEQ ID NO: 1355707 - DNA, 25 bp, Homo sapien
agtcagtcaagtaagagtaatgcat

SEQ ID NO: 1355708 - DNA, 25 bp, Homo sapien
agctgctgaagctgacagtcagtca

SEQ ID NO: 1355709 - DNA, 25 bp, Homo sapien
tctccaatggagctgtgtgtgactt

SEQ ID NO: 1355710 - DNA, 25 bp, Homo sapien
ttttcagtcaaatggttccatccag

SEQ ID NO: 1355711 - DNA, 25 bp, Homo sapien
tgtcagtctgtaattgagtcctcct

SEQ ID NO: 1355712 - DNA, 25 bp, Homo sapien
tcttgttggccttttgacatggatt

SEQ ID NO: 1355713 - DNA, 25 bp, Homo sapien
ctttattttcaacagaggatgatta

SEQ ID NO: 1355714 - DNA, 25 bp, Homo sapien
caacagaggatgattacagaattat

SEQ ID NO: 1355715 - DNA, 25 bp, Homo sapien
gacactttgtagacctttattttca

SEQ ID NO: 1355716 - DNA, 25 bp, Homo sapien
tattttcaacagaggatgattacag

SEQ ID NO: 1355717 - DNA, 25 bp, Homo sapien
gataaagggccaagtgatatccagt

SEQ ID NO: 1355718 - DNA, 25 bp, Homo sapien
gaagattgtgctgaggcttcagtgt

SEQ ID NO: 1355719 - DNA, 25 bp, Homo sapien
cagtgtgttgagaccaactgcagat

SEQ ID NO: 1355720 - DNA, 25 bp, Homo sapien
aagaagataaagggccaagtgatat

SEQ ID NO: 1355721 - DNA, 25 bp, Homo sapien
tcatgagtacacatgccaagaagac

SEQ ID NO: 1355722 - DNA, 25 bp, Homo sapien
ttgcattgaagtagataacctatac

SEQ ID NO: 1355723 - DNA, 25 bp, Homo sapien
gaagtagataacctatacatcaccc

SEQ ID NO: 1355724 - DNA, 25 bp, Homo sapien
atttgaaggcgtttgttgcattgaa

SEQ ID NO: 1355725 - DNA, 25 bp, Homo sapien
acctatacatcacccaaacgcaatg

SEQ ID NO: 1355726 - DNA, 25 bp, Homo sapien
agctgcctctattcacattcactac

SEQ ID NO: 1355727 - DNA, 25 bp, Homo sapien
tcacattcactacctgccactctaa

SEQ ID NO: 1355728 - DNA, 25 bp, Homo sapien
aaccagctgcctctattcacattca

SEQ ID NO: 1355729 - DNA, 25 bp, Homo sapien
cattcactacctgccactctaaaag

SEQ ID NO: 1355730 - DNA, 25 bp, Homo sapien
gtaatacaggttatatctgcatgcc

SEQ ID NO: 1355731 - DNA, 25 bp, Homo sapien
ccttggtaatacaggttatatctgc

SEQ ID NO: 1355732 - DNA, 25 bp, Homo sapien
cttggtaatacaggttatatctgca

SEQ ID NO: 1355733 - DNA, 25 bp, Homo sapien
tggtaatacaggttatatctgcatg

SEQ ID NO: 1355734 - DNA, 25 bp, Homo sapien
gaaaataggaagtatctttctctga

SEQ ID NO: 1355735 - DNA, 25 bp, Homo sapien
acagagtctatcagctgagaaaaca

SEQ ID NO: 1355736 - DNA, 25 bp, Homo sapien
gaatgttgacctcgtcaagatggca

SEQ ID NO: 1355737 - DNA, 25 bp, Homo sapien
taattctaaaagcaagtcctattct

SEQ ID NO: 1355738 - DNA, 25 bp, Homo sapien
taaaaaggtaccagcataactagtg

SEQ ID NO: 1355739 - DNA, 25 bp, Homo sapien
tgtgacctgggtagtaaattttagc

SEQ ID NO: 1355740 - DNA, 25 bp, Homo sapien
tattccttatcaacagtggtgtgca

SEQ ID NO: 1355741 - DNA, 25 bp, Homo sapien
gcttcagtctgataagtatgatcca

SEQ ID NO: 1355742 - DNA, 25 bp, Homo sapien
acagccaaatggtgcgacaggagga

SEQ ID NO: 1355743 - DNA, 25 bp, Homo sapien
ctggcagccgccaagtgaggccgct

SEQ ID NO: 1355744 - DNA, 25 bp, Homo sapien
caagtgaggccgcttttgcgacgcg

SEQ ID NO: 1355745 - DNA, 25 bp, Homo sapien
ttttgcgacgcggtgacagccaaat

SEQ ID NO: 1355746 - DNA, 25 bp, Homo sapien
cgggagcctgctctcgcctggtccc

SEQ ID NO: 1355747 - DNA, 25 bp, Homo sapien
tttgcttcacttcagcagccctctt

SEQ ID NO: 1355748 - DNA, 25 bp, Homo sapien
caaatgtttgcttcacttcagcagc

SEQ ID NO: 1355749 - DNA, 25 bp, Homo sapien
tgtttgcttcacttcagcagccctc

SEQ ID NO: 1355750 - DNA, 25 bp, Homo sapien
aatgtttgcttcacttcagcagccc

SEQ ID NO: 1355751 - DNA, 25 bp, Homo sapien
gagccatagcatctattaactctgc

SEQ ID NO: 1355752 - DNA, 25 bp, Homo sapien
gaccatatgcattaacctagtgatt

SEQ ID NO: 1355753 - DNA, 25 bp, Homo sapien
tccccagaagtagtcacattgccct

SEQ ID NO: 1355754 - DNA, 25 bp, Homo sapien
taataggcgcttacattgcttaact

SEQ ID NO: 1355755 - DNA, 25 bp, Homo sapien
gtttgaccatagttcataagatccc

SEQ ID NO: 1355756 - DNA, 25 bp, Homo sapien
tttgtgtaacaccagtcataaaaaa

SEQ ID NO: 1355757 - DNA, 25 bp, Homo sapien
tccacaatgcagaacccgttttaaa

SEQ ID NO: 1355758 - DNA, 25 bp, Homo sapien
ccaaaagtaaggagtacatactcag

SEQ ID NO: 1355759 - DNA, 25 bp, Homo sapien
ttctttaggcaagtagcagtcttta

SEQ ID NO: 1355760 - DNA, 25 bp, Homo sapien
tctttaggcaagtagcagtctttat

SEQ ID NO: 1355761 - DNA, 25 bp, Homo sapien
gcaagtagcagtctttatttctgta

SEQ ID NO: 1355762 - DNA, 25 bp, Homo sapien
gttctttaggcaagtagcagtcttt

SEQ ID NO: 1355763 - DNA, 25 bp, Homo sapien
ggtaggctctagtacttgtctcatg

SEQ ID NO: 1355764 - DNA, 25 bp, Homo sapien
gctgatagctagaaggtaactggtt

SEQ ID NO: 1355765 - DNA, 25 bp, Homo sapien
taactggttgacaagagggtgcatc

SEQ ID NO: 1355766 - DNA, 25 bp, Homo sapien
catggtgatcagatgctctagagtc

SEQ ID NO: 1355767 - DNA, 25 bp, Homo sapien
gatatgagggattgctatttctccc

SEQ ID NO: 1355768 - DNA, 25 bp, Homo sapien
aatagccaaccacagtggcacgtgc

SEQ ID NO: 1355769 - DNA, 25 bp, Homo sapien
agaaatagccaaccacagtggcacg

SEQ ID NO: 1355770 - DNA, 25 bp, Homo sapien
tggagattggatttggatatgaggg

SEQ ID NO: 1355771 - DNA, 25 bp, Homo sapien
gcttgtttgccgttatatatcctct

SEQ ID NO: 1355772 - DNA, 25 bp, Homo sapien
taccaccttacattccatacagcaa

SEQ ID NO: 1355773 - DNA, 25 bp, Homo sapien
taaataggtgtttattagacatcta

SEQ ID NO: 1355774 - DNA, 25 bp, Homo sapien
tgtatgagagatccagttggtgctg

SEQ ID NO: 1355775 - DNA, 25 bp, Homo sapien
ataacaaaggcacgcctatcactgg

SEQ ID NO: 1355776 - DNA, 25 bp, Homo sapien
tagctaggagtacgggaacgtgcca

SEQ ID NO: 1355777 - DNA, 25 bp, Homo sapien
tccaaaggtttagacttagaggctg

SEQ ID NO: 1355778 - DNA, 25 bp, Homo sapien
ccaggtgtggtctaaggtatccact

SEQ ID NO: 1355779 - DNA, 25 bp, Homo sapien
tccaagttactaaaaggctggtgca

SEQ ID NO: 1355780 - DNA, 25 bp, Homo sapien
ggcttttaggatattcgtcacccaa

SEQ ID NO: 1355781 - DNA, 25 bp, Homo sapien
ggctggtgcagaacttacatagata

SEQ ID NO: 1355782 - DNA, 25 bp, Homo sapien
tccatggagttttaccagtctacaa

SEQ ID NO: 1355783 - DNA, 25 bp, Homo sapien
tatagtccctagctttgccatatgc

SEQ ID NO: 1355784 - DNA, 25 bp, Homo sapien
tagacactgcgaaaccaagctgact

SEQ ID NO: 1355785 - DNA, 25 bp, Homo sapien
tgactccacctcgagaaccaaggat

SEQ ID NO: 1355786 - DNA, 25 bp, Homo sapien
tggagcgctctgatggacaaaaaag

SEQ ID NO: 1355787 - DNA, 25 bp, Homo sapien
ttgtacattttaggccactggatcc

SEQ ID NO: 1355788 - DNA, 25 bp, Homo sapien
aactcttcaaaggatccgtctgtgg

SEQ ID NO: 1355789 - DNA, 25 bp, Homo sapien
tctgctgtagaagggaaccataact

SEQ ID NO: 1355790 - DNA, 25 bp, Homo sapien
gaggacttttaatcagccgaaccaa

SEQ ID NO: 1355791 - DNA, 25 bp, Homo sapien
gcttactgtgtatagatactgagaa

SEQ ID NO: 1355792 - DNA, 25 bp, Homo sapien
tctgctcctgtaaggtcagtagcat

SEQ ID NO: 1355793 - DNA, 25 bp, Homo sapien
tatttatggactgcttactgtgtat

SEQ ID NO: 1355794 - DNA, 25 bp, Homo sapien
tcagtagcatcttttatttgaagca

SEQ ID NO: 1355795 - DNA, 25 bp, Homo sapien
caagatttttgcaagtactgccagt

SEQ ID NO: 1355796 - DNA, 25 bp, Homo sapien
gctctccctgtaacacaaattgagg

SEQ ID NO: 1355797 - DNA, 25 bp, Homo sapien
tattgacttggtaaatctgctgtac

SEQ ID NO: 1355798 - DNA, 25 bp, Homo sapien
gatgcaagcaccagtattgtatgta

SEQ ID NO: 1355799 - DNA, 25 bp, Homo sapien
tctctcaagctggtgcctttcaagg

SEQ ID NO: 1355800 - DNA, 25 bp, Homo sapien
gatgttgatgttaacaatggttctc

SEQ ID NO: 1355801 - DNA, 25 bp, Homo sapien
gtaatggaaataaagtctatcagct

SEQ ID NO: 1355802 - DNA, 25 bp, Homo sapien
tatacataataaatctcacatacac

SEQ ID NO: 1355803 - DNA, 25 bp, Homo sapien
caagaatttgacgttagctgcctca

SEQ ID NO: 1355804 - DNA, 25 bp, Homo sapien
tttcctcatgaaaggctcaacccag

SEQ ID NO: 1355805 - DNA, 25 bp, Homo sapien
tcagccctggaatgcgtaccatgtc

SEQ ID NO: 1355806 - DNA, 25 bp, Homo sapien
tataggctatgtacaacaggcaaag

SEQ ID NO: 1355807 - DNA, 25 bp, Homo sapien
ctgattgtaacatcagcaacaccag

SEQ ID NO: 1355808 - DNA, 25 bp, Homo sapien
cgaggatagatcagtctataggact

SEQ ID NO: 1355809 - DNA, 25 bp, Homo sapien
tctggggctcgaggatagatcagtc

SEQ ID NO: 1355810 - DNA, 25 bp, Homo sapien
ggtagtttgtccactggggtgtcaa

SEQ ID NO: 1355811 - DNA, 25 bp, Homo sapien
aaaaactgataatagaaatacatac

SEQ ID NO: 1355812 - DNA, 25 bp, Homo sapien
cactacctgcattgtaatttgtgag

SEQ ID NO: 1355813 - DNA, 25 bp, Homo sapien
ctcctttccactacctgcattgtaa

SEQ ID NO: 1355814 - DNA, 25 bp, Homo sapien
catactaaaaggtagaaagcgggag

SEQ ID NO: 1355815 - DNA, 25 bp, Homo sapien
ggccatgtaaatagctgccgctgcc

SEQ ID NO: 1355816 - DNA, 25 bp, Homo sapien
cagctttacgggctatatgtgtagc

SEQ ID NO: 1355817 - DNA, 25 bp, Homo sapien
tgatgcctgtgaggccatgtaaata

SEQ ID NO: 1355818 - DNA, 25 bp, Homo sapien
tatatgtgtagctgccatctgtact

SEQ ID NO: 1355819 - DNA, 25 bp, Homo sapien
ctggacatgaagtccccagttgtaa

SEQ ID NO: 1355820 - DNA, 25 bp, Homo sapien
gaagtccccagttgtaatcaaatcc

SEQ ID NO: 1355821 - DNA, 25 bp, Homo sapien
tagaaattcgtgatacggcacatat

SEQ ID NO: 1355822 - DNA, 25 bp, Homo sapien
cacactggtttctagcgctttcaaa

SEQ ID NO: 1355823 - DNA, 25 bp, Homo sapien
taggaaccccttcttgtctacaggc

SEQ ID NO: 1355824 - DNA, 25 bp, Homo sapien
tacaggcaatatagagacaagcaga

SEQ ID NO: 1355825 - DNA, 25 bp, Homo sapien
gcagaagctatagcatcattagctc

SEQ ID NO: 1355826 - DNA, 25 bp, Homo sapien
cttcaggctcttctgttcatatact

SEQ ID NO: 1355827 - DNA, 25 bp, Homo sapien
aaagtcaatgccagaatggcttaaa

SEQ ID NO: 1355828 - DNA, 25 bp, Homo sapien
ccagaatggcttaaaggaggtagac

SEQ ID NO: 1355829 - DNA, 25 bp, Homo sapien
caatgccagaatggcttaaaggagg

SEQ ID NO: 1355830 - DNA, 25 bp, Homo sapien
tggcttaaaggaggtagacaagaac

SEQ ID NO: 1355831 - DNA, 25 bp, Homo sapien
tcatcattgcccgatcagaactgct

SEQ ID NO: 1355832 - DNA, 25 bp, Homo sapien
ttcgtcaaaacttgcagctcctgtg

SEQ ID NO: 1355833 - DNA, 25 bp, Homo sapien
cgaggtagattgattctgtctgcca

SEQ ID NO: 1355834 - DNA, 25 bp, Homo sapien
actgctcattgttctccgattctgg

SEQ ID NO: 1355835 - DNA, 25 bp, Homo sapien
caactcgagatggatcttttgttgc

SEQ ID NO: 1355836 - DNA, 25 bp, Homo sapien
caaatctccatcactcagaagagga

SEQ ID NO: 1355837 - DNA, 25 bp, Homo sapien
cttttgttgctttgtcattgctgaa

SEQ ID NO: 1355838 - DNA, 25 bp, Homo sapien
tgccaatcatggtagacaaatctcc

SEQ ID NO: 1355839 - DNA, 25 bp, Homo sapien
tgtgccaatctaacaataatcctct

SEQ ID NO: 1355840 - DNA, 25 bp, Homo sapien
tctaggaccaagcttaaatatcaca

SEQ ID NO: 1355841 - DNA, 25 bp, Homo sapien
tcattttgtcaagatagggtttact

SEQ ID NO: 1355842 - DNA, 25 bp, Homo sapien
gcaaagtacagctattcatatgtga

SEQ ID NO: 1355843 - DNA, 25 bp, Homo sapien
gaagctgaaagtaggaaggaaccag

SEQ ID NO: 1355844 - DNA, 25 bp, Homo sapien
aagctgaaagtaggaaggaaccaga

SEQ ID NO: 1355845 - DNA, 25 bp, Homo sapien
caaacggcagaaaccagttactgta

SEQ ID NO: 1355846 - DNA, 25 bp, Homo sapien
gctattataatacccatgtacagtg

SEQ ID NO: 1355847 - DNA, 25 bp, Homo sapien
caattagaagttacggtactagcag

SEQ ID NO: 1355848 - DNA, 25 bp, Homo sapien
ctttgtgtatacacagcaaacagaa

SEQ ID NO: 1355849 - DNA, 25 bp, Homo sapien
ttgctctggaagaaagctgcgagac

SEQ ID NO: 1355850 - DNA, 25 bp, Homo sapien
tacaactagtccagcagattaagtg

SEQ ID NO: 1355851 - DNA, 25 bp, Homo sapien
gccatgcctgggtataatctatagt

SEQ ID NO: 1355852 - DNA, 25 bp, Homo sapien
ctaagtggtacaaggcagccatgcc

SEQ ID NO: 1355853 - DNA, 25 bp, Homo sapien
actcttaagtacagttggcctgctg

SEQ ID NO: 1355854 - DNA, 25 bp, Homo sapien
taatatatatgcacgactcctccct

SEQ ID NO: 1355855 - DNA, 25 bp, Homo sapien
tttggcacctatcttacaatctggc

SEQ ID NO: 1355856 - DNA, 25 bp, Homo sapien
tcaagttccccatccaaaagagtaa

SEQ ID NO: 1355857 - DNA, 25 bp, Homo sapien
tctgctaagtccataggatccctgt

SEQ ID NO: 1355858 - DNA, 25 bp, Homo sapien
aatagaccctttagcgcactgatca

SEQ ID NO: 1355859 - DNA, 25 bp, Homo sapien
gactaatagatgacccaaacaagag

SEQ ID NO: 1355860 - DNA, 25 bp, Homo sapien
tatgggcattagcacagtccccagc

SEQ ID NO: 1355861 - DNA, 25 bp, Homo sapien
ccacgccaggctaatgcccagctaa

SEQ ID NO: 1355862 - DNA, 25 bp, Homo sapien
cacgccaggctaatgcccagctaat

SEQ ID NO: 1355863 - DNA, 25 bp, Homo sapien
tatcaggattacggcacaagcccct

SEQ ID NO: 1355864 - DNA, 25 bp, Homo sapien
agttatcaggattacggcacaagcc

SEQ ID NO: 1355865 - DNA, 25 bp, Homo sapien
gttatcaggattacggcacaagccc

SEQ ID NO: 1355866 - DNA, 25 bp, Homo sapien
gagttatcaggattacggcacaagc

SEQ ID NO: 1355867 - DNA, 25 bp, Homo sapien
caagccacattcaggacagatcata

SEQ ID NO: 1355868 - DNA, 25 bp, Homo sapien
ccactaaaatcgcatctggatggtt

SEQ ID NO: 1355869 - DNA, 25 bp, Homo sapien
tgtgactcttggaagagcatccaaa

SEQ ID NO: 1355870 - DNA, 25 bp, Homo sapien
tcatatcaccggctctgtagtcctc

SEQ ID NO: 1355871 - DNA, 25 bp, Homo sapien
atttttacatcttcccaaccaacat

SEQ ID NO: 1355872 - DNA, 25 bp, Homo sapien
tttttacatcttcccaaccaacatg

SEQ ID NO: 1355873 - DNA, 25 bp, Homo sapien
tacatcttcccaaccaacatgtatc

SEQ ID NO: 1355874 - DNA, 25 bp, Homo sapien
tttacatcttcccaaccaacatgta

SEQ ID NO: 1355875 - DNA, 25 bp, Homo sapien
cactgaacccagtaagtatagaaat

SEQ ID NO: 1355876 - DNA, 25 bp, Homo sapien
tgatttcctttagtccagaattgag

SEQ ID NO: 1355877 - DNA, 25 bp, Homo sapien
gttgctctgctgaacttaagacttg

SEQ ID NO: 1355878 - DNA, 25 bp, Homo sapien
accatccagtttgtgctctttgcca

SEQ ID NO: 1355879 - DNA, 25 bp, Homo sapien
ctgcggtgcccgcaacaagacacaa

SEQ ID NO: 1355880 - DNA, 25 bp, Homo sapien
accgaaagcaggaagcgaatgtggc

SEQ ID NO: 1355881 - DNA, 25 bp, Homo sapien
cgaatgtggcgaagagacgcgcaga

SEQ ID NO: 1355882 - DNA, 25 bp, Homo sapien
cacaacagacacaccgaaagcagga

SEQ ID NO: 1355883 - DNA, 25 bp, Homo sapien
catacgtcacgtgctttgcgatttc

SEQ ID NO: 1355884 - DNA, 25 bp, Homo sapien
gaaaaccctggcttcgtagtggtgc

SEQ ID NO: 1355885 - DNA, 25 bp, Homo sapien
tgctaagcgagtcaacgtaactacc

SEQ ID NO: 1355886 - DNA, 25 bp, Homo sapien
gccaagaacagtgagatcccatacg

SEQ ID NO: 1355887 - DNA, 25 bp, Homo sapien
taggtcatccagaacaggtgtctgt

SEQ ID NO: 1355888 - DNA, 25 bp, Homo sapien
ttaggtcatccagaacaggtgtctg

SEQ ID NO: 1355889 - DNA, 25 bp, Homo sapien
cagaacaggtgtctgttcaggatct

SEQ ID NO: 1355890 - DNA, 25 bp, Homo sapien
catccagaacaggtgtctgttcagg

SEQ ID NO: 1355891 - DNA, 25 bp, Homo sapien
aatccactacttattattgacctgt

SEQ ID NO: 1355892 - DNA, 25 bp, Homo sapien
tggttgtccaaaatagtctctgatg

SEQ ID NO: 1355893 - DNA, 25 bp, Homo sapien
cttttcttggatagtctactaatga

SEQ ID NO: 1355894 - DNA, 25 bp, Homo sapien
ttactcaatccactacttattattg

SEQ ID NO: 1355895 - DNA, 25 bp, Homo sapien
tctagaagagaaatttgatctttgt

SEQ ID NO: 1355896 - DNA, 25 bp, Homo sapien
tcctcaggtcaacttatcttctaga

SEQ ID NO: 1355897 - DNA, 25 bp, Homo sapien
cctatatcagtaatgcattcatctg

SEQ ID NO: 1355898 - DNA, 25 bp, Homo sapien
ctttgtaccatgtaacctatatcag

SEQ ID NO: 1355899 - DNA, 25 bp, Homo sapien
tgccatccttattatatagacattc

SEQ ID NO: 1355900 - DNA, 25 bp, Homo sapien
gtacagtggcttcaaactgcttcca

SEQ ID NO: 1355901 - DNA, 25 bp, Homo sapien
catgctagctgtggcatgaatggaa

SEQ ID NO: 1355902 - DNA, 25 bp, Homo sapien
gacattcaccctcatgctagctgtg

SEQ ID NO: 1355903 - DNA, 25 bp, Homo sapien
taatagtataagtagtcaaagaaga

SEQ ID NO: 1355904 - DNA, 25 bp, Homo sapien
tggtttttcaatagccaaaccacag

SEQ ID NO: 1355905 - DNA, 25 bp, Homo sapien
ccaaaccacagtttttatcatatac

SEQ ID NO: 1355906 - DNA, 25 bp, Homo sapien
tttgactagttgcaaaggaactgga

SEQ ID NO: 1355907 - DNA, 25 bp, Homo sapien
gtaaggccaatcagagaccgtagaa

SEQ ID NO: 1355908 - DNA, 25 bp, Homo sapien
gaccgtagaagaggataatggactt

SEQ ID NO: 1355909 - DNA, 25 bp, Homo sapien
aatgtttggatatccaaagctagcc

SEQ ID NO: 1355910 - DNA, 25 bp, Homo sapien
acaaaatgactctgggaccactgag

SEQ ID NO: 1355911 - DNA, 25 bp, Homo sapien
tattgcactattcacccacagacct

SEQ ID NO: 1355912 - DNA, 25 bp, Homo sapien
aattcctttgttcaatattgcacta

SEQ ID NO: 1355913 - DNA, 25 bp, Homo sapien
tcaggccaatgctgggacttacatg

SEQ ID NO: 1355914 - DNA, 25 bp, Homo sapien
ctgtgagcctttccttaataaacct

SEQ ID NO: 1355915 - DNA, 25 bp, Homo sapien
tgtttattgtttgccaggctttttg

SEQ ID NO: 1355916 - DNA, 25 bp, Homo sapien
tttattgtttgccaggctttttgca

SEQ ID NO: 1355917 - DNA, 25 bp, Homo sapien
attgtttgccaggctttttgcatac

SEQ ID NO: 1355918 - DNA, 25 bp, Homo sapien
ttgtttgccaggctttttgcataca

SEQ ID NO: 1355919 - DNA, 25 bp, Homo sapien
aaaatgattgtggaaggtgtgttaa

SEQ ID NO: 1355920 - DNA, 25 bp, Homo sapien
tgagagaaccgagttactgagaggt

SEQ ID NO: 1355921 - DNA, 25 bp, Homo sapien
taggagttgggttaactgctttgga

SEQ ID NO: 1355922 - DNA, 25 bp, Homo sapien
ttcttatccactatgttatgctgac

SEQ ID NO: 1355923 - DNA, 25 bp, Homo sapien
aattccatactaggtcatctaacag

SEQ ID NO: 1355924 - DNA, 25 bp, Homo sapien
tctaacagaaacattaatccattct

SEQ ID NO: 1355925 - DNA, 25 bp, Homo sapien
taagtaacaattccatactaggtca

SEQ ID NO: 1355926 - DNA, 25 bp, Homo sapien
tggcagcactaagtaacaattccat

SEQ ID NO: 1355927 - DNA, 25 bp, Homo sapien
ttctgtacactccatgccttgatga

SEQ ID NO: 1355928 - DNA, 25 bp, Homo sapien
tctgtacactccatgccttgatgat

SEQ ID NO: 1355929 - DNA, 25 bp, Homo sapien
cttctgtacactccatgccttgatg

SEQ ID NO: 1355930 - DNA, 25 bp, Homo sapien
caaggagggcttctgtgtagtaggt

SEQ ID NO: 1355931 - DNA, 25 bp, Homo sapien
tgaggcaggcatctggcatggtgtc

SEQ ID NO: 1355932 - DNA, 25 bp, Homo sapien
tctggcatggtgtcagtgcccaaga

SEQ ID NO: 1355933 - DNA, 25 bp, Homo sapien
tgtagtaggtgacagtggtggcctg

SEQ ID NO: 1355934 - DNA, 25 bp, Homo sapien
acaggtcggcatgggtgataaagcc

SEQ ID NO: 1355935 - DNA, 25 bp, Homo sapien
taaagcccaggtcgggtgaagatgt

SEQ ID NO: 1355936 - DNA, 25 bp, Homo sapien
cggcatgggtgataaagcccaggtc

SEQ ID NO: 1355937 - DNA, 25 bp, Homo sapien
tgacaggacaggtcggcatgggtga

SEQ ID NO: 1355938 - DNA, 25 bp, Homo sapien
tgggcgaatattctctaacacttgt

SEQ ID NO: 1355939 - DNA, 25 bp, Homo sapien
ccctgaattcgtaaaatctctgctt

SEQ ID NO: 1355940 - DNA, 25 bp, Homo sapien
cccatttgatcttcttataatatct

SEQ ID NO: 1355941 - DNA, 25 bp, Homo sapien
gatcttcttataatatcttactcta

SEQ ID NO: 1355942 - DNA, 25 bp, Homo sapien
tgaggaaatctatagaccaaccaga

SEQ ID NO: 1355943 - DNA, 25 bp, Homo sapien
agagtctcctttccaccttgcctta

SEQ ID NO: 1355944 - DNA, 25 bp, Homo sapien
aatacatctcttccgcattgcttca

SEQ ID NO: 1355945 - DNA, 25 bp, Homo sapien
tggctatccccagtttaatacatct

SEQ ID NO: 1355946 - DNA, 25 bp, Homo sapien
cctccatcatgccaaacggtctaga

SEQ ID NO: 1355947 - DNA, 25 bp, Homo sapien
gacatgactgtatgtttttgccgtt

SEQ ID NO: 1355948 - DNA, 25 bp, Homo sapien
atgacatgactgtatgtttttgccg

SEQ ID NO: 1355949 - DNA, 25 bp, Homo sapien
catcatgccaaacggtctagagaag

SEQ ID NO: 1355950 - DNA, 25 bp, Homo sapien
tgagtatgctgcctgctggctttgt

SEQ ID NO: 1355951 - DNA, 25 bp, Homo sapien
tgttctcaataatgagtatgctgcc

SEQ ID NO: 1355952 - DNA, 25 bp, Homo sapien
ttctcaataatgagtatgctgcctg

SEQ ID NO: 1355953 - DNA, 25 bp, Homo sapien
ctcaataatgagtatgctgcctgct

SEQ ID NO: 1355954 - DNA, 25 bp, Homo sapien
agcaaaaacgcacaaacttctcaaa

SEQ ID NO: 1355955 - DNA, 25 bp, Homo sapien
atgaagcaaaaacgcacaaacttct

SEQ ID NO: 1355956 - DNA, 25 bp, Homo sapien
tctgagttacagaatgctgaaacgg

SEQ ID NO: 1355957 - DNA, 25 bp, Homo sapien
agttacagaatgctgaaacggggat

SEQ ID NO: 1355958 - DNA, 25 bp, Homo sapien
aaacttatagtcataaggctcatta

SEQ ID NO: 1355959 - DNA, 25 bp, Homo sapien
ttcttcatatcagagaggtctggat

SEQ ID NO: 1355960 - DNA, 25 bp, Homo sapien
cattattcttcatatcagagaggtc

SEQ ID NO: 1355961 - DNA, 25 bp, Homo sapien
tatgtttagtcatccatttcacaaa

SEQ ID NO: 1355962 - DNA, 25 bp, Homo sapien
taaggtctgggcaagatatatctct

SEQ ID NO: 1355963 - DNA, 25 bp, Homo sapien
gaggagggatgcctttccattgaga

SEQ ID NO: 1355964 - DNA, 25 bp, Homo sapien
aacccctaggtcagtgtctagcaca

SEQ ID NO: 1355965 - DNA, 25 bp, Homo sapien
taggcttatacgtgcagctttcagc

SEQ ID NO: 1355966 - DNA, 25 bp, Homo sapien
tgtactggccatgtatcattgattt

SEQ ID NO: 1355967 - DNA, 25 bp, Homo sapien
cagagtctagaacaccttaagaggt

SEQ ID NO: 1355968 - DNA, 25 bp, Homo sapien
tttaatatgagaaggctcacattcc

SEQ ID NO: 1355969 - DNA, 25 bp, Homo sapien
gcttgggagcctgctaaatacagct

SEQ ID NO: 1355970 - DNA, 25 bp, Homo sapien
tccatgcgcttgatgtcaatccaga

SEQ ID NO: 1355971 - DNA, 25 bp, Homo sapien
ctagcaaagacacatcagcgatgat

SEQ ID NO: 1355972 - DNA, 25 bp, Homo sapien
caagtaaacgtaccatccgatctct

SEQ ID NO: 1355973 - DNA, 25 bp, Homo sapien
tcagcgatgatgaagtatcctccat

SEQ ID NO: 1355974 - DNA, 25 bp, Homo sapien
ccttacaaaggagggttagcttgct

SEQ ID NO: 1355975 - DNA, 25 bp, Homo sapien
ggatcgattgccttagcctggaaat

SEQ ID NO: 1355976 - DNA, 25 bp, Homo sapien
gagccctcaggaacaggattagtgc

SEQ ID NO: 1355977 - DNA, 25 bp, Homo sapien
gacacagcaaaaggcaccatccgtg

SEQ ID NO: 1355978 - DNA, 25 bp, Homo sapien
ttacagtgacatgcatgccccagct

SEQ ID NO: 1355979 - DNA, 25 bp, Homo sapien
tttgctaacacaagccagaccaagt

SEQ ID NO: 1355980 - DNA, 25 bp, Homo sapien
tctgatattaacatgccagccaggc

SEQ ID NO: 1355981 - DNA, 25 bp, Homo sapien
tgaggcagtcagagtccatttgcta

SEQ ID NO: 1355982 - DNA, 25 bp, Homo sapien
taaatatgttaccttgcatggtgaa

SEQ ID NO: 1355983 - DNA, 25 bp, Homo sapien
tgggtcccaatgacttctaggtctt

SEQ ID NO: 1355984 - DNA, 25 bp, Homo sapien
tagaatgatggtaactaaatcccta

SEQ ID NO: 1355985 - DNA, 25 bp, Homo sapien
cagtagacagagtaatgggtcccaa

SEQ ID NO: 1355986 - DNA, 25 bp, Homo sapien
ctgtaaaggagttgcacaagtataa

SEQ ID NO: 1355987 - DNA, 25 bp, Homo sapien
tgcacaagtataaatcgtgttttgt

SEQ ID NO: 1355988 - DNA, 25 bp, Homo sapien
gatttggaccaatggaccagccaag

SEQ ID NO: 1355989 - DNA, 25 bp, Homo sapien
tgttttgttgaactgtctgtaaatg

SEQ ID NO: 1355990 - DNA, 25 bp, Homo sapien
gaaagtctttccagcacttcctatt

SEQ ID NO: 1355991 - DNA, 25 bp, Homo sapien
gcacttcctattgttattgttctct

SEQ ID NO: 1355992 - DNA, 25 bp, Homo sapien
ccagccagttacactgaaagtcttt

SEQ ID NO: 1355993 - DNA, 25 bp, Homo sapien
ttccagccagttacactgaaagtct

SEQ ID NO: 1355994 - DNA, 25 bp, Homo sapien
caatggctcttaaaatgtgatctca

SEQ ID NO: 1355995 - DNA, 25 bp, Homo sapien
actagcaatatcagcatcactgggc

SEQ ID NO: 1355996 - DNA, 25 bp, Homo sapien
tgggacccagtaatcatgtgtgcac

SEQ ID NO: 1355997 - DNA, 25 bp, Homo sapien
gactgcaggttcgataaaataggcc

SEQ ID NO: 1355998 - DNA, 25 bp, Homo sapien
tgctagacattggtaataactggta

SEQ ID NO: 1355999 - DNA, 25 bp, Homo sapien
caaccaccaggtgctaaggactaag

SEQ ID NO: 1356000 - DNA, 25 bp, Homo sapien
tgtctagtagggacatgagccacat

SEQ ID NO: 1356001 - DNA, 25 bp, Homo sapien
gcaggtaacaaaggtctagaggtct

SEQ ID NO: 1356002 - DNA, 25 bp, Homo sapien
agagtgtgtcatatttgatgcaaag

SEQ ID NO: 1356003 - DNA, 25 bp, Homo sapien
ggtcagcaattacttgcagttcctc

SEQ ID NO: 1356004 - DNA, 25 bp, Homo sapien
gcaattacttgcagttcctctctgt

SEQ ID NO: 1356005 - DNA, 25 bp, Homo sapien
atcgctgatgcagagtgtgtcatat

SEQ ID NO: 1356006 - DNA, 25 bp, Homo sapien
ggtcagaagactgtataaggagatg

SEQ ID NO: 1356007 - DNA, 25 bp, Homo sapien
gtataaggagatgagacttgcttac

SEQ ID NO: 1356008 - DNA, 25 bp, Homo sapien
aaatgataggtcagaagactgtata

SEQ ID NO: 1356009 - DNA, 25 bp, Homo sapien
tgagaaaatgataggtcagaagact

SEQ ID NO: 1356010 - DNA, 25 bp, Homo sapien
tactttccagttcttgaggatctaa

SEQ ID NO: 1356011 - DNA, 25 bp, Homo sapien
gtccagtcagaactagaccatcttt

SEQ ID NO: 1356012 - DNA, 25 bp, Homo sapien
tcttgaggatctaatgtccagtcag

SEQ ID NO: 1356013 - DNA, 25 bp, Homo sapien
tgggttatgtggagtatttagtata

SEQ ID NO: 1356014 - DNA, 25 bp, Homo sapien
catgtctgatattgtaaggctagct

SEQ ID NO: 1356015 - DNA, 25 bp, Homo sapien
gctgtagttctgcttaagagcctaa

SEQ ID NO: 1356016 - DNA, 25 bp, Homo sapien
gccctgtcaacattaactgctgcta

SEQ ID NO: 1356017 - DNA, 25 bp, Homo sapien
tcacaggaactagctataactatgg

SEQ ID NO: 1356018 - DNA, 25 bp, Homo sapien
gaataaaaacaggtgttgctccagc

SEQ ID NO: 1356019 - DNA, 25 bp, Homo sapien
tcaggggaataaaaacaggtgttgc

SEQ ID NO: 1356020 - DNA, 25 bp, Homo sapien
aaaaacaggtgttgctccagccatt

SEQ ID NO: 1356021 - DNA, 25 bp, Homo sapien
taaaaacaggtgttgctccagccat

SEQ ID NO: 1356022 - DNA, 25 bp, Homo sapien
tcatagcagtcatagaaaggcacta

SEQ ID NO: 1356023 - DNA, 25 bp, Homo sapien
gcagtcatagaaaggcactattagt

SEQ ID NO: 1356024 - DNA, 25 bp, Homo sapien
catagaaaggcactattagtatgac

SEQ ID NO: 1356025 - DNA, 25 bp, Homo sapien
gggctcatagcagtcatagaaaggc

SEQ ID NO: 1356026 - DNA, 25 bp, Homo sapien
ttttctgggtactggaaatgtatca

SEQ ID NO: 1356027 - DNA, 25 bp, Homo sapien
ctgggtactggaaatgtatcatatc

SEQ ID NO: 1356028 - DNA, 25 bp, Homo sapien
tatccagctgtacatttaagatttg

SEQ ID NO: 1356029 - DNA, 25 bp, Homo sapien
agaagttttctgggtactggaaatg

SEQ ID NO: 1356030 - DNA, 25 bp, Homo sapien
aaaagagatccatatgctcctactg

SEQ ID NO: 1356031 - DNA, 25 bp, Homo sapien
ttcatacagataggacagagctttc

SEQ ID NO: 1356032 - DNA, 25 bp, Homo sapien
cctactgtcacaaggatttctttat

SEQ ID NO: 1356033 - DNA, 25 bp, Homo sapien
cttgaatggtgttaaaaagagatcc

SEQ ID NO: 1356034 - DNA, 25 bp, Homo sapien
accttacttggtcaggatgtattac

SEQ ID NO: 1356035 - DNA, 25 bp, Homo sapien
cattcctatggtaaaccttacttgg

SEQ ID NO: 1356036 - DNA, 25 bp, Homo sapien
tacttggtcaggatgtattactttt

SEQ ID NO: 1356037 - DNA, 25 bp, Homo sapien
aactaatcctgcattcctatggtaa

SEQ ID NO: 1356038 - DNA, 25 bp, Homo sapien
gattctcaccagtgtcaaaccctgt

SEQ ID NO: 1356039 - DNA, 25 bp, Homo sapien
ccagggagtgagatctatgaagagc

SEQ ID NO: 1356040 - DNA, 25 bp, Homo sapien
tcattatggatttgtataggctggg

SEQ ID NO: 1356041 - DNA, 25 bp, Homo sapien
accctgtgacacaggtaagtttcac

SEQ ID NO: 1356042 - DNA, 25 bp, Homo sapien
gctatcgattgctgcaatctttgat

SEQ ID NO: 1356043 - DNA, 25 bp, Homo sapien
tctggaaagccttggccaagattca

SEQ ID NO: 1356044 - DNA, 25 bp, Homo sapien
aaagcctcgtgtatactgattcagg

SEQ ID NO: 1356045 - DNA, 25 bp, Homo sapien
tgcagccaatttggtaaattcaatc

SEQ ID NO: 1356046 - DNA, 25 bp, Homo sapien
tatcaagtccttcaatccgttttgc

SEQ ID NO: 1356047 - DNA, 25 bp, Homo sapien
cacacattactatcaagtccttcaa

SEQ ID NO: 1356048 - DNA, 25 bp, Homo sapien
ccttcaatccgttttgcatttgtga

SEQ ID NO: 1356049 - DNA, 25 bp, Homo sapien
caatccgttttgcatttgtgaattt

SEQ ID NO: 1356050 - DNA, 25 bp, Homo sapien
agtgcatgttctctactcagtccaa

SEQ ID NO: 1356051 - DNA, 25 bp, Homo sapien
ggagatcatgcccttgttgagagtg

SEQ ID NO: 1356052 - DNA, 25 bp, Homo sapien
tattattgcccacctaaggagacct

SEQ ID NO: 1356053 - DNA, 25 bp, Homo sapien
catgtgtgatctttcctatgcccaa

SEQ ID NO: 1356054 - DNA, 25 bp, Homo sapien
caggcgatctgccctactcggcctc

SEQ ID NO: 1356055 - DNA, 25 bp, Homo sapien
aggcgatctgccctactcggcctcc

SEQ ID NO: 1356056 - DNA, 25 bp, Homo sapien
tcaggcgatctgccctactcggcct

SEQ ID NO: 1356057 - DNA, 25 bp, Homo sapien
ctcaggcgatctgccctactcggcc

SEQ ID NO: 1356058 - DNA, 25 bp, Homo sapien
acccacccagagcaatcctgcaagc

SEQ ID NO: 1356059 - DNA, 25 bp, Homo sapien
attcatggaaagtgctctacacagg

SEQ ID NO: 1356060 - DNA, 25 bp, Homo sapien
gaaagtgctctacacaggtgtacca

SEQ ID NO: 1356061 - DNA, 25 bp, Homo sapien
tggaaagtgctctacacaggtgtac

SEQ ID NO: 1356062 - DNA, 25 bp, Homo sapien
ggaagagacaagtgcataagatgcc

SEQ ID NO: 1356063 - DNA, 25 bp, Homo sapien
tacatgcttcagattgaacagtggg

SEQ ID NO: 1356064 - DNA, 25 bp, Homo sapien
gatgccttagaagctccgaagctat

SEQ ID NO: 1356065 - DNA, 25 bp, Homo sapien
cagccagactgaatggtaacagaaa

SEQ ID NO: 1356066 - DNA, 25 bp, Homo sapien
ggaactctatacaaccctggtggga

SEQ ID NO: 1356067 - DNA, 25 bp, Homo sapien
tgagataccactagattcccatcag

SEQ ID NO: 1356068 - DNA, 25 bp, Homo sapien
caaagacaaatcagcagcgtgaggg

SEQ ID NO: 1356069 - DNA, 25 bp, Homo sapien
gggcaaaagatttgacagccacttc

SEQ ID NO: 1356070 - DNA, 25 bp, Homo sapien
tgacttaccaacaatcagccgcctt

SEQ ID NO: 1356071 - DNA, 25 bp, Homo sapien
tgtaaaggaccacgagaacctcctg

SEQ ID NO: 1356072 - DNA, 25 bp, Homo sapien
tatggaaggattcggctaagacaac

SEQ ID NO: 1356073 - DNA, 25 bp, Homo sapien
gatatcttaagagccaaaaggtcct

SEQ ID NO: 1356074 - DNA, 25 bp, Homo sapien
cccctctatcagatcggcttcctcc

SEQ ID NO: 1356075 - DNA, 25 bp, Homo sapien
tccccctctatcagatcggcttcct

SEQ ID NO: 1356076 - DNA, 25 bp, Homo sapien
ctccccctctatcagatcggcttcc

SEQ ID NO: 1356077 - DNA, 25 bp, Homo sapien
ccctctatcagatcggcttcctcca

SEQ ID NO: 1356078 - DNA, 25 bp, Homo sapien
ccctgtcacaacttgagtagagatc

SEQ ID NO: 1356079 - DNA, 25 bp, Homo sapien
aaccctgtcacaacttgagtagaga

SEQ ID NO: 1356080 - DNA, 25 bp, Homo sapien
accctgtcacaacttgagtagagat

SEQ ID NO: 1356081 - DNA, 25 bp, Homo sapien
ttggggacaaataaacatctctacg

SEQ ID NO: 1356082 - DNA, 25 bp, Homo sapien
ggacaaataaacatctctacgagag

SEQ ID NO: 1356083 - DNA, 25 bp, Homo sapien
ggggacaaataaacatctctacgag

SEQ ID NO: 1356084 - DNA, 25 bp, Homo sapien
acaaataaacatctctacgagaggg

SEQ ID NO: 1356085 - DNA, 25 bp, Homo sapien
aatgaagagctttcctgggcgatct

SEQ ID NO: 1356086 - DNA, 25 bp, Homo sapien
gcactactgcgcaatctggatgctt

SEQ ID NO: 1356087 - DNA, 25 bp, Homo sapien
ttaggaggactgaaccgcgaagccg

SEQ ID NO: 1356088 - DNA, 25 bp, Homo sapien
tgctttttaaggtatggctatccat

SEQ ID NO: 1356089 - DNA, 25 bp, Homo sapien
caccagtggcggctgtcagttagga

SEQ ID NO: 1356090 - DNA, 25 bp, Homo sapien
gaatacctgccccatgtaagtgcta

SEQ ID NO: 1356091 - DNA, 25 bp, Homo sapien
ggctgaaccaatcaagacaactaga

SEQ ID NO: 1356092 - DNA, 25 bp, Homo sapien
taaatcagagttggacagtcaggct

SEQ ID NO: 1356093 - DNA, 25 bp, Homo sapien
tcaaaactcctagtgtgtgaagtag

SEQ ID NO: 1356094 - DNA, 25 bp, Homo sapien
ggttagtgctatcccaaatagtcca

SEQ ID NO: 1356095 - DNA, 25 bp, Homo sapien
gagccctggcatacgtagtctaata

SEQ ID NO: 1356096 - DNA, 25 bp, Homo sapien
cacggtggcataaagaggagagaat

SEQ ID NO: 1356097 - DNA, 25 bp, Homo sapien
cgacttctatgttgggagagggcct

SEQ ID NO: 1356098 - DNA, 25 bp, Homo sapien
caagttcctaaagcagatgtacgta

SEQ ID NO: 1356099 - DNA, 25 bp, Homo sapien
taaacctttttcgatccctgagcag

SEQ ID NO: 1356100 - DNA, 25 bp, Homo sapien
tatataatgaccagcacatggcctg

SEQ ID NO: 1356101 - DNA, 25 bp, Homo sapien
cacagacaggcaagcagttgctcag

SEQ ID NO: 1356102 - DNA, 25 bp, Homo sapien
agcagaagtagagaatccgaggatt

SEQ ID NO: 1356103 - DNA, 25 bp, Homo sapien
ctctaccgctaagagagcagaggct

SEQ ID NO: 1356104 - DNA, 25 bp, Homo sapien
tgtcttcaggaattttgctctaccg

SEQ ID NO: 1356105 - DNA, 25 bp, Homo sapien
agaatccgaggattttggaagaaga

SEQ ID NO: 1356106 - DNA, 25 bp, Homo sapien
tttgcactcagtgcgcgctttggcg

SEQ ID NO: 1356107 - DNA, 25 bp, Homo sapien
cagggattgactctggggtttgcac

SEQ ID NO: 1356108 - DNA, 25 bp, Homo sapien
ctaggctcgagtcccgactgggctt

SEQ ID NO: 1356109 - DNA, 25 bp, Homo sapien
ccggctgggcgggattcggacgcgg

SEQ ID NO: 1356110 - DNA, 25 bp, Homo sapien
cgggatttgggcagttccgggcttg

SEQ ID NO: 1356111 - DNA, 25 bp, Homo sapien
cagttccgggcttgcgggaacaagg

SEQ ID NO: 1356112 - DNA, 25 bp, Homo sapien
ggcagttccgggcttgcgggaacaa

SEQ ID NO: 1356113 - DNA, 25 bp, Homo sapien
atttgggcagttccgggcttgcggg

SEQ ID NO: 1356114 - DNA, 25 bp, Homo sapien
ggcgcgcgatgacggtggggtccgc

SEQ ID NO: 1356115 - DNA, 25 bp, Homo sapien
cgcgatgacggtggggtccgccgcg

SEQ ID NO: 1356116 - DNA, 25 bp, Homo sapien
ggggtccgccgcgatcgcggaatgg

SEQ ID NO: 1356117 - DNA, 25 bp, Homo sapien
atgacggtggggtccgccgcgatcg

SEQ ID NO: 1356118 - DNA, 25 bp, Homo sapien
tcggatgtatgcgactgatcgggtt

SEQ ID NO: 1356119 - DNA, 25 bp, Homo sapien
cttggatatgggtatggaatttggc

SEQ ID NO: 1356120 - DNA, 25 bp, Homo sapien
gccccagggctcgaatcggatgtat

SEQ ID NO: 1356121 - DNA, 25 bp, Homo sapien
tataggacgaggactggtttgcaag

SEQ ID NO: 1356122 - DNA, 25 bp, Homo sapien
tgaaattactagctaataggccggg

SEQ ID NO: 1356123 - DNA, 25 bp, Homo sapien
tctggtagggagagacaagcaatag

SEQ ID NO: 1356124 - DNA, 25 bp, Homo sapien
caaaaaggccgtgtaagtgagtcct

SEQ ID NO: 1356125 - DNA, 25 bp, Homo sapien
gaggaggtgacattagaactcagaa

SEQ ID NO: 1356126 - DNA, 25 bp, Homo sapien
tatagtaatagagtccccaagtttc

SEQ ID NO: 1356127 - DNA, 25 bp, Homo sapien
ggctgtatgaccaaattgtggccaa

SEQ ID NO: 1356128 - DNA, 25 bp, Homo sapien
caatatttaggagagtactcagtcc

SEQ ID NO: 1356129 - DNA, 25 bp, Homo sapien
caccctctgttatggctaggttggc

SEQ ID NO: 1356130 - DNA, 25 bp, Homo sapien
ccacttacctaggatgtttgacaat

SEQ ID NO: 1356131 - DNA, 25 bp, Homo sapien
tctgtaattgctgtaagaaatgtca

SEQ ID NO: 1356132 - DNA, 25 bp, Homo sapien
taatctgtaattgctgtaagaaatg

SEQ ID NO: 1356133 - DNA, 25 bp, Homo sapien
taagaaatgtcaaccacttacctag

SEQ ID NO: 1356134 - DNA, 25 bp, Homo sapien
gggacccattgtacacttggccaaa

SEQ ID NO: 1356135 - DNA, 25 bp, Homo sapien
ccttgtagccttgatataatggaga

SEQ ID NO: 1356136 - DNA, 25 bp, Homo sapien
gggtcaactgtctaaaggtctcagg

SEQ ID NO: 1356137 - DNA, 25 bp, Homo sapien
agtggtggcaactcatgatccctcc

SEQ ID NO: 1356138 - DNA, 25 bp, Homo sapien
ttagatctttagcttatgcgacata

SEQ ID NO: 1356139 - DNA, 25 bp, Homo sapien
gcttatgcgacatatatctcttggt

SEQ ID NO: 1356140 - DNA, 25 bp, Homo sapien
tctcctttagtactcgggcctgttc

SEQ ID NO: 1356141 - DNA, 25 bp, Homo sapien
ttttgtatctcattttgaagttggg

SEQ ID NO: 1356142 - DNA, 25 bp, Homo sapien
ttcgctctgccatactaagtttgtg

SEQ ID NO: 1356143 - DNA, 25 bp, Homo sapien
cgctctgccatactaagtttgtgat

SEQ ID NO: 1356144 - DNA, 25 bp, Homo sapien
cagaaaaacgaaccacaaggtgatg

SEQ ID NO: 1356145 - DNA, 25 bp, Homo sapien
acagaaaaacgaaccacaaggtgat

SEQ ID NO: 1356146 - DNA, 25 bp, Homo sapien
tcttccagcaactgggccctctccc

SEQ ID NO: 1356147 - DNA, 25 bp, Homo sapien
ctgaagtttactagtgagggtcttc

SEQ ID NO: 1356148 - DNA, 25 bp, Homo sapien
ccatcatctgctgatactttatttg

SEQ ID NO: 1356149 - DNA, 25 bp, Homo sapien
gcagattcagcttttacacattcca

SEQ ID NO: 1356150 - DNA, 25 bp, Homo sapien
agactccttggatttcaagtatgtc

SEQ ID NO: 1356151 - DNA, 25 bp, Homo sapien
actccttggatttcaagtatgtctg

SEQ ID NO: 1356152 - DNA, 25 bp, Homo sapien
gactccttggatttcaagtatgtct

SEQ ID NO: 1356153 - DNA, 25 bp, Homo sapien
tgttcttctgcccaccatcttttct

SEQ ID NO: 1356154 - DNA, 25 bp, Homo sapien
aattcttcctcttggccctggtgtg

SEQ ID NO: 1356155 - DNA, 25 bp, Homo sapien
taagcaggttttcctgttcttctgc

SEQ ID NO: 1356156 - DNA, 25 bp, Homo sapien
cacagagtgagaagtaggaaatggc

SEQ ID NO: 1356157 - DNA, 25 bp, Homo sapien
gcaggtttccataatcgacagatga

SEQ ID NO: 1356158 - DNA, 25 bp, Homo sapien
agcaggtttccataatcgacagatg

SEQ ID NO: 1356159 - DNA, 25 bp, Homo sapien
aggtttccataatcgacagatgaat

SEQ ID NO: 1356160 - DNA, 25 bp, Homo sapien
caggtttccataatcgacagatgaa

SEQ ID NO: 1356161 - DNA, 25 bp, Homo sapien
aaagtcatcccgctttttgtctagc

SEQ ID NO: 1356162 - DNA, 25 bp, Homo sapien
ggttcctcatagtactttttctcca

SEQ ID NO: 1356163 - DNA, 25 bp, Homo sapien
tacaaaagtcatcccgctttttgtc

SEQ ID NO: 1356164 - DNA, 25 bp, Homo sapien
aagtcatcccgctttttgtctagct

SEQ ID NO: 1356165 - DNA, 25 bp, Homo sapien
tccaaatccatgtaaatgtgataga

SEQ ID NO: 1356166 - DNA, 25 bp, Homo sapien
caaatccatgtaaatgtgatagaaa

SEQ ID NO: 1356167 - DNA, 25 bp, Homo sapien
aatccaaatccatgtaaatgtgata

SEQ ID NO: 1356168 - DNA, 25 bp, Homo sapien
ccaaatccatgtaaatgtgatagaa

SEQ ID NO: 1356169 - DNA, 25 bp, Homo sapien
agagttcttcatatagacttcagtg

SEQ ID NO: 1356170 - DNA, 25 bp, Homo sapien
catatagacttcagtggcctccctc

SEQ ID NO: 1356171 - DNA, 25 bp, Homo sapien
gttcttcatatagacttcagtggcc

SEQ ID NO: 1356172 - DNA, 25 bp, Homo sapien
ttcatatagacttcagtggcctccc

SEQ ID NO: 1356173 - DNA, 25 bp, Homo sapien
gatcccctctgctgatagcattgat

SEQ ID NO: 1356174 - DNA, 25 bp, Homo sapien
ttcatcttgtagtttctcaagctgg

SEQ ID NO: 1356175 - DNA, 25 bp, Homo sapien
tcatcttgtagtttctcaagctggg

SEQ ID NO: 1356176 - DNA, 25 bp, Homo sapien
cttccggatacagagtcggggcaga

SEQ ID NO: 1356177 - DNA, 25 bp, Homo sapien
cggtgaatgggcagatcgaagacaa

SEQ ID NO: 1356178 - DNA, 25 bp, Homo sapien
tgggcagatcgaagacaaaacattt

SEQ ID NO: 1356179 - DNA, 25 bp, Homo sapien
cagagtcggggcagattaaaatttt

SEQ ID NO: 1356180 - DNA, 25 bp, Homo sapien
agagaaacataataaagaaatttgc

SEQ ID NO: 1356181 - DNA, 25 bp, Homo sapien
ctagagaaacataataaagaaattt

SEQ ID NO: 1356182 - DNA, 25 bp, Homo sapien
tagagaaacataataaagaaatttg

SEQ ID NO: 1356183 - DNA, 25 bp, Homo sapien
cttgcgttagcttcagggaatactc

SEQ ID NO: 1356184 - DNA, 25 bp, Homo sapien
tcagggaatactccaggtactcatc

SEQ ID NO: 1356185 - DNA, 25 bp, Homo sapien
ggattttgatcggattcgatgtgtc

SEQ ID NO: 1356186 - DNA, 25 bp, Homo sapien
caggtgaggattttgatcggattcg

SEQ ID NO: 1356187 - DNA, 25 bp, Homo sapien
gatctctcctctgtacttgcattat

SEQ ID NO: 1356188 - DNA, 25 bp, Homo sapien
tctctcctctgtacttgcattattt

SEQ ID NO: 1356189 - DNA, 25 bp, Homo sapien
ggatctctcctctgtacttgcatta

SEQ ID NO: 1356190 - DNA, 25 bp, Homo sapien
ctctcctctgtacttgcattatttt

SEQ ID NO: 1356191 - DNA, 25 bp, Homo sapien
agatccaggagtcattctggttgtc

SEQ ID NO: 1356192 - DNA, 25 bp, Homo sapien
tccaggagtcattctggttgtcacc

SEQ ID NO: 1356193 - DNA, 25 bp, Homo sapien
gaagatccaggagtcattctggttg

SEQ ID NO: 1356194 - DNA, 25 bp, Homo sapien
gatccaggagtcattctggttgtca

SEQ ID NO: 1356195 - DNA, 25 bp, Homo sapien
aagcaggactaaggtgtgttctggc

SEQ ID NO: 1356196 - DNA, 25 bp, Homo sapien
gtcaagcaggactaaggtgtgttct

SEQ ID NO: 1356197 - DNA, 25 bp, Homo sapien
cagtgtcaagcaggactaaggtgtg

SEQ ID NO: 1356198 - DNA, 25 bp, Homo sapien
caggactaaggtgtgttctggcttt

SEQ ID NO: 1356199 - DNA, 25 bp, Homo sapien
cagattcctttggtgtgagatttca

SEQ ID NO: 1356200 - DNA, 25 bp, Homo sapien
attcctttggtgtgagatttcactg

SEQ ID NO: 1356201 - DNA, 25 bp, Homo sapien
gatttcactgtggagcccagagaga

SEQ ID NO: 1356202 - DNA, 25 bp, Homo sapien
ccagattcctttggtgtgagatttc

SEQ ID NO: 1356203 - DNA, 25 bp, Homo sapien
tgtaaaggagagatgggataagaag

SEQ ID NO: 1356204 - DNA, 25 bp, Homo sapien
gtaaaggagagatgggataagaagg

SEQ ID NO: 1356205 - DNA, 25 bp, Homo sapien
taaaggagagatgggataagaaggg

SEQ ID NO: 1356206 - DNA, 25 bp, Homo sapien
ctgtaaaggagagatgggataagaa

SEQ ID NO: 1356207 - DNA, 25 bp, Homo sapien
caggaagtcaagactgtggtgagct

SEQ ID NO: 1356208 - DNA, 25 bp, Homo sapien
ctgagatcttgccactgtactccag

SEQ ID NO: 1356209 - DNA, 25 bp, Homo sapien
tgagatcttgccactgtactccagc

SEQ ID NO: 1356210 - DNA, 25 bp, Homo sapien
gcccaggaagtcaagactgtggtga

SEQ ID NO: 1356211 - DNA, 25 bp, Homo sapien
aactgtaactcatggtgaacagtca

SEQ ID NO: 1356212 - DNA, 25 bp, Homo sapien
tgtaactcatggtgaacagtcaatt

SEQ ID NO: 1356213 - DNA, 25 bp, Homo sapien
tcaactgtaactcatggtgaacagt

SEQ ID NO: 1356214 - DNA, 25 bp, Homo sapien
gtaactcatggtgaacagtcaattg

SEQ ID NO: 1356215 - DNA, 25 bp, Homo sapien
cataatggatgctgactgtgttggg

SEQ ID NO: 1356216 - DNA, 25 bp, Homo sapien
ataatggatgctgactgtgttgggg

SEQ ID NO: 1356217 - DNA, 25 bp, Homo sapien
tcataatggatgctgactgtgttgg

SEQ ID NO: 1356218 - DNA, 25 bp, Homo sapien
cctcataatggatgctgactgtgtt

SEQ ID NO: 1356219 - DNA, 25 bp, Homo sapien
tgcggtagaggcccacaattgccac

SEQ ID NO: 1356220 - DNA, 25 bp, Homo sapien
cctgtgcggtagaggcccacaattg

SEQ ID NO: 1356221 - DNA, 25 bp, Homo sapien
ggtagaggcccacaattgccaccac

SEQ ID NO: 1356222 - DNA, 25 bp, Homo sapien
ctgtgcggtagaggcccacaattgc

SEQ ID NO: 1356223 - DNA, 25 bp, Homo sapien
gattcgccaccagttccccattagt

SEQ ID NO: 1356224 - DNA, 25 bp, Homo sapien
ttcgccaccagttccccattagtgt

SEQ ID NO: 1356225 - DNA, 25 bp, Homo sapien
tggattcgccaccagttccccatta

SEQ ID NO: 1356226 - DNA, 25 bp, Homo sapien
ttctggattcgccaccagttcccca

SEQ ID NO: 1356227 - DNA, 25 bp, Homo sapien
aagagttggaatgaattagaatttc

SEQ ID NO: 1356228 - DNA, 25 bp, Homo sapien
agagttggaatgaattagaatttcc

SEQ ID NO: 1356229 - DNA, 25 bp, Homo sapien
gggaagagttggaatgaattagaat

SEQ ID NO: 1356230 - DNA, 25 bp, Homo sapien
ctgcaagggaagagttggaatgaat

SEQ ID NO: 1356231 - DNA, 25 bp, Homo sapien
tctggtgaaaagaacccatttgtag

SEQ ID NO: 1356232 - DNA, 25 bp, Homo sapien
ccttctggtgaaaagaacccatttg

SEQ ID NO: 1356233 - DNA, 25 bp, Homo sapien
tgctgttctttccttctggtgaaaa

SEQ ID NO: 1356234 - DNA, 25 bp, Homo sapien
cccatttgtagctctttccatttct

SEQ ID NO: 1356235 - DNA, 25 bp, Homo sapien
taagcaacctttgtaatggcttcag

SEQ ID NO: 1356236 - DNA, 25 bp, Homo sapien
tttatttcaccccttcagtgttgtg

SEQ ID NO: 1356237 - DNA, 25 bp, Homo sapien
caaataattagaagttaagcaacct

SEQ ID NO: 1356238 - DNA, 25 bp, Homo sapien
tttctttcgctggatcgctggactt

SEQ ID NO: 1356239 - DNA, 25 bp, Homo sapien
tggaagcaactaccctgtgattcaa

SEQ ID NO: 1356240 - DNA, 25 bp, Homo sapien
tcactggctacttctactaaacagg

SEQ ID NO: 1356241 - DNA, 25 bp, Homo sapien
caagaaaagcataaccccaaatgac

SEQ ID NO: 1356242 - DNA, 25 bp, Homo sapien
ttacaatcacggcataaggcgggag

SEQ ID NO: 1356243 - DNA, 25 bp, Homo sapien
cttcaaatgatgaatcggcgtgttt

SEQ ID NO: 1356244 - DNA, 25 bp, Homo sapien
caaggccctgacagttgattgattt

SEQ ID NO: 1356245 - DNA, 25 bp, Homo sapien
aggccctgacagttgattgatttga

SEQ ID NO: 1356246 - DNA, 25 bp, Homo sapien
taagaggatcaaattgggttcgtag

SEQ ID NO: 1356247 - DNA, 25 bp, Homo sapien
taagcaagcgatagagcacatgggc

SEQ ID NO: 1356248 - DNA, 25 bp, Homo sapien
tctagaagggcaaaagtgaacacag

SEQ ID NO: 1356249 - DNA, 25 bp, Homo sapien
gaaatatgctcccaaagtagtgact

SEQ ID NO: 1356250 - DNA, 25 bp, Homo sapien
tatggctgtcgactaaaggtcatcc

SEQ ID NO: 1356251 - DNA, 25 bp, Homo sapien
gaagttacttcaactcataaaaatg

SEQ ID NO: 1356252 - DNA, 25 bp, Homo sapien
ttttctactgtgaagttacttcaac

SEQ ID NO: 1356253 - DNA, 25 bp, Homo sapien
gcttttaatggcagagttattcttt

SEQ ID NO: 1356254 - DNA, 25 bp, Homo sapien
acctttgtagcaatggagcttggaa

SEQ ID NO: 1356255 - DNA, 25 bp, Homo sapien
tgtgtttgcactacatgcagagctg

SEQ ID NO: 1356256 - DNA, 25 bp, Homo sapien
tctgcaaactatggcttatgggtgc

SEQ ID NO: 1356257 - DNA, 25 bp, Homo sapien
agattaccagccattgccataaaga

SEQ ID NO: 1356258 - DNA, 25 bp, Homo sapien
gagactgtatgacctgcaaagccat

SEQ ID NO: 1356259 - DNA, 25 bp, Homo sapien
agtggtaccagcttatgagatttcc

SEQ ID NO: 1356260 - DNA, 25 bp, Homo sapien
tgtctactgctggtcatctggaaga

SEQ ID NO: 1356261 - DNA, 25 bp, Homo sapien
ggacattgtagacttggccagacca

SEQ ID NO: 1356262 - DNA, 25 bp, Homo sapien
gaagctagggtggttgtccttgata

SEQ ID NO: 1356263 - DNA, 25 bp, Homo sapien
ctttcgtcgtctcattttcgtctgg

SEQ ID NO: 1356264 - DNA, 25 bp, Homo sapien
cctcttttagtagttgctcctgttc

SEQ ID NO: 1356265 - DNA, 25 bp, Homo sapien
ttgaaatccctcttttagtagttgc

SEQ ID NO: 1356266 - DNA, 25 bp, Homo sapien
cattttcgtctggagatcctgtatc

SEQ ID NO: 1356267 - DNA, 25 bp, Homo sapien
gagtaaagtgtagcatcaggcaaat

SEQ ID NO: 1356268 - DNA, 25 bp, Homo sapien
tgacataacaccgaaataagcaaag

SEQ ID NO: 1356269 - DNA, 25 bp, Homo sapien
taattttctctgagtcacgcaagac

SEQ ID NO: 1356270 - DNA, 25 bp, Homo sapien
cacgcaagacgtaaatgtcatactt

SEQ ID NO: 1356271 - DNA, 25 bp, Homo sapien
gagtgccagactgaccatactgagt

SEQ ID NO: 1356272 - DNA, 25 bp, Homo sapien
aggtaagaaatctgagtgccagact

SEQ ID NO: 1356273 - DNA, 25 bp, Homo sapien
agaaatctgagtgccagactgacca

SEQ ID NO: 1356274 - DNA, 25 bp, Homo sapien
agactgaccatactgagtttctgca

SEQ ID NO: 1356275 - DNA, 25 bp, Homo sapien
aataaggatatagttcttgctacat

SEQ ID NO: 1356276 - DNA, 25 bp, Homo sapien
caatgccccaccgagatacagatat

SEQ ID NO: 1356277 - DNA, 25 bp, Homo sapien
gttcttgctacatatgttattaagc

SEQ ID NO: 1356278 - DNA, 25 bp, Homo sapien
tgatgcctagcagataatagcttcc

SEQ ID NO: 1356279 - DNA, 25 bp, Homo sapien
gctgaagcctgtgcagactcagctt

SEQ ID NO: 1356280 - DNA, 25 bp, Homo sapien
ctgaagtttaagagcgagggtcctc

SEQ ID NO: 1356281 - DNA, 25 bp, Homo sapien
catttttgctgaagcctgtgcagac

SEQ ID NO: 1356282 - DNA, 25 bp, Homo sapien
gtttaagagcgagggtcctctcttg

SEQ ID NO: 1356283 - DNA, 25 bp, Homo sapien
tatgccctactcagagatgacctcg

SEQ ID NO: 1356284 - DNA, 25 bp, Homo sapien
tacacttacctgtcgttgttgctga

SEQ ID NO: 1356285 - DNA, 25 bp, Homo sapien
tgacctcggcaagtaagacacacct

SEQ ID NO: 1356286 - DNA, 25 bp, Homo sapien
taaagggtcccatgtttatccagtc

SEQ ID NO: 1356287 - DNA, 25 bp, Homo sapien
tgtctggagaattgcatcagtcata

SEQ ID NO: 1356288 - DNA, 25 bp, Homo sapien
ctgtctggagaattgcatcagtcat

SEQ ID NO: 1356289 - DNA, 25 bp, Homo sapien
gaactgttaatgctgtggtcccata

SEQ ID NO: 1356290 - DNA, 25 bp, Homo sapien
ggtcaaattccctgtcggagcgaca

SEQ ID NO: 1356291 - DNA, 25 bp, Homo sapien
tcctggcaagccgatcagaacatcc

SEQ ID NO: 1356292 - DNA, 25 bp, Homo sapien
gagcgacagacacatgctcctggca

SEQ ID NO: 1356293 - DNA, 25 bp, Homo sapien
gatgagcacctaggacatatctggt

SEQ ID NO: 1356294 - DNA, 25 bp, Homo sapien
taggaggcaggtcagcagctttcca

SEQ ID NO: 1356295 - DNA, 25 bp, Homo sapien
tgtaaagccagtttgcagcctaaat

SEQ ID NO: 1356296 - DNA, 25 bp, Homo sapien
ttagacccacctgacctgtaaagcc

SEQ ID NO: 1356297 - DNA, 25 bp, Homo sapien
tgaaaatgacctgaagtaaagctga

SEQ ID NO: 1356298 - DNA, 25 bp, Homo sapien
taaagctgagcaacgatctgatgat

SEQ ID NO: 1356299 - DNA, 25 bp, Homo sapien
tcgaataaattcccgccttcacttc

SEQ ID NO: 1356300 - DNA, 25 bp, Homo sapien
ttcttctagaggactgaaaatgacc

SEQ ID NO: 1356301 - DNA, 25 bp, Homo sapien
gctgaagtcgctttctttttggagg

SEQ ID NO: 1356302 - DNA, 25 bp, Homo sapien
ttcagggctgagattgatagcttta

SEQ ID NO: 1356303 - DNA, 25 bp, Homo sapien
gatagctttatgtcaactgttagag

SEQ ID NO: 1356304 - DNA, 25 bp, Homo sapien
ccactttctgctgaagtcgctttct

SEQ ID NO: 1356305 - DNA, 25 bp, Homo sapien
gctgagttctctatctgggccaagg

SEQ ID NO: 1356306 - DNA, 25 bp, Homo sapien
tcatagtgggcaatagccttttgca

SEQ ID NO: 1356307 - DNA, 25 bp, Homo sapien
agttctctatctgggccaaggccag

SEQ ID NO: 1356308 - DNA, 25 bp, Homo sapien
caaggccaggactgcgttctccatg

SEQ ID NO: 1356309 - DNA, 25 bp, Homo sapien
gaacaaatgataatgtttctggtgg

SEQ ID NO: 1356310 - DNA, 25 bp, Homo sapien
atgataatgtttctggtggtaaaga

SEQ ID NO: 1356311 - DNA, 25 bp, Homo sapien
caaatgataatgtttctggtggtaa

SEQ ID NO: 1356312 - DNA, 25 bp, Homo sapien
aagaacaaatgataatgtttctggt

SEQ ID NO: 1356313 - DNA, 25 bp, Homo sapien
gcaggtccagttcactagggcaatt

SEQ ID NO: 1356314 - DNA, 25 bp, Homo sapien
cattggtgccatctagaatttaaca

SEQ ID NO: 1356315 - DNA, 25 bp, Homo sapien
tgcagtattgttcaaaagcgctttc

SEQ ID NO: 1356316 - DNA, 25 bp, Homo sapien
taaacaatgagcagaagtactagga

SEQ ID NO: 1356317 - DNA, 25 bp, Homo sapien
ttcctgcggtgaacgggccgatcaa

SEQ ID NO: 1356318 - DNA, 25 bp, Homo sapien
tcatcttgtagtttctcgagctggg

SEQ ID NO: 1356319 - DNA, 25 bp, Homo sapien
gagtctgggcaggttaaaagtttca

SEQ ID NO: 1356320 - DNA, 25 bp, Homo sapien
acttgttgcacaaattcggggtcca

SEQ ID NO: 1356321 - DNA, 25 bp, Homo sapien
cttggactagcacacggttcatgtt

SEQ ID NO: 1356322 - DNA, 25 bp, Homo sapien
atattttaggctcttcaggctggat

SEQ ID NO: 1356323 - DNA, 25 bp, Homo sapien
aactctgttattgaagcatgacaac

SEQ ID NO: 1356324 - DNA, 25 bp, Homo sapien
gctgtagtttgccaatgcttggact

SEQ ID NO: 1356325 - DNA, 25 bp, Homo sapien
ctatggctaagtagaagatcacaaa

SEQ ID NO: 1356326 - DNA, 25 bp, Homo sapien
tatggctaagtagaagatcacaaac

SEQ ID NO: 1356327 - DNA, 25 bp, Homo sapien
tctatggctaagtagaagatcacaa

SEQ ID NO: 1356328 - DNA, 25 bp, Homo sapien
atggctaagtagaagatcacaaacc

SEQ ID NO: 1356329 - DNA, 25 bp, Homo sapien
tctaggaatagccagctgaagacat

SEQ ID NO: 1356330 - DNA, 25 bp, Homo sapien
tcctcatttatcagttgaagctctc

SEQ ID NO: 1356331 - DNA, 25 bp, Homo sapien
gctggaaaactagcaatagtaaact

SEQ ID NO: 1356332 - DNA, 25 bp, Homo sapien
cagggagataaaattaacctaatca

SEQ ID NO: 1356333 - DNA, 25 bp, Homo sapien
ggattttgatcggattctatgtgtc

SEQ ID NO: 1356334 - DNA, 25 bp, Homo sapien
ttcagcttcagggagtatgtcaggt

SEQ ID NO: 1356335 - DNA, 25 bp, Homo sapien
caggtgaggattttgatcggattct

SEQ ID NO: 1356336 - DNA, 25 bp, Homo sapien
gggagtatgtcaggtactcatctgg

SEQ ID NO: 1356337 - DNA, 25 bp, Homo sapien
cagtgtcagttctaaagtggataca

SEQ ID NO: 1356338 - DNA, 25 bp, Homo sapien
cagttctaaagtggatacatgggat

SEQ ID NO: 1356339 - DNA, 25 bp, Homo sapien
ctcctaacctaagtgtcagtgtcag

SEQ ID NO: 1356340 - DNA, 25 bp, Homo sapien
taacctaagtgtcagtgtcagttct

SEQ ID NO: 1356341 - DNA, 25 bp, Homo sapien
tattgtacacgaaggtgctgctcag

SEQ ID NO: 1356342 - DNA, 25 bp, Homo sapien
atgctattgtacacgaaggtgctgc

SEQ ID NO: 1356343 - DNA, 25 bp, Homo sapien
ctattgtacacgaaggtgctgctca

SEQ ID NO: 1356344 - DNA, 25 bp, Homo sapien
gctattgtacacgaaggtgctgctc

SEQ ID NO: 1356345 - DNA, 25 bp, Homo sapien
gaccctcggtgtccagcagaactag

SEQ ID NO: 1356346 - DNA, 25 bp, Homo sapien
gcagaactaggatgtggcctggctt

SEQ ID NO: 1356347 - DNA, 25 bp, Homo sapien
agattcctttagtgtgagactgcac

SEQ ID NO: 1356348 - DNA, 25 bp, Homo sapien
tgtccagcagaactaggatgtggcc

SEQ ID NO: 1356349 - DNA, 25 bp, Homo sapien
gagaggagaccagcgatggggattt

SEQ ID NO: 1356350 - DNA, 25 bp, Homo sapien
cagcgatggggatttagtaacaggc

SEQ ID NO: 1356351 - DNA, 25 bp, Homo sapien
gagaccagcgatggggatttagtaa

SEQ ID NO: 1356352 - DNA, 25 bp, Homo sapien
cgatggggatttagtaacaggcagt

SEQ ID NO: 1356353 - DNA, 25 bp, Homo sapien
ccttttaggagaggcataatttgtg

SEQ ID NO: 1356354 - DNA, 25 bp, Homo sapien
ttactccttttaggagaggcataat

SEQ ID NO: 1356355 - DNA, 25 bp, Homo sapien
ttttaggagaggcataatttgtgct

SEQ ID NO: 1356356 - DNA, 25 bp, Homo sapien
ctccttttaggagaggcataatttg

SEQ ID NO: 1356357 - DNA, 25 bp, Homo sapien
ctgtgtagatggacagaagggactt

SEQ ID NO: 1356358 - DNA, 25 bp, Homo sapien
cataatggaggctgactgtgtagat

SEQ ID NO: 1356359 - DNA, 25 bp, Homo sapien
ggacttggcagagctttgctcatgc

SEQ ID NO: 1356360 - DNA, 25 bp, Homo sapien
gcagagctttgctcatgccactcac

SEQ ID NO: 1356361 - DNA, 25 bp, Homo sapien
ttcgccatcagtcgcccattagtgt

SEQ ID NO: 1356362 - DNA, 25 bp, Homo sapien
ttctggattcgccatcagtcgccca

SEQ ID NO: 1356363 - DNA, 25 bp, Homo sapien
ccatcagtcgcccattagtgttctc

SEQ ID NO: 1356364 - DNA, 25 bp, Homo sapien
cagagcttctggattcgccatcagt

SEQ ID NO: 1356365 - DNA, 25 bp, Homo sapien
ctgtcatgtggatctctgatgccat

SEQ ID NO: 1356366 - DNA, 25 bp, Homo sapien
cctgtcatgtggatctctgatgcca

SEQ ID NO: 1356367 - DNA, 25 bp, Homo sapien
tgggcctgtcatgtggatctctgat

SEQ ID NO: 1356368 - DNA, 25 bp, Homo sapien
ggcctgtcatgtggatctctgatgc

SEQ ID NO: 1356369 - DNA, 25 bp, Homo sapien
taggttccatatcactgagctgaga

SEQ ID NO: 1356370 - DNA, 25 bp, Homo sapien
taattcaacacaagcactgtagtgg

SEQ ID NO: 1356371 - DNA, 25 bp, Homo sapien
catagaagcaggattcagtccatca

SEQ ID NO: 1356372 - DNA, 25 bp, Homo sapien
tctttaaccgtgtcagtgggctgct

SEQ ID NO: 1356373 - DNA, 25 bp, Homo sapien
tctccttagttcacgagcactggct

SEQ ID NO: 1356374 - DNA, 25 bp, Homo sapien
gacacactctcaatggagctgccta

SEQ ID NO: 1356375 - DNA, 25 bp, Homo sapien
cctattctttgagaggtgcagtaca

SEQ ID NO: 1356376 - DNA, 25 bp, Homo sapien
ggctttacatgaatcgcacaactga

SEQ ID NO: 1356377 - DNA, 25 bp, Homo sapien
tgccttcagacccaatattcttcca

SEQ ID NO: 1356378 - DNA, 25 bp, Homo sapien
aagttgccttcagacccaatattct

SEQ ID NO: 1356379 - DNA, 25 bp, Homo sapien
ttcagacccaatattcttccactgg

SEQ ID NO: 1356380 - DNA, 25 bp, Homo sapien
tcagacccaatattcttccactggg

SEQ ID NO: 1356381 - DNA, 25 bp, Homo sapien
gcatgaaggtcagagatgatgttct

SEQ ID NO: 1356382 - DNA, 25 bp, Homo sapien
gatgagtacctagcaccaaattaag

SEQ ID NO: 1356383 - DNA, 25 bp, Homo sapien
gacatactcatattggaacaggtta

SEQ ID NO: 1356384 - DNA, 25 bp, Homo sapien
acaggttagtcacttagagatgcag

SEQ ID NO: 1356385 - DNA, 25 bp, Homo sapien
aaaaatccccactgtcatgaacata

SEQ ID NO: 1356386 - DNA, 25 bp, Homo sapien
aaaatccccactgtcatgaacataa

SEQ ID NO: 1356387 - DNA, 25 bp, Homo sapien
aaatccccactgtcatgaacataaa

SEQ ID NO: 1356388 - DNA, 25 bp, Homo sapien
gtacagactctcaagcaacaatgta

SEQ ID NO: 1356389 - DNA, 25 bp, Homo sapien
gactctcaagcaacaatgtacagct

SEQ ID NO: 1356390 - DNA, 25 bp, Homo sapien
aataaattttagtggaacaatcctg

SEQ ID NO: 1356391 - DNA, 25 bp, Homo sapien
aaatgtacagactctcaagcaacaa

SEQ ID NO: 1356392 - DNA, 25 bp, Homo sapien
tctcaatcatgaaatcttgcagaga

SEQ ID NO: 1356393 - DNA, 25 bp, Homo sapien
tttctcaaaacccaggtgatgacaa

SEQ ID NO: 1356394 - DNA, 25 bp, Homo sapien
ctcaggaattctctcaatcatgaaa

SEQ ID NO: 1356395 - DNA, 25 bp, Homo sapien
ctcaaaacccaggtgatgacaatat

SEQ ID NO: 1356396 - DNA, 25 bp, Homo sapien
ggaatcgtttgtatcaatacagtga

SEQ ID NO: 1356397 - DNA, 25 bp, Homo sapien
tggaatcgtttgtatcaatacagtg

SEQ ID NO: 1356398 - DNA, 25 bp, Homo sapien
cttggaatcgtttgtatcaatacag

SEQ ID NO: 1356399 - DNA, 25 bp, Homo sapien
gaatcgtttgtatcaatacagtgaa

SEQ ID NO: 1356400 - DNA, 25 bp, Homo sapien
tggcgactcagcgttttcttcccgg

SEQ ID NO: 1356401 - DNA, 25 bp, Homo sapien
gggtctgctgctatggagtccactt

SEQ ID NO: 1356402 - DNA, 25 bp, Homo sapien
gtctgctgctatggagtccacttct

SEQ ID NO: 1356403 - DNA, 25 bp, Homo sapien
acttctctccagtggcgactcagcg

SEQ ID NO: 1356404 - DNA, 25 bp, Homo sapien
cggtgtatggctaaactggtgcgca

SEQ ID NO: 1356405 - DNA, 25 bp, Homo sapien
tactggtgcccaacttatgcctaaa

SEQ ID NO: 1356406 - DNA, 25 bp, Homo sapien
cagaagtggactacaatagggacgt

SEQ ID NO: 1356407 - DNA, 25 bp, Homo sapien
ggtgccaacaccagatcagttatgt

SEQ ID NO: 1356408 - DNA, 25 bp, Homo sapien
ggtggcatccatttactcatagctg

SEQ ID NO: 1356409 - DNA, 25 bp, Homo sapien
caattctggagcatcggtgtgcaac

SEQ ID NO: 1356410 - DNA, 25 bp, Homo sapien
aatagctgtagagtatggctccctc

SEQ ID NO: 1356411 - DNA, 25 bp, Homo sapien
gttttcccgtgagatgcctttacaa

SEQ ID NO: 1356412 - DNA, 25 bp, Homo sapien
gatataatgtcatagcagaggagca

SEQ ID NO: 1356413 - DNA, 25 bp, Homo sapien
taggattatagtcctggtcctcaga

SEQ ID NO: 1356414 - DNA, 25 bp, Homo sapien
taaaagcctagttaagtgtcccaga

SEQ ID NO: 1356415 - DNA, 25 bp, Homo sapien
tacctagagggtttacatggacaga

SEQ ID NO: 1356416 - DNA, 25 bp, Homo sapien
ggagtgatgctctactgtgccccat

SEQ ID NO: 1356417 - DNA, 25 bp, Homo sapien
tgcagccagcatgccatacaaagac

SEQ ID NO: 1356418 - DNA, 25 bp, Homo sapien
gccctatgctacgaccatagttaaa

SEQ ID NO: 1356419 - DNA, 25 bp, Homo sapien
tgtgccccatggtttgtttggtctc

SEQ ID NO: 1356420 - DNA, 25 bp, Homo sapien
tatctcattggaaaatgcatcctag

SEQ ID NO: 1356421 - DNA, 25 bp, Homo sapien
tgtaggtaaaacattgacctcatac

SEQ ID NO: 1356422 - DNA, 25 bp, Homo sapien
ctgaatatacagtaagggtggtgca

SEQ ID NO: 1356423 - DNA, 25 bp, Homo sapien
aacagaaactgcaagatatctcatt

SEQ ID NO: 1356424 - DNA, 25 bp, Homo sapien
aactttatggttcaacaaaaatgca

SEQ ID NO: 1356425 - DNA, 25 bp, Homo sapien
cagttgtttgacactctgaagttgc

SEQ ID NO: 1356426 - DNA, 25 bp, Homo sapien
gacactctgaagttgctcattcatg

SEQ ID NO: 1356427 - DNA, 25 bp, Homo sapien
gggagctggacaggcaaattttgct

SEQ ID NO: 1356428 - DNA, 25 bp, Homo sapien
tttgagttaagtttaatggcagttg

SEQ ID NO: 1356429 - DNA, 25 bp, Homo sapien
tcatctggatatcccatatgtcttt

SEQ ID NO: 1356430 - DNA, 25 bp, Homo sapien
gagtatgttacatattggctccaat

SEQ ID NO: 1356431 - DNA, 25 bp, Homo sapien
aagtctcttgctctcattctcgaat

SEQ ID NO: 1356432 - DNA, 25 bp, Homo sapien
cctccttgagaaggcgttcctgttc

SEQ ID NO: 1356433 - DNA, 25 bp, Homo sapien
attttcgatatggggcactggaaga

SEQ ID NO: 1356434 - DNA, 25 bp, Homo sapien
cattttcgatatggggcactggaag

SEQ ID NO: 1356435 - DNA, 25 bp, Homo sapien
tcattttcgatatggggcactggaa

SEQ ID NO: 1356436 - DNA, 25 bp, Homo sapien
gcagattcagcctttatacgttcca

SEQ ID NO: 1356437 - DNA, 25 bp, Homo sapien
ctcagtcaattgtttcacatgttcc

SEQ ID NO: 1356438 - DNA, 25 bp, Homo sapien
agtcaattgtttcacatgttcctga

SEQ ID NO: 1356439 - DNA, 25 bp, Homo sapien
tgctctgccattaactgggccctgt

SEQ ID NO: 1356440 - DNA, 25 bp, Homo sapien
gaatattcaattgtaggtgttccct

SEQ ID NO: 1356441 - DNA, 25 bp, Homo sapien
tccaggtggaccaatattgctaact

SEQ ID NO: 1356442 - DNA, 25 bp, Homo sapien
ttttgagagctttccgaccatgtag

SEQ ID NO: 1356443 - DNA, 25 bp, Homo sapien
cttgggtaaccagaaaaccaatgat

SEQ ID NO: 1356444 - DNA, 25 bp, Homo sapien
agtgactgatcagtctgtagaagtg

SEQ ID NO: 1356445 - DNA, 25 bp, Homo sapien
agagtgactgatcagtctgtagaag

SEQ ID NO: 1356446 - DNA, 25 bp, Homo sapien
gtgactgatcagtctgtagaagtgc

SEQ ID NO: 1356447 - DNA, 25 bp, Homo sapien
gagtgactgatcagtctgtagaagt

SEQ ID NO: 1356448 - DNA, 25 bp, Homo sapien
gattgtgggttagatccagcaatcc

SEQ ID NO: 1356449 - DNA, 25 bp, Homo sapien
agaatgaagaaagagtgattgtggg

SEQ ID NO: 1356450 - DNA, 25 bp, Homo sapien
gacaatggcatccatagcaacctgg

SEQ ID NO: 1356451 - DNA, 25 bp, Homo sapien
aagacaatggcatccatagcaacct

SEQ ID NO: 1356452 - DNA, 25 bp, Homo sapien
gcttgacatcttcttctaaagggcc

SEQ ID NO: 1356453 - DNA, 25 bp, Homo sapien
gaagtaaagccatgcaacaatctga

SEQ ID NO: 1356454 - DNA, 25 bp, Homo sapien
tctgagtaaagagacggtaacctcc

SEQ ID NO: 1356455 - DNA, 25 bp, Homo sapien
tcatctcgccttgcttccaactggg

SEQ ID NO: 1356456 - DNA, 25 bp, Homo sapien
caagtctctcatttcaggaatagtt

SEQ ID NO: 1356457 - DNA, 25 bp, Homo sapien
agttctgagcacaaacactggagtc

SEQ ID NO: 1356458 - DNA, 25 bp, Homo sapien
tctgagcacaaacactggagtcagg

SEQ ID NO: 1356459 - DNA, 25 bp, Homo sapien
actatttcatacgaaacttttatct

SEQ ID NO: 1356460 - DNA, 25 bp, Homo sapien
tgagttctctatctgggccaaggcc

SEQ ID NO: 1356461 - DNA, 25 bp, Homo sapien
cactgcggctgagttctctatctgg

SEQ ID NO: 1356462 - DNA, 25 bp, Homo sapien
ccaggactgcgttctccatgcaggg

SEQ ID NO: 1356463 - DNA, 25 bp, Homo sapien
caaggccaggactgcgttctccatg

SEQ ID NO: 1356464 - DNA, 25 bp, Homo sapien
tctctctgcggttttaagtaccatc

SEQ ID NO: 1356465 - DNA, 25 bp, Homo sapien
actcatcgagtttgccagggctttg

SEQ ID NO: 1356466 - DNA, 25 bp, Homo sapien
actggagtggttgatcacacaacaa

SEQ ID NO: 1356467 - DNA, 25 bp, Homo sapien
tagtctggtgtctggcttaggtaaa

SEQ ID NO: 1356468 - DNA, 25 bp, Homo sapien
gaagttgcaaagttctatcctgccc

SEQ ID NO: 1356469 - DNA, 25 bp, Homo sapien
caaagttctatcctgccctatgcat

SEQ ID NO: 1356470 - DNA, 25 bp, Homo sapien
cattatttgctataaagctattcct

SEQ ID NO: 1356471 - DNA, 25 bp, Homo sapien
tatatgctttggttagctcttaacc

SEQ ID NO: 1356472 - DNA, 25 bp, Homo sapien
tatgagatgatactatagctttagt

SEQ ID NO: 1356473 - DNA, 25 bp, Homo sapien
tttatcctctacaatgggcagaagg

SEQ ID NO: 1356474 - DNA, 25 bp, Homo sapien
tcagaagtgacccttatgctttcca

SEQ ID NO: 1356475 - DNA, 25 bp, Homo sapien
ttgccatcaatagactatgcatttg

SEQ ID NO: 1356476 - DNA, 25 bp, Homo sapien
cgggccaatcgaagacgaagcactt

SEQ ID NO: 1356477 - DNA, 25 bp, Homo sapien
ggcccattgactggaatgccacctg

SEQ ID NO: 1356478 - DNA, 25 bp, Homo sapien
gggaagaactttcggatgcacaacc

SEQ ID NO: 1356479 - DNA, 25 bp, Homo sapien
ggtacttcttaggagcgggccaatc

SEQ ID NO: 1356480 - DNA, 25 bp, Homo sapien
gcccatgtaaggaggaaatttatta

SEQ ID NO: 1356481 - DNA, 25 bp, Homo sapien
gctctctatttattacccaaccaag

SEQ ID NO: 1356482 - DNA, 25 bp, Homo sapien
caagaagaggtaggtaatgcaattt

SEQ ID NO: 1356483 - DNA, 25 bp, Homo sapien
ttggttccaactgatatagtcaagc

SEQ ID NO: 1356484 - DNA, 25 bp, Homo sapien
gccttgattcgatctgtcagctctg

SEQ ID NO: 1356485 - DNA, 25 bp, Homo sapien
tagcgaaagctccaagtagtcatca

SEQ ID NO: 1356486 - DNA, 25 bp, Homo sapien
caaagtcagctgagtcgtctacaga

SEQ ID NO: 1356487 - DNA, 25 bp, Homo sapien
ttgttaccaggtgaggagtttgcct

SEQ ID NO: 1356488 - DNA, 25 bp, Homo sapien
tctaatatggagcaaggaggatacc

SEQ ID NO: 1356489 - DNA, 25 bp, Homo sapien
taacgagacatgtaactgggaagac

SEQ ID NO: 1356490 - DNA, 25 bp, Homo sapien
tgccctagggactaagaacgctgta

SEQ ID NO: 1356491 - DNA, 25 bp, Homo sapien
aatccagtgtggtagggcagaagcc

SEQ ID NO: 1356492 - DNA, 25 bp, Homo sapien
tggtgaaaaaatgaagctgttattt

SEQ ID NO: 1356493 - DNA, 25 bp, Homo sapien
tgaagctgttattttctaggtttac

SEQ ID NO: 1356494 - DNA, 25 bp, Homo sapien
aaatgaagctgttattttctaggtt

SEQ ID NO: 1356495 - DNA, 25 bp, Homo sapien
ttggtgaaaaaatgaagctgttatt

SEQ ID NO: 1356496 - DNA, 25 bp, Homo sapien
tgctgttctggaccacaaaaaagga

SEQ ID NO: 1356497 - DNA, 25 bp, Homo sapien
tgttctggaccacaaaaaaggatac

SEQ ID NO: 1356498 - DNA, 25 bp, Homo sapien
ctgttctggaccacaaaaaaggata

SEQ ID NO: 1356499 - DNA, 25 bp, Homo sapien
gctgttctggaccacaaaaaaggat

SEQ ID NO: 1356500 - DNA, 25 bp, Homo sapien
ctattgtacacgaaggtgctgctca

SEQ ID NO: 1356501 - DNA, 25 bp, Homo sapien
tattgtacacgaaggtgctgctcag

SEQ ID NO: 1356502 - DNA, 25 bp, Homo sapien
atgctattgtacacgaaggtgctgc

SEQ ID NO: 1356503 - DNA, 25 bp, Homo sapien
gctattgtacacgaaggtgctgctc

SEQ ID NO: 1356504 - DNA, 25 bp, Homo sapien
tgtcgagcagaactagggtgtgttc

SEQ ID NO: 1356505 - DNA, 25 bp, Homo sapien
gccctcagtgtcgagcagaactagg

SEQ ID NO: 1356506 - DNA, 25 bp, Homo sapien
cctcagtgtcgagcagaactagggt

SEQ ID NO: 1356507 - DNA, 25 bp, Homo sapien
tcagtgtcgagcagaactagggtgt

SEQ ID NO: 1356508 - DNA, 25 bp, Homo sapien
cttcactgtggagcctagagagaag

SEQ ID NO: 1356509 - DNA, 25 bp, Homo sapien
ttcactgtggagcctagagagaagc

SEQ ID NO: 1356510 - DNA, 25 bp, Homo sapien
accagctgccctttagtgttatcaa

SEQ ID NO: 1356511 - DNA, 25 bp, Homo sapien
gctgccctttagtgttatcaatgag

SEQ ID NO: 1356512 - DNA, 25 bp, Homo sapien
cctttagtgttatcaatgaggctca

SEQ ID NO: 1356513 - DNA, 25 bp, Homo sapien
gccctttagtgttatcaatgaggct

SEQ ID NO: 1356514 - DNA, 25 bp, Homo sapien
gctgtcttacaaattgggtcactgg

SEQ ID NO: 1356515 - DNA, 25 bp, Homo sapien
caggattcctcattgcatttagtca

SEQ ID NO: 1356516 - DNA, 25 bp, Homo sapien
gaagagacagtttgaagactatgca

SEQ ID NO: 1356517 - DNA, 25 bp, Homo sapien
tctgctccatgacccaatccaggat

SEQ ID NO: 1356518 - DNA, 25 bp, Homo sapien
tgtagcccaggtactatggacgtgc

SEQ ID NO: 1356519 - DNA, 25 bp, Homo sapien
cattgctcaactcgtcccagattag

SEQ ID NO: 1356520 - DNA, 25 bp, Homo sapien
ctaggccctctcaggtggaaagtta

SEQ ID NO: 1356521 - DNA, 25 bp, Homo sapien
cccagattagttcactgagagctcc

SEQ ID NO: 1356522 - DNA, 25 bp, Homo sapien
ctggaaagaaggttgttccaatgtg

SEQ ID NO: 1356523 - DNA, 25 bp, Homo sapien
tcttccgagtttggctgcactgctt

SEQ ID NO: 1356524 - DNA, 25 bp, Homo sapien
ctccaacgtccaggctctgtcaatg

SEQ ID NO: 1356525 - DNA, 25 bp, Homo sapien
cctctcttttcttccgagtttggct

SEQ ID NO: 1356526 - DNA, 25 bp, Homo sapien
ctgacgagagacaagaaaaagaggt

SEQ ID NO: 1356527 - DNA, 25 bp, Homo sapien
caaagaaatgcactaatatgaaaca

SEQ ID NO: 1356528 - DNA, 25 bp, Homo sapien
ggtaacctctgcaaagaaatgcact

SEQ ID NO: 1356529 - DNA, 25 bp, Homo sapien
gacaagaaaaagaggtaacctctgc

SEQ ID NO: 1356530 - DNA, 25 bp, Homo sapien
cttttggtgggttggtagtattgct

SEQ ID NO: 1356531 - DNA, 25 bp, Homo sapien
gcattctacagtaatttcaccacaa

SEQ ID NO: 1356532 - DNA, 25 bp, Homo sapien
caggcgattgttctgccttgtcctc

SEQ ID NO: 1356533 - DNA, 25 bp, Homo sapien
taaaacccatattattgtgtccgga

SEQ ID NO: 1356534 - DNA, 25 bp, Homo sapien
tagaaagactcaagagagtgtgaca

SEQ ID NO: 1356535 - DNA, 25 bp, Homo sapien
aaatgcatagaaagactcaagagag

SEQ ID NO: 1356536 - DNA, 25 bp, Homo sapien
gaggacaaatgcatagaaagactca

SEQ ID NO: 1356537 - DNA, 25 bp, Homo sapien
tgcatagaaagactcaagagagtgt

SEQ ID NO: 1356538 - DNA, 25 bp, Homo sapien
cttttaaaatgagcaacagcgttat

SEQ ID NO: 1356539 - DNA, 25 bp, Homo sapien
tgtggcgttactctcttctcactga

SEQ ID NO: 1356540 - DNA, 25 bp, Homo sapien
tatcttctaacttgttccccatttc

SEQ ID NO: 1356541 - DNA, 25 bp, Homo sapien
ctgatttgcaagagctaattataac

SEQ ID NO: 1356542 - DNA, 25 bp, Homo sapien
aggatttctcagcctattacataat

SEQ ID NO: 1356543 - DNA, 25 bp, Homo sapien
cctattacataatgagctaagaatt

SEQ ID NO: 1356544 - DNA, 25 bp, Homo sapien
tctcagcctattacataatgagcta

SEQ ID NO: 1356545 - DNA, 25 bp, Homo sapien
cagcctattacataatgagctaaga

SEQ ID NO: 1356546 - DNA, 25 bp, Homo sapien
gcttagcagccccaggtagtgctgc

SEQ ID NO: 1356547 - DNA, 25 bp, Homo sapien
tagcttagcagccccaggtagtgct

SEQ ID NO: 1356548 - DNA, 25 bp, Homo sapien
tagcagccccaggtagtgctgcaat

SEQ ID NO: 1356549 - DNA, 25 bp, Homo sapien
gcagccccaggtagtgctgcaataa

SEQ ID NO: 1356550 - DNA, 25 bp, Homo sapien
gttctttcagtcgattaatctcttc

SEQ ID NO: 1356551 - DNA, 25 bp, Homo sapien
catttaacgactcaaatatctcttt

SEQ ID NO: 1356552 - DNA, 25 bp, Homo sapien
cttcagtaagcagttcttctaggac

SEQ ID NO: 1356553 - DNA, 25 bp, Homo sapien
tgccagccacatcaagaatctgtga

SEQ ID NO: 1356554 - DNA, 25 bp, Homo sapien
cagttctctcatatagttttccctt

SEQ ID NO: 1356555 - DNA, 25 bp, Homo sapien
gttgagctatgttttcctggaaact

SEQ ID NO: 1356556 - DNA, 25 bp, Homo sapien
cttcttcttgagttgagctatgttt

SEQ ID NO: 1356557 - DNA, 25 bp, Homo sapien
tgagttgagctatgttttcctggaa

SEQ ID NO: 1356558 - DNA, 25 bp, Homo sapien
tatggccttctctccagcagtgagg

SEQ ID NO: 1356559 - DNA, 25 bp, Homo sapien
tcctctataaccacctgtgactgca

SEQ ID NO: 1356560 - DNA, 25 bp, Homo sapien
gcaggatggattcctctataaccac

SEQ ID NO: 1356561 - DNA, 25 bp, Homo sapien
ggaagctctggaggacctcgtctgc

SEQ ID NO: 1356562 - DNA, 25 bp, Homo sapien
ggcactagtgtatagtcctgttcaa

SEQ ID NO: 1356563 - DNA, 25 bp, Homo sapien
gccgcttaagctcagcctgacaata

SEQ ID NO: 1356564 - DNA, 25 bp, Homo sapien
tgaaagccgcttaagctcagcctga

SEQ ID NO: 1356565 - DNA, 25 bp, Homo sapien
tgcttctaagtagatattgtgcccc

SEQ ID NO: 1356566 - DNA, 25 bp, Homo sapien
cttttatctttgaaggagtactcca

SEQ ID NO: 1356567 - DNA, 25 bp, Homo sapien
tccagacaaggagtcgctccactgt

SEQ ID NO: 1356568 - DNA, 25 bp, Homo sapien
tgtggggaatctcacttgctgggcc

SEQ ID NO: 1356569 - DNA, 25 bp, Homo sapien
acaaggagtcgctccactgttgatg

SEQ ID NO: 1356570 - DNA, 25 bp, Homo sapien
cacccatatagggaaatagactcac

SEQ ID NO: 1356571 - DNA, 25 bp, Homo sapien
aaacacccatatagggaaatagact

SEQ ID NO: 1356572 - DNA, 25 bp, Homo sapien
gatacagtaggcctcagtaaacacc

SEQ ID NO: 1356573 - DNA, 25 bp, Homo sapien
atacagtaggcctcagtaaacaccc

SEQ ID NO: 1356574 - DNA, 25 bp, Homo sapien
aattactatccagttggtcttctcg

SEQ ID NO: 1356575 - DNA, 25 bp, Homo sapien
gtcttctcgtacttcttcaacatgg

SEQ ID NO: 1356576 - DNA, 25 bp, Homo sapien
cagttggtcttctcgtacttcttca

SEQ ID NO: 1356577 - DNA, 25 bp, Homo sapien
cttcaacatggagtaagagtttttt

SEQ ID NO: 1356578 - DNA, 25 bp, Homo sapien
agaattttggatttggggattcttg

SEQ ID NO: 1356579 - DNA, 25 bp, Homo sapien
gaattttggatttggggattcttgc

SEQ ID NO: 1356580 - DNA, 25 bp, Homo sapien
tgggcttgttagaattttggatttg

SEQ ID NO: 1356581 - DNA, 25 bp, Homo sapien
ctgggcttgttagaattttggattt

SEQ ID NO: 1356582 - DNA, 25 bp, Homo sapien
tgcagaattagtgaaaaagtgacta

SEQ ID NO: 1356583 - DNA, 25 bp, Homo sapien
ctgcagaattagtgaaaaagtgact

SEQ ID NO: 1356584 - DNA, 25 bp, Homo sapien
tgtcagaaatgaaatgttgggctta

SEQ ID NO: 1356585 - DNA, 25 bp, Homo sapien
catgtcagaaatgaaatgttgggct

SEQ ID NO: 1356586 - DNA, 25 bp, Homo sapien
cagaaatgaaatgttgggcttaaaa

SEQ ID NO: 1356587 - DNA, 25 bp, Homo sapien
tgtccccatgtcagaaatgaaatgt

SEQ ID NO: 1356588 - DNA, 25 bp, Homo sapien
tctcccatctaggccatgctctgat

SEQ ID NO: 1356589 - DNA, 25 bp, Homo sapien
ttctcccatctaggccatgctctga

SEQ ID NO: 1356590 - DNA, 25 bp, Homo sapien
cttctcccatctaggccatgctctg

SEQ ID NO: 1356591 - DNA, 25 bp, Homo sapien
tcccatctaggccatgctctgatac

SEQ ID NO: 1356592 - DNA, 25 bp, Homo sapien
agctccagggtaaaatctcgaacag

SEQ ID NO: 1356593 - DNA, 25 bp, Homo sapien
tgccctgattagctctgttagctca

SEQ ID NO: 1356594 - DNA, 25 bp, Homo sapien
gattttgccctgattagctctgtta

SEQ ID NO: 1356595 - DNA, 25 bp, Homo sapien
tttgccctgattagctctgttagct

SEQ ID NO: 1356596 - DNA, 25 bp, Homo sapien
ttttgccctgattagctctgttagc

SEQ ID NO: 1356597 - DNA, 25 bp, Homo sapien
taaactccataaaacctggctcttc

SEQ ID NO: 1356598 - DNA, 25 bp, Homo sapien
gaagacacagtatcagtttccattc

SEQ ID NO: 1356599 - DNA, 25 bp, Homo sapien
cagtatcagtttccattcccctaaa

SEQ ID NO: 1356600 - DNA, 25 bp, Homo sapien
caaccaggacaactgagtcacaaca

SEQ ID NO: 1356601 - DNA, 25 bp, Homo sapien
tccagggcctggtggttgatggtgc

SEQ ID NO: 1356602 - DNA, 25 bp, Homo sapien
agggcctggtggttgatggtgccca

SEQ ID NO: 1356603 - DNA, 25 bp, Homo sapien
tgctccagggcctggtggttgatgg

SEQ ID NO: 1356604 - DNA, 25 bp, Homo sapien
ctgctccagggcctggtggttgatg

SEQ ID NO: 1356605 - DNA, 25 bp, Homo sapien
ccagggcaaagatccacgagtcact

SEQ ID NO: 1356606 - DNA, 25 bp, Homo sapien
agccagggcaaagatccacgagtca

SEQ ID NO: 1356607 - DNA, 25 bp, Homo sapien
acagccagggcaaagatccacgagt

SEQ ID NO: 1356608 - DNA, 25 bp, Homo sapien
tgcttagaagcacagccagggcaaa

SEQ ID NO: 1356609 - DNA, 25 bp, Homo sapien
aaaacataaatagagaatcaaaggt

SEQ ID NO: 1356610 - DNA, 25 bp, Homo sapien
ggtaaagaagatttctctatgtctc

SEQ ID NO: 1356611 - DNA, 25 bp, Homo sapien
taggccagagaagttggattgatac

SEQ ID NO: 1356612 - DNA, 25 bp, Homo sapien
cagatttgtgattcaggaataggcc

SEQ ID NO: 1356613 - DNA, 25 bp, Homo sapien
ttttccatatcacccaggccctccg

SEQ ID NO: 1356614 - DNA, 25 bp, Homo sapien
ttccatatcacccaggccctccgtg

SEQ ID NO: 1356615 - DNA, 25 bp, Homo sapien
cttttccatatcacccaggccctcc

SEQ ID NO: 1356616 - DNA, 25 bp, Homo sapien
ccatatcacccaggccctccgtgtc

SEQ ID NO: 1356617 - DNA, 25 bp, Homo sapien
ggcagacaaggcctataccagttaa

SEQ ID NO: 1356618 - DNA, 25 bp, Homo sapien
gggaagaggagaaacaacatatagt

SEQ ID NO: 1356619 - DNA, 25 bp, Homo sapien
cagacaaggcctataccagttaaat

SEQ ID NO: 1356620 - DNA, 25 bp, Homo sapien
caaggcctataccagttaaatgtat

SEQ ID NO: 1356621 - DNA, 25 bp, Homo sapien
actggacagatggggctcatccatg

SEQ ID NO: 1356622 - DNA, 25 bp, Homo sapien
ggacagatggggctcatccatgctt

SEQ ID NO: 1356623 - DNA, 25 bp, Homo sapien
aactggacagatggggctcatccat

SEQ ID NO: 1356624 - DNA, 25 bp, Homo sapien
tggacagatggggctcatccatgct

SEQ ID NO: 1356625 - DNA, 25 bp, Homo sapien
gtagaggcccacaattgccaccact

SEQ ID NO: 1356626 - DNA, 25 bp, Homo sapien
gatgccctttagtgttctcagtgag

SEQ ID NO: 1356627 - DNA, 25 bp, Homo sapien
tgtaatggcagacaggatttccaga

SEQ ID NO: 1356628 - DNA, 25 bp, Homo sapien
cagtgaggcacactgggcctggcat

SEQ ID NO: 1356629 - DNA, 25 bp, Homo sapien
gaattcaccaccagatgccctttag

SEQ ID NO: 1356630 - DNA, 25 bp, Homo sapien
tttgacttgattatgttaacagatt

SEQ ID NO: 1356631 - DNA, 25 bp, Homo sapien
tgacttgattatgttaacagatttt

SEQ ID NO: 1356632 - DNA, 25 bp, Homo sapien
tttttgacttgattatgttaacaga

SEQ ID NO: 1356633 - DNA, 25 bp, Homo sapien
gacttgattatgttaacagattttg

SEQ ID NO: 1356634 - DNA, 25 bp, Homo sapien
tctgaatttggctgcactgatttct

SEQ ID NO: 1356635 - DNA, 25 bp, Homo sapien
gaaagttatgagtctttattctctt

SEQ ID NO: 1356636 - DNA, 25 bp, Homo sapien
tggtaagaaggcagcttcaatgaga

SEQ ID NO: 1356637 - DNA, 25 bp, Homo sapien
tgagaaagttatgagtctttattct

SEQ ID NO: 1356638 - DNA, 25 bp, Homo sapien
ggggctttccagactttctagagac

SEQ ID NO: 1356639 - DNA, 25 bp, Homo sapien
tatgacagagttgaaacaagaacct

SEQ ID NO: 1356640 - DNA, 25 bp, Homo sapien
tatgtactatataaatacccaatag

SEQ ID NO: 1356641 - DNA, 25 bp, Homo sapien
gatcactctcactagccaatatgag

SEQ ID NO: 1356642 - DNA, 25 bp, Homo sapien
cagaggtgggtgtcacaagttgctt

SEQ ID NO: 1356643 - DNA, 25 bp, Homo sapien
tttaagaagcctgtgtcccctgtga

SEQ ID NO: 1356644 - DNA, 25 bp, Homo sapien
taatgagaattacaagatacccctg

SEQ ID NO: 1356645 - DNA, 25 bp, Homo sapien
ggcccatggcatatcttgtagaatt

SEQ ID NO: 1356646 - DNA, 25 bp, Homo sapien
cgttaataacattaagccaagagcc

SEQ ID NO: 1356647 - DNA, 25 bp, Homo sapien
gaacaaggcagtgagtttccaaatg

SEQ ID NO: 1356648 - DNA, 25 bp, Homo sapien
aacaaggcagtgagtttccaaatgt

SEQ ID NO: 1356649 - DNA, 25 bp, Homo sapien
cattctggacataagacttggctaa

SEQ ID NO: 1356650 - DNA, 25 bp, Homo sapien
caaaagaaactattggccagatgtg

SEQ ID NO: 1356651 - DNA, 25 bp, Homo sapien
caagttttgagcactagacagcaga

SEQ ID NO: 1356652 - DNA, 25 bp, Homo sapien
gagtccagaaataatgctgtacacc

SEQ ID NO: 1356653 - DNA, 25 bp, Homo sapien
aggttgaggctacaatgacccatgt

SEQ ID NO: 1356654 - DNA, 25 bp, Homo sapien
aatgacccatgtttgtgctactgca

SEQ ID NO: 1356655 - DNA, 25 bp, Homo sapien
atgacccatgtttgtgctactgcac

SEQ ID NO: 1356656 - DNA, 25 bp, Homo sapien
tgaggctacaatgacccatgtttgt

SEQ ID NO: 1356657 - DNA, 25 bp, Homo sapien
taaattgcaaatggttaatggcttc

SEQ ID NO: 1356658 - DNA, 25 bp, Homo sapien
gtcaggccctgatattctttgataa

SEQ ID NO: 1356659 - DNA, 25 bp, Homo sapien
cttctcattaatcggcaagagctag

SEQ ID NO: 1356660 - DNA, 25 bp, Homo sapien
cacatggatactcagaggagaacaa

SEQ ID NO: 1356661 - DNA, 25 bp, Homo sapien
ttaaatacgtgagccaagatatttt

SEQ ID NO: 1356662 - DNA, 25 bp, Homo sapien
taaatacgtgagccaagatattttg

SEQ ID NO: 1356663 - DNA, 25 bp, Homo sapien
caatcattatgttgctagccatgtc

SEQ ID NO: 1356664 - DNA, 25 bp, Homo sapien
ccatgtcaaggatctttaagagcct

SEQ ID NO: 1356665 - DNA, 25 bp, Homo sapien
tagcttggaagccccaggtagagtg

SEQ ID NO: 1356666 - DNA, 25 bp, Homo sapien
aagagccttaactgttcatttttag

SEQ ID NO: 1356667 - DNA, 25 bp, Homo sapien
agcacaaagaatgcccttcgagagg

SEQ ID NO: 1356668 - DNA, 25 bp, Homo sapien
tggacctgaatcatgggagtataca

SEQ ID NO: 1356669 - DNA, 25 bp, Homo sapien
ccttttgtgacattccctaagcaac

SEQ ID NO: 1356670 - DNA, 25 bp, Homo sapien
ccatgctcatctagcaaataacggg

SEQ ID NO: 1356671 - DNA, 25 bp, Homo sapien
cagggcattgtccctcaggcactgc

SEQ ID NO: 1356672 - DNA, 25 bp, Homo sapien
gcagggcattgtccctcaggcactg

SEQ ID NO: 1356673 - DNA, 25 bp, Homo sapien
atttgggccatgtattcctggaagc

SEQ ID NO: 1356674 - DNA, 25 bp, Homo sapien
ctccatttgggccatgtattcctgg

SEQ ID NO: 1356675 - DNA, 25 bp, Homo sapien
ttttagcagcctttcatgctctctg

SEQ ID NO: 1356676 - DNA, 25 bp, Homo sapien
tgtgttttagcagcctttcatgctc

SEQ ID NO: 1356677 - DNA, 25 bp, Homo sapien
ggaagttctggaggacctcgtttgc

SEQ ID NO: 1356678 - DNA, 25 bp, Homo sapien
caggatggattcctctacaaccacc

SEQ ID NO: 1356679 - DNA, 25 bp, Homo sapien
ctgactgcaggatggattcctctac

SEQ ID NO: 1356680 - DNA, 25 bp, Homo sapien
tatggccttctctccagcagtgagg

SEQ ID NO: 1356681 - DNA, 25 bp, Homo sapien
tatagtcccactcaacctgtttctt

SEQ ID NO: 1356682 - DNA, 25 bp, Homo sapien
tttctgggcactagcttatagtccc

SEQ ID NO: 1356683 - DNA, 25 bp, Homo sapien
cgcttaagctcagcctggcaatatt

SEQ ID NO: 1356684 - DNA, 25 bp, Homo sapien
tgaaagccgcttaagctcagcctgg

SEQ ID NO: 1356685 - DNA, 25 bp, Homo sapien
gcagcacaaagtctcccttcttttt

SEQ ID NO: 1356686 - DNA, 25 bp, Homo sapien
ctcccttctttttctctatggtgtc

SEQ ID NO: 1356687 - DNA, 25 bp, Homo sapien
ctgcagcacaaagtctcccttcttt

SEQ ID NO: 1356688 - DNA, 25 bp, Homo sapien
gtctcccttctttttctctatggtg

SEQ ID NO: 1356689 - DNA, 25 bp, Homo sapien
taggtcagtctgagacagactgaaa

SEQ ID NO: 1356690 - DNA, 25 bp, Homo sapien
gacagactgaaagacaaactttcag

SEQ ID NO: 1356691 - DNA, 25 bp, Homo sapien
aggtcagtctgagacagactgaaag

SEQ ID NO: 1356692 - DNA, 25 bp, Homo sapien
ttttaggtcagtctgagacagactg

SEQ ID NO: 1356693 - DNA, 25 bp, Homo sapien
tttcggaagggcagaaatcaggaag

SEQ ID NO: 1356694 - DNA, 25 bp, Homo sapien
catcatttcggaagggcagaaatca

SEQ ID NO: 1356695 - DNA, 25 bp, Homo sapien
ctttatgcatcatttcggaagggca

SEQ ID NO: 1356696 - DNA, 25 bp, Homo sapien
ctacactttatgcatcatttcggaa

SEQ ID NO: 1356697 - DNA, 25 bp, Homo sapien
catctacataagtcaccaccagagt

SEQ ID NO: 1356698 - DNA, 25 bp, Homo sapien
gcatctacataagtcaccaccagag

SEQ ID NO: 1356699 - DNA, 25 bp, Homo sapien
tgcacagccgctgggttctcaagct

SEQ ID NO: 1356700 - DNA, 25 bp, Homo sapien
catatatttagggaaaatttacagt

SEQ ID NO: 1356701 - DNA, 25 bp, Homo sapien
atcacatatatttagggaaaattta

SEQ ID NO: 1356702 - DNA, 25 bp, Homo sapien
tgaatcacatatatttagggaaaat

SEQ ID NO: 1356703 - DNA, 25 bp, Homo sapien
cacatatatttagggaaaatttaca

SEQ ID NO: 1356704 - DNA, 25 bp, Homo sapien
gacatgctttgggacaaaaaaagac

SEQ ID NO: 1356705 - DNA, 25 bp, Homo sapien
agacatgctttgggacaaaaaaaga

SEQ ID NO: 1356706 - DNA, 25 bp, Homo sapien
tgctttgggacaaaaaaagactcac

SEQ ID NO: 1356707 - DNA, 25 bp, Homo sapien
catgctttgggacaaaaaaagactc

SEQ ID NO: 1356708 - DNA, 25 bp, Homo sapien
ttcggaagaaatgcctgatacactc

SEQ ID NO: 1356709 - DNA, 25 bp, Homo sapien
tggcacttcgtccatatgatttaaa

SEQ ID NO: 1356710 - DNA, 25 bp, Homo sapien
gcttgtcatttgtaggccggtcaaa

SEQ ID NO: 1356711 - DNA, 25 bp, Homo sapien
tgtctgattgcataaggaaatgcct

SEQ ID NO: 1356712 - DNA, 25 bp, Homo sapien
gaattttgaattttgggattcttgc

SEQ ID NO: 1356713 - DNA, 25 bp, Homo sapien
tgaattttgaattttgggattcttg

SEQ ID NO: 1356714 - DNA, 25 bp, Homo sapien
ctaggcatgtttgaattttgaattt

SEQ ID NO: 1356715 - DNA, 25 bp, Homo sapien
catgtttgaattttgaattttggga

SEQ ID NO: 1356716 - DNA, 25 bp, Homo sapien
aaagagggctcattgaagagacagc

SEQ ID NO: 1356717 - DNA, 25 bp, Homo sapien
aaaagagggctcattgaagagacag

SEQ ID NO: 1356718 - DNA, 25 bp, Homo sapien
aaaaagagggctcattgaagagaca

SEQ ID NO: 1356719 - DNA, 25 bp, Homo sapien
cactgaaccttcccacatccaggcc

SEQ ID NO: 1356720 - DNA, 25 bp, Homo sapien
ctggaatcagcttcaaggcattctc

SEQ ID NO: 1356721 - DNA, 25 bp, Homo sapien
gcttcaaggcattctccaggtactc

SEQ ID NO: 1356722 - DNA, 25 bp, Homo sapien
atcagcttcaaggcattctccaggt

SEQ ID NO: 1356723 - DNA, 25 bp, Homo sapien
cagcttcaaggcattctccaggtac

SEQ ID NO: 1356724 - DNA, 25 bp, Homo sapien
agctccagggtaaaatcccgaacag

SEQ ID NO: 1356725 - DNA, 25 bp, Homo sapien
tgccctgattagctctgctagctca

SEQ ID NO: 1356726 - DNA, 25 bp, Homo sapien
gattttgccctgattagctctgcta

SEQ ID NO: 1356727 - DNA, 25 bp, Homo sapien
gctcacgctgttatagacaaagctg

SEQ ID NO: 1356728 - DNA, 25 bp, Homo sapien
tgctcacgctgttatagacaaagct

SEQ ID NO: 1356729 - DNA, 25 bp, Homo sapien
gtgctcacgctgttatagacaaagc

SEQ ID NO: 1356730 - DNA, 25 bp, Homo sapien
caagttctaaggtcagctagtagtt

SEQ ID NO: 1356731 - DNA, 25 bp, Homo sapien
ttctaaggtcagctagtagttctgc

SEQ ID NO: 1356732 - DNA, 25 bp, Homo sapien
attacaagttctaaggtcagctagt

SEQ ID NO: 1356733 - DNA, 25 bp, Homo sapien
ggtcagctagtagttctgctgctgc

SEQ ID NO: 1356734 - DNA, 25 bp, Homo sapien
ttttctacatcgcccaggccctcgg

SEQ ID NO: 1356735 - DNA, 25 bp, Homo sapien
aggccctcggtgtccagaaggacca

SEQ ID NO: 1356736 - DNA, 25 bp, Homo sapien
accagggtgtggtttggcttagaga

SEQ ID NO: 1356737 - DNA, 25 bp, Homo sapien
gccctcggtgtccagaaggaccagg

SEQ ID NO: 1356738 - DNA, 25 bp, Homo sapien
tttcagactgcaccgtggagcccag

SEQ ID NO: 1356739 - DNA, 25 bp, Homo sapien
tccagatgcccttagtttcagactg

SEQ ID NO: 1356740 - DNA, 25 bp, Homo sapien
catccagatgcccttagtttcagac

SEQ ID NO: 1356741 - DNA, 25 bp, Homo sapien
agatgcccttagtttcagactgcac

SEQ ID NO: 1356742 - DNA, 25 bp, Homo sapien
tcactggttccaagtaaatggctcc

SEQ ID NO: 1356743 - DNA, 25 bp, Homo sapien
atcactggttccaagtaaatggctc

SEQ ID NO: 1356744 - DNA, 25 bp, Homo sapien
gatcagctgtgttatcactggttcc

SEQ ID NO: 1356745 - DNA, 25 bp, Homo sapien
gggtgtgatcagctgtgttatcact

SEQ ID NO: 1356746 - DNA, 25 bp, Homo sapien
aatcttgtcaagaatctctaatgcc

SEQ ID NO: 1356747 - DNA, 25 bp, Homo sapien
gctttcctgcaagacgattcatgag

SEQ ID NO: 1356748 - DNA, 25 bp, Homo sapien
cctggttttccactagacaaatggg

SEQ ID NO: 1356749 - DNA, 25 bp, Homo sapien
tgcggtatagccctacaatggccac

SEQ ID NO: 1356750 - DNA, 25 bp, Homo sapien
ctgtaacccagaaaaaaatactcag

SEQ ID NO: 1356751 - DNA, 25 bp, Homo sapien
actcagtagaatacaagatcttgaa

SEQ ID NO: 1356752 - DNA, 25 bp, Homo sapien
gtagaatacaagatcttgaagtcat

SEQ ID NO: 1356753 - DNA, 25 bp, Homo sapien
aaaatactcagtagaatacaagatc

SEQ ID NO: 1356754 - DNA, 25 bp, Homo sapien
gggcactgcagcgtgaagagttctc

SEQ ID NO: 1356755 - DNA, 25 bp, Homo sapien
cactgcagcgtgaagagttctctca

SEQ ID NO: 1356756 - DNA, 25 bp, Homo sapien
tgcagcgtgaagagttctctcaccc

SEQ ID NO: 1356757 - DNA, 25 bp, Homo sapien
cagcgtgaagagttctctcacccat

SEQ ID NO: 1356758 - DNA, 25 bp, Homo sapien
tcgagaaacggactgttcttagaag

SEQ ID NO: 1356759 - DNA, 25 bp, Homo sapien
ctcctgcgcctggatcctcgagaaa

SEQ ID NO: 1356760 - DNA, 25 bp, Homo sapien
gcctggatcctcgagaaacggactg

SEQ ID NO: 1356761 - DNA, 25 bp, Homo sapien
gatcctcgagaaacggactgttctt

SEQ ID NO: 1356762 - DNA, 25 bp, Homo sapien
aaagtccagccggatttacagacat

SEQ ID NO: 1356763 - DNA, 25 bp, Homo sapien
gccggatttacagacatccaagtaa

SEQ ID NO: 1356764 - DNA, 25 bp, Homo sapien
tttacagacatccaagtaagagtct

SEQ ID NO: 1356765 - DNA, 25 bp, Homo sapien
acagacatccaagtaagagtctgtg

SEQ ID NO: 1356766 - DNA, 25 bp, Homo sapien
tgcgatggcaaaagacagtcaggca

SEQ ID NO: 1356767 - DNA, 25 bp, Homo sapien
aatgcgatggcaaaagacagtcagg

SEQ ID NO: 1356768 - DNA, 25 bp, Homo sapien
gatggcaaaagacagtcaggcaatg

SEQ ID NO: 1356769 - DNA, 25 bp, Homo sapien
caatgcgatggcaaaagacagtcag

SEQ ID NO: 1356770 - DNA, 25 bp, Homo sapien
ctagccgcccttgctgagcccttca

SEQ ID NO: 1356771 - DNA, 25 bp, Homo sapien
gacaagttcctagccgcccttgctg

SEQ ID NO: 1356772 - DNA, 25 bp, Homo sapien
cagccaggggacaagttcctagccg

SEQ ID NO: 1356773 - DNA, 25 bp, Homo sapien
caggggacaagttcctagccgccct

SEQ ID NO: 1356774 - DNA, 25 bp, Homo sapien
cttgccttagacgaatggcacgaca

SEQ ID NO: 1356775 - DNA, 25 bp, Homo sapien
gttgtctctgaacagaaatggattt

SEQ ID NO: 1356776 - DNA, 25 bp, Homo sapien
gattttgcttgccttagacgaatgg

SEQ ID NO: 1356777 - DNA, 25 bp, Homo sapien
gccttagacgaatggcacgacattg

SEQ ID NO: 1356778 - DNA, 25 bp, Homo sapien
ctgggttgttacttgtgcgttcatc

SEQ ID NO: 1356779 - DNA, 25 bp, Homo sapien
gggatgtaactaactaaaatattgc

SEQ ID NO: 1356780 - DNA, 25 bp, Homo sapien
taatgctgaatgtatgtacctgggt

SEQ ID NO: 1356781 - DNA, 25 bp, Homo sapien
gtgatattagttggctctagcaggg

SEQ ID NO: 1356782 - DNA, 25 bp, Homo sapien
ccaaatatctcttagctggtatgaa

SEQ ID NO: 1356783 - DNA, 25 bp, Homo sapien
tttggaaatcagaagtctgtgaagc

SEQ ID NO: 1356784 - DNA, 25 bp, Homo sapien
gagcaacaggtgaattactacagtg

SEQ ID NO: 1356785 - DNA, 25 bp, Homo sapien
tacttactggtagtttcaagaaatc

SEQ ID NO: 1356786 - DNA, 25 bp, Homo sapien
tttgcacccagtgacagatctctaa

SEQ ID NO: 1356787 - DNA, 25 bp, Homo sapien
ttgcacccagtgacagatctctaac

SEQ ID NO: 1356788 - DNA, 25 bp, Homo sapien
ttttgcacccagtgacagatctcta

SEQ ID NO: 1356789 - DNA, 25 bp, Homo sapien
tcttttgcacccagtgacagatctc

SEQ ID NO: 1356790 - DNA, 25 bp, Homo sapien
gaaatcaactactttgtaacatggt

SEQ ID NO: 1356791 - DNA, 25 bp, Homo sapien
tctaggttaacagtaacaaggtgtg

SEQ ID NO: 1356792 - DNA, 25 bp, Homo sapien
gaatatctgtggatcactaatgaaa

SEQ ID NO: 1356793 - DNA, 25 bp, Homo sapien
gagatagagctattctttttactga

SEQ ID NO: 1356794 - DNA, 25 bp, Homo sapien
aatctccttagggaaattcagtctt

SEQ ID NO: 1356795 - DNA, 25 bp, Homo sapien
tcaagctcctatcatattacctaag

SEQ ID NO: 1356796 - DNA, 25 bp, Homo sapien
aattttactggagatatacaaaaca

SEQ ID NO: 1356797 - DNA, 25 bp, Homo sapien
aaaaaattcaagctcctatcatatt

SEQ ID NO: 1356798 - DNA, 25 bp, Homo sapien
tggccatactgggaggaaaagtctc

SEQ ID NO: 1356799 - DNA, 25 bp, Homo sapien
gactgagcccagttagggacaccct

SEQ ID NO: 1356800 - DNA, 25 bp, Homo sapien
cacagatcagagctagtctatggcc

SEQ ID NO: 1356801 - DNA, 25 bp, Homo sapien
cgaccattagcctgagtgatgccca

SEQ ID NO: 1356802 - DNA, 25 bp, Homo sapien
tgttgattgtcccaaggtctacagt

SEQ ID NO: 1356803 - DNA, 25 bp, Homo sapien
gattgtcccaaggtctacagtttct

SEQ ID NO: 1356804 - DNA, 25 bp, Homo sapien
ttaaatgttgattgtcccaaggtct

SEQ ID NO: 1356805 - DNA, 25 bp, Homo sapien
aaaggaaactcccatatttagcact

SEQ ID NO: 1356806 - DNA, 25 bp, Homo sapien
atcgttattaacagtcctctgggcg

SEQ ID NO: 1356807 - DNA, 25 bp, Homo sapien
aaggcttctattttgagcttggaat

SEQ ID NO: 1356808 - DNA, 25 bp, Homo sapien
cctctgggcgtgctggagctcactg

SEQ ID NO: 1356809 - DNA, 25 bp, Homo sapien
ctattttgagcttggaatgttgtgc

SEQ ID NO: 1356810 - DNA, 25 bp, Homo sapien
tcaagcttcttactgattgcctaaa

SEQ ID NO: 1356811 - DNA, 25 bp, Homo sapien
aatagaaagtaagatcaagcttctt

SEQ ID NO: 1356812 - DNA, 25 bp, Homo sapien
tctacagtagcagtaaacagttcct

SEQ ID NO: 1356813 - DNA, 25 bp, Homo sapien
cacgtgcatctaacctatttctgta

SEQ ID NO: 1356814 - DNA, 25 bp, Homo sapien
gctgagagccacaagatcttgctgc

SEQ ID NO: 1356815 - DNA, 25 bp, Homo sapien
gagagatgaaacaattgatgaatac

SEQ ID NO: 1356816 - DNA, 25 bp, Homo sapien
catactctcatcgttacaggcaggg

SEQ ID NO: 1356817 - DNA, 25 bp, Homo sapien
tccctctttgccactgctacatact

SEQ ID NO: 1356818 - DNA, 25 bp, Homo sapien
tcctgcatcatttgctcgttctgcc

SEQ ID NO: 1356819 - DNA, 25 bp, Homo sapien
gtctcacttgttcctgatggagtct

SEQ ID NO: 1356820 - DNA, 25 bp, Homo sapien
ttgaatcgccgccaacctttgcgct

SEQ ID NO: 1356821 - DNA, 25 bp, Homo sapien
catttgtctcacttgttcctgatgg

SEQ ID NO: 1356822 - DNA, 25 bp, Homo sapien
tcccacttttgtttgtgattgttcc

SEQ ID NO: 1356823 - DNA, 25 bp, Homo sapien
ccagtcagatatgcttgaggagcta

SEQ ID NO: 1356824 - DNA, 25 bp, Homo sapien
gctctagtttaacatcccatgaggg

SEQ ID NO: 1356825 - DNA, 25 bp, Homo sapien
ttccaggtaaccacaatgcaggatc

SEQ ID NO: 1356826 - DNA, 25 bp, Homo sapien
gagagcctggtcagtctgtaatatt

SEQ ID NO: 1356827 - DNA, 25 bp, Homo sapien
ctctgtgagagcctggtcagtctgt

SEQ ID NO: 1356828 - DNA, 25 bp, Homo sapien
agcctggtcagtctgtaatattgca

SEQ ID NO: 1356829 - DNA, 25 bp, Homo sapien
ctgtgagagcctggtcagtctgtaa

SEQ ID NO: 1356830 - DNA, 25 bp, Homo sapien
taagcttggacctgttggtgtcacc

SEQ ID NO: 1356831 - DNA, 25 bp, Homo sapien
tagcaacccggaaaacatgcagtta

SEQ ID NO: 1356832 - DNA, 25 bp, Homo sapien
gtcagtcagagcatgcaagtccact

SEQ ID NO: 1356833 - DNA, 25 bp, Homo sapien
taaattctgtgcgaggaacaccaac

SEQ ID NO: 1356834 - DNA, 25 bp, Homo sapien
tccgaggctcccgatagtactttgc

SEQ ID NO: 1356835 - DNA, 25 bp, Homo sapien
aatgaagagattatggcctcctggc

SEQ ID NO: 1356836 - DNA, 25 bp, Homo sapien
taatccgaggatgcttccaggttcc

SEQ ID NO: 1356837 - DNA, 25 bp, Homo sapien
agtaaagccgagcaataatccgagg

SEQ ID NO: 1356838 - DNA, 25 bp, Homo sapien
aaaaattccaaggatgatactctat

SEQ ID NO: 1356839 - DNA, 25 bp, Homo sapien
aattccaaggatgatactctataga

SEQ ID NO: 1356840 - DNA, 25 bp, Homo sapien
ggatgatactctatagaaaaatgac

SEQ ID NO: 1356841 - DNA, 25 bp, Homo sapien
ccaaggatgatactctatagaaaaa

SEQ ID NO: 1356842 - DNA, 25 bp, Homo sapien
ccccatgaactagaaacaaaaatat

SEQ ID NO: 1356843 - DNA, 25 bp, Homo sapien
taatccccatgaactagaaacaaaa

SEQ ID NO: 1356844 - DNA, 25 bp, Homo sapien
catgaactagaaacaaaaatatcac

SEQ ID NO: 1356845 - DNA, 25 bp, Homo sapien
ttaatccccatgaactagaaacaaa

SEQ ID NO: 1356846 - DNA, 25 bp, Homo sapien
gaaactttggtctacatccttgaaa

SEQ ID NO: 1356847 - DNA, 25 bp, Homo sapien
caggactgcattctctatgcaaggc

SEQ ID NO: 1356848 - DNA, 25 bp, Homo sapien
ttcatgaagacttcaatggcctccc

SEQ ID NO: 1356849 - DNA, 25 bp, Homo sapien
tctggaaactttggtctacatcctt

SEQ ID NO: 1356850 - DNA, 25 bp, Homo sapien
aagagtcttggtcatagaatggcta

SEQ ID NO: 1356851 - DNA, 25 bp, Homo sapien
gaccatgatgccacctggaagagtc

SEQ ID NO: 1356852 - DNA, 25 bp, Homo sapien
ccacctggaagagtcttggtcatag

SEQ ID NO: 1356853 - DNA, 25 bp, Homo sapien
tagaatggctaaagatgtaggaaca

SEQ ID NO: 1356854 - DNA, 25 bp, Homo sapien
cacttgttgcacaaattcaggctct

SEQ ID NO: 1356855 - DNA, 25 bp, Homo sapien
cacaaattcaggctctagctcatca

SEQ ID NO: 1356856 - DNA, 25 bp, Homo sapien
gagcaggtaagtcaaagataaagca

SEQ ID NO: 1356857 - DNA, 25 bp, Homo sapien
ggtgagcaggtaagtcaaagataaa

SEQ ID NO: 1356858 - DNA, 25 bp, Homo sapien
caggtaagtcaaagataaagcattt

SEQ ID NO: 1356859 - DNA, 25 bp, Homo sapien
ttggtgagcaggtaagtcaaagata

SEQ ID NO: 1356860 - DNA, 25 bp, Homo sapien
tgtatacacagacggggcaaattga

SEQ ID NO: 1356861 - DNA, 25 bp, Homo sapien
ctgtatacacagacggggcaaattg

SEQ ID NO: 1356862 - DNA, 25 bp, Homo sapien
acacagacggggcaaattgaaattt

SEQ ID NO: 1356863 - DNA, 25 bp, Homo sapien
cagacggggcaaattgaaattttga

SEQ ID NO: 1356864 - DNA, 25 bp, Homo sapien
aataggatttatttagcatagactt

SEQ ID NO: 1356865 - DNA, 25 bp, Homo sapien
gcaaaatggtaactaatcagggaaa

SEQ ID NO: 1356866 - DNA, 25 bp, Homo sapien
ttaatatatcttcataaaccctaag

SEQ ID NO: 1356867 - DNA, 25 bp, Homo sapien
ccacctgatgtcacttagattaata

SEQ ID NO: 1356868 - DNA, 25 bp, Homo sapien
tgacaagttgcccatctatttccag

SEQ ID NO: 1356869 - DNA, 25 bp, Homo sapien
gtgacaagttgcccatctatttcca

SEQ ID NO: 1356870 - DNA, 25 bp, Homo sapien
gagtttcttgccttgagcagatctg

SEQ ID NO: 1356871 - DNA, 25 bp, Homo sapien
tcaaggtcgggtgagtttcttgcct

SEQ ID NO: 1356872 - DNA, 25 bp, Homo sapien
ggatcttcaaccctgtcaaggtcgg

SEQ ID NO: 1356873 - DNA, 25 bp, Homo sapien
tcttgccttgagcagatctgtcagt

SEQ ID NO: 1356874 - DNA, 25 bp, Homo sapien
agacatgcagctggtaaatagagga

SEQ ID NO: 1356875 - DNA, 25 bp, Homo sapien
taaatagaggagttctgtcggactt

SEQ ID NO: 1356876 - DNA, 25 bp, Homo sapien
tgcagctggtaaatagaggagttct

SEQ ID NO: 1356877 - DNA, 25 bp, Homo sapien
gagttctgtcggactttggtgccat

SEQ ID NO: 1356878 - DNA, 25 bp, Homo sapien
cagtaagagtgccagtgcaaagatc

SEQ ID NO: 1356879 - DNA, 25 bp, Homo sapien
tgtacacaaaggtgctgctcagtaa

SEQ ID NO: 1356880 - DNA, 25 bp, Homo sapien
gcaccctgatcaattttgttcacag

SEQ ID NO: 1356881 - DNA, 25 bp, Homo sapien
tgcagtaggtcgatagcaccctgat

SEQ ID NO: 1356882 - DNA, 25 bp, Homo sapien
gccctcggtgtcaagcagaactaat

SEQ ID NO: 1356883 - DNA, 25 bp, Homo sapien
agactgcaccgtagatgcaacagag

SEQ ID NO: 1356884 - DNA, 25 bp, Homo sapien
taatgtgtgatttggccagttggga

SEQ ID NO: 1356885 - DNA, 25 bp, Homo sapien
ccttggtgtgagactgcaccgtaga

SEQ ID NO: 1356886 - DNA, 25 bp, Homo sapien
gggagtgagaggttgtaatagaaga

SEQ ID NO: 1356887 - DNA, 25 bp, Homo sapien
ggagtgagaggttgtaatagaagag

SEQ ID NO: 1356888 - DNA, 25 bp, Homo sapien
gagtgagaggttgtaatagaagaga

SEQ ID NO: 1356889 - DNA, 25 bp, Homo sapien
ttgcttcctcgtactggatggtgac

SEQ ID NO: 1356890 - DNA, 25 bp, Homo sapien
ggcagagctttgctggtaccactca

SEQ ID NO: 1356891 - DNA, 25 bp, Homo sapien
tcctcgtactggatggtgactgtgt

SEQ ID NO: 1356892 - DNA, 25 bp, Homo sapien
tggcagagctttgctggtaccactc

SEQ ID NO: 1356893 - DNA, 25 bp, Homo sapien
gaggcccacaatcgctaccacaact

SEQ ID NO: 1356894 - DNA, 25 bp, Homo sapien
gctaccacaactacaggttgcgtaa

SEQ ID NO: 1356895 - DNA, 25 bp, Homo sapien
caactacaggttgcgtaatggcaga

SEQ ID NO: 1356896 - DNA, 25 bp, Homo sapien
cacaatcgctaccacaactacaggt

SEQ ID NO: 1356897 - DNA, 25 bp, Homo sapien
gggtctgacatgtggatctctaaag

SEQ ID NO: 1356898 - DNA, 25 bp, Homo sapien
taaagttctcgatgaggcacatggg

SEQ ID NO: 1356899 - DNA, 25 bp, Homo sapien
cttcagctgctcattaaagttctcg

SEQ ID NO: 1356900 - DNA, 25 bp, Homo sapien
tctgacatgtggatctctaaagcca

SEQ ID NO: 1356901 - DNA, 25 bp, Homo sapien
cagcactgcctaagtttctggaaaa

SEQ ID NO: 1356902 - DNA, 25 bp, Homo sapien
cttggcagcagaaaataggatatcc

SEQ ID NO: 1356903 - DNA, 25 bp, Homo sapien
gaaatgcctagtgcaagcctgaccc

SEQ ID NO: 1356904 - DNA, 25 bp, Homo sapien
aaaacttcactatccgcttgacgag

SEQ ID NO: 1356905 - DNA, 25 bp, Homo sapien
tgaagtgatgatctacaacaattag

SEQ ID NO: 1356906 - DNA, 25 bp, Homo sapien
tttccactagaaagatatgggcacc

SEQ ID NO: 1356907 - DNA, 25 bp, Homo sapien
tatatgtagaattctggttgcctga

SEQ ID NO: 1356908 - DNA, 25 bp, Homo sapien
tgatttgtatgcagcggaggccaga

SEQ ID NO: 1356909 - DNA, 25 bp, Homo sapien
actgcttgagccctataacctttgc

SEQ ID NO: 1356910 - DNA, 25 bp, Homo sapien
cagtattgagggatccagttgggca

SEQ ID NO: 1356911 - DNA, 25 bp, Homo sapien
aattagacttgatttccaaccccag

SEQ ID NO: 1356912 - DNA, 25 bp, Homo sapien
taacttagtgttctgggatgcattc

SEQ ID NO: 1356913 - DNA, 25 bp, Homo sapien
tctttctcatgaaaataatagctat

SEQ ID NO: 1356914 - DNA, 25 bp, Homo sapien
attgcatcatattcattgttctttc

SEQ ID NO: 1356915 - DNA, 25 bp, Homo sapien
tttctcatgaaaataatagctatca

SEQ ID NO: 1356916 - DNA, 25 bp, Homo sapien
gcatcatattcattgttctttctca

SEQ ID NO: 1356917 - DNA, 25 bp, Homo sapien
gatataccacatcaggataagctgc

SEQ ID NO: 1356918 - DNA, 25 bp, Homo sapien
ggcagacacagctggtacttgatga

SEQ ID NO: 1356919 - DNA, 25 bp, Homo sapien
tctttactgaggtctgatataccac

SEQ ID NO: 1356920 - DNA, 25 bp, Homo sapien
taagctgcatcctatcctttgtaga

SEQ ID NO: 1356921 - DNA, 25 bp, Homo sapien
gcggaccctagcgttgagtgtcacg

SEQ ID NO: 1356922 - DNA, 25 bp, Homo sapien
accctagcgttgagtgtcacggttc

SEQ ID NO: 1356923 - DNA, 25 bp, Homo sapien
acaaaggttccacagcctggagggt

SEQ ID NO: 1356924 - DNA, 25 bp, Homo sapien
ggaccctagcgttgagtgtcacggt

SEQ ID NO: 1356925 - DNA, 25 bp, Homo sapien
aatcaagaatgggtaagattacagg

SEQ ID NO: 1356926 - DNA, 25 bp, Homo sapien
aattaataaaacagggcaaacatct

SEQ ID NO: 1356927 - DNA, 25 bp, Homo sapien
ccagggctgacacaagtaaatacca

SEQ ID NO: 1356928 - DNA, 25 bp, Homo sapien
gcatcaactcgaaatccaaatctca

SEQ ID NO: 1356929 - DNA, 25 bp, Homo sapien
cctcatcaagtgagaagggttgagc

SEQ ID NO: 1356930 - DNA, 25 bp, Homo sapien
gaaatcccctcagctaaatatcatc

SEQ ID NO: 1356931 - DNA, 25 bp, Homo sapien
ctttttacagtaggctttggcttca

SEQ ID NO: 1356932 - DNA, 25 bp, Homo sapien
ccagagcatgctatctggataggct

SEQ ID NO: 1356933 - DNA, 25 bp, Homo sapien
gacagtcttcactctgggatgacaa

SEQ ID NO: 1356934 - DNA, 25 bp, Homo sapien
caacaagattgtaggacaagacagt

SEQ ID NO: 1356935 - DNA, 25 bp, Homo sapien
gcatgaagaacatccaagttgtcgt

SEQ ID NO: 1356936 - DNA, 25 bp, Homo sapien
tcttcagggtgttgttatgccaggc

SEQ ID NO: 1356937 - DNA, 25 bp, Homo sapien
ctggagacaactgccactagattag

SEQ ID NO: 1356938 - DNA, 25 bp, Homo sapien
acaactgccactagattagctgtca

SEQ ID NO: 1356939 - DNA, 25 bp, Homo sapien
gagacaactgccactagattagctg

SEQ ID NO: 1356940 - DNA, 25 bp, Homo sapien
ggagacaactgccactagattagct

SEQ ID NO: 1356941 - DNA, 25 bp, Homo sapien
ggagaaactctttgcaatctactca

SEQ ID NO: 1356942 - DNA, 25 bp, Homo sapien
tctacaatgaactcaaacaaattta

SEQ ID NO: 1356943 - DNA, 25 bp, Homo sapien
tacaagaaaaaaacaatcccatcaa

SEQ ID NO: 1356944 - DNA, 25 bp, Homo sapien
tctgacaaagggctaatatccagaa

SEQ ID NO: 1356945 - DNA, 25 bp, Homo sapien
tttttgcaattgactcatctgacaa

SEQ ID NO: 1356946 - DNA, 25 bp, Homo sapien
gaaaatttttgcaattgactcatct

SEQ ID NO: 1356947 - DNA, 25 bp, Homo sapien
tgaactcaaacaaatttacaagaaa

SEQ ID NO: 1356948 - DNA, 25 bp, Homo sapien
agggctaatatccagaatctacaat

SEQ ID NO: 1356949 - DNA, 25 bp, Homo sapien
caagctccattgctacaaaggtgta

SEQ ID NO: 1356950 - DNA, 25 bp, Homo sapien
taatagagcatggtgctgtttcctc

SEQ ID NO: 1356951 - DNA, 25 bp, Homo sapien
gaccaggtgagaccacagaatacta

SEQ ID NO: 1356952 - DNA, 25 bp, Homo sapien
gaaatgttcatgtaggtaagcttta

SEQ ID NO: 1356953 - DNA, 25 bp, Homo sapien
tgcatggctacctctatcaggccct

SEQ ID NO: 1356954 - DNA, 25 bp, Homo sapien
ggtgggcgcctgcatggctacctct

SEQ ID NO: 1356955 - DNA, 25 bp, Homo sapien
ctgcagcaggcccaaaaatgcagaa

SEQ ID NO: 1356956 - DNA, 25 bp, Homo sapien
aatgcagaaagcaagaccgtcgctg

SEQ ID NO: 1356957 - DNA, 25 bp, Homo sapien
gtttgcagctggtcaaaatggggaa

SEQ ID NO: 1356958 - DNA, 25 bp, Homo sapien
tatgcatacattgaaacctatcaaa

SEQ ID NO: 1356959 - DNA, 25 bp, Homo sapien
gatatatctattgcattgattgtgg

SEQ ID NO: 1356960 - DNA, 25 bp, Homo sapien
aagccattacttacaaaagagtact

SEQ ID NO: 1356961 - DNA, 25 bp, Homo sapien
aataaagcaacagcagaaagagccc

SEQ ID NO: 1356962 - DNA, 25 bp, Homo sapien
aggaaaaataaagcaacagcagaaa

SEQ ID NO: 1356963 - DNA, 25 bp, Homo sapien
aaaataaagcaacagcagaaagagc

SEQ ID NO: 1356964 - DNA, 25 bp, Homo sapien
taaagcaacagcagaaagagcccac

SEQ ID NO: 1356965 - DNA, 25 bp, Homo sapien
attccaaagagagctatcaactctc

SEQ ID NO: 1356966 - DNA, 25 bp, Homo sapien
tggacaccagacaaggaccatcctg

SEQ ID NO: 1356967 - DNA, 25 bp, Homo sapien
cccaggatgaaggtcaatctggaca

SEQ ID NO: 1356968 - DNA, 25 bp, Homo sapien
actctctacatggagaagcttcatg

SEQ ID NO: 1356969 - DNA, 25 bp, Homo sapien
tcctctttaaccacttggccatcaa

SEQ ID NO: 1356970 - DNA, 25 bp, Homo sapien
catcaatttcgaagacatcatgctt

SEQ ID NO: 1356971 - DNA, 25 bp, Homo sapien
ttggccatcaatttcgaagacatca

SEQ ID NO: 1356972 - DNA, 25 bp, Homo sapien
aatttcgaagacatcatgcttctca

SEQ ID NO: 1356973 - DNA, 25 bp, Homo sapien
aatatggagatcctaaagagaaaac

SEQ ID NO: 1356974 - DNA, 25 bp, Homo sapien
catacctgtacaactaaaatgtttg

SEQ ID NO: 1356975 - DNA, 25 bp, Homo sapien
gtcaagtcttgaactacaaatagaa

SEQ ID NO: 1356976 - DNA, 25 bp, Homo sapien
cattgtccagagaaataaaacgtga

SEQ ID NO: 1356977 - DNA, 25 bp, Homo sapien
taaatacgcctattccaaatggaag

SEQ ID NO: 1356978 - DNA, 25 bp, Homo sapien
tgataaaattatctccgggtccctc

SEQ ID NO: 1356979 - DNA, 25 bp, Homo sapien
tcttaaaactcgagaatgatctccc

SEQ ID NO: 1356980 - DNA, 25 bp, Homo sapien
catgctgatgcaagatggatttcca

SEQ ID NO: 1356981 - DNA, 25 bp, Homo sapien
tagttttacaaaggcggtgtcagtc

SEQ ID NO: 1356982 - DNA, 25 bp, Homo sapien
caaatctgacctctggaaccgtggt

SEQ ID NO: 1356983 - DNA, 25 bp, Homo sapien
tagcttggcctatgctccagaatgg

SEQ ID NO: 1356984 - DNA, 25 bp, Homo sapien
ggtgtcagtcctcaaacaatgaagg

SEQ ID NO: 1356985 - DNA, 25 bp, Homo sapien
aagggaacatcgcacaccacggcct

SEQ ID NO: 1356986 - DNA, 25 bp, Homo sapien
aggaaagggaacatcgcacaccacg

SEQ ID NO: 1356987 - DNA, 25 bp, Homo sapien
aatgtccaacaatgtggcacatata

SEQ ID NO: 1356988 - DNA, 25 bp, Homo sapien
aaatgtccaacaatgtggcacatat

SEQ ID NO: 1356989 - DNA, 25 bp, Homo sapien
actgggtgcagcacaccaacatggc

SEQ ID NO: 1356990 - DNA, 25 bp, Homo sapien
tgttaaatgacgagttactgggtgc

SEQ ID NO: 1356991 - DNA, 25 bp, Homo sapien
gttactgggtgcagcacaccaacat

SEQ ID NO: 1356992 - DNA, 25 bp, Homo sapien
atgttaaatgacgagttactgggtg

SEQ ID NO: 1356993 - DNA, 25 bp, Homo sapien
attggccagcggaacgcgtcgcgtc

SEQ ID NO: 1356994 - DNA, 25 bp, Homo sapien
tgcagagacgagtggccgcttcgtt

SEQ ID NO: 1356995 - DNA, 25 bp, Homo sapien
ggtgcggttacctgttcacgcctca

SEQ ID NO: 1356996 - DNA, 25 bp, Homo sapien
tcgcgtcacaatggagccggtcgga

SEQ ID NO: 1356997 - DNA, 25 bp, Homo sapien
atttgtgaatgtatgctgtggagcc

SEQ ID NO: 1356998 - DNA, 25 bp, Homo sapien
tctggaaggcacatttaaagaggac

SEQ ID NO: 1356999 - DNA, 25 bp, Homo sapien
tcttatcaagaatggcagtaactcc

SEQ ID NO: 1357000 - DNA, 25 bp, Homo sapien
caggagtgtcagatctaatgtgcca

SEQ ID NO: 1357001 - DNA, 25 bp, Homo sapien
cacccgactcttctgagagctcaaa

SEQ ID NO: 1357002 - DNA, 25 bp, Homo sapien
cagataattattgagactgttagtg

SEQ ID NO: 1357003 - DNA, 25 bp, Homo sapien
tgcacacccgactcttctgagagct

SEQ ID NO: 1357004 - DNA, 25 bp, Homo sapien
ttagtgtcaggttcttcctgcacac

SEQ ID NO: 1357005 - DNA, 25 bp, Homo sapien
catcccatttggtgagtaagttggc

SEQ ID NO: 1357006 - DNA, 25 bp, Homo sapien
gaagacttagcctctgcttctgaat

SEQ ID NO: 1357007 - DNA, 25 bp, Homo sapien
cctttctccctgaaggatgaagact

SEQ ID NO: 1357008 - DNA, 25 bp, Homo sapien
gcagttccccattcagatttgtaaa

SEQ ID NO: 1357009 - DNA, 25 bp, Homo sapien
gacaatcactgtgccgtgccttggg

SEQ ID NO: 1357010 - DNA, 25 bp, Homo sapien
taaaaccatggtgggacgtcttctg

SEQ ID NO: 1357011 - DNA, 25 bp, Homo sapien
cacaagtgcttcgattctccatgga

SEQ ID NO: 1357012 - DNA, 25 bp, Homo sapien
caagattttgctttcgtcctcaggg

SEQ ID NO: 1357013 - DNA, 25 bp, Homo sapien
gatataagcgctaccagtgtgtcta

SEQ ID NO: 1357014 - DNA, 25 bp, Homo sapien
tggtcaacctcaaggagcttcgtgt

SEQ ID NO: 1357015 - DNA, 25 bp, Homo sapien
taaggaccctgtacttgaagagcag

SEQ ID NO: 1357016 - DNA, 25 bp, Homo sapien
tgtgtgttctcaagccaagcccaat

SEQ ID NO: 1357017 - DNA, 25 bp, Homo sapien
ccgagtctgagcaactgattggcat

SEQ ID NO: 1357018 - DNA, 25 bp, Homo sapien
gccccggttcaaagtccgagtctga

SEQ ID NO: 1357019 - DNA, 25 bp, Homo sapien
cacttctttgtaatgttagccccgg

SEQ ID NO: 1357020 - DNA, 25 bp, Homo sapien
tgcccacattgtggctataggagag

SEQ ID NO: 1357021 - DNA, 25 bp, Homo sapien
gatgtcagtccctaaaacggaactg

SEQ ID NO: 1357022 - DNA, 25 bp, Homo sapien
cagattgagatgctaccagatgggc

SEQ ID NO: 1357023 - DNA, 25 bp, Homo sapien
cagacgtgcttagacaaatgttgac

SEQ ID NO: 1357024 - DNA, 25 bp, Homo sapien
catgtgggtgagctgtcaaacctta

SEQ ID NO: 1357025 - DNA, 25 bp, Homo sapien
taatcttggattcaacatctgtgag

SEQ ID NO: 1357026 - DNA, 25 bp, Homo sapien
caccaatgatgaaccctgagaaaat

SEQ ID NO: 1357027 - DNA, 25 bp, Homo sapien
catttggcctttgcctagaacagga

SEQ ID NO: 1357028 - DNA, 25 bp, Homo sapien
ggtttcggctgtttatgactcatgt

SEQ ID NO: 1357029 - DNA, 25 bp, Homo sapien
taactgcacctacacaaaactggaa

SEQ ID NO: 1357030 - DNA, 25 bp, Homo sapien
aaaacagcctctattcagtgtctaa

SEQ ID NO: 1357031 - DNA, 25 bp, Homo sapien
aatgagttctcaaaacccacaaaga

SEQ ID NO: 1357032 - DNA, 25 bp, Homo sapien
gggtctaggcattatgatgccacct

SEQ ID NO: 1357033 - DNA, 25 bp, Homo sapien
caaaacttgcctttagtcagaacat

SEQ ID NO: 1357034 - DNA, 25 bp, Homo sapien
cttgcctttagtcagaacattcagc

SEQ ID NO: 1357035 - DNA, 25 bp, Homo sapien
cagggaagcaggtataactgatgaa

SEQ ID NO: 1357036 - DNA, 25 bp, Homo sapien
tctcagggaagcaggtataactgat

SEQ ID NO: 1357037 - DNA, 25 bp, Homo sapien
tgctgtggtgcactgcagtgatgta

SEQ ID NO: 1357038 - DNA, 25 bp, Homo sapien
catagctccaataggtgtgctgtgg

SEQ ID NO: 1357039 - DNA, 25 bp, Homo sapien
tgcataacattgtttgatagtgaaa

SEQ ID NO: 1357040 - DNA, 25 bp, Homo sapien
cataatattgatgggttcaaaaacc

SEQ ID NO: 1357041 - DNA, 25 bp, Homo sapien
gatcctagaatacatgggttgcggg

SEQ ID NO: 1357042 - DNA, 25 bp, Homo sapien
tagtagatctctcatgagtgggccc

SEQ ID NO: 1357043 - DNA, 25 bp, Homo sapien
gatgttcatagaacgcctcatctct

SEQ ID NO: 1357044 - DNA, 25 bp, Homo sapien
gaaaagagctgcgtggatcctagaa

SEQ ID NO: 1357045 - DNA, 25 bp, Homo sapien
ctgaattgtgaaccaggtaagcaaa

SEQ ID NO: 1357046 - DNA, 25 bp, Homo sapien
gcagcatgacttaaaggaggtcttg

SEQ ID NO: 1357047 - DNA, 25 bp, Homo sapien
ggggcagtaagggtcttctttgata

SEQ ID NO: 1357048 - DNA, 25 bp, Homo sapien
cacagccacacccttgtccgttctc

SEQ ID NO: 1357049 - DNA, 25 bp, Homo sapien
catgacttaaaggaggtcttgtttc

SEQ ID NO: 1357050 - DNA, 25 bp, Homo sapien
gtgaatgttcttgcccttttgtgcc

SEQ ID NO: 1357051 - DNA, 25 bp, Homo sapien
atgtgaatgttcttgcccttttgtg

SEQ ID NO: 1357052 - DNA, 25 bp, Homo sapien
aaatgtgaatgttcttgcccttttg

SEQ ID NO: 1357053 - DNA, 25 bp, Homo sapien
agaaatgtgaatgttcttgcccttt

SEQ ID NO: 1357054 - DNA, 25 bp, Homo sapien
cctgaaaatccttctcaggtgttgc

SEQ ID NO: 1357055 - DNA, 25 bp, Homo sapien
ctgaaaatccttctcaggtgttgca

SEQ ID NO: 1357056 - DNA, 25 bp, Homo sapien
tatagtcagctacataaagtggacc

SEQ ID NO: 1357057 - DNA, 25 bp, Homo sapien
gatctgcctgataccatttctctga

SEQ ID NO: 1357058 - DNA, 25 bp, Homo sapien
gcaaagtggcatattaagaacatcg

SEQ ID NO: 1357059 - DNA, 25 bp, Homo sapien
ttcaaagagcacttcaaaggccact

SEQ ID NO: 1357060 - DNA, 25 bp, Homo sapien
ggcccaggtgagacaccatcctaag

SEQ ID NO: 1357061 - DNA, 25 bp, Homo sapien
cagtccacagactgttcaacatttt

SEQ ID NO: 1357062 - DNA, 25 bp, Homo sapien
cctgctggtggccaagtgagaccat

SEQ ID NO: 1357063 - DNA, 25 bp, Homo sapien
cccaggtgagacaccatcctaagct

SEQ ID NO: 1357064 - DNA, 25 bp, Homo sapien
caaattttaacctctaccatatgga

SEQ ID NO: 1357065 - DNA, 25 bp, Homo sapien
taaggatgcaattagctgttaaata

SEQ ID NO: 1357066 - DNA, 25 bp, Homo sapien
taaataatctaaccctcacaaccag

SEQ ID NO: 1357067 - DNA, 25 bp, Homo sapien
gaaagattccctttggcattatact

SEQ ID NO: 1357068 - DNA, 25 bp, Homo sapien
tcatcttacaaatgtgcagacctgg

SEQ ID NO: 1357069 - DNA, 25 bp, Homo sapien
aaatcactgcagcaagttgtcagcc

SEQ ID NO: 1357070 - DNA, 25 bp, Homo sapien
gcagacctggttgctcttaaatcaa

SEQ ID NO: 1357071 - DNA, 25 bp, Homo sapien
catgcctgacgtagagtaaatcctc

SEQ ID NO: 1357072 - DNA, 25 bp, Homo sapien
gaattcctgtagatagcagctagca

SEQ ID NO: 1357073 - DNA, 25 bp, Homo sapien
gacagctgcttagaaatgcctcatt

SEQ ID NO: 1357074 - DNA, 25 bp, Homo sapien
gactggtctgccctgcctgtagaca

SEQ ID NO: 1357075 - DNA, 25 bp, Homo sapien
tacttcgggaagatactggctgact

SEQ ID NO: 1357076 - DNA, 25 bp, Homo sapien
attctcacaccaaacaagccctaag

SEQ ID NO: 1357077 - DNA, 25 bp, Homo sapien
tataaaattctcacaccaaacaagc

SEQ ID NO: 1357078 - DNA, 25 bp, Homo sapien
taaaattctcacaccaaacaagccc

SEQ ID NO: 1357079 - DNA, 25 bp, Homo sapien
cacaccaaacaagccctaagaagac

SEQ ID NO: 1357080 - DNA, 25 bp, Homo sapien
ttccattgtctttagaataactcac

SEQ ID NO: 1357081 - DNA, 25 bp, Homo sapien
tgttccattgtctttagaataactc

SEQ ID NO: 1357082 - DNA, 25 bp, Homo sapien
aatgttccattgtctttagaataac

SEQ ID NO: 1357083 - DNA, 25 bp, Homo sapien
taaatgttccattgtctttagaata

SEQ ID NO: 1357084 - DNA, 25 bp, Homo sapien
ccaatcataagtggcaggttcccat

SEQ ID NO: 1357085 - DNA, 25 bp, Homo sapien
gatatatagggtaagatccagggtc

SEQ ID NO: 1357086 - DNA, 25 bp, Homo sapien
tcatcaacatggaaggtctctgaac

SEQ ID NO: 1357087 - DNA, 25 bp, Homo sapien
ccagggtcttgagtatagaagggtc

SEQ ID NO: 1357088 - DNA, 25 bp, Homo sapien
tgagaactactaactctggaagtcc

SEQ ID NO: 1357089 - DNA, 25 bp, Homo sapien
gagatacaagatttaagcccagacc

SEQ ID NO: 1357090 - DNA, 25 bp, Homo sapien
gacagagtctgtgcacccagttcat

SEQ ID NO: 1357091 - DNA, 25 bp, Homo sapien
tgaactatgaacaccctgaagtcgg

SEQ ID NO: 1357092 - DNA, 25 bp, Homo sapien
aaggaggcgactgttttctgaaggc

SEQ ID NO: 1357093 - DNA, 25 bp, Homo sapien
gccaactggccagcaactagttgtc

SEQ ID NO: 1357094 - DNA, 25 bp, Homo sapien
tctgaaggcttgtagcacgaaaaca

SEQ ID NO: 1357095 - DNA, 25 bp, Homo sapien
actagttgtctatcagtttctctac

SEQ ID NO: 1357096 - DNA, 25 bp, Homo sapien
tggcattgataaggcattcccagaa

SEQ ID NO: 1357097 - DNA, 25 bp, Homo sapien
cttttccagactgccagcgcggagc

SEQ ID NO: 1357098 - DNA, 25 bp, Homo sapien
actagtttgactttgggtgctcttc

SEQ ID NO: 1357099 - DNA, 25 bp, Homo sapien
cagcgcggagcactagtttgacttt

SEQ ID NO: 1357100 - DNA, 25 bp, Homo sapien
tgccagctttcaagacgtcagagtg

SEQ ID NO: 1357101 - DNA, 25 bp, Homo sapien
gccagctttcaagacgtcagagtgc

SEQ ID NO: 1357102 - DNA, 25 bp, Homo sapien
gtaatcttgtcggtacattttttca

SEQ ID NO: 1357103 - DNA, 25 bp, Homo sapien
atcttgtcggtacattttttcactg

SEQ ID NO: 1357104 - DNA, 25 bp, Homo sapien
acagccgcctgtggttttccgcgca

SEQ ID NO: 1357105 - DNA, 25 bp, Homo sapien
ttttccgcgcattgtgagggatgag

SEQ ID NO: 1357106 - DNA, 25 bp, Homo sapien
tggctgagccgacgctgcgcgcaca

SEQ ID NO: 1357107 - DNA, 25 bp, Homo sapien
tggtattagacgcagccgaatcctc

SEQ ID NO: 1357108 - DNA, 25 bp, Homo sapien
caggggtgggagtggccgcgtcgtg

SEQ ID NO: 1357109 - DNA, 25 bp, Homo sapien
ggtgggagtggccgcgtcgtgaagc

SEQ ID NO: 1357110 - DNA, 25 bp, Homo sapien
tggccgcgtcgtgaagcggagagag

SEQ ID NO: 1357111 - DNA, 25 bp, Homo sapien
gagtggccgcgtcgtgaagcggaga

SEQ ID NO: 1357112 - DNA, 25 bp, Homo sapien
ctggctgccgctagccgggctgcgt

SEQ ID NO: 1357113 - DNA, 25 bp, Homo sapien
gcggagtcgactcggcgggcggtgg

SEQ ID NO: 1357114 - DNA, 25 bp, Homo sapien
gctggcaccgcggagtcgactcggc

SEQ ID NO: 1357115 - DNA, 25 bp, Homo sapien
tggctgccgctagccgggctgcgtg

SEQ ID NO: 1357116 - DNA, 25 bp, Homo sapien
ctcgaaaatctctgagaccccgggg

SEQ ID NO: 1357117 - DNA, 25 bp, Homo sapien
gaagttagcacttttgggcagggaa

SEQ ID NO: 1357118 - DNA, 25 bp, Homo sapien
tggaaggtttctcgaagaaacgtga

SEQ ID NO: 1357119 - DNA, 25 bp, Homo sapien
tgccacctccgaacccttgaagtta

SEQ ID NO: 1357120 - DNA, 25 bp, Homo sapien
gaaacgtgagagcaccgtgtgctca

SEQ ID NO: 1357121 - DNA, 25 bp, Homo sapien
cacccaaattgttggtggcaccttc

SEQ ID NO: 1357122 - DNA, 25 bp, Homo sapien
tgttatcttgagacttgttcaaccg

SEQ ID NO: 1357123 - DNA, 25 bp, Homo sapien
ccgaggcttctcgactggtttaact

SEQ ID NO: 1357124 - DNA, 25 bp, Homo sapien
tgagacttgttcaaccgaggcttct

SEQ ID NO: 1357125 - DNA, 25 bp, Homo sapien
cagtaaatctgttgacaatcaccat

SEQ ID NO: 1357126 - DNA, 25 bp, Homo sapien
tatccaagtgtgcatgattcaaagg

SEQ ID NO: 1357127 - DNA, 25 bp, Homo sapien
tgcagatgtccaatgaggtagtagt

SEQ ID NO: 1357128 - DNA, 25 bp, Homo sapien
tgtgaccgcttatgactaaacttag

SEQ ID NO: 1357129 - DNA, 25 bp, Homo sapien
caaagtcactagctagtagccatag

SEQ ID NO: 1357130 - DNA, 25 bp, Homo sapien
tcagtttgctgtaatccacaattac

SEQ ID NO: 1357131 - DNA, 25 bp, Homo sapien
caattactgagtagaacttgtattg

SEQ ID NO: 1357132 - DNA, 25 bp, Homo sapien
agggctctggattattctttctgtc

SEQ ID NO: 1357133 - DNA, 25 bp, Homo sapien
gtttgctgtaatccacaattactga

SEQ ID NO: 1357134 - DNA, 25 bp, Homo sapien
gccagacacgagatacagtgctgct

SEQ ID NO: 1357135 - DNA, 25 bp, Homo sapien
atgccagacacgagatacagtgctg

SEQ ID NO: 1357136 - DNA, 25 bp, Homo sapien
cagacacgagatacagtgctgctcc

SEQ ID NO: 1357137 - DNA, 25 bp, Homo sapien
ttgaacaatgccagacacgagatac

SEQ ID NO: 1357138 - DNA, 25 bp, Homo sapien
gcttcttggactgagtgatgatgtg

SEQ ID NO: 1357139 - DNA, 25 bp, Homo sapien
tagatgcttcttggactgagtgatg

SEQ ID NO: 1357140 - DNA, 25 bp, Homo sapien
aagcttagatgcttcttggactgag

SEQ ID NO: 1357141 - DNA, 25 bp, Homo sapien
cttagatgcttcttggactgagtga

SEQ ID NO: 1357142 - DNA, 25 bp, Homo sapien
tgcgtgttgccatagtaaagctcat

SEQ ID NO: 1357143 - DNA, 25 bp, Homo sapien
ttaatccgtttacatgctttttgcg

SEQ ID NO: 1357144 - DNA, 25 bp, Homo sapien
gctttttgcgtgttgccatagtaaa

SEQ ID NO: 1357145 - DNA, 25 bp, Homo sapien
tacatgctttttgcgtgttgccata

SEQ ID NO: 1357146 - DNA, 25 bp, Homo sapien
tcaccatctctatcaagccctcttt

SEQ ID NO: 1357147 - DNA, 25 bp, Homo sapien
ccatctctatcaagccctctttcac

SEQ ID NO: 1357148 - DNA, 25 bp, Homo sapien
cttttccttaaaggtcaccatctct

SEQ ID NO: 1357149 - DNA, 25 bp, Homo sapien
gtcaccatctctatcaagccctctt

SEQ ID NO: 1357150 - DNA, 25 bp, Homo sapien
gacggtgttcgtcctgatgatagtg

SEQ ID NO: 1357151 - DNA, 25 bp, Homo sapien
ttggagacaaggacggtgttcgtcc

SEQ ID NO: 1357152 - DNA, 25 bp, Homo sapien
tagtgatgcagcatgtgtggttctc

SEQ ID NO: 1357153 - DNA, 25 bp, Homo sapien
ctcatagatgtctatttctgtgctc

SEQ ID NO: 1357154 - DNA, 25 bp, Homo sapien
cctttgagtatgtccgtcaggagac

SEQ ID NO: 1357155 - DNA, 25 bp, Homo sapien
tatgatagatcagtatgaccctctc

SEQ ID NO: 1357156 - DNA, 25 bp, Homo sapien
tgccatgtatgttcgccagactgta

SEQ ID NO: 1357157 - DNA, 25 bp, Homo sapien
gaatggactcctgataaactgaggc

SEQ ID NO: 1357158 - DNA, 25 bp, Homo sapien
tccagccgattaacgggaatttgcc

SEQ ID NO: 1357159 - DNA, 25 bp, Homo sapien
cagccgattaacgggaatttgccct

SEQ ID NO: 1357160 - DNA, 25 bp, Homo sapien
agccgattaacgggaatttgccctg

SEQ ID NO: 1357161 - DNA, 25 bp, Homo sapien
ttccagccgattaacgggaatttgc

SEQ ID NO: 1357162 - DNA, 25 bp, Homo sapien
ggataaaccattgcctctgcacagg

SEQ ID NO: 1357163 - DNA, 25 bp, Homo sapien
tattgcacggcaagagtgacgccat

SEQ ID NO: 1357164 - DNA, 25 bp, Homo sapien
tagcaaggttttaagcagcaaggtc

SEQ ID NO: 1357165 - DNA, 25 bp, Homo sapien
caccgtggtggctaatatttgactc

SEQ ID NO: 1357166 - DNA, 25 bp, Homo sapien
aacggaatctgtagcccggatttga

SEQ ID NO: 1357167 - DNA, 25 bp, Homo sapien
tcaggacccaaagagcaataccaac

SEQ ID NO: 1357168 - DNA, 25 bp, Homo sapien
atcctctgcaggtactgtgcatctg

SEQ ID NO: 1357169 - DNA, 25 bp, Homo sapien
cgttgtacatcctctgcaggtactg

SEQ ID NO: 1357170 - DNA, 25 bp, Homo sapien
caacatccacgcataaacagccagc

SEQ ID NO: 1357171 - DNA, 25 bp, Homo sapien
tcaacatccacgcataaacagccag

SEQ ID NO: 1357172 - DNA, 25 bp, Homo sapien
tgctgtgttgtcaccctgtcctccc

SEQ ID NO: 1357173 - DNA, 25 bp, Homo sapien
gctgtgttgtcaccctgtcctccct

SEQ ID NO: 1357174 - DNA, 25 bp, Homo sapien
tctctagccagctgtacttcgtgag

SEQ ID NO: 1357175 - DNA, 25 bp, Homo sapien
tctaggagtcaacacagctatggcc

SEQ ID NO: 1357176 - DNA, 25 bp, Homo sapien
cagccttggattctcggtaactcaa

SEQ ID NO: 1357177 - DNA, 25 bp, Homo sapien
tgaccacatggatcatcagcaccgc

SEQ ID NO: 1357178 - DNA, 25 bp, Homo sapien
ccttgtctgggatcactaagctgag

SEQ ID NO: 1357179 - DNA, 25 bp, Homo sapien
tagcactcgaactcaggcaggctgc

SEQ ID NO: 1357180 - DNA, 25 bp, Homo sapien
tagcgcttcaaatagatggccacca

SEQ ID NO: 1357181 - DNA, 25 bp, Homo sapien
gaaaggagcttacctgctctgccag

SEQ ID NO: 1357182 - DNA, 25 bp, Homo sapien
taagagaccattgctcggcacaaca

SEQ ID NO: 1357183 - DNA, 25 bp, Homo sapien
gcaacactaggattacaaaggcagg

SEQ ID NO: 1357184 - DNA, 25 bp, Homo sapien
gaaacttcagggtcaaagcctcata

SEQ ID NO: 1357185 - DNA, 25 bp, Homo sapien
tatgaatctgaggaacacaatccgg

SEQ ID NO: 1357186 - DNA, 25 bp, Homo sapien
tgtaacagggtttgaatgaagcacg

SEQ ID NO: 1357187 - DNA, 25 bp, Homo sapien
aatgaagcacgtctcacacacctca

SEQ ID NO: 1357188 - DNA, 25 bp, Homo sapien
cagggtatgtgcggatgttgtaaca

SEQ ID NO: 1357189 - DNA, 25 bp, Homo sapien
acctcacatgtgagaacccaatcat

SEQ ID NO: 1357190 - DNA, 25 bp, Homo sapien
gagtgtattctggacctctctgttc

SEQ ID NO: 1357191 - DNA, 25 bp, Homo sapien
gtttgggctgctcttcttcacgtcc

SEQ ID NO: 1357192 - DNA, 25 bp, Homo sapien
tctgttcatgttcctgtttgggctg

SEQ ID NO: 1357193 - DNA, 25 bp, Homo sapien
ggcatcttgtaacgggtctcgggca

SEQ ID NO: 1357194 - DNA, 25 bp, Homo sapien
tatcagagttttagtcgacgggaca

SEQ ID NO: 1357195 - DNA, 25 bp, Homo sapien
gacgcttgcgagagcattacggcga

SEQ ID NO: 1357196 - DNA, 25 bp, Homo sapien
aaaacggtgacattatcgggctgca

SEQ ID NO: 1357197 - DNA, 25 bp, Homo sapien
tgtgtgccccaaagctcagataagt

SEQ ID NO: 1357198 - DNA, 25 bp, Homo sapien
tgctccgcatctagcagtcgctcgc

SEQ ID NO: 1357199 - DNA, 25 bp, Homo sapien
agggccaccggagaaagcgctcgca

SEQ ID NO: 1357200 - DNA, 25 bp, Homo sapien
gctcgcaatcacatggaggcccggg

SEQ ID NO: 1357201 - DNA, 25 bp, Homo sapien
agtcgcggcactcgccggctgcggt

SEQ ID NO: 1357202 - DNA, 25 bp, Homo sapien
tgtctaattcccctcgttacagagt

SEQ ID NO: 1357203 - DNA, 25 bp, Homo sapien
ggccgagctgcaccccaaggttggt

SEQ ID NO: 1357204 - DNA, 25 bp, Homo sapien
tccggcctcagcataagccgtggct

SEQ ID NO: 1357205 - DNA, 25 bp, Homo sapien
aaggttggtgcgcacctctcccggc

SEQ ID NO: 1357206 - DNA, 25 bp, Homo sapien
ggcgagcggagtgggctcccgtttg

SEQ ID NO: 1357207 - DNA, 25 bp, Homo sapien
tgggagattgttccgctttctgcag

SEQ ID NO: 1357208 - DNA, 25 bp, Homo sapien
tgggctcccgtttgctgccgccagg

SEQ ID NO: 1357209 - DNA, 25 bp, Homo sapien
tgcagtctgagcgtcggccgcttcg

SEQ ID NO: 1357210 - DNA, 25 bp, Homo sapien
ctgctggttcctcccggaggtgggt

SEQ ID NO: 1357211 - DNA, 25 bp, Homo sapien
cttcctggctcctgaacccctcgcg

SEQ ID NO: 1357212 - DNA, 25 bp, Homo sapien
agccggtttcggctctgctggttcc

SEQ ID NO: 1357213 - DNA, 25 bp, Homo sapien
gccctatcggaaaggcggggagagc

SEQ ID NO: 1357214 - DNA, 25 bp, Homo sapien
tcttgggagcgggacttctgctcaa

SEQ ID NO: 1357215 - DNA, 25 bp, Homo sapien
tagcttgtttggaggcgtgggctct

SEQ ID NO: 1357216 - DNA, 25 bp, Homo sapien
gcgtgggctcttgggagcgggactt

SEQ ID NO: 1357217 - DNA, 25 bp, Homo sapien
gacttctgctcaaatcctgtccagg

SEQ ID NO: 1357218 - DNA, 25 bp, Homo sapien
tactagggggtatcccttgcagata

SEQ ID NO: 1357219 - DNA, 25 bp, Homo sapien
ctccagttactggagggttgatagg

SEQ ID NO: 1357220 - DNA, 25 bp, Homo sapien
agcacctccagttactggagggttg

SEQ ID NO: 1357221 - DNA, 25 bp, Homo sapien
gggtggttgccgggaggaccagcac

SEQ ID NO: 1357222 - DNA, 25 bp, Homo sapien
tgtgggaaggaaacagccgagatga

SEQ ID NO: 1357223 - DNA, 25 bp, Homo sapien
tcctcgttgcctcgcagatttcctg

SEQ ID NO: 1357224 - DNA, 25 bp, Homo sapien
gctggagccgcttggcttatatttg

SEQ ID NO: 1357225 - DNA, 25 bp, Homo sapien
tgaggttccaggagcacgcacttgg

SEQ ID NO: 1357226 - DNA, 25 bp, Homo sapien
tctttatatcctctggagatgaagg

SEQ ID NO: 1357227 - DNA, 25 bp, Homo sapien
tatattgtcaaaggctgtgtcgaag

SEQ ID NO: 1357228 - DNA, 25 bp, Homo sapien
tattccaatgaaaagaagggatgcc

SEQ ID NO: 1357229 - DNA, 25 bp, Homo sapien
ggaaaagtgttgctgtccttttata

SEQ ID NO: 1357230 - DNA, 25 bp, Homo sapien
taactcctctggttcgtgctgcgtg

SEQ ID NO: 1357231 - DNA, 25 bp, Homo sapien
cctctggttcgtgctgcgtgtttga

SEQ ID NO: 1357232 - DNA, 25 bp, Homo sapien
tcgtgctgcgtgtttgaagagtaga

SEQ ID NO: 1357233 - DNA, 25 bp, Homo sapien
ctgataactcctctggttcgtgctg

SEQ ID NO: 1357234 - DNA, 25 bp, Homo sapien
ggtgaagcaggcaattctctgggca

SEQ ID NO: 1357235 - DNA, 25 bp, Homo sapien
gtgtcaactcagtttttggcccaaa

SEQ ID NO: 1357236 - DNA, 25 bp, Homo sapien
tgaatgatagtgtgggtgtcaactc

SEQ ID NO: 1357237 - DNA, 25 bp, Homo sapien
tctctgggcagcgacactgtggctg

SEQ ID NO: 1357238 - DNA, 25 bp, Homo sapien
cagtattatgcctagtaaatcccag

SEQ ID NO: 1357239 - DNA, 25 bp, Homo sapien
tagtaaatcccagtacatcaaccat

SEQ ID NO: 1357240 - DNA, 25 bp, Homo sapien
tttcacagtattatgcctagtaaat

SEQ ID NO: 1357241 - DNA, 25 bp, Homo sapien
atgcctagtaaatcccagtacatca

SEQ ID NO: 1357242 - DNA, 25 bp, Homo sapien
acagccagcagtaggtaatggaaaa

SEQ ID NO: 1357243 - DNA, 25 bp, Homo sapien
tggcatatgagtagccattctagaa

SEQ ID NO: 1357244 - DNA, 25 bp, Homo sapien
cttggcatatgagtagccattctag

SEQ ID NO: 1357245 - DNA, 25 bp, Homo sapien
gcatatgagtagccattctagaacc

SEQ ID NO: 1357246 - DNA, 25 bp, Homo sapien
tgtcgccgtggttccagcctccgga

SEQ ID NO: 1357247 - DNA, 25 bp, Homo sapien
ccccagagagcgccctgagagaaca

SEQ ID NO: 1357248 - DNA, 25 bp, Homo sapien
aggagtgaagtctcctgtcgccgtg

SEQ ID NO: 1357249 - DNA, 25 bp, Homo sapien
gcctccggagctcgcccaagccgcg

SEQ ID NO: 1357250 - DNA, 25 bp, Homo sapien
ctgcggcacggagcactgctagtgt

SEQ ID NO: 1357251 - DNA, 25 bp, Homo sapien
tctgtgctgcagcttcacttgcccg

SEQ ID NO: 1357252 - DNA, 25 bp, Homo sapien
gagcactgctagtgtcggatctgca

SEQ ID NO: 1357253 - DNA, 25 bp, Homo sapien
cacggagcactgctagtgtcggatc

SEQ ID NO: 1357254 - DNA, 25 bp, Homo sapien
cgcctgcgaggactccactagggcg

SEQ ID NO: 1357255 - DNA, 25 bp, Homo sapien
tgcggagccgcctgcgaggactcca

SEQ ID NO: 1357256 - DNA, 25 bp, Homo sapien
aggactccactagggcgctttccag

SEQ ID NO: 1357257 - DNA, 25 bp, Homo sapien
ctgggcgtgcgctgcggagccgcct

SEQ ID NO: 1357258 - DNA, 25 bp, Homo sapien
tgcataatatgttagccatcagatt

SEQ ID NO: 1357259 - DNA, 25 bp, Homo sapien
aatgcataatatgttagccatcaga

SEQ ID NO: 1357260 - DNA, 25 bp, Homo sapien
aaaaatgcataatatgttagccatc

SEQ ID NO: 1357261 - DNA, 25 bp, Homo sapien
aaatgcataatatgttagccatcag

SEQ ID NO: 1357262 - DNA, 25 bp, Homo sapien
ggatctggtcatgtttccgggctaa

SEQ ID NO: 1357263 - DNA, 25 bp, Homo sapien
tgagatctttgcagttagtcatgga

SEQ ID NO: 1357264 - DNA, 25 bp, Homo sapien
tgtgttaagccctgattttggatct

SEQ ID NO: 1357265 - DNA, 25 bp, Homo sapien
ccgggctaatcgtttttcatggtca

SEQ ID NO: 1357266 - DNA, 25 bp, Homo sapien
gacaaagatgttaaccttggccaat

SEQ ID NO: 1357267 - DNA, 25 bp, Homo sapien
gaatgttctagggtccgaaacctgc

SEQ ID NO: 1357268 - DNA, 25 bp, Homo sapien
cctgctgagacggataagactgata

SEQ ID NO: 1357269 - DNA, 25 bp, Homo sapien
gtttgattataacagccctagctag

SEQ ID NO: 1357270 - DNA, 25 bp, Homo sapien
tcatttatgggttcttctgatggca

SEQ ID NO: 1357271 - DNA, 25 bp, Homo sapien
caggtgtctgcagttgtgtctgtac

SEQ ID NO: 1357272 - DNA, 25 bp, Homo sapien
tgttagataaccgtacccaggtgtc

SEQ ID NO: 1357273 - DNA, 25 bp, Homo sapien
gcaggacagctgttagataaccgta

SEQ ID NO: 1357274 - DNA, 25 bp, Homo sapien
tgaagtctgactatacaattgcctc

SEQ ID NO: 1357275 - DNA, 25 bp, Homo sapien
tcatgccgatttgagagaaacctgg

SEQ ID NO: 1357276 - DNA, 25 bp, Homo sapien
taatctttctttatgctcatgccga

SEQ ID NO: 1357277 - DNA, 25 bp, Homo sapien
gcctaagcaggtgataggacactcc

SEQ ID NO: 1357278 - DNA, 25 bp, Homo sapien
caagtcagcgaagaggtattggtcc

SEQ ID NO: 1357279 - DNA, 25 bp, Homo sapien
gacttggcatatgggcatccctgaa

SEQ ID NO: 1357280 - DNA, 25 bp, Homo sapien
cctactagtggtgccagggattccc

SEQ ID NO: 1357281 - DNA, 25 bp, Homo sapien
tattaatacctgtgccttagggcct

SEQ ID NO: 1357282 - DNA, 25 bp, Homo sapien
ctaaatactacctcgtatttgtcca

SEQ ID NO: 1357283 - DNA, 25 bp, Homo sapien
aaatactacctcgtatttgtccact

SEQ ID NO: 1357284 - DNA, 25 bp, Homo sapien
tcctaaatactacctcgtatttgtc

SEQ ID NO: 1357285 - DNA, 25 bp, Homo sapien
atactacctcgtatttgtccacttt

SEQ ID NO: 1357286 - DNA, 25 bp, Homo sapien
ttatctacagccgttgacacccatt

SEQ ID NO: 1357287 - DNA, 25 bp, Homo sapien
cagccgttgacacccatttgtatct

SEQ ID NO: 1357288 - DNA, 25 bp, Homo sapien
tctacagccgttgacacccatttgt

SEQ ID NO: 1357289 - DNA, 25 bp, Homo sapien
gccgttgacacccatttgtatctct

SEQ ID NO: 1357290 - DNA, 25 bp, Homo sapien
tgctgttaaaatcactaactgtggg

SEQ ID NO: 1357291 - DNA, 25 bp, Homo sapien
cctttaaggctgctgttaaaatcac

SEQ ID NO: 1357292 - DNA, 25 bp, Homo sapien
gaggagccggcctaggctgtggatt

SEQ ID NO: 1357293 - DNA, 25 bp, Homo sapien
gctgtggattctgggcctttaaggc

SEQ ID NO: 1357294 - DNA, 25 bp, Homo sapien
gggtgagtacaatattggctgatgt

SEQ ID NO: 1357295 - DNA, 25 bp, Homo sapien
ttctgtcaagttcggagacagccat

SEQ ID NO: 1357296 - DNA, 25 bp, Homo sapien
aattctgtcaagttcggagacagcc

SEQ ID NO: 1357297 - DNA, 25 bp, Homo sapien
tgatgtgatacggaaaattctgtca

SEQ ID NO: 1357298 - DNA, 25 bp, Homo sapien
gttctgagtgctttcaacactatca

SEQ ID NO: 1357299 - DNA, 25 bp, Homo sapien
tcaaatagtgctcatattctttcat

SEQ ID NO: 1357300 - DNA, 25 bp, Homo sapien
gtgctttcaacactatcaaatagtg

SEQ ID NO: 1357301 - DNA, 25 bp, Homo sapien
agtgttgaaagttctgagtgctttc

SEQ ID NO: 1357302 - DNA, 25 bp, Homo sapien
taccacttgaggtgaacatcgaagc

SEQ ID NO: 1357303 - DNA, 25 bp, Homo sapien
tctgaaagctaagagttggtccaca

SEQ ID NO: 1357304 - DNA, 25 bp, Homo sapien
gaagataagcttgttgagcctcaca

SEQ ID NO: 1357305 - DNA, 25 bp, Homo sapien
tagttcaggccagatgtagtacatg

SEQ ID NO: 1357306 - DNA, 25 bp, Homo sapien
tccacaacaattaaatgccagaaat

SEQ ID NO: 1357307 - DNA, 25 bp, Homo sapien
cacaaggtgtgagacacactcttcc

SEQ ID NO: 1357308 - DNA, 25 bp, Homo sapien
gccatacctatttgaaggcgtgcag

SEQ ID NO: 1357309 - DNA, 25 bp, Homo sapien
gaggcacaaggtgtgagacacactc

SEQ ID NO: 1357310 - DNA, 25 bp, Homo sapien
acttttgtcctttgagcctgccctc

SEQ ID NO: 1357311 - DNA, 25 bp, Homo sapien
ctaaatcccatgattgtggactgtt

SEQ ID NO: 1357312 - DNA, 25 bp, Homo sapien
catgattgtggactgttggctgttt

SEQ ID NO: 1357313 - DNA, 25 bp, Homo sapien
atctcttctgaactgacttttgtcc

SEQ ID NO: 1357314 - DNA, 25 bp, Homo sapien
tggagctctattggccactcctgca

SEQ ID NO: 1357315 - DNA, 25 bp, Homo sapien
caggtattaggaccagactctgtaa

SEQ ID NO: 1357316 - DNA, 25 bp, Homo sapien
tgcactgcacaggtattaggaccag

SEQ ID NO: 1357317 - DNA, 25 bp, Homo sapien
ctggagctctattggccactcctgc

SEQ ID NO: 1357318 - DNA, 25 bp, Homo sapien
ataatggaagctggtaccctgcagg

SEQ ID NO: 1357319 - DNA, 25 bp, Homo sapien
gaataatggaagctggtaccctgca

SEQ ID NO: 1357320 - DNA, 25 bp, Homo sapien
ttttcttggcatgccagaataatgg

SEQ ID NO: 1357321 - DNA, 25 bp, Homo sapien
ttcttggcatgccagaataatggaa

SEQ ID NO: 1357322 - DNA, 25 bp, Homo sapien
tccttcttcgcagctttagctaagg

SEQ ID NO: 1357323 - DNA, 25 bp, Homo sapien
tgtatttgaacagttgtccttcttc

SEQ ID NO: 1357324 - DNA, 25 bp, Homo sapien
tgaacagttgtccttcttcgcagct

SEQ ID NO: 1357325 - DNA, 25 bp, Homo sapien
aattgtatttgaacagttgtccttc

SEQ ID NO: 1357326 - DNA, 25 bp, Homo sapien
aagtgggagcacatttttatggggc

SEQ ID NO: 1357327 - DNA, 25 bp, Homo sapien
gcacatttttatggggcagccgcat

SEQ ID NO: 1357328 - DNA, 25 bp, Homo sapien
ggagcacatttttatggggcagccg

SEQ ID NO: 1357329 - DNA, 25 bp, Homo sapien
tgggagcacatttttatggggcagc

SEQ ID NO: 1357330 - DNA, 25 bp, Homo sapien
gttgtagaagtctggaattctcatc

SEQ ID NO: 1357331 - DNA, 25 bp, Homo sapien
agaagtctggaattctcatctccat

SEQ ID NO: 1357332 - DNA, 25 bp, Homo sapien
tgtagaagtctggaattctcatctc

SEQ ID NO: 1357333 - DNA, 25 bp, Homo sapien
tagaagtctggaattctcatctcca

SEQ ID NO: 1357334 - DNA, 25 bp, Homo sapien
tgccagactgttttagggactaatg

SEQ ID NO: 1357335 - DNA, 25 bp, Homo sapien
cactcagtttgggatgactttctct

SEQ ID NO: 1357336 - DNA, 25 bp, Homo sapien
gaagttaggcgataaagttgaacca

SEQ ID NO: 1357337 - DNA, 25 bp, Homo sapien
ttattaaggtctcttagctgccaga

SEQ ID NO: 1357338 - DNA, 25 bp, Homo sapien
agcatttttctttctcttctccagt

SEQ ID NO: 1357339 - DNA, 25 bp, Homo sapien
ttagcatttttctttctcttctcca

SEQ ID NO: 1357340 - DNA, 25 bp, Homo sapien
tagcatttttctttctcttctccag

SEQ ID NO: 1357341 - DNA, 25 bp, Homo sapien
catttttctttctcttctccagttt

SEQ ID NO: 1357342 - DNA, 25 bp, Homo sapien
aaggagagatgaagagcgcgtatcc

SEQ ID NO: 1357343 - DNA, 25 bp, Homo sapien
gagatgaagagcgcgtatccaaaag

SEQ ID NO: 1357344 - DNA, 25 bp, Homo sapien
ggagagatgaagagcgcgtatccaa

SEQ ID NO: 1357345 - DNA, 25 bp, Homo sapien
gagagatgaagagcgcgtatccaaa

SEQ ID NO: 1357346 - DNA, 25 bp, Homo sapien
tcaggcgctccgcatccagctgttg

SEQ ID NO: 1357347 - DNA, 25 bp, Homo sapien
cgtgttcagcgttcacgtagctgtt

SEQ ID NO: 1357348 - DNA, 25 bp, Homo sapien
gttgccgccgcagtagttcttctct

SEQ ID NO: 1357349 - DNA, 25 bp, Homo sapien
gctgtcccagtacaaacgcttcatt

SEQ ID NO: 1357350 - DNA, 25 bp, Homo sapien
tgatttccatattgctcaggtcaca

SEQ ID NO: 1357351 - DNA, 25 bp, Homo sapien
gtgatttccatattgctcaggtcac

SEQ ID NO: 1357352 - DNA, 25 bp, Homo sapien
tactgctgccatgtggatgttgccc

SEQ ID NO: 1357353 - DNA, 25 bp, Homo sapien
ctgaaatgtgaagaactgcaggggg

SEQ ID NO: 1357354 - DNA, 25 bp, Homo sapien
tgaaatgtgaagaactgcaggggga

SEQ ID NO: 1357355 - DNA, 25 bp, Homo sapien
aatgtgaagaactgcagggggagtc

SEQ ID NO: 1357356 - DNA, 25 bp, Homo sapien
gaaatgtgaagaactgcagggggag

SEQ ID NO: 1357357 - DNA, 25 bp, Homo sapien
acgcagcctggttatcgtaagagct

SEQ ID NO: 1357358 - DNA, 25 bp, Homo sapien
taggccacatgatggtcatagaagg

SEQ ID NO: 1357359 - DNA, 25 bp, Homo sapien
aaggactgaggatacgcagcctggt

SEQ ID NO: 1357360 - DNA, 25 bp, Homo sapien
aggatacgcagcctggttatcgtaa

SEQ ID NO: 1357361 - DNA, 25 bp, Homo sapien
catggaagactgaaacaggattcca

SEQ ID NO: 1357362 - DNA, 25 bp, Homo sapien
atggaagactgaaacaggattccac

SEQ ID NO: 1357363 - DNA, 25 bp, Homo sapien
ccaagccattgcttgatgataatgt

SEQ ID NO: 1357364 - DNA, 25 bp, Homo sapien
gcttgatgataatgttgccagtatc

SEQ ID NO: 1357365 - DNA, 25 bp, Homo sapien
aatgttgccagtatcttgcatatac

SEQ ID NO: 1357366 - DNA, 25 bp, Homo sapien
gctttgcatccaagccattgcttga

SEQ ID NO: 1357367 - DNA, 25 bp, Homo sapien
caccactgccatctccgattgtgaa

SEQ ID NO: 1357368 - DNA, 25 bp, Homo sapien
ttcaccactgccatctccgattgtg

SEQ ID NO: 1357369 - DNA, 25 bp, Homo sapien
caaatgggtgccgaaacttgtgggc

SEQ ID NO: 1357370 - DNA, 25 bp, Homo sapien
agtccaaatgggtgccgaaacttgt

SEQ ID NO: 1357371 - DNA, 25 bp, Homo sapien
cacaggcttctagaaacgtcccaga

SEQ ID NO: 1357372 - DNA, 25 bp, Homo sapien
tagaattctttccaggcgggtcgca

SEQ ID NO: 1357373 - DNA, 25 bp, Homo sapien
tgccaggttcaaacatggcgggccg

SEQ ID NO: 1357374 - DNA, 25 bp, Homo sapien
ggaagaaggcattccaaccggcttc

SEQ ID NO: 1357375 - DNA, 25 bp, Homo sapien
agcgtgacagcggacctgcttcccg

SEQ ID NO: 1357376 - DNA, 25 bp, Homo sapien
tccgagcgtgacagcggacctgctt

SEQ ID NO: 1357377 - DNA, 25 bp, Homo sapien
cgagcgtgacagcggacctgcttcc

SEQ ID NO: 1357378 - DNA, 25 bp, Homo sapien
ctccgagcgtgacagcggacctgct

SEQ ID NO: 1357379 - DNA, 25 bp, Homo sapien
tcgcgcggagtgatcgtgtggaatc

SEQ ID NO: 1357380 - DNA, 25 bp, Homo sapien
gtggaatcgcgggtcgcggacgctc

SEQ ID NO: 1357381 - DNA, 25 bp, Homo sapien
tcccgggctggtagcgcgccgctct

SEQ ID NO: 1357382 - DNA, 25 bp, Homo sapien
agccaatagcaggccgcgccgatgg

SEQ ID NO: 1357383 - DNA, 25 bp, Homo sapien
gtgtccctagttcagtataaccaga

SEQ ID NO: 1357384 - DNA, 25 bp, Homo sapien
ctacaatttagagccaccgggctcc

SEQ ID NO: 1357385 - DNA, 25 bp, Homo sapien
gggtatgacagtgatgtccctgatc

SEQ ID NO: 1357386 - DNA, 25 bp, Homo sapien
tccttgttgtataactcctgtgtcc

SEQ ID NO: 1357387 - DNA, 25 bp, Homo sapien
tccgaagggacctcatggagatgtg

SEQ ID NO: 1357388 - DNA, 25 bp, Homo sapien
acagcttccgaagggacctcatgga

SEQ ID NO: 1357389 - DNA, 25 bp, Homo sapien
ccagagacagcttccgaagggacct

SEQ ID NO: 1357390 - DNA, 25 bp, Homo sapien
aagggacctcatggagatgtgtgtc

SEQ ID NO: 1357391 - DNA, 25 bp, Homo sapien
ctggccagctgctctaatgacagga

SEQ ID NO: 1357392 - DNA, 25 bp, Homo sapien
ttaaaaggcgaagagacaggctggc

SEQ ID NO: 1357393 - DNA, 25 bp, Homo sapien
ccagagttagctgggtgagagtttc

SEQ ID NO: 1357394 - DNA, 25 bp, Homo sapien
cagctgctctaatgacaggagtaag

SEQ ID NO: 1357395 - DNA, 25 bp, Homo sapien
tggcagggtcagaagctagacaaca

SEQ ID NO: 1357396 - DNA, 25 bp, Homo sapien
gcctctggcagggtcagaagctaga

SEQ ID NO: 1357397 - DNA, 25 bp, Homo sapien
tctggcagggtcagaagctagacaa

SEQ ID NO: 1357398 - DNA, 25 bp, Homo sapien
gcagggtcagaagctagacaacaag

SEQ ID NO: 1357399 - DNA, 25 bp, Homo sapien
tgtagtgcatccctgtgcttgttcc

SEQ ID NO: 1357400 - DNA, 25 bp, Homo sapien
tttgtagtgcatccctgtgcttgtt

SEQ ID NO: 1357401 - DNA, 25 bp, Homo sapien
gcatttgtagtgcatccctgtgctt

SEQ ID NO: 1357402 - DNA, 25 bp, Homo sapien
gtgcatttgtagtgcatccctgtgc

SEQ ID NO: 1357403 - DNA, 25 bp, Homo sapien
tagagtgttggtgtggttctaaaga

SEQ ID NO: 1357404 - DNA, 25 bp, Homo sapien
cattggagcccgtgggcgagttcct

SEQ ID NO: 1357405 - DNA, 25 bp, Homo sapien
tcagccttatagagtgttggtgtgg

SEQ ID NO: 1357406 - DNA, 25 bp, Homo sapien
aagaggccagactgggtagcattgg

SEQ ID NO: 1357407 - DNA, 25 bp, Homo sapien
ttttcatcaagtttaaaatggctca

SEQ ID NO: 1357408 - DNA, 25 bp, Homo sapien
tttcatcaagtttaaaatggctcat

SEQ ID NO: 1357409 - DNA, 25 bp, Homo sapien
attttcatcaagtttaaaatggctc

SEQ ID NO: 1357410 - DNA, 25 bp, Homo sapien
gcctggggatcttgtaaagccatca

SEQ ID NO: 1357411 - DNA, 25 bp, Homo sapien
ctttctttgtttctagctgctcttg

SEQ ID NO: 1357412 - DNA, 25 bp, Homo sapien
ctattgtactgccttgttctgctct

SEQ ID NO: 1357413 - DNA, 25 bp, Homo sapien
ttctttgtttctagctgctcttgtg

SEQ ID NO: 1357414 - DNA, 25 bp, Homo sapien
tgccttgttctgctctttttcccct

SEQ ID NO: 1357415 - DNA, 25 bp, Homo sapien
ggtttgtctttacacataacctcaa

SEQ ID NO: 1357416 - DNA, 25 bp, Homo sapien
gtccacacaaggtttgtctttacac

SEQ ID NO: 1357417 - DNA, 25 bp, Homo sapien
tgtctttacacataacctcaaagcc

SEQ ID NO: 1357418 - DNA, 25 bp, Homo sapien
cacaaggtttgtctttacacataac

SEQ ID NO: 1357419 - DNA, 25 bp, Homo sapien
gcgtaacagccggagtacatccaga

SEQ ID NO: 1357420 - DNA, 25 bp, Homo sapien
gaccgctcacatcctagagccttgt

SEQ ID NO: 1357421 - DNA, 25 bp, Homo sapien
aaatctttaaacagagcgtaacagc

SEQ ID NO: 1357422 - DNA, 25 bp, Homo sapien
cctagagccttgtcactatgtgttc

SEQ ID NO: 1357423 - DNA, 25 bp, Homo sapien
gaggaatcccatgtggcccaacacg

SEQ ID NO: 1357424 - DNA, 25 bp, Homo sapien
tcatccgactcttctccgaggaatc

SEQ ID NO: 1357425 - DNA, 25 bp, Homo sapien
cacgccaagggtcatcattagaaaa

SEQ ID NO: 1357426 - DNA, 25 bp, Homo sapien
tgtggcccaacacgccaagggtcat

SEQ ID NO: 1357427 - DNA, 25 bp, Homo sapien
taagatatcatcttcccctcttgcc

SEQ ID NO: 1357428 - DNA, 25 bp, Homo sapien
aagatatcatcttcccctcttgccc

SEQ ID NO: 1357429 - DNA, 25 bp, Homo sapien
ttaagatatcatcttcccctcttgc

SEQ ID NO: 1357430 - DNA, 25 bp, Homo sapien
gatatcatcttcccctcttgcccct

SEQ ID NO: 1357431 - DNA, 25 bp, Homo sapien
ccatgggagatgtttccaaacacat

SEQ ID NO: 1357432 - DNA, 25 bp, Homo sapien
acatccagggaaacaaataattgaa

SEQ ID NO: 1357433 - DNA, 25 bp, Homo sapien
aataattgaattgcttctactttcc

SEQ ID NO: 1357434 - DNA, 25 bp, Homo sapien
attgcttctactttcccctcttcat

SEQ ID NO: 1357435 - DNA, 25 bp, Homo sapien
acttcagaagaaaagcgagtgtcac

SEQ ID NO: 1357436 - DNA, 25 bp, Homo sapien
tctctagcaagatgcaatgctttct

SEQ ID NO: 1357437 - DNA, 25 bp, Homo sapien
gcgagtgtcacagttattatcatag

SEQ ID NO: 1357438 - DNA, 25 bp, Homo sapien
tgtcacagttattatcataggcagc

SEQ ID NO: 1357439 - DNA, 25 bp, Homo sapien
gaggtctgtaacatggaagatgctc

SEQ ID NO: 1357440 - DNA, 25 bp, Homo sapien
ggtctgtaacatggaagatgctctt

SEQ ID NO: 1357441 - DNA, 25 bp, Homo sapien
tggaggtctgtaacatggaagatgc

SEQ ID NO: 1357442 - DNA, 25 bp, Homo sapien
ctagtggaggtctgtaacatggaag

SEQ ID NO: 1357443 - DNA, 25 bp, Homo sapien
gggtaagccattgcttggttctcat

SEQ ID NO: 1357444 - DNA, 25 bp, Homo sapien
ttgaggacccaaaaaggtagcctca

SEQ ID NO: 1357445 - DNA, 25 bp, Homo sapien
ccacagtccacggagtgaggttgag

SEQ ID NO: 1357446 - DNA, 25 bp, Homo sapien
tcttgattttggctgtcaagagggt

SEQ ID NO: 1357447 - DNA, 25 bp, Homo sapien
gtagtggagacatctgggatatgca

SEQ ID NO: 1357448 - DNA, 25 bp, Homo sapien
cgatttttcaagatagagttgaatg

SEQ ID NO: 1357449 - DNA, 25 bp, Homo sapien
ttcatagagattggatatgacagcc

SEQ ID NO: 1357450 - DNA, 25 bp, Homo sapien
cagtgttgggacaaaatttcttcga

SEQ ID NO: 1357451 - DNA, 25 bp, Homo sapien
cccaccattagttaatcgcagtatt

SEQ ID NO: 1357452 - DNA, 25 bp, Homo sapien
ccaccattagttaatcgcagtattg

SEQ ID NO: 1357453 - DNA, 25 bp, Homo sapien
gagagagacaagtaagtgtgactct

SEQ ID NO: 1357454 - DNA, 25 bp, Homo sapien
gactctggcttatgctggaagcatg

SEQ ID NO: 1357455 - DNA, 25 bp, Homo sapien
tgactctggcttatgctggaagcat

SEQ ID NO: 1357456 - DNA, 25 bp, Homo sapien
gacaagtaagtgtgactctggctta

SEQ ID NO: 1357457 - DNA, 25 bp, Homo sapien
tcactgctaccacttttgaaacctt

SEQ ID NO: 1357458 - DNA, 25 bp, Homo sapien
ggtctttttgcaaataaggcatcat

SEQ ID NO: 1357459 - DNA, 25 bp, Homo sapien
ataaggcatcattacattcactgct

SEQ ID NO: 1357460 - DNA, 25 bp, Homo sapien
tgttagctaccaggaggtctttttg

SEQ ID NO: 1357461 - DNA, 25 bp, Homo sapien
agccattaggttcatcagtatgagc

SEQ ID NO: 1357462 - DNA, 25 bp, Homo sapien
catcagtatgagcaacagggggtaa

SEQ ID NO: 1357463 - DNA, 25 bp, Homo sapien
aagccattaggttcatcagtatgag

SEQ ID NO: 1357464 - DNA, 25 bp, Homo sapien
gtatgagcaacagggggtaagtttc

SEQ ID NO: 1357465 - DNA, 25 bp, Homo sapien
caaagggcagaagccctcttgatcc

SEQ ID NO: 1357466 - DNA, 25 bp, Homo sapien
ggcagaagccctcttgatccaaggg

SEQ ID NO: 1357467 - DNA, 25 bp, Homo sapien
cagtctcatatatggtctctgcaga

SEQ ID NO: 1357468 - DNA, 25 bp, Homo sapien
gatccaagggggctgacttttcagt

SEQ ID NO: 1357469 - DNA, 25 bp, Homo sapien
ctgcttgtgggtgacagcaagtgaa

SEQ ID NO: 1357470 - DNA, 25 bp, Homo sapien
tgctgaaattgacaaaaggcttcat

SEQ ID NO: 1357471 - DNA, 25 bp, Homo sapien
tgtgggtgacagcaagtgaattcac

SEQ ID NO: 1357472 - DNA, 25 bp, Homo sapien
tagcccgagaggaacgggctgctga

SEQ ID NO: 1357473 - DNA, 25 bp, Homo sapien
tctaggccagtgatactaaatacaa

SEQ ID NO: 1357474 - DNA, 25 bp, Homo sapien
gaaatgtgtaccaatgtcagtgatc

SEQ ID NO: 1357475 - DNA, 25 bp, Homo sapien
ggtctgtcataacctccaagataaa

SEQ ID NO: 1357476 - DNA, 25 bp, Homo sapien
caaggctacttgttgcttgagatct

SEQ ID NO: 1357477 - DNA, 25 bp, Homo sapien
ggtcatctttactccactctgtgat

SEQ ID NO: 1357478 - DNA, 25 bp, Homo sapien
gagaagtgtcagtgccaggtccctg

SEQ ID NO: 1357479 - DNA, 25 bp, Homo sapien
aggcagagcccgcaggtcatcttta

SEQ ID NO: 1357480 - DNA, 25 bp, Homo sapien
tccctgtgttggatgtggaggcaga

SEQ ID NO: 1357481 - DNA, 25 bp, Homo sapien
ctggacattcaccctttctcaggca

SEQ ID NO: 1357482 - DNA, 25 bp, Homo sapien
ccctggacattcaccctttctcagg

SEQ ID NO: 1357483 - DNA, 25 bp, Homo sapien
tcaccctttctcaggcagcccacca

SEQ ID NO: 1357484 - DNA, 25 bp, Homo sapien
ggacattcaccctttctcaggcagc

SEQ ID NO: 1357485 - DNA, 25 bp, Homo sapien
tgcttggcaggcgtccccattttat

SEQ ID NO: 1357486 - DNA, 25 bp, Homo sapien
cagatgcgaatgacttcaggatacc

SEQ ID NO: 1357487 - DNA, 25 bp, Homo sapien
tatgatatcaaagctgctatgctgt

SEQ ID NO: 1357488 - DNA, 25 bp, Homo sapien
tacagaggttcaggataacatagca

SEQ ID NO: 1357489 - DNA, 25 bp, Homo sapien
tttgttctgctttgcgagctaaaac

SEQ ID NO: 1357490 - DNA, 25 bp, Homo sapien
gttctgctttgcgagctaaaaccga

SEQ ID NO: 1357491 - DNA, 25 bp, Homo sapien
ctgctttgcgagctaaaaccgatcc

SEQ ID NO: 1357492 - DNA, 25 bp, Homo sapien
cccagaataggatttaaaggaggat

SEQ ID NO: 1357493 - DNA, 25 bp, Homo sapien
gcaatgaattctttcatcccttttc

SEQ ID NO: 1357494 - DNA, 25 bp, Homo sapien
ttcttataaccagaattttcatggc

SEQ ID NO: 1357495 - DNA, 25 bp, Homo sapien
ggcatttggatgaatgccagtaatg

SEQ ID NO: 1357496 - DNA, 25 bp, Homo sapien
tgttcttataaccagaattttcatg

SEQ ID NO: 1357497 - DNA, 25 bp, Homo sapien
aggaagaacatatggccaatggcca

SEQ ID NO: 1357498 - DNA, 25 bp, Homo sapien
aattggtgaaggaagaacatatggc

SEQ ID NO: 1357499 - DNA, 25 bp, Homo sapien
atgctggctgagttcccattaagat

SEQ ID NO: 1357500 - DNA, 25 bp, Homo sapien
ctgatggtataaattggtgaaggaa

SEQ ID NO: 1357501 - DNA, 25 bp, Homo sapien
ccaaggttattgaggccctcatcca

SEQ ID NO: 1357502 - DNA, 25 bp, Homo sapien
cagctgagcttggatgcacccacat

SEQ ID NO: 1357503 - DNA, 25 bp, Homo sapien
tccatctccaggatgagtggtcctg

SEQ ID NO: 1357504 - DNA, 25 bp, Homo sapien
atgcctgcttttcagcaaccccagg

SEQ ID NO: 1357505 - DNA, 25 bp, Homo sapien
ttcagcaaccccagggcgtccatct

SEQ ID NO: 1357506 - DNA, 25 bp, Homo sapien
ccatctccaggatgagtggtcctga

SEQ ID NO: 1357507 - DNA, 25 bp, Homo sapien
cactttcaggtccagggaacattcc

SEQ ID NO: 1357508 - DNA, 25 bp, Homo sapien
tttgaatttgaaacagcagaatacg

SEQ ID NO: 1357509 - DNA, 25 bp, Homo sapien
aatacggcagtttggctgaaacaac

SEQ ID NO: 1357510 - DNA, 25 bp, Homo sapien
aacagcagaatacggcagtttggct

SEQ ID NO: 1357511 - DNA, 25 bp, Homo sapien
aaaacaatcagccatttatagactt

SEQ ID NO: 1357512 - DNA, 25 bp, Homo sapien
ccaagtttctgcagttacagaaaaa

SEQ ID NO: 1357513 - DNA, 25 bp, Homo sapien
aacaatcagccatttatagacttct

SEQ ID NO: 1357514 - DNA, 25 bp, Homo sapien
tccaagtttctgcagttacagaaaa

SEQ ID NO: 1357515 - DNA, 25 bp, Homo sapien
gggaagtggtgactcgagacaagtg

SEQ ID NO: 1357516 - DNA, 25 bp, Homo sapien
ccataaagattcctaaaagtctttg

SEQ ID NO: 1357517 - DNA, 25 bp, Homo sapien
cataaagattcctaaaagtctttgt

SEQ ID NO: 1357518 - DNA, 25 bp, Homo sapien
gaagtggtgactcgagacaagtgga

SEQ ID NO: 1357519 - DNA, 25 bp, Homo sapien
gaacaccatatgcagcagagcatct

SEQ ID NO: 1357520 - DNA, 25 bp, Homo sapien
gggacaaattggttctattagtctc

SEQ ID NO: 1357521 - DNA, 25 bp, Homo sapien
tgttcccattatagagtgtgatacc

SEQ ID NO: 1357522 - DNA, 25 bp, Homo sapien
tagctgtgcattgtgatttcactgg

SEQ ID NO: 1357523 - DNA, 25 bp, Homo sapien
cttaaagcagaggtttctaaagcag

SEQ ID NO: 1357524 - DNA, 25 bp, Homo sapien
ttctaaagcaggatgttcttgggca

SEQ ID NO: 1357525 - DNA, 25 bp, Homo sapien
taaagcagaggtttctaaagcagga

SEQ ID NO: 1357526 - DNA, 25 bp, Homo sapien
ttaaagcagaggtttctaaagcagg

SEQ ID NO: 1357527 - DNA, 25 bp, Homo sapien
ctgtatagcatctgtgtcacttgca

SEQ ID NO: 1357528 - DNA, 25 bp, Homo sapien
tgcagagccccatcaaacggagcat

SEQ ID NO: 1357529 - DNA, 25 bp, Homo sapien
tggctgcccagtccaagaatgttgg

SEQ ID NO: 1357530 - DNA, 25 bp, Homo sapien
tcacttgcatgactctggccttggc

SEQ ID NO: 1357531 - DNA, 25 bp, Homo sapien
ccactgaagggtggccggagacttt

SEQ ID NO: 1357532 - DNA, 25 bp, Homo sapien
tatatcccaagatgcgagattctgc

SEQ ID NO: 1357533 - DNA, 25 bp, Homo sapien
taatccttcagactcatgtgctgcc

SEQ ID NO: 1357534 - DNA, 25 bp, Homo sapien
tgtgctgcctccataggaatgatgt

SEQ ID NO: 1357535 - DNA, 25 bp, Homo sapien
ttattttagcagttagtggagcctc

SEQ ID NO: 1357536 - DNA, 25 bp, Homo sapien
ttttagcagttagtggagcctcctc

SEQ ID NO: 1357537 - DNA, 25 bp, Homo sapien
tattttagcagttagtggagcctcc

SEQ ID NO: 1357538 - DNA, 25 bp, Homo sapien
ttagcagttagtggagcctcctcct

SEQ ID NO: 1357539 - DNA, 25 bp, Homo sapien
actgctctgcccgaatatgacctgg

SEQ ID NO: 1357540 - DNA, 25 bp, Homo sapien
tatgacctggacacttataagcaga

SEQ ID NO: 1357541 - DNA, 25 bp, Homo sapien
taaaatgtcaaaggccaaattctgc

SEQ ID NO: 1357542 - DNA, 25 bp, Homo sapien
tagcccagcctgtcaatagattctt

SEQ ID NO: 1357543 - DNA, 25 bp, Homo sapien
gctgtcccctttatcgcgtactggt

SEQ ID NO: 1357544 - DNA, 25 bp, Homo sapien
tgttcaagagaacacgcacaacgtt

SEQ ID NO: 1357545 - DNA, 25 bp, Homo sapien
gcgtactggtaacaggcaagtccac

SEQ ID NO: 1357546 - DNA, 25 bp, Homo sapien
tccactggtcacagatgctctttgt

SEQ ID NO: 1357547 - DNA, 25 bp, Homo sapien
gtgactgaactaatgaaagaataaa

SEQ ID NO: 1357548 - DNA, 25 bp, Homo sapien
tacttgagtgactgaactaatgaaa

SEQ ID NO: 1357549 - DNA, 25 bp, Homo sapien
ttgagtgactgaactaatgaaagaa

SEQ ID NO: 1357550 - DNA, 25 bp, Homo sapien
agtgactgaactaatgaaagaataa

SEQ ID NO: 1357551 - DNA, 25 bp, Homo sapien
gatacagctcactttgccaaatttg

SEQ ID NO: 1357552 - DNA, 25 bp, Homo sapien
tgattccccggattttggtcttaga

SEQ ID NO: 1357553 - DNA, 25 bp, Homo sapien
gcctctggattttgatcttagatta

SEQ ID NO: 1357554 - DNA, 25 bp, Homo sapien
tcatctacctggtgggttaccgaat

SEQ ID NO: 1357555 - DNA, 25 bp, Homo sapien
ttgtctctttgaatgtgtcaatatc

SEQ ID NO: 1357556 - DNA, 25 bp, Homo sapien
tttgtctctttgaatgtgtcaatat

SEQ ID NO: 1357557 - DNA, 25 bp, Homo sapien
gtttttgtctctttgaatgtgtcaa

SEQ ID NO: 1357558 - DNA, 25 bp, Homo sapien
acagtttttgtctctttgaatgtgt

SEQ ID NO: 1357559 - DNA, 25 bp, Homo sapien
gtgccatcagagacaagcccataca

SEQ ID NO: 1357560 - DNA, 25 bp, Homo sapien
tccattggccaactttccctggtgc

SEQ ID NO: 1357561 - DNA, 25 bp, Homo sapien
ccatcagagacaagcccatacattc

SEQ ID NO: 1357562 - DNA, 25 bp, Homo sapien
ctttatattttaagggctctactgc

SEQ ID NO: 1357563 - DNA, 25 bp, Homo sapien
ttggccaccccaatctatgttagat

SEQ ID NO: 1357564 - DNA, 25 bp, Homo sapien
tatcctagtcgttgtggtgactgga

SEQ ID NO: 1357565 - DNA, 25 bp, Homo sapien
caaattgctcttggccaccccaatc

SEQ ID NO: 1357566 - DNA, 25 bp, Homo sapien
cctagtcgttgtggtgactggactc

SEQ ID NO: 1357567 - DNA, 25 bp, Homo sapien
ctggtagagcccaattacatgagat

SEQ ID NO: 1357568 - DNA, 25 bp, Homo sapien
gtagagcccaattacatgagatgat

SEQ ID NO: 1357569 - DNA, 25 bp, Homo sapien
tggtagagcccaattacatgagatg

SEQ ID NO: 1357570 - DNA, 25 bp, Homo sapien
agagcccaattacatgagatgattt

SEQ ID NO: 1357571 - DNA, 25 bp, Homo sapien
gagactgattaggaacctccactga

SEQ ID NO: 1357572 - DNA, 25 bp, Homo sapien
tccactgagcacatcgggctccaat

SEQ ID NO: 1357573 - DNA, 25 bp, Homo sapien
cctgcctcccattaagagactgatt

SEQ ID NO: 1357574 - DNA, 25 bp, Homo sapien
gggctccaatttccatctaatgcag

SEQ ID NO: 1357575 - DNA, 25 bp, Homo sapien
gatgtactaatctctttgttgttct

SEQ ID NO: 1357576 - DNA, 25 bp, Homo sapien
atgtactaatctctttgttgttcta

SEQ ID NO: 1357577 - DNA, 25 bp, Homo sapien
atacttcacaaatgtgcgtctcatc

SEQ ID NO: 1357578 - DNA, 25 bp, Homo sapien
agaatacttcacaaatgtgcgtctc

SEQ ID NO: 1357579 - DNA, 25 bp, Homo sapien
gttcccatgtggtactgtgcggact

SEQ ID NO: 1357580 - DNA, 25 bp, Homo sapien
catgtggtactgtgcggactctgag

SEQ ID NO: 1357581 - DNA, 25 bp, Homo sapien
ccatgtggtactgtgcggactctga

SEQ ID NO: 1357582 - DNA, 25 bp, Homo sapien
tcccatgtggtactgtgcggactct

SEQ ID NO: 1357583 - DNA, 25 bp, Homo sapien
tcaagggatatgtgtagctgcagca

SEQ ID NO: 1357584 - DNA, 25 bp, Homo sapien
tttcaagggatatgtgtagctgcag

SEQ ID NO: 1357585 - DNA, 25 bp, Homo sapien
ttcaagggatatgtgtagctgcagc

SEQ ID NO: 1357586 - DNA, 25 bp, Homo sapien
ttttcaagggatatgtgtagctgca

SEQ ID NO: 1357587 - DNA, 25 bp, Homo sapien
catctaaagatagctggtaactcat

SEQ ID NO: 1357588 - DNA, 25 bp, Homo sapien
tattgacatctaaagatagctggta

SEQ ID NO: 1357589 - DNA, 25 bp, Homo sapien
tttcattgttattgacatctaaaga

SEQ ID NO: 1357590 - DNA, 25 bp, Homo sapien
tgttattgacatctaaagatagctg

SEQ ID NO: 1357591 - DNA, 25 bp, Homo sapien
tttgattggaggttttctgcagagc

SEQ ID NO: 1357592 - DNA, 25 bp, Homo sapien
ctaagcatttgattggaggttttct

SEQ ID NO: 1357593 - DNA, 25 bp, Homo sapien
catttgattggaggttttctgcaga

SEQ ID NO: 1357594 - DNA, 25 bp, Homo sapien
agcatttgattggaggttttctgca

SEQ ID NO: 1357595 - DNA, 25 bp, Homo sapien
cacgagtggttcagattttgtcagg

SEQ ID NO: 1357596 - DNA, 25 bp, Homo sapien
tcctgatgagcgtgcacctttgctg

SEQ ID NO: 1357597 - DNA, 25 bp, Homo sapien
ggtctttaagtaatcacacgagtgg

SEQ ID NO: 1357598 - DNA, 25 bp, Homo sapien
tgtgccagacgcacaatcaagtgct

SEQ ID NO: 1357599 - DNA, 25 bp, Homo sapien
gaaaataccctgctgttaaacgcat

SEQ ID NO: 1357600 - DNA, 25 bp, Homo sapien
gctgttaaacgcatctgcaatctgc

SEQ ID NO: 1357601 - DNA, 25 bp, Homo sapien
cctgctgttaaacgcatctgcaatc

SEQ ID NO: 1357602 - DNA, 25 bp, Homo sapien
taccctgctgttaaacgcatctgca

SEQ ID NO: 1357603 - DNA, 25 bp, Homo sapien
accattgttaagtgtttctaacact

SEQ ID NO: 1357604 - DNA, 25 bp, Homo sapien
taccattgttaagtgtttctaacac

SEQ ID NO: 1357605 - DNA, 25 bp, Homo sapien
tgttcaaaatctccgtgatcctctg

SEQ ID NO: 1357606 - DNA, 25 bp, Homo sapien
tatttaatctcctgtcgtgtgggaa

SEQ ID NO: 1357607 - DNA, 25 bp, Homo sapien
tttggtactccagagacctagcttc

SEQ ID NO: 1357608 - DNA, 25 bp, Homo sapien
gaactattgagaaagtagcccatct

SEQ ID NO: 1357609 - DNA, 25 bp, Homo sapien
tatcccagactttgcccaggtttta

SEQ ID NO: 1357610 - DNA, 25 bp, Homo sapien
tctgggacagtccttaccatgactg

SEQ ID NO: 1357611 - DNA, 25 bp, Homo sapien
gcacacaaactgctatcccagactt

SEQ ID NO: 1357612 - DNA, 25 bp, Homo sapien
gggacagtccttaccatgactgaaa

SEQ ID NO: 1357613 - DNA, 25 bp, Homo sapien
ttaaccacatcaattgcttcctgct

SEQ ID NO: 1357614 - DNA, 25 bp, Homo sapien
tgccattgtgggggagtaaggatcc

SEQ ID NO: 1357615 - DNA, 25 bp, Homo sapien
tttctgtcttatctgagaatggagt

SEQ ID NO: 1357616 - DNA, 25 bp, Homo sapien
tctgtcttatctgagaatggagtca

SEQ ID NO: 1357617 - DNA, 25 bp, Homo sapien
ccattgtgggggagtaaggatccca

SEQ ID NO: 1357618 - DNA, 25 bp, Homo sapien
agtagcaaaatctggagaattaaaa

SEQ ID NO: 1357619 - DNA, 25 bp, Homo sapien
gaagtagcaaaatctggagaattaa

SEQ ID NO: 1357620 - DNA, 25 bp, Homo sapien
cttagaagtagcaaaatctggagaa

SEQ ID NO: 1357621 - DNA, 25 bp, Homo sapien
ttagaagtagcaaaatctggagaat

SEQ ID NO: 1357622 - DNA, 25 bp, Homo sapien
taggtactgactccagggacactgg

SEQ ID NO: 1357623 - DNA, 25 bp, Homo sapien
tcttctgtataggtactgactccag

SEQ ID NO: 1357624 - DNA, 25 bp, Homo sapien
cactggggattttgtctcagcttga

SEQ ID NO: 1357625 - DNA, 25 bp, Homo sapien
tggttgagtcctatcttctgtatag

SEQ ID NO: 1357626 - DNA, 25 bp, Homo sapien
tcccaggcctacttgatcttgtccg

SEQ ID NO: 1357627 - DNA, 25 bp, Homo sapien
tcttgtccgtttggctcggctggtg

SEQ ID NO: 1357628 - DNA, 25 bp, Homo sapien
tacttgatcttgtccgtttggctcg

SEQ ID NO: 1357629 - DNA, 25 bp, Homo sapien
caagtcccaggcctacttgatcttg

SEQ ID NO: 1357630 - DNA, 25 bp, Homo sapien
ctattgctggtttgttgatatagtg

SEQ ID NO: 1357631 - DNA, 25 bp, Homo sapien
caccatttgtcttagatgaaaaata

SEQ ID NO: 1357632 - DNA, 25 bp, Homo sapien
agaaagtaaccaacttcaccatttg

SEQ ID NO: 1357633 - DNA, 25 bp, Homo sapien
gctggtttgttgatatagtgtttgt

SEQ ID NO: 1357634 - DNA, 25 bp, Homo sapien
tttatttcacttactgcttggatca

SEQ ID NO: 1357635 - DNA, 25 bp, Homo sapien
cattcttcatgcccgtatcctctgt

SEQ ID NO: 1357636 - DNA, 25 bp, Homo sapien
ttcatgcccgtatcctctgtttatt

SEQ ID NO: 1357637 - DNA, 25 bp, Homo sapien
tatccctggttttgttcagcccctc

SEQ ID NO: 1357638 - DNA, 25 bp, Homo sapien
actgagcatcatggtaccccagcca

SEQ ID NO: 1357639 - DNA, 25 bp, Homo sapien
caagttctgctagcatcatcactgg

SEQ ID NO: 1357640 - DNA, 25 bp, Homo sapien
gtgctcttaacaacttccctgggta

SEQ ID NO: 1357641 - DNA, 25 bp, Homo sapien
taagtagtataatgccattttccag

SEQ ID NO: 1357642 - DNA, 25 bp, Homo sapien
tgaggctccaggtagtcttgtgatg

SEQ ID NO: 1357643 - DNA, 25 bp, Homo sapien
gctccaggtagtcttgtgatgtgat

SEQ ID NO: 1357644 - DNA, 25 bp, Homo sapien
agcagagggagttgctggaacacag

SEQ ID NO: 1357645 - DNA, 25 bp, Homo sapien
ggttgtatgaggctccaggtagtct

SEQ ID NO: 1357646 - DNA, 25 bp, Homo sapien
tatttaacagatcaactggccagtc

SEQ ID NO: 1357647 - DNA, 25 bp, Homo sapien
caactggccagtcatgatcccttct

SEQ ID NO: 1357648 - DNA, 25 bp, Homo sapien
tggccagtcatgatcccttctgaag

SEQ ID NO: 1357649 - DNA, 25 bp, Homo sapien
gtcatgatcccttctgaagtcaagt

SEQ ID NO: 1357650 - DNA, 25 bp, Homo sapien
ccaagatggaggttgtaattcccaa

SEQ ID NO: 1357651 - DNA, 25 bp, Homo sapien
ttaaacaaccaagatggaggttgta

SEQ ID NO: 1357652 - DNA, 25 bp, Homo sapien
gcattactgctttgaagtttcaggg

SEQ ID NO: 1357653 - DNA, 25 bp, Homo sapien
taattcccaaagcagggcattactg

SEQ ID NO: 1357654 - DNA, 25 bp, Homo sapien
attgcagtggcatttctagtgtgca

SEQ ID NO: 1357655 - DNA, 25 bp, Homo sapien
cgtttgtaagtgatattcggaattg

SEQ ID NO: 1357656 - DNA, 25 bp, Homo sapien
ttgcagtggcatttctagtgtgcat

SEQ ID NO: 1357657 - DNA, 25 bp, Homo sapien
gtgatattcggaattgcagtggcat

SEQ ID NO: 1357658 - DNA, 25 bp, Homo sapien
tatgaaatgccttcactctccatac

SEQ ID NO: 1357659 - DNA, 25 bp, Homo sapien
ctcttgcggtatgaaatgccttcac

SEQ ID NO: 1357660 - DNA, 25 bp, Homo sapien
ggtatgaaatgccttcactctccat

SEQ ID NO: 1357661 - DNA, 25 bp, Homo sapien
gcggtatgaaatgccttcactctcc

SEQ ID NO: 1357662 - DNA, 25 bp, Homo sapien
cctgtgaactgctgaagccagccgg

SEQ ID NO: 1357663 - DNA, 25 bp, Homo sapien
tcctttcctcgctcagagcgctgcc

SEQ ID NO: 1357664 - DNA, 25 bp, Homo sapien
tttgaattatcccagtggtcatcag

SEQ ID NO: 1357665 - DNA, 25 bp, Homo sapien
gggagcacgcctgtgaactgctgaa

SEQ ID NO: 1357666 - DNA, 25 bp, Homo sapien
ggcgatcatccacagttgcagccca

SEQ ID NO: 1357667 - DNA, 25 bp, Homo sapien
gcattgtcaccgaggcgatcatcca

SEQ ID NO: 1357668 - DNA, 25 bp, Homo sapien
gggcaacagcagtatctgacatctg

SEQ ID NO: 1357669 - DNA, 25 bp, Homo sapien
ctgacatctgagctgctaggtatgc

SEQ ID NO: 1357670 - DNA, 25 bp, Homo sapien
aactgatcgattgcagcatttgcag

SEQ ID NO: 1357671 - DNA, 25 bp, Homo sapien
gcatttgcagaaatcgacatatcct

SEQ ID NO: 1357672 - DNA, 25 bp, Homo sapien
tttaattgaaactgatcgattgcag

SEQ ID NO: 1357673 - DNA, 25 bp, Homo sapien
gcagaaatcgacatatccttttgga

SEQ ID NO: 1357674 - DNA, 25 bp, Homo sapien
tgaacaaaagtcatgaatatagact

SEQ ID NO: 1357675 - DNA, 25 bp, Homo sapien
acaaaagtcatgaatatagacttcc

SEQ ID NO: 1357676 - DNA, 25 bp, Homo sapien
gaacaaaagtcatgaatatagactt

SEQ ID NO: 1357677 - DNA, 25 bp, Homo sapien
ttgaacaaaagtcatgaatatagac

SEQ ID NO: 1357678 - DNA, 25 bp, Homo sapien
cagttgtgcagacttatccaggaca

SEQ ID NO: 1357679 - DNA, 25 bp, Homo sapien
catttatttgcagttgtgcagactt

SEQ ID NO: 1357680 - DNA, 25 bp, Homo sapien
agacttatccaggacagagtcactg

SEQ ID NO: 1357681 - DNA, 25 bp, Homo sapien
tatttgcagttgtgcagacttatcc

SEQ ID NO: 1357682 - DNA, 25 bp, Homo sapien
gaacttctctcaacctggctggctg

SEQ ID NO: 1357683 - DNA, 25 bp, Homo sapien
gattcaagctgcagagatttaactc

SEQ ID NO: 1357684 - DNA, 25 bp, Homo sapien
ggctctggctaactcagccgtgaga

SEQ ID NO: 1357685 - DNA, 25 bp, Homo sapien
tctaatgtaaaatcatgaacggatg

SEQ ID NO: 1357686 - DNA, 25 bp, Homo sapien
tgaaggtgagatacattttttcctg

SEQ ID NO: 1357687 - DNA, 25 bp, Homo sapien
tcatcatcagcagtaagtgcacaac

SEQ ID NO: 1357688 - DNA, 25 bp, Homo sapien
tgagtgcaaccttctgtctgaaggt

SEQ ID NO: 1357689 - DNA, 25 bp, Homo sapien
ctgctaaggatgtgagtgcaacctt

SEQ ID NO: 1357690 - DNA, 25 bp, Homo sapien
tttgctgcaattgcggggatgagga

SEQ ID NO: 1357691 - DNA, 25 bp, Homo sapien
gaggatgatgatacacgagatcagc

SEQ ID NO: 1357692 - DNA, 25 bp, Homo sapien
aagccatagttgattgtgctgcagt

SEQ ID NO: 1357693 - DNA, 25 bp, Homo sapien
ccatagttgattgtgctgcagtcat

SEQ ID NO: 1357694 - DNA, 25 bp, Homo sapien
tctcctcttgcccaagcaaaacaat

SEQ ID NO: 1357695 - DNA, 25 bp, Homo sapien
cactctcctcttgcccaagcaaaac

SEQ ID NO: 1357696 - DNA, 25 bp, Homo sapien
tccactctcctcttgcccaagcaaa

SEQ ID NO: 1357697 - DNA, 25 bp, Homo sapien
cctccactctcctcttgcccaagca

SEQ ID NO: 1357698 - DNA, 25 bp, Homo sapien
ttcctcaacttctctatagactatg

SEQ ID NO: 1357699 - DNA, 25 bp, Homo sapien
atatcttcctcaacttctctataga

SEQ ID NO: 1357700 - DNA, 25 bp, Homo sapien
actatgagctcctcaacagcaagga

SEQ ID NO: 1357701 - DNA, 25 bp, Homo sapien
aacttctctatagactatgagctcc

SEQ ID NO: 1357702 - DNA, 25 bp, Homo sapien
aaccatactcatatgcaacaagagt

SEQ ID NO: 1357703 - DNA, 25 bp, Homo sapien
ttctagttcatcttggggccgccga

SEQ ID NO: 1357704 - DNA, 25 bp, Homo sapien
cttggggccgccgattcttgtgttt

SEQ ID NO: 1357705 - DNA, 25 bp, Homo sapien
aaaccatactcatatgcaacaagag

SEQ ID NO: 1357706 - DNA, 25 bp, Homo sapien
cttgtgagctgaggccagctcccac

SEQ ID NO: 1357707 - DNA, 25 bp, Homo sapien
gtgagctgaggccagctcccacagt

SEQ ID NO: 1357708 - DNA, 25 bp, Homo sapien
ccacagtccttccaacatctctcat

SEQ ID NO: 1357709 - DNA, 25 bp, Homo sapien
ctgaggccagctcccacagtccttc

SEQ ID NO: 1357710 - DNA, 25 bp, Homo sapien
gtcagcaataccaagatgcttgctc

SEQ ID NO: 1357711 - DNA, 25 bp, Homo sapien
gcatgtcagcaataccaagatgctt

SEQ ID NO: 1357712 - DNA, 25 bp, Homo sapien
catgtcagcaataccaagatgcttg

SEQ ID NO: 1357713 - DNA, 25 bp, Homo sapien
tgtcagcaataccaagatgcttgct

SEQ ID NO: 1357714 - DNA, 25 bp, Homo sapien
aggttcttttgatggatggtgtccc

SEQ ID NO: 1357715 - DNA, 25 bp, Homo sapien
gacagccagccttaacaagattctc

SEQ ID NO: 1357716 - DNA, 25 bp, Homo sapien
tggtctgctcagtagaagagaagga

SEQ ID NO: 1357717 - DNA, 25 bp, Homo sapien
tagttgcttgccaaacatctgtcgg

SEQ ID NO: 1357718 - DNA, 25 bp, Homo sapien
ggtgccaggtagtctgatcgctttg

SEQ ID NO: 1357719 - DNA, 25 bp, Homo sapien
gaattgcccggtcaatggtgctgat

SEQ ID NO: 1357720 - DNA, 25 bp, Homo sapien
ctgatcgctttgaattgcccggtca

SEQ ID NO: 1357721 - DNA, 25 bp, Homo sapien
cttcttggtgccaggtagtctgatc

SEQ ID NO: 1357722 - DNA, 25 bp, Homo sapien
cttcaattaaggcataggtcagttc

SEQ ID NO: 1357723 - DNA, 25 bp, Homo sapien
tcatccacctgcctatcttcaatta

SEQ ID NO: 1357724 - DNA, 25 bp, Homo sapien
tgtcttgtgcatggcgtgacaccat

SEQ ID NO: 1357725 - DNA, 25 bp, Homo sapien
cataggtcagttctttgtcttgtgc

SEQ ID NO: 1357726 - DNA, 25 bp, Homo sapien
aaatatactcctcaagagttccctt

SEQ ID NO: 1357727 - DNA, 25 bp, Homo sapien
aaaatatactcctcaagagttccct

SEQ ID NO: 1357728 - DNA, 25 bp, Homo sapien
ttgatatttgtcagacttactgatg

SEQ ID NO: 1357729 - DNA, 25 bp, Homo sapien
ttttgatatttgtcagacttactga

SEQ ID NO: 1357730 - DNA, 25 bp, Homo sapien
tttgatatttgtcagacttactgat

SEQ ID NO: 1357731 - DNA, 25 bp, Homo sapien
gcagaagtgtgctcagatacagtaa

SEQ ID NO: 1357732 - DNA, 25 bp, Homo sapien
gacagaaattggtaggccttcccag

SEQ ID NO: 1357733 - DNA, 25 bp, Homo sapien
gacgtaaaacttattcagagccagc

SEQ ID NO: 1357734 - DNA, 25 bp, Homo sapien
tctcaagccaggtgaaggagacccc

SEQ ID NO: 1357735 - DNA, 25 bp, Homo sapien
tcgctgagaataatcttcagaagct

SEQ ID NO: 1357736 - DNA, 25 bp, Homo sapien
gaataatcttcagaagcttggcttt

SEQ ID NO: 1357737 - DNA, 25 bp, Homo sapien
tgcagtcgctgagaataatcttcag

SEQ ID NO: 1357738 - DNA, 25 bp, Homo sapien
tgagaataatcttcagaagcttggc

SEQ ID NO: 1357739 - DNA, 25 bp, Homo sapien
catctagtccactctagcaagcacg

SEQ ID NO: 1357740 - DNA, 25 bp, Homo sapien
caagcacgaagctcattttttacaa

SEQ ID NO: 1357741 - DNA, 25 bp, Homo sapien
tatatctcatctagtccactctagc

SEQ ID NO: 1357742 - DNA, 25 bp, Homo sapien
cactctagcaagcacgaagctcatt

SEQ ID NO: 1357743 - DNA, 25 bp, Homo sapien
ttgtacctatacagtgtacaacaca

SEQ ID NO: 1357744 - DNA, 25 bp, Homo sapien
tggttaattggtcagcaaaggtatt

SEQ ID NO: 1357745 - DNA, 25 bp, Homo sapien
tttggttaattggtcagcaaaggta

SEQ ID NO: 1357746 - DNA, 25 bp, Homo sapien
ttggttaattggtcagcaaaggtat

SEQ ID NO: 1357747 - DNA, 25 bp, Homo sapien
tcttaatcatttattagttcatcca

SEQ ID NO: 1357748 - DNA, 25 bp, Homo sapien
ttcttaatcatttattagttcatcc

SEQ ID NO: 1357749 - DNA, 25 bp, Homo sapien
ttaatcatttattagttcatccatt

SEQ ID NO: 1357750 - DNA, 25 bp, Homo sapien
cttaatcatttattagttcatccat

SEQ ID NO: 1357751 - DNA, 25 bp, Homo sapien
cacagtggggcttgacttggccttt

SEQ ID NO: 1357752 - DNA, 25 bp, Homo sapien
tgtcaggctccacatcaaatgcttc

SEQ ID NO: 1357753 - DNA, 25 bp, Homo sapien
tctttctccaccaaggaatcattga

SEQ ID NO: 1357754 - DNA, 25 bp, Homo sapien
aggaatcattgaatctcacagtggg

SEQ ID NO: 1357755 - DNA, 25 bp, Homo sapien
gcagctgcttatattcaccagaggg

SEQ ID NO: 1357756 - DNA, 25 bp, Homo sapien
cttctaaaagaacaccacaagggct

SEQ ID NO: 1357757 - DNA, 25 bp, Homo sapien
cagaggggatggcagcaatcctact

SEQ ID NO: 1357758 - DNA, 25 bp, Homo sapien
tacgttcacgatgccttgaagaggg

SEQ ID NO: 1357759 - DNA, 25 bp, Homo sapien
ggaacacagcaggagaataccactg

SEQ ID NO: 1357760 - DNA, 25 bp, Homo sapien
aataccagacgctgatttcaggaac

SEQ ID NO: 1357761 - DNA, 25 bp, Homo sapien
catcatttggcaacgagagcatgaa

SEQ ID NO: 1357762 - DNA, 25 bp, Homo sapien
tgaaatgcccgggatccatcatttg

SEQ ID NO: 1357763 - DNA, 25 bp, Homo sapien
gaaatctgaacaggtccagatccgt

SEQ ID NO: 1357764 - DNA, 25 bp, Homo sapien
tgaacaggtccagatccgtctctct

SEQ ID NO: 1357765 - DNA, 25 bp, Homo sapien
ggtccagatccgtctctctctgctg

SEQ ID NO: 1357766 - DNA, 25 bp, Homo sapien
tcaagaaatctgaacaggtccagat

SEQ ID NO: 1357767 - DNA, 25 bp, Homo sapien
cgagtcctctgggaaacaatgcatc

SEQ ID NO: 1357768 - DNA, 25 bp, Homo sapien
gtcctctgggaaacaatgcatctct

SEQ ID NO: 1357769 - DNA, 25 bp, Homo sapien
gtctttgtgttctgtctatgattca

SEQ ID NO: 1357770 - DNA, 25 bp, Homo sapien
tctcttagggtctttgtgttctgtc

SEQ ID NO: 1357771 - DNA, 25 bp, Homo sapien
caatgcgagctctgtggccagagta

SEQ ID NO: 1357772 - DNA, 25 bp, Homo sapien
ggttttccactccacttaatgatgg

SEQ ID NO: 1357773 - DNA, 25 bp, Homo sapien
cacttaatgatggaggcaatgcgag

SEQ ID NO: 1357774 - DNA, 25 bp, Homo sapien
cagagtacatgaggaagcatccaca

SEQ ID NO: 1357775 - DNA, 25 bp, Homo sapien
aaaccattcttcacatcccggtcca

SEQ ID NO: 1357776 - DNA, 25 bp, Homo sapien
gtccaaatgcctcatgcactgtgaa

SEQ ID NO: 1357777 - DNA, 25 bp, Homo sapien
ggtagaatgccctttagtaacataa

SEQ ID NO: 1357778 - DNA, 25 bp, Homo sapien
ttcagagttcatcatttcaagcctc

SEQ ID NO: 1357779 - DNA, 25 bp, Homo sapien
tatctctggattgcaatcacgggca

SEQ ID NO: 1357780 - DNA, 25 bp, Homo sapien
tcaggcactgggtgatctctacaca

SEQ ID NO: 1357781 - DNA, 25 bp, Homo sapien
aagcccgcagcagtaatggtaatcc

SEQ ID NO: 1357782 - DNA, 25 bp, Homo sapien
gactcaaggagacagaggacccaaa

SEQ ID NO: 1357783 - DNA, 25 bp, Homo sapien
tttgaggatatatgtccaaagaaat

SEQ ID NO: 1357784 - DNA, 25 bp, Homo sapien
gtcacaacaacagtgaagacatgga

SEQ ID NO: 1357785 - DNA, 25 bp, Homo sapien
gagataacaagagttgacgaacatg

SEQ ID NO: 1357786 - DNA, 25 bp, Homo sapien
gaactaccctataggattcagcaat

SEQ ID NO: 1357787 - DNA, 25 bp, Homo sapien
cacactgcttgttggtggagtcagg

SEQ ID NO: 1357788 - DNA, 25 bp, Homo sapien
cagcaacgaggcaagttttgaccac

SEQ ID NO: 1357789 - DNA, 25 bp, Homo sapien
ggagtcaggactgcaacacaatagt

SEQ ID NO: 1357790 - DNA, 25 bp, Homo sapien
aatagtccttactcccaggccagga

SEQ ID NO: 1357791 - DNA, 25 bp, Homo sapien
atgaacaagttataactcatttcac

SEQ ID NO: 1357792 - DNA, 25 bp, Homo sapien
agcatcagcattcaaggaaagttgg

SEQ ID NO: 1357793 - DNA, 25 bp, Homo sapien
agactgcagcgggaaaaatcaagga

SEQ ID NO: 1357794 - DNA, 25 bp, Homo sapien
cagaaccctaggaaagcatcagcat

SEQ ID NO: 1357795 - DNA, 25 bp, Homo sapien
ctagcccaaagcctgaagtcaacaa

SEQ ID NO: 1357796 - DNA, 25 bp, Homo sapien
tgagtgcctctttgtactagcccaa

SEQ ID NO: 1357797 - DNA, 25 bp, Homo sapien
tcactggcttacatctgagtgcctc

SEQ ID NO: 1357798 - DNA, 25 bp, Homo sapien
agtcctagagactacccaggctttt

SEQ ID NO: 1357799 - DNA, 25 bp, Homo sapien
gtgaaaaggctatgagcagagctgc

SEQ ID NO: 1357800 - DNA, 25 bp, Homo sapien
gagcagagctgccattcgttgactc

SEQ ID NO: 1357801 - DNA, 25 bp, Homo sapien
gctgccattcgttgactcttgttac

SEQ ID NO: 1357802 - DNA, 25 bp, Homo sapien
ttgactcttgttacttgagtaggtg

SEQ ID NO: 1357803 - DNA, 25 bp, Homo sapien
gcagttgagaaaacgtaggccaaac

SEQ ID NO: 1357804 - DNA, 25 bp, Homo sapien
tacgctggacagaaccctagaagaa

SEQ ID NO: 1357805 - DNA, 25 bp, Homo sapien
ttggcactgcagagatacgctggac

SEQ ID NO: 1357806 - DNA, 25 bp, Homo sapien
gagatgcctgctgagattgaaagtc

SEQ ID NO: 1357807 - DNA, 25 bp, Homo sapien
caatttagaatataggatccaataa

SEQ ID NO: 1357808 - DNA, 25 bp, Homo sapien
tttagaatataggatccaataaaaa

SEQ ID NO: 1357809 - DNA, 25 bp, Homo sapien
aatttagaatataggatccaataaa

SEQ ID NO: 1357810 - DNA, 25 bp, Homo sapien
tacaatttagaatataggatccaat

SEQ ID NO: 1357811 - DNA, 25 bp, Homo sapien
ggccatcatgtctactatcagtttc

SEQ ID NO: 1357812 - DNA, 25 bp, Homo sapien
tcatgtctactatcagtttctgaaa

SEQ ID NO: 1357813 - DNA, 25 bp, Homo sapien
catcatgtctactatcagtttctga

SEQ ID NO: 1357814 - DNA, 25 bp, Homo sapien
ttggccatcatgtctactatcagtt

SEQ ID NO: 1357815 - DNA, 25 bp, Homo sapien
taaagaatgaagtctgacggcggga

SEQ ID NO: 1357816 - DNA, 25 bp, Homo sapien
tccctggctgcgacgtgtatgcgaa

SEQ ID NO: 1357817 - DNA, 25 bp, Homo sapien
tgacagggcccttttatcgtaaatc

SEQ ID NO: 1357818 - DNA, 25 bp, Homo sapien
tgtcccagaccagatagtagcaaga

SEQ ID NO: 1357819 - DNA, 25 bp, Homo sapien
gaactgtatgctccactaagtggct

SEQ ID NO: 1357820 - DNA, 25 bp, Homo sapien
ggaactgtatgctccactaagtggc

SEQ ID NO: 1357821 - DNA, 25 bp, Homo sapien
ccttcatacagtcctgagcactgag

SEQ ID NO: 1357822 - DNA, 25 bp, Homo sapien
ttcatacagtcctgagcactgagcc

SEQ ID NO: 1357823 - DNA, 25 bp, Homo sapien
ggcgtcctaattgctcgtcccacag

SEQ ID NO: 1357824 - DNA, 25 bp, Homo sapien
aattgctcgtcccacagcctcccgc

SEQ ID NO: 1357825 - DNA, 25 bp, Homo sapien
gggggcgtcctaattgctcgtccca

SEQ ID NO: 1357826 - DNA, 25 bp, Homo sapien
attgctcgtcccacagcctcccgct

SEQ ID NO: 1357827 - DNA, 25 bp, Homo sapien
tgtcatcgctgcccagcgcttcgga

SEQ ID NO: 1357828 - DNA, 25 bp, Homo sapien
aggctgtccgacctcgccggcgctc

SEQ ID NO: 1357829 - DNA, 25 bp, Homo sapien
cagcagaacagctgcgaggctcgag

SEQ ID NO: 1357830 - DNA, 25 bp, Homo sapien
gaggctcgaggagcgtccgcctgcc

SEQ ID NO: 1357831 - DNA, 25 bp, Homo sapien
tataagtgactctttttggacaaca

SEQ ID NO: 1357832 - DNA, 25 bp, Homo sapien
tttttcatattatggagcatgccac

SEQ ID NO: 1357833 - DNA, 25 bp, Homo sapien
gggcagacggaatgtcctcggcaac

SEQ ID NO: 1357834 - DNA, 25 bp, Homo sapien
cagtgcaaagttctcagttaccctc

SEQ ID NO: 1357835 - DNA, 25 bp, Homo sapien
ttttcaccagtcacactgctgtggg

SEQ ID NO: 1357836 - DNA, 25 bp, Homo sapien
tgtggggtcagcattttcaccagtc

SEQ ID NO: 1357837 - DNA, 25 bp, Homo sapien
tggttgcactctgtgtggggtcagc

SEQ ID NO: 1357838 - DNA, 25 bp, Homo sapien
tgtgggggagatttccagccctgtt

SEQ ID NO: 1357839 - DNA, 25 bp, Homo sapien
gagaggacgggcagcagtccgggtt

SEQ ID NO: 1357840 - DNA, 25 bp, Homo sapien
ccctgcccactggtaagcatcttcc

SEQ ID NO: 1357841 - DNA, 25 bp, Homo sapien
aggccctaggccgtggatgagcaca

SEQ ID NO: 1357842 - DNA, 25 bp, Homo sapien
ccaggccctaggccgtggatgagca

SEQ ID NO: 1357843 - DNA, 25 bp, Homo sapien
cccaggccctaggccgtggatgagc

SEQ ID NO: 1357844 - DNA, 25 bp, Homo sapien
ggccctaggccgtggatgagcacac

SEQ ID NO: 1357845 - DNA, 25 bp, Homo sapien
ctctgcagcgccgagtagttccctg

SEQ ID NO: 1357846 - DNA, 25 bp, Homo sapien
gaaataaggcgatggaaacatcctc

SEQ ID NO: 1357847 - DNA, 25 bp, Homo sapien
caggcttgggtgatagaaataaggc

SEQ ID NO: 1357848 - DNA, 25 bp, Homo sapien
tgctggaggagtccggtacatgctg

SEQ ID NO: 1357849 - DNA, 25 bp, Homo sapien
gctggtggtcggaaaaagctgtcct

SEQ ID NO: 1357850 - DNA, 25 bp, Homo sapien
taccaggtcttgacttgggtgtcag

SEQ ID NO: 1357851 - DNA, 25 bp, Homo sapien
tgccgctcaaagctacgctccagtt

SEQ ID NO: 1357852 - DNA, 25 bp, Homo sapien
tcacggctactcgtaatctcccggt

SEQ ID NO: 1357853 - DNA, 25 bp, Homo sapien
atagaaacccagccacggtggtaag

SEQ ID NO: 1357854 - DNA, 25 bp, Homo sapien
ctaccatagaaacccagccacggtg

SEQ ID NO: 1357855 - DNA, 25 bp, Homo sapien
ccatagaaacccagccacggtggta

SEQ ID NO: 1357856 - DNA, 25 bp, Homo sapien
accatagaaacccagccacggtggt

SEQ ID NO: 1357857 - DNA, 25 bp, Homo sapien
ccagacaccgagttgagctcaaaat

SEQ ID NO: 1357858 - DNA, 25 bp, Homo sapien
tttgtgcagtgctccttgatcttcc

SEQ ID NO: 1357859 - DNA, 25 bp, Homo sapien
tccctgtttgtacccgtttgtgcag

SEQ ID NO: 1357860 - DNA, 25 bp, Homo sapien
gaaatcgatatgtcaatccctccct

SEQ ID NO: 1357861 - DNA, 25 bp, Homo sapien
gtgctgtagggtgcacatgccgcca

SEQ ID NO: 1357862 - DNA, 25 bp, Homo sapien
cctgaagctctcgtgcactgcgttg

SEQ ID NO: 1357863 - DNA, 25 bp, Homo sapien
gaatcctcccgcttgtcgagtttgg

SEQ ID NO: 1357864 - DNA, 25 bp, Homo sapien
gccagaggtttgctgtcgcccaaga

SEQ ID NO: 1357865 - DNA, 25 bp, Homo sapien
gggccgaggcggccgagcccagctg

SEQ ID NO: 1357866 - DNA, 25 bp, Homo sapien
agacgtggaagtcctgggggccgag

SEQ ID NO: 1357867 - DNA, 25 bp, Homo sapien
ctgggggccgaggcggccgagccca

SEQ ID NO: 1357868 - DNA, 25 bp, Homo sapien
tgggggccgaggcggccgagcccag

SEQ ID NO: 1357869 - DNA, 25 bp, Homo sapien
tgctgttggggcaaaggctgcaaac

SEQ ID NO: 1357870 - DNA, 25 bp, Homo sapien
tgatgatgctgggtcgcgtctgcta

SEQ ID NO: 1357871 - DNA, 25 bp, Homo sapien
gatgatgctgggtcgcgtctgctac

SEQ ID NO: 1357872 - DNA, 25 bp, Homo sapien
gtgatgatgctgggtcgcgtctgct

SEQ ID NO: 1357873 - DNA, 25 bp, Homo sapien
tacggtatcaatctccgaacaggga

SEQ ID NO: 1357874 - DNA, 25 bp, Homo sapien
ccgagcgggcggaaatctccattca

SEQ ID NO: 1357875 - DNA, 25 bp, Homo sapien
agaaggcgccgtccctacggtatca

SEQ ID NO: 1357876 - DNA, 25 bp, Homo sapien
tctattccaaaactcgacccgctgg

SEQ ID NO: 1357877 - DNA, 25 bp, Homo sapien
gaaagctatcgatcgtaaaacaaaa

SEQ ID NO: 1357878 - DNA, 25 bp, Homo sapien
ggcaatctgtggatactttcgacac

SEQ ID NO: 1357879 - DNA, 25 bp, Homo sapien
cccgaaccagcgaagaaagctatcg

SEQ ID NO: 1357880 - DNA, 25 bp, Homo sapien
tgagaaaactcggaacttgcgctcc

SEQ ID NO: 1357881 - DNA, 25 bp, Homo sapien
gctgctcttttgagaacccgcacat

SEQ ID NO: 1357882 - DNA, 25 bp, Homo sapien
ggcagccccgtagccgagtttctga

SEQ ID NO: 1357883 - DNA, 25 bp, Homo sapien
gttcgcttgtaatccggctgctggc

SEQ ID NO: 1357884 - DNA, 25 bp, Homo sapien
acgtgccagggagccaataggcgca

SEQ ID NO: 1357885 - DNA, 25 bp, Homo sapien
ggccgaaatctggagtttagttgca

SEQ ID NO: 1357886 - DNA, 25 bp, Homo sapien
tcgagtggcctttaatgtctccaaa

SEQ ID NO: 1357887 - DNA, 25 bp, Homo sapien
ctaggtctggaatgatgttcgagtg

SEQ ID NO: 1357888 - DNA, 25 bp, Homo sapien
tctggagtttagttgcagttctgga

SEQ ID NO: 1357889 - DNA, 25 bp, Homo sapien
gagtcttacactgggacaagttggg

SEQ ID NO: 1357890 - DNA, 25 bp, Homo sapien
caggtttgacaagaacttgtgctgg

SEQ ID NO: 1357891 - DNA, 25 bp, Homo sapien
tgatacaaattagaacctgctacag

SEQ ID NO: 1357892 - DNA, 25 bp, Homo sapien
tggggagtcttacactgggacaagt

SEQ ID NO: 1357893 - DNA, 25 bp, Homo sapien
taaaggaaatgaagtgtgttcagtc

SEQ ID NO: 1357894 - DNA, 25 bp, Homo sapien
aaaggaaatgaagtgtgttcagtca

SEQ ID NO: 1357895 - DNA, 25 bp, Homo sapien
aaggaaatgaagtgtgttcagtcat

SEQ ID NO: 1357896 - DNA, 25 bp, Homo sapien
ctaaaggaaatgaagtgtgttcagt

SEQ ID NO: 1357897 - DNA, 25 bp, Homo sapien
taacatatttgtaacgtgcgccgag

SEQ ID NO: 1357898 - DNA, 25 bp, Homo sapien
tgtaaaagacgcttccgcagagcag

SEQ ID NO: 1357899 - DNA, 25 bp, Homo sapien
agttcggcgctttcaggaccctctt

SEQ ID NO: 1357900 - DNA, 25 bp, Homo sapien
cctcggcgaggtagatgttaagctc

SEQ ID NO: 1357901 - DNA, 25 bp, Homo sapien
taatccgatcgtttagagctgctgt

SEQ ID NO: 1357902 - DNA, 25 bp, Homo sapien
gcgaaaacgattgtactgccgagtt

SEQ ID NO: 1357903 - DNA, 25 bp, Homo sapien
tgcgctaggcattccagcactgggc

SEQ ID NO: 1357904 - DNA, 25 bp, Homo sapien
tctgcctctaatccgggcgaaaacg

SEQ ID NO: 1357905 - DNA, 25 bp, Homo sapien
taccggagatgtgttcgtaactgct

SEQ ID NO: 1357906 - DNA, 25 bp, Homo sapien
gagtatagatcctgtttaccggaga

SEQ ID NO: 1357907 - DNA, 25 bp, Homo sapien
tttgctgcttgggtcagacgtccca

SEQ ID NO: 1357908 - DNA, 25 bp, Homo sapien
tcgggcagaagatgacaggccagcc

SEQ ID NO: 1357909 - DNA, 25 bp, Homo sapien
gacggaagcgcccaatgagattcac

SEQ ID NO: 1357910 - DNA, 25 bp, Homo sapien
ctcggagattgccgcggccctcgaa

SEQ ID NO: 1357911 - DNA, 25 bp, Homo sapien
atgagattcaccctgcagcccgggt

SEQ ID NO: 1357912 - DNA, 25 bp, Homo sapien
gtccagcccaccttcctcggagatt

SEQ ID NO: 1357913 - DNA, 25 bp, Homo sapien
ctaggtcttcatgtcccggcggcca

SEQ ID NO: 1357914 - DNA, 25 bp, Homo sapien
aggtcttcatgtcccggcggccaga

SEQ ID NO: 1357915 - DNA, 25 bp, Homo sapien
ccagaggacgttgcggggaccactg

SEQ ID NO: 1357916 - DNA, 25 bp, Homo sapien
gcggccagaggacgttgcggggacc

SEQ ID NO: 1357917 - DNA, 25 bp, Homo sapien
gagaatctgaggaaccgagtccaag

SEQ ID NO: 1357918 - DNA, 25 bp, Homo sapien
tccaagatagccgacctaggctgtt

SEQ ID NO: 1357919 - DNA, 25 bp, Homo sapien
gagtgaatctgacactgccaggttc

SEQ ID NO: 1357920 - DNA, 25 bp, Homo sapien
tcccgaactagactggcgactctgg

SEQ ID NO: 1357921 - DNA, 25 bp, Homo sapien
ctccaagacagtaggttttcggtca

SEQ ID NO: 1357922 - DNA, 25 bp, Homo sapien
caagacagtaggttttcggtcaagt

SEQ ID NO: 1357923 - DNA, 25 bp, Homo sapien
tgcctccaagacagtaggttttcgg

SEQ ID NO: 1357924 - DNA, 25 bp, Homo sapien
tattttctgaaccgctccctctccc

SEQ ID NO: 1357925 - DNA, 25 bp, Homo sapien
cacgggttatgttcagatagtaggc

SEQ ID NO: 1357926 - DNA, 25 bp, Homo sapien
tggcatcaccgtttccttggactaa

SEQ ID NO: 1357927 - DNA, 25 bp, Homo sapien
taatccgagtatcttcccagagagg

SEQ ID NO: 1357928 - DNA, 25 bp, Homo sapien
gagctgaggagcaccctagtttata

SEQ ID NO: 1357929 - DNA, 25 bp, Homo sapien
gatagaggcgtgtcatctatcttcc

SEQ ID NO: 1357930 - DNA, 25 bp, Homo sapien
tcccagggaacatgatggttcacaa

SEQ ID NO: 1357931 - DNA, 25 bp, Homo sapien
gcgtgtcatctatcttcccagggaa

SEQ ID NO: 1357932 - DNA, 25 bp, Homo sapien
acaaatgaagaggctagccctcctg

SEQ ID NO: 1357933 - DNA, 25 bp, Homo sapien
gcaactgtgaataatgaaagacaac

SEQ ID NO: 1357934 - DNA, 25 bp, Homo sapien
tatggttgctgcacttgaaggaacc

SEQ ID NO: 1357935 - DNA, 25 bp, Homo sapien
tgaagaaacaatggcactaatgagc

SEQ ID NO: 1357936 - DNA, 25 bp, Homo sapien
tcatgcacagcaaattgaagaaaca

SEQ ID NO: 1357937 - DNA, 25 bp, Homo sapien
acagctgaggcacacatcgcccgtg

SEQ ID NO: 1357938 - DNA, 25 bp, Homo sapien
cacgaccaagacttttgcccttttg

SEQ ID NO: 1357939 - DNA, 25 bp, Homo sapien
tgcagtcaggatctgttagtacagt

SEQ ID NO: 1357940 - DNA, 25 bp, Homo sapien
catcgcccgtggcatggactccggg

SEQ ID NO: 1357941 - DNA, 25 bp, Homo sapien
tttgcttattttgattcctcgggcg

SEQ ID NO: 1357942 - DNA, 25 bp, Homo sapien
attttgattcctcgggcgttggagc

SEQ ID NO: 1357943 - DNA, 25 bp, Homo sapien
tcctcgggcgttggagctgtattag

SEQ ID NO: 1357944 - DNA, 25 bp, Homo sapien
gattcctcgggcgttggagctgtat

SEQ ID NO: 1357945 - DNA, 25 bp, Homo sapien
tcgtagataatattgatgagagctt

SEQ ID NO: 1357946 - DNA, 25 bp, Homo sapien
taatattgatgagagctttgccgga

SEQ ID NO: 1357947 - DNA, 25 bp, Homo sapien
tgccggagcctgacatcaaattagt

SEQ ID NO: 1357948 - DNA, 25 bp, Homo sapien
catcaaattagtggccttcgtgtaa

SEQ ID NO: 1357949 - DNA, 25 bp, Homo sapien
tgggaagaaatgtctaacatgctta

SEQ ID NO: 1357950 - DNA, 25 bp, Homo sapien
ctgggaagaaatgtctaacatgctt

SEQ ID NO: 1357951 - DNA, 25 bp, Homo sapien
ttcctctcatcaatacagcagagct

SEQ ID NO: 1357952 - DNA, 25 bp, Homo sapien
ggacaccgaaagccgcctgtacttc

SEQ ID NO: 1357953 - DNA, 25 bp, Homo sapien
ctgacggggacaccgaaagccgcct

SEQ ID NO: 1357954 - DNA, 25 bp, Homo sapien
gacaccgaaagccgcctgtacttcc

SEQ ID NO: 1357955 - DNA, 25 bp, Homo sapien
gacccagaaatcattattggctgca

SEQ ID NO: 1357956 - DNA, 25 bp, Homo sapien
cccagaaatcattattggctgcaga

SEQ ID NO: 1357957 - DNA, 25 bp, Homo sapien
tctgcacggttcctaattggaagca

SEQ ID NO: 1357958 - DNA, 25 bp, Homo sapien
tggctgcagatctgcacggttccta

SEQ ID NO: 1357959 - DNA, 25 bp, Homo sapien
cgacacttccccgaacggcggcagg

SEQ ID NO: 1357960 - DNA, 25 bp, Homo sapien
gacacttccccgaacggcggcagga

SEQ ID NO: 1357961 - DNA, 25 bp, Homo sapien
cctgattcctgggatcctcttcatg

SEQ ID NO: 1357962 - DNA, 25 bp, Homo sapien
ctgattcctgggatcctcttcatgt

SEQ ID NO: 1357963 - DNA, 25 bp, Homo sapien
catacatcagagagaaggcctcctg

SEQ ID NO: 1357964 - DNA, 25 bp, Homo sapien
ggtttctgtttgctgtgacaccaat

SEQ ID NO: 1357965 - DNA, 25 bp, Homo sapien
tgtgacaccaattgtccctttgctc

SEQ ID NO: 1357966 - DNA, 25 bp, Homo sapien
atgaggacttggaacagttgaggtt

SEQ ID NO: 1357967 - DNA, 25 bp, Homo sapien
aagatcaatggttctgagctttggt

SEQ ID NO: 1357968 - DNA, 25 bp, Homo sapien
gaagtaagatcaatggttctgagct

SEQ ID NO: 1357969 - DNA, 25 bp, Homo sapien
ttggaagtaagatcaatggttctga

SEQ ID NO: 1357970 - DNA, 25 bp, Homo sapien
gtaagatcaatggttctgagctttg

SEQ ID NO: 1357971 - DNA, 25 bp, Homo sapien
gctgctgtattgtccaccctttgat

SEQ ID NO: 1357972 - DNA, 25 bp, Homo sapien
gtggctgctgtattgtccacccttt

SEQ ID NO: 1357973 - DNA, 25 bp, Homo sapien
tgacatcagacagccgagggaggag

SEQ ID NO: 1357974 - DNA, 25 bp, Homo sapien
gctgtattgtccaccctttgatttg

SEQ ID NO: 1357975 - DNA, 25 bp, Homo sapien
ctgccctgcatggctgctgccagtg

SEQ ID NO: 1357976 - DNA, 25 bp, Homo sapien
gctgccctgcatggctgctgccagt

SEQ ID NO: 1357977 - DNA, 25 bp, Homo sapien
tggctgccctgcatggctgctgcca

SEQ ID NO: 1357978 - DNA, 25 bp, Homo sapien
tctggctgccctgcatggctgctgc

SEQ ID NO: 1357979 - DNA, 25 bp, Homo sapien
aggaggcaccagttggtcctggcag

SEQ ID NO: 1357980 - DNA, 25 bp, Homo sapien
ttggtcctggcagctgatatttgat

SEQ ID NO: 1357981 - DNA, 25 bp, Homo sapien
ggcaccagttggtcctggcagctga

SEQ ID NO: 1357982 - DNA, 25 bp, Homo sapien
ccagttggtcctggcagctgatatt

SEQ ID NO: 1357983 - DNA, 25 bp, Homo sapien
ttccttctgcaccgaaaaagcctgg

SEQ ID NO: 1357984 - DNA, 25 bp, Homo sapien
cttccttctgcaccgaaaaagcctg

SEQ ID NO: 1357985 - DNA, 25 bp, Homo sapien
cttctgcaccgaaaaagcctggggc

SEQ ID NO: 1357986 - DNA, 25 bp, Homo sapien
tccttctgcaccgaaaaagcctggg

SEQ ID NO: 1357987 - DNA, 25 bp, Homo sapien
cttctttactgctagttctattggg

SEQ ID NO: 1357988 - DNA, 25 bp, Homo sapien
aaagctttacaaccaagcgtagtct

SEQ ID NO: 1357989 - DNA, 25 bp, Homo sapien
ccaagcgtagtctcttctttactgc

SEQ ID NO: 1357990 - DNA, 25 bp, Homo sapien
gctagttctattgggcctccttttc

SEQ ID NO: 1357991 - DNA, 25 bp, Homo sapien
gaaaggcccaagctacccatatgtc

SEQ ID NO: 1357992 - DNA, 25 bp, Homo sapien
cactggagaaatgacgaaaggccca

SEQ ID NO: 1357993 - DNA, 25 bp, Homo sapien
cctggagttcgtcggtgacagctgc

SEQ ID NO: 1357994 - DNA, 25 bp, Homo sapien
tatagattccaaaagaagacgtgct

SEQ ID NO: 1357995 - DNA, 25 bp, Homo sapien
cagccattgtattggttcctttaca

SEQ ID NO: 1357996 - DNA, 25 bp, Homo sapien
tttgattctcttaaaagcccctgtg

SEQ ID NO: 1357997 - DNA, 25 bp, Homo sapien
cataaaggggagtatgttgcttttc

SEQ ID NO: 1357998 - DNA, 25 bp, Homo sapien
ccctgtgtaggtattagctccattt

SEQ ID NO: 1357999 - DNA, 25 bp, Homo sapien
tccaagtaacgaagcagatcctgct

SEQ ID NO: 1358000 - DNA, 25 bp, Homo sapien
tctcagtgtgtttaatggcgggtca

SEQ ID NO: 1358001 - DNA, 25 bp, Homo sapien
tgacctcaggattggaggcagccga

SEQ ID NO: 1358002 - DNA, 25 bp, Homo sapien
cgtctgaactgatattgtgcccaca

SEQ ID NO: 1358003 - DNA, 25 bp, Homo sapien
tgcaggctgtatagggagcatagct

SEQ ID NO: 1358004 - DNA, 25 bp, Homo sapien
gcaggctgtatagggagcatagctg

SEQ ID NO: 1358005 - DNA, 25 bp, Homo sapien
agacagccagcagaaactttctaga

SEQ ID NO: 1358006 - DNA, 25 bp, Homo sapien
catgatgagaattcactgggtggaa

SEQ ID NO: 1358007 - DNA, 25 bp, Homo sapien
ctcagagacagccagcagaaacttt

SEQ ID NO: 1358008 - DNA, 25 bp, Homo sapien
gaattcactgggtggaaataccacc

SEQ ID NO: 1358009 - DNA, 25 bp, Homo sapien
tggaaactggtatggcttcatgtcc

SEQ ID NO: 1358010 - DNA, 25 bp, Homo sapien
ttttggaaactggtatggcttcatg

SEQ ID NO: 1358011 - DNA, 25 bp, Homo sapien
tcttttggaaactggtatggcttca

SEQ ID NO: 1358012 - DNA, 25 bp, Homo sapien
catcttttggaaactggtatggctt

SEQ ID NO: 1358013 - DNA, 25 bp, Homo sapien
ttcttctgtattaggaaggataatt

SEQ ID NO: 1358014 - DNA, 25 bp, Homo sapien
aaatatgcatttgcttttgtagtcg

SEQ ID NO: 1358015 - DNA, 25 bp, Homo sapien
gaagagtgtgagtttgctctgcttc

SEQ ID NO: 1358016 - DNA, 25 bp, Homo sapien
ttgtagtcgaagagtgtgagtttgc

SEQ ID NO: 1358017 - DNA, 25 bp, Homo sapien
tgcttttgtagtcgaagagtgtgag

SEQ ID NO: 1358018 - DNA, 25 bp, Homo sapien
tgcttgttgtgcaaatgggcctcag

SEQ ID NO: 1358019 - DNA, 25 bp, Homo sapien
ttgcttgttgtgcaaatgggcctca

SEQ ID NO: 1358020 - DNA, 25 bp, Homo sapien
ctttttgcttgttgtgcaaatgggc

SEQ ID NO: 1358021 - DNA, 25 bp, Homo sapien
ttttgcttgttgtgcaaatgggcct

SEQ ID NO: 1358022 - DNA, 25 bp, Homo sapien
ttacactgccctagagccactactt

SEQ ID NO: 1358023 - DNA, 25 bp, Homo sapien
cccactggcccatattgagtgagac

SEQ ID NO: 1358024 - DNA, 25 bp, Homo sapien
tacactgccctagagccactacttt

SEQ ID NO: 1358025 - DNA, 25 bp, Homo sapien
aacatgccccactggcccatattga

SEQ ID NO: 1358026 - DNA, 25 bp, Homo sapien
caagagtgagtgttaatgttcctgc

SEQ ID NO: 1358027 - DNA, 25 bp, Homo sapien
tcaagagtgagtgttaatgttcctg

SEQ ID NO: 1358028 - DNA, 25 bp, Homo sapien
ctcaagagtgagtgttaatgttcct

SEQ ID NO: 1358029 - DNA, 25 bp, Homo sapien
caaaattggctgtgcctcaatcagc

SEQ ID NO: 1358030 - DNA, 25 bp, Homo sapien
tgggaccccaggtacatgttaccac

SEQ ID NO: 1358031 - DNA, 25 bp, Homo sapien
aaattatctcttacatggcccttga

SEQ ID NO: 1358032 - DNA, 25 bp, Homo sapien
tacgcacgctgaggccttggatatg

SEQ ID NO: 1358033 - DNA, 25 bp, Homo sapien
tctctgtagcccactggtatttaaa

SEQ ID NO: 1358034 - DNA, 25 bp, Homo sapien
tttctctgtagcccactggtattta

SEQ ID NO: 1358035 - DNA, 25 bp, Homo sapien
ctgtagcccactggtatttaaatac

SEQ ID NO: 1358036 - DNA, 25 bp, Homo sapien
tctgtagcccactggtatttaaata

SEQ ID NO: 1358037 - DNA, 25 bp, Homo sapien
catcctctgttgagctgcaaggccc

SEQ ID NO: 1358038 - DNA, 25 bp, Homo sapien
gaaccggtgctcaatgtttaaagac

SEQ ID NO: 1358039 - DNA, 25 bp, Homo sapien
gggatatgccgacagcccattaaag

SEQ ID NO: 1358040 - DNA, 25 bp, Homo sapien
aaggccctcatttgtattagaagtg

SEQ ID NO: 1358041 - DNA, 25 bp, Homo sapien
tagatcacaaggcagtctacccgga

SEQ ID NO: 1358042 - DNA, 25 bp, Homo sapien
cggaaacatctctggcaaatagcca

SEQ ID NO: 1358043 - DNA, 25 bp, Homo sapien
tagattgcggagcagataataggct

SEQ ID NO: 1358044 - DNA, 25 bp, Homo sapien
agataataggctgaacttagatcac

SEQ ID NO: 1358045 - DNA, 25 bp, Homo sapien
ctggagccacggctaataggtatga

SEQ ID NO: 1358046 - DNA, 25 bp, Homo sapien
aataggtatgatgccattgagagct

SEQ ID NO: 1358047 - DNA, 25 bp, Homo sapien
taagaatgctcttggtaggccagag

SEQ ID NO: 1358048 - DNA, 25 bp, Homo sapien
gggaatgtgggaataagaatgctct

SEQ ID NO: 1358049 - DNA, 25 bp, Homo sapien
ggtaactattacacagagcatgaca

SEQ ID NO: 1358050 - DNA, 25 bp, Homo sapien
ggttagatacctgcaaaagactgaa

SEQ ID NO: 1358051 - DNA, 25 bp, Homo sapien
tccaaactagtgaaatgataacggg

SEQ ID NO: 1358052 - DNA, 25 bp, Homo sapien
aaaaaagtcctctggcgctatgagc

SEQ ID NO: 1358053 - DNA, 25 bp, Homo sapien
gaattacagattatggccaagtcag

SEQ ID NO: 1358054 - DNA, 25 bp, Homo sapien
gatgttgcacagaaacacgtctgcc

SEQ ID NO: 1358055 - DNA, 25 bp, Homo sapien
tacagggtagttgaaaaccagtgcc

SEQ ID NO: 1358056 - DNA, 25 bp, Homo sapien
aaattgtgtccggatgaatggcgca

SEQ ID NO: 1358057 - DNA, 25 bp, Homo sapien
tgcgtacatacccaccgaatacatt

SEQ ID NO: 1358058 - DNA, 25 bp, Homo sapien
tctaggactccaacatacaggccaa

SEQ ID NO: 1358059 - DNA, 25 bp, Homo sapien
gctggtaccaagctcatcaacattg

SEQ ID NO: 1358060 - DNA, 25 bp, Homo sapien
gaatacatttctaactgagcaggtg

SEQ ID NO: 1358061 - DNA, 25 bp, Homo sapien
cattcttaggtaatgctacataagg

SEQ ID NO: 1358062 - DNA, 25 bp, Homo sapien
ggatactaaactcctgatgaagctt

SEQ ID NO: 1358063 - DNA, 25 bp, Homo sapien
aatttactatggtagcattcttagg

SEQ ID NO: 1358064 - DNA, 25 bp, Homo sapien
tcagaaatttactatggtagcattc

SEQ ID NO: 1358065 - DNA, 25 bp, Homo sapien
tgttgcccctacatagacatggcct

SEQ ID NO: 1358066 - DNA, 25 bp, Homo sapien
gaccaaattccttagcacccagtgg

SEQ ID NO: 1358067 - DNA, 25 bp, Homo sapien
tctcattcctgggttctttcacaac

SEQ ID NO: 1358068 - DNA, 25 bp, Homo sapien
agcttaccaaactttcccagaggag

SEQ ID NO: 1358069 - DNA, 25 bp, Homo sapien
tgaaaagttgtctggagagcagtgc

SEQ ID NO: 1358070 - DNA, 25 bp, Homo sapien
cgtaaatcaccgagcagcactgtgc

SEQ ID NO: 1358071 - DNA, 25 bp, Homo sapien
aatttagtgcttgctctttcccaca

SEQ ID NO: 1358072 - DNA, 25 bp, Homo sapien
ccgtgtttttcctcacattagaagc

SEQ ID NO: 1358073 - DNA, 25 bp, Homo sapien
ttctctagacggaaaactacaggcc

SEQ ID NO: 1358074 - DNA, 25 bp, Homo sapien
ccttcaatgtcatactccaccagaa

SEQ ID NO: 1358075 - DNA, 25 bp, Homo sapien
gctgtcacaatctctagtctctgat

SEQ ID NO: 1358076 - DNA, 25 bp, Homo sapien
tagcatggacccaatacatcagctg

SEQ ID NO: 1358077 - DNA, 25 bp, Homo sapien
ttcgcagagattatatcagtaactg

SEQ ID NO: 1358078 - DNA, 25 bp, Homo sapien
tctctgtgcttatgagggttgcttg

SEQ ID NO: 1358079 - DNA, 25 bp, Homo sapien
ttttccttcccctgattagcaaatc

SEQ ID NO: 1358080 - DNA, 25 bp, Homo sapien
cagtaactgctaagaaggtcatgat

SEQ ID NO: 1358081 - DNA, 25 bp, Homo sapien
gggtccggcctacaatctcttcttc

SEQ ID NO: 1358082 - DNA, 25 bp, Homo sapien
tcttctgcccaagcgaaatccaggg

SEQ ID NO: 1358083 - DNA, 25 bp, Homo sapien
gagtgacactggaggcgtctgcacc

SEQ ID NO: 1358084 - DNA, 25 bp, Homo sapien
atctacctcagggttagccagcggc

SEQ ID NO: 1358085 - DNA, 25 bp, Homo sapien
gatttgatatcaactacccgcaagc

SEQ ID NO: 1358086 - DNA, 25 bp, Homo sapien
ggcagtccaggaagaagatactcgt

SEQ ID NO: 1358087 - DNA, 25 bp, Homo sapien
ccaaaagccgattgagcggaagtga

SEQ ID NO: 1358088 - DNA, 25 bp, Homo sapien
gacggcatccagatcgggatcctga

SEQ ID NO: 1358089 - DNA, 25 bp, Homo sapien
tctaaattacccttcctcactggtg

SEQ ID NO: 1358090 - DNA, 25 bp, Homo sapien
cagggtgcccactagaaatctaaat

SEQ ID NO: 1358091 - DNA, 25 bp, Homo sapien
tgattgttatgaaatgggccggcag

SEQ ID NO: 1358092 - DNA, 25 bp, Homo sapien
cctcactggtgcctggagtagtcct

SEQ ID NO: 1358093 - DNA, 25 bp, Homo sapien
gcacggagtatgaaacagtcccaac

SEQ ID NO: 1358094 - DNA, 25 bp, Homo sapien
tccagtgtggacagcaacattcctg

SEQ ID NO: 1358095 - DNA, 25 bp, Homo sapien
cctggcagagacttgtgggttagac

SEQ ID NO: 1358096 - DNA, 25 bp, Homo sapien
tggcatagcacaagagcacggagta

SEQ ID NO: 1358097 - DNA, 25 bp, Homo sapien
tgaaggtggcacatttatgcttcca

SEQ ID NO: 1358098 - DNA, 25 bp, Homo sapien
gattaccagtgaaaaccctctgaag

SEQ ID NO: 1358099 - DNA, 25 bp, Homo sapien
gatgagtgcgccagatttacacagt

SEQ ID NO: 1358100 - DNA, 25 bp, Homo sapien
tttgaaattgctctactggtagcag

SEQ ID NO: 1358101 - DNA, 25 bp, Homo sapien
cacagggacgtttccctgttccagt

SEQ ID NO: 1358102 - DNA, 25 bp, Homo sapien
tgaccactgggcaccgagatccgtg

SEQ ID NO: 1358103 - DNA, 25 bp, Homo sapien
ccctgttccagttcattgatggagt

SEQ ID NO: 1358104 - DNA, 25 bp, Homo sapien
caccgagatccgtgcttgaaaggac

SEQ ID NO: 1358105 - DNA, 25 bp, Homo sapien
agaaaagcaagatttgctaaatgct

SEQ ID NO: 1358106 - DNA, 25 bp, Homo sapien
aaagcaagatttgctaaatgctcta

SEQ ID NO: 1358107 - DNA, 25 bp, Homo sapien
ctgatacatgcagaaaagcaagatt

SEQ ID NO: 1358108 - DNA, 25 bp, Homo sapien
agcaagatttgctaaatgctctaat

SEQ ID NO: 1358109 - DNA, 25 bp, Homo sapien
attatgtgtatgctcatagattgca

SEQ ID NO: 1358110 - DNA, 25 bp, Homo sapien
tctctattatgtgtatgctcataga

SEQ ID NO: 1358111 - DNA, 25 bp, Homo sapien
ctctattatgtgtatgctcatagat

SEQ ID NO: 1358112 - DNA, 25 bp, Homo sapien
ctattatgtgtatgctcatagattg

SEQ ID NO: 1358113 - DNA, 25 bp, Homo sapien
agatctagaattgggtctgtccacc

SEQ ID NO: 1358114 - DNA, 25 bp, Homo sapien
aagcagtccggtgtctttccccaga

SEQ ID NO: 1358115 - DNA, 25 bp, Homo sapien
ggacaatacccaagttcatcaaagc

SEQ ID NO: 1358116 - DNA, 25 bp, Homo sapien
tgtaatcttggtatccagggcccag

SEQ ID NO: 1358117 - DNA, 25 bp, Homo sapien
gcgcggggacttcgctgggaaccac

SEQ ID NO: 1358118 - DNA, 25 bp, Homo sapien
gacagcgggcggagaatactcacgc

SEQ ID NO: 1358119 - DNA, 25 bp, Homo sapien
gcggagaatactcacgctgggccca

SEQ ID NO: 1358120 - DNA, 25 bp, Homo sapien
ctcaaataaacgggcgctgccgcct

SEQ ID NO: 1358121 - DNA, 25 bp, Homo sapien
ctgcagccgccgcgggagacgctgc

SEQ ID NO: 1358122 - DNA, 25 bp, Homo sapien
cgccgcgggagacgctgccccgccc

SEQ ID NO: 1358123 - DNA, 25 bp, Homo sapien
cagccgccgcgggagacgctgcccc

SEQ ID NO: 1358124 - DNA, 25 bp, Homo sapien
ccgccgcgggagacgctgccccgcc

SEQ ID NO: 1358125 - DNA, 25 bp, Homo sapien
gaaacccttccaccaaaatgagctg

SEQ ID NO: 1358126 - DNA, 25 bp, Homo sapien
tagcagcccgaaacgcactgtgaag

SEQ ID NO: 1358127 - DNA, 25 bp, Homo sapien
caacaaggtgttgagcgatcagtca

SEQ ID NO: 1358128 - DNA, 25 bp, Homo sapien
ctgtgaactacggagagaccccaga

SEQ ID NO: 1358129 - DNA, 25 bp, Homo sapien
tattgtgcaacatgaccctgcattg

SEQ ID NO: 1358130 - DNA, 25 bp, Homo sapien
cacatttggtggaagaatgaaggag

SEQ ID NO: 1358131 - DNA, 25 bp, Homo sapien
tgtcaacatattaacctgaattccc

SEQ ID NO: 1358132 - DNA, 25 bp, Homo sapien
aaccaaaccagtgaagcgtattgtg

SEQ ID NO: 1358133 - DNA, 25 bp, Homo sapien
agggagtatgccctgtgtcttgaaa

SEQ ID NO: 1358134 - DNA, 25 bp, Homo sapien
ctcccagggagtatgccctgtgtct

SEQ ID NO: 1358135 - DNA, 25 bp, Homo sapien
ggagtatgccctgtgtcttgaaaat

SEQ ID NO: 1358136 - DNA, 25 bp, Homo sapien
cccagggagtatgccctgtgtcttg

SEQ ID NO: 1358137 - DNA, 25 bp, Homo sapien
gaagattaataactctggacccagt

SEQ ID NO: 1358138 - DNA, 25 bp, Homo sapien
tcagcaacataatcgaggacccagg

SEQ ID NO: 1358139 - DNA, 25 bp, Homo sapien
gaataactgtttcgatgacactccc

SEQ ID NO: 1358140 - DNA, 25 bp, Homo sapien
aagtgaataatccagaactgcccag

SEQ ID NO: 1358141 - DNA, 25 bp, Homo sapien
aagacactgatactcgccagcatgt

SEQ ID NO: 1358142 - DNA, 25 bp, Homo sapien
caaggttatgctgtgggtgagactc

SEQ ID NO: 1358143 - DNA, 25 bp, Homo sapien
tccacagcttgaggaggttccatac

SEQ ID NO: 1358144 - DNA, 25 bp, Homo sapien
ggtgctatcgcaggtcaaggttatg

SEQ ID NO: 1358145 - DNA, 25 bp, Homo sapien
cccggacggggtggctggcctcgcg

SEQ ID NO: 1358146 - DNA, 25 bp, Homo sapien
tattgattgattgatttattgatca

SEQ ID NO: 1358147 - DNA, 25 bp, Homo sapien
cggggtggctggcctcgcgggggct

SEQ ID NO: 1358148 - DNA, 25 bp, Homo sapien
tgattgattgatttattgatcattc

SEQ ID NO: 1358149 - DNA, 25 bp, Homo sapien
tggttctacaggagaatctgaatgt

SEQ ID NO: 1358150 - DNA, 25 bp, Homo sapien
gttctacaggagaatctgaatgttg

SEQ ID NO: 1358151 - DNA, 25 bp, Homo sapien
atggttctacaggagaatctgaatg

SEQ ID NO: 1358152 - DNA, 25 bp, Homo sapien
ggttctacaggagaatctgaatgtt

SEQ ID NO: 1358153 - DNA, 25 bp, Homo sapien
tgttgcaccagtcgagcgtagccgt

SEQ ID NO: 1358154 - DNA, 25 bp, Homo sapien
tgtacacattatctcggacccaagc

SEQ ID NO: 1358155 - DNA, 25 bp, Homo sapien
tgcagtgcagtagtcctctcatcag

SEQ ID NO: 1358156 - DNA, 25 bp, Homo sapien
cagaggtagcatccaactgcaggtg

SEQ ID NO: 1358157 - DNA, 25 bp, Homo sapien
tctctatagaggaggatgtcgcatt

SEQ ID NO: 1358158 - DNA, 25 bp, Homo sapien
cagtgaatgtttacagactacccag

SEQ ID NO: 1358159 - DNA, 25 bp, Homo sapien
gccagatggtggatgcagaagtctt

SEQ ID NO: 1358160 - DNA, 25 bp, Homo sapien
aaatttggtgcatcccactgggtta

SEQ ID NO: 1358161 - DNA, 25 bp, Homo sapien
gatacttctccgcagagttcacaga

SEQ ID NO: 1358162 - DNA, 25 bp, Homo sapien
ttcggtaactactggatgcatgcta

SEQ ID NO: 1358163 - DNA, 25 bp, Homo sapien
cttaagacaagaaactcagtgaggc

SEQ ID NO: 1358164 - DNA, 25 bp, Homo sapien
gattactgagccaaaaatccgaaag

SEQ ID NO: 1358165 - DNA, 25 bp, Homo sapien
taagtgctatggagctcccagaaaa

SEQ ID NO: 1358166 - DNA, 25 bp, Homo sapien
gtgacatatgctactttcaaagaag

SEQ ID NO: 1358167 - DNA, 25 bp, Homo sapien
tgacagttgatatggtgacatatgc

SEQ ID NO: 1358168 - DNA, 25 bp, Homo sapien
gggtcacagagcaattaagtgctat

SEQ ID NO: 1358169 - DNA, 25 bp, Homo sapien
ggcttctgtcacattcaagggttaa

SEQ ID NO: 1358170 - DNA, 25 bp, Homo sapien
tattacagttgtcgtttgcctaaac

SEQ ID NO: 1358171 - DNA, 25 bp, Homo sapien
tctaatctaagaaccatgcagtatg

SEQ ID NO: 1358172 - DNA, 25 bp, Homo sapien
tgtggctggccctcaaaataagaaa

SEQ ID NO: 1358173 - DNA, 25 bp, Homo sapien
tggtgcttgcatacaaaaacttgtt

SEQ ID NO: 1358174 - DNA, 25 bp, Homo sapien
tacatacgaagcaaagaatcaatgc

SEQ ID NO: 1358175 - DNA, 25 bp, Homo sapien
gaatcaatgcatatccttggttcaa

SEQ ID NO: 1358176 - DNA, 25 bp, Homo sapien
gtaaggagatataccataggaaagc

SEQ ID NO: 1358177 - DNA, 25 bp, Homo sapien
tcctcacagcacatttatttcagta

SEQ ID NO: 1358178 - DNA, 25 bp, Homo sapien
aattctgttatgtcggttcttagca

SEQ ID NO: 1358179 - DNA, 25 bp, Homo sapien
cacgattttcgtacatataatcaca

SEQ ID NO: 1358180 - DNA, 25 bp, Homo sapien
tagcatgagcatagtgttacacgat

SEQ ID NO: 1358181 - DNA, 25 bp, Homo sapien
taaagtaagaggcaaacctgtcctg

SEQ ID NO: 1358182 - DNA, 25 bp, Homo sapien
ggatgcaccactttattgtctgaga

SEQ ID NO: 1358183 - DNA, 25 bp, Homo sapien
tgccctatttgagtgaacagtctca

SEQ ID NO: 1358184 - DNA, 25 bp, Homo sapien
tcagcggttcttggtattatacaaa

SEQ ID NO: 1358185 - DNA, 25 bp, Homo sapien
cagtttattaatggctgcttacatg

SEQ ID NO: 1358186 - DNA, 25 bp, Homo sapien
ttcctgctttagtatttataaacag

SEQ ID NO: 1358187 - DNA, 25 bp, Homo sapien
tacatgtactgctcttttactgagt

SEQ ID NO: 1358188 - DNA, 25 bp, Homo sapien
tttaagtattcaatttgctctgatg

SEQ ID NO: 1358189 - DNA, 25 bp, Homo sapien
ccagtccgtggaagattagcgttta

SEQ ID NO: 1358190 - DNA, 25 bp, Homo sapien
taagtagtgacgtgacttccaccat

SEQ ID NO: 1358191 - DNA, 25 bp, Homo sapien
gctgcttcggccattagtagagaaa

SEQ ID NO: 1358192 - DNA, 25 bp, Homo sapien
caagggtcctcgaaagactaggcca

SEQ ID NO: 1358193 - DNA, 25 bp, Homo sapien
atgtaaacctcgtcagcaccatgag

SEQ ID NO: 1358194 - DNA, 25 bp, Homo sapien
gcaccatgaggtaatgttagcattt

SEQ ID NO: 1358195 - DNA, 25 bp, Homo sapien
tcttgcttccagatcttgaccttga

SEQ ID NO: 1358196 - DNA, 25 bp, Homo sapien
gagaatgtaaacctcgtcagcacca

SEQ ID NO: 1358197 - DNA, 25 bp, Homo sapien
tttttctagagaggtcagacagacc

SEQ ID NO: 1358198 - DNA, 25 bp, Homo sapien
cagttagaaaaagtccgcattcatt

SEQ ID NO: 1358199 - DNA, 25 bp, Homo sapien
tgctgattctgtaatagcagtaata

SEQ ID NO: 1358200 - DNA, 25 bp, Homo sapien
ctgtactgtacagcggtattatctg

SEQ ID NO: 1358201 - DNA, 25 bp, Homo sapien
gaactggctgttcaatgactctgtg

SEQ ID NO: 1358202 - DNA, 25 bp, Homo sapien
caaagggatgatagcaatccagggt

SEQ ID NO: 1358203 - DNA, 25 bp, Homo sapien
ccagggtgctgctggtcaattagca

SEQ ID NO: 1358204 - DNA, 25 bp, Homo sapien
taggtctttgaatacagctacacca

SEQ ID NO: 1358205 - DNA, 25 bp, Homo sapien
gacacttgaagtccaaatttcatcc

SEQ ID NO: 1358206 - DNA, 25 bp, Homo sapien
ttttttaccaagcattcaaagcacc

SEQ ID NO: 1358207 - DNA, 25 bp, Homo sapien
aaccaaatcttctgacacttgaact

SEQ ID NO: 1358208 - DNA, 25 bp, Homo sapien
aacccttctgtaatggcatacttga

SEQ ID NO: 1358209 - DNA, 25 bp, Homo sapien
ctcaaaaggaggcttagactaaaat

SEQ ID NO: 1358210 - DNA, 25 bp, Homo sapien
cagaagcaagtttgctcatttggag

SEQ ID NO: 1358211 - DNA, 25 bp, Homo sapien
agcccagtctggaagaattgtcaag

SEQ ID NO: 1358212 - DNA, 25 bp, Homo sapien
caaggagtttgctttaagcagaagc

SEQ ID NO: 1358213 - DNA, 25 bp, Homo sapien
actagtggtattgacctcatcagaa

SEQ ID NO: 1358214 - DNA, 25 bp, Homo sapien
gctttacttccaaaacgtatcaaga

SEQ ID NO: 1358215 - DNA, 25 bp, Homo sapien
taagtcatttgttgtagaatagcaa

SEQ ID NO: 1358216 - DNA, 25 bp, Homo sapien
aaacgttaatatattgcactagtgg

SEQ ID NO: 1358217 - DNA, 25 bp, Homo sapien
cagacaaattgatgatagccttcag

SEQ ID NO: 1358218 - DNA, 25 bp, Homo sapien
caaataagtgcatgtttctgggatg

SEQ ID NO: 1358219 - DNA, 25 bp, Homo sapien
ttctcaaagatgtcggtgaccccag

SEQ ID NO: 1358220 - DNA, 25 bp, Homo sapien
gatacgcaaagtctatacacacaaa

SEQ ID NO: 1358221 - DNA, 25 bp, Homo sapien
cactcttctttcgtgcataagcgcg

SEQ ID NO: 1358222 - DNA, 25 bp, Homo sapien
cataagcgcgtaagtggttggacag

SEQ ID NO: 1358223 - DNA, 25 bp, Homo sapien
taaacgtcgtattgcaatgcacaca

SEQ ID NO: 1358224 - DNA, 25 bp, Homo sapien
ggctaacagcacttgtaaacgtcgt

SEQ ID NO: 1358225 - DNA, 25 bp, Homo sapien
tgtgtatagcatagtcataaacgtc

SEQ ID NO: 1358226 - DNA, 25 bp, Homo sapien
aactgtgtatagcatagtcataaac

SEQ ID NO: 1358227 - DNA, 25 bp, Homo sapien
ttaaactgtgtatagcatagtcata

SEQ ID NO: 1358228 - DNA, 25 bp, Homo sapien
tatagcatagtcataaacgtcctct

SEQ ID NO: 1358229 - DNA, 25 bp, Homo sapien
taatacgacgactgttcaatgcctt

SEQ ID NO: 1358230 - DNA, 25 bp, Homo sapien
ccattacggtatgcttcaagaggta

SEQ ID NO: 1358231 - DNA, 25 bp, Homo sapien
gcttcagtctttaggccattacggt

SEQ ID NO: 1358232 - DNA, 25 bp, Homo sapien
caaatggtctgggaataatacgacg

SEQ ID NO: 1358233 - DNA, 25 bp, Homo sapien
tgagcatcccatttcgtctttccaa

SEQ ID NO: 1358234 - DNA, 25 bp, Homo sapien
aacacagattggagatttgtgagca

SEQ ID NO: 1358235 - DNA, 25 bp, Homo sapien
caagtcttttcaagtggcctctaac

SEQ ID NO: 1358236 - DNA, 25 bp, Homo sapien
gacaagtgtgttcagaagtggtttc

SEQ ID NO: 1358237 - DNA, 25 bp, Homo sapien
gatgatgaatgcaagtactccgtgt

SEQ ID NO: 1358238 - DNA, 25 bp, Homo sapien
tctggtgatacaacatgacgggctt

SEQ ID NO: 1358239 - DNA, 25 bp, Homo sapien
tatggccttgggacattaagatggc

SEQ ID NO: 1358240 - DNA, 25 bp, Homo sapien
gctgggcagtaaggacacgatttct

SEQ ID NO: 1358241 - DNA, 25 bp, Homo sapien
caagattctgttgttggctgatcca

SEQ ID NO: 1358242 - DNA, 25 bp, Homo sapien
tagaaacagtaggagcaccagcatg

SEQ ID NO: 1358243 - DNA, 25 bp, Homo sapien
tataaatagactagactggcctcca

SEQ ID NO: 1358244 - DNA, 25 bp, Homo sapien
gctagtatgaacaggtgaactctct

SEQ ID NO: 1358245 - DNA, 25 bp, Homo sapien
ggcaagcccatttaacacatttagt

SEQ ID NO: 1358246 - DNA, 25 bp, Homo sapien
attgttggcaagcccatttaacaca

SEQ ID NO: 1358247 - DNA, 25 bp, Homo sapien
tgttggcaagcccatttaacacatt

SEQ ID NO: 1358248 - DNA, 25 bp, Homo sapien
tggcaagcccatttaacacatttag

SEQ ID NO: 1358249 - DNA, 25 bp, Homo sapien
tctagaacctagtacatcacttgcc

SEQ ID NO: 1358250 - DNA, 25 bp, Homo sapien
gatctggtggtctagtgcaatggcc

SEQ ID NO: 1358251 - DNA, 25 bp, Homo sapien
ggctgggaatgtaatctagtcacta

SEQ ID NO: 1358252 - DNA, 25 bp, Homo sapien
tcacaccatgactgtaatgcctacc

SEQ ID NO: 1358253 - DNA, 25 bp, Homo sapien
tggtgctaatgcatcacccagcagg

SEQ ID NO: 1358254 - DNA, 25 bp, Homo sapien
taatgatatcactccaaaatggtgc

SEQ ID NO: 1358255 - DNA, 25 bp, Homo sapien
tcctttaagggtaccaatttcatgc

SEQ ID NO: 1358256 - DNA, 25 bp, Homo sapien
gcaggagtctctacatcacatacac

SEQ ID NO: 1358257 - DNA, 25 bp, Homo sapien
aattcagtgttaatgagtggcttca

SEQ ID NO: 1358258 - DNA, 25 bp, Homo sapien
aagtggtaaattcagtgttaatgag

SEQ ID NO: 1358259 - DNA, 25 bp, Homo sapien
gttaatgagtggcttcactgttacc

SEQ ID NO: 1358260 - DNA, 25 bp, Homo sapien
agtggcttcactgttaccacctcag

SEQ ID NO: 1358261 - DNA, 25 bp, Homo sapien
agtatgtcaatcccatactccaggg

SEQ ID NO: 1358262 - DNA, 25 bp, Homo sapien
aagtatgtcaatcccatactccagg

SEQ ID NO: 1358263 - DNA, 25 bp, Homo sapien
actccaggggcagtgtgtcaacttt

SEQ ID NO: 1358264 - DNA, 25 bp, Homo sapien
ggcagtgtgtcaactttgccctcca

SEQ ID NO: 1358265 - DNA, 25 bp, Homo sapien
atagcttaaagtattctattgtagc

SEQ ID NO: 1358266 - DNA, 25 bp, Homo sapien
ctgttgtcaattaattacacagaag

SEQ ID NO: 1358267 - DNA, 25 bp, Homo sapien
tatgtttgtactatactgttgtcaa

SEQ ID NO: 1358268 - DNA, 25 bp, Homo sapien
gtcaattaattacacagaagctatt

SEQ ID NO: 1358269 - DNA, 25 bp, Homo sapien
gtgatagtatttagttttagagtta

SEQ ID NO: 1358270 - DNA, 25 bp, Homo sapien
gaaggcaaggaactattatataatg

SEQ ID NO: 1358271 - DNA, 25 bp, Homo sapien
ataagttgctttacaaattaatgaa

SEQ ID NO: 1358272 - DNA, 25 bp, Homo sapien
caataaaagacctggaacgtttcat

SEQ ID NO: 1358273 - DNA, 25 bp, Homo sapien
aaaacactatcacttacattccact

SEQ ID NO: 1358274 - DNA, 25 bp, Homo sapien
taccagggtatataagtgattatct

SEQ ID NO: 1358275 - DNA, 25 bp, Homo sapien
tgagaacctcaaacaaaatactagc

SEQ ID NO: 1358276 - DNA, 25 bp, Homo sapien
tatacactgtagtatggctttatta

SEQ ID NO: 1358277 - DNA, 25 bp, Homo sapien
acgccagggcaagaaaagcccactt

SEQ ID NO: 1358278 - DNA, 25 bp, Homo sapien
tacgtaacattgtactagaattcct

SEQ ID NO: 1358279 - DNA, 25 bp, Homo sapien
tcctagccagagcacttaggggagg

SEQ ID NO: 1358280 - DNA, 25 bp, Homo sapien
gatccatacacctcggatcccaaag

SEQ ID NO: 1358281 - DNA, 25 bp, Homo sapien
caggagaaacggaggaattgttgtt

SEQ ID NO: 1358282 - DNA, 25 bp, Homo sapien
tggtgatttccaggacctcaggagc

SEQ ID NO: 1358283 - DNA, 25 bp, Homo sapien
gattctgcttatgagacacttagtc

SEQ ID NO: 1358284 - DNA, 25 bp, Homo sapien
aatgctgtaacatgaatgaaccgtg

SEQ ID NO: 1358285 - DNA, 25 bp, Homo sapien
taacaaatatgtctgggtttgctcc

SEQ ID NO: 1358286 - DNA, 25 bp, Homo sapien
ataacaaatatgtctgggtttgctc

SEQ ID NO: 1358287 - DNA, 25 bp, Homo sapien
ggatgaggtggagatcaataaataa

SEQ ID NO: 1358288 - DNA, 25 bp, Homo sapien
tgaggtggagatcaataaataacaa

SEQ ID NO: 1358289 - DNA, 25 bp, Homo sapien
tggaatgatatttgccgcttagcct

SEQ ID NO: 1358290 - DNA, 25 bp, Homo sapien
tactgggaattctaatgactaatgc

SEQ ID NO: 1358291 - DNA, 25 bp, Homo sapien
tataactagttgcatggtactggga

SEQ ID NO: 1358292 - DNA, 25 bp, Homo sapien
tccctaacatatagcacagtgccta

SEQ ID NO: 1358293 - DNA, 25 bp, Homo sapien
caaatcaactggaccaagtgtgtca

SEQ ID NO: 1358294 - DNA, 25 bp, Homo sapien
catatactttatcaacaaaggagag

SEQ ID NO: 1358295 - DNA, 25 bp, Homo sapien
gtggctgaaccaaacattaacttga

SEQ ID NO: 1358296 - DNA, 25 bp, Homo sapien
ggtcagagttcaataagagtggctg

SEQ ID NO: 1358297 - DNA, 25 bp, Homo sapien
gctttgctcgtactctccaaaatct

SEQ ID NO: 1358298 - DNA, 25 bp, Homo sapien
ctttgctcgtactctccaaaatctg

SEQ ID NO: 1358299 - DNA, 25 bp, Homo sapien
caagtgggctttactcctggaatgc

SEQ ID NO: 1358300 - DNA, 25 bp, Homo sapien
aaagccatacatgaaaagcccacag

SEQ ID NO: 1358301 - DNA, 25 bp, Homo sapien
accagatggctttgctagagaattc

SEQ ID NO: 1358302 - DNA, 25 bp, Homo sapien
gtacacctagcaaaacgaggacatg

SEQ ID NO: 1358303 - DNA, 25 bp, Homo sapien
actacaggatccagtcatggagtgg

SEQ ID NO: 1358304 - DNA, 25 bp, Homo sapien
cacctactacaggatccagtcatgg

SEQ ID NO: 1358305 - DNA, 25 bp, Homo sapien
catacacctactacaggatccagtc

SEQ ID NO: 1358306 - DNA, 25 bp, Homo sapien
tggtggagcaggagaataagagtga

SEQ ID NO: 1358307 - DNA, 25 bp, Homo sapien
aaagcagatcattcactgtctgggc

SEQ ID NO: 1358308 - DNA, 25 bp, Homo sapien
cataggtatatacagacgtcaaatc

SEQ ID NO: 1358309 - DNA, 25 bp, Homo sapien
tgaatcacctttgaacaactgctaa

SEQ ID NO: 1358310 - DNA, 25 bp, Homo sapien
aaaattccagaatatgcatagcacc

SEQ ID NO: 1358311 - DNA, 25 bp, Homo sapien
ctcatcaagaggtggtccgccaggt

SEQ ID NO: 1358312 - DNA, 25 bp, Homo sapien
tgccagttttgagcttaggcttcaa

SEQ ID NO: 1358313 - DNA, 25 bp, Homo sapien
tctcttaaatctgggattgacctta

SEQ ID NO: 1358314 - DNA, 25 bp, Homo sapien
aatagcccaattctgtttcacctcg

SEQ ID NO: 1358315 - DNA, 25 bp, Homo sapien
tttcatatgttgaacgtgcatgcaa

SEQ ID NO: 1358316 - DNA, 25 bp, Homo sapien
tgcaagtgtgatcctctagttttct

SEQ ID NO: 1358317 - DNA, 25 bp, Homo sapien
ttgaacgtgcatgcaagtgtgatcc

SEQ ID NO: 1358318 - DNA, 25 bp, Homo sapien
cgtgcatgcaagtgtgatcctctag

SEQ ID NO: 1358319 - DNA, 25 bp, Homo sapien
tttagctctgcactacaaactgagg

SEQ ID NO: 1358320 - DNA, 25 bp, Homo sapien
gaaaaaggcatacctcaattagtgc

SEQ ID NO: 1358321 - DNA, 25 bp, Homo sapien
taatgtctcttaagccatggctaaa

SEQ ID NO: 1358322 - DNA, 25 bp, Homo sapien
tcaaaattcagcatacaagtacaag

SEQ ID NO: 1358323 - DNA, 25 bp, Homo sapien
cgaatagctgggattgcaggcaccc

SEQ ID NO: 1358324 - DNA, 25 bp, Homo sapien
acctcccaggttcaagtgattctcc

SEQ ID NO: 1358325 - DNA, 25 bp, Homo sapien
cccgaatagctgggattgcaggcac

SEQ ID NO: 1358326 - DNA, 25 bp, Homo sapien
tcagctcaccacaacttctacctcc

SEQ ID NO: 1358327 - DNA, 25 bp, Homo sapien
tatcttagatcatgagctctttgga

SEQ ID NO: 1358328 - DNA, 25 bp, Homo sapien
tggagtagaagccatatctgtgctc

SEQ ID NO: 1358329 - DNA, 25 bp, Homo sapien
gtttcatagttaagtactcttcaag

SEQ ID NO: 1358330 - DNA, 25 bp, Homo sapien
gtatatgcaaccctacccctagtgg

SEQ ID NO: 1358331 - DNA, 25 bp, Homo sapien
tgggggaaatacaaccagacaaaca

SEQ ID NO: 1358332 - DNA, 25 bp, Homo sapien
atacaaccagacaaacaagactttt

SEQ ID NO: 1358333 - DNA, 25 bp, Homo sapien
gacaaacaagacttttctgaataca

SEQ ID NO: 1358334 - DNA, 25 bp, Homo sapien
caaccagacaaacaagacttttctg

SEQ ID NO: 1358335 - DNA, 25 bp, Homo sapien
taaactcgagcattcacaatccaaa

SEQ ID NO: 1358336 - DNA, 25 bp, Homo sapien
aaagctgttatgtgtaaagtctcaa

SEQ ID NO: 1358337 - DNA, 25 bp, Homo sapien
aagtcttttcatacccatttctgcg

SEQ ID NO: 1358338 - DNA, 25 bp, Homo sapien
tcaaaaccagatatactagaatgtg

SEQ ID NO: 1358339 - DNA, 25 bp, Homo sapien
cacaaggcacctttaatcagtgaag

SEQ ID NO: 1358340 - DNA, 25 bp, Homo sapien
tcaattctcactacccttgggaggg

SEQ ID NO: 1358341 - DNA, 25 bp, Homo sapien
gaaattaataggagggagcacaagg

SEQ ID NO: 1358342 - DNA, 25 bp, Homo sapien
gctctaatcacggaaaatgcttgca

SEQ ID NO: 1358343 - DNA, 25 bp, Homo sapien
tagacaatgagagcaatacgacacc

SEQ ID NO: 1358344 - DNA, 25 bp, Homo sapien
cttagtcactcagtaaagggcagca

SEQ ID NO: 1358345 - DNA, 25 bp, Homo sapien
taagtcaaatgtcccaccagcaagg

SEQ ID NO: 1358346 - DNA, 25 bp, Homo sapien
tgggcagtgctgacctatacaatct

SEQ ID NO: 1358347 - DNA, 25 bp, Homo sapien
aacaaccttgtctttatcggcatgg

SEQ ID NO: 1358348 - DNA, 25 bp, Homo sapien
tctcacttcctctataacaaccttg

SEQ ID NO: 1358349 - DNA, 25 bp, Homo sapien
tataacaaccttgtctttatcggca

SEQ ID NO: 1358350 - DNA, 25 bp, Homo sapien
cttcctctataacaaccttgtcttt

SEQ ID NO: 1358351 - DNA, 25 bp, Homo sapien
gcattgtatgccagaaagctaagga

SEQ ID NO: 1358352 - DNA, 25 bp, Homo sapien
caggtaacacttactttactcagca

SEQ ID NO: 1358353 - DNA, 25 bp, Homo sapien
tatgtaatatcaaccctaaacctct

SEQ ID NO: 1358354 - DNA, 25 bp, Homo sapien
tacaactgcaaatcactcacaggtg

SEQ ID NO: 1358355 - DNA, 25 bp, Homo sapien
gaaaggatagtaactccatggttca

SEQ ID NO: 1358356 - DNA, 25 bp, Homo sapien
ttagagtcttactaccctctgggtc

SEQ ID NO: 1358357 - DNA, 25 bp, Homo sapien
tgcagcaactaaggccttagagaca

SEQ ID NO: 1358358 - DNA, 25 bp, Homo sapien
ccatggttcaacttggcagatctgc

SEQ ID NO: 1358359 - DNA, 25 bp, Homo sapien
tttgaacacagagatctacacagtg

SEQ ID NO: 1358360 - DNA, 25 bp, Homo sapien
taatgtgtttaaatatccctccaac

SEQ ID NO: 1358361 - DNA, 25 bp, Homo sapien
acttcatgagttaataccaacacaa

SEQ ID NO: 1358362 - DNA, 25 bp, Homo sapien
caaccaaggaattctgttaattgcc

SEQ ID NO: 1358363 - DNA, 25 bp, Homo sapien
taccatccagatgcaacaagcgtgg

SEQ ID NO: 1358364 - DNA, 25 bp, Homo sapien
tagtcggcggtgttgtgatacttct

SEQ ID NO: 1358365 - DNA, 25 bp, Homo sapien
tcttagcaagcctaccaaaatgcaa

SEQ ID NO: 1358366 - DNA, 25 bp, Homo sapien
attaggactggacaggatagtcggc

SEQ ID NO: 1358367 - DNA, 25 bp, Homo sapien
tgttgctaaaccatagatggatccc

SEQ ID NO: 1358368 - DNA, 25 bp, Homo sapien
gtctgggacaactcatcttcaggtt

SEQ ID NO: 1358369 - DNA, 25 bp, Homo sapien
tgtagaagtctcgtaacaagtaacc

SEQ ID NO: 1358370 - DNA, 25 bp, Homo sapien
ccaacaagagttgtctgtagaagtc

SEQ ID NO: 1358371 - DNA, 25 bp, Homo sapien
caaccgagcagcctcaacgagaggg

SEQ ID NO: 1358372 - DNA, 25 bp, Homo sapien
gggtgtagacagttaatgccagagc

SEQ ID NO: 1358373 - DNA, 25 bp, Homo sapien
tatgcggtcctgtcccaagtaaggg

SEQ ID NO: 1358374 - DNA, 25 bp, Homo sapien
tagccgcataagatcttgcaggacg

SEQ ID NO: 1358375 - DNA, 25 bp, Homo sapien
ccgtggcccccagcgaccgccgcgg

SEQ ID NO: 1358376 - DNA, 25 bp, Homo sapien
tccgtggcccccagcgaccgccgcg

SEQ ID NO: 1358377 - DNA, 25 bp, Homo sapien
ccgggctccttgtgtagcaccaact

SEQ ID NO: 1358378 - DNA, 25 bp, Homo sapien
ggcccgggctccttgtgtagcacca

SEQ ID NO: 1358379 - DNA, 25 bp, Homo sapien
gcgaatctgaccaaataacccctga

SEQ ID NO: 1358380 - DNA, 25 bp, Homo sapien
ctgggacccagcctagggcgtagct

SEQ ID NO: 1358381 - DNA, 25 bp, Homo sapien
tgggacccagcctagggcgtagctc

SEQ ID NO: 1358382 - DNA, 25 bp, Homo sapien
tcgggtcccagcgaatctgaccaaa

SEQ ID NO: 1358383 - DNA, 25 bp, Homo sapien
gcagcggaaacagtgcaccactgtt

SEQ ID NO: 1358384 - DNA, 25 bp, Homo sapien
ccaattagacaaacgagggcagcgg

SEQ ID NO: 1358385 - DNA, 25 bp, Homo sapien
ttggtgccgtgtgcgtcaaaccggg

SEQ ID NO: 1358386 - DNA, 25 bp, Homo sapien
tctgtacgctactcggctccagcgg

SEQ ID NO: 1358387 - DNA, 25 bp, Homo sapien
aaccaacatctgttcaataatcagt

SEQ ID NO: 1358388 - DNA, 25 bp, Homo sapien
gctgggacacactaactgctcaacc

SEQ ID NO: 1358389 - DNA, 25 bp, Homo sapien
ttccttaaataggacttgcttcttc

SEQ ID NO: 1358390 - DNA, 25 bp, Homo sapien
gtcctccacggaggccatactagag

SEQ ID NO: 1358391 - DNA, 25 bp, Homo sapien
cagtgatctactggccaggtctgct

SEQ ID NO: 1358392 - DNA, 25 bp, Homo sapien
gctttgtaaaactctgaccgcaggg

SEQ ID NO: 1358393 - DNA, 25 bp, Homo sapien
gacatggtgcagtgatctactggcc

SEQ ID NO: 1358394 - DNA, 25 bp, Homo sapien
ggtctatgtgacctgcgtctttctc

SEQ ID NO: 1358395 - DNA, 25 bp, Homo sapien
caggatgcaaactccaataggggga

SEQ ID NO: 1358396 - DNA, 25 bp, Homo sapien
aagtctttatgattctggataaaca

SEQ ID NO: 1358397 - DNA, 25 bp, Homo sapien
caatagggggagtctcaggaaaggt

SEQ ID NO: 1358398 - DNA, 25 bp, Homo sapien
gtctttatgattctggataaacacc

SEQ ID NO: 1358399 - DNA, 25 bp, Homo sapien
tatagttagggatagacagccatgt

SEQ ID NO: 1358400 - DNA, 25 bp, Homo sapien
gaggcctttccaatcttcagttcaa

SEQ ID NO: 1358401 - DNA, 25 bp, Homo sapien
ctagtttctatgacccggcttgtga

SEQ ID NO: 1358402 - DNA, 25 bp, Homo sapien
caaaagggtgtgatcgaatggtaat

SEQ ID NO: 1358403 - DNA, 25 bp, Homo sapien
ttggtgaactttgacattggctcgt

SEQ ID NO: 1358404 - DNA, 25 bp, Homo sapien
gctttgggagtgtccagggttcact

SEQ ID NO: 1358405 - DNA, 25 bp, Homo sapien
tccagggttcactcctttggtgaac

SEQ ID NO: 1358406 - DNA, 25 bp, Homo sapien
gacattggctcgtctctgagtcacc

SEQ ID NO: 1358407 - DNA, 25 bp, Homo sapien
ctgcggggccagacacatggcagca

SEQ ID NO: 1358408 - DNA, 25 bp, Homo sapien
atggcagcaggagccacagtagagc

SEQ ID NO: 1358409 - DNA, 25 bp, Homo sapien
ggcagcaggagccacagtagagcag

SEQ ID NO: 1358410 - DNA, 25 bp, Homo sapien
gcaggagccacagtagagcaggcat

SEQ ID NO: 1358411 - DNA, 25 bp, Homo sapien
ttggcatcttaatccattcactcgg

SEQ ID NO: 1358412 - DNA, 25 bp, Homo sapien
ccattcactcgggatttctgccagc

SEQ ID NO: 1358413 - DNA, 25 bp, Homo sapien
ggcatcttaatccattcactcggga

SEQ ID NO: 1358414 - DNA, 25 bp, Homo sapien
taatccattcactcgggatttctgc

SEQ ID NO: 1358415 - DNA, 25 bp, Homo sapien
catatccaagatgtccagcaggacc

SEQ ID NO: 1358416 - DNA, 25 bp, Homo sapien
cattttccatatccaagatgtccag

SEQ ID NO: 1358417 - DNA, 25 bp, Homo sapien
tccaagatgtccagcaggaccaaat

SEQ ID NO: 1358418 - DNA, 25 bp, Homo sapien
gtccagcaggaccaaatcactccat

SEQ ID NO: 1358419 - DNA, 25 bp, Homo sapien
tttcggttacttgaataagaggcaa

SEQ ID NO: 1358420 - DNA, 25 bp, Homo sapien
ttcggttacttgaataagaggcaag

SEQ ID NO: 1358421 - DNA, 25 bp, Homo sapien
ctttcggttacttgaataagaggca

SEQ ID NO: 1358422 - DNA, 25 bp, Homo sapien
cggttacttgaataagaggcaagtg

SEQ ID NO: 1358423 - DNA, 25 bp, Homo sapien
gagagaagcgaatctttagttgcag

SEQ ID NO: 1358424 - DNA, 25 bp, Homo sapien
tctcctgttacaaatgcaggagcag

SEQ ID NO: 1358425 - DNA, 25 bp, Homo sapien
cacagagaaggccgtcaatgctgat

SEQ ID NO: 1358426 - DNA, 25 bp, Homo sapien
cagagaaggccgtcaatgctgattc

SEQ ID NO: 1358427 - DNA, 25 bp, Homo sapien
gagtctcctgttacaaatgcaggag

SEQ ID NO: 1358428 - DNA, 25 bp, Homo sapien
caagccttccctgccaatgcaggca

SEQ ID NO: 1358429 - DNA, 25 bp, Homo sapien
gccttccctgccaatgcaggcagcc

SEQ ID NO: 1358430 - DNA, 25 bp, Homo sapien
aagccttccctgccaatgcaggcag

SEQ ID NO: 1358431 - DNA, 25 bp, Homo sapien
tgcaagccttccctgccaatgcagg

SEQ ID NO: 1358432 - DNA, 25 bp, Homo sapien
tggtaccctgtcctctcataacttt

SEQ ID NO: 1358433 - DNA, 25 bp, Homo sapien
ctgtcctctcataacttttcaccat

SEQ ID NO: 1358434 - DNA, 25 bp, Homo sapien
taccctgtcctctcataacttttca

SEQ ID NO: 1358435 - DNA, 25 bp, Homo sapien
gtggtaccctgtcctctcataactt

SEQ ID NO: 1358436 - DNA, 25 bp, Homo sapien
ttcatgtggagtgtcataatgcacc

SEQ ID NO: 1358437 - DNA, 25 bp, Homo sapien
tttcatgtggagtgtcataatgcac

SEQ ID NO: 1358438 - DNA, 25 bp, Homo sapien
tacatggacgatttgactttcatgt

SEQ ID NO: 1358439 - DNA, 25 bp, Homo sapien
aaccattttacatggacgatttgac

SEQ ID NO: 1358440 - DNA, 25 bp, Homo sapien
aatatgtgcgaatctatcaggattc

SEQ ID NO: 1358441 - DNA, 25 bp, Homo sapien
gaatctatcaggattccattgtcga

SEQ ID NO: 1358442 - DNA, 25 bp, Homo sapien
tatgtgcgaatctatcaggattcca

SEQ ID NO: 1358443 - DNA, 25 bp, Homo sapien
caggattccattgtcgacatgtata

SEQ ID NO: 1358444 - DNA, 25 bp, Homo sapien
tcagttgttagagaaacgcagttcc

SEQ ID NO: 1358445 - DNA, 25 bp, Homo sapien
ggtatggtacaatctccagtctgag

SEQ ID NO: 1358446 - DNA, 25 bp, Homo sapien
tgagcacagtctcttgccaggtggt

SEQ ID NO: 1358447 - DNA, 25 bp, Homo sapien
cttcattacaaggagaggtgtcctc

SEQ ID NO: 1358448 - DNA, 25 bp, Homo sapien
tccaaattgggcacaggtgggtcca

SEQ ID NO: 1358449 - DNA, 25 bp, Homo sapien
agttcctgcccaatccatcgaacat

SEQ ID NO: 1358450 - DNA, 25 bp, Homo sapien
tgcccaatccatcgaacattggcct

SEQ ID NO: 1358451 - DNA, 25 bp, Homo sapien
tcctgcccaatccatcgaacattgg

SEQ ID NO: 1358452 - DNA, 25 bp, Homo sapien
ctgggctgcttacaacactcagccc

SEQ ID NO: 1358453 - DNA, 25 bp, Homo sapien
ggctgggctgcttacaacactcagc

SEQ ID NO: 1358454 - DNA, 25 bp, Homo sapien
gctgggctgcttacaacactcagcc

SEQ ID NO: 1358455 - DNA, 25 bp, Homo sapien
tgggctgcttacaacactcagccct

SEQ ID NO: 1358456 - DNA, 25 bp, Homo sapien
caataagaactagtgcacttcagaa

SEQ ID NO: 1358457 - DNA, 25 bp, Homo sapien
tcctgcattgtctagccattctctg

SEQ ID NO: 1358458 - DNA, 25 bp, Homo sapien
caagcttgtcctgcattgtctagcc

SEQ ID NO: 1358459 - DNA, 25 bp, Homo sapien
ttccattgagccaataagaactagt

SEQ ID NO: 1358460 - DNA, 25 bp, Homo sapien
taaactcctcctgcattctcaggaa

SEQ ID NO: 1358461 - DNA, 25 bp, Homo sapien
ttggcagtaggactttgcttggtga

SEQ ID NO: 1358462 - DNA, 25 bp, Homo sapien
tgataatgtgtttcctctagtaaac

SEQ ID NO: 1358463 - DNA, 25 bp, Homo sapien
taggactttgcttggtgataatgtg

SEQ ID NO: 1358464 - DNA, 25 bp, Homo sapien
cttctaaaggctttgtgaactttct

SEQ ID NO: 1358465 - DNA, 25 bp, Homo sapien
tctaaaggctttgtgaactttctcc

SEQ ID NO: 1358466 - DNA, 25 bp, Homo sapien
aaggctttgtgaactttctcctcat

SEQ ID NO: 1358467 - DNA, 25 bp, Homo sapien
taaaggctttgtgaactttctcctc

SEQ ID NO: 1358468 - DNA, 25 bp, Homo sapien
acttatgttctagctgccagtccac

SEQ ID NO: 1358469 - DNA, 25 bp, Homo sapien
gaccatgctactatctgttgagact

SEQ ID NO: 1358470 - DNA, 25 bp, Homo sapien
tgtcctccttgtattggacaccagt

SEQ ID NO: 1358471 - DNA, 25 bp, Homo sapien
caacatctgaccatgctactatctg

SEQ ID NO: 1358472 - DNA, 25 bp, Homo sapien
tcaggtacccagcatctaggctctt

SEQ ID NO: 1358473 - DNA, 25 bp, Homo sapien
tagagagtcttcagtcttgggaaca

SEQ ID NO: 1358474 - DNA, 25 bp, Homo sapien
ttttcaggtacccagcatctaggct

SEQ ID NO: 1358475 - DNA, 25 bp, Homo sapien
aaactggctttgacctgtcaggcat

SEQ ID NO: 1358476 - DNA, 25 bp, Homo sapien
tgctcaaagttagataacagtaggt

SEQ ID NO: 1358477 - DNA, 25 bp, Homo sapien
gtgcaatcagcccttaacttaaggg

SEQ ID NO: 1358478 - DNA, 25 bp, Homo sapien
gaacaaagctaatcaaatacaggag

SEQ ID NO: 1358479 - DNA, 25 bp, Homo sapien
taggttcaaatagccactggattct

SEQ ID NO: 1358480 - DNA, 25 bp, Homo sapien
accatcaaatattcccaataaagac

SEQ ID NO: 1358481 - DNA, 25 bp, Homo sapien
aaataccatcaaatattcccaataa

SEQ ID NO: 1358482 - DNA, 25 bp, Homo sapien
ttagaaaataccatcaaatattccc

SEQ ID NO: 1358483 - DNA, 25 bp, Homo sapien
ataccatcaaatattcccaataaag

SEQ ID NO: 1358484 - DNA, 25 bp, Homo sapien
tcagcttcatcatcaggatgataca

SEQ ID NO: 1358485 - DNA, 25 bp, Homo sapien
agcttcatcatcaggatgatacata

SEQ ID NO: 1358486 - DNA, 25 bp, Homo sapien
ttcatcagcttcatcatcaggatga

SEQ ID NO: 1358487 - DNA, 25 bp, Homo sapien
catcagcttcatcatcaggatgata

SEQ ID NO: 1358488 - DNA, 25 bp, Homo sapien
ttattgatataatcttaaagtgtct

SEQ ID NO: 1358489 - DNA, 25 bp, Homo sapien
tttattgatataatcttaaagtgtc

SEQ ID NO: 1358490 - DNA, 25 bp, Homo sapien
tattgatataatcttaaagtgtctt

SEQ ID NO: 1358491 - DNA, 25 bp, Homo sapien
tctcaatctctggtgacagattttg

SEQ ID NO: 1358492 - DNA, 25 bp, Homo sapien
ctcaatctctggtgacagattttgt

SEQ ID NO: 1358493 - DNA, 25 bp, Homo sapien
ttctcaatctctggtgacagatttt

SEQ ID NO: 1358494 - DNA, 25 bp, Homo sapien
tcaatctctggtgacagattttgtg

SEQ ID NO: 1358495 - DNA, 25 bp, Homo sapien
tcattgaaagtttaagcactcgggc

SEQ ID NO: 1358496 - DNA, 25 bp, Homo sapien
tgaaagtttaagcactcgggcaaaa

SEQ ID NO: 1358497 - DNA, 25 bp, Homo sapien
taacaatcattgaaagtttaagcac

SEQ ID NO: 1358498 - DNA, 25 bp, Homo sapien
cattgaaagtttaagcactcgggca

SEQ ID NO: 1358499 - DNA, 25 bp, Homo sapien
catttccggcttgttgaggtaattt

SEQ ID NO: 1358500 - DNA, 25 bp, Homo sapien
aataactgcatttccggcttgttga

SEQ ID NO: 1358501 - DNA, 25 bp, Homo sapien
ataactgcatttccggcttgttgag

SEQ ID NO: 1358502 - DNA, 25 bp, Homo sapien
ctgcatttccggcttgttgaggtaa

SEQ ID NO: 1358503 - DNA, 25 bp, Homo sapien
cgacatctcatgtgatgaaacaaaa

SEQ ID NO: 1358504 - DNA, 25 bp, Homo sapien
gggcatagcagaatttgataaagaa

SEQ ID NO: 1358505 - DNA, 25 bp, Homo sapien
tatccgacatctcatgtgatgaaac

SEQ ID NO: 1358506 - DNA, 25 bp, Homo sapien
aaagaaatatccgacatctcatgtg

SEQ ID NO: 1358507 - DNA, 25 bp, Homo sapien
taactgtatagaagaatttactctg

SEQ ID NO: 1358508 - DNA, 25 bp, Homo sapien
tatttgtaaaatacggcaaacaaga

SEQ ID NO: 1358509 - DNA, 25 bp, Homo sapien
tctcattgtagttagacatctctag

SEQ ID NO: 1358510 - DNA, 25 bp, Homo sapien
tcatggagagcttggtatatttcct

SEQ ID NO: 1358511 - DNA, 25 bp, Homo sapien
tggaatttgctctttgactcttgaa

SEQ ID NO: 1358512 - DNA, 25 bp, Homo sapien
cctggtacttgaactcaaagtgttt

SEQ ID NO: 1358513 - DNA, 25 bp, Homo sapien
cccctggtacttgaactcaaagtgt

SEQ ID NO: 1358514 - DNA, 25 bp, Homo sapien
ccctggtacttgaactcaaagtgtt

SEQ ID NO: 1358515 - DNA, 25 bp, Homo sapien
cagtatcagttgaaaagctagtaac

SEQ ID NO: 1358516 - DNA, 25 bp, Homo sapien
aagctagtaacttctaagttttcat

SEQ ID NO: 1358517 - DNA, 25 bp, Homo sapien
gctagtaacttctaagttttcatca

SEQ ID NO: 1358518 - DNA, 25 bp, Homo sapien
ctcagtatcagttgaaaagctagta

SEQ ID NO: 1358519 - DNA, 25 bp, Homo sapien
tgttgaagaacactgtttgagagac

SEQ ID NO: 1358520 - DNA, 25 bp, Homo sapien
ctgaaaatagagaattgcttttatc

SEQ ID NO: 1358521 - DNA, 25 bp, Homo sapien
tctgttgaagaacactgtttgagag

SEQ ID NO: 1358522 - DNA, 25 bp, Homo sapien
aagttgtagaacagttacatctaga

SEQ ID NO: 1358523 - DNA, 25 bp, Homo sapien
tcagatggttcttgtctaacttttc

SEQ ID NO: 1358524 - DNA, 25 bp, Homo sapien
ttccatagatttcaggctgatccca

SEQ ID NO: 1358525 - DNA, 25 bp, Homo sapien
ttttccatagatttcaggctgatcc

SEQ ID NO: 1358526 - DNA, 25 bp, Homo sapien
gatattcagatggttcttgtctaac

SEQ ID NO: 1358527 - DNA, 25 bp, Homo sapien
ttaaggtccacactttgagatttat

SEQ ID NO: 1358528 - DNA, 25 bp, Homo sapien
tctttaaggtccacactttgagatt

SEQ ID NO: 1358529 - DNA, 25 bp, Homo sapien
cttgatatactaggaagggaaggtt

SEQ ID NO: 1358530 - DNA, 25 bp, Homo sapien
aactctttaaggtccacactttgag

SEQ ID NO: 1358531 - DNA, 25 bp, Homo sapien
cttcagacgtttaactggaggaaca

SEQ ID NO: 1358532 - DNA, 25 bp, Homo sapien
ttcagacgtttaactggaggaacag

SEQ ID NO: 1358533 - DNA, 25 bp, Homo sapien
cggttcccaggttttttgctggcag

SEQ ID NO: 1358534 - DNA, 25 bp, Homo sapien
gttcccaggttttttgctggcagtc

SEQ ID NO: 1358535 - DNA, 25 bp, Homo sapien
ccaggttttttgctggcagtcgttc

SEQ ID NO: 1358536 - DNA, 25 bp, Homo sapien
tcccaggttttttgctggcagtcgt

SEQ ID NO: 1358537 - DNA, 25 bp, Homo sapien
cctcatttctcagatggggcagcca

SEQ ID NO: 1358538 - DNA, 25 bp, Homo sapien
tcagatggggcagccagtcagagac

SEQ ID NO: 1358539 - DNA, 25 bp, Homo sapien
atggggcagccagtcagagacgctc

SEQ ID NO: 1358540 - DNA, 25 bp, Homo sapien
ggggtggtggcggggcagagacact

SEQ ID NO: 1358541 - DNA, 25 bp, Homo sapien
tcataccataccattcacattttta

SEQ ID NO: 1358542 - DNA, 25 bp, Homo sapien
ttcataccataccattcacattttt

SEQ ID NO: 1358543 - DNA, 25 bp, Homo sapien
attcataccataccattcacatttt

SEQ ID NO: 1358544 - DNA, 25 bp, Homo sapien
gcagagaggtaaaggtttatttcta

SEQ ID NO: 1358545 - DNA, 25 bp, Homo sapien
cagttgcccagccctattacttgaa

SEQ ID NO: 1358546 - DNA, 25 bp, Homo sapien
gcagttgcccagccctattacttga

SEQ ID NO: 1358547 - DNA, 25 bp, Homo sapien
agttgcccagccctattacttgaaa

SEQ ID NO: 1358548 - DNA, 25 bp, Homo sapien
tcgagtatgacatttgctatagttt

SEQ ID NO: 1358549 - DNA, 25 bp, Homo sapien
ttttactatcgagtatgacatttgc

SEQ ID NO: 1358550 - DNA, 25 bp, Homo sapien
tatatttaagaagttccaggccagg

SEQ ID NO: 1358551 - DNA, 25 bp, Homo sapien
taatattttactatcgagtatgaca

SEQ ID NO: 1358552 - DNA, 25 bp, Homo sapien
gcatgtctaatcatgctgctgctct

SEQ ID NO: 1358553 - DNA, 25 bp, Homo sapien
gagcatgtctaatcatgctgctgct

SEQ ID NO: 1358554 - DNA, 25 bp, Homo sapien
tcagagagcatgtctaatcatgctg

SEQ ID NO: 1358555 - DNA, 25 bp, Homo sapien
gagagcatgtctaatcatgctgctg

SEQ ID NO: 1358556 - DNA, 25 bp, Homo sapien
taggtcctgctattgtagatatgtc

SEQ ID NO: 1358557 - DNA, 25 bp, Homo sapien
ctcttgggttctaagtaaaagactg

SEQ ID NO: 1358558 - DNA, 25 bp, Homo sapien
tgatttgatttccaaacctcttggg

SEQ ID NO: 1358559 - DNA, 25 bp, Homo sapien
tctgaatgtttagaatgggaaatct

SEQ ID NO: 1358560 - DNA, 25 bp, Homo sapien
acttattagatttatgctaagatct

SEQ ID NO: 1358561 - DNA, 25 bp, Homo sapien
gatttatgctaagatcttcagattt

SEQ ID NO: 1358562 - DNA, 25 bp, Homo sapien
tattagatttatgctaagatcttca

SEQ ID NO: 1358563 - DNA, 25 bp, Homo sapien
tagatttatgctaagatcttcagat

SEQ ID NO: 1358564 - DNA, 25 bp, Homo sapien
tctgccgtcgtatcactatatcttg

SEQ ID NO: 1358565 - DNA, 25 bp, Homo sapien
actaatatttctgccgtcgtatcac

SEQ ID NO: 1358566 - DNA, 25 bp, Homo sapien
gattatctgcgtcacctatgattaa

SEQ ID NO: 1358567 - DNA, 25 bp, Homo sapien
acatagtgagaatccgatgctgttc

SEQ ID NO: 1358568 - DNA, 25 bp, Homo sapien
ctttaagttcatattttggtagata

SEQ ID NO: 1358569 - DNA, 25 bp, Homo sapien
tgttccactttaagttcatattttg

SEQ ID NO: 1358570 - DNA, 25 bp, Homo sapien
ctgttccactttaagttcatatttt

SEQ ID NO: 1358571 - DNA, 25 bp, Homo sapien
taagttcatattttggtagatacat

SEQ ID NO: 1358572 - DNA, 25 bp, Homo sapien
ctgggttccaaaggggggatgtctg

SEQ ID NO: 1358573 - DNA, 25 bp, Homo sapien
cacagtttcttttatctgggttcca

SEQ ID NO: 1358574 - DNA, 25 bp, Homo sapien
gcatttacgattgcatttgacaatg

SEQ ID NO: 1358575 - DNA, 25 bp, Homo sapien
tcaaaccagcatttacgattgcatt

SEQ ID NO: 1358576 - DNA, 25 bp, Homo sapien
ttcccttgcatctgtctcttctatt

SEQ ID NO: 1358577 - DNA, 25 bp, Homo sapien
gaagtcaaaccagcatttacgattg

SEQ ID NO: 1358578 - DNA, 25 bp, Homo sapien
gttgtttggatacatgcagagagtt

SEQ ID NO: 1358579 - DNA, 25 bp, Homo sapien
agttgtttggatacatgcagagagt

SEQ ID NO: 1358580 - DNA, 25 bp, Homo sapien
ttgagcagctacaaaatctgacaac

SEQ ID NO: 1358581 - DNA, 25 bp, Homo sapien
tgagcagctacaaaatctgacaacc

SEQ ID NO: 1358582 - DNA, 25 bp, Homo sapien
cttgagcagctacaaaatctgacaa

SEQ ID NO: 1358583 - DNA, 25 bp, Homo sapien
tcttgtaattcgggagccatgtctg

SEQ ID NO: 1358584 - DNA, 25 bp, Homo sapien
ggaatgcatcctagttgagcctgaa

SEQ ID NO: 1358585 - DNA, 25 bp, Homo sapien
gccatgtctgaaaatctttgcggta

SEQ ID NO: 1358586 - DNA, 25 bp, Homo sapien
tatcttgtgtcaaagcaaaatcttg

SEQ ID NO: 1358587 - DNA, 25 bp, Homo sapien
tgttttaattcttccttccattgga

SEQ ID NO: 1358588 - DNA, 25 bp, Homo sapien
tctcttgttttaattcttccttcca

SEQ ID NO: 1358589 - DNA, 25 bp, Homo sapien
cttgttttaattcttccttccattg

SEQ ID NO: 1358590 - DNA, 25 bp, Homo sapien
tcatttctcttgttttaattcttcc

SEQ ID NO: 1358591 - DNA, 25 bp, Homo sapien
ccgatttggatctttgttcaaagta

SEQ ID NO: 1358592 - DNA, 25 bp, Homo sapien
catttatccttaactgtatatctag

SEQ ID NO: 1358593 - DNA, 25 bp, Homo sapien
gaaattccttgcagccagctatcaa

SEQ ID NO: 1358594 - DNA, 25 bp, Homo sapien
gatagttatccgatttggatctttg

SEQ ID NO: 1358595 - DNA, 25 bp, Homo sapien
aatgtaatataataccaagccatca

SEQ ID NO: 1358596 - DNA, 25 bp, Homo sapien
tccactgattgtataaaatttcttc

SEQ ID NO: 1358597 - DNA, 25 bp, Homo sapien
ataccaagccatcaatcttcctgct

SEQ ID NO: 1358598 - DNA, 25 bp, Homo sapien
tttccactgattgtataaaatttct

SEQ ID NO: 1358599 - DNA, 25 bp, Homo sapien
tggcaaagtctatcctgtggctacc

SEQ ID NO: 1358600 - DNA, 25 bp, Homo sapien
aagtctatcctgtggctaccgagga

SEQ ID NO: 1358601 - DNA, 25 bp, Homo sapien
ttgatgcacccatcgaggcagaggc

SEQ ID NO: 1358602 - DNA, 25 bp, Homo sapien
ggtgaaggctggcaaagtctatcct

SEQ ID NO: 1358603 - DNA, 25 bp, Homo sapien
tggtttgaaattaacaccttcatcc

SEQ ID NO: 1358604 - DNA, 25 bp, Homo sapien
ggtttgaaattaacaccttcatcca

SEQ ID NO: 1358605 - DNA, 25 bp, Homo sapien
ttggtttgaaattaacaccttcatc

SEQ ID NO: 1358606 - DNA, 25 bp, Homo sapien
gtttgaaattaacaccttcatccat

SEQ ID NO: 1358607 - DNA, 25 bp, Homo sapien
cagggatgataaatcattcagattc

SEQ ID NO: 1358608 - DNA, 25 bp, Homo sapien
aatcattcagattcttcaaacataa

SEQ ID NO: 1358609 - DNA, 25 bp, Homo sapien
ctttattaagtccagggatgataaa

SEQ ID NO: 1358610 - DNA, 25 bp, Homo sapien
attaagtccagggatgataaatcat

SEQ ID NO: 1358611 - DNA, 25 bp, Homo sapien
tctttgttcaatccagatgcaaaac

SEQ ID NO: 1358612 - DNA, 25 bp, Homo sapien
caattccatctttgttcaatccaga

SEQ ID NO: 1358613 - DNA, 25 bp, Homo sapien
tccatctttgttcaatccagatgca

SEQ ID NO: 1358614 - DNA, 25 bp, Homo sapien
cttgtaattttgcttcaattccatc

SEQ ID NO: 1358615 - DNA, 25 bp, Homo sapien
cacatccgtgatggtatgcagtact

SEQ ID NO: 1358616 - DNA, 25 bp, Homo sapien
cattccacagcaatattcacatccg

SEQ ID NO: 1358617 - DNA, 25 bp, Homo sapien
taaagcagagttgatcgtatccatt

SEQ ID NO: 1358618 - DNA, 25 bp, Homo sapien
tgatggtatgcagtactatctctgc

SEQ ID NO: 1358619 - DNA, 25 bp, Homo sapien
catctgaatgtacttgtcccttgtg

SEQ ID NO: 1358620 - DNA, 25 bp, Homo sapien
gtctctacaagctaacatctgaatg

SEQ ID NO: 1358621 - DNA, 25 bp, Homo sapien
gtcccttgtgcttaatcgagtcatg

SEQ ID NO: 1358622 - DNA, 25 bp, Homo sapien
taactgcagtagctgtagtgtcaaa

SEQ ID NO: 1358623 - DNA, 25 bp, Homo sapien
taccaatcatctgtagaatatctgt

SEQ ID NO: 1358624 - DNA, 25 bp, Homo sapien
tttactcccatagctaaagtactgg

SEQ ID NO: 1358625 - DNA, 25 bp, Homo sapien
aacagtcctccagcataatgcattg

SEQ ID NO: 1358626 - DNA, 25 bp, Homo sapien
taggtgagcaggcaaatttactccc

SEQ ID NO: 1358627 - DNA, 25 bp, Homo sapien
acagtaaaagctccctcaactactt

SEQ ID NO: 1358628 - DNA, 25 bp, Homo sapien
tacttttctatctgacagctccata

SEQ ID NO: 1358629 - DNA, 25 bp, Homo sapien
gaactggtaaatctccaacagtaaa

SEQ ID NO: 1358630 - DNA, 25 bp, Homo sapien
caacagtaaaagctccctcaactac

SEQ ID NO: 1358631 - DNA, 25 bp, Homo sapien
gaatctcttacggaatatgcatact

SEQ ID NO: 1358632 - DNA, 25 bp, Homo sapien
gttttgaatctcttacggaatatgc

SEQ ID NO: 1358633 - DNA, 25 bp, Homo sapien
ctctcagttttgaatctcttacgga

SEQ ID NO: 1358634 - DNA, 25 bp, Homo sapien
tacggaatatgcatacttctgtaac

SEQ ID NO: 1358635 - DNA, 25 bp, Homo sapien
gttccacagtcataataaatttagc

SEQ ID NO: 1358636 - DNA, 25 bp, Homo sapien
gtttctgttccacagtcataataaa

SEQ ID NO: 1358637 - DNA, 25 bp, Homo sapien
gcatctttcacaagaacagaagcag

SEQ ID NO: 1358638 - DNA, 25 bp, Homo sapien
cagcctgttgcacacccttccttgt

SEQ ID NO: 1358639 - DNA, 25 bp, Homo sapien
agtgtgggtttctgatcagagtaca

SEQ ID NO: 1358640 - DNA, 25 bp, Homo sapien
tttggttactactgcagggaaatcc

SEQ ID NO: 1358641 - DNA, 25 bp, Homo sapien
ttcactggtctatggctctcatcca

SEQ ID NO: 1358642 - DNA, 25 bp, Homo sapien
ggtttctgatcagagtacatttgta

SEQ ID NO: 1358643 - DNA, 25 bp, Homo sapien
gatgtccacatgtccacaaaaaatg

SEQ ID NO: 1358644 - DNA, 25 bp, Homo sapien
gatactagcaaacgagatgtccaca

SEQ ID NO: 1358645 - DNA, 25 bp, Homo sapien
caattagagtcagctagttacaaca

SEQ ID NO: 1358646 - DNA, 25 bp, Homo sapien
tactatgaggcacctgaaacccagg

SEQ ID NO: 1358647 - DNA, 25 bp, Homo sapien
gtctgagaaacagactgtacagttt

SEQ ID NO: 1358648 - DNA, 25 bp, Homo sapien
gatacagctacaaatcgcattggaa

SEQ ID NO: 1358649 - DNA, 25 bp, Homo sapien
tcctcagcatttggaattgttgcag

SEQ ID NO: 1358650 - DNA, 25 bp, Homo sapien
tacaacttcaagagttggaccacga

SEQ ID NO: 1358651 - DNA, 25 bp, Homo sapien
aaccagctgaaccaaagagttgtct

SEQ ID NO: 1358652 - DNA, 25 bp, Homo sapien
tcaatgagaaacagtcgaaccagct

SEQ ID NO: 1358653 - DNA, 25 bp, Homo sapien
tgagaaacagtcgaaccagctgaac

SEQ ID NO: 1358654 - DNA, 25 bp, Homo sapien
tgaaccaaagagttgtctctccatt

SEQ ID NO: 1358655 - DNA, 25 bp, Homo sapien
ttgtcataataatatgggcatgctg

SEQ ID NO: 1358656 - DNA, 25 bp, Homo sapien
tgtatctccagtaagttctttacaa

SEQ ID NO: 1358657 - DNA, 25 bp, Homo sapien
tcatcaaaacgctgactgcacaagg

SEQ ID NO: 1358658 - DNA, 25 bp, Homo sapien
tacaattcaatcctattggtccaaa

SEQ ID NO: 1358659 - DNA, 25 bp, Homo sapien
gaaccagttggagcacaaatcacaa

SEQ ID NO: 1358660 - DNA, 25 bp, Homo sapien
caattttaatattcaaccatggcaa

SEQ ID NO: 1358661 - DNA, 25 bp, Homo sapien
ccattaacaatcttgttatagctag

SEQ ID NO: 1358662 - DNA, 25 bp, Homo sapien
tatagctagttcaaacactacagtt

SEQ ID NO: 1358663 - DNA, 25 bp, Homo sapien
ggccttggactgtatatagttgaaa

SEQ ID NO: 1358664 - DNA, 25 bp, Homo sapien
tcatcaaaggccttggactgtatat

SEQ ID NO: 1358665 - DNA, 25 bp, Homo sapien
tcaaaggccttggactgtatatagt

SEQ ID NO: 1358666 - DNA, 25 bp, Homo sapien
ggactgtatatagttgaaatatgga

SEQ ID NO: 1358667 - DNA, 25 bp, Homo sapien
gaatttctgtgacagccttcaagga

SEQ ID NO: 1358668 - DNA, 25 bp, Homo sapien
gtgacagccttcaaggaacctaaac

SEQ ID NO: 1358669 - DNA, 25 bp, Homo sapien
gacagccttcaaggaacctaaacca

SEQ ID NO: 1358670 - DNA, 25 bp, Homo sapien
cagccttcaaggaacctaaaccatt

SEQ ID NO: 1358671 - DNA, 25 bp, Homo sapien
ctgtttgtacaattttcactgagcc

SEQ ID NO: 1358672 - DNA, 25 bp, Homo sapien
tcactgagccaatgtgagagtccaa

SEQ ID NO: 1358673 - DNA, 25 bp, Homo sapien
tgtcattagaataagcactcccatg

SEQ ID NO: 1358674 - DNA, 25 bp, Homo sapien
ggtgctttgaacatgccttctccga

SEQ ID NO: 1358675 - DNA, 25 bp, Homo sapien
ctatgaacgcttggccgccacaagc

SEQ ID NO: 1358676 - DNA, 25 bp, Homo sapien
taggaagagccgacatcgaaggatc

SEQ ID NO: 1358677 - DNA, 25 bp, Homo sapien
acaatgataggaagagccgacatcg

SEQ ID NO: 1358678 - DNA, 25 bp, Homo sapien
cgacgtcgctatgaacgcttggccg

SEQ ID NO: 1358679 - DNA, 25 bp, Homo sapien
atcaagatcaagcgagcttttgccc

SEQ ID NO: 1358680 - DNA, 25 bp, Homo sapien
ggtctgtattcgtactgaaaatcaa

SEQ ID NO: 1358681 - DNA, 25 bp, Homo sapien
tctgctccacgggaggtttctgtcc

SEQ ID NO: 1358682 - DNA, 25 bp, Homo sapien
aagatcaagcgagcttttgcccttc

SEQ ID NO: 1358683 - DNA, 25 bp, Homo sapien
gttaccgtttgacaggtgtacagcc

SEQ ID NO: 1358684 - DNA, 25 bp, Homo sapien
cttaggacacctgcgttaccgtttg

SEQ ID NO: 1358685 - DNA, 25 bp, Homo sapien
tgacaggtgtacagccccagtcaaa

SEQ ID NO: 1358686 - DNA, 25 bp, Homo sapien
ggacacctgcgttaccgtttgacag

SEQ ID NO: 1358687 - DNA, 25 bp, Homo sapien
gaatactgatgtgctctctccttta

SEQ ID NO: 1358688 - DNA, 25 bp, Homo sapien
aattaactaattttgtatcatcagg

SEQ ID NO: 1358689 - DNA, 25 bp, Homo sapien
ggtgctatctcagtgccaatgtgat

SEQ ID NO: 1358690 - DNA, 25 bp, Homo sapien
tgccagcaatatgtgataagtcatt

SEQ ID NO: 1358691 - DNA, 25 bp, Homo sapien
caaactggaatttttgtgttagtga

SEQ ID NO: 1358692 - DNA, 25 bp, Homo sapien
cccttctaaatttagatcatcctgt

SEQ ID NO: 1358693 - DNA, 25 bp, Homo sapien
ttctaaatttagatcatcctgttca

SEQ ID NO: 1358694 - DNA, 25 bp, Homo sapien
aggcaaactggaatttttgtgttag

SEQ ID NO: 1358695 - DNA, 25 bp, Homo sapien
aaccaatccaatgacttttcattgt

SEQ ID NO: 1358696 - DNA, 25 bp, Homo sapien
ccaatccaatgacttttcattgtct

SEQ ID NO: 1358697 - DNA, 25 bp, Homo sapien
accaatccaatgacttttcattgtc

SEQ ID NO: 1358698 - DNA, 25 bp, Homo sapien
tcattatcataatcaaggctcttac

SEQ ID NO: 1358699 - DNA, 25 bp, Homo sapien
catattaggtcttactgtatattcc

SEQ ID NO: 1358700 - DNA, 25 bp, Homo sapien
tagctgtactattctgcctcttaat

SEQ ID NO: 1358701 - DNA, 25 bp, Homo sapien
cctttgtgtttccacggtcattatc

SEQ ID NO: 1358702 - DNA, 25 bp, Homo sapien
caaagaaaacaggcaatcatttgat

SEQ ID NO: 1358703 - DNA, 25 bp, Homo sapien
aaacaggcaatcatttgatttcagc

SEQ ID NO: 1358704 - DNA, 25 bp, Homo sapien
gaaaacaggcaatcatttgatttca

SEQ ID NO: 1358705 - DNA, 25 bp, Homo sapien
tcaacttcatctggtttttcaaaaa

SEQ ID NO: 1358706 - DNA, 25 bp, Homo sapien
tgttgaaaactggactttgtcataa

SEQ ID NO: 1358707 - DNA, 25 bp, Homo sapien
ttgaaaactggactttgtcataaat

SEQ ID NO: 1358708 - DNA, 25 bp, Homo sapien
gttgaaaactggactttgtcataaa

SEQ ID NO: 1358709 - DNA, 25 bp, Homo sapien
tattttcaagttaggacagcacatt

SEQ ID NO: 1358710 - DNA, 25 bp, Homo sapien
caatgagttgatcaaagctaaagct

SEQ ID NO: 1358711 - DNA, 25 bp, Homo sapien
tgtgcacctctaacaatatactatg

SEQ ID NO: 1358712 - DNA, 25 bp, Homo sapien
gaattaatcagtcttcttgggctct

SEQ ID NO: 1358713 - DNA, 25 bp, Homo sapien
tcatgccccagcaagtaggcattct

SEQ ID NO: 1358714 - DNA, 25 bp, Homo sapien
ggttgaagtgactccagcagcaaga

SEQ ID NO: 1358715 - DNA, 25 bp, Homo sapien
tggttcccctgaagaaactcacgag

SEQ ID NO: 1358716 - DNA, 25 bp, Homo sapien
aaactcacgagtgctcccaccagaa

SEQ ID NO: 1358717 - DNA, 25 bp, Homo sapien
gaataggtcactcagcttatagcct

SEQ ID NO: 1358718 - DNA, 25 bp, Homo sapien
tgcatagcggtaaagtctggacttt

SEQ ID NO: 1358719 - DNA, 25 bp, Homo sapien
cataaggcctcatgtagaggagact

SEQ ID NO: 1358720 - DNA, 25 bp, Homo sapien
gaaacgtcctatatgctgcataagg

SEQ ID NO: 1358721 - DNA, 25 bp, Homo sapien
tgcgcaaacgcccagtagcggaatc

SEQ ID NO: 1358722 - DNA, 25 bp, Homo sapien
taaccgctcttctagctggccaagg

SEQ ID NO: 1358723 - DNA, 25 bp, Homo sapien
ggatctcttggagacggcgacccag

SEQ ID NO: 1358724 - DNA, 25 bp, Homo sapien
gcaggcgcatccgatcgactcggta

SEQ ID NO: 1358725 - DNA, 25 bp, Homo sapien
gattaggaacgaattctggatcgtg

SEQ ID NO: 1358726 - DNA, 25 bp, Homo sapien
cgcgggattgtgagggattaggaac

SEQ ID NO: 1358727 - DNA, 25 bp, Homo sapien
acggtttgttccatggcgcgggatt

SEQ ID NO: 1358728 - DNA, 25 bp, Homo sapien
tttccgacggtttgttccatggcgc

SEQ ID NO: 1358729 - DNA, 25 bp, Homo sapien
cgcgcctgcgcactaagcatctggt

SEQ ID NO: 1358730 - DNA, 25 bp, Homo sapien
cttcccggctgagctcgcggccagc

SEQ ID NO: 1358731 - DNA, 25 bp, Homo sapien
atctggttcggtctctggcccgagg

SEQ ID NO: 1358732 - DNA, 25 bp, Homo sapien
ctgcggcgggaaagtcgcgcgcctg

SEQ ID NO: 1358733 - DNA, 25 bp, Homo sapien
ttttcctctgcgtagagccatccag

SEQ ID NO: 1358734 - DNA, 25 bp, Homo sapien
gtcagctgacagatttcccatttag

SEQ ID NO: 1358735 - DNA, 25 bp, Homo sapien
cactggttgataaagggaagctgca

SEQ ID NO: 1358736 - DNA, 25 bp, Homo sapien
cctcggaaattacatggtgctgacc

SEQ ID NO: 1358737 - DNA, 25 bp, Homo sapien
ttggtacacccgctggcaaaagtca

SEQ ID NO: 1358738 - DNA, 25 bp, Homo sapien
tggtgggcaaccagaaggccatgtt

SEQ ID NO: 1358739 - DNA, 25 bp, Homo sapien
aaggccatgttggtacacccgctgg

SEQ ID NO: 1358740 - DNA, 25 bp, Homo sapien
aaccagaaggccatgttggtacacc

SEQ ID NO: 1358741 - DNA, 25 bp, Homo sapien
caccaatgagacgaatgaagctgac

SEQ ID NO: 1358742 - DNA, 25 bp, Homo sapien
gttggcataactgccaaatgtgtgt

SEQ ID NO: 1358743 - DNA, 25 bp, Homo sapien
ggatgagcttgccaccgttgctgat

SEQ ID NO: 1358744 - DNA, 25 bp, Homo sapien
actgccaaatgtgtgtatcaccact

SEQ ID NO: 1358745 - DNA, 25 bp, Homo sapien
atcaaaagaacgaaggtcataaagt

SEQ ID NO: 1358746 - DNA, 25 bp, Homo sapien
gaacgaaggtcataaagtttgacca

SEQ ID NO: 1358747 - DNA, 25 bp, Homo sapien
cttatcaaaagaacgaaggtcataa

SEQ ID NO: 1358748 - DNA, 25 bp, Homo sapien
aacgaaggtcataaagtttgaccat

SEQ ID NO: 1358749 - DNA, 25 bp, Homo sapien
tcgtcgttgctgctcaaggtgatca

SEQ ID NO: 1358750 - DNA, 25 bp, Homo sapien
gtgatcacctcgcttttagggctga

SEQ ID NO: 1358751 - DNA, 25 bp, Homo sapien
gtcgtcgttgctgctcaaggtgatc

SEQ ID NO: 1358752 - DNA, 25 bp, Homo sapien
tgctcaaggtgatcacctcgctttt

SEQ ID NO: 1358753 - DNA, 25 bp, Homo sapien
cttgtcccgagttttcgcagaacac

SEQ ID NO: 1358754 - DNA, 25 bp, Homo sapien
tggcgagcggacaggctgcctaatg

SEQ ID NO: 1358755 - DNA, 25 bp, Homo sapien
tgcctaatggccaacctgggcgagg

SEQ ID NO: 1358756 - DNA, 25 bp, Homo sapien
agcagcatgcggtgggtcagcttca

SEQ ID NO: 1358757 - DNA, 25 bp, Homo sapien
ctcctgcttggacgacggtcttccg

SEQ ID NO: 1358758 - DNA, 25 bp, Homo sapien
ctggtaaccactgggtagtcaatga

SEQ ID NO: 1358759 - DNA, 25 bp, Homo sapien
ctctggtaaccactgggtagtcaat

SEQ ID NO: 1358760 - DNA, 25 bp, Homo sapien
tcccctacatcatatcctgagctca

SEQ ID NO: 1358761 - DNA, 25 bp, Homo sapien
gtaaccactgggtagtcaatgaaga

SEQ ID NO: 1358762 - DNA, 25 bp, Homo sapien
taaatcctttgagctgccccagcat

SEQ ID NO: 1358763 - DNA, 25 bp, Homo sapien
ctgctcctccttaaatcctttgagc

SEQ ID NO: 1358764 - DNA, 25 bp, Homo sapien
gagactgcggttaatagcttgaatt

SEQ ID NO: 1358765 - DNA, 25 bp, Homo sapien
gttggagagactgcggttaatagct

SEQ ID NO: 1358766 - DNA, 25 bp, Homo sapien
agttggagagactgcggttaatagc

SEQ ID NO: 1358767 - DNA, 25 bp, Homo sapien
ggagagactgcggttaatagcttga

SEQ ID NO: 1358768 - DNA, 25 bp, Homo sapien
gattcaggatctggctcaagcgctc

SEQ ID NO: 1358769 - DNA, 25 bp, Homo sapien
aagctacatcgtacaagtccccagg

SEQ ID NO: 1358770 - DNA, 25 bp, Homo sapien
gggtttatcaatgtatccagactca

SEQ ID NO: 1358771 - DNA, 25 bp, Homo sapien
taatcttcccacgatccaataaagt

SEQ ID NO: 1358772 - DNA, 25 bp, Homo sapien
tcagaattaagtagttcctggccaa

SEQ ID NO: 1358773 - DNA, 25 bp, Homo sapien
atcgtcctgttccccagtggattca

SEQ ID NO: 1358774 - DNA, 25 bp, Homo sapien
gaattaagtagttcctggccaagaa

SEQ ID NO: 1358775 - DNA, 25 bp, Homo sapien
ctttcagaattaagtagttcctggc

SEQ ID NO: 1358776 - DNA, 25 bp, Homo sapien
gtgtctctcggcgtcctcagcgaca

SEQ ID NO: 1358777 - DNA, 25 bp, Homo sapien
tctccagaaagctcaaacatgagct

SEQ ID NO: 1358778 - DNA, 25 bp, Homo sapien
tcctcagcgacaggagtttctcctg

SEQ ID NO: 1358779 - DNA, 25 bp, Homo sapien
gaaacatagccacgtaaccatgcac

SEQ ID NO: 1358780 - DNA, 25 bp, Homo sapien
acttggacccaacctaagcatctgg

SEQ ID NO: 1358781 - DNA, 25 bp, Homo sapien
gggatgactctgatcctgagctgac

SEQ ID NO: 1358782 - DNA, 25 bp, Homo sapien
cagactggaaattcactggaccgtt

SEQ ID NO: 1358783 - DNA, 25 bp, Homo sapien
catagaattgagacgctccagcacc

SEQ ID NO: 1358784 - DNA, 25 bp, Homo sapien
aaggactgcagttttgtcgccagat

SEQ ID NO: 1358785 - DNA, 25 bp, Homo sapien
tcgctgtcactgcacatcagtagac

SEQ ID NO: 1358786 - DNA, 25 bp, Homo sapien
tacgttcctgtcgtatttgctgaag

SEQ ID NO: 1358787 - DNA, 25 bp, Homo sapien
ggagaagtccgccacctcgctgtca

SEQ ID NO: 1358788 - DNA, 25 bp, Homo sapien
cacattgtagagacattggttgact

SEQ ID NO: 1358789 - DNA, 25 bp, Homo sapien
tgcagcacattgtagagacattggt

SEQ ID NO: 1358790 - DNA, 25 bp, Homo sapien
tgtagagacattggttgacttttcc

SEQ ID NO: 1358791 - DNA, 25 bp, Homo sapien
cgtggtccatgcagcacattgtaga

SEQ ID NO: 1358792 - DNA, 25 bp, Homo sapien
aagattggtaggacccctctacctg

SEQ ID NO: 1358793 - DNA, 25 bp, Homo sapien
tgattccaagattggtaggacccct

SEQ ID NO: 1358794 - DNA, 25 bp, Homo sapien
tcctccacaagacactgatcatcat

SEQ ID NO: 1358795 - DNA, 25 bp, Homo sapien
gacattctggctccttacaagtctc

SEQ ID NO: 1358796 - DNA, 25 bp, Homo sapien
ctgtaacagatacaaataatccttt

SEQ ID NO: 1358797 - DNA, 25 bp, Homo sapien
tgttttgaagatggctattttgatg

SEQ ID NO: 1358798 - DNA, 25 bp, Homo sapien
tttgaagatggctattttgatgtag

SEQ ID NO: 1358799 - DNA, 25 bp, Homo sapien
gaagatggctattttgatgtagagg

SEQ ID NO: 1358800 - DNA, 25 bp, Homo sapien
aatgcctgtggcttgtgagggccac

SEQ ID NO: 1358801 - DNA, 25 bp, Homo sapien
caactcttgatatagagatttggct

SEQ ID NO: 1358802 - DNA, 25 bp, Homo sapien
ttgtgagggccactcaggccccagc

SEQ ID NO: 1358803 - DNA, 25 bp, Homo sapien
aggccccagcctaatggcaactctt

SEQ ID NO: 1358804 - DNA, 25 bp, Homo sapien
ttgctgcctagagcaagtgggcatt

SEQ ID NO: 1358805 - DNA, 25 bp, Homo sapien
gtcagaaacagcaacctgtacttgc

SEQ ID NO: 1358806 - DNA, 25 bp, Homo sapien
tcaataactgattgtcagaaacagc

SEQ ID NO: 1358807 - DNA, 25 bp, Homo sapien
gaactcaataactgattgtcagaaa

SEQ ID NO: 1358808 - DNA, 25 bp, Homo sapien
ctcctcactgttggagcagtcccag

SEQ ID NO: 1358809 - DNA, 25 bp, Homo sapien
gctcctcactgttggagcagtccca

SEQ ID NO: 1358810 - DNA, 25 bp, Homo sapien
ctgttggagcagtcccagcagagaa

SEQ ID NO: 1358811 - DNA, 25 bp, Homo sapien
gagcagtcccagcagagaaagccaa

SEQ ID NO: 1358812 - DNA, 25 bp, Homo sapien
gcatgggactgaagccccatggaaa

SEQ ID NO: 1358813 - DNA, 25 bp, Homo sapien
cctgcatgggactgaagccccatgg

SEQ ID NO: 1358814 - DNA, 25 bp, Homo sapien
ttctggatggcgttcctcaaagcac

SEQ ID NO: 1358815 - DNA, 25 bp, Homo sapien
atggaccacgttctggatggcgttc

SEQ ID NO: 1358816 - DNA, 25 bp, Homo sapien
gtgctttggttgataaaaggataat

SEQ ID NO: 1358817 - DNA, 25 bp, Homo sapien
tttgagtctttgattggtcaagtgg

SEQ ID NO: 1358818 - DNA, 25 bp, Homo sapien
tatgaagactttcagctttgagtct

SEQ ID NO: 1358819 - DNA, 25 bp, Homo sapien
taaaaggataatcagttctggggct

SEQ ID NO: 1358820 - DNA, 25 bp, Homo sapien
tggaaactgataatagtccttttta

SEQ ID NO: 1358821 - DNA, 25 bp, Homo sapien
gtgttcaaactggccacagggattt

SEQ ID NO: 1358822 - DNA, 25 bp, Homo sapien
gtttcatgaacaacccccagataaa

SEQ ID NO: 1358823 - DNA, 25 bp, Homo sapien
ctgacacactgaacagagaaaagaa

SEQ ID NO: 1358824 - DNA, 25 bp, Homo sapien
tacagagtaacagctggtaaacacc

SEQ ID NO: 1358825 - DNA, 25 bp, Homo sapien
catgcccactaagaacacaagcagg

SEQ ID NO: 1358826 - DNA, 25 bp, Homo sapien
aaaagactggcacgcgtgtgagcac

SEQ ID NO: 1358827 - DNA, 25 bp, Homo sapien
tctgcaaattaagggtgtagcctgc

SEQ ID NO: 1358828 - DNA, 25 bp, Homo sapien
tcagaagtgtgcatccagacaaagg

SEQ ID NO: 1358829 - DNA, 25 bp, Homo sapien
tctagtgtggtacagaagcccaggg

SEQ ID NO: 1358830 - DNA, 25 bp, Homo sapien
tccaccgaaggttaggcaaagcgca

SEQ ID NO: 1358831 - DNA, 25 bp, Homo sapien
caggtagcgtaatctaggtcctcca

SEQ ID NO: 1358832 - DNA, 25 bp, Homo sapien
agcaaggcgtgctctgcgtgctgcc

SEQ ID NO: 1358833 - DNA, 25 bp, Homo sapien
cgtgctctgcgtgctgccgatgctg

SEQ ID NO: 1358834 - DNA, 25 bp, Homo sapien
ctgctggagcaaggcgtgctctgcg

SEQ ID NO: 1358835 - DNA, 25 bp, Homo sapien
aaggcgtgctctgcgtgctgccgat

SEQ ID NO: 1358836 - DNA, 25 bp, Homo sapien
caggaacttggccccattacttcca

SEQ ID NO: 1358837 - DNA, 25 bp, Homo sapien
aacactcgaggaaaggccctgccct

SEQ ID NO: 1358838 - DNA, 25 bp, Homo sapien
acaaaacactcgaggaaaggccctg

SEQ ID NO: 1358839 - DNA, 25 bp, Homo sapien
aggaacttggccccattacttccat

SEQ ID NO: 1358840 - DNA, 25 bp, Homo sapien
tcatcaagcaatagggagcaagtgt

SEQ ID NO: 1358841 - DNA, 25 bp, Homo sapien
gactaatgtggctatgcatgaacca

SEQ ID NO: 1358842 - DNA, 25 bp, Homo sapien
tcatccgtgcccattaaagagacct

SEQ ID NO: 1358843 - DNA, 25 bp, Homo sapien
caacagcaggtaaaagagaaggcct

SEQ ID NO: 1358844 - DNA, 25 bp, Homo sapien
gagtgtctattgtgtggcaggaaca

SEQ ID NO: 1358845 - DNA, 25 bp, Homo sapien
aacacaagctgttcaccaactctta

SEQ ID NO: 1358846 - DNA, 25 bp, Homo sapien
aactcttactcaacagtcacactaa

SEQ ID NO: 1358847 - DNA, 25 bp, Homo sapien
tctctttcattcgttatttcatcca

SEQ ID NO: 1358848 - DNA, 25 bp, Homo sapien
caaaggctgcaaacgcaatgcccat

SEQ ID NO: 1358849 - DNA, 25 bp, Homo sapien
tgtgagaatagatgtaccacaaggc

SEQ ID NO: 1358850 - DNA, 25 bp, Homo sapien
cccgtcaggagtgctccgatcacaa

SEQ ID NO: 1358851 - DNA, 25 bp, Homo sapien
gagaatagatgtaccacaaggcccc

SEQ ID NO: 1358852 - DNA, 25 bp, Homo sapien
acggttagggtgtccagaccatgga

SEQ ID NO: 1358853 - DNA, 25 bp, Homo sapien
gttagggtgtccagaccatggaaaa

SEQ ID NO: 1358854 - DNA, 25 bp, Homo sapien
cggttagggtgtccagaccatggaa

SEQ ID NO: 1358855 - DNA, 25 bp, Homo sapien
cacggttagggtgtccagaccatgg

SEQ ID NO: 1358856 - DNA, 25 bp, Homo sapien
gaggttttatttcgaaatagttgca

SEQ ID NO: 1358857 - DNA, 25 bp, Homo sapien
aggttttatttcgaaatagttgcat

SEQ ID NO: 1358858 - DNA, 25 bp, Homo sapien
gttttatttcgaaatagttgcataa

SEQ ID NO: 1358859 - DNA, 25 bp, Homo sapien
ggttttatttcgaaatagttgcata

SEQ ID NO: 1358860 - DNA, 25 bp, Homo sapien
ggatttggttccttcatgcttggac

SEQ ID NO: 1358861 - DNA, 25 bp, Homo sapien
tttggttccttcatgcttggacctt

SEQ ID NO: 1358862 - DNA, 25 bp, Homo sapien
atttggttccttcatgcttggacct

SEQ ID NO: 1358863 - DNA, 25 bp, Homo sapien
gatttggttccttcatgcttggacc

SEQ ID NO: 1358864 - DNA, 25 bp, Homo sapien
gaaacaaaaacataaatcacaatgt

SEQ ID NO: 1358865 - DNA, 25 bp, Homo sapien
acaaaaacataaatcacaatgtatt

SEQ ID NO: 1358866 - DNA, 25 bp, Homo sapien
aacaaaaacataaatcacaatgtat

SEQ ID NO: 1358867 - DNA, 25 bp, Homo sapien
ctgaaacaaaaacataaatcacaat

SEQ ID NO: 1358868 - DNA, 25 bp, Homo sapien
ataaatactgtgagaaagctctgtc

SEQ ID NO: 1358869 - DNA, 25 bp, Homo sapien
agggtcatcaaagtctcagcagaaa

SEQ ID NO: 1358870 - DNA, 25 bp, Homo sapien
tgacaatcagttgcataggctctcc

SEQ ID NO: 1358871 - DNA, 25 bp, Homo sapien
gaatttgggtccgacaatttgtgtg

SEQ ID NO: 1358872 - DNA, 25 bp, Homo sapien
cccaaaggccgagggactataggcg

SEQ ID NO: 1358873 - DNA, 25 bp, Homo sapien
ctcccaaaggccgagggactatagg

SEQ ID NO: 1358874 - DNA, 25 bp, Homo sapien
gtcatctgtatatccccaagggctc

SEQ ID NO: 1358875 - DNA, 25 bp, Homo sapien
cagcggttgagatattatggtccac

SEQ ID NO: 1358876 - DNA, 25 bp, Homo sapien
gatatcgtgtgactagagcccaagg

SEQ ID NO: 1358877 - DNA, 25 bp, Homo sapien
tgagcgtagctctgtccctagctgg

SEQ ID NO: 1358878 - DNA, 25 bp, Homo sapien
tataagcccaagtgttctcaaatgc

SEQ ID NO: 1358879 - DNA, 25 bp, Homo sapien
catctataggtatgtaaatcacggc

SEQ ID NO: 1358880 - DNA, 25 bp, Homo sapien
tcaaatgctgtaaaaagcggtcaca

SEQ ID NO: 1358881 - DNA, 25 bp, Homo sapien
tcttaatcctttgggtgaacagaca

SEQ ID NO: 1358882 - DNA, 25 bp, Homo sapien
acaggcgtgtgccatgacgcctggc

SEQ ID NO: 1358883 - DNA, 25 bp, Homo sapien
cttcccaggtttaggcaattctctg

SEQ ID NO: 1358884 - DNA, 25 bp, Homo sapien
tgcctcagcctaaagagtagctggg

SEQ ID NO: 1358885 - DNA, 25 bp, Homo sapien
attacaggcgtgtgccatgacgcct

SEQ ID NO: 1358886 - DNA, 25 bp, Homo sapien
tcaaatgactattccaattcacctt

SEQ ID NO: 1358887 - DNA, 25 bp, Homo sapien
caaatgactattccaattcaccttg

SEQ ID NO: 1358888 - DNA, 25 bp, Homo sapien
gaccttttggaagtcacccagtcca

SEQ ID NO: 1358889 - DNA, 25 bp, Homo sapien
taaaagcagtgccttaggctcccag

SEQ ID NO: 1358890 - DNA, 25 bp, Homo sapien
tgtgcctgccacctatactcttctg

SEQ ID NO: 1358891 - DNA, 25 bp, Homo sapien
tcacaacaactttaggacggccaga

SEQ ID NO: 1358892 - DNA, 25 bp, Homo sapien
ccagattatcgaggcgtccagcgag

SEQ ID NO: 1358893 - DNA, 25 bp, Homo sapien
cagcaaggggcttagtgaacgtctt

SEQ ID NO: 1358894 - DNA, 25 bp, Homo sapien
tgcaggcttcgtcaggaggcacaca

SEQ ID NO: 1358895 - DNA, 25 bp, Homo sapien
gcttcatggtggatcacagcaaggg

SEQ ID NO: 1358896 - DNA, 25 bp, Homo sapien
aatgaacttgtcctttcggcttgct

SEQ ID NO: 1358897 - DNA, 25 bp, Homo sapien
acttgtcctttcggcttgctgtgtt

SEQ ID NO: 1358898 - DNA, 25 bp, Homo sapien
ttgtcctttcggcttgctgtgtttt

SEQ ID NO: 1358899 - DNA, 25 bp, Homo sapien
atgaacttgtcctttcggcttgctg

SEQ ID NO: 1358900 - DNA, 25 bp, Homo sapien
aaataaccatccgaatggatgaagg

SEQ ID NO: 1358901 - DNA, 25 bp, Homo sapien
gccaaaataaccatccgaatggatg

SEQ ID NO: 1358902 - DNA, 25 bp, Homo sapien
aaaatgccaaaataaccatccgaat

SEQ ID NO: 1358903 - DNA, 25 bp, Homo sapien
ataaccatccgaatggatgaaggcc

SEQ ID NO: 1358904 - DNA, 25 bp, Homo sapien
ccatgtcagcttgcgggataggaaa

SEQ ID NO: 1358905 - DNA, 25 bp, Homo sapien
taatgagacatcctatcagggttcg

SEQ ID NO: 1358906 - DNA, 25 bp, Homo sapien
taaagcacgtttggatggcaaatcc

SEQ ID NO: 1358907 - DNA, 25 bp, Homo sapien
taggaaagtgcactctcttgggact

SEQ ID NO: 1358908 - DNA, 25 bp, Homo sapien
gatatgcccacttgaaacactaagg

SEQ ID NO: 1358909 - DNA, 25 bp, Homo sapien
tcccactatgaagctgagcttgcag

SEQ ID NO: 1358910 - DNA, 25 bp, Homo sapien
catgaaaggttgtacccagggcaca

SEQ ID NO: 1358911 - DNA, 25 bp, Homo sapien
gaggaccttcccataagaccaacag

SEQ ID NO: 1358912 - DNA, 25 bp, Homo sapien
cagtgttgtatagctccatgttgaa

SEQ ID NO: 1358913 - DNA, 25 bp, Homo sapien
gcacagagaagacgccctgggaggg

SEQ ID NO: 1358914 - DNA, 25 bp, Homo sapien
gagggcaccaaaaagaggtcagtgt

SEQ ID NO: 1358915 - DNA, 25 bp, Homo sapien
tgatgtttccgtggggctgttcctg

SEQ ID NO: 1358916 - DNA, 25 bp, Homo sapien
tatcacctgactccagatcttcata

SEQ ID NO: 1358917 - DNA, 25 bp, Homo sapien
catatctcccggaaatccattatca

SEQ ID NO: 1358918 - DNA, 25 bp, Homo sapien
ccacgatttcaggtcgggtgaacag

SEQ ID NO: 1358919 - DNA, 25 bp, Homo sapien
gatcttcataaccatctggccaacc

SEQ ID NO: 1358920 - DNA, 25 bp, Homo sapien
tgcttgggttcatgggagagtcact

SEQ ID NO: 1358921 - DNA, 25 bp, Homo sapien
gaagttggattcagtcgtcctggct

SEQ ID NO: 1358922 - DNA, 25 bp, Homo sapien
catgctgcaattatcaggaggtcaa

SEQ ID NO: 1358923 - DNA, 25 bp, Homo sapien
caaaaggagattagcagggcctagc

SEQ ID NO: 1358924 - DNA, 25 bp, Homo sapien
ttatagtagaccacaccatcaaggg

SEQ ID NO: 1358925 - DNA, 25 bp, Homo sapien
tgcaggtaggatccaacagggtgac

SEQ ID NO: 1358926 - DNA, 25 bp, Homo sapien
cagaggagactccaaaacaaagtgt

SEQ ID NO: 1358927 - DNA, 25 bp, Homo sapien
aaagtgtgtgccattcatcttggcc

SEQ ID NO: 1358928 - DNA, 25 bp, Homo sapien
ggtcctttggccgagggagcccatc

SEQ ID NO: 1358929 - DNA, 25 bp, Homo sapien
gaaacagttgtatgctgggaatgac

SEQ ID NO: 1358930 - DNA, 25 bp, Homo sapien
tgacagacagggcaatatccacgct

SEQ ID NO: 1358931 - DNA, 25 bp, Homo sapien
tctttttctacagccacgatcatct

SEQ ID NO: 1358932 - DNA, 25 bp, Homo sapien
caagccgaagatgaaatctattagc

SEQ ID NO: 1358933 - DNA, 25 bp, Homo sapien
gccacaggagccattgtgtatgaag

SEQ ID NO: 1358934 - DNA, 25 bp, Homo sapien
caccagattcccttgggttgaagga

SEQ ID NO: 1358935 - DNA, 25 bp, Homo sapien
gactatagccattgtccaaagccca

SEQ ID NO: 1358936 - DNA, 25 bp, Homo sapien
cacttacagccacttaacaatggag

SEQ ID NO: 1358937 - DNA, 25 bp, Homo sapien
tgaaagatagcacaatcacttacag

SEQ ID NO: 1358938 - DNA, 25 bp, Homo sapien
tgttatattgccctcaaattcccat

SEQ ID NO: 1358939 - DNA, 25 bp, Homo sapien
caatggagatatgtcctgagaaatg

SEQ ID NO: 1358940 - DNA, 25 bp, Homo sapien
ggtcttatatcaattgttatatcca

SEQ ID NO: 1358941 - DNA, 25 bp, Homo sapien
tcttgagaaggtcttatatcaattg

SEQ ID NO: 1358942 - DNA, 25 bp, Homo sapien
gttgacagactttttgcacttcaag

SEQ ID NO: 1358943 - DNA, 25 bp, Homo sapien
cagactttttgcacttcaagatcag

SEQ ID NO: 1358944 - DNA, 25 bp, Homo sapien
caaaggcaaagttaagacctacatg

SEQ ID NO: 1358945 - DNA, 25 bp, Homo sapien
gacaaaggcaaagttaagacctaca

SEQ ID NO: 1358946 - DNA, 25 bp, Homo sapien
aaggcaaagttaagacctacatgcc

SEQ ID NO: 1358947 - DNA, 25 bp, Homo sapien
aaaggcaaagttaagacctacatgc

SEQ ID NO: 1358948 - DNA, 25 bp, Homo sapien
ttagctcgatgatgtgtacttcctc

SEQ ID NO: 1358949 - DNA, 25 bp, Homo sapien
tgctgctttgggttgaaggtactca

SEQ ID NO: 1358950 - DNA, 25 bp, Homo sapien
attcttccctatgttgcactttgga

SEQ ID NO: 1358951 - DNA, 25 bp, Homo sapien
tactcagcaaggtaattgagtgaga

SEQ ID NO: 1358952 - DNA, 25 bp, Homo sapien
tgtcaaaccactgaggtactcggta

SEQ ID NO: 1358953 - DNA, 25 bp, Homo sapien
tactcggtaaccagattcaaaggaa

SEQ ID NO: 1358954 - DNA, 25 bp, Homo sapien
cacgagctcaaaggatggttcttcg

SEQ ID NO: 1358955 - DNA, 25 bp, Homo sapien
ggttcttcgtctgtgaagtccgcaa

SEQ ID NO: 1358956 - DNA, 25 bp, Homo sapien
ctctctccacggcatggcccggtga

SEQ ID NO: 1358957 - DNA, 25 bp, Homo sapien
tggagtcaagtttcaggggttccga

SEQ ID NO: 1358958 - DNA, 25 bp, Homo sapien
actcatactcaactggtggctggag

SEQ ID NO: 1358959 - DNA, 25 bp, Homo sapien
gcatggcccggtgactcatactcaa

SEQ ID NO: 1358960 - DNA, 25 bp, Homo sapien
ctgcaccagacacaaggtcctttaa

SEQ ID NO: 1358961 - DNA, 25 bp, Homo sapien
caccagacacaaggtcctttaagtt

SEQ ID NO: 1358962 - DNA, 25 bp, Homo sapien
tgcaccagacacaaggtcctttaag

SEQ ID NO: 1358963 - DNA, 25 bp, Homo sapien
cagacacaaggtcctttaagttggc

SEQ ID NO: 1358964 - DNA, 25 bp, Homo sapien
tgaaaactggaccacagaaccctca

SEQ ID NO: 1358965 - DNA, 25 bp, Homo sapien
gaatgaagtaactgctccatactct

SEQ ID NO: 1358966 - DNA, 25 bp, Homo sapien
tcttgctatcttgagttcggtgaat

SEQ ID NO: 1358967 - DNA, 25 bp, Homo sapien
gctccatactcttttcgggcccaat

SEQ ID NO: 1358968 - DNA, 25 bp, Homo sapien
tccctctgaactctgaaagaacctt

SEQ ID NO: 1358969 - DNA, 25 bp, Homo sapien
caatgcaggatgtccctctgaactc

SEQ ID NO: 1358970 - DNA, 25 bp, Homo sapien
agaaccttgtgaggacggactgcat

SEQ ID NO: 1358971 - DNA, 25 bp, Homo sapien
tatacaattatataaacgtatcttc

SEQ ID NO: 1358972 - DNA, 25 bp, Homo sapien
caattatataaacgtatcttctaaa

SEQ ID NO: 1358973 - DNA, 25 bp, Homo sapien
tatcttctaaaaacgctggcaaaaa

SEQ ID NO: 1358974 - DNA, 25 bp, Homo sapien
acgtatcttctaaaaacgctggcaa

SEQ ID NO: 1358975 - DNA, 25 bp, Homo sapien
ttgaagtctctgaagatgatcaagg

SEQ ID NO: 1358976 - DNA, 25 bp, Homo sapien
ccgaaataactgtggttggagcctc

SEQ ID NO: 1358977 - DNA, 25 bp, Homo sapien
tttgcagtctacattgaagtctctg

SEQ ID NO: 1358978 - DNA, 25 bp, Homo sapien
aggcagagccctcttaagcaggcca

SEQ ID NO: 1358979 - DNA, 25 bp, Homo sapien
ctcaatggccacaatagggccaaaa

SEQ ID NO: 1358980 - DNA, 25 bp, Homo sapien
aatgttctaattgccatagtgacat

SEQ ID NO: 1358981 - DNA, 25 bp, Homo sapien
taaaaacaggcttatgtgatccttc

SEQ ID NO: 1358982 - DNA, 25 bp, Homo sapien
ttctgattgttctctgggccaccca

SEQ ID NO: 1358983 - DNA, 25 bp, Homo sapien
ggcttatgtgatccttctaagagat

SEQ ID NO: 1358984 - DNA, 25 bp, Homo sapien
cagtttcaacatggcacactgagag

SEQ ID NO: 1358985 - DNA, 25 bp, Homo sapien
caaggatacatgcatcgtggactga

SEQ ID NO: 1358986 - DNA, 25 bp, Homo sapien
gactgagagtcaagagacccattcg

SEQ ID NO: 1358987 - DNA, 25 bp, Homo sapien
tccctgggtaacctcggagaagaca

SEQ ID NO: 1358988 - DNA, 25 bp, Homo sapien
aatttccagagatcccgtgggccct

SEQ ID NO: 1358989 - DNA, 25 bp, Homo sapien
tggatgtggactgaggagatgggat

SEQ ID NO: 1358990 - DNA, 25 bp, Homo sapien
tggtggatgtggactgaggagatgg

SEQ ID NO: 1358991 - DNA, 25 bp, Homo sapien
cccagtggcaagtctctctgtcttc

SEQ ID NO: 1358992 - DNA, 25 bp, Homo sapien
gatgccacaccagggggtgtgggga

SEQ ID NO: 1358993 - DNA, 25 bp, Homo sapien
tccatgaagcctaatccaagagttc

SEQ ID NO: 1358994 - DNA, 25 bp, Homo sapien
caaactggtccatgaagcctaatcc

SEQ ID NO: 1358995 - DNA, 25 bp, Homo sapien
aatccaagagttcctgttctaacca

SEQ ID NO: 1358996 - DNA, 25 bp, Homo sapien
gaccacaaactggtccatgaagcct

SEQ ID NO: 1358997 - DNA, 25 bp, Homo sapien
ttcaaacagtgctggatattcggta

SEQ ID NO: 1358998 - DNA, 25 bp, Homo sapien
ggtttcaaacagtgctggatattcg

SEQ ID NO: 1358999 - DNA, 25 bp, Homo sapien
aaacagtgctggatattcggtattc

SEQ ID NO: 1359000 - DNA, 25 bp, Homo sapien
gctggtttcaaacagtgctggatat

SEQ ID NO: 1359001 - DNA, 25 bp, Homo sapien
aagcaaatctgatctgccacatccc

SEQ ID NO: 1359002 - DNA, 25 bp, Homo sapien
aatgcaagcaaatctgatctgccac

SEQ ID NO: 1359003 - DNA, 25 bp, Homo sapien
ctgatggtgtgagaaaatgcaagca

SEQ ID NO: 1359004 - DNA, 25 bp, Homo sapien
tgccacatcccttatgtaacaccat

SEQ ID NO: 1359005 - DNA, 25 bp, Homo sapien
taaaggggtcctgggagccgttgca

SEQ ID NO: 1359006 - DNA, 25 bp, Homo sapien
aaggggtcctgggagccgttgcaag

SEQ ID NO: 1359007 - DNA, 25 bp, Homo sapien
ggtcctgggagccgttgcaaggaga

SEQ ID NO: 1359008 - DNA, 25 bp, Homo sapien
cctgggagccgttgcaaggagattc

SEQ ID NO: 1359009 - DNA, 25 bp, Homo sapien
aatgggcttcaaattagctttgcta

SEQ ID NO: 1359010 - DNA, 25 bp, Homo sapien
ttataatgggcttcaaattagcttt

SEQ ID NO: 1359011 - DNA, 25 bp, Homo sapien
agccacacagtacctagcctaattt

SEQ ID NO: 1359012 - DNA, 25 bp, Homo sapien
cagtacctagcctaatttctacatt

SEQ ID NO: 1359013 - DNA, 25 bp, Homo sapien
gaatggcctgtgcatcagtactgtg

SEQ ID NO: 1359014 - DNA, 25 bp, Homo sapien
gagagttgcatgagcagatcctgaa

SEQ ID NO: 1359015 - DNA, 25 bp, Homo sapien
gagtaatcattccacctgctacgtg

SEQ ID NO: 1359016 - DNA, 25 bp, Homo sapien
gatcctgaattccaacgggacagct

SEQ ID NO: 1359017 - DNA, 25 bp, Homo sapien
gtttctatttccctagagatgggag

SEQ ID NO: 1359018 - DNA, 25 bp, Homo sapien
gacacaaaccgatcactctcaggct

SEQ ID NO: 1359019 - DNA, 25 bp, Homo sapien
acaaaaacagtcgtgggcttcagca

SEQ ID NO: 1359020 - DNA, 25 bp, Homo sapien
tggaaggctaaggatcaccacagca

SEQ ID NO: 1359021 - DNA, 25 bp, Homo sapien
gcaccactaacctggacaagctcag

SEQ ID NO: 1359022 - DNA, 25 bp, Homo sapien
tgaatctaacaaacaaaggtcctgg

SEQ ID NO: 1359023 - DNA, 25 bp, Homo sapien
taggaacataggaagtgccaaagca

SEQ ID NO: 1359024 - DNA, 25 bp, Homo sapien
caaatctcaccgtagttctggagac

SEQ ID NO: 1359025 - DNA, 25 bp, Homo sapien
gaacacatgacaaaacaggacgaaa

SEQ ID NO: 1359026 - DNA, 25 bp, Homo sapien
tgtgcaagtgggctcattactcaga

SEQ ID NO: 1359027 - DNA, 25 bp, Homo sapien
tatacacagtaatagcaccaagcca

SEQ ID NO: 1359028 - DNA, 25 bp, Homo sapien
caggacgaaaaattgcccttgtaca

SEQ ID NO: 1359029 - DNA, 25 bp, Homo sapien
aactgcaacacatgggctgacaaca

SEQ ID NO: 1359030 - DNA, 25 bp, Homo sapien
aataaactgcaacacatgggctgac

SEQ ID NO: 1359031 - DNA, 25 bp, Homo sapien
aaataaactgcaacacatgggctga

SEQ ID NO: 1359032 - DNA, 25 bp, Homo sapien
taaactgcaacacatgggctgacaa

SEQ ID NO: 1359033 - DNA, 25 bp, Homo sapien
ctggccaaaagcaccaagtgacaat

SEQ ID NO: 1359034 - DNA, 25 bp, Homo sapien
gaagaactcgcagcaaggaagaagc

SEQ ID NO: 1359035 - DNA, 25 bp, Homo sapien
aagggcctgcgtgaaagccctcacg

SEQ ID NO: 1359036 - DNA, 25 bp, Homo sapien
gcaatgaagggcctgcgtgaaagcc

SEQ ID NO: 1359037 - DNA, 25 bp, Homo sapien
cggaatcatgtgtgtcccaacggac

SEQ ID NO: 1359038 - DNA, 25 bp, Homo sapien
ccatgtgcccaacacggaatcatgt

SEQ ID NO: 1359039 - DNA, 25 bp, Homo sapien
acacggaatcatgtgtgtcccaacg

SEQ ID NO: 1359040 - DNA, 25 bp, Homo sapien
tgcccatgtgcccaacacggaatca

SEQ ID NO: 1359041 - DNA, 25 bp, Homo sapien
ttggctcccttggaccagggctttc

SEQ ID NO: 1359042 - DNA, 25 bp, Homo sapien
ctcccttggaccagggctttctcct

SEQ ID NO: 1359043 - DNA, 25 bp, Homo sapien
ggctcccttggaccagggctttctc

SEQ ID NO: 1359044 - DNA, 25 bp, Homo sapien
ctttggctcccttggaccagggctt

SEQ ID NO: 1359045 - DNA, 25 bp, Homo sapien
aagcactgcttgcacatcgactgac

SEQ ID NO: 1359046 - DNA, 25 bp, Homo sapien
gctgcctcccaaggaaagcactgct

SEQ ID NO: 1359047 - DNA, 25 bp, Homo sapien
tcccaaggaaagcactgcttgcaca

SEQ ID NO: 1359048 - DNA, 25 bp, Homo sapien
ggaaagcactgcttgcacatcgact

SEQ ID NO: 1359049 - DNA, 25 bp, Homo sapien
ccacgtaaacgggtccacaggcatg

SEQ ID NO: 1359050 - DNA, 25 bp, Homo sapien
gatgcagcttccacgtaaacgggtc

SEQ ID NO: 1359051 - DNA, 25 bp, Homo sapien
cttttaagaagacatcgatgcagct

SEQ ID NO: 1359052 - DNA, 25 bp, Homo sapien
gaagacatcgatgcagcttccacgt

SEQ ID NO: 1359053 - DNA, 25 bp, Homo sapien
agagaaccgacagccacatcaccga

SEQ ID NO: 1359054 - DNA, 25 bp, Homo sapien
aaccgacagccacatcaccgacttg

SEQ ID NO: 1359055 - DNA, 25 bp, Homo sapien
ctaggcacagagaaccgacagccac

SEQ ID NO: 1359056 - DNA, 25 bp, Homo sapien
taggcacagagaaccgacagccaca

SEQ ID NO: 1359057 - DNA, 25 bp, Homo sapien
taacacacacgattcagcagcaagt

SEQ ID NO: 1359058 - DNA, 25 bp, Homo sapien
gattcagcagcaagtaatacaataa

SEQ ID NO: 1359059 - DNA, 25 bp, Homo sapien
gaattaacacacacgattcagcagc

SEQ ID NO: 1359060 - DNA, 25 bp, Homo sapien
cacacacgattcagcagcaagtaat

SEQ ID NO: 1359061 - DNA, 25 bp, Homo sapien
gccaagggctatgcctcagtcaaga

SEQ ID NO: 1359062 - DNA, 25 bp, Homo sapien
gagactagccctgtatctaacatgg

SEQ ID NO: 1359063 - DNA, 25 bp, Homo sapien
tctaacatgggagcgaaccacagtg

SEQ ID NO: 1359064 - DNA, 25 bp, Homo sapien
tatctgaggcacctggcagctcaag

SEQ ID NO: 1359065 - DNA, 25 bp, Homo sapien
gatacaagacgtagtaaattataag

SEQ ID NO: 1359066 - DNA, 25 bp, Homo sapien
aaacaagtttggatacaagacgtag

SEQ ID NO: 1359067 - DNA, 25 bp, Homo sapien
aggacaggtgagctatttgtgtgaa

SEQ ID NO: 1359068 - DNA, 25 bp, Homo sapien
caggtgagctatttgtgtgaacaca

SEQ ID NO: 1359069 - DNA, 25 bp, Homo sapien
tggcccacaggagacacgcagtctt

SEQ ID NO: 1359070 - DNA, 25 bp, Homo sapien
tttcaggctgacgacaagactggca

SEQ ID NO: 1359071 - DNA, 25 bp, Homo sapien
gtataacctccctaagcccaagcat

SEQ ID NO: 1359072 - DNA, 25 bp, Homo sapien
cagtcttcaccactacggctgctag

SEQ ID NO: 1359073 - DNA, 25 bp, Homo sapien
aaacagtgaagctctccatcaaggc

SEQ ID NO: 1359074 - DNA, 25 bp, Homo sapien
ccctggcctgcagtgcggagattca

SEQ ID NO: 1359075 - DNA, 25 bp, Homo sapien
tggcacagcctgacaaaacagtgaa

SEQ ID NO: 1359076 - DNA, 25 bp, Homo sapien
gattcaggacatgcacctcctgtgg

SEQ ID NO: 1359077 - DNA, 25 bp, Homo sapien
ggtgacagttcacacagtgcaccag

SEQ ID NO: 1359078 - DNA, 25 bp, Homo sapien
caagggaatcacaaacacaagccac

SEQ ID NO: 1359079 - DNA, 25 bp, Homo sapien
gccaagggaatcacaaacacaagcc

SEQ ID NO: 1359080 - DNA, 25 bp, Homo sapien
ctgccaagggaatcacaaacacaag

SEQ ID NO: 1359081 - DNA, 25 bp, Homo sapien
agggaatcacaaacacaagccactc

SEQ ID NO: 1359082 - DNA, 25 bp, Homo sapien
tgggtagaagacacttcccatttaa

SEQ ID NO: 1359083 - DNA, 25 bp, Homo sapien
ctaaaattgcacttaacaaaagtat

SEQ ID NO: 1359084 - DNA, 25 bp, Homo sapien
tctgggtagaagacacttcccattt

SEQ ID NO: 1359085 - DNA, 25 bp, Homo sapien
taaagtcccaataatactatacata

SEQ ID NO: 1359086 - DNA, 25 bp, Homo sapien
caggcactgtccacctaacctagag

SEQ ID NO: 1359087 - DNA, 25 bp, Homo sapien
gaggcactcaatgttacgggtgttc

SEQ ID NO: 1359088 - DNA, 25 bp, Homo sapien
cttcctgaacggagtctgaggactc

SEQ ID NO: 1359089 - DNA, 25 bp, Homo sapien
gttcccaaagcaaatgcctgccgtt

SEQ ID NO: 1359090 - DNA, 25 bp, Homo sapien
ctatctctccgttggcacaccacag

SEQ ID NO: 1359091 - DNA, 25 bp, Homo sapien
ctctatctctccgttggcacaccac

SEQ ID NO: 1359092 - DNA, 25 bp, Homo sapien
gtggcaggacaatcctctatctctc

SEQ ID NO: 1359093 - DNA, 25 bp, Homo sapien
atcctctatctctccgttggcacac

SEQ ID NO: 1359094 - DNA, 25 bp, Homo sapien
tggttccttccgcaatctgtctgca

SEQ ID NO: 1359095 - DNA, 25 bp, Homo sapien
catagtggttccttccgcaatctgt

SEQ ID NO: 1359096 - DNA, 25 bp, Homo sapien
ccccttggcctcatagtggttcctt

SEQ ID NO: 1359097 - DNA, 25 bp, Homo sapien
cgcaatctgtctgcacaatgccagg

SEQ ID NO: 1359098 - DNA, 25 bp, Homo sapien
cgtggacgatgacgaaagaacacac

SEQ ID NO: 1359099 - DNA, 25 bp, Homo sapien
aaccagggcgtggacgatgacgaaa

SEQ ID NO: 1359100 - DNA, 25 bp, Homo sapien
cacgtaaggatcaaccagggcgtgg

SEQ ID NO: 1359101 - DNA, 25 bp, Homo sapien
taaggatcaaccagggcgtggacga

SEQ ID NO: 1359102 - DNA, 25 bp, Homo sapien
actgccaaaccagcctccttcacaa

SEQ ID NO: 1359103 - DNA, 25 bp, Homo sapien
aaagcaggcccccaccgctcgggtg

SEQ ID NO: 1359104 - DNA, 25 bp, Homo sapien
aggcccccaccgctcgggtgctcag

SEQ ID NO: 1359105 - DNA, 25 bp, Homo sapien
taaactctggtgagaaactccccag

SEQ ID NO: 1359106 - DNA, 25 bp, Homo sapien
tgttcagctgtaataaaagtggtaa

SEQ ID NO: 1359107 - DNA, 25 bp, Homo sapien
ccagggttctaatgaggagcgtgtg

SEQ ID NO: 1359108 - DNA, 25 bp, Homo sapien
gtggtaaagatgcagagggaattaa

SEQ ID NO: 1359109 - DNA, 25 bp, Homo sapien
ggttctaatgaggagcgtgtgttca

SEQ ID NO: 1359110 - DNA, 25 bp, Homo sapien
ttccactctggatcaactagctcct

SEQ ID NO: 1359111 - DNA, 25 bp, Homo sapien
catggagacagctctaatacttgca

SEQ ID NO: 1359112 - DNA, 25 bp, Homo sapien
actgccagagggaactcacctttct

SEQ ID NO: 1359113 - DNA, 25 bp, Homo sapien
tacttgcaaatggtcaaactgaaaa

SEQ ID NO: 1359114 - DNA, 25 bp, Homo sapien
ccacaagtccttcctacgcgtgtcc

SEQ ID NO: 1359115 - DNA, 25 bp, Homo sapien
atttcacatgttcctacagcaccag

SEQ ID NO: 1359116 - DNA, 25 bp, Homo sapien
ctacgcgtgtcctcacagccaagca

SEQ ID NO: 1359117 - DNA, 25 bp, Homo sapien
actgcaactgcaccatttcccctta

SEQ ID NO: 1359118 - DNA, 25 bp, Homo sapien
taggaaagtttaggacagcagaaaa

SEQ ID NO: 1359119 - DNA, 25 bp, Homo sapien
gttacactttatacactactcatag

SEQ ID NO: 1359120 - DNA, 25 bp, Homo sapien
catagaggtgtgattcaattgagta

SEQ ID NO: 1359121 - DNA, 25 bp, Homo sapien
cacaaagaaaagctgactctgcaca

SEQ ID NO: 1359122 - DNA, 25 bp, Homo sapien
aaataattctgaccaaagccaatgc

SEQ ID NO: 1359123 - DNA, 25 bp, Homo sapien
tctctctaggaagcagagaatcctg

SEQ ID NO: 1359124 - DNA, 25 bp, Homo sapien
ccttgcctgggtaggatgctgtaga

SEQ ID NO: 1359125 - DNA, 25 bp, Homo sapien
gacaacgccctctcatagacctgag

SEQ ID NO: 1359126 - DNA, 25 bp, Homo sapien
caatctggcagtcccctgggagtcc

SEQ ID NO: 1359127 - DNA, 25 bp, Homo sapien
gaatacagtgtctattcataggcac

SEQ ID NO: 1359128 - DNA, 25 bp, Homo sapien
gacctggccagttcatctctcctta

SEQ ID NO: 1359129 - DNA, 25 bp, Homo sapien
agggaagtcaccacactgacgctga

SEQ ID NO: 1359130 - DNA, 25 bp, Homo sapien
agccaaatcttaagtctttttatat

SEQ ID NO: 1359131 - DNA, 25 bp, Homo sapien
cactgggttttcccatctacttttg

SEQ ID NO: 1359132 - DNA, 25 bp, Homo sapien
tggcttaatacaagaccactgggtt

SEQ ID NO: 1359133 - DNA, 25 bp, Homo sapien
ttcttgttaaatttcaaagacacat

SEQ ID NO: 1359134 - DNA, 25 bp, Homo sapien
gagtgataagcctaaagaaacgctg

SEQ ID NO: 1359135 - DNA, 25 bp, Homo sapien
tgaaagaccagggaactgtcagcct

SEQ ID NO: 1359136 - DNA, 25 bp, Homo sapien
gaaacgctgtactacttatgcaacc

SEQ ID NO: 1359137 - DNA, 25 bp, Homo sapien
ctaaggagacaaggcgactaaatgc

SEQ ID NO: 1359138 - DNA, 25 bp, Homo sapien
gtctggataaccatcagttgtctgt

SEQ ID NO: 1359139 - DNA, 25 bp, Homo sapien
tctgtcagtcactctttcacatcaa

SEQ ID NO: 1359140 - DNA, 25 bp, Homo sapien
cagttgtctgtcagtcactctttca

SEQ ID NO: 1359141 - DNA, 25 bp, Homo sapien
tgtctgccaaatactgaagtctgga

SEQ ID NO: 1359142 - DNA, 25 bp, Homo sapien
cactcttgacactgtggtggagaat

SEQ ID NO: 1359143 - DNA, 25 bp, Homo sapien
tagtgcacgatcctgactctctgac

SEQ ID NO: 1359144 - DNA, 25 bp, Homo sapien
aacccaaggtcacaactagtgcacg

SEQ ID NO: 1359145 - DNA, 25 bp, Homo sapien
tgatctggacctgaacctgtgtgcc

SEQ ID NO: 1359146 - DNA, 25 bp, Homo sapien
gcccaggaggtagagcctacagtaa

SEQ ID NO: 1359147 - DNA, 25 bp, Homo sapien
aagcccaggaggtagagcctacagt

SEQ ID NO: 1359148 - DNA, 25 bp, Homo sapien
acagtaagccatgattatgcctctg

SEQ ID NO: 1359149 - DNA, 25 bp, Homo sapien
ggaggtagagcctacagtaagccat

SEQ ID NO: 1359150 - DNA, 25 bp, Homo sapien
ctgcagtggctaaacaggagctcat

SEQ ID NO: 1359151 - DNA, 25 bp, Homo sapien
gatggcaatcacataatgggaagtc

SEQ ID NO: 1359152 - DNA, 25 bp, Homo sapien
caaagatggcaatcacataatggga

SEQ ID NO: 1359153 - DNA, 25 bp, Homo sapien
tggcaatcacataatgggaagtcat

SEQ ID NO: 1359154 - DNA, 25 bp, Homo sapien
cagggcaaagatggcaatcacataa

SEQ ID NO: 1359155 - DNA, 25 bp, Homo sapien
cagtgcgtctcgtccagtcacttca

SEQ ID NO: 1359156 - DNA, 25 bp, Homo sapien
agtagtcttaaagtccctccttgca

SEQ ID NO: 1359157 - DNA, 25 bp, Homo sapien
ttaaagtccctccttgcaattttca

SEQ ID NO: 1359158 - DNA, 25 bp, Homo sapien
tccaacagtgcgtctcgtccagtca

SEQ ID NO: 1359159 - DNA, 25 bp, Homo sapien
gactgagggcagtgactatctaata

SEQ ID NO: 1359160 - DNA, 25 bp, Homo sapien
cactcaagcaaactagactgagggc

SEQ ID NO: 1359161 - DNA, 25 bp, Homo sapien
aaagcgtaatgtaagaaatttatct

SEQ ID NO: 1359162 - DNA, 25 bp, Homo sapien
gaatttctgaaaagcgtaatgtaag

SEQ ID NO: 1359163 - DNA, 25 bp, Homo sapien
ggaggccactatggttcaatcttga

SEQ ID NO: 1359164 - DNA, 25 bp, Homo sapien
ccaaatggtaatgttaggcagctta

SEQ ID NO: 1359165 - DNA, 25 bp, Homo sapien
caaaattaccagtcaagttgaggca

SEQ ID NO: 1359166 - DNA, 25 bp, Homo sapien
ttagaacagtccctagcacgtaaca

SEQ ID NO: 1359167 - DNA, 25 bp, Homo sapien
tattcaaactcacaaactaggatgg

SEQ ID NO: 1359168 - DNA, 25 bp, Homo sapien
gcttacccagctgtgttacattgga

SEQ ID NO: 1359169 - DNA, 25 bp, Homo sapien
ctaggatggctttttcacccaccct

SEQ ID NO: 1359170 - DNA, 25 bp, Homo sapien
cacccttgcaatactctaagaacca

SEQ ID NO: 1359171 - DNA, 25 bp, Homo sapien
acctgaaggcattttggcccccagt

SEQ ID NO: 1359172 - DNA, 25 bp, Homo sapien
cagagcactgaataaggacaattaa

SEQ ID NO: 1359173 - DNA, 25 bp, Homo sapien
taaggacaattaatttgccaagctc

SEQ ID NO: 1359174 - DNA, 25 bp, Homo sapien
tgaaggcattttggcccccagtcat

SEQ ID NO: 1359175 - DNA, 25 bp, Homo sapien
atacaggccctgtcctcaaggtcat

SEQ ID NO: 1359176 - DNA, 25 bp, Homo sapien
aattaaatctagtcctccattataa

SEQ ID NO: 1359177 - DNA, 25 bp, Homo sapien
tacaggccctgtcctcaaggtcatt

SEQ ID NO: 1359178 - DNA, 25 bp, Homo sapien
caacaatgtctggagaattaataaa

SEQ ID NO: 1359179 - DNA, 25 bp, Homo sapien
atagagcaacatcctttaactgaca

SEQ ID NO: 1359180 - DNA, 25 bp, Homo sapien
ccaagtaatggtgatcaacaatgtc

SEQ ID NO: 1359181 - DNA, 25 bp, Homo sapien
tcctttaactgacacaatggcatga

SEQ ID NO: 1359182 - DNA, 25 bp, Homo sapien
ctggagcgaccctggccggtaagta

SEQ ID NO: 1359183 - DNA, 25 bp, Homo sapien
agcactgcgcatcgccgggggcact

SEQ ID NO: 1359184 - DNA, 25 bp, Homo sapien
aaggacccgcggagaggaagagtga

SEQ ID NO: 1359185 - DNA, 25 bp, Homo sapien
gtaagtaggcactggcagcccgcgc

SEQ ID NO: 1359186 - DNA, 25 bp, Homo sapien
cacccgcagcaagttggaggaaagc

SEQ ID NO: 1359187 - DNA, 25 bp, Homo sapien
ctgcgccgcggcaaaactacgccat

SEQ ID NO: 1359188 - DNA, 25 bp, Homo sapien
ccgggaatcgcgcagggaaagtggc

SEQ ID NO: 1359189 - DNA, 25 bp, Homo sapien
gtgtgtccagcggagatccacccgc

SEQ ID NO: 1359190 - DNA, 25 bp, Homo sapien
ccatcaggccgacccggcgcactcg

SEQ ID NO: 1359191 - DNA, 25 bp, Homo sapien
aagaggaaagtgccgctcggcgtcc

SEQ ID NO: 1359192 - DNA, 25 bp, Homo sapien
cgaaaccctcgattacccccatcag

SEQ ID NO: 1359193 - DNA, 25 bp, Homo sapien
gaaagtgccgctcggcgtccccgaa

SEQ ID NO: 1359194 - DNA, 25 bp, Homo sapien
attcattctgtccctgtgctttttc

SEQ ID NO: 1359195 - DNA, 25 bp, Homo sapien
tcattctgtccctgtgctttttccc

SEQ ID NO: 1359196 - DNA, 25 bp, Homo sapien
cattctgtccctgtgctttttccca

SEQ ID NO: 1359197 - DNA, 25 bp, Homo sapien
ttctgtccctgtgctttttcccaac

SEQ ID NO: 1359198 - DNA, 25 bp, Homo sapien
ctccggtcccgcttgttgtcacgct

SEQ ID NO: 1359199 - DNA, 25 bp, Homo sapien
ttgtcacgctctgatggtgggcgcc

SEQ ID NO: 1359200 - DNA, 25 bp, Homo sapien
gggcgccggcggagtcttgcctctt

SEQ ID NO: 1359201 - DNA, 25 bp, Homo sapien
tgggcgccggcggagtcttgcctct

SEQ ID NO: 1359202 - DNA, 25 bp, Homo sapien
tctacacacaaggattctctgccgt

SEQ ID NO: 1359203 - DNA, 25 bp, Homo sapien
caccaaagatctacacacaaggatt

SEQ ID NO: 1359204 - DNA, 25 bp, Homo sapien
tctgccgtccctctgatgttgtgtc

SEQ ID NO: 1359205 - DNA, 25 bp, Homo sapien
acaaggattctctgccgtccctctg

SEQ ID NO: 1359206 - DNA, 25 bp, Homo sapien
gcttcaggctcatgcggttctttca

SEQ ID NO: 1359207 - DNA, 25 bp, Homo sapien
ttcctgcacagcctgatgttaagac

SEQ ID NO: 1359208 - DNA, 25 bp, Homo sapien
gatgttaagaccatgcgcagcttca

SEQ ID NO: 1359209 - DNA, 25 bp, Homo sapien
gctcatgcggttctttcagtttgaa

SEQ ID NO: 1359210 - DNA, 25 bp, Homo sapien
gctgctgtagtagttccggagagtc

SEQ ID NO: 1359211 - DNA, 25 bp, Homo sapien
gaagaatgggaagcatatttgcgtc

SEQ ID NO: 1359212 - DNA, 25 bp, Homo sapien
gagccaagtccccatgggcattggg

SEQ ID NO: 1359213 - DNA, 25 bp, Homo sapien
tgtccaaggagcactgaagaatggg

SEQ ID NO: 1359214 - DNA, 25 bp, Homo sapien
gattataggcgggcaccatcacatc

SEQ ID NO: 1359215 - DNA, 25 bp, Homo sapien
ttataggcgggcaccatcacatcca

SEQ ID NO: 1359216 - DNA, 25 bp, Homo sapien
agtgcacaggctattcacagctgag

SEQ ID NO: 1359217 - DNA, 25 bp, Homo sapien
ttcacagctgagatcccattactga

SEQ ID NO: 1359218 - DNA, 25 bp, Homo sapien
tataggtccttgatgccaacaatcc

SEQ ID NO: 1359219 - DNA, 25 bp, Homo sapien
tttctagcatactccttataggtcc

SEQ ID NO: 1359220 - DNA, 25 bp, Homo sapien
cagtttcaagcatcctattctctca

SEQ ID NO: 1359221 - DNA, 25 bp, Homo sapien
taatcctagtgttttcgcagctcct

SEQ ID NO: 1359222 - DNA, 25 bp, Homo sapien
gagctaccatgccagtctacagtgt

SEQ ID NO: 1359223 - DNA, 25 bp, Homo sapien
taagcatgagacatttggagcaaca

SEQ ID NO: 1359224 - DNA, 25 bp, Homo sapien
agtgtttttaatgcccagacttggg

SEQ ID NO: 1359225 - DNA, 25 bp, Homo sapien
gaaacttaaacctcttgcactcata

SEQ ID NO: 1359226 - DNA, 25 bp, Homo sapien
tcagtaagaactcacacactggtgg

SEQ ID NO: 1359227 - DNA, 25 bp, Homo sapien
cccaaaagcaggagctactatgctt

SEQ ID NO: 1359228 - DNA, 25 bp, Homo sapien
caaatgttgggagaggatcagtaag

SEQ ID NO: 1359229 - DNA, 25 bp, Homo sapien
acataacaacattggctgagtgcag

SEQ ID NO: 1359230 - DNA, 25 bp, Homo sapien
tcactcgcggtcatgaggcggagac

SEQ ID NO: 1359231 - DNA, 25 bp, Homo sapien
ggtcatgaggcggagaccagcccag

SEQ ID NO: 1359232 - DNA, 25 bp, Homo sapien
actcgcggtcatgaggcggagacca

SEQ ID NO: 1359233 - DNA, 25 bp, Homo sapien
gatcactcgcggtcatgaggcggag

SEQ ID NO: 1359234 - DNA, 25 bp, Homo sapien
ttgaagcattcgttgtatccctggg

SEQ ID NO: 1359235 - DNA, 25 bp, Homo sapien
ggactgtcactctcacggcttccag

SEQ ID NO: 1359236 - DNA, 25 bp, Homo sapien
catggaagtttgtcgctgacctgtg

SEQ ID NO: 1359237 - DNA, 25 bp, Homo sapien
tctgccgcgtcacgttgttgaagca

SEQ ID NO: 1359238 - DNA, 25 bp, Homo sapien
ttgggcacccactgctacgtgcgga

SEQ ID NO: 1359239 - DNA, 25 bp, Homo sapien
tggtccctggtctactgctactgcg

SEQ ID NO: 1359240 - DNA, 25 bp, Homo sapien
tcacccgctcccgaggaagggcagt

SEQ ID NO: 1359241 - DNA, 25 bp, Homo sapien
tcaaacttttgtggagcctcggcaa

SEQ ID NO: 1359242 - DNA, 25 bp, Homo sapien
aatacgtttgtagtactctccacag

SEQ ID NO: 1359243 - DNA, 25 bp, Homo sapien
gctggcaggcacagaagattcttca

SEQ ID NO: 1359244 - DNA, 25 bp, Homo sapien
cagcaatgaggaagggaacttcgtc

SEQ ID NO: 1359245 - DNA, 25 bp, Homo sapien
cactggttatttgcacctggagagc

SEQ ID NO: 1359246 - DNA, 25 bp, Homo sapien
tgagataatttccatgcagttctgc

SEQ ID NO: 1359247 - DNA, 25 bp, Homo sapien
gagataatttccatgcagttctgcc

SEQ ID NO: 1359248 - DNA, 25 bp, Homo sapien
attgtccctttgacctacatagaga

SEQ ID NO: 1359249 - DNA, 25 bp, Homo sapien
tattgtccctttgacctacatagag

SEQ ID NO: 1359250 - DNA, 25 bp, Homo sapien
cagggtgactgagcacaagagaaaa

SEQ ID NO: 1359251 - DNA, 25 bp, Homo sapien
aacagggtgactgagcacaagagaa

SEQ ID NO: 1359252 - DNA, 25 bp, Homo sapien
gctcccagggctggagaaaatttta

SEQ ID NO: 1359253 - DNA, 25 bp, Homo sapien
gggtgactgagcacaagagaaaaaa

SEQ ID NO: 1359254 - DNA, 25 bp, Homo sapien
tcatccatatcaggaaccaagtaat

SEQ ID NO: 1359255 - DNA, 25 bp, Homo sapien
catatcaggaaccaagtaatactgt

SEQ ID NO: 1359256 - DNA, 25 bp, Homo sapien
caggaaccaagtaatactgtaatgg

SEQ ID NO: 1359257 - DNA, 25 bp, Homo sapien
tccatatcaggaaccaagtaatact

SEQ ID NO: 1359258 - DNA, 25 bp, Homo sapien
catcagaatgatcagtaaaccaggt

SEQ ID NO: 1359259 - DNA, 25 bp, Homo sapien
gaatgatcagtaaaccaggtaaaga

SEQ ID NO: 1359260 - DNA, 25 bp, Homo sapien
ctgcatcagaatgatcagtaaacca

SEQ ID NO: 1359261 - DNA, 25 bp, Homo sapien
tcagaatgatcagtaaaccaggtaa

SEQ ID NO: 1359262 - DNA, 25 bp, Homo sapien
cttcttttgaagtgggagtggagac

SEQ ID NO: 1359263 - DNA, 25 bp, Homo sapien
tgcagaggccgatgtctcctccagt

SEQ ID NO: 1359264 - DNA, 25 bp, Homo sapien
gaacgtttcgtcacatcctttccag

SEQ ID NO: 1359265 - DNA, 25 bp, Homo sapien
gagactggcgtttaggggccatgct

SEQ ID NO: 1359266 - DNA, 25 bp, Homo sapien
gtatccatggcacttaacttcagaa

SEQ ID NO: 1359267 - DNA, 25 bp, Homo sapien
aacttcagaaagtccagtcctatga

SEQ ID NO: 1359268 - DNA, 25 bp, Homo sapien
tggatgtcacaaaattctcaagaga

SEQ ID NO: 1359269 - DNA, 25 bp, Homo sapien
ggcttatatcagcaaacccatgtta

SEQ ID NO: 1359270 - DNA, 25 bp, Homo sapien
agggactccccaacaattgaacact

SEQ ID NO: 1359271 - DNA, 25 bp, Homo sapien
aggccatgtggaccatgaaacccac

SEQ ID NO: 1359272 - DNA, 25 bp, Homo sapien
gaggccatgtggaccatgaaaccca

SEQ ID NO: 1359273 - DNA, 25 bp, Homo sapien
tttggaggccatgtggaccatgaaa

SEQ ID NO: 1359274 - DNA, 25 bp, Homo sapien
tggaggccatgtggaccatgaaacc

SEQ ID NO: 1359275 - DNA, 25 bp, Homo sapien
aaattcattgtcatgctgggaaatg

SEQ ID NO: 1359276 - DNA, 25 bp, Homo sapien
ctgggaaatgagcttgacaaagtgg

SEQ ID NO: 1359277 - DNA, 25 bp, Homo sapien
ggaaatgagcttgacaaagtggtca

SEQ ID NO: 1359278 - DNA, 25 bp, Homo sapien
caaattcattgtcatgctgggaaat

SEQ ID NO: 1359279 - DNA, 25 bp, Homo sapien
ctgaaggtggaagagttggtgtcac

SEQ ID NO: 1359280 - DNA, 25 bp, Homo sapien
gagggccccctctgatgctgcttta

SEQ ID NO: 1359281 - DNA, 25 bp, Homo sapien
tctggtgctcattgtagccccagat

SEQ ID NO: 1359282 - DNA, 25 bp, Homo sapien
cctctgatgctgctttaccaccttg

SEQ ID NO: 1359283 - DNA, 25 bp, Homo sapien
tgctgctttaccaccttgatgtcat

SEQ ID NO: 1359284 - DNA, 25 bp, Homo sapien
aggttcatgactaacatgttggcag

SEQ ID NO: 1359285 - DNA, 25 bp, Homo sapien
tgatcttgaccagggagctaagcag

SEQ ID NO: 1359286 - DNA, 25 bp, Homo sapien
gcatggactgtgatcctgattcctc

SEQ ID NO: 1359287 - DNA, 25 bp, Homo sapien
ggatgatcttgaccagggagctaag

SEQ ID NO: 1359288 - DNA, 25 bp, Homo sapien
catggactgtgatcctgattcctcc

SEQ ID NO: 1359289 - DNA, 25 bp, Homo sapien
cattgatgtcaagcttcctgttttc

SEQ ID NO: 1359290 - DNA, 25 bp, Homo sapien
cagcaccagcgtcatcctgtttgat

SEQ ID NO: 1359291 - DNA, 25 bp, Homo sapien
cgtcatcctgtttgattttggtggg

SEQ ID NO: 1359292 - DNA, 25 bp, Homo sapien
ataatcagcaccagcgtcatcctgt

SEQ ID NO: 1359293 - DNA, 25 bp, Homo sapien
tgacgatgccgtggaacttggccat

SEQ ID NO: 1359294 - DNA, 25 bp, Homo sapien
cttgacgatgccgtggaacttggcc

SEQ ID NO: 1359295 - DNA, 25 bp, Homo sapien
acgatgccgtggaacttggccatgg

SEQ ID NO: 1359296 - DNA, 25 bp, Homo sapien
ttgacgatgccgtggaacttggcca

SEQ ID NO: 1359297 - DNA, 25 bp, Homo sapien
gtagaccatgtagttgaggtcagtg

SEQ ID NO: 1359298 - DNA, 25 bp, Homo sapien
gaccatgtagttgaggtcagtgaag

SEQ ID NO: 1359299 - DNA, 25 bp, Homo sapien
tgtagttgaggtcagtgaaggggtc

SEQ ID NO: 1359300 - DNA, 25 bp, Homo sapien
catgtagttgaggtcagtgaagggg

SEQ ID NO: 1359301 - DNA, 25 bp, Homo sapien
atggtaacagcatctactttgctag

SEQ ID NO: 1359302 - DNA, 25 bp, Homo sapien
gatgggttctcgcattattgctcag

SEQ ID NO: 1359303 - DNA, 25 bp, Homo sapien
cttttagatagcaaatagttatgtc

SEQ ID NO: 1359304 - DNA, 25 bp, Homo sapien
tgctatccagtctcataatctcctt

SEQ ID NO: 1359305 - DNA, 25 bp, Homo sapien
tgagtgtaagtctaccattgtactt

SEQ ID NO: 1359306 - DNA, 25 bp, Homo sapien
cagagttcattctaccacagtcatt

SEQ ID NO: 1359307 - DNA, 25 bp, Homo sapien
tccgattggtatgtgttcttgagct

SEQ ID NO: 1359308 - DNA, 25 bp, Homo sapien
cattctaccacagtcattgaagaaa

SEQ ID NO: 1359309 - DNA, 25 bp, Homo sapien
tgtaaatctttgtcccacagaaccc

SEQ ID NO: 1359310 - DNA, 25 bp, Homo sapien
gatgttttccatcaatagattcgaa

SEQ ID NO: 1359311 - DNA, 25 bp, Homo sapien
gccactgttgcatgtctgcaggatg

SEQ ID NO: 1359312 - DNA, 25 bp, Homo sapien
agcttcttttggaactgtgccactg

SEQ ID NO: 1359313 - DNA, 25 bp, Homo sapien
tagattcgaagacaatcctgtctgt

SEQ ID NO: 1359314 - DNA, 25 bp, Homo sapien
tggaaaggaagctcattggcactag

SEQ ID NO: 1359315 - DNA, 25 bp, Homo sapien
ttcagagcctacacacagactgttg

SEQ ID NO: 1359316 - DNA, 25 bp, Homo sapien
caaggcaggttgtttcagcagctac

SEQ ID NO: 1359317 - DNA, 25 bp, Homo sapien
caaactctgatttgagtgaaggcgg

SEQ ID NO: 1359318 - DNA, 25 bp, Homo sapien
gcatggcagatatacttcttctcca

SEQ ID NO: 1359319 - DNA, 25 bp, Homo sapien
agaaagtttgaatctgcatggcaga

SEQ ID NO: 1359320 - DNA, 25 bp, Homo sapien
atctgcatggcagatatacttcttc

SEQ ID NO: 1359321 - DNA, 25 bp, Homo sapien
agagaaagtttgaatctgcatggca

SEQ ID NO: 1359322 - DNA, 25 bp, Homo sapien
ccagccttggtgtaaggaactacag

SEQ ID NO: 1359323 - DNA, 25 bp, Homo sapien
ggcttgctggagaagccaaaaccag

SEQ ID NO: 1359324 - DNA, 25 bp, Homo sapien
tctgcaatgaggagatgatgtcttc

SEQ ID NO: 1359325 - DNA, 25 bp, Homo sapien
gaagtatgaggagtccactctgcac

SEQ ID NO: 1359326 - DNA, 25 bp, Homo sapien
tgaattccctatgacagaatctgtc

SEQ ID NO: 1359327 - DNA, 25 bp, Homo sapien
tgtattgtcatctcactttggaaga

SEQ ID NO: 1359328 - DNA, 25 bp, Homo sapien
taagccagtaagtaacaatgattgc

SEQ ID NO: 1359329 - DNA, 25 bp, Homo sapien
acctccatgacccagcgtacttgta

SEQ ID NO: 1359330 - DNA, 25 bp, Homo sapien
tgaaaatcaattccggacaactgag

SEQ ID NO: 1359331 - DNA, 25 bp, Homo sapien
tttggataaactgaaggccactttg

SEQ ID NO: 1359332 - DNA, 25 bp, Homo sapien
caggcccctgtatgtccttttgaca

SEQ ID NO: 1359333 - DNA, 25 bp, Homo sapien
gacaactgagtctaacacgcaaaaa

SEQ ID NO: 1359334 - DNA, 25 bp, Homo sapien
agtggaggggcccaacttgtcatac

SEQ ID NO: 1359335 - DNA, 25 bp, Homo sapien
aacagtggaggggcccaacttgtca

SEQ ID NO: 1359336 - DNA, 25 bp, Homo sapien
gaagcatttgtggtgaacagtggag

SEQ ID NO: 1359337 - DNA, 25 bp, Homo sapien
tgaacagtggaggggcccaacttgt

SEQ ID NO: 1359338 - DNA, 25 bp, Homo sapien
agtactttcgctctcggggtgcaat

SEQ ID NO: 1359339 - DNA, 25 bp, Homo sapien
tactttcgctctcggggtgcaatga

SEQ ID NO: 1359340 - DNA, 25 bp, Homo sapien
gagtactttcgctctcggggtgcaa

SEQ ID NO: 1359341 - DNA, 25 bp, Homo sapien
cgagtactttcgctctcggggtgca

SEQ ID NO: 1359342 - DNA, 25 bp, Homo sapien
ctttttgtcatcagctgtagctgtt

SEQ ID NO: 1359343 - DNA, 25 bp, Homo sapien
ccagctttttgtcatcagctgtagc

SEQ ID NO: 1359344 - DNA, 25 bp, Homo sapien
agctttttgtcatcagctgtagctg

SEQ ID NO: 1359345 - DNA, 25 bp, Homo sapien
cagctgtagctgttctttgtaccat

SEQ ID NO: 1359346 - DNA, 25 bp, Homo sapien
ttctggacctgatccggaagtttgg

SEQ ID NO: 1359347 - DNA, 25 bp, Homo sapien
gtgagctgtacccttgtccccattc

SEQ ID NO: 1359348 - DNA, 25 bp, Homo sapien
tctgtgagctgtacccttgtcccca

SEQ ID NO: 1359349 - DNA, 25 bp, Homo sapien
ttgtccccattctggacctgatccg

SEQ ID NO: 1359350 - DNA, 25 bp, Homo sapien
tacggacaccagctgatgtctggaa

SEQ ID NO: 1359351 - DNA, 25 bp, Homo sapien
cattgccctgatatttatcttacgg

SEQ ID NO: 1359352 - DNA, 25 bp, Homo sapien
tgaaggggcaagaaatgattgttcc

SEQ ID NO: 1359353 - DNA, 25 bp, Homo sapien
aaactcctcagctcacaagacttct

SEQ ID NO: 1359354 - DNA, 25 bp, Homo sapien
ttcatgatgttgcaagggcttctcc

SEQ ID NO: 1359355 - DNA, 25 bp, Homo sapien
tgcactatagcaaaggtgagtcacc

SEQ ID NO: 1359356 - DNA, 25 bp, Homo sapien
tctatgaatcgaggtgacagggttc

SEQ ID NO: 1359357 - DNA, 25 bp, Homo sapien
cttatgagtttagggcttggacaca

SEQ ID NO: 1359358 - DNA, 25 bp, Homo sapien
gactactctagtaactcatacatag

SEQ ID NO: 1359359 - DNA, 25 bp, Homo sapien
ggaacatatccccattaaagcaatt

SEQ ID NO: 1359360 - DNA, 25 bp, Homo sapien
gatgatcaagagatttgctgaaaga

SEQ ID NO: 1359361 - DNA, 25 bp, Homo sapien
taggcagacttaggtcttccttgct

SEQ ID NO: 1359362 - DNA, 25 bp, Homo sapien
gatttaacgctctttagcaaaggac

SEQ ID NO: 1359363 - DNA, 25 bp, Homo sapien
cctattataacttctgctggagagg

SEQ ID NO: 1359364 - DNA, 25 bp, Homo sapien
tgatagccaacttgacactaggagt

SEQ ID NO: 1359365 - DNA, 25 bp, Homo sapien
tacatagcatctaactgcagcagaa

SEQ ID NO: 1359366 - DNA, 25 bp, Homo sapien
catatgtgggcattatttaccatta

SEQ ID NO: 1359367 - DNA, 25 bp, Homo sapien
aaaaaacctgttctatagtgtatca

SEQ ID NO: 1359368 - DNA, 25 bp, Homo sapien
cctgttctatagtgtatcattatag

SEQ ID NO: 1359369 - DNA, 25 bp, Homo sapien
agtatttaggacatatgtgggcatt

SEQ ID NO: 1359370 - DNA, 25 bp, Homo sapien
tccactcgagctagaacactttcaa

SEQ ID NO: 1359371 - DNA, 25 bp, Homo sapien
ctcgagctagaacactttcaatcaa

SEQ ID NO: 1359372 - DNA, 25 bp, Homo sapien
caatgagttcttccactcgagctag

SEQ ID NO: 1359373 - DNA, 25 bp, Homo sapien
gagttcttccactcgagctagaaca

SEQ ID NO: 1359374 - DNA, 25 bp, Homo sapien
cagctggaggtagcttaggaatatt

SEQ ID NO: 1359375 - DNA, 25 bp, Homo sapien
gcttaggaatatttaagaccaggta

SEQ ID NO: 1359376 - DNA, 25 bp, Homo sapien
gaggtagcttaggaatatttaagac

SEQ ID NO: 1359377 - DNA, 25 bp, Homo sapien
tagcttaggaatatttaagaccagg

SEQ ID NO: 1359378 - DNA, 25 bp, Homo sapien
tattagggatctcttctccacttac

SEQ ID NO: 1359379 - DNA, 25 bp, Homo sapien
gcatattagggatctcttctccact

SEQ ID NO: 1359380 - DNA, 25 bp, Homo sapien
ttcaggaggcatattagggatctct

SEQ ID NO: 1359381 - DNA, 25 bp, Homo sapien
ggaggcatattagggatctcttctc

SEQ ID NO: 1359382 - DNA, 25 bp, Homo sapien
tagaacaaagatctttagatttctg

SEQ ID NO: 1359383 - DNA, 25 bp, Homo sapien
gaacaaagatctttagatttctggg

SEQ ID NO: 1359384 - DNA, 25 bp, Homo sapien
caaagatctttagatttctgggcct

SEQ ID NO: 1359385 - DNA, 25 bp, Homo sapien
tatagaacaaagatctttagatttc

SEQ ID NO: 1359386 - DNA, 25 bp, Homo sapien
gatatacggaagagatcacacgatt

SEQ ID NO: 1359387 - DNA, 25 bp, Homo sapien
taaaagcaccaccacagatatacgg

SEQ ID NO: 1359388 - DNA, 25 bp, Homo sapien
ttccggtaatgcctataaaagcacc

SEQ ID NO: 1359389 - DNA, 25 bp, Homo sapien
tgtgacacttaactctcagatttca

SEQ ID NO: 1359390 - DNA, 25 bp, Homo sapien
ttccaagttctgtccataatccagt

SEQ ID NO: 1359391 - DNA, 25 bp, Homo sapien
atttctgcttcataatgtgcttttg

SEQ ID NO: 1359392 - DNA, 25 bp, Homo sapien
tctgcttcataatgtgcttttgaca

SEQ ID NO: 1359393 - DNA, 25 bp, Homo sapien
taagtcctatatgaagtggctttaa

SEQ ID NO: 1359394 - DNA, 25 bp, Homo sapien
tgcaccatttggatagctccaggtt

SEQ ID NO: 1359395 - DNA, 25 bp, Homo sapien
gattgcctactattaaacgcgataa

SEQ ID NO: 1359396 - DNA, 25 bp, Homo sapien
cagacgtctcttcctctatgagcca

SEQ ID NO: 1359397 - DNA, 25 bp, Homo sapien
gggcactacgcttatcactgcacca

SEQ ID NO: 1359398 - DNA, 25 bp, Homo sapien
ttcaattgatatccacaccacggat

SEQ ID NO: 1359399 - DNA, 25 bp, Homo sapien
caagtatggcctttcaattgatatc

SEQ ID NO: 1359400 - DNA, 25 bp, Homo sapien
cacaccacggatctagttctagagg

SEQ ID NO: 1359401 - DNA, 25 bp, Homo sapien
tctagttctagaggatgctttccct

SEQ ID NO: 1359402 - DNA, 25 bp, Homo sapien
taaaatctacacatgtctatgctga

SEQ ID NO: 1359403 - DNA, 25 bp, Homo sapien
ttagcatctatcaacttatcttggg

SEQ ID NO: 1359404 - DNA, 25 bp, Homo sapien
tattttgacccaagtagtacatgtt

SEQ ID NO: 1359405 - DNA, 25 bp, Homo sapien
gaatactagagaggatctaaaaccc

SEQ ID NO: 1359406 - DNA, 25 bp, Homo sapien
tattactcttatgtgcactgactgc

SEQ ID NO: 1359407 - DNA, 25 bp, Homo sapien
gtgtagccacacagtataacaagca

SEQ ID NO: 1359408 - DNA, 25 bp, Homo sapien
tcatcatttctatgggttggtaaca

SEQ ID NO: 1359409 - DNA, 25 bp, Homo sapien
caggaatttccttaaccagtgtagc

SEQ ID NO: 1359410 - DNA, 25 bp, Homo sapien
aatactagatatggctgaaatcccc

SEQ ID NO: 1359411 - DNA, 25 bp, Homo sapien
ggcagaacccactgcaactgatggc

SEQ ID NO: 1359412 - DNA, 25 bp, Homo sapien
cataaagagtatagggaaaacacct

SEQ ID NO: 1359413 - DNA, 25 bp, Homo sapien
gatggctttcaagactaggttactg

SEQ ID NO: 1359414 - DNA, 25 bp, Homo sapien
agaagaacaaagttggcagactcac

SEQ ID NO: 1359415 - DNA, 25 bp, Homo sapien
taaaaatagccaatacaattttgaa

SEQ ID NO: 1359416 - DNA, 25 bp, Homo sapien
ttaaaaatagccaatacaattttga

SEQ ID NO: 1359417 - DNA, 25 bp, Homo sapien
aaaagaagaacaaagttggcagact

SEQ ID NO: 1359418 - DNA, 25 bp, Homo sapien
tagagtccaaaaatagacccatact

SEQ ID NO: 1359419 - DNA, 25 bp, Homo sapien
tacctttgtgatctgggttaacaaa

SEQ ID NO: 1359420 - DNA, 25 bp, Homo sapien
tttgtatccatgaaaaactttcctc

SEQ ID NO: 1359421 - DNA, 25 bp, Homo sapien
gataaagttgccaagataattcagt

SEQ ID NO: 1359422 - DNA, 25 bp, Homo sapien
aaactgcataactaattggcaaaat

SEQ ID NO: 1359423 - DNA, 25 bp, Homo sapien
cattatctttgataaccaaatacct

SEQ ID NO: 1359424 - DNA, 25 bp, Homo sapien
ttatctttgataaccaaatacctca

SEQ ID NO: 1359425 - DNA, 25 bp, Homo sapien
ttcattatctttgataaccaaatac

SEQ ID NO: 1359426 - DNA, 25 bp, Homo sapien
tatctttgataaccaaatacctcaa

SEQ ID NO: 1359427 - DNA, 25 bp, Homo sapien
ctatctgagttttgcagtaaatctg

SEQ ID NO: 1359428 - DNA, 25 bp, Homo sapien
tatctgagttttgcagtaaatctgt

SEQ ID NO: 1359429 - DNA, 25 bp, Homo sapien
atctgagttttgcagtaaatctgtt

SEQ ID NO: 1359430 - DNA, 25 bp, Homo sapien
ctgtaaaccatttgttgttacgtgt

SEQ ID NO: 1359431 - DNA, 25 bp, Homo sapien
tccacacctgagtgattacttgtat

SEQ ID NO: 1359432 - DNA, 25 bp, Homo sapien
cacacctgagtgattacttgtattc

SEQ ID NO: 1359433 - DNA, 25 bp, Homo sapien
ctccacacctgagtgattacttgta

SEQ ID NO: 1359434 - DNA, 25 bp, Homo sapien
cacctgagtgattacttgtattcaa

SEQ ID NO: 1359435 - DNA, 25 bp, Homo sapien
atccaacttgttaatatacagctga

SEQ ID NO: 1359436 - DNA, 25 bp, Homo sapien
caacttgttaatatacagctgaagc

SEQ ID NO: 1359437 - DNA, 25 bp, Homo sapien
tatacagctgaagcatagctaaact

SEQ ID NO: 1359438 - DNA, 25 bp, Homo sapien
tacagctgaagcatagctaaactct

SEQ ID NO: 1359439 - DNA, 25 bp, Homo sapien
ttttatgcatgtaatacatccacac

SEQ ID NO: 1359440 - DNA, 25 bp, Homo sapien
ccattttatgcatgtaatacatcca

SEQ ID NO: 1359441 - DNA, 25 bp, Homo sapien
tgtaatacatccacacttgtacctc

SEQ ID NO: 1359442 - DNA, 25 bp, Homo sapien
tgcatgtaatacatccacacttgta

SEQ ID NO: 1359443 - DNA, 25 bp, Homo sapien
ctcaatggggcaaagtgtcattact

SEQ ID NO: 1359444 - DNA, 25 bp, Homo sapien
tcaatggggcaaagtgtcattactt

SEQ ID NO: 1359445 - DNA, 25 bp, Homo sapien
tattctcaataaactattctccagc

SEQ ID NO: 1359446 - DNA, 25 bp, Homo sapien
ttctaagtactggtaaagtagacta

SEQ ID NO: 1359447 - DNA, 25 bp, Homo sapien
ttctattctcaataaactattctcc

SEQ ID NO: 1359448 - DNA, 25 bp, Homo sapien
aaactcttgatttctaagtactggt

SEQ ID NO: 1359449 - DNA, 25 bp, Homo sapien
caatcctttggagataacagactct

SEQ ID NO: 1359450 - DNA, 25 bp, Homo sapien
atcctttggagataacagactcttc

SEQ ID NO: 1359451 - DNA, 25 bp, Homo sapien
ctttggagataacagactcttctgt

SEQ ID NO: 1359452 - DNA, 25 bp, Homo sapien
cctttggagataacagactcttctg

SEQ ID NO: 1359453 - DNA, 25 bp, Homo sapien
gacttcaatgtgccccatattaaac

SEQ ID NO: 1359454 - DNA, 25 bp, Homo sapien
acttcaatgtgccccatattaaact

SEQ ID NO: 1359455 - DNA, 25 bp, Homo sapien
cttcaatgtgccccatattaaactg

SEQ ID NO: 1359456 - DNA, 25 bp, Homo sapien
aattcaaggtaattccaagttctct

SEQ ID NO: 1359457 - DNA, 25 bp, Homo sapien
cttaagaccattggaagctgatcaa

SEQ ID NO: 1359458 - DNA, 25 bp, Homo sapien
tatggatgccctgtacaaatactag

SEQ ID NO: 1359459 - DNA, 25 bp, Homo sapien
cagagaagccattgagtctgctaac

SEQ ID NO: 1359460 - DNA, 25 bp, Homo sapien
gagatccaatctgttcccaaatctg

SEQ ID NO: 1359461 - DNA, 25 bp, Homo sapien
taacttgtaccaaagtgaggatggc

SEQ ID NO: 1359462 - DNA, 25 bp, Homo sapien
tcctgtactacagcctttgggacat

SEQ ID NO: 1359463 - DNA, 25 bp, Homo sapien
tgctacgtgcatccttactgctggc

SEQ ID NO: 1359464 - DNA, 25 bp, Homo sapien
tcaatgttcatggagataaccccta

SEQ ID NO: 1359465 - DNA, 25 bp, Homo sapien
acaccttttataccacagggcctgg

SEQ ID NO: 1359466 - DNA, 25 bp, Homo sapien
tataacaggctagtctcatggtcct

SEQ ID NO: 1359467 - DNA, 25 bp, Homo sapien
caattcctgctatgatcctgggaaa

SEQ ID NO: 1359468 - DNA, 25 bp, Homo sapien
aagtttccagtagggtggtgcatcc

SEQ ID NO: 1359469 - DNA, 25 bp, Homo sapien
aacatcctagggcttgagactggca

SEQ ID NO: 1359470 - DNA, 25 bp, Homo sapien
tctggaagctgaacgcacgaagttt

SEQ ID NO: 1359471 - DNA, 25 bp, Homo sapien
tgatagctgcgtctcctggatagcc

SEQ ID NO: 1359472 - DNA, 25 bp, Homo sapien
tattatttctgatgcaaaatacctg

SEQ ID NO: 1359473 - DNA, 25 bp, Homo sapien
agactgttcaaagaattgtgctgtc

SEQ ID NO: 1359474 - DNA, 25 bp, Homo sapien
tgttcaaagaattgtgctgtcagca

SEQ ID NO: 1359475 - DNA, 25 bp, Homo sapien
ttcaaagaattgtgctgtcagcaaa

SEQ ID NO: 1359476 - DNA, 25 bp, Homo sapien
aagcagtagcactacaggtatatgc

SEQ ID NO: 1359477 - DNA, 25 bp, Homo sapien
ttcccaagcagtagcactacaggta

SEQ ID NO: 1359478 - DNA, 25 bp, Homo sapien
atgctgtatcaactgaaccccacat

SEQ ID NO: 1359479 - DNA, 25 bp, Homo sapien
gaaactagatttctatttacatgtc

SEQ ID NO: 1359480 - DNA, 25 bp, Homo sapien
ttccacaaaaggcttagtgaactct

SEQ ID NO: 1359481 - DNA, 25 bp, Homo sapien
tagtgaactctattaaggccttgca

SEQ ID NO: 1359482 - DNA, 25 bp, Homo sapien
tctattaaggccttgcaacactgac

SEQ ID NO: 1359483 - DNA, 25 bp, Homo sapien
ggcttagtgaactctattaaggcct

SEQ ID NO: 1359484 - DNA, 25 bp, Homo sapien
gctgattccaaagggtagacaatgc

SEQ ID NO: 1359485 - DNA, 25 bp, Homo sapien
aatatgccttgttatgaagtttctg

SEQ ID NO: 1359486 - DNA, 25 bp, Homo sapien
tgctaatccaattgaatatgccttg

SEQ ID NO: 1359487 - DNA, 25 bp, Homo sapien
tcttttgagtatggaacaggaagaa

SEQ ID NO: 1359488 - DNA, 25 bp, Homo sapien
aaacagagatcaagttgtcgctcat

SEQ ID NO: 1359489 - DNA, 25 bp, Homo sapien
caatactgttactgcactcagccat

SEQ ID NO: 1359490 - DNA, 25 bp, Homo sapien
gggctcttcaatcagttcaagcaaa

SEQ ID NO: 1359491 - DNA, 25 bp, Homo sapien
agagggctcttcaatcagttcaagc

SEQ ID NO: 1359492 - DNA, 25 bp, Homo sapien
ttcaatcagttcaagcaaacccaac

SEQ ID NO: 1359493 - DNA, 25 bp, Homo sapien
ctgtttgtaatggctgaagcaaaag

SEQ ID NO: 1359494 - DNA, 25 bp, Homo sapien
caataaatcaaagatcaaaaaataa

SEQ ID NO: 1359495 - DNA, 25 bp, Homo sapien
accaataaatcaaagatcaaaaaat

SEQ ID NO: 1359496 - DNA, 25 bp, Homo sapien
tttaccaataaatcaaagatcaaaa

SEQ ID NO: 1359497 - DNA, 25 bp, Homo sapien
ttaccaataaatcaaagatcaaaaa

SEQ ID NO: 1359498 - DNA, 25 bp, Homo sapien
acaaaaggcatcgaacaacaggacc

SEQ ID NO: 1359499 - DNA, 25 bp, Homo sapien
gaccaacgagattccagcccatatt

SEQ ID NO: 1359500 - DNA, 25 bp, Homo sapien
caacaggaccaacgagattccagcc

SEQ ID NO: 1359501 - DNA, 25 bp, Homo sapien
catcgaacaacaggaccaacgagat

SEQ ID NO: 1359502 - DNA, 25 bp, Homo sapien
catctataggactctcgcagtgtgc

SEQ ID NO: 1359503 - DNA, 25 bp, Homo sapien
tcctatcttggaagagctcagaatt

SEQ ID NO: 1359504 - DNA, 25 bp, Homo sapien
gactctcgcagtgtgctttcctatc

SEQ ID NO: 1359505 - DNA, 25 bp, Homo sapien
aacactgccatctataggactctcg

SEQ ID NO: 1359506 - DNA, 25 bp, Homo sapien
aggcgaggtagcagtgagttgtgat

SEQ ID NO: 1359507 - DNA, 25 bp, Homo sapien
ggaggcgaggtagcagtgagttgtg

SEQ ID NO: 1359508 - DNA, 25 bp, Homo sapien
cacggccaaaccctgtgtataaaat

SEQ ID NO: 1359509 - DNA, 25 bp, Homo sapien
gaggcgaggtagcagtgagttgtga

SEQ ID NO: 1359510 - DNA, 25 bp, Homo sapien
caaccattaatgagaacagtttggc

SEQ ID NO: 1359511 - DNA, 25 bp, Homo sapien
tttttagatattgttggtaggaatg

SEQ ID NO: 1359512 - DNA, 25 bp, Homo sapien
aaaggatatcactatattgaagaga

SEQ ID NO: 1359513 - DNA, 25 bp, Homo sapien
ttacaatatctcagatatggaagca

SEQ ID NO: 1359514 - DNA, 25 bp, Homo sapien
ctgaaaatggtagtgggaggcaggg

SEQ ID NO: 1359515 - DNA, 25 bp, Homo sapien
gaggctgaaaatggtagtgggaggc

SEQ ID NO: 1359516 - DNA, 25 bp, Homo sapien
ttaccagaggctgaaaatggtagtg

SEQ ID NO: 1359517 - DNA, 25 bp, Homo sapien
gttaccagaggctgaaaatggtagt

SEQ ID NO: 1359518 - DNA, 25 bp, Homo sapien
cattgtaactggatgatactggcta

SEQ ID NO: 1359519 - DNA, 25 bp, Homo sapien
tactggctagtataatgacatatcg

SEQ ID NO: 1359520 - DNA, 25 bp, Homo sapien
tcccataacgctgtgattacgaacg

SEQ ID NO: 1359521 - DNA, 25 bp, Homo sapien
ccatacacatttggctggaggagaa

SEQ ID NO: 1359522 - DNA, 25 bp, Homo sapien
actgaaataggccaaaatcctcttc

SEQ ID NO: 1359523 - DNA, 25 bp, Homo sapien
tgtgtgcccttcttctatgcatctt

SEQ ID NO: 1359524 - DNA, 25 bp, Homo sapien
tttgcccagctaactgaaataggcc

SEQ ID NO: 1359525 - DNA, 25 bp, Homo sapien
tgcccttcttctatgcatctttgcc

SEQ ID NO: 1359526 - DNA, 25 bp, Homo sapien
ccttgaaatctactgtaccagtgaa

SEQ ID NO: 1359527 - DNA, 25 bp, Homo sapien
tatttagataagtatgtcacctgga

SEQ ID NO: 1359528 - DNA, 25 bp, Homo sapien
agataaacaatttgagtgaccacaa

SEQ ID NO: 1359529 - DNA, 25 bp, Homo sapien
cactcatgctctttacaggtcaaaa

SEQ ID NO: 1359530 - DNA, 25 bp, Homo sapien
tattatagactgaagttcctctaca

SEQ ID NO: 1359531 - DNA, 25 bp, Homo sapien
ctttattatagactgaagttcctct

SEQ ID NO: 1359532 - DNA, 25 bp, Homo sapien
tatagactgaagttcctctacagcc

SEQ ID NO: 1359533 - DNA, 25 bp, Homo sapien
tagactgaagttcctctacagccat

SEQ ID NO: 1359534 - DNA, 25 bp, Homo sapien
tatttctcctagtttcgatgctaaa

SEQ ID NO: 1359535 - DNA, 25 bp, Homo sapien
tttctcctagtttcgatgctaaaat

SEQ ID NO: 1359536 - DNA, 25 bp, Homo sapien
cttatttctcctagtttcgatgcta

SEQ ID NO: 1359537 - DNA, 25 bp, Homo sapien
tcttatttctcctagtttcgatgct

SEQ ID NO: 1359538 - DNA, 25 bp, Homo sapien
ctcggggcgagacgccggagcgtgt

SEQ ID NO: 1359539 - DNA, 25 bp, Homo sapien
gagcgtgtccccgtccggcagacta

SEQ ID NO: 1359540 - DNA, 25 bp, Homo sapien
cccgcgctacgcgtagggaggcggg

SEQ ID NO: 1359541 - DNA, 25 bp, Homo sapien
tccggcgtcttagcccgctcttctg

SEQ ID NO: 1359542 - DNA, 25 bp, Homo sapien
ccgctgctctcgaaaagccgcaggt

SEQ ID NO: 1359543 - DNA, 25 bp, Homo sapien
tccccgctgctctcgaaaagccgca

SEQ ID NO: 1359544 - DNA, 25 bp, Homo sapien
agccgcaggtaggagcaaggatctc

SEQ ID NO: 1359545 - DNA, 25 bp, Homo sapien
aaaagccgcaggtaggagcaaggat

SEQ ID NO: 1359546 - DNA, 25 bp, Homo sapien
ggccttggaggttttctagctcctc

SEQ ID NO: 1359547 - DNA, 25 bp, Homo sapien
gaaagcacagttaaacaaggtatgc

SEQ ID NO: 1359548 - DNA, 25 bp, Homo sapien
caaagcgcagtaaaggaaagcacag

SEQ ID NO: 1359549 - DNA, 25 bp, Homo sapien
cagtaagctcactacctcattggta

SEQ ID NO: 1359550 - DNA, 25 bp, Homo sapien
cctggcctgtgggtagtcaattttt

SEQ ID NO: 1359551 - DNA, 25 bp, Homo sapien
cagcagcgtcaacatcatctagaag

SEQ ID NO: 1359552 - DNA, 25 bp, Homo sapien
tatacaatgtgtggtccatggaacc

SEQ ID NO: 1359553 - DNA, 25 bp, Homo sapien
tccccagaagatgagcatgcacatt

SEQ ID NO: 1359554 - DNA, 25 bp, Homo sapien
cctgttatcatcttggaaagagaca

SEQ ID NO: 1359555 - DNA, 25 bp, Homo sapien
cctcatgtggagtatatacagaata

SEQ ID NO: 1359556 - DNA, 25 bp, Homo sapien
aatatcctcatgtggagtatataca

SEQ ID NO: 1359557 - DNA, 25 bp, Homo sapien
ctgttatcatcttggaaagagacaa

SEQ ID NO: 1359558 - DNA, 25 bp, Homo sapien
cattggtcaactggacaactaaaat

SEQ ID NO: 1359559 - DNA, 25 bp, Homo sapien
tatcttcactagctgaatctcccta

SEQ ID NO: 1359560 - DNA, 25 bp, Homo sapien
tggtcactatagacaccaagacaag

SEQ ID NO: 1359561 - DNA, 25 bp, Homo sapien
ccaagacaagtggtgtttcctaggt

SEQ ID NO: 1359562 - DNA, 25 bp, Homo sapien
cccttgatgttctctaatggaaagc

SEQ ID NO: 1359563 - DNA, 25 bp, Homo sapien
gctattcctagttctatgcccttga

SEQ ID NO: 1359564 - DNA, 25 bp, Homo sapien
gtagtagtctaacatggatacatgc

SEQ ID NO: 1359565 - DNA, 25 bp, Homo sapien
tgtttccagtgaactgtggcccgct

SEQ ID NO: 1359566 - DNA, 25 bp, Homo sapien
attagaaatatcagtggaaagcatc

SEQ ID NO: 1359567 - DNA, 25 bp, Homo sapien
aaacctaaagcattaaatgcaaaca

SEQ ID NO: 1359568 - DNA, 25 bp, Homo sapien
tgggtaaacctaaagcattaaatgc

SEQ ID NO: 1359569 - DNA, 25 bp, Homo sapien
atgggtaaacctaaagcattaaatg

SEQ ID NO: 1359570 - DNA, 25 bp, Homo sapien
tggttaaagtatgtctctcctaaaa

SEQ ID NO: 1359571 - DNA, 25 bp, Homo sapien
atgatggcggggaccgcctgtaatc

SEQ ID NO: 1359572 - DNA, 25 bp, Homo sapien
ccaacatggttaaagtatgtctctc

SEQ ID NO: 1359573 - DNA, 25 bp, Homo sapien
catggttaaagtatgtctctcctaa

SEQ ID NO: 1359574 - DNA, 25 bp, Homo sapien
tgttaaatgcagagtcaagatggga

SEQ ID NO: 1359575 - DNA, 25 bp, Homo sapien
ggcagaggatgttaaatgcagagtc

SEQ ID NO: 1359576 - DNA, 25 bp, Homo sapien
gagtcaagatgggacagaactttgt

SEQ ID NO: 1359577 - DNA, 25 bp, Homo sapien
tgggacagctggatcaaggccaagg

SEQ ID NO: 1359578 - DNA, 25 bp, Homo sapien
catgacttttaccttcccctgcctt

SEQ ID NO: 1359579 - DNA, 25 bp, Homo sapien
ttttctcatattcatgacttttacc

SEQ ID NO: 1359580 - DNA, 25 bp, Homo sapien
cttcccctgccttctcaccttccat

SEQ ID NO: 1359581 - DNA, 25 bp, Homo sapien
tattttctcatattcatgactttta

SEQ ID NO: 1359582 - DNA, 25 bp, Homo sapien
atgaagtctgagaacttagtactcc

SEQ ID NO: 1359583 - DNA, 25 bp, Homo sapien
tctgagaacttagtactccatctcc

SEQ ID NO: 1359584 - DNA, 25 bp, Homo sapien
agtctgagaacttagtactccatct

SEQ ID NO: 1359585 - DNA, 25 bp, Homo sapien
gagaacttagtactccatctcctag

SEQ ID NO: 1359586 - DNA, 25 bp, Homo sapien
ttcctctcttgtaggttacaacagt

SEQ ID NO: 1359587 - DNA, 25 bp, Homo sapien
ggttacaacagttctgttttttgca

SEQ ID NO: 1359588 - DNA, 25 bp, Homo sapien
tcttgtaggttacaacagttctgtt

SEQ ID NO: 1359589 - DNA, 25 bp, Homo sapien
tctcttgtaggttacaacagttctg

SEQ ID NO: 1359590 - DNA, 25 bp, Homo sapien
cctgactggcatgcatattacagcc

SEQ ID NO: 1359591 - DNA, 25 bp, Homo sapien
ctgactggcatgcatattacagcca

SEQ ID NO: 1359592 - DNA, 25 bp, Homo sapien
acacctgactggcatgcatattaca

SEQ ID NO: 1359593 - DNA, 25 bp, Homo sapien
cacctgactggcatgcatattacag

SEQ ID NO: 1359594 - DNA, 25 bp, Homo sapien
cttgaataggtagcagtctgggtcc

SEQ ID NO: 1359595 - DNA, 25 bp, Homo sapien
ccttgaataggtagcagtctgggtc

SEQ ID NO: 1359596 - DNA, 25 bp, Homo sapien
ttgaataggtagcagtctgggtcct

SEQ ID NO: 1359597 - DNA, 25 bp, Homo sapien
tgggtcccgcagaactgtagaacct

SEQ ID NO: 1359598 - DNA, 25 bp, Homo sapien
tggacttcatcctggaccataagga

SEQ ID NO: 1359599 - DNA, 25 bp, Homo sapien
ccataaggataagggtcacacctga

SEQ ID NO: 1359600 - DNA, 25 bp, Homo sapien
tcacacctgacggatggcagaatgg

SEQ ID NO: 1359601 - DNA, 25 bp, Homo sapien
gtatcaaaagactgggaccccaggc

SEQ ID NO: 1359602 - DNA, 25 bp, Homo sapien
tgccccacatgtgtactctggctgg

SEQ ID NO: 1359603 - DNA, 25 bp, Homo sapien
cacggtgctcacaactgccaagaaa

SEQ ID NO: 1359604 - DNA, 25 bp, Homo sapien
tgagtcagccttgcccctgtacata

SEQ ID NO: 1359605 - DNA, 25 bp, Homo sapien
tctttggcacccatccatcttgtct

SEQ ID NO: 1359606 - DNA, 25 bp, Homo sapien
tgtactgactgtcaggaagcttcat

SEQ ID NO: 1359607 - DNA, 25 bp, Homo sapien
ctgtgtactgactgtcaggaagctt

SEQ ID NO: 1359608 - DNA, 25 bp, Homo sapien
tctcctattctttggcacccatcca

SEQ ID NO: 1359609 - DNA, 25 bp, Homo sapien
tcctcttggattaacttcctcccaa

SEQ ID NO: 1359610 - DNA, 25 bp, Homo sapien
ttcctcccaacccacggcactggca

SEQ ID NO: 1359611 - DNA, 25 bp, Homo sapien
ctgtcctcttggattaacttcctcc

SEQ ID NO: 1359612 - DNA, 25 bp, Homo sapien
acccacggcactggcacttcagaag

SEQ ID NO: 1359613 - DNA, 25 bp, Homo sapien
tattaactaatttaagtgctgcttc

SEQ ID NO: 1359614 - DNA, 25 bp, Homo sapien
ttcttctggtttggtcccaggcagt

SEQ ID NO: 1359615 - DNA, 25 bp, Homo sapien
tctggtttggtcccaggcagttgta

SEQ ID NO: 1359616 - DNA, 25 bp, Homo sapien
cttctggtttggtcccaggcagttg

SEQ ID NO: 1359617 - DNA, 25 bp, Homo sapien
tattgaattaatgctatttacaaag

SEQ ID NO: 1359618 - DNA, 25 bp, Homo sapien
taccatgtaaaaataggccagccat

SEQ ID NO: 1359619 - DNA, 25 bp, Homo sapien
tgaaggcccaaggtagatggattgc

SEQ ID NO: 1359620 - DNA, 25 bp, Homo sapien
tattttacttatgtctgactttaaa

SEQ ID NO: 1359621 - DNA, 25 bp, Homo sapien
attttgcaactctaagccagagatg

SEQ ID NO: 1359622 - DNA, 25 bp, Homo sapien
cagagaactctatgaaatgtctgtg

SEQ ID NO: 1359623 - DNA, 25 bp, Homo sapien
tagataagatatagaaatgaatgac

SEQ ID NO: 1359624 - DNA, 25 bp, Homo sapien
ataaaatagggacctttggcaatat

SEQ ID NO: 1359625 - DNA, 25 bp, Homo sapien
tcaaatttcacacggtaacaggcac

SEQ ID NO: 1359626 - DNA, 25 bp, Homo sapien
aaataaccaaccagtacacagggtg

SEQ ID NO: 1359627 - DNA, 25 bp, Homo sapien
cacttagagcataaacagggataac

SEQ ID NO: 1359628 - DNA, 25 bp, Homo sapien
taaacgtcataagggaagagcagga

SEQ ID NO: 1359629 - DNA, 25 bp, Homo sapien
gcaaccgttagcttttgaggagcag

SEQ ID NO: 1359630 - DNA, 25 bp, Homo sapien
cctccaagagtaagaacagacccag

SEQ ID NO: 1359631 - DNA, 25 bp, Homo sapien
gaggttttcacagccctactgaagg

SEQ ID NO: 1359632 - DNA, 25 bp, Homo sapien
tgtccgaagcctagagagtcacttg

SEQ ID NO: 1359633 - DNA, 25 bp, Homo sapien
cagctccaggaggtaaggcgaagga

SEQ ID NO: 1359634 - DNA, 25 bp, Homo sapien
aacctggtaggatctgcagactgga

SEQ ID NO: 1359635 - DNA, 25 bp, Homo sapien
gaggagcaacctggtaggatctgca

SEQ ID NO: 1359636 - DNA, 25 bp, Homo sapien
tccaggaggtaaggcgaaggaggag

SEQ ID NO: 1359637 - DNA, 25 bp, Homo sapien
aagggagtggaggcaagcagggagc

SEQ ID NO: 1359638 - DNA, 25 bp, Homo sapien
gaggctgccctctgtagtgttgtgt

SEQ ID NO: 1359639 - DNA, 25 bp, Homo sapien
tgccctctgtagtgttgtgtagctg

SEQ ID NO: 1359640 - DNA, 25 bp, Homo sapien
ccctctgtagtgttgtgtagctgct

SEQ ID NO: 1359641 - DNA, 25 bp, Homo sapien
catgctgcgtctcccggtgccttcg

SEQ ID NO: 1359642 - DNA, 25 bp, Homo sapien
tcatttgagcccatgctgcgtctcc

SEQ ID NO: 1359643 - DNA, 25 bp, Homo sapien
atttgagcccatgctgcgtctcccg

SEQ ID NO: 1359644 - DNA, 25 bp, Homo sapien
tgagcccatgctgcgtctcccggtg

SEQ ID NO: 1359645 - DNA, 25 bp, Homo sapien
ggtcgcagccgaagggcttgaagcc

SEQ ID NO: 1359646 - DNA, 25 bp, Homo sapien
tgtttgcggctgtgggtgatgaggt

SEQ ID NO: 1359647 - DNA, 25 bp, Homo sapien
ggctgaatgccttgccgcacacctg

SEQ ID NO: 1359648 - DNA, 25 bp, Homo sapien
tctggaaacccttcccacagaggtc

SEQ ID NO: 1359649 - DNA, 25 bp, Homo sapien
cagcagctggttgcaccacagtcta

SEQ ID NO: 1359650 - DNA, 25 bp, Homo sapien
gtctaaggccttcaagcaacttgga

SEQ ID NO: 1359651 - DNA, 25 bp, Homo sapien
gagggtgacgtgttgcaacctgaac

SEQ ID NO: 1359652 - DNA, 25 bp, Homo sapien
gtgacgtgttgcaacctgaactgac

SEQ ID NO: 1359653 - DNA, 25 bp, Homo sapien
atgtctgacttctggtggaacctct

SEQ ID NO: 1359654 - DNA, 25 bp, Homo sapien
tctggtggaacctcttgccacagta

SEQ ID NO: 1359655 - DNA, 25 bp, Homo sapien
cagtgtggatgaaagtgtgtttctt

SEQ ID NO: 1359656 - DNA, 25 bp, Homo sapien
agtgtgtttcttcatgtctgacttc

SEQ ID NO: 1359657 - DNA, 25 bp, Homo sapien
cacagatcttacagtcaaagctccg

SEQ ID NO: 1359658 - DNA, 25 bp, Homo sapien
agatcttacagtcaaagctccgttc

SEQ ID NO: 1359659 - DNA, 25 bp, Homo sapien
ttcccacagatcttacagtcaaagc

SEQ ID NO: 1359660 - DNA, 25 bp, Homo sapien
agctcttcccacagatcttacagtc

SEQ ID NO: 1359661 - DNA, 25 bp, Homo sapien
aaggcctgagccggccacaatcctc

SEQ ID NO: 1359662 - DNA, 25 bp, Homo sapien
tcacagtggtgtgacaccaaaatcc

SEQ ID NO: 1359663 - DNA, 25 bp, Homo sapien
cacagtggtgtgacaccaaaatcca

SEQ ID NO: 1359664 - DNA, 25 bp, Homo sapien
ggacgcagcggagggcttgggggag

SEQ ID NO: 1359665 - DNA, 25 bp, Homo sapien
gggacgcagcggagggcttggggga

SEQ ID NO: 1359666 - DNA, 25 bp, Homo sapien
gtcttgccgcacatctcgcaggcaa

SEQ ID NO: 1359667 - DNA, 25 bp, Homo sapien
ctgcgagtgcacggctttgtgctgc

SEQ ID NO: 1359668 - DNA, 25 bp, Homo sapien
gcacgtgcacctcgagcccgtgcgg

SEQ ID NO: 1359669 - DNA, 25 bp, Homo sapien
caggcaaagggtctggtaccgctgt

SEQ ID NO: 1359670 - DNA, 25 bp, Homo sapien
gcccttgtctgcgtgcagcccgtgg

SEQ ID NO: 1359671 - DNA, 25 bp, Homo sapien
gtgggcctctcatacagcccggctg

SEQ ID NO: 1359672 - DNA, 25 bp, Homo sapien
cgtggccacgctcggggtacagcaa

SEQ ID NO: 1359673 - DNA, 25 bp, Homo sapien
atgcacttgtaggagccgccgccca

SEQ ID NO: 1359674 - DNA, 25 bp, Homo sapien
ctaggccagggccagcggtggcacc

SEQ ID NO: 1359675 - DNA, 25 bp, Homo sapien
gtggcaccggcccctgcgctgcagc

SEQ ID NO: 1359676 - DNA, 25 bp, Homo sapien
aggccagggccagcggtggcaccgg

SEQ ID NO: 1359677 - DNA, 25 bp, Homo sapien
gcaccggcccctgcgctgcagctcc

SEQ ID NO: 1359678 - DNA, 25 bp, Homo sapien
ccagcgccacgctccagggccccac

SEQ ID NO: 1359679 - DNA, 25 bp, Homo sapien
tcgggccgtacagcgcggccgggtg

SEQ ID NO: 1359680 - DNA, 25 bp, Homo sapien
gccggcagcccgcttcgggccgtac

SEQ ID NO: 1359681 - DNA, 25 bp, Homo sapien
tccggggcgggttcgcagaagaggc

SEQ ID NO: 1359682 - DNA, 25 bp, Homo sapien
gggcttcgtccagcgatgggcacat

SEQ ID NO: 1359683 - DNA, 25 bp, Homo sapien
ccatgagtacggtttgaaaggcagg

SEQ ID NO: 1359684 - DNA, 25 bp, Homo sapien
aggtgccgcaggtcagaacccgcca

SEQ ID NO: 1359685 - DNA, 25 bp, Homo sapien
aggccgctccatgagtacggtttga

SEQ ID NO: 1359686 - DNA, 25 bp, Homo sapien
gcgcatctataaatgcccgtagttg

SEQ ID NO: 1359687 - DNA, 25 bp, Homo sapien
gatcctacagggaagggcgcatcta

SEQ ID NO: 1359688 - DNA, 25 bp, Homo sapien
actcaagggcggaagggtccagcca

SEQ ID NO: 1359689 - DNA, 25 bp, Homo sapien
aatgcccgtagttgagctgttaaga

SEQ ID NO: 1359690 - DNA, 25 bp, Homo sapien
atattctggatataaccggcccttg

SEQ ID NO: 1359691 - DNA, 25 bp, Homo sapien
ggcccttgacagaatccggctggtc

SEQ ID NO: 1359692 - DNA, 25 bp, Homo sapien
tggtggtatcttctaaaactagcaa

SEQ ID NO: 1359693 - DNA, 25 bp, Homo sapien
tgtgggacgggtggtggtatcttct

SEQ ID NO: 1359694 - DNA, 25 bp, Homo sapien
tctgtctggggcttcggtcagctgc

SEQ ID NO: 1359695 - DNA, 25 bp, Homo sapien
tcaaactccgagctccgttcgcaga

SEQ ID NO: 1359696 - DNA, 25 bp, Homo sapien
tcagctgcgattcgggggacaaacg

SEQ ID NO: 1359697 - DNA, 25 bp, Homo sapien
gagctccgttcgcagacgctgcctt

SEQ ID NO: 1359698 - DNA, 25 bp, Homo sapien
cttcttgcttttgacgagaaatgag

SEQ ID NO: 1359699 - DNA, 25 bp, Homo sapien
ttttgacgagaaatgagcgcggcat

SEQ ID NO: 1359700 - DNA, 25 bp, Homo sapien
tctctaaacggagggaatagtctgg

SEQ ID NO: 1359701 - DNA, 25 bp, Homo sapien
ttctctaaacggagggaatagtctg

SEQ ID NO: 1359702 - DNA, 25 bp, Homo sapien
actttccccactgcgccccaagagt

SEQ ID NO: 1359703 - DNA, 25 bp, Homo sapien
ctgtcacccacggtcactccgaggg

SEQ ID NO: 1359704 - DNA, 25 bp, Homo sapien
gagccgctgtcacccacggtcactc

SEQ ID NO: 1359705 - DNA, 25 bp, Homo sapien
cggtcactccgagggcttgctcagc

SEQ ID NO: 1359706 - DNA, 25 bp, Homo sapien
aggcggagggagagcgcgggccagg

SEQ ID NO: 1359707 - DNA, 25 bp, Homo sapien
ggactgggcacccaggcggagggag

SEQ ID NO: 1359708 - DNA, 25 bp, Homo sapien
gtactctccggtgcggcggactggg

SEQ ID NO: 1359709 - DNA, 25 bp, Homo sapien
tggagacgtgggtcagtactctccg

SEQ ID NO: 1359710 - DNA, 25 bp, Homo sapien
tgggttaccccaactcagctactca

SEQ ID NO: 1359711 - DNA, 25 bp, Homo sapien
tagcgaagctcgctccggcaatcaa

SEQ ID NO: 1359712 - DNA, 25 bp, Homo sapien
agctcagcggtaaaacctgtcccgg

SEQ ID NO: 1359713 - DNA, 25 bp, Homo sapien
cctggctgtgctttacggctggcga

SEQ ID NO: 1359714 - DNA, 25 bp, Homo sapien
ggtagtgcaccgacaatttagcaga

SEQ ID NO: 1359715 - DNA, 25 bp, Homo sapien
taggtgtcccgagtcggtagtgcac

SEQ ID NO: 1359716 - DNA, 25 bp, Homo sapien
gaggtggagcccgatccacgaacgt

SEQ ID NO: 1359717 - DNA, 25 bp, Homo sapien
cgaacgttgactgggaaatgctagg

SEQ ID NO: 1359718 - DNA, 25 bp, Homo sapien
gagggaactagctgcccggggcgtc

SEQ ID NO: 1359719 - DNA, 25 bp, Homo sapien
ctgcattagcagagagcgggggtcg

SEQ ID NO: 1359720 - DNA, 25 bp, Homo sapien
tgcattagcagagagcgggggtcgg

SEQ ID NO: 1359721 - DNA, 25 bp, Homo sapien
aactagctgcccggggcgtcgctct

SEQ ID NO: 1359722 - DNA, 25 bp, Homo sapien
caggtcgaaatctgagcgcagcggg

SEQ ID NO: 1359723 - DNA, 25 bp, Homo sapien
gagctgcagtacagcagttctccgt

SEQ ID NO: 1359724 - DNA, 25 bp, Homo sapien
tggtgaccgggttcacacgtgagct

SEQ ID NO: 1359725 - DNA, 25 bp, Homo sapien
cgaggtggtctggagtaaacgaatc

SEQ ID NO: 1359726 - DNA, 25 bp, Homo sapien
tctccggaggaatgggaatagacct

SEQ ID NO: 1359727 - DNA, 25 bp, Homo sapien
cttggtccctgtagggtgcaggccc

SEQ ID NO: 1359728 - DNA, 25 bp, Homo sapien
ctcctagggctagagctttgtcgct

SEQ ID NO: 1359729 - DNA, 25 bp, Homo sapien
agaaaagacgcctgggacgtgtcgc

SEQ ID NO: 1359730 - DNA, 25 bp, Homo sapien
ttgtcccgagggtcccgctgcagct

SEQ ID NO: 1359731 - DNA, 25 bp, Homo sapien
ccgctgcagcttggacccacgttgg

SEQ ID NO: 1359732 - DNA, 25 bp, Homo sapien
tggcgttgtcccgagggtcccgctg

SEQ ID NO: 1359733 - DNA, 25 bp, Homo sapien
cgagggtcccgctgcagcttggacc

SEQ ID NO: 1359734 - DNA, 25 bp, Homo sapien
cgctaagggggcgtcctcccgagcg

SEQ ID NO: 1359735 - DNA, 25 bp, Homo sapien
ccgcgctgcagctggcgcgggaggt

SEQ ID NO: 1359736 - DNA, 25 bp, Homo sapien
tctcctcaccgtccgggcccaggaa

SEQ ID NO: 1359737 - DNA, 25 bp, Homo sapien
ctaagggggcgtcctcccgagcgca

SEQ ID NO: 1359738 - DNA, 25 bp, Homo sapien
ccgcacggcggtccgcagcaggtgg

SEQ ID NO: 1359739 - DNA, 25 bp, Homo sapien
cttccctggtggatttggctcccct

SEQ ID NO: 1359740 - DNA, 25 bp, Homo sapien
tccagatttccagtcacactgcgcg

SEQ ID NO: 1359741 - DNA, 25 bp, Homo sapien
gggtcgcgccctaacccagctgccg

SEQ ID NO: 1359742 - DNA, 25 bp, Homo sapien
caccgcgctaggagagttttcaaac

SEQ ID NO: 1359743 - DNA, 25 bp, Homo sapien
gctaggagagttttcaaacggaatc

SEQ ID NO: 1359744 - DNA, 25 bp, Homo sapien
gagagttttcaaacggaatcttgct

SEQ ID NO: 1359745 - DNA, 25 bp, Homo sapien
cgggcaccgcgctaggagagttttc

SEQ ID NO: 1359746 - DNA, 25 bp, Homo sapien
gccacagattgaggacacagattga

SEQ ID NO: 1359747 - DNA, 25 bp, Homo sapien
cttaggcactagaaatgacttgaaa

SEQ ID NO: 1359748 - DNA, 25 bp, Homo sapien
attggaggtccggacacttaggcac

SEQ ID NO: 1359749 - DNA, 25 bp, Homo sapien
gagacttccgcagcgagagaagcca

SEQ ID NO: 1359750 - DNA, 25 bp, Homo sapien
ctagggctgcaccacccccgggtcg

SEQ ID NO: 1359751 - DNA, 25 bp, Homo sapien
cccggcgagtggccacggcgtccgc

SEQ ID NO: 1359752 - DNA, 25 bp, Homo sapien
gagcccggcgagtggccacggcgtc

SEQ ID NO: 1359753 - DNA, 25 bp, Homo sapien
ggagcccggcgagtggccacggcgt

SEQ ID NO: 1359754 - DNA, 25 bp, Homo sapien
ggcgagtggccacggcgtccgcaga

SEQ ID NO: 1359755 - DNA, 25 bp, Homo sapien
cccgcaggccccgaaatagcttgtt

SEQ ID NO: 1359756 - DNA, 25 bp, Homo sapien
atagcttgttgtggaaacacttggg

SEQ ID NO: 1359757 - DNA, 25 bp, Homo sapien
atacgcccaacgaggctgaaaatac

SEQ ID NO: 1359758 - DNA, 25 bp, Homo sapien
gataaatacgcccaacgaggctgaa

SEQ ID NO: 1359759 - DNA, 25 bp, Homo sapien
gacacccaatccgagaggtttgctc

SEQ ID NO: 1359760 - DNA, 25 bp, Homo sapien
gcgcccggcgggaccggtgggcgca

SEQ ID NO: 1359761 - DNA, 25 bp, Homo sapien
aatccgagaggtttgctcatttccc

SEQ ID NO: 1359762 - DNA, 25 bp, Homo sapien
cccaatccgagaggtttgctcattt

SEQ ID NO: 1359763 - DNA, 25 bp, Homo sapien
gctgcaaaattaaaggccgcgcggg

SEQ ID NO: 1359764 - DNA, 25 bp, Homo sapien
taaagcgccataaaagcaccacttg

SEQ ID NO: 1359765 - DNA, 25 bp, Homo sapien
caaagtaagccttcttcgctcggat

SEQ ID NO: 1359766 - DNA, 25 bp, Homo sapien
taatttccggtggtcggagctgcaa

SEQ ID NO: 1359767 - DNA, 25 bp, Homo sapien
tcatctttatgtcctaggcgggctc

SEQ ID NO: 1359768 - DNA, 25 bp, Homo sapien
cttcatctttatgtcctaggcgggc

SEQ ID NO: 1359769 - DNA, 25 bp, Homo sapien
ttcatctttatgtcctaggcgggct

SEQ ID NO: 1359770 - DNA, 25 bp, Homo sapien
gagggtaggcactggatcttcatct

SEQ ID NO: 1359771 - DNA, 25 bp, Homo sapien
cactccagtgacaggcacaaggaca

SEQ ID NO: 1359772 - DNA, 25 bp, Homo sapien
ctaattctgcactccagtgacaggc

SEQ ID NO: 1359773 - DNA, 25 bp, Homo sapien
acaggcacaaggacagatgctggac

SEQ ID NO: 1359774 - DNA, 25 bp, Homo sapien
tctgcactccagtgacaggcacaag

SEQ ID NO: 1359775 - DNA, 25 bp, Homo sapien
taggtgacaccagagactaggaaag

SEQ ID NO: 1359776 - DNA, 25 bp, Homo sapien
cacgacgaagtcatcctggttgagg

SEQ ID NO: 1359777 - DNA, 25 bp, Homo sapien
gagacatacaaaagtgacaaagcag

SEQ ID NO: 1359778 - DNA, 25 bp, Homo sapien
tgtatctgttcctgtcctgggacag

SEQ ID NO: 1359779 - DNA, 25 bp, Homo sapien
tgggggggagagacaaggcttgact

SEQ ID NO: 1359780 - DNA, 25 bp, Homo sapien
cagtgaactgacagtcagttcagga

SEQ ID NO: 1359781 - DNA, 25 bp, Homo sapien
tctgggcctggtttaagatgctcat

SEQ ID NO: 1359782 - DNA, 25 bp, Homo sapien
gttctctgggcctggtttaagatgc

SEQ ID NO: 1359783 - DNA, 25 bp, Homo sapien
ggcctggtttaagatgctcattttc

SEQ ID NO: 1359784 - DNA, 25 bp, Homo sapien
agacccagttaggtgacatcagcag

SEQ ID NO: 1359785 - DNA, 25 bp, Homo sapien
tctgagcaggtcatagggtaggaga

SEQ ID NO: 1359786 - DNA, 25 bp, Homo sapien
agatgcagctatagacccagttagg

SEQ ID NO: 1359787 - DNA, 25 bp, Homo sapien
ggcgtggtacataaaggttgtggca

SEQ ID NO: 1359788 - DNA, 25 bp, Homo sapien
tattgcatcctaaaggcctgggaga

SEQ ID NO: 1359789 - DNA, 25 bp, Homo sapien
tgctactgtagcacaaagcggccat

SEQ ID NO: 1359790 - DNA, 25 bp, Homo sapien
tgagggtcaaagcaataatgtggcc

SEQ ID NO: 1359791 - DNA, 25 bp, Homo sapien
tagtccacaacgtacctgaaggctt

SEQ ID NO: 1359792 - DNA, 25 bp, Homo sapien
tactactctagtaaccaacacatgg

SEQ ID NO: 1359793 - DNA, 25 bp, Homo sapien
gtggcccaccaataattttcatgaa

SEQ ID NO: 1359794 - DNA, 25 bp, Homo sapien
gatgttcaatgttaggtggtacaga

SEQ ID NO: 1359795 - DNA, 25 bp, Homo sapien
gaagtcctgttagatgctgaaagca

SEQ ID NO: 1359796 - DNA, 25 bp, Homo sapien
gtcaaatgtctgtagacagccacct

SEQ ID NO: 1359797 - DNA, 25 bp, Homo sapien
ctttatggcaatggtaaatcagtgg

SEQ ID NO: 1359798 - DNA, 25 bp, Homo sapien
ttgctcactgagcataaaatattgc

SEQ ID NO: 1359799 - DNA, 25 bp, Homo sapien
cagatgtatgtcttggtcaaatgtc

SEQ ID NO: 1359800 - DNA, 25 bp, Homo sapien
aaaagccctaatcatatgataactg

SEQ ID NO: 1359801 - DNA, 25 bp, Homo sapien
taaatccatagtctaggtcacagtg

SEQ ID NO: 1359802 - DNA, 25 bp, Homo sapien
aatcatatgataactgatcccttaa

SEQ ID NO: 1359803 - DNA, 25 bp, Homo sapien
tccatagtctaggtcacagtgatgg

SEQ ID NO: 1359804 - DNA, 25 bp, Homo sapien
tgaatacgactctcttcttctcggg

SEQ ID NO: 1359805 - DNA, 25 bp, Homo sapien
agaagcccctctggccttttaggca

SEQ ID NO: 1359806 - DNA, 25 bp, Homo sapien
ttccatcaaaaggaggttggcctga

SEQ ID NO: 1359807 - DNA, 25 bp, Homo sapien
tcgaaccagattttccgtgcaaagg

SEQ ID NO: 1359808 - DNA, 25 bp, Homo sapien
tgtgggagaggaatgctgcttccca

SEQ ID NO: 1359809 - DNA, 25 bp, Homo sapien
gagaggaatgctgcttcccactcat

SEQ ID NO: 1359810 - DNA, 25 bp, Homo sapien
ggagaggaatgctgcttcccactca

SEQ ID NO: 1359811 - DNA, 25 bp, Homo sapien
tgggagaggaatgctgcttcccact

SEQ ID NO: 1359812 - DNA, 25 bp, Homo sapien
gggagtgccagtccggtataacatt

SEQ ID NO: 1359813 - DNA, 25 bp, Homo sapien
tccggtataacatttctgccttctc

SEQ ID NO: 1359814 - DNA, 25 bp, Homo sapien
gccagtccggtataacatttctgcc

SEQ ID NO: 1359815 - DNA, 25 bp, Homo sapien
agtgccagtccggtataacatttct

SEQ ID NO: 1359816 - DNA, 25 bp, Homo sapien
tgctaaaatatgctccacgtctcct

SEQ ID NO: 1359817 - DNA, 25 bp, Homo sapien
caagaattagctaccaaatatctac

SEQ ID NO: 1359818 - DNA, 25 bp, Homo sapien
tctactctgactattaagaatcttg

SEQ ID NO: 1359819 - DNA, 25 bp, Homo sapien
tacaattaagtcatcagctctgccc

SEQ ID NO: 1359820 - DNA, 25 bp, Homo sapien
tccttggcagaacagagggatctat

SEQ ID NO: 1359821 - DNA, 25 bp, Homo sapien
gaacaatgatgtctggcccaagcag

SEQ ID NO: 1359822 - DNA, 25 bp, Homo sapien
tgtgccctagaccaagtggacaaat

SEQ ID NO: 1359823 - DNA, 25 bp, Homo sapien
tatgacaacaagaatcagcagggat

SEQ ID NO: 1359824 - DNA, 25 bp, Homo sapien
cgggggttcactagccgagatcacg

SEQ ID NO: 1359825 - DNA, 25 bp, Homo sapien
ggcgggggttcactagccgagatca

SEQ ID NO: 1359826 - DNA, 25 bp, Homo sapien
gcgggggttcactagccgagatcac

SEQ ID NO: 1359827 - DNA, 25 bp, Homo sapien
aggcgggggttcactagccgagatc

SEQ ID NO: 1359828 - DNA, 25 bp, Homo sapien
caggaacactccaccacactaacta

SEQ ID NO: 1359829 - DNA, 25 bp, Homo sapien
tacaggaacactccaccacactaac

SEQ ID NO: 1359830 - DNA, 25 bp, Homo sapien
acaggaacactccaccacactaact

SEQ ID NO: 1359831 - DNA, 25 bp, Homo sapien
atacaggaacactccaccacactaa

SEQ ID NO: 1359832 - DNA, 25 bp, Homo sapien
tacaggcctacgtcaccatacttgg

SEQ ID NO: 1359833 - DNA, 25 bp, Homo sapien
acaggcctacgtcaccatacttggc

SEQ ID NO: 1359834 - DNA, 25 bp, Homo sapien
tacaaactatcatcagagaatgcca

SEQ ID NO: 1359835 - DNA, 25 bp, Homo sapien
aactatattcaacagccttcatgct

SEQ ID NO: 1359836 - DNA, 25 bp, Homo sapien
gggaatcctccttaactcatgaggc

SEQ ID NO: 1359837 - DNA, 25 bp, Homo sapien
gggtattcaattagtcagagaagaa

SEQ ID NO: 1359838 - DNA, 25 bp, Homo sapien
agtgataaagaaatctgtgccgaga

SEQ ID NO: 1359839 - DNA, 25 bp, Homo sapien
aaagattacagctattccacgcaag

SEQ ID NO: 1359840 - DNA, 25 bp, Homo sapien
tgtgccgagaaaatatgatcacctg

SEQ ID NO: 1359841 - DNA, 25 bp, Homo sapien
tgatcacctgggcaagtgtctgtgt

SEQ ID NO: 1359842 - DNA, 25 bp, Homo sapien
ttgccatctagtgccaggaaacaca

SEQ ID NO: 1359843 - DNA, 25 bp, Homo sapien
aaacacagatgtgttcgaggactaa

SEQ ID NO: 1359844 - DNA, 25 bp, Homo sapien
ccatctagtgccaggaaacacagat

SEQ ID NO: 1359845 - DNA, 25 bp, Homo sapien
acagatgtgttcgaggactaatggg

SEQ ID NO: 1359846 - DNA, 25 bp, Homo sapien
gtgcagaagctgctacagaaagaaa

SEQ ID NO: 1359847 - DNA, 25 bp, Homo sapien
ttagatagaatagaagtgcagaagc

SEQ ID NO: 1359848 - DNA, 25 bp, Homo sapien
caatgctagtagcaccaaatggaaa

SEQ ID NO: 1359849 - DNA, 25 bp, Homo sapien
caaacatggctaggaaaactgcctg

SEQ ID NO: 1359850 - DNA, 25 bp, Homo sapien
cttctgcatggtactttacactgct

SEQ ID NO: 1359851 - DNA, 25 bp, Homo sapien
ttggttgtatgagatcctgaaactt

SEQ ID NO: 1359852 - DNA, 25 bp, Homo sapien
gaaacttctgcatggtactttacac

SEQ ID NO: 1359853 - DNA, 25 bp, Homo sapien
gtatgagatcctgaaacttctgcat

SEQ ID NO: 1359854 - DNA, 25 bp, Homo sapien
tttcacacattaagaggattctggc

SEQ ID NO: 1359855 - DNA, 25 bp, Homo sapien
ggaccaattgcaatctgacctcact

SEQ ID NO: 1359856 - DNA, 25 bp, Homo sapien
gaatccactgatgcaaaatccacgg

SEQ ID NO: 1359857 - DNA, 25 bp, Homo sapien
atactccagccacactagcattgtt

SEQ ID NO: 1359858 - DNA, 25 bp, Homo sapien
gggaactcactaggtctcctttgtg

SEQ ID NO: 1359859 - DNA, 25 bp, Homo sapien
tcacgtttcagtgatcacggttcac

SEQ ID NO: 1359860 - DNA, 25 bp, Homo sapien
ttcatgattatgaagccattcaaat

SEQ ID NO: 1359861 - DNA, 25 bp, Homo sapien
ttagtatcaggaatagatgtggctc

SEQ ID NO: 1359862 - DNA, 25 bp, Homo sapien
tcttaggccacacgtaaaaaactga

SEQ ID NO: 1359863 - DNA, 25 bp, Homo sapien
taaggtaagactgctttcttaggcc

SEQ ID NO: 1359864 - DNA, 25 bp, Homo sapien
ggtttccactctttaaatctgcaca

SEQ ID NO: 1359865 - DNA, 25 bp, Homo sapien
tttctggcagtcctgatgagactga

SEQ ID NO: 1359866 - DNA, 25 bp, Homo sapien
tcagttccccaatatactggttaga

SEQ ID NO: 1359867 - DNA, 25 bp, Homo sapien
gctatctgatctttcagttccccaa

SEQ ID NO: 1359868 - DNA, 25 bp, Homo sapien
tgttaagctgtccttgaagctttcc

SEQ ID NO: 1359869 - DNA, 25 bp, Homo sapien
ggttagaatcagacttgttaagctg

SEQ ID NO: 1359870 - DNA, 25 bp, Homo sapien
cacaccagtgtgacggaccagttag

SEQ ID NO: 1359871 - DNA, 25 bp, Homo sapien
ggctatggcagtaacccctgggcaa

SEQ ID NO: 1359872 - DNA, 25 bp, Homo sapien
gtcacacattagtggcacaccagtg

SEQ ID NO: 1359873 - DNA, 25 bp, Homo sapien
gcttctgtggtgaggcacacataca

SEQ ID NO: 1359874 - DNA, 25 bp, Homo sapien
ctggattgtttgataacgacctacg

SEQ ID NO: 1359875 - DNA, 25 bp, Homo sapien
ttgttttatccctgcaatcatggag

SEQ ID NO: 1359876 - DNA, 25 bp, Homo sapien
tttgataacgacctacgcacacaca

SEQ ID NO: 1359877 - DNA, 25 bp, Homo sapien
ttcacttgttttatccctgcaatca

SEQ ID NO: 1359878 - DNA, 25 bp, Homo sapien
tagttctgtctatatcgctgggcaa

SEQ ID NO: 1359879 - DNA, 25 bp, Homo sapien
agactgctagcccactgattctggt

SEQ ID NO: 1359880 - DNA, 25 bp, Homo sapien
tgatacaactcttaatggctgagcc

SEQ ID NO: 1359881 - DNA, 25 bp, Homo sapien
tagtttaagacatctgacagactgc

SEQ ID NO: 1359882 - DNA, 25 bp, Homo sapien
attcgttcatcaccaaagtcattag

SEQ ID NO: 1359883 - DNA, 25 bp, Homo sapien
gtaagtatccaattcgttcatcacc

SEQ ID NO: 1359884 - DNA, 25 bp, Homo sapien
aagtatccaattcgttcatcaccaa

SEQ ID NO: 1359885 - DNA, 25 bp, Homo sapien
cgttcatcaccaaagtcattaggtt

SEQ ID NO: 1359886 - DNA, 25 bp, Homo sapien
taacaaaaagagacacggtggtaca

SEQ ID NO: 1359887 - DNA, 25 bp, Homo sapien
gaggcaaccacattaacttgcagca

SEQ ID NO: 1359888 - DNA, 25 bp, Homo sapien
tatgttcaacggtcacagaggcaac

SEQ ID NO: 1359889 - DNA, 25 bp, Homo sapien
gggtcatgacacaatgcaagttgct

SEQ ID NO: 1359890 - DNA, 25 bp, Homo sapien
caaatatttggctagtatttttcag

SEQ ID NO: 1359891 - DNA, 25 bp, Homo sapien
tgtaatttaaagtcatggacaaagg

SEQ ID NO: 1359892 - DNA, 25 bp, Homo sapien
tttaaagtcatggacaaaggtttga

SEQ ID NO: 1359893 - DNA, 25 bp, Homo sapien
aaagtcatggacaaaggtttgaata

SEQ ID NO: 1359894 - DNA, 25 bp, Homo sapien
ctagggaggcttaggtagaactgct

SEQ ID NO: 1359895 - DNA, 25 bp, Homo sapien
taaaatttgatataattccaatggc

SEQ ID NO: 1359896 - DNA, 25 bp, Homo sapien
caatggctcctaaaaactatggact

SEQ ID NO: 1359897 - DNA, 25 bp, Homo sapien
aagtcagcattcacacaaggtctaa

SEQ ID NO: 1359898 - DNA, 25 bp, Homo sapien
tattttgactgtggctagtatgccg

SEQ ID NO: 1359899 - DNA, 25 bp, Homo sapien
gatcacaactggtcaagcttaagct

SEQ ID NO: 1359900 - DNA, 25 bp, Homo sapien
tacacgaaatcaggtaagatggcat

SEQ ID NO: 1359901 - DNA, 25 bp, Homo sapien
tgtgaaaatagcaacagtcctccat

SEQ ID NO: 1359902 - DNA, 25 bp, Homo sapien
actatccaggagaactttcccaatc

SEQ ID NO: 1359903 - DNA, 25 bp, Homo sapien
caggatactatccaggagaactttc

SEQ ID NO: 1359904 - DNA, 25 bp, Homo sapien
caactccaagacacgtaattgtcag

SEQ ID NO: 1359905 - DNA, 25 bp, Homo sapien
tttcccaatctagcaaggcaggcca

SEQ ID NO: 1359906 - DNA, 25 bp, Homo sapien
ggccagagtttgaattttgtcccca

SEQ ID NO: 1359907 - DNA, 25 bp, Homo sapien
cagagtttgaattttgtccccaacg

SEQ ID NO: 1359908 - DNA, 25 bp, Homo sapien
ggagggccagagtttgaattttgtc

SEQ ID NO: 1359909 - DNA, 25 bp, Homo sapien
aaggagggccagagtttgaattttg

SEQ ID NO: 1359910 - DNA, 25 bp, Homo sapien
tagagagacagcttttttaatctgt

SEQ ID NO: 1359911 - DNA, 25 bp, Homo sapien
atgtactttattattttcatatggt

SEQ ID NO: 1359912 - DNA, 25 bp, Homo sapien
gtactttattattttcatatggtac

SEQ ID NO: 1359913 - DNA, 25 bp, Homo sapien
tgtactttattattttcatatggta

SEQ ID NO: 1359914 - DNA, 25 bp, Homo sapien
gatttcaagctcagcaatgtgttgt

SEQ ID NO: 1359915 - DNA, 25 bp, Homo sapien
tgtgttgtcgtagttcagccacagc

SEQ ID NO: 1359916 - DNA, 25 bp, Homo sapien
agcagctatgctatctgcttcccga

SEQ ID NO: 1359917 - DNA, 25 bp, Homo sapien
cagctatgctatctgcttcccgaag

SEQ ID NO: 1359918 - DNA, 25 bp, Homo sapien
aaacaaaatcagttagttgacatat

SEQ ID NO: 1359919 - DNA, 25 bp, Homo sapien
gtttttaagataatctaatcacgat

SEQ ID NO: 1359920 - DNA, 25 bp, Homo sapien
caaaatcagttagttgacatattta

SEQ ID NO: 1359921 - DNA, 25 bp, Homo sapien
tgtttttaagataatctaatcacga

SEQ ID NO: 1359922 - DNA, 25 bp, Homo sapien
cacttaattgagtaaggagtccttt

SEQ ID NO: 1359923 - DNA, 25 bp, Homo sapien
aatctctgcttgtttacgctttgct

SEQ ID NO: 1359924 - DNA, 25 bp, Homo sapien
tgttctgtgcagaaagatactgcac

SEQ ID NO: 1359925 - DNA, 25 bp, Homo sapien
actgcactttctcctgtaggctaat

SEQ ID NO: 1359926 - DNA, 25 bp, Homo sapien
tttccatctcccagtagtacgagct

SEQ ID NO: 1359927 - DNA, 25 bp, Homo sapien
tcccagtagtacgagctaagtggcg

SEQ ID NO: 1359928 - DNA, 25 bp, Homo sapien
tcagcttctctaagtcgaatggtca

SEQ ID NO: 1359929 - DNA, 25 bp, Homo sapien
tcatagcatttttcttgggtgggtc

SEQ ID NO: 1359930 - DNA, 25 bp, Homo sapien
tgtggtcacataccagataaatgtc

SEQ ID NO: 1359931 - DNA, 25 bp, Homo sapien
gaaaaagttacacaaggcacaatgg

SEQ ID NO: 1359932 - DNA, 25 bp, Homo sapien
caatgtcaaggcctaatttcggtcc

SEQ ID NO: 1359933 - DNA, 25 bp, Homo sapien
gtttcacactaaccaacaatggact

SEQ ID NO: 1359934 - DNA, 25 bp, Homo sapien
aggtacttcaaactcttacaaattg

SEQ ID NO: 1359935 - DNA, 25 bp, Homo sapien
gtacttcaaactcttacaaattgga

SEQ ID NO: 1359936 - DNA, 25 bp, Homo sapien
atcaggtacttcaaactcttacaaa

SEQ ID NO: 1359937 - DNA, 25 bp, Homo sapien
cttcaaactcttacaaattggatat

SEQ ID NO: 1359938 - DNA, 25 bp, Homo sapien
aatattattctcatcaggaagggag

SEQ ID NO: 1359939 - DNA, 25 bp, Homo sapien
caatattattctcatcaggaaggga

SEQ ID NO: 1359940 - DNA, 25 bp, Homo sapien
taaatccttgacttgctgtctaagt

SEQ ID NO: 1359941 - DNA, 25 bp, Homo sapien
tgttcctctaaatccttgacttgct

SEQ ID NO: 1359942 - DNA, 25 bp, Homo sapien
gtgaacagcaaatgttgctgcctga

SEQ ID NO: 1359943 - DNA, 25 bp, Homo sapien
atttggtgaacagcaaatgttgctg

SEQ ID NO: 1359944 - DNA, 25 bp, Homo sapien
ttggtgaacagcaaatgttgctgcc

SEQ ID NO: 1359945 - DNA, 25 bp, Homo sapien
ggtgaacagcaaatgttgctgcctg

SEQ ID NO: 1359946 - DNA, 25 bp, Homo sapien
aatcttcgttgtagttggaactgca

SEQ ID NO: 1359947 - DNA, 25 bp, Homo sapien
ggaccaattccttctctagctgtag

SEQ ID NO: 1359948 - DNA, 25 bp, Homo sapien
tatatccaagactttatcctgcatc

SEQ ID NO: 1359949 - DNA, 25 bp, Homo sapien
cactcagtcgggcttggaccaattc

SEQ ID NO: 1359950 - DNA, 25 bp, Homo sapien
gactttatattagaagatccccaag

SEQ ID NO: 1359951 - DNA, 25 bp, Homo sapien
aaaagctatagtaatgttgggcaca

SEQ ID NO: 1359952 - DNA, 25 bp, Homo sapien
gctgaaatgctctgataacaagtca

SEQ ID NO: 1359953 - DNA, 25 bp, Homo sapien
ctcaaaggcccatatgagaatggaa

SEQ ID NO: 1359954 - DNA, 25 bp, Homo sapien
ggtcctgctgtgtcgctggtcttga

SEQ ID NO: 1359955 - DNA, 25 bp, Homo sapien
gcagtggcatcatcaatgatcactc

SEQ ID NO: 1359956 - DNA, 25 bp, Homo sapien
agggtcctgctgtgtcgctggtctt

SEQ ID NO: 1359957 - DNA, 25 bp, Homo sapien
gcatcatcaatgatcactcaagtga

SEQ ID NO: 1359958 - DNA, 25 bp, Homo sapien
tattagagtcagagaagatcctttg

SEQ ID NO: 1359959 - DNA, 25 bp, Homo sapien
taatacattttccactaagcactgc

SEQ ID NO: 1359960 - DNA, 25 bp, Homo sapien
gacagggatgtcgaagacctgaact

SEQ ID NO: 1359961 - DNA, 25 bp, Homo sapien
taaatatctatcagggcaggttgga

SEQ ID NO: 1359962 - DNA, 25 bp, Homo sapien
aacctgctctgcttcacttcacgtt

SEQ ID NO: 1359963 - DNA, 25 bp, Homo sapien
ctgctctgcttcacttcacgttgca

SEQ ID NO: 1359964 - DNA, 25 bp, Homo sapien
tgctctgcttcacttcacgttgcat

SEQ ID NO: 1359965 - DNA, 25 bp, Homo sapien
acctgctctgcttcacttcacgttg

SEQ ID NO: 1359966 - DNA, 25 bp, Homo sapien
ctaaatggctgaacattacagggga

SEQ ID NO: 1359967 - DNA, 25 bp, Homo sapien
cagcttgttcaaaaagtttatagac

SEQ ID NO: 1359968 - DNA, 25 bp, Homo sapien
tattaccgtttgtagaaacaagaca

SEQ ID NO: 1359969 - DNA, 25 bp, Homo sapien
cagctaagaatggtagcagactgtt

SEQ ID NO: 1359970 - DNA, 25 bp, Homo sapien
aaagtgcatagagtgaggaaaacat

SEQ ID NO: 1359971 - DNA, 25 bp, Homo sapien
ctgcaatatgattgtgatcaaattc

SEQ ID NO: 1359972 - DNA, 25 bp, Homo sapien
cacatgaccacttcaggtaaaccac

SEQ ID NO: 1359973 - DNA, 25 bp, Homo sapien
catgagattatcttttcgttttggg

SEQ ID NO: 1359974 - DNA, 25 bp, Homo sapien
acacctcacacagcttttttgctac

SEQ ID NO: 1359975 - DNA, 25 bp, Homo sapien
gccgttagacttaaagtcagcaaca

SEQ ID NO: 1359976 - DNA, 25 bp, Homo sapien
cagacttgccgttagacttaaagtc

SEQ ID NO: 1359977 - DNA, 25 bp, Homo sapien
cctcacacagcttttttgctacatc

SEQ ID NO: 1359978 - DNA, 25 bp, Homo sapien
taataaagatgccagggtttgtgga

SEQ ID NO: 1359979 - DNA, 25 bp, Homo sapien
agatgccagggtttgtggatttgat

SEQ ID NO: 1359980 - DNA, 25 bp, Homo sapien
ctaataaagatgccagggtttgtgg

SEQ ID NO: 1359981 - DNA, 25 bp, Homo sapien
taaagatgccagggtttgtggattt

SEQ ID NO: 1359982 - DNA, 25 bp, Homo sapien
ctgaacggtgcaggaagaatacaga

SEQ ID NO: 1359983 - DNA, 25 bp, Homo sapien
cggtgcaggaagaatacagacatgt

SEQ ID NO: 1359984 - DNA, 25 bp, Homo sapien
tgaacggtgcaggaagaatacagac

SEQ ID NO: 1359985 - DNA, 25 bp, Homo sapien
aacggtgcaggaagaatacagacat

SEQ ID NO: 1359986 - DNA, 25 bp, Homo sapien
taactggttcacaatcctgcacctt

SEQ ID NO: 1359987 - DNA, 25 bp, Homo sapien
aatcctgcaccttccaagcatagca

SEQ ID NO: 1359988 - DNA, 25 bp, Homo sapien
ttaactggttcacaatcctgcacct

SEQ ID NO: 1359989 - DNA, 25 bp, Homo sapien
cctgcaccttccaagcatagcatac

SEQ ID NO: 1359990 - DNA, 25 bp, Homo sapien
ggattctctttgccagacactgtct

SEQ ID NO: 1359991 - DNA, 25 bp, Homo sapien
catttaggattctctttgccagaca

SEQ ID NO: 1359992 - DNA, 25 bp, Homo sapien
tttaggattctctttgccagacact

SEQ ID NO: 1359993 - DNA, 25 bp, Homo sapien
cacatttaggattctctttgccaga

SEQ ID NO: 1359994 - DNA, 25 bp, Homo sapien
ctttccctctggtttcttgggatca

SEQ ID NO: 1359995 - DNA, 25 bp, Homo sapien
gacagagacctctgggtttctctta

SEQ ID NO: 1359996 - DNA, 25 bp, Homo sapien
tccctctggtttcttgggatcacct

SEQ ID NO: 1359997 - DNA, 25 bp, Homo sapien
ggaataagcagacacctttccctct

SEQ ID NO: 1359998 - DNA, 25 bp, Homo sapien
gactaaattgcttcttccttcctgg

SEQ ID NO: 1359999 - DNA, 25 bp, Homo sapien
ctaaattgcttcttccttcctggtc

SEQ ID NO: 1360000 - DNA, 25 bp, Homo sapien
cctgactaaattgcttcttccttcc

SEQ ID NO: 1360001 - DNA, 25 bp, Homo sapien
aaattgcttcttccttcctggtcac

SEQ ID NO: 1360002 - DNA, 25 bp, Homo sapien
tatgccagtactactttgactactc

SEQ ID NO: 1360003 - DNA, 25 bp, Homo sapien
ccaatatacaaatacgagatagatt

SEQ ID NO: 1360004 - DNA, 25 bp, Homo sapien
aaggccacttgcaattccatgtgaa

SEQ ID NO: 1360005 - DNA, 25 bp, Homo sapien
tctgtaggtgattttgggtagtact

SEQ ID NO: 1360006 - DNA, 25 bp, Homo sapien
ctctagttattcattgctggcgcat

SEQ ID NO: 1360007 - DNA, 25 bp, Homo sapien
cattgctggcgcattcttttacttt

SEQ ID NO: 1360008 - DNA, 25 bp, Homo sapien
tattgatatggttggaataaaatct

SEQ ID NO: 1360009 - DNA, 25 bp, Homo sapien
gaagctactgtgaatggactttttt

SEQ ID NO: 1360010 - DNA, 25 bp, Homo sapien
caaaactagcttacctacagtagca

SEQ ID NO: 1360011 - DNA, 25 bp, Homo sapien
tactaagtgtatgctctatctggaa

SEQ ID NO: 1360012 - DNA, 25 bp, Homo sapien
gagtctctggtcaaatcttagctcc

SEQ ID NO: 1360013 - DNA, 25 bp, Homo sapien
tgtttcttcccagatcttcaaatag

SEQ ID NO: 1360014 - DNA, 25 bp, Homo sapien
tccagatctgcatagagttccagga

SEQ ID NO: 1360015 - DNA, 25 bp, Homo sapien
aatctagcgcctacttgaggatgga

SEQ ID NO: 1360016 - DNA, 25 bp, Homo sapien
caacttcttctgcttacttattaca

SEQ ID NO: 1360017 - DNA, 25 bp, Homo sapien
aaagaacgtcctactttgcagtcac

SEQ ID NO: 1360018 - DNA, 25 bp, Homo sapien
cctgattaagatcgcccttgtctga

SEQ ID NO: 1360019 - DNA, 25 bp, Homo sapien
tcctgattaagatcgcccttgtctg

SEQ ID NO: 1360020 - DNA, 25 bp, Homo sapien
ttcctgattaagatcgcccttgtct

SEQ ID NO: 1360021 - DNA, 25 bp, Homo sapien
tattcctgattaagatcgcccttgt

SEQ ID NO: 1360022 - DNA, 25 bp, Homo sapien
taactgcatatattctgcatgctgg

SEQ ID NO: 1360023 - DNA, 25 bp, Homo sapien
gtagctgtttagtacgcaccctagg

SEQ ID NO: 1360024 - DNA, 25 bp, Homo sapien
tacctgaggctagatgtacaattag

SEQ ID NO: 1360025 - DNA, 25 bp, Homo sapien
gccacactgtcgaagctttaaatga

SEQ ID NO: 1360026 - DNA, 25 bp, Homo sapien
agcaattctgacatacactgcttat

SEQ ID NO: 1360027 - DNA, 25 bp, Homo sapien
aaagcaattctgacatacactgctt

SEQ ID NO: 1360028 - DNA, 25 bp, Homo sapien
gatacctattatgaaaacagatttc

SEQ ID NO: 1360029 - DNA, 25 bp, Homo sapien
aatgatacctattatgaaaacagat

SEQ ID NO: 1360030 - DNA, 25 bp, Homo sapien
caataagacccctaaatatcacaga

SEQ ID NO: 1360031 - DNA, 25 bp, Homo sapien
ttagaacaggagtccttaggccaca

SEQ ID NO: 1360032 - DNA, 25 bp, Homo sapien
tccttaggccacaataagaccccta

SEQ ID NO: 1360033 - DNA, 25 bp, Homo sapien
aattagaacaggagtccttaggcca

SEQ ID NO: 1360034 - DNA, 25 bp, Homo sapien
tggccaactcccgttttatgaggta

SEQ ID NO: 1360035 - DNA, 25 bp, Homo sapien
tgatggtggccaactcccgttttat

SEQ ID NO: 1360036 - DNA, 25 bp, Homo sapien
tcatcactctgctgtttgatggtgg

SEQ ID NO: 1360037 - DNA, 25 bp, Homo sapien
gctgtttgatggtggccaactcccg

SEQ ID NO: 1360038 - DNA, 25 bp, Homo sapien
gtatcaatctatctgccaaggaagc

SEQ ID NO: 1360039 - DNA, 25 bp, Homo sapien
tatcaatctatctgccaaggaagca

SEQ ID NO: 1360040 - DNA, 25 bp, Homo sapien
tctaatgtctcgatgcgctgtttta

SEQ ID NO: 1360041 - DNA, 25 bp, Homo sapien
gtctcgatgcgctgttttaaaagtc

SEQ ID NO: 1360042 - DNA, 25 bp, Homo sapien
tttttctaatgtctcgatgcgctgt

SEQ ID NO: 1360043 - DNA, 25 bp, Homo sapien
taatgtctcgatgcgctgttttaaa

SEQ ID NO: 1360044 - DNA, 25 bp, Homo sapien
cttttgactaaaaactggccagaat

SEQ ID NO: 1360045 - DNA, 25 bp, Homo sapien
aactgttcgtatgtctatcagaatc

SEQ ID NO: 1360046 - DNA, 25 bp, Homo sapien
gcgtcccgaagcacaaatttaaata

SEQ ID NO: 1360047 - DNA, 25 bp, Homo sapien
cattttagggctttagatctctgcg

SEQ ID NO: 1360048 - DNA, 25 bp, Homo sapien
gggctcactgacagatatagttctt

SEQ ID NO: 1360049 - DNA, 25 bp, Homo sapien
agaaggtcatcaccccaaaggtctt

SEQ ID NO: 1360050 - DNA, 25 bp, Homo sapien
tttgatgatcataccaatgggctgt

SEQ ID NO: 1360051 - DNA, 25 bp, Homo sapien
tgtgtgtaagaagtagcatttccca

SEQ ID NO: 1360052 - DNA, 25 bp, Homo sapien
ggtggagggctagggaaggaatagc

SEQ ID NO: 1360053 - DNA, 25 bp, Homo sapien
aatacctaatgtagatgacgggtta

SEQ ID NO: 1360054 - DNA, 25 bp, Homo sapien
atgggtgcagcaaaccaccatggca

SEQ ID NO: 1360055 - DNA, 25 bp, Homo sapien
cgtgtatacctatgtaacaaacctg

SEQ ID NO: 1360056 - DNA, 25 bp, Homo sapien
ttttattgtagtgtattccttttca

SEQ ID NO: 1360057 - DNA, 25 bp, Homo sapien
catttctttcgtttttattgtagtg

SEQ ID NO: 1360058 - DNA, 25 bp, Homo sapien
tttaatttcaacttgctcttccatt

SEQ ID NO: 1360059 - DNA, 25 bp, Homo sapien
tattgtagtgtattccttttcaagc

SEQ ID NO: 1360060 - DNA, 25 bp, Homo sapien
tagtaagatctaggttgggtgacag

SEQ ID NO: 1360061 - DNA, 25 bp, Homo sapien
aaagtgggagaaggcatgctgtaaa

SEQ ID NO: 1360062 - DNA, 25 bp, Homo sapien
tctcaggggatactccctcaggagc

SEQ ID NO: 1360063 - DNA, 25 bp, Homo sapien
taagatctaggttgggtgacaggtt

SEQ ID NO: 1360064 - DNA, 25 bp, Homo sapien
actgcatcctagacttctcaagtga

SEQ ID NO: 1360065 - DNA, 25 bp, Homo sapien
taataacttttgagcagactgagcc

SEQ ID NO: 1360066 - DNA, 25 bp, Homo sapien
caagaggtggaaggtcataatgaac

SEQ ID NO: 1360067 - DNA, 25 bp, Homo sapien
tactgggtgccaagagggaaaacat

SEQ ID NO: 1360068 - DNA, 25 bp, Homo sapien
tttttggcacaactgaggaaatgtg

SEQ ID NO: 1360069 - DNA, 25 bp, Homo sapien
ggaagcaatgtggtaaatgaggcaa

SEQ ID NO: 1360070 - DNA, 25 bp, Homo sapien
tatggaactactgttaagtggtgga

SEQ ID NO: 1360071 - DNA, 25 bp, Homo sapien
tgaacatagactgagtattaggcag

SEQ ID NO: 1360072 - DNA, 25 bp, Homo sapien
catcaaactgatgtggaatgacctt

SEQ ID NO: 1360073 - DNA, 25 bp, Homo sapien
aattgtatttgacttggtaagctgc

SEQ ID NO: 1360074 - DNA, 25 bp, Homo sapien
tatttgacttggtaagctgcttgga

SEQ ID NO: 1360075 - DNA, 25 bp, Homo sapien
tgcttggattagcttgtctgggaca

SEQ ID NO: 1360076 - DNA, 25 bp, Homo sapien
gaagaagtgctaatcctacacgaaa

SEQ ID NO: 1360077 - DNA, 25 bp, Homo sapien
tctgaagaagtgctaatcctacacg

SEQ ID NO: 1360078 - DNA, 25 bp, Homo sapien
gaagtgctaatcctacacgaaacac

SEQ ID NO: 1360079 - DNA, 25 bp, Homo sapien
gctaatcctacacgaaacactattt

SEQ ID NO: 1360080 - DNA, 25 bp, Homo sapien
ccaggatgatgcatacattgaggta

SEQ ID NO: 1360081 - DNA, 25 bp, Homo sapien
tgtaagaaagatagtcagaaaccag

SEQ ID NO: 1360082 - DNA, 25 bp, Homo sapien
caattggtagtggaaaagttgtaag

SEQ ID NO: 1360083 - DNA, 25 bp, Homo sapien
actctgagattgaaaatgtacaaag

SEQ ID NO: 1360084 - DNA, 25 bp, Homo sapien
tcaaactggtacatacaaaggccca

SEQ ID NO: 1360085 - DNA, 25 bp, Homo sapien
taaaaagttcacgaagtctataatc

SEQ ID NO: 1360086 - DNA, 25 bp, Homo sapien
agttcacgaagtctataatcttgca

SEQ ID NO: 1360087 - DNA, 25 bp, Homo sapien
catacattcaaactggtacatacaa

SEQ ID NO: 1360088 - DNA, 25 bp, Homo sapien
tgtaggccaactgtaacatgatggc

SEQ ID NO: 1360089 - DNA, 25 bp, Homo sapien
aatgtgacacggagtggcatacacc

SEQ ID NO: 1360090 - DNA, 25 bp, Homo sapien
tgtgactctgagctgataagaatcc

SEQ ID NO: 1360091 - DNA, 25 bp, Homo sapien
cttgagtcctagagcaatgtgctgc

SEQ ID NO: 1360092 - DNA, 25 bp, Homo sapien
taattgcgcctcggataaacctcac

SEQ ID NO: 1360093 - DNA, 25 bp, Homo sapien
cactggctacgatactgccactgcg

SEQ ID NO: 1360094 - DNA, 25 bp, Homo sapien
attgcgcctcggataaacctcactg

SEQ ID NO: 1360095 - DNA, 25 bp, Homo sapien
ctggctacgatactgccactgcgca

SEQ ID NO: 1360096 - DNA, 25 bp, Homo sapien
cagtaaccaacctcacgatctacta

SEQ ID NO: 1360097 - DNA, 25 bp, Homo sapien
aactataaaagcacttccttgacag

SEQ ID NO: 1360098 - DNA, 25 bp, Homo sapien
cctcacgatctactaaagagtaagc

SEQ ID NO: 1360099 - DNA, 25 bp, Homo sapien
gcaacaatccaactataaaagcact

SEQ ID NO: 1360100 - DNA, 25 bp, Homo sapien
tcaatttttcacaaggcgaggtcat

SEQ ID NO: 1360101 - DNA, 25 bp, Homo sapien
aagttgtgttcagggtaagttctag

SEQ ID NO: 1360102 - DNA, 25 bp, Homo sapien
taaaacctcctgtccaaggctatct

SEQ ID NO: 1360103 - DNA, 25 bp, Homo sapien
taagttctagcaatgtcccttcgga

SEQ ID NO: 1360104 - DNA, 25 bp, Homo sapien
actttgtgcactgcataaaagttgc

SEQ ID NO: 1360105 - DNA, 25 bp, Homo sapien
caaactattgctctaaagtgatggg

SEQ ID NO: 1360106 - DNA, 25 bp, Homo sapien
gatggggtatccctttatgaacaag

SEQ ID NO: 1360107 - DNA, 25 bp, Homo sapien
tgcataaaagttgccaaactattgc

SEQ ID NO: 1360108 - DNA, 25 bp, Homo sapien
atggtacagtacccaacattcaaag

SEQ ID NO: 1360109 - DNA, 25 bp, Homo sapien
gatggtacagtacccaacattcaaa

SEQ ID NO: 1360110 - DNA, 25 bp, Homo sapien
tggtacagtacccaacattcaaagg

SEQ ID NO: 1360111 - DNA, 25 bp, Homo sapien
gaacttcaacaaagaacatgaatac

SEQ ID NO: 1360112 - DNA, 25 bp, Homo sapien
ataagaacttcaacaaagaacatga

SEQ ID NO: 1360113 - DNA, 25 bp, Homo sapien
cttctttttgcgtacatcttcccat

SEQ ID NO: 1360114 - DNA, 25 bp, Homo sapien
tctttttgcgtacatcttcccattc

SEQ ID NO: 1360115 - DNA, 25 bp, Homo sapien
tttttgcgtacatcttcccattcat

SEQ ID NO: 1360116 - DNA, 25 bp, Homo sapien
tttccttctttttgcgtacatcttc

SEQ ID NO: 1360117 - DNA, 25 bp, Homo sapien
ctcgacacaagagaagagccactgt

SEQ ID NO: 1360118 - DNA, 25 bp, Homo sapien
gctagaggctgatgaactcgacaca

SEQ ID NO: 1360119 - DNA, 25 bp, Homo sapien
cacaagagaagagccactgtttctt

SEQ ID NO: 1360120 - DNA, 25 bp, Homo sapien
gatgaactcgacacaagagaagagc

SEQ ID NO: 1360121 - DNA, 25 bp, Homo sapien
agacttactatccgtttctaacaat

SEQ ID NO: 1360122 - DNA, 25 bp, Homo sapien
gaggaatcacatcctttcacatcaa

SEQ ID NO: 1360123 - DNA, 25 bp, Homo sapien
aggaatcacatcctttcacatcaac

SEQ ID NO: 1360124 - DNA, 25 bp, Homo sapien
agaggaatcacatcctttcacatca

SEQ ID NO: 1360125 - DNA, 25 bp, Homo sapien
caccaagcacaaattcatgtctcag

SEQ ID NO: 1360126 - DNA, 25 bp, Homo sapien
gatctttgacattacattaaaccat

SEQ ID NO: 1360127 - DNA, 25 bp, Homo sapien
taatagccgcagtaaaactatgaaa

SEQ ID NO: 1360128 - DNA, 25 bp, Homo sapien
aactttcatcaaatagatctttgac

SEQ ID NO: 1360129 - DNA, 25 bp, Homo sapien
gaaaagcacatttaacacacaaggg

SEQ ID NO: 1360130 - DNA, 25 bp, Homo sapien
ccagacttactagttggtggggcga

SEQ ID NO: 1360131 - DNA, 25 bp, Homo sapien
agagagaattcaaattattatcctt

SEQ ID NO: 1360132 - DNA, 25 bp, Homo sapien
tattatccttgcaatttttccccag

SEQ ID NO: 1360133 - DNA, 25 bp, Homo sapien
taaatttctgggctacagcaatact

SEQ ID NO: 1360134 - DNA, 25 bp, Homo sapien
actatgacaaagtggccttcatccc

SEQ ID NO: 1360135 - DNA, 25 bp, Homo sapien
tatgacaaagtggccttcatccctg

SEQ ID NO: 1360136 - DNA, 25 bp, Homo sapien
ctatgacaaagtggccttcatccct

SEQ ID NO: 1360137 - DNA, 25 bp, Homo sapien
tagttcctaatcctgttccctgtga

SEQ ID NO: 1360138 - DNA, 25 bp, Homo sapien
gcagtattttctatcaccaggtttg

SEQ ID NO: 1360139 - DNA, 25 bp, Homo sapien
tctcaataggaagggaccaagtctg

SEQ ID NO: 1360140 - DNA, 25 bp, Homo sapien
ccaagtctgaggacaggtctattta

SEQ ID NO: 1360141 - DNA, 25 bp, Homo sapien
tcacctgagccaaggaggtcaaagc

SEQ ID NO: 1360142 - DNA, 25 bp, Homo sapien
tgagccgtggtcacgccactgtact

SEQ ID NO: 1360143 - DNA, 25 bp, Homo sapien
ttgggaggcagaggtcgaaggatca

SEQ ID NO: 1360144 - DNA, 25 bp, Homo sapien
gaggcagaggtcgaaggatcacctg

SEQ ID NO: 1360145 - DNA, 25 bp, Homo sapien
agtgcagagtacagaggcgcgatct

SEQ ID NO: 1360146 - DNA, 25 bp, Homo sapien
gtgcagagtacagaggcgcgatctc

SEQ ID NO: 1360147 - DNA, 25 bp, Homo sapien
gggattggttccctgataccaaaga

SEQ ID NO: 1360148 - DNA, 25 bp, Homo sapien
caaaatgtgtgggtggtgacgtcct

SEQ ID NO: 1360149 - DNA, 25 bp, Homo sapien
taaatcagctctggatgacttttag

SEQ ID NO: 1360150 - DNA, 25 bp, Homo sapien
gaacttgtggatatggagcgcagac

SEQ ID NO: 1360151 - DNA, 25 bp, Homo sapien
cttttaagagaatggtaagctgcca

SEQ ID NO: 1360152 - DNA, 25 bp, Homo sapien
gtatagtggctttagatttacttaa

SEQ ID NO: 1360153 - DNA, 25 bp, Homo sapien
ttctattctaattgtcatggacatg

SEQ ID NO: 1360154 - DNA, 25 bp, Homo sapien
taagagaatggtaagctgccagctg

SEQ ID NO: 1360155 - DNA, 25 bp, Homo sapien
gattttggcgacaatttcacaggtg

SEQ ID NO: 1360156 - DNA, 25 bp, Homo sapien
taaactgtgctatttccacatgatg

SEQ ID NO: 1360157 - DNA, 25 bp, Homo sapien
gtaatttcatacactgctggcggga

SEQ ID NO: 1360158 - DNA, 25 bp, Homo sapien
gctggcgggatatcaaaaatacagg

SEQ ID NO: 1360159 - DNA, 25 bp, Homo sapien
ccattaggagaaaaggatattttgc

SEQ ID NO: 1360160 - DNA, 25 bp, Homo sapien
gagatgatgccctaaagagcctctg

SEQ ID NO: 1360161 - DNA, 25 bp, Homo sapien
aaacggagtccggaatatgcattcc

SEQ ID NO: 1360162 - DNA, 25 bp, Homo sapien
caataacatggtaaggaaacaaacg

SEQ ID NO: 1360163 - DNA, 25 bp, Homo sapien
ttagccaggagttctaagtcgtctg

SEQ ID NO: 1360164 - DNA, 25 bp, Homo sapien
tggtatgtaatgaagtagatggact

SEQ ID NO: 1360165 - DNA, 25 bp, Homo sapien
ttctaagtcgtctggactcaactgt

SEQ ID NO: 1360166 - DNA, 25 bp, Homo sapien
catctgactgactgtatgcgatact

SEQ ID NO: 1360167 - DNA, 25 bp, Homo sapien
agagagtagagctcagcttttctgc

SEQ ID NO: 1360168 - DNA, 25 bp, Homo sapien
gatcagtgggctgttaccgttgaga

SEQ ID NO: 1360169 - DNA, 25 bp, Homo sapien
ccaagaaagaaaagttgaatggcat

SEQ ID NO: 1360170 - DNA, 25 bp, Homo sapien
gttgagagacgaatcccaagaaaga

SEQ ID NO: 1360171 - DNA, 25 bp, Homo sapien
tattatagaaaggatcagtgggctg

SEQ ID NO: 1360172 - DNA, 25 bp, Homo sapien
cttcctgggtgttttaccactggtg

SEQ ID NO: 1360173 - DNA, 25 bp, Homo sapien
actggtgcatctgctggcagttagc

SEQ ID NO: 1360174 - DNA, 25 bp, Homo sapien
atctgctggcagttagctttgtacc

SEQ ID NO: 1360175 - DNA, 25 bp, Homo sapien
cctgggtgttttaccactggtgcat

SEQ ID NO: 1360176 - DNA, 25 bp, Homo sapien
tcacagaattgggagccgcctgcca

SEQ ID NO: 1360177 - DNA, 25 bp, Homo sapien
agagctgagactggtgcttcgcagc

SEQ ID NO: 1360178 - DNA, 25 bp, Homo sapien
gcgggactgtagttgtcgtgtctgg

SEQ ID NO: 1360179 - DNA, 25 bp, Homo sapien
gtgcttcgcagccaactgtctgcag

SEQ ID NO: 1360180 - DNA, 25 bp, Homo sapien
catgcgcactggtattgggctgtcc

SEQ ID NO: 1360181 - DNA, 25 bp, Homo sapien
gcaatagtagcagaagttaagccct

SEQ ID NO: 1360182 - DNA, 25 bp, Homo sapien
tgggctgtccctcactggcaatagt

SEQ ID NO: 1360183 - DNA, 25 bp, Homo sapien
taataactgacccagactgctctgt

SEQ ID NO: 1360184 - DNA, 25 bp, Homo sapien
tcaggattgcaggttagcagcacag

SEQ ID NO: 1360185 - DNA, 25 bp, Homo sapien
tgagcatacaagtaccaaagtgagt

SEQ ID NO: 1360186 - DNA, 25 bp, Homo sapien
ctgacctggagcctaaaagcatctt

SEQ ID NO: 1360187 - DNA, 25 bp, Homo sapien
gactcttgggaatcatgctgctata

SEQ ID NO: 1360188 - DNA, 25 bp, Homo sapien
caccaagaccggctgctttatgcat

SEQ ID NO: 1360189 - DNA, 25 bp, Homo sapien
tagcaagtactgttataggcactac

SEQ ID NO: 1360190 - DNA, 25 bp, Homo sapien
taaagttgtcttccttcatagagaa

SEQ ID NO: 1360191 - DNA, 25 bp, Homo sapien
cagaattttgctggattccctacca

SEQ ID NO: 1360192 - DNA, 25 bp, Homo sapien
tctgggcaacagagcaagaccctgt

SEQ ID NO: 1360193 - DNA, 25 bp, Homo sapien
agtctgggcaacagagcaagaccct

SEQ ID NO: 1360194 - DNA, 25 bp, Homo sapien
catgatcaccccactgcactacagt

SEQ ID NO: 1360195 - DNA, 25 bp, Homo sapien
acagtctgggcaacagagcaagacc

SEQ ID NO: 1360196 - DNA, 25 bp, Homo sapien
gaatggctacaaactcttctcaagt

SEQ ID NO: 1360197 - DNA, 25 bp, Homo sapien
ggaatggctacaaactcttctcaag

SEQ ID NO: 1360198 - DNA, 25 bp, Homo sapien
caggaatggctacaaactcttctca

SEQ ID NO: 1360199 - DNA, 25 bp, Homo sapien
aatggctacaaactcttctcaagtt

SEQ ID NO: 1360200 - DNA, 25 bp, Homo sapien
tccacgggatttacgaggacgtgcc

SEQ ID NO: 1360201 - DNA, 25 bp, Homo sapien
tgggacgccacagttagacccgccg

SEQ ID NO: 1360202 - DNA, 25 bp, Homo sapien
tggagacacgccatgcgcagaatcc

SEQ ID NO: 1360203 - DNA, 25 bp, Homo sapien
tcccggaggccaagtaaagacgcca

SEQ ID NO: 1360204 - DNA, 25 bp, Homo sapien
aggcgaggaagcgagtgcagggaac

SEQ ID NO: 1360205 - DNA, 25 bp, Homo sapien
gaagcgagtgcagggaacttaggcc

SEQ ID NO: 1360206 - DNA, 25 bp, Homo sapien
acaggcgaggaagcgagtgcaggga

SEQ ID NO: 1360207 - DNA, 25 bp, Homo sapien
cgaggaagcgagtgcagggaactta

SEQ ID NO: 1360208 - DNA, 25 bp, Homo sapien
tggctccacgggtcgcccgtcccga

SEQ ID NO: 1360209 - DNA, 25 bp, Homo sapien
ttgagtagacttcgccgtaaacatt

SEQ ID NO: 1360210 - DNA, 25 bp, Homo sapien
acattaacttcccatccagccggca

SEQ ID NO: 1360211 - DNA, 25 bp, Homo sapien
cttggaaacgttgagtagacttcgc

SEQ ID NO: 1360212 - DNA, 25 bp, Homo sapien
cagctggccagctggttcctccggg

SEQ ID NO: 1360213 - DNA, 25 bp, Homo sapien
gcaccgccgctgtcggaactgcagc

SEQ ID NO: 1360214 - DNA, 25 bp, Homo sapien
cgctgtcggaactgcagccagcccc

SEQ ID NO: 1360215 - DNA, 25 bp, Homo sapien
ccagctggccagctggttcctccgg

SEQ ID NO: 1360216 - DNA, 25 bp, Homo sapien
tagggcactcgcaaaaacaataatc

SEQ ID NO: 1360217 - DNA, 25 bp, Homo sapien
tgtactcttacacgtgtcttcgcat

SEQ ID NO: 1360218 - DNA, 25 bp, Homo sapien
taatcaacgcgtaaatgacacttgt

SEQ ID NO: 1360219 - DNA, 25 bp, Homo sapien
tcttcgcattgggtttatgcagact

SEQ ID NO: 1360220 - DNA, 25 bp, Homo sapien
ccaccgtatgcattctttagaagac

SEQ ID NO: 1360221 - DNA, 25 bp, Homo sapien
ctccaccgtatgcattctttagaag

SEQ ID NO: 1360222 - DNA, 25 bp, Homo sapien
attctttagaagactctgacatcat

SEQ ID NO: 1360223 - DNA, 25 bp, Homo sapien
tccaccgtatgcattctttagaaga

SEQ ID NO: 1360224 - DNA, 25 bp, Homo sapien
gcaggtatggaattaaacctaacac

SEQ ID NO: 1360225 - DNA, 25 bp, Homo sapien
ttgcaggtatggaattaaacctaac

SEQ ID NO: 1360226 - DNA, 25 bp, Homo sapien
tatggaattaaacctaacacttcat

SEQ ID NO: 1360227 - DNA, 25 bp, Homo sapien
ctttcttgcaggtatggaattaaac

SEQ ID NO: 1360228 - DNA, 25 bp, Homo sapien
tcccactagggtttctaaaggcagc

SEQ ID NO: 1360229 - DNA, 25 bp, Homo sapien
cagcagtcattttgttggtaaccat

SEQ ID NO: 1360230 - DNA, 25 bp, Homo sapien
gcagcagtcattttgttggtaacca

SEQ ID NO: 1360231 - DNA, 25 bp, Homo sapien
agggtttctaaaggcagcagtcatt

SEQ ID NO: 1360232 - DNA, 25 bp, Homo sapien
gagactggggatttgaattgaattt

SEQ ID NO: 1360233 - DNA, 25 bp, Homo sapien
tggttttgaaggcaatacccacaga

SEQ ID NO: 1360234 - DNA, 25 bp, Homo sapien
ttgaaggcaatacccacagagggaa

SEQ ID NO: 1360235 - DNA, 25 bp, Homo sapien
gaaggcaatacccacagagggaagt

SEQ ID NO: 1360236 - DNA, 25 bp, Homo sapien
ttttgaaggcaatacccacagaggg

SEQ ID NO: 1360237 - DNA, 25 bp, Homo sapien
tcaaagaatctcaattgcacctact

SEQ ID NO: 1360238 - DNA, 25 bp, Homo sapien
ccaggaagccaagtgttatgggtcg

SEQ ID NO: 1360239 - DNA, 25 bp, Homo sapien
ttgcagatgaccaaccagggacagc

SEQ ID NO: 1360240 - DNA, 25 bp, Homo sapien
caattgcacctactccaggaagcca

SEQ ID NO: 1360241 - DNA, 25 bp, Homo sapien
actggaaacagatgaatcttggcaa

SEQ ID NO: 1360242 - DNA, 25 bp, Homo sapien
tcccaggctttcaccaatatcctcc

SEQ ID NO: 1360243 - DNA, 25 bp, Homo sapien
aaacagatgaatcttggcaagcttc

SEQ ID NO: 1360244 - DNA, 25 bp, Homo sapien
gaatcttggcaagcttctcccaggc

SEQ ID NO: 1360245 - DNA, 25 bp, Homo sapien
tgtcagtgctaagtgccattccgat

SEQ ID NO: 1360246 - DNA, 25 bp, Homo sapien
gagctcctggagtcattcggtgtat

SEQ ID NO: 1360247 - DNA, 25 bp, Homo sapien
gactcctttaagcacagactctcta

SEQ ID NO: 1360248 - DNA, 25 bp, Homo sapien
gactctctaagatgctgaccccatg

SEQ ID NO: 1360249 - DNA, 25 bp, Homo sapien
ccagtcataatcataattgtcattg

SEQ ID NO: 1360250 - DNA, 25 bp, Homo sapien
aatagcctattagcagaacacccag

SEQ ID NO: 1360251 - DNA, 25 bp, Homo sapien
ttcagtcccattaaaaaccatagat

SEQ ID NO: 1360252 - DNA, 25 bp, Homo sapien
gtacgtctttattagtcatccaaac

SEQ ID NO: 1360253 - DNA, 25 bp, Homo sapien
gaccctgtatcagaaaacgtttcaa

SEQ ID NO: 1360254 - DNA, 25 bp, Homo sapien
agaccctgtatcagaaaacgtttca

SEQ ID NO: 1360255 - DNA, 25 bp, Homo sapien
caagaccctgtatcagaaaacgttt

SEQ ID NO: 1360256 - DNA, 25 bp, Homo sapien
ggagcagtgcttcgcaaaagtttgg

SEQ ID NO: 1360257 - DNA, 25 bp, Homo sapien
catcactgattgctgtctggagcag

SEQ ID NO: 1360258 - DNA, 25 bp, Homo sapien
ttcgaagtgggacatagcgtgttcc

SEQ ID NO: 1360259 - DNA, 25 bp, Homo sapien
caaaccgacgtttggcatcactgat

SEQ ID NO: 1360260 - DNA, 25 bp, Homo sapien
gaggtgactggtgatgaatacaatg

SEQ ID NO: 1360261 - DNA, 25 bp, Homo sapien
tggaaagcattgatggtcagccagg

SEQ ID NO: 1360262 - DNA, 25 bp, Homo sapien
ttcacctgctatttggatgcaggcc

SEQ ID NO: 1360263 - DNA, 25 bp, Homo sapien
agtggaggtgactggtgatgaatac

SEQ ID NO: 1360264 - DNA, 25 bp, Homo sapien
taagcctaaaatacaacccaactga

SEQ ID NO: 1360265 - DNA, 25 bp, Homo sapien
aagatttctaaacctgcaactagga

SEQ ID NO: 1360266 - DNA, 25 bp, Homo sapien
gcaagtacaccaagagcattctcac

SEQ ID NO: 1360267 - DNA, 25 bp, Homo sapien
ggattgaaaccactaccttttgcat

SEQ ID NO: 1360268 - DNA, 25 bp, Homo sapien
catcggaagcacatcatgggccaga

SEQ ID NO: 1360269 - DNA, 25 bp, Homo sapien
tttaatgcagaagtacatcggaagc

SEQ ID NO: 1360270 - DNA, 25 bp, Homo sapien
agattacatgcgctacttaatggaa

SEQ ID NO: 1360271 - DNA, 25 bp, Homo sapien
tacatgcgctacttaatggaagaag

SEQ ID NO: 1360272 - DNA, 25 bp, Homo sapien
ctcacgtgtagtcctgtagctggga

SEQ ID NO: 1360273 - DNA, 25 bp, Homo sapien
tagggcacatgaaatgaaaccaagt

SEQ ID NO: 1360274 - DNA, 25 bp, Homo sapien
tatggttgcattaatatagtagggc

SEQ ID NO: 1360275 - DNA, 25 bp, Homo sapien
tgagaatctggcttagaaggacaag

SEQ ID NO: 1360276 - DNA, 25 bp, Homo sapien
cagaagcgaagggaaccaggtttgc

SEQ ID NO: 1360277 - DNA, 25 bp, Homo sapien
tgtgcaaactcgatcactagctctg

SEQ ID NO: 1360278 - DNA, 25 bp, Homo sapien
cataaagtgatgtgatggcccacaa

SEQ ID NO: 1360279 - DNA, 25 bp, Homo sapien
cagactgttggtgtaattgtgcaaa

SEQ ID NO: 1360280 - DNA, 25 bp, Homo sapien
tatttgacttttggccctatggtag

SEQ ID NO: 1360281 - DNA, 25 bp, Homo sapien
gggaaagttagcttaagatcataca

SEQ ID NO: 1360282 - DNA, 25 bp, Homo sapien
ggtagtaggacatcacagaagttgg

SEQ ID NO: 1360283 - DNA, 25 bp, Homo sapien
gccactctcttggacaaactgattt

SEQ ID NO: 1360284 - DNA, 25 bp, Homo sapien
ggcaagcaacagaccaaccatcagt

SEQ ID NO: 1360285 - DNA, 25 bp, Homo sapien
gatgaacagctctccctaaaaattt

SEQ ID NO: 1360286 - DNA, 25 bp, Homo sapien
cattatcccttatgttgtatgatga

SEQ ID NO: 1360287 - DNA, 25 bp, Homo sapien
tgggcttctgttttacctgacagga

SEQ ID NO: 1360288 - DNA, 25 bp, Homo sapien
aacatgttccactttaggtaggcga

SEQ ID NO: 1360289 - DNA, 25 bp, Homo sapien
ccatggcgttgaaggaaagttttga

SEQ ID NO: 1360290 - DNA, 25 bp, Homo sapien
aagctgtccagtgatggtcacatag

SEQ ID NO: 1360291 - DNA, 25 bp, Homo sapien
caaaactggtgctaatccatggcgt

SEQ ID NO: 1360292 - DNA, 25 bp, Homo sapien
tgttgaaaggtacatgccaaatctg

SEQ ID NO: 1360293 - DNA, 25 bp, Homo sapien
aagaaatagccctttggcccacagg

SEQ ID NO: 1360294 - DNA, 25 bp, Homo sapien
tatgaaagaggagcaaatactaaac

SEQ ID NO: 1360295 - DNA, 25 bp, Homo sapien
ccaaatctgagtatacgtgtgaaaa

SEQ ID NO: 1360296 - DNA, 25 bp, Homo sapien
caaaatcaggatatgtggatcttga

SEQ ID NO: 1360297 - DNA, 25 bp, Homo sapien
tcttgattgggccttaagatgtcag

SEQ ID NO: 1360298 - DNA, 25 bp, Homo sapien
taatttattttagtcttgcacttac

SEQ ID NO: 1360299 - DNA, 25 bp, Homo sapien
tattttagtcttgcacttacagtcc

SEQ ID NO: 1360300 - DNA, 25 bp, Homo sapien
tataagatttcttgaagtaagccac

SEQ ID NO: 1360301 - DNA, 25 bp, Homo sapien
aaattggtgtactgtcaagtataag

SEQ ID NO: 1360302 - DNA, 25 bp, Homo sapien
agatgggccctttgaatctttagga

SEQ ID NO: 1360303 - DNA, 25 bp, Homo sapien
ccacttgaaccattgtgaagctaca

SEQ ID NO: 1360304 - DNA, 25 bp, Homo sapien
tgtacttcggagatgtaacagggct

SEQ ID NO: 1360305 - DNA, 25 bp, Homo sapien
gcaagtttaacctgctttgcagtct

SEQ ID NO: 1360306 - DNA, 25 bp, Homo sapien
taacagggcttctaaaagggcagga

SEQ ID NO: 1360307 - DNA, 25 bp, Homo sapien
ttttgtgtaactggccggaatttga

SEQ ID NO: 1360308 - DNA, 25 bp, Homo sapien
tcaatgacccaaggaaggcttattc

SEQ ID NO: 1360309 - DNA, 25 bp, Homo sapien
tcacttggagcaccacgcagtaggt

SEQ ID NO: 1360310 - DNA, 25 bp, Homo sapien
tcagttgaagaagtgcccatgccga

SEQ ID NO: 1360311 - DNA, 25 bp, Homo sapien
tggcactagtatcgcacatgaggaa

SEQ ID NO: 1360312 - DNA, 25 bp, Homo sapien
cacaacacctggtagattatcccaa

SEQ ID NO: 1360313 - DNA, 25 bp, Homo sapien
aatttttgtacagtagttcctctag

SEQ ID NO: 1360314 - DNA, 25 bp, Homo sapien
tccaaaatcaagatgaagcgcttgt

SEQ ID NO: 1360315 - DNA, 25 bp, Homo sapien
tcctctagttggcttatcaaatagc

SEQ ID NO: 1360316 - DNA, 25 bp, Homo sapien
caaagtaaagagtttctgtaacaca

SEQ ID NO: 1360317 - DNA, 25 bp, Homo sapien
ctgattgttgggcttggtggataaa

SEQ ID NO: 1360318 - DNA, 25 bp, Homo sapien
taacacaaaggctgttacatgcagg

SEQ ID NO: 1360319 - DNA, 25 bp, Homo sapien
catgcaggcccatcaataactccag

SEQ ID NO: 1360320 - DNA, 25 bp, Homo sapien
caagtaggtggtacatctgcagagc

SEQ ID NO: 1360321 - DNA, 25 bp, Homo sapien
tggtacatctgcagagcacaaccat

SEQ ID NO: 1360322 - DNA, 25 bp, Homo sapien
gtaggtggtacatctgcagagcaca

SEQ ID NO: 1360323 - DNA, 25 bp, Homo sapien
ggtggtacatctgcagagcacaacc

SEQ ID NO: 1360324 - DNA, 25 bp, Homo sapien
tcagcgaaaacatcaaaggtttttc

SEQ ID NO: 1360325 - DNA, 25 bp, Homo sapien
taagattgttctttactccggtgat

SEQ ID NO: 1360326 - DNA, 25 bp, Homo sapien
tttcctgtcctaagattgttcttta

SEQ ID NO: 1360327 - DNA, 25 bp, Homo sapien
ccggtgattctcctaaatgcctctc

SEQ ID NO: 1360328 - DNA, 25 bp, Homo sapien
gagccccgggaattggcaaatatcc

SEQ ID NO: 1360329 - DNA, 25 bp, Homo sapien
tatgcatgaggttcccctggttttc

SEQ ID NO: 1360330 - DNA, 25 bp, Homo sapien
cagtaggggctttccgccaacataa

SEQ ID NO: 1360331 - DNA, 25 bp, Homo sapien
tggttttccacaaagcctctgctga

SEQ ID NO: 1360332 - DNA, 25 bp, Homo sapien
caaatcttatcctctcggctgggtg

SEQ ID NO: 1360333 - DNA, 25 bp, Homo sapien
taccctagccccttaagactgtata

SEQ ID NO: 1360334 - DNA, 25 bp, Homo sapien
aagaggccataaaagtcagctcacc

SEQ ID NO: 1360335 - DNA, 25 bp, Homo sapien
caaagcatggtgtgccagtgttccc

SEQ ID NO: 1360336 - DNA, 25 bp, Homo sapien
cctctgcataattctgtataggtag

SEQ ID NO: 1360337 - DNA, 25 bp, Homo sapien
tcatccgcacatatgagaagcgagc

SEQ ID NO: 1360338 - DNA, 25 bp, Homo sapien
gcacatatataatccagcttccaac

SEQ ID NO: 1360339 - DNA, 25 bp, Homo sapien
ttctgtataggtagaatactgcaca

SEQ ID NO: 1360340 - DNA, 25 bp, Homo sapien
aaaaaagaacataacgatcattcat

SEQ ID NO: 1360341 - DNA, 25 bp, Homo sapien
ccccgcagtaggggcagatactgac

SEQ ID NO: 1360342 - DNA, 25 bp, Homo sapien
tgttagcaataactgcagacacctc

SEQ ID NO: 1360343 - DNA, 25 bp, Homo sapien
tccaggtaagtgtagtggtacagtc

SEQ ID NO: 1360344 - DNA, 25 bp, Homo sapien
gagtacaatgactctgtccaggtaa

SEQ ID NO: 1360345 - DNA, 25 bp, Homo sapien
gcagggtggcagcatacattgttaa

SEQ ID NO: 1360346 - DNA, 25 bp, Homo sapien
ctttcccagtctctaatagccatca

SEQ ID NO: 1360347 - DNA, 25 bp, Homo sapien
tacctttcccagtctctaatagcca

SEQ ID NO: 1360348 - DNA, 25 bp, Homo sapien
gactataattactgttgtgctaaca

SEQ ID NO: 1360349 - DNA, 25 bp, Homo sapien
cagtctctaatagccatcattttac

SEQ ID NO: 1360350 - DNA, 25 bp, Homo sapien
tgtactttagggtattaatcaataa

SEQ ID NO: 1360351 - DNA, 25 bp, Homo sapien
gcctgtactttagggtattaatcaa

SEQ ID NO: 1360352 - DNA, 25 bp, Homo sapien
tcacttggttgattgtttccattgg

SEQ ID NO: 1360353 - DNA, 25 bp, Homo sapien
acttggttgattgtttccattggtg

SEQ ID NO: 1360354 - DNA, 25 bp, Homo sapien
ctaaggatgctagaaaagtttcaaa

SEQ ID NO: 1360355 - DNA, 25 bp, Homo sapien
cttcctgaatcaactaaggatgcta

SEQ ID NO: 1360356 - DNA, 25 bp, Homo sapien
acctcactcagcctgttccttatac

SEQ ID NO: 1360357 - DNA, 25 bp, Homo sapien
atacttttatacttcagttccacag

SEQ ID NO: 1360358 - DNA, 25 bp, Homo sapien
cgtgccaggccaagactattcagtt

SEQ ID NO: 1360359 - DNA, 25 bp, Homo sapien
cataggtttggaaaaacatcaccac

SEQ ID NO: 1360360 - DNA, 25 bp, Homo sapien
ccatgttacaacatgaatcagtact

SEQ ID NO: 1360361 - DNA, 25 bp, Homo sapien
gcaaacacgaatcaactctctttct

SEQ ID NO: 1360362 - DNA, 25 bp, Homo sapien
caacatgaatcagtacttcgtttct

SEQ ID NO: 1360363 - DNA, 25 bp, Homo sapien
gctttaacatctttgacttcgaata

SEQ ID NO: 1360364 - DNA, 25 bp, Homo sapien
ctgtttgaggtttcctacttgttca

SEQ ID NO: 1360365 - DNA, 25 bp, Homo sapien
gacttcgaatatgaacacttggtca

SEQ ID NO: 1360366 - DNA, 25 bp, Homo sapien
tagtcctcaagcatatttataatga

SEQ ID NO: 1360367 - DNA, 25 bp, Homo sapien
ccaagttgtcacaagatggaaccag

SEQ ID NO: 1360368 - DNA, 25 bp, Homo sapien
cagtgtctcacactgggtgaatttt

SEQ ID NO: 1360369 - DNA, 25 bp, Homo sapien
gtaatctattatgtcatcaccagca

SEQ ID NO: 1360370 - DNA, 25 bp, Homo sapien
gctttcagagctacatgcttccatc

SEQ ID NO: 1360371 - DNA, 25 bp, Homo sapien
tgttgcagcaatctaggcccttctg

SEQ ID NO: 1360372 - DNA, 25 bp, Homo sapien
tgtgcagaccccatcattggaaggc

SEQ ID NO: 1360373 - DNA, 25 bp, Homo sapien
gacatcactgatatcttgggcaaga

SEQ ID NO: 1360374 - DNA, 25 bp, Homo sapien
taaatattatccaactaggctgggc

SEQ ID NO: 1360375 - DNA, 25 bp, Homo sapien
ctatctctgaaagcattcagaatca

SEQ ID NO: 1360376 - DNA, 25 bp, Homo sapien
gaatcaaatagctcagcattcctct

SEQ ID NO: 1360377 - DNA, 25 bp, Homo sapien
ctcttctttttcactaaactgtgct

SEQ ID NO: 1360378 - DNA, 25 bp, Homo sapien
gaaagcattcagaatcaaatagctc

SEQ ID NO: 1360379 - DNA, 25 bp, Homo sapien
cagcaccccgatcttggataaatac

SEQ ID NO: 1360380 - DNA, 25 bp, Homo sapien
taccaaagtatactgtaaaggctag

SEQ ID NO: 1360381 - DNA, 25 bp, Homo sapien
tttcttgctacttaaggttctggcc

SEQ ID NO: 1360382 - DNA, 25 bp, Homo sapien
caggtcacagcttcacagaattagg

SEQ ID NO: 1360383 - DNA, 25 bp, Homo sapien
tagcagacaactctatcaggccttc

SEQ ID NO: 1360384 - DNA, 25 bp, Homo sapien
taacgacgcaagtgaaggtgggaaa

SEQ ID NO: 1360385 - DNA, 25 bp, Homo sapien
tctaaaatggattagcagtgtgcct

SEQ ID NO: 1360386 - DNA, 25 bp, Homo sapien
ggtagtttttacatccagggcaatg

SEQ ID NO: 1360387 - DNA, 25 bp, Homo sapien
tcacatatcctacaatttattcatt

SEQ ID NO: 1360388 - DNA, 25 bp, Homo sapien
cataacgttcagtaggttttagtat

SEQ ID NO: 1360389 - DNA, 25 bp, Homo sapien
tattcatttaaagcataacgttcag

SEQ ID NO: 1360390 - DNA, 25 bp, Homo sapien
ttctgtccccctcaagaacacttca

SEQ ID NO: 1360391 - DNA, 25 bp, Homo sapien
cagctactcgcggtgtctactaggt

SEQ ID NO: 1360392 - DNA, 25 bp, Homo sapien
catcggagtgatggatttgcgctca

SEQ ID NO: 1360393 - DNA, 25 bp, Homo sapien
tggtggtgcttgctacaaagactca

SEQ ID NO: 1360394 - DNA, 25 bp, Homo sapien
taaaagattacacagaggtacctgg

SEQ ID NO: 1360395 - DNA, 25 bp, Homo sapien
cccccggacagagactcctcgccat

SEQ ID NO: 1360396 - DNA, 25 bp, Homo sapien
gccaggcccccggacagagactcct

SEQ ID NO: 1360397 - DNA, 25 bp, Homo sapien
aggcccccggacagagactcctcgc

SEQ ID NO: 1360398 - DNA, 25 bp, Homo sapien
ttagccaggcccccggacagagact

SEQ ID NO: 1360399 - DNA, 25 bp, Homo sapien
ggtaatcacacatcgccccgccgcg

SEQ ID NO: 1360400 - DNA, 25 bp, Homo sapien
ccttgttctgaagagataccttcat

SEQ ID NO: 1360401 - DNA, 25 bp, Homo sapien
gccttgttcaggtgccttgttctga

SEQ ID NO: 1360402 - DNA, 25 bp, Homo sapien
gcataagccttgttcaggtgccttg

SEQ ID NO: 1360403 - DNA, 25 bp, Homo sapien
ttggtttttgcataagccttgttca

SEQ ID NO: 1360404 - DNA, 25 bp, Homo sapien
gaagccatgatactcttctctatat

SEQ ID NO: 1360405 - DNA, 25 bp, Homo sapien
agccatgatactcttctctatatgg

SEQ ID NO: 1360406 - DNA, 25 bp, Homo sapien
cagaagccatgatactcttctctat

SEQ ID NO: 1360407 - DNA, 25 bp, Homo sapien
aagccatgatactcttctctatatg

SEQ ID NO: 1360408 - DNA, 25 bp, Homo sapien
acgcacgctatcctcctgtcctctg

SEQ ID NO: 1360409 - DNA, 25 bp, Homo sapien
tctgactatgttgactatgagtgca

SEQ ID NO: 1360410 - DNA, 25 bp, Homo sapien
actacatcccagaacccctacacgc

SEQ ID NO: 1360411 - DNA, 25 bp, Homo sapien
gttctgactatgttgactatgagtg

SEQ ID NO: 1360412 - DNA, 25 bp, Homo sapien
ttgctaaacgattggcaaaagctac

SEQ ID NO: 1360413 - DNA, 25 bp, Homo sapien
tcattggaatttacaactaaatatc

SEQ ID NO: 1360414 - DNA, 25 bp, Homo sapien
gaagattttgctaaacgattggcaa

SEQ ID NO: 1360415 - DNA, 25 bp, Homo sapien
ttagaagattttgctaaacgattgg

SEQ ID NO: 1360416 - DNA, 25 bp, Homo sapien
gcattggttgtacgccgtgaagtcg

SEQ ID NO: 1360417 - DNA, 25 bp, Homo sapien
gcagtcagttggcaagatatcaggt

SEQ ID NO: 1360418 - DNA, 25 bp, Homo sapien
caggtgaggcaaaatttcgtagctc

SEQ ID NO: 1360419 - DNA, 25 bp, Homo sapien
gaagtcgcacgaagtgaggttgtca

SEQ ID NO: 1360420 - DNA, 25 bp, Homo sapien
agtctggattgtctatttccaagct

SEQ ID NO: 1360421 - DNA, 25 bp, Homo sapien
tctatttccaagctgttatccaggc

SEQ ID NO: 1360422 - DNA, 25 bp, Homo sapien
atgacgctgaacatgaaagtctgga

SEQ ID NO: 1360423 - DNA, 25 bp, Homo sapien
ctgaacatgaaagtctggattgtct

SEQ ID NO: 1360424 - DNA, 25 bp, Homo sapien
tgatcaattcattgtaaacaccact

SEQ ID NO: 1360425 - DNA, 25 bp, Homo sapien
gatcaattcattgtaaacaccactg

SEQ ID NO: 1360426 - DNA, 25 bp, Homo sapien
gtcaagtaaagcagtggtagtggag

SEQ ID NO: 1360427 - DNA, 25 bp, Homo sapien
gctagtcaagtaaagcagtggtagt

SEQ ID NO: 1360428 - DNA, 25 bp, Homo sapien
ggctgcttgagaagcggaaacaagt

SEQ ID NO: 1360429 - DNA, 25 bp, Homo sapien
actgaaaacagatgtatgggctgct

SEQ ID NO: 1360430 - DNA, 25 bp, Homo sapien
tctgaattttcatggtagcaactgt

SEQ ID NO: 1360431 - DNA, 25 bp, Homo sapien
gcaatgggaacatcacagagtgaag

SEQ ID NO: 1360432 - DNA, 25 bp, Homo sapien
ccgttgagctacatgcatgccccat

SEQ ID NO: 1360433 - DNA, 25 bp, Homo sapien
tgccccgttgagctacatgcatgcc

SEQ ID NO: 1360434 - DNA, 25 bp, Homo sapien
ctggatcagatgcatgccccgttga

SEQ ID NO: 1360435 - DNA, 25 bp, Homo sapien
gatgcatgccccgttgagctacatg

SEQ ID NO: 1360436 - DNA, 25 bp, Homo sapien
tatggttagcgctaataaccgttga

SEQ ID NO: 1360437 - DNA, 25 bp, Homo sapien
ctaattctgaatgttgatgcccata

SEQ ID NO: 1360438 - DNA, 25 bp, Homo sapien
gctaataaccgttgaatatgtctgc

SEQ ID NO: 1360439 - DNA, 25 bp, Homo sapien
gtctgcagtttatcaaggagtttta

SEQ ID NO: 1360440 - DNA, 25 bp, Homo sapien
ctgagggcctacaacacctgcctgg

SEQ ID NO: 1360441 - DNA, 25 bp, Homo sapien
aagataggcccttcaggcacacggg

SEQ ID NO: 1360442 - DNA, 25 bp, Homo sapien
gcctgggtcaaagataggcccttca

SEQ ID NO: 1360443 - DNA, 25 bp, Homo sapien
gtgcccactccccagtatttgcaca

SEQ ID NO: 1360444 - DNA, 25 bp, Homo sapien
tagttggaaccatacagtgtgtaac

SEQ ID NO: 1360445 - DNA, 25 bp, Homo sapien
tggcagagttaccatataattcccc

SEQ ID NO: 1360446 - DNA, 25 bp, Homo sapien
gcgtaatgtcctatacacaccatga

SEQ ID NO: 1360447 - DNA, 25 bp, Homo sapien
ttcagattgactccattagcttagc

SEQ ID NO: 1360448 - DNA, 25 bp, Homo sapien
gtagttttccatctgataccagccg

SEQ ID NO: 1360449 - DNA, 25 bp, Homo sapien
taccaaagcttgattaggtgtgtag

SEQ ID NO: 1360450 - DNA, 25 bp, Homo sapien
cagtagtcagtcaaactggattggg

SEQ ID NO: 1360451 - DNA, 25 bp, Homo sapien
tcttgagctccagatgcattgcagt

SEQ ID NO: 1360452 - DNA, 25 bp, Homo sapien
cattaattggaatcagtgtctgaat

SEQ ID NO: 1360453 - DNA, 25 bp, Homo sapien
ttttctgtgataaatgctccaaaag

SEQ ID NO: 1360454 - DNA, 25 bp, Homo sapien
attgctaattttgaaagttctggcc

SEQ ID NO: 1360455 - DNA, 25 bp, Homo sapien
gtgataaatgctccaaaagttttaa

SEQ ID NO: 1360456 - DNA, 25 bp, Homo sapien
aatattgctaattttgaaagttctg

SEQ ID NO: 1360457 - DNA, 25 bp, Homo sapien
cttaatgccacgttcctgaatggga

SEQ ID NO: 1360458 - DNA, 25 bp, Homo sapien
ttttcctgtataacagtgccagcct

SEQ ID NO: 1360459 - DNA, 25 bp, Homo sapien
tgccagcctgccgacgatcaggagc

SEQ ID NO: 1360460 - DNA, 25 bp, Homo sapien
ggtcgcacacgacccttttcctgta

SEQ ID NO: 1360461 - DNA, 25 bp, Homo sapien
cgacgatcaggagcgcagctttcac

SEQ ID NO: 1360462 - DNA, 25 bp, Homo sapien
tcactgcaacgttaaagagtccttc

SEQ ID NO: 1360463 - DNA, 25 bp, Homo sapien
cccgcggctttggagagctgccatt

SEQ ID NO: 1360464 - DNA, 25 bp, Homo sapien
ggcggaaggactgagcctcactgca

SEQ ID NO: 1360465 - DNA, 25 bp, Homo sapien
agaatgcaccggcagtccgcgggaa

SEQ ID NO: 1360466 - DNA, 25 bp, Homo sapien
tgcgtgcatatgtgccgggtacccg

SEQ ID NO: 1360467 - DNA, 25 bp, Homo sapien
ccagtaagtgctcggactcgcaggg

SEQ ID NO: 1360468 - DNA, 25 bp, Homo sapien
aaggacctcggtttgtgcgtgcata

SEQ ID NO: 1360469 - DNA, 25 bp, Homo sapien
tgtttgaggccggtgtaagaacgct

SEQ ID NO: 1360470 - DNA, 25 bp, Homo sapien
acttgtattagtatctgaggacact

SEQ ID NO: 1360471 - DNA, 25 bp, Homo sapien
tgaggacacttaacaaccaagttga

SEQ ID NO: 1360472 - DNA, 25 bp, Homo sapien
gactacaacctgttacgaggtcaga

SEQ ID NO: 1360473 - DNA, 25 bp, Homo sapien
caagttgaaccatctgtaggaatgc

SEQ ID NO: 1360474 - DNA, 25 bp, Homo sapien
ctgggatgtcgtcttctactttttc

SEQ ID NO: 1360475 - DNA, 25 bp, Homo sapien
cctggttactgggatgtcgtcttct

SEQ ID NO: 1360476 - DNA, 25 bp, Homo sapien
gttttcatgtgctggatgtcttaga

SEQ ID NO: 1360477 - DNA, 25 bp, Homo sapien
gagcctttggttgtcttaatctgtt

SEQ ID NO: 1360478 - DNA, 25 bp, Homo sapien
tcccttgattcaattccttgaaaga

SEQ ID NO: 1360479 - DNA, 25 bp, Homo sapien
gacagaatcaagagaaaagatctgg

SEQ ID NO: 1360480 - DNA, 25 bp, Homo sapien
agggagactcttatggagggccata

SEQ ID NO: 1360481 - DNA, 25 bp, Homo sapien
tgaaaacaagatcaattaacagcag

SEQ ID NO: 1360482 - DNA, 25 bp, Homo sapien
caaagtcggtgctttggaaacattc

SEQ ID NO: 1360483 - DNA, 25 bp, Homo sapien
ccatgaggtacctgatatgaccttg

SEQ ID NO: 1360484 - DNA, 25 bp, Homo sapien
tacaccagctcaaaaagccatgagg

SEQ ID NO: 1360485 - DNA, 25 bp, Homo sapien
tattctcatacagatctacaggtct

SEQ ID NO: 1360486 - DNA, 25 bp, Homo sapien
aaataatgtaattaccagtggctgg

SEQ ID NO: 1360487 - DNA, 25 bp, Homo sapien
tcatatcctactgtagactggctct

SEQ ID NO: 1360488 - DNA, 25 bp, Homo sapien
ttgcgaattcgtgttcctcctgtgc

SEQ ID NO: 1360489 - DNA, 25 bp, Homo sapien
tgggctttcaagtataagggcctta

SEQ ID NO: 1360490 - DNA, 25 bp, Homo sapien
aagcatttgtttgggttgcgaattc

SEQ ID NO: 1360491 - DNA, 25 bp, Homo sapien
agtgtctttgcctattgcacttttt

SEQ ID NO: 1360492 - DNA, 25 bp, Homo sapien
gtgtctttgcctattgcactttttt

SEQ ID NO: 1360493 - DNA, 25 bp, Homo sapien
gaatatgaaggatttcttactcctt

SEQ ID NO: 1360494 - DNA, 25 bp, Homo sapien
aatatgaaggatttcttactccttt

SEQ ID NO: 1360495 - DNA, 25 bp, Homo sapien
taccattgtttagaagctgtgctcg

SEQ ID NO: 1360496 - DNA, 25 bp, Homo sapien
gctgtgctcgttaggctttttaatg

SEQ ID NO: 1360497 - DNA, 25 bp, Homo sapien
tgagaggtaatccatatgtagatcc

SEQ ID NO: 1360498 - DNA, 25 bp, Homo sapien
cacaagtgttctttgctttaggaag

SEQ ID NO: 1360499 - DNA, 25 bp, Homo sapien
catttgcggagaagaagaggtcgtc

SEQ ID NO: 1360500 - DNA, 25 bp, Homo sapien
tagcatgtggcgaaaaataccgagt

SEQ ID NO: 1360501 - DNA, 25 bp, Homo sapien
gatcttggcctgctgcaataccaca

SEQ ID NO: 1360502 - DNA, 25 bp, Homo sapien
gaacgcgtacaggaagatcttggcc

SEQ ID NO: 1360503 - DNA, 25 bp, Homo sapien
ttggccaggtataaatgagctttac

SEQ ID NO: 1360504 - DNA, 25 bp, Homo sapien
tgaaaaatgtaaatcccgtgtatcc

SEQ ID NO: 1360505 - DNA, 25 bp, Homo sapien
tttaattctaactgaacaccagcag

SEQ ID NO: 1360506 - DNA, 25 bp, Homo sapien
tcctgcagctgcaatattttgaata

SEQ ID NO: 1360507 - DNA, 25 bp, Homo sapien
tatgtcttagtattgctctcactga

SEQ ID NO: 1360508 - DNA, 25 bp, Homo sapien
gctgtcactggcacccttgtggata

SEQ ID NO: 1360509 - DNA, 25 bp, Homo sapien
cagtgcttttatgtatggcctgggc

SEQ ID NO: 1360510 - DNA, 25 bp, Homo sapien
tgtgagaggtggtttgcacatgcct

SEQ ID NO: 1360511 - DNA, 25 bp, Homo sapien
ccaagagcgtattctgtaacaggtc

SEQ ID NO: 1360512 - DNA, 25 bp, Homo sapien
tgtgtcattagagacccattcttta

SEQ ID NO: 1360513 - DNA, 25 bp, Homo sapien
tgtcaccaagttcctgccagaatcc

SEQ ID NO: 1360514 - DNA, 25 bp, Homo sapien
tgcataaccttctatcttggatatt

SEQ ID NO: 1360515 - DNA, 25 bp, Homo sapien
aatcatgttttgaatgcctatgagt

SEQ ID NO: 1360516 - DNA, 25 bp, Homo sapien
gcaatcatgttttgaatgcctatga

SEQ ID NO: 1360517 - DNA, 25 bp, Homo sapien
agcaatcatgttttgaatgcctatg

SEQ ID NO: 1360518 - DNA, 25 bp, Homo sapien
tcatgttttgaatgcctatgagttg

SEQ ID NO: 1360519 - DNA, 25 bp, Homo sapien
tcgatgagctgaagagtcaacaact

SEQ ID NO: 1360520 - DNA, 25 bp, Homo sapien
gaggatccccaaccatcaacattgt

SEQ ID NO: 1360521 - DNA, 25 bp, Homo sapien
taggcattgtatgacatctcacagc

SEQ ID NO: 1360522 - DNA, 25 bp, Homo sapien
gatcaccaaaggattacagtctctg

SEQ ID NO: 1360523 - DNA, 25 bp, Homo sapien
tgtatataccaacatactaatatgt

SEQ ID NO: 1360524 - DNA, 25 bp, Homo sapien
taaacttgatcgtaattatgcatgc

SEQ ID NO: 1360525 - DNA, 25 bp, Homo sapien
agtcccaagacctggcaaccacgaa

SEQ ID NO: 1360526 - DNA, 25 bp, Homo sapien
tcaaactacagaacttttccaccac

SEQ ID NO: 1360527 - DNA, 25 bp, Homo sapien
tcagatgcagggatccagagtccat

SEQ ID NO: 1360528 - DNA, 25 bp, Homo sapien
gaacagtgcatgtttaggcaacagg

SEQ ID NO: 1360529 - DNA, 25 bp, Homo sapien
ctttccccagacgtacattaggtgt

SEQ ID NO: 1360530 - DNA, 25 bp, Homo sapien
cacctgaaagtgatagcagtgcaga

SEQ ID NO: 1360531 - DNA, 25 bp, Homo sapien
gcaagtgttgcagaggataccccta

SEQ ID NO: 1360532 - DNA, 25 bp, Homo sapien
cataggtttaagatcagtggcacaa

SEQ ID NO: 1360533 - DNA, 25 bp, Homo sapien
ggtaggcccagatcattttagcaat

SEQ ID NO: 1360534 - DNA, 25 bp, Homo sapien
tacattatggaaatcggttgggcct

SEQ ID NO: 1360535 - DNA, 25 bp, Homo sapien
gtagtctaaagatttattcaatcca

SEQ ID NO: 1360536 - DNA, 25 bp, Homo sapien
aacttccacagttaatttgtaactg

SEQ ID NO: 1360537 - DNA, 25 bp, Homo sapien
caatccatcattaggtaattctcag

SEQ ID NO: 1360538 - DNA, 25 bp, Homo sapien
tgtaactgccgcatttacaaaaaag

SEQ ID NO: 1360539 - DNA, 25 bp, Homo sapien
tcagcaggattacttgcacagaaag

SEQ ID NO: 1360540 - DNA, 25 bp, Homo sapien
caatgttacgtactctagtttggag

SEQ ID NO: 1360541 - DNA, 25 bp, Homo sapien
cttaagtacaactggatcagcagga

SEQ ID NO: 1360542 - DNA, 25 bp, Homo sapien
ccattaatggtcttgactgtaacag

SEQ ID NO: 1360543 - DNA, 25 bp, Homo sapien
cgagcttcaaatgctctaagcagag

SEQ ID NO: 1360544 - DNA, 25 bp, Homo sapien
tgtatgtttcgatcacgagcttcaa

SEQ ID NO: 1360545 - DNA, 25 bp, Homo sapien
tataaacttgaatggctgacaccac

SEQ ID NO: 1360546 - DNA, 25 bp, Homo sapien
taagcagagtttgtatgtgcccact

SEQ ID NO: 1360547 - DNA, 25 bp, Homo sapien
catatgcctgctgtataatcagaag

SEQ ID NO: 1360548 - DNA, 25 bp, Homo sapien
tcttgctatattggagtgtagtatc

SEQ ID NO: 1360549 - DNA, 25 bp, Homo sapien
gatggagtttgcctaggcacaatct

SEQ ID NO: 1360550 - DNA, 25 bp, Homo sapien
gctcattgcaacctgagactgtgcc

SEQ ID NO: 1360551 - DNA, 25 bp, Homo sapien
caagatgcagtcttatttgcacatc

SEQ ID NO: 1360552 - DNA, 25 bp, Homo sapien
gcagtcttatttgcacatctgaagc

SEQ ID NO: 1360553 - DNA, 25 bp, Homo sapien
agatgcagtcttatttgcacatctg

SEQ ID NO: 1360554 - DNA, 25 bp, Homo sapien
atgcagtcttatttgcacatctgaa

SEQ ID NO: 1360555 - DNA, 25 bp, Homo sapien
tgaaaactataaaagggctatatta

SEQ ID NO: 1360556 - DNA, 25 bp, Homo sapien
tacttgaggtcaaagtatttatggc

SEQ ID NO: 1360557 - DNA, 25 bp, Homo sapien
ttattaccatagtaaggcctctggc

SEQ ID NO: 1360558 - DNA, 25 bp, Homo sapien
tgcttagttcagtaacttattacca

SEQ ID NO: 1360559 - DNA, 25 bp, Homo sapien
ttattttattagaagaccatactga

SEQ ID NO: 1360560 - DNA, 25 bp, Homo sapien
tattttattagaagaccatactgac

SEQ ID NO: 1360561 - DNA, 25 bp, Homo sapien
tttattttattagaagaccatactg

SEQ ID NO: 1360562 - DNA, 25 bp, Homo sapien
gtcaaagcagaacatgtaatcacca

SEQ ID NO: 1360563 - DNA, 25 bp, Homo sapien
gcctgttctcccatattatccagga

SEQ ID NO: 1360564 - DNA, 25 bp, Homo sapien
tatccaggattaattcaaagaaaat

SEQ ID NO: 1360565 - DNA, 25 bp, Homo sapien
tcatatccaatatatctgtgccagt

SEQ ID NO: 1360566 - DNA, 25 bp, Homo sapien
gtgaaccgcagtgcctggcccattt

SEQ ID NO: 1360567 - DNA, 25 bp, Homo sapien
ttataggcgtgaaccgcagtgcctg

SEQ ID NO: 1360568 - DNA, 25 bp, Homo sapien
ctggcccatttttacttcttataca

SEQ ID NO: 1360569 - DNA, 25 bp, Homo sapien
tggcccatttttacttcttatacac

SEQ ID NO: 1360570 - DNA, 25 bp, Homo sapien
ctatcaaagagaaaacagttaattc

SEQ ID NO: 1360571 - DNA, 25 bp, Homo sapien
tcaaagagaaaacagttaattccaa

SEQ ID NO: 1360572 - DNA, 25 bp, Homo sapien
caaagagaaaacagttaattccaag

SEQ ID NO: 1360573 - DNA, 25 bp, Homo sapien
tatcaaagagaaaacagttaattcc

SEQ ID NO: 1360574 - DNA, 25 bp, Homo sapien
caatatctaatcctgctccatctaa

SEQ ID NO: 1360575 - DNA, 25 bp, Homo sapien
taaggttttgccttctggagaggca

SEQ ID NO: 1360576 - DNA, 25 bp, Homo sapien
gaggcaagatggaaatcaatatcta

SEQ ID NO: 1360577 - DNA, 25 bp, Homo sapien
aactaaggttttgccttctggagag

SEQ ID NO: 1360578 - DNA, 25 bp, Homo sapien
catatgatgtaaagattatctaagc

SEQ ID NO: 1360579 - DNA, 25 bp, Homo sapien
tatacagtagatcatatgatgtaaa

SEQ ID NO: 1360580 - DNA, 25 bp, Homo sapien
aagattatctaagctagagaggtaa

SEQ ID NO: 1360581 - DNA, 25 bp, Homo sapien
ttatatacagtagatcatatgatgt

SEQ ID NO: 1360582 - DNA, 25 bp, Homo sapien
aaaacttaggcaattggcagggcgc

SEQ ID NO: 1360583 - DNA, 25 bp, Homo sapien
gcaggccggttcatttactagccaa

SEQ ID NO: 1360584 - DNA, 25 bp, Homo sapien
gaactggtttcaaatggctggctaa

SEQ ID NO: 1360585 - DNA, 25 bp, Homo sapien
aattgtgtattcgaagcaggccggt

SEQ ID NO: 1360586 - DNA, 25 bp, Homo sapien
ccagtggtgggattgctggactata

SEQ ID NO: 1360587 - DNA, 25 bp, Homo sapien
tctgttgatgaacactttaggttgc

SEQ ID NO: 1360588 - DNA, 25 bp, Homo sapien
caccccccagcctcccactactctt

SEQ ID NO: 1360589 - DNA, 25 bp, Homo sapien
tatctccataagttcaattgctttc

SEQ ID NO: 1360590 - DNA, 25 bp, Homo sapien
tattctaataggaattgcactgaat

SEQ ID NO: 1360591 - DNA, 25 bp, Homo sapien
gtattctaataggaattgcactgaa

SEQ ID NO: 1360592 - DNA, 25 bp, Homo sapien
ggtattctaataggaattgcactga

SEQ ID NO: 1360593 - DNA, 25 bp, Homo sapien
ggaattgcactgaatctgtagattg

SEQ ID NO: 1360594 - DNA, 25 bp, Homo sapien
cggccccagcgagagcctcgcctcg

SEQ ID NO: 1360595 - DNA, 25 bp, Homo sapien
gggctggcttcctgaacggccctcg

SEQ ID NO: 1360596 - DNA, 25 bp, Homo sapien
gcgcctgcgcggagcgggctggctt

SEQ ID NO: 1360597 - DNA, 25 bp, Homo sapien
caccagggccgtccaccagaagttt

SEQ ID NO: 1360598 - DNA, 25 bp, Homo sapien
taaacgggtgagaggcgacaacgca

SEQ ID NO: 1360599 - DNA, 25 bp, Homo sapien
aaacgggtgagaggcgacaacgcag

SEQ ID NO: 1360600 - DNA, 25 bp, Homo sapien
ctaaacgggtgagaggcgacaacgc

SEQ ID NO: 1360601 - DNA, 25 bp, Homo sapien
acgggtgagaggcgacaacgcagtg

SEQ ID NO: 1360602 - DNA, 25 bp, Homo sapien
gtactcgatctccagcgaggccttc

SEQ ID NO: 1360603 - DNA, 25 bp, Homo sapien
agaagcactccttctggccggcggg

SEQ ID NO: 1360604 - DNA, 25 bp, Homo sapien
tagaagcactccttctggccggcgg

SEQ ID NO: 1360605 - DNA, 25 bp, Homo sapien
agcactccttctggccggcgggaag

SEQ ID NO: 1360606 - DNA, 25 bp, Homo sapien
ggtagaagcactccttctggccggc

SEQ ID NO: 1360607 - DNA, 25 bp, Homo sapien
tgaagtcgctatcgagggaaggtgt

SEQ ID NO: 1360608 - DNA, 25 bp, Homo sapien
agtcgctatcgagggaaggtgtgaa

SEQ ID NO: 1360609 - DNA, 25 bp, Homo sapien
ggtaaaggtgaagtcgctatcgagg

SEQ ID NO: 1360610 - DNA, 25 bp, Homo sapien
taaaggtgaagtcgctatcgaggga

SEQ ID NO: 1360611 - DNA, 25 bp, Homo sapien
cagcagcaccggaggcagagcggcc

SEQ ID NO: 1360612 - DNA, 25 bp, Homo sapien
gcggccagaaggagcacggggaagg

SEQ ID NO: 1360613 - DNA, 25 bp, Homo sapien
gccagaaggagcacggggaagggca

SEQ ID NO: 1360614 - DNA, 25 bp, Homo sapien
cggccagaaggagcacggggaaggg

SEQ ID NO: 1360615 - DNA, 25 bp, Homo sapien
gaagcgcagttctccaaagggtagg

SEQ ID NO: 1360616 - DNA, 25 bp, Homo sapien
ggcgaacactccctccgaaagagaa

SEQ ID NO: 1360617 - DNA, 25 bp, Homo sapien
caccaatgggcatcatggcggtaat

SEQ ID NO: 1360618 - DNA, 25 bp, Homo sapien
tcccgcggcggttcgaattctgtgc

SEQ ID NO: 1360619 - DNA, 25 bp, Homo sapien
cagaaagtcctgcaggttttaggaa

SEQ ID NO: 1360620 - DNA, 25 bp, Homo sapien
aagtcctgcaggttttaggaatgtt

SEQ ID NO: 1360621 - DNA, 25 bp, Homo sapien
acagaaagtcctgcaggttttagga

SEQ ID NO: 1360622 - DNA, 25 bp, Homo sapien
gaaagtcctgcaggttttaggaatg

SEQ ID NO: 1360623 - DNA, 25 bp, Homo sapien
tggacacagtcaatgcagcagtacc

SEQ ID NO: 1360624 - DNA, 25 bp, Homo sapien
ccgatgtcaattgccaccttcacag

SEQ ID NO: 1360625 - DNA, 25 bp, Homo sapien
gtcaatgcagcagtacccgatgtca

SEQ ID NO: 1360626 - DNA, 25 bp, Homo sapien
catttgcgttctggtacatgtggac

SEQ ID NO: 1360627 - DNA, 25 bp, Homo sapien
caagagtggccagagtcaagtgtaa

SEQ ID NO: 1360628 - DNA, 25 bp, Homo sapien
agtgattttcatagcgtaaggagga

SEQ ID NO: 1360629 - DNA, 25 bp, Homo sapien
tatatttgcaataaggaaagccaag

SEQ ID NO: 1360630 - DNA, 25 bp, Homo sapien
tctgcagttgattacaaagtggtca

SEQ ID NO: 1360631 - DNA, 25 bp, Homo sapien
tataagtaaacagaagccccgagag

SEQ ID NO: 1360632 - DNA, 25 bp, Homo sapien
taaatacggagacatactgatcaac

SEQ ID NO: 1360633 - DNA, 25 bp, Homo sapien
gccccgagagtagccagaatttact

SEQ ID NO: 1360634 - DNA, 25 bp, Homo sapien
gaaggataggcttcatgactgaaac

SEQ ID NO: 1360635 - DNA, 25 bp, Homo sapien
tgaagcagtcaggtaacattaggag

SEQ ID NO: 1360636 - DNA, 25 bp, Homo sapien
tcttactaccctaggcttttgccaa

SEQ ID NO: 1360637 - DNA, 25 bp, Homo sapien
tgtttggcctacaggttcttgacag

SEQ ID NO: 1360638 - DNA, 25 bp, Homo sapien
cgcagggccttgcttctgagcatac

SEQ ID NO: 1360639 - DNA, 25 bp, Homo sapien
ttgctgtttggccagatgccgtggc

SEQ ID NO: 1360640 - DNA, 25 bp, Homo sapien
tgtttggccagatgccgtggctcgt

SEQ ID NO: 1360641 - DNA, 25 bp, Homo sapien
gatgccgtggctcgtgcccataatt

SEQ ID NO: 1360642 - DNA, 25 bp, Homo sapien
ttaaattgctgtttggccagatgcc

SEQ ID NO: 1360643 - DNA, 25 bp, Homo sapien
cggtcttttatctacttgttctgaa

SEQ ID NO: 1360644 - DNA, 25 bp, Homo sapien
ttttggatcaggacatggtatgtga

SEQ ID NO: 1360645 - DNA, 25 bp, Homo sapien
aattagaaaatgatcgtcccctgta

SEQ ID NO: 1360646 - DNA, 25 bp, Homo sapien
tcttcttgtacctaatctgaatacc

SEQ ID NO: 1360647 - DNA, 25 bp, Homo sapien
caaagccttatgtggtctggttcct

SEQ ID NO: 1360648 - DNA, 25 bp, Homo sapien
gaaaaatactggacatagatagtgg

SEQ ID NO: 1360649 - DNA, 25 bp, Homo sapien
ctgggtttctcctaaacatgtagaa

SEQ ID NO: 1360650 - DNA, 25 bp, Homo sapien
tgaaagccagacacatgttgcataa

SEQ ID NO: 1360651 - DNA, 25 bp, Homo sapien
gccttgtgttatatacctcttgaga

SEQ ID NO: 1360652 - DNA, 25 bp, Homo sapien
tatgtaaggcatcgttttgagtaac

SEQ ID NO: 1360653 - DNA, 25 bp, Homo sapien
ttagaaccctggcatataggaaaca

SEQ ID NO: 1360654 - DNA, 25 bp, Homo sapien
cagatgaattgtggaagctccgcta

SEQ ID NO: 1360655 - DNA, 25 bp, Homo sapien
cccacttccgcattgtgagtagctg

SEQ ID NO: 1360656 - DNA, 25 bp, Homo sapien
cctctcactgtgtagtctatttatc

SEQ ID NO: 1360657 - DNA, 25 bp, Homo sapien
accatcctcagttctgattatatat

SEQ ID NO: 1360658 - DNA, 25 bp, Homo sapien
ttttgatgttgtcccaaagatccca

SEQ ID NO: 1360659 - DNA, 25 bp, Homo sapien
tcaggttatgaaagagcaagaacag

SEQ ID NO: 1360660 - DNA, 25 bp, Homo sapien
cgggagcaggtgcagaactctcata

SEQ ID NO: 1360661 - DNA, 25 bp, Homo sapien
cattgccactcagtacaaggaggcc

SEQ ID NO: 1360662 - DNA, 25 bp, Homo sapien
cagaattggcagaggctcgtcatca

SEQ ID NO: 1360663 - DNA, 25 bp, Homo sapien
atgttcccctccctaggtctatgtg

SEQ ID NO: 1360664 - DNA, 25 bp, Homo sapien
caccacccaacaggccccgatgtgt

SEQ ID NO: 1360665 - DNA, 25 bp, Homo sapien
ctctaatcccccaccacccaacagg

SEQ ID NO: 1360666 - DNA, 25 bp, Homo sapien
atgttatccctcctctaatccccca

SEQ ID NO: 1360667 - DNA, 25 bp, Homo sapien
ttaagcaagacatggtccccacaag

SEQ ID NO: 1360668 - DNA, 25 bp, Homo sapien
gccccaccaatctaagcaagacatg

SEQ ID NO: 1360669 - DNA, 25 bp, Homo sapien
tctcggaagtgtgtcaacatacctt

SEQ ID NO: 1360670 - DNA, 25 bp, Homo sapien
tagtaattacatgagggtaccaggc

SEQ ID NO: 1360671 - DNA, 25 bp, Homo sapien
ctgagacaagccttccatctatgag

SEQ ID NO: 1360672 - DNA, 25 bp, Homo sapien
accttcctccacatgtgaggattac

SEQ ID NO: 1360673 - DNA, 25 bp, Homo sapien
cttatctgagacaagccttccatct

SEQ ID NO: 1360674 - DNA, 25 bp, Homo sapien
tatctgagacaagccttccatctat

SEQ ID NO: 1360675 - DNA, 25 bp, Homo sapien
ggctgcaaggcccatgcaaatctga

SEQ ID NO: 1360676 - DNA, 25 bp, Homo sapien
gaagcaacagcaatacaggtcaccc

SEQ ID NO: 1360677 - DNA, 25 bp, Homo sapien
gagaccacctgagcttgcacttcat

SEQ ID NO: 1360678 - DNA, 25 bp, Homo sapien
tgcaagggctgtcgctggatctacc

SEQ ID NO: 1360679 - DNA, 25 bp, Homo sapien
gcaaagtggaagatttctgctgact

SEQ ID NO: 1360680 - DNA, 25 bp, Homo sapien
agagaaccatgcaaagtggaagatt

SEQ ID NO: 1360681 - DNA, 25 bp, Homo sapien
tgctgactctcaaaagtcttctgtt

SEQ ID NO: 1360682 - DNA, 25 bp, Homo sapien
ccaattctggggctatatagatgat

SEQ ID NO: 1360683 - DNA, 25 bp, Homo sapien
tcaacaagtccaagataggaatgaa

SEQ ID NO: 1360684 - DNA, 25 bp, Homo sapien
agaagctcaggatactgtaagcaat

SEQ ID NO: 1360685 - DNA, 25 bp, Homo sapien
gcaatttgcatcaacaagtccaaga

SEQ ID NO: 1360686 - DNA, 25 bp, Homo sapien
taaacgaacagttagagaaggcaaa

SEQ ID NO: 1360687 - DNA, 25 bp, Homo sapien
cattgcctaggcatgggcataggca

SEQ ID NO: 1360688 - DNA, 25 bp, Homo sapien
atcatctctttttttaggctttttg

SEQ ID NO: 1360689 - DNA, 25 bp, Homo sapien
gcttttgaaattaaaatatcatctc

SEQ ID NO: 1360690 - DNA, 25 bp, Homo sapien
aaatatcatctctttttttaggctt

SEQ ID NO: 1360691 - DNA, 25 bp, Homo sapien
ttggttttttagtgtatgtagtctc

SEQ ID NO: 1360692 - DNA, 25 bp, Homo sapien
gaatgttctcataacttcgtcataa

SEQ ID NO: 1360693 - DNA, 25 bp, Homo sapien
cattttctctattgcatggtgtgag

SEQ ID NO: 1360694 - DNA, 25 bp, Homo sapien
gatccttggaaagttgatttactga

SEQ ID NO: 1360695 - DNA, 25 bp, Homo sapien
tgttcatttgggctctgtatgtcaa

SEQ ID NO: 1360696 - DNA, 25 bp, Homo sapien
ggatattgataggaatgatccagta

SEQ ID NO: 1360697 - DNA, 25 bp, Homo sapien
gcacagaaacacatggaatggaagg

SEQ ID NO: 1360698 - DNA, 25 bp, Homo sapien
aaggcaggcagaatatgggagcaca

SEQ ID NO: 1360699 - DNA, 25 bp, Homo sapien
atccttaaggtaggcttaagaaatg

SEQ ID NO: 1360700 - DNA, 25 bp, Homo sapien
aggaaagcataaacagactagcaaa

SEQ ID NO: 1360701 - DNA, 25 bp, Homo sapien
gaattgccagccagatagttctgtc

SEQ ID NO: 1360702 - DNA, 25 bp, Homo sapien
tgtcatgtggaacaaccgtgcaaga

SEQ ID NO: 1360703 - DNA, 25 bp, Homo sapien
gactagcaaagtctagtagaattgc

SEQ ID NO: 1360704 - DNA, 25 bp, Homo sapien
agagagacaaaatatattcccaaca

SEQ ID NO: 1360705 - DNA, 25 bp, Homo sapien
caaaacatgtcaaactctccggata

SEQ ID NO: 1360706 - DNA, 25 bp, Homo sapien
aatgcgttcataacagatgcagaga

SEQ ID NO: 1360707 - DNA, 25 bp, Homo sapien
caaccaatgcgttcataacagatgc

SEQ ID NO: 1360708 - DNA, 25 bp, Homo sapien
gaggctgcagtaggctgagattgca

SEQ ID NO: 1360709 - DNA, 25 bp, Homo sapien
cctgggcaacagagcaaaacttctc

SEQ ID NO: 1360710 - DNA, 25 bp, Homo sapien
cagcctgggcaacagagcaaaactt

SEQ ID NO: 1360711 - DNA, 25 bp, Homo sapien
aggctgcagtaggctgagattgcac

SEQ ID NO: 1360712 - DNA, 25 bp, Homo sapien
gaaagaaaactcaatccatacctca

SEQ ID NO: 1360713 - DNA, 25 bp, Homo sapien
cattaactaaaaaatgtatcctata

SEQ ID NO: 1360714 - DNA, 25 bp, Homo sapien
catacctcacatcataaacattaac

SEQ ID NO: 1360715 - DNA, 25 bp, Homo sapien
gaaaactcaatccatacctcacatc

SEQ ID NO: 1360716 - DNA, 25 bp, Homo sapien
tatccaaggtaactgggtctgagtc

SEQ ID NO: 1360717 - DNA, 25 bp, Homo sapien
cttgcttgtaactgaggctgacgga

SEQ ID NO: 1360718 - DNA, 25 bp, Homo sapien
ctgtaaaccaatgagaattcctgtc

SEQ ID NO: 1360719 - DNA, 25 bp, Homo sapien
cactggattaagtaggaaattcaca

SEQ ID NO: 1360720 - DNA, 25 bp, Homo sapien
tactgactgactttaaagtggtcag

SEQ ID NO: 1360721 - DNA, 25 bp, Homo sapien
actgactgactttaaagtggtcaga

SEQ ID NO: 1360722 - DNA, 25 bp, Homo sapien
acaagaaataagaaggccatgctat

SEQ ID NO: 1360723 - DNA, 25 bp, Homo sapien
ttattcccaaaagcaatgttacaag

SEQ ID NO: 1360724 - DNA, 25 bp, Homo sapien
ttttattcccaaaagcaatgttaca

SEQ ID NO: 1360725 - DNA, 25 bp, Homo sapien
ttacaagaaataagaaggccatgct

SEQ ID NO: 1360726 - DNA, 25 bp, Homo sapien
aatctgcctacttagtataacacac

SEQ ID NO: 1360727 - DNA, 25 bp, Homo sapien
gaatctgcctacttagtataacaca

SEQ ID NO: 1360728 - DNA, 25 bp, Homo sapien
tagaatctgcctacttagtataaca

SEQ ID NO: 1360729 - DNA, 25 bp, Homo sapien
ttaggaattagatggagatagaatc

SEQ ID NO: 1360730 - DNA, 25 bp, Homo sapien
gcaggccctgaatgaacgtagactt

SEQ ID NO: 1360731 - DNA, 25 bp, Homo sapien
gaatgaacgtagacttcatcagcag

SEQ ID NO: 1360732 - DNA, 25 bp, Homo sapien
acgtagacttcatcagcaggacaga

SEQ ID NO: 1360733 - DNA, 25 bp, Homo sapien
ggccctgaatgaacgtagacttcat

SEQ ID NO: 1360734 - DNA, 25 bp, Homo sapien
ttcatccctgaagtatttaaattct

SEQ ID NO: 1360735 - DNA, 25 bp, Homo sapien
tttcatccctgaagtatttaaattc

SEQ ID NO: 1360736 - DNA, 25 bp, Homo sapien
tcatccctgaagtatttaaattctt

SEQ ID NO: 1360737 - DNA, 25 bp, Homo sapien
catccctgaagtatttaaattcttt

SEQ ID NO: 1360738 - DNA, 25 bp, Homo sapien
tattgttacatatatcagctgtccg

SEQ ID NO: 1360739 - DNA, 25 bp, Homo sapien
ctgtcaaaagtatacagtcatgtac

SEQ ID NO: 1360740 - DNA, 25 bp, Homo sapien
tatgtcatcctaaagtttcctcatg

SEQ ID NO: 1360741 - DNA, 25 bp, Homo sapien
ggcccactgcctatcattgacttgt

SEQ ID NO: 1360742 - DNA, 25 bp, Homo sapien
accagcaagatcaacatggcagaac

SEQ ID NO: 1360743 - DNA, 25 bp, Homo sapien
gaccagcaagatcaacatggcagaa

SEQ ID NO: 1360744 - DNA, 25 bp, Homo sapien
caacggtgccaagaatatacactgc

SEQ ID NO: 1360745 - DNA, 25 bp, Homo sapien
taactaaaatgacacggtactggca

SEQ ID NO: 1360746 - DNA, 25 bp, Homo sapien
gctgccacagctagtatcaaactga

SEQ ID NO: 1360747 - DNA, 25 bp, Homo sapien
caaactgcgtgattctcatggaagc

SEQ ID NO: 1360748 - DNA, 25 bp, Homo sapien
ccaggattgtaccatgaagaaacag

SEQ ID NO: 1360749 - DNA, 25 bp, Homo sapien
agtctcccagcgaagaaaagcccaa

SEQ ID NO: 1360750 - DNA, 25 bp, Homo sapien
tcttggatacaatctaccaggattg

SEQ ID NO: 1360751 - DNA, 25 bp, Homo sapien
cataagaactgagaccacagaagta

SEQ ID NO: 1360752 - DNA, 25 bp, Homo sapien
aaagtcctcaacaaactatcatagt

SEQ ID NO: 1360753 - DNA, 25 bp, Homo sapien
tacaagaccagcattacactgatac

SEQ ID NO: 1360754 - DNA, 25 bp, Homo sapien
tcaaactcattctacaagaccagca

SEQ ID NO: 1360755 - DNA, 25 bp, Homo sapien
ggccaatatccctgaccaacacaga

SEQ ID NO: 1360756 - DNA, 25 bp, Homo sapien
aaacccagtacgtcgggaagctgag

SEQ ID NO: 1360757 - DNA, 25 bp, Homo sapien
ttatttttcaggccagccacatcag

SEQ ID NO: 1360758 - DNA, 25 bp, Homo sapien
ggccagccacatcagctgtcctcat

SEQ ID NO: 1360759 - DNA, 25 bp, Homo sapien
tttttcaggccagccacatcagctg

SEQ ID NO: 1360760 - DNA, 25 bp, Homo sapien
caggccagccacatcagctgtcctc

SEQ ID NO: 1360761 - DNA, 25 bp, Homo sapien
ccttaaagtatcatgatgagaactt

SEQ ID NO: 1360762 - DNA, 25 bp, Homo sapien
tttattttctgaggccacacttggg

SEQ ID NO: 1360763 - DNA, 25 bp, Homo sapien
gtgtctgtgactgttctctcgcaaa

SEQ ID NO: 1360764 - DNA, 25 bp, Homo sapien
tctacagcttgttttgggatacagc

SEQ ID NO: 1360765 - DNA, 25 bp, Homo sapien
gaaactgttttctcggatccaagca

SEQ ID NO: 1360766 - DNA, 25 bp, Homo sapien
cactgtttgtcttatgttggatcct

SEQ ID NO: 1360767 - DNA, 25 bp, Homo sapien
tgttgtttgtctccccagcttgaat

SEQ ID NO: 1360768 - DNA, 25 bp, Homo sapien
gtttgtcttatgttggatccttatc

SEQ ID NO: 1360769 - DNA, 25 bp, Homo sapien
atgttgtttgtctccccagcttgaa

SEQ ID NO: 1360770 - DNA, 25 bp, Homo sapien
tattttatagcttgcaaacactgtt

SEQ ID NO: 1360771 - DNA, 25 bp, Homo sapien
aagtgaaagcactattttatagctt

SEQ ID NO: 1360772 - DNA, 25 bp, Homo sapien
gcactattttatagcttgcaaacac

SEQ ID NO: 1360773 - DNA, 25 bp, Homo sapien
gaaagcactattttatagcttgcaa

SEQ ID NO: 1360774 - DNA, 25 bp, Homo sapien
ctgtgagatgcagtagttagagagc

SEQ ID NO: 1360775 - DNA, 25 bp, Homo sapien
gatgcagtagttagagagctgactt

SEQ ID NO: 1360776 - DNA, 25 bp, Homo sapien
gagagctgacttttaccagagatga

SEQ ID NO: 1360777 - DNA, 25 bp, Homo sapien
gctgacttttaccagagatgaaagg

SEQ ID NO: 1360778 - DNA, 25 bp, Homo sapien
ctctcttaaataagcaatcacaata

SEQ ID NO: 1360779 - DNA, 25 bp, Homo sapien
tgaccttacacagcttactctctta

SEQ ID NO: 1360780 - DNA, 25 bp, Homo sapien
gccagatagacatagtccctgacct

SEQ ID NO: 1360781 - DNA, 25 bp, Homo sapien
aaagaaatacaaacgtaagccagat

SEQ ID NO: 1360782 - DNA, 25 bp, Homo sapien
agagctgtgtacaacgtcccccatc

SEQ ID NO: 1360783 - DNA, 25 bp, Homo sapien
tcagctatggcagagctgtgtacaa

SEQ ID NO: 1360784 - DNA, 25 bp, Homo sapien
gactggactggaaataggctgctga

SEQ ID NO: 1360785 - DNA, 25 bp, Homo sapien
gactcaagctgagcagagtcccttc

SEQ ID NO: 1360786 - DNA, 25 bp, Homo sapien
tgaactcctgacctcacatgatccg

SEQ ID NO: 1360787 - DNA, 25 bp, Homo sapien
cttgaactcctgacctcacatgatc

SEQ ID NO: 1360788 - DNA, 25 bp, Homo sapien
gtcttgaactcctgacctcacatga

SEQ ID NO: 1360789 - DNA, 25 bp, Homo sapien
gacctcacatgatccgcccatctcg

SEQ ID NO: 1360790 - DNA, 25 bp, Homo sapien
taaaaggaaattgccagcccttcag

SEQ ID NO: 1360791 - DNA, 25 bp, Homo sapien
ctttaggaccctgaatgactgcatg

SEQ ID NO: 1360792 - DNA, 25 bp, Homo sapien
tgtaaatgaggacaacaccttaggg

SEQ ID NO: 1360793 - DNA, 25 bp, Homo sapien
tgacttgacatcatccgtaacagcc

SEQ ID NO: 1360794 - DNA, 25 bp, Homo sapien
tattcaggaatagagacagccctaa

SEQ ID NO: 1360795 - DNA, 25 bp, Homo sapien
aatattcaggaatagagacagccct

SEQ ID NO: 1360796 - DNA, 25 bp, Homo sapien
actgggtcatgtcactagccctctt

SEQ ID NO: 1360797 - DNA, 25 bp, Homo sapien
agaactgggtcatgtcactagccct

SEQ ID NO: 1360798 - DNA, 25 bp, Homo sapien
tctatacatgcattgcaagctttct

SEQ ID NO: 1360799 - DNA, 25 bp, Homo sapien
cctttctcataactttggtatgctg

SEQ ID NO: 1360800 - DNA, 25 bp, Homo sapien
gcacctcctctatacatgcattgca

SEQ ID NO: 1360801 - DNA, 25 bp, Homo sapien
ctcataactttggtatgctgaagat

SEQ ID NO: 1360802 - DNA, 25 bp, Homo sapien
tcttcaatgcttagtgcccagcaca

SEQ ID NO: 1360803 - DNA, 25 bp, Homo sapien
aggtgagttggtcactatgtgcaga

SEQ ID NO: 1360804 - DNA, 25 bp, Homo sapien
ggcctcagagtaacatagatcctta

SEQ ID NO: 1360805 - DNA, 25 bp, Homo sapien
tatgtgcagaatatggccaatcaga

SEQ ID NO: 1360806 - DNA, 25 bp, Homo sapien
taaaacttcatatatgccgggcatg

SEQ ID NO: 1360807 - DNA, 25 bp, Homo sapien
tctctgggtaatgagagtcactctg

SEQ ID NO: 1360808 - DNA, 25 bp, Homo sapien
taatcgttcccatggtaacacagag

SEQ ID NO: 1360809 - DNA, 25 bp, Homo sapien
gtaagtcattgaccctgaagctgga

SEQ ID NO: 1360810 - DNA, 25 bp, Homo sapien
taactatagtgtcatttttattggt

SEQ ID NO: 1360811 - DNA, 25 bp, Homo sapien
ggttgaatagtgttgatgtttggtt

SEQ ID NO: 1360812 - DNA, 25 bp, Homo sapien
ttttattggttgaatagtgttgatg

SEQ ID NO: 1360813 - DNA, 25 bp, Homo sapien
ttaactatagtgtcatttttattgg

SEQ ID NO: 1360814 - DNA, 25 bp, Homo sapien
acagggtctcgttctcacactgtta

SEQ ID NO: 1360815 - DNA, 25 bp, Homo sapien
tgcctgggacctcttcaaaagctgt

SEQ ID NO: 1360816 - DNA, 25 bp, Homo sapien
tctacttgggtctgaataacattga

SEQ ID NO: 1360817 - DNA, 25 bp, Homo sapien
gctcttttattgctatacatctggg

SEQ ID NO: 1360818 - DNA, 25 bp, Homo sapien
aatcagctattgtgtggagggaaaa

SEQ ID NO: 1360819 - DNA, 25 bp, Homo sapien
tcccaatactagaaaagcatctgcg

SEQ ID NO: 1360820 - DNA, 25 bp, Homo sapien
gtaatttaaccacatgccacttgcc

SEQ ID NO: 1360821 - DNA, 25 bp, Homo sapien
gccacttgccatcatatgctcctga

SEQ ID NO: 1360822 - DNA, 25 bp, Homo sapien
catgggtacctgtatgtgaccagct

SEQ ID NO: 1360823 - DNA, 25 bp, Homo sapien
gagggggtttcaactgatcttgatc

SEQ ID NO: 1360824 - DNA, 25 bp, Homo sapien
caaaggatatctctatttcataaat

SEQ ID NO: 1360825 - DNA, 25 bp, Homo sapien
ggcaaccggcccacaaaggatatct

SEQ ID NO: 1360826 - DNA, 25 bp, Homo sapien
ttaatcccaggtatagaaggcccag

SEQ ID NO: 1360827 - DNA, 25 bp, Homo sapien
gatcaccaagggcttagatgtctaa

SEQ ID NO: 1360828 - DNA, 25 bp, Homo sapien
aaactgtagtgagaatgagtactcc

SEQ ID NO: 1360829 - DNA, 25 bp, Homo sapien
tattgctggaatgtctgaacactga

SEQ ID NO: 1360830 - DNA, 25 bp, Homo sapien
ttctggagccagaccgcatgagctt

SEQ ID NO: 1360831 - DNA, 25 bp, Homo sapien
ggaacggctggatcaaataggttga

SEQ ID NO: 1360832 - DNA, 25 bp, Homo sapien
gatggcaagtataggagttgtactg

SEQ ID NO: 1360833 - DNA, 25 bp, Homo sapien
gagttgtactggaacggctggatca

SEQ ID NO: 1360834 - DNA, 25 bp, Homo sapien
tataggagttgtactggaacggctg

SEQ ID NO: 1360835 - DNA, 25 bp, Homo sapien
taacatggacgtggaaatatgaccc

SEQ ID NO: 1360836 - DNA, 25 bp, Homo sapien
tgagttgtttacagcccaccaggag

SEQ ID NO: 1360837 - DNA, 25 bp, Homo sapien
caagattccatgagataccccagta

SEQ ID NO: 1360838 - DNA, 25 bp, Homo sapien
gatatctcttaaggcaccgacacag

SEQ ID NO: 1360839 - DNA, 25 bp, Homo sapien
gctccttgacagcaagggctacttc

SEQ ID NO: 1360840 - DNA, 25 bp, Homo sapien
ttagatggcaagctccttgacagca

SEQ ID NO: 1360841 - DNA, 25 bp, Homo sapien
catactgcactgtgtagtctttggt

SEQ ID NO: 1360842 - DNA, 25 bp, Homo sapien
gggctacttcccatctgactgtatt

SEQ ID NO: 1360843 - DNA, 25 bp, Homo sapien
tcaatatgagaacatgattaagctt

SEQ ID NO: 1360844 - DNA, 25 bp, Homo sapien
gacagccaactcgtcccaaatgtgg

SEQ ID NO: 1360845 - DNA, 25 bp, Homo sapien
aacggccacaccctttctagagctg

SEQ ID NO: 1360846 - DNA, 25 bp, Homo sapien
tgtggaagtccagcgaaaaatcagc

SEQ ID NO: 1360847 - DNA, 25 bp, Homo sapien
gaagagctgtccaactaatgcagag

SEQ ID NO: 1360848 - DNA, 25 bp, Homo sapien
caataaataactggtgcaatatctg

SEQ ID NO: 1360849 - DNA, 25 bp, Homo sapien
tagttattgttgtaacccactgccc

SEQ ID NO: 1360850 - DNA, 25 bp, Homo sapien
cctttgggtggcttcttaggcagca

SEQ ID NO: 1360851 - DNA, 25 bp, Homo sapien
actggtgcaatatctgtaggttaga

SEQ ID NO: 1360852 - DNA, 25 bp, Homo sapien
ggatcaccaacttgagagctttgtt

SEQ ID NO: 1360853 - DNA, 25 bp, Homo sapien
gaggatcaccaacttgagagctttg

SEQ ID NO: 1360854 - DNA, 25 bp, Homo sapien
tgaggatcaccaacttgagagcttt

SEQ ID NO: 1360855 - DNA, 25 bp, Homo sapien
ctgaggatcaccaacttgagagctt

SEQ ID NO: 1360856 - DNA, 25 bp, Homo sapien
ggattgcttttacaaatcccactgt

SEQ ID NO: 1360857 - DNA, 25 bp, Homo sapien
ctttattctagcacacacgtttgca

SEQ ID NO: 1360858 - DNA, 25 bp, Homo sapien
tatttctcactacttaataatgttt

SEQ ID NO: 1360859 - DNA, 25 bp, Homo sapien
tgtttaaagattagtagaagacatt

SEQ ID NO: 1360860 - DNA, 25 bp, Homo sapien
ctagcaaagtatatggtagacacta

SEQ ID NO: 1360861 - DNA, 25 bp, Homo sapien
ggtattacttcttcaggcaatagac

SEQ ID NO: 1360862 - DNA, 25 bp, Homo sapien
ttagattcaacattcacaccatttg

SEQ ID NO: 1360863 - DNA, 25 bp, Homo sapien
aattagcaggactgaattagattca

SEQ ID NO: 1360864 - DNA, 25 bp, Homo sapien
tagttgacccacaggaatgtatcag

SEQ ID NO: 1360865 - DNA, 25 bp, Homo sapien
acccacaggaatgtatcagctttaa

SEQ ID NO: 1360866 - DNA, 25 bp, Homo sapien
aaatctgagttagttgcatagttga

SEQ ID NO: 1360867 - DNA, 25 bp, Homo sapien
tagttgcatagttgacccacaggaa

SEQ ID NO: 1360868 - DNA, 25 bp, Homo sapien
aaaattctaaggtgtttgttcatga

SEQ ID NO: 1360869 - DNA, 25 bp, Homo sapien
aaaaattctaaggtgtttgttcatg

SEQ ID NO: 1360870 - DNA, 25 bp, Homo sapien
aattctaaggtgtttgttcatgaac

SEQ ID NO: 1360871 - DNA, 25 bp, Homo sapien
tctgggtacttacagtctagcttaa

SEQ ID NO: 1360872 - DNA, 25 bp, Homo sapien
tatagagggacttgttacatagccc

SEQ ID NO: 1360873 - DNA, 25 bp, Homo sapien
cgctgtccaactctcactggataca

SEQ ID NO: 1360874 - DNA, 25 bp, Homo sapien
tatatgatcccacatctccgctgtc

SEQ ID NO: 1360875 - DNA, 25 bp, Homo sapien
tagtcaggacactagacagttattg

SEQ ID NO: 1360876 - DNA, 25 bp, Homo sapien
cccagtgtataattcatatcaggca

SEQ ID NO: 1360877 - DNA, 25 bp, Homo sapien
aattgtactcaatcttcaaggtgca

SEQ ID NO: 1360878 - DNA, 25 bp, Homo sapien
cacctattttgcatggctatatgga

SEQ ID NO: 1360879 - DNA, 25 bp, Homo sapien
ttcttgagagcagcatatagggctc

SEQ ID NO: 1360880 - DNA, 25 bp, Homo sapien
caagagtaatgaatctgatgaacca

SEQ ID NO: 1360881 - DNA, 25 bp, Homo sapien
attaaagaaccagtaagttgtcctg

SEQ ID NO: 1360882 - DNA, 25 bp, Homo sapien
cagttgccatcatatgtatcaagag

SEQ ID NO: 1360883 - DNA, 25 bp, Homo sapien
ctgtttagaccttgacacctgttga

SEQ ID NO: 1360884 - DNA, 25 bp, Homo sapien
tctgtttagaccttgacacctgttg

SEQ ID NO: 1360885 - DNA, 25 bp, Homo sapien
ggtttacaggtatgatgagccacaa

SEQ ID NO: 1360886 - DNA, 25 bp, Homo sapien
gagagctttgaaccgaataaggtct

SEQ ID NO: 1360887 - DNA, 25 bp, Homo sapien
ggactttagagagctttgaaccgaa

SEQ ID NO: 1360888 - DNA, 25 bp, Homo sapien
ttagagagctttgaaccgaataagg

SEQ ID NO: 1360889 - DNA, 25 bp, Homo sapien
aaaggtgaaggactttagagagctt

SEQ ID NO: 1360890 - DNA, 25 bp, Homo sapien
ccaagcccaggtcccattcttctca

SEQ ID NO: 1360891 - DNA, 25 bp, Homo sapien
ccagacgacgcagaaacaggcacac

SEQ ID NO: 1360892 - DNA, 25 bp, Homo sapien
ggcacacggggttctgctttcccca

SEQ ID NO: 1360893 - DNA, 25 bp, Homo sapien
agacgacgcagaaacaggcacacgg

SEQ ID NO: 1360894 - DNA, 25 bp, Homo sapien
aggaatagcaaagagagttatttta

SEQ ID NO: 1360895 - DNA, 25 bp, Homo sapien
ctcatttgggctcctaaaggaatag

SEQ ID NO: 1360896 - DNA, 25 bp, Homo sapien
ctaaaggaatagcaaagagagttat

SEQ ID NO: 1360897 - DNA, 25 bp, Homo sapien
tcatttgggctcctaaaggaatagc

SEQ ID NO: 1360898 - DNA, 25 bp, Homo sapien
ccaaatccagctagggaaggtttcg

SEQ ID NO: 1360899 - DNA, 25 bp, Homo sapien
caaatccagctagggaaggtttcgg

SEQ ID NO: 1360900 - DNA, 25 bp, Homo sapien
aatccagctagggaaggtttcggag

SEQ ID NO: 1360901 - DNA, 25 bp, Homo sapien
gagagagggtagagacgatccttcc

SEQ ID NO: 1360902 - DNA, 25 bp, Homo sapien
ggtagagacgatccttcctcgccta

SEQ ID NO: 1360903 - DNA, 25 bp, Homo sapien
ctacttgagagagggtagagacgat

SEQ ID NO: 1360904 - DNA, 25 bp, Homo sapien
gagacgatccttcctcgcctatcta

SEQ ID NO: 1360905 - DNA, 25 bp, Homo sapien
aagcgcgtgcttggagctctccggt

SEQ ID NO: 1360906 - DNA, 25 bp, Homo sapien
cagatgtagcgtccgggccccagac

SEQ ID NO: 1360907 - DNA, 25 bp, Homo sapien
ctccggtacagtgaggcgcgcgctt

SEQ ID NO: 1360908 - DNA, 25 bp, Homo sapien
gccccagaccaagcgcgtgcttgga

SEQ ID NO: 1360909 - DNA, 25 bp, Homo sapien
tcgggagcggcttcctgcaaacctt

SEQ ID NO: 1360910 - DNA, 25 bp, Homo sapien
cgaggtgcttgccaggaccgtagca

SEQ ID NO: 1360911 - DNA, 25 bp, Homo sapien
acgatctgcgttcgggctacgcggc

SEQ ID NO: 1360912 - DNA, 25 bp, Homo sapien
gaaatctgagggaacgaggcttccg

SEQ ID NO: 1360913 - DNA, 25 bp, Homo sapien
gaaatctcggtggagtagtggacca

SEQ ID NO: 1360914 - DNA, 25 bp, Homo sapien
tggccaacgatgctcgagagctggt

SEQ ID NO: 1360915 - DNA, 25 bp, Homo sapien
gagactcttcctaatgtccgggtgg

SEQ ID NO: 1360916 - DNA, 25 bp, Homo sapien
tccgagggcgactttttgagaaatc

SEQ ID NO: 1360917 - DNA, 25 bp, Homo sapien
gcccagtttggaagtctgtcatgat

SEQ ID NO: 1360918 - DNA, 25 bp, Homo sapien
aatgaaagttaatgagcatgcttgc

SEQ ID NO: 1360919 - DNA, 25 bp, Homo sapien
gcatgcttgctatgagagagggatt

SEQ ID NO: 1360920 - DNA, 25 bp, Homo sapien
gacatttcaaagactgcccagtttg

SEQ ID NO: 1360921 - DNA, 25 bp, Homo sapien
ggatgtcatacccatgaagtgcatt

SEQ ID NO: 1360922 - DNA, 25 bp, Homo sapien
gaacgataagttaatacgtgttggc

SEQ ID NO: 1360923 - DNA, 25 bp, Homo sapien
tattatacgtttgaagcctagtgac

SEQ ID NO: 1360924 - DNA, 25 bp, Homo sapien
tctgatgcagagttcaggttaatat

SEQ ID NO: 1360925 - DNA, 25 bp, Homo sapien
cagagcattatgtgtaccccagaag

SEQ ID NO: 1360926 - DNA, 25 bp, Homo sapien
ctttttcggcagattatcagattag

SEQ ID NO: 1360927 - DNA, 25 bp, Homo sapien
tcttgctgaaagttactatcctgac

SEQ ID NO: 1360928 - DNA, 25 bp, Homo sapien
cagattagtaagtgtttaaaaggca

SEQ ID NO: 1360929 - DNA, 25 bp, Homo sapien
ccaaatgagttatattgcagcaggt

SEQ ID NO: 1360930 - DNA, 25 bp, Homo sapien
gaattacgctaatgatcttagtggg

SEQ ID NO: 1360931 - DNA, 25 bp, Homo sapien
tagtgggttgaatttctcgaaacac

SEQ ID NO: 1360932 - DNA, 25 bp, Homo sapien
tatccaattcagatggcataggcac

SEQ ID NO: 1360933 - DNA, 25 bp, Homo sapien
tctggtaaccagcattcagtctcta

SEQ ID NO: 1360934 - DNA, 25 bp, Homo sapien
caataaccacccattacctcctctc

SEQ ID NO: 1360935 - DNA, 25 bp, Homo sapien
ccaccatccgtctacagaactcttc

SEQ ID NO: 1360936 - DNA, 25 bp, Homo sapien
ggtaaccagcattcagtctctatga

SEQ ID NO: 1360937 - DNA, 25 bp, Homo sapien
cctcaatgttgttgataggttctgg

SEQ ID NO: 1360938 - DNA, 25 bp, Homo sapien
aataactgtttgagtcctaataggc

SEQ ID NO: 1360939 - DNA, 25 bp, Homo sapien
ctgtgaacgtgggtatacaaataac

SEQ ID NO: 1360940 - DNA, 25 bp, Homo sapien
gcacagatctgtatattcgcaattg

SEQ ID NO: 1360941 - DNA, 25 bp, Homo sapien
cacagtcggtgctgcggtgagccgt

SEQ ID NO: 1360942 - DNA, 25 bp, Homo sapien
gcattaaacaatcccacagtcggtg

SEQ ID NO: 1360943 - DNA, 25 bp, Homo sapien
tgcattaaacaatcccacagtcggt

SEQ ID NO: 1360944 - DNA, 25 bp, Homo sapien
ctgcattaaacaatcccacagtcgg

SEQ ID NO: 1360945 - DNA, 25 bp, Homo sapien
ggacctgctgtatgtgatatgaaca

SEQ ID NO: 1360946 - DNA, 25 bp, Homo sapien
aacataccaggctcaaaatggtctg

SEQ ID NO: 1360947 - DNA, 25 bp, Homo sapien
cagtcatagactggtaacacaggca

SEQ ID NO: 1360948 - DNA, 25 bp, Homo sapien
tttgttgtgcctataaaagatgcca

SEQ ID NO: 1360949 - DNA, 25 bp, Homo sapien
ggagaggtcttcttccctgatagag

SEQ ID NO: 1360950 - DNA, 25 bp, Homo sapien
tgtagcaatgtatcctatggcatga

SEQ ID NO: 1360951 - DNA, 25 bp, Homo sapien
tccagtgatccatatgggttgggca

SEQ ID NO: 1360952 - DNA, 25 bp, Homo sapien
tgttagttgcctacccaacagccat

SEQ ID NO: 1360953 - DNA, 25 bp, Homo sapien
tctatagtctctataacctggataa

SEQ ID NO: 1360954 - DNA, 25 bp, Homo sapien
tagtctctataacctggataatctt

SEQ ID NO: 1360955 - DNA, 25 bp, Homo sapien
agtctctataacctggataatcttt

SEQ ID NO: 1360956 - DNA, 25 bp, Homo sapien
tatagtctctataacctggataatc

SEQ ID NO: 1360957 - DNA, 25 bp, Homo sapien
ggctgtctgggtaggtgtcctgggt

SEQ ID NO: 1360958 - DNA, 25 bp, Homo sapien
tgtctgagatgactgtctttgacat

SEQ ID NO: 1360959 - DNA, 25 bp, Homo sapien
gtgtctgagatgactgtctttgaca

SEQ ID NO: 1360960 - DNA, 25 bp, Homo sapien
tataagctacggaagcagataaacc

SEQ ID NO: 1360961 - DNA, 25 bp, Homo sapien
taagctacggaagcagataaaccat

SEQ ID NO: 1360962 - DNA, 25 bp, Homo sapien
tacggaagcagataaaccatcaaat

SEQ ID NO: 1360963 - DNA, 25 bp, Homo sapien
tctcaatggcttaagtagaaatttc

SEQ ID NO: 1360964 - DNA, 25 bp, Homo sapien
cagaaagcaacgtcagttcgaggca

SEQ ID NO: 1360965 - DNA, 25 bp, Homo sapien
taggtatcccaaagagatcaggtct

SEQ ID NO: 1360966 - DNA, 25 bp, Homo sapien
gatctaacattcctcttggtaacca

SEQ ID NO: 1360967 - DNA, 25 bp, Homo sapien
gaaagaacgttaccagcatctcgga

SEQ ID NO: 1360968 - DNA, 25 bp, Homo sapien
tcgtcatgccaaagcatcaggcttg

SEQ ID NO: 1360969 - DNA, 25 bp, Homo sapien
ggagagatcaccttaagcatcaaga

SEQ ID NO: 1360970 - DNA, 25 bp, Homo sapien
gatgacgcttccctgtcaaggtttc

SEQ ID NO: 1360971 - DNA, 25 bp, Homo sapien
tggtggttcccaagaatcgtcatgc

SEQ ID NO: 1360972 - DNA, 25 bp, Homo sapien
tggaaacaggggtccgactggcagc

SEQ ID NO: 1360973 - DNA, 25 bp, Homo sapien
ctggcagcggagtgggggcagtcca

SEQ ID NO: 1360974 - DNA, 25 bp, Homo sapien
gagtgggggcagtccaagctccggg

SEQ ID NO: 1360975 - DNA, 25 bp, Homo sapien
ggaatgagataatagcggcggtggg

SEQ ID NO: 1360976 - DNA, 25 bp, Homo sapien
gaggggccagcgagggtgaccaggt

SEQ ID NO: 1360977 - DNA, 25 bp, Homo sapien
aggggccagcgagggtgaccaggtg

SEQ ID NO: 1360978 - DNA, 25 bp, Homo sapien
gtggcggcacctttcgaggtagacc

SEQ ID NO: 1360979 - DNA, 25 bp, Homo sapien
tcggacagactgtggagccgacaga

SEQ ID NO: 1360980 - DNA, 25 bp, Homo sapien
aggtagacccgctgagctgctagcc

SEQ ID NO: 1360981 - DNA, 25 bp, Homo sapien
gacggccagaaagttccgccatgag

SEQ ID NO: 1360982 - DNA, 25 bp, Homo sapien
gaccctcggcggtgaaagcgcgctc

SEQ ID NO: 1360983 - DNA, 25 bp, Homo sapien
tgcgtgcgccgtgatcccctcttgt

SEQ ID NO: 1360984 - DNA, 25 bp, Homo sapien
ggtcccgctcgtctttgtgtgcaga

SEQ ID NO: 1360985 - DNA, 25 bp, Homo sapien
tttgccgccgtggtgcagctcgggc

SEQ ID NO: 1360986 - DNA, 25 bp, Homo sapien
ggtagcagggataactatggaagca

SEQ ID NO: 1360987 - DNA, 25 bp, Homo sapien
tgatgtcaggataaaatgtcagcac

SEQ ID NO: 1360988 - DNA, 25 bp, Homo sapien
tgagcaaaggctaaacagtataaca

SEQ ID NO: 1360989 - DNA, 25 bp, Homo sapien
gcagtgctgaacaatagagaggcta

SEQ ID NO: 1360990 - DNA, 25 bp, Homo sapien
agcctgtagcacccagtatacccaa

SEQ ID NO: 1360991 - DNA, 25 bp, Homo sapien
gcctgtagcacccagtatacccaag

SEQ ID NO: 1360992 - DNA, 25 bp, Homo sapien
cctgtagcacccagtatacccaagc

SEQ ID NO: 1360993 - DNA, 25 bp, Homo sapien
atctgcagtcaaatgctctaccacc

SEQ ID NO: 1360994 - DNA, 25 bp, Homo sapien
aaatgctctaccacctgagctatac

SEQ ID NO: 1360995 - DNA, 25 bp, Homo sapien
gtcaaatgctctaccacctgagcta

SEQ ID NO: 1360996 - DNA, 25 bp, Homo sapien
cagtcaaatgctctaccacctgagc

SEQ ID NO: 1360997 - DNA, 25 bp, Homo sapien
tgtcggccaggctccagtctggcct

SEQ ID NO: 1360998 - DNA, 25 bp, Homo sapien
atcatgtcggccaggctccagtctg

SEQ ID NO: 1360999 - DNA, 25 bp, Homo sapien
catgtcggccaggctccagtctggc

SEQ ID NO: 1361000 - DNA, 25 bp, Homo sapien
ttcatcatgtcggccaggctccagt

SEQ ID NO: 1361001 - DNA, 25 bp, Homo sapien
tctgaagtcgaaggcaaaacaggtg

SEQ ID NO: 1361002 - DNA, 25 bp, Homo sapien
catagaaaattcttggagctacagt

SEQ ID NO: 1361003 - DNA, 25 bp, Homo sapien
tcatcttgtaacacagggacgagaa

SEQ ID NO: 1361004 - DNA, 25 bp, Homo sapien
gctacagtctgagggcctaggctcc

SEQ ID NO: 1361005 - DNA, 25 bp, Homo sapien
tttgggacaggcactttaaactgaa

SEQ ID NO: 1361006 - DNA, 25 bp, Homo sapien
agagacatttgggacaggcacttta

SEQ ID NO: 1361007 - DNA, 25 bp, Homo sapien
caggcactttaaactgaacacccct

SEQ ID NO: 1361008 - DNA, 25 bp, Homo sapien
gacatttgggacaggcactttaaac

SEQ ID NO: 1361009 - DNA, 25 bp, Homo sapien
cctcctggactgcaggttcctgaag

SEQ ID NO: 1361010 - DNA, 25 bp, Homo sapien
tcctggactgcaggttcctgaagag

SEQ ID NO: 1361011 - DNA, 25 bp, Homo sapien
gactgcaggttcctgaagagggttt

SEQ ID NO: 1361012 - DNA, 25 bp, Homo sapien
ctggactgcaggttcctgaagaggg

SEQ ID NO: 1361013 - DNA, 25 bp, Homo sapien
tcttctgtacaaagcctgaagtgct

SEQ ID NO: 1361014 - DNA, 25 bp, Homo sapien
gcaggatttgcttccgtaggaggca

SEQ ID NO: 1361015 - DNA, 25 bp, Homo sapien
tggaatagtgcaacctgtatatggg

SEQ ID NO: 1361016 - DNA, 25 bp, Homo sapien
taggaggcaagttccttgatgtgga

SEQ ID NO: 1361017 - DNA, 25 bp, Homo sapien
ggagttttgaatttgggatactcaa

SEQ ID NO: 1361018 - DNA, 25 bp, Homo sapien
atacctaggatcaatgtattcctga

SEQ ID NO: 1361019 - DNA, 25 bp, Homo sapien
gaaacaacctatttcaatgagctta

SEQ ID NO: 1361020 - DNA, 25 bp, Homo sapien
actcaacttgtattagcttaagtaa

SEQ ID NO: 1361021 - DNA, 25 bp, Homo sapien
tgatcaacattagcagtagttacct

SEQ ID NO: 1361022 - DNA, 25 bp, Homo sapien
tatgaaagagactggatacaactgt

SEQ ID NO: 1361023 - DNA, 25 bp, Homo sapien
gctaggtcttctcttaaatttgctg

SEQ ID NO: 1361024 - DNA, 25 bp, Homo sapien
gcaaccagccaacatagctaggtct

SEQ ID NO: 1361025 - DNA, 25 bp, Homo sapien
cacgtttaatatcctgtggatacta

SEQ ID NO: 1361026 - DNA, 25 bp, Homo sapien
tgcaatttacacgtttaatatcctg

SEQ ID NO: 1361027 - DNA, 25 bp, Homo sapien
gatttgcacattattactttatcaa

SEQ ID NO: 1361028 - DNA, 25 bp, Homo sapien
actaaaagcttgtatattgtcagat

SEQ ID NO: 1361029 - DNA, 25 bp, Homo sapien
tgctgccccatagcaatcgcatttg

SEQ ID NO: 1361030 - DNA, 25 bp, Homo sapien
tctctctgtctgattgacttgtgca

SEQ ID NO: 1361031 - DNA, 25 bp, Homo sapien
ccaatttacgcgagagggcagttaa

SEQ ID NO: 1361032 - DNA, 25 bp, Homo sapien
ggcagttaaaatctggttgaatttc

SEQ ID NO: 1361033 - DNA, 25 bp, Homo sapien
ttaacgtcacaagcggcatcagcag

SEQ ID NO: 1361034 - DNA, 25 bp, Homo sapien
catgaatcgcgctgttgccaaatgg

SEQ ID NO: 1361035 - DNA, 25 bp, Homo sapien
ttccttcaaaagtcacagcctggcg

SEQ ID NO: 1361036 - DNA, 25 bp, Homo sapien
cattcatccggtagctgtctgcagc

SEQ ID NO: 1361037 - DNA, 25 bp, Homo sapien
agagaatggcagtttgggtgtactg

SEQ ID NO: 1361038 - DNA, 25 bp, Homo sapien
ccgcagagcagtccacgtcttttct

SEQ ID NO: 1361039 - DNA, 25 bp, Homo sapien
ttgggtgtactggtgccgcagagca

SEQ ID NO: 1361040 - DNA, 25 bp, Homo sapien
gagcagtccacgtcttttctaacct

SEQ ID NO: 1361041 - DNA, 25 bp, Homo sapien
aattaccttttagtggctgggcgtg

SEQ ID NO: 1361042 - DNA, 25 bp, Homo sapien
tcaagaccagtctggccagtatggt

SEQ ID NO: 1361043 - DNA, 25 bp, Homo sapien
gtagctcacgcctgtaatgccagca

SEQ ID NO: 1361044 - DNA, 25 bp, Homo sapien
ctttgggaggctgaggcgggtggat

SEQ ID NO: 1361045 - DNA, 25 bp, Homo sapien
tctgaaagaagcctctgggtctggg

SEQ ID NO: 1361046 - DNA, 25 bp, Homo sapien
ctgtgaagaaaaggctgtggccgcc

SEQ ID NO: 1361047 - DNA, 25 bp, Homo sapien
ggtgacacgcaaagtaatgtgaccc

SEQ ID NO: 1361048 - DNA, 25 bp, Homo sapien
taggccactgtatgctctggaggac

SEQ ID NO: 1361049 - DNA, 25 bp, Homo sapien
actcatactcaagtcctccaagcat

SEQ ID NO: 1361050 - DNA, 25 bp, Homo sapien
tactcaagtcctccaagcatccagg

SEQ ID NO: 1361051 - DNA, 25 bp, Homo sapien
cagccaagccgagtgaccagcggtt

SEQ ID NO: 1361052 - DNA, 25 bp, Homo sapien
cagcggttttggtgttactagaaag

SEQ ID NO: 1361053 - DNA, 25 bp, Homo sapien
ccagggctttcatgagagctgagaa

SEQ ID NO: 1361054 - DNA, 25 bp, Homo sapien
aaagtgcccgtgcatcccagaatgt

SEQ ID NO: 1361055 - DNA, 25 bp, Homo sapien
tcttactcagagtggccgctcggtc

SEQ ID NO: 1361056 - DNA, 25 bp, Homo sapien
gtccactgcaatgccgatggccatt

SEQ ID NO: 1361057 - DNA, 25 bp, Homo sapien
agatcagcggtcaggttcagggcca

SEQ ID NO: 1361058 - DNA, 25 bp, Homo sapien
atcagcggtcaggttcagggccaat

SEQ ID NO: 1361059 - DNA, 25 bp, Homo sapien
ctgaaagccaggagatcagcggtca

SEQ ID NO: 1361060 - DNA, 25 bp, Homo sapien
gccaggagatcagcggtcaggttca

SEQ ID NO: 1361061 - DNA, 25 bp, Homo sapien
cccaaaacgcctgagaatctctcct

SEQ ID NO: 1361062 - DNA, 25 bp, Homo sapien
caaaacgcctgagaatctctcctcg

SEQ ID NO: 1361063 - DNA, 25 bp, Homo sapien
ccccaaaacgcctgagaatctctcc

SEQ ID NO: 1361064 - DNA, 25 bp, Homo sapien
aaacgcctgagaatctctcctcggg

SEQ ID NO: 1361065 - DNA, 25 bp, Homo sapien
aagggacagaaaaatgtgaggacat

SEQ ID NO: 1361066 - DNA, 25 bp, Homo sapien
gggatggaagggacagaaaaatgtg

SEQ ID NO: 1361067 - DNA, 25 bp, Homo sapien
tggatttggggatggaagggacaga

SEQ ID NO: 1361068 - DNA, 25 bp, Homo sapien
atggaagggacagaaaaatgtgagg

SEQ ID NO: 1361069 - DNA, 25 bp, Homo sapien
tgcccagctggtctcgaattcctgg

SEQ ID NO: 1361070 - DNA, 25 bp, Homo sapien
gcccagctggtctcgaattcctggg

SEQ ID NO: 1361071 - DNA, 25 bp, Homo sapien
ccttgacctccctggctcaaaggat

SEQ ID NO: 1361072 - DNA, 25 bp, Homo sapien
tgacctccctggctcaaaggatcct

SEQ ID NO: 1361073 - DNA, 25 bp, Homo sapien
tgatagaacgaagctagtggagccg

SEQ ID NO: 1361074 - DNA, 25 bp, Homo sapien
taaggagcaagaccccagccaagag

SEQ ID NO: 1361075 - DNA, 25 bp, Homo sapien
ggcctggaacctgcggcctttcagg

SEQ ID NO: 1361076 - DNA, 25 bp, Homo sapien
ggctcagattcatgaggcctggaac

SEQ ID NO: 1361077 - DNA, 25 bp, Homo sapien
ttctttgttcctgagttgtgctgtc

SEQ ID NO: 1361078 - DNA, 25 bp, Homo sapien
acattctttgttcctgagttgtgct

SEQ ID NO: 1361079 - DNA, 25 bp, Homo sapien
caggccaattgagtcactggcttca

SEQ ID NO: 1361080 - DNA, 25 bp, Homo sapien
caggcttctgggaagagtcgctgta

SEQ ID NO: 1361081 - DNA, 25 bp, Homo sapien
ccgtgaggcaaggtaatgagttcca

SEQ ID NO: 1361082 - DNA, 25 bp, Homo sapien
cagagactccaagtatcctagcaac

SEQ ID NO: 1361083 - DNA, 25 bp, Homo sapien
tatgtccaggcgcagctggtgtccg

SEQ ID NO: 1361084 - DNA, 25 bp, Homo sapien
ctttcaattatgtccaggcgcagct

SEQ ID NO: 1361085 - DNA, 25 bp, Homo sapien
ggccggatcctgctgcgacgttttg

SEQ ID NO: 1361086 - DNA, 25 bp, Homo sapien
tgagcttttgtctgacaccggccgg

SEQ ID NO: 1361087 - DNA, 25 bp, Homo sapien
catgtgttcggagctgaccgatccc

SEQ ID NO: 1361088 - DNA, 25 bp, Homo sapien
agcaaggctgcatgtgttcggagct

SEQ ID NO: 1361089 - DNA, 25 bp, Homo sapien
ccaaatgctgacaatggtgatctcc

SEQ ID NO: 1361090 - DNA, 25 bp, Homo sapien
taatgtttttgcgtaaaccaaatgc

SEQ ID NO: 1361091 - DNA, 25 bp, Homo sapien
ggaatagtgtgtacagacctgtggc

SEQ ID NO: 1361092 - DNA, 25 bp, Homo sapien
gacctgtggcaaacagatattacac

SEQ ID NO: 1361093 - DNA, 25 bp, Homo sapien
ccttaaataaattcccatgctggtg

SEQ ID NO: 1361094 - DNA, 25 bp, Homo sapien
tatcttcagactttcctatgggcaa

SEQ ID NO: 1361095 - DNA, 25 bp, Homo sapien
tacaaaagccagaggagcaccggga

SEQ ID NO: 1361096 - DNA, 25 bp, Homo sapien
ccttgaaaagccagaggagcaccag

SEQ ID NO: 1361097 - DNA, 25 bp, Homo sapien
caaacgctgggttcagttcacagta

SEQ ID NO: 1361098 - DNA, 25 bp, Homo sapien
gaaccttgaggaacggcaccttgca

SEQ ID NO: 1361099 - DNA, 25 bp, Homo sapien
tccatgctcagtacgtgctgggcga

SEQ ID NO: 1361100 - DNA, 25 bp, Homo sapien
gactcaaactcgttgggcctgaagg

SEQ ID NO: 1361101 - DNA, 25 bp, Homo sapien
tcggcaggtagctctctgactggtg

SEQ ID NO: 1361102 - DNA, 25 bp, Homo sapien
ctttgagggacaaggctcttctgtc

SEQ ID NO: 1361103 - DNA, 25 bp, Homo sapien
tttgagggacaaggctcttctgtcc

SEQ ID NO: 1361104 - DNA, 25 bp, Homo sapien
caatcggcaggtagctctctgactg

SEQ ID NO: 1361105 - DNA, 25 bp, Homo sapien
caggcgggctggctaccactctttt

SEQ ID NO: 1361106 - DNA, 25 bp, Homo sapien
ggcgggctggctaccactcttttct

SEQ ID NO: 1361107 - DNA, 25 bp, Homo sapien
gcaggcgggctggctaccactcttt

SEQ ID NO: 1361108 - DNA, 25 bp, Homo sapien
gcgggctggctaccactcttttctt

SEQ ID NO: 1361109 - DNA, 25 bp, Homo sapien
agacaagaccgagggcaaattacaa

SEQ ID NO: 1361110 - DNA, 25 bp, Homo sapien
gaaattccagcaacctttcgaagat

SEQ ID NO: 1361111 - DNA, 25 bp, Homo sapien
tccagcaacctttcgaagataagac

SEQ ID NO: 1361112 - DNA, 25 bp, Homo sapien
ctttcgaagataagacaagaccgag

SEQ ID NO: 1361113 - DNA, 25 bp, Homo sapien
ggcccgacgtcagggcaggtggcac

SEQ ID NO: 1361114 - DNA, 25 bp, Homo sapien
ccaccagccagccaactagcaggcc

SEQ ID NO: 1361115 - DNA, 25 bp, Homo sapien
actagcaggcccgacgtcagggcag

SEQ ID NO: 1361116 - DNA, 25 bp, Homo sapien
gccagccaactagcaggcccgacgt

SEQ ID NO: 1361117 - DNA, 25 bp, Homo sapien
ccactgaaggacactggggcagggc

SEQ ID NO: 1361118 - DNA, 25 bp, Homo sapien
ggcagggcagcaggccatgagccat

SEQ ID NO: 1361119 - DNA, 25 bp, Homo sapien
agccactgaaggacactggggcagg

SEQ ID NO: 1361120 - DNA, 25 bp, Homo sapien
ggagccactgaaggacactggggca

SEQ ID NO: 1361121 - DNA, 25 bp, Homo sapien
cgtgctgcgtgtacaaagtggtgac

SEQ ID NO: 1361122 - DNA, 25 bp, Homo sapien
aagtggtgacaagttctaggaggat

SEQ ID NO: 1361123 - DNA, 25 bp, Homo sapien
catttctgggcgtgctgcgtgtaca

SEQ ID NO: 1361124 - DNA, 25 bp, Homo sapien
cgtgtacaaagtggtgacaagttct

SEQ ID NO: 1361125 - DNA, 25 bp, Homo sapien
gtgcttttagataatatgcacaaag

SEQ ID NO: 1361126 - DNA, 25 bp, Homo sapien
ctttcccagtgcttttagataatat

SEQ ID NO: 1361127 - DNA, 25 bp, Homo sapien
gactggatctatgtccccgatgcct

SEQ ID NO: 1361128 - DNA, 25 bp, Homo sapien
cataagattagaagctgggagccgg

SEQ ID NO: 1361129 - DNA, 25 bp, Homo sapien
gagagtcacgaactaggaagtcacc

SEQ ID NO: 1361130 - DNA, 25 bp, Homo sapien
ggcaaattctgctctcgggcctgga

SEQ ID NO: 1361131 - DNA, 25 bp, Homo sapien
atctcgaactggtactgcacgcggc

SEQ ID NO: 1361132 - DNA, 25 bp, Homo sapien
tcgctgagtcgcagaactgtccggt

SEQ ID NO: 1361133 - DNA, 25 bp, Homo sapien
cagcctggctgttcctgtagcctga

SEQ ID NO: 1361134 - DNA, 25 bp, Homo sapien
aatttataatgtggtgcagcctggc

SEQ ID NO: 1361135 - DNA, 25 bp, Homo sapien
agcaactggagaatttataatgtgg

SEQ ID NO: 1361136 - DNA, 25 bp, Homo sapien
ctggctgttcctgtagcctgaccac

SEQ ID NO: 1361137 - DNA, 25 bp, Homo sapien
ggcagccttgttgatctgggccacc

SEQ ID NO: 1361138 - DNA, 25 bp, Homo sapien
gtgtgaataactgccagctcaatgg

SEQ ID NO: 1361139 - DNA, 25 bp, Homo sapien
ccagtagggaagtgatggagagtgt

SEQ ID NO: 1361140 - DNA, 25 bp, Homo sapien
tctcctcccgaagctaagccactgc

SEQ ID NO: 1361141 - DNA, 25 bp, Homo sapien
acaacgctgtgcttgcagaccccag

SEQ ID NO: 1361142 - DNA, 25 bp, Homo sapien
tcttccggttactgactctgtggct

SEQ ID NO: 1361143 - DNA, 25 bp, Homo sapien
ggagcgctggctgtcccttcacttc

SEQ ID NO: 1361144 - DNA, 25 bp, Homo sapien
cagcccgccctcctagttcttccgg

SEQ ID NO: 1361145 - DNA, 25 bp, Homo sapien
gagtgggaccctgcgggtcatcaat

SEQ ID NO: 1361146 - DNA, 25 bp, Homo sapien
ccatgtggcctcggagtgggaccct

SEQ ID NO: 1361147 - DNA, 25 bp, Homo sapien
attgcctgagagcagccgtgtatgc

SEQ ID NO: 1361148 - DNA, 25 bp, Homo sapien
tcatcaatctgtacattgcctgaga

SEQ ID NO: 1361149 - DNA, 25 bp, Homo sapien
cttcttcagtttctcgggggtcctg

SEQ ID NO: 1361150 - DNA, 25 bp, Homo sapien
aggcatggctgcgcaggtcctcgct

SEQ ID NO: 1361151 - DNA, 25 bp, Homo sapien
ggcatggctgcgcaggtcctcgctg

SEQ ID NO: 1361152 - DNA, 25 bp, Homo sapien
tcgggggtcctgtccatgatgtgcc

SEQ ID NO: 1361153 - DNA, 25 bp, Homo sapien
aacttttagggcaaatggacagagc

SEQ ID NO: 1361154 - DNA, 25 bp, Homo sapien
tacaacatgtgaactgaacctggaa

SEQ ID NO: 1361155 - DNA, 25 bp, Homo sapien
gctgaccaggaaccgcttgctgaaa

SEQ ID NO: 1361156 - DNA, 25 bp, Homo sapien
gaatcagtggtctgcggcgttgcac

SEQ ID NO: 1361157 - DNA, 25 bp, Homo sapien
aagagatgcggacgctggctgtcca

SEQ ID NO: 1361158 - DNA, 25 bp, Homo sapien
tgtccagggtgcctgcaggctttag

SEQ ID NO: 1361159 - DNA, 25 bp, Homo sapien
aatttgcatcaaagagatgcggacg

SEQ ID NO: 1361160 - DNA, 25 bp, Homo sapien
gctttagacggtgatgtttgacacc

SEQ ID NO: 1361161 - DNA, 25 bp, Homo sapien
caacatttggcggaattctgtaggc

SEQ ID NO: 1361162 - DNA, 25 bp, Homo sapien
tagcactggtcatgcatgtctgcaa

SEQ ID NO: 1361163 - DNA, 25 bp, Homo sapien
tactggtgacagtgtatcctttcgc

SEQ ID NO: 1361164 - DNA, 25 bp, Homo sapien
tgtaaaccccacaggttagtgagag

SEQ ID NO: 1361165 - DNA, 25 bp, Homo sapien
tgcccacaggtcttgccagcttcat

SEQ ID NO: 1361166 - DNA, 25 bp, Homo sapien
ggctttggatcaagaacattgtgcc

SEQ ID NO: 1361167 - DNA, 25 bp, Homo sapien
gatgctgctgggctttggatcaaga

SEQ ID NO: 1361168 - DNA, 25 bp, Homo sapien
attgtgcccacaggtcttgccagct

SEQ ID NO: 1361169 - DNA, 25 bp, Homo sapien
ggccccacttcgaaatgttcatgtt

SEQ ID NO: 1361170 - DNA, 25 bp, Homo sapien
catgtttgtcccagtcattagcatt

SEQ ID NO: 1361171 - DNA, 25 bp, Homo sapien
atggccccacttcgaaatgttcatg

SEQ ID NO: 1361172 - DNA, 25 bp, Homo sapien
tgttcatgtttgtcccagtcattag

SEQ ID NO: 1361173 - DNA, 25 bp, Homo sapien
tctgtagaggtacacggcctggcag

SEQ ID NO: 1361174 - DNA, 25 bp, Homo sapien
taacatgttctgacgcagggtccaa

SEQ ID NO: 1361175 - DNA, 25 bp, Homo sapien
cagggtccaattgcaggaaccttcc

SEQ ID NO: 1361176 - DNA, 25 bp, Homo sapien
ttccatggctccctgaacaaaacat

SEQ ID NO: 1361177 - DNA, 25 bp, Homo sapien
tgggcaaggtctcttgcacacattc

SEQ ID NO: 1361178 - DNA, 25 bp, Homo sapien
ggcaaggtctcttgcacacattccc

SEQ ID NO: 1361179 - DNA, 25 bp, Homo sapien
tctgggcaaggtctcttgcacacat

SEQ ID NO: 1361180 - DNA, 25 bp, Homo sapien
tctctgggcaaggtctcttgcacac

SEQ ID NO: 1361181 - DNA, 25 bp, Homo sapien
ttgcactgtaacgtctctctccatc

SEQ ID NO: 1361182 - DNA, 25 bp, Homo sapien
tgaccccagtgagtttgcccatcat

SEQ ID NO: 1361183 - DNA, 25 bp, Homo sapien
tccatcccttcttgaccccagtgag

SEQ ID NO: 1361184 - DNA, 25 bp, Homo sapien
actcattgcactgtaacgtctctct

SEQ ID NO: 1361185 - DNA, 25 bp, Homo sapien
gctgaaagccctggcgggtaccttc

SEQ ID NO: 1361186 - DNA, 25 bp, Homo sapien
ttaatagataaaccgaaacacgatg

SEQ ID NO: 1361187 - DNA, 25 bp, Homo sapien
tttccaacaggccatttgttaacat

SEQ ID NO: 1361188 - DNA, 25 bp, Homo sapien
ttaacatcttgccacgctgaaagcc

SEQ ID NO: 1361189 - DNA, 25 bp, Homo sapien
cccaccaggcatggtattacagcag

SEQ ID NO: 1361190 - DNA, 25 bp, Homo sapien
gagttaaatgtctgcagaatgccca

SEQ ID NO: 1361191 - DNA, 25 bp, Homo sapien
taattcaccagactcagcaaaggct

SEQ ID NO: 1361192 - DNA, 25 bp, Homo sapien
aagttcctcctctagctcaccaggg

SEQ ID NO: 1361193 - DNA, 25 bp, Homo sapien
ggaaagcactgcattccttaggcat

SEQ ID NO: 1361194 - DNA, 25 bp, Homo sapien
gacttgcggtgatagaagcagcaca

SEQ ID NO: 1361195 - DNA, 25 bp, Homo sapien
cttgactccaatgaaagacttgcgg

SEQ ID NO: 1361196 - DNA, 25 bp, Homo sapien
gagctgctgagagggcgtggaaagc

SEQ ID NO: 1361197 - DNA, 25 bp, Homo sapien
tcttcagtcccggggaccacacact

SEQ ID NO: 1361198 - DNA, 25 bp, Homo sapien
ggtcttcagtcccggggaccacaca

SEQ ID NO: 1361199 - DNA, 25 bp, Homo sapien
tcggtcttcagtcccggggaccaca

SEQ ID NO: 1361200 - DNA, 25 bp, Homo sapien
cttcagtcccggggaccacacactt

SEQ ID NO: 1361201 - DNA, 25 bp, Homo sapien
gttaaagccctagcccaccacagca

SEQ ID NO: 1361202 - DNA, 25 bp, Homo sapien
gacgttaaagccctagcccaccaca

SEQ ID NO: 1361203 - DNA, 25 bp, Homo sapien
ccgggggagtgagtcggctccttct

SEQ ID NO: 1361204 - DNA, 25 bp, Homo sapien
agaagtcagggaagtcggcagccgg

SEQ ID NO: 1361205 - DNA, 25 bp, Homo sapien
aaataggaaattgctctgggcccag

SEQ ID NO: 1361206 - DNA, 25 bp, Homo sapien
caggtatggagagccacagtctcac

SEQ ID NO: 1361207 - DNA, 25 bp, Homo sapien
tcaagtctgcccacaaaaataggaa

SEQ ID NO: 1361208 - DNA, 25 bp, Homo sapien
gattagcgtcaaatcctcgggagac

SEQ ID NO: 1361209 - DNA, 25 bp, Homo sapien
gagtgtgggcgatgacttcctttct

SEQ ID NO: 1361210 - DNA, 25 bp, Homo sapien
ctggaggtctggtctgcagtcttga

SEQ ID NO: 1361211 - DNA, 25 bp, Homo sapien
tggtctgcagtcttgacggctccca

SEQ ID NO: 1361212 - DNA, 25 bp, Homo sapien
gcgagtgtgggcgatgacttccttt

SEQ ID NO: 1361213 - DNA, 25 bp, Homo sapien
tctggcttgccctcatttccgttag

SEQ ID NO: 1361214 - DNA, 25 bp, Homo sapien
tcaatcaggccattagccaccacag

SEQ ID NO: 1361215 - DNA, 25 bp, Homo sapien
aagggtaagtccgtgtgagcagcca

SEQ ID NO: 1361216 - DNA, 25 bp, Homo sapien
tcatttccgttagatggagttcaaa

SEQ ID NO: 1361217 - DNA, 25 bp, Homo sapien
cttggagagcaaataacgattcctt

SEQ ID NO: 1361218 - DNA, 25 bp, Homo sapien
gaaatcctgcacagaaattcgtgag

SEQ ID NO: 1361219 - DNA, 25 bp, Homo sapien
aagaggctagacaggcaccatccca

SEQ ID NO: 1361220 - DNA, 25 bp, Homo sapien
tagtcagccaagagactccgaagcc

SEQ ID NO: 1361221 - DNA, 25 bp, Homo sapien
ctgccctatttagtaaccatggaaa

SEQ ID NO: 1361222 - DNA, 25 bp, Homo sapien
tgccctatttagtaaccatggaaac

SEQ ID NO: 1361223 - DNA, 25 bp, Homo sapien
gccctatttagtaaccatggaaaca

SEQ ID NO: 1361224 - DNA, 25 bp, Homo sapien
tctgtctcacaagcacctctgcaaa

SEQ ID NO: 1361225 - DNA, 25 bp, Homo sapien
gtgagacagacacctgcttgtcttc

SEQ ID NO: 1361226 - DNA, 25 bp, Homo sapien
tcccacctccactgcgccagttctc

SEQ ID NO: 1361227 - DNA, 25 bp, Homo sapien
gagacagacacctgcttgtcttcaa

SEQ ID NO: 1361228 - DNA, 25 bp, Homo sapien
caaagtagctgtgagaatcagtcca

SEQ ID NO: 1361229 - DNA, 25 bp, Homo sapien
ccaatttcaaagagtcacgtgacca

SEQ ID NO: 1361230 - DNA, 25 bp, Homo sapien
cacacacccgggttgtagcagggat

SEQ ID NO: 1361231 - DNA, 25 bp, Homo sapien
tacggactgataaagcaccctggct

SEQ ID NO: 1361232 - DNA, 25 bp, Homo sapien
cattggaatgcctgaacatgatagg

SEQ ID NO: 1361233 - DNA, 25 bp, Homo sapien
gacccatgtcttattgtcatcattg

SEQ ID NO: 1361234 - DNA, 25 bp, Homo sapien
actcattaaaatgactggtgccctt

SEQ ID NO: 1361235 - DNA, 25 bp, Homo sapien
tgtctgttggcctcatgacccatgt

SEQ ID NO: 1361236 - DNA, 25 bp, Homo sapien
gtcattcaagaaacaattagatgcc

SEQ ID NO: 1361237 - DNA, 25 bp, Homo sapien
cattcaagaaacaattagatgccat

SEQ ID NO: 1361238 - DNA, 25 bp, Homo sapien
tacacttgcatactcaggcagagca

SEQ ID NO: 1361239 - DNA, 25 bp, Homo sapien
cttaaggatcaggagaatgcgcact

SEQ ID NO: 1361240 - DNA, 25 bp, Homo sapien
tgtcccaagtaaatggatccctgca

SEQ ID NO: 1361241 - DNA, 25 bp, Homo sapien
gatgagcaaccagatctttacagta

SEQ ID NO: 1361242 - DNA, 25 bp, Homo sapien
tcagagctgacaggtacacctcata

SEQ ID NO: 1361243 - DNA, 25 bp, Homo sapien
tgggctaaagatgccagaaccgacc

SEQ ID NO: 1361244 - DNA, 25 bp, Homo sapien
ggtacacctcataagatgcagagat

SEQ ID NO: 1361245 - DNA, 25 bp, Homo sapien
aagatgccagaaccgaccagggcag

SEQ ID NO: 1361246 - DNA, 25 bp, Homo sapien
tataaatggccacattttcatagac

SEQ ID NO: 1361247 - DNA, 25 bp, Homo sapien
ttataaatggccacattttcataga

SEQ ID NO: 1361248 - DNA, 25 bp, Homo sapien
tttataaatggccacattttcatag

SEQ ID NO: 1361249 - DNA, 25 bp, Homo sapien
tgtagtaacaccgaacctcccaaga

SEQ ID NO: 1361250 - DNA, 25 bp, Homo sapien
tccctttcgtccctctgcatgtggg

SEQ ID NO: 1361251 - DNA, 25 bp, Homo sapien
ccccagagcgggccagggctgtttt

SEQ ID NO: 1361252 - DNA, 25 bp, Homo sapien
gcggtgtttgatctctggtcccaca

SEQ ID NO: 1361253 - DNA, 25 bp, Homo sapien
gccaatgtgcacactcaggcaaaaa

SEQ ID NO: 1361254 - DNA, 25 bp, Homo sapien
ccaatgtgcacactcaggcaaaaac

SEQ ID NO: 1361255 - DNA, 25 bp, Homo sapien
tgccaatgtgcacactcaggcaaaa

SEQ ID NO: 1361256 - DNA, 25 bp, Homo sapien
ctgccaatgtgcacactcaggcaaa

SEQ ID NO: 1361257 - DNA, 25 bp, Homo sapien
caagtggccaagtggttctactgga

SEQ ID NO: 1361258 - DNA, 25 bp, Homo sapien
tggccaagtggttctactggagctt

SEQ ID NO: 1361259 - DNA, 25 bp, Homo sapien
aagtggttctactggagcttcctcc

SEQ ID NO: 1361260 - DNA, 25 bp, Homo sapien
ggttctactggagcttcctcctctt

SEQ ID NO: 1361261 - DNA, 25 bp, Homo sapien
tagcaactctgtgttccaaatggga

SEQ ID NO: 1361262 - DNA, 25 bp, Homo sapien
tacccagggtcacggctacatgttt

SEQ ID NO: 1361263 - DNA, 25 bp, Homo sapien
gctttttacacaaaccaggctgcag

SEQ ID NO: 1361264 - DNA, 25 bp, Homo sapien
cctgtaataggatgacgtgagaccc

SEQ ID NO: 1361265 - DNA, 25 bp, Homo sapien
ccacagttgggtccagaagatgtgg

SEQ ID NO: 1361266 - DNA, 25 bp, Homo sapien
acagttgggtccagaagatgtggat

SEQ ID NO: 1361267 - DNA, 25 bp, Homo sapien
cacagttgggtccagaagatgtgga

SEQ ID NO: 1361268 - DNA, 25 bp, Homo sapien
tccacagttgggtccagaagatgtg

SEQ ID NO: 1361269 - DNA, 25 bp, Homo sapien
taagttactaagctgggccccatct

SEQ ID NO: 1361270 - DNA, 25 bp, Homo sapien
gggaacgatgcattcttacattgag

SEQ ID NO: 1361271 - DNA, 25 bp, Homo sapien
tctcccaggcagtattcacaacagg

SEQ ID NO: 1361272 - DNA, 25 bp, Homo sapien
caggccccagaatgttagagtattt

SEQ ID NO: 1361273 - DNA, 25 bp, Homo sapien
gatttcaactgatcttgccacaaaa

SEQ ID NO: 1361274 - DNA, 25 bp, Homo sapien
ggattcatgctgagtagatttcaac

SEQ ID NO: 1361275 - DNA, 25 bp, Homo sapien
gcagatacgtaggatgaacaagcat

SEQ ID NO: 1361276 - DNA, 25 bp, Homo sapien
gaacaagcatagagctctaatggac

SEQ ID NO: 1361277 - DNA, 25 bp, Homo sapien
gaggttgcggcgagctgagatggcg

SEQ ID NO: 1361278 - DNA, 25 bp, Homo sapien
aggttgcggcgagctgagatggcgc

SEQ ID NO: 1361279 - DNA, 25 bp, Homo sapien
agaggttgcggcgagctgagatggc

SEQ ID NO: 1361280 - DNA, 25 bp, Homo sapien
ttcctcttctgtctgaggcccgcca

SEQ ID NO: 1361281 - DNA, 25 bp, Homo sapien
tttcctcttctgtctgaggcccgcc

SEQ ID NO: 1361282 - DNA, 25 bp, Homo sapien
tcctcttctgtctgaggcccgccat

SEQ ID NO: 1361283 - DNA, 25 bp, Homo sapien
ccagccaagacggcctctcccagcc

SEQ ID NO: 1361284 - DNA, 25 bp, Homo sapien
ctccagccaagacggcctctcccag

SEQ ID NO: 1361285 - DNA, 25 bp, Homo sapien
actccagccaagacggcctctccca

SEQ ID NO: 1361286 - DNA, 25 bp, Homo sapien
tccagccaagacggcctctcccagc

SEQ ID NO: 1361287 - DNA, 25 bp, Homo sapien
gctgccctgtgtcattagctgtcat

SEQ ID NO: 1361288 - DNA, 25 bp, Homo sapien
ggctgccctgtgtcattagctgtca

SEQ ID NO: 1361289 - DNA, 25 bp, Homo sapien
ttaaacgatcttcctgctgcagcct

SEQ ID NO: 1361290 - DNA, 25 bp, Homo sapien
tgtttcgttactagtgggcactgcc

SEQ ID NO: 1361291 - DNA, 25 bp, Homo sapien
tgtggataacctgagtagcattctg

SEQ ID NO: 1361292 - DNA, 25 bp, Homo sapien
gcacccggcctctaatatctaaagt

SEQ ID NO: 1361293 - DNA, 25 bp, Homo sapien
ccagtccgttactgcttcttttcaa

SEQ ID NO: 1361294 - DNA, 25 bp, Homo sapien
cctggaggtcttagccagtacagtt

SEQ ID NO: 1361295 - DNA, 25 bp, Homo sapien
gaggtcttagccagtacagttaaat

SEQ ID NO: 1361296 - DNA, 25 bp, Homo sapien
accgcgcccagtccgttactgcttc

SEQ ID NO: 1361297 - DNA, 25 bp, Homo sapien
cacaaagaatctatgcagagctact

SEQ ID NO: 1361298 - DNA, 25 bp, Homo sapien
caaagaatctatgcagagctactaa

SEQ ID NO: 1361299 - DNA, 25 bp, Homo sapien
gaatctatgcagagctactaagaga

SEQ ID NO: 1361300 - DNA, 25 bp, Homo sapien
tatgcagagctactaagagagttga

SEQ ID NO: 1361301 - DNA, 25 bp, Homo sapien
gaagagagcttgaaattctacatcc

SEQ ID NO: 1361302 - DNA, 25 bp, Homo sapien
gatagtgacaccattccgaagcatg

SEQ ID NO: 1361303 - DNA, 25 bp, Homo sapien
caatcccacagctagcctcttggtg

SEQ ID NO: 1361304 - DNA, 25 bp, Homo sapien
tgacagactggatagtgacaccatt

SEQ ID NO: 1361305 - DNA, 25 bp, Homo sapien
ctttcccaaatagcatgctggtggc

SEQ ID NO: 1361306 - DNA, 25 bp, Homo sapien
tcttcaacccaggagcagcgcaaga

SEQ ID NO: 1361307 - DNA, 25 bp, Homo sapien
aacccaggagcagcgcaagatgcag

SEQ ID NO: 1361308 - DNA, 25 bp, Homo sapien
cgcaagatgcaggggctgagctcac

SEQ ID NO: 1361309 - DNA, 25 bp, Homo sapien
ttcaacccaggagcagcgcaagatg

SEQ ID NO: 1361310 - DNA, 25 bp, Homo sapien
gaatgcactaaaccattcgcaacag

SEQ ID NO: 1361311 - DNA, 25 bp, Homo sapien
cattcctcggaatgcactaaaccat

SEQ ID NO: 1361312 - DNA, 25 bp, Homo sapien
aggccaccagggaccgggacattca

SEQ ID NO: 1361313 - DNA, 25 bp, Homo sapien
gaccgggacattcaccattcctcgg

SEQ ID NO: 1361314 - DNA, 25 bp, Homo sapien
tacacaaaaagcttccaatttgcag

SEQ ID NO: 1361315 - DNA, 25 bp, Homo sapien
aagcttccaatttgcagacagcaga

SEQ ID NO: 1361316 - DNA, 25 bp, Homo sapien
agtacacaaaaagcttccaatttgc

SEQ ID NO: 1361317 - DNA, 25 bp, Homo sapien
aaaaagcttccaatttgcagacagc

SEQ ID NO: 1361318 - DNA, 25 bp, Homo sapien
gaaggaattaggcactcacagctgt

SEQ ID NO: 1361319 - DNA, 25 bp, Homo sapien
cctctcagcccaaggaagattccag

SEQ ID NO: 1361320 - DNA, 25 bp, Homo sapien
gacctgaatggtatccaagcactga

SEQ ID NO: 1361321 - DNA, 25 bp, Homo sapien
tgttcccaggaatgtgtgcctccac

SEQ ID NO: 1361322 - DNA, 25 bp, Homo sapien
tcaagaggaaatcctgtctgcagac

SEQ ID NO: 1361323 - DNA, 25 bp, Homo sapien
aaccacaagtacatccaagggcagc

SEQ ID NO: 1361324 - DNA, 25 bp, Homo sapien
agagatacagtcaccaaaagagaag

SEQ ID NO: 1361325 - DNA, 25 bp, Homo sapien
tgcttgcagaacaaaggctccttct

SEQ ID NO: 1361326 - DNA, 25 bp, Homo sapien
acctgggtctgcttgcagaacaaag

SEQ ID NO: 1361327 - DNA, 25 bp, Homo sapien
ctgaatacaagcagggtactgaccc

SEQ ID NO: 1361328 - DNA, 25 bp, Homo sapien
cctaaaccaggagtgcttgttaagt

SEQ ID NO: 1361329 - DNA, 25 bp, Homo sapien
ccaccctccgataagatcttttaca

SEQ ID NO: 1361330 - DNA, 25 bp, Homo sapien
tacagaaatatgacctctgtccaag

SEQ ID NO: 1361331 - DNA, 25 bp, Homo sapien
tattaatagtagtacagagcagggt

SEQ ID NO: 1361332 - DNA, 25 bp, Homo sapien
taaaattttatttcagcatgctgac

SEQ ID NO: 1361333 - DNA, 25 bp, Homo sapien
aaattttatttcagcatgctgacaa

SEQ ID NO: 1361334 - DNA, 25 bp, Homo sapien
gctggtgcatccacataaaatttta

SEQ ID NO: 1361335 - DNA, 25 bp, Homo sapien
ctgctggtgcatccacataaaattt

SEQ ID NO: 1361336 - DNA, 25 bp, Homo sapien
tcaccggcatgtttctgggaaggct

SEQ ID NO: 1361337 - DNA, 25 bp, Homo sapien
cacatcttgataggcatctgggcga

SEQ ID NO: 1361338 - DNA, 25 bp, Homo sapien
tcttccgtggaagggtgccatgtat

SEQ ID NO: 1361339 - DNA, 25 bp, Homo sapien
tcagaaggtccatggatgaggccag

SEQ ID NO: 1361340 - DNA, 25 bp, Homo sapien
tgtcctcggttcattgtcaaatcca

SEQ ID NO: 1361341 - DNA, 25 bp, Homo sapien
cctcggttcattgtcaaatccagta

SEQ ID NO: 1361342 - DNA, 25 bp, Homo sapien
ttaactctgtcctcggttcattgtc

SEQ ID NO: 1361343 - DNA, 25 bp, Homo sapien
actctgtcctcggttcattgtcaaa

SEQ ID NO: 1361344 - DNA, 25 bp, Homo sapien
cactgtcagcacttgctcaatgcta

SEQ ID NO: 1361345 - DNA, 25 bp, Homo sapien
tgtcagcacttgctcaatgctaacc

SEQ ID NO: 1361346 - DNA, 25 bp, Homo sapien
gcacactgtcagcacttgctcaatg

SEQ ID NO: 1361347 - DNA, 25 bp, Homo sapien
tcagcacttgctcaatgctaaccat

SEQ ID NO: 1361348 - DNA, 25 bp, Homo sapien
agtctgtacccaagtaggtgactct

SEQ ID NO: 1361349 - DNA, 25 bp, Homo sapien
gtctgtacccaagtaggtgactctg

SEQ ID NO: 1361350 - DNA, 25 bp, Homo sapien
ttgactggaagtgctagggaagatc

SEQ ID NO: 1361351 - DNA, 25 bp, Homo sapien
gaagtgctagggaagatctggaagg

SEQ ID NO: 1361352 - DNA, 25 bp, Homo sapien
aggctgatggtgaaacccatggagg

SEQ ID NO: 1361353 - DNA, 25 bp, Homo sapien
ggctgatggtgaaacccatggagga

SEQ ID NO: 1361354 - DNA, 25 bp, Homo sapien
aaacccatggaggaacaatgaagaa

SEQ ID NO: 1361355 - DNA, 25 bp, Homo sapien
gagaaactcgcctcctcggagcctt

SEQ ID NO: 1361356 - DNA, 25 bp, Homo sapien
atgcctggccgccaatcgctgagcg

SEQ ID NO: 1361357 - DNA, 25 bp, Homo sapien
agtgccaccgagcaagatgcctggc

SEQ ID NO: 1361358 - DNA, 25 bp, Homo sapien
accccggccggcttctgcgaagagg

SEQ ID NO: 1361359 - DNA, 25 bp, Homo sapien
ggctctcttcgtatctccccaagga

SEQ ID NO: 1361360 - DNA, 25 bp, Homo sapien
agccgattcgcgctgccttgcggaa

SEQ ID NO: 1361361 - DNA, 25 bp, Homo sapien
ttacattcggtgacctagccaggcc

SEQ ID NO: 1361362 - DNA, 25 bp, Homo sapien
tcaactggtgatttgcggctccgcg

SEQ ID NO: 1361363 - DNA, 25 bp, Homo sapien
cttcaaggactatggcaggttttgt

SEQ ID NO: 1361364 - DNA, 25 bp, Homo sapien
ttcaaggactatggcaggttttgtc

SEQ ID NO: 1361365 - DNA, 25 bp, Homo sapien
caggccagcttgggtcagatgaagc

SEQ ID NO: 1361366 - DNA, 25 bp, Homo sapien
aggccagcttgggtcagatgaagca

SEQ ID NO: 1361367 - DNA, 25 bp, Homo sapien
gcaaatggttgatgctccatgttgt

SEQ ID NO: 1361368 - DNA, 25 bp, Homo sapien
gggccctctattgcatcagcttttg

SEQ ID NO: 1361369 - DNA, 25 bp, Homo sapien
tgtatgagggccctctattgcatca

SEQ ID NO: 1361370 - DNA, 25 bp, Homo sapien
gggaccctgccattagcaaatggtt

SEQ ID NO: 1361371 - DNA, 25 bp, Homo sapien
taaaaatcctcagtcaagcaaggga

SEQ ID NO: 1361372 - DNA, 25 bp, Homo sapien
tcaaagaaatgaggtggtggctgcc

SEQ ID NO: 1361373 - DNA, 25 bp, Homo sapien
caagggactgggatttgtgaagctc

SEQ ID NO: 1361374 - DNA, 25 bp, Homo sapien
tccacagggttttaggatgctctgg

SEQ ID NO: 1361375 - DNA, 25 bp, Homo sapien
attgcatctctgaatgaaggcttcc

SEQ ID NO: 1361376 - DNA, 25 bp, Homo sapien
tctgaatgaaggcttcctctggagg

SEQ ID NO: 1361377 - DNA, 25 bp, Homo sapien
gcttcccctgcacattgcatctctg

SEQ ID NO: 1361378 - DNA, 25 bp, Homo sapien
agctctgtggacgtgcagcttcccc

SEQ ID NO: 1361379 - DNA, 25 bp, Homo sapien
ttaagacaaagagggcaagttgaaa

SEQ ID NO: 1361380 - DNA, 25 bp, Homo sapien
gaaagatcctggactctggaggctg

SEQ ID NO: 1361381 - DNA, 25 bp, Homo sapien
caggacctaactttggagtatcctt

SEQ ID NO: 1361382 - DNA, 25 bp, Homo sapien
caagttgaaattgtgagatactgca

SEQ ID NO: 1361383 - DNA, 25 bp, Homo sapien
gatgctccggtgctgcgactgcctc

SEQ ID NO: 1361384 - DNA, 25 bp, Homo sapien
gcgcctgatggagacccgaagttgg

SEQ ID NO: 1361385 - DNA, 25 bp, Homo sapien
agacttaaaactcctactgcctttg

SEQ ID NO: 1361386 - DNA, 25 bp, Homo sapien
ggccaagacttaaaactcctactgc

SEQ ID NO: 1361387 - DNA, 25 bp, Homo sapien
taaaaactcagaatcacttttatta

SEQ ID NO: 1361388 - DNA, 25 bp, Homo sapien
aactcagaatcacttttattaaaat

SEQ ID NO: 1361389 - DNA, 25 bp, Homo sapien
aataaaaactcagaatcacttttat

SEQ ID NO: 1361390 - DNA, 25 bp, Homo sapien
ctaataaaaactcagaatcactttt

SEQ ID NO: 1361391 - DNA, 25 bp, Homo sapien
gccatggccggtggctaaggacagg

SEQ ID NO: 1361392 - DNA, 25 bp, Homo sapien
catagggagacaatgggtgtgtggg

SEQ ID NO: 1361393 - DNA, 25 bp, Homo sapien
tgcatagggagacaatgggtgtgtg

SEQ ID NO: 1361394 - DNA, 25 bp, Homo sapien
ggcggccatggccggtggctaagga

SEQ ID NO: 1361395 - DNA, 25 bp, Homo sapien
ttcagaaatcagatagccacagctg

SEQ ID NO: 1361396 - DNA, 25 bp, Homo sapien
cagaattcttggcagtcaaacaata

SEQ ID NO: 1361397 - DNA, 25 bp, Homo sapien
aattcttggcagtcaaacaatacca

SEQ ID NO: 1361398 - DNA, 25 bp, Homo sapien
taaaactgagattaacccagaattc

SEQ ID NO: 1361399 - DNA, 25 bp, Homo sapien
gccacggtccatggggtgccctggg

SEQ ID NO: 1361400 - DNA, 25 bp, Homo sapien
tccatcctgcgctgggtcacctctg

SEQ ID NO: 1361401 - DNA, 25 bp, Homo sapien
ggcctccatcctgcgctgggtcacc

SEQ ID NO: 1361402 - DNA, 25 bp, Homo sapien
tgccctggggatactaaggcctcca

SEQ ID NO: 1361403 - DNA, 25 bp, Homo sapien
ctctgagggacgctatttctcctcc

SEQ ID NO: 1361404 - DNA, 25 bp, Homo sapien
ctaagccgcaggcagccactagagg

SEQ ID NO: 1361405 - DNA, 25 bp, Homo sapien
ctgagggacgctatttctcctcctg

SEQ ID NO: 1361406 - DNA, 25 bp, Homo sapien
aagccgcaggcagccactagaggac

SEQ ID NO: 1361407 - DNA, 25 bp, Homo sapien
acaccacgatggaagctgcttttgc

SEQ ID NO: 1361408 - DNA, 25 bp, Homo sapien
gatgactgtagctgcgcactgtgcc

SEQ ID NO: 1361409 - DNA, 25 bp, Homo sapien
ggacacccagcattcaaaggagcga

SEQ ID NO: 1361410 - DNA, 25 bp, Homo sapien
catggtgacaggcttgcattccttt

SEQ ID NO: 1361411 - DNA, 25 bp, Homo sapien
ggtaaagaaagggccaccatcacac

SEQ ID NO: 1361412 - DNA, 25 bp, Homo sapien
tcaggtggggacattggtaaagaaa

SEQ ID NO: 1361413 - DNA, 25 bp, Homo sapien
attggtaaagaaagggccaccatca

SEQ ID NO: 1361414 - DNA, 25 bp, Homo sapien
gacattggtaaagaaagggccacca

SEQ ID NO: 1361415 - DNA, 25 bp, Homo sapien
tacatgtaagtggtgcctgcagagt

SEQ ID NO: 1361416 - DNA, 25 bp, Homo sapien
tataactcccaaggaatagacgcca

SEQ ID NO: 1361417 - DNA, 25 bp, Homo sapien
gaatggacttccgaaaggctgcgtc

SEQ ID NO: 1361418 - DNA, 25 bp, Homo sapien
tctttgggccttcatacacaggagc

SEQ ID NO: 1361419 - DNA, 25 bp, Homo sapien
agagaaggaaggtagcaagggctct

SEQ ID NO: 1361420 - DNA, 25 bp, Homo sapien
ggctctgatcctggagatggtagaa

SEQ ID NO: 1361421 - DNA, 25 bp, Homo sapien
ggcaaagctgggaaacaagaccaaa

SEQ ID NO: 1361422 - DNA, 25 bp, Homo sapien
caagaccaaaaacagcaaaccgcgt

SEQ ID NO: 1361423 - DNA, 25 bp, Homo sapien
tggcggggaacagccatgccagctt

SEQ ID NO: 1361424 - DNA, 25 bp, Homo sapien
tttggctctggtatctgtggatgcc

SEQ ID NO: 1361425 - DNA, 25 bp, Homo sapien
cctggcggggaacagccatgccagc

SEQ ID NO: 1361426 - DNA, 25 bp, Homo sapien
agctttggctctggtatctgtggat

SEQ ID NO: 1361427 - DNA, 25 bp, Homo sapien
ccagatcatgtgtttccaagcggtg

SEQ ID NO: 1361428 - DNA, 25 bp, Homo sapien
tctaaaggttgggactagcactccc

SEQ ID NO: 1361429 - DNA, 25 bp, Homo sapien
taggactattccagacttggcaggg

SEQ ID NO: 1361430 - DNA, 25 bp, Homo sapien
tgctcagtcagccttccgggaaaac

SEQ ID NO: 1361431 - DNA, 25 bp, Homo sapien
agagatcactgagagtttaactcca

SEQ ID NO: 1361432 - DNA, 25 bp, Homo sapien
tggtgttgtcaacacagagatcact

SEQ ID NO: 1361433 - DNA, 25 bp, Homo sapien
ggattcctctagctttggtgttgtc

SEQ ID NO: 1361434 - DNA, 25 bp, Homo sapien
actccaaatcgcaggcctccattgt

SEQ ID NO: 1361435 - DNA, 25 bp, Homo sapien
gagctcaagccagccaagccagcat

SEQ ID NO: 1361436 - DNA, 25 bp, Homo sapien
ttcatgggtaatctgaacatcccca

SEQ ID NO: 1361437 - DNA, 25 bp, Homo sapien
catgaatgtggtcttctaatgtttc

SEQ ID NO: 1361438 - DNA, 25 bp, Homo sapien
tttcactttcatgggtaatctgaac

SEQ ID NO: 1361439 - DNA, 25 bp, Homo sapien
catgagccagtccattgattacatc

SEQ ID NO: 1361440 - DNA, 25 bp, Homo sapien
acttgagggtaccatactgctgtct

SEQ ID NO: 1361441 - DNA, 25 bp, Homo sapien
tttatgataagagcaccagcatgca

SEQ ID NO: 1361442 - DNA, 25 bp, Homo sapien
cccttccggttttctctcattgata

SEQ ID NO: 1361443 - DNA, 25 bp, Homo sapien
gtcccacagaagcagaatatgtgct

SEQ ID NO: 1361444 - DNA, 25 bp, Homo sapien
gggtcccacagaagcagaatatgtg

SEQ ID NO: 1361445 - DNA, 25 bp, Homo sapien
tcaccagggtcccacagaagcagaa

SEQ ID NO: 1361446 - DNA, 25 bp, Homo sapien
cttgtcaccagggtcccacagaagc

SEQ ID NO: 1361447 - DNA, 25 bp, Homo sapien
ctccataggggctgaagacagcagc

SEQ ID NO: 1361448 - DNA, 25 bp, Homo sapien
tctccataggggctgaagacagcag

SEQ ID NO: 1361449 - DNA, 25 bp, Homo sapien
tgccctcctccaccagaacacccca

SEQ ID NO: 1361450 - DNA, 25 bp, Homo sapien
cccctgccctcctccaccagaacac

SEQ ID NO: 1361451 - DNA, 25 bp, Homo sapien
cctgccctcctccaccagaacaccc

SEQ ID NO: 1361452 - DNA, 25 bp, Homo sapien
gccctcctccaccagaacaccccac

SEQ ID NO: 1361453 - DNA, 25 bp, Homo sapien
gtgtgtctgcgcttctcaatcctcc

SEQ ID NO: 1361454 - DNA, 25 bp, Homo sapien
tgtgtgtctgcgcttctcaatcctc

SEQ ID NO: 1361455 - DNA, 25 bp, Homo sapien
tgtgtctgcgcttctcaatcctccc

SEQ ID NO: 1361456 - DNA, 25 bp, Homo sapien
ctgtgtgtctgcgcttctcaatcct

SEQ ID NO: 1361457 - DNA, 25 bp, Homo sapien
ctggaatatggatgtcccataggcc

SEQ ID NO: 1361458 - DNA, 25 bp, Homo sapien
ggatgtcccataggcccctcccatt

SEQ ID NO: 1361459 - DNA, 25 bp, Homo sapien
gaatatggatgtcccataggcccct

SEQ ID NO: 1361460 - DNA, 25 bp, Homo sapien
atatggatgtcccataggcccctcc

SEQ ID NO: 1361461 - DNA, 25 bp, Homo sapien
cagaggtttcctcttgcccggtcta

SEQ ID NO: 1361462 - DNA, 25 bp, Homo sapien
tctgcctcctaagtgggagtctggg

SEQ ID NO: 1361463 - DNA, 25 bp, Homo sapien
ctttgggctctgtatatgcccctga

SEQ ID NO: 1361464 - DNA, 25 bp, Homo sapien
tttggtatctagctctcctttgggc

SEQ ID NO: 1361465 - DNA, 25 bp, Homo sapien
ggaaggtgtccgccccactgtagca

SEQ ID NO: 1361466 - DNA, 25 bp, Homo sapien
gtgtccgccccactgtagcacacat

SEQ ID NO: 1361467 - DNA, 25 bp, Homo sapien
aaggtgtccgccccactgtagcaca

SEQ ID NO: 1361468 - DNA, 25 bp, Homo sapien
ctaggggaaggtgtccgccccactg

SEQ ID NO: 1361469 - DNA, 25 bp, Homo sapien
ggttcttgttgcctggtttgctgac

SEQ ID NO: 1361470 - DNA, 25 bp, Homo sapien
ttgttgcctggtttgctgactgccg

SEQ ID NO: 1361471 - DNA, 25 bp, Homo sapien
ttgctgactgccgtccagagccgct

SEQ ID NO: 1361472 - DNA, 25 bp, Homo sapien
cctggtttgctgactgccgtccaga

SEQ ID NO: 1361473 - DNA, 25 bp, Homo sapien
catcatataagaggggattcaaggg

SEQ ID NO: 1361474 - DNA, 25 bp, Homo sapien
taagaggggattcaagggtgtatca

SEQ ID NO: 1361475 - DNA, 25 bp, Homo sapien
gggcagctgtgtacttttggctgtg

SEQ ID NO: 1361476 - DNA, 25 bp, Homo sapien
caggtgaatctcatggtgctgatgc

SEQ ID NO: 1361477 - DNA, 25 bp, Homo sapien
taggtggtatgctctgccagaaaat

SEQ ID NO: 1361478 - DNA, 25 bp, Homo sapien
gaaaccaagttattagtcctgtaga

SEQ ID NO: 1361479 - DNA, 25 bp, Homo sapien
ggtaggtagatctagacttactctg

SEQ ID NO: 1361480 - DNA, 25 bp, Homo sapien
tttacccaccaacgctgtgcctgtg

SEQ ID NO: 1361481 - DNA, 25 bp, Homo sapien
gaaggtagcacctcccctgttgtgg

SEQ ID NO: 1361482 - DNA, 25 bp, Homo sapien
tcaggtatcatttctcgagggaagc

SEQ ID NO: 1361483 - DNA, 25 bp, Homo sapien
ccctcacaatatataggctcttgga

SEQ ID NO: 1361484 - DNA, 25 bp, Homo sapien
caagacccacttctctaggatcagg

SEQ ID NO: 1361485 - DNA, 25 bp, Homo sapien
tctttgcagaaagggctagaagctc

SEQ ID NO: 1361486 - DNA, 25 bp, Homo sapien
cctggttatcccataatagtgactg

SEQ ID NO: 1361487 - DNA, 25 bp, Homo sapien
gatcagcattgtcctagctcccctg

SEQ ID NO: 1361488 - DNA, 25 bp, Homo sapien
tctacactgggctgatgattctctt

SEQ ID NO: 1361489 - DNA, 25 bp, Homo sapien
gatacacaggccgtaatttgctgac

SEQ ID NO: 1361490 - DNA, 25 bp, Homo sapien
ggaggataacctgcctgaggtcgca

SEQ ID NO: 1361491 - DNA, 25 bp, Homo sapien
ttgagcaagttattacaccagccct

SEQ ID NO: 1361492 - DNA, 25 bp, Homo sapien
tgaccctcagtgtgtgccagaacag

SEQ ID NO: 1361493 - DNA, 25 bp, Homo sapien
aaggctgtcctttaatcatggtcgg

SEQ ID NO: 1361494 - DNA, 25 bp, Homo sapien
tcaggatgtggacagaaccggaatg

SEQ ID NO: 1361495 - DNA, 25 bp, Homo sapien
cctcctgtgagcagtaatgttcctg

SEQ ID NO: 1361496 - DNA, 25 bp, Homo sapien
cagggaaacccagatcaatgtgaag

SEQ ID NO: 1361497 - DNA, 25 bp, Homo sapien
gaagtgagaggataagccacagact

SEQ ID NO: 1361498 - DNA, 25 bp, Homo sapien
caaaatgctgccaggcttgggaagc

SEQ ID NO: 1361499 - DNA, 25 bp, Homo sapien
taatgaccctaaatcacaagcctga

SEQ ID NO: 1361500 - DNA, 25 bp, Homo sapien
gaagcaatgataacctcagggcagg

SEQ ID NO: 1361501 - DNA, 25 bp, Homo sapien
tcccatcaaggacagtgtagtcagt

SEQ ID NO: 1361502 - DNA, 25 bp, Homo sapien
ccaatgtggagacaaaccaaggccc

SEQ ID NO: 1361503 - DNA, 25 bp, Homo sapien
tgtggtagattgcacttccccaaaa

SEQ ID NO: 1361504 - DNA, 25 bp, Homo sapien
gaagtggatccaacagccctcagtt

SEQ ID NO: 1361505 - DNA, 25 bp, Homo sapien
ttgtgtcactaacatcattcagctc

SEQ ID NO: 1361506 - DNA, 25 bp, Homo sapien
ctcaaagatcattcaagcgcagatt

SEQ ID NO: 1361507 - DNA, 25 bp, Homo sapien
cattgttaactcaaagatcattcaa

SEQ ID NO: 1361508 - DNA, 25 bp, Homo sapien
gtcactaacatcattcagctcaaaa

SEQ ID NO: 1361509 - DNA, 25 bp, Homo sapien
tgtttagaatgatagggcatacagg

SEQ ID NO: 1361510 - DNA, 25 bp, Homo sapien
tattgttcacccctacatgaagtgc

SEQ ID NO: 1361511 - DNA, 25 bp, Homo sapien
caaacaccaaactaatcactgtggc

SEQ ID NO: 1361512 - DNA, 25 bp, Homo sapien
attctgaaatgtccttacgctattg

SEQ ID NO: 1361513 - DNA, 25 bp, Homo sapien
tctacagacaccaggcgaactaagg

SEQ ID NO: 1361514 - DNA, 25 bp, Homo sapien
ccaggcgaactaaggtgtcacccgt

SEQ ID NO: 1361515 - DNA, 25 bp, Homo sapien
tacacaagttccaggaccctctaca

SEQ ID NO: 1361516 - DNA, 25 bp, Homo sapien
ggtgtcacccgtgcccagatagtac

SEQ ID NO: 1361517 - DNA, 25 bp, Homo sapien
gcaggaagtacagctcgtgagggac

SEQ ID NO: 1361518 - DNA, 25 bp, Homo sapien
agaaagactagaatccaagggcagg

SEQ ID NO: 1361519 - DNA, 25 bp, Homo sapien
aagaaagactagaatccaagggcag

SEQ ID NO: 1361520 - DNA, 25 bp, Homo sapien
tgggacatccctcagacgtgagagg

SEQ ID NO: 1361521 - DNA, 25 bp, Homo sapien
tccctcagacgtgagaggatagttt

SEQ ID NO: 1361522 - DNA, 25 bp, Homo sapien
agactggccagtgcggcttccagat

SEQ ID NO: 1361523 - DNA, 25 bp, Homo sapien
caaagcacagccgtgaaagctgatg

SEQ ID NO: 1361524 - DNA, 25 bp, Homo sapien
ctgtaggtggtggttccaccctgca

SEQ ID NO: 1361525 - DNA, 25 bp, Homo sapien
gctgtaggtggtggttccaccctgc

SEQ ID NO: 1361526 - DNA, 25 bp, Homo sapien
agctgtaggtggtggttccaccctg

SEQ ID NO: 1361527 - DNA, 25 bp, Homo sapien
gtaccagctgttacaccggcatcca

SEQ ID NO: 1361528 - DNA, 25 bp, Homo sapien
tacctgcaaaacctccaatgggctt

SEQ ID NO: 1361529 - DNA, 25 bp, Homo sapien
cgctgttgtgaaggaactctgggca

SEQ ID NO: 1361530 - DNA, 25 bp, Homo sapien
tccactggtgttacagccacacagc

SEQ ID NO: 1361531 - DNA, 25 bp, Homo sapien
gtaacagacacctatgcttacctac

SEQ ID NO: 1361532 - DNA, 25 bp, Homo sapien
taacagacacctatgcttacctacc

SEQ ID NO: 1361533 - DNA, 25 bp, Homo sapien
ttcactaccattgtaaactgttcct

SEQ ID NO: 1361534 - DNA, 25 bp, Homo sapien
cttcactaccattgtaaactgttcc

SEQ ID NO: 1361535 - DNA, 25 bp, Homo sapien
ccttcactaccattgtaaactgttc

SEQ ID NO: 1361536 - DNA, 25 bp, Homo sapien
ctccttcactaccattgtaaactgt

SEQ ID NO: 1361537 - DNA, 25 bp, Homo sapien
gacatatttttcatgcgctctgcaa

SEQ ID NO: 1361538 - DNA, 25 bp, Homo sapien
ggaccatccctctccacggaatatc

SEQ ID NO: 1361539 - DNA, 25 bp, Homo sapien
ccccattcctcagatgacatatttt

SEQ ID NO: 1361540 - DNA, 25 bp, Homo sapien
tttcatgcgctctgcaagcccaaag

SEQ ID NO: 1361541 - DNA, 25 bp, Homo sapien
cctgaccacagttccagcctagtgg

SEQ ID NO: 1361542 - DNA, 25 bp, Homo sapien
taacctggtccctctaaatctgtgc

SEQ ID NO: 1361543 - DNA, 25 bp, Homo sapien
catttctggtttggagctagattca

SEQ ID NO: 1361544 - DNA, 25 bp, Homo sapien
aaatctgtgcctactttggaatcca

SEQ ID NO: 1361545 - DNA, 25 bp, Homo sapien
aaggcaaatgggagtagagcaagat

SEQ ID NO: 1361546 - DNA, 25 bp, Homo sapien
aggcaaatgggagtagagcaagatc

SEQ ID NO: 1361547 - DNA, 25 bp, Homo sapien
caaggcaaatgggagtagagcaaga

SEQ ID NO: 1361548 - DNA, 25 bp, Homo sapien
gtaagccatatcaggttgggttgta

SEQ ID NO: 1361549 - DNA, 25 bp, Homo sapien
tgttttctggcttgcaacttggagc

SEQ ID NO: 1361550 - DNA, 25 bp, Homo sapien
taaccagtcctgtaagtaagccata

SEQ ID NO: 1361551 - DNA, 25 bp, Homo sapien
tctctccctttaaccagtcctgtaa

SEQ ID NO: 1361552 - DNA, 25 bp, Homo sapien
ttcatctctgtatgccccaaggtca

SEQ ID NO: 1361553 - DNA, 25 bp, Homo sapien
cacgcctggactatcatcctttcta

SEQ ID NO: 1361554 - DNA, 25 bp, Homo sapien
taaggcttgtaagccaagcacatgt

SEQ ID NO: 1361555 - DNA, 25 bp, Homo sapien
ctttctataaggcttgtaagccaag

SEQ ID NO: 1361556 - DNA, 25 bp, Homo sapien
accccttttgccgtatctggcctgg

SEQ ID NO: 1361557 - DNA, 25 bp, Homo sapien
tgcacatcccctcctatagtaatca

SEQ ID NO: 1361558 - DNA, 25 bp, Homo sapien
atcttgaatcaagtctgcccctacc

SEQ ID NO: 1361559 - DNA, 25 bp, Homo sapien
acacagcttttctcatgccaaatgc

SEQ ID NO: 1361560 - DNA, 25 bp, Homo sapien
ttcccaacctcgtctgttgacacat

SEQ ID NO: 1361561 - DNA, 25 bp, Homo sapien
tgtacttccataaggacccatccaa

SEQ ID NO: 1361562 - DNA, 25 bp, Homo sapien
tcaccccaaactgtacttccataag

SEQ ID NO: 1361563 - DNA, 25 bp, Homo sapien
ccaacctcgtctgttgacacatctt

SEQ ID NO: 1361564 - DNA, 25 bp, Homo sapien
ggcctaactgtattgtccctactca

SEQ ID NO: 1361565 - DNA, 25 bp, Homo sapien
tatacctctggagtaaagcaaagct

SEQ ID NO: 1361566 - DNA, 25 bp, Homo sapien
tctgggaaggccgaaatcactaacc

SEQ ID NO: 1361567 - DNA, 25 bp, Homo sapien
ggtagctcacgcctcactttgggag

SEQ ID NO: 1361568 - DNA, 25 bp, Homo sapien
gaagtacaaccttgatagctcacag

SEQ ID NO: 1361569 - DNA, 25 bp, Homo sapien
ctggccccagtcttctaattgcagg

SEQ ID NO: 1361570 - DNA, 25 bp, Homo sapien
ccttgatagctcacagaaggctgca

SEQ ID NO: 1361571 - DNA, 25 bp, Homo sapien
ttgcagggtataagaagtacaacct

SEQ ID NO: 1361572 - DNA, 25 bp, Homo sapien
cctgatcacgctttacttgggccat

SEQ ID NO: 1361573 - DNA, 25 bp, Homo sapien
tgcagcgagcaatcttgagggatga

SEQ ID NO: 1361574 - DNA, 25 bp, Homo sapien
ccaagaatgcaagaccctgatcacg

SEQ ID NO: 1361575 - DNA, 25 bp, Homo sapien
cacgttcttcctagatgtgccaaga

SEQ ID NO: 1361576 - DNA, 25 bp, Homo sapien
cggcctcggccgctcacaggcgcga

SEQ ID NO: 1361577 - DNA, 25 bp, Homo sapien
ctcacaggcgcgacgtaaaggcccg

SEQ ID NO: 1361578 - DNA, 25 bp, Homo sapien
cggccgctcacaggcgcgacgtaaa

SEQ ID NO: 1361579 - DNA, 25 bp, Homo sapien
gctcacaggcgcgacgtaaaggccc

SEQ ID NO: 1361580 - DNA, 25 bp, Homo sapien
cttaacggtgcaacggctggcctgg

SEQ ID NO: 1361581 - DNA, 25 bp, Homo sapien
cccggcttaacggtgcaacggctgg

SEQ ID NO: 1361582 - DNA, 25 bp, Homo sapien
gggcctgcaactctggggtcccggc

SEQ ID NO: 1361583 - DNA, 25 bp, Homo sapien
tcaccggcccggcttaacggtgcaa

SEQ ID NO: 1361584 - DNA, 25 bp, Homo sapien
gggaaaagcgcgactgtgattcgta

SEQ ID NO: 1361585 - DNA, 25 bp, Homo sapien
ggagggaaaagcgcgactgtgattc

SEQ ID NO: 1361586 - DNA, 25 bp, Homo sapien
agggaaaagcgcgactgtgattcgt

SEQ ID NO: 1361587 - DNA, 25 bp, Homo sapien
ggaaaagcgcgactgtgattcgtac

SEQ ID NO: 1361588 - DNA, 25 bp, Homo sapien
cgtgaaggggaccgggttgcggctg

SEQ ID NO: 1361589 - DNA, 25 bp, Homo sapien
ggaccgggttgcggctgccctcaca

SEQ ID NO: 1361590 - DNA, 25 bp, Homo sapien
ggggaccgggttgcggctgccctca

SEQ ID NO: 1361591 - DNA, 25 bp, Homo sapien
tgaaggggaccgggttgcggctgcc

SEQ ID NO: 1361592 - DNA, 25 bp, Homo sapien
ccgaccttgttgaggggcgaccact

SEQ ID NO: 1361593 - DNA, 25 bp, Homo sapien
cttggctcaactgggtcgccgacct

SEQ ID NO: 1361594 - DNA, 25 bp, Homo sapien
cgtttgaggcggatggcagtgccct

SEQ ID NO: 1361595 - DNA, 25 bp, Homo sapien
gaccgagagcctgcggctggcgttt

SEQ ID NO: 1361596 - DNA, 25 bp, Homo sapien
tgcgtgcgctgtgctgactacctct

SEQ ID NO: 1361597 - DNA, 25 bp, Homo sapien
gagggacgagaaaacacgcctacgc

SEQ ID NO: 1361598 - DNA, 25 bp, Homo sapien
ggaaaagcgacactgaagcgaaggc

SEQ ID NO: 1361599 - DNA, 25 bp, Homo sapien
gcagtcgatgtaggtcctgagaaga

SEQ ID NO: 1361600 - DNA, 25 bp, Homo sapien
aaatgtgagtctgcaacagagggtg

SEQ ID NO: 1361601 - DNA, 25 bp, Homo sapien
ggaaatgtgagtctgcaacagaggg

SEQ ID NO: 1361602 - DNA, 25 bp, Homo sapien
gcacagttaattggaaatgtgagtc

SEQ ID NO: 1361603 - DNA, 25 bp, Homo sapien
tttgcacagttaattggaaatgtga

SEQ ID NO: 1361604 - DNA, 25 bp, Homo sapien
cgaagcagagtagctgaagcctcaa

SEQ ID NO: 1361605 - DNA, 25 bp, Homo sapien
cctcaagaaggggaagatcagtgtg

SEQ ID NO: 1361606 - DNA, 25 bp, Homo sapien
agcagagtagctgaagcctcaagaa

SEQ ID NO: 1361607 - DNA, 25 bp, Homo sapien
caagaaggggaagatcagtgtgtca

SEQ ID NO: 1361608 - DNA, 25 bp, Homo sapien
gactgaatacctggtacatctctca

SEQ ID NO: 1361609 - DNA, 25 bp, Homo sapien
tgttggatgctaagaacctagccca

SEQ ID NO: 1361610 - DNA, 25 bp, Homo sapien
gagcagttggtttatcatacagcag

SEQ ID NO: 1361611 - DNA, 25 bp, Homo sapien
gaatgggatcctattaatgtatacc

SEQ ID NO: 1361612 - DNA, 25 bp, Homo sapien
gaccaacactccttgggtgccagaa

SEQ ID NO: 1361613 - DNA, 25 bp, Homo sapien
ccataaagagtctacaccagggtgg

SEQ ID NO: 1361614 - DNA, 25 bp, Homo sapien
tgaacagggccagtctatggtaaat

SEQ ID NO: 1361615 - DNA, 25 bp, Homo sapien
tagccagggtgcatactgtaccact

SEQ ID NO: 1361616 - DNA, 25 bp, Homo sapien
aatgttgcagtttgcttggtaaatc

SEQ ID NO: 1361617 - DNA, 25 bp, Homo sapien
aatgtaaaatgttgcagtttgcttg

SEQ ID NO: 1361618 - DNA, 25 bp, Homo sapien
gtaaataaaggagcaatgtaaaatg

SEQ ID NO: 1361619 - DNA, 25 bp, Homo sapien
taagtaaataaaggagcaatgtaaa

SEQ ID NO: 1361620 - DNA, 25 bp, Homo sapien
tctttcggaacttttttcctgctgc

SEQ ID NO: 1361621 - DNA, 25 bp, Homo sapien
attgcgaaatttcttcttctttcgg

SEQ ID NO: 1361622 - DNA, 25 bp, Homo sapien
taattgcgaaatttcttcttctttc

SEQ ID NO: 1361623 - DNA, 25 bp, Homo sapien
tgcgaaatttcttcttctttcggaa

SEQ ID NO: 1361624 - DNA, 25 bp, Homo sapien
cagccatgatctctgagtacttcct

SEQ ID NO: 1361625 - DNA, 25 bp, Homo sapien
tcagccatgatctctgagtacttcc

SEQ ID NO: 1361626 - DNA, 25 bp, Homo sapien
agccatgatctctgagtacttcctt

SEQ ID NO: 1361627 - DNA, 25 bp, Homo sapien
cagctggattgtcaacaatggttcc

SEQ ID NO: 1361628 - DNA, 25 bp, Homo sapien
gaattcgtgaatggtagaaatcagc

SEQ ID NO: 1361629 - DNA, 25 bp, Homo sapien
cgtgaatggtagaaatcagctggat

SEQ ID NO: 1361630 - DNA, 25 bp, Homo sapien
cctttgcttcttgggaattcgtgaa

SEQ ID NO: 1361631 - DNA, 25 bp, Homo sapien
tcatacttcagtgtagctctaatta

SEQ ID NO: 1361632 - DNA, 25 bp, Homo sapien
aaaaagtagcatagtggtgctatta

SEQ ID NO: 1361633 - DNA, 25 bp, Homo sapien
gaaataagtcatgcattgagtgcca

SEQ ID NO: 1361634 - DNA, 25 bp, Homo sapien
tggaaagaacaagcttacattacac

SEQ ID NO: 1361635 - DNA, 25 bp, Homo sapien
aatcttttcgggtccatgctggctc

SEQ ID NO: 1361636 - DNA, 25 bp, Homo sapien
cttgtaaaatcttttcgggtccatg

SEQ ID NO: 1361637 - DNA, 25 bp, Homo sapien
aaatcttttcgggtccatgctggct

SEQ ID NO: 1361638 - DNA, 25 bp, Homo sapien
gtaaaatcttttcgggtccatgctg

SEQ ID NO: 1361639 - DNA, 25 bp, Homo sapien
gatactttgattcactatatggtgg

SEQ ID NO: 1361640 - DNA, 25 bp, Homo sapien
ttcaaaatcaggtgtaatgacggct

SEQ ID NO: 1361641 - DNA, 25 bp, Homo sapien
gtgtaatgacggctttctgcagaag

SEQ ID NO: 1361642 - DNA, 25 bp, Homo sapien
cactatatggtggaacacagtggtt

SEQ ID NO: 1361643 - DNA, 25 bp, Homo sapien
aatgttatataagtttttcaacagt

SEQ ID NO: 1361644 - DNA, 25 bp, Homo sapien
gaatgttatataagtttttcaacag

SEQ ID NO: 1361645 - DNA, 25 bp, Homo sapien
gagttttagaccaccttggtcaaca

SEQ ID NO: 1361646 - DNA, 25 bp, Homo sapien
aatcctagtgctttgaggaggccaa

SEQ ID NO: 1361647 - DNA, 25 bp, Homo sapien
gttttagaccaccttggtcaacata

SEQ ID NO: 1361648 - DNA, 25 bp, Homo sapien
agtgctttgaggaggccaagggagg

SEQ ID NO: 1361649 - DNA, 25 bp, Homo sapien
ggttctcttgttagactgtagttta

SEQ ID NO: 1361650 - DNA, 25 bp, Homo sapien
ttagggttctcttgttagactgtag

SEQ ID NO: 1361651 - DNA, 25 bp, Homo sapien
agggttctcttgttagactgtagtt

SEQ ID NO: 1361652 - DNA, 25 bp, Homo sapien
gtgttagggttctcttgttagactg

SEQ ID NO: 1361653 - DNA, 25 bp, Homo sapien
aaaccacccaactgcttgatactca

SEQ ID NO: 1361654 - DNA, 25 bp, Homo sapien
accacccaactgcttgatactcaga

SEQ ID NO: 1361655 - DNA, 25 bp, Homo sapien
ttgatactcagaccagggtctatgc

SEQ ID NO: 1361656 - DNA, 25 bp, Homo sapien
gatactcagaccagggtctatgctg

SEQ ID NO: 1361657 - DNA, 25 bp, Homo sapien
cttcatcactaaactcatcttcatt

SEQ ID NO: 1361658 - DNA, 25 bp, Homo sapien
agtcttcttcatcactaaactcatc

SEQ ID NO: 1361659 - DNA, 25 bp, Homo sapien
tcttcttcatcactaaactcatctt

SEQ ID NO: 1361660 - DNA, 25 bp, Homo sapien
gtcttcttcatcactaaactcatct

SEQ ID NO: 1361661 - DNA, 25 bp, Homo sapien
tttttcttcctcaatggcaacctca

SEQ ID NO: 1361662 - DNA, 25 bp, Homo sapien
ttctttttcttcctcaatggcaacc

SEQ ID NO: 1361663 - DNA, 25 bp, Homo sapien
ttttcttcctcaatggcaacctcac

SEQ ID NO: 1361664 - DNA, 25 bp, Homo sapien
ctgatgaatcttcttcacttttttc

SEQ ID NO: 1361665 - DNA, 25 bp, Homo sapien
gaattcacaggtgtacccacgatct

SEQ ID NO: 1361666 - DNA, 25 bp, Homo sapien
gattcttggcttggatctgtcagag

SEQ ID NO: 1361667 - DNA, 25 bp, Homo sapien
tcaacattggcctgttcgtgcactg

SEQ ID NO: 1361668 - DNA, 25 bp, Homo sapien
cagattagagtgcactgatacagca

SEQ ID NO: 1361669 - DNA, 25 bp, Homo sapien
gaataatttgactctgcctcagagg

SEQ ID NO: 1361670 - DNA, 25 bp, Homo sapien
gtcccctttggtagtgagcctgtag

SEQ ID NO: 1361671 - DNA, 25 bp, Homo sapien
cagtagttcgggcatcagatccagt

SEQ ID NO: 1361672 - DNA, 25 bp, Homo sapien
taaaatggtatcatggtgctcagac

SEQ ID NO: 1361673 - DNA, 25 bp, Homo sapien
taaagtcaaatataatgggtagacc

SEQ ID NO: 1361674 - DNA, 25 bp, Homo sapien
ttcctagatgtaacttcagaagcag

SEQ ID NO: 1361675 - DNA, 25 bp, Homo sapien
ctcatccttcctagatgtaacttca

SEQ ID NO: 1361676 - DNA, 25 bp, Homo sapien
tataatgggtagaccaacattctga

SEQ ID NO: 1361677 - DNA, 25 bp, Homo sapien
caggaaaaaatcgccgccgctccgt

SEQ ID NO: 1361678 - DNA, 25 bp, Homo sapien
cgtacaggaaaaaatcgccgccgct

SEQ ID NO: 1361679 - DNA, 25 bp, Homo sapien
tacaggaaaaaatcgccgccgctcc

SEQ ID NO: 1361680 - DNA, 25 bp, Homo sapien
gtacaggaaaaaatcgccgccgctc

SEQ ID NO: 1361681 - DNA, 25 bp, Homo sapien
tgcatggtggccgaaattaaccctc

SEQ ID NO: 1361682 - DNA, 25 bp, Homo sapien
gctaaacagtttccgtgacaggctt

SEQ ID NO: 1361683 - DNA, 25 bp, Homo sapien
actaacgccactaagagtcaccagg

SEQ ID NO: 1361684 - DNA, 25 bp, Homo sapien
tcagaatgagacagccgactaacgc

SEQ ID NO: 1361685 - DNA, 25 bp, Homo sapien
gcccgtgcagatctggtaaccacca

SEQ ID NO: 1361686 - DNA, 25 bp, Homo sapien
ttggatgctggccttagcccgtgca

SEQ ID NO: 1361687 - DNA, 25 bp, Homo sapien
gaactttcagccgacgcggcttgga

SEQ ID NO: 1361688 - DNA, 25 bp, Homo sapien
ttgcccggaactttcagccgacgcg

SEQ ID NO: 1361689 - DNA, 25 bp, Homo sapien
ttttccgcgcagatccgagaattcg

SEQ ID NO: 1361690 - DNA, 25 bp, Homo sapien
caaagggcctgggtttaagtgtgca

SEQ ID NO: 1361691 - DNA, 25 bp, Homo sapien
gaaatgcgtcagagaactgcctcga

SEQ ID NO: 1361692 - DNA, 25 bp, Homo sapien
gatataaggtgctcgcaggaactgg

SEQ ID NO: 1361693 - DNA, 25 bp, Homo sapien
ttccccccaaatatatcgtatattc

SEQ ID NO: 1361694 - DNA, 25 bp, Homo sapien
ttattcacatacagattcctccctt

SEQ ID NO: 1361695 - DNA, 25 bp, Homo sapien
aatatatcgtatattccttgggtat

SEQ ID NO: 1361696 - DNA, 25 bp, Homo sapien
agatgcagccttttattgctcttat

SEQ ID NO: 1361697 - DNA, 25 bp, Homo sapien
aatcatactcagtttgagttcaaat

SEQ ID NO: 1361698 - DNA, 25 bp, Homo sapien
tgcttccagctattgaaacaaccca

SEQ ID NO: 1361699 - DNA, 25 bp, Homo sapien
ggatgcttccagctattgaaacaac

SEQ ID NO: 1361700 - DNA, 25 bp, Homo sapien
aaatcatactcagtttgagttcaaa

SEQ ID NO: 1361701 - DNA, 25 bp, Homo sapien
cagacacataaaaagttgacttatc

SEQ ID NO: 1361702 - DNA, 25 bp, Homo sapien
ttgctattatagtacaccactacag

SEQ ID NO: 1361703 - DNA, 25 bp, Homo sapien
ccaactttacatgaaaaaggtatat

SEQ ID NO: 1361704 - DNA, 25 bp, Homo sapien
ttcccttcctatgtttctaattctg

SEQ ID NO: 1361705 - DNA, 25 bp, Homo sapien
gaaggatgaactgctagccaacata

SEQ ID NO: 1361706 - DNA, 25 bp, Homo sapien
tggatgcacatctcctcagaaaaca

SEQ ID NO: 1361707 - DNA, 25 bp, Homo sapien
ggagatcaccaaaaagctctgctga

SEQ ID NO: 1361708 - DNA, 25 bp, Homo sapien
tagcaatggccatcatagtatggtc

SEQ ID NO: 1361709 - DNA, 25 bp, Homo sapien
tgcccgggcagatttcacataattt

SEQ ID NO: 1361710 - DNA, 25 bp, Homo sapien
taagtagataatgtcggccctgaat

SEQ ID NO: 1361711 - DNA, 25 bp, Homo sapien
actgcgcccggatgaaatacaagag

SEQ ID NO: 1361712 - DNA, 25 bp, Homo sapien
ttccctaggttgagaaaacttgagc

SEQ ID NO: 1361713 - DNA, 25 bp, Homo sapien
gagttaagaagcaattaatgaattt

SEQ ID NO: 1361714 - DNA, 25 bp, Homo sapien
aattgcttggttataataagagtta

SEQ ID NO: 1361715 - DNA, 25 bp, Homo sapien
taagagttaagaagcaattaatgaa

SEQ ID NO: 1361716 - DNA, 25 bp, Homo sapien
taattaaattgcttggttataataa

SEQ ID NO: 1361717 - DNA, 25 bp, Homo sapien
caggtaagttatgctcctaagtcag

SEQ ID NO: 1361718 - DNA, 25 bp, Homo sapien
tttaaggaaagcaatacagaggttc

SEQ ID NO: 1361719 - DNA, 25 bp, Homo sapien
caatgacaccatttacaggcagtaa

SEQ ID NO: 1361720 - DNA, 25 bp, Homo sapien
tatgacgaaagaatatctgcctcaa

SEQ ID NO: 1361721 - DNA, 25 bp, Homo sapien
agcggcacccactcgtgcgcttgaa

SEQ ID NO: 1361722 - DNA, 25 bp, Homo sapien
gatttgataattcctctacttttca

SEQ ID NO: 1361723 - DNA, 25 bp, Homo sapien
cgcttgaatgtcaggaatgctttcc

SEQ ID NO: 1361724 - DNA, 25 bp, Homo sapien
ttttcacaatgaccgaataccgcag

SEQ ID NO: 1361725 - DNA, 25 bp, Homo sapien
aatgaagggccaaagtacaagtaca

SEQ ID NO: 1361726 - DNA, 25 bp, Homo sapien
taaaatgcatgcctggctgtggaat

SEQ ID NO: 1361727 - DNA, 25 bp, Homo sapien
gaaacaaaccgtcacaatgatgcag

SEQ ID NO: 1361728 - DNA, 25 bp, Homo sapien
gatacacgctatattgccaactgct

SEQ ID NO: 1361729 - DNA, 25 bp, Homo sapien
caccaaggccagctaatttaattat

SEQ ID NO: 1361730 - DNA, 25 bp, Homo sapien
ctagaggtgtgcgtcaccaaggcca

SEQ ID NO: 1361731 - DNA, 25 bp, Homo sapien
taggactagaggtgtgcgtcaccaa

SEQ ID NO: 1361732 - DNA, 25 bp, Homo sapien
gtcaccaaggccagctaatttaatt

SEQ ID NO: 1361733 - DNA, 25 bp, Homo sapien
aggaggcaagattaacttggttact

SEQ ID NO: 1361734 - DNA, 25 bp, Homo sapien
gagtcaacagctgtatgtcaaattg

SEQ ID NO: 1361735 - DNA, 25 bp, Homo sapien
ttttggatcattgtgagtcaacagc

SEQ ID NO: 1361736 - DNA, 25 bp, Homo sapien
acagcaggaggcaagattaacttgg

SEQ ID NO: 1361737 - DNA, 25 bp, Homo sapien
ttttgtaggttattagaccagagag

SEQ ID NO: 1361738 - DNA, 25 bp, Homo sapien
tactgagagtaaaggtaaaacgcta

SEQ ID NO: 1361739 - DNA, 25 bp, Homo sapien
tgaactgacagtcttacacatcttt

SEQ ID NO: 1361740 - DNA, 25 bp, Homo sapien
cactcactccatatcaagttgtatg

SEQ ID NO: 1361741 - DNA, 25 bp, Homo sapien
ggtattattgttttcagcacataag

SEQ ID NO: 1361742 - DNA, 25 bp, Homo sapien
attttaaccaggattaacattcagt

SEQ ID NO: 1361743 - DNA, 25 bp, Homo sapien
cagcacataagtagaactgaaggaa

SEQ ID NO: 1361744 - DNA, 25 bp, Homo sapien
gattaacattcagttcaatcagaga

SEQ ID NO: 1361745 - DNA, 25 bp, Homo sapien
aatccagctgtgcaactccaaggac

SEQ ID NO: 1361746 - DNA, 25 bp, Homo sapien
gtaaggctgtaaatgctccaaggaa

SEQ ID NO: 1361747 - DNA, 25 bp, Homo sapien
tagatcagaggtacctatggcaaca

SEQ ID NO: 1361748 - DNA, 25 bp, Homo sapien
tgaagcaatgatcacagaatccagc

SEQ ID NO: 1361749 - DNA, 25 bp, Homo sapien
gaagagtttgattctacaatgaaca

SEQ ID NO: 1361750 - DNA, 25 bp, Homo sapien
atgaagagtttgattctacaatgaa

SEQ ID NO: 1361751 - DNA, 25 bp, Homo sapien
tgaagagtttgattctacaatgaac

SEQ ID NO: 1361752 - DNA, 25 bp, Homo sapien
tactgtagaaataacgaagacctat

SEQ ID NO: 1361753 - DNA, 25 bp, Homo sapien
aacgaagacctataaaagcagaaag

SEQ ID NO: 1361754 - DNA, 25 bp, Homo sapien
gtctcatcacccaaattactgttta

SEQ ID NO: 1361755 - DNA, 25 bp, Homo sapien
taatagtcatgtgcttactgtagaa

SEQ ID NO: 1361756 - DNA, 25 bp, Homo sapien
cttttctactgcatgagatacagtg

SEQ ID NO: 1361757 - DNA, 25 bp, Homo sapien
ctactgcatgagatacagtgcattc

SEQ ID NO: 1361758 - DNA, 25 bp, Homo sapien
tgcattccaagacatctggaaactc

SEQ ID NO: 1361759 - DNA, 25 bp, Homo sapien
catgagatacagtgcattccaagac

SEQ ID NO: 1361760 - DNA, 25 bp, Homo sapien
tcatacaaagtaaacggcaaaggct

SEQ ID NO: 1361761 - DNA, 25 bp, Homo sapien
tagcctaagtaatgtgctgtgagcc

SEQ ID NO: 1361762 - DNA, 25 bp, Homo sapien
gtgtttacaagtcaagcataagtag

SEQ ID NO: 1361763 - DNA, 25 bp, Homo sapien
gttacatggttgcagtatgcccagg

SEQ ID NO: 1361764 - DNA, 25 bp, Homo sapien
tgagaatcctagtatcttgtctggt

SEQ ID NO: 1361765 - DNA, 25 bp, Homo sapien
tactggatcagagtgccgtctcagc

SEQ ID NO: 1361766 - DNA, 25 bp, Homo sapien
cagcaaatcaaccacagagagttta

SEQ ID NO: 1361767 - DNA, 25 bp, Homo sapien
tctggttaaagagttgcctacggtc

SEQ ID NO: 1361768 - DNA, 25 bp, Homo sapien
gggttgatttgggaactccattcat

SEQ ID NO: 1361769 - DNA, 25 bp, Homo sapien
tcaaggttttttggatacaatcatg

SEQ ID NO: 1361770 - DNA, 25 bp, Homo sapien
ttgggaactccattcattcaaggtt

SEQ ID NO: 1361771 - DNA, 25 bp, Homo sapien
aggttttttggatacaatcatgaag

SEQ ID NO: 1361772 - DNA, 25 bp, Homo sapien
gtttggacccaaggtcgcgtcgaca

SEQ ID NO: 1361773 - DNA, 25 bp, Homo sapien
ttttttagacgcgttgccctcggca

SEQ ID NO: 1361774 - DNA, 25 bp, Homo sapien
tgcgcagctgcaccggctaagtttt

SEQ ID NO: 1361775 - DNA, 25 bp, Homo sapien
taccagccttaagcaccgagagagg

SEQ ID NO: 1361776 - DNA, 25 bp, Homo sapien
acttcttccgcaggcggccccagtt

SEQ ID NO: 1361777 - DNA, 25 bp, Homo sapien
ccagttcagcaggttccccgtctgc

SEQ ID NO: 1361778 - DNA, 25 bp, Homo sapien
ttggccgcgcggctgtcggtgccca

SEQ ID NO: 1361779 - DNA, 25 bp, Homo sapien
ctcgctgtgcgtggacgggcacttc

SEQ ID NO: 1361780 - DNA, 25 bp, Homo sapien
ctccggctccggctactgcggccgc

SEQ ID NO: 1361781 - DNA, 25 bp, Homo sapien
gcagaaatcgtagccgagaaagtgc

SEQ ID NO: 1361782 - DNA, 25 bp, Homo sapien
gaagacaatgactaagcagaaatcg

SEQ ID NO: 1361783 - DNA, 25 bp, Homo sapien
agagctgattccaaactgagggagc

SEQ ID NO: 1361784 - DNA, 25 bp, Homo sapien
gcggggcgcgaatgggctgcgggac

SEQ ID NO: 1361785 - DNA, 25 bp, Homo sapien
gcgggacgccggcccgcaagtgact

SEQ ID NO: 1361786 - DNA, 25 bp, Homo sapien
gggacgccggcccgcaagtgactgg

SEQ ID NO: 1361787 - DNA, 25 bp, Homo sapien
cgcgaatgggctgcgggacgccggc

SEQ ID NO: 1361788 - DNA, 25 bp, Homo sapien
aggacagcgcgaggcagacaccgcc

SEQ ID NO: 1361789 - DNA, 25 bp, Homo sapien
ctggtgaggtagacaccgcctccgc

SEQ ID NO: 1361790 - DNA, 25 bp, Homo sapien
cgcgcgggtcgagagagcgtggcgg

SEQ ID NO: 1361791 - DNA, 25 bp, Homo sapien
gcgtggcgacgggtggtgcgcggcg

SEQ ID NO: 1361792 - DNA, 25 bp, Homo sapien
cttagtgaaaccctcacagagcttt

SEQ ID NO: 1361793 - DNA, 25 bp, Homo sapien
agtgaaaccctcacagagctttatg

SEQ ID NO: 1361794 - DNA, 25 bp, Homo sapien
gaaaccctcacagagctttatgtca

SEQ ID NO: 1361795 - DNA, 25 bp, Homo sapien
aaccctcacagagctttatgtcacc

SEQ ID NO: 1361796 - DNA, 25 bp, Homo sapien
aactccagcggattatttctatgct

SEQ ID NO: 1361797 - DNA, 25 bp, Homo sapien
acactcatttttttagctcctaact

SEQ ID NO: 1361798 - DNA, 25 bp, Homo sapien
ctaactccagcggattatttctatg

SEQ ID NO: 1361799 - DNA, 25 bp, Homo sapien
agctcctaactccagcggattattt

SEQ ID NO: 1361800 - DNA, 25 bp, Homo sapien
aatattattctacatggaggcatga

SEQ ID NO: 1361801 - DNA, 25 bp, Homo sapien
caatattattctacatggaggcatg

SEQ ID NO: 1361802 - DNA, 25 bp, Homo sapien
catgagttagtagtttttgcttact

SEQ ID NO: 1361803 - DNA, 25 bp, Homo sapien
tattattctacatggaggcatgagt

SEQ ID NO: 1361804 - DNA, 25 bp, Homo sapien
ttttaggcttctgttgttttagtca

SEQ ID NO: 1361805 - DNA, 25 bp, Homo sapien
ctgttgttttagtcacaatataatg

SEQ ID NO: 1361806 - DNA, 25 bp, Homo sapien
gttttagtcacaatataatgttttg

SEQ ID NO: 1361807 - DNA, 25 bp, Homo sapien
aataaggagttttaggcttctgttg

SEQ ID NO: 1361808 - DNA, 25 bp, Homo sapien
aatataatttaatgggttgaaattg

SEQ ID NO: 1361809 - DNA, 25 bp, Homo sapien
tgaaatataatttaatgggttgaaa

SEQ ID NO: 1361810 - DNA, 25 bp, Homo sapien
ttaaacgtcctgaaaatgtgtctgt

SEQ ID NO: 1361811 - DNA, 25 bp, Homo sapien
agtgttttggtggaactaattcaag

SEQ ID NO: 1361812 - DNA, 25 bp, Homo sapien
aattcaagtactatgggtataaagc

SEQ ID NO: 1361813 - DNA, 25 bp, Homo sapien
tgagcattgtccataatacaggtct

SEQ ID NO: 1361814 - DNA, 25 bp, Homo sapien
agaatgtatgtcctgcggctgttgg

SEQ ID NO: 1361815 - DNA, 25 bp, Homo sapien
ttcttgcttgcaaaattgtgctaat

SEQ ID NO: 1361816 - DNA, 25 bp, Homo sapien
ttctcaggagactgtcactctcaga

SEQ ID NO: 1361817 - DNA, 25 bp, Homo sapien
tccttgtcttgggttttgggctaca

SEQ ID NO: 1361818 - DNA, 25 bp, Homo sapien
tttcatgctttcacaaccagcacac

SEQ ID NO: 1361819 - DNA, 25 bp, Homo sapien
gaggcaaaacaaagcagtccaggac

SEQ ID NO: 1361820 - DNA, 25 bp, Homo sapien
acagtgagtttagtcatcatctcct

SEQ ID NO: 1361821 - DNA, 25 bp, Homo sapien
aacagtgagtttagtcatcatctcc

SEQ ID NO: 1361822 - DNA, 25 bp, Homo sapien
ttattctgttagtcttcttaacagt

SEQ ID NO: 1361823 - DNA, 25 bp, Homo sapien
ttaacagtgagtttagtcatcatct

SEQ ID NO: 1361824 - DNA, 25 bp, Homo sapien
tgaggggagcctcaggggctgtgag

SEQ ID NO: 1361825 - DNA, 25 bp, Homo sapien
tccgtgaaccacagccaagttgagt

SEQ ID NO: 1361826 - DNA, 25 bp, Homo sapien
gctttgtccccagaatatggagtag

SEQ ID NO: 1361827 - DNA, 25 bp, Homo sapien
aaccagaggctgtatgacttgcaaa

SEQ ID NO: 1361828 - DNA, 25 bp, Homo sapien
tgttaacaccgtgaaagcagaggct

SEQ ID NO: 1361829 - DNA, 25 bp, Homo sapien
tcttctgcaatgtttcctctctcct

SEQ ID NO: 1361830 - DNA, 25 bp, Homo sapien
tgtttcctctctcctctcctttccc

SEQ ID NO: 1361831 - DNA, 25 bp, Homo sapien
ttcttctgcaatgtttcctctctcc

SEQ ID NO: 1361832 - DNA, 25 bp, Homo sapien
gggatgtgcacatctgagcctggac

SEQ ID NO: 1361833 - DNA, 25 bp, Homo sapien
caaagcatgtcttatgggatgtgca

SEQ ID NO: 1361834 - DNA, 25 bp, Homo sapien
gcttgggtctgggcaaagcatgtct

SEQ ID NO: 1361835 - DNA, 25 bp, Homo sapien
tcaagactgtgggatttggctacaa

SEQ ID NO: 1361836 - DNA, 25 bp, Homo sapien
caacttgatgatcgccttggacaaa

SEQ ID NO: 1361837 - DNA, 25 bp, Homo sapien
ttctggtgcctgaaacagctacccc

SEQ ID NO: 1361838 - DNA, 25 bp, Homo sapien
tggccacagtgaaggtgcccaggat

SEQ ID NO: 1361839 - DNA, 25 bp, Homo sapien
tcttcaggagagctagagtgggctt

SEQ ID NO: 1361840 - DNA, 25 bp, Homo sapien
aaaagcagatctgcttgaaatgaga

SEQ ID NO: 1361841 - DNA, 25 bp, Homo sapien
tgctagtgggatggcccggggtttc

SEQ ID NO: 1361842 - DNA, 25 bp, Homo sapien
agctgctagtgggatggcccggggt

SEQ ID NO: 1361843 - DNA, 25 bp, Homo sapien
cagaaaagcagatctgcttgaaatg

SEQ ID NO: 1361844 - DNA, 25 bp, Homo sapien
gggtcatttacgctggccagtccat

SEQ ID NO: 1361845 - DNA, 25 bp, Homo sapien
catttggatgaccatatgggcacag

SEQ ID NO: 1361846 - DNA, 25 bp, Homo sapien
tgttccaggtgagcaagtcagtttc

SEQ ID NO: 1361847 - DNA, 25 bp, Homo sapien
gaattcgctgcatgctcctcgtgtg

SEQ ID NO: 1361848 - DNA, 25 bp, Homo sapien
ctgcaggaacgagcggtgtgaaaga

SEQ ID NO: 1361849 - DNA, 25 bp, Homo sapien
tgcttacatcctggggggaagctac

SEQ ID NO: 1361850 - DNA, 25 bp, Homo sapien
catacatgcttacatcctgggggga

SEQ ID NO: 1361851 - DNA, 25 bp, Homo sapien
catgcttacatcctggggggaagct

SEQ ID NO: 1361852 - DNA, 25 bp, Homo sapien
gtgcatacatgcttacatcctgggg

SEQ ID NO: 1361853 - DNA, 25 bp, Homo sapien
ctgctccttattccccaaatccaag

SEQ ID NO: 1361854 - DNA, 25 bp, Homo sapien
tctgctccttattccccaaatccaa

SEQ ID NO: 1361855 - DNA, 25 bp, Homo sapien
cttctctgctccttattccccaaat

SEQ ID NO: 1361856 - DNA, 25 bp, Homo sapien
tctctgctccttattccccaaatcc

SEQ ID NO: 1361857 - DNA, 25 bp, Homo sapien
gctccagcagctcgagggtgcagag

SEQ ID NO: 1361858 - DNA, 25 bp, Homo sapien
gggcttgtcgactggctccagcagc

SEQ ID NO: 1361859 - DNA, 25 bp, Homo sapien
tcagtctgctgtttagcaaaattta

SEQ ID NO: 1361860 - DNA, 25 bp, Homo sapien
ttcagtctgctgtttagcaaaattt

SEQ ID NO: 1361861 - DNA, 25 bp, Homo sapien
agtctgctgtttagcaaaatttaca

SEQ ID NO: 1361862 - DNA, 25 bp, Homo sapien
cagtctgctgtttagcaaaatttac

SEQ ID NO: 1361863 - DNA, 25 bp, Homo sapien
actgggtgttctggaccagtctttg

SEQ ID NO: 1361864 - DNA, 25 bp, Homo sapien
ctgggtgttctggaccagtctttgc

SEQ ID NO: 1361865 - DNA, 25 bp, Homo sapien
cagctctcggtgccccagggccaac

SEQ ID NO: 1361866 - DNA, 25 bp, Homo sapien
tcagctctcggtgccccagggccaa

SEQ ID NO: 1361867 - DNA, 25 bp, Homo sapien
gactgagtactcctcgatgagcagg

SEQ ID NO: 1361868 - DNA, 25 bp, Homo sapien
ggtctgtgtgactgagtactcctcg

SEQ ID NO: 1361869 - DNA, 25 bp, Homo sapien
tgtgtgactgagtactcctcgatga

SEQ ID NO: 1361870 - DNA, 25 bp, Homo sapien
agtactcctcgatgagcaggctgtc

SEQ ID NO: 1361871 - DNA, 25 bp, Homo sapien
gagcatgttgtagtgcctctccctc

SEQ ID NO: 1361872 - DNA, 25 bp, Homo sapien
tcattgtgacgatatagccatctcc

SEQ ID NO: 1361873 - DNA, 25 bp, Homo sapien
gttcaggtcaggaagcaggtcgtcc

SEQ ID NO: 1361874 - DNA, 25 bp, Homo sapien
cactgcctgggaagttcccctggaa

SEQ ID NO: 1361875 - DNA, 25 bp, Homo sapien
catacatcgaaaggcgccctttacc

SEQ ID NO: 1361876 - DNA, 25 bp, Homo sapien
gaatggtgcccatacatcgaaaggc

SEQ ID NO: 1361877 - DNA, 25 bp, Homo sapien
gaaaggcgccctttaccatgatggc

SEQ ID NO: 1361878 - DNA, 25 bp, Homo sapien
gatgctgaatggtgcccatacatcg

SEQ ID NO: 1361879 - DNA, 25 bp, Homo sapien
ttccccagccctgggaatctcttgc

SEQ ID NO: 1361880 - DNA, 25 bp, Homo sapien
cttccccagccctgggaatctcttg

SEQ ID NO: 1361881 - DNA, 25 bp, Homo sapien
gttccacagcatgcggcgtgcctgg

SEQ ID NO: 1361882 - DNA, 25 bp, Homo sapien
gctcacgatgacgttccacagcatg

SEQ ID NO: 1361883 - DNA, 25 bp, Homo sapien
gatgacgttccacagcatgcggcgt

SEQ ID NO: 1361884 - DNA, 25 bp, Homo sapien
tcacgatgacgttccacagcatgcg

SEQ ID NO: 1361885 - DNA, 25 bp, Homo sapien
ctcagtgctcctgtatggggaccag

SEQ ID NO: 1361886 - DNA, 25 bp, Homo sapien
gctgaacttcccggctgtgagccga

SEQ ID NO: 1361887 - DNA, 25 bp, Homo sapien
aggccgcagagtgggctgaacttcc

SEQ ID NO: 1361888 - DNA, 25 bp, Homo sapien
tgaacttcccggctgtgagccgatg

SEQ ID NO: 1361889 - DNA, 25 bp, Homo sapien
acttcccggctgtgagccgatggcc

SEQ ID NO: 1361890 - DNA, 25 bp, Homo sapien
tttaagcccttggtgcggcccaagc

SEQ ID NO: 1361891 - DNA, 25 bp, Homo sapien
gaacgcaggatgtgcgcagtcccaa

SEQ ID NO: 1361892 - DNA, 25 bp, Homo sapien
cactgggctgatcgctcaaaatgag

SEQ ID NO: 1361893 - DNA, 25 bp, Homo sapien
tccggagctgtgtgaaccaaacact

SEQ ID NO: 1361894 - DNA, 25 bp, Homo sapien
ccaggctcttaatactccagtttgc

SEQ ID NO: 1361895 - DNA, 25 bp, Homo sapien
ggcgtagacagtcaggcccaggctc

SEQ ID NO: 1361896 - DNA, 25 bp, Homo sapien
ttgttgcccccactgtacgtgccag

SEQ ID NO: 1361897 - DNA, 25 bp, Homo sapien
tgccagccaggcagtcggcgtagac

SEQ ID NO: 1361898 - DNA, 25 bp, Homo sapien
cactgtgggagatgcatcttcagga

SEQ ID NO: 1361899 - DNA, 25 bp, Homo sapien
tagacgtgtgattgctgagtcagag

SEQ ID NO: 1361900 - DNA, 25 bp, Homo sapien
tcttcaggataaactcttagacgtg

SEQ ID NO: 1361901 - DNA, 25 bp, Homo sapien
tgcactctcatgaaacaggcttgta

SEQ ID NO: 1361902 - DNA, 25 bp, Homo sapien
gtggccacaacaaaacatttttcac

SEQ ID NO: 1361903 - DNA, 25 bp, Homo sapien
agactcctatgtggccacaacaaaa

SEQ ID NO: 1361904 - DNA, 25 bp, Homo sapien
cagactcctatgtggccacaacaaa

SEQ ID NO: 1361905 - DNA, 25 bp, Homo sapien
tatgtggccacaacaaaacattttt

SEQ ID NO: 1361906 - DNA, 25 bp, Homo sapien
tgtgagcagctcatcaattgcatca

SEQ ID NO: 1361907 - DNA, 25 bp, Homo sapien
cgaagccgggcataaaggtaaagat

SEQ ID NO: 1361908 - DNA, 25 bp, Homo sapien
ctgaggacagtagcccatattttga

SEQ ID NO: 1361909 - DNA, 25 bp, Homo sapien
aagatgttctcgtcctgtgagcagc

SEQ ID NO: 1361910 - DNA, 25 bp, Homo sapien
agaaaaaaagcaattactgagtatc

SEQ ID NO: 1361911 - DNA, 25 bp, Homo sapien
ctgcaagaaaaaaagcaattactga

SEQ ID NO: 1361912 - DNA, 25 bp, Homo sapien
caagaaaaaaagcaattactgagta

SEQ ID NO: 1361913 - DNA, 25 bp, Homo sapien
gcaagaaaaaaagcaattactgagt

SEQ ID NO: 1361914 - DNA, 25 bp, Homo sapien
tgaggaagtcacctgcgtggtcact

SEQ ID NO: 1361915 - DNA, 25 bp, Homo sapien
ggtatgatatctctaccctgccatg

SEQ ID NO: 1361916 - DNA, 25 bp, Homo sapien
gatatctttcccctgccatggtatg

SEQ ID NO: 1361917 - DNA, 25 bp, Homo sapien
catgactccttttgtcaccatgagg

SEQ ID NO: 1361918 - DNA, 25 bp, Homo sapien
ttgcctgctacggtggcatcccctg

SEQ ID NO: 1361919 - DNA, 25 bp, Homo sapien
gaatgtggttgttttgccggcacca

SEQ ID NO: 1361920 - DNA, 25 bp, Homo sapien
tgtccccagtgagcatcttgaatgt

SEQ ID NO: 1361921 - DNA, 25 bp, Homo sapien
ctgtggtgtccccagtgagcatctt

SEQ ID NO: 1361922 - DNA, 25 bp, Homo sapien
agggcgaactccgacacacagcctg

SEQ ID NO: 1361923 - DNA, 25 bp, Homo sapien
ccagggcgaactccgacacacagcc

SEQ ID NO: 1361924 - DNA, 25 bp, Homo sapien
ctccagggcgaactccgacacacag

SEQ ID NO: 1361925 - DNA, 25 bp, Homo sapien
ctctccagggcgaactccgacacac

SEQ ID NO: 1361926 - DNA, 25 bp, Homo sapien
tgcaagatacgaagaaaccggactg

SEQ ID NO: 1361927 - DNA, 25 bp, Homo sapien
caagatacgaagaaaccggactgag

SEQ ID NO: 1361928 - DNA, 25 bp, Homo sapien
agatacgaagaaaccggactgagaa

SEQ ID NO: 1361929 - DNA, 25 bp, Homo sapien
ctgcaagatacgaagaaaccggact

SEQ ID NO: 1361930 - DNA, 25 bp, Homo sapien
cttggttagttcatgtagccttaag

SEQ ID NO: 1361931 - DNA, 25 bp, Homo sapien
aatgggctccttagtgggctcggca

SEQ ID NO: 1361932 - DNA, 25 bp, Homo sapien
tcatcttcatcaacaatgggctcct

SEQ ID NO: 1361933 - DNA, 25 bp, Homo sapien
ttagttcatgtagccttaagatgtc

SEQ ID NO: 1361934 - DNA, 25 bp, Homo sapien
gtcagggttggcagctacccacctt

SEQ ID NO: 1361935 - DNA, 25 bp, Homo sapien
aatggcaattgccagctaacctggc

SEQ ID NO: 1361936 - DNA, 25 bp, Homo sapien
gaagagcctgcggaagaatggcaat

SEQ ID NO: 1361937 - DNA, 25 bp, Homo sapien
tcccaaatctctaattagcaaaggg

SEQ ID NO: 1361938 - DNA, 25 bp, Homo sapien
cccagtggaacggatttgcagagtg

SEQ ID NO: 1361939 - DNA, 25 bp, Homo sapien
aacggatttgcagagtgctcctcac

SEQ ID NO: 1361940 - DNA, 25 bp, Homo sapien
tcttcccaatcaggtcccagtggaa

SEQ ID NO: 1361941 - DNA, 25 bp, Homo sapien
agtggaacggatttgcagagtgctc

SEQ ID NO: 1361942 - DNA, 25 bp, Homo sapien
gcttcctcagcacggcgttgaacct

SEQ ID NO: 1361943 - DNA, 25 bp, Homo sapien
tcagtgcaaggtcaatgaggccccg

SEQ ID NO: 1361944 - DNA, 25 bp, Homo sapien
cgggcatagacatctgtcacagcct

SEQ ID NO: 1361945 - DNA, 25 bp, Homo sapien
gcacggcgttgaacctgagcagcgt

SEQ ID NO: 1361946 - DNA, 25 bp, Homo sapien
gcaggtggggcccagatgctctcac

SEQ ID NO: 1361947 - DNA, 25 bp, Homo sapien
ccagatgctctcacaggacagcaca

SEQ ID NO: 1361948 - DNA, 25 bp, Homo sapien
cagagaagtaggactgttggaaacg

SEQ ID NO: 1361949 - DNA, 25 bp, Homo sapien
ctgaaacagagaagtaggactgttg

SEQ ID NO: 1361950 - DNA, 25 bp, Homo sapien
ccctcaaggcatttgttaacaccag

SEQ ID NO: 1361951 - DNA, 25 bp, Homo sapien
aacaacaggagccctcaaggcattt

SEQ ID NO: 1361952 - DNA, 25 bp, Homo sapien
cctcaaggcatttgttaacaccagg

SEQ ID NO: 1361953 - DNA, 25 bp, Homo sapien
gatttgtcctgtgttccccagtggg

SEQ ID NO: 1361954 - DNA, 25 bp, Homo sapien
ggtccacgggtctgggcggttcatg

SEQ ID NO: 1361955 - DNA, 25 bp, Homo sapien
tggggcctccgcacagatttgtcct

SEQ ID NO: 1361956 - DNA, 25 bp, Homo sapien
gtcccaccctctgaactgggaagag

SEQ ID NO: 1361957 - DNA, 25 bp, Homo sapien
caagataaagccacataggctgtgc

SEQ ID NO: 1361958 - DNA, 25 bp, Homo sapien
gttgatgccgatgaacagattagca

SEQ ID NO: 1361959 - DNA, 25 bp, Homo sapien
aggatgctgggtacatcatgggaat

SEQ ID NO: 1361960 - DNA, 25 bp, Homo sapien
ggtaatagcactgctgttgatgccg

SEQ ID NO: 1361961 - DNA, 25 bp, Homo sapien
aacttgtgggtgctaccaccacagg

SEQ ID NO: 1361962 - DNA, 25 bp, Homo sapien
ttctgtcaggagatgatcccccacc

SEQ ID NO: 1361963 - DNA, 25 bp, Homo sapien
ttttctgtcaggagatgatccccca

SEQ ID NO: 1361964 - DNA, 25 bp, Homo sapien
ctggggccggaagctaaacttgtgg

SEQ ID NO: 1361965 - DNA, 25 bp, Homo sapien
tttcttctgaaacccgatgaagatg

SEQ ID NO: 1361966 - DNA, 25 bp, Homo sapien
tcttctgaaacccgatgaagatgcc

SEQ ID NO: 1361967 - DNA, 25 bp, Homo sapien
ttctgaaacccgatgaagatgccca

SEQ ID NO: 1361968 - DNA, 25 bp, Homo sapien
ctttcttctgaaacccgatgaagat

SEQ ID NO: 1361969 - DNA, 25 bp, Homo sapien
cctcaacgggatgagaaagatatcc

SEQ ID NO: 1361970 - DNA, 25 bp, Homo sapien
ggcaagaaccagagacgggcttcct

SEQ ID NO: 1361971 - DNA, 25 bp, Homo sapien
cactgttcaggtgtataggtccggt

SEQ ID NO: 1361972 - DNA, 25 bp, Homo sapien
tgatctggtgcagggtatcagagcc

SEQ ID NO: 1361973 - DNA, 25 bp, Homo sapien
taaccagcctgcagtcctcaaagtg

SEQ ID NO: 1361974 - DNA, 25 bp, Homo sapien
tcttccaggctgaacgagactaaag

SEQ ID NO: 1361975 - DNA, 25 bp, Homo sapien
cagacaagctcagaccaagggacat

SEQ ID NO: 1361976 - DNA, 25 bp, Homo sapien
cagaagccacctgataggatgcagt

SEQ ID NO: 1361977 - DNA, 25 bp, Homo sapien
taggctcagagatccctgtaagcgc

SEQ ID NO: 1361978 - DNA, 25 bp, Homo sapien
ccaaaatgatggatcgcggaggtga

SEQ ID NO: 1361979 - DNA, 25 bp, Homo sapien
cccttcattggactgccagctagta

SEQ ID NO: 1361980 - DNA, 25 bp, Homo sapien
gaaagcctgctaacatgatgcctac

SEQ ID NO: 1361981 - DNA, 25 bp, Homo sapien
ttagcatcacagggccaatgtggta

SEQ ID NO: 1361982 - DNA, 25 bp, Homo sapien
tagcatcacagggccaatgtggtac

SEQ ID NO: 1361983 - DNA, 25 bp, Homo sapien
attagcatcacagggccaatgtggt

SEQ ID NO: 1361984 - DNA, 25 bp, Homo sapien
gagtgtttcctcgtgtagacagaag

SEQ ID NO: 1361985 - DNA, 25 bp, Homo sapien
ttgatgctcttatccaaagaaaggc

SEQ ID NO: 1361986 - DNA, 25 bp, Homo sapien
cctgcagcctgtaatagggtacgct

SEQ ID NO: 1361987 - DNA, 25 bp, Homo sapien
gattttactactcaagacacctaga

SEQ ID NO: 1361988 - DNA, 25 bp, Homo sapien
tatttgatgggtcagaagacccctc

SEQ ID NO: 1361989 - DNA, 25 bp, Homo sapien
tattaccttctcagcgccagactga

SEQ ID NO: 1361990 - DNA, 25 bp, Homo sapien
gacccctcagtgcaggacatagaga

SEQ ID NO: 1361991 - DNA, 25 bp, Homo sapien
tctggtgaccctaccacagggaaag

SEQ ID NO: 1361992 - DNA, 25 bp, Homo sapien
ttggcccagtgcctttcagcagccc

SEQ ID NO: 1361993 - DNA, 25 bp, Homo sapien
gcttcgggctcctagttctgtgcct

SEQ ID NO: 1361994 - DNA, 25 bp, Homo sapien
gaagatgtcaagggacagcagatac

SEQ ID NO: 1361995 - DNA, 25 bp, Homo sapien
tggtctggtccttcagagcacacac

SEQ ID NO: 1361996 - DNA, 25 bp, Homo sapien
agggaggcgctgtaaactgacactt

SEQ ID NO: 1361997 - DNA, 25 bp, Homo sapien
gagggaggcgctgtaaactgacact

SEQ ID NO: 1361998 - DNA, 25 bp, Homo sapien
gggagggaggcgctgtaaactgaca

SEQ ID NO: 1361999 - DNA, 25 bp, Homo sapien
gaggggagggaggcgctgtaaactg

SEQ ID NO: 1362000 - DNA, 25 bp, Homo sapien
gggctcactccactgataaactgga

SEQ ID NO: 1362001 - DNA, 25 bp, Homo sapien
cacccagtaggtggtggggctcact

SEQ ID NO: 1362002 - DNA, 25 bp, Homo sapien
catggagaaaatcacgcagatggca

SEQ ID NO: 1362003 - DNA, 25 bp, Homo sapien
tggaggtgcttggatttgttcaccc

SEQ ID NO: 1362004 - DNA, 25 bp, Homo sapien
tgacggtgattccatactcctcggg

SEQ ID NO: 1362005 - DNA, 25 bp, Homo sapien
ccgtaagatggcgttgtgggccaca

SEQ ID NO: 1362006 - DNA, 25 bp, Homo sapien
attgagaaagctgaccagggcatgc

SEQ ID NO: 1362007 - DNA, 25 bp, Homo sapien
gcaggctggcccgtaagatggcgtt

SEQ ID NO: 1362008 - DNA, 25 bp, Homo sapien
gtttctagatgtttaaggaaatcag

SEQ ID NO: 1362009 - DNA, 25 bp, Homo sapien
ttagaggcctctctagtgatagggc

SEQ ID NO: 1362010 - DNA, 25 bp, Homo sapien
gatgtttaaggaaatcaggtatttc

SEQ ID NO: 1362011 - DNA, 25 bp, Homo sapien
tatttctttagaggcctctctagtg

SEQ ID NO: 1362012 - DNA, 25 bp, Homo sapien
tcctccaatggaaattcctccatac

SEQ ID NO: 1362013 - DNA, 25 bp, Homo sapien
gacgactgggagctttcctccaatg

SEQ ID NO: 1362014 - DNA, 25 bp, Homo sapien
tcatgatccggccaaggtcgcttaa

SEQ ID NO: 1362015 - DNA, 25 bp, Homo sapien
caacaagtgcttcccccgtgatggg

SEQ ID NO: 1362016 - DNA, 25 bp, Homo sapien
tgttcattgacccagaatttgctct

SEQ ID NO: 1362017 - DNA, 25 bp, Homo sapien
atatccaagcaatgcggaagccgcc

SEQ ID NO: 1362018 - DNA, 25 bp, Homo sapien
tttttgcattttccgatatccaagc

SEQ ID NO: 1362019 - DNA, 25 bp, Homo sapien
gaataccacaagtacagcagtgccg

SEQ ID NO: 1362020 - DNA, 25 bp, Homo sapien
ggaagccgcccagccctgggacatt

SEQ ID NO: 1362021 - DNA, 25 bp, Homo sapien
tccaaatcatatcccgcatgctgga

SEQ ID NO: 1362022 - DNA, 25 bp, Homo sapien
gtcatatgtcaggtcaatatgcctg

SEQ ID NO: 1362023 - DNA, 25 bp, Homo sapien
ctgagtggtcctgttgtcaggtcat

SEQ ID NO: 1362024 - DNA, 25 bp, Homo sapien
cgcatgctggactttctgagtggtc

SEQ ID NO: 1362025 - DNA, 25 bp, Homo sapien
cctgtccgtcaggtcttgtagaatt

SEQ ID NO: 1362026 - DNA, 25 bp, Homo sapien
tgtagaatttccgtgctgcgctgtg

SEQ ID NO: 1362027 - DNA, 25 bp, Homo sapien
tgcttcttataagagcaggatacgt

SEQ ID NO: 1362028 - DNA, 25 bp, Homo sapien
cgtttttaccaagaagtcggagatg

SEQ ID NO: 1362029 - DNA, 25 bp, Homo sapien
tctgtgtttatatccaagcgatgat

SEQ ID NO: 1362030 - DNA, 25 bp, Homo sapien
gtttagtcccctactcaactgccag

SEQ ID NO: 1362031 - DNA, 25 bp, Homo sapien
taatctgtttgggtggctgcaaacc

SEQ ID NO: 1362032 - DNA, 25 bp, Homo sapien
ggagataccagggactcccctagtc

SEQ ID NO: 1362033 - DNA, 25 bp, Homo sapien
gcagcatggtgagcttctccctggt

SEQ ID NO: 1362034 - DNA, 25 bp, Homo sapien
ggcactctggcagcatggtgagctt

SEQ ID NO: 1362035 - DNA, 25 bp, Homo sapien
tggtgagcttctccctggtgctgca

SEQ ID NO: 1362036 - DNA, 25 bp, Homo sapien
catggtgagcttctccctggtgctg

SEQ ID NO: 1362037 - DNA, 25 bp, Homo sapien
ctgcttctggaacagctgggtgatg

SEQ ID NO: 1362038 - DNA, 25 bp, Homo sapien
aagggttgacctgtgtccatttctg

SEQ ID NO: 1362039 - DNA, 25 bp, Homo sapien
gcttctggaacagctgggtgatgtt

SEQ ID NO: 1362040 - DNA, 25 bp, Homo sapien
ggttgacctgtgtccatttctgctt

SEQ ID NO: 1362041 - DNA, 25 bp, Homo sapien
ccataatcagcctcaaagttgctga

SEQ ID NO: 1362042 - DNA, 25 bp, Homo sapien
attccataatcagcctcaaagttgc

SEQ ID NO: 1362043 - DNA, 25 bp, Homo sapien
aaaatattccataatcagcctcaaa

SEQ ID NO: 1362044 - DNA, 25 bp, Homo sapien
cagcctcaaagttgctgacaaatcc

SEQ ID NO: 1362045 - DNA, 25 bp, Homo sapien
ggcttattcaggaggacgtctgcaa

SEQ ID NO: 1362046 - DNA, 25 bp, Homo sapien
gaggacgtctgcaagtaccgtgaac

SEQ ID NO: 1362047 - DNA, 25 bp, Homo sapien
gtaccgtgaactgctcactgcctgg

SEQ ID NO: 1362048 - DNA, 25 bp, Homo sapien
ctgctcactgcctggttcatccatg

SEQ ID NO: 1362049 - DNA, 25 bp, Homo sapien
tgtactgctgcccatatatccaggg

SEQ ID NO: 1362050 - DNA, 25 bp, Homo sapien
gccaaaaggagggataacaatagaa

SEQ ID NO: 1362051 - DNA, 25 bp, Homo sapien
atatatccaggggtgaagggtcaaa

SEQ ID NO: 1362052 - DNA, 25 bp, Homo sapien
ctgaagaaggtgtactgctgcccat

SEQ ID NO: 1362053 - DNA, 25 bp, Homo sapien
aatctcttgaccagcagcgcctgca

SEQ ID NO: 1362054 - DNA, 25 bp, Homo sapien
ctgcggatggtgtgttggaatctct

SEQ ID NO: 1362055 - DNA, 25 bp, Homo sapien
cagcgcctgcacatgctggaggacc

SEQ ID NO: 1362056 - DNA, 25 bp, Homo sapien
agctgtgtccccgtgttgagctgcg

SEQ ID NO: 1362057 - DNA, 25 bp, Homo sapien
agcaatgaaataccaggctggtagc

SEQ ID NO: 1362058 - DNA, 25 bp, Homo sapien
tcctcttcatttaagtcagcaatga

SEQ ID NO: 1362059 - DNA, 25 bp, Homo sapien
tgaaataccaggctggtagcttaat

SEQ ID NO: 1362060 - DNA, 25 bp, Homo sapien
aataccaggctggtagcttaatcat

SEQ ID NO: 1362061 - DNA, 25 bp, Homo sapien
accatgcgatgtactgggatgggct

SEQ ID NO: 1362062 - DNA, 25 bp, Homo sapien
gactacatcttttggtcaccatgcg

SEQ ID NO: 1362063 - DNA, 25 bp, Homo sapien
cactgtgccaggacgactacatctt

SEQ ID NO: 1362064 - DNA, 25 bp, Homo sapien
ggctgaagcatatctgggctggtat

SEQ ID NO: 1362065 - DNA, 25 bp, Homo sapien
cagaatcctccgtgaccttcagaaa

SEQ ID NO: 1362066 - DNA, 25 bp, Homo sapien
tcagaatcctccgtgaccttcagaa

SEQ ID NO: 1362067 - DNA, 25 bp, Homo sapien
gaatcagaatcctccgtgaccttca

SEQ ID NO: 1362068 - DNA, 25 bp, Homo sapien
gaatcctccgtgaccttcagaaaaa

SEQ ID NO: 1362069 - DNA, 25 bp, Homo sapien
gtggagaactacatccatcagctca

SEQ ID NO: 1362070 - DNA, 25 bp, Homo sapien
aggaagataagttcttgaccaatgc

SEQ ID NO: 1362071 - DNA, 25 bp, Homo sapien
catggtggagaactacatccatcag

SEQ ID NO: 1362072 - DNA, 25 bp, Homo sapien
attccaaaactgctgagaccaaggt

SEQ ID NO: 1362073 - DNA, 25 bp, Homo sapien
gaagcaaagtcctcccgactagcta

SEQ ID NO: 1362074 - DNA, 25 bp, Homo sapien
gtatctcggcagtgactctttcaga

SEQ ID NO: 1362075 - DNA, 25 bp, Homo sapien
gatgctccatcaagtctgcttttag

SEQ ID NO: 1362076 - DNA, 25 bp, Homo sapien
gcttttagcttagttggccctgaga

SEQ ID NO: 1362077 - DNA, 25 bp, Homo sapien
ggacttgttctggagttaggtcatc

SEQ ID NO: 1362078 - DNA, 25 bp, Homo sapien
cacgtggtggagaaacccttagacg

SEQ ID NO: 1362079 - DNA, 25 bp, Homo sapien
taggtcatcgacgtgggctggacac

SEQ ID NO: 1362080 - DNA, 25 bp, Homo sapien
agaaacccttagacgagcagctgca

SEQ ID NO: 1362081 - DNA, 25 bp, Homo sapien
cctgagcagtagagccttccctggg

SEQ ID NO: 1362082 - DNA, 25 bp, Homo sapien
cctcgtccatgtggtgagtggacat

SEQ ID NO: 1362083 - DNA, 25 bp, Homo sapien
ttaagtacaagcctgtgccaaagca

SEQ ID NO: 1362084 - DNA, 25 bp, Homo sapien
tttcatcttgcgcaccaaggttaag

SEQ ID NO: 1362085 - DNA, 25 bp, Homo sapien
gcccagcccaggagactgagcagca

SEQ ID NO: 1362086 - DNA, 25 bp, Homo sapien
ctagggctgcagtgagagcccagcc

SEQ ID NO: 1362087 - DNA, 25 bp, Homo sapien
caggagactgagcagcagctgttac

SEQ ID NO: 1362088 - DNA, 25 bp, Homo sapien
gcccaggagactgagcagcagctgt

SEQ ID NO: 1362089 - DNA, 25 bp, Homo sapien
gaggtgggttcgtccagaatcacca

SEQ ID NO: 1362090 - DNA, 25 bp, Homo sapien
ttgagcgtctcgagtaagggtccac

SEQ ID NO: 1362091 - DNA, 25 bp, Homo sapien
ctgagcgatacttcaggagcagatc

SEQ ID NO: 1362092 - DNA, 25 bp, Homo sapien
aaggcaatggcaaccgacagctttc

SEQ ID NO: 1362093 - DNA, 25 bp, Homo sapien
ggcacaagaaggacgggagagttaa

SEQ ID NO: 1362094 - DNA, 25 bp, Homo sapien
gaggcacaagaaggacgggagagtt

SEQ ID NO: 1362095 - DNA, 25 bp, Homo sapien
gcacaagaaggacgggagagttaag

SEQ ID NO: 1362096 - DNA, 25 bp, Homo sapien
ctggaggcacaagaaggacgggaga

SEQ ID NO: 1362097 - DNA, 25 bp, Homo sapien
tcggatcagaccctttgaagactgt

SEQ ID NO: 1362098 - DNA, 25 bp, Homo sapien
tgttcaagcacatcaatctcaggac

SEQ ID NO: 1362099 - DNA, 25 bp, Homo sapien
atctcaggacaaataaaacccaggc

SEQ ID NO: 1362100 - DNA, 25 bp, Homo sapien
gcgttcaaagccctaatactgttca

SEQ ID NO: 1362101 - DNA, 25 bp, Homo sapien
ggagccatggatttgccatctgtgg

SEQ ID NO: 1362102 - DNA, 25 bp, Homo sapien
ctgataggtcctgagcctcttcatt

SEQ ID NO: 1362103 - DNA, 25 bp, Homo sapien
ctgggcatagaacagcatgtgctca

SEQ ID NO: 1362104 - DNA, 25 bp, Homo sapien
cctgggactttcctttcagctgggc

SEQ ID NO: 1362105 - DNA, 25 bp, Homo sapien
ttcctttcagctgggcatagaacag

SEQ ID NO: 1362106 - DNA, 25 bp, Homo sapien
gtggacacatgccaaggctctgccg

SEQ ID NO: 1362107 - DNA, 25 bp, Homo sapien
cacagtcccagaggttggtggcaac

SEQ ID NO: 1362108 - DNA, 25 bp, Homo sapien
ctgccggactgcatccaggctggtt

SEQ ID NO: 1362109 - DNA, 25 bp, Homo sapien
aacaggatgttgtgctgtggacaca

SEQ ID NO: 1362110 - DNA, 25 bp, Homo sapien
tacaacattagaacagcgccagcat

SEQ ID NO: 1362111 - DNA, 25 bp, Homo sapien
cagccgatgaagtaatgtgtttgcc

SEQ ID NO: 1362112 - DNA, 25 bp, Homo sapien
aaagcagatggatgcagggccgcca

SEQ ID NO: 1362113 - DNA, 25 bp, Homo sapien
tatcagttagcatggagagaaagca

SEQ ID NO: 1362114 - DNA, 25 bp, Homo sapien
gagaagccgaaatctccgcgatcaa

SEQ ID NO: 1362115 - DNA, 25 bp, Homo sapien
gatcaaccactagagggaaacagaa

SEQ ID NO: 1362116 - DNA, 25 bp, Homo sapien
catctcaggctatctgaacttgtcc

SEQ ID NO: 1362117 - DNA, 25 bp, Homo sapien
gaacttgtcctgatggagaagccga

SEQ ID NO: 1362118 - DNA, 25 bp, Homo sapien
actgtgtcacgtgggttcgctgccc

SEQ ID NO: 1362119 - DNA, 25 bp, Homo sapien
tgaagactgtgtcacgtgggttcgc

SEQ ID NO: 1362120 - DNA, 25 bp, Homo sapien
gaaccgccctagagaacattccatc

SEQ ID NO: 1362121 - DNA, 25 bp, Homo sapien
cattcacactgaaccgccctagaga

SEQ ID NO: 1362122 - DNA, 25 bp, Homo sapien
gatgttcagacggtccacagctggc

SEQ ID NO: 1362123 - DNA, 25 bp, Homo sapien
ctggatgctcacgttcaaagaagga

SEQ ID NO: 1362124 - DNA, 25 bp, Homo sapien
tctttaccagattcttcacgcatac

SEQ ID NO: 1362125 - DNA, 25 bp, Homo sapien
tggccggccacagggctcaaaaatc

SEQ ID NO: 1362126 - DNA, 25 bp, Homo sapien
tctggatcctccgtttcctctgtta

SEQ ID NO: 1362127 - DNA, 25 bp, Homo sapien
caagccaatacgactcttgtagaag

SEQ ID NO: 1362128 - DNA, 25 bp, Homo sapien
ccaatacgactcttgtagaagaaag

SEQ ID NO: 1362129 - DNA, 25 bp, Homo sapien
accgccaagccaatacgactcttgt

SEQ ID NO: 1362130 - DNA, 25 bp, Homo sapien
cttcaccgccaagccaatacgactc

SEQ ID NO: 1362131 - DNA, 25 bp, Homo sapien
gcgagtaagccatagacagcagcat

SEQ ID NO: 1362132 - DNA, 25 bp, Homo sapien
gactgttcccgatgttgctccactg

SEQ ID NO: 1362133 - DNA, 25 bp, Homo sapien
tgatcaaggtaccaagcgagtaagc

SEQ ID NO: 1362134 - DNA, 25 bp, Homo sapien
aagctgaattcgtccccttccgtgg

SEQ ID NO: 1362135 - DNA, 25 bp, Homo sapien
ctatgtacccaagaagatggcctca

SEQ ID NO: 1362136 - DNA, 25 bp, Homo sapien
cagggggagttcagagtgtctctct

SEQ ID NO: 1362137 - DNA, 25 bp, Homo sapien
tctgcaaacaagagagtctctagct

SEQ ID NO: 1362138 - DNA, 25 bp, Homo sapien
gatggcctcaaattccatctgccta

SEQ ID NO: 1362139 - DNA, 25 bp, Homo sapien
cttcttcagctcagcggtcatgcgg

SEQ ID NO: 1362140 - DNA, 25 bp, Homo sapien
cggtcatgcggtcctgccaggcgaa

SEQ ID NO: 1362141 - DNA, 25 bp, Homo sapien
cctgccaggcgaagcacaggatgtg

SEQ ID NO: 1362142 - DNA, 25 bp, Homo sapien
gtgaaatagatgacaccactacagg

SEQ ID NO: 1362143 - DNA, 25 bp, Homo sapien
aagaggatgaatgggtcgctgtaat

SEQ ID NO: 1362144 - DNA, 25 bp, Homo sapien
cgctgtaatgtaggattcttccatg

SEQ ID NO: 1362145 - DNA, 25 bp, Homo sapien
tgaatgggtcgctgtaatgtaggat

SEQ ID NO: 1362146 - DNA, 25 bp, Homo sapien
ggtcgctgtaatgtaggattcttcc

SEQ ID NO: 1362147 - DNA, 25 bp, Homo sapien
tgggagaccattaggttgaaacggc

SEQ ID NO: 1362148 - DNA, 25 bp, Homo sapien
ttgaaacggccccagcattctgtgt

SEQ ID NO: 1362149 - DNA, 25 bp, Homo sapien
tccctgggaggagtagcacattaga

SEQ ID NO: 1362150 - DNA, 25 bp, Homo sapien
taaatttctacgcacactccatgtg

SEQ ID NO: 1362151 - DNA, 25 bp, Homo sapien
tatctgtgatgggcatgcgagagct

SEQ ID NO: 1362152 - DNA, 25 bp, Homo sapien
gaatgtgccatttgtctgctgtggc

SEQ ID NO: 1362153 - DNA, 25 bp, Homo sapien
cctgcctgtgggtactgacagaaca

SEQ ID NO: 1362154 - DNA, 25 bp, Homo sapien
gagctgagtggaacgaatgtgccat

SEQ ID NO: 1362155 - DNA, 25 bp, Homo sapien
ctaatagctcgagtaacaaagggac

SEQ ID NO: 1362156 - DNA, 25 bp, Homo sapien
ttctaatagctcgagtaacaaaggg

SEQ ID NO: 1362157 - DNA, 25 bp, Homo sapien
tctaatagctcgagtaacaaaggga

SEQ ID NO: 1362158 - DNA, 25 bp, Homo sapien
tcccattgtccctgcttccagcttc

SEQ ID NO: 1362159 - DNA, 25 bp, Homo sapien
cttcccattgtccctgcttccagct

SEQ ID NO: 1362160 - DNA, 25 bp, Homo sapien
attgtccctgcttccagcttctttc

SEQ ID NO: 1362161 - DNA, 25 bp, Homo sapien
ccattgtccctgcttccagcttctt

SEQ ID NO: 1362162 - DNA, 25 bp, Homo sapien
caacaagccaggcaaaatctcatgg

SEQ ID NO: 1362163 - DNA, 25 bp, Homo sapien
gctttgaagacctaatggcccattc

SEQ ID NO: 1362164 - DNA, 25 bp, Homo sapien
tcttaggagggcagatctcaatgct

SEQ ID NO: 1362165 - DNA, 25 bp, Homo sapien
tcatggctgttgctagtcagatgtt

SEQ ID NO: 1362166 - DNA, 25 bp, Homo sapien
tcagccagtctgtggtcactacaca

SEQ ID NO: 1362167 - DNA, 25 bp, Homo sapien
gcatgggatgggagacactcagcca

SEQ ID NO: 1362168 - DNA, 25 bp, Homo sapien
actgcctagtgtggtacagcacttc

SEQ ID NO: 1362169 - DNA, 25 bp, Homo sapien
tcaggtgggtaccagatatgggcca

SEQ ID NO: 1362170 - DNA, 25 bp, Homo sapien
gaatatcgtcaggaggaagatgctc

SEQ ID NO: 1362171 - DNA, 25 bp, Homo sapien
aagatagggaaacagcggttcagga

SEQ ID NO: 1362172 - DNA, 25 bp, Homo sapien
aatcactgcattggagacaccctga

SEQ ID NO: 1362173 - DNA, 25 bp, Homo sapien
gaagatgctcatcgacatgatggag

SEQ ID NO: 1362174 - DNA, 25 bp, Homo sapien
taactaatcagtttggcactttcag

SEQ ID NO: 1362175 - DNA, 25 bp, Homo sapien
aatacatcagttatccaacagccac

SEQ ID NO: 1362176 - DNA, 25 bp, Homo sapien
ccctagttacacaaaaagacacaca

SEQ ID NO: 1362177 - DNA, 25 bp, Homo sapien
ggcgaatgatccatcaatacatcag

SEQ ID NO: 1362178 - DNA, 25 bp, Homo sapien
gatttgatacactggaacgactttc

SEQ ID NO: 1362179 - DNA, 25 bp, Homo sapien
cagcatgggagggtttcactcaagg

SEQ ID NO: 1362180 - DNA, 25 bp, Homo sapien
gccctagggagagaagcatatgttc

SEQ ID NO: 1362181 - DNA, 25 bp, Homo sapien
catgtgctagtaaagcccttgggat

SEQ ID NO: 1362182 - DNA, 25 bp, Homo sapien
ccagctacaacatcaactcttttcc

SEQ ID NO: 1362183 - DNA, 25 bp, Homo sapien
cactgcactgactcatctgtgcctg

SEQ ID NO: 1362184 - DNA, 25 bp, Homo sapien
ctgactcatctgtgcctgcctggag

SEQ ID NO: 1362185 - DNA, 25 bp, Homo sapien
tgcactgactcatctgtgcctgcct

SEQ ID NO: 1362186 - DNA, 25 bp, Homo sapien
cactgactcatctgtgcctgcctgg

SEQ ID NO: 1362187 - DNA, 25 bp, Homo sapien
atgctctccaatttggctctggtcc

SEQ ID NO: 1362188 - DNA, 25 bp, Homo sapien
ccatgctctccaatttggctctggt

SEQ ID NO: 1362189 - DNA, 25 bp, Homo sapien
tgctctccaatttggctctggtccc

SEQ ID NO: 1362190 - DNA, 25 bp, Homo sapien
catgctctccaatttggctctggtc

SEQ ID NO: 1362191 - DNA, 25 bp, Homo sapien
tgttcaaccatgtcctgcagatagg

SEQ ID NO: 1362192 - DNA, 25 bp, Homo sapien
ttccacgggatcagctctgggacca

SEQ ID NO: 1362193 - DNA, 25 bp, Homo sapien
ctggaggtagattccaactggagcc

SEQ ID NO: 1362194 - DNA, 25 bp, Homo sapien
gatgtaccggaaatcttccacggga

SEQ ID NO: 1362195 - DNA, 25 bp, Homo sapien
gtccattcggatcttatacttcacg

SEQ ID NO: 1362196 - DNA, 25 bp, Homo sapien
tacatgtcagggaataccactccgg

SEQ ID NO: 1362197 - DNA, 25 bp, Homo sapien
tcctccagtagagagagggcacgtt

SEQ ID NO: 1362198 - DNA, 25 bp, Homo sapien
tttcaaacttatccaggaccaagca

SEQ ID NO: 1362199 - DNA, 25 bp, Homo sapien
tgcgcctcagagtatgcaccggaag

SEQ ID NO: 1362200 - DNA, 25 bp, Homo sapien
caccggaagcctctggcgattcaga

SEQ ID NO: 1362201 - DNA, 25 bp, Homo sapien
gggctgcacacccaacacttcttgg

SEQ ID NO: 1362202 - DNA, 25 bp, Homo sapien
ttgggcctcctgaactaaactgtcc

SEQ ID NO: 1362203 - DNA, 25 bp, Homo sapien
ctgggggcaggtcccatgtaatgtt

SEQ ID NO: 1362204 - DNA, 25 bp, Homo sapien
gggcaggtcccatgtaatgttctca

SEQ ID NO: 1362205 - DNA, 25 bp, Homo sapien
caggtcccatgtaatgttctcagtc

SEQ ID NO: 1362206 - DNA, 25 bp, Homo sapien
tgggggcaggtcccatgtaatgttc

SEQ ID NO: 1362207 - DNA, 25 bp, Homo sapien
ttcagtggcattgctgactgctgtg

SEQ ID NO: 1362208 - DNA, 25 bp, Homo sapien
ccatcctggctggtttatcaggcag

SEQ ID NO: 1362209 - DNA, 25 bp, Homo sapien
gctgtgatgacgtgggctccatcct

SEQ ID NO: 1362210 - DNA, 25 bp, Homo sapien
tatcaggcagctgattcatagtcat

SEQ ID NO: 1362211 - DNA, 25 bp, Homo sapien
tatacggccaaaactggtccaagga

SEQ ID NO: 1362212 - DNA, 25 bp, Homo sapien
aatagttaggatctgataaatacca

SEQ ID NO: 1362213 - DNA, 25 bp, Homo sapien
tgaggtccaagttcacttaggagac

SEQ ID NO: 1362214 - DNA, 25 bp, Homo sapien
cactatggtataccaaaccgtctca

SEQ ID NO: 1362215 - DNA, 25 bp, Homo sapien
gaaggccttataaagctaatcccga

SEQ ID NO: 1362216 - DNA, 25 bp, Homo sapien
tagaacaatgctatggacagatgcc

SEQ ID NO: 1362217 - DNA, 25 bp, Homo sapien
gggaacatatcccatcctgagctga

SEQ ID NO: 1362218 - DNA, 25 bp, Homo sapien
tccctagatcaaggtagagcaattg

SEQ ID NO: 1362219 - DNA, 25 bp, Homo sapien
cataagtacgtttgggagacagaga

SEQ ID NO: 1362220 - DNA, 25 bp, Homo sapien
gctgtctgcttctacactaagagta

SEQ ID NO: 1362221 - DNA, 25 bp, Homo sapien
tcaaacctagcaccactagtgggaa

SEQ ID NO: 1362222 - DNA, 25 bp, Homo sapien
tctatgaggctacggccatggagtc

SEQ ID NO: 1362223 - DNA, 25 bp, Homo sapien
tgttatagccggagctcagaatctc

SEQ ID NO: 1362224 - DNA, 25 bp, Homo sapien
gtggcaggaccaccaccatttgaag

SEQ ID NO: 1362225 - DNA, 25 bp, Homo sapien
tctcaaagagaaccattgtaatgcc

SEQ ID NO: 1362226 - DNA, 25 bp, Homo sapien
tgtaatgccctatgacagccaatga

SEQ ID NO: 1362227 - DNA, 25 bp, Homo sapien
gagatgttggctgtataatcccgcc

SEQ ID NO: 1362228 - DNA, 25 bp, Homo sapien
gcaaccctgtgctgacgtggcataa

SEQ ID NO: 1362229 - DNA, 25 bp, Homo sapien
gctaaatcaaacacctccttgggag

SEQ ID NO: 1362230 - DNA, 25 bp, Homo sapien
gaatacatccaggacgtgctaggag

SEQ ID NO: 1362231 - DNA, 25 bp, Homo sapien
gctcaagtggccctgctggtgtcaa

SEQ ID NO: 1362232 - DNA, 25 bp, Homo sapien
aatgccagcggagggctcaagtggc

SEQ ID NO: 1362233 - DNA, 25 bp, Homo sapien
ggctcaagtggccctgctggtgtca

SEQ ID NO: 1362234 - DNA, 25 bp, Homo sapien
ggcgatgaatgccagcggagggctc

SEQ ID NO: 1362235 - DNA, 25 bp, Homo sapien
tcagaggccctcgtgaagtcctggc

SEQ ID NO: 1362236 - DNA, 25 bp, Homo sapien
cagaggccctcgtgaagtcctggcg

SEQ ID NO: 1362237 - DNA, 25 bp, Homo sapien
tggcggccccggaggatgtgatttg

SEQ ID NO: 1362238 - DNA, 25 bp, Homo sapien
gatgtgatttgcagcgttgtgattc

SEQ ID NO: 1362239 - DNA, 25 bp, Homo sapien
tggcaccttctgaaaggccactggg

SEQ ID NO: 1362240 - DNA, 25 bp, Homo sapien
tttggagagcgagggtcacacactc

SEQ ID NO: 1362241 - DNA, 25 bp, Homo sapien
cactctggaaaattgtggtggcacc

SEQ ID NO: 1362242 - DNA, 25 bp, Homo sapien
ggtgatcgcttagtagttgcctgca

SEQ ID NO: 1362243 - DNA, 25 bp, Homo sapien
tccacttcacagtaatcctgctcat

SEQ ID NO: 1362244 - DNA, 25 bp, Homo sapien
ggcctcccaatcagagtacacaggg

SEQ ID NO: 1362245 - DNA, 25 bp, Homo sapien
gctcatagaaatggccccatggtgg

SEQ ID NO: 1362246 - DNA, 25 bp, Homo sapien
caggcctcccaatcagagtacacag

SEQ ID NO: 1362247 - DNA, 25 bp, Homo sapien
acactggccatagatggccactcaa

SEQ ID NO: 1362248 - DNA, 25 bp, Homo sapien
tgatgtgcttgtagaacttgagggc

SEQ ID NO: 1362249 - DNA, 25 bp, Homo sapien
gcaggagtgtccagcaagcaatgga

SEQ ID NO: 1362250 - DNA, 25 bp, Homo sapien
gatggccactcaagcaatgtcagac

SEQ ID NO: 1362251 - DNA, 25 bp, Homo sapien
tattgattgaccaggcggagggtgc

SEQ ID NO: 1362252 - DNA, 25 bp, Homo sapien
tccagtcgaagttggccatgtcgtc

SEQ ID NO: 1362253 - DNA, 25 bp, Homo sapien
gcgatcagtgatgttaaatatgtcc

SEQ ID NO: 1362254 - DNA, 25 bp, Homo sapien
ggccatgtcgtcagcctggctttcc

SEQ ID NO: 1362255 - DNA, 25 bp, Homo sapien
atctggggccctacttcttcccagg

SEQ ID NO: 1362256 - DNA, 25 bp, Homo sapien
cagatctggggccctacttcttccc

SEQ ID NO: 1362257 - DNA, 25 bp, Homo sapien
ttgtcaaagaagtaccagatctggg

SEQ ID NO: 1362258 - DNA, 25 bp, Homo sapien
caacttcctaacgtgttccagttct

SEQ ID NO: 1362259 - DNA, 25 bp, Homo sapien
ccttcgtgctgcaggtgaatcagga

SEQ ID NO: 1362260 - DNA, 25 bp, Homo sapien
ggttaaaggatttgactccaggctc

SEQ ID NO: 1362261 - DNA, 25 bp, Homo sapien
ggctctggatcaatgcattacaaaa

SEQ ID NO: 1362262 - DNA, 25 bp, Homo sapien
gccgccctccaagcgattttggtta

SEQ ID NO: 1362263 - DNA, 25 bp, Homo sapien
ataccagttgaaggagagcacccga

SEQ ID NO: 1362264 - DNA, 25 bp, Homo sapien
aagtcctgcatactcggccgatgga

SEQ ID NO: 1362265 - DNA, 25 bp, Homo sapien
tgtggagtcaatccccagaaaggcc

SEQ ID NO: 1362266 - DNA, 25 bp, Homo sapien
gatgcccatcagctttgtaaaggtc

SEQ ID NO: 1362267 - DNA, 25 bp, Homo sapien
tcgttgggaatgtgtccttgggcaa

SEQ ID NO: 1362268 - DNA, 25 bp, Homo sapien
aagccagttcttgggttctgttgtc

SEQ ID NO: 1362269 - DNA, 25 bp, Homo sapien
gaattcgttgggaatgtgtccttgg

SEQ ID NO: 1362270 - DNA, 25 bp, Homo sapien
tgttaagccagttcttgggttctgt

SEQ ID NO: 1362271 - DNA, 25 bp, Homo sapien
ccccaagatctcagattgatacctt

SEQ ID NO: 1362272 - DNA, 25 bp, Homo sapien
tcagattgataccttgagaacggct

SEQ ID NO: 1362273 - DNA, 25 bp, Homo sapien
gataccttgagaacggctgtctagg

SEQ ID NO: 1362274 - DNA, 25 bp, Homo sapien
tcttggtgacatatcagataatatt

SEQ ID NO: 1362275 - DNA, 25 bp, Homo sapien
caaggtcatgtcctgtttgacttca

SEQ ID NO: 1362276 - DNA, 25 bp, Homo sapien
ctggaaaccaaggtcatgtcctgtt

SEQ ID NO: 1362277 - DNA, 25 bp, Homo sapien
ggatgtggaagtccccaggtgtgct

SEQ ID NO: 1362278 - DNA, 25 bp, Homo sapien
gaaaccaaggtcatgtcctgtttga

SEQ ID NO: 1362279 - DNA, 25 bp, Homo sapien
aaacaggacattgatgggcgcatgt

SEQ ID NO: 1362280 - DNA, 25 bp, Homo sapien
tagtcagaaccccaagattgggccc

SEQ ID NO: 1362281 - DNA, 25 bp, Homo sapien
cattgatgggcgcatgtagtcagaa

SEQ ID NO: 1362282 - DNA, 25 bp, Homo sapien
ccagagccaagaatgaaacaggaca

SEQ ID NO: 1362283 - DNA, 25 bp, Homo sapien
gagtgcctgcatacagaaaccgaga

SEQ ID NO: 1362284 - DNA, 25 bp, Homo sapien
gaatgctagcatttgccaaggcagc

SEQ ID NO: 1362285 - DNA, 25 bp, Homo sapien
tgacaggtcaaggtagcccagggtt

SEQ ID NO: 1362286 - DNA, 25 bp, Homo sapien
catgtgaagacgtaaggaaagactt

SEQ ID NO: 1362287 - DNA, 25 bp, Homo sapien
aaagtgtggcctacaatggtcttca

SEQ ID NO: 1362288 - DNA, 25 bp, Homo sapien
ggtcttcatcagaatcgcctaaggt

SEQ ID NO: 1362289 - DNA, 25 bp, Homo sapien
taaggtaacaggatagattctgggc

SEQ ID NO: 1362290 - DNA, 25 bp, Homo sapien
attaagcgtggaccgtgccagaaac

SEQ ID NO: 1362291 - DNA, 25 bp, Homo sapien
gaagtccacgttggcatacagagtg

SEQ ID NO: 1362292 - DNA, 25 bp, Homo sapien
tgaagatgatgaagcgctccaggag

SEQ ID NO: 1362293 - DNA, 25 bp, Homo sapien
gcacagggcatagcgcaccgtcttt

SEQ ID NO: 1362294 - DNA, 25 bp, Homo sapien
tctatccactgtagggtgccctggg

SEQ ID NO: 1362295 - DNA, 25 bp, Homo sapien
ttgtctagtttcggtgaaaacctca

SEQ ID NO: 1362296 - DNA, 25 bp, Homo sapien
tcattgtgcagggaaccagtgtgag

SEQ ID NO: 1362297 - DNA, 25 bp, Homo sapien
cattgtgcagggaaccagtgtgaga

SEQ ID NO: 1362298 - DNA, 25 bp, Homo sapien
attgtgcagggaaccagtgtgagaa

SEQ ID NO: 1362299 - DNA, 25 bp, Homo sapien
tgctctggacggacttgagagttga

SEQ ID NO: 1362300 - DNA, 25 bp, Homo sapien
gttgatcagaaggtagaccactgag

SEQ ID NO: 1362301 - DNA, 25 bp, Homo sapien
taatgagaaatagtgtcagtgtttc

SEQ ID NO: 1362302 - DNA, 25 bp, Homo sapien
tcagacaggccgatgtttttaatga

SEQ ID NO: 1362303 - DNA, 25 bp, Homo sapien
tgttagggacttctcacagcccgaa

SEQ ID NO: 1362304 - DNA, 25 bp, Homo sapien
tctcacagcctctaaggccagggat

SEQ ID NO: 1362305 - DNA, 25 bp, Homo sapien
tctaaggccagggatcttgcagagc

SEQ ID NO: 1362306 - DNA, 25 bp, Homo sapien
ggggatggacccctgttccctctca

SEQ ID NO: 1362307 - DNA, 25 bp, Homo sapien
gaaccgcctgcataccaattcaaaa

SEQ ID NO: 1362308 - DNA, 25 bp, Homo sapien
aaccgcctgcataccaattcaaaat

SEQ ID NO: 1362309 - DNA, 25 bp, Homo sapien
ggaaccgcctgcataccaattcaaa

SEQ ID NO: 1362310 - DNA, 25 bp, Homo sapien
ctttgtaaaggcacattggtgttat

SEQ ID NO: 1362311 - DNA, 25 bp, Homo sapien
taaaggcacattggtgttattactt

SEQ ID NO: 1362312 - DNA, 25 bp, Homo sapien
actttgtaaaggcacattggtgtta

SEQ ID NO: 1362313 - DNA, 25 bp, Homo sapien
tgtaaaggcacattggtgttattac

SEQ ID NO: 1362314 - DNA, 25 bp, Homo sapien
ctgcaattctctccgggtgagtccg

SEQ ID NO: 1362315 - DNA, 25 bp, Homo sapien
cgggtgagtccggagggtgtccatg

SEQ ID NO: 1362316 - DNA, 25 bp, Homo sapien
tgagtccggagggtgtccatgaatt

SEQ ID NO: 1362317 - DNA, 25 bp, Homo sapien
aattctctccgggtgagtccggagg

SEQ ID NO: 1362318 - DNA, 25 bp, Homo sapien
atggagttgttatagtttgacacaa

SEQ ID NO: 1362319 - DNA, 25 bp, Homo sapien
gaaaacagggattgttcacattgca

SEQ ID NO: 1362320 - DNA, 25 bp, Homo sapien
agttgttatagtttgacacaattcc

SEQ ID NO: 1362321 - DNA, 25 bp, Homo sapien
cacattgcagaagatcccctggagc

SEQ ID NO: 1362322 - DNA, 25 bp, Homo sapien
taccccaagcatgcagtagggctgc

SEQ ID NO: 1362323 - DNA, 25 bp, Homo sapien
tcaaccacggtgaactgagcaccta

SEQ ID NO: 1362324 - DNA, 25 bp, Homo sapien
agacgctcgtctattccttcaacca

SEQ ID NO: 1362325 - DNA, 25 bp, Homo sapien
tgctgctgcttgagcagacgctcgt

SEQ ID NO: 1362326 - DNA, 25 bp, Homo sapien
aaccagatcaagaccagaaataaag

SEQ ID NO: 1362327 - DNA, 25 bp, Homo sapien
gggttggcattccttaaccagatca

SEQ ID NO: 1362328 - DNA, 25 bp, Homo sapien
gctgtagagtgggttggcattcctt

SEQ ID NO: 1362329 - DNA, 25 bp, Homo sapien
acacgagttccaccacaaagcgaat

SEQ ID NO: 1362330 - DNA, 25 bp, Homo sapien
ggtctggttttcacaatagcctctt

SEQ ID NO: 1362331 - DNA, 25 bp, Homo sapien
tgacgcttaactgcgtacaggcata

SEQ ID NO: 1362332 - DNA, 25 bp, Homo sapien
tcttttcctagcctgacaggtctgg

SEQ ID NO: 1362333 - DNA, 25 bp, Homo sapien
ggcatccctgtccttgacgcttaac

SEQ ID NO: 1362334 - DNA, 25 bp, Homo sapien
catcgggaggcgtgccagacagaaa

SEQ ID NO: 1362335 - DNA, 25 bp, Homo sapien
gaggcgtgccagacagaaatctcaa

SEQ ID NO: 1362336 - DNA, 25 bp, Homo sapien
caatttccaggccatcaggatggca

SEQ ID NO: 1362337 - DNA, 25 bp, Homo sapien
caggatggcatccagtgaacgccag

SEQ ID NO: 1362338 - DNA, 25 bp, Homo sapien
acccatgccagcgaaaggccagatt

SEQ ID NO: 1362339 - DNA, 25 bp, Homo sapien
ctgagcaggagtcgcccacccatgc

SEQ ID NO: 1362340 - DNA, 25 bp, Homo sapien
cccacccatgccagcgaaaggccag

SEQ ID NO: 1362341 - DNA, 25 bp, Homo sapien
gagtccctgagcaggagtcgcccac

SEQ ID NO: 1362342 - DNA, 25 bp, Homo sapien
aaacagggttattctctgtcacagc

SEQ ID NO: 1362343 - DNA, 25 bp, Homo sapien
cacagcgacatgagcgccacaggaa

SEQ ID NO: 1362344 - DNA, 25 bp, Homo sapien
ctgtcacagcgacatgagcgccaca

SEQ ID NO: 1362345 - DNA, 25 bp, Homo sapien
tattctctgtcacagcgacatgagc

SEQ ID NO: 1362346 - DNA, 25 bp, Homo sapien
agcgtggatgccctagagagcggta

SEQ ID NO: 1362347 - DNA, 25 bp, Homo sapien
gcgtggatgccctagagagcggtag

SEQ ID NO: 1362348 - DNA, 25 bp, Homo sapien
cgtggatgccctagagagcggtaga

SEQ ID NO: 1362349 - DNA, 25 bp, Homo sapien
tcagcgtggatgccctagagagcgg

SEQ ID NO: 1362350 - DNA, 25 bp, Homo sapien
ttatttgctccacacctcattttta

SEQ ID NO: 1362351 - DNA, 25 bp, Homo sapien
tatttgctccacacctcatttttaa

SEQ ID NO: 1362352 - DNA, 25 bp, Homo sapien
ttaaaccacagacagtaactgttac

SEQ ID NO: 1362353 - DNA, 25 bp, Homo sapien
tcatttttaaaccacagacagtaac

SEQ ID NO: 1362354 - DNA, 25 bp, Homo sapien
gctgtatctgtctcacgaagcccat

SEQ ID NO: 1362355 - DNA, 25 bp, Homo sapien
agctgtatctgtctcacgaagccca

SEQ ID NO: 1362356 - DNA, 25 bp, Homo sapien
cttccagagcaaaagctgtatctgt

SEQ ID NO: 1362357 - DNA, 25 bp, Homo sapien
cataaacgccgttaagagcgcctct

SEQ ID NO: 1362358 - DNA, 25 bp, Homo sapien
gaccacacgaagaccagattggtca

SEQ ID NO: 1362359 - DNA, 25 bp, Homo sapien
gcaaaggacataaacgccgttaaga

SEQ ID NO: 1362360 - DNA, 25 bp, Homo sapien
cacacgaagaccagattggtcagag

SEQ ID NO: 1362361 - DNA, 25 bp, Homo sapien
ttttatgtctaaacaatctttgtcc

SEQ ID NO: 1362362 - DNA, 25 bp, Homo sapien
gagagttactgcttttatgtctaaa

SEQ ID NO: 1362363 - DNA, 25 bp, Homo sapien
ccaaatattccagagttcctccaaa

SEQ ID NO: 1362364 - DNA, 25 bp, Homo sapien
tattccagagttcctccaaatattc

SEQ ID NO: 1362365 - DNA, 25 bp, Homo sapien
ctgatgcaatgactctgtcaaggct

SEQ ID NO: 1362366 - DNA, 25 bp, Homo sapien
tgcaatgactctgtcaaggctgctc

SEQ ID NO: 1362367 - DNA, 25 bp, Homo sapien
tgtcaaggctgctccagtgaaggaa

SEQ ID NO: 1362368 - DNA, 25 bp, Homo sapien
caaggctgctccagtgaaggaagac

SEQ ID NO: 1362369 - DNA, 25 bp, Homo sapien
ggaagacccaattcacacaagttga

SEQ ID NO: 1362370 - DNA, 25 bp, Homo sapien
cataggcacgatgattactacaacc

SEQ ID NO: 1362371 - DNA, 25 bp, Homo sapien
tattattgcaagagacataggcacg

SEQ ID NO: 1362372 - DNA, 25 bp, Homo sapien
gacaaaccgagtacagctggtggct

SEQ ID NO: 1362373 - DNA, 25 bp, Homo sapien
tgtgtggttagtcctcaccagagac

SEQ ID NO: 1362374 - DNA, 25 bp, Homo sapien
cagagacaattatcaagaggagggc

SEQ ID NO: 1362375 - DNA, 25 bp, Homo sapien
taatctgaggacatggtcttgaaga

SEQ ID NO: 1362376 - DNA, 25 bp, Homo sapien
gatggctgcttggtgctactcgtca

SEQ ID NO: 1362377 - DNA, 25 bp, Homo sapien
ttagacgtattagtgaaaaccaaga

SEQ ID NO: 1362378 - DNA, 25 bp, Homo sapien
tatgttttagacgtattagtgaaaa

SEQ ID NO: 1362379 - DNA, 25 bp, Homo sapien
attatgttttagacgtattagtgaa

SEQ ID NO: 1362380 - DNA, 25 bp, Homo sapien
cgtattagtgaaaaccaagaagtgg

SEQ ID NO: 1362381 - DNA, 25 bp, Homo sapien
ggattgatagaagggaaaggttcag

SEQ ID NO: 1362382 - DNA, 25 bp, Homo sapien
ccttagagataatagttgaaatgtt

SEQ ID NO: 1362383 - DNA, 25 bp, Homo sapien
cgtttggtctagaaggatgggacaa

SEQ ID NO: 1362384 - DNA, 25 bp, Homo sapien
cctattcagatctttaagaagtgct

SEQ ID NO: 1362385 - DNA, 25 bp, Homo sapien
ccaggtcctccatacatttgtagac

SEQ ID NO: 1362386 - DNA, 25 bp, Homo sapien
ctgttccctgctgaaaaacacccaa

SEQ ID NO: 1362387 - DNA, 25 bp, Homo sapien
gctgtgtctatcctaaaaaattcca

SEQ ID NO: 1362388 - DNA, 25 bp, Homo sapien
aattccgtgccttgccactgtcctg

SEQ ID NO: 1362389 - DNA, 25 bp, Homo sapien
tctgaagcctagttgcccaggtcct

SEQ ID NO: 1362390 - DNA, 25 bp, Homo sapien
gactctaaacaccaacgtatattct

SEQ ID NO: 1362391 - DNA, 25 bp, Homo sapien
cttagagcataatggagaagagcac

SEQ ID NO: 1362392 - DNA, 25 bp, Homo sapien
tccttgcagttggactctaaacacc

SEQ ID NO: 1362393 - DNA, 25 bp, Homo sapien
ctctagaaccactcccaataccaaa

SEQ ID NO: 1362394 - DNA, 25 bp, Homo sapien
ccatcacacctgcctaagtaaagat

SEQ ID NO: 1362395 - DNA, 25 bp, Homo sapien
gctaggccagtctatctttttcatt

SEQ ID NO: 1362396 - DNA, 25 bp, Homo sapien
cacacctgcctaagtaaagattaaa

SEQ ID NO: 1362397 - DNA, 25 bp, Homo sapien
tcacacctgcctaagtaaagattaa

SEQ ID NO: 1362398 - DNA, 25 bp, Homo sapien
gcaatgcctcattggtaacggtcac

SEQ ID NO: 1362399 - DNA, 25 bp, Homo sapien
ttcacttatcaatgagcaatgcctc

SEQ ID NO: 1362400 - DNA, 25 bp, Homo sapien
cgaatgggcatgactgcatccagaa

SEQ ID NO: 1362401 - DNA, 25 bp, Homo sapien
ttacaatatcctgtaacgaatgggc

SEQ ID NO: 1362402 - DNA, 25 bp, Homo sapien
gactagcccgtgacaattcgatgag

SEQ ID NO: 1362403 - DNA, 25 bp, Homo sapien
tccaatggtgtgctcaggactgaca

SEQ ID NO: 1362404 - DNA, 25 bp, Homo sapien
tacagtagtaggatgccaaccaagg

SEQ ID NO: 1362405 - DNA, 25 bp, Homo sapien
tactgtaacacaacgatagctggga

SEQ ID NO: 1362406 - DNA, 25 bp, Homo sapien
ctgaaaagaagccacgggaacatga

SEQ ID NO: 1362407 - DNA, 25 bp, Homo sapien
taatgaggcttactgacctgtactc

SEQ ID NO: 1362408 - DNA, 25 bp, Homo sapien
cagttgttgacaatccaggtagaac

SEQ ID NO: 1362409 - DNA, 25 bp, Homo sapien
tgatataacctttgggtgggctcca

SEQ ID NO: 1362410 - DNA, 25 bp, Homo sapien
taggttgaccagttgcttgcccagg

SEQ ID NO: 1362411 - DNA, 25 bp, Homo sapien
gtaggaatctgaagaccgtctctca

SEQ ID NO: 1362412 - DNA, 25 bp, Homo sapien
aaatgttgtccaatgttgaggctgc

SEQ ID NO: 1362413 - DNA, 25 bp, Homo sapien
ggcattgacttcaccacgagaccgt

SEQ ID NO: 1362414 - DNA, 25 bp, Homo sapien
ggcattgatagaatggtccccacta

SEQ ID NO: 1362415 - DNA, 25 bp, Homo sapien
gaacaaacagtagtagcagcgtctt

SEQ ID NO: 1362416 - DNA, 25 bp, Homo sapien
tctatctacaggcaaacttacaggt

SEQ ID NO: 1362417 - DNA, 25 bp, Homo sapien
gcctcttggtctagaagcaactgtg

SEQ ID NO: 1362418 - DNA, 25 bp, Homo sapien
tggcttcaagatccgcacacctcag

SEQ ID NO: 1362419 - DNA, 25 bp, Homo sapien
tcctggcttcaagatccgcacacct

SEQ ID NO: 1362420 - DNA, 25 bp, Homo sapien
cttcaagatccgcacacctcagact

SEQ ID NO: 1362421 - DNA, 25 bp, Homo sapien
ttcaagatccgcacacctcagactc

SEQ ID NO: 1362422 - DNA, 25 bp, Homo sapien
caatggctagccaagatttgttaac

SEQ ID NO: 1362423 - DNA, 25 bp, Homo sapien
cactgaactacggaactggaagata

SEQ ID NO: 1362424 - DNA, 25 bp, Homo sapien
taaatgtaggccacaggtaaaaagc

SEQ ID NO: 1362425 - DNA, 25 bp, Homo sapien
gaataaaatgatcgcagtcaaggaa

SEQ ID NO: 1362426 - DNA, 25 bp, Homo sapien
cattttgcttgcgttctgattcctc

SEQ ID NO: 1362427 - DNA, 25 bp, Homo sapien
tgcatcacattttcctaacgcattt

SEQ ID NO: 1362428 - DNA, 25 bp, Homo sapien
gctttcactctctgaagtatggata

SEQ ID NO: 1362429 - DNA, 25 bp, Homo sapien
tcaaatgatgtagctcgttcaaaaa

SEQ ID NO: 1362430 - DNA, 25 bp, Homo sapien
tgtagggacccatcgaagatcttct

SEQ ID NO: 1362431 - DNA, 25 bp, Homo sapien
tgggccttggcctaatgagacttgg

SEQ ID NO: 1362432 - DNA, 25 bp, Homo sapien
tgagaaactctaccaagcgtgcttg

SEQ ID NO: 1362433 - DNA, 25 bp, Homo sapien
tctttcttctggtgataacagaggc

SEQ ID NO: 1362434 - DNA, 25 bp, Homo sapien
cgctttagatgtactataaggaaat

SEQ ID NO: 1362435 - DNA, 25 bp, Homo sapien
ctataaattccttgtacaatcgaaa

SEQ ID NO: 1362436 - DNA, 25 bp, Homo sapien
catttacatgttggatctcttttgc

SEQ ID NO: 1362437 - DNA, 25 bp, Homo sapien
tttgatgctggcaattgtcttagaa

SEQ ID NO: 1362438 - DNA, 25 bp, Homo sapien
tccaaagcttgacacaatttttcag

SEQ ID NO: 1362439 - DNA, 25 bp, Homo sapien
gaaatatctaccaagtgcattccat

SEQ ID NO: 1362440 - DNA, 25 bp, Homo sapien
tgccgaaggtataatttcaagacgt

SEQ ID NO: 1362441 - DNA, 25 bp, Homo sapien
tgtttccacacacacgataaattcc

SEQ ID NO: 1362442 - DNA, 25 bp, Homo sapien
cctggaagtttctgatgaccacaaa

SEQ ID NO: 1362443 - DNA, 25 bp, Homo sapien
gctccaaataagtgtatttttcctg

SEQ ID NO: 1362444 - DNA, 25 bp, Homo sapien
cactttcgatgacaaacaaggagac

SEQ ID NO: 1362445 - DNA, 25 bp, Homo sapien
tataaaagggataccatctggttcc

SEQ ID NO: 1362446 - DNA, 25 bp, Homo sapien
gggatctcaatttgcgaaacttgtg

SEQ ID NO: 1362447 - DNA, 25 bp, Homo sapien
ggaacactacaatgccttcacaatc

SEQ ID NO: 1362448 - DNA, 25 bp, Homo sapien
cttcacaatccctacatttcgtggg

SEQ ID NO: 1362449 - DNA, 25 bp, Homo sapien
tcacattcaacaccttggaacacta

SEQ ID NO: 1362450 - DNA, 25 bp, Homo sapien
gaaggtggctctctttcatctagat

SEQ ID NO: 1362451 - DNA, 25 bp, Homo sapien
gatggtgttcgtggaagttttcgat

SEQ ID NO: 1362452 - DNA, 25 bp, Homo sapien
ccactggatggtgttcgtggaagtt

SEQ ID NO: 1362453 - DNA, 25 bp, Homo sapien
tctgcagaggacatagttccactgg

SEQ ID NO: 1362454 - DNA, 25 bp, Homo sapien
aatccagagatctagattcgctgct

SEQ ID NO: 1362455 - DNA, 25 bp, Homo sapien
tctgcactgttagagcatctgtcct

SEQ ID NO: 1362456 - DNA, 25 bp, Homo sapien
ggaaggcgtacaacatcctctaaag

SEQ ID NO: 1362457 - DNA, 25 bp, Homo sapien
aaagagttggcaggtccaaatcctg

SEQ ID NO: 1362458 - DNA, 25 bp, Homo sapien
ttttattagaactgtcaggaaggcg

SEQ ID NO: 1362459 - DNA, 25 bp, Homo sapien
cagttgaatttgtggccttgacaaa

SEQ ID NO: 1362460 - DNA, 25 bp, Homo sapien
gcatgtggaagaggttaactgttac

SEQ ID NO: 1362461 - DNA, 25 bp, Homo sapien
gagtttggcactatcacagagagac

SEQ ID NO: 1362462 - DNA, 25 bp, Homo sapien
gactgtaaactgtctgcaagggaag

SEQ ID NO: 1362463 - DNA, 25 bp, Homo sapien
caagtgtgtacaatatgccagaccc

SEQ ID NO: 1362464 - DNA, 25 bp, Homo sapien
gatggtctgatcacaactgcctaag

SEQ ID NO: 1362465 - DNA, 25 bp, Homo sapien
tatcaattcatccaaaagacggcag

SEQ ID NO: 1362466 - DNA, 25 bp, Homo sapien
tgagcttaatacactggcaggtacg

SEQ ID NO: 1362467 - DNA, 25 bp, Homo sapien
cacactgtgtacctgattttaagac

SEQ ID NO: 1362468 - DNA, 25 bp, Homo sapien
aagcaaaaataatcgagacactggg

SEQ ID NO: 1362469 - DNA, 25 bp, Homo sapien
tataaaaaggacagcgagaaccaaa

SEQ ID NO: 1362470 - DNA, 25 bp, Homo sapien
caaagacctaagtagttggagagac

SEQ ID NO: 1362471 - DNA, 25 bp, Homo sapien
aactgatttttaccaagatgcagag

SEQ ID NO: 1362472 - DNA, 25 bp, Homo sapien
caagtagacacctacaaatatggtc

SEQ ID NO: 1362473 - DNA, 25 bp, Homo sapien
aaacaagtggatatctgcatttacc

SEQ ID NO: 1362474 - DNA, 25 bp, Homo sapien
tgcagaggcaatttaatgaaaatgg

SEQ ID NO: 1362475 - DNA, 25 bp, Homo sapien
gaaaacaagtgtccggagttgtgct

SEQ ID NO: 1362476 - DNA, 25 bp, Homo sapien
aacaagtgtccggagttgtgctaaa

SEQ ID NO: 1362477 - DNA, 25 bp, Homo sapien
ctggaaaacaagtgtccggagttgt

SEQ ID NO: 1362478 - DNA, 25 bp, Homo sapien
gctttaagggtaagatcacactgga

SEQ ID NO: 1362479 - DNA, 25 bp, Homo sapien
tcttggcagacgcagaactttgaca

SEQ ID NO: 1362480 - DNA, 25 bp, Homo sapien
ctatccttgctatcaggtgcctgaa

SEQ ID NO: 1362481 - DNA, 25 bp, Homo sapien
cagcacgacctgagagcctattaaa

SEQ ID NO: 1362482 - DNA, 25 bp, Homo sapien
tcaaaatgtggatcttcaccaacag

SEQ ID NO: 1362483 - DNA, 25 bp, Homo sapien
taattcaacttgcaaataaaaaaga

SEQ ID NO: 1362484 - DNA, 25 bp, Homo sapien
ctaattcaacttgcaaataaaaaag

SEQ ID NO: 1362485 - DNA, 25 bp, Homo sapien
ctagttgcttgttgagattttttgc

SEQ ID NO: 1362486 - DNA, 25 bp, Homo sapien
catattcatcttgacgttgcatgca

SEQ ID NO: 1362487 - DNA, 25 bp, Homo sapien
tgcacgaaacatggaagactttgct

SEQ ID NO: 1362488 - DNA, 25 bp, Homo sapien
ttgctaatccgccacttgaagacag

SEQ ID NO: 1362489 - DNA, 25 bp, Homo sapien
ttttgctcctgtttccaaagctctt

SEQ ID NO: 1362490 - DNA, 25 bp, Homo sapien
cattttattttgctcctgtttccaa

SEQ ID NO: 1362491 - DNA, 25 bp, Homo sapien
atttcatttttccttccaagtagag

SEQ ID NO: 1362492 - DNA, 25 bp, Homo sapien
catttcatttttccttccaagtaga

SEQ ID NO: 1362493 - DNA, 25 bp, Homo sapien
ttgtttgttgtaaaaggtgactgct

SEQ ID NO: 1362494 - DNA, 25 bp, Homo sapien
cacaaatttgttagcctggagagct

SEQ ID NO: 1362495 - DNA, 25 bp, Homo sapien
cattaagaagagcattagtaaacag

SEQ ID NO: 1362496 - DNA, 25 bp, Homo sapien
aggtgactgctttctatatcattaa

SEQ ID NO: 1362497 - DNA, 25 bp, Homo sapien
gcctctgccaacttgaccatatttc

SEQ ID NO: 1362498 - DNA, 25 bp, Homo sapien
gaccatatttctagtggactccaat

SEQ ID NO: 1362499 - DNA, 25 bp, Homo sapien
ttctagttgcctctgccaacttgac

SEQ ID NO: 1362500 - DNA, 25 bp, Homo sapien
attccaatgttagttctagttgcct

SEQ ID NO: 1362501 - DNA, 25 bp, Homo sapien
tttgaccaagttttagcatatgaca

SEQ ID NO: 1362502 - DNA, 25 bp, Homo sapien
tcaacccatgaaactatgttcttag

SEQ ID NO: 1362503 - DNA, 25 bp, Homo sapien
caaagccagctcgatagagtcagtg

SEQ ID NO: 1362504 - DNA, 25 bp, Homo sapien
tgttctttaacagcacgttgtctag

SEQ ID NO: 1362505 - DNA, 25 bp, Homo sapien
ctttttcactggatgagtccactga

SEQ ID NO: 1362506 - DNA, 25 bp, Homo sapien
tttttcactggatgagtccactgat

SEQ ID NO: 1362507 - DNA, 25 bp, Homo sapien
ctggatgagtccactgattccacag

SEQ ID NO: 1362508 - DNA, 25 bp, Homo sapien
tcactggatgagtccactgattcca

SEQ ID NO: 1362509 - DNA, 25 bp, Homo sapien
caggcagtcgcaataatgaatcatt

SEQ ID NO: 1362510 - DNA, 25 bp, Homo sapien
agaaacaggcagtcgcaataatgaa

SEQ ID NO: 1362511 - DNA, 25 bp, Homo sapien
tcattgcctacatctcccataagga

SEQ ID NO: 1362512 - DNA, 25 bp, Homo sapien
atgaatcattgcctacatctcccat

SEQ ID NO: 1362513 - DNA, 25 bp, Homo sapien
ctggaagagatcgtttttgttttct

SEQ ID NO: 1362514 - DNA, 25 bp, Homo sapien
tcctgcttggaaacatgagaacaca

SEQ ID NO: 1362515 - DNA, 25 bp, Homo sapien
tatctctcttaccatattgcaaata

SEQ ID NO: 1362516 - DNA, 25 bp, Homo sapien
aaaataggctatatctctcttacca

SEQ ID NO: 1362517 - DNA, 25 bp, Homo sapien
ttggaaacatgagaacacacaggaa

SEQ ID NO: 1362518 - DNA, 25 bp, Homo sapien
tctatgtcaaaaagtgctggtaggg

SEQ ID NO: 1362519 - DNA, 25 bp, Homo sapien
gacagaagaagctatccatgtttcc

SEQ ID NO: 1362520 - DNA, 25 bp, Homo sapien
gaaacaaatttggttactaagcaca

SEQ ID NO: 1362521 - DNA, 25 bp, Homo sapien
cacacaaacatgataaatctatgtc

SEQ ID NO: 1362522 - DNA, 25 bp, Homo sapien
atagactttaaaacacggagcagtt

SEQ ID NO: 1362523 - DNA, 25 bp, Homo sapien
tagactttaaaacacggagcagttc

SEQ ID NO: 1362524 - DNA, 25 bp, Homo sapien
agatcaacagaattgaggttctgat

SEQ ID NO: 1362525 - DNA, 25 bp, Homo sapien
ctgcagcattttgaagatcaacaga

SEQ ID NO: 1362526 - DNA, 25 bp, Homo sapien
caaatatagtaacatgtgggagaac

SEQ ID NO: 1362527 - DNA, 25 bp, Homo sapien
tggaacttaaggacttgagccccat

SEQ ID NO: 1362528 - DNA, 25 bp, Homo sapien
tcaccaactccttgatgtaatccgg

SEQ ID NO: 1362529 - DNA, 25 bp, Homo sapien
gagagttgacctgatgcccaagcac

SEQ ID NO: 1362530 - DNA, 25 bp, Homo sapien
ttcatgtaacagtcagaaaaactga

SEQ ID NO: 1362531 - DNA, 25 bp, Homo sapien
tcatgtaacagtcagaaaaactgaa

SEQ ID NO: 1362532 - DNA, 25 bp, Homo sapien
catgtaacagtcagaaaaactgaaa

SEQ ID NO: 1362533 - DNA, 25 bp, Homo sapien
ggcgaccgcggcaggtacgggaggc

SEQ ID NO: 1362534 - DNA, 25 bp, Homo sapien
tgcagctaccgccacggccgcaccg

SEQ ID NO: 1362535 - DNA, 25 bp, Homo sapien
aggtacgggaggcaactagctcgcg

SEQ ID NO: 1362536 - DNA, 25 bp, Homo sapien
atctcgcgtgccggacgcggacgcc

SEQ ID NO: 1362537 - DNA, 25 bp, Homo sapien
aaggagcccctgaattccgcagtga

SEQ ID NO: 1362538 - DNA, 25 bp, Homo sapien
cctgaattccgcagtgaggcgatga

SEQ ID NO: 1362539 - DNA, 25 bp, Homo sapien
aagcatccccagtaagaaagacgga

SEQ ID NO: 1362540 - DNA, 25 bp, Homo sapien
tgagacccggtgaagaaaaccaatg

SEQ ID NO: 1362541 - DNA, 25 bp, Homo sapien
catcccgcgtcccggacgcggacgg

SEQ ID NO: 1362542 - DNA, 25 bp, Homo sapien
gccaggttgggtgggagacacaatg

SEQ ID NO: 1362543 - DNA, 25 bp, Homo sapien
atgctgcagaccatcttcctgtcct

SEQ ID NO: 1362544 - DNA, 25 bp, Homo sapien
tgggtgggagacacaatgctgcaga

SEQ ID NO: 1362545 - DNA, 25 bp, Homo sapien
gttgggtgggagacacaatgctgca

SEQ ID NO: 1362546 - DNA, 25 bp, Homo sapien
gtttattcaggtctattcgggtcta

SEQ ID NO: 1362547 - DNA, 25 bp, Homo sapien
attcgggtctattcatcagttattc

SEQ ID NO: 1362548 - DNA, 25 bp, Homo sapien
gtgtttattcaggtctattcgggtc

SEQ ID NO: 1362549 - DNA, 25 bp, Homo sapien
ctattcgggtctattcatcagttat

SEQ ID NO: 1362550 - DNA, 25 bp, Homo sapien
cagtgcagttacaatatagagaacc

SEQ ID NO: 1362551 - DNA, 25 bp, Homo sapien
gtggaatcttctaattccacacaat

SEQ ID NO: 1362552 - DNA, 25 bp, Homo sapien
ttccacattggggtatttgaggtag

SEQ ID NO: 1362553 - DNA, 25 bp, Homo sapien
gtaggaactacttacaacagtgcag

SEQ ID NO: 1362554 - DNA, 25 bp, Homo sapien
aatagcagtattcttggttaccagg

SEQ ID NO: 1362555 - DNA, 25 bp, Homo sapien
ggttaccaggtatctgaaccacaga

SEQ ID NO: 1362556 - DNA, 25 bp, Homo sapien
ctttggaagctaactagtagtctgg

SEQ ID NO: 1362557 - DNA, 25 bp, Homo sapien
tctacccaaagtagcaacttcttcc

SEQ ID NO: 1362558 - DNA, 25 bp, Homo sapien
ccctgggtatcattgggattggcac

SEQ ID NO: 1362559 - DNA, 25 bp, Homo sapien
taaaagggctgctttatgatatcca

SEQ ID NO: 1362560 - DNA, 25 bp, Homo sapien
gactgcgttctttccccaggttgaa

SEQ ID NO: 1362561 - DNA, 25 bp, Homo sapien
aggttgaagctgttaatcatcctgc

SEQ ID NO: 1362562 - DNA, 25 bp, Homo sapien
tatgtgtatgtaaccctgaagagag

SEQ ID NO: 1362563 - DNA, 25 bp, Homo sapien
gggagtcagtgctcgtggaccaccc

SEQ ID NO: 1362564 - DNA, 25 bp, Homo sapien
tggaccacccctgatagatgggaat

SEQ ID NO: 1362565 - DNA, 25 bp, Homo sapien
gacccgaatttgcactggactgcct

SEQ ID NO: 1362566 - DNA, 25 bp, Homo sapien
caagagattatttcactgattcttc

SEQ ID NO: 1362567 - DNA, 25 bp, Homo sapien
tctctcttctcaagccctcttgctt

SEQ ID NO: 1362568 - DNA, 25 bp, Homo sapien
tcttccagtcaagagattatttcac

SEQ ID NO: 1362569 - DNA, 25 bp, Homo sapien
ctcaagccctcttgcttttaactct

SEQ ID NO: 1362570 - DNA, 25 bp, Homo sapien
tgaaggatgtgcaagggtgctttgt

SEQ ID NO: 1362571 - DNA, 25 bp, Homo sapien
tatgttaaggaagattctcctcgcc

SEQ ID NO: 1362572 - DNA, 25 bp, Homo sapien
gaatctgctcaacttctgcattaga

SEQ ID NO: 1362573 - DNA, 25 bp, Homo sapien
ccactcccgtttcaactgttctctg

SEQ ID NO: 1362574 - DNA, 25 bp, Homo sapien
ccctgtgcctaaagcctccacgata

SEQ ID NO: 1362575 - DNA, 25 bp, Homo sapien
cctgtgcctaaagcctccacgataa

SEQ ID NO: 1362576 - DNA, 25 bp, Homo sapien
tgtgcctaaagcctccacgataacc

SEQ ID NO: 1362577 - DNA, 25 bp, Homo sapien
tgcctaaagcctccacgataaccat

SEQ ID NO: 1362578 - DNA, 25 bp, Homo sapien
tgcggatgtacacctaagaacttgg

SEQ ID NO: 1362579 - DNA, 25 bp, Homo sapien
ggttcctaaccaggccatgtacttg

SEQ ID NO: 1362580 - DNA, 25 bp, Homo sapien
tatagacctacgtcctcaaagaggc

SEQ ID NO: 1362581 - DNA, 25 bp, Homo sapien
tgaacagccaagatccatggagtgg

SEQ ID NO: 1362582 - DNA, 25 bp, Homo sapien
gaacccgactgttatggattcagca

SEQ ID NO: 1362583 - DNA, 25 bp, Homo sapien
tggcaacagagaacccgactgttat

SEQ ID NO: 1362584 - DNA, 25 bp, Homo sapien
agcagttgacggttgacctccagca

SEQ ID NO: 1362585 - DNA, 25 bp, Homo sapien
aaagctaaaacctctctggcaacag

SEQ ID NO: 1362586 - DNA, 25 bp, Homo sapien
cgccctcttgtgatgtgttacaaaa

SEQ ID NO: 1362587 - DNA, 25 bp, Homo sapien
tcaaaaaggcgtcttctcgcgccct

SEQ ID NO: 1362588 - DNA, 25 bp, Homo sapien
tcttctcgcgccctcttgtgatgtg

SEQ ID NO: 1362589 - DNA, 25 bp, Homo sapien
ttcaaaaaggcgtcttctcgcgccc

SEQ ID NO: 1362590 - DNA, 25 bp, Homo sapien
gtacatttaggagaaacttgcaggc

SEQ ID NO: 1362591 - DNA, 25 bp, Homo sapien
ggtgtctatccagtcagtgccggta

SEQ ID NO: 1362592 - DNA, 25 bp, Homo sapien
tctcctaggttgagatggaacatac

SEQ ID NO: 1362593 - DNA, 25 bp, Homo sapien
aaattaaagtagcattatagccggt

SEQ ID NO: 1362594 - DNA, 25 bp, Homo sapien
aggacaacaggaccaacaagtcaga

SEQ ID NO: 1362595 - DNA, 25 bp, Homo sapien
gacaacaggaccaacaagtcagatc

SEQ ID NO: 1362596 - DNA, 25 bp, Homo sapien
acaggaccaacaagtcagatctggg

SEQ ID NO: 1362597 - DNA, 25 bp, Homo sapien
ggaccaacaagtcagatctggggcc

SEQ ID NO: 1362598 - DNA, 25 bp, Homo sapien
cacgatctgcagatgacctccagat

SEQ ID NO: 1362599 - DNA, 25 bp, Homo sapien
tcttgaaccacgatctgcagatgac

SEQ ID NO: 1362600 - DNA, 25 bp, Homo sapien
agattttcctgttcacagttctcag

SEQ ID NO: 1362601 - DNA, 25 bp, Homo sapien
taatatcttgaaccacgatctgcag

SEQ ID NO: 1362602 - DNA, 25 bp, Homo sapien
gacattaacatctaatgtcatttcc

SEQ ID NO: 1362603 - DNA, 25 bp, Homo sapien
ggagtccagacattaacatctaatg

SEQ ID NO: 1362604 - DNA, 25 bp, Homo sapien
gagtccagacattaacatctaatgt

SEQ ID NO: 1362605 - DNA, 25 bp, Homo sapien
aacatctaatgtcatttcccatttg

SEQ ID NO: 1362606 - DNA, 25 bp, Homo sapien
ccaggtgctttccaggttgtaaagg

SEQ ID NO: 1362607 - DNA, 25 bp, Homo sapien
ttgtaaagggtagatcaggctgact

SEQ ID NO: 1362608 - DNA, 25 bp, Homo sapien
cttcaacacggagtaagacctgcat

SEQ ID NO: 1362609 - DNA, 25 bp, Homo sapien
gaggctcacacagttgtcccactat

SEQ ID NO: 1362610 - DNA, 25 bp, Homo sapien
gaactgctcttgttgtcttcaccca

SEQ ID NO: 1362611 - DNA, 25 bp, Homo sapien
gttgtcttcacccactcggacctca

SEQ ID NO: 1362612 - DNA, 25 bp, Homo sapien
tgaactgctcttgttgtcttcaccc

SEQ ID NO: 1362613 - DNA, 25 bp, Homo sapien
ttctgaactgctcttgttgtcttca

SEQ ID NO: 1362614 - DNA, 25 bp, Homo sapien
cagctactcttaggtgtgagtggcg

SEQ ID NO: 1362615 - DNA, 25 bp, Homo sapien
cacttaatgccgacagctactctta

SEQ ID NO: 1362616 - DNA, 25 bp, Homo sapien
gggagtttccacttaatgccgacag

SEQ ID NO: 1362617 - DNA, 25 bp, Homo sapien
gccgacagctactcttaggtgtgag

SEQ ID NO: 1362618 - DNA, 25 bp, Homo sapien
agatgaatccccgagaactgagttt

SEQ ID NO: 1362619 - DNA, 25 bp, Homo sapien
tgaatccccgagaactgagtttttc

SEQ ID NO: 1362620 - DNA, 25 bp, Homo sapien
agctgcacagatgaatccccgagaa

SEQ ID NO: 1362621 - DNA, 25 bp, Homo sapien
gcacagatgaatccccgagaactga

SEQ ID NO: 1362622 - DNA, 25 bp, Homo sapien
gacaccaacccctgccatctgttgc

SEQ ID NO: 1362623 - DNA, 25 bp, Homo sapien
tacagaggtactctgtatgtgtcag

SEQ ID NO: 1362624 - DNA, 25 bp, Homo sapien
acctggtggtacagaggtactctgt

SEQ ID NO: 1362625 - DNA, 25 bp, Homo sapien
ggtggtacagaggtactctgtatgt

SEQ ID NO: 1362626 - DNA, 25 bp, Homo sapien
acaggctggcgcttcagttgaatcc

SEQ ID NO: 1362627 - DNA, 25 bp, Homo sapien
cattttccttcttgcgtttcaggaa

SEQ ID NO: 1362628 - DNA, 25 bp, Homo sapien
caggtacctttctctttggctccct

SEQ ID NO: 1362629 - DNA, 25 bp, Homo sapien
tgatcattttccttcttgcgtttca

SEQ ID NO: 1362630 - DNA, 25 bp, Homo sapien
caaaggagcaatgccatgtttccta

SEQ ID NO: 1362631 - DNA, 25 bp, Homo sapien
aaggagcaatgccatgtttcctaaa

SEQ ID NO: 1362632 - DNA, 25 bp, Homo sapien
aggagcaatgccatgtttcctaaaa

SEQ ID NO: 1362633 - DNA, 25 bp, Homo sapien
aaaggagcaatgccatgtttcctaa

SEQ ID NO: 1362634 - DNA, 25 bp, Homo sapien
tcatccagttattgtgaaagccggg

SEQ ID NO: 1362635 - DNA, 25 bp, Homo sapien
tgcgctagagattataacccgcggt

SEQ ID NO: 1362636 - DNA, 25 bp, Homo sapien
taaaaacggagggtgatgatcccga

SEQ ID NO: 1362637 - DNA, 25 bp, Homo sapien
taacggtacatcaccgcgggagtgg

SEQ ID NO: 1362638 - DNA, 25 bp, Homo sapien
tgtagccgtctcaccactataatgg

SEQ ID NO: 1362639 - DNA, 25 bp, Homo sapien
gctagattagcaggcccgagtgaat

SEQ ID NO: 1362640 - DNA, 25 bp, Homo sapien
taacctgatgcatactgggccagag

SEQ ID NO: 1362641 - DNA, 25 bp, Homo sapien
cacagaggtgtgaaggtagacccta

SEQ ID NO: 1362642 - DNA, 25 bp, Homo sapien
cacgtgagaacccttaagacagggc

SEQ ID NO: 1362643 - DNA, 25 bp, Homo sapien
gactttggagccagccatactagct

SEQ ID NO: 1362644 - DNA, 25 bp, Homo sapien
ccacaagatggcgatagcagttaca

SEQ ID NO: 1362645 - DNA, 25 bp, Homo sapien
ttttttgctctagggaggcagcgga

SEQ ID NO: 1362646 - DNA, 25 bp, Homo sapien
tgtaccagctttttatgggtggtaa

SEQ ID NO: 1362647 - DNA, 25 bp, Homo sapien
aaggtgggggctagaacagtcttct

SEQ ID NO: 1362648 - DNA, 25 bp, Homo sapien
ggctagaacagtcttcttttagtta

SEQ ID NO: 1362649 - DNA, 25 bp, Homo sapien
gccaggctgtaccagctttttatgg

SEQ ID NO: 1362650 - DNA, 25 bp, Homo sapien
gatgtaaaccattcgaagtcagcta

SEQ ID NO: 1362651 - DNA, 25 bp, Homo sapien
tgtaacctgattcatcctgggatgt

SEQ ID NO: 1362652 - DNA, 25 bp, Homo sapien
cagaagatacagttgagtttggctc

SEQ ID NO: 1362653 - DNA, 25 bp, Homo sapien
gaaatctggagaactatacctgctt

SEQ ID NO: 1362654 - DNA, 25 bp, Homo sapien
tgtgccctgtggtagttggaaacaa

SEQ ID NO: 1362655 - DNA, 25 bp, Homo sapien
aacagcgtttattatacagtggcag

SEQ ID NO: 1362656 - DNA, 25 bp, Homo sapien
tagctgccacagtaatactcattcc

SEQ ID NO: 1362657 - DNA, 25 bp, Homo sapien
gtttaacatcattgcataacagcgt

SEQ ID NO: 1362658 - DNA, 25 bp, Homo sapien
catgggtgaattatgtttccgaggc

SEQ ID NO: 1362659 - DNA, 25 bp, Homo sapien
cactggctaccgaagtaaactgatg

SEQ ID NO: 1362660 - DNA, 25 bp, Homo sapien
gatgtcaaacgatcctaagcgaaga

SEQ ID NO: 1362661 - DNA, 25 bp, Homo sapien
aactccaaatgagccataggaaggc

SEQ ID NO: 1362662 - DNA, 25 bp, Homo sapien
ggcctcgtgtatgggaagtcatgaa

SEQ ID NO: 1362663 - DNA, 25 bp, Homo sapien
aagtcatgaagtctcgtggctctgg

SEQ ID NO: 1362664 - DNA, 25 bp, Homo sapien
tggctctggagtaggaagttgcact

SEQ ID NO: 1362665 - DNA, 25 bp, Homo sapien
cactaaacggtgaaaggctggacag

SEQ ID NO: 1362666 - DNA, 25 bp, Homo sapien
ttccttcacatccacctcatctttg

SEQ ID NO: 1362667 - DNA, 25 bp, Homo sapien
tccttccttcacatccacctcatct

SEQ ID NO: 1362668 - DNA, 25 bp, Homo sapien
cttcacatccacctcatctttgaag

SEQ ID NO: 1362669 - DNA, 25 bp, Homo sapien
ccttccttcacatccacctcatctt

SEQ ID NO: 1362670 - DNA, 25 bp, Homo sapien
tgtaatgcactaagctctttgtccc

SEQ ID NO: 1362671 - DNA, 25 bp, Homo sapien
ccccatgtgagcaggaatttgagat

SEQ ID NO: 1362672 - DNA, 25 bp, Homo sapien
cccaggtagccccatgtgagcagga

SEQ ID NO: 1362673 - DNA, 25 bp, Homo sapien
aatttgagataaaggttgaagcacc

SEQ ID NO: 1362674 - DNA, 25 bp, Homo sapien
gtttcaggcattcttccttaggatg

SEQ ID NO: 1362675 - DNA, 25 bp, Homo sapien
ttcttccttaggatgtggtgttaca

SEQ ID NO: 1362676 - DNA, 25 bp, Homo sapien
taggatgtggtgttacataaaacag

SEQ ID NO: 1362677 - DNA, 25 bp, Homo sapien
tcaaaggtttgtttcaggcattctt

SEQ ID NO: 1362678 - DNA, 25 bp, Homo sapien
tggcccagtaggtgccaagaacctt

SEQ ID NO: 1362679 - DNA, 25 bp, Homo sapien
taaagccaactcaactcagccatga

SEQ ID NO: 1362680 - DNA, 25 bp, Homo sapien
tgtttttcctagataacagtgcccc

SEQ ID NO: 1362681 - DNA, 25 bp, Homo sapien
tgtgcagtcaccctcaagagctgta

SEQ ID NO: 1362682 - DNA, 25 bp, Homo sapien
tgggaagaaatctctccaagtctgc

SEQ ID NO: 1362683 - DNA, 25 bp, Homo sapien
tagtcaaactactgccaatgggaag

SEQ ID NO: 1362684 - DNA, 25 bp, Homo sapien
agtgacaatgggcacctacagagca

SEQ ID NO: 1362685 - DNA, 25 bp, Homo sapien
gaagctgtggttgccggtttctacc

SEQ ID NO: 1362686 - DNA, 25 bp, Homo sapien
ccagtcacctttatttaaagtatat

SEQ ID NO: 1362687 - DNA, 25 bp, Homo sapien
cagtcacctttatttaaagtatatt

SEQ ID NO: 1362688 - DNA, 25 bp, Homo sapien
gaaggtgcccagaataccaatgtct

SEQ ID NO: 1362689 - DNA, 25 bp, Homo sapien
tacatggattgaagtcagcccctca

SEQ ID NO: 1362690 - DNA, 25 bp, Homo sapien
tgtaaagcatattaggaaggtgccc

SEQ ID NO: 1362691 - DNA, 25 bp, Homo sapien
ttttgcttggacgacctggttactc

SEQ ID NO: 1362692 - DNA, 25 bp, Homo sapien
tgtagagatatagccaggatgatga

SEQ ID NO: 1362693 - DNA, 25 bp, Homo sapien
acacttgtgtagagatatagccagg

SEQ ID NO: 1362694 - DNA, 25 bp, Homo sapien
gatgaccacaaataccacagctcca

SEQ ID NO: 1362695 - DNA, 25 bp, Homo sapien
atgatgaccacaaataccacagctc

SEQ ID NO: 1362696 - DNA, 25 bp, Homo sapien
cacccagcgtaagccatcgtttata

SEQ ID NO: 1362697 - DNA, 25 bp, Homo sapien
agcgtaagccatcgtttatatcccc

SEQ ID NO: 1362698 - DNA, 25 bp, Homo sapien
cccagcgtaagccatcgtttatatc

SEQ ID NO: 1362699 - DNA, 25 bp, Homo sapien
cacacccagcgtaagccatcgttta

SEQ ID NO: 1362700 - DNA, 25 bp, Homo sapien
ttaactgttcgggagggaatcactg

SEQ ID NO: 1362701 - DNA, 25 bp, Homo sapien
ggctgtctgtactcttccggttaac

SEQ ID NO: 1362702 - DNA, 25 bp, Homo sapien
tccacatcaatcaaaaactcattag

SEQ ID NO: 1362703 - DNA, 25 bp, Homo sapien
tggcccatacactctaccgggctgt

SEQ ID NO: 1362704 - DNA, 25 bp, Homo sapien
ttcacaatttaaaacaggtcataaa

SEQ ID NO: 1362705 - DNA, 25 bp, Homo sapien
gtattcacaatttaaaacaggtcat

SEQ ID NO: 1362706 - DNA, 25 bp, Homo sapien
caagtattcacaatttaaaacaggt

SEQ ID NO: 1362707 - DNA, 25 bp, Homo sapien
cccaagtattcacaatttaaaacag

SEQ ID NO: 1362708 - DNA, 25 bp, Homo sapien
gactaaagtccgttcatcttctacg

SEQ ID NO: 1362709 - DNA, 25 bp, Homo sapien
agtccttgccaaaaacatcccggag

SEQ ID NO: 1362710 - DNA, 25 bp, Homo sapien
aaaactctgaattgttggctgtccg

SEQ ID NO: 1362711 - DNA, 25 bp, Homo sapien
atcccggaggcttaggaaagtgttg

SEQ ID NO: 1362712 - DNA, 25 bp, Homo sapien
atataatacacgcaacatgaaaaat

SEQ ID NO: 1362713 - DNA, 25 bp, Homo sapien
agtatataatacacgcaacatgaaa

SEQ ID NO: 1362714 - DNA, 25 bp, Homo sapien
tataatacacgcaacatgaaaaatg

SEQ ID NO: 1362715 - DNA, 25 bp, Homo sapien
gtatataatacacgcaacatgaaaa

SEQ ID NO: 1362716 - DNA, 25 bp, Homo sapien
aactctggggagttctcatacagag

SEQ ID NO: 1362717 - DNA, 25 bp, Homo sapien
ccagcagaaccggtgctctccacat

SEQ ID NO: 1362718 - DNA, 25 bp, Homo sapien
tctccacattccctgcagggtagga

SEQ ID NO: 1362719 - DNA, 25 bp, Homo sapien
gagaagacccgtgccaagtacgtct

SEQ ID NO: 1362720 - DNA, 25 bp, Homo sapien
ttcacaatctcgtcggtgaggtcac

SEQ ID NO: 1362721 - DNA, 25 bp, Homo sapien
tgtaaaagcatttgcttttccaatc

SEQ ID NO: 1362722 - DNA, 25 bp, Homo sapien
ctgttgtgtaaaagcatttgctttt

SEQ ID NO: 1362723 - DNA, 25 bp, Homo sapien
gcttttccaatctcctgacttagtg

SEQ ID NO: 1362724 - DNA, 25 bp, Homo sapien
tgtgtaaaagcatttgcttttccaa

SEQ ID NO: 1362725 - DNA, 25 bp, Homo sapien
caacaccgagcacttgggatgcatg

SEQ ID NO: 1362726 - DNA, 25 bp, Homo sapien
gactttgaaccagacagctatttga

SEQ ID NO: 1362727 - DNA, 25 bp, Homo sapien
tgagccatcatacctagcaacaccg

SEQ ID NO: 1362728 - DNA, 25 bp, Homo sapien
caaagtgagattgggtgactagctc

SEQ ID NO: 1362729 - DNA, 25 bp, Homo sapien
aacacagtctgcctggtacgagggc

SEQ ID NO: 1362730 - DNA, 25 bp, Homo sapien
taataaataggtgaagcgtcactgc

SEQ ID NO: 1362731 - DNA, 25 bp, Homo sapien
cagagccagacccatcgttcaaggc

SEQ ID NO: 1362732 - DNA, 25 bp, Homo sapien
cagggctatagggtctcgctgacta

SEQ ID NO: 1362733 - DNA, 25 bp, Homo sapien
aagagattgttcagtccataggacc

SEQ ID NO: 1362734 - DNA, 25 bp, Homo sapien
aggagaagagtgcacacctcaggcc

SEQ ID NO: 1362735 - DNA, 25 bp, Homo sapien
caactgtaaaatgactgctctggtc

SEQ ID NO: 1362736 - DNA, 25 bp, Homo sapien
ggccctccagtacagcagcaagaga

SEQ ID NO: 1362737 - DNA, 25 bp, Homo sapien
aacagtgtagacttgattgacgggt

SEQ ID NO: 1362738 - DNA, 25 bp, Homo sapien
cagtgtagacttgattgacgggttt

SEQ ID NO: 1362739 - DNA, 25 bp, Homo sapien
aagttaaattatatgctgccacagt

SEQ ID NO: 1362740 - DNA, 25 bp, Homo sapien
ttatatgctgccacagtatttgtag

SEQ ID NO: 1362741 - DNA, 25 bp, Homo sapien
tgttataacttgaccgggaagagcc

SEQ ID NO: 1362742 - DNA, 25 bp, Homo sapien
gaaattattcatgggcaaagccttg

SEQ ID NO: 1362743 - DNA, 25 bp, Homo sapien
caccgtcggctgtattggatcagga

SEQ ID NO: 1362744 - DNA, 25 bp, Homo sapien
cacgtgtgacaagagttaggactgc

SEQ ID NO: 1362745 - DNA, 25 bp, Homo sapien
taatatccaaacctctgcacgccaa

SEQ ID NO: 1362746 - DNA, 25 bp, Homo sapien
tgcagacgcaggcacaagtcctatc

SEQ ID NO: 1362747 - DNA, 25 bp, Homo sapien
gaagatgcacatataatgaaagata

SEQ ID NO: 1362748 - DNA, 25 bp, Homo sapien
aagtcctatcatattgaaggtcgca

SEQ ID NO: 1362749 - DNA, 25 bp, Homo sapien
tgcaacaacagtccaattactcgga

SEQ ID NO: 1362750 - DNA, 25 bp, Homo sapien
tccccagagttaaagcgggagctaa

SEQ ID NO: 1362751 - DNA, 25 bp, Homo sapien
cgggagctaaaagtccgcttatgca

SEQ ID NO: 1362752 - DNA, 25 bp, Homo sapien
cgagcaaaactctccagcggaaggg

SEQ ID NO: 1362753 - DNA, 25 bp, Homo sapien
tgagcgcagccgagtcccgtaggcg

SEQ ID NO: 1362754 - DNA, 25 bp, Homo sapien
ggactgtcgcctccctcctgcgtgt

SEQ ID NO: 1362755 - DNA, 25 bp, Homo sapien
gactcggttcattcaagccgggctg

SEQ ID NO: 1362756 - DNA, 25 bp, Homo sapien
cggcgcccgacggactcggttcatt

SEQ ID NO: 1362757 - DNA, 25 bp, Homo sapien
gagcgtccgagcgacggcggtctcg

SEQ ID NO: 1362758 - DNA, 25 bp, Homo sapien
acctgggcgaagacccagccgagca

SEQ ID NO: 1362759 - DNA, 25 bp, Homo sapien
aggagcgtccgagcgacggcggtct

SEQ ID NO: 1362760 - DNA, 25 bp, Homo sapien
agacccagccgagcaggagcgtccg

SEQ ID NO: 1362761 - DNA, 25 bp, Homo sapien
cagttggcggcgagatcgagcgggt

SEQ ID NO: 1362762 - DNA, 25 bp, Homo sapien
gcggcgagatcgagcgggttccgtg

SEQ ID NO: 1362763 - DNA, 25 bp, Homo sapien
gtctaccagttggcggcgagatcga

SEQ ID NO: 1362764 - DNA, 25 bp, Homo sapien
atcgagcgggttccgtggcgcccgt

SEQ ID NO: 1362765 - DNA, 25 bp, Homo sapien
ccggtgccccgcgcgctataaaggg

SEQ ID NO: 1362766 - DNA, 25 bp, Homo sapien
tgccccgcgcgctataaagggccgg

SEQ ID NO: 1362767 - DNA, 25 bp, Homo sapien
gcgcgctataaagggccggcggcgc

SEQ ID NO: 1362768 - DNA, 25 bp, Homo sapien
gctcgcagtcttggggagccggtgc

SEQ ID NO: 1362769 - DNA, 25 bp, Homo sapien
cttgattgtatctgatgtctggccc

SEQ ID NO: 1362770 - DNA, 25 bp, Homo sapien
tgaaaatctgatccctggatatctg

SEQ ID NO: 1362771 - DNA, 25 bp, Homo sapien
ccaatgtgggcctcctgaaaatctg

SEQ ID NO: 1362772 - DNA, 25 bp, Homo sapien
ttttgtacgctgtatccaatgtggg

SEQ ID NO: 1362773 - DNA, 25 bp, Homo sapien
cggcatcagaagaacaagctgttcc

SEQ ID NO: 1362774 - DNA, 25 bp, Homo sapien
ttctgcaacggcatcagaagaacaa

SEQ ID NO: 1362775 - DNA, 25 bp, Homo sapien
caacggcatcagaagaacaagctgt

SEQ ID NO: 1362776 - DNA, 25 bp, Homo sapien
tgcaacggcatcagaagaacaagct

SEQ ID NO: 1362777 - DNA, 25 bp, Homo sapien
tagtcactttttgcaaagcattaat

SEQ ID NO: 1362778 - DNA, 25 bp, Homo sapien
ctagtcactttttgcaaagcattaa

SEQ ID NO: 1362779 - DNA, 25 bp, Homo sapien
ccagggacataagagcctcacatag

SEQ ID NO: 1362780 - DNA, 25 bp, Homo sapien
cccagggacataagagcctcacata

SEQ ID NO: 1362781 - DNA, 25 bp, Homo sapien
cagggacataagagcctcacatagc

SEQ ID NO: 1362782 - DNA, 25 bp, Homo sapien
tcaaccaatgcttctaggaaaagac

SEQ ID NO: 1362783 - DNA, 25 bp, Homo sapien
tattgctacccttactgagattgag

SEQ ID NO: 1362784 - DNA, 25 bp, Homo sapien
gagtctcccaggaactaccagacag

SEQ ID NO: 1362785 - DNA, 25 bp, Homo sapien
gaaaagactctccacagtagacagg

SEQ ID NO: 1362786 - DNA, 25 bp, Homo sapien
ttagattttgactgtgtgggtcagc

SEQ ID NO: 1362787 - DNA, 25 bp, Homo sapien
ttttgactgtgtgggtcagctcctc

SEQ ID NO: 1362788 - DNA, 25 bp, Homo sapien
gactgtgtgggtcagctcctcatct

SEQ ID NO: 1362789 - DNA, 25 bp, Homo sapien
gattttgactgtgtgggtcagctcc

SEQ ID NO: 1362790 - DNA, 25 bp, Homo sapien
caggagactaggatacatctgaacc

SEQ ID NO: 1362791 - DNA, 25 bp, Homo sapien
tgtaacagttagtgctctcgcaagc

SEQ ID NO: 1362792 - DNA, 25 bp, Homo sapien
gcatggatacttgctcaacctgaga

SEQ ID NO: 1362793 - DNA, 25 bp, Homo sapien
tttcaggatccacatagcatagcta

SEQ ID NO: 1362794 - DNA, 25 bp, Homo sapien
tgcacagtataagccttttatccca

SEQ ID NO: 1362795 - DNA, 25 bp, Homo sapien
taatataccacatgactacttttgc

SEQ ID NO: 1362796 - DNA, 25 bp, Homo sapien
ttaacaaagtaatcatcatatgtgg

SEQ ID NO: 1362797 - DNA, 25 bp, Homo sapien
gaaaaccacacttaatattgcaaca

SEQ ID NO: 1362798 - DNA, 25 bp, Homo sapien
actgacggatagactggttaccagg

SEQ ID NO: 1362799 - DNA, 25 bp, Homo sapien
ggttaccagggctgagtgtaaattc

SEQ ID NO: 1362800 - DNA, 25 bp, Homo sapien
ctggtactgacggatagactggtta

SEQ ID NO: 1362801 - DNA, 25 bp, Homo sapien
ccagggctgagtgtaaattctgttc

SEQ ID NO: 1362802 - DNA, 25 bp, Homo sapien
tgggaacagtccagaaattccgacc

SEQ ID NO: 1362803 - DNA, 25 bp, Homo sapien
tgcgggagcccatacatctttggga

SEQ ID NO: 1362804 - DNA, 25 bp, Homo sapien
gaagaaataagcagtgtgtcccctc

SEQ ID NO: 1362805 - DNA, 25 bp, Homo sapien
caattggaatctaggctgtaggctg

SEQ ID NO: 1362806 - DNA, 25 bp, Homo sapien
tgagcaattctcaggttccccacca

SEQ ID NO: 1362807 - DNA, 25 bp, Homo sapien
accaggtagtgccttcggcagtgct

SEQ ID NO: 1362808 - DNA, 25 bp, Homo sapien
tgctgtcggacccaagtcagggcat

SEQ ID NO: 1362809 - DNA, 25 bp, Homo sapien
ggcactttcatgagcaattctcagg

SEQ ID NO: 1362810 - DNA, 25 bp, Homo sapien
ctaactgcctgaatcttcactgcca

SEQ ID NO: 1362811 - DNA, 25 bp, Homo sapien
agtggtcactggtactgaagcctgt

SEQ ID NO: 1362812 - DNA, 25 bp, Homo sapien
aactgcctgaatcttcactgccacc

SEQ ID NO: 1362813 - DNA, 25 bp, Homo sapien
tggtcactggtactgaagcctgttg

SEQ ID NO: 1362814 - DNA, 25 bp, Homo sapien
caagccggagcggagaggaaaaatt

SEQ ID NO: 1362815 - DNA, 25 bp, Homo sapien
ctgcaagccggagcggagaggaaaa

SEQ ID NO: 1362816 - DNA, 25 bp, Homo sapien
gccggagcggagaggaaaaatttca

SEQ ID NO: 1362817 - DNA, 25 bp, Homo sapien
tgcaagccggagcggagaggaaaaa

SEQ ID NO: 1362818 - DNA, 25 bp, Homo sapien
atctccccctggagtccgacgagtg

SEQ ID NO: 1362819 - DNA, 25 bp, Homo sapien
cccctggagtccgacgagtgcagcg

SEQ ID NO: 1362820 - DNA, 25 bp, Homo sapien
gaatctccccctggagtccgacgag

SEQ ID NO: 1362821 - DNA, 25 bp, Homo sapien
tccccctggagtccgacgagtgcag

SEQ ID NO: 1362822 - DNA, 25 bp, Homo sapien
cagttttcccctcttgtgaggagag

SEQ ID NO: 1362823 - DNA, 25 bp, Homo sapien
agagagatagcagcagttttcccct

SEQ ID NO: 1362824 - DNA, 25 bp, Homo sapien
ctacaactccacagaagagagatag

SEQ ID NO: 1362825 - DNA, 25 bp, Homo sapien
caactccacagaagagagatagcag

SEQ ID NO: 1362826 - DNA, 25 bp, Homo sapien
aagctgtaaagacggttagtgggct

SEQ ID NO: 1362827 - DNA, 25 bp, Homo sapien
tgtaaagacggttagtgggctgagc

SEQ ID NO: 1362828 - DNA, 25 bp, Homo sapien
taaagacggttagtgggctgagctc

SEQ ID NO: 1362829 - DNA, 25 bp, Homo sapien
tcaagctgtaaagacggttagtggg

SEQ ID NO: 1362830 - DNA, 25 bp, Homo sapien
cgaaagctattagggtgactgtgga

SEQ ID NO: 1362831 - DNA, 25 bp, Homo sapien
gggtcccagtgtgataactgaccca

SEQ ID NO: 1362832 - DNA, 25 bp, Homo sapien
ccaggcccagatggcaaacgaaagc

SEQ ID NO: 1362833 - DNA, 25 bp, Homo sapien
cagtgtgataactgacccaggccca

SEQ ID NO: 1362834 - DNA, 25 bp, Homo sapien
tcctttgggtgcagtaaaatggccc

SEQ ID NO: 1362835 - DNA, 25 bp, Homo sapien
tgcactagccccattgaaaggtaga

SEQ ID NO: 1362836 - DNA, 25 bp, Homo sapien
gattgacggttcatgctcgaagaaa

SEQ ID NO: 1362837 - DNA, 25 bp, Homo sapien
taaattgaagataaccaagcacctg

SEQ ID NO: 1362838 - DNA, 25 bp, Homo sapien
gaagcacttttaacactgatccaca

SEQ ID NO: 1362839 - DNA, 25 bp, Homo sapien
taatgggtgcttggattgaaactcg

SEQ ID NO: 1362840 - DNA, 25 bp, Homo sapien
gatgagatgcacgtatgccgtgtgt

SEQ ID NO: 1362841 - DNA, 25 bp, Homo sapien
cttcagagtcgctttcaggcctcca

SEQ ID NO: 1362842 - DNA, 25 bp, Homo sapien
tgtctgcctagagttaagccttgtc

SEQ ID NO: 1362843 - DNA, 25 bp, Homo sapien
tgtaatgttcatccaagcaagctac

SEQ ID NO: 1362844 - DNA, 25 bp, Homo sapien
gcaagctacacgtttgtggcagatt

SEQ ID NO: 1362845 - DNA, 25 bp, Homo sapien
ggaccagcctgtggagaacattttg

SEQ ID NO: 1362846 - DNA, 25 bp, Homo sapien
caacagctggcaggtattgaatacc

SEQ ID NO: 1362847 - DNA, 25 bp, Homo sapien
caaagtaggtcagcaaaccctcgag

SEQ ID NO: 1362848 - DNA, 25 bp, Homo sapien
tggcagataacagctatggacactc

SEQ ID NO: 1362849 - DNA, 25 bp, Homo sapien
caggcactttgcataggctatcaca

SEQ ID NO: 1362850 - DNA, 25 bp, Homo sapien
ccaggagcgctgtgctcccagttca

SEQ ID NO: 1362851 - DNA, 25 bp, Homo sapien
gggagatacgttgtcttgcggtgcc

SEQ ID NO: 1362852 - DNA, 25 bp, Homo sapien
ccagttcaggttgactaaatgttct

SEQ ID NO: 1362853 - DNA, 25 bp, Homo sapien
ctttgactgattgcacaggagaggg

SEQ ID NO: 1362854 - DNA, 25 bp, Homo sapien
acattttgatgatgaagccataggc

SEQ ID NO: 1362855 - DNA, 25 bp, Homo sapien
cattttgatgatgaagccataggcc

SEQ ID NO: 1362856 - DNA, 25 bp, Homo sapien
taaccccgtgtagatattatgccgc

SEQ ID NO: 1362857 - DNA, 25 bp, Homo sapien
cacctgcagctaaccccgtgtagat

SEQ ID NO: 1362858 - DNA, 25 bp, Homo sapien
tgtagatattatgccgctcagggct

SEQ ID NO: 1362859 - DNA, 25 bp, Homo sapien
gatattatgccgctcagggctgagg

SEQ ID NO: 1362860 - DNA, 25 bp, Homo sapien
taaaagggcgctacctgtgtgagtt

SEQ ID NO: 1362861 - DNA, 25 bp, Homo sapien
tcatgccgaggaagtgaaaagccca

SEQ ID NO: 1362862 - DNA, 25 bp, Homo sapien
tggaggctggatccatcctggaata

SEQ ID NO: 1362863 - DNA, 25 bp, Homo sapien
gaaaagcccagacacatttggttca

SEQ ID NO: 1362864 - DNA, 25 bp, Homo sapien
gaggtttcctcagtccatacatggc

SEQ ID NO: 1362865 - DNA, 25 bp, Homo sapien
tgtacaattcctgcactgaccgaca

SEQ ID NO: 1362866 - DNA, 25 bp, Homo sapien
ggcagagagcattcactccccagaa

SEQ ID NO: 1362867 - DNA, 25 bp, Homo sapien
cattggcagacggtgtcatgctccc

SEQ ID NO: 1362868 - DNA, 25 bp, Homo sapien
cacagtctgaggatttgggagggtt

SEQ ID NO: 1362869 - DNA, 25 bp, Homo sapien
agtctgaggatttgggagggtttct

SEQ ID NO: 1362870 - DNA, 25 bp, Homo sapien
acagtctgaggatttgggagggttt

SEQ ID NO: 1362871 - DNA, 25 bp, Homo sapien
cagtctgaggatttgggagggtttc

SEQ ID NO: 1362872 - DNA, 25 bp, Homo sapien
caaagcaatcactctgcggctgggc

SEQ ID NO: 1362873 - DNA, 25 bp, Homo sapien
taggttctggccacagcgaagagaa

SEQ ID NO: 1362874 - DNA, 25 bp, Homo sapien
aatagtttggcgcttggtcagccgc

SEQ ID NO: 1362875 - DNA, 25 bp, Homo sapien
ggaagttactctgcctgactcctag

SEQ ID NO: 1362876 - DNA, 25 bp, Homo sapien
cctctccgcagaccccgagaggctc

SEQ ID NO: 1362877 - DNA, 25 bp, Homo sapien
gctggagtgtgcattggagaaaggc

SEQ ID NO: 1362878 - DNA, 25 bp, Homo sapien
gcctctccgcagaccccgagaggct

SEQ ID NO: 1362879 - DNA, 25 bp, Homo sapien
tggggctggagtgtgcattggagaa

SEQ ID NO: 1362880 - DNA, 25 bp, Homo sapien
gggcctgaagcgcagcagttctccc

SEQ ID NO: 1362881 - DNA, 25 bp, Homo sapien
cctgcacagctccattcagagtcaa

SEQ ID NO: 1362882 - DNA, 25 bp, Homo sapien
gggtcacagatagaagcccctgcac

SEQ ID NO: 1362883 - DNA, 25 bp, Homo sapien
gagtcaaagtccgtttccctgtagc

SEQ ID NO: 1362884 - DNA, 25 bp, Homo sapien
taaatacaaatcccaatccttatgg

SEQ ID NO: 1362885 - DNA, 25 bp, Homo sapien
cagaccatagcatttaataaaactc

SEQ ID NO: 1362886 - DNA, 25 bp, Homo sapien
ttcttttgtgtttcacttctatggg

SEQ ID NO: 1362887 - DNA, 25 bp, Homo sapien
tcacaggaaaccttattttgaatcc

SEQ ID NO: 1362888 - DNA, 25 bp, Homo sapien
gttacaactgacaagtggagtccat

SEQ ID NO: 1362889 - DNA, 25 bp, Homo sapien
agtcaacaccaaaaggtgggctctt

SEQ ID NO: 1362890 - DNA, 25 bp, Homo sapien
ttgtgagggtagctgttacaactga

SEQ ID NO: 1362891 - DNA, 25 bp, Homo sapien
caagtggagtccatgaaaagtcaac

SEQ ID NO: 1362892 - DNA, 25 bp, Homo sapien
ccaggctgcatttgaaaggaagggt

SEQ ID NO: 1362893 - DNA, 25 bp, Homo sapien
tgcatttgaaaggaagggtgttaat

SEQ ID NO: 1362894 - DNA, 25 bp, Homo sapien
gctgcatttgaaaggaagggtgtta

SEQ ID NO: 1362895 - DNA, 25 bp, Homo sapien
ggaggccaggctgcatttgaaagga

SEQ ID NO: 1362896 - DNA, 25 bp, Homo sapien
gcttcagaactcgtcctgctggctc

SEQ ID NO: 1362897 - DNA, 25 bp, Homo sapien
agctcccctctgtaatataagcaga

SEQ ID NO: 1362898 - DNA, 25 bp, Homo sapien
aataagaggcttcagaactcgtcct

SEQ ID NO: 1362899 - DNA, 25 bp, Homo sapien
ccagctcccctctgtaatataagca

SEQ ID NO: 1362900 - DNA, 25 bp, Homo sapien
tgacttcctccccaaagctaggtgg

SEQ ID NO: 1362901 - DNA, 25 bp, Homo sapien
ggaaagctcttgaagaacctggctt

SEQ ID NO: 1362902 - DNA, 25 bp, Homo sapien
tgccctcggagtagagcagaacatg

SEQ ID NO: 1362903 - DNA, 25 bp, Homo sapien
tggaggcacccatgaacgttgaggc

SEQ ID NO: 1362904 - DNA, 25 bp, Homo sapien
gccctctggggtccagggagttctc

SEQ ID NO: 1362905 - DNA, 25 bp, Homo sapien
gctgggccctctggggtccagggag

SEQ ID NO: 1362906 - DNA, 25 bp, Homo sapien
cctctggggtccagggagttctcac

SEQ ID NO: 1362907 - DNA, 25 bp, Homo sapien
cttgctgggccctctggggtccagg

SEQ ID NO: 1362908 - DNA, 25 bp, Homo sapien
tccctccctcggtcctgtcattggg

SEQ ID NO: 1362909 - DNA, 25 bp, Homo sapien
tgtcattggggcactttgaggacag

SEQ ID NO: 1362910 - DNA, 25 bp, Homo sapien
tggtcgttggaatgcttccccagag

SEQ ID NO: 1362911 - DNA, 25 bp, Homo sapien
gcagggatttggtccggcatgaccc

SEQ ID NO: 1362912 - DNA, 25 bp, Homo sapien
ttggagccagacttgccgacagcca

SEQ ID NO: 1362913 - DNA, 25 bp, Homo sapien
ccttggagccagacttgccgacagc

SEQ ID NO: 1362914 - DNA, 25 bp, Homo sapien
gacccttggagccagacttgccgac

SEQ ID NO: 1362915 - DNA, 25 bp, Homo sapien
ggagccagacttgccgacagccata

SEQ ID NO: 1362916 - DNA, 25 bp, Homo sapien
tctgctgcattttgtgtattctcat

SEQ ID NO: 1362917 - DNA, 25 bp, Homo sapien
attctgctgcattttgtgtattctc

SEQ ID NO: 1362918 - DNA, 25 bp, Homo sapien
gctgcattttgtgtattctcataca

SEQ ID NO: 1362919 - DNA, 25 bp, Homo sapien
gcattttgtgtattctcatacacca

SEQ ID NO: 1362920 - DNA, 25 bp, Homo sapien
cattgactaagtggacaagccaagc

SEQ ID NO: 1362921 - DNA, 25 bp, Homo sapien
gctgagcgcagaggagatgttcaat

SEQ ID NO: 1362922 - DNA, 25 bp, Homo sapien
cagtgtattctcaacgcttagcgca

SEQ ID NO: 1362923 - DNA, 25 bp, Homo sapien
aagctctagtggcttcctgtggcag

SEQ ID NO: 1362924 - DNA, 25 bp, Homo sapien
tatccatatagcagtaccacagtgt

SEQ ID NO: 1362925 - DNA, 25 bp, Homo sapien
gcttttggtgtcacttctaggaaac

SEQ ID NO: 1362926 - DNA, 25 bp, Homo sapien
tagtaaattatcatggcacccttgt

SEQ ID NO: 1362927 - DNA, 25 bp, Homo sapien
tccatgtggatatacacttatccca

SEQ ID NO: 1362928 - DNA, 25 bp, Homo sapien
ccaagacattaccactatgagactt

SEQ ID NO: 1362929 - DNA, 25 bp, Homo sapien
gacattaccactatgagactttggg

SEQ ID NO: 1362930 - DNA, 25 bp, Homo sapien
ccactatgagactttgggaaaggtt

SEQ ID NO: 1362931 - DNA, 25 bp, Homo sapien
tgagactttgggaaaggttgcttaa

SEQ ID NO: 1362932 - DNA, 25 bp, Homo sapien
cctgaaactggtgactgggaacact

SEQ ID NO: 1362933 - DNA, 25 bp, Homo sapien
taccgcaagtctctctagcaagctg

SEQ ID NO: 1362934 - DNA, 25 bp, Homo sapien
taaatgttgctttcggcatctggcc

SEQ ID NO: 1362935 - DNA, 25 bp, Homo sapien
tcaagtaaacccctagcagtcagga

SEQ ID NO: 1362936 - DNA, 25 bp, Homo sapien
cccaggctgcatgtacgttttctcc

SEQ ID NO: 1362937 - DNA, 25 bp, Homo sapien
tcccaatgcggaataaatcagacag

SEQ ID NO: 1362938 - DNA, 25 bp, Homo sapien
ccttgaaaaacatactgacggtcag

SEQ ID NO: 1362939 - DNA, 25 bp, Homo sapien
tgacggtcagggtatacagaacaca

SEQ ID NO: 1362940 - DNA, 25 bp, Homo sapien
tataaagagaatatccagctgacca

SEQ ID NO: 1362941 - DNA, 25 bp, Homo sapien
gtcctcataatgcaactagtcccct

SEQ ID NO: 1362942 - DNA, 25 bp, Homo sapien
ctagtccccttatgaaaagggcctg

SEQ ID NO: 1362943 - DNA, 25 bp, Homo sapien
catcagggaacttgctatgatctga

SEQ ID NO: 1362944 - DNA, 25 bp, Homo sapien
gagccaatatcgtaccgctgcacac

SEQ ID NO: 1362945 - DNA, 25 bp, Homo sapien
tatcgtaccgctgcacacaagcctg

SEQ ID NO: 1362946 - DNA, 25 bp, Homo sapien
gccaatatcgtaccgctgcacacaa

SEQ ID NO: 1362947 - DNA, 25 bp, Homo sapien
aatatcgtaccgctgcacacaagcc

SEQ ID NO: 1362948 - DNA, 25 bp, Homo sapien
aagtgctctgtgttgacaagggact

SEQ ID NO: 1362949 - DNA, 25 bp, Homo sapien
tctgtgttgacaagggacttgtcca

SEQ ID NO: 1362950 - DNA, 25 bp, Homo sapien
gaaagtgctctgtgttgacaaggga

SEQ ID NO: 1362951 - DNA, 25 bp, Homo sapien
tgctctgtgttgacaagggacttgt

SEQ ID NO: 1362952 - DNA, 25 bp, Homo sapien
tcaggaaagggttggacaggtgaca

SEQ ID NO: 1362953 - DNA, 25 bp, Homo sapien
caggaaagggttggacaggtgacac

SEQ ID NO: 1362954 - DNA, 25 bp, Homo sapien
gctcaacaccgccttacagaagatg

SEQ ID NO: 1362955 - DNA, 25 bp, Homo sapien
gagctttcgtatctgtttaggcagc

SEQ ID NO: 1362956 - DNA, 25 bp, Homo sapien
ccaagttggttttcgtgtcggagct

SEQ ID NO: 1362957 - DNA, 25 bp, Homo sapien
cctgaggatcttatccaagttggtt

SEQ ID NO: 1362958 - DNA, 25 bp, Homo sapien
ccgcaagcctcctgacctgagcagg

SEQ ID NO: 1362959 - DNA, 25 bp, Homo sapien
tgagcaggctgagtcagggacaggc

SEQ ID NO: 1362960 - DNA, 25 bp, Homo sapien
ttccgcaagcctcctgacctgagca

SEQ ID NO: 1362961 - DNA, 25 bp, Homo sapien
caagcctcctgacctgagcaggctg

SEQ ID NO: 1362962 - DNA, 25 bp, Homo sapien
ttgttctagttacgtaagcagccaa

SEQ ID NO: 1362963 - DNA, 25 bp, Homo sapien
attgttctagttacgtaagcagcca

SEQ ID NO: 1362964 - DNA, 25 bp, Homo sapien
aattgttctagttacgtaagcagcc

SEQ ID NO: 1362965 - DNA, 25 bp, Homo sapien
ggagagcgccccttgggcaaggtgg

SEQ ID NO: 1362966 - DNA, 25 bp, Homo sapien
aggtgggggcacttccctgactccg

SEQ ID NO: 1362967 - DNA, 25 bp, Homo sapien
tgactccgcccaatgctggttctgc

SEQ ID NO: 1362968 - DNA, 25 bp, Homo sapien
gcaaggtgggggcacttccctgact

SEQ ID NO: 1362969 - DNA, 25 bp, Homo sapien
gggtggccttgagatctacatgctc

SEQ ID NO: 1362970 - DNA, 25 bp, Homo sapien
tgagatctacatgctcctttgagtg

SEQ ID NO: 1362971 - DNA, 25 bp, Homo sapien
taaagggctgatcgttctgagagga

SEQ ID NO: 1362972 - DNA, 25 bp, Homo sapien
tcctttgagtgtaaagggctgatcg

SEQ ID NO: 1362973 - DNA, 25 bp, Homo sapien
ttctggcacagccacgtttcagtga

SEQ ID NO: 1362974 - DNA, 25 bp, Homo sapien
cagtctgaatctggaaaactcttct

SEQ ID NO: 1362975 - DNA, 25 bp, Homo sapien
acgtttcagtgagtaggcccaccct

SEQ ID NO: 1362976 - DNA, 25 bp, Homo sapien
ccctgcatcagtctgaatctggaaa

SEQ ID NO: 1362977 - DNA, 25 bp, Homo sapien
tgggatggccttgggatccacgtgg

SEQ ID NO: 1362978 - DNA, 25 bp, Homo sapien
ttcacctgtgttgcatcagcagcgt

SEQ ID NO: 1362979 - DNA, 25 bp, Homo sapien
gggaaggtgctcttcacctgtgttg

SEQ ID NO: 1362980 - DNA, 25 bp, Homo sapien
ggtgctcttcacctgtgttgcatca

SEQ ID NO: 1362981 - DNA, 25 bp, Homo sapien
atgcacgaagttgtcctaagcagtg

SEQ ID NO: 1362982 - DNA, 25 bp, Homo sapien
tgttaaccacagcattctcccttac

SEQ ID NO: 1362983 - DNA, 25 bp, Homo sapien
tcctgttaaccacagcattctccct

SEQ ID NO: 1362984 - DNA, 25 bp, Homo sapien
cctgttaaccacagcattctccctt

SEQ ID NO: 1362985 - DNA, 25 bp, Homo sapien
ctgttaaccacagcattctccctta

SEQ ID NO: 1362986 - DNA, 25 bp, Homo sapien
tcagatgcctgattcctgactaggg

SEQ ID NO: 1362987 - DNA, 25 bp, Homo sapien
gggacgtctattgggcggtcaccac

SEQ ID NO: 1362988 - DNA, 25 bp, Homo sapien
ccctgccagggacagtatcttctgg

SEQ ID NO: 1362989 - DNA, 25 bp, Homo sapien
ccaaaagaagtgtgtgggacgtcta

SEQ ID NO: 1362990 - DNA, 25 bp, Homo sapien
ggcagaacatcccattctgcacaaa

SEQ ID NO: 1362991 - DNA, 25 bp, Homo sapien
tctgcacaaaaatattgcgtttctc

SEQ ID NO: 1362992 - DNA, 25 bp, Homo sapien
taaatttcaaagcatgggacaaagg

SEQ ID NO: 1362993 - DNA, 25 bp, Homo sapien
aagcatgggacaaaggcagaacatc

SEQ ID NO: 1362994 - DNA, 25 bp, Homo sapien
tcttgccatctttatcactgtgtgc

SEQ ID NO: 1362995 - DNA, 25 bp, Homo sapien
cttgccatctttatcactgtgtgct

SEQ ID NO: 1362996 - DNA, 25 bp, Homo sapien
ttgccatctttatcactgtgtgctc

SEQ ID NO: 1362997 - DNA, 25 bp, Homo sapien
tgccatctttatcactgtgtgctca

SEQ ID NO: 1362998 - DNA, 25 bp, Homo sapien
ctcaggattgtccttccagaacagg

SEQ ID NO: 1362999 - DNA, 25 bp, Homo sapien
aggattgtccttccagaacaggatg

SEQ ID NO: 1363000 - DNA, 25 bp, Homo sapien
ttgtccttccagaacaggatgtagg

SEQ ID NO: 1363001 - DNA, 25 bp, Homo sapien
gattgtccttccagaacaggatgta

SEQ ID NO: 1363002 - DNA, 25 bp, Homo sapien
tctggagagagttaaaagtgtctta

SEQ ID NO: 1363003 - DNA, 25 bp, Homo sapien
tatagatttgcccatattagaccta

SEQ ID NO: 1363004 - DNA, 25 bp, Homo sapien
gatttgcccatattagacctaaaaa

SEQ ID NO: 1363005 - DNA, 25 bp, Homo sapien
ggctttgctatgaggatctctggct

SEQ ID NO: 1363006 - DNA, 25 bp, Homo sapien
cttgttgccaagaatgggtcatgta

SEQ ID NO: 1363007 - DNA, 25 bp, Homo sapien
cctgtgtccgaactgaatatcagca

SEQ ID NO: 1363008 - DNA, 25 bp, Homo sapien
gcaatgtcttgttgccaagaatggg

SEQ ID NO: 1363009 - DNA, 25 bp, Homo sapien
ggaaaattcctgtgtccgaactgaa

SEQ ID NO: 1363010 - DNA, 25 bp, Homo sapien
tccctcgatgacaaaatgagagctt

SEQ ID NO: 1363011 - DNA, 25 bp, Homo sapien
tatcatccagcaatacaaggtgtcc

SEQ ID NO: 1363012 - DNA, 25 bp, Homo sapien
ttcctacacagcagtgaatctctca

SEQ ID NO: 1363013 - DNA, 25 bp, Homo sapien
tcaggctacatggtcaccgaagatc

SEQ ID NO: 1363014 - DNA, 25 bp, Homo sapien
atcaacattgccaccatggcagcct

SEQ ID NO: 1363015 - DNA, 25 bp, Homo sapien
cagtgagacgcaggcccagatcctt

SEQ ID NO: 1363016 - DNA, 25 bp, Homo sapien
gatccttcacacaggggagcgagaa

SEQ ID NO: 1363017 - DNA, 25 bp, Homo sapien
ccagatccttcacacaggggagcga

SEQ ID NO: 1363018 - DNA, 25 bp, Homo sapien
tgggtgggccaaattcccacgaggc

SEQ ID NO: 1363019 - DNA, 25 bp, Homo sapien
tcctgggcatcagccggccttccag

SEQ ID NO: 1363020 - DNA, 25 bp, Homo sapien
gctctgggccggctggtaaaatgaa

SEQ ID NO: 1363021 - DNA, 25 bp, Homo sapien
cagcggtgggtgggccaaattccca

SEQ ID NO: 1363022 - DNA, 25 bp, Homo sapien
tccctaggactatcagccagcatct

SEQ ID NO: 1363023 - DNA, 25 bp, Homo sapien
gaaactgatactccacccgcttgtt

SEQ ID NO: 1363024 - DNA, 25 bp, Homo sapien
tgaccccaggaaccatcctctttcc

SEQ ID NO: 1363025 - DNA, 25 bp, Homo sapien
cctgtagaaactgatactccacccg

SEQ ID NO: 1363026 - DNA, 25 bp, Homo sapien
ttagcatgtcatcactggcagccac

SEQ ID NO: 1363027 - DNA, 25 bp, Homo sapien
tagcatgtcatcactggcagccaca

SEQ ID NO: 1363028 - DNA, 25 bp, Homo sapien
tcatcactggcagccacactctgac

SEQ ID NO: 1363029 - DNA, 25 bp, Homo sapien
atgtcatcactggcagccacactct

SEQ ID NO: 1363030 - DNA, 25 bp, Homo sapien
gcagtaacttctgcactggttgaca

SEQ ID NO: 1363031 - DNA, 25 bp, Homo sapien
cctgcgagggatgcagctgtaatgt

SEQ ID NO: 1363032 - DNA, 25 bp, Homo sapien
tcctgagcaggttggttcctgcgag

SEQ ID NO: 1363033 - DNA, 25 bp, Homo sapien
gacattcaccgctttgaacatagaa

SEQ ID NO: 1363034 - DNA, 25 bp, Homo sapien
gcaccaacagtatgcagatgttctg

SEQ ID NO: 1363035 - DNA, 25 bp, Homo sapien
tgcaccaacagtatgcagatgttct

SEQ ID NO: 1363036 - DNA, 25 bp, Homo sapien
ctgcaccaacagtatgcagatgttc

SEQ ID NO: 1363037 - DNA, 25 bp, Homo sapien
acatttcaagtttagagcccagaaa

SEQ ID NO: 1363038 - DNA, 25 bp, Homo sapien
aataggcattggcaacaattctcag

SEQ ID NO: 1363039 - DNA, 25 bp, Homo sapien
aacatttcaagtttagagcccagaa

SEQ ID NO: 1363040 - DNA, 25 bp, Homo sapien
agtatgactcatgtcgcttttagac

SEQ ID NO: 1363041 - DNA, 25 bp, Homo sapien
tcatgtcgcttttagacaataaggc

SEQ ID NO: 1363042 - DNA, 25 bp, Homo sapien
gcttttagacaataaggcatttcca

SEQ ID NO: 1363043 - DNA, 25 bp, Homo sapien
gacaataaggcatttccatgggcca

SEQ ID NO: 1363044 - DNA, 25 bp, Homo sapien
caattcttatcaaaactccagcaag

SEQ ID NO: 1363045 - DNA, 25 bp, Homo sapien
tacagtcaactgatcgtcaatggag

SEQ ID NO: 1363046 - DNA, 25 bp, Homo sapien
atagccttttaaacagacagtgctg

SEQ ID NO: 1363047 - DNA, 25 bp, Homo sapien
tacttcatagcaacagacaatagag

SEQ ID NO: 1363048 - DNA, 25 bp, Homo sapien
ctgaatctgggaggacaagtaggat

SEQ ID NO: 1363049 - DNA, 25 bp, Homo sapien
gaagtgtgcacaccgggactgtctg

SEQ ID NO: 1363050 - DNA, 25 bp, Homo sapien
aagcagggaagtgtgcacaccggga

SEQ ID NO: 1363051 - DNA, 25 bp, Homo sapien
gacaagtaggatcgggcaggtaaga

SEQ ID NO: 1363052 - DNA, 25 bp, Homo sapien
tctaggcagacgactggaaggtgct

SEQ ID NO: 1363053 - DNA, 25 bp, Homo sapien
acaggcatcagcatcaacctcttga

SEQ ID NO: 1363054 - DNA, 25 bp, Homo sapien
tctctgacgtggatgacggtgacca

SEQ ID NO: 1363055 - DNA, 25 bp, Homo sapien
taaagatttggcatcgcaagcctgg

SEQ ID NO: 1363056 - DNA, 25 bp, Homo sapien
ccacacagctagtaactaggagaac

SEQ ID NO: 1363057 - DNA, 25 bp, Homo sapien
catttaggaaatacctacagagcat

SEQ ID NO: 1363058 - DNA, 25 bp, Homo sapien
gccttgctcactttagctcatcaga

SEQ ID NO: 1363059 - DNA, 25 bp, Homo sapien
gcctactgtgtgaagtatttgttca

SEQ ID NO: 1363060 - DNA, 25 bp, Homo sapien
cactggcggagttcacagaaacagc

SEQ ID NO: 1363061 - DNA, 25 bp, Homo sapien
cactgcgccttcaagagggtggaca

SEQ ID NO: 1363062 - DNA, 25 bp, Homo sapien
gcaaaaatagatccaaaggcctctg

SEQ ID NO: 1363063 - DNA, 25 bp, Homo sapien
aagagttagtgagacaagatacatc

SEQ ID NO: 1363064 - DNA, 25 bp, Homo sapien
atggatgctattgccccttgcaggg

SEQ ID NO: 1363065 - DNA, 25 bp, Homo sapien
taggatgagcaacagggctggcaca

SEQ ID NO: 1363066 - DNA, 25 bp, Homo sapien
gggttaggatgagcaacagggctgg

SEQ ID NO: 1363067 - DNA, 25 bp, Homo sapien
gaaatggatgctattgccccttgca

SEQ ID NO: 1363068 - DNA, 25 bp, Homo sapien
ttcagcttcagcatatgaggcgtct

SEQ ID NO: 1363069 - DNA, 25 bp, Homo sapien
tcccaactaattctgtttccctgag

SEQ ID NO: 1363070 - DNA, 25 bp, Homo sapien
tccctgagctgtgcttcaccaatat

SEQ ID NO: 1363071 - DNA, 25 bp, Homo sapien
ctatcccctgattcacaaagtgact

SEQ ID NO: 1363072 - DNA, 25 bp, Homo sapien
gactcaggccgggttctgtcagttg

SEQ ID NO: 1363073 - DNA, 25 bp, Homo sapien
cctgcctggttgcaggttggtggga

SEQ ID NO: 1363074 - DNA, 25 bp, Homo sapien
cctcattgccctgcccaccatgaca

SEQ ID NO: 1363075 - DNA, 25 bp, Homo sapien
tgtttgtgccacctctgcatccttg

SEQ ID NO: 1363076 - DNA, 25 bp, Homo sapien
cctggctttgttctggaagctctcc

SEQ ID NO: 1363077 - DNA, 25 bp, Homo sapien
tttgttctggaagctctccagcttc

SEQ ID NO: 1363078 - DNA, 25 bp, Homo sapien
ccagcttctccacaaagcccttatg

SEQ ID NO: 1363079 - DNA, 25 bp, Homo sapien
tccagcttctccacaaagcccttat

SEQ ID NO: 1363080 - DNA, 25 bp, Homo sapien
cacagttaacccatctatgttgctg

SEQ ID NO: 1363081 - DNA, 25 bp, Homo sapien
ctgtctctcattggccttgccccag

SEQ ID NO: 1363082 - DNA, 25 bp, Homo sapien
ctgccacgatcaagagcccctctct

SEQ ID NO: 1363083 - DNA, 25 bp, Homo sapien
caacttttcagtagcaagcctggac

SEQ ID NO: 1363084 - DNA, 25 bp, Homo sapien
attcctctaccccttgcttccatga

SEQ ID NO: 1363085 - DNA, 25 bp, Homo sapien
tctgttcatagttcctccaatgaga

SEQ ID NO: 1363086 - DNA, 25 bp, Homo sapien
atgagacttctcatatccctgaaga

SEQ ID NO: 1363087 - DNA, 25 bp, Homo sapien
ttcatagttcctccaatgagacttc

SEQ ID NO: 1363088 - DNA, 25 bp, Homo sapien
tgataagtttgagctagtagatctt

SEQ ID NO: 1363089 - DNA, 25 bp, Homo sapien
ttcgtgggaccagctcagaaacagg

SEQ ID NO: 1363090 - DNA, 25 bp, Homo sapien
aaacagggctgtgataagtttgagc

SEQ ID NO: 1363091 - DNA, 25 bp, Homo sapien
acaaaaactctattcgtgggaccag

SEQ ID NO: 1363092 - DNA, 25 bp, Homo sapien
aagaataagacttggccctcatctt

SEQ ID NO: 1363093 - DNA, 25 bp, Homo sapien
tgtgcaaccattattcttctgctag

SEQ ID NO: 1363094 - DNA, 25 bp, Homo sapien
cttctttgtgtgcaagagcctgttc

SEQ ID NO: 1363095 - DNA, 25 bp, Homo sapien
gaaggatgcaaatacatcatgtctc

SEQ ID NO: 1363096 - DNA, 25 bp, Homo sapien
agtggcccggacaacatcaaggttc

SEQ ID NO: 1363097 - DNA, 25 bp, Homo sapien
gaatctccagtttggcacggctcag

SEQ ID NO: 1363098 - DNA, 25 bp, Homo sapien
catagagcgaaggtgaagaatctcc

SEQ ID NO: 1363099 - DNA, 25 bp, Homo sapien
gaggcgccatttccacgtttgcagg

SEQ ID NO: 1363100 - DNA, 25 bp, Homo sapien
actggcacgggtcccattactccct

SEQ ID NO: 1363101 - DNA, 25 bp, Homo sapien
caggacaaagccctggccttagtgg

SEQ ID NO: 1363102 - DNA, 25 bp, Homo sapien
gtactttatatcactggcacgggtc

SEQ ID NO: 1363103 - DNA, 25 bp, Homo sapien
tggccttagtggaaaatgagtactt

SEQ ID NO: 1363104 - DNA, 25 bp, Homo sapien
agagccatttaaccaagtccctcgg

SEQ ID NO: 1363105 - DNA, 25 bp, Homo sapien
agtccctcggcaaagagcatgtctg

SEQ ID NO: 1363106 - DNA, 25 bp, Homo sapien
gacaaagggagtggcctcgtccctg

SEQ ID NO: 1363107 - DNA, 25 bp, Homo sapien
gtggcctcgtccctgggctgcagtc

SEQ ID NO: 1363108 - DNA, 25 bp, Homo sapien
gcaagaaattgctgaccggaggaat

SEQ ID NO: 1363109 - DNA, 25 bp, Homo sapien
taagacccgtcttcctaaatggaga

SEQ ID NO: 1363110 - DNA, 25 bp, Homo sapien
ttagcctaaccgcaagagattcatg

SEQ ID NO: 1363111 - DNA, 25 bp, Homo sapien
tcttggtaacaaacgcagtgcctag

SEQ ID NO: 1363112 - DNA, 25 bp, Homo sapien
catgtttggaacataggtctgggcc

SEQ ID NO: 1363113 - DNA, 25 bp, Homo sapien
tttggccagtaaccacaaggacagg

SEQ ID NO: 1363114 - DNA, 25 bp, Homo sapien
ggaacactgtggttaacctcagggc

SEQ ID NO: 1363115 - DNA, 25 bp, Homo sapien
catcagcgatgacacagggaaagcg

SEQ ID NO: 1363116 - DNA, 25 bp, Homo sapien
tcatgaatgcacaaactcctgagaa

SEQ ID NO: 1363117 - DNA, 25 bp, Homo sapien
tctcacaacttcatggcaggccaca

SEQ ID NO: 1363118 - DNA, 25 bp, Homo sapien
caggccacaattttgtcttacacca

SEQ ID NO: 1363119 - DNA, 25 bp, Homo sapien
ttacaccatattgtcacaggaagaa

SEQ ID NO: 1363120 - DNA, 25 bp, Homo sapien
ctgcggagactcaagaacaggacac

SEQ ID NO: 1363121 - DNA, 25 bp, Homo sapien
caaacaggaaaatcccaatgagacc

SEQ ID NO: 1363122 - DNA, 25 bp, Homo sapien
ggaaaatcccaatgagaccatggat

SEQ ID NO: 1363123 - DNA, 25 bp, Homo sapien
ggagactcaagaacaggacacagac

SEQ ID NO: 1363124 - DNA, 25 bp, Homo sapien
tctctctgtcctaccatctgtcctc

SEQ ID NO: 1363125 - DNA, 25 bp, Homo sapien
aaatgccatcaaaatctagtgtaca

SEQ ID NO: 1363126 - DNA, 25 bp, Homo sapien
agaagaacacgagaacacagatgct

SEQ ID NO: 1363127 - DNA, 25 bp, Homo sapien
caagaagaacacgagaacacagatg

SEQ ID NO: 1363128 - DNA, 25 bp, Homo sapien
tatgttgactgcctgtctgggtaga

SEQ ID NO: 1363129 - DNA, 25 bp, Homo sapien
tacagtaagccccagggtatgttga

SEQ ID NO: 1363130 - DNA, 25 bp, Homo sapien
cgcagatggtgaggcgagcccagct

SEQ ID NO: 1363131 - DNA, 25 bp, Homo sapien
tggatgatgggttggccgcagatgg

SEQ ID NO: 1363132 - DNA, 25 bp, Homo sapien
caccccatgacaggctcccatgtgt

SEQ ID NO: 1363133 - DNA, 25 bp, Homo sapien
cttaatccatgtctctacagaggac

SEQ ID NO: 1363134 - DNA, 25 bp, Homo sapien
cagcttaatccatgtctctacagag

SEQ ID NO: 1363135 - DNA, 25 bp, Homo sapien
ccccatgacaggctcccatgtgtga

SEQ ID NO: 1363136 - DNA, 25 bp, Homo sapien
tcttgttctctgagctgggccagag

SEQ ID NO: 1363137 - DNA, 25 bp, Homo sapien
gtagagccatgatctggctgtctct

SEQ ID NO: 1363138 - DNA, 25 bp, Homo sapien
gcttgagctataagatcttgttctc

SEQ ID NO: 1363139 - DNA, 25 bp, Homo sapien
gaatttggaattggggtagagccat

SEQ ID NO: 1363140 - DNA, 25 bp, Homo sapien
ctggtgaaggtcagcatgcagggag

SEQ ID NO: 1363141 - DNA, 25 bp, Homo sapien
tggtgaaggtcagcatgcagggaga

SEQ ID NO: 1363142 - DNA, 25 bp, Homo sapien
gaaggtcagcatgcagggagagaag

SEQ ID NO: 1363143 - DNA, 25 bp, Homo sapien
gtgaaggtcagcatgcagggagaga

SEQ ID NO: 1363144 - DNA, 25 bp, Homo sapien
tggggagattttctacagcacacac

SEQ ID NO: 1363145 - DNA, 25 bp, Homo sapien
tgatctaaaacacatgtgcctggag

SEQ ID NO: 1363146 - DNA, 25 bp, Homo sapien
cacatgtgcctggagatccagtgct

SEQ ID NO: 1363147 - DNA, 25 bp, Homo sapien
tgcctggagatccagtgctggagct

SEQ ID NO: 1363148 - DNA, 25 bp, Homo sapien
accacaggctcctccggtgtctggt

SEQ ID NO: 1363149 - DNA, 25 bp, Homo sapien
tccaggagggactgataaaccacag

SEQ ID NO: 1363150 - DNA, 25 bp, Homo sapien
gcaaagcctgcagatccctaagcat

SEQ ID NO: 1363151 - DNA, 25 bp, Homo sapien
cgactgcccgcagcctgatactggg

SEQ ID NO: 1363152 - DNA, 25 bp, Homo sapien
caaacttgagacctttgggcttcct

SEQ ID NO: 1363153 - DNA, 25 bp, Homo sapien
acaacattctgcaggcttctcaaga

SEQ ID NO: 1363154 - DNA, 25 bp, Homo sapien
tgggcttcctcgaaaaagacctatc

SEQ ID NO: 1363155 - DNA, 25 bp, Homo sapien
tttccaaacagcgatcaaacttgag

SEQ ID NO: 1363156 - DNA, 25 bp, Homo sapien
cactgatgctctgatgtgctcatca

SEQ ID NO: 1363157 - DNA, 25 bp, Homo sapien
tctgcaatctcatatgccctggggt

SEQ ID NO: 1363158 - DNA, 25 bp, Homo sapien
aagccactgatgctctgatgtgctc

SEQ ID NO: 1363159 - DNA, 25 bp, Homo sapien
ttacactagctcgaaagccactgat

SEQ ID NO: 1363160 - DNA, 25 bp, Homo sapien
ttccttgcaggcatatacttttgca

SEQ ID NO: 1363161 - DNA, 25 bp, Homo sapien
tgcaggcatatacttttgcaatttg

SEQ ID NO: 1363162 - DNA, 25 bp, Homo sapien
ttgtttctgtccttcagtgacatca

SEQ ID NO: 1363163 - DNA, 25 bp, Homo sapien
tgcaatttgtttctgtccttcagtg

SEQ ID NO: 1363164 - DNA, 25 bp, Homo sapien
tgctgcttggaattcacccttcagc

SEQ ID NO: 1363165 - DNA, 25 bp, Homo sapien
tgtgctgggctgatagagagattcc

SEQ ID NO: 1363166 - DNA, 25 bp, Homo sapien
tgggctgatagagagattccaaaga

SEQ ID NO: 1363167 - DNA, 25 bp, Homo sapien
ttctgctgcttggaattcacccttc

SEQ ID NO: 1363168 - DNA, 25 bp, Homo sapien
cagtctgtgcaacgaaattcagagc

SEQ ID NO: 1363169 - DNA, 25 bp, Homo sapien
ttcattgcccacatctactagcagg

SEQ ID NO: 1363170 - DNA, 25 bp, Homo sapien
caaaacacacgcacaattctggcaa

SEQ ID NO: 1363171 - DNA, 25 bp, Homo sapien
cacaattctggcaagtgttcattgc

SEQ ID NO: 1363172 - DNA, 25 bp, Homo sapien
tccccatgtgtagatcttagcagtc

SEQ ID NO: 1363173 - DNA, 25 bp, Homo sapien
gaacgacaggcaaacactttagcag

SEQ ID NO: 1363174 - DNA, 25 bp, Homo sapien
gacaatttcctagtgactgtggccc

SEQ ID NO: 1363175 - DNA, 25 bp, Homo sapien
tgtccacatcacaagaactagcagg

SEQ ID NO: 1363176 - DNA, 25 bp, Homo sapien
tattcctgcgggaaacactcagtgc

SEQ ID NO: 1363177 - DNA, 25 bp, Homo sapien
aagacacattatgttcaggcaaggg

SEQ ID NO: 1363178 - DNA, 25 bp, Homo sapien
ggttttaggcccagcacagtcagat

SEQ ID NO: 1363179 - DNA, 25 bp, Homo sapien
gaatttccaaaagcgtaatatgggc

SEQ ID NO: 1363180 - DNA, 25 bp, Homo sapien
ggtaaacttgggtgaacagcaggta

SEQ ID NO: 1363181 - DNA, 25 bp, Homo sapien
tgatccatcatctgactggatccgt

SEQ ID NO: 1363182 - DNA, 25 bp, Homo sapien
taaaagccgaacagctgatccatca

SEQ ID NO: 1363183 - DNA, 25 bp, Homo sapien
ggatccgtaactgttcttctgcatc

SEQ ID NO: 1363184 - DNA, 25 bp, Homo sapien
tccagcccccttgccgggcactcca

SEQ ID NO: 1363185 - DNA, 25 bp, Homo sapien
cttgccgggcactccacttgaccat

SEQ ID NO: 1363186 - DNA, 25 bp, Homo sapien
ccccttgccgggcactccacttgac

SEQ ID NO: 1363187 - DNA, 25 bp, Homo sapien
gcccccttgccgggcactccacttg

SEQ ID NO: 1363188 - DNA, 25 bp, Homo sapien
taaaattctccaagcagtgtcaagc

SEQ ID NO: 1363189 - DNA, 25 bp, Homo sapien
caacttcccagttacaccatcttgg

SEQ ID NO: 1363190 - DNA, 25 bp, Homo sapien
tacaggcaaagcatgaccttccggg

SEQ ID NO: 1363191 - DNA, 25 bp, Homo sapien
cagtacaaaacattaggcacagcat

SEQ ID NO: 1363192 - DNA, 25 bp, Homo sapien
ctgaactgtgttattggtccatggg

SEQ ID NO: 1363193 - DNA, 25 bp, Homo sapien
ttgtctgaactgtgttattggtcca

SEQ ID NO: 1363194 - DNA, 25 bp, Homo sapien
gtctgaactgtgttattggtccatg

SEQ ID NO: 1363195 - DNA, 25 bp, Homo sapien
ctttgtctgaactgtgttattggtc

SEQ ID NO: 1363196 - DNA, 25 bp, Homo sapien
cgttcctcagaacatgcaagagaga

SEQ ID NO: 1363197 - DNA, 25 bp, Homo sapien
cacacacgggtactttggtcaaatc

SEQ ID NO: 1363198 - DNA, 25 bp, Homo sapien
gtctaccgttcctcagaacatgcaa

SEQ ID NO: 1363199 - DNA, 25 bp, Homo sapien
ccatatctaaccacaggatattttt

SEQ ID NO: 1363200 - DNA, 25 bp, Homo sapien
gtctcagagtgccagcaagtgcttc

SEQ ID NO: 1363201 - DNA, 25 bp, Homo sapien
cttgaggttgttcataggaaggctc

SEQ ID NO: 1363202 - DNA, 25 bp, Homo sapien
tcaagactggtactcagagtgtctc

SEQ ID NO: 1363203 - DNA, 25 bp, Homo sapien
gaggcatcccagacacaggtagaaa

SEQ ID NO: 1363204 - DNA, 25 bp, Homo sapien
tccagtctgaggtacaagcccccat

SEQ ID NO: 1363205 - DNA, 25 bp, Homo sapien
tctgaggtacaagcccccatggctg

SEQ ID NO: 1363206 - DNA, 25 bp, Homo sapien
taactgactcttgtaaggtgagccc

SEQ ID NO: 1363207 - DNA, 25 bp, Homo sapien
cactggagcctctgataactgactc

SEQ ID NO: 1363208 - DNA, 25 bp, Homo sapien
gacgagaaattgctccatcagagtc

SEQ ID NO: 1363209 - DNA, 25 bp, Homo sapien
gggacgagaaattgctccatcagag

SEQ ID NO: 1363210 - DNA, 25 bp, Homo sapien
acgagaaattgctccatcagagtct

SEQ ID NO: 1363211 - DNA, 25 bp, Homo sapien
ctgggacgagaaattgctccatcag

SEQ ID NO: 1363212 - DNA, 25 bp, Homo sapien
aatatctggataccctatggctgac

SEQ ID NO: 1363213 - DNA, 25 bp, Homo sapien
gatgaggcccacatacattagagag

SEQ ID NO: 1363214 - DNA, 25 bp, Homo sapien
aggtcccacccatatctgaagaagg

SEQ ID NO: 1363215 - DNA, 25 bp, Homo sapien
accactaggatgctgtagacggaca

SEQ ID NO: 1363216 - DNA, 25 bp, Homo sapien
tagttttaccctagatataagctag

SEQ ID NO: 1363217 - DNA, 25 bp, Homo sapien
gcctctggaggtttgctgaaagtgc

SEQ ID NO: 1363218 - DNA, 25 bp, Homo sapien
aattactaattcatcgtcagctgca

SEQ ID NO: 1363219 - DNA, 25 bp, Homo sapien
gaaacattttgcttgagataaacct

SEQ ID NO: 1363220 - DNA, 25 bp, Homo sapien
tctttcctccagtcaggtttctacc

SEQ ID NO: 1363221 - DNA, 25 bp, Homo sapien
gatctttcctccagtcaggtttcta

SEQ ID NO: 1363222 - DNA, 25 bp, Homo sapien
ccagatctttcctccagtcaggttt

SEQ ID NO: 1363223 - DNA, 25 bp, Homo sapien
cagatctttcctccagtcaggtttc

SEQ ID NO: 1363224 - DNA, 25 bp, Homo sapien
cagtggacactaccatttcaattgc

SEQ ID NO: 1363225 - DNA, 25 bp, Homo sapien
tttcaattgcgaagtcaggcaatga

SEQ ID NO: 1363226 - DNA, 25 bp, Homo sapien
caccagtcgcttcagtggacactac

SEQ ID NO: 1363227 - DNA, 25 bp, Homo sapien
ctggaaaactatgccaccagtcgct

SEQ ID NO: 1363228 - DNA, 25 bp, Homo sapien
ctgtttgctatgtggaatacgccac

SEQ ID NO: 1363229 - DNA, 25 bp, Homo sapien
gcccaaggtcgtggcggcgccggct

SEQ ID NO: 1363230 - DNA, 25 bp, Homo sapien
tacactgttgctcggccctcaggaa

SEQ ID NO: 1363231 - DNA, 25 bp, Homo sapien
aatacgccactacactgttgctcgg

SEQ ID NO: 1363232 - DNA, 25 bp, Homo sapien
gcagggaagcgtctgagcctcttcc

SEQ ID NO: 1363233 - DNA, 25 bp, Homo sapien
cgaggtggttgaggcgagagggcag

SEQ ID NO: 1363234 - DNA, 25 bp, Homo sapien
agagggcagggaagcgtctgagcct

SEQ ID NO: 1363235 - DNA, 25 bp, Homo sapien
gggagccgctgcctcgaggtggttg

SEQ ID NO: 1363236 - DNA, 25 bp, Homo sapien
cagtggaccgcagcgcccgcagtcg

SEQ ID NO: 1363237 - DNA, 25 bp, Homo sapien
aggcggacccagtggaccgcagcgc

SEQ ID NO: 1363238 - DNA, 25 bp, Homo sapien
aagaggcggacccagtggaccgcag

SEQ ID NO: 1363239 - DNA, 25 bp, Homo sapien
cccagtggaccgcagcgcccgcagt

SEQ ID NO: 1363240 - DNA, 25 bp, Homo sapien
gccacctggcggggaggaacctgga

SEQ ID NO: 1363241 - DNA, 25 bp, Homo sapien
tccctgccggacgcttccgcctttc

SEQ ID NO: 1363242 - DNA, 25 bp, Homo sapien
cgcttccgcctttcccgcgcctcgg

SEQ ID NO: 1363243 - DNA, 25 bp, Homo sapien
tgccggacgcttccgcctttcccgc

SEQ ID NO: 1363244 - DNA, 25 bp, Homo sapien
aaacttggggtcgtcctcaggtgca

SEQ ID NO: 1363245 - DNA, 25 bp, Homo sapien
ctccaggtaagcacttggcggcagg

SEQ ID NO: 1363246 - DNA, 25 bp, Homo sapien
ctcaggtgcacctccaggtaagcac

SEQ ID NO: 1363247 - DNA, 25 bp, Homo sapien
ttaacatccgctccgcgcagagcag

SEQ ID NO: 1363248 - DNA, 25 bp, Homo sapien
tgagtccacctgtttatcttctttt

SEQ ID NO: 1363249 - DNA, 25 bp, Homo sapien
tcggtttccaggttgagtccacctg

SEQ ID NO: 1363250 - DNA, 25 bp, Homo sapien
cggtttccaggttgagtccacctgt

SEQ ID NO: 1363251 - DNA, 25 bp, Homo sapien
ctcttcgagtagatttgggttcggt

SEQ ID NO: 1363252 - DNA, 25 bp, Homo sapien
aggccactttcacgaaatcatccat

SEQ ID NO: 1363253 - DNA, 25 bp, Homo sapien
ccagcgtgggtgacaaaggcagaac

SEQ ID NO: 1363254 - DNA, 25 bp, Homo sapien
tgtactccagcgtgggtgacaaagg

SEQ ID NO: 1363255 - DNA, 25 bp, Homo sapien
ttgcagtggcccatgatcgagccac

SEQ ID NO: 1363256 - DNA, 25 bp, Homo sapien
aggttgcagtggcccatgatcgagc

SEQ ID NO: 1363257 - DNA, 25 bp, Homo sapien
ttagagaggtttaggacttggccag

SEQ ID NO: 1363258 - DNA, 25 bp, Homo sapien
ttaggacttggccagtgttgcacac

SEQ ID NO: 1363259 - DNA, 25 bp, Homo sapien
cagtaccactcataggagatgaaac

SEQ ID NO: 1363260 - DNA, 25 bp, Homo sapien
tcttcactcattaaaacctcatcag

SEQ ID NO: 1363261 - DNA, 25 bp, Homo sapien
agcagcttctgcagtttatccactg

SEQ ID NO: 1363262 - DNA, 25 bp, Homo sapien
caattcccggttgctagatgagcta

SEQ ID NO: 1363263 - DNA, 25 bp, Homo sapien
gagctagttcactcatcctcagaaa

SEQ ID NO: 1363264 - DNA, 25 bp, Homo sapien
ccacttgactgttgacggcagaaac

SEQ ID NO: 1363265 - DNA, 25 bp, Homo sapien
caggcagtgctgctcgtcttgattt

SEQ ID NO: 1363266 - DNA, 25 bp, Homo sapien
taaaattgacagttgagcttttcca

SEQ ID NO: 1363267 - DNA, 25 bp, Homo sapien
aaatcacaaataaagccatcagcag

SEQ ID NO: 1363268 - DNA, 25 bp, Homo sapien
cagccactgtggacatttgccatcc

SEQ ID NO: 1363269 - DNA, 25 bp, Homo sapien
gctaactgaggccacagtgccaaga

SEQ ID NO: 1363270 - DNA, 25 bp, Homo sapien
tgccaagatcgtcagcaggctgcct

SEQ ID NO: 1363271 - DNA, 25 bp, Homo sapien
ttatcttgtcccttactggctccag

SEQ ID NO: 1363272 - DNA, 25 bp, Homo sapien
gtcatataagtaagaacagctgcca

SEQ ID NO: 1363273 - DNA, 25 bp, Homo sapien
aataggcctctttaggccgggtgca

SEQ ID NO: 1363274 - DNA, 25 bp, Homo sapien
atctgggatccaaagctaggaaata

SEQ ID NO: 1363275 - DNA, 25 bp, Homo sapien
tctgggatccaaagctaggaaataa

SEQ ID NO: 1363276 - DNA, 25 bp, Homo sapien
taggaggagcaggtacttcttccct

SEQ ID NO: 1363277 - DNA, 25 bp, Homo sapien
tgtggaaatattctccgcccgcaaa

SEQ ID NO: 1363278 - DNA, 25 bp, Homo sapien
cgcccgcaaactattcgtgatattg

SEQ ID NO: 1363279 - DNA, 25 bp, Homo sapien
tgtcgctgatactgctgggccttgt

SEQ ID NO: 1363280 - DNA, 25 bp, Homo sapien
agcagcatggtgcattgtccaggta

SEQ ID NO: 1363281 - DNA, 25 bp, Homo sapien
tctggtgtcttgacaaatacctgct

SEQ ID NO: 1363282 - DNA, 25 bp, Homo sapien
caggtacctgttccgatgctgctac

SEQ ID NO: 1363283 - DNA, 25 bp, Homo sapien
ggtgtcttgacaaatacctgctcca

SEQ ID NO: 1363284 - DNA, 25 bp, Homo sapien
gtctctacctcttgcctcaggaaca

SEQ ID NO: 1363285 - DNA, 25 bp, Homo sapien
aggtacgtctctacctcttgcctca

SEQ ID NO: 1363286 - DNA, 25 bp, Homo sapien
tacgtctctacctcttgcctcagga

SEQ ID NO: 1363287 - DNA, 25 bp, Homo sapien
tcaaccaggtacgtctctacctctt

SEQ ID NO: 1363288 - DNA, 25 bp, Homo sapien
gataagtgtaaagaggaggaaacca

SEQ ID NO: 1363289 - DNA, 25 bp, Homo sapien
ctggagttccttgccaaggataagt

SEQ ID NO: 1363290 - DNA, 25 bp, Homo sapien
tgcttctgatttgctcctttccacc

SEQ ID NO: 1363291 - DNA, 25 bp, Homo sapien
gagtggcgctcactaatagggacga

SEQ ID NO: 1363292 - DNA, 25 bp, Homo sapien
ccccaggggactggctgctttccct

SEQ ID NO: 1363293 - DNA, 25 bp, Homo sapien
gcagccccaggggactggctgcttt

SEQ ID NO: 1363294 - DNA, 25 bp, Homo sapien
agccccaggggactggctgctttcc

SEQ ID NO: 1363295 - DNA, 25 bp, Homo sapien
ctcccacctggctgcagccccaggg

SEQ ID NO: 1363296 - DNA, 25 bp, Homo sapien
gccagttttactgtaggtccaagga

SEQ ID NO: 1363297 - DNA, 25 bp, Homo sapien
tcctggtgaccggtgcattcctgaa

SEQ ID NO: 1363298 - DNA, 25 bp, Homo sapien
aactggtctgggacggttcctgcca

SEQ ID NO: 1363299 - DNA, 25 bp, Homo sapien
ggatgtatctggactcggatttcac

SEQ ID NO: 1363300 - DNA, 25 bp, Homo sapien
ttgaagagtcggcagaaacccaggt

SEQ ID NO: 1363301 - DNA, 25 bp, Homo sapien
aagagtcggcagaaacccaggttca

SEQ ID NO: 1363302 - DNA, 25 bp, Homo sapien
tcggcagaaacccaggttcacagtt

SEQ ID NO: 1363303 - DNA, 25 bp, Homo sapien
ttttgaagagtcggcagaaacccag

SEQ ID NO: 1363304 - DNA, 25 bp, Homo sapien
cagcagagccccgtaggcattgtgg

SEQ ID NO: 1363305 - DNA, 25 bp, Homo sapien
gggagtctcctaggcttgaatagga

SEQ ID NO: 1363306 - DNA, 25 bp, Homo sapien
ccccgtaggcattgtggaggtgctt

SEQ ID NO: 1363307 - DNA, 25 bp, Homo sapien
aaggtgcagagcttcgtggctcagc

SEQ ID NO: 1363308 - DNA, 25 bp, Homo sapien
gctgaaaatcgtgagtcctcctgaa

SEQ ID NO: 1363309 - DNA, 25 bp, Homo sapien
gcacaggctgaaaatcgtgagtcct

SEQ ID NO: 1363310 - DNA, 25 bp, Homo sapien
aaatcgtgagtcctcctgaaacttc

SEQ ID NO: 1363311 - DNA, 25 bp, Homo sapien
acttcctttcactgctcttgctcca

SEQ ID NO: 1363312 - DNA, 25 bp, Homo sapien
gctggtatgctcatgtctgtggctc

SEQ ID NO: 1363313 - DNA, 25 bp, Homo sapien
tggtatgctcatgtctgtggctcat

SEQ ID NO: 1363314 - DNA, 25 bp, Homo sapien
ctggtatgctcatgtctgtggctca

SEQ ID NO: 1363315 - DNA, 25 bp, Homo sapien
tgctggtatgctcatgtctgtggct

SEQ ID NO: 1363316 - DNA, 25 bp, Homo sapien
gagccatttacagaatagaagatga

SEQ ID NO: 1363317 - DNA, 25 bp, Homo sapien
gaagatgagaccactagagaaaagt

SEQ ID NO: 1363318 - DNA, 25 bp, Homo sapien
caggccattgtgagatagataccca

SEQ ID NO: 1363319 - DNA, 25 bp, Homo sapien
tgtttgaccaggtaacaatactgga

SEQ ID NO: 1363320 - DNA, 25 bp, Homo sapien
gaaaagatcttgttcgctaggtaag

SEQ ID NO: 1363321 - DNA, 25 bp, Homo sapien
gctcttttagaaacaccactctgaa

SEQ ID NO: 1363322 - DNA, 25 bp, Homo sapien
cacaggccacttttgtacatgctct

SEQ ID NO: 1363323 - DNA, 25 bp, Homo sapien
gagcaactctacattgatacattgg

SEQ ID NO: 1363324 - DNA, 25 bp, Homo sapien
gtagaaaccagatacactaaactgt

SEQ ID NO: 1363325 - DNA, 25 bp, Homo sapien
caataagcatgagtttagtcttcca

SEQ ID NO: 1363326 - DNA, 25 bp, Homo sapien
tagttggcaaagaccacatttagca

SEQ ID NO: 1363327 - DNA, 25 bp, Homo sapien
aattagcaaacaatactgtagaaac

SEQ ID NO: 1363328 - DNA, 25 bp, Homo sapien
taaaaattactcaaggctagcttgg

SEQ ID NO: 1363329 - DNA, 25 bp, Homo sapien
aaggcaactattgagggaagaggca

SEQ ID NO: 1363330 - DNA, 25 bp, Homo sapien
aaacaaaggactaaatactgagctc

SEQ ID NO: 1363331 - DNA, 25 bp, Homo sapien
gaactggctgtacaagagtactccc

SEQ ID NO: 1363332 - DNA, 25 bp, Homo sapien
tcagggtattctgcctgataatcac

SEQ ID NO: 1363333 - DNA, 25 bp, Homo sapien
ggtactcgccatgatactcatcagg

SEQ ID NO: 1363334 - DNA, 25 bp, Homo sapien
gaaattgtcgagttgtccaccggct

SEQ ID NO: 1363335 - DNA, 25 bp, Homo sapien
gggatcatatacttgccgcccaagc

SEQ ID NO: 1363336 - DNA, 25 bp, Homo sapien
tagaaaagtaaacgtgagtggcagc

SEQ ID NO: 1363337 - DNA, 25 bp, Homo sapien
tatgagagacataatgccgcacccg

SEQ ID NO: 1363338 - DNA, 25 bp, Homo sapien
taaatctcccttggactcggtaaga

SEQ ID NO: 1363339 - DNA, 25 bp, Homo sapien
aaattactatgtggcctcaaacacg

SEQ ID NO: 1363340 - DNA, 25 bp, Homo sapien
cctagtcccgtaagctgtcatacct

SEQ ID NO: 1363341 - DNA, 25 bp, Homo sapien
gatgcctcctagtcccgtaagctgt

SEQ ID NO: 1363342 - DNA, 25 bp, Homo sapien
tgcccatctgcagactaattgtggt

SEQ ID NO: 1363343 - DNA, 25 bp, Homo sapien
gcccatctgcagactaattgtggtc

SEQ ID NO: 1363344 - DNA, 25 bp, Homo sapien
cattaaggtcgtgtaaaattgccta

SEQ ID NO: 1363345 - DNA, 25 bp, Homo sapien
ttaaactgacaaattctaacagggc

SEQ ID NO: 1363346 - DNA, 25 bp, Homo sapien
cagggcttggctgctatatcatgat

SEQ ID NO: 1363347 - DNA, 25 bp, Homo sapien
gaaggaaaacatctgaactacgtat

SEQ ID NO: 1363348 - DNA, 25 bp, Homo sapien
acttaactccaatgtcaatggttgt

SEQ ID NO: 1363349 - DNA, 25 bp, Homo sapien
tgcagaccaattacactttggccag

SEQ ID NO: 1363350 - DNA, 25 bp, Homo sapien
tgtcaatggttgtatggaatccttt

SEQ ID NO: 1363351 - DNA, 25 bp, Homo sapien
caattacactttggccagcttttaa

SEQ ID NO: 1363352 - DNA, 25 bp, Homo sapien
atgcacactaactgaaaaggccaac

SEQ ID NO: 1363353 - DNA, 25 bp, Homo sapien
tgcacactaactgaaaaggccaaca

SEQ ID NO: 1363354 - DNA, 25 bp, Homo sapien
catttgcttcgaatatgtcatgtgg

SEQ ID NO: 1363355 - DNA, 25 bp, Homo sapien
gaatatgtcatgtggcttcatacca

SEQ ID NO: 1363356 - DNA, 25 bp, Homo sapien
tagtctgaacctgggtcatgtttcc

SEQ ID NO: 1363357 - DNA, 25 bp, Homo sapien
acctgggtcatgtttccattctcaa

SEQ ID NO: 1363358 - DNA, 25 bp, Homo sapien
tgaggactcgttgaccttcttcact

SEQ ID NO: 1363359 - DNA, 25 bp, Homo sapien
tatgagagacatcttatttactggc

SEQ ID NO: 1363360 - DNA, 25 bp, Homo sapien
gagacatcttatttactggcacaca

SEQ ID NO: 1363361 - DNA, 25 bp, Homo sapien
gctccctttagcatcagtaagggaa

SEQ ID NO: 1363362 - DNA, 25 bp, Homo sapien
taagggaaagcattaaagatatctg

SEQ ID NO: 1363363 - DNA, 25 bp, Homo sapien
tgcctgatgatcatacttggaagca

SEQ ID NO: 1363364 - DNA, 25 bp, Homo sapien
attgcgaagatcttcttctgcctga

SEQ ID NO: 1363365 - DNA, 25 bp, Homo sapien
tcacctcttctatccaattgcgaag

SEQ ID NO: 1363366 - DNA, 25 bp, Homo sapien
aagttggggccaatgctcatgcctg

SEQ ID NO: 1363367 - DNA, 25 bp, Homo sapien
acacaaatgctatgctattatacat

SEQ ID NO: 1363368 - DNA, 25 bp, Homo sapien
caacacaaatgctatgctattatac

SEQ ID NO: 1363369 - DNA, 25 bp, Homo sapien
aacacaaatgctatgctattataca

SEQ ID NO: 1363370 - DNA, 25 bp, Homo sapien
catcccgtttcccaggtcaagtagg

SEQ ID NO: 1363371 - DNA, 25 bp, Homo sapien
ggcacataatcagaccactcctggg

SEQ ID NO: 1363372 - DNA, 25 bp, Homo sapien
tcttgaaggctcaccatgcacctga

SEQ ID NO: 1363373 - DNA, 25 bp, Homo sapien
caacagtgaaaaccaacgctgagtc

SEQ ID NO: 1363374 - DNA, 25 bp, Homo sapien
taggatacagctgatcctcctccct

SEQ ID NO: 1363375 - DNA, 25 bp, Homo sapien
ctccctacattcagcgattggcctg

SEQ ID NO: 1363376 - DNA, 25 bp, Homo sapien
gctctcgctcctccgacagcttcac

SEQ ID NO: 1363377 - DNA, 25 bp, Homo sapien
gcgattggcctgctctgctctcgct

SEQ ID NO: 1363378 - DNA, 25 bp, Homo sapien
gtccccagtgattacaacagtctcc

SEQ ID NO: 1363379 - DNA, 25 bp, Homo sapien
ttttgagccaccaggataatcctgc

SEQ ID NO: 1363380 - DNA, 25 bp, Homo sapien
cctaatttcagctgtggctccccgt

SEQ ID NO: 1363381 - DNA, 25 bp, Homo sapien
caattcctggttattgtccccagtg

SEQ ID NO: 1363382 - DNA, 25 bp, Homo sapien
tgtccaaaggttgtgggctcagcag

SEQ ID NO: 1363383 - DNA, 25 bp, Homo sapien
gctcagcagggattcggacccagat

SEQ ID NO: 1363384 - DNA, 25 bp, Homo sapien
aaagcagtacaagcacttagggtag

SEQ ID NO: 1363385 - DNA, 25 bp, Homo sapien
tcttcatgcagagatgacttgtcca

SEQ ID NO: 1363386 - DNA, 25 bp, Homo sapien
gccctaagggcaatgtggacagaat

SEQ ID NO: 1363387 - DNA, 25 bp, Homo sapien
gaatggtgcagatctacagacctgg

SEQ ID NO: 1363388 - DNA, 25 bp, Homo sapien
taggttacaactgacccagaagagt

SEQ ID NO: 1363389 - DNA, 25 bp, Homo sapien
gtggaaatgcctcacacgctgcctg

SEQ ID NO: 1363390 - DNA, 25 bp, Homo sapien
aaaaagtaagcttgtgtgttctgcc

SEQ ID NO: 1363391 - DNA, 25 bp, Homo sapien
gaggcagggacatacaaatcttaga

SEQ ID NO: 1363392 - DNA, 25 bp, Homo sapien
cagtcactgagttgagtataagcca

SEQ ID NO: 1363393 - DNA, 25 bp, Homo sapien
taaaatcagagacttcctcaattca

SEQ ID NO: 1363394 - DNA, 25 bp, Homo sapien
gagagagatgtcaagtagctagccc

SEQ ID NO: 1363395 - DNA, 25 bp, Homo sapien
caagcaatgtatcaattatgcaata

SEQ ID NO: 1363396 - DNA, 25 bp, Homo sapien
ggtgtcaaaccacgcaatgtcactt

SEQ ID NO: 1363397 - DNA, 25 bp, Homo sapien
tagaactcacatatgctagactccc

SEQ ID NO: 1363398 - DNA, 25 bp, Homo sapien
cagcatctcatacaaaggcctagca

SEQ ID NO: 1363399 - DNA, 25 bp, Homo sapien
aggcctagcaaacatggctatttga

SEQ ID NO: 1363400 - DNA, 25 bp, Homo sapien
gaagtgacaggtgggtagcaaaaat

SEQ ID NO: 1363401 - DNA, 25 bp, Homo sapien
cacaatgtcaagaagtgacaggtgg

SEQ ID NO: 1363402 - DNA, 25 bp, Homo sapien
ttccagctctgacaatgccagtgcc

SEQ ID NO: 1363403 - DNA, 25 bp, Homo sapien
cggtgcggtggcaatcctgacatgc

SEQ ID NO: 1363404 - DNA, 25 bp, Homo sapien
tacataattcgcttcacaccgccta

SEQ ID NO: 1363405 - DNA, 25 bp, Homo sapien
catgcttgggctcccgggaggttaa

SEQ ID NO: 1363406 - DNA, 25 bp, Homo sapien
tcccaggcaccgagatcggagactg

SEQ ID NO: 1363407 - DNA, 25 bp, Homo sapien
tcggcgggacattaggcggtctctc

SEQ ID NO: 1363408 - DNA, 25 bp, Homo sapien
tccatttcccgcaaaagcaacagca

SEQ ID NO: 1363409 - DNA, 25 bp, Homo sapien
actgtgatgggtcccggaccggctt

SEQ ID NO: 1363410 - DNA, 25 bp, Homo sapien
aagggcgagtggccacgcaggagcg

SEQ ID NO: 1363411 - DNA, 25 bp, Homo sapien
agggcgagtggccacgcaggagcgc

SEQ ID NO: 1363412 - DNA, 25 bp, Homo sapien
aagggcccttgttgaagtgggtcat

SEQ ID NO: 1363413 - DNA, 25 bp, Homo sapien
ccgagagcccataggaagggccctt

SEQ ID NO: 1363414 - DNA, 25 bp, Homo sapien
tgttcttgacttcggccgagagccc

SEQ ID NO: 1363415 - DNA, 25 bp, Homo sapien
cttgttcttgacttcggccgagagc

SEQ ID NO: 1363416 - DNA, 25 bp, Homo sapien
ggcggcgggaagagacagcgctggg

SEQ ID NO: 1363417 - DNA, 25 bp, Homo sapien
gggtccggggtctctcgcacttcgc

SEQ ID NO: 1363418 - DNA, 25 bp, Homo sapien
tggggtccggggtctctcgcacttc

SEQ ID NO: 1363419 - DNA, 25 bp, Homo sapien
gggcggcgggaagagacagcgctgg

SEQ ID NO: 1363420 - DNA, 25 bp, Homo sapien
gcgggggatgctcgaactccctcct

SEQ ID NO: 1363421 - DNA, 25 bp, Homo sapien
gccgccgcgggggatgctcgaactc

SEQ ID NO: 1363422 - DNA, 25 bp, Homo sapien
gccgcgggggatgctcgaactccct

SEQ ID NO: 1363423 - DNA, 25 bp, Homo sapien
gagtggccgccgcgggggatgctcg

SEQ ID NO: 1363424 - DNA, 25 bp, Homo sapien
aggcgcaggagacggccgcggggcg

SEQ ID NO: 1363425 - DNA, 25 bp, Homo sapien
ctgggaggcgcaggagacggccgcg

SEQ ID NO: 1363426 - DNA, 25 bp, Homo sapien
ggcgcgggcggtgcctgggcgactg

SEQ ID NO: 1363427 - DNA, 25 bp, Homo sapien
gcggtgcctgggcgactgggtccaa

SEQ ID NO: 1363428 - DNA, 25 bp, Homo sapien
tccgctgcgaagcacccggctgcct

SEQ ID NO: 1363429 - DNA, 25 bp, Homo sapien
tccgcctgggccttcgaggattggc

SEQ ID NO: 1363430 - DNA, 25 bp, Homo sapien
gggcggtgcggccaattgaagggcc

SEQ ID NO: 1363431 - DNA, 25 bp, Homo sapien
ggcccgaccaatggagggccgcctc

SEQ ID NO: 1363432 - DNA, 25 bp, Homo sapien
agctactgtgccagaagagatcatg

SEQ ID NO: 1363433 - DNA, 25 bp, Homo sapien
cagctactgtgccagaagagatcat

SEQ ID NO: 1363434 - DNA, 25 bp, Homo sapien
aagagatcatggaaccaggtgtgga

SEQ ID NO: 1363435 - DNA, 25 bp, Homo sapien
gtgccagaagagatcatggaaccag

SEQ ID NO: 1363436 - DNA, 25 bp, Homo sapien
aaatagcagccagatttgaggtaca

SEQ ID NO: 1363437 - DNA, 25 bp, Homo sapien
tgtgggaaatagcagccagatttga

SEQ ID NO: 1363438 - DNA, 25 bp, Homo sapien
ctaggagtgtgggaaatagcagcca

SEQ ID NO: 1363439 - DNA, 25 bp, Homo sapien
ttgggacctaggagtgtgggaaata

SEQ ID NO: 1363440 - DNA, 25 bp, Homo sapien
ccaggtgatactattagtacatcca

SEQ ID NO: 1363441 - DNA, 25 bp, Homo sapien
cagttactccaggtgatactattag

SEQ ID NO: 1363442 - DNA, 25 bp, Homo sapien
actccaggtgatactattagtacat

SEQ ID NO: 1363443 - DNA, 25 bp, Homo sapien
gttactccaggtgatactattagta

SEQ ID NO: 1363444 - DNA, 25 bp, Homo sapien
gagataaccccggatcgatggtact

SEQ ID NO: 1363445 - DNA, 25 bp, Homo sapien
gggatccaaggctacgttgaaaagc

SEQ ID NO: 1363446 - DNA, 25 bp, Homo sapien
tccaggatagatagccaccagatgt

SEQ ID NO: 1363447 - DNA, 25 bp, Homo sapien
taatgacgtgatgtcgacacagccc

SEQ ID NO: 1363448 - DNA, 25 bp, Homo sapien
tcaatggaccaaaccacgagtcttt

SEQ ID NO: 1363449 - DNA, 25 bp, Homo sapien
ccttgcatggttttaggtccagata

SEQ ID NO: 1363450 - DNA, 25 bp, Homo sapien
tccagataattcagggcaaatcggt

SEQ ID NO: 1363451 - DNA, 25 bp, Homo sapien
gccaactctgtatatggtatttcca

SEQ ID NO: 1363452 - DNA, 25 bp, Homo sapien
tgagaggcgggaagagactgtcccc

SEQ ID NO: 1363453 - DNA, 25 bp, Homo sapien
tgaaaggtagaatgatgtgttccaa

SEQ ID NO: 1363454 - DNA, 25 bp, Homo sapien
ttgaaaggtagaatgatgtgttcca

SEQ ID NO: 1363455 - DNA, 25 bp, Homo sapien
cccactaagaagtcaggtttacctg

SEQ ID NO: 1363456 - DNA, 25 bp, Homo sapien
tcaagcaggaccagcgaaagaattc

SEQ ID NO: 1363457 - DNA, 25 bp, Homo sapien
caggcactgcactaactattgtact

SEQ ID NO: 1363458 - DNA, 25 bp, Homo sapien
tctattccagtagacatggcaccac

SEQ ID NO: 1363459 - DNA, 25 bp, Homo sapien
tactggtttatgctcaaggttctgg

SEQ ID NO: 1363460 - DNA, 25 bp, Homo sapien
ggagtgcaaattgtcatgaagccaa

SEQ ID NO: 1363461 - DNA, 25 bp, Homo sapien
cgtcatgccggcctaaacaagagat

SEQ ID NO: 1363462 - DNA, 25 bp, Homo sapien
gatactctgtattaaggccaactac

SEQ ID NO: 1363463 - DNA, 25 bp, Homo sapien
aaatactactaaaacagccagaaga

SEQ ID NO: 1363464 - DNA, 25 bp, Homo sapien
taatcatacaaactctatatttagt

SEQ ID NO: 1363465 - DNA, 25 bp, Homo sapien
caaactctatatttagttctgtaaa

SEQ ID NO: 1363466 - DNA, 25 bp, Homo sapien
gaaaatttgcaggtagtaatacata

SEQ ID NO: 1363467 - DNA, 25 bp, Homo sapien
tacgtttatcaatgtttgtttcata

SEQ ID NO: 1363468 - DNA, 25 bp, Homo sapien
agtagttacgtttatcaatgtttgt

SEQ ID NO: 1363469 - DNA, 25 bp, Homo sapien
gttacgtttatcaatgtttgtttca

SEQ ID NO: 1363470 - DNA, 25 bp, Homo sapien
tagtagttacgtttatcaatgtttg

SEQ ID NO: 1363471 - DNA, 25 bp, Homo sapien
tcaggactgtcagacgcctttacaa

SEQ ID NO: 1363472 - DNA, 25 bp, Homo sapien
caggactgtcagacgcctttacaag

SEQ ID NO: 1363473 - DNA, 25 bp, Homo sapien
actgtcagacgcctttacaagaaac

SEQ ID NO: 1363474 - DNA, 25 bp, Homo sapien
ggactgtcagacgcctttacaagaa

SEQ ID NO: 1363475 - DNA, 25 bp, Homo sapien
cggcagatgctttcaacgtagacaa

SEQ ID NO: 1363476 - DNA, 25 bp, Homo sapien
gaagggcagatacacagataggaac

SEQ ID NO: 1363477 - DNA, 25 bp, Homo sapien
gataacgtttctacacggcagatgc

SEQ ID NO: 1363478 - DNA, 25 bp, Homo sapien
gagccggccactgaacaatgaagta

SEQ ID NO: 1363479 - DNA, 25 bp, Homo sapien
cagcactcatcggacaggcatgtgt

SEQ ID NO: 1363480 - DNA, 25 bp, Homo sapien
tcagtcagcactcatcggacaggca

SEQ ID NO: 1363481 - DNA, 25 bp, Homo sapien
cctggtgctcagtcagcactcatcg

SEQ ID NO: 1363482 - DNA, 25 bp, Homo sapien
catcggacaggcatgtgttgctctt

SEQ ID NO: 1363483 - DNA, 25 bp, Homo sapien
cccactgaaaggtcttcagggccac

SEQ ID NO: 1363484 - DNA, 25 bp, Homo sapien
gaaaggtcttcagggccactaacac

SEQ ID NO: 1363485 - DNA, 25 bp, Homo sapien
ctgaaaggtcttcagggccactaac

SEQ ID NO: 1363486 - DNA, 25 bp, Homo sapien
cactgaaaggtcttcagggccacta

SEQ ID NO: 1363487 - DNA, 25 bp, Homo sapien
tctttgtggcatctgtatgattgat

SEQ ID NO: 1363488 - DNA, 25 bp, Homo sapien
tgttctttcaagatcgacagtggct

SEQ ID NO: 1363489 - DNA, 25 bp, Homo sapien
agtggctcttttgactgcattacag

SEQ ID NO: 1363490 - DNA, 25 bp, Homo sapien
ccacagtccaggcatctcctgttgg

SEQ ID NO: 1363491 - DNA, 25 bp, Homo sapien
aaggtggggagaagtagcgcaagcg

SEQ ID NO: 1363492 - DNA, 25 bp, Homo sapien
aagtagcgcaagcggccccagcagc

SEQ ID NO: 1363493 - DNA, 25 bp, Homo sapien
ggtggggagaagtagcgcaagcggc

SEQ ID NO: 1363494 - DNA, 25 bp, Homo sapien
gaagtagcgcaagcggccccagcag

SEQ ID NO: 1363495 - DNA, 25 bp, Homo sapien
ctgcagatgaaagcacttaagtgtg

SEQ ID NO: 1363496 - DNA, 25 bp, Homo sapien
caacaatgttgagagtgacatttac

SEQ ID NO: 1363497 - DNA, 25 bp, Homo sapien
aagaattctctgacacactgcaccc

SEQ ID NO: 1363498 - DNA, 25 bp, Homo sapien
gtgtgagtgaaagcaacaatgttga

SEQ ID NO: 1363499 - DNA, 25 bp, Homo sapien
tttcccctttggcttgactctcatt

SEQ ID NO: 1363500 - DNA, 25 bp, Homo sapien
atattgttctcgtggtagtaagtct

SEQ ID NO: 1363501 - DNA, 25 bp, Homo sapien
ccctttggcttgactctcattctct

SEQ ID NO: 1363502 - DNA, 25 bp, Homo sapien
cccatattgttctcgtggtagtaag

SEQ ID NO: 1363503 - DNA, 25 bp, Homo sapien
gcaggacagagctgaaattcattag

SEQ ID NO: 1363504 - DNA, 25 bp, Homo sapien
ctaaggttgtttgtaaatcaggtgc

SEQ ID NO: 1363505 - DNA, 25 bp, Homo sapien
caggtgcatgtggataagcccttct

SEQ ID NO: 1363506 - DNA, 25 bp, Homo sapien
acggatgtccttgaatggtggtcca

SEQ ID NO: 1363507 - DNA, 25 bp, Homo sapien
ccggcttcttggaattcggtgaatg

SEQ ID NO: 1363508 - DNA, 25 bp, Homo sapien
acatggagtgcaaggtggtgaaaac

SEQ ID NO: 1363509 - DNA, 25 bp, Homo sapien
tctggcttcaccctgtgaattaggg

SEQ ID NO: 1363510 - DNA, 25 bp, Homo sapien
tgaaaacggtggagggccaggactg

SEQ ID NO: 1363511 - DNA, 25 bp, Homo sapien
tccttctagatatgaagatctatga

SEQ ID NO: 1363512 - DNA, 25 bp, Homo sapien
tagctaaccacttattccacatgtc

SEQ ID NO: 1363513 - DNA, 25 bp, Homo sapien
cattccatagctaaccacttattcc

SEQ ID NO: 1363514 - DNA, 25 bp, Homo sapien
ctatgaggttgccagggaccgaaag

SEQ ID NO: 1363515 - DNA, 25 bp, Homo sapien
gtgaatgccacacgactgaaaagtc

SEQ ID NO: 1363516 - DNA, 25 bp, Homo sapien
tatttagtgaatgccacacgactga

SEQ ID NO: 1363517 - DNA, 25 bp, Homo sapien
tagtgaatgccacacgactgaaaag

SEQ ID NO: 1363518 - DNA, 25 bp, Homo sapien
attatttagtgaatgccacacgact

SEQ ID NO: 1363519 - DNA, 25 bp, Homo sapien
atgctgaaggcctgacggccagcag

SEQ ID NO: 1363520 - DNA, 25 bp, Homo sapien
gatgctgaaggcctgacggccagca

SEQ ID NO: 1363521 - DNA, 25 bp, Homo sapien
atgatgctgaaggcctgacggccag

SEQ ID NO: 1363522 - DNA, 25 bp, Homo sapien
tgatgctgaaggcctgacggccagc

SEQ ID NO: 1363523 - DNA, 25 bp, Homo sapien
ctagggtgaacggtactgtcatgac

SEQ ID NO: 1363524 - DNA, 25 bp, Homo sapien
ggaattcaaagatgcagtgagctat

SEQ ID NO: 1363525 - DNA, 25 bp, Homo sapien
gattgcaccactgcaccccagcctg

SEQ ID NO: 1363526 - DNA, 25 bp, Homo sapien
ctgggcagacagtgagaccccgtct

SEQ ID NO: 1363527 - DNA, 25 bp, Homo sapien
agcccaggaattcaaagatgcagtg

SEQ ID NO: 1363528 - DNA, 25 bp, Homo sapien
tgctctgttcccaactgtttgttct

SEQ ID NO: 1363529 - DNA, 25 bp, Homo sapien
cctgttactttcttggcaccatgtc

SEQ ID NO: 1363530 - DNA, 25 bp, Homo sapien
tcgcgttatttatcattcctgttac

SEQ ID NO: 1363531 - DNA, 25 bp, Homo sapien
gtcttctcagtttcgtcagactctt

SEQ ID NO: 1363532 - DNA, 25 bp, Homo sapien
aaaatgttctattctatatgatcca

SEQ ID NO: 1363533 - DNA, 25 bp, Homo sapien
ttttgaatccgttaattatcttcac

SEQ ID NO: 1363534 - DNA, 25 bp, Homo sapien
gaaagtctagattagtgtcatctga

SEQ ID NO: 1363535 - DNA, 25 bp, Homo sapien
tcttcacaatatctaatcatatttc

SEQ ID NO: 1363536 - DNA, 25 bp, Homo sapien
tttctctctaacagtggctgcattg

SEQ ID NO: 1363537 - DNA, 25 bp, Homo sapien
atggagcagaattttctctctaaca

SEQ ID NO: 1363538 - DNA, 25 bp, Homo sapien
cttcagattcatgagtagaggctct

SEQ ID NO: 1363539 - DNA, 25 bp, Homo sapien
gtggctgcattgccccagtaggcga

SEQ ID NO: 1363540 - DNA, 25 bp, Homo sapien
ggagtatggccccatgacaccttga

SEQ ID NO: 1363541 - DNA, 25 bp, Homo sapien
tcagaacctccggagggagtatggc

SEQ ID NO: 1363542 - DNA, 25 bp, Homo sapien
ccggtatcctcataaaaaaggcatg

SEQ ID NO: 1363543 - DNA, 25 bp, Homo sapien
ccgagattagagtgacgtagctgca

SEQ ID NO: 1363544 - DNA, 25 bp, Homo sapien
tgagtaggcattggacaagctccca

SEQ ID NO: 1363545 - DNA, 25 bp, Homo sapien
tgttactagggtctctatcagctcg

SEQ ID NO: 1363546 - DNA, 25 bp, Homo sapien
tatcagctcgatctagttcaaaaga

SEQ ID NO: 1363547 - DNA, 25 bp, Homo sapien
cagcctcaggatctcagtggtatgc

SEQ ID NO: 1363548 - DNA, 25 bp, Homo sapien
tgtaagcacctacagagttggtgga

SEQ ID NO: 1363549 - DNA, 25 bp, Homo sapien
gtattgttctacagcccgtagatca

SEQ ID NO: 1363550 - DNA, 25 bp, Homo sapien
gatttagattgtattacctgacagg

SEQ ID NO: 1363551 - DNA, 25 bp, Homo sapien
tcacactctgccaccgcgtgtgtat

SEQ ID NO: 1363552 - DNA, 25 bp, Homo sapien
gaagcactacccatattcgcaggat

SEQ ID NO: 1363553 - DNA, 25 bp, Homo sapien
ggacccagccactaccaagatactg

SEQ ID NO: 1363554 - DNA, 25 bp, Homo sapien
taacgtccatggaacgaagcactac

SEQ ID NO: 1363555 - DNA, 25 bp, Homo sapien
tcgcaggattaggaaaaccgccaca

SEQ ID NO: 1363556 - DNA, 25 bp, Homo sapien
acggcgcatgcgtccaacttccggg

SEQ ID NO: 1363557 - DNA, 25 bp, Homo sapien
agagaaacggcgcatgcgtccaact

SEQ ID NO: 1363558 - DNA, 25 bp, Homo sapien
caaagttcacaactacgggtgccga

SEQ ID NO: 1363559 - DNA, 25 bp, Homo sapien
gggaccagccgctgtcaaagttcac

SEQ ID NO: 1363560 - DNA, 25 bp, Homo sapien
ctccacccttatgagtggaatagtg

SEQ ID NO: 1363561 - DNA, 25 bp, Homo sapien
tgagtggaatagtgccattatgaaa

SEQ ID NO: 1363562 - DNA, 25 bp, Homo sapien
tccagtggaactttgttgggcggtg

SEQ ID NO: 1363563 - DNA, 25 bp, Homo sapien
aggtgtttagttcacgagggctcca

SEQ ID NO: 1363564 - DNA, 25 bp, Homo sapien
taagactagtcaagaggaggaggga

SEQ ID NO: 1363565 - DNA, 25 bp, Homo sapien
aaagagtagatcaaggagttccatt

SEQ ID NO: 1363566 - DNA, 25 bp, Homo sapien
gagtagatcaaggagttccatttgt

SEQ ID NO: 1363567 - DNA, 25 bp, Homo sapien
ggaggagggaaagagtagatcaagg

SEQ ID NO: 1363568 - DNA, 25 bp, Homo sapien
ttatgtactcttggaggagtaaggg

SEQ ID NO: 1363569 - DNA, 25 bp, Homo sapien
aaggaggtgtcagttgccagggtct

SEQ ID NO: 1363570 - DNA, 25 bp, Homo sapien
ttaacttgaactctgttatgtactc

SEQ ID NO: 1363571 - DNA, 25 bp, Homo sapien
tgaactctgttatgtactcttggag

SEQ ID NO: 1363572 - DNA, 25 bp, Homo sapien
ttctttgtatccctactggctataa

SEQ ID NO: 1363573 - DNA, 25 bp, Homo sapien
tctttgtatccctactggctataag

SEQ ID NO: 1363574 - DNA, 25 bp, Homo sapien
tttgtatccctactggctataagca

SEQ ID NO: 1363575 - DNA, 25 bp, Homo sapien
ttgtatccctactggctataagcat

SEQ ID NO: 1363576 - DNA, 25 bp, Homo sapien
tggctgcacaaaagtctgtcagctg

SEQ ID NO: 1363577 - DNA, 25 bp, Homo sapien
gccaagggtagtggccttgccagtt

SEQ ID NO: 1363578 - DNA, 25 bp, Homo sapien
tctctagcaggaaattgtaggcctt

SEQ ID NO: 1363579 - DNA, 25 bp, Homo sapien
gtcattcccagctgattggagcagg

SEQ ID NO: 1363580 - DNA, 25 bp, Homo sapien
gatcgtatatgccttattaaaatgc

SEQ ID NO: 1363581 - DNA, 25 bp, Homo sapien
tattaaaatgcttgtgctcagacat

SEQ ID NO: 1363582 - DNA, 25 bp, Homo sapien
agaaaacatattgatcgtatatgcc

SEQ ID NO: 1363583 - DNA, 25 bp, Homo sapien
ccttattaaaatgcttgtgctcaga

SEQ ID NO: 1363584 - DNA, 25 bp, Homo sapien
gggctccctgtcattccaatcttgg

SEQ ID NO: 1363585 - DNA, 25 bp, Homo sapien
cagctccattgggtacctgaggtct

SEQ ID NO: 1363586 - DNA, 25 bp, Homo sapien
ggatactactccatctctgcaaccg

SEQ ID NO: 1363587 - DNA, 25 bp, Homo sapien
tagttgattgcaggacccagattac

SEQ ID NO: 1363588 - DNA, 25 bp, Homo sapien
ttcagagaaccattgtgtaactggt

SEQ ID NO: 1363589 - DNA, 25 bp, Homo sapien
cagagaaccattgtgtaactggttc

SEQ ID NO: 1363590 - DNA, 25 bp, Homo sapien
ctcttcagagaaccattgtgtaact

SEQ ID NO: 1363591 - DNA, 25 bp, Homo sapien
tcttcagagaaccattgtgtaactg

SEQ ID NO: 1363592 - DNA, 25 bp, Homo sapien
tgaaaagggttggctagaagagtct

SEQ ID NO: 1363593 - DNA, 25 bp, Homo sapien
ctgaaaagggttggctagaagagtc

SEQ ID NO: 1363594 - DNA, 25 bp, Homo sapien
tgttttacttctgttacaatggtcc

SEQ ID NO: 1363595 - DNA, 25 bp, Homo sapien
ccagccttgcttcactaactctaaa

SEQ ID NO: 1363596 - DNA, 25 bp, Homo sapien
tgttacaatggtcccacattcccct

SEQ ID NO: 1363597 - DNA, 25 bp, Homo sapien
ctcttctacttgcttacccactttt

SEQ ID NO: 1363598 - DNA, 25 bp, Homo sapien
ggttcaactcaggaaacatgggcca

SEQ ID NO: 1363599 - DNA, 25 bp, Homo sapien
gagatctgcggagccaattgactgg

SEQ ID NO: 1363600 - DNA, 25 bp, Homo sapien
gcaaggagctaagtactctcacaga

SEQ ID NO: 1363601 - DNA, 25 bp, Homo sapien
cctgaaggactcttgggattttgac

SEQ ID NO: 1363602 - DNA, 25 bp, Homo sapien
ttctcctccattgttatgtctctgg

SEQ ID NO: 1363603 - DNA, 25 bp, Homo sapien
tctggactggtatggctgtgcccta

SEQ ID NO: 1363604 - DNA, 25 bp, Homo sapien
gtgcattcaatgctcctcttgcctg

SEQ ID NO: 1363605 - DNA, 25 bp, Homo sapien
cctagttgactctctgaaaagttgg

SEQ ID NO: 1363606 - DNA, 25 bp, Homo sapien
ttcctcatcacaaattccagtattg

SEQ ID NO: 1363607 - DNA, 25 bp, Homo sapien
ccttcttcctcatcacaaattccag

SEQ ID NO: 1363608 - DNA, 25 bp, Homo sapien
ttcttcctcatcacaaattccagta

SEQ ID NO: 1363609 - DNA, 25 bp, Homo sapien
tcttcctcatcacaaattccagtat

SEQ ID NO: 1363610 - DNA, 25 bp, Homo sapien
cagctcattctttcaccctccacgt

SEQ ID NO: 1363611 - DNA, 25 bp, Homo sapien
tgcttccagctcattctttcaccct

SEQ ID NO: 1363612 - DNA, 25 bp, Homo sapien
ctcattctttcaccctccacgttgt

SEQ ID NO: 1363613 - DNA, 25 bp, Homo sapien
attctttcaccctccacgttgtaca

SEQ ID NO: 1363614 - DNA, 25 bp, Homo sapien
gaaaatgagaactggcgttagaata

SEQ ID NO: 1363615 - DNA, 25 bp, Homo sapien
cattgggcagtaaggagattgtaac

SEQ ID NO: 1363616 - DNA, 25 bp, Homo sapien
aaagctttgaatccttcctgttaag

SEQ ID NO: 1363617 - DNA, 25 bp, Homo sapien
tagaatatgaataagaaatggcatc

SEQ ID NO: 1363618 - DNA, 25 bp, Homo sapien
ggagagctgattgaacttgacccag

SEQ ID NO: 1363619 - DNA, 25 bp, Homo sapien
catattaagctgtgggactagagag

SEQ ID NO: 1363620 - DNA, 25 bp, Homo sapien
gggaagggccttcattcaagaagaa

SEQ ID NO: 1363621 - DNA, 25 bp, Homo sapien
cttgacccagtagacagtgagatta

SEQ ID NO: 1363622 - DNA, 25 bp, Homo sapien
tagtgctgtccacatcataggtgct

SEQ ID NO: 1363623 - DNA, 25 bp, Homo sapien
tagtgagtctccatgtagcagtttg

SEQ ID NO: 1363624 - DNA, 25 bp, Homo sapien
taatgttacccttcactggtatagc

SEQ ID NO: 1363625 - DNA, 25 bp, Homo sapien
aaatatgtactggttaactagaggg

SEQ ID NO: 1363626 - DNA, 25 bp, Homo sapien
gctgcatgagttaattcaacatcca

SEQ ID NO: 1363627 - DNA, 25 bp, Homo sapien
tggctgcatgagttaattcaacatc

SEQ ID NO: 1363628 - DNA, 25 bp, Homo sapien
ggctgcatgagttaattcaacatcc

SEQ ID NO: 1363629 - DNA, 25 bp, Homo sapien
ctggctgcatgagttaattcaacat

SEQ ID NO: 1363630 - DNA, 25 bp, Homo sapien
taaagtttgccttcttatgtctaaa

SEQ ID NO: 1363631 - DNA, 25 bp, Homo sapien
caaatatgtgttgataccctacagt

SEQ ID NO: 1363632 - DNA, 25 bp, Homo sapien
tatgagtgcaaagaaattgacttct

SEQ ID NO: 1363633 - DNA, 25 bp, Homo sapien
gttatatatgagtgcaaagaaattg

SEQ ID NO: 1363634 - DNA, 25 bp, Homo sapien
tggactagccttacgttaagtgaaa

SEQ ID NO: 1363635 - DNA, 25 bp, Homo sapien
tggatgacccaggacggtcttaaag

SEQ ID NO: 1363636 - DNA, 25 bp, Homo sapien
tattatttcatggactagccttacg

SEQ ID NO: 1363637 - DNA, 25 bp, Homo sapien
actctgatatattatggatgaccca

SEQ ID NO: 1363638 - DNA, 25 bp, Homo sapien
ggtgtagagagccaggtttactgtt

SEQ ID NO: 1363639 - DNA, 25 bp, Homo sapien
tcactggtgtagagagccaggttta

SEQ ID NO: 1363640 - DNA, 25 bp, Homo sapien
ttggttgcaccatctgttatcaggc

SEQ ID NO: 1363641 - DNA, 25 bp, Homo sapien
caggtttactgttggttgcaccatc

SEQ ID NO: 1363642 - DNA, 25 bp, Homo sapien
gggaaggtgttgttacagtgtacat

SEQ ID NO: 1363643 - DNA, 25 bp, Homo sapien
atgtttcctctgtgtcgtttttaag

SEQ ID NO: 1363644 - DNA, 25 bp, Homo sapien
catgtttcctctgtgtcgtttttaa

SEQ ID NO: 1363645 - DNA, 25 bp, Homo sapien
aaggtgttgttacagtgtacatgtt

SEQ ID NO: 1363646 - DNA, 25 bp, Homo sapien
gtgaatgacgccctctgaatttttc

SEQ ID NO: 1363647 - DNA, 25 bp, Homo sapien
cgtgaatgacgccctctgaattttt

SEQ ID NO: 1363648 - DNA, 25 bp, Homo sapien
ccttgggtcagcatgtaatgttggt

SEQ ID NO: 1363649 - DNA, 25 bp, Homo sapien
agaaggcgtactggctatccttggg

SEQ ID NO: 1363650 - DNA, 25 bp, Homo sapien
gttggtatattccttcacagagtat

SEQ ID NO: 1363651 - DNA, 25 bp, Homo sapien
cgtactggctatccttgggtcagca

SEQ ID NO: 1363652 - DNA, 25 bp, Homo sapien
tcctacagagaatcagtgcttccag

SEQ ID NO: 1363653 - DNA, 25 bp, Homo sapien
cagacttgtaactgaaacagccagc

SEQ ID NO: 1363654 - DNA, 25 bp, Homo sapien
ccacagacttgtaactgaaacagcc

SEQ ID NO: 1363655 - DNA, 25 bp, Homo sapien
ccagtgctgattagggcatagttta

SEQ ID NO: 1363656 - DNA, 25 bp, Homo sapien
gctaaggcaagagaatcacttgaac

SEQ ID NO: 1363657 - DNA, 25 bp, Homo sapien
cccaggaggtggaggttgcagtgag

SEQ ID NO: 1363658 - DNA, 25 bp, Homo sapien
gcctgtagtcccagctactcaggag

SEQ ID NO: 1363659 - DNA, 25 bp, Homo sapien
aaattaggcaggcatcgtggctcat

SEQ ID NO: 1363660 - DNA, 25 bp, Homo sapien
cctattggtattgctcacattttaa

SEQ ID NO: 1363661 - DNA, 25 bp, Homo sapien
aatggattgcttattctgttaccct

SEQ ID NO: 1363662 - DNA, 25 bp, Homo sapien
gattgcttattctgttaccctattg

SEQ ID NO: 1363663 - DNA, 25 bp, Homo sapien
tctgttaccctattggtattgctca

SEQ ID NO: 1363664 - DNA, 25 bp, Homo sapien
tcacgaaatcgaaaacactgaaaag

SEQ ID NO: 1363665 - DNA, 25 bp, Homo sapien
caagagtcacattgtattgtatgca

SEQ ID NO: 1363666 - DNA, 25 bp, Homo sapien
tttattattaagcttcaagagtcac

SEQ ID NO: 1363667 - DNA, 25 bp, Homo sapien
atgcattgaatatcacgaaatcgaa

SEQ ID NO: 1363668 - DNA, 25 bp, Homo sapien
aacgaggagcgttatgacactttgc

SEQ ID NO: 1363669 - DNA, 25 bp, Homo sapien
gcgcacagttcccatgagtccaggt

SEQ ID NO: 1363670 - DNA, 25 bp, Homo sapien
actggccgcttgcagcagggctgtc

SEQ ID NO: 1363671 - DNA, 25 bp, Homo sapien
agtccaggtccgtccagtcaacatc

SEQ ID NO: 1363672 - DNA, 25 bp, Homo sapien
ggcccgggaatctggaccttgtcta

SEQ ID NO: 1363673 - DNA, 25 bp, Homo sapien
cttgtctagagtcccggcgccagta

SEQ ID NO: 1363674 - DNA, 25 bp, Homo sapien
gtaccagttcggagggcatcctgga

SEQ ID NO: 1363675 - DNA, 25 bp, Homo sapien
ccagtaccagttcggagggcatcct

SEQ ID NO: 1363676 - DNA, 25 bp, Homo sapien
cactcagttcagacctgagccgggc

SEQ ID NO: 1363677 - DNA, 25 bp, Homo sapien
agctccacgggggcgaataattttg

SEQ ID NO: 1363678 - DNA, 25 bp, Homo sapien
caacactcagttcagacctgagccg

SEQ ID NO: 1363679 - DNA, 25 bp, Homo sapien
aacagctccacgggggcgaataatt

SEQ ID NO: 1363680 - DNA, 25 bp, Homo sapien
gcctgcagctaaacttagagggttc

SEQ ID NO: 1363681 - DNA, 25 bp, Homo sapien
ccaagtgtctttcgcccagttcatc

SEQ ID NO: 1363682 - DNA, 25 bp, Homo sapien
tcggggttcgaagcctgcagctaaa

SEQ ID NO: 1363683 - DNA, 25 bp, Homo sapien
cgagaggctgagcttcgcgtctgta

SEQ ID NO: 1363684 - DNA, 25 bp, Homo sapien
gattggataattcttcaccatctcc

SEQ ID NO: 1363685 - DNA, 25 bp, Homo sapien
tgtctccactgttctctttattgat

SEQ ID NO: 1363686 - DNA, 25 bp, Homo sapien
tgtcatccctcttctgattggataa

SEQ ID NO: 1363687 - DNA, 25 bp, Homo sapien
tctccactgttctctttattgataa

SEQ ID NO: 1363688 - DNA, 25 bp, Homo sapien
gcatgaagtggtgtggaacacatca

SEQ ID NO: 1363689 - DNA, 25 bp, Homo sapien
gagaggcaagttagcttcagagaga

SEQ ID NO: 1363690 - DNA, 25 bp, Homo sapien
gttgagcagcaatccaggtatgaaa

SEQ ID NO: 1363691 - DNA, 25 bp, Homo sapien
ctgttctactcagcctgacgtttta

SEQ ID NO: 1363692 - DNA, 25 bp, Homo sapien
cttttgggtaaaatagtagctgaca

SEQ ID NO: 1363693 - DNA, 25 bp, Homo sapien
tattaggctaaacccagctgttttg

SEQ ID NO: 1363694 - DNA, 25 bp, Homo sapien
taactagaaccctgctaatgtagag

SEQ ID NO: 1363695 - DNA, 25 bp, Homo sapien
ttaagccagctcaggaatattaggc

SEQ ID NO: 1363696 - DNA, 25 bp, Homo sapien
ttctccgaatttgtacttgctctgg

SEQ ID NO: 1363697 - DNA, 25 bp, Homo sapien
gcaggacttaagaagcttttctccg

SEQ ID NO: 1363698 - DNA, 25 bp, Homo sapien
gaagtcaaagagtattcagcgttgg

SEQ ID NO: 1363699 - DNA, 25 bp, Homo sapien
gataggcatcattctaacttcagga

SEQ ID NO: 1363700 - DNA, 25 bp, Homo sapien
cagctttaacaacccttctttgttg

SEQ ID NO: 1363701 - DNA, 25 bp, Homo sapien
gcagtgaaggtgagatggaccttat

SEQ ID NO: 1363702 - DNA, 25 bp, Homo sapien
ttgcagtgaaggtgagatggacctt

SEQ ID NO: 1363703 - DNA, 25 bp, Homo sapien
tgcagtgaaggtgagatggacctta

SEQ ID NO: 1363704 - DNA, 25 bp, Homo sapien
tgtgatttccaagaattgatatagg

SEQ ID NO: 1363705 - DNA, 25 bp, Homo sapien
gaatgcttcttaattgaaatagttc

SEQ ID NO: 1363706 - DNA, 25 bp, Homo sapien
taggaatgcttcttaattgaaatag

SEQ ID NO: 1363707 - DNA, 25 bp, Homo sapien
tgatataggaatgcttcttaattga

SEQ ID NO: 1363708 - DNA, 25 bp, Homo sapien
cagacaagttgctctcgccagcctt

SEQ ID NO: 1363709 - DNA, 25 bp, Homo sapien
gttttagagacatgaaatgacagct

SEQ ID NO: 1363710 - DNA, 25 bp, Homo sapien
gcttcctgcatgatgggcacgtcac

SEQ ID NO: 1363711 - DNA, 25 bp, Homo sapien
agagtccgattctggatcctgatag

SEQ ID NO: 1363712 - DNA, 25 bp, Homo sapien
catgtcatttagtaacgcgttgtaa

SEQ ID NO: 1363713 - DNA, 25 bp, Homo sapien
ccaggatggaaaggctactcatgtc

SEQ ID NO: 1363714 - DNA, 25 bp, Homo sapien
accgaggaacggctcatgtcaattc

SEQ ID NO: 1363715 - DNA, 25 bp, Homo sapien
actgcaggttaatcaccgaggaacg

SEQ ID NO: 1363716 - DNA, 25 bp, Homo sapien
tgaatgagagattaacccggctcct

SEQ ID NO: 1363717 - DNA, 25 bp, Homo sapien
tagtttgctctactcatctcctgca

SEQ ID NO: 1363718 - DNA, 25 bp, Homo sapien
cagagggttcacctcagatcttccc

SEQ ID NO: 1363719 - DNA, 25 bp, Homo sapien
tccctctgtaaggtgaacatcctgt

SEQ ID NO: 1363720 - DNA, 25 bp, Homo sapien
tgtgaataaggctgacgtctgcccc

SEQ ID NO: 1363721 - DNA, 25 bp, Homo sapien
gcatagtctgcactcactgagcacc

SEQ ID NO: 1363722 - DNA, 25 bp, Homo sapien
catggtgtcccggagtattgacctc

SEQ ID NO: 1363723 - DNA, 25 bp, Homo sapien
tctggtcgaccccagggaatttctc

SEQ ID NO: 1363724 - DNA, 25 bp, Homo sapien
tcatctctgatgactttggagactg

SEQ ID NO: 1363725 - DNA, 25 bp, Homo sapien
ggtcatctctgatgactttggagac

SEQ ID NO: 1363726 - DNA, 25 bp, Homo sapien
agtaagttgcctggcaagcgtggtc

SEQ ID NO: 1363727 - DNA, 25 bp, Homo sapien
taagttgcctggcaagcgtggtcat

SEQ ID NO: 1363728 - DNA, 25 bp, Homo sapien
tcaaagggctcccttccgatcggaa

SEQ ID NO: 1363729 - DNA, 25 bp, Homo sapien
aatcaaatgcccctctaggattgag

SEQ ID NO: 1363730 - DNA, 25 bp, Homo sapien
tgtgacttcacgatgttccagatga

SEQ ID NO: 1363731 - DNA, 25 bp, Homo sapien
gaacacttgtgaagttcttctgtga

SEQ ID NO: 1363732 - DNA, 25 bp, Homo sapien
caaaagtgttcctatcctggtttgg

SEQ ID NO: 1363733 - DNA, 25 bp, Homo sapien
gctaaggttaacatagttgttctgg

SEQ ID NO: 1363734 - DNA, 25 bp, Homo sapien
attgaggtttgcagggtcggtgcaa

SEQ ID NO: 1363735 - DNA, 25 bp, Homo sapien
ctgaagtgctaaggttaacatagtt

SEQ ID NO: 1363736 - DNA, 25 bp, Homo sapien
cattgataccccagggtcagtgagt

SEQ ID NO: 1363737 - DNA, 25 bp, Homo sapien
ccagtgcagggccatttgcctaaac

SEQ ID NO: 1363738 - DNA, 25 bp, Homo sapien
accctcttatgccacagaggacaga

SEQ ID NO: 1363739 - DNA, 25 bp, Homo sapien
tagtgtgcattgataccccagggtc

SEQ ID NO: 1363740 - DNA, 25 bp, Homo sapien
gaaatagtgaaagctgaggataggc

SEQ ID NO: 1363741 - DNA, 25 bp, Homo sapien
tgaaatagtgaaagctgaggatagg

SEQ ID NO: 1363742 - DNA, 25 bp, Homo sapien
ctgaaatagtgaaagctgaggatag

SEQ ID NO: 1363743 - DNA, 25 bp, Homo sapien
gtgggctctgtgacttcccacactc

SEQ ID NO: 1363744 - DNA, 25 bp, Homo sapien
cttcgttgctgtgggctctgtgact

SEQ ID NO: 1363745 - DNA, 25 bp, Homo sapien
gttgctgtgggctctgtgacttccc

SEQ ID NO: 1363746 - DNA, 25 bp, Homo sapien
ctgtgggctctgtgacttcccacac

SEQ ID NO: 1363747 - DNA, 25 bp, Homo sapien
tactccctggggggtatgagccttg

SEQ ID NO: 1363748 - DNA, 25 bp, Homo sapien
ctggggggtatgagccttgggcact

SEQ ID NO: 1363749 - DNA, 25 bp, Homo sapien
gctgtactccctggggggtatgagc

SEQ ID NO: 1363750 - DNA, 25 bp, Homo sapien
ccctggggggtatgagccttgggca

SEQ ID NO: 1363751 - DNA, 25 bp, Homo sapien
tacaatggatagactgtgcgcgcac

SEQ ID NO: 1363752 - DNA, 25 bp, Homo sapien
ggaacaattgccgtgcatagcagaa

SEQ ID NO: 1363753 - DNA, 25 bp, Homo sapien
taaactatacgtgcgcttgctgcaa

SEQ ID NO: 1363754 - DNA, 25 bp, Homo sapien
tacaagcgtgtgtaccaagcatggc

SEQ ID NO: 1363755 - DNA, 25 bp, Homo sapien
gacagtctgcgtggctgaggtacca

SEQ ID NO: 1363756 - DNA, 25 bp, Homo sapien
cataggaaggactggctagttgaca

SEQ ID NO: 1363757 - DNA, 25 bp, Homo sapien
cataggtttgtgcataggaaggact

SEQ ID NO: 1363758 - DNA, 25 bp, Homo sapien
gagaaatggtcatcagtacacttgt

SEQ ID NO: 1363759 - DNA, 25 bp, Homo sapien
cctactgtaatgtgcctcctggagt

SEQ ID NO: 1363760 - DNA, 25 bp, Homo sapien
tgacttcagtcgctaggattctctg

SEQ ID NO: 1363761 - DNA, 25 bp, Homo sapien
taacttgagtgtcatgccctcttgc

SEQ ID NO: 1363762 - DNA, 25 bp, Homo sapien
cctggagttgtgcaatgaggcatcc

SEQ ID NO: 1363763 - DNA, 25 bp, Homo sapien
cacattcgcctggttctcttgtttt

SEQ ID NO: 1363764 - DNA, 25 bp, Homo sapien
tggttctcttgttttcgactctggg

SEQ ID NO: 1363765 - DNA, 25 bp, Homo sapien
tctcttgttttcgactctgggttct

SEQ ID NO: 1363766 - DNA, 25 bp, Homo sapien
cgcctggttctcttgttttcgactc

SEQ ID NO: 1363767 - DNA, 25 bp, Homo sapien
cacagatccagaaggccaaacagac

SEQ ID NO: 1363768 - DNA, 25 bp, Homo sapien
catttcacactaggttctggagtcc

SEQ ID NO: 1363769 - DNA, 25 bp, Homo sapien
gaagaggagttcattcaacagctac

SEQ ID NO: 1363770 - DNA, 25 bp, Homo sapien
catggcacggatgatattcagcgaa

SEQ ID NO: 1363771 - DNA, 25 bp, Homo sapien
tggataataccagagtgtgcctgtc

SEQ ID NO: 1363772 - DNA, 25 bp, Homo sapien
gcctgtccacagtcatgagtttcag

SEQ ID NO: 1363773 - DNA, 25 bp, Homo sapien
caaggtcgattgttgatcaagggcc

SEQ ID NO: 1363774 - DNA, 25 bp, Homo sapien
ggcccacaaagagcactggataata

SEQ ID NO: 1363775 - DNA, 25 bp, Homo sapien
taattctaggcagtgcctctcagcg

SEQ ID NO: 1363776 - DNA, 25 bp, Homo sapien
caattacatgcactttaaacagagg

SEQ ID NO: 1363777 - DNA, 25 bp, Homo sapien
gcttcgtttacacatagggcttaat

SEQ ID NO: 1363778 - DNA, 25 bp, Homo sapien
tgtacagtggtttgggttgaaccca

SEQ ID NO: 1363779 - DNA, 25 bp, Homo sapien
ccctgggttccatcactgggaggga

SEQ ID NO: 1363780 - DNA, 25 bp, Homo sapien
cttcagcagtctgactccggtgggt

SEQ ID NO: 1363781 - DNA, 25 bp, Homo sapien
tcactgggagggacatattcaccag

SEQ ID NO: 1363782 - DNA, 25 bp, Homo sapien
ggttccatcactgggagggacatat

SEQ ID NO: 1363783 - DNA, 25 bp, Homo sapien
ttgccagaaacttgtcaattgggtt

SEQ ID NO: 1363784 - DNA, 25 bp, Homo sapien
gtgttgaattgccagaaacttgtca

SEQ ID NO: 1363785 - DNA, 25 bp, Homo sapien
ttctgacgtgcgatactacatggtg

SEQ ID NO: 1363786 - DNA, 25 bp, Homo sapien
cgatactacatggtgttgaattgcc

SEQ ID NO: 1363787 - DNA, 25 bp, Homo sapien
tcccatgataggccggctgcaagtt

SEQ ID NO: 1363788 - DNA, 25 bp, Homo sapien
cccatgataggccggctgcaagttg

SEQ ID NO: 1363789 - DNA, 25 bp, Homo sapien
gtcccatgataggccggctgcaagt

SEQ ID NO: 1363790 - DNA, 25 bp, Homo sapien
tcttgccttacagcttccggggagg

SEQ ID NO: 1363791 - DNA, 25 bp, Homo sapien
tctttatatctcctccagtgaattc

SEQ ID NO: 1363792 - DNA, 25 bp, Homo sapien
gctgtgggagtctcactgcttcgaa

SEQ ID NO: 1363793 - DNA, 25 bp, Homo sapien
taattcgtggatgttttgtgaaacc

SEQ ID NO: 1363794 - DNA, 25 bp, Homo sapien
caaatataatcagatttaagttttt

SEQ ID NO: 1363795 - DNA, 25 bp, Homo sapien
gaaccaataattttcaaatataatc

SEQ ID NO: 1363796 - DNA, 25 bp, Homo sapien
tttcaaatataatcagatttaagtt

SEQ ID NO: 1363797 - DNA, 25 bp, Homo sapien
ccaataattttcaaatataatcaga

SEQ ID NO: 1363798 - DNA, 25 bp, Homo sapien
ccctagtagggtttggtggcatagt

SEQ ID NO: 1363799 - DNA, 25 bp, Homo sapien
cattcatgatctgtgtcctcgagga

SEQ ID NO: 1363800 - DNA, 25 bp, Homo sapien
ctttggtagagcagccctcccatgt

SEQ ID NO: 1363801 - DNA, 25 bp, Homo sapien
caggtactgcccctagtagggtttg

SEQ ID NO: 1363802 - DNA, 25 bp, Homo sapien
tggcatttcccactcttattttcct

SEQ ID NO: 1363803 - DNA, 25 bp, Homo sapien
gatgtaaggtaagtggcatttccca

SEQ ID NO: 1363804 - DNA, 25 bp, Homo sapien
aaagtgatgctccaaagaggatgta

SEQ ID NO: 1363805 - DNA, 25 bp, Homo sapien
ttttgcacctcctcttttaggattg

SEQ ID NO: 1363806 - DNA, 25 bp, Homo sapien
cttggccaaggctgtgtagttgggt

SEQ ID NO: 1363807 - DNA, 25 bp, Homo sapien
ttggccaaggctgtgtagttgggtt

SEQ ID NO: 1363808 - DNA, 25 bp, Homo sapien
aggctgtgtagttgggtttgaggtc

SEQ ID NO: 1363809 - DNA, 25 bp, Homo sapien
ctgtgtagttgggtttgaggtccat

SEQ ID NO: 1363810 - DNA, 25 bp, Homo sapien
tcttgtgctgggttataattgctca

SEQ ID NO: 1363811 - DNA, 25 bp, Homo sapien
tatcaaagagcactatccccatctc

SEQ ID NO: 1363812 - DNA, 25 bp, Homo sapien
ctctacctagttgtactgtggctga

SEQ ID NO: 1363813 - DNA, 25 bp, Homo sapien
ttctttgaagtaacaatccctggtg

SEQ ID NO: 1363814 - DNA, 25 bp, Homo sapien
cattttcactccagtggttgtggtg

SEQ ID NO: 1363815 - DNA, 25 bp, Homo sapien
cactccagtggttgtggtgactgtg

SEQ ID NO: 1363816 - DNA, 25 bp, Homo sapien
gcaaagaagcacgaggaccttcatt

SEQ ID NO: 1363817 - DNA, 25 bp, Homo sapien
aaagaagcacgaggaccttcatttt

SEQ ID NO: 1363818 - DNA, 25 bp, Homo sapien
ctggtagttgccagccaatgttgga

SEQ ID NO: 1363819 - DNA, 25 bp, Homo sapien
ttgccagccaatgttggaggtctga

SEQ ID NO: 1363820 - DNA, 25 bp, Homo sapien
ctgactgggtccctccatctggtag

SEQ ID NO: 1363821 - DNA, 25 bp, Homo sapien
tagttgccagccaatgttggaggtc

SEQ ID NO: 1363822 - DNA, 25 bp, Homo sapien
tatttggcttcttactagagaagac

SEQ ID NO: 1363823 - DNA, 25 bp, Homo sapien
tttggcttcttactagagaagacct

SEQ ID NO: 1363824 - DNA, 25 bp, Homo sapien
gcttcttactagagaagacctatat

SEQ ID NO: 1363825 - DNA, 25 bp, Homo sapien
tcttactagagaagacctatataca

SEQ ID NO: 1363826 - DNA, 25 bp, Homo sapien
tgaaattcctgcccatggtccccat

SEQ ID NO: 1363827 - DNA, 25 bp, Homo sapien
ctgcctgaaattcctgcccatggtc

SEQ ID NO: 1363828 - DNA, 25 bp, Homo sapien
attcctgcccatggtccccatgata

SEQ ID NO: 1363829 - DNA, 25 bp, Homo sapien
tgcctgaaattcctgcccatggtcc

SEQ ID NO: 1363830 - DNA, 25 bp, Homo sapien
tgtggttcacccacactggactgcc

SEQ ID NO: 1363831 - DNA, 25 bp, Homo sapien
tgaggatgtggttcacccacactgg

SEQ ID NO: 1363832 - DNA, 25 bp, Homo sapien
gaggactgaggatgtggttcaccca

SEQ ID NO: 1363833 - DNA, 25 bp, Homo sapien
gactgaggatgtggttcacccacac

SEQ ID NO: 1363834 - DNA, 25 bp, Homo sapien
ggtgtacaggtatgttattgaataa

SEQ ID NO: 1363835 - DNA, 25 bp, Homo sapien
tgttgttcaaattatgactttcccc

SEQ ID NO: 1363836 - DNA, 25 bp, Homo sapien
tttccccacattccatggaaaactc

SEQ ID NO: 1363837 - DNA, 25 bp, Homo sapien
cctctcacaggggtgtacaggtatg

SEQ ID NO: 1363838 - DNA, 25 bp, Homo sapien
gaggctgataagcacagtttctcat

SEQ ID NO: 1363839 - DNA, 25 bp, Homo sapien
cacctgaggctgataagcacagttt

SEQ ID NO: 1363840 - DNA, 25 bp, Homo sapien
cctgaggctgataagcacagtttct

SEQ ID NO: 1363841 - DNA, 25 bp, Homo sapien
caccacctgaggctgataagcacag

SEQ ID NO: 1363842 - DNA, 25 bp, Homo sapien
catttggcggcagaagaggccgatt

SEQ ID NO: 1363843 - DNA, 25 bp, Homo sapien
ctcactgcccatgataggattatat

SEQ ID NO: 1363844 - DNA, 25 bp, Homo sapien
tgactgaaaatgtggtcagcaggag

SEQ ID NO: 1363845 - DNA, 25 bp, Homo sapien
ggattatattctgattgactgaaaa

SEQ ID NO: 1363846 - DNA, 25 bp, Homo sapien
gccaaaaatgttcagcaagggcaaa

SEQ ID NO: 1363847 - DNA, 25 bp, Homo sapien
gctcaatgcaatttggttgcacatt

SEQ ID NO: 1363848 - DNA, 25 bp, Homo sapien
tcaatgcaatttggttgcacattat

SEQ ID NO: 1363849 - DNA, 25 bp, Homo sapien
aaatgttcagcaagggcaaaatgtg

SEQ ID NO: 1363850 - DNA, 25 bp, Homo sapien
ctctgattttccgtgtttctgttcc

SEQ ID NO: 1363851 - DNA, 25 bp, Homo sapien
gagcttttgcatagctttggtttgg

SEQ ID NO: 1363852 - DNA, 25 bp, Homo sapien
tagagcttttgcatagctttggttt

SEQ ID NO: 1363853 - DNA, 25 bp, Homo sapien
ctgattttccgtgtttctgttccat

SEQ ID NO: 1363854 - DNA, 25 bp, Homo sapien
catcctttggcaggggtgctcagtg

SEQ ID NO: 1363855 - DNA, 25 bp, Homo sapien
cagtgcacttgagtcagatgagaaa

SEQ ID NO: 1363856 - DNA, 25 bp, Homo sapien
ttctttgggaataatagagttcttc

SEQ ID NO: 1363857 - DNA, 25 bp, Homo sapien
aataatagagttcttctcccttaga

SEQ ID NO: 1363858 - DNA, 25 bp, Homo sapien
ttcagagttgctgccatatggttcc

SEQ ID NO: 1363859 - DNA, 25 bp, Homo sapien
cataaaggttctgccaaaattcccg

SEQ ID NO: 1363860 - DNA, 25 bp, Homo sapien
tgctgccatatggttcccataaagg

SEQ ID NO: 1363861 - DNA, 25 bp, Homo sapien
caaaattcccgtggttctcacaaga

SEQ ID NO: 1363862 - DNA, 25 bp, Homo sapien
tggcagacatgggagagacaggcaa

SEQ ID NO: 1363863 - DNA, 25 bp, Homo sapien
cgggtggcagacatgggagagacag

SEQ ID NO: 1363864 - DNA, 25 bp, Homo sapien
ggtggcagacatgggagagacaggc

SEQ ID NO: 1363865 - DNA, 25 bp, Homo sapien
ctgcgggtggcagacatgggagaga

SEQ ID NO: 1363866 - DNA, 25 bp, Homo sapien
aggcaagtgttgtctcttagaaggc

SEQ ID NO: 1363867 - DNA, 25 bp, Homo sapien
ggaagacatcccatggaaggcactt

SEQ ID NO: 1363868 - DNA, 25 bp, Homo sapien
gcactttattttgcccagaagctgg

SEQ ID NO: 1363869 - DNA, 25 bp, Homo sapien
cagaaggcaagtgttgtctcttaga

SEQ ID NO: 1363870 - DNA, 25 bp, Homo sapien
taaagtgatatttgccagtaaaagc

SEQ ID NO: 1363871 - DNA, 25 bp, Homo sapien
caggttgtcttgtcaaatgagttat

SEQ ID NO: 1363872 - DNA, 25 bp, Homo sapien
gaatggcatcctttataattaaggc

SEQ ID NO: 1363873 - DNA, 25 bp, Homo sapien
tttcaaaatgtagcctgaatggcat

SEQ ID NO: 1363874 - DNA, 25 bp, Homo sapien
caaaactgcttccttttcagggcgc

SEQ ID NO: 1363875 - DNA, 25 bp, Homo sapien
gcttccttttcagggcgctgaacac

SEQ ID NO: 1363876 - DNA, 25 bp, Homo sapien
ttcaaaactgcttccttttcagggc

SEQ ID NO: 1363877 - DNA, 25 bp, Homo sapien
actgcttccttttcagggcgctgaa

SEQ ID NO: 1363878 - DNA, 25 bp, Homo sapien
cccatgtctacatactgctgtgttt

SEQ ID NO: 1363879 - DNA, 25 bp, Homo sapien
gatcttgcacttgtagattgtgtag

SEQ ID NO: 1363880 - DNA, 25 bp, Homo sapien
tatcccataaaatatcccagcaggt

SEQ ID NO: 1363881 - DNA, 25 bp, Homo sapien
agccccagatcttgcacttgtagat

SEQ ID NO: 1363882 - DNA, 25 bp, Homo sapien
gaagtaaataatatctggacattgc

SEQ ID NO: 1363883 - DNA, 25 bp, Homo sapien
taatatctggacattgcagtacaat

SEQ ID NO: 1363884 - DNA, 25 bp, Homo sapien
aaataatatctggacattgcagtac

SEQ ID NO: 1363885 - DNA, 25 bp, Homo sapien
agtaaataatatctggacattgcag

SEQ ID NO: 1363886 - DNA, 25 bp, Homo sapien
cttgctgctttctcaatgctgactt

SEQ ID NO: 1363887 - DNA, 25 bp, Homo sapien
tgtctgagatccttgctgctttctc

SEQ ID NO: 1363888 - DNA, 25 bp, Homo sapien
gcatgtctgagatccttgctgcttt

SEQ ID NO: 1363889 - DNA, 25 bp, Homo sapien
ttttgaaagtttcaggcctacgtgc

SEQ ID NO: 1363890 - DNA, 25 bp, Homo sapien
tgactgccgggcaatggcatcctga

SEQ ID NO: 1363891 - DNA, 25 bp, Homo sapien
tccccctcaggttgtgcttttgtga

SEQ ID NO: 1363892 - DNA, 25 bp, Homo sapien
tttgtgacatgggtctctttccttt

SEQ ID NO: 1363893 - DNA, 25 bp, Homo sapien
aggctgactgccgggcaatggcatc

SEQ ID NO: 1363894 - DNA, 25 bp, Homo sapien
tttctaggagactccgtccccacca

SEQ ID NO: 1363895 - DNA, 25 bp, Homo sapien
gtccccaccagacctgccgtctcat

SEQ ID NO: 1363896 - DNA, 25 bp, Homo sapien
acctgccgtctcatgttcccatttg

SEQ ID NO: 1363897 - DNA, 25 bp, Homo sapien
ccagacctgccgtctcatgttccca

SEQ ID NO: 1363898 - DNA, 25 bp, Homo sapien
ctttgggtagcatacaagaatattc

SEQ ID NO: 1363899 - DNA, 25 bp, Homo sapien
tcacatcagccaataagtaaaaagc

SEQ ID NO: 1363900 - DNA, 25 bp, Homo sapien
ttcattacattccaagctagtttct

SEQ ID NO: 1363901 - DNA, 25 bp, Homo sapien
tattcaggcccatgaagaaggtcat

SEQ ID NO: 1363902 - DNA, 25 bp, Homo sapien
aacttgttgtaaaatctttgcattc

SEQ ID NO: 1363903 - DNA, 25 bp, Homo sapien
taataacttgttgtaaaatctttgc

SEQ ID NO: 1363904 - DNA, 25 bp, Homo sapien
ttgttcagctgaatctcccaggact

SEQ ID NO: 1363905 - DNA, 25 bp, Homo sapien
cttgttgtaaaatctttgcattcag

SEQ ID NO: 1363906 - DNA, 25 bp, Homo sapien
ccattctgttcttgcttctattggt

SEQ ID NO: 1363907 - DNA, 25 bp, Homo sapien
ttgcttctattggtttctccttcat

SEQ ID NO: 1363908 - DNA, 25 bp, Homo sapien
ttctgttcttgcttctattggtttc

SEQ ID NO: 1363909 - DNA, 25 bp, Homo sapien
gttcttgcttctattggtttctcct

SEQ ID NO: 1363910 - DNA, 25 bp, Homo sapien
gaaatgagccagttgcacctagctg

SEQ ID NO: 1363911 - DNA, 25 bp, Homo sapien
cagagatttactggagcagacaggc

SEQ ID NO: 1363912 - DNA, 25 bp, Homo sapien
gcttgaaagagatggactgccaccg

SEQ ID NO: 1363913 - DNA, 25 bp, Homo sapien
gacttatatcaaccctggcatgctg

SEQ ID NO: 1363914 - DNA, 25 bp, Homo sapien
caagctccattcagactcacaaacc

SEQ ID NO: 1363915 - DNA, 25 bp, Homo sapien
gtttacaagaaggatctagcttagg

SEQ ID NO: 1363916 - DNA, 25 bp, Homo sapien
cagactcacaaaccacatttagaat

SEQ ID NO: 1363917 - DNA, 25 bp, Homo sapien
gcttaggaactacagcttgactggc

SEQ ID NO: 1363918 - DNA, 25 bp, Homo sapien
tgctcaatcatggacttgccggccc

SEQ ID NO: 1363919 - DNA, 25 bp, Homo sapien
tgtgacttcgctgacattagcaagc

SEQ ID NO: 1363920 - DNA, 25 bp, Homo sapien
gctctggctcatgttgctcaatcat

SEQ ID NO: 1363921 - DNA, 25 bp, Homo sapien
tgagtgcccgtgactgtcctaattg

SEQ ID NO: 1363922 - DNA, 25 bp, Homo sapien
cttgctcccacagatatgatacttc

SEQ ID NO: 1363923 - DNA, 25 bp, Homo sapien
tcttgctcccacagatatgatactt

SEQ ID NO: 1363924 - DNA, 25 bp, Homo sapien
catactcttcctttcagctgacctg

SEQ ID NO: 1363925 - DNA, 25 bp, Homo sapien
cagctgacctgaagttcaagccctg

SEQ ID NO: 1363926 - DNA, 25 bp, Homo sapien
tcttgatgtctcttagtacctgaca

SEQ ID NO: 1363927 - DNA, 25 bp, Homo sapien
cctgacattatactgctatggtttc

SEQ ID NO: 1363928 - DNA, 25 bp, Homo sapien
ggagaagcggtgcatttcagaatat

SEQ ID NO: 1363929 - DNA, 25 bp, Homo sapien
cgtggagaagcggtgcatttcagaa

SEQ ID NO: 1363930 - DNA, 25 bp, Homo sapien
tggagaagcggtgcatttcagaata

SEQ ID NO: 1363931 - DNA, 25 bp, Homo sapien
ggcgtggagaagcggtgcatttcag

SEQ ID NO: 1363932 - DNA, 25 bp, Homo sapien
cgtgctgctgggacaggactgtgaa

SEQ ID NO: 1363933 - DNA, 25 bp, Homo sapien
gacaggactgtgaaatcatcctcca

SEQ ID NO: 1363934 - DNA, 25 bp, Homo sapien
acaggactgtgaaatcatcctccac

SEQ ID NO: 1363935 - DNA, 25 bp, Homo sapien
taattagtaatccttacaacccata

SEQ ID NO: 1363936 - DNA, 25 bp, Homo sapien
aattacaactgccattttatggatg

SEQ ID NO: 1363937 - DNA, 25 bp, Homo sapien
ctccatataccttagttcaaggttt

SEQ ID NO: 1363938 - DNA, 25 bp, Homo sapien
tgaaggaacatgagcatcggaattt

SEQ ID NO: 1363939 - DNA, 25 bp, Homo sapien
tatgtctagtggttcataagtcaca

SEQ ID NO: 1363940 - DNA, 25 bp, Homo sapien
ctttcttgccctggagactcaatga

SEQ ID NO: 1363941 - DNA, 25 bp, Homo sapien
tcaaaactaaatggagtcctgcata

SEQ ID NO: 1363942 - DNA, 25 bp, Homo sapien
tagtgcaagcctataaaacctcagc

SEQ ID NO: 1363943 - DNA, 25 bp, Homo sapien
gagatgggagataaaaccagcaaag

SEQ ID NO: 1363944 - DNA, 25 bp, Homo sapien
caaaatatctctgaaaatgaaagag

SEQ ID NO: 1363945 - DNA, 25 bp, Homo sapien
tctctgaaaatgaaagagatgggag

SEQ ID NO: 1363946 - DNA, 25 bp, Homo sapien
gcctcagaactttttattaaatcac

SEQ ID NO: 1363947 - DNA, 25 bp, Homo sapien
gcaagaagaagttctcaagagagcc

SEQ ID NO: 1363948 - DNA, 25 bp, Homo sapien
caagaagaagttctcaagagagcct

SEQ ID NO: 1363949 - DNA, 25 bp, Homo sapien
cctggcatttccactccaattggaa

SEQ ID NO: 1363950 - DNA, 25 bp, Homo sapien
gagcaacctggcatttccactccaa

SEQ ID NO: 1363951 - DNA, 25 bp, Homo sapien
gctccaaagcggaagatgcaccaag

SEQ ID NO: 1363952 - DNA, 25 bp, Homo sapien
ggtcacagtggcagcactccggtag

SEQ ID NO: 1363953 - DNA, 25 bp, Homo sapien
tgactggtgtcttctttgggtcaca

SEQ ID NO: 1363954 - DNA, 25 bp, Homo sapien
ccatgtctagggatgactggtgtct

SEQ ID NO: 1363955 - DNA, 25 bp, Homo sapien
atgcttaaccttgaatgattttcct

SEQ ID NO: 1363956 - DNA, 25 bp, Homo sapien
cctatgcttaaccttgaatgatttt

SEQ ID NO: 1363957 - DNA, 25 bp, Homo sapien
tttcccaaccggtatcccagtgcca

SEQ ID NO: 1363958 - DNA, 25 bp, Homo sapien
ttcccaaccggtatcccagtgccat

SEQ ID NO: 1363959 - DNA, 25 bp, Homo sapien
ggtctatactagttgaacacttcag

SEQ ID NO: 1363960 - DNA, 25 bp, Homo sapien
tctgtacaccaggtctatactagtt

SEQ ID NO: 1363961 - DNA, 25 bp, Homo sapien
tactagttgaacacttcagggccat

SEQ ID NO: 1363962 - DNA, 25 bp, Homo sapien
ttgtttctgtacaccaggtctatac

SEQ ID NO: 1363963 - DNA, 25 bp, Homo sapien
tgcaggtggccatccattccaactc

SEQ ID NO: 1363964 - DNA, 25 bp, Homo sapien
tcttctatcctcacagatgcactgc

SEQ ID NO: 1363965 - DNA, 25 bp, Homo sapien
gcaggtggccatccattccaactct

SEQ ID NO: 1363966 - DNA, 25 bp, Homo sapien
tcagagtcagtatcttctatcctca

SEQ ID NO: 1363967 - DNA, 25 bp, Homo sapien
ctagttggtggacacatggtgtcgt

SEQ ID NO: 1363968 - DNA, 25 bp, Homo sapien
aatgctgcctgatggctataaacac

SEQ ID NO: 1363969 - DNA, 25 bp, Homo sapien
gtgtcgtagctctgtgaaatgctgc

SEQ ID NO: 1363970 - DNA, 25 bp, Homo sapien
gcctgatggctataaacacagccat

SEQ ID NO: 1363971 - DNA, 25 bp, Homo sapien
gaaggatcggctctgcttgtcctcc

SEQ ID NO: 1363972 - DNA, 25 bp, Homo sapien
gcttgtcctcctgcgttatttgcaa

SEQ ID NO: 1363973 - DNA, 25 bp, Homo sapien
agctgatagaagatgaaggatcggc

SEQ ID NO: 1363974 - DNA, 25 bp, Homo sapien
caaaacctgtgaggcactttgcaga

SEQ ID NO: 1363975 - DNA, 25 bp, Homo sapien
actgcttctgctaaatttcctttgt

SEQ ID NO: 1363976 - DNA, 25 bp, Homo sapien
cactgcttctgctaaatttcctttg

SEQ ID NO: 1363977 - DNA, 25 bp, Homo sapien
ctgcttctgctaaatttcctttgta

SEQ ID NO: 1363978 - DNA, 25 bp, Homo sapien
tgcttctgctaaatttcctttgtat

SEQ ID NO: 1363979 - DNA, 25 bp, Homo sapien
taggcatttcttcagctcgtcacaa

SEQ ID NO: 1363980 - DNA, 25 bp, Homo sapien
tcacaatagcgctctctttccatgg

SEQ ID NO: 1363981 - DNA, 25 bp, Homo sapien
tagtccatagataaacgatgttggc

SEQ ID NO: 1363982 - DNA, 25 bp, Homo sapien
taatagtgtgctgcgtagtccatag

SEQ ID NO: 1363983 - DNA, 25 bp, Homo sapien
acaatctgaacagttctttccttaa

SEQ ID NO: 1363984 - DNA, 25 bp, Homo sapien
gcctggaggatattaggcctcgtac

SEQ ID NO: 1363985 - DNA, 25 bp, Homo sapien
ggggtctgcagtatatgtggaacaa

SEQ ID NO: 1363986 - DNA, 25 bp, Homo sapien
cctcgtacagcaattgggcaaatgt

SEQ ID NO: 1363987 - DNA, 25 bp, Homo sapien
gtgaggtgacctcttggctgctccc

SEQ ID NO: 1363988 - DNA, 25 bp, Homo sapien
ggctgctcccttatgggtcccagga

SEQ ID NO: 1363989 - DNA, 25 bp, Homo sapien
catcaattgtccatgagtcagctcc

SEQ ID NO: 1363990 - DNA, 25 bp, Homo sapien
ggacctaaccacagttggccaatca

SEQ ID NO: 1363991 - DNA, 25 bp, Homo sapien
cacgggctgcagtgttctgttcaga

SEQ ID NO: 1363992 - DNA, 25 bp, Homo sapien
tacacgctccatgggcacttgcagg

SEQ ID NO: 1363993 - DNA, 25 bp, Homo sapien
gagagatgctgcccctactacacgc

SEQ ID NO: 1363994 - DNA, 25 bp, Homo sapien
agctgtgagagagccatgagaagca

SEQ ID NO: 1363995 - DNA, 25 bp, Homo sapien
tgacaccggtgtccacaagatttcc

SEQ ID NO: 1363996 - DNA, 25 bp, Homo sapien
cagatgacaccggtgtccacaagat

SEQ ID NO: 1363997 - DNA, 25 bp, Homo sapien
ggtgtccacaagatttcctgcacca

SEQ ID NO: 1363998 - DNA, 25 bp, Homo sapien
aacaccagatgacaccggtgtccac

SEQ ID NO: 1363999 - DNA, 25 bp, Homo sapien
acaaatacatttgccagaacattac

SEQ ID NO: 1364000 - DNA, 25 bp, Homo sapien
gattcctttcacaaatacatttgcc

SEQ ID NO: 1364001 - DNA, 25 bp, Homo sapien
tcacaaatacatttgccagaacatt

SEQ ID NO: 1364002 - DNA, 25 bp, Homo sapien
tcctttcacaaatacatttgccaga

SEQ ID NO: 1364003 - DNA, 25 bp, Homo sapien
ccctacacagacacattttgacaca

SEQ ID NO: 1364004 - DNA, 25 bp, Homo sapien
tgtcaaattgactaagagggaaact

SEQ ID NO: 1364005 - DNA, 25 bp, Homo sapien
aattcagcatgcagaagtgactttg

SEQ ID NO: 1364006 - DNA, 25 bp, Homo sapien
tgatgttgcccggtccatctcccta

SEQ ID NO: 1364007 - DNA, 25 bp, Homo sapien
gatgactttagcctcagcagttttc

SEQ ID NO: 1364008 - DNA, 25 bp, Homo sapien
ccacttgatgactttagcctcagca

SEQ ID NO: 1364009 - DNA, 25 bp, Homo sapien
cttgatgactttagcctcagcagtt

SEQ ID NO: 1364010 - DNA, 25 bp, Homo sapien
atgactttagcctcagcagttttcc

SEQ ID NO: 1364011 - DNA, 25 bp, Homo sapien
ttgtggtaattaactgtggtcagcg

SEQ ID NO: 1364012 - DNA, 25 bp, Homo sapien
gcgtctcgaggtcatcattataaac

SEQ ID NO: 1364013 - DNA, 25 bp, Homo sapien
agtgtccataatagaattgtggtaa

SEQ ID NO: 1364014 - DNA, 25 bp, Homo sapien
ttataaacatcactcttgactggag

SEQ ID NO: 1364015 - DNA, 25 bp, Homo sapien
cagcacagcaccataagctttatat

SEQ ID NO: 1364016 - DNA, 25 bp, Homo sapien
ctaggtctttgagcattgagtattc

SEQ ID NO: 1364017 - DNA, 25 bp, Homo sapien
ctgtgctaaaactgtcagcacagca

SEQ ID NO: 1364018 - DNA, 25 bp, Homo sapien
gacctaggtctttgagcattgagta

SEQ ID NO: 1364019 - DNA, 25 bp, Homo sapien
acttccactccaaggtccacgtaat

SEQ ID NO: 1364020 - DNA, 25 bp, Homo sapien
ccagcagggttggttgccgtgacat

SEQ ID NO: 1364021 - DNA, 25 bp, Homo sapien
gtaatccacatcatcccatgtcctg

SEQ ID NO: 1364022 - DNA, 25 bp, Homo sapien
ggttgccgtgacatggtagctgtgg

SEQ ID NO: 1364023 - DNA, 25 bp, Homo sapien
gaattgccacgctgtgtggccatca

SEQ ID NO: 1364024 - DNA, 25 bp, Homo sapien
caagaagctctttcaagacaggaac

SEQ ID NO: 1364025 - DNA, 25 bp, Homo sapien
ggaaccgccttttctttgtgaatgc

SEQ ID NO: 1364026 - DNA, 25 bp, Homo sapien
gaggtcctctctcagaattgccacg

SEQ ID NO: 1364027 - DNA, 25 bp, Homo sapien
caaaaatggctgttgagcttctgtc

SEQ ID NO: 1364028 - DNA, 25 bp, Homo sapien
gagcctgaaaaacagcgtgctggca

SEQ ID NO: 1364029 - DNA, 25 bp, Homo sapien
aagctcagtgatggtagagccgctg

SEQ ID NO: 1364030 - DNA, 25 bp, Homo sapien
tgctggcagcattgattcagaagct

SEQ ID NO: 1364031 - DNA, 25 bp, Homo sapien
agctgcaaactaaattctcaggagc

SEQ ID NO: 1364032 - DNA, 25 bp, Homo sapien
tcaggagctttggtatgttctataa

SEQ ID NO: 1364033 - DNA, 25 bp, Homo sapien
taggtaaacccttgccagctgcaaa

SEQ ID NO: 1364034 - DNA, 25 bp, Homo sapien
aaatttcctagggttcattgccagt

SEQ ID NO: 1364035 - DNA, 25 bp, Homo sapien
tatgtgtggagtgtgactccataag

SEQ ID NO: 1364036 - DNA, 25 bp, Homo sapien
ctccataagagtggagaaacaatca

SEQ ID NO: 1364037 - DNA, 25 bp, Homo sapien
catgagatctgcgtggtggtttctt

SEQ ID NO: 1364038 - DNA, 25 bp, Homo sapien
ttgatggacatatgtgtggagtgtg

SEQ ID NO: 1364039 - DNA, 25 bp, Homo sapien
tgttaacatggcacttcgttgccac

SEQ ID NO: 1364040 - DNA, 25 bp, Homo sapien
caccagaaggatgtaaatgagttgt

SEQ ID NO: 1364041 - DNA, 25 bp, Homo sapien
agagccactagctagcttgatgtgt

SEQ ID NO: 1364042 - DNA, 25 bp, Homo sapien
gttgccacaataatttagagccact

SEQ ID NO: 1364043 - DNA, 25 bp, Homo sapien
gtaaggtttatgaaccatgactaac

SEQ ID NO: 1364044 - DNA, 25 bp, Homo sapien
aggtaaggtttatgaaccatgacta

SEQ ID NO: 1364045 - DNA, 25 bp, Homo sapien
ggtaaggtttatgaaccatgactaa

SEQ ID NO: 1364046 - DNA, 25 bp, Homo sapien
ttttagcacatcttcccaagatgac

SEQ ID NO: 1364047 - DNA, 25 bp, Homo sapien
ttgtctctgtgcattttagcacatc

SEQ ID NO: 1364048 - DNA, 25 bp, Homo sapien
gcattttagcacatcttcccaagat

SEQ ID NO: 1364049 - DNA, 25 bp, Homo sapien
ttagcacatcttcccaagatgaccc

SEQ ID NO: 1364050 - DNA, 25 bp, Homo sapien
gctgccccagtttaatctaaaatta

SEQ ID NO: 1364051 - DNA, 25 bp, Homo sapien
ggtgcctgcctttgagtggtgtcat

SEQ ID NO: 1364052 - DNA, 25 bp, Homo sapien
gatgccatttcctgtgtggtgcctg

SEQ ID NO: 1364053 - DNA, 25 bp, Homo sapien
tgtggtgcctgcctttgagtggtgt

SEQ ID NO: 1364054 - DNA, 25 bp, Homo sapien
tgtgtggtgcctgcctttgagtggt

SEQ ID NO: 1364055 - DNA, 25 bp, Homo sapien
tgtgtatatcaccactgtgtgactc

SEQ ID NO: 1364056 - DNA, 25 bp, Homo sapien
aaattggagctctgtgtgtatatca

SEQ ID NO: 1364057 - DNA, 25 bp, Homo sapien
tctccatacttgaaagcgtttaatg

SEQ ID NO: 1364058 - DNA, 25 bp, Homo sapien
cactgtgtgactcctaaatgagagc

SEQ ID NO: 1364059 - DNA, 25 bp, Homo sapien
taatggataggcactgtaataacag

SEQ ID NO: 1364060 - DNA, 25 bp, Homo sapien
gaacagcacaagataatggataggc

SEQ ID NO: 1364061 - DNA, 25 bp, Homo sapien
taacagcgtggcctgtaggagcccc

SEQ ID NO: 1364062 - DNA, 25 bp, Homo sapien
tttcctatcatctgcacataatcct

SEQ ID NO: 1364063 - DNA, 25 bp, Homo sapien
ccgtagaagggaatcttcgaaagat

SEQ ID NO: 1364064 - DNA, 25 bp, Homo sapien
ctgttcacaggaacatgattagcag

SEQ ID NO: 1364065 - DNA, 25 bp, Homo sapien
gctgtgtagcttgtggagaatgaag

SEQ ID NO: 1364066 - DNA, 25 bp, Homo sapien
gtatattttccatccgtagaaggga

SEQ ID NO: 1364067 - DNA, 25 bp, Homo sapien
ctgcttttaggggactgcagtttga

SEQ ID NO: 1364068 - DNA, 25 bp, Homo sapien
tgcttttaggggactgcagtttgaa

SEQ ID NO: 1364069 - DNA, 25 bp, Homo sapien
cttttaggggactgcagtttgaata

SEQ ID NO: 1364070 - DNA, 25 bp, Homo sapien
ttttaggggactgcagtttgaatat

SEQ ID NO: 1364071 - DNA, 25 bp, Homo sapien
aaccgcaggggaaattatacctcag

SEQ ID NO: 1364072 - DNA, 25 bp, Homo sapien
gtacctgccacaaatcagaattatg

SEQ ID NO: 1364073 - DNA, 25 bp, Homo sapien
ctgtgatgggtaataagtacctgcc

SEQ ID NO: 1364074 - DNA, 25 bp, Homo sapien
attatgaattttgtacgcctaacaa

SEQ ID NO: 1364075 - DNA, 25 bp, Homo sapien
aattatctctccttgccgatctttt

SEQ ID NO: 1364076 - DNA, 25 bp, Homo sapien
tttgttgggtatttggctatggcag

SEQ ID NO: 1364077 - DNA, 25 bp, Homo sapien
tgttgggtatttggctatggcagca

SEQ ID NO: 1364078 - DNA, 25 bp, Homo sapien
ctccttgccgatctttttcccattg

SEQ ID NO: 1364079 - DNA, 25 bp, Homo sapien
caagagggaagagattgcaatgcat

SEQ ID NO: 1364080 - DNA, 25 bp, Homo sapien
tatcacagttcttagatcttgcaag

SEQ ID NO: 1364081 - DNA, 25 bp, Homo sapien
ctggaaagcaataatagccttctgt

SEQ ID NO: 1364082 - DNA, 25 bp, Homo sapien
tagccttctgtagtatcacagttct

SEQ ID NO: 1364083 - DNA, 25 bp, Homo sapien
tggtcagtgctgtcaggtacatact

SEQ ID NO: 1364084 - DNA, 25 bp, Homo sapien
cttggtcagtgctgtcaggtacata

SEQ ID NO: 1364085 - DNA, 25 bp, Homo sapien
gtcagtgctgtcaggtacatactcc

SEQ ID NO: 1364086 - DNA, 25 bp, Homo sapien
caggtacatactccttcactgtgtt

SEQ ID NO: 1364087 - DNA, 25 bp, Homo sapien
aaagcattctagcaccctctggcat

SEQ ID NO: 1364088 - DNA, 25 bp, Homo sapien
ggttgaggacaaaagcattctagca

SEQ ID NO: 1364089 - DNA, 25 bp, Homo sapien
attgttgtggctcatggttgaggac

SEQ ID NO: 1364090 - DNA, 25 bp, Homo sapien
ggctcatggttgaggacaaaagcat

SEQ ID NO: 1364091 - DNA, 25 bp, Homo sapien
aatgtctttgcgactcattaacggg

SEQ ID NO: 1364092 - DNA, 25 bp, Homo sapien
taatgtctttgcgactcattaacgg

SEQ ID NO: 1364093 - DNA, 25 bp, Homo sapien
gcactctgagcaccaagacatctca

SEQ ID NO: 1364094 - DNA, 25 bp, Homo sapien
acggggttagttgttttgcactctg

SEQ ID NO: 1364095 - DNA, 25 bp, Homo sapien
ctgcaggcgattgcctccaggtgtt

SEQ ID NO: 1364096 - DNA, 25 bp, Homo sapien
gggaacccattgaaagtcgatgcaa

SEQ ID NO: 1364097 - DNA, 25 bp, Homo sapien
ttgaaagtcgatgcaatttagagca

SEQ ID NO: 1364098 - DNA, 25 bp, Homo sapien
aggtgtttgccagtgggaacccatt

SEQ ID NO: 1364099 - DNA, 25 bp, Homo sapien
ctgccggcaacaggtgtattttagg

SEQ ID NO: 1364100 - DNA, 25 bp, Homo sapien
ggcaacaggtgtattttagggcaga

SEQ ID NO: 1364101 - DNA, 25 bp, Homo sapien
ccggcaacaggtgtattttagggca

SEQ ID NO: 1364102 - DNA, 25 bp, Homo sapien
caacaggtgtattttagggcagaca

SEQ ID NO: 1364103 - DNA, 25 bp, Homo sapien
gacaggactttgactaccaggtgta

SEQ ID NO: 1364104 - DNA, 25 bp, Homo sapien
ggagacaggactttgactaccaggt

SEQ ID NO: 1364105 - DNA, 25 bp, Homo sapien
gactttgactaccaggtgtagtgca

SEQ ID NO: 1364106 - DNA, 25 bp, Homo sapien
tgactaccaggtgtagtgcagaagg

SEQ ID NO: 1364107 - DNA, 25 bp, Homo sapien
gtctgcaactaaaccctgggacact

SEQ ID NO: 1364108 - DNA, 25 bp, Homo sapien
tggagtcaccgtccaggttggaacc

SEQ ID NO: 1364109 - DNA, 25 bp, Homo sapien
gatccagcagatctacatagtctgc

SEQ ID NO: 1364110 - DNA, 25 bp, Homo sapien
agcctccatggcaactttcaccctg

SEQ ID NO: 1364111 - DNA, 25 bp, Homo sapien
cagtcatgtattctaaccagtccgg

SEQ ID NO: 1364112 - DNA, 25 bp, Homo sapien
tcacttttggatgcattagctgtct

SEQ ID NO: 1364113 - DNA, 25 bp, Homo sapien
gccagtggctgtttaccggtttcac

SEQ ID NO: 1364114 - DNA, 25 bp, Homo sapien
tttgcaacaatgaatgcagtcatgt

SEQ ID NO: 1364115 - DNA, 25 bp, Homo sapien
cttctttcgcttgcatgtggatctt

SEQ ID NO: 1364116 - DNA, 25 bp, Homo sapien
catgtggatctttcagacatacgac

SEQ ID NO: 1364117 - DNA, 25 bp, Homo sapien
catacgactcgacacaaactgagta

SEQ ID NO: 1364118 - DNA, 25 bp, Homo sapien
gatctttcagacatacgactcgaca

SEQ ID NO: 1364119 - DNA, 25 bp, Homo sapien
tgcagagctattctcagtataatga

SEQ ID NO: 1364120 - DNA, 25 bp, Homo sapien
cagagctattctcagtataatgaat

SEQ ID NO: 1364121 - DNA, 25 bp, Homo sapien
gctattctcagtataatgaatgtaa

SEQ ID NO: 1364122 - DNA, 25 bp, Homo sapien
gagctattctcagtataatgaatgt

SEQ ID NO: 1364123 - DNA, 25 bp, Homo sapien
tggctccacagaaaagatgccgaag

SEQ ID NO: 1364124 - DNA, 25 bp, Homo sapien
tctctctcagtacacaatttgacag

SEQ ID NO: 1364125 - DNA, 25 bp, Homo sapien
gatgccgaagaagacagctaaaacg

SEQ ID NO: 1364126 - DNA, 25 bp, Homo sapien
gggcaatgctctagcgactactgaa

SEQ ID NO: 1364127 - DNA, 25 bp, Homo sapien
ggctctatacgtgtgtgtttgttca

SEQ ID NO: 1364128 - DNA, 25 bp, Homo sapien
ttagggtggctctatacgtgtgtgt

SEQ ID NO: 1364129 - DNA, 25 bp, Homo sapien
agggtggctctatacgtgtgtgttt

SEQ ID NO: 1364130 - DNA, 25 bp, Homo sapien
ggtggctctatacgtgtgtgtttgt

SEQ ID NO: 1364131 - DNA, 25 bp, Homo sapien
tgcatccctccacacaagctgatct

SEQ ID NO: 1364132 - DNA, 25 bp, Homo sapien
cctccacacaagctgatcttggttc

SEQ ID NO: 1364133 - DNA, 25 bp, Homo sapien
ggttcttaaataactccatgcactt

SEQ ID NO: 1364134 - DNA, 25 bp, Homo sapien
tcttggttcttaaataactccatgc

SEQ ID NO: 1364135 - DNA, 25 bp, Homo sapien
tattccatgtccgtatctctttcct

SEQ ID NO: 1364136 - DNA, 25 bp, Homo sapien
tatctgtactgccaattactttctt

SEQ ID NO: 1364137 - DNA, 25 bp, Homo sapien
ctttcctatctgtactgccaattac

SEQ ID NO: 1364138 - DNA, 25 bp, Homo sapien
cccatttccttattccatgtccgta

SEQ ID NO: 1364139 - DNA, 25 bp, Homo sapien
tggtcctgacatggtatcattttca

SEQ ID NO: 1364140 - DNA, 25 bp, Homo sapien
ggatctaaatggttaagcatgctgt

SEQ ID NO: 1364141 - DNA, 25 bp, Homo sapien
tttcaggatctaaatggttaagcat

SEQ ID NO: 1364142 - DNA, 25 bp, Homo sapien
agcatgctgtttgtatgctgagacc

SEQ ID NO: 1364143 - DNA, 25 bp, Homo sapien
gcttccagcacctgaacaatttggt

SEQ ID NO: 1364144 - DNA, 25 bp, Homo sapien
gagtgaaacaccacttacttggcaa

SEQ ID NO: 1364145 - DNA, 25 bp, Homo sapien
tatctcaaggcataacgcttccagc

SEQ ID NO: 1364146 - DNA, 25 bp, Homo sapien
gaagcaaaggctagatggaatcaac

SEQ ID NO: 1364147 - DNA, 25 bp, Homo sapien
tactgataaggatctctacagtccg

SEQ ID NO: 1364148 - DNA, 25 bp, Homo sapien
gacatactgataaggatctctacag

SEQ ID NO: 1364149 - DNA, 25 bp, Homo sapien
aaggatctctacagtccgatggcaa

SEQ ID NO: 1364150 - DNA, 25 bp, Homo sapien
tagtctgtagacatactgataagga

SEQ ID NO: 1364151 - DNA, 25 bp, Homo sapien
tctgtgtcaaaggaatgcccgtaag

SEQ ID NO: 1364152 - DNA, 25 bp, Homo sapien
taggcgtctaaatgtggaggtaagt

SEQ ID NO: 1364153 - DNA, 25 bp, Homo sapien
cgtaagaattgttggtaggcgtcta

SEQ ID NO: 1364154 - DNA, 25 bp, Homo sapien
tatcaagatttgttgacccaaagaa

SEQ ID NO: 1364155 - DNA, 25 bp, Homo sapien
gttcatcattcgccgtttcaaccat

SEQ ID NO: 1364156 - DNA, 25 bp, Homo sapien
cggttcatcattcgccgtttcaacc

SEQ ID NO: 1364157 - DNA, 25 bp, Homo sapien
ggttcatcattcgccgtttcaacca

SEQ ID NO: 1364158 - DNA, 25 bp, Homo sapien
ccggttcatcattcgccgtttcaac

SEQ ID NO: 1364159 - DNA, 25 bp, Homo sapien
cagccttaaagcctttatgaacttt

SEQ ID NO: 1364160 - DNA, 25 bp, Homo sapien
ttaaagcctttatgaactttgagaa

SEQ ID NO: 1364161 - DNA, 25 bp, Homo sapien
agccttaaagcctttatgaactttg

SEQ ID NO: 1364162 - DNA, 25 bp, Homo sapien
gccttaaagcctttatgaactttga

SEQ ID NO: 1364163 - DNA, 25 bp, Homo sapien
catctctgagcaccagcccgaaagc

SEQ ID NO: 1364164 - DNA, 25 bp, Homo sapien
tcatctctgagcaccagcccgaaag

SEQ ID NO: 1364165 - DNA, 25 bp, Homo sapien
ctgcgcccggccgtctctcttcttc

SEQ ID NO: 1364166 - DNA, 25 bp, Homo sapien
cgctgcgcccggccgtctctcttct

SEQ ID NO: 1364167 - DNA, 25 bp, Homo sapien
gccgctgcgcccggccgtctctctt

SEQ ID NO: 1364168 - DNA, 25 bp, Homo sapien
tgcgcccggccgtctctcttcttct

SEQ ID NO: 1364169 - DNA, 25 bp, Homo sapien
gcatgattctgcagcagctggtacc

SEQ ID NO: 1364170 - DNA, 25 bp, Homo sapien
catgattctgcagcagctggtaccg

SEQ ID NO: 1364171 - DNA, 25 bp, Homo sapien
attctgcagcagctggtaccggttg

SEQ ID NO: 1364172 - DNA, 25 bp, Homo sapien
tgattctgcagcagctggtaccggt

SEQ ID NO: 1364173 - DNA, 25 bp, Homo sapien
taacattggtgtgctcctgagagca

SEQ ID NO: 1364174 - DNA, 25 bp, Homo sapien
gaccaaggttgattgggccagaagt

SEQ ID NO: 1364175 - DNA, 25 bp, Homo sapien
tctctaagaatagccagaagagcct

SEQ ID NO: 1364176 - DNA, 25 bp, Homo sapien
tgatcctttccttatgaccaaggtt

SEQ ID NO: 1364177 - DNA, 25 bp, Homo sapien
tagtaatcaccctttaagatgaggc

SEQ ID NO: 1364178 - DNA, 25 bp, Homo sapien
cacaagggtataccaattggaagcc

SEQ ID NO: 1364179 - DNA, 25 bp, Homo sapien
tcgtgaaggccgaagaactacctat

SEQ ID NO: 1364180 - DNA, 25 bp, Homo sapien
tctggctgttgtaaccaagtcaggg

SEQ ID NO: 1364181 - DNA, 25 bp, Homo sapien
catctccatcccgttgagttggtcc

SEQ ID NO: 1364182 - DNA, 25 bp, Homo sapien
aatcccatctccatcccgttgagtt

SEQ ID NO: 1364183 - DNA, 25 bp, Homo sapien
cttcaggctggtgacaatacctcca

SEQ ID NO: 1364184 - DNA, 25 bp, Homo sapien
tctccatcccgttgagttggtcctg

SEQ ID NO: 1364185 - DNA, 25 bp, Homo sapien
tgatttacaacgattagcgacagtg

SEQ ID NO: 1364186 - DNA, 25 bp, Homo sapien
tagcgacagtgtagttcttagacat

SEQ ID NO: 1364187 - DNA, 25 bp, Homo sapien
tttacttaaattgtgcaaacgtgat

SEQ ID NO: 1364188 - DNA, 25 bp, Homo sapien
aattgtgcaaacgtgatttacaacg

SEQ ID NO: 1364189 - DNA, 25 bp, Homo sapien
tgatttagttattcacggaactttg

SEQ ID NO: 1364190 - DNA, 25 bp, Homo sapien
gctttctgcttatcgttttgcttca

SEQ ID NO: 1364191 - DNA, 25 bp, Homo sapien
cttgctttctgcttatcgttttgct

SEQ ID NO: 1364192 - DNA, 25 bp, Homo sapien
ttatgatgatttagttattcacgga

SEQ ID NO: 1364193 - DNA, 25 bp, Homo sapien
aaaaaggcttgctggatagaggata

SEQ ID NO: 1364194 - DNA, 25 bp, Homo sapien
aaaggcttgctggatagaggataca

SEQ ID NO: 1364195 - DNA, 25 bp, Homo sapien
gcaggtggagtacataatgatttta

SEQ ID NO: 1364196 - DNA, 25 bp, Homo sapien
gcttgctggatagaggatacatcct

SEQ ID NO: 1364197 - DNA, 25 bp, Homo sapien
cccagttgttctttgatgaagagaa

SEQ ID NO: 1364198 - DNA, 25 bp, Homo sapien
catttgccaaggtctcatggatttt

SEQ ID NO: 1364199 - DNA, 25 bp, Homo sapien
tctgtgttgccttcccagttgttct

SEQ ID NO: 1364200 - DNA, 25 bp, Homo sapien
ttttcataacatttgccaaggtctc

SEQ ID NO: 1364201 - DNA, 25 bp, Homo sapien
caggggtgtaggtccagtgggaggg

SEQ ID NO: 1364202 - DNA, 25 bp, Homo sapien
gagatcttcgctgggcagcttcttt

SEQ ID NO: 1364203 - DNA, 25 bp, Homo sapien
gtgagatcttcgctgggcagcttct

SEQ ID NO: 1364204 - DNA, 25 bp, Homo sapien
gcaggggtgtaggtccagtgggagg

SEQ ID NO: 1364205 - DNA, 25 bp, Homo sapien
agaagactgagtcccttcttaagag

SEQ ID NO: 1364206 - DNA, 25 bp, Homo sapien
caggatgtaggtgatctcttcattt

SEQ ID NO: 1364207 - DNA, 25 bp, Homo sapien
gagtaagaagactgagtcccttctt

SEQ ID NO: 1364208 - DNA, 25 bp, Homo sapien
aagactgagtcccttcttaagagcc

SEQ ID NO: 1364209 - DNA, 25 bp, Homo sapien
tctttgaggcaataggctttcaagt

SEQ ID NO: 1364210 - DNA, 25 bp, Homo sapien
tttctttgaggcaataggctttcaa

SEQ ID NO: 1364211 - DNA, 25 bp, Homo sapien
ctttgaggcaataggctttcaagtg

SEQ ID NO: 1364212 - DNA, 25 bp, Homo sapien
cctgtcttttccagggggtctcagt

SEQ ID NO: 1364213 - DNA, 25 bp, Homo sapien
tctccttctgctctgacttagtttt

SEQ ID NO: 1364214 - DNA, 25 bp, Homo sapien
ctcatcaccatttcaattctccttc

SEQ ID NO: 1364215 - DNA, 25 bp, Homo sapien
atcaccatttcaattctccttctgc

SEQ ID NO: 1364216 - DNA, 25 bp, Homo sapien
ttctccttctgctctgacttagttt

SEQ ID NO: 1364217 - DNA, 25 bp, Homo sapien
tagctctagaaagcttgatgcagct

SEQ ID NO: 1364218 - DNA, 25 bp, Homo sapien
atgcagctttagaaatggtcatgct

SEQ ID NO: 1364219 - DNA, 25 bp, Homo sapien
tgttcattgtctgcccctctgtggg

SEQ ID NO: 1364220 - DNA, 25 bp, Homo sapien
ggttaggctgcagaaactcatccct

SEQ ID NO: 1364221 - DNA, 25 bp, Homo sapien
gaagttcattgcctgtatgctcact

SEQ ID NO: 1364222 - DNA, 25 bp, Homo sapien
ctcactgttcaagtcaacaggtgct

SEQ ID NO: 1364223 - DNA, 25 bp, Homo sapien
tgagtttgctacacagactctaaga

SEQ ID NO: 1364224 - DNA, 25 bp, Homo sapien
tacacagactctaagatctgctaca

SEQ ID NO: 1364225 - DNA, 25 bp, Homo sapien
ttgggagctcttcatgacaaagtca

SEQ ID NO: 1364226 - DNA, 25 bp, Homo sapien
tagactggggccaatttttgggagc

SEQ ID NO: 1364227 - DNA, 25 bp, Homo sapien
gagctcttcatgacaaagtcagcca

SEQ ID NO: 1364228 - DNA, 25 bp, Homo sapien
caatttttgggagctcttcatgaca

SEQ ID NO: 1364229 - DNA, 25 bp, Homo sapien
ttccagagatatttgcttacaatcc

SEQ ID NO: 1364230 - DNA, 25 bp, Homo sapien
cttccagagatatttgcttacaatc

SEQ ID NO: 1364231 - DNA, 25 bp, Homo sapien
cagcagcacttttcgcagcatcagc

SEQ ID NO: 1364232 - DNA, 25 bp, Homo sapien
aatattcctattggaatcaggatga

SEQ ID NO: 1364233 - DNA, 25 bp, Homo sapien
caaaatattcctattggaatcagga

SEQ ID NO: 1364234 - DNA, 25 bp, Homo sapien
agcacttttcgcagcatcagcagcc

SEQ ID NO: 1364235 - DNA, 25 bp, Homo sapien
taagtgggagctttgcacgaggaac

SEQ ID NO: 1364236 - DNA, 25 bp, Homo sapien
gaagtcagacatggaactgtttaga

SEQ ID NO: 1364237 - DNA, 25 bp, Homo sapien
ccataagtgggagctttgcacgagg

SEQ ID NO: 1364238 - DNA, 25 bp, Homo sapien
agtgggagctttgcacgaggaacaa

SEQ ID NO: 1364239 - DNA, 25 bp, Homo sapien
agagtcgccataatgtcccttgatg

SEQ ID NO: 1364240 - DNA, 25 bp, Homo sapien
taggcagtatggcttgcagaagcat

SEQ ID NO: 1364241 - DNA, 25 bp, Homo sapien
gcttgcagaagcatagatcagagca

SEQ ID NO: 1364242 - DNA, 25 bp, Homo sapien
catcctcaagtgtagagtcgccata

SEQ ID NO: 1364243 - DNA, 25 bp, Homo sapien
cttagagttcacaagcccaagccag

SEQ ID NO: 1364244 - DNA, 25 bp, Homo sapien
ctaggggggaagcaggccaatggga

SEQ ID NO: 1364245 - DNA, 25 bp, Homo sapien
atggagcttagagttcacaagccca

SEQ ID NO: 1364246 - DNA, 25 bp, Homo sapien
cccaagccagaagggtacacatgcc

SEQ ID NO: 1364247 - DNA, 25 bp, Homo sapien
gacgttgtaacaggaacaattttca

SEQ ID NO: 1364248 - DNA, 25 bp, Homo sapien
tttggtacgtttattgccggcaatg

SEQ ID NO: 1364249 - DNA, 25 bp, Homo sapien
caatgacttccttggcggttttggt

SEQ ID NO: 1364250 - DNA, 25 bp, Homo sapien
gccggcaatggacgttgtaacagga

SEQ ID NO: 1364251 - DNA, 25 bp, Homo sapien
tcctgccactcaaggattaatgcat

SEQ ID NO: 1364252 - DNA, 25 bp, Homo sapien
ctcaaggattaatgcatgatagggc

SEQ ID NO: 1364253 - DNA, 25 bp, Homo sapien
gccactcaaggattaatgcatgata

SEQ ID NO: 1364254 - DNA, 25 bp, Homo sapien
taactcctgccactcaaggattaat

SEQ ID NO: 1364255 - DNA, 25 bp, Homo sapien
aaaatctgttcctactacaatgtta

SEQ ID NO: 1364256 - DNA, 25 bp, Homo sapien
tgttcctactacaatgttattttta

SEQ ID NO: 1364257 - DNA, 25 bp, Homo sapien
aatctgttcctactacaatgttatt

SEQ ID NO: 1364258 - DNA, 25 bp, Homo sapien
tctgttcctactacaatgttatttt

SEQ ID NO: 1364259 - DNA, 25 bp, Homo sapien
tgaaaaattgcagaaagaggctgct

SEQ ID NO: 1364260 - DNA, 25 bp, Homo sapien
ccaaataagctctggctatgcacct

SEQ ID NO: 1364261 - DNA, 25 bp, Homo sapien
ttcgcatgcagcagttttaagttat

SEQ ID NO: 1364262 - DNA, 25 bp, Homo sapien
tctttttcgcatgcagcagttttaa

SEQ ID NO: 1364263 - DNA, 25 bp, Homo sapien
gctctggctatgcacctgtattgga

SEQ ID NO: 1364264 - DNA, 25 bp, Homo sapien
aaagagtggacggttaacagtgcct

SEQ ID NO: 1364265 - DNA, 25 bp, Homo sapien
ggacactgtctgtgataatgaggag

SEQ ID NO: 1364266 - DNA, 25 bp, Homo sapien
taatgaggaggatattgcctctctc

SEQ ID NO: 1364267 - DNA, 25 bp, Homo sapien
gatttattcagtttaccgtgtgcaa

SEQ ID NO: 1364268 - DNA, 25 bp, Homo sapien
aactaccattaagatagaaacattc

SEQ ID NO: 1364269 - DNA, 25 bp, Homo sapien
actaccattaagatagaaacattcc

SEQ ID NO: 1364270 - DNA, 25 bp, Homo sapien
ctcggtgtagctggctgtgggcact

SEQ ID NO: 1364271 - DNA, 25 bp, Homo sapien
actcggtgtagctggctgtgggcac

SEQ ID NO: 1364272 - DNA, 25 bp, Homo sapien
ccggagttcactacacttaagctcc

SEQ ID NO: 1364273 - DNA, 25 bp, Homo sapien
ttgctactgctctccggagttcact

SEQ ID NO: 1364274 - DNA, 25 bp, Homo sapien
ggtagggaccgctcagagacatagc

SEQ ID NO: 1364275 - DNA, 25 bp, Homo sapien
gggtggtagggaccgctcagagaca

SEQ ID NO: 1364276 - DNA, 25 bp, Homo sapien
cacatgtgggattgggcatgccagt

SEQ ID NO: 1364277 - DNA, 25 bp, Homo sapien
gccacatgtgggattgggcatgcca

SEQ ID NO: 1364278 - DNA, 25 bp, Homo sapien
gaatcagacaccatgtctaggaccc

SEQ ID NO: 1364279 - DNA, 25 bp, Homo sapien
cttttctatttgctgagctgaatca

SEQ ID NO: 1364280 - DNA, 25 bp, Homo sapien
gaaagttaagtggatgcccttcata

SEQ ID NO: 1364281 - DNA, 25 bp, Homo sapien
cagtggaattcacagcaacaggttt

SEQ ID NO: 1364282 - DNA, 25 bp, Homo sapien
gattggctctagtgcaacagtgaga

SEQ ID NO: 1364283 - DNA, 25 bp, Homo sapien
tgcgtgttttgtaaaccttcttgga

SEQ ID NO: 1364284 - DNA, 25 bp, Homo sapien
tgcattgtcctttggcttgcgtgtt

SEQ ID NO: 1364285 - DNA, 25 bp, Homo sapien
cacttaagtctaaactgcattgtcc

SEQ ID NO: 1364286 - DNA, 25 bp, Homo sapien
gtcagttacgataatcatccttgtc

SEQ ID NO: 1364287 - DNA, 25 bp, Homo sapien
aaaagtgtcagttacgataatcatc

SEQ ID NO: 1364288 - DNA, 25 bp, Homo sapien
agcaggatccctgtcgcacacatct

SEQ ID NO: 1364289 - DNA, 25 bp, Homo sapien
gcaggatccctgtcgcacacatctg

SEQ ID NO: 1364290 - DNA, 25 bp, Homo sapien
aatcctaatgcttcattcagccgtt

SEQ ID NO: 1364291 - DNA, 25 bp, Homo sapien
cctaatgcttcattcagccgttcaa

SEQ ID NO: 1364292 - DNA, 25 bp, Homo sapien
taaatcctaatgcttcattcagccg

SEQ ID NO: 1364293 - DNA, 25 bp, Homo sapien
tcttaaatcctaatgcttcattcag

SEQ ID NO: 1364294 - DNA, 25 bp, Homo sapien
gtatctgatggtgtaagtcacttct

SEQ ID NO: 1364295 - DNA, 25 bp, Homo sapien
ggttaacaccagacaccactatcat

SEQ ID NO: 1364296 - DNA, 25 bp, Homo sapien
tgcaacaatgaatagtgcatcatct

SEQ ID NO: 1364297 - DNA, 25 bp, Homo sapien
gcatcatcttgggtcggttaacacc

SEQ ID NO: 1364298 - DNA, 25 bp, Homo sapien
ttcagaaggcttacaggtatctcag

SEQ ID NO: 1364299 - DNA, 25 bp, Homo sapien
gttttgttcagaaggcttacaggta

SEQ ID NO: 1364300 - DNA, 25 bp, Homo sapien
gaaggcttacaggtatctcagaggg

SEQ ID NO: 1364301 - DNA, 25 bp, Homo sapien
ttgttcagaaggcttacaggtatct

SEQ ID NO: 1364302 - DNA, 25 bp, Homo sapien
tagataggataatctgttgagatat

SEQ ID NO: 1364303 - DNA, 25 bp, Homo sapien
tgctatagaagacttgaaggattag

SEQ ID NO: 1364304 - DNA, 25 bp, Homo sapien
ttgtgctatagaagacttgaaggat

SEQ ID NO: 1364305 - DNA, 25 bp, Homo sapien
tatagaagacttgaaggattagaag

SEQ ID NO: 1364306 - DNA, 25 bp, Homo sapien
cattcatcccccgtaccaagtcgta

SEQ ID NO: 1364307 - DNA, 25 bp, Homo sapien
ctctgctatattggacctgaagtct

SEQ ID NO: 1364308 - DNA, 25 bp, Homo sapien
ccattctcctctattgccacattca

SEQ ID NO: 1364309 - DNA, 25 bp, Homo sapien
tgctatattggacctgaagtctctg

SEQ ID NO: 1364310 - DNA, 25 bp, Homo sapien
caattctgcctgtcccataattcat

SEQ ID NO: 1364311 - DNA, 25 bp, Homo sapien
gagtgttgggttgatatcaatggcc

SEQ ID NO: 1364312 - DNA, 25 bp, Homo sapien
gttgggttgatatcaatggccagca

SEQ ID NO: 1364313 - DNA, 25 bp, Homo sapien
gctcctgtggctctctgcatgactt

SEQ ID NO: 1364314 - DNA, 25 bp, Homo sapien
tgacttcagtcccatgagtgttggg

SEQ ID NO: 1364315 - DNA, 25 bp, Homo sapien
ttgaaggaatcctggaccgatgtct

SEQ ID NO: 1364316 - DNA, 25 bp, Homo sapien
agtgaaatctctaatgatgcagagc

SEQ ID NO: 1364317 - DNA, 25 bp, Homo sapien
tctctaatgatgcagagccacagtt

SEQ ID NO: 1364318 - DNA, 25 bp, Homo sapien
catgatcagaggaaaaccaatatgc

SEQ ID NO: 1364319 - DNA, 25 bp, Homo sapien
ggctgaaagcgcattctcctccgga

SEQ ID NO: 1364320 - DNA, 25 bp, Homo sapien
tgcattttcttatgccaagtgtgta

SEQ ID NO: 1364321 - DNA, 25 bp, Homo sapien
tctcctccggagataatctgcattt

SEQ ID NO: 1364322 - DNA, 25 bp, Homo sapien
gcattttcttatgccaagtgtgtag

SEQ ID NO: 1364323 - DNA, 25 bp, Homo sapien
gacatatgctgaatacaatcaagtc

SEQ ID NO: 1364324 - DNA, 25 bp, Homo sapien
tgacatatgctgaatacaatcaagt

SEQ ID NO: 1364325 - DNA, 25 bp, Homo sapien
gtgacatatgctgaatacaatcaag

SEQ ID NO: 1364326 - DNA, 25 bp, Homo sapien
tagcccagcatatgggaaaaatcct

SEQ ID NO: 1364327 - DNA, 25 bp, Homo sapien
tcactttgctgaatgtatcgagccg

SEQ ID NO: 1364328 - DNA, 25 bp, Homo sapien
gcctgacagtacctgacttaattac

SEQ ID NO: 1364329 - DNA, 25 bp, Homo sapien
tgagaaaaccgtgtcagcctgacag

SEQ ID NO: 1364330 - DNA, 25 bp, Homo sapien
gtgtgccatgctccaaaggacaaca

SEQ ID NO: 1364331 - DNA, 25 bp, Homo sapien
cggcatctaagtctaaggaaaggca

SEQ ID NO: 1364332 - DNA, 25 bp, Homo sapien
gggagcactagcaatgtctaccaca

SEQ ID NO: 1364333 - DNA, 25 bp, Homo sapien
cacagcctgtgtcccggcatctaag

SEQ ID NO: 1364334 - DNA, 25 bp, Homo sapien
aggcagaagtcctctccatccacga

SEQ ID NO: 1364335 - DNA, 25 bp, Homo sapien
agaagtcctctccatccacgataac

SEQ ID NO: 1364336 - DNA, 25 bp, Homo sapien
gcagaagtcctctccatccacgata

SEQ ID NO: 1364337 - DNA, 25 bp, Homo sapien
tattcaggcagaagtcctctccatc

SEQ ID NO: 1364338 - DNA, 25 bp, Homo sapien
ccgtcagctgccaactgcaggagct

SEQ ID NO: 1364339 - DNA, 25 bp, Homo sapien
ggcagctaagaggtgaatccttgaa

SEQ ID NO: 1364340 - DNA, 25 bp, Homo sapien
gctttaaacactctggttgcattaa

SEQ ID NO: 1364341 - DNA, 25 bp, Homo sapien
attaacagcgctgccccgtcagctg

SEQ ID NO: 1364342 - DNA, 25 bp, Homo sapien
gagttaaagcttcattgaaggcaca

SEQ ID NO: 1364343 - DNA, 25 bp, Homo sapien
cagtaacatccacaagcccgttggt

SEQ ID NO: 1364344 - DNA, 25 bp, Homo sapien
gggggtgggcactctcgcctccatt

SEQ ID NO: 1364345 - DNA, 25 bp, Homo sapien
ggttgtttcaccagtattccagatg

SEQ ID NO: 1364346 - DNA, 25 bp, Homo sapien
taatattgaggtttggtttgcctga

SEQ ID NO: 1364347 - DNA, 25 bp, Homo sapien
gcctcgtatcgtggataattatctc

SEQ ID NO: 1364348 - DNA, 25 bp, Homo sapien
ttctgcctctgcctcgtatcgtgga

SEQ ID NO: 1364349 - DNA, 25 bp, Homo sapien
tcttaatattgaggtttggtttgcc

SEQ ID NO: 1364350 - DNA, 25 bp, Homo sapien
tcctttatcagcttattccactgct

SEQ ID NO: 1364351 - DNA, 25 bp, Homo sapien
tatcagcttattccactgcttcctg

SEQ ID NO: 1364352 - DNA, 25 bp, Homo sapien
tccactgcttcctgatggtactcac

SEQ ID NO: 1364353 - DNA, 25 bp, Homo sapien
tcccttcctttatcagcttattcca

SEQ ID NO: 1364354 - DNA, 25 bp, Homo sapien
aagtatacactctatgaaatagtcg

SEQ ID NO: 1364355 - DNA, 25 bp, Homo sapien
tacactctatgaaatagtcgtattc

SEQ ID NO: 1364356 - DNA, 25 bp, Homo sapien
cactctatgaaatagtcgtattcta

SEQ ID NO: 1364357 - DNA, 25 bp, Homo sapien
gtatacactctatgaaatagtcgta

SEQ ID NO: 1364358 - DNA, 25 bp, Homo sapien
ttggattgtcaaccacccatctgtg

SEQ ID NO: 1364359 - DNA, 25 bp, Homo sapien
ctttttcaaaaggatggtgtcgagc

SEQ ID NO: 1364360 - DNA, 25 bp, Homo sapien
caaaaggatggtgtcgagcaggaat

SEQ ID NO: 1364361 - DNA, 25 bp, Homo sapien
ccatctgtgttaaggccaaaccttt

SEQ ID NO: 1364362 - DNA, 25 bp, Homo sapien
tagtaaacccagtcctggaagattc

SEQ ID NO: 1364363 - DNA, 25 bp, Homo sapien
acttcccactaatgatgttgcacca

SEQ ID NO: 1364364 - DNA, 25 bp, Homo sapien
taatgatgttgcaccatagctttga

SEQ ID NO: 1364365 - DNA, 25 bp, Homo sapien
tcccactaatgatgttgcaccatag

SEQ ID NO: 1364366 - DNA, 25 bp, Homo sapien
tgatgttgcaccatagctttgagcc

SEQ ID NO: 1364367 - DNA, 25 bp, Homo sapien
attcccttcctctttgaaagcctct

SEQ ID NO: 1364368 - DNA, 25 bp, Homo sapien
tgaaagcctctccagatcttccaaa

SEQ ID NO: 1364369 - DNA, 25 bp, Homo sapien
ctctttgaaagcctctccagatctt

SEQ ID NO: 1364370 - DNA, 25 bp, Homo sapien
aagcctctccagatcttccaaacat

SEQ ID NO: 1364371 - DNA, 25 bp, Homo sapien
tgagaccccatgattgggcaatctc

SEQ ID NO: 1364372 - DNA, 25 bp, Homo sapien
ctgtttattaaccaaccagcttaga

SEQ ID NO: 1364373 - DNA, 25 bp, Homo sapien
gcttagaaaaataatcatggtagac

SEQ ID NO: 1364374 - DNA, 25 bp, Homo sapien
gagcaggtactgtttattaaccaac

SEQ ID NO: 1364375 - DNA, 25 bp, Homo sapien
ttagaaaaataatcatggtagacac

SEQ ID NO: 1364376 - DNA, 25 bp, Homo sapien
tcagattggggtacctccatgcaat

SEQ ID NO: 1364377 - DNA, 25 bp, Homo sapien
cttcagattggggtacctccatgca

SEQ ID NO: 1364378 - DNA, 25 bp, Homo sapien
tccacctcgtggagaagacaatttg

SEQ ID NO: 1364379 - DNA, 25 bp, Homo sapien
agattggggtacctccatgcaatat

SEQ ID NO: 1364380 - DNA, 25 bp, Homo sapien
tgggctcactccattgatacctctg

SEQ ID NO: 1364381 - DNA, 25 bp, Homo sapien
tccattgatacctctgattctgatg

SEQ ID NO: 1364382 - DNA, 25 bp, Homo sapien
ctttgggctcactccattgatacct

SEQ ID NO: 1364383 - DNA, 25 bp, Homo sapien
gctcactccattgatacctctgatt

SEQ ID NO: 1364384 - DNA, 25 bp, Homo sapien
gtgctttgctttttcatagataagc

SEQ ID NO: 1364385 - DNA, 25 bp, Homo sapien
tgctttgctttttcatagataagct

SEQ ID NO: 1364386 - DNA, 25 bp, Homo sapien
tgtgatagtgctttgctttttcata

SEQ ID NO: 1364387 - DNA, 25 bp, Homo sapien
tattccttgtgatagtgctttgctt

SEQ ID NO: 1364388 - DNA, 25 bp, Homo sapien
ctttcgaagcatcttttgggcaaac

SEQ ID NO: 1364389 - DNA, 25 bp, Homo sapien
ctctgcgaaattccttcgctttttc

SEQ ID NO: 1364390 - DNA, 25 bp, Homo sapien
cagctctgcgaaattccttcgcttt

SEQ ID NO: 1364391 - DNA, 25 bp, Homo sapien
cttcagctctgcgaaattccttcgc

SEQ ID NO: 1364392 - DNA, 25 bp, Homo sapien
tttctcaggcgcttgatcttcagct

SEQ ID NO: 1364393 - DNA, 25 bp, Homo sapien
tcttcttctcttctacaccctccat

SEQ ID NO: 1364394 - DNA, 25 bp, Homo sapien
tggaacagcaggaacctccttcttc

SEQ ID NO: 1364395 - DNA, 25 bp, Homo sapien
ctggaacagcaggaacctccttctt

SEQ ID NO: 1364396 - DNA, 25 bp, Homo sapien
ccttcttcttctcttctacaccctc

SEQ ID NO: 1364397 - DNA, 25 bp, Homo sapien
taatggtctttctactagtcaaatc

SEQ ID NO: 1364398 - DNA, 25 bp, Homo sapien
ggtctttctactagtcaaatctctc

SEQ ID NO: 1364399 - DNA, 25 bp, Homo sapien
tttaatggtctttctactagtcaaa

SEQ ID NO: 1364400 - DNA, 25 bp, Homo sapien
tctttaatggtctttctactagtca

SEQ ID NO: 1364401 - DNA, 25 bp, Homo sapien
ttacaggccaacagctttccacccc

SEQ ID NO: 1364402 - DNA, 25 bp, Homo sapien
tacaggccaacagctttccaccccc

SEQ ID NO: 1364403 - DNA, 25 bp, Homo sapien
cattgtctcaacatagatctttcca

SEQ ID NO: 1364404 - DNA, 25 bp, Homo sapien
aggagcttatcagcccagtccttgc

SEQ ID NO: 1364405 - DNA, 25 bp, Homo sapien
aaatctttctttacaactgctgcca

SEQ ID NO: 1364406 - DNA, 25 bp, Homo sapien
cctcatttcctaaacacaggagctt

SEQ ID NO: 1364407 - DNA, 25 bp, Homo sapien
tctttggaagcttgcttggaaagtc

SEQ ID NO: 1364408 - DNA, 25 bp, Homo sapien
agatgcacatgaaggggatacccgc

SEQ ID NO: 1364409 - DNA, 25 bp, Homo sapien
cctccctctatgagggaggtcatcc

SEQ ID NO: 1364410 - DNA, 25 bp, Homo sapien
ggaagcttgcttggaaagtctagca

SEQ ID NO: 1364411 - DNA, 25 bp, Homo sapien
ggctggagccggtctgcaaataaaa

SEQ ID NO: 1364412 - DNA, 25 bp, Homo sapien
cataggttgacggtagccaagctgg

SEQ ID NO: 1364413 - DNA, 25 bp, Homo sapien
tctgcagcagaacgccaggttccag

SEQ ID NO: 1364414 - DNA, 25 bp, Homo sapien
ttaccaagtggtctcgttcagtggg

SEQ ID NO: 1364415 - DNA, 25 bp, Homo sapien
cgccattttctcgccgcttgtgtgg

SEQ ID NO: 1364416 - DNA, 25 bp, Homo sapien
tcggcaatttccgtcgggccccagc

SEQ ID NO: 1364417 - DNA, 25 bp, Homo sapien
tcgccgcttgtgtggctcgctggct

SEQ ID NO: 1364418 - DNA, 25 bp, Homo sapien
attttctcgccgcttgtgtggctcg

SEQ ID NO: 1364419 - DNA, 25 bp, Homo sapien
aatcgggccggcgagaaggtgtgtg

SEQ ID NO: 1364420 - DNA, 25 bp, Homo sapien
aagctttgtccggttcggcaatgga

SEQ ID NO: 1364421 - DNA, 25 bp, Homo sapien
caatggacgggtatgtaatcgggcc

SEQ ID NO: 1364422 - DNA, 25 bp, Homo sapien
tgtgagcgaagctttgtccggttcg

SEQ ID NO: 1364423 - DNA, 25 bp, Homo sapien
cctcccgcggcccctcccagggctg

SEQ ID NO: 1364424 - DNA, 25 bp, Homo sapien
ctcccgcggcccctcccagggctgg

SEQ ID NO: 1364425 - DNA, 25 bp, Homo sapien
tacccaacccccgccccatcgcaca

SEQ ID NO: 1364426 - DNA, 25 bp, Homo sapien
cccgccccatcgcacacacccctcc

SEQ ID NO: 1364427 - DNA, 25 bp, Homo sapien
cccccgccccatcgcacacacccct

SEQ ID NO: 1364428 - DNA, 25 bp, Homo sapien
caacccccgccccatcgcacacacc

SEQ ID NO: 1364429 - DNA, 25 bp, Homo sapien
ccgacccttgggttagcggtgcctg

SEQ ID NO: 1364430 - DNA, 25 bp, Homo sapien
tagcggtgcctgtgagagcgagtgg

SEQ ID NO: 1364431 - DNA, 25 bp, Homo sapien
acccttgggttagcggtgcctgtga

SEQ ID NO: 1364432 - DNA, 25 bp, Homo sapien
cctgtgagagcgagtgggatgggca

SEQ ID NO: 1364433 - DNA, 25 bp, Homo sapien
taaatggatggtaagtggtttgacc

SEQ ID NO: 1364434 - DNA, 25 bp, Homo sapien
aaaggaagttgttgaggcagttagc

SEQ ID NO: 1364435 - DNA, 25 bp, Homo sapien
ggtagagatcctttggaatccttcc

SEQ ID NO: 1364436 - DNA, 25 bp, Homo sapien
cacacatggcttcttgtaatataaa

SEQ ID NO: 1364437 - DNA, 25 bp, Homo sapien
gggaaaattggcatcatgactacaa

SEQ ID NO: 1364438 - DNA, 25 bp, Homo sapien
gcatattgctcatatgttctgaacc

SEQ ID NO: 1364439 - DNA, 25 bp, Homo sapien
tggatttgacttgaatctgtagagc

SEQ ID NO: 1364440 - DNA, 25 bp, Homo sapien
tcatatgagtcagttcttagaaaaa

SEQ ID NO: 1364441 - DNA, 25 bp, Homo sapien
gcttgcagtggcgccactggactcc

SEQ ID NO: 1364442 - DNA, 25 bp, Homo sapien
agcttgcagtggcgccactggactc

SEQ ID NO: 1364443 - DNA, 25 bp, Homo sapien
ctgtgacaatccgttgatacttgaa

SEQ ID NO: 1364444 - DNA, 25 bp, Homo sapien
atccgttgatacttgaagacctctc

SEQ ID NO: 1364445 - DNA, 25 bp, Homo sapien
gacaatccgttgatacttgaagacc

SEQ ID NO: 1364446 - DNA, 25 bp, Homo sapien
tttctgtgacaatccgttgatactt

SEQ ID NO: 1364447 - DNA, 25 bp, Homo sapien
agatttggggaaactctcaaaaatg

SEQ ID NO: 1364448 - DNA, 25 bp, Homo sapien
cacttgtttaacaagttgaaagtag

SEQ ID NO: 1364449 - DNA, 25 bp, Homo sapien
gaggattttgaagttggttgaaaga

SEQ ID NO: 1364450 - DNA, 25 bp, Homo sapien
gacataagactctactagatttggg

SEQ ID NO: 1364451 - DNA, 25 bp, Homo sapien
gaatgtaagactggatttatctaag

SEQ ID NO: 1364452 - DNA, 25 bp, Homo sapien
tatctaagtctggaattgtgtaaca

SEQ ID NO: 1364453 - DNA, 25 bp, Homo sapien
tgaaagcatagacagaatgtaagac

SEQ ID NO: 1364454 - DNA, 25 bp, Homo sapien
tgtgtaacattaaaggaatagtagc

SEQ ID NO: 1364455 - DNA, 25 bp, Homo sapien
cacaacctcttatgtgtactttaaa

SEQ ID NO: 1364456 - DNA, 25 bp, Homo sapien
tgaatcggaacccagagatacagag

SEQ ID NO: 1364457 - DNA, 25 bp, Homo sapien
ttgcagtacaccattgttttacccc

SEQ ID NO: 1364458 - DNA, 25 bp, Homo sapien
tgcatgtgacctatacacaacctct

SEQ ID NO: 1364459 - DNA, 25 bp, Homo sapien
agctttagcctaggcttttaattct

SEQ ID NO: 1364460 - DNA, 25 bp, Homo sapien
ctgagcccagaagatagaaacagca

SEQ ID NO: 1364461 - DNA, 25 bp, Homo sapien
gaaaaggcttgatgttctaaacagt

SEQ ID NO: 1364462 - DNA, 25 bp, Homo sapien
tctaaacagtattataccaccaagt

SEQ ID NO: 1364463 - DNA, 25 bp, Homo sapien
gtgcattcagtcagagctatctgaa

SEQ ID NO: 1364464 - DNA, 25 bp, Homo sapien
tataatgactacatctggagtttct

SEQ ID NO: 1364465 - DNA, 25 bp, Homo sapien
taactaaaggcaggaaaatagaatg

SEQ ID NO: 1364466 - DNA, 25 bp, Homo sapien
acaacaagtgaacgtatccattgaa

SEQ ID NO: 1364467 - DNA, 25 bp, Homo sapien
aatggtcagccgtaagccatgcagc

SEQ ID NO: 1364468 - DNA, 25 bp, Homo sapien
catgcagccatcgtgcttaaattgg

SEQ ID NO: 1364469 - DNA, 25 bp, Homo sapien
gtgtgtgtttcgtaaaatatgcttt

SEQ ID NO: 1364470 - DNA, 25 bp, Homo sapien
tcaggaaccatttggaatggtcagc

SEQ ID NO: 1364471 - DNA, 25 bp, Homo sapien
tgacgaggcactcttcccgtctttc

SEQ ID NO: 1364472 - DNA, 25 bp, Homo sapien
caaagatcttgacgaggcactcttc

SEQ ID NO: 1364473 - DNA, 25 bp, Homo sapien
cttccaaagatcttgacgaggcact

SEQ ID NO: 1364474 - DNA, 25 bp, Homo sapien
agatcttgacgaggcactcttcccg

SEQ ID NO: 1364475 - DNA, 25 bp, Homo sapien
tgagcatgtgcagactggtctagct

SEQ ID NO: 1364476 - DNA, 25 bp, Homo sapien
gttgacatacgtgccttaaaaagga

SEQ ID NO: 1364477 - DNA, 25 bp, Homo sapien
cactcttgtgggacgtatcatataa

SEQ ID NO: 1364478 - DNA, 25 bp, Homo sapien
taagtttgagccctatgtggaaagc

SEQ ID NO: 1364479 - DNA, 25 bp, Homo sapien
tcagaatctacaggtcaaattaatt

SEQ ID NO: 1364480 - DNA, 25 bp, Homo sapien
gatgtacttagtttcaagattcata

SEQ ID NO: 1364481 - DNA, 25 bp, Homo sapien
gaacagttcttgtcaatccgaattg

SEQ ID NO: 1364482 - DNA, 25 bp, Homo sapien
actttttgaaattgatgtacttagt

SEQ ID NO: 1364483 - DNA, 25 bp, Homo sapien
tctgtagctctatattcaccttttc

SEQ ID NO: 1364484 - DNA, 25 bp, Homo sapien
ccctgtagcatgctcaataaacact

SEQ ID NO: 1364485 - DNA, 25 bp, Homo sapien
ctttgttttcactccactgtgcttc

SEQ ID NO: 1364486 - DNA, 25 bp, Homo sapien
aacacttctgtagctctatattcac

SEQ ID NO: 1364487 - DNA, 25 bp, Homo sapien
tgttataatctactgctttaaagac

SEQ ID NO: 1364488 - DNA, 25 bp, Homo sapien
cctgttataatctactgctttaaag

SEQ ID NO: 1364489 - DNA, 25 bp, Homo sapien
cagtagatttatgcactaatagatc

SEQ ID NO: 1364490 - DNA, 25 bp, Homo sapien
ttttccagtagatttatgcactaat

SEQ ID NO: 1364491 - DNA, 25 bp, Homo sapien
gctgctcaggaaacattcctttcct

SEQ ID NO: 1364492 - DNA, 25 bp, Homo sapien
tgaacttcccacactttgctgctca

SEQ ID NO: 1364493 - DNA, 25 bp, Homo sapien
gggcacacatagcctcctggcctgg

SEQ ID NO: 1364494 - DNA, 25 bp, Homo sapien
ctcctctcgcccggggcacacatag

SEQ ID NO: 1364495 - DNA, 25 bp, Homo sapien
aggcaggctgggtacactcggtttc

SEQ ID NO: 1364496 - DNA, 25 bp, Homo sapien
gctgggtacactcggtttcctggcc

SEQ ID NO: 1364497 - DNA, 25 bp, Homo sapien
gctgggaactgatttcgtcaccttc

SEQ ID NO: 1364498 - DNA, 25 bp, Homo sapien
tcgtcaccttcactaagcacagagg

SEQ ID NO: 1364499 - DNA, 25 bp, Homo sapien
taaggaatgtacaataacttccagt

SEQ ID NO: 1364500 - DNA, 25 bp, Homo sapien
tctaacatccactggaccactgcaa

SEQ ID NO: 1364501 - DNA, 25 bp, Homo sapien
aggaatgtacaataacttccagtac

SEQ ID NO: 1364502 - DNA, 25 bp, Homo sapien
agcttaaggaatgtacaataacttc

SEQ ID NO: 1364503 - DNA, 25 bp, Homo sapien
aggctttcccatcaaccagcggagg

SEQ ID NO: 1364504 - DNA, 25 bp, Homo sapien
tcttttacacattgaactttcgctg

SEQ ID NO: 1364505 - DNA, 25 bp, Homo sapien
cggaggtgcactttcatctctttta

SEQ ID NO: 1364506 - DNA, 25 bp, Homo sapien
gatgcttcagtctccagcttaaaag

SEQ ID NO: 1364507 - DNA, 25 bp, Homo sapien
aggatcaagcccactttcatgggat

SEQ ID NO: 1364508 - DNA, 25 bp, Homo sapien
gatgtttcaaccctcttgaaatctc

SEQ ID NO: 1364509 - DNA, 25 bp, Homo sapien
tgaggatcaagcccactttcatggg

SEQ ID NO: 1364510 - DNA, 25 bp, Homo sapien
tgtttcaaccctcttgaaatctccc

SEQ ID NO: 1364511 - DNA, 25 bp, Homo sapien
ctgaatctaagtggtgatagaaatg

SEQ ID NO: 1364512 - DNA, 25 bp, Homo sapien
gatagaaatgagtatcaggttgagg

SEQ ID NO: 1364513 - DNA, 25 bp, Homo sapien
tgagtatcaggttgagggccactga

SEQ ID NO: 1364514 - DNA, 25 bp, Homo sapien
ggtgatgtgaactagcacatactca

SEQ ID NO: 1364515 - DNA, 25 bp, Homo sapien
ccaggggcttgagaaagataccgct

SEQ ID NO: 1364516 - DNA, 25 bp, Homo sapien
ttgagaaagataccgctgaggctca

SEQ ID NO: 1364517 - DNA, 25 bp, Homo sapien
tgaccaggggcttgagaaagatacc

SEQ ID NO: 1364518 - DNA, 25 bp, Homo sapien
ggcttgagaaagataccgctgaggc

SEQ ID NO: 1364519 - DNA, 25 bp, Homo sapien
taatggttcctagggctacatgcag

SEQ ID NO: 1364520 - DNA, 25 bp, Homo sapien
gcagtgtgctatgaccgctattcat

SEQ ID NO: 1364521 - DNA, 25 bp, Homo sapien
taatggcacacacttggtaatacgc

SEQ ID NO: 1364522 - DNA, 25 bp, Homo sapien
ggtaatacgcatgatgattcagaat

SEQ ID NO: 1364523 - DNA, 25 bp, Homo sapien
tgcagactaccagcaaagtgtggaa

SEQ ID NO: 1364524 - DNA, 25 bp, Homo sapien
ggtttcattaccttgtgagattgct

SEQ ID NO: 1364525 - DNA, 25 bp, Homo sapien
tgctggcaacagtgactcatgcagg

SEQ ID NO: 1364526 - DNA, 25 bp, Homo sapien
gactcatgcagggatggttatttgc

SEQ ID NO: 1364527 - DNA, 25 bp, Homo sapien
tgctcttcgggggtcgcagtcacgt

SEQ ID NO: 1364528 - DNA, 25 bp, Homo sapien
catagtcataagttggctgctgctc

SEQ ID NO: 1364529 - DNA, 25 bp, Homo sapien
tcagcttgggtgttcatagtcataa

SEQ ID NO: 1364530 - DNA, 25 bp, Homo sapien
tcacgttgtcacataacacaggttc

SEQ ID NO: 1364531 - DNA, 25 bp, Homo sapien
gtcaaattgaactgcaccacctctg

SEQ ID NO: 1364532 - DNA, 25 bp, Homo sapien
tcttgtgtgtcaaattgaactgcac

SEQ ID NO: 1364533 - DNA, 25 bp, Homo sapien
gaagtcttgtgtgtcaaattgaact

SEQ ID NO: 1364534 - DNA, 25 bp, Homo sapien
gaccaaagaagtcttgtgtgtcaaa

SEQ ID NO: 1364535 - DNA, 25 bp, Homo sapien
aagaacggatgagaagtagaattag

SEQ ID NO: 1364536 - DNA, 25 bp, Homo sapien
tgagaagtagaattagagcccgtgg

SEQ ID NO: 1364537 - DNA, 25 bp, Homo sapien
tcaaagggttgacaggtcagggcca

SEQ ID NO: 1364538 - DNA, 25 bp, Homo sapien
cggatgagaagtagaattagagccc

SEQ ID NO: 1364539 - DNA, 25 bp, Homo sapien
ttcctgtaagggtgtccagttctct

SEQ ID NO: 1364540 - DNA, 25 bp, Homo sapien
cttgaagtgcatgagctgagtgggg

SEQ ID NO: 1364541 - DNA, 25 bp, Homo sapien
agctggctaggctcttcctgtaagg

SEQ ID NO: 1364542 - DNA, 25 bp, Homo sapien
gaaaatgaaatattggagacagctg

SEQ ID NO: 1364543 - DNA, 25 bp, Homo sapien
cactgatgaacgttttcagcagctc

SEQ ID NO: 1364544 - DNA, 25 bp, Homo sapien
cagcagctctttactgaagcgttca

SEQ ID NO: 1364545 - DNA, 25 bp, Homo sapien
tcttcctcgtcagccagtctacagt

SEQ ID NO: 1364546 - DNA, 25 bp, Homo sapien
ggttgtcagagggtaaatcctcttc

SEQ ID NO: 1364547 - DNA, 25 bp, Homo sapien
tgtgtgttttgacatagttgtcctt

SEQ ID NO: 1364548 - DNA, 25 bp, Homo sapien
ttcctgaaagtacatgtttggcttc

SEQ ID NO: 1364549 - DNA, 25 bp, Homo sapien
caatgattgtatggattggttgtcg

SEQ ID NO: 1364550 - DNA, 25 bp, Homo sapien
gtttgatgtacttgcatgagtggtg

SEQ ID NO: 1364551 - DNA, 25 bp, Homo sapien
ccctttctccttctgctacttttgc

SEQ ID NO: 1364552 - DNA, 25 bp, Homo sapien
tgggacccctttctccttctgctac

SEQ ID NO: 1364553 - DNA, 25 bp, Homo sapien
tctgggacccctttctccttctgct

SEQ ID NO: 1364554 - DNA, 25 bp, Homo sapien
caggcctctgggacccctttctcct

SEQ ID NO: 1364555 - DNA, 25 bp, Homo sapien
tattctcccttcttcttcatcataa

SEQ ID NO: 1364556 - DNA, 25 bp, Homo sapien
cttattctcccttcttcttcatcat

SEQ ID NO: 1364557 - DNA, 25 bp, Homo sapien
ttaacttattctcccttcttcttca

SEQ ID NO: 1364558 - DNA, 25 bp, Homo sapien
ttctcccttcttcttcatcataatc

SEQ ID NO: 1364559 - DNA, 25 bp, Homo sapien
gtgtcagcaggtccgttgtcatact

SEQ ID NO: 1364560 - DNA, 25 bp, Homo sapien
caggtccgttgtcatacttgacttg

SEQ ID NO: 1364561 - DNA, 25 bp, Homo sapien
gacataatatacaactccagctctg

SEQ ID NO: 1364562 - DNA, 25 bp, Homo sapien
catcactgacataatatacaactcc

SEQ ID NO: 1364563 - DNA, 25 bp, Homo sapien
agttcagataactctgatccatacg

SEQ ID NO: 1364564 - DNA, 25 bp, Homo sapien
cagataactctgatccatacgcaaa

SEQ ID NO: 1364565 - DNA, 25 bp, Homo sapien
gttcagataactctgatccatacgc

SEQ ID NO: 1364566 - DNA, 25 bp, Homo sapien
tcagataactctgatccatacgcaa

SEQ ID NO: 1364567 - DNA, 25 bp, Homo sapien
ctgcatgccagtgtcagggggatga

SEQ ID NO: 1364568 - DNA, 25 bp, Homo sapien
atggtattcactggttctcagtgca

SEQ ID NO: 1364569 - DNA, 25 bp, Homo sapien
cagaaatgccagctggctgcatgcc

SEQ ID NO: 1364570 - DNA, 25 bp, Homo sapien
ttgagagcttcctcatagcaaaacc

SEQ ID NO: 1364571 - DNA, 25 bp, Homo sapien
cgttgccggcaagtctggtgtgcct

SEQ ID NO: 1364572 - DNA, 25 bp, Homo sapien
acgtgcagcgttgccggcaagtctg

SEQ ID NO: 1364573 - DNA, 25 bp, Homo sapien
ctgtcagcatccacgtgcagcgttg

SEQ ID NO: 1364574 - DNA, 25 bp, Homo sapien
agcatccacgtgcagcgttgccggc

SEQ ID NO: 1364575 - DNA, 25 bp, Homo sapien
aaaaatatgatttgttttctccagg

SEQ ID NO: 1364576 - DNA, 25 bp, Homo sapien
tcaaaaatatgatttgttttctcca

SEQ ID NO: 1364577 - DNA, 25 bp, Homo sapien
ctttcaaaaatatgatttgttttct

SEQ ID NO: 1364578 - DNA, 25 bp, Homo sapien
aaaatatgatttgttttctccaggc

SEQ ID NO: 1364579 - DNA, 25 bp, Homo sapien
ccagactgtctttataatggagata

SEQ ID NO: 1364580 - DNA, 25 bp, Homo sapien
tattggcaaagggataagaagatgc

SEQ ID NO: 1364581 - DNA, 25 bp, Homo sapien
aatgacttagggttcagctagaaac

SEQ ID NO: 1364582 - DNA, 25 bp, Homo sapien
tgtcaagaacatatgagatgaggtg

SEQ ID NO: 1364583 - DNA, 25 bp, Homo sapien
tatgggctccataaaaatattccta

SEQ ID NO: 1364584 - DNA, 25 bp, Homo sapien
aaatattcctaatggagaagttatg

SEQ ID NO: 1364585 - DNA, 25 bp, Homo sapien
gaactcataactatgggctccataa

SEQ ID NO: 1364586 - DNA, 25 bp, Homo sapien
gaatagcaaatgaactcataactat

SEQ ID NO: 1364587 - DNA, 25 bp, Homo sapien
ctttgaaggcagtttttagcatact

SEQ ID NO: 1364588 - DNA, 25 bp, Homo sapien
tttgaaggcagtttttagcatacta

SEQ ID NO: 1364589 - DNA, 25 bp, Homo sapien
ttgaaggcagtttttagcatactag

SEQ ID NO: 1364590 - DNA, 25 bp, Homo sapien
atatgcttttgtgcaaggagccagc

SEQ ID NO: 1364591 - DNA, 25 bp, Homo sapien
gagaggagaggcgtccagctgccca

SEQ ID NO: 1364592 - DNA, 25 bp, Homo sapien
agccagctcatttcagggagaggag

SEQ ID NO: 1364593 - DNA, 25 bp, Homo sapien
gctgcccatggaccccaccaacacc

SEQ ID NO: 1364594 - DNA, 25 bp, Homo sapien
cctgccagatttctaactcccttaa

SEQ ID NO: 1364595 - DNA, 25 bp, Homo sapien
ctgccagatttctaactcccttaac

SEQ ID NO: 1364596 - DNA, 25 bp, Homo sapien
ctcctgccagatttctaactccctt

SEQ ID NO: 1364597 - DNA, 25 bp, Homo sapien
tcctgccagatttctaactccctta

SEQ ID NO: 1364598 - DNA, 25 bp, Homo sapien
ctggggtctttcaccaaagtgatag

SEQ ID NO: 1364599 - DNA, 25 bp, Homo sapien
actggggtctttcaccaaagtgata

SEQ ID NO: 1364600 - DNA, 25 bp, Homo sapien
aactggggtctttcaccaaagtgat

SEQ ID NO: 1364601 - DNA, 25 bp, Homo sapien
tggggtctttcaccaaagtgatagt

SEQ ID NO: 1364602 - DNA, 25 bp, Homo sapien
tttcagcagcaacagaaacagctgg

SEQ ID NO: 1364603 - DNA, 25 bp, Homo sapien
gctttcagcagcaacagaaacagct

SEQ ID NO: 1364604 - DNA, 25 bp, Homo sapien
ttcagcagcaacagaaacagctgga

SEQ ID NO: 1364605 - DNA, 25 bp, Homo sapien
ctgctttcagcagcaacagaaacag

SEQ ID NO: 1364606 - DNA, 25 bp, Homo sapien
acaggtcatcagcaaagtggtgctc

SEQ ID NO: 1364607 - DNA, 25 bp, Homo sapien
ccacaggtcatcagcaaagtggtgc

SEQ ID NO: 1364608 - DNA, 25 bp, Homo sapien
caggtcatcagcaaagtggtgctcc

SEQ ID NO: 1364609 - DNA, 25 bp, Homo sapien
cacaggtcatcagcaaagtggtgct

SEQ ID NO: 1364610 - DNA, 25 bp, Homo sapien
tatggagcacagcatagggcaattt

SEQ ID NO: 1364611 - DNA, 25 bp, Homo sapien
agtcagagcccgtatgtgcacagca

SEQ ID NO: 1364612 - DNA, 25 bp, Homo sapien
tttgtacacccatctcacgcatgag

SEQ ID NO: 1364613 - DNA, 25 bp, Homo sapien
cacagcaaaagagtggtaaccagga

SEQ ID NO: 1364614 - DNA, 25 bp, Homo sapien
ctctttggttcataaggtgttgtcc

SEQ ID NO: 1364615 - DNA, 25 bp, Homo sapien
cctgtacaagtgtcggttatggtgg

SEQ ID NO: 1364616 - DNA, 25 bp, Homo sapien
tcctggaaaccattttgatgcagtc

SEQ ID NO: 1364617 - DNA, 25 bp, Homo sapien
tcgacaatagggcaaacactgagac

SEQ ID NO: 1364618 - DNA, 25 bp, Homo sapien
cacttcatgagggaagaatacatct

SEQ ID NO: 1364619 - DNA, 25 bp, Homo sapien
ggaattcctgggaccaacctataca

SEQ ID NO: 1364620 - DNA, 25 bp, Homo sapien
tacaactcgttggtgggaaagtgct

SEQ ID NO: 1364621 - DNA, 25 bp, Homo sapien
tcatagcctttcagagtaatggcca

SEQ ID NO: 1364622 - DNA, 25 bp, Homo sapien
gaaaatgctttctgccgtaaaaaca

SEQ ID NO: 1364623 - DNA, 25 bp, Homo sapien
cagaaagatgtactgttgcagaaga

SEQ ID NO: 1364624 - DNA, 25 bp, Homo sapien
ttggcaccactggtttaaatttcac

SEQ ID NO: 1364625 - DNA, 25 bp, Homo sapien
ttgcagaagagcaatatttggcacc

SEQ ID NO: 1364626 - DNA, 25 bp, Homo sapien
tagcatttaccacagttgatacaca

SEQ ID NO: 1364627 - DNA, 25 bp, Homo sapien
ttcatcaatcatagccacaacttgc

SEQ ID NO: 1364628 - DNA, 25 bp, Homo sapien
gccagaatcattacaggtcatgtag

SEQ ID NO: 1364629 - DNA, 25 bp, Homo sapien
tctacgttgctcaattcaccaaatg

SEQ ID NO: 1364630 - DNA, 25 bp, Homo sapien
aagatgggcaatatgcatgcctggc

SEQ ID NO: 1364631 - DNA, 25 bp, Homo sapien
tacgagacctaattaactgcattca

SEQ ID NO: 1364632 - DNA, 25 bp, Homo sapien
cttgggagactggatagtataattc

SEQ ID NO: 1364633 - DNA, 25 bp, Homo sapien
cacccgtgtgagttgttatggctaa

SEQ ID NO: 1364634 - DNA, 25 bp, Homo sapien
cactgtcattagagattggtacttc

SEQ ID NO: 1364635 - DNA, 25 bp, Homo sapien
tatcatcaacaacacgaactgggtc

SEQ ID NO: 1364636 - DNA, 25 bp, Homo sapien
tcagctgcataatgagcactgtcat

SEQ ID NO: 1364637 - DNA, 25 bp, Homo sapien
cactgcagtctgtttgtaggtgggc

SEQ ID NO: 1364638 - DNA, 25 bp, Homo sapien
gcaatgctgccaccttaatctagga

SEQ ID NO: 1364639 - DNA, 25 bp, Homo sapien
gaattaggcacaggcttaccacgct

SEQ ID NO: 1364640 - DNA, 25 bp, Homo sapien
tctgggttccagatgtgcaatatct

SEQ ID NO: 1364641 - DNA, 25 bp, Homo sapien
catgcacttcagctacactggagga

SEQ ID NO: 1364642 - DNA, 25 bp, Homo sapien
taagtgactataagaaaactaggaa

SEQ ID NO: 1364643 - DNA, 25 bp, Homo sapien
acatgactaatacaagatatcttgg

SEQ ID NO: 1364644 - DNA, 25 bp, Homo sapien
taaagggtacacaagacctctctgt

SEQ ID NO: 1364645 - DNA, 25 bp, Homo sapien
tgtgtctgtgtcagtatgctggttg

SEQ ID NO: 1364646 - DNA, 25 bp, Homo sapien
cagataaggtccaaaacttggcagt

SEQ ID NO: 1364647 - DNA, 25 bp, Homo sapien
gctatgattttcttgcgctgttcca

SEQ ID NO: 1364648 - DNA, 25 bp, Homo sapien
tcttgcgctgttccagataaggtcc

SEQ ID NO: 1364649 - DNA, 25 bp, Homo sapien
tacattttgttctttcagtctaatc

SEQ ID NO: 1364650 - DNA, 25 bp, Homo sapien
agtttcatggttgggttggcatata

SEQ ID NO: 1364651 - DNA, 25 bp, Homo sapien
atgtcttggtgagacatttggagga

SEQ ID NO: 1364652 - DNA, 25 bp, Homo sapien
atcagggaaacagggttgagtttca

SEQ ID NO: 1364653 - DNA, 25 bp, Homo sapien
tcttggtgagacatttggaggaaaa

SEQ ID NO: 1364654 - DNA, 25 bp, Homo sapien
tgctgactgcctcaccctgactcac

SEQ ID NO: 1364655 - DNA, 25 bp, Homo sapien
ctgactgcctcaccctgactcacaa

SEQ ID NO: 1364656 - DNA, 25 bp, Homo sapien
actgcctcaccctgactcacaatgg

SEQ ID NO: 1364657 - DNA, 25 bp, Homo sapien
tccaatattgatcttcactcccaca

SEQ ID NO: 1364658 - DNA, 25 bp, Homo sapien
ccttgtgcttaatattacgatatag

SEQ ID NO: 1364659 - DNA, 25 bp, Homo sapien
cacagtgacactatattaatgtatt

SEQ ID NO: 1364660 - DNA, 25 bp, Homo sapien
tgccttgtgcttaatattacgatat

SEQ ID NO: 1364661 - DNA, 25 bp, Homo sapien
tgaattacttatgtacacagtgaca

SEQ ID NO: 1364662 - DNA, 25 bp, Homo sapien
agtacctgctttcccgtgatttcca

SEQ ID NO: 1364663 - DNA, 25 bp, Homo sapien
gtatatgcttaagttaagtacctgc

SEQ ID NO: 1364664 - DNA, 25 bp, Homo sapien
ttgaattcatcagggattcctgtag

SEQ ID NO: 1364665 - DNA, 25 bp, Homo sapien
acttgaattcatcagggattcctgt

SEQ ID NO: 1364666 - DNA, 25 bp, Homo sapien
gtactgaacgtggaatcaatactca

SEQ ID NO: 1364667 - DNA, 25 bp, Homo sapien
tgcattgctgtttaagtgcctggaa

SEQ ID NO: 1364668 - DNA, 25 bp, Homo sapien
tcccttagaggccagcacatcgtct

SEQ ID NO: 1364669 - DNA, 25 bp, Homo sapien
acagcagtgcccattgaagagtact

SEQ ID NO: 1364670 - DNA, 25 bp, Homo sapien
gaaattagcacacgagtgtcccgct

SEQ ID NO: 1364671 - DNA, 25 bp, Homo sapien
tgacttccagtgacataacagagct

SEQ ID NO: 1364672 - DNA, 25 bp, Homo sapien
tctccagaagtcaggtaacagctct

SEQ ID NO: 1364673 - DNA, 25 bp, Homo sapien
gctctccatgctagaaaaccattca

SEQ ID NO: 1364674 - DNA, 25 bp, Homo sapien
gactagaaagcttcgtgtgacctct

SEQ ID NO: 1364675 - DNA, 25 bp, Homo sapien
tgttgcccctagttggtcaccaagc

SEQ ID NO: 1364676 - DNA, 25 bp, Homo sapien
tcttccgcaggtttcaggcccttga

SEQ ID NO: 1364677 - DNA, 25 bp, Homo sapien
gaaagtctactgtcattgcatccta

SEQ ID NO: 1364678 - DNA, 25 bp, Homo sapien
gccttccgggaatgctaagaataca

SEQ ID NO: 1364679 - DNA, 25 bp, Homo sapien
gagctgattacaccagacacgggcc

SEQ ID NO: 1364680 - DNA, 25 bp, Homo sapien
gaatacagtgtcttcccagagctga

SEQ ID NO: 1364681 - DNA, 25 bp, Homo sapien
gcctcaatgatgcatggaccagcta

SEQ ID NO: 1364682 - DNA, 25 bp, Homo sapien
tacaatgaccaatactttgggtagt

SEQ ID NO: 1364683 - DNA, 25 bp, Homo sapien
ctgcctcggagagactgaaaatatt

SEQ ID NO: 1364684 - DNA, 25 bp, Homo sapien
tgtacaatgaccaatactttgggta

SEQ ID NO: 1364685 - DNA, 25 bp, Homo sapien
ggagagactgaaaatattactattg

SEQ ID NO: 1364686 - DNA, 25 bp, Homo sapien
gctgtgatgcaggggagacactcac

SEQ ID NO: 1364687 - DNA, 25 bp, Homo sapien
tggtggtatgcataatctggaagcc

SEQ ID NO: 1364688 - DNA, 25 bp, Homo sapien
caagctaccgaaactggtgaactgt

SEQ ID NO: 1364689 - DNA, 25 bp, Homo sapien
acgtgggccagacaatcacagagca

SEQ ID NO: 1364690 - DNA, 25 bp, Homo sapien
attccaagttcgttccaagctaccg

SEQ ID NO: 1364691 - DNA, 25 bp, Homo sapien
ggttctcctggcatggtgtccactg

SEQ ID NO: 1364692 - DNA, 25 bp, Homo sapien
caattgagtctactgaagaattcct

SEQ ID NO: 1364693 - DNA, 25 bp, Homo sapien
actgctagcagtgaatacacaggcc

SEQ ID NO: 1364694 - DNA, 25 bp, Homo sapien
gctggtgccagggagttaacatgaa

SEQ ID NO: 1364695 - DNA, 25 bp, Homo sapien
tacaatacatcctgttattctgggc

SEQ ID NO: 1364696 - DNA, 25 bp, Homo sapien
ggtccttagggagagtgaccatata

SEQ ID NO: 1364697 - DNA, 25 bp, Homo sapien
tgggcagtctctatgaaacattcag

SEQ ID NO: 1364698 - DNA, 25 bp, Homo sapien
ctgcagtagaaagatgggtaaaacc

SEQ ID NO: 1364699 - DNA, 25 bp, Homo sapien
ctgtaatatgtgtataagctctcct

SEQ ID NO: 1364700 - DNA, 25 bp, Homo sapien
aatatgtgtataagctctcctttac

SEQ ID NO: 1364701 - DNA, 25 bp, Homo sapien
gtaatatgtgtataagctctccttt

SEQ ID NO: 1364702 - DNA, 25 bp, Homo sapien
tatgtgtataagctctcctttactt

SEQ ID NO: 1364703 - DNA, 25 bp, Homo sapien
gcatcaagttacctgactctaaact

SEQ ID NO: 1364704 - DNA, 25 bp, Homo sapien
caagttacctgactctaaactatac

SEQ ID NO: 1364705 - DNA, 25 bp, Homo sapien
gaagcatcaagttacctgactctaa

SEQ ID NO: 1364706 - DNA, 25 bp, Homo sapien
tcaagttacctgactctaaactata

SEQ ID NO: 1364707 - DNA, 25 bp, Homo sapien
ccctgcatgtaatatcctatcggca

SEQ ID NO: 1364708 - DNA, 25 bp, Homo sapien
cttttgttaacggaggctgcaggca

SEQ ID NO: 1364709 - DNA, 25 bp, Homo sapien
ggcaaggccagcttttgttaacgga

SEQ ID NO: 1364710 - DNA, 25 bp, Homo sapien
cggcaatcaatttaaggttctgttc

SEQ ID NO: 1364711 - DNA, 25 bp, Homo sapien
caaggcttactgcttacaagacaga

SEQ ID NO: 1364712 - DNA, 25 bp, Homo sapien
ggccaattgctggatatcctcctaa

SEQ ID NO: 1364713 - DNA, 25 bp, Homo sapien
gggcggcctgcttccatacagatgg

SEQ ID NO: 1364714 - DNA, 25 bp, Homo sapien
gacagaaaccatgagtaaggtgcac

SEQ ID NO: 1364715 - DNA, 25 bp, Homo sapien
gaggtcagactactagtggagtgat

SEQ ID NO: 1364716 - DNA, 25 bp, Homo sapien
gatataatgggaaactgcactacag

SEQ ID NO: 1364717 - DNA, 25 bp, Homo sapien
agcactctgacaggagaggtcagac

SEQ ID NO: 1364718 - DNA, 25 bp, Homo sapien
catcttagctgtatgttatggaaag

SEQ ID NO: 1364719 - DNA, 25 bp, Homo sapien
tatagtatgcggacactgtgaggac

SEQ ID NO: 1364720 - DNA, 25 bp, Homo sapien
tcctgtgtaaagaagccagatactt

SEQ ID NO: 1364721 - DNA, 25 bp, Homo sapien
gagtgtctttctacaaagggtctac

SEQ ID NO: 1364722 - DNA, 25 bp, Homo sapien
tagcctgacctatgagtgaatatca

SEQ ID NO: 1364723 - DNA, 25 bp, Homo sapien
aaggcaagaacactcactgtctaaa

SEQ ID NO: 1364724 - DNA, 25 bp, Homo sapien
aaacatgacagtgcaatgcagctac

SEQ ID NO: 1364725 - DNA, 25 bp, Homo sapien
tactggacttgcaaccatacacatt

SEQ ID NO: 1364726 - DNA, 25 bp, Homo sapien
ttctgtttgattgccactcatggag

SEQ ID NO: 1364727 - DNA, 25 bp, Homo sapien
aagtcaattatatgatgtttctctt

SEQ ID NO: 1364728 - DNA, 25 bp, Homo sapien
cagctatacgtggaactggtttccc

SEQ ID NO: 1364729 - DNA, 25 bp, Homo sapien
gcttttcagataaagcagggctttg

SEQ ID NO: 1364730 - DNA, 25 bp, Homo sapien
tgaggccagtgcagtagtcttcgat

SEQ ID NO: 1364731 - DNA, 25 bp, Homo sapien
tctggtgactcacagtagctggact

SEQ ID NO: 1364732 - DNA, 25 bp, Homo sapien
ttgtacagtatgagtaagaatagta

SEQ ID NO: 1364733 - DNA, 25 bp, Homo sapien
taagaatagtaacaagccaaaacca

SEQ ID NO: 1364734 - DNA, 25 bp, Homo sapien
gtatgagtaagaatagtaacaagcc

SEQ ID NO: 1364735 - DNA, 25 bp, Homo sapien
tgagtaagaatagtaacaagccaaa

SEQ ID NO: 1364736 - DNA, 25 bp, Homo sapien
gctttgcccatggatttgatctcag

SEQ ID NO: 1364737 - DNA, 25 bp, Homo sapien
gaaagatgccttgtccttgcctaac

SEQ ID NO: 1364738 - DNA, 25 bp, Homo sapien
tgtagctttagagtgggatcctgga

SEQ ID NO: 1364739 - DNA, 25 bp, Homo sapien
acttaggatgcaagtgcaccattga

SEQ ID NO: 1364740 - DNA, 25 bp, Homo sapien
gcaacaagcagggatcacttctcca

SEQ ID NO: 1364741 - DNA, 25 bp, Homo sapien
cttctgtattgcatcctgggagtga

SEQ ID NO: 1364742 - DNA, 25 bp, Homo sapien
taccaatagaattccctaacagcag

SEQ ID NO: 1364743 - DNA, 25 bp, Homo sapien
tacttgagaccatccaacttagcct

SEQ ID NO: 1364744 - DNA, 25 bp, Homo sapien
atcacatagtgcataccacattcct

SEQ ID NO: 1364745 - DNA, 25 bp, Homo sapien
tcacatagtgcataccacattcctc

SEQ ID NO: 1364746 - DNA, 25 bp, Homo sapien
catcacatagtgcataccacattcc

SEQ ID NO: 1364747 - DNA, 25 bp, Homo sapien
gatgtcctattcaaacaatcatagc

SEQ ID NO: 1364748 - DNA, 25 bp, Homo sapien
aatcatagccaaggccaatgtctag

SEQ ID NO: 1364749 - DNA, 25 bp, Homo sapien
aaatccataggaagtcttttcatct

SEQ ID NO: 1364750 - DNA, 25 bp, Homo sapien
gcatgtcctttgatgtcctattcaa

SEQ ID NO: 1364751 - DNA, 25 bp, Homo sapien
atgatgctgtaacctaggttttttc

SEQ ID NO: 1364752 - DNA, 25 bp, Homo sapien
tctcaaagcaataggtctgattgct

SEQ ID NO: 1364753 - DNA, 25 bp, Homo sapien
tttcagcagagtcaattccaccagt

SEQ ID NO: 1364754 - DNA, 25 bp, Homo sapien
gacggaagcaccactatggagaaac

SEQ ID NO: 1364755 - DNA, 25 bp, Homo sapien
caggcagagcacgagcaatggaggt

SEQ ID NO: 1364756 - DNA, 25 bp, Homo sapien
tcagaataatcaatggttagcacac

SEQ ID NO: 1364757 - DNA, 25 bp, Homo sapien
tggttagcacactgaccacttgagt

SEQ ID NO: 1364758 - DNA, 25 bp, Homo sapien
acttctattactatgatgtgatgac

SEQ ID NO: 1364759 - DNA, 25 bp, Homo sapien
acttgagtatactgtcttatattac

SEQ ID NO: 1364760 - DNA, 25 bp, Homo sapien
ataataaattgtgctcagatggatc

SEQ ID NO: 1364761 - DNA, 25 bp, Homo sapien
taagcttcctaaatgtcagctgatc

SEQ ID NO: 1364762 - DNA, 25 bp, Homo sapien
ccagtgatttgtcgaaacaataccg

SEQ ID NO: 1364763 - DNA, 25 bp, Homo sapien
gttttactaagctaagacaaatgca

SEQ ID NO: 1364764 - DNA, 25 bp, Homo sapien
tagcaagactgtcccgttcatccgt

SEQ ID NO: 1364765 - DNA, 25 bp, Homo sapien
cgtggacagtgccattattagatac

SEQ ID NO: 1364766 - DNA, 25 bp, Homo sapien
tataaaaccactatgacttcgagac

SEQ ID NO: 1364767 - DNA, 25 bp, Homo sapien
gggtctgctgactacaacctttttg

SEQ ID NO: 1364768 - DNA, 25 bp, Homo sapien
gctgctgtatgtcttacaaaatgat

SEQ ID NO: 1364769 - DNA, 25 bp, Homo sapien
aatgatttatggtgtcccaatcccc

SEQ ID NO: 1364770 - DNA, 25 bp, Homo sapien
tgtatagttgtaataaactccccaa

SEQ ID NO: 1364771 - DNA, 25 bp, Homo sapien
gacacccattcctaaagtaacaaca

SEQ ID NO: 1364772 - DNA, 25 bp, Homo sapien
tgcttataaaccaccacatgagtgt

SEQ ID NO: 1364773 - DNA, 25 bp, Homo sapien
aaatggcctagatatttctttccag

SEQ ID NO: 1364774 - DNA, 25 bp, Homo sapien
aaagggatatcagtccacagagctg

SEQ ID NO: 1364775 - DNA, 25 bp, Homo sapien
gtgaatactacacttacaaaaggtc

SEQ ID NO: 1364776 - DNA, 25 bp, Homo sapien
taatcactgctaacaggttacagca

SEQ ID NO: 1364777 - DNA, 25 bp, Homo sapien
cattttcggcaaatcatgataggtg

SEQ ID NO: 1364778 - DNA, 25 bp, Homo sapien
tcagcaaagagggatattatcagtc

SEQ ID NO: 1364779 - DNA, 25 bp, Homo sapien
tattgagagcctatgagaatgcctg

SEQ ID NO: 1364780 - DNA, 25 bp, Homo sapien
cttggctgtgatgattagtcagcag

SEQ ID NO: 1364781 - DNA, 25 bp, Homo sapien
ttggctgtgatgattagtcagcagc

SEQ ID NO: 1364782 - DNA, 25 bp, Homo sapien
ccttggctgtgatgattagtcagca

SEQ ID NO: 1364783 - DNA, 25 bp, Homo sapien
tggctgtgatgattagtcagcagct

SEQ ID NO: 1364784 - DNA, 25 bp, Homo sapien
cgctgggttaggcaagctgttcaga

SEQ ID NO: 1364785 - DNA, 25 bp, Homo sapien
tctgccgctgggttaggcaagctgt

SEQ ID NO: 1364786 - DNA, 25 bp, Homo sapien
tgcggaacatctgccgctgggttag

SEQ ID NO: 1364787 - DNA, 25 bp, Homo sapien
agagctggtgcggaacatctgccgc

SEQ ID NO: 1364788 - DNA, 25 bp, Homo sapien
gcaaagcgaactacatatggaggag

SEQ ID NO: 1364789 - DNA, 25 bp, Homo sapien
gcagtggggattgcaaagcgaacta

SEQ ID NO: 1364790 - DNA, 25 bp, Homo sapien
aaagcgaactacatatggaggagtg

SEQ ID NO: 1364791 - DNA, 25 bp, Homo sapien
gggattgcaaagcgaactacatatg

SEQ ID NO: 1364792 - DNA, 25 bp, Homo sapien
tgctgtatgttaacacaagggcaac

SEQ ID NO: 1364793 - DNA, 25 bp, Homo sapien
tgggtaatccatagctctgggcctg

SEQ ID NO: 1364794 - DNA, 25 bp, Homo sapien
taataggtggtgctcatacattgcc

SEQ ID NO: 1364795 - DNA, 25 bp, Homo sapien
tatttcagttgatgcacgataccca

SEQ ID NO: 1364796 - DNA, 25 bp, Homo sapien
tacgagtccattcaccaatagttga

SEQ ID NO: 1364797 - DNA, 25 bp, Homo sapien
tatggctgtgcgactgtactacatc

SEQ ID NO: 1364798 - DNA, 25 bp, Homo sapien
catatgggttatgggtaggtaatga

SEQ ID NO: 1364799 - DNA, 25 bp, Homo sapien
gactaaagaagactagagctaataa

SEQ ID NO: 1364800 - DNA, 25 bp, Homo sapien
gcagataatcacgaagacctggtaa

SEQ ID NO: 1364801 - DNA, 25 bp, Homo sapien
gtcaaagcagataatcacgaagacc

SEQ ID NO: 1364802 - DNA, 25 bp, Homo sapien
aaagcagataatcacgaagacctgg

SEQ ID NO: 1364803 - DNA, 25 bp, Homo sapien
agataatcacgaagacctggtaaga

SEQ ID NO: 1364804 - DNA, 25 bp, Homo sapien
tgaatatgctaacagcaggcaccct

SEQ ID NO: 1364805 - DNA, 25 bp, Homo sapien
tctttacgagttctgtgttctgcga

SEQ ID NO: 1364806 - DNA, 25 bp, Homo sapien
tgtgtgtcaaaacccctatcttaag

SEQ ID NO: 1364807 - DNA, 25 bp, Homo sapien
cactggtttgtaatgatagctcaga

SEQ ID NO: 1364808 - DNA, 25 bp, Homo sapien
caagggattgaatgctgtcgaatcg

SEQ ID NO: 1364809 - DNA, 25 bp, Homo sapien
gcacctggcttacatggaaggaaga

SEQ ID NO: 1364810 - DNA, 25 bp, Homo sapien
tctgacaaagcaataacaagggatt

SEQ ID NO: 1364811 - DNA, 25 bp, Homo sapien
tcatggatgttaagaaggcattgtc

SEQ ID NO: 1364812 - DNA, 25 bp, Homo sapien
caatctcatgcagttggcggacaga

SEQ ID NO: 1364813 - DNA, 25 bp, Homo sapien
taatagtacactagctcagagagtt

SEQ ID NO: 1364814 - DNA, 25 bp, Homo sapien
tgtagaatttcagccaagttgctca

SEQ ID NO: 1364815 - DNA, 25 bp, Homo sapien
tgatccagatgttaaagccataggc

SEQ ID NO: 1364816 - DNA, 25 bp, Homo sapien
tctttgagaggcagtcatgtctgag

SEQ ID NO: 1364817 - DNA, 25 bp, Homo sapien
tgtgattgataaagccagggattac

SEQ ID NO: 1364818 - DNA, 25 bp, Homo sapien
ttcataacttccacaaatagcactg

SEQ ID NO: 1364819 - DNA, 25 bp, Homo sapien
cagatggccgagatttgggtccaga

SEQ ID NO: 1364820 - DNA, 25 bp, Homo sapien
tatcatctctataggaataataggt

SEQ ID NO: 1364821 - DNA, 25 bp, Homo sapien
tattgcaatcaccttaagacacact

SEQ ID NO: 1364822 - DNA, 25 bp, Homo sapien
tgcctagaatacaaagggaactgac

SEQ ID NO: 1364823 - DNA, 25 bp, Homo sapien
tgtgatcccatgtgtagaaataggc

SEQ ID NO: 1364824 - DNA, 25 bp, Homo sapien
ccagctgctgaaggaagactttatt

SEQ ID NO: 1364825 - DNA, 25 bp, Homo sapien
gaaattctagcacatctggggcact

SEQ ID NO: 1364826 - DNA, 25 bp, Homo sapien
ttctcttcctgatgacggacgtctg

SEQ ID NO: 1364827 - DNA, 25 bp, Homo sapien
ggtcctcacacttggtttggattct

SEQ ID NO: 1364828 - DNA, 25 bp, Homo sapien
tagtggcagctgtcaaggtccttac

SEQ ID NO: 1364829 - DNA, 25 bp, Homo sapien
tgacatacttagtggcagctgtcaa

SEQ ID NO: 1364830 - DNA, 25 bp, Homo sapien
gacatacttagtggcagctgtcaag

SEQ ID NO: 1364831 - DNA, 25 bp, Homo sapien
acttagtggcagctgtcaaggtcct

SEQ ID NO: 1364832 - DNA, 25 bp, Homo sapien
ccacaggccaggcccattcctcttt

SEQ ID NO: 1364833 - DNA, 25 bp, Homo sapien
acaggccaggcccattcctctttct

SEQ ID NO: 1364834 - DNA, 25 bp, Homo sapien
gcccacaggccaggcccattcctct

SEQ ID NO: 1364835 - DNA, 25 bp, Homo sapien
ctgcccacaggccaggcccattcct

SEQ ID NO: 1364836 - DNA, 25 bp, Homo sapien
ataaatttaactccagggcatctgc

SEQ ID NO: 1364837 - DNA, 25 bp, Homo sapien
gacatgataaatttaactccagggc

SEQ ID NO: 1364838 - DNA, 25 bp, Homo sapien
gtggacatgataaatttaactccag

SEQ ID NO: 1364839 - DNA, 25 bp, Homo sapien
tgataaatttaactccagggcatct

SEQ ID NO: 1364840 - DNA, 25 bp, Homo sapien
tcatggcagctctttatttaaaact

SEQ ID NO: 1364841 - DNA, 25 bp, Homo sapien
ctaataaaaataggagagaagaaat

SEQ ID NO: 1364842 - DNA, 25 bp, Homo sapien
taaatatatactaaagtaaccatta

SEQ ID NO: 1364843 - DNA, 25 bp, Homo sapien
gcagctctttatttaaaactaataa

SEQ ID NO: 1364844 - DNA, 25 bp, Homo sapien
gcaagttccgtccagtcatttttat

SEQ ID NO: 1364845 - DNA, 25 bp, Homo sapien
gacttcttggcaagttccgtccagt

SEQ ID NO: 1364846 - DNA, 25 bp, Homo sapien
tcttggcaagttccgtccagtcatt

SEQ ID NO: 1364847 - DNA, 25 bp, Homo sapien
cagacttcttggcaagttccgtcca

SEQ ID NO: 1364848 - DNA, 25 bp, Homo sapien
tattgtcgcatctcagggaacaggg

SEQ ID NO: 1364849 - DNA, 25 bp, Homo sapien
atattgtcgcatctcagggaacagg

SEQ ID NO: 1364850 - DNA, 25 bp, Homo sapien
gcagactgtaaaggctgagtggaaa

SEQ ID NO: 1364851 - DNA, 25 bp, Homo sapien
atgcagactgtaaaggctgagtgga

SEQ ID NO: 1364852 - DNA, 25 bp, Homo sapien
gactgtaaaggctgagtggaaactt

SEQ ID NO: 1364853 - DNA, 25 bp, Homo sapien
agactgtaaaggctgagtggaaact

SEQ ID NO: 1364854 - DNA, 25 bp, Homo sapien
aaattactatcaacacacatagttt

SEQ ID NO: 1364855 - DNA, 25 bp, Homo sapien
gcacagtcattgatcctatctaaat

SEQ ID NO: 1364856 - DNA, 25 bp, Homo sapien
aactctaggacattggtagaatgaa

SEQ ID NO: 1364857 - DNA, 25 bp, Homo sapien
tatcaacacacatagttttcagact

SEQ ID NO: 1364858 - DNA, 25 bp, Homo sapien
taaacatactcccttcaatccataa

SEQ ID NO: 1364859 - DNA, 25 bp, Homo sapien
tctgggttgccttaataaaaagatc

SEQ ID NO: 1364860 - DNA, 25 bp, Homo sapien
aatgatgccatccactgacaccagt

SEQ ID NO: 1364861 - DNA, 25 bp, Homo sapien
tcatgtctgtgagaactgtcaatct

SEQ ID NO: 1364862 - DNA, 25 bp, Homo sapien
gagtggcagtaaggacccaggacca

SEQ ID NO: 1364863 - DNA, 25 bp, Homo sapien
aaagatatagccttgtgcaggaaaa

SEQ ID NO: 1364864 - DNA, 25 bp, Homo sapien
cagtaaggacccaggaccatcttaa

SEQ ID NO: 1364865 - DNA, 25 bp, Homo sapien
tgcaggaaaaccacaagggacagta

SEQ ID NO: 1364866 - DNA, 25 bp, Homo sapien
aatggtacgagtgaaatagtcaggc

SEQ ID NO: 1364867 - DNA, 25 bp, Homo sapien
agaggtgagtttctgaaatggtacg

SEQ ID NO: 1364868 - DNA, 25 bp, Homo sapien
tagtcaggcatataaagcgctagcc

SEQ ID NO: 1364869 - DNA, 25 bp, Homo sapien
gactccatggcaagagcattaggaa

SEQ ID NO: 1364870 - DNA, 25 bp, Homo sapien
gggtcatatgatgggtatatgttta

SEQ ID NO: 1364871 - DNA, 25 bp, Homo sapien
aaagtaaaatatctgggtcatatga

SEQ ID NO: 1364872 - DNA, 25 bp, Homo sapien
ttgatgaaaatatgagttagtccca

SEQ ID NO: 1364873 - DNA, 25 bp, Homo sapien
taaacccaccaaagtactgtatcag

SEQ ID NO: 1364874 - DNA, 25 bp, Homo sapien
taggtttctcatttaggtctatgag

SEQ ID NO: 1364875 - DNA, 25 bp, Homo sapien
gagatctgaatcaaggcttactttc

SEQ ID NO: 1364876 - DNA, 25 bp, Homo sapien
tcttgttgcataagaacacccaatt

SEQ ID NO: 1364877 - DNA, 25 bp, Homo sapien
cagtaattttggtaggtatctgaca

SEQ ID NO: 1364878 - DNA, 25 bp, Homo sapien
gacttgccaaatctccctttcacaa

SEQ ID NO: 1364879 - DNA, 25 bp, Homo sapien
tagtgaataattaccgtgtgtcaaa

SEQ ID NO: 1364880 - DNA, 25 bp, Homo sapien
ctgagagtgtcataaaaagcaagtc

SEQ ID NO: 1364881 - DNA, 25 bp, Homo sapien
taaactatctctgagggtcacacag

SEQ ID NO: 1364882 - DNA, 25 bp, Homo sapien
gacaaatgcaataaaccatagtggc

SEQ ID NO: 1364883 - DNA, 25 bp, Homo sapien
catagtggcactattgatatctgtc

SEQ ID NO: 1364884 - DNA, 25 bp, Homo sapien
gagtagttattagacccatcactag

SEQ ID NO: 1364885 - DNA, 25 bp, Homo sapien
gatatctgtcactttggaccaaaag

SEQ ID NO: 1364886 - DNA, 25 bp, Homo sapien
gccagaggtggttccccggatgatt

SEQ ID NO: 1364887 - DNA, 25 bp, Homo sapien
gagctttgtccagggccatacatgg

SEQ ID NO: 1364888 - DNA, 25 bp, Homo sapien
gacactttgacaccaatatgcagcc

SEQ ID NO: 1364889 - DNA, 25 bp, Homo sapien
tgcagccgttttctcactgatgagc

SEQ ID NO: 1364890 - DNA, 25 bp, Homo sapien
ctgggggaaacatttgtcacaatgt

SEQ ID NO: 1364891 - DNA, 25 bp, Homo sapien
tgggggaaacatttgtcacaatgtc

SEQ ID NO: 1364892 - DNA, 25 bp, Homo sapien
gatgaaagagtaaagatattgagtc

SEQ ID NO: 1364893 - DNA, 25 bp, Homo sapien
ctgatgaaagagtaaagatattgag

SEQ ID NO: 1364894 - DNA, 25 bp, Homo sapien
tgatgaaagagtaaagatattgagt

SEQ ID NO: 1364895 - DNA, 25 bp, Homo sapien
tgaaagagtaaagatattgagtctc

SEQ ID NO: 1364896 - DNA, 25 bp, Homo sapien
ctcatccagtgggtactccggtgtt

SEQ ID NO: 1364897 - DNA, 25 bp, Homo sapien
aatatttcactcagatgaggctggt

SEQ ID NO: 1364898 - DNA, 25 bp, Homo sapien
tccagtgggtactccggtgttttca

SEQ ID NO: 1364899 - DNA, 25 bp, Homo sapien
gtactccggtgttttcatggtctga

SEQ ID NO: 1364900 - DNA, 25 bp, Homo sapien
tgggttcactgttcagataagaggt

SEQ ID NO: 1364901 - DNA, 25 bp, Homo sapien
tctgctggcctgcttataagatgat

SEQ ID NO: 1364902 - DNA, 25 bp, Homo sapien
tttggatacactctgccaaacggta

SEQ ID NO: 1364903 - DNA, 25 bp, Homo sapien
caacagacagactgattaaattatt

SEQ ID NO: 1364904 - DNA, 25 bp, Homo sapien
gatgtttgaagtagtgccttcagtt

SEQ ID NO: 1364905 - DNA, 25 bp, Homo sapien
aagagacaggtttagagacttaaag

SEQ ID NO: 1364906 - DNA, 25 bp, Homo sapien
tttcagagatgtttgaagtagtgcc

SEQ ID NO: 1364907 - DNA, 25 bp, Homo sapien
taaagacaggtcatatgagaaacag

SEQ ID NO: 1364908 - DNA, 25 bp, Homo sapien
gacacctactggattaactacccag

SEQ ID NO: 1364909 - DNA, 25 bp, Homo sapien
aacatccaaagctatttaaagaggc

SEQ ID NO: 1364910 - DNA, 25 bp, Homo sapien
ccttaagatgggataatgtgcacaa

SEQ ID NO: 1364911 - DNA, 25 bp, Homo sapien
taaagaggcaattgccagtctctga

SEQ ID NO: 1364912 - DNA, 25 bp, Homo sapien
gtcacaccttcatctcccctatgca

SEQ ID NO: 1364913 - DNA, 25 bp, Homo sapien
tgcacatcacttttgataggttcag

SEQ ID NO: 1364914 - DNA, 25 bp, Homo sapien
ttttgataggttcagaggcaacaac

SEQ ID NO: 1364915 - DNA, 25 bp, Homo sapien
catcacttttgataggttcagaggc

SEQ ID NO: 1364916 - DNA, 25 bp, Homo sapien
tatttggatgtgagggacacctccg

SEQ ID NO: 1364917 - DNA, 25 bp, Homo sapien
ctgagaaagagtccatacatggttc

SEQ ID NO: 1364918 - DNA, 25 bp, Homo sapien
tgctttactgttatttggatgtgag

SEQ ID NO: 1364919 - DNA, 25 bp, Homo sapien
gaaagagtccatacatggttccaat

SEQ ID NO: 1364920 - DNA, 25 bp, Homo sapien
agactgtcatttttcgaaatgaaaa

SEQ ID NO: 1364921 - DNA, 25 bp, Homo sapien
acgttggattggctagacttgctgg

SEQ ID NO: 1364922 - DNA, 25 bp, Homo sapien
ggaaagcactaagccgaagagatgc

SEQ ID NO: 1364923 - DNA, 25 bp, Homo sapien
tgaaaatgctaatgataccgaaggg

SEQ ID NO: 1364924 - DNA, 25 bp, Homo sapien
cacaagactgctgtgcaagcgtacc

SEQ ID NO: 1364925 - DNA, 25 bp, Homo sapien
tctctgccagtccttaccagtttgc

SEQ ID NO: 1364926 - DNA, 25 bp, Homo sapien
ccacaagactgctgtgcaagcgtac

SEQ ID NO: 1364927 - DNA, 25 bp, Homo sapien
cagtccttaccagtttgccaattat

SEQ ID NO: 1364928 - DNA, 25 bp, Homo sapien
agcgaccatgtttctagcactctga

SEQ ID NO: 1364929 - DNA, 25 bp, Homo sapien
ctgtgacagcctttcagtctttgca

SEQ ID NO: 1364930 - DNA, 25 bp, Homo sapien
tacacaacagcgaccatgtttctag

SEQ ID NO: 1364931 - DNA, 25 bp, Homo sapien
ctctcagatcttattgactgctgtg

SEQ ID NO: 1364932 - DNA, 25 bp, Homo sapien
aactttgccattagcagcaattttc

SEQ ID NO: 1364933 - DNA, 25 bp, Homo sapien
taaactttgccattagcagcaattt

SEQ ID NO: 1364934 - DNA, 25 bp, Homo sapien
ctttgccattagcagcaattttctt

SEQ ID NO: 1364935 - DNA, 25 bp, Homo sapien
ctaaactttgccattagcagcaatt

SEQ ID NO: 1364936 - DNA, 25 bp, Homo sapien
tacaaaggcaaggagaatattatgg

SEQ ID NO: 1364937 - DNA, 25 bp, Homo sapien
tctgacagtaaggtaatcatggtat

SEQ ID NO: 1364938 - DNA, 25 bp, Homo sapien
tgtgagacagaataagggtaaaatc

SEQ ID NO: 1364939 - DNA, 25 bp, Homo sapien
caaaatagccaatgtaggtatgcct

SEQ ID NO: 1364940 - DNA, 25 bp, Homo sapien
tgcgctagcaagaccaaaaggattt

SEQ ID NO: 1364941 - DNA, 25 bp, Homo sapien
aaagctcttcgaatcattgatgtgc

SEQ ID NO: 1364942 - DNA, 25 bp, Homo sapien
tggcagaaacggaagctccatattg

SEQ ID NO: 1364943 - DNA, 25 bp, Homo sapien
taatgtccaccagatcaataggagt

SEQ ID NO: 1364944 - DNA, 25 bp, Homo sapien
tgacactaccatccatcaagcttgt

SEQ ID NO: 1364945 - DNA, 25 bp, Homo sapien
cagaaatttgattgtgttatgcacc

SEQ ID NO: 1364946 - DNA, 25 bp, Homo sapien
tccatgatggaaaggcctagctcca

SEQ ID NO: 1364947 - DNA, 25 bp, Homo sapien
taattggctccatggcataatggtc

SEQ ID NO: 1364948 - DNA, 25 bp, Homo sapien
tttcttcccattctaaaggctgctt

SEQ ID NO: 1364949 - DNA, 25 bp, Homo sapien
gcaccaacagttgtataagggtttc

SEQ ID NO: 1364950 - DNA, 25 bp, Homo sapien
tatctatcagtagacatttaggtta

SEQ ID NO: 1364951 - DNA, 25 bp, Homo sapien
aatagtcattgtatcaagtgtgagg

SEQ ID NO: 1364952 - DNA, 25 bp, Homo sapien
cagtaaaattaacctgtgaagccac

SEQ ID NO: 1364953 - DNA, 25 bp, Homo sapien
atttggtaacagtgtgatgctggcc

SEQ ID NO: 1364954 - DNA, 25 bp, Homo sapien
cacttcttctaggttgtcaaatttg

SEQ ID NO: 1364955 - DNA, 25 bp, Homo sapien
gaagccacctggtcgtaggctttcc

SEQ ID NO: 1364956 - DNA, 25 bp, Homo sapien
gcaaaggtggtgatactgctgacaa

SEQ ID NO: 1364957 - DNA, 25 bp, Homo sapien
tactgcatacaaaccaaagagtctg

SEQ ID NO: 1364958 - DNA, 25 bp, Homo sapien
taacaattgccatactgacaggccc

SEQ ID NO: 1364959 - DNA, 25 bp, Homo sapien
tcaaaagtgtcaatcaaaaaggtaa

SEQ ID NO: 1364960 - DNA, 25 bp, Homo sapien
taaggtcgaataagctgcctcaaaa

SEQ ID NO: 1364961 - DNA, 25 bp, Homo sapien
taacagctggaaagatgacacttga

SEQ ID NO: 1364962 - DNA, 25 bp, Homo sapien
aagatgacacttgacatttggaaac

SEQ ID NO: 1364963 - DNA, 25 bp, Homo sapien
tgctgcaaggctttcccattagctt

SEQ ID NO: 1364964 - DNA, 25 bp, Homo sapien
tactctaatattaagcctgtgcaat

SEQ ID NO: 1364965 - DNA, 25 bp, Homo sapien
aatactctaatattaagcctgtgca

SEQ ID NO: 1364966 - DNA, 25 bp, Homo sapien
aaatttctaattctcgaatcatagt

SEQ ID NO: 1364967 - DNA, 25 bp, Homo sapien
ctgcaaagggtaacggaaatactct

SEQ ID NO: 1364968 - DNA, 25 bp, Homo sapien
tcagatggtaatgactttctgtcac

SEQ ID NO: 1364969 - DNA, 25 bp, Homo sapien
gggcagatttgaactagtgaccaag

SEQ ID NO: 1364970 - DNA, 25 bp, Homo sapien
ccaagaggttaaaggctctgtatct

SEQ ID NO: 1364971 - DNA, 25 bp, Homo sapien
ctgtcactcttgacctggggcagat

SEQ ID NO: 1364972 - DNA, 25 bp, Homo sapien
tagaatcacagtaactgttaaagaa

SEQ ID NO: 1364973 - DNA, 25 bp, Homo sapien
tcacagtaactgttaaagaacttca

SEQ ID NO: 1364974 - DNA, 25 bp, Homo sapien
atcacagtaactgttaaagaacttc

SEQ ID NO: 1364975 - DNA, 25 bp, Homo sapien
gaatcacagtaactgttaaagaact

SEQ ID NO: 1364976 - DNA, 25 bp, Homo sapien
tgaaagtcccaatcctagtcctgcc

SEQ ID NO: 1364977 - DNA, 25 bp, Homo sapien
tcttggcacacggaagcgttctagt

SEQ ID NO: 1364978 - DNA, 25 bp, Homo sapien
ttctagtttactttcctggaagcac

SEQ ID NO: 1364979 - DNA, 25 bp, Homo sapien
caaacacaacagtcagatgaagaga

SEQ ID NO: 1364980 - DNA, 25 bp, Homo sapien
cacaactcacttctttactagacaa

SEQ ID NO: 1364981 - DNA, 25 bp, Homo sapien
catctgttaagactctatacatcag

SEQ ID NO: 1364982 - DNA, 25 bp, Homo sapien
taggattcttacttgcaaatttaaa

SEQ ID NO: 1364983 - DNA, 25 bp, Homo sapien
taaatctaataattggtgctatcta

SEQ ID NO: 1364984 - DNA, 25 bp, Homo sapien
gattagagagttacacagcaggagg

SEQ ID NO: 1364985 - DNA, 25 bp, Homo sapien
tgctggattatgcaagagagtgccc

SEQ ID NO: 1364986 - DNA, 25 bp, Homo sapien
taggatccttagttacagtgctggt

SEQ ID NO: 1364987 - DNA, 25 bp, Homo sapien
tcagatggccgttcagggacttcag

SEQ ID NO: 1364988 - DNA, 25 bp, Homo sapien
tggcagtgccttggtacaacctgaa

SEQ ID NO: 1364989 - DNA, 25 bp, Homo sapien
gcagtactctgaatggaccatagtg

SEQ ID NO: 1364990 - DNA, 25 bp, Homo sapien
tgccagaaaatcacccacagtggga

SEQ ID NO: 1364991 - DNA, 25 bp, Homo sapien
cataatataactaggcagtggcagt

SEQ ID NO: 1364992 - DNA, 25 bp, Homo sapien
tcgttgtggcaaagtatgctcagct

SEQ ID NO: 1364993 - DNA, 25 bp, Homo sapien
cagtcgttgtggcaaagtatgctca

SEQ ID NO: 1364994 - DNA, 25 bp, Homo sapien
gaccacagtcgttgtggcaaagtat

SEQ ID NO: 1364995 - DNA, 25 bp, Homo sapien
tcaagaccacagtcgttgtggcaaa

SEQ ID NO: 1364996 - DNA, 25 bp, Homo sapien
tgctttccatcattcaccgattcca

SEQ ID NO: 1364997 - DNA, 25 bp, Homo sapien
tccactgtagtgttagccaaaccaa

SEQ ID NO: 1364998 - DNA, 25 bp, Homo sapien
tacgtatttgtgaatgtaccaagaa

SEQ ID NO: 1364999 - DNA, 25 bp, Homo sapien
tgttagccaaaccaacgacatcacc

SEQ ID NO: 1365000 - DNA, 25 bp, Homo sapien
aattttatagggctcaaggcttctt

SEQ ID NO: 1365001 - DNA, 25 bp, Homo sapien
attttatagggctcaaggcttcttt

SEQ ID NO: 1365002 - DNA, 25 bp, Homo sapien
tttatagggctcaaggcttctttta

SEQ ID NO: 1365003 - DNA, 25 bp, Homo sapien
aaattttatagggctcaaggcttct

SEQ ID NO: 1365004 - DNA, 25 bp, Homo sapien
tatggatctctagtacatggcaggc

SEQ ID NO: 1365005 - DNA, 25 bp, Homo sapien
tctgttacgctaggcactatgtgac

SEQ ID NO: 1365006 - DNA, 25 bp, Homo sapien
tcttggctagcttcacagattcagc

SEQ ID NO: 1365007 - DNA, 25 bp, Homo sapien
gatcacaaaagaacccttgaaggtg

SEQ ID NO: 1365008 - DNA, 25 bp, Homo sapien
gatatttggcaaacacttactatgc

SEQ ID NO: 1365009 - DNA, 25 bp, Homo sapien
gtaaatacactttgaggagggcttg

SEQ ID NO: 1365010 - DNA, 25 bp, Homo sapien
atggtcaggtaagtcttgaaaacac

SEQ ID NO: 1365011 - DNA, 25 bp, Homo sapien
actgggtcatgttaaaccaaatgaa

SEQ ID NO: 1365012 - DNA, 25 bp, Homo sapien
tcaaatggatatctaaggcagatgt

SEQ ID NO: 1365013 - DNA, 25 bp, Homo sapien
gtaagtgatgtggtgttgattccca

SEQ ID NO: 1365014 - DNA, 25 bp, Homo sapien
cactgttatcagtttgacctccatc

SEQ ID NO: 1365015 - DNA, 25 bp, Homo sapien
aatatcatgttgtgcttcaaatgga

SEQ ID NO: 1365016 - DNA, 25 bp, Homo sapien
atatgtgctttttacatacctcatt

SEQ ID NO: 1365017 - DNA, 25 bp, Homo sapien
aaatgaatgatccttacactaaaca

SEQ ID NO: 1365018 - DNA, 25 bp, Homo sapien
aatatgtgctttttacatacctcat

SEQ ID NO: 1365019 - DNA, 25 bp, Homo sapien
ttacatacctcatttgcagaaattc

SEQ ID NO: 1365020 - DNA, 25 bp, Homo sapien
tcatcttgctctgtccgaacaaact

SEQ ID NO: 1365021 - DNA, 25 bp, Homo sapien
ctttaggatcactcagaactgaacc

SEQ ID NO: 1365022 - DNA, 25 bp, Homo sapien
aaactgcatagcaacaattctccca

SEQ ID NO: 1365023 - DNA, 25 bp, Homo sapien
gcactgatgaccacatcggctttca

SEQ ID NO: 1365024 - DNA, 25 bp, Homo sapien
tacgttctgtgtaacttggtgcctt

SEQ ID NO: 1365025 - DNA, 25 bp, Homo sapien
gagtatctcacaaaactacgttctg

SEQ ID NO: 1365026 - DNA, 25 bp, Homo sapien
tctgccacctgctaatactctcgga

SEQ ID NO: 1365027 - DNA, 25 bp, Homo sapien
ccctggcagctgttggagtatctca

SEQ ID NO: 1365028 - DNA, 25 bp, Homo sapien
tgatgagttcatgtcctttgcaggg

SEQ ID NO: 1365029 - DNA, 25 bp, Homo sapien
gaattaatttttgtggcacatatac

SEQ ID NO: 1365030 - DNA, 25 bp, Homo sapien
aaaatgatgagttcatgtcctttgc

SEQ ID NO: 1365031 - DNA, 25 bp, Homo sapien
accatggaatactatgcagccataa

SEQ ID NO: 1365032 - DNA, 25 bp, Homo sapien
gcaaagtggtccaaggttacaggaa

SEQ ID NO: 1365033 - DNA, 25 bp, Homo sapien
agtggtccaaggttacaggaagaat

SEQ ID NO: 1365034 - DNA, 25 bp, Homo sapien
ccaaggttacaggaagaattatgtc

SEQ ID NO: 1365035 - DNA, 25 bp, Homo sapien
tggtccaaggttacaggaagaatta

SEQ ID NO: 1365036 - DNA, 25 bp, Homo sapien
gagaagcgctagtttgtcagtagca

SEQ ID NO: 1365037 - DNA, 25 bp, Homo sapien
tgattggctggtttccctaaggacc

SEQ ID NO: 1365038 - DNA, 25 bp, Homo sapien
cctaaggacccatggctgagaagcg

SEQ ID NO: 1365039 - DNA, 25 bp, Homo sapien
catcttcttagaggatagtgtcgag

SEQ ID NO: 1365040 - DNA, 25 bp, Homo sapien
tgcacagtcaaaggcagtgtctcca

SEQ ID NO: 1365041 - DNA, 25 bp, Homo sapien
gactccccgtatcgatggcaatgga

SEQ ID NO: 1365042 - DNA, 25 bp, Homo sapien
acggcgagctccacaacgtagagca

SEQ ID NO: 1365043 - DNA, 25 bp, Homo sapien
gcaatggagagtgacaggcgcacat

SEQ ID NO: 1365044 - DNA, 25 bp, Homo sapien
tgatgaaaggaaaaccccattttca

SEQ ID NO: 1365045 - DNA, 25 bp, Homo sapien
tcaagtagagaaaccatttctgcat

SEQ ID NO: 1365046 - DNA, 25 bp, Homo sapien
cattttcaagtagagaaaccatttc

SEQ ID NO: 1365047 - DNA, 25 bp, Homo sapien
ctgaatgatgaaaggaaaaccccat

SEQ ID NO: 1365048 - DNA, 25 bp, Homo sapien
ggtcctgcgtcaggccttggaagat

SEQ ID NO: 1365049 - DNA, 25 bp, Homo sapien
agtctttggatgtataaaacccctg

SEQ ID NO: 1365050 - DNA, 25 bp, Homo sapien
tataaaacccctggtcctgcgtcag

SEQ ID NO: 1365051 - DNA, 25 bp, Homo sapien
tggatgtataaaacccctggtcctg

SEQ ID NO: 1365052 - DNA, 25 bp, Homo sapien
catattgctgagacttaaaatcaca

SEQ ID NO: 1365053 - DNA, 25 bp, Homo sapien
tattgctgagacttaaaatcacagt

SEQ ID NO: 1365054 - DNA, 25 bp, Homo sapien
tggaatatatttagtattactgtca

SEQ ID NO: 1365055 - DNA, 25 bp, Homo sapien
ggaatatatttagtattactgtcat

SEQ ID NO: 1365056 - DNA, 25 bp, Homo sapien
gatggatgcgcttggtcaacaattc

SEQ ID NO: 1365057 - DNA, 25 bp, Homo sapien
ttcttgatggatgcgcttggtcaac

SEQ ID NO: 1365058 - DNA, 25 bp, Homo sapien
cgcttggtcaacaattccagaaaca

SEQ ID NO: 1365059 - DNA, 25 bp, Homo sapien
agggcattcttgatggatgcgcttg

SEQ ID NO: 1365060 - DNA, 25 bp, Homo sapien
aatatttgtaacttgtaagtgcacg

SEQ ID NO: 1365061 - DNA, 25 bp, Homo sapien
ggcaagtgctgtcctcgttaaccac

SEQ ID NO: 1365062 - DNA, 25 bp, Homo sapien
ctcagataacccctggaatcaataa

SEQ ID NO: 1365063 - DNA, 25 bp, Homo sapien
tgcacggttaaggagaacagaaggc

SEQ ID NO: 1365064 - DNA, 25 bp, Homo sapien
tgtgataccacagccgactcccttg

SEQ ID NO: 1365065 - DNA, 25 bp, Homo sapien
agctgtgataccacagccgactccc

SEQ ID NO: 1365066 - DNA, 25 bp, Homo sapien
agccgactcccttgtgtgacctgtg

SEQ ID NO: 1365067 - DNA, 25 bp, Homo sapien
taccacagccgactcccttgtgtga

SEQ ID NO: 1365068 - DNA, 25 bp, Homo sapien
caaacgttctttatcagaaccacaa

SEQ ID NO: 1365069 - DNA, 25 bp, Homo sapien
tgcagtccaagctgctaggaaaatt

SEQ ID NO: 1365070 - DNA, 25 bp, Homo sapien
tgattctactgcaagaccatcctgg

SEQ ID NO: 1365071 - DNA, 25 bp, Homo sapien
agttcgtgtctacaacctccaaacg

SEQ ID NO: 1365072 - DNA, 25 bp, Homo sapien
gaaatatcatctcaaacctgtcaga

SEQ ID NO: 1365073 - DNA, 25 bp, Homo sapien
caattaacagtgtgtagagacaact

SEQ ID NO: 1365074 - DNA, 25 bp, Homo sapien
tgaaagctgtacctcagataaggag

SEQ ID NO: 1365075 - DNA, 25 bp, Homo sapien
tacttaagaaactaaactcaacagc

SEQ ID NO: 1365076 - DNA, 25 bp, Homo sapien
tagttccggcttctatgtcaaagtg

SEQ ID NO: 1365077 - DNA, 25 bp, Homo sapien
gaaatctcagatcagtgtgtcagca

SEQ ID NO: 1365078 - DNA, 25 bp, Homo sapien
taacttacaacatattgcctccagg

SEQ ID NO: 1365079 - DNA, 25 bp, Homo sapien
tcaaagtgccatagactgcgtgact

SEQ ID NO: 1365080 - DNA, 25 bp, Homo sapien
atattttgcctgctgttttaggtcc

SEQ ID NO: 1365081 - DNA, 25 bp, Homo sapien
caaactttgaataatacgtatcaca

SEQ ID NO: 1365082 - DNA, 25 bp, Homo sapien
tagacaccactcagtatacacagtg

SEQ ID NO: 1365083 - DNA, 25 bp, Homo sapien
tcctgccatcaagcatgtagtaata

SEQ ID NO: 1365084 - DNA, 25 bp, Homo sapien
gaaaatagagtcttcttgaaacata

SEQ ID NO: 1365085 - DNA, 25 bp, Homo sapien
tctagcaagtagcattttgcaatca

SEQ ID NO: 1365086 - DNA, 25 bp, Homo sapien
tgcttcaaaggaactaagccagagg

SEQ ID NO: 1365087 - DNA, 25 bp, Homo sapien
caaccaaagtggtcattctagcaag

SEQ ID NO: 1365088 - DNA, 25 bp, Homo sapien
tagtgatgataccaagaaattcatc

SEQ ID NO: 1365089 - DNA, 25 bp, Homo sapien
tctgaagatgtcaaagcagtaatta

SEQ ID NO: 1365090 - DNA, 25 bp, Homo sapien
ccatgaataagtaggtggaagatac

SEQ ID NO: 1365091 - DNA, 25 bp, Homo sapien
catccacaaggtagaggaaaaagcc

SEQ ID NO: 1365092 - DNA, 25 bp, Homo sapien
gattattagagtctgtaattgtaag

SEQ ID NO: 1365093 - DNA, 25 bp, Homo sapien
gtaattgtaagttatgtaaccacac

SEQ ID NO: 1365094 - DNA, 25 bp, Homo sapien
tagagtctgtaattgtaagttatgt

SEQ ID NO: 1365095 - DNA, 25 bp, Homo sapien
gtctgtaattgtaagttatgtaacc

SEQ ID NO: 1365096 - DNA, 25 bp, Homo sapien
atgaattaacaggcttgagggcttt

SEQ ID NO: 1365097 - DNA, 25 bp, Homo sapien
catgaattaacaggcttgagggctt

SEQ ID NO: 1365098 - DNA, 25 bp, Homo sapien
tgaattaacaggcttgagggctttc

SEQ ID NO: 1365099 - DNA, 25 bp, Homo sapien
gaattaacaggcttgagggctttcc

SEQ ID NO: 1365100 - DNA, 25 bp, Homo sapien
agttcctgcccctttacacaagtgg

SEQ ID NO: 1365101 - DNA, 25 bp, Homo sapien
aaaagtcacagaggccaaaacagtg

SEQ ID NO: 1365102 - DNA, 25 bp, Homo sapien
gttttccacaactgctactgccatg

SEQ ID NO: 1365103 - DNA, 25 bp, Homo sapien
cacaagtggtccctcataaaaattt

SEQ ID NO: 1365104 - DNA, 25 bp, Homo sapien
aactccattacagaggatatcccag

SEQ ID NO: 1365105 - DNA, 25 bp, Homo sapien
atcttctgatgggttactgtttgca

SEQ ID NO: 1365106 - DNA, 25 bp, Homo sapien
tgcatatataaaagctgttgatctg

SEQ ID NO: 1365107 - DNA, 25 bp, Homo sapien
tatcccagttatatcaatgccatgt

SEQ ID NO: 1365108 - DNA, 25 bp, Homo sapien
gcaagcttccaatacctttgaaata

SEQ ID NO: 1365109 - DNA, 25 bp, Homo sapien
gcagatgttttcacccgctgcaagg

SEQ ID NO: 1365110 - DNA, 25 bp, Homo sapien
catcctttacaagtaatgtgttttc

SEQ ID NO: 1365111 - DNA, 25 bp, Homo sapien
ggcacacatacctaaatcggcaaga

SEQ ID NO: 1365112 - DNA, 25 bp, Homo sapien
gatacaagatttcattatgggaccc

SEQ ID NO: 1365113 - DNA, 25 bp, Homo sapien
gaaagcttactgactcattaggagc

SEQ ID NO: 1365114 - DNA, 25 bp, Homo sapien
gcagcaaaagcataccaatagaaag

SEQ ID NO: 1365115 - DNA, 25 bp, Homo sapien
catgtggactgagctcgcagttcca

SEQ ID NO: 1365116 - DNA, 25 bp, Homo sapien
tacctacggagcagttgttctggca

SEQ ID NO: 1365117 - DNA, 25 bp, Homo sapien
aaatacctacatttcctgagctcta

SEQ ID NO: 1365118 - DNA, 25 bp, Homo sapien
tagcatgcagaaattcactaatccc

SEQ ID NO: 1365119 - DNA, 25 bp, Homo sapien
caaactgtcatattctacctacgga

SEQ ID NO: 1365120 - DNA, 25 bp, Homo sapien
caattagcctgccagtaagcaagga

SEQ ID NO: 1365121 - DNA, 25 bp, Homo sapien
gccagtaagcaaggattagggaaaa

SEQ ID NO: 1365122 - DNA, 25 bp, Homo sapien
tctttaggaccttcactgttcaatt

SEQ ID NO: 1365123 - DNA, 25 bp, Homo sapien
ggaccttcactgttcaattagcctg

SEQ ID NO: 1365124 - DNA, 25 bp, Homo sapien
tataggaacacaactactgaaatta

SEQ ID NO: 1365125 - DNA, 25 bp, Homo sapien
tggttatactagaattcaatggctg

SEQ ID NO: 1365126 - DNA, 25 bp, Homo sapien
ctagttttattctacagatagtacc

SEQ ID NO: 1365127 - DNA, 25 bp, Homo sapien
acagtttgcagcaaataagccaaaa

SEQ ID NO: 1365128 - DNA, 25 bp, Homo sapien
tattgaataggtacatcccactctg

SEQ ID NO: 1365129 - DNA, 25 bp, Homo sapien
aataatcagggatagctatctcttc

SEQ ID NO: 1365130 - DNA, 25 bp, Homo sapien
aacacaagcatggtatcaggaaaac

SEQ ID NO: 1365131 - DNA, 25 bp, Homo sapien
cagtaattaaggagtgagaagcaag

SEQ ID NO: 1365132 - DNA, 25 bp, Homo sapien
tatatgccgtaattgcccatagtac

SEQ ID NO: 1365133 - DNA, 25 bp, Homo sapien
cattcatgaggcaaagactaagtca

SEQ ID NO: 1365134 - DNA, 25 bp, Homo sapien
tgtgaccaggttcctaacagtatag

SEQ ID NO: 1365135 - DNA, 25 bp, Homo sapien
tatagtactagttcgtggccccgag

SEQ ID NO: 1365136 - DNA, 25 bp, Homo sapien
atgaaagcagctttgtagccttttt

SEQ ID NO: 1365137 - DNA, 25 bp, Homo sapien
gaaagcagctttgtagcctttttct

SEQ ID NO: 1365138 - DNA, 25 bp, Homo sapien
cactgaaaggcttttaccgcaaatt

SEQ ID NO: 1365139 - DNA, 25 bp, Homo sapien
ttcactgaaaggcttttaccgcaaa

SEQ ID NO: 1365140 - DNA, 25 bp, Homo sapien
tacagacaattaatcacatgcaggc

SEQ ID NO: 1365141 - DNA, 25 bp, Homo sapien
tgcaggcatgccagatgagaactat

SEQ ID NO: 1365142 - DNA, 25 bp, Homo sapien
tagctgcactgaacccctaaagcaa

SEQ ID NO: 1365143 - DNA, 25 bp, Homo sapien
tggcattcagacagtagacagacaa

SEQ ID NO: 1365144 - DNA, 25 bp, Homo sapien
tgagcagtacacagataggtgtttt

SEQ ID NO: 1365145 - DNA, 25 bp, Homo sapien
ctttagtgtagagcttactcctttc

SEQ ID NO: 1365146 - DNA, 25 bp, Homo sapien
gagcagtacacagataggtgttttt

SEQ ID NO: 1365147 - DNA, 25 bp, Homo sapien
ttaatctttagtgtagagcttactc

SEQ ID NO: 1365148 - DNA, 25 bp, Homo sapien
cattagctcaatctcaaaattcact

SEQ ID NO: 1365149 - DNA, 25 bp, Homo sapien
tacatcatacggcagccggaactga

SEQ ID NO: 1365150 - DNA, 25 bp, Homo sapien
ttcactacatcatacggcagccgga

SEQ ID NO: 1365151 - DNA, 25 bp, Homo sapien
ggcagccggaactgaggaatttcag

SEQ ID NO: 1365152 - DNA, 25 bp, Homo sapien
ggcccagcaccaaaaagagcaatct

SEQ ID NO: 1365153 - DNA, 25 bp, Homo sapien
gcaatctttgcagaataggcttcag

SEQ ID NO: 1365154 - DNA, 25 bp, Homo sapien
aatatagtgatgtcagagtacccca

SEQ ID NO: 1365155 - DNA, 25 bp, Homo sapien
acaacttatacttgcaggcccagca

SEQ ID NO: 1365156 - DNA, 25 bp, Homo sapien
gtgggatactcattgctttgaatac

SEQ ID NO: 1365157 - DNA, 25 bp, Homo sapien
gatctgtgggatactcattgctttg

SEQ ID NO: 1365158 - DNA, 25 bp, Homo sapien
gaaggatttctgatctgtgggatac

SEQ ID NO: 1365159 - DNA, 25 bp, Homo sapien
tctgggggaggcagcgaaggatttc

SEQ ID NO: 1365160 - DNA, 25 bp, Homo sapien
tcagagaagtgcaacataaaattac

SEQ ID NO: 1365161 - DNA, 25 bp, Homo sapien
tacagtatcaaattcctaagagatt

SEQ ID NO: 1365162 - DNA, 25 bp, Homo sapien
tattattaggtccagttacttacag

SEQ ID NO: 1365163 - DNA, 25 bp, Homo sapien
tattaaactacatcagtcttcagag

SEQ ID NO: 1365164 - DNA, 25 bp, Homo sapien
cagataaacacttaacgcttcaagg

SEQ ID NO: 1365165 - DNA, 25 bp, Homo sapien
gcttcaaggctcctcgtcacataga

SEQ ID NO: 1365166 - DNA, 25 bp, Homo sapien
ttgggtattggttaaagacattcac

SEQ ID NO: 1365167 - DNA, 25 bp, Homo sapien
gaagtagtatagagaaatcccattt

SEQ ID NO: 1365168 - DNA, 25 bp, Homo sapien
cctgatttcatctacaattgcttgt

SEQ ID NO: 1365169 - DNA, 25 bp, Homo sapien
acctgatttcatctacaattgcttg

SEQ ID NO: 1365170 - DNA, 25 bp, Homo sapien
tttctgaatgagtcacctgatttca

SEQ ID NO: 1365171 - DNA, 25 bp, Homo sapien
gattgctggatccaacgttagatca

SEQ ID NO: 1365172 - DNA, 25 bp, Homo sapien
tgtacccaatgggttgtctcatccc

SEQ ID NO: 1365173 - DNA, 25 bp, Homo sapien
cattatccaaccattgactgatgtg

SEQ ID NO: 1365174 - DNA, 25 bp, Homo sapien
ttttgtgtcctcacaagtcagctcc

SEQ ID NO: 1365175 - DNA, 25 bp, Homo sapien
tgttctgaaggcacatgtctctgtc

SEQ ID NO: 1365176 - DNA, 25 bp, Homo sapien
taaaaccatgtgagagtttccagag

SEQ ID NO: 1365177 - DNA, 25 bp, Homo sapien
tcatacttcgtagtggtcaggtaag

SEQ ID NO: 1365178 - DNA, 25 bp, Homo sapien
tgcatctgtgaaagcttgccctggt

SEQ ID NO: 1365179 - DNA, 25 bp, Homo sapien
tagaattaacctgtcagaaagcagg

SEQ ID NO: 1365180 - DNA, 25 bp, Homo sapien
tattgcaacaatccacaacctcgaa

SEQ ID NO: 1365181 - DNA, 25 bp, Homo sapien
caaagtgagacttaagcttgaggaa

SEQ ID NO: 1365182 - DNA, 25 bp, Homo sapien
ctaaaaatctaggttgacgggcact

SEQ ID NO: 1365183 - DNA, 25 bp, Homo sapien
ctgcttgttgactccaaataggaga

SEQ ID NO: 1365184 - DNA, 25 bp, Homo sapien
tgactccaaataggagacgtcagag

SEQ ID NO: 1365185 - DNA, 25 bp, Homo sapien
tccaaataggagacgtcagagagcc

SEQ ID NO: 1365186 - DNA, 25 bp, Homo sapien
tgttgactccaaataggagacgtca

SEQ ID NO: 1365187 - DNA, 25 bp, Homo sapien
cattaaagagaaagccaggatcaaa

SEQ ID NO: 1365188 - DNA, 25 bp, Homo sapien
atgattcattaaagagaaagccagg

SEQ ID NO: 1365189 - DNA, 25 bp, Homo sapien
ttaaagagaaagccaggatcaaagt

SEQ ID NO: 1365190 - DNA, 25 bp, Homo sapien
tacaaatgattcattaaagagaaag

SEQ ID NO: 1365191 - DNA, 25 bp, Homo sapien
ccaagtgggttgtcagaaaatatca

SEQ ID NO: 1365192 - DNA, 25 bp, Homo sapien
ggtccctcttcagtggcatataaat

SEQ ID NO: 1365193 - DNA, 25 bp, Homo sapien
gctgcaatccaccaatattaatggg

SEQ ID NO: 1365194 - DNA, 25 bp, Homo sapien
catccacctacacaaagatcagagg

SEQ ID NO: 1365195 - DNA, 25 bp, Homo sapien
gcttgcaagcaaatgagaatcttta

SEQ ID NO: 1365196 - DNA, 25 bp, Homo sapien
cagcttgcaagcaaatgagaatctt

SEQ ID NO: 1365197 - DNA, 25 bp, Homo sapien
acagcttgcaagcaaatgagaatct

SEQ ID NO: 1365198 - DNA, 25 bp, Homo sapien
ttgggtattgaaagaattctacaat

SEQ ID NO: 1365199 - DNA, 25 bp, Homo sapien
caattatactatcaagcagctgtgt

SEQ ID NO: 1365200 - DNA, 25 bp, Homo sapien
tctatacaatgagatgcctagttca

SEQ ID NO: 1365201 - DNA, 25 bp, Homo sapien
tattgacgagaatatgagcaattcc

SEQ ID NO: 1365202 - DNA, 25 bp, Homo sapien
cagactattttgtgcgagtttgctc

SEQ ID NO: 1365203 - DNA, 25 bp, Homo sapien
gattagttggacagctcttctgaca

SEQ ID NO: 1365204 - DNA, 25 bp, Homo sapien
agattagttggacagctcttctgac

SEQ ID NO: 1365205 - DNA, 25 bp, Homo sapien
tctgacacggggcatctgcacattt

SEQ ID NO: 1365206 - DNA, 25 bp, Homo sapien
acagctcttctgacacggggcatct

SEQ ID NO: 1365207 - DNA, 25 bp, Homo sapien
tgggcagactctgataataatacca

SEQ ID NO: 1365208 - DNA, 25 bp, Homo sapien
gggcagactctgataataataccat

SEQ ID NO: 1365209 - DNA, 25 bp, Homo sapien
ttcctttggtgtcatgaatatgcca

SEQ ID NO: 1365210 - DNA, 25 bp, Homo sapien
aatgggcagactctgataataatac

SEQ ID NO: 1365211 - DNA, 25 bp, Homo sapien
ggaaattgctttgcaagctaggaag

SEQ ID NO: 1365212 - DNA, 25 bp, Homo sapien
taggaagatattaatctgttctccc

SEQ ID NO: 1365213 - DNA, 25 bp, Homo sapien
agcatcatgggtgcataaatccttt

SEQ ID NO: 1365214 - DNA, 25 bp, Homo sapien
tcatattgaagaggtgttgttaaag

SEQ ID NO: 1365215 - DNA, 25 bp, Homo sapien
accagcgttactgcatcctaccaaa

SEQ ID NO: 1365216 - DNA, 25 bp, Homo sapien
cagtctgtataccagcgttactgca

SEQ ID NO: 1365217 - DNA, 25 bp, Homo sapien
tgtataccagcgttactgcatccta

SEQ ID NO: 1365218 - DNA, 25 bp, Homo sapien
gcccagtctgtataccagcgttact

SEQ ID NO: 1365219 - DNA, 25 bp, Homo sapien
tgagagtttcaagtgtgaaatacgc

SEQ ID NO: 1365220 - DNA, 25 bp, Homo sapien
atgaaatcacattctactgagagtt

SEQ ID NO: 1365221 - DNA, 25 bp, Homo sapien
aatcacattctactgagagtttcaa

SEQ ID NO: 1365222 - DNA, 25 bp, Homo sapien
tgtgaaatacgcaataaaaagtatc

SEQ ID NO: 1365223 - DNA, 25 bp, Homo sapien
gaggcatcatttaccagaggtcatg

SEQ ID NO: 1365224 - DNA, 25 bp, Homo sapien
gttgcagattcggaagacaactcat

SEQ ID NO: 1365225 - DNA, 25 bp, Homo sapien
gattcggaagacaactcattcagag

SEQ ID NO: 1365226 - DNA, 25 bp, Homo sapien
ttaatcaaagtaaggaggcatcatt

SEQ ID NO: 1365227 - DNA, 25 bp, Homo sapien
taatagatctttatgctggccacaa

SEQ ID NO: 1365228 - DNA, 25 bp, Homo sapien
gggtcaacgatatgcctcagccaaa

SEQ ID NO: 1365229 - DNA, 25 bp, Homo sapien
catttgtgacgtgtaattggccttc

SEQ ID NO: 1365230 - DNA, 25 bp, Homo sapien
caaacttgatgattggtgccctaga

SEQ ID NO: 1365231 - DNA, 25 bp, Homo sapien
tcagacgaattctaagtaaggcaca

SEQ ID NO: 1365232 - DNA, 25 bp, Homo sapien
taagcctcaatcacatcaaaacgcc

SEQ ID NO: 1365233 - DNA, 25 bp, Homo sapien
gcctggccgctactgagctctttag

SEQ ID NO: 1365234 - DNA, 25 bp, Homo sapien
gcctcagaagacataacacgtaaat

SEQ ID NO: 1365235 - DNA, 25 bp, Homo sapien
tttcaaactgccgatttgacgcacc

SEQ ID NO: 1365236 - DNA, 25 bp, Homo sapien
gccgatttgacgcaccagtcaggag

SEQ ID NO: 1365237 - DNA, 25 bp, Homo sapien
aaactgccgatttgacgcaccagtc

SEQ ID NO: 1365238 - DNA, 25 bp, Homo sapien
gatttgacgcaccagtcaggaggaa

SEQ ID NO: 1365239 - DNA, 25 bp, Homo sapien
agctagtgctgccagtatgatgcca

SEQ ID NO: 1365240 - DNA, 25 bp, Homo sapien
ggcaaccttgcctattagtaaggaa

SEQ ID NO: 1365241 - DNA, 25 bp, Homo sapien
aaagcactggtcagaacgaacatcc

SEQ ID NO: 1365242 - DNA, 25 bp, Homo sapien
catgtcatctgtggacaaatgtagt

SEQ ID NO: 1365243 - DNA, 25 bp, Homo sapien
catggtttagcttcactctggcctc

SEQ ID NO: 1365244 - DNA, 25 bp, Homo sapien
tgtgaacatggtttagcttcactct

SEQ ID NO: 1365245 - DNA, 25 bp, Homo sapien
gatgtgtgtgaacatggtttagctt

SEQ ID NO: 1365246 - DNA, 25 bp, Homo sapien
aacatggtttagcttcactctggcc

SEQ ID NO: 1365247 - DNA, 25 bp, Homo sapien
tattcaaagcataagagttgccacc

SEQ ID NO: 1365248 - DNA, 25 bp, Homo sapien
attcaaagcataagagttgccaccc

SEQ ID NO: 1365249 - DNA, 25 bp, Homo sapien
cttttattcaaagcataagagttgc

SEQ ID NO: 1365250 - DNA, 25 bp, Homo sapien
tttattcaaagcataagagttgcca

SEQ ID NO: 1365251 - DNA, 25 bp, Homo sapien
gagtcgtgtgcttgatgtcatcaaa

SEQ ID NO: 1365252 - DNA, 25 bp, Homo sapien
tcctcgctcaccaagagtcgtgtgc

SEQ ID NO: 1365253 - DNA, 25 bp, Homo sapien
ctcattgcttctcggagagctcctc

SEQ ID NO: 1365254 - DNA, 25 bp, Homo sapien
tgcttctcggagagctcctcgctca

SEQ ID NO: 1365255 - DNA, 25 bp, Homo sapien
attgcattaattctctaagatcctg

SEQ ID NO: 1365256 - DNA, 25 bp, Homo sapien
tgcattaattctctaagatcctgag

SEQ ID NO: 1365257 - DNA, 25 bp, Homo sapien
aaaattgcattaattctctaagatc

SEQ ID NO: 1365258 - DNA, 25 bp, Homo sapien
gcattaattctctaagatcctgaga

SEQ ID NO: 1365259 - DNA, 25 bp, Homo sapien
tttaagctctgaacaatctgaccca

SEQ ID NO: 1365260 - DNA, 25 bp, Homo sapien
ctttaagctctgaacaatctgaccc

SEQ ID NO: 1365261 - DNA, 25 bp, Homo sapien
ttaagctctgaacaatctgacccat

SEQ ID NO: 1365262 - DNA, 25 bp, Homo sapien
caatttatacagacgcctatctcag

SEQ ID NO: 1365263 - DNA, 25 bp, Homo sapien
ttctcttcagtataggcaacaggat

SEQ ID NO: 1365264 - DNA, 25 bp, Homo sapien
ggagatggaaaacagctagtcttct

SEQ ID NO: 1365265 - DNA, 25 bp, Homo sapien
gcataatctgattgtctggcccaaa

SEQ ID NO: 1365266 - DNA, 25 bp, Homo sapien
gatcatcagataatgcacagaagtc

SEQ ID NO: 1365267 - DNA, 25 bp, Homo sapien
gaaggacatgatcagataacaagag

SEQ ID NO: 1365268 - DNA, 25 bp, Homo sapien
taaatagtgttctcccactttccag

SEQ ID NO: 1365269 - DNA, 25 bp, Homo sapien
cacttttactaggaagtagacatga

SEQ ID NO: 1365270 - DNA, 25 bp, Homo sapien
ccaacactcctaccatgggagcaga

SEQ ID NO: 1365271 - DNA, 25 bp, Homo sapien
gcacattgctgatacgtgaaaagtt

SEQ ID NO: 1365272 - DNA, 25 bp, Homo sapien
taagattctgaacactagcatgtag

SEQ ID NO: 1365273 - DNA, 25 bp, Homo sapien
tacactgggaagaagctcaggtgcc

SEQ ID NO: 1365274 - DNA, 25 bp, Homo sapien
cgaaagttcatagtggtaggcaggc

SEQ ID NO: 1365275 - DNA, 25 bp, Homo sapien
tgagatagctcagcagtggcctcgg

SEQ ID NO: 1365276 - DNA, 25 bp, Homo sapien
ccaggcacttgttcggttcagagaa

SEQ ID NO: 1365277 - DNA, 25 bp, Homo sapien
tatgacaggtgacggtagtgctgcc

SEQ ID NO: 1365278 - DNA, 25 bp, Homo sapien
gaaacacaattcacgtagctgcaac

SEQ ID NO: 1365279 - DNA, 25 bp, Homo sapien
tagctgcaaccaaaacagccttcga

SEQ ID NO: 1365280 - DNA, 25 bp, Homo sapien
cagcattgaaagacacttcggataa

SEQ ID NO: 1365281 - DNA, 25 bp, Homo sapien
gccttcgaaatacatcagaacaatg

SEQ ID NO: 1365282 - DNA, 25 bp, Homo sapien
gaattatatttaaattcaaacatac

SEQ ID NO: 1365283 - DNA, 25 bp, Homo sapien
ctggaattatatttaaattcaaaca

SEQ ID NO: 1365284 - DNA, 25 bp, Homo sapien
ggaattatatttaaattcaaacata

SEQ ID NO: 1365285 - DNA, 25 bp, Homo sapien
tggaattatatttaaattcaaacat

SEQ ID NO: 1365286 - DNA, 25 bp, Homo sapien
aatgtgtggagtgaggtaattttca

SEQ ID NO: 1365287 - DNA, 25 bp, Homo sapien
gaaatagtgtatcagtggtacttac

SEQ ID NO: 1365288 - DNA, 25 bp, Homo sapien
ttttcagcatgaaatagtgtatcag

SEQ ID NO: 1365289 - DNA, 25 bp, Homo sapien
tgtgtggagtgaggtaattttcagc

SEQ ID NO: 1365290 - DNA, 25 bp, Homo sapien
tttgtgttcgaggatttaaagccag

SEQ ID NO: 1365291 - DNA, 25 bp, Homo sapien
agttgcatgagtttgtgttcgagga

SEQ ID NO: 1365292 - DNA, 25 bp, Homo sapien
gccgaagtggaacgcagagttgcat

SEQ ID NO: 1365293 - DNA, 25 bp, Homo sapien
cttgtctaatttcttggccgaagtg

SEQ ID NO: 1365294 - DNA, 25 bp, Homo sapien
ccatgcatttgccttctcctcaagt

SEQ ID NO: 1365295 - DNA, 25 bp, Homo sapien
ttctcctcaagttgccatcctttgt

SEQ ID NO: 1365296 - DNA, 25 bp, Homo sapien
ttttgtctgccatgcatttgccttc

SEQ ID NO: 1365297 - DNA, 25 bp, Homo sapien
catttgccttctcctcaagttgcca

SEQ ID NO: 1365298 - DNA, 25 bp, Homo sapien
ctcctcagtagaatgtaagaactga

SEQ ID NO: 1365299 - DNA, 25 bp, Homo sapien
aatatatgaaatcaagcttggcatt

SEQ ID NO: 1365300 - DNA, 25 bp, Homo sapien
cttggcattcaatgtttcactggca

SEQ ID NO: 1365301 - DNA, 25 bp, Homo sapien
gaatgtaagaactgatttcgaagac

SEQ ID NO: 1365302 - DNA, 25 bp, Homo sapien
ctaggtttagtatgtgtaaaatcac

SEQ ID NO: 1365303 - DNA, 25 bp, Homo sapien
ggtttagtatgtgtaaaatcactgt

SEQ ID NO: 1365304 - DNA, 25 bp, Homo sapien
taggtttagtatgtgtaaaatcact

SEQ ID NO: 1365305 - DNA, 25 bp, Homo sapien
ttagtatgtgtaaaatcactgttga

SEQ ID NO: 1365306 - DNA, 25 bp, Homo sapien
tcgatgtccgccgagtccttactga

SEQ ID NO: 1365307 - DNA, 25 bp, Homo sapien
tgtccgccgagtccttactgagcac

SEQ ID NO: 1365308 - DNA, 25 bp, Homo sapien
tccgccgagtccttactgagcacag

SEQ ID NO: 1365309 - DNA, 25 bp, Homo sapien
gatgtccgccgagtccttactgagc

SEQ ID NO: 1365310 - DNA, 25 bp, Homo sapien
tgccagtgacaaaccctccttgcgt

SEQ ID NO: 1365311 - DNA, 25 bp, Homo sapien
cttgcgtcctcaagctccagccaga

SEQ ID NO: 1365312 - DNA, 25 bp, Homo sapien
cagtgcctacagtctcgagtctgcc

SEQ ID NO: 1365313 - DNA, 25 bp, Homo sapien
cagccggagcgcgagtcgaaaacag

SEQ ID NO: 1365314 - DNA, 25 bp, Homo sapien
ctgttataattctcctaaacaacta

SEQ ID NO: 1365315 - DNA, 25 bp, Homo sapien
cagtcaggttcaatgttcaatttcc

SEQ ID NO: 1365316 - DNA, 25 bp, Homo sapien
gatacaggcttattgctctttcagg

SEQ ID NO: 1365317 - DNA, 25 bp, Homo sapien
ttaacatacatcttatcagttagca

SEQ ID NO: 1365318 - DNA, 25 bp, Homo sapien
tcagaagtaggacttatgagtcatc

SEQ ID NO: 1365319 - DNA, 25 bp, Homo sapien
gtcagaggctgaatgatcatgaggt

SEQ ID NO: 1365320 - DNA, 25 bp, Homo sapien
gactaaagatcagttaggcccaaat

SEQ ID NO: 1365321 - DNA, 25 bp, Homo sapien
tttttccgctgtctgattttcaagg

SEQ ID NO: 1365322 - DNA, 25 bp, Homo sapien
aagcaagtgcaaagtcatcgacttc

SEQ ID NO: 1365323 - DNA, 25 bp, Homo sapien
tttgtcatcatggaaagagagccgt

SEQ ID NO: 1365324 - DNA, 25 bp, Homo sapien
caatgatgttggatcaggatcttcc

SEQ ID NO: 1365325 - DNA, 25 bp, Homo sapien
agagagccgtagtctaaaggtgaag

SEQ ID NO: 1365326 - DNA, 25 bp, Homo sapien
gatttgagacccataccctggagta

SEQ ID NO: 1365327 - DNA, 25 bp, Homo sapien
tataaagactcgaaatccaagcagc

SEQ ID NO: 1365328 - DNA, 25 bp, Homo sapien
tgtcttattctttagcaccagctgg

SEQ ID NO: 1365329 - DNA, 25 bp, Homo sapien
cagcagcttgtccttatacagcaag

SEQ ID NO: 1365330 - DNA, 25 bp, Homo sapien
tcaggtccatttgtcataaaacagt

SEQ ID NO: 1365331 - DNA, 25 bp, Homo sapien
gatggttgtttgtagcatatgttaa

SEQ ID NO: 1365332 - DNA, 25 bp, Homo sapien
tgttaactgtgccagtgcttgcaaa

SEQ ID NO: 1365333 - DNA, 25 bp, Homo sapien
caaattcatttcatagggttcaggt

SEQ ID NO: 1365334 - DNA, 25 bp, Homo sapien
gccagtctcctttcccccaatcttc

SEQ ID NO: 1365335 - DNA, 25 bp, Homo sapien
cccaagcacaagccagtctcctttc

SEQ ID NO: 1365336 - DNA, 25 bp, Homo sapien
cagtctcctttcccccaatcttcat

SEQ ID NO: 1365337 - DNA, 25 bp, Homo sapien
caagcacaagccagtctcctttccc

SEQ ID NO: 1365338 - DNA, 25 bp, Homo sapien
tatagtcttattacaaagccaggca

SEQ ID NO: 1365339 - DNA, 25 bp, Homo sapien
gatgcttgcatctgaaagaagaggc

SEQ ID NO: 1365340 - DNA, 25 bp, Homo sapien
gcattggtacctaaagttggagaaa

SEQ ID NO: 1365341 - DNA, 25 bp, Homo sapien
tgagggagtttccacaactgagcat

SEQ ID NO: 1365342 - DNA, 25 bp, Homo sapien
tttgtgggcattataattgactgtg

SEQ ID NO: 1365343 - DNA, 25 bp, Homo sapien
tacaaaccatattgtttctaatcaa

SEQ ID NO: 1365344 - DNA, 25 bp, Homo sapien
gtgggcattataattgactgtgctt

SEQ ID NO: 1365345 - DNA, 25 bp, Homo sapien
cagtacaaaccatattgtttctaat

SEQ ID NO: 1365346 - DNA, 25 bp, Homo sapien
tctggtttcatgataagcgtctgat

SEQ ID NO: 1365347 - DNA, 25 bp, Homo sapien
gtttcatgataagcgtctgataatc

SEQ ID NO: 1365348 - DNA, 25 bp, Homo sapien
caattctggtttcatgataagcgtc

SEQ ID NO: 1365349 - DNA, 25 bp, Homo sapien
tttgccaattctggtttcatgataa

SEQ ID NO: 1365350 - DNA, 25 bp, Homo sapien
acaggtgacagccaagaagctgaac

SEQ ID NO: 1365351 - DNA, 25 bp, Homo sapien
ttttctgaagctacacaggtgacag

SEQ ID NO: 1365352 - DNA, 25 bp, Homo sapien
tgacagccaagaagctgaacagctt

SEQ ID NO: 1365353 - DNA, 25 bp, Homo sapien
ccattttctgaagctacacaggtga

SEQ ID NO: 1365354 - DNA, 25 bp, Homo sapien
tgatgtcctggatactgccactggt

SEQ ID NO: 1365355 - DNA, 25 bp, Homo sapien
cacagctgtgatgtcctggatactg

SEQ ID NO: 1365356 - DNA, 25 bp, Homo sapien
cttccacagctgtgatgtcctggat

SEQ ID NO: 1365357 - DNA, 25 bp, Homo sapien
tggatactgccactggtactgccac

SEQ ID NO: 1365358 - DNA, 25 bp, Homo sapien
tcacagatttaggagcctccacaca

SEQ ID NO: 1365359 - DNA, 25 bp, Homo sapien
tgacagtatctgttacacggaggat

SEQ ID NO: 1365360 - DNA, 25 bp, Homo sapien
aaagctacgtatagtccctgcagga

SEQ ID NO: 1365361 - DNA, 25 bp, Homo sapien
tgggaactctaaataccagtgctgt

SEQ ID NO: 1365362 - DNA, 25 bp, Homo sapien
tcagtgtgtctgttagtctccccag

SEQ ID NO: 1365363 - DNA, 25 bp, Homo sapien
tccatggcaaaatcgagtggcatct

SEQ ID NO: 1365364 - DNA, 25 bp, Homo sapien
gaatgcattttcaagtacctctagg

SEQ ID NO: 1365365 - DNA, 25 bp, Homo sapien
catgtataaggccactgaatggaac

SEQ ID NO: 1365366 - DNA, 25 bp, Homo sapien
tgatggcataattgctgtctcagcc

SEQ ID NO: 1365367 - DNA, 25 bp, Homo sapien
gagaatgggttttgcaatgtttccc

SEQ ID NO: 1365368 - DNA, 25 bp, Homo sapien
gttctgaatttctcaagctccaggc

SEQ ID NO: 1365369 - DNA, 25 bp, Homo sapien
tttaatcaattaacctcagacatgg

SEQ ID NO: 1365370 - DNA, 25 bp, Homo sapien
ggcctatttatccaactctactaga

SEQ ID NO: 1365371 - DNA, 25 bp, Homo sapien
cacagtttcggagggtggaagtttg

SEQ ID NO: 1365372 - DNA, 25 bp, Homo sapien
tgtgtttccacatgacgcgcgcgtg

SEQ ID NO: 1365373 - DNA, 25 bp, Homo sapien
ttgggttctcgtgagccctcttcct

SEQ ID NO: 1365374 - DNA, 25 bp, Homo sapien
gccagcttgattgggttctcgtgag

SEQ ID NO: 1365375 - DNA, 25 bp, Homo sapien
gaatgctcctctggagttacacagt

SEQ ID NO: 1365376 - DNA, 25 bp, Homo sapien
tagtgtgtgactaaaaaactgggct

SEQ ID NO: 1365377 - DNA, 25 bp, Homo sapien
cgattcagtccaaagcaggtgccct

SEQ ID NO: 1365378 - DNA, 25 bp, Homo sapien
gcaaattgtaccatgtgaatgctcc

SEQ ID NO: 1365379 - DNA, 25 bp, Homo sapien
tatgtagtcctactaaaagcagatt

SEQ ID NO: 1365380 - DNA, 25 bp, Homo sapien
accactgcactatgagagtaggagg

SEQ ID NO: 1365381 - DNA, 25 bp, Homo sapien
tacattggcccaattctgtattgac

SEQ ID NO: 1365382 - DNA, 25 bp, Homo sapien
cacacaagcttagggaatccaaggg

SEQ ID NO: 1365383 - DNA, 25 bp, Homo sapien
catgacttggtcagcagatgggaca

SEQ ID NO: 1365384 - DNA, 25 bp, Homo sapien
acatgacttggtcagcagatgggac

SEQ ID NO: 1365385 - DNA, 25 bp, Homo sapien
ctacatgacttggtcagcagatggg

SEQ ID NO: 1365386 - DNA, 25 bp, Homo sapien
tgacttggtcagcagatgggacagg

SEQ ID NO: 1365387 - DNA, 25 bp, Homo sapien
accgagaggactaagtgtagagaaa

SEQ ID NO: 1365388 - DNA, 25 bp, Homo sapien
acatcagagtttttacagtcagaac

SEQ ID NO: 1365389 - DNA, 25 bp, Homo sapien
cagagtttttacagtcagaacacat

SEQ ID NO: 1365390 - DNA, 25 bp, Homo sapien
gtcagaacacatcccagaggctttg

SEQ ID NO: 1365391 - DNA, 25 bp, Homo sapien
agtcagaacacatcccagaggcttt

SEQ ID NO: 1365392 - DNA, 25 bp, Homo sapien
taagagacttagagcattttacagt

SEQ ID NO: 1365393 - DNA, 25 bp, Homo sapien
aaaatggcctttattagcagtggct

SEQ ID NO: 1365394 - DNA, 25 bp, Homo sapien
aaattccacccatacctatagttgc

SEQ ID NO: 1365395 - DNA, 25 bp, Homo sapien
tcttgcatacacaacaaccccaaag

SEQ ID NO: 1365396 - DNA, 25 bp, Homo sapien
tttgaggtagacttatttgatagcc

SEQ ID NO: 1365397 - DNA, 25 bp, Homo sapien
tttgatagccatagtcactttttgg

SEQ ID NO: 1365398 - DNA, 25 bp, Homo sapien
tattccgtttctcttcaaatgcagc

SEQ ID NO: 1365399 - DNA, 25 bp, Homo sapien
tcagagtggtaataaagaaatcgct

SEQ ID NO: 1365400 - DNA, 25 bp, Homo sapien
tacataaaaccagcagatgttggct

SEQ ID NO: 1365401 - DNA, 25 bp, Homo sapien
tacagtttttcacactatatctaca

SEQ ID NO: 1365402 - DNA, 25 bp, Homo sapien
tctgaccaagtatgtaattgtaaca

SEQ ID NO: 1365403 - DNA, 25 bp, Homo sapien
ttatatagcaccttacagagcagtc

SEQ ID NO: 1365404 - DNA, 25 bp, Homo sapien
gataagtgtagtattgcatgctaac

SEQ ID NO: 1365405 - DNA, 25 bp, Homo sapien
caatgtagatgagataagtgtagta

SEQ ID NO: 1365406 - DNA, 25 bp, Homo sapien
gcttgtagtctacaccaatgtagat

SEQ ID NO: 1365407 - DNA, 25 bp, Homo sapien
tcctatctgtttcctgtagcttgta

SEQ ID NO: 1365408 - DNA, 25 bp, Homo sapien
tggtgtggtactcttcccattttcc

SEQ ID NO: 1365409 - DNA, 25 bp, Homo sapien
agttcagctggaataccatctggtg

SEQ ID NO: 1365410 - DNA, 25 bp, Homo sapien
ccaacgggtctccagatggctgctg

SEQ ID NO: 1365411 - DNA, 25 bp, Homo sapien
tctggaaaatggtagcttgatcgtc

SEQ ID NO: 1365412 - DNA, 25 bp, Homo sapien
tgtaagtagaaatacgtctagctgg

SEQ ID NO: 1365413 - DNA, 25 bp, Homo sapien
gaaatacgtctagctggctcaaaac

SEQ ID NO: 1365414 - DNA, 25 bp, Homo sapien
tttgttgtgtaagtagaaatacgtc

SEQ ID NO: 1365415 - DNA, 25 bp, Homo sapien
caatgacatcatttgttgtgtaagt

SEQ ID NO: 1365416 - DNA, 25 bp, Homo sapien
aaatcagtctttgagctgatccatg

SEQ ID NO: 1365417 - DNA, 25 bp, Homo sapien
taatgcactctctaactagcaccta

SEQ ID NO: 1365418 - DNA, 25 bp, Homo sapien
tataacccaatgataggatacttca

SEQ ID NO: 1365419 - DNA, 25 bp, Homo sapien
tgtcactcagtaccagtcaattaag

SEQ ID NO: 1365420 - DNA, 25 bp, Homo sapien
tctgcacattcttcactccagtcca

SEQ ID NO: 1365421 - DNA, 25 bp, Homo sapien
ttaatacatcaccaaaatctgcaca

SEQ ID NO: 1365422 - DNA, 25 bp, Homo sapien
cagtccacatcattaacattgttac

SEQ ID NO: 1365423 - DNA, 25 bp, Homo sapien
tttaatacatcaccaaaatctgcac

SEQ ID NO: 1365424 - DNA, 25 bp, Homo sapien
taaacagtaagtctcccatgcagaa

SEQ ID NO: 1365425 - DNA, 25 bp, Homo sapien
gaaccacatcattctagggctcaca

SEQ ID NO: 1365426 - DNA, 25 bp, Homo sapien
tccgtgatacaatggtagctgcacc

SEQ ID NO: 1365427 - DNA, 25 bp, Homo sapien
gaacaactgtgatggccttatgctg

SEQ ID NO: 1365428 - DNA, 25 bp, Homo sapien
taaatgggcgacctaaaatatccca

SEQ ID NO: 1365429 - DNA, 25 bp, Homo sapien
cttgggactcagtagcaaatgacca

SEQ ID NO: 1365430 - DNA, 25 bp, Homo sapien
gtttctatcaagctacttacttggg

SEQ ID NO: 1365431 - DNA, 25 bp, Homo sapien
tctgagtatttaagcaggatttatt

SEQ ID NO: 1365432 - DNA, 25 bp, Homo sapien
tacttggatctagcatgaaatgcac

SEQ ID NO: 1365433 - DNA, 25 bp, Homo sapien
tctagtcttaggacatcaattgaaa

SEQ ID NO: 1365434 - DNA, 25 bp, Homo sapien
tattagaaaaggctgcttacccttc

SEQ ID NO: 1365435 - DNA, 25 bp, Homo sapien
tatgactacttaacactacttggat

SEQ ID NO: 1365436 - DNA, 25 bp, Homo sapien
gaattcagtcttcgtgcgtagcccg

SEQ ID NO: 1365437 - DNA, 25 bp, Homo sapien
gaagcgccttgataggacggtccca

SEQ ID NO: 1365438 - DNA, 25 bp, Homo sapien
tagtggaatcttctgggcgcctggt

SEQ ID NO: 1365439 - DNA, 25 bp, Homo sapien
tagctcagcttagagcggtcccaga

SEQ ID NO: 1365440 - DNA, 25 bp, Homo sapien
ctgaagaggcgtcccaaagagattg

SEQ ID NO: 1365441 - DNA, 25 bp, Homo sapien
gattggacgtctgaacagtcactgc

SEQ ID NO: 1365442 - DNA, 25 bp, Homo sapien
gtgccacactgcaaccaatccggtt

SEQ ID NO: 1365443 - DNA, 25 bp, Homo sapien
tgagactcgtcctaaaggcagaggc

SEQ ID NO: 1365444 - DNA, 25 bp, Homo sapien
accacgggcgtttagtggccagctg

SEQ ID NO: 1365445 - DNA, 25 bp, Homo sapien
tggcaaccacgggcgtttagtggcc

SEQ ID NO: 1365446 - DNA, 25 bp, Homo sapien
caaccacgggcgtttagtggccagc

SEQ ID NO: 1365447 - DNA, 25 bp, Homo sapien
cttggcaaccacgggcgtttagtgg

SEQ ID NO: 1365448 - DNA, 25 bp, Homo sapien
tgccgctggtactctcctcgactac

SEQ ID NO: 1365449 - DNA, 25 bp, Homo sapien
gctggtactctcctcgactacgcgt

SEQ ID NO: 1365450 - DNA, 25 bp, Homo sapien
gccgctggtactctcctcgactacg

SEQ ID NO: 1365451 - DNA, 25 bp, Homo sapien
ggtactctcctcgactacgcgtatt

SEQ ID NO: 1365452 - DNA, 25 bp, Homo sapien
tattatccacccaagaatacccgtc

SEQ ID NO: 1365453 - DNA, 25 bp, Homo sapien
cgtaatccgtattatccacccaaga

SEQ ID NO: 1365454 - DNA, 25 bp, Homo sapien
ccaagaatacccgtcaccgaagaga

SEQ ID NO: 1365455 - DNA, 25 bp, Homo sapien
cgtcaccgaagagagtcagaggacc

SEQ ID NO: 1365456 - DNA, 25 bp, Homo sapien
aaggatccaaagctgtgctcggctg

SEQ ID NO: 1365457 - DNA, 25 bp, Homo sapien
cataactcgatttccctaaagaagg

SEQ ID NO: 1365458 - DNA, 25 bp, Homo sapien
gcttgaccgggaccataaatccata

SEQ ID NO: 1365459 - DNA, 25 bp, Homo sapien
accagaactcttgctgctcgctgag

SEQ ID NO: 1365460 - DNA, 25 bp, Homo sapien
attgagtgccatggcggccagagaa

SEQ ID NO: 1365461 - DNA, 25 bp, Homo sapien
ctctaggtggtatgattgagtgcca

SEQ ID NO: 1365462 - DNA, 25 bp, Homo sapien
cggccagtccactctaggtggtatg

SEQ ID NO: 1365463 - DNA, 25 bp, Homo sapien
gtatgattgagtgccatggcggcca

SEQ ID NO: 1365464 - DNA, 25 bp, Homo sapien
cggcttgctcatgcttccgaggagt

SEQ ID NO: 1365465 - DNA, 25 bp, Homo sapien
ttcaagcggaactccaactgtgtgt

SEQ ID NO: 1365466 - DNA, 25 bp, Homo sapien
cagtgttaacaagccttgggaaggg

SEQ ID NO: 1365467 - DNA, 25 bp, Homo sapien
tgccccagtgccttcgcgtggtggc

SEQ ID NO: 1365468 - DNA, 25 bp, Homo sapien
aaatgcatccaggaaattctgctgg

SEQ ID NO: 1365469 - DNA, 25 bp, Homo sapien
aatgcatccaggaaattctgctggc

SEQ ID NO: 1365470 - DNA, 25 bp, Homo sapien
taggtgttgttgcagctctaaattt

SEQ ID NO: 1365471 - DNA, 25 bp, Homo sapien
atgcatccaggaaattctgctggca

SEQ ID NO: 1365472 - DNA, 25 bp, Homo sapien
caagtcataattcttgatgtagtac

SEQ ID NO: 1365473 - DNA, 25 bp, Homo sapien
aagtcataattcttgatgtagtaca

SEQ ID NO: 1365474 - DNA, 25 bp, Homo sapien
cataattcttgatgtagtacattat

SEQ ID NO: 1365475 - DNA, 25 bp, Homo sapien
gtcataattcttgatgtagtacatt

SEQ ID NO: 1365476 - DNA, 25 bp, Homo sapien
aatctgatccagattgcctcaccaa

SEQ ID NO: 1365477 - DNA, 25 bp, Homo sapien
caccaactgctagtagcacacctga

SEQ ID NO: 1365478 - DNA, 25 bp, Homo sapien
cttgcaatctgatccagattgcctc

SEQ ID NO: 1365479 - DNA, 25 bp, Homo sapien
gattgcctcaccaactgctagtagc

SEQ ID NO: 1365480 - DNA, 25 bp, Homo sapien
ggaggaattctttgtccttacagag

SEQ ID NO: 1365481 - DNA, 25 bp, Homo sapien
caagttgttctatttgatactgcca

SEQ ID NO: 1365482 - DNA, 25 bp, Homo sapien
gatactgccagtgttgaaattccag

SEQ ID NO: 1365483 - DNA, 25 bp, Homo sapien
tgtaatttcattcgcagttggagga

SEQ ID NO: 1365484 - DNA, 25 bp, Homo sapien
ttgcccaccagatcgtcctctttat

SEQ ID NO: 1365485 - DNA, 25 bp, Homo sapien
ccaccagatcgtcctctttatccag

SEQ ID NO: 1365486 - DNA, 25 bp, Homo sapien
cttgcccaccagatcgtcctcttta

SEQ ID NO: 1365487 - DNA, 25 bp, Homo sapien
gcccaccagatcgtcctctttatcc

SEQ ID NO: 1365488 - DNA, 25 bp, Homo sapien
ggccacacttttgaatcccgatagc

SEQ ID NO: 1365489 - DNA, 25 bp, Homo sapien
acacttttgaatcccgatagccaca

SEQ ID NO: 1365490 - DNA, 25 bp, Homo sapien
gccacacttttgaatcccgatagcc

SEQ ID NO: 1365491 - DNA, 25 bp, Homo sapien
cacacttttgaatcccgatagccac

SEQ ID NO: 1365492 - DNA, 25 bp, Homo sapien
taccctacattctagtccatctgtc

SEQ ID NO: 1365493 - DNA, 25 bp, Homo sapien
ggtgtccttgtctcttctaccctac

SEQ ID NO: 1365494 - DNA, 25 bp, Homo sapien
tcttatcttggggtgtccttgtctc

SEQ ID NO: 1365495 - DNA, 25 bp, Homo sapien
gcccttctggattagacaccacttt

SEQ ID NO: 1365496 - DNA, 25 bp, Homo sapien
gctgctctgacatttgcttagccat

SEQ ID NO: 1365497 - DNA, 25 bp, Homo sapien
ggcaggatgctgctctgacatttgc

SEQ ID NO: 1365498 - DNA, 25 bp, Homo sapien
ggatgctgctctgacatttgcttag

SEQ ID NO: 1365499 - DNA, 25 bp, Homo sapien
gatgctgctctgacatttgcttagc

SEQ ID NO: 1365500 - DNA, 25 bp, Homo sapien
atgaccacaccctccctgctttacc

SEQ ID NO: 1365501 - DNA, 25 bp, Homo sapien
gtgatgaccacaccctccctgcttt

SEQ ID NO: 1365502 - DNA, 25 bp, Homo sapien
gaccacaccctccctgctttaccat

SEQ ID NO: 1365503 - DNA, 25 bp, Homo sapien
gggtgatgaccacaccctccctgct

SEQ ID NO: 1365504 - DNA, 25 bp, Homo sapien
gcagtccactttctcgtgttaatta

SEQ ID NO: 1365505 - DNA, 25 bp, Homo sapien
ttgcctggcaacacataacatggga

SEQ ID NO: 1365506 - DNA, 25 bp, Homo sapien
cattcagcaggatactggcagtcca

SEQ ID NO: 1365507 - DNA, 25 bp, Homo sapien
ctgttatttcagagcacgtgtccca

SEQ ID NO: 1365508 - DNA, 25 bp, Homo sapien
gccaacaaatatcgtcttctcaagt

SEQ ID NO: 1365509 - DNA, 25 bp, Homo sapien
caagtatgtatttgcttctacaaga

SEQ ID NO: 1365510 - DNA, 25 bp, Homo sapien
gcttctacaagatcaaaatcctgct

SEQ ID NO: 1365511 - DNA, 25 bp, Homo sapien
tctgagaaaagttgccagtgacatg

SEQ ID NO: 1365512 - DNA, 25 bp, Homo sapien
aagtcttggaaagacatgatatttt

SEQ ID NO: 1365513 - DNA, 25 bp, Homo sapien
taagtcttggaaagacatgatattt

SEQ ID NO: 1365514 - DNA, 25 bp, Homo sapien
agtcttggaaagacatgatattttt

SEQ ID NO: 1365515 - DNA, 25 bp, Homo sapien
ctgtttcagaaagagactttgtatc

SEQ ID NO: 1365516 - DNA, 25 bp, Homo sapien
tgttgctttgaactgcctcccagag

SEQ ID NO: 1365517 - DNA, 25 bp, Homo sapien
ttgctttgaactgcctcccagaggc

SEQ ID NO: 1365518 - DNA, 25 bp, Homo sapien
gctgtttcagaaagagactttgtat

SEQ ID NO: 1365519 - DNA, 25 bp, Homo sapien
ttcccctttctgtgcgattgttctg

SEQ ID NO: 1365520 - DNA, 25 bp, Homo sapien
tgctttttggtattgctacaatttc

SEQ ID NO: 1365521 - DNA, 25 bp, Homo sapien
tattgttctcccctgcagaattcct

SEQ ID NO: 1365522 - DNA, 25 bp, Homo sapien
cagcagcagtttgtgagtctcagat

SEQ ID NO: 1365523 - DNA, 25 bp, Homo sapien
tatagaatgggaatatactcaagct

SEQ ID NO: 1365524 - DNA, 25 bp, Homo sapien
aatgggaatatactcaagctcaagc

SEQ ID NO: 1365525 - DNA, 25 bp, Homo sapien
gggaatatactcaagctcaagcttt

SEQ ID NO: 1365526 - DNA, 25 bp, Homo sapien
gaagtgaggaatatagaatgggaat

SEQ ID NO: 1365527 - DNA, 25 bp, Homo sapien
cagagtctctgtaaaggggaaacct

SEQ ID NO: 1365528 - DNA, 25 bp, Homo sapien
ggagtgtagagaatctgaacttcac

SEQ ID NO: 1365529 - DNA, 25 bp, Homo sapien
tatgagagtattgccattgtttcaa

SEQ ID NO: 1365530 - DNA, 25 bp, Homo sapien
gatattcatttaacttgttgtgtcc

SEQ ID NO: 1365531 - DNA, 25 bp, Homo sapien
tgctgtaacttgtatcagtgtggag

SEQ ID NO: 1365532 - DNA, 25 bp, Homo sapien
ttgtatcagtgtggagatagagctc

SEQ ID NO: 1365533 - DNA, 25 bp, Homo sapien
tagagctctatatcatcttctcccc

SEQ ID NO: 1365534 - DNA, 25 bp, Homo sapien
gatagagctctatatcatcttctcc

SEQ ID NO: 1365535 - DNA, 25 bp, Homo sapien
gaaaagctcgctccaaagtgctact

SEQ ID NO: 1365536 - DNA, 25 bp, Homo sapien
caggcctggtctagtgtggcattta

SEQ ID NO: 1365537 - DNA, 25 bp, Homo sapien
ccccatggtgtcagaacaatctcca

SEQ ID NO: 1365538 - DNA, 25 bp, Homo sapien
tcagttgtcgtgtggcttagcattg

SEQ ID NO: 1365539 - DNA, 25 bp, Homo sapien
taacactcatcaccttcagttttct

SEQ ID NO: 1365540 - DNA, 25 bp, Homo sapien
ctaacactcatcaccttcagttttc

SEQ ID NO: 1365541 - DNA, 25 bp, Homo sapien
atgtgcgtgtatgtgaaaggtgata

SEQ ID NO: 1365542 - DNA, 25 bp, Homo sapien
tgtgcgtgtatgtgaaaggtgatat

SEQ ID NO: 1365543 - DNA, 25 bp, Homo sapien
aatatcaatagatcttgtaagagac

SEQ ID NO: 1365544 - DNA, 25 bp, Homo sapien
tatcaatagatcttgtaagagacac

SEQ ID NO: 1365545 - DNA, 25 bp, Homo sapien
ttaatatcaatagatcttgtaagag

SEQ ID NO: 1365546 - DNA, 25 bp, Homo sapien
caatagatcttgtaagagacacttc

SEQ ID NO: 1365547 - DNA, 25 bp, Homo sapien
tttcccctaatcctttgatgatcat

SEQ ID NO: 1365548 - DNA, 25 bp, Homo sapien
aaaaataagagcattgtagaggtag

SEQ ID NO: 1365549 - DNA, 25 bp, Homo sapien
aaataagagcattgtagaggtagac

SEQ ID NO: 1365550 - DNA, 25 bp, Homo sapien
aaaataagagcattgtagaggtaga

SEQ ID NO: 1365551 - DNA, 25 bp, Homo sapien
tgcaggtctgccagtcctctattag

SEQ ID NO: 1365552 - DNA, 25 bp, Homo sapien
ctccttattcgtatgcaggtctgcc

SEQ ID NO: 1365553 - DNA, 25 bp, Homo sapien
gccagtcctctattagtattgtcat

SEQ ID NO: 1365554 - DNA, 25 bp, Homo sapien
tcctcctccttattcgtatgcaggt

SEQ ID NO: 1365555 - DNA, 25 bp, Homo sapien
aattcttggattttgctagggtaag

SEQ ID NO: 1365556 - DNA, 25 bp, Homo sapien
actggctggtgtgacggtatttgcc

SEQ ID NO: 1365557 - DNA, 25 bp, Homo sapien
agggaagctggatggaagtgagaca

SEQ ID NO: 1365558 - DNA, 25 bp, Homo sapien
aagtgagacagttgggtcccatgct

SEQ ID NO: 1365559 - DNA, 25 bp, Homo sapien
tgtgccgctctttcatagaacctac

SEQ ID NO: 1365560 - DNA, 25 bp, Homo sapien
cctggcttgctgtgccgctctttca

SEQ ID NO: 1365561 - DNA, 25 bp, Homo sapien
ctttatccctcctcccatggtgctt

SEQ ID NO: 1365562 - DNA, 25 bp, Homo sapien
catagctaggtgcatctttatccct

SEQ ID NO: 1365563 - DNA, 25 bp, Homo sapien
taatctggtatagttccatttctgt

SEQ ID NO: 1365564 - DNA, 25 bp, Homo sapien
tatagttccatttctgtaattaaag

SEQ ID NO: 1365565 - DNA, 25 bp, Homo sapien
tctcataatctggtatagttccatt

SEQ ID NO: 1365566 - DNA, 25 bp, Homo sapien
tctggtatagttccatttctgtaat

SEQ ID NO: 1365567 - DNA, 25 bp, Homo sapien
tggtgactagttcctcctgaaatgc

SEQ ID NO: 1365568 - DNA, 25 bp, Homo sapien
ctggtgactagttcctcctgaaatg

SEQ ID NO: 1365569 - DNA, 25 bp, Homo sapien
tggccgcctcgtaggacggtgctat

SEQ ID NO: 1365570 - DNA, 25 bp, Homo sapien
aacatgacagtatgtaagggccagt

SEQ ID NO: 1365571 - DNA, 25 bp, Homo sapien
gctatgcaagttcttcacagtatca

SEQ ID NO: 1365572 - DNA, 25 bp, Homo sapien
ggcttgaattcaacagaaacatgac

SEQ ID NO: 1365573 - DNA, 25 bp, Homo sapien
tctctagagaatgacgttggtgcgt

SEQ ID NO: 1365574 - DNA, 25 bp, Homo sapien
cattgtttctacctttctctagaga

SEQ ID NO: 1365575 - DNA, 25 bp, Homo sapien
tctttagtggccgatgcgattgatc

SEQ ID NO: 1365576 - DNA, 25 bp, Homo sapien
gattgatcttctttgggtccctctg

SEQ ID NO: 1365577 - DNA, 25 bp, Homo sapien
agcaaggctgctccttggggcccca

SEQ ID NO: 1365578 - DNA, 25 bp, Homo sapien
ttctcctggctccacccaatcagca

SEQ ID NO: 1365579 - DNA, 25 bp, Homo sapien
ctaaggtacgtgattagattttctt

SEQ ID NO: 1365580 - DNA, 25 bp, Homo sapien
tggctccacccaatcagcagcaagg

SEQ ID NO: 1365581 - DNA, 25 bp, Homo sapien
gatttaaaggttgacattgggatga

SEQ ID NO: 1365582 - DNA, 25 bp, Homo sapien
taaatggaatgtgttgtacttgcga

SEQ ID NO: 1365583 - DNA, 25 bp, Homo sapien
tacttgcgacagttgttcatttcaa

SEQ ID NO: 1365584 - DNA, 25 bp, Homo sapien
atgaaaggtggaattacagtaaata

SEQ ID NO: 1365585 - DNA, 25 bp, Homo sapien
taagctctaagctatgagtagaaac

SEQ ID NO: 1365586 - DNA, 25 bp, Homo sapien
gaaacatgattgtactttagaccca

SEQ ID NO: 1365587 - DNA, 25 bp, Homo sapien
gatgatgaagcacacaattataagc

SEQ ID NO: 1365588 - DNA, 25 bp, Homo sapien
agttggattcccaaatcaatggacg

SEQ ID NO: 1365589 - DNA, 25 bp, Homo sapien
aagtgcaaaccaccaagcccaggta

SEQ ID NO: 1365590 - DNA, 25 bp, Homo sapien
actacaagtgcaaaccaccaagccc

SEQ ID NO: 1365591 - DNA, 25 bp, Homo sapien
agtgcaaaccaccaagcccaggtaa

SEQ ID NO: 1365592 - DNA, 25 bp, Homo sapien
acaagtgcaaaccaccaagcccagg

SEQ ID NO: 1365593 - DNA, 25 bp, Homo sapien
catcgttttaatatgcaccttcttc

SEQ ID NO: 1365594 - DNA, 25 bp, Homo sapien
tttctgctctttgaattacatgtac

SEQ ID NO: 1365595 - DNA, 25 bp, Homo sapien
acatgtacatcgattgagttgctga

SEQ ID NO: 1365596 - DNA, 25 bp, Homo sapien
tacatcgattgagttgctgaaatta

SEQ ID NO: 1365597 - DNA, 25 bp, Homo sapien
tctgactagcaaagcctgagttttt

SEQ ID NO: 1365598 - DNA, 25 bp, Homo sapien
tggatttctgtctgactagcaaagc

SEQ ID NO: 1365599 - DNA, 25 bp, Homo sapien
ttctgtctgactagcaaagcctgag

SEQ ID NO: 1365600 - DNA, 25 bp, Homo sapien
tggcttcaccccagttgtctctggg

SEQ ID NO: 1365601 - DNA, 25 bp, Homo sapien
aaatctagcatcagaaatttggcta

SEQ ID NO: 1365602 - DNA, 25 bp, Homo sapien
cttgaatgctttcagaaatccagaa

SEQ ID NO: 1365603 - DNA, 25 bp, Homo sapien
ctacacgggtctgtttgaggaggtt

SEQ ID NO: 1365604 - DNA, 25 bp, Homo sapien
tttcctgttacttcccttgaatgct

SEQ ID NO: 1365605 - DNA, 25 bp, Homo sapien
tctctggtgtataaccacttcctgc

SEQ ID NO: 1365606 - DNA, 25 bp, Homo sapien
tcttggaccgtctctgggttgttca

SEQ ID NO: 1365607 - DNA, 25 bp, Homo sapien
gatgaatctaacacaatcaggctgt

SEQ ID NO: 1365608 - DNA, 25 bp, Homo sapien
cagtattgagctgcagtaagcctaa

SEQ ID NO: 1365609 - DNA, 25 bp, Homo sapien
gaaaccattgaagatctaaagccca

SEQ ID NO: 1365610 - DNA, 25 bp, Homo sapien
gatctaaagcccaatcaagtggtgt

SEQ ID NO: 1365611 - DNA, 25 bp, Homo sapien
ggatccaggatccagtgattgaaag

SEQ ID NO: 1365612 - DNA, 25 bp, Homo sapien
agacttcactgaggacttatggatc

SEQ ID NO: 1365613 - DNA, 25 bp, Homo sapien
catcaagatcattcacggttggcag

SEQ ID NO: 1365614 - DNA, 25 bp, Homo sapien
caagatcattcacggttggcagtgg

SEQ ID NO: 1365615 - DNA, 25 bp, Homo sapien
tcattcacggttggcagtggatcag

SEQ ID NO: 1365616 - DNA, 25 bp, Homo sapien
gactggcatcaagatcattcacggt

SEQ ID NO: 1365617 - DNA, 25 bp, Homo sapien
acagtcaagatctgaacaagagtcg

SEQ ID NO: 1365618 - DNA, 25 bp, Homo sapien
aagcatatcagccagtggatagact

SEQ ID NO: 1365619 - DNA, 25 bp, Homo sapien
taaggtttgcggtttatgataagca

SEQ ID NO: 1365620 - DNA, 25 bp, Homo sapien
gacagctgtgatggttcttggaatc

SEQ ID NO: 1365621 - DNA, 25 bp, Homo sapien
ccacagtttagctttgtctgatgat

SEQ ID NO: 1365622 - DNA, 25 bp, Homo sapien
ttttttgggtggttgatatccacag

SEQ ID NO: 1365623 - DNA, 25 bp, Homo sapien
caactttcttgccagtggctgtgtt

SEQ ID NO: 1365624 - DNA, 25 bp, Homo sapien
tctccctgttgctcatttactacca

SEQ ID NO: 1365625 - DNA, 25 bp, Homo sapien
cagggctattttctcgtttcagtcc

SEQ ID NO: 1365626 - DNA, 25 bp, Homo sapien
ggctattttctcgtttcagtccttg

SEQ ID NO: 1365627 - DNA, 25 bp, Homo sapien
tattttctcgtttcagtccttgtaa

SEQ ID NO: 1365628 - DNA, 25 bp, Homo sapien
actcagggctattttctcgtttcag

SEQ ID NO: 1365629 - DNA, 25 bp, Homo sapien
aagtagataattgagaggctctcag

SEQ ID NO: 1365630 - DNA, 25 bp, Homo sapien
aaaatgttcccgcacccttgatggt

SEQ ID NO: 1365631 - DNA, 25 bp, Homo sapien
aaattttaggtcaccatctgcaaag

SEQ ID NO: 1365632 - DNA, 25 bp, Homo sapien
ggctctcagtgttaaattgtttgca

SEQ ID NO: 1365633 - DNA, 25 bp, Homo sapien
aaagccaggcctctataaacttgtg

SEQ ID NO: 1365634 - DNA, 25 bp, Homo sapien
tcagatcaatagagcagctgggcag

SEQ ID NO: 1365635 - DNA, 25 bp, Homo sapien
tggtcttagtccctccggagtccta

SEQ ID NO: 1365636 - DNA, 25 bp, Homo sapien
gctgtttcgcagcagattactctgg

SEQ ID NO: 1365637 - DNA, 25 bp, Homo sapien
ccctctttatctgcctttttcccat

SEQ ID NO: 1365638 - DNA, 25 bp, Homo sapien
gattccctctttatctgcctttttc

SEQ ID NO: 1365639 - DNA, 25 bp, Homo sapien
ctacagattccctctttatctgcct

SEQ ID NO: 1365640 - DNA, 25 bp, Homo sapien
cagattccctctttatctgcctttt

SEQ ID NO: 1365641 - DNA, 25 bp, Homo sapien
tcaacccagtgtgttttgatttctg

SEQ ID NO: 1365642 - DNA, 25 bp, Homo sapien
cttcaacccagtgtgttttgatttc

SEQ ID NO: 1365643 - DNA, 25 bp, Homo sapien
caacccagtgtgttttgatttctgt

SEQ ID NO: 1365644 - DNA, 25 bp, Homo sapien
ttcaacccagtgtgttttgatttct

SEQ ID NO: 1365645 - DNA, 25 bp, Homo sapien
ggtaactgacaacgcggctccctgc

SEQ ID NO: 1365646 - DNA, 25 bp, Homo sapien
ttccatgggttcccgcggtaactga

SEQ ID NO: 1365647 - DNA, 25 bp, Homo sapien
ttcccgcggtaactgacaacgcggc

SEQ ID NO: 1365648 - DNA, 25 bp, Homo sapien
catgggttcccgcggtaactgacaa

SEQ ID NO: 1365649 - DNA, 25 bp, Homo sapien
ctaaaacatgcattgattgtccatc

SEQ ID NO: 1365650 - DNA, 25 bp, Homo sapien
aaacagctctcagatagcaatgcat

SEQ ID NO: 1365651 - DNA, 25 bp, Homo sapien
ggtcactcaccttacaaacagctct

SEQ ID NO: 1365652 - DNA, 25 bp, Homo sapien
taatggctactacaacatcctctag

SEQ ID NO: 1365653 - DNA, 25 bp, Homo sapien
cttccgcccatgaagagactgttca

SEQ ID NO: 1365654 - DNA, 25 bp, Homo sapien
tcaggtgtttaaacgtgatgtccat

SEQ ID NO: 1365655 - DNA, 25 bp, Homo sapien
ttccgcccatgaagagactgttcag

SEQ ID NO: 1365656 - DNA, 25 bp, Homo sapien
gaagagactgttcaggtgtttaaac

SEQ ID NO: 1365657 - DNA, 25 bp, Homo sapien
tcaaatagcaagaatgatgcgcttt

SEQ ID NO: 1365658 - DNA, 25 bp, Homo sapien
tatttcatttacaccctccacaaca

SEQ ID NO: 1365659 - DNA, 25 bp, Homo sapien
tcatttacaccctccacaacattat

SEQ ID NO: 1365660 - DNA, 25 bp, Homo sapien
agcaagaatgatgcgctttatttca

SEQ ID NO: 1365661 - DNA, 25 bp, Homo sapien
tctaaagtagtcatctctctcagct

SEQ ID NO: 1365662 - DNA, 25 bp, Homo sapien
tgttggctggactgatctaaagtag

SEQ ID NO: 1365663 - DNA, 25 bp, Homo sapien
tctctcagcttggttgaagcccagt

SEQ ID NO: 1365664 - DNA, 25 bp, Homo sapien
gaaattgtgtctgtaattgttggct

SEQ ID NO: 1365665 - DNA, 25 bp, Homo sapien
ctggattcctgattgaaagcttcat

SEQ ID NO: 1365666 - DNA, 25 bp, Homo sapien
tggattcctgattgaaagcttcatt

SEQ ID NO: 1365667 - DNA, 25 bp, Homo sapien
cctggattcctgattgaaagcttca

SEQ ID NO: 1365668 - DNA, 25 bp, Homo sapien
gattcctgattgaaagcttcatttt

SEQ ID NO: 1365669 - DNA, 25 bp, Homo sapien
gcctcctagcttcaatcaaaatatt

SEQ ID NO: 1365670 - DNA, 25 bp, Homo sapien
tgctatctctcccaggacattgatg

SEQ ID NO: 1365671 - DNA, 25 bp, Homo sapien
gacattgatgcctataggagaagcc

SEQ ID NO: 1365672 - DNA, 25 bp, Homo sapien
gcctataggagaagccttgccccag

SEQ ID NO: 1365673 - DNA, 25 bp, Homo sapien
atctcctgcacactaagccttgctt

SEQ ID NO: 1365674 - DNA, 25 bp, Homo sapien
catccatagcggaggtagatatgat

SEQ ID NO: 1365675 - DNA, 25 bp, Homo sapien
ctgttgtttaggagggtagtttctg

SEQ ID NO: 1365676 - DNA, 25 bp, Homo sapien
gcttgcatccatagcggaggtagat

SEQ ID NO: 1365677 - DNA, 25 bp, Homo sapien
gggtagtttctgcttgcatccatag

SEQ ID NO: 1365678 - DNA, 25 bp, Homo sapien
tatttatatagcctactatatgatc

SEQ ID NO: 1365679 - DNA, 25 bp, Homo sapien
tgggtaaacctctgagacttgctgg

SEQ ID NO: 1365680 - DNA, 25 bp, Homo sapien
tcacaggcgagtcctcaagctgagt

SEQ ID NO: 1365681 - DNA, 25 bp, Homo sapien
tcttggatactagcccagccatggc

SEQ ID NO: 1365682 - DNA, 25 bp, Homo sapien
gggtgcagcacacaacatactgaga

SEQ ID NO: 1365683 - DNA, 25 bp, Homo sapien
aatgctaaattgagaacagactgtc

SEQ ID NO: 1365684 - DNA, 25 bp, Homo sapien
tgaccaacctgactgaagggtgggt

SEQ ID NO: 1365685 - DNA, 25 bp, Homo sapien
taaatgggcctacagaaaagaggtg

SEQ ID NO: 1365686 - DNA, 25 bp, Homo sapien
ggtgggtgcacgtctgaaatcaatg

SEQ ID NO: 1365687 - DNA, 25 bp, Homo sapien
tctcgggtcttgtgggaataggttc

SEQ ID NO: 1365688 - DNA, 25 bp, Homo sapien
ggttcgcttcgtggcttcttcccag

SEQ ID NO: 1365689 - DNA, 25 bp, Homo sapien
gccagctgcttttcgggcgaggcca

SEQ ID NO: 1365690 - DNA, 25 bp, Homo sapien
tttctccaacgtagccggagtccga

SEQ ID NO: 1365691 - DNA, 25 bp, Homo sapien
atctttgaaactccgaatcccttca

SEQ ID NO: 1365692 - DNA, 25 bp, Homo sapien
ttgaaactccgaatcccttcatagg

SEQ ID NO: 1365693 - DNA, 25 bp, Homo sapien
gaaactccgaatcccttcataggtg

SEQ ID NO: 1365694 - DNA, 25 bp, Homo sapien
ctccgaatcccttcataggtgaatc

SEQ ID NO: 1365695 - DNA, 25 bp, Homo sapien
cttaatatcatccagtcgttgatga

SEQ ID NO: 1365696 - DNA, 25 bp, Homo sapien
tccagtcgttgatgaattttcctat

SEQ ID NO: 1365697 - DNA, 25 bp, Homo sapien
tcatccagtcgttgatgaattttcc

SEQ ID NO: 1365698 - DNA, 25 bp, Homo sapien
gatgaattttcctattatctccaag

SEQ ID NO: 1365699 - DNA, 25 bp, Homo sapien
agctttgaccgggtcttatgaagag

SEQ ID NO: 1365700 - DNA, 25 bp, Homo sapien
aagaggattctcaagtggagcctca

SEQ ID NO: 1365701 - DNA, 25 bp, Homo sapien
ctcaagtggagcctcagagagcaag

SEQ ID NO: 1365702 - DNA, 25 bp, Homo sapien
ccgggtcttatgaagaggattctca

SEQ ID NO: 1365703 - DNA, 25 bp, Homo sapien
ttaactacctaattggaagcactcc

SEQ ID NO: 1365704 - DNA, 25 bp, Homo sapien
tcactatatgtaagggtcatcccag

SEQ ID NO: 1365705 - DNA, 25 bp, Homo sapien
cctagctaggactttactgtttgac

SEQ ID NO: 1365706 - DNA, 25 bp, Homo sapien
gaagcactccttgcatctaatgagc

SEQ ID NO: 1365707 - DNA, 25 bp, Homo sapien
ttcgtatcaggtttagcaaggtgca

SEQ ID NO: 1365708 - DNA, 25 bp, Homo sapien
caaagttattgttgaggagctcacc

SEQ ID NO: 1365709 - DNA, 25 bp, Homo sapien
taaattatactgacctgggccccaa

SEQ ID NO: 1365710 - DNA, 25 bp, Homo sapien
ttgagacactgctacccatgggaaa

SEQ ID NO: 1365711 - DNA, 25 bp, Homo sapien
gaacatcacacttcttaataggatc

SEQ ID NO: 1365712 - DNA, 25 bp, Homo sapien
tgcaattcgatatagagtgtttcag

SEQ ID NO: 1365713 - DNA, 25 bp, Homo sapien
gcacaaaaccgtcatgaacatcaca

SEQ ID NO: 1365714 - DNA, 25 bp, Homo sapien
cacgggtacttgaaaccagtgaact

SEQ ID NO: 1365715 - DNA, 25 bp, Homo sapien
ttgccttaattgaaggtgttcacag

SEQ ID NO: 1365716 - DNA, 25 bp, Homo sapien
attgccttaattgaaggtgttcaca

SEQ ID NO: 1365717 - DNA, 25 bp, Homo sapien
tattcccattatccagctgaagagc

SEQ ID NO: 1365718 - DNA, 25 bp, Homo sapien
tggcttattcccattatccagctga

SEQ ID NO: 1365719 - DNA, 25 bp, Homo sapien
gatttgcttctttaacgcattcact

SEQ ID NO: 1365720 - DNA, 25 bp, Homo sapien
cataatctcgaatattgtccctgtt

SEQ ID NO: 1365721 - DNA, 25 bp, Homo sapien
ttgcatcaggaaaagataggtggat

SEQ ID NO: 1365722 - DNA, 25 bp, Homo sapien
caggaaaagataggtggatgtcata

SEQ ID NO: 1365723 - DNA, 25 bp, Homo sapien
gctcatatgaaaggccccagggcta

SEQ ID NO: 1365724 - DNA, 25 bp, Homo sapien
ccatgaattgctagggaatcctcca

SEQ ID NO: 1365725 - DNA, 25 bp, Homo sapien
tcttggagatatcctgaagccagca

SEQ ID NO: 1365726 - DNA, 25 bp, Homo sapien
tgagaagcctaatccaaggacagct

SEQ ID NO: 1365727 - DNA, 25 bp, Homo sapien
gctaccggagtgaaaacagagcaca

SEQ ID NO: 1365728 - DNA, 25 bp, Homo sapien
gaaacgatgtaattcaaagacctgc

SEQ ID NO: 1365729 - DNA, 25 bp, Homo sapien
gcagggtgtggtgccaatgcactat

SEQ ID NO: 1365730 - DNA, 25 bp, Homo sapien
acaaatacatgtcctctcagcagca

SEQ ID NO: 1365731 - DNA, 25 bp, Homo sapien
agcccttcagattcttatgggaagc

SEQ ID NO: 1365732 - DNA, 25 bp, Homo sapien
tgcaacagtccctcataatccatga

SEQ ID NO: 1365733 - DNA, 25 bp, Homo sapien
tctatccttacctgaatgcttgaat

SEQ ID NO: 1365734 - DNA, 25 bp, Homo sapien
caggacttgacacatactgatgatc

SEQ ID NO: 1365735 - DNA, 25 bp, Homo sapien
caaaggactttctactcgaggaatg

SEQ ID NO: 1365736 - DNA, 25 bp, Homo sapien
tgaaattattcaccacgcacacaac

SEQ ID NO: 1365737 - DNA, 25 bp, Homo sapien
cgaggaatgctgatcattggcatct

SEQ ID NO: 1365738 - DNA, 25 bp, Homo sapien
ttctactcgaggaatgctgatcatt

SEQ ID NO: 1365739 - DNA, 25 bp, Homo sapien
ctggaggacatgatggatatcctcc

SEQ ID NO: 1365740 - DNA, 25 bp, Homo sapien
ctcctaaatatcctggaggacatga

SEQ ID NO: 1365741 - DNA, 25 bp, Homo sapien
gtgccactgagggccaatttgcacc

SEQ ID NO: 1365742 - DNA, 25 bp, Homo sapien
gggccaatttgcaccatcctgtttc

SEQ ID NO: 1365743 - DNA, 25 bp, Homo sapien
tgcaaatacattttcaaaacacaaa

SEQ ID NO: 1365744 - DNA, 25 bp, Homo sapien
gcaaatacattttcaaaacacaaat

SEQ ID NO: 1365745 - DNA, 25 bp, Homo sapien
ctgcaaatacattttcaaaacacaa

SEQ ID NO: 1365746 - DNA, 25 bp, Homo sapien
gaaagcctgctataacatctgacca

SEQ ID NO: 1365747 - DNA, 25 bp, Homo sapien
tattctgctactctgttgagtccag

SEQ ID NO: 1365748 - DNA, 25 bp, Homo sapien
tgaccaatgatttcgatattctgct

SEQ ID NO: 1365749 - DNA, 25 bp, Homo sapien
tgctatagatattccaaccagaaag

SEQ ID NO: 1365750 - DNA, 25 bp, Homo sapien
ttcccttggctttgattgtgttggt

SEQ ID NO: 1365751 - DNA, 25 bp, Homo sapien
caagcatagaactggcttagcaagt

SEQ ID NO: 1365752 - DNA, 25 bp, Homo sapien
gcttagcaagtctggttcccttggc

SEQ ID NO: 1365753 - DNA, 25 bp, Homo sapien
taagcccaagcatagaactggctta

SEQ ID NO: 1365754 - DNA, 25 bp, Homo sapien
ctgggataaatgtccatgggaatgt

SEQ ID NO: 1365755 - DNA, 25 bp, Homo sapien
tcaggagacatagaagttggaacca

SEQ ID NO: 1365756 - DNA, 25 bp, Homo sapien
cagagaagtttagctatgcttctgg

SEQ ID NO: 1365757 - DNA, 25 bp, Homo sapien
aaggcagagaagtttagctatgctt

SEQ ID NO: 1365758 - DNA, 25 bp, Homo sapien
ctgataggtaggagccaatggatgc

SEQ ID NO: 1365759 - DNA, 25 bp, Homo sapien
caataggacatatagtgagggagca

SEQ ID NO: 1365760 - DNA, 25 bp, Homo sapien
cttgctgataggtaggagccaatgg

SEQ ID NO: 1365761 - DNA, 25 bp, Homo sapien
cttgggtggcaataggacatatagt

SEQ ID NO: 1365762 - DNA, 25 bp, Homo sapien
cattaccagatactcttacaatcat

SEQ ID NO: 1365763 - DNA, 25 bp, Homo sapien
gaagcacttcccgtgatgcttgcca

SEQ ID NO: 1365764 - DNA, 25 bp, Homo sapien
tggacattgggtgggactcatcatt

SEQ ID NO: 1365765 - DNA, 25 bp, Homo sapien
cacttcccgtgatgcttgccagcag

SEQ ID NO: 1365766 - DNA, 25 bp, Homo sapien
caaatttggtttcgaattggtcctg

SEQ ID NO: 1365767 - DNA, 25 bp, Homo sapien
tggtttcgaattggtcctgagattt

SEQ ID NO: 1365768 - DNA, 25 bp, Homo sapien
gattttacagatctcttgttaatga

SEQ ID NO: 1365769 - DNA, 25 bp, Homo sapien
aattggtcctgagattttacagatc

SEQ ID NO: 1365770 - DNA, 25 bp, Homo sapien
ttgtggaaaagcctacagggaacgc

SEQ ID NO: 1365771 - DNA, 25 bp, Homo sapien
tgtggaaaagcctacagggaacgcg

SEQ ID NO: 1365772 - DNA, 25 bp, Homo sapien
caaggtacatccttgtgaggaggga

SEQ ID NO: 1365773 - DNA, 25 bp, Homo sapien
gctgatggtaccattgttggggaca

SEQ ID NO: 1365774 - DNA, 25 bp, Homo sapien
ctgcaaggtacatccttgtgaggag

SEQ ID NO: 1365775 - DNA, 25 bp, Homo sapien
tggtaccattgttggggacaagagc

SEQ ID NO: 1365776 - DNA, 25 bp, Homo sapien
tataattgggcttacacagggcaag

SEQ ID NO: 1365777 - DNA, 25 bp, Homo sapien
gaattgtgtatactgctgacatcca

SEQ ID NO: 1365778 - DNA, 25 bp, Homo sapien
tctgggttgccagtacaggcctctt

SEQ ID NO: 1365779 - DNA, 25 bp, Homo sapien
gatacatagctgcatagacactgag

SEQ ID NO: 1365780 - DNA, 25 bp, Homo sapien
ggtttatatagcaacagtctccagt

SEQ ID NO: 1365781 - DNA, 25 bp, Homo sapien
caagaaatcggacagttcggcgcac

SEQ ID NO: 1365782 - DNA, 25 bp, Homo sapien
tggctagttgtaggcaaaagacagc

SEQ ID NO: 1365783 - DNA, 25 bp, Homo sapien
atcccttgtggctagttgtaggcaa

SEQ ID NO: 1365784 - DNA, 25 bp, Homo sapien
cttccacggggtctccatcccctgg

SEQ ID NO: 1365785 - DNA, 25 bp, Homo sapien
cacatgatggctgccctctcagcct

SEQ ID NO: 1365786 - DNA, 25 bp, Homo sapien
agcttccacggggtctccatcccct

SEQ ID NO: 1365787 - DNA, 25 bp, Homo sapien
tgcacatgatggctgccctctcagc

SEQ ID NO: 1365788 - DNA, 25 bp, Homo sapien
gggttcttaattctggaatcacgcg

SEQ ID NO: 1365789 - DNA, 25 bp, Homo sapien
gaaggggttcttaattctggaatca

SEQ ID NO: 1365790 - DNA, 25 bp, Homo sapien
tcttaattctggaatcacgcgctac

SEQ ID NO: 1365791 - DNA, 25 bp, Homo sapien
taattctggaatcacgcgctaccat

SEQ ID NO: 1365792 - DNA, 25 bp, Homo sapien
tgagtaaaaagccccattctgctga

SEQ ID NO: 1365793 - DNA, 25 bp, Homo sapien
atgagtaaaaagccccattctgctg

SEQ ID NO: 1365794 - DNA, 25 bp, Homo sapien
aatgagtaaaaagccccattctgct

SEQ ID NO: 1365795 - DNA, 25 bp, Homo sapien
gagtaaaaagccccattctgctgat

SEQ ID NO: 1365796 - DNA, 25 bp, Homo sapien
caggaagcgtctggtgtagtaaatc

SEQ ID NO: 1365797 - DNA, 25 bp, Homo sapien
gcgtctggtgtagtaaatcctttcc

SEQ ID NO: 1365798 - DNA, 25 bp, Homo sapien
aatcctttccgggtagtgaaccatg

SEQ ID NO: 1365799 - DNA, 25 bp, Homo sapien
agcccaggaagcgtctggtgtagta

SEQ ID NO: 1365800 - DNA, 25 bp, Homo sapien
tgtccttggagatgtacaggaagca

SEQ ID NO: 1365801 - DNA, 25 bp, Homo sapien
gaagcactgatccatgcatacagat

SEQ ID NO: 1365802 - DNA, 25 bp, Homo sapien
aaagtattcaggcatgtggtaacac

SEQ ID NO: 1365803 - DNA, 25 bp, Homo sapien
cattgacagaaatcacggcatgtga

SEQ ID NO: 1365804 - DNA, 25 bp, Homo sapien
ggctgggacccatacacatgaacat

SEQ ID NO: 1365805 - DNA, 25 bp, Homo sapien
catgaacatactttgtacctttaag

SEQ ID NO: 1365806 - DNA, 25 bp, Homo sapien
gggacacttcccgatttccagcaaa

SEQ ID NO: 1365807 - DNA, 25 bp, Homo sapien
aaatcgggatatctcgacccaagct

SEQ ID NO: 1365808 - DNA, 25 bp, Homo sapien
cttcttcctggtatgtttttattca

SEQ ID NO: 1365809 - DNA, 25 bp, Homo sapien
tattcaggttaatttctctatacat

SEQ ID NO: 1365810 - DNA, 25 bp, Homo sapien
ctggtatgtttttattcaggttaat

SEQ ID NO: 1365811 - DNA, 25 bp, Homo sapien
tttattcaggttaatttctctatac

SEQ ID NO: 1365812 - DNA, 25 bp, Homo sapien
taccacatacaatgacgccagcacc

SEQ ID NO: 1365813 - DNA, 25 bp, Homo sapien
ttgggatagcagcagtagctacatt

SEQ ID NO: 1365814 - DNA, 25 bp, Homo sapien
gatagcagcagtagctacatttctc

SEQ ID NO: 1365815 - DNA, 25 bp, Homo sapien
atacaatgacgccagcacccttggg

SEQ ID NO: 1365816 - DNA, 25 bp, Homo sapien
ccttcaagacacaccttaaatacca

SEQ ID NO: 1365817 - DNA, 25 bp, Homo sapien
tgcctccaaggggttgttcacggag

SEQ ID NO: 1365818 - DNA, 25 bp, Homo sapien
gctgtttcaagagtgcagtctccat

SEQ ID NO: 1365819 - DNA, 25 bp, Homo sapien
gatgtcctaactcaaattccatttc

SEQ ID NO: 1365820 - DNA, 25 bp, Homo sapien
aggcgaggggcgagatcagggactc

SEQ ID NO: 1365821 - DNA, 25 bp, Homo sapien
agatcagggactcggcgacgagggc

SEQ ID NO: 1365822 - DNA, 25 bp, Homo sapien
ggactcggcgacgagggcgagcgcc

SEQ ID NO: 1365823 - DNA, 25 bp, Homo sapien
ggcgagatcagggactcggcgacga

SEQ ID NO: 1365824 - DNA, 25 bp, Homo sapien
gaacgtgtccgtatactcgaagtag

SEQ ID NO: 1365825 - DNA, 25 bp, Homo sapien
ctcgaagtagtacgccagcatcacc

SEQ ID NO: 1365826 - DNA, 25 bp, Homo sapien
taggcgctgtcgtggcagaagaagc

SEQ ID NO: 1365827 - DNA, 25 bp, Homo sapien
aagaagccctgcacgttcacggtga

SEQ ID NO: 1365828 - DNA, 25 bp, Homo sapien
ccgagcgggcggtcgacgcggtggg

SEQ ID NO: 1365829 - DNA, 25 bp, Homo sapien
ggcaggtccgggcttcgaggcgccg

SEQ ID NO: 1365830 - DNA, 25 bp, Homo sapien
cccggtccgccgaggcagccaccgg

SEQ ID NO: 1365831 - DNA, 25 bp, Homo sapien
ggcacgggaggcgggatggagccgc

SEQ ID NO: 1365832 - DNA, 25 bp, Homo sapien
cgagaccattcgagaagcagcggcg

SEQ ID NO: 1365833 - DNA, 25 bp, Homo sapien
cctgcacgagaccattcgagaagca

SEQ ID NO: 1365834 - DNA, 25 bp, Homo sapien
gctgcgcccctgcacgagaccattc

SEQ ID NO: 1365835 - DNA, 25 bp, Homo sapien
gagtcccgggcgacgggcagcggcc

SEQ ID NO: 1365836 - DNA, 25 bp, Homo sapien
caccagctgagaggtttaagaaacc

SEQ ID NO: 1365837 - DNA, 25 bp, Homo sapien
tgcggcgcccagagtttcaaccggt

SEQ ID NO: 1365838 - DNA, 25 bp, Homo sapien
aaaatggtgcgtggacgcgtcttcc

SEQ ID NO: 1365839 - DNA, 25 bp, Homo sapien
ttcaaccggtgcgttcagcctgcat

SEQ ID NO: 1365840 - DNA, 25 bp, Homo sapien
gccaaaccaaacaattttctatgat

SEQ ID NO: 1365841 - DNA, 25 bp, Homo sapien
tcatgctgctgtaccagagaatccg

SEQ ID NO: 1365842 - DNA, 25 bp, Homo sapien
ctcagagcttaggagcgggctgctg

SEQ ID NO: 1365843 - DNA, 25 bp, Homo sapien
ggattgggtagctcaaaagaaggca

SEQ ID NO: 1365844 - DNA, 25 bp, Homo sapien
gctgtctggaccacccaagcctttt

SEQ ID NO: 1365845 - DNA, 25 bp, Homo sapien
tcagcttcatcggaagactttccta

SEQ ID NO: 1365846 - DNA, 25 bp, Homo sapien
tcctaatgctgtctggaccacccaa

SEQ ID NO: 1365847 - DNA, 25 bp, Homo sapien
agaaatcagcttcatcggaagactt

SEQ ID NO: 1365848 - DNA, 25 bp, Homo sapien
cctgcttcacaaggatatcaacata

SEQ ID NO: 1365849 - DNA, 25 bp, Homo sapien
tgtactttatcatgctggaaatcct

SEQ ID NO: 1365850 - DNA, 25 bp, Homo sapien
gcttcacaaggatatcaacataatt

SEQ ID NO: 1365851 - DNA, 25 bp, Homo sapien
atctgtactttatcatgctggaaat

SEQ ID NO: 1365852 - DNA, 25 bp, Homo sapien
agagccaacagtcctaagagtacac

SEQ ID NO: 1365853 - DNA, 25 bp, Homo sapien
gaggagagccaacagtcctaagagt

SEQ ID NO: 1365854 - DNA, 25 bp, Homo sapien
ggagagccaacagtcctaagagtac

SEQ ID NO: 1365855 - DNA, 25 bp, Homo sapien
tcagaggagagccaacagtcctaag

SEQ ID NO: 1365856 - DNA, 25 bp, Homo sapien
tctgactggattgaaagaagtcatt

SEQ ID NO: 1365857 - DNA, 25 bp, Homo sapien
gtgaggtccgagaaacaagccagga

SEQ ID NO: 1365858 - DNA, 25 bp, Homo sapien
acctccactgatcctgtgacatcag

SEQ ID NO: 1365859 - DNA, 25 bp, Homo sapien
caggattctgactggattgaaagaa

SEQ ID NO: 1365860 - DNA, 25 bp, Homo sapien
gacctcttaagttcggatgacaagc

SEQ ID NO: 1365861 - DNA, 25 bp, Homo sapien
tctggacctcttaagttcggatgac

SEQ ID NO: 1365862 - DNA, 25 bp, Homo sapien
tctaagatctggacctcttaagttc

SEQ ID NO: 1365863 - DNA, 25 bp, Homo sapien
taagttcggatgacaagcacctaag

SEQ ID NO: 1365864 - DNA, 25 bp, Homo sapien
tctggagcatcataggacaaagtct

SEQ ID NO: 1365865 - DNA, 25 bp, Homo sapien
ccttagtgtggagagatttgaatca

SEQ ID NO: 1365866 - DNA, 25 bp, Homo sapien
gaacacatgtttgggtgtcccttag

SEQ ID NO: 1365867 - DNA, 25 bp, Homo sapien
caggtatatactcatttctatttgg

SEQ ID NO: 1365868 - DNA, 25 bp, Homo sapien
ggactaatacaatgtgtgatattca

SEQ ID NO: 1365869 - DNA, 25 bp, Homo sapien
ccaaaccgttagagctctagatgga

SEQ ID NO: 1365870 - DNA, 25 bp, Homo sapien
ccaacatccaaaccgttagagctct

SEQ ID NO: 1365871 - DNA, 25 bp, Homo sapien
tgatattcagaaagtccaacatcca

SEQ ID NO: 1365872 - DNA, 25 bp, Homo sapien
ttgtaatagcagtaagaacaaaagg

SEQ ID NO: 1365873 - DNA, 25 bp, Homo sapien
taatgcaatggaagcggtattgtaa

SEQ ID NO: 1365874 - DNA, 25 bp, Homo sapien
caatggaagcggtattgtaatagca

SEQ ID NO: 1365875 - DNA, 25 bp, Homo sapien
tagatataatgcaatggaagcggta

SEQ ID NO: 1365876 - DNA, 25 bp, Homo sapien
ggcctatcacagattcccatctcca

SEQ ID NO: 1365877 - DNA, 25 bp, Homo sapien
caggcctatcacagattcccatctc

SEQ ID NO: 1365878 - DNA, 25 bp, Homo sapien
agcaggcctatcacagattcccatc

SEQ ID NO: 1365879 - DNA, 25 bp, Homo sapien
tctaacaatagaaccttccacttca

SEQ ID NO: 1365880 - DNA, 25 bp, Homo sapien
tatagtcaattttgccaaggagcag

SEQ ID NO: 1365881 - DNA, 25 bp, Homo sapien
gagatggcctatagtcaattttgcc

SEQ ID NO: 1365882 - DNA, 25 bp, Homo sapien
cctatagtcaattttgccaaggagc

SEQ ID NO: 1365883 - DNA, 25 bp, Homo sapien
gatggagatggcctatagtcaattt

SEQ ID NO: 1365884 - DNA, 25 bp, Homo sapien
gaattaagttatctgaattcagtgc

SEQ ID NO: 1365885 - DNA, 25 bp, Homo sapien
taatctagctcttcagacttcctct

SEQ ID NO: 1365886 - DNA, 25 bp, Homo sapien
gctcttcagacttcctctgatcctg

SEQ ID NO: 1365887 - DNA, 25 bp, Homo sapien
acattgcaagtctctccctgtttgt

SEQ ID NO: 1365888 - DNA, 25 bp, Homo sapien
cagtgagctgcacccacgggcaaga

SEQ ID NO: 1365889 - DNA, 25 bp, Homo sapien
tgcacccacgggcaagacatatgtg

SEQ ID NO: 1365890 - DNA, 25 bp, Homo sapien
tgcagttaaccccagtgagctgcac

SEQ ID NO: 1365891 - DNA, 25 bp, Homo sapien
agttaaccccagtgagctgcaccca

SEQ ID NO: 1365892 - DNA, 25 bp, Homo sapien
tatgatggaagagcctgaaggccat

SEQ ID NO: 1365893 - DNA, 25 bp, Homo sapien
ttgtatgatggaagagcctgaaggc

SEQ ID NO: 1365894 - DNA, 25 bp, Homo sapien
gtgttgtatgatggaagagcctgaa

SEQ ID NO: 1365895 - DNA, 25 bp, Homo sapien
tgtatgatggaagagcctgaaggcc

SEQ ID NO: 1365896 - DNA, 25 bp, Homo sapien
tggctccatccgctataaaaccttg

SEQ ID NO: 1365897 - DNA, 25 bp, Homo sapien
tctggagatcgcaagagaagcaaca

SEQ ID NO: 1365898 - DNA, 25 bp, Homo sapien
taaaaccttgacagaccatgagccc

SEQ ID NO: 1365899 - DNA, 25 bp, Homo sapien
aagggcagccttcgccaaacttacg

SEQ ID NO: 1365900 - DNA, 25 bp, Homo sapien
taattggacaccaagaggaagaatc

SEQ ID NO: 1365901 - DNA, 25 bp, Homo sapien
agtatctcacggtacaaattaagaa

SEQ ID NO: 1365902 - DNA, 25 bp, Homo sapien
caaccattgttgctacctatcctga

SEQ ID NO: 1365903 - DNA, 25 bp, Homo sapien
cactggttaagtttgactcgtctct

SEQ ID NO: 1365904 - DNA, 25 bp, Homo sapien
gcagaattgaaaactctggcaataa

SEQ ID NO: 1365905 - DNA, 25 bp, Homo sapien
tgacgctcatactggcttttgcctg

SEQ ID NO: 1365906 - DNA, 25 bp, Homo sapien
aaaacatggactcaaccatatccct

SEQ ID NO: 1365907 - DNA, 25 bp, Homo sapien
catcatgacgctcatactggctttt

SEQ ID NO: 1365908 - DNA, 25 bp, Homo sapien
taaatcagactaaaaggtggtatct

SEQ ID NO: 1365909 - DNA, 25 bp, Homo sapien
tcttatttgctaatgggagcacttc

SEQ ID NO: 1365910 - DNA, 25 bp, Homo sapien
taggctgtgctttactgataaaacc

SEQ ID NO: 1365911 - DNA, 25 bp, Homo sapien
tagacactagaactcagacctctgc

SEQ ID NO: 1365912 - DNA, 25 bp, Homo sapien
ggaagaccagtattgctgctagcat

SEQ ID NO: 1365913 - DNA, 25 bp, Homo sapien
ttgactgtgctttccatactttcta

SEQ ID NO: 1365914 - DNA, 25 bp, Homo sapien
caaacttgactgtgctttccatact

SEQ ID NO: 1365915 - DNA, 25 bp, Homo sapien
gcataccgcacaaatgaatcatata

SEQ ID NO: 1365916 - DNA, 25 bp, Homo sapien
tattgcaagtgttgttatttctgtt

SEQ ID NO: 1365917 - DNA, 25 bp, Homo sapien
gaactagagtgggtcccttcctctc

SEQ ID NO: 1365918 - DNA, 25 bp, Homo sapien
agggctccaacatagttgtttgaag

SEQ ID NO: 1365919 - DNA, 25 bp, Homo sapien
ctgctgctgcccattagatatggaa

SEQ ID NO: 1365920 - DNA, 25 bp, Homo sapien
gttctgttaatgctgcttgggtcca

SEQ ID NO: 1365921 - DNA, 25 bp, Homo sapien
ttctgttaatgctgcttgggtccac

SEQ ID NO: 1365922 - DNA, 25 bp, Homo sapien
aactgaacaagcctatagtgagtca

SEQ ID NO: 1365923 - DNA, 25 bp, Homo sapien
gaacaagcctatagtgagtcataat

SEQ ID NO: 1365924 - DNA, 25 bp, Homo sapien
tgagctatttccctttggaatgaaa

SEQ ID NO: 1365925 - DNA, 25 bp, Homo sapien
tctgcaactgaacaagcctatagtg

SEQ ID NO: 1365926 - DNA, 25 bp, Homo sapien
ttcccactatcagtagagaagcagc

SEQ ID NO: 1365927 - DNA, 25 bp, Homo sapien
gcagctcagcaaagtgttcccacta

SEQ ID NO: 1365928 - DNA, 25 bp, Homo sapien
gatagtggtaacaaatgctacagac

SEQ ID NO: 1365929 - DNA, 25 bp, Homo sapien
gcaccaggacgatggttttagtgat

SEQ ID NO: 1365930 - DNA, 25 bp, Homo sapien
aatgatgcttgcagctctcattcag

SEQ ID NO: 1365931 - DNA, 25 bp, Homo sapien
gaatgatgcttgcagctctcattca

SEQ ID NO: 1365932 - DNA, 25 bp, Homo sapien
cttttgcaacactgtttgtagccac

SEQ ID NO: 1365933 - DNA, 25 bp, Homo sapien
gcaacactgtttgtagccacatctg

SEQ ID NO: 1365934 - DNA, 25 bp, Homo sapien
tttgcaacactgtttgtagccacat

SEQ ID NO: 1365935 - DNA, 25 bp, Homo sapien
caaccttttgcaacactgtttgtag

SEQ ID NO: 1365936 - DNA, 25 bp, Homo sapien
atcccccagatgcagctctaagttc

SEQ ID NO: 1365937 - DNA, 25 bp, Homo sapien
tggcgaatccaatgtacccttggaa

SEQ ID NO: 1365938 - DNA, 25 bp, Homo sapien
tacccttggaattgcagactctctt

SEQ ID NO: 1365939 - DNA, 25 bp, Homo sapien
gtgtctgctcactggcgaatccaat

SEQ ID NO: 1365940 - DNA, 25 bp, Homo sapien
ctgagcaagagtttttaatatcaca

SEQ ID NO: 1365941 - DNA, 25 bp, Homo sapien
cactgatcacacagccaaaagcaag

SEQ ID NO: 1365942 - DNA, 25 bp, Homo sapien
tgatcacacagccaaaagcaagttg

SEQ ID NO: 1365943 - DNA, 25 bp, Homo sapien
gagtttttaatatcacactgatcac

SEQ ID NO: 1365944 - DNA, 25 bp, Homo sapien
tgttttcctaaagctgtgttgtctg

SEQ ID NO: 1365945 - DNA, 25 bp, Homo sapien
ctgttttcctaaagctgtgttgtct

SEQ ID NO: 1365946 - DNA, 25 bp, Homo sapien
cacttatggctgacaaactcgcaaa

SEQ ID NO: 1365947 - DNA, 25 bp, Homo sapien
taaagggatcctaagccccaaatgc

SEQ ID NO: 1365948 - DNA, 25 bp, Homo sapien
caaaatggtccctgatcagacgtac

SEQ ID NO: 1365949 - DNA, 25 bp, Homo sapien
cattgcaggtccagtagattccaac

SEQ ID NO: 1365950 - DNA, 25 bp, Homo sapien
tggcagagggcatgtgccagtgaag

SEQ ID NO: 1365951 - DNA, 25 bp, Homo sapien
gtggcagagggcatgtgccagtgaa

SEQ ID NO: 1365952 - DNA, 25 bp, Homo sapien
ggcagagggcatgtgccagtgaaga

SEQ ID NO: 1365953 - DNA, 25 bp, Homo sapien
gttgggtctgattctccattaaagc

SEQ ID NO: 1365954 - DNA, 25 bp, Homo sapien
attaaagcccttggattgatgccca

SEQ ID NO: 1365955 - DNA, 25 bp, Homo sapien
taaccaacctttgacaacattccag

SEQ ID NO: 1365956 - DNA, 25 bp, Homo sapien
ggcagttccactagtcctattacca

SEQ ID NO: 1365957 - DNA, 25 bp, Homo sapien
tcccagacagtgcattcacccatat

SEQ ID NO: 1365958 - DNA, 25 bp, Homo sapien
cgtgctctagtttcccagacagtgc

SEQ ID NO: 1365959 - DNA, 25 bp, Homo sapien
ccagacagtgcattcacccatatag

SEQ ID NO: 1365960 - DNA, 25 bp, Homo sapien
tcttccgtgctctagtttcccagac

SEQ ID NO: 1365961 - DNA, 25 bp, Homo sapien
tgaggagttgtgcagacctagctat

SEQ ID NO: 1365962 - DNA, 25 bp, Homo sapien
tatgaacccagtgtatttgaaacta

SEQ ID NO: 1365963 - DNA, 25 bp, Homo sapien
gttgtgttagccagttcagaatgtg

SEQ ID NO: 1365964 - DNA, 25 bp, Homo sapien
caaactcagcaactagtcatgatcg

SEQ ID NO: 1365965 - DNA, 25 bp, Homo sapien
ttctgtagccatgttcagaggaagg

SEQ ID NO: 1365966 - DNA, 25 bp, Homo sapien
ggaacactgttctacaagcatcttc

SEQ ID NO: 1365967 - DNA, 25 bp, Homo sapien
gactaactgatttgttcttctgtag

SEQ ID NO: 1365968 - DNA, 25 bp, Homo sapien
aaagccacccaatcctggtcttact

SEQ ID NO: 1365969 - DNA, 25 bp, Homo sapien
cagtgaactggtcctttagcagata

SEQ ID NO: 1365970 - DNA, 25 bp, Homo sapien
taaattaggaaggatccaattcact

SEQ ID NO: 1365971 - DNA, 25 bp, Homo sapien
ttaggaaggatccaattcactgtca

SEQ ID NO: 1365972 - DNA, 25 bp, Homo sapien
tcatttggcaaatgaccattcagtg

SEQ ID NO: 1365973 - DNA, 25 bp, Homo sapien
gaatcatttttctaatacatgttca

SEQ ID NO: 1365974 - DNA, 25 bp, Homo sapien
tttttctattgtgtgtgaatcattt

SEQ ID NO: 1365975 - DNA, 25 bp, Homo sapien
ttctattgtgtgtgaatcatttttc

SEQ ID NO: 1365976 - DNA, 25 bp, Homo sapien
aatcatttttctaatacatgttcat

SEQ ID NO: 1365977 - DNA, 25 bp, Homo sapien
gagagcaatcagcattacctcattg

SEQ ID NO: 1365978 - DNA, 25 bp, Homo sapien
gaagtccacattagcttgtggtaac

SEQ ID NO: 1365979 - DNA, 25 bp, Homo sapien
gtccacattagcttgtggtaactgc

SEQ ID NO: 1365980 - DNA, 25 bp, Homo sapien
aactgcactaccataaggagagcaa

SEQ ID NO: 1365981 - DNA, 25 bp, Homo sapien
gatgttcccgcagagattttccact

SEQ ID NO: 1365982 - DNA, 25 bp, Homo sapien
ttcgctgctcggcttcctctctgtg

SEQ ID NO: 1365983 - DNA, 25 bp, Homo sapien
tgtgcttcacgcattttaccactgg

SEQ ID NO: 1365984 - DNA, 25 bp, Homo sapien
taccactggcatgcaatccactgaa

SEQ ID NO: 1365985 - DNA, 25 bp, Homo sapien
gcacacttgatctcttcctgttgaa

SEQ ID NO: 1365986 - DNA, 25 bp, Homo sapien
tggaaatggaaatccctggcctcct

SEQ ID NO: 1365987 - DNA, 25 bp, Homo sapien
cacaaatggtcgcatacgaaccacc

SEQ ID NO: 1365988 - DNA, 25 bp, Homo sapien
tacttgatatgctgtgaaactcccc

SEQ ID NO: 1365989 - DNA, 25 bp, Homo sapien
agccagtttgaaaccatcagccaag

SEQ ID NO: 1365990 - DNA, 25 bp, Homo sapien
aacacttgtaaagcacgtctgtacc

SEQ ID NO: 1365991 - DNA, 25 bp, Homo sapien
gcaccaacccagacatagctctatt

SEQ ID NO: 1365992 - DNA, 25 bp, Homo sapien
taccagtgatcgtataagtcagagg

SEQ ID NO: 1365993 - DNA, 25 bp, Homo sapien
gaacagagaataggacaccactacc

SEQ ID NO: 1365994 - DNA, 25 bp, Homo sapien
ctggaggagagtagtttgcaaatgt

SEQ ID NO: 1365995 - DNA, 25 bp, Homo sapien
ggacaccactaccagaatcagctct

SEQ ID NO: 1365996 - DNA, 25 bp, Homo sapien
aatcagctctactggaggagagtag

SEQ ID NO: 1365997 - DNA, 25 bp, Homo sapien
agtaccccgcacagactcgagcttt

SEQ ID NO: 1365998 - DNA, 25 bp, Homo sapien
cacagactcgagctttctcgtggct

SEQ ID NO: 1365999 - DNA, 25 bp, Homo sapien
cagactcgagctttctcgtggctgc

SEQ ID NO: 1366000 - DNA, 25 bp, Homo sapien
ccgcacagactcgagctttctcgtg

SEQ ID NO: 1366001 - DNA, 25 bp, Homo sapien
gactttcaaagacaccagttgaaga

SEQ ID NO: 1366002 - DNA, 25 bp, Homo sapien
ttctctctgccatagtgaatggact

SEQ ID NO: 1366003 - DNA, 25 bp, Homo sapien
tagtgaatggactttcaaagacacc

SEQ ID NO: 1366004 - DNA, 25 bp, Homo sapien
ggagtttctggtattacctcacttc

SEQ ID NO: 1366005 - DNA, 25 bp, Homo sapien
tgcaacctgggctagctaaagtgat

SEQ ID NO: 1366006 - DNA, 25 bp, Homo sapien
gaagactgcaacctgggctagctaa

SEQ ID NO: 1366007 - DNA, 25 bp, Homo sapien
ggcatggaagactgcaacctgggct

SEQ ID NO: 1366008 - DNA, 25 bp, Homo sapien
ttgatgggcatggaagactgcaacc

SEQ ID NO: 1366009 - DNA, 25 bp, Homo sapien
taggtggatcagacctggatgcctt

SEQ ID NO: 1366010 - DNA, 25 bp, Homo sapien
ccttggtagagaaagctggcatggc

SEQ ID NO: 1366011 - DNA, 25 bp, Homo sapien
ttatgtgagtggtttaggtggatca

SEQ ID NO: 1366012 - DNA, 25 bp, Homo sapien
ctggcatggcattgagttgggtcct

SEQ ID NO: 1366013 - DNA, 25 bp, Homo sapien
ggctcctcatacctcttaacataga

SEQ ID NO: 1366014 - DNA, 25 bp, Homo sapien
ctgtaacccgagcaaatgtcacagg

SEQ ID NO: 1366015 - DNA, 25 bp, Homo sapien
aaggcctctgatccacaagtcacca

SEQ ID NO: 1366016 - DNA, 25 bp, Homo sapien
ttaacatagaacttgcagcagctcc

SEQ ID NO: 1366017 - DNA, 25 bp, Homo sapien
cagggcggatctcctgtggatcagt

SEQ ID NO: 1366018 - DNA, 25 bp, Homo sapien
ggagcttgcaagtgctggcatgtct

SEQ ID NO: 1366019 - DNA, 25 bp, Homo sapien
tggaatccaccctgtctcagatagg

SEQ ID NO: 1366020 - DNA, 25 bp, Homo sapien
tccaactgccgctgaactggcaggg

SEQ ID NO: 1366021 - DNA, 25 bp, Homo sapien
agcataattccagacatccctgtcc

SEQ ID NO: 1366022 - DNA, 25 bp, Homo sapien
gcataattccagacatccctgtcca

SEQ ID NO: 1366023 - DNA, 25 bp, Homo sapien
cagcataattccagacatccctgtc

SEQ ID NO: 1366024 - DNA, 25 bp, Homo sapien
cataattccagacatccctgtccag

SEQ ID NO: 1366025 - DNA, 25 bp, Homo sapien
aatcttcatagccagattagttggg

SEQ ID NO: 1366026 - DNA, 25 bp, Homo sapien
gaaaccacagatgagataaatcttc

SEQ ID NO: 1366027 - DNA, 25 bp, Homo sapien
tagccagattagttgggaaggaaga

SEQ ID NO: 1366028 - DNA, 25 bp, Homo sapien
tcatagccagattagttgggaagga

SEQ ID NO: 1366029 - DNA, 25 bp, Homo sapien
gaacatggcttgttaaacagctccc

SEQ ID NO: 1366030 - DNA, 25 bp, Homo sapien
acctggtgccaaattgataccaggg

SEQ ID NO: 1366031 - DNA, 25 bp, Homo sapien
acagctccctctactatatatcaaa

SEQ ID NO: 1366032 - DNA, 25 bp, Homo sapien
tctcccttatcaacaggatgaagaa

SEQ ID NO: 1366033 - DNA, 25 bp, Homo sapien
cttcagtggcttgggggagttcaat

SEQ ID NO: 1366034 - DNA, 25 bp, Homo sapien
aatcttcagtggcttgggggagttc

SEQ ID NO: 1366035 - DNA, 25 bp, Homo sapien
tcacaatatttggatctatattgcc

SEQ ID NO: 1366036 - DNA, 25 bp, Homo sapien
ctatattgccaaaatgaagaccctt

SEQ ID NO: 1366037 - DNA, 25 bp, Homo sapien
tggaactgaggataccaatgactcc

SEQ ID NO: 1366038 - DNA, 25 bp, Homo sapien
tgagatgaaggactgaacgtaccac

SEQ ID NO: 1366039 - DNA, 25 bp, Homo sapien
tactgtctgaaagtgaacgtggccc

SEQ ID NO: 1366040 - DNA, 25 bp, Homo sapien
cactgaagaacaacgaaaaggccca

SEQ ID NO: 1366041 - DNA, 25 bp, Homo sapien
taccgtggagtccatagcagggcca

SEQ ID NO: 1366042 - DNA, 25 bp, Homo sapien
ttagaagaacaacactgcacggatc

SEQ ID NO: 1366043 - DNA, 25 bp, Homo sapien
aactgaaatagcgttgcctctggca

SEQ ID NO: 1366044 - DNA, 25 bp, Homo sapien
tgctgacatagtacacaggcttggc

SEQ ID NO: 1366045 - DNA, 25 bp, Homo sapien
taaatagagtttcaatttgcctccc

SEQ ID NO: 1366046 - DNA, 25 bp, Homo sapien
caaaagagccctgcgcttactgcga

SEQ ID NO: 1366047 - DNA, 25 bp, Homo sapien
gaaccatttactgcctgattgtagg

SEQ ID NO: 1366048 - DNA, 25 bp, Homo sapien
gggaagcctatattgaacgtctcct

SEQ ID NO: 1366049 - DNA, 25 bp, Homo sapien
gctctgggagttcatatgctactgg

SEQ ID NO: 1366050 - DNA, 25 bp, Homo sapien
tactggtgctgattgccaacctgca

SEQ ID NO: 1366051 - DNA, 25 bp, Homo sapien
caacagccattagagtccaagggat

SEQ ID NO: 1366052 - DNA, 25 bp, Homo sapien
tcttagaggtgtcagtggcattcca

SEQ ID NO: 1366053 - DNA, 25 bp, Homo sapien
taaagtacagttcagtacattacgc

SEQ ID NO: 1366054 - DNA, 25 bp, Homo sapien
tacattacgcatatccacagtgttg

SEQ ID NO: 1366055 - DNA, 25 bp, Homo sapien
gttcagtacattacgcatatccaca

SEQ ID NO: 1366056 - DNA, 25 bp, Homo sapien
tacgcatatccacagtgttgtacaa

SEQ ID NO: 1366057 - DNA, 25 bp, Homo sapien
ggaacacatcgcagaagacacaagc

SEQ ID NO: 1366058 - DNA, 25 bp, Homo sapien
taatttacaggatcagctgcctccc

SEQ ID NO: 1366059 - DNA, 25 bp, Homo sapien
caaaaacatgtacgaagcaagcacc

SEQ ID NO: 1366060 - DNA, 25 bp, Homo sapien
tagagcccagggaagataagtgact

SEQ ID NO: 1366061 - DNA, 25 bp, Homo sapien
catttgtcttttcccactgcagcct

SEQ ID NO: 1366062 - DNA, 25 bp, Homo sapien
tattgcctcagctattaatgccagc

SEQ ID NO: 1366063 - DNA, 25 bp, Homo sapien
tgagagcttcctagttggcatctgc

SEQ ID NO: 1366064 - DNA, 25 bp, Homo sapien
aactgagaggagtgaagactaggca

SEQ ID NO: 1366065 - DNA, 25 bp, Homo sapien
taagggaaatgccatccggtaatgt

SEQ ID NO: 1366066 - DNA, 25 bp, Homo sapien
tgcattcattattacagggtcaggg

SEQ ID NO: 1366067 - DNA, 25 bp, Homo sapien
gcagtacttcggtattacagcgcca

SEQ ID NO: 1366068 - DNA, 25 bp, Homo sapien
taaatactagaaaggaatcagcaca

SEQ ID NO: 1366069 - DNA, 25 bp, Homo sapien
atggcatctgcttcacttctacctt

SEQ ID NO: 1366070 - DNA, 25 bp, Homo sapien
ggcatctgcttcacttctaccttta

SEQ ID NO: 1366071 - DNA, 25 bp, Homo sapien
tggcatctgcttcacttctaccttt

SEQ ID NO: 1366072 - DNA, 25 bp, Homo sapien
aatggcatctgcttcacttctacct

SEQ ID NO: 1366073 - DNA, 25 bp, Homo sapien
gatatgtccaaaaaactaaactgaa

SEQ ID NO: 1366074 - DNA, 25 bp, Homo sapien
tctttaaagtaccacagcacctttg

SEQ ID NO: 1366075 - DNA, 25 bp, Homo sapien
aaatatatttaccataggctgggcg

SEQ ID NO: 1366076 - DNA, 25 bp, Homo sapien
aaatacactgagcaaaggatatgtc

SEQ ID NO: 1366077 - DNA, 25 bp, Homo sapien
gaattcacaaatatgctccaggcag

SEQ ID NO: 1366078 - DNA, 25 bp, Homo sapien
ccagaattacatatagggcatgaca

SEQ ID NO: 1366079 - DNA, 25 bp, Homo sapien
taattatcacttggcctgcaaaagc

SEQ ID NO: 1366080 - DNA, 25 bp, Homo sapien
gaatgttgttctctaaaggctggac

SEQ ID NO: 1366081 - DNA, 25 bp, Homo sapien
tagatggttgattgcagataaaaat

SEQ ID NO: 1366082 - DNA, 25 bp, Homo sapien
tcatagatggttgattgcagataaa

SEQ ID NO: 1366083 - DNA, 25 bp, Homo sapien
cataaattgccaacactgccttttt

SEQ ID NO: 1366084 - DNA, 25 bp, Homo sapien
cagacataaattgccaacactgcct

SEQ ID NO: 1366085 - DNA, 25 bp, Homo sapien
ctgtttccactgcagtaaatgactg

SEQ ID NO: 1366086 - DNA, 25 bp, Homo sapien
gtttccactgcagtaaatgactgaa

SEQ ID NO: 1366087 - DNA, 25 bp, Homo sapien
tgtttccactgcagtaaatgactga

SEQ ID NO: 1366088 - DNA, 25 bp, Homo sapien
tactatcgggaagcgcattcttttc

SEQ ID NO: 1366089 - DNA, 25 bp, Homo sapien
tcagccattactatcgggaagcgca

SEQ ID NO: 1366090 - DNA, 25 bp, Homo sapien
tacataacatggcttttttaccagg

SEQ ID NO: 1366091 - DNA, 25 bp, Homo sapien
atggtttgtatagaagtgcttctac

SEQ ID NO: 1366092 - DNA, 25 bp, Homo sapien
tacgaatccggtcattgcataggtt

SEQ ID NO: 1366093 - DNA, 25 bp, Homo sapien
caacatgccaggctacgaatccggt

SEQ ID NO: 1366094 - DNA, 25 bp, Homo sapien
cagtcctggtaaatccattcccagg

SEQ ID NO: 1366095 - DNA, 25 bp, Homo sapien
gagccgataagcatgtacctccaga

SEQ ID NO: 1366096 - DNA, 25 bp, Homo sapien
tgcgtaatctaccaatccttaaaag

SEQ ID NO: 1366097 - DNA, 25 bp, Homo sapien
ttatggctgcgtaatctaccaatcc

SEQ ID NO: 1366098 - DNA, 25 bp, Homo sapien
taaaagagatgcacccacattttcc

SEQ ID NO: 1366099 - DNA, 25 bp, Homo sapien
catgtaggataatcacttccagcag

SEQ ID NO: 1366100 - DNA, 25 bp, Homo sapien
attctagcagctgttcccatactcc

SEQ ID NO: 1366101 - DNA, 25 bp, Homo sapien
caatgagtccagttaaacatttgcc

SEQ ID NO: 1366102 - DNA, 25 bp, Homo sapien
gttcccatactccaatgagtccagt

SEQ ID NO: 1366103 - DNA, 25 bp, Homo sapien
gctattattctagcagctgttccca

SEQ ID NO: 1366104 - DNA, 25 bp, Homo sapien
accaaaataagaaccagtcagtatt

SEQ ID NO: 1366105 - DNA, 25 bp, Homo sapien
ctaccaaaataagaaccagtcagta

SEQ ID NO: 1366106 - DNA, 25 bp, Homo sapien
taccaaaataagaaccagtcagtat

SEQ ID NO: 1366107 - DNA, 25 bp, Homo sapien
taaaagcaatggaactataattaat

SEQ ID NO: 1366108 - DNA, 25 bp, Homo sapien
ttaaaagcaatggaactataattaa

SEQ ID NO: 1366109 - DNA, 25 bp, Homo sapien
tgccaaagtcatcactatacagccg

SEQ ID NO: 1366110 - DNA, 25 bp, Homo sapien
cttgggtcatgtaaaggtggcctga

SEQ ID NO: 1366111 - DNA, 25 bp, Homo sapien
tacagccgaggtatgggtggtaacc

SEQ ID NO: 1366112 - DNA, 25 bp, Homo sapien
taaaggtggcctgaagactgccaga

SEQ ID NO: 1366113 - DNA, 25 bp, Homo sapien
gcataacaaaagcaatgcaggtgag

SEQ ID NO: 1366114 - DNA, 25 bp, Homo sapien
gcaggtgaggacagttgtggtgaac

SEQ ID NO: 1366115 - DNA, 25 bp, Homo sapien
cagcctcccctgtatataaacggca

SEQ ID NO: 1366116 - DNA, 25 bp, Homo sapien
tggtgaacatgagcatccgatgcac

SEQ ID NO: 1366117 - DNA, 25 bp, Homo sapien
cttttgaccaaactggcttgaagaa

SEQ ID NO: 1366118 - DNA, 25 bp, Homo sapien
aaccagtacacctatgctaacagta

SEQ ID NO: 1366119 - DNA, 25 bp, Homo sapien
tgctaacagtagtcatccatgccac

SEQ ID NO: 1366120 - DNA, 25 bp, Homo sapien
tgaagaaccgggcaaccagtacacc

SEQ ID NO: 1366121 - DNA, 25 bp, Homo sapien
tgctgagagtgcttgtaaattcgac

SEQ ID NO: 1366122 - DNA, 25 bp, Homo sapien
ggagagtctgtcacatcatattttt

SEQ ID NO: 1366123 - DNA, 25 bp, Homo sapien
tttcataggtaatcaaaggttgctg

SEQ ID NO: 1366124 - DNA, 25 bp, Homo sapien
tcagaaggagtacagaatgggatcc

SEQ ID NO: 1366125 - DNA, 25 bp, Homo sapien
gcaccatctgctagaaatatgtaat

SEQ ID NO: 1366126 - DNA, 25 bp, Homo sapien
taatagcttgtgtttagatcaaatc

SEQ ID NO: 1366127 - DNA, 25 bp, Homo sapien
ccaggaagggtaatgtttcttctga

SEQ ID NO: 1366128 - DNA, 25 bp, Homo sapien
catcattagctgcaccatctgctag

SEQ ID NO: 1366129 - DNA, 25 bp, Homo sapien
caccgtccgccaacctccaagccat

SEQ ID NO: 1366130 - DNA, 25 bp, Homo sapien
acaccgtccgccaacctccaagcca

SEQ ID NO: 1366131 - DNA, 25 bp, Homo sapien
cattacagggtgacttcgccccgtt

SEQ ID NO: 1366132 - DNA, 25 bp, Homo sapien
tgggaaggctggatgtacacagtct

SEQ ID NO: 1366133 - DNA, 25 bp, Homo sapien
cagtctgatcttcatgaatacacag

SEQ ID NO: 1366134 - DNA, 25 bp, Homo sapien
cctggagtccattacagggtgactt

SEQ ID NO: 1366135 - DNA, 25 bp, Homo sapien
caagaggactaatggcgggttacta

SEQ ID NO: 1366136 - DNA, 25 bp, Homo sapien
tgagggtctcgccatgtgttcccag

SEQ ID NO: 1366137 - DNA, 25 bp, Homo sapien
gaagtacctggagatcagtagcagt

SEQ ID NO: 1366138 - DNA, 25 bp, Homo sapien
tggtggagacacatcaaaagggcac

SEQ ID NO: 1366139 - DNA, 25 bp, Homo sapien
ttaccacttatgtaagtgagaggta

SEQ ID NO: 1366140 - DNA, 25 bp, Homo sapien
taccacttatgtaagtgagaggtac

SEQ ID NO: 1366141 - DNA, 25 bp, Homo sapien
gctcatttcaaccatcaccgattgg

SEQ ID NO: 1366142 - DNA, 25 bp, Homo sapien
cagttcaaaggactcctaatacaga

SEQ ID NO: 1366143 - DNA, 25 bp, Homo sapien
ttgttcccacaatctgaggcactga

SEQ ID NO: 1366144 - DNA, 25 bp, Homo sapien
catccactgatcatgagacaatgca

SEQ ID NO: 1366145 - DNA, 25 bp, Homo sapien
tgtgaaattataggaccaggaatct

SEQ ID NO: 1366146 - DNA, 25 bp, Homo sapien
aaaggtactactgtagctttaggtg

SEQ ID NO: 1366147 - DNA, 25 bp, Homo sapien
aaggaaatgcatttggttgtgaaat

SEQ ID NO: 1366148 - DNA, 25 bp, Homo sapien
gattttatacttctcaacaactgtg

SEQ ID NO: 1366149 - DNA, 25 bp, Homo sapien
tgtgtgatttggagcactgcttgga

SEQ ID NO: 1366150 - DNA, 25 bp, Homo sapien
tagatgcacttctgtgactcactgc

SEQ ID NO: 1366151 - DNA, 25 bp, Homo sapien
ttagatgcacttctgtgactcactg

SEQ ID NO: 1366152 - DNA, 25 bp, Homo sapien
actgtgtgtgatttggagcactgct

SEQ ID NO: 1366153 - DNA, 25 bp, Homo sapien
aaggagccaataggagggccattca

SEQ ID NO: 1366154 - DNA, 25 bp, Homo sapien
tatcttcacaggtcaaaagttgtga

SEQ ID NO: 1366155 - DNA, 25 bp, Homo sapien
gaaagcctttaaatggatgccctga

SEQ ID NO: 1366156 - DNA, 25 bp, Homo sapien
cattacgcgcttctaggagaaagcc

SEQ ID NO: 1366157 - DNA, 25 bp, Homo sapien
caaaccctcgtgacatggaatttac

SEQ ID NO: 1366158 - DNA, 25 bp, Homo sapien
tattaatagccattccgcaaagaga

SEQ ID NO: 1366159 - DNA, 25 bp, Homo sapien
gggcagtccataaggctaagttagt

SEQ ID NO: 1366160 - DNA, 25 bp, Homo sapien
cctactgtacagtgtgaactctaag

SEQ ID NO: 1366161 - DNA, 25 bp, Homo sapien
ttttccattgggataattagccaca

SEQ ID NO: 1366162 - DNA, 25 bp, Homo sapien
ccaagagtaaatccagaaactgcca

SEQ ID NO: 1366163 - DNA, 25 bp, Homo sapien
cagaagtatgcaggtaccaagagta

SEQ ID NO: 1366164 - DNA, 25 bp, Homo sapien
cagactgtggactatgaccatgttc

SEQ ID NO: 1366165 - DNA, 25 bp, Homo sapien
gtttcacccgaatttcaatctcagc

SEQ ID NO: 1366166 - DNA, 25 bp, Homo sapien
gaagtttcacccgaatttcaatctc

SEQ ID NO: 1366167 - DNA, 25 bp, Homo sapien
gatatgtgaagtttcacccgaattt

SEQ ID NO: 1366168 - DNA, 25 bp, Homo sapien
tgtgaagtttcacccgaatttcaat

SEQ ID NO: 1366169 - DNA, 25 bp, Homo sapien
caaaaacagtctattgtctgtgcct

SEQ ID NO: 1366170 - DNA, 25 bp, Homo sapien
gaaagaggaacttgtcattcagatg

SEQ ID NO: 1366171 - DNA, 25 bp, Homo sapien
ttcagatgttccaagacaaaatgag

SEQ ID NO: 1366172 - DNA, 25 bp, Homo sapien
gggaatagtcaagtatgcattggct

SEQ ID NO: 1366173 - DNA, 25 bp, Homo sapien
agtaccctcagaattactaggttgg

SEQ ID NO: 1366174 - DNA, 25 bp, Homo sapien
tcagaattactaggttggggcaaaa

SEQ ID NO: 1366175 - DNA, 25 bp, Homo sapien
tactaggttggggcaaaactctgcc

SEQ ID NO: 1366176 - DNA, 25 bp, Homo sapien
ccctcagaattactaggttggggca

SEQ ID NO: 1366177 - DNA, 25 bp, Homo sapien
gccagtaggaaagacttctgaaaaa

SEQ ID NO: 1366178 - DNA, 25 bp, Homo sapien
tggccagtaggaaagacttctgaaa

SEQ ID NO: 1366179 - DNA, 25 bp, Homo sapien
caatgcgcctggccagtaggaaaga

SEQ ID NO: 1366180 - DNA, 25 bp, Homo sapien
gcgcctggccagtaggaaagacttc

SEQ ID NO: 1366181 - DNA, 25 bp, Homo sapien
cctccacgtatcagactcaagcaat

SEQ ID NO: 1366182 - DNA, 25 bp, Homo sapien
tacaacctccacgtatcagactcaa

SEQ ID NO: 1366183 - DNA, 25 bp, Homo sapien
acaacctccacgtatcagactcaag

SEQ ID NO: 1366184 - DNA, 25 bp, Homo sapien
ctacaacctccacgtatcagactca

SEQ ID NO: 1366185 - DNA, 25 bp, Homo sapien
tccacagaaactccataagcgttag

SEQ ID NO: 1366186 - DNA, 25 bp, Homo sapien
tactaagggcttacaacacatcatg

SEQ ID NO: 1366187 - DNA, 25 bp, Homo sapien
tcagaacaacctagggaactatggg

SEQ ID NO: 1366188 - DNA, 25 bp, Homo sapien
tcagacccttaaggctgacacagta

SEQ ID NO: 1366189 - DNA, 25 bp, Homo sapien
ttctgcctggccgactgccctggtc

SEQ ID NO: 1366190 - DNA, 25 bp, Homo sapien
catagtttcggaatacagcacccgt

SEQ ID NO: 1366191 - DNA, 25 bp, Homo sapien
cagtctgtcgctaagctggatttga

SEQ ID NO: 1366192 - DNA, 25 bp, Homo sapien
cctggtcagcacaggcactcgctct

SEQ ID NO: 1366193 - DNA, 25 bp, Homo sapien
cattaaggaaaaagacgtgacactt

SEQ ID NO: 1366194 - DNA, 25 bp, Homo sapien
ctttgacattaaggaaaaagacgtg

SEQ ID NO: 1366195 - DNA, 25 bp, Homo sapien
gacattaaggaaaaagacgtgacac

SEQ ID NO: 1366196 - DNA, 25 bp, Homo sapien
tgacattaaggaaaaagacgtgaca

SEQ ID NO: 1366197 - DNA, 25 bp, Homo sapien
tctttgtccaatacccaagagtgta

SEQ ID NO: 1366198 - DNA, 25 bp, Homo sapien
tggataagcacacgtactctcacag

SEQ ID NO: 1366199 - DNA, 25 bp, Homo sapien
cgtactctcacagcttcaattatca

SEQ ID NO: 1366200 - DNA, 25 bp, Homo sapien
tatgttttatgaaggtgagttcagt

SEQ ID NO: 1366201 - DNA, 25 bp, Homo sapien
tcaccaggatggattcagtacccag

SEQ ID NO: 1366202 - DNA, 25 bp, Homo sapien
cagtacccagggtgcatgcatgaag

SEQ ID NO: 1366203 - DNA, 25 bp, Homo sapien
ttgaaggactgagtgtcacagacag

SEQ ID NO: 1366204 - DNA, 25 bp, Homo sapien
cattctctgggctacacgagtgtgc

SEQ ID NO: 1366205 - DNA, 25 bp, Homo sapien
aacagcagggttgagtactgatcac

SEQ ID NO: 1366206 - DNA, 25 bp, Homo sapien
ggttgagtactgatcacaccagtta

SEQ ID NO: 1366207 - DNA, 25 bp, Homo sapien
cagcagggttgagtactgatcacac

SEQ ID NO: 1366208 - DNA, 25 bp, Homo sapien
cagggttgagtactgatcacaccag

SEQ ID NO: 1366209 - DNA, 25 bp, Homo sapien
gactgtcaaattcgaaaattgccaa

SEQ ID NO: 1366210 - DNA, 25 bp, Homo sapien
atcacacctttgataaacctcactg

SEQ ID NO: 1366211 - DNA, 25 bp, Homo sapien
actggctacgatactatgatactgc

SEQ ID NO: 1366212 - DNA, 25 bp, Homo sapien
ttgccaatgccgactctatttttag

SEQ ID NO: 1366213 - DNA, 25 bp, Homo sapien
agttgagtttaagcacagcttcttc

SEQ ID NO: 1366214 - DNA, 25 bp, Homo sapien
ttggaagttgagtttaagcacagct

SEQ ID NO: 1366215 - DNA, 25 bp, Homo sapien
tgaagaataattcctggttctaggt

SEQ ID NO: 1366216 - DNA, 25 bp, Homo sapien
cagcttcttcaaccagttgaagaat

SEQ ID NO: 1366217 - DNA, 25 bp, Homo sapien
ggagaattaaagatatgtgatcagc

SEQ ID NO: 1366218 - DNA, 25 bp, Homo sapien
gatatgtgatcagcagatgaaggtc

SEQ ID NO: 1366219 - DNA, 25 bp, Homo sapien
ttgtactccgtccagcagggagaat

SEQ ID NO: 1366220 - DNA, 25 bp, Homo sapien
aagtggtgccacttaaggctactac

SEQ ID NO: 1366221 - DNA, 25 bp, Homo sapien
tgcctacttatgtcagcctggatgc

SEQ ID NO: 1366222 - DNA, 25 bp, Homo sapien
gcttccattcaactaaaagtggtgc

SEQ ID NO: 1366223 - DNA, 25 bp, Homo sapien
gatccaagctctgcctgaaatgaag

SEQ ID NO: 1366224 - DNA, 25 bp, Homo sapien
gctgggtctgtacggaattacacat

SEQ ID NO: 1366225 - DNA, 25 bp, Homo sapien
agaagaatcaagctgggtctgtacg

SEQ ID NO: 1366226 - DNA, 25 bp, Homo sapien
tcaagctgggtctgtacggaattac

SEQ ID NO: 1366227 - DNA, 25 bp, Homo sapien
gaaattggagaagcttttaagaata

SEQ ID NO: 1366228 - DNA, 25 bp, Homo sapien
caagtactatggaacattaaaagta

SEQ ID NO: 1366229 - DNA, 25 bp, Homo sapien
tatactcgtagaagataaatttact

SEQ ID NO: 1366230 - DNA, 25 bp, Homo sapien
gcagtggcctgatctattttttgta

SEQ ID NO: 1366231 - DNA, 25 bp, Homo sapien
gtagtagaaacacgtgttgatatac

SEQ ID NO: 1366232 - DNA, 25 bp, Homo sapien
ccagcttgggtggacaataccagac

SEQ ID NO: 1366233 - DNA, 25 bp, Homo sapien
ttgggtggacaataccagacgctgt

SEQ ID NO: 1366234 - DNA, 25 bp, Homo sapien
gtgtggttatgtgagcttgtagtcc

SEQ ID NO: 1366235 - DNA, 25 bp, Homo sapien
tgtggttatgtgagcttgtagtccc

SEQ ID NO: 1366236 - DNA, 25 bp, Homo sapien
catacttgagtgatgctggataagg

SEQ ID NO: 1366237 - DNA, 25 bp, Homo sapien
taatcgctgacagttaaatgtgacc

SEQ ID NO: 1366238 - DNA, 25 bp, Homo sapien
tgaactactgtgtctagtgggcaaa

SEQ ID NO: 1366239 - DNA, 25 bp, Homo sapien
tgactaaacgtttcggtagaatgct

SEQ ID NO: 1366240 - DNA, 25 bp, Homo sapien
tctgttagaaactatacacttctgg

SEQ ID NO: 1366241 - DNA, 25 bp, Homo sapien
tcaacttccaatgtataaatctgtt

SEQ ID NO: 1366242 - DNA, 25 bp, Homo sapien
taaatctgttagaaactatacactt

SEQ ID NO: 1366243 - DNA, 25 bp, Homo sapien
gaaattaggagcaaaatcaacttcc

SEQ ID NO: 1366244 - DNA, 25 bp, Homo sapien
gaagccagggatgtagccaatttca

SEQ ID NO: 1366245 - DNA, 25 bp, Homo sapien
tctacataggcgagaaggaagccag

SEQ ID NO: 1366246 - DNA, 25 bp, Homo sapien
ggcccttagaagaacagatgatcgt

SEQ ID NO: 1366247 - DNA, 25 bp, Homo sapien
tcactggtggatgaaactcctggaa

SEQ ID NO: 1366248 - DNA, 25 bp, Homo sapien
cagtggtatgaccttaaagttttca

SEQ ID NO: 1366249 - DNA, 25 bp, Homo sapien
agtggtatgaccttaaagttttcag

SEQ ID NO: 1366250 - DNA, 25 bp, Homo sapien
tggtgatgagtcctggagtccttca

SEQ ID NO: 1366251 - DNA, 25 bp, Homo sapien
ttgtaggaagtcattggtctttagc

SEQ ID NO: 1366252 - DNA, 25 bp, Homo sapien
atggtctgctatggtgatgagtcct

SEQ ID NO: 1366253 - DNA, 25 bp, Homo sapien
agtccttcaagatttgtaggaagtc

SEQ ID NO: 1366254 - DNA, 25 bp, Homo sapien
gggaggtgaaaggtacttgcttaca

SEQ ID NO: 1366255 - DNA, 25 bp, Homo sapien
tggcgggaggtgaaaggtacttgct

SEQ ID NO: 1366256 - DNA, 25 bp, Homo sapien
catggcgggaggtgaaaggtacttg

SEQ ID NO: 1366257 - DNA, 25 bp, Homo sapien
aggtgaaaggtacttgcttacatgg

SEQ ID NO: 1366258 - DNA, 25 bp, Homo sapien
ttatttgataatccagctgaacctg

SEQ ID NO: 1366259 - DNA, 25 bp, Homo sapien
ggcaccaatagatgtgcttgaggca

SEQ ID NO: 1366260 - DNA, 25 bp, Homo sapien
taaaacgaggcatgctgttatcatc

SEQ ID NO: 1366261 - DNA, 25 bp, Homo sapien
atagcagccctgagttaacaaaaag

SEQ ID NO: 1366262 - DNA, 25 bp, Homo sapien
ggttgatgacactaggcccattggt

SEQ ID NO: 1366263 - DNA, 25 bp, Homo sapien
atctgtttcgcgctcctaggagagg

SEQ ID NO: 1366264 - DNA, 25 bp, Homo sapien
tctcaagatctcagtcagggtgggt

SEQ ID NO: 1366265 - DNA, 25 bp, Homo sapien
tcataactctgcaatcctctgggcc

SEQ ID NO: 1366266 - DNA, 25 bp, Homo sapien
gaattttggtctttcagactaccag

SEQ ID NO: 1366267 - DNA, 25 bp, Homo sapien
ggacctcgttatctatcttctacag

SEQ ID NO: 1366268 - DNA, 25 bp, Homo sapien
ggttctaacaatgcgttattccaga

SEQ ID NO: 1366269 - DNA, 25 bp, Homo sapien
caatgttcgccaacctaaaatacgt

SEQ ID NO: 1366270 - DNA, 25 bp, Homo sapien
tttgtttttaatcaatgcaatttat

SEQ ID NO: 1366271 - DNA, 25 bp, Homo sapien
tttaatcaatgcaatttatttagtt

SEQ ID NO: 1366272 - DNA, 25 bp, Homo sapien
tgtttttaatcaatgcaatttattt

SEQ ID NO: 1366273 - DNA, 25 bp, Homo sapien
tttttaatcaatgcaatttatttag

SEQ ID NO: 1366274 - DNA, 25 bp, Homo sapien
tccatcagggatctatactcttcag

SEQ ID NO: 1366275 - DNA, 25 bp, Homo sapien
acctatggaaacacttaaacttgct

SEQ ID NO: 1366276 - DNA, 25 bp, Homo sapien
tcgagtactacatgatgaaattctt

SEQ ID NO: 1366277 - DNA, 25 bp, Homo sapien
cagaataatttactgtatgtggcac

SEQ ID NO: 1366278 - DNA, 25 bp, Homo sapien
tgaatttgtttgtcatccttatgca

SEQ ID NO: 1366279 - DNA, 25 bp, Homo sapien
aattccaattttagtatgtttgctg

SEQ ID NO: 1366280 - DNA, 25 bp, Homo sapien
ggggccatgctaatcttctctgtgt

SEQ ID NO: 1366281 - DNA, 25 bp, Homo sapien
ttagtatgtttgctgctgaagcaag

SEQ ID NO: 1366282 - DNA, 25 bp, Homo sapien
tttctatcggcttcacaataccatt

SEQ ID NO: 1366283 - DNA, 25 bp, Homo sapien
ttcataggaatcttttctgtgagac

SEQ ID NO: 1366284 - DNA, 25 bp, Homo sapien
acattctaattagggaaataagaca

SEQ ID NO: 1366285 - DNA, 25 bp, Homo sapien
catttgagattattagccactccct

SEQ ID NO: 1366286 - DNA, 25 bp, Homo sapien
cgcgcccggcccggatacttctatt

SEQ ID NO: 1366287 - DNA, 25 bp, Homo sapien
gagaggtagccaaattttgaattcc

SEQ ID NO: 1366288 - DNA, 25 bp, Homo sapien
tccaaggctgctcggaagatttttt

SEQ ID NO: 1366289 - DNA, 25 bp, Homo sapien
taaacagcgctatgactttaaatcc

SEQ ID NO: 1366290 - DNA, 25 bp, Homo sapien
tattcttccctgatcacatgagtgg

SEQ ID NO: 1366291 - DNA, 25 bp, Homo sapien
agtattttactgtctgggcacagtg

SEQ ID NO: 1366292 - DNA, 25 bp, Homo sapien
gaagtattttactgtctgggcacag

SEQ ID NO: 1366293 - DNA, 25 bp, Homo sapien
aagtattttactgtctgggcacagt

SEQ ID NO: 1366294 - DNA, 25 bp, Homo sapien
tgttgggtacccttgcctaacgtga

SEQ ID NO: 1366295 - DNA, 25 bp, Homo sapien
aagcaaactttctggatgcccaaca

SEQ ID NO: 1366296 - DNA, 25 bp, Homo sapien
gcaggtctcatcaattccatccaaa

SEQ ID NO: 1366297 - DNA, 25 bp, Homo sapien
cctaacgtgaactggcagtgttacc

SEQ ID NO: 1366298 - DNA, 25 bp, Homo sapien
caattttattagacaggcataattt

SEQ ID NO: 1366299 - DNA, 25 bp, Homo sapien
aaagtaatcatacatgagaaggtag

SEQ ID NO: 1366300 - DNA, 25 bp, Homo sapien
ggagattgggctatgtagtttataa

SEQ ID NO: 1366301 - DNA, 25 bp, Homo sapien
gaaggtagacctgtgccctaggatc

SEQ ID NO: 1366302 - DNA, 25 bp, Homo sapien
tctggagggtgttcctgtaattcac

SEQ ID NO: 1366303 - DNA, 25 bp, Homo sapien
taaagtagttataggagcagagaac

SEQ ID NO: 1366304 - DNA, 25 bp, Homo sapien
ctttatcaaaatctggtcctatgtg

SEQ ID NO: 1366305 - DNA, 25 bp, Homo sapien
aattcacaactgtagacacatgggc

SEQ ID NO: 1366306 - DNA, 25 bp, Homo sapien
tttagtcctatctctactgctgaag

SEQ ID NO: 1366307 - DNA, 25 bp, Homo sapien
ttctttggcaacctctcatgaaaag

SEQ ID NO: 1366308 - DNA, 25 bp, Homo sapien
taataacagcctaacagattttttg

SEQ ID NO: 1366309 - DNA, 25 bp, Homo sapien
tctaggctagcctcaaggttaagta

SEQ ID NO: 1366310 - DNA, 25 bp, Homo sapien
gccaaaggcttgaccaaggttggag

SEQ ID NO: 1366311 - DNA, 25 bp, Homo sapien
ccaaagcttagtggcttacaccaag

SEQ ID NO: 1366312 - DNA, 25 bp, Homo sapien
ccgtggcatttggtaggaggctaca

SEQ ID NO: 1366313 - DNA, 25 bp, Homo sapien
gagtggctaagctaggtggtcctac

SEQ ID NO: 1366314 - DNA, 25 bp, Homo sapien
tacaaatctgtctggtagaccatca

SEQ ID NO: 1366315 - DNA, 25 bp, Homo sapien
cattagctttcctaatgcgccagcg

SEQ ID NO: 1366316 - DNA, 25 bp, Homo sapien
ttggaacttcctcagatgatgcaag

SEQ ID NO: 1366317 - DNA, 25 bp, Homo sapien
tcaaagtggactatgttaagcacag

SEQ ID NO: 1366318 - DNA, 25 bp, Homo sapien
attccagcggttctcttgctgccca

SEQ ID NO: 1366319 - DNA, 25 bp, Homo sapien
tgatgcattccagcggttctcttgc

SEQ ID NO: 1366320 - DNA, 25 bp, Homo sapien
atttgatgcattccagcggttctct

SEQ ID NO: 1366321 - DNA, 25 bp, Homo sapien
tgcattccagcggttctcttgctgc

SEQ ID NO: 1366322 - DNA, 25 bp, Homo sapien
gggactgacacatttaatataggat

SEQ ID NO: 1366323 - DNA, 25 bp, Homo sapien
tgatgtcagtgaccctggctggcca

SEQ ID NO: 1366324 - DNA, 25 bp, Homo sapien
catctagtgatggtatcttggtgga

SEQ ID NO: 1366325 - DNA, 25 bp, Homo sapien
gcagcgtttatagcagtccttggca

SEQ ID NO: 1366326 - DNA, 25 bp, Homo sapien
tgtatctgcatgaactccgtgggaa

SEQ ID NO: 1366327 - DNA, 25 bp, Homo sapien
caatttaagcttaaggtccagcagt

SEQ ID NO: 1366328 - DNA, 25 bp, Homo sapien
tcataatacacaagcgccaggagag

SEQ ID NO: 1366329 - DNA, 25 bp, Homo sapien
gatttttctatcagcacccaggtct

SEQ ID NO: 1366330 - DNA, 25 bp, Homo sapien
ccctagaggagagctttatacaatt

SEQ ID NO: 1366331 - DNA, 25 bp, Homo sapien
tagagcctgtaatctaaatgctggc

SEQ ID NO: 1366332 - DNA, 25 bp, Homo sapien
aatgctggctcaaatttattcccca

SEQ ID NO: 1366333 - DNA, 25 bp, Homo sapien
aaagctggtagccttgaaaatgtca

SEQ ID NO: 1366334 - DNA, 25 bp, Homo sapien
gcagtatgcgttttgaagtacttga

SEQ ID NO: 1366335 - DNA, 25 bp, Homo sapien
tttccctcactaaaaaatgctcttc

SEQ ID NO: 1366336 - DNA, 25 bp, Homo sapien
cagtaacaaatcaaagcattattca

SEQ ID NO: 1366337 - DNA, 25 bp, Homo sapien
aacaaaaatgcagtatgcgttttga

SEQ ID NO: 1366338 - DNA, 25 bp, Homo sapien
taaagaattagcacacttggaagtc

SEQ ID NO: 1366339 - DNA, 25 bp, Homo sapien
taaagacacttgcaattgccaatag

SEQ ID NO: 1366340 - DNA, 25 bp, Homo sapien
tgtatgtcatgcatcccatccaaaa

SEQ ID NO: 1366341 - DNA, 25 bp, Homo sapien
taaaaaagagagctacctgtatgtc

SEQ ID NO: 1366342 - DNA, 25 bp, Homo sapien
gactctttagagaatgctaccaggt

SEQ ID NO: 1366343 - DNA, 25 bp, Homo sapien
caaaagcacttaatctggtcacata

SEQ ID NO: 1366344 - DNA, 25 bp, Homo sapien
gtccactgatacagatttaactgca

SEQ ID NO: 1366345 - DNA, 25 bp, Homo sapien
aaatgaggccctatgattctaggtg

SEQ ID NO: 1366346 - DNA, 25 bp, Homo sapien
caatctttaccaatccccaagtaca

SEQ ID NO: 1366347 - DNA, 25 bp, Homo sapien
tcaaggaaaatacgctatgaaggct

SEQ ID NO: 1366348 - DNA, 25 bp, Homo sapien
tattctttggttgcatactatgagg

SEQ ID NO: 1366349 - DNA, 25 bp, Homo sapien
agtatccagtctttaacagctcaag

SEQ ID NO: 1366350 - DNA, 25 bp, Homo sapien
gggtttggaagatgtatgtaatgct

SEQ ID NO: 1366351 - DNA, 25 bp, Homo sapien
tggtaactgcccagggaaataggct

SEQ ID NO: 1366352 - DNA, 25 bp, Homo sapien
ttggaagatgtatgtaatgctccta

SEQ ID NO: 1366353 - DNA, 25 bp, Homo sapien
aactgcccagggaaataggctgaag

SEQ ID NO: 1366354 - DNA, 25 bp, Homo sapien
cgcgtaaaggaatgctatcttccct

SEQ ID NO: 1366355 - DNA, 25 bp, Homo sapien
taaataggttctggctgagtccgcg

SEQ ID NO: 1366356 - DNA, 25 bp, Homo sapien
ctgaattactaaataggttctggct

SEQ ID NO: 1366357 - DNA, 25 bp, Homo sapien
gctgagtccgcgtaaaggaatgcta

SEQ ID NO: 1366358 - DNA, 25 bp, Homo sapien
taatagttgctcctgactgaacatc

SEQ ID NO: 1366359 - DNA, 25 bp, Homo sapien
tttccttatcagttgagcaaggcat

SEQ ID NO: 1366360 - DNA, 25 bp, Homo sapien
tcagttgagcaaggcatactaatag

SEQ ID NO: 1366361 - DNA, 25 bp, Homo sapien
gaacatctcctagtgatgcatttgg

SEQ ID NO: 1366362 - DNA, 25 bp, Homo sapien
taattggagtaccaaggaggaacac

SEQ ID NO: 1366363 - DNA, 25 bp, Homo sapien
tccaggcaacaacggaataacatct

SEQ ID NO: 1366364 - DNA, 25 bp, Homo sapien
gtctccctgggaaagtatcatgtaa

SEQ ID NO: 1366365 - DNA, 25 bp, Homo sapien
taaacatgactactgacatcttgcc

SEQ ID NO: 1366366 - DNA, 25 bp, Homo sapien
tatttaagccagaatgtcagaatgg

SEQ ID NO: 1366367 - DNA, 25 bp, Homo sapien
taaatactaggcataagagagccag

SEQ ID NO: 1366368 - DNA, 25 bp, Homo sapien
aactcctaagcgtcaaagagaggga

SEQ ID NO: 1366369 - DNA, 25 bp, Homo sapien
aataaaatgcacaaaactaactgga

SEQ ID NO: 1366370 - DNA, 25 bp, Homo sapien
gagtagcccagacctaatttgatag

SEQ ID NO: 1366371 - DNA, 25 bp, Homo sapien
gactggtctgggtggattaaactat

SEQ ID NO: 1366372 - DNA, 25 bp, Homo sapien
tgaagtcagaaatcctagccaggcc

SEQ ID NO: 1366373 - DNA, 25 bp, Homo sapien
ctttaaattctagcaatggactcca

SEQ ID NO: 1366374 - DNA, 25 bp, Homo sapien
gagggaaggtattctggaatgcaaa

SEQ ID NO: 1366375 - DNA, 25 bp, Homo sapien
gagacaggataaccaatcccacagg

SEQ ID NO: 1366376 - DNA, 25 bp, Homo sapien
gataaccaatcccacaggttgggta

SEQ ID NO: 1366377 - DNA, 25 bp, Homo sapien
tttttggcagatatcgaatgaggga

SEQ ID NO: 1366378 - DNA, 25 bp, Homo sapien
ttcaggttaggagaaattccacttc

SEQ ID NO: 1366379 - DNA, 25 bp, Homo sapien
caggcggagtagtagaaggtcccaa

SEQ ID NO: 1366380 - DNA, 25 bp, Homo sapien
tgctggaatgtgcaggcggagtagt

SEQ ID NO: 1366381 - DNA, 25 bp, Homo sapien
gaaggtcccaatacatcttgctttc

SEQ ID NO: 1366382 - DNA, 25 bp, Homo sapien
ttaactgtagcttctaattgttctt

SEQ ID NO: 1366383 - DNA, 25 bp, Homo sapien
tctttaattcgaagagactgtccaa

SEQ ID NO: 1366384 - DNA, 25 bp, Homo sapien
ctcttgctctttaattcgaagagac

SEQ ID NO: 1366385 - DNA, 25 bp, Homo sapien
cagatccccttgtaacttcttgata

SEQ ID NO: 1366386 - DNA, 25 bp, Homo sapien
tgctgaatagtaactgtattcttca

SEQ ID NO: 1366387 - DNA, 25 bp, Homo sapien
gaagttctgcagataatgattttat

SEQ ID NO: 1366388 - DNA, 25 bp, Homo sapien
caagctttcctagttgtacttgatt

SEQ ID NO: 1366389 - DNA, 25 bp, Homo sapien
gttgtacttgatttttctcaccatt

SEQ ID NO: 1366390 - DNA, 25 bp, Homo sapien
atgattttattgtagcttcaagctt

SEQ ID NO: 1366391 - DNA, 25 bp, Homo sapien
gtgtttacttataaatatgattatc

SEQ ID NO: 1366392 - DNA, 25 bp, Homo sapien
aattagggcatttgtgtttacttat

SEQ ID NO: 1366393 - DNA, 25 bp, Homo sapien
catgaataattagggcatttgtgtt

SEQ ID NO: 1366394 - DNA, 25 bp, Homo sapien
aaaacatgaataattagggcatttg

SEQ ID NO: 1366395 - DNA, 25 bp, Homo sapien
gatttcctgttctaaaactgccact

SEQ ID NO: 1366396 - DNA, 25 bp, Homo sapien
tttctcgtggcattcaacatctagt

SEQ ID NO: 1366397 - DNA, 25 bp, Homo sapien
gacttcttgcttagtccgctgtagc

SEQ ID NO: 1366398 - DNA, 25 bp, Homo sapien
tgttcttaaaacaagctggtcctta

SEQ ID NO: 1366399 - DNA, 25 bp, Homo sapien
tattagccgcttctaactcagacag

SEQ ID NO: 1366400 - DNA, 25 bp, Homo sapien
gatgttttgttgatggaggatttct

SEQ ID NO: 1366401 - DNA, 25 bp, Homo sapien
gacagtctgttttgtagctggtgga

SEQ ID NO: 1366402 - DNA, 25 bp, Homo sapien
tttgctttaagttctctaatagtgg

SEQ ID NO: 1366403 - DNA, 25 bp, Homo sapien
tgataaaggtagtaccaggcacagt

SEQ ID NO: 1366404 - DNA, 25 bp, Homo sapien
taaaaatctgtaaagtccctagcca

SEQ ID NO: 1366405 - DNA, 25 bp, Homo sapien
tcttaacaacagtccaaagacaagc

SEQ ID NO: 1366406 - DNA, 25 bp, Homo sapien
gacaagcccaagtacataaagaaat

SEQ ID NO: 1366407 - DNA, 25 bp, Homo sapien
cccattcattccgtaacttatctaa

SEQ ID NO: 1366408 - DNA, 25 bp, Homo sapien
tgtcaaggctgctgtatgtgacgcc

SEQ ID NO: 1366409 - DNA, 25 bp, Homo sapien
gagaatgcttgtttgtcaaggctgc

SEQ ID NO: 1366410 - DNA, 25 bp, Homo sapien
tatgtgacgcccattcattccgtaa

SEQ ID NO: 1366411 - DNA, 25 bp, Homo sapien
ctttcgtgtaaagtccagttgctta

SEQ ID NO: 1366412 - DNA, 25 bp, Homo sapien
aaagtccagttgcttagtagcatca

SEQ ID NO: 1366413 - DNA, 25 bp, Homo sapien
catctagtgattgcatcaatgataa

SEQ ID NO: 1366414 - DNA, 25 bp, Homo sapien
gcttagtagcatcatctagtgattg

SEQ ID NO: 1366415 - DNA, 25 bp, Homo sapien
aagatgcttaaaaggatttgtctct

SEQ ID NO: 1366416 - DNA, 25 bp, Homo sapien
taaaaggatttgtctctaccacatt

SEQ ID NO: 1366417 - DNA, 25 bp, Homo sapien
caaacagcctgcgagaaatttcttt

SEQ ID NO: 1366418 - DNA, 25 bp, Homo sapien
tgcaggtgagttatccaaaatagct

SEQ ID NO: 1366419 - DNA, 25 bp, Homo sapien
ttttgtgggaaagctaagaagtcta

SEQ ID NO: 1366420 - DNA, 25 bp, Homo sapien
tctttggcatgttcttgagtacatt

SEQ ID NO: 1366421 - DNA, 25 bp, Homo sapien
catgttcttgagtacattgctgaag

SEQ ID NO: 1366422 - DNA, 25 bp, Homo sapien
ggaaagctaagaagtctaccagaag

SEQ ID NO: 1366423 - DNA, 25 bp, Homo sapien
tagcccaatattcccaaagtaacta

SEQ ID NO: 1366424 - DNA, 25 bp, Homo sapien
ttataattagcatcctgaaggattc

SEQ ID NO: 1366425 - DNA, 25 bp, Homo sapien
gagaacagtaccaataaaacttaga

SEQ ID NO: 1366426 - DNA, 25 bp, Homo sapien
tcaagaactaagctaaggaactctg

SEQ ID NO: 1366427 - DNA, 25 bp, Homo sapien
aaaaatggatccgtgtcatcagtca

SEQ ID NO: 1366428 - DNA, 25 bp, Homo sapien
tccgtgtcatcagtcagacgaataa

SEQ ID NO: 1366429 - DNA, 25 bp, Homo sapien
taaaaaaaatggatccgtgtcatca

SEQ ID NO: 1366430 - DNA, 25 bp, Homo sapien
catcagtcagacgaataactaagtc

SEQ ID NO: 1366431 - DNA, 25 bp, Homo sapien
aatgctcattcttatacttactctc

SEQ ID NO: 1366432 - DNA, 25 bp, Homo sapien
tgaactggattagaaactgattgta

SEQ ID NO: 1366433 - DNA, 25 bp, Homo sapien
tgtagttcaatgctcattcttatac

SEQ ID NO: 1366434 - DNA, 25 bp, Homo sapien
actgattgtagttcaatgctcattc

SEQ ID NO: 1366435 - DNA, 25 bp, Homo sapien
agatctccatatgcagctgctggtt

SEQ ID NO: 1366436 - DNA, 25 bp, Homo sapien
tctccatatgcagctgctggttttg

SEQ ID NO: 1366437 - DNA, 25 bp, Homo sapien
tatgcagctgctggttttgggacca

SEQ ID NO: 1366438 - DNA, 25 bp, Homo sapien
atgcagctgctggttttgggaccat

SEQ ID NO: 1366439 - DNA, 25 bp, Homo sapien
ggccgactcgacacctaggtgcaag

SEQ ID NO: 1366440 - DNA, 25 bp, Homo sapien
tctgggttccctatccgcttcctag

SEQ ID NO: 1366441 - DNA, 25 bp, Homo sapien
aggtggatcccacgggccagaaccg

SEQ ID NO: 1366442 - DNA, 25 bp, Homo sapien
tctgcaacggccgacttggtgagag

SEQ ID NO: 1366443 - DNA, 25 bp, Homo sapien
tgcatttcacctgcaacgggactag

SEQ ID NO: 1366444 - DNA, 25 bp, Homo sapien
agtctttgcatttcacctgcaacgg

SEQ ID NO: 1366445 - DNA, 25 bp, Homo sapien
cgggactagttggtggaacagcact

SEQ ID NO: 1366446 - DNA, 25 bp, Homo sapien
cctgcaacgggactagttggtggaa

SEQ ID NO: 1366447 - DNA, 25 bp, Homo sapien
tgcctcggctggtgtgcagaaaagc

SEQ ID NO: 1366448 - DNA, 25 bp, Homo sapien
tgagaggtccgggtcctgataaagt

SEQ ID NO: 1366449 - DNA, 25 bp, Homo sapien
ccggccctcgggattagcctgagag

SEQ ID NO: 1366450 - DNA, 25 bp, Homo sapien
ttgagtttggcgctcggcttctgcg

SEQ ID NO: 1366451 - DNA, 25 bp, Homo sapien
tttgtggtgaacacgctggagccgc

SEQ ID NO: 1366452 - DNA, 25 bp, Homo sapien
attttgtggtgaacacgctggagcc

SEQ ID NO: 1366453 - DNA, 25 bp, Homo sapien
tggtgaacacgctggagccgcggag

SEQ ID NO: 1366454 - DNA, 25 bp, Homo sapien
ttgtggtgaacacgctggagccgcg

SEQ ID NO: 1366455 - DNA, 25 bp, Homo sapien
tatagacccttgtttgtccaaagca

SEQ ID NO: 1366456 - DNA, 25 bp, Homo sapien
gatttcagacaccatatgtaggcct

SEQ ID NO: 1366457 - DNA, 25 bp, Homo sapien
gaagatgctcggaaaagaatcctgt

SEQ ID NO: 1366458 - DNA, 25 bp, Homo sapien
gaatcctgtgtcctttagatccaaa

SEQ ID NO: 1366459 - DNA, 25 bp, Homo sapien
cacagtatatgaagatcaactagca

SEQ ID NO: 1366460 - DNA, 25 bp, Homo sapien
tatgaagatcaactagcaaagcatt

SEQ ID NO: 1366461 - DNA, 25 bp, Homo sapien
tatatgaagatcaactagcaaagca

SEQ ID NO: 1366462 - DNA, 25 bp, Homo sapien
cagtatatgaagatcaactagcaaa

SEQ ID NO: 1366463 - DNA, 25 bp, Homo sapien
tctatattcaagatattaatgcagg

SEQ ID NO: 1366464 - DNA, 25 bp, Homo sapien
aatgcaggcttaagagatgaaacag

SEQ ID NO: 1366465 - DNA, 25 bp, Homo sapien
tgaaacagaaatacctgaacaatta

SEQ ID NO: 1366466 - DNA, 25 bp, Homo sapien
tatattcaagatattaatgcaggct

SEQ ID NO: 1366467 - DNA, 25 bp, Homo sapien
cttctctatctgaagagcagttgga

SEQ ID NO: 1366468 - DNA, 25 bp, Homo sapien
tcttctctatctgaagagcagttgg

SEQ ID NO: 1366469 - DNA, 25 bp, Homo sapien
ttcttctctatctgaagagcagttg

SEQ ID NO: 1366470 - DNA, 25 bp, Homo sapien
tacacgatgcacttaatgaccctaa

SEQ ID NO: 1366471 - DNA, 25 bp, Homo sapien
cctaaaaatggcgattctgcaacca

SEQ ID NO: 1366472 - DNA, 25 bp, Homo sapien
tacacttaaagatcatattatgtcc

SEQ ID NO: 1366473 - DNA, 25 bp, Homo sapien
tatgtcccatccagcattacacgat

SEQ ID NO: 1366474 - DNA, 25 bp, Homo sapien
aaaaagttcacttcatcctagtgga

SEQ ID NO: 1366475 - DNA, 25 bp, Homo sapien
ccaagaagatgctttgttgagtttg

SEQ ID NO: 1366476 - DNA, 25 bp, Homo sapien
tggaaaaggtgaccacaagattcaa

SEQ ID NO: 1366477 - DNA, 25 bp, Homo sapien
cttggtccaagaagatgctttgttg

SEQ ID NO: 1366478 - DNA, 25 bp, Homo sapien
aagacttcaaattgatattcaacac

SEQ ID NO: 1366479 - DNA, 25 bp, Homo sapien
gaaagacttcaaattgatattcaac

SEQ ID NO: 1366480 - DNA, 25 bp, Homo sapien
ttgaaagacttcaaattgatattca

SEQ ID NO: 1366481 - DNA, 25 bp, Homo sapien
gtttgaaagacttcaaattgatatt

SEQ ID NO: 1366482 - DNA, 25 bp, Homo sapien
ggaaagcatctgtgtggtatggcaa

SEQ ID NO: 1366483 - DNA, 25 bp, Homo sapien
attggaaagcatctgtgtggtatgg

SEQ ID NO: 1366484 - DNA, 25 bp, Homo sapien
aaagcatctgtgtggtatggcaaca

SEQ ID NO: 1366485 - DNA, 25 bp, Homo sapien
aagcatctgtgtggtatggcaacag

SEQ ID NO: 1366486 - DNA, 25 bp, Homo sapien
caccacaggtgtgattggagacatt

SEQ ID NO: 1366487 - DNA, 25 bp, Homo sapien
gaaacctatgctgccagttttgagg

SEQ ID NO: 1366488 - DNA, 25 bp, Homo sapien
aagaatatttcagggctctaggcct

SEQ ID NO: 1366489 - DNA, 25 bp, Homo sapien
tacagaatcacagatgatggcgctg

SEQ ID NO: 1366490 - DNA, 25 bp, Homo sapien
atgggttagttaacagtctctcaat

SEQ ID NO: 1366491 - DNA, 25 bp, Homo sapien
tacttagtacattatgggttagtta

SEQ ID NO: 1366492 - DNA, 25 bp, Homo sapien
aagtacttagtacattatgggttag

SEQ ID NO: 1366493 - DNA, 25 bp, Homo sapien
ttatgggttagttaacagtctctca

SEQ ID NO: 1366494 - DNA, 25 bp, Homo sapien
ttgcagtactatacagaccctctgg

SEQ ID NO: 1366495 - DNA, 25 bp, Homo sapien
gggattcagtcctgctttgcagtac

SEQ ID NO: 1366496 - DNA, 25 bp, Homo sapien
caaggtcgaatccagtatttgcagc

SEQ ID NO: 1366497 - DNA, 25 bp, Homo sapien
gaccctctggtgtctttggaaaatg

SEQ ID NO: 1366498 - DNA, 25 bp, Homo sapien
gcctcattaaactttggtaatagct

SEQ ID NO: 1366499 - DNA, 25 bp, Homo sapien
gaattcaccaaagtaatcctcttta

SEQ ID NO: 1366500 - DNA, 25 bp, Homo sapien
taaaaaatgctgtggcctcattaaa

SEQ ID NO: 1366501 - DNA, 25 bp, Homo sapien
gctgtggcctcattaaactttggta

SEQ ID NO: 1366502 - DNA, 25 bp, Homo sapien
ttatccatccgtatttatggagatt

SEQ ID NO: 1366503 - DNA, 25 bp, Homo sapien
gtagttgaaccgttgacttggtgat

SEQ ID NO: 1366504 - DNA, 25 bp, Homo sapien
agtagttgaaccgttgacttggtga

SEQ ID NO: 1366505 - DNA, 25 bp, Homo sapien
catccgtatttatggagattggtaa

SEQ ID NO: 1366506 - DNA, 25 bp, Homo sapien
tcaacacataattagcgtatttctg

SEQ ID NO: 1366507 - DNA, 25 bp, Homo sapien
ctgagaatttgacttatatgtggac

SEQ ID NO: 1366508 - DNA, 25 bp, Homo sapien
tgattgtaacaagggccaatctgag

SEQ ID NO: 1366509 - DNA, 25 bp, Homo sapien
tctggaaagcacaattgtgattttc

SEQ ID NO: 1366510 - DNA, 25 bp, Homo sapien
atattgtcagaatctgtccatgaca

SEQ ID NO: 1366511 - DNA, 25 bp, Homo sapien
atttccagagccatacatgtatata

SEQ ID NO: 1366512 - DNA, 25 bp, Homo sapien
cactttttttcttcccacaatattg

SEQ ID NO: 1366513 - DNA, 25 bp, Homo sapien
tctgtgttatatacaaatcttatac

SEQ ID NO: 1366514 - DNA, 25 bp, Homo sapien
ttaatctgtgttatatacaaatctt

SEQ ID NO: 1366515 - DNA, 25 bp, Homo sapien
taatctgtgttatatacaaatctta

SEQ ID NO: 1366516 - DNA, 25 bp, Homo sapien
aatctgtgttatatacaaatcttat

SEQ ID NO: 1366517 - DNA, 25 bp, Homo sapien
ggaggaagtgatactttcaatttca

SEQ ID NO: 1366518 - DNA, 25 bp, Homo sapien
tttcaatttcagtgggttgtctctg

SEQ ID NO: 1366519 - DNA, 25 bp, Homo sapien
agtgatactttcaatttcagtgggt

SEQ ID NO: 1366520 - DNA, 25 bp, Homo sapien
actgggaggaagtgatactttcaat

SEQ ID NO: 1366521 - DNA, 25 bp, Homo sapien
catttgtcagaagattaagctttgg

SEQ ID NO: 1366522 - DNA, 25 bp, Homo sapien
aatacttgagggagcgttcaagatg

SEQ ID NO: 1366523 - DNA, 25 bp, Homo sapien
tagtgggtattctcttattctcatt

SEQ ID NO: 1366524 - DNA, 25 bp, Homo sapien
aagtaataatcaacagttaatagac

SEQ ID NO: 1366525 - DNA, 25 bp, Homo sapien
tgctatgggttaatacaaacagcga

SEQ ID NO: 1366526 - DNA, 25 bp, Homo sapien
atttagctaactagaagcccaaaag

SEQ ID NO: 1366527 - DNA, 25 bp, Homo sapien
tatgggttaatacaaacagcgaaga

SEQ ID NO: 1366528 - DNA, 25 bp, Homo sapien
tttagctaactagaagcccaaaaga

SEQ ID NO: 1366529 - DNA, 25 bp, Homo sapien
ttgctgagaacaagagtacccagat

SEQ ID NO: 1366530 - DNA, 25 bp, Homo sapien
tgtttgaggcaagcatgttatttca

SEQ ID NO: 1366531 - DNA, 25 bp, Homo sapien
cagccataacgtatgtagattttgc

SEQ ID NO: 1366532 - DNA, 25 bp, Homo sapien
tatttcatttcgttgcagccataac

SEQ ID NO: 1366533 - DNA, 25 bp, Homo sapien
caagtttgttgcttcccatgtccag

SEQ ID NO: 1366534 - DNA, 25 bp, Homo sapien
aaaatcgttcatactcagatcaagg

SEQ ID NO: 1366535 - DNA, 25 bp, Homo sapien
tctatagtatcaggaagttgttcaa

SEQ ID NO: 1366536 - DNA, 25 bp, Homo sapien
gccactcaagggcaggcatgttcaa

SEQ ID NO: 1366537 - DNA, 25 bp, Homo sapien
caccctggccttcaaggagatcaca

SEQ ID NO: 1366538 - DNA, 25 bp, Homo sapien
taatcactacaacctaggctctgcc

SEQ ID NO: 1366539 - DNA, 25 bp, Homo sapien
tgagtggtcaactactgcagatgga

SEQ ID NO: 1366540 - DNA, 25 bp, Homo sapien
tcaaagtttggaggcattccagtcc

SEQ ID NO: 1366541 - DNA, 25 bp, Homo sapien
ttgtggaagatcacatatatctctg

SEQ ID NO: 1366542 - DNA, 25 bp, Homo sapien
tggcacaattacttagttccttggg

SEQ ID NO: 1366543 - DNA, 25 bp, Homo sapien
tcttgtggaagatcacatatatctc

SEQ ID NO: 1366544 - DNA, 25 bp, Homo sapien
ccaagctggcacaattacttagttc

SEQ ID NO: 1366545 - DNA, 25 bp, Homo sapien
ctaacacaatgaggttctggaatct

SEQ ID NO: 1366546 - DNA, 25 bp, Homo sapien
tggtatctctgaaattgtgtttcga

SEQ ID NO: 1366547 - DNA, 25 bp, Homo sapien
aattgtgtttcgagataaatctaac

SEQ ID NO: 1366548 - DNA, 25 bp, Homo sapien
aaatctaacacaatgaggttctgga

SEQ ID NO: 1366549 - DNA, 25 bp, Homo sapien
ctgtagttgattcagtttcagcaga

SEQ ID NO: 1366550 - DNA, 25 bp, Homo sapien
tcagtttcagcagagaagaagggag

SEQ ID NO: 1366551 - DNA, 25 bp, Homo sapien
gttgattcagtttcagcagagaaga

SEQ ID NO: 1366552 - DNA, 25 bp, Homo sapien
ttcagtttcagcagagaagaaggga

SEQ ID NO: 1366553 - DNA, 25 bp, Homo sapien
gagaggttgctataagaaggattaa

SEQ ID NO: 1366554 - DNA, 25 bp, Homo sapien
taggtttaggcagggttgaagcaaa

SEQ ID NO: 1366555 - DNA, 25 bp, Homo sapien
atttttattaggcagatggttatct

SEQ ID NO: 1366556 - DNA, 25 bp, Homo sapien
ttctagtcttaattacacagtctca

SEQ ID NO: 1366557 - DNA, 25 bp, Homo sapien
tttctcttagcttggttaagcttac

SEQ ID NO: 1366558 - DNA, 25 bp, Homo sapien
gcttggttaagcttactcgttcttc

SEQ ID NO: 1366559 - DNA, 25 bp, Homo sapien
agcttactcgttcttcccagatccg

SEQ ID NO: 1366560 - DNA, 25 bp, Homo sapien
gttaagcttactcgttcttcccaga

SEQ ID NO: 1366561 - DNA, 25 bp, Homo sapien
gaaatcattttagttcatagacaat

SEQ ID NO: 1366562 - DNA, 25 bp, Homo sapien
acaattacataagtggcattcactt

SEQ ID NO: 1366563 - DNA, 25 bp, Homo sapien
caattacataagtggcattcacttt

SEQ ID NO: 1366564 - DNA, 25 bp, Homo sapien
cattttagttcatagacaattacat

SEQ ID NO: 1366565 - DNA, 25 bp, Homo sapien
ttcaaggagcttggcatcaaaaggg

SEQ ID NO: 1366566 - DNA, 25 bp, Homo sapien
cactcagtgtgatttgcagaacagc

SEQ ID NO: 1366567 - DNA, 25 bp, Homo sapien
tagccaatttagctgaacgaagcag

SEQ ID NO: 1366568 - DNA, 25 bp, Homo sapien
tatgggattcctacgcagacaagtt

SEQ ID NO: 1366569 - DNA, 25 bp, Homo sapien
acagcattgacagccccagtacaaa

SEQ ID NO: 1366570 - DNA, 25 bp, Homo sapien
gaaattccttctctcgcttcaggtc

SEQ ID NO: 1366571 - DNA, 25 bp, Homo sapien
aattccttctctcgcttcaggtctt

SEQ ID NO: 1366572 - DNA, 25 bp, Homo sapien
tccttctctcgcttcaggtcttcat

SEQ ID NO: 1366573 - DNA, 25 bp, Homo sapien
cattgtcatagtcaccaacttcatt

SEQ ID NO: 1366574 - DNA, 25 bp, Homo sapien
tcatagtcaccaacttcattaggtt

SEQ ID NO: 1366575 - DNA, 25 bp, Homo sapien
tccacattgtcatagtcaccaactt

SEQ ID NO: 1366576 - DNA, 25 bp, Homo sapien
tgtcatagtcaccaacttcattagg

SEQ ID NO: 1366577 - DNA, 25 bp, Homo sapien
tatagtggcgggatatgactctctg

SEQ ID NO: 1366578 - DNA, 25 bp, Homo sapien
caaggaatccagaactgaagtggga

SEQ ID NO: 1366579 - DNA, 25 bp, Homo sapien
gggtcatagagcaagtctcagtcaa

SEQ ID NO: 1366580 - DNA, 25 bp, Homo sapien
caaaatggactttaggcacaaatac

SEQ ID NO: 1366581 - DNA, 25 bp, Homo sapien
tggtctcgttctgtcccataggctg

SEQ ID NO: 1366582 - DNA, 25 bp, Homo sapien
aaaagcctatattatttcagctaaa

SEQ ID NO: 1366583 - DNA, 25 bp, Homo sapien
tgagacatggtctcgttctgtccca

SEQ ID NO: 1366584 - DNA, 25 bp, Homo sapien
tatttcagctaaagaaacacacttt

SEQ ID NO: 1366585 - DNA, 25 bp, Homo sapien
taatgtagtagagggaaatttctag

SEQ ID NO: 1366586 - DNA, 25 bp, Homo sapien
cccatccatgaaacacacttctaaa

SEQ ID NO: 1366587 - DNA, 25 bp, Homo sapien
tgcacccatccatgaaacacacttc

SEQ ID NO: 1366588 - DNA, 25 bp, Homo sapien
caaatcaaagtgtatggaatatagg

SEQ ID NO: 1366589 - DNA, 25 bp, Homo sapien
ctttgtttgagaaatcaattaatgt

SEQ ID NO: 1366590 - DNA, 25 bp, Homo sapien
caattaatgtaatattctgaataga

SEQ ID NO: 1366591 - DNA, 25 bp, Homo sapien
tttgtttgagaaatcaattaatgta

SEQ ID NO: 1366592 - DNA, 25 bp, Homo sapien
aatcaattaatgtaatattctgaat

SEQ ID NO: 1366593 - DNA, 25 bp, Homo sapien
ggagaggagcaacctgacaatcagt

SEQ ID NO: 1366594 - DNA, 25 bp, Homo sapien
cagtgtacctgaataaggaacccca

SEQ ID NO: 1366595 - DNA, 25 bp, Homo sapien
tagcccagacactcttgccaaagaa

SEQ ID NO: 1366596 - DNA, 25 bp, Homo sapien
gactcatatacacataggcactgca

SEQ ID NO: 1366597 - DNA, 25 bp, Homo sapien
gagaatctctaagcaaggcatgccg

SEQ ID NO: 1366598 - DNA, 25 bp, Homo sapien
tgattacttctagggagcaggactg

SEQ ID NO: 1366599 - DNA, 25 bp, Homo sapien
cagacacagtataggtatcagcagc

SEQ ID NO: 1366600 - DNA, 25 bp, Homo sapien
ggcatgccgaatttactcaggaaca

SEQ ID NO: 1366601 - DNA, 25 bp, Homo sapien
gtaaccaagtgaaatgtaatgtcag

SEQ ID NO: 1366602 - DNA, 25 bp, Homo sapien
gttagcgactatcagttaagagtag

SEQ ID NO: 1366603 - DNA, 25 bp, Homo sapien
tttttttcagtgtggctccaaatga

SEQ ID NO: 1366604 - DNA, 25 bp, Homo sapien
cacacataaccaaagttagcgacta

SEQ ID NO: 1366605 - DNA, 25 bp, Homo sapien
ggattaatggatcctatagtagttt

SEQ ID NO: 1366606 - DNA, 25 bp, Homo sapien
tacttagtactggattaatggatcc

SEQ ID NO: 1366607 - DNA, 25 bp, Homo sapien
attttggatacgtacttagtactgg

SEQ ID NO: 1366608 - DNA, 25 bp, Homo sapien
ggatacgtacttagtactggattaa

SEQ ID NO: 1366609 - DNA, 25 bp, Homo sapien
tacattgcccgttggaggagactct

SEQ ID NO: 1366610 - DNA, 25 bp, Homo sapien
tggagttctctcacacggtctggct

SEQ ID NO: 1366611 - DNA, 25 bp, Homo sapien
tagtggctcggctcatcagctctga

SEQ ID NO: 1366612 - DNA, 25 bp, Homo sapien
cacaatgggatcgaggccaggttct

SEQ ID NO: 1366613 - DNA, 25 bp, Homo sapien
tgtgggttcacacacatgatccaat

SEQ ID NO: 1366614 - DNA, 25 bp, Homo sapien
actgtgtccggcctctcttggtgat

SEQ ID NO: 1366615 - DNA, 25 bp, Homo sapien
ccagtgggctttccagactaagagc

SEQ ID NO: 1366616 - DNA, 25 bp, Homo sapien
ggttattggcacagacccacttcca

SEQ ID NO: 1366617 - DNA, 25 bp, Homo sapien
tcagaggaatgctcaaaataatgaa

SEQ ID NO: 1366618 - DNA, 25 bp, Homo sapien
tataccttctaatctccagacatgt

SEQ ID NO: 1366619 - DNA, 25 bp, Homo sapien
taattccaacctctaggagtacagc

SEQ ID NO: 1366620 - DNA, 25 bp, Homo sapien
tgattttcttgctgaccactcgcag

SEQ ID NO: 1366621 - DNA, 25 bp, Homo sapien
gctttgtagagcctcatggaccagc

SEQ ID NO: 1366622 - DNA, 25 bp, Homo sapien
cccttgctttgtagagcctcatgga

SEQ ID NO: 1366623 - DNA, 25 bp, Homo sapien
gtagagcctcatggaccagcactgc

SEQ ID NO: 1366624 - DNA, 25 bp, Homo sapien
tttgtagagcctcatggaccagcac

SEQ ID NO: 1366625 - DNA, 25 bp, Homo sapien
cacacccagcctatgcagccattta

SEQ ID NO: 1366626 - DNA, 25 bp, Homo sapien
acacccagcctatgcagccatttaa

SEQ ID NO: 1366627 - DNA, 25 bp, Homo sapien
ccacacccagcctatgcagccattt

SEQ ID NO: 1366628 - DNA, 25 bp, Homo sapien
tattgacatgtaaggttacccataa

SEQ ID NO: 1366629 - DNA, 25 bp, Homo sapien
ttgtttattgacatgtaaggttacc

SEQ ID NO: 1366630 - DNA, 25 bp, Homo sapien
tgtaaggttacccataatataatgt

SEQ ID NO: 1366631 - DNA, 25 bp, Homo sapien
gcatgacaatgtggaattgtttatt

SEQ ID NO: 1366632 - DNA, 25 bp, Homo sapien
taaagtaccttccttacatgaggga

SEQ ID NO: 1366633 - DNA, 25 bp, Homo sapien
tacattcttacccaggatatggaga

SEQ ID NO: 1366634 - DNA, 25 bp, Homo sapien
tacagttacaagtcatcacacctgg

SEQ ID NO: 1366635 - DNA, 25 bp, Homo sapien
tactgtctgtatatggctacctgtc

SEQ ID NO: 1366636 - DNA, 25 bp, Homo sapien
gacaaatattgtgccttagatcctt

SEQ ID NO: 1366637 - DNA, 25 bp, Homo sapien
aagccattgacacaaaaacatcagc

SEQ ID NO: 1366638 - DNA, 25 bp, Homo sapien
cagctagggtttacatactctttgg

SEQ ID NO: 1366639 - DNA, 25 bp, Homo sapien
tcagcaccatattaagaagtcacac

SEQ ID NO: 1366640 - DNA, 25 bp, Homo sapien
cattgtagcaccatcaataactctg

SEQ ID NO: 1366641 - DNA, 25 bp, Homo sapien
tatctgtgccttatatacttctcct

SEQ ID NO: 1366642 - DNA, 25 bp, Homo sapien
caaattggagaagcgtgacattgta

SEQ ID NO: 1366643 - DNA, 25 bp, Homo sapien
gatctagtagcataaaagctgggtt

SEQ ID NO: 1366644 - DNA, 25 bp, Homo sapien
ccaatggctacttcaggtggcatta

SEQ ID NO: 1366645 - DNA, 25 bp, Homo sapien
tggcattatcactggtttggcaaag

SEQ ID NO: 1366646 - DNA, 25 bp, Homo sapien
cactggtttggcaaaggtaccacca

SEQ ID NO: 1366647 - DNA, 25 bp, Homo sapien
cttaattgatccaagggccccaatg

SEQ ID NO: 1366648 - DNA, 25 bp, Homo sapien
tcctgtaagatcagtggtgctgagc

SEQ ID NO: 1366649 - DNA, 25 bp, Homo sapien
tgctgagctgactcacagagcccaa

SEQ ID NO: 1366650 - DNA, 25 bp, Homo sapien
tttctggaggcggttcagttcagtg

SEQ ID NO: 1366651 - DNA, 25 bp, Homo sapien
tcagtggcgatgtcaaatatagagc

SEQ ID NO: 1366652 - DNA, 25 bp, Homo sapien
tgaggtacaatagaagtctctaatc

SEQ ID NO: 1366653 - DNA, 25 bp, Homo sapien
gtctctaatctacaagcacatttgc

SEQ ID NO: 1366654 - DNA, 25 bp, Homo sapien
aaagatcactatttgaggtacaata

SEQ ID NO: 1366655 - DNA, 25 bp, Homo sapien
gaagtctctaatctacaagcacatt

SEQ ID NO: 1366656 - DNA, 25 bp, Homo sapien
aactgtagtaatcccaaggaagcag

SEQ ID NO: 1366657 - DNA, 25 bp, Homo sapien
cacagaagcgttaaggataggaaac

SEQ ID NO: 1366658 - DNA, 25 bp, Homo sapien
ggataggaaactgtagtaatcccaa

SEQ ID NO: 1366659 - DNA, 25 bp, Homo sapien
taggaaactgtagtaatcccaagga

SEQ ID NO: 1366660 - DNA, 25 bp, Homo sapien
taatgatacagaccagccaaagttc

SEQ ID NO: 1366661 - DNA, 25 bp, Homo sapien
tcaagtctacatgtacctagtcaca

SEQ ID NO: 1366662 - DNA, 25 bp, Homo sapien
catgtggaactaggtcaccctaatc

SEQ ID NO: 1366663 - DNA, 25 bp, Homo sapien
agtagtcaggtagcttgtaaacatc

SEQ ID NO: 1366664 - DNA, 25 bp, Homo sapien
aggccggccagggcgactacgcgtg

SEQ ID NO: 1366665 - DNA, 25 bp, Homo sapien
gaggccggccagggcgactacgcgt

SEQ ID NO: 1366666 - DNA, 25 bp, Homo sapien
ggctacggcgccatccccgccgcgc

SEQ ID NO: 1366667 - DNA, 25 bp, Homo sapien
gccgcgcccccgcagccgccctact

SEQ ID NO: 1366668 - DNA, 25 bp, Homo sapien
ctacggcgccatccccgccgcgccc

SEQ ID NO: 1366669 - DNA, 25 bp, Homo sapien
gcccccgcagccgccctactcctac

SEQ ID NO: 1366670 - DNA, 25 bp, Homo sapien
atcccagggtctacaacatccacag

SEQ ID NO: 1366671 - DNA, 25 bp, Homo sapien
tacaacatccacagctggaccgtca

SEQ ID NO: 1366672 - DNA, 25 bp, Homo sapien
agctggaccgtcatccgctatccta

SEQ ID NO: 1366673 - DNA, 25 bp, Homo sapien
agggtctacaacatccacagctgga

SEQ ID NO: 1366674 - DNA, 25 bp, Homo sapien
ctatcgtggtcgtgggaggctgtcc

SEQ ID NO: 1366675 - DNA, 25 bp, Homo sapien
ctgttcccctttgggttcatttgct

SEQ ID NO: 1366676 - DNA, 25 bp, Homo sapien
catcatcctgttcccctttgggttc

SEQ ID NO: 1366677 - DNA, 25 bp, Homo sapien
aggctgtcccgtctgcagggtcggg

SEQ ID NO: 1366678 - DNA, 25 bp, Homo sapien
tggagccaccttcgcttaaagggaa

SEQ ID NO: 1366679 - DNA, 25 bp, Homo sapien
tgtggagccaccttcgcttaaaggg

SEQ ID NO: 1366680 - DNA, 25 bp, Homo sapien
caccttcgcttaaagggaacaccag

SEQ ID NO: 1366681 - DNA, 25 bp, Homo sapien
gagccaccttcgcttaaagggaaca

SEQ ID NO: 1366682 - DNA, 25 bp, Homo sapien
cagctgcggtttcccggagcgtgga

SEQ ID NO: 1366683 - DNA, 25 bp, Homo sapien
tatttgattaagcttcaggactgtt

SEQ ID NO: 1366684 - DNA, 25 bp, Homo sapien
aggactgttttgtaaagcgaggtgg

SEQ ID NO: 1366685 - DNA, 25 bp, Homo sapien
ttgtaaagcgaggtgggaccgatgt

SEQ ID NO: 1366686 - DNA, 25 bp, Homo sapien
tttgagaaaggtgagaaataatctt

SEQ ID NO: 1366687 - DNA, 25 bp, Homo sapien
aggctcatgacaactcaatgaagca

SEQ ID NO: 1366688 - DNA, 25 bp, Homo sapien
catgacaactcaatgaagcactgct

SEQ ID NO: 1366689 - DNA, 25 bp, Homo sapien
gagaaaggtgagaaataatcttttc

SEQ ID NO: 1366690 - DNA, 25 bp, Homo sapien
gccttgtttgaaatgaatgaatctc

SEQ ID NO: 1366691 - DNA, 25 bp, Homo sapien
tcaagccttgtttgaaatgaatgaa

SEQ ID NO: 1366692 - DNA, 25 bp, Homo sapien
aagccttgtttgaaatgaatgaatc

SEQ ID NO: 1366693 - DNA, 25 bp, Homo sapien
cttgtttgaaatgaatgaatctcac

SEQ ID NO: 1366694 - DNA, 25 bp, Homo sapien
ttaattccacgagcaaatgcaatgg

SEQ ID NO: 1366695 - DNA, 25 bp, Homo sapien
ttcttctcggagcttaaccagttca

SEQ ID NO: 1366696 - DNA, 25 bp, Homo sapien
gaagaaaggcataaaggagagttta

SEQ ID NO: 1366697 - DNA, 25 bp, Homo sapien
cagttcagtaaggtcaatctcatca

SEQ ID NO: 1366698 - DNA, 25 bp, Homo sapien
caaacagagcaattatcaatataca

SEQ ID NO: 1366699 - DNA, 25 bp, Homo sapien
ggaagttaatcattccaggagttta

SEQ ID NO: 1366700 - DNA, 25 bp, Homo sapien
gaaacctgctaacgtattactcttc

SEQ ID NO: 1366701 - DNA, 25 bp, Homo sapien
acactgactgcatcatgacactcag

SEQ ID NO: 1366702 - DNA, 25 bp, Homo sapien
tgagccaacaacttcactcagctta

SEQ ID NO: 1366703 - DNA, 25 bp, Homo sapien
gaggcaatatagctcctgtctgctt

SEQ ID NO: 1366704 - DNA, 25 bp, Homo sapien
ttgtctttgcctgtgaataccggag

SEQ ID NO: 1366705 - DNA, 25 bp, Homo sapien
accggaggttttgatactagtatag

SEQ ID NO: 1366706 - DNA, 25 bp, Homo sapien
cactgcaggagtttcaacaacatct

SEQ ID NO: 1366707 - DNA, 25 bp, Homo sapien
atcatgagacactgcaggagtttca

SEQ ID NO: 1366708 - DNA, 25 bp, Homo sapien
cagtgtttttcggccctttatctct

SEQ ID NO: 1366709 - DNA, 25 bp, Homo sapien
attgttttccattgccagacggcga

SEQ ID NO: 1366710 - DNA, 25 bp, Homo sapien
gaatttcacaagtctccccagttga

SEQ ID NO: 1366711 - DNA, 25 bp, Homo sapien
tagtgtttctagcatcacagtctaa

SEQ ID NO: 1366712 - DNA, 25 bp, Homo sapien
tcttcagttagggaattagagtaca

SEQ ID NO: 1366713 - DNA, 25 bp, Homo sapien
tgttaccaatgtagaaacggactct

SEQ ID NO: 1366714 - DNA, 25 bp, Homo sapien
tgtgcctagccaataatgtctttca

SEQ ID NO: 1366715 - DNA, 25 bp, Homo sapien
tcaaagtaataggaagcacccctaa

SEQ ID NO: 1366716 - DNA, 25 bp, Homo sapien
gcccagattatagcctcttattcat

SEQ ID NO: 1366717 - DNA, 25 bp, Homo sapien
gaacaagagcccctgaagaaatgaa

SEQ ID NO: 1366718 - DNA, 25 bp, Homo sapien
ttgaacttcacagatgctatcaaac

SEQ ID NO: 1366719 - DNA, 25 bp, Homo sapien
caatatcgtctagattataatagag

SEQ ID NO: 1366720 - DNA, 25 bp, Homo sapien
gaacttcacagatgctatcaaactg

SEQ ID NO: 1366721 - DNA, 25 bp, Homo sapien
cataggcaatatcgtctagattata

SEQ ID NO: 1366722 - DNA, 25 bp, Homo sapien
aatgtctgagagcttgaactgaaca

SEQ ID NO: 1366723 - DNA, 25 bp, Homo sapien
agttgttttcaggaagtgatgtgga

SEQ ID NO: 1366724 - DNA, 25 bp, Homo sapien
cagcagttgttttcaggaagtgatg

SEQ ID NO: 1366725 - DNA, 25 bp, Homo sapien
gcagttgttttcaggaagtgatgtg

SEQ ID NO: 1366726 - DNA, 25 bp, Homo sapien
tgttttcaggaagtgatgtggatga

SEQ ID NO: 1366727 - DNA, 25 bp, Homo sapien
cataatttggcttcaaaacatgaac

SEQ ID NO: 1366728 - DNA, 25 bp, Homo sapien
ctctcatgctgggttgtaatttcta

SEQ ID NO: 1366729 - DNA, 25 bp, Homo sapien
tcatgctgggttgtaatttctatct

SEQ ID NO: 1366730 - DNA, 25 bp, Homo sapien
ctcatgctgggttgtaatttctatc

SEQ ID NO: 1366731 - DNA, 25 bp, Homo sapien
tctcatgctgggttgtaatttctat

SEQ ID NO: 1366732 - DNA, 25 bp, Homo sapien
gcattcctgctccaggttctcagca

SEQ ID NO: 1366733 - DNA, 25 bp, Homo sapien
cttccccgcattcctgctccaggtt

SEQ ID NO: 1366734 - DNA, 25 bp, Homo sapien
cattcctgctccaggttctcagcat

SEQ ID NO: 1366735 - DNA, 25 bp, Homo sapien
cagcttccccgcattcctgctccag

SEQ ID NO: 1366736 - DNA, 25 bp, Homo sapien
caacagtgccgcaaactggagagac

SEQ ID NO: 1366737 - DNA, 25 bp, Homo sapien
aatgacaacagtgccgcaaactgga

SEQ ID NO: 1366738 - DNA, 25 bp, Homo sapien
gtgccgcaaactggagagactctcc

SEQ ID NO: 1366739 - DNA, 25 bp, Homo sapien
ctggagagactctcctcggcgcggc

SEQ ID NO: 1366740 - DNA, 25 bp, Homo sapien
tccaaagtcatgacaaaatacatct

SEQ ID NO: 1366741 - DNA, 25 bp, Homo sapien
gggctaatccaaagtcatgacaaaa

SEQ ID NO: 1366742 - DNA, 25 bp, Homo sapien
aaaatgggctaatccaaagtcatga

SEQ ID NO: 1366743 - DNA, 25 bp, Homo sapien
aaagtcatgacaaaatacatctaag

SEQ ID NO: 1366744 - DNA, 25 bp, Homo sapien
aatattttgactgagactggtgcat

SEQ ID NO: 1366745 - DNA, 25 bp, Homo sapien
cacaatatggtagtggattcaccag

SEQ ID NO: 1366746 - DNA, 25 bp, Homo sapien
ttttggcatcaagatcatactagcc

SEQ ID NO: 1366747 - DNA, 25 bp, Homo sapien
gatcttaggtttttgatacatcagc

SEQ ID NO: 1366748 - DNA, 25 bp, Homo sapien
taccttgcgtacttaaagacttgaa

SEQ ID NO: 1366749 - DNA, 25 bp, Homo sapien
ttaaacttgtgggtatgtgtcatcc

SEQ ID NO: 1366750 - DNA, 25 bp, Homo sapien
catgtaatgtttgctcagattcaac

SEQ ID NO: 1366751 - DNA, 25 bp, Homo sapien
gctgagtgcccaattctaggttgat

SEQ ID NO: 1366752 - DNA, 25 bp, Homo sapien
tgtacaagttgattgtaaaacatct

SEQ ID NO: 1366753 - DNA, 25 bp, Homo sapien
acaagttgattgtaaaacatctgtg

SEQ ID NO: 1366754 - DNA, 25 bp, Homo sapien
ccggctggagccacggcagaggaac

SEQ ID NO: 1366755 - DNA, 25 bp, Homo sapien
aatctaagatgtgttgcgggaagtc

SEQ ID NO: 1366756 - DNA, 25 bp, Homo sapien
tgtggggttgggcaaaaacagccat

SEQ ID NO: 1366757 - DNA, 25 bp, Homo sapien
taagacaatatgtgcactgctgaac

SEQ ID NO: 1366758 - DNA, 25 bp, Homo sapien
gttggactcttataagtagttctgc

SEQ ID NO: 1366759 - DNA, 25 bp, Homo sapien
cttgtgatctttgttggactcttat

SEQ ID NO: 1366760 - DNA, 25 bp, Homo sapien
gtgttcacatcagaccacccaggtt

SEQ ID NO: 1366761 - DNA, 25 bp, Homo sapien
agcagcagagcgttgggattaccag

SEQ ID NO: 1366762 - DNA, 25 bp, Homo sapien
ggattaccagacagtggtgttcaca

SEQ ID NO: 1366763 - DNA, 25 bp, Homo sapien
aacattctctgtcgcaaagcagcag

SEQ ID NO: 1366764 - DNA, 25 bp, Homo sapien
ttgcatcttcagctctaaaagtcgg

SEQ ID NO: 1366765 - DNA, 25 bp, Homo sapien
tcagctctaaaagtcggcacctcgg

SEQ ID NO: 1366766 - DNA, 25 bp, Homo sapien
agggcgcacacacttcgagagacag

SEQ ID NO: 1366767 - DNA, 25 bp, Homo sapien
cggtgcatcgcaggatcccaatctt

SEQ ID NO: 1366768 - DNA, 25 bp, Homo sapien
gcgggataactggaggagttatctt

SEQ ID NO: 1366769 - DNA, 25 bp, Homo sapien
acaagcctgcgggataactggagga

SEQ ID NO: 1366770 - DNA, 25 bp, Homo sapien
aaagcacaagcctgcgggataactg

SEQ ID NO: 1366771 - DNA, 25 bp, Homo sapien
cctgcgggataactggaggagttat

SEQ ID NO: 1366772 - DNA, 25 bp, Homo sapien
ctttaagccgagctacgcgcatgcg

SEQ ID NO: 1366773 - DNA, 25 bp, Homo sapien
cagattttgccgtgcccagggcaca

SEQ ID NO: 1366774 - DNA, 25 bp, Homo sapien
ttctgaactactgggcgggagccaa

SEQ ID NO: 1366775 - DNA, 25 bp, Homo sapien
ccagggcacaagtttttcagggctc

SEQ ID NO: 1366776 - DNA, 25 bp, Homo sapien
ggcggccagatcctgagagtctcta

SEQ ID NO: 1366777 - DNA, 25 bp, Homo sapien
cggagcacgccaggcctgaggtaaa

SEQ ID NO: 1366778 - DNA, 25 bp, Homo sapien
tacggccttgagctgtctcctaggc

SEQ ID NO: 1366779 - DNA, 25 bp, Homo sapien
cagaaggtcccagacgcaggtatgg

SEQ ID NO: 1366780 - DNA, 25 bp, Homo sapien
tgcttgtgacgccagaggaaaccct

SEQ ID NO: 1366781 - DNA, 25 bp, Homo sapien
gaacagcacgtatgagctggcaaga

SEQ ID NO: 1366782 - DNA, 25 bp, Homo sapien
tggttctgctgtcagttttagaatc

SEQ ID NO: 1366783 - DNA, 25 bp, Homo sapien
gcaagatagatagggcagaaatgct

SEQ ID NO: 1366784 - DNA, 25 bp, Homo sapien
gaatcctgagatgtgttatcccagc

SEQ ID NO: 1366785 - DNA, 25 bp, Homo sapien
tgagatgtgttatcccagccttcat

SEQ ID NO: 1366786 - DNA, 25 bp, Homo sapien
aagaatcctgagatgtgttatccca

SEQ ID NO: 1366787 - DNA, 25 bp, Homo sapien
tcctgagatgtgttatcccagcctt

SEQ ID NO: 1366788 - DNA, 25 bp, Homo sapien
tgatatataccttctacctagtggg

SEQ ID NO: 1366789 - DNA, 25 bp, Homo sapien
taacatttaataggcattgtctcat

SEQ ID NO: 1366790 - DNA, 25 bp, Homo sapien
taccttctacctagtgggcactttg

SEQ ID NO: 1366791 - DNA, 25 bp, Homo sapien
tgcacccggcaacaataacatttaa

SEQ ID NO: 1366792 - DNA, 25 bp, Homo sapien
tccactccccgtaactggtgcactg

SEQ ID NO: 1366793 - DNA, 25 bp, Homo sapien
ggagaaagcagaattgtagtgaact

SEQ ID NO: 1366794 - DNA, 25 bp, Homo sapien
tccagtatctcttttgggctacttg

SEQ ID NO: 1366795 - DNA, 25 bp, Homo sapien
tggttggtgaaagcctgacttccat

SEQ ID NO: 1366796 - DNA, 25 bp, Homo sapien
tcctagttaacctttgtaactgagc

SEQ ID NO: 1366797 - DNA, 25 bp, Homo sapien
caggcaatgtcttcctagttaacct

SEQ ID NO: 1366798 - DNA, 25 bp, Homo sapien
ttttctgtcaggcaatgtcttccta

SEQ ID NO: 1366799 - DNA, 25 bp, Homo sapien
aacctttgtaactgagctgttgtca

SEQ ID NO: 1366800 - DNA, 25 bp, Homo sapien
ctttcagaggatccaccgttattca

SEQ ID NO: 1366801 - DNA, 25 bp, Homo sapien
tgacactagaggtacttatagtcca

SEQ ID NO: 1366802 - DNA, 25 bp, Homo sapien
ggatccaccgttattcatcctgctt

SEQ ID NO: 1366803 - DNA, 25 bp, Homo sapien
tgccggcaaaccctgtttgacacta

SEQ ID NO: 1366804 - DNA, 25 bp, Homo sapien
caatggtattctactgttttggaac

SEQ ID NO: 1366805 - DNA, 25 bp, Homo sapien
aggccatcacgccattttctgcttt

SEQ ID NO: 1366806 - DNA, 25 bp, Homo sapien
tgtagacaatagcaatgcaaaaagc

SEQ ID NO: 1366807 - DNA, 25 bp, Homo sapien
gaagacattgcctcattaacattct

SEQ ID NO: 1366808 - DNA, 25 bp, Homo sapien
cgtggtccagtagtctggttccata

SEQ ID NO: 1366809 - DNA, 25 bp, Homo sapien
tagtctgttccatagtctggttctc

SEQ ID NO: 1366810 - DNA, 25 bp, Homo sapien
gtggtccagtagtctggttccatag

SEQ ID NO: 1366811 - DNA, 25 bp, Homo sapien
gaaatatctgagttgagtacagttt

SEQ ID NO: 1366812 - DNA, 25 bp, Homo sapien
gaatcagtgaatcagtccatgatac

SEQ ID NO: 1366813 - DNA, 25 bp, Homo sapien
acagtttgaatcagtgaatcagtcc

SEQ ID NO: 1366814 - DNA, 25 bp, Homo sapien
cagtattcattgtgggagggagggt

SEQ ID NO: 1366815 - DNA, 25 bp, Homo sapien
cagccccgcaaaggcttggatggcc

SEQ ID NO: 1366816 - DNA, 25 bp, Homo sapien
gcaccagccccgcaaaggcttggat

SEQ ID NO: 1366817 - DNA, 25 bp, Homo sapien
gccccgcaaaggcttggatggccga

SEQ ID NO: 1366818 - DNA, 25 bp, Homo sapien
accagccccgcaaaggcttggatgg

SEQ ID NO: 1366819 - DNA, 25 bp, Homo sapien
ctggagagacctctcagagcgcatg

SEQ ID NO: 1366820 - DNA, 25 bp, Homo sapien
tcggatagtcggtctgtagcgccat

SEQ ID NO: 1366821 - DNA, 25 bp, Homo sapien
gaaaacgccgccacaagtttcttgc

SEQ ID NO: 1366822 - DNA, 25 bp, Homo sapien
ttctccctagaggtcaacaagcgac

SEQ ID NO: 1366823 - DNA, 25 bp, Homo sapien
ccccgtgcgtatctcgcttaagatg

SEQ ID NO: 1366824 - DNA, 25 bp, Homo sapien
tatctcgcttaagatggcagcggag

SEQ ID NO: 1366825 - DNA, 25 bp, Homo sapien
tgcgtatctcgcttaagatggcagc

SEQ ID NO: 1366826 - DNA, 25 bp, Homo sapien
taatcggggcttgtgagttcatgaa

SEQ ID NO: 1366827 - DNA, 25 bp, Homo sapien
ttccccttctcgcagctgctgaggt

SEQ ID NO: 1366828 - DNA, 25 bp, Homo sapien
gaggtctggagatttgggaaccaaa

SEQ ID NO: 1366829 - DNA, 25 bp, Homo sapien
ggaaccaaacttgcacctccagttc

SEQ ID NO: 1366830 - DNA, 25 bp, Homo sapien
gcacctccagttctgcgggtacccc

SEQ ID NO: 1366831 - DNA, 25 bp, Homo sapien
ctactgtgccacagtaatggctgtg

SEQ ID NO: 1366832 - DNA, 25 bp, Homo sapien
ctgtgccacagtaatggctgtggct

SEQ ID NO: 1366833 - DNA, 25 bp, Homo sapien
ggctgtggctctgacacctccaact

SEQ ID NO: 1366834 - DNA, 25 bp, Homo sapien
gtgccacagtaatggctgtggctct

SEQ ID NO: 1366835 - DNA, 25 bp, Homo sapien
tctcctggtaaggagatgaacctcc

SEQ ID NO: 1366836 - DNA, 25 bp, Homo sapien
ccttgtgaatgtttgctctgatcct

SEQ ID NO: 1366837 - DNA, 25 bp, Homo sapien
gtaaggagatgaacctccttcctcc

SEQ ID NO: 1366838 - DNA, 25 bp, Homo sapien
gctctgatccttgggctcctgtttc

SEQ ID NO: 1366839 - DNA, 25 bp, Homo sapien
catttggagatgaacgcacgggtac

SEQ ID NO: 1366840 - DNA, 25 bp, Homo sapien
ttgtaggcattgacccataatttgc

SEQ ID NO: 1366841 - DNA, 25 bp, Homo sapien
aaagatggatggaccgattttccct

SEQ ID NO: 1366842 - DNA, 25 bp, Homo sapien
gagagaatcattcgttcatttgtta

SEQ ID NO: 1366843 - DNA, 25 bp, Homo sapien
ttttccctggccacatgagaccaaa

SEQ ID NO: 1366844 - DNA, 25 bp, Homo sapien
gagaccaaaagactactcccctctg

SEQ ID NO: 1366845 - DNA, 25 bp, Homo sapien
gccaagacaaagtggggacccgtgc

SEQ ID NO: 1366846 - DNA, 25 bp, Homo sapien
gggacccgtgcttggctgtggctct

SEQ ID NO: 1366847 - DNA, 25 bp, Homo sapien
tgccagagtggagaagactctgtcc

SEQ ID NO: 1366848 - DNA, 25 bp, Homo sapien
ccagagtggagaagactctgtccat

SEQ ID NO: 1366849 - DNA, 25 bp, Homo sapien
ctaggaaatgccagagtggagaaga

SEQ ID NO: 1366850 - DNA, 25 bp, Homo sapien
aatgccagagtggagaagactctgt

SEQ ID NO: 1366851 - DNA, 25 bp, Homo sapien
gttgtcccacgctgactttgaggct

SEQ ID NO: 1366852 - DNA, 25 bp, Homo sapien
ttcattccagtaagtgttagggcca

SEQ ID NO: 1366853 - DNA, 25 bp, Homo sapien
tgcttcacttccacgaacccagact

SEQ ID NO: 1366854 - DNA, 25 bp, Homo sapien
tgcctttgttactcactttgcacat

SEQ ID NO: 1366855 - DNA, 25 bp, Homo sapien
caagcttcgctaagcaggaaatcat

SEQ ID NO: 1366856 - DNA, 25 bp, Homo sapien
ctctcagtgatttgacctcggagat

SEQ ID NO: 1366857 - DNA, 25 bp, Homo sapien
gatttgacctcggagatgctggcca

SEQ ID NO: 1366858 - DNA, 25 bp, Homo sapien
gatgctggccaagcttcgctaagca

SEQ ID NO: 1366859 - DNA, 25 bp, Homo sapien
gcagcagcccacacattctatgatt

SEQ ID NO: 1366860 - DNA, 25 bp, Homo sapien
gagagcccaacttttctacccgcga

SEQ ID NO: 1366861 - DNA, 25 bp, Homo sapien
tgggaagttgctgttgtccttaaca

SEQ ID NO: 1366862 - DNA, 25 bp, Homo sapien
gttttgaataaagatccttggatac

SEQ ID NO: 1366863 - DNA, 25 bp, Homo sapien
gaagtcttgccggatgttttctttg

SEQ ID NO: 1366864 - DNA, 25 bp, Homo sapien
tcagaagtcttgccggatgttttct

SEQ ID NO: 1366865 - DNA, 25 bp, Homo sapien
aagtcttgccggatgttttctttgt

SEQ ID NO: 1366866 - DNA, 25 bp, Homo sapien
cagaagtcttgccggatgttttctt

SEQ ID NO: 1366867 - DNA, 25 bp, Homo sapien
ctagttgaaaaatagtccgttcagt

SEQ ID NO: 1366868 - DNA, 25 bp, Homo sapien
tcagattctcagttgtaactgcttg

SEQ ID NO: 1366869 - DNA, 25 bp, Homo sapien
gttgaaaaatagtccgttcagtctc

SEQ ID NO: 1366870 - DNA, 25 bp, Homo sapien
ttgaaaaatagtccgttcagtctca

SEQ ID NO: 1366871 - DNA, 25 bp, Homo sapien
ttgccatgcagtaatgccatttttt

SEQ ID NO: 1366872 - DNA, 25 bp, Homo sapien
acattcttgccatgcagtaatgcca

SEQ ID NO: 1366873 - DNA, 25 bp, Homo sapien
catgcagtaatgccatttttttgac

SEQ ID NO: 1366874 - DNA, 25 bp, Homo sapien
gccatgcagtaatgccatttttttg

SEQ ID NO: 1366875 - DNA, 25 bp, Homo sapien
caggactgtcaggtatctcaggtag

SEQ ID NO: 1366876 - DNA, 25 bp, Homo sapien
ccaggactgtcaggtatctcaggta

SEQ ID NO: 1366877 - DNA, 25 bp, Homo sapien
atccaggactgtcaggtatctcagg

SEQ ID NO: 1366878 - DNA, 25 bp, Homo sapien
aggactgtcaggtatctcaggtagt

SEQ ID NO: 1366879 - DNA, 25 bp, Homo sapien
tgcgagtttacttctccaccagcac

SEQ ID NO: 1366880 - DNA, 25 bp, Homo sapien
gtttacttctccaccagcactgcag

SEQ ID NO: 1366881 - DNA, 25 bp, Homo sapien
aggttggtatctgcgagtttacttc

SEQ ID NO: 1366882 - DNA, 25 bp, Homo sapien
taggttggtatctgcgagtttactt

SEQ ID NO: 1366883 - DNA, 25 bp, Homo sapien
cagccaccaaacctgtgcctgccat

SEQ ID NO: 1366884 - DNA, 25 bp, Homo sapien
gcagtgcatccacctcaacctctcc

SEQ ID NO: 1366885 - DNA, 25 bp, Homo sapien
tcaacctctccagccaccaaacctg

SEQ ID NO: 1366886 - DNA, 25 bp, Homo sapien
tctccagccaccaaacctgtgcctg

SEQ ID NO: 1366887 - DNA, 25 bp, Homo sapien
ttcgtgtaccaaccagggacaatgg

SEQ ID NO: 1366888 - DNA, 25 bp, Homo sapien
caatggtggttgttctcatgtttac

SEQ ID NO: 1366889 - DNA, 25 bp, Homo sapien
ggctaacactgccaaaactttcgtg

SEQ ID NO: 1366890 - DNA, 25 bp, Homo sapien
tctgagctttgattctggctaatgg

SEQ ID NO: 1366891 - DNA, 25 bp, Homo sapien
tgtgcttagatccagaaggttcttg

SEQ ID NO: 1366892 - DNA, 25 bp, Homo sapien
tagggcattgatttttggcattgaa

SEQ ID NO: 1366893 - DNA, 25 bp, Homo sapien
agaaggttcttgaatgttcttaggg

SEQ ID NO: 1366894 - DNA, 25 bp, Homo sapien
ggcattgaatgagcaggtgattgtt

SEQ ID NO: 1366895 - DNA, 25 bp, Homo sapien
tgactggctggctacttcagattgg

SEQ ID NO: 1366896 - DNA, 25 bp, Homo sapien
gctctaaggatatggtaatggacaa

SEQ ID NO: 1366897 - DNA, 25 bp, Homo sapien
tcagattggaagttcagagatgccc

SEQ ID NO: 1366898 - DNA, 25 bp, Homo sapien
aaattgactctgacttactgaagcc

SEQ ID NO: 1366899 - DNA, 25 bp, Homo sapien
ctggtgtgtagaactgtggaaagct

SEQ ID NO: 1366900 - DNA, 25 bp, Homo sapien
tgtgtagaactgtggaaagctctct

SEQ ID NO: 1366901 - DNA, 25 bp, Homo sapien
gtgtgtagaactgtggaaagctctc

SEQ ID NO: 1366902 - DNA, 25 bp, Homo sapien
tggtgtgtagaactgtggaaagctc

SEQ ID NO: 1366903 - DNA, 25 bp, Homo sapien
tgcgttggtctttggtgagcacacg

SEQ ID NO: 1366904 - DNA, 25 bp, Homo sapien
gcctttgtaaagagcctgggatggc

SEQ ID NO: 1366905 - DNA, 25 bp, Homo sapien
tatgagggtacaactgtcgctgcca

SEQ ID NO: 1366906 - DNA, 25 bp, Homo sapien
tgggatggcctcttcatggatctgc

SEQ ID NO: 1366907 - DNA, 25 bp, Homo sapien
tctcggaaggtgaactcatccgttg

SEQ ID NO: 1366908 - DNA, 25 bp, Homo sapien
aaggctatctccaagctggtttgcg

SEQ ID NO: 1366909 - DNA, 25 bp, Homo sapien
gatgagaagcctgtacaatgtgagt

SEQ ID NO: 1366910 - DNA, 25 bp, Homo sapien
gtgttaccacattgccatcctactg

SEQ ID NO: 1366911 - DNA, 25 bp, Homo sapien
ctttgaaatctagccatttcaaatc

SEQ ID NO: 1366912 - DNA, 25 bp, Homo sapien
ttgaaatctagccatttcaaatcta

SEQ ID NO: 1366913 - DNA, 25 bp, Homo sapien
tcctttgaaatctagccatttcaaa

SEQ ID NO: 1366914 - DNA, 25 bp, Homo sapien
gaaatctagccatttcaaatctagt

SEQ ID NO: 1366915 - DNA, 25 bp, Homo sapien
cagacgctggcttcgagcactatga

SEQ ID NO: 1366916 - DNA, 25 bp, Homo sapien
agatttatgaggcaaagcgcttcac

SEQ ID NO: 1366917 - DNA, 25 bp, Homo sapien
tgacaacatcgtgcgaaggttcctg

SEQ ID NO: 1366918 - DNA, 25 bp, Homo sapien
tgaacatctgtgagaacaccgaagg

SEQ ID NO: 1366919 - DNA, 25 bp, Homo sapien
gtacaccttatccaaggtcatgttg

SEQ ID NO: 1366920 - DNA, 25 bp, Homo sapien
tcctgatgaaatgtacaccttatcc

SEQ ID NO: 1366921 - DNA, 25 bp, Homo sapien
tatccaaggtcatgttgatgttaga

SEQ ID NO: 1366922 - DNA, 25 bp, Homo sapien
gaaatgtacaccttatccaaggtca

SEQ ID NO: 1366923 - DNA, 25 bp, Homo sapien
tagggcagcccagtatccaaaagga

SEQ ID NO: 1366924 - DNA, 25 bp, Homo sapien
gggcatctgagagcagacccctttc

SEQ ID NO: 1366925 - DNA, 25 bp, Homo sapien
tccctggactaggtagggttcttca

SEQ ID NO: 1366926 - DNA, 25 bp, Homo sapien
gagagttgctgcttaatcctccaaa

SEQ ID NO: 1366927 - DNA, 25 bp, Homo sapien
accgtgcctagccagataccttttt

SEQ ID NO: 1366928 - DNA, 25 bp, Homo sapien
ccgtgcctagccagatacctttttt

SEQ ID NO: 1366929 - DNA, 25 bp, Homo sapien
gcctagccagatacctttttttgag

SEQ ID NO: 1366930 - DNA, 25 bp, Homo sapien
gtgcctagccagatacctttttttg

SEQ ID NO: 1366931 - DNA, 25 bp, Homo sapien
ctgtgcctgtaaagttataagccat

SEQ ID NO: 1366932 - DNA, 25 bp, Homo sapien
tttccataaactcccggctagccag

SEQ ID NO: 1366933 - DNA, 25 bp, Homo sapien
aatgctgcaacagatgatccagaga

SEQ ID NO: 1366934 - DNA, 25 bp, Homo sapien
tgttcccctaatgtcatgagtatgt

SEQ ID NO: 1366935 - DNA, 25 bp, Homo sapien
catattatcataacaccaagggtga

SEQ ID NO: 1366936 - DNA, 25 bp, Homo sapien
ccagccaactaccagaaattaccct

SEQ ID NO: 1366937 - DNA, 25 bp, Homo sapien
gaaagggaggatgtgcgaggctctt

SEQ ID NO: 1366938 - DNA, 25 bp, Homo sapien
gagcatggcaccaacaacctgcttg

SEQ ID NO: 1366939 - DNA, 25 bp, Homo sapien
gtacgagcatggcaccaacaacctg

SEQ ID NO: 1366940 - DNA, 25 bp, Homo sapien
gggatcttgtgtatcacatggcaag

SEQ ID NO: 1366941 - DNA, 25 bp, Homo sapien
gaatcaccctggttgttcagcttaa

SEQ ID NO: 1366942 - DNA, 25 bp, Homo sapien
ttttctgtataaaacctgtcagctg

SEQ ID NO: 1366943 - DNA, 25 bp, Homo sapien
tactaggtcaatagaaaagagtctt

SEQ ID NO: 1366944 - DNA, 25 bp, Homo sapien
tagtgtcaataatactactaggtca

SEQ ID NO: 1366945 - DNA, 25 bp, Homo sapien
gatgggagtgttggtgtgtttctct

SEQ ID NO: 1366946 - DNA, 25 bp, Homo sapien
aatttggttggtaggttcagatggg

SEQ ID NO: 1366947 - DNA, 25 bp, Homo sapien
tggctctgcccgatcatctaggcct

SEQ ID NO: 1366948 - DNA, 25 bp, Homo sapien
tcctcgtctgctggccttcttgttg

SEQ ID NO: 1366949 - DNA, 25 bp, Homo sapien
ctctttggtttcctagccgaataat

SEQ ID NO: 1366950 - DNA, 25 bp, Homo sapien
gtttcctagccgaataatctcatct

SEQ ID NO: 1366951 - DNA, 25 bp, Homo sapien
tcatccagtcatccaagctagacat

SEQ ID NO: 1366952 - DNA, 25 bp, Homo sapien
tttggtttcctagccgaataatctc

SEQ ID NO: 1366953 - DNA, 25 bp, Homo sapien
cacatacacgcacaacatacctttg

SEQ ID NO: 1366954 - DNA, 25 bp, Homo sapien
tattctcaagaaagcactagctgag

SEQ ID NO: 1366955 - DNA, 25 bp, Homo sapien
atttctgatttctgttagtgataac

SEQ ID NO: 1366956 - DNA, 25 bp, Homo sapien
catgcacaactttactaatcggaac

SEQ ID NO: 1366957 - DNA, 25 bp, Homo sapien
ctaagcctttcctggtgcacgatgt

SEQ ID NO: 1366958 - DNA, 25 bp, Homo sapien
tgttatgacattgtggctttcgccc

SEQ ID NO: 1366959 - DNA, 25 bp, Homo sapien
tactatttaatgtcgacaccgctgt

SEQ ID NO: 1366960 - DNA, 25 bp, Homo sapien
ggcagccttgagaaccacccatttc

SEQ ID NO: 1366961 - DNA, 25 bp, Homo sapien
tctatgaggaatcgaggagcgttac

SEQ ID NO: 1366962 - DNA, 25 bp, Homo sapien
aaaggacccttataggtactcacag

SEQ ID NO: 1366963 - DNA, 25 bp, Homo sapien
gctgcacacgctagcatatctggaa

SEQ ID NO: 1366964 - DNA, 25 bp, Homo sapien
gaatggactgcttcgacactgaaag

SEQ ID NO: 1366965 - DNA, 25 bp, Homo sapien
tacatagacacaccaagaagtggat

SEQ ID NO: 1366966 - DNA, 25 bp, Homo sapien
tactttacacatgtgcctacataga

SEQ ID NO: 1366967 - DNA, 25 bp, Homo sapien
aattgtataggaagatgacagtatt

SEQ ID NO: 1366968 - DNA, 25 bp, Homo sapien
agttgactactgtaaatttcccata

SEQ ID NO: 1366969 - DNA, 25 bp, Homo sapien
tcatattgctctggagggtgaatca

SEQ ID NO: 1366970 - DNA, 25 bp, Homo sapien
gagcaccagccccggagttctcttt

SEQ ID NO: 1366971 - DNA, 25 bp, Homo sapien
gtatcacatccccatagagcaccag

SEQ ID NO: 1366972 - DNA, 25 bp, Homo sapien
tcagtctcgtatcacatccccatag

SEQ ID NO: 1366973 - DNA, 25 bp, Homo sapien
acagcagaggcttctaacacatatt

SEQ ID NO: 1366974 - DNA, 25 bp, Homo sapien
cagaggcttctaacacatatttggc

SEQ ID NO: 1366975 - DNA, 25 bp, Homo sapien
gcagaggcttctaacacatatttgg

SEQ ID NO: 1366976 - DNA, 25 bp, Homo sapien
cagcagaggcttctaacacatattt

SEQ ID NO: 1366977 - DNA, 25 bp, Homo sapien
ccgaagtcattttggacggccacct

SEQ ID NO: 1366978 - DNA, 25 bp, Homo sapien
ggccagcactggtaacctagccggg

SEQ ID NO: 1366979 - DNA, 25 bp, Homo sapien
agggcatcccctgcctgaacgaaga

SEQ ID NO: 1366980 - DNA, 25 bp, Homo sapien
tgaaccaaggcgtctctttaagtgg

SEQ ID NO: 1366981 - DNA, 25 bp, Homo sapien
cagcctcataacttgctcccactta

SEQ ID NO: 1366982 - DNA, 25 bp, Homo sapien
agcagcacatagttaggtctttttt

SEQ ID NO: 1366983 - DNA, 25 bp, Homo sapien
taagcagcacatagttaggtctttt

SEQ ID NO: 1366984 - DNA, 25 bp, Homo sapien
ttgcagcctcataacttgctcccac

SEQ ID NO: 1366985 - DNA, 25 bp, Homo sapien
aactgaagagattctgtacagcgaa

SEQ ID NO: 1366986 - DNA, 25 bp, Homo sapien
gattgaaggattcagcccttttaca

SEQ ID NO: 1366987 - DNA, 25 bp, Homo sapien
ccctttgtcggatatattgactgtg

SEQ ID NO: 1366988 - DNA, 25 bp, Homo sapien
cagcagagtaaacaggtcttatttt

SEQ ID NO: 1366989 - DNA, 25 bp, Homo sapien
tgtaagaaccagataattaatctgc

SEQ ID NO: 1366990 - DNA, 25 bp, Homo sapien
gaaaaatcagtttcaatttactctg

SEQ ID NO: 1366991 - DNA, 25 bp, Homo sapien
gatgaaaatctgaacgcataaagga

SEQ ID NO: 1366992 - DNA, 25 bp, Homo sapien
tgtgttgttaacagtgtgtccaggc

SEQ ID NO: 1366993 - DNA, 25 bp, Homo sapien
caattaattccacaggttgggcgta

SEQ ID NO: 1366994 - DNA, 25 bp, Homo sapien
tggactactccaaaagcacatgagt

SEQ ID NO: 1366995 - DNA, 25 bp, Homo sapien
tagaatttacggcatagtagccatc

SEQ ID NO: 1366996 - DNA, 25 bp, Homo sapien
taattcacagtcttgagtgagggca

SEQ ID NO: 1366997 - DNA, 25 bp, Homo sapien
aagatagagtgtctgaggaagtgat

SEQ ID NO: 1366998 - DNA, 25 bp, Homo sapien
aattggctgacaggaactcctcttt

SEQ ID NO: 1366999 - DNA, 25 bp, Homo sapien
gatagagtgtctgaggaagtgatca

SEQ ID NO: 1367000 - DNA, 25 bp, Homo sapien
aagtgatcaaattggctgacaggaa

SEQ ID NO: 1367001 - DNA, 25 bp, Homo sapien
gtttagtagcaagtgtttcagcttt

SEQ ID NO: 1367002 - DNA, 25 bp, Homo sapien
caagtttagtagcaagtgtttcagc

SEQ ID NO: 1367003 - DNA, 25 bp, Homo sapien
tagtagcaagtgtttcagcttttgc

SEQ ID NO: 1367004 - DNA, 25 bp, Homo sapien
aagtttagtagcaagtgtttcagct

SEQ ID NO: 1367005 - DNA, 25 bp, Homo sapien
cttgatgggatcctcatcgtgttca

SEQ ID NO: 1367006 - DNA, 25 bp, Homo sapien
gggatcctcatcgtgttcagtcacc

SEQ ID NO: 1367007 - DNA, 25 bp, Homo sapien
gatcctcatcgtgttcagtcaccac

SEQ ID NO: 1367008 - DNA, 25 bp, Homo sapien
tcagtcaccaccagttgagacttct

SEQ ID NO: 1367009 - DNA, 25 bp, Homo sapien
taccacggtggtgatagtattgaaa

SEQ ID NO: 1367010 - DNA, 25 bp, Homo sapien
accacggtggtgatagtattgaaat

SEQ ID NO: 1367011 - DNA, 25 bp, Homo sapien
ctaccacggtggtgatagtattgaa

SEQ ID NO: 1367012 - DNA, 25 bp, Homo sapien
tggggagagcccctttgctgtcagc

SEQ ID NO: 1367013 - DNA, 25 bp, Homo sapien
ggagagcccctttgctgtcagctct

SEQ ID NO: 1367014 - DNA, 25 bp, Homo sapien
gagcccctttgctgtcagctctctt

SEQ ID NO: 1367015 - DNA, 25 bp, Homo sapien
cttaatggggagagcccctttgctg

SEQ ID NO: 1367016 - DNA, 25 bp, Homo sapien
gcagttgagtaactggcagtccaag

SEQ ID NO: 1367017 - DNA, 25 bp, Homo sapien
cagttgagtaactggcagtccaagg

SEQ ID NO: 1367018 - DNA, 25 bp, Homo sapien
agttgagtaactggcagtccaaggc

SEQ ID NO: 1367019 - DNA, 25 bp, Homo sapien
tcatggaggatagccctttgccgcc

SEQ ID NO: 1367020 - DNA, 25 bp, Homo sapien
tttgccgccgcaactgcatgtagcg

SEQ ID NO: 1367021 - DNA, 25 bp, Homo sapien
ctttcgtgcgggatatcctgtccag

SEQ ID NO: 1367022 - DNA, 25 bp, Homo sapien
tttcggccgctcatggaggatagcc

SEQ ID NO: 1367023 - DNA, 25 bp, Homo sapien
tcatgacagcaggggtgggtgccac

SEQ ID NO: 1367024 - DNA, 25 bp, Homo sapien
cttcatgacagcaggggtgggtgcc

SEQ ID NO: 1367025 - DNA, 25 bp, Homo sapien
ttcatgacagcaggggtgggtgcca

SEQ ID NO: 1367026 - DNA, 25 bp, Homo sapien
tccatcactgctttgagtctgccta

SEQ ID NO: 1367027 - DNA, 25 bp, Homo sapien
gactcttgattctgtggtggtctcc

SEQ ID NO: 1367028 - DNA, 25 bp, Homo sapien
gcagctgtgtgctggacccagataa

SEQ ID NO: 1367029 - DNA, 25 bp, Homo sapien
ttttcagtgtcaagaacgtagtccg

SEQ ID NO: 1367030 - DNA, 25 bp, Homo sapien
agcattttacttacacttgctttct

SEQ ID NO: 1367031 - DNA, 25 bp, Homo sapien
gccattagcattttacttacacttg

SEQ ID NO: 1367032 - DNA, 25 bp, Homo sapien
cagctaggttctgccattagcattt

SEQ ID NO: 1367033 - DNA, 25 bp, Homo sapien
attttacttacacttgctttctcac

SEQ ID NO: 1367034 - DNA, 25 bp, Homo sapien
ttggacttctcagtctccaaaactg

SEQ ID NO: 1367035 - DNA, 25 bp, Homo sapien
gatgctgaccacttgatcttggact

SEQ ID NO: 1367036 - DNA, 25 bp, Homo sapien
tcttggacttctcagtctccaaaac

SEQ ID NO: 1367037 - DNA, 25 bp, Homo sapien
cagatgctgaccacttgatcttgga

SEQ ID NO: 1367038 - DNA, 25 bp, Homo sapien
ggcaaaggctttcggcaactccagg

SEQ ID NO: 1367039 - DNA, 25 bp, Homo sapien
aaaggctttcggcaactccaggcac

SEQ ID NO: 1367040 - DNA, 25 bp, Homo sapien
ctttcggcaactccaggcacagtct

SEQ ID NO: 1367041 - DNA, 25 bp, Homo sapien
ggctttcggcaactccaggcacagt

SEQ ID NO: 1367042 - DNA, 25 bp, Homo sapien
ttcaaggagcaaagaagctaacact

SEQ ID NO: 1367043 - DNA, 25 bp, Homo sapien
ttctccgctctaggcttagaaatgg

SEQ ID NO: 1367044 - DNA, 25 bp, Homo sapien
ctttttcaaccccatggtgtggtca

SEQ ID NO: 1367045 - DNA, 25 bp, Homo sapien
aaataatctacgcagaactgtggac

SEQ ID NO: 1367046 - DNA, 25 bp, Homo sapien
ttatgaagaacccatcctgcaccag

SEQ ID NO: 1367047 - DNA, 25 bp, Homo sapien
tcagtcctggcattgacctttgctg

SEQ ID NO: 1367048 - DNA, 25 bp, Homo sapien
tagttgtagagcatacagtcagtgt

SEQ ID NO: 1367049 - DNA, 25 bp, Homo sapien
tgctcattgtaggaatcagccaact

SEQ ID NO: 1367050 - DNA, 25 bp, Homo sapien
ttctggagagactcgtacatgcgtt

SEQ ID NO: 1367051 - DNA, 25 bp, Homo sapien
cgtacatgcgttgctgatccctggg

SEQ ID NO: 1367052 - DNA, 25 bp, Homo sapien
ggtccagaaggttctgcttgatggt

SEQ ID NO: 1367053 - DNA, 25 bp, Homo sapien
tgaactcggaagtacaggtccagaa

SEQ ID NO: 1367054 - DNA, 25 bp, Homo sapien
gctggagccatgtgaagtctcaaca

SEQ ID NO: 1367055 - DNA, 25 bp, Homo sapien
cttagtggcttgaggcaacgcttca

SEQ ID NO: 1367056 - DNA, 25 bp, Homo sapien
tatactcacaaacgcaaggcctgga

SEQ ID NO: 1367057 - DNA, 25 bp, Homo sapien
agggctgagtatccgcaatggcttc

SEQ ID NO: 1367058 - DNA, 25 bp, Homo sapien
tgtcaaattcataacacccatgggt

SEQ ID NO: 1367059 - DNA, 25 bp, Homo sapien
aatacttaatgagccagagctatgc

SEQ ID NO: 1367060 - DNA, 25 bp, Homo sapien
taacccatgtaatgtgcctgcagag

SEQ ID NO: 1367061 - DNA, 25 bp, Homo sapien
catgggttaaggaattccccattct

SEQ ID NO: 1367062 - DNA, 25 bp, Homo sapien
ccaagatgccggctcttcattggta

SEQ ID NO: 1367063 - DNA, 25 bp, Homo sapien
taatacattagtgatttgatgatgc

SEQ ID NO: 1367064 - DNA, 25 bp, Homo sapien
cggctcttcattggtaatacattag

SEQ ID NO: 1367065 - DNA, 25 bp, Homo sapien
acattagtgatttgatgatgctgca

SEQ ID NO: 1367066 - DNA, 25 bp, Homo sapien
gcaagacgggaggtccgtacatacc

SEQ ID NO: 1367067 - DNA, 25 bp, Homo sapien
gctcaggatcttcagcaagacggga

SEQ ID NO: 1367068 - DNA, 25 bp, Homo sapien
caggatcttcagcaagacgggaggt

SEQ ID NO: 1367069 - DNA, 25 bp, Homo sapien
tcttcagcaagacgggaggtccgta

SEQ ID NO: 1367070 - DNA, 25 bp, Homo sapien
gtgttcaggcagctggtcatctggc

SEQ ID NO: 1367071 - DNA, 25 bp, Homo sapien
catctggctccagagggtcactctc

SEQ ID NO: 1367072 - DNA, 25 bp, Homo sapien
acatcactatactgcgccccacata

SEQ ID NO: 1367073 - DNA, 25 bp, Homo sapien
gggtcactctcaaccacatcactat

SEQ ID NO: 1367074 - DNA, 25 bp, Homo sapien
gaaaattccaacatccattgtttct

SEQ ID NO: 1367075 - DNA, 25 bp, Homo sapien
aaaattccaacatccattgtttctc

SEQ ID NO: 1367076 - DNA, 25 bp, Homo sapien
cctgagtctctggatgtggcaatcc

SEQ ID NO: 1367077 - DNA, 25 bp, Homo sapien
ttatttacaattcccctgctgatgg

SEQ ID NO: 1367078 - DNA, 25 bp, Homo sapien
aggctcctgtcacctttcctgtcgg

SEQ ID NO: 1367079 - DNA, 25 bp, Homo sapien
ttaatccaatgggtgaggagactcc

SEQ ID NO: 1367080 - DNA, 25 bp, Homo sapien
gaccactgagactcttctgatcatc

SEQ ID NO: 1367081 - DNA, 25 bp, Homo sapien
tggatgctcttgataaacccagtga

SEQ ID NO: 1367082 - DNA, 25 bp, Homo sapien
cacatggattgattgctcttccctg

SEQ ID NO: 1367083 - DNA, 25 bp, Homo sapien
cagggcctagaagattgagctggtt

SEQ ID NO: 1367084 - DNA, 25 bp, Homo sapien
ttcttagaaatctccatgtgaggaa

SEQ ID NO: 1367085 - DNA, 25 bp, Homo sapien
tcttagaaatctccatgtgaggaag

SEQ ID NO: 1367086 - DNA, 25 bp, Homo sapien
tagaaatctccatgtgaggaagaaa

SEQ ID NO: 1367087 - DNA, 25 bp, Homo sapien
cttagaaatctccatgtgaggaaga

SEQ ID NO: 1367088 - DNA, 25 bp, Homo sapien
tgtgaaagacttaactgggcaacac

SEQ ID NO: 1367089 - DNA, 25 bp, Homo sapien
gaataagaaacgtcagaagcctcct

SEQ ID NO: 1367090 - DNA, 25 bp, Homo sapien
taacagagcatgctggccaaagagt

SEQ ID NO: 1367091 - DNA, 25 bp, Homo sapien
ccttagatgatccaagagactgagt

SEQ ID NO: 1367092 - DNA, 25 bp, Homo sapien
tagtgggattcgaaataacgtaaca

SEQ ID NO: 1367093 - DNA, 25 bp, Homo sapien
agttcgtgattcaattcgtgggtca

SEQ ID NO: 1367094 - DNA, 25 bp, Homo sapien
tcccttctggacatcagatgcagat

SEQ ID NO: 1367095 - DNA, 25 bp, Homo sapien
gcatgtgttcttgcaaaatgcatat

SEQ ID NO: 1367096 - DNA, 25 bp, Homo sapien
tctggtgaaccagaaatagtacctc

SEQ ID NO: 1367097 - DNA, 25 bp, Homo sapien
gacagcaactctggtggcctcattt

SEQ ID NO: 1367098 - DNA, 25 bp, Homo sapien
tgaaatcaagggcaagcaaatgcct

SEQ ID NO: 1367099 - DNA, 25 bp, Homo sapien
cctgcaggtccattaaagcaagggc

SEQ ID NO: 1367100 - DNA, 25 bp, Homo sapien
actgggtggaggtgactactgttca

SEQ ID NO: 1367101 - DNA, 25 bp, Homo sapien
cacatttgatgagctgtctgcagga

SEQ ID NO: 1367102 - DNA, 25 bp, Homo sapien
tactgttcagctactccagttggga

SEQ ID NO: 1367103 - DNA, 25 bp, Homo sapien
tatgtacacagcacccacaatcctt

SEQ ID NO: 1367104 - DNA, 25 bp, Homo sapien
tacccacggcaatgtgttgtgtgtc

SEQ ID NO: 1367105 - DNA, 25 bp, Homo sapien
ctggcttcatggttagaagcatggc

SEQ ID NO: 1367106 - DNA, 25 bp, Homo sapien
cattgctacagagaaagctgctggc

SEQ ID NO: 1367107 - DNA, 25 bp, Homo sapien
tctgtgatcccagtgtcatgatctg

SEQ ID NO: 1367108 - DNA, 25 bp, Homo sapien
cttgtccctgagggaactgtgagca

SEQ ID NO: 1367109 - DNA, 25 bp, Homo sapien
tccctgagggaactgtgagcaggca

SEQ ID NO: 1367110 - DNA, 25 bp, Homo sapien
ccctgagggaactgtgagcaggcat

SEQ ID NO: 1367111 - DNA, 25 bp, Homo sapien
tgtccctgagggaactgtgagcagg

SEQ ID NO: 1367112 - DNA, 25 bp, Homo sapien
tctgtagtgggataggtcttggttc

SEQ ID NO: 1367113 - DNA, 25 bp, Homo sapien
gccacgcgtttacctaattcactga

SEQ ID NO: 1367114 - DNA, 25 bp, Homo sapien
tggtgataaggtcatatggacccag

SEQ ID NO: 1367115 - DNA, 25 bp, Homo sapien
cagtctcagtatccaaggtagctgc

SEQ ID NO: 1367116 - DNA, 25 bp, Homo sapien
tcttctcaactatgtcaattgacat

SEQ ID NO: 1367117 - DNA, 25 bp, Homo sapien
tctcttctcaactatgtcaattgac

SEQ ID NO: 1367118 - DNA, 25 bp, Homo sapien
gcctctcttctcaactatgtcaatt

SEQ ID NO: 1367119 - DNA, 25 bp, Homo sapien
ctcaactatgtcaattgacattgtc

SEQ ID NO: 1367120 - DNA, 25 bp, Homo sapien
gggctgagacagcaatgcttagcaa

SEQ ID NO: 1367121 - DNA, 25 bp, Homo sapien
ccaagtcgcagttcggcagggccat

SEQ ID NO: 1367122 - DNA, 25 bp, Homo sapien
ctgagacagcaatgcttagcaagag

SEQ ID NO: 1367123 - DNA, 25 bp, Homo sapien
tccacttgccaagtcgcagttcggc

SEQ ID NO: 1367124 - DNA, 25 bp, Homo sapien
tgatcattccgatgcctgaaaactg

SEQ ID NO: 1367125 - DNA, 25 bp, Homo sapien
gactgttgtggttacctaaggccat

SEQ ID NO: 1367126 - DNA, 25 bp, Homo sapien
ctgactgttgtggttacctaaggcc

SEQ ID NO: 1367127 - DNA, 25 bp, Homo sapien
gtgtgtgcgtgatcattccgatgcc

SEQ ID NO: 1367128 - DNA, 25 bp, Homo sapien
ttttacaatctgactgcattaagac

SEQ ID NO: 1367129 - DNA, 25 bp, Homo sapien
tctgctagaggaatcataagaggca

SEQ ID NO: 1367130 - DNA, 25 bp, Homo sapien
cggaactaaatgcacaaagacctca

SEQ ID NO: 1367131 - DNA, 25 bp, Homo sapien
aaaaaaccatcatatgcggaactaa

SEQ ID NO: 1367132 - DNA, 25 bp, Homo sapien
taagaagacctaactggataagacc

SEQ ID NO: 1367133 - DNA, 25 bp, Homo sapien
cacataacagagagtaggcaacctt

SEQ ID NO: 1367134 - DNA, 25 bp, Homo sapien
gacaatgggtgaaacacagacgcta

SEQ ID NO: 1367135 - DNA, 25 bp, Homo sapien
taccacaggcttttgctaaagaggc

SEQ ID NO: 1367136 - DNA, 25 bp, Homo sapien
tatacaataagacctctgcagagcg

SEQ ID NO: 1367137 - DNA, 25 bp, Homo sapien
agctcgatgccacattccagaatag

SEQ ID NO: 1367138 - DNA, 25 bp, Homo sapien
tacctgatgaagtagagacgtgctt

SEQ ID NO: 1367139 - DNA, 25 bp, Homo sapien
tggagtatcttaagggcatgctatc

SEQ ID NO: 1367140 - DNA, 25 bp, Homo sapien
tacaggtcaaatggcatcacaaccc

SEQ ID NO: 1367141 - DNA, 25 bp, Homo sapien
gctccaggtaacttcataaatctgt

SEQ ID NO: 1367142 - DNA, 25 bp, Homo sapien
catttcagttttatctagctccagg

SEQ ID NO: 1367143 - DNA, 25 bp, Homo sapien
gagagaatgaaactgatttgtcaac

SEQ ID NO: 1367144 - DNA, 25 bp, Homo sapien
gaatgtctactcgaatcttgcttgc

SEQ ID NO: 1367145 - DNA, 25 bp, Homo sapien
cactaaaagtggaggtaatgggcaa

SEQ ID NO: 1367146 - DNA, 25 bp, Homo sapien
tcacaattggctagagagggaaaag

SEQ ID NO: 1367147 - DNA, 25 bp, Homo sapien
gctgggtaaattcaatgggcacatt

SEQ ID NO: 1367148 - DNA, 25 bp, Homo sapien
ctgccaaactgagaaagcaaaaaca

SEQ ID NO: 1367149 - DNA, 25 bp, Homo sapien
tgcattatgagagtaaaggagtcca

SEQ ID NO: 1367150 - DNA, 25 bp, Homo sapien
tatttccctacgcaacatgagcatc

SEQ ID NO: 1367151 - DNA, 25 bp, Homo sapien
cagtaataatacgaggatgaccacc

SEQ ID NO: 1367152 - DNA, 25 bp, Homo sapien
gaagtaaggcagtcaaagcaccagc

SEQ ID NO: 1367153 - DNA, 25 bp, Homo sapien
ctcccaggaagtttgcagatgtggc

SEQ ID NO: 1367154 - DNA, 25 bp, Homo sapien
aggaagtttgcagatgtggcaacac

SEQ ID NO: 1367155 - DNA, 25 bp, Homo sapien
ccaggaagtttgcagatgtggcaac

SEQ ID NO: 1367156 - DNA, 25 bp, Homo sapien
tactctcccaggaagtttgcagatg

SEQ ID NO: 1367157 - DNA, 25 bp, Homo sapien
cattcaacagatagttcctgagcac

SEQ ID NO: 1367158 - DNA, 25 bp, Homo sapien
tcattcaacagatagttcctgagca

SEQ ID NO: 1367159 - DNA, 25 bp, Homo sapien
caacagatagttcctgagcacttac

SEQ ID NO: 1367160 - DNA, 25 bp, Homo sapien
ttcaacagatagttcctgagcactt

SEQ ID NO: 1367161 - DNA, 25 bp, Homo sapien
tgagtcttcatagccatttcagcac

SEQ ID NO: 1367162 - DNA, 25 bp, Homo sapien
tatactaactgcaaagagctactgt

SEQ ID NO: 1367163 - DNA, 25 bp, Homo sapien
tcttcttggtataacactgcctctg

SEQ ID NO: 1367164 - DNA, 25 bp, Homo sapien
tgaagctaggccatcattccatagg

SEQ ID NO: 1367165 - DNA, 25 bp, Homo sapien
gagcatactctccatgataggacag

SEQ ID NO: 1367166 - DNA, 25 bp, Homo sapien
tgcaaagaaggacaagagcatactc

SEQ ID NO: 1367167 - DNA, 25 bp, Homo sapien
gctcaggcatgtgcaagcaaaggaa

SEQ ID NO: 1367168 - DNA, 25 bp, Homo sapien
tagagagatcatatataccccgtct

SEQ ID NO: 1367169 - DNA, 25 bp, Homo sapien
tgatctctagacactaataacttgc

SEQ ID NO: 1367170 - DNA, 25 bp, Homo sapien
taaatatacaccgttgaagacactc

SEQ ID NO: 1367171 - DNA, 25 bp, Homo sapien
cacagacatttcctttcagatagct

SEQ ID NO: 1367172 - DNA, 25 bp, Homo sapien
agtttatcccctgtatccatcacag

SEQ ID NO: 1367173 - DNA, 25 bp, Homo sapien
ggctacacatcagtactggtctgca

SEQ ID NO: 1367174 - DNA, 25 bp, Homo sapien
gatgacctatgtcgtacttgggaag

SEQ ID NO: 1367175 - DNA, 25 bp, Homo sapien
tagcgtcttctacaccagaggtccc

SEQ ID NO: 1367176 - DNA, 25 bp, Homo sapien
ccaaaaaggatctgacagctcttag

SEQ ID NO: 1367177 - DNA, 25 bp, Homo sapien
gatgtaaggtttttacccacattca

SEQ ID NO: 1367178 - DNA, 25 bp, Homo sapien
tgttgttttagaaatgccatacagc

SEQ ID NO: 1367179 - DNA, 25 bp, Homo sapien
ttccaggtgctatacaagattcggg

SEQ ID NO: 1367180 - DNA, 25 bp, Homo sapien
caaaatgccagaaatggtacatgaa

SEQ ID NO: 1367181 - DNA, 25 bp, Homo sapien
aaacatcacgtcttccatctggcgg

SEQ ID NO: 1367182 - DNA, 25 bp, Homo sapien
tttttagctcagtacagtgccatgc

SEQ ID NO: 1367183 - DNA, 25 bp, Homo sapien
caagctgtgaggaaagcatctctgt

SEQ ID NO: 1367184 - DNA, 25 bp, Homo sapien
ggagtcaacgcatcctaagaggaaa

SEQ ID NO: 1367185 - DNA, 25 bp, Homo sapien
ggaatactatttcaatggacctaag

SEQ ID NO: 1367186 - DNA, 25 bp, Homo sapien
tgcccgccacattgtattttctatg

SEQ ID NO: 1367187 - DNA, 25 bp, Homo sapien
cattgtggccttatttacaagagtc

SEQ ID NO: 1367188 - DNA, 25 bp, Homo sapien
ggacctaagagaggtctctcagtat

SEQ ID NO: 1367189 - DNA, 25 bp, Homo sapien
caatgtgaaaacagttaacactact

SEQ ID NO: 1367190 - DNA, 25 bp, Homo sapien
agagatcggccgcacaacaatgtga

SEQ ID NO: 1367191 - DNA, 25 bp, Homo sapien
gacagttgttgttcagtgggtataa

SEQ ID NO: 1367192 - DNA, 25 bp, Homo sapien
caggtacaaaagagtattattattc

SEQ ID NO: 1367193 - DNA, 25 bp, Homo sapien
taaaaaatctccttatagcttcagt

SEQ ID NO: 1367194 - DNA, 25 bp, Homo sapien
aaaaaatctccttatagcttcagta

SEQ ID NO: 1367195 - DNA, 25 bp, Homo sapien
ttaaaaaatctccttatagcttcag

SEQ ID NO: 1367196 - DNA, 25 bp, Homo sapien
aatcaaagaattttctgtgatgttt

SEQ ID NO: 1367197 - DNA, 25 bp, Homo sapien
tattaagataaatcaaagaattttc

SEQ ID NO: 1367198 - DNA, 25 bp, Homo sapien
ctattaagataaatcaaagaatttt

SEQ ID NO: 1367199 - DNA, 25 bp, Homo sapien
acaaagttctcagaacgagagcaaa

SEQ ID NO: 1367200 - DNA, 25 bp, Homo sapien
agaaaaatactaatactggagcatt

SEQ ID NO: 1367201 - DNA, 25 bp, Homo sapien
ataaaaccaccgaatactccataca

SEQ ID NO: 1367202 - DNA, 25 bp, Homo sapien
aaaaccaccgaatactccatacaca

SEQ ID NO: 1367203 - DNA, 25 bp, Homo sapien
gactggcggcaatagaacacgtggc

SEQ ID NO: 1367204 - DNA, 25 bp, Homo sapien
gattcctaagatttgggcgcccata

SEQ ID NO: 1367205 - DNA, 25 bp, Homo sapien
cagtagattgcagtagggccagccg

SEQ ID NO: 1367206 - DNA, 25 bp, Homo sapien
ctgacaagaattagagcggcggccg

SEQ ID NO: 1367207 - DNA, 25 bp, Homo sapien
caatacagtattagctatgggcact

SEQ ID NO: 1367208 - DNA, 25 bp, Homo sapien
tgtccttcaggatcattcatgtgtc

SEQ ID NO: 1367209 - DNA, 25 bp, Homo sapien
tatgccatacaaatccctaggacct

SEQ ID NO: 1367210 - DNA, 25 bp, Homo sapien
cataagatctacactcttggcagat

SEQ ID NO: 1367211 - DNA, 25 bp, Homo sapien
tacatatcctagcagatacacttgg

SEQ ID NO: 1367212 - DNA, 25 bp, Homo sapien
gcttctgccatcatgatgcaaaatt

SEQ ID NO: 1367213 - DNA, 25 bp, Homo sapien
cacttggaagtattggtgtaattgc

SEQ ID NO: 1367214 - DNA, 25 bp, Homo sapien
gcaaaattttggtctgatgatagca

SEQ ID NO: 1367215 - DNA, 25 bp, Homo sapien
ttgcccatatacacaaatactgtct

SEQ ID NO: 1367216 - DNA, 25 bp, Homo sapien
tcacaaatatagttttcatgttttt

SEQ ID NO: 1367217 - DNA, 25 bp, Homo sapien
gttacataattaatcacaaatatag

SEQ ID NO: 1367218 - DNA, 25 bp, Homo sapien
gcccatatacacaaatactgtctaa

SEQ ID NO: 1367219 - DNA, 25 bp, Homo sapien
gatttgacacagcttccctaatttc

SEQ ID NO: 1367220 - DNA, 25 bp, Homo sapien
taggcatctcttgatttgacacagc

SEQ ID NO: 1367221 - DNA, 25 bp, Homo sapien
cttgtgtagctttgcattcatgact

SEQ ID NO: 1367222 - DNA, 25 bp, Homo sapien
cacagtcatgcttacaaaggcaaag

SEQ ID NO: 1367223 - DNA, 25 bp, Homo sapien
ccaaggcccctggagtgcctggtgt

SEQ ID NO: 1367224 - DNA, 25 bp, Homo sapien
gatctcccattaccacacactctgt

SEQ ID NO: 1367225 - DNA, 25 bp, Homo sapien
ggagtgcctggtgtttggatctccc

SEQ ID NO: 1367226 - DNA, 25 bp, Homo sapien
agtgcctggtgtttggatctcccat

SEQ ID NO: 1367227 - DNA, 25 bp, Homo sapien
ccacagccattcgggctctttagaa

SEQ ID NO: 1367228 - DNA, 25 bp, Homo sapien
cagccattcgggctctttagaaaac

SEQ ID NO: 1367229 - DNA, 25 bp, Homo sapien
tgctcggaatggctcctcagatctt

SEQ ID NO: 1367230 - DNA, 25 bp, Homo sapien
gccattcgggctctttagaaaactg

SEQ ID NO: 1367231 - DNA, 25 bp, Homo sapien
agtcttagctcagtcaggaatttgc

SEQ ID NO: 1367232 - DNA, 25 bp, Homo sapien
ttttgggtttggatgtagctctaag

SEQ ID NO: 1367233 - DNA, 25 bp, Homo sapien
atttgctaagcttgtcgttttctac

SEQ ID NO: 1367234 - DNA, 25 bp, Homo sapien
tttggatgtagctctaagtcttagc

SEQ ID NO: 1367235 - DNA, 25 bp, Homo sapien
cattcaagtaagtggaaggaggttc

SEQ ID NO: 1367236 - DNA, 25 bp, Homo sapien
aaagtttattcagctgcttctttgg

SEQ ID NO: 1367237 - DNA, 25 bp, Homo sapien
taaaatggctgaaattgaaagttta

SEQ ID NO: 1367238 - DNA, 25 bp, Homo sapien
tttggaaactgcatttgagctttga

SEQ ID NO: 1367239 - DNA, 25 bp, Homo sapien
aaatgagaatctgtaaaacttgaag

SEQ ID NO: 1367240 - DNA, 25 bp, Homo sapien
gaatctgtaaaacttgaagctgtcc

SEQ ID NO: 1367241 - DNA, 25 bp, Homo sapien
tgagaatctgtaaaacttgaagctg

SEQ ID NO: 1367242 - DNA, 25 bp, Homo sapien
aatctgtaaaacttgaagctgtcct

SEQ ID NO: 1367243 - DNA, 25 bp, Homo sapien
caactcccgagcactaagtagacgg

SEQ ID NO: 1367244 - DNA, 25 bp, Homo sapien
tacgtacagattgactttgcagcca

SEQ ID NO: 1367245 - DNA, 25 bp, Homo sapien
tcaatttcaactaggagccaaccag

SEQ ID NO: 1367246 - DNA, 25 bp, Homo sapien
tagagagcagtatccttgagtagca

SEQ ID NO: 1367247 - DNA, 25 bp, Homo sapien
tcatcccagccagtaagaatttcag

SEQ ID NO: 1367248 - DNA, 25 bp, Homo sapien
ttcatgttgaatgcccacaccacca

SEQ ID NO: 1367249 - DNA, 25 bp, Homo sapien
gaaattggaaatctgtgctatacgt

SEQ ID NO: 1367250 - DNA, 25 bp, Homo sapien
ccatattgggttttcaaagtgcctt

SEQ ID NO: 1367251 - DNA, 25 bp, Homo sapien
tattaaaggtacagaggaaatgtgg

SEQ ID NO: 1367252 - DNA, 25 bp, Homo sapien
tcttcaaatgccaagtcatccactt

SEQ ID NO: 1367253 - DNA, 25 bp, Homo sapien
ccctgcaggatggaaacaattatta

SEQ ID NO: 1367254 - DNA, 25 bp, Homo sapien
tacaattgctttcaggaatcctaaa

SEQ ID NO: 1367255 - DNA, 25 bp, Homo sapien
tggacaacaaatttgtattgctcag

SEQ ID NO: 1367256 - DNA, 25 bp, Homo sapien
tctgagtgtaactttgccaatattt

SEQ ID NO: 1367257 - DNA, 25 bp, Homo sapien
aaccaaacaaaactcgtatctgagt

SEQ ID NO: 1367258 - DNA, 25 bp, Homo sapien
gataattccaatgagaaatactacc

SEQ ID NO: 1367259 - DNA, 25 bp, Homo sapien
gaagcagtgtagttctacctctcat

SEQ ID NO: 1367260 - DNA, 25 bp, Homo sapien
attttacatctaagcaaggactggc

SEQ ID NO: 1367261 - DNA, 25 bp, Homo sapien
cagatcttctgactcgaagttgaga

SEQ ID NO: 1367262 - DNA, 25 bp, Homo sapien
gcctctccagtgtaatatttgcctt

SEQ ID NO: 1367263 - DNA, 25 bp, Homo sapien
tataaaccaggctaattcacaggtc

SEQ ID NO: 1367264 - DNA, 25 bp, Homo sapien
tcattcttgtcgtgttggcttccag

SEQ ID NO: 1367265 - DNA, 25 bp, Homo sapien
tcaaccagagactcaagatagcctc

SEQ ID NO: 1367266 - DNA, 25 bp, Homo sapien
gaagccttagtgacccagatctcaa

SEQ ID NO: 1367267 - DNA, 25 bp, Homo sapien
tgcccaagtgcaatacaacaaatct

SEQ ID NO: 1367268 - DNA, 25 bp, Homo sapien
taaaatgtttgagtacaaggctaag

SEQ ID NO: 1367269 - DNA, 25 bp, Homo sapien
acagttagcctcaatgaagattcta

SEQ ID NO: 1367270 - DNA, 25 bp, Homo sapien
tcaaagactatgttgtgattcggtt

SEQ ID NO: 1367271 - DNA, 25 bp, Homo sapien
aagcagcttctttactatcatcaat

SEQ ID NO: 1367272 - DNA, 25 bp, Homo sapien
tctttactatcatcaatctctgcca

SEQ ID NO: 1367273 - DNA, 25 bp, Homo sapien
gcagcttctttactatcatcaatct

SEQ ID NO: 1367274 - DNA, 25 bp, Homo sapien
caaagcagcttctttactatcatca

SEQ ID NO: 1367275 - DNA, 25 bp, Homo sapien
tccagaatatgtaataaacactcaa

SEQ ID NO: 1367276 - DNA, 25 bp, Homo sapien
atccagaatatgtaataaacactca

SEQ ID NO: 1367277 - DNA, 25 bp, Homo sapien
ccagaatatgtaataaacactcaaa

SEQ ID NO: 1367278 - DNA, 25 bp, Homo sapien
cagaatatgtaataaacactcaaaa

SEQ ID NO: 1367279 - DNA, 25 bp, Homo sapien
cctggtctgctttatgtgtacatcc

SEQ ID NO: 1367280 - DNA, 25 bp, Homo sapien
tactagataagccaaaagacctgtt

SEQ ID NO: 1367281 - DNA, 25 bp, Homo sapien
tgatatcatagggaaaaaactcact

SEQ ID NO: 1367282 - DNA, 25 bp, Homo sapien
gatgtctatccacaagctttccagc

SEQ ID NO: 1367283 - DNA, 25 bp, Homo sapien
tcaattacctaccacaacacctggg

SEQ ID NO: 1367284 - DNA, 25 bp, Homo sapien
ccatatcaatccatatatggctgaa

SEQ ID NO: 1367285 - DNA, 25 bp, Homo sapien
aaccatatcaatccatatatggctg

SEQ ID NO: 1367286 - DNA, 25 bp, Homo sapien
ttcacagggcggcaagagtgagaat

SEQ ID NO: 1367287 - DNA, 25 bp, Homo sapien
tacatcagacaatggtaaatatcta

SEQ ID NO: 1367288 - DNA, 25 bp, Homo sapien
ttacatcagacaatggtaaatatct

SEQ ID NO: 1367289 - DNA, 25 bp, Homo sapien
catcagacaatggtaaatatctatg

SEQ ID NO: 1367290 - DNA, 25 bp, Homo sapien
atcagacaatggtaaatatctatgt

SEQ ID NO: 1367291 - DNA, 25 bp, Homo sapien
tccatctccattggatgtatgctgc

SEQ ID NO: 1367292 - DNA, 25 bp, Homo sapien
aaacagacttagcatctccatctcc

SEQ ID NO: 1367293 - DNA, 25 bp, Homo sapien
gatcaaggaatgcaatggttctccc

SEQ ID NO: 1367294 - DNA, 25 bp, Homo sapien
tctgagctattttctggtatggaaa

SEQ ID NO: 1367295 - DNA, 25 bp, Homo sapien
caaccctggctaagccaacacaaag

SEQ ID NO: 1367296 - DNA, 25 bp, Homo sapien
gtcgtcggctccaaccctggctaag

SEQ ID NO: 1367297 - DNA, 25 bp, Homo sapien
tttctggtcgtcggctccaaccctg

SEQ ID NO: 1367298 - DNA, 25 bp, Homo sapien
aaccctggctaagccaacacaaagt

SEQ ID NO: 1367299 - DNA, 25 bp, Homo sapien
ctgccttgccatccaattagctgtg

SEQ ID NO: 1367300 - DNA, 25 bp, Homo sapien
agttatccattaattcatccaaggg

SEQ ID NO: 1367301 - DNA, 25 bp, Homo sapien
ggacttgacaagctatacttacact

SEQ ID NO: 1367302 - DNA, 25 bp, Homo sapien
cacaagtacatttcaagaagcccca

SEQ ID NO: 1367303 - DNA, 25 bp, Homo sapien
atatgagagcccttctagtgtcttg

SEQ ID NO: 1367304 - DNA, 25 bp, Homo sapien
aatgtagtaacagaggaataatatg

SEQ ID NO: 1367305 - DNA, 25 bp, Homo sapien
ttaagtcatatacacatctaaatgt

SEQ ID NO: 1367306 - DNA, 25 bp, Homo sapien
ccatagtggtatgagatattaagtc

SEQ ID NO: 1367307 - DNA, 25 bp, Homo sapien
ggtttacactcatataccgtggagg

SEQ ID NO: 1367308 - DNA, 25 bp, Homo sapien
gctgggctgcttggtttacactcat

SEQ ID NO: 1367309 - DNA, 25 bp, Homo sapien
gattttgaacaatctccagaagctg

SEQ ID NO: 1367310 - DNA, 25 bp, Homo sapien
tggaggttcatagatcttccttccc

SEQ ID NO: 1367311 - DNA, 25 bp, Homo sapien
tagccatgaaactacataatatgtt

SEQ ID NO: 1367312 - DNA, 25 bp, Homo sapien
ctgttcttagccatgaaactacata

SEQ ID NO: 1367313 - DNA, 25 bp, Homo sapien
ttcttagccatgaaactacataata

SEQ ID NO: 1367314 - DNA, 25 bp, Homo sapien
attaatgcaattagctctcccaggt

SEQ ID NO: 1367315 - DNA, 25 bp, Homo sapien
cggcctcacacccatgttttcagaa

SEQ ID NO: 1367316 - DNA, 25 bp, Homo sapien
aatcccaacgcattaattcattcca

SEQ ID NO: 1367317 - DNA, 25 bp, Homo sapien
aagtagaatgtattgaattgttcaa

SEQ ID NO: 1367318 - DNA, 25 bp, Homo sapien
tatactgcttatcatttcgtaagaa

SEQ ID NO: 1367319 - DNA, 25 bp, Homo sapien
aaagactgctcctttactttgatgt

SEQ ID NO: 1367320 - DNA, 25 bp, Homo sapien
tgcgtcagagactgggataccacag

SEQ ID NO: 1367321 - DNA, 25 bp, Homo sapien
ttttaacagggatttgagcatggac

SEQ ID NO: 1367322 - DNA, 25 bp, Homo sapien
gctagtaactgcacagacccatctg

SEQ ID NO: 1367323 - DNA, 25 bp, Homo sapien
gactgtgtgtcagacgctgcgtcag

SEQ ID NO: 1367324 - DNA, 25 bp, Homo sapien
caaagaagctttctggtctccaagt

SEQ ID NO: 1367325 - DNA, 25 bp, Homo sapien
tcaaagaagctttctggtctccaag

SEQ ID NO: 1367326 - DNA, 25 bp, Homo sapien
tagaaactgtctctccaaacttata

SEQ ID NO: 1367327 - DNA, 25 bp, Homo sapien
aacaatagaaactgtctctccaaac

SEQ ID NO: 1367328 - DNA, 25 bp, Homo sapien
atagaaactgtctctccaaacttat

SEQ ID NO: 1367329 - DNA, 25 bp, Homo sapien
tgctctccaggaccctgatttataa

SEQ ID NO: 1367330 - DNA, 25 bp, Homo sapien
caatcgaagggcttaccagtgaact

SEQ ID NO: 1367331 - DNA, 25 bp, Homo sapien
caaacttcttcagtgaatcctggaa

SEQ ID NO: 1367332 - DNA, 25 bp, Homo sapien
gatttataaactgtaaccactcctg

SEQ ID NO: 1367333 - DNA, 25 bp, Homo sapien
tgtctatcagtgtggaggatcagaa

SEQ ID NO: 1367334 - DNA, 25 bp, Homo sapien
ctgtctatcagtgtggaggatcaga

SEQ ID NO: 1367335 - DNA, 25 bp, Homo sapien
aaaaatgtatgtcctattagcttaa

SEQ ID NO: 1367336 - DNA, 25 bp, Homo sapien
tatgtcctattagcttaaggtttac

SEQ ID NO: 1367337 - DNA, 25 bp, Homo sapien
gatttatatgggatgtgttctattt

SEQ ID NO: 1367338 - DNA, 25 bp, Homo sapien
gcaaaatatggagaaagggctagtt

SEQ ID NO: 1367339 - DNA, 25 bp, Homo sapien
gcagcattgtcacaagcttgtccag

SEQ ID NO: 1367340 - DNA, 25 bp, Homo sapien
ttgtggattagggtgattctcctgc

SEQ ID NO: 1367341 - DNA, 25 bp, Homo sapien
catccgtcatcagttcttaaaaggc

SEQ ID NO: 1367342 - DNA, 25 bp, Homo sapien
ctccgccttgtggattagggtgatt

SEQ ID NO: 1367343 - DNA, 25 bp, Homo sapien
ccactgaaaaacctcctttgttgca

SEQ ID NO: 1367344 - DNA, 25 bp, Homo sapien
tccactgaaaaacctcctttgttgc

SEQ ID NO: 1367345 - DNA, 25 bp, Homo sapien
cactgaaaaacctcctttgttgcat

SEQ ID NO: 1367346 - DNA, 25 bp, Homo sapien
ggaattcccagctttgttgctctta

SEQ ID NO: 1367347 - DNA, 25 bp, Homo sapien
aataactctataaggaattcccagc

SEQ ID NO: 1367348 - DNA, 25 bp, Homo sapien
ggaggcattgtgaataactctataa

SEQ ID NO: 1367349 - DNA, 25 bp, Homo sapien
gctcttagaacaagatcactgtgtg

SEQ ID NO: 1367350 - DNA, 25 bp, Homo sapien
cattatgtcgagaaaatgtgcatac

SEQ ID NO: 1367351 - DNA, 25 bp, Homo sapien
gcaagtttgggtcaagataaccaca

SEQ ID NO: 1367352 - DNA, 25 bp, Homo sapien
cattgtgtgataccattttacccac

SEQ ID NO: 1367353 - DNA, 25 bp, Homo sapien
caaaccctgctagtaatctatcaac

SEQ ID NO: 1367354 - DNA, 25 bp, Homo sapien
gaagcactaacacttggcactatcc

SEQ ID NO: 1367355 - DNA, 25 bp, Homo sapien
atagtgtctccgtttttgacataag

SEQ ID NO: 1367356 - DNA, 25 bp, Homo sapien
tgcaatgatatagcgcaaatgacgt

SEQ ID NO: 1367357 - DNA, 25 bp, Homo sapien
cactgcgccggctggtatgtttgtt

SEQ ID NO: 1367358 - DNA, 25 bp, Homo sapien
catttgtaaagctagaatcctggga

SEQ ID NO: 1367359 - DNA, 25 bp, Homo sapien
gatataaatcttaggtaaccagctg

SEQ ID NO: 1367360 - DNA, 25 bp, Homo sapien
gatgcccatcttcgtggtaatgaca

SEQ ID NO: 1367361 - DNA, 25 bp, Homo sapien
tggctccaggtacacgatgaaattc

SEQ ID NO: 1367362 - DNA, 25 bp, Homo sapien
caaggaatgcaacatcactgatatc

SEQ ID NO: 1367363 - DNA, 25 bp, Homo sapien
catcactgatatcagcatcctttaa

SEQ ID NO: 1367364 - DNA, 25 bp, Homo sapien
ccacaaggaatgcaacatcactgat

SEQ ID NO: 1367365 - DNA, 25 bp, Homo sapien
caccaaccacaaggaatgcaacatc

SEQ ID NO: 1367366 - DNA, 25 bp, Homo sapien
agacttcaactcaggactgctttgg

SEQ ID NO: 1367367 - DNA, 25 bp, Homo sapien
ttcactatctgcatgaacttaggca

SEQ ID NO: 1367368 - DNA, 25 bp, Homo sapien
agagtggcagacttcaactcaggac

SEQ ID NO: 1367369 - DNA, 25 bp, Homo sapien
cattcactatctgcatgaacttagg

SEQ ID NO: 1367370 - DNA, 25 bp, Homo sapien
caggtcttgactctgtaagtagtaa

SEQ ID NO: 1367371 - DNA, 25 bp, Homo sapien
tccagcaccttaacaaagtacacat

SEQ ID NO: 1367372 - DNA, 25 bp, Homo sapien
cacataatttactgtaggtaaggct

SEQ ID NO: 1367373 - DNA, 25 bp, Homo sapien
aataatcctaatctacatgtaaagc

SEQ ID NO: 1367374 - DNA, 25 bp, Homo sapien
taaaataggacaaagcaccctttca

SEQ ID NO: 1367375 - DNA, 25 bp, Homo sapien
tcctcagatcattaatgaacaaggg

SEQ ID NO: 1367376 - DNA, 25 bp, Homo sapien
tgaacaagggatgcgtttcaaaggg

SEQ ID NO: 1367377 - DNA, 25 bp, Homo sapien
tcttgactacctcatgaaataaggg

SEQ ID NO: 1367378 - DNA, 25 bp, Homo sapien
tgcagcgtctaacaacttccaggcc

SEQ ID NO: 1367379 - DNA, 25 bp, Homo sapien
gcttccttccctacagttaggactg

SEQ ID NO: 1367380 - DNA, 25 bp, Homo sapien
ggcccaacccgatgagataaagcat

SEQ ID NO: 1367381 - DNA, 25 bp, Homo sapien
taggcttccagatacactcgactgc

SEQ ID NO: 1367382 - DNA, 25 bp, Homo sapien
gatgacaaccaaagtagcacaagag

SEQ ID NO: 1367383 - DNA, 25 bp, Homo sapien
tctagtgatgaacacgatgacaacc

SEQ ID NO: 1367384 - DNA, 25 bp, Homo sapien
cttatgtcacgcttaagaactggga

SEQ ID NO: 1367385 - DNA, 25 bp, Homo sapien
cagaaaaaccgtcagtaacaccgag

SEQ ID NO: 1367386 - DNA, 25 bp, Homo sapien
cagttttgcctcttgttacacaaac

SEQ ID NO: 1367387 - DNA, 25 bp, Homo sapien
ccgctgagagaatcgtaggtagttc

SEQ ID NO: 1367388 - DNA, 25 bp, Homo sapien
cgctgagagaatcgtaggtagttct

SEQ ID NO: 1367389 - DNA, 25 bp, Homo sapien
attcttaactaccacctttccgcag

SEQ ID NO: 1367390 - DNA, 25 bp, Homo sapien
gctccgtgcagagaaaaggcccacg

SEQ ID NO: 1367391 - DNA, 25 bp, Homo sapien
agcgccggctccgtgcagagaaaag

SEQ ID NO: 1367392 - DNA, 25 bp, Homo sapien
agaagcaactgcaaaagcgccggct

SEQ ID NO: 1367393 - DNA, 25 bp, Homo sapien
ggtgccgcaaaatgctggtgccttt

SEQ ID NO: 1367394 - DNA, 25 bp, Homo sapien
aaaggatcgggcgtgctcacgagcc

SEQ ID NO: 1367395 - DNA, 25 bp, Homo sapien
cgtggagccaccgtttcatagcctc

SEQ ID NO: 1367396 - DNA, 25 bp, Homo sapien
cagagcccggctccactgaagaaac

SEQ ID NO: 1367397 - DNA, 25 bp, Homo sapien
catggcttaaacacccgcttcctaa

SEQ ID NO: 1367398 - DNA, 25 bp, Homo sapien
agactaaatcggtgtaatgttgtcc

SEQ ID NO: 1367399 - DNA, 25 bp, Homo sapien
cattgcagttgaccttcatccttac

SEQ ID NO: 1367400 - DNA, 25 bp, Homo sapien
tcatccttacaaacacgctaactgg

SEQ ID NO: 1367401 - DNA, 25 bp, Homo sapien
caggaagcccagacatgttgccgat

SEQ ID NO: 1367402 - DNA, 25 bp, Homo sapien
ttctttacaataacagccttgatca

SEQ ID NO: 1367403 - DNA, 25 bp, Homo sapien
tctttacaataacagccttgatcac

SEQ ID NO: 1367404 - DNA, 25 bp, Homo sapien
acaggaatgaggaaacgtgctgtta

SEQ ID NO: 1367405 - DNA, 25 bp, Homo sapien
cgtgctgttaatgtgtctcttactt

SEQ ID NO: 1367406 - DNA, 25 bp, Homo sapien
taatagaaattgttgttcagcactg

SEQ ID NO: 1367407 - DNA, 25 bp, Homo sapien
gtgtcacacactagtataatcttgg

SEQ ID NO: 1367408 - DNA, 25 bp, Homo sapien
caaggctacattaacccagtccaga

SEQ ID NO: 1367409 - DNA, 25 bp, Homo sapien
gatgtctgtctacagtcattgccat

SEQ ID NO: 1367410 - DNA, 25 bp, Homo sapien
aggctacattaacccagtccagatt

SEQ ID NO: 1367411 - DNA, 25 bp, Homo sapien
ctacattaacccagtccagattcct

SEQ ID NO: 1367412 - DNA, 25 bp, Homo sapien
ttgccgaaagctgccatcagtccat

SEQ ID NO: 1367413 - DNA, 25 bp, Homo sapien
gacagagttgccaatagtcttcatg

SEQ ID NO: 1367414 - DNA, 25 bp, Homo sapien
tcatgttgtcttccgttgttttcct

SEQ ID NO: 1367415 - DNA, 25 bp, Homo sapien
ctattggtacatcgctttgccgaaa

SEQ ID NO: 1367416 - DNA, 25 bp, Homo sapien
ctttgaacttcctccactttgggca

SEQ ID NO: 1367417 - DNA, 25 bp, Homo sapien
tttgaacttcctccactttgggcag

SEQ ID NO: 1367418 - DNA, 25 bp, Homo sapien
tggtctttgaacttcctccactttg

SEQ ID NO: 1367419 - DNA, 25 bp, Homo sapien
tctttgaacttcctccactttgggc

SEQ ID NO: 1367420 - DNA, 25 bp, Homo sapien
ctttggctctagatggaatgatagg

SEQ ID NO: 1367421 - DNA, 25 bp, Homo sapien
ggaatgatagggtatgcataaatgt

SEQ ID NO: 1367422 - DNA, 25 bp, Homo sapien
ttttactttggctctagatggaatg

SEQ ID NO: 1367423 - DNA, 25 bp, Homo sapien
tgatagggtatgcataaatgttcat

SEQ ID NO: 1367424 - DNA, 25 bp, Homo sapien
cgttactcgccttaatggtccatcc

SEQ ID NO: 1367425 - DNA, 25 bp, Homo sapien
ggtccatcctttatagccaaaatga

SEQ ID NO: 1367426 - DNA, 25 bp, Homo sapien
cagcccaatcttttccgttactcgc

SEQ ID NO: 1367427 - DNA, 25 bp, Homo sapien
taatggtccatcctttatagccaaa

SEQ ID NO: 1367428 - DNA, 25 bp, Homo sapien
ttgatcatcccagctgaatgtgtgg

SEQ ID NO: 1367429 - DNA, 25 bp, Homo sapien
tcatcccagctgaatgtgtggggtc

SEQ ID NO: 1367430 - DNA, 25 bp, Homo sapien
cttgatcatcccagctgaatgtgtg

SEQ ID NO: 1367431 - DNA, 25 bp, Homo sapien
gatcatcccagctgaatgtgtgggg

SEQ ID NO: 1367432 - DNA, 25 bp, Homo sapien
ggctcagtgactatggctttgcaaa

SEQ ID NO: 1367433 - DNA, 25 bp, Homo sapien
gctttgcaaacactaaacattcctg

SEQ ID NO: 1367434 - DNA, 25 bp, Homo sapien
aatctttattgggagaagccgtcaa

SEQ ID NO: 1367435 - DNA, 25 bp, Homo sapien
ctgtctcaagtcctgtagatggctt

SEQ ID NO: 1367436 - DNA, 25 bp, Homo sapien
agtgaagggaatttctagagaaggc

SEQ ID NO: 1367437 - DNA, 25 bp, Homo sapien
gcatgggaggcttgtaaataggcag

SEQ ID NO: 1367438 - DNA, 25 bp, Homo sapien
caaaaggtcaccagagccaaaaagc

SEQ ID NO: 1367439 - DNA, 25 bp, Homo sapien
gggagttattgcatccacgctggat

SEQ ID NO: 1367440 - DNA, 25 bp, Homo sapien
gcagcgtgcgtcacaccacagacag

SEQ ID NO: 1367441 - DNA, 25 bp, Homo sapien
tccaacgttagaagactgcatttca

SEQ ID NO: 1367442 - DNA, 25 bp, Homo sapien
cactttgaacaatcaagggtgtttg

SEQ ID NO: 1367443 - DNA, 25 bp, Homo sapien
catctactacagctgtctgggccag

SEQ ID NO: 1367444 - DNA, 25 bp, Homo sapien
cttccaagttcgtatctcttatcta

SEQ ID NO: 1367445 - DNA, 25 bp, Homo sapien
tccaagttcgtatctcttatctata

SEQ ID NO: 1367446 - DNA, 25 bp, Homo sapien
ttccaagttcgtatctcttatctat

SEQ ID NO: 1367447 - DNA, 25 bp, Homo sapien
gtttgcgtctcttggtgttatttcc

SEQ ID NO: 1367448 - DNA, 25 bp, Homo sapien
caaggtttgcgtctcttggtgttat

SEQ ID NO: 1367449 - DNA, 25 bp, Homo sapien
aggtttgcgtctcttggtgttattt

SEQ ID NO: 1367450 - DNA, 25 bp, Homo sapien
aacaaggtttgcgtctcttggtgtt

SEQ ID NO: 1367451 - DNA, 25 bp, Homo sapien
catacccccctcaacaccaccacca

SEQ ID NO: 1367452 - DNA, 25 bp, Homo sapien
ccaccaccaataacaactccttcat

SEQ ID NO: 1367453 - DNA, 25 bp, Homo sapien
accaccaccaccaataacaactcct

SEQ ID NO: 1367454 - DNA, 25 bp, Homo sapien
caccaccaccaataacaactccttc

SEQ ID NO: 1367455 - DNA, 25 bp, Homo sapien
tttaataacgtacaaagtgcaatag

SEQ ID NO: 1367456 - DNA, 25 bp, Homo sapien
tagtataaatagtgtagcgtgtgca

SEQ ID NO: 1367457 - DNA, 25 bp, Homo sapien
tttggaaaccatgcacttcgcaatg

SEQ ID NO: 1367458 - DNA, 25 bp, Homo sapien
ggacaccacagagctcaatttggaa

SEQ ID NO: 1367459 - DNA, 25 bp, Homo sapien
tagacctcctgcatctgcctacatc

SEQ ID NO: 1367460 - DNA, 25 bp, Homo sapien
ctagacctcctgcatctgcctacat

SEQ ID NO: 1367461 - DNA, 25 bp, Homo sapien
ccaaagacttcaaaagctgccagat

SEQ ID NO: 1367462 - DNA, 25 bp, Homo sapien
tcaaaagctgccagattattgtgaa

SEQ ID NO: 1367463 - DNA, 25 bp, Homo sapien
ccagattattgtgaaaggagaaaca

SEQ ID NO: 1367464 - DNA, 25 bp, Homo sapien
agaaacactgttttcgaaggctgct

SEQ ID NO: 1367465 - DNA, 25 bp, Homo sapien
gggcttcatggacagtgacctgctg

SEQ ID NO: 1367466 - DNA, 25 bp, Homo sapien
ctgaatttctttgcaatagaagttg

SEQ ID NO: 1367467 - DNA, 25 bp, Homo sapien
catcaaaccgttttatattgaaaag

SEQ ID NO: 1367468 - DNA, 25 bp, Homo sapien
ttaatggctatggagctgaatttct

SEQ ID NO: 1367469 - DNA, 25 bp, Homo sapien
taagtcattccaaactgtctggcgt

SEQ ID NO: 1367470 - DNA, 25 bp, Homo sapien
tactgaacgtccagaaaagatcttg

SEQ ID NO: 1367471 - DNA, 25 bp, Homo sapien
gcgtcctgtcccaaaacatctctga

SEQ ID NO: 1367472 - DNA, 25 bp, Homo sapien
tacacttccggctgcatgcttgcaa

SEQ ID NO: 1367473 - DNA, 25 bp, Homo sapien
gtctcctgagtacaactcttaaaat

SEQ ID NO: 1367474 - DNA, 25 bp, Homo sapien
atcactgtgacataagtctcctgag

SEQ ID NO: 1367475 - DNA, 25 bp, Homo sapien
cacctttgaagctttctgtagcagc

SEQ ID NO: 1367476 - DNA, 25 bp, Homo sapien
cattttcagttacttgcacctttga

SEQ ID NO: 1367477 - DNA, 25 bp, Homo sapien
cttgcatggccacaggtataggtca

SEQ ID NO: 1367478 - DNA, 25 bp, Homo sapien
ttcacaggcccggtaggtcaggaga

SEQ ID NO: 1367479 - DNA, 25 bp, Homo sapien
gtagcggtctttgccctgtgaataa

SEQ ID NO: 1367480 - DNA, 25 bp, Homo sapien
cggtctcctcatctggtagcggtct

SEQ ID NO: 1367481 - DNA, 25 bp, Homo sapien
ctactacccgtgctgaacctgacat

SEQ ID NO: 1367482 - DNA, 25 bp, Homo sapien
actcctgcctgaccaaacttgcctc

SEQ ID NO: 1367483 - DNA, 25 bp, Homo sapien
aacttgcctcctactacccgtgctg

SEQ ID NO: 1367484 - DNA, 25 bp, Homo sapien
cctgcctgaccaaacttgcctccta

SEQ ID NO: 1367485 - DNA, 25 bp, Homo sapien
tttctgatgactgcctggtagtagc

SEQ ID NO: 1367486 - DNA, 25 bp, Homo sapien
tagtagctctgatctgactattcag

SEQ ID NO: 1367487 - DNA, 25 bp, Homo sapien
tcctccatcatggtggtagctgctc

SEQ ID NO: 1367488 - DNA, 25 bp, Homo sapien
tccatcatggtggtagctgctccat

SEQ ID NO: 1367489 - DNA, 25 bp, Homo sapien
catatggtctgtgatcaagtcctgg

SEQ ID NO: 1367490 - DNA, 25 bp, Homo sapien
aagttcatgttcaggatcaagctcc

SEQ ID NO: 1367491 - DNA, 25 bp, Homo sapien
tggatgcagcccatagtcaaggaat

SEQ ID NO: 1367492 - DNA, 25 bp, Homo sapien
ggaaaagcggtagtatcacatctct

SEQ ID NO: 1367493 - DNA, 25 bp, Homo sapien
taatctgtaaacgtatacatgagat

SEQ ID NO: 1367494 - DNA, 25 bp, Homo sapien
aatcaccgatgctttggaacattac

SEQ ID NO: 1367495 - DNA, 25 bp, Homo sapien
tgagatgttttttaaggtaccttgc

SEQ ID NO: 1367496 - DNA, 25 bp, Homo sapien
tagtttctcattggtccttaatcac

SEQ ID NO: 1367497 - DNA, 25 bp, Homo sapien
acacgtgcgtaaacacccagtgatc

SEQ ID NO: 1367498 - DNA, 25 bp, Homo sapien
gtaaacacccagtgatcacgcttat

SEQ ID NO: 1367499 - DNA, 25 bp, Homo sapien
cgtgcgtaaacacccagtgatcacg

SEQ ID NO: 1367500 - DNA, 25 bp, Homo sapien
atatctcacacgtgcgtaaacaccc

SEQ ID NO: 1367501 - DNA, 25 bp, Homo sapien
caattgaaactgcacagcggaggaa

SEQ ID NO: 1367502 - DNA, 25 bp, Homo sapien
taatgcaagggcagaagcgtcctgt

SEQ ID NO: 1367503 - DNA, 25 bp, Homo sapien
gagcttgtcacgcaggcagatctga

SEQ ID NO: 1367504 - DNA, 25 bp, Homo sapien
gatagcgtttgagccacaaggcaag

SEQ ID NO: 1367505 - DNA, 25 bp, Homo sapien
tgagtcgactcccaagcagaatgtg

SEQ ID NO: 1367506 - DNA, 25 bp, Homo sapien
cagttgcgagtagcacgaggatctg

SEQ ID NO: 1367507 - DNA, 25 bp, Homo sapien
atttgaggcctctgagtcgactccc

SEQ ID NO: 1367508 - DNA, 25 bp, Homo sapien
caggcgttttgaatctctcaggact

SEQ ID NO: 1367509 - DNA, 25 bp, Homo sapien
acaccgatcctcctagggctgcggg

SEQ ID NO: 1367510 - DNA, 25 bp, Homo sapien
gtgcgctacgagactccgggccgtc

SEQ ID NO: 1367511 - DNA, 25 bp, Homo sapien
ctcctcagacttttcgagagaaaag

SEQ ID NO: 1367512 - DNA, 25 bp, Homo sapien
ttttctgctgctcgcgcgaaagtgg

SEQ ID NO: 1367513 - DNA, 25 bp, Homo sapien
actggccattggagtgctccgctgc

SEQ ID NO: 1367514 - DNA, 25 bp, Homo sapien
gaccccgactcgagtaagtttgcga

SEQ ID NO: 1367515 - DNA, 25 bp, Homo sapien
aagcgagccgtacagatcccgggct

SEQ ID NO: 1367516 - DNA, 25 bp, Homo sapien
gacttcgcgtagcaggcagggaact

SEQ ID NO: 1367517 - DNA, 25 bp, Homo sapien
tactaaggagcccatctcgatcaga

SEQ ID NO: 1367518 - DNA, 25 bp, Homo sapien
tctccgggcgctgaaaatttgcatc

SEQ ID NO: 1367519 - DNA, 25 bp, Homo sapien
ccaactgtggaacctacgggtgtag

SEQ ID NO: 1367520 - DNA, 25 bp, Homo sapien
tgaaaattgcagttggtcggaggaa

SEQ ID NO: 1367521 - DNA, 25 bp, Homo sapien
gctggcgctgctcaagaccgtaatt

SEQ ID NO: 1367522 - DNA, 25 bp, Homo sapien
ggaattcagccgcagcaaatcggac

SEQ ID NO: 1367523 - DNA, 25 bp, Homo sapien
gaactgcatcagtgcgctgtccagc

SEQ ID NO: 1367524 - DNA, 25 bp, Homo sapien
tgaccaacaaggagatgcgtcgggc

SEQ ID NO: 1367525 - DNA, 25 bp, Homo sapien
gatccttggtgtcctaggagaaaca

SEQ ID NO: 1367526 - DNA, 25 bp, Homo sapien
gccgaaatctgcataaggaagccca

SEQ ID NO: 1367527 - DNA, 25 bp, Homo sapien
gaacgccagaaacttttcagtccag

SEQ ID NO: 1367528 - DNA, 25 bp, Homo sapien
tgcaaaccaagggagatttcttagc

SEQ ID NO: 1367529 - DNA, 25 bp, Homo sapien
tgtgggctgagtagcataacacttt

SEQ ID NO: 1367530 - DNA, 25 bp, Homo sapien
tacagtatcagtgaagcagctagct

SEQ ID NO: 1367531 - DNA, 25 bp, Homo sapien
ggcactttgcaagcatcacagactt

SEQ ID NO: 1367532 - DNA, 25 bp, Homo sapien
cagcctatcttctgaaccacataga

SEQ ID NO: 1367533 - DNA, 25 bp, Homo sapien
agtgatcctcccatagatttgtctg

SEQ ID NO: 1367534 - DNA, 25 bp, Homo sapien
tataaataccttgagggaggaatca

SEQ ID NO: 1367535 - DNA, 25 bp, Homo sapien
taacatacaccattgccttcactgc

SEQ ID NO: 1367536 - DNA, 25 bp, Homo sapien
tgtacttcacgtggtccaagaaaag

SEQ ID NO: 1367537 - DNA, 25 bp, Homo sapien
cttcagcgagcttcatgtggccacc

SEQ ID NO: 1367538 - DNA, 25 bp, Homo sapien
ttctgcttcagcgagcttcatgtgg

SEQ ID NO: 1367539 - DNA, 25 bp, Homo sapien
aatagtggttagttctcacatgctg

SEQ ID NO: 1367540 - DNA, 25 bp, Homo sapien
ttgaggtaccagaaatagtggttag

SEQ ID NO: 1367541 - DNA, 25 bp, Homo sapien
ttgtggctgcctacttgaacaatcc

SEQ ID NO: 1367542 - DNA, 25 bp, Homo sapien
taaagctattgaagttggcagcatc

SEQ ID NO: 1367543 - DNA, 25 bp, Homo sapien
gaggctgtgacatcctggctaaagc

SEQ ID NO: 1367544 - DNA, 25 bp, Homo sapien
ttaagaaggagcacaaattgagggt

SEQ ID NO: 1367545 - DNA, 25 bp, Homo sapien
gagctctcagagctgagcttattca

SEQ ID NO: 1367546 - DNA, 25 bp, Homo sapien
tttggcatctaatataaattgaaac

SEQ ID NO: 1367547 - DNA, 25 bp, Homo sapien
tataaattgaaacaactgagctctc

SEQ ID NO: 1367548 - DNA, 25 bp, Homo sapien
cagggctcctctttggcatctaata

SEQ ID NO: 1367549 - DNA, 25 bp, Homo sapien
tactaagtcaattccccactggagc

SEQ ID NO: 1367550 - DNA, 25 bp, Homo sapien
ctgaaggtccactatgggtactaag

SEQ ID NO: 1367551 - DNA, 25 bp, Homo sapien
tatgggtactaagtcaattccccac

SEQ ID NO: 1367552 - DNA, 25 bp, Homo sapien
cccactggagcagtttctgtctggt

SEQ ID NO: 1367553 - DNA, 25 bp, Homo sapien
gagtgtgacaagcatgggtggagat

SEQ ID NO: 1367554 - DNA, 25 bp, Homo sapien
tcatctgcggctacttcatatctgg

SEQ ID NO: 1367555 - DNA, 25 bp, Homo sapien
gatgtcttagttggcatatctgatc

SEQ ID NO: 1367556 - DNA, 25 bp, Homo sapien
tcatatctggctgaaacatcttcag

SEQ ID NO: 1367557 - DNA, 25 bp, Homo sapien
ccctttccaaatgctggttccatct

SEQ ID NO: 1367558 - DNA, 25 bp, Homo sapien
tttccaaatgctggttccatcttca

SEQ ID NO: 1367559 - DNA, 25 bp, Homo sapien
agaccctttccaaatgctggttcca

SEQ ID NO: 1367560 - DNA, 25 bp, Homo sapien
cagaccctttccaaatgctggttcc

SEQ ID NO: 1367561 - DNA, 25 bp, Homo sapien
tcttgtgaggaacagttggtcagga

SEQ ID NO: 1367562 - DNA, 25 bp, Homo sapien
cactgttcgctcttgtgaggaacag

SEQ ID NO: 1367563 - DNA, 25 bp, Homo sapien
aggaacagttggtcaggaagccgcg

SEQ ID NO: 1367564 - DNA, 25 bp, Homo sapien
cgctcttgtgaggaacagttggtca

SEQ ID NO: 1367565 - DNA, 25 bp, Homo sapien
aaataccatttccccctgccacagt

SEQ ID NO: 1367566 - DNA, 25 bp, Homo sapien
agcagaaaagtgagatgtccaggca

SEQ ID NO: 1367567 - DNA, 25 bp, Homo sapien
taccatttccccctgccacagttgc

SEQ ID NO: 1367568 - DNA, 25 bp, Homo sapien
tcaagatccaccaagcagaaaagtg

SEQ ID NO: 1367569 - DNA, 25 bp, Homo sapien
caaagaagcggtcaccaacccactt

SEQ ID NO: 1367570 - DNA, 25 bp, Homo sapien
cacttggaaaaggacgtgcattctg

SEQ ID NO: 1367571 - DNA, 25 bp, Homo sapien
tttgtagacaaagaagcggtcacca

SEQ ID NO: 1367572 - DNA, 25 bp, Homo sapien
gaaaaggacgtgcattctgagtcat

SEQ ID NO: 1367573 - DNA, 25 bp, Homo sapien
tgagaaccgtttgagttgggtctag

SEQ ID NO: 1367574 - DNA, 25 bp, Homo sapien
agttgggtctagcatttgctatgga

SEQ ID NO: 1367575 - DNA, 25 bp, Homo sapien
gtttgagttgggtctagcatttgct

SEQ ID NO: 1367576 - DNA, 25 bp, Homo sapien
actgagaaccgtttgagttgggtct

SEQ ID NO: 1367577 - DNA, 25 bp, Homo sapien
agcatgaaagttttcgttgtttttg

SEQ ID NO: 1367578 - DNA, 25 bp, Homo sapien
agagcatgaaagttttcgttgtttt

SEQ ID NO: 1367579 - DNA, 25 bp, Homo sapien
cttgaaaaagatgaggcccaaggac

SEQ ID NO: 1367580 - DNA, 25 bp, Homo sapien
ttgaaaaagatgaggcccaaggact

SEQ ID NO: 1367581 - DNA, 25 bp, Homo sapien
tcaaagaacacagtggaattgacca

SEQ ID NO: 1367582 - DNA, 25 bp, Homo sapien
tgttgatggcgatgtcaaagaacac

SEQ ID NO: 1367583 - DNA, 25 bp, Homo sapien
tgtcaaagaacacagtggaattgac

SEQ ID NO: 1367584 - DNA, 25 bp, Homo sapien
cgatgtcaaagaacacagtggaatt

SEQ ID NO: 1367585 - DNA, 25 bp, Homo sapien
tgatgtggttgacactcgctgagga

SEQ ID NO: 1367586 - DNA, 25 bp, Homo sapien
gacagtgcccgggttgaagtgggcc

SEQ ID NO: 1367587 - DNA, 25 bp, Homo sapien
gaggatgtgcgataacacagacagt

SEQ ID NO: 1367588 - DNA, 25 bp, Homo sapien
gaagtgggccttccagagttccgtg

SEQ ID NO: 1367589 - DNA, 25 bp, Homo sapien
gtgtttacttagttggtgtctggtc

SEQ ID NO: 1367590 - DNA, 25 bp, Homo sapien
taattaatgttgtgactgggcggct

SEQ ID NO: 1367591 - DNA, 25 bp, Homo sapien
actaatgctatctctttggcatagg

SEQ ID NO: 1367592 - DNA, 25 bp, Homo sapien
ttggcataggtatagaagttcatca

SEQ ID NO: 1367593 - DNA, 25 bp, Homo sapien
tgtggtaccccacattgtaaccttc

SEQ ID NO: 1367594 - DNA, 25 bp, Homo sapien
aagaatccccctgatgactgtggta

SEQ ID NO: 1367595 - DNA, 25 bp, Homo sapien
ctctgatttccaggcgagtccacgc

SEQ ID NO: 1367596 - DNA, 25 bp, Homo sapien
ctttctgcggtggtgaagaatcccc

SEQ ID NO: 1367597 - DNA, 25 bp, Homo sapien
taatagaacattctgagggtgtcat

SEQ ID NO: 1367598 - DNA, 25 bp, Homo sapien
cttgtggaggattagcttccctgat

SEQ ID NO: 1367599 - DNA, 25 bp, Homo sapien
aggaagggtgtctggtaatagaaca

SEQ ID NO: 1367600 - DNA, 25 bp, Homo sapien
gtggaggattagcttccctgatgta

SEQ ID NO: 1367601 - DNA, 25 bp, Homo sapien
ttgcctcgcagtagagcccaactag

SEQ ID NO: 1367602 - DNA, 25 bp, Homo sapien
taaagagaaggcaacgctcagagtt

SEQ ID NO: 1367603 - DNA, 25 bp, Homo sapien
caaaaggctgcggtatcaaagtggc

SEQ ID NO: 1367604 - DNA, 25 bp, Homo sapien
gacggacctgacttttgccttgcct

SEQ ID NO: 1367605 - DNA, 25 bp, Homo sapien
gacaagctccaacgcgtcaaaggcg

SEQ ID NO: 1367606 - DNA, 25 bp, Homo sapien
tcacacgtcaggttttatcgctgac

SEQ ID NO: 1367607 - DNA, 25 bp, Homo sapien
caaaggcgttagatctgagggctgc

SEQ ID NO: 1367608 - DNA, 25 bp, Homo sapien
tgcagcagccttcgcggttccgcat

SEQ ID NO: 1367609 - DNA, 25 bp, Homo sapien
attgtggagctgttcacggccccag

SEQ ID NO: 1367610 - DNA, 25 bp, Homo sapien
tttagccggcgaccaccttttgatc

SEQ ID NO: 1367611 - DNA, 25 bp, Homo sapien
ccgtgagggccagaacttagtacag

SEQ ID NO: 1367612 - DNA, 25 bp, Homo sapien
gatctcttgtgttgcacttgtgtcc

SEQ ID NO: 1367613 - DNA, 25 bp, Homo sapien
cacacccccatcaggaagtctggtt

SEQ ID NO: 1367614 - DNA, 25 bp, Homo sapien
gggtagtgggcacaggacgatttgg

SEQ ID NO: 1367615 - DNA, 25 bp, Homo sapien
aagtcacacccccatcaggaagtct

SEQ ID NO: 1367616 - DNA, 25 bp, Homo sapien
ggtagtgggcacaggacgatttggg

SEQ ID NO: 1367617 - DNA, 25 bp, Homo sapien
ctgtggactgtgcaaagaccttctt

SEQ ID NO: 1367618 - DNA, 25 bp, Homo sapien
ttgttctgtggactgtgcaaagacc

SEQ ID NO: 1367619 - DNA, 25 bp, Homo sapien
tcccattggatccatgattccagca

SEQ ID NO: 1367620 - DNA, 25 bp, Homo sapien
ctcagggagagggtgctttgttctg

SEQ ID NO: 1367621 - DNA, 25 bp, Homo sapien
tgactctctgtctcatgcggctaag

SEQ ID NO: 1367622 - DNA, 25 bp, Homo sapien
ccagcaggagcatgcgaaaagcttc

SEQ ID NO: 1367623 - DNA, 25 bp, Homo sapien
tgcggctaagccaaatccgactgat

SEQ ID NO: 1367624 - DNA, 25 bp, Homo sapien
gcaatttgttctcgtcccagcagga

SEQ ID NO: 1367625 - DNA, 25 bp, Homo sapien
aaactgctgaggacttggtacaagg

SEQ ID NO: 1367626 - DNA, 25 bp, Homo sapien
gcacgaaccgaattaacagaaatgt

SEQ ID NO: 1367627 - DNA, 25 bp, Homo sapien
gacatttactgtgcgaacagaagca

SEQ ID NO: 1367628 - DNA, 25 bp, Homo sapien
tagagggtaaaatcaatctcacacg

SEQ ID NO: 1367629 - DNA, 25 bp, Homo sapien
ccttgccccctctgtgttttgtact

SEQ ID NO: 1367630 - DNA, 25 bp, Homo sapien
tgaaccaatgaaaatcccttgcccc

SEQ ID NO: 1367631 - DNA, 25 bp, Homo sapien
ccaatgaaaatcccttgccccctct

SEQ ID NO: 1367632 - DNA, 25 bp, Homo sapien
caatgaaaatcccttgccccctctg

SEQ ID NO: 1367633 - DNA, 25 bp, Homo sapien
taagttaggagagtcaaggagcctg

SEQ ID NO: 1367634 - DNA, 25 bp, Homo sapien
aactgaatttaagttaggagagtca

SEQ ID NO: 1367635 - DNA, 25 bp, Homo sapien
gaggagtctcttttaagttcaatga

SEQ ID NO: 1367636 - DNA, 25 bp, Homo sapien
taggagaggagtctcttttaagttc

SEQ ID NO: 1367637 - DNA, 25 bp, Homo sapien
ctgtgcgtagccactgctgagcaga

SEQ ID NO: 1367638 - DNA, 25 bp, Homo sapien
ctgagcagactttcctgtgctgcca

SEQ ID NO: 1367639 - DNA, 25 bp, Homo sapien
tgtgcgtagccactgctgagcagac

SEQ ID NO: 1367640 - DNA, 25 bp, Homo sapien
ccactgctgagcagactttcctgtg

SEQ ID NO: 1367641 - DNA, 25 bp, Homo sapien
tttcagttggatcacccgggtggca

SEQ ID NO: 1367642 - DNA, 25 bp, Homo sapien
gagttgtgaagaccatttgcaatca

SEQ ID NO: 1367643 - DNA, 25 bp, Homo sapien
cacagttgaggcttgtttcagttgg

SEQ ID NO: 1367644 - DNA, 25 bp, Homo sapien
ccgggtggcatggtccttctgctgt

SEQ ID NO: 1367645 - DNA, 25 bp, Homo sapien
ttatctctggatcaaattgaagctg

SEQ ID NO: 1367646 - DNA, 25 bp, Homo sapien
tattgggcaccaaaccgtattgctc

SEQ ID NO: 1367647 - DNA, 25 bp, Homo sapien
ttaatgtatctctggccactttctc

SEQ ID NO: 1367648 - DNA, 25 bp, Homo sapien
tcccgttggctgtccgatatgcatg

SEQ ID NO: 1367649 - DNA, 25 bp, Homo sapien
tatgtgtcagttcatccaggtttgc

SEQ ID NO: 1367650 - DNA, 25 bp, Homo sapien
tctcctctgagttatgtgtcagttc

SEQ ID NO: 1367651 - DNA, 25 bp, Homo sapien
ctcctctgagttatgtgtcagttca

SEQ ID NO: 1367652 - DNA, 25 bp, Homo sapien
tgtgtcagttcatccaggtttgcct

SEQ ID NO: 1367653 - DNA, 25 bp, Homo sapien
cactttgatctctcatattgcccac

SEQ ID NO: 1367654 - DNA, 25 bp, Homo sapien
tctcatattgcccacttggcccttt

SEQ ID NO: 1367655 - DNA, 25 bp, Homo sapien
tgatctctcatattgcccacttggc

SEQ ID NO: 1367656 - DNA, 25 bp, Homo sapien
tttgatctctcatattgcccacttg

SEQ ID NO: 1367657 - DNA, 25 bp, Homo sapien
gtctctgagacaggtccgacactcc

SEQ ID NO: 1367658 - DNA, 25 bp, Homo sapien
gggctgaatcttgatgaaggaataa

SEQ ID NO: 1367659 - DNA, 25 bp, Homo sapien
gaataatgacgtatccccatatggg

SEQ ID NO: 1367660 - DNA, 25 bp, Homo sapien
tcacaggacattgccgatgtgtctc

SEQ ID NO: 1367661 - DNA, 25 bp, Homo sapien
caggaattcggacagcttcatgctc

SEQ ID NO: 1367662 - DNA, 25 bp, Homo sapien
aattcggacagcttcatgctcccag

SEQ ID NO: 1367663 - DNA, 25 bp, Homo sapien
ggaattcggacagcttcatgctccc

SEQ ID NO: 1367664 - DNA, 25 bp, Homo sapien
tcggacagcttcatgctcccagctg

SEQ ID NO: 1367665 - DNA, 25 bp, Homo sapien
catctgggatttcacctttttccat

SEQ ID NO: 1367666 - DNA, 25 bp, Homo sapien
caatccagggattttgatattccaa

SEQ ID NO: 1367667 - DNA, 25 bp, Homo sapien
attttgatattccaaacaaactcac

SEQ ID NO: 1367668 - DNA, 25 bp, Homo sapien
ggattttgatattccaaacaaactc

SEQ ID NO: 1367669 - DNA, 25 bp, Homo sapien
agcaatccagggattttgatattcc

SEQ ID NO: 1367670 - DNA, 25 bp, Homo sapien
atgtgcagaaggaggttccaatgtg

SEQ ID NO: 1367671 - DNA, 25 bp, Homo sapien
gaggttccaatgtgatgccattaga

SEQ ID NO: 1367672 - DNA, 25 bp, Homo sapien
cagaaggaggttccaatgtgatgcc

SEQ ID NO: 1367673 - DNA, 25 bp, Homo sapien
gggatattctgtggagaaactcagc

SEQ ID NO: 1367674 - DNA, 25 bp, Homo sapien
tggtgcacatttgtgggtggttcat

SEQ ID NO: 1367675 - DNA, 25 bp, Homo sapien
tgctgtcacttttgctgccaagaaa

SEQ ID NO: 1367676 - DNA, 25 bp, Homo sapien
ctgctgtcacttttgctgccaagaa

SEQ ID NO: 1367677 - DNA, 25 bp, Homo sapien
gcaggccactgtaacccatgtgggt

SEQ ID NO: 1367678 - DNA, 25 bp, Homo sapien
gatctgtttggtttctgtcggtcat

SEQ ID NO: 1367679 - DNA, 25 bp, Homo sapien
tgaaggaagatctgtttggtttctg

SEQ ID NO: 1367680 - DNA, 25 bp, Homo sapien
atctctgtcacatctctgcaggcca

SEQ ID NO: 1367681 - DNA, 25 bp, Homo sapien
tttgtttggctccattacagatttt

SEQ ID NO: 1367682 - DNA, 25 bp, Homo sapien
ttttgtttggctccattacagattt

SEQ ID NO: 1367683 - DNA, 25 bp, Homo sapien
catgtcatatatgcctacactccag

SEQ ID NO: 1367684 - DNA, 25 bp, Homo sapien
gtggccatgtcatatatgcctacac

SEQ ID NO: 1367685 - DNA, 25 bp, Homo sapien
ccctggatctgtggccatgtcatat

SEQ ID NO: 1367686 - DNA, 25 bp, Homo sapien
atatatgcctacactccagatgctg

SEQ ID NO: 1367687 - DNA, 25 bp, Homo sapien
tctttgacagctgaacagtgcggct

SEQ ID NO: 1367688 - DNA, 25 bp, Homo sapien
tgacagctgaacagtgcggctctgc

SEQ ID NO: 1367689 - DNA, 25 bp, Homo sapien
acagtgcggctctgccctcagctgt

SEQ ID NO: 1367690 - DNA, 25 bp, Homo sapien
agctgctatctttgacagctgaaca

SEQ ID NO: 1367691 - DNA, 25 bp, Homo sapien
tttcctctagtagggatattgtcat

SEQ ID NO: 1367692 - DNA, 25 bp, Homo sapien
attttcctctagtagggatattgtc

SEQ ID NO: 1367693 - DNA, 25 bp, Homo sapien
gaattttcctctagtagggatattg

SEQ ID NO: 1367694 - DNA, 25 bp, Homo sapien
cagaattttcctctagtagggatat

SEQ ID NO: 1367695 - DNA, 25 bp, Homo sapien
aacattgaatgatgggtttgggtga

SEQ ID NO: 1367696 - DNA, 25 bp, Homo sapien
ggaacattgaatgatgggtttgggt

SEQ ID NO: 1367697 - DNA, 25 bp, Homo sapien
acagtgacacctgaaatagggccca

SEQ ID NO: 1367698 - DNA, 25 bp, Homo sapien
cattgaatgatgggtttgggtgata

SEQ ID NO: 1367699 - DNA, 25 bp, Homo sapien
cagtgtgctggaagtcaatgatatg

SEQ ID NO: 1367700 - DNA, 25 bp, Homo sapien
gtgtgctggaagtcaatgatatgtc

SEQ ID NO: 1367701 - DNA, 25 bp, Homo sapien
ctcagtgtgctggaagtcaatgata

SEQ ID NO: 1367702 - DNA, 25 bp, Homo sapien
tgtgctggaagtcaatgatatgtct

SEQ ID NO: 1367703 - DNA, 25 bp, Homo sapien
actttctactgcataatgatgcaaa

SEQ ID NO: 1367704 - DNA, 25 bp, Homo sapien
ctttctactgcataatgatgcaaat

SEQ ID NO: 1367705 - DNA, 25 bp, Homo sapien
tagtctgggttagccttttcaccag

SEQ ID NO: 1367706 - DNA, 25 bp, Homo sapien
tctaggaggtattgaatggtttgac

SEQ ID NO: 1367707 - DNA, 25 bp, Homo sapien
aatggtttgacatgagttagtctgg

SEQ ID NO: 1367708 - DNA, 25 bp, Homo sapien
ccagatctgtcttgatatatgtgac

SEQ ID NO: 1367709 - DNA, 25 bp, Homo sapien
ggcataaagcggaccagatctctgc

SEQ ID NO: 1367710 - DNA, 25 bp, Homo sapien
ctgcagagggcataaagcggaccag

SEQ ID NO: 1367711 - DNA, 25 bp, Homo sapien
tctcagactcattccagattttttc

SEQ ID NO: 1367712 - DNA, 25 bp, Homo sapien
cctggagagtcacccgtgctgttct

SEQ ID NO: 1367713 - DNA, 25 bp, Homo sapien
tcagttctctgctgactgggattct

SEQ ID NO: 1367714 - DNA, 25 bp, Homo sapien
ttctctgctgactgggattctttct

SEQ ID NO: 1367715 - DNA, 25 bp, Homo sapien
tcttgcttacttccctgataatcca

SEQ ID NO: 1367716 - DNA, 25 bp, Homo sapien
gttctctgctgactgggattctttc

SEQ ID NO: 1367717 - DNA, 25 bp, Homo sapien
gggccctcagaactactcagtagtt

SEQ ID NO: 1367718 - DNA, 25 bp, Homo sapien
ttcccagttgtaccaggatgttcct

SEQ ID NO: 1367719 - DNA, 25 bp, Homo sapien
cctagttgacaatttatcaccctct

SEQ ID NO: 1367720 - DNA, 25 bp, Homo sapien
tcctcctcacacctagttgacaatt

SEQ ID NO: 1367721 - DNA, 25 bp, Homo sapien
tagtccctggtgattggatttccaa

SEQ ID NO: 1367722 - DNA, 25 bp, Homo sapien
ctttagcctctttgttgcaagtagc

SEQ ID NO: 1367723 - DNA, 25 bp, Homo sapien
aatgattgaaacgttaagcacatcc

SEQ ID NO: 1367724 - DNA, 25 bp, Homo sapien
gcacatccatccattgattggattc

SEQ ID NO: 1367725 - DNA, 25 bp, Homo sapien
cctccagtcatcacatactcagtca

SEQ ID NO: 1367726 - DNA, 25 bp, Homo sapien
tcctccagtcatcacatactcagtc

SEQ ID NO: 1367727 - DNA, 25 bp, Homo sapien
ctccagtcatcacatactcagtcat

SEQ ID NO: 1367728 - DNA, 25 bp, Homo sapien
tattattccgggaacttgtctccaa

SEQ ID NO: 1367729 - DNA, 25 bp, Homo sapien
cattgctacagggttctgatcctca

SEQ ID NO: 1367730 - DNA, 25 bp, Homo sapien
gactgcatgattctccattagagga

SEQ ID NO: 1367731 - DNA, 25 bp, Homo sapien
aaccttttcagagtacaccattgtg

SEQ ID NO: 1367732 - DNA, 25 bp, Homo sapien
gtaatgatatcagtgcttctatctc

SEQ ID NO: 1367733 - DNA, 25 bp, Homo sapien
agtaatgatatcagtgcttctatct

SEQ ID NO: 1367734 - DNA, 25 bp, Homo sapien
ttagctgttctgctttataagtgag

SEQ ID NO: 1367735 - DNA, 25 bp, Homo sapien
caatctctgtctgactttgtaaata

SEQ ID NO: 1367736 - DNA, 25 bp, Homo sapien
ttcctgtcacattgtatactgggag

SEQ ID NO: 1367737 - DNA, 25 bp, Homo sapien
ggagtttcaatctctgtctgacttt

SEQ ID NO: 1367738 - DNA, 25 bp, Homo sapien
tataactcaacagtcctgcatgcag

SEQ ID NO: 1367739 - DNA, 25 bp, Homo sapien
taattccagtgcagttgaggtaggt

SEQ ID NO: 1367740 - DNA, 25 bp, Homo sapien
aggttcagagttaagttgctcgtaa

SEQ ID NO: 1367741 - DNA, 25 bp, Homo sapien
agaggaggacaaggttcagagttaa

SEQ ID NO: 1367742 - DNA, 25 bp, Homo sapien
taagttgctcgtaattccagtgcag

SEQ ID NO: 1367743 - DNA, 25 bp, Homo sapien
taaccatttgaccctgacacatcat

SEQ ID NO: 1367744 - DNA, 25 bp, Homo sapien
ctaaccatttgaccctgacacatca

SEQ ID NO: 1367745 - DNA, 25 bp, Homo sapien
ctaactgtggtagtcttctagccac

SEQ ID NO: 1367746 - DNA, 25 bp, Homo sapien
aactgtggtagtcttctagccaccc

SEQ ID NO: 1367747 - DNA, 25 bp, Homo sapien
tgtggtagtcttctagccaccctgc

SEQ ID NO: 1367748 - DNA, 25 bp, Homo sapien
tggtagtcttctagccaccctgcaa

SEQ ID NO: 1367749 - DNA, 25 bp, Homo sapien
tctctgactttcttgcattaagata

SEQ ID NO: 1367750 - DNA, 25 bp, Homo sapien
ggctggcacatagtttgacatttct

SEQ ID NO: 1367751 - DNA, 25 bp, Homo sapien
cattaagatatgtccttttggcgaa

SEQ ID NO: 1367752 - DNA, 25 bp, Homo sapien
tggctggcacatagtttgacatttc

SEQ ID NO: 1367753 - DNA, 25 bp, Homo sapien
tatgtgtgcctctaagcctgagctt

SEQ ID NO: 1367754 - DNA, 25 bp, Homo sapien
tctaactaaccctgggcatggcaac

SEQ ID NO: 1367755 - DNA, 25 bp, Homo sapien
cttgtaagagaaactatgtgtgcct

SEQ ID NO: 1367756 - DNA, 25 bp, Homo sapien
actaaccctgggcatggcaactcag

SEQ ID NO: 1367757 - DNA, 25 bp, Homo sapien
cttttcatataagcaggagccctgg

SEQ ID NO: 1367758 - DNA, 25 bp, Homo sapien
caccaggcaaatatactcagactcc

SEQ ID NO: 1367759 - DNA, 25 bp, Homo sapien
ttgcaaagatcaccaggcaaatata

SEQ ID NO: 1367760 - DNA, 25 bp, Homo sapien
cctccttttcatataagcaggagcc

SEQ ID NO: 1367761 - DNA, 25 bp, Homo sapien
ttgaaatacagaaaaaaaattgcca

SEQ ID NO: 1367762 - DNA, 25 bp, Homo sapien
tgaaatacagaaaaaaaattgccag

SEQ ID NO: 1367763 - DNA, 25 bp, Homo sapien
actgatgtttattttccatcaacca

SEQ ID NO: 1367764 - DNA, 25 bp, Homo sapien
agaaactgatgtttattttccatca

SEQ ID NO: 1367765 - DNA, 25 bp, Homo sapien
tgatgtttattttccatcaaccatt

SEQ ID NO: 1367766 - DNA, 25 bp, Homo sapien
aaactgatgtttattttccatcaac

SEQ ID NO: 1367767 - DNA, 25 bp, Homo sapien
ctgcttaagagcctatgcaagaaca

SEQ ID NO: 1367768 - DNA, 25 bp, Homo sapien
gcttaagagcctatgcaagaacagc

SEQ ID NO: 1367769 - DNA, 25 bp, Homo sapien
tgctgcttaagagcctatgcaagaa

SEQ ID NO: 1367770 - DNA, 25 bp, Homo sapien
catgctgcttaagagcctatgcaag

SEQ ID NO: 1367771 - DNA, 25 bp, Homo sapien
aagaccagtcagtggttgctcctac

SEQ ID NO: 1367772 - DNA, 25 bp, Homo sapien
taagaccagtcagtggttgctccta

SEQ ID NO: 1367773 - DNA, 25 bp, Homo sapien
ttaagaccagtcagtggttgctcct

SEQ ID NO: 1367774 - DNA, 25 bp, Homo sapien
tcttcagtagggaattgctgaatag

SEQ ID NO: 1367775 - DNA, 25 bp, Homo sapien
agcgctccagtcttcagtagggaat

SEQ ID NO: 1367776 - DNA, 25 bp, Homo sapien
cagtagggaattgctgaataggcac

SEQ ID NO: 1367777 - DNA, 25 bp, Homo sapien
gcgctccagtcttcagtagggaatt

SEQ ID NO: 1367778 - DNA, 25 bp, Homo sapien
caggatctctgtcgaagtacagatc

SEQ ID NO: 1367779 - DNA, 25 bp, Homo sapien
cctccttggtcactgccttctcagc

SEQ ID NO: 1367780 - DNA, 25 bp, Homo sapien
tccttggtcactgccttctcagcag

SEQ ID NO: 1367781 - DNA, 25 bp, Homo sapien
cttcaggatctctgtcgaagtacag

SEQ ID NO: 1367782 - DNA, 25 bp, Homo sapien
gacctcccatgggtgttcacgggaa

SEQ ID NO: 1367783 - DNA, 25 bp, Homo sapien
acgggaaatggtgccacacatgcgc

SEQ ID NO: 1367784 - DNA, 25 bp, Homo sapien
cctcccatgggtgttcacgggaaat

SEQ ID NO: 1367785 - DNA, 25 bp, Homo sapien
ttcacgggaaatggtgccacacatg

SEQ ID NO: 1367786 - DNA, 25 bp, Homo sapien
ggcaacaatagcacgacctgccagc

SEQ ID NO: 1367787 - DNA, 25 bp, Homo sapien
cacaacaagccgtggctcccggaag

SEQ ID NO: 1367788 - DNA, 25 bp, Homo sapien
accacaacaagccgtggctcccgga

SEQ ID NO: 1367789 - DNA, 25 bp, Homo sapien
atggcaacaatagcacgacctgcca

SEQ ID NO: 1367790 - DNA, 25 bp, Homo sapien
agatttatgatatagatgccatcac

SEQ ID NO: 1367791 - DNA, 25 bp, Homo sapien
ttccttttatagatgtactgttcca

SEQ ID NO: 1367792 - DNA, 25 bp, Homo sapien
cttcagatttatgatatagatgcca

SEQ ID NO: 1367793 - DNA, 25 bp, Homo sapien
tccttttatagatgtactgttccat

SEQ ID NO: 1367794 - DNA, 25 bp, Homo sapien
aagattggtgccacctaagtgggtt

SEQ ID NO: 1367795 - DNA, 25 bp, Homo sapien
caagattggtgccacctaagtgggt

SEQ ID NO: 1367796 - DNA, 25 bp, Homo sapien
ctggaagtcaagattggtgccacct

SEQ ID NO: 1367797 - DNA, 25 bp, Homo sapien
agtcaagattggtgccacctaagtg

SEQ ID NO: 1367798 - DNA, 25 bp, Homo sapien
tgcaaggaacttaaggacatcctcc

SEQ ID NO: 1367799 - DNA, 25 bp, Homo sapien
ttgcaggacatcaagggctccggac

SEQ ID NO: 1367800 - DNA, 25 bp, Homo sapien
ggaacttaaggacatcctccttcat

SEQ ID NO: 1367801 - DNA, 25 bp, Homo sapien
tttgcaggacatcaagggctccgga

SEQ ID NO: 1367802 - DNA, 25 bp, Homo sapien
tagcaattagcagaggaccatggaa

SEQ ID NO: 1367803 - DNA, 25 bp, Homo sapien
gcaggtagcaaggaaaagcgccagt

SEQ ID NO: 1367804 - DNA, 25 bp, Homo sapien
catttgcacgataggaagagaggcc

SEQ ID NO: 1367805 - DNA, 25 bp, Homo sapien
tctgcaaacgtagagggaaggtcgt

SEQ ID NO: 1367806 - DNA, 25 bp, Homo sapien
tattttacatggaacaagtcacgat

SEQ ID NO: 1367807 - DNA, 25 bp, Homo sapien
taagggagacctcccttgactatct

SEQ ID NO: 1367808 - DNA, 25 bp, Homo sapien
gaatgaatttaccatggcaggcttc

SEQ ID NO: 1367809 - DNA, 25 bp, Homo sapien
agccattcccagaagggtatttttg

SEQ ID NO: 1367810 - DNA, 25 bp, Homo sapien
tccactatgcctggtagatcaacca

SEQ ID NO: 1367811 - DNA, 25 bp, Homo sapien
gttttatgccaaccagtttgacatt

SEQ ID NO: 1367812 - DNA, 25 bp, Homo sapien
agatcaaccagaagagaaaaactgc

SEQ ID NO: 1367813 - DNA, 25 bp, Homo sapien
tctgattggctaactgctagagcaa

SEQ ID NO: 1367814 - DNA, 25 bp, Homo sapien
tggaatccagatgcaccttgtgcaa

SEQ ID NO: 1367815 - DNA, 25 bp, Homo sapien
tgcattcaatgtcagtggcccaaaa

SEQ ID NO: 1367816 - DNA, 25 bp, Homo sapien
cctcatgaataagctgtgatcagcc

SEQ ID NO: 1367817 - DNA, 25 bp, Homo sapien
tgtacagcaccgcatcagagaattg

SEQ ID NO: 1367818 - DNA, 25 bp, Homo sapien
gaaaaccagcatactccaggcttcg

SEQ ID NO: 1367819 - DNA, 25 bp, Homo sapien
tcagccattaggtcgatgtcagaga

SEQ ID NO: 1367820 - DNA, 25 bp, Homo sapien
gacaacatggttagttcctgcccac

SEQ ID NO: 1367821 - DNA, 25 bp, Homo sapien
cagtgtcccacagatcatgaaagat

SEQ ID NO: 1367822 - DNA, 25 bp, Homo sapien
aaatggagtgactaaattctgtact

SEQ ID NO: 1367823 - DNA, 25 bp, Homo sapien
aatggagtgactaaattctgtactt

SEQ ID NO: 1367824 - DNA, 25 bp, Homo sapien
atggagtgactaaattctgtacttt

SEQ ID NO: 1367825 - DNA, 25 bp, Homo sapien
tcttgactgtaactgggcctgtgat

SEQ ID NO: 1367826 - DNA, 25 bp, Homo sapien
gatgctaaagggtctgtcatccaag

SEQ ID NO: 1367827 - DNA, 25 bp, Homo sapien
tgtttttctcagatgctaaagggtc

SEQ ID NO: 1367828 - DNA, 25 bp, Homo sapien
gcaccaaatcgggttccagatgtct

SEQ ID NO: 1367829 - DNA, 25 bp, Homo sapien
tgaataagatcttagaaatagcttg

SEQ ID NO: 1367830 - DNA, 25 bp, Homo sapien
gtgaataagatcttagaaatagctt

SEQ ID NO: 1367831 - DNA, 25 bp, Homo sapien
tgtgaataagatcttagaaatagct

SEQ ID NO: 1367832 - DNA, 25 bp, Homo sapien
ctgtgaataagatcttagaaatagc

SEQ ID NO: 1367833 - DNA, 25 bp, Homo sapien
taaactaaacattgggtgaccatgg

SEQ ID NO: 1367834 - DNA, 25 bp, Homo sapien
caagtcgcgtgttatagcttcccaa

SEQ ID NO: 1367835 - DNA, 25 bp, Homo sapien
gctgagtcttaggttgtttcggcca

SEQ ID NO: 1367836 - DNA, 25 bp, Homo sapien
gatggtgcttgaatctaatccagcc

SEQ ID NO: 1367837 - DNA, 25 bp, Homo sapien
atgcttctcctttctgttgcctttt

SEQ ID NO: 1367838 - DNA, 25 bp, Homo sapien
ttatgcttctcctttctgttgcctt

SEQ ID NO: 1367839 - DNA, 25 bp, Homo sapien
tgcttctcctttctgttgccttttt

SEQ ID NO: 1367840 - DNA, 25 bp, Homo sapien
tatgcttctcctttctgttgccttt

SEQ ID NO: 1367841 - DNA, 25 bp, Homo sapien
caaagggagccagacagagaggata

SEQ ID NO: 1367842 - DNA, 25 bp, Homo sapien
ttatgaggacaaagggagccagaca

SEQ ID NO: 1367843 - DNA, 25 bp, Homo sapien
tttcccaaatgcctggaagacaaat

SEQ ID NO: 1367844 - DNA, 25 bp, Homo sapien
gacagagaggataattttcccaaat

SEQ ID NO: 1367845 - DNA, 25 bp, Homo sapien
tttttcatgcagtcacgaagtcttg

SEQ ID NO: 1367846 - DNA, 25 bp, Homo sapien
cctcctgaataccagtgaggacagc

SEQ ID NO: 1367847 - DNA, 25 bp, Homo sapien
tagttcctcgtagtcataggcacca

SEQ ID NO: 1367848 - DNA, 25 bp, Homo sapien
cgaagtcttgtttccaagctcagca

SEQ ID NO: 1367849 - DNA, 25 bp, Homo sapien
cttcaatctgccgaaattttgcctt

SEQ ID NO: 1367850 - DNA, 25 bp, Homo sapien
tttaaaacatattggaaatctctct

SEQ ID NO: 1367851 - DNA, 25 bp, Homo sapien
aaattttgccttcagccctttcatt

SEQ ID NO: 1367852 - DNA, 25 bp, Homo sapien
ttaagacttcaatagactgggacat

SEQ ID NO: 1367853 - DNA, 25 bp, Homo sapien
gcctgcttttggcatcccgggaaca

SEQ ID NO: 1367854 - DNA, 25 bp, Homo sapien
aaatgcaccgcccatcaggatcctg

SEQ ID NO: 1367855 - DNA, 25 bp, Homo sapien
gagcaacaactgtgcaaatgcaccg

SEQ ID NO: 1367856 - DNA, 25 bp, Homo sapien
cagtagttggcgaagttgcctgctt

SEQ ID NO: 1367857 - DNA, 25 bp, Homo sapien
caaagggaaacataaaacacagact

SEQ ID NO: 1367858 - DNA, 25 bp, Homo sapien
caatttatgcttctagatttatctt

SEQ ID NO: 1367859 - DNA, 25 bp, Homo sapien
ctgcaatttatgcttctagatttat

SEQ ID NO: 1367860 - DNA, 25 bp, Homo sapien
tggtattccagttctactgtagttt

SEQ ID NO: 1367861 - DNA, 25 bp, Homo sapien
tattccagttctactgtagtttttc

SEQ ID NO: 1367862 - DNA, 25 bp, Homo sapien
atcggtctgtgtgcgtcgtgcaagc

SEQ ID NO: 1367863 - DNA, 25 bp, Homo sapien
ccaaatcggtctgtgtgcgtcgtgc

SEQ ID NO: 1367864 - DNA, 25 bp, Homo sapien
cggtctgtgtgcgtcgtgcaagcat

SEQ ID NO: 1367865 - DNA, 25 bp, Homo sapien
aaatcggtctgtgtgcgtcgtgcaa

SEQ ID NO: 1367866 - DNA, 25 bp, Homo sapien
catgaatttattcagcccttgtgat

SEQ ID NO: 1367867 - DNA, 25 bp, Homo sapien
aatgcctcctttataaaccatgaat

SEQ ID NO: 1367868 - DNA, 25 bp, Homo sapien
gtctttttatgtcgctcatttcatt

SEQ ID NO: 1367869 - DNA, 25 bp, Homo sapien
tttttcctgcttggaatgcctcctt

SEQ ID NO: 1367870 - DNA, 25 bp, Homo sapien
ttaaaccatcgtatttatgttaatc

SEQ ID NO: 1367871 - DNA, 25 bp, Homo sapien
taacctctgcgtattccatgaacat

SEQ ID NO: 1367872 - DNA, 25 bp, Homo sapien
ttttaacctctgcgtattccatgaa

SEQ ID NO: 1367873 - DNA, 25 bp, Homo sapien
aaaccatcgtatttatgttaatctg

SEQ ID NO: 1367874 - DNA, 25 bp, Homo sapien
tgcgtgtgcgtgtggtatattgcaa

SEQ ID NO: 1367875 - DNA, 25 bp, Homo sapien
tgtgcgtgtggtatattgcaaactc

SEQ ID NO: 1367876 - DNA, 25 bp, Homo sapien
gtggtatattgcaaactcatcccat

SEQ ID NO: 1367877 - DNA, 25 bp, Homo sapien
gcgtgtggtatattgcaaactcatc

SEQ ID NO: 1367878 - DNA, 25 bp, Homo sapien
taaggtatccggagtcgacagcctc

SEQ ID NO: 1367879 - DNA, 25 bp, Homo sapien
atgggagagtttgggacatccagtt

SEQ ID NO: 1367880 - DNA, 25 bp, Homo sapien
ggtgttcagtcccaccaaggatggg

SEQ ID NO: 1367881 - DNA, 25 bp, Homo sapien
ggagagtttgggacatccagtttga

SEQ ID NO: 1367882 - DNA, 25 bp, Homo sapien
ctaagcacagcgccaagcttcagca

SEQ ID NO: 1367883 - DNA, 25 bp, Homo sapien
ggtactaagcacagcgccaagcttc

SEQ ID NO: 1367884 - DNA, 25 bp, Homo sapien
tactaagcacagcgccaagcttcag

SEQ ID NO: 1367885 - DNA, 25 bp, Homo sapien
taagcacagcgccaagcttcagcag

SEQ ID NO: 1367886 - DNA, 25 bp, Homo sapien
actgattaagatcccggtgccgggc

SEQ ID NO: 1367887 - DNA, 25 bp, Homo sapien
catagtgactgattaagatcccggt

SEQ ID NO: 1367888 - DNA, 25 bp, Homo sapien
ttaagatcccggtgccgggctggca

SEQ ID NO: 1367889 - DNA, 25 bp, Homo sapien
tgactgattaagatcccggtgccgg

SEQ ID NO: 1367890 - DNA, 25 bp, Homo sapien
aataacatcatgctcacctttctcc

SEQ ID NO: 1367891 - DNA, 25 bp, Homo sapien
ttcatcaataacatcatgctcacct

SEQ ID NO: 1367892 - DNA, 25 bp, Homo sapien
attcatcaataacatcatgctcacc

SEQ ID NO: 1367893 - DNA, 25 bp, Homo sapien
ttccataattcatcaataacatcat

SEQ ID NO: 1367894 - DNA, 25 bp, Homo sapien
taccgggacaacactgatgtaagca

SEQ ID NO: 1367895 - DNA, 25 bp, Homo sapien
atctagatagactcttgggcagtac

SEQ ID NO: 1367896 - DNA, 25 bp, Homo sapien
gcttcattttggtgcagaagaccac

SEQ ID NO: 1367897 - DNA, 25 bp, Homo sapien
tggttgctataagtttgacatctgc

SEQ ID NO: 1367898 - DNA, 25 bp, Homo sapien
cccagatgtaattgccagtagtgag

SEQ ID NO: 1367899 - DNA, 25 bp, Homo sapien
tgccccagatgtaattgccagtagt

SEQ ID NO: 1367900 - DNA, 25 bp, Homo sapien
ccagatgtaattgccagtagtgagc

SEQ ID NO: 1367901 - DNA, 25 bp, Homo sapien
ccccagatgtaattgccagtagtga

SEQ ID NO: 1367902 - DNA, 25 bp, Homo sapien
tatgaagtccggtctcctgagaagg

SEQ ID NO: 1367903 - DNA, 25 bp, Homo sapien
tgttttatgaagtccggtctcctga

SEQ ID NO: 1367904 - DNA, 25 bp, Homo sapien
agggacagctgccaaggatggtgaa

SEQ ID NO: 1367905 - DNA, 25 bp, Homo sapien
cagctgccaaggatggtgaagtcca

SEQ ID NO: 1367906 - DNA, 25 bp, Homo sapien
tcctggtctgtattgattctcatct

SEQ ID NO: 1367907 - DNA, 25 bp, Homo sapien
ctggtctgtattgattctcatcttt

SEQ ID NO: 1367908 - DNA, 25 bp, Homo sapien
cctggtctgtattgattctcatctt

SEQ ID NO: 1367909 - DNA, 25 bp, Homo sapien
cttttaagccactatcaccaagagt

SEQ ID NO: 1367910 - DNA, 25 bp, Homo sapien
tctcatccaggtcaaactgtcaagc

SEQ ID NO: 1367911 - DNA, 25 bp, Homo sapien
cactcttgacaactgaaccatagtc

SEQ ID NO: 1367912 - DNA, 25 bp, Homo sapien
ttctgaaaaccaatatccactcttg

SEQ ID NO: 1367913 - DNA, 25 bp, Homo sapien
acagctggttgtagtattgcatggc

SEQ ID NO: 1367914 - DNA, 25 bp, Homo sapien
gaagttactagtatagccctcaagt

SEQ ID NO: 1367915 - DNA, 25 bp, Homo sapien
tacatggcaggagaacactaaattg

SEQ ID NO: 1367916 - DNA, 25 bp, Homo sapien
tgcaatgctaagtgaacgctactcc

SEQ ID NO: 1367917 - DNA, 25 bp, Homo sapien
tctccacattttgtaactgcaggtg

SEQ ID NO: 1367918 - DNA, 25 bp, Homo sapien
cttcatatcccttgtctcagagaag

SEQ ID NO: 1367919 - DNA, 25 bp, Homo sapien
aggcaaatatgggtatgtgtggtgg

SEQ ID NO: 1367920 - DNA, 25 bp, Homo sapien
ctatctttcaatcatctatctctgt

SEQ ID NO: 1367921 - DNA, 25 bp, Homo sapien
tacagcaagtcccagctatgatgga

SEQ ID NO: 1367922 - DNA, 25 bp, Homo sapien
ctatctctgtctacctaatatatca

SEQ ID NO: 1367923 - DNA, 25 bp, Homo sapien
caggtactgtgacccatgtgtccaa

SEQ ID NO: 1367924 - DNA, 25 bp, Homo sapien
catgtgtccaacatatttagcacgg

SEQ ID NO: 1367925 - DNA, 25 bp, Homo sapien
gtgtccaacatatttagcacgggct

SEQ ID NO: 1367926 - DNA, 25 bp, Homo sapien
gggcccagcaggtactgtgacccat

SEQ ID NO: 1367927 - DNA, 25 bp, Homo sapien
tgttttcttgctggtaatactccat

SEQ ID NO: 1367928 - DNA, 25 bp, Homo sapien
tgaatagcacttagtagttcttcaa

SEQ ID NO: 1367929 - DNA, 25 bp, Homo sapien
tttgaatagcacttagtagttcttc

SEQ ID NO: 1367930 - DNA, 25 bp, Homo sapien
tcaatggaaagcttgatattttgaa

SEQ ID NO: 1367931 - DNA, 25 bp, Homo sapien
tataatgtcaatggaaagcttgata

SEQ ID NO: 1367932 - DNA, 25 bp, Homo sapien
agcctggcttgactcttttaggaga

SEQ ID NO: 1367933 - DNA, 25 bp, Homo sapien
cttttaggagaaatgtctccatcat

SEQ ID NO: 1367934 - DNA, 25 bp, Homo sapien
ctggcttgactcttttaggagaaat

SEQ ID NO: 1367935 - DNA, 25 bp, Homo sapien
tcttttaggagaaatgtctccatca

SEQ ID NO: 1367936 - DNA, 25 bp, Homo sapien
gtgtgcgctacagataaggtcttac

SEQ ID NO: 1367937 - DNA, 25 bp, Homo sapien
tgtgcgctacagataaggtcttact

SEQ ID NO: 1367938 - DNA, 25 bp, Homo sapien
tgtgtgcgctacagataaggtctta

SEQ ID NO: 1367939 - DNA, 25 bp, Homo sapien
gtgtgtgcgctacagataaggtctt

SEQ ID NO: 1367940 - DNA, 25 bp, Homo sapien
cattttgggatccaaggtgactgct

SEQ ID NO: 1367941 - DNA, 25 bp, Homo sapien
ggagaggacttacataattggtacc

SEQ ID NO: 1367942 - DNA, 25 bp, Homo sapien
tgatttttagctgcatccatgcctt

SEQ ID NO: 1367943 - DNA, 25 bp, Homo sapien
tttcatcaaatggagaggacttaca

SEQ ID NO: 1367944 - DNA, 25 bp, Homo sapien
ttagctgcatccatgcctttttcat

SEQ ID NO: 1367945 - DNA, 25 bp, Homo sapien
tcttagctgaaggtttatccagtct

SEQ ID NO: 1367946 - DNA, 25 bp, Homo sapien
gctatcaggaagtaatatcactcag

SEQ ID NO: 1367947 - DNA, 25 bp, Homo sapien
gatgttgtcctaatacttgaatgct

SEQ ID NO: 1367948 - DNA, 25 bp, Homo sapien
taatttcacataacctaccaagaca

SEQ ID NO: 1367949 - DNA, 25 bp, Homo sapien
gagtattattgaccaggatcagctg

SEQ ID NO: 1367950 - DNA, 25 bp, Homo sapien
tgttttacaagcagcatcccaaatg

SEQ ID NO: 1367951 - DNA, 25 bp, Homo sapien
cagcacgtctgcgatgggagtatta

SEQ ID NO: 1367952 - DNA, 25 bp, Homo sapien
tttggacacaaaccgcagcacgtct

SEQ ID NO: 1367953 - DNA, 25 bp, Homo sapien
gaaggatctaatccggcaaacaaag

SEQ ID NO: 1367954 - DNA, 25 bp, Homo sapien
cttggaaggatctaatccggcaaac

SEQ ID NO: 1367955 - DNA, 25 bp, Homo sapien
tgagaaggttggacgtcgcctgcat

SEQ ID NO: 1367956 - DNA, 25 bp, Homo sapien
aggttgagaaggttggacgtcgcct

SEQ ID NO: 1367957 - DNA, 25 bp, Homo sapien
gatatgacatcactacagctcctgg

SEQ ID NO: 1367958 - DNA, 25 bp, Homo sapien
cattctcagagctaggagtccggga

SEQ ID NO: 1367959 - DNA, 25 bp, Homo sapien
gattgactctcgtgctccagttcag

SEQ ID NO: 1367960 - DNA, 25 bp, Homo sapien
ccagtcagagccgagtggaagcaga

SEQ ID NO: 1367961 - DNA, 25 bp, Homo sapien
tatgtgattcaagcattgattaggc

SEQ ID NO: 1367962 - DNA, 25 bp, Homo sapien
taatctgttcactgactgatatggt

SEQ ID NO: 1367963 - DNA, 25 bp, Homo sapien
ccagagtagccttattcagccaata

SEQ ID NO: 1367964 - DNA, 25 bp, Homo sapien
tcagccaataatcgttcactgatca

SEQ ID NO: 1367965 - DNA, 25 bp, Homo sapien
ctacaggtaaccagaagccattgca

SEQ ID NO: 1367966 - DNA, 25 bp, Homo sapien
ccaaaatggtagtaatatttgaggt

SEQ ID NO: 1367967 - DNA, 25 bp, Homo sapien
caatggacgaagtgtcagtgccaaa

SEQ ID NO: 1367968 - DNA, 25 bp, Homo sapien
gaatggagacaatggacgaagtgtc

SEQ ID NO: 1367969 - DNA, 25 bp, Homo sapien
tggagacaatggacgaagtgtcagt

SEQ ID NO: 1367970 - DNA, 25 bp, Homo sapien
ccattggccgcttgctttgaatctc

SEQ ID NO: 1367971 - DNA, 25 bp, Homo sapien
tatcattctcaatgaccattggccg

SEQ ID NO: 1367972 - DNA, 25 bp, Homo sapien
cctttatcattctcaatgaccattg

SEQ ID NO: 1367973 - DNA, 25 bp, Homo sapien
tcaatgaccattggccgcttgcttt

SEQ ID NO: 1367974 - DNA, 25 bp, Homo sapien
ctgaccctctcacatgtttggcttt

SEQ ID NO: 1367975 - DNA, 25 bp, Homo sapien
cctgggccatagctgtttggcccat

SEQ ID NO: 1367976 - DNA, 25 bp, Homo sapien
ctctcacatgtttggctttaggaaa

SEQ ID NO: 1367977 - DNA, 25 bp, Homo sapien
tgtccctgggccatagctgtttggc

SEQ ID NO: 1367978 - DNA, 25 bp, Homo sapien
ctcctgctgctaggtctagtaccac

SEQ ID NO: 1367979 - DNA, 25 bp, Homo sapien
gctcctgctgctaggtctagtacca

SEQ ID NO: 1367980 - DNA, 25 bp, Homo sapien
tgctcctgctgctaggtctagtacc

SEQ ID NO: 1367981 - DNA, 25 bp, Homo sapien
cttgctcctgctgctaggtctagta

SEQ ID NO: 1367982 - DNA, 25 bp, Homo sapien
tggccaaacctaaggacaattggtg

SEQ ID NO: 1367983 - DNA, 25 bp, Homo sapien
gacaaaagcatcagctaacctgcca

SEQ ID NO: 1367984 - DNA, 25 bp, Homo sapien
tctcagtaggcactttataggcaga

SEQ ID NO: 1367985 - DNA, 25 bp, Homo sapien
tggcctggctagagatctagatatc

SEQ ID NO: 1367986 - DNA, 25 bp, Homo sapien
cactcggaagtttcttatctcaggc

SEQ ID NO: 1367987 - DNA, 25 bp, Homo sapien
tcatgtagggaccactcggaagttt

SEQ ID NO: 1367988 - DNA, 25 bp, Homo sapien
catgtagggaccactcggaagtttc

SEQ ID NO: 1367989 - DNA, 25 bp, Homo sapien
ggaccactcggaagtttcttatctc

SEQ ID NO: 1367990 - DNA, 25 bp, Homo sapien
tccttgcatttgctggcacaggcac

SEQ ID NO: 1367991 - DNA, 25 bp, Homo sapien
cacacatatacagttgggaaacggg

SEQ ID NO: 1367992 - DNA, 25 bp, Homo sapien
aaggctcttggttctcacacatata

SEQ ID NO: 1367993 - DNA, 25 bp, Homo sapien
ctggcacaggcacaaggctcttggt

SEQ ID NO: 1367994 - DNA, 25 bp, Homo sapien
gctggactggaatgaagtatacgca

SEQ ID NO: 1367995 - DNA, 25 bp, Homo sapien
gaatgaagtatacgcagaaaccaca

SEQ ID NO: 1367996 - DNA, 25 bp, Homo sapien
tcttccttgtgctggactggaatga

SEQ ID NO: 1367997 - DNA, 25 bp, Homo sapien
ccttgtgctggactggaatgaagta

SEQ ID NO: 1367998 - DNA, 25 bp, Homo sapien
ttataattttaatcacccgaatcat

SEQ ID NO: 1367999 - DNA, 25 bp, Homo sapien
aaatataatgtttgaacatcacctg

SEQ ID NO: 1368000 - DNA, 25 bp, Homo sapien
tataatgtttgaacatcacctgcac

SEQ ID NO: 1368001 - DNA, 25 bp, Homo sapien
cacctgcaccgatttttataatttt

SEQ ID NO: 1368002 - DNA, 25 bp, Homo sapien
taaagaagttatggaaagcggtcat

SEQ ID NO: 1368003 - DNA, 25 bp, Homo sapien
ttaaagaagttatggaaagcggtca

SEQ ID NO: 1368004 - DNA, 25 bp, Homo sapien
tatacacttatagatgttaccaaac

SEQ ID NO: 1368005 - DNA, 25 bp, Homo sapien
gcacagtgacagacctaaatccaac

SEQ ID NO: 1368006 - DNA, 25 bp, Homo sapien
aatagaagttgactggcacagtgac

SEQ ID NO: 1368007 - DNA, 25 bp, Homo sapien
taaaaatatcttggtggatcgtacc

SEQ ID NO: 1368008 - DNA, 25 bp, Homo sapien
acttgcagtcacgtggaaggtgaag

SEQ ID NO: 1368009 - DNA, 25 bp, Homo sapien
cgaaagaggcatcaggtaacttgca

SEQ ID NO: 1368010 - DNA, 25 bp, Homo sapien
cattttacacagatactgtattagt

SEQ ID NO: 1368011 - DNA, 25 bp, Homo sapien
aaagctggcgaaagaggcatcaggt

SEQ ID NO: 1368012 - DNA, 25 bp, Homo sapien
ggaacagtcgctaggtccataattc

SEQ ID NO: 1368013 - DNA, 25 bp, Homo sapien
cagtcgctaggtccataattctcta

SEQ ID NO: 1368014 - DNA, 25 bp, Homo sapien
taattctctaatactccagggatca

SEQ ID NO: 1368015 - DNA, 25 bp, Homo sapien
caggaacagtcgctaggtccataat

SEQ ID NO: 1368016 - DNA, 25 bp, Homo sapien
cttagattgtttggggatatgaaag

SEQ ID NO: 1368017 - DNA, 25 bp, Homo sapien
agattgtttggggatatgaaagaga

SEQ ID NO: 1368018 - DNA, 25 bp, Homo sapien
agaggggagtcaggtatcacccaca

SEQ ID NO: 1368019 - DNA, 25 bp, Homo sapien
gagaggggagtcaggtatcacccac

SEQ ID NO: 1368020 - DNA, 25 bp, Homo sapien
cagaggtataattgtctatgtagaa

SEQ ID NO: 1368021 - DNA, 25 bp, Homo sapien
tgttcacagaggtataattgtctat

SEQ ID NO: 1368022 - DNA, 25 bp, Homo sapien
gttcacagaggtataattgtctatg

SEQ ID NO: 1368023 - DNA, 25 bp, Homo sapien
cacagaggtataattgtctatgtag

SEQ ID NO: 1368024 - DNA, 25 bp, Homo sapien
ctatagaatcttgtagaccccacca

SEQ ID NO: 1368025 - DNA, 25 bp, Homo sapien
gatgacatttgacggtgactgacac

SEQ ID NO: 1368026 - DNA, 25 bp, Homo sapien
gaatcttgtagaccccaccataaga

SEQ ID NO: 1368027 - DNA, 25 bp, Homo sapien
taagaacatatgtgatgacatttga

SEQ ID NO: 1368028 - DNA, 25 bp, Homo sapien
aatattcattggcctgtgaaaatcc

SEQ ID NO: 1368029 - DNA, 25 bp, Homo sapien
aatgcaagtttttcccgaatcaggc

SEQ ID NO: 1368030 - DNA, 25 bp, Homo sapien
atccaaatgcaagtttttcccgaat

SEQ ID NO: 1368031 - DNA, 25 bp, Homo sapien
caaatgcaagtttttcccgaatcag

SEQ ID NO: 1368032 - DNA, 25 bp, Homo sapien
gcctggaggttctagcctgttataa

SEQ ID NO: 1368033 - DNA, 25 bp, Homo sapien
gctctacggttatggctggtgcctg

SEQ ID NO: 1368034 - DNA, 25 bp, Homo sapien
cagacctgaaaggtaggagtgttgt

SEQ ID NO: 1368035 - DNA, 25 bp, Homo sapien
cattctgctctacggttatggctgg

SEQ ID NO: 1368036 - DNA, 25 bp, Homo sapien
ccaataaatatagtatgggtgatca

SEQ ID NO: 1368037 - DNA, 25 bp, Homo sapien
gcaccaacccaataaatatagtatg

SEQ ID NO: 1368038 - DNA, 25 bp, Homo sapien
agctcttgttttttcgttgcaccaa

SEQ ID NO: 1368039 - DNA, 25 bp, Homo sapien
tagtatgggtgatcaatgctgatat

SEQ ID NO: 1368040 - DNA, 25 bp, Homo sapien
tttcattggattcatcgagtttcat

SEQ ID NO: 1368041 - DNA, 25 bp, Homo sapien
atttcattggattcatcgagtttca

SEQ ID NO: 1368042 - DNA, 25 bp, Homo sapien
catttcattggattcatcgagtttc

SEQ ID NO: 1368043 - DNA, 25 bp, Homo sapien
caatgaaactgggttatggatacaa

SEQ ID NO: 1368044 - DNA, 25 bp, Homo sapien
atcttcaatgaaactgggttatgga

SEQ ID NO: 1368045 - DNA, 25 bp, Homo sapien
ttcaatgaaactgggttatggatac

SEQ ID NO: 1368046 - DNA, 25 bp, Homo sapien
tcttcaatgaaactgggttatggat

SEQ ID NO: 1368047 - DNA, 25 bp, Homo sapien
tctaaagtatgaagtagccattgac

SEQ ID NO: 1368048 - DNA, 25 bp, Homo sapien
gcatctaaagtatgaagtagccatt

SEQ ID NO: 1368049 - DNA, 25 bp, Homo sapien
agcatctaaagtatgaagtagccat

SEQ ID NO: 1368050 - DNA, 25 bp, Homo sapien
catctaaagtatgaagtagccattg

SEQ ID NO: 1368051 - DNA, 25 bp, Homo sapien
aagctactaaggagtcttaggcagg

SEQ ID NO: 1368052 - DNA, 25 bp, Homo sapien
aagagtttgaatctagcttgggcaa

SEQ ID NO: 1368053 - DNA, 25 bp, Homo sapien
ctgaagttccaagctactaaggagt

SEQ ID NO: 1368054 - DNA, 25 bp, Homo sapien
gggcaatatagttagaacccaatct

SEQ ID NO: 1368055 - DNA, 25 bp, Homo sapien
acttctaagatcctctggcagtgct

SEQ ID NO: 1368056 - DNA, 25 bp, Homo sapien
tgcctcattgcttgcacactctgca

SEQ ID NO: 1368057 - DNA, 25 bp, Homo sapien
gcaaatgcctgctgacacaatccca

SEQ ID NO: 1368058 - DNA, 25 bp, Homo sapien
tcattgcttgcacactctgcaaatg

SEQ ID NO: 1368059 - DNA, 25 bp, Homo sapien
tgcacactctgcaaatgcctgctga

SEQ ID NO: 1368060 - DNA, 25 bp, Homo sapien
gattcactagccctatggaaacttc

SEQ ID NO: 1368061 - DNA, 25 bp, Homo sapien
attcactagccctatggaaacttct

SEQ ID NO: 1368062 - DNA, 25 bp, Homo sapien
agattcactagccctatggaaactt

SEQ ID NO: 1368063 - DNA, 25 bp, Homo sapien
tgtggttggaaccaattcttcccca

SEQ ID NO: 1368064 - DNA, 25 bp, Homo sapien
tttccagagtgagagacaatcagca

SEQ ID NO: 1368065 - DNA, 25 bp, Homo sapien
gaacatcaatagaaagacatcctgg

SEQ ID NO: 1368066 - DNA, 25 bp, Homo sapien
tgaagtaagccactgaagaagagga

SEQ ID NO: 1368067 - DNA, 25 bp, Homo sapien
ggttctatgagtcttgcagatcacg

SEQ ID NO: 1368068 - DNA, 25 bp, Homo sapien
gttatatgcctgctagaacactaat

SEQ ID NO: 1368069 - DNA, 25 bp, Homo sapien
ttccacctccttaaggcagaactgt

SEQ ID NO: 1368070 - DNA, 25 bp, Homo sapien
tgaatgctgtcattgtgtcactggg

SEQ ID NO: 1368071 - DNA, 25 bp, Homo sapien
tgggcactggatagtattggcaaac

SEQ ID NO: 1368072 - DNA, 25 bp, Homo sapien
ggactcttaactgcactgcctgctg

SEQ ID NO: 1368073 - DNA, 25 bp, Homo sapien
tcttgtcttgtcatgcacacggtgc

SEQ ID NO: 1368074 - DNA, 25 bp, Homo sapien
tgagcagctcaacgtgtcagcaaaa

SEQ ID NO: 1368075 - DNA, 25 bp, Homo sapien
taacattgaactaccgctactgcgg

SEQ ID NO: 1368076 - DNA, 25 bp, Homo sapien
taggaatgtggctctcacactgacc

SEQ ID NO: 1368077 - DNA, 25 bp, Homo sapien
caacacaggaccactttaagaaggg

SEQ ID NO: 1368078 - DNA, 25 bp, Homo sapien
tatagggtcctagtgattcagctgc

SEQ ID NO: 1368079 - DNA, 25 bp, Homo sapien
tagaggcagatacagacaacacagg

SEQ ID NO: 1368080 - DNA, 25 bp, Homo sapien
tataggagtaaccattccacacaag

SEQ ID NO: 1368081 - DNA, 25 bp, Homo sapien
tcaagggttgccctataggagtaac

SEQ ID NO: 1368082 - DNA, 25 bp, Homo sapien
tagttattggtcaagggttgcccta

SEQ ID NO: 1368083 - DNA, 25 bp, Homo sapien
tcagcttccgtagttattggtcaag

SEQ ID NO: 1368084 - DNA, 25 bp, Homo sapien
gccgctatcatcagtcagggaagta

SEQ ID NO: 1368085 - DNA, 25 bp, Homo sapien
tgctaaaattgtccggttgccgcta

SEQ ID NO: 1368086 - DNA, 25 bp, Homo sapien
gctcttgttgcaatgtggttgctaa

SEQ ID NO: 1368087 - DNA, 25 bp, Homo sapien
gtttgagactttggttaacttgctc

SEQ ID NO: 1368088 - DNA, 25 bp, Homo sapien
cagggaacaggccaagtgaactcca

SEQ ID NO: 1368089 - DNA, 25 bp, Homo sapien
agggaacaggccaagtgaactccac

SEQ ID NO: 1368090 - DNA, 25 bp, Homo sapien
ccagggaacaggccaagtgaactcc

SEQ ID NO: 1368091 - DNA, 25 bp, Homo sapien
ttatagtcacaagagtaacttttca

SEQ ID NO: 1368092 - DNA, 25 bp, Homo sapien
tatagtcacaagagtaacttttcat

SEQ ID NO: 1368093 - DNA, 25 bp, Homo sapien
tcaaactgcccactgtgtattttgt

SEQ ID NO: 1368094 - DNA, 25 bp, Homo sapien
gtagtaattcaaactgcccactgtg

SEQ ID NO: 1368095 - DNA, 25 bp, Homo sapien
gtttcatgggttcctaatttggcag

SEQ ID NO: 1368096 - DNA, 25 bp, Homo sapien
gctttttgtagtaattcaaactgcc

SEQ ID NO: 1368097 - DNA, 25 bp, Homo sapien
aacaaggtacgtcaggaggtgctcc

SEQ ID NO: 1368098 - DNA, 25 bp, Homo sapien
aggtgctcctttggctaggctggca

SEQ ID NO: 1368099 - DNA, 25 bp, Homo sapien
ttagacacagtaacaaggtacgtca

SEQ ID NO: 1368100 - DNA, 25 bp, Homo sapien
gaaatgagaggagtcctttccttgg

SEQ ID NO: 1368101 - DNA, 25 bp, Homo sapien
gctgtgaatactttcgaaatcctag

SEQ ID NO: 1368102 - DNA, 25 bp, Homo sapien
gaatagactggctgtgaatactttc

SEQ ID NO: 1368103 - DNA, 25 bp, Homo sapien
tactttcgaaatcctagtttgtgcc

SEQ ID NO: 1368104 - DNA, 25 bp, Homo sapien
ctccattaggtgaatagactggctg

SEQ ID NO: 1368105 - DNA, 25 bp, Homo sapien
ttcacaaggatttacaaagagttta

SEQ ID NO: 1368106 - DNA, 25 bp, Homo sapien
atcttcttttcacaaggatttacaa

SEQ ID NO: 1368107 - DNA, 25 bp, Homo sapien
cttttcacaaggatttacaaagagt

SEQ ID NO: 1368108 - DNA, 25 bp, Homo sapien
tcttttcacaaggatttacaaagag

SEQ ID NO: 1368109 - DNA, 25 bp, Homo sapien
ccatattgtaagaagcttcagagac

SEQ ID NO: 1368110 - DNA, 25 bp, Homo sapien
tattgtaagaagcttcagagacgtg

SEQ ID NO: 1368111 - DNA, 25 bp, Homo sapien
ttccatattgtaagaagcttcagag

SEQ ID NO: 1368112 - DNA, 25 bp, Homo sapien
catattgtaagaagcttcagagacg

SEQ ID NO: 1368113 - DNA, 25 bp, Homo sapien
acgagcacgcagaaacactcaggct

SEQ ID NO: 1368114 - DNA, 25 bp, Homo sapien
tcacgagcacgcagaaacactcagg

SEQ ID NO: 1368115 - DNA, 25 bp, Homo sapien
tcttttagccagagagtacggggaa

SEQ ID NO: 1368116 - DNA, 25 bp, Homo sapien
ggcttcttttagccagagagtacgg

SEQ ID NO: 1368117 - DNA, 25 bp, Homo sapien
caagttaggcaatactgttccatta

SEQ ID NO: 1368118 - DNA, 25 bp, Homo sapien
ctttccaccaagttaggcaatactg

SEQ ID NO: 1368119 - DNA, 25 bp, Homo sapien
caccaagttaggcaatactgttcca

SEQ ID NO: 1368120 - DNA, 25 bp, Homo sapien
taggcaatactgttccattatatga

SEQ ID NO: 1368121 - DNA, 25 bp, Homo sapien
aaaacctgtgccagttttctttgct

SEQ ID NO: 1368122 - DNA, 25 bp, Homo sapien
acctgtgccagttttctttgctcga

SEQ ID NO: 1368123 - DNA, 25 bp, Homo sapien
tttctttgctcgaaacctccatttg

SEQ ID NO: 1368124 - DNA, 25 bp, Homo sapien
gctcgaaacctccatttgtgtaaat

SEQ ID NO: 1368125 - DNA, 25 bp, Homo sapien
ttactaagagtgtttttaagctgct

SEQ ID NO: 1368126 - DNA, 25 bp, Homo sapien
tttatctgcgaaaaactgtcaagtt

SEQ ID NO: 1368127 - DNA, 25 bp, Homo sapien
cttctttacattgatcattaagctt

SEQ ID NO: 1368128 - DNA, 25 bp, Homo sapien
aagttgaatgatttccttgctgtca

SEQ ID NO: 1368129 - DNA, 25 bp, Homo sapien
ggtcactgctagcttttcagcttag

SEQ ID NO: 1368130 - DNA, 25 bp, Homo sapien
tcctggcacatcctattcttcgaag

SEQ ID NO: 1368131 - DNA, 25 bp, Homo sapien
ctgtagctgttatgtcagaatgact

SEQ ID NO: 1368132 - DNA, 25 bp, Homo sapien
tcagcttagcaattgatcctggcac

SEQ ID NO: 1368133 - DNA, 25 bp, Homo sapien
actgaagagttctaattgtaggtca

SEQ ID NO: 1368134 - DNA, 25 bp, Homo sapien
gagttctaattgtaggtcaaggttg

SEQ ID NO: 1368135 - DNA, 25 bp, Homo sapien
aattgtaggtcaaggttgattggtg

SEQ ID NO: 1368136 - DNA, 25 bp, Homo sapien
tctaattgtaggtcaaggttgattg

SEQ ID NO: 1368137 - DNA, 25 bp, Homo sapien
tggtcaccaactcccggggtcaagc

SEQ ID NO: 1368138 - DNA, 25 bp, Homo sapien
ctaggctggtcaccaactcccgggg

SEQ ID NO: 1368139 - DNA, 25 bp, Homo sapien
tcccagagcgctggtatcacaggca

SEQ ID NO: 1368140 - DNA, 25 bp, Homo sapien
agagcgctggtatcacaggcataag

SEQ ID NO: 1368141 - DNA, 25 bp, Homo sapien
tcaacgatcctttgctgtagaaaag

SEQ ID NO: 1368142 - DNA, 25 bp, Homo sapien
tttcaacgatcctttgctgtagaaa

SEQ ID NO: 1368143 - DNA, 25 bp, Homo sapien
ttcaacgatcctttgctgtagaaaa

SEQ ID NO: 1368144 - DNA, 25 bp, Homo sapien
ctttcaacgatcctttgctgtagaa

SEQ ID NO: 1368145 - DNA, 25 bp, Homo sapien
tgtgggtttccgctccagcaagctg

SEQ ID NO: 1368146 - DNA, 25 bp, Homo sapien
tggttccccgtgttgcttttgcttg

SEQ ID NO: 1368147 - DNA, 25 bp, Homo sapien
ccaatattaggagcagcagatagct

SEQ ID NO: 1368148 - DNA, 25 bp, Homo sapien
agttctctgcgttcacctgttgggc

SEQ ID NO: 1368149 - DNA, 25 bp, Homo sapien
gtgcaacatatttggtgaccatcta

SEQ ID NO: 1368150 - DNA, 25 bp, Homo sapien
gagctcttccgttgaaaatcaatag

SEQ ID NO: 1368151 - DNA, 25 bp, Homo sapien
gcaacatatttggtgaccatctaca

SEQ ID NO: 1368152 - DNA, 25 bp, Homo sapien
agataatagcactgtggagctcttc

SEQ ID NO: 1368153 - DNA, 25 bp, Homo sapien
agcgcctcctcggcatgggcgttca

SEQ ID NO: 1368154 - DNA, 25 bp, Homo sapien
catgggcgttcactctggccatgct

SEQ ID NO: 1368155 - DNA, 25 bp, Homo sapien
ctgggcaggcctaggtcggaaccgg

SEQ ID NO: 1368156 - DNA, 25 bp, Homo sapien
gcaggcctaggtcggaaccggctcc

SEQ ID NO: 1368157 - DNA, 25 bp, Homo sapien
cacaatcttatacgccataggatga

SEQ ID NO: 1368158 - DNA, 25 bp, Homo sapien
cttatacgccataggatgacaactt

SEQ ID NO: 1368159 - DNA, 25 bp, Homo sapien
atcacaatcttatacgccataggat

SEQ ID NO: 1368160 - DNA, 25 bp, Homo sapien
aatcttatacgccataggatgacaa

SEQ ID NO: 1368161 - DNA, 25 bp, Homo sapien
gggatttagacaacttatctctgaa

SEQ ID NO: 1368162 - DNA, 25 bp, Homo sapien
taaatggataacactgcatccctga

SEQ ID NO: 1368163 - DNA, 25 bp, Homo sapien
ttctgttattgctatactttcatca

SEQ ID NO: 1368164 - DNA, 25 bp, Homo sapien
tttgttcagaagtgtaaaactgttc

SEQ ID NO: 1368165 - DNA, 25 bp, Homo sapien
taacctgcattattgaagcacactg

SEQ ID NO: 1368166 - DNA, 25 bp, Homo sapien
catatgattgtttgcttgacggagg

SEQ ID NO: 1368167 - DNA, 25 bp, Homo sapien
cagagaagagttgatcagagtgtgc

SEQ ID NO: 1368168 - DNA, 25 bp, Homo sapien
gaggtatagccttgaataaagcatc

SEQ ID NO: 1368169 - DNA, 25 bp, Homo sapien
tacaaaggcattttattattaacca

SEQ ID NO: 1368170 - DNA, 25 bp, Homo sapien
tatacaaaggcattttattattaac

SEQ ID NO: 1368171 - DNA, 25 bp, Homo sapien
ttagagtcagatggaattcagggac

SEQ ID NO: 1368172 - DNA, 25 bp, Homo sapien
tgccatcagagttctgcaattctca

SEQ ID NO: 1368173 - DNA, 25 bp, Homo sapien
cagggacacgtgcaagttttggaaa

SEQ ID NO: 1368174 - DNA, 25 bp, Homo sapien
tatttattgccatcagagttctgca

SEQ ID NO: 1368175 - DNA, 25 bp, Homo sapien
gcacaaaatgggttggtggcaccaa

SEQ ID NO: 1368176 - DNA, 25 bp, Homo sapien
tcctggatggatgagaatgagcacc

SEQ ID NO: 1368177 - DNA, 25 bp, Homo sapien
taaatggtacctgtatatgcagcgt

SEQ ID NO: 1368178 - DNA, 25 bp, Homo sapien
ccacaaaggcatcggtatttcctaa

SEQ ID NO: 1368179 - DNA, 25 bp, Homo sapien
caataggtacttgatcaatttttgg

SEQ ID NO: 1368180 - DNA, 25 bp, Homo sapien
ggtgtattgatttcaatgacagtct

SEQ ID NO: 1368181 - DNA, 25 bp, Homo sapien
caaacaggaccaacttcaaatccga

SEQ ID NO: 1368182 - DNA, 25 bp, Homo sapien
cttcaaatccgaacttctgattctg

SEQ ID NO: 1368183 - DNA, 25 bp, Homo sapien
cccaggaagcgaagtgctttgtcat

SEQ ID NO: 1368184 - DNA, 25 bp, Homo sapien
aattttgccgagcagaggcagtcag

SEQ ID NO: 1368185 - DNA, 25 bp, Homo sapien
gatgacacatcataccaggctgctg

SEQ ID NO: 1368186 - DNA, 25 bp, Homo sapien
gacagtggtaggtgaaattttgccg

SEQ ID NO: 1368187 - DNA, 25 bp, Homo sapien
tttcctcttttatgctacaaagaat

SEQ ID NO: 1368188 - DNA, 25 bp, Homo sapien
aaagacacctaatgactcttttcct

SEQ ID NO: 1368189 - DNA, 25 bp, Homo sapien
agacacctaatgactcttttcctct

SEQ ID NO: 1368190 - DNA, 25 bp, Homo sapien
tcctcttttatgctacaaagaatta

SEQ ID NO: 1368191 - DNA, 25 bp, Homo sapien
ctcctttggccatgatgaaattctt

SEQ ID NO: 1368192 - DNA, 25 bp, Homo sapien
acttcctggtttctcctttggccat

SEQ ID NO: 1368193 - DNA, 25 bp, Homo sapien
tttctcctttggccatgatgaaatt

SEQ ID NO: 1368194 - DNA, 25 bp, Homo sapien
tggtttctcctttggccatgatgaa

SEQ ID NO: 1368195 - DNA, 25 bp, Homo sapien
gaaggaatctcctgagcaaccttgg

SEQ ID NO: 1368196 - DNA, 25 bp, Homo sapien
ttttttgtctggataaatgcaagtc

SEQ ID NO: 1368197 - DNA, 25 bp, Homo sapien
caccaccagatgtgaaattacagta

SEQ ID NO: 1368198 - DNA, 25 bp, Homo sapien
gaatctcctgagcaaccttggttag

SEQ ID NO: 1368199 - DNA, 25 bp, Homo sapien
ctggattggtctgagtacccattgg

SEQ ID NO: 1368200 - DNA, 25 bp, Homo sapien
gagttgcaggtctttacaagttcgg

SEQ ID NO: 1368201 - DNA, 25 bp, Homo sapien
tcagggaattgagggaaccaaatat

SEQ ID NO: 1368202 - DNA, 25 bp, Homo sapien
tatgctcaatgtcttgtttcaggga

SEQ ID NO: 1368203 - DNA, 25 bp, Homo sapien
gagacccaggaggccctggaagacc

SEQ ID NO: 1368204 - DNA, 25 bp, Homo sapien
ccaggaggccctggaagaccactgt

SEQ ID NO: 1368205 - DNA, 25 bp, Homo sapien
tggagacccaggaggccctggaaga

SEQ ID NO: 1368206 - DNA, 25 bp, Homo sapien
ggaggccctggaagaccactgtcac

SEQ ID NO: 1368207 - DNA, 25 bp, Homo sapien
gtgtctctgttatatttgtaactta

SEQ ID NO: 1368208 - DNA, 25 bp, Homo sapien
atttgtgtctctgttatatttgtaa

SEQ ID NO: 1368209 - DNA, 25 bp, Homo sapien
cagataaaaatctggagcatttgtg

SEQ ID NO: 1368210 - DNA, 25 bp, Homo sapien
agcatttgtgtctctgttatatttg

SEQ ID NO: 1368211 - DNA, 25 bp, Homo sapien
tggtaaacctggaggaccaggtgga

SEQ ID NO: 1368212 - DNA, 25 bp, Homo sapien
agggaccagcaggaccaggaattcc

SEQ ID NO: 1368213 - DNA, 25 bp, Homo sapien
ctaagggaccagcaggaccaggaat

SEQ ID NO: 1368214 - DNA, 25 bp, Homo sapien
taagggaccagcaggaccaggaatt

SEQ ID NO: 1368215 - DNA, 25 bp, Homo sapien
aagggaccagcaggaccaggaattc

SEQ ID NO: 1368216 - DNA, 25 bp, Homo sapien
tatccctcagaatatgatttacagg

SEQ ID NO: 1368217 - DNA, 25 bp, Homo sapien
gagagagaatcagccaatttaaagg

SEQ ID NO: 1368218 - DNA, 25 bp, Homo sapien
aacatttttccatggtgaatctaaa

SEQ ID NO: 1368219 - DNA, 25 bp, Homo sapien
aatattttcataacagcatacactg

SEQ ID NO: 1368220 - DNA, 25 bp, Homo sapien
ccttttgctcctggagatccttgag

SEQ ID NO: 1368221 - DNA, 25 bp, Homo sapien
tgctcctggagatccttgagttcca

SEQ ID NO: 1368222 - DNA, 25 bp, Homo sapien
tggagatccttgagttccagggagc

SEQ ID NO: 1368223 - DNA, 25 bp, Homo sapien
atccttgagttccagggagccctcg

SEQ ID NO: 1368224 - DNA, 25 bp, Homo sapien
gaccaatcaggccaattaaaccagg

SEQ ID NO: 1368225 - DNA, 25 bp, Homo sapien
ggaccaatcaggccaattaaaccag

SEQ ID NO: 1368226 - DNA, 25 bp, Homo sapien
ccaatcaggccaattaaaccaggat

SEQ ID NO: 1368227 - DNA, 25 bp, Homo sapien
gaggaccaatcaggccaattaaacc

SEQ ID NO: 1368228 - DNA, 25 bp, Homo sapien
agggtcacctttgagaccaggtaag

SEQ ID NO: 1368229 - DNA, 25 bp, Homo sapien
gggtcacctttgagaccaggtaagc

SEQ ID NO: 1368230 - DNA, 25 bp, Homo sapien
ggtcacctttgagaccaggtaagcc

SEQ ID NO: 1368231 - DNA, 25 bp, Homo sapien
acctttgagaccaggtaagccagga

SEQ ID NO: 1368232 - DNA, 25 bp, Homo sapien
tgaaaatacggagttgaaaatagta

SEQ ID NO: 1368233 - DNA, 25 bp, Homo sapien
gaatcctataactagtcacagacct

SEQ ID NO: 1368234 - DNA, 25 bp, Homo sapien
agagtaggtatgaattagagaatcc

SEQ ID NO: 1368235 - DNA, 25 bp, Homo sapien
ttttcagttaagaataaagtgtcaa

SEQ ID NO: 1368236 - DNA, 25 bp, Homo sapien
ggaccaggtggtccatcttggcctg

SEQ ID NO: 1368237 - DNA, 25 bp, Homo sapien
tgcagctccagggagaccttgttct

SEQ ID NO: 1368238 - DNA, 25 bp, Homo sapien
cagctccagggagaccttgttctcc

SEQ ID NO: 1368239 - DNA, 25 bp, Homo sapien
cataggaccaggtggtccatcttgg

SEQ ID NO: 1368240 - DNA, 25 bp, Homo sapien
ccagggatgccccgaagaccttctg

SEQ ID NO: 1368241 - DNA, 25 bp, Homo sapien
gaccagggatgccccgaagaccttc

SEQ ID NO: 1368242 - DNA, 25 bp, Homo sapien
aagaccttctggaccaggctttcct

SEQ ID NO: 1368243 - DNA, 25 bp, Homo sapien
aggtccctgaggaccgactgggccg

SEQ ID NO: 1368244 - DNA, 25 bp, Homo sapien
tttttcaccttgtcttccctctgca

SEQ ID NO: 1368245 - DNA, 25 bp, Homo sapien
cttagcacctttttcaccttgtctt

SEQ ID NO: 1368246 - DNA, 25 bp, Homo sapien
accttgtcttccctctgcacctgca

SEQ ID NO: 1368247 - DNA, 25 bp, Homo sapien
cctttttcaccttgtcttccctctg

SEQ ID NO: 1368248 - DNA, 25 bp, Homo sapien
tccaggaggacctggtgggccagcc

SEQ ID NO: 1368249 - DNA, 25 bp, Homo sapien
aggaggacctggtgggccagcctca

SEQ ID NO: 1368250 - DNA, 25 bp, Homo sapien
gcctcaccagatgggccaggaggac

SEQ ID NO: 1368251 - DNA, 25 bp, Homo sapien
gtgggccagcctcaccagatgggcc

SEQ ID NO: 1368252 - DNA, 25 bp, Homo sapien
cggttgaccaggatctccatcttca

SEQ ID NO: 1368253 - DNA, 25 bp, Homo sapien
aggatctccatcttcacccttgtca

SEQ ID NO: 1368254 - DNA, 25 bp, Homo sapien
gttgaccaggatctccatcttcacc

SEQ ID NO: 1368255 - DNA, 25 bp, Homo sapien
ccatcttcacccttgtcaccaccaa

SEQ ID NO: 1368256 - DNA, 25 bp, Homo sapien
gcagggccaggttccccaggaggac

SEQ ID NO: 1368257 - DNA, 25 bp, Homo sapien
ggttccccaggaggaccaggatctc

SEQ ID NO: 1368258 - DNA, 25 bp, Homo sapien
caggatctccaggaaaaccaacagg

SEQ ID NO: 1368259 - DNA, 25 bp, Homo sapien
gccaggttccccaggaggaccagga

SEQ ID NO: 1368260 - DNA, 25 bp, Homo sapien
gcagctccaggtggaccagcttccc

SEQ ID NO: 1368261 - DNA, 25 bp, Homo sapien
gggttacccttagggccatcatcac

SEQ ID NO: 1368262 - DNA, 25 bp, Homo sapien
cgggttacccttagggccatcatca

SEQ ID NO: 1368263 - DNA, 25 bp, Homo sapien
ccaggaggccctgggttccctgctt

SEQ ID NO: 1368264 - DNA, 25 bp, Homo sapien
aggccctgggttccctgcttctcca

SEQ ID NO: 1368265 - DNA, 25 bp, Homo sapien
ggaggccctgggttccctgcttctc

SEQ ID NO: 1368266 - DNA, 25 bp, Homo sapien
gcctacacctgcttccccaggaggc

SEQ ID NO: 1368267 - DNA, 25 bp, Homo sapien
tctccaacaccaccaactgaaccaa

SEQ ID NO: 1368268 - DNA, 25 bp, Homo sapien
tccaacaccaccaactgaaccaaca

SEQ ID NO: 1368269 - DNA, 25 bp, Homo sapien
caactgaaccaacagaccctggggg

SEQ ID NO: 1368270 - DNA, 25 bp, Homo sapien
ttttctccaacaccaccaactgaac

SEQ ID NO: 1368271 - DNA, 25 bp, Homo sapien
ctccattgggaccttgagggcctct

SEQ ID NO: 1368272 - DNA, 25 bp, Homo sapien
cattgggaccttgagggcctcttgg

SEQ ID NO: 1368273 - DNA, 25 bp, Homo sapien
atcagctccattgggaccttgaggg

SEQ ID NO: 1368274 - DNA, 25 bp, Homo sapien
cagctccattgggaccttgagggcc

SEQ ID NO: 1368275 - DNA, 25 bp, Homo sapien
tttttcaccaggtgggcctggcaga

SEQ ID NO: 1368276 - DNA, 25 bp, Homo sapien
tttcaccaggtgggcctggcagacc

SEQ ID NO: 1368277 - DNA, 25 bp, Homo sapien
ccattttcacctttttcaccaggtg

SEQ ID NO: 1368278 - DNA, 25 bp, Homo sapien
tcacctttttcaccaggtgggcctg

SEQ ID NO: 1368279 - DNA, 25 bp, Homo sapien
tctaggacctggttcaccatcacct

SEQ ID NO: 1368280 - DNA, 25 bp, Homo sapien
ctgaagacctattggaccaggaggt

SEQ ID NO: 1368281 - DNA, 25 bp, Homo sapien
ctgctgtcctctaggacctggttca

SEQ ID NO: 1368282 - DNA, 25 bp, Homo sapien
agggaagcctctggcaccctcatca

SEQ ID NO: 1368283 - DNA, 25 bp, Homo sapien
cccacaaaattgactggttatggga

SEQ ID NO: 1368284 - DNA, 25 bp, Homo sapien
gactggttatgggacagtatacaaa

SEQ ID NO: 1368285 - DNA, 25 bp, Homo sapien
atttgctgaacaatgtggaatactc

SEQ ID NO: 1368286 - DNA, 25 bp, Homo sapien
gtatacaaatttaatcagggagctg

SEQ ID NO: 1368287 - DNA, 25 bp, Homo sapien
aggggcaccaactggtccttgaaga

SEQ ID NO: 1368288 - DNA, 25 bp, Homo sapien
accaactggtccttgaagacctggg

SEQ ID NO: 1368289 - DNA, 25 bp, Homo sapien
ggggcaccaactggtccttgaagac

SEQ ID NO: 1368290 - DNA, 25 bp, Homo sapien
gcaccaactggtccttgaagacctg

SEQ ID NO: 1368291 - DNA, 25 bp, Homo sapien
ttttgtcccggctcaccaatttcac

SEQ ID NO: 1368292 - DNA, 25 bp, Homo sapien
cccttgctgcctttttgtcccggct

SEQ ID NO: 1368293 - DNA, 25 bp, Homo sapien
ccttgctgcctttttgtcccggctc

SEQ ID NO: 1368294 - DNA, 25 bp, Homo sapien
tttgtcccggctcaccaatttcacc

SEQ ID NO: 1368295 - DNA, 25 bp, Homo sapien
ggtaacggaaatacactgacatata

SEQ ID NO: 1368296 - DNA, 25 bp, Homo sapien
tgtataaactggtaacggaaataca

SEQ ID NO: 1368297 - DNA, 25 bp, Homo sapien
ataaactggtaacggaaatacactg

SEQ ID NO: 1368298 - DNA, 25 bp, Homo sapien
aactggtaacggaaatacactgaca

SEQ ID NO: 1368299 - DNA, 25 bp, Homo sapien
gccctgggagaccaacaggaccttg

SEQ ID NO: 1368300 - DNA, 25 bp, Homo sapien
gagccggcaggaccagctggccctg

SEQ ID NO: 1368301 - DNA, 25 bp, Homo sapien
ttgtctccgtcttccccaggggagc

SEQ ID NO: 1368302 - DNA, 25 bp, Homo sapien
gggagaccaacaggaccttgaactc

SEQ ID NO: 1368303 - DNA, 25 bp, Homo sapien
agctgtacctgctgacccacgttct

SEQ ID NO: 1368304 - DNA, 25 bp, Homo sapien
ggtaaaccaattgggccagctgtac

SEQ ID NO: 1368305 - DNA, 25 bp, Homo sapien
tgctgacccacgttctcctggtgag

SEQ ID NO: 1368306 - DNA, 25 bp, Homo sapien
gcgccctggtaaaccaattgggcca

SEQ ID NO: 1368307 - DNA, 25 bp, Homo sapien
gaattaatgcagcacttggcactac

SEQ ID NO: 1368308 - DNA, 25 bp, Homo sapien
gcacttggcactacattctgagtag

SEQ ID NO: 1368309 - DNA, 25 bp, Homo sapien
attagaagcatgagatccttcaaag

SEQ ID NO: 1368310 - DNA, 25 bp, Homo sapien
tggcactacattctgagtagtaaat

SEQ ID NO: 1368311 - DNA, 25 bp, Homo sapien
gctagaaagaactcaaaggagggac

SEQ ID NO: 1368312 - DNA, 25 bp, Homo sapien
tctggagcaaactctctatgggcca

SEQ ID NO: 1368313 - DNA, 25 bp, Homo sapien
ggaaccactagctttctgatctgga

SEQ ID NO: 1368314 - DNA, 25 bp, Homo sapien
tcaacaatgcctgtcataatagaga

SEQ ID NO: 1368315 - DNA, 25 bp, Homo sapien
cctggagcaatgagaatagaaagta

SEQ ID NO: 1368316 - DNA, 25 bp, Homo sapien
gaaagtattcccctaatccctcaca

SEQ ID NO: 1368317 - DNA, 25 bp, Homo sapien
gtattagctttatccccttctgcag

SEQ ID NO: 1368318 - DNA, 25 bp, Homo sapien
tagcattggtctatattcctggagc

SEQ ID NO: 1368319 - DNA, 25 bp, Homo sapien
ttcacatctagaaaaccatccagtt

SEQ ID NO: 1368320 - DNA, 25 bp, Homo sapien
aattatacttcacatctagaaaacc

SEQ ID NO: 1368321 - DNA, 25 bp, Homo sapien
taatcactttaaatggagtaaacta

SEQ ID NO: 1368322 - DNA, 25 bp, Homo sapien
ttaaatggagtaaactaaggctcgc

SEQ ID NO: 1368323 - DNA, 25 bp, Homo sapien
atcatgcaccgcttcactagattct

SEQ ID NO: 1368324 - DNA, 25 bp, Homo sapien
caatagtgttaggaactaataaatg

SEQ ID NO: 1368325 - DNA, 25 bp, Homo sapien
catcatcatgcaccgcttcactaga

SEQ ID NO: 1368326 - DNA, 25 bp, Homo sapien
agtcatcatcatgcaccgcttcact

SEQ ID NO: 1368327 - DNA, 25 bp, Homo sapien
gctgtaattcacaaccatgattgtc

SEQ ID NO: 1368328 - DNA, 25 bp, Homo sapien
cacacactgtggaatcacagcatga

SEQ ID NO: 1368329 - DNA, 25 bp, Homo sapien
ggaatcacagcatgagagtaatgaa

SEQ ID NO: 1368330 - DNA, 25 bp, Homo sapien
aagaagagctgtaattcacaaccat

SEQ ID NO: 1368331 - DNA, 25 bp, Homo sapien
tcccctcctttcagtccaggtgcac

SEQ ID NO: 1368332 - DNA, 25 bp, Homo sapien
cccctcctttcagtccaggtgcacc

SEQ ID NO: 1368333 - DNA, 25 bp, Homo sapien
tggtccatctttccctgagatacct

SEQ ID NO: 1368334 - DNA, 25 bp, Homo sapien
catctttccctgagataccttgagg

SEQ ID NO: 1368335 - DNA, 25 bp, Homo sapien
ctgctggtccatctttccctgagat

SEQ ID NO: 1368336 - DNA, 25 bp, Homo sapien
aaccacgtaatcctgctggtccatc

SEQ ID NO: 1368337 - DNA, 25 bp, Homo sapien
ccacgttcccctattggaccagtct

SEQ ID NO: 1368338 - DNA, 25 bp, Homo sapien
tattggaccagtctcaccggttggt

SEQ ID NO: 1368339 - DNA, 25 bp, Homo sapien
ccctattggaccagtctcaccggtt

SEQ ID NO: 1368340 - DNA, 25 bp, Homo sapien
acgttcccctattggaccagtctca

SEQ ID NO: 1368341 - DNA, 25 bp, Homo sapien
cccaggagggccggtcttgccttga

SEQ ID NO: 1368342 - DNA, 25 bp, Homo sapien
gagggccggtcttgccttgaaatcc

SEQ ID NO: 1368343 - DNA, 25 bp, Homo sapien
ggagggccggtcttgccttgaaatc

SEQ ID NO: 1368344 - DNA, 25 bp, Homo sapien
caggagggccggtcttgccttgaaa

SEQ ID NO: 1368345 - DNA, 25 bp, Homo sapien
tggaaatatgccaatccatgatgat

SEQ ID NO: 1368346 - DNA, 25 bp, Homo sapien
tgacaatccactgggatagccagat

SEQ ID NO: 1368347 - DNA, 25 bp, Homo sapien
aagtaatcattggtgagaagcaaga

SEQ ID NO: 1368348 - DNA, 25 bp, Homo sapien
ccatgatgatttctgattagaatga

SEQ ID NO: 1368349 - DNA, 25 bp, Homo sapien
ccccacgttgcccagggtgtcctgg

SEQ ID NO: 1368350 - DNA, 25 bp, Homo sapien
acgttgcccagggtgtcctggcagc

SEQ ID NO: 1368351 - DNA, 25 bp, Homo sapien
agtctccccacgttgcccagggtgt

SEQ ID NO: 1368352 - DNA, 25 bp, Homo sapien
gtctccccacgttgcccagggtgtc

SEQ ID NO: 1368353 - DNA, 25 bp, Homo sapien
aacatcatggcttgctcagtgactt

SEQ ID NO: 1368354 - DNA, 25 bp, Homo sapien
caaaacattcttggatgtcatttaa

SEQ ID NO: 1368355 - DNA, 25 bp, Homo sapien
tcttggatgtcatttaaccatggct

SEQ ID NO: 1368356 - DNA, 25 bp, Homo sapien
ggttttccagggctactactgccat

SEQ ID NO: 1368357 - DNA, 25 bp, Homo sapien
cagggaatccaactggaccctgagg

SEQ ID NO: 1368358 - DNA, 25 bp, Homo sapien
gcctggctggcgtattcttttccta

SEQ ID NO: 1368359 - DNA, 25 bp, Homo sapien
atggtgttgaaaccagatgactaga

SEQ ID NO: 1368360 - DNA, 25 bp, Homo sapien
ttaagaaatccataatgactcagtg

SEQ ID NO: 1368361 - DNA, 25 bp, Homo sapien
aatatccagtgcctaaatttgagct

SEQ ID NO: 1368362 - DNA, 25 bp, Homo sapien
gagggccatcgccacctgaagtgcc

SEQ ID NO: 1368363 - DNA, 25 bp, Homo sapien
ggccaggagggccatcgccacctga

SEQ ID NO: 1368364 - DNA, 25 bp, Homo sapien
caggagggccatcgccacctgaagt

SEQ ID NO: 1368365 - DNA, 25 bp, Homo sapien
ccaggagggccatcgccacctgaag

SEQ ID NO: 1368366 - DNA, 25 bp, Homo sapien
caggtttcccagtgggacctcttgc

SEQ ID NO: 1368367 - DNA, 25 bp, Homo sapien
accccgagggcctggtttgccagct

SEQ ID NO: 1368368 - DNA, 25 bp, Homo sapien
gagggcctggtttgccagctactcc

SEQ ID NO: 1368369 - DNA, 25 bp, Homo sapien
gttggaccacgctgaccccgagggc

SEQ ID NO: 1368370 - DNA, 25 bp, Homo sapien
cgttggaccacgctgaccccgaggg

SEQ ID NO: 1368371 - DNA, 25 bp, Homo sapien
cctttctctccattggcacctggaa

SEQ ID NO: 1368372 - DNA, 25 bp, Homo sapien
acctggaaacccagggaatccagtg

SEQ ID NO: 1368373 - DNA, 25 bp, Homo sapien
tggaaacccagggaatccagtggaa

SEQ ID NO: 1368374 - DNA, 25 bp, Homo sapien
tttctctccattggcacctggaaac

SEQ ID NO: 1368375 - DNA, 25 bp, Homo sapien
atatcctggtaatcctggaactcca

SEQ ID NO: 1368376 - DNA, 25 bp, Homo sapien
gatatcctggtaatcctggaactcc

SEQ ID NO: 1368377 - DNA, 25 bp, Homo sapien
gaactcaatttctgacaccagttat

SEQ ID NO: 1368378 - DNA, 25 bp, Homo sapien
acatcagctgcaagagtaccagtga

SEQ ID NO: 1368379 - DNA, 25 bp, Homo sapien
tatagaaaatttaaggtgtcactaa

SEQ ID NO: 1368380 - DNA, 25 bp, Homo sapien
cactgaaacgtaaatgtaatggttg

SEQ ID NO: 1368381 - DNA, 25 bp, Homo sapien
cttgggccaatttgaccaacttctc

SEQ ID NO: 1368382 - DNA, 25 bp, Homo sapien
tgctcgacctttgggtccttcaggg

SEQ ID NO: 1368383 - DNA, 25 bp, Homo sapien
ttgacctgaaggacctgggtctcca

SEQ ID NO: 1368384 - DNA, 25 bp, Homo sapien
ctcctgcttgacctgaaggacctgg

SEQ ID NO: 1368385 - DNA, 25 bp, Homo sapien
ccttttagacccatgtcacctttga

SEQ ID NO: 1368386 - DNA, 25 bp, Homo sapien
cccatgtcacctttgaatcctggaa

SEQ ID NO: 1368387 - DNA, 25 bp, Homo sapien
tctgtcaccttttagacccatgtca

SEQ ID NO: 1368388 - DNA, 25 bp, Homo sapien
tagacccatgtcacctttgaatcct

SEQ ID NO: 1368389 - DNA, 25 bp, Homo sapien
caacatgtattctatactggttaaa

SEQ ID NO: 1368390 - DNA, 25 bp, Homo sapien
cagccacagattctgatccccaata

SEQ ID NO: 1368391 - DNA, 25 bp, Homo sapien
tttatgagggaaataaccattctcc

SEQ ID NO: 1368392 - DNA, 25 bp, Homo sapien
ttattggctataaattaccctagga

SEQ ID NO: 1368393 - DNA, 25 bp, Homo sapien
acctttagatcccttgagacctctg

SEQ ID NO: 1368394 - DNA, 25 bp, Homo sapien
tttcacctttagatcccttgagacc

SEQ ID NO: 1368395 - DNA, 25 bp, Homo sapien
tcacctttagatcccttgagacctc

SEQ ID NO: 1368396 - DNA, 25 bp, Homo sapien
cttttcacctttagatcccttgaga

SEQ ID NO: 1368397 - DNA, 25 bp, Homo sapien
gtatccaataggaccttgtggacca

SEQ ID NO: 1368398 - DNA, 25 bp, Homo sapien
cgggtatccaataggaccttgtgga

SEQ ID NO: 1368399 - DNA, 25 bp, Homo sapien
ggtatccaataggaccttgtggacc

SEQ ID NO: 1368400 - DNA, 25 bp, Homo sapien
tccaataggaccttgtggaccaggg

SEQ ID NO: 1368401 - DNA, 25 bp, Homo sapien
ccttttctccagactggccttcttt

SEQ ID NO: 1368402 - DNA, 25 bp, Homo sapien
agcccccttttctccagactggcct

SEQ ID NO: 1368403 - DNA, 25 bp, Homo sapien
ttttctccagactggccttctttcc

SEQ ID NO: 1368404 - DNA, 25 bp, Homo sapien
cagagcccccttttctccagactgg

SEQ ID NO: 1368405 - DNA, 25 bp, Homo sapien
agcaccaggaagtccagcaagtcct

SEQ ID NO: 1368406 - DNA, 25 bp, Homo sapien
ccaggaagtccagcaagtcctggtt

SEQ ID NO: 1368407 - DNA, 25 bp, Homo sapien
tcagcaccaggaagtccagcaagtc

SEQ ID NO: 1368408 - DNA, 25 bp, Homo sapien
aggaggcccatcagcaccaggaagt

SEQ ID NO: 1368409 - DNA, 25 bp, Homo sapien
tatttctggagtggtataagtattc

SEQ ID NO: 1368410 - DNA, 25 bp, Homo sapien
tcagaaaactcaaatctacagagac

SEQ ID NO: 1368411 - DNA, 25 bp, Homo sapien
tattccgaaacttagattgcagcac

SEQ ID NO: 1368412 - DNA, 25 bp, Homo sapien
catggactgaatattaacacgagga

SEQ ID NO: 1368413 - DNA, 25 bp, Homo sapien
gggacaaaatattactcaaggaatc

SEQ ID NO: 1368414 - DNA, 25 bp, Homo sapien
tataatggcaatgacaacttcacaa

SEQ ID NO: 1368415 - DNA, 25 bp, Homo sapien
gatagaaatgtgctatgactacagg

SEQ ID NO: 1368416 - DNA, 25 bp, Homo sapien
ggaatctcacagtggagatcaggga

SEQ ID NO: 1368417 - DNA, 25 bp, Homo sapien
aattggaccttgtggaccaggaaga

SEQ ID NO: 1368418 - DNA, 25 bp, Homo sapien
accaattggaccttgtggaccagga

SEQ ID NO: 1368419 - DNA, 25 bp, Homo sapien
ccaattggaccttgtggaccaggaa

SEQ ID NO: 1368420 - DNA, 25 bp, Homo sapien
caattggaccttgtggaccaggaag

SEQ ID NO: 1368421 - DNA, 25 bp, Homo sapien
ctgaggtcctggattcccttgttga

SEQ ID NO: 1368422 - DNA, 25 bp, Homo sapien
tcctggattcccttgttgacctgga

SEQ ID NO: 1368423 - DNA, 25 bp, Homo sapien
ggattcccttgttgacctggaggcc

SEQ ID NO: 1368424 - DNA, 25 bp, Homo sapien
aggtcctggattcccttgttgacct

SEQ ID NO: 1368425 - DNA, 25 bp, Homo sapien
ttggtcctggggggccatctacacc

SEQ ID NO: 1368426 - DNA, 25 bp, Homo sapien
ctggggggccatctacacctgccat

SEQ ID NO: 1368427 - DNA, 25 bp, Homo sapien
ggggggccatctacacctgccatac

SEQ ID NO: 1368428 - DNA, 25 bp, Homo sapien
gtcctggggggccatctacacctgc

SEQ ID NO: 1368429 - DNA, 25 bp, Homo sapien
tggagttccccttggacccagcaaa

SEQ ID NO: 1368430 - DNA, 25 bp, Homo sapien
cccttggacccagcaaacctcgtgg

SEQ ID NO: 1368431 - DNA, 25 bp, Homo sapien
ttggacccagcaaacctcgtgggcc

SEQ ID NO: 1368432 - DNA, 25 bp, Homo sapien
ctggagttccccttggacccagcaa

SEQ ID NO: 1368433 - DNA, 25 bp, Homo sapien
gaagacctcttggtccaatttctcc

SEQ ID NO: 1368434 - DNA, 25 bp, Homo sapien
ggaagacctcttggtccaatttctc

SEQ ID NO: 1368435 - DNA, 25 bp, Homo sapien
gaggaccttgaggacctcgttcacc

SEQ ID NO: 1368436 - DNA, 25 bp, Homo sapien
aggacctggaggaccttgaggacct

SEQ ID NO: 1368437 - DNA, 25 bp, Homo sapien
gacctggaggaccttgaggacctcg

SEQ ID NO: 1368438 - DNA, 25 bp, Homo sapien
attccatcatcaccaggaggacctg

SEQ ID NO: 1368439 - DNA, 25 bp, Homo sapien
ggaagtccatcaaaccctcgatctc

SEQ ID NO: 1368440 - DNA, 25 bp, Homo sapien
cccggaagtccatcaaaccctcgat

SEQ ID NO: 1368441 - DNA, 25 bp, Homo sapien
gacctttgtcacctggcagacccgg

SEQ ID NO: 1368442 - DNA, 25 bp, Homo sapien
tttgtcacctggcagacccggaagt

SEQ ID NO: 1368443 - DNA, 25 bp, Homo sapien
ctcttcctccatctgcacctggacg

SEQ ID NO: 1368444 - DNA, 25 bp, Homo sapien
ttcctccatctgcacctggacgacc

SEQ ID NO: 1368445 - DNA, 25 bp, Homo sapien
tttgccccaggttctcctggcattc

SEQ ID NO: 1368446 - DNA, 25 bp, Homo sapien
ctttgccccaggttctcctggcatt

SEQ ID NO: 1368447 - DNA, 25 bp, Homo sapien
ccagggggaccctggacgcctcgag

SEQ ID NO: 1368448 - DNA, 25 bp, Homo sapien
cagggggaccctggacgcctcgagg

SEQ ID NO: 1368449 - DNA, 25 bp, Homo sapien
gcctaggctggagcccagcggcgcg

SEQ ID NO: 1368450 - DNA, 25 bp, Homo sapien
gtcgcctaggctggagcccagcggc

SEQ ID NO: 1368451 - DNA, 25 bp, Homo sapien
ctgcctcccaggttcacaccattct

SEQ ID NO: 1368452 - DNA, 25 bp, Homo sapien
tgcctcccaggttcacaccattctc

SEQ ID NO: 1368453 - DNA, 25 bp, Homo sapien
cagtatttttacacgattcccagtt

SEQ ID NO: 1368454 - DNA, 25 bp, Homo sapien
gctttgtaatgagaagactgtactc

SEQ ID NO: 1368455 - DNA, 25 bp, Homo sapien
gaaagtgttgagcaaaaagttcaca

SEQ ID NO: 1368456 - DNA, 25 bp, Homo sapien
gaactccagtctgaaggcatgggcc

SEQ ID NO: 1368457 - DNA, 25 bp, Homo sapien
tcacctttggccccagatgaaccag

SEQ ID NO: 1368458 - DNA, 25 bp, Homo sapien
tgaggacctggatcaccactctcac

SEQ ID NO: 1368459 - DNA, 25 bp, Homo sapien
atcaccactctcacctttggcccca

SEQ ID NO: 1368460 - DNA, 25 bp, Homo sapien
cacctttggccccagatgaaccagg

SEQ ID NO: 1368461 - DNA, 25 bp, Homo sapien
ggacctggtcttccagttagaccca

SEQ ID NO: 1368462 - DNA, 25 bp, Homo sapien
tcttccagttagacccattgggcca

SEQ ID NO: 1368463 - DNA, 25 bp, Homo sapien
cagttagacccattgggccaggtgg

SEQ ID NO: 1368464 - DNA, 25 bp, Homo sapien
acaggacctggtcttccagttagac

SEQ ID NO: 1368465 - DNA, 25 bp, Homo sapien
gttggtcctttggaaccatcaccac

SEQ ID NO: 1368466 - DNA, 25 bp, Homo sapien
tggtcctttggaaccatcaccacca

SEQ ID NO: 1368467 - DNA, 25 bp, Homo sapien
gatggttggtcctttggaaccatca

SEQ ID NO: 1368468 - DNA, 25 bp, Homo sapien
agagatggttggtcctttggaacca

SEQ ID NO: 1368469 - DNA, 25 bp, Homo sapien
cccctggtaagccaggacgtcctgg

SEQ ID NO: 1368470 - DNA, 25 bp, Homo sapien
aggaggaccaggtagaccatcagcc

SEQ ID NO: 1368471 - DNA, 25 bp, Homo sapien
ggtagaccatcagcccctggtaagc

SEQ ID NO: 1368472 - DNA, 25 bp, Homo sapien
catcagcccctggtaagccaggacg

SEQ ID NO: 1368473 - DNA, 25 bp, Homo sapien
gtagacctggaggacccataatacc

SEQ ID NO: 1368474 - DNA, 25 bp, Homo sapien
tatcgccagggtcaccagggggtcc

SEQ ID NO: 1368475 - DNA, 25 bp, Homo sapien
gggccttgtagacctggaggaccca

SEQ ID NO: 1368476 - DNA, 25 bp, Homo sapien
ccagtggggccttgtagacctggag

SEQ ID NO: 1368477 - DNA, 25 bp, Homo sapien
cctggtggtccttcgacaagcatac

SEQ ID NO: 1368478 - DNA, 25 bp, Homo sapien
ctggtggtccttcgacaagcatacc

SEQ ID NO: 1368479 - DNA, 25 bp, Homo sapien
tcctggtggtccttcgacaagcata

SEQ ID NO: 1368480 - DNA, 25 bp, Homo sapien
aggctcaaccactgctggttctcct

SEQ ID NO: 1368481 - DNA, 25 bp, Homo sapien
aaagacattaagatggacatggaca

SEQ ID NO: 1368482 - DNA, 25 bp, Homo sapien
aagacattaagatggacatggacat

SEQ ID NO: 1368483 - DNA, 25 bp, Homo sapien
tgttttcatatagtgtatcctcaga

SEQ ID NO: 1368484 - DNA, 25 bp, Homo sapien
gaatccctgccgtctatttctttgt

SEQ ID NO: 1368485 - DNA, 25 bp, Homo sapien
tctccatctaccagaagatcagaat

SEQ ID NO: 1368486 - DNA, 25 bp, Homo sapien
taaaaatcatattcgcctaaatctc

SEQ ID NO: 1368487 - DNA, 25 bp, Homo sapien
tcctctcccgttagatattcttcag

SEQ ID NO: 1368488 - DNA, 25 bp, Homo sapien
gaatcataatcctctcccgttagat

SEQ ID NO: 1368489 - DNA, 25 bp, Homo sapien
taatcctctcccgttagatattctt

SEQ ID NO: 1368490 - DNA, 25 bp, Homo sapien
ctgggaatcataatcctctcccgtt

SEQ ID NO: 1368491 - DNA, 25 bp, Homo sapien
tacaatttgatagcgtgtgatggga

SEQ ID NO: 1368492 - DNA, 25 bp, Homo sapien
gatgggatgcgattttgttactact

SEQ ID NO: 1368493 - DNA, 25 bp, Homo sapien
tgcaaggaattgaggaacatgaagt

SEQ ID NO: 1368494 - DNA, 25 bp, Homo sapien
tattgttagtaaagcaaggtaagca

SEQ ID NO: 1368495 - DNA, 25 bp, Homo sapien
tttccattgttccatagttgtattc

SEQ ID NO: 1368496 - DNA, 25 bp, Homo sapien
ttgtcccagaaacatgcctaggagc

SEQ ID NO: 1368497 - DNA, 25 bp, Homo sapien
atgcctaggagcttctgtctggtaa

SEQ ID NO: 1368498 - DNA, 25 bp, Homo sapien
cctaggagcttctgtctggtaactt

SEQ ID NO: 1368499 - DNA, 25 bp, Homo sapien
ttgatttagtagccactgtcctcat

SEQ ID NO: 1368500 - DNA, 25 bp, Homo sapien
tgatttagtagccactgtcctcatc

SEQ ID NO: 1368501 - DNA, 25 bp, Homo sapien
agtgggtccctctgttacactttca

SEQ ID NO: 1368502 - DNA, 25 bp, Homo sapien
agtcatattcgattatatcctctgg

SEQ ID NO: 1368503 - DNA, 25 bp, Homo sapien
tattcgattatatcctctggtgcat

SEQ ID NO: 1368504 - DNA, 25 bp, Homo sapien
tgttacactttcagcctctttatac

SEQ ID NO: 1368505 - DNA, 25 bp, Homo sapien
aagtacatgtatggctgatgctcca

SEQ ID NO: 1368506 - DNA, 25 bp, Homo sapien
ttacaacatgggaacaaaacacctc

SEQ ID NO: 1368507 - DNA, 25 bp, Homo sapien
taacagcttacctgacataatagca

SEQ ID NO: 1368508 - DNA, 25 bp, Homo sapien
tattgcattacccaacaagattgtc

SEQ ID NO: 1368509 - DNA, 25 bp, Homo sapien
ataagtataagttcaaaaactgcac

SEQ ID NO: 1368510 - DNA, 25 bp, Homo sapien
caaaaactgcactgcgatgtccata

SEQ ID NO: 1368511 - DNA, 25 bp, Homo sapien
ccatatcactgaaatacgaagacct

SEQ ID NO: 1368512 - DNA, 25 bp, Homo sapien
tgaaatacgaagaccttctctggtc

SEQ ID NO: 1368513 - DNA, 25 bp, Homo sapien
tgaagagtcacagtctggactataa

SEQ ID NO: 1368514 - DNA, 25 bp, Homo sapien
tagtcatatgctgccttgggatcac

SEQ ID NO: 1368515 - DNA, 25 bp, Homo sapien
gatcacctgtgatcaaaaactgctg

SEQ ID NO: 1368516 - DNA, 25 bp, Homo sapien
taatgctcacagtagtcatatgctg

SEQ ID NO: 1368517 - DNA, 25 bp, Homo sapien
gaactccttgtcttatgtgaagcca

SEQ ID NO: 1368518 - DNA, 25 bp, Homo sapien
catgtcaatgtgttagtgctaagga

SEQ ID NO: 1368519 - DNA, 25 bp, Homo sapien
tcagcctgagcatccactgaattgc

SEQ ID NO: 1368520 - DNA, 25 bp, Homo sapien
aaaaccagcctgtgatactgtcttg

SEQ ID NO: 1368521 - DNA, 25 bp, Homo sapien
ggtatctcaatgagaatgaacattt

SEQ ID NO: 1368522 - DNA, 25 bp, Homo sapien
aacattttcatgaaacggttcttgg

SEQ ID NO: 1368523 - DNA, 25 bp, Homo sapien
aatcttgatgatttgttaaaagcaa

SEQ ID NO: 1368524 - DNA, 25 bp, Homo sapien
acggttcttggaaaaatcttgatga

SEQ ID NO: 1368525 - DNA, 25 bp, Homo sapien
gacggacccatgaggacttttagca

SEQ ID NO: 1368526 - DNA, 25 bp, Homo sapien
ggtcactgttagttgcccatatcaa

SEQ ID NO: 1368527 - DNA, 25 bp, Homo sapien
gggacccacgaggacttctgactga

SEQ ID NO: 1368528 - DNA, 25 bp, Homo sapien
tttagaacacagacagacggaccca

SEQ ID NO: 1368529 - DNA, 25 bp, Homo sapien
caactaaagagctgaagttactcca

SEQ ID NO: 1368530 - DNA, 25 bp, Homo sapien
tactcactgtcatattcactaaggg

SEQ ID NO: 1368531 - DNA, 25 bp, Homo sapien
tgaaactctaggatgcgaagtagct

SEQ ID NO: 1368532 - DNA, 25 bp, Homo sapien
taatgtgcatgcaatcagtgttgga

SEQ ID NO: 1368533 - DNA, 25 bp, Homo sapien
aaatctccaggtgaaactgtctatt

SEQ ID NO: 1368534 - DNA, 25 bp, Homo sapien
taaataatgtctcgagagtgcatcc

SEQ ID NO: 1368535 - DNA, 25 bp, Homo sapien
gagtgcatcctttaatggtgtcaga

SEQ ID NO: 1368536 - DNA, 25 bp, Homo sapien
gaaatagtctagctgatgctctgaa

SEQ ID NO: 1368537 - DNA, 25 bp, Homo sapien
cagcttagagttggatttattttta

SEQ ID NO: 1368538 - DNA, 25 bp, Homo sapien
tcagcttagagttggatttattttt

SEQ ID NO: 1368539 - DNA, 25 bp, Homo sapien
tggtatcaacaattgctctctcact

SEQ ID NO: 1368540 - DNA, 25 bp, Homo sapien
tctccacgctgattgctacccgatg

SEQ ID NO: 1368541 - DNA, 25 bp, Homo sapien
caaaaaccgtgattccattggtatc

SEQ ID NO: 1368542 - DNA, 25 bp, Homo sapien
tctatcaagtggtttcgtggttttc

SEQ ID NO: 1368543 - DNA, 25 bp, Homo sapien
ttccagggttggcagatgtggaaaa

SEQ ID NO: 1368544 - DNA, 25 bp, Homo sapien
cactactgtaggcaggatccaagac

SEQ ID NO: 1368545 - DNA, 25 bp, Homo sapien
taggcaggatccaagactgagacac

SEQ ID NO: 1368546 - DNA, 25 bp, Homo sapien
gactgagacacaatatctttccttc

SEQ ID NO: 1368547 - DNA, 25 bp, Homo sapien
ttcccgtcagcgatgttaacagttc

SEQ ID NO: 1368548 - DNA, 25 bp, Homo sapien
tgctgaataccatgctcattatata

SEQ ID NO: 1368549 - DNA, 25 bp, Homo sapien
aacctcaacaccaatttgctgaata

SEQ ID NO: 1368550 - DNA, 25 bp, Homo sapien
ccagtgtggtcttcaaacagaaaaa

SEQ ID NO: 1368551 - DNA, 25 bp, Homo sapien
ggcactgagttgtgcttgctttgaa

SEQ ID NO: 1368552 - DNA, 25 bp, Homo sapien
aaactctgtaagcagtatctgagcc

SEQ ID NO: 1368553 - DNA, 25 bp, Homo sapien
gatattccctctggagaattgtgaa

SEQ ID NO: 1368554 - DNA, 25 bp, Homo sapien
gtgcaaaatcccgttgtttttgata

SEQ ID NO: 1368555 - DNA, 25 bp, Homo sapien
cttcatggatattactccatacttc

SEQ ID NO: 1368556 - DNA, 25 bp, Homo sapien
acttcatggatattactccatactt

SEQ ID NO: 1368557 - DNA, 25 bp, Homo sapien
ttagtaattgtgccccttcacattt

SEQ ID NO: 1368558 - DNA, 25 bp, Homo sapien
agtaattgtgccccttcacattttt

SEQ ID NO: 1368559 - DNA, 25 bp, Homo sapien
tagtaattgtgccccttcacatttt

SEQ ID NO: 1368560 - DNA, 25 bp, Homo sapien
attccttcaaagaaccccactggct

SEQ ID NO: 1368561 - DNA, 25 bp, Homo sapien
tccttcaaagaaccccactggctct

SEQ ID NO: 1368562 - DNA, 25 bp, Homo sapien
ttcaaagaaccccactggctctcag

SEQ ID NO: 1368563 - DNA, 25 bp, Homo sapien
aaagaaccccactggctctcagatg

SEQ ID NO: 1368564 - DNA, 25 bp, Homo sapien
aggattggaagtgacctttaccaag

SEQ ID NO: 1368565 - DNA, 25 bp, Homo sapien
tgacctttaccaagaacttgaagag

SEQ ID NO: 1368566 - DNA, 25 bp, Homo sapien
gattggaagtgacctttaccaagaa

SEQ ID NO: 1368567 - DNA, 25 bp, Homo sapien
gaagtgacctttaccaagaacttga

SEQ ID NO: 1368568 - DNA, 25 bp, Homo sapien
gttttatccccactgcttcttctcc

SEQ ID NO: 1368569 - DNA, 25 bp, Homo sapien
tttatccccactgcttcttctccag

SEQ ID NO: 1368570 - DNA, 25 bp, Homo sapien
tatccccactgcttcttctccagac

SEQ ID NO: 1368571 - DNA, 25 bp, Homo sapien
tccccactgcttcttctccagacat

SEQ ID NO: 1368572 - DNA, 25 bp, Homo sapien
ttctccaagagaactgcacgtccaa

SEQ ID NO: 1368573 - DNA, 25 bp, Homo sapien
tcattctccaagagaactgcacgtc

SEQ ID NO: 1368574 - DNA, 25 bp, Homo sapien
tctccaagagaactgcacgtccaac

SEQ ID NO: 1368575 - DNA, 25 bp, Homo sapien
attctccaagagaactgcacgtcca

SEQ ID NO: 1368576 - DNA, 25 bp, Homo sapien
tctggattgtatttaagggaattgc

SEQ ID NO: 1368577 - DNA, 25 bp, Homo sapien
tattgtcccgcctacattcatctct

SEQ ID NO: 1368578 - DNA, 25 bp, Homo sapien
agtttccaattccaacctggtagca

SEQ ID NO: 1368579 - DNA, 25 bp, Homo sapien
tggtagcagctacaatctggattgt

SEQ ID NO: 1368580 - DNA, 25 bp, Homo sapien
gttgttacggtgaaatcccagagcc

SEQ ID NO: 1368581 - DNA, 25 bp, Homo sapien
aagaggaaggtcaatgcgagggttg

SEQ ID NO: 1368582 - DNA, 25 bp, Homo sapien
tgcgagggttgttacggtgaaatcc

SEQ ID NO: 1368583 - DNA, 25 bp, Homo sapien
tcaatgcgagggttgttacggtgaa

SEQ ID NO: 1368584 - DNA, 25 bp, Homo sapien
ggtttgcgttcttcgtgtctctagc

SEQ ID NO: 1368585 - DNA, 25 bp, Homo sapien
tcgccagggatgtttgctacacagc

SEQ ID NO: 1368586 - DNA, 25 bp, Homo sapien
cagaccaacttcgtcctttccaagg

SEQ ID NO: 1368587 - DNA, 25 bp, Homo sapien
tcaacccacgaaattgcgactgcag

SEQ ID NO: 1368588 - DNA, 25 bp, Homo sapien
tctgttagcctctcgctggtcggcg

SEQ ID NO: 1368589 - DNA, 25 bp, Homo sapien
tgatcggccacaccgctggagtcct

SEQ ID NO: 1368590 - DNA, 25 bp, Homo sapien
gggctggcagcggtaaccttatcct

SEQ ID NO: 1368591 - DNA, 25 bp, Homo sapien
tctgcttcgtatggcagacgtggaa

SEQ ID NO: 1368592 - DNA, 25 bp, Homo sapien
gcccaatttgatctaaactgtttac

SEQ ID NO: 1368593 - DNA, 25 bp, Homo sapien
aagcttctgtattaatagaatccca

SEQ ID NO: 1368594 - DNA, 25 bp, Homo sapien
tagaatcccaaacattccatagtgc

SEQ ID NO: 1368595 - DNA, 25 bp, Homo sapien
gctgaaatgtgagttcagaaagccc

SEQ ID NO: 1368596 - DNA, 25 bp, Homo sapien
gaggagaccctgagattgagaacat

SEQ ID NO: 1368597 - DNA, 25 bp, Homo sapien
gatggtaaacattgagggaaaaata

SEQ ID NO: 1368598 - DNA, 25 bp, Homo sapien
aaataaaatcttcaccagtgcagag

SEQ ID NO: 1368599 - DNA, 25 bp, Homo sapien
tatcaccaatatctggagcaatgcc

SEQ ID NO: 1368600 - DNA, 25 bp, Homo sapien
gcagaaactttcaccttggaaatta

SEQ ID NO: 1368601 - DNA, 25 bp, Homo sapien
tgcagaaactttcaccttggaaatt

SEQ ID NO: 1368602 - DNA, 25 bp, Homo sapien
acattgcagcacttcttttttactg

SEQ ID NO: 1368603 - DNA, 25 bp, Homo sapien
tgtgatttaaattgccccggaagct

SEQ ID NO: 1368604 - DNA, 25 bp, Homo sapien
gatgggcatcctattctgattcctt

SEQ ID NO: 1368605 - DNA, 25 bp, Homo sapien
tcatccttagatgcaattctgttct

SEQ ID NO: 1368606 - DNA, 25 bp, Homo sapien
tagctcttctactggatcaacactg

SEQ ID NO: 1368607 - DNA, 25 bp, Homo sapien
ttagctcttctactggatcaacact

SEQ ID NO: 1368608 - DNA, 25 bp, Homo sapien
tttactgtttctgaactttgattgc

SEQ ID NO: 1368609 - DNA, 25 bp, Homo sapien
ttactgtttctgaactttgattgct

SEQ ID NO: 1368610 - DNA, 25 bp, Homo sapien
ttttactgtttctgaactttgattg

SEQ ID NO: 1368611 - DNA, 25 bp, Homo sapien
gattttacatccaaagcatgaacat

SEQ ID NO: 1368612 - DNA, 25 bp, Homo sapien
gaaattacatcacaggattttacat

SEQ ID NO: 1368613 - DNA, 25 bp, Homo sapien
ttccctgaaattacatcacaggatt

SEQ ID NO: 1368614 - DNA, 25 bp, Homo sapien
ttacatcacaggattttacatccaa

SEQ ID NO: 1368615 - DNA, 25 bp, Homo sapien
tcagatatctggtgcaaggccataa

SEQ ID NO: 1368616 - DNA, 25 bp, Homo sapien
ggtgcaaggccataagcaacagaaa

SEQ ID NO: 1368617 - DNA, 25 bp, Homo sapien
gcaacagaaattgccacaaagctga

SEQ ID NO: 1368618 - DNA, 25 bp, Homo sapien
cagaaattgccacaaagctgaactt

SEQ ID NO: 1368619 - DNA, 25 bp, Homo sapien
atgatcttgcctgctggcaaacctc

SEQ ID NO: 1368620 - DNA, 25 bp, Homo sapien
cagacagtgtcttatggacatgggg

SEQ ID NO: 1368621 - DNA, 25 bp, Homo sapien
tgatgatcttgcctgctggcaaacc

SEQ ID NO: 1368622 - DNA, 25 bp, Homo sapien
agtgtcttatggacatggggcctga

SEQ ID NO: 1368623 - DNA, 25 bp, Homo sapien
taggcaggaactacttactggccac

SEQ ID NO: 1368624 - DNA, 25 bp, Homo sapien
tatgtcttgtgtctctcccagacca

SEQ ID NO: 1368625 - DNA, 25 bp, Homo sapien
tactggccacattgttgaaattctg

SEQ ID NO: 1368626 - DNA, 25 bp, Homo sapien
tgttattgggttaggacttgcacac

SEQ ID NO: 1368627 - DNA, 25 bp, Homo sapien
cattgagttttttgtagggcatgag

SEQ ID NO: 1368628 - DNA, 25 bp, Homo sapien
gaaagacgatattccacaccttagt

SEQ ID NO: 1368629 - DNA, 25 bp, Homo sapien
tagttctccactaattgtgcatgac

SEQ ID NO: 1368630 - DNA, 25 bp, Homo sapien
tgtgcatgacatagcagcaatccag

SEQ ID NO: 1368631 - DNA, 25 bp, Homo sapien
tcgtggcaacgaggttgctgctgcc

SEQ ID NO: 1368632 - DNA, 25 bp, Homo sapien
cttcagtgtcaaatggtatcgtggc

SEQ ID NO: 1368633 - DNA, 25 bp, Homo sapien
tcaaatggtatcgtggcaacgaggt

SEQ ID NO: 1368634 - DNA, 25 bp, Homo sapien
tatcgtggcaacgaggttgctgctg

SEQ ID NO: 1368635 - DNA, 25 bp, Homo sapien
aaatgttggaatctgaagcatcatg

SEQ ID NO: 1368636 - DNA, 25 bp, Homo sapien
atgcccacgccttcgccaaatgttg

SEQ ID NO: 1368637 - DNA, 25 bp, Homo sapien
catgatggaacagttaactttgcgc

SEQ ID NO: 1368638 - DNA, 25 bp, Homo sapien
tctgaagcatcatgatggaacagtt

SEQ ID NO: 1368639 - DNA, 25 bp, Homo sapien
gacaccatcttatgtatattgcagg

SEQ ID NO: 1368640 - DNA, 25 bp, Homo sapien
catgtatcttcagcgtgttcatcag

SEQ ID NO: 1368641 - DNA, 25 bp, Homo sapien
tgtatattgcaggtattatccccag

SEQ ID NO: 1368642 - DNA, 25 bp, Homo sapien
gagtcacacgcagtatcaaatgttg

SEQ ID NO: 1368643 - DNA, 25 bp, Homo sapien
ctccaagaggtctgtatgtagatac

SEQ ID NO: 1368644 - DNA, 25 bp, Homo sapien
tcctccaagaggtctgtatgtagat

SEQ ID NO: 1368645 - DNA, 25 bp, Homo sapien
cctccaagaggtctgtatgtagata

SEQ ID NO: 1368646 - DNA, 25 bp, Homo sapien
tctgcacatagaagtgtggacattt

SEQ ID NO: 1368647 - DNA, 25 bp, Homo sapien
aatctgcacatagaagtgtggacat

SEQ ID NO: 1368648 - DNA, 25 bp, Homo sapien
tgcacatagaagtgtggacatttct

SEQ ID NO: 1368649 - DNA, 25 bp, Homo sapien
cacatagaagtgtggacatttcttc

SEQ ID NO: 1368650 - DNA, 25 bp, Homo sapien
ccggtgttggtatccctcgtgccaa

SEQ ID NO: 1368651 - DNA, 25 bp, Homo sapien
gacagcatgagagtatagagctgct

SEQ ID NO: 1368652 - DNA, 25 bp, Homo sapien
tagagctgcttaaagccagaaacac

SEQ ID NO: 1368653 - DNA, 25 bp, Homo sapien
catctcatcacatattccggtgttg

SEQ ID NO: 1368654 - DNA, 25 bp, Homo sapien
gggtctaagacaacccctgcagact

SEQ ID NO: 1368655 - DNA, 25 bp, Homo sapien
tctgataatgggtctaagacaaccc

SEQ ID NO: 1368656 - DNA, 25 bp, Homo sapien
cattgtccgtatctttctgttgtgg

SEQ ID NO: 1368657 - DNA, 25 bp, Homo sapien
agactccttgttgtaagagcctaca

SEQ ID NO: 1368658 - DNA, 25 bp, Homo sapien
tttagtttaatctcagtgagagtgc

SEQ ID NO: 1368659 - DNA, 25 bp, Homo sapien
agtgagagtgcagttaccttctacc

SEQ ID NO: 1368660 - DNA, 25 bp, Homo sapien
attcagctttagtttaatctcagtg

SEQ ID NO: 1368661 - DNA, 25 bp, Homo sapien
tcagtgagagtgcagttaccttcta

SEQ ID NO: 1368662 - DNA, 25 bp, Homo sapien
tgtacttgtattgttcttaatgtct

SEQ ID NO: 1368663 - DNA, 25 bp, Homo sapien
tgtaagtgggaaagcaatccatttc

SEQ ID NO: 1368664 - DNA, 25 bp, Homo sapien
gtaagtgggaaagcaatccatttcc

SEQ ID NO: 1368665 - DNA, 25 bp, Homo sapien
caagttgtacttgtattgttcttaa

SEQ ID NO: 1368666 - DNA, 25 bp, Homo sapien
gccagtctcttagttctttgtgcca

SEQ ID NO: 1368667 - DNA, 25 bp, Homo sapien
taccctcagctcaccgggaaaacat

SEQ ID NO: 1368668 - DNA, 25 bp, Homo sapien
taaaataatttctccgccagtctct

SEQ ID NO: 1368669 - DNA, 25 bp, Homo sapien
tgtgccatgtccatgctaccctcag

SEQ ID NO: 1368670 - DNA, 25 bp, Homo sapien
tcttgtgggtgggatcaaatgactg

SEQ ID NO: 1368671 - DNA, 25 bp, Homo sapien
attgtttcccaggaatgccagtcct

SEQ ID NO: 1368672 - DNA, 25 bp, Homo sapien
cccaggaatgccagtcctagtccag

SEQ ID NO: 1368673 - DNA, 25 bp, Homo sapien
cctgtatttccatgataggctctgt

SEQ ID NO: 1368674 - DNA, 25 bp, Homo sapien
cagaacaagtcaaaggtacacaagc

SEQ ID NO: 1368675 - DNA, 25 bp, Homo sapien
gatccaatacacttgaatgaaatag

SEQ ID NO: 1368676 - DNA, 25 bp, Homo sapien
ggtattcagtagtttgaccacactg

SEQ ID NO: 1368677 - DNA, 25 bp, Homo sapien
tttgtgacacgaaactcttaaagtg

SEQ ID NO: 1368678 - DNA, 25 bp, Homo sapien
gggaccccgtgctaatggaatcatt

SEQ ID NO: 1368679 - DNA, 25 bp, Homo sapien
cttcaagtggtaatgtgagctatgg

SEQ ID NO: 1368680 - DNA, 25 bp, Homo sapien
tgctgtatggcccagttcacaacag

SEQ ID NO: 1368681 - DNA, 25 bp, Homo sapien
agatgaagttttacccactcaccca

SEQ ID NO: 1368682 - DNA, 25 bp, Homo sapien
cactccagcctgagcaatagagtga

SEQ ID NO: 1368683 - DNA, 25 bp, Homo sapien
ccagcctgagcaatagagtgagatt

SEQ ID NO: 1368684 - DNA, 25 bp, Homo sapien
ctcccgctttgtggccactgcactc

SEQ ID NO: 1368685 - DNA, 25 bp, Homo sapien
ctccagcctgagcaatagagtgaga

SEQ ID NO: 1368686 - DNA, 25 bp, Homo sapien
actgctcaatgaaataaaagaggat

SEQ ID NO: 1368687 - DNA, 25 bp, Homo sapien
gctcaatgaaataaaagaggataca

SEQ ID NO: 1368688 - DNA, 25 bp, Homo sapien
aacaaatggaaaaacattccatgct

SEQ ID NO: 1368689 - DNA, 25 bp, Homo sapien
catgggtaggaagaatcaatatcat

SEQ ID NO: 1368690 - DNA, 25 bp, Homo sapien
taggtggatagatcgtgaaattttc

SEQ ID NO: 1368691 - DNA, 25 bp, Homo sapien
ttttgttaggtggatagatcgtgaa

SEQ ID NO: 1368692 - DNA, 25 bp, Homo sapien
gatagatcgtgaaattttcttccca

SEQ ID NO: 1368693 - DNA, 25 bp, Homo sapien
gtggatagatcgtgaaattttcttc

SEQ ID NO: 1368694 - DNA, 25 bp, Homo sapien
tatccgtctgctaaatgcctactga

SEQ ID NO: 1368695 - DNA, 25 bp, Homo sapien
tttctgcgaaatgaaccctggcagg

SEQ ID NO: 1368696 - DNA, 25 bp, Homo sapien
ggcaggggcctatccgtctgctaaa

SEQ ID NO: 1368697 - DNA, 25 bp, Homo sapien
gccatttctgcgaaatgaaccctgg

SEQ ID NO: 1368698 - DNA, 25 bp, Homo sapien
ttgccccttaaactgagttctcctc

SEQ ID NO: 1368699 - DNA, 25 bp, Homo sapien
aatgagttgacagaataactggcta

SEQ ID NO: 1368700 - DNA, 25 bp, Homo sapien
gttgacagaataactggctagcttt

SEQ ID NO: 1368701 - DNA, 25 bp, Homo sapien
tgagttctcctccctacaatggtgt

SEQ ID NO: 1368702 - DNA, 25 bp, Homo sapien
ttcaggccaattcactttcccaagg

SEQ ID NO: 1368703 - DNA, 25 bp, Homo sapien
ttcccaaggccagggattaagagcc

SEQ ID NO: 1368704 - DNA, 25 bp, Homo sapien
gttctcctccttgctattcaggcca

SEQ ID NO: 1368705 - DNA, 25 bp, Homo sapien
tatttccacacccaagttctcctcc

SEQ ID NO: 1368706 - DNA, 25 bp, Homo sapien
gagcagccgcttgcgatatcaaggg

SEQ ID NO: 1368707 - DNA, 25 bp, Homo sapien
tttccagaatccttagcgcgaggcg

SEQ ID NO: 1368708 - DNA, 25 bp, Homo sapien
tgatgccgcgattttgactgagact

SEQ ID NO: 1368709 - DNA, 25 bp, Homo sapien
gaagagtcttcgaagggttgccgct

SEQ ID NO: 1368710 - DNA, 25 bp, Homo sapien
gttcttttaactgaaggcattgaca

SEQ ID NO: 1368711 - DNA, 25 bp, Homo sapien
gactccatcaactgaaacttttagg

SEQ ID NO: 1368712 - DNA, 25 bp, Homo sapien
catactttagtcgttgaatttgcaa

SEQ ID NO: 1368713 - DNA, 25 bp, Homo sapien
tgcaaaagagcaagatcgagttcac

SEQ ID NO: 1368714 - DNA, 25 bp, Homo sapien
aagccaagacaggtcggtcaccctt

SEQ ID NO: 1368715 - DNA, 25 bp, Homo sapien
tatgtatcatatcacttggagagcc

SEQ ID NO: 1368716 - DNA, 25 bp, Homo sapien
tgatgaggcatcttatccagagacc

SEQ ID NO: 1368717 - DNA, 25 bp, Homo sapien
gggaatgtgtctggtaagccaagac

SEQ ID NO: 1368718 - DNA, 25 bp, Homo sapien
cagtcttggcaggtatataggaata

SEQ ID NO: 1368719 - DNA, 25 bp, Homo sapien
tatacaaacaaggtcgagaaccacc

SEQ ID NO: 1368720 - DNA, 25 bp, Homo sapien
cacagatgttggaataaacctctca

SEQ ID NO: 1368721 - DNA, 25 bp, Homo sapien
tgaccgtaatcaccaagaacagtgg

SEQ ID NO: 1368722 - DNA, 25 bp, Homo sapien
ggaactgtgcgtaacagctttgaaa

SEQ ID NO: 1368723 - DNA, 25 bp, Homo sapien
tgaccacctggactatggaactgtg

SEQ ID NO: 1368724 - DNA, 25 bp, Homo sapien
taatgacctgtgttatacttcctat

SEQ ID NO: 1368725 - DNA, 25 bp, Homo sapien
cccgtgtccttcaagtgctttctaa

SEQ ID NO: 1368726 - DNA, 25 bp, Homo sapien
taagcatcaggaaatatataccctg

SEQ ID NO: 1368727 - DNA, 25 bp, Homo sapien
taccctgtacccaacatgcacaagg

SEQ ID NO: 1368728 - DNA, 25 bp, Homo sapien
caagtaagactggaacatctgtgac

SEQ ID NO: 1368729 - DNA, 25 bp, Homo sapien
aaaaagccaggatatcaagtaagac

SEQ ID NO: 1368730 - DNA, 25 bp, Homo sapien
taaatattagtgatccgccctgcaa

SEQ ID NO: 1368731 - DNA, 25 bp, Homo sapien
aatgaacttgttcaatggtccagac

SEQ ID NO: 1368732 - DNA, 25 bp, Homo sapien
taagagtgcctttgttgatcctagt

SEQ ID NO: 1368733 - DNA, 25 bp, Homo sapien
caaaaacctaccattgctgggcata

SEQ ID NO: 1368734 - DNA, 25 bp, Homo sapien
tgtacatggtgaagcatctagtaga

SEQ ID NO: 1368735 - DNA, 25 bp, Homo sapien
tttcctaattgagaacctagtatga

SEQ ID NO: 1368736 - DNA, 25 bp, Homo sapien
tagtatgaaatccatagactttaat

SEQ ID NO: 1368737 - DNA, 25 bp, Homo sapien
gatggtgatgcatggagttaatttt

SEQ ID NO: 1368738 - DNA, 25 bp, Homo sapien
gagattgccgtactggtgattgaca

SEQ ID NO: 1368739 - DNA, 25 bp, Homo sapien
cttctacaagggactgcacatggcc

SEQ ID NO: 1368740 - DNA, 25 bp, Homo sapien
gagggactcctatgtgggctacatg

SEQ ID NO: 1368741 - DNA, 25 bp, Homo sapien
caagcacagtatcctgaccctgaag

SEQ ID NO: 1368742 - DNA, 25 bp, Homo sapien
atccaggctaggctgtccctctaca

SEQ ID NO: 1368743 - DNA, 25 bp, Homo sapien
tccaggctaggctgtccctctacac

SEQ ID NO: 1368744 - DNA, 25 bp, Homo sapien
gtacgtggccatccaggctaggctg

SEQ ID NO: 1368745 - DNA, 25 bp, Homo sapien
cgtggccatccaggctaggctgtcc

SEQ ID NO: 1368746 - DNA, 25 bp, Homo sapien
acccacatggtgcccatctataagg

SEQ ID NO: 1368747 - DNA, 25 bp, Homo sapien
acatggtgcccatctataagggcta

SEQ ID NO: 1368748 - DNA, 25 bp, Homo sapien
gggctacgccctccctgacaccatt

SEQ ID NO: 1368749 - DNA, 25 bp, Homo sapien
tacgccctccctgacaccattctgc

SEQ ID NO: 1368750 - DNA, 25 bp, Homo sapien
caaggttggctatagcttcagcacc

SEQ ID NO: 1368751 - DNA, 25 bp, Homo sapien
aaggttggctatagcttcagcacca

SEQ ID NO: 1368752 - DNA, 25 bp, Homo sapien
tgagcagtagatggccactgccaca

SEQ ID NO: 1368753 - DNA, 25 bp, Homo sapien
agacactacgtcaaggagaaactgt

SEQ ID NO: 1368754 - DNA, 25 bp, Homo sapien
ctgccgagcgggagatcagacacta

SEQ ID NO: 1368755 - DNA, 25 bp, Homo sapien
ctttgagcagtagatggccactgcc

SEQ ID NO: 1368756 - DNA, 25 bp, Homo sapien
agtgtcccgagacgctgttccagcc

SEQ ID NO: 1368757 - DNA, 25 bp, Homo sapien
ggttgcagtgtcccgagacgctgtt

SEQ ID NO: 1368758 - DNA, 25 bp, Homo sapien
ttgcagtgtcccgagacgctgttcc

SEQ ID NO: 1368759 - DNA, 25 bp, Homo sapien
gcagtgtcccgagacgctgttccag

SEQ ID NO: 1368760 - DNA, 25 bp, Homo sapien
tcaagatgatcgcatccccagagca

SEQ ID NO: 1368761 - DNA, 25 bp, Homo sapien
taggccaacacggtgctatctggtg

SEQ ID NO: 1368762 - DNA, 25 bp, Homo sapien
ggtggcaacatgtacccaggcatca

SEQ ID NO: 1368763 - DNA, 25 bp, Homo sapien
gacctgtaggccaacacggtgctat

SEQ ID NO: 1368764 - DNA, 25 bp, Homo sapien
caagcaatagtacaatgacttggcc

SEQ ID NO: 1368765 - DNA, 25 bp, Homo sapien
gattagcaagcaatagtacaatgac

SEQ ID NO: 1368766 - DNA, 25 bp, Homo sapien
ttagcaagcaatagtacaatgactt

SEQ ID NO: 1368767 - DNA, 25 bp, Homo sapien
gcaagcaatagtacaatgacttggc

SEQ ID NO: 1368768 - DNA, 25 bp, Homo sapien
actggagaaagattatgtgcgttcc

SEQ ID NO: 1368769 - DNA, 25 bp, Homo sapien
agattatgtgcgttccaagattgcc

SEQ ID NO: 1368770 - DNA, 25 bp, Homo sapien
ggagaaagattatgtgcgttccaag

SEQ ID NO: 1368771 - DNA, 25 bp, Homo sapien
gaaagattatgtgcgttccaagatt

SEQ ID NO: 1368772 - DNA, 25 bp, Homo sapien
caaagcttagaaaaaggtagctatg

SEQ ID NO: 1368773 - DNA, 25 bp, Homo sapien
acaatgtatgttgtttatgggaaca

SEQ ID NO: 1368774 - DNA, 25 bp, Homo sapien
gaaattgaatgtcttgctatcaaag

SEQ ID NO: 1368775 - DNA, 25 bp, Homo sapien
gatgaagtaagtcatgaaaacatgc

SEQ ID NO: 1368776 - DNA, 25 bp, Homo sapien
tatatttaaactcgcatttcttgtt

SEQ ID NO: 1368777 - DNA, 25 bp, Homo sapien
atatttaaactcgcatttcttgttt

SEQ ID NO: 1368778 - DNA, 25 bp, Homo sapien
atatatttaaactcgcatttcttgt

SEQ ID NO: 1368779 - DNA, 25 bp, Homo sapien
aaaatttacgtttctgatgatggca

SEQ ID NO: 1368780 - DNA, 25 bp, Homo sapien
ttcctgctggcacatactgtgatgt

SEQ ID NO: 1368781 - DNA, 25 bp, Homo sapien
aattcatgctgaatctaaattgtaa

SEQ ID NO: 1368782 - DNA, 25 bp, Homo sapien
tattagtaactctgctgaagatcca

SEQ ID NO: 1368783 - DNA, 25 bp, Homo sapien
caggtactgcttgttcctgcactca

SEQ ID NO: 1368784 - DNA, 25 bp, Homo sapien
ccacaggtactgcttgttcctgcac

SEQ ID NO: 1368785 - DNA, 25 bp, Homo sapien
gactgctggaaagtccctacttcca

SEQ ID NO: 1368786 - DNA, 25 bp, Homo sapien
gtactgcttgttcctgcactcacag

SEQ ID NO: 1368787 - DNA, 25 bp, Homo sapien
gattaattacagcatccacataaat

SEQ ID NO: 1368788 - DNA, 25 bp, Homo sapien
aattacagcatccacataaatacga

SEQ ID NO: 1368789 - DNA, 25 bp, Homo sapien
ttacagcatccacataaatacgaac

SEQ ID NO: 1368790 - DNA, 25 bp, Homo sapien
atatgattaattacagcatccacat

SEQ ID NO: 1368791 - DNA, 25 bp, Homo sapien
gctgttatgcacagttccatagtcc

SEQ ID NO: 1368792 - DNA, 25 bp, Homo sapien
tactgatttaaaggcgtatggattt

SEQ ID NO: 1368793 - DNA, 25 bp, Homo sapien
tccatagtccaggtggtcaatttct

SEQ ID NO: 1368794 - DNA, 25 bp, Homo sapien
tatctgaggaaagtcattacaatac

SEQ ID NO: 1368795 - DNA, 25 bp, Homo sapien
ctccaggaacagaggctccatttta

SEQ ID NO: 1368796 - DNA, 25 bp, Homo sapien
ggaacagaggctccattttagatat

SEQ ID NO: 1368797 - DNA, 25 bp, Homo sapien
acagaggctccattttagatatcat

SEQ ID NO: 1368798 - DNA, 25 bp, Homo sapien
tccaggaacagaggctccattttag

SEQ ID NO: 1368799 - DNA, 25 bp, Homo sapien
cagacgtatcaactgaggtcgagag

SEQ ID NO: 1368800 - DNA, 25 bp, Homo sapien
gaccagcctgattaacacgaagaaa

SEQ ID NO: 1368801 - DNA, 25 bp, Homo sapien
aaccccatctcaggatcccttgaag

SEQ ID NO: 1368802 - DNA, 25 bp, Homo sapien
ccttgaagccgggaagcggaaattg

SEQ ID NO: 1368803 - DNA, 25 bp, Homo sapien
tgcggatttgcatttaattttaaat

SEQ ID NO: 1368804 - DNA, 25 bp, Homo sapien
ttgcggatttgcatttaattttaaa

SEQ ID NO: 1368805 - DNA, 25 bp, Homo sapien
tttgcggatttgcatttaattttaa

SEQ ID NO: 1368806 - DNA, 25 bp, Homo sapien
gacatcacagtatgtgccagcagga

SEQ ID NO: 1368807 - DNA, 25 bp, Homo sapien
catgaattgcaataaatggatcttc

SEQ ID NO: 1368808 - DNA, 25 bp, Homo sapien
gctttgccatcatcagaaacgtaga

SEQ ID NO: 1368809 - DNA, 25 bp, Homo sapien
gatcttcagcagagttactaataga

SEQ ID NO: 1368810 - DNA, 25 bp, Homo sapien
cattaaccacaagatacatattatt

SEQ ID NO: 1368811 - DNA, 25 bp, Homo sapien
tcattaaccacaagatacatattat

SEQ ID NO: 1368812 - DNA, 25 bp, Homo sapien
aaatcattaaccacaagatacatat

SEQ ID NO: 1368813 - DNA, 25 bp, Homo sapien
ggccaataatgagaagtttcagaac

SEQ ID NO: 1368814 - DNA, 25 bp, Homo sapien
taaaaggctggccatccactacatt

SEQ ID NO: 1368815 - DNA, 25 bp, Homo sapien
catccactacattgcggaaattaac

SEQ ID NO: 1368816 - DNA, 25 bp, Homo sapien
ggttgctcccattatcataccagtt

SEQ ID NO: 1368817 - DNA, 25 bp, Homo sapien
cataccagtttgtaaaaggctggcc

SEQ ID NO: 1368818 - DNA, 25 bp, Homo sapien
tctggattaatagtaacttctttag

SEQ ID NO: 1368819 - DNA, 25 bp, Homo sapien
tgccacaagtagtgtctggattaat

SEQ ID NO: 1368820 - DNA, 25 bp, Homo sapien
ggtggcccaacccaatcattaacat

SEQ ID NO: 1368821 - DNA, 25 bp, Homo sapien
tatttggcgccatcgatgttcacag

SEQ ID NO: 1368822 - DNA, 25 bp, Homo sapien
tcaaaatatcttggccaacggtagc

SEQ ID NO: 1368823 - DNA, 25 bp, Homo sapien
gatgagcaagcataaatccaactgc

SEQ ID NO: 1368824 - DNA, 25 bp, Homo sapien
cggtagcttgacattactcgtgtaa

SEQ ID NO: 1368825 - DNA, 25 bp, Homo sapien
tgtaaatccataaggatgagcaagc

SEQ ID NO: 1368826 - DNA, 25 bp, Homo sapien
agcgccatgtcctcgttgattgtca

SEQ ID NO: 1368827 - DNA, 25 bp, Homo sapien
ctagcatcccagaaggtaagtatag

SEQ ID NO: 1368828 - DNA, 25 bp, Homo sapien
taagtatagaggctcctccagcgcc

SEQ ID NO: 1368829 - DNA, 25 bp, Homo sapien
tcatggttatccacaaagacaagcg

SEQ ID NO: 1368830 - DNA, 25 bp, Homo sapien
ggtaagtttagcgttcctaggcata

SEQ ID NO: 1368831 - DNA, 25 bp, Homo sapien
gtttagggcactagaatacttatca

SEQ ID NO: 1368832 - DNA, 25 bp, Homo sapien
gtgacagacactctaaatacaaaag

SEQ ID NO: 1368833 - DNA, 25 bp, Homo sapien
cagacagaaactcctagggtaagtt

SEQ ID NO: 1368834 - DNA, 25 bp, Homo sapien
gcactggggtagtatgactaacaga

SEQ ID NO: 1368835 - DNA, 25 bp, Homo sapien
gataactcgcactggggtagtatga

SEQ ID NO: 1368836 - DNA, 25 bp, Homo sapien
ctcgcactggggtagtatgactaac

SEQ ID NO: 1368837 - DNA, 25 bp, Homo sapien
tccagaagataactcgcactggggt

SEQ ID NO: 1368838 - DNA, 25 bp, Homo sapien
atgaaatagttcaggggaaaagttg

SEQ ID NO: 1368839 - DNA, 25 bp, Homo sapien
ctatgaaatagttcaggggaaaagt

SEQ ID NO: 1368840 - DNA, 25 bp, Homo sapien
cccggccattaccaaagtagtcact

SEQ ID NO: 1368841 - DNA, 25 bp, Homo sapien
gccgagttttgcaccatacttgaat

SEQ ID NO: 1368842 - DNA, 25 bp, Homo sapien
tacttgaattctgtcacccggccat

SEQ ID NO: 1368843 - DNA, 25 bp, Homo sapien
tccacttgcgaataactgtgccgag

SEQ ID NO: 1368844 - DNA, 25 bp, Homo sapien
cacgcctggtcctatttgttatatg

SEQ ID NO: 1368845 - DNA, 25 bp, Homo sapien
catttttaattgaatctgccgtgaa

SEQ ID NO: 1368846 - DNA, 25 bp, Homo sapien
ttgctatatcgtccaggatggtccc

SEQ ID NO: 1368847 - DNA, 25 bp, Homo sapien
aataataacagctcacaggaatacg

SEQ ID NO: 1368848 - DNA, 25 bp, Homo sapien
ccaaaattgcctttatgtctccagg

SEQ ID NO: 1368849 - DNA, 25 bp, Homo sapien
gtttagattatgcagtttgtccaaa

SEQ ID NO: 1368850 - DNA, 25 bp, Homo sapien
gattatgcagtttgtccaaaattgc

SEQ ID NO: 1368851 - DNA, 25 bp, Homo sapien
cagtttgtccaaaattgcctttatg

SEQ ID NO: 1368852 - DNA, 25 bp, Homo sapien
tatattcggcaatcttagaacgcac

SEQ ID NO: 1368853 - DNA, 25 bp, Homo sapien
cccagtgcaagatcgagaagaccag

SEQ ID NO: 1368854 - DNA, 25 bp, Homo sapien
gaagaccagacagacgacaatctct

SEQ ID NO: 1368855 - DNA, 25 bp, Homo sapien
gaacgcacataatccttccccagtg

SEQ ID NO: 1368856 - DNA, 25 bp, Homo sapien
ccacaggtactgcttgttcctgcac

SEQ ID NO: 1368857 - DNA, 25 bp, Homo sapien
caggtactgcttgttcctgcactca

SEQ ID NO: 1368858 - DNA, 25 bp, Homo sapien
gactgctggaaagtccctacttcca

SEQ ID NO: 1368859 - DNA, 25 bp, Homo sapien
gtactgcttgttcctgcactcacag

SEQ ID NO: 1368860 - DNA, 25 bp, Homo sapien
aattacagcatccacataaatacga

SEQ ID NO: 1368861 - DNA, 25 bp, Homo sapien
gattaattacagcatccacataaat

SEQ ID NO: 1368862 - DNA, 25 bp, Homo sapien
ttacagcatccacataaatacgaac

SEQ ID NO: 1368863 - DNA, 25 bp, Homo sapien
atatgattaattacagcatccacat

SEQ ID NO: 1368864 - DNA, 25 bp, Homo sapien
ccaacattgttgcatctagtcacca

SEQ ID NO: 1368865 - DNA, 25 bp, Homo sapien
ccaccaaggtctgaaagggttgtga

SEQ ID NO: 1368866 - DNA, 25 bp, Homo sapien
ccagatcttgtgcataatttatagc

SEQ ID NO: 1368867 - DNA, 25 bp, Homo sapien
gctaactggttggtatctttcccac

SEQ ID NO: 1368868 - DNA, 25 bp, Homo sapien
cctccaaatcccttgggagctaaat

SEQ ID NO: 1368869 - DNA, 25 bp, Homo sapien
cgccattcaaacagatgaacaatag

SEQ ID NO: 1368870 - DNA, 25 bp, Homo sapien
tcaagagcaatatcaacccatcgcc

SEQ ID NO: 1368871 - DNA, 25 bp, Homo sapien
gctaaatatcgctcacattcaagag

SEQ ID NO: 1368872 - DNA, 25 bp, Homo sapien
agcccagcagaacccaatggtgaaa

SEQ ID NO: 1368873 - DNA, 25 bp, Homo sapien
tggtgaaaagcaaccaaaagagctt

SEQ ID NO: 1368874 - DNA, 25 bp, Homo sapien
ctgagcccagcagaacccaatggtg

SEQ ID NO: 1368875 - DNA, 25 bp, Homo sapien
tgaaaagcaaccaaaagagcttcat

SEQ ID NO: 1368876 - DNA, 25 bp, Homo sapien
tttgctttgaagttgtcagtgtcct

SEQ ID NO: 1368877 - DNA, 25 bp, Homo sapien
cggtataaatgcgaaccgcttccaa

SEQ ID NO: 1368878 - DNA, 25 bp, Homo sapien
tagataacgtaagctaagaaaggaa

SEQ ID NO: 1368879 - DNA, 25 bp, Homo sapien
tataaatgcgaaccgcttccaactc

SEQ ID NO: 1368880 - DNA, 25 bp, Homo sapien
cccacggtgctctggtagataacgt

SEQ ID NO: 1368881 - DNA, 25 bp, Homo sapien
cagaccgacaagacggaaacaactg

SEQ ID NO: 1368882 - DNA, 25 bp, Homo sapien
gacagaccgacaagacggaaacaac

SEQ ID NO: 1368883 - DNA, 25 bp, Homo sapien
ctgacagaccgacaagacggaaaca

SEQ ID NO: 1368884 - DNA, 25 bp, Homo sapien
agaccgacaagacggaaacaactgg

SEQ ID NO: 1368885 - DNA, 25 bp, Homo sapien
cttccacaagcacgtttttagccat

SEQ ID NO: 1368886 - DNA, 25 bp, Homo sapien
ttgtcttccacaagcacgtttttag

SEQ ID NO: 1368887 - DNA, 25 bp, Homo sapien
gacttgtcttccacaagcacgtttt

SEQ ID NO: 1368888 - DNA, 25 bp, Homo sapien
tcttccacaagcacgtttttagcca

SEQ ID NO: 1368889 - DNA, 25 bp, Homo sapien
gaagagttaacttgaatgccaggcc

SEQ ID NO: 1368890 - DNA, 25 bp, Homo sapien
cacgtgtactaaacactgacatcaa

SEQ ID NO: 1368891 - DNA, 25 bp, Homo sapien
ggaagagttaacttgaatgccaggc

SEQ ID NO: 1368892 - DNA, 25 bp, Homo sapien
gaccaagccacgtgtactaaacact

SEQ ID NO: 1368893 - DNA, 25 bp, Homo sapien
agccctgctactccttcaaatgctt

SEQ ID NO: 1368894 - DNA, 25 bp, Homo sapien
tccttcaaatgcttgatctggtgcc

SEQ ID NO: 1368895 - DNA, 25 bp, Homo sapien
agacatcagtcacagccctgctact

SEQ ID NO: 1368896 - DNA, 25 bp, Homo sapien
aatgcttgatctggtgccaacttat

SEQ ID NO: 1368897 - DNA, 25 bp, Homo sapien
ttttttcagacagagagaggacaaa

SEQ ID NO: 1368898 - DNA, 25 bp, Homo sapien
cagagagaggacaaacaataaagga

SEQ ID NO: 1368899 - DNA, 25 bp, Homo sapien
agacagagagaggacaaacaataaa

SEQ ID NO: 1368900 - DNA, 25 bp, Homo sapien
caataaaggaaagatacataaagtt

SEQ ID NO: 1368901 - DNA, 25 bp, Homo sapien
gaatagcagtgccaccgctgctata

SEQ ID NO: 1368902 - DNA, 25 bp, Homo sapien
agaatagcagtgccaccgctgctat

SEQ ID NO: 1368903 - DNA, 25 bp, Homo sapien
tacctcggggaatagaagcctctgg

SEQ ID NO: 1368904 - DNA, 25 bp, Homo sapien
ctgtggacagcacaatgcgaagcaa

SEQ ID NO: 1368905 - DNA, 25 bp, Homo sapien
gagcagctcattttgaagatcttca

SEQ ID NO: 1368906 - DNA, 25 bp, Homo sapien
aagcaaggcccctctgtacctcggg

SEQ ID NO: 1368907 - DNA, 25 bp, Homo sapien
ggtttggactgcctctacgaattgg

SEQ ID NO: 1368908 - DNA, 25 bp, Homo sapien
tagaagttacatgccgtttaccaac

SEQ ID NO: 1368909 - DNA, 25 bp, Homo sapien
ttgctgacttgatacagaagacggc

SEQ ID NO: 1368910 - DNA, 25 bp, Homo sapien
tacgaattggctcaaataataggcc

SEQ ID NO: 1368911 - DNA, 25 bp, Homo sapien
gcagcaaatgaatcgaactatcaga

SEQ ID NO: 1368912 - DNA, 25 bp, Homo sapien
gacacaagtccttcctatagtattg

SEQ ID NO: 1368913 - DNA, 25 bp, Homo sapien
ttctggaaagtatgtcaagaaacaa

SEQ ID NO: 1368914 - DNA, 25 bp, Homo sapien
cttagagttccggaaagtgcagcaa

SEQ ID NO: 1368915 - DNA, 25 bp, Homo sapien
tgtatgaacatctcatcactgactg

SEQ ID NO: 1368916 - DNA, 25 bp, Homo sapien
tacttattcagtgatagcgcctctg

SEQ ID NO: 1368917 - DNA, 25 bp, Homo sapien
gaaatctcacctttagttaaactga

SEQ ID NO: 1368918 - DNA, 25 bp, Homo sapien
tggaaaagaacacgaaaccacattg

SEQ ID NO: 1368919 - DNA, 25 bp, Homo sapien
gagaaggattacgtgcgttctaaga

SEQ ID NO: 1368920 - DNA, 25 bp, Homo sapien
ggattacgtgcgttctaagattgcc

SEQ ID NO: 1368921 - DNA, 25 bp, Homo sapien
actggagaaggattacgtgcgttct

SEQ ID NO: 1368922 - DNA, 25 bp, Homo sapien
gaaggattacgtgcgttctaagatt

SEQ ID NO: 1368923 - DNA, 25 bp, Homo sapien
aaaatttacgtttctgatgatggca

SEQ ID NO: 1368924 - DNA, 25 bp, Homo sapien
ttcctgctggcacatactgtgatgt

SEQ ID NO: 1368925 - DNA, 25 bp, Homo sapien
tattagtaactctgctgaagatcca

SEQ ID NO: 1368926 - DNA, 25 bp, Homo sapien
aattcatgctgaatctaaattgtaa

SEQ ID NO: 1368927 - DNA, 25 bp, Homo sapien
ctttgggcctttaattttgaatgag

SEQ ID NO: 1368928 - DNA, 25 bp, Homo sapien
aattgtaaatgctagaagctttaga

SEQ ID NO: 1368929 - DNA, 25 bp, Homo sapien
aatgctagaagctttagattttgac

SEQ ID NO: 1368930 - DNA, 25 bp, Homo sapien
ctatttctaattccatgatcactaa

SEQ ID NO: 1368931 - DNA, 25 bp, Homo sapien
tataaggcctgactctcctccgcac

SEQ ID NO: 1368932 - DNA, 25 bp, Homo sapien
ttataaggcctgactctcctccgca

SEQ ID NO: 1368933 - DNA, 25 bp, Homo sapien
acagtgtccaacactttttccattg

SEQ ID NO: 1368934 - DNA, 25 bp, Homo sapien
cttgattgtgaggtattagaggatg

SEQ ID NO: 1368935 - DNA, 25 bp, Homo sapien
ctagaacgctttctgtatccacagt

SEQ ID NO: 1368936 - DNA, 25 bp, Homo sapien
gttttgtcactcttcgttttatcac

SEQ ID NO: 1368937 - DNA, 25 bp, Homo sapien
gtcctgtagtgcagatcaatcacca

SEQ ID NO: 1368938 - DNA, 25 bp, Homo sapien
gtgaaatcctgctgaactagactgc

SEQ ID NO: 1368939 - DNA, 25 bp, Homo sapien
agtagcctttgagctcttgtggaca

SEQ ID NO: 1368940 - DNA, 25 bp, Homo sapien
tggtggtcaacctcatgcaatgtga

SEQ ID NO: 1368941 - DNA, 25 bp, Homo sapien
tgttttggcattatttagtaataca

SEQ ID NO: 1368942 - DNA, 25 bp, Homo sapien
gataatatcaaggttttgttctatc

SEQ ID NO: 1368943 - DNA, 25 bp, Homo sapien
ttcactacccccttccatactgaag

SEQ ID NO: 1368944 - DNA, 25 bp, Homo sapien
ttctatccacaaatgttttggcatt

SEQ ID NO: 1368945 - DNA, 25 bp, Homo sapien
catgcagatgggagcagtggatctc

SEQ ID NO: 1368946 - DNA, 25 bp, Homo sapien
gaatgacctgtttgaactctccaca

SEQ ID NO: 1368947 - DNA, 25 bp, Homo sapien
ttcatctacacctgctgtggtcagc

SEQ ID NO: 1368948 - DNA, 25 bp, Homo sapien
taagatagtctggtgggacaatcct

SEQ ID NO: 1368949 - DNA, 25 bp, Homo sapien
ttagtatattttgattcgatgaata

SEQ ID NO: 1368950 - DNA, 25 bp, Homo sapien
agtatattttgattcgatgaataac

SEQ ID NO: 1368951 - DNA, 25 bp, Homo sapien
tagtatattttgattcgatgaataa

SEQ ID NO: 1368952 - DNA, 25 bp, Homo sapien
tgatctggtggaggagattgcctca

SEQ ID NO: 1368953 - DNA, 25 bp, Homo sapien
gatctggtggaggagattgcctcac

SEQ ID NO: 1368954 - DNA, 25 bp, Homo sapien
ttttgagtaggaggaaatgttgtca

SEQ ID NO: 1368955 - DNA, 25 bp, Homo sapien
tgcacaagttaccttcccgatgtca

SEQ ID NO: 1368956 - DNA, 25 bp, Homo sapien
gatgtcattaccacggagagctgta

SEQ ID NO: 1368957 - DNA, 25 bp, Homo sapien
tctgctgtggggctaacattgtgtt

SEQ ID NO: 1368958 - DNA, 25 bp, Homo sapien
tgtagaagaggaaagtcgatagcct

SEQ ID NO: 1368959 - DNA, 25 bp, Homo sapien
actttgttgttttcctctcattcat

SEQ ID NO: 1368960 - DNA, 25 bp, Homo sapien
tactttgttgttttcctctcattca

SEQ ID NO: 1368961 - DNA, 25 bp, Homo sapien
tatactttgttgttttcctctcatt

SEQ ID NO: 1368962 - DNA, 25 bp, Homo sapien
tttatactttgttgttttcctctca

SEQ ID NO: 1368963 - DNA, 25 bp, Homo sapien
gttgtttttcttctaagagaggcat

SEQ ID NO: 1368964 - DNA, 25 bp, Homo sapien
tgttgtttttcttctaagagaggca

SEQ ID NO: 1368965 - DNA, 25 bp, Homo sapien
ttgttgtttttcttctaagagaggc

SEQ ID NO: 1368966 - DNA, 25 bp, Homo sapien
ccatctttgttacgggcagccaggc

SEQ ID NO: 1368967 - DNA, 25 bp, Homo sapien
taaaacagatctcgccacggagtcc

SEQ ID NO: 1368968 - DNA, 25 bp, Homo sapien
ggagtccgcaagcagcagagactgt

SEQ ID NO: 1368969 - DNA, 25 bp, Homo sapien
tgatcacagctatgcccttttggac

SEQ ID NO: 1368970 - DNA, 25 bp, Homo sapien
tggatgggttagaggcacaaagtcc

SEQ ID NO: 1368971 - DNA, 25 bp, Homo sapien
gttattggatgggttagaggcacaa

SEQ ID NO: 1368972 - DNA, 25 bp, Homo sapien
cacaaagtccggcttaggtgaggaa

SEQ ID NO: 1368973 - DNA, 25 bp, Homo sapien
ctttggtggtggttattggatgggt

SEQ ID NO: 1368974 - DNA, 25 bp, Homo sapien
cacattcaatgagctgccgaagaaa

SEQ ID NO: 1368975 - DNA, 25 bp, Homo sapien
cgtcgtaggatcatgagaggctctc

SEQ ID NO: 1368976 - DNA, 25 bp, Homo sapien
tactcatttataatgggttgtgcaa

SEQ ID NO: 1368977 - DNA, 25 bp, Homo sapien
caatagcaaagttgtaggtccacat

SEQ ID NO: 1368978 - DNA, 25 bp, Homo sapien
ctatcagcaatagggacatgcatct

SEQ ID NO: 1368979 - DNA, 25 bp, Homo sapien
ttgactatcagcaatagggacatgc

SEQ ID NO: 1368980 - DNA, 25 bp, Homo sapien
gactatcagcaatagggacatgcat

SEQ ID NO: 1368981 - DNA, 25 bp, Homo sapien
gttgactatcagcaatagggacatg

SEQ ID NO: 1368982 - DNA, 25 bp, Homo sapien
caggcccacaacctgtgacgatgcc

SEQ ID NO: 1368983 - DNA, 25 bp, Homo sapien
tgccaggcccacaacctgtgacgat

SEQ ID NO: 1368984 - DNA, 25 bp, Homo sapien
gccaggcccacaacctgtgacgatg

SEQ ID NO: 1368985 - DNA, 25 bp, Homo sapien
catgccaggcccacaacctgtgacg

SEQ ID NO: 1368986 - DNA, 25 bp, Homo sapien
ggtagctggcaaaggatagataact

SEQ ID NO: 1368987 - DNA, 25 bp, Homo sapien
cattataactggtaattgggtagct

SEQ ID NO: 1368988 - DNA, 25 bp, Homo sapien
ccatgcttcattataactggtaatt

SEQ ID NO: 1368989 - DNA, 25 bp, Homo sapien
tgggagcaagccgtgtaaccatgct

SEQ ID NO: 1368990 - DNA, 25 bp, Homo sapien
tcttttggatagcttaccacaaaga

SEQ ID NO: 1368991 - DNA, 25 bp, Homo sapien
gataccatacatcaaaacactggag

SEQ ID NO: 1368992 - DNA, 25 bp, Homo sapien
tctctttggagttcagataccatac

SEQ ID NO: 1368993 - DNA, 25 bp, Homo sapien
ttggatagcttaccacaaagattac

SEQ ID NO: 1368994 - DNA, 25 bp, Homo sapien
ctgggctagccagcctatgaagatt

SEQ ID NO: 1368995 - DNA, 25 bp, Homo sapien
cagcctatgaagattggtcaggtgg

SEQ ID NO: 1368996 - DNA, 25 bp, Homo sapien
tagccagcctatgaagattggtcag

SEQ ID NO: 1368997 - DNA, 25 bp, Homo sapien
gctagccagcctatgaagattggtc

SEQ ID NO: 1368998 - DNA, 25 bp, Homo sapien
cgcagctgccgtgttggctttgcat

SEQ ID NO: 1368999 - DNA, 25 bp, Homo sapien
ttgagccggcatctggatgtcatgg

SEQ ID NO: 1369000 - DNA, 25 bp, Homo sapien
ggaagagagcgcagctgccgtgttg

SEQ ID NO: 1369001 - DNA, 25 bp, Homo sapien
tcttgagccggcatctggatgtcat

SEQ ID NO: 1369002 - DNA, 25 bp, Homo sapien
attcgccaaagtgacccatgccttc

SEQ ID NO: 1369003 - DNA, 25 bp, Homo sapien
ccttccagagacacattatcacggt

SEQ ID NO: 1369004 - DNA, 25 bp, Homo sapien
ccctccgtggaataattttgatgaa

SEQ ID NO: 1369005 - DNA, 25 bp, Homo sapien
attgaccaggcggttgatggtagcc

SEQ ID NO: 1369006 - DNA, 25 bp, Homo sapien
gaagatggccaagaagatggtcccg

SEQ ID NO: 1369007 - DNA, 25 bp, Homo sapien
caagtggagaggagatcccaaggtg

SEQ ID NO: 1369008 - DNA, 25 bp, Homo sapien
gtggagaggagatcccaaggtggtc

SEQ ID NO: 1369009 - DNA, 25 bp, Homo sapien
gagaggagatcccaaggtggtcaga

SEQ ID NO: 1369010 - DNA, 25 bp, Homo sapien
tgagacctcataatgtaactcaatt

SEQ ID NO: 1369011 - DNA, 25 bp, Homo sapien
acttgagacctcataatgtaactca

SEQ ID NO: 1369012 - DNA, 25 bp, Homo sapien
attacttgagacctcataatgtaac

SEQ ID NO: 1369013 - DNA, 25 bp, Homo sapien
agacctcataatgtaactcaatttg

SEQ ID NO: 1369014 - DNA, 25 bp, Homo sapien
gcgaggagtttatccactgttgtca

SEQ ID NO: 1369015 - DNA, 25 bp, Homo sapien
gctgttctagctttaaacacttgga

SEQ ID NO: 1369016 - DNA, 25 bp, Homo sapien
cacttggaactgttcgccttctgcg

SEQ ID NO: 1369017 - DNA, 25 bp, Homo sapien
tccatataagaaggtcttcttggtc

SEQ ID NO: 1369018 - DNA, 25 bp, Homo sapien
atgtgaaattggttgtagttcccca

SEQ ID NO: 1369019 - DNA, 25 bp, Homo sapien
ggctccttggatccatatgagctca

SEQ ID NO: 1369020 - DNA, 25 bp, Homo sapien
aattggttgtagttccccatggagc

SEQ ID NO: 1369021 - DNA, 25 bp, Homo sapien
cccatggagcagttctaggctcctt

SEQ ID NO: 1369022 - DNA, 25 bp, Homo sapien
aactgtaggtattcaggacagagaa

SEQ ID NO: 1369023 - DNA, 25 bp, Homo sapien
gagtagttcgtagaagatctgaaac

SEQ ID NO: 1369024 - DNA, 25 bp, Homo sapien
ttagccagagagtagttcgtagaag

SEQ ID NO: 1369025 - DNA, 25 bp, Homo sapien
agaactgtaggtattcaggacagag

SEQ ID NO: 1369026 - DNA, 25 bp, Homo sapien
ggtctggaatatctaagggttctcg

SEQ ID NO: 1369027 - DNA, 25 bp, Homo sapien
tgctcaggtctggaatatctaaggg

SEQ ID NO: 1369028 - DNA, 25 bp, Homo sapien
tatctaagggttctcgatgagtaac

SEQ ID NO: 1369029 - DNA, 25 bp, Homo sapien
tcctgctcaggtctggaatatctaa

SEQ ID NO: 1369030 - DNA, 25 bp, Homo sapien
tccttacgttcaaatttctgtctct

SEQ ID NO: 1369031 - DNA, 25 bp, Homo sapien
tttgtgatattccttacgttcaaat

SEQ ID NO: 1369032 - DNA, 25 bp, Homo sapien
ttccttacgttcaaatttctgtctc

SEQ ID NO: 1369033 - DNA, 25 bp, Homo sapien
gatattccttacgttcaaatttctg

SEQ ID NO: 1369034 - DNA, 25 bp, Homo sapien
ttaactttgatattctctctttcat

SEQ ID NO: 1369035 - DNA, 25 bp, Homo sapien
aaaatagaccttgacttgactcttc

SEQ ID NO: 1369036 - DNA, 25 bp, Homo sapien
tcatttttactgctactcctaccac

SEQ ID NO: 1369037 - DNA, 25 bp, Homo sapien
attaaatcagcatcatcactactgc

SEQ ID NO: 1369038 - DNA, 25 bp, Homo sapien
ctaccacctctagctaccattaaat

SEQ ID NO: 1369039 - DNA, 25 bp, Homo sapien
cccaagtgcatagacattgagccat

SEQ ID NO: 1369040 - DNA, 25 bp, Homo sapien
tacgtcgcctaatcctgtagttgat

SEQ ID NO: 1369041 - DNA, 25 bp, Homo sapien
taatctgctctgagactacgtcgcc

SEQ ID NO: 1369042 - DNA, 25 bp, Homo sapien
tgaagcctacacactctgccatgag

SEQ ID NO: 1369043 - DNA, 25 bp, Homo sapien
cagaaactggaaaaagttgcaggaa

SEQ ID NO: 1369044 - DNA, 25 bp, Homo sapien
tggaaaaagttgcaggaatttcaat

SEQ ID NO: 1369045 - DNA, 25 bp, Homo sapien
ctgttcctgaagccagaaactggaa

SEQ ID NO: 1369046 - DNA, 25 bp, Homo sapien
actggaaaaagttgcaggaatttca

SEQ ID NO: 1369047 - DNA, 25 bp, Homo sapien
gggtttattgacaccttgataggtg

SEQ ID NO: 1369048 - DNA, 25 bp, Homo sapien
tcaaaaacaagctgagggtagtaag

SEQ ID NO: 1369049 - DNA, 25 bp, Homo sapien
tattgacaccttgataggtgtttgc

SEQ ID NO: 1369050 - DNA, 25 bp, Homo sapien
ttctgggtttattgacaccttgata

SEQ ID NO: 1369051 - DNA, 25 bp, Homo sapien
acctatgcctcccagactcaagcca

SEQ ID NO: 1369052 - DNA, 25 bp, Homo sapien
ttattattttttcactcccaggctg

SEQ ID NO: 1369053 - DNA, 25 bp, Homo sapien
tattattattttttcactcccaggc

SEQ ID NO: 1369054 - DNA, 25 bp, Homo sapien
ctatgcctcccagactcaagccatc

SEQ ID NO: 1369055 - DNA, 25 bp, Homo sapien
ggacttggcattgcttaataggaag

SEQ ID NO: 1369056 - DNA, 25 bp, Homo sapien
caggacttggcattgcttaatagga

SEQ ID NO: 1369057 - DNA, 25 bp, Homo sapien
ttctcaggacttggcattgcttaat

SEQ ID NO: 1369058 - DNA, 25 bp, Homo sapien
ggcattgcttaataggaagatccat

SEQ ID NO: 1369059 - DNA, 25 bp, Homo sapien
gaacatatcagaggatgaatggtga

SEQ ID NO: 1369060 - DNA, 25 bp, Homo sapien
aaattggaacatatcagaggatgaa

SEQ ID NO: 1369061 - DNA, 25 bp, Homo sapien
actgcttctgtcacaggttgactca

SEQ ID NO: 1369062 - DNA, 25 bp, Homo sapien
caagtagaagtgtctggtctgccag

SEQ ID NO: 1369063 - DNA, 25 bp, Homo sapien
ctatgaaagtcgcattgcggtcttg

SEQ ID NO: 1369064 - DNA, 25 bp, Homo sapien
cattgcggtcttggaaagaaaatca

SEQ ID NO: 1369065 - DNA, 25 bp, Homo sapien
gaaagtcgcattgcggtcttggaaa

SEQ ID NO: 1369066 - DNA, 25 bp, Homo sapien
agtcgcattgcggtcttggaaagaa

SEQ ID NO: 1369067 - DNA, 25 bp, Homo sapien
cattggaacaactaatatttggtca

SEQ ID NO: 1369068 - DNA, 25 bp, Homo sapien
aaaccctctagcatacattggaaca

SEQ ID NO: 1369069 - DNA, 25 bp, Homo sapien
tggtcaatgtaactaatccttagaa

SEQ ID NO: 1369070 - DNA, 25 bp, Homo sapien
tgctaccatagaaaccctctagcat

SEQ ID NO: 1369071 - DNA, 25 bp, Homo sapien
tctgcaggtttatggaaggcagtaa

SEQ ID NO: 1369072 - DNA, 25 bp, Homo sapien
taagaatggaaattctgcaggttta

SEQ ID NO: 1369073 - DNA, 25 bp, Homo sapien
gaaattctgcaggtttatggaaggc

SEQ ID NO: 1369074 - DNA, 25 bp, Homo sapien
tttatggaaggcagtaaaatccaga

SEQ ID NO: 1369075 - DNA, 25 bp, Homo sapien
ctagattcctagttatttcattggc

SEQ ID NO: 1369076 - DNA, 25 bp, Homo sapien
tactgtggagctgatgtctcaaact

SEQ ID NO: 1369077 - DNA, 25 bp, Homo sapien
ctatttactgtggagctgatgtctc

SEQ ID NO: 1369078 - DNA, 25 bp, Homo sapien
tctcaaactttctaagatgactaga

SEQ ID NO: 1369079 - DNA, 25 bp, Homo sapien
cagttttcacgagaatgatctcctg

SEQ ID NO: 1369080 - DNA, 25 bp, Homo sapien
aagacacctgctatcctctcctttt

SEQ ID NO: 1369081 - DNA, 25 bp, Homo sapien
agttttcacgagaatgatctcctgt

SEQ ID NO: 1369082 - DNA, 25 bp, Homo sapien
cagcatctaagacacctgctatcct

SEQ ID NO: 1369083 - DNA, 25 bp, Homo sapien
aaagggcaatggtaattcttgcagc

SEQ ID NO: 1369084 - DNA, 25 bp, Homo sapien
tgaaggtgacctttactacatcttt

SEQ ID NO: 1369085 - DNA, 25 bp, Homo sapien
ttcttgcagctgaaggtgaccttta

SEQ ID NO: 1369086 - DNA, 25 bp, Homo sapien
gatagcatcaggcttcttgaaagaa

SEQ ID NO: 1369087 - DNA, 25 bp, Homo sapien
tgtttattcaactgaattccaacca

SEQ ID NO: 1369088 - DNA, 25 bp, Homo sapien
ttctgtttattcaactgaattccaa

SEQ ID NO: 1369089 - DNA, 25 bp, Homo sapien
tgtttctgtttattcaactgaattc

SEQ ID NO: 1369090 - DNA, 25 bp, Homo sapien
gtttattcaactgaattccaaccat

SEQ ID NO: 1369091 - DNA, 25 bp, Homo sapien
tgagagtaagagtagatttttgtgt

SEQ ID NO: 1369092 - DNA, 25 bp, Homo sapien
ttttgtgttctcacctccaaaaatg

SEQ ID NO: 1369093 - DNA, 25 bp, Homo sapien
cagagatctgttgttcatcacagta

SEQ ID NO: 1369094 - DNA, 25 bp, Homo sapien
caaaggacacaaaatgtcaatgaga

SEQ ID NO: 1369095 - DNA, 25 bp, Homo sapien
tcttgagacttagagcagcttgttt

SEQ ID NO: 1369096 - DNA, 25 bp, Homo sapien
gacttagagcagcttgtttcttcac

SEQ ID NO: 1369097 - DNA, 25 bp, Homo sapien
gagacttagagcagcttgtttcttc

SEQ ID NO: 1369098 - DNA, 25 bp, Homo sapien
caaaatcttgagacttagagcagct

SEQ ID NO: 1369099 - DNA, 25 bp, Homo sapien
ctggttttcaggcccactcttccaa

SEQ ID NO: 1369100 - DNA, 25 bp, Homo sapien
tttcaggcccactcttccaaggaaa

SEQ ID NO: 1369101 - DNA, 25 bp, Homo sapien
gttttcaggcccactcttccaagga

SEQ ID NO: 1369102 - DNA, 25 bp, Homo sapien
caggcccactcttccaaggaaacta

SEQ ID NO: 1369103 - DNA, 25 bp, Homo sapien
ctttactaagtccagtgaatctttc

SEQ ID NO: 1369104 - DNA, 25 bp, Homo sapien
tctctatgacatagcctttctttac

SEQ ID NO: 1369105 - DNA, 25 bp, Homo sapien
tccgatatactttgtttttgcggtg

SEQ ID NO: 1369106 - DNA, 25 bp, Homo sapien
ttttgcggtgtttgaaactactcac

SEQ ID NO: 1369107 - DNA, 25 bp, Homo sapien
cttctaccgcatttaaagttctcca

SEQ ID NO: 1369108 - DNA, 25 bp, Homo sapien
tcttctaccgcatttaaagttctcc

SEQ ID NO: 1369109 - DNA, 25 bp, Homo sapien
ttctaccgcatttaaagttctccat

SEQ ID NO: 1369110 - DNA, 25 bp, Homo sapien
tctcttctaccgcatttaaagttct

SEQ ID NO: 1369111 - DNA, 25 bp, Homo sapien
tttgattcactgacatagaatctct

SEQ ID NO: 1369112 - DNA, 25 bp, Homo sapien
cacaagaccttgtccagcactgtta

SEQ ID NO: 1369113 - DNA, 25 bp, Homo sapien
ttttggcccacaagaccttgtccag

SEQ ID NO: 1369114 - DNA, 25 bp, Homo sapien
taaccactggcttacgaagaatttg

SEQ ID NO: 1369115 - DNA, 25 bp, Homo sapien
tcaacattccatacacgaagacatc

SEQ ID NO: 1369116 - DNA, 25 bp, Homo sapien
caacattccatacacgaagacatca

SEQ ID NO: 1369117 - DNA, 25 bp, Homo sapien
ccgtacacttatgaaaggcgttgtc

SEQ ID NO: 1369118 - DNA, 25 bp, Homo sapien
tatgaaaggcgttgtccagtgtcat

SEQ ID NO: 1369119 - DNA, 25 bp, Homo sapien
tacacttatgaaaggcgttgtccag

SEQ ID NO: 1369120 - DNA, 25 bp, Homo sapien
cttatgaaaggcgttgtccagtgtc

SEQ ID NO: 1369121 - DNA, 25 bp, Homo sapien
catccattgctgttatatgattcct

SEQ ID NO: 1369122 - DNA, 25 bp, Homo sapien
attgctgttatatgattcctcatgc

SEQ ID NO: 1369123 - DNA, 25 bp, Homo sapien
tgttatatgattcctcatgctcttc

SEQ ID NO: 1369124 - DNA, 25 bp, Homo sapien
tgctgttatatgattcctcatgctc

SEQ ID NO: 1369125 - DNA, 25 bp, Homo sapien
caactgggtttaatgatacattctc

SEQ ID NO: 1369126 - DNA, 25 bp, Homo sapien
catccaactgggtttaatgatacat

SEQ ID NO: 1369127 - DNA, 25 bp, Homo sapien
tcatccaactgggtttaatgataca

SEQ ID NO: 1369128 - DNA, 25 bp, Homo sapien
tccaactgggtttaatgatacattc

SEQ ID NO: 1369129 - DNA, 25 bp, Homo sapien
atcagccaaataatggttgtcagaa

SEQ ID NO: 1369130 - DNA, 25 bp, Homo sapien
ccaaataatggttgtcagaatcaac

SEQ ID NO: 1369131 - DNA, 25 bp, Homo sapien
tcaatcagccaaataatggttgtca

SEQ ID NO: 1369132 - DNA, 25 bp, Homo sapien
cagccaaataatggttgtcagaatc

SEQ ID NO: 1369133 - DNA, 25 bp, Homo sapien
cttccaaagctatattttctgcctg

SEQ ID NO: 1369134 - DNA, 25 bp, Homo sapien
gcctggtcatgggatgtactgctac

SEQ ID NO: 1369135 - DNA, 25 bp, Homo sapien
tccaaagctatattttctgcctggt

SEQ ID NO: 1369136 - DNA, 25 bp, Homo sapien
ggtcatgggatgtactgctacttct

SEQ ID NO: 1369137 - DNA, 25 bp, Homo sapien
tggcccgtagccaataacacagtac

SEQ ID NO: 1369138 - DNA, 25 bp, Homo sapien
catagggatgtattatttctgccac

SEQ ID NO: 1369139 - DNA, 25 bp, Homo sapien
caatgtataaaagtctctgcgaaga

SEQ ID NO: 1369140 - DNA, 25 bp, Homo sapien
gaaagctgaactgagactattgcta

SEQ ID NO: 1369141 - DNA, 25 bp, Homo sapien
gaattctgtcaatcaactccaggcc

SEQ ID NO: 1369142 - DNA, 25 bp, Homo sapien
taaattctgaaccagcaaactagtg

SEQ ID NO: 1369143 - DNA, 25 bp, Homo sapien
gctgaccagtgcacaatagcaatat

SEQ ID NO: 1369144 - DNA, 25 bp, Homo sapien
tagatgaatgtgtgagaaggctctc

SEQ ID NO: 1369145 - DNA, 25 bp, Homo sapien
atcaaaggttcttttgggataatct

SEQ ID NO: 1369146 - DNA, 25 bp, Homo sapien
tgccatttgggctctatcaccacca

SEQ ID NO: 1369147 - DNA, 25 bp, Homo sapien
tccagccatgctacaataattactc

SEQ ID NO: 1369148 - DNA, 25 bp, Homo sapien
tcagagaactcttatacaaggcagc

SEQ ID NO: 1369149 - DNA, 25 bp, Homo sapien
ttattctgctggctacatactgcca

SEQ ID NO: 1369150 - DNA, 25 bp, Homo sapien
tacttgaaagggaaacctgcaccat

SEQ ID NO: 1369151 - DNA, 25 bp, Homo sapien
ttacttgaaagggaaacctgcacca

SEQ ID NO: 1369152 - DNA, 25 bp, Homo sapien
gctgataggcaaaaggcttcatatt

SEQ ID NO: 1369153 - DNA, 25 bp, Homo sapien
taggcaaaaggcttcatattaaaac

SEQ ID NO: 1369154 - DNA, 25 bp, Homo sapien
taaactgctgataggcaaaaggctt

SEQ ID NO: 1369155 - DNA, 25 bp, Homo sapien
actgctgataggcaaaaggcttcat

SEQ ID NO: 1369156 - DNA, 25 bp, Homo sapien
ggtgactaccacaattacaagcttc

SEQ ID NO: 1369157 - DNA, 25 bp, Homo sapien
agctggtaatgcctctgaagattat

SEQ ID NO: 1369158 - DNA, 25 bp, Homo sapien
tgcctctgaagattattcaaagcat

SEQ ID NO: 1369159 - DNA, 25 bp, Homo sapien
gcatggtttaaggtgactaccacaa

SEQ ID NO: 1369160 - DNA, 25 bp, Homo sapien
gatgaatttcaatagccaaaattga

SEQ ID NO: 1369161 - DNA, 25 bp, Homo sapien
gaatgattaacaagtttgtcctcct

SEQ ID NO: 1369162 - DNA, 25 bp, Homo sapien
aatttagatgaatttcaatagccaa

SEQ ID NO: 1369163 - DNA, 25 bp, Homo sapien
tatctgaaaatgcacatggtatatt

SEQ ID NO: 1369164 - DNA, 25 bp, Homo sapien
actttacagcccctctgaggggcat

SEQ ID NO: 1369165 - DNA, 25 bp, Homo sapien
ttctctatggatagaagctgctttt

SEQ ID NO: 1369166 - DNA, 25 bp, Homo sapien
tctatggatagaagctgcttttgac

SEQ ID NO: 1369167 - DNA, 25 bp, Homo sapien
tatggatagaagctgcttttgactg

SEQ ID NO: 1369168 - DNA, 25 bp, Homo sapien
tttcgaagaggcctagattttcttc

SEQ ID NO: 1369169 - DNA, 25 bp, Homo sapien
tcaaggatctgatgcacaagtttcg

SEQ ID NO: 1369170 - DNA, 25 bp, Homo sapien
tctgatgcacaagtttcgaagaggc

SEQ ID NO: 1369171 - DNA, 25 bp, Homo sapien
tcatgcccattgcattgttcactga

SEQ ID NO: 1369172 - DNA, 25 bp, Homo sapien
ttgaacagtttaagatttctcatta

SEQ ID NO: 1369173 - DNA, 25 bp, Homo sapien
cattgaacagtttaagatttctcat

SEQ ID NO: 1369174 - DNA, 25 bp, Homo sapien
gccacattgaacagtttaagatttc

SEQ ID NO: 1369175 - DNA, 25 bp, Homo sapien
cacattgaacagtttaagatttctc

SEQ ID NO: 1369176 - DNA, 25 bp, Homo sapien
gtggagaatctgttcatgattagct

SEQ ID NO: 1369177 - DNA, 25 bp, Homo sapien
ggagaatctgttcatgattagctgc

SEQ ID NO: 1369178 - DNA, 25 bp, Homo sapien
tggagaatctgttcatgattagctg

SEQ ID NO: 1369179 - DNA, 25 bp, Homo sapien
gcttttagcagacacatgttgctga

SEQ ID NO: 1369180 - DNA, 25 bp, Homo sapien
gttgtatcctgaaatactccaaata

SEQ ID NO: 1369181 - DNA, 25 bp, Homo sapien
cctgaaatactccaaatatgagcat

SEQ ID NO: 1369182 - DNA, 25 bp, Homo sapien
gctgaagtaataaagttgtatcctg

SEQ ID NO: 1369183 - DNA, 25 bp, Homo sapien
taacgcttctcgtgaattactgctt

SEQ ID NO: 1369184 - DNA, 25 bp, Homo sapien
tgcttttccaaaattgccatatttg

SEQ ID NO: 1369185 - DNA, 25 bp, Homo sapien
gctgccgactaaaagtgcccttgaa

SEQ ID NO: 1369186 - DNA, 25 bp, Homo sapien
tatctcctgcccattaactcttaac

SEQ ID NO: 1369187 - DNA, 25 bp, Homo sapien
cattatgagaggattcagttaaatc

SEQ ID NO: 1369188 - DNA, 25 bp, Homo sapien
ttatgagaggattcagttaaatcag

SEQ ID NO: 1369189 - DNA, 25 bp, Homo sapien
attatgagaggattcagttaaatca

SEQ ID NO: 1369190 - DNA, 25 bp, Homo sapien
gagagaagccatttgaggtgataaa

SEQ ID NO: 1369191 - DNA, 25 bp, Homo sapien
aaagtactgcaagatcaatgcatat

SEQ ID NO: 1369192 - DNA, 25 bp, Homo sapien
gtactgcaagatcaatgcatatttc

SEQ ID NO: 1369193 - DNA, 25 bp, Homo sapien
catactgacttttatttggaggaga

SEQ ID NO: 1369194 - DNA, 25 bp, Homo sapien
agaaaagtactgcaagatcaatgca

SEQ ID NO: 1369195 - DNA, 25 bp, Homo sapien
gtaggaggtgtcctgaaatggcaat

SEQ ID NO: 1369196 - DNA, 25 bp, Homo sapien
tcagatgtaggaggtgtcctgaaat

SEQ ID NO: 1369197 - DNA, 25 bp, Homo sapien
tgtaggaggtgtcctgaaatggcaa

SEQ ID NO: 1369198 - DNA, 25 bp, Homo sapien
gatgtaggaggtgtcctgaaatggc

SEQ ID NO: 1369199 - DNA, 25 bp, Homo sapien
tctggagcagacgataatatcatgg

SEQ ID NO: 1369200 - DNA, 25 bp, Homo sapien
cgtctgttggttttgggatcctccg

SEQ ID NO: 1369201 - DNA, 25 bp, Homo sapien
tgtgcccaatgcttgcttatgccct

SEQ ID NO: 1369202 - DNA, 25 bp, Homo sapien
taactgtacattcaccaactatagg

SEQ ID NO: 1369203 - DNA, 25 bp, Homo sapien
tctgagtggttcagttatgcagact

SEQ ID NO: 1369204 - DNA, 25 bp, Homo sapien
gcattgcataggtattttgttccca

SEQ ID NO: 1369205 - DNA, 25 bp, Homo sapien
cagacttctgcattgcataggtatt

SEQ ID NO: 1369206 - DNA, 25 bp, Homo sapien
tggttcagttatgcagacttctgca

SEQ ID NO: 1369207 - DNA, 25 bp, Homo sapien
aagtccagcattgccatatatttga

SEQ ID NO: 1369208 - DNA, 25 bp, Homo sapien
gttttccagaagcacgatgatcagc

SEQ ID NO: 1369209 - DNA, 25 bp, Homo sapien
tcttgtcacatgtaaaaagtaggtg

SEQ ID NO: 1369210 - DNA, 25 bp, Homo sapien
cacaaagtggtgaacagatatctca

SEQ ID NO: 1369211 - DNA, 25 bp, Homo sapien
cttctaaagctatcccgtttcactg

SEQ ID NO: 1369212 - DNA, 25 bp, Homo sapien
gctatcccgtttcactgagaatata

SEQ ID NO: 1369213 - DNA, 25 bp, Homo sapien
ccgtttcactgagaatataatacaa

SEQ ID NO: 1369214 - DNA, 25 bp, Homo sapien
taaagctatcccgtttcactgagaa

SEQ ID NO: 1369215 - DNA, 25 bp, Homo sapien
gctactgaatgtgtctcaacccaac

SEQ ID NO: 1369216 - DNA, 25 bp, Homo sapien
cactcagctactgaatgtgtctcaa

SEQ ID NO: 1369217 - DNA, 25 bp, Homo sapien
ctcttgctgtcaatcactcagctac

SEQ ID NO: 1369218 - DNA, 25 bp, Homo sapien
caatcactcagctactgaatgtgtc

SEQ ID NO: 1369219 - DNA, 25 bp, Homo sapien
tgtcccttctatgtggccactgttc

SEQ ID NO: 1369220 - DNA, 25 bp, Homo sapien
tccaggtctgcaccacaatcgacac

SEQ ID NO: 1369221 - DNA, 25 bp, Homo sapien
cttctatgtggccactgttcctctc

SEQ ID NO: 1369222 - DNA, 25 bp, Homo sapien
gtttgtcccttctatgtggccactg

SEQ ID NO: 1369223 - DNA, 25 bp, Homo sapien
tcttggtaaggccagatttgcttct

SEQ ID NO: 1369224 - DNA, 25 bp, Homo sapien
gctatggaggtatcactatcctgca

SEQ ID NO: 1369225 - DNA, 25 bp, Homo sapien
cagatttgcttctctcacaccaggg

SEQ ID NO: 1369226 - DNA, 25 bp, Homo sapien
caggataactgtgcttagagggagc

SEQ ID NO: 1369227 - DNA, 25 bp, Homo sapien
ctgtttaggttcatacccactttct

SEQ ID NO: 1369228 - DNA, 25 bp, Homo sapien
aaatgtgatcagcatcctgtttagg

SEQ ID NO: 1369229 - DNA, 25 bp, Homo sapien
ataatctctgaaaatgtgatcagca

SEQ ID NO: 1369230 - DNA, 25 bp, Homo sapien
gatcagcatcctgtttaggttcata

SEQ ID NO: 1369231 - DNA, 25 bp, Homo sapien
ttagggttcggcaactgtactagct

SEQ ID NO: 1369232 - DNA, 25 bp, Homo sapien
ggttcggcaactgtactagctatag

SEQ ID NO: 1369233 - DNA, 25 bp, Homo sapien
cggcaactgtactagctatagggat

SEQ ID NO: 1369234 - DNA, 25 bp, Homo sapien
caactgtactagctatagggatttc

SEQ ID NO: 1369235 - DNA, 25 bp, Homo sapien
tgcttctacttttcccatcaatctt

SEQ ID NO: 1369236 - DNA, 25 bp, Homo sapien
cccatcaatcttctggagaggatga

SEQ ID NO: 1369237 - DNA, 25 bp, Homo sapien
ttttcccatcaatcttctggagagg

SEQ ID NO: 1369238 - DNA, 25 bp, Homo sapien
ggatgattccagctttctgtatcca

SEQ ID NO: 1369239 - DNA, 25 bp, Homo sapien
tatgtttgctgtgaccgttgatgtt

SEQ ID NO: 1369240 - DNA, 25 bp, Homo sapien
tcctggagtatgtttgctgtgaccg

SEQ ID NO: 1369241 - DNA, 25 bp, Homo sapien
ggaaagtcctggagtatgtttgctg

SEQ ID NO: 1369242 - DNA, 25 bp, Homo sapien
tgctgtgaccgttgatgttttgcca

SEQ ID NO: 1369243 - DNA, 25 bp, Homo sapien
atttacaattaagcaacaatgaagg

SEQ ID NO: 1369244 - DNA, 25 bp, Homo sapien
tggagtgcaccacagggagacacaa

SEQ ID NO: 1369245 - DNA, 25 bp, Homo sapien
ttctgtagcacatcttcataactat

SEQ ID NO: 1369246 - DNA, 25 bp, Homo sapien
ggctatttacaattaagcaacaatg

SEQ ID NO: 1369247 - DNA, 25 bp, Homo sapien
tctatgtggtccactccacacactt

SEQ ID NO: 1369248 - DNA, 25 bp, Homo sapien
caagctgccgttttgggctgagatt

SEQ ID NO: 1369249 - DNA, 25 bp, Homo sapien
tgtgggcagttattgagagagaact

SEQ ID NO: 1369250 - DNA, 25 bp, Homo sapien
acacacttcggcttctggagtttcc

SEQ ID NO: 1369251 - DNA, 25 bp, Homo sapien
cactgtggctggtacgtcccctaat

SEQ ID NO: 1369252 - DNA, 25 bp, Homo sapien
ctggtacgtcccctaatgctgcact

SEQ ID NO: 1369253 - DNA, 25 bp, Homo sapien
tacgtcccctaatgctgcactttgg

SEQ ID NO: 1369254 - DNA, 25 bp, Homo sapien
tgtggctggtacgtcccctaatgct

SEQ ID NO: 1369255 - DNA, 25 bp, Homo sapien
cttctgactgaattttcgtttcatg

SEQ ID NO: 1369256 - DNA, 25 bp, Homo sapien
gactgaattttcgtttcatgcatgt

SEQ ID NO: 1369257 - DNA, 25 bp, Homo sapien
tgaattttcgtttcatgcatgtaca

SEQ ID NO: 1369258 - DNA, 25 bp, Homo sapien
tctgactgaattttcgtttcatgca

SEQ ID NO: 1369259 - DNA, 25 bp, Homo sapien
ctgttcacaaaggtcacatgtgcag

SEQ ID NO: 1369260 - DNA, 25 bp, Homo sapien
gtttgtctgcaaatttattcagaaa

SEQ ID NO: 1369261 - DNA, 25 bp, Homo sapien
tgcgtttgtctgcaaatttattcag

SEQ ID NO: 1369262 - DNA, 25 bp, Homo sapien
ctgcgtttgtctgcaaatttattca

SEQ ID NO: 1369263 - DNA, 25 bp, Homo sapien
gcgtttgtctgcaaatttattcaga

SEQ ID NO: 1369264 - DNA, 25 bp, Homo sapien
attgggctgatatggtccaattcta

SEQ ID NO: 1369265 - DNA, 25 bp, Homo sapien
gctgatatggtccaattctatactc

SEQ ID NO: 1369266 - DNA, 25 bp, Homo sapien
gggctgatatggtccaattctatac

SEQ ID NO: 1369267 - DNA, 25 bp, Homo sapien
tgggctgatatggtccaattctata

SEQ ID NO: 1369268 - DNA, 25 bp, Homo sapien
gattaaattcctccatcttgtccac

SEQ ID NO: 1369269 - DNA, 25 bp, Homo sapien
tgattaaattcctccatcttgtcca

SEQ ID NO: 1369270 - DNA, 25 bp, Homo sapien
ttgattaaattcctccatcttgtcc

SEQ ID NO: 1369271 - DNA, 25 bp, Homo sapien
cttgattaaattcctccatcttgtc

SEQ ID NO: 1369272 - DNA, 25 bp, Homo sapien
atttaaatgccatgcccgatttacg

SEQ ID NO: 1369273 - DNA, 25 bp, Homo sapien
aatgccatgcccgatttacgaagtt

SEQ ID NO: 1369274 - DNA, 25 bp, Homo sapien
tttaaatgccatgcccgatttacga

SEQ ID NO: 1369275 - DNA, 25 bp, Homo sapien
taaatgccatgcccgatttacgaag

SEQ ID NO: 1369276 - DNA, 25 bp, Homo sapien
tttttctttgctgctgctgaagcac

SEQ ID NO: 1369277 - DNA, 25 bp, Homo sapien
gctttttctttgctgctgctgaagc

SEQ ID NO: 1369278 - DNA, 25 bp, Homo sapien
aagctttttctttgctgctgctgaa

SEQ ID NO: 1369279 - DNA, 25 bp, Homo sapien
ctttttaagctttttctttgctgct

SEQ ID NO: 1369280 - DNA, 25 bp, Homo sapien
ttctccatcggaagccatatcacct

SEQ ID NO: 1369281 - DNA, 25 bp, Homo sapien
tctccatcggaagccatatcaccta

SEQ ID NO: 1369282 - DNA, 25 bp, Homo sapien
tccatcggaagccatatcacctaaa

SEQ ID NO: 1369283 - DNA, 25 bp, Homo sapien
tcacagtacctgaaggttccttttc

SEQ ID NO: 1369284 - DNA, 25 bp, Homo sapien
tcttcaccggacttctcttctcgtt

SEQ ID NO: 1369285 - DNA, 25 bp, Homo sapien
attcggttcctgctctgtctggtca

SEQ ID NO: 1369286 - DNA, 25 bp, Homo sapien
tatcttcggttgaactttcagtctt

SEQ ID NO: 1369287 - DNA, 25 bp, Homo sapien
ctgctctgtctggtcatcctttgtg

SEQ ID NO: 1369288 - DNA, 25 bp, Homo sapien
tttgctgtctggagtgttcttgggc

SEQ ID NO: 1369289 - DNA, 25 bp, Homo sapien
tctttgctgtctggagtgttcttgg

SEQ ID NO: 1369290 - DNA, 25 bp, Homo sapien
ctttgctgtctggagtgttcttggg

SEQ ID NO: 1369291 - DNA, 25 bp, Homo sapien
attgtgggagcttccgcgatctgct

SEQ ID NO: 1369292 - DNA, 25 bp, Homo sapien
gggattgtgggagcttccgcgatct

SEQ ID NO: 1369293 - DNA, 25 bp, Homo sapien
ggattgtgggagcttccgcgatctg

SEQ ID NO: 1369294 - DNA, 25 bp, Homo sapien
gattgtgggagcttccgcgatctgc

SEQ ID NO: 1369295 - DNA, 25 bp, Homo sapien
tccactccagtgtaaattttagcta

SEQ ID NO: 1369296 - DNA, 25 bp, Homo sapien
caatctgtcaataccttatagtcta

SEQ ID NO: 1369297 - DNA, 25 bp, Homo sapien
aatttaatgtaagagaagggtgtgc

SEQ ID NO: 1369298 - DNA, 25 bp, Homo sapien
agttcataggaatcgagagtataca

SEQ ID NO: 1369299 - DNA, 25 bp, Homo sapien
tggtttcgggtcatccaaatgatgg

SEQ ID NO: 1369300 - DNA, 25 bp, Homo sapien
cgggtcatccaaatgatgggtcaat

SEQ ID NO: 1369301 - DNA, 25 bp, Homo sapien
gacaaaatgtacaaatttgttccat

SEQ ID NO: 1369302 - DNA, 25 bp, Homo sapien
tgcatctgtggtttcgggtcatcca

SEQ ID NO: 1369303 - DNA, 25 bp, Homo sapien
gattgcatgcttaactttttaccct

SEQ ID NO: 1369304 - DNA, 25 bp, Homo sapien
caggtagagattgcatgcttaactt

SEQ ID NO: 1369305 - DNA, 25 bp, Homo sapien
gttctgcaggtagagattgcatgct

SEQ ID NO: 1369306 - DNA, 25 bp, Homo sapien
agattgcatgcttaactttttaccc

SEQ ID NO: 1369307 - DNA, 25 bp, Homo sapien
tgtggcctttttccaattcctctgg

SEQ ID NO: 1369308 - DNA, 25 bp, Homo sapien
tctgcctgtggcctttttccaattc

SEQ ID NO: 1369309 - DNA, 25 bp, Homo sapien
tttagctggagccttccttctgcct

SEQ ID NO: 1369310 - DNA, 25 bp, Homo sapien
caagtttagctggagccttccttct

SEQ ID NO: 1369311 - DNA, 25 bp, Homo sapien
ctcatctttcctcatatgttcctgc

SEQ ID NO: 1369312 - DNA, 25 bp, Homo sapien
tcatctttcctcatatgttcctgca

SEQ ID NO: 1369313 - DNA, 25 bp, Homo sapien
ctctcatctttcctcatatgttcct

SEQ ID NO: 1369314 - DNA, 25 bp, Homo sapien
catctttcctcatatgttcctgcag

SEQ ID NO: 1369315 - DNA, 25 bp, Homo sapien
caagtaatatgagactgtgggagac

SEQ ID NO: 1369316 - DNA, 25 bp, Homo sapien
tgagtctccacaagctactctctgt

SEQ ID NO: 1369317 - DNA, 25 bp, Homo sapien
cactttgccagctatgcctattaga

SEQ ID NO: 1369318 - DNA, 25 bp, Homo sapien
gcaaatgtttaatggtgagaaccaa

SEQ ID NO: 1369319 - DNA, 25 bp, Homo sapien
aaagcatgtcaaattccatgtatca

SEQ ID NO: 1369320 - DNA, 25 bp, Homo sapien
tgcagaagtttctttattttcactc

SEQ ID NO: 1369321 - DNA, 25 bp, Homo sapien
tgtggctttgcagaagtttctttat

SEQ ID NO: 1369322 - DNA, 25 bp, Homo sapien
gcagaagtttctttattttcactct

SEQ ID NO: 1369323 - DNA, 25 bp, Homo sapien
tacatgtgtggctttgcagaagttt

SEQ ID NO: 1369324 - DNA, 25 bp, Homo sapien
ctatctgaggctttgatttctacct

SEQ ID NO: 1369325 - DNA, 25 bp, Homo sapien
tatctgaggctttgatttctacctc

SEQ ID NO: 1369326 - DNA, 25 bp, Homo sapien
cctatctgaggctttgatttctacc

SEQ ID NO: 1369327 - DNA, 25 bp, Homo sapien
tgctgggtatcccattgtatgcata

SEQ ID NO: 1369328 - DNA, 25 bp, Homo sapien
tatccattcgcttcttaacatacat

SEQ ID NO: 1369329 - DNA, 25 bp, Homo sapien
agtctttggatggacatctgcttta

SEQ ID NO: 1369330 - DNA, 25 bp, Homo sapien
tgccacaatttatgtatccattcgc

SEQ ID NO: 1369331 - DNA, 25 bp, Homo sapien
taagtcctttcagcaatcctataag

SEQ ID NO: 1369332 - DNA, 25 bp, Homo sapien
gaaacagagcttagtcagggattga

SEQ ID NO: 1369333 - DNA, 25 bp, Homo sapien
ccaagaaggacaaagattggcatca

SEQ ID NO: 1369334 - DNA, 25 bp, Homo sapien
cattcaacaagtcctcagaaacaga

SEQ ID NO: 1369335 - DNA, 25 bp, Homo sapien
gacttgacctgccatatagtagata

SEQ ID NO: 1369336 - DNA, 25 bp, Homo sapien
cttgacctgccatatagtagataaa

SEQ ID NO: 1369337 - DNA, 25 bp, Homo sapien
gacttgtgaactccttaggcactga

SEQ ID NO: 1369338 - DNA, 25 bp, Homo sapien
ctctggacttgtgaactccttaggc

SEQ ID NO: 1369339 - DNA, 25 bp, Homo sapien
gttgattcccaggtgacggcaggga

SEQ ID NO: 1369340 - DNA, 25 bp, Homo sapien
tgattcccaggtgacggcagggaaa

SEQ ID NO: 1369341 - DNA, 25 bp, Homo sapien
gaaatggttgattcccaggtgacgg

SEQ ID NO: 1369342 - DNA, 25 bp, Homo sapien
atggttgattcccaggtgacggcag

SEQ ID NO: 1369343 - DNA, 25 bp, Homo sapien
aaagacggtgtgaggagctattcca

SEQ ID NO: 1369344 - DNA, 25 bp, Homo sapien
ccactctcagcctagtggcagaaag

SEQ ID NO: 1369345 - DNA, 25 bp, Homo sapien
gacttcataatgctcataaatcctg

SEQ ID NO: 1369346 - DNA, 25 bp, Homo sapien
tatttctgtatatgtggtccactct

SEQ ID NO: 1369347 - DNA, 25 bp, Homo sapien
ggatggactgaaggaccaagacaca

SEQ ID NO: 1369348 - DNA, 25 bp, Homo sapien
cacagcaagggcacaagtcagaggt

SEQ ID NO: 1369349 - DNA, 25 bp, Homo sapien
gaggtgacgagtatctcaaatgtaa

SEQ ID NO: 1369350 - DNA, 25 bp, Homo sapien
gcaccaactgtgaggccacagcaag

SEQ ID NO: 1369351 - DNA, 25 bp, Homo sapien
agggcctgattaaaaatggtgttca

SEQ ID NO: 1369352 - DNA, 25 bp, Homo sapien
caagggcctgattaaaaatggtgtt

SEQ ID NO: 1369353 - DNA, 25 bp, Homo sapien
gggcctgattaaaaatggtgttcat

SEQ ID NO: 1369354 - DNA, 25 bp, Homo sapien
caactgtatccctttcaattgcact

SEQ ID NO: 1369355 - DNA, 25 bp, Homo sapien
aactgtatccctttcaattgcacta

SEQ ID NO: 1369356 - DNA, 25 bp, Homo sapien
ccagtctgtgtagcgagggcaccag

SEQ ID NO: 1369357 - DNA, 25 bp, Homo sapien
tctgtgtagcgagggcaccagtctg

SEQ ID NO: 1369358 - DNA, 25 bp, Homo sapien
tagagaccaccagtctgtgtagcga

SEQ ID NO: 1369359 - DNA, 25 bp, Homo sapien
accaccagtctgtgtagcgagggca

SEQ ID NO: 1369360 - DNA, 25 bp, Homo sapien
cagatggcgaggggggggccctaca

SEQ ID NO: 1369361 - DNA, 25 bp, Homo sapien
tacacagatggcgaggggggggccc

SEQ ID NO: 1369362 - DNA, 25 bp, Homo sapien
ctacacagatggcgaggggggggcc

SEQ ID NO: 1369363 - DNA, 25 bp, Homo sapien
cacagatggcgaggggggggcccta

SEQ ID NO: 1369364 - DNA, 25 bp, Homo sapien
tgtgggttctgtacaggaaactgag

SEQ ID NO: 1369365 - DNA, 25 bp, Homo sapien
gggttctgtacaggaaactgagtcc

SEQ ID NO: 1369366 - DNA, 25 bp, Homo sapien
gtgaggttgtgggttctgtacagga

SEQ ID NO: 1369367 - DNA, 25 bp, Homo sapien
aagaccaggcggagggaggtgaggt

SEQ ID NO: 1369368 - DNA, 25 bp, Homo sapien
ggcttccggttcacaggttcgcatg

SEQ ID NO: 1369369 - DNA, 25 bp, Homo sapien
cccagtcgtagccatcttcatcggg

SEQ ID NO: 1369370 - DNA, 25 bp, Homo sapien
gcatcgcggactcgtgtaaactttt

SEQ ID NO: 1369371 - DNA, 25 bp, Homo sapien
gggactccgcatcgcggactcgtgt

SEQ ID NO: 1369372 - DNA, 25 bp, Homo sapien
gctagccgtctgtgtagcgctcgcc

SEQ ID NO: 1369373 - DNA, 25 bp, Homo sapien
gccgcggtgagggttgtcctccaag

SEQ ID NO: 1369374 - DNA, 25 bp, Homo sapien
ttccgtctcctccagtagtcgctgt

SEQ ID NO: 1369375 - DNA, 25 bp, Homo sapien
gctcatctgcttgcacgggctctga

SEQ ID NO: 1369376 - DNA, 25 bp, Homo sapien
tgagaacaccaacacaaatcaaagt

SEQ ID NO: 1369377 - DNA, 25 bp, Homo sapien
gagaacaccaacacaaatcaaagta

SEQ ID NO: 1369378 - DNA, 25 bp, Homo sapien
atgagaacaccaacacaaatcaaag

SEQ ID NO: 1369379 - DNA, 25 bp, Homo sapien
agaacaccaacacaaatcaaagtaa

SEQ ID NO: 1369380 - DNA, 25 bp, Homo sapien
caaaactgtccaggtatattttgca

SEQ ID NO: 1369381 - DNA, 25 bp, Homo sapien
ccaaaactgtccaggtatattttgc

SEQ ID NO: 1369382 - DNA, 25 bp, Homo sapien
ctatttgcatgaccattcattgatt

SEQ ID NO: 1369383 - DNA, 25 bp, Homo sapien
aacctatttgcatgaccattcattg

SEQ ID NO: 1369384 - DNA, 25 bp, Homo sapien
cagtccaggtttaaatcttctctag

SEQ ID NO: 1369385 - DNA, 25 bp, Homo sapien
tgttatctaacctgtgatggcccat

SEQ ID NO: 1369386 - DNA, 25 bp, Homo sapien
tctttatgttaacatagcctaagtc

SEQ ID NO: 1369387 - DNA, 25 bp, Homo sapien
tctctagtagatttatgtgtgtgac

SEQ ID NO: 1369388 - DNA, 25 bp, Homo sapien
tgcttctctctcaccatctgcttca

SEQ ID NO: 1369389 - DNA, 25 bp, Homo sapien
tttgcttctctctcaccatctgctt

SEQ ID NO: 1369390 - DNA, 25 bp, Homo sapien
gcttctctctcaccatctgcttcat

SEQ ID NO: 1369391 - DNA, 25 bp, Homo sapien
ttctctctcaccatctgcttcattc

SEQ ID NO: 1369392 - DNA, 25 bp, Homo sapien
tctgtttttaaaattatatgatgac

SEQ ID NO: 1369393 - DNA, 25 bp, Homo sapien
tctctgtttttaaaattatatgatg

SEQ ID NO: 1369394 - DNA, 25 bp, Homo sapien
tgtttttaaaattatatgatgacat

SEQ ID NO: 1369395 - DNA, 25 bp, Homo sapien
ctttctctgtttttaaaattatatg

SEQ ID NO: 1369396 - DNA, 25 bp, Homo sapien
ttaaatgccagttgtgctcttgagg

SEQ ID NO: 1369397 - DNA, 25 bp, Homo sapien
aatgccagttgtgctcttgaggatg

SEQ ID NO: 1369398 - DNA, 25 bp, Homo sapien
ccagttgtgctcttgaggatgaatc

SEQ ID NO: 1369399 - DNA, 25 bp, Homo sapien
ttgtgctcttgaggatgaatctcag

SEQ ID NO: 1369400 - DNA, 25 bp, Homo sapien
tcaaaattttacagcaactacaatt

SEQ ID NO: 1369401 - DNA, 25 bp, Homo sapien
caaaattttacagcaactacaattc

SEQ ID NO: 1369402 - DNA, 25 bp, Homo sapien
tctcctgggaaatcaccgaatgcaa

SEQ ID NO: 1369403 - DNA, 25 bp, Homo sapien
tgctagcagccaaagtccttcagta

SEQ ID NO: 1369404 - DNA, 25 bp, Homo sapien
gtccttcagtagattggtgtttgtc

SEQ ID NO: 1369405 - DNA, 25 bp, Homo sapien
aatgcaactgccctcatcaatgttc

SEQ ID NO: 1369406 - DNA, 25 bp, Homo sapien
cagtgacttgataaccaatatgaag

SEQ ID NO: 1369407 - DNA, 25 bp, Homo sapien
gatagaatggtttcagtttcctgca

SEQ ID NO: 1369408 - DNA, 25 bp, Homo sapien
gaatttggctgggtctatcagtgac

SEQ ID NO: 1369409 - DNA, 25 bp, Homo sapien
tacttaaccctctccattaagatgg

SEQ ID NO: 1369410 - DNA, 25 bp, Homo sapien
catataatagtgacgagctcaggat

SEQ ID NO: 1369411 - DNA, 25 bp, Homo sapien
gattgttgagtagagggccatcatc

SEQ ID NO: 1369412 - DNA, 25 bp, Homo sapien
ttcctgatcctatatgtgtaaccag

SEQ ID NO: 1369413 - DNA, 25 bp, Homo sapien
tgtaaccagtgatggctcatatgct

SEQ ID NO: 1369414 - DNA, 25 bp, Homo sapien
taaatgtacgtgatacatttccttc

SEQ ID NO: 1369415 - DNA, 25 bp, Homo sapien
ccttcagtaaatgtacgtgatacat

SEQ ID NO: 1369416 - DNA, 25 bp, Homo sapien
gtacgtgatacatttccttcaccat

SEQ ID NO: 1369417 - DNA, 25 bp, Homo sapien
cagtaaatgtacgtgatacatttcc

SEQ ID NO: 1369418 - DNA, 25 bp, Homo sapien
gggtagacacaaagtgtaacagtca

SEQ ID NO: 1369419 - DNA, 25 bp, Homo sapien
catggtaaccatctcaactccagga

SEQ ID NO: 1369420 - DNA, 25 bp, Homo sapien
aggaattccagacaacatctcttct

SEQ ID NO: 1369421 - DNA, 25 bp, Homo sapien
cttcttccttagttatggatacagc

SEQ ID NO: 1369422 - DNA, 25 bp, Homo sapien
tctgttgagcacaagcagccttatt

SEQ ID NO: 1369423 - DNA, 25 bp, Homo sapien
ctctgttgagcacaagcagccttat

SEQ ID NO: 1369424 - DNA, 25 bp, Homo sapien
caagcagccttatttcactttggta

SEQ ID NO: 1369425 - DNA, 25 bp, Homo sapien
cagccttatttcactttggtatgtg

SEQ ID NO: 1369426 - DNA, 25 bp, Homo sapien
aatgtgctggtgatgcctctcttct

SEQ ID NO: 1369427 - DNA, 25 bp, Homo sapien
gcagttttcaatgtgctggtgatgc

SEQ ID NO: 1369428 - DNA, 25 bp, Homo sapien
tctcttcttgcacataggatggctc

SEQ ID NO: 1369429 - DNA, 25 bp, Homo sapien
cttcttgcacataggatggctccat

SEQ ID NO: 1369430 - DNA, 25 bp, Homo sapien
gctgcttcttctgtaggaccttgaa

SEQ ID NO: 1369431 - DNA, 25 bp, Homo sapien
cctgaaatacagcatgctttctgct

SEQ ID NO: 1369432 - DNA, 25 bp, Homo sapien
tgtctctttcagggttaacatctcc

SEQ ID NO: 1369433 - DNA, 25 bp, Homo sapien
tttgcatcatcaagggaatatgcat

SEQ ID NO: 1369434 - DNA, 25 bp, Homo sapien
aaatgctggaggctagctacatcat

SEQ ID NO: 1369435 - DNA, 25 bp, Homo sapien
gcaagtccaagcagacacgaatgga

SEQ ID NO: 1369436 - DNA, 25 bp, Homo sapien
cacgaatggatgctctcataaacaa

SEQ ID NO: 1369437 - DNA, 25 bp, Homo sapien
tctagacaaggcacattaaaagatg

SEQ ID NO: 1369438 - DNA, 25 bp, Homo sapien
ggcagtaatgccgaaataccctgat

SEQ ID NO: 1369439 - DNA, 25 bp, Homo sapien
taatgccgaaataccctgatggaat

SEQ ID NO: 1369440 - DNA, 25 bp, Homo sapien
aaagtaagtgagtggcagtaatgcc

SEQ ID NO: 1369441 - DNA, 25 bp, Homo sapien
taccctgatggaattaagccttcca

SEQ ID NO: 1369442 - DNA, 25 bp, Homo sapien
tgacagttcaatacttcctcatctt

SEQ ID NO: 1369443 - DNA, 25 bp, Homo sapien
gcagtccccgtttgacagttcaata

SEQ ID NO: 1369444 - DNA, 25 bp, Homo sapien
tgtgcagtccccgtttgacagttca

SEQ ID NO: 1369445 - DNA, 25 bp, Homo sapien
cagtccccgtttgacagttcaatac

SEQ ID NO: 1369446 - DNA, 25 bp, Homo sapien
ctagtaagacgttatgttctttatt

SEQ ID NO: 1369447 - DNA, 25 bp, Homo sapien
tttatttcatcatcgtagttgaatt

SEQ ID NO: 1369448 - DNA, 25 bp, Homo sapien
gtaagacgttatgttctttatttca

SEQ ID NO: 1369449 - DNA, 25 bp, Homo sapien
tttcatcatcgtagttgaatttaaa

SEQ ID NO: 1369450 - DNA, 25 bp, Homo sapien
gaatcctctttacaagggtatttga

SEQ ID NO: 1369451 - DNA, 25 bp, Homo sapien
cttcatgggaatcctctttacaagg

SEQ ID NO: 1369452 - DNA, 25 bp, Homo sapien
tcatgggaatcctctttacaagggt

SEQ ID NO: 1369453 - DNA, 25 bp, Homo sapien
atgggaatcctctttacaagggtat

SEQ ID NO: 1369454 - DNA, 25 bp, Homo sapien
gctcctgaaatcctgcccttatctg

SEQ ID NO: 1369455 - DNA, 25 bp, Homo sapien
tcctgaaatcctgcccttatctgga

SEQ ID NO: 1369456 - DNA, 25 bp, Homo sapien
tgggctcctgaaatcctgcccttat

SEQ ID NO: 1369457 - DNA, 25 bp, Homo sapien
ggctcctgaaatcctgcccttatct

SEQ ID NO: 1369458 - DNA, 25 bp, Homo sapien
ggagacctgtccagtattagtgtta

SEQ ID NO: 1369459 - DNA, 25 bp, Homo sapien
gaaacagtccttttgacaggcaaaa

SEQ ID NO: 1369460 - DNA, 25 bp, Homo sapien
gcatttgctgacaccgggtggctta

SEQ ID NO: 1369461 - DNA, 25 bp, Homo sapien
cagtattagtgttagggctcttttc

SEQ ID NO: 1369462 - DNA, 25 bp, Homo sapien
tttggtagcacgctgagggccttgc

SEQ ID NO: 1369463 - DNA, 25 bp, Homo sapien
gggattttggtagcacgctgagggc

SEQ ID NO: 1369464 - DNA, 25 bp, Homo sapien
attttggtagcacgctgagggcctt

SEQ ID NO: 1369465 - DNA, 25 bp, Homo sapien
gattttggtagcacgctgagggcct

SEQ ID NO: 1369466 - DNA, 25 bp, Homo sapien
agaaaacacagacacgtcgaaatgc

SEQ ID NO: 1369467 - DNA, 25 bp, Homo sapien
aaacacagacacgtcgaaatgccat

SEQ ID NO: 1369468 - DNA, 25 bp, Homo sapien
aaaggtcacatctgccagccatacc

SEQ ID NO: 1369469 - DNA, 25 bp, Homo sapien
tagaacacggaagggcctctcagtt

SEQ ID NO: 1369470 - DNA, 25 bp, Homo sapien
ctccaggtagaacacggaagggcct

SEQ ID NO: 1369471 - DNA, 25 bp, Homo sapien
aggtagaacacggaagggcctctca

SEQ ID NO: 1369472 - DNA, 25 bp, Homo sapien
tgttgcccatggaaacaaagtcttc

SEQ ID NO: 1369473 - DNA, 25 bp, Homo sapien
ggcagtgtataatttcatcagctct

SEQ ID NO: 1369474 - DNA, 25 bp, Homo sapien
tgccattgcagctttgttgcccatg

SEQ ID NO: 1369475 - DNA, 25 bp, Homo sapien
tgagtgcttcagaatcagtgtgcca

SEQ ID NO: 1369476 - DNA, 25 bp, Homo sapien
tgtgaggcagacaagatatgtgatt

SEQ ID NO: 1369477 - DNA, 25 bp, Homo sapien
cacattccatggcatagaatggggg

SEQ ID NO: 1369478 - DNA, 25 bp, Homo sapien
ctatttccacacgtcttgatgctgt

SEQ ID NO: 1369479 - DNA, 25 bp, Homo sapien
tttccacacgtcttgatgctgtcct

SEQ ID NO: 1369480 - DNA, 25 bp, Homo sapien
ttaagcaaacgtggcatatgcacac

SEQ ID NO: 1369481 - DNA, 25 bp, Homo sapien
tttaagcaaacgtggcatatgcaca

SEQ ID NO: 1369482 - DNA, 25 bp, Homo sapien
catgtgaaatacaagtggtatcccc

SEQ ID NO: 1369483 - DNA, 25 bp, Homo sapien
gcagtagttgcataccctgaaatac

SEQ ID NO: 1369484 - DNA, 25 bp, Homo sapien
tctactcgtgtggtagtcagggcag

SEQ ID NO: 1369485 - DNA, 25 bp, Homo sapien
tgaacgagaagtcaacgcagcaact

SEQ ID NO: 1369486 - DNA, 25 bp, Homo sapien
aataaaattccaagactgactgcat

SEQ ID NO: 1369487 - DNA, 25 bp, Homo sapien
tcctcctaggcaagaggccattggt

SEQ ID NO: 1369488 - DNA, 25 bp, Homo sapien
tatataatattaaccatgagagtgc

SEQ ID NO: 1369489 - DNA, 25 bp, Homo sapien
ggccattggtgggacagtcagacta

SEQ ID NO: 1369490 - DNA, 25 bp, Homo sapien
cagaaggtaatccagggctcagcag

SEQ ID NO: 1369491 - DNA, 25 bp, Homo sapien
gcatgtgccctgatcttgtcctcca

SEQ ID NO: 1369492 - DNA, 25 bp, Homo sapien
cagcctaatgcccttgttctgcagg

SEQ ID NO: 1369493 - DNA, 25 bp, Homo sapien
taatcttactatggtctgcactcag

SEQ ID NO: 1369494 - DNA, 25 bp, Homo sapien
ttcattgtggagaagtgcagatccc

SEQ ID NO: 1369495 - DNA, 25 bp, Homo sapien
aggttaatgctggatggctttgcag

SEQ ID NO: 1369496 - DNA, 25 bp, Homo sapien
gaagtgcagatcccctcagtcttta

SEQ ID NO: 1369497 - DNA, 25 bp, Homo sapien
gttaatgctggatggctttgcagtg

SEQ ID NO: 1369498 - DNA, 25 bp, Homo sapien
ttaagacatatagagtttaacctat

SEQ ID NO: 1369499 - DNA, 25 bp, Homo sapien
gacatatagagtttaacctataaat

SEQ ID NO: 1369500 - DNA, 25 bp, Homo sapien
gttatgtaataatttcactaacatc

SEQ ID NO: 1369501 - DNA, 25 bp, Homo sapien
aagttatgtaataatttcactaaca

SEQ ID NO: 1369502 - DNA, 25 bp, Homo sapien
taatggtgaatactgctcctattga

SEQ ID NO: 1369503 - DNA, 25 bp, Homo sapien
tagctagtacgatgccgtttaaact

SEQ ID NO: 1369504 - DNA, 25 bp, Homo sapien
tataatggtgaatactgctcctatt

SEQ ID NO: 1369505 - DNA, 25 bp, Homo sapien
tgagttagctagtacgatgccgttt

SEQ ID NO: 1369506 - DNA, 25 bp, Homo sapien
aagatgatcagatccagaggctcct

SEQ ID NO: 1369507 - DNA, 25 bp, Homo sapien
tcgaaagtgagagacttgctgtgct

SEQ ID NO: 1369508 - DNA, 25 bp, Homo sapien
tattcttgacatccaatctatcgaa

SEQ ID NO: 1369509 - DNA, 25 bp, Homo sapien
tccaatctatcgaaagtgagagact

SEQ ID NO: 1369510 - DNA, 25 bp, Homo sapien
tttccattcacgtgctgccaggttg

SEQ ID NO: 1369511 - DNA, 25 bp, Homo sapien
aatagaccctctttgtggttgacca

SEQ ID NO: 1369512 - DNA, 25 bp, Homo sapien
cagttctcgtatctgtgtccatgcc

SEQ ID NO: 1369513 - DNA, 25 bp, Homo sapien
caccagcaaagggacccgctaaatt

SEQ ID NO: 1369514 - DNA, 25 bp, Homo sapien
cgctaaattacaaaatagaccctct

SEQ ID NO: 1369515 - DNA, 25 bp, Homo sapien
tggcctgagactcataacgcagttg

SEQ ID NO: 1369516 - DNA, 25 bp, Homo sapien
caactgttctactgtatgggatgct

SEQ ID NO: 1369517 - DNA, 25 bp, Homo sapien
aacgcagttgcccaaggatttcttg

SEQ ID NO: 1369518 - DNA, 25 bp, Homo sapien
cacaaatattaggtgtgggcctgtt

SEQ ID NO: 1369519 - DNA, 25 bp, Homo sapien
cccttgtcttgtcgagttgattaac

SEQ ID NO: 1369520 - DNA, 25 bp, Homo sapien
tgattaacttttcaaacgcatgtgc

SEQ ID NO: 1369521 - DNA, 25 bp, Homo sapien
cctcttctctactgcgcatttgact

SEQ ID NO: 1369522 - DNA, 25 bp, Homo sapien
tctactgcgcatttgacttttaacc

SEQ ID NO: 1369523 - DNA, 25 bp, Homo sapien
agccacatcagcacataccggaagg

SEQ ID NO: 1369524 - DNA, 25 bp, Homo sapien
ttagaatccttgctcaaaggacaga

SEQ ID NO: 1369525 - DNA, 25 bp, Homo sapien
gccacatcagcacataccggaagga

SEQ ID NO: 1369526 - DNA, 25 bp, Homo sapien
cataccggaaggaacactgtcaact

SEQ ID NO: 1369527 - DNA, 25 bp, Homo sapien
ttatcgtagcaagtactgacaccat

SEQ ID NO: 1369528 - DNA, 25 bp, Homo sapien
ctttaattatcgtagcaagtactga

SEQ ID NO: 1369529 - DNA, 25 bp, Homo sapien
aattatcgtagcaagtactgacacc

SEQ ID NO: 1369530 - DNA, 25 bp, Homo sapien
ttaattatcgtagcaagtactgaca

SEQ ID NO: 1369531 - DNA, 25 bp, Homo sapien
ttagcaggctgatattctgaggctg

SEQ ID NO: 1369532 - DNA, 25 bp, Homo sapien
tgactgttagcaggctgatattctg

SEQ ID NO: 1369533 - DNA, 25 bp, Homo sapien
tgttagcaggctgatattctgaggc

SEQ ID NO: 1369534 - DNA, 25 bp, Homo sapien
cactgactgttagcaggctgatatt

SEQ ID NO: 1369535 - DNA, 25 bp, Homo sapien
gtggatccagctgccataacagttt

SEQ ID NO: 1369536 - DNA, 25 bp, Homo sapien
tgtggatccagctgccataacagtt

SEQ ID NO: 1369537 - DNA, 25 bp, Homo sapien
tggatccagctgccataacagtttc

SEQ ID NO: 1369538 - DNA, 25 bp, Homo sapien
ctgtgagaagcaaaaggaacctcat

SEQ ID NO: 1369539 - DNA, 25 bp, Homo sapien
tcttacagtgaatcccatcatactg

SEQ ID NO: 1369540 - DNA, 25 bp, Homo sapien
ttccgtagacaaatttcttacagtg

SEQ ID NO: 1369541 - DNA, 25 bp, Homo sapien
caaccaagttgtgccatcttctgcc

SEQ ID NO: 1369542 - DNA, 25 bp, Homo sapien
aattcatacaaccaagttgtgccat

SEQ ID NO: 1369543 - DNA, 25 bp, Homo sapien
tgggttcacttaggctcagctcagt

SEQ ID NO: 1369544 - DNA, 25 bp, Homo sapien
tacatgagaaccgtggcctgctatg

SEQ ID NO: 1369545 - DNA, 25 bp, Homo sapien
tcgtaacaaccccaatatctcggtg

SEQ ID NO: 1369546 - DNA, 25 bp, Homo sapien
ggtgacagaggcaaactatgcagct

SEQ ID NO: 1369547 - DNA, 25 bp, Homo sapien
tctcctgacctggtgttcccccctc

SEQ ID NO: 1369548 - DNA, 25 bp, Homo sapien
ctgacctggtgttcccccctcctcg

SEQ ID NO: 1369549 - DNA, 25 bp, Homo sapien
gaagagtagaggcacgcaaagcaaa

SEQ ID NO: 1369550 - DNA, 25 bp, Homo sapien
tggtgttcaaatgtccacagtccaa

SEQ ID NO: 1369551 - DNA, 25 bp, Homo sapien
gaacctcagtatacttgggagcaac

SEQ ID NO: 1369552 - DNA, 25 bp, Homo sapien
ggtccagattccagcacaatgcact

SEQ ID NO: 1369553 - DNA, 25 bp, Homo sapien
tagtggtcatactggaatcagaacc

SEQ ID NO: 1369554 - DNA, 25 bp, Homo sapien
gagtgtcaatattgcccggacaaga

SEQ ID NO: 1369555 - DNA, 25 bp, Homo sapien
aacgagtttgcttgtatcacatggc

SEQ ID NO: 1369556 - DNA, 25 bp, Homo sapien
tagaatacacctagcaacgagtttg

SEQ ID NO: 1369557 - DNA, 25 bp, Homo sapien
cgggcaccggcattctgagcatctt

SEQ ID NO: 1369558 - DNA, 25 bp, Homo sapien
gaacgggaccagctgtactacgagt

SEQ ID NO: 1369559 - DNA, 25 bp, Homo sapien
tatccttcggaactgggcagcactg

SEQ ID NO: 1369560 - DNA, 25 bp, Homo sapien
tttcggtccacgaggagatgatcgc

SEQ ID NO: 1369561 - DNA, 25 bp, Homo sapien
tattagttcttaagtgttacagccc

SEQ ID NO: 1369562 - DNA, 25 bp, Homo sapien
tctgtatgctaagaaaataggtgtg

SEQ ID NO: 1369563 - DNA, 25 bp, Homo sapien
gccccttcagaatataacttcagga

SEQ ID NO: 1369564 - DNA, 25 bp, Homo sapien
aactggtgttctgaaatagcctaac

SEQ ID NO: 1369565 - DNA, 25 bp, Homo sapien
gatgtatcaacatccaggcactgtc

SEQ ID NO: 1369566 - DNA, 25 bp, Homo sapien
ttggtgccattggaccacaggcagg

SEQ ID NO: 1369567 - DNA, 25 bp, Homo sapien
tatggactggtactgactgcttggt

SEQ ID NO: 1369568 - DNA, 25 bp, Homo sapien
tcaagacctctggagtgaggacacc

SEQ ID NO: 1369569 - DNA, 25 bp, Homo sapien
aatagtagcaaaggtagatgaactc

SEQ ID NO: 1369570 - DNA, 25 bp, Homo sapien
agatgaactcacaggtgcttggtgc

SEQ ID NO: 1369571 - DNA, 25 bp, Homo sapien
aaaactgactcctcaaaatagtagc

SEQ ID NO: 1369572 - DNA, 25 bp, Homo sapien
gatgaactcacaggtgcttggtgct

SEQ ID NO: 1369573 - DNA, 25 bp, Homo sapien
tatcgatgggtaactgatgtgatct

SEQ ID NO: 1369574 - DNA, 25 bp, Homo sapien
tcacattgttcatatcgatgggtaa

SEQ ID NO: 1369575 - DNA, 25 bp, Homo sapien
tgttcatatcgatgggtaactgatg

SEQ ID NO: 1369576 - DNA, 25 bp, Homo sapien
ctctgagatatgtccccattatttc

SEQ ID NO: 1369577 - DNA, 25 bp, Homo sapien
ttggggacaatagctgtttttccac

SEQ ID NO: 1369578 - DNA, 25 bp, Homo sapien
ctgcattcaaaaggtagtttgatag

SEQ ID NO: 1369579 - DNA, 25 bp, Homo sapien
caaaaggtagtttgatagagggcat

SEQ ID NO: 1369580 - DNA, 25 bp, Homo sapien
atagagggcattggggacaatagct

SEQ ID NO: 1369581 - DNA, 25 bp, Homo sapien
tcttgtgaatcaagtttctgattgc

SEQ ID NO: 1369582 - DNA, 25 bp, Homo sapien
actggacttagggatactggccctg

SEQ ID NO: 1369583 - DNA, 25 bp, Homo sapien
ttgactatctccatctcagtgtggc

SEQ ID NO: 1369584 - DNA, 25 bp, Homo sapien
gtgtggctaccgctgactggagata

SEQ ID NO: 1369585 - DNA, 25 bp, Homo sapien
ctttggtgaacaccagccttttcat

SEQ ID NO: 1369586 - DNA, 25 bp, Homo sapien
caggacttccataagccagtatgta

SEQ ID NO: 1369587 - DNA, 25 bp, Homo sapien
tcaggacttccataagccagtatgt

SEQ ID NO: 1369588 - DNA, 25 bp, Homo sapien
aggacttccataagccagtatgtac

SEQ ID NO: 1369589 - DNA, 25 bp, Homo sapien
ctctttgtatccatctgaacatgtc

SEQ ID NO: 1369590 - DNA, 25 bp, Homo sapien
tgaacatgtctgaatgcctgggccc

SEQ ID NO: 1369591 - DNA, 25 bp, Homo sapien
tctgaacatgtctgaatgcctgggc

SEQ ID NO: 1369592 - DNA, 25 bp, Homo sapien
tctttgtatccatctgaacatgtct

SEQ ID NO: 1369593 - DNA, 25 bp, Homo sapien
gaagtcatgctgtagtatttgtgcc

SEQ ID NO: 1369594 - DNA, 25 bp, Homo sapien
atttgtgcccttgcgcaaagtacac

SEQ ID NO: 1369595 - DNA, 25 bp, Homo sapien
tcatgctgtagtatttgtgcccttg

SEQ ID NO: 1369596 - DNA, 25 bp, Homo sapien
tcaagttagcccagaagtcatgctg

SEQ ID NO: 1369597 - DNA, 25 bp, Homo sapien
ttcacaatgtgcacgacaccggtgg

SEQ ID NO: 1369598 - DNA, 25 bp, Homo sapien
gggctgattaattgcaaaatttgga

SEQ ID NO: 1369599 - DNA, 25 bp, Homo sapien
ccggtggaagcctcatgtgcataaa

SEQ ID NO: 1369600 - DNA, 25 bp, Homo sapien
gagttgagtcatttgtccttgccag

SEQ ID NO: 1369601 - DNA, 25 bp, Homo sapien
ccagaagcgtcgtgggccatgtata

SEQ ID NO: 1369602 - DNA, 25 bp, Homo sapien
taagtgaaacgtacatgccacccct

SEQ ID NO: 1369603 - DNA, 25 bp, Homo sapien
ccttccacttgctggcagttgcaga

SEQ ID NO: 1369604 - DNA, 25 bp, Homo sapien
gcgcacaggtctcgaggtagtataa

SEQ ID NO: 1369605 - DNA, 25 bp, Homo sapien
gccatcagtgctatgtgcagtgaca

SEQ ID NO: 1369606 - DNA, 25 bp, Homo sapien
ccgggcgaaattggtattagaggat

SEQ ID NO: 1369607 - DNA, 25 bp, Homo sapien
tctgacttgagtggaggaatgcgcg

SEQ ID NO: 1369608 - DNA, 25 bp, Homo sapien
tgggtgcgtcgcgtctcactgccat

SEQ ID NO: 1369609 - DNA, 25 bp, Homo sapien
tttatgccccttctgactaagctca

SEQ ID NO: 1369610 - DNA, 25 bp, Homo sapien
gatttatgccccttctgactaagct

SEQ ID NO: 1369611 - DNA, 25 bp, Homo sapien
tatgccccttctgactaagctcaac

SEQ ID NO: 1369612 - DNA, 25 bp, Homo sapien
tgatttatgccccttctgactaagc

SEQ ID NO: 1369613 - DNA, 25 bp, Homo sapien
aaataaaatgaaagcggtgccaagc

SEQ ID NO: 1369614 - DNA, 25 bp, Homo sapien
aaagcggtgccaagcggcatagaac

SEQ ID NO: 1369615 - DNA, 25 bp, Homo sapien
ggtgccaagcggcatagaaccgcct

SEQ ID NO: 1369616 - DNA, 25 bp, Homo sapien
aagcggcatagaaccgcctggccgc

SEQ ID NO: 1369617 - DNA, 25 bp, Homo sapien
ctgatccccgggaaccagaaaatcg

SEQ ID NO: 1369618 - DNA, 25 bp, Homo sapien
tccagtgagtagacggtcctcctct

SEQ ID NO: 1369619 - DNA, 25 bp, Homo sapien
gctcctatagttgcatcaggtacag

SEQ ID NO: 1369620 - DNA, 25 bp, Homo sapien
ttggaaaagtcgcaggttgagctcc

SEQ ID NO: 1369621 - DNA, 25 bp, Homo sapien
caggtacagatttccagtgagtaga

SEQ ID NO: 1369622 - DNA, 25 bp, Homo sapien
tcttgtcaagaatgtctgttgcaca

SEQ ID NO: 1369623 - DNA, 25 bp, Homo sapien
gtcaagaatgtctgttgcacagtcc

SEQ ID NO: 1369624 - DNA, 25 bp, Homo sapien
attcaaatatcttgcactcttctgc

SEQ ID NO: 1369625 - DNA, 25 bp, Homo sapien
ttaagctataattggctgcctcttg

SEQ ID NO: 1369626 - DNA, 25 bp, Homo sapien
tcatgaggccatatctgcacagtga

SEQ ID NO: 1369627 - DNA, 25 bp, Homo sapien
tccagctgccgacattatcatgagg

SEQ ID NO: 1369628 - DNA, 25 bp, Homo sapien
gttgatgtccattgagaagtccagc

SEQ ID NO: 1369629 - DNA, 25 bp, Homo sapien
gacaatttctaagcgtggtctggaa

SEQ ID NO: 1369630 - DNA, 25 bp, Homo sapien
cagccagtggtctgccattgtgtgt

SEQ ID NO: 1369631 - DNA, 25 bp, Homo sapien
cagacagcactggaaggacttttat

SEQ ID NO: 1369632 - DNA, 25 bp, Homo sapien
gctctgagttttgcacttagattcc

SEQ ID NO: 1369633 - DNA, 25 bp, Homo sapien
tggatgactcaaagacactgggttc

SEQ ID NO: 1369634 - DNA, 25 bp, Homo sapien
gctttgcctgaaaaactatatgcca

SEQ ID NO: 1369635 - DNA, 25 bp, Homo sapien
ctatatgccaaacccggaatccttc

SEQ ID NO: 1369636 - DNA, 25 bp, Homo sapien
gtatgatccacaacacttcgctttg

SEQ ID NO: 1369637 - DNA, 25 bp, Homo sapien
ggattgggcctaaatttctttgaca

SEQ ID NO: 1369638 - DNA, 25 bp, Homo sapien
tagggggttgccctttctgcataaa

SEQ ID NO: 1369639 - DNA, 25 bp, Homo sapien
cagatcacatacattggtgtgaggg

SEQ ID NO: 1369640 - DNA, 25 bp, Homo sapien
tccaaacagatcacatacattggtg

SEQ ID NO: 1369641 - DNA, 25 bp, Homo sapien
cacagtaattggtttcctagcagga

SEQ ID NO: 1369642 - DNA, 25 bp, Homo sapien
taaatatcgctacaacaatgtggtg

SEQ ID NO: 1369643 - DNA, 25 bp, Homo sapien
ggtgagaaacactgagaccagatac

SEQ ID NO: 1369644 - DNA, 25 bp, Homo sapien
tgcaaaaggacaacgaagagttaac

SEQ ID NO: 1369645 - DNA, 25 bp, Homo sapien
gtcggcaaggacacatatgatgcag

SEQ ID NO: 1369646 - DNA, 25 bp, Homo sapien
ctgctgtttctccaacttcggtcat

SEQ ID NO: 1369647 - DNA, 25 bp, Homo sapien
tccggatataatttcaagttctgcc

SEQ ID NO: 1369648 - DNA, 25 bp, Homo sapien
agttctgcctacttgctgctgtttc

SEQ ID NO: 1369649 - DNA, 25 bp, Homo sapien
ttctcatagtcttccggatataatt

SEQ ID NO: 1369650 - DNA, 25 bp, Homo sapien
gatctctcaccagattaaaaaggga

SEQ ID NO: 1369651 - DNA, 25 bp, Homo sapien
gtatccatgaagtcccattagcaca

SEQ ID NO: 1369652 - DNA, 25 bp, Homo sapien
gggaataagcccatcagctgacaga

SEQ ID NO: 1369653 - DNA, 25 bp, Homo sapien
cattagcacattgcagcatgaggac

SEQ ID NO: 1369654 - DNA, 25 bp, Homo sapien
cctggaagaaccaatctggaattgt

SEQ ID NO: 1369655 - DNA, 25 bp, Homo sapien
aattgtgtcagattgaagggttatc

SEQ ID NO: 1369656 - DNA, 25 bp, Homo sapien
gaattgtgtcagattgaagggttat

SEQ ID NO: 1369657 - DNA, 25 bp, Homo sapien
aagaaccaatctggaattgtgtcag

SEQ ID NO: 1369658 - DNA, 25 bp, Homo sapien
tgaactgcccgaaaatgtttgccca

SEQ ID NO: 1369659 - DNA, 25 bp, Homo sapien
aagatctgattgaggatgtaaaacc

SEQ ID NO: 1369660 - DNA, 25 bp, Homo sapien
aaaccctaaatcaaagctcacgttg

SEQ ID NO: 1369661 - DNA, 25 bp, Homo sapien
ctttccttgaaatgaactgcccgaa

SEQ ID NO: 1369662 - DNA, 25 bp, Homo sapien
ccaagacattatatccatctcctag

SEQ ID NO: 1369663 - DNA, 25 bp, Homo sapien
caaaatccaagacattatatccatc

SEQ ID NO: 1369664 - DNA, 25 bp, Homo sapien
atcaaaatccaagacattatatcca

SEQ ID NO: 1369665 - DNA, 25 bp, Homo sapien
aatccaagacattatatccatctcc

SEQ ID NO: 1369666 - DNA, 25 bp, Homo sapien
tactgcttggtgcagcaactgagca

SEQ ID NO: 1369667 - DNA, 25 bp, Homo sapien
tgacttcctgaaatgatggtgctgt

SEQ ID NO: 1369668 - DNA, 25 bp, Homo sapien
tctgtatgcttcagtaatgggcgaa

SEQ ID NO: 1369669 - DNA, 25 bp, Homo sapien
caggcttgtgtgaagtaactggctc

SEQ ID NO: 1369670 - DNA, 25 bp, Homo sapien
gcagttttcaggctgtgacatggac

SEQ ID NO: 1369671 - DNA, 25 bp, Homo sapien
aatagttcccttagtttcctgcata

SEQ ID NO: 1369672 - DNA, 25 bp, Homo sapien
ttttgtctagcccatgtcatgctgg

SEQ ID NO: 1369673 - DNA, 25 bp, Homo sapien
gacatggaccttctactcttttgga

SEQ ID NO: 1369674 - DNA, 25 bp, Homo sapien
actgtggcacggtctggactgtgca

SEQ ID NO: 1369675 - DNA, 25 bp, Homo sapien
agtgtggcgcgaacagcaggacctt

SEQ ID NO: 1369676 - DNA, 25 bp, Homo sapien
ttctgaatgaggtgaagagtgtggc

SEQ ID NO: 1369677 - DNA, 25 bp, Homo sapien
ccttgactgtggcacggtctggact

SEQ ID NO: 1369678 - DNA, 25 bp, Homo sapien
cactgcagtttacgtaagtgtaagt

SEQ ID NO: 1369679 - DNA, 25 bp, Homo sapien
tgcagtttacgtaagtgtaagtatt

SEQ ID NO: 1369680 - DNA, 25 bp, Homo sapien
ctgcagtttacgtaagtgtaagtat

SEQ ID NO: 1369681 - DNA, 25 bp, Homo sapien
actgcagtttacgtaagtgtaagta

SEQ ID NO: 1369682 - DNA, 25 bp, Homo sapien
cagagagaaccttgctccagtagtt

SEQ ID NO: 1369683 - DNA, 25 bp, Homo sapien
cagataatgccgcatttgcaggcag

SEQ ID NO: 1369684 - DNA, 25 bp, Homo sapien
gttcaggcagataatgccgcatttg

SEQ ID NO: 1369685 - DNA, 25 bp, Homo sapien
agagagaaccttgctccagtagttc

SEQ ID NO: 1369686 - DNA, 25 bp, Homo sapien
gatttttgccaatacaaactctaaa

SEQ ID NO: 1369687 - DNA, 25 bp, Homo sapien
ttcacactcaccacagaaacaaaat

SEQ ID NO: 1369688 - DNA, 25 bp, Homo sapien
cactctgatgttctacagcaggcag

SEQ ID NO: 1369689 - DNA, 25 bp, Homo sapien
taaagaggctttggcgaatggagaa

SEQ ID NO: 1369690 - DNA, 25 bp, Homo sapien
ctgccaccaacaatagctgtagtca

SEQ ID NO: 1369691 - DNA, 25 bp, Homo sapien
tgccaccaacaatagctgtagtcat

SEQ ID NO: 1369692 - DNA, 25 bp, Homo sapien
ggtcttccacagcagtcactaccat

SEQ ID NO: 1369693 - DNA, 25 bp, Homo sapien
cctcttatagcacattctggtgact

SEQ ID NO: 1369694 - DNA, 25 bp, Homo sapien
cttctcaacagtcctcttatagcac

SEQ ID NO: 1369695 - DNA, 25 bp, Homo sapien
acagtcctcttatagcacattctgg

SEQ ID NO: 1369696 - DNA, 25 bp, Homo sapien
cttatagcacattctggtgactgca

SEQ ID NO: 1369697 - DNA, 25 bp, Homo sapien
tgtgatccttaatccctttcctgga

SEQ ID NO: 1369698 - DNA, 25 bp, Homo sapien
ttcctggatgaagagaagtccatga

SEQ ID NO: 1369699 - DNA, 25 bp, Homo sapien
tatacatccacgtcccaaagttgtc

SEQ ID NO: 1369700 - DNA, 25 bp, Homo sapien
tgcttcttgagtttaccaaccaaag

SEQ ID NO: 1369701 - DNA, 25 bp, Homo sapien
aatcagttgcttctagctcatatct

SEQ ID NO: 1369702 - DNA, 25 bp, Homo sapien
ttaatcagttgcttctagctcatat

SEQ ID NO: 1369703 - DNA, 25 bp, Homo sapien
taatcagttgcttctagctcatatc

SEQ ID NO: 1369704 - DNA, 25 bp, Homo sapien
tcttgacaaataagatcagattcct

SEQ ID NO: 1369705 - DNA, 25 bp, Homo sapien
tttctattcttaagtggcacagttt

SEQ ID NO: 1369706 - DNA, 25 bp, Homo sapien
cattggtcttgacaaataagatcag

SEQ ID NO: 1369707 - DNA, 25 bp, Homo sapien
ggcacagtttgggtcattggtcttg

SEQ ID NO: 1369708 - DNA, 25 bp, Homo sapien
ccatagtccatgtggtcctggtctc

SEQ ID NO: 1369709 - DNA, 25 bp, Homo sapien
tctctgccatagtccatgtggtcct

SEQ ID NO: 1369710 - DNA, 25 bp, Homo sapien
tccatgtggtcctggtctctgccat

SEQ ID NO: 1369711 - DNA, 25 bp, Homo sapien
catgtggtcctggtctctgccatag

SEQ ID NO: 1369712 - DNA, 25 bp, Homo sapien
taattaagtctatgtgcagagccag

SEQ ID NO: 1369713 - DNA, 25 bp, Homo sapien
gaattctggtacctggactctgggc

SEQ ID NO: 1369714 - DNA, 25 bp, Homo sapien
aataacatcgggctgaaacatcctg

SEQ ID NO: 1369715 - DNA, 25 bp, Homo sapien
tcttgagaccatgctaggacggtac

SEQ ID NO: 1369716 - DNA, 25 bp, Homo sapien
ctaggctgctttaatggcattcgaa

SEQ ID NO: 1369717 - DNA, 25 bp, Homo sapien
taagttgctttttgcgtgcactcgt

SEQ ID NO: 1369718 - DNA, 25 bp, Homo sapien
tgcgtgcactcgtggattcctttcc

SEQ ID NO: 1369719 - DNA, 25 bp, Homo sapien
aagggcaagaattcacacgtagacg

SEQ ID NO: 1369720 - DNA, 25 bp, Homo sapien
ccaaatatttttgtgcagtcttgat

SEQ ID NO: 1369721 - DNA, 25 bp, Homo sapien
tagaaacctggatagtcaagaaaat

SEQ ID NO: 1369722 - DNA, 25 bp, Homo sapien
aacattttatgccagttggagacct

SEQ ID NO: 1369723 - DNA, 25 bp, Homo sapien
gatctgtcagcctgttgaggaagcc

SEQ ID NO: 1369724 - DNA, 25 bp, Homo sapien
gctgttggagagtctttgaaaatac

SEQ ID NO: 1369725 - DNA, 25 bp, Homo sapien
acagctgttggagagtctttgaaaa

SEQ ID NO: 1369726 - DNA, 25 bp, Homo sapien
cagctgttggagagtctttgaaaat

SEQ ID NO: 1369727 - DNA, 25 bp, Homo sapien
tgttggagagtctttgaaaataccc

SEQ ID NO: 1369728 - DNA, 25 bp, Homo sapien
gagtacagtttgttctcaagcactg

SEQ ID NO: 1369729 - DNA, 25 bp, Homo sapien
ttcagaagtaaagaggaagcaatgg

SEQ ID NO: 1369730 - DNA, 25 bp, Homo sapien
tataaaatagacacagttgagaagc

SEQ ID NO: 1369731 - DNA, 25 bp, Homo sapien
gttctaggcattgcacactcagcaa

SEQ ID NO: 1369732 - DNA, 25 bp, Homo sapien
tgctcttcttcgaaaagctgtaaaa

SEQ ID NO: 1369733 - DNA, 25 bp, Homo sapien
cagccttgctcttcttcgaaaagct

SEQ ID NO: 1369734 - DNA, 25 bp, Homo sapien
gacacaacagccttgctcttcttcg

SEQ ID NO: 1369735 - DNA, 25 bp, Homo sapien
aacagccttgctcttcttcgaaaag

SEQ ID NO: 1369736 - DNA, 25 bp, Homo sapien
caaccacccagccaacagcttccac

SEQ ID NO: 1369737 - DNA, 25 bp, Homo sapien
ttccctatagcaacttcagctctga

SEQ ID NO: 1369738 - DNA, 25 bp, Homo sapien
tgttccctatagcaacttcagctct

SEQ ID NO: 1369739 - DNA, 25 bp, Homo sapien
ccacccagccaacagcttccacatt

SEQ ID NO: 1369740 - DNA, 25 bp, Homo sapien
gggaacaagtgacccctcagctcat

SEQ ID NO: 1369741 - DNA, 25 bp, Homo sapien
ccctttggtagtggaatggatcatc

SEQ ID NO: 1369742 - DNA, 25 bp, Homo sapien
aagtggcaacaccaagtcctggcta

SEQ ID NO: 1369743 - DNA, 25 bp, Homo sapien
taataccctctgagcataaggagtc

SEQ ID NO: 1369744 - DNA, 25 bp, Homo sapien
tctgtagtcctcatttttacttggt

SEQ ID NO: 1369745 - DNA, 25 bp, Homo sapien
tgtgtctccaggatgacctatctcc

SEQ ID NO: 1369746 - DNA, 25 bp, Homo sapien
gattcatcttttgcaacaacgacca

SEQ ID NO: 1369747 - DNA, 25 bp, Homo sapien
tatattcttctaggatgaagtcttc

SEQ ID NO: 1369748 - DNA, 25 bp, Homo sapien
ccagtctgccgtttttctggtctag

SEQ ID NO: 1369749 - DNA, 25 bp, Homo sapien
tctgccgtttttctggtctagattc

SEQ ID NO: 1369750 - DNA, 25 bp, Homo sapien
cagtctgccgtttttctggtctaga

SEQ ID NO: 1369751 - DNA, 25 bp, Homo sapien
ctccagtctgccgtttttctggtct

SEQ ID NO: 1369752 - DNA, 25 bp, Homo sapien
tgctaaatcagtgaaacagtgatta

SEQ ID NO: 1369753 - DNA, 25 bp, Homo sapien
ctgctaaatcagtgaaacagtgatt

SEQ ID NO: 1369754 - DNA, 25 bp, Homo sapien
gctaaatcagtgaaacagtgattat

SEQ ID NO: 1369755 - DNA, 25 bp, Homo sapien
ggcatcctctgcgagaagctgcggt

SEQ ID NO: 1369756 - DNA, 25 bp, Homo sapien
gggacgtgccacaacaacgtgcgct

SEQ ID NO: 1369757 - DNA, 25 bp, Homo sapien
ctcctgcactgccagaacggaggga

SEQ ID NO: 1369758 - DNA, 25 bp, Homo sapien
aatgtctgcgacaacgagctcctgc

SEQ ID NO: 1369759 - DNA, 25 bp, Homo sapien
atattggcctgcttccgtccctgaa

SEQ ID NO: 1369760 - DNA, 25 bp, Homo sapien
taaggaaatctgttacaagctgcca

SEQ ID NO: 1369761 - DNA, 25 bp, Homo sapien
tagtgatgcacatgtgtaacagccc

SEQ ID NO: 1369762 - DNA, 25 bp, Homo sapien
gaatcccttccaacctgtgctttag

SEQ ID NO: 1369763 - DNA, 25 bp, Homo sapien
tgtaataagattccaccaaaggaca

SEQ ID NO: 1369764 - DNA, 25 bp, Homo sapien
aacgtgctggcatcaaagaatatca

SEQ ID NO: 1369765 - DNA, 25 bp, Homo sapien
aaggaacagccaccaagcagtttca

SEQ ID NO: 1369766 - DNA, 25 bp, Homo sapien
tctctgtaagggcaacgaacgtgct

SEQ ID NO: 1369767 - DNA, 25 bp, Homo sapien
gccaattcgaagaaggcaataaaag

SEQ ID NO: 1369768 - DNA, 25 bp, Homo sapien
gaaaagccaattcgaagaaggcaat

SEQ ID NO: 1369769 - DNA, 25 bp, Homo sapien
cacgtctaagtctattgaatgtttg

SEQ ID NO: 1369770 - DNA, 25 bp, Homo sapien
tgccaccccacgtctaagtctattg

SEQ ID NO: 1369771 - DNA, 25 bp, Homo sapien
aggtgattctttttgccccaggcag

SEQ ID NO: 1369772 - DNA, 25 bp, Homo sapien
taggtgattctttttgccccaggca

SEQ ID NO: 1369773 - DNA, 25 bp, Homo sapien
ttggctttcatggtgtgataaacac

SEQ ID NO: 1369774 - DNA, 25 bp, Homo sapien
attagtgtcattactctccgtctct

SEQ ID NO: 1369775 - DNA, 25 bp, Homo sapien
ttagtgtcattactctccgtctctt

SEQ ID NO: 1369776 - DNA, 25 bp, Homo sapien
tagtgtcattactctccgtctcttt

SEQ ID NO: 1369777 - DNA, 25 bp, Homo sapien
gtgtcattactctccgtctcttttt

SEQ ID NO: 1369778 - DNA, 25 bp, Homo sapien
attcataattgggaaagcagtcaaa

SEQ ID NO: 1369779 - DNA, 25 bp, Homo sapien
ggaaagcagtcaaatctaaatgcat

SEQ ID NO: 1369780 - DNA, 25 bp, Homo sapien
cctgtgtaattacaattcataattg

SEQ ID NO: 1369781 - DNA, 25 bp, Homo sapien
acaattcataattgggaaagcagtc

SEQ ID NO: 1369782 - DNA, 25 bp, Homo sapien
tttcagggtggtgagaagcaaccca

SEQ ID NO: 1369783 - DNA, 25 bp, Homo sapien
tgaaaaagtctgatatagtgtgagc

SEQ ID NO: 1369784 - DNA, 25 bp, Homo sapien
aagtctgatatagtgtgagctctga

SEQ ID NO: 1369785 - DNA, 25 bp, Homo sapien
cattttgctagaaagggcttcaacc

SEQ ID NO: 1369786 - DNA, 25 bp, Homo sapien
tttccgaatggagaacctggtgacc

SEQ ID NO: 1369787 - DNA, 25 bp, Homo sapien
gagagattatcagtagccacagcag

SEQ ID NO: 1369788 - DNA, 25 bp, Homo sapien
tggtgacccccagaatgtagattca

SEQ ID NO: 1369789 - DNA, 25 bp, Homo sapien
ctgcgctgtgaggaagcacactatt

SEQ ID NO: 1369790 - DNA, 25 bp, Homo sapien
ggatccaagaagcgtctgagccctg

SEQ ID NO: 1369791 - DNA, 25 bp, Homo sapien
tgagagagtcttcaccaaagtcaac

SEQ ID NO: 1369792 - DNA, 25 bp, Homo sapien
caactggttccatgagagagtcttc

SEQ ID NO: 1369793 - DNA, 25 bp, Homo sapien
gtcttcaccaaagtcaacccaagtg

SEQ ID NO: 1369794 - DNA, 25 bp, Homo sapien
ttctccaagatactggccaactggt

SEQ ID NO: 1369795 - DNA, 25 bp, Homo sapien
gcatgaaatcatgttggagatctct

SEQ ID NO: 1369796 - DNA, 25 bp, Homo sapien
tccagaagccacatccgcacaattt

SEQ ID NO: 1369797 - DNA, 25 bp, Homo sapien
gatctctattgtaatctctattgga

SEQ ID NO: 1369798 - DNA, 25 bp, Homo sapien
cgcacaatttttcacttaaccagga

SEQ ID NO: 1369799 - DNA, 25 bp, Homo sapien
cacattttgaatggcctcgtaaata

SEQ ID NO: 1369800 - DNA, 25 bp, Homo sapien
ggactcagtagaaaaggactccaca

SEQ ID NO: 1369801 - DNA, 25 bp, Homo sapien
ggactccagcacaattgggttttga

SEQ ID NO: 1369802 - DNA, 25 bp, Homo sapien
gatatttctgcttacttgggactca

SEQ ID NO: 1369803 - DNA, 25 bp, Homo sapien
gatctgtttgattggtcctagcacc

SEQ ID NO: 1369804 - DNA, 25 bp, Homo sapien
gaagacctgagtgtggtgaaatgtc

SEQ ID NO: 1369805 - DNA, 25 bp, Homo sapien
gaatggtatgtgtcagaagacctga

SEQ ID NO: 1369806 - DNA, 25 bp, Homo sapien
cacagaaagcatcttgtgaggggaa

SEQ ID NO: 1369807 - DNA, 25 bp, Homo sapien
tgtgactgggcagcagtaggatacc

SEQ ID NO: 1369808 - DNA, 25 bp, Homo sapien
cttcccttgggaattgaatgaacgg

SEQ ID NO: 1369809 - DNA, 25 bp, Homo sapien
tctgagagatgagtaattgtgactg

SEQ ID NO: 1369810 - DNA, 25 bp, Homo sapien
ggcccatgagtgtgtgataccagat

SEQ ID NO: 1369811 - DNA, 25 bp, Homo sapien
cactgggtgacctttgcatggggcc

SEQ ID NO: 1369812 - DNA, 25 bp, Homo sapien
ctcctaaattagtcatcggtgctgt

SEQ ID NO: 1369813 - DNA, 25 bp, Homo sapien
ggcaaacaagttggatcctggggac

SEQ ID NO: 1369814 - DNA, 25 bp, Homo sapien
acaatggcaaggcaacactcctaaa

SEQ ID NO: 1369815 - DNA, 25 bp, Homo sapien
agtcaggcagcctcaattcctgaaa

SEQ ID NO: 1369816 - DNA, 25 bp, Homo sapien
tgagcttcccagaacccctcagcag

SEQ ID NO: 1369817 - DNA, 25 bp, Homo sapien
tcctgaaaggccctggtgagcttcc

SEQ ID NO: 1369818 - DNA, 25 bp, Homo sapien
cgggcagtcaggcagcctcaattcc

SEQ ID NO: 1369819 - DNA, 25 bp, Homo sapien
ctggaaagctgccaatagtccacgt

SEQ ID NO: 1369820 - DNA, 25 bp, Homo sapien
ctctccttctgtgccgtttctgctt

SEQ ID NO: 1369821 - DNA, 25 bp, Homo sapien
ttctgtgccgtttctgcttctgtct

SEQ ID NO: 1369822 - DNA, 25 bp, Homo sapien
gctgccaatagtccacgtctgtctc

SEQ ID NO: 1369823 - DNA, 25 bp, Homo sapien
ttcatgtcctcgttttcatttccct

SEQ ID NO: 1369824 - DNA, 25 bp, Homo sapien
atttcatgtcctcgttttcatttcc

SEQ ID NO: 1369825 - DNA, 25 bp, Homo sapien
tgggtgccggttttgcttatgcact

SEQ ID NO: 1369826 - DNA, 25 bp, Homo sapien
ccagaatgggtgccggttttgctta

SEQ ID NO: 1369827 - DNA, 25 bp, Homo sapien
tcttcaataacacaagcattgtttt

SEQ ID NO: 1369828 - DNA, 25 bp, Homo sapien
cttcaataacacaagcattgttttg

SEQ ID NO: 1369829 - DNA, 25 bp, Homo sapien
ctcttcaataacacaagcattgttt

SEQ ID NO: 1369830 - DNA, 25 bp, Homo sapien
gaacccactcatccaatctgcttaa

SEQ ID NO: 1369831 - DNA, 25 bp, Homo sapien
aaaaggagcgtctgaatattcagcc

SEQ ID NO: 1369832 - DNA, 25 bp, Homo sapien
caaacacacaacgaggacatttaaa

SEQ ID NO: 1369833 - DNA, 25 bp, Homo sapien
tttatctctttcaagagaacccact

SEQ ID NO: 1369834 - DNA, 25 bp, Homo sapien
agagcacgagttcacagcagaggct

SEQ ID NO: 1369835 - DNA, 25 bp, Homo sapien
ctgacatggtaatgatgtgtttgga

SEQ ID NO: 1369836 - DNA, 25 bp, Homo sapien
tgcctgcagcactgacatggtaatg

SEQ ID NO: 1369837 - DNA, 25 bp, Homo sapien
tgagacttactctggaattgtgcct

SEQ ID NO: 1369838 - DNA, 25 bp, Homo sapien
tggagcctgcatctcacatattgga

SEQ ID NO: 1369839 - DNA, 25 bp, Homo sapien
tcacatattggacacttctcccaca

SEQ ID NO: 1369840 - DNA, 25 bp, Homo sapien
gcatgcctgattgccgtttccactt

SEQ ID NO: 1369841 - DNA, 25 bp, Homo sapien
ttttcaacagctacttccagggcat

SEQ ID NO: 1369842 - DNA, 25 bp, Homo sapien
ggaggaatgctgtggatatgggtac

SEQ ID NO: 1369843 - DNA, 25 bp, Homo sapien
aatgctgtggatatgggtacagccg

SEQ ID NO: 1369844 - DNA, 25 bp, Homo sapien
cagccgggcgcgagatttacaccct

SEQ ID NO: 1369845 - DNA, 25 bp, Homo sapien
cccgcactttcaagggccctccaga

SEQ ID NO: 1369846 - DNA, 25 bp, Homo sapien
agatgccgctggaagcgcgacgctt

SEQ ID NO: 1369847 - DNA, 25 bp, Homo sapien
ctgaaccggactccctttcgattgg

SEQ ID NO: 1369848 - DNA, 25 bp, Homo sapien
ttcgcattactgtgctggacgcttg

SEQ ID NO: 1369849 - DNA, 25 bp, Homo sapien
tccaggcgaacccaattccagggcg

SEQ ID NO: 1369850 - DNA, 25 bp, Homo sapien
tagaatatgtgctactaccaccaac

SEQ ID NO: 1369851 - DNA, 25 bp, Homo sapien
gaatgacccatgtccaactgctgtt

SEQ ID NO: 1369852 - DNA, 25 bp, Homo sapien
gaatggcgctcacctatttctcagg

SEQ ID NO: 1369853 - DNA, 25 bp, Homo sapien
gaggccatcgcctgtccattcagaa

SEQ ID NO: 1369854 - DNA, 25 bp, Homo sapien
tcctactagacgcatagcgtccacg

SEQ ID NO: 1369855 - DNA, 25 bp, Homo sapien
cctcctactagacgcatagcgtcca

SEQ ID NO: 1369856 - DNA, 25 bp, Homo sapien
gccctcctactagacgcatagcgtc

SEQ ID NO: 1369857 - DNA, 25 bp, Homo sapien
ctactagacgcatagcgtccacggg

SEQ ID NO: 1369858 - DNA, 25 bp, Homo sapien
cacacatacactgcttctgttcact

SEQ ID NO: 1369859 - DNA, 25 bp, Homo sapien
gcttctgttcactctggactgctgg

SEQ ID NO: 1369860 - DNA, 25 bp, Homo sapien
tccacacatacactgcttctgttca

SEQ ID NO: 1369861 - DNA, 25 bp, Homo sapien
gttcactctggactgctggcgatgg

SEQ ID NO: 1369862 - DNA, 25 bp, Homo sapien
ggtacaggcccaacaatccagtgcc

SEQ ID NO: 1369863 - DNA, 25 bp, Homo sapien
tacacgagggctgcatacaggcaag

SEQ ID NO: 1369864 - DNA, 25 bp, Homo sapien
tgctacaataccatccacaggagtg

SEQ ID NO: 1369865 - DNA, 25 bp, Homo sapien
ggcaacagacaaaacattcccgaga

SEQ ID NO: 1369866 - DNA, 25 bp, Homo sapien
cataacaaagttcggctgacggcaa

SEQ ID NO: 1369867 - DNA, 25 bp, Homo sapien
gatgaaaagtcctagcccatgaggg

SEQ ID NO: 1369868 - DNA, 25 bp, Homo sapien
aacacaacttctgctatggaggaaa

SEQ ID NO: 1369869 - DNA, 25 bp, Homo sapien
tttaggctcctcacaaaaaagagtg

SEQ ID NO: 1369870 - DNA, 25 bp, Homo sapien
tctggcacccagacggattgatgag

SEQ ID NO: 1369871 - DNA, 25 bp, Homo sapien
aagtaaagggaagcacgaaccaatg

SEQ ID NO: 1369872 - DNA, 25 bp, Homo sapien
gctcttggttttgccctggtccctg

SEQ ID NO: 1369873 - DNA, 25 bp, Homo sapien
ggtccctgacaatgacagactggca

SEQ ID NO: 1369874 - DNA, 25 bp, Homo sapien
taaagggaagcacgaaccaatgtgt

SEQ ID NO: 1369875 - DNA, 25 bp, Homo sapien
aaatctcagcattaagacttaggag

SEQ ID NO: 1369876 - DNA, 25 bp, Homo sapien
tctcagcattaagacttaggagggg

SEQ ID NO: 1369877 - DNA, 25 bp, Homo sapien
aatctcagcattaagacttaggagg

SEQ ID NO: 1369878 - DNA, 25 bp, Homo sapien
gaaatctcagcattaagacttagga

SEQ ID NO: 1369879 - DNA, 25 bp, Homo sapien
ttcagttaattcacgatgctgtgca

SEQ ID NO: 1369880 - DNA, 25 bp, Homo sapien
tgtgcaggcttctatttatcccttc

SEQ ID NO: 1369881 - DNA, 25 bp, Homo sapien
tgcagggtgcaacacgggatttgaa

SEQ ID NO: 1369882 - DNA, 25 bp, Homo sapien
agttaattcacgatgctgtgcaggc

SEQ ID NO: 1369883 - DNA, 25 bp, Homo sapien
tcctcttccacatatgtggatggaa

SEQ ID NO: 1369884 - DNA, 25 bp, Homo sapien
attcatcctcttccacatatgtgga

SEQ ID NO: 1369885 - DNA, 25 bp, Homo sapien
tccacatatgtggatggaaaccagc

SEQ ID NO: 1369886 - DNA, 25 bp, Homo sapien
tcttccacatatgtggatggaaacc

SEQ ID NO: 1369887 - DNA, 25 bp, Homo sapien
tccctggtgccacaatgggtgcaaa

SEQ ID NO: 1369888 - DNA, 25 bp, Homo sapien
tgtaatacagtatagaggcttctcc

SEQ ID NO: 1369889 - DNA, 25 bp, Homo sapien
tcaaatattttcagcgagtccctgg

SEQ ID NO: 1369890 - DNA, 25 bp, Homo sapien
aaacacagcaccagtttccagaggg

SEQ ID NO: 1369891 - DNA, 25 bp, Homo sapien
gtcataccgagcgatggcaatgccc

SEQ ID NO: 1369892 - DNA, 25 bp, Homo sapien
tgtgtaaatcttcaccacatctcct

SEQ ID NO: 1369893 - DNA, 25 bp, Homo sapien
aactctctcatatctcttgcacaga

SEQ ID NO: 1369894 - DNA, 25 bp, Homo sapien
tcttgcacagaagtcataccgagcg

SEQ ID NO: 1369895 - DNA, 25 bp, Homo sapien
taagaacctcaatcaaagtaaggac

SEQ ID NO: 1369896 - DNA, 25 bp, Homo sapien
tacagaccagcgataatggcagagg

SEQ ID NO: 1369897 - DNA, 25 bp, Homo sapien
tgcacagtcgtgatttcattacaga

SEQ ID NO: 1369898 - DNA, 25 bp, Homo sapien
gacagtaggtttgcagttcgttaac

SEQ ID NO: 1369899 - DNA, 25 bp, Homo sapien
agctgtagtctggaggagttacaaa

SEQ ID NO: 1369900 - DNA, 25 bp, Homo sapien
gctgtagtctggaggagttacaaaa

SEQ ID NO: 1369901 - DNA, 25 bp, Homo sapien
aagggggaacaaagctgtagtctgg

SEQ ID NO: 1369902 - DNA, 25 bp, Homo sapien
gtagtctggaggagttacaaaagaa

SEQ ID NO: 1369903 - DNA, 25 bp, Homo sapien
tgcctggcacctactgagacaagag

SEQ ID NO: 1369904 - DNA, 25 bp, Homo sapien
aattattggtaggtacacgtcctgg

SEQ ID NO: 1369905 - DNA, 25 bp, Homo sapien
cacccagtgtatagctctcagccaa

SEQ ID NO: 1369906 - DNA, 25 bp, Homo sapien
gaacgttgaggtggttatcatctcc

SEQ ID NO: 1369907 - DNA, 25 bp, Homo sapien
ccttgagagaatgatgcttgtagta

SEQ ID NO: 1369908 - DNA, 25 bp, Homo sapien
gatgcttgtagtactccacaagttc

SEQ ID NO: 1369909 - DNA, 25 bp, Homo sapien
ctctgtccagctgaatgttctggct

SEQ ID NO: 1369910 - DNA, 25 bp, Homo sapien
gagttgtatctaaggttctgaaccc

SEQ ID NO: 1369911 - DNA, 25 bp, Homo sapien
atctcttgttaaaatcttgatgtgc

SEQ ID NO: 1369912 - DNA, 25 bp, Homo sapien
catctcttgttaaaatcttgatgtg

SEQ ID NO: 1369913 - DNA, 25 bp, Homo sapien
ttaatgctaattgcatattctcctg

SEQ ID NO: 1369914 - DNA, 25 bp, Homo sapien
cctgactctttggtcctgtgcctca

SEQ ID NO: 1369915 - DNA, 25 bp, Homo sapien
cctgtgcctcacaaggtaagtacta

SEQ ID NO: 1369916 - DNA, 25 bp, Homo sapien
gctaattgcatattctcctgactct

SEQ ID NO: 1369917 - DNA, 25 bp, Homo sapien
cctattaataagttcggtctctgct

SEQ ID NO: 1369918 - DNA, 25 bp, Homo sapien
taagttcggtctctgcttgcaatct

SEQ ID NO: 1369919 - DNA, 25 bp, Homo sapien
aataagttcggtctctgcttgcaat

SEQ ID NO: 1369920 - DNA, 25 bp, Homo sapien
ttaataagttcggtctctgcttgca

SEQ ID NO: 1369921 - DNA, 25 bp, Homo sapien
aatgacacagaaaatttggataata

SEQ ID NO: 1369922 - DNA, 25 bp, Homo sapien
acaatgacacagaaaatttggataa

SEQ ID NO: 1369923 - DNA, 25 bp, Homo sapien
caatgacacagaaaatttggataat

SEQ ID NO: 1369924 - DNA, 25 bp, Homo sapien
tactatacacgttgagcatctctaa

SEQ ID NO: 1369925 - DNA, 25 bp, Homo sapien
tattctactatacacgttgagcatc

SEQ ID NO: 1369926 - DNA, 25 bp, Homo sapien
gtttacacttgggttccatcctgaa

SEQ ID NO: 1369927 - DNA, 25 bp, Homo sapien
tacacttgggttccatcctgaatat

SEQ ID NO: 1369928 - DNA, 25 bp, Homo sapien
cgcccagctgagtctgatcatttga

SEQ ID NO: 1369929 - DNA, 25 bp, Homo sapien
agtctgatcatttgacaagaacctg

SEQ ID NO: 1369930 - DNA, 25 bp, Homo sapien
aacacgcccagctgagtctgatcat

SEQ ID NO: 1369931 - DNA, 25 bp, Homo sapien
gctgagtctgatcatttgacaagaa

SEQ ID NO: 1369932 - DNA, 25 bp, Homo sapien
ggttggcaagaataatctactggtt

SEQ ID NO: 1369933 - DNA, 25 bp, Homo sapien
tggcaagaataatctactggtttgg

SEQ ID NO: 1369934 - DNA, 25 bp, Homo sapien
cagggttggcaagaataatctactg

SEQ ID NO: 1369935 - DNA, 25 bp, Homo sapien
aagaataatctactggtttgggcac

SEQ ID NO: 1369936 - DNA, 25 bp, Homo sapien
caccatagtccattaacactgcaaa

SEQ ID NO: 1369937 - DNA, 25 bp, Homo sapien
cttctgtgtactatgggtccttgtc

SEQ ID NO: 1369938 - DNA, 25 bp, Homo sapien
cttcttcctgaagtataccttatga

SEQ ID NO: 1369939 - DNA, 25 bp, Homo sapien
taccttatgaagctagatggcacac

SEQ ID NO: 1369940 - DNA, 25 bp, Homo sapien
tgcctgcctttgagctagccataaa

SEQ ID NO: 1369941 - DNA, 25 bp, Homo sapien
tgcatggtacaatccagtgcctgcc

SEQ ID NO: 1369942 - DNA, 25 bp, Homo sapien
tgggcagtgccttcagatagttttg

SEQ ID NO: 1369943 - DNA, 25 bp, Homo sapien
taccagaagtggaaactcttgttgc

SEQ ID NO: 1369944 - DNA, 25 bp, Homo sapien
tagttcatccaccaagagctcctgg

SEQ ID NO: 1369945 - DNA, 25 bp, Homo sapien
ccaggctttgtctctagttgccata

SEQ ID NO: 1369946 - DNA, 25 bp, Homo sapien
tgacccatttatgaaccgcctgtgt

SEQ ID NO: 1369947 - DNA, 25 bp, Homo sapien
ggatatacccaagtttgcattgtgc

SEQ ID NO: 1369948 - DNA, 25 bp, Homo sapien
gcttatgttcatcccagcaatattc

SEQ ID NO: 1369949 - DNA, 25 bp, Homo sapien
atgtaaagtaattcagcctttgtgg

SEQ ID NO: 1369950 - DNA, 25 bp, Homo sapien
tgcttatgttcatcccagcaatatt

SEQ ID NO: 1369951 - DNA, 25 bp, Homo sapien
tgggcaaggcttgactgcatcactt

SEQ ID NO: 1369952 - DNA, 25 bp, Homo sapien
tccaacctctccagatgctaaattt

SEQ ID NO: 1369953 - DNA, 25 bp, Homo sapien
ggcaaggcttgactgcatcacttgg

SEQ ID NO: 1369954 - DNA, 25 bp, Homo sapien
acatgggcaaggcttgactgcatca

SEQ ID NO: 1369955 - DNA, 25 bp, Homo sapien
gaccacaacagaatttctcagaact

SEQ ID NO: 1369956 - DNA, 25 bp, Homo sapien
cacaacagaatttctcagaactttc

SEQ ID NO: 1369957 - DNA, 25 bp, Homo sapien
gaactttctcccataatgttactcc

SEQ ID NO: 1369958 - DNA, 25 bp, Homo sapien
cagaactttctcccataatgttact

SEQ ID NO: 1369959 - DNA, 25 bp, Homo sapien
gacacagttctaaatgaaggtaaca

SEQ ID NO: 1369960 - DNA, 25 bp, Homo sapien
ttggcactgattacagttctactgc

SEQ ID NO: 1369961 - DNA, 25 bp, Homo sapien
tgattagtaagcatgaagtatcaca

SEQ ID NO: 1369962 - DNA, 25 bp, Homo sapien
gaagaccttgtgaattaatcggaat

SEQ ID NO: 1369963 - DNA, 25 bp, Homo sapien
tccactaaggaaactctaggcctag

SEQ ID NO: 1369964 - DNA, 25 bp, Homo sapien
ctactcatgtggctgaggcacggta

SEQ ID NO: 1369965 - DNA, 25 bp, Homo sapien
aatgagccgtgatcccgccgctgca

SEQ ID NO: 1369966 - DNA, 25 bp, Homo sapien
tcatgtggctgaggcacggtaattg

SEQ ID NO: 1369967 - DNA, 25 bp, Homo sapien
tcagaagttcaacggtatccccggc

SEQ ID NO: 1369968 - DNA, 25 bp, Homo sapien
aaacagactgtgtgcatctcctttc

SEQ ID NO: 1369969 - DNA, 25 bp, Homo sapien
tcctttcagaagttcaacggtatcc

SEQ ID NO: 1369970 - DNA, 25 bp, Homo sapien
gactgtgtgcatctcctttcagaag

SEQ ID NO: 1369971 - DNA, 25 bp, Homo sapien
tgatctgttgtcaggggtacagaga

SEQ ID NO: 1369972 - DNA, 25 bp, Homo sapien
gggcacagcgatataatgaattctg

SEQ ID NO: 1369973 - DNA, 25 bp, Homo sapien
tcaggggtacagagatcaaaggata

SEQ ID NO: 1369974 - DNA, 25 bp, Homo sapien
tgaaacaagggcacagcgatataat

SEQ ID NO: 1369975 - DNA, 25 bp, Homo sapien
tctcgcaaccaaaatgaaccattat

SEQ ID NO: 1369976 - DNA, 25 bp, Homo sapien
aatgaaccattatcagtccactcat

SEQ ID NO: 1369977 - DNA, 25 bp, Homo sapien
catgttttctttctcgcaaccaaaa

SEQ ID NO: 1369978 - DNA, 25 bp, Homo sapien
tgaaccattatcagtccactcataa

SEQ ID NO: 1369979 - DNA, 25 bp, Homo sapien
aaactctgaggatccgcaatcacca

SEQ ID NO: 1369980 - DNA, 25 bp, Homo sapien
tggagcccttagctcagagaacaac

SEQ ID NO: 1369981 - DNA, 25 bp, Homo sapien
gcaatcaccacaatatctaacaggt

SEQ ID NO: 1369982 - DNA, 25 bp, Homo sapien
gaagaatttctaacctgctcagtca

SEQ ID NO: 1369983 - DNA, 25 bp, Homo sapien
taacagcagttaggtcaatgtagta

SEQ ID NO: 1369984 - DNA, 25 bp, Homo sapien
atttaacagcagttaggtcaatgta

SEQ ID NO: 1369985 - DNA, 25 bp, Homo sapien
cagcagttaggtcaatgtagtataa

SEQ ID NO: 1369986 - DNA, 25 bp, Homo sapien
cagttaggtcaatgtagtataaagg

SEQ ID NO: 1369987 - DNA, 25 bp, Homo sapien
taaagaataacaggcctatgagtga

SEQ ID NO: 1369988 - DNA, 25 bp, Homo sapien
taaagtacgttcaacgtgaaacaca

SEQ ID NO: 1369989 - DNA, 25 bp, Homo sapien
tatagctaaagaataacaggcctat

SEQ ID NO: 1369990 - DNA, 25 bp, Homo sapien
ttaatggcctcaataaagtacgttc

SEQ ID NO: 1369991 - DNA, 25 bp, Homo sapien
ggaaatctctcctacaactgaaatg

SEQ ID NO: 1369992 - DNA, 25 bp, Homo sapien
ttggaatctacagaaatgtatcccg

SEQ ID NO: 1369993 - DNA, 25 bp, Homo sapien
tattaaggatatgctgttacccgca

SEQ ID NO: 1369994 - DNA, 25 bp, Homo sapien
gagtggtgagggctaaactagacct

SEQ ID NO: 1369995 - DNA, 25 bp, Homo sapien
ctactaggtcgtctcctggttgcaa

SEQ ID NO: 1369996 - DNA, 25 bp, Homo sapien
aaagtcaggagctgctaagaaggtc

SEQ ID NO: 1369997 - DNA, 25 bp, Homo sapien
ggacaaaaagagctacccagtattg

SEQ ID NO: 1369998 - DNA, 25 bp, Homo sapien
tcaggatttctaagggagtcagcgc

SEQ ID NO: 1369999 - DNA, 25 bp, Homo sapien
tcttcaactctttcgcgatacgggt

SEQ ID NO: 1370000 - DNA, 25 bp, Homo sapien
gagtaactacatggctgacactaaa

SEQ ID NO: 1370001 - DNA, 25 bp, Homo sapien
taaattgtccaaagatttgcacagc

SEQ ID NO: 1370002 - DNA, 25 bp, Homo sapien
catgattttgtatgccatggctagg

SEQ ID NO: 1370003 - DNA, 25 bp, Homo sapien
cacccaaataatgttacagttgaga

SEQ ID NO: 1370004 - DNA, 25 bp, Homo sapien
tgttcacgtcctctagacaaactga

SEQ ID NO: 1370005 - DNA, 25 bp, Homo sapien
ttcacgtcctctagacaaactgaaa

SEQ ID NO: 1370006 - DNA, 25 bp, Homo sapien
gttcacgtcctctagacaaactgaa

SEQ ID NO: 1370007 - DNA, 25 bp, Homo sapien
catgttcacgtcctctagacaaact

SEQ ID NO: 1370008 - DNA, 25 bp, Homo sapien
gctatgatcacaacggttaatatct

SEQ ID NO: 1370009 - DNA, 25 bp, Homo sapien
aggtagctatgatcacaacggttaa

SEQ ID NO: 1370010 - DNA, 25 bp, Homo sapien
gggcatttgatataagaggtagcta

SEQ ID NO: 1370011 - DNA, 25 bp, Homo sapien
gacatcacacgattttgttggggca

SEQ ID NO: 1370012 - DNA, 25 bp, Homo sapien
cattttggataccagagaactatca

SEQ ID NO: 1370013 - DNA, 25 bp, Homo sapien
attttggataccagagaactatcaa

SEQ ID NO: 1370014 - DNA, 25 bp, Homo sapien
accattttggataccagagaactat

SEQ ID NO: 1370015 - DNA, 25 bp, Homo sapien
ccattttggataccagagaactatc

SEQ ID NO: 1370016 - DNA, 25 bp, Homo sapien
gccggccttgacctcccaaagtgct

SEQ ID NO: 1370017 - DNA, 25 bp, Homo sapien
cagctattttttttttgcttgtatt

SEQ ID NO: 1370018 - DNA, 25 bp, Homo sapien
ccagctattttttttttgcttgtat

SEQ ID NO: 1370019 - DNA, 25 bp, Homo sapien
ccggccttgacctcccaaagtgctg

SEQ ID NO: 1370020 - DNA, 25 bp, Homo sapien
cctgtttaggagttcttcgcagtcc

SEQ ID NO: 1370021 - DNA, 25 bp, Homo sapien
ccacctgtttaggagttcttcgcag

SEQ ID NO: 1370022 - DNA, 25 bp, Homo sapien
ttaggagttcttcgcagtccattgg

SEQ ID NO: 1370023 - DNA, 25 bp, Homo sapien
gagttcttcgcagtccattggtccg

SEQ ID NO: 1370024 - DNA, 25 bp, Homo sapien
tgtgttggtaattttgcactattaa

SEQ ID NO: 1370025 - DNA, 25 bp, Homo sapien
tatgtgttggtaattttgcactatt

SEQ ID NO: 1370026 - DNA, 25 bp, Homo sapien
ggtaattttgcactattaaattgta

SEQ ID NO: 1370027 - DNA, 25 bp, Homo sapien
tgttggtaattttgcactattaaat

SEQ ID NO: 1370028 - DNA, 25 bp, Homo sapien
tggaaagcaaatgaatgttgcacat

SEQ ID NO: 1370029 - DNA, 25 bp, Homo sapien
ttggaaagcaaatgaatgttgcaca

SEQ ID NO: 1370030 - DNA, 25 bp, Homo sapien
tctggtagtttgagtgtcccttgtt

SEQ ID NO: 1370031 - DNA, 25 bp, Homo sapien
aaaaattggcattgtcagtgtaaag

SEQ ID NO: 1370032 - DNA, 25 bp, Homo sapien
ctctgcagagtggtaaaacaccact

SEQ ID NO: 1370033 - DNA, 25 bp, Homo sapien
taatatatttccacggtccctcagg

SEQ ID NO: 1370034 - DNA, 25 bp, Homo sapien
ggttagcaaccttagctttctctgc

SEQ ID NO: 1370035 - DNA, 25 bp, Homo sapien
gagacttgcttcactggtttgccca

SEQ ID NO: 1370036 - DNA, 25 bp, Homo sapien
tggcccagtcttagaacccaggtta

SEQ ID NO: 1370037 - DNA, 25 bp, Homo sapien
tataaaagtgccatttggctggccc

SEQ ID NO: 1370038 - DNA, 25 bp, Homo sapien
tcagaagaaagatcgcccaagagcg

SEQ ID NO: 1370039 - DNA, 25 bp, Homo sapien
gcatttacaggctcttcatatcttg

SEQ ID NO: 1370040 - DNA, 25 bp, Homo sapien
gctcttggcagaagagaggatccat

SEQ ID NO: 1370041 - DNA, 25 bp, Homo sapien
gagaggatccatcatagaacaccag

SEQ ID NO: 1370042 - DNA, 25 bp, Homo sapien
cttcatatcttgtgcagggtttggc

SEQ ID NO: 1370043 - DNA, 25 bp, Homo sapien
cagacacggcactgatgagactggt

SEQ ID NO: 1370044 - DNA, 25 bp, Homo sapien
cggcactgatgagactggtacaaca

SEQ ID NO: 1370045 - DNA, 25 bp, Homo sapien
gacacggcactgatgagactggtac

SEQ ID NO: 1370046 - DNA, 25 bp, Homo sapien
cacggcactgatgagactggtacaa

SEQ ID NO: 1370047 - DNA, 25 bp, Homo sapien
tcatggatacggcatagagctgttt

SEQ ID NO: 1370048 - DNA, 25 bp, Homo sapien
cattcatggatacggcatagagctg

SEQ ID NO: 1370049 - DNA, 25 bp, Homo sapien
tgcattcatggatacggcatagagc

SEQ ID NO: 1370050 - DNA, 25 bp, Homo sapien
ggatacggcatagagctgtttgcac

SEQ ID NO: 1370051 - DNA, 25 bp, Homo sapien
tgaaactactatggtgggcacttgg

SEQ ID NO: 1370052 - DNA, 25 bp, Homo sapien
caaatctattttggctgtactctga

SEQ ID NO: 1370053 - DNA, 25 bp, Homo sapien
ttggtatccacctgaaactactatg

SEQ ID NO: 1370054 - DNA, 25 bp, Homo sapien
gagctgagataattagggctgatta

SEQ ID NO: 1370055 - DNA, 25 bp, Homo sapien
tgaactatgagcattcggtgttacc

SEQ ID NO: 1370056 - DNA, 25 bp, Homo sapien
cattcggtgttaccggtctctcaaa

SEQ ID NO: 1370057 - DNA, 25 bp, Homo sapien
tatgagcattcggtgttaccggtct

SEQ ID NO: 1370058 - DNA, 25 bp, Homo sapien
tcataccgctaatgaactatgagca

SEQ ID NO: 1370059 - DNA, 25 bp, Homo sapien
gttatgcagaaaactcacgtaaatt

SEQ ID NO: 1370060 - DNA, 25 bp, Homo sapien
aacacatattcagagtaaattaggc

SEQ ID NO: 1370061 - DNA, 25 bp, Homo sapien
cagagtaaattaggccttaattatg

SEQ ID NO: 1370062 - DNA, 25 bp, Homo sapien
aaacagaattgcaacaataaacatg

SEQ ID NO: 1370063 - DNA, 25 bp, Homo sapien
cacaattgtctactcttcccaaaca

SEQ ID NO: 1370064 - DNA, 25 bp, Homo sapien
ttaactctgccacaattgtctactc

SEQ ID NO: 1370065 - DNA, 25 bp, Homo sapien
tttgtgtgctctcgctccacactta

SEQ ID NO: 1370066 - DNA, 25 bp, Homo sapien
cttaaaacataaatagccttgataa

SEQ ID NO: 1370067 - DNA, 25 bp, Homo sapien
ggaaattggagtctgcatagtctgg

SEQ ID NO: 1370068 - DNA, 25 bp, Homo sapien
caggatgtgactcgagtgaaggtat

SEQ ID NO: 1370069 - DNA, 25 bp, Homo sapien
tgcatagtctggtcttatgttagac

SEQ ID NO: 1370070 - DNA, 25 bp, Homo sapien
gaaggtatgcatcttgaagtcgtgg

SEQ ID NO: 1370071 - DNA, 25 bp, Homo sapien
ccttcttaccagtctcctctttata

SEQ ID NO: 1370072 - DNA, 25 bp, Homo sapien
tcttaccagtctcctctttatagtc

SEQ ID NO: 1370073 - DNA, 25 bp, Homo sapien
accagtctcctctttatagtcatca

SEQ ID NO: 1370074 - DNA, 25 bp, Homo sapien
gtctcctctttatagtcatcaaaca

SEQ ID NO: 1370075 - DNA, 25 bp, Homo sapien
gaagagggatctcacatttgtttag

SEQ ID NO: 1370076 - DNA, 25 bp, Homo sapien
gccaacatccaggagtgggagaaga

SEQ ID NO: 1370077 - DNA, 25 bp, Homo sapien
gttccaccgagcactcaaatttgtt

SEQ ID NO: 1370078 - DNA, 25 bp, Homo sapien
cacatttgtttagaacctgttccac

SEQ ID NO: 1370079 - DNA, 25 bp, Homo sapien
gagcctgccataaagttgaagagac

SEQ ID NO: 1370080 - DNA, 25 bp, Homo sapien
cacagaattgcctttctcagtggag

SEQ ID NO: 1370081 - DNA, 25 bp, Homo sapien
gccatgtggcaagcagtcacagaat

SEQ ID NO: 1370082 - DNA, 25 bp, Homo sapien
aaggcccacatacatcaacaatttg

SEQ ID NO: 1370083 - DNA, 25 bp, Homo sapien
ctgaagcttctaaatcctgttcctg

SEQ ID NO: 1370084 - DNA, 25 bp, Homo sapien
gaaaacctgaagcttctaaatcctg

SEQ ID NO: 1370085 - DNA, 25 bp, Homo sapien
aaaacctgaagcttctaaatcctgt

SEQ ID NO: 1370086 - DNA, 25 bp, Homo sapien
aagcttctaaatcctgttcctgggc

SEQ ID NO: 1370087 - DNA, 25 bp, Homo sapien
tggctccactatagacttcgtcatg

SEQ ID NO: 1370088 - DNA, 25 bp, Homo sapien
aaagagagctactcctttgggcctt

SEQ ID NO: 1370089 - DNA, 25 bp, Homo sapien
cattcagcgcccatctgatgtcaca

SEQ ID NO: 1370090 - DNA, 25 bp, Homo sapien
ttagcttaccccttagtgttcctgc

SEQ ID NO: 1370091 - DNA, 25 bp, Homo sapien
tggacctaccctgtttttgccaaca

SEQ ID NO: 1370092 - DNA, 25 bp, Homo sapien
caccctccatttggacctaccctgt

SEQ ID NO: 1370093 - DNA, 25 bp, Homo sapien
cactgccagacacaggattccagag

SEQ ID NO: 1370094 - DNA, 25 bp, Homo sapien
agccctcaagtaagtcctccacagt

SEQ ID NO: 1370095 - DNA, 25 bp, Homo sapien
aaatcactccaaagtagaatttcat

SEQ ID NO: 1370096 - DNA, 25 bp, Homo sapien
aactctgcttaggtttgatcctcac

SEQ ID NO: 1370097 - DNA, 25 bp, Homo sapien
caaatcactccaaagtagaatttca

SEQ ID NO: 1370098 - DNA, 25 bp, Homo sapien
ggcagaggcgctctgcagatacttt

SEQ ID NO: 1370099 - DNA, 25 bp, Homo sapien
gtggaccgccaatggccagctggct

SEQ ID NO: 1370100 - DNA, 25 bp, Homo sapien
aagtcctctgtgctccggcagaggc

SEQ ID NO: 1370101 - DNA, 25 bp, Homo sapien
gctacaggaattccgccagaaagtc

SEQ ID NO: 1370102 - DNA, 25 bp, Homo sapien
agagccttactcacaccaaacaaac

SEQ ID NO: 1370103 - DNA, 25 bp, Homo sapien
ccagatccacgaggctttcttttcc

SEQ ID NO: 1370104 - DNA, 25 bp, Homo sapien
tccattcccagatccacgaggcttt

SEQ ID NO: 1370105 - DNA, 25 bp, Homo sapien
tcccacatctctaaccatgaggttc

SEQ ID NO: 1370106 - DNA, 25 bp, Homo sapien
gctcctgtgactgctagtttcctga

SEQ ID NO: 1370107 - DNA, 25 bp, Homo sapien
gctcaaatgctcctgtgactgctag

SEQ ID NO: 1370108 - DNA, 25 bp, Homo sapien
ttgtacacatttgctcaaatgctcc

SEQ ID NO: 1370109 - DNA, 25 bp, Homo sapien
acttgtacacatttgctcaaatgct

SEQ ID NO: 1370110 - DNA, 25 bp, Homo sapien
tcaaactgttctagccatttcttct

SEQ ID NO: 1370111 - DNA, 25 bp, Homo sapien
atttcaaactgttctagccatttct

SEQ ID NO: 1370112 - DNA, 25 bp, Homo sapien
ttcaaactgttctagccatttcttc

SEQ ID NO: 1370113 - DNA, 25 bp, Homo sapien
ttgggtatggatgaggtagaagcca

SEQ ID NO: 1370114 - DNA, 25 bp, Homo sapien
tattggctatcttgtactgctgaag

SEQ ID NO: 1370115 - DNA, 25 bp, Homo sapien
ttttctcttacatacgatcactgcc

SEQ ID NO: 1370116 - DNA, 25 bp, Homo sapien
gatcactgccaaatcaaataagaag

SEQ ID NO: 1370117 - DNA, 25 bp, Homo sapien
ctttatcggttgtaggattattggc

SEQ ID NO: 1370118 - DNA, 25 bp, Homo sapien
ttattcgaatttcaccatctccctg

SEQ ID NO: 1370119 - DNA, 25 bp, Homo sapien
tggtatgcttgtctagagtggttat

SEQ ID NO: 1370120 - DNA, 25 bp, Homo sapien
tccctgaggtcgtccaaaaagcaaa

SEQ ID NO: 1370121 - DNA, 25 bp, Homo sapien
ctagagtggttattcgaatttcacc

SEQ ID NO: 1370122 - DNA, 25 bp, Homo sapien
ctgtttaatttcacgaagggtctca

SEQ ID NO: 1370123 - DNA, 25 bp, Homo sapien
taatttcacgaagggtctcattatc

SEQ ID NO: 1370124 - DNA, 25 bp, Homo sapien
caaattctctatagatagctgaaac

SEQ ID NO: 1370125 - DNA, 25 bp, Homo sapien
ctatagatagctgaaactgtttaat

SEQ ID NO: 1370126 - DNA, 25 bp, Homo sapien
gatcagtggtatgtttgaccagttc

SEQ ID NO: 1370127 - DNA, 25 bp, Homo sapien
ccttctcagtcggatcagtggtatg

SEQ ID NO: 1370128 - DNA, 25 bp, Homo sapien
cagtcggatcagtggtatgtttgac

SEQ ID NO: 1370129 - DNA, 25 bp, Homo sapien
tcagatttgccttctcagtcggatc

SEQ ID NO: 1370130 - DNA, 25 bp, Homo sapien
cacaagcaagtctcgaagagtaaat

SEQ ID NO: 1370131 - DNA, 25 bp, Homo sapien
gtactttaaaacacgttgcatagga

SEQ ID NO: 1370132 - DNA, 25 bp, Homo sapien
gtctcgaagagtaaatttcccatta

SEQ ID NO: 1370133 - DNA, 25 bp, Homo sapien
gtggtactttaaaacacgttgcata

SEQ ID NO: 1370134 - DNA, 25 bp, Homo sapien
cggcacgcagctcccactgagtatt

SEQ ID NO: 1370135 - DNA, 25 bp, Homo sapien
taagtatccgacttaatacttccaa

SEQ ID NO: 1370136 - DNA, 25 bp, Homo sapien
tgttgaagtgttacactaagtatcc

SEQ ID NO: 1370137 - DNA, 25 bp, Homo sapien
caaatcaggactatggttagaagtg

SEQ ID NO: 1370138 - DNA, 25 bp, Homo sapien
aactagagatggctgactccactcc

SEQ ID NO: 1370139 - DNA, 25 bp, Homo sapien
tttgtcttagaaatgtagtctaaac

SEQ ID NO: 1370140 - DNA, 25 bp, Homo sapien
tctaatttcagtttgacatcttctt

SEQ ID NO: 1370141 - DNA, 25 bp, Homo sapien
gcagtactgcccgtaaataaccaat

SEQ ID NO: 1370142 - DNA, 25 bp, Homo sapien
tcatgaatctcttgcattaggttcc

SEQ ID NO: 1370143 - DNA, 25 bp, Homo sapien
gaatcatgaatctcttgcattaggt

SEQ ID NO: 1370144 - DNA, 25 bp, Homo sapien
catgaatctcttgcattaggttccg

SEQ ID NO: 1370145 - DNA, 25 bp, Homo sapien
gaatctcttgcattaggttccgatg

SEQ ID NO: 1370146 - DNA, 25 bp, Homo sapien
aggaatgttgatgaatactgaatca

SEQ ID NO: 1370147 - DNA, 25 bp, Homo sapien
gaaatctttttagtggtgccatgaa

SEQ ID NO: 1370148 - DNA, 25 bp, Homo sapien
aaatctttttagtggtgccatgaaa

SEQ ID NO: 1370149 - DNA, 25 bp, Homo sapien
agaaatctttttagtggtgccatga

SEQ ID NO: 1370150 - DNA, 25 bp, Homo sapien
tctgcttaatttctgctagacaaca

SEQ ID NO: 1370151 - DNA, 25 bp, Homo sapien
gctagacaacaacttcgtatatcat

SEQ ID NO: 1370152 - DNA, 25 bp, Homo sapien
ctgtctgcttaatttctgctagaca

SEQ ID NO: 1370153 - DNA, 25 bp, Homo sapien
taatttctgctagacaacaacttcg

SEQ ID NO: 1370154 - DNA, 25 bp, Homo sapien
taaacacagtcatagagatcttctt

SEQ ID NO: 1370155 - DNA, 25 bp, Homo sapien
ttcctctgccttcattaagtcctca

SEQ ID NO: 1370156 - DNA, 25 bp, Homo sapien
ttaagtcctcatagacttctccacc

SEQ ID NO: 1370157 - DNA, 25 bp, Homo sapien
ttcttcatcttccacaagggtttca

SEQ ID NO: 1370158 - DNA, 25 bp, Homo sapien
agagataggagactgggacaaccag

SEQ ID NO: 1370159 - DNA, 25 bp, Homo sapien
ctgggacaaccagacttggtgaaca

SEQ ID NO: 1370160 - DNA, 25 bp, Homo sapien
tcaaccagacccttcctttatctgt

SEQ ID NO: 1370161 - DNA, 25 bp, Homo sapien
tatattcagggccataactaacata

SEQ ID NO: 1370162 - DNA, 25 bp, Homo sapien
cacataaattggcagtggctaaatt

SEQ ID NO: 1370163 - DNA, 25 bp, Homo sapien
tctattaaatcaggaaggcctttgt

SEQ ID NO: 1370164 - DNA, 25 bp, Homo sapien
taacgtgcttatctgatctcccacc

SEQ ID NO: 1370165 - DNA, 25 bp, Homo sapien
gaggctgtaacacctgccacctgaa

SEQ ID NO: 1370166 - DNA, 25 bp, Homo sapien
tctgaagcaattacagctggtcacc

SEQ ID NO: 1370167 - DNA, 25 bp, Homo sapien
tcaccacagtcacatgtgcaggggg

SEQ ID NO: 1370168 - DNA, 25 bp, Homo sapien
taatttggtagcaatcatccttcca

SEQ ID NO: 1370169 - DNA, 25 bp, Homo sapien
ggtagcaatcatccttccatggctc

SEQ ID NO: 1370170 - DNA, 25 bp, Homo sapien
ttccatggctccgttcactagtgta

SEQ ID NO: 1370171 - DNA, 25 bp, Homo sapien
gctccgttcactagtgtagatgaaa

SEQ ID NO: 1370172 - DNA, 25 bp, Homo sapien
tgtgctttgtagccagtgcagagaa

SEQ ID NO: 1370173 - DNA, 25 bp, Homo sapien
aaccccactaagtcctgcttggatc

SEQ ID NO: 1370174 - DNA, 25 bp, Homo sapien
ccccactaagtcctgcttggatcct

SEQ ID NO: 1370175 - DNA, 25 bp, Homo sapien
gaaccccactaagtcctgcttggat

SEQ ID NO: 1370176 - DNA, 25 bp, Homo sapien
gattcctgtggccaatgctataggt

SEQ ID NO: 1370177 - DNA, 25 bp, Homo sapien
gttcgagaaagtcgtgataatgttt

SEQ ID NO: 1370178 - DNA, 25 bp, Homo sapien
ctgtggccaatgctataggtgttcg

SEQ ID NO: 1370179 - DNA, 25 bp, Homo sapien
tgctataggtgttcgagaaagtcgt

SEQ ID NO: 1370180 - DNA, 25 bp, Homo sapien
aagaagcccttgttctctctgtgtc

SEQ ID NO: 1370181 - DNA, 25 bp, Homo sapien
gatgcttccaagcaagaagcccttg

SEQ ID NO: 1370182 - DNA, 25 bp, Homo sapien
ctctgtgtcttctacatggtggaca

SEQ ID NO: 1370183 - DNA, 25 bp, Homo sapien
cagaaaagcctccaggatgcttcca

SEQ ID NO: 1370184 - DNA, 25 bp, Homo sapien
ctgaacccagtgaggccacccactc

SEQ ID NO: 1370185 - DNA, 25 bp, Homo sapien
atcctgaacccagtgaggccaccca

SEQ ID NO: 1370186 - DNA, 25 bp, Homo sapien
cctgaacccagtgaggccacccact

SEQ ID NO: 1370187 - DNA, 25 bp, Homo sapien
tgaacccagtgaggccacccactcc

SEQ ID NO: 1370188 - DNA, 25 bp, Homo sapien
ttgtgtccccataggaccccggaca

SEQ ID NO: 1370189 - DNA, 25 bp, Homo sapien
ggtctgtgtcccctttgtgtcccca

SEQ ID NO: 1370190 - DNA, 25 bp, Homo sapien
tgtgtccccataggaccccggacat

SEQ ID NO: 1370191 - DNA, 25 bp, Homo sapien
tgtcccctttgtgtccccataggac

SEQ ID NO: 1370192 - DNA, 25 bp, Homo sapien
gaggtgggctctgcaagggcaatca

SEQ ID NO: 1370193 - DNA, 25 bp, Homo sapien
tgggctctgcaagggcaatcaggca

SEQ ID NO: 1370194 - DNA, 25 bp, Homo sapien
ctctgcaagggcaatcaggcagctg

SEQ ID NO: 1370195 - DNA, 25 bp, Homo sapien
tgcaagggcaatcaggcagctgcat

SEQ ID NO: 1370196 - DNA, 25 bp, Homo sapien
aaatgcaagacgagcttgggggttc

SEQ ID NO: 1370197 - DNA, 25 bp, Homo sapien
caaatgcaagacgagcttgggggtt

SEQ ID NO: 1370198 - DNA, 25 bp, Homo sapien
tcaagaaggggtccacggcatcaca

SEQ ID NO: 1370199 - DNA, 25 bp, Homo sapien
cattaggttgctatctagcagcaga

SEQ ID NO: 1370200 - DNA, 25 bp, Homo sapien
caacattaggttgctatctagcagc

SEQ ID NO: 1370201 - DNA, 25 bp, Homo sapien
ctacaacattaggttgctatctagc

SEQ ID NO: 1370202 - DNA, 25 bp, Homo sapien
ggttgctatctagcagcagaggctc

SEQ ID NO: 1370203 - DNA, 25 bp, Homo sapien
gatgcttttagagttgtacaacaag

SEQ ID NO: 1370204 - DNA, 25 bp, Homo sapien
tactgataggtatacataaactttt

SEQ ID NO: 1370205 - DNA, 25 bp, Homo sapien
gaaattgcgcttttctattgatttt

SEQ ID NO: 1370206 - DNA, 25 bp, Homo sapien
ctaggaggtgaaactgctatgaaat

SEQ ID NO: 1370207 - DNA, 25 bp, Homo sapien
ggactccgatgctttacactcacag

SEQ ID NO: 1370208 - DNA, 25 bp, Homo sapien
tcaagtgatgcctacaggactccga

SEQ ID NO: 1370209 - DNA, 25 bp, Homo sapien
taagatactgggcatgactggcaat

SEQ ID NO: 1370210 - DNA, 25 bp, Homo sapien
gatgcctacaggactccgatgcttt

SEQ ID NO: 1370211 - DNA, 25 bp, Homo sapien
ctcaattgcctgactttcttgagaa

SEQ ID NO: 1370212 - DNA, 25 bp, Homo sapien
cttgattctcatagtcaaaatatat

SEQ ID NO: 1370213 - DNA, 25 bp, Homo sapien
tcaattgcctgactttcttgagaat

SEQ ID NO: 1370214 - DNA, 25 bp, Homo sapien
attcagttttacgacacaagaattg

SEQ ID NO: 1370215 - DNA, 25 bp, Homo sapien
caacccttccaagttgagctttata

SEQ ID NO: 1370216 - DNA, 25 bp, Homo sapien
tgcttactagccttagggagtcatc

SEQ ID NO: 1370217 - DNA, 25 bp, Homo sapien
cagcgataataagaatatgagccct

SEQ ID NO: 1370218 - DNA, 25 bp, Homo sapien
tgtaaacagcgataataagaatatg

SEQ ID NO: 1370219 - DNA, 25 bp, Homo sapien
gacttaaaacaacaagatgagcatg

SEQ ID NO: 1370220 - DNA, 25 bp, Homo sapien
caagtaaccatggaagtggcagtga

SEQ ID NO: 1370221 - DNA, 25 bp, Homo sapien
tgaattggatcacaggattgactta

SEQ ID NO: 1370222 - DNA, 25 bp, Homo sapien
aagtaaagtcagtctcatctggcaa

SEQ ID NO: 1370223 - DNA, 25 bp, Homo sapien
caggaagaaccttcgaaaatgtttg

SEQ ID NO: 1370224 - DNA, 25 bp, Homo sapien
tcagcaaatgcatcggcagagcagt

SEQ ID NO: 1370225 - DNA, 25 bp, Homo sapien
cctggagagtcagcaaatgcatcgg

SEQ ID NO: 1370226 - DNA, 25 bp, Homo sapien
tcggcagagcagttacaatgataag

SEQ ID NO: 1370227 - DNA, 25 bp, Homo sapien
ccctacagagcggggagctttccac

SEQ ID NO: 1370228 - DNA, 25 bp, Homo sapien
cactgtgggggttcaaagaagatga

SEQ ID NO: 1370229 - DNA, 25 bp, Homo sapien
tgtgggggttcaaagaagatgattc

SEQ ID NO: 1370230 - DNA, 25 bp, Homo sapien
tacagagcggggagctttccactgt

SEQ ID NO: 1370231 - DNA, 25 bp, Homo sapien
aaacagaagtgctcccacaggatgc

SEQ ID NO: 1370232 - DNA, 25 bp, Homo sapien
aacagaagtgctcccacaggatgct

SEQ ID NO: 1370233 - DNA, 25 bp, Homo sapien
gaaacagaagtgctcccacaggatg

SEQ ID NO: 1370234 - DNA, 25 bp, Homo sapien
ggaaacagaagtgctcccacaggat

SEQ ID NO: 1370235 - DNA, 25 bp, Homo sapien
acttctacccagaaaacagtgcagt

SEQ ID NO: 1370236 - DNA, 25 bp, Homo sapien
cactaccattggtgcccaacagtct

SEQ ID NO: 1370237 - DNA, 25 bp, Homo sapien
gtgcttgaggtccaaaggcttcact

SEQ ID NO: 1370238 - DNA, 25 bp, Homo sapien
ccacttctacccagaaaacagtgca

SEQ ID NO: 1370239 - DNA, 25 bp, Homo sapien
aaaaatcttagcattcaagcaacta

SEQ ID NO: 1370240 - DNA, 25 bp, Homo sapien
aaaatcttagcattcaagcaactaa

SEQ ID NO: 1370241 - DNA, 25 bp, Homo sapien
aaatcttagcattcaagcaactaag

SEQ ID NO: 1370242 - DNA, 25 bp, Homo sapien
aactaagactccaaaactctgaaag

SEQ ID NO: 1370243 - DNA, 25 bp, Homo sapien
ttagtgcttagctgataatagtcct

SEQ ID NO: 1370244 - DNA, 25 bp, Homo sapien
catggaataattctcgatgactgat

SEQ ID NO: 1370245 - DNA, 25 bp, Homo sapien
taagattatagacgttgagccagca

SEQ ID NO: 1370246 - DNA, 25 bp, Homo sapien
acctagccccttgagacatttcttg

SEQ ID NO: 1370247 - DNA, 25 bp, Homo sapien
aattgttcagcaaaaatagcggtat

SEQ ID NO: 1370248 - DNA, 25 bp, Homo sapien
gctgtaccatttgaagtatttaggg

SEQ ID NO: 1370249 - DNA, 25 bp, Homo sapien
ggacaaatgtcatgatgcctatcta

SEQ ID NO: 1370250 - DNA, 25 bp, Homo sapien
tatccttattttgacggctgtacca

SEQ ID NO: 1370251 - DNA, 25 bp, Homo sapien
ttttgacggtgcctgtcctgaacct

SEQ ID NO: 1370252 - DNA, 25 bp, Homo sapien
cttttgacggtgcctgtcctgaacc

SEQ ID NO: 1370253 - DNA, 25 bp, Homo sapien
ccttttgacggtgcctgtcctgaac

SEQ ID NO: 1370254 - DNA, 25 bp, Homo sapien
tccttttgacggtgcctgtcctgaa

SEQ ID NO: 1370255 - DNA, 25 bp, Homo sapien
agcaaagaagttaactaacaagatt

SEQ ID NO: 1370256 - DNA, 25 bp, Homo sapien
ttctaatattatgccaggggaaaca

SEQ ID NO: 1370257 - DNA, 25 bp, Homo sapien
caaagttacagatactgtcatgatg

SEQ ID NO: 1370258 - DNA, 25 bp, Homo sapien
catacagtacggaaacgaacaaagt

SEQ ID NO: 1370259 - DNA, 25 bp, Homo sapien
ctttccaaagtcacgaacatcaaac

SEQ ID NO: 1370260 - DNA, 25 bp, Homo sapien
gtcaaatgcctcgaaaagttcactt

SEQ ID NO: 1370261 - DNA, 25 bp, Homo sapien
aagtcacgaacatcaaacaagtcaa

SEQ ID NO: 1370262 - DNA, 25 bp, Homo sapien
tctcacaacaggccgtgagaaatgt

SEQ ID NO: 1370263 - DNA, 25 bp, Homo sapien
ttctgcgcaaggtgctgaataagat

SEQ ID NO: 1370264 - DNA, 25 bp, Homo sapien
gtggtccctcatgttcaacgacctt

SEQ ID NO: 1370265 - DNA, 25 bp, Homo sapien
cacttattaggttctgcgcaaggtg

SEQ ID NO: 1370266 - DNA, 25 bp, Homo sapien
tcatgttcaacgaccttacagccca

SEQ ID NO: 1370267 - DNA, 25 bp, Homo sapien
tcagggccactacgtagacactggc

SEQ ID NO: 1370268 - DNA, 25 bp, Homo sapien
gacactggccaaatgaccctttggt

SEQ ID NO: 1370269 - DNA, 25 bp, Homo sapien
caaaagagcttgtggaattgcctcc

SEQ ID NO: 1370270 - DNA, 25 bp, Homo sapien
tccttcctcaattgagttaaaatgc

SEQ ID NO: 1370271 - DNA, 25 bp, Homo sapien
aatagaaggctacaccaattgtctc

SEQ ID NO: 1370272 - DNA, 25 bp, Homo sapien
aaaagaatcaacaaggggctcccat

SEQ ID NO: 1370273 - DNA, 25 bp, Homo sapien
agacagtcttgaatcatggatgcca

SEQ ID NO: 1370274 - DNA, 25 bp, Homo sapien
tggccaaacataggacaagttgaac

SEQ ID NO: 1370275 - DNA, 25 bp, Homo sapien
caggctatctgcagctttgaggaga

SEQ ID NO: 1370276 - DNA, 25 bp, Homo sapien
aaaatatagcggcacagcgaggcaa

SEQ ID NO: 1370277 - DNA, 25 bp, Homo sapien
gagttggtagtacatgaacccatca

SEQ ID NO: 1370278 - DNA, 25 bp, Homo sapien
gagaggagacgtgctacaagaaaca

SEQ ID NO: 1370279 - DNA, 25 bp, Homo sapien
aattgctttgggctgtaaaaactgc

SEQ ID NO: 1370280 - DNA, 25 bp, Homo sapien
gattccagaaccatttccgaggcca

SEQ ID NO: 1370281 - DNA, 25 bp, Homo sapien
aatttttagtcttgggcaacagcat

SEQ ID NO: 1370282 - DNA, 25 bp, Homo sapien
ccaagtgaactctagaagattcgag

SEQ ID NO: 1370283 - DNA, 25 bp, Homo sapien
ccaagagggtgttgttatgaggcac

SEQ ID NO: 1370284 - DNA, 25 bp, Homo sapien
tttggagcgttggaacatgaccagg

SEQ ID NO: 1370285 - DNA, 25 bp, Homo sapien
gaggcactgcaaagaggtgaatgaa

SEQ ID NO: 1370286 - DNA, 25 bp, Homo sapien
acagtaaaagcaaggtggtaagcca

SEQ ID NO: 1370287 - DNA, 25 bp, Homo sapien
gcaccagtcttataacatccaataa

SEQ ID NO: 1370288 - DNA, 25 bp, Homo sapien
cagctgcatgtacttttgcaccagt

SEQ ID NO: 1370289 - DNA, 25 bp, Homo sapien
ttttgcaccagtcttataacatcca

SEQ ID NO: 1370290 - DNA, 25 bp, Homo sapien
gctgcatgtacttttgcaccagtct

SEQ ID NO: 1370291 - DNA, 25 bp, Homo sapien
cttcatatgatttatctctatgcct

SEQ ID NO: 1370292 - DNA, 25 bp, Homo sapien
tactatcaggtgtttgcccaccaca

SEQ ID NO: 1370293 - DNA, 25 bp, Homo sapien
tgtcaaggtcaccaaggaaacttat

SEQ ID NO: 1370294 - DNA, 25 bp, Homo sapien
taaagagctgtctatacttgctgtc

SEQ ID NO: 1370295 - DNA, 25 bp, Homo sapien
tatttcacttgatcagcagcatttg

SEQ ID NO: 1370296 - DNA, 25 bp, Homo sapien
gcctgttctttcttagggactgccc

SEQ ID NO: 1370297 - DNA, 25 bp, Homo sapien
aaatacgtatggctctccccacttc

SEQ ID NO: 1370298 - DNA, 25 bp, Homo sapien
ctgttctttcttagggactgcccac

SEQ ID NO: 1370299 - DNA, 25 bp, Homo sapien
ttttaaatacgtatggctctcccca

SEQ ID NO: 1370300 - DNA, 25 bp, Homo sapien
gaatctgaagtgcaggggaccctga

SEQ ID NO: 1370301 - DNA, 25 bp, Homo sapien
aacaggcaaggaatgcagaatctga

SEQ ID NO: 1370302 - DNA, 25 bp, Homo sapien
tccttcttaaaaggcgctgctctgg

SEQ ID NO: 1370303 - DNA, 25 bp, Homo sapien
taaatcatataaagtccgttccttc

SEQ ID NO: 1370304 - DNA, 25 bp, Homo sapien
aagctttcgcattcagcttgaggag

SEQ ID NO: 1370305 - DNA, 25 bp, Homo sapien
ggacgcaaagctttcgcattcagct

SEQ ID NO: 1370306 - DNA, 25 bp, Homo sapien
catctccggacgcaaagctttcgca

SEQ ID NO: 1370307 - DNA, 25 bp, Homo sapien
tccggacgcaaagctttcgcattca

SEQ ID NO: 1370308 - DNA, 25 bp, Homo sapien
cgagtcccaggtcacccggtggttg

SEQ ID NO: 1370309 - DNA, 25 bp, Homo sapien
caaggtcgaacacctgagccgagtc

SEQ ID NO: 1370310 - DNA, 25 bp, Homo sapien
actccatcgcggagggtctgcgcaa

SEQ ID NO: 1370311 - DNA, 25 bp, Homo sapien
catctgcggcctcaggttgatctcc

SEQ ID NO: 1370312 - DNA, 25 bp, Homo sapien
ttccccgcgcgggatcgagggagca

SEQ ID NO: 1370313 - DNA, 25 bp, Homo sapien
gccgcgcacaggcttccgactccag

SEQ ID NO: 1370314 - DNA, 25 bp, Homo sapien
cgccgcgctaggctcggctccggtc

SEQ ID NO: 1370315 - DNA, 25 bp, Homo sapien
gccggtctcgctgcggtccgcaagt

SEQ ID NO: 1370316 - DNA, 25 bp, Homo sapien
gcagtctatcttgatcacacttatg

SEQ ID NO: 1370317 - DNA, 25 bp, Homo sapien
gccactgggaaagacggatgatcaa

SEQ ID NO: 1370318 - DNA, 25 bp, Homo sapien
gcaagggttgtagcctcgcagtcta

SEQ ID NO: 1370319 - DNA, 25 bp, Homo sapien
gatgatcaatactcacagtgcaagg

SEQ ID NO: 1370320 - DNA, 25 bp, Homo sapien
tcattgaaacagtgatagccacgtg

SEQ ID NO: 1370321 - DNA, 25 bp, Homo sapien
tggaagatacgagatcagtgcttgg

SEQ ID NO: 1370322 - DNA, 25 bp, Homo sapien
gaggcgtcagcataggaaatcattg

SEQ ID NO: 1370323 - DNA, 25 bp, Homo sapien
tagccacgtgatcaaaggtaagact

SEQ ID NO: 1370324 - DNA, 25 bp, Homo sapien
cacttggggccaaccctgattcaat

SEQ ID NO: 1370325 - DNA, 25 bp, Homo sapien
taaatgggtagaaaccactgccatg

SEQ ID NO: 1370326 - DNA, 25 bp, Homo sapien
tctgacttatagagcccaaaaatgt

SEQ ID NO: 1370327 - DNA, 25 bp, Homo sapien
gattcaatatctgacttatagagcc

SEQ ID NO: 1370328 - DNA, 25 bp, Homo sapien
ctggtaagaacagcacctacattta

SEQ ID NO: 1370329 - DNA, 25 bp, Homo sapien
tcctgttaagactgatgacacgaac

SEQ ID NO: 1370330 - DNA, 25 bp, Homo sapien
ggtaagaacagcacctacatttatg

SEQ ID NO: 1370331 - DNA, 25 bp, Homo sapien
tgttaagactgatgacacgaacccc

SEQ ID NO: 1370332 - DNA, 25 bp, Homo sapien
ggcaatctgagtctctaggactttg

SEQ ID NO: 1370333 - DNA, 25 bp, Homo sapien
tactaatatacacagtgccataagc

SEQ ID NO: 1370334 - DNA, 25 bp, Homo sapien
ttttgcttgtactacatccagcagg

SEQ ID NO: 1370335 - DNA, 25 bp, Homo sapien
taagcatcactatttgtgaggtcct

SEQ ID NO: 1370336 - DNA, 25 bp, Homo sapien
tgatggccaactacccctatgcagt

SEQ ID NO: 1370337 - DNA, 25 bp, Homo sapien
gacggcttttaactcagtatgaaca

SEQ ID NO: 1370338 - DNA, 25 bp, Homo sapien
tccttgactaaataggcctcgaggc

SEQ ID NO: 1370339 - DNA, 25 bp, Homo sapien
caaaccctattacagacttgacggc

SEQ ID NO: 1370340 - DNA, 25 bp, Homo sapien
cagcttccccttcctaatcactagg

SEQ ID NO: 1370341 - DNA, 25 bp, Homo sapien
tctgggtctcataggaccactcagc

SEQ ID NO: 1370342 - DNA, 25 bp, Homo sapien
tgcacagaagtgtcctcccagggtt

SEQ ID NO: 1370343 - DNA, 25 bp, Homo sapien
aatgcacagtaaattggggcctaca

SEQ ID NO: 1370344 - DNA, 25 bp, Homo sapien
tgctttgctgttaaagacggaatga

SEQ ID NO: 1370345 - DNA, 25 bp, Homo sapien
actctatggtggaggtcatccaggc

SEQ ID NO: 1370346 - DNA, 25 bp, Homo sapien
aagagaactctatggtggaggtcat

SEQ ID NO: 1370347 - DNA, 25 bp, Homo sapien
gacggaatgagcatcttctctacac

SEQ ID NO: 1370348 - DNA, 25 bp, Homo sapien
ttttccggacgcatgtgaaatgcca

SEQ ID NO: 1370349 - DNA, 25 bp, Homo sapien
gacaacccaccttgtctagggacag

SEQ ID NO: 1370350 - DNA, 25 bp, Homo sapien
gacagctcatgttatcggaaagacc

SEQ ID NO: 1370351 - DNA, 25 bp, Homo sapien
tctattagggagaaaccaactgagt

SEQ ID NO: 1370352 - DNA, 25 bp, Homo sapien
tgtttttgcttgaaaggatcatcgc

SEQ ID NO: 1370353 - DNA, 25 bp, Homo sapien
aggatcatcgctgcgtgcctgtctt

SEQ ID NO: 1370354 - DNA, 25 bp, Homo sapien
tgaaaggatcatcgctgcgtgcctg

SEQ ID NO: 1370355 - DNA, 25 bp, Homo sapien
tgcttgaaaggatcatcgctgcgtg

SEQ ID NO: 1370356 - DNA, 25 bp, Homo sapien
aaattcgagtcgtggtgtacctcag

SEQ ID NO: 1370357 - DNA, 25 bp, Homo sapien
gaacaggtctaaattcgagtcgtgg

SEQ ID NO: 1370358 - DNA, 25 bp, Homo sapien
gtgtacctcagatggttcaccctta

SEQ ID NO: 1370359 - DNA, 25 bp, Homo sapien
taagatgctgaacaggtctaaattc

SEQ ID NO: 1370360 - DNA, 25 bp, Homo sapien
agcagcaggcagaccaacaaagcag

SEQ ID NO: 1370361 - DNA, 25 bp, Homo sapien
tcatttcattgtcactaggcttcac

SEQ ID NO: 1370362 - DNA, 25 bp, Homo sapien
gttcatttcattgtcactaggcttc

SEQ ID NO: 1370363 - DNA, 25 bp, Homo sapien
ttcatttcattgtcactaggcttca

SEQ ID NO: 1370364 - DNA, 25 bp, Homo sapien
tgttcatttcattgtcactaggctt

SEQ ID NO: 1370365 - DNA, 25 bp, Homo sapien
ccagcagcatgcagatattgccaag

SEQ ID NO: 1370366 - DNA, 25 bp, Homo sapien
ccaggcaataggcataggaaatgag

SEQ ID NO: 1370367 - DNA, 25 bp, Homo sapien
taggcataggaaatgagtaggcagc

SEQ ID NO: 1370368 - DNA, 25 bp, Homo sapien
cagcagcatgcagatattgccaagt

SEQ ID NO: 1370369 - DNA, 25 bp, Homo sapien
tccaccctgactgcgggaccacagc

SEQ ID NO: 1370370 - DNA, 25 bp, Homo sapien
gggaccacagcgacatgttggagac

SEQ ID NO: 1370371 - DNA, 25 bp, Homo sapien
ttccaccctgactgcgggaccacag

SEQ ID NO: 1370372 - DNA, 25 bp, Homo sapien
tgcgggaccacagcgacatgttgga

SEQ ID NO: 1370373 - DNA, 25 bp, Homo sapien
tttctacagtagcatcttcagtcat

SEQ ID NO: 1370374 - DNA, 25 bp, Homo sapien
caaggagcctatttctacagtagca

SEQ ID NO: 1370375 - DNA, 25 bp, Homo sapien
tatttctacagtagcatcttcagtc

SEQ ID NO: 1370376 - DNA, 25 bp, Homo sapien
cactgaaatcaaggagcctatttct

SEQ ID NO: 1370377 - DNA, 25 bp, Homo sapien
ccaattggccagtttcgttctctaa

SEQ ID NO: 1370378 - DNA, 25 bp, Homo sapien
ccaggaggttctgagtaaggtctgc

SEQ ID NO: 1370379 - DNA, 25 bp, Homo sapien
cacagaccaatcttgcagaagccag

SEQ ID NO: 1370380 - DNA, 25 bp, Homo sapien
gctgctgcctgcttactgagtgtgc

SEQ ID NO: 1370381 - DNA, 25 bp, Homo sapien
ctgtaaccaggcagttctctcaagc

SEQ ID NO: 1370382 - DNA, 25 bp, Homo sapien
gtaaccaggcagttctctcaagcca

SEQ ID NO: 1370383 - DNA, 25 bp, Homo sapien
tgtaaccaggcagttctctcaagcc

SEQ ID NO: 1370384 - DNA, 25 bp, Homo sapien
taaccaggcagttctctcaagccat

SEQ ID NO: 1370385 - DNA, 25 bp, Homo sapien
tgtcagacagcttcttgcacctgac

SEQ ID NO: 1370386 - DNA, 25 bp, Homo sapien
ccagtgtctacttggccttccagtg

SEQ ID NO: 1370387 - DNA, 25 bp, Homo sapien
cttccagtgtctacttggccttcca

SEQ ID NO: 1370388 - DNA, 25 bp, Homo sapien
ccttccagtgtcagacagcttcttg

SEQ ID NO: 1370389 - DNA, 25 bp, Homo sapien
taaagggccattattccagactcat

SEQ ID NO: 1370390 - DNA, 25 bp, Homo sapien
gcatcttagataccaatagggactc

SEQ ID NO: 1370391 - DNA, 25 bp, Homo sapien
catctgcgtgcaggtttgtgaacat

SEQ ID NO: 1370392 - DNA, 25 bp, Homo sapien
taggagggtgatctattcccaaagg

SEQ ID NO: 1370393 - DNA, 25 bp, Homo sapien
ggcaatgataagatgctctgcttct

SEQ ID NO: 1370394 - DNA, 25 bp, Homo sapien
aatgataagatgctctgcttctggg

SEQ ID NO: 1370395 - DNA, 25 bp, Homo sapien
tgcaggcaatgataagatgctctgc

SEQ ID NO: 1370396 - DNA, 25 bp, Homo sapien
cccagctgcaggcaatgataagatg

SEQ ID NO: 1370397 - DNA, 25 bp, Homo sapien
caatgttgattttgagcatccagga

SEQ ID NO: 1370398 - DNA, 25 bp, Homo sapien
cagagcagtggttaactctactggg

SEQ ID NO: 1370399 - DNA, 25 bp, Homo sapien
gagaatttgggtaaaacttcacaga

SEQ ID NO: 1370400 - DNA, 25 bp, Homo sapien
catgaagaccattgaacaaggtcgg

SEQ ID NO: 1370401 - DNA, 25 bp, Homo sapien
ctggaaggtgtgaaaggtgctttgg

SEQ ID NO: 1370402 - DNA, 25 bp, Homo sapien
tgtgaaaggtgctttgggtccgaga

SEQ ID NO: 1370403 - DNA, 25 bp, Homo sapien
gtgaaaggtgctttgggtccgagaa

SEQ ID NO: 1370404 - DNA, 25 bp, Homo sapien
aggtgtgaaaggtgctttgggtccg

SEQ ID NO: 1370405 - DNA, 25 bp, Homo sapien
aagaggatctgttgtggagtggact

SEQ ID NO: 1370406 - DNA, 25 bp, Homo sapien
aggatctgttgtggagtggactcat

SEQ ID NO: 1370407 - DNA, 25 bp, Homo sapien
tgttgtggagtggactcattcagaa

SEQ ID NO: 1370408 - DNA, 25 bp, Homo sapien
gatctgttgtggagtggactcattc

SEQ ID NO: 1370409 - DNA, 25 bp, Homo sapien
gaggacgaggggcaggaggaaacca

SEQ ID NO: 1370410 - DNA, 25 bp, Homo sapien
ctgaggacgaggggcaggaggaaac

SEQ ID NO: 1370411 - DNA, 25 bp, Homo sapien
aagggagaaaaataattcactcctg

SEQ ID NO: 1370412 - DNA, 25 bp, Homo sapien
gggagaaaaataattcactcctgct

SEQ ID NO: 1370413 - DNA, 25 bp, Homo sapien
tgcctctgcaacaatctccagaaag

SEQ ID NO: 1370414 - DNA, 25 bp, Homo sapien
agaccgctgaccgaagacccctggt

SEQ ID NO: 1370415 - DNA, 25 bp, Homo sapien
cctaaatatgggtggattgaagacc

SEQ ID NO: 1370416 - DNA, 25 bp, Homo sapien
aacttgccaaaggagtagaccgctg

SEQ ID NO: 1370417 - DNA, 25 bp, Homo sapien
ttcccaggaccgcttgagcatcaag

SEQ ID NO: 1370418 - DNA, 25 bp, Homo sapien
gggtatctgccgtccacagagctgg

SEQ ID NO: 1370419 - DNA, 25 bp, Homo sapien
tacttgcaatagtggtttcccagga

SEQ ID NO: 1370420 - DNA, 25 bp, Homo sapien
gagcatcaagcgtttctgatccggg

SEQ ID NO: 1370421 - DNA, 25 bp, Homo sapien
gaaacagagctcacgaccactggtt

SEQ ID NO: 1370422 - DNA, 25 bp, Homo sapien
catgggcagcaagtaagctccagca

SEQ ID NO: 1370423 - DNA, 25 bp, Homo sapien
tagagctgctcctgtcacatgggca

SEQ ID NO: 1370424 - DNA, 25 bp, Homo sapien
aatgggagccagtgcgaaacagagc

SEQ ID NO: 1370425 - DNA, 25 bp, Homo sapien
gtacccaggtaagcaagagccttgc

SEQ ID NO: 1370426 - DNA, 25 bp, Homo sapien
aggtaagcaagagccttgcacaccc

SEQ ID NO: 1370427 - DNA, 25 bp, Homo sapien
cccaggtaagcaagagccttgcaca

SEQ ID NO: 1370428 - DNA, 25 bp, Homo sapien
tacccaggtaagcaagagccttgca

SEQ ID NO: 1370429 - DNA, 25 bp, Homo sapien
ggatgagctttaaaccatgttcctc

SEQ ID NO: 1370430 - DNA, 25 bp, Homo sapien
caaagtaaagaaagtctcccacagt

SEQ ID NO: 1370431 - DNA, 25 bp, Homo sapien
ttgaccaatgaatgtttctcactgc

SEQ ID NO: 1370432 - DNA, 25 bp, Homo sapien
tacttagaaactcaagcacccaact

SEQ ID NO: 1370433 - DNA, 25 bp, Homo sapien
caaagactggctgggtgacacatag

SEQ ID NO: 1370434 - DNA, 25 bp, Homo sapien
tgacacatagctacagaaggcactg

SEQ ID NO: 1370435 - DNA, 25 bp, Homo sapien
tcatgctgactagggaaaactggga

SEQ ID NO: 1370436 - DNA, 25 bp, Homo sapien
caagggaccatgcaggctagaacaa

SEQ ID NO: 1370437 - DNA, 25 bp, Homo sapien
ccccgaggagagacatttgaatctt

SEQ ID NO: 1370438 - DNA, 25 bp, Homo sapien
ggcccacgtgtccaggtagcagtaa

SEQ ID NO: 1370439 - DNA, 25 bp, Homo sapien
tgctacctggagaatgggcccacgt

SEQ ID NO: 1370440 - DNA, 25 bp, Homo sapien
tgtgatggacataacagttcccaga

SEQ ID NO: 1370441 - DNA, 25 bp, Homo sapien
ataattccagttgagattttggtgg

SEQ ID NO: 1370442 - DNA, 25 bp, Homo sapien
agtacaagccgtctgtggatctacc

SEQ ID NO: 1370443 - DNA, 25 bp, Homo sapien
tccaggcacacagtacaagccgtct

SEQ ID NO: 1370444 - DNA, 25 bp, Homo sapien
cttttcttccggctgctttcatggg

SEQ ID NO: 1370445 - DNA, 25 bp, Homo sapien
cagggctgtaactctaatgggtaaa

SEQ ID NO: 1370446 - DNA, 25 bp, Homo sapien
gatgctggcaattgcacacagagct

SEQ ID NO: 1370447 - DNA, 25 bp, Homo sapien
gatactccacggcaaaatgagcctg

SEQ ID NO: 1370448 - DNA, 25 bp, Homo sapien
aactgccagtgtctgctacagccat

SEQ ID NO: 1370449 - DNA, 25 bp, Homo sapien
aaatatactatcttcaactctcggc

SEQ ID NO: 1370450 - DNA, 25 bp, Homo sapien
tttgtgctgcccatattgaaaacag

SEQ ID NO: 1370451 - DNA, 25 bp, Homo sapien
gaatcccaggcttatcatattataa

SEQ ID NO: 1370452 - DNA, 25 bp, Homo sapien
taatatgtatctctcacctttgtgc

SEQ ID NO: 1370453 - DNA, 25 bp, Homo sapien
tgcagaagctgatacaagtcaaagg

SEQ ID NO: 1370454 - DNA, 25 bp, Homo sapien
tcctgactaaaacggaatctgattc

SEQ ID NO: 1370455 - DNA, 25 bp, Homo sapien
tataactccaggaaccaaataatgg

SEQ ID NO: 1370456 - DNA, 25 bp, Homo sapien
tggcaggataaacggaatctttcaa

SEQ ID NO: 1370457 - DNA, 25 bp, Homo sapien
aagtttgaagtgaccattgttacca

SEQ ID NO: 1370458 - DNA, 25 bp, Homo sapien
ttcaattcgaggagaaaaagtcact

SEQ ID NO: 1370459 - DNA, 25 bp, Homo sapien
gaaagtttcaattatcaggctaaag

SEQ ID NO: 1370460 - DNA, 25 bp, Homo sapien
ttcagatttcggattcagggcagag

SEQ ID NO: 1370461 - DNA, 25 bp, Homo sapien
agggagcaccttcatgaagtttggg

SEQ ID NO: 1370462 - DNA, 25 bp, Homo sapien
gggtgatgcctctgtaaagtcctgg

SEQ ID NO: 1370463 - DNA, 25 bp, Homo sapien
ataattcgtcgaaagaggccaacca

SEQ ID NO: 1370464 - DNA, 25 bp, Homo sapien
tctgtaaagtcctggtattccttct

SEQ ID NO: 1370465 - DNA, 25 bp, Homo sapien
gaagcccaagacaacatccctttta

SEQ ID NO: 1370466 - DNA, 25 bp, Homo sapien
caattatgacccagaatgatattct

SEQ ID NO: 1370467 - DNA, 25 bp, Homo sapien
gactctaaagctggtacactttcca

SEQ ID NO: 1370468 - DNA, 25 bp, Homo sapien
taacagtgagtgtcctaactatagt

SEQ ID NO: 1370469 - DNA, 25 bp, Homo sapien
tcaaaacttgtagggtctacgcaac

SEQ ID NO: 1370470 - DNA, 25 bp, Homo sapien
caacaatggagactgtcacagtgag

SEQ ID NO: 1370471 - DNA, 25 bp, Homo sapien
cccaagaagtctgaggcaaggatct

SEQ ID NO: 1370472 - DNA, 25 bp, Homo sapien
caaccaggatggtacagtgtaatca

SEQ ID NO: 1370473 - DNA, 25 bp, Homo sapien
cacaggtgctggataaggcaccgca

SEQ ID NO: 1370474 - DNA, 25 bp, Homo sapien
gcatgcgagttctcaccaaagccaa

SEQ ID NO: 1370475 - DNA, 25 bp, Homo sapien
ccagggtttacagaatcttttgcaa

SEQ ID NO: 1370476 - DNA, 25 bp, Homo sapien
caaagccaatgggtagctggccagc

SEQ ID NO: 1370477 - DNA, 25 bp, Homo sapien
aacgagaaagtaggttacacagcgc

SEQ ID NO: 1370478 - DNA, 25 bp, Homo sapien
actcagcacaagaagtaaagtcctg

SEQ ID NO: 1370479 - DNA, 25 bp, Homo sapien
tcacacctaagaggacggccataat

SEQ ID NO: 1370480 - DNA, 25 bp, Homo sapien
aacacagaatgaccatatggctcag

SEQ ID NO: 1370481 - DNA, 25 bp, Homo sapien
tatgcctgcataaggtatgatacct

SEQ ID NO: 1370482 - DNA, 25 bp, Homo sapien
tattccagagtactgcccagttttg

SEQ ID NO: 1370483 - DNA, 25 bp, Homo sapien
tatgatacctaataaattgggaaca

SEQ ID NO: 1370484 - DNA, 25 bp, Homo sapien
gtaaaaagctcccaagccttcatgt

SEQ ID NO: 1370485 - DNA, 25 bp, Homo sapien
ctccattggatatataaaagtctgt

SEQ ID NO: 1370486 - DNA, 25 bp, Homo sapien
ttgtccttcttcagtaagtaacttc

SEQ ID NO: 1370487 - DNA, 25 bp, Homo sapien
ccttcttcagtaagtaacttcttgt

SEQ ID NO: 1370488 - DNA, 25 bp, Homo sapien
tccattggatatataaaagtctgtg

SEQ ID NO: 1370489 - DNA, 25 bp, Homo sapien
cacgtggcctcgagcaagttcatga

SEQ ID NO: 1370490 - DNA, 25 bp, Homo sapien
tgaccccaatacagccaaaatagtg

SEQ ID NO: 1370491 - DNA, 25 bp, Homo sapien
taaagtgacccaacatagctaactg

SEQ ID NO: 1370492 - DNA, 25 bp, Homo sapien
cctggctatcagtactaaagtgacc

SEQ ID NO: 1370493 - DNA, 25 bp, Homo sapien
taacaaaagccgacagagaagtgat

SEQ ID NO: 1370494 - DNA, 25 bp, Homo sapien
aaaacataatctgtggctgctcaac

SEQ ID NO: 1370495 - DNA, 25 bp, Homo sapien
ccttccagaggttagattgtgacac

SEQ ID NO: 1370496 - DNA, 25 bp, Homo sapien
gaggtgtcactccaaactcagctca

SEQ ID NO: 1370497 - DNA, 25 bp, Homo sapien
tcatatgcccagaatttaacagctg

SEQ ID NO: 1370498 - DNA, 25 bp, Homo sapien
caaagcgagcggatacctccttctt

SEQ ID NO: 1370499 - DNA, 25 bp, Homo sapien
tttgatgacgtttgtaccatttccc

SEQ ID NO: 1370500 - DNA, 25 bp, Homo sapien
tctgtcgaaagccaccaaatatgtt

SEQ ID NO: 1370501 - DNA, 25 bp, Homo sapien
ttttcaataccctttctaactgcaa

SEQ ID NO: 1370502 - DNA, 25 bp, Homo sapien
gatgagagggagtattgccatgatt

SEQ ID NO: 1370503 - DNA, 25 bp, Homo sapien
tatatataatgatgagagggagtat

SEQ ID NO: 1370504 - DNA, 25 bp, Homo sapien
tctagaacaaccacacaatcttttt

SEQ ID NO: 1370505 - DNA, 25 bp, Homo sapien
catctggaatagttaagctatcccc

SEQ ID NO: 1370506 - DNA, 25 bp, Homo sapien
tttcgtcttccgtgaattcatctgg

SEQ ID NO: 1370507 - DNA, 25 bp, Homo sapien
catgattttcagacggtccaaaggg

SEQ ID NO: 1370508 - DNA, 25 bp, Homo sapien
tcgagagacagcaccagcaatgcct

SEQ ID NO: 1370509 - DNA, 25 bp, Homo sapien
ctatggtttatagctccaaataagt

SEQ ID NO: 1370510 - DNA, 25 bp, Homo sapien
tatggtttatagctccaaataagta

SEQ ID NO: 1370511 - DNA, 25 bp, Homo sapien
tcaatgtctgtaacaggattaaata

SEQ ID NO: 1370512 - DNA, 25 bp, Homo sapien
tttccagaaacggataatttcctca

SEQ ID NO: 1370513 - DNA, 25 bp, Homo sapien
ttccagaaacggataatttcctcaa

SEQ ID NO: 1370514 - DNA, 25 bp, Homo sapien
tccagaaacggataatttcctcaat

SEQ ID NO: 1370515 - DNA, 25 bp, Homo sapien
gagtggttttgagtgaaattcttaa

SEQ ID NO: 1370516 - DNA, 25 bp, Homo sapien
tggtgaggagtgctttacttccaag

SEQ ID NO: 1370517 - DNA, 25 bp, Homo sapien
ggtgaggagtgctttacttccaagt

SEQ ID NO: 1370518 - DNA, 25 bp, Homo sapien
agttgagtggttttgagtgaaattc

SEQ ID NO: 1370519 - DNA, 25 bp, Homo sapien
aaaggatggcagtcaaataaaatgc

SEQ ID NO: 1370520 - DNA, 25 bp, Homo sapien
aaagctttggtgcatcctacaaatt

SEQ ID NO: 1370521 - DNA, 25 bp, Homo sapien
cttacagctgctggcacaaagaagg

SEQ ID NO: 1370522 - DNA, 25 bp, Homo sapien
actctgagtgtaccaggattttgac

SEQ ID NO: 1370523 - DNA, 25 bp, Homo sapien
tgtaattgttgtttgaccccaccac

SEQ ID NO: 1370524 - DNA, 25 bp, Homo sapien
catttgtcccagcacagaggtatat

SEQ ID NO: 1370525 - DNA, 25 bp, Homo sapien
gcatgagagtcctagtcactactta

SEQ ID NO: 1370526 - DNA, 25 bp, Homo sapien
cataagcatcctccacaaggcaagg

SEQ ID NO: 1370527 - DNA, 25 bp, Homo sapien
gcacgagcatcatctattgcacaca

SEQ ID NO: 1370528 - DNA, 25 bp, Homo sapien
ctttttgtctgcatgagcacgagca

SEQ ID NO: 1370529 - DNA, 25 bp, Homo sapien
taagaggcaggtatcccaatttcct

SEQ ID NO: 1370530 - DNA, 25 bp, Homo sapien
caccacctcaagctgttatagttta

SEQ ID NO: 1370531 - DNA, 25 bp, Homo sapien
ttgttgttcagaaatagtcagaccc

SEQ ID NO: 1370532 - DNA, 25 bp, Homo sapien
aaatagtcagacccagtgtctggag

SEQ ID NO: 1370533 - DNA, 25 bp, Homo sapien
aatagtcagacccagtgtctggaga

SEQ ID NO: 1370534 - DNA, 25 bp, Homo sapien
tgcttgttgttcagaaatagtcaga

SEQ ID NO: 1370535 - DNA, 25 bp, Homo sapien
tatgacatagtaagaggccctcacc

SEQ ID NO: 1370536 - DNA, 25 bp, Homo sapien
tgagaccacatgacccacaaagcta

SEQ ID NO: 1370537 - DNA, 25 bp, Homo sapien
aaagaaatctcattttacccagagg

SEQ ID NO: 1370538 - DNA, 25 bp, Homo sapien
gagacaagtagctacaactgagacc

SEQ ID NO: 1370539 - DNA, 25 bp, Homo sapien
gtctaaactcttaaatgccaatttc

SEQ ID NO: 1370540 - DNA, 25 bp, Homo sapien
gttgacatctccagtagtaaaaatt

SEQ ID NO: 1370541 - DNA, 25 bp, Homo sapien
tatttttgtctaaactcttaaatgc

SEQ ID NO: 1370542 - DNA, 25 bp, Homo sapien
catctttgttgacatctccagtagt

SEQ ID NO: 1370543 - DNA, 25 bp, Homo sapien
cctctagagattgaatggcccctac

SEQ ID NO: 1370544 - DNA, 25 bp, Homo sapien
cttgttatagtccaggtaccaaaag

SEQ ID NO: 1370545 - DNA, 25 bp, Homo sapien
attgaatggcccctacatcctccag

SEQ ID NO: 1370546 - DNA, 25 bp, Homo sapien
catccttgttatagtccaggtacca

SEQ ID NO: 1370547 - DNA, 25 bp, Homo sapien
gatgtctccctcgcagctccgcggc

SEQ ID NO: 1370548 - DNA, 25 bp, Homo sapien
cgaggatgtctccctcgcagctccg

SEQ ID NO: 1370549 - DNA, 25 bp, Homo sapien
aggatgtctccctcgcagctccgcg

SEQ ID NO: 1370550 - DNA, 25 bp, Homo sapien
gaggatgtctccctcgcagctccgc

SEQ ID NO: 1370551 - DNA, 25 bp, Homo sapien
cacaatgcaccttcatcggttaaag

SEQ ID NO: 1370552 - DNA, 25 bp, Homo sapien
ctcaggggcgccaaacacaatgcac

SEQ ID NO: 1370553 - DNA, 25 bp, Homo sapien
ttcatcggttaaagctctggaagga

SEQ ID NO: 1370554 - DNA, 25 bp, Homo sapien
gaagtgcgaccgacgaacgggatct

SEQ ID NO: 1370555 - DNA, 25 bp, Homo sapien
taagaaagtaaagctccagtaaggc

SEQ ID NO: 1370556 - DNA, 25 bp, Homo sapien
cattgggtgatcattcagcatacac

SEQ ID NO: 1370557 - DNA, 25 bp, Homo sapien
gaggttcctcaagaagttcaccagc

SEQ ID NO: 1370558 - DNA, 25 bp, Homo sapien
tgttaaaagctctgtccaggatgca

SEQ ID NO: 1370559 - DNA, 25 bp, Homo sapien
tgcactgcagcaaggtcgtcccttt

SEQ ID NO: 1370560 - DNA, 25 bp, Homo sapien
tgaagaggcctataactaccaaaga

SEQ ID NO: 1370561 - DNA, 25 bp, Homo sapien
tctgggacaatcagcacaaagtacc

SEQ ID NO: 1370562 - DNA, 25 bp, Homo sapien
attatgaaccttggacagaacaggc

SEQ ID NO: 1370563 - DNA, 25 bp, Homo sapien
atgccagtgtcagggaacgcttcaa

SEQ ID NO: 1370564 - DNA, 25 bp, Homo sapien
cctctttggataagagaatgccagt

SEQ ID NO: 1370565 - DNA, 25 bp, Homo sapien
ttcaacagggttggagaagttccac

SEQ ID NO: 1370566 - DNA, 25 bp, Homo sapien
tttccctctttggataagagaatgc

SEQ ID NO: 1370567 - DNA, 25 bp, Homo sapien
aaatttaacagtgcccgtgggccag

SEQ ID NO: 1370568 - DNA, 25 bp, Homo sapien
tgaaattgctcagtcgcaggtcaag

SEQ ID NO: 1370569 - DNA, 25 bp, Homo sapien
cgaaagagatcgaatgtgtgcgcct

SEQ ID NO: 1370570 - DNA, 25 bp, Homo sapien
taaaacggattacatgtctgcaagg

SEQ ID NO: 1370571 - DNA, 25 bp, Homo sapien
gctgctccgcgtcctggcaggccgc

SEQ ID NO: 1370572 - DNA, 25 bp, Homo sapien
cctcggcgtcctggcccagagggat

SEQ ID NO: 1370573 - DNA, 25 bp, Homo sapien
tgggcagcacgaagtcccgcagcca

SEQ ID NO: 1370574 - DNA, 25 bp, Homo sapien
agtgcctggaagagggtctcgtagc

SEQ ID NO: 1370575 - DNA, 25 bp, Homo sapien
gtcacgggagatcgagggctgcggg

SEQ ID NO: 1370576 - DNA, 25 bp, Homo sapien
ggctgcggggcgagaccgggaccag

SEQ ID NO: 1370577 - DNA, 25 bp, Homo sapien
gggcgcgcggcgcaacagcgtttgg

SEQ ID NO: 1370578 - DNA, 25 bp, Homo sapien
ctggccgaggaagtcacgggagatc

SEQ ID NO: 1370579 - DNA, 25 bp, Homo sapien
ccgcctccagagagccggaagtgag

SEQ ID NO: 1370580 - DNA, 25 bp, Homo sapien
cccgctgtcagcatgcgggtccgag

SEQ ID NO: 1370581 - DNA, 25 bp, Homo sapien
tccagggctgcagcgtcagcgcgtc

SEQ ID NO: 1370582 - DNA, 25 bp, Homo sapien
gtctcgggaggtgctgtgcggaccc

SEQ ID NO: 1370583 - DNA, 25 bp, Homo sapien
aattttttcgtggttgcacacctgg

SEQ ID NO: 1370584 - DNA, 25 bp, Homo sapien
ggcattgtctctcacggatgtctaa

SEQ ID NO: 1370585 - DNA, 25 bp, Homo sapien
cacacctgggatggcgattctgctt

SEQ ID NO: 1370586 - DNA, 25 bp, Homo sapien
tcaacagccatctgcgtgggcaacg

SEQ ID NO: 1370587 - DNA, 25 bp, Homo sapien
agtggtgcaataaacgtgcatgtga

SEQ ID NO: 1370588 - DNA, 25 bp, Homo sapien
gcaataaacgtgcatgtgaatgatt

SEQ ID NO: 1370589 - DNA, 25 bp, Homo sapien
ggtgcaataaacgtgcatgtgaatg

SEQ ID NO: 1370590 - DNA, 25 bp, Homo sapien
tagtggtgcaataaacgtgcatgtg

SEQ ID NO: 1370591 - DNA, 25 bp, Homo sapien
atgctgctagcatcacggagaaggg

SEQ ID NO: 1370592 - DNA, 25 bp, Homo sapien
cttcctgcaatctctccacttgtga

SEQ ID NO: 1370593 - DNA, 25 bp, Homo sapien
tctctccacttgtgatgctgtctct

SEQ ID NO: 1370594 - DNA, 25 bp, Homo sapien
tgctgtctctgatgctgctagcatc

SEQ ID NO: 1370595 - DNA, 25 bp, Homo sapien
gaagcagtgattattccatacccac

SEQ ID NO: 1370596 - DNA, 25 bp, Homo sapien
ggaagcagtgattattccataccca

SEQ ID NO: 1370597 - DNA, 25 bp, Homo sapien
gtggaagcagtgattattccatacc

SEQ ID NO: 1370598 - DNA, 25 bp, Homo sapien
agcagtgattattccatacccacaa

SEQ ID NO: 1370599 - DNA, 25 bp, Homo sapien
caagtgaccatcctagtatcaccgc

SEQ ID NO: 1370600 - DNA, 25 bp, Homo sapien
accaagtgaccatcctagtatcacc

SEQ ID NO: 1370601 - DNA, 25 bp, Homo sapien
ttaaccaagtgaccatcctagtatc

SEQ ID NO: 1370602 - DNA, 25 bp, Homo sapien
aagtgaccatcctagtatcaccgca

SEQ ID NO: 1370603 - DNA, 25 bp, Homo sapien
tgtttggacttaaacttgctttgct

SEQ ID NO: 1370604 - DNA, 25 bp, Homo sapien
tcctgccatcctttgcgtccttcca

SEQ ID NO: 1370605 - DNA, 25 bp, Homo sapien
ctgccatcctttgcgtccttccagc

SEQ ID NO: 1370606 - DNA, 25 bp, Homo sapien
tcatcctgccatcctttgcgtcctt

SEQ ID NO: 1370607 - DNA, 25 bp, Homo sapien
catcctgccatcctttgcgtccttc

SEQ ID NO: 1370608 - DNA, 25 bp, Homo sapien
gggccagcgaatctgaatgccagtc

SEQ ID NO: 1370609 - DNA, 25 bp, Homo sapien
tgcgggccagcgaatctgaatgcca

SEQ ID NO: 1370610 - DNA, 25 bp, Homo sapien
agcatgcgggccagcgaatctgaat

SEQ ID NO: 1370611 - DNA, 25 bp, Homo sapien
gcatgcgggccagcgaatctgaatg

SEQ ID NO: 1370612 - DNA, 25 bp, Homo sapien
acgcccttgtgtgttgcttgctgag

SEQ ID NO: 1370613 - DNA, 25 bp, Homo sapien
ttgacgcccttgtgtgttgcttgct

SEQ ID NO: 1370614 - DNA, 25 bp, Homo sapien
gacgcccttgtgtgttgcttgctga

SEQ ID NO: 1370615 - DNA, 25 bp, Homo sapien
cgcccttgtgtgttgcttgctgagc

SEQ ID NO: 1370616 - DNA, 25 bp, Homo sapien
gcctgtgaaacttgcacctctgact

SEQ ID NO: 1370617 - DNA, 25 bp, Homo sapien
ctgtgaaacttgcacctctgactgg

SEQ ID NO: 1370618 - DNA, 25 bp, Homo sapien
cctgtgaaacttgcacctctgactg

SEQ ID NO: 1370619 - DNA, 25 bp, Homo sapien
cttggggacaggccgcctcggtggg

SEQ ID NO: 1370620 - DNA, 25 bp, Homo sapien
gtgaactgagggagtcaagtaaact

SEQ ID NO: 1370621 - DNA, 25 bp, Homo sapien
atctcctcttgatcctttttaattt

SEQ ID NO: 1370622 - DNA, 25 bp, Homo sapien
tatctcctcttgatcctttttaatt

SEQ ID NO: 1370623 - DNA, 25 bp, Homo sapien
gcatggtgggctttggtcttctatc

SEQ ID NO: 1370624 - DNA, 25 bp, Homo sapien
tgggctttggtcttctatctcctct

SEQ ID NO: 1370625 - DNA, 25 bp, Homo sapien
gctggcaagacaaatcttattcaga

SEQ ID NO: 1370626 - DNA, 25 bp, Homo sapien
ggaacttgtaaggaacacgatagct

SEQ ID NO: 1370627 - DNA, 25 bp, Homo sapien
cacgtgctgcataggttggtgtgaa

SEQ ID NO: 1370628 - DNA, 25 bp, Homo sapien
gattaagaggcctgacagacacctg

SEQ ID NO: 1370629 - DNA, 25 bp, Homo sapien
acaccaatgacacatctcagtccag

SEQ ID NO: 1370630 - DNA, 25 bp, Homo sapien
gtccagccagggatgtgaagtgcaa

SEQ ID NO: 1370631 - DNA, 25 bp, Homo sapien
tgtgcttccaacttgatttttgatg

SEQ ID NO: 1370632 - DNA, 25 bp, Homo sapien
ttgatgctgatgcaaatcatcctgt

SEQ ID NO: 1370633 - DNA, 25 bp, Homo sapien
gatttatcatgttcacaatggagta

SEQ ID NO: 1370634 - DNA, 25 bp, Homo sapien
ctgggacaccaattggagatttatc

SEQ ID NO: 1370635 - DNA, 25 bp, Homo sapien
ccaattggagatttatcatgttcac

SEQ ID NO: 1370636 - DNA, 25 bp, Homo sapien
tggagatttatcatgttcacaatgg

SEQ ID NO: 1370637 - DNA, 25 bp, Homo sapien
gaaggatggaaggagtcaagcaaca

SEQ ID NO: 1370638 - DNA, 25 bp, Homo sapien
ggagtcaagcaacatccatccagtg

SEQ ID NO: 1370639 - DNA, 25 bp, Homo sapien
caaagtgctccaataagggtggtag

SEQ ID NO: 1370640 - DNA, 25 bp, Homo sapien
aagagccaagctgacttgcttgtct

SEQ ID NO: 1370641 - DNA, 25 bp, Homo sapien
ttgtcctttcacctcttcaagatca

SEQ ID NO: 1370642 - DNA, 25 bp, Homo sapien
cttgtcctttcacctcttcaagatc

SEQ ID NO: 1370643 - DNA, 25 bp, Homo sapien
tgccaagaaagagacttcacgatgc

SEQ ID NO: 1370644 - DNA, 25 bp, Homo sapien
tcccatttgggattggagtaatccc

SEQ ID NO: 1370645 - DNA, 25 bp, Homo sapien
gtaagagttggacttgtcatggtgt

SEQ ID NO: 1370646 - DNA, 25 bp, Homo sapien
cctggcaacatcctgagcggagcaa

SEQ ID NO: 1370647 - DNA, 25 bp, Homo sapien
tctggcaagtcctgcaggactccct

SEQ ID NO: 1370648 - DNA, 25 bp, Homo sapien
caaaacacatttctctggcaagtcc

SEQ ID NO: 1370649 - DNA, 25 bp, Homo sapien
cttctcttcagaatcctgcagcttt

SEQ ID NO: 1370650 - DNA, 25 bp, Homo sapien
ctagaatgagacaaaacacatttct

SEQ ID NO: 1370651 - DNA, 25 bp, Homo sapien
tcctcctcatggtcattttgatttt

SEQ ID NO: 1370652 - DNA, 25 bp, Homo sapien
ctggggggcactggcgctttcccct

SEQ ID NO: 1370653 - DNA, 25 bp, Homo sapien
tggggggcactggcgctttcccctc

SEQ ID NO: 1370654 - DNA, 25 bp, Homo sapien
cctcctcctcctcatggtcattttg

SEQ ID NO: 1370655 - DNA, 25 bp, Homo sapien
ggggaatgtttagagcttcctcctc

SEQ ID NO: 1370656 - DNA, 25 bp, Homo sapien
gggaatgtttagagcttcctcctct

SEQ ID NO: 1370657 - DNA, 25 bp, Homo sapien
ctgggggaatgtttagagcttcctc

SEQ ID NO: 1370658 - DNA, 25 bp, Homo sapien
tgggggaatgtttagagcttcctcc

SEQ ID NO: 1370659 - DNA, 25 bp, Homo sapien
cgacttcgtgttccttaaatgtgat

SEQ ID NO: 1370660 - DNA, 25 bp, Homo sapien
ttggagttagaagggttgtgactat

SEQ ID NO: 1370661 - DNA, 25 bp, Homo sapien
cagagcagagtcgacttcgtgttcc

SEQ ID NO: 1370662 - DNA, 25 bp, Homo sapien
gaagggttgtgactatttgaacaag

SEQ ID NO: 1370663 - DNA, 25 bp, Homo sapien
caaaaggcattgcaccccaagaagt

SEQ ID NO: 1370664 - DNA, 25 bp, Homo sapien
ccaaaaggcattgcaccccaagaag

SEQ ID NO: 1370665 - DNA, 25 bp, Homo sapien
ctcctcgtctttgtcgtcttcatcc

SEQ ID NO: 1370666 - DNA, 25 bp, Homo sapien
ctcgtctttgtcgtcttcatcctca

SEQ ID NO: 1370667 - DNA, 25 bp, Homo sapien
atcctcatcttcatcttcatcattt

SEQ ID NO: 1370668 - DNA, 25 bp, Homo sapien
tcctcatcttcatcttcatcatttt

SEQ ID NO: 1370669 - DNA, 25 bp, Homo sapien
tacagatgtgtccattgaaatattt

SEQ ID NO: 1370670 - DNA, 25 bp, Homo sapien
ctgcaaatacagatgtgtccattga

SEQ ID NO: 1370671 - DNA, 25 bp, Homo sapien
gcaaatacagatgtgtccattgaaa

SEQ ID NO: 1370672 - DNA, 25 bp, Homo sapien
gatgtgtccattgaaatatttccca

SEQ ID NO: 1370673 - DNA, 25 bp, Homo sapien
gaccctgggacttgtcagggtcatc

SEQ ID NO: 1370674 - DNA, 25 bp, Homo sapien
gggttttcagatgcttgttcagcca

SEQ ID NO: 1370675 - DNA, 25 bp, Homo sapien
aactgggtcagctcttttgcctgag

SEQ ID NO: 1370676 - DNA, 25 bp, Homo sapien
ctcagcttgtgaacaaggtgctctg

SEQ ID NO: 1370677 - DNA, 25 bp, Homo sapien
aatgaaacgccacagtcagtcaaga

SEQ ID NO: 1370678 - DNA, 25 bp, Homo sapien
taatatcctcgcagatgttccattc

SEQ ID NO: 1370679 - DNA, 25 bp, Homo sapien
ggccatgggcatctctatgtgaaaa

SEQ ID NO: 1370680 - DNA, 25 bp, Homo sapien
cacacagccttctgatatatgagag

SEQ ID NO: 1370681 - DNA, 25 bp, Homo sapien
tggactgcagttcatccctcagcac

SEQ ID NO: 1370682 - DNA, 25 bp, Homo sapien
gactgcagttcatccctcagcacag

SEQ ID NO: 1370683 - DNA, 25 bp, Homo sapien
actgcagttcatccctcagcacaga

SEQ ID NO: 1370684 - DNA, 25 bp, Homo sapien
catggactgcagttcatccctcagc

SEQ ID NO: 1370685 - DNA, 25 bp, Homo sapien
ctctttgaggtctcggaactgctga

SEQ ID NO: 1370686 - DNA, 25 bp, Homo sapien
taggcagtagcttgagttataagga

SEQ ID NO: 1370687 - DNA, 25 bp, Homo sapien
ggaactgctgattgctctctgccag

SEQ ID NO: 1370688 - DNA, 25 bp, Homo sapien
tgccagctgcgagcgcaattcctgg

SEQ ID NO: 1370689 - DNA, 25 bp, Homo sapien
gtttgtggcagaagaggtagagcca

SEQ ID NO: 1370690 - DNA, 25 bp, Homo sapien
gtggcagaagaggtagagccaggga

SEQ ID NO: 1370691 - DNA, 25 bp, Homo sapien
gctgacgtttgtggcagaagaggta

SEQ ID NO: 1370692 - DNA, 25 bp, Homo sapien
ttgtggcagaagaggtagagccagg

SEQ ID NO: 1370693 - DNA, 25 bp, Homo sapien
cgcaaaaacagggaccgggatgcct

SEQ ID NO: 1370694 - DNA, 25 bp, Homo sapien
gctccgactctgacaagagtgaggg

SEQ ID NO: 1370695 - DNA, 25 bp, Homo sapien
ggaggtagcagccagcgtaccaggt

SEQ ID NO: 1370696 - DNA, 25 bp, Homo sapien
tgatgaacacgacacaacactttag

SEQ ID NO: 1370697 - DNA, 25 bp, Homo sapien
agttgcaataacagaattagaaggt

SEQ ID NO: 1370698 - DNA, 25 bp, Homo sapien
tgcaataacagaattagaaggtggg

SEQ ID NO: 1370699 - DNA, 25 bp, Homo sapien
gcagttgcaataacagaattagaag

SEQ ID NO: 1370700 - DNA, 25 bp, Homo sapien
ctgcagttgcaataacagaattaga

SEQ ID NO: 1370701 - DNA, 25 bp, Homo sapien
tggtttctgtgatgctggaagaatg

SEQ ID NO: 1370702 - DNA, 25 bp, Homo sapien
ctattttttggtttctgtgatgctg

SEQ ID NO: 1370703 - DNA, 25 bp, Homo sapien
ggtttctgtgatgctggaagaatga

SEQ ID NO: 1370704 - DNA, 25 bp, Homo sapien
ttttggtttctgtgatgctggaaga

SEQ ID NO: 1370705 - DNA, 25 bp, Homo sapien
ccctccttcagcattgggaccgaaa

SEQ ID NO: 1370706 - DNA, 25 bp, Homo sapien
gaggtgtgccctccttcagcattgg

SEQ ID NO: 1370707 - DNA, 25 bp, Homo sapien
cagaggtgtgccctccttcagcatt

SEQ ID NO: 1370708 - DNA, 25 bp, Homo sapien
gcattgggaccgaaattcagaagtg

SEQ ID NO: 1370709 - DNA, 25 bp, Homo sapien
tgctgagaggcatgctttccactgg

SEQ ID NO: 1370710 - DNA, 25 bp, Homo sapien
catcagtgatctgggctcttcccaa

SEQ ID NO: 1370711 - DNA, 25 bp, Homo sapien
cagtgatctgggctcttcccaaagc

SEQ ID NO: 1370712 - DNA, 25 bp, Homo sapien
tcgtcctgctgaaccatttccacgc

SEQ ID NO: 1370713 - DNA, 25 bp, Homo sapien
gaaccatttccacgcactgtccaat

SEQ ID NO: 1370714 - DNA, 25 bp, Homo sapien
tgagaggcactggcgtgtttgtttt

SEQ ID NO: 1370715 - DNA, 25 bp, Homo sapien
ccagcagaataactcctacaactta

SEQ ID NO: 1370716 - DNA, 25 bp, Homo sapien
tattgtagctctaaatgagttttga

SEQ ID NO: 1370717 - DNA, 25 bp, Homo sapien
tacttctatatacttacactagtac

SEQ ID NO: 1370718 - DNA, 25 bp, Homo sapien
ttttctgaagtatctattcaagtct

SEQ ID NO: 1370719 - DNA, 25 bp, Homo sapien
tcttcttttctgaagtatctattca

SEQ ID NO: 1370720 - DNA, 25 bp, Homo sapien
tgtttcattgtgctgtttatcttat

SEQ ID NO: 1370721 - DNA, 25 bp, Homo sapien
ttgtttcattgtgctgtttatctta

SEQ ID NO: 1370722 - DNA, 25 bp, Homo sapien
tcaattctttggttaggtcagagac

SEQ ID NO: 1370723 - DNA, 25 bp, Homo sapien
gaaaagtcattgtaggcccaagcca

SEQ ID NO: 1370724 - DNA, 25 bp, Homo sapien
gaataagtatgtagtgcccactgag

SEQ ID NO: 1370725 - DNA, 25 bp, Homo sapien
tgtgtgctgttgtgctaatccctca

SEQ ID NO: 1370726 - DNA, 25 bp, Homo sapien
agactgcttcctaggtgggacccga

SEQ ID NO: 1370727 - DNA, 25 bp, Homo sapien
tctgctaagggacagtcagtctgcc

SEQ ID NO: 1370728 - DNA, 25 bp, Homo sapien
gaatttttacatactccggcagcac

SEQ ID NO: 1370729 - DNA, 25 bp, Homo sapien
ggaattccagtagctacagtcaggg

SEQ ID NO: 1370730 - DNA, 25 bp, Homo sapien
caactccgaggaggtgagaccggaa

SEQ ID NO: 1370731 - DNA, 25 bp, Homo sapien
cggctccgctagacagttgcagaag

SEQ ID NO: 1370732 - DNA, 25 bp, Homo sapien
tacgggatcctcttcgaagacctgg

SEQ ID NO: 1370733 - DNA, 25 bp, Homo sapien
taacgatgactacttacgctacggg

SEQ ID NO: 1370734 - DNA, 25 bp, Homo sapien
tattgaatgctaagtgttggagata

SEQ ID NO: 1370735 - DNA, 25 bp, Homo sapien
gatgacttggtctttcccttcaaaa

SEQ ID NO: 1370736 - DNA, 25 bp, Homo sapien
ggaataaattccactagaggggcat

SEQ ID NO: 1370737 - DNA, 25 bp, Homo sapien
gcactccttgaagctatcaaggtta

SEQ ID NO: 1370738 - DNA, 25 bp, Homo sapien
tatttgaactttggactctctagtg

SEQ ID NO: 1370739 - DNA, 25 bp, Homo sapien
taagtgttaatatatgatatcctga

SEQ ID NO: 1370740 - DNA, 25 bp, Homo sapien
tctagtgaggttgggtaagtgttaa

SEQ ID NO: 1370741 - DNA, 25 bp, Homo sapien
tccatttgtaggcaacctgcccttt

SEQ ID NO: 1370742 - DNA, 25 bp, Homo sapien
tggtgtcagcaggaatagctagtgc

SEQ ID NO: 1370743 - DNA, 25 bp, Homo sapien
cacggacatgcacggcacctttaga

SEQ ID NO: 1370744 - DNA, 25 bp, Homo sapien
tagctagtgcggttgcacggacatg

SEQ ID NO: 1370745 - DNA, 25 bp, Homo sapien
tccagatgaatttaccgaacaagaa

SEQ ID NO: 1370746 - DNA, 25 bp, Homo sapien
tgaagccactttttggattaacctg

SEQ ID NO: 1370747 - DNA, 25 bp, Homo sapien
agagatgttatcttttcctaagagg

SEQ ID NO: 1370748 - DNA, 25 bp, Homo sapien
taaaaaagctgagcttgaaaatgct

SEQ ID NO: 1370749 - DNA, 25 bp, Homo sapien
tacattttctactactctcccttga

SEQ ID NO: 1370750 - DNA, 25 bp, Homo sapien
tcttgtacctcatccaagtatctgg

SEQ ID NO: 1370751 - DNA, 25 bp, Homo sapien
ccactgctcagggcctcaattttct

SEQ ID NO: 1370752 - DNA, 25 bp, Homo sapien
tcaaattattcttgtacctcatcca

SEQ ID NO: 1370753 - DNA, 25 bp, Homo sapien
gcctcaagcaagccacctgctccgg

SEQ ID NO: 1370754 - DNA, 25 bp, Homo sapien
agctcaatgatgtccaccacgccgt

SEQ ID NO: 1370755 - DNA, 25 bp, Homo sapien
ggagctcaatgatgtccaccacgcc

SEQ ID NO: 1370756 - DNA, 25 bp, Homo sapien
ctcctcggagttggggtcaaacgcg

SEQ ID NO: 1370757 - DNA, 25 bp, Homo sapien
acgccgtccccattgcaatccaggt

SEQ ID NO: 1370758 - DNA, 25 bp, Homo sapien
ttcgaagaggatcccgtagcgtaag

SEQ ID NO: 1370759 - DNA, 25 bp, Homo sapien
agtagtcatcgttatcctggcaggc

SEQ ID NO: 1370760 - DNA, 25 bp, Homo sapien
gatcccgtagcgtaagtagtcatcg

SEQ ID NO: 1370761 - DNA, 25 bp, Homo sapien
taagtagtcatcgttatcctggcag

SEQ ID NO: 1370762 - DNA, 25 bp, Homo sapien
agccgccattgtcatcctggcccgt

SEQ ID NO: 1370763 - DNA, 25 bp, Homo sapien
aagccgccattgtcatcctggcccg

SEQ ID NO: 1370764 - DNA, 25 bp, Homo sapien
tagtgaccagaggttctcacagcca

SEQ ID NO: 1370765 - DNA, 25 bp, Homo sapien
caaaattcttagtgaccagaggttc

SEQ ID NO: 1370766 - DNA, 25 bp, Homo sapien
cagggttcagaagttatggtggcct

SEQ ID NO: 1370767 - DNA, 25 bp, Homo sapien
tggcaggaatgcatggactcaaaat

SEQ ID NO: 1370768 - DNA, 25 bp, Homo sapien
cattagcatctgaaacttgagaaca

SEQ ID NO: 1370769 - DNA, 25 bp, Homo sapien
gagatctactccattttaaacctgc

SEQ ID NO: 1370770 - DNA, 25 bp, Homo sapien
gaccaagaactttgacagtatcctt

SEQ ID NO: 1370771 - DNA, 25 bp, Homo sapien
tttcaatacatgaggcagctacagc

SEQ ID NO: 1370772 - DNA, 25 bp, Homo sapien
aggcatcagtgagagtggatgcccc

SEQ ID NO: 1370773 - DNA, 25 bp, Homo sapien
aaaaccgcctactcaggcatcagtg

SEQ ID NO: 1370774 - DNA, 25 bp, Homo sapien
ggacctgctgagaaagaccacttgg

SEQ ID NO: 1370775 - DNA, 25 bp, Homo sapien
atcagtgagagtggatgcccctgcc

SEQ ID NO: 1370776 - DNA, 25 bp, Homo sapien
tgttacaagctgatcactatggctg

SEQ ID NO: 1370777 - DNA, 25 bp, Homo sapien
aacttcctgatatgtacctgtatgg

SEQ ID NO: 1370778 - DNA, 25 bp, Homo sapien
caaaggaataagcagttccaggttc

SEQ ID NO: 1370779 - DNA, 25 bp, Homo sapien
cttcatgactgagatgatgttggcc

SEQ ID NO: 1370780 - DNA, 25 bp, Homo sapien
gttgacagatgtaccctaaggtgct

SEQ ID NO: 1370781 - DNA, 25 bp, Homo sapien
agttcctgagatcaagaagggttaa

SEQ ID NO: 1370782 - DNA, 25 bp, Homo sapien
cattaataataggtgtggcagtgtt

SEQ ID NO: 1370783 - DNA, 25 bp, Homo sapien
ccagagagaggcattagcaggttac

SEQ ID NO: 1370784 - DNA, 25 bp, Homo sapien
tatattaccaacttgcccttcagtg

SEQ ID NO: 1370785 - DNA, 25 bp, Homo sapien
aagtactgtctgaccatatggcaca

SEQ ID NO: 1370786 - DNA, 25 bp, Homo sapien
gaattatttatacactagatccagc

SEQ ID NO: 1370787 - DNA, 25 bp, Homo sapien
tatagagtcacagggcatgcagatt

SEQ ID NO: 1370788 - DNA, 25 bp, Homo sapien
tctagatggtacgtcatgtgaatgc

SEQ ID NO: 1370789 - DNA, 25 bp, Homo sapien
tatatatagcaacgctctgagagac

SEQ ID NO: 1370790 - DNA, 25 bp, Homo sapien
tgtgaatgcaaccaagcactgtagt

SEQ ID NO: 1370791 - DNA, 25 bp, Homo sapien
agacaaactgggctcatatgacggg

SEQ ID NO: 1370792 - DNA, 25 bp, Homo sapien
caactcatggctttaacacaaaaaa

SEQ ID NO: 1370793 - DNA, 25 bp, Homo sapien
accacatccaacttctttattcttg

SEQ ID NO: 1370794 - DNA, 25 bp, Homo sapien
cacatccaacttctttattcttgag

SEQ ID NO: 1370795 - DNA, 25 bp, Homo sapien
ttaccacatccaacttctttattct

SEQ ID NO: 1370796 - DNA, 25 bp, Homo sapien
acatccaacttctttattcttgaga

SEQ ID NO: 1370797 - DNA, 25 bp, Homo sapien
gtctggccatatctcaagcaggtct

SEQ ID NO: 1370798 - DNA, 25 bp, Homo sapien
gcttggaacatagacttttgcagtg

SEQ ID NO: 1370799 - DNA, 25 bp, Homo sapien
cacaactatcgctgagaccctgaaa

SEQ ID NO: 1370800 - DNA, 25 bp, Homo sapien
caggtctgtccaatggcttggaaca

SEQ ID NO: 1370801 - DNA, 25 bp, Homo sapien
caaaataattacgcaggtcagccac

SEQ ID NO: 1370802 - DNA, 25 bp, Homo sapien
atcaaaataattacgcaggtcagcc

SEQ ID NO: 1370803 - DNA, 25 bp, Homo sapien
tcaaaataattacgcaggtcagcca

SEQ ID NO: 1370804 - DNA, 25 bp, Homo sapien
tcatcaaaataattacgcaggtcag

SEQ ID NO: 1370805 - DNA, 25 bp, Homo sapien
gaaccatcactgctcagaggaattg

SEQ ID NO: 1370806 - DNA, 25 bp, Homo sapien
tatctccaacacagaagggtgtggg

SEQ ID NO: 1370807 - DNA, 25 bp, Homo sapien
caacttgggatacgcaaggagtctc

SEQ ID NO: 1370808 - DNA, 25 bp, Homo sapien
agcacataagcggttcaacttggga

SEQ ID NO: 1370809 - DNA, 25 bp, Homo sapien
gagccaccaatgtctttgggcttat

SEQ ID NO: 1370810 - DNA, 25 bp, Homo sapien
cagcctgttctttccgccttggcag

SEQ ID NO: 1370811 - DNA, 25 bp, Homo sapien
ttaagctttccacttgttgggacac

SEQ ID NO: 1370812 - DNA, 25 bp, Homo sapien
ggacaggggcctttgagccaccaat

SEQ ID NO: 1370813 - DNA, 25 bp, Homo sapien
gaacctttcctgctgtaagcttggg

SEQ ID NO: 1370814 - DNA, 25 bp, Homo sapien
cctttcctgctgtaagcttgggtat

SEQ ID NO: 1370815 - DNA, 25 bp, Homo sapien
tttcctgctgtaagcttgggtatga

SEQ ID NO: 1370816 - DNA, 25 bp, Homo sapien
cctgctgtaagcttgggtatgaggt

SEQ ID NO: 1370817 - DNA, 25 bp, Homo sapien
ggaggattgcttgaggatggaagtt

SEQ ID NO: 1370818 - DNA, 25 bp, Homo sapien
attgcttgaggatggaagttcaaga

SEQ ID NO: 1370819 - DNA, 25 bp, Homo sapien
ctcagcattttaggaagatggggca

SEQ ID NO: 1370820 - DNA, 25 bp, Homo sapien
taatctcagcattttaggaagatgg

SEQ ID NO: 1370821 - DNA, 25 bp, Homo sapien
cttgaaacaccaaaaggccaggcag

SEQ ID NO: 1370822 - DNA, 25 bp, Homo sapien
ggctaactcggacagtagtcatggg

SEQ ID NO: 1370823 - DNA, 25 bp, Homo sapien
agtattctaagacaaccccagcaga

SEQ ID NO: 1370824 - DNA, 25 bp, Homo sapien
tcaaaggacaccgtaggctaactcg

SEQ ID NO: 1370825 - DNA, 25 bp, Homo sapien
tcatagcgatttgccacatataaag

SEQ ID NO: 1370826 - DNA, 25 bp, Homo sapien
tgggtacagtatccaacattctcag

SEQ ID NO: 1370827 - DNA, 25 bp, Homo sapien
ccggaagattcctatctgggtacag

SEQ ID NO: 1370828 - DNA, 25 bp, Homo sapien
tgctgctctgaaagacatgattctg

SEQ ID NO: 1370829 - DNA, 25 bp, Homo sapien
gaaacaggggattgaattcagagtt

SEQ ID NO: 1370830 - DNA, 25 bp, Homo sapien
attcagagtttggtgtgctgatgac

SEQ ID NO: 1370831 - DNA, 25 bp, Homo sapien
agagtttggtgtgctgatgacaatc

SEQ ID NO: 1370832 - DNA, 25 bp, Homo sapien
ctgatggaaacaggggattgaattc

SEQ ID NO: 1370833 - DNA, 25 bp, Homo sapien
gccagatcacctgaatccaaatgtt

SEQ ID NO: 1370834 - DNA, 25 bp, Homo sapien
caggtacccaaataccacttcagga

SEQ ID NO: 1370835 - DNA, 25 bp, Homo sapien
gatcacctgaatccaaatgttctat

SEQ ID NO: 1370836 - DNA, 25 bp, Homo sapien
cacttcaggaaatctggccagatca

SEQ ID NO: 1370837 - DNA, 25 bp, Homo sapien
taatgcttatatgacctaagaacaa

SEQ ID NO: 1370838 - DNA, 25 bp, Homo sapien
taaaatctagcttcacttgcaccta

SEQ ID NO: 1370839 - DNA, 25 bp, Homo sapien
aatatgtaataatgcttatatgacc

SEQ ID NO: 1370840 - DNA, 25 bp, Homo sapien
ctaagaacaattattcgggccaggc

SEQ ID NO: 1370841 - DNA, 25 bp, Homo sapien
gatacaatgtgatggtcaaattcag

SEQ ID NO: 1370842 - DNA, 25 bp, Homo sapien
tacacgttatcaagtcaaatccaag

SEQ ID NO: 1370843 - DNA, 25 bp, Homo sapien
ccacaacggagccatgatacaatgt

SEQ ID NO: 1370844 - DNA, 25 bp, Homo sapien
caagcaaacgagagtctctctccac

SEQ ID NO: 1370845 - DNA, 25 bp, Homo sapien
gtgaagtatcaccacatcccaggtc

SEQ ID NO: 1370846 - DNA, 25 bp, Homo sapien
ccaacaagcaattcaatgcatggat

SEQ ID NO: 1370847 - DNA, 25 bp, Homo sapien
gattgacttttagcagccttaagag

SEQ ID NO: 1370848 - DNA, 25 bp, Homo sapien
ctccatcgtaatttatcctcattaa

SEQ ID NO: 1370849 - DNA, 25 bp, Homo sapien
ttaaactgaattgccgtctccctgg

SEQ ID NO: 1370850 - DNA, 25 bp, Homo sapien
tttaacgaactggtaccgctgtctg

SEQ ID NO: 1370851 - DNA, 25 bp, Homo sapien
cttcttaggctcatgttgatccact

SEQ ID NO: 1370852 - DNA, 25 bp, Homo sapien
ttcaaaattaccgtcaaccacacta

SEQ ID NO: 1370853 - DNA, 25 bp, Homo sapien
gatttatccttcaagctctatttga

SEQ ID NO: 1370854 - DNA, 25 bp, Homo sapien
agctctatttgagagaatcagcact

SEQ ID NO: 1370855 - DNA, 25 bp, Homo sapien
aagatttatccttcaagctctattt

SEQ ID NO: 1370856 - DNA, 25 bp, Homo sapien
ctatttgagagaatcagcactgact

SEQ ID NO: 1370857 - DNA, 25 bp, Homo sapien
gaaaccaacgcttctgtctttgtac

SEQ ID NO: 1370858 - DNA, 25 bp, Homo sapien
gcagcatgcccaaccgaaaaaacaa

SEQ ID NO: 1370859 - DNA, 25 bp, Homo sapien
ttccatcatcctgcggtaagcagca

SEQ ID NO: 1370860 - DNA, 25 bp, Homo sapien
aaaacaaagctcgtcgcggagccgc

SEQ ID NO: 1370861 - DNA, 25 bp, Homo sapien
tcgctgcgtgacgctaccgccgcgg

SEQ ID NO: 1370862 - DNA, 25 bp, Homo sapien
cctcgctgcgtgacgctaccgccgc

SEQ ID NO: 1370863 - DNA, 25 bp, Homo sapien
gcctcgctgcgtgacgctaccgccg

SEQ ID NO: 1370864 - DNA, 25 bp, Homo sapien
ctcgctgcgtgacgctaccgccgcg

SEQ ID NO: 1370865 - DNA, 25 bp, Homo sapien
tcggcctccccgcggggctcgccaa

SEQ ID NO: 1370866 - DNA, 25 bp, Homo sapien
gcgcctcggcctccccgcggggctc

SEQ ID NO: 1370867 - DNA, 25 bp, Homo sapien
ggcgcccgcacccgcgcctcggcct

SEQ ID NO: 1370868 - DNA, 25 bp, Homo sapien
tacgccggcgcccgcacccgcgcct

SEQ ID NO: 1370869 - DNA, 25 bp, Homo sapien
cgggagcctcatggtgcgccgagct

SEQ ID NO: 1370870 - DNA, 25 bp, Homo sapien
ggccccgggagcctcatggtgcgcc

SEQ ID NO: 1370871 - DNA, 25 bp, Homo sapien
cccgggagcctcatggtgcgccgag

SEQ ID NO: 1370872 - DNA, 25 bp, Homo sapien
ggagcctcatggtgcgccgagctcc

SEQ ID NO: 1370873 - DNA, 25 bp, Homo sapien
gctgtggcgcatgcccagaagccat

SEQ ID NO: 1370874 - DNA, 25 bp, Homo sapien
cagttccaaggcgtcggttttgcgt

SEQ ID NO: 1370875 - DNA, 25 bp, Homo sapien
tcgtaacggccgctgtggcgcatgc

SEQ ID NO: 1370876 - DNA, 25 bp, Homo sapien
ttttgcgtctcgtaacggccgctgt

SEQ ID NO: 1370877 - DNA, 25 bp, Homo sapien
gctgttgagttcgtggcgctcccga

SEQ ID NO: 1370878 - DNA, 25 bp, Homo sapien
ctcccgaggcgtggcaaaggcctaa

SEQ ID NO: 1370879 - DNA, 25 bp, Homo sapien
gttgaccccgctagcgtgcggctgc

SEQ ID NO: 1370880 - DNA, 25 bp, Homo sapien
cacggtacggcagctgttggcgaag

SEQ ID NO: 1370881 - DNA, 25 bp, Homo sapien
ccagcggaaggcggcaagaggagca

SEQ ID NO: 1370882 - DNA, 25 bp, Homo sapien
agcggaaggcggcaagaggagcagc

SEQ ID NO: 1370883 - DNA, 25 bp, Homo sapien
ggccagcggaaggcggcaagaggag

SEQ ID NO: 1370884 - DNA, 25 bp, Homo sapien
ctggccagcggaaggcggcaagagg

SEQ ID NO: 1370885 - DNA, 25 bp, Homo sapien
atagttttccccgagtgttgtggat

SEQ ID NO: 1370886 - DNA, 25 bp, Homo sapien
ccccgagtgttgtggatagaactgt

SEQ ID NO: 1370887 - DNA, 25 bp, Homo sapien
tagaactgttgatctcttggaaaag

SEQ ID NO: 1370888 - DNA, 25 bp, Homo sapien
cttggaaaagttattgtatcctgcc

SEQ ID NO: 1370889 - DNA, 25 bp, Homo sapien
agtctgaaaaatcatccttggctct

SEQ ID NO: 1370890 - DNA, 25 bp, Homo sapien
tcttattagagtctgaaaaatcatc

SEQ ID NO: 1370891 - DNA, 25 bp, Homo sapien
gaaaaatcatccttggctctgtcca

SEQ ID NO: 1370892 - DNA, 25 bp, Homo sapien
cttattagagtctgaaaaatcatcc

SEQ ID NO: 1370893 - DNA, 25 bp, Homo sapien
tcaccaaattttgacttcttcaagc

SEQ ID NO: 1370894 - DNA, 25 bp, Homo sapien
gacttcttcaagctgtcatctacca

SEQ ID NO: 1370895 - DNA, 25 bp, Homo sapien
ttttgacttcttcaagctgtcatct

SEQ ID NO: 1370896 - DNA, 25 bp, Homo sapien
ttggacaatcaccaaattttgactt

SEQ ID NO: 1370897 - DNA, 25 bp, Homo sapien
ttgcttcggtatgaggttggaaaga

SEQ ID NO: 1370898 - DNA, 25 bp, Homo sapien
aaagtggttgcttcggtatgaggtt

SEQ ID NO: 1370899 - DNA, 25 bp, Homo sapien
agtctctactgacagaaagtggttg

SEQ ID NO: 1370900 - DNA, 25 bp, Homo sapien
aaactagtctctactgacagaaagt

SEQ ID NO: 1370901 - DNA, 25 bp, Homo sapien
cgacgttcgatggagtagggtccca

SEQ ID NO: 1370902 - DNA, 25 bp, Homo sapien
gacgatattagcaagcacaccgcag

SEQ ID NO: 1370903 - DNA, 25 bp, Homo sapien
cctaagagtcaggtacggaggtcac

SEQ ID NO: 1370904 - DNA, 25 bp, Homo sapien
cagttggcggaagagatcgagctcc

SEQ ID NO: 1370905 - DNA, 25 bp, Homo sapien
cagtagtctatttacagagttcatc

SEQ ID NO: 1370906 - DNA, 25 bp, Homo sapien
tgtctacccagtctactactttgtg

SEQ ID NO: 1370907 - DNA, 25 bp, Homo sapien
gaaatgatgagctgtattgtcccta

SEQ ID NO: 1370908 - DNA, 25 bp, Homo sapien
ggtgaagtccaacatgtcaaaaatg

SEQ ID NO: 1370909 - DNA, 25 bp, Homo sapien
cgcagtcgaagtcgtgataggaaag

SEQ ID NO: 1370910 - DNA, 25 bp, Homo sapien
gaaaggcatagaagtcgcagtcgaa

SEQ ID NO: 1370911 - DNA, 25 bp, Homo sapien
agaaaatgagagaggtagaagacga

SEQ ID NO: 1370912 - DNA, 25 bp, Homo sapien
cgaagatcccgaagtattgaccggg

SEQ ID NO: 1370913 - DNA, 25 bp, Homo sapien
tacatgatgcacagattgttcttgc

SEQ ID NO: 1370914 - DNA, 25 bp, Homo sapien
cctcaaagggacacttagtatgcct

SEQ ID NO: 1370915 - DNA, 25 bp, Homo sapien
tactgtatattatcttggaaggctc

SEQ ID NO: 1370916 - DNA, 25 bp, Homo sapien
tatgtgctgccaatgtacaagaagg

SEQ ID NO: 1370917 - DNA, 25 bp, Homo sapien
cattagcaattctccgctctgtgtt

SEQ ID NO: 1370918 - DNA, 25 bp, Homo sapien
gcccagggcacagtcatatattttt

SEQ ID NO: 1370919 - DNA, 25 bp, Homo sapien
tatgagtgggcagacaatctgtgat

SEQ ID NO: 1370920 - DNA, 25 bp, Homo sapien
ctaggcttggcaatatgagtgggca

SEQ ID NO: 1370921 - DNA, 25 bp, Homo sapien
gatggaaggaggacagttcctccca

SEQ ID NO: 1370922 - DNA, 25 bp, Homo sapien
tgatatgtaggtgacaggaggttca

SEQ ID NO: 1370923 - DNA, 25 bp, Homo sapien
cattgtccctggctgtcatgctctg

SEQ ID NO: 1370924 - DNA, 25 bp, Homo sapien
ttcaggatggcccttggtgatggaa

SEQ ID NO: 1370925 - DNA, 25 bp, Homo sapien
tcctattctatgtcatgttctggag

SEQ ID NO: 1370926 - DNA, 25 bp, Homo sapien
ctcctattctatgtcatgttctgga

SEQ ID NO: 1370927 - DNA, 25 bp, Homo sapien
cctattctatgtcatgttctggagc

SEQ ID NO: 1370928 - DNA, 25 bp, Homo sapien
aaattcccttgctgacgcgcgtgac

SEQ ID NO: 1370929 - DNA, 25 bp, Homo sapien
gaactcggaatttcatagacggcct

SEQ ID NO: 1370930 - DNA, 25 bp, Homo sapien
gagtttcctaaaagtccagcacagt

SEQ ID NO: 1370931 - DNA, 25 bp, Homo sapien
gacggccttggctcacgatcggttt

SEQ ID NO: 1370932 - DNA, 25 bp, Homo sapien
tgggtgcaaccattgtcagtagaaa

SEQ ID NO: 1370933 - DNA, 25 bp, Homo sapien
tatgcggccttatatatgggctctc

SEQ ID NO: 1370934 - DNA, 25 bp, Homo sapien
tgttaggttcatcacatgggtgcaa

SEQ ID NO: 1370935 - DNA, 25 bp, Homo sapien
tgtaccagtgtcatgttgcaaaacc

SEQ ID NO: 1370936 - DNA, 25 bp, Homo sapien
gttgctttaagagggcatactgact

SEQ ID NO: 1370937 - DNA, 25 bp, Homo sapien
ccttttagttgctttaagagggcat

SEQ ID NO: 1370938 - DNA, 25 bp, Homo sapien
atgcccttttagttgctttaagagg

SEQ ID NO: 1370939 - DNA, 25 bp, Homo sapien
aagagggcatactgactttgtggtc

SEQ ID NO: 1370940 - DNA, 25 bp, Homo sapien
tcatgtgctgtaaatgtgtggtttt

SEQ ID NO: 1370941 - DNA, 25 bp, Homo sapien
agtgtcatgtgctgtaaatgtgtgg

SEQ ID NO: 1370942 - DNA, 25 bp, Homo sapien
gtcatgtgctgtaaatgtgtggttt

SEQ ID NO: 1370943 - DNA, 25 bp, Homo sapien
cttagtgtcatgtgctgtaaatgtg

SEQ ID NO: 1370944 - DNA, 25 bp, Homo sapien
cagtttcctattggctacaccatgt

SEQ ID NO: 1370945 - DNA, 25 bp, Homo sapien
tggtgaaaacattccttcttgagtt

SEQ ID NO: 1370946 - DNA, 25 bp, Homo sapien
gagctttattgcctccaacatgcct

SEQ ID NO: 1370947 - DNA, 25 bp, Homo sapien
caaaggaggtaacgttcttcagcca

SEQ ID NO: 1370948 - DNA, 25 bp, Homo sapien
ttgctgcaacctgccacgtcgctgc

SEQ ID NO: 1370949 - DNA, 25 bp, Homo sapien
ctgcaacctgccacgtcgctgcctg

SEQ ID NO: 1370950 - DNA, 25 bp, Homo sapien
cttgctgcaacctgccacgtcgctg

SEQ ID NO: 1370951 - DNA, 25 bp, Homo sapien
aacctgccacgtcgctgcctgcaca

SEQ ID NO: 1370952 - DNA, 25 bp, Homo sapien
cacaaagcgttagtatattgagtct

SEQ ID NO: 1370953 - DNA, 25 bp, Homo sapien
gggttattagcacatcaaaacaatg

SEQ ID NO: 1370954 - DNA, 25 bp, Homo sapien
cacctggccgatattcctgttctta

SEQ ID NO: 1370955 - DNA, 25 bp, Homo sapien
tttaatgtaaggatagcagcgtgcc

SEQ ID NO: 1370956 - DNA, 25 bp, Homo sapien
aactgatttacatccccatcagcaa

SEQ ID NO: 1370957 - DNA, 25 bp, Homo sapien
aataggtaatgccaaaagttttgca

SEQ ID NO: 1370958 - DNA, 25 bp, Homo sapien
catgtaatttggtggacatacacac

SEQ ID NO: 1370959 - DNA, 25 bp, Homo sapien
ccatcagcaataattgagtgctcta

SEQ ID NO: 1370960 - DNA, 25 bp, Homo sapien
tgattttcactcttgcatgttttat

SEQ ID NO: 1370961 - DNA, 25 bp, Homo sapien
gattttcactcttgcatgttttatc

SEQ ID NO: 1370962 - DNA, 25 bp, Homo sapien
aaataaaattcactgcatatgttat

SEQ ID NO: 1370963 - DNA, 25 bp, Homo sapien
cagtgtgtactgttttgccacatac

SEQ ID NO: 1370964 - DNA, 25 bp, Homo sapien
cacctttggaggagaatatattaga

SEQ ID NO: 1370965 - DNA, 25 bp, Homo sapien
catgctgaagtatagtttttgggaa

SEQ ID NO: 1370966 - DNA, 25 bp, Homo sapien
tacatactaattacccattggatac

SEQ ID NO: 1370967 - DNA, 25 bp, Homo sapien
tgagttaagaagaacatagatttat

SEQ ID NO: 1370968 - DNA, 25 bp, Homo sapien
tctagaaagtcatcttcctaaattg

SEQ ID NO: 1370969 - DNA, 25 bp, Homo sapien
gaatccttggtagcctagcgttgaa

SEQ ID NO: 1370970 - DNA, 25 bp, Homo sapien
ttgattttaagaatcagaagtcctt

SEQ ID NO: 1370971 - DNA, 25 bp, Homo sapien
cacctctgtgctttagcaaggtctt

SEQ ID NO: 1370972 - DNA, 25 bp, Homo sapien
caaggtcttctgcaatcgttttaat

SEQ ID NO: 1370973 - DNA, 25 bp, Homo sapien
ccttagggcatgatccaaagccgag

SEQ ID NO: 1370974 - DNA, 25 bp, Homo sapien
caaaatggttgctgtccttagggca

SEQ ID NO: 1370975 - DNA, 25 bp, Homo sapien
tgtaataacttaagagctgccagtt

SEQ ID NO: 1370976 - DNA, 25 bp, Homo sapien
tctgaagctctgatactgtaataac

SEQ ID NO: 1370977 - DNA, 25 bp, Homo sapien
cttgcgactgctgaggctgtgtgtc

SEQ ID NO: 1370978 - DNA, 25 bp, Homo sapien
gatcaaacttacgagctgcaatgct

SEQ ID NO: 1370979 - DNA, 25 bp, Homo sapien
tcagtgctatcaaagtcacataagg

SEQ ID NO: 1370980 - DNA, 25 bp, Homo sapien
cttcagtgctatcaaagtcacataa

SEQ ID NO: 1370981 - DNA, 25 bp, Homo sapien
ttcagtgctatcaaagtcacataag

SEQ ID NO: 1370982 - DNA, 25 bp, Homo sapien
gctgtaggtcatgaaagcctgaagt

SEQ ID NO: 1370983 - DNA, 25 bp, Homo sapien
taggtcatgaaagcctgaagttttt

SEQ ID NO: 1370984 - DNA, 25 bp, Homo sapien
cagggtctgagctgtaggtcatgaa

SEQ ID NO: 1370985 - DNA, 25 bp, Homo sapien
tctgagctgtaggtcatgaaagcct

SEQ ID NO: 1370986 - DNA, 25 bp, Homo sapien
ttgttgccatgaccatgcgggtgtt

SEQ ID NO: 1370987 - DNA, 25 bp, Homo sapien
tgatacttgtgtcaagcgccaccct

SEQ ID NO: 1370988 - DNA, 25 bp, Homo sapien
tgggtggattcgtgcacccgctgcc

SEQ ID NO: 1370989 - DNA, 25 bp, Homo sapien
tgtggctgaccgcagctgggcttca

SEQ ID NO: 1370990 - DNA, 25 bp, Homo sapien
catgttcacctttaaaggattttga

SEQ ID NO: 1370991 - DNA, 25 bp, Homo sapien
ctctctgagaacagatccgtttggg

SEQ ID NO: 1370992 - DNA, 25 bp, Homo sapien
tgggctcatgttcacctttaaagga

SEQ ID NO: 1370993 - DNA, 25 bp, Homo sapien
tctgagaacagatccgtttgggttt

SEQ ID NO: 1370994 - DNA, 25 bp, Homo sapien
agaatacatgcaattggaggatgtg

SEQ ID NO: 1370995 - DNA, 25 bp, Homo sapien
tcaaaaccaaggagatagtgaagaa

SEQ ID NO: 1370996 - DNA, 25 bp, Homo sapien
gtcttagtgactgtcacttcaaaag

SEQ ID NO: 1370997 - DNA, 25 bp, Homo sapien
ccaaggagatagtgaagaaatctgt

SEQ ID NO: 1370998 - DNA, 25 bp, Homo sapien
tcagcctcttgccatccagatgtag

SEQ ID NO: 1370999 - DNA, 25 bp, Homo sapien
caaagtccttggtcactgcgatttc

SEQ ID NO: 1371000 - DNA, 25 bp, Homo sapien
tatgggttgctaccaacttgcactg

SEQ ID NO: 1371001 - DNA, 25 bp, Homo sapien
gaagtgtcaggtgagtgcacaagac

SEQ ID NO: 1371002 - DNA, 25 bp, Homo sapien
cacctcttttgctatgatttgagta

SEQ ID NO: 1371003 - DNA, 25 bp, Homo sapien
ggcacctcttttgctatgatttgag

SEQ ID NO: 1371004 - DNA, 25 bp, Homo sapien
cctcttttgctatgatttgagtaat

SEQ ID NO: 1371005 - DNA, 25 bp, Homo sapien
aaggcacctcttttgctatgatttg

SEQ ID NO: 1371006 - DNA, 25 bp, Homo sapien
acagtcctgacatttgttactctgc

SEQ ID NO: 1371007 - DNA, 25 bp, Homo sapien
gaggtaggaatcttagtgccacagt

SEQ ID NO: 1371008 - DNA, 25 bp, Homo sapien
caggctcttcgggaggtaggaatct

SEQ ID NO: 1371009 - DNA, 25 bp, Homo sapien
cgggaggtaggaatcttagtgccac

SEQ ID NO: 1371010 - DNA, 25 bp, Homo sapien
atcttccacagttgatccttccgtg

SEQ ID NO: 1371011 - DNA, 25 bp, Homo sapien
tgatccttccgtggccctttttctc

SEQ ID NO: 1371012 - DNA, 25 bp, Homo sapien
gagttgaatctgagtgtggtgcctt

SEQ ID NO: 1371013 - DNA, 25 bp, Homo sapien
cagttgatccttccgtggccctttt

SEQ ID NO: 1371014 - DNA, 25 bp, Homo sapien
cagaaggcacagctcggactgggtg

SEQ ID NO: 1371015 - DNA, 25 bp, Homo sapien
cattcaaggagcctgcgacagaagg

SEQ ID NO: 1371016 - DNA, 25 bp, Homo sapien
caaggagcctgcgacagaaggcaca

SEQ ID NO: 1371017 - DNA, 25 bp, Homo sapien
cacagctcggactgggtgccgtcat

SEQ ID NO: 1371018 - DNA, 25 bp, Homo sapien
tgccttcttggagtgccgttgggat

SEQ ID NO: 1371019 - DNA, 25 bp, Homo sapien
gccttcttggagtgccgttgggatc

SEQ ID NO: 1371020 - DNA, 25 bp, Homo sapien
gacagcctcatggccacttggtctg

SEQ ID NO: 1371021 - DNA, 25 bp, Homo sapien
gcctcatggccacttggtctggctt

SEQ ID NO: 1371022 - DNA, 25 bp, Homo sapien
gcagctgcatctccataatgaccgt

SEQ ID NO: 1371023 - DNA, 25 bp, Homo sapien
catctccataatgaccgtttaggta

SEQ ID NO: 1371024 - DNA, 25 bp, Homo sapien
gagctcctcgttgggggcctcctgc

SEQ ID NO: 1371025 - DNA, 25 bp, Homo sapien
tccttggggtgtccctgttacctca

SEQ ID NO: 1371026 - DNA, 25 bp, Homo sapien
gggtgtccctgttacctcactccca

SEQ ID NO: 1371027 - DNA, 25 bp, Homo sapien
tcacagagctcctcgttgggggcct

SEQ ID NO: 1371028 - DNA, 25 bp, Homo sapien
ctgagcctcgaggcccagaagggtg

SEQ ID NO: 1371029 - DNA, 25 bp, Homo sapien
ctcgaggcccagaagggtggccggg

SEQ ID NO: 1371030 - DNA, 25 bp, Homo sapien
gcctcgaggcccagaagggtggccg

SEQ ID NO: 1371031 - DNA, 25 bp, Homo sapien
gagcctcgaggcccagaagggtggc

SEQ ID NO: 1371032 - DNA, 25 bp, Homo sapien
aaagacttgtgactcctgcaggtcc

SEQ ID NO: 1371033 - DNA, 25 bp, Homo sapien
ctgcaggtccaagactagcagggca

SEQ ID NO: 1371034 - DNA, 25 bp, Homo sapien
ctctatgaagcatcgactctcctgg

SEQ ID NO: 1371035 - DNA, 25 bp, Homo sapien
tgagatgggctgttacatccacggt

SEQ ID NO: 1371036 - DNA, 25 bp, Homo sapien
atttgaattcccaatcttgcataag

SEQ ID NO: 1371037 - DNA, 25 bp, Homo sapien
ttctgatagttgaggctacaaaggc

SEQ ID NO: 1371038 - DNA, 25 bp, Homo sapien
tcttgcataagtagaaatccaaaag

SEQ ID NO: 1371039 - DNA, 25 bp, Homo sapien
gatagttgaggctacaaaggcaaaa

SEQ ID NO: 1371040 - DNA, 25 bp, Homo sapien
gaatccatgaattaggagtctataa

SEQ ID NO: 1371041 - DNA, 25 bp, Homo sapien
cttccaggcatgatctacaaaaatt

SEQ ID NO: 1371042 - DNA, 25 bp, Homo sapien
tataattcatgggactttggaaagt

SEQ ID NO: 1371043 - DNA, 25 bp, Homo sapien
tctaatctttaaaagctggttccat

SEQ ID NO: 1371044 - DNA, 25 bp, Homo sapien
gaggccaagtcatccagggtaactg

SEQ ID NO: 1371045 - DNA, 25 bp, Homo sapien
aggccaagtcatccagggtaactgg

SEQ ID NO: 1371046 - DNA, 25 bp, Homo sapien
ggccaagtcatccagggtaactgga

SEQ ID NO: 1371047 - DNA, 25 bp, Homo sapien
gccaagtcatccagggtaactggag

SEQ ID NO: 1371048 - DNA, 25 bp, Homo sapien
gctgaagtatatttgctttcatcca

SEQ ID NO: 1371049 - DNA, 25 bp, Homo sapien
agctgaagtatatttgctttcatcc

SEQ ID NO: 1371050 - DNA, 25 bp, Homo sapien
aggagctgaagtatatttgctttca

SEQ ID NO: 1371051 - DNA, 25 bp, Homo sapien
aaggagctgaagtatatttgctttc

SEQ ID NO: 1371052 - DNA, 25 bp, Homo sapien
tccaagcactaagccagcagccaca

SEQ ID NO: 1371053 - DNA, 25 bp, Homo sapien
ggctctccaagcactaagccagcag

SEQ ID NO: 1371054 - DNA, 25 bp, Homo sapien
agcactaagccagcagccacatcag

SEQ ID NO: 1371055 - DNA, 25 bp, Homo sapien
ctagaccagtggctctccaagcact

SEQ ID NO: 1371056 - DNA, 25 bp, Homo sapien
accttacacagttggtttaaatctg

SEQ ID NO: 1371057 - DNA, 25 bp, Homo sapien
caccttacacagttggtttaaatct

SEQ ID NO: 1371058 - DNA, 25 bp, Homo sapien
ctgaaggagatcacctttgaccctt

SEQ ID NO: 1371059 - DNA, 25 bp, Homo sapien
aggagatcacctttgacccttccac

SEQ ID NO: 1371060 - DNA, 25 bp, Homo sapien
cgattgttgattcgtgcttgtggac

SEQ ID NO: 1371061 - DNA, 25 bp, Homo sapien
gatgcttgtccttggtggccagaaa

SEQ ID NO: 1371062 - DNA, 25 bp, Homo sapien
ggatcaaagtcaccaacgattgttg

SEQ ID NO: 1371063 - DNA, 25 bp, Homo sapien
ttcgtgcttgtggacttgctgctgc

SEQ ID NO: 1371064 - DNA, 25 bp, Homo sapien
cttcttgtcttgcaaatggtaagga

SEQ ID NO: 1371065 - DNA, 25 bp, Homo sapien
ttcttgtcttgcaaatggtaaggag

SEQ ID NO: 1371066 - DNA, 25 bp, Homo sapien
gcttcttgtcttgcaaatggtaagg

SEQ ID NO: 1371067 - DNA, 25 bp, Homo sapien
gagagacttgcctcagattctattc

SEQ ID NO: 1371068 - DNA, 25 bp, Homo sapien
ggaagtgcctttctgagaggttggt

SEQ ID NO: 1371069 - DNA, 25 bp, Homo sapien
gtgacaacttagagagacttgcctc

SEQ ID NO: 1371070 - DNA, 25 bp, Homo sapien
cctttctgagaggttggtgacaact

SEQ ID NO: 1371071 - DNA, 25 bp, Homo sapien
gagaagttcttggtggatatgtact

SEQ ID NO: 1371072 - DNA, 25 bp, Homo sapien
gttcttggtggatatgtactatggg

SEQ ID NO: 1371073 - DNA, 25 bp, Homo sapien
gaagttcttggtggatatgtactat

SEQ ID NO: 1371074 - DNA, 25 bp, Homo sapien
agttcttggtggatatgtactatgg

SEQ ID NO: 1371075 - DNA, 25 bp, Homo sapien
tatgcatagccttctcttgagggtc

SEQ ID NO: 1371076 - DNA, 25 bp, Homo sapien
tctctcgacttggaagaaaagctgg

SEQ ID NO: 1371077 - DNA, 25 bp, Homo sapien
tatcttaatctgagagaggtcccca

SEQ ID NO: 1371078 - DNA, 25 bp, Homo sapien
tcaacacagtttgactcaggcgtgg

SEQ ID NO: 1371079 - DNA, 25 bp, Homo sapien
agttgtaacaatagctctggttctc

SEQ ID NO: 1371080 - DNA, 25 bp, Homo sapien
tggttctcactgactgtcttcactg

SEQ ID NO: 1371081 - DNA, 25 bp, Homo sapien
gttctcactgactgtcttcactgtg

SEQ ID NO: 1371082 - DNA, 25 bp, Homo sapien
tgtgtgcagcccgatcgctctcgtc

SEQ ID NO: 1371083 - DNA, 25 bp, Homo sapien
tcttcccatgtcaacacttggctca

SEQ ID NO: 1371084 - DNA, 25 bp, Homo sapien
tagcaaggtaatgagcttctttgag

SEQ ID NO: 1371085 - DNA, 25 bp, Homo sapien
gcttctttgagataactggaggaac

SEQ ID NO: 1371086 - DNA, 25 bp, Homo sapien
gaggttccactcagaatccaacaga

SEQ ID NO: 1371087 - DNA, 25 bp, Homo sapien
gttgaagggccttgcgacacagaca

SEQ ID NO: 1371088 - DNA, 25 bp, Homo sapien
tatcacaggtgaacaagttgaaggg

SEQ ID NO: 1371089 - DNA, 25 bp, Homo sapien
tcaacagttggaagttgactgcagt

SEQ ID NO: 1371090 - DNA, 25 bp, Homo sapien
aaaaacggagcttcaaaatcatggc

SEQ ID NO: 1371091 - DNA, 25 bp, Homo sapien
cagacaggcttcttaaacctaccat

SEQ ID NO: 1371092 - DNA, 25 bp, Homo sapien
ttctcagacaggcttcttaaaccta

SEQ ID NO: 1371093 - DNA, 25 bp, Homo sapien
tcagacaggcttcttaaacctacca

SEQ ID NO: 1371094 - DNA, 25 bp, Homo sapien
tctctttctcagacaggcttcttaa

SEQ ID NO: 1371095 - DNA, 25 bp, Homo sapien
tcatcagatgctttaccccagagag

SEQ ID NO: 1371096 - DNA, 25 bp, Homo sapien
cccaggtctagtttgatgataaagc

SEQ ID NO: 1371097 - DNA, 25 bp, Homo sapien
tcattcacggagatactgaacccgg

SEQ ID NO: 1371098 - DNA, 25 bp, Homo sapien
taatgggaaatgttgcttggatcac

SEQ ID NO: 1371099 - DNA, 25 bp, Homo sapien
gtaaagcgttaagagcctcactcct

SEQ ID NO: 1371100 - DNA, 25 bp, Homo sapien
acgcggcgtcgatgctcaagaaacc

SEQ ID NO: 1371101 - DNA, 25 bp, Homo sapien
aaactcggcttgaggagttgctgct

SEQ ID NO: 1371102 - DNA, 25 bp, Homo sapien
taaaaactatactagagtccagcga

SEQ ID NO: 1371103 - DNA, 25 bp, Homo sapien
tagtgaacttttgggcaccaactgg

SEQ ID NO: 1371104 - DNA, 25 bp, Homo sapien
gggcaccaactggtcgatttaccat

SEQ ID NO: 1371105 - DNA, 25 bp, Homo sapien
tgaccgtgcttaaattagtgaactt

SEQ ID NO: 1371106 - DNA, 25 bp, Homo sapien
gccttgaccgtgcttaaattagtga

SEQ ID NO: 1371107 - DNA, 25 bp, Homo sapien
ttatatggtattgtttagggaacaa

SEQ ID NO: 1371108 - DNA, 25 bp, Homo sapien
tatacgcatcttcccacaaactttt

SEQ ID NO: 1371109 - DNA, 25 bp, Homo sapien
tgttcagtagagacacaacttttca

SEQ ID NO: 1371110 - DNA, 25 bp, Homo sapien
taatatcagtatctgtggggaattg

SEQ ID NO: 1371111 - DNA, 25 bp, Homo sapien
tctattctctcatagtgacagagag

SEQ ID NO: 1371112 - DNA, 25 bp, Homo sapien
tattttctttgattatacagctaga

SEQ ID NO: 1371113 - DNA, 25 bp, Homo sapien
gaaactttgtatgtgggatgaattt

SEQ ID NO: 1371114 - DNA, 25 bp, Homo sapien
gattatacagctagataggctctca

SEQ ID NO: 1371115 - DNA, 25 bp, Homo sapien
gattggagaccgttgtattagaata

SEQ ID NO: 1371116 - DNA, 25 bp, Homo sapien
gaactgcacattcgagggatccaga

SEQ ID NO: 1371117 - DNA, 25 bp, Homo sapien
tcatgagtactgctttggatgaagc

SEQ ID NO: 1371118 - DNA, 25 bp, Homo sapien
taggtagttcctacatatggcagaa

SEQ ID NO: 1371119 - DNA, 25 bp, Homo sapien
tcagtcaggagtcagacatcagtaa

SEQ ID NO: 1371120 - DNA, 25 bp, Homo sapien
tggctccagaatccgtcttatgtga

SEQ ID NO: 1371121 - DNA, 25 bp, Homo sapien
ccagggttacctgtgtagtaagtgg

SEQ ID NO: 1371122 - DNA, 25 bp, Homo sapien
gatttgaccaacacaattaataggc

SEQ ID NO: 1371123 - DNA, 25 bp, Homo sapien
tatgcatttggtacaagtcttgaaa

SEQ ID NO: 1371124 - DNA, 25 bp, Homo sapien
taatgttttgataatgagaatccac

SEQ ID NO: 1371125 - DNA, 25 bp, Homo sapien
tcacgtctagagtaaaactttggct

SEQ ID NO: 1371126 - DNA, 25 bp, Homo sapien
tctacatacatccaaaaattccagt

SEQ ID NO: 1371127 - DNA, 25 bp, Homo sapien
tcaggaacgagatcagaatgcaggt

SEQ ID NO: 1371128 - DNA, 25 bp, Homo sapien
gcagcgcccctgctgtaaaggattt

SEQ ID NO: 1371129 - DNA, 25 bp, Homo sapien
gctgtgctaagaacccacctgaggt

SEQ ID NO: 1371130 - DNA, 25 bp, Homo sapien
tgaaagctctcctccaagatcagga

SEQ ID NO: 1371131 - DNA, 25 bp, Homo sapien
gctagaatatgaccatgggagccaa

SEQ ID NO: 1371132 - DNA, 25 bp, Homo sapien
aagcctcatggcattgggtttggca

SEQ ID NO: 1371133 - DNA, 25 bp, Homo sapien
caaagtgggccaaagacctaagcat

SEQ ID NO: 1371134 - DNA, 25 bp, Homo sapien
tataaaactcaagaggagcatgtgg

SEQ ID NO: 1371135 - DNA, 25 bp, Homo sapien
cttactcttgagctacaatgccaga

SEQ ID NO: 1371136 - DNA, 25 bp, Homo sapien
caatgccagaaactatggtgtatac

SEQ ID NO: 1371137 - DNA, 25 bp, Homo sapien
agtaaataactgcaccctctgaggg

SEQ ID NO: 1371138 - DNA, 25 bp, Homo sapien
tatcacagtccctaacaatgtagtg

SEQ ID NO: 1371139 - DNA, 25 bp, Homo sapien
taatgcacgtactaaaccaatgaag

SEQ ID NO: 1371140 - DNA, 25 bp, Homo sapien
caaagggtccgacagtaccagatga

SEQ ID NO: 1371141 - DNA, 25 bp, Homo sapien
cagagacactgactttgggctaaag

SEQ ID NO: 1371142 - DNA, 25 bp, Homo sapien
tagatgatcaaagatgtgctccacc

SEQ ID NO: 1371143 - DNA, 25 bp, Homo sapien
catcgtctgtgattactgcttggga

SEQ ID NO: 1371144 - DNA, 25 bp, Homo sapien
taatacttctctggacatgcgcgtt

SEQ ID NO: 1371145 - DNA, 25 bp, Homo sapien
tcaaacacggtaaggaaacaatcta

SEQ ID NO: 1371146 - DNA, 25 bp, Homo sapien
ggtcctgtaaggtgcttcatcgtct

SEQ ID NO: 1371147 - DNA, 25 bp, Homo sapien
gactgggacctggagtaacactgga

SEQ ID NO: 1371148 - DNA, 25 bp, Homo sapien
taacactggatcacagactgcaaag

SEQ ID NO: 1371149 - DNA, 25 bp, Homo sapien
ggcccacgcttggaacaagttgcca

SEQ ID NO: 1371150 - DNA, 25 bp, Homo sapien
cccatgtggttaggtcaagaaccta

SEQ ID NO: 1371151 - DNA, 25 bp, Homo sapien
ggaattaattacattaagtgctcag

SEQ ID NO: 1371152 - DNA, 25 bp, Homo sapien
tatttctctaatggccaatgttttt

SEQ ID NO: 1371153 - DNA, 25 bp, Homo sapien
aactatttctctaatggccaatgtt

SEQ ID NO: 1371154 - DNA, 25 bp, Homo sapien
tctggggatgtggacccctattctt

SEQ ID NO: 1371155 - DNA, 25 bp, Homo sapien
gacaatataccaaaccacaacgtaa

SEQ ID NO: 1371156 - DNA, 25 bp, Homo sapien
tgtatacaatagttcttacagcctg

SEQ ID NO: 1371157 - DNA, 25 bp, Homo sapien
gtctaccctgttctgattttcctaa

SEQ ID NO: 1371158 - DNA, 25 bp, Homo sapien
taaggtatgatgtcctggatagcat

SEQ ID NO: 1371159 - DNA, 25 bp, Homo sapien
ggtcaggagttcgagaccagcctga

SEQ ID NO: 1371160 - DNA, 25 bp, Homo sapien
ttgggaggccgacaagggcgggtca

SEQ ID NO: 1371161 - DNA, 25 bp, Homo sapien
ccaacatggtgaaaccccatctcta

SEQ ID NO: 1371162 - DNA, 25 bp, Homo sapien
aggccgacaagggcgggtcacttga

SEQ ID NO: 1371163 - DNA, 25 bp, Homo sapien
gtgagccgagattgtaccacctcac

SEQ ID NO: 1371164 - DNA, 25 bp, Homo sapien
ctagctactcgggagactgaggcag

SEQ ID NO: 1371165 - DNA, 25 bp, Homo sapien
gccgagattgtaccacctcactcca

SEQ ID NO: 1371166 - DNA, 25 bp, Homo sapien
catggtgatgcacatctgtaatcct

SEQ ID NO: 1371167 - DNA, 25 bp, Homo sapien
caacagttgcatgtcgccttgctag

SEQ ID NO: 1371168 - DNA, 25 bp, Homo sapien
gccttgctagctgtcaaagtagact

SEQ ID NO: 1371169 - DNA, 25 bp, Homo sapien
gtctttcctgaattgctgtcatcat

SEQ ID NO: 1371170 - DNA, 25 bp, Homo sapien
cacccgatgtgttcaatttgctttc

SEQ ID NO: 1371171 - DNA, 25 bp, Homo sapien
taaaaggcatgcaagcagcattaat

SEQ ID NO: 1371172 - DNA, 25 bp, Homo sapien
caagaggacactttatacgcatgga

SEQ ID NO: 1371173 - DNA, 25 bp, Homo sapien
gaacatgtcttgtcccaagaggaca

SEQ ID NO: 1371174 - DNA, 25 bp, Homo sapien
gggcatattccccaagtcagtgtga

SEQ ID NO: 1371175 - DNA, 25 bp, Homo sapien
gcttaagcgatcatcctccctcaac

SEQ ID NO: 1371176 - DNA, 25 bp, Homo sapien
tcaacaactgaacttaagcgatcat

SEQ ID NO: 1371177 - DNA, 25 bp, Homo sapien
aacaactgaacttaagcgatcatcc

SEQ ID NO: 1371178 - DNA, 25 bp, Homo sapien
tttcaacaactgaacttaagcgatc

SEQ ID NO: 1371179 - DNA, 25 bp, Homo sapien
caacaactgaacttaagcgatcatc

SEQ ID NO: 1371180 - DNA, 25 bp, Homo sapien
cacgtaagtaacacttcctggatcc

SEQ ID NO: 1371181 - DNA, 25 bp, Homo sapien
acgtaagtaacacttcctggatcca

SEQ ID NO: 1371182 - DNA, 25 bp, Homo sapien
gcacgtaagtaacacttcctggatc

SEQ ID NO: 1371183 - DNA, 25 bp, Homo sapien
tctgcagttaaggaagacacccaac

SEQ ID NO: 1371184 - DNA, 25 bp, Homo sapien
tctgtgaagtctgctaaggacaggt

SEQ ID NO: 1371185 - DNA, 25 bp, Homo sapien
taatgtaaagtgctgactgatgtcc

SEQ ID NO: 1371186 - DNA, 25 bp, Homo sapien
aaagcccatgcacttcaattggtgg

SEQ ID NO: 1371187 - DNA, 25 bp, Homo sapien
caataaggatgcaggcgtagtaata

SEQ ID NO: 1371188 - DNA, 25 bp, Homo sapien
cgtagtaatagctgtggaaaagatg

SEQ ID NO: 1371189 - DNA, 25 bp, Homo sapien
ccacagtgacctgtgggcagcctgc

SEQ ID NO: 1371190 - DNA, 25 bp, Homo sapien
cagcctgcgtagagataagctgagg

SEQ ID NO: 1371191 - DNA, 25 bp, Homo sapien
ggtaacgatactccatggctgcatg

SEQ ID NO: 1371192 - DNA, 25 bp, Homo sapien
tgatcctggtaacgatactccatgg

SEQ ID NO: 1371193 - DNA, 25 bp, Homo sapien
tcagactgatcctggtaacgatact

SEQ ID NO: 1371194 - DNA, 25 bp, Homo sapien
tcagtcagactgatcctggtaacga

SEQ ID NO: 1371195 - DNA, 25 bp, Homo sapien
tcaatgtccccaattcaaactggcc

SEQ ID NO: 1371196 - DNA, 25 bp, Homo sapien
tagtgggttcccgtaagtgcctgta

SEQ ID NO: 1371197 - DNA, 25 bp, Homo sapien
taactatccagaatcagtgatgcct

SEQ ID NO: 1371198 - DNA, 25 bp, Homo sapien
caagtgggtggccttaactctagtg

SEQ ID NO: 1371199 - DNA, 25 bp, Homo sapien
aggctgtcgtttgtgctggtgttcc

SEQ ID NO: 1371200 - DNA, 25 bp, Homo sapien
ggagacttgaggctgtcgtttgtgc

SEQ ID NO: 1371201 - DNA, 25 bp, Homo sapien
acttgaggctgtcgtttgtgctggt

SEQ ID NO: 1371202 - DNA, 25 bp, Homo sapien
ggctgtcgtttgtgctggtgttcct

SEQ ID NO: 1371203 - DNA, 25 bp, Homo sapien
tgggctttgtatccaaaacaggtga

SEQ ID NO: 1371204 - DNA, 25 bp, Homo sapien
ggctgcctgcggcttcagacttgag

SEQ ID NO: 1371205 - DNA, 25 bp, Homo sapien
cagagacaggcttggccgactggct

SEQ ID NO: 1371206 - DNA, 25 bp, Homo sapien
tttccgctgcgggtgaaccttctgt

SEQ ID NO: 1371207 - DNA, 25 bp, Homo sapien
tgaactgcagacctccagtgatccg

SEQ ID NO: 1371208 - DNA, 25 bp, Homo sapien
acaggtgcataccacatcacgcctg

SEQ ID NO: 1371209 - DNA, 25 bp, Homo sapien
ggtcttgaactgcagacctccagtg

SEQ ID NO: 1371210 - DNA, 25 bp, Homo sapien
aggtgcataccacatcacgcctggc

SEQ ID NO: 1371211 - DNA, 25 bp, Homo sapien
tctgtcatgctcatacgctggcttc

SEQ ID NO: 1371212 - DNA, 25 bp, Homo sapien
ttccatccagctaatcctttagggc

SEQ ID NO: 1371213 - DNA, 25 bp, Homo sapien
taccatctgctctaacaaactactg

SEQ ID NO: 1371214 - DNA, 25 bp, Homo sapien
tagaaccagtaatgaagggacagca

SEQ ID NO: 1371215 - DNA, 25 bp, Homo sapien
tataatggaaatcggcatcacctgc

SEQ ID NO: 1371216 - DNA, 25 bp, Homo sapien
tcaaatgcccggagcacttcagggc

SEQ ID NO: 1371217 - DNA, 25 bp, Homo sapien
tctgcgtctggtacatcaaatgccc

SEQ ID NO: 1371218 - DNA, 25 bp, Homo sapien
tcaggaccgcctatatgtctcagca

SEQ ID NO: 1371219 - DNA, 25 bp, Homo sapien
tggctaatgccataattatcagcac

SEQ ID NO: 1371220 - DNA, 25 bp, Homo sapien
gctccgttacaaatgtggtgaatgt

SEQ ID NO: 1371221 - DNA, 25 bp, Homo sapien
tgccataattatcagcactggaaga

SEQ ID NO: 1371222 - DNA, 25 bp, Homo sapien
tccaatatgcttcaatggctccgtt

SEQ ID NO: 1371223 - DNA, 25 bp, Homo sapien
ccaaatagggttgactagtaagagc

SEQ ID NO: 1371224 - DNA, 25 bp, Homo sapien
gagctcatagtatttttggcatggg

SEQ ID NO: 1371225 - DNA, 25 bp, Homo sapien
ttggcatgggtcatccttataggtc

SEQ ID NO: 1371226 - DNA, 25 bp, Homo sapien
tataggtccatgaacttctaaacca

SEQ ID NO: 1371227 - DNA, 25 bp, Homo sapien
ttagagaaacagacaaaacactgat

SEQ ID NO: 1371228 - DNA, 25 bp, Homo sapien
tagagaaacagacaaaacactgatc

SEQ ID NO: 1371229 - DNA, 25 bp, Homo sapien
agaaacagacaaaacactgatcatt

SEQ ID NO: 1371230 - DNA, 25 bp, Homo sapien
ctgtttagagaaacagacaaaacac

SEQ ID NO: 1371231 - DNA, 25 bp, Homo sapien
aaatgggaagtcgaaataagactgg

SEQ ID NO: 1371232 - DNA, 25 bp, Homo sapien
aaagctgtgcaagatgtcaccactg

SEQ ID NO: 1371233 - DNA, 25 bp, Homo sapien
tatcctggctctgatattgtactat

SEQ ID NO: 1371234 - DNA, 25 bp, Homo sapien
gactggtggattgtatcaaagtcaa

SEQ ID NO: 1371235 - DNA, 25 bp, Homo sapien
taatggctccatcttggcgacttca

SEQ ID NO: 1371236 - DNA, 25 bp, Homo sapien
ggctccatcttggcgacttcagcct

SEQ ID NO: 1371237 - DNA, 25 bp, Homo sapien
tggctccatcttggcgacttcagcc

SEQ ID NO: 1371238 - DNA, 25 bp, Homo sapien
atggctccatcttggcgacttcagc

SEQ ID NO: 1371239 - DNA, 25 bp, Homo sapien
cagtagtggtcctttccaatttcta

SEQ ID NO: 1371240 - DNA, 25 bp, Homo sapien
ggctacttgactcactctgctagaa

SEQ ID NO: 1371241 - DNA, 25 bp, Homo sapien
cagtatgatcccaactttgaaagat

SEQ ID NO: 1371242 - DNA, 25 bp, Homo sapien
gaaataccttaaactactgacagat

SEQ ID NO: 1371243 - DNA, 25 bp, Homo sapien
tataaatacatccaattccatccca

SEQ ID NO: 1371244 - DNA, 25 bp, Homo sapien
caattccatcccaaactgaacagaa

SEQ ID NO: 1371245 - DNA, 25 bp, Homo sapien
cttatataaatacatccaattccat

SEQ ID NO: 1371246 - DNA, 25 bp, Homo sapien
aattccatcccaaactgaacagaaa

SEQ ID NO: 1371247 - DNA, 25 bp, Homo sapien
ctgatgattaaaacacgtctcaact

SEQ ID NO: 1371248 - DNA, 25 bp, Homo sapien
gattaaaacacgtctcaactgagtg

SEQ ID NO: 1371249 - DNA, 25 bp, Homo sapien
gtctcaactgagtgtaccaacgtac

SEQ ID NO: 1371250 - DNA, 25 bp, Homo sapien
aaaacacgtctcaactgagtgtacc

SEQ ID NO: 1371251 - DNA, 25 bp, Homo sapien
taaaaccacgatgcagagcagacaa

SEQ ID NO: 1371252 - DNA, 25 bp, Homo sapien
ccactaaaaccacgatgcagagcag

SEQ ID NO: 1371253 - DNA, 25 bp, Homo sapien
aaccacgatgcagagcagacaaaga

SEQ ID NO: 1371254 - DNA, 25 bp, Homo sapien
cagtagccactaaaaccacgatgca

SEQ ID NO: 1371255 - DNA, 25 bp, Homo sapien
cactccaaaggaatcttcgaatcgc

SEQ ID NO: 1371256 - DNA, 25 bp, Homo sapien
gaatcttcgaatcgccacttccatg

SEQ ID NO: 1371257 - DNA, 25 bp, Homo sapien
cattatatggatccactccaaagga

SEQ ID NO: 1371258 - DNA, 25 bp, Homo sapien
cattaacacattatatggatccact

SEQ ID NO: 1371259 - DNA, 25 bp, Homo sapien
caaggcacctggtttccagtcttct

SEQ ID NO: 1371260 - DNA, 25 bp, Homo sapien
tcttttaaggataatctcagcatca

SEQ ID NO: 1371261 - DNA, 25 bp, Homo sapien
aatatcacttagtgcatcatccaag

SEQ ID NO: 1371262 - DNA, 25 bp, Homo sapien
ctccattgagaaacttctgtatttc

SEQ ID NO: 1371263 - DNA, 25 bp, Homo sapien
aacagtaaatacaaggtgggacatg

SEQ ID NO: 1371264 - DNA, 25 bp, Homo sapien
gcttagcaaaatcactaaacaaatt

SEQ ID NO: 1371265 - DNA, 25 bp, Homo sapien
cagcttagcaaaatcactaaacaaa

SEQ ID NO: 1371266 - DNA, 25 bp, Homo sapien
taattagccagttgatacaaataaa

SEQ ID NO: 1371267 - DNA, 25 bp, Homo sapien
tttccagcttcaattaaaatcttat

SEQ ID NO: 1371268 - DNA, 25 bp, Homo sapien
tatctcctaaaaacaggattgcttt

SEQ ID NO: 1371269 - DNA, 25 bp, Homo sapien
gtatctcctaaaaacaggattgctt

SEQ ID NO: 1371270 - DNA, 25 bp, Homo sapien
taagtatctcctaaaaacaggattg

SEQ ID NO: 1371271 - DNA, 25 bp, Homo sapien
atgacaagtcaggactgacatcctt

SEQ ID NO: 1371272 - DNA, 25 bp, Homo sapien
tgacaagtcaggactgacatccttt

SEQ ID NO: 1371273 - DNA, 25 bp, Homo sapien
tctcattgttcctgaagcagcatca

SEQ ID NO: 1371274 - DNA, 25 bp, Homo sapien
tctgtggggtcaatccagtcatcat

SEQ ID NO: 1371275 - DNA, 25 bp, Homo sapien
tcattgttcctgaagcagcatcata

SEQ ID NO: 1371276 - DNA, 25 bp, Homo sapien
agcatgtctgtggggtcaatccagt

SEQ ID NO: 1371277 - DNA, 25 bp, Homo sapien
ctaccagcaacagacattcacaaag

SEQ ID NO: 1371278 - DNA, 25 bp, Homo sapien
taccagcaacagacattcacaaagg

SEQ ID NO: 1371279 - DNA, 25 bp, Homo sapien
aacagacattcacaaaggagcaaag

SEQ ID NO: 1371280 - DNA, 25 bp, Homo sapien
cagcaacagacattcacaaaggagc

SEQ ID NO: 1371281 - DNA, 25 bp, Homo sapien
cagtatctaaggaagaaggtacaca

SEQ ID NO: 1371282 - DNA, 25 bp, Homo sapien
cttctagagttaagataacactttc

SEQ ID NO: 1371283 - DNA, 25 bp, Homo sapien
taatgaaaactacttccttctagag

SEQ ID NO: 1371284 - DNA, 25 bp, Homo sapien
tgcataatatgctcactgatataag

SEQ ID NO: 1371285 - DNA, 25 bp, Homo sapien
tcacgcctgtaatcccagcactgtg

SEQ ID NO: 1371286 - DNA, 25 bp, Homo sapien
aaacacaaaaactcagccaggcatg

SEQ ID NO: 1371287 - DNA, 25 bp, Homo sapien
caagctgggcggattacttgaggcc

SEQ ID NO: 1371288 - DNA, 25 bp, Homo sapien
gtgggaaactgccaggtgcagtgcc

SEQ ID NO: 1371289 - DNA, 25 bp, Homo sapien
cgatctttttaagctccccaagtga

SEQ ID NO: 1371290 - DNA, 25 bp, Homo sapien
tgcccataaacagcttacggtctag

SEQ ID NO: 1371291 - DNA, 25 bp, Homo sapien
taggacccaggcacttcgatctttt

SEQ ID NO: 1371292 - DNA, 25 bp, Homo sapien
cccagtggttggcacgtgaaagaca

SEQ ID NO: 1371293 - DNA, 25 bp, Homo sapien
aagctcctggtgatgccgcagacca

SEQ ID NO: 1371294 - DNA, 25 bp, Homo sapien
gctagtttcgtttaatggtggcacc

SEQ ID NO: 1371295 - DNA, 25 bp, Homo sapien
catggtcactgattgaaggctggaa

SEQ ID NO: 1371296 - DNA, 25 bp, Homo sapien
tatgtcattctagtacttgtcaggg

SEQ ID NO: 1371297 - DNA, 25 bp, Homo sapien
taccaggaaacacagatcgtcgtgc

SEQ ID NO: 1371298 - DNA, 25 bp, Homo sapien
gaacgacatctccacagagcgggaa

SEQ ID NO: 1371299 - DNA, 25 bp, Homo sapien
tagctactagactggagaactacca

SEQ ID NO: 1371300 - DNA, 25 bp, Homo sapien
tggagaggacctgttggaacgacat

SEQ ID NO: 1371301 - DNA, 25 bp, Homo sapien
tggattagtagagtcaaatcctgtt

SEQ ID NO: 1371302 - DNA, 25 bp, Homo sapien
ctggattagtagagtcaaatcctgt

SEQ ID NO: 1371303 - DNA, 25 bp, Homo sapien
ggattagtagagtcaaatcctgttt

SEQ ID NO: 1371304 - DNA, 25 bp, Homo sapien
agtcgggaggctgcaacttatttcg

SEQ ID NO: 1371305 - DNA, 25 bp, Homo sapien
ctagaagtaccagggtataagtcgg

SEQ ID NO: 1371306 - DNA, 25 bp, Homo sapien
tggaaccatggctctcaaacttgcg

SEQ ID NO: 1371307 - DNA, 25 bp, Homo sapien
gcttatgcagtttcttggaaccatg

SEQ ID NO: 1371308 - DNA, 25 bp, Homo sapien
attcaaattatgcttaaagttttca

SEQ ID NO: 1371309 - DNA, 25 bp, Homo sapien
tattcaaattatgcttaaagttttc

SEQ ID NO: 1371310 - DNA, 25 bp, Homo sapien
tgcctgcctctcgaggaagacacct

SEQ ID NO: 1371311 - DNA, 25 bp, Homo sapien
cctgcctctcgaggaagacacctgc

SEQ ID NO: 1371312 - DNA, 25 bp, Homo sapien
gcctgcctctcgaggaagacacctg

SEQ ID NO: 1371313 - DNA, 25 bp, Homo sapien
cctgcctgcctctcgaggaagacac

SEQ ID NO: 1371314 - DNA, 25 bp, Homo sapien
cgctgattggcctcgttgattgggc

SEQ ID NO: 1371315 - DNA, 25 bp, Homo sapien
gtttcagcgtgcttcctgggcctcg

SEQ ID NO: 1371316 - DNA, 25 bp, Homo sapien
tgggcctcgtcatcgaattgttcgg

SEQ ID NO: 1371317 - DNA, 25 bp, Homo sapien
aattgttcggctgacggctgcgtgt

SEQ ID NO: 1371318 - DNA, 25 bp, Homo sapien
cgcgcgggttattttcgccgcggat

SEQ ID NO: 1371319 - DNA, 25 bp, Homo sapien
ctgcgcgcgggttattttcgccgcg

SEQ ID NO: 1371320 - DNA, 25 bp, Homo sapien
ctagtagcgggaccggcctctgcgc

SEQ ID NO: 1371321 - DNA, 25 bp, Homo sapien
gcctctgcgcgcgggttattttcgc

SEQ ID NO: 1371322 - DNA, 25 bp, Homo sapien
tattgaaataatagcacagttacac

SEQ ID NO: 1371323 - DNA, 25 bp, Homo sapien
tgtcaagaggtctttattgaaataa

SEQ ID NO: 1371324 - DNA, 25 bp, Homo sapien
taaatgtcaagaggtctttattgaa

SEQ ID NO: 1371325 - DNA, 25 bp, Homo sapien
tcaagaggtctttattgaaataata

SEQ ID NO: 1371326 - DNA, 25 bp, Homo sapien
ctacatatagcaggtcacagcagca

SEQ ID NO: 1371327 - DNA, 25 bp, Homo sapien
tacaatatgggatcgtgagaagagc

SEQ ID NO: 1371328 - DNA, 25 bp, Homo sapien
gcagactttggcaacgagactacat

SEQ ID NO: 1371329 - DNA, 25 bp, Homo sapien
tgaacacctgggaagtttaatctgg

SEQ ID NO: 1371330 - DNA, 25 bp, Homo sapien
tgtaagtccagagggtgacagttct

SEQ ID NO: 1371331 - DNA, 25 bp, Homo sapien
taagtccagagggtgacagttctat

SEQ ID NO: 1371332 - DNA, 25 bp, Homo sapien
ccattgtaagtccagagggtgacag

SEQ ID NO: 1371333 - DNA, 25 bp, Homo sapien
attgtaagtccagagggtgacagtt

SEQ ID NO: 1371334 - DNA, 25 bp, Homo sapien
gccatctgcactgaatcactttgtc

SEQ ID NO: 1371335 - DNA, 25 bp, Homo sapien
gtgccatctgcactgaatcactttg

SEQ ID NO: 1371336 - DNA, 25 bp, Homo sapien
tttgtccttgtgctcccccaccacc

SEQ ID NO: 1371337 - DNA, 25 bp, Homo sapien
tctgcactgaatcactttgtccttg

SEQ ID NO: 1371338 - DNA, 25 bp, Homo sapien
caacatttgacaagttgcctctctc

SEQ ID NO: 1371339 - DNA, 25 bp, Homo sapien
tcttgacgtaaagcttggtgaatcc

SEQ ID NO: 1371340 - DNA, 25 bp, Homo sapien
tatttgctaacatatacccatacag

SEQ ID NO: 1371341 - DNA, 25 bp, Homo sapien
tacattgaaaggtttatacagggat

SEQ ID NO: 1371342 - DNA, 25 bp, Homo sapien
gcctgttagcaagtagtgagctcca

SEQ ID NO: 1371343 - DNA, 25 bp, Homo sapien
gaatcgaacagagcgaacatcactg

SEQ ID NO: 1371344 - DNA, 25 bp, Homo sapien
tggctaagagacgaccactgggatc

SEQ ID NO: 1371345 - DNA, 25 bp, Homo sapien
tttcatatcataagagcctgttagc

SEQ ID NO: 1371346 - DNA, 25 bp, Homo sapien
tatatgagttacacttaaagccggg

SEQ ID NO: 1371347 - DNA, 25 bp, Homo sapien
gaagtcaactgtgttgcatgacact

SEQ ID NO: 1371348 - DNA, 25 bp, Homo sapien
tcctgagtcctagggaatgccagaa

SEQ ID NO: 1371349 - DNA, 25 bp, Homo sapien
cacagaataggtttcagctagagat

SEQ ID NO: 1371350 - DNA, 25 bp, Homo sapien
tgccaacaacacgaacacaacttgg

SEQ ID NO: 1371351 - DNA, 25 bp, Homo sapien
tctaacagtcttatcttgggaacca

SEQ ID NO: 1371352 - DNA, 25 bp, Homo sapien
cacaacttggtactcgaagatccca

SEQ ID NO: 1371353 - DNA, 25 bp, Homo sapien
ttatcttgggaaccagatgcaatca

SEQ ID NO: 1371354 - DNA, 25 bp, Homo sapien
tccactcaaagcatggaggccctgt

SEQ ID NO: 1371355 - DNA, 25 bp, Homo sapien
taaaatagctcctccgctttctggg

SEQ ID NO: 1371356 - DNA, 25 bp, Homo sapien
cctgtcctctttgacaatcggttgt

SEQ ID NO: 1371357 - DNA, 25 bp, Homo sapien
gtataaatgttacaatcccctgctc

SEQ ID NO: 1371358 - DNA, 25 bp, Homo sapien
gcgttacaagtctctgcattgaagg

SEQ ID NO: 1371359 - DNA, 25 bp, Homo sapien
aataactgcccacaaggactccagg

SEQ ID NO: 1371360 - DNA, 25 bp, Homo sapien
taccaccggctgcttaggagtctca

SEQ ID NO: 1371361 - DNA, 25 bp, Homo sapien
cattgaagggcagcactttgacgta

SEQ ID NO: 1371362 - DNA, 25 bp, Homo sapien
cctaaacatataagtctttggttct

SEQ ID NO: 1371363 - DNA, 25 bp, Homo sapien
taaacatataagtctttggttctac

SEQ ID NO: 1371364 - DNA, 25 bp, Homo sapien
atataagtctttggttctacctcca

SEQ ID NO: 1371365 - DNA, 25 bp, Homo sapien
aacatataagtctttggttctacct

SEQ ID NO: 1371366 - DNA, 25 bp, Homo sapien
ttggatcaattacatctggataggc

SEQ ID NO: 1371367 - DNA, 25 bp, Homo sapien
taggcacatactctcagagtttttg

SEQ ID NO: 1371368 - DNA, 25 bp, Homo sapien
cagcatataaacctccagctggatg

SEQ ID NO: 1371369 - DNA, 25 bp, Homo sapien
actgctctaacagcttgtgtgtctt

SEQ ID NO: 1371370 - DNA, 25 bp, Homo sapien
atgcaccatcagaggaaacattgtt

SEQ ID NO: 1371371 - DNA, 25 bp, Homo sapien
aaacattgtttgcaaagtcacccat

SEQ ID NO: 1371372 - DNA, 25 bp, Homo sapien
ttaataatgcaccatcagaggaaac

SEQ ID NO: 1371373 - DNA, 25 bp, Homo sapien
taatgcaccatcagaggaaacattg

SEQ ID NO: 1371374 - DNA, 25 bp, Homo sapien
ctttcgaccttgaaagactccctgg

SEQ ID NO: 1371375 - DNA, 25 bp, Homo sapien
cctttcgaccttgaaagactccctg

SEQ ID NO: 1371376 - DNA, 25 bp, Homo sapien
ccgccggacctacagagctcatggt

SEQ ID NO: 1371377 - DNA, 25 bp, Homo sapien
tgaacaaagcacctaagatgcgccg

SEQ ID NO: 1371378 - DNA, 25 bp, Homo sapien
ggtttagatgtagattctctggtca

SEQ ID NO: 1371379 - DNA, 25 bp, Homo sapien
aacactcgtgaaactgctcaggcca

SEQ ID NO: 1371380 - DNA, 25 bp, Homo sapien
tgtacttaatctcagccaaaaagct

SEQ ID NO: 1371381 - DNA, 25 bp, Homo sapien
gaaaatgctccttaactattcccat

SEQ ID NO: 1371382 - DNA, 25 bp, Homo sapien
tgtaaatatgcagtcttccactgct

SEQ ID NO: 1371383 - DNA, 25 bp, Homo sapien
tgaattcctataagcatccaagtgc

SEQ ID NO: 1371384 - DNA, 25 bp, Homo sapien
tgatccaggattacgaggagtgctt

SEQ ID NO: 1371385 - DNA, 25 bp, Homo sapien
cattagatccattgcctttgctccc

SEQ ID NO: 1371386 - DNA, 25 bp, Homo sapien
ggcttccacaaggtgattcctccag

SEQ ID NO: 1371387 - DNA, 25 bp, Homo sapien
tgagtgctgatacctcattaccaag

SEQ ID NO: 1371388 - DNA, 25 bp, Homo sapien
tgattcacgcctccttcaagcaaca

SEQ ID NO: 1371389 - DNA, 25 bp, Homo sapien
tgttcagtaagattctgctgctgat

SEQ ID NO: 1371390 - DNA, 25 bp, Homo sapien
catctgttggtatatctgccgctgt

SEQ ID NO: 1371391 - DNA, 25 bp, Homo sapien
gctgttgatagcgtaatctttgcct

SEQ ID NO: 1371392 - DNA, 25 bp, Homo sapien
tagctggtcctggattctgtgctcc

SEQ ID NO: 1371393 - DNA, 25 bp, Homo sapien
tctggcccaagatttcactgccgat

SEQ ID NO: 1371394 - DNA, 25 bp, Homo sapien
cctctgtgcatcaacaggtgtatca

SEQ ID NO: 1371395 - DNA, 25 bp, Homo sapien
atttcactgccgataggcctctgtg

SEQ ID NO: 1371396 - DNA, 25 bp, Homo sapien
tattctcaagcatgagacttctact

SEQ ID NO: 1371397 - DNA, 25 bp, Homo sapien
cgctcaggggattcttcgtaaatac

SEQ ID NO: 1371398 - DNA, 25 bp, Homo sapien
tcttcgtaaatactgtgacattctg

SEQ ID NO: 1371399 - DNA, 25 bp, Homo sapien
cattctgtattctcaagcatgagac

SEQ ID NO: 1371400 - DNA, 25 bp, Homo sapien
taaactcggcatgattggtcagacg

SEQ ID NO: 1371401 - DNA, 25 bp, Homo sapien
gactggttagtccacaggtgaggcc

SEQ ID NO: 1371402 - DNA, 25 bp, Homo sapien
tcaaaacagtgaactcgtgcggtgc

SEQ ID NO: 1371403 - DNA, 25 bp, Homo sapien
cagagagcgggtcatataggcatca

SEQ ID NO: 1371404 - DNA, 25 bp, Homo sapien
catcgcgttgttaacacataaagct

SEQ ID NO: 1371405 - DNA, 25 bp, Homo sapien
gacatcgcgttgttaacacataaag

SEQ ID NO: 1371406 - DNA, 25 bp, Homo sapien
tgctgacatcgcgttgttaacacat

SEQ ID NO: 1371407 - DNA, 25 bp, Homo sapien
atcttctgctgacatcgcgttgtta

SEQ ID NO: 1371408 - DNA, 25 bp, Homo sapien
actgaagaacttcatcccattgacc

SEQ ID NO: 1371409 - DNA, 25 bp, Homo sapien
ctgaagaacttcatcccattgacca

SEQ ID NO: 1371410 - DNA, 25 bp, Homo sapien
aactgaagaacttcatcccattgac

SEQ ID NO: 1371411 - DNA, 25 bp, Homo sapien
gaactgaagaacttcatcccattga

SEQ ID NO: 1371412 - DNA, 25 bp, Homo sapien
cttgttctttttaacagacctctgg

SEQ ID NO: 1371413 - DNA, 25 bp, Homo sapien
tcttttattatcataccacaaccac

SEQ ID NO: 1371414 - DNA, 25 bp, Homo sapien
caaagtctccgattttcttagtcaa

SEQ ID NO: 1371415 - DNA, 25 bp, Homo sapien
aaccacaatggagtgatgactcttg

SEQ ID NO: 1371416 - DNA, 25 bp, Homo sapien
tttcaacctcttttacattcactgt

SEQ ID NO: 1371417 - DNA, 25 bp, Homo sapien
cttctttgaattcaggaagtccaaa

SEQ ID NO: 1371418 - DNA, 25 bp, Homo sapien
caaaattagcttaatgatttcaacc

SEQ ID NO: 1371419 - DNA, 25 bp, Homo sapien
gggccagcatactaatgtgaagctt

SEQ ID NO: 1371420 - DNA, 25 bp, Homo sapien
tgtaggtctgctacaactgagcaca

SEQ ID NO: 1371421 - DNA, 25 bp, Homo sapien
ctgtaggtctgctacaactgagcac

SEQ ID NO: 1371422 - DNA, 25 bp, Homo sapien
gtaggtctgctacaactgagcacat

SEQ ID NO: 1371423 - DNA, 25 bp, Homo sapien
tggttaaaccagaatgccacagtca

SEQ ID NO: 1371424 - DNA, 25 bp, Homo sapien
tttggttaaaccagaatgccacagt

SEQ ID NO: 1371425 - DNA, 25 bp, Homo sapien
ggttaaaccagaatgccacagtcat

SEQ ID NO: 1371426 - DNA, 25 bp, Homo sapien
tctttggttaaaccagaatgccaca

SEQ ID NO: 1371427 - DNA, 25 bp, Homo sapien
gagggcagggacttatttatgcccc

SEQ ID NO: 1371428 - DNA, 25 bp, Homo sapien
ttagcacacagtagtagacactgac

SEQ ID NO: 1371429 - DNA, 25 bp, Homo sapien
gactttcactatattgtgcaggcca

SEQ ID NO: 1371430 - DNA, 25 bp, Homo sapien
ccaggccaaccacagatacttttaa

SEQ ID NO: 1371431 - DNA, 25 bp, Homo sapien
tacttactcatgtcagatattgttg

SEQ ID NO: 1371432 - DNA, 25 bp, Homo sapien
tatggaatacttactcatgtcagat

SEQ ID NO: 1371433 - DNA, 25 bp, Homo sapien
gtaattcacttaatcctccaacaac

SEQ ID NO: 1371434 - DNA, 25 bp, Homo sapien
gatattgttgtaaatagtaattcac

SEQ ID NO: 1371435 - DNA, 25 bp, Homo sapien
ttaaagcccatatagggaacagtgg

SEQ ID NO: 1371436 - DNA, 25 bp, Homo sapien
tcagtaggtagtggttgctgtcaaa

SEQ ID NO: 1371437 - DNA, 25 bp, Homo sapien
gctaaggacttaggcattattcagt

SEQ ID NO: 1371438 - DNA, 25 bp, Homo sapien
tattggaaggccttgagtagcaggc

SEQ ID NO: 1371439 - DNA, 25 bp, Homo sapien
tagccactcctgatagcgttcggcg

SEQ ID NO: 1371440 - DNA, 25 bp, Homo sapien
gaaaacctcataggtaggctgctgc

SEQ ID NO: 1371441 - DNA, 25 bp, Homo sapien
tttcaaacacactgacgcgggccag

SEQ ID NO: 1371442 - DNA, 25 bp, Homo sapien
acccgcggtgctggagttctctcaa

SEQ ID NO: 1371443 - DNA, 25 bp, Homo sapien
aaagcacccaagtcatcaactgcca

SEQ ID NO: 1371444 - DNA, 25 bp, Homo sapien
tgttgtaatggccttttacgtcctg

SEQ ID NO: 1371445 - DNA, 25 bp, Homo sapien
gctgtggcaattgcttgtgttgtaa

SEQ ID NO: 1371446 - DNA, 25 bp, Homo sapien
tgtgattggaaccaggctgcatgct

SEQ ID NO: 1371447 - DNA, 25 bp, Homo sapien
gcagaccattttagatggctcagca

SEQ ID NO: 1371448 - DNA, 25 bp, Homo sapien
gaagtactttgccatggagttagta

SEQ ID NO: 1371449 - DNA, 25 bp, Homo sapien
gagttagtaactcctgagcagacca

SEQ ID NO: 1371450 - DNA, 25 bp, Homo sapien
catcagtgtgtttggacagttcata

SEQ ID NO: 1371451 - DNA, 25 bp, Homo sapien
caaaccagtttttacagcctcctgg

SEQ ID NO: 1371452 - DNA, 25 bp, Homo sapien
ggatagcagtattgcctcagattca

SEQ ID NO: 1371453 - DNA, 25 bp, Homo sapien
tgactttccctaagcagataagcag

SEQ ID NO: 1371454 - DNA, 25 bp, Homo sapien
agcctcctgggtgggtcgtcttgac

SEQ ID NO: 1371455 - DNA, 25 bp, Homo sapien
atttgatcggatcgtgaccccagcc

SEQ ID NO: 1371456 - DNA, 25 bp, Homo sapien
ggccgacccgaaatgaaaagctctc

SEQ ID NO: 1371457 - DNA, 25 bp, Homo sapien
ccgacccgaaatgaaaagctctcct

SEQ ID NO: 1371458 - DNA, 25 bp, Homo sapien
ttgatcttatttgatcggatcgtga

SEQ ID NO: 1371459 - DNA, 25 bp, Homo sapien
ctgtggtccccgaggtcccggagct

SEQ ID NO: 1371460 - DNA, 25 bp, Homo sapien
gccacgctgtggtccccgaggtccc

SEQ ID NO: 1371461 - DNA, 25 bp, Homo sapien
ggcggccacgctgtggtccccgagg

SEQ ID NO: 1371462 - DNA, 25 bp, Homo sapien
ttaggcggcggccacgctgtggtcc

SEQ ID NO: 1371463 - DNA, 25 bp, Homo sapien
cactgattatcgaggcgattctgat

SEQ ID NO: 1371464 - DNA, 25 bp, Homo sapien
tgtccccggccactgattatcgagg

SEQ ID NO: 1371465 - DNA, 25 bp, Homo sapien
ttgatcagatagacgaggccgggct

SEQ ID NO: 1371466 - DNA, 25 bp, Homo sapien
gctcagaagtgatgaattgatcaga

SEQ ID NO: 1371467 - DNA, 25 bp, Homo sapien
tgattaaatactggcccagactgac

SEQ ID NO: 1371468 - DNA, 25 bp, Homo sapien
cagcagagcccctgatggtaccctg

SEQ ID NO: 1371469 - DNA, 25 bp, Homo sapien
tggtaccctgcctatcaagaccctt

SEQ ID NO: 1371470 - DNA, 25 bp, Homo sapien
cctgatggtaccctgcctatcaaga

SEQ ID NO: 1371471 - DNA, 25 bp, Homo sapien
gtccctccaggtcacgggtgcctcg

SEQ ID NO: 1371472 - DNA, 25 bp, Homo sapien
actggagtcaattcgggtgaatccg

SEQ ID NO: 1371473 - DNA, 25 bp, Homo sapien
gagaactggagtcaattcgggtgaa

SEQ ID NO: 1371474 - DNA, 25 bp, Homo sapien
gccttgctgcaacgatcttggccgc

SEQ ID NO: 1371475 - DNA, 25 bp, Homo sapien
gaagactgggagagcgtttccggca

SEQ ID NO: 1371476 - DNA, 25 bp, Homo sapien
ggaagactgggagagcgtttccggc

SEQ ID NO: 1371477 - DNA, 25 bp, Homo sapien
aagactgggagagcgtttccggcat

SEQ ID NO: 1371478 - DNA, 25 bp, Homo sapien
tctatttaatggaagtgggccgcag

SEQ ID NO: 1371479 - DNA, 25 bp, Homo sapien
tgcacaaatctatttaatggaagtg

SEQ ID NO: 1371480 - DNA, 25 bp, Homo sapien
ataattagttcagggatctgtcaac

SEQ ID NO: 1371481 - DNA, 25 bp, Homo sapien
gtgggccgcagtatgtttcactata

SEQ ID NO: 1371482 - DNA, 25 bp, Homo sapien
catctttctttcgggagtagcctcc

SEQ ID NO: 1371483 - DNA, 25 bp, Homo sapien
tctttctttcgggagtagcctccat

SEQ ID NO: 1371484 - DNA, 25 bp, Homo sapien
atctttctttcgggagtagcctcca

SEQ ID NO: 1371485 - DNA, 25 bp, Homo sapien
tccttggatgctgtggatggactcc

SEQ ID NO: 1371486 - DNA, 25 bp, Homo sapien
ctttttagggttgatccagtgtctg

SEQ ID NO: 1371487 - DNA, 25 bp, Homo sapien
ctcctttttagggttgatccagtgt

SEQ ID NO: 1371488 - DNA, 25 bp, Homo sapien
ctatggatccttggatgctgtggat

SEQ ID NO: 1371489 - DNA, 25 bp, Homo sapien
ttatacagatgagcacaatcttggg

SEQ ID NO: 1371490 - DNA, 25 bp, Homo sapien
ttaccttatatgactggatggcagc

SEQ ID NO: 1371491 - DNA, 25 bp, Homo sapien
ggcaaggtagttgaatgtgatctca

SEQ ID NO: 1371492 - DNA, 25 bp, Homo sapien
gggagatttctgttcatcttagaca

SEQ ID NO: 1371493 - DNA, 25 bp, Homo sapien
tggtggttgtacaaggctgctaagc

SEQ ID NO: 1371494 - DNA, 25 bp, Homo sapien
ctataggtatcctgcgtggttttct

SEQ ID NO: 1371495 - DNA, 25 bp, Homo sapien
taggtatcctgcgtggttttctggt

SEQ ID NO: 1371496 - DNA, 25 bp, Homo sapien
tgctaagcggaagtccaggtcatcc

SEQ ID NO: 1371497 - DNA, 25 bp, Homo sapien
ctcgggatcaaaatagtaggcatcc

SEQ ID NO: 1371498 - DNA, 25 bp, Homo sapien
taattgtgggggttgagttgagccg

SEQ ID NO: 1371499 - DNA, 25 bp, Homo sapien
aaggtgtgttgggttcttatatggc

SEQ ID NO: 1371500 - DNA, 25 bp, Homo sapien
gggttgagttgagccgactccaggg

SEQ ID NO: 1371501 - DNA, 25 bp, Homo sapien
agcccgcagttctcctaagtaggaa

SEQ ID NO: 1371502 - DNA, 25 bp, Homo sapien
cttggaagcccgcagttctcctaag

SEQ ID NO: 1371503 - DNA, 25 bp, Homo sapien
cagttctcctaagtaggaatcatcg

SEQ ID NO: 1371504 - DNA, 25 bp, Homo sapien
tcctaagtaggaatcatcgttatct

SEQ ID NO: 1371505 - DNA, 25 bp, Homo sapien
ccgggtcccaattgtttggagcgct

SEQ ID NO: 1371506 - DNA, 25 bp, Homo sapien
caattgtttggagcgctggtttcgg

SEQ ID NO: 1371507 - DNA, 25 bp, Homo sapien
gcgctggtttcggttgccaggcaac

SEQ ID NO: 1371508 - DNA, 25 bp, Homo sapien
gcctcactggcataagatcccgggt

SEQ ID NO: 1371509 - DNA, 25 bp, Homo sapien
gggcctcttccaggcgacgacgtct

SEQ ID NO: 1371510 - DNA, 25 bp, Homo sapien
gacgacgtctggagggtgatctctc

SEQ ID NO: 1371511 - DNA, 25 bp, Homo sapien
gcaacatcggagatgctcataaaat

SEQ ID NO: 1371512 - DNA, 25 bp, Homo sapien
tttctctcggttcacacgccacgtg

SEQ ID NO: 1371513 - DNA, 25 bp, Homo sapien
gctggcttggaggatgcttccactg

SEQ ID NO: 1371514 - DNA, 25 bp, Homo sapien
aaacggaaatttgttggctggcttg

SEQ ID NO: 1371515 - DNA, 25 bp, Homo sapien
ggctggcttggaggatgcttccact

SEQ ID NO: 1371516 - DNA, 25 bp, Homo sapien
ggcttggaggatgcttccactgtgt

SEQ ID NO: 1371517 - DNA, 25 bp, Homo sapien
ggcctgcctgttgggccggttgcgc

SEQ ID NO: 1371518 - DNA, 25 bp, Homo sapien
cgggcctgcctgttgggccggttgc

SEQ ID NO: 1371519 - DNA, 25 bp, Homo sapien
cctgcctgttgggccggttgcgcac

SEQ ID NO: 1371520 - DNA, 25 bp, Homo sapien
ccgggcctgcctgttgggccggttg

SEQ ID NO: 1371521 - DNA, 25 bp, Homo sapien
cccacgccgcgcgcaccagcggcgg

SEQ ID NO: 1371522 - DNA, 25 bp, Homo sapien
gcccacgccgcgcgcaccagcggcg

SEQ ID NO: 1371523 - DNA, 25 bp, Homo sapien
gagaggaggcggttgtcaaggcgac

SEQ ID NO: 1371524 - DNA, 25 bp, Homo sapien
ggtgttggcgtagccgcagggaggt

SEQ ID NO: 1371525 - DNA, 25 bp, Homo sapien
gtgactgaagcgagcctggcctctt

SEQ ID NO: 1371526 - DNA, 25 bp, Homo sapien
tcaaggcgacgtgggtaggaggaga

SEQ ID NO: 1371527 - DNA, 25 bp, Homo sapien
tcaggacaacgctatggctgagcct

SEQ ID NO: 1371528 - DNA, 25 bp, Homo sapien
tgggaccgccttccaggtgacccag

SEQ ID NO: 1371529 - DNA, 25 bp, Homo sapien
ccagggaacgggaccggagcttcat

SEQ ID NO: 1371530 - DNA, 25 bp, Homo sapien
gaagaactgagaggcgcataccccg

SEQ ID NO: 1371531 - DNA, 25 bp, Homo sapien
ggcgaagagtgctgatttcaccacg

SEQ ID NO: 1371532 - DNA, 25 bp, Homo sapien
aggaaggcgaagagtgctgatttca

SEQ ID NO: 1371533 - DNA, 25 bp, Homo sapien
gagtgctgatttcaccacggaatca

SEQ ID NO: 1371534 - DNA, 25 bp, Homo sapien
gaagagtgctgatttcaccacggaa

SEQ ID NO: 1371535 - DNA, 25 bp, Homo sapien
gaaatttgggcccatcctaatccat

SEQ ID NO: 1371536 - DNA, 25 bp, Homo sapien
tgttacatggccttcctcttgtgtg

SEQ ID NO: 1371537 - DNA, 25 bp, Homo sapien
gcaagccaggagtctaaaaccaaag

SEQ ID NO: 1371538 - DNA, 25 bp, Homo sapien
tgggtcttctcatggcataaggcct

SEQ ID NO: 1371539 - DNA, 25 bp, Homo sapien
ctgggccgcatagcaagactctctc

SEQ ID NO: 1371540 - DNA, 25 bp, Homo sapien
gacagaaatctcctttggcccaata

SEQ ID NO: 1371541 - DNA, 25 bp, Homo sapien
gctggacatggtgacgtaaatctgt

SEQ ID NO: 1371542 - DNA, 25 bp, Homo sapien
tattgcttcctaacaaattacccta

SEQ ID NO: 1371543 - DNA, 25 bp, Homo sapien
gagtctcttaggaggttacagtcaa

SEQ ID NO: 1371544 - DNA, 25 bp, Homo sapien
gctcagagtctcttaggaggttaca

SEQ ID NO: 1371545 - DNA, 25 bp, Homo sapien
tggctcagagtctcttaggaggtta

SEQ ID NO: 1371546 - DNA, 25 bp, Homo sapien
cagagtctcttaggaggttacagtc

SEQ ID NO: 1371547 - DNA, 25 bp, Homo sapien
cagtggtcaatatcacagtttcccg

SEQ ID NO: 1371548 - DNA, 25 bp, Homo sapien
cagtttcccggaggaaacattgaag

SEQ ID NO: 1371549 - DNA, 25 bp, Homo sapien
ggaaacattgaaggcgactcaatgg

SEQ ID NO: 1371550 - DNA, 25 bp, Homo sapien
aaggcgactcaatggcactgcttcc

SEQ ID NO: 1371551 - DNA, 25 bp, Homo sapien
tagataaagccctgcggagctgagc

SEQ ID NO: 1371552 - DNA, 25 bp, Homo sapien
tgagctggtttcaccttcgtcatta

SEQ ID NO: 1371553 - DNA, 25 bp, Homo sapien
gtcattacaactttgaagccctctg

SEQ ID NO: 1371554 - DNA, 25 bp, Homo sapien
caccttcgtcattacaactttgaag

SEQ ID NO: 1371555 - DNA, 25 bp, Homo sapien
tgaggttcagatggcttttccagcc

SEQ ID NO: 1371556 - DNA, 25 bp, Homo sapien
tcacttcacctgttcaggcttcggg

SEQ ID NO: 1371557 - DNA, 25 bp, Homo sapien
tactggccgtgcgaccttaggaaaa

SEQ ID NO: 1371558 - DNA, 25 bp, Homo sapien
tccagcccgctggttaacacagctg

SEQ ID NO: 1371559 - DNA, 25 bp, Homo sapien
taggaccaaacggaggactttgctg

SEQ ID NO: 1371560 - DNA, 25 bp, Homo sapien
taaatgtgcacacgaatcgcctggg

SEQ ID NO: 1371561 - DNA, 25 bp, Homo sapien
cgcctgggaatcgtattaacatgca

SEQ ID NO: 1371562 - DNA, 25 bp, Homo sapien
gatcgtcatagtaaagtgttgcctc

SEQ ID NO: 1371563 - DNA, 25 bp, Homo sapien
caaagccctggtggatacatcctcc

SEQ ID NO: 1371564 - DNA, 25 bp, Homo sapien
cacagaataaacgtctaggctggcc

SEQ ID NO: 1371565 - DNA, 25 bp, Homo sapien
taaacaaggtgttcaccaagctggg

SEQ ID NO: 1371566 - DNA, 25 bp, Homo sapien
taagcttaacgcatctgctcaggca

SEQ ID NO: 1371567 - DNA, 25 bp, Homo sapien
tggcctacatgttcaattttctatg

SEQ ID NO: 1371568 - DNA, 25 bp, Homo sapien
cctggcctacatgttcaattttcta

SEQ ID NO: 1371569 - DNA, 25 bp, Homo sapien
gtgcctggcctacatgttcaatttt

SEQ ID NO: 1371570 - DNA, 25 bp, Homo sapien
tgcctggcctacatgttcaattttc

SEQ ID NO: 1371571 - DNA, 25 bp, Homo sapien
gagacccattacgtataacccagga

SEQ ID NO: 1371572 - DNA, 25 bp, Homo sapien
gatagttagctatgtcacaccctca

SEQ ID NO: 1371573 - DNA, 25 bp, Homo sapien
tcatctcaggagtccatgacggcgg

SEQ ID NO: 1371574 - DNA, 25 bp, Homo sapien
tcaagaaggtcttagcacatctagc

SEQ ID NO: 1371575 - DNA, 25 bp, Homo sapien
ggcaattaacagattatagttgtat

SEQ ID NO: 1371576 - DNA, 25 bp, Homo sapien
tatgaataagcttctagagactctt

SEQ ID NO: 1371577 - DNA, 25 bp, Homo sapien
gcatatttactgcatgacatttgga

SEQ ID NO: 1371578 - DNA, 25 bp, Homo sapien
gttgttaccggttgagggcattatg

SEQ ID NO: 1371579 - DNA, 25 bp, Homo sapien
gtgcctgtcaccttcctaccagtag

SEQ ID NO: 1371580 - DNA, 25 bp, Homo sapien
gtcaccttcctaccagtaggaggct

SEQ ID NO: 1371581 - DNA, 25 bp, Homo sapien
cctgtcaccttcctaccagtaggag

SEQ ID NO: 1371582 - DNA, 25 bp, Homo sapien
tgcctgtcaccttcctaccagtagg

SEQ ID NO: 1371583 - DNA, 25 bp, Homo sapien
cagttgggaacaggcccaatagcct

SEQ ID NO: 1371584 - DNA, 25 bp, Homo sapien
aacaggcccaatagccttgactcca

SEQ ID NO: 1371585 - DNA, 25 bp, Homo sapien
tgactccaccctggtagttgcctcc

SEQ ID NO: 1371586 - DNA, 25 bp, Homo sapien
aagccgagcagttgggaacaggccc

SEQ ID NO: 1371587 - DNA, 25 bp, Homo sapien
caggggccagtctgtttcgcagcgc

SEQ ID NO: 1371588 - DNA, 25 bp, Homo sapien
ccaggggccagtctgtttcgcagcg

SEQ ID NO: 1371589 - DNA, 25 bp, Homo sapien
gggccagtctgtttcgcagcgccat

SEQ ID NO: 1371590 - DNA, 25 bp, Homo sapien
ggggccagtctgtttcgcagcgcca

SEQ ID NO: 1371591 - DNA, 25 bp, Homo sapien
tcttcctgcccggtggtcagaggca

SEQ ID NO: 1371592 - DNA, 25 bp, Homo sapien
gctggatcttagatggctttacatc

SEQ ID NO: 1371593 - DNA, 25 bp, Homo sapien
ttacatctttatggaatgctgggcc

SEQ ID NO: 1371594 - DNA, 25 bp, Homo sapien
agccacccttgacaaagaacactgg

SEQ ID NO: 1371595 - DNA, 25 bp, Homo sapien
gaagaaagctcctgtttggtcaaag

SEQ ID NO: 1371596 - DNA, 25 bp, Homo sapien
aggaagaaagctcctgtttggtcaa

SEQ ID NO: 1371597 - DNA, 25 bp, Homo sapien
agaaagctcctgtttggtcaaaggg

SEQ ID NO: 1371598 - DNA, 25 bp, Homo sapien
gggagggcatttccttgagccatgg

SEQ ID NO: 1371599 - DNA, 25 bp, Homo sapien
agccttttctgggtcgcctgcacgg

SEQ ID NO: 1371600 - DNA, 25 bp, Homo sapien
tgcccgaggagcacccgtgcttaaa

SEQ ID NO: 1371601 - DNA, 25 bp, Homo sapien
gaaaggtcaccagaagagtccctgg

SEQ ID NO: 1371602 - DNA, 25 bp, Homo sapien
tgaggcaggtcgactggagtacacc

SEQ ID NO: 1371603 - DNA, 25 bp, Homo sapien
gcttaaaggctccacggctcagatg

SEQ ID NO: 1371604 - DNA, 25 bp, Homo sapien
tgtccaggctatcgacgctgatgct

SEQ ID NO: 1371605 - DNA, 25 bp, Homo sapien
tcctggatatcaacgacaatgcccc

SEQ ID NO: 1371606 - DNA, 25 bp, Homo sapien
tatgagacgaccaaggagtacaccc

SEQ ID NO: 1371607 - DNA, 25 bp, Homo sapien
tacaccctacgggtgcgagcacagg

SEQ ID NO: 1371608 - DNA, 25 bp, Homo sapien
gagcaatgcacagggtcttcccggg

SEQ ID NO: 1371609 - DNA, 25 bp, Homo sapien
tccttaagaagaagtgtctgcccac

SEQ ID NO: 1371610 - DNA, 25 bp, Homo sapien
tggatgaggactcgtcaggctccga

SEQ ID NO: 1371611 - DNA, 25 bp, Homo sapien
tgcccaccatcagcgagaagagcag

SEQ ID NO: 1371612 - DNA, 25 bp, Homo sapien
tatacgctggaaattgactcccctt

SEQ ID NO: 1371613 - DNA, 25 bp, Homo sapien
caaagaggataggacctcccaggat

SEQ ID NO: 1371614 - DNA, 25 bp, Homo sapien
ccctcatacgccatcaccaaaagga

SEQ ID NO: 1371615 - DNA, 25 bp, Homo sapien
aaaggaaaggacaaagccacacgca

SEQ ID NO: 1371616 - DNA, 25 bp, Homo sapien
aagggtgtgcctcgtcctgcccgca

SEQ ID NO: 1371617 - DNA, 25 bp, Homo sapien
ggcaaagggtgtgcctcgtcctgcc

SEQ ID NO: 1371618 - DNA, 25 bp, Homo sapien
gggcaggcctcagaacggtgagggg

SEQ ID NO: 1371619 - DNA, 25 bp, Homo sapien
gcaggcctcagaacggtgaggggcc

SEQ ID NO: 1371620 - DNA, 25 bp, Homo sapien
cccgggcaggccagtcatgtgttaa

SEQ ID NO: 1371621 - DNA, 25 bp, Homo sapien
tcaagcacaggtttcaagtctgggt

SEQ ID NO: 1371622 - DNA, 25 bp, Homo sapien
aaatgctactttgtctaacctgctg

SEQ ID NO: 1371623 - DNA, 25 bp, Homo sapien
agtgcttcatttttcgtgcccgccc

SEQ ID NO: 1371624 - DNA, 25 bp, Homo sapien
tcaaaggaccaggtcctgttcctct

SEQ ID NO: 1371625 - DNA, 25 bp, Homo sapien
tgttcctctttctccccgactccac

SEQ ID NO: 1371626 - DNA, 25 bp, Homo sapien
tttctccccgactccaccccagctc

SEQ ID NO: 1371627 - DNA, 25 bp, Homo sapien
caaaggaccaggtcctgttcctctt

SEQ ID NO: 1371628 - DNA, 25 bp, Homo sapien
tcccgggggtctgatatggccatca

SEQ ID NO: 1371629 - DNA, 25 bp, Homo sapien
gttttgccgactgcttttcatctga

SEQ ID NO: 1371630 - DNA, 25 bp, Homo sapien
gagtcaccatttactccaagcatgt

SEQ ID NO: 1371631 - DNA, 25 bp, Homo sapien
ccaagcatgtattccagacttgtca

SEQ ID NO: 1371632 - DNA, 25 bp, Homo sapien
cagcaattcctgcaaagggttaaaa

SEQ ID NO: 1371633 - DNA, 25 bp, Homo sapien
ttctgccgtggattctcccccgtct

SEQ ID NO: 1371634 - DNA, 25 bp, Homo sapien
tcccctcagcaattcctgcaaaggg

SEQ ID NO: 1371635 - DNA, 25 bp, Homo sapien
cctcagcaattcctgcaaagggtta

SEQ ID NO: 1371636 - DNA, 25 bp, Homo sapien
catcagattgtacagtttggttgtt

SEQ ID NO: 1371637 - DNA, 25 bp, Homo sapien
atcagattgtacagtttggttgttg

SEQ ID NO: 1371638 - DNA, 25 bp, Homo sapien
ctgtaaatagggtagcgttttgttg

SEQ ID NO: 1371639 - DNA, 25 bp, Homo sapien
aactagttctgtgcgggtacagcac

SEQ ID NO: 1371640 - DNA, 25 bp, Homo sapien
tttcatgccccatactactgaataa

SEQ ID NO: 1371641 - DNA, 25 bp, Homo sapien
tgtccgcttctgtgtggtaccctgt

SEQ ID NO: 1371642 - DNA, 25 bp, Homo sapien
gcaggatcgacttccagatatacag

SEQ ID NO: 1371643 - DNA, 25 bp, Homo sapien
caggatcgacttccagatatacaga

SEQ ID NO: 1371644 - DNA, 25 bp, Homo sapien
aggatcgacttccagatatacagag

SEQ ID NO: 1371645 - DNA, 25 bp, Homo sapien
gaggccgctcacgtggaaatgtcca

SEQ ID NO: 1371646 - DNA, 25 bp, Homo sapien
gagtaagcttatcacaaactggcct

SEQ ID NO: 1371647 - DNA, 25 bp, Homo sapien
aatgtccagtgaaccaatgccaagg

SEQ ID NO: 1371648 - DNA, 25 bp, Homo sapien
gccagagtccagtagagaatgcgat

SEQ ID NO: 1371649 - DNA, 25 bp, Homo sapien
gctgcagattgctgcgagtggcacc

SEQ ID NO: 1371650 - DNA, 25 bp, Homo sapien
ctgcgagtggcacccatgacaggaa

SEQ ID NO: 1371651 - DNA, 25 bp, Homo sapien
gactgccactttcctggggggctgc

SEQ ID NO: 1371652 - DNA, 25 bp, Homo sapien
attgctgcgagtggcacccatgaca

SEQ ID NO: 1371653 - DNA, 25 bp, Homo sapien
ctgggcaagggcgggcattcttcct

SEQ ID NO: 1371654 - DNA, 25 bp, Homo sapien
aagggcgggcattcttcctcctgac

SEQ ID NO: 1371655 - DNA, 25 bp, Homo sapien
acgctgggcaagggcgggcattctt

SEQ ID NO: 1371656 - DNA, 25 bp, Homo sapien
ggcaagggcgggcattcttcctcct

SEQ ID NO: 1371657 - DNA, 25 bp, Homo sapien
tgtgtccactttcccgcactctgtg

SEQ ID NO: 1371658 - DNA, 25 bp, Homo sapien
cgagttgacagagaatccggaggta

SEQ ID NO: 1371659 - DNA, 25 bp, Homo sapien
ttggaagcccttttcgagttgacag

SEQ ID NO: 1371660 - DNA, 25 bp, Homo sapien
ttcgagttgacagagaatccggagg

SEQ ID NO: 1371661 - DNA, 25 bp, Homo sapien
ccggctggtgagtggcattcggctg

SEQ ID NO: 1371662 - DNA, 25 bp, Homo sapien
aggtggcacactccggctggtgagt

SEQ ID NO: 1371663 - DNA, 25 bp, Homo sapien
ggtgagtggcattcggctggcaggc

SEQ ID NO: 1371664 - DNA, 25 bp, Homo sapien
caggtggcacactccggctggtgag

SEQ ID NO: 1371665 - DNA, 25 bp, Homo sapien
ggatggccgagggaatgggcagttg

SEQ ID NO: 1371666 - DNA, 25 bp, Homo sapien
cgagggaatgggcagttgactggaa

SEQ ID NO: 1371667 - DNA, 25 bp, Homo sapien
agggaatgggcagttgactggaaga

SEQ ID NO: 1371668 - DNA, 25 bp, Homo sapien
tggccgagggaatgggcagttgact

SEQ ID NO: 1371669 - DNA, 25 bp, Homo sapien
cggggcaggcgttgagagttgctgg

SEQ ID NO: 1371670 - DNA, 25 bp, Homo sapien
ccggggcaggcgttgagagttgctg

SEQ ID NO: 1371671 - DNA, 25 bp, Homo sapien
caggacggatctgatgggggtgggt

SEQ ID NO: 1371672 - DNA, 25 bp, Homo sapien
ccaggacggatctgatgggggtggg

SEQ ID NO: 1371673 - DNA, 25 bp, Homo sapien
gccaggacggatctgatgggggtgg

SEQ ID NO: 1371674 - DNA, 25 bp, Homo sapien
aatttcagggtcaatcccacaaact

SEQ ID NO: 1371675 - DNA, 25 bp, Homo sapien
gaaatttcagggtcaatcccacaaa

SEQ ID NO: 1371676 - DNA, 25 bp, Homo sapien
gagaaatttcagggtcaatcccaca

SEQ ID NO: 1371677 - DNA, 25 bp, Homo sapien
tttcagggtcaatcccacaaactcc

SEQ ID NO: 1371678 - DNA, 25 bp, Homo sapien
caacttggctgctctggtctcctca

SEQ ID NO: 1371679 - DNA, 25 bp, Homo sapien
ccgcaacttggctgctctggtctcc

SEQ ID NO: 1371680 - DNA, 25 bp, Homo sapien
aacttggctgctctggtctcctcac

SEQ ID NO: 1371681 - DNA, 25 bp, Homo sapien
gcaacttggctgctctggtctcctc

SEQ ID NO: 1371682 - DNA, 25 bp, Homo sapien
ggagtcgatcgggtaagaggagaag

SEQ ID NO: 1371683 - DNA, 25 bp, Homo sapien
ggcttttggatgcagggaacagatt

SEQ ID NO: 1371684 - DNA, 25 bp, Homo sapien
gaagatgctgggcttttggatgcag

SEQ ID NO: 1371685 - DNA, 25 bp, Homo sapien
tggatgcagggaacagattgcaagt

SEQ ID NO: 1371686 - DNA, 25 bp, Homo sapien
gtttatcatagacatatactcagac

SEQ ID NO: 1371687 - DNA, 25 bp, Homo sapien
tctagatgtagaaatgctatccctg

SEQ ID NO: 1371688 - DNA, 25 bp, Homo sapien
gacactgtggtaagagttttggttc

SEQ ID NO: 1371689 - DNA, 25 bp, Homo sapien
accactccctgcatcatggcacaca

SEQ ID NO: 1371690 - DNA, 25 bp, Homo sapien
tcattactccggagtcgaggcgtca

SEQ ID NO: 1371691 - DNA, 25 bp, Homo sapien
cagcaggtctcggacaggactatcc

SEQ ID NO: 1371692 - DNA, 25 bp, Homo sapien
ttggagggcctctttccagatgtag

SEQ ID NO: 1371693 - DNA, 25 bp, Homo sapien
tccgcgtcaaagagttcacagtggg

SEQ ID NO: 1371694 - DNA, 25 bp, Homo sapien
gcctgcgctctcccgatcctgcagg

SEQ ID NO: 1371695 - DNA, 25 bp, Homo sapien
tgcgctctcccgatcctgcagggca

SEQ ID NO: 1371696 - DNA, 25 bp, Homo sapien
gctctcccgatcctgcagggcacac

SEQ ID NO: 1371697 - DNA, 25 bp, Homo sapien
tgggcttcactcggcgaggccccag

SEQ ID NO: 1371698 - DNA, 25 bp, Homo sapien
gttggcctcatcgaggatctcctcc

SEQ ID NO: 1371699 - DNA, 25 bp, Homo sapien
agcggccagccggttggcctcatcg

SEQ ID NO: 1371700 - DNA, 25 bp, Homo sapien
aggccccgtcgaagtggtttctctg

SEQ ID NO: 1371701 - DNA, 25 bp, Homo sapien
gccccgtcgaagtggtttctctgga

SEQ ID NO: 1371702 - DNA, 25 bp, Homo sapien
tctgggcgatgagatacctggttct

SEQ ID NO: 1371703 - DNA, 25 bp, Homo sapien
taataggcctttagcatttacggac

SEQ ID NO: 1371704 - DNA, 25 bp, Homo sapien
tcatgcccatgcaaaagggaacagg

SEQ ID NO: 1371705 - DNA, 25 bp, Homo sapien
caatagtgtcatagaggcccgagtc

SEQ ID NO: 1371706 - DNA, 25 bp, Homo sapien
caaggtctcatccacaataaacctt

SEQ ID NO: 1371707 - DNA, 25 bp, Homo sapien
aggtctcatccacaataaaccttac

SEQ ID NO: 1371708 - DNA, 25 bp, Homo sapien
gccccccaaagtccaaggtctcatc

SEQ ID NO: 1371709 - DNA, 25 bp, Homo sapien
gtctcatccacaataaaccttacat

SEQ ID NO: 1371710 - DNA, 25 bp, Homo sapien
gatgcagctctccatcgctgggtct

SEQ ID NO: 1371711 - DNA, 25 bp, Homo sapien
aagaatgaaagccagtcatgggtcc

SEQ ID NO: 1371712 - DNA, 25 bp, Homo sapien
gtcatgggtccctgatgcagctctc

SEQ ID NO: 1371713 - DNA, 25 bp, Homo sapien
gaaagccagtcatgggtccctgatg

SEQ ID NO: 1371714 - DNA, 25 bp, Homo sapien
ccagcaggagcgagagtccagttag

SEQ ID NO: 1371715 - DNA, 25 bp, Homo sapien
gccagcaggagcgagagtccagtta

SEQ ID NO: 1371716 - DNA, 25 bp, Homo sapien
agcaggagcgagagtccagttagat

SEQ ID NO: 1371717 - DNA, 25 bp, Homo sapien
ccagccagcaggagcgagagtccag

SEQ ID NO: 1371718 - DNA, 25 bp, Homo sapien
tcaggtatccattctgcccaaggct

SEQ ID NO: 1371719 - DNA, 25 bp, Homo sapien
cctcaggtatccattctgcccaagg

SEQ ID NO: 1371720 - DNA, 25 bp, Homo sapien
gagaaaccatacctttcctcaggta

SEQ ID NO: 1371721 - DNA, 25 bp, Homo sapien
tgagccggagagaaaccataccttt

SEQ ID NO: 1371722 - DNA, 25 bp, Homo sapien
tgctggaggcaaagcaagcgcccag

SEQ ID NO: 1371723 - DNA, 25 bp, Homo sapien
aggagtggcacctcccgcacagcta

SEQ ID NO: 1371724 - DNA, 25 bp, Homo sapien
gcaaagcaagcgcccaggagtggca

SEQ ID NO: 1371725 - DNA, 25 bp, Homo sapien
tagattcagggtgcaagccagggtc

SEQ ID NO: 1371726 - DNA, 25 bp, Homo sapien
cgatacggagggctcccccaactgc

SEQ ID NO: 1371727 - DNA, 25 bp, Homo sapien
gatacggagggctcccccaactgcc

SEQ ID NO: 1371728 - DNA, 25 bp, Homo sapien
acgatacggagggctcccccaactg

SEQ ID NO: 1371729 - DNA, 25 bp, Homo sapien
gggggcggcctgcacgccccatctt

SEQ ID NO: 1371730 - DNA, 25 bp, Homo sapien
ccgccactatcctcagggttctgca

SEQ ID NO: 1371731 - DNA, 25 bp, Homo sapien
ggggcggcctgcacgccccatcttc

SEQ ID NO: 1371732 - DNA, 25 bp, Homo sapien
ctccccgccactatcctcagggttc

SEQ ID NO: 1371733 - DNA, 25 bp, Homo sapien
cactcccctggcatcacacgcgaag

SEQ ID NO: 1371734 - DNA, 25 bp, Homo sapien
tcccctggcatcacacgcgaagcac

SEQ ID NO: 1371735 - DNA, 25 bp, Homo sapien
ccctggcatcacacgcgaagcacac

SEQ ID NO: 1371736 - DNA, 25 bp, Homo sapien
tttccactcccctggcatcacacgc

SEQ ID NO: 1371737 - DNA, 25 bp, Homo sapien
tcccgcaacctagtcccgggaatca

SEQ ID NO: 1371738 - DNA, 25 bp, Homo sapien
ctagtcccgggaatcagctccgagg

SEQ ID NO: 1371739 - DNA, 25 bp, Homo sapien
gggctcctttcgaatctctcaggcc

SEQ ID NO: 1371740 - DNA, 25 bp, Homo sapien
ttatcttccacgcaacaggctttct

SEQ ID NO: 1371741 - DNA, 25 bp, Homo sapien
cacgattttacaatttgggcagggc

SEQ ID NO: 1371742 - DNA, 25 bp, Homo sapien
ctcttgatgagaggagcaccgtgct

SEQ ID NO: 1371743 - DNA, 25 bp, Homo sapien
tagcctgagatcctttacatgggag

SEQ ID NO: 1371744 - DNA, 25 bp, Homo sapien
gcaccgtgctcatacaaagatagga

SEQ ID NO: 1371745 - DNA, 25 bp, Homo sapien
gttgaattcagttgtgtcgtagatg

SEQ ID NO: 1371746 - DNA, 25 bp, Homo sapien
gtggagggttgaattcagttgtgtc

SEQ ID NO: 1371747 - DNA, 25 bp, Homo sapien
gagggttgaattcagttgtgtcgta

SEQ ID NO: 1371748 - DNA, 25 bp, Homo sapien
ttgaattcagttgtgtcgtagatgt

SEQ ID NO: 1371749 - DNA, 25 bp, Homo sapien
aaccagacatggtgccgaagctcct

SEQ ID NO: 1371750 - DNA, 25 bp, Homo sapien
tggctcctgtgccatgaattcactt

SEQ ID NO: 1371751 - DNA, 25 bp, Homo sapien
actttgtagccatgacagcaaatgg

SEQ ID NO: 1371752 - DNA, 25 bp, Homo sapien
gctgagggcaccgttgtcacggtcc

SEQ ID NO: 1371753 - DNA, 25 bp, Homo sapien
ggcaccgttgtcacggtccctggct

SEQ ID NO: 1371754 - DNA, 25 bp, Homo sapien
cgactgtcggagagcgctttcctga

SEQ ID NO: 1371755 - DNA, 25 bp, Homo sapien
catttgctacataccagtgagagcc

SEQ ID NO: 1371756 - DNA, 25 bp, Homo sapien
gagctgtccggttctaaatgatgag

SEQ ID NO: 1371757 - DNA, 25 bp, Homo sapien
cagccagcagctacaagtcagagag

SEQ ID NO: 1371758 - DNA, 25 bp, Homo sapien
ttctcttggaagggaaggaatccat

SEQ ID NO: 1371759 - DNA, 25 bp, Homo sapien
ccctgtccttacacaccccacaggc

SEQ ID NO: 1371760 - DNA, 25 bp, Homo sapien
gctcatgatcctgaggcgtttactc

SEQ ID NO: 1371761 - DNA, 25 bp, Homo sapien
aggtgctgtgactcttgtgggttcc

SEQ ID NO: 1371762 - DNA, 25 bp, Homo sapien
gagtaccatgccttcttaggtgtcc

SEQ ID NO: 1371763 - DNA, 25 bp, Homo sapien
ctttgtcagagtaccatgccttctt

SEQ ID NO: 1371764 - DNA, 25 bp, Homo sapien
tcagagtaccatgccttcttaggtg

SEQ ID NO: 1371765 - DNA, 25 bp, Homo sapien
taccatgccttcttaggtgtcctca

SEQ ID NO: 1371766 - DNA, 25 bp, Homo sapien
tcagggctctgtacttagggttgcc

SEQ ID NO: 1371767 - DNA, 25 bp, Homo sapien
aaagggacccggcttgcggatctct

SEQ ID NO: 1371768 - DNA, 25 bp, Homo sapien
tatagatgcctccatcaaagggacc

SEQ ID NO: 1371769 - DNA, 25 bp, Homo sapien
gggttcaccgccttgcaggtataga

SEQ ID NO: 1371770 - DNA, 25 bp, Homo sapien
cagaagagctgggtattatagccgg

SEQ ID NO: 1371771 - DNA, 25 bp, Homo sapien
cagagaagtctcgttgggcaaaccc

SEQ ID NO: 1371772 - DNA, 25 bp, Homo sapien
ccggtgactgtagtgcagtcggcca

SEQ ID NO: 1371773 - DNA, 25 bp, Homo sapien
agaggcgcggacacagcagaagagc

SEQ ID NO: 1371774 - DNA, 25 bp, Homo sapien
gtcttcccagctcatgatccccatg

SEQ ID NO: 1371775 - DNA, 25 bp, Homo sapien
tcttcccagctcatgatccccatgc

SEQ ID NO: 1371776 - DNA, 25 bp, Homo sapien
ccggcctatccttaagtcttcccag

SEQ ID NO: 1371777 - DNA, 25 bp, Homo sapien
tcccagctcatgatccccatgcctc

SEQ ID NO: 1371778 - DNA, 25 bp, Homo sapien
tgatgaggtcagagacgatgcagct

SEQ ID NO: 1371779 - DNA, 25 bp, Homo sapien
tgagtccgcactggttttcagcaaa

SEQ ID NO: 1371780 - DNA, 25 bp, Homo sapien
ctggtgcggtgatagtgctccagca

SEQ ID NO: 1371781 - DNA, 25 bp, Homo sapien
caaagacacggaaggcataggagtt

SEQ ID NO: 1371782 - DNA, 25 bp, Homo sapien
caaacgtccaccagcttaatactct

SEQ ID NO: 1371783 - DNA, 25 bp, Homo sapien
agtgtagcgctgaagccccaaacgt

SEQ ID NO: 1371784 - DNA, 25 bp, Homo sapien
ggcggtgtccattccagtgtagcgc

SEQ ID NO: 1371785 - DNA, 25 bp, Homo sapien
agccttctgcaccgtgtatcccaga

SEQ ID NO: 1371786 - DNA, 25 bp, Homo sapien
cccagacatgacgtgggagccttgc

SEQ ID NO: 1371787 - DNA, 25 bp, Homo sapien
gacatgacgtgggagccttgccgca

SEQ ID NO: 1371788 - DNA, 25 bp, Homo sapien
acgtgggagccttgccgcagcttcc

SEQ ID NO: 1371789 - DNA, 25 bp, Homo sapien
tgtgtcccagacatgacgtgggagc

SEQ ID NO: 1371790 - DNA, 25 bp, Homo sapien
cacccagctgcacgcggagttggta

SEQ ID NO: 1371791 - DNA, 25 bp, Homo sapien
gagttggtagcgacctgagtcagca

SEQ ID NO: 1371792 - DNA, 25 bp, Homo sapien
catcatgtgtccagatggcttgagg

SEQ ID NO: 1371793 - DNA, 25 bp, Homo sapien
gagtcagcacgttgggcttctcgga

SEQ ID NO: 1371794 - DNA, 25 bp, Homo sapien
agcagccccgagaggcttcctgact

SEQ ID NO: 1371795 - DNA, 25 bp, Homo sapien
ccacagggaggcttgacttggagct

SEQ ID NO: 1371796 - DNA, 25 bp, Homo sapien
cctcctttcagcaacagcctaagga

SEQ ID NO: 1371797 - DNA, 25 bp, Homo sapien
aggaatgagggtaatgctttgagca

SEQ ID NO: 1371798 - DNA, 25 bp, Homo sapien
tgctagcaggactcttggtatctgt

SEQ ID NO: 1371799 - DNA, 25 bp, Homo sapien
gggaagattgcccctctgctagcag

SEQ ID NO: 1371800 - DNA, 25 bp, Homo sapien
aagattgcccctctgctagcaggac

SEQ ID NO: 1371801 - DNA, 25 bp, Homo sapien
gccccagacatggacccagtatggg

SEQ ID NO: 1371802 - DNA, 25 bp, Homo sapien
gaatgggattagtaggttcactgtg

SEQ ID NO: 1371803 - DNA, 25 bp, Homo sapien
tggaatgggattagtaggttcactg

SEQ ID NO: 1371804 - DNA, 25 bp, Homo sapien
atgggattagtaggttcactgtgtc

SEQ ID NO: 1371805 - DNA, 25 bp, Homo sapien
tgggattagtaggttcactgtgtcc

SEQ ID NO: 1371806 - DNA, 25 bp, Homo sapien
cagggcccgaggtagccagatcttg

SEQ ID NO: 1371807 - DNA, 25 bp, Homo sapien
gcctcagggcccgaggtagccagat

SEQ ID NO: 1371808 - DNA, 25 bp, Homo sapien
gtaggtctgcctcagggcccgaggt

SEQ ID NO: 1371809 - DNA, 25 bp, Homo sapien
taggtctgcctcagggcccgaggta

SEQ ID NO: 1371810 - DNA, 25 bp, Homo sapien
tcaccaaattaagcccttcttagag

SEQ ID NO: 1371811 - DNA, 25 bp, Homo sapien
aggagatggatactcagagaaagta

SEQ ID NO: 1371812 - DNA, 25 bp, Homo sapien
gagatggatactcagagaaagtaaa

SEQ ID NO: 1371813 - DNA, 25 bp, Homo sapien
atcggtcaccaaattaagcccttct

SEQ ID NO: 1371814 - DNA, 25 bp, Homo sapien
cagcaatgagcaccatagtcagggc

SEQ ID NO: 1371815 - DNA, 25 bp, Homo sapien
cacccagcaatgagcaccatagtca

SEQ ID NO: 1371816 - DNA, 25 bp, Homo sapien
tcagggcttggacagtggcctgccc

SEQ ID NO: 1371817 - DNA, 25 bp, Homo sapien
gcaatgagcaccatagtcagggctt

SEQ ID NO: 1371818 - DNA, 25 bp, Homo sapien
tttttgccaatgagacgtaagtggc

SEQ ID NO: 1371819 - DNA, 25 bp, Homo sapien
ccttccgtagcgtagctatctctga

SEQ ID NO: 1371820 - DNA, 25 bp, Homo sapien
tttgctggatggctacgcgaccagt

SEQ ID NO: 1371821 - DNA, 25 bp, Homo sapien
gctgcccggccaccttttgctggat

SEQ ID NO: 1371822 - DNA, 25 bp, Homo sapien
tcagcagatgggctctttctcctcc

SEQ ID NO: 1371823 - DNA, 25 bp, Homo sapien
cagcagatgggctctttctcctcca

SEQ ID NO: 1371824 - DNA, 25 bp, Homo sapien
agcagatgggctctttctcctccac

SEQ ID NO: 1371825 - DNA, 25 bp, Homo sapien
ctcagggtcccagggaacgcctctt

SEQ ID NO: 1371826 - DNA, 25 bp, Homo sapien
cagggtcccagggaacgcctctttg

SEQ ID NO: 1371827 - DNA, 25 bp, Homo sapien
gtgaaggggaaattgaatgcttctt

SEQ ID NO: 1371828 - DNA, 25 bp, Homo sapien
tgaaggggaaattgaatgcttcttc

SEQ ID NO: 1371829 - DNA, 25 bp, Homo sapien
catcgtgaaggggaaattgaatgct

SEQ ID NO: 1371830 - DNA, 25 bp, Homo sapien
cgtgaaggggaaattgaatgcttct

SEQ ID NO: 1371831 - DNA, 25 bp, Homo sapien
gagaccatcgtgaaggggaaattga

SEQ ID NO: 1371832 - DNA, 25 bp, Homo sapien
ggcacacagagaccatcgtgaaggg

SEQ ID NO: 1371833 - DNA, 25 bp, Homo sapien
tgaagcctggggtggttcagcatcc

SEQ ID NO: 1371834 - DNA, 25 bp, Homo sapien
gtggttcagcatccgctgggctggc

SEQ ID NO: 1371835 - DNA, 25 bp, Homo sapien
tcagcttggatcctgcggccacctc

SEQ ID NO: 1371836 - DNA, 25 bp, Homo sapien
aagcctggggtggttcagcatccgc

SEQ ID NO: 1371837 - DNA, 25 bp, Homo sapien
gctccagctctagattttcactgct

SEQ ID NO: 1371838 - DNA, 25 bp, Homo sapien
tttcactgctggtgatgagggaggg

SEQ ID NO: 1371839 - DNA, 25 bp, Homo sapien
ctgagctccagctctagattttcac

SEQ ID NO: 1371840 - DNA, 25 bp, Homo sapien
gagctccagctctagattttcactg

SEQ ID NO: 1371841 - DNA, 25 bp, Homo sapien
gacaatctgtttattggggccttgg

SEQ ID NO: 1371842 - DNA, 25 bp, Homo sapien
tgacagaagctcagcctctttgtaa

SEQ ID NO: 1371843 - DNA, 25 bp, Homo sapien
ggtaattggtaagatcccaggagcc

SEQ ID NO: 1371844 - DNA, 25 bp, Homo sapien
tctttgtaactggtataggagctaa

SEQ ID NO: 1371845 - DNA, 25 bp, Homo sapien
ccaaatatacagaaaattaccagta

SEQ ID NO: 1371846 - DNA, 25 bp, Homo sapien
ttaacccaaatattccaaatataca

SEQ ID NO: 1371847 - DNA, 25 bp, Homo sapien
attccaaatatacagaaaattacca

SEQ ID NO: 1371848 - DNA, 25 bp, Homo sapien
taacccaaatattccaaatatacag

SEQ ID NO: 1371849 - DNA, 25 bp, Homo sapien
taatgtgtaactgacgtgggtcact

SEQ ID NO: 1371850 - DNA, 25 bp, Homo sapien
ggtcactgaaactcgattatcccac

SEQ ID NO: 1371851 - DNA, 25 bp, Homo sapien
ggaattttatcatggggtctggctt

SEQ ID NO: 1371852 - DNA, 25 bp, Homo sapien
tggctttaatgtgtaactgacgtgg

SEQ ID NO: 1371853 - DNA, 25 bp, Homo sapien
ttttagggcacatgcagtaatgatc

SEQ ID NO: 1371854 - DNA, 25 bp, Homo sapien
gtttttagggcacatgcagtaatga

SEQ ID NO: 1371855 - DNA, 25 bp, Homo sapien
ggtttttagggcacatgcagtaatg

SEQ ID NO: 1371856 - DNA, 25 bp, Homo sapien
gggtttttagggcacatgcagtaat

SEQ ID NO: 1371857 - DNA, 25 bp, Homo sapien
ctgctttacactttcgtgggaaggc

SEQ ID NO: 1371858 - DNA, 25 bp, Homo sapien
ctttacactttcgtgggaaggcagc

SEQ ID NO: 1371859 - DNA, 25 bp, Homo sapien
gctttacactttcgtgggaaggcag

SEQ ID NO: 1371860 - DNA, 25 bp, Homo sapien
tttacactttcgtgggaaggcagct

SEQ ID NO: 1371861 - DNA, 25 bp, Homo sapien
tacctgagctggacaaacccatggc

SEQ ID NO: 1371862 - DNA, 25 bp, Homo sapien
caaatcatcagggaacagtcagtca

SEQ ID NO: 1371863 - DNA, 25 bp, Homo sapien
cactctaggtcattgtggacaggca

SEQ ID NO: 1371864 - DNA, 25 bp, Homo sapien
aataatgactaatgccaggccagcc

SEQ ID NO: 1371865 - DNA, 25 bp, Homo sapien
tatcctggtatcgtgacgaaggcca

SEQ ID NO: 1371866 - DNA, 25 bp, Homo sapien
tcccctccgtatcctggtatcgtga

SEQ ID NO: 1371867 - DNA, 25 bp, Homo sapien
tctggtttacagactcgatgcagga

SEQ ID NO: 1371868 - DNA, 25 bp, Homo sapien
cgtgacgaaggccatgagaaccagc

SEQ ID NO: 1371869 - DNA, 25 bp, Homo sapien
tggaggtggccagcacattaccagc

SEQ ID NO: 1371870 - DNA, 25 bp, Homo sapien
ctggaggtggccagcacattaccag

SEQ ID NO: 1371871 - DNA, 25 bp, Homo sapien
tacggctgatctatggactctcctg

SEQ ID NO: 1371872 - DNA, 25 bp, Homo sapien
caagcctgggagtttacacaatgat

SEQ ID NO: 1371873 - DNA, 25 bp, Homo sapien
gatatcattaaaagcgaagagccct

SEQ ID NO: 1371874 - DNA, 25 bp, Homo sapien
taagaactcggaccactttggactg

SEQ ID NO: 1371875 - DNA, 25 bp, Homo sapien
tgtgtacccgacaatcaactctagg

SEQ ID NO: 1371876 - DNA, 25 bp, Homo sapien
taagtctactggcacacacacaaag

SEQ ID NO: 1371877 - DNA, 25 bp, Homo sapien
tcatgatttagcaacgagccacacg

SEQ ID NO: 1371878 - DNA, 25 bp, Homo sapien
gaagcagcagataggcagccattgt

SEQ ID NO: 1371879 - DNA, 25 bp, Homo sapien
gttcttggagtaggactgtccccag

SEQ ID NO: 1371880 - DNA, 25 bp, Homo sapien
gcgccatgcagaacacacagaagtg

SEQ ID NO: 1371881 - DNA, 25 bp, Homo sapien
cagctgtttcgtctcgccagcagag

SEQ ID NO: 1371882 - DNA, 25 bp, Homo sapien
tgccaaagggcaattaacaagggta

SEQ ID NO: 1371883 - DNA, 25 bp, Homo sapien
ccacagggagtgtaagaggtactgt

SEQ ID NO: 1371884 - DNA, 25 bp, Homo sapien
ttccaccatccatgctgggtccagc

SEQ ID NO: 1371885 - DNA, 25 bp, Homo sapien
agccacagggagtgtaagaggtact

SEQ ID NO: 1371886 - DNA, 25 bp, Homo sapien
gggagtgtaagaggtactgtggttc

SEQ ID NO: 1371887 - DNA, 25 bp, Homo sapien
gctgcagcacagagtatcgatgcac

SEQ ID NO: 1371888 - DNA, 25 bp, Homo sapien
cacagagtatcgatgcaccaggaac

SEQ ID NO: 1371889 - DNA, 25 bp, Homo sapien
tgggaggctgtgtccaaagcatcca

SEQ ID NO: 1371890 - DNA, 25 bp, Homo sapien
tccacaccattggcctctgcatgct

SEQ ID NO: 1371891 - DNA, 25 bp, Homo sapien
gcatcaatcccacgatggccaggat

SEQ ID NO: 1371892 - DNA, 25 bp, Homo sapien
ttcacaatgagcactcctgctacga

SEQ ID NO: 1371893 - DNA, 25 bp, Homo sapien
ctgctacgactgtgaccagcatcaa

SEQ ID NO: 1371894 - DNA, 25 bp, Homo sapien
gcactcctgctacgactgtgaccag

SEQ ID NO: 1371895 - DNA, 25 bp, Homo sapien
tttgaacatacttaacatgacttgg

SEQ ID NO: 1371896 - DNA, 25 bp, Homo sapien
ccattaccatagctcaatttttcac

SEQ ID NO: 1371897 - DNA, 25 bp, Homo sapien
taaatcaaaaccagcccattaccat

SEQ ID NO: 1371898 - DNA, 25 bp, Homo sapien
catgcccgacaggtaacttgcttca

SEQ ID NO: 1371899 - DNA, 25 bp, Homo sapien
tcttttacttctcgaactggattta

SEQ ID NO: 1371900 - DNA, 25 bp, Homo sapien
tacttctcgaactggatttacccca

SEQ ID NO: 1371901 - DNA, 25 bp, Homo sapien
gagtcattttctggacggtagtagc

SEQ ID NO: 1371902 - DNA, 25 bp, Homo sapien
gtgttcttctcttccgtacagacaa

SEQ ID NO: 1371903 - DNA, 25 bp, Homo sapien
ggcccttcagttctggctgttccac

SEQ ID NO: 1371904 - DNA, 25 bp, Homo sapien
agacaaaactccaggtcgtggccct

SEQ ID NO: 1371905 - DNA, 25 bp, Homo sapien
gcaagagtcagcaaataaagtacct

SEQ ID NO: 1371906 - DNA, 25 bp, Homo sapien
gagtcagcaaataaagtacctttca

SEQ ID NO: 1371907 - DNA, 25 bp, Homo sapien
ctgcaagagtcagcaaataaagtac

SEQ ID NO: 1371908 - DNA, 25 bp, Homo sapien
gcaaataaagtacctttcaaagcag

SEQ ID NO: 1371909 - DNA, 25 bp, Homo sapien
gcagtacacggcaaatttttctgtc

SEQ ID NO: 1371910 - DNA, 25 bp, Homo sapien
catctctccatagtgccacccactg

SEQ ID NO: 1371911 - DNA, 25 bp, Homo sapien
atgttgcccttgcagtacacggcaa

SEQ ID NO: 1371912 - DNA, 25 bp, Homo sapien
tgaggtcttgacaaattgctcaggc

SEQ ID NO: 1371913 - DNA, 25 bp, Homo sapien
tatggatgctgcttgtatttcaagg

SEQ ID NO: 1371914 - DNA, 25 bp, Homo sapien
ctgcgcatagctggtattcaatgag

SEQ ID NO: 1371915 - DNA, 25 bp, Homo sapien
tatttggggaatatatggatgctgc

SEQ ID NO: 1371916 - DNA, 25 bp, Homo sapien
gcgcatagctggtattcaatgagta

SEQ ID NO: 1371917 - DNA, 25 bp, Homo sapien
ggatttcaatatttgttagccctat

SEQ ID NO: 1371918 - DNA, 25 bp, Homo sapien
tcaatatttgttagccctataagaa

SEQ ID NO: 1371919 - DNA, 25 bp, Homo sapien
gctggatttcaatatttgttagccc

SEQ ID NO: 1371920 - DNA, 25 bp, Homo sapien
tgttagccctataagaaaactgtct

SEQ ID NO: 1371921 - DNA, 25 bp, Homo sapien
gggagacagagaaatctgaggaatg

SEQ ID NO: 1371922 - DNA, 25 bp, Homo sapien
ggagacagagaaatctgaggaatgc

SEQ ID NO: 1371923 - DNA, 25 bp, Homo sapien
agacagagaaatctgaggaatgctg

SEQ ID NO: 1371924 - DNA, 25 bp, Homo sapien
gagacagagaaatctgaggaatgct

SEQ ID NO: 1371925 - DNA, 25 bp, Homo sapien
cacacggatgacttgcgtagccgca

SEQ ID NO: 1371926 - DNA, 25 bp, Homo sapien
cagaaactgttctttgtagcccaaa

SEQ ID NO: 1371927 - DNA, 25 bp, Homo sapien
gcttggtcacaacatagtctcgacc

SEQ ID NO: 1371928 - DNA, 25 bp, Homo sapien
tctcgaccattctgacacacggatg

SEQ ID NO: 1371929 - DNA, 25 bp, Homo sapien
aggagagacacactgttcaggaaag

SEQ ID NO: 1371930 - DNA, 25 bp, Homo sapien
ctaaaggagagacacactgttcagg

SEQ ID NO: 1371931 - DNA, 25 bp, Homo sapien
gagacacactgttcaggaaagtaca

SEQ ID NO: 1371932 - DNA, 25 bp, Homo sapien
agacacactgttcaggaaagtacac

SEQ ID NO: 1371933 - DNA, 25 bp, Homo sapien
gaccaaattcaactagagtgtctag

SEQ ID NO: 1371934 - DNA, 25 bp, Homo sapien
cacgacagtctcaaaggaccaaatt

SEQ ID NO: 1371935 - DNA, 25 bp, Homo sapien
ttagatgacagcgaccctcaggcat

SEQ ID NO: 1371936 - DNA, 25 bp, Homo sapien
tcaacacgctgaggaaatgagccca

SEQ ID NO: 1371937 - DNA, 25 bp, Homo sapien
gaaagattctgtgaagccccaaatg

SEQ ID NO: 1371938 - DNA, 25 bp, Homo sapien
cagcattgaccttcgtctgtggaga

SEQ ID NO: 1371939 - DNA, 25 bp, Homo sapien
ccactggctggtcaggaaagattct

SEQ ID NO: 1371940 - DNA, 25 bp, Homo sapien
tgatattcatggacctagctccagg

SEQ ID NO: 1371941 - DNA, 25 bp, Homo sapien
ttgaattatagtctgtaacatcccc

SEQ ID NO: 1371942 - DNA, 25 bp, Homo sapien
taaaagcaatcctttctagaatctt

SEQ ID NO: 1371943 - DNA, 25 bp, Homo sapien
gtgtgtgagatgagttcatgcatac

SEQ ID NO: 1371944 - DNA, 25 bp, Homo sapien
tctatagttctgtcaaatgcaaaaa

SEQ ID NO: 1371945 - DNA, 25 bp, Homo sapien
agaatccaggatggtgtaatagtgg

SEQ ID NO: 1371946 - DNA, 25 bp, Homo sapien
gtacacatctggaaccatcactgag

SEQ ID NO: 1371947 - DNA, 25 bp, Homo sapien
taggacggctgctgtgctcaatggc

SEQ ID NO: 1371948 - DNA, 25 bp, Homo sapien
tggaaccatcactgagatggcatcc

SEQ ID NO: 1371949 - DNA, 25 bp, Homo sapien
tgcctacggcattcggctctgagag

SEQ ID NO: 1371950 - DNA, 25 bp, Homo sapien
ctgtaggaagcatgaatatgaaggc

SEQ ID NO: 1371951 - DNA, 25 bp, Homo sapien
cattggaacattcagtttctgggag

SEQ ID NO: 1371952 - DNA, 25 bp, Homo sapien
tgagcaatgacaatgcctacggcat

SEQ ID NO: 1371953 - DNA, 25 bp, Homo sapien
caggcttcctcaggtgcgtccacct

SEQ ID NO: 1371954 - DNA, 25 bp, Homo sapien
tttcaggcttcctcaggtgcgtcca

SEQ ID NO: 1371955 - DNA, 25 bp, Homo sapien
ttcaggcttcctcaggtgcgtccac

SEQ ID NO: 1371956 - DNA, 25 bp, Homo sapien
tcaggcttcctcaggtgcgtccacc

SEQ ID NO: 1371957 - DNA, 25 bp, Homo sapien
tagagatgtcggtccaaagacttgg

SEQ ID NO: 1371958 - DNA, 25 bp, Homo sapien
tcacgttggtaaagtccgtctctcc

SEQ ID NO: 1371959 - DNA, 25 bp, Homo sapien
cgcttgttatgtagacgccgcggag

SEQ ID NO: 1371960 - DNA, 25 bp, Homo sapien
gacttggaatagacaatgcctcgat

SEQ ID NO: 1371961 - DNA, 25 bp, Homo sapien
gtaaagattgtgccaaacccagtgt

SEQ ID NO: 1371962 - DNA, 25 bp, Homo sapien
ggtaaagattgtgccaaacccagtg

SEQ ID NO: 1371963 - DNA, 25 bp, Homo sapien
gaggtaaagattgtgccaaacccag

SEQ ID NO: 1371964 - DNA, 25 bp, Homo sapien
ctgaggtaaagattgtgccaaaccc

SEQ ID NO: 1371965 - DNA, 25 bp, Homo sapien
caggttcatctacatgcatgaatac

SEQ ID NO: 1371966 - DNA, 25 bp, Homo sapien
atcatttgctgccagaatagaatag

SEQ ID NO: 1371967 - DNA, 25 bp, Homo sapien
cagaatagaatagaactgttcctgt

SEQ ID NO: 1371968 - DNA, 25 bp, Homo sapien
tagaactgttcctgtcccacggagg

SEQ ID NO: 1371969 - DNA, 25 bp, Homo sapien
aaacgtggatccttcttgttgtatc

SEQ ID NO: 1371970 - DNA, 25 bp, Homo sapien
gttgaaacgtggatccttcttgttg

SEQ ID NO: 1371971 - DNA, 25 bp, Homo sapien
tgaaacgtggatccttcttgttgta

SEQ ID NO: 1371972 - DNA, 25 bp, Homo sapien
ctgttgaaacgtggatccttcttgt

SEQ ID NO: 1371973 - DNA, 25 bp, Homo sapien
ttttcacaccaatagttttgaagct

SEQ ID NO: 1371974 - DNA, 25 bp, Homo sapien
tttcacaccaatagttttgaagctt

SEQ ID NO: 1371975 - DNA, 25 bp, Homo sapien
tcacaccaatagttttgaagctttt

SEQ ID NO: 1371976 - DNA, 25 bp, Homo sapien
cacaccaatagttttgaagcttttt

SEQ ID NO: 1371977 - DNA, 25 bp, Homo sapien
cccagaaaattctaccatgaatgga

SEQ ID NO: 1371978 - DNA, 25 bp, Homo sapien
aaattctaccatgaatggacaacag

SEQ ID NO: 1371979 - DNA, 25 bp, Homo sapien
cagaaaattctaccatgaatggaca

SEQ ID NO: 1371980 - DNA, 25 bp, Homo sapien
gaaaattctaccatgaatggacaac

SEQ ID NO: 1371981 - DNA, 25 bp, Homo sapien
gcaggagccatttgcataggttgta

SEQ ID NO: 1371982 - DNA, 25 bp, Homo sapien
aggagccatttgcataggttgtaaa

SEQ ID NO: 1371983 - DNA, 25 bp, Homo sapien
ggagccatttgcataggttgtaaag

SEQ ID NO: 1371984 - DNA, 25 bp, Homo sapien
caggagccatttgcataggttgtaa

SEQ ID NO: 1371985 - DNA, 25 bp, Homo sapien
aattcttggacacccacaggccatt

SEQ ID NO: 1371986 - DNA, 25 bp, Homo sapien
tgagggctatacatcatctgagtga

SEQ ID NO: 1371987 - DNA, 25 bp, Homo sapien
cagtgctgagagctaaaagataatc

SEQ ID NO: 1371988 - DNA, 25 bp, Homo sapien
tgaaaagggagatctgtttgcacaa

SEQ ID NO: 1371989 - DNA, 25 bp, Homo sapien
taaagattcttcctccacgacttcc

SEQ ID NO: 1371990 - DNA, 25 bp, Homo sapien
tttccagagttctcaggaccaatag

SEQ ID NO: 1371991 - DNA, 25 bp, Homo sapien
cttaaagttcttcccataatcctca

SEQ ID NO: 1371992 - DNA, 25 bp, Homo sapien
ggaccaatagccatgccaaattcag

SEQ ID NO: 1371993 - DNA, 25 bp, Homo sapien
gccaaattcagtccgaataaaggtg

SEQ ID NO: 1371994 - DNA, 25 bp, Homo sapien
aaattccatatgataattaatagcg

SEQ ID NO: 1371995 - DNA, 25 bp, Homo sapien
acagttaaaatgctgtgaaaccaac

SEQ ID NO: 1371996 - DNA, 25 bp, Homo sapien
gcctatgtcacgaagaggaaattga

SEQ ID NO: 1371997 - DNA, 25 bp, Homo sapien
cagccgtcgaatgataagtaaacag

SEQ ID NO: 1371998 - DNA, 25 bp, Homo sapien
cgtgccatcatgtctagaaaaggga

SEQ ID NO: 1371999 - DNA, 25 bp, Homo sapien
gaaatgctccaacgcgtgttattga

SEQ ID NO: 1372000 - DNA, 25 bp, Homo sapien
gaacccaggagctcaatacaagcct

SEQ ID NO: 1372001 - DNA, 25 bp, Homo sapien
tctggtgaaaacttaggatggctag

SEQ ID NO: 1372002 - DNA, 25 bp, Homo sapien
cttcgatatagcttggactgtccaa

SEQ ID NO: 1372003 - DNA, 25 bp, Homo sapien
ttcgatatagcttggactgtccaaa

SEQ ID NO: 1372004 - DNA, 25 bp, Homo sapien
ggtacatggaaggtagtcaagacta

SEQ ID NO: 1372005 - DNA, 25 bp, Homo sapien
tacatggaaggtagtcaagactaga

SEQ ID NO: 1372006 - DNA, 25 bp, Homo sapien
catggaaggtagtcaagactagaat

SEQ ID NO: 1372007 - DNA, 25 bp, Homo sapien
ggaaggtagtcaagactagaatgac

SEQ ID NO: 1372008 - DNA, 25 bp, Homo sapien
gggccaatgtatcctcagcgtgtcc

SEQ ID NO: 1372009 - DNA, 25 bp, Homo sapien
tggcagtacctcctttgtggcaggg

SEQ ID NO: 1372010 - DNA, 25 bp, Homo sapien
gacacatgcattatggaataccagg

SEQ ID NO: 1372011 - DNA, 25 bp, Homo sapien
gtgggagcccagctgtatatcagga

SEQ ID NO: 1372012 - DNA, 25 bp, Homo sapien
cccagtgctatctccaacccaggac

SEQ ID NO: 1372013 - DNA, 25 bp, Homo sapien
aacccaggacaaggatactgagcct

SEQ ID NO: 1372014 - DNA, 25 bp, Homo sapien
agtgctatctccaacccaggacaag

SEQ ID NO: 1372015 - DNA, 25 bp, Homo sapien
cagtgctatctccaacccaggacaa

SEQ ID NO: 1372016 - DNA, 25 bp, Homo sapien
tagtacaatcagtgcctcacgcagg

SEQ ID NO: 1372017 - DNA, 25 bp, Homo sapien
tgggcttccgaattcacgtatgtga

SEQ ID NO: 1372018 - DNA, 25 bp, Homo sapien
tggttaactctcaaatgctcggcag

SEQ ID NO: 1372019 - DNA, 25 bp, Homo sapien
tcttgcagtcttgaatgggcttccg

SEQ ID NO: 1372020 - DNA, 25 bp, Homo sapien
aaatgacatcaatgaggtccttcag

SEQ ID NO: 1372021 - DNA, 25 bp, Homo sapien
ctcttgagtgaggatagtgtctgaa

SEQ ID NO: 1372022 - DNA, 25 bp, Homo sapien
tgacatcaatgaggtccttcaggaa

SEQ ID NO: 1372023 - DNA, 25 bp, Homo sapien
acatcaatgaggtccttcaggaaaa

SEQ ID NO: 1372024 - DNA, 25 bp, Homo sapien
acacgtcgaagtgtttagaggcact

SEQ ID NO: 1372025 - DNA, 25 bp, Homo sapien
ttcacgtagctaaacattggtaaag

SEQ ID NO: 1372026 - DNA, 25 bp, Homo sapien
gatgccctgaacacgtcgaagtgtt

SEQ ID NO: 1372027 - DNA, 25 bp, Homo sapien
cattaacttcacgtagctaaacatt

SEQ ID NO: 1372028 - DNA, 25 bp, Homo sapien
ctgccctctttcaacaaatatgtct

SEQ ID NO: 1372029 - DNA, 25 bp, Homo sapien
tgccctctttcaacaaatatgtctg

SEQ ID NO: 1372030 - DNA, 25 bp, Homo sapien
cctctttcaacaaatatgtctgcat

SEQ ID NO: 1372031 - DNA, 25 bp, Homo sapien
gccctctttcaacaaatatgtctgc

SEQ ID NO: 1372032 - DNA, 25 bp, Homo sapien
tcacatccaagaccaaagcaatggc

SEQ ID NO: 1372033 - DNA, 25 bp, Homo sapien
tggccggcctctgaaaggggaactc

SEQ ID NO: 1372034 - DNA, 25 bp, Homo sapien
gaccaaagcaatggccggcctctga

SEQ ID NO: 1372035 - DNA, 25 bp, Homo sapien
catccaagaccaaagcaatggccgg

SEQ ID NO: 1372036 - DNA, 25 bp, Homo sapien
ttcatgaaggtttcgctcactctgc

SEQ ID NO: 1372037 - DNA, 25 bp, Homo sapien
tgaagactaacctttccccagataa

SEQ ID NO: 1372038 - DNA, 25 bp, Homo sapien
tatacattgcatgagagaagactct

SEQ ID NO: 1372039 - DNA, 25 bp, Homo sapien
cattcccttggagccatctgtcata

SEQ ID NO: 1372040 - DNA, 25 bp, Homo sapien
tacagagttcctactccttgatcca

SEQ ID NO: 1372041 - DNA, 25 bp, Homo sapien
agagttcctactccttgatccaaag

SEQ ID NO: 1372042 - DNA, 25 bp, Homo sapien
cagagttcctactccttgatccaaa

SEQ ID NO: 1372043 - DNA, 25 bp, Homo sapien
ctacagagttcctactccttgatcc

SEQ ID NO: 1372044 - DNA, 25 bp, Homo sapien
gagaggccaagtattggaagaaatg

SEQ ID NO: 1372045 - DNA, 25 bp, Homo sapien
agaaatgaggcagttaggaagttcc

SEQ ID NO: 1372046 - DNA, 25 bp, Homo sapien
agaggccaagtattggaagaaatga

SEQ ID NO: 1372047 - DNA, 25 bp, Homo sapien
gcagttaggaagttccggggcatta

SEQ ID NO: 1372048 - DNA, 25 bp, Homo sapien
aggtctggcgattcacaacaacagg

SEQ ID NO: 1372049 - DNA, 25 bp, Homo sapien
tccgggtgttacaaaggtctggcga

SEQ ID NO: 1372050 - DNA, 25 bp, Homo sapien
ttcacaacaacaggccgaggtcttc

SEQ ID NO: 1372051 - DNA, 25 bp, Homo sapien
ttacaaaggtctggcgattcacaac

SEQ ID NO: 1372052 - DNA, 25 bp, Homo sapien
tacagaagtagttagtgacaggagc

SEQ ID NO: 1372053 - DNA, 25 bp, Homo sapien
gaaaataagcaagagttcctggctt

SEQ ID NO: 1372054 - DNA, 25 bp, Homo sapien
aattgtcaaatggtctgtacacagg

SEQ ID NO: 1372055 - DNA, 25 bp, Homo sapien
atacaacacggcctctctacagggc

SEQ ID NO: 1372056 - DNA, 25 bp, Homo sapien
tggagggcattcacatacattgatg

SEQ ID NO: 1372057 - DNA, 25 bp, Homo sapien
gctttaccgtgctttcttgagaaga

SEQ ID NO: 1372058 - DNA, 25 bp, Homo sapien
tttctttgtatcttggcaccccagc

SEQ ID NO: 1372059 - DNA, 25 bp, Homo sapien
tagcacagatctaggcatttggagg

SEQ ID NO: 1372060 - DNA, 25 bp, Homo sapien
gagaccacggatgactaacaaacgc

SEQ ID NO: 1372061 - DNA, 25 bp, Homo sapien
ccacggatgactaacaaacgcaaaa

SEQ ID NO: 1372062 - DNA, 25 bp, Homo sapien
gaagagaccacggatgactaacaaa

SEQ ID NO: 1372063 - DNA, 25 bp, Homo sapien
cggatgactaacaaacgcaaaaact

SEQ ID NO: 1372064 - DNA, 25 bp, Homo sapien
tcaccacgggatatagacatgctag

SEQ ID NO: 1372065 - DNA, 25 bp, Homo sapien
caaaggttgagctgcttgtccccag

SEQ ID NO: 1372066 - DNA, 25 bp, Homo sapien
ttggctgacgctgaaaaacggttac

SEQ ID NO: 1372067 - DNA, 25 bp, Homo sapien
gataaccaggcagtccaaagggaga

SEQ ID NO: 1372068 - DNA, 25 bp, Homo sapien
caagagttaattactccttcacctt

SEQ ID NO: 1372069 - DNA, 25 bp, Homo sapien
tcaagagttaattactccttcacct

SEQ ID NO: 1372070 - DNA, 25 bp, Homo sapien
gctcccgggcccggcgcccgctcac

SEQ ID NO: 1372071 - DNA, 25 bp, Homo sapien
ggctcccgggcccggcgcccgctca

SEQ ID NO: 1372072 - DNA, 25 bp, Homo sapien
ctggtgcgtgttgttggccagcttg

SEQ ID NO: 1372073 - DNA, 25 bp, Homo sapien
cagcttggcgacgaagtcccggacc

SEQ ID NO: 1372074 - DNA, 25 bp, Homo sapien
gccagcttggcgacgaagtcccgga

SEQ ID NO: 1372075 - DNA, 25 bp, Homo sapien
tgttggccagcttggcgacgaagtc

SEQ ID NO: 1372076 - DNA, 25 bp, Homo sapien
ccccagctcaccccgatggggccag

SEQ ID NO: 1372077 - DNA, 25 bp, Homo sapien
cccccagctcaccccgatggggcca

SEQ ID NO: 1372078 - DNA, 25 bp, Homo sapien
cccagctcaccccgatggggccaga

SEQ ID NO: 1372079 - DNA, 25 bp, Homo sapien
aggccatggggccagcgcgagaggc

SEQ ID NO: 1372080 - DNA, 25 bp, Homo sapien
cgcgtccagccggtcctggctgagg

SEQ ID NO: 1372081 - DNA, 25 bp, Homo sapien
ggccagcgcgagaggccgtccgcag

SEQ ID NO: 1372082 - DNA, 25 bp, Homo sapien
ggctgagggtcgacggcggcagcag

SEQ ID NO: 1372083 - DNA, 25 bp, Homo sapien
cgccgaatgccgccgacgccgacac

SEQ ID NO: 1372084 - DNA, 25 bp, Homo sapien
ccgccgaatgccgccgacgccgaca

SEQ ID NO: 1372085 - DNA, 25 bp, Homo sapien
tgccgcccggcgcgcccgcccaccc

SEQ ID NO: 1372086 - DNA, 25 bp, Homo sapien
ctgccgcccggcgcgcccgcccacc

SEQ ID NO: 1372087 - DNA, 25 bp, Homo sapien
tgtgggccacatcctacggagacag

SEQ ID NO: 1372088 - DNA, 25 bp, Homo sapien
gagacagacatcaggacatccgtga

SEQ ID NO: 1372089 - DNA, 25 bp, Homo sapien
tgctgcaagaaggtgaatgcgaact

SEQ ID NO: 1372090 - DNA, 25 bp, Homo sapien
ggagcgcccattgtctgctaagcag

SEQ ID NO: 1372091 - DNA, 25 bp, Homo sapien
aaatgatacaatgcacccaacccga

SEQ ID NO: 1372092 - DNA, 25 bp, Homo sapien
cagcttctgggacatggtaacttgc

SEQ ID NO: 1372093 - DNA, 25 bp, Homo sapien
aactggccataaacccaaatgagga

SEQ ID NO: 1372094 - DNA, 25 bp, Homo sapien
tatgggagtagatcacaagacagtc

SEQ ID NO: 1372095 - DNA, 25 bp, Homo sapien
gattcagagacacaactcacctctc

SEQ ID NO: 1372096 - DNA, 25 bp, Homo sapien
caacttaagctgaggcgaacggaca

SEQ ID NO: 1372097 - DNA, 25 bp, Homo sapien
cactagaagtttcacaggagcacag

SEQ ID NO: 1372098 - DNA, 25 bp, Homo sapien
cgaacggacataggctaagagctac

SEQ ID NO: 1372099 - DNA, 25 bp, Homo sapien
tatcaacaccatgggattaatggat

SEQ ID NO: 1372100 - DNA, 25 bp, Homo sapien
gactgtattacaatggctgggcaca

SEQ ID NO: 1372101 - DNA, 25 bp, Homo sapien
ccttttggcccactaacatttgcat

SEQ ID NO: 1372102 - DNA, 25 bp, Homo sapien
aacagacatcttcatagaataggga

SEQ ID NO: 1372103 - DNA, 25 bp, Homo sapien
cagaactgcctttatgtacagacat

SEQ ID NO: 1372104 - DNA, 25 bp, Homo sapien
tagaactgaaattgtcccagagaag

SEQ ID NO: 1372105 - DNA, 25 bp, Homo sapien
cattattagaactgaaattgtccca

SEQ ID NO: 1372106 - DNA, 25 bp, Homo sapien
aactgaaattgtcccagagaagttc

SEQ ID NO: 1372107 - DNA, 25 bp, Homo sapien
tgtccttgataacctcttcaagttc

SEQ ID NO: 1372108 - DNA, 25 bp, Homo sapien
aatgtccttgataacctcttcaagt

SEQ ID NO: 1372109 - DNA, 25 bp, Homo sapien
ttaaatgtccttgataacctcttca

SEQ ID NO: 1372110 - DNA, 25 bp, Homo sapien
aaatgtccttgataacctcttcaag

SEQ ID NO: 1372111 - DNA, 25 bp, Homo sapien
gaactaagggatctgctgtcccaag

SEQ ID NO: 1372112 - DNA, 25 bp, Homo sapien
aagctgggctgagttaccctgctga

SEQ ID NO: 1372113 - DNA, 25 bp, Homo sapien
ccaaggatatcctttccaggcagca

SEQ ID NO: 1372114 - DNA, 25 bp, Homo sapien
cctaccatggtcaggagaagctgtg

SEQ ID NO: 1372115 - DNA, 25 bp, Homo sapien
cacatcatacttaaccaaatgcctg

SEQ ID NO: 1372116 - DNA, 25 bp, Homo sapien
aatgcctggcatcattgtcacttct

SEQ ID NO: 1372117 - DNA, 25 bp, Homo sapien
gaatagctaattcatagagtagttg

SEQ ID NO: 1372118 - DNA, 25 bp, Homo sapien
ggacaataagaatagctaattcata

SEQ ID NO: 1372119 - DNA, 25 bp, Homo sapien
taaaagttgagcttgtgtgtgtgac

SEQ ID NO: 1372120 - DNA, 25 bp, Homo sapien
tgtgtgacttgaggttacttggcca

SEQ ID NO: 1372121 - DNA, 25 bp, Homo sapien
catgtcccacagttttgggcaatac

SEQ ID NO: 1372122 - DNA, 25 bp, Homo sapien
cattaacactggcataggaaaccag

SEQ ID NO: 1372123 - DNA, 25 bp, Homo sapien
gcaatactgagcaataggtgccact

SEQ ID NO: 1372124 - DNA, 25 bp, Homo sapien
ggaaaccagttgtgactgctgaaga

SEQ ID NO: 1372125 - DNA, 25 bp, Homo sapien
tgaaagttgctagagagaatcagca

SEQ ID NO: 1372126 - DNA, 25 bp, Homo sapien
tttaatgtaacttgaaagttgctag

SEQ ID NO: 1372127 - DNA, 25 bp, Homo sapien
tatatgatgtttagtatcctctgcc

SEQ ID NO: 1372128 - DNA, 25 bp, Homo sapien
tcagcataatccagttatatgatgt

SEQ ID NO: 1372129 - DNA, 25 bp, Homo sapien
taatagcgtctgagccaaggactgc

SEQ ID NO: 1372130 - DNA, 25 bp, Homo sapien
gagtggaacagtcctacagaagaac

SEQ ID NO: 1372131 - DNA, 25 bp, Homo sapien
tcaaaaaacatctctatgaggcagg

SEQ ID NO: 1372132 - DNA, 25 bp, Homo sapien
aaagaatttcactcatgactcaggc

SEQ ID NO: 1372133 - DNA, 25 bp, Homo sapien
gaaaatccactatagtagcacaatg

SEQ ID NO: 1372134 - DNA, 25 bp, Homo sapien
gttggccctaccgtctcaaagccag

SEQ ID NO: 1372135 - DNA, 25 bp, Homo sapien
gcaagattaattaggaagcctctga

SEQ ID NO: 1372136 - DNA, 25 bp, Homo sapien
ttatctcacagacaatagaagtcag

SEQ ID NO: 1372137 - DNA, 25 bp, Homo sapien
tcaatgtttgttgcattcagcttct

SEQ ID NO: 1372138 - DNA, 25 bp, Homo sapien
cctccattacttgtttgaggatgat

SEQ ID NO: 1372139 - DNA, 25 bp, Homo sapien
gatgatgagtgaagacttgatggct

SEQ ID NO: 1372140 - DNA, 25 bp, Homo sapien
ctcctccattacttgtttgaggatg

SEQ ID NO: 1372141 - DNA, 25 bp, Homo sapien
tgcacaatccgtccttccttcaaag

SEQ ID NO: 1372142 - DNA, 25 bp, Homo sapien
caaacatcttacttagtatggtgca

SEQ ID NO: 1372143 - DNA, 25 bp, Homo sapien
aagaagatgcctattaattatgcac

SEQ ID NO: 1372144 - DNA, 25 bp, Homo sapien
aaaaagtatttagcaagtatgtcaa

SEQ ID NO: 1372145 - DNA, 25 bp, Homo sapien
cttgtggtaaacttcttgcaaggag

SEQ ID NO: 1372146 - DNA, 25 bp, Homo sapien
gctcgagcatcacactgtacaaagg

SEQ ID NO: 1372147 - DNA, 25 bp, Homo sapien
tgaagcagagccaattgctcgagca

SEQ ID NO: 1372148 - DNA, 25 bp, Homo sapien
tacaaaggtcccagatgggtccata

SEQ ID NO: 1372149 - DNA, 25 bp, Homo sapien
ataatgctactccaaagggacgaga

SEQ ID NO: 1372150 - DNA, 25 bp, Homo sapien
ataataatgctactccaaagggacg

SEQ ID NO: 1372151 - DNA, 25 bp, Homo sapien
aataatgctactccaaagggacgag

SEQ ID NO: 1372152 - DNA, 25 bp, Homo sapien
taataatgctactccaaagggacga

SEQ ID NO: 1372153 - DNA, 25 bp, Homo sapien
gcttgggtcacactctccactgtca

SEQ ID NO: 1372154 - DNA, 25 bp, Homo sapien
tctcattgtaggtgaaccagtggtt

SEQ ID NO: 1372155 - DNA, 25 bp, Homo sapien
gacacagcttgggtcacactctcca

SEQ ID NO: 1372156 - DNA, 25 bp, Homo sapien
actgcaaagccagattggacacagc

SEQ ID NO: 1372157 - DNA, 25 bp, Homo sapien
accatctcactacgcacatcccttt

SEQ ID NO: 1372158 - DNA, 25 bp, Homo sapien
gaagagcaaagcatggtacaacctt

SEQ ID NO: 1372159 - DNA, 25 bp, Homo sapien
ttctaataaggacattaaagcagcc

SEQ ID NO: 1372160 - DNA, 25 bp, Homo sapien
aataaggacattaaagcagcccacc

SEQ ID NO: 1372161 - DNA, 25 bp, Homo sapien
tacctgcagtatagcccaggcagct

SEQ ID NO: 1372162 - DNA, 25 bp, Homo sapien
taaacaaggaactcaagcatcctgg

SEQ ID NO: 1372163 - DNA, 25 bp, Homo sapien
caaaggcgggctgttatttacaagc

SEQ ID NO: 1372164 - DNA, 25 bp, Homo sapien
gagccacatctaatattgacacagg

SEQ ID NO: 1372165 - DNA, 25 bp, Homo sapien
tcagcaattagcccactcatggcac

SEQ ID NO: 1372166 - DNA, 25 bp, Homo sapien
tggctttatcaattaaagtcttagc

SEQ ID NO: 1372167 - DNA, 25 bp, Homo sapien
catcagcaattagcccactcatggc

SEQ ID NO: 1372168 - DNA, 25 bp, Homo sapien
agcatcagcaattagcccactcatg

SEQ ID NO: 1372169 - DNA, 25 bp, Homo sapien
cagaggcaacaaggaatacaaagat

SEQ ID NO: 1372170 - DNA, 25 bp, Homo sapien
tgggcagaggcaacaaggaatacaa

SEQ ID NO: 1372171 - DNA, 25 bp, Homo sapien
aagaccaaaaaagtgggcagaggca

SEQ ID NO: 1372172 - DNA, 25 bp, Homo sapien
aaaagtgggcagaggcaacaaggaa

SEQ ID NO: 1372173 - DNA, 25 bp, Homo sapien
tctgatgtctggatcccaatggctg

SEQ ID NO: 1372174 - DNA, 25 bp, Homo sapien
tgagcatcaatctctacaattttct

SEQ ID NO: 1372175 - DNA, 25 bp, Homo sapien
tgggctccatcagtggggaagtaat

SEQ ID NO: 1372176 - DNA, 25 bp, Homo sapien
atgtctggatcccaatggctgtaga

SEQ ID NO: 1372177 - DNA, 25 bp, Homo sapien
gcctcaatggcatattccacttgaa

SEQ ID NO: 1372178 - DNA, 25 bp, Homo sapien
caatggcatattccacttgaaataa

SEQ ID NO: 1372179 - DNA, 25 bp, Homo sapien
cttgatagcctcaatggcatattcc

SEQ ID NO: 1372180 - DNA, 25 bp, Homo sapien
gatagcctcaatggcatattccact

SEQ ID NO: 1372181 - DNA, 25 bp, Homo sapien
ggagtccagactttacaacaggtaa

SEQ ID NO: 1372182 - DNA, 25 bp, Homo sapien
gaaatccctacggagaagaggcacc

SEQ ID NO: 1372183 - DNA, 25 bp, Homo sapien
caatccgtggtttatggagtccaga

SEQ ID NO: 1372184 - DNA, 25 bp, Homo sapien
taaaagctttgagcacacaatggac

SEQ ID NO: 1372185 - DNA, 25 bp, Homo sapien
ttaagagtctcaggccgagcgaggt

SEQ ID NO: 1372186 - DNA, 25 bp, Homo sapien
caattctttaagagtctcaggccga

SEQ ID NO: 1372187 - DNA, 25 bp, Homo sapien
cactgtacctgtaaacaattcttta

SEQ ID NO: 1372188 - DNA, 25 bp, Homo sapien
gagccactgtacctgtaaacaattc

SEQ ID NO: 1372189 - DNA, 25 bp, Homo sapien
cttctgataagcataacaatttcta

SEQ ID NO: 1372190 - DNA, 25 bp, Homo sapien
aaatgccttctgataagcataacaa

SEQ ID NO: 1372191 - DNA, 25 bp, Homo sapien
tctgataagcataacaatttctatc

SEQ ID NO: 1372192 - DNA, 25 bp, Homo sapien
gccttctgataagcataacaatttc

SEQ ID NO: 1372193 - DNA, 25 bp, Homo sapien
tgaagaaactatacaccgcagcatg

SEQ ID NO: 1372194 - DNA, 25 bp, Homo sapien
tgttcaaggcagtcatactaggcac

SEQ ID NO: 1372195 - DNA, 25 bp, Homo sapien
tactaggcacgaaaagatgaacgga

SEQ ID NO: 1372196 - DNA, 25 bp, Homo sapien
taactgcaggtggtaaaacttcgac

SEQ ID NO: 1372197 - DNA, 25 bp, Homo sapien
agccggagcttctcgcttccgcacc

SEQ ID NO: 1372198 - DNA, 25 bp, Homo sapien
cttccgcaccgagttaggacccagg

SEQ ID NO: 1372199 - DNA, 25 bp, Homo sapien
agtgccgccgatgtggtctagcttg

SEQ ID NO: 1372200 - DNA, 25 bp, Homo sapien
tgactcagcggtaggacaagtgccg

SEQ ID NO: 1372201 - DNA, 25 bp, Homo sapien
aggtccggccagtctcgggttcctg

SEQ ID NO: 1372202 - DNA, 25 bp, Homo sapien
ggcctgcccacccataattcccacc

SEQ ID NO: 1372203 - DNA, 25 bp, Homo sapien
atgacacggcagaacccaggccgcg

SEQ ID NO: 1372204 - DNA, 25 bp, Homo sapien
ataacatccccaggtccggccagtc

SEQ ID NO: 1372205 - DNA, 25 bp, Homo sapien
tgtcgtactcagaccgggtaagaaa

SEQ ID NO: 1372206 - DNA, 25 bp, Homo sapien
ctgtcgtactcagaccgggtaagaa

SEQ ID NO: 1372207 - DNA, 25 bp, Homo sapien
gaggaccaacacgactccaccggca

SEQ ID NO: 1372208 - DNA, 25 bp, Homo sapien
aacacgactccaccggcacccaact

SEQ ID NO: 1372209 - DNA, 25 bp, Homo sapien
gaggcagcggctacgcggggattct

SEQ ID NO: 1372210 - DNA, 25 bp, Homo sapien
ttctgaggaccaacacgactccacc

SEQ ID NO: 1372211 - DNA, 25 bp, Homo sapien
cggccgcagtactaaggaccaactg

SEQ ID NO: 1372212 - DNA, 25 bp, Homo sapien
ctaaggaccaactgcgcgtgcgacc

SEQ ID NO: 1372213 - DNA, 25 bp, Homo sapien
acccacacggccgcagtactaagga

SEQ ID NO: 1372214 - DNA, 25 bp, Homo sapien
taaggaccaactgcgcgtgcgaccg

SEQ ID NO: 1372215 - DNA, 25 bp, Homo sapien
caaggccagcaagtcatccaaaggc

SEQ ID NO: 1372216 - DNA, 25 bp, Homo sapien
cttattgccggccagtgaaggccaa

SEQ ID NO: 1372217 - DNA, 25 bp, Homo sapien
tggaggccccttctcgaaagcggaa

SEQ ID NO: 1372218 - DNA, 25 bp, Homo sapien
gcctctcggccaaaactaaaacagc

SEQ ID NO: 1372219 - DNA, 25 bp, Homo sapien
ggctgctgccgctttttataacttt

SEQ ID NO: 1372220 - DNA, 25 bp, Homo sapien
gctgctgccgctttttataacttta

SEQ ID NO: 1372221 - DNA, 25 bp, Homo sapien
caggctgctgccgctttttataact

SEQ ID NO: 1372222 - DNA, 25 bp, Homo sapien
aggctgctgccgctttttataactt

SEQ ID NO: 1372223 - DNA, 25 bp, Homo sapien
ccactcccgtgcagatgcgagagga

SEQ ID NO: 1372224 - DNA, 25 bp, Homo sapien
ttctaggatccttgccccgagggtc

SEQ ID NO: 1372225 - DNA, 25 bp, Homo sapien
tcttgacaccagagacgactatggt

SEQ ID NO: 1372226 - DNA, 25 bp, Homo sapien
tctggtccttcagcaaccctaggca

SEQ ID NO: 1372227 - DNA, 25 bp, Homo sapien
gacttctcgtctgggagtgggcact

SEQ ID NO: 1372228 - DNA, 25 bp, Homo sapien
taagcacttgcaggctgagtcagtc

SEQ ID NO: 1372229 - DNA, 25 bp, Homo sapien
acacagtgtatgctaggctgagacc

SEQ ID NO: 1372230 - DNA, 25 bp, Homo sapien
tcaggaatcttgctgctagccacgc

SEQ ID NO: 1372231 - DNA, 25 bp, Homo sapien
gctgggaaacctgcagtatgggttt

SEQ ID NO: 1372232 - DNA, 25 bp, Homo sapien
ttattgcctgacctacctcacaggg

SEQ ID NO: 1372233 - DNA, 25 bp, Homo sapien
cgtccctatcactggtgtggctgtg

SEQ ID NO: 1372234 - DNA, 25 bp, Homo sapien
gtatgggtttactccgtccctatca

SEQ ID NO: 1372235 - DNA, 25 bp, Homo sapien
tcaggagacttaagagccacagggc

SEQ ID NO: 1372236 - DNA, 25 bp, Homo sapien
tcaaatctcttggtagggcagccag

SEQ ID NO: 1372237 - DNA, 25 bp, Homo sapien
caagatttgccagcctaggtgtaca

SEQ ID NO: 1372238 - DNA, 25 bp, Homo sapien
ttgagttcccaggaccagacaaggg

SEQ ID NO: 1372239 - DNA, 25 bp, Homo sapien
gaacttgaagctgcactccaaattg

SEQ ID NO: 1372240 - DNA, 25 bp, Homo sapien
cttccaatggactagaaacgtggga

SEQ ID NO: 1372241 - DNA, 25 bp, Homo sapien
taaagggatcggtcatctccatact

SEQ ID NO: 1372242 - DNA, 25 bp, Homo sapien
tgcaaagacctctcgatggaggaat

SEQ ID NO: 1372243 - DNA, 25 bp, Homo sapien
ggaatccattcccttgggcagccag

SEQ ID NO: 1372244 - DNA, 25 bp, Homo sapien
tgctctctgttgtacctgggaccaa

SEQ ID NO: 1372245 - DNA, 25 bp, Homo sapien
tcttaaggagctagggatgacctca

SEQ ID NO: 1372246 - DNA, 25 bp, Homo sapien
ccatttgaaaatcgtggcagccacg

SEQ ID NO: 1372247 - DNA, 25 bp, Homo sapien
ggttattgtagagcagcagcacctc

SEQ ID NO: 1372248 - DNA, 25 bp, Homo sapien
tagagctcacagtcgcagttcaggg

SEQ ID NO: 1372249 - DNA, 25 bp, Homo sapien
cacaatgggcgtatcagagaagacc

SEQ ID NO: 1372250 - DNA, 25 bp, Homo sapien
gagctgactgattctggatccgaca

SEQ ID NO: 1372251 - DNA, 25 bp, Homo sapien
tgggcgaggaaggccacaaggaaga

SEQ ID NO: 1372252 - DNA, 25 bp, Homo sapien
gggcgaggaaggccacaaggaagat

SEQ ID NO: 1372253 - DNA, 25 bp, Homo sapien
gagtgggcgaggaaggccacaagga

SEQ ID NO: 1372254 - DNA, 25 bp, Homo sapien
ctggagtgggcgaggaaggccacaa

SEQ ID NO: 1372255 - DNA, 25 bp, Homo sapien
tgggaggaggtcacccgggcatgtt

SEQ ID NO: 1372256 - DNA, 25 bp, Homo sapien
ctgggaggaggtcacccgggcatgt

SEQ ID NO: 1372257 - DNA, 25 bp, Homo sapien
caggtatgcacaggatggcagggac

SEQ ID NO: 1372258 - DNA, 25 bp, Homo sapien
gctgggtagtttccaggcactgtgc

SEQ ID NO: 1372259 - DNA, 25 bp, Homo sapien
aatatcggccgaagaggaggtggcc

SEQ ID NO: 1372260 - DNA, 25 bp, Homo sapien
ggagtcacagggatggcacgggcag

SEQ ID NO: 1372261 - DNA, 25 bp, Homo sapien
cggcctgtcactgcgcccaccttac

SEQ ID NO: 1372262 - DNA, 25 bp, Homo sapien
gtctgggagctccgtcgcggcctct

SEQ ID NO: 1372263 - DNA, 25 bp, Homo sapien
gtctcagcccatggccggtctggga

SEQ ID NO: 1372264 - DNA, 25 bp, Homo sapien
ctgctcggcgaggacgtgtctcagc

SEQ ID NO: 1372265 - DNA, 25 bp, Homo sapien
gcctcgaccgctgagcccgccggag

SEQ ID NO: 1372266 - DNA, 25 bp, Homo sapien
tccgcaggcctggcgcggatcggtg

SEQ ID NO: 1372267 - DNA, 25 bp, Homo sapien
gcagcgatcccagcggagggagcgg

SEQ ID NO: 1372268 - DNA, 25 bp, Homo sapien
cgaccgcggtcgctgcctccaggtc

SEQ ID NO: 1372269 - DNA, 25 bp, Homo sapien
agctccttagcctgcaagccagctg

SEQ ID NO: 1372270 - DNA, 25 bp, Homo sapien
ttgatgctactagttcatgaccctt

SEQ ID NO: 1372271 - DNA, 25 bp, Homo sapien
ccccgtcttgatgctactagttcat

SEQ ID NO: 1372272 - DNA, 25 bp, Homo sapien
cacccccgtcttgatgctactagtt

SEQ ID NO: 1372273 - DNA, 25 bp, Homo sapien
tttacagacacctcatgcacctctc

SEQ ID NO: 1372274 - DNA, 25 bp, Homo sapien
ccctttacagacacctcatgcacct

SEQ ID NO: 1372275 - DNA, 25 bp, Homo sapien
tacagacacctcatgcacctctccc

SEQ ID NO: 1372276 - DNA, 25 bp, Homo sapien
cctttacagacacctcatgcacctc

SEQ ID NO: 1372277 - DNA, 25 bp, Homo sapien
tccccttatggagcaattgcaacat

SEQ ID NO: 1372278 - DNA, 25 bp, Homo sapien
tatctcttcaaggagtattagcgtg

SEQ ID NO: 1372279 - DNA, 25 bp, Homo sapien
cctaatcctcaagatgaaggccagt

SEQ ID NO: 1372280 - DNA, 25 bp, Homo sapien
ggaagagcctagaccttatcattca

SEQ ID NO: 1372281 - DNA, 25 bp, Homo sapien
ggacaaggtgtgaagaatcttgaaa

SEQ ID NO: 1372282 - DNA, 25 bp, Homo sapien
agatgaggagggtaatctttttgga

SEQ ID NO: 1372283 - DNA, 25 bp, Homo sapien
aatcttgaaatcacattgcatcagt

SEQ ID NO: 1372284 - DNA, 25 bp, Homo sapien
aagatgaggagggtaatctttttgg

SEQ ID NO: 1372285 - DNA, 25 bp, Homo sapien
gagctacagtcattagaaggcttca

SEQ ID NO: 1372286 - DNA, 25 bp, Homo sapien
aggtctctccacaagacagcttgag

SEQ ID NO: 1372287 - DNA, 25 bp, Homo sapien
cagttatgcgttagatggagctaca

SEQ ID NO: 1372288 - DNA, 25 bp, Homo sapien
gagtttcctcacaacacggtagctg

SEQ ID NO: 1372289 - DNA, 25 bp, Homo sapien
gtcgccttggaaaaaggcaatttga

SEQ ID NO: 1372290 - DNA, 25 bp, Homo sapien
gcaggctttgataaatgtcatcttt

SEQ ID NO: 1372291 - DNA, 25 bp, Homo sapien
cagcaggctttgataaatgtcatct

SEQ ID NO: 1372292 - DNA, 25 bp, Homo sapien
ttgaaagtcgccttggaaaaaggca

SEQ ID NO: 1372293 - DNA, 25 bp, Homo sapien
cttggtcttgaaaacttgtcgtgcc

SEQ ID NO: 1372294 - DNA, 25 bp, Homo sapien
cttcaggaagatgttagtttccagc

SEQ ID NO: 1372295 - DNA, 25 bp, Homo sapien
gcctgggacgtgctaaattgctgaa

SEQ ID NO: 1372296 - DNA, 25 bp, Homo sapien
aattgctgaacaagtagttattagc

SEQ ID NO: 1372297 - DNA, 25 bp, Homo sapien
ctgcacgtcaattgcagagtccact

SEQ ID NO: 1372298 - DNA, 25 bp, Homo sapien
gtaggaaattgaagggctgtcttcg

SEQ ID NO: 1372299 - DNA, 25 bp, Homo sapien
gtcttcgtttgctggtgagactcat

SEQ ID NO: 1372300 - DNA, 25 bp, Homo sapien
aagggctgtcttcgtttgctggtga

SEQ ID NO: 1372301 - DNA, 25 bp, Homo sapien
gacagatggatcaacatcaggcaca

SEQ ID NO: 1372302 - DNA, 25 bp, Homo sapien
gctgctcctaaactgacaggctcac

SEQ ID NO: 1372303 - DNA, 25 bp, Homo sapien
tctctgctccatgctttgggtagca

SEQ ID NO: 1372304 - DNA, 25 bp, Homo sapien
gacagacagatggatcaacatcagg

SEQ ID NO: 1372305 - DNA, 25 bp, Homo sapien
ggtgtgcccgatgcgcattctgatg

SEQ ID NO: 1372306 - DNA, 25 bp, Homo sapien
ccgatgcgcattctgatggccccag

SEQ ID NO: 1372307 - DNA, 25 bp, Homo sapien
cctacttctggtggcagtggtgtgc

SEQ ID NO: 1372308 - DNA, 25 bp, Homo sapien
agtggtgtgcccgatgcgcattctg

SEQ ID NO: 1372309 - DNA, 25 bp, Homo sapien
gtcagaccgtgtggagagccttgcc

SEQ ID NO: 1372310 - DNA, 25 bp, Homo sapien
gaatccagctcattaggtactactg

SEQ ID NO: 1372311 - DNA, 25 bp, Homo sapien
tgcacttttgaggtcccctctgaga

SEQ ID NO: 1372312 - DNA, 25 bp, Homo sapien
ggtactactgaactcccctctgaca

SEQ ID NO: 1372313 - DNA, 25 bp, Homo sapien
aggctccgagggtcccttccagcca

SEQ ID NO: 1372314 - DNA, 25 bp, Homo sapien
ttgaaggagtagagcttttgtgtgt

SEQ ID NO: 1372315 - DNA, 25 bp, Homo sapien
ctgggctccaggattgaaggagtag

SEQ ID NO: 1372316 - DNA, 25 bp, Homo sapien
ccaggattgaaggagtagagctttt

SEQ ID NO: 1372317 - DNA, 25 bp, Homo sapien
cagctaatggcctggaaaaaactgg

SEQ ID NO: 1372318 - DNA, 25 bp, Homo sapien
tctccacttcatggcgcagctaatg

SEQ ID NO: 1372319 - DNA, 25 bp, Homo sapien
gaaggcagccactaggctgctttcc

SEQ ID NO: 1372320 - DNA, 25 bp, Homo sapien
tagacagacggggtattgatcctgc

SEQ ID NO: 1372321 - DNA, 25 bp, Homo sapien
tcagggacgatcaatgccgttccgg

SEQ ID NO: 1372322 - DNA, 25 bp, Homo sapien
gagagtgcggcctgtttcttgaggg

SEQ ID NO: 1372323 - DNA, 25 bp, Homo sapien
tcttgagggcaccacttctactcca

SEQ ID NO: 1372324 - DNA, 25 bp, Homo sapien
ggtctctaattaggccagggagctg

SEQ ID NO: 1372325 - DNA, 25 bp, Homo sapien
cctccagcggcccttgggagggtca

SEQ ID NO: 1372326 - DNA, 25 bp, Homo sapien
aggagcagacagggccctccagcgg

SEQ ID NO: 1372327 - DNA, 25 bp, Homo sapien
cagaggagcagacagggccctccag

SEQ ID NO: 1372328 - DNA, 25 bp, Homo sapien
agcagacagggccctccagcggccc

SEQ ID NO: 1372329 - DNA, 25 bp, Homo sapien
ttgacccagagctccttttccagca

SEQ ID NO: 1372330 - DNA, 25 bp, Homo sapien
gctccttttccagcagcagaagtag

SEQ ID NO: 1372331 - DNA, 25 bp, Homo sapien
gagctccttttccagcagcagaagt

SEQ ID NO: 1372332 - DNA, 25 bp, Homo sapien
cagagctccttttccagcagcagaa

SEQ ID NO: 1372333 - DNA, 25 bp, Homo sapien
gacccttcccactactggtcctgaa

SEQ ID NO: 1372334 - DNA, 25 bp, Homo sapien
tgtcactcatccagtggccttcaac

SEQ ID NO: 1372335 - DNA, 25 bp, Homo sapien
tcatccagtggccttcaactgcaac

SEQ ID NO: 1372336 - DNA, 25 bp, Homo sapien
ggtcctgaatgctaagcccaggact

SEQ ID NO: 1372337 - DNA, 25 bp, Homo sapien
cacagcatagtgagccatggatctc

SEQ ID NO: 1372338 - DNA, 25 bp, Homo sapien
aaagatcagtcctcagcagcaaggg

SEQ ID NO: 1372339 - DNA, 25 bp, Homo sapien
caagggccctgccatgataccaagg

SEQ ID NO: 1372340 - DNA, 25 bp, Homo sapien
gcagtggcaacataagaagtcttca

SEQ ID NO: 1372341 - DNA, 25 bp, Homo sapien
ctcctgccggcaggagtacccacat

SEQ ID NO: 1372342 - DNA, 25 bp, Homo sapien
gatgggctctcaggtatcccaaagg

SEQ ID NO: 1372343 - DNA, 25 bp, Homo sapien
gctggggggttgatcatctcctgcc

SEQ ID NO: 1372344 - DNA, 25 bp, Homo sapien
gcagtttgatcaggagatgggctct

SEQ ID NO: 1372345 - DNA, 25 bp, Homo sapien
tgttgactttcgaatcccaggccag

SEQ ID NO: 1372346 - DNA, 25 bp, Homo sapien
caccccggctggagtcatgatgggc

SEQ ID NO: 1372347 - DNA, 25 bp, Homo sapien
tcttctatggatgtctcaaccggca

SEQ ID NO: 1372348 - DNA, 25 bp, Homo sapien
gactggctgtccttctgagtcctgg

SEQ ID NO: 1372349 - DNA, 25 bp, Homo sapien
gatgtgggagcacctagccgtatct

SEQ ID NO: 1372350 - DNA, 25 bp, Homo sapien
ccaggagttttctagtcaccagatg

SEQ ID NO: 1372351 - DNA, 25 bp, Homo sapien
tcaacagattgaggcaaccatccgg

SEQ ID NO: 1372352 - DNA, 25 bp, Homo sapien
gactttctgttgtcaggtgtcccca

SEQ ID NO: 1372353 - DNA, 25 bp, Homo sapien
gatttaggactaccttcacgcagta

SEQ ID NO: 1372354 - DNA, 25 bp, Homo sapien
tcacgcagtatccagggttattagt

SEQ ID NO: 1372355 - DNA, 25 bp, Homo sapien
ggactgagttcccttcgctagaacg

SEQ ID NO: 1372356 - DNA, 25 bp, Homo sapien
tggacgaggctttttaaggtggctc

SEQ ID NO: 1372357 - DNA, 25 bp, Homo sapien
gtgcctcagctctactacaggtgcc

SEQ ID NO: 1372358 - DNA, 25 bp, Homo sapien
tgcctcagctctactacaggtgccc

SEQ ID NO: 1372359 - DNA, 25 bp, Homo sapien
ttgcgcggggactgtgctaatcttc

SEQ ID NO: 1372360 - DNA, 25 bp, Homo sapien
cttgcgcggggactgtgctaatctt

SEQ ID NO: 1372361 - DNA, 25 bp, Homo sapien
catgagatgctaaagtcagacattg

SEQ ID NO: 1372362 - DNA, 25 bp, Homo sapien
ggcagcagcatgcagaatcttagca

SEQ ID NO: 1372363 - DNA, 25 bp, Homo sapien
gaggtgctgcattctagaacttcaa

SEQ ID NO: 1372364 - DNA, 25 bp, Homo sapien
gattcgatcgtcaagacatcacttg

SEQ ID NO: 1372365 - DNA, 25 bp, Homo sapien
tatagggagttttgtacatggtgcc

SEQ ID NO: 1372366 - DNA, 25 bp, Homo sapien
tcctgctcaaagtaccattatggtt

SEQ ID NO: 1372367 - DNA, 25 bp, Homo sapien
tctaaagtgtattaacagtgcatgc

SEQ ID NO: 1372368 - DNA, 25 bp, Homo sapien
taaagtcagcttcttggatacagac

SEQ ID NO: 1372369 - DNA, 25 bp, Homo sapien
gaaacattaaatctactagcctgaa

SEQ ID NO: 1372370 - DNA, 25 bp, Homo sapien
caggtgcctatgctttggaccatca

SEQ ID NO: 1372371 - DNA, 25 bp, Homo sapien
tggaccatcaaagaagccattagtc

SEQ ID NO: 1372372 - DNA, 25 bp, Homo sapien
gattctgattaccagccaggcttgc

SEQ ID NO: 1372373 - DNA, 25 bp, Homo sapien
gaaacctaggatgtccaaacattca

SEQ ID NO: 1372374 - DNA, 25 bp, Homo sapien
tctagtgagaatcacaaggtaccag

SEQ ID NO: 1372375 - DNA, 25 bp, Homo sapien
tgtatgcccagtgctagtgttttcc

SEQ ID NO: 1372376 - DNA, 25 bp, Homo sapien
gacttaaagtgccttccaccaagaa

SEQ ID NO: 1372377 - DNA, 25 bp, Homo sapien
ttttacagactataggaagccttgc

SEQ ID NO: 1372378 - DNA, 25 bp, Homo sapien
tatccagtgatccagatctctgagc

SEQ ID NO: 1372379 - DNA, 25 bp, Homo sapien
tctgagctaaggcacatagaggtct

SEQ ID NO: 1372380 - DNA, 25 bp, Homo sapien
aaagatgatcgttttgggatgtgcc

SEQ ID NO: 1372381 - DNA, 25 bp, Homo sapien
cacaagcagtttttatgtgccttcc

SEQ ID NO: 1372382 - DNA, 25 bp, Homo sapien
tgtgccttcccttcagttatgttcg

SEQ ID NO: 1372383 - DNA, 25 bp, Homo sapien
tcgtgctcctcagaataaccctgta

SEQ ID NO: 1372384 - DNA, 25 bp, Homo sapien
aagtaggtagggaagtcatcttcat

SEQ ID NO: 1372385 - DNA, 25 bp, Homo sapien
tggattcattcttcatgtcatggta

SEQ ID NO: 1372386 - DNA, 25 bp, Homo sapien
tacagttgcagtcatgtatactcca

SEQ ID NO: 1372387 - DNA, 25 bp, Homo sapien
gctatcccactttgaaaagaacgta

SEQ ID NO: 1372388 - DNA, 25 bp, Homo sapien
tctttaagctgcaatagctatccca

SEQ ID NO: 1372389 - DNA, 25 bp, Homo sapien
atcttttcgcatattgaggtcaagg

SEQ ID NO: 1372390 - DNA, 25 bp, Homo sapien
ttgacatcttttcgcatattgaggt

SEQ ID NO: 1372391 - DNA, 25 bp, Homo sapien
gacatcttttcgcatattgaggtca

SEQ ID NO: 1372392 - DNA, 25 bp, Homo sapien
tgatgataatatctgtaactgcatc

SEQ ID NO: 1372393 - DNA, 25 bp, Homo sapien
tggaagtagccgcaaagaatttgtg

SEQ ID NO: 1372394 - DNA, 25 bp, Homo sapien
gatgcaaagactcatgcatacgatt

SEQ ID NO: 1372395 - DNA, 25 bp, Homo sapien
gaggacaatggaagtagccgcaaag

SEQ ID NO: 1372396 - DNA, 25 bp, Homo sapien
tggttacatatgctgttgaacagat

SEQ ID NO: 1372397 - DNA, 25 bp, Homo sapien
agcaccatatcataggcactgaggg

SEQ ID NO: 1372398 - DNA, 25 bp, Homo sapien
ttccaccagcaccatatcataggca

SEQ ID NO: 1372399 - DNA, 25 bp, Homo sapien
tttctctcggatctctgccctccca

SEQ ID NO: 1372400 - DNA, 25 bp, Homo sapien
ttctttctctcggatctctgccctc

SEQ ID NO: 1372401 - DNA, 25 bp, Homo sapien
attcaagtctttgacggaaaacttg

SEQ ID NO: 1372402 - DNA, 25 bp, Homo sapien
gatgcccgtggttttgactctggat

SEQ ID NO: 1372403 - DNA, 25 bp, Homo sapien
gactctggatcggagcacatcttgc

SEQ ID NO: 1372404 - DNA, 25 bp, Homo sapien
cacatcttgctcactagggaggtac

SEQ ID NO: 1372405 - DNA, 25 bp, Homo sapien
tacttggctagggtcaagagaaatt

SEQ ID NO: 1372406 - DNA, 25 bp, Homo sapien
taaatacttggctagggtcaagaga

SEQ ID NO: 1372407 - DNA, 25 bp, Homo sapien
ttcagaagagttaaatacttggcta

SEQ ID NO: 1372408 - DNA, 25 bp, Homo sapien
gagttaaatacttggctagggtcaa

SEQ ID NO: 1372409 - DNA, 25 bp, Homo sapien
tcctcaatggagtcagccaggttgt

SEQ ID NO: 1372410 - DNA, 25 bp, Homo sapien
cattaagctggtattctgcagctct

SEQ ID NO: 1372411 - DNA, 25 bp, Homo sapien
agctctctcgaagcaggcttgcacc

SEQ ID NO: 1372412 - DNA, 25 bp, Homo sapien
taatgacctccacgagctcaggagg

SEQ ID NO: 1372413 - DNA, 25 bp, Homo sapien
agaaacctggttaagaacttcacag

SEQ ID NO: 1372414 - DNA, 25 bp, Homo sapien
ccttaaccacataatagtaatcaca

SEQ ID NO: 1372415 - DNA, 25 bp, Homo sapien
ttcttcttgctagcctttctgcttc

SEQ ID NO: 1372416 - DNA, 25 bp, Homo sapien
ccatatagtttgttggcctctggta

SEQ ID NO: 1372417 - DNA, 25 bp, Homo sapien
cacccttaaccacataatagtaatc

SEQ ID NO: 1372418 - DNA, 25 bp, Homo sapien
caggcattcttctggtgaatagcca

SEQ ID NO: 1372419 - DNA, 25 bp, Homo sapien
gcacagcttggttcagcataatcga

SEQ ID NO: 1372420 - DNA, 25 bp, Homo sapien
cagtgtggtcatggcccggatgata

SEQ ID NO: 1372421 - DNA, 25 bp, Homo sapien
agcataatcgatgcccagtgtggtc

SEQ ID NO: 1372422 - DNA, 25 bp, Homo sapien
tttagctggacctgagtaaccagac

SEQ ID NO: 1372423 - DNA, 25 bp, Homo sapien
ctttagctggacctgagtaaccaga

SEQ ID NO: 1372424 - DNA, 25 bp, Homo sapien
gacgatggtgctctttcctgactcc

SEQ ID NO: 1372425 - DNA, 25 bp, Homo sapien
catctgtttgacgatggtgctcttt

SEQ ID NO: 1372426 - DNA, 25 bp, Homo sapien
tctgtttgacgatggtgctctttcc

SEQ ID NO: 1372427 - DNA, 25 bp, Homo sapien
tttgacgatggtgctctttcctgac

SEQ ID NO: 1372428 - DNA, 25 bp, Homo sapien
agcagtagcagcttgacagtcttgg

SEQ ID NO: 1372429 - DNA, 25 bp, Homo sapien
agtagcagcttgacagtcttggctt

SEQ ID NO: 1372430 - DNA, 25 bp, Homo sapien
agcagcttgacagtcttggcttcct

SEQ ID NO: 1372431 - DNA, 25 bp, Homo sapien
gcagtagcagcttgacagtcttggc

SEQ ID NO: 1372432 - DNA, 25 bp, Homo sapien
ttgtcagctttttcaggcccctaat

SEQ ID NO: 1372433 - DNA, 25 bp, Homo sapien
tttgccgtcttgtcagctttttcag

SEQ ID NO: 1372434 - DNA, 25 bp, Homo sapien
aggcccctaatcctctctcgtaagg

SEQ ID NO: 1372435 - DNA, 25 bp, Homo sapien
agctttttcaggcccctaatcctct

SEQ ID NO: 1372436 - DNA, 25 bp, Homo sapien
ctgtagggtcttgtactctgcctac

SEQ ID NO: 1372437 - DNA, 25 bp, Homo sapien
aaagctggtctgtacgatggcaggt

SEQ ID NO: 1372438 - DNA, 25 bp, Homo sapien
gagtatcccaacttggctcccctaa

SEQ ID NO: 1372439 - DNA, 25 bp, Homo sapien
tacattgactgagactccctacttc

SEQ ID NO: 1372440 - DNA, 25 bp, Homo sapien
tcggattatctaccccttggcagtg

SEQ ID NO: 1372441 - DNA, 25 bp, Homo sapien
tactgagtactaactacaggccagg

SEQ ID NO: 1372442 - DNA, 25 bp, Homo sapien
tgcttgttggatagaccccagaacg

SEQ ID NO: 1372443 - DNA, 25 bp, Homo sapien
tgagtgtcaatagagaaccaaggcc

SEQ ID NO: 1372444 - DNA, 25 bp, Homo sapien
tcttcatcaagacggacaacagggt

SEQ ID NO: 1372445 - DNA, 25 bp, Homo sapien
caggtgccccgcctcttgtgagtgt

SEQ ID NO: 1372446 - DNA, 25 bp, Homo sapien
ggtatctgggaagtactttgctcac

SEQ ID NO: 1372447 - DNA, 25 bp, Homo sapien
gagctgcggctctccatttacgggc

SEQ ID NO: 1372448 - DNA, 25 bp, Homo sapien
tgccactgttcgaggccactgtgca

SEQ ID NO: 1372449 - DNA, 25 bp, Homo sapien
caggcagcgcagagctgggtatggg

SEQ ID NO: 1372450 - DNA, 25 bp, Homo sapien
ctgcagtgatgtgtaccgtaccaag

SEQ ID NO: 1372451 - DNA, 25 bp, Homo sapien
tcttagagcacgtgagcaggcagcg

SEQ ID NO: 1372452 - DNA, 25 bp, Homo sapien
tactacctggcccagatcggcatcg

SEQ ID NO: 1372453 - DNA, 25 bp, Homo sapien
gtactacctggcccagatcggcatc

SEQ ID NO: 1372454 - DNA, 25 bp, Homo sapien
tggcccagatcggcatcgccatgtc

SEQ ID NO: 1372455 - DNA, 25 bp, Homo sapien
ggctgggacccaactataccaagga

SEQ ID NO: 1372456 - DNA, 25 bp, Homo sapien
aatgtgccagacatccgcgtgggct

SEQ ID NO: 1372457 - DNA, 25 bp, Homo sapien
ccattccagaggaggcgggtatcac

SEQ ID NO: 1372458 - DNA, 25 bp, Homo sapien
agctggcgctcatcacgcaggcagt

SEQ ID NO: 1372459 - DNA, 25 bp, Homo sapien
tatctgctatacaacaccgtgctca

SEQ ID NO: 1372460 - DNA, 25 bp, Homo sapien
tgaatccctggtgtttcggtaacaa

SEQ ID NO: 1372461 - DNA, 25 bp, Homo sapien
tttgttaagagagtatgcggcagga

SEQ ID NO: 1372462 - DNA, 25 bp, Homo sapien
gcagtaatcatctcagccgttggct

SEQ ID NO: 1372463 - DNA, 25 bp, Homo sapien
ctcctcgttcctttctcctgtttat

SEQ ID NO: 1372464 - DNA, 25 bp, Homo sapien
cctgcctcctcgttcctttctcctg

SEQ ID NO: 1372465 - DNA, 25 bp, Homo sapien
tgcctcctcgttcctttctcctgtt

SEQ ID NO: 1372466 - DNA, 25 bp, Homo sapien
ctgcctcctcgttcctttctcctgt

SEQ ID NO: 1372467 - DNA, 25 bp, Homo sapien
ccttcctgttagtggttgtgtctgc

SEQ ID NO: 1372468 - DNA, 25 bp, Homo sapien
gctacccactatccttcgtgaacat

SEQ ID NO: 1372469 - DNA, 25 bp, Homo sapien
atcattacccttccctgcactaaag

SEQ ID NO: 1372470 - DNA, 25 bp, Homo sapien
tgcaggccctttgaagcctcagcta

SEQ ID NO: 1372471 - DNA, 25 bp, Homo sapien
cgagctgtccccgtgttgcatgaag

SEQ ID NO: 1372472 - DNA, 25 bp, Homo sapien
gactggtttacaggccctgctcctg

SEQ ID NO: 1372473 - DNA, 25 bp, Homo sapien
tgtccccgtgttgcatgaaggagca

SEQ ID NO: 1372474 - DNA, 25 bp, Homo sapien
atggtccctgccttaggcctacctg

SEQ ID NO: 1372475 - DNA, 25 bp, Homo sapien
tgcctcctcgttcctttctcctgtt

SEQ ID NO: 1372476 - DNA, 25 bp, Homo sapien
cctgcctcctcgttcctttctcctg

SEQ ID NO: 1372477 - DNA, 25 bp, Homo sapien
ctcctcgttcctttctcctgtttat

SEQ ID NO: 1372478 - DNA, 25 bp, Homo sapien
ctgcctcctcgttcctttctcctgt

SEQ ID NO: 1372479 - DNA, 25 bp, Homo sapien
atcattacccttccctgcactaaag

SEQ ID NO: 1372480 - DNA, 25 bp, Homo sapien
gctacccactatccttcgtgaacat

SEQ ID NO: 1372481 - DNA, 25 bp, Homo sapien
ccttcctgttagtggttgtgtctgc

SEQ ID NO: 1372482 - DNA, 25 bp, Homo sapien
tgcaggccctttgaagcctcagcta

SEQ ID NO: 1372483 - DNA, 25 bp, Homo sapien
gactggtttacaggccctgctcctg

SEQ ID NO: 1372484 - DNA, 25 bp, Homo sapien
atggtccctgccttaggcctacctg

SEQ ID NO: 1372485 - DNA, 25 bp, Homo sapien
tgtccccgtgttgcatgaaggagca

SEQ ID NO: 1372486 - DNA, 25 bp, Homo sapien
cgagctgtccccgtgttgcatgaag

SEQ ID NO: 1372487 - DNA, 25 bp, Homo sapien
cacagccagagcttagtggatgggt

SEQ ID NO: 1372488 - DNA, 25 bp, Homo sapien
ccagctccgtgtgatgcccagtaaa

SEQ ID NO: 1372489 - DNA, 25 bp, Homo sapien
tcaggactgtgctcgaattgtgggt

SEQ ID NO: 1372490 - DNA, 25 bp, Homo sapien
ccagtaaagcctgaaccatgcctgc

SEQ ID NO: 1372491 - DNA, 25 bp, Homo sapien
taagcccttactgatggtacttgta

SEQ ID NO: 1372492 - DNA, 25 bp, Homo sapien
tttaaaggcagatctgtgtccatgc

SEQ ID NO: 1372493 - DNA, 25 bp, Homo sapien
ttctgaactagaaacgcccagttgc

SEQ ID NO: 1372494 - DNA, 25 bp, Homo sapien
tgtataaagccatcactattgtgcc

SEQ ID NO: 1372495 - DNA, 25 bp, Homo sapien
tctgagcaacatcctagcttaaggg

SEQ ID NO: 1372496 - DNA, 25 bp, Homo sapien
tcatatcatcgatctagccccaggg

SEQ ID NO: 1372497 - DNA, 25 bp, Homo sapien
taggctgatttattgtgcccgcacc

SEQ ID NO: 1372498 - DNA, 25 bp, Homo sapien
ggtactacagctgtgcatgcctaag

SEQ ID NO: 1372499 - DNA, 25 bp, Homo sapien
gcttagcaccttctgtctgtactat

SEQ ID NO: 1372500 - DNA, 25 bp, Homo sapien
cactgggtatccctgccatttgggc

SEQ ID NO: 1372501 - DNA, 25 bp, Homo sapien
gagctttatacctcttctggccaaa

SEQ ID NO: 1372502 - DNA, 25 bp, Homo sapien
tactggcctgaacacctaatccctg

SEQ ID NO: 1372503 - DNA, 25 bp, Homo sapien
tcttagccttaacttggaaatgccc

SEQ ID NO: 1372504 - DNA, 25 bp, Homo sapien
ggtgccaagtcatctccacaggagt

SEQ ID NO: 1372505 - DNA, 25 bp, Homo sapien
caacttgaccagcaggaaatgcata

SEQ ID NO: 1372506 - DNA, 25 bp, Homo sapien
tggcccacaggcctatctctgaaga

SEQ ID NO: 1372507 - DNA, 25 bp, Homo sapien
agctttgtgtttaatgttgggcctt

SEQ ID NO: 1372508 - DNA, 25 bp, Homo sapien
gctttgtgtttaatgttgggcctta

SEQ ID NO: 1372509 - DNA, 25 bp, Homo sapien
caagagaaactcagctggacaccag

SEQ ID NO: 1372510 - DNA, 25 bp, Homo sapien
gaactccggttaagtccatcagtac

SEQ ID NO: 1372511 - DNA, 25 bp, Homo sapien
tcagggcttgggcatgaacctacag

SEQ ID NO: 1372512 - DNA, 25 bp, Homo sapien
tagggaaatgccagtatcgcagcga

SEQ ID NO: 1372513 - DNA, 25 bp, Homo sapien
tcagcatacaggcttgttgccccac

SEQ ID NO: 1372514 - DNA, 25 bp, Homo sapien
cagaactgatcagactgtaagtagg

SEQ ID NO: 1372515 - DNA, 25 bp, Homo sapien
ctgatcagactgtaagtaggcagcg

SEQ ID NO: 1372516 - DNA, 25 bp, Homo sapien
agtaggcagcgattttctccaaagc

SEQ ID NO: 1372517 - DNA, 25 bp, Homo sapien
cagactgtaagtaggcagcgatttt

SEQ ID NO: 1372518 - DNA, 25 bp, Homo sapien
cagatgcataccagaacagcaacat

SEQ ID NO: 1372519 - DNA, 25 bp, Homo sapien
gaagttaggctcttcccaagactta

SEQ ID NO: 1372520 - DNA, 25 bp, Homo sapien
cattcacgtgttgcctgcgtctacc

SEQ ID NO: 1372521 - DNA, 25 bp, Homo sapien
tagaggtgtccaaccattgatccca

SEQ ID NO: 1372522 - DNA, 25 bp, Homo sapien
gcaaaagccggggaagaatcctcca

SEQ ID NO: 1372523 - DNA, 25 bp, Homo sapien
gggagcctgtgagtgtttttataag

SEQ ID NO: 1372524 - DNA, 25 bp, Homo sapien
gcctgtgagtgtttttataagagaa

SEQ ID NO: 1372525 - DNA, 25 bp, Homo sapien
aatcctccactatgggatcctgcag

SEQ ID NO: 1372526 - DNA, 25 bp, Homo sapien
tttgggaactcatccaggcacttgg

SEQ ID NO: 1372527 - DNA, 25 bp, Homo sapien
caggcacttggggtcaaatatacgg

SEQ ID NO: 1372528 - DNA, 25 bp, Homo sapien
ctcaaaacggcacatgaaagccttc

SEQ ID NO: 1372529 - DNA, 25 bp, Homo sapien
cacatgaaagccttcaggtttggga

SEQ ID NO: 1372530 - DNA, 25 bp, Homo sapien
ctgatccaagatatcataggtgaga

SEQ ID NO: 1372531 - DNA, 25 bp, Homo sapien
gatccaagatatcataggtgagaaa

SEQ ID NO: 1372532 - DNA, 25 bp, Homo sapien
tccaagatatcataggtgagaaaat

SEQ ID NO: 1372533 - DNA, 25 bp, Homo sapien
caagatatcataggtgagaaaatcc

SEQ ID NO: 1372534 - DNA, 25 bp, Homo sapien
cttccaagtactgaggcttcagttt

SEQ ID NO: 1372535 - DNA, 25 bp, Homo sapien
cttttccccggcaaaccatgagaat

SEQ ID NO: 1372536 - DNA, 25 bp, Homo sapien
tcagcagatgtgtgctaaggaaact

SEQ ID NO: 1372537 - DNA, 25 bp, Homo sapien
ccattcagcagatgtgtgctaagga

SEQ ID NO: 1372538 - DNA, 25 bp, Homo sapien
tttttctgatactccattcagcaga

SEQ ID NO: 1372539 - DNA, 25 bp, Homo sapien
gcagatgtgtgctaaggaaactcac

SEQ ID NO: 1372540 - DNA, 25 bp, Homo sapien
tgtgtgcggaaatccattacttggt

SEQ ID NO: 1372541 - DNA, 25 bp, Homo sapien
ccttatcagttgtgtgcggaaatcc

SEQ ID NO: 1372542 - DNA, 25 bp, Homo sapien
gagctgtaacagagccttatcagtt

SEQ ID NO: 1372543 - DNA, 25 bp, Homo sapien
ggttctctatgatgtccactcgaat

SEQ ID NO: 1372544 - DNA, 25 bp, Homo sapien
acatgttgtgcttgcgagcgatgta

SEQ ID NO: 1372545 - DNA, 25 bp, Homo sapien
catgttgtgcttgcgagcgatgtag

SEQ ID NO: 1372546 - DNA, 25 bp, Homo sapien
tgcttgcgagcgatgtagcgcaaga

SEQ ID NO: 1372547 - DNA, 25 bp, Homo sapien
agcgatgtagcgcaagatggcattg

SEQ ID NO: 1372548 - DNA, 25 bp, Homo sapien
gccattggcttcgatcatagtcagg

SEQ ID NO: 1372549 - DNA, 25 bp, Homo sapien
cagccattggcttcgatcatagtca

SEQ ID NO: 1372550 - DNA, 25 bp, Homo sapien
ccagccattggcttcgatcatagtc

SEQ ID NO: 1372551 - DNA, 25 bp, Homo sapien
cattggcttcgatcatagtcaggag

SEQ ID NO: 1372552 - DNA, 25 bp, Homo sapien
taataccccacctgacaagagcaaa

SEQ ID NO: 1372553 - DNA, 25 bp, Homo sapien
cccagttccagataaaggatgtgtc

SEQ ID NO: 1372554 - DNA, 25 bp, Homo sapien
caccctctgggcgtaagaagaccag

SEQ ID NO: 1372555 - DNA, 25 bp, Homo sapien
tgtgtctctattcacccagattggg

SEQ ID NO: 1372556 - DNA, 25 bp, Homo sapien
acgtgtaccgtttctcctcataaga

SEQ ID NO: 1372557 - DNA, 25 bp, Homo sapien
tatccgtgaactccaggagcaggcg

SEQ ID NO: 1372558 - DNA, 25 bp, Homo sapien
cctcataagaggtatccgtgaactc

SEQ ID NO: 1372559 - DNA, 25 bp, Homo sapien
cgcacgtgtaccgtttctcctcata

SEQ ID NO: 1372560 - DNA, 25 bp, Homo sapien
ggctctaccgttgagacggcactca

SEQ ID NO: 1372561 - DNA, 25 bp, Homo sapien
agctcgaaaaggctcccgcgtagag

SEQ ID NO: 1372562 - DNA, 25 bp, Homo sapien
aagacagcggttcagcgactgcgca

SEQ ID NO: 1372563 - DNA, 25 bp, Homo sapien
tcagtctctttgaccgagcggctct

SEQ ID NO: 1372564 - DNA, 25 bp, Homo sapien
cagtacccgagaaccatagacgact

SEQ ID NO: 1372565 - DNA, 25 bp, Homo sapien
ccacgaatatcccagtacccgagaa

SEQ ID NO: 1372566 - DNA, 25 bp, Homo sapien
gaatatcccagtacccgagaaccat

SEQ ID NO: 1372567 - DNA, 25 bp, Homo sapien
gaaccatagacgactcgcacgacat

SEQ ID NO: 1372568 - DNA, 25 bp, Homo sapien
tctccgtcccttgcctccgcggctc

SEQ ID NO: 1372569 - DNA, 25 bp, Homo sapien
cgcaggcgcgactaatgccggcgtt

SEQ ID NO: 1372570 - DNA, 25 bp, Homo sapien
tagggaaactgtgagcgggaggggc

SEQ ID NO: 1372571 - DNA, 25 bp, Homo sapien
ctgtgagcgggaggggctttatacc

SEQ ID NO: 1372572 - DNA, 25 bp, Homo sapien
gccttgctgaaatgtctgcctattc

SEQ ID NO: 1372573 - DNA, 25 bp, Homo sapien
cttgctgaaatgtctgcctattcct

SEQ ID NO: 1372574 - DNA, 25 bp, Homo sapien
ccttgaagccttctcagaaccaacc

SEQ ID NO: 1372575 - DNA, 25 bp, Homo sapien
agccttgctgaaatgtctgcctatt

SEQ ID NO: 1372576 - DNA, 25 bp, Homo sapien
acaagcctaggcataaatgctccag

SEQ ID NO: 1372577 - DNA, 25 bp, Homo sapien
tggttactggggaggctccaacaca

SEQ ID NO: 1372578 - DNA, 25 bp, Homo sapien
cagccagaagggacactgtttgctt

SEQ ID NO: 1372579 - DNA, 25 bp, Homo sapien
gaaggagagggactgaacagattct

SEQ ID NO: 1372580 - DNA, 25 bp, Homo sapien
tggttcttggaggtgtctaagctgg

SEQ ID NO: 1372581 - DNA, 25 bp, Homo sapien
agatctgccatcttgcatcagcggg

SEQ ID NO: 1372582 - DNA, 25 bp, Homo sapien
ctaatgggtatcagatctgccatct

SEQ ID NO: 1372583 - DNA, 25 bp, Homo sapien
tgggtatcagatctgccatcttgca

SEQ ID NO: 1372584 - DNA, 25 bp, Homo sapien
ctgaggaaagacaaagattcagatg

SEQ ID NO: 1372585 - DNA, 25 bp, Homo sapien
tgaggaaagacaaagattcagatga

SEQ ID NO: 1372586 - DNA, 25 bp, Homo sapien
ggcctgcaggcttttccaactggcc

SEQ ID NO: 1372587 - DNA, 25 bp, Homo sapien
tgggcctgcaggcttttccaactgg

SEQ ID NO: 1372588 - DNA, 25 bp, Homo sapien
cctgcaggcttttccaactggccct

SEQ ID NO: 1372589 - DNA, 25 bp, Homo sapien
tgcaggcttttccaactggccctct

SEQ ID NO: 1372590 - DNA, 25 bp, Homo sapien
acactcccaatggttgtcaggaccc

SEQ ID NO: 1372591 - DNA, 25 bp, Homo sapien
actcccaatggttgtcaggacccca

SEQ ID NO: 1372592 - DNA, 25 bp, Homo sapien
ccaatggttgtcaggaccccagggt

SEQ ID NO: 1372593 - DNA, 25 bp, Homo sapien
tcccaatggttgtcaggaccccagg

SEQ ID NO: 1372594 - DNA, 25 bp, Homo sapien
tgtagctccccaggtcttatgcgaa

SEQ ID NO: 1372595 - DNA, 25 bp, Homo sapien
cctccagccgggacaggattcgtgg

SEQ ID NO: 1372596 - DNA, 25 bp, Homo sapien
tggctccccgtcagggacccaagtg

SEQ ID NO: 1372597 - DNA, 25 bp, Homo sapien
tcttatgcgaagtagctggctcccc

SEQ ID NO: 1372598 - DNA, 25 bp, Homo sapien
acctcttcaggcctcgagctaagtc

SEQ ID NO: 1372599 - DNA, 25 bp, Homo sapien
tcttcaggcctcgagctaagtcgaa

SEQ ID NO: 1372600 - DNA, 25 bp, Homo sapien
ggcctcgagctaagtcgaagcattg

SEQ ID NO: 1372601 - DNA, 25 bp, Homo sapien
tcgagctaagtcgaagcattggaac

SEQ ID NO: 1372602 - DNA, 25 bp, Homo sapien
taatacggtccgaatcaaaccaaga

SEQ ID NO: 1372603 - DNA, 25 bp, Homo sapien
gctctggccccatgataaagttggc

SEQ ID NO: 1372604 - DNA, 25 bp, Homo sapien
agggatcagagtccatctcatctca

SEQ ID NO: 1372605 - DNA, 25 bp, Homo sapien
gacttagggctctggatagtccagg

SEQ ID NO: 1372606 - DNA, 25 bp, Homo sapien
tgttgcttggaatgtagccgctccg

SEQ ID NO: 1372607 - DNA, 25 bp, Homo sapien
tgcttggaatgtagccgctccgtcc

SEQ ID NO: 1372608 - DNA, 25 bp, Homo sapien
gctccgtcccgcctcattcttcacc

SEQ ID NO: 1372609 - DNA, 25 bp, Homo sapien
tccgtcccgcctcattcttcaccag

SEQ ID NO: 1372610 - DNA, 25 bp, Homo sapien
ctgccaagagtcaccacctcagtcc

SEQ ID NO: 1372611 - DNA, 25 bp, Homo sapien
ttctccctctctaggccacccacct

SEQ ID NO: 1372612 - DNA, 25 bp, Homo sapien
ccaagagtcaccacctcagtcccct

SEQ ID NO: 1372613 - DNA, 25 bp, Homo sapien
cctctctaggccacccaccttggca

SEQ ID NO: 1372614 - DNA, 25 bp, Homo sapien
tcctagcttcaaactcgtacaagac

SEQ ID NO: 1372615 - DNA, 25 bp, Homo sapien
gaccacagtcagttcccgtgggttc

SEQ ID NO: 1372616 - DNA, 25 bp, Homo sapien
gcttcaaactcgtacaagacttgca

SEQ ID NO: 1372617 - DNA, 25 bp, Homo sapien
ccgtgggttcctagcttcaaactcg

SEQ ID NO: 1372618 - DNA, 25 bp, Homo sapien
ggctgggcaggtttggggctggagg

SEQ ID NO: 1372619 - DNA, 25 bp, Homo sapien
agggctggctgggcaggtttggggc

SEQ ID NO: 1372620 - DNA, 25 bp, Homo sapien
ctggctgggcaggtttggggctgga

SEQ ID NO: 1372621 - DNA, 25 bp, Homo sapien
gctggctgggcaggtttggggctgg

SEQ ID NO: 1372622 - DNA, 25 bp, Homo sapien
ctggagttggggtccccaggctgag

SEQ ID NO: 1372623 - DNA, 25 bp, Homo sapien
gctgagggtcatggttgtgtgtctt

SEQ ID NO: 1372624 - DNA, 25 bp, Homo sapien
ggtccccaggctgagggtcatggtt

SEQ ID NO: 1372625 - DNA, 25 bp, Homo sapien
ggggtccccaggctgagggtcatgg

SEQ ID NO: 1372626 - DNA, 25 bp, Homo sapien
aaagtgtgaggtgctccctaaccta

SEQ ID NO: 1372627 - DNA, 25 bp, Homo sapien
gaggaaagtgtgaggtgctccctaa

SEQ ID NO: 1372628 - DNA, 25 bp, Homo sapien
gtgtgaggtgctccctaacctatga

SEQ ID NO: 1372629 - DNA, 25 bp, Homo sapien
gaggtgctccctaacctatgacttc

SEQ ID NO: 1372630 - DNA, 25 bp, Homo sapien
tcagaagcatgtgtgggtagtatca

SEQ ID NO: 1372631 - DNA, 25 bp, Homo sapien
tcatgagaagaagcaatgggagcct

SEQ ID NO: 1372632 - DNA, 25 bp, Homo sapien
taagaaacagagtcaggatggctgg

SEQ ID NO: 1372633 - DNA, 25 bp, Homo sapien
aattaagcctatgtcccagccctga

SEQ ID NO: 1372634 - DNA, 25 bp, Homo sapien
cagggtcctggtatcctaagggtgc

SEQ ID NO: 1372635 - DNA, 25 bp, Homo sapien
acagggtcctggtatcctaagggtg

SEQ ID NO: 1372636 - DNA, 25 bp, Homo sapien
gagaatgtgggttggtagggcaggg

SEQ ID NO: 1372637 - DNA, 25 bp, Homo sapien
ggggctcatcgcctgtccagtcggc

SEQ ID NO: 1372638 - DNA, 25 bp, Homo sapien
gggctcatcgcctgtccagtcggcc

SEQ ID NO: 1372639 - DNA, 25 bp, Homo sapien
ccagtcatctgagaatgtgggttgg

SEQ ID NO: 1372640 - DNA, 25 bp, Homo sapien
tctcaggtgggcttagacaggactg

SEQ ID NO: 1372641 - DNA, 25 bp, Homo sapien
gtgagatcacttgggctgctaggcc

SEQ ID NO: 1372642 - DNA, 25 bp, Homo sapien
gactgtagcaggttgatagctttag

SEQ ID NO: 1372643 - DNA, 25 bp, Homo sapien
ccccatccaaaggttactctcaggt

SEQ ID NO: 1372644 - DNA, 25 bp, Homo sapien
ggatgtgtacgagctcaggggcact

SEQ ID NO: 1372645 - DNA, 25 bp, Homo sapien
tgtgtacgagctcaggggcacttgt

SEQ ID NO: 1372646 - DNA, 25 bp, Homo sapien
gatgtgtacgagctcaggggcactt

SEQ ID NO: 1372647 - DNA, 25 bp, Homo sapien
tgtacgagctcaggggcacttgtct

SEQ ID NO: 1372648 - DNA, 25 bp, Homo sapien
tgatcttctggaagcagtcaatgta

SEQ ID NO: 1372649 - DNA, 25 bp, Homo sapien
agctcaatgtcccttaggacatggt

SEQ ID NO: 1372650 - DNA, 25 bp, Homo sapien
gctcaatgtcccttaggacatggtt

SEQ ID NO: 1372651 - DNA, 25 bp, Homo sapien
ctcaatgtcccttaggacatggttc

SEQ ID NO: 1372652 - DNA, 25 bp, Homo sapien
cctctctgggtcctcgggggaagag

SEQ ID NO: 1372653 - DNA, 25 bp, Homo sapien
aaaggcacttggttctcgggcactg

SEQ ID NO: 1372654 - DNA, 25 bp, Homo sapien
ttctcgggcactggtgtggcgtggc

SEQ ID NO: 1372655 - DNA, 25 bp, Homo sapien
gcacttggttctcgggcactggtgt

SEQ ID NO: 1372656 - DNA, 25 bp, Homo sapien
tagggagcggcctttccatagcagg

SEQ ID NO: 1372657 - DNA, 25 bp, Homo sapien
tggctgaaggcctccaagtcgaggt

SEQ ID NO: 1372658 - DNA, 25 bp, Homo sapien
tgctccatagggagcggcctttcca

SEQ ID NO: 1372659 - DNA, 25 bp, Homo sapien
ggctccagatagcgtgcctgctcca

SEQ ID NO: 1372660 - DNA, 25 bp, Homo sapien
ctgcaggctggtcttcagtcgctct

SEQ ID NO: 1372661 - DNA, 25 bp, Homo sapien
atggagttgtaggaacatgtgttga

SEQ ID NO: 1372662 - DNA, 25 bp, Homo sapien
gctcctgcacggtgatggacaggat

SEQ ID NO: 1372663 - DNA, 25 bp, Homo sapien
ttgagcgccacattcatggcctgga

SEQ ID NO: 1372664 - DNA, 25 bp, Homo sapien
aagagcagagtgctagtgcctggca

SEQ ID NO: 1372665 - DNA, 25 bp, Homo sapien
ccaccagagctaggtgtggcttctg

SEQ ID NO: 1372666 - DNA, 25 bp, Homo sapien
cctagggctgaggtgtcatctacct

SEQ ID NO: 1372667 - DNA, 25 bp, Homo sapien
agaggtcaactgtgaggccaccaga

SEQ ID NO: 1372668 - DNA, 25 bp, Homo sapien
tcatcctagccctttggtggcctag

SEQ ID NO: 1372669 - DNA, 25 bp, Homo sapien
tgcaaggcatcctcgggcccctgga

SEQ ID NO: 1372670 - DNA, 25 bp, Homo sapien
tcccctgcttgcatgtcatcaagtg

SEQ ID NO: 1372671 - DNA, 25 bp, Homo sapien
gcagccagccgtccctgacctgcag

SEQ ID NO: 1372672 - DNA, 25 bp, Homo sapien
catccatctcgaacagcttctgcaa

SEQ ID NO: 1372673 - DNA, 25 bp, Homo sapien
gtcctaggactgggagaaagctcag

SEQ ID NO: 1372674 - DNA, 25 bp, Homo sapien
agtcctaggactgggagaaagctca

SEQ ID NO: 1372675 - DNA, 25 bp, Homo sapien
cagatgctctggcaggcttgttgga

SEQ ID NO: 1372676 - DNA, 25 bp, Homo sapien
gagtccatgcgacatggttgggaca

SEQ ID NO: 1372677 - DNA, 25 bp, Homo sapien
cttgtgtgaagtgtccatgttctgg

SEQ ID NO: 1372678 - DNA, 25 bp, Homo sapien
cacttgggtttagttggacactgcc

SEQ ID NO: 1372679 - DNA, 25 bp, Homo sapien
tgggctctgaggtgaggttctggga

SEQ ID NO: 1372680 - DNA, 25 bp, Homo sapien
gggctctgaggtgaggttctgggag

SEQ ID NO: 1372681 - DNA, 25 bp, Homo sapien
gtgggctctgaggtgaggttctggg

SEQ ID NO: 1372682 - DNA, 25 bp, Homo sapien
ggcacagagcaaggggcgggaggtg

SEQ ID NO: 1372683 - DNA, 25 bp, Homo sapien
aatggctctgctgctgggccttgac

SEQ ID NO: 1372684 - DNA, 25 bp, Homo sapien
tggctctgctgctgggccttgacat

SEQ ID NO: 1372685 - DNA, 25 bp, Homo sapien
taaatggctctgctgctgggccttg

SEQ ID NO: 1372686 - DNA, 25 bp, Homo sapien
agtaaatggctctgctgctgggcct

SEQ ID NO: 1372687 - DNA, 25 bp, Homo sapien
caggggccctttccggagccatctg

SEQ ID NO: 1372688 - DNA, 25 bp, Homo sapien
ctgcagccagcgtcctccactgagg

SEQ ID NO: 1372689 - DNA, 25 bp, Homo sapien
gggccctttccggagccatctgcag

SEQ ID NO: 1372690 - DNA, 25 bp, Homo sapien
tgctattgctctgactgggggcctc

SEQ ID NO: 1372691 - DNA, 25 bp, Homo sapien
ggtcttggagcaggtggtccggtgc

SEQ ID NO: 1372692 - DNA, 25 bp, Homo sapien
tggtccggtgctggtggtggaagga

SEQ ID NO: 1372693 - DNA, 25 bp, Homo sapien
ctgggtgccagtgaaggccgggtgc

SEQ ID NO: 1372694 - DNA, 25 bp, Homo sapien
caggaggctggtcttggagcaggtg

SEQ ID NO: 1372695 - DNA, 25 bp, Homo sapien
cagaggcagccacgcctgtgctctt

SEQ ID NO: 1372696 - DNA, 25 bp, Homo sapien
cagccacgcctgtgctctttggact

SEQ ID NO: 1372697 - DNA, 25 bp, Homo sapien
aggcagccacgcctgtgctctttgg

SEQ ID NO: 1372698 - DNA, 25 bp, Homo sapien
ggttacagaggcagccacgcctgtg

SEQ ID NO: 1372699 - DNA, 25 bp, Homo sapien
tcctcagacataaagcctttgtggc

SEQ ID NO: 1372700 - DNA, 25 bp, Homo sapien
ctcagacataaagcctttgtggcct

SEQ ID NO: 1372701 - DNA, 25 bp, Homo sapien
tgcccctgggagcagtgtgtgtctc

SEQ ID NO: 1372702 - DNA, 25 bp, Homo sapien
tgcagtgccctttaggggtgcccct

SEQ ID NO: 1372703 - DNA, 25 bp, Homo sapien
gaagcttctgcacaaagctccgggt

SEQ ID NO: 1372704 - DNA, 25 bp, Homo sapien
ttctgcacaaagctccgggtgccac

SEQ ID NO: 1372705 - DNA, 25 bp, Homo sapien
gcttctgcacaaagctccgggtgcc

SEQ ID NO: 1372706 - DNA, 25 bp, Homo sapien
ctgaagcttctgcacaaagctccgg

SEQ ID NO: 1372707 - DNA, 25 bp, Homo sapien
accaggagctgggacttaggttgga

SEQ ID NO: 1372708 - DNA, 25 bp, Homo sapien
caggagctgggacttaggttggagg

SEQ ID NO: 1372709 - DNA, 25 bp, Homo sapien
ctgcaagggagttcggctgaggcac

SEQ ID NO: 1372710 - DNA, 25 bp, Homo sapien
aagggagttcggctgaggcaccagg

SEQ ID NO: 1372711 - DNA, 25 bp, Homo sapien
gagggcttacagacaccttggaatt

SEQ ID NO: 1372712 - DNA, 25 bp, Homo sapien
gaattcaagctgagttcattatttc

SEQ ID NO: 1372713 - DNA, 25 bp, Homo sapien
aggatccctctggagggcttacaga

SEQ ID NO: 1372714 - DNA, 25 bp, Homo sapien
cactgtgagaggtgctaggatccct

SEQ ID NO: 1372715 - DNA, 25 bp, Homo sapien
gctggagatttgattgtccactcct

SEQ ID NO: 1372716 - DNA, 25 bp, Homo sapien
cccaatggactacccttcctgcagt

SEQ ID NO: 1372717 - DNA, 25 bp, Homo sapien
cagctctgtggcaagtcctaagtgg

SEQ ID NO: 1372718 - DNA, 25 bp, Homo sapien
cattgatccttactggttgctggta

SEQ ID NO: 1372719 - DNA, 25 bp, Homo sapien
ggcttgtaattccttgaagggtcac

SEQ ID NO: 1372720 - DNA, 25 bp, Homo sapien
gaagtccttgatgaactcaagtctc

SEQ ID NO: 1372721 - DNA, 25 bp, Homo sapien
ccttgtactttatactcggcttggg

SEQ ID NO: 1372722 - DNA, 25 bp, Homo sapien
cctgtggacacgctatggctttatg

SEQ ID NO: 1372723 - DNA, 25 bp, Homo sapien
tttagaaccagaccccagagcaggg

SEQ ID NO: 1372724 - DNA, 25 bp, Homo sapien
ccagccagcacctcttgctggtgga

SEQ ID NO: 1372725 - DNA, 25 bp, Homo sapien
ctttagaaccagaccccagagcagg

SEQ ID NO: 1372726 - DNA, 25 bp, Homo sapien
agcacctcttgctggtggactgcat

SEQ ID NO: 1372727 - DNA, 25 bp, Homo sapien
gcgggtcatagattttgtctgggcc

SEQ ID NO: 1372728 - DNA, 25 bp, Homo sapien
tcattcttgcgggtcatagattttg

SEQ ID NO: 1372729 - DNA, 25 bp, Homo sapien
gggcctgggtcgcagacagagaagg

SEQ ID NO: 1372730 - DNA, 25 bp, Homo sapien
gtcatagattttgtctgggcctggg

SEQ ID NO: 1372731 - DNA, 25 bp, Homo sapien
tctctgtcagcaaagccgcatccgt

SEQ ID NO: 1372732 - DNA, 25 bp, Homo sapien
ctgattgaaagcagatgtctcgccc

SEQ ID NO: 1372733 - DNA, 25 bp, Homo sapien
accgctggcatgtccaggccgcaga

SEQ ID NO: 1372734 - DNA, 25 bp, Homo sapien
gaaagcagatgtctcgccctggtgg

SEQ ID NO: 1372735 - DNA, 25 bp, Homo sapien
aaggctccaccgctggatgctggct

SEQ ID NO: 1372736 - DNA, 25 bp, Homo sapien
aaaggcaaaggctccaccgctggat

SEQ ID NO: 1372737 - DNA, 25 bp, Homo sapien
ggctccaccgctggatgctggcttc

SEQ ID NO: 1372738 - DNA, 25 bp, Homo sapien
aggctccaccgctggatgctggctt

SEQ ID NO: 1372739 - DNA, 25 bp, Homo sapien
agcactggggtttactatggagggt

SEQ ID NO: 1372740 - DNA, 25 bp, Homo sapien
tcagcactggggtttactatggagg

SEQ ID NO: 1372741 - DNA, 25 bp, Homo sapien
actcagcactggggtttactatgga

SEQ ID NO: 1372742 - DNA, 25 bp, Homo sapien
ctcagcactggggtttactatggag

SEQ ID NO: 1372743 - DNA, 25 bp, Homo sapien
tatcacgtggctggatcttgaaggc

SEQ ID NO: 1372744 - DNA, 25 bp, Homo sapien
tgctgtggtcacttttatcacgtgg

SEQ ID NO: 1372745 - DNA, 25 bp, Homo sapien
ggctggatcttgaaggcagttgaat

SEQ ID NO: 1372746 - DNA, 25 bp, Homo sapien
tgttgcttccaccacgctgctgtgg

SEQ ID NO: 1372747 - DNA, 25 bp, Homo sapien
ccatggatggtgctttgactcagca

SEQ ID NO: 1372748 - DNA, 25 bp, Homo sapien
tgttctctgaatgggggttggtgag

SEQ ID NO: 1372749 - DNA, 25 bp, Homo sapien
aggccatggatggtgctttgactca

SEQ ID NO: 1372750 - DNA, 25 bp, Homo sapien
ttgttctctgaatgggggttggtga

SEQ ID NO: 1372751 - DNA, 25 bp, Homo sapien
ccttggctgggccgctggcgggaag

SEQ ID NO: 1372752 - DNA, 25 bp, Homo sapien
tggccttggctgggccgctggcggg

SEQ ID NO: 1372753 - DNA, 25 bp, Homo sapien
ctctggccttggctgggccgctggc

SEQ ID NO: 1372754 - DNA, 25 bp, Homo sapien
ctggccttggctgggccgctggcgg

SEQ ID NO: 1372755 - DNA, 25 bp, Homo sapien
tgaagagtgactgggccaggatgcc

SEQ ID NO: 1372756 - DNA, 25 bp, Homo sapien
tggagtggtgagttgctggtctgct

SEQ ID NO: 1372757 - DNA, 25 bp, Homo sapien
tgctggtctgctttgttagaggaag

SEQ ID NO: 1372758 - DNA, 25 bp, Homo sapien
gagcctggtgtaccacctggtgcca

SEQ ID NO: 1372759 - DNA, 25 bp, Homo sapien
caacacgtgaaacccgaagaagatg

SEQ ID NO: 1372760 - DNA, 25 bp, Homo sapien
cccgaagaagatgcggatggcgcca

SEQ ID NO: 1372761 - DNA, 25 bp, Homo sapien
agccgtggtggctgcccaacacgtg

SEQ ID NO: 1372762 - DNA, 25 bp, Homo sapien
gtggtggctgcccaacacgtgaaac

SEQ ID NO: 1372763 - DNA, 25 bp, Homo sapien
aataaaactcccgtctgcagcacag

SEQ ID NO: 1372764 - DNA, 25 bp, Homo sapien
ctgtaatttcatctctgaccaatca

SEQ ID NO: 1372765 - DNA, 25 bp, Homo sapien
acctggcctgtaatttcatctctga

SEQ ID NO: 1372766 - DNA, 25 bp, Homo sapien
ataataaaactcccgtctgcagcac

SEQ ID NO: 1372767 - DNA, 25 bp, Homo sapien
gcagggaccacatcagctcatcaca

SEQ ID NO: 1372768 - DNA, 25 bp, Homo sapien
cagggaccacatcagctcatcacag

SEQ ID NO: 1372769 - DNA, 25 bp, Homo sapien
tcccaccagtggtcctcagcaggga

SEQ ID NO: 1372770 - DNA, 25 bp, Homo sapien
ctttcccaccagtggtcctcagcag

SEQ ID NO: 1372771 - DNA, 25 bp, Homo sapien
ccttgggcctgccaatgaagtctct

SEQ ID NO: 1372772 - DNA, 25 bp, Homo sapien
ggcctgccaatgaagtctctgtcca

SEQ ID NO: 1372773 - DNA, 25 bp, Homo sapien
gcctgccaatgaagtctctgtccat

SEQ ID NO: 1372774 - DNA, 25 bp, Homo sapien
tgggcctgccaatgaagtctctgtc

SEQ ID NO: 1372775 - DNA, 25 bp, Homo sapien
cagtcaaggctagggaacaatttcc

SEQ ID NO: 1372776 - DNA, 25 bp, Homo sapien
cagggactctgtgaagccttggcaa

SEQ ID NO: 1372777 - DNA, 25 bp, Homo sapien
tgattatcgctgtgcgaggcggcca

SEQ ID NO: 1372778 - DNA, 25 bp, Homo sapien
ccttgcataacagggccagcagtca

SEQ ID NO: 1372779 - DNA, 25 bp, Homo sapien
cagagcgctacccagaagggcataa

SEQ ID NO: 1372780 - DNA, 25 bp, Homo sapien
tgaggctcgcatcctgagggacatg

SEQ ID NO: 1372781 - DNA, 25 bp, Homo sapien
aagggcataactagaggctgggacc

SEQ ID NO: 1372782 - DNA, 25 bp, Homo sapien
gcatccggagggagatcctggaacc

SEQ ID NO: 1372783 - DNA, 25 bp, Homo sapien
gcaggaggagcaccagggatcggag

SEQ ID NO: 1372784 - DNA, 25 bp, Homo sapien
cagggatcggaggagccccgcagag

SEQ ID NO: 1372785 - DNA, 25 bp, Homo sapien
tcctcgggcagcgtgctgccccttg

SEQ ID NO: 1372786 - DNA, 25 bp, Homo sapien
actcctcgggcagcgtgctgcccct

SEQ ID NO: 1372787 - DNA, 25 bp, Homo sapien
gatttcccgtaaaggtgtgcagcct

SEQ ID NO: 1372788 - DNA, 25 bp, Homo sapien
tggacgctgaggagtgaaagaaccc

SEQ ID NO: 1372789 - DNA, 25 bp, Homo sapien
tgacctgccagtgatgccaagaggg

SEQ ID NO: 1372790 - DNA, 25 bp, Homo sapien
gcagaggctcccctcatgaaggaag

SEQ ID NO: 1372791 - DNA, 25 bp, Homo sapien
tgagcacttggtggcatcagagcag

SEQ ID NO: 1372792 - DNA, 25 bp, Homo sapien
tgagaagtcaagagaggacattggc

SEQ ID NO: 1372793 - DNA, 25 bp, Homo sapien
gacattggctcacgcactgtgagat

SEQ ID NO: 1372794 - DNA, 25 bp, Homo sapien
atttaaaagataggaagctgcttat

SEQ ID NO: 1372795 - DNA, 25 bp, Homo sapien
gttgtttgatgactctgagtggtta

SEQ ID NO: 1372796 - DNA, 25 bp, Homo sapien
ctggttgtttgatgactctgagtgg

SEQ ID NO: 1372797 - DNA, 25 bp, Homo sapien
tgtttgatgactctgagtggttatt

SEQ ID NO: 1372798 - DNA, 25 bp, Homo sapien
tggttgtttgatgactctgagtggt

SEQ ID NO: 1372799 - DNA, 25 bp, Homo sapien
aatcagccatatctggttttcttgg

SEQ ID NO: 1372800 - DNA, 25 bp, Homo sapien
gcgattaattgaacatttagtgtgg

SEQ ID NO: 1372801 - DNA, 25 bp, Homo sapien
taataacatgattgagaaatcagcc

SEQ ID NO: 1372802 - DNA, 25 bp, Homo sapien
ttggctgtggactcttcagaaaaga

SEQ ID NO: 1372803 - DNA, 25 bp, Homo sapien
aaagagggtgggagatcacgagtgt

SEQ ID NO: 1372804 - DNA, 25 bp, Homo sapien
gagggtgggagatcacgagtgtcca

SEQ ID NO: 1372805 - DNA, 25 bp, Homo sapien
gggtgggagatcacgagtgtccaca

SEQ ID NO: 1372806 - DNA, 25 bp, Homo sapien
agcagttgagatccaactggaactc

SEQ ID NO: 1372807 - DNA, 25 bp, Homo sapien
gcttgggcttcactgactggaacag

SEQ ID NO: 1372808 - DNA, 25 bp, Homo sapien
taaaagacccgagcgggaatgaggc

SEQ ID NO: 1372809 - DNA, 25 bp, Homo sapien
agtttcgggctatttcaggccctgg

SEQ ID NO: 1372810 - DNA, 25 bp, Homo sapien
tcactgactggaacagcctctccat

SEQ ID NO: 1372811 - DNA, 25 bp, Homo sapien
cagagagggtgaggaaggcaggctc

SEQ ID NO: 1372812 - DNA, 25 bp, Homo sapien
ccaccagcagccgaccactctcctc

SEQ ID NO: 1372813 - DNA, 25 bp, Homo sapien
ccagcagccgaccactctcctctgg

SEQ ID NO: 1372814 - DNA, 25 bp, Homo sapien
accaccagcagccgaccactctcct

SEQ ID NO: 1372815 - DNA, 25 bp, Homo sapien
accagcagccgaccactctcctctg

SEQ ID NO: 1372816 - DNA, 25 bp, Homo sapien
atttttgctccctttctctggcagg

SEQ ID NO: 1372817 - DNA, 25 bp, Homo sapien
ccctttctctggcaggagctggtgc

SEQ ID NO: 1372818 - DNA, 25 bp, Homo sapien
ttttgctccctttctctggcaggag

SEQ ID NO: 1372819 - DNA, 25 bp, Homo sapien
ctccctttctctggcaggagctggt

SEQ ID NO: 1372820 - DNA, 25 bp, Homo sapien
agctgacccttgtgaccagtccggg

SEQ ID NO: 1372821 - DNA, 25 bp, Homo sapien
cagggccaggccttaaatttgcgac

SEQ ID NO: 1372822 - DNA, 25 bp, Homo sapien
gagcagtggccgctttatccaacaa

SEQ ID NO: 1372823 - DNA, 25 bp, Homo sapien
caacaactgcgtgatagctgggagg

SEQ ID NO: 1372824 - DNA, 25 bp, Homo sapien
tggaagattccttgactctgaggca

SEQ ID NO: 1372825 - DNA, 25 bp, Homo sapien
taaaaactcattaaggcagggattc

SEQ ID NO: 1372826 - DNA, 25 bp, Homo sapien
cacctttgtatccagtgtgcctagc

SEQ ID NO: 1372827 - DNA, 25 bp, Homo sapien
cagaatgattgagggtgggacctta

SEQ ID NO: 1372828 - DNA, 25 bp, Homo sapien
tgtattattgtcaggccaagtgctg

SEQ ID NO: 1372829 - DNA, 25 bp, Homo sapien
cagttgaggactagtcaaggtcaca

SEQ ID NO: 1372830 - DNA, 25 bp, Homo sapien
ttaccagtaaatgtgccccaccgtg

SEQ ID NO: 1372831 - DNA, 25 bp, Homo sapien
tcccaggaggaatattactaatgtg

SEQ ID NO: 1372832 - DNA, 25 bp, Homo sapien
cagtagtgtaccaaaagagggatcc

SEQ ID NO: 1372833 - DNA, 25 bp, Homo sapien
tctctgcagtaagaaagactgctct

SEQ ID NO: 1372834 - DNA, 25 bp, Homo sapien
agagggatcctagcccttcaaataa

SEQ ID NO: 1372835 - DNA, 25 bp, Homo sapien
tgcacacaatatgctaggacagaca

SEQ ID NO: 1372836 - DNA, 25 bp, Homo sapien
tagcccgtagttcatagcatcagtg

SEQ ID NO: 1372837 - DNA, 25 bp, Homo sapien
gcttgttaagatcaggaggcccact

SEQ ID NO: 1372838 - DNA, 25 bp, Homo sapien
cagagaagcagggatggtacctacc

SEQ ID NO: 1372839 - DNA, 25 bp, Homo sapien
taccttctctgtggaacaatctgca

SEQ ID NO: 1372840 - DNA, 25 bp, Homo sapien
tgtatccatcacgttagccctgctg

SEQ ID NO: 1372841 - DNA, 25 bp, Homo sapien
aaaggaaagctttcaccctgcagct

SEQ ID NO: 1372842 - DNA, 25 bp, Homo sapien
tcttagcagggaacaattgtcttgc

SEQ ID NO: 1372843 - DNA, 25 bp, Homo sapien
tccttgccagtgtgaccatgctttc

SEQ ID NO: 1372844 - DNA, 25 bp, Homo sapien
agtacctgtggtgggctattgtgcc

SEQ ID NO: 1372845 - DNA, 25 bp, Homo sapien
aaggaacttagagccggaccgagct

SEQ ID NO: 1372846 - DNA, 25 bp, Homo sapien
tgcgcctgatactgaactgttaaag

SEQ ID NO: 1372847 - DNA, 25 bp, Homo sapien
cagatcaggccatgggttaacagta

SEQ ID NO: 1372848 - DNA, 25 bp, Homo sapien
cctgggtttaccctgcaggaagcag

SEQ ID NO: 1372849 - DNA, 25 bp, Homo sapien
caggtgacagtaaccaattttgctg

SEQ ID NO: 1372850 - DNA, 25 bp, Homo sapien
gcttcggatcttgaacaagctgaca

SEQ ID NO: 1372851 - DNA, 25 bp, Homo sapien
aagtgagtcagtgtagtcagcaggc

SEQ ID NO: 1372852 - DNA, 25 bp, Homo sapien
gcctctcgagacatacaaatccttg

SEQ ID NO: 1372853 - DNA, 25 bp, Homo sapien
ccagggccagaaagtcggtatcttg

SEQ ID NO: 1372854 - DNA, 25 bp, Homo sapien
ccagaagtaattgcggaggctcctt

SEQ ID NO: 1372855 - DNA, 25 bp, Homo sapien
tccttttggctttcgagggcctgta

SEQ ID NO: 1372856 - DNA, 25 bp, Homo sapien
tcaacgcttgtccttgtcaagctgc

SEQ ID NO: 1372857 - DNA, 25 bp, Homo sapien
acgcttgtccttgtcaagctgcctg

SEQ ID NO: 1372858 - DNA, 25 bp, Homo sapien
gcttgtccttgtcaagctgcctgcc

SEQ ID NO: 1372859 - DNA, 25 bp, Homo sapien
ttgtccttgtcaagctgcctgcctt

SEQ ID NO: 1372860 - DNA, 25 bp, Homo sapien
ctggtgtccgtgtttctgccaggac

SEQ ID NO: 1372861 - DNA, 25 bp, Homo sapien
caagatttagggctctggcatcttc

SEQ ID NO: 1372862 - DNA, 25 bp, Homo sapien
tttctgccaggaccaagatttaggg

SEQ ID NO: 1372863 - DNA, 25 bp, Homo sapien
caggaccaagatttagggctctggc

SEQ ID NO: 1372864 - DNA, 25 bp, Homo sapien
ccctgatgtgtctttgtgggcttgg

SEQ ID NO: 1372865 - DNA, 25 bp, Homo sapien
cagctcagccctgatgtgtctttgt

SEQ ID NO: 1372866 - DNA, 25 bp, Homo sapien
tcagccctgatgtgtctttgtgggc

SEQ ID NO: 1372867 - DNA, 25 bp, Homo sapien
gctcagccctgatgtgtctttgtgg

SEQ ID NO: 1372868 - DNA, 25 bp, Homo sapien
aattcttctgagcaatgtggttgtg

SEQ ID NO: 1372869 - DNA, 25 bp, Homo sapien
tgctggttgaggctgaattcttctg

SEQ ID NO: 1372870 - DNA, 25 bp, Homo sapien
cttctgagcaatgtggttgtgttta

SEQ ID NO: 1372871 - DNA, 25 bp, Homo sapien
gctgctggttgaggctgaattcttc

SEQ ID NO: 1372872 - DNA, 25 bp, Homo sapien
ggctggtcccgtggaagagattcca

SEQ ID NO: 1372873 - DNA, 25 bp, Homo sapien
aacatccaatatcatttccatggca

SEQ ID NO: 1372874 - DNA, 25 bp, Homo sapien
gattccaaatatgtggtgatttctg

SEQ ID NO: 1372875 - DNA, 25 bp, Homo sapien
ccatggcatagctctgggctggtcc

SEQ ID NO: 1372876 - DNA, 25 bp, Homo sapien
atgaagagcttcagtccacgcggcg

SEQ ID NO: 1372877 - DNA, 25 bp, Homo sapien
ttagtgtcagacaccagtgcgcccc

SEQ ID NO: 1372878 - DNA, 25 bp, Homo sapien
ccaagtaagctgtcttagctggaga

SEQ ID NO: 1372879 - DNA, 25 bp, Homo sapien
tccctgaacgatgagccaagtaagc

SEQ ID NO: 1372880 - DNA, 25 bp, Homo sapien
gagtcctggctgcttcgaagcccct

SEQ ID NO: 1372881 - DNA, 25 bp, Homo sapien
aagaccctgtaacgtgttccctgct

SEQ ID NO: 1372882 - DNA, 25 bp, Homo sapien
ctgggagcgactgggaatggaaaaa

SEQ ID NO: 1372883 - DNA, 25 bp, Homo sapien
cagaggtgggctgggagcgactggg

SEQ ID NO: 1372884 - DNA, 25 bp, Homo sapien
tccagttcagaaggccgggtggctc

SEQ ID NO: 1372885 - DNA, 25 bp, Homo sapien
agaaggccgggtggctccttgggct

SEQ ID NO: 1372886 - DNA, 25 bp, Homo sapien
gtggtccagttcagaaggccgggtg

SEQ ID NO: 1372887 - DNA, 25 bp, Homo sapien
tggtccagttcagaaggccgggtgg

SEQ ID NO: 1372888 - DNA, 25 bp, Homo sapien
tatagtcaccatctgaggaaggctc

SEQ ID NO: 1372889 - DNA, 25 bp, Homo sapien
ggagtagatgccagggtgagccgca

SEQ ID NO: 1372890 - DNA, 25 bp, Homo sapien
agcgagacgaggcttggagacttat

SEQ ID NO: 1372891 - DNA, 25 bp, Homo sapien
tcccagatcctggactggcccacag

SEQ ID NO: 1372892 - DNA, 25 bp, Homo sapien
ggatcttcccataacgctcgcgctt

SEQ ID NO: 1372893 - DNA, 25 bp, Homo sapien
cataggcagccgtgaaggggttccg

SEQ ID NO: 1372894 - DNA, 25 bp, Homo sapien
gagggtggctgtcagtacggggcag

SEQ ID NO: 1372895 - DNA, 25 bp, Homo sapien
cagtacggggcagcacagagatgtc

SEQ ID NO: 1372896 - DNA, 25 bp, Homo sapien
gggtttgagggggtgatagggcagc

SEQ ID NO: 1372897 - DNA, 25 bp, Homo sapien
ggtttgagggggtgatagggcagcc

SEQ ID NO: 1372898 - DNA, 25 bp, Homo sapien
agagccccatccttgcagtgccctc

SEQ ID NO: 1372899 - DNA, 25 bp, Homo sapien
gccagagagccccatccttgcagtg

SEQ ID NO: 1372900 - DNA, 25 bp, Homo sapien
ggcagccagagagccccatccttgc

SEQ ID NO: 1372901 - DNA, 25 bp, Homo sapien
agccccatccttgcagtgccctcac

SEQ ID NO: 1372902 - DNA, 25 bp, Homo sapien
gctggaatgtgctgaaggtcgtgcg

SEQ ID NO: 1372903 - DNA, 25 bp, Homo sapien
gccagctgctcccgggcatacacat

SEQ ID NO: 1372904 - DNA, 25 bp, Homo sapien
aatgtgctgaaggtcgtgcggttac

SEQ ID NO: 1372905 - DNA, 25 bp, Homo sapien
gcatacacatcaggatagtgggttt

SEQ ID NO: 1372906 - DNA, 25 bp, Homo sapien
gagccttgcaagttagagggcccgt

SEQ ID NO: 1372907 - DNA, 25 bp, Homo sapien
gctggcagctttggaggtcttctcc

SEQ ID NO: 1372908 - DNA, 25 bp, Homo sapien
ttgcaagttagagggcccgtctctg

SEQ ID NO: 1372909 - DNA, 25 bp, Homo sapien
agctggcagctttggaggtcttctc

SEQ ID NO: 1372910 - DNA, 25 bp, Homo sapien
cctgcaggtacttggcgggcggctt

SEQ ID NO: 1372911 - DNA, 25 bp, Homo sapien
tccgcggggccctcgtagaagtggc

SEQ ID NO: 1372912 - DNA, 25 bp, Homo sapien
ccgaggtcctgcaggtacttggcgg

SEQ ID NO: 1372913 - DNA, 25 bp, Homo sapien
cctcgtagaagtggccgccgttgag

SEQ ID NO: 1372914 - DNA, 25 bp, Homo sapien
ggtgcaggtgaggcgcagcggcggg

SEQ ID NO: 1372915 - DNA, 25 bp, Homo sapien
gctcgtcccccgaggccacataggg

SEQ ID NO: 1372916 - DNA, 25 bp, Homo sapien
cggaaagcgggtcagccgcgggccg

SEQ ID NO: 1372917 - DNA, 25 bp, Homo sapien
gcccgcaggccggaaagcgggtcag

SEQ ID NO: 1372918 - DNA, 25 bp, Homo sapien
aaggcgcgcagtgctcggggtccat

SEQ ID NO: 1372919 - DNA, 25 bp, Homo sapien
cggaaaggcgcgcagtgctcggggt

SEQ ID NO: 1372920 - DNA, 25 bp, Homo sapien
gcggaaaggcgcgcagtgctcgggg

SEQ ID NO: 1372921 - DNA, 25 bp, Homo sapien
gaaaggcgcgcagtgctcggggtcc

SEQ ID NO: 1372922 - DNA, 25 bp, Homo sapien
ctgcccgcgccgcctgtgagcgccc

SEQ ID NO: 1372923 - DNA, 25 bp, Homo sapien
ccgcgccgcctgtgagcgcccgcca

SEQ ID NO: 1372924 - DNA, 25 bp, Homo sapien
cgccgcctgtgagcgcccgccaagg

SEQ ID NO: 1372925 - DNA, 25 bp, Homo sapien
tgcccgcgccgcctgtgagcgcccg

SEQ ID NO: 1372926 - DNA, 25 bp, Homo sapien
accctgctcacttcccatggattga

SEQ ID NO: 1372927 - DNA, 25 bp, Homo sapien
aggacccgaggaccctgctcacttc

SEQ ID NO: 1372928 - DNA, 25 bp, Homo sapien
ttcccatggattgaggagcccgtgg

SEQ ID NO: 1372929 - DNA, 25 bp, Homo sapien
agcccgtggggctgcgttaaactgt

SEQ ID NO: 1372930 - DNA, 25 bp, Homo sapien
gttgggctgtaaatcaagaccaaac

SEQ ID NO: 1372931 - DNA, 25 bp, Homo sapien
caaggagtcattaagccgttattaa

SEQ ID NO: 1372932 - DNA, 25 bp, Homo sapien
accagaagccttgcatctcacaagg

SEQ ID NO: 1372933 - DNA, 25 bp, Homo sapien
gagttgggctgtaaatcaagaccaa

SEQ ID NO: 1372934 - DNA, 25 bp, Homo sapien
cattagggcccctaatcacggaatg

SEQ ID NO: 1372935 - DNA, 25 bp, Homo sapien
ttggaggcattatggccattagggc

SEQ ID NO: 1372936 - DNA, 25 bp, Homo sapien
ctaatcacggaatgcagactggcca

SEQ ID NO: 1372937 - DNA, 25 bp, Homo sapien
ggcattatggccattagggccccta

SEQ ID NO: 1372938 - DNA, 25 bp, Homo sapien
ctgcatccactttcaagcccagaaa

SEQ ID NO: 1372939 - DNA, 25 bp, Homo sapien
catccactttcaagcccagaaattt

SEQ ID NO: 1372940 - DNA, 25 bp, Homo sapien
tgcatccactttcaagcccagaaat

SEQ ID NO: 1372941 - DNA, 25 bp, Homo sapien
tccactttcaagcccagaaatttct

SEQ ID NO: 1372942 - DNA, 25 bp, Homo sapien
ggttttgctgttgtctgaatggaag

SEQ ID NO: 1372943 - DNA, 25 bp, Homo sapien
gttttgctgttgtctgaatggaagt

SEQ ID NO: 1372944 - DNA, 25 bp, Homo sapien
caagcttgggtgtaaaaacatcggc

SEQ ID NO: 1372945 - DNA, 25 bp, Homo sapien
aaaacatcggcctctcgtatttggc

SEQ ID NO: 1372946 - DNA, 25 bp, Homo sapien
ggcctctcgtatttggctgtaaaca

SEQ ID NO: 1372947 - DNA, 25 bp, Homo sapien
ggtgtaaaaacatcggcctctcgta

SEQ ID NO: 1372948 - DNA, 25 bp, Homo sapien
acaggcgtttggtttcttcccagat

SEQ ID NO: 1372949 - DNA, 25 bp, Homo sapien
gtttcttcccagatcgctggggggc

SEQ ID NO: 1372950 - DNA, 25 bp, Homo sapien
ggcgtttggtttcttcccagatcgc

SEQ ID NO: 1372951 - DNA, 25 bp, Homo sapien
gtttggtttcttcccagatcgctgg

SEQ ID NO: 1372952 - DNA, 25 bp, Homo sapien
ataattgataacaacccgctgggtg

SEQ ID NO: 1372953 - DNA, 25 bp, Homo sapien
gagcatcgcaacctgcggcctgagt

SEQ ID NO: 1372954 - DNA, 25 bp, Homo sapien
ggaaatggatgcagtgcccgtgaac

SEQ ID NO: 1372955 - DNA, 25 bp, Homo sapien
gggtccaagggctcgagcatcgcaa

SEQ ID NO: 1372956 - DNA, 25 bp, Homo sapien
agcggagccggaggcagcaagcaaa

SEQ ID NO: 1372957 - DNA, 25 bp, Homo sapien
ggggagcggagccggaggcagcaag

SEQ ID NO: 1372958 - DNA, 25 bp, Homo sapien
gaggcagcaagcaaaggaaacgcac

SEQ ID NO: 1372959 - DNA, 25 bp, Homo sapien
ggaggcagcaagcaaaggaaacgca

SEQ ID NO: 1372960 - DNA, 25 bp, Homo sapien
ggcgcgcggggccacgaaagaccga

SEQ ID NO: 1372961 - DNA, 25 bp, Homo sapien
gcgcgcggggccacgaaagaccgac

SEQ ID NO: 1372962 - DNA, 25 bp, Homo sapien
tcgcagccgccagccgtagggagct

SEQ ID NO: 1372963 - DNA, 25 bp, Homo sapien
gcgacgttccgcattccatcgggtt

SEQ ID NO: 1372964 - DNA, 25 bp, Homo sapien
gtgtgctttcgttttctcaaggcca

SEQ ID NO: 1372965 - DNA, 25 bp, Homo sapien
ccctactgggcttgtgcggcgcagt

SEQ ID NO: 1372966 - DNA, 25 bp, Homo sapien
tgaatttcggccactttgatggtcc

SEQ ID NO: 1372967 - DNA, 25 bp, Homo sapien
taaaaacgcctttgataacgtctca

SEQ ID NO: 1372968 - DNA, 25 bp, Homo sapien
aacgtctcacagttacatatttcta

SEQ ID NO: 1372969 - DNA, 25 bp, Homo sapien
gttatgtttgatgtagccccagatg

SEQ ID NO: 1372970 - DNA, 25 bp, Homo sapien
gtactgggtttccatgaggagtttc

SEQ ID NO: 1372971 - DNA, 25 bp, Homo sapien
tcatttttcatgtactgggtttcca

SEQ ID NO: 1372972 - DNA, 25 bp, Homo sapien
cagccagaccagtttcactttttca

SEQ ID NO: 1372973 - DNA, 25 bp, Homo sapien
tcatgtactgggtttccatgaggag

SEQ ID NO: 1372974 - DNA, 25 bp, Homo sapien
ttcttgatggaattgaccggatgtt

SEQ ID NO: 1372975 - DNA, 25 bp, Homo sapien
acttttggtataacattgctgggcc

SEQ ID NO: 1372976 - DNA, 25 bp, Homo sapien
gctgggccaaaaggtctcctgagaa

SEQ ID NO: 1372977 - DNA, 25 bp, Homo sapien
gaattgaccggatgtttctccttca

SEQ ID NO: 1372978 - DNA, 25 bp, Homo sapien
tagtctcctagattgagggagaggt

SEQ ID NO: 1372979 - DNA, 25 bp, Homo sapien
ctgtttggggacaatcctgcttgtt

SEQ ID NO: 1372980 - DNA, 25 bp, Homo sapien
gcttgtttgtcacagcgctgggcct

SEQ ID NO: 1372981 - DNA, 25 bp, Homo sapien
cttccttagtctcctagattgaggg

SEQ ID NO: 1372982 - DNA, 25 bp, Homo sapien
tgaggttagatgctccgggctgcca

SEQ ID NO: 1372983 - DNA, 25 bp, Homo sapien
gctgatgggttgaccaccagtggta

SEQ ID NO: 1372984 - DNA, 25 bp, Homo sapien
cagtggtagatggtgcatcgctgcc

SEQ ID NO: 1372985 - DNA, 25 bp, Homo sapien
tgggtggactcccactgtaaccagc

SEQ ID NO: 1372986 - DNA, 25 bp, Homo sapien
catagttgctagatctgtgcagggc

SEQ ID NO: 1372987 - DNA, 25 bp, Homo sapien
tcagcagggctactttctaagaact

SEQ ID NO: 1372988 - DNA, 25 bp, Homo sapien
tctatcccccttaaggtcagcaggg

SEQ ID NO: 1372989 - DNA, 25 bp, Homo sapien
tctcaggctccgttgatgaccagca

SEQ ID NO: 1372990 - DNA, 25 bp, Homo sapien
ttcatcctcatagggatctcccctc

SEQ ID NO: 1372991 - DNA, 25 bp, Homo sapien
ttcttcatcctcatagggatctccc

SEQ ID NO: 1372992 - DNA, 25 bp, Homo sapien
gctgctcttccggaccttcttcatc

SEQ ID NO: 1372993 - DNA, 25 bp, Homo sapien
catcctcatagggatctcccctccc

SEQ ID NO: 1372994 - DNA, 25 bp, Homo sapien
gctgcaggcgggtttatgtctttcc

SEQ ID NO: 1372995 - DNA, 25 bp, Homo sapien
catgcccctggatggctcaatgtgt

SEQ ID NO: 1372996 - DNA, 25 bp, Homo sapien
gacaggcgggtattcaaggcattct

SEQ ID NO: 1372997 - DNA, 25 bp, Homo sapien
gcattcacgtaagtaagttcaaggg

SEQ ID NO: 1372998 - DNA, 25 bp, Homo sapien
tcaggtgaagcctctgcggaggtag

SEQ ID NO: 1372999 - DNA, 25 bp, Homo sapien
aagcctctgcggaggtaggtgctct

SEQ ID NO: 1373000 - DNA, 25 bp, Homo sapien
ggtgaagcctctgcggaggtaggtg

SEQ ID NO: 1373001 - DNA, 25 bp, Homo sapien
gaagcctctgcggaggtaggtgctc

SEQ ID NO: 1373002 - DNA, 25 bp, Homo sapien
tgtgaaggggctcttcacatcagag

SEQ ID NO: 1373003 - DNA, 25 bp, Homo sapien
agtgtgaaggggctcttcacatcag

SEQ ID NO: 1373004 - DNA, 25 bp, Homo sapien
tgaaggggctcttcacatcagagga

SEQ ID NO: 1373005 - DNA, 25 bp, Homo sapien
atgtagtgtgaaggggctcttcaca

SEQ ID NO: 1373006 - DNA, 25 bp, Homo sapien
tcagcctcggtttgacgtcaggctc

SEQ ID NO: 1373007 - DNA, 25 bp, Homo sapien
tttgacgtcaggctctcacggtccc

SEQ ID NO: 1373008 - DNA, 25 bp, Homo sapien
aaaggatgggctttgtacatttcca

SEQ ID NO: 1373009 - DNA, 25 bp, Homo sapien
tacatttccaggccgcagaccggag

SEQ ID NO: 1373010 - DNA, 25 bp, Homo sapien
aataccctgcattcagggtcctgaa

SEQ ID NO: 1373011 - DNA, 25 bp, Homo sapien
gctgctgcgtgtgccccttaaatac

SEQ ID NO: 1373012 - DNA, 25 bp, Homo sapien
tcagctctggcactcacggcagcca

SEQ ID NO: 1373013 - DNA, 25 bp, Homo sapien
gccccttaaataccctgcattcagg

SEQ ID NO: 1373014 - DNA, 25 bp, Homo sapien
tggcctctcgcttcacccccctgcc

SEQ ID NO: 1373015 - DNA, 25 bp, Homo sapien
tgactggcctctcgcttcacccccc

SEQ ID NO: 1373016 - DNA, 25 bp, Homo sapien
actggcctctcgcttcacccccctg

SEQ ID NO: 1373017 - DNA, 25 bp, Homo sapien
ctgactggcctctcgcttcaccccc

SEQ ID NO: 1373018 - DNA, 25 bp, Homo sapien
gtgatgcatcatctttcgcaaaaag

SEQ ID NO: 1373019 - DNA, 25 bp, Homo sapien
gtataatgtccaaagactatgcatg

SEQ ID NO: 1373020 - DNA, 25 bp, Homo sapien
tacagcgactcgatgaaaatatctc

SEQ ID NO: 1373021 - DNA, 25 bp, Homo sapien
ctctgctcagtgctgagaacttggt

SEQ ID NO: 1373022 - DNA, 25 bp, Homo sapien
ctccccttgccaggagtcatccttt

SEQ ID NO: 1373023 - DNA, 25 bp, Homo sapien
tccccttgccaggagtcatcctttg

SEQ ID NO: 1373024 - DNA, 25 bp, Homo sapien
ccgcagacgaggtaggcatcaaagt

SEQ ID NO: 1373025 - DNA, 25 bp, Homo sapien
actggctgaggtatttatagaagca

SEQ ID NO: 1373026 - DNA, 25 bp, Homo sapien
atggaaatgggtctatatttgactc

SEQ ID NO: 1373027 - DNA, 25 bp, Homo sapien
tgagaaccccggaaaactggctgag

SEQ ID NO: 1373028 - DNA, 25 bp, Homo sapien
ctgtgaagagttgtccagttgtccc

SEQ ID NO: 1373029 - DNA, 25 bp, Homo sapien
ctctacttgcgtgtgcctcttggtc

SEQ ID NO: 1373030 - DNA, 25 bp, Homo sapien
ctacttgcgtgtgcctcttggtcct

SEQ ID NO: 1373031 - DNA, 25 bp, Homo sapien
cctcttggtcctgtgaagagttgtc

SEQ ID NO: 1373032 - DNA, 25 bp, Homo sapien
cttggctgactgtaaaacctttcct

SEQ ID NO: 1373033 - DNA, 25 bp, Homo sapien
tgacatcttccaagttgtccttggc

SEQ ID NO: 1373034 - DNA, 25 bp, Homo sapien
tacctgacggacagtagatttcccc

SEQ ID NO: 1373035 - DNA, 25 bp, Homo sapien
atatgacttgctggacttgaaaccc

SEQ ID NO: 1373036 - DNA, 25 bp, Homo sapien
gtgagtcaagcctgcgtcacggcgc

SEQ ID NO: 1373037 - DNA, 25 bp, Homo sapien
gtcggccatcagagcctcgctcgct

SEQ ID NO: 1373038 - DNA, 25 bp, Homo sapien
ctttcggaaagcgagggaacagtgc

SEQ ID NO: 1373039 - DNA, 25 bp, Homo sapien
ctgcccgagagcctcgcattgacgc

SEQ ID NO: 1373040 - DNA, 25 bp, Homo sapien
gaggaccaaggtgtgaggcggcgct

SEQ ID NO: 1373041 - DNA, 25 bp, Homo sapien
gaccaaggtgtgaggcggcgctgcc

SEQ ID NO: 1373042 - DNA, 25 bp, Homo sapien
ccaaggtgtgaggcggcgctgcccc

SEQ ID NO: 1373043 - DNA, 25 bp, Homo sapien
aggaccaaggtgtgaggcggcgctg

SEQ ID NO: 1373044 - DNA, 25 bp, Homo sapien
cagccgccgttgcctggcgacggag

SEQ ID NO: 1373045 - DNA, 25 bp, Homo sapien
ccgccgttgcctggcgacggagccc

SEQ ID NO: 1373046 - DNA, 25 bp, Homo sapien
gccgccgttgcctggcgacggagcc

SEQ ID NO: 1373047 - DNA, 25 bp, Homo sapien
agccgccgttgcctggcgacggagc

SEQ ID NO: 1373048 - DNA, 25 bp, Homo sapien
catctgcctgctagtaatttgggac

SEQ ID NO: 1373049 - DNA, 25 bp, Homo sapien
gatgttctgtactgcgcaacctggg

SEQ ID NO: 1373050 - DNA, 25 bp, Homo sapien
gtattcattgaggacatgggtctcc

SEQ ID NO: 1373051 - DNA, 25 bp, Homo sapien
tcactcgatagggtggttccagaat

SEQ ID NO: 1373052 - DNA, 25 bp, Homo sapien
cttgcagcttcatcatccgacgtgt

SEQ ID NO: 1373053 - DNA, 25 bp, Homo sapien
catcatccgacgtgttgctcgtgaa

SEQ ID NO: 1373054 - DNA, 25 bp, Homo sapien
gttgctcgtgaaagccacttcacaa

SEQ ID NO: 1373055 - DNA, 25 bp, Homo sapien
tccgacgtgttgctcgtgaaagcca

SEQ ID NO: 1373056 - DNA, 25 bp, Homo sapien
gcagaagtcctcagataatgtcagt

SEQ ID NO: 1373057 - DNA, 25 bp, Homo sapien
aaactgtcgctgaaggatggagaac

SEQ ID NO: 1373058 - DNA, 25 bp, Homo sapien
gcctggtcaaccagtccagctaggg

SEQ ID NO: 1373059 - DNA, 25 bp, Homo sapien
gaatggagatgccatcggcactggt

SEQ ID NO: 1373060 - DNA, 25 bp, Homo sapien
agcaaagtgacccagcgtgagcaca

SEQ ID NO: 1373061 - DNA, 25 bp, Homo sapien
tcgaggagcctgtggactataagca

SEQ ID NO: 1373062 - DNA, 25 bp, Homo sapien
tcggcaacatctggaggttccccta

SEQ ID NO: 1373063 - DNA, 25 bp, Homo sapien
ggccggcctggaacagtaagctgca

SEQ ID NO: 1373064 - DNA, 25 bp, Homo sapien
aagtcaactagcaagagctcttgtg

SEQ ID NO: 1373065 - DNA, 25 bp, Homo sapien
gaaagtcaactagcaagagctcttg

SEQ ID NO: 1373066 - DNA, 25 bp, Homo sapien
tgggaaagtcaactagcaagagctc

SEQ ID NO: 1373067 - DNA, 25 bp, Homo sapien
tcaactagcaagagctcttgtgctc

SEQ ID NO: 1373068 - DNA, 25 bp, Homo sapien
taaactgagagtcgaccacgttgcc

SEQ ID NO: 1373069 - DNA, 25 bp, Homo sapien
gagacgaggtcaccgagtttccagg

SEQ ID NO: 1373070 - DNA, 25 bp, Homo sapien
ttccaggccagagtcctacgtcagg

SEQ ID NO: 1373071 - DNA, 25 bp, Homo sapien
tccagctgcatagtgagtcaagggc

SEQ ID NO: 1373072 - DNA, 25 bp, Homo sapien
catcagaggtttacacgtgaccaac

SEQ ID NO: 1373073 - DNA, 25 bp, Homo sapien
tggtgagactatagcccatgggcac

SEQ ID NO: 1373074 - DNA, 25 bp, Homo sapien
cacatttcacaaagggtgcagcaga

SEQ ID NO: 1373075 - DNA, 25 bp, Homo sapien
ctgatcagtagcaaccagcagggac

SEQ ID NO: 1373076 - DNA, 25 bp, Homo sapien
gatcaaggcacccagcttcagtatc

SEQ ID NO: 1373077 - DNA, 25 bp, Homo sapien
ccagcttcagtatctagtgaggact

SEQ ID NO: 1373078 - DNA, 25 bp, Homo sapien
acccagcttcagtatctagtgagga

SEQ ID NO: 1373079 - DNA, 25 bp, Homo sapien
agcttcagtatctagtgaggactct

SEQ ID NO: 1373080 - DNA, 25 bp, Homo sapien
taagcattctgtactgaaggtgcca

SEQ ID NO: 1373081 - DNA, 25 bp, Homo sapien
cagatgctttcctgggccctatcaa

SEQ ID NO: 1373082 - DNA, 25 bp, Homo sapien
ttagcactgggcatctgtggtcatc

SEQ ID NO: 1373083 - DNA, 25 bp, Homo sapien
aaaggtcaagttcaccctcagatgc

SEQ ID NO: 1373084 - DNA, 25 bp, Homo sapien
tcatcctgatgaacggaaagcaggg

SEQ ID NO: 1373085 - DNA, 25 bp, Homo sapien
gatgtatttccagtacccggaactg

SEQ ID NO: 1373086 - DNA, 25 bp, Homo sapien
tttgccaggacacggaccagatagg

SEQ ID NO: 1373087 - DNA, 25 bp, Homo sapien
aacatcagtttcgaggagcagggac

SEQ ID NO: 1373088 - DNA, 25 bp, Homo sapien
aaaacatttcgcgatgaacacagcc

SEQ ID NO: 1373089 - DNA, 25 bp, Homo sapien
ggtttccttccatccggcacaagaa

SEQ ID NO: 1373090 - DNA, 25 bp, Homo sapien
tggccttccgtcagccgcagtgaaa

SEQ ID NO: 1373091 - DNA, 25 bp, Homo sapien
tcttgggctacgttgggcctccgag

SEQ ID NO: 1373092 - DNA, 25 bp, Homo sapien
cgctcttcgaagaggagctcacctt

SEQ ID NO: 1373093 - DNA, 25 bp, Homo sapien
tgatcagctcggtgtgtgtctcctc

SEQ ID NO: 1373094 - DNA, 25 bp, Homo sapien
caagcctccgtccaaaacatgtctg

SEQ ID NO: 1373095 - DNA, 25 bp, Homo sapien
gcgaggcgtcggagaagatcatcat

SEQ ID NO: 1373096 - DNA, 25 bp, Homo sapien
tagggtcactgcttcactagccgca

SEQ ID NO: 1373097 - DNA, 25 bp, Homo sapien
catcctcgttgtggggggacttcca

SEQ ID NO: 1373098 - DNA, 25 bp, Homo sapien
ccccatctatgtccttgacttaggg

SEQ ID NO: 1373099 - DNA, 25 bp, Homo sapien
acctggtgaagtctattgaaggcca

SEQ ID NO: 1373100 - DNA, 25 bp, Homo sapien
ggtccccagtgaccgtttcaggctg

SEQ ID NO: 1373101 - DNA, 25 bp, Homo sapien
gggtactagatgccagagtggtcct

SEQ ID NO: 1373102 - DNA, 25 bp, Homo sapien
ggccaaagtggctgttttttctgta

SEQ ID NO: 1373103 - DNA, 25 bp, Homo sapien
tttttctgtagatcgatgtggaacc

SEQ ID NO: 1373104 - DNA, 25 bp, Homo sapien
agcatcatgctaaagagccgctggg

SEQ ID NO: 1373105 - DNA, 25 bp, Homo sapien
tggtacccacacaagaggtagcacg

SEQ ID NO: 1373106 - DNA, 25 bp, Homo sapien
cctagaagagcagtggttagcaagc

SEQ ID NO: 1373107 - DNA, 25 bp, Homo sapien
gctacagctgcaagtcaaagaggtc

SEQ ID NO: 1373108 - DNA, 25 bp, Homo sapien
actctgggcttctccgatgtaaagg

SEQ ID NO: 1373109 - DNA, 25 bp, Homo sapien
gagaaaaatcaaagccagctcttat

SEQ ID NO: 1373110 - DNA, 25 bp, Homo sapien
gaggtagtggccagcatcgtaggga

SEQ ID NO: 1373111 - DNA, 25 bp, Homo sapien
gcttctccgatgtaaagggtgagaa

SEQ ID NO: 1373112 - DNA, 25 bp, Homo sapien
tagaagtgtgctatcaacagatggc

SEQ ID NO: 1373113 - DNA, 25 bp, Homo sapien
tcaaaggccatagattagacccacc

SEQ ID NO: 1373114 - DNA, 25 bp, Homo sapien
tgtagccctggccaattagatcaca

SEQ ID NO: 1373115 - DNA, 25 bp, Homo sapien
gtttcgccccttagccagtgatatg

SEQ ID NO: 1373116 - DNA, 25 bp, Homo sapien
tgttcggcttgatggcagagactca

SEQ ID NO: 1373117 - DNA, 25 bp, Homo sapien
ggatccctatcagccacatgtctgg

SEQ ID NO: 1373118 - DNA, 25 bp, Homo sapien
tcaggatcctgaactatttgggtgg

SEQ ID NO: 1373119 - DNA, 25 bp, Homo sapien
ggtcgaaagtttaaactgccagcca

SEQ ID NO: 1373120 - DNA, 25 bp, Homo sapien
gagtccacttagaggacttcaagct

SEQ ID NO: 1373121 - DNA, 25 bp, Homo sapien
taactcgaatggtcctcacagcaac

SEQ ID NO: 1373122 - DNA, 25 bp, Homo sapien
cagcaaccctatgagaggagcaggg

SEQ ID NO: 1373123 - DNA, 25 bp, Homo sapien
tccacaggccacgaacgttgttatg

SEQ ID NO: 1373124 - DNA, 25 bp, Homo sapien
cacagagccatgagaagggagcctt

SEQ ID NO: 1373125 - DNA, 25 bp, Homo sapien
ttgttgacggtgttatcagactggc

SEQ ID NO: 1373126 - DNA, 25 bp, Homo sapien
cagagccatgagaagggagccttcc

SEQ ID NO: 1373127 - DNA, 25 bp, Homo sapien
aagggagccttccttgttgacggtg

SEQ ID NO: 1373128 - DNA, 25 bp, Homo sapien
taaaagtccagaggcgacggaggcc

SEQ ID NO: 1373129 - DNA, 25 bp, Homo sapien
tcacagtggttgtagtggaagaaag

SEQ ID NO: 1373130 - DNA, 25 bp, Homo sapien
cccggtcacagtggttgtagtggaa

SEQ ID NO: 1373131 - DNA, 25 bp, Homo sapien
ataaaagtccagaggcgacggaggc

SEQ ID NO: 1373132 - DNA, 25 bp, Homo sapien
tatgtgatgcttattgtatactgcc

SEQ ID NO: 1373133 - DNA, 25 bp, Homo sapien
gggtgctatagcaattatgtgatgc

SEQ ID NO: 1373134 - DNA, 25 bp, Homo sapien
tgtatactgccttagacttctggct

SEQ ID NO: 1373135 - DNA, 25 bp, Homo sapien
aagaacagactctgggtgctatagc

SEQ ID NO: 1373136 - DNA, 25 bp, Homo sapien
tgagcatctgtggtgagactccgcg

SEQ ID NO: 1373137 - DNA, 25 bp, Homo sapien
tgtctttcccgcctgtcaagccttg

SEQ ID NO: 1373138 - DNA, 25 bp, Homo sapien
catttgtcgtgatgaggacgtcctg

SEQ ID NO: 1373139 - DNA, 25 bp, Homo sapien
ctgataataagcatttgtcgtgatg

SEQ ID NO: 1373140 - DNA, 25 bp, Homo sapien
ctcattggtgacagcatgacctctg

SEQ ID NO: 1373141 - DNA, 25 bp, Homo sapien
ctgtggttctagaatggctgcctgc

SEQ ID NO: 1373142 - DNA, 25 bp, Homo sapien
ggtgacagcatgacctctggtgtct

SEQ ID NO: 1373143 - DNA, 25 bp, Homo sapien
tgtttcatgacctgtttgcatctgt

SEQ ID NO: 1373144 - DNA, 25 bp, Homo sapien
tcttcctaggctagaagcctcggaa

SEQ ID NO: 1373145 - DNA, 25 bp, Homo sapien
aagacaggcggatggcttaaggtcg

SEQ ID NO: 1373146 - DNA, 25 bp, Homo sapien
tattgatgctatactagtaacttct

SEQ ID NO: 1373147 - DNA, 25 bp, Homo sapien
aaagatctcgtttatagtgttcagg

SEQ ID NO: 1373148 - DNA, 25 bp, Homo sapien
ctgtcctcaccccttgttgaagtca

SEQ ID NO: 1373149 - DNA, 25 bp, Homo sapien
cttgttgaagtcatgccgccctcag

SEQ ID NO: 1373150 - DNA, 25 bp, Homo sapien
cccttggtcatgagcagttcctgat

SEQ ID NO: 1373151 - DNA, 25 bp, Homo sapien
gaaaaacactgacgtccaactggct

SEQ ID NO: 1373152 - DNA, 25 bp, Homo sapien
cagtaccaagttatggtcagcagat

SEQ ID NO: 1373153 - DNA, 25 bp, Homo sapien
tccagtaccaagttatggtcagcag

SEQ ID NO: 1373154 - DNA, 25 bp, Homo sapien
taccaagttatggtcagcagatccc

SEQ ID NO: 1373155 - DNA, 25 bp, Homo sapien
cccctccagtaccaagttatggtca

SEQ ID NO: 1373156 - DNA, 25 bp, Homo sapien
tcagctcttcagtagatttagaccc

SEQ ID NO: 1373157 - DNA, 25 bp, Homo sapien
ggctgaatggaaccctcttgaaaga

SEQ ID NO: 1373158 - DNA, 25 bp, Homo sapien
cattggaggagtctattgatgtgga

SEQ ID NO: 1373159 - DNA, 25 bp, Homo sapien
gcggtggcctcaattcagaggtaca

SEQ ID NO: 1373160 - DNA, 25 bp, Homo sapien
tccagcaaatcgtggaactatgtgc

SEQ ID NO: 1373161 - DNA, 25 bp, Homo sapien
gtggaactatgtgctcctggtcaca

SEQ ID NO: 1373162 - DNA, 25 bp, Homo sapien
gggctgtggatttgaactgtgttgc

SEQ ID NO: 1373163 - DNA, 25 bp, Homo sapien
ggccctctccagcaaatcgtggaac

SEQ ID NO: 1373164 - DNA, 25 bp, Homo sapien
ccccaggggtggggaagctcttcat

SEQ ID NO: 1373165 - DNA, 25 bp, Homo sapien
tccccaggggtggggaagctcttca

SEQ ID NO: 1373166 - DNA, 25 bp, Homo sapien
ctccacccaccaggcttggattcat

SEQ ID NO: 1373167 - DNA, 25 bp, Homo sapien
cactccacccaccaggcttggattc

SEQ ID NO: 1373168 - DNA, 25 bp, Homo sapien
actccacccaccaggcttggattca

SEQ ID NO: 1373169 - DNA, 25 bp, Homo sapien
taaatccctaagagactgatgaacc

SEQ ID NO: 1373170 - DNA, 25 bp, Homo sapien
tcttcgaagggttgctgtggaccag

SEQ ID NO: 1373171 - DNA, 25 bp, Homo sapien
gacattggatttataagcatgctcg

SEQ ID NO: 1373172 - DNA, 25 bp, Homo sapien
ctgatgaacctgagtccagtaaaaa

SEQ ID NO: 1373173 - DNA, 25 bp, Homo sapien
gggatccattacactaaaaaggcaa

SEQ ID NO: 1373174 - DNA, 25 bp, Homo sapien
cctctgctctaagaatcacagcagg

SEQ ID NO: 1373175 - DNA, 25 bp, Homo sapien
tctggaaagccccagaagtcacatg

SEQ ID NO: 1373176 - DNA, 25 bp, Homo sapien
gagaagggctcaccaagttgctgag

SEQ ID NO: 1373177 - DNA, 25 bp, Homo sapien
gactggcagctagaggtctgcttca

SEQ ID NO: 1373178 - DNA, 25 bp, Homo sapien
actggcagctagaggtctgcttcaa

SEQ ID NO: 1373179 - DNA, 25 bp, Homo sapien
tgactggcagctagaggtctgcttc

SEQ ID NO: 1373180 - DNA, 25 bp, Homo sapien
tgggatggaccaatagccctgtgct

SEQ ID NO: 1373181 - DNA, 25 bp, Homo sapien
catggtcctatagggctcctggcaa

SEQ ID NO: 1373182 - DNA, 25 bp, Homo sapien
gatcaaatggcgcatgggcacgaaa

SEQ ID NO: 1373183 - DNA, 25 bp, Homo sapien
tagggtaagactaacctcgcgctgt

SEQ ID NO: 1373184 - DNA, 25 bp, Homo sapien
tgtatttaatcaatgaaggtgtttc

SEQ ID NO: 1373185 - DNA, 25 bp, Homo sapien
cacattcatcttctctcggtattta

SEQ ID NO: 1373186 - DNA, 25 bp, Homo sapien
ctcggtatttactcagatgggaaaa

SEQ ID NO: 1373187 - DNA, 25 bp, Homo sapien
gacagctaatctccaagagcctcac

SEQ ID NO: 1373188 - DNA, 25 bp, Homo sapien
tcctgtgcgaaaagtcagaggcgag

SEQ ID NO: 1373189 - DNA, 25 bp, Homo sapien
cacatcggggaattgtactattcga

SEQ ID NO: 1373190 - DNA, 25 bp, Homo sapien
cctgtgcgaaaagtcagaggcgagt

SEQ ID NO: 1373191 - DNA, 25 bp, Homo sapien
ttgtactattcgaccagctctctcc

SEQ ID NO: 1373192 - DNA, 25 bp, Homo sapien
tctgggtgtcagcttataggcctgg

SEQ ID NO: 1373193 - DNA, 25 bp, Homo sapien
gacagtctctaggttgtaagctgcc

SEQ ID NO: 1373194 - DNA, 25 bp, Homo sapien
tattgagctgtaaaggaaacactcc

SEQ ID NO: 1373195 - DNA, 25 bp, Homo sapien
acaccattgcctcactgtgcaggga

SEQ ID NO: 1373196 - DNA, 25 bp, Homo sapien
ttgatgcttagggtcgtctgacctt

SEQ ID NO: 1373197 - DNA, 25 bp, Homo sapien
gcttagggtcgtctgaccttggctg

SEQ ID NO: 1373198 - DNA, 25 bp, Homo sapien
ggtcgtctgaccttggctggccaat

SEQ ID NO: 1373199 - DNA, 25 bp, Homo sapien
tagggtcgtctgaccttggctggcc

SEQ ID NO: 1373200 - DNA, 25 bp, Homo sapien
tgtgcctaaagttctctcagggacc

SEQ ID NO: 1373201 - DNA, 25 bp, Homo sapien
tgttttgggaccagccaaccttgta

SEQ ID NO: 1373202 - DNA, 25 bp, Homo sapien
ggattcagtgtaggttctgcccctc

SEQ ID NO: 1373203 - DNA, 25 bp, Homo sapien
gaggataaaaatcagccgtgcccca

SEQ ID NO: 1373204 - DNA, 25 bp, Homo sapien
cacagccaccttagtttgtaatgtc

SEQ ID NO: 1373205 - DNA, 25 bp, Homo sapien
ccacagccaccttagtttgtaatgt

SEQ ID NO: 1373206 - DNA, 25 bp, Homo sapien
cagccaccttagtttgtaatgtcat

SEQ ID NO: 1373207 - DNA, 25 bp, Homo sapien
acagccaccttagtttgtaatgtca

SEQ ID NO: 1373208 - DNA, 25 bp, Homo sapien
ctggagggctcagcaatttgctcaa

SEQ ID NO: 1373209 - DNA, 25 bp, Homo sapien
caccaagcggaagtggaggcatcaa

SEQ ID NO: 1373210 - DNA, 25 bp, Homo sapien
catgagtcaccaaaaagtcctggag

SEQ ID NO: 1373211 - DNA, 25 bp, Homo sapien
tcaaggtcatctggttaagagagcc

SEQ ID NO: 1373212 - DNA, 25 bp, Homo sapien
ccactgtgactgtgtgacgcctggg

SEQ ID NO: 1373213 - DNA, 25 bp, Homo sapien
gatgtgctaggccatggtcctctct

SEQ ID NO: 1373214 - DNA, 25 bp, Homo sapien
tgaatcccaaagaacgagggcccag

SEQ ID NO: 1373215 - DNA, 25 bp, Homo sapien
tccagaggaggatactaaggcccaa

SEQ ID NO: 1373216 - DNA, 25 bp, Homo sapien
cttttcagcaagtgaccttgggcca

SEQ ID NO: 1373217 - DNA, 25 bp, Homo sapien
taaaatggaggtgccaccagcaccg

SEQ ID NO: 1373218 - DNA, 25 bp, Homo sapien
taaccagtgcaattcagctcaagaa

SEQ ID NO: 1373219 - DNA, 25 bp, Homo sapien
caaaatccaggacactaaccagtgc

SEQ ID NO: 1373220 - DNA, 25 bp, Homo sapien
caagacctccctggccaacatggat

SEQ ID NO: 1373221 - DNA, 25 bp, Homo sapien
gacctccctggccaacatggatggt

SEQ ID NO: 1373222 - DNA, 25 bp, Homo sapien
tgaaactccgtctctactaaaaata

SEQ ID NO: 1373223 - DNA, 25 bp, Homo sapien
aaaaaattagccagtcgtggtggcg

SEQ ID NO: 1373224 - DNA, 25 bp, Homo sapien
tcatggtattaggttctggggatgc

SEQ ID NO: 1373225 - DNA, 25 bp, Homo sapien
catggtattaggttctggggatgct

SEQ ID NO: 1373226 - DNA, 25 bp, Homo sapien
atggtattaggttctggggatgctg

SEQ ID NO: 1373227 - DNA, 25 bp, Homo sapien
ccagcttgcgtgacagagcaattcc

SEQ ID NO: 1373228 - DNA, 25 bp, Homo sapien
ctccagcttgcgtgacagagcaatt

SEQ ID NO: 1373229 - DNA, 25 bp, Homo sapien
tccagcttgcgtgacagagcaattc

SEQ ID NO: 1373230 - DNA, 25 bp, Homo sapien
tcagaagtttcgaactccaagggcc

SEQ ID NO: 1373231 - DNA, 25 bp, Homo sapien
taatcaagagatagaaggcctccag

SEQ ID NO: 1373232 - DNA, 25 bp, Homo sapien
tgtacggcgaacgactgaaggagcc

SEQ ID NO: 1373233 - DNA, 25 bp, Homo sapien
gtaaaatggtgtccgctaggcgtcc

SEQ ID NO: 1373234 - DNA, 25 bp, Homo sapien
tgatggcccgacctcccaaatagtg

SEQ ID NO: 1373235 - DNA, 25 bp, Homo sapien
tgagcaagaagtaccgttacagggc

SEQ ID NO: 1373236 - DNA, 25 bp, Homo sapien
gatatcgctgtgagcctgcctctct

SEQ ID NO: 1373237 - DNA, 25 bp, Homo sapien
aagccaatgaaagggataaggaggt

SEQ ID NO: 1373238 - DNA, 25 bp, Homo sapien
tatagtttgggtccatataggaacc

SEQ ID NO: 1373239 - DNA, 25 bp, Homo sapien
tagttggtcattacctacagagtgc

SEQ ID NO: 1373240 - DNA, 25 bp, Homo sapien
taggtccagtaataagagtcaggtg

SEQ ID NO: 1373241 - DNA, 25 bp, Homo sapien
cttaaaatgtccatcgcctggctgg

SEQ ID NO: 1373242 - DNA, 25 bp, Homo sapien
tctgctattgtgatgccaatgccgg

SEQ ID NO: 1373243 - DNA, 25 bp, Homo sapien
gcaaaactggttgaacagcggatga

SEQ ID NO: 1373244 - DNA, 25 bp, Homo sapien
tggaattcaaagctctaatggacct

SEQ ID NO: 1373245 - DNA, 25 bp, Homo sapien
cttatgtggagtttacatgggcctc

SEQ ID NO: 1373246 - DNA, 25 bp, Homo sapien
tatggctcacacagcttaagagtag

SEQ ID NO: 1373247 - DNA, 25 bp, Homo sapien
cctggaagtgaattgacggcaaacc

SEQ ID NO: 1373248 - DNA, 25 bp, Homo sapien
gagtagctgtctctcaaacgtgcgc

SEQ ID NO: 1373249 - DNA, 25 bp, Homo sapien
gcagggagaccatcaatttcatttt

SEQ ID NO: 1373250 - DNA, 25 bp, Homo sapien
gcttcttaccagagttatgcagtga

SEQ ID NO: 1373251 - DNA, 25 bp, Homo sapien
tcctgacacatttgaggagctcctc

SEQ ID NO: 1373252 - DNA, 25 bp, Homo sapien
gagctagcgtttgtaattagaaccg

SEQ ID NO: 1373253 - DNA, 25 bp, Homo sapien
gaatggatgaagagttcctgagagc

SEQ ID NO: 1373254 - DNA, 25 bp, Homo sapien
ccttggatgtgcatgcaccgtgacg

SEQ ID NO: 1373255 - DNA, 25 bp, Homo sapien
tatttgacctttggttccacatgcc

SEQ ID NO: 1373256 - DNA, 25 bp, Homo sapien
cagtcacttcggttggtagtacaga

SEQ ID NO: 1373257 - DNA, 25 bp, Homo sapien
caccgtgacggtttcataggtacga

SEQ ID NO: 1373258 - DNA, 25 bp, Homo sapien
gcacggtgacaacgctggagttcaa

SEQ ID NO: 1373259 - DNA, 25 bp, Homo sapien
gcagcaggagacttcagtgcacggt

SEQ ID NO: 1373260 - DNA, 25 bp, Homo sapien
taactagttgcagacgaagaccacc

SEQ ID NO: 1373261 - DNA, 25 bp, Homo sapien
taacctcggatggaagagccctagt

SEQ ID NO: 1373262 - DNA, 25 bp, Homo sapien
aaacagctggttatgagatgatggc

SEQ ID NO: 1373263 - DNA, 25 bp, Homo sapien
tgctaggcagcttatgtacccatac

SEQ ID NO: 1373264 - DNA, 25 bp, Homo sapien
cacaagatagagctccttggattgt

SEQ ID NO: 1373265 - DNA, 25 bp, Homo sapien
tatctagtaactacaatagctgatc

SEQ ID NO: 1373266 - DNA, 25 bp, Homo sapien
agttctaattggcagacttctggca

SEQ ID NO: 1373267 - DNA, 25 bp, Homo sapien
ctggcacttgtcctcctgtttctat

SEQ ID NO: 1373268 - DNA, 25 bp, Homo sapien
tggcagacttctggcactggcactt

SEQ ID NO: 1373269 - DNA, 25 bp, Homo sapien
cctgtttctatagaaactgggttgg

SEQ ID NO: 1373270 - DNA, 25 bp, Homo sapien
gatagtgaaaagtgaaatggtgcct

SEQ ID NO: 1373271 - DNA, 25 bp, Homo sapien
cataactgagatttgaaccgagatt

SEQ ID NO: 1373272 - DNA, 25 bp, Homo sapien
tatgctaggccttggagaatacaaa

SEQ ID NO: 1373273 - DNA, 25 bp, Homo sapien
tgatcttgcagactaatggaaagga

SEQ ID NO: 1373274 - DNA, 25 bp, Homo sapien
tcaatggctatgtttcacacttctt

SEQ ID NO: 1373275 - DNA, 25 bp, Homo sapien
taaacttttggagggagcatatacc

SEQ ID NO: 1373276 - DNA, 25 bp, Homo sapien
tccagaattctgatcaatcaatggc

SEQ ID NO: 1373277 - DNA, 25 bp, Homo sapien
cattccagtcactaagtaaggtttt

SEQ ID NO: 1373278 - DNA, 25 bp, Homo sapien
tagatgcgatgtgtttctttcaagc

SEQ ID NO: 1373279 - DNA, 25 bp, Homo sapien
taaaaacttatctggccgcgcccag

SEQ ID NO: 1373280 - DNA, 25 bp, Homo sapien
tagctctcacttgattgcagtcttc

SEQ ID NO: 1373281 - DNA, 25 bp, Homo sapien
tctcagaatgctaaagcaagaagga

SEQ ID NO: 1373282 - DNA, 25 bp, Homo sapien
ctgaagagaggagatagcatatgcc

SEQ ID NO: 1373283 - DNA, 25 bp, Homo sapien
catctttcggccaatggtacaaaaa

SEQ ID NO: 1373284 - DNA, 25 bp, Homo sapien
tagcatatgccagagaagtagaaag

SEQ ID NO: 1373285 - DNA, 25 bp, Homo sapien
tagaaagagccattgtatgtctggg

SEQ ID NO: 1373286 - DNA, 25 bp, Homo sapien
acctccacctcctgggttcaagcag

SEQ ID NO: 1373287 - DNA, 25 bp, Homo sapien
ggcacgatctctgctttgcttactg

SEQ ID NO: 1373288 - DNA, 25 bp, Homo sapien
aggttggagtggtgtagtggcacga

SEQ ID NO: 1373289 - DNA, 25 bp, Homo sapien
cacgatctctgctttgcttactgca

SEQ ID NO: 1373290 - DNA, 25 bp, Homo sapien
ttcctaaagggtctcaaggatctct

SEQ ID NO: 1373291 - DNA, 25 bp, Homo sapien
gggatatacccctgaacaaaataga

SEQ ID NO: 1373292 - DNA, 25 bp, Homo sapien
tcttagatcatgatgcctcactgga

SEQ ID NO: 1373293 - DNA, 25 bp, Homo sapien
cactggatatgtagagtataccctc

SEQ ID NO: 1373294 - DNA, 25 bp, Homo sapien
ctttttcttctggtctgcttgtttc

SEQ ID NO: 1373295 - DNA, 25 bp, Homo sapien
tttttcttctggtctgcttgtttca

SEQ ID NO: 1373296 - DNA, 25 bp, Homo sapien
tctggtctgcttgtttcatctcctc

SEQ ID NO: 1373297 - DNA, 25 bp, Homo sapien
tcttctggtctgcttgtttcatctc

SEQ ID NO: 1373298 - DNA, 25 bp, Homo sapien
aagtgaatagaatgttttataacct

SEQ ID NO: 1373299 - DNA, 25 bp, Homo sapien
aaataagtgaatagaatgttttata

SEQ ID NO: 1373300 - DNA, 25 bp, Homo sapien
aaaataagtgaatagaatgttttat

SEQ ID NO: 1373301 - DNA, 25 bp, Homo sapien
ataagtgaatagaatgttttataac

SEQ ID NO: 1373302 - DNA, 25 bp, Homo sapien
tagtctctgaactcttgtagacatt

SEQ ID NO: 1373303 - DNA, 25 bp, Homo sapien
agtctctgaactcttgtagacattt

SEQ ID NO: 1373304 - DNA, 25 bp, Homo sapien
ctagtctctgaactcttgtagacat

SEQ ID NO: 1373305 - DNA, 25 bp, Homo sapien
gatgctttgtaggtattcatcaatc

SEQ ID NO: 1373306 - DNA, 25 bp, Homo sapien
cagaacatatagaggacagggcttt

SEQ ID NO: 1373307 - DNA, 25 bp, Homo sapien
tctgtaaggctttgtagtttatggg

SEQ ID NO: 1373308 - DNA, 25 bp, Homo sapien
tcatcaatcttaggaaaactgaatc

SEQ ID NO: 1373309 - DNA, 25 bp, Homo sapien
tcttcaacagatggctaatggcaca

SEQ ID NO: 1373310 - DNA, 25 bp, Homo sapien
cacggaggaatgacttagaggaaca

SEQ ID NO: 1373311 - DNA, 25 bp, Homo sapien
tctgtgtgatctacaagagcatggc

SEQ ID NO: 1373312 - DNA, 25 bp, Homo sapien
tgtttaagatactaggagcacgtcc

SEQ ID NO: 1373313 - DNA, 25 bp, Homo sapien
cagacaagtagacatagatccagtg

SEQ ID NO: 1373314 - DNA, 25 bp, Homo sapien
catgttaccattaatcctggatcag

SEQ ID NO: 1373315 - DNA, 25 bp, Homo sapien
tataagaatctgcttaaggcacatc

SEQ ID NO: 1373316 - DNA, 25 bp, Homo sapien
aaagcatcatgggtctttgaggctc

SEQ ID NO: 1373317 - DNA, 25 bp, Homo sapien
tataggtggtccagaaaggacagcc

SEQ ID NO: 1373318 - DNA, 25 bp, Homo sapien
gccatcccagcaaagaaactggcaa

SEQ ID NO: 1373319 - DNA, 25 bp, Homo sapien
acctgtttactgtagaattcctaca

SEQ ID NO: 1373320 - DNA, 25 bp, Homo sapien
ctgtagaattcctacacagatcaac

SEQ ID NO: 1373321 - DNA, 25 bp, Homo sapien
aataatctgactgaccgtctcaagg

SEQ ID NO: 1373322 - DNA, 25 bp, Homo sapien
cagtacaggcagtatcaatgccagg

SEQ ID NO: 1373323 - DNA, 25 bp, Homo sapien
caagcaggttagtgatgccgcagag

SEQ ID NO: 1373324 - DNA, 25 bp, Homo sapien
tgccgcagaggatgaggtaagactt

SEQ ID NO: 1373325 - DNA, 25 bp, Homo sapien
tacagaaacaaggtaagaggcatcc

SEQ ID NO: 1373326 - DNA, 25 bp, Homo sapien
cagaaacaaggtaagaggcatccat

SEQ ID NO: 1373327 - DNA, 25 bp, Homo sapien
gctacagaaacaaggtaagaggcat

SEQ ID NO: 1373328 - DNA, 25 bp, Homo sapien
ctgctacagaaacaaggtaagaggc

SEQ ID NO: 1373329 - DNA, 25 bp, Homo sapien
gatgtcaatccccagtgttttggct

SEQ ID NO: 1373330 - DNA, 25 bp, Homo sapien
tgtcaatccccagtgttttggctct

SEQ ID NO: 1373331 - DNA, 25 bp, Homo sapien
gtcaatccccagtgttttggctctg

SEQ ID NO: 1373332 - DNA, 25 bp, Homo sapien
tcaatccccagtgttttggctctgg

SEQ ID NO: 1373333 - DNA, 25 bp, Homo sapien
catgtgcctctggaccatgtgcaga

SEQ ID NO: 1373334 - DNA, 25 bp, Homo sapien
caaacagttgtttgcagctccacga

SEQ ID NO: 1373335 - DNA, 25 bp, Homo sapien
tcttaagagcatactagaaggcacc

SEQ ID NO: 1373336 - DNA, 25 bp, Homo sapien
taaatttttgctaggtagtccagcc

SEQ ID NO: 1373337 - DNA, 25 bp, Homo sapien
ataaactcttaaggaacatactctt

SEQ ID NO: 1373338 - DNA, 25 bp, Homo sapien
cagaagtatcgcttttactgcaagc

SEQ ID NO: 1373339 - DNA, 25 bp, Homo sapien
catctcctcagacattgagccctat

SEQ ID NO: 1373340 - DNA, 25 bp, Homo sapien
tgtttccagctgcacggaatgccct

SEQ ID NO: 1373341 - DNA, 25 bp, Homo sapien
gctgtagaaagagccaatcgttttt

SEQ ID NO: 1373342 - DNA, 25 bp, Homo sapien
aagagccaatcgttttttgaagtat

SEQ ID NO: 1373343 - DNA, 25 bp, Homo sapien
tatttggtagttaccacagcagcca

SEQ ID NO: 1373344 - DNA, 25 bp, Homo sapien
tcccagaacgggcaatagctgtaga

SEQ ID NO: 1373345 - DNA, 25 bp, Homo sapien
cttggtataagaaagcagaacccaa

SEQ ID NO: 1373346 - DNA, 25 bp, Homo sapien
tggtataagaaagcagaacccaaac

SEQ ID NO: 1373347 - DNA, 25 bp, Homo sapien
ttggtataagaaagcagaacccaaa

SEQ ID NO: 1373348 - DNA, 25 bp, Homo sapien
cgaaagccccaagaatggaggtagt

SEQ ID NO: 1373349 - DNA, 25 bp, Homo sapien
gatcagatatccaccagtaacaacg

SEQ ID NO: 1373350 - DNA, 25 bp, Homo sapien
gcccagctgctgatcagatatccac

SEQ ID NO: 1373351 - DNA, 25 bp, Homo sapien
tccaagtatgtcacaaataatagca

SEQ ID NO: 1373352 - DNA, 25 bp, Homo sapien
gatggatccaatccaaccaatttgc

SEQ ID NO: 1373353 - DNA, 25 bp, Homo sapien
aaccaatttgctctgaggtgccttc

SEQ ID NO: 1373354 - DNA, 25 bp, Homo sapien
ccaatccaaccaatttgctctgagg

SEQ ID NO: 1373355 - DNA, 25 bp, Homo sapien
tccaaccaatttgctctgaggtgcc

SEQ ID NO: 1373356 - DNA, 25 bp, Homo sapien
aatgaatcacaatcatccatcccca

SEQ ID NO: 1373357 - DNA, 25 bp, Homo sapien
ggaccttcccctccctcttcagcat

SEQ ID NO: 1373358 - DNA, 25 bp, Homo sapien
cccatcctccatccagggttttagt

SEQ ID NO: 1373359 - DNA, 25 bp, Homo sapien
catccagggttttagtgtaaggttg

SEQ ID NO: 1373360 - DNA, 25 bp, Homo sapien
gcctcttctattttaaatgcagaag

SEQ ID NO: 1373361 - DNA, 25 bp, Homo sapien
gatgcctcttctattttaaatgcag

SEQ ID NO: 1373362 - DNA, 25 bp, Homo sapien
cctcttctattttaaatgcagaaga

SEQ ID NO: 1373363 - DNA, 25 bp, Homo sapien
cttctattttaaatgcagaagatcc

SEQ ID NO: 1373364 - DNA, 25 bp, Homo sapien
cgatttaggccctcctgctagtgga

SEQ ID NO: 1373365 - DNA, 25 bp, Homo sapien
caaggagggctcagacgatttaggc

SEQ ID NO: 1373366 - DNA, 25 bp, Homo sapien
caagtgagcattgtaagagccaagg

SEQ ID NO: 1373367 - DNA, 25 bp, Homo sapien
tgtggtgttcagcaaagaaatcctc

SEQ ID NO: 1373368 - DNA, 25 bp, Homo sapien
cagaaaagtgcctaatgcacattaa

SEQ ID NO: 1373369 - DNA, 25 bp, Homo sapien
gcattagaaagcaattgactcttaa

SEQ ID NO: 1373370 - DNA, 25 bp, Homo sapien
tcggtccatagagcattagaaagca

SEQ ID NO: 1373371 - DNA, 25 bp, Homo sapien
tactaatatcttgatagtcggtcca

SEQ ID NO: 1373372 - DNA, 25 bp, Homo sapien
taacataggtaggatccagttccta

SEQ ID NO: 1373373 - DNA, 25 bp, Homo sapien
gtaattaacataggtaggatccagt

SEQ ID NO: 1373374 - DNA, 25 bp, Homo sapien
attaacataggtaggatccagttcc

SEQ ID NO: 1373375 - DNA, 25 bp, Homo sapien
aggtaattaacataggtaggatcca

SEQ ID NO: 1373376 - DNA, 25 bp, Homo sapien
tttgtgcactgccaccgtgatgcca

SEQ ID NO: 1373377 - DNA, 25 bp, Homo sapien
cactgccaccgtgatgccatcgtgt

SEQ ID NO: 1373378 - DNA, 25 bp, Homo sapien
ttttgtgcactgccaccgtgatgcc

SEQ ID NO: 1373379 - DNA, 25 bp, Homo sapien
ccaccgtgatgccatcgtgtttctg

SEQ ID NO: 1373380 - DNA, 25 bp, Homo sapien
tgggctagaacagatatcactccag

SEQ ID NO: 1373381 - DNA, 25 bp, Homo sapien
gatatcactccagcatgctcatctg

SEQ ID NO: 1373382 - DNA, 25 bp, Homo sapien
tagaacagatatcactccagcatgc

SEQ ID NO: 1373383 - DNA, 25 bp, Homo sapien
acagatatcactccagcatgctcat

SEQ ID NO: 1373384 - DNA, 25 bp, Homo sapien
gatgccgacgtttgagccttgaagg

SEQ ID NO: 1373385 - DNA, 25 bp, Homo sapien
cattttgaccagatccgatgccgac

SEQ ID NO: 1373386 - DNA, 25 bp, Homo sapien
gccactatggcagagcatttggatg

SEQ ID NO: 1373387 - DNA, 25 bp, Homo sapien
tcaggtaatagacatgccactatgg

SEQ ID NO: 1373388 - DNA, 25 bp, Homo sapien
agtctttccattagtaagcctagca

SEQ ID NO: 1373389 - DNA, 25 bp, Homo sapien
ctgaatttcagtctttccattagta

SEQ ID NO: 1373390 - DNA, 25 bp, Homo sapien
taccctttttctcccaaatgactga

SEQ ID NO: 1373391 - DNA, 25 bp, Homo sapien
gtaagcctagcaaatgcttccaaaa

SEQ ID NO: 1373392 - DNA, 25 bp, Homo sapien
aatgaaagagcaagggattgagacc

SEQ ID NO: 1373393 - DNA, 25 bp, Homo sapien
gagaccaggtatgtccaacactgaa

SEQ ID NO: 1373394 - DNA, 25 bp, Homo sapien
tagttgagcttcaaaattgtacacc

SEQ ID NO: 1373395 - DNA, 25 bp, Homo sapien
tatttagagcctagcagtctcagca

SEQ ID NO: 1373396 - DNA, 25 bp, Homo sapien
ccagattaagtccttgtgaatctgt

SEQ ID NO: 1373397 - DNA, 25 bp, Homo sapien
ccaggaacacaagagagttgaagta

SEQ ID NO: 1373398 - DNA, 25 bp, Homo sapien
ggccacaaacactgcgtgaaaaaca

SEQ ID NO: 1373399 - DNA, 25 bp, Homo sapien
cttttttcattgtcacaccctaaga

SEQ ID NO: 1373400 - DNA, 25 bp, Homo sapien
cctggaagacgagcgaaattccgtc

SEQ ID NO: 1373401 - DNA, 25 bp, Homo sapien
agctgagggacatcggtgggaggca

SEQ ID NO: 1373402 - DNA, 25 bp, Homo sapien
aagctgagggacatcggtgggaggc

SEQ ID NO: 1373403 - DNA, 25 bp, Homo sapien
gaagctgagggacatcggtgggagg

SEQ ID NO: 1373404 - DNA, 25 bp, Homo sapien
tgtttacactgcagggctcgacact

SEQ ID NO: 1373405 - DNA, 25 bp, Homo sapien
agataggcagttttggcccgtggcc

SEQ ID NO: 1373406 - DNA, 25 bp, Homo sapien
gataggttacacacaggagatacgt

SEQ ID NO: 1373407 - DNA, 25 bp, Homo sapien
ccgggagactcgctcaagagggaat

SEQ ID NO: 1373408 - DNA, 25 bp, Homo sapien
tcttccaagtgctgctccaaggtcg

SEQ ID NO: 1373409 - DNA, 25 bp, Homo sapien
tccaagtgctgctccaaggtcgcct

SEQ ID NO: 1373410 - DNA, 25 bp, Homo sapien
gtgtcttccaagtgctgctccaagg

SEQ ID NO: 1373411 - DNA, 25 bp, Homo sapien
agtgctgctccaaggtcgcctccat

SEQ ID NO: 1373412 - DNA, 25 bp, Homo sapien
gcctcagtcacttgacgcgagcggg

SEQ ID NO: 1373413 - DNA, 25 bp, Homo sapien
aaattgatcacggtgcaacgtccgc

SEQ ID NO: 1373414 - DNA, 25 bp, Homo sapien
tccggctcagaacccagcggcacgg

SEQ ID NO: 1373415 - DNA, 25 bp, Homo sapien
gcgtggaccgtaacggcgcctccaa

SEQ ID NO: 1373416 - DNA, 25 bp, Homo sapien
tgacgaaggcttgggctccccgcgc

SEQ ID NO: 1373417 - DNA, 25 bp, Homo sapien
cggtgaccgtcgaggtgacctgcac

SEQ ID NO: 1373418 - DNA, 25 bp, Homo sapien
aacatcactgcgcttccgtcgcaca

SEQ ID NO: 1373419 - DNA, 25 bp, Homo sapien
tcgaggtgacctgcacctggctcca

SEQ ID NO: 1373420 - DNA, 25 bp, Homo sapien
cggcacggattattcccctctcggg

SEQ ID NO: 1373421 - DNA, 25 bp, Homo sapien
ttattcccctctcgggagaggtctg

SEQ ID NO: 1373422 - DNA, 25 bp, Homo sapien
cgggcctcagtgcttcagttcgtgg

SEQ ID NO: 1373423 - DNA, 25 bp, Homo sapien
agccgggcctcagtgcttcagttcg

SEQ ID NO: 1373424 - DNA, 25 bp, Homo sapien
aatgagatgcagactttcatatcca

SEQ ID NO: 1373425 - DNA, 25 bp, Homo sapien
gatgcccagttaatgcagccatgac

SEQ ID NO: 1373426 - DNA, 25 bp, Homo sapien
caagtcttcattagatgcccagtta

SEQ ID NO: 1373427 - DNA, 25 bp, Homo sapien
tgagatgcagactttcatatccaag

SEQ ID NO: 1373428 - DNA, 25 bp, Homo sapien
tagtacgcacatatgcacacaggca

SEQ ID NO: 1373429 - DNA, 25 bp, Homo sapien
tgatctctcttgtctagtacgcaca

SEQ ID NO: 1373430 - DNA, 25 bp, Homo sapien
gacatacctcccatcatgacatggt

SEQ ID NO: 1373431 - DNA, 25 bp, Homo sapien
cacatgtatccctcggtctgaatta

SEQ ID NO: 1373432 - DNA, 25 bp, Homo sapien
tcagccagggcctatgcctctgtgg

SEQ ID NO: 1373433 - DNA, 25 bp, Homo sapien
ttatccgaattttgaggaatgtaga

SEQ ID NO: 1373434 - DNA, 25 bp, Homo sapien
tattatccgaattttgaggaatgta

SEQ ID NO: 1373435 - DNA, 25 bp, Homo sapien
tatccgaattttgaggaatgtagaa

SEQ ID NO: 1373436 - DNA, 25 bp, Homo sapien
atccgaattttgaggaatgtagaat

SEQ ID NO: 1373437 - DNA, 25 bp, Homo sapien
tcctcaccaactggtggtgtctgct

SEQ ID NO: 1373438 - DNA, 25 bp, Homo sapien
aacactttcctcaccaactggtggt

SEQ ID NO: 1373439 - DNA, 25 bp, Homo sapien
caccaactggtggtgtctgctacca

SEQ ID NO: 1373440 - DNA, 25 bp, Homo sapien
ctattttgcaccaacactttcctca

SEQ ID NO: 1373441 - DNA, 25 bp, Homo sapien
caaaaggattcggagctcctgcggg

SEQ ID NO: 1373442 - DNA, 25 bp, Homo sapien
tcaaaaggattcggagctcctgcgg

SEQ ID NO: 1373443 - DNA, 25 bp, Homo sapien
ctggagggatctcttcagtgaggta

SEQ ID NO: 1373444 - DNA, 25 bp, Homo sapien
cggatgtgcttcaattccccagaag

SEQ ID NO: 1373445 - DNA, 25 bp, Homo sapien
gaggtaaaccaataagatgtccagg

SEQ ID NO: 1373446 - DNA, 25 bp, Homo sapien
ggaacgaacaatcttttctcggatg

SEQ ID NO: 1373447 - DNA, 25 bp, Homo sapien
tcctgatttgccagcgttagcctcc

SEQ ID NO: 1373448 - DNA, 25 bp, Homo sapien
cagtcctgatttgccagcgttagcc

SEQ ID NO: 1373449 - DNA, 25 bp, Homo sapien
ccagcgttagcctcccctggtcctt

SEQ ID NO: 1373450 - DNA, 25 bp, Homo sapien
tttgccagcgttagcctcccctggt

SEQ ID NO: 1373451 - DNA, 25 bp, Homo sapien
catttgtcagcttgtgggagacacc

SEQ ID NO: 1373452 - DNA, 25 bp, Homo sapien
gagaattttccactcgtcttaggga

SEQ ID NO: 1373453 - DNA, 25 bp, Homo sapien
tagggaaaaagctatccagagagcg

SEQ ID NO: 1373454 - DNA, 25 bp, Homo sapien
tttcactgcagacagtgggctcccg

SEQ ID NO: 1373455 - DNA, 25 bp, Homo sapien
ggtaagaccacccatgagaagctga

SEQ ID NO: 1373456 - DNA, 25 bp, Homo sapien
gacctttgtcggtgctagtgccaca

SEQ ID NO: 1373457 - DNA, 25 bp, Homo sapien
cagtacaatgaggtgaggtcaggcc

SEQ ID NO: 1373458 - DNA, 25 bp, Homo sapien
tttcccagccatgtgtgagacacgg

SEQ ID NO: 1373459 - DNA, 25 bp, Homo sapien
gggcgcctgagcagcattcccacgg

SEQ ID NO: 1373460 - DNA, 25 bp, Homo sapien
agtttgacatcgactgcgggcgcct

SEQ ID NO: 1373461 - DNA, 25 bp, Homo sapien
acggctgtcttcgagatccacggca

SEQ ID NO: 1373462 - DNA, 25 bp, Homo sapien
cccttggttctttagtttgacatcg

SEQ ID NO: 1373463 - DNA, 25 bp, Homo sapien
cactgaggccagaataactgtgtcc

SEQ ID NO: 1373464 - DNA, 25 bp, Homo sapien
gcatagctcttatgcaatgaggtgg

SEQ ID NO: 1373465 - DNA, 25 bp, Homo sapien
aaactggctgtccagatgcctaggc

SEQ ID NO: 1373466 - DNA, 25 bp, Homo sapien
gcacatttctcatcgagagcatagc

SEQ ID NO: 1373467 - DNA, 25 bp, Homo sapien
gccttctgagagaccttcagagctg

SEQ ID NO: 1373468 - DNA, 25 bp, Homo sapien
ttcccagaggaaggcgtcttgggtc

SEQ ID NO: 1373469 - DNA, 25 bp, Homo sapien
agagccttctgagagaccttcagag

SEQ ID NO: 1373470 - DNA, 25 bp, Homo sapien
aggaaggcgtcttgggtctctttgc

SEQ ID NO: 1373471 - DNA, 25 bp, Homo sapien
tggtttgtcacccttaggagggcaa

SEQ ID NO: 1373472 - DNA, 25 bp, Homo sapien
aggcctcagcgctggtttgtcaccc

SEQ ID NO: 1373473 - DNA, 25 bp, Homo sapien
gcaatggtcacaagcccagatgcct

SEQ ID NO: 1373474 - DNA, 25 bp, Homo sapien
gagcagcctctgctattgtggtcat

SEQ ID NO: 1373475 - DNA, 25 bp, Homo sapien
gagagacaggatggacccaagaagc

SEQ ID NO: 1373476 - DNA, 25 bp, Homo sapien
aggatggacccaagaagccctggac

SEQ ID NO: 1373477 - DNA, 25 bp, Homo sapien
gagacaggatggacccaagaagccc

SEQ ID NO: 1373478 - DNA, 25 bp, Homo sapien
acaggatggacccaagaagccctgg

SEQ ID NO: 1373479 - DNA, 25 bp, Homo sapien
gctttcgctgatgaggatcttcccg

SEQ ID NO: 1373480 - DNA, 25 bp, Homo sapien
gattccatcaaaactgggccggttc

SEQ ID NO: 1373481 - DNA, 25 bp, Homo sapien
gggtcagcatagtctcccggaagct

SEQ ID NO: 1373482 - DNA, 25 bp, Homo sapien
caaagaggagccagaactgacggtg

SEQ ID NO: 1373483 - DNA, 25 bp, Homo sapien
tacaccaatgggctaatcaatgact

SEQ ID NO: 1373484 - DNA, 25 bp, Homo sapien
ttctccccagcaaaggatggtctcc

SEQ ID NO: 1373485 - DNA, 25 bp, Homo sapien
gaacgtcatggttattttggcagca

SEQ ID NO: 1373486 - DNA, 25 bp, Homo sapien
tcattatacaagatccagggcagaa

SEQ ID NO: 1373487 - DNA, 25 bp, Homo sapien
gagtaccatcagtgagctttgggca

SEQ ID NO: 1373488 - DNA, 25 bp, Homo sapien
tcttggaccgcagatggtgctccct

SEQ ID NO: 1373489 - DNA, 25 bp, Homo sapien
tccaggtgtgaatcagtcccgcttt

SEQ ID NO: 1373490 - DNA, 25 bp, Homo sapien
cccgctttctgagaggaatgagtac

SEQ ID NO: 1373491 - DNA, 25 bp, Homo sapien
gtggcgatgtcagccttagggccat

SEQ ID NO: 1373492 - DNA, 25 bp, Homo sapien
ctgagagcagcgtccgtcaggagac

SEQ ID NO: 1373493 - DNA, 25 bp, Homo sapien
tgtagcccctctggtccctcgagtg

SEQ ID NO: 1373494 - DNA, 25 bp, Homo sapien
cagccttagggccatggaaagggta

SEQ ID NO: 1373495 - DNA, 25 bp, Homo sapien
ttgttagagtgtcgatgggcacagt

SEQ ID NO: 1373496 - DNA, 25 bp, Homo sapien
tctcttccttgttagagtgtcgatg

SEQ ID NO: 1373497 - DNA, 25 bp, Homo sapien
ccttgttagagtgtcgatgggcaca

SEQ ID NO: 1373498 - DNA, 25 bp, Homo sapien
cttccttgttagagtgtcgatgggc

SEQ ID NO: 1373499 - DNA, 25 bp, Homo sapien
cagaggactgatagtgggcctcctt

SEQ ID NO: 1373500 - DNA, 25 bp, Homo sapien
gaggactgatagtgggcctccttaa

SEQ ID NO: 1373501 - DNA, 25 bp, Homo sapien
agaggactgatagtgggcctcctta

SEQ ID NO: 1373502 - DNA, 25 bp, Homo sapien
gcagaggactgatagtgggcctcct

SEQ ID NO: 1373503 - DNA, 25 bp, Homo sapien
tgactggctgatcaagtcaggcatc

SEQ ID NO: 1373504 - DNA, 25 bp, Homo sapien
gatcaagtcaggcatcgctttcctg

SEQ ID NO: 1373505 - DNA, 25 bp, Homo sapien
gtcaggcatcgctttcctggtctcc

SEQ ID NO: 1373506 - DNA, 25 bp, Homo sapien
agagtttacgatgggcctccgccca

SEQ ID NO: 1373507 - DNA, 25 bp, Homo sapien
ttgcttgggacctatattggggttc

SEQ ID NO: 1373508 - DNA, 25 bp, Homo sapien
tctctgaggagtgagcatctgaagg

SEQ ID NO: 1373509 - DNA, 25 bp, Homo sapien
gcttgggacctatattggggttctc

SEQ ID NO: 1373510 - DNA, 25 bp, Homo sapien
gttctctgaggagtgagcatctgaa

SEQ ID NO: 1373511 - DNA, 25 bp, Homo sapien
aaaggccttgtccagcttcctggca

SEQ ID NO: 1373512 - DNA, 25 bp, Homo sapien
gaaaaggccttgtccagcttcctgg

SEQ ID NO: 1373513 - DNA, 25 bp, Homo sapien
agagaaaaggccttgtccagcttcc

SEQ ID NO: 1373514 - DNA, 25 bp, Homo sapien
gagaaaaggccttgtccagcttcct

SEQ ID NO: 1373515 - DNA, 25 bp, Homo sapien
ggtgggcactgtagtgtcagttcca

SEQ ID NO: 1373516 - DNA, 25 bp, Homo sapien
ctctgggtcttttaccaacatcagc

SEQ ID NO: 1373517 - DNA, 25 bp, Homo sapien
tctgggtcttttaccaacatcagct

SEQ ID NO: 1373518 - DNA, 25 bp, Homo sapien
aacgaactcccctatcagatcctgg

SEQ ID NO: 1373519 - DNA, 25 bp, Homo sapien
tgacccaagctcctgtcctccggtt

SEQ ID NO: 1373520 - DNA, 25 bp, Homo sapien
gaccaattggacactaagccatgaa

SEQ ID NO: 1373521 - DNA, 25 bp, Homo sapien
tctcaggcttcggactaggcttgcc

SEQ ID NO: 1373522 - DNA, 25 bp, Homo sapien
tcagcaaagaagagcccatttggct

SEQ ID NO: 1373523 - DNA, 25 bp, Homo sapien
caaagaagagcccatttggctgtgg

SEQ ID NO: 1373524 - DNA, 25 bp, Homo sapien
gaagagcccatttggctgtggcagc

SEQ ID NO: 1373525 - DNA, 25 bp, Homo sapien
ctgtggcagctttgtgggcaatggt

SEQ ID NO: 1373526 - DNA, 25 bp, Homo sapien
tagcctggacgggtcttcttctcgt

SEQ ID NO: 1373527 - DNA, 25 bp, Homo sapien
ctggacgggtcttcttctcgtggac

SEQ ID NO: 1373528 - DNA, 25 bp, Homo sapien
tcttctcgtggacagccttggtaag

SEQ ID NO: 1373529 - DNA, 25 bp, Homo sapien
acagccttggtaagagccttcagca

SEQ ID NO: 1373530 - DNA, 25 bp, Homo sapien
ctatagtcgttacattgctgctgct

SEQ ID NO: 1373531 - DNA, 25 bp, Homo sapien
ctctccctatagtcgttacattgct

SEQ ID NO: 1373532 - DNA, 25 bp, Homo sapien
ttgaaggccttagcctttaccctgc

SEQ ID NO: 1373533 - DNA, 25 bp, Homo sapien
gctgctgttctggacccccttgaag

SEQ ID NO: 1373534 - DNA, 25 bp, Homo sapien
ctgagatgtgctctcctcggcaggg

SEQ ID NO: 1373535 - DNA, 25 bp, Homo sapien
cctgagatgtgctctcctcggcagg

SEQ ID NO: 1373536 - DNA, 25 bp, Homo sapien
tctccagtgtcacattccctttggt

SEQ ID NO: 1373537 - DNA, 25 bp, Homo sapien
tgcctgctgatctgtgaggcttctt

SEQ ID NO: 1373538 - DNA, 25 bp, Homo sapien
ttgatgatggggcatcttccgtggg

SEQ ID NO: 1373539 - DNA, 25 bp, Homo sapien
cacattccctttggttccagccctc

SEQ ID NO: 1373540 - DNA, 25 bp, Homo sapien
gggctctttgtacatggccatctgg

SEQ ID NO: 1373541 - DNA, 25 bp, Homo sapien
ctctttgtacatggccatctgggaa

SEQ ID NO: 1373542 - DNA, 25 bp, Homo sapien
ctgtccttaggggactctgcagttt

SEQ ID NO: 1373543 - DNA, 25 bp, Homo sapien
ctctggtgctgtccttaggggactc

SEQ ID NO: 1373544 - DNA, 25 bp, Homo sapien
gaactcttgttctggaaaaatctgg

SEQ ID NO: 1373545 - DNA, 25 bp, Homo sapien
agcgcatggctgagtgcagatctgc

SEQ ID NO: 1373546 - DNA, 25 bp, Homo sapien
ggtggaggatctgtcaccccagagc

SEQ ID NO: 1373547 - DNA, 25 bp, Homo sapien
gatctgcatcaggtttagggaactc

SEQ ID NO: 1373548 - DNA, 25 bp, Homo sapien
taaaacaaatctggcccggctactc

SEQ ID NO: 1373549 - DNA, 25 bp, Homo sapien
gctactactgactgggatggccttg

SEQ ID NO: 1373550 - DNA, 25 bp, Homo sapien
catcttcctggacaattggcccagc

SEQ ID NO: 1373551 - DNA, 25 bp, Homo sapien
cctgccttggttcaggccttgatca

SEQ ID NO: 1373552 - DNA, 25 bp, Homo sapien
aaagccttgtctgcttcgaatggga

SEQ ID NO: 1373553 - DNA, 25 bp, Homo sapien
tgggagcctcaacccgaacatacat

SEQ ID NO: 1373554 - DNA, 25 bp, Homo sapien
agtacaatgcccctctctgtgtaga

SEQ ID NO: 1373555 - DNA, 25 bp, Homo sapien
tacatccgctagactctcctttggc

SEQ ID NO: 1373556 - DNA, 25 bp, Homo sapien
tgttgattagttgctctgcacagcc

SEQ ID NO: 1373557 - DNA, 25 bp, Homo sapien
ctgaggatggctgagatttcacagg

SEQ ID NO: 1373558 - DNA, 25 bp, Homo sapien
cacagggcgagtcagtgttgattag

SEQ ID NO: 1373559 - DNA, 25 bp, Homo sapien
tgagatttcacagggcgagtcagtg

SEQ ID NO: 1373560 - DNA, 25 bp, Homo sapien
tggcaagggttctgccacccttgtt

SEQ ID NO: 1373561 - DNA, 25 bp, Homo sapien
tctgccacccttgtttggtcctttg

SEQ ID NO: 1373562 - DNA, 25 bp, Homo sapien
aacctcaggtagcccctggcaaggg

SEQ ID NO: 1373563 - DNA, 25 bp, Homo sapien
caacctcaggtagcccctggcaagg

SEQ ID NO: 1373564 - DNA, 25 bp, Homo sapien
tccctgctgcgtgtaggcgaatccc

SEQ ID NO: 1373565 - DNA, 25 bp, Homo sapien
aacatggggcgatcacactttcggg

SEQ ID NO: 1373566 - DNA, 25 bp, Homo sapien
caggcgggtagcactgagaagctcc

SEQ ID NO: 1373567 - DNA, 25 bp, Homo sapien
ttcagaagatcgtgggaagcttgag

SEQ ID NO: 1373568 - DNA, 25 bp, Homo sapien
agcaagatggagcttagagccaaga

SEQ ID NO: 1373569 - DNA, 25 bp, Homo sapien
gctctatgaagtctatgtacaccca

SEQ ID NO: 1373570 - DNA, 25 bp, Homo sapien
tacacccatgatcaggtggacaggc

SEQ ID NO: 1373571 - DNA, 25 bp, Homo sapien
gacacaggaactctcagctgcagaa

SEQ ID NO: 1373572 - DNA, 25 bp, Homo sapien
gaaagcttccagaatatgtcagcaa

SEQ ID NO: 1373573 - DNA, 25 bp, Homo sapien
tacatcctgtgcaatgtagttacag

SEQ ID NO: 1373574 - DNA, 25 bp, Homo sapien
tcaatacatcctgtgcaatgtagtt

SEQ ID NO: 1373575 - DNA, 25 bp, Homo sapien
catcctgtgcaatgtagttacagct

SEQ ID NO: 1373576 - DNA, 25 bp, Homo sapien
tcctgtgcaatgtagttacagctgg

SEQ ID NO: 1373577 - DNA, 25 bp, Homo sapien
cttctgctattgatcccaaggaggc

SEQ ID NO: 1373578 - DNA, 25 bp, Homo sapien
gttccctttcggcatcatccttacg

SEQ ID NO: 1373579 - DNA, 25 bp, Homo sapien
tatctacctctttgagttttcagca

SEQ ID NO: 1373580 - DNA, 25 bp, Homo sapien
tgctccgccttcagctctcattggt

SEQ ID NO: 1373581 - DNA, 25 bp, Homo sapien
caaacaaggcattcggtgtctaggg

SEQ ID NO: 1373582 - DNA, 25 bp, Homo sapien
tcacagagactcagaaagacaccag

SEQ ID NO: 1373583 - DNA, 25 bp, Homo sapien
gtttggtagcaaagtgcgcccctga

SEQ ID NO: 1373584 - DNA, 25 bp, Homo sapien
tgagtcctctggatagctaccaagg

SEQ ID NO: 1373585 - DNA, 25 bp, Homo sapien
gcaggttttagcttgcatccagctg

SEQ ID NO: 1373586 - DNA, 25 bp, Homo sapien
ttgagtgatgtgtacagcttacccc

SEQ ID NO: 1373587 - DNA, 25 bp, Homo sapien
gatctcacaaacctcaaacctaggg

SEQ ID NO: 1373588 - DNA, 25 bp, Homo sapien
tgattgccacaaacctcaccttctg

SEQ ID NO: 1373589 - DNA, 25 bp, Homo sapien
gatcagacttcccttttatccctga

SEQ ID NO: 1373590 - DNA, 25 bp, Homo sapien
gctgttagatcagacttccctttta

SEQ ID NO: 1373591 - DNA, 25 bp, Homo sapien
ctggctgttagatcagacttccctt

SEQ ID NO: 1373592 - DNA, 25 bp, Homo sapien
acttcccttttatccctgagtcagg

SEQ ID NO: 1373593 - DNA, 25 bp, Homo sapien
aaacctcgattgacaagaattatgt

SEQ ID NO: 1373594 - DNA, 25 bp, Homo sapien
gattggtcaatgtataattctataa

SEQ ID NO: 1373595 - DNA, 25 bp, Homo sapien
tatatggaaaacctctaaaaactca

SEQ ID NO: 1373596 - DNA, 25 bp, Homo sapien
attccacataagtgaaactaaggag

SEQ ID NO: 1373597 - DNA, 25 bp, Homo sapien
agcaagggctccgatgagccaggat

SEQ ID NO: 1373598 - DNA, 25 bp, Homo sapien
agggctccgatgagccaggatgtgc

SEQ ID NO: 1373599 - DNA, 25 bp, Homo sapien
caagggctccgatgagccaggatgt

SEQ ID NO: 1373600 - DNA, 25 bp, Homo sapien
gcaagggctccgatgagccaggatg

SEQ ID NO: 1373601 - DNA, 25 bp, Homo sapien
gaggtttccccatcagttaactgag

SEQ ID NO: 1373602 - DNA, 25 bp, Homo sapien
aaggttgaaccagacatgctttccc

SEQ ID NO: 1373603 - DNA, 25 bp, Homo sapien
ctaaggcaggaaagttatgctaacc

SEQ ID NO: 1373604 - DNA, 25 bp, Homo sapien
ttacaatgttgaccctgagcaaggc

SEQ ID NO: 1373605 - DNA, 25 bp, Homo sapien
gaggtcagatctcaagaggacagga

SEQ ID NO: 1373606 - DNA, 25 bp, Homo sapien
gctgtatgacagcaggcagaaatgg

SEQ ID NO: 1373607 - DNA, 25 bp, Homo sapien
tgtgtccattccagaaggaggtcag

SEQ ID NO: 1373608 - DNA, 25 bp, Homo sapien
aggccttccttgtgcatacactgca

SEQ ID NO: 1373609 - DNA, 25 bp, Homo sapien
tcttctggctttgcagaggtctgcg

SEQ ID NO: 1373610 - DNA, 25 bp, Homo sapien
ggttaattcctaaggtgcagtcatg

SEQ ID NO: 1373611 - DNA, 25 bp, Homo sapien
gcagtcatgtgaggtgttcagatgc

SEQ ID NO: 1373612 - DNA, 25 bp, Homo sapien
tcatgcccgcgactaggttaattcc

SEQ ID NO: 1373613 - DNA, 25 bp, Homo sapien
tagcttgataggtgactcccgtctt

SEQ ID NO: 1373614 - DNA, 25 bp, Homo sapien
tagcttctccccataggcctaaggg

SEQ ID NO: 1373615 - DNA, 25 bp, Homo sapien
gacatgtttttgtgaccctggagcc

SEQ ID NO: 1373616 - DNA, 25 bp, Homo sapien
cataagccggtgatgaggatgtgca

SEQ ID NO: 1373617 - DNA, 25 bp, Homo sapien
cagttaacattttggtaatattcac

SEQ ID NO: 1373618 - DNA, 25 bp, Homo sapien
tcagttaacattttggtaatattca

SEQ ID NO: 1373619 - DNA, 25 bp, Homo sapien
gacatcagttaacattttggtaata

SEQ ID NO: 1373620 - DNA, 25 bp, Homo sapien
tcagacatcagttaacattttggta

SEQ ID NO: 1373621 - DNA, 25 bp, Homo sapien
gacctagaatctggagacctttgga

SEQ ID NO: 1373622 - DNA, 25 bp, Homo sapien
gcaatcgcacatagggaacccacta

SEQ ID NO: 1373623 - DNA, 25 bp, Homo sapien
caatgacagggaccggtaaggcaat

SEQ ID NO: 1373624 - DNA, 25 bp, Homo sapien
gatgggatctttggacagcttgtca

SEQ ID NO: 1373625 - DNA, 25 bp, Homo sapien
tgctgggacaggcaaagaacctcac

SEQ ID NO: 1373626 - DNA, 25 bp, Homo sapien
gcatcaaagctagggcggttccgat

SEQ ID NO: 1373627 - DNA, 25 bp, Homo sapien
tctttagctgggtctcaaaccgcag

SEQ ID NO: 1373628 - DNA, 25 bp, Homo sapien
caatagctataatcctggcaggccc

SEQ ID NO: 1373629 - DNA, 25 bp, Homo sapien
ggcagcagcctcgtctgctgggtct

SEQ ID NO: 1373630 - DNA, 25 bp, Homo sapien
gggagggcagcagcctcgtctgctg

SEQ ID NO: 1373631 - DNA, 25 bp, Homo sapien
agggcagcagcctcgtctgctgggt

SEQ ID NO: 1373632 - DNA, 25 bp, Homo sapien
agcagcctcgtctgctgggtctccg

SEQ ID NO: 1373633 - DNA, 25 bp, Homo sapien
aagcacctcacgctatgcctttcag

SEQ ID NO: 1373634 - DNA, 25 bp, Homo sapien
ggagagccccgagagctctctgaga

SEQ ID NO: 1373635 - DNA, 25 bp, Homo sapien
agcacctcacgctatgcctttcagc

SEQ ID NO: 1373636 - DNA, 25 bp, Homo sapien
gagaagcacctcacgctatgccttt

SEQ ID NO: 1373637 - DNA, 25 bp, Homo sapien
tctctcagccaagagttcagacaca

SEQ ID NO: 1373638 - DNA, 25 bp, Homo sapien
cagccaagagttcagacacatgatc

SEQ ID NO: 1373639 - DNA, 25 bp, Homo sapien
caccaccacaacgacaaagcaaaat

SEQ ID NO: 1373640 - DNA, 25 bp, Homo sapien
tctcagccaagagttcagacacatg

SEQ ID NO: 1373641 - DNA, 25 bp, Homo sapien
gggatcagggggagcaggtagcaat

SEQ ID NO: 1373642 - DNA, 25 bp, Homo sapien
ctggggatcagggggagcaggtagc

SEQ ID NO: 1373643 - DNA, 25 bp, Homo sapien
ggggatcagggggagcaggtagcaa

SEQ ID NO: 1373644 - DNA, 25 bp, Homo sapien
tggggatcagggggagcaggtagca

SEQ ID NO: 1373645 - DNA, 25 bp, Homo sapien
ctgtcctcaggaggtgtgacgttgc

SEQ ID NO: 1373646 - DNA, 25 bp, Homo sapien
tgctgcaggaatctgagatgcacca

SEQ ID NO: 1373647 - DNA, 25 bp, Homo sapien
cactcgagctagaaataatggtgag

SEQ ID NO: 1373648 - DNA, 25 bp, Homo sapien
gacttgaagacagccgagcatgggc

SEQ ID NO: 1373649 - DNA, 25 bp, Homo sapien
tcagtgtccaacccaaaatcccgga

SEQ ID NO: 1373650 - DNA, 25 bp, Homo sapien
cagcttccttttaagcgcgggggct

SEQ ID NO: 1373651 - DNA, 25 bp, Homo sapien
tcagcttccttttaagcgcgggggc

SEQ ID NO: 1373652 - DNA, 25 bp, Homo sapien
gacatggttatgctgccagctgcac

SEQ ID NO: 1373653 - DNA, 25 bp, Homo sapien
cagacatggttatgctgccagctgc

SEQ ID NO: 1373654 - DNA, 25 bp, Homo sapien
ttatgctgccagctgcacttcccac

SEQ ID NO: 1373655 - DNA, 25 bp, Homo sapien
catggttatgctgccagctgcactt

SEQ ID NO: 1373656 - DNA, 25 bp, Homo sapien
agagggtcccgagcccattctgtgc

SEQ ID NO: 1373657 - DNA, 25 bp, Homo sapien
cacgcaaaccccagagggtcccgag

SEQ ID NO: 1373658 - DNA, 25 bp, Homo sapien
ccccgcgccacgcaaaccccagagg

SEQ ID NO: 1373659 - DNA, 25 bp, Homo sapien
gggtcccgagcccattctgtgcact

SEQ ID NO: 1373660 - DNA, 25 bp, Homo sapien
gtcggcaagggcttgccgccgcgga

SEQ ID NO: 1373661 - DNA, 25 bp, Homo sapien
gcgcaacgccccgacacggatttac

SEQ ID NO: 1373662 - DNA, 25 bp, Homo sapien
acggcagtggtcggcaagggcttgc

SEQ ID NO: 1373663 - DNA, 25 bp, Homo sapien
gcttgccgccgcggactcagcccaa

SEQ ID NO: 1373664 - DNA, 25 bp, Homo sapien
ggccagcgccggcagaaccccggca

SEQ ID NO: 1373665 - DNA, 25 bp, Homo sapien
cggcgcgtacggagctcccggccgc

SEQ ID NO: 1373666 - DNA, 25 bp, Homo sapien
ggcagaaccccggcagcgggcggcg

SEQ ID NO: 1373667 - DNA, 25 bp, Homo sapien
gcgcgtacggagctcccggccgccg

SEQ ID NO: 1373668 - DNA, 25 bp, Homo sapien
ggattctggcgtttcatcgtggtag

SEQ ID NO: 1373669 - DNA, 25 bp, Homo sapien
tgaaagcccatgaagcgggactccg

SEQ ID NO: 1373670 - DNA, 25 bp, Homo sapien
tgaggtgtggttgaagactgggagc

SEQ ID NO: 1373671 - DNA, 25 bp, Homo sapien
ttcatcgtggtagtctgtgaggtgt

SEQ ID NO: 1373672 - DNA, 25 bp, Homo sapien
ggaggttgaaggtggtcactagaat

SEQ ID NO: 1373673 - DNA, 25 bp, Homo sapien
tggtcactagaatggggctattaga

SEQ ID NO: 1373674 - DNA, 25 bp, Homo sapien
gatgttccgctcctgatcttcctta

SEQ ID NO: 1373675 - DNA, 25 bp, Homo sapien
gattttctttgccaccagatgttcc

SEQ ID NO: 1373676 - DNA, 25 bp, Homo sapien
cttgttagtgtcagcaacagtgatg

SEQ ID NO: 1373677 - DNA, 25 bp, Homo sapien
ctacttgttagtgtcagcaacagtg

SEQ ID NO: 1373678 - DNA, 25 bp, Homo sapien
tgatgctttggtgcttcgatcgacc

SEQ ID NO: 1373679 - DNA, 25 bp, Homo sapien
ctttggtgcttcgatcgacccaagt

SEQ ID NO: 1373680 - DNA, 25 bp, Homo sapien
ctggcattcctggtgttgcagaacc

SEQ ID NO: 1373681 - DNA, 25 bp, Homo sapien
caagtgaggaggtggctaaatcatc

SEQ ID NO: 1373682 - DNA, 25 bp, Homo sapien
ggagggaaaggtagacaagtgagga

SEQ ID NO: 1373683 - DNA, 25 bp, Homo sapien
ctggtgttgcagaaccaacgtgtat

SEQ ID NO: 1373684 - DNA, 25 bp, Homo sapien
agatgacttaggagtggaagagagc

SEQ ID NO: 1373685 - DNA, 25 bp, Homo sapien
ggaagatgacttaggagtggaagag

SEQ ID NO: 1373686 - DNA, 25 bp, Homo sapien
aagatgacttaggagtggaagagag

SEQ ID NO: 1373687 - DNA, 25 bp, Homo sapien
gaagatgacttaggagtggaagaga

SEQ ID NO: 1373688 - DNA, 25 bp, Homo sapien
gtggctgccttccctcagttctttc

SEQ ID NO: 1373689 - DNA, 25 bp, Homo sapien
tgccgtccagttagggtgtggccct

SEQ ID NO: 1373690 - DNA, 25 bp, Homo sapien
cttgccgtccagttagggtgtggcc

SEQ ID NO: 1373691 - DNA, 25 bp, Homo sapien
gctgccttccctcagttctttccct

SEQ ID NO: 1373692 - DNA, 25 bp, Homo sapien
gcggcaatgcggcaatctgggaggg

SEQ ID NO: 1373693 - DNA, 25 bp, Homo sapien
catgcagcggtatctgcacactgtg

SEQ ID NO: 1373694 - DNA, 25 bp, Homo sapien
gggcgccacatgcagcggtatctgc

SEQ ID NO: 1373695 - DNA, 25 bp, Homo sapien
cacactgtggctcgggcggcaatgc

SEQ ID NO: 1373696 - DNA, 25 bp, Homo sapien
tctcccaggcatggctgcccatcgt

SEQ ID NO: 1373697 - DNA, 25 bp, Homo sapien
tgtctcccaggcatggctgcccatc

SEQ ID NO: 1373698 - DNA, 25 bp, Homo sapien
cgtagccagcaaactctgtctccca

SEQ ID NO: 1373699 - DNA, 25 bp, Homo sapien
caggcatggctgcccatcgtctcac

SEQ ID NO: 1373700 - DNA, 25 bp, Homo sapien
tcttgactgggagtttgcatccagt

SEQ ID NO: 1373701 - DNA, 25 bp, Homo sapien
cctgagcattaatggtcctgggtgc

SEQ ID NO: 1373702 - DNA, 25 bp, Homo sapien
tgtcctccacactgggtatatcttg

SEQ ID NO: 1373703 - DNA, 25 bp, Homo sapien
ttagccctgagcattaatggtcctg

SEQ ID NO: 1373704 - DNA, 25 bp, Homo sapien
cagcaagacctgatgtgttctcctc

SEQ ID NO: 1373705 - DNA, 25 bp, Homo sapien
agcaagacctgatgtgttctcctca

SEQ ID NO: 1373706 - DNA, 25 bp, Homo sapien
agtcttggcgctggaaaccagatga

SEQ ID NO: 1373707 - DNA, 25 bp, Homo sapien
gaagtcttggcgctggaaaccagat

SEQ ID NO: 1373708 - DNA, 25 bp, Homo sapien
tgcagaagtcttggcgctggaaacc

SEQ ID NO: 1373709 - DNA, 25 bp, Homo sapien
tctcctgcagaagtcttggcgctgg

SEQ ID NO: 1373710 - DNA, 25 bp, Homo sapien
gacattcagcactgatttgcttaca

SEQ ID NO: 1373711 - DNA, 25 bp, Homo sapien
tgcttacattctgctgaagtgcacc

SEQ ID NO: 1373712 - DNA, 25 bp, Homo sapien
gtaaaatccgttttgacattcagca

SEQ ID NO: 1373713 - DNA, 25 bp, Homo sapien
tctcctggttctcgcaatttaataa

SEQ ID NO: 1373714 - DNA, 25 bp, Homo sapien
ccagatatcgccaaatgtaaaaagg

SEQ ID NO: 1373715 - DNA, 25 bp, Homo sapien
atgactcaagttaccagatatcgcc

SEQ ID NO: 1373716 - DNA, 25 bp, Homo sapien
aattcaatgatatagtctcctcctc

SEQ ID NO: 1373717 - DNA, 25 bp, Homo sapien
ctaattcaatgatatagtctcctcc

SEQ ID NO: 1373718 - DNA, 25 bp, Homo sapien
tgtggtcagggtgtgcaaacttata

SEQ ID NO: 1373719 - DNA, 25 bp, Homo sapien
caccctgtggaagggctatagtctg

SEQ ID NO: 1373720 - DNA, 25 bp, Homo sapien
cacagactgttgacttacaagggaa

SEQ ID NO: 1373721 - DNA, 25 bp, Homo sapien
taaagaacataggaggtttagagcc

SEQ ID NO: 1373722 - DNA, 25 bp, Homo sapien
tatagtaattgcttctgggaccaaa

SEQ ID NO: 1373723 - DNA, 25 bp, Homo sapien
tacaatatggctgtattaggcctcc

SEQ ID NO: 1373724 - DNA, 25 bp, Homo sapien
tcaaaaatggtctatacagtgccct

SEQ ID NO: 1373725 - DNA, 25 bp, Homo sapien
tgtgatgtgcaaaagctataaccct

SEQ ID NO: 1373726 - DNA, 25 bp, Homo sapien
tgtaacagatttacctaaggtccca

SEQ ID NO: 1373727 - DNA, 25 bp, Homo sapien
gagatcattgaatccagcacgccca

SEQ ID NO: 1373728 - DNA, 25 bp, Homo sapien
ggactgactattctccaggcccata

SEQ ID NO: 1373729 - DNA, 25 bp, Homo sapien
tatctaagacctcctgtaacacagt

SEQ ID NO: 1373730 - DNA, 25 bp, Homo sapien
tcagctcagctaaaacctataaggc

SEQ ID NO: 1373731 - DNA, 25 bp, Homo sapien
gcaaggcacatttcttttaggcaag

SEQ ID NO: 1373732 - DNA, 25 bp, Homo sapien
tatgcacgcattatgaagcgaatcc

SEQ ID NO: 1373733 - DNA, 25 bp, Homo sapien
ccagaacatggaatataacacgact

SEQ ID NO: 1373734 - DNA, 25 bp, Homo sapien
ctacagttctttatatggggggctc

SEQ ID NO: 1373735 - DNA, 25 bp, Homo sapien
agctctacagttctttatatggggg

SEQ ID NO: 1373736 - DNA, 25 bp, Homo sapien
ggagcatcctactggtcagtgcagc

SEQ ID NO: 1373737 - DNA, 25 bp, Homo sapien
agttctttatatggggggctcttca

SEQ ID NO: 1373738 - DNA, 25 bp, Homo sapien
ttaaaggattgcatccccataattg

SEQ ID NO: 1373739 - DNA, 25 bp, Homo sapien
taaaggattgcatccccataattgg

SEQ ID NO: 1373740 - DNA, 25 bp, Homo sapien
attaaaggattgcatccccataatt

SEQ ID NO: 1373741 - DNA, 25 bp, Homo sapien
cctccatctctatgttaagaacaga

SEQ ID NO: 1373742 - DNA, 25 bp, Homo sapien
tacaatgtggtgactacaagcaatc

SEQ ID NO: 1373743 - DNA, 25 bp, Homo sapien
atcctttagggaacttacaatgtgg

SEQ ID NO: 1373744 - DNA, 25 bp, Homo sapien
tgtgctaggcactagtacctaaaac

SEQ ID NO: 1373745 - DNA, 25 bp, Homo sapien
cccttggcatatggctgaaacttgc

SEQ ID NO: 1373746 - DNA, 25 bp, Homo sapien
tgtcttctggcaacccttggcatat

SEQ ID NO: 1373747 - DNA, 25 bp, Homo sapien
gattctgtctgtcttctggcaaccc

SEQ ID NO: 1373748 - DNA, 25 bp, Homo sapien
ggcaacccttggcatatggctgaaa

SEQ ID NO: 1373749 - DNA, 25 bp, Homo sapien
tctcatttgcttatgtacagaacac

SEQ ID NO: 1373750 - DNA, 25 bp, Homo sapien
gcacactgatcgaatctctcatttg

SEQ ID NO: 1373751 - DNA, 25 bp, Homo sapien
catttgttggcttgaaagttcttgg

SEQ ID NO: 1373752 - DNA, 25 bp, Homo sapien
tagtaaggtttcaggcacactgatc

SEQ ID NO: 1373753 - DNA, 25 bp, Homo sapien
aaatgcatttgggattcatttcacc

SEQ ID NO: 1373754 - DNA, 25 bp, Homo sapien
ccagatcatgccttattgtggttaa

SEQ ID NO: 1373755 - DNA, 25 bp, Homo sapien
aaaaattattgcctaataaatggca

SEQ ID NO: 1373756 - DNA, 25 bp, Homo sapien
tcatttcacctccttagagtctcag

SEQ ID NO: 1373757 - DNA, 25 bp, Homo sapien
tcatttaagtaggaaccatctggaa

SEQ ID NO: 1373758 - DNA, 25 bp, Homo sapien
catttaagtaggaaccatctggaaa

SEQ ID NO: 1373759 - DNA, 25 bp, Homo sapien
atttaagtaggaaccatctggaaag

SEQ ID NO: 1373760 - DNA, 25 bp, Homo sapien
aggggctgggaggtggggctagaga

SEQ ID NO: 1373761 - DNA, 25 bp, Homo sapien
gcaggggctgggaggtggggctaga

SEQ ID NO: 1373762 - DNA, 25 bp, Homo sapien
ggggctgggaggtggggctagagag

SEQ ID NO: 1373763 - DNA, 25 bp, Homo sapien
caggggctgggaggtggggctagag

SEQ ID NO: 1373764 - DNA, 25 bp, Homo sapien
gggctgggacatatgcacagaactt

SEQ ID NO: 1373765 - DNA, 25 bp, Homo sapien
tcttgtgatactgccgaagcttatc

SEQ ID NO: 1373766 - DNA, 25 bp, Homo sapien
ccgaattagtaacttccgctggaag

SEQ ID NO: 1373767 - DNA, 25 bp, Homo sapien
gagatgccatgacaacctttttcgg

SEQ ID NO: 1373768 - DNA, 25 bp, Homo sapien
tgaaaggtccatcaaaccgaagcat

SEQ ID NO: 1373769 - DNA, 25 bp, Homo sapien
taaaacaagggcataggcagaccaa

SEQ ID NO: 1373770 - DNA, 25 bp, Homo sapien
tcatccacatatctacagggtaggc

SEQ ID NO: 1373771 - DNA, 25 bp, Homo sapien
cagggtaggcaaccgaaatacatat

SEQ ID NO: 1373772 - DNA, 25 bp, Homo sapien
tttgctaggacaagcgaagaaccgc

SEQ ID NO: 1373773 - DNA, 25 bp, Homo sapien
caatgcgatggtcaagacaccggcg

SEQ ID NO: 1373774 - DNA, 25 bp, Homo sapien
tagaccgcgctggagaaaaggatga

SEQ ID NO: 1373775 - DNA, 25 bp, Homo sapien
ggtcactgggtgcatatcgccgtaa

SEQ ID NO: 1373776 - DNA, 25 bp, Homo sapien
ggtgaggccaggtcgctcctcctcg

SEQ ID NO: 1373777 - DNA, 25 bp, Homo sapien
cgggctccgcgtagccgtggttcac

SEQ ID NO: 1373778 - DNA, 25 bp, Homo sapien
cgtggttcaccagcgtgtgggcacc

SEQ ID NO: 1373779 - DNA, 25 bp, Homo sapien
gttgcagccaaagccgcgatgctct

SEQ ID NO: 1373780 - DNA, 25 bp, Homo sapien
tccatgcttgctgagatagatgtct

SEQ ID NO: 1373781 - DNA, 25 bp, Homo sapien
gcagaagcgctgaaaaatgtcagca

SEQ ID NO: 1373782 - DNA, 25 bp, Homo sapien
gcactgcagcgagcgcagaagcgct

SEQ ID NO: 1373783 - DNA, 25 bp, Homo sapien
gggctgccctgcagatccgagtctg

SEQ ID NO: 1373784 - DNA, 25 bp, Homo sapien
cactatcctgtagggaaagggccag

SEQ ID NO: 1373785 - DNA, 25 bp, Homo sapien
tgactgatacagcagtagccctgag

SEQ ID NO: 1373786 - DNA, 25 bp, Homo sapien
gagccagagccctctatgcctgtga

SEQ ID NO: 1373787 - DNA, 25 bp, Homo sapien
gaaggactaggttactggcccctga

SEQ ID NO: 1373788 - DNA, 25 bp, Homo sapien
caggctagtccagtgaagcagtagg

SEQ ID NO: 1373789 - DNA, 25 bp, Homo sapien
cagttagttgtaaccactgcatttg

SEQ ID NO: 1373790 - DNA, 25 bp, Homo sapien
atcagttagttgtaaccactgcatt

SEQ ID NO: 1373791 - DNA, 25 bp, Homo sapien
gttagttgtaaccactgcatttgga

SEQ ID NO: 1373792 - DNA, 25 bp, Homo sapien
cccagttgctcataggatttgcatc

SEQ ID NO: 1373793 - DNA, 25 bp, Homo sapien
tgacacacggtgaggatgattctcc

SEQ ID NO: 1373794 - DNA, 25 bp, Homo sapien
gctgctttctctgcgaatggttaag

SEQ ID NO: 1373795 - DNA, 25 bp, Homo sapien
gactggtgaccaacacaaagatggg

SEQ ID NO: 1373796 - DNA, 25 bp, Homo sapien
gcacagaagcggcaatcttttccag

SEQ ID NO: 1373797 - DNA, 25 bp, Homo sapien
agaagcggcaatcttttccagacat

SEQ ID NO: 1373798 - DNA, 25 bp, Homo sapien
gggagcacagaagcggcaatctttt

SEQ ID NO: 1373799 - DNA, 25 bp, Homo sapien
aagggagcacagaagcggcaatctt

SEQ ID NO: 1373800 - DNA, 25 bp, Homo sapien
tttttgctggattaacgattactgt

SEQ ID NO: 1373801 - DNA, 25 bp, Homo sapien
tccaccagatgaagcatttccggga

SEQ ID NO: 1373802 - DNA, 25 bp, Homo sapien
ccaccagatgaagcatttccgggat

SEQ ID NO: 1373803 - DNA, 25 bp, Homo sapien
tgctggattaacgattactgtatta

SEQ ID NO: 1373804 - DNA, 25 bp, Homo sapien
caatacatggctcttctggctcact

SEQ ID NO: 1373805 - DNA, 25 bp, Homo sapien
aaataaagtagtgtgtctggatccc

SEQ ID NO: 1373806 - DNA, 25 bp, Homo sapien
ttctctgtggaagggctgtacttct

SEQ ID NO: 1373807 - DNA, 25 bp, Homo sapien
cagagagctccataagaggaagttc

SEQ ID NO: 1373808 - DNA, 25 bp, Homo sapien
tgaaaatgggcagctacatccttgt

SEQ ID NO: 1373809 - DNA, 25 bp, Homo sapien
tcaatctttcttcacgctgggccct

SEQ ID NO: 1373810 - DNA, 25 bp, Homo sapien
gcagctacatccttgtctgtgttct

SEQ ID NO: 1373811 - DNA, 25 bp, Homo sapien
aatgggcagctacatccttgtctgt

SEQ ID NO: 1373812 - DNA, 25 bp, Homo sapien
cagtgaaagatgagcctgcttagac

SEQ ID NO: 1373813 - DNA, 25 bp, Homo sapien
ctatttcatatggctatccatttgc

SEQ ID NO: 1373814 - DNA, 25 bp, Homo sapien
atccatttgcaattccagtgaaaga

SEQ ID NO: 1373815 - DNA, 25 bp, Homo sapien
ccagtgaaagatgagcctgcttaga

SEQ ID NO: 1373816 - DNA, 25 bp, Homo sapien
gcttcatggcttcagaaagatacac

SEQ ID NO: 1373817 - DNA, 25 bp, Homo sapien
ctaataaatggtctgctcgtctgct

SEQ ID NO: 1373818 - DNA, 25 bp, Homo sapien
atagcctcttcgtatttgcctgcag

SEQ ID NO: 1373819 - DNA, 25 bp, Homo sapien
cagaaagatacactgcagccttttt

SEQ ID NO: 1373820 - DNA, 25 bp, Homo sapien
ctgcaagggagtgcgacgcagccac

SEQ ID NO: 1373821 - DNA, 25 bp, Homo sapien
caagggagtgcgacgcagccacgaa

SEQ ID NO: 1373822 - DNA, 25 bp, Homo sapien
tgcgacgcagccacgaagactgcgg

SEQ ID NO: 1373823 - DNA, 25 bp, Homo sapien
ggagtgcgacgcagccacgaagact

SEQ ID NO: 1373824 - DNA, 25 bp, Homo sapien
catagaatttgtaaggtaaacaaca

SEQ ID NO: 1373825 - DNA, 25 bp, Homo sapien
aacaacaatttcccgccagagtcat

SEQ ID NO: 1373826 - DNA, 25 bp, Homo sapien
aaacaacaatttcccgccagagtca

SEQ ID NO: 1373827 - DNA, 25 bp, Homo sapien
cttggtttcatagaatttgtaaggt

SEQ ID NO: 1373828 - DNA, 25 bp, Homo sapien
tctgccctgcatccaggtggtgagg

SEQ ID NO: 1373829 - DNA, 25 bp, Homo sapien
tccattctccatcatggggctctgc

SEQ ID NO: 1373830 - DNA, 25 bp, Homo sapien
ccattctccatcatggggctctgcc

SEQ ID NO: 1373831 - DNA, 25 bp, Homo sapien
cctgcatccaggtggtgaggcagtc

SEQ ID NO: 1373832 - DNA, 25 bp, Homo sapien
ctggtagagagtaagaggtaatgcc

SEQ ID NO: 1373833 - DNA, 25 bp, Homo sapien
ggcatatagtaggtgattcttcctc

SEQ ID NO: 1373834 - DNA, 25 bp, Homo sapien
catatagtaggtgattcttcctctc

SEQ ID NO: 1373835 - DNA, 25 bp, Homo sapien
tatagtaggtgattcttcctctctt

SEQ ID NO: 1373836 - DNA, 25 bp, Homo sapien
gcatatagtaggtgattcttcctct

SEQ ID NO: 1373837 - DNA, 25 bp, Homo sapien
cttctgtggaccctatgaaactgat

SEQ ID NO: 1373838 - DNA, 25 bp, Homo sapien
gaaactgatcacttcttttgtgact

SEQ ID NO: 1373839 - DNA, 25 bp, Homo sapien
tctgtggaccctatgaaactgatca

SEQ ID NO: 1373840 - DNA, 25 bp, Homo sapien
atgaaactgatcacttcttttgtga

SEQ ID NO: 1373841 - DNA, 25 bp, Homo sapien
tcagtgactgagaccattgcctttg

SEQ ID NO: 1373842 - DNA, 25 bp, Homo sapien
ctcagtgactgagaccattgccttt

SEQ ID NO: 1373843 - DNA, 25 bp, Homo sapien
cagtgactgagaccattgcctttgc

SEQ ID NO: 1373844 - DNA, 25 bp, Homo sapien
gatacgatctatgcaggtcagactg

SEQ ID NO: 1373845 - DNA, 25 bp, Homo sapien
tcccaggatacgatctatgcaggtc

SEQ ID NO: 1373846 - DNA, 25 bp, Homo sapien
gccccaggtaaactgctgtcccagg

SEQ ID NO: 1373847 - DNA, 25 bp, Homo sapien
tctatgcaggtcagactgtgctcca

SEQ ID NO: 1373848 - DNA, 25 bp, Homo sapien
caggtcctaggtccagctctgggtg

SEQ ID NO: 1373849 - DNA, 25 bp, Homo sapien
ctctgggtggggctatgcccaccat

SEQ ID NO: 1373850 - DNA, 25 bp, Homo sapien
caggcaggtcctaggtccagctctg

SEQ ID NO: 1373851 - DNA, 25 bp, Homo sapien
gcaggtcctaggtccagctctgggt

SEQ ID NO: 1373852 - DNA, 25 bp, Homo sapien
tattcttgaagagtaaggtcagttc

SEQ ID NO: 1373853 - DNA, 25 bp, Homo sapien
tgcatatttctacctaggaggacgg

SEQ ID NO: 1373854 - DNA, 25 bp, Homo sapien
ggaaatttctagtcacgcattgcct

SEQ ID NO: 1373855 - DNA, 25 bp, Homo sapien
catggacaggcctctagccgaggga

SEQ ID NO: 1373856 - DNA, 25 bp, Homo sapien
gcattttgggctttgggatctacct

SEQ ID NO: 1373857 - DNA, 25 bp, Homo sapien
ctcacgctgggcaatgtgtttgtca

SEQ ID NO: 1373858 - DNA, 25 bp, Homo sapien
tacctgctgatccacaacaacttcg

SEQ ID NO: 1373859 - DNA, 25 bp, Homo sapien
gtgtttgtcatcgtgggctctatta

SEQ ID NO: 1373860 - DNA, 25 bp, Homo sapien
tatcctgatttcaaccagtcactta

SEQ ID NO: 1373861 - DNA, 25 bp, Homo sapien
attagagggccttattgatgtgttc

SEQ ID NO: 1373862 - DNA, 25 bp, Homo sapien
gaagacttctggtattatctctcta

SEQ ID NO: 1373863 - DNA, 25 bp, Homo sapien
cagtcacttagctgataatcacagt

SEQ ID NO: 1373864 - DNA, 25 bp, Homo sapien
ccgtccccggtgagacattctcttg

SEQ ID NO: 1373865 - DNA, 25 bp, Homo sapien
gaaacttatcattctatcttccaaa

SEQ ID NO: 1373866 - DNA, 25 bp, Homo sapien
tcctagccagaagcctaggctttgt

SEQ ID NO: 1373867 - DNA, 25 bp, Homo sapien
ccatatgagtgagtgataacatcac

SEQ ID NO: 1373868 - DNA, 25 bp, Homo sapien
caatatgagagaggaaaattatagc

SEQ ID NO: 1373869 - DNA, 25 bp, Homo sapien
gagatctataacttgcaaagaacaa

SEQ ID NO: 1373870 - DNA, 25 bp, Homo sapien
gcttgacatatatcaatgcacataa

SEQ ID NO: 1373871 - DNA, 25 bp, Homo sapien
aagggactgggattagtttgagatc

SEQ ID NO: 1373872 - DNA, 25 bp, Homo sapien
taatgtatgattccagctatgagac

SEQ ID NO: 1373873 - DNA, 25 bp, Homo sapien
taagccaatgtgaaggctacctaat

SEQ ID NO: 1373874 - DNA, 25 bp, Homo sapien
caatggtgacaataaaaggatcagt

SEQ ID NO: 1373875 - DNA, 25 bp, Homo sapien
gacaataaaaggatcagtagttacc

SEQ ID NO: 1373876 - DNA, 25 bp, Homo sapien
gaaatacactcctaagtagccatga

SEQ ID NO: 1373877 - DNA, 25 bp, Homo sapien
cagataaaatgtaggagatgcagtt

SEQ ID NO: 1373878 - DNA, 25 bp, Homo sapien
cagttaaacaggtgccagagtgaca

SEQ ID NO: 1373879 - DNA, 25 bp, Homo sapien
gagctgagcattcaccttaggaagt

SEQ ID NO: 1373880 - DNA, 25 bp, Homo sapien
cagtagttttgggtaaagcagattt

SEQ ID NO: 1373881 - DNA, 25 bp, Homo sapien
tcagtagttttgggtaaagcagatt

SEQ ID NO: 1373882 - DNA, 25 bp, Homo sapien
ttaatgaactagtagtataaggaaa

SEQ ID NO: 1373883 - DNA, 25 bp, Homo sapien
ctcagtagttttgggtaaagcagat

SEQ ID NO: 1373884 - DNA, 25 bp, Homo sapien
gaataaatagggtatctgcgaagat

SEQ ID NO: 1373885 - DNA, 25 bp, Homo sapien
ccaatggaacctaagagaaagacta

SEQ ID NO: 1373886 - DNA, 25 bp, Homo sapien
tgtcaagatactgctgcggaaaaag

SEQ ID NO: 1373887 - DNA, 25 bp, Homo sapien
gaaatgtaccatgcttagagattgc

SEQ ID NO: 1373888 - DNA, 25 bp, Homo sapien
tgagtagtaccccacaaacacagac

SEQ ID NO: 1373889 - DNA, 25 bp, Homo sapien
tagagctaaggcgagggatagaccc

SEQ ID NO: 1373890 - DNA, 25 bp, Homo sapien
ggcataaaaccagacagacccatgg

SEQ ID NO: 1373891 - DNA, 25 bp, Homo sapien
tacagggtgtattttggcctacctc

SEQ ID NO: 1373892 - DNA, 25 bp, Homo sapien
cattgatgattactacgtgtcaggt

SEQ ID NO: 1373893 - DNA, 25 bp, Homo sapien
gctctcttgtgccttagaaccttta

SEQ ID NO: 1373894 - DNA, 25 bp, Homo sapien
tctaaagacaagtagagggctacaa

SEQ ID NO: 1373895 - DNA, 25 bp, Homo sapien
gctagaccttctagatgtctggata

SEQ ID NO: 1373896 - DNA, 25 bp, Homo sapien
gagagtgagtataagcaaagaggca

SEQ ID NO: 1373897 - DNA, 25 bp, Homo sapien
gaatgactagtcaatgaggcagaag

SEQ ID NO: 1373898 - DNA, 25 bp, Homo sapien
taaaagctctacagggtataacagc

SEQ ID NO: 1373899 - DNA, 25 bp, Homo sapien
caaagaggcaaaccgtggactgagt

SEQ ID NO: 1373900 - DNA, 25 bp, Homo sapien
gttctaaaattatagtgttgatggt

SEQ ID NO: 1373901 - DNA, 25 bp, Homo sapien
aaaacagctgttaatagaaagcagc

SEQ ID NO: 1373902 - DNA, 25 bp, Homo sapien
agctttttagtgcttgcctatggca

SEQ ID NO: 1373903 - DNA, 25 bp, Homo sapien
cataaggagaggtgatggggaatga

SEQ ID NO: 1373904 - DNA, 25 bp, Homo sapien
caatctcagtaacgtatgtacatag

SEQ ID NO: 1373905 - DNA, 25 bp, Homo sapien
ccttaaagttgtacaatcgactgat

SEQ ID NO: 1373906 - DNA, 25 bp, Homo sapien
tgcctgggaacacatcactataagc

SEQ ID NO: 1373907 - DNA, 25 bp, Homo sapien
taatgcctgagcaatttaggtaaag

SEQ ID NO: 1373908 - DNA, 25 bp, Homo sapien
tctcgaatggtttcttctaactccg

SEQ ID NO: 1373909 - DNA, 25 bp, Homo sapien
ctaactccggtggtgtcactgggaa

SEQ ID NO: 1373910 - DNA, 25 bp, Homo sapien
tgctgtgactcgtgagaatgttatg

SEQ ID NO: 1373911 - DNA, 25 bp, Homo sapien
tgcttctcatgggtatagtattcca

SEQ ID NO: 1373912 - DNA, 25 bp, Homo sapien
cttctttatgtgatccatcttctta

SEQ ID NO: 1373913 - DNA, 25 bp, Homo sapien
cccatttatgattgcgttataagca

SEQ ID NO: 1373914 - DNA, 25 bp, Homo sapien
atactgcttaggagttgggaaccgg

SEQ ID NO: 1373915 - DNA, 25 bp, Homo sapien
ggtgacattagcttccccatttatg

SEQ ID NO: 1373916 - DNA, 25 bp, Homo sapien
cacagcaggcacatatggaggattt

SEQ ID NO: 1373917 - DNA, 25 bp, Homo sapien
tagaaggcatactgactcaccacag

SEQ ID NO: 1373918 - DNA, 25 bp, Homo sapien
cgaaaaggtttactagtctctgatc

SEQ ID NO: 1373919 - DNA, 25 bp, Homo sapien
aaatgttactgctaaatgcaccggg

SEQ ID NO: 1373920 - DNA, 25 bp, Homo sapien
gcacactctcaaatccttagtaagg

SEQ ID NO: 1373921 - DNA, 25 bp, Homo sapien
aatgccttattacttcttccttgag

SEQ ID NO: 1373922 - DNA, 25 bp, Homo sapien
tgctaaaggaatcgaaaccttctcc

SEQ ID NO: 1373923 - DNA, 25 bp, Homo sapien
ccttgggcacctttatctgatgttg

SEQ ID NO: 1373924 - DNA, 25 bp, Homo sapien
tattgatctcctcatatactaaaaa

SEQ ID NO: 1373925 - DNA, 25 bp, Homo sapien
catgcatattgatctcctcatatac

SEQ ID NO: 1373926 - DNA, 25 bp, Homo sapien
tcttttacatgcatattgatctcct

SEQ ID NO: 1373927 - DNA, 25 bp, Homo sapien
tcacatatttttactaagctttgaa

SEQ ID NO: 1373928 - DNA, 25 bp, Homo sapien
taggcatatttttggatcgcgtccc

SEQ ID NO: 1373929 - DNA, 25 bp, Homo sapien
ggatcgatggtactcaatggtggca

SEQ ID NO: 1373930 - DNA, 25 bp, Homo sapien
tgtgatggcagaacatctgtcccct

SEQ ID NO: 1373931 - DNA, 25 bp, Homo sapien
tctgcccttagattggccatggaag

SEQ ID NO: 1373932 - DNA, 25 bp, Homo sapien
gcaaatgtttgcatggtgagtccat

SEQ ID NO: 1373933 - DNA, 25 bp, Homo sapien
gacgctggtacagatttcacttcag

SEQ ID NO: 1373934 - DNA, 25 bp, Homo sapien
taacggttggcatttgggaggcctc

SEQ ID NO: 1373935 - DNA, 25 bp, Homo sapien
gacttaacaggaacaagagatggcg

SEQ ID NO: 1373936 - DNA, 25 bp, Homo sapien
caattgaactgatgcacttgtggaa

SEQ ID NO: 1373937 - DNA, 25 bp, Homo sapien
gacttaggaattggaagtaattgca

SEQ ID NO: 1373938 - DNA, 25 bp, Homo sapien
gaactagtggtataagatttccaga

SEQ ID NO: 1373939 - DNA, 25 bp, Homo sapien
caatcgtctgaactacttggtacat

SEQ ID NO: 1373940 - DNA, 25 bp, Homo sapien
tacaacatactacatggtatataca

SEQ ID NO: 1373941 - DNA, 25 bp, Homo sapien
aatacaacatactacatggtatata

SEQ ID NO: 1373942 - DNA, 25 bp, Homo sapien
taaatacaacatactacatggtata

SEQ ID NO: 1373943 - DNA, 25 bp, Homo sapien
ataaatacaacatactacatggtat

SEQ ID NO: 1373944 - DNA, 25 bp, Homo sapien
tttcaggtaagcatacaactttggg

SEQ ID NO: 1373945 - DNA, 25 bp, Homo sapien
cttcgtgaaggagtaaactgaccac

SEQ ID NO: 1373946 - DNA, 25 bp, Homo sapien
gaaagcatactgagttcatccaggg

SEQ ID NO: 1373947 - DNA, 25 bp, Homo sapien
gaccacagaagatattagagttgcc

SEQ ID NO: 1373948 - DNA, 25 bp, Homo sapien
ggaatcccgaatgtactcccattgg

SEQ ID NO: 1373949 - DNA, 25 bp, Homo sapien
taaaatatctgccagtcactccagc

SEQ ID NO: 1373950 - DNA, 25 bp, Homo sapien
aattcctgcagggtagattatccta

SEQ ID NO: 1373951 - DNA, 25 bp, Homo sapien
cagctggacgcgaaaatcatctaca

SEQ ID NO: 1373952 - DNA, 25 bp, Homo sapien
tctcgagagggtgtatccccaggct

SEQ ID NO: 1373953 - DNA, 25 bp, Homo sapien
gagagaatcggcgtgagtctccgcc

SEQ ID NO: 1373954 - DNA, 25 bp, Homo sapien
ggacacctcatccagaaaagtggga

SEQ ID NO: 1373955 - DNA, 25 bp, Homo sapien
cactgaagccgatagctggagcaaa

SEQ ID NO: 1373956 - DNA, 25 bp, Homo sapien
tgtagcggttgtgacataagtgtga

SEQ ID NO: 1373957 - DNA, 25 bp, Homo sapien
tggccatagctgaacctttggcagc

SEQ ID NO: 1373958 - DNA, 25 bp, Homo sapien
caacagttgtgaagggttatggcca

SEQ ID NO: 1373959 - DNA, 25 bp, Homo sapien
tcttggtctgtaccaggttggtgta

SEQ ID NO: 1373960 - DNA, 25 bp, Homo sapien
gatgatgtcatatctatcaatgacc

SEQ ID NO: 1373961 - DNA, 25 bp, Homo sapien
tagaagcagttgtctgaggtgaaat

SEQ ID NO: 1373962 - DNA, 25 bp, Homo sapien
cagtccaagtctggagtagaagcag

SEQ ID NO: 1373963 - DNA, 25 bp, Homo sapien
gatcacgttgtctgagatgatgtca

SEQ ID NO: 1373964 - DNA, 25 bp, Homo sapien
gtgccagcagaccaatttcattcat

SEQ ID NO: 1373965 - DNA, 25 bp, Homo sapien
tgtgccagcagaccaatttcattca

SEQ ID NO: 1373966 - DNA, 25 bp, Homo sapien
ttgtgccagcagaccaatttcattc

SEQ ID NO: 1373967 - DNA, 25 bp, Homo sapien
attgtgccagcagaccaatttcatt

SEQ ID NO: 1373968 - DNA, 25 bp, Homo sapien
gatggtataggacctgtgaacaagg

SEQ ID NO: 1373969 - DNA, 25 bp, Homo sapien
ggcccttaggatggtataggacctg

SEQ ID NO: 1373970 - DNA, 25 bp, Homo sapien
gacctgtgaacaaggttaagcaaca

SEQ ID NO: 1373971 - DNA, 25 bp, Homo sapien
taggacctgtgaacaaggttaagca

SEQ ID NO: 1373972 - DNA, 25 bp, Homo sapien
ttctaagtgtagcagaaattggccc

SEQ ID NO: 1373973 - DNA, 25 bp, Homo sapien
tgctgcccgctttatgagtatagtc

SEQ ID NO: 1373974 - DNA, 25 bp, Homo sapien
tactggctactagacaaaaatatct

SEQ ID NO: 1373975 - DNA, 25 bp, Homo sapien
tagaaggtccttgttgtaaattgat

SEQ ID NO: 1373976 - DNA, 25 bp, Homo sapien
tttatcgacctgcacttcacagtgg

SEQ ID NO: 1373977 - DNA, 25 bp, Homo sapien
tggctacttggcctgctttccagct

SEQ ID NO: 1373978 - DNA, 25 bp, Homo sapien
gcacttcacagtggctacttggcct

SEQ ID NO: 1373979 - DNA, 25 bp, Homo sapien
ctgctggcagtatgggacctcttta

SEQ ID NO: 1373980 - DNA, 25 bp, Homo sapien
aaggctgaactctagtacatccaca

SEQ ID NO: 1373981 - DNA, 25 bp, Homo sapien
aattgagtggttgccatggtttaga

SEQ ID NO: 1373982 - DNA, 25 bp, Homo sapien
agtgagagaacctgatctgaaaagg

SEQ ID NO: 1373983 - DNA, 25 bp, Homo sapien
gaaatgaatagacagagcagagaat

SEQ ID NO: 1373984 - DNA, 25 bp, Homo sapien
acacaggctagggtgaagtgagtta

SEQ ID NO: 1373985 - DNA, 25 bp, Homo sapien
gctagggtgaagtgagttaatcatg

SEQ ID NO: 1373986 - DNA, 25 bp, Homo sapien
caggctagggtgaagtgagttaatc

SEQ ID NO: 1373987 - DNA, 25 bp, Homo sapien
gggtgaagtgagttaatcatggctc

SEQ ID NO: 1373988 - DNA, 25 bp, Homo sapien
tctgctgttgagacatagaggcatt

SEQ ID NO: 1373989 - DNA, 25 bp, Homo sapien
tattgtagtttactgagtttccaaa

SEQ ID NO: 1373990 - DNA, 25 bp, Homo sapien
ggcatttttctgatggtcaactgaa

SEQ ID NO: 1373991 - DNA, 25 bp, Homo sapien
tctaggattgatcactggtgcctca

SEQ ID NO: 1373992 - DNA, 25 bp, Homo sapien
tatcagccctggtaagattctagtg

SEQ ID NO: 1373993 - DNA, 25 bp, Homo sapien
taatctgttgatgtccgtggctttc

SEQ ID NO: 1373994 - DNA, 25 bp, Homo sapien
tatcattccctttggaggacacagt

SEQ ID NO: 1373995 - DNA, 25 bp, Homo sapien
tcaacactagacttacaagggtact

SEQ ID NO: 1373996 - DNA, 25 bp, Homo sapien
tccaatcatttgcatacccagaaaa

SEQ ID NO: 1373997 - DNA, 25 bp, Homo sapien
tctttacctgtacatacagagatcc

SEQ ID NO: 1373998 - DNA, 25 bp, Homo sapien
tccaaggagaaacaatccaatcatt

SEQ ID NO: 1373999 - DNA, 25 bp, Homo sapien
gtttttgtagatgcatgtatcacac

SEQ ID NO: 1374000 - DNA, 25 bp, Homo sapien
gttcaagactacttttacatgtaat

SEQ ID NO: 1374001 - DNA, 25 bp, Homo sapien
gcatgtagtttaattggattgccaa

SEQ ID NO: 1374002 - DNA, 25 bp, Homo sapien
ggttacatcctattaaaaaggctca

SEQ ID NO: 1374003 - DNA, 25 bp, Homo sapien
gaatttgggctctacaaaggttaca

SEQ ID NO: 1374004 - DNA, 25 bp, Homo sapien
tgcaagcatgtgtatgatagaccaa

SEQ ID NO: 1374005 - DNA, 25 bp, Homo sapien
gattaaaatttcacgccagagacta

SEQ ID NO: 1374006 - DNA, 25 bp, Homo sapien
caacacttaagccatggaagagccc

SEQ ID NO: 1374007 - DNA, 25 bp, Homo sapien
tagcttagtatctggcattgtggcc

SEQ ID NO: 1374008 - DNA, 25 bp, Homo sapien
ggatttactgactaatgctgattat

SEQ ID NO: 1374009 - DNA, 25 bp, Homo sapien
attatttagtcatggaaaatgtctc

SEQ ID NO: 1374010 - DNA, 25 bp, Homo sapien
tgcagactgattggtgcacgtcagg

SEQ ID NO: 1374011 - DNA, 25 bp, Homo sapien
aagtgctcctaacaaaacatgatct

SEQ ID NO: 1374012 - DNA, 25 bp, Homo sapien
gttactgtcagccttgattaagtgg

SEQ ID NO: 1374013 - DNA, 25 bp, Homo sapien
gattaagtggttgaaaatttcagag

SEQ ID NO: 1374014 - DNA, 25 bp, Homo sapien
gagaagaataagcaacttctgtgaa

SEQ ID NO: 1374015 - DNA, 25 bp, Homo sapien
tttccccaatccctgagaatcataa

SEQ ID NO: 1374016 - DNA, 25 bp, Homo sapien
ccgtgttcgttcattgttaataggg

SEQ ID NO: 1374017 - DNA, 25 bp, Homo sapien
gggcaaggtgcagtgtcatagaggg

SEQ ID NO: 1374018 - DNA, 25 bp, Homo sapien
gtgcagtgtcatagagggttaatcc

SEQ ID NO: 1374019 - DNA, 25 bp, Homo sapien
ggaaagtagccgtgttcgttcattg

SEQ ID NO: 1374020 - DNA, 25 bp, Homo sapien
caaggctaaatcttgctagcaatac

SEQ ID NO: 1374021 - DNA, 25 bp, Homo sapien
cctggactaagagaaggaagtctga

SEQ ID NO: 1374022 - DNA, 25 bp, Homo sapien
agttctcttagtctaccttcctgga

SEQ ID NO: 1374023 - DNA, 25 bp, Homo sapien
tcaaaaaggcgggagagttgcctat

SEQ ID NO: 1374024 - DNA, 25 bp, Homo sapien
gacatagaccattctgctgcagtag

SEQ ID NO: 1374025 - DNA, 25 bp, Homo sapien
aggaaaatgacatagaccattctgc

SEQ ID NO: 1374026 - DNA, 25 bp, Homo sapien
gctgcagtagtgatcatgtgaagca

SEQ ID NO: 1374027 - DNA, 25 bp, Homo sapien
gaaaatcacgaatgtaagtcaggaa

SEQ ID NO: 1374028 - DNA, 25 bp, Homo sapien
gaaaactcttctgccatcgcaatgc

SEQ ID NO: 1374029 - DNA, 25 bp, Homo sapien
tttaggggagtcaatttctcagaaa

SEQ ID NO: 1374030 - DNA, 25 bp, Homo sapien
tctgccatcgcaatgctcttcatat

SEQ ID NO: 1374031 - DNA, 25 bp, Homo sapien
actcttctgccatcgcaatgctctt

SEQ ID NO: 1374032 - DNA, 25 bp, Homo sapien
cactgtgcaaaactgatgagcaagt

SEQ ID NO: 1374033 - DNA, 25 bp, Homo sapien
ttctaaatcagtcccaaaattgcca

SEQ ID NO: 1374034 - DNA, 25 bp, Homo sapien
ctgtgcaaaactgatgagcaagtca

SEQ ID NO: 1374035 - DNA, 25 bp, Homo sapien
tcccaaaattgccactgtgcaaaac

SEQ ID NO: 1374036 - DNA, 25 bp, Homo sapien
taggaaaggatggtctgaacaaaca

SEQ ID NO: 1374037 - DNA, 25 bp, Homo sapien
gataaccaacaacagtctgatccag

SEQ ID NO: 1374038 - DNA, 25 bp, Homo sapien
tccacaccagataaccaacaacagt

SEQ ID NO: 1374039 - DNA, 25 bp, Homo sapien
tctgatccagaagacttgtttgcca

SEQ ID NO: 1374040 - DNA, 25 bp, Homo sapien
caaaggtaagcacagctccacttac

SEQ ID NO: 1374041 - DNA, 25 bp, Homo sapien
accaaaggtaagcacagctccactt

SEQ ID NO: 1374042 - DNA, 25 bp, Homo sapien
ccaaaggtaagcacagctccactta

SEQ ID NO: 1374043 - DNA, 25 bp, Homo sapien
cctctaagtaggtagtgaagacact

SEQ ID NO: 1374044 - DNA, 25 bp, Homo sapien
tggcctcccgaactttgacagaata

SEQ ID NO: 1374045 - DNA, 25 bp, Homo sapien
aaaatattctcccttggctctagct

SEQ ID NO: 1374046 - DNA, 25 bp, Homo sapien
cagtgctgggaatagggagtttcca

SEQ ID NO: 1374047 - DNA, 25 bp, Homo sapien
gaacaacatatacaaatttgtttta

SEQ ID NO: 1374048 - DNA, 25 bp, Homo sapien
tttttctgaacaacatatacaaatt

SEQ ID NO: 1374049 - DNA, 25 bp, Homo sapien
tctgaacaacatatacaaatttgtt

SEQ ID NO: 1374050 - DNA, 25 bp, Homo sapien
tttctgaacaacatatacaaatttg

SEQ ID NO: 1374051 - DNA, 25 bp, Homo sapien
tatttgtggcacagacagctagcta

SEQ ID NO: 1374052 - DNA, 25 bp, Homo sapien
tgtgtgggtgctatcaagaactgct

SEQ ID NO: 1374053 - DNA, 25 bp, Homo sapien
catagtataaagtggctgctgggaa

SEQ ID NO: 1374054 - DNA, 25 bp, Homo sapien
tacacggccataagtactcttgtga

SEQ ID NO: 1374055 - DNA, 25 bp, Homo sapien
tgtcctgtggatcctaaaaaagtta

SEQ ID NO: 1374056 - DNA, 25 bp, Homo sapien
tgctccacagctatgaattcccact

SEQ ID NO: 1374057 - DNA, 25 bp, Homo sapien
tacaaggcaggacacctaggaatgc

SEQ ID NO: 1374058 - DNA, 25 bp, Homo sapien
tcctataaatcaccctgcctgaagt

SEQ ID NO: 1374059 - DNA, 25 bp, Homo sapien
aagtacaaggccagccttgtttaat

SEQ ID NO: 1374060 - DNA, 25 bp, Homo sapien
gtcctaaacaactcagtattccaag

SEQ ID NO: 1374061 - DNA, 25 bp, Homo sapien
aatttgatgataacgttctcttcag

SEQ ID NO: 1374062 - DNA, 25 bp, Homo sapien
gagcatgaacttgcttataacgaac

SEQ ID NO: 1374063 - DNA, 25 bp, Homo sapien
tacaacttggctcagtaagacatag

SEQ ID NO: 1374064 - DNA, 25 bp, Homo sapien
cagtcaagaactagctaaatcaaat

SEQ ID NO: 1374065 - DNA, 25 bp, Homo sapien
agacatagtagccaattacacaggg

SEQ ID NO: 1374066 - DNA, 25 bp, Homo sapien
attgccagacaattcaacagtgtag

SEQ ID NO: 1374067 - DNA, 25 bp, Homo sapien
agtaacactccagtgttgaaagaag

SEQ ID NO: 1374068 - DNA, 25 bp, Homo sapien
agtaaaacaagtaacactccagtgt

SEQ ID NO: 1374069 - DNA, 25 bp, Homo sapien
gtagcaatttggctattatcatgtt

SEQ ID NO: 1374070 - DNA, 25 bp, Homo sapien
agcaatttggctattatcatgttaa

SEQ ID NO: 1374071 - DNA, 25 bp, Homo sapien
ataaaactgccgcaatatttagcat

SEQ ID NO: 1374072 - DNA, 25 bp, Homo sapien
ttctggagctactgtaccagtgtca

SEQ ID NO: 1374073 - DNA, 25 bp, Homo sapien
tttctggagctactgtaccagtgtc

SEQ ID NO: 1374074 - DNA, 25 bp, Homo sapien
cagcattgcaatgtatccacctgca

SEQ ID NO: 1374075 - DNA, 25 bp, Homo sapien
agcattgcaatgtatccacctgcat

SEQ ID NO: 1374076 - DNA, 25 bp, Homo sapien
cacagcattgcaatgtatccacctg

SEQ ID NO: 1374077 - DNA, 25 bp, Homo sapien
cacacagcattgcaatgtatccacc

SEQ ID NO: 1374078 - DNA, 25 bp, Homo sapien
cccagtggctagtcactcccttggg

SEQ ID NO: 1374079 - DNA, 25 bp, Homo sapien
catgcagtaccaccaaggaagtgaa

SEQ ID NO: 1374080 - DNA, 25 bp, Homo sapien
tattacagtagtccctcggtatctg

SEQ ID NO: 1374081 - DNA, 25 bp, Homo sapien
tgtggattcaacgaagtacttggca

SEQ ID NO: 1374082 - DNA, 25 bp, Homo sapien
gtacttggcacctggcaaactcaag

SEQ ID NO: 1374083 - DNA, 25 bp, Homo sapien
tcaatgttaaaataagaatgagaca

SEQ ID NO: 1374084 - DNA, 25 bp, Homo sapien
ttgtaatgccaatgtaaaatctgat

SEQ ID NO: 1374085 - DNA, 25 bp, Homo sapien
aagagtctcctatacaaagaataca

SEQ ID NO: 1374086 - DNA, 25 bp, Homo sapien
tgttgacttcaatgttaaaataaga

SEQ ID NO: 1374087 - DNA, 25 bp, Homo sapien
ctgatataaggtaaagccgggtcta

SEQ ID NO: 1374088 - DNA, 25 bp, Homo sapien
taaagccgggtctatatggtggagt

SEQ ID NO: 1374089 - DNA, 25 bp, Homo sapien
cagatgtccaaattacaagggctga

SEQ ID NO: 1374090 - DNA, 25 bp, Homo sapien
tatatggtggagtgttactgcagta

SEQ ID NO: 1374091 - DNA, 25 bp, Homo sapien
tccagtcttgaccaaaccaatctag

SEQ ID NO: 1374092 - DNA, 25 bp, Homo sapien
catgcccggtctgtctttacttatc

SEQ ID NO: 1374093 - DNA, 25 bp, Homo sapien
taacgtggtccataaggtccttgca

SEQ ID NO: 1374094 - DNA, 25 bp, Homo sapien
tatattcacctctgggccatgcttg

SEQ ID NO: 1374095 - DNA, 25 bp, Homo sapien
ttactctggccatctgatttgttgc

SEQ ID NO: 1374096 - DNA, 25 bp, Homo sapien
tagaatactcctatgaatgtgagaa

SEQ ID NO: 1374097 - DNA, 25 bp, Homo sapien
ccatgaactttgtgaatacttacag

SEQ ID NO: 1374098 - DNA, 25 bp, Homo sapien
tcagtccttaacatcccatcaatat

SEQ ID NO: 1374099 - DNA, 25 bp, Homo sapien
gatggcagaccctccagtttcaagt

SEQ ID NO: 1374100 - DNA, 25 bp, Homo sapien
gaaccttgaatgagtgatggcagac

SEQ ID NO: 1374101 - DNA, 25 bp, Homo sapien
agtatggcacattaccaacccgggc

SEQ ID NO: 1374102 - DNA, 25 bp, Homo sapien
gagtctatgtcagtttagctgtccc

SEQ ID NO: 1374103 - DNA, 25 bp, Homo sapien
gagatttccctgtctttcgtagaag

SEQ ID NO: 1374104 - DNA, 25 bp, Homo sapien
taagcatagcagaggaccttaccca

SEQ ID NO: 1374105 - DNA, 25 bp, Homo sapien
tggcacccattgacattgaagcatg

SEQ ID NO: 1374106 - DNA, 25 bp, Homo sapien
tttacctcaactaccatggaatggc

SEQ ID NO: 1374107 - DNA, 25 bp, Homo sapien
tgttatcaacacagattgtaccatc

SEQ ID NO: 1374108 - DNA, 25 bp, Homo sapien
atctgctatagcaaccactgctaca

SEQ ID NO: 1374109 - DNA, 25 bp, Homo sapien
ataatgttatcaacacagattgtac

SEQ ID NO: 1374110 - DNA, 25 bp, Homo sapien
tatcaacacagattgtaccatctgc

SEQ ID NO: 1374111 - DNA, 25 bp, Homo sapien
gtcttcagacctgctcatacctgca

SEQ ID NO: 1374112 - DNA, 25 bp, Homo sapien
tgttttacaacttcacaaaatgtta

SEQ ID NO: 1374113 - DNA, 25 bp, Homo sapien
caacttcacaaaatgttagtcttca

SEQ ID NO: 1374114 - DNA, 25 bp, Homo sapien
aaatgttagtcttcagacctgctca

SEQ ID NO: 1374115 - DNA, 25 bp, Homo sapien
gaagattcttggtaactgcttcaac

SEQ ID NO: 1374116 - DNA, 25 bp, Homo sapien
aacaggaacgtgtactcaacaggaa

SEQ ID NO: 1374117 - DNA, 25 bp, Homo sapien
actcaattagcttttgtgggaaagg

SEQ ID NO: 1374118 - DNA, 25 bp, Homo sapien
caggaacgtgtactcaattagcttt

SEQ ID NO: 1374119 - DNA, 25 bp, Homo sapien
gtttgaggatctccgctccgctttg

SEQ ID NO: 1374120 - DNA, 25 bp, Homo sapien
cgctgattttctccggaagcgcgaa

SEQ ID NO: 1374121 - DNA, 25 bp, Homo sapien
cactaggccgtttgaggatctccgc

SEQ ID NO: 1374122 - DNA, 25 bp, Homo sapien
cggaagcgcgaagcactaggccgtt

SEQ ID NO: 1374123 - DNA, 25 bp, Homo sapien
aagacgcgagagacggaactcggca

SEQ ID NO: 1374124 - DNA, 25 bp, Homo sapien
ctgggaccaggaaaagacgcgagag

SEQ ID NO: 1374125 - DNA, 25 bp, Homo sapien
gagagacggaactcggcatcaggca

SEQ ID NO: 1374126 - DNA, 25 bp, Homo sapien
accaggaaaagacgcgagagacgga

SEQ ID NO: 1374127 - DNA, 25 bp, Homo sapien
ctctgacgcacccttctagagggag

SEQ ID NO: 1374128 - DNA, 25 bp, Homo sapien
cccctctggcgcctggcataaggta

SEQ ID NO: 1374129 - DNA, 25 bp, Homo sapien
cagcaggagtctcgcgcgcctgcga

SEQ ID NO: 1374130 - DNA, 25 bp, Homo sapien
ccccggaggcaatgagggccagcag

SEQ ID NO: 1374131 - DNA, 25 bp, Homo sapien
ctagcgctggccgctggcgccgaag

SEQ ID NO: 1374132 - DNA, 25 bp, Homo sapien
gcgctggccgctggcgccgaagccc

SEQ ID NO: 1374133 - DNA, 25 bp, Homo sapien
agcgctggccgctggcgccgaagcc

SEQ ID NO: 1374134 - DNA, 25 bp, Homo sapien
tagcgctggccgctggcgccgaagc

SEQ ID NO: 1374135 - DNA, 25 bp, Homo sapien
gcgcctgcggcgctgctcgttcaaa

SEQ ID NO: 1374136 - DNA, 25 bp, Homo sapien
gggcgcgctcacggcaccgaggagc

SEQ ID NO: 1374137 - DNA, 25 bp, Homo sapien
acggcaccgaggagcgcgcctgcgg

SEQ ID NO: 1374138 - DNA, 25 bp, Homo sapien
cgcgctcccgagcagaccggccggc

SEQ ID NO: 1374139 - DNA, 25 bp, Homo sapien
tgttcccctttacggcaatcgcgaa

SEQ ID NO: 1374140 - DNA, 25 bp, Homo sapien
cgtgaacgtgctgccgccgatcagt

SEQ ID NO: 1374141 - DNA, 25 bp, Homo sapien
cagtcacccagtcggctggagtcgg

SEQ ID NO: 1374142 - DNA, 25 bp, Homo sapien
tacggcaatcgcgaaagtgtcgtga

SEQ ID NO: 1374143 - DNA, 25 bp, Homo sapien
tggagagaggactggatgctctggg

SEQ ID NO: 1374144 - DNA, 25 bp, Homo sapien
gcgggtcattaggatatagctgtgt

SEQ ID NO: 1374145 - DNA, 25 bp, Homo sapien
tatagctgtgtatggactcgcgcga

SEQ ID NO: 1374146 - DNA, 25 bp, Homo sapien
tcaccggacgtgaaggatttgaagg

SEQ ID NO: 1374147 - DNA, 25 bp, Homo sapien
gcctcgcgcgcggggttgtggggag

SEQ ID NO: 1374148 - DNA, 25 bp, Homo sapien
aggcgaggggcgactgcccccttgc

SEQ ID NO: 1374149 - DNA, 25 bp, Homo sapien
cctcgcgcgcggggttgtggggagg

SEQ ID NO: 1374150 - DNA, 25 bp, Homo sapien
gaggcgaggggcgactgcccccttg

SEQ ID NO: 1374151 - DNA, 25 bp, Homo sapien
ttaattgttctattttctccattct

SEQ ID NO: 1374152 - DNA, 25 bp, Homo sapien
tgttctattttctccattctgattc

SEQ ID NO: 1374153 - DNA, 25 bp, Homo sapien
attgttctattttctccattctgat

SEQ ID NO: 1374154 - DNA, 25 bp, Homo sapien
ttctattttctccattctgattcat

SEQ ID NO: 1374155 - DNA, 25 bp, Homo sapien
tgaaaatactcttgtatttcctcat

SEQ ID NO: 1374156 - DNA, 25 bp, Homo sapien
ttgaaaatactcttgtatttcctca

SEQ ID NO: 1374157 - DNA, 25 bp, Homo sapien
cttgaaaatactcttgtatttcctc

SEQ ID NO: 1374158 - DNA, 25 bp, Homo sapien
tgtcttgcaacttggtatatgttaa

SEQ ID NO: 1374159 - DNA, 25 bp, Homo sapien
cttgcaacttggtatatgttaatat

SEQ ID NO: 1374160 - DNA, 25 bp, Homo sapien
agctagtagctttgattttagtgtc

SEQ ID NO: 1374161 - DNA, 25 bp, Homo sapien
gctagtagctttgattttagtgtca

SEQ ID NO: 1374162 - DNA, 25 bp, Homo sapien
tgtgcgcactggcaaacgtatgttt

SEQ ID NO: 1374163 - DNA, 25 bp, Homo sapien
gagagcagcgccctaatccaatatt

SEQ ID NO: 1374164 - DNA, 25 bp, Homo sapien
gagatatcagaacctcccagccagt

SEQ ID NO: 1374165 - DNA, 25 bp, Homo sapien
gaagcaagtaagtcggtccgtctgg

SEQ ID NO: 1374166 - DNA, 25 bp, Homo sapien
cagaataaagcaagcagagtttttc

SEQ ID NO: 1374167 - DNA, 25 bp, Homo sapien
tactagttctgcttgagtttacagc

SEQ ID NO: 1374168 - DNA, 25 bp, Homo sapien
tgatgctaaagtcaattctcctgtt

SEQ ID NO: 1374169 - DNA, 25 bp, Homo sapien
agtcttcctgttggtatgtcacaaa

SEQ ID NO: 1374170 - DNA, 25 bp, Homo sapien
ctttctccaaagacctgtagcttta

SEQ ID NO: 1374171 - DNA, 25 bp, Homo sapien
tctccaaagacctgtagctttatgc

SEQ ID NO: 1374172 - DNA, 25 bp, Homo sapien
ccttacactgtcttctggtactttc

SEQ ID NO: 1374173 - DNA, 25 bp, Homo sapien
caaagacctgtagctttatgctcat

SEQ ID NO: 1374174 - DNA, 25 bp, Homo sapien
tgaacgagcttggaccttgatttcc

SEQ ID NO: 1374175 - DNA, 25 bp, Homo sapien
taatctgttgcgtaactctctctgg

SEQ ID NO: 1374176 - DNA, 25 bp, Homo sapien
gaacgttaggactattccagggcta

SEQ ID NO: 1374177 - DNA, 25 bp, Homo sapien
aaccagactgtgtgcgtttgaccca

SEQ ID NO: 1374178 - DNA, 25 bp, Homo sapien
caggatatgggtctgtgcacaaaga

SEQ ID NO: 1374179 - DNA, 25 bp, Homo sapien
tcgacctgtcacataagctcaagtg

SEQ ID NO: 1374180 - DNA, 25 bp, Homo sapien
gtaatgcacttagttcttggcccca

SEQ ID NO: 1374181 - DNA, 25 bp, Homo sapien
tagtggagcagcacaatagcatcac

SEQ ID NO: 1374182 - DNA, 25 bp, Homo sapien
cagtgcagatgtcttcataaggctg

SEQ ID NO: 1374183 - DNA, 25 bp, Homo sapien
ttctgagattgaggccataaaatgg

SEQ ID NO: 1374184 - DNA, 25 bp, Homo sapien
cataaggctgattccagaagatcag

SEQ ID NO: 1374185 - DNA, 25 bp, Homo sapien
caaatactacatattgagctctcac

SEQ ID NO: 1374186 - DNA, 25 bp, Homo sapien
cagtgcttgttttatacattgcaag

SEQ ID NO: 1374187 - DNA, 25 bp, Homo sapien
cagttgtcttcatgcataaaagtca

SEQ ID NO: 1374188 - DNA, 25 bp, Homo sapien
ggaactatgttctatcatatcactc

SEQ ID NO: 1374189 - DNA, 25 bp, Homo sapien
tccttttagaatgccttggaactat

SEQ ID NO: 1374190 - DNA, 25 bp, Homo sapien
tctggaattcagttaaggcaactag

SEQ ID NO: 1374191 - DNA, 25 bp, Homo sapien
cccacattctttggaggaaagtgtc

SEQ ID NO: 1374192 - DNA, 25 bp, Homo sapien
tattaagccataagggactttctgg

SEQ ID NO: 1374193 - DNA, 25 bp, Homo sapien
tcatttggtcagactgaagacgttc

SEQ ID NO: 1374194 - DNA, 25 bp, Homo sapien
agtctggagagttttcacctggctg

SEQ ID NO: 1374195 - DNA, 25 bp, Homo sapien
cttcatggtatgagtctggagagtt

SEQ ID NO: 1374196 - DNA, 25 bp, Homo sapien
tttcacctggctgtaggacagacac

SEQ ID NO: 1374197 - DNA, 25 bp, Homo sapien
gtggatgcactttggccacctttga

SEQ ID NO: 1374198 - DNA, 25 bp, Homo sapien
gcctgttctttttgacttgagggag

SEQ ID NO: 1374199 - DNA, 25 bp, Homo sapien
ggctatttctaaagagtggatgcac

SEQ ID NO: 1374200 - DNA, 25 bp, Homo sapien
caagcagacctgacataaagatgtc

SEQ ID NO: 1374201 - DNA, 25 bp, Homo sapien
gacttgggattcctttgactcgagc

SEQ ID NO: 1374202 - DNA, 25 bp, Homo sapien
aatgtgggggctagatgtttcttca

SEQ ID NO: 1374203 - DNA, 25 bp, Homo sapien
ttgactcgagcttttccttcacttt

SEQ ID NO: 1374204 - DNA, 25 bp, Homo sapien
tcattgctaatgtgggggctagatg

SEQ ID NO: 1374205 - DNA, 25 bp, Homo sapien
tctctatggagtcaaaagtgggagg

SEQ ID NO: 1374206 - DNA, 25 bp, Homo sapien
taccctggccctaatacagggctgt

SEQ ID NO: 1374207 - DNA, 25 bp, Homo sapien
gaaccaggaaactagccacagtatt

SEQ ID NO: 1374208 - DNA, 25 bp, Homo sapien
cagggctgtccctgtaatagaataa

SEQ ID NO: 1374209 - DNA, 25 bp, Homo sapien
gcagatttttatatctagtcgcaac

SEQ ID NO: 1374210 - DNA, 25 bp, Homo sapien
tatgcacaatagtagaatctgtttg

SEQ ID NO: 1374211 - DNA, 25 bp, Homo sapien
tactagctgcctgtatcctaacaat

SEQ ID NO: 1374212 - DNA, 25 bp, Homo sapien
cattgtgaatgccttcttaattgcc

SEQ ID NO: 1374213 - DNA, 25 bp, Homo sapien
ggttcactgttgcaagaccactggg

SEQ ID NO: 1374214 - DNA, 25 bp, Homo sapien
tgcactttgtactgtagcagggacc

SEQ ID NO: 1374215 - DNA, 25 bp, Homo sapien
tatagaaattgctgcctatcaggca

SEQ ID NO: 1374216 - DNA, 25 bp, Homo sapien
gaaatcctcagtttgtgcctaatga

SEQ ID NO: 1374217 - DNA, 25 bp, Homo sapien
gacacagcattcataggtccggcac

SEQ ID NO: 1374218 - DNA, 25 bp, Homo sapien
cataggttgcacacatgacgaaaag

SEQ ID NO: 1374219 - DNA, 25 bp, Homo sapien
tatattgtactttggattgccctgg

SEQ ID NO: 1374220 - DNA, 25 bp, Homo sapien
tctggacactcaaattaaggcttct

SEQ ID NO: 1374221 - DNA, 25 bp, Homo sapien
cctaaacgggtgctgagaatgtctc

SEQ ID NO: 1374222 - DNA, 25 bp, Homo sapien
gaatcagcatactacaccctgtggg

SEQ ID NO: 1374223 - DNA, 25 bp, Homo sapien
gatttgatccgctactgtgtcagtg

SEQ ID NO: 1374224 - DNA, 25 bp, Homo sapien
catcgggcagggctcataaattgca

SEQ ID NO: 1374225 - DNA, 25 bp, Homo sapien
ttggtatataggaacatcatgtttt

SEQ ID NO: 1374226 - DNA, 25 bp, Homo sapien
ttaatgatgtaattggtatatagga

SEQ ID NO: 1374227 - DNA, 25 bp, Homo sapien
taatgatgtaattggtatataggaa

SEQ ID NO: 1374228 - DNA, 25 bp, Homo sapien
catcattaatgatgtaattggtata

SEQ ID NO: 1374229 - DNA, 25 bp, Homo sapien
ggtttgggccaagaaagcatgcaga

SEQ ID NO: 1374230 - DNA, 25 bp, Homo sapien
gatacatcccactagcttgtgaggt

SEQ ID NO: 1374231 - DNA, 25 bp, Homo sapien
ggtaacacgccctaactatcctgtg

SEQ ID NO: 1374232 - DNA, 25 bp, Homo sapien
tatgttgtcatgcagggtttgggcc

SEQ ID NO: 1374233 - DNA, 25 bp, Homo sapien
tccttgctagcaattgttcgaatat

SEQ ID NO: 1374234 - DNA, 25 bp, Homo sapien
ttccttgctagcaattgttcgaata

SEQ ID NO: 1374235 - DNA, 25 bp, Homo sapien
tttccttgctagcaattgttcgaat

SEQ ID NO: 1374236 - DNA, 25 bp, Homo sapien
cccggagaggttaaatggcatgcca

SEQ ID NO: 1374237 - DNA, 25 bp, Homo sapien
tcctggtgcagtgttctctcctatg

SEQ ID NO: 1374238 - DNA, 25 bp, Homo sapien
actatctatagtggaaattgaggcc

SEQ ID NO: 1374239 - DNA, 25 bp, Homo sapien
gaccaagtattaaaagctaggacag

SEQ ID NO: 1374240 - DNA, 25 bp, Homo sapien
caaattactctagactgaagctgct

SEQ ID NO: 1374241 - DNA, 25 bp, Homo sapien
gggaaacagacctacgtatggaagc

SEQ ID NO: 1374242 - DNA, 25 bp, Homo sapien
cctctgcaaaaaatggagctctgag

SEQ ID NO: 1374243 - DNA, 25 bp, Homo sapien
gaggctgagcctttcgaccacaaag

SEQ ID NO: 1374244 - DNA, 25 bp, Homo sapien
ctgttcctcatattcaagtattttc

SEQ ID NO: 1374245 - DNA, 25 bp, Homo sapien
tcaagtattttctgttggaaatagc

SEQ ID NO: 1374246 - DNA, 25 bp, Homo sapien
tcttctgttcctcatattcaagtat

SEQ ID NO: 1374247 - DNA, 25 bp, Homo sapien
catattcaagtattttctgttggaa

SEQ ID NO: 1374248 - DNA, 25 bp, Homo sapien
tgtgggttcaaatacaggtgttaga

SEQ ID NO: 1374249 - DNA, 25 bp, Homo sapien
ctgtgggttcaaatacaggtgttag

SEQ ID NO: 1374250 - DNA, 25 bp, Homo sapien
aatacaggtgttagaggcatctgat

SEQ ID NO: 1374251 - DNA, 25 bp, Homo sapien
ttcaaatacaggtgttagaggcatc

SEQ ID NO: 1374252 - DNA, 25 bp, Homo sapien
gcttagactgatggggactgttact

SEQ ID NO: 1374253 - DNA, 25 bp, Homo sapien
ggcttagactgatggggactgttac

SEQ ID NO: 1374254 - DNA, 25 bp, Homo sapien
tgggcttagactgatggggactgtt

SEQ ID NO: 1374255 - DNA, 25 bp, Homo sapien
ctatgggcttagactgatggggact

SEQ ID NO: 1374256 - DNA, 25 bp, Homo sapien
tcttctcggcttcctggatgaaaag

SEQ ID NO: 1374257 - DNA, 25 bp, Homo sapien
cacaaatcggcggttggtcttggag

SEQ ID NO: 1374258 - DNA, 25 bp, Homo sapien
tttgcctcccgcttgatataggaag

SEQ ID NO: 1374259 - DNA, 25 bp, Homo sapien
gggcctgaaacatgctcgttgattt

SEQ ID NO: 1374260 - DNA, 25 bp, Homo sapien
tagggctggtctaggactactgaat

SEQ ID NO: 1374261 - DNA, 25 bp, Homo sapien
tgcactgcctggagagacccaaaat

SEQ ID NO: 1374262 - DNA, 25 bp, Homo sapien
ttcttgcaggcggaaagctcctggg

SEQ ID NO: 1374263 - DNA, 25 bp, Homo sapien
taggttctaggcctctagggctggt

SEQ ID NO: 1374264 - DNA, 25 bp, Homo sapien
gatgtcatcctgaagcttcggtggc

SEQ ID NO: 1374265 - DNA, 25 bp, Homo sapien
cccctgaccaagagagtctaagatg

SEQ ID NO: 1374266 - DNA, 25 bp, Homo sapien
cttcggtggcaggatgtctttttca

SEQ ID NO: 1374267 - DNA, 25 bp, Homo sapien
ttaactcattgatcccctgaccaag

SEQ ID NO: 1374268 - DNA, 25 bp, Homo sapien
tccttcacaaagattgaccagcagg

SEQ ID NO: 1374269 - DNA, 25 bp, Homo sapien
ttccttcacaaagattgaccagcag

SEQ ID NO: 1374270 - DNA, 25 bp, Homo sapien
ccccagaggatttaccgtcttgatt

SEQ ID NO: 1374271 - DNA, 25 bp, Homo sapien
aggatttaccgtcttgatttctgcc

SEQ ID NO: 1374272 - DNA, 25 bp, Homo sapien
ctttcttcatagacccccagaggat

SEQ ID NO: 1374273 - DNA, 25 bp, Homo sapien
gaaataaacatagactggctttctc

SEQ ID NO: 1374274 - DNA, 25 bp, Homo sapien
caagatggagaaatcacagccagtc

SEQ ID NO: 1374275 - DNA, 25 bp, Homo sapien
ttgatctcaagcaacagtcccgtga

SEQ ID NO: 1374276 - DNA, 25 bp, Homo sapien
gtcccgtgaggcagatacaatctcc

SEQ ID NO: 1374277 - DNA, 25 bp, Homo sapien
gctgcccgaggtcatactatgctgc

SEQ ID NO: 1374278 - DNA, 25 bp, Homo sapien
caacagggatgtaggtgtgcgccca

SEQ ID NO: 1374279 - DNA, 25 bp, Homo sapien
gcatttgtactccaaccatgaaggg

SEQ ID NO: 1374280 - DNA, 25 bp, Homo sapien
gctggaagcgcatttgtactccaac

SEQ ID NO: 1374281 - DNA, 25 bp, Homo sapien
agcatggatgcactgagacaaggtg

SEQ ID NO: 1374282 - DNA, 25 bp, Homo sapien
gatatgaatagaaggtctaccccta

SEQ ID NO: 1374283 - DNA, 25 bp, Homo sapien
ctgacttctgttgagtccctaacat

SEQ ID NO: 1374284 - DNA, 25 bp, Homo sapien
ttctccctccccagatatgaataga

SEQ ID NO: 1374285 - DNA, 25 bp, Homo sapien
agggttgtcaacctaaaatcactgg

SEQ ID NO: 1374286 - DNA, 25 bp, Homo sapien
cctcagccttgcaagggcagaatca

SEQ ID NO: 1374287 - DNA, 25 bp, Homo sapien
tccccaagctaagtcaggagcattc

SEQ ID NO: 1374288 - DNA, 25 bp, Homo sapien
tgtaattccgcatccccttcaggtg

SEQ ID NO: 1374289 - DNA, 25 bp, Homo sapien
caatgcttggcatctggcaaccagt

SEQ ID NO: 1374290 - DNA, 25 bp, Homo sapien
tccgccaggaagatgatttttctct

SEQ ID NO: 1374291 - DNA, 25 bp, Homo sapien
aagtatctgttcaaaactgagacag

SEQ ID NO: 1374292 - DNA, 25 bp, Homo sapien
gaccttccgccaggaagatgatttt

SEQ ID NO: 1374293 - DNA, 25 bp, Homo sapien
ctgagaccttccgccaggaagatga

SEQ ID NO: 1374294 - DNA, 25 bp, Homo sapien
ttaaaacgatagcattcccctgtgc

SEQ ID NO: 1374295 - DNA, 25 bp, Homo sapien
cagatggacgctgtaaggtagagac

SEQ ID NO: 1374296 - DNA, 25 bp, Homo sapien
gacttacagctccaaaaggtcaggg

SEQ ID NO: 1374297 - DNA, 25 bp, Homo sapien
tcttggtggcttgagcagtaactag

SEQ ID NO: 1374298 - DNA, 25 bp, Homo sapien
cctgagtcggggatgaagctcttga

SEQ ID NO: 1374299 - DNA, 25 bp, Homo sapien
tctcggaggccctgcatgaacgggt

SEQ ID NO: 1374300 - DNA, 25 bp, Homo sapien
tgaagctcttgagagtgacagtctt

SEQ ID NO: 1374301 - DNA, 25 bp, Homo sapien
tgaacgggtagatgacagccatgga

SEQ ID NO: 1374302 - DNA, 25 bp, Homo sapien
ctaagagcttagttgcacaggcagg

SEQ ID NO: 1374303 - DNA, 25 bp, Homo sapien
gaacagtagctgtctctgcaagagg

SEQ ID NO: 1374304 - DNA, 25 bp, Homo sapien
tagattcccgaggtcagagactgcc

SEQ ID NO: 1374305 - DNA, 25 bp, Homo sapien
gaagagactctacttgcccctgagc

SEQ ID NO: 1374306 - DNA, 25 bp, Homo sapien
cttggagaacaagccgaagcagccg

SEQ ID NO: 1374307 - DNA, 25 bp, Homo sapien
ccgatgcagctgatgatgcagtaca

SEQ ID NO: 1374308 - DNA, 25 bp, Homo sapien
cagccgatgcagctgatgatgcagt

SEQ ID NO: 1374309 - DNA, 25 bp, Homo sapien
agaacaagccgaagcagccgatgca

SEQ ID NO: 1374310 - DNA, 25 bp, Homo sapien
tgggaaggcgagggccagggccggc

SEQ ID NO: 1374311 - DNA, 25 bp, Homo sapien
gaaggcgagggccagggccggcagg

SEQ ID NO: 1374312 - DNA, 25 bp, Homo sapien
gggaaggcgagggccagggccggca

SEQ ID NO: 1374313 - DNA, 25 bp, Homo sapien
ggaaggcgagggccagggccggcag

SEQ ID NO: 1374314 - DNA, 25 bp, Homo sapien
ggtcagaatggccaccagcatcaaa

SEQ ID NO: 1374315 - DNA, 25 bp, Homo sapien
ccaagggcttctcccaactgggtat

SEQ ID NO: 1374316 - DNA, 25 bp, Homo sapien
gccaaggtaagcaggcctggataga

SEQ ID NO: 1374317 - DNA, 25 bp, Homo sapien
aaatccttgagggtactgggtgagt

SEQ ID NO: 1374318 - DNA, 25 bp, Homo sapien
ggggcatcaggtcctcgtgcttgtg

SEQ ID NO: 1374319 - DNA, 25 bp, Homo sapien
agaaggggcatcaggtcctcgtgct

SEQ ID NO: 1374320 - DNA, 25 bp, Homo sapien
gagaaggggcatcaggtcctcgtgc

SEQ ID NO: 1374321 - DNA, 25 bp, Homo sapien
aaggggcatcaggtcctcgtgcttg

SEQ ID NO: 1374322 - DNA, 25 bp, Homo sapien
gcactagcatggcagcaggtcctgg

SEQ ID NO: 1374323 - DNA, 25 bp, Homo sapien
cagagggagcactagcatggcagca

SEQ ID NO: 1374324 - DNA, 25 bp, Homo sapien
accagtgctgccaataagcccggag

SEQ ID NO: 1374325 - DNA, 25 bp, Homo sapien
aataagcccggagttttgcagctca

SEQ ID NO: 1374326 - DNA, 25 bp, Homo sapien
tgagcaagcccagccgtggagctga

SEQ ID NO: 1374327 - DNA, 25 bp, Homo sapien
cacattggtcagaacgaaggagaag

SEQ ID NO: 1374328 - DNA, 25 bp, Homo sapien
gcagtatccaatctttctgctccca

SEQ ID NO: 1374329 - DNA, 25 bp, Homo sapien
ctcccatccacattggtcagaacga

SEQ ID NO: 1374330 - DNA, 25 bp, Homo sapien
caagaggcgcctgcagtatccaatc

SEQ ID NO: 1374331 - DNA, 25 bp, Homo sapien
gagtgatgcccactcattcccatct

SEQ ID NO: 1374332 - DNA, 25 bp, Homo sapien
ctgggatactcggtgagtgatgccc

SEQ ID NO: 1374333 - DNA, 25 bp, Homo sapien
tcctgctgaccccgaagcaggttct

SEQ ID NO: 1374334 - DNA, 25 bp, Homo sapien
ggggatagctttgagcagccgctcc

SEQ ID NO: 1374335 - DNA, 25 bp, Homo sapien
aaattggtaggtgattataggctcg

SEQ ID NO: 1374336 - DNA, 25 bp, Homo sapien
gtattcaaagaagtgctgcccccca

SEQ ID NO: 1374337 - DNA, 25 bp, Homo sapien
tataggctcgtaatcatcctctgaa

SEQ ID NO: 1374338 - DNA, 25 bp, Homo sapien
gcaaagttgggcaaagagtgctcct

SEQ ID NO: 1374339 - DNA, 25 bp, Homo sapien
gtctgtgagaatccgggtgacctcc

SEQ ID NO: 1374340 - DNA, 25 bp, Homo sapien
gagtctgtgagaatccgggtgacct

SEQ ID NO: 1374341 - DNA, 25 bp, Homo sapien
tgagaatccgggtgacctccacacc

SEQ ID NO: 1374342 - DNA, 25 bp, Homo sapien
tggagtggagtctgtgagaatccgg

SEQ ID NO: 1374343 - DNA, 25 bp, Homo sapien
cagagactgcctaacctgtcgggtg

SEQ ID NO: 1374344 - DNA, 25 bp, Homo sapien
cactcaggatcagggccaaatgggc

SEQ ID NO: 1374345 - DNA, 25 bp, Homo sapien
ccacggaaatgtgctggagaggcca

SEQ ID NO: 1374346 - DNA, 25 bp, Homo sapien
taagaacaggctcaaagggcatgtg

SEQ ID NO: 1374347 - DNA, 25 bp, Homo sapien
tgaacacccggcctaccacttgtcc

SEQ ID NO: 1374348 - DNA, 25 bp, Homo sapien
gaagcagtcggcgttggaagagcct

SEQ ID NO: 1374349 - DNA, 25 bp, Homo sapien
ggcgttggaagagcctgaacacccg

SEQ ID NO: 1374350 - DNA, 25 bp, Homo sapien
cggagttgaagcagtcggcgttgga

SEQ ID NO: 1374351 - DNA, 25 bp, Homo sapien
aagccacgcgctgtcttccagagag

SEQ ID NO: 1374352 - DNA, 25 bp, Homo sapien
tctcccctaacacagacagactggt

SEQ ID NO: 1374353 - DNA, 25 bp, Homo sapien
cacccagtggttgagcaagaaggat

SEQ ID NO: 1374354 - DNA, 25 bp, Homo sapien
tcggtctccagccacaactctgtga

SEQ ID NO: 1374355 - DNA, 25 bp, Homo sapien
ttcatataaggcatctcatttaatc

SEQ ID NO: 1374356 - DNA, 25 bp, Homo sapien
ctcatgtttcatataaggcatctca

SEQ ID NO: 1374357 - DNA, 25 bp, Homo sapien
tgtttcatataaggcatctcattta

SEQ ID NO: 1374358 - DNA, 25 bp, Homo sapien
catgtttcatataaggcatctcatt

SEQ ID NO: 1374359 - DNA, 25 bp, Homo sapien
ctgatggtgcagatggaatggccag

SEQ ID NO: 1374360 - DNA, 25 bp, Homo sapien
atggtgcagatggaatggccagata

SEQ ID NO: 1374361 - DNA, 25 bp, Homo sapien
gaatggccagatattggagatctgt

SEQ ID NO: 1374362 - DNA, 25 bp, Homo sapien
ttggagatctgtgtctagagaggac

SEQ ID NO: 1374363 - DNA, 25 bp, Homo sapien
tatctaagggtcacggctgttcagc

SEQ ID NO: 1374364 - DNA, 25 bp, Homo sapien
gacctctgggcaaagtatctaaggg

SEQ ID NO: 1374365 - DNA, 25 bp, Homo sapien
aatgaatgaatttctaactgccctc

SEQ ID NO: 1374366 - DNA, 25 bp, Homo sapien
gccacacaaatatttgccgagtgaa

SEQ ID NO: 1374367 - DNA, 25 bp, Homo sapien
ctgggcgacacgctggaaagcagca

SEQ ID NO: 1374368 - DNA, 25 bp, Homo sapien
gttgacttctaatttaatccccata

SEQ ID NO: 1374369 - DNA, 25 bp, Homo sapien
gggaattatgtccatttcactgttg

SEQ ID NO: 1374370 - DNA, 25 bp, Homo sapien
agcagctgcgcaggttctaccgccg

SEQ ID NO: 1374371 - DNA, 25 bp, Homo sapien
tgtttgtggccggtggctatctgct

SEQ ID NO: 1374372 - DNA, 25 bp, Homo sapien
cctgtgtttgtggccggtggctatc

SEQ ID NO: 1374373 - DNA, 25 bp, Homo sapien
ctggctccgaggaactgggcaaaga

SEQ ID NO: 1374374 - DNA, 25 bp, Homo sapien
gcaaagaccacggaggactcccagg

SEQ ID NO: 1374375 - DNA, 25 bp, Homo sapien
cctctgggaggacaccacaaccggg

SEQ ID NO: 1374376 - DNA, 25 bp, Homo sapien
tcctggatggaaggacacgtggccc

SEQ ID NO: 1374377 - DNA, 25 bp, Homo sapien
acaaccggggcgctttcaggcacac

SEQ ID NO: 1374378 - DNA, 25 bp, Homo sapien
tttcaggcacactgcggttgcacca

SEQ ID NO: 1374379 - DNA, 25 bp, Homo sapien
gtgcccacgccgtccccccgcgctc

SEQ ID NO: 1374380 - DNA, 25 bp, Homo sapien
aactgctcccggatctcgacgcccc

SEQ ID NO: 1374381 - DNA, 25 bp, Homo sapien
tctcgacgccccgtgccgccctcca

SEQ ID NO: 1374382 - DNA, 25 bp, Homo sapien
tgcccacgccgtccccccgcgctct

SEQ ID NO: 1374383 - DNA, 25 bp, Homo sapien
ctcaggctggctcgaaggcggcggc

SEQ ID NO: 1374384 - DNA, 25 bp, Homo sapien
ccatggccgcgcttcagtctcaggc

SEQ ID NO: 1374385 - DNA, 25 bp, Homo sapien
ccccatggccgcgcttcagtctcag

SEQ ID NO: 1374386 - DNA, 25 bp, Homo sapien
caggctggctcgaaggcggcggccg

SEQ ID NO: 1374387 - DNA, 25 bp, Homo sapien
gcccctggagtgcccggctcccgct

SEQ ID NO: 1374388 - DNA, 25 bp, Homo sapien
tgacctccgcgggtccgacactttc

SEQ ID NO: 1374389 - DNA, 25 bp, Homo sapien
cactttcactttcacgcggggggag

SEQ ID NO: 1374390 - DNA, 25 bp, Homo sapien
gcggcgcggcgcaccttccggactc

SEQ ID NO: 1374391 - DNA, 25 bp, Homo sapien
ccatgggctttggcagctacagtcc

SEQ ID NO: 1374392 - DNA, 25 bp, Homo sapien
catgggctttggcagctacagtcca

SEQ ID NO: 1374393 - DNA, 25 bp, Homo sapien
ttctagggggcccaactcgtgacac

SEQ ID NO: 1374394 - DNA, 25 bp, Homo sapien
gggcccaactcgtgacacagggaat

SEQ ID NO: 1374395 - DNA, 25 bp, Homo sapien
caacaaccacgagagggcgcccctt

SEQ ID NO: 1374396 - DNA, 25 bp, Homo sapien
ccacgagagggcgccccttccccat

SEQ ID NO: 1374397 - DNA, 25 bp, Homo sapien
tcctgacttcctcttagatcataga

SEQ ID NO: 1374398 - DNA, 25 bp, Homo sapien
tagatcatagattggacctggtttt

SEQ ID NO: 1374399 - DNA, 25 bp, Homo sapien
caggaattctcatgtgggattcccc

SEQ ID NO: 1374400 - DNA, 25 bp, Homo sapien
cagctgttgacttgttgccctgaag

SEQ ID NO: 1374401 - DNA, 25 bp, Homo sapien
cttctttgggtctccctcagtttca

SEQ ID NO: 1374402 - DNA, 25 bp, Homo sapien
tgggtctccctcagtttcactgcca

SEQ ID NO: 1374403 - DNA, 25 bp, Homo sapien
cctgccttctttgggtctccctcag

SEQ ID NO: 1374404 - DNA, 25 bp, Homo sapien
ctttgggtctccctcagtttcactg

SEQ ID NO: 1374405 - DNA, 25 bp, Homo sapien
ggccaagcagatcaacaagcccagg

SEQ ID NO: 1374406 - DNA, 25 bp, Homo sapien
tgtcactcgggcacactagacttgt

SEQ ID NO: 1374407 - DNA, 25 bp, Homo sapien
cgtgaagcttttgagcaggaggcca

SEQ ID NO: 1374408 - DNA, 25 bp, Homo sapien
tatccagtctggctatgagatcccc

SEQ ID NO: 1374409 - DNA, 25 bp, Homo sapien
ccctcacgtcaggtggtgtgtggtc

SEQ ID NO: 1374410 - DNA, 25 bp, Homo sapien
cagacacaaagggttgggtaggcct

SEQ ID NO: 1374411 - DNA, 25 bp, Homo sapien
agtttcatgcaggtcagtcctgggt

SEQ ID NO: 1374412 - DNA, 25 bp, Homo sapien
catggcagacttctctcagcagaca

SEQ ID NO: 1374413 - DNA, 25 bp, Homo sapien
ctcgcgatgtgcttcagcagagcag

SEQ ID NO: 1374414 - DNA, 25 bp, Homo sapien
ctagcagctcgcgatgtgcttcagc

SEQ ID NO: 1374415 - DNA, 25 bp, Homo sapien
cgcgatgtgcttcagcagagcaggt

SEQ ID NO: 1374416 - DNA, 25 bp, Homo sapien
gcagctcgcgatgtgcttcagcaga

SEQ ID NO: 1374417 - DNA, 25 bp, Homo sapien
gctgttgacagctggtggaatacat

SEQ ID NO: 1374418 - DNA, 25 bp, Homo sapien
gaagccttcacttctgggtgtcaca

SEQ ID NO: 1374419 - DNA, 25 bp, Homo sapien
tccaaccttgggcatacttgaggtg

SEQ ID NO: 1374420 - DNA, 25 bp, Homo sapien
tgtcacaggtcggttataccagctg

SEQ ID NO: 1374421 - DNA, 25 bp, Homo sapien
tgacttcagcttgcttatgagcagg

SEQ ID NO: 1374422 - DNA, 25 bp, Homo sapien
aagtcatccaaatcaatggtccaaa

SEQ ID NO: 1374423 - DNA, 25 bp, Homo sapien
catggaccaagcaaaattgttctcc

SEQ ID NO: 1374424 - DNA, 25 bp, Homo sapien
cctctcattgcagaaggaccttgag

SEQ ID NO: 1374425 - DNA, 25 bp, Homo sapien
gtggcttctcttaagaatgtgcaga

SEQ ID NO: 1374426 - DNA, 25 bp, Homo sapien
tcaatccatgtacttgtggcttctc

SEQ ID NO: 1374427 - DNA, 25 bp, Homo sapien
ccatgtacttgtggcttctcttaag

SEQ ID NO: 1374428 - DNA, 25 bp, Homo sapien
gtacttgtggcttctcttaagaatg

SEQ ID NO: 1374429 - DNA, 25 bp, Homo sapien
tcacagttaagtcccgaatccagcc

SEQ ID NO: 1374430 - DNA, 25 bp, Homo sapien
cgaatccagcctagcatgcagaagg

SEQ ID NO: 1374431 - DNA, 25 bp, Homo sapien
gaccagatgagatgaccctgctcta

SEQ ID NO: 1374432 - DNA, 25 bp, Homo sapien
catgcagaaggaccagatgagatga

SEQ ID NO: 1374433 - DNA, 25 bp, Homo sapien
atcccattgtctctccagtacatca

SEQ ID NO: 1374434 - DNA, 25 bp, Homo sapien
gccagaaggtcctcccataggtggg

SEQ ID NO: 1374435 - DNA, 25 bp, Homo sapien
cccattgtctctccagtacatcatg

SEQ ID NO: 1374436 - DNA, 25 bp, Homo sapien
attgtctctccagtacatcatggca

SEQ ID NO: 1374437 - DNA, 25 bp, Homo sapien
catttcaccctgatccttggattct

SEQ ID NO: 1374438 - DNA, 25 bp, Homo sapien
gtaggggactattgtgtactgtaga

SEQ ID NO: 1374439 - DNA, 25 bp, Homo sapien
tgatccttggattctatgtgtaggg

SEQ ID NO: 1374440 - DNA, 25 bp, Homo sapien
gaagtcataagtcatcacactgatg

SEQ ID NO: 1374441 - DNA, 25 bp, Homo sapien
ttgccagcagatatagctgctgtga

SEQ ID NO: 1374442 - DNA, 25 bp, Homo sapien
cagatatagctgctgtgatacgcag

SEQ ID NO: 1374443 - DNA, 25 bp, Homo sapien
gatatagctgctgtgatacgcagcc

SEQ ID NO: 1374444 - DNA, 25 bp, Homo sapien
cagcagatatagctgctgtgatacg

SEQ ID NO: 1374445 - DNA, 25 bp, Homo sapien
tctcctctagaataaccatcttcac

SEQ ID NO: 1374446 - DNA, 25 bp, Homo sapien
ctagaataaccatcttcacctcctt

SEQ ID NO: 1374447 - DNA, 25 bp, Homo sapien
tcctctagaataaccatcttcacct

SEQ ID NO: 1374448 - DNA, 25 bp, Homo sapien
ctttttctcctctagaataaccatc

SEQ ID NO: 1374449 - DNA, 25 bp, Homo sapien
gatataggacatcactatcattcca

SEQ ID NO: 1374450 - DNA, 25 bp, Homo sapien
tttgtcattcacagtggcgaaggcg

SEQ ID NO: 1374451 - DNA, 25 bp, Homo sapien
tcaattcctacagattgttctttca

SEQ ID NO: 1374452 - DNA, 25 bp, Homo sapien
actgaggatataggacatcactatc

SEQ ID NO: 1374453 - DNA, 25 bp, Homo sapien
gcaattgttgcatatggattataca

SEQ ID NO: 1374454 - DNA, 25 bp, Homo sapien
ggttttgcagcaattgttgcatatg

SEQ ID NO: 1374455 - DNA, 25 bp, Homo sapien
taaagaggcaccattcgtacctgtt

SEQ ID NO: 1374456 - DNA, 25 bp, Homo sapien
accattcgtacctgttggagcagca

SEQ ID NO: 1374457 - DNA, 25 bp, Homo sapien
tcctgaaggtactcccagtttgctg

SEQ ID NO: 1374458 - DNA, 25 bp, Homo sapien
catgtcacctaaatgcacttgatgg

SEQ ID NO: 1374459 - DNA, 25 bp, Homo sapien
tgtataagagtcctatttgccccag

SEQ ID NO: 1374460 - DNA, 25 bp, Homo sapien
tgttagaactctgtccaaaaagtgc

SEQ ID NO: 1374461 - DNA, 25 bp, Homo sapien
gccattgctctggtacacgttcttt

SEQ ID NO: 1374462 - DNA, 25 bp, Homo sapien
tattgttcttgagtcagccattgct

SEQ ID NO: 1374463 - DNA, 25 bp, Homo sapien
gagtcagccattgctctggtacacg

SEQ ID NO: 1374464 - DNA, 25 bp, Homo sapien
gttcttgagtcagccattgctctgg

SEQ ID NO: 1374465 - DNA, 25 bp, Homo sapien
atagacagagcaatattccttgagg

SEQ ID NO: 1374466 - DNA, 25 bp, Homo sapien
catgtcatagacagagcaatattcc

SEQ ID NO: 1374467 - DNA, 25 bp, Homo sapien
gttgttggccatgtcatagacagag

SEQ ID NO: 1374468 - DNA, 25 bp, Homo sapien
ggccatgtcatagacagagcaatat

SEQ ID NO: 1374469 - DNA, 25 bp, Homo sapien
ccctggaagccaggagtgaatatgt

SEQ ID NO: 1374470 - DNA, 25 bp, Homo sapien
ctggaagccaggagtgaatatgtac

SEQ ID NO: 1374471 - DNA, 25 bp, Homo sapien
aatcccagtaccctggaagccagga

SEQ ID NO: 1374472 - DNA, 25 bp, Homo sapien
caaatcccagtaccctggaagccag

SEQ ID NO: 1374473 - DNA, 25 bp, Homo sapien
gtgatggtgggcatgctctgtatgt

SEQ ID NO: 1374474 - DNA, 25 bp, Homo sapien
gatggtgggcatgctctgtatgtag

SEQ ID NO: 1374475 - DNA, 25 bp, Homo sapien
tgatggtgggcatgctctgtatgta

SEQ ID NO: 1374476 - DNA, 25 bp, Homo sapien
tctgagcctgctggggtcctgttgc

SEQ ID NO: 1374477 - DNA, 25 bp, Homo sapien
ttctgagcctgctggggtcctgttg

SEQ ID NO: 1374478 - DNA, 25 bp, Homo sapien
cattctgagcctgctggggtcctgt

SEQ ID NO: 1374479 - DNA, 25 bp, Homo sapien
attctgagcctgctggggtcctgtt

SEQ ID NO: 1374480 - DNA, 25 bp, Homo sapien
ggaaggtctcggtatccacaatggc

SEQ ID NO: 1374481 - DNA, 25 bp, Homo sapien
ggaaggaggcatgtactgctgagga

SEQ ID NO: 1374482 - DNA, 25 bp, Homo sapien
caggaaggaggcatgtactgctgag

SEQ ID NO: 1374483 - DNA, 25 bp, Homo sapien
cagcaggaaggtctcggtatccaca

SEQ ID NO: 1374484 - DNA, 25 bp, Homo sapien
caaccctcagagcacaagccagtgg

SEQ ID NO: 1374485 - DNA, 25 bp, Homo sapien
aaccctcagagcacaagccagtggc

SEQ ID NO: 1374486 - DNA, 25 bp, Homo sapien
ggcaaccctcagagcacaagccagt

SEQ ID NO: 1374487 - DNA, 25 bp, Homo sapien
ctggcaaccctcagagcacaagcca

SEQ ID NO: 1374488 - DNA, 25 bp, Homo sapien
ctgccagtacagttacgggctgaca

SEQ ID NO: 1374489 - DNA, 25 bp, Homo sapien
ctgacaggggtccagatgatctgac

SEQ ID NO: 1374490 - DNA, 25 bp, Homo sapien
ccagtacagttacgggctgacaggg

SEQ ID NO: 1374491 - DNA, 25 bp, Homo sapien
acagttacgggctgacaggggtcca

SEQ ID NO: 1374492 - DNA, 25 bp, Homo sapien
tgagctctccacaatactggcgggt

SEQ ID NO: 1374493 - DNA, 25 bp, Homo sapien
tccaaggatgagctctccacaatac

SEQ ID NO: 1374494 - DNA, 25 bp, Homo sapien
aaggatgagctctccacaatactgg

SEQ ID NO: 1374495 - DNA, 25 bp, Homo sapien
tctccacaatactggcgggttggct

SEQ ID NO: 1374496 - DNA, 25 bp, Homo sapien
ctgaagacgggctgagtaagctggc

SEQ ID NO: 1374497 - DNA, 25 bp, Homo sapien
aagtagaagctgaagacgggctgag

SEQ ID NO: 1374498 - DNA, 25 bp, Homo sapien
tagaagctgaagacgggctgagtaa

SEQ ID NO: 1374499 - DNA, 25 bp, Homo sapien
aagacgggctgagtaagctggctct

SEQ ID NO: 1374500 - DNA, 25 bp, Homo sapien
tcaggccaaactcctggttattgac

SEQ ID NO: 1374501 - DNA, 25 bp, Homo sapien
cccaggatcccgtcaaagtctgaat

SEQ ID NO: 1374502 - DNA, 25 bp, Homo sapien
tagtaaaaggggtcgctgggctcat

SEQ ID NO: 1374503 - DNA, 25 bp, Homo sapien
tgtaggggaattcccctctgccatg

SEQ ID NO: 1374504 - DNA, 25 bp, Homo sapien
tcatagcccaggaacacactcaggc

SEQ ID NO: 1374505 - DNA, 25 bp, Homo sapien
tagtccataggtttgtccatcgttt

SEQ ID NO: 1374506 - DNA, 25 bp, Homo sapien
tcaggctgccactcccataggatag

SEQ ID NO: 1374507 - DNA, 25 bp, Homo sapien
gctgccactcccataggatagtcca

SEQ ID NO: 1374508 - DNA, 25 bp, Homo sapien
tgaaggtggaggacaggctgggatt

SEQ ID NO: 1374509 - DNA, 25 bp, Homo sapien
ctgaaggtggaggacaggctgggat

SEQ ID NO: 1374510 - DNA, 25 bp, Homo sapien
aaggtggaggacaggctgggattga

SEQ ID NO: 1374511 - DNA, 25 bp, Homo sapien
ggtggaggacaggctgggattgaac

SEQ ID NO: 1374512 - DNA, 25 bp, Homo sapien
tcatggtgtggagggtggtagtgac

SEQ ID NO: 1374513 - DNA, 25 bp, Homo sapien
ggtgtggagggtggtagtgacatac

SEQ ID NO: 1374514 - DNA, 25 bp, Homo sapien
tggagggtggtagtgacatactcac

SEQ ID NO: 1374515 - DNA, 25 bp, Homo sapien
atctgctcccctcatggtgtggagg

SEQ ID NO: 1374516 - DNA, 25 bp, Homo sapien
agcagacttggctctggcagtagat

SEQ ID NO: 1374517 - DNA, 25 bp, Homo sapien
agacttggctctggcagtagatgga

SEQ ID NO: 1374518 - DNA, 25 bp, Homo sapien
ggctctggcagtagatggagggcag

SEQ ID NO: 1374519 - DNA, 25 bp, Homo sapien
tggctctggcagtagatggagggca

SEQ ID NO: 1374520 - DNA, 25 bp, Homo sapien
atcaaagaggactaggaaattttgg

SEQ ID NO: 1374521 - DNA, 25 bp, Homo sapien
ggtgtcccagtgctgatctccccaa

SEQ ID NO: 1374522 - DNA, 25 bp, Homo sapien
aataatacttggcaattggatcagc

SEQ ID NO: 1374523 - DNA, 25 bp, Homo sapien
tcagaaacgtctccagtacaccctg

SEQ ID NO: 1374524 - DNA, 25 bp, Homo sapien
caggtagttggtgaagggctcataa

SEQ ID NO: 1374525 - DNA, 25 bp, Homo sapien
cattctctggcggatagacttgcct

SEQ ID NO: 1374526 - DNA, 25 bp, Homo sapien
acacatccatagctgcatgttttca

SEQ ID NO: 1374527 - DNA, 25 bp, Homo sapien
gtaacacatccatagctgcatgttt

SEQ ID NO: 1374528 - DNA, 25 bp, Homo sapien
cctgtaacacatccatagctgcatg

SEQ ID NO: 1374529 - DNA, 25 bp, Homo sapien
cacatccatagctgcatgttttcat

SEQ ID NO: 1374530 - DNA, 25 bp, Homo sapien
aatatgtgggtgtcgacggggcagt

SEQ ID NO: 1374531 - DNA, 25 bp, Homo sapien
tatgtgggtgtcgacggggcagtcc

SEQ ID NO: 1374532 - DNA, 25 bp, Homo sapien
taatatgtgggtgtcgacggggcag

SEQ ID NO: 1374533 - DNA, 25 bp, Homo sapien
atatgtgggtgtcgacggggcagtc

SEQ ID NO: 1374534 - DNA, 25 bp, Homo sapien
cagcatgtgtacaaaatcggcaaat

SEQ ID NO: 1374535 - DNA, 25 bp, Homo sapien
gcatgtgtacaaaatcggcaaatgt

SEQ ID NO: 1374536 - DNA, 25 bp, Homo sapien
agcatgtgtacaaaatcggcaaatg

SEQ ID NO: 1374537 - DNA, 25 bp, Homo sapien
agaaaaattgtagcacttcattccc

SEQ ID NO: 1374538 - DNA, 25 bp, Homo sapien
tctggcttaaagacttggaggctac

SEQ ID NO: 1374539 - DNA, 25 bp, Homo sapien
gagattctggctccaaccaacagtg

SEQ ID NO: 1374540 - DNA, 25 bp, Homo sapien
taataggtatggcacccactctgtg

SEQ ID NO: 1374541 - DNA, 25 bp, Homo sapien
cagtcatgcctaggaaaatgttccc

SEQ ID NO: 1374542 - DNA, 25 bp, Homo sapien
tggaaaagagattggcctattctgg

SEQ ID NO: 1374543 - DNA, 25 bp, Homo sapien
gctttgccccgggatgagaaggctt

SEQ ID NO: 1374544 - DNA, 25 bp, Homo sapien
tccaacatgtcacttagaagaaaag

SEQ ID NO: 1374545 - DNA, 25 bp, Homo sapien
aaggcttccaacatgtcacttagaa

SEQ ID NO: 1374546 - DNA, 25 bp, Homo sapien
gggacagtcaccttttcacgggcca

SEQ ID NO: 1374547 - DNA, 25 bp, Homo sapien
tctgaagacccaagttacccatcct

SEQ ID NO: 1374548 - DNA, 25 bp, Homo sapien
cactgtattctgtctaagggtctca

SEQ ID NO: 1374549 - DNA, 25 bp, Homo sapien
ggtgagtgcccacctcagaagtcaa

SEQ ID NO: 1374550 - DNA, 25 bp, Homo sapien
aggggtcacagactgataacccaca

SEQ ID NO: 1374551 - DNA, 25 bp, Homo sapien
tccagtggtcacagattgatgaccc

SEQ ID NO: 1374552 - DNA, 25 bp, Homo sapien
ccagtggtcacagattgatgaccca

SEQ ID NO: 1374553 - DNA, 25 bp, Homo sapien
actttccgtggatctcagtgacccc

SEQ ID NO: 1374554 - DNA, 25 bp, Homo sapien
taggggtcacagttgtacctctagg

SEQ ID NO: 1374555 - DNA, 25 bp, Homo sapien
gctacagtgtgctttccaagggata

SEQ ID NO: 1374556 - DNA, 25 bp, Homo sapien
gggttatagtcatattttcacactt

SEQ ID NO: 1374557 - DNA, 25 bp, Homo sapien
tgaagaattcacagcagatgacagc

SEQ ID NO: 1374558 - DNA, 25 bp, Homo sapien
tatcagtggtccatgccgtggtcac

SEQ ID NO: 1374559 - DNA, 25 bp, Homo sapien
tggtcacagccagcctttcagggtc

SEQ ID NO: 1374560 - DNA, 25 bp, Homo sapien
ttgtggtaaagaagttgaactgaac

SEQ ID NO: 1374561 - DNA, 25 bp, Homo sapien
cagcccgcaccaggatatcattcaa

SEQ ID NO: 1374562 - DNA, 25 bp, Homo sapien
gtgccacagaacgtgcccctgacgt

SEQ ID NO: 1374563 - DNA, 25 bp, Homo sapien
tgacgtcatccatgtccaatgtcca

SEQ ID NO: 1374564 - DNA, 25 bp, Homo sapien
aatgctctcgccttataaaccatgc

SEQ ID NO: 1374565 - DNA, 25 bp, Homo sapien
actgggtacaatggcaaaaaactga

SEQ ID NO: 1374566 - DNA, 25 bp, Homo sapien
gtttattagctatgggatcctgaag

SEQ ID NO: 1374567 - DNA, 25 bp, Homo sapien
gatagtccctcaggaagcaatgtag

SEQ ID NO: 1374568 - DNA, 25 bp, Homo sapien
gatatggatgaagcgtgaagacact

SEQ ID NO: 1374569 - DNA, 25 bp, Homo sapien
gctataagctttctacaccactgag

SEQ ID NO: 1374570 - DNA, 25 bp, Homo sapien
tacatgtatccagtctctcaggtga

SEQ ID NO: 1374571 - DNA, 25 bp, Homo sapien
tactgaatattgaggagtggaacca

SEQ ID NO: 1374572 - DNA, 25 bp, Homo sapien
ggtttaggaactactggagcatgtc

SEQ ID NO: 1374573 - DNA, 25 bp, Homo sapien
gtgcttcttcgctccccagacaaag

SEQ ID NO: 1374574 - DNA, 25 bp, Homo sapien
tggcatacgggacatactggtaatc

SEQ ID NO: 1374575 - DNA, 25 bp, Homo sapien
tctttccccttgttggcatacggga

SEQ ID NO: 1374576 - DNA, 25 bp, Homo sapien
tactggtaatcaatccagtgcttct

SEQ ID NO: 1374577 - DNA, 25 bp, Homo sapien
tctggtggttacattcccttggaaa

SEQ ID NO: 1374578 - DNA, 25 bp, Homo sapien
tttccgccacccaatagcaagcttg

SEQ ID NO: 1374579 - DNA, 25 bp, Homo sapien
tccaggtcactacagccacacagtt

SEQ ID NO: 1374580 - DNA, 25 bp, Homo sapien
cacacagttatgtggctcgtattgc

SEQ ID NO: 1374581 - DNA, 25 bp, Homo sapien
gctctggcctgcaacccattcttag

SEQ ID NO: 1374582 - DNA, 25 bp, Homo sapien
gaggcgaaaggtacgtccataggtg

SEQ ID NO: 1374583 - DNA, 25 bp, Homo sapien
cctggagatgctggtccgatcgctc

SEQ ID NO: 1374584 - DNA, 25 bp, Homo sapien
tgagggtgccccaagctttctccaa

SEQ ID NO: 1374585 - DNA, 25 bp, Homo sapien
cataagacaagacattgatgaaatc

SEQ ID NO: 1374586 - DNA, 25 bp, Homo sapien
ccaacttccatgtaagtcataagac

SEQ ID NO: 1374587 - DNA, 25 bp, Homo sapien
gggctattatgtcctgtgaaccttt

SEQ ID NO: 1374588 - DNA, 25 bp, Homo sapien
tgtcctgtgaacctttcccaacttc

SEQ ID NO: 1374589 - DNA, 25 bp, Homo sapien
cctccttccggaaggcaaacaggag

SEQ ID NO: 1374590 - DNA, 25 bp, Homo sapien
tgtttggacgatgtgtgggacccca

SEQ ID NO: 1374591 - DNA, 25 bp, Homo sapien
gcagtgcctccttccggaaggcaaa

SEQ ID NO: 1374592 - DNA, 25 bp, Homo sapien
cctagaaagcgcacatcataggatg

SEQ ID NO: 1374593 - DNA, 25 bp, Homo sapien
gagaaaagtccaccggtcatgcatg

SEQ ID NO: 1374594 - DNA, 25 bp, Homo sapien
gggctgcctcttagtccaggatata

SEQ ID NO: 1374595 - DNA, 25 bp, Homo sapien
tcaagaccatcaaagtcatgtgtcc

SEQ ID NO: 1374596 - DNA, 25 bp, Homo sapien
catgtgtcctcagaagggatataac

SEQ ID NO: 1374597 - DNA, 25 bp, Homo sapien
gttccacccgccgatggacagtagt

SEQ ID NO: 1374598 - DNA, 25 bp, Homo sapien
aggtgccaaagttccacccgccgat

SEQ ID NO: 1374599 - DNA, 25 bp, Homo sapien
ccgccgatggacagtagtgttttca

SEQ ID NO: 1374600 - DNA, 25 bp, Homo sapien
cttgaggtgccaaagttccacccgc

SEQ ID NO: 1374601 - DNA, 25 bp, Homo sapien
tgcccagttggtgaaataacacacg

SEQ ID NO: 1374602 - DNA, 25 bp, Homo sapien
taacacacgagtttatgggcagcac

SEQ ID NO: 1374603 - DNA, 25 bp, Homo sapien
cctggccgactgtgtgcccagttgg

SEQ ID NO: 1374604 - DNA, 25 bp, Homo sapien
gttcattgaggcaaaggcaaatatc

SEQ ID NO: 1374605 - DNA, 25 bp, Homo sapien
tggtgtttcagcacaagaaccagcc

SEQ ID NO: 1374606 - DNA, 25 bp, Homo sapien
tcgtggtgtttcagcacaagaacca

SEQ ID NO: 1374607 - DNA, 25 bp, Homo sapien
atcgtggtgtttcagcacaagaacc

SEQ ID NO: 1374608 - DNA, 25 bp, Homo sapien
cgtggtgtttcagcacaagaaccag

SEQ ID NO: 1374609 - DNA, 25 bp, Homo sapien
caacccacagcaacagcttccacat

SEQ ID NO: 1374610 - DNA, 25 bp, Homo sapien
atggtctgatagctgtgagtccaga

SEQ ID NO: 1374611 - DNA, 25 bp, Homo sapien
ctcaatggtctgatagctgtgagtc

SEQ ID NO: 1374612 - DNA, 25 bp, Homo sapien
caatggtctgatagctgtgagtcca

SEQ ID NO: 1374613 - DNA, 25 bp, Homo sapien
tcaatggtctgatagctgtgagtcc

SEQ ID NO: 1374614 - DNA, 25 bp, Homo sapien
tgtgaggtcagtttccatgcttgta

SEQ ID NO: 1374615 - DNA, 25 bp, Homo sapien
gggagaaaccccatatggtagcagc

SEQ ID NO: 1374616 - DNA, 25 bp, Homo sapien
tggcactgaataccaggaagagggt

SEQ ID NO: 1374617 - DNA, 25 bp, Homo sapien
gtaatttatgagagtcacagtgacc

SEQ ID NO: 1374618 - DNA, 25 bp, Homo sapien
taaaggtgttattgcacatccatgc

SEQ ID NO: 1374619 - DNA, 25 bp, Homo sapien
acagcacctaatgggtagaagccag

SEQ ID NO: 1374620 - DNA, 25 bp, Homo sapien
atattcagtgcagagggtccttgac

SEQ ID NO: 1374621 - DNA, 25 bp, Homo sapien
ggatgctgctaaccctcctttgatg

SEQ ID NO: 1374622 - DNA, 25 bp, Homo sapien
gaagtgtccccgataatccagcaaa

SEQ ID NO: 1374623 - DNA, 25 bp, Homo sapien
gattgatccacctttgttgccccag

SEQ ID NO: 1374624 - DNA, 25 bp, Homo sapien
catagccaaaaaggtgggcacaccc

SEQ ID NO: 1374625 - DNA, 25 bp, Homo sapien
taaactgtctgattcatggtaggca

SEQ ID NO: 1374626 - DNA, 25 bp, Homo sapien
ttttggctagcacctaaacacttaa

SEQ ID NO: 1374627 - DNA, 25 bp, Homo sapien
ggatatgaacccttgttttctacga

SEQ ID NO: 1374628 - DNA, 25 bp, Homo sapien
tagactaagtcgctgaatacaggaa

SEQ ID NO: 1374629 - DNA, 25 bp, Homo sapien
tagagtacaaagacccaatcttggc

SEQ ID NO: 1374630 - DNA, 25 bp, Homo sapien
tcttgcttcaaggagtccgccacaa

SEQ ID NO: 1374631 - DNA, 25 bp, Homo sapien
tccaggtgcctagatcaaagggtgc

SEQ ID NO: 1374632 - DNA, 25 bp, Homo sapien
cacattttgaggaacaagttaacac

SEQ ID NO: 1374633 - DNA, 25 bp, Homo sapien
tgtatgctcccacttacacgtatgt

SEQ ID NO: 1374634 - DNA, 25 bp, Homo sapien
tcacaactgattctaatgtgttcag

SEQ ID NO: 1374635 - DNA, 25 bp, Homo sapien
gagaatctgcctcttaataatcaga

SEQ ID NO: 1374636 - DNA, 25 bp, Homo sapien
actgtatcatgtgagctgctgatga

SEQ ID NO: 1374637 - DNA, 25 bp, Homo sapien
tactcacgctgtccaaatgcaacga

SEQ ID NO: 1374638 - DNA, 25 bp, Homo sapien
gcaagaaaatttggagccctctgaa

SEQ ID NO: 1374639 - DNA, 25 bp, Homo sapien
tctaacatgctatctggaggaaaca

SEQ ID NO: 1374640 - DNA, 25 bp, Homo sapien
tgctgctgtaatatgattgtgaacc

SEQ ID NO: 1374641 - DNA, 25 bp, Homo sapien
cagttagagcttgggtgtttttgct

SEQ ID NO: 1374642 - DNA, 25 bp, Homo sapien
tattaaagaaccagactccgactgt

SEQ ID NO: 1374643 - DNA, 25 bp, Homo sapien
attaaagaaccagactccgactgtc

SEQ ID NO: 1374644 - DNA, 25 bp, Homo sapien
ccttgaaaattagcccaatgtctga

SEQ ID NO: 1374645 - DNA, 25 bp, Homo sapien
aaggagagacaccttgaaaattagc

SEQ ID NO: 1374646 - DNA, 25 bp, Homo sapien
acctgaaatcataggcaaggcttct

SEQ ID NO: 1374647 - DNA, 25 bp, Homo sapien
caatgtctgatgccacctgaaatca

SEQ ID NO: 1374648 - DNA, 25 bp, Homo sapien
ggtgagcctcatagcccttggtgga

SEQ ID NO: 1374649 - DNA, 25 bp, Homo sapien
tggttctgagcaccatccaaggggt

SEQ ID NO: 1374650 - DNA, 25 bp, Homo sapien
ccatccaaggggtgagcctcatagc

SEQ ID NO: 1374651 - DNA, 25 bp, Homo sapien
tagcccttggtggaccagagaacag

SEQ ID NO: 1374652 - DNA, 25 bp, Homo sapien
cactgatagatgtgaattactccca

SEQ ID NO: 1374653 - DNA, 25 bp, Homo sapien
tgattagtggacttcagagtaagga

SEQ ID NO: 1374654 - DNA, 25 bp, Homo sapien
tagaactatcctcaagtgaaggacg

SEQ ID NO: 1374655 - DNA, 25 bp, Homo sapien
tgaaggacgtagcaaatcactccat

SEQ ID NO: 1374656 - DNA, 25 bp, Homo sapien
tactcaagggtaatcatgtcaaggg

SEQ ID NO: 1374657 - DNA, 25 bp, Homo sapien
tcttcgagaggcagaacttaagtga

SEQ ID NO: 1374658 - DNA, 25 bp, Homo sapien
taattgatccatgactcctaactgg

SEQ ID NO: 1374659 - DNA, 25 bp, Homo sapien
gggctacaagaccaacaccatgatg

SEQ ID NO: 1374660 - DNA, 25 bp, Homo sapien
tatgtcccatcactagggagccagg

SEQ ID NO: 1374661 - DNA, 25 bp, Homo sapien
ggcaaagaattctcaacagcctgtg

SEQ ID NO: 1374662 - DNA, 25 bp, Homo sapien
tcccctatggtgtctatgatagaaa

SEQ ID NO: 1374663 - DNA, 25 bp, Homo sapien
gaaacacctttaagctctccttcat

SEQ ID NO: 1374664 - DNA, 25 bp, Homo sapien
ggcaagccaaactttttattcagcc

SEQ ID NO: 1374665 - DNA, 25 bp, Homo sapien
gccaaactttttattcagccagaaa

SEQ ID NO: 1374666 - DNA, 25 bp, Homo sapien
aagccaaactttttattcagccaga

SEQ ID NO: 1374667 - DNA, 25 bp, Homo sapien
caagccaaactttttattcagccag

SEQ ID NO: 1374668 - DNA, 25 bp, Homo sapien
cataatggtgaattaagcactataa

SEQ ID NO: 1374669 - DNA, 25 bp, Homo sapien
ggccaattcctcatagacagctaca

SEQ ID NO: 1374670 - DNA, 25 bp, Homo sapien
ccatctctatgagtagcataagagc

SEQ ID NO: 1374671 - DNA, 25 bp, Homo sapien
tgtgtaaaaccgtaccaagtcctgc

SEQ ID NO: 1374672 - DNA, 25 bp, Homo sapien
tccctcaggctgagagacgatgcct

SEQ ID NO: 1374673 - DNA, 25 bp, Homo sapien
ggcacagatctagcatatcaacata

SEQ ID NO: 1374674 - DNA, 25 bp, Homo sapien
gcctattaacggcacagatctagca

SEQ ID NO: 1374675 - DNA, 25 bp, Homo sapien
gctgagagacgatgcctattaacgg

SEQ ID NO: 1374676 - DNA, 25 bp, Homo sapien
cctgtgttgtctcacaagctgagag

SEQ ID NO: 1374677 - DNA, 25 bp, Homo sapien
ctgtgttgtctcacaagctgagagg

SEQ ID NO: 1374678 - DNA, 25 bp, Homo sapien
tcctgtgttgtctcacaagctgaga

SEQ ID NO: 1374679 - DNA, 25 bp, Homo sapien
acttgctttttgtcttaaatccaat

SEQ ID NO: 1374680 - DNA, 25 bp, Homo sapien
catgggggacttgctttttgtctta

SEQ ID NO: 1374681 - DNA, 25 bp, Homo sapien
tcatgggggacttgctttttgtctt

SEQ ID NO: 1374682 - DNA, 25 bp, Homo sapien
ggacttgctttttgtcttaaatcca

SEQ ID NO: 1374683 - DNA, 25 bp, Homo sapien
tggacgacctgatggtcccagccca

SEQ ID NO: 1374684 - DNA, 25 bp, Homo sapien
ggttctgtgggcacaacgtggtgga

SEQ ID NO: 1374685 - DNA, 25 bp, Homo sapien
ggcacaacgtggtggacgacctgat

SEQ ID NO: 1374686 - DNA, 25 bp, Homo sapien
caacgtggtggacgacctgatggtc

SEQ ID NO: 1374687 - DNA, 25 bp, Homo sapien
ttgagcggggaccaagtcgcatctc

SEQ ID NO: 1374688 - DNA, 25 bp, Homo sapien
gtgattgagcggggaccaagtcgca

SEQ ID NO: 1374689 - DNA, 25 bp, Homo sapien
cagggagtgattgagcggggaccaa

SEQ ID NO: 1374690 - DNA, 25 bp, Homo sapien
gattgagcggggaccaagtcgcatc

SEQ ID NO: 1374691 - DNA, 25 bp, Homo sapien
tcacaaagtctctgtgggcttggct

SEQ ID NO: 1374692 - DNA, 25 bp, Homo sapien
cacaaagtctctgtgggcttggctt

SEQ ID NO: 1374693 - DNA, 25 bp, Homo sapien
ggcagagtagagacaagaaaagcag

SEQ ID NO: 1374694 - DNA, 25 bp, Homo sapien
aaaaagagaacccaacacatctggg

SEQ ID NO: 1374695 - DNA, 25 bp, Homo sapien
cacattttttgggtgtgttacacac

SEQ ID NO: 1374696 - DNA, 25 bp, Homo sapien
gagacaagaaaagcagacctggaga

SEQ ID NO: 1374697 - DNA, 25 bp, Homo sapien
atttcaccaactgtatggcctcatc

SEQ ID NO: 1374698 - DNA, 25 bp, Homo sapien
tttcaccaactgtatggcctcatcg

SEQ ID NO: 1374699 - DNA, 25 bp, Homo sapien
tggcctcatcgccaggatagcagtg

SEQ ID NO: 1374700 - DNA, 25 bp, Homo sapien
cctcatcgccaggatagcagtgtag

SEQ ID NO: 1374701 - DNA, 25 bp, Homo sapien
tcatccaatccagtcttctattttc

SEQ ID NO: 1374702 - DNA, 25 bp, Homo sapien
tgaatgtgccccaggaatggacagg

SEQ ID NO: 1374703 - DNA, 25 bp, Homo sapien
caagtcccttcggatacagatggag

SEQ ID NO: 1374704 - DNA, 25 bp, Homo sapien
taacaggcagcaaatcacggcaagg

SEQ ID NO: 1374705 - DNA, 25 bp, Homo sapien
ctttatgtgagagggtagactgccg

SEQ ID NO: 1374706 - DNA, 25 bp, Homo sapien
agtcttcactgagagaggccaggaa

SEQ ID NO: 1374707 - DNA, 25 bp, Homo sapien
tgagcagtcttcactgagagaggcc

SEQ ID NO: 1374708 - DNA, 25 bp, Homo sapien
gcaagtgagcagtcttcactgagag

SEQ ID NO: 1374709 - DNA, 25 bp, Homo sapien
acagcaagtgagcagtcttcactga

SEQ ID NO: 1374710 - DNA, 25 bp, Homo sapien
gaggagagggttgtgaaaggtccag

SEQ ID NO: 1374711 - DNA, 25 bp, Homo sapien
ggaggagagggttgtgaaaggtcca

SEQ ID NO: 1374712 - DNA, 25 bp, Homo sapien
cactgtctgctttaaggaactactt

SEQ ID NO: 1374713 - DNA, 25 bp, Homo sapien
ggaactacttcatcagctaatgctt

SEQ ID NO: 1374714 - DNA, 25 bp, Homo sapien
cgatgttccgaaacctcagctagaa

SEQ ID NO: 1374715 - DNA, 25 bp, Homo sapien
cacttaagagatcttcgatgttccg

SEQ ID NO: 1374716 - DNA, 25 bp, Homo sapien
ggttcccatttatacccatcaggcc

SEQ ID NO: 1374717 - DNA, 25 bp, Homo sapien
acggttcccatttatacccatcagg

SEQ ID NO: 1374718 - DNA, 25 bp, Homo sapien
tcacggttcccatttatacccatca

SEQ ID NO: 1374719 - DNA, 25 bp, Homo sapien
cccatttatacccatcaggcccctg

SEQ ID NO: 1374720 - DNA, 25 bp, Homo sapien
agcccagtgacacactgggagtgta

SEQ ID NO: 1374721 - DNA, 25 bp, Homo sapien
cagtgacacactgggagtgtacagc

SEQ ID NO: 1374722 - DNA, 25 bp, Homo sapien
tactcttggtgtccacaagggagac

SEQ ID NO: 1374723 - DNA, 25 bp, Homo sapien
aggacacagcttgtactcttggtgt

SEQ ID NO: 1374724 - DNA, 25 bp, Homo sapien
aagacaaagacttcactttgctgag

SEQ ID NO: 1374725 - DNA, 25 bp, Homo sapien
actttgctgaggatgccaagccagc

SEQ ID NO: 1374726 - DNA, 25 bp, Homo sapien
taggaaggtagccaggcgcactgca

SEQ ID NO: 1374727 - DNA, 25 bp, Homo sapien
tgccaagccagcgaggtaggaaggt

SEQ ID NO: 1374728 - DNA, 25 bp, Homo sapien
ggcttgggacagcgggtatcccaga

SEQ ID NO: 1374729 - DNA, 25 bp, Homo sapien
tggcttgggacagcgggtatcccag

SEQ ID NO: 1374730 - DNA, 25 bp, Homo sapien
ctggcttgggacagcgggtatccca

SEQ ID NO: 1374731 - DNA, 25 bp, Homo sapien
acacaagtgacctgagcagcatgag

SEQ ID NO: 1374732 - DNA, 25 bp, Homo sapien
caacacaagtgacctgagcagcatg

SEQ ID NO: 1374733 - DNA, 25 bp, Homo sapien
aacacaagtgacctgagcagcatga

SEQ ID NO: 1374734 - DNA, 25 bp, Homo sapien
gacattcatgcaaactaagtagcgt

SEQ ID NO: 1374735 - DNA, 25 bp, Homo sapien
tctttccacgctacaatgctcaggg

SEQ ID NO: 1374736 - DNA, 25 bp, Homo sapien
cactggctttacaatgcagactggc

SEQ ID NO: 1374737 - DNA, 25 bp, Homo sapien
taagtagcgttaacctgcgaatcta

SEQ ID NO: 1374738 - DNA, 25 bp, Homo sapien
cctgctgagcaaggtcccaaacctt

SEQ ID NO: 1374739 - DNA, 25 bp, Homo sapien
ctcggtatgaactcagtaccacctg

SEQ ID NO: 1374740 - DNA, 25 bp, Homo sapien
acctgctgagcaaggtcccaaacct

SEQ ID NO: 1374741 - DNA, 25 bp, Homo sapien
aggaggcttagagacaggagcaatg

SEQ ID NO: 1374742 - DNA, 25 bp, Homo sapien
aggcttagagacaggagcaatgaga

SEQ ID NO: 1374743 - DNA, 25 bp, Homo sapien
gcttagagacaggagcaatgagaac

SEQ ID NO: 1374744 - DNA, 25 bp, Homo sapien
ttagagacaggagcaatgagaacag

SEQ ID NO: 1374745 - DNA, 25 bp, Homo sapien
gcagaacttgctgacaataagtgtc

SEQ ID NO: 1374746 - DNA, 25 bp, Homo sapien
tgctgacaataagtgtctcattctc

SEQ ID NO: 1374747 - DNA, 25 bp, Homo sapien
tcatctagttcccacaattcaacag

SEQ ID NO: 1374748 - DNA, 25 bp, Homo sapien
gacactgactgtagacacaatgtca

SEQ ID NO: 1374749 - DNA, 25 bp, Homo sapien
acatgagcttggattataccaaggc

SEQ ID NO: 1374750 - DNA, 25 bp, Homo sapien
gattataccaaggcagtaattcact

SEQ ID NO: 1374751 - DNA, 25 bp, Homo sapien
aacatgagcttggattataccaagg

SEQ ID NO: 1374752 - DNA, 25 bp, Homo sapien
aaaacatgagcttggattataccaa

SEQ ID NO: 1374753 - DNA, 25 bp, Homo sapien
tttaaacttccatgcaatgccggcc

SEQ ID NO: 1374754 - DNA, 25 bp, Homo sapien
gaataattgaacgtcttgcacagtg

SEQ ID NO: 1374755 - DNA, 25 bp, Homo sapien
tgttcaagctcaactgtcagagagg

SEQ ID NO: 1374756 - DNA, 25 bp, Homo sapien
gtttaagcagcacactatccagtga

SEQ ID NO: 1374757 - DNA, 25 bp, Homo sapien
tctccccaacccaagtgaggtcagc

SEQ ID NO: 1374758 - DNA, 25 bp, Homo sapien
agcctccgtttggactccggcggag

SEQ ID NO: 1374759 - DNA, 25 bp, Homo sapien
tgaatcggaggccactagaatacct

SEQ ID NO: 1374760 - DNA, 25 bp, Homo sapien
actccggcggagcagaagccttcgt

SEQ ID NO: 1374761 - DNA, 25 bp, Homo sapien
ttcgcctccatggagaccgcacaga

SEQ ID NO: 1374762 - DNA, 25 bp, Homo sapien
gggtacaagctgtcagcgcgtgaag

SEQ ID NO: 1374763 - DNA, 25 bp, Homo sapien
tgaagggtagaagggttcgcctcca

SEQ ID NO: 1374764 - DNA, 25 bp, Homo sapien
tacaagctgtcagcgcgtgaagggt

SEQ ID NO: 1374765 - DNA, 25 bp, Homo sapien
aactgccgttccatgcaggcgggcg

SEQ ID NO: 1374766 - DNA, 25 bp, Homo sapien
ccgttccatgcaggcgggcgcattt

SEQ ID NO: 1374767 - DNA, 25 bp, Homo sapien
tccaactgccgttccatgcaggcgg

SEQ ID NO: 1374768 - DNA, 25 bp, Homo sapien
gcagcctccaactgccgttccatgc

SEQ ID NO: 1374769 - DNA, 25 bp, Homo sapien
ccctcatgcgataggctctcagcgt

SEQ ID NO: 1374770 - DNA, 25 bp, Homo sapien
tagactcaaactggacgccggccgg

SEQ ID NO: 1374771 - DNA, 25 bp, Homo sapien
tctcgcgagaattgcttctatggct

SEQ ID NO: 1374772 - DNA, 25 bp, Homo sapien
gaaccgcaactctacttctcgcgag

SEQ ID NO: 1374773 - DNA, 25 bp, Homo sapien
tctttatcctaaaactggtgtaaca

SEQ ID NO: 1374774 - DNA, 25 bp, Homo sapien
cgttatggactgatccctgaggaat

SEQ ID NO: 1374775 - DNA, 25 bp, Homo sapien
cctcttcctgaatacggaggaaaag

SEQ ID NO: 1374776 - DNA, 25 bp, Homo sapien
cggaggaaaagttcgttatggactg

SEQ ID NO: 1374777 - DNA, 25 bp, Homo sapien
tcggaactgggcttatcttgtacgc

SEQ ID NO: 1374778 - DNA, 25 bp, Homo sapien
aatatatgtgattagcgcagagacc

SEQ ID NO: 1374779 - DNA, 25 bp, Homo sapien
ctatcagtactaggtgtaatggtct

SEQ ID NO: 1374780 - DNA, 25 bp, Homo sapien
gcagagaccttcactgccctatcag

SEQ ID NO: 1374781 - DNA, 25 bp, Homo sapien
aaaacttgcccaactagaagaggcg

SEQ ID NO: 1374782 - DNA, 25 bp, Homo sapien
catccagaatgcaattgatacggag

SEQ ID NO: 1374783 - DNA, 25 bp, Homo sapien
gttcagaagcgccattacctttttg

SEQ ID NO: 1374784 - DNA, 25 bp, Homo sapien
gaagtcacaacaggcactggttcag

SEQ ID NO: 1374785 - DNA, 25 bp, Homo sapien
ccgggaacgactgtatagagtatat

SEQ ID NO: 1374786 - DNA, 25 bp, Homo sapien
tacttaccgggaacgactgtataga

SEQ ID NO: 1374787 - DNA, 25 bp, Homo sapien
ctatggctttggaagttacttaccg

SEQ ID NO: 1374788 - DNA, 25 bp, Homo sapien
attgctatggctttggaagttactt

SEQ ID NO: 1374789 - DNA, 25 bp, Homo sapien
gcctttataaaaacttgctgcctga

SEQ ID NO: 1374790 - DNA, 25 bp, Homo sapien
tctgcctttgagttgttccgtgatc

SEQ ID NO: 1374791 - DNA, 25 bp, Homo sapien
tccgtgatcacttctgaataagcag

SEQ ID NO: 1374792 - DNA, 25 bp, Homo sapien
tctatcggccagtcagatgtttctc

SEQ ID NO: 1374793 - DNA, 25 bp, Homo sapien
ctagagggaaccaaaggttggctca

SEQ ID NO: 1374794 - DNA, 25 bp, Homo sapien
cagtgaaggaggatacacatagtaa

SEQ ID NO: 1374795 - DNA, 25 bp, Homo sapien
tttctcaccccagtaactagaggga

SEQ ID NO: 1374796 - DNA, 25 bp, Homo sapien
gaaaaagtcaatggaagaagaggat

SEQ ID NO: 1374797 - DNA, 25 bp, Homo sapien
agctagaggccatatcagctttcca

SEQ ID NO: 1374798 - DNA, 25 bp, Homo sapien
gctagaggccatatcagctttccag

SEQ ID NO: 1374799 - DNA, 25 bp, Homo sapien
aagctagaggccatatcagctttcc

SEQ ID NO: 1374800 - DNA, 25 bp, Homo sapien
agccttgcttgggtgtggtctatca

SEQ ID NO: 1374801 - DNA, 25 bp, Homo sapien
tcctgggagatcagaatcagtctct

SEQ ID NO: 1374802 - DNA, 25 bp, Homo sapien
caacactggctaggaatttattggc

SEQ ID NO: 1374803 - DNA, 25 bp, Homo sapien
gatgttatttgagggcagccttgct

SEQ ID NO: 1374804 - DNA, 25 bp, Homo sapien
cctttggagtcaggacacgcgagaa

SEQ ID NO: 1374805 - DNA, 25 bp, Homo sapien
gtcaggacacgcgagaagggcttca

SEQ ID NO: 1374806 - DNA, 25 bp, Homo sapien
tcaggacacgcgagaagggcttcaa

SEQ ID NO: 1374807 - DNA, 25 bp, Homo sapien
ccatttcctttggagtcaggacacg

SEQ ID NO: 1374808 - DNA, 25 bp, Homo sapien
tggtcttgggcagacctgagaaagc

SEQ ID NO: 1374809 - DNA, 25 bp, Homo sapien
tcttgggcagacctgagaaagccat

SEQ ID NO: 1374810 - DNA, 25 bp, Homo sapien
gggcagacctgagaaagccattgtc

SEQ ID NO: 1374811 - DNA, 25 bp, Homo sapien
aagggctggtcttgggcagacctga

SEQ ID NO: 1374812 - DNA, 25 bp, Homo sapien
caacagggcaacatcctgtgtatat

SEQ ID NO: 1374813 - DNA, 25 bp, Homo sapien
gcaacatcctgtgtatatgaaaaag

SEQ ID NO: 1374814 - DNA, 25 bp, Homo sapien
tgggcaacagggcaacatcctgtgt

SEQ ID NO: 1374815 - DNA, 25 bp, Homo sapien
agggcaacatcctgtgtatatgaaa

SEQ ID NO: 1374816 - DNA, 25 bp, Homo sapien
gctcattccttcgacaggagcccga

SEQ ID NO: 1374817 - DNA, 25 bp, Homo sapien
cagcggtcccagaagctcattcctt

SEQ ID NO: 1374818 - DNA, 25 bp, Homo sapien
cagaagctcattccttcgacaggag

SEQ ID NO: 1374819 - DNA, 25 bp, Homo sapien
gacaggagcccgaagtttgtgtgct

SEQ ID NO: 1374820 - DNA, 25 bp, Homo sapien
acctggtgtggttgtctcaggacct

SEQ ID NO: 1374821 - DNA, 25 bp, Homo sapien
cacttctcgtgatgccttgtcacca

SEQ ID NO: 1374822 - DNA, 25 bp, Homo sapien
gctgcattggtctccaggtgaccag

SEQ ID NO: 1374823 - DNA, 25 bp, Homo sapien
accatcaagcagatatctaccccag

SEQ ID NO: 1374824 - DNA, 25 bp, Homo sapien
actgattacagagatgattcccaaa

SEQ ID NO: 1374825 - DNA, 25 bp, Homo sapien
tccttttggtcaaatgactgattac

SEQ ID NO: 1374826 - DNA, 25 bp, Homo sapien
tacagagatgattcccaaacccgtg

SEQ ID NO: 1374827 - DNA, 25 bp, Homo sapien
caaatgactgattacagagatgatt

SEQ ID NO: 1374828 - DNA, 25 bp, Homo sapien
tcagtatgcaaatgatgagaatgga

SEQ ID NO: 1374829 - DNA, 25 bp, Homo sapien
tatgcaaatgatgagaatggacgtc

SEQ ID NO: 1374830 - DNA, 25 bp, Homo sapien
gtatgcaaatgatgagaatggacgt

SEQ ID NO: 1374831 - DNA, 25 bp, Homo sapien
cagtatgcaaatgatgagaatggac

SEQ ID NO: 1374832 - DNA, 25 bp, Homo sapien
gcggtcagccttgcggacaactttg

SEQ ID NO: 1374833 - DNA, 25 bp, Homo sapien
agcggtcagccttgcggacaacttt

SEQ ID NO: 1374834 - DNA, 25 bp, Homo sapien
cggtcagccttgcggacaactttgg

SEQ ID NO: 1374835 - DNA, 25 bp, Homo sapien
aaagtcattggccagggttcctttg

SEQ ID NO: 1374836 - DNA, 25 bp, Homo sapien
tggccagggttcctttgtcgtcagt

SEQ ID NO: 1374837 - DNA, 25 bp, Homo sapien
ttggccagggttcctttgtcgtcag

SEQ ID NO: 1374838 - DNA, 25 bp, Homo sapien
gccagggttcctttgtcgtcagtta

SEQ ID NO: 1374839 - DNA, 25 bp, Homo sapien
taaaatccatgtcatccctggcaaa

SEQ ID NO: 1374840 - DNA, 25 bp, Homo sapien
tggtcaggcaggacatagtgacaat

SEQ ID NO: 1374841 - DNA, 25 bp, Homo sapien
gcaaagtcccgctggatgccacacc

SEQ ID NO: 1374842 - DNA, 25 bp, Homo sapien
gtccctcagggccacatgattggtg

SEQ ID NO: 1374843 - DNA, 25 bp, Homo sapien
cagcacaaagcttctcttgaccttt

SEQ ID NO: 1374844 - DNA, 25 bp, Homo sapien
tgtagtgggcattgtagttgcagat

SEQ ID NO: 1374845 - DNA, 25 bp, Homo sapien
aatagcctcggcaccagtatttggg

SEQ ID NO: 1374846 - DNA, 25 bp, Homo sapien
agatggcagaagccgtgtccagcac

SEQ ID NO: 1374847 - DNA, 25 bp, Homo sapien
cattgcttgacggagggccttgaag

SEQ ID NO: 1374848 - DNA, 25 bp, Homo sapien
ggagggccttgaagagcctgaggct

SEQ ID NO: 1374849 - DNA, 25 bp, Homo sapien
atatggaatgcgtaatgaatttgca

SEQ ID NO: 1374850 - DNA, 25 bp, Homo sapien
taatctactctgtatcattctaatt

SEQ ID NO: 1374851 - DNA, 25 bp, Homo sapien
tgtcatccttgcacaagggccatgc

SEQ ID NO: 1374852 - DNA, 25 bp, Homo sapien
tcagtatatgtgctgccaaagtgag

SEQ ID NO: 1374853 - DNA, 25 bp, Homo sapien
aggagagtagaatgaagagccacat

SEQ ID NO: 1374854 - DNA, 25 bp, Homo sapien
tgagagccaaggagagtagaatgaa

SEQ ID NO: 1374855 - DNA, 25 bp, Homo sapien
tgaaatgagagccaaggagagtaga

SEQ ID NO: 1374856 - DNA, 25 bp, Homo sapien
aatgagagccaaggagagtagaatg

SEQ ID NO: 1374857 - DNA, 25 bp, Homo sapien
ggaatgatagaatgcacccagggag

SEQ ID NO: 1374858 - DNA, 25 bp, Homo sapien
atgatagaatgcacccagggagccc

SEQ ID NO: 1374859 - DNA, 25 bp, Homo sapien
gcaaactttcaactggaatgataga

SEQ ID NO: 1374860 - DNA, 25 bp, Homo sapien
aaggaagcaaactttcaactggaat

SEQ ID NO: 1374861 - DNA, 25 bp, Homo sapien
ctgtttaagggaaacagatatgctt

SEQ ID NO: 1374862 - DNA, 25 bp, Homo sapien
tgtttaagggaaacagatatgcttg

SEQ ID NO: 1374863 - DNA, 25 bp, Homo sapien
tgtaaaaatcccttggcccaggcat

SEQ ID NO: 1374864 - DNA, 25 bp, Homo sapien
ggtgaattcagcagtttaagtcccc

SEQ ID NO: 1374865 - DNA, 25 bp, Homo sapien
tgtcagtaagtcaactaggcaccct

SEQ ID NO: 1374866 - DNA, 25 bp, Homo sapien
caataatacgttgtccccaagtcag

SEQ ID NO: 1374867 - DNA, 25 bp, Homo sapien
cagttgatgatagataaaggcagcc

SEQ ID NO: 1374868 - DNA, 25 bp, Homo sapien
taggcatagacgatagggttcatca

SEQ ID NO: 1374869 - DNA, 25 bp, Homo sapien
caaagaatcagagggatggcagacc

SEQ ID NO: 1374870 - DNA, 25 bp, Homo sapien
cagcaggatgcccatgtacagcaca

SEQ ID NO: 1374871 - DNA, 25 bp, Homo sapien
gtccattctcatgacggaaacaaat

SEQ ID NO: 1374872 - DNA, 25 bp, Homo sapien
catttctgtggtactctgaggtcag

SEQ ID NO: 1374873 - DNA, 25 bp, Homo sapien
acatttctgtggtactctgaggtca

SEQ ID NO: 1374874 - DNA, 25 bp, Homo sapien
tttctgtggtactctgaggtcagtt

SEQ ID NO: 1374875 - DNA, 25 bp, Homo sapien
caaacatgggggtcaatcccaccag

SEQ ID NO: 1374876 - DNA, 25 bp, Homo sapien
ttcttctgtgagtggtgaccctctt

SEQ ID NO: 1374877 - DNA, 25 bp, Homo sapien
attcttctgtgagtggtgaccctct

SEQ ID NO: 1374878 - DNA, 25 bp, Homo sapien
gggggtcaatcccaccaggaatgac

SEQ ID NO: 1374879 - DNA, 25 bp, Homo sapien
ctgtgtgaatgaagagagtcagtga

SEQ ID NO: 1374880 - DNA, 25 bp, Homo sapien
tgtgtgaatgaagagagtcagtgag

SEQ ID NO: 1374881 - DNA, 25 bp, Homo sapien
caagatcagatctctaatctgggat

SEQ ID NO: 1374882 - DNA, 25 bp, Homo sapien
gcttgtttgtagctccctcactctg

SEQ ID NO: 1374883 - DNA, 25 bp, Homo sapien
cgagcatcgtaaccactgtgataca

SEQ ID NO: 1374884 - DNA, 25 bp, Homo sapien
tatgaggatagtgcaattatcccca

SEQ ID NO: 1374885 - DNA, 25 bp, Homo sapien
taggcaagtcataaaaaggcagctg

SEQ ID NO: 1374886 - DNA, 25 bp, Homo sapien
ttgaccacgcagatgaccagcacgt

SEQ ID NO: 1374887 - DNA, 25 bp, Homo sapien
cagcgatggccagcaaggacatgat

SEQ ID NO: 1374888 - DNA, 25 bp, Homo sapien
cagccagggctagagagacaatgaa

SEQ ID NO: 1374889 - DNA, 25 bp, Homo sapien
tgtaggtaacattggccaatgacag

SEQ ID NO: 1374890 - DNA, 25 bp, Homo sapien
gatgtaggtaacattggccaatgac

SEQ ID NO: 1374891 - DNA, 25 bp, Homo sapien
gtaggtaacattggccaatgacaga

SEQ ID NO: 1374892 - DNA, 25 bp, Homo sapien
ggtgatgtaggtaacattggccaat

SEQ ID NO: 1374893 - DNA, 25 bp, Homo sapien
caagatccgtctgtagggccagtgg

SEQ ID NO: 1374894 - DNA, 25 bp, Homo sapien
tcccagaggtccatgtgcagtgaca

SEQ ID NO: 1374895 - DNA, 25 bp, Homo sapien
tgtgcagtgacagtctaaaattccc

SEQ ID NO: 1374896 - DNA, 25 bp, Homo sapien
agtgggcctagctctcgccagacgt

SEQ ID NO: 1374897 - DNA, 25 bp, Homo sapien
tcattcagggaccagaggacagtgc

SEQ ID NO: 1374898 - DNA, 25 bp, Homo sapien
tagaaagggctcatcacaggtgggt

SEQ ID NO: 1374899 - DNA, 25 bp, Homo sapien
tagagaaggctcgagacaagattgg

SEQ ID NO: 1374900 - DNA, 25 bp, Homo sapien
cacgagttgacgctttgctgagcac

SEQ ID NO: 1374901 - DNA, 25 bp, Homo sapien
tgcctcatcacatctcaagtaggag

SEQ ID NO: 1374902 - DNA, 25 bp, Homo sapien
tactcggtgcctcaggcaaccagag

SEQ ID NO: 1374903 - DNA, 25 bp, Homo sapien
ggtctgcacattgccttaggatcaa

SEQ ID NO: 1374904 - DNA, 25 bp, Homo sapien
aaccagaggaaccacgccagagctc

SEQ ID NO: 1374905 - DNA, 25 bp, Homo sapien
tcagctgccggagacttagcacggt

SEQ ID NO: 1374906 - DNA, 25 bp, Homo sapien
gctatgctcaatggtggccaccaga

SEQ ID NO: 1374907 - DNA, 25 bp, Homo sapien
ttctgttgtcactcgggacccaggc

SEQ ID NO: 1374908 - DNA, 25 bp, Homo sapien
tagcacggtagcgtcagcttcaagt

SEQ ID NO: 1374909 - DNA, 25 bp, Homo sapien
tagagattggtgttccccgatggga

SEQ ID NO: 1374910 - DNA, 25 bp, Homo sapien
ggagtcgccgctgagaggctgttca

SEQ ID NO: 1374911 - DNA, 25 bp, Homo sapien
gctgttcatgccctggttgtagaga

SEQ ID NO: 1374912 - DNA, 25 bp, Homo sapien
tgtgaggaaggagtcgccgctgaga

SEQ ID NO: 1374913 - DNA, 25 bp, Homo sapien
cagctgccccttgtgccagaggcga

SEQ ID NO: 1374914 - DNA, 25 bp, Homo sapien
agaggcgatgagcaccgggcctcct

SEQ ID NO: 1374915 - DNA, 25 bp, Homo sapien
agcggctgggttccgcggcagcacg

SEQ ID NO: 1374916 - DNA, 25 bp, Homo sapien
cagcagatgacaaggaaggaggtct

SEQ ID NO: 1374917 - DNA, 25 bp, Homo sapien
atgtactcttaagtattgtttgttg

SEQ ID NO: 1374918 - DNA, 25 bp, Homo sapien
ttattaaatgtactcttaagtattg

SEQ ID NO: 1374919 - DNA, 25 bp, Homo sapien
tactcttaagtattgtttgttgctt

SEQ ID NO: 1374920 - DNA, 25 bp, Homo sapien
tattaaatgtactcttaagtattgt

SEQ ID NO: 1374921 - DNA, 25 bp, Homo sapien
ctgaaaacatgtgccaatgagggcc

SEQ ID NO: 1374922 - DNA, 25 bp, Homo sapien
gataactccgtttggaatgtgctgc

SEQ ID NO: 1374923 - DNA, 25 bp, Homo sapien
tgagggccgataactccgtttggaa

SEQ ID NO: 1374924 - DNA, 25 bp, Homo sapien
tattcacatattgctcagcaatcac

SEQ ID NO: 1374925 - DNA, 25 bp, Homo sapien
cacaacagcttcattgtatgaggag

SEQ ID NO: 1374926 - DNA, 25 bp, Homo sapien
gaacttggaccttcagtgcacagac

SEQ ID NO: 1374927 - DNA, 25 bp, Homo sapien
tgttagccattgagctctagaaacc

SEQ ID NO: 1374928 - DNA, 25 bp, Homo sapien
gagagcattgaactgaagctttcct

SEQ ID NO: 1374929 - DNA, 25 bp, Homo sapien
tgaacatagggactatccttttaaa

SEQ ID NO: 1374930 - DNA, 25 bp, Homo sapien
ctgaacatagggactatccttttaa

SEQ ID NO: 1374931 - DNA, 25 bp, Homo sapien
acagagctctccacggtgttcagtg

SEQ ID NO: 1374932 - DNA, 25 bp, Homo sapien
tagcacagcacagagctctccacgg

SEQ ID NO: 1374933 - DNA, 25 bp, Homo sapien
acagcacagagctctccacggtgtt

SEQ ID NO: 1374934 - DNA, 25 bp, Homo sapien
cacagcacagagctctccacggtgt

SEQ ID NO: 1374935 - DNA, 25 bp, Homo sapien
ctcctttgggtttagaaccatattg

SEQ ID NO: 1374936 - DNA, 25 bp, Homo sapien
tgagtctcctttgggtttagaacca

SEQ ID NO: 1374937 - DNA, 25 bp, Homo sapien
gaccagcttaatgaaacagacatcc

SEQ ID NO: 1374938 - DNA, 25 bp, Homo sapien
ttagaccagcttaatgaaacagaca

SEQ ID NO: 1374939 - DNA, 25 bp, Homo sapien
cagacatccttcgcgtactgacgga

SEQ ID NO: 1374940 - DNA, 25 bp, Homo sapien
accagcttaatgaaacagacatcct

SEQ ID NO: 1374941 - DNA, 25 bp, Homo sapien
ttctcttatgtgcaaactaaccata

SEQ ID NO: 1374942 - DNA, 25 bp, Homo sapien
tatgtgcaaactaaccatagtggac

SEQ ID NO: 1374943 - DNA, 25 bp, Homo sapien
tcttatgtgcaaactaaccatagtg

SEQ ID NO: 1374944 - DNA, 25 bp, Homo sapien
tgtgcaaactaaccatagtggacat

SEQ ID NO: 1374945 - DNA, 25 bp, Homo sapien
tgtgactcaggactcaagcagccca

SEQ ID NO: 1374946 - DNA, 25 bp, Homo sapien
agtacaggggcggcatttgctgctc

SEQ ID NO: 1374947 - DNA, 25 bp, Homo sapien
gtacaggggcggcatttgctgctcc

SEQ ID NO: 1374948 - DNA, 25 bp, Homo sapien
taagtacaggggcggcatttgctgc

SEQ ID NO: 1374949 - DNA, 25 bp, Homo sapien
ataagtacaggggcggcatttgctg

SEQ ID NO: 1374950 - DNA, 25 bp, Homo sapien
gatggctcatggaattcagggaaac

SEQ ID NO: 1374951 - DNA, 25 bp, Homo sapien
tatggcagagcggttgcagagcttc

SEQ ID NO: 1374952 - DNA, 25 bp, Homo sapien
ttccacgccgtgtctaggtgagcca

SEQ ID NO: 1374953 - DNA, 25 bp, Homo sapien
tcctagtgtttagcagtcccaaagc

SEQ ID NO: 1374954 - DNA, 25 bp, Homo sapien
caatatctggaccagcaacctgaag

SEQ ID NO: 1374955 - DNA, 25 bp, Homo sapien
ggtactagtacagattcctcgggct

SEQ ID NO: 1374956 - DNA, 25 bp, Homo sapien
atatctggaccagcaacctgaaggc

SEQ ID NO: 1374957 - DNA, 25 bp, Homo sapien
agggaggtactagtacagattcctc

SEQ ID NO: 1374958 - DNA, 25 bp, Homo sapien
cacgcttcaaaactgttgaggagca

SEQ ID NO: 1374959 - DNA, 25 bp, Homo sapien
cattgagcaaccttcagtaaacaca

SEQ ID NO: 1374960 - DNA, 25 bp, Homo sapien
taagcaccttctattacataccccg

SEQ ID NO: 1374961 - DNA, 25 bp, Homo sapien
tcctgcctaccctttgaggagcact

SEQ ID NO: 1374962 - DNA, 25 bp, Homo sapien
tactaacacataaaaagacagcact

SEQ ID NO: 1374963 - DNA, 25 bp, Homo sapien
taacacataaaaagacagcactttg

SEQ ID NO: 1374964 - DNA, 25 bp, Homo sapien
attactaacacataaaaagacagca

SEQ ID NO: 1374965 - DNA, 25 bp, Homo sapien
acacataaaaagacagcactttgga

SEQ ID NO: 1374966 - DNA, 25 bp, Homo sapien
tttaaagtgtgcggcactgtcccct

SEQ ID NO: 1374967 - DNA, 25 bp, Homo sapien
tagttctgcctcgtgagataaggtt

SEQ ID NO: 1374968 - DNA, 25 bp, Homo sapien
tcctcttcaccttccaagatgattg

SEQ ID NO: 1374969 - DNA, 25 bp, Homo sapien
tgactcagcaccattcccttggtga

SEQ ID NO: 1374970 - DNA, 25 bp, Homo sapien
tgttcaggatcaagtcagtcttcat

SEQ ID NO: 1374971 - DNA, 25 bp, Homo sapien
gtaggttatgttcaggatcaagtca

SEQ ID NO: 1374972 - DNA, 25 bp, Homo sapien
ggttatgttcaggatcaagtcagtc

SEQ ID NO: 1374973 - DNA, 25 bp, Homo sapien
tatgttcaggatcaagtcagtcttc

SEQ ID NO: 1374974 - DNA, 25 bp, Homo sapien
attttggagtcaggaagctctggct

SEQ ID NO: 1374975 - DNA, 25 bp, Homo sapien
aaagaggattttggagtcaggaagc

SEQ ID NO: 1374976 - DNA, 25 bp, Homo sapien
ggattttggagtcaggaagctctgg

SEQ ID NO: 1374977 - DNA, 25 bp, Homo sapien
cttcagcaggataacaggaaagaaa

SEQ ID NO: 1374978 - DNA, 25 bp, Homo sapien
cccagtggcaggatgtccacagttc

SEQ ID NO: 1374979 - DNA, 25 bp, Homo sapien
caggatgtccacagttcagcttata

SEQ ID NO: 1374980 - DNA, 25 bp, Homo sapien
gtgaggggactccccattacattct

SEQ ID NO: 1374981 - DNA, 25 bp, Homo sapien
gtggcaggatgtccacagttcagct

SEQ ID NO: 1374982 - DNA, 25 bp, Homo sapien
ttgggccaatctattgacagccacc

SEQ ID NO: 1374983 - DNA, 25 bp, Homo sapien
tttgggccaatctattgacagccac

SEQ ID NO: 1374984 - DNA, 25 bp, Homo sapien
tcactgtcgtcaccaggggcaagct

SEQ ID NO: 1374985 - DNA, 25 bp, Homo sapien
gtcctctgtaaggatgtcactgtcg

SEQ ID NO: 1374986 - DNA, 25 bp, Homo sapien
atgtcactgtcgtcaccaggggcaa

SEQ ID NO: 1374987 - DNA, 25 bp, Homo sapien
cctctgtaaggatgtcactgtcgtc

SEQ ID NO: 1374988 - DNA, 25 bp, Homo sapien
cagctttgcatgtatcttggcactg

SEQ ID NO: 1374989 - DNA, 25 bp, Homo sapien
tttgcatgtatcttggcactgcacg

SEQ ID NO: 1374990 - DNA, 25 bp, Homo sapien
tgcatgtatcttggcactgcacggc

SEQ ID NO: 1374991 - DNA, 25 bp, Homo sapien
actgcacggcccagtagtaccacat

SEQ ID NO: 1374992 - DNA, 25 bp, Homo sapien
ttttcagacggggcggctgcgaggc

SEQ ID NO: 1374993 - DNA, 25 bp, Homo sapien
acggggcggctgcgaggcggagggt

SEQ ID NO: 1374994 - DNA, 25 bp, Homo sapien
cagacggggcggctgcgaggcggag

SEQ ID NO: 1374995 - DNA, 25 bp, Homo sapien
ggggcggctgcgaggcggagggtct

SEQ ID NO: 1374996 - DNA, 25 bp, Homo sapien
agctccagacggccccagagggagc

SEQ ID NO: 1374997 - DNA, 25 bp, Homo sapien
tcaaactagcggcttggtaagagta

SEQ ID NO: 1374998 - DNA, 25 bp, Homo sapien
tcttcagccgagttgtgtaatttac

SEQ ID NO: 1374999 - DNA, 25 bp, Homo sapien
aagttaaggacggtgtcttcagccg

SEQ ID NO: 1375000 - DNA, 25 bp, Homo sapien
tcttgcccccttaatcaggaagtta

SEQ ID NO: 1375001 - DNA, 25 bp, Homo sapien
tttctagacatacagaatcactaat

SEQ ID NO: 1375002 - DNA, 25 bp, Homo sapien
ttttctagacatacagaatcactaa

SEQ ID NO: 1375003 - DNA, 25 bp, Homo sapien
tacacccaggcagaataggagtatg

SEQ ID NO: 1375004 - DNA, 25 bp, Homo sapien
gattagatattggagcctacggcca

SEQ ID NO: 1375005 - DNA, 25 bp, Homo sapien
gaataacacatggaagttgacgtgc

SEQ ID NO: 1375006 - DNA, 25 bp, Homo sapien
tatcataggaatggatacctagagg

SEQ ID NO: 1375007 - DNA, 25 bp, Homo sapien
tgctttggattgtgggtctgcgtct

SEQ ID NO: 1375008 - DNA, 25 bp, Homo sapien
catggtagtggtatgctttttgcat

SEQ ID NO: 1375009 - DNA, 25 bp, Homo sapien
gggtctgcgtctatcaaagtgaaaa

SEQ ID NO: 1375010 - DNA, 25 bp, Homo sapien
ttttcccctcatggtagtggtatgc

SEQ ID NO: 1375011 - DNA, 25 bp, Homo sapien
catcctttgagtgggactttaggaa

SEQ ID NO: 1375012 - DNA, 25 bp, Homo sapien
gattgatgtgcagtactgagggtcc

SEQ ID NO: 1375013 - DNA, 25 bp, Homo sapien
tatagggcaggtagaaaggttgacc

SEQ ID NO: 1375014 - DNA, 25 bp, Homo sapien
gcagaactagctcgactgttgatta

SEQ ID NO: 1375015 - DNA, 25 bp, Homo sapien
tatacctctgaccatttaataggag

SEQ ID NO: 1375016 - DNA, 25 bp, Homo sapien
acaacgtaacatgggtttggcaagc

SEQ ID NO: 1375017 - DNA, 25 bp, Homo sapien
cttttgtacccctcatcactgcgaa

SEQ ID NO: 1375018 - DNA, 25 bp, Homo sapien
ggagatccctgccaattagagctag

SEQ ID NO: 1375019 - DNA, 25 bp, Homo sapien
gcttctgctggcttaattctcagaa

SEQ ID NO: 1375020 - DNA, 25 bp, Homo sapien
tgcttctgctggcttaattctcaga

SEQ ID NO: 1375021 - DNA, 25 bp, Homo sapien
cttctgctggcttaattctcagaac

SEQ ID NO: 1375022 - DNA, 25 bp, Homo sapien
cctgcttctgctggcttaattctca

SEQ ID NO: 1375023 - DNA, 25 bp, Homo sapien
actatctggtggatggtcgtctttt

SEQ ID NO: 1375024 - DNA, 25 bp, Homo sapien
ggatggtcgtcttttggatggttcg

SEQ ID NO: 1375025 - DNA, 25 bp, Homo sapien
tctggtggatggtcgtcttttggat

SEQ ID NO: 1375026 - DNA, 25 bp, Homo sapien
tatctggtggatggtcgtcttttgg

SEQ ID NO: 1375027 - DNA, 25 bp, Homo sapien
gcagggcctcgtactcactcctggg

SEQ ID NO: 1375028 - DNA, 25 bp, Homo sapien
gcctggcgttgcccctctgcccggg

SEQ ID NO: 1375029 - DNA, 25 bp, Homo sapien
gatattcagcagggcctcgtactca

SEQ ID NO: 1375030 - DNA, 25 bp, Homo sapien
attcagcagggcctcgtactcactc

SEQ ID NO: 1375031 - DNA, 25 bp, Homo sapien
ctgtgagcgtcatcttagcctctcc

SEQ ID NO: 1375032 - DNA, 25 bp, Homo sapien
tcaagccagctcattgtattgggcc

SEQ ID NO: 1375033 - DNA, 25 bp, Homo sapien
ccagctcattgtattgggccgagat

SEQ ID NO: 1375034 - DNA, 25 bp, Homo sapien
gggggcatctgcctccatggtcaac

SEQ ID NO: 1375035 - DNA, 25 bp, Homo sapien
gctcattgtattgggccgagatgtc

SEQ ID NO: 1375036 - DNA, 25 bp, Homo sapien
gcaatctgggcttgtaggcctttta

SEQ ID NO: 1375037 - DNA, 25 bp, Homo sapien
gctggcaatctgggcttgtaggcct

SEQ ID NO: 1375038 - DNA, 25 bp, Homo sapien
caatctgggcttgtaggccttttac

SEQ ID NO: 1375039 - DNA, 25 bp, Homo sapien
tggcaatctgggcttgtaggccttt

SEQ ID NO: 1375040 - DNA, 25 bp, Homo sapien
gtcatcattgaccttgtggagtccg

SEQ ID NO: 1375041 - DNA, 25 bp, Homo sapien
ttgaccttgtggagtccgtggatgt

SEQ ID NO: 1375042 - DNA, 25 bp, Homo sapien
tcattgaccttgtggagtccgtgga

SEQ ID NO: 1375043 - DNA, 25 bp, Homo sapien
catcattgaccttgtggagtccgtg

SEQ ID NO: 1375044 - DNA, 25 bp, Homo sapien
ccagaccccaagctgtcccagaagc

SEQ ID NO: 1375045 - DNA, 25 bp, Homo sapien
tgcagccagaccccaagctgtccca

SEQ ID NO: 1375046 - DNA, 25 bp, Homo sapien
cagccagaccccaagctgtcccaga

SEQ ID NO: 1375047 - DNA, 25 bp, Homo sapien
agccagaccccaagctgtcccagaa

SEQ ID NO: 1375048 - DNA, 25 bp, Homo sapien
ccttgacagagcttagggactggta

SEQ ID NO: 1375049 - DNA, 25 bp, Homo sapien
tggatagacgctggccaggcgccat

SEQ ID NO: 1375050 - DNA, 25 bp, Homo sapien
aggcgccatagctggctgccttgac

SEQ ID NO: 1375051 - DNA, 25 bp, Homo sapien
ccatagctggctgccttgacagagc

SEQ ID NO: 1375052 - DNA, 25 bp, Homo sapien
agtgagaggataggactcaggcttt

SEQ ID NO: 1375053 - DNA, 25 bp, Homo sapien
gagagtgagaggataggactcaggc

SEQ ID NO: 1375054 - DNA, 25 bp, Homo sapien
gaggagagtgagaggataggactca

SEQ ID NO: 1375055 - DNA, 25 bp, Homo sapien
ctggggaggagagtgagaggatagg

SEQ ID NO: 1375056 - DNA, 25 bp, Homo sapien
tcaaagagtttctatgcagaaagac

SEQ ID NO: 1375057 - DNA, 25 bp, Homo sapien
gatagtgtcactcctacttttaaag

SEQ ID NO: 1375058 - DNA, 25 bp, Homo sapien
gacttgccctgagataaatagctag

SEQ ID NO: 1375059 - DNA, 25 bp, Homo sapien
tgaaaaaggtaggacagatagtgtc

SEQ ID NO: 1375060 - DNA, 25 bp, Homo sapien
cattcttatgcaggggccatgttaa

SEQ ID NO: 1375061 - DNA, 25 bp, Homo sapien
ggccatgttaatcttccctatatca

SEQ ID NO: 1375062 - DNA, 25 bp, Homo sapien
gccatgttaatcttccctatatcat

SEQ ID NO: 1375063 - DNA, 25 bp, Homo sapien
tgtcattcttatgcaggggccatgt

SEQ ID NO: 1375064 - DNA, 25 bp, Homo sapien
cgtgagagaccgtgcccggctccaa

SEQ ID NO: 1375065 - DNA, 25 bp, Homo sapien
cagcaaagttgacgttgacagcaaa

SEQ ID NO: 1375066 - DNA, 25 bp, Homo sapien
ttcagcaaagttgacgttgacagca

SEQ ID NO: 1375067 - DNA, 25 bp, Homo sapien
gcaaagttgacgttgacagcaaagg

SEQ ID NO: 1375068 - DNA, 25 bp, Homo sapien
aaagttgacgttgacagcaaaggca

SEQ ID NO: 1375069 - DNA, 25 bp, Homo sapien
ggatttcttacagcacttcctggca

SEQ ID NO: 1375070 - DNA, 25 bp, Homo sapien
tgttagattgtgaaccctgaaacca

SEQ ID NO: 1375071 - DNA, 25 bp, Homo sapien
catgaatgaatacaggcagattggc

SEQ ID NO: 1375072 - DNA, 25 bp, Homo sapien
ccaggttgcctgagtttaaatcgtg

SEQ ID NO: 1375073 - DNA, 25 bp, Homo sapien
gtttctattttgaatgcaggcaaca

SEQ ID NO: 1375074 - DNA, 25 bp, Homo sapien
tgtgactttgttgccaatagatgtt

SEQ ID NO: 1375075 - DNA, 25 bp, Homo sapien
ttctaccatcttgccttttgccttg

SEQ ID NO: 1375076 - DNA, 25 bp, Homo sapien
tcctatatccatatttaaagattgt

SEQ ID NO: 1375077 - DNA, 25 bp, Homo sapien
taaaagtttcatcaagacagaacat

SEQ ID NO: 1375078 - DNA, 25 bp, Homo sapien
gactaccaaaaaattagagtctgtg

SEQ ID NO: 1375079 - DNA, 25 bp, Homo sapien
gggaatgttgccacatatgaaaaaa

SEQ ID NO: 1375080 - DNA, 25 bp, Homo sapien
tagtgacttgttccttaatgtggac

SEQ ID NO: 1375081 - DNA, 25 bp, Homo sapien
gagctggtgctactgcaggtgcata

SEQ ID NO: 1375082 - DNA, 25 bp, Homo sapien
agctggtgctactgcaggtgcatac

SEQ ID NO: 1375083 - DNA, 25 bp, Homo sapien
tgctctaggcccatagtcagcagca

SEQ ID NO: 1375084 - DNA, 25 bp, Homo sapien
tatattggtttgcacaagttccctg

SEQ ID NO: 1375085 - DNA, 25 bp, Homo sapien
aactgggataactgatttctatggc

SEQ ID NO: 1375086 - DNA, 25 bp, Homo sapien
aaatgtcccctcaaactcattgcag

SEQ ID NO: 1375087 - DNA, 25 bp, Homo sapien
aactgttgcctaattggaaagtgcc

SEQ ID NO: 1375088 - DNA, 25 bp, Homo sapien
ggctgataccacttagaacacggaa

SEQ ID NO: 1375089 - DNA, 25 bp, Homo sapien
taatatgccatcaggagtgctccgt

SEQ ID NO: 1375090 - DNA, 25 bp, Homo sapien
tgagtccacggaaaggatttcagca

SEQ ID NO: 1375091 - DNA, 25 bp, Homo sapien
caatgccatgaggtggacatgtgcc

SEQ ID NO: 1375092 - DNA, 25 bp, Homo sapien
tgcagtttcttagcacgcgcaggca

SEQ ID NO: 1375093 - DNA, 25 bp, Homo sapien
catttatgatccacgcaggaccatg

SEQ ID NO: 1375094 - DNA, 25 bp, Homo sapien
gaagtgccttaactgcaccggatgg

SEQ ID NO: 1375095 - DNA, 25 bp, Homo sapien
tggattttaggaggacagccacagc

SEQ ID NO: 1375096 - DNA, 25 bp, Homo sapien
aatgttggtattctctgggaagaca

SEQ ID NO: 1375097 - DNA, 25 bp, Homo sapien
ggcagtcagagccaacgttccctca

SEQ ID NO: 1375098 - DNA, 25 bp, Homo sapien
caaaactgaaatgttggtattctct

SEQ ID NO: 1375099 - DNA, 25 bp, Homo sapien
ccagagtgggcttgctcagttggca

SEQ ID NO: 1375100 - DNA, 25 bp, Homo sapien
gcctaatcggggcagtttacacgcc

SEQ ID NO: 1375101 - DNA, 25 bp, Homo sapien
ccctaataacctccatagatgtgtc

SEQ ID NO: 1375102 - DNA, 25 bp, Homo sapien
ctttcctttgctagcagcctaatcg

SEQ ID NO: 1375103 - DNA, 25 bp, Homo sapien
cagataacccaaccctctgttcaaa

SEQ ID NO: 1375104 - DNA, 25 bp, Homo sapien
atgtgcacattacctgacagacagt

SEQ ID NO: 1375105 - DNA, 25 bp, Homo sapien
gtgcacattacctgacagacagtga

SEQ ID NO: 1375106 - DNA, 25 bp, Homo sapien
tgtgcacattacctgacagacagtg

SEQ ID NO: 1375107 - DNA, 25 bp, Homo sapien
tgcacattacctgacagacagtgag

SEQ ID NO: 1375108 - DNA, 25 bp, Homo sapien
ccatcaggctgagggacaatcagtg

SEQ ID NO: 1375109 - DNA, 25 bp, Homo sapien
ggtcagcccaaaagaagatccacat

SEQ ID NO: 1375110 - DNA, 25 bp, Homo sapien
ttcccagccagtgagtgttccctac

SEQ ID NO: 1375111 - DNA, 25 bp, Homo sapien
gatttgagagtgaccctaaccaccg

SEQ ID NO: 1375112 - DNA, 25 bp, Homo sapien
cacggaatggagctgggaattttaa

SEQ ID NO: 1375113 - DNA, 25 bp, Homo sapien
cactggtgaattggctgttctctga

SEQ ID NO: 1375114 - DNA, 25 bp, Homo sapien
tccgtcccggctgcctctaggtgag

SEQ ID NO: 1375115 - DNA, 25 bp, Homo sapien
tgggttcacttctacctcactggtg

SEQ ID NO: 1375116 - DNA, 25 bp, Homo sapien
tgcctggagcaatgtcttgccaaag

SEQ ID NO: 1375117 - DNA, 25 bp, Homo sapien
tatggactgaaacctccaaggcaga

SEQ ID NO: 1375118 - DNA, 25 bp, Homo sapien
tagcaggtcgggttttgcctcactg

SEQ ID NO: 1375119 - DNA, 25 bp, Homo sapien
ggcattcaaacagcccagtgctatg

SEQ ID NO: 1375120 - DNA, 25 bp, Homo sapien
tgggctttcgagagccataccgccc

SEQ ID NO: 1375121 - DNA, 25 bp, Homo sapien
tgcatgcatgccagacagacacaca

SEQ ID NO: 1375122 - DNA, 25 bp, Homo sapien
catacagaatgttcaacggaggtct

SEQ ID NO: 1375123 - DNA, 25 bp, Homo sapien
cagccccaaagtgagtgcatgcatg

SEQ ID NO: 1375124 - DNA, 25 bp, Homo sapien
tcaacgtggaggtccagtcatccgg

SEQ ID NO: 1375125 - DNA, 25 bp, Homo sapien
taacaccagaggctgtcgattccgg

SEQ ID NO: 1375126 - DNA, 25 bp, Homo sapien
ttcttgaccttctgtgagcggccgg

SEQ ID NO: 1375127 - DNA, 25 bp, Homo sapien
aagtctagccaattgcccaccaggt

SEQ ID NO: 1375128 - DNA, 25 bp, Homo sapien
gcaagggggctaaatcccttccaca

SEQ ID NO: 1375129 - DNA, 25 bp, Homo sapien
cacagacactcctatgggatggaaa

SEQ ID NO: 1375130 - DNA, 25 bp, Homo sapien
ctgccaagagaaggttgactggagg

SEQ ID NO: 1375131 - DNA, 25 bp, Homo sapien
caacaagggtgctcgcactgggtcc

SEQ ID NO: 1375132 - DNA, 25 bp, Homo sapien
gcttcagttcttgcagtgcacccat

SEQ ID NO: 1375133 - DNA, 25 bp, Homo sapien
gttcttgcagtgcacccatcatgca

SEQ ID NO: 1375134 - DNA, 25 bp, Homo sapien
tgcagtgcacccatcatgcagttca

SEQ ID NO: 1375135 - DNA, 25 bp, Homo sapien
gcacccatcatgcagttcatctgat

SEQ ID NO: 1375136 - DNA, 25 bp, Homo sapien
tgctcggctaacaggcgtaagctgc

SEQ ID NO: 1375137 - DNA, 25 bp, Homo sapien
gggatgccatcacccaaggaagaag

SEQ ID NO: 1375138 - DNA, 25 bp, Homo sapien
tcagaggccgagcttgggatatgcc

SEQ ID NO: 1375139 - DNA, 25 bp, Homo sapien
ttcttgactaagagaggagccagca

SEQ ID NO: 1375140 - DNA, 25 bp, Homo sapien
cgctctcgatttgccaggcagagcc

SEQ ID NO: 1375141 - DNA, 25 bp, Homo sapien
cagctcccgctctcgatttgccagg

SEQ ID NO: 1375142 - DNA, 25 bp, Homo sapien
cctccgaacgctccctgcgcactcc

SEQ ID NO: 1375143 - DNA, 25 bp, Homo sapien
ctccccaagcccagacctgacatct

SEQ ID NO: 1375144 - DNA, 25 bp, Homo sapien
cagggtggtacccgcttccctcgag

SEQ ID NO: 1375145 - DNA, 25 bp, Homo sapien
aagcccaggcagacagccggccaag

SEQ ID NO: 1375146 - DNA, 25 bp, Homo sapien
tccctcgagcgagcagtcccgctga

SEQ ID NO: 1375147 - DNA, 25 bp, Homo sapien
gctctgccaagcccggcagagctgg

SEQ ID NO: 1375148 - DNA, 25 bp, Homo sapien
ctccctgccccggcgccagcttcgc

SEQ ID NO: 1375149 - DNA, 25 bp, Homo sapien
gccccggcgccagcttcgctcttac

SEQ ID NO: 1375150 - DNA, 25 bp, Homo sapien
cctgccccggcgccagcttcgctct

SEQ ID NO: 1375151 - DNA, 25 bp, Homo sapien
tgccccggcgccagcttcgctctta

SEQ ID NO: 1375152 - DNA, 25 bp, Homo sapien
tttgaggcgacggagatagcagtcc

SEQ ID NO: 1375153 - DNA, 25 bp, Homo sapien
gagatagcagtccatttccctgctc

SEQ ID NO: 1375154 - DNA, 25 bp, Homo sapien
gacggagatagcagtccatttccct

SEQ ID NO: 1375155 - DNA, 25 bp, Homo sapien
gctcctgtttgaggcgacggagata

SEQ ID NO: 1375156 - DNA, 25 bp, Homo sapien
gtagcgctcgcagcgcggagctgag

SEQ ID NO: 1375157 - DNA, 25 bp, Homo sapien
tgtcgggttcggttcaaacagagag

SEQ ID NO: 1375158 - DNA, 25 bp, Homo sapien
gccccactggaaactgcgctccggg

SEQ ID NO: 1375159 - DNA, 25 bp, Homo sapien
tcagagtcgcttccccagcggctag

SEQ ID NO: 1375160 - DNA, 25 bp, Homo sapien
ggctggcgaggacacacctggtccc

SEQ ID NO: 1375161 - DNA, 25 bp, Homo sapien
ggggctggcgaggacacacctggtc

SEQ ID NO: 1375162 - DNA, 25 bp, Homo sapien
tggcgaggacacacctggtcccggc

SEQ ID NO: 1375163 - DNA, 25 bp, Homo sapien
gctggcgaggacacacctggtcccg

SEQ ID NO: 1375164 - DNA, 25 bp, Homo sapien
gaaaatggctcatacccaggactct

SEQ ID NO: 1375165 - DNA, 25 bp, Homo sapien
tgctgccgccgcttaacaagtgaag

SEQ ID NO: 1375166 - DNA, 25 bp, Homo sapien
tgaaaaggaccttcatcagggcatg

SEQ ID NO: 1375167 - DNA, 25 bp, Homo sapien
gaataggaactgaacacgcgaagga

SEQ ID NO: 1375168 - DNA, 25 bp, Homo sapien
taggtgctgctattcctccattctg

SEQ ID NO: 1375169 - DNA, 25 bp, Homo sapien
ggagacagtagatcaccagagggca

SEQ ID NO: 1375170 - DNA, 25 bp, Homo sapien
tgtgctggaaccatcatgtggaact

SEQ ID NO: 1375171 - DNA, 25 bp, Homo sapien
gaagagatgaggagacagtagatca

SEQ ID NO: 1375172 - DNA, 25 bp, Homo sapien
ccttgccttagaggagacctgttca

SEQ ID NO: 1375173 - DNA, 25 bp, Homo sapien
taactgtagggaaagagcatgactg

SEQ ID NO: 1375174 - DNA, 25 bp, Homo sapien
taggtcacccaggttgctaagggca

SEQ ID NO: 1375175 - DNA, 25 bp, Homo sapien
taagggcagaatcagcacagaaacc

SEQ ID NO: 1375176 - DNA, 25 bp, Homo sapien
gctgtgctctggtaatcagtgtgca

SEQ ID NO: 1375177 - DNA, 25 bp, Homo sapien
tcatgacgacagtggttgcaattct

SEQ ID NO: 1375178 - DNA, 25 bp, Homo sapien
tactggtgtgcaccctgggatgtga

SEQ ID NO: 1375179 - DNA, 25 bp, Homo sapien
ggaggagacaggacccaacagtatc

SEQ ID NO: 1375180 - DNA, 25 bp, Homo sapien
gctgacagccgctttatcaattaaa

SEQ ID NO: 1375181 - DNA, 25 bp, Homo sapien
tgctgacagccgctttatcaattaa

SEQ ID NO: 1375182 - DNA, 25 bp, Homo sapien
tatgattagcagaaacccttcctga

SEQ ID NO: 1375183 - DNA, 25 bp, Homo sapien
gagctgaatatgattagcagaaacc

SEQ ID NO: 1375184 - DNA, 25 bp, Homo sapien
gtgttacaagtcatggagaattaag

SEQ ID NO: 1375185 - DNA, 25 bp, Homo sapien
aaaggtattgaggtgttacaagtca

SEQ ID NO: 1375186 - DNA, 25 bp, Homo sapien
taagcatctgggctagttgggtctg

SEQ ID NO: 1375187 - DNA, 25 bp, Homo sapien
gaattaagcatctgggctagttggg

SEQ ID NO: 1375188 - DNA, 25 bp, Homo sapien
gagtctattaggcatcccaagggag

SEQ ID NO: 1375189 - DNA, 25 bp, Homo sapien
tatagggcagattctacggagactg

SEQ ID NO: 1375190 - DNA, 25 bp, Homo sapien
gcagatggatgcacacgtctagagt

SEQ ID NO: 1375191 - DNA, 25 bp, Homo sapien
tagctgcctacgcatgaaatgatgg

SEQ ID NO: 1375192 - DNA, 25 bp, Homo sapien
tctcaccggagataaatgtggttgc

SEQ ID NO: 1375193 - DNA, 25 bp, Homo sapien
tcagggtacggagcgggtagcgttg

SEQ ID NO: 1375194 - DNA, 25 bp, Homo sapien
tgtgcgccagggacttgctaggaga

SEQ ID NO: 1375195 - DNA, 25 bp, Homo sapien
tgggtccagctacgttctgcgcgct

SEQ ID NO: 1375196 - DNA, 25 bp, Homo sapien
tttttgtgtgtctgggcagtctctc

SEQ ID NO: 1375197 - DNA, 25 bp, Homo sapien
ttttgtgtgtctgggcagtctctca

SEQ ID NO: 1375198 - DNA, 25 bp, Homo sapien
tagtgtgtcatgtaatgaatatacc

SEQ ID NO: 1375199 - DNA, 25 bp, Homo sapien
tgaatataccagtcccctatgtatt

SEQ ID NO: 1375200 - DNA, 25 bp, Homo sapien
tatttattcctctgactcaaaggtg

SEQ ID NO: 1375201 - DNA, 25 bp, Homo sapien
caggttttgtatcagctgattcagc

SEQ ID NO: 1375202 - DNA, 25 bp, Homo sapien
taatagctaacagagtgcttatgat

SEQ ID NO: 1375203 - DNA, 25 bp, Homo sapien
gctgacagtgacctactgttgccgg

SEQ ID NO: 1375204 - DNA, 25 bp, Homo sapien
gatttactacctaacattctctctg

SEQ ID NO: 1375205 - DNA, 25 bp, Homo sapien
ttgcccagaaatgtaatatcaacct

SEQ ID NO: 1375206 - DNA, 25 bp, Homo sapien
cagagagtccctgtgttggcaagta

SEQ ID NO: 1375207 - DNA, 25 bp, Homo sapien
gcaacgtcaccaaaagaactgggct

SEQ ID NO: 1375208 - DNA, 25 bp, Homo sapien
taaaatccatcagccatacacgttg

SEQ ID NO: 1375209 - DNA, 25 bp, Homo sapien
tgtgacaggcaatccgaagagcaaa

SEQ ID NO: 1375210 - DNA, 25 bp, Homo sapien
ccagattggatacatcaggtacagc

SEQ ID NO: 1375211 - DNA, 25 bp, Homo sapien
gtttaatccagattggatacatcag

SEQ ID NO: 1375212 - DNA, 25 bp, Homo sapien
aatccagattggatacatcaggtac

SEQ ID NO: 1375213 - DNA, 25 bp, Homo sapien
atttgtttaatccagattggataca

SEQ ID NO: 1375214 - DNA, 25 bp, Homo sapien
ccaggacttgggtcagtgccgtaca

SEQ ID NO: 1375215 - DNA, 25 bp, Homo sapien
gaagacgacaggaaactcaagggtg

SEQ ID NO: 1375216 - DNA, 25 bp, Homo sapien
catccagtgtagttgagtaacctgc

SEQ ID NO: 1375217 - DNA, 25 bp, Homo sapien
gctccgagggtcatgggtcataaca

SEQ ID NO: 1375218 - DNA, 25 bp, Homo sapien
ctgtcataagaaccacaaggagtat

SEQ ID NO: 1375219 - DNA, 25 bp, Homo sapien
tagtccatagatgtttctacccaga

SEQ ID NO: 1375220 - DNA, 25 bp, Homo sapien
cctggattgcaataatggttctgcc

SEQ ID NO: 1375221 - DNA, 25 bp, Homo sapien
ggtacagtcaggtgatttccaaggg

SEQ ID NO: 1375222 - DNA, 25 bp, Homo sapien
agccaaaagactcgtgttctggtct

SEQ ID NO: 1375223 - DNA, 25 bp, Homo sapien
aaaatgcattagactaatagccaaa

SEQ ID NO: 1375224 - DNA, 25 bp, Homo sapien
tgtcattaaataactgcatgacctt

SEQ ID NO: 1375225 - DNA, 25 bp, Homo sapien
ggtctcagatctgtcattaaataac

SEQ ID NO: 1375226 - DNA, 25 bp, Homo sapien
caaacgttgacattttttggaccag

SEQ ID NO: 1375227 - DNA, 25 bp, Homo sapien
ctcaagggtcatggctattggcccc

SEQ ID NO: 1375228 - DNA, 25 bp, Homo sapien
aatgttcccttggtgccctatcaaa

SEQ ID NO: 1375229 - DNA, 25 bp, Homo sapien
aattcagcatactttggaccttgtg

SEQ ID NO: 1375230 - DNA, 25 bp, Homo sapien
tagcaaggtgccctaatgaccggct

SEQ ID NO: 1375231 - DNA, 25 bp, Homo sapien
tccaccagggtgcaagctagttgaa

SEQ ID NO: 1375232 - DNA, 25 bp, Homo sapien
gaacctacagggtcaatcgagctgg

SEQ ID NO: 1375233 - DNA, 25 bp, Homo sapien
tggcacataccagagttgaccgcgt

SEQ ID NO: 1375234 - DNA, 25 bp, Homo sapien
tatcacagggctatgtccacgctag

SEQ ID NO: 1375235 - DNA, 25 bp, Homo sapien
cgctagcagcgtgaacctcaggtgc

SEQ ID NO: 1375236 - DNA, 25 bp, Homo sapien
ttcctctggccccagtgagatgcag

SEQ ID NO: 1375237 - DNA, 25 bp, Homo sapien
gagggagtggtctcagtgaccaccc

SEQ ID NO: 1375238 - DNA, 25 bp, Homo sapien
cttgacaacattgctggctatggaa

SEQ ID NO: 1375239 - DNA, 25 bp, Homo sapien
tgatctgggatgttttgcagtttgg

SEQ ID NO: 1375240 - DNA, 25 bp, Homo sapien
gcagtttggtctcagtccgtcgtct

SEQ ID NO: 1375241 - DNA, 25 bp, Homo sapien
ctggctatggaaggaatgttcgtgt

SEQ ID NO: 1375242 - DNA, 25 bp, Homo sapien
catctgctcatcaataaactcgtgg

SEQ ID NO: 1375243 - DNA, 25 bp, Homo sapien
cctggatgtggatcgtgctgagctc

SEQ ID NO: 1375244 - DNA, 25 bp, Homo sapien
tgagctcttgcatgctgcgcaggcg

SEQ ID NO: 1375245 - DNA, 25 bp, Homo sapien
ttcttactacgacgggagcagcagg

SEQ ID NO: 1375246 - DNA, 25 bp, Homo sapien
ggtggttcagcgcaagaaactggaa

SEQ ID NO: 1375247 - DNA, 25 bp, Homo sapien
cagatgtggcacttggagactaaca

SEQ ID NO: 1375248 - DNA, 25 bp, Homo sapien
ggattccctaggtcaagtgtaagca

SEQ ID NO: 1375249 - DNA, 25 bp, Homo sapien
gagactaacaggataccagcactgg

SEQ ID NO: 1375250 - DNA, 25 bp, Homo sapien
tggtggaggttcgtacagataacag

SEQ ID NO: 1375251 - DNA, 25 bp, Homo sapien
ttgatggtggaggttcgtacagata

SEQ ID NO: 1375252 - DNA, 25 bp, Homo sapien
caggggatcatccacaagataggac

SEQ ID NO: 1375253 - DNA, 25 bp, Homo sapien
cagataacaggggatcatccacaag

SEQ ID NO: 1375254 - DNA, 25 bp, Homo sapien
taattattgggttcaactgtcatcc

SEQ ID NO: 1375255 - DNA, 25 bp, Homo sapien
tgtaactagggtttgcagagcacct

SEQ ID NO: 1375256 - DNA, 25 bp, Homo sapien
tgggtccgggcctatccctttggca

SEQ ID NO: 1375257 - DNA, 25 bp, Homo sapien
tgtcctgacattccaccccttaagt

SEQ ID NO: 1375258 - DNA, 25 bp, Homo sapien
ggccaggatatggaacatctagaat

SEQ ID NO: 1375259 - DNA, 25 bp, Homo sapien
tccttccttagggtactgagccctg

SEQ ID NO: 1375260 - DNA, 25 bp, Homo sapien
gagccctgactatagactctttggg

SEQ ID NO: 1375261 - DNA, 25 bp, Homo sapien
acatctagaattaggaagttccttc

SEQ ID NO: 1375262 - DNA, 25 bp, Homo sapien
cacacgctgtctgcaggaggatgta

SEQ ID NO: 1375263 - DNA, 25 bp, Homo sapien
ctgagaaactgataggcagacccct

SEQ ID NO: 1375264 - DNA, 25 bp, Homo sapien
gggtcttccacctgagggccagtag

SEQ ID NO: 1375265 - DNA, 25 bp, Homo sapien
tgtggcaccctaaaccatggctctg

SEQ ID NO: 1375266 - DNA, 25 bp, Homo sapien
tcgatgagtgaggtggtcttgccca

SEQ ID NO: 1375267 - DNA, 25 bp, Homo sapien
gctggctctcgatgagtgaggtggt

SEQ ID NO: 1375268 - DNA, 25 bp, Homo sapien
tggtcttgcccatgtgctcctcttc

SEQ ID NO: 1375269 - DNA, 25 bp, Homo sapien
ctctcgatgagtgaggtggtcttgc

SEQ ID NO: 1375270 - DNA, 25 bp, Homo sapien
tgcattcgaactgcctgttttggcc

SEQ ID NO: 1375271 - DNA, 25 bp, Homo sapien
cttgctgtgcaggtatgcattcgaa

SEQ ID NO: 1375272 - DNA, 25 bp, Homo sapien
tttggccacacggatcctggcaagg

SEQ ID NO: 1375273 - DNA, 25 bp, Homo sapien
cagcgcctcgttgaggagcccgttg

SEQ ID NO: 1375274 - DNA, 25 bp, Homo sapien
tccctgcaatcgtcttaggcaccat

SEQ ID NO: 1375275 - DNA, 25 bp, Homo sapien
gatggagccgaagatcttccctgca

SEQ ID NO: 1375276 - DNA, 25 bp, Homo sapien
caggacgccactcaaggagcagatg

SEQ ID NO: 1375277 - DNA, 25 bp, Homo sapien
cttttgtgccctgcgtttatcagct

SEQ ID NO: 1375278 - DNA, 25 bp, Homo sapien
ctttcctgtcgcttagctgttccat

SEQ ID NO: 1375279 - DNA, 25 bp, Homo sapien
cgactttcctgtcgcttagctgttc

SEQ ID NO: 1375280 - DNA, 25 bp, Homo sapien
cccgactttcctgtcgcttagctgt

SEQ ID NO: 1375281 - DNA, 25 bp, Homo sapien
cgaggaccagctgtacccccgactt

SEQ ID NO: 1375282 - DNA, 25 bp, Homo sapien
tcctgaggcctgaactgtgtcgaca

SEQ ID NO: 1375283 - DNA, 25 bp, Homo sapien
tcgacataacttagcacgagctctg

SEQ ID NO: 1375284 - DNA, 25 bp, Homo sapien
gctgggtgctcggtagatacatgca

SEQ ID NO: 1375285 - DNA, 25 bp, Homo sapien
ctctgcgtataccttgctgggtgct

SEQ ID NO: 1375286 - DNA, 25 bp, Homo sapien
actgagcgatgagtaactgatgtgc

SEQ ID NO: 1375287 - DNA, 25 bp, Homo sapien
taactgagcgatgagtaactgatgt

SEQ ID NO: 1375288 - DNA, 25 bp, Homo sapien
aactgagcgatgagtaactgatgtg

SEQ ID NO: 1375289 - DNA, 25 bp, Homo sapien
ggctcttgtcatctctgccagcagg

SEQ ID NO: 1375290 - DNA, 25 bp, Homo sapien
tcttgtcatctctgccagcaggcat

SEQ ID NO: 1375291 - DNA, 25 bp, Homo sapien
tgggctcttgtcatctctgccagca

SEQ ID NO: 1375292 - DNA, 25 bp, Homo sapien
cctgggctcttgtcatctctgccag

SEQ ID NO: 1375293 - DNA, 25 bp, Homo sapien
gcagaagggctgatggtgagggtgg

SEQ ID NO: 1375294 - DNA, 25 bp, Homo sapien
gactcacagaactccaggcagaagg

SEQ ID NO: 1375295 - DNA, 25 bp, Homo sapien
tgggctccacataggccccagctgt

SEQ ID NO: 1375296 - DNA, 25 bp, Homo sapien
tcttgataaacacggcattcgcagg

SEQ ID NO: 1375297 - DNA, 25 bp, Homo sapien
ggccctaccacgtggatttcctgga

SEQ ID NO: 1375298 - DNA, 25 bp, Homo sapien
gccctgtgcacagactgaccactgt

SEQ ID NO: 1375299 - DNA, 25 bp, Homo sapien
ctttggagagtgtccaggtggcctc

SEQ ID NO: 1375300 - DNA, 25 bp, Homo sapien
tgtggttctgatagactccagtccc

SEQ ID NO: 1375301 - DNA, 25 bp, Homo sapien
cacgatagttatgagagatgaggct

SEQ ID NO: 1375302 - DNA, 25 bp, Homo sapien
tctctgttcaccagcgtagctccag

SEQ ID NO: 1375303 - DNA, 25 bp, Homo sapien
ggtacttgctccaaacacgatagtt

SEQ ID NO: 1375304 - DNA, 25 bp, Homo sapien
ggcttctagaatgcataatacagtg

SEQ ID NO: 1375305 - DNA, 25 bp, Homo sapien
tgtggaggggatcttccgatagcaa

SEQ ID NO: 1375306 - DNA, 25 bp, Homo sapien
tcttccgatagcaaggaggctgctg

SEQ ID NO: 1375307 - DNA, 25 bp, Homo sapien
ctctatatgggtctaggaggaccat

SEQ ID NO: 1375308 - DNA, 25 bp, Homo sapien
gaagctttggggtacatatccttgg

SEQ ID NO: 1375309 - DNA, 25 bp, Homo sapien
ctctgggcaagcagctaagcagggc

SEQ ID NO: 1375310 - DNA, 25 bp, Homo sapien
gcaagcagctaagcagggcaggaag

SEQ ID NO: 1375311 - DNA, 25 bp, Homo sapien
tctgggcaagcagctaagcagggca

SEQ ID NO: 1375312 - DNA, 25 bp, Homo sapien
tgggcaagcagctaagcagggcagg

SEQ ID NO: 1375313 - DNA, 25 bp, Homo sapien
tatgtagggctcagtactacccgtg

SEQ ID NO: 1375314 - DNA, 25 bp, Homo sapien
cagtaagcccttaattgatggtccc

SEQ ID NO: 1375315 - DNA, 25 bp, Homo sapien
tcacagggtattcaaagctccaagc

SEQ ID NO: 1375316 - DNA, 25 bp, Homo sapien
ggaggaagtcgctctaagccacaga

SEQ ID NO: 1375317 - DNA, 25 bp, Homo sapien
ctaaggaaaaccattagacctgcac

SEQ ID NO: 1375318 - DNA, 25 bp, Homo sapien
gacctgcacttagcaaccaccagga

SEQ ID NO: 1375319 - DNA, 25 bp, Homo sapien
cattagacctgcacttagcaaccac

SEQ ID NO: 1375320 - DNA, 25 bp, Homo sapien
caaccaccaggatggtatttttagc

SEQ ID NO: 1375321 - DNA, 25 bp, Homo sapien
catatgctcagaatgcgctagcgcg

SEQ ID NO: 1375322 - DNA, 25 bp, Homo sapien
gatcaggccctgatagcaaactggc

SEQ ID NO: 1375323 - DNA, 25 bp, Homo sapien
taatgacagcccgtgtgggaggaca

SEQ ID NO: 1375324 - DNA, 25 bp, Homo sapien
tggtgtgtcctagcctcctgcaaac

SEQ ID NO: 1375325 - DNA, 25 bp, Homo sapien
tagaaactgcgtggtcttgttcttt

SEQ ID NO: 1375326 - DNA, 25 bp, Homo sapien
tccatgcacaccctttgattaagca

SEQ ID NO: 1375327 - DNA, 25 bp, Homo sapien
ggtcttgttctttgagtggatttct

SEQ ID NO: 1375328 - DNA, 25 bp, Homo sapien
cattatctccatgcacaccctttga

SEQ ID NO: 1375329 - DNA, 25 bp, Homo sapien
tgccagagctgagcggaataaagat

SEQ ID NO: 1375330 - DNA, 25 bp, Homo sapien
cacaagagggtctatgtttctctca

SEQ ID NO: 1375331 - DNA, 25 bp, Homo sapien
ggctttccaggaacgtctcatcatg

SEQ ID NO: 1375332 - DNA, 25 bp, Homo sapien
gaaacaaatgagtggccaatcaggc

SEQ ID NO: 1375333 - DNA, 25 bp, Homo sapien
caagtcttttgcatggctaccacca

SEQ ID NO: 1375334 - DNA, 25 bp, Homo sapien
gaatttcttccctggacaagagtga

SEQ ID NO: 1375335 - DNA, 25 bp, Homo sapien
gatttggtattagaaggcagcagct

SEQ ID NO: 1375336 - DNA, 25 bp, Homo sapien
aatgatatgtttcagtgtgggagcc

SEQ ID NO: 1375337 - DNA, 25 bp, Homo sapien
actcctccttaggaacagggaatga

SEQ ID NO: 1375338 - DNA, 25 bp, Homo sapien
tactcctccttaggaacagggaatg

SEQ ID NO: 1375339 - DNA, 25 bp, Homo sapien
ggtttcctagatacgccagtggctt

SEQ ID NO: 1375340 - DNA, 25 bp, Homo sapien
ttctggtttcctagatacgccagtg

SEQ ID NO: 1375341 - DNA, 25 bp, Homo sapien
aataatcacactccccacactgaag

SEQ ID NO: 1375342 - DNA, 25 bp, Homo sapien
tggtttcctagatacgccagtggct

SEQ ID NO: 1375343 - DNA, 25 bp, Homo sapien
tcgtctgaagctctaagctcctcag

SEQ ID NO: 1375344 - DNA, 25 bp, Homo sapien
gggccaccacactggtaggtaaatg

SEQ ID NO: 1375345 - DNA, 25 bp, Homo sapien
cgtgcacagggtgctaatggtcagt

SEQ ID NO: 1375346 - DNA, 25 bp, Homo sapien
acactggtaggtaaatgactcctcc

SEQ ID NO: 1375347 - DNA, 25 bp, Homo sapien
tcagctgactgccagggtaccaggg

SEQ ID NO: 1375348 - DNA, 25 bp, Homo sapien
tggtcagctgactgccagggtacca

SEQ ID NO: 1375349 - DNA, 25 bp, Homo sapien
cagctgactgccagggtaccaggga

SEQ ID NO: 1375350 - DNA, 25 bp, Homo sapien
ctgtggtcagctgactgccagggta

SEQ ID NO: 1375351 - DNA, 25 bp, Homo sapien
gaatccaaacggctctggcagctgc

SEQ ID NO: 1375352 - DNA, 25 bp, Homo sapien
tcacagatgagataacaagcctgtg

SEQ ID NO: 1375353 - DNA, 25 bp, Homo sapien
ggcagctgcattaaaacctgaacag

SEQ ID NO: 1375354 - DNA, 25 bp, Homo sapien
caaggttaatagagcctcctgcaaa

SEQ ID NO: 1375355 - DNA, 25 bp, Homo sapien
ataattccaagagggaactgagaac

SEQ ID NO: 1375356 - DNA, 25 bp, Homo sapien
tgtaataattccaagagggaactga

SEQ ID NO: 1375357 - DNA, 25 bp, Homo sapien
tggtgtaataattccaagagggaac

SEQ ID NO: 1375358 - DNA, 25 bp, Homo sapien
ctggtgtaataattccaagagggaa

SEQ ID NO: 1375359 - DNA, 25 bp, Homo sapien
tgggagggatggcagttatgaacgg

SEQ ID NO: 1375360 - DNA, 25 bp, Homo sapien
gggatggcagttatgaacgggcccc

SEQ ID NO: 1375361 - DNA, 25 bp, Homo sapien
gatggcagttatgaacgggccccat

SEQ ID NO: 1375362 - DNA, 25 bp, Homo sapien
gagggatggcagttatgaacgggcc

SEQ ID NO: 1375363 - DNA, 25 bp, Homo sapien
ggttaaaaatcagagcagggcctct

SEQ ID NO: 1375364 - DNA, 25 bp, Homo sapien
cagctgctgctatgtcagggttaaa

SEQ ID NO: 1375365 - DNA, 25 bp, Homo sapien
gctgctatgtcagggttaaaaatca

SEQ ID NO: 1375366 - DNA, 25 bp, Homo sapien
agggttaaaaatcagagcagggcct

SEQ ID NO: 1375367 - DNA, 25 bp, Homo sapien
gcactcatggggacaacttctagca

SEQ ID NO: 1375368 - DNA, 25 bp, Homo sapien
gatgaagaaccgaagctaaaaccca

SEQ ID NO: 1375369 - DNA, 25 bp, Homo sapien
gctaaaacccatgaatgctgtgctg

SEQ ID NO: 1375370 - DNA, 25 bp, Homo sapien
gaaccgaagctaaaacccatgaatg

SEQ ID NO: 1375371 - DNA, 25 bp, Homo sapien
tcagctccttctccatggagcgcac

SEQ ID NO: 1375372 - DNA, 25 bp, Homo sapien
gctccttctccatggagcgcaccat

SEQ ID NO: 1375373 - DNA, 25 bp, Homo sapien
tccactcagctccttctccatggag

SEQ ID NO: 1375374 - DNA, 25 bp, Homo sapien
tttccactcagctccttctccatgg

SEQ ID NO: 1375375 - DNA, 25 bp, Homo sapien
catcttgcaacagcacttgcagctt

SEQ ID NO: 1375376 - DNA, 25 bp, Homo sapien
ctcaatacgggtaagaagtttctgg

SEQ ID NO: 1375377 - DNA, 25 bp, Homo sapien
ggcagctcaatacgggtaagaagtt

SEQ ID NO: 1375378 - DNA, 25 bp, Homo sapien
gcagcttctggcagctcaatacggg

SEQ ID NO: 1375379 - DNA, 25 bp, Homo sapien
tcaggtccattcgcagtgctcagaa

SEQ ID NO: 1375380 - DNA, 25 bp, Homo sapien
tgagtttctctggcccgagttgctg

SEQ ID NO: 1375381 - DNA, 25 bp, Homo sapien
gtttctctggcccgagttgctggca

SEQ ID NO: 1375382 - DNA, 25 bp, Homo sapien
gagtttctctggcccgagttgctgg

SEQ ID NO: 1375383 - DNA, 25 bp, Homo sapien
agtttctctggcccgagttgctggc

SEQ ID NO: 1375384 - DNA, 25 bp, Homo sapien
cagggcgctgctgagactgcaatca

SEQ ID NO: 1375385 - DNA, 25 bp, Homo sapien
gactgcaatcatgatcttaggaatg

SEQ ID NO: 1375386 - DNA, 25 bp, Homo sapien
gatcttaggaatgaacacgtctgtg

SEQ ID NO: 1375387 - DNA, 25 bp, Homo sapien
acagggcgctgctgagactgcaatc

SEQ ID NO: 1375388 - DNA, 25 bp, Homo sapien
cctgcctgtccagaccttctttgta

SEQ ID NO: 1375389 - DNA, 25 bp, Homo sapien
aacttggacttttgatcaggcgaaa

SEQ ID NO: 1375390 - DNA, 25 bp, Homo sapien
gacttttgatcaggcgaaagcctat

SEQ ID NO: 1375391 - DNA, 25 bp, Homo sapien
cgaaagcctatgtggatgccctgcc

SEQ ID NO: 1375392 - DNA, 25 bp, Homo sapien
cagtcctgttgggatcggaagttgc

SEQ ID NO: 1375393 - DNA, 25 bp, Homo sapien
ggagggagggctatgtttccagtcc

SEQ ID NO: 1375394 - DNA, 25 bp, Homo sapien
gatcggaagttgctggctgtgccac

SEQ ID NO: 1375395 - DNA, 25 bp, Homo sapien
gccactggaaaccactgggtgcaaa

SEQ ID NO: 1375396 - DNA, 25 bp, Homo sapien
ggcagtcagagccacatcaggagct

SEQ ID NO: 1375397 - DNA, 25 bp, Homo sapien
catcaggagcttgactagaagtgga

SEQ ID NO: 1375398 - DNA, 25 bp, Homo sapien
tcctccacatggctatcctgaagga

SEQ ID NO: 1375399 - DNA, 25 bp, Homo sapien
aagtgaggtgtctggccatgggtga

SEQ ID NO: 1375400 - DNA, 25 bp, Homo sapien
ttgtgaacttgctggccgaggagcc

SEQ ID NO: 1375401 - DNA, 25 bp, Homo sapien
catgaccagaccgatgtagtagggc

SEQ ID NO: 1375402 - DNA, 25 bp, Homo sapien
gaagaaagcccagttcggaggcaca

SEQ ID NO: 1375403 - DNA, 25 bp, Homo sapien
tggtgtaccaaaacgaggcagggat

SEQ ID NO: 1375404 - DNA, 25 bp, Homo sapien
gtactccacggtgaagatcatgacg

SEQ ID NO: 1375405 - DNA, 25 bp, Homo sapien
agccgcaggaggtactccacggtga

SEQ ID NO: 1375406 - DNA, 25 bp, Homo sapien
caggaggtactccacggtgaagatc

SEQ ID NO: 1375407 - DNA, 25 bp, Homo sapien
ctgggagccgcgaagagccgcagga

SEQ ID NO: 1375408 - DNA, 25 bp, Homo sapien
gtcacgtagtagaagaccagggcca

SEQ ID NO: 1375409 - DNA, 25 bp, Homo sapien
cagagatgcactcgtagcgcgggta

SEQ ID NO: 1375410 - DNA, 25 bp, Homo sapien
caccacgttggtgatgaccgagaca

SEQ ID NO: 1375411 - DNA, 25 bp, Homo sapien
gagtcgttgtcgtccatgagccgct

SEQ ID NO: 1375412 - DNA, 25 bp, Homo sapien
gcgcggacgctaggcacaccagctt

SEQ ID NO: 1375413 - DNA, 25 bp, Homo sapien
accagcttggagttagttcagcaaa

SEQ ID NO: 1375414 - DNA, 25 bp, Homo sapien
cagcttggagttagttcagcaaacc

SEQ ID NO: 1375415 - DNA, 25 bp, Homo sapien
cagccgcgcggacgctaggcacacc

SEQ ID NO: 1375416 - DNA, 25 bp, Homo sapien
ggctgcccgggataaaagcagaaca

SEQ ID NO: 1375417 - DNA, 25 bp, Homo sapien
gcagtgcgatttcaggtctggaacc

SEQ ID NO: 1375418 - DNA, 25 bp, Homo sapien
gaacatctcggatcctattcaaatg

SEQ ID NO: 1375419 - DNA, 25 bp, Homo sapien
aatgtcaacactaagcaagcgcagg

SEQ ID NO: 1375420 - DNA, 25 bp, Homo sapien
ctcgcagagtgagtctttcgatccc

SEQ ID NO: 1375421 - DNA, 25 bp, Homo sapien
gcgacggcccttggcgtcacgtaga

SEQ ID NO: 1375422 - DNA, 25 bp, Homo sapien
ggcgtcacgtagagacctttcccag

SEQ ID NO: 1375423 - DNA, 25 bp, Homo sapien
gtggcgtcgggcaggaccagatgga

SEQ ID NO: 1375424 - DNA, 25 bp, Homo sapien
cgccggctcgccgagctggagaact

SEQ ID NO: 1375425 - DNA, 25 bp, Homo sapien
cgccgagctggagaactttgcgaag

SEQ ID NO: 1375426 - DNA, 25 bp, Homo sapien
ccggctcgccgagctggagaacttt

SEQ ID NO: 1375427 - DNA, 25 bp, Homo sapien
gctcgccgagctggagaactttgcg

SEQ ID NO: 1375428 - DNA, 25 bp, Homo sapien
agaaggctcggtcgcgtccctctta

SEQ ID NO: 1375429 - DNA, 25 bp, Homo sapien
agccggagcaacaggcgtgggagca

SEQ ID NO: 1375430 - DNA, 25 bp, Homo sapien
tgggagcagcgctcctcgcacttcc

SEQ ID NO: 1375431 - DNA, 25 bp, Homo sapien
gtccctcttaccttccgcgaagcca

SEQ ID NO: 1375432 - DNA, 25 bp, Homo sapien
taagctccgtttgaagaccagacac

SEQ ID NO: 1375433 - DNA, 25 bp, Homo sapien
tcagaaagtcaactaatgggacagt

SEQ ID NO: 1375434 - DNA, 25 bp, Homo sapien
gaccagacactggtccagacacctg

SEQ ID NO: 1375435 - DNA, 25 bp, Homo sapien
tcattcctcataagctcgtaactca

SEQ ID NO: 1375436 - DNA, 25 bp, Homo sapien
gaaaaacatctagggcaatttagca

SEQ ID NO: 1375437 - DNA, 25 bp, Homo sapien
cagagacagactagatgccaatcaa

SEQ ID NO: 1375438 - DNA, 25 bp, Homo sapien
gaaaactaagacctaagctcaccca

SEQ ID NO: 1375439 - DNA, 25 bp, Homo sapien
gttctagccaaagtaatataggcca

SEQ ID NO: 1375440 - DNA, 25 bp, Homo sapien
gccactctgtgagtaacatcaagaa

SEQ ID NO: 1375441 - DNA, 25 bp, Homo sapien
gacctggtagatatcagtatcttca

SEQ ID NO: 1375442 - DNA, 25 bp, Homo sapien
ttggaaaagccactctgtgagtaac

SEQ ID NO: 1375443 - DNA, 25 bp, Homo sapien
ggaggaaagacctggtagatatcag

SEQ ID NO: 1375444 - DNA, 25 bp, Homo sapien
ttatccgagcccaaatattgctttt

SEQ ID NO: 1375445 - DNA, 25 bp, Homo sapien
ctttatccgagcccaaatattgctt

SEQ ID NO: 1375446 - DNA, 25 bp, Homo sapien
ttcctttatccgagcccaaatattg

SEQ ID NO: 1375447 - DNA, 25 bp, Homo sapien
caggttcctttatccgagcccaaat

SEQ ID NO: 1375448 - DNA, 25 bp, Homo sapien
tggtatcactgagggagcatttagg

SEQ ID NO: 1375449 - DNA, 25 bp, Homo sapien
tagacagtctctctttactgcagac

SEQ ID NO: 1375450 - DNA, 25 bp, Homo sapien
caccaaattgtcttgctgaaaaaga

SEQ ID NO: 1375451 - DNA, 25 bp, Homo sapien
caaagaagaatgtgtgggcaccaca

SEQ ID NO: 1375452 - DNA, 25 bp, Homo sapien
gagttgggatgctcgaagttttgca

SEQ ID NO: 1375453 - DNA, 25 bp, Homo sapien
caatgacagtttgagtttattaaga

SEQ ID NO: 1375454 - DNA, 25 bp, Homo sapien
cgaagttttgcagtctcatctttca

SEQ ID NO: 1375455 - DNA, 25 bp, Homo sapien
tcccctccggattcccagcacttgg

SEQ ID NO: 1375456 - DNA, 25 bp, Homo sapien
gcctgaaggtacagagtagtgtccc

SEQ ID NO: 1375457 - DNA, 25 bp, Homo sapien
ttttgaatgatcgacacaggctctg

SEQ ID NO: 1375458 - DNA, 25 bp, Homo sapien
tcatcttatagccagtccccgaggt

SEQ ID NO: 1375459 - DNA, 25 bp, Homo sapien
tctgccagacaccttccaaataggg

SEQ ID NO: 1375460 - DNA, 25 bp, Homo sapien
tatcaagcaacccaccacagaaggg

SEQ ID NO: 1375461 - DNA, 25 bp, Homo sapien
cagatactagactatgcacaggagt

SEQ ID NO: 1375462 - DNA, 25 bp, Homo sapien
gatatgggcaaagcagatgacccct

SEQ ID NO: 1375463 - DNA, 25 bp, Homo sapien
gagccagggccattaatacacgcag

SEQ ID NO: 1375464 - DNA, 25 bp, Homo sapien
ctgtgtttaggtagctccctgagat

SEQ ID NO: 1375465 - DNA, 25 bp, Homo sapien
gtctgtgtttaggtagctccctgag

SEQ ID NO: 1375466 - DNA, 25 bp, Homo sapien
agatacctctctgaacacccgtccc

SEQ ID NO: 1375467 - DNA, 25 bp, Homo sapien
gtgtttaggtagctccctgagatac

SEQ ID NO: 1375468 - DNA, 25 bp, Homo sapien
ttggttgaagcctcaacaaatgtag

SEQ ID NO: 1375469 - DNA, 25 bp, Homo sapien
gattgctgtcgacacaggcaggccc

SEQ ID NO: 1375470 - DNA, 25 bp, Homo sapien
aagatgaactgagggtctcatcagg

SEQ ID NO: 1375471 - DNA, 25 bp, Homo sapien
gctgaggttttctaaggcggagatc

SEQ ID NO: 1375472 - DNA, 25 bp, Homo sapien
tccagaaaagaacggtggcagaggt

SEQ ID NO: 1375473 - DNA, 25 bp, Homo sapien
gtgaatgacaattgccaaatccaaa

SEQ ID NO: 1375474 - DNA, 25 bp, Homo sapien
ggcagaggtcggtcaggatgtgaat

SEQ ID NO: 1375475 - DNA, 25 bp, Homo sapien
gtagttccagaaaagaacggtggca

SEQ ID NO: 1375476 - DNA, 25 bp, Homo sapien
cgtctggcagccttgactgtggcac

SEQ ID NO: 1375477 - DNA, 25 bp, Homo sapien
ccgccttcctgagaaaagttggcct

SEQ ID NO: 1375478 - DNA, 25 bp, Homo sapien
caattagcttaatgacatggtggga

SEQ ID NO: 1375479 - DNA, 25 bp, Homo sapien
atgaagcacgtctggcagccttgac

SEQ ID NO: 1375480 - DNA, 25 bp, Homo sapien
gacagcctatcagatggcagcgccg

SEQ ID NO: 1375481 - DNA, 25 bp, Homo sapien
catcttcttgaatccaggtggtagc

SEQ ID NO: 1375482 - DNA, 25 bp, Homo sapien
catttatgttgggaagatgcccttc

SEQ ID NO: 1375483 - DNA, 25 bp, Homo sapien
gcctcctagaggtgagaaacgactg

SEQ ID NO: 1375484 - DNA, 25 bp, Homo sapien
aatttaagatcatcgttgatggaag

SEQ ID NO: 1375485 - DNA, 25 bp, Homo sapien
aaaatttaagatcatcgttgatgga

SEQ ID NO: 1375486 - DNA, 25 bp, Homo sapien
gatcatcgttgatggaagtgccaaa

SEQ ID NO: 1375487 - DNA, 25 bp, Homo sapien
taagatcatcgttgatggaagtgcc

SEQ ID NO: 1375488 - DNA, 25 bp, Homo sapien
gaaggatggcgagtggtgtgactgc

SEQ ID NO: 1375489 - DNA, 25 bp, Homo sapien
agagggttcactcttaggaaatcca

SEQ ID NO: 1375490 - DNA, 25 bp, Homo sapien
agaaggatggcgagtggtgtgactg

SEQ ID NO: 1375491 - DNA, 25 bp, Homo sapien
cagccttctgtacccattccacacc

SEQ ID NO: 1375492 - DNA, 25 bp, Homo sapien
acaccctgtccacaagccatgtgtt

SEQ ID NO: 1375493 - DNA, 25 bp, Homo sapien
agccatgtgttcaggacttgaccca

SEQ ID NO: 1375494 - DNA, 25 bp, Homo sapien
catgtgttcaggacttgacccacaa

SEQ ID NO: 1375495 - DNA, 25 bp, Homo sapien
tccaacctcctttggtactgaccag

SEQ ID NO: 1375496 - DNA, 25 bp, Homo sapien
caagttggtgccagagctaggtctt

SEQ ID NO: 1375497 - DNA, 25 bp, Homo sapien
tccataaaacggcatccacaaagca

SEQ ID NO: 1375498 - DNA, 25 bp, Homo sapien
tgttccaagtgaatctgcacattgc

SEQ ID NO: 1375499 - DNA, 25 bp, Homo sapien
gctgctgctttgtgatcacttttcc

SEQ ID NO: 1375500 - DNA, 25 bp, Homo sapien
gaagcacattgtctagccagagctg

SEQ ID NO: 1375501 - DNA, 25 bp, Homo sapien
ttcccttcaaggttgccctggatct

SEQ ID NO: 1375502 - DNA, 25 bp, Homo sapien
tggggactccttagcacatccagcc

SEQ ID NO: 1375503 - DNA, 25 bp, Homo sapien
gctaagggctcctcaaataagcaaa

SEQ ID NO: 1375504 - DNA, 25 bp, Homo sapien
ccccatttccagaattggctaaggg

SEQ ID NO: 1375505 - DNA, 25 bp, Homo sapien
agaataagctgctggttcgatccca

SEQ ID NO: 1375506 - DNA, 25 bp, Homo sapien
ttcgatcccagctgttctgaggccc

SEQ ID NO: 1375507 - DNA, 25 bp, Homo sapien
aggaccccagggactgtagacagtt

SEQ ID NO: 1375508 - DNA, 25 bp, Homo sapien
ctgtagacagtttgccaccccctcc

SEQ ID NO: 1375509 - DNA, 25 bp, Homo sapien
tgaaggaccccagggactgtagaca

SEQ ID NO: 1375510 - DNA, 25 bp, Homo sapien
cagctgtggacagatactggggttc

SEQ ID NO: 1375511 - DNA, 25 bp, Homo sapien
ctggagagccaggacagctgttgat

SEQ ID NO: 1375512 - DNA, 25 bp, Homo sapien
agagccaggacagctgttgattcct

SEQ ID NO: 1375513 - DNA, 25 bp, Homo sapien
ggagagccaggacagctgttgattc

SEQ ID NO: 1375514 - DNA, 25 bp, Homo sapien
gccaggacagctgttgattcctgtg

SEQ ID NO: 1375515 - DNA, 25 bp, Homo sapien
agaattcttcacgtggtcctcccca

SEQ ID NO: 1375516 - DNA, 25 bp, Homo sapien
gaagaattcttcacgtggtcctccc

SEQ ID NO: 1375517 - DNA, 25 bp, Homo sapien
gtggtcctccccacgccagcagctt

SEQ ID NO: 1375518 - DNA, 25 bp, Homo sapien
gctgaagaattcttcacgtggtcct

SEQ ID NO: 1375519 - DNA, 25 bp, Homo sapien
tatagaatagtgcagaccaatgggt

SEQ ID NO: 1375520 - DNA, 25 bp, Homo sapien
tgtgtattaccagacaagatgccag

SEQ ID NO: 1375521 - DNA, 25 bp, Homo sapien
gatatttgcatatccgagcagccca

SEQ ID NO: 1375522 - DNA, 25 bp, Homo sapien
aaaaacatagatactgcggacagcc

SEQ ID NO: 1375523 - DNA, 25 bp, Homo sapien
aagacacttgttattctgagagcca

SEQ ID NO: 1375524 - DNA, 25 bp, Homo sapien
catccctgaagacacttgttattct

SEQ ID NO: 1375525 - DNA, 25 bp, Homo sapien
tattctgagagccactaagtcattg

SEQ ID NO: 1375526 - DNA, 25 bp, Homo sapien
cttgttattctgagagccactaagt

SEQ ID NO: 1375527 - DNA, 25 bp, Homo sapien
tctgtgaggatctatgttctctgtg

SEQ ID NO: 1375528 - DNA, 25 bp, Homo sapien
tcagctaggccattcactctggtta

SEQ ID NO: 1375529 - DNA, 25 bp, Homo sapien
ttcagcagttagattcatagctctg

SEQ ID NO: 1375530 - DNA, 25 bp, Homo sapien
gggtgaatctctcctatactgactc

SEQ ID NO: 1375531 - DNA, 25 bp, Homo sapien
gcttccaagagccgttcaagggcca

SEQ ID NO: 1375532 - DNA, 25 bp, Homo sapien
cttccaagagccgttcaagggccat

SEQ ID NO: 1375533 - DNA, 25 bp, Homo sapien
gggcttccaagagccgttcaagggc

SEQ ID NO: 1375534 - DNA, 25 bp, Homo sapien
ctgggcttccaagagccgttcaagg

SEQ ID NO: 1375535 - DNA, 25 bp, Homo sapien
cctttctaataggtttgagtccctg

SEQ ID NO: 1375536 - DNA, 25 bp, Homo sapien
gtttgagtccctgacaccgtctgtg

SEQ ID NO: 1375537 - DNA, 25 bp, Homo sapien
atgccccaggacatatggattcccc

SEQ ID NO: 1375538 - DNA, 25 bp, Homo sapien
gggtgatactgcttgttggctctcc

SEQ ID NO: 1375539 - DNA, 25 bp, Homo sapien
ttgctttaccaagtagctgagcact

SEQ ID NO: 1375540 - DNA, 25 bp, Homo sapien
gctgagcactgtgacattaacctcc

SEQ ID NO: 1375541 - DNA, 25 bp, Homo sapien
tttaccaagtagctgagcactgtga

SEQ ID NO: 1375542 - DNA, 25 bp, Homo sapien
gagcactgtgacattaacctccaat

SEQ ID NO: 1375543 - DNA, 25 bp, Homo sapien
gagctcctcgtgcaccccactcaag

SEQ ID NO: 1375544 - DNA, 25 bp, Homo sapien
tggcagagctcctcgtgcaccccac

SEQ ID NO: 1375545 - DNA, 25 bp, Homo sapien
accccactcaagcccttggatctat

SEQ ID NO: 1375546 - DNA, 25 bp, Homo sapien
cagagctcctcgtgcaccccactca

SEQ ID NO: 1375547 - DNA, 25 bp, Homo sapien
ggaccagccaacaccaagattgtca

SEQ ID NO: 1375548 - DNA, 25 bp, Homo sapien
ttaactgggaccagccaacaccaag

SEQ ID NO: 1375549 - DNA, 25 bp, Homo sapien
ctttaactgggaccagccaacacca

SEQ ID NO: 1375550 - DNA, 25 bp, Homo sapien
ccaacaccaagattgtcagttaaca

SEQ ID NO: 1375551 - DNA, 25 bp, Homo sapien
cagcacctaatgtgtcacctttgga

SEQ ID NO: 1375552 - DNA, 25 bp, Homo sapien
cttcagaagtctggcagcacctaat

SEQ ID NO: 1375553 - DNA, 25 bp, Homo sapien
ctcttcagaagtctggcagcaccta

SEQ ID NO: 1375554 - DNA, 25 bp, Homo sapien
tggcagcacctaatgtgtcaccttt

SEQ ID NO: 1375555 - DNA, 25 bp, Homo sapien
tctcttttgtcttacagccacaacc

SEQ ID NO: 1375556 - DNA, 25 bp, Homo sapien
cctggaacaggtcacatcatccctg

SEQ ID NO: 1375557 - DNA, 25 bp, Homo sapien
ggaacaggtcacatcatccctgcat

SEQ ID NO: 1375558 - DNA, 25 bp, Homo sapien
gacctggaacaggtcacatcatccc

SEQ ID NO: 1375559 - DNA, 25 bp, Homo sapien
tggaacaggtcacatcatccctgca

SEQ ID NO: 1375560 - DNA, 25 bp, Homo sapien
tccagaccagggagtattaagccat

SEQ ID NO: 1375561 - DNA, 25 bp, Homo sapien
gggtgagtggctgcggactcatttg

SEQ ID NO: 1375562 - DNA, 25 bp, Homo sapien
gagtggctgcggactcatttgccat

SEQ ID NO: 1375563 - DNA, 25 bp, Homo sapien
tttgcctggtgagcaagtgaagagg

SEQ ID NO: 1375564 - DNA, 25 bp, Homo sapien
cctactcttggtgaagtgtcctccc

SEQ ID NO: 1375565 - DNA, 25 bp, Homo sapien
gaagtgtcctcccttcctagttgca

SEQ ID NO: 1375566 - DNA, 25 bp, Homo sapien
cttggtgaagtgtcctcccttccta

SEQ ID NO: 1375567 - DNA, 25 bp, Homo sapien
ctactcttggtgaagtgtcctccct

SEQ ID NO: 1375568 - DNA, 25 bp, Homo sapien
tctgactgatgccatgtgtttctcc

SEQ ID NO: 1375569 - DNA, 25 bp, Homo sapien
cagggaggggataaatctgactgat

SEQ ID NO: 1375570 - DNA, 25 bp, Homo sapien
taaatctgactgatgccatgtgttt

SEQ ID NO: 1375571 - DNA, 25 bp, Homo sapien
tgactgatgccatgtgtttctccat

SEQ ID NO: 1375572 - DNA, 25 bp, Homo sapien
caaagatcacaaggtgtggccccca

SEQ ID NO: 1375573 - DNA, 25 bp, Homo sapien
gaagctgagcaaggaattcgatttc

SEQ ID NO: 1375574 - DNA, 25 bp, Homo sapien
gacaagtgaggttggacgtcttcca

SEQ ID NO: 1375575 - DNA, 25 bp, Homo sapien
cccaggaaatgaatcttccatccaa

SEQ ID NO: 1375576 - DNA, 25 bp, Homo sapien
cagatggaaaaaacatctgtgggct

SEQ ID NO: 1375577 - DNA, 25 bp, Homo sapien
aaaaacatctgtgggcttaggagca

SEQ ID NO: 1375578 - DNA, 25 bp, Homo sapien
tggaaaaaacatctgtgggcttagg

SEQ ID NO: 1375579 - DNA, 25 bp, Homo sapien
ttgcagatggaaaaaacatctgtgg

SEQ ID NO: 1375580 - DNA, 25 bp, Homo sapien
cagcaaagcgtcaatctaagtggaa

SEQ ID NO: 1375581 - DNA, 25 bp, Homo sapien
tgagagaaccccagtccttaggaga

SEQ ID NO: 1375582 - DNA, 25 bp, Homo sapien
ttagaaaaatcagagtggcccaccc

SEQ ID NO: 1375583 - DNA, 25 bp, Homo sapien
tcctaaatgtaaggccaggtccaga

SEQ ID NO: 1375584 - DNA, 25 bp, Homo sapien
ttgcagaagagcaaacccatccgtc

SEQ ID NO: 1375585 - DNA, 25 bp, Homo sapien
ccatccgtcgcgcagccagtgtggg

SEQ ID NO: 1375586 - DNA, 25 bp, Homo sapien
cagccacttggacgccttatctgag

SEQ ID NO: 1375587 - DNA, 25 bp, Homo sapien
tatctgagccaaagtaatcacttgc

SEQ ID NO: 1375588 - DNA, 25 bp, Homo sapien
tgaagtctccttctcagaggtagct

SEQ ID NO: 1375589 - DNA, 25 bp, Homo sapien
attccagaacagactgattgtgacc

SEQ ID NO: 1375590 - DNA, 25 bp, Homo sapien
tttacaatcccctagagatggtctc

SEQ ID NO: 1375591 - DNA, 25 bp, Homo sapien
tcagaggtagctcaagggcctttcc

SEQ ID NO: 1375592 - DNA, 25 bp, Homo sapien
aagaattgaagtgtataagggacct

SEQ ID NO: 1375593 - DNA, 25 bp, Homo sapien
aagtgtataagggacctgagatatc

SEQ ID NO: 1375594 - DNA, 25 bp, Homo sapien
tataagggacctgagatatcatcta

SEQ ID NO: 1375595 - DNA, 25 bp, Homo sapien
ggacctgagatatcatctaagccaa

SEQ ID NO: 1375596 - DNA, 25 bp, Homo sapien
gaaccaggcttttgtaccatcacac

SEQ ID NO: 1375597 - DNA, 25 bp, Homo sapien
ccagaaccaggcttttgtaccatca

SEQ ID NO: 1375598 - DNA, 25 bp, Homo sapien
accaggcttttgtaccatcacacag

SEQ ID NO: 1375599 - DNA, 25 bp, Homo sapien
aggcttttgtaccatcacacagcta

SEQ ID NO: 1375600 - DNA, 25 bp, Homo sapien
tcctgagaagagatcaaaccagctg

SEQ ID NO: 1375601 - DNA, 25 bp, Homo sapien
cctgagaagagatcaaaccagctgg

SEQ ID NO: 1375602 - DNA, 25 bp, Homo sapien
atcaaacccaggtggattgtggagc

SEQ ID NO: 1375603 - DNA, 25 bp, Homo sapien
caaacccaggtggattgtggagctc

SEQ ID NO: 1375604 - DNA, 25 bp, Homo sapien
cagcgggtgggctgcttcagtgaat

SEQ ID NO: 1375605 - DNA, 25 bp, Homo sapien
gctgcttcagtgaatcaaacccagg

SEQ ID NO: 1375606 - DNA, 25 bp, Homo sapien
ggctatcatcgcagaatgtttcatt

SEQ ID NO: 1375607 - DNA, 25 bp, Homo sapien
tagctcaatcccttccttagaaagg

SEQ ID NO: 1375608 - DNA, 25 bp, Homo sapien
tccttagaaaggctatcatcgcaga

SEQ ID NO: 1375609 - DNA, 25 bp, Homo sapien
tttccttggagccactagctcaatc

SEQ ID NO: 1375610 - DNA, 25 bp, Homo sapien
tttggttgaactgtcagagctgttg

SEQ ID NO: 1375611 - DNA, 25 bp, Homo sapien
tctccctatttggttgaactgtcag

SEQ ID NO: 1375612 - DNA, 25 bp, Homo sapien
aaaagggtgattggtgatctcccta

SEQ ID NO: 1375613 - DNA, 25 bp, Homo sapien
ggtgatctccctatttggttgaact

SEQ ID NO: 1375614 - DNA, 25 bp, Homo sapien
cctgggccgtaagtctcctgggcct

SEQ ID NO: 1375615 - DNA, 25 bp, Homo sapien
tgacgtctcctaagagctcctccac

SEQ ID NO: 1375616 - DNA, 25 bp, Homo sapien
gtctcctaagagctcctccactctg

SEQ ID NO: 1375617 - DNA, 25 bp, Homo sapien
ctctcccctgggccgtaagtctcct

SEQ ID NO: 1375618 - DNA, 25 bp, Homo sapien
ctcaactctaagaccagaggaccct

SEQ ID NO: 1375619 - DNA, 25 bp, Homo sapien
cctggagaactcaactctaagacca

SEQ ID NO: 1375620 - DNA, 25 bp, Homo sapien
ctctaattacactgtctgcagaaag

SEQ ID NO: 1375621 - DNA, 25 bp, Homo sapien
gccacagcccaagtccgtagctcat

SEQ ID NO: 1375622 - DNA, 25 bp, Homo sapien
tctgcatgtggaaatggaccggcag

SEQ ID NO: 1375623 - DNA, 25 bp, Homo sapien
gctgcagacccagcgtcatcttctg

SEQ ID NO: 1375624 - DNA, 25 bp, Homo sapien
cacagatctgacagcaatcgtagct

SEQ ID NO: 1375625 - DNA, 25 bp, Homo sapien
tatttgtagatccaattcagggagg

SEQ ID NO: 1375626 - DNA, 25 bp, Homo sapien
gtttgtacaatgaacagctgattga

SEQ ID NO: 1375627 - DNA, 25 bp, Homo sapien
ggagtttgtacaatgaacagctgat

SEQ ID NO: 1375628 - DNA, 25 bp, Homo sapien
gtacaatgaacagctgattgaacag

SEQ ID NO: 1375629 - DNA, 25 bp, Homo sapien
ttgtacaatgaacagctgattgaac

SEQ ID NO: 1375630 - DNA, 25 bp, Homo sapien
accacagtgcagagctcagtcacaa

SEQ ID NO: 1375631 - DNA, 25 bp, Homo sapien
ggatgaaaccacagtgcagagctca

SEQ ID NO: 1375632 - DNA, 25 bp, Homo sapien
gaaaccacagtgcagagctcagtca

SEQ ID NO: 1375633 - DNA, 25 bp, Homo sapien
acagtgcagagctcagtcacaattt

SEQ ID NO: 1375634 - DNA, 25 bp, Homo sapien
tctccagggtgtcttaggggcaaca

SEQ ID NO: 1375635 - DNA, 25 bp, Homo sapien
ttgcaagttcgacccctgataaacc

SEQ ID NO: 1375636 - DNA, 25 bp, Homo sapien
gtgacttgcaagttcgacccctgat

SEQ ID NO: 1375637 - DNA, 25 bp, Homo sapien
gcttgtgacttgcaagttcgacccc

SEQ ID NO: 1375638 - DNA, 25 bp, Homo sapien
aaagtgccattaatgccgctgccca

SEQ ID NO: 1375639 - DNA, 25 bp, Homo sapien
catcatcctctagggaaagtgccat

SEQ ID NO: 1375640 - DNA, 25 bp, Homo sapien
gagagttaatcagagtgtccaaggc

SEQ ID NO: 1375641 - DNA, 25 bp, Homo sapien
taatcagagtgtccaaggctccagg

SEQ ID NO: 1375642 - DNA, 25 bp, Homo sapien
gcacactgctacatgtccccatttg

SEQ ID NO: 1375643 - DNA, 25 bp, Homo sapien
ttcctgcagctgttagaaaccctgg

SEQ ID NO: 1375644 - DNA, 25 bp, Homo sapien
gatgtccaaggcatatcattaagca

SEQ ID NO: 1375645 - DNA, 25 bp, Homo sapien
gaattgtgcagacgcctacttcagc

SEQ ID NO: 1375646 - DNA, 25 bp, Homo sapien
ttttggtgggagtagaattctagca

SEQ ID NO: 1375647 - DNA, 25 bp, Homo sapien
gtctcttagtgtcaattgtaccaat

SEQ ID NO: 1375648 - DNA, 25 bp, Homo sapien
aattgtcgttattttgccctcatgt

SEQ ID NO: 1375649 - DNA, 25 bp, Homo sapien
tctggctactgttgagagataagca

SEQ ID NO: 1375650 - DNA, 25 bp, Homo sapien
tgaaagatccgctgccaaaatgcct

SEQ ID NO: 1375651 - DNA, 25 bp, Homo sapien
tgtgcattctcacaaaggaagctgg

SEQ ID NO: 1375652 - DNA, 25 bp, Homo sapien
catcatgcagacctctctatgggct

SEQ ID NO: 1375653 - DNA, 25 bp, Homo sapien
gaagctttagatcctcatcatgcag

SEQ ID NO: 1375654 - DNA, 25 bp, Homo sapien
gacctaatctctgcaatcacacaat

SEQ ID NO: 1375655 - DNA, 25 bp, Homo sapien
ttctatttgttagaatcaagtctct

SEQ ID NO: 1375656 - DNA, 25 bp, Homo sapien
cctaatctctgcaatcacacaatgt

SEQ ID NO: 1375657 - DNA, 25 bp, Homo sapien
tgacctaatctctgcaatcacacaa

SEQ ID NO: 1375658 - DNA, 25 bp, Homo sapien
cggaatcctcgatggaatgcaggcg

SEQ ID NO: 1375659 - DNA, 25 bp, Homo sapien
ttcaccctaacagccagtggactct

SEQ ID NO: 1375660 - DNA, 25 bp, Homo sapien
tcctcgatggaatgcaggcgcaggc

SEQ ID NO: 1375661 - DNA, 25 bp, Homo sapien
ggtgcaatttgcatacttctggtgg

SEQ ID NO: 1375662 - DNA, 25 bp, Homo sapien
agtagagactaaaatacatgttagt

SEQ ID NO: 1375663 - DNA, 25 bp, Homo sapien
ccgcaccaggccatagctagctttt

SEQ ID NO: 1375664 - DNA, 25 bp, Homo sapien
caccacgacacccacctatctaatt

SEQ ID NO: 1375665 - DNA, 25 bp, Homo sapien
cacgacacccacctatctaatttgt

SEQ ID NO: 1375666 - DNA, 25 bp, Homo sapien
ggacaaatgactgacatcttcaccc

SEQ ID NO: 1375667 - DNA, 25 bp, Homo sapien
atatctgtcataggacaaatgactg

SEQ ID NO: 1375668 - DNA, 25 bp, Homo sapien
gacaaatgactgacatcttcacccc

SEQ ID NO: 1375669 - DNA, 25 bp, Homo sapien
gtgaatatctgtcataggacaaatg

SEQ ID NO: 1375670 - DNA, 25 bp, Homo sapien
cactttttaatagaattgcttggtt

SEQ ID NO: 1375671 - DNA, 25 bp, Homo sapien
aggaattgccagactactttccaca

SEQ ID NO: 1375672 - DNA, 25 bp, Homo sapien
ttctcagcaacctcaccaacatttg

SEQ ID NO: 1375673 - DNA, 25 bp, Homo sapien
taatgggattactggtagttctgtt

SEQ ID NO: 1375674 - DNA, 25 bp, Homo sapien
catctactgttgtgtaaggaacttc

SEQ ID NO: 1375675 - DNA, 25 bp, Homo sapien
aattaagtcactcccagtttcctgc

SEQ ID NO: 1375676 - DNA, 25 bp, Homo sapien
tacctaccgaagcaactagatgtgg

SEQ ID NO: 1375677 - DNA, 25 bp, Homo sapien
tggctgggacacaatcaaaggagga

SEQ ID NO: 1375678 - DNA, 25 bp, Homo sapien
tgtaccatataacacaagcattaac

SEQ ID NO: 1375679 - DNA, 25 bp, Homo sapien
taggcattaacgtttgtaaagccaa

SEQ ID NO: 1375680 - DNA, 25 bp, Homo sapien
taaagccaaatataccatgcagaag

SEQ ID NO: 1375681 - DNA, 25 bp, Homo sapien
aacaagttaaatcttgctgtttggg

SEQ ID NO: 1375682 - DNA, 25 bp, Homo sapien
tgaatctctcacgaccgaggtctgg

SEQ ID NO: 1375683 - DNA, 25 bp, Homo sapien
aatctctcacgaccgaggtctggcc

SEQ ID NO: 1375684 - DNA, 25 bp, Homo sapien
tgtgaatctctcacgaccgaggtct

SEQ ID NO: 1375685 - DNA, 25 bp, Homo sapien
cgaccgaggtctggccgcgcgccac

SEQ ID NO: 1375686 - DNA, 25 bp, Homo sapien
tctgctgggtaaaggttctctctaa

SEQ ID NO: 1375687 - DNA, 25 bp, Homo sapien
gaagagatccctaccaaaggcaggt

SEQ ID NO: 1375688 - DNA, 25 bp, Homo sapien
gaatgaaagttaccatcctggctca

SEQ ID NO: 1375689 - DNA, 25 bp, Homo sapien
taaactaggaacatgcaatgcagca

SEQ ID NO: 1375690 - DNA, 25 bp, Homo sapien
tttctcagaggcataaaattaggcc

SEQ ID NO: 1375691 - DNA, 25 bp, Homo sapien
tgggccctggaattcaaagaatata

SEQ ID NO: 1375692 - DNA, 25 bp, Homo sapien
gaaagaatatggagccaggaattcc

SEQ ID NO: 1375693 - DNA, 25 bp, Homo sapien
ggaattccctccaaagcaatagagt

SEQ ID NO: 1375694 - DNA, 25 bp, Homo sapien
tgtggacgtccatacttgcaaagcc

SEQ ID NO: 1375695 - DNA, 25 bp, Homo sapien
tacctggccaaagttagatgggaca

SEQ ID NO: 1375696 - DNA, 25 bp, Homo sapien
cccgtgttacccagtgtgagtgcaa

SEQ ID NO: 1375697 - DNA, 25 bp, Homo sapien
tgaagtccgtttgagcagaactacc

SEQ ID NO: 1375698 - DNA, 25 bp, Homo sapien
taggtttgcagtagtggaatctcca

SEQ ID NO: 1375699 - DNA, 25 bp, Homo sapien
gagaggatcctagcctttgaagctg

SEQ ID NO: 1375700 - DNA, 25 bp, Homo sapien
tcaagggcccacatgaggcatcagt

SEQ ID NO: 1375701 - DNA, 25 bp, Homo sapien
aatttgcggttatgacagacccggg

SEQ ID NO: 1375702 - DNA, 25 bp, Homo sapien
tagttttcagagatggagctcacta

SEQ ID NO: 1375703 - DNA, 25 bp, Homo sapien
tgtgcccagctgtcagacgctgagt

SEQ ID NO: 1375704 - DNA, 25 bp, Homo sapien
ccagctgtcagacgctgagttttaa

SEQ ID NO: 1375705 - DNA, 25 bp, Homo sapien
ccagctaatttaaacatagttttca

SEQ ID NO: 1375706 - DNA, 25 bp, Homo sapien
cagggcccttgtggtctgcggtaag

SEQ ID NO: 1375707 - DNA, 25 bp, Homo sapien
cacatccattaacacaaaacatgag

SEQ ID NO: 1375708 - DNA, 25 bp, Homo sapien
tgaggggatttgctctggtttcaca

SEQ ID NO: 1375709 - DNA, 25 bp, Homo sapien
acatgagctagtcagggcccttgtg

SEQ ID NO: 1375710 - DNA, 25 bp, Homo sapien
aaaaacaaacattgcctggccctga

SEQ ID NO: 1375711 - DNA, 25 bp, Homo sapien
tgcagtcagggctccatttagttcc

SEQ ID NO: 1375712 - DNA, 25 bp, Homo sapien
gacacgagtctctacatggcttaac

SEQ ID NO: 1375713 - DNA, 25 bp, Homo sapien
tagagaaggcacatgactgaagtac

SEQ ID NO: 1375714 - DNA, 25 bp, Homo sapien
gaattaccatcaaagcagagtggct

SEQ ID NO: 1375715 - DNA, 25 bp, Homo sapien
cacacctggttattgatggccttgg

SEQ ID NO: 1375716 - DNA, 25 bp, Homo sapien
cactcagtggtcatagggcagaagc

SEQ ID NO: 1375717 - DNA, 25 bp, Homo sapien
gagttctccgtaagcaatcctgcag

SEQ ID NO: 1375718 - DNA, 25 bp, Homo sapien
catgacctgtggttgtttttaactc

SEQ ID NO: 1375719 - DNA, 25 bp, Homo sapien
ctgggttagaaaactggagagcttt

SEQ ID NO: 1375720 - DNA, 25 bp, Homo sapien
ggatgatctccataagagagaagca

SEQ ID NO: 1375721 - DNA, 25 bp, Homo sapien
gagagctttggattccagggatgat

SEQ ID NO: 1375722 - DNA, 25 bp, Homo sapien
caaaatgcggtgacttgacttcaac

SEQ ID NO: 1375723 - DNA, 25 bp, Homo sapien
caaggtcacatgaacagtgcgtggc

SEQ ID NO: 1375724 - DNA, 25 bp, Homo sapien
agtatatcgatggagcagctggaca

SEQ ID NO: 1375725 - DNA, 25 bp, Homo sapien
tgcaaggcaagcattctcccactgg

SEQ ID NO: 1375726 - DNA, 25 bp, Homo sapien
ccagaactcaaacctaggtcttctg

SEQ ID NO: 1375727 - DNA, 25 bp, Homo sapien
tgtgtattctcctcaaagcctgagg

SEQ ID NO: 1375728 - DNA, 25 bp, Homo sapien
gtattctcctcaaagcctgaggatg

SEQ ID NO: 1375729 - DNA, 25 bp, Homo sapien
aaatcctgtgtattctcctcaaagc

SEQ ID NO: 1375730 - DNA, 25 bp, Homo sapien
ggatctcaagctgatgcaagcaatt

SEQ ID NO: 1375731 - DNA, 25 bp, Homo sapien
ggtcctgggatctcaagctgatgca

SEQ ID NO: 1375732 - DNA, 25 bp, Homo sapien
caaaggtcctgggatctcaagctga

SEQ ID NO: 1375733 - DNA, 25 bp, Homo sapien
tcctgggatctcaagctgatgcaag

SEQ ID NO: 1375734 - DNA, 25 bp, Homo sapien
tcatcatctaaagaattccattgct

SEQ ID NO: 1375735 - DNA, 25 bp, Homo sapien
tcagaagtcatcatctaaagaattc

SEQ ID NO: 1375736 - DNA, 25 bp, Homo sapien
tcatctaaagaattccattgctcac

SEQ ID NO: 1375737 - DNA, 25 bp, Homo sapien
cagaagtcatcatctaaagaattcc

SEQ ID NO: 1375738 - DNA, 25 bp, Homo sapien
acaccagatggaggggataaaagta

SEQ ID NO: 1375739 - DNA, 25 bp, Homo sapien
agatggaggggataaaagtacgagg

SEQ ID NO: 1375740 - DNA, 25 bp, Homo sapien
ccagatggaggggataaaagtacga

SEQ ID NO: 1375741 - DNA, 25 bp, Homo sapien
tggaggggataaaagtacgaggtca

SEQ ID NO: 1375742 - DNA, 25 bp, Homo sapien
ggcttcttgcaagaggctttttctt

SEQ ID NO: 1375743 - DNA, 25 bp, Homo sapien
gcttcttgcaagaggctttttctta

SEQ ID NO: 1375744 - DNA, 25 bp, Homo sapien
tcttgcaagaggctttttcttaaac

SEQ ID NO: 1375745 - DNA, 25 bp, Homo sapien
tgcaagaggctttttcttaaactaa

SEQ ID NO: 1375746 - DNA, 25 bp, Homo sapien
gagcaggagagtgttgaatgagctg

SEQ ID NO: 1375747 - DNA, 25 bp, Homo sapien
aaagtttcaactttgagtgccccag

SEQ ID NO: 1375748 - DNA, 25 bp, Homo sapien
aaagtcttcacagctagggcttagc

SEQ ID NO: 1375749 - DNA, 25 bp, Homo sapien
cctgggctcgcaataagggctaaac

SEQ ID NO: 1375750 - DNA, 25 bp, Homo sapien
taagattagtaaagtgccttcgtcc

SEQ ID NO: 1375751 - DNA, 25 bp, Homo sapien
tctgttctacaaggtagtttgccag

SEQ ID NO: 1375752 - DNA, 25 bp, Homo sapien
caacaggttctgttctacaaggtag

SEQ ID NO: 1375753 - DNA, 25 bp, Homo sapien
aggtagtttgccagtgcctagaacc

SEQ ID NO: 1375754 - DNA, 25 bp, Homo sapien
tacaaggtagtttgccagtgcctag

SEQ ID NO: 1375755 - DNA, 25 bp, Homo sapien
gatgctcctactgcatagagcaaac

SEQ ID NO: 1375756 - DNA, 25 bp, Homo sapien
gtctggaatggtgcctgaagttatg

SEQ ID NO: 1375757 - DNA, 25 bp, Homo sapien
gaatggtgcctgaagttatgcattt

SEQ ID NO: 1375758 - DNA, 25 bp, Homo sapien
tggtgcctgaagttatgcatttttc

SEQ ID NO: 1375759 - DNA, 25 bp, Homo sapien
ctagtttttccatggttctcagtgt

SEQ ID NO: 1375760 - DNA, 25 bp, Homo sapien
tatccatcctagttgtgctcttgag

SEQ ID NO: 1375761 - DNA, 25 bp, Homo sapien
ttgagacataggcacattctgtacc

SEQ ID NO: 1375762 - DNA, 25 bp, Homo sapien
gcaacagaagtagctcaaatcacca

SEQ ID NO: 1375763 - DNA, 25 bp, Homo sapien
gatgggatacccactctagtatcag

SEQ ID NO: 1375764 - DNA, 25 bp, Homo sapien
taatctacacaagtccttgagatca

SEQ ID NO: 1375765 - DNA, 25 bp, Homo sapien
caaataatctacacaagtccttgag

SEQ ID NO: 1375766 - DNA, 25 bp, Homo sapien
ttacaaataatctacacaagtcctt

SEQ ID NO: 1375767 - DNA, 25 bp, Homo sapien
tctacacaagtccttgagatcatac

SEQ ID NO: 1375768 - DNA, 25 bp, Homo sapien
tcaggaaactggtgagtgagaatgg

SEQ ID NO: 1375769 - DNA, 25 bp, Homo sapien
atggctatcattgctgtagaagagc

SEQ ID NO: 1375770 - DNA, 25 bp, Homo sapien
agaatggctatcattgctgtagaag

SEQ ID NO: 1375771 - DNA, 25 bp, Homo sapien
aaactggtgagtgagaatggctatc

SEQ ID NO: 1375772 - DNA, 25 bp, Homo sapien
ttatagccttcggcatggttgcttc

SEQ ID NO: 1375773 - DNA, 25 bp, Homo sapien
tatagccttcggcatggttgcttct

SEQ ID NO: 1375774 - DNA, 25 bp, Homo sapien
tagccttcggcatggttgcttctca

SEQ ID NO: 1375775 - DNA, 25 bp, Homo sapien
atagccttcggcatggttgcttctc

SEQ ID NO: 1375776 - DNA, 25 bp, Homo sapien
ctaacgggtatggaatcattctaaa

SEQ ID NO: 1375777 - DNA, 25 bp, Homo sapien
tgcagctgggataagggtaaaatag

SEQ ID NO: 1375778 - DNA, 25 bp, Homo sapien
tgtcctttctctaacgggtatggaa

SEQ ID NO: 1375779 - DNA, 25 bp, Homo sapien
ctgtgcagctgggataagggtaaaa

SEQ ID NO: 1375780 - DNA, 25 bp, Homo sapien
tctattcgtttccagtgctgaagat

SEQ ID NO: 1375781 - DNA, 25 bp, Homo sapien
tatcaccccgtttcagaatgtgttc

SEQ ID NO: 1375782 - DNA, 25 bp, Homo sapien
gaaagcataggcaattgcttcacta

SEQ ID NO: 1375783 - DNA, 25 bp, Homo sapien
cactgtaacagattaagagcacctt

SEQ ID NO: 1375784 - DNA, 25 bp, Homo sapien
tgataagtaagacaagtgccctgct

SEQ ID NO: 1375785 - DNA, 25 bp, Homo sapien
ttctatgagattggacaggcagggc

SEQ ID NO: 1375786 - DNA, 25 bp, Homo sapien
tatgatgaggcatgaccaatccagg

SEQ ID NO: 1375787 - DNA, 25 bp, Homo sapien
tagaaatgcgtagaaaatgtgggcc

SEQ ID NO: 1375788 - DNA, 25 bp, Homo sapien
aacttttaaatgctacagatagcga

SEQ ID NO: 1375789 - DNA, 25 bp, Homo sapien
taaatatgtactccagttataagga

SEQ ID NO: 1375790 - DNA, 25 bp, Homo sapien
tctactttactcttgccctaagggc

SEQ ID NO: 1375791 - DNA, 25 bp, Homo sapien
tatacattctaaggctacaaacact

SEQ ID NO: 1375792 - DNA, 25 bp, Homo sapien
acctgaccacctgaggcaaacagtg

SEQ ID NO: 1375793 - DNA, 25 bp, Homo sapien
cctttctagttaatgaatgtttcac

SEQ ID NO: 1375794 - DNA, 25 bp, Homo sapien
aaacgtatcttctttcactccagga

SEQ ID NO: 1375795 - DNA, 25 bp, Homo sapien
taccaccacagatcactttttgcct

SEQ ID NO: 1375796 - DNA, 25 bp, Homo sapien
gacattcagggatctaacgtttaca

SEQ ID NO: 1375797 - DNA, 25 bp, Homo sapien
taatgaatacatctagcaggctctt

SEQ ID NO: 1375798 - DNA, 25 bp, Homo sapien
aatttctactctttgtgggagctcc

SEQ ID NO: 1375799 - DNA, 25 bp, Homo sapien
gctttgaggcttgtgcacgcatgtg

SEQ ID NO: 1375800 - DNA, 25 bp, Homo sapien
tgaaatagctgaattgtcaactgct

SEQ ID NO: 1375801 - DNA, 25 bp, Homo sapien
ttgatatttagttgaggggaaaatg

SEQ ID NO: 1375802 - DNA, 25 bp, Homo sapien
tttgaaatagctgaattgtcaactg

SEQ ID NO: 1375803 - DNA, 25 bp, Homo sapien
tgatatttagttgaggggaaaatgg

SEQ ID NO: 1375804 - DNA, 25 bp, Homo sapien
ttaaaaagaatcatgtctcagcagt

SEQ ID NO: 1375805 - DNA, 25 bp, Homo sapien
gttgtgttagcaggtgtggaaacat

SEQ ID NO: 1375806 - DNA, 25 bp, Homo sapien
tatatgggacctacggccttactaa

SEQ ID NO: 1375807 - DNA, 25 bp, Homo sapien
aagaatcatgtctcagcagtaggtc

SEQ ID NO: 1375808 - DNA, 25 bp, Homo sapien
tctgctgtgcttaatcctcttctgg

SEQ ID NO: 1375809 - DNA, 25 bp, Homo sapien
ctgctgtgcttaatcctcttctgga

SEQ ID NO: 1375810 - DNA, 25 bp, Homo sapien
tgcttccacggcattaatttctgct

SEQ ID NO: 1375811 - DNA, 25 bp, Homo sapien
agctctatgaattgcttccacggca

SEQ ID NO: 1375812 - DNA, 25 bp, Homo sapien
aacagattgctgctgactttggaag

SEQ ID NO: 1375813 - DNA, 25 bp, Homo sapien
gctgtgtaacagattgctgctgact

SEQ ID NO: 1375814 - DNA, 25 bp, Homo sapien
taacagattgctgctgactttggaa

SEQ ID NO: 1375815 - DNA, 25 bp, Homo sapien
cagtgctgctgtgtaacagattgct

SEQ ID NO: 1375816 - DNA, 25 bp, Homo sapien
tgttgctcaagctggtcttcaactt

SEQ ID NO: 1375817 - DNA, 25 bp, Homo sapien
ctcaagctggtcttcaacttctgag

SEQ ID NO: 1375818 - DNA, 25 bp, Homo sapien
gctcaagcaatccacccgcttcagc

SEQ ID NO: 1375819 - DNA, 25 bp, Homo sapien
ctcaagcaatccacccgcttcagct

SEQ ID NO: 1375820 - DNA, 25 bp, Homo sapien
atgtgttctcgtatagtgaaagata

SEQ ID NO: 1375821 - DNA, 25 bp, Homo sapien
tctgagtgctaaatactgactggta

SEQ ID NO: 1375822 - DNA, 25 bp, Homo sapien
gactcactcatattagaaacaagca

SEQ ID NO: 1375823 - DNA, 25 bp, Homo sapien
gatactaaatagcaacctctgagtg

SEQ ID NO: 1375824 - DNA, 25 bp, Homo sapien
taatgaaagtcctgataaagaagat

SEQ ID NO: 1375825 - DNA, 25 bp, Homo sapien
aacatctggataggcctgtaattct

SEQ ID NO: 1375826 - DNA, 25 bp, Homo sapien
tgaacatctggataggcctgtaatt

SEQ ID NO: 1375827 - DNA, 25 bp, Homo sapien
gtgattctaagagattttcatggat

SEQ ID NO: 1375828 - DNA, 25 bp, Homo sapien
gcctgaacatctggataggcctgta

SEQ ID NO: 1375829 - DNA, 25 bp, Homo sapien
cattgccaatcttcttttaatatat

SEQ ID NO: 1375830 - DNA, 25 bp, Homo sapien
tgcacacattgccaatcttctttta

SEQ ID NO: 1375831 - DNA, 25 bp, Homo sapien
ttaatatataccagtacattggtat

SEQ ID NO: 1375832 - DNA, 25 bp, Homo sapien
acacattgccaatcttcttttaata

SEQ ID NO: 1375833 - DNA, 25 bp, Homo sapien
cagttgagcttcatgctgaggactt

SEQ ID NO: 1375834 - DNA, 25 bp, Homo sapien
cagtagaacatatgcagtggcacag

SEQ ID NO: 1375835 - DNA, 25 bp, Homo sapien
gctgtgactgcctataaattgtttc

SEQ ID NO: 1375836 - DNA, 25 bp, Homo sapien
ctgaggactttggtgctggcactgc

SEQ ID NO: 1375837 - DNA, 25 bp, Homo sapien
tctaaagcttgataggctgctttga

SEQ ID NO: 1375838 - DNA, 25 bp, Homo sapien
gcttgataggctgctttgattcgag

SEQ ID NO: 1375839 - DNA, 25 bp, Homo sapien
ttaattctaaagcttgataggctgc

SEQ ID NO: 1375840 - DNA, 25 bp, Homo sapien
aagcttgataggctgctttgattcg

SEQ ID NO: 1375841 - DNA, 25 bp, Homo sapien
tctagaagtagaacagctgactaaa

SEQ ID NO: 1375842 - DNA, 25 bp, Homo sapien
tgctaatttaacaccttaacacagt

SEQ ID NO: 1375843 - DNA, 25 bp, Homo sapien
gatactggccaggtaaagaacatca

SEQ ID NO: 1375844 - DNA, 25 bp, Homo sapien
gaacatcattctgctgcaacactaa

SEQ ID NO: 1375845 - DNA, 25 bp, Homo sapien
caatggtgggcccttctggataagt

SEQ ID NO: 1375846 - DNA, 25 bp, Homo sapien
cagtaagtcaagagaaatttgccac

SEQ ID NO: 1375847 - DNA, 25 bp, Homo sapien
tgctcactgcaaagatatgttcctt

SEQ ID NO: 1375848 - DNA, 25 bp, Homo sapien
gggttagacacacctctagagaagt

SEQ ID NO: 1375849 - DNA, 25 bp, Homo sapien
tagacaaagtagtatagaactgcag

SEQ ID NO: 1375850 - DNA, 25 bp, Homo sapien
tgtgataaagatcccagaccagggc

SEQ ID NO: 1375851 - DNA, 25 bp, Homo sapien
tataccctagtagcaaagacaaaca

SEQ ID NO: 1375852 - DNA, 25 bp, Homo sapien
tagataaggagggtgagtgcattca

SEQ ID NO: 1375853 - DNA, 25 bp, Homo sapien
gctgacaggttcatgtcatagtatg

SEQ ID NO: 1375854 - DNA, 25 bp, Homo sapien
taagtggctctttaccagtcaccca

SEQ ID NO: 1375855 - DNA, 25 bp, Homo sapien
gaaggacgtaaaaaatctgtgtcac

SEQ ID NO: 1375856 - DNA, 25 bp, Homo sapien
gttcatgtcatagtatgtaagtggc

SEQ ID NO: 1375857 - DNA, 25 bp, Homo sapien
tgaaaagatttagagggtttctcca

SEQ ID NO: 1375858 - DNA, 25 bp, Homo sapien
agagggtttctccataccttacatt

SEQ ID NO: 1375859 - DNA, 25 bp, Homo sapien
ctctgaaaagatttagagggtttct

SEQ ID NO: 1375860 - DNA, 25 bp, Homo sapien
ctcctatattctgctcctctgaaaa

SEQ ID NO: 1375861 - DNA, 25 bp, Homo sapien
tagcaatagccaagggaagagatgt

SEQ ID NO: 1375862 - DNA, 25 bp, Homo sapien
tcaaggtactagaatggttgggctc

SEQ ID NO: 1375863 - DNA, 25 bp, Homo sapien
gggaaaccacttaggatactatagc

SEQ ID NO: 1375864 - DNA, 25 bp, Homo sapien
tacctagtaaggagagagtatgtac

SEQ ID NO: 1375865 - DNA, 25 bp, Homo sapien
tctcataagggcattcatcacatcc

SEQ ID NO: 1375866 - DNA, 25 bp, Homo sapien
cacagacggcgccttctcgtggtgt

SEQ ID NO: 1375867 - DNA, 25 bp, Homo sapien
ctgggaagtctatgaccaaggtacc

SEQ ID NO: 1375868 - DNA, 25 bp, Homo sapien
cccacggtagaagtggcaagcagct

SEQ ID NO: 1375869 - DNA, 25 bp, Homo sapien
aatcttaaatacacagctctgaaaa

SEQ ID NO: 1375870 - DNA, 25 bp, Homo sapien
ctacctcgtaacatcacattggtga

SEQ ID NO: 1375871 - DNA, 25 bp, Homo sapien
caatcttaaatacacagctctgaaa

SEQ ID NO: 1375872 - DNA, 25 bp, Homo sapien
tcaatcttaaatacacagctctgaa

SEQ ID NO: 1375873 - DNA, 25 bp, Homo sapien
tcagtggttgcaaatggcttacaga

SEQ ID NO: 1375874 - DNA, 25 bp, Homo sapien
tctctgttcctcgaaggagaacctg

SEQ ID NO: 1375875 - DNA, 25 bp, Homo sapien
tgcttatggaagtaccaccattcaa

SEQ ID NO: 1375876 - DNA, 25 bp, Homo sapien
caaatggcttacagatacttgctca

SEQ ID NO: 1375877 - DNA, 25 bp, Homo sapien
tcactgaaaccttgacctccctggg

SEQ ID NO: 1375878 - DNA, 25 bp, Homo sapien
gatcatcccacctcagcctcccgtg

SEQ ID NO: 1375879 - DNA, 25 bp, Homo sapien
tcaggtgatcatcccacctcagcct

SEQ ID NO: 1375880 - DNA, 25 bp, Homo sapien
tttgtagggacaaggttttgccatg

SEQ ID NO: 1375881 - DNA, 25 bp, Homo sapien
agtcctgatatcaatgaagaggtcc

SEQ ID NO: 1375882 - DNA, 25 bp, Homo sapien
agaatttgggtgtcaatgaatttaa

SEQ ID NO: 1375883 - DNA, 25 bp, Homo sapien
tagaatttgggtgtcaatgaattta

SEQ ID NO: 1375884 - DNA, 25 bp, Homo sapien
atagaatttgggtgtcaatgaattt

SEQ ID NO: 1375885 - DNA, 25 bp, Homo sapien
catagaatttgggtgtcaatgaatt

SEQ ID NO: 1375886 - DNA, 25 bp, Homo sapien
caagtatctttatgagtggtgggac

SEQ ID NO: 1375887 - DNA, 25 bp, Homo sapien
caaaggaggttcaaaactactccat

SEQ ID NO: 1375888 - DNA, 25 bp, Homo sapien
aaaaccactgtctcaaattagaggg

SEQ ID NO: 1375889 - DNA, 25 bp, Homo sapien
ggcttatcactatttgcaacaaatc

SEQ ID NO: 1375890 - DNA, 25 bp, Homo sapien
cagagatgccaaattagctcttcag

SEQ ID NO: 1375891 - DNA, 25 bp, Homo sapien
tgcatagaaaccaccgttaagcact

SEQ ID NO: 1375892 - DNA, 25 bp, Homo sapien
taagcacttcattcacctgttacag

SEQ ID NO: 1375893 - DNA, 25 bp, Homo sapien
cacctgttacagagatgccaaatta

SEQ ID NO: 1375894 - DNA, 25 bp, Homo sapien
caaaatatttccgaacattaactca

SEQ ID NO: 1375895 - DNA, 25 bp, Homo sapien
caggaaaggggacatttgctgcctt

SEQ ID NO: 1375896 - DNA, 25 bp, Homo sapien
aatataatcacatggtaaggggacc

SEQ ID NO: 1375897 - DNA, 25 bp, Homo sapien
atcacatggtaaggggacctgggcc

SEQ ID NO: 1375898 - DNA, 25 bp, Homo sapien
tcaaccaccatactgaatcatgtaa

SEQ ID NO: 1375899 - DNA, 25 bp, Homo sapien
cgtcgaaagaactagcaaacccact

SEQ ID NO: 1375900 - DNA, 25 bp, Homo sapien
tgtcagcacagaatacgtagcaagt

SEQ ID NO: 1375901 - DNA, 25 bp, Homo sapien
caagtgttctacagacgtcgaaaga

SEQ ID NO: 1375902 - DNA, 25 bp, Homo sapien
gtttgtggcgctctcacttcctgta

SEQ ID NO: 1375903 - DNA, 25 bp, Homo sapien
ttctacggaggagccggtaacggca

SEQ ID NO: 1375904 - DNA, 25 bp, Homo sapien
ggtaacggcagcaggcttgtcaatc

SEQ ID NO: 1375905 - DNA, 25 bp, Homo sapien
aaaacgaggacataagagagagggc

SEQ ID NO: 1375906 - DNA, 25 bp, Homo sapien
cttttaagggatcctaccagaggtg

SEQ ID NO: 1375907 - DNA, 25 bp, Homo sapien
ctcagaggccctctaggactaccga

SEQ ID NO: 1375908 - DNA, 25 bp, Homo sapien
gatcgctcatcatcgactcctcaga

SEQ ID NO: 1375909 - DNA, 25 bp, Homo sapien
ggactaccgagaatctcttgccctt

SEQ ID NO: 1375910 - DNA, 25 bp, Homo sapien
ttgatcgctcatcatcgactcctca

SEQ ID NO: 1375911 - DNA, 25 bp, Homo sapien
cacacagcctcaaagggatcctcag

SEQ ID NO: 1375912 - DNA, 25 bp, Homo sapien
aagggatcctcagggcgtaaagcag

SEQ ID NO: 1375913 - DNA, 25 bp, Homo sapien
gatcctcagggcgtaaagcagcccc

SEQ ID NO: 1375914 - DNA, 25 bp, Homo sapien
tgccaaattctcacacagcctcaaa

SEQ ID NO: 1375915 - DNA, 25 bp, Homo sapien
ccagcctagcgtcgggtttaggcca

SEQ ID NO: 1375916 - DNA, 25 bp, Homo sapien
tccctccagcctagcgtcgggttta

SEQ ID NO: 1375917 - DNA, 25 bp, Homo sapien
agatgcaggagacgctccaacagct

SEQ ID NO: 1375918 - DNA, 25 bp, Homo sapien
agggacagatgcaggagacgctcca

SEQ ID NO: 1375919 - DNA, 25 bp, Homo sapien
cttgccgctatcgcaggcgccagga

SEQ ID NO: 1375920 - DNA, 25 bp, Homo sapien
ttgccgctatcgcaggcgccaggag

SEQ ID NO: 1375921 - DNA, 25 bp, Homo sapien
cgggagtcgggaatcctgggatagt

SEQ ID NO: 1375922 - DNA, 25 bp, Homo sapien
ccgggagtcgggaatcctgggatag

SEQ ID NO: 1375923 - DNA, 25 bp, Homo sapien
gatagtggcggacctgaagttggcc

SEQ ID NO: 1375924 - DNA, 25 bp, Homo sapien
tcctgggatagtggcggacctgaag

SEQ ID NO: 1375925 - DNA, 25 bp, Homo sapien
aactggactgagatgtgaccccgaa

SEQ ID NO: 1375926 - DNA, 25 bp, Homo sapien
acagcagcgcctattctggaggaac

SEQ ID NO: 1375927 - DNA, 25 bp, Homo sapien
cgcttccaaacgaaatgagggtcac

SEQ ID NO: 1375928 - DNA, 25 bp, Homo sapien
tgtgaccccgaagtgttaccgcttc

SEQ ID NO: 1375929 - DNA, 25 bp, Homo sapien
gctgtcgtggagataacgggcacca

SEQ ID NO: 1375930 - DNA, 25 bp, Homo sapien
aagaataatcgaaacacgctgccag

SEQ ID NO: 1375931 - DNA, 25 bp, Homo sapien
acagctatttggtcggatggaggcc

SEQ ID NO: 1375932 - DNA, 25 bp, Homo sapien
cgggcaccagaaaaacttgtaggag

SEQ ID NO: 1375933 - DNA, 25 bp, Homo sapien
gcgctggcgttaggagacgtcactc

SEQ ID NO: 1375934 - DNA, 25 bp, Homo sapien
cccaagatggccgacttcgatgatc

SEQ ID NO: 1375935 - DNA, 25 bp, Homo sapien
catggggccctcttggtcggcgttt

SEQ ID NO: 1375936 - DNA, 25 bp, Homo sapien
tcactcccgcgcataactgacatgg

SEQ ID NO: 1375937 - DNA, 25 bp, Homo sapien
tacgctctccgcagtcgggacgctt

SEQ ID NO: 1375938 - DNA, 25 bp, Homo sapien
gaagcttcttggtccatgctgacat

SEQ ID NO: 1375939 - DNA, 25 bp, Homo sapien
catgctgacatacgctctccgcagt

SEQ ID NO: 1375940 - DNA, 25 bp, Homo sapien
tgacatacgctctccgcagtcggga

SEQ ID NO: 1375941 - DNA, 25 bp, Homo sapien
agttcctcgttcctcgactctcctt

SEQ ID NO: 1375942 - DNA, 25 bp, Homo sapien
cccagttcctcgttcctcgactctc

SEQ ID NO: 1375943 - DNA, 25 bp, Homo sapien
tggccccagttcctcgttcctcgac

SEQ ID NO: 1375944 - DNA, 25 bp, Homo sapien
tcctcgttcctcgactctccttttc

SEQ ID NO: 1375945 - DNA, 25 bp, Homo sapien
ctgcaagggaacagacgtttccttt

SEQ ID NO: 1375946 - DNA, 25 bp, Homo sapien
cctttattggatcgtgactgtggac

SEQ ID NO: 1375947 - DNA, 25 bp, Homo sapien
tttctgtaattttgcgagagggtgg

SEQ ID NO: 1375948 - DNA, 25 bp, Homo sapien
tatgttgcgacatatcaaaaagcag

SEQ ID NO: 1375949 - DNA, 25 bp, Homo sapien
agtttagggcgagtcacttcctggt

SEQ ID NO: 1375950 - DNA, 25 bp, Homo sapien
cccatccccccatttgtagatataa

SEQ ID NO: 1375951 - DNA, 25 bp, Homo sapien
ttagtttagggcgagtcacttcctg

SEQ ID NO: 1375952 - DNA, 25 bp, Homo sapien
tgtagatataattggggttagttta

SEQ ID NO: 1375953 - DNA, 25 bp, Homo sapien
cagaatttgaacaccagtctttccc

SEQ ID NO: 1375954 - DNA, 25 bp, Homo sapien
gtcgcctgtctgattcgctataata

SEQ ID NO: 1375955 - DNA, 25 bp, Homo sapien
tcttcgacaaggagaggtcccaaat

SEQ ID NO: 1375956 - DNA, 25 bp, Homo sapien
tacttttctcctgtactgtcgcctg

SEQ ID NO: 1375957 - DNA, 25 bp, Homo sapien
caagcctaaccaaggtggctgccat

SEQ ID NO: 1375958 - DNA, 25 bp, Homo sapien
gagcccaagcctaaccaaggtggct

SEQ ID NO: 1375959 - DNA, 25 bp, Homo sapien
gcccaagcctaaccaaggtggctgc

SEQ ID NO: 1375960 - DNA, 25 bp, Homo sapien
agagcccaagcctaaccaaggtggc

SEQ ID NO: 1375961 - DNA, 25 bp, Homo sapien
tcacgcctgtgaagatagaaggata

SEQ ID NO: 1375962 - DNA, 25 bp, Homo sapien
gcagatgtctgaaccaggtgctgaa

SEQ ID NO: 1375963 - DNA, 25 bp, Homo sapien
tgccttttagacaggctatgcctgg

SEQ ID NO: 1375964 - DNA, 25 bp, Homo sapien
tggaaaaacagaggcgttcctcctg

SEQ ID NO: 1375965 - DNA, 25 bp, Homo sapien
tacccattatggtggactggacaag

SEQ ID NO: 1375966 - DNA, 25 bp, Homo sapien
cccattcttaatttggagagctcca

SEQ ID NO: 1375967 - DNA, 25 bp, Homo sapien
gacatgatagactcccatttagaaa

SEQ ID NO: 1375968 - DNA, 25 bp, Homo sapien
tgttgggaagccagtattgcaaagg

SEQ ID NO: 1375969 - DNA, 25 bp, Homo sapien
tgcctagattaatcctgtggcctcc

SEQ ID NO: 1375970 - DNA, 25 bp, Homo sapien
gtggcctcctaaccaagcttcagct

SEQ ID NO: 1375971 - DNA, 25 bp, Homo sapien
tacattctgtgtgcaactcttcctt

SEQ ID NO: 1375972 - DNA, 25 bp, Homo sapien
tacatgacctaaatctaccatcctg

SEQ ID NO: 1375973 - DNA, 25 bp, Homo sapien
cttctatggccagatctgttgttgt

SEQ ID NO: 1375974 - DNA, 25 bp, Homo sapien
cagtgaggcttattgaccttaccct

SEQ ID NO: 1375975 - DNA, 25 bp, Homo sapien
tgcatacctcctctctttagacaag

SEQ ID NO: 1375976 - DNA, 25 bp, Homo sapien
cattgagatcaaaaacagtgaggct

SEQ ID NO: 1375977 - DNA, 25 bp, Homo sapien
aagcaagtttgttccaggtgaccca

SEQ ID NO: 1375978 - DNA, 25 bp, Homo sapien
taaaaaagtttcctagccatgaagc

SEQ ID NO: 1375979 - DNA, 25 bp, Homo sapien
caagaactgctgacgtactgtggat

SEQ ID NO: 1375980 - DNA, 25 bp, Homo sapien
tgtttacacttctatgaccaggcct

SEQ ID NO: 1375981 - DNA, 25 bp, Homo sapien
tctgggcagcttcggaggatttgtc

SEQ ID NO: 1375982 - DNA, 25 bp, Homo sapien
cccgattaactgatgaacaggattt

SEQ ID NO: 1375983 - DNA, 25 bp, Homo sapien
ttttagcaacccgattaactgatga

SEQ ID NO: 1375984 - DNA, 25 bp, Homo sapien
cagcttcggaggatttgtcttcttc

SEQ ID NO: 1375985 - DNA, 25 bp, Homo sapien
gaattggaccgtgtcaagctgagct

SEQ ID NO: 1375986 - DNA, 25 bp, Homo sapien
ggtctacagacttctgaccccaggg

SEQ ID NO: 1375987 - DNA, 25 bp, Homo sapien
gtgttcacaccccataggttcctgg

SEQ ID NO: 1375988 - DNA, 25 bp, Homo sapien
ggtaccctgagatgctacggcagct

SEQ ID NO: 1375989 - DNA, 25 bp, Homo sapien
ctctgccaggctgtacgaccggagt

SEQ ID NO: 1375990 - DNA, 25 bp, Homo sapien
caggcaccggcaagactgtcacgtt

SEQ ID NO: 1375991 - DNA, 25 bp, Homo sapien
catgaggcacattgttacgggcacc

SEQ ID NO: 1375992 - DNA, 25 bp, Homo sapien
cgaccggagtctggagtcaaaccca

SEQ ID NO: 1375993 - DNA, 25 bp, Homo sapien
aattccgtggcctgtcatgtgatgc

SEQ ID NO: 1375994 - DNA, 25 bp, Homo sapien
tccaaggccaagaacgaagcgtcat

SEQ ID NO: 1375995 - DNA, 25 bp, Homo sapien
caacttaagggtctgggatgggatc

SEQ ID NO: 1375996 - DNA, 25 bp, Homo sapien
caccgtgcgaagcagccagagcttt

SEQ ID NO: 1375997 - DNA, 25 bp, Homo sapien
caggaccgtggcttagcctccagtc

SEQ ID NO: 1375998 - DNA, 25 bp, Homo sapien
tgccaaactggacctgcaacaggga

SEQ ID NO: 1375999 - DNA, 25 bp, Homo sapien
cagggacagaatttactgcaaggtc

SEQ ID NO: 1376000 - DNA, 25 bp, Homo sapien
gtacagctcagatgggacaggaccg

SEQ ID NO: 1376001 - DNA, 25 bp, Homo sapien
ccaggctggcaagcaacttggacat

SEQ ID NO: 1376002 - DNA, 25 bp, Homo sapien
aagtttagccccctgctacagacca

SEQ ID NO: 1376003 - DNA, 25 bp, Homo sapien
tgagcccctaagctgaccctgtagg

SEQ ID NO: 1376004 - DNA, 25 bp, Homo sapien
ggcatgacctcatcctttgctctaa

SEQ ID NO: 1376005 - DNA, 25 bp, Homo sapien
ttattcatgcccccctgaccaaatg

SEQ ID NO: 1376006 - DNA, 25 bp, Homo sapien
gtagcctttattcatgcccccctga

SEQ ID NO: 1376007 - DNA, 25 bp, Homo sapien
tcatgcccccctgaccaaatgcagt

SEQ ID NO: 1376008 - DNA, 25 bp, Homo sapien
cctgtagcctttattcatgcccccc

SEQ ID NO: 1376009 - DNA, 25 bp, Homo sapien
atttctgtacccctgtgaagggagg

SEQ ID NO: 1376010 - DNA, 25 bp, Homo sapien
ataggcgtggctcccagagcgctgg

SEQ ID NO: 1376011 - DNA, 25 bp, Homo sapien
ccacctcggggctagaaaacaatgc

SEQ ID NO: 1376012 - DNA, 25 bp, Homo sapien
ttcctgtgagccagaagtgtataaa

SEQ ID NO: 1376013 - DNA, 25 bp, Homo sapien
tagccaaaggcactgatccggttcg

SEQ ID NO: 1376014 - DNA, 25 bp, Homo sapien
gcccctccgacgcttgttcttgcgg

SEQ ID NO: 1376015 - DNA, 25 bp, Homo sapien
actgatccggttcgccatgtcccgg

SEQ ID NO: 1376016 - DNA, 25 bp, Homo sapien
aaaggcactgatccggttcgccatg

SEQ ID NO: 1376017 - DNA, 25 bp, Homo sapien
agctctctcctggtgtgctcgtctt

SEQ ID NO: 1376018 - DNA, 25 bp, Homo sapien
ctctctcctggtgtgctcgtcttgc

SEQ ID NO: 1376019 - DNA, 25 bp, Homo sapien
gctctctcctggtgtgctcgtcttg

SEQ ID NO: 1376020 - DNA, 25 bp, Homo sapien
cttcttattccccaccaggatgatg

SEQ ID NO: 1376021 - DNA, 25 bp, Homo sapien
cacgttggggcagaagtgcttcacc

SEQ ID NO: 1376022 - DNA, 25 bp, Homo sapien
acctctggggtccacttctcaggaa

SEQ ID NO: 1376023 - DNA, 25 bp, Homo sapien
ctcaggtccttcttattccccacca

SEQ ID NO: 1376024 - DNA, 25 bp, Homo sapien
tcaacagtagtatgccctcagaggg

SEQ ID NO: 1376025 - DNA, 25 bp, Homo sapien
taaaggagaccaacagggcctgagt

SEQ ID NO: 1376026 - DNA, 25 bp, Homo sapien
tcagagggccagttaccacagtaaa

SEQ ID NO: 1376027 - DNA, 25 bp, Homo sapien
tgtagacatgcaccaacaggtgtcg

SEQ ID NO: 1376028 - DNA, 25 bp, Homo sapien
gagaggccgcagtcgatcatagtct

SEQ ID NO: 1376029 - DNA, 25 bp, Homo sapien
gccgcagtcgatcatagtcttcctg

SEQ ID NO: 1376030 - DNA, 25 bp, Homo sapien
gagagaggccgcagtcgatcatagt

SEQ ID NO: 1376031 - DNA, 25 bp, Homo sapien
gaggccgcagtcgatcatagtcttc

SEQ ID NO: 1376032 - DNA, 25 bp, Homo sapien
cacagggccagtgagtagctggcct

SEQ ID NO: 1376033 - DNA, 25 bp, Homo sapien
tcactgtcccacaacataaattagg

SEQ ID NO: 1376034 - DNA, 25 bp, Homo sapien
tgaaaccactgtccttcgggctcac

SEQ ID NO: 1376035 - DNA, 25 bp, Homo sapien
agacgtgtttgacccttgagttgcc

SEQ ID NO: 1376036 - DNA, 25 bp, Homo sapien
caggtgggggagcttaaacccagag

SEQ ID NO: 1376037 - DNA, 25 bp, Homo sapien
ggactcggcccaggttacagagcca

SEQ ID NO: 1376038 - DNA, 25 bp, Homo sapien
agggactcggcccaggttacagagc

SEQ ID NO: 1376039 - DNA, 25 bp, Homo sapien
gactcggcccaggttacagagccag

SEQ ID NO: 1376040 - DNA, 25 bp, Homo sapien
tccgcaatatagttctcaaagacag

SEQ ID NO: 1376041 - DNA, 25 bp, Homo sapien
tagacctccggaaactgatccttgc

SEQ ID NO: 1376042 - DNA, 25 bp, Homo sapien
aagacagtagggacgtagacctccg

SEQ ID NO: 1376043 - DNA, 25 bp, Homo sapien
aagacgatgaggaggcaggtcttcc

SEQ ID NO: 1376044 - DNA, 25 bp, Homo sapien
ggaattatctccttcggtacccaga

SEQ ID NO: 1376045 - DNA, 25 bp, Homo sapien
cactctgtcgggcattttggcagga

SEQ ID NO: 1376046 - DNA, 25 bp, Homo sapien
ccagtcacaaatgaggagtccctct

SEQ ID NO: 1376047 - DNA, 25 bp, Homo sapien
gaatagttatagagcccctaggtgc

SEQ ID NO: 1376048 - DNA, 25 bp, Homo sapien
gcttccctcacttcctccttccctg

SEQ ID NO: 1376049 - DNA, 25 bp, Homo sapien
cctcacttcctccttccctggggag

SEQ ID NO: 1376050 - DNA, 25 bp, Homo sapien
agcttccctcacttcctccttccct

SEQ ID NO: 1376051 - DNA, 25 bp, Homo sapien
ctcacttcctccttccctggggagg

SEQ ID NO: 1376052 - DNA, 25 bp, Homo sapien
ctccagccggctgaagttcccaggc

SEQ ID NO: 1376053 - DNA, 25 bp, Homo sapien
caacatagatcctgagtggcccttc

SEQ ID NO: 1376054 - DNA, 25 bp, Homo sapien
taattcagacggcaccagagtggtg

SEQ ID NO: 1376055 - DNA, 25 bp, Homo sapien
tttaggaagcgaatactccagcccc

SEQ ID NO: 1376056 - DNA, 25 bp, Homo sapien
gatggcatggacaactccctgtgag

SEQ ID NO: 1376057 - DNA, 25 bp, Homo sapien
tctgagttgaagttccctcgcccct

SEQ ID NO: 1376058 - DNA, 25 bp, Homo sapien
gggcgtctgagttgaagttccctcg

SEQ ID NO: 1376059 - DNA, 25 bp, Homo sapien
ctggggcgtctgagttgaagttccc

SEQ ID NO: 1376060 - DNA, 25 bp, Homo sapien
cggcggggcaggttccgggaagctg

SEQ ID NO: 1376061 - DNA, 25 bp, Homo sapien
tcctggggacgagttcccaagacgc

SEQ ID NO: 1376062 - DNA, 25 bp, Homo sapien
cccgatctccgggccagcgaggaag

SEQ ID NO: 1376063 - DNA, 25 bp, Homo sapien
aggccgaagcccctcctcgcacggg

SEQ ID NO: 1376064 - DNA, 25 bp, Homo sapien
atgccgactccgcttggagggaacg

SEQ ID NO: 1376065 - DNA, 25 bp, Homo sapien
cagctgcgcggccggtgccggaggc

SEQ ID NO: 1376066 - DNA, 25 bp, Homo sapien
gctgcgcggccggtgccggaggctc

SEQ ID NO: 1376067 - DNA, 25 bp, Homo sapien
ctgcgcggccggtgccggaggctca

SEQ ID NO: 1376068 - DNA, 25 bp, Homo sapien
agctgcgcggccggtgccggaggct

SEQ ID NO: 1376069 - DNA, 25 bp, Homo sapien
gacttggcgcataggatatttacct

SEQ ID NO: 1376070 - DNA, 25 bp, Homo sapien
tatttacctacacgcgtatctcctt

SEQ ID NO: 1376071 - DNA, 25 bp, Homo sapien
tgtgaattctgttcccactcctagg

SEQ ID NO: 1376072 - DNA, 25 bp, Homo sapien
aagggtgcgcctagaaatgcttctg

SEQ ID NO: 1376073 - DNA, 25 bp, Homo sapien
ttaagttgccactaaagaagggtca

SEQ ID NO: 1376074 - DNA, 25 bp, Homo sapien
gcggacatcccttcttcagttaagt

SEQ ID NO: 1376075 - DNA, 25 bp, Homo sapien
gctgtaattttggatatagcggaca

SEQ ID NO: 1376076 - DNA, 25 bp, Homo sapien
tccatctcgtttatttgccaatagc

SEQ ID NO: 1376077 - DNA, 25 bp, Homo sapien
gggagacgccagccacggtctcggg

SEQ ID NO: 1376078 - DNA, 25 bp, Homo sapien
cagagatgtcatccccggaacccag

SEQ ID NO: 1376079 - DNA, 25 bp, Homo sapien
ctcccagggggatgacgaagacaga

SEQ ID NO: 1376080 - DNA, 25 bp, Homo sapien
atccccggaacccagcttgttgttg

SEQ ID NO: 1376081 - DNA, 25 bp, Homo sapien
attcatgtaccaacatgtatgtggg

SEQ ID NO: 1376082 - DNA, 25 bp, Homo sapien
gcacattcatgtaccaacatgtatg

SEQ ID NO: 1376083 - DNA, 25 bp, Homo sapien
cattcatgtaccaacatgtatgtgg

SEQ ID NO: 1376084 - DNA, 25 bp, Homo sapien
acatgcacattcatgtaccaacatg

SEQ ID NO: 1376085 - DNA, 25 bp, Homo sapien
tcagtagtgacatcccacaggccat

SEQ ID NO: 1376086 - DNA, 25 bp, Homo sapien
cattaggctcataggccgacagcac

SEQ ID NO: 1376087 - DNA, 25 bp, Homo sapien
caggactagcacatcatctgggcag

SEQ ID NO: 1376088 - DNA, 25 bp, Homo sapien
tctgggcagtgctcatattgtgtca

SEQ ID NO: 1376089 - DNA, 25 bp, Homo sapien
agcctcgggtcaccccaatggtggc

SEQ ID NO: 1376090 - DNA, 25 bp, Homo sapien
gagaaagggcttgatgggcagggtg

SEQ ID NO: 1376091 - DNA, 25 bp, Homo sapien
ggctgtggtctcccaagcctcgggt

SEQ ID NO: 1376092 - DNA, 25 bp, Homo sapien
accccaatggtggccatcacccgag

SEQ ID NO: 1376093 - DNA, 25 bp, Homo sapien
ctccagctcgatctttttgtaggcc

SEQ ID NO: 1376094 - DNA, 25 bp, Homo sapien
atcctccagctcgatctttttgtag

SEQ ID NO: 1376095 - DNA, 25 bp, Homo sapien
cctccagctcgatctttttgtaggc

SEQ ID NO: 1376096 - DNA, 25 bp, Homo sapien
tcctccagctcgatctttttgtagg

SEQ ID NO: 1376097 - DNA, 25 bp, Homo sapien
gcctagcagctctggtttcaggaag

SEQ ID NO: 1376098 - DNA, 25 bp, Homo sapien
cagccggtcatgttctggtcccggt

SEQ ID NO: 1376099 - DNA, 25 bp, Homo sapien
aactcaaggtgggtgaattcactgc

SEQ ID NO: 1376100 - DNA, 25 bp, Homo sapien
tggtcccggtacaacatcctctgcc

SEQ ID NO: 1376101 - DNA, 25 bp, Homo sapien
ggagttggggatgatcagaacagag

SEQ ID NO: 1376102 - DNA, 25 bp, Homo sapien
tggagttggggatgatcagaacaga

SEQ ID NO: 1376103 - DNA, 25 bp, Homo sapien
cccgggacattggaatgatttcacc

SEQ ID NO: 1376104 - DNA, 25 bp, Homo sapien
gatttcaccattccggacaatgatg

SEQ ID NO: 1376105 - DNA, 25 bp, Homo sapien
tggcgctcagtctccggggtaaact

SEQ ID NO: 1376106 - DNA, 25 bp, Homo sapien
aagcagctgaagacgctggcgctca

SEQ ID NO: 1376107 - DNA, 25 bp, Homo sapien
caccttgcctagcaggtagatcaca

SEQ ID NO: 1376108 - DNA, 25 bp, Homo sapien
tgctatcgcctgcattggccacgta

SEQ ID NO: 1376109 - DNA, 25 bp, Homo sapien
agcaggtagatcacaaccagtgcac

SEQ ID NO: 1376110 - DNA, 25 bp, Homo sapien
tgcattggccacgtacaccttgcct

SEQ ID NO: 1376111 - DNA, 25 bp, Homo sapien
catgagctggaaggcattctcaacg

SEQ ID NO: 1376112 - DNA, 25 bp, Homo sapien
gctggaaggcattctcaacggcccc

SEQ ID NO: 1376113 - DNA, 25 bp, Homo sapien
ggcccccactaccaggctctcgtgg

SEQ ID NO: 1376114 - DNA, 25 bp, Homo sapien
actaccaggctctcgtggctcactt

SEQ ID NO: 1376115 - DNA, 25 bp, Homo sapien
ggtggcgaagggtcctgaagtatct

SEQ ID NO: 1376116 - DNA, 25 bp, Homo sapien
agtgagagggatcggaggaatctgg

SEQ ID NO: 1376117 - DNA, 25 bp, Homo sapien
gtccccggagtggttgggaggcaga

SEQ ID NO: 1376118 - DNA, 25 bp, Homo sapien
tgagggccaagcaagtgagagggat

SEQ ID NO: 1376119 - DNA, 25 bp, Homo sapien
caggtcctttagctgctctcggata

SEQ ID NO: 1376120 - DNA, 25 bp, Homo sapien
cctttagctgctctcggatatggcg

SEQ ID NO: 1376121 - DNA, 25 bp, Homo sapien
gatatggcgatgcaggagccgtgag

SEQ ID NO: 1376122 - DNA, 25 bp, Homo sapien
tgctctcggatatggcgatgcagga

SEQ ID NO: 1376123 - DNA, 25 bp, Homo sapien
aaataggccccagtagtagaagcag

SEQ ID NO: 1376124 - DNA, 25 bp, Homo sapien
tcaaataggccccagtagtagaagc

SEQ ID NO: 1376125 - DNA, 25 bp, Homo sapien
gcccatcaaataggccccagtagta

SEQ ID NO: 1376126 - DNA, 25 bp, Homo sapien
gcatgcccatcaaataggccccagt

SEQ ID NO: 1376127 - DNA, 25 bp, Homo sapien
agtgagttcatcaggtcttccgcat

SEQ ID NO: 1376128 - DNA, 25 bp, Homo sapien
ggtaaaggttctgtgccagaaggta

SEQ ID NO: 1376129 - DNA, 25 bp, Homo sapien
cagaaggtagatagccagtgagttc

SEQ ID NO: 1376130 - DNA, 25 bp, Homo sapien
cagatttaaaaccagaggcctgagt

SEQ ID NO: 1376131 - DNA, 25 bp, Homo sapien
cacagcaagcctggtcctcattgtg

SEQ ID NO: 1376132 - DNA, 25 bp, Homo sapien
tcattgtgccgactcttgccagcat

SEQ ID NO: 1376133 - DNA, 25 bp, Homo sapien
tggcctcggctaggctccctaggta

SEQ ID NO: 1376134 - DNA, 25 bp, Homo sapien
taggctccctaggtactcctgtaac

SEQ ID NO: 1376135 - DNA, 25 bp, Homo sapien
caggctgaagggcatctaaatggga

SEQ ID NO: 1376136 - DNA, 25 bp, Homo sapien
cttagcctttaagctgccgggccgc

SEQ ID NO: 1376137 - DNA, 25 bp, Homo sapien
tctccagcccagatcgggaaagagg

SEQ ID NO: 1376138 - DNA, 25 bp, Homo sapien
tctgctgccttaacaatgaggaagc

SEQ ID NO: 1376139 - DNA, 25 bp, Homo sapien
gtccacggaaaagggagctcctggc

SEQ ID NO: 1376140 - DNA, 25 bp, Homo sapien
caatgagcgggaaggacgtgaagaa

SEQ ID NO: 1376141 - DNA, 25 bp, Homo sapien
cagaggatagcaaaggtccacggaa

SEQ ID NO: 1376142 - DNA, 25 bp, Homo sapien
cgtgggcgagggcagtcaatgagcg

SEQ ID NO: 1376143 - DNA, 25 bp, Homo sapien
ctttgcacagcccggcccgcgtggt

SEQ ID NO: 1376144 - DNA, 25 bp, Homo sapien
ccgcgtggtcatcggcgcgtcgcag

SEQ ID NO: 1376145 - DNA, 25 bp, Homo sapien
tgtccggggggctttgcacagcccg

SEQ ID NO: 1376146 - DNA, 25 bp, Homo sapien
agcccggcccgcgtggtcatcggcg

SEQ ID NO: 1376147 - DNA, 25 bp, Homo sapien
gccgaggcggcgttgggcaggtccg

SEQ ID NO: 1376148 - DNA, 25 bp, Homo sapien
tcggtctggagaagctcgctcgagc

SEQ ID NO: 1376149 - DNA, 25 bp, Homo sapien
tcctgggcgcttctggagcggcggc

SEQ ID NO: 1376150 - DNA, 25 bp, Homo sapien
gcctcaacagccttcgcgggcgtcg

SEQ ID NO: 1376151 - DNA, 25 bp, Homo sapien
tgcgccacggccgagcgcacccggt

SEQ ID NO: 1376152 - DNA, 25 bp, Homo sapien
cggccgagcgcacccggtttagcat

SEQ ID NO: 1376153 - DNA, 25 bp, Homo sapien
caggtgcgccacggccgagcgcacc

SEQ ID NO: 1376154 - DNA, 25 bp, Homo sapien
cacggccgagcgcacccggtttagc

SEQ ID NO: 1376155 - DNA, 25 bp, Homo sapien
cccccatggctccgcgtgggcggtg

SEQ ID NO: 1376156 - DNA, 25 bp, Homo sapien
ccatggctccgcgtgggcggtgctc

SEQ ID NO: 1376157 - DNA, 25 bp, Homo sapien
ccccatggctccgcgtgggcggtgc

SEQ ID NO: 1376158 - DNA, 25 bp, Homo sapien
cccatggctccgcgtgggcggtgct

SEQ ID NO: 1376159 - DNA, 25 bp, Homo sapien
ccctgctactggctcccggccagct

SEQ ID NO: 1376160 - DNA, 25 bp, Homo sapien
cttccctgctactggctcccggcca

SEQ ID NO: 1376161 - DNA, 25 bp, Homo sapien
tggctcccggccagctgggcgggtc

SEQ ID NO: 1376162 - DNA, 25 bp, Homo sapien
ctcccggccagctgggcgggtcccg

SEQ ID NO: 1376163 - DNA, 25 bp, Homo sapien
ctcccagctcctttccccccagcac

SEQ ID NO: 1376164 - DNA, 25 bp, Homo sapien
tcactcccagctcctttccccccag

SEQ ID NO: 1376165 - DNA, 25 bp, Homo sapien
cccagctcctttccccccagcacct

SEQ ID NO: 1376166 - DNA, 25 bp, Homo sapien
gctcctttccccccagcacctccac

SEQ ID NO: 1376167 - DNA, 25 bp, Homo sapien
tgaacctgcgggtgccggatgtcct

SEQ ID NO: 1376168 - DNA, 25 bp, Homo sapien
tctgagttgccaccacggaggtgtc

SEQ ID NO: 1376169 - DNA, 25 bp, Homo sapien
ggctgtgcccatccgttcagccgag

SEQ ID NO: 1376170 - DNA, 25 bp, Homo sapien
ggccacaagaccttcagggttttga

SEQ ID NO: 1376171 - DNA, 25 bp, Homo sapien
gacagggctccggactagacagcac

SEQ ID NO: 1376172 - DNA, 25 bp, Homo sapien
tctgtctttcggagtgctggtccct

SEQ ID NO: 1376173 - DNA, 25 bp, Homo sapien
gccctgcggatgatgccaacctgac

SEQ ID NO: 1376174 - DNA, 25 bp, Homo sapien
gtccctggctcagtggcaaggaaga

SEQ ID NO: 1376175 - DNA, 25 bp, Homo sapien
caccctgtgtgatcccagagtctgc

SEQ ID NO: 1376176 - DNA, 25 bp, Homo sapien
cctccagattcccaggccagaagag

SEQ ID NO: 1376177 - DNA, 25 bp, Homo sapien
ccaggccagaagagactgtccctgc

SEQ ID NO: 1376178 - DNA, 25 bp, Homo sapien
gagtctgcaagagcccctccagatt

SEQ ID NO: 1376179 - DNA, 25 bp, Homo sapien
gaatctttcctacttgtccaggtgg

SEQ ID NO: 1376180 - DNA, 25 bp, Homo sapien
tgcaaccccctatgaatctttccta

SEQ ID NO: 1376181 - DNA, 25 bp, Homo sapien
agccatcggctccctctatcctttg

SEQ ID NO: 1376182 - DNA, 25 bp, Homo sapien
ctctatcctttgcaaccccctatga

SEQ ID NO: 1376183 - DNA, 25 bp, Homo sapien
ctgctgcaaccggaaccgcatcgag

SEQ ID NO: 1376184 - DNA, 25 bp, Homo sapien
atcgaggagcgctcccagacggtga

SEQ ID NO: 1376185 - DNA, 25 bp, Homo sapien
gctcccagacggtgaaatgctcctg

SEQ ID NO: 1376186 - DNA, 25 bp, Homo sapien
aggtggccggcaccacgcgggcaaa

SEQ ID NO: 1376187 - DNA, 25 bp, Homo sapien
tgcgtggacggtgagtgagaggcca

SEQ ID NO: 1376188 - DNA, 25 bp, Homo sapien
gccataaggaggcctgttcaggcct

SEQ ID NO: 1376189 - DNA, 25 bp, Homo sapien
cgtggacggtgagtgagaggccagg

SEQ ID NO: 1376190 - DNA, 25 bp, Homo sapien
ctgcgtggacggtgagtgagaggcc

SEQ ID NO: 1376191 - DNA, 25 bp, Homo sapien
tgcagggatcggtgggattaaagtt

SEQ ID NO: 1376192 - DNA, 25 bp, Homo sapien
ggcctcaggctgagtactgcctctc

SEQ ID NO: 1376193 - DNA, 25 bp, Homo sapien
tgagagggttacgtccccaggcctc

SEQ ID NO: 1376194 - DNA, 25 bp, Homo sapien
aggctgagtactgcctctctgggca

SEQ ID NO: 1376195 - DNA, 25 bp, Homo sapien
acagcctccatcgtcctgcagagat

SEQ ID NO: 1376196 - DNA, 25 bp, Homo sapien
gtagagaccctagagctgcactccg

SEQ ID NO: 1376197 - DNA, 25 bp, Homo sapien
tcattcgcagacctgctcttggctg

SEQ ID NO: 1376198 - DNA, 25 bp, Homo sapien
cactgtgctcgtagagaccctagag

SEQ ID NO: 1376199 - DNA, 25 bp, Homo sapien
gggaggagtgtaaggtgctcccgga

SEQ ID NO: 1376200 - DNA, 25 bp, Homo sapien
ctgccgggggaggagtgtaaggtgc

SEQ ID NO: 1376201 - DNA, 25 bp, Homo sapien
gaggagtgtaaggtgctcccggacc

SEQ ID NO: 1376202 - DNA, 25 bp, Homo sapien
ggagtgtaaggtgctcccggacctg

SEQ ID NO: 1376203 - DNA, 25 bp, Homo sapien
caagaaaggcttgactgagccgtga

SEQ ID NO: 1376204 - DNA, 25 bp, Homo sapien
cggcctggacaagaaaggcttgact

SEQ ID NO: 1376205 - DNA, 25 bp, Homo sapien
tcttcaccaggtcacacgatagctc

SEQ ID NO: 1376206 - DNA, 25 bp, Homo sapien
accaggtcacacgatagctcttggg

SEQ ID NO: 1376207 - DNA, 25 bp, Homo sapien
taatctgaaggcgagtggctatggc

SEQ ID NO: 1376208 - DNA, 25 bp, Homo sapien
tatgggacccaggaactcagacctg

SEQ ID NO: 1376209 - DNA, 25 bp, Homo sapien
gaatccattggagcgtatgggaccc

SEQ ID NO: 1376210 - DNA, 25 bp, Homo sapien
tccagaggaccaccttgagagtgag

SEQ ID NO: 1376211 - DNA, 25 bp, Homo sapien
tatcttagtttctccgtaggtagtg

SEQ ID NO: 1376212 - DNA, 25 bp, Homo sapien
cttagtttctccgtaggtagtgtct

SEQ ID NO: 1376213 - DNA, 25 bp, Homo sapien
tcttagtttctccgtaggtagtgtc

SEQ ID NO: 1376214 - DNA, 25 bp, Homo sapien
atcttagtttctccgtaggtagtgt

SEQ ID NO: 1376215 - DNA, 25 bp, Homo sapien
ctgtgcctcacatctgagtcctggc

SEQ ID NO: 1376216 - DNA, 25 bp, Homo sapien
tactcttgcatctgtcacactgtgc

SEQ ID NO: 1376217 - DNA, 25 bp, Homo sapien
catgttgcttgtccctatgatgggc

SEQ ID NO: 1376218 - DNA, 25 bp, Homo sapien
tatgatgggcacttttggccagttc

SEQ ID NO: 1376219 - DNA, 25 bp, Homo sapien
ctgccccgatgcttcctgtttcaga

SEQ ID NO: 1376220 - DNA, 25 bp, Homo sapien
ggtatgcactgccccgatgcttcct

SEQ ID NO: 1376221 - DNA, 25 bp, Homo sapien
tcccccgtggcaaggtggagtgaag

SEQ ID NO: 1376222 - DNA, 25 bp, Homo sapien
caggtggtctgctaggctggcactc

SEQ ID NO: 1376223 - DNA, 25 bp, Homo sapien
tttgtgtatgaattgctctttgcag

SEQ ID NO: 1376224 - DNA, 25 bp, Homo sapien
ttttgtgtatgaattgctctttgca

SEQ ID NO: 1376225 - DNA, 25 bp, Homo sapien
ttgtgtatgaattgctctttgcagt

SEQ ID NO: 1376226 - DNA, 25 bp, Homo sapien
tgtgtatgaattgctctttgcagtt

SEQ ID NO: 1376227 - DNA, 25 bp, Homo sapien
cactcgtctggatcttctgggcgtc

SEQ ID NO: 1376228 - DNA, 25 bp, Homo sapien
gaaagctacaacctggctccatgga

SEQ ID NO: 1376229 - DNA, 25 bp, Homo sapien
tgtgggtcctatagcctgaaccagc

SEQ ID NO: 1376230 - DNA, 25 bp, Homo sapien
ttgtctgtctgtgggtcctatagcc

SEQ ID NO: 1376231 - DNA, 25 bp, Homo sapien
atatacatatagtcgggccgggcgc

SEQ ID NO: 1376232 - DNA, 25 bp, Homo sapien
ccgtgcccggctgaactttctcata

SEQ ID NO: 1376233 - DNA, 25 bp, Homo sapien
cggctgaactttctcatattatgta

SEQ ID NO: 1376234 - DNA, 25 bp, Homo sapien
gtatatacatatagtcgggccgggc

SEQ ID NO: 1376235 - DNA, 25 bp, Homo sapien
atcagttaaggcaggcacgcgccat

SEQ ID NO: 1376236 - DNA, 25 bp, Homo sapien
tcagttaaggcaggcacgcgccatt

SEQ ID NO: 1376237 - DNA, 25 bp, Homo sapien
gcaggcacgcgccattttcacttct

SEQ ID NO: 1376238 - DNA, 25 bp, Homo sapien
ttaaggcaggcacgcgccattttca

SEQ ID NO: 1376239 - DNA, 25 bp, Homo sapien
aaaagccaaacgaggaattatgtct

SEQ ID NO: 1376240 - DNA, 25 bp, Homo sapien
tggaaaagccaaacgaggaattatg

SEQ ID NO: 1376241 - DNA, 25 bp, Homo sapien
gaaaagccaaacgaggaattatgtc

SEQ ID NO: 1376242 - DNA, 25 bp, Homo sapien
ggcttccaaagtcatctggcagcat

SEQ ID NO: 1376243 - DNA, 25 bp, Homo sapien
gagttatccaaagctgggcatctgt

SEQ ID NO: 1376244 - DNA, 25 bp, Homo sapien
ttatccaaagctgggcatctgtgat

SEQ ID NO: 1376245 - DNA, 25 bp, Homo sapien
aaagtcatctggcagcatcagtctt

SEQ ID NO: 1376246 - DNA, 25 bp, Homo sapien
ggagcagagatcgtaggtggatctt

SEQ ID NO: 1376247 - DNA, 25 bp, Homo sapien
tggttggtctgaggagcagagatcg

SEQ ID NO: 1376248 - DNA, 25 bp, Homo sapien
ctgaggagcagagatcgtaggtgga

SEQ ID NO: 1376249 - DNA, 25 bp, Homo sapien
gtctgaggagcagagatcgtaggtg

SEQ ID NO: 1376250 - DNA, 25 bp, Homo sapien
gtctgacattaaaaattgaataaat

SEQ ID NO: 1376251 - DNA, 25 bp, Homo sapien
cttatggtctgacattaaaaattga

SEQ ID NO: 1376252 - DNA, 25 bp, Homo sapien
gacattaaaaattgaataaatatgt

SEQ ID NO: 1376253 - DNA, 25 bp, Homo sapien
tctgacattaaaaattgaataaata

SEQ ID NO: 1376254 - DNA, 25 bp, Homo sapien
ggagatggaggttgcgatgagccga

SEQ ID NO: 1376255 - DNA, 25 bp, Homo sapien
atgagccgagatcgcgccactgcac

SEQ ID NO: 1376256 - DNA, 25 bp, Homo sapien
catgcggcccccaagacgtagagct

SEQ ID NO: 1376257 - DNA, 25 bp, Homo sapien
ttgaagggaccgctgggctgcctga

SEQ ID NO: 1376258 - DNA, 25 bp, Homo sapien
ggagccgagcgcgtgcgtggcacgg

SEQ ID NO: 1376259 - DNA, 25 bp, Homo sapien
cgggtctggtctgcgctctcggcac

SEQ ID NO: 1376260 - DNA, 25 bp, Homo sapien
gcagtcggccctcgcgtcctctgct

SEQ ID NO: 1376261 - DNA, 25 bp, Homo sapien
ctctgctgcccgaaacaagcgcgtg

SEQ ID NO: 1376262 - DNA, 25 bp, Homo sapien
aacaagcgcgtggaaagcttggtcg

SEQ ID NO: 1376263 - DNA, 25 bp, Homo sapien
acagccgcgcgcacagactggttct

SEQ ID NO: 1376264 - DNA, 25 bp, Homo sapien
tggcacccgggaagacgcctgggag

SEQ ID NO: 1376265 - DNA, 25 bp, Homo sapien
gtgtttggattccaatctgggcctg

SEQ ID NO: 1376266 - DNA, 25 bp, Homo sapien
cctccctctgaagtggcgacagtaa

SEQ ID NO: 1376267 - DNA, 25 bp, Homo sapien
gcgcgtagtagagggaagcgactga

SEQ ID NO: 1376268 - DNA, 25 bp, Homo sapien
tatcactactaggtatattaccaaa

SEQ ID NO: 1376269 - DNA, 25 bp, Homo sapien
aatgaagtactaataaatcccacaa

SEQ ID NO: 1376270 - DNA, 25 bp, Homo sapien
cactactaggtatattaccaaaata

SEQ ID NO: 1376271 - DNA, 25 bp, Homo sapien
tattcttaatgcctatatcactact

SEQ ID NO: 1376272 - DNA, 25 bp, Homo sapien
aagggagttgtgtccggatttggtg

SEQ ID NO: 1376273 - DNA, 25 bp, Homo sapien
tcattgcatgaaatacccaagatag

SEQ ID NO: 1376274 - DNA, 25 bp, Homo sapien
agggagttgtgtccggatttggtgg

SEQ ID NO: 1376275 - DNA, 25 bp, Homo sapien
attgcatgaaatacccaagataggt

SEQ ID NO: 1376276 - DNA, 25 bp, Homo sapien
caggccagtaggctgacgccctgaa

SEQ ID NO: 1376277 - DNA, 25 bp, Homo sapien
tgacgccctgaacagtgtcccagag

SEQ ID NO: 1376278 - DNA, 25 bp, Homo sapien
cagattatgaaacatgcgggggaca

SEQ ID NO: 1376279 - DNA, 25 bp, Homo sapien
ggaagaggaagtcctgaggcttctc

SEQ ID NO: 1376280 - DNA, 25 bp, Homo sapien
gctggttctttctggcaagcagggc

SEQ ID NO: 1376281 - DNA, 25 bp, Homo sapien
gcaagcagggccatacagatgcacg

SEQ ID NO: 1376282 - DNA, 25 bp, Homo sapien
gcagggccatacagatgcacgcttt

SEQ ID NO: 1376283 - DNA, 25 bp, Homo sapien
tctttctggcaagcagggccataca

SEQ ID NO: 1376284 - DNA, 25 bp, Homo sapien
ctccttttggagttgtacctgagtt

SEQ ID NO: 1376285 - DNA, 25 bp, Homo sapien
gtctccttttggagttgtacctgag

SEQ ID NO: 1376286 - DNA, 25 bp, Homo sapien
tttggagttgtacctgagtttatta

SEQ ID NO: 1376287 - DNA, 25 bp, Homo sapien
ttatagatccagcttggttcttctc

SEQ ID NO: 1376288 - DNA, 25 bp, Homo sapien
aatggcttaatcctgaaggtcttgt

SEQ ID NO: 1376289 - DNA, 25 bp, Homo sapien
ccaggaatggcttaatcctgaaggt

SEQ ID NO: 1376290 - DNA, 25 bp, Homo sapien
ggaatggcttaatcctgaaggtctt

SEQ ID NO: 1376291 - DNA, 25 bp, Homo sapien
caggaatggcttaatcctgaaggtc

SEQ ID NO: 1376292 - DNA, 25 bp, Homo sapien
taacaaagatcctgaagtgttgagt

SEQ ID NO: 1376293 - DNA, 25 bp, Homo sapien
gttcagggtggagctcattgacaaa

SEQ ID NO: 1376294 - DNA, 25 bp, Homo sapien
tgacaaataaggcagacaaagcatt

SEQ ID NO: 1376295 - DNA, 25 bp, Homo sapien
gggtggagctcattgacaaataagg

SEQ ID NO: 1376296 - DNA, 25 bp, Homo sapien
gatgctgatctcaataagataacgc

SEQ ID NO: 1376297 - DNA, 25 bp, Homo sapien
tttctgatgctgatctcaataagat

SEQ ID NO: 1376298 - DNA, 25 bp, Homo sapien
tctgatgctgatctcaataagataa

SEQ ID NO: 1376299 - DNA, 25 bp, Homo sapien
tgctgatctcaataagataacgctc

SEQ ID NO: 1376300 - DNA, 25 bp, Homo sapien
taagtggtggttaatctgcatcaca

SEQ ID NO: 1376301 - DNA, 25 bp, Homo sapien
tactaacttttgcttctgaatacag

SEQ ID NO: 1376302 - DNA, 25 bp, Homo sapien
tgtgcccagcatgtggtactaactt

SEQ ID NO: 1376303 - DNA, 25 bp, Homo sapien
aaaaccctcactccactaacaagat

SEQ ID NO: 1376304 - DNA, 25 bp, Homo sapien
tagcaaggcccaaaatgaaacctgg

SEQ ID NO: 1376305 - DNA, 25 bp, Homo sapien
tgcccaggcatacaaagggagtttt

SEQ ID NO: 1376306 - DNA, 25 bp, Homo sapien
cgcagaggttacagacttgggtcca

SEQ ID NO: 1376307 - DNA, 25 bp, Homo sapien
ccttaaggttaactgctctggatgc

SEQ ID NO: 1376308 - DNA, 25 bp, Homo sapien
tttggaaaagtcagcctcttacaca

SEQ ID NO: 1376309 - DNA, 25 bp, Homo sapien
ctgcctcgatttaagtgatattagg

SEQ ID NO: 1376310 - DNA, 25 bp, Homo sapien
cattgaatgtctgtatctttctgcc

SEQ ID NO: 1376311 - DNA, 25 bp, Homo sapien
tatacttttactctgtcaattacag

SEQ ID NO: 1376312 - DNA, 25 bp, Homo sapien
tcaatttacccttcagccccatgga

SEQ ID NO: 1376313 - DNA, 25 bp, Homo sapien
tcaggctattggtaaggagtcaaac

SEQ ID NO: 1376314 - DNA, 25 bp, Homo sapien
tactatttgcattgagcaccactgg

SEQ ID NO: 1376315 - DNA, 25 bp, Homo sapien
tatagctagcagaaacatatgccag

SEQ ID NO: 1376316 - DNA, 25 bp, Homo sapien
gagattctgctgctttggtaacttc

SEQ ID NO: 1376317 - DNA, 25 bp, Homo sapien
tctggtccggagattctgctgcttt

SEQ ID NO: 1376318 - DNA, 25 bp, Homo sapien
ccggagattctgctgctttggtaac

SEQ ID NO: 1376319 - DNA, 25 bp, Homo sapien
tgtgtctttctggtccggagattct

SEQ ID NO: 1376320 - DNA, 25 bp, Homo sapien
agtcgataattgatgcccatgccaa

SEQ ID NO: 1376321 - DNA, 25 bp, Homo sapien
cccatgccaatgaagagatagatac

SEQ ID NO: 1376322 - DNA, 25 bp, Homo sapien
ttctgctcgtttgctttctgttctt

SEQ ID NO: 1376323 - DNA, 25 bp, Homo sapien
tgttcttttgccaaaagtcgataat

SEQ ID NO: 1376324 - DNA, 25 bp, Homo sapien
tctccatacatgtcattgagccgac

SEQ ID NO: 1376325 - DNA, 25 bp, Homo sapien
ccagtatgtgtatttgtagtctcca

SEQ ID NO: 1376326 - DNA, 25 bp, Homo sapien
agtctccatacatgtcattgagccg

SEQ ID NO: 1376327 - DNA, 25 bp, Homo sapien
aataattaggacgacgccacatgcc

SEQ ID NO: 1376328 - DNA, 25 bp, Homo sapien
gcattcccatcttacatgcttgttt

SEQ ID NO: 1376329 - DNA, 25 bp, Homo sapien
gacccacattagtagggagatatac

SEQ ID NO: 1376330 - DNA, 25 bp, Homo sapien
gcttgttttgtaatagacccacatt

SEQ ID NO: 1376331 - DNA, 25 bp, Homo sapien
tattcttacccaaatagctcactaa

SEQ ID NO: 1376332 - DNA, 25 bp, Homo sapien
cgattggtcgcatgagggctccagc

SEQ ID NO: 1376333 - DNA, 25 bp, Homo sapien
gccaatggtcgcctcttgtagaaat

SEQ ID NO: 1376334 - DNA, 25 bp, Homo sapien
tacaagtcccatagatggtcgggct

SEQ ID NO: 1376335 - DNA, 25 bp, Homo sapien
tcaaacaatacggagctgagccacc

SEQ ID NO: 1376336 - DNA, 25 bp, Homo sapien
caacaatcatgactatacgacttcc

SEQ ID NO: 1376337 - DNA, 25 bp, Homo sapien
acggtgttacagaaagaagctgcaa

SEQ ID NO: 1376338 - DNA, 25 bp, Homo sapien
gctgcaatcaagccacagcctgaca

SEQ ID NO: 1376339 - DNA, 25 bp, Homo sapien
tccaatgactccaatacagacgtat

SEQ ID NO: 1376340 - DNA, 25 bp, Homo sapien
tagtaatataaaggaaactgctccc

SEQ ID NO: 1376341 - DNA, 25 bp, Homo sapien
acatgtatgtagaaagtggctgggc

SEQ ID NO: 1376342 - DNA, 25 bp, Homo sapien
tgctccctcacatctacacaagtat

SEQ ID NO: 1376343 - DNA, 25 bp, Homo sapien
acaccttggtaatggatgttcacaa

SEQ ID NO: 1376344 - DNA, 25 bp, Homo sapien
gtgtacagcgacagccagtccaaga

SEQ ID NO: 1376345 - DNA, 25 bp, Homo sapien
ctggagcacggccacaccaagatag

SEQ ID NO: 1376346 - DNA, 25 bp, Homo sapien
caccaagatagacacggccttcgtg

SEQ ID NO: 1376347 - DNA, 25 bp, Homo sapien
tagacacggccttcgtgtacagcga

SEQ ID NO: 1376348 - DNA, 25 bp, Homo sapien
cattgccctggtagagaaggccctg

SEQ ID NO: 1376349 - DNA, 25 bp, Homo sapien
gagatctacaggaatcgcttctgga

SEQ ID NO: 1376350 - DNA, 25 bp, Homo sapien
tgtaacctctgcaagagcaatggct

SEQ ID NO: 1376351 - DNA, 25 bp, Homo sapien
cagcaggtgaaaacggagctcttcc

SEQ ID NO: 1376352 - DNA, 25 bp, Homo sapien
tatcagttttttgcgaccagtctcc

SEQ ID NO: 1376353 - DNA, 25 bp, Homo sapien
aagaggaatcaaatgtcaagtggcc

SEQ ID NO: 1376354 - DNA, 25 bp, Homo sapien
tcagataacagtcaacacaacgtgg

SEQ ID NO: 1376355 - DNA, 25 bp, Homo sapien
cacaacgtgggtgtaacaactcaag

SEQ ID NO: 1376356 - DNA, 25 bp, Homo sapien
gcagtgatcatgatactggtgcaca

SEQ ID NO: 1376357 - DNA, 25 bp, Homo sapien
ggtcctcaataaatactggcagtga

SEQ ID NO: 1376358 - DNA, 25 bp, Homo sapien
gaccaagtctctctaaggtgctaca

SEQ ID NO: 1376359 - DNA, 25 bp, Homo sapien
ggtgctacatcaagaactggccgtt

SEQ ID NO: 1376360 - DNA, 25 bp, Homo sapien
ttggcaacattgcaacaacccatct

SEQ ID NO: 1376361 - DNA, 25 bp, Homo sapien
gccttggcaacattgcaacaaccca

SEQ ID NO: 1376362 - DNA, 25 bp, Homo sapien
gaagggggaggaccgatcacctgag

SEQ ID NO: 1376363 - DNA, 25 bp, Homo sapien
gtgaagggggaggaccgatcacctg

SEQ ID NO: 1376364 - DNA, 25 bp, Homo sapien
tgaaaattaaaagagcaggccttaa

SEQ ID NO: 1376365 - DNA, 25 bp, Homo sapien
aaaattaaaagagcaggccttaatg

SEQ ID NO: 1376366 - DNA, 25 bp, Homo sapien
attaaaagagcaggccttaatgggt

SEQ ID NO: 1376367 - DNA, 25 bp, Homo sapien
aaaagagcaggccttaatgggtact

SEQ ID NO: 1376368 - DNA, 25 bp, Homo sapien
cagccaacattatggaggatatcca

SEQ ID NO: 1376369 - DNA, 25 bp, Homo sapien
gatatccatgacacttcgctggtgg

SEQ ID NO: 1376370 - DNA, 25 bp, Homo sapien
tgggaaatgcataagagaagccgat

SEQ ID NO: 1376371 - DNA, 25 bp, Homo sapien
ggaaatgaaagctccaattaccact

SEQ ID NO: 1376372 - DNA, 25 bp, Homo sapien
caaaatgcaggtcaaatccaaatat

SEQ ID NO: 1376373 - DNA, 25 bp, Homo sapien
ccaaaatgcaggtcaaatccaaata

SEQ ID NO: 1376374 - DNA, 25 bp, Homo sapien
ttaagtgtagataaattccaaaatg

SEQ ID NO: 1376375 - DNA, 25 bp, Homo sapien
tgtagataaattccaaaatgcaggt

SEQ ID NO: 1376376 - DNA, 25 bp, Homo sapien
gatatgggttggaccttcccatgct

SEQ ID NO: 1376377 - DNA, 25 bp, Homo sapien
ttcccatgctatctactctcttact

SEQ ID NO: 1376378 - DNA, 25 bp, Homo sapien
tctcagactccaactggatatgggt

SEQ ID NO: 1376379 - DNA, 25 bp, Homo sapien
tgttgtcatgttatcattcattcct

SEQ ID NO: 1376380 - DNA, 25 bp, Homo sapien
cagtgcctcactgtagctcctgggc

SEQ ID NO: 1376381 - DNA, 25 bp, Homo sapien
gaaatctaaagacctcaatcgtgag

SEQ ID NO: 1376382 - DNA, 25 bp, Homo sapien
cgtgactaaattgatacctaatggt

SEQ ID NO: 1376383 - DNA, 25 bp, Homo sapien
ttcagactgcatatcatcttggtgc

SEQ ID NO: 1376384 - DNA, 25 bp, Homo sapien
cactaattttgaggtagtgataagc

SEQ ID NO: 1376385 - DNA, 25 bp, Homo sapien
ggtatgaagtacatgatttctactg

SEQ ID NO: 1376386 - DNA, 25 bp, Homo sapien
tgttgcctacactcatatttgaatg

SEQ ID NO: 1376387 - DNA, 25 bp, Homo sapien
taacagctgcattatggtatgaagt

SEQ ID NO: 1376388 - DNA, 25 bp, Homo sapien
caaatatgtcatgacaaagtaataa

SEQ ID NO: 1376389 - DNA, 25 bp, Homo sapien
atgttaaaacgcatgctggaaaaaa

SEQ ID NO: 1376390 - DNA, 25 bp, Homo sapien
aaaatgttaaaacgcatgctggaaa

SEQ ID NO: 1376391 - DNA, 25 bp, Homo sapien
aataaaatgttaaaacgcatgctgg

SEQ ID NO: 1376392 - DNA, 25 bp, Homo sapien
aacagggccgccttaagtccatgag

SEQ ID NO: 1376393 - DNA, 25 bp, Homo sapien
cacaggttgaatgacaaagagcccc

SEQ ID NO: 1376394 - DNA, 25 bp, Homo sapien
aaagtctactcgaaccctgcagtca

SEQ ID NO: 1376395 - DNA, 25 bp, Homo sapien
tgcatcggaccaagtgtaacgctat

SEQ ID NO: 1376396 - DNA, 25 bp, Homo sapien
cgaggagcctattgaagacttaggg

SEQ ID NO: 1376397 - DNA, 25 bp, Homo sapien
ggaggtaccacatgcagcagcctca

SEQ ID NO: 1376398 - DNA, 25 bp, Homo sapien
cctgggaccggcatcttagcacggg

SEQ ID NO: 1376399 - DNA, 25 bp, Homo sapien
gatcaaagcatctctcgaggagcct

SEQ ID NO: 1376400 - DNA, 25 bp, Homo sapien
tccgccggagacaaagtctcccaac

SEQ ID NO: 1376401 - DNA, 25 bp, Homo sapien
tccgcgccgcgtgccgccggctgtt

SEQ ID NO: 1376402 - DNA, 25 bp, Homo sapien
gaggccacgcggctgcctgtgacca

SEQ ID NO: 1376403 - DNA, 25 bp, Homo sapien
agcgcctcaaggtctccttcaccag

SEQ ID NO: 1376404 - DNA, 25 bp, Homo sapien
agcgaggctgccttataacccgccg

SEQ ID NO: 1376405 - DNA, 25 bp, Homo sapien
gcagctagccagtcacgtcgcagct

SEQ ID NO: 1376406 - DNA, 25 bp, Homo sapien
gctgcctcgtttgcttgttccagta

SEQ ID NO: 1376407 - DNA, 25 bp, Homo sapien
cgtcgcagctcaccactttgtctgg

SEQ ID NO: 1376408 - DNA, 25 bp, Homo sapien
gcccttgggtccctgtctgacgagc

SEQ ID NO: 1376409 - DNA, 25 bp, Homo sapien
tctaggcaatctgccctcgttcggg

SEQ ID NO: 1376410 - DNA, 25 bp, Homo sapien
ccttgggtccctgtctgacgagctc

SEQ ID NO: 1376411 - DNA, 25 bp, Homo sapien
tgtctgacgagctctaggcaatctg

SEQ ID NO: 1376412 - DNA, 25 bp, Homo sapien
acaaccatcggtctcacccctcagt

SEQ ID NO: 1376413 - DNA, 25 bp, Homo sapien
gggccggcgctgtagagccgggcat

SEQ ID NO: 1376414 - DNA, 25 bp, Homo sapien
gcgtgcggagtagcgggaagcgact

SEQ ID NO: 1376415 - DNA, 25 bp, Homo sapien
gatgtgtttggattccaatccgggc

SEQ ID NO: 1376416 - DNA, 25 bp, Homo sapien
cctccctctgaagtggcgacagtag

SEQ ID NO: 1376417 - DNA, 25 bp, Homo sapien
tcgtaggctcatcgggaggtcctga

SEQ ID NO: 1376418 - DNA, 25 bp, Homo sapien
ggccggacgcttatggacgatgcat

SEQ ID NO: 1376419 - DNA, 25 bp, Homo sapien
catgcaacttgccaccatagagcca

SEQ ID NO: 1376420 - DNA, 25 bp, Homo sapien
tcggccacgtggaaaagcgagaatg

SEQ ID NO: 1376421 - DNA, 25 bp, Homo sapien
cactccagcctgtccagcctaggca

SEQ ID NO: 1376422 - DNA, 25 bp, Homo sapien
atgccgaggcggatggagcacgagg

SEQ ID NO: 1376423 - DNA, 25 bp, Homo sapien
actccagcctgtccagcctaggcaa

SEQ ID NO: 1376424 - DNA, 25 bp, Homo sapien
gggatgccgaggcggatggagcacg

SEQ ID NO: 1376425 - DNA, 25 bp, Homo sapien
aatttcaggttatatgtcaggtgta

SEQ ID NO: 1376426 - DNA, 25 bp, Homo sapien
tttcaaaggcctatgtctggatcta

SEQ ID NO: 1376427 - DNA, 25 bp, Homo sapien
tatatgtcaggtgtagtcctactgc

SEQ ID NO: 1376428 - DNA, 25 bp, Homo sapien
ggtgtagtcctactgctttcaaagg

SEQ ID NO: 1376429 - DNA, 25 bp, Homo sapien
gaggcctctaacatcacagtgactg

SEQ ID NO: 1376430 - DNA, 25 bp, Homo sapien
cagtgactggctttgtgtatccatc

SEQ ID NO: 1376431 - DNA, 25 bp, Homo sapien
cagacctgggtgttctacctggacc

SEQ ID NO: 1376432 - DNA, 25 bp, Homo sapien
ggacagctgcacatcaagcctactg

SEQ ID NO: 1376433 - DNA, 25 bp, Homo sapien
actgagaagcatttaaggaccaaga

SEQ ID NO: 1376434 - DNA, 25 bp, Homo sapien
taagaattgttgaaggcccttctca

SEQ ID NO: 1376435 - DNA, 25 bp, Homo sapien
aattagcccagtataagtcaacaag

SEQ ID NO: 1376436 - DNA, 25 bp, Homo sapien
tcttggaacatagaacagatggaag

SEQ ID NO: 1376437 - DNA, 25 bp, Homo sapien
tatatacaaaacgtttcatttccta

SEQ ID NO: 1376438 - DNA, 25 bp, Homo sapien
tacttacaaaggccacctacaaatc

SEQ ID NO: 1376439 - DNA, 25 bp, Homo sapien
atatacaaaacgtttcatttcctat

SEQ ID NO: 1376440 - DNA, 25 bp, Homo sapien
cttacaaaggccacctacaaatcca

SEQ ID NO: 1376441 - DNA, 25 bp, Homo sapien
gcccagaaaatttattaatatcacc

SEQ ID NO: 1376442 - DNA, 25 bp, Homo sapien
cggcccagaaaatttattaatatca

SEQ ID NO: 1376443 - DNA, 25 bp, Homo sapien
gaaaatttattaatatcaccacttc

SEQ ID NO: 1376444 - DNA, 25 bp, Homo sapien
cagaaaatttattaatatcaccact

SEQ ID NO: 1376445 - DNA, 25 bp, Homo sapien
tatggattgccagaccttgcagctg

SEQ ID NO: 1376446 - DNA, 25 bp, Homo sapien
caaatgttgtcttgcctcgtggtaa

SEQ ID NO: 1376447 - DNA, 25 bp, Homo sapien
tgtttttccaagaacccagccgctc

SEQ ID NO: 1376448 - DNA, 25 bp, Homo sapien
cactggaatgcccttgtaattgcca

SEQ ID NO: 1376449 - DNA, 25 bp, Homo sapien
taagagtcggcactgagctagttgc

SEQ ID NO: 1376450 - DNA, 25 bp, Homo sapien
aataagagtcggcactgagctagtt

SEQ ID NO: 1376451 - DNA, 25 bp, Homo sapien
agagtcggcactgagctagttgcca

SEQ ID NO: 1376452 - DNA, 25 bp, Homo sapien
ctaataagagtcggcactgagctag

SEQ ID NO: 1376453 - DNA, 25 bp, Homo sapien
tgagggtatgaagacatgattgctg

SEQ ID NO: 1376454 - DNA, 25 bp, Homo sapien
ctgagggtatgaagacatgattgct

SEQ ID NO: 1376455 - DNA, 25 bp, Homo sapien
agggtatgaagacatgattgctgcc

SEQ ID NO: 1376456 - DNA, 25 bp, Homo sapien
gagggtatgaagacatgattgctgc

SEQ ID NO: 1376457 - DNA, 25 bp, Homo sapien
tatgagaatgaatgtcaccccactc

SEQ ID NO: 1376458 - DNA, 25 bp, Homo sapien
tccctatgagaatgaatgtcacccc

SEQ ID NO: 1376459 - DNA, 25 bp, Homo sapien
ctttttccctatgagaatgaatgtc

SEQ ID NO: 1376460 - DNA, 25 bp, Homo sapien
ctttatctttttccctatgagaatg

SEQ ID NO: 1376461 - DNA, 25 bp, Homo sapien
tcaggaaactcccaagcattctgga

SEQ ID NO: 1376462 - DNA, 25 bp, Homo sapien
tttatcttcaggaaactcccaagca

SEQ ID NO: 1376463 - DNA, 25 bp, Homo sapien
ctctgcatgtgagtaagaaccactg

SEQ ID NO: 1376464 - DNA, 25 bp, Homo sapien
tggaagctctgcatgtgagtaagaa

SEQ ID NO: 1376465 - DNA, 25 bp, Homo sapien
atgtgcaccgactcccctggagctg

SEQ ID NO: 1376466 - DNA, 25 bp, Homo sapien
caaaaatctgatggcgacattctct

SEQ ID NO: 1376467 - DNA, 25 bp, Homo sapien
gcagtctgtctctttggtagctaca

SEQ ID NO: 1376468 - DNA, 25 bp, Homo sapien
tatcctttgttttcggtagacaggc

SEQ ID NO: 1376469 - DNA, 25 bp, Homo sapien
aagttggagagccaaccagcaaaac

SEQ ID NO: 1376470 - DNA, 25 bp, Homo sapien
tgtctaaaggtttagctgtaagtaa

SEQ ID NO: 1376471 - DNA, 25 bp, Homo sapien
cctcctgtctaaaggtttagctgta

SEQ ID NO: 1376472 - DNA, 25 bp, Homo sapien
gcctcctgtctaaaggtttagctgt

SEQ ID NO: 1376473 - DNA, 25 bp, Homo sapien
tcctgtctaaaggtttagctgtaag

SEQ ID NO: 1376474 - DNA, 25 bp, Homo sapien
cttagtttatttttgctagcttcct

SEQ ID NO: 1376475 - DNA, 25 bp, Homo sapien
tagtttatttttgctagcttccttc

SEQ ID NO: 1376476 - DNA, 25 bp, Homo sapien
gccttagtttatttttgctagcttc

SEQ ID NO: 1376477 - DNA, 25 bp, Homo sapien
gtttatttttgctagcttccttcat

SEQ ID NO: 1376478 - DNA, 25 bp, Homo sapien
gagttatcaccctagtacttggaaa

SEQ ID NO: 1376479 - DNA, 25 bp, Homo sapien
agaggtggagggttattggtttatg

SEQ ID NO: 1376480 - DNA, 25 bp, Homo sapien
cttcagagttatcaccctagtactt

SEQ ID NO: 1376481 - DNA, 25 bp, Homo sapien
tatcaccctagtacttggaaactgc

SEQ ID NO: 1376482 - DNA, 25 bp, Homo sapien
gctaattaagaaccggcatgggcca

SEQ ID NO: 1376483 - DNA, 25 bp, Homo sapien
ccttttatcaagtgcccagtgccaa

SEQ ID NO: 1376484 - DNA, 25 bp, Homo sapien
tcaaaagcacttgggtgggtcttcc

SEQ ID NO: 1376485 - DNA, 25 bp, Homo sapien
taattggaattgcacgtcctcagcg

SEQ ID NO: 1376486 - DNA, 25 bp, Homo sapien
tccacaagacctccctgtctttgtg

SEQ ID NO: 1376487 - DNA, 25 bp, Homo sapien
gcttcccttccacaagacctccctg

SEQ ID NO: 1376488 - DNA, 25 bp, Homo sapien
gagacacctggatgctggctcactc

SEQ ID NO: 1376489 - DNA, 25 bp, Homo sapien
caagacctccctgtctttgtgaggc

SEQ ID NO: 1376490 - DNA, 25 bp, Homo sapien
tggtgaagagagcaaagatttgttc

SEQ ID NO: 1376491 - DNA, 25 bp, Homo sapien
gagcaaagatttgttcacagaataa

SEQ ID NO: 1376492 - DNA, 25 bp, Homo sapien
agatttgttcacagaataaaagctc

SEQ ID NO: 1376493 - DNA, 25 bp, Homo sapien
gaagagagcaaagatttgttcacag

SEQ ID NO: 1376494 - DNA, 25 bp, Homo sapien
tcagtctgagagcatagtatttttc

SEQ ID NO: 1376495 - DNA, 25 bp, Homo sapien
tttgcctggattataatattgattc

SEQ ID NO: 1376496 - DNA, 25 bp, Homo sapien
tccatctatttagatcctcttttat

SEQ ID NO: 1376497 - DNA, 25 bp, Homo sapien
cattttgcctggattataatattga

SEQ ID NO: 1376498 - DNA, 25 bp, Homo sapien
gaactctaaaatctcagcccaggta

SEQ ID NO: 1376499 - DNA, 25 bp, Homo sapien
tattctgtgcttatggattccactg

SEQ ID NO: 1376500 - DNA, 25 bp, Homo sapien
tgcaaagagtaaagtcccgaggtaa

SEQ ID NO: 1376501 - DNA, 25 bp, Homo sapien
gcccaggtactttagcacccacgaa

SEQ ID NO: 1376502 - DNA, 25 bp, Homo sapien
cttaaggaactactgcgccctccag

SEQ ID NO: 1376503 - DNA, 25 bp, Homo sapien
tccacagcggcagctaaaatccctg

SEQ ID NO: 1376504 - DNA, 25 bp, Homo sapien
ttgaactcacagctattcgccgcac

SEQ ID NO: 1376505 - DNA, 25 bp, Homo sapien
ctccagcggaagaacagcggcggaa

SEQ ID NO: 1376506 - DNA, 25 bp, Homo sapien
tattgcagtctcaatcttcagagag

SEQ ID NO: 1376507 - DNA, 25 bp, Homo sapien
tgttagggtttagccagagtcttcc

SEQ ID NO: 1376508 - DNA, 25 bp, Homo sapien
cctaggcctagctgtgtaaaatcca

SEQ ID NO: 1376509 - DNA, 25 bp, Homo sapien
tctttgcttgaccaacccgtaggca

SEQ ID NO: 1376510 - DNA, 25 bp, Homo sapien
gaaaagtgctggatcctgaagtcag

SEQ ID NO: 1376511 - DNA, 25 bp, Homo sapien
cacaggtgacagtaagggctagtag

SEQ ID NO: 1376512 - DNA, 25 bp, Homo sapien
gataatgcttgagaaatatattctg

SEQ ID NO: 1376513 - DNA, 25 bp, Homo sapien
agaagtagaacttgtcttgaaatcc

SEQ ID NO: 1376514 - DNA, 25 bp, Homo sapien
gtgatttcagtgtccctattcagga

SEQ ID NO: 1376515 - DNA, 25 bp, Homo sapien
caggtgacagtagacgatatatagt

SEQ ID NO: 1376516 - DNA, 25 bp, Homo sapien
tgaagtagagggatttgaaagacca

SEQ ID NO: 1376517 - DNA, 25 bp, Homo sapien
cagaatcgctaaaataacaggtgac

SEQ ID NO: 1376518 - DNA, 25 bp, Homo sapien
tgccacaggttacaggatcatgctt

SEQ ID NO: 1376519 - DNA, 25 bp, Homo sapien
tggattgccctagtcttcagaatgg

SEQ ID NO: 1376520 - DNA, 25 bp, Homo sapien
cattcaagatggtagtgagggcaca

SEQ ID NO: 1376521 - DNA, 25 bp, Homo sapien
gattgcatctgaccgcaccaaggtg

SEQ ID NO: 1376522 - DNA, 25 bp, Homo sapien
taaccgccttcttcatgcctagagg

SEQ ID NO: 1376523 - DNA, 25 bp, Homo sapien
cagtttgcccaaaagaggtaagcca

SEQ ID NO: 1376524 - DNA, 25 bp, Homo sapien
tgaacgcttcaaaaactggaggctg

SEQ ID NO: 1376525 - DNA, 25 bp, Homo sapien
tgtcacagctgtatgcacctagagg

SEQ ID NO: 1376526 - DNA, 25 bp, Homo sapien
cttctggaaccatttgtccatccga

SEQ ID NO: 1376527 - DNA, 25 bp, Homo sapien
atccgacttctgcactgggccacat

SEQ ID NO: 1376528 - DNA, 25 bp, Homo sapien
tggaaccatttgtccatccgacttc

SEQ ID NO: 1376529 - DNA, 25 bp, Homo sapien
tctggaaccatttgtccatccgact

SEQ ID NO: 1376530 - DNA, 25 bp, Homo sapien
aagttcttcattgaccaggaaacca

SEQ ID NO: 1376531 - DNA, 25 bp, Homo sapien
ccaatgtgcagtatatcttaagaag

SEQ ID NO: 1376532 - DNA, 25 bp, Homo sapien
tcttaagaagggaagagtgctcttg

SEQ ID NO: 1376533 - DNA, 25 bp, Homo sapien
cacagtattgaaataccagactgag

SEQ ID NO: 1376534 - DNA, 25 bp, Homo sapien
tggtggaaaggtacatacagaagct

SEQ ID NO: 1376535 - DNA, 25 bp, Homo sapien
gaactccatgacctactggtacagg

SEQ ID NO: 1376536 - DNA, 25 bp, Homo sapien
aatgtccaagctcccctaaagtgcc

SEQ ID NO: 1376537 - DNA, 25 bp, Homo sapien
aacgtggctcactgtcgtcactgca

SEQ ID NO: 1376538 - DNA, 25 bp, Homo sapien
gggttgagattgtggcattcagttt

SEQ ID NO: 1376539 - DNA, 25 bp, Homo sapien
gggactccaattagaatggggttga

SEQ ID NO: 1376540 - DNA, 25 bp, Homo sapien
caagtgtgtcatggccttttttaat

SEQ ID NO: 1376541 - DNA, 25 bp, Homo sapien
atattttacccaagtgtgtcatggc

SEQ ID NO: 1376542 - DNA, 25 bp, Homo sapien
tgagcagccctaatactagatgtac

SEQ ID NO: 1376543 - DNA, 25 bp, Homo sapien
gccaagtcattgttcagtgtagtca

SEQ ID NO: 1376544 - DNA, 25 bp, Homo sapien
tggataatactagtctgagcagccc

SEQ ID NO: 1376545 - DNA, 25 bp, Homo sapien
tactgtggcctctttacaatggtga

SEQ ID NO: 1376546 - DNA, 25 bp, Homo sapien
tctgcggcactgaactatacttgcc

SEQ ID NO: 1376547 - DNA, 25 bp, Homo sapien
aggcatctgcggcactgaactatac

SEQ ID NO: 1376548 - DNA, 25 bp, Homo sapien
cactgaactatacttgccacaaaat

SEQ ID NO: 1376549 - DNA, 25 bp, Homo sapien
aacaaaaggcatctgcggcactgaa

SEQ ID NO: 1376550 - DNA, 25 bp, Homo sapien
gtcacttgtctcacccgccaaatgt

SEQ ID NO: 1376551 - DNA, 25 bp, Homo sapien
cactcctgcacgtgcaccagctttc

SEQ ID NO: 1376552 - DNA, 25 bp, Homo sapien
ttgtctcacccgccaaatgtgtacc

SEQ ID NO: 1376553 - DNA, 25 bp, Homo sapien
gtctcacccgccaaatgtgtaccat

SEQ ID NO: 1376554 - DNA, 25 bp, Homo sapien
gactcatccaactacttcccaataa

SEQ ID NO: 1376555 - DNA, 25 bp, Homo sapien
tcccaataaatggtccaggattaat

SEQ ID NO: 1376556 - DNA, 25 bp, Homo sapien
cttcgatgcctttgtagactcatcc

SEQ ID NO: 1376557 - DNA, 25 bp, Homo sapien
tgggtattcatgttcagtgtagggc

SEQ ID NO: 1376558 - DNA, 25 bp, Homo sapien
cctgaagagcggaaacctaatggga

SEQ ID NO: 1376559 - DNA, 25 bp, Homo sapien
cctaatgggaaaagactgctgaaag

SEQ ID NO: 1376560 - DNA, 25 bp, Homo sapien
caaaaagcggaaagctttcatgccc

SEQ ID NO: 1376561 - DNA, 25 bp, Homo sapien
ccttggtgctcatgtagcctgaaga

SEQ ID NO: 1376562 - DNA, 25 bp, Homo sapien
cattttttaatacctacatatacaa

SEQ ID NO: 1376563 - DNA, 25 bp, Homo sapien
tctgcagagatgaaatacactccag

SEQ ID NO: 1376564 - DNA, 25 bp, Homo sapien
gttgcgggaagtcagttcttatcac

SEQ ID NO: 1376565 - DNA, 25 bp, Homo sapien
tctcttatggtcgagtctgcagaga

SEQ ID NO: 1376566 - DNA, 25 bp, Homo sapien
cttagctgtgtccagtctactggtg

SEQ ID NO: 1376567 - DNA, 25 bp, Homo sapien
ccatcaaaggtattcattgctgtta

SEQ ID NO: 1376568 - DNA, 25 bp, Homo sapien
tgtctcatggttcccgatatccttt

SEQ ID NO: 1376569 - DNA, 25 bp, Homo sapien
tgctaccccgtttgtatttgtctca

SEQ ID NO: 1376570 - DNA, 25 bp, Homo sapien
ataactgttcggtaaaactgcgtct

SEQ ID NO: 1376571 - DNA, 25 bp, Homo sapien
tcaaataactgttcggtaaaactgc

SEQ ID NO: 1376572 - DNA, 25 bp, Homo sapien
cggtaaaactgcgtcttttgctgac

SEQ ID NO: 1376573 - DNA, 25 bp, Homo sapien
aactgcgtcttttgctgactcaggc

SEQ ID NO: 1376574 - DNA, 25 bp, Homo sapien
taaacatacatagggagcatgagtc

SEQ ID NO: 1376575 - DNA, 25 bp, Homo sapien
caaggcttggccttgctgtgcacaa

SEQ ID NO: 1376576 - DNA, 25 bp, Homo sapien
tgcacaagcgctgtgaggaagattt

SEQ ID NO: 1376577 - DNA, 25 bp, Homo sapien
agcccggatcagtgccacaagtcaa

SEQ ID NO: 1376578 - DNA, 25 bp, Homo sapien
ggagaccaagcttttgctgtccttg

SEQ ID NO: 1376579 - DNA, 25 bp, Homo sapien
cttgggtcaggtaggagaccaagct

SEQ ID NO: 1376580 - DNA, 25 bp, Homo sapien
gtccttgtaaatgggatttgtctcc

SEQ ID NO: 1376581 - DNA, 25 bp, Homo sapien
taaatgggatttgtctcctgcttgt

SEQ ID NO: 1376582 - DNA, 25 bp, Homo sapien
tgcatgcctttattcccatctctca

SEQ ID NO: 1376583 - DNA, 25 bp, Homo sapien
ttactctccctgcatgcctttattc

SEQ ID NO: 1376584 - DNA, 25 bp, Homo sapien
cctgcatgcctttattcccatctct

SEQ ID NO: 1376585 - DNA, 25 bp, Homo sapien
ctctccctgcatgcctttattccca

SEQ ID NO: 1376586 - DNA, 25 bp, Homo sapien
agacctggccaatctctgttaagaa

SEQ ID NO: 1376587 - DNA, 25 bp, Homo sapien
tctgttaagaattccattgcaaatg

SEQ ID NO: 1376588 - DNA, 25 bp, Homo sapien
ccattgcaaatgtggcttctccctt

SEQ ID NO: 1376589 - DNA, 25 bp, Homo sapien
acctggactgggaacccatcctctg

SEQ ID NO: 1376590 - DNA, 25 bp, Homo sapien
cttcccttgtccctgcataccctgt

SEQ ID NO: 1376591 - DNA, 25 bp, Homo sapien
tgcataccctgtcctagcccaaggc

SEQ ID NO: 1376592 - DNA, 25 bp, Homo sapien
tgtcctagcccaaggcgccgaacct

SEQ ID NO: 1376593 - DNA, 25 bp, Homo sapien
aaggcgccgaacctggcagcggcat

SEQ ID NO: 1376594 - DNA, 25 bp, Homo sapien
tctggattcctaaggggctgactct

SEQ ID NO: 1376595 - DNA, 25 bp, Homo sapien
gctgctgaagaattagagtctaaaa

SEQ ID NO: 1376596 - DNA, 25 bp, Homo sapien
tagcccggctgatagtggccttccg

SEQ ID NO: 1376597 - DNA, 25 bp, Homo sapien
catgagttagctgaacttccgggtc

SEQ ID NO: 1376598 - DNA, 25 bp, Homo sapien
aaccccaaaacaatagcagcttaag

SEQ ID NO: 1376599 - DNA, 25 bp, Homo sapien
tcacatcatggcactggctggcacc

SEQ ID NO: 1376600 - DNA, 25 bp, Homo sapien
gattcccaagttagctccagcatgt

SEQ ID NO: 1376601 - DNA, 25 bp, Homo sapien
tcatgtaacattttggaggtggcca

SEQ ID NO: 1376602 - DNA, 25 bp, Homo sapien
ccaggatcaggtgagccagacttca

SEQ ID NO: 1376603 - DNA, 25 bp, Homo sapien
gagagtgtacatgcaagcctgcccg

SEQ ID NO: 1376604 - DNA, 25 bp, Homo sapien
tgtgtatacgctgggactgcctgtc

SEQ ID NO: 1376605 - DNA, 25 bp, Homo sapien
tacagctgatcttaaacgcaacggg

SEQ ID NO: 1376606 - DNA, 25 bp, Homo sapien
tctgctgtctgcgaagaggatgtat

SEQ ID NO: 1376607 - DNA, 25 bp, Homo sapien
tgtaaacgaagccactgttcgatcc

SEQ ID NO: 1376608 - DNA, 25 bp, Homo sapien
tcgatcccagaaaactcccaattaa

SEQ ID NO: 1376609 - DNA, 25 bp, Homo sapien
tgctgtctgcgaagaggatgtatca

SEQ ID NO: 1376610 - DNA, 25 bp, Homo sapien
ggatatatataatcatgaggagata

SEQ ID NO: 1376611 - DNA, 25 bp, Homo sapien
ctgtacagtgcgcaccagtggtgcc

SEQ ID NO: 1376612 - DNA, 25 bp, Homo sapien
aagcccgtgaagcacagccggcttc

SEQ ID NO: 1376613 - DNA, 25 bp, Homo sapien
ccaagacggcggtgccgcccatgga

SEQ ID NO: 1376614 - DNA, 25 bp, Homo sapien
tttttttcacaattcgtgagtccag

SEQ ID NO: 1376615 - DNA, 25 bp, Homo sapien
ttttttcacaattcgtgagtccaga

SEQ ID NO: 1376616 - DNA, 25 bp, Homo sapien
ccatgcctgggggtaattgttgaaa

SEQ ID NO: 1376617 - DNA, 25 bp, Homo sapien
tgcctgggggtaattgttgaaagac

SEQ ID NO: 1376618 - DNA, 25 bp, Homo sapien
catgcctgggggtaattgttgaaag

SEQ ID NO: 1376619 - DNA, 25 bp, Homo sapien
cctgggggtaattgttgaaagacat

SEQ ID NO: 1376620 - DNA, 25 bp, Homo sapien
ctacatcatcatggcgagaggcagc

SEQ ID NO: 1376621 - DNA, 25 bp, Homo sapien
tcttctgcggctatgggcctccagt

SEQ ID NO: 1376622 - DNA, 25 bp, Homo sapien
tagcacacagtaggaaatagctttg

SEQ ID NO: 1376623 - DNA, 25 bp, Homo sapien
atagctttgttgaccatttttccac

SEQ ID NO: 1376624 - DNA, 25 bp, Homo sapien
agagtcttgtagcattgtggaaccc

SEQ ID NO: 1376625 - DNA, 25 bp, Homo sapien
ctcattttcgcccacagaatttata

SEQ ID NO: 1376626 - DNA, 25 bp, Homo sapien
ccatttctcattttcgcccacagaa

SEQ ID NO: 1376627 - DNA, 25 bp, Homo sapien
ttcagttttgagagtcttgtagcat

SEQ ID NO: 1376628 - DNA, 25 bp, Homo sapien
ggtgcccaggtacaatcattggcca

SEQ ID NO: 1376629 - DNA, 25 bp, Homo sapien
aaactgtgggtgtggcatgtcttcc

SEQ ID NO: 1376630 - DNA, 25 bp, Homo sapien
ccagtgtaaatatatgcgagtcagc

SEQ ID NO: 1376631 - DNA, 25 bp, Homo sapien
tgggtgccgcctttagctccataag

SEQ ID NO: 1376632 - DNA, 25 bp, Homo sapien
tgagggtgagtctaggcacaggcag

SEQ ID NO: 1376633 - DNA, 25 bp, Homo sapien
tagaaatacagatatgctttgcggg

SEQ ID NO: 1376634 - DNA, 25 bp, Homo sapien
tggagggggcttctttagaaataca

SEQ ID NO: 1376635 - DNA, 25 bp, Homo sapien
gaaactgcagccactactggggagt

SEQ ID NO: 1376636 - DNA, 25 bp, Homo sapien
gcttcacagcagtatgtgtccagcc

SEQ ID NO: 1376637 - DNA, 25 bp, Homo sapien
cagcttcacagcagtatgtgtccag

SEQ ID NO: 1376638 - DNA, 25 bp, Homo sapien
actgcaagagtcagctggtcatgca

SEQ ID NO: 1376639 - DNA, 25 bp, Homo sapien
ccagcttcacagcagtatgtgtcca

SEQ ID NO: 1376640 - DNA, 25 bp, Homo sapien
gcaggcttgcatatctgagcagaca

SEQ ID NO: 1376641 - DNA, 25 bp, Homo sapien
tgacataaaagtgatatcatgtttg

SEQ ID NO: 1376642 - DNA, 25 bp, Homo sapien
ggataataggaatttctagtgacat

SEQ ID NO: 1376643 - DNA, 25 bp, Homo sapien
ttattaagagcagaacaatgggcct

SEQ ID NO: 1376644 - DNA, 25 bp, Homo sapien
ctggatcccagcatgatgtggccat

SEQ ID NO: 1376645 - DNA, 25 bp, Homo sapien
cgtgcatgctcactgctggatccca

SEQ ID NO: 1376646 - DNA, 25 bp, Homo sapien
gtgcatgctcactgctggatcccag

SEQ ID NO: 1376647 - DNA, 25 bp, Homo sapien
tgttcgtacacagcagatggctttc

SEQ ID NO: 1376648 - DNA, 25 bp, Homo sapien
tggagttcgcaagccgcagctcttt

SEQ ID NO: 1376649 - DNA, 25 bp, Homo sapien
ttaaaatgagtaagccagggctttc

SEQ ID NO: 1376650 - DNA, 25 bp, Homo sapien
ggctctgaataggtctgttcgtaca

SEQ ID NO: 1376651 - DNA, 25 bp, Homo sapien
gaaattgcattaatggctttgctcc

SEQ ID NO: 1376652 - DNA, 25 bp, Homo sapien
ctgaaattgcattaatggctttgct

SEQ ID NO: 1376653 - DNA, 25 bp, Homo sapien
gctttgctcctgaatgtaaaacaaa

SEQ ID NO: 1376654 - DNA, 25 bp, Homo sapien
tggctttgctcctgaatgtaaaaca

SEQ ID NO: 1376655 - DNA, 25 bp, Homo sapien
tccccaacccttcggatttgataca

SEQ ID NO: 1376656 - DNA, 25 bp, Homo sapien
ccccaacccttcggatttgatacat

SEQ ID NO: 1376657 - DNA, 25 bp, Homo sapien
ctctcctagccatcagccttgctac

SEQ ID NO: 1376658 - DNA, 25 bp, Homo sapien
ctcctagccatcagccttgctactt

SEQ ID NO: 1376659 - DNA, 25 bp, Homo sapien
tgcccagtgcaagccgtgctcctcc

SEQ ID NO: 1376660 - DNA, 25 bp, Homo sapien
atcagaacaactagccagctcatct

SEQ ID NO: 1376661 - DNA, 25 bp, Homo sapien
gacacgatccacatccattccatga

SEQ ID NO: 1376662 - DNA, 25 bp, Homo sapien
caaactgcctgtgtaggctgcccag

SEQ ID NO: 1376663 - DNA, 25 bp, Homo sapien
gatgagggactgagagaagaagaaa

SEQ ID NO: 1376664 - DNA, 25 bp, Homo sapien
gagggactgagagaagaagaaagag

SEQ ID NO: 1376665 - DNA, 25 bp, Homo sapien
tcacgatgagggactgagagaagaa

SEQ ID NO: 1376666 - DNA, 25 bp, Homo sapien
cacgatgagggactgagagaagaag

SEQ ID NO: 1376667 - DNA, 25 bp, Homo sapien
cagcattcaagcctgtcaccgcctt

SEQ ID NO: 1376668 - DNA, 25 bp, Homo sapien
gcattcaagcctgtcaccgccttca

SEQ ID NO: 1376669 - DNA, 25 bp, Homo sapien
agcattcaagcctgtcaccgccttc

SEQ ID NO: 1376670 - DNA, 25 bp, Homo sapien
acagttccacaacacgttgtctcca

SEQ ID NO: 1376671 - DNA, 25 bp, Homo sapien
gctggaatccatccacagttccaca

SEQ ID NO: 1376672 - DNA, 25 bp, Homo sapien
cagttccacaacacgttgtctccat

SEQ ID NO: 1376673 - DNA, 25 bp, Homo sapien
ccacagttccacaacacgttgtctc

SEQ ID NO: 1376674 - DNA, 25 bp, Homo sapien
caaacggtactcatttgtttttgca

SEQ ID NO: 1376675 - DNA, 25 bp, Homo sapien
catctcaaacggtactcatttgttt

SEQ ID NO: 1376676 - DNA, 25 bp, Homo sapien
atttgtttttgcagtctctctgctc

SEQ ID NO: 1376677 - DNA, 25 bp, Homo sapien
catttgtttttgcagtctctctgct

SEQ ID NO: 1376678 - DNA, 25 bp, Homo sapien
ttctacatcaaggatctggtcaggg

SEQ ID NO: 1376679 - DNA, 25 bp, Homo sapien
ttattctacatcaaggatctggtca

SEQ ID NO: 1376680 - DNA, 25 bp, Homo sapien
tctggtcagggtctgtgtttttcat

SEQ ID NO: 1376681 - DNA, 25 bp, Homo sapien
atctggtcagggtctgtgtttttca

SEQ ID NO: 1376682 - DNA, 25 bp, Homo sapien
aaaatcacagcaataggctctgctg

SEQ ID NO: 1376683 - DNA, 25 bp, Homo sapien
aatcacagcaataggctctgctgca

SEQ ID NO: 1376684 - DNA, 25 bp, Homo sapien
tcacagcaataggctctgctgcatg

SEQ ID NO: 1376685 - DNA, 25 bp, Homo sapien
aaatcacagcaataggctctgctgc

SEQ ID NO: 1376686 - DNA, 25 bp, Homo sapien
aatggaatctggctatggatttctt

SEQ ID NO: 1376687 - DNA, 25 bp, Homo sapien
atttgggatagactggaagatggat

SEQ ID NO: 1376688 - DNA, 25 bp, Homo sapien
gatttcttctcgaatgttcctactc

SEQ ID NO: 1376689 - DNA, 25 bp, Homo sapien
tgggatagactggaagatggataat

SEQ ID NO: 1376690 - DNA, 25 bp, Homo sapien
tggtatacccaaggcactctatagt

SEQ ID NO: 1376691 - DNA, 25 bp, Homo sapien
gatctttagattccgagtcacagtg

SEQ ID NO: 1376692 - DNA, 25 bp, Homo sapien
gctggtctctatccagatagctagg

SEQ ID NO: 1376693 - DNA, 25 bp, Homo sapien
cacatgcgtgcacactggtataccc

SEQ ID NO: 1376694 - DNA, 25 bp, Homo sapien
taggcctcactttagagtcacaggg

SEQ ID NO: 1376695 - DNA, 25 bp, Homo sapien
gaggtggcattcttggaagttttac

SEQ ID NO: 1376696 - DNA, 25 bp, Homo sapien
catgcacgagtaccctagacagcag

SEQ ID NO: 1376697 - DNA, 25 bp, Homo sapien
tcacagggaatgcaggaggagagca

SEQ ID NO: 1376698 - DNA, 25 bp, Homo sapien
agtaattgctcttgcattgcccttt

SEQ ID NO: 1376699 - DNA, 25 bp, Homo sapien
gcagtggccatgttatgattgtgaa

SEQ ID NO: 1376700 - DNA, 25 bp, Homo sapien
gcattgccctttacccataacctta

SEQ ID NO: 1376701 - DNA, 25 bp, Homo sapien
tcttgcattgccctttacccataac

SEQ ID NO: 1376702 - DNA, 25 bp, Homo sapien
gtaatgatgtaattgttgtggtttc

SEQ ID NO: 1376703 - DNA, 25 bp, Homo sapien
taatgatgtaattgttgtggtttct

SEQ ID NO: 1376704 - DNA, 25 bp, Homo sapien
gaaccgtgagtgagtaatgatgtaa

SEQ ID NO: 1376705 - DNA, 25 bp, Homo sapien
ccgtgagtgagtaatgatgtaattg

SEQ ID NO: 1376706 - DNA, 25 bp, Homo sapien
atttacgcagtcaacagacatatgc

SEQ ID NO: 1376707 - DNA, 25 bp, Homo sapien
gacatttacgcagtcaacagacata

SEQ ID NO: 1376708 - DNA, 25 bp, Homo sapien
ccaacccaaatgtcccaaatgtcca

SEQ ID NO: 1376709 - DNA, 25 bp, Homo sapien
acccaaatgtcccaaatgtccatca

SEQ ID NO: 1376710 - DNA, 25 bp, Homo sapien
gcctgtcagagtccttagatgcagc

SEQ ID NO: 1376711 - DNA, 25 bp, Homo sapien
cagagtccttagatgcagcagaacc

SEQ ID NO: 1376712 - DNA, 25 bp, Homo sapien
cccaagtagatctggttgagtgtat

SEQ ID NO: 1376713 - DNA, 25 bp, Homo sapien
agtccttagatgcagcagaacctcc

SEQ ID NO: 1376714 - DNA, 25 bp, Homo sapien
tggaagcagcaatagcatgctttcg

SEQ ID NO: 1376715 - DNA, 25 bp, Homo sapien
gaagcagcaatagcatgctttcggt

SEQ ID NO: 1376716 - DNA, 25 bp, Homo sapien
cagcaatagcatgctttcggtttag

SEQ ID NO: 1376717 - DNA, 25 bp, Homo sapien
agcagcaatagcatgctttcggttt

SEQ ID NO: 1376718 - DNA, 25 bp, Homo sapien
tctttgtccaagttgtgcctatcag

SEQ ID NO: 1376719 - DNA, 25 bp, Homo sapien
taagattaattttgggttctaagca

SEQ ID NO: 1376720 - DNA, 25 bp, Homo sapien
gcctatcagactgtggctggacagt

SEQ ID NO: 1376721 - DNA, 25 bp, Homo sapien
tgaaggcttgctgttgatatactct

SEQ ID NO: 1376722 - DNA, 25 bp, Homo sapien
taggctgactgcatccgttgactga

SEQ ID NO: 1376723 - DNA, 25 bp, Homo sapien
gacagatctaggagctgtagcctca

SEQ ID NO: 1376724 - DNA, 25 bp, Homo sapien
tattaaagggagacaggagactaca

SEQ ID NO: 1376725 - DNA, 25 bp, Homo sapien
gaaagctacctggaagagccggcat

SEQ ID NO: 1376726 - DNA, 25 bp, Homo sapien
tcaggactccaaccagatctgctgg

SEQ ID NO: 1376727 - DNA, 25 bp, Homo sapien
tcaggcagtctgcttacttctcagt

SEQ ID NO: 1376728 - DNA, 25 bp, Homo sapien
ttcacccttgaatcccagtacctag

SEQ ID NO: 1376729 - DNA, 25 bp, Homo sapien
gctggaagggatctacgatatcttt

SEQ ID NO: 1376730 - DNA, 25 bp, Homo sapien
tcggctgtaacaggccaccctaaag

SEQ ID NO: 1376731 - DNA, 25 bp, Homo sapien
tcttaggtcatacagcagtgccgga

SEQ ID NO: 1376732 - DNA, 25 bp, Homo sapien
acttttcactgaggacgctgcggct

SEQ ID NO: 1376733 - DNA, 25 bp, Homo sapien
gcctcaatgggcgttcagtaacatc

SEQ ID NO: 1376734 - DNA, 25 bp, Homo sapien
tgctgggtgcgggacaagaagatgt

SEQ ID NO: 1376735 - DNA, 25 bp, Homo sapien
cataactgagaagagggattgtgct

SEQ ID NO: 1376736 - DNA, 25 bp, Homo sapien
gatgtctcaggccacgtaaagctgg

SEQ ID NO: 1376737 - DNA, 25 bp, Homo sapien
agcttgttcggctgcagtgatggca

SEQ ID NO: 1376738 - DNA, 25 bp, Homo sapien
gaagtctggaatgtaggatctggcc

SEQ ID NO: 1376739 - DNA, 25 bp, Homo sapien
gcagccactgctgttaacattgtaa

SEQ ID NO: 1376740 - DNA, 25 bp, Homo sapien
cttgatgctcgtgaactggtgacta

SEQ ID NO: 1376741 - DNA, 25 bp, Homo sapien
tatgatgaatctggtccctgctgcc

SEQ ID NO: 1376742 - DNA, 25 bp, Homo sapien
aaccaaatggatagggctttaggca

SEQ ID NO: 1376743 - DNA, 25 bp, Homo sapien
gaaagtgtaagaggctcttttgggc

SEQ ID NO: 1376744 - DNA, 25 bp, Homo sapien
ctttgtgattatgcttggtgagggc

SEQ ID NO: 1376745 - DNA, 25 bp, Homo sapien
caacttgatattgagcagtgaactt

SEQ ID NO: 1376746 - DNA, 25 bp, Homo sapien
ttttccctgaggctgttgtgcctca

SEQ ID NO: 1376747 - DNA, 25 bp, Homo sapien
tttccctgaggctgttgtgcctcat

SEQ ID NO: 1376748 - DNA, 25 bp, Homo sapien
tgtctgatgtggaatttggtgacct

SEQ ID NO: 1376749 - DNA, 25 bp, Homo sapien
tctgatgtggaatttggtgacctgg

SEQ ID NO: 1376750 - DNA, 25 bp, Homo sapien
ctgatgtggaatttggtgacctgga

SEQ ID NO: 1376751 - DNA, 25 bp, Homo sapien
tgatgtggaatttggtgacctggat

SEQ ID NO: 1376752 - DNA, 25 bp, Homo sapien
tgttacattagttgctaaaaaataa

SEQ ID NO: 1376753 - DNA, 25 bp, Homo sapien
aaagcaatgatttatggtattatga

SEQ ID NO: 1376754 - DNA, 25 bp, Homo sapien
cccggccctcgatgcatttttaatg

SEQ ID NO: 1376755 - DNA, 25 bp, Homo sapien
tatggtattatgatctaaatgcctt

SEQ ID NO: 1376756 - DNA, 25 bp, Homo sapien
tgagccgagatcacgctattgcact

SEQ ID NO: 1376757 - DNA, 25 bp, Homo sapien
gatcacgctattgcactcccctggg

SEQ ID NO: 1376758 - DNA, 25 bp, Homo sapien
cgagatcacgctattgcactcccct

SEQ ID NO: 1376759 - DNA, 25 bp, Homo sapien
gtgagccgagatcacgctattgcac

SEQ ID NO: 1376760 - DNA, 25 bp, Homo sapien
tcaaaggtctgttgaagtggtaaat

SEQ ID NO: 1376761 - DNA, 25 bp, Homo sapien
cgtgctttgaagctatcacaactca

SEQ ID NO: 1376762 - DNA, 25 bp, Homo sapien
tgttgaagtggtaaataaacgtgct

SEQ ID NO: 1376763 - DNA, 25 bp, Homo sapien
aataaacgtgctttgaagctatcac

SEQ ID NO: 1376764 - DNA, 25 bp, Homo sapien
tgcttaggggcagttatcacagttc

SEQ ID NO: 1376765 - DNA, 25 bp, Homo sapien
tcctagtaagccaagcttgtttctg

SEQ ID NO: 1376766 - DNA, 25 bp, Homo sapien
cttgtgtagttgaacttgcttaggg

SEQ ID NO: 1376767 - DNA, 25 bp, Homo sapien
tatcacagttcctagtaagccaagc

SEQ ID NO: 1376768 - DNA, 25 bp, Homo sapien
cacaacagtgcaataggtagaggat

SEQ ID NO: 1376769 - DNA, 25 bp, Homo sapien
ttgccagcagctataaagtgaacgt

SEQ ID NO: 1376770 - DNA, 25 bp, Homo sapien
taatggccaacgagtcacaacagtg

SEQ ID NO: 1376771 - DNA, 25 bp, Homo sapien
gaacgtactgagaccgacaggacag

SEQ ID NO: 1376772 - DNA, 25 bp, Homo sapien
gcctttatgaatccatcttcacacg

SEQ ID NO: 1376773 - DNA, 25 bp, Homo sapien
gagtatccttattttgccgctcaaa

SEQ ID NO: 1376774 - DNA, 25 bp, Homo sapien
tattttgccgctcaaatgtcccttg

SEQ ID NO: 1376775 - DNA, 25 bp, Homo sapien
ttcacacgcactgtttgccctgagt

SEQ ID NO: 1376776 - DNA, 25 bp, Homo sapien
gcaaaacatttgtacccttggacat

SEQ ID NO: 1376777 - DNA, 25 bp, Homo sapien
ttgaaaattagagggagaactagtc

SEQ ID NO: 1376778 - DNA, 25 bp, Homo sapien
tactgcagcaaccacttaaagatct

SEQ ID NO: 1376779 - DNA, 25 bp, Homo sapien
tgtttagacctctcttagcttggct

SEQ ID NO: 1376780 - DNA, 25 bp, Homo sapien
taaattacttagaagccaaggcgta

SEQ ID NO: 1376781 - DNA, 25 bp, Homo sapien
taacaactatagtaagctcacttgg

SEQ ID NO: 1376782 - DNA, 25 bp, Homo sapien
tctgagttaatgtgtctgttggcct

SEQ ID NO: 1376783 - DNA, 25 bp, Homo sapien
ctatccctaaacaaaaggcagatgt

SEQ ID NO: 1376784 - DNA, 25 bp, Homo sapien
gaagattctatattgtgagttttaa

SEQ ID NO: 1376785 - DNA, 25 bp, Homo sapien
gaaaaactggaagattctatattgt

SEQ ID NO: 1376786 - DNA, 25 bp, Homo sapien
aactggaagattctatattgtgagt

SEQ ID NO: 1376787 - DNA, 25 bp, Homo sapien
ctggaagattctatattgtgagttt

SEQ ID NO: 1376788 - DNA, 25 bp, Homo sapien
gccagagtccatcaaataacatctt

SEQ ID NO: 1376789 - DNA, 25 bp, Homo sapien
aacagtataagccagagtccatcaa

SEQ ID NO: 1376790 - DNA, 25 bp, Homo sapien
caaagaatgactgcagtatccacag

SEQ ID NO: 1376791 - DNA, 25 bp, Homo sapien
aagaatgactgcagtatccacagaa

SEQ ID NO: 1376792 - DNA, 25 bp, Homo sapien
tgtgctcctacgtgaaacccgagca

SEQ ID NO: 1376793 - DNA, 25 bp, Homo sapien
catgagcctcattctggttaccaca

SEQ ID NO: 1376794 - DNA, 25 bp, Homo sapien
caggtttggctccttccggtctgtg

SEQ ID NO: 1376795 - DNA, 25 bp, Homo sapien
cgagcaacattaaggctttcagggc

SEQ ID NO: 1376796 - DNA, 25 bp, Homo sapien
ggattgctaagaaccaactgtcccc

SEQ ID NO: 1376797 - DNA, 25 bp, Homo sapien
tatggctgagaaacggcagtaacct

SEQ ID NO: 1376798 - DNA, 25 bp, Homo sapien
gatggccgttgtctcttctaacagc

SEQ ID NO: 1376799 - DNA, 25 bp, Homo sapien
tcaagttacctaggctgcatgaagg

SEQ ID NO: 1376800 - DNA, 25 bp, Homo sapien
tctcaggtcaccctttttatttcag

SEQ ID NO: 1376801 - DNA, 25 bp, Homo sapien
gatgtatacttacagcatctcaggt

SEQ ID NO: 1376802 - DNA, 25 bp, Homo sapien
ggctggataagttgtttcaaataac

SEQ ID NO: 1376803 - DNA, 25 bp, Homo sapien
gctgtgttatccaacctcgatgtat

SEQ ID NO: 1376804 - DNA, 25 bp, Homo sapien
aacatgggccccaataacagcaggg

SEQ ID NO: 1376805 - DNA, 25 bp, Homo sapien
ccttataggctcaggatatgctgca

SEQ ID NO: 1376806 - DNA, 25 bp, Homo sapien
gaattaactcccaagtgacacactg

SEQ ID NO: 1376807 - DNA, 25 bp, Homo sapien
tttaaactgcataggtccacttgcc

SEQ ID NO: 1376808 - DNA, 25 bp, Homo sapien
gagcacacgacctagatcctcgcat

SEQ ID NO: 1376809 - DNA, 25 bp, Homo sapien
tcctctaagaatccaatgctgctgc

SEQ ID NO: 1376810 - DNA, 25 bp, Homo sapien
cgtcccatctggaagtgacgggaga

SEQ ID NO: 1376811 - DNA, 25 bp, Homo sapien
gggacccctgtggtatattatacac

SEQ ID NO: 1376812 - DNA, 25 bp, Homo sapien
ttattttgtagttacctcctgttgc

SEQ ID NO: 1376813 - DNA, 25 bp, Homo sapien
ttgctattgtggtgaactcaagtgt

SEQ ID NO: 1376814 - DNA, 25 bp, Homo sapien
ttgtggtgaactcaagtgtcaaaag

SEQ ID NO: 1376815 - DNA, 25 bp, Homo sapien
taaaaagttatatagatactagcct

SEQ ID NO: 1376816 - DNA, 25 bp, Homo sapien
tttgcctcaaagagattcttgcaaa

SEQ ID NO: 1376817 - DNA, 25 bp, Homo sapien
tgcctcaaagagattcttgcaaatt

SEQ ID NO: 1376818 - DNA, 25 bp, Homo sapien
ttgcctcaaagagattcttgcaaat

SEQ ID NO: 1376819 - DNA, 25 bp, Homo sapien
atttgcctcaaagagattcttgcaa

SEQ ID NO: 1376820 - DNA, 25 bp, Homo sapien
cacatagaacgtggaaaccatgttg

SEQ ID NO: 1376821 - DNA, 25 bp, Homo sapien
cactgtgttaggaaccacaactcag

SEQ ID NO: 1376822 - DNA, 25 bp, Homo sapien
tcaatgatgcttgtgataggacaca

SEQ ID NO: 1376823 - DNA, 25 bp, Homo sapien
cagatgatctatatggaaacaatgc

SEQ ID NO: 1376824 - DNA, 25 bp, Homo sapien
tagttgcccaaaagactatgtccag

SEQ ID NO: 1376825 - DNA, 25 bp, Homo sapien
tgcacacccagttggaaaaggactt

SEQ ID NO: 1376826 - DNA, 25 bp, Homo sapien
taactgtcacagtactgaagcgcaa

SEQ ID NO: 1376827 - DNA, 25 bp, Homo sapien
cattcattcgctttggcagagctga

SEQ ID NO: 1376828 - DNA, 25 bp, Homo sapien
gaaaggataactactcttgtgatat

SEQ ID NO: 1376829 - DNA, 25 bp, Homo sapien
gattaagggattcattgtcagtcca

SEQ ID NO: 1376830 - DNA, 25 bp, Homo sapien
tataacacctgagacagcagaaagg

SEQ ID NO: 1376831 - DNA, 25 bp, Homo sapien
taaatcctagaagatcacttataac

SEQ ID NO: 1376832 - DNA, 25 bp, Homo sapien
tacatgttttctcatagctactcag

SEQ ID NO: 1376833 - DNA, 25 bp, Homo sapien
aaacatcaaagaattgaaatgagat

SEQ ID NO: 1376834 - DNA, 25 bp, Homo sapien
acatgttttctcatagctactcagt

SEQ ID NO: 1376835 - DNA, 25 bp, Homo sapien
catgttttctcatagctactcagtg

SEQ ID NO: 1376836 - DNA, 25 bp, Homo sapien
tgcccttggcaaaattggccagggt

SEQ ID NO: 1376837 - DNA, 25 bp, Homo sapien
cagcgcagtccccagtcaaagtgca

SEQ ID NO: 1376838 - DNA, 25 bp, Homo sapien
cttggcaaaattggccagggtagca

SEQ ID NO: 1376839 - DNA, 25 bp, Homo sapien
attggccagggtagcagcgcagtcc

SEQ ID NO: 1376840 - DNA, 25 bp, Homo sapien
caccttgcaagggtaggtagtgtga

SEQ ID NO: 1376841 - DNA, 25 bp, Homo sapien
aggctgccagtcaccttgcaagggt

SEQ ID NO: 1376842 - DNA, 25 bp, Homo sapien
aagacagtaccaacgcccctggagg

SEQ ID NO: 1376843 - DNA, 25 bp, Homo sapien
agtgtgaggcttgctaatcttgttc

SEQ ID NO: 1376844 - DNA, 25 bp, Homo sapien
accatgattatagccccatggatgg

SEQ ID NO: 1376845 - DNA, 25 bp, Homo sapien
gaggataaagagcttgaccatgatt

SEQ ID NO: 1376846 - DNA, 25 bp, Homo sapien
ctcacacagggaggataaagagctt

SEQ ID NO: 1376847 - DNA, 25 bp, Homo sapien
gaccatgattatagccccatggatg

SEQ ID NO: 1376848 - DNA, 25 bp, Homo sapien
tgaacctggtccttgatgcacagag

SEQ ID NO: 1376849 - DNA, 25 bp, Homo sapien
tgtccttaatcttgcctccaggagc

SEQ ID NO: 1376850 - DNA, 25 bp, Homo sapien
tagtcctcaatggtgacaaatgcct

SEQ ID NO: 1376851 - DNA, 25 bp, Homo sapien
ccaacatagccgttgtagtcctcaa

SEQ ID NO: 1376852 - DNA, 25 bp, Homo sapien
tttcaacaacttggtggacagcttt

SEQ ID NO: 1376853 - DNA, 25 bp, Homo sapien
tcaacaacttggtggacagctttaa

SEQ ID NO: 1376854 - DNA, 25 bp, Homo sapien
acaacttggtggacagctttaatac

SEQ ID NO: 1376855 - DNA, 25 bp, Homo sapien
caacaacttggtggacagctttaat

SEQ ID NO: 1376856 - DNA, 25 bp, Homo sapien
taagctgttctttcttatttggctt

SEQ ID NO: 1376857 - DNA, 25 bp, Homo sapien
ttacttgcaacataacataattagc

SEQ ID NO: 1376858 - DNA, 25 bp, Homo sapien
cataattagcacgtaagcaccttga

SEQ ID NO: 1376859 - DNA, 25 bp, Homo sapien
tagctatcgctacagagaacatatg

SEQ ID NO: 1376860 - DNA, 25 bp, Homo sapien
tcctgatcagtctccctctggcaaa

SEQ ID NO: 1376861 - DNA, 25 bp, Homo sapien
ctaaccactaaacccaattgacagg

SEQ ID NO: 1376862 - DNA, 25 bp, Homo sapien
tgcaggaaccttacagcgtattacg

SEQ ID NO: 1376863 - DNA, 25 bp, Homo sapien
gcaaactgacttgtgaggtcctgta

SEQ ID NO: 1376864 - DNA, 25 bp, Homo sapien
tagatcttaattctcacagagcagg

SEQ ID NO: 1376865 - DNA, 25 bp, Homo sapien
cccagtgaggccagacgcaataaaa

SEQ ID NO: 1376866 - DNA, 25 bp, Homo sapien
cccagatcaaaaactcccagttata

SEQ ID NO: 1376867 - DNA, 25 bp, Homo sapien
aagcatcattcaggaaagttttatg

SEQ ID NO: 1376868 - DNA, 25 bp, Homo sapien
tcttattggtttcagaccccagtga

SEQ ID NO: 1376869 - DNA, 25 bp, Homo sapien
tatttaatcactatatatttctcta

SEQ ID NO: 1376870 - DNA, 25 bp, Homo sapien
ttatttaatcactatatatttctct

SEQ ID NO: 1376871 - DNA, 25 bp, Homo sapien
ctagattttctcctttagcaagggt

SEQ ID NO: 1376872 - DNA, 25 bp, Homo sapien
ctctaagttttctagattttctcct

SEQ ID NO: 1376873 - DNA, 25 bp, Homo sapien
aagtctaaaacagaaagtgaactct

SEQ ID NO: 1376874 - DNA, 25 bp, Homo sapien
aattagagcgatcttacagtttgaa

SEQ ID NO: 1376875 - DNA, 25 bp, Homo sapien
aaacagaaagtgaactctataatag

SEQ ID NO: 1376876 - DNA, 25 bp, Homo sapien
caactaaaattagagcgatcttaca

SEQ ID NO: 1376877 - DNA, 25 bp, Homo sapien
aagtgtcagtaggaaaaccgaggat

SEQ ID NO: 1376878 - DNA, 25 bp, Homo sapien
ggaaaaccgaggatacaaccacatc

SEQ ID NO: 1376879 - DNA, 25 bp, Homo sapien
accacatcaactgaacgctgtggcc

SEQ ID NO: 1376880 - DNA, 25 bp, Homo sapien
aagcaatcgaaagtgtcagtaggaa

SEQ ID NO: 1376881 - DNA, 25 bp, Homo sapien
tcactttgcccctaggaaatttaga

SEQ ID NO: 1376882 - DNA, 25 bp, Homo sapien
cactttgcccctaggaaatttagat

SEQ ID NO: 1376883 - DNA, 25 bp, Homo sapien
tgcctgacacccagaactacactgt

SEQ ID NO: 1376884 - DNA, 25 bp, Homo sapien
gaactacactgtctactgagtaact

SEQ ID NO: 1376885 - DNA, 25 bp, Homo sapien
agtctgtcagctgctgctataatct

SEQ ID NO: 1376886 - DNA, 25 bp, Homo sapien
cttgctgtccagcaagtctgtcagc

SEQ ID NO: 1376887 - DNA, 25 bp, Homo sapien
ttcctagctttcctggcagaagtaa

SEQ ID NO: 1376888 - DNA, 25 bp, Homo sapien
gataggaacgcagtgataaccatat

SEQ ID NO: 1376889 - DNA, 25 bp, Homo sapien
tagctttcctggcagaagtaatatg

SEQ ID NO: 1376890 - DNA, 25 bp, Homo sapien
ctttagataggaacgcagtgataac

SEQ ID NO: 1376891 - DNA, 25 bp, Homo sapien
tgggcaatagaacaacacccggtct

SEQ ID NO: 1376892 - DNA, 25 bp, Homo sapien
caatattttaaaccctccatccata

SEQ ID NO: 1376893 - DNA, 25 bp, Homo sapien
acactgaggtgcagatgctaagcag

SEQ ID NO: 1376894 - DNA, 25 bp, Homo sapien
tcggctaggctcactcactggctaa

SEQ ID NO: 1376895 - DNA, 25 bp, Homo sapien
tcctttattgcccacatcaacttga

SEQ ID NO: 1376896 - DNA, 25 bp, Homo sapien
tttattgcccacatcaacttgaaga

SEQ ID NO: 1376897 - DNA, 25 bp, Homo sapien
gcaactcaatggaatatcatataca

SEQ ID NO: 1376898 - DNA, 25 bp, Homo sapien
agcaactcaatggaatatcatatac

SEQ ID NO: 1376899 - DNA, 25 bp, Homo sapien
taataggtgtaacaggtggtgcccc

SEQ ID NO: 1376900 - DNA, 25 bp, Homo sapien
tctgataacctactccttgctgata

SEQ ID NO: 1376901 - DNA, 25 bp, Homo sapien
gaaatggactttagttggtcaaggc

SEQ ID NO: 1376902 - DNA, 25 bp, Homo sapien
tggtcaaggctcttctcacggaaaa

SEQ ID NO: 1376903 - DNA, 25 bp, Homo sapien
ttcccctcccagattattgcactaa

SEQ ID NO: 1376904 - DNA, 25 bp, Homo sapien
taactcgatcagaggaaggacttga

SEQ ID NO: 1376905 - DNA, 25 bp, Homo sapien
tatttccaacacagacatatccatc

SEQ ID NO: 1376906 - DNA, 25 bp, Homo sapien
tatccatctttttgcactcattccc

SEQ ID NO: 1376907 - DNA, 25 bp, Homo sapien
caagcatggtggctaatcaggaggc

SEQ ID NO: 1376908 - DNA, 25 bp, Homo sapien
gggagtgctacggagatcaacatca

SEQ ID NO: 1376909 - DNA, 25 bp, Homo sapien
gacatggtgagtttaccacactcaa

SEQ ID NO: 1376910 - DNA, 25 bp, Homo sapien
cgtgatactatgcataactactgaa

SEQ ID NO: 1376911 - DNA, 25 bp, Homo sapien
taagaggccaattgatcatctgatg

SEQ ID NO: 1376912 - DNA, 25 bp, Homo sapien
gaactattatcaccacataacagat

SEQ ID NO: 1376913 - DNA, 25 bp, Homo sapien
tattgggtatttactcttgccaggt

SEQ ID NO: 1376914 - DNA, 25 bp, Homo sapien
gacaatgtggaaatatttagcctaa

SEQ ID NO: 1376915 - DNA, 25 bp, Homo sapien
catgttgaggcttcgagagccacca

SEQ ID NO: 1376916 - DNA, 25 bp, Homo sapien
ggccatgtagcaggtcgtcccataa

SEQ ID NO: 1376917 - DNA, 25 bp, Homo sapien
tcagtctccgagtcatggcgggtgc

SEQ ID NO: 1376918 - DNA, 25 bp, Homo sapien
gatgaccggcactctgggccatgta

SEQ ID NO: 1376919 - DNA, 25 bp, Homo sapien
gctgaaggctgctgattcaaattct

SEQ ID NO: 1376920 - DNA, 25 bp, Homo sapien
tgaatcccgcacaatatgacaccac

SEQ ID NO: 1376921 - DNA, 25 bp, Homo sapien
aattctgattcagccagactatctg

SEQ ID NO: 1376922 - DNA, 25 bp, Homo sapien
gactatctgaatcccgcacaatatg

SEQ ID NO: 1376923 - DNA, 25 bp, Homo sapien
tacgcaataatatcatctgtgtccg

SEQ ID NO: 1376924 - DNA, 25 bp, Homo sapien
tctgtgtccgtgcttcaccatcttc

SEQ ID NO: 1376925 - DNA, 25 bp, Homo sapien
tcacaaccattgtcacttgaggccc

SEQ ID NO: 1376926 - DNA, 25 bp, Homo sapien
tcacttgacaggtcatcagacaccc

SEQ ID NO: 1376927 - DNA, 25 bp, Homo sapien
cttgttaaatccatctaaatcttac

SEQ ID NO: 1376928 - DNA, 25 bp, Homo sapien
cccttgttaaatccatctaaatctt

SEQ ID NO: 1376929 - DNA, 25 bp, Homo sapien
ccccttgttaaatccatctaaatct

SEQ ID NO: 1376930 - DNA, 25 bp, Homo sapien
ccttgttaaatccatctaaatctta

SEQ ID NO: 1376931 - DNA, 25 bp, Homo sapien
taatctctggtcgacattgtctcct

SEQ ID NO: 1376932 - DNA, 25 bp, Homo sapien
gataggatggacacaacttgggtca

SEQ ID NO: 1376933 - DNA, 25 bp, Homo sapien
tgtctcctcttaatgataggatgga

SEQ ID NO: 1376934 - DNA, 25 bp, Homo sapien
tgtcagtttcagtccctttgttaga

SEQ ID NO: 1376935 - DNA, 25 bp, Homo sapien
aaagccaggcagtgttgttcacagc

SEQ ID NO: 1376936 - DNA, 25 bp, Homo sapien
ggtatttctggacgcactctgggcc

SEQ ID NO: 1376937 - DNA, 25 bp, Homo sapien
tcagccagagtagaacaagggacca

SEQ ID NO: 1376938 - DNA, 25 bp, Homo sapien
tacaggcagggtacaagctcaacca

SEQ ID NO: 1376939 - DNA, 25 bp, Homo sapien
tccagccggtctgacatatttaaac

SEQ ID NO: 1376940 - DNA, 25 bp, Homo sapien
tgtccagccggtctgacatatttaa

SEQ ID NO: 1376941 - DNA, 25 bp, Homo sapien
ccactatgtccagccggtctgacat

SEQ ID NO: 1376942 - DNA, 25 bp, Homo sapien
cggtctgacatatttaaactgctaa

SEQ ID NO: 1376943 - DNA, 25 bp, Homo sapien
tctatcgcatagtcagggcacaaat

SEQ ID NO: 1376944 - DNA, 25 bp, Homo sapien
ttgcctttaaccacacccaaatcac

SEQ ID NO: 1376945 - DNA, 25 bp, Homo sapien
cttttctatcgcatagtcagggcac

SEQ ID NO: 1376946 - DNA, 25 bp, Homo sapien
tataaaactgattgcctttaaccac

SEQ ID NO: 1376947 - DNA, 25 bp, Homo sapien
caccaataatgggtacagattccaa

SEQ ID NO: 1376948 - DNA, 25 bp, Homo sapien
atttccattttctcggctcccatca

SEQ ID NO: 1376949 - DNA, 25 bp, Homo sapien
ctgttgccaaagatagtctcccaaa

SEQ ID NO: 1376950 - DNA, 25 bp, Homo sapien
tcggctcccatcaccatttacagtt

SEQ ID NO: 1376951 - DNA, 25 bp, Homo sapien
ttaaaagtttagacggctgggtgca

SEQ ID NO: 1376952 - DNA, 25 bp, Homo sapien
tatttagtaattgcttacgcaggca

SEQ ID NO: 1376953 - DNA, 25 bp, Homo sapien
cattgcacctaatggaaaattctta

SEQ ID NO: 1376954 - DNA, 25 bp, Homo sapien
attctgagggaagataacataactt

SEQ ID NO: 1376955 - DNA, 25 bp, Homo sapien
tcttcttcgatttccattgtttcct

SEQ ID NO: 1376956 - DNA, 25 bp, Homo sapien
ttccattgtttcctgatggtcttgt

SEQ ID NO: 1376957 - DNA, 25 bp, Homo sapien
ttcccatgagtagcataaggcacaa

SEQ ID NO: 1376958 - DNA, 25 bp, Homo sapien
ggcacaagggtccaagtacttcact

SEQ ID NO: 1376959 - DNA, 25 bp, Homo sapien
gtacttcacttatgttcacaatagg

SEQ ID NO: 1376960 - DNA, 25 bp, Homo sapien
tcacaataggcatcatcaaatataa

SEQ ID NO: 1376961 - DNA, 25 bp, Homo sapien
ttttgttgtatcagcccaagtggca

SEQ ID NO: 1376962 - DNA, 25 bp, Homo sapien
tgggtggagactagacgaatacttg

SEQ ID NO: 1376963 - DNA, 25 bp, Homo sapien
tattaacgagattccagagagctcc

SEQ ID NO: 1376964 - DNA, 25 bp, Homo sapien
gaatctgctagtgctctgatctgaa

SEQ ID NO: 1376965 - DNA, 25 bp, Homo sapien
tgaatccaccaattgctgaacaatg

SEQ ID NO: 1376966 - DNA, 25 bp, Homo sapien
aacaagccccttccgagtcagagat

SEQ ID NO: 1376967 - DNA, 25 bp, Homo sapien
agagatgtccatggaatttcaggtt

SEQ ID NO: 1376968 - DNA, 25 bp, Homo sapien
ttcttaaagaggtaacctgaatcca

SEQ ID NO: 1376969 - DNA, 25 bp, Homo sapien
tcaagtctggctttatgtggcccat

SEQ ID NO: 1376970 - DNA, 25 bp, Homo sapien
taagtcaacgtcaatcaagtctggc

SEQ ID NO: 1376971 - DNA, 25 bp, Homo sapien
aacgtcaatcaagtctggctttatg

SEQ ID NO: 1376972 - DNA, 25 bp, Homo sapien
tctgattaagtcaacgtcaatcaag

SEQ ID NO: 1376973 - DNA, 25 bp, Homo sapien
tcactttacggataaggcaaccaag

SEQ ID NO: 1376974 - DNA, 25 bp, Homo sapien
cgtgctatgactttaggatggctac

SEQ ID NO: 1376975 - DNA, 25 bp, Homo sapien
caatgggcattatgagtggatttcc

SEQ ID NO: 1376976 - DNA, 25 bp, Homo sapien
ccattgtcgtatatgaggtccattg

SEQ ID NO: 1376977 - DNA, 25 bp, Homo sapien
aaacaagtgaaaccctgtgagaaat

SEQ ID NO: 1376978 - DNA, 25 bp, Homo sapien
caagtgaaaccctgtgagaaatctc

SEQ ID NO: 1376979 - DNA, 25 bp, Homo sapien
aaccctgtgagaaatctctatttcc

SEQ ID NO: 1376980 - DNA, 25 bp, Homo sapien
accctgtgagaaatctctatttcct

SEQ ID NO: 1376981 - DNA, 25 bp, Homo sapien
tacaggaacatccataaaggacacc

SEQ ID NO: 1376982 - DNA, 25 bp, Homo sapien
tacaaggcaagtatagcactacagg

SEQ ID NO: 1376983 - DNA, 25 bp, Homo sapien
tgcagagagggaagttacccctgat

SEQ ID NO: 1376984 - DNA, 25 bp, Homo sapien
taagaagtccaagaaagatttccac

SEQ ID NO: 1376985 - DNA, 25 bp, Homo sapien
tcacatgacagtaagtgcagccata

SEQ ID NO: 1376986 - DNA, 25 bp, Homo sapien
ggaaggcactgcaactcacatgaca

SEQ ID NO: 1376987 - DNA, 25 bp, Homo sapien
caagcaaatcccctgactaaggtgg

SEQ ID NO: 1376988 - DNA, 25 bp, Homo sapien
tttggcaccggtataaataaagcat

SEQ ID NO: 1376989 - DNA, 25 bp, Homo sapien
tatctgcttccaatatgctcgaaca

SEQ ID NO: 1376990 - DNA, 25 bp, Homo sapien
tgcttgtcctagaactgtaattgcc

SEQ ID NO: 1376991 - DNA, 25 bp, Homo sapien
tgctcgaacacaacatatatcagtt

SEQ ID NO: 1376992 - DNA, 25 bp, Homo sapien
cagatataaggtatcatcctgagac

SEQ ID NO: 1376993 - DNA, 25 bp, Homo sapien
ctttttctggaacatctattagttg

SEQ ID NO: 1376994 - DNA, 25 bp, Homo sapien
accatgcccaacgaaaagatccttt

SEQ ID NO: 1376995 - DNA, 25 bp, Homo sapien
tattagttggatattacatttcctg

SEQ ID NO: 1376996 - DNA, 25 bp, Homo sapien
gcatgaattgcactcactttgctat

SEQ ID NO: 1376997 - DNA, 25 bp, Homo sapien
caagctcagtgtgcaatgcgtgaag

SEQ ID NO: 1376998 - DNA, 25 bp, Homo sapien
tagaggcgtggccagtcatttcact

SEQ ID NO: 1376999 - DNA, 25 bp, Homo sapien
tcaacccggtcttctgtcagaggaa

SEQ ID NO: 1377000 - DNA, 25 bp, Homo sapien
tagtggacctcactatagaggcgtg

SEQ ID NO: 1377001 - DNA, 25 bp, Homo sapien
tatctttttgtagagctatgttgcc

SEQ ID NO: 1377002 - DNA, 25 bp, Homo sapien
cggcctcgagcaaaaacctcggctt

SEQ ID NO: 1377003 - DNA, 25 bp, Homo sapien
gatagctctcatttactgtagtctc

SEQ ID NO: 1377004 - DNA, 25 bp, Homo sapien
attctttaagtccttgcaggctgcc

SEQ ID NO: 1377005 - DNA, 25 bp, Homo sapien
catatctgctgatcgtaggctccaa

SEQ ID NO: 1377006 - DNA, 25 bp, Homo sapien
ccatatctgctgatcgtaggctcca

SEQ ID NO: 1377007 - DNA, 25 bp, Homo sapien
tctgttcgattgacttttcccatat

SEQ ID NO: 1377008 - DNA, 25 bp, Homo sapien
cttaatctgagtctgttcgattgac

SEQ ID NO: 1377009 - DNA, 25 bp, Homo sapien
cttaaaagatatttccacttcttgg

SEQ ID NO: 1377010 - DNA, 25 bp, Homo sapien
atatttccacttcttgggcgggcat

SEQ ID NO: 1377011 - DNA, 25 bp, Homo sapien
agatatttccacttcttgggcgggc

SEQ ID NO: 1377012 - DNA, 25 bp, Homo sapien
aaagatatttccacttcttgggcgg

SEQ ID NO: 1377013 - DNA, 25 bp, Homo sapien
cttcttttggtaccacgatatagca

SEQ ID NO: 1377014 - DNA, 25 bp, Homo sapien
ggtaccacgatatagcatctctctc

SEQ ID NO: 1377015 - DNA, 25 bp, Homo sapien
cttttggtaccacgatatagcatct

SEQ ID NO: 1377016 - DNA, 25 bp, Homo sapien
tttggtaccacgatatagcatctct

SEQ ID NO: 1377017 - DNA, 25 bp, Homo sapien
ctgtgtctccagccagagaatggga

SEQ ID NO: 1377018 - DNA, 25 bp, Homo sapien
tctccagccagagaatgggatttca

SEQ ID NO: 1377019 - DNA, 25 bp, Homo sapien
tgtgtctccagccagagaatgggat

SEQ ID NO: 1377020 - DNA, 25 bp, Homo sapien
tgtctccagccagagaatgggattt

SEQ ID NO: 1377021 - DNA, 25 bp, Homo sapien
tgagtccagctgctgaaggttactc

SEQ ID NO: 1377022 - DNA, 25 bp, Homo sapien
ctctcccagtttgggtaggacgcga

SEQ ID NO: 1377023 - DNA, 25 bp, Homo sapien
taggacgcgaaaaccgcttctctca

SEQ ID NO: 1377024 - DNA, 25 bp, Homo sapien
tgaaggaaaaccaatcggtgagtcc

SEQ ID NO: 1377025 - DNA, 25 bp, Homo sapien
aaaaaactggcgcagcggcgaccgg

SEQ ID NO: 1377026 - DNA, 25 bp, Homo sapien
tctgcaatatatcgggcgagcgtgt

SEQ ID NO: 1377027 - DNA, 25 bp, Homo sapien
cggagaagcctctgcaatatatcgg

SEQ ID NO: 1377028 - DNA, 25 bp, Homo sapien
aatatatcgggcgagcgtgttcgtg

SEQ ID NO: 1377029 - DNA, 25 bp, Homo sapien
gcccgggacctccgtcctcagtgcc

SEQ ID NO: 1377030 - DNA, 25 bp, Homo sapien
ctagtgcccgttgccccgcgggccg

SEQ ID NO: 1377031 - DNA, 25 bp, Homo sapien
gcgcccgggacctccgtcctcagtg

SEQ ID NO: 1377032 - DNA, 25 bp, Homo sapien
cgcccgggacctccgtcctcagtgc

SEQ ID NO: 1377033 - DNA, 25 bp, Homo sapien
gcggagacgccggagaggccgttac

SEQ ID NO: 1377034 - DNA, 25 bp, Homo sapien
cttcccctccaggcggagacgccgg

SEQ ID NO: 1377035 - DNA, 25 bp, Homo sapien
aggcggagacgccggagaggccgtt

SEQ ID NO: 1377036 - DNA, 25 bp, Homo sapien
ccctccaggcggagacgccggagag

SEQ ID NO: 1377037 - DNA, 25 bp, Homo sapien
ggctttgtgcccagctggaaaagac

SEQ ID NO: 1377038 - DNA, 25 bp, Homo sapien
cagggtcacggactgaccagaaaat

SEQ ID NO: 1377039 - DNA, 25 bp, Homo sapien
ggcggcaaatcgatcgccggtcaga

SEQ ID NO: 1377040 - DNA, 25 bp, Homo sapien
tcgccacggcgacagcaaaaggctt

SEQ ID NO: 1377041 - DNA, 25 bp, Homo sapien
cgccgaggtggctccgcccctggcc

SEQ ID NO: 1377042 - DNA, 25 bp, Homo sapien
ctttccggctttcgccgccgaggtg

SEQ ID NO: 1377043 - DNA, 25 bp, Homo sapien
gccgaggtggctccgcccctggccc

SEQ ID NO: 1377044 - DNA, 25 bp, Homo sapien
tccgctttccggctttcgccgccga

SEQ ID NO: 1377045 - DNA, 25 bp, Homo sapien
tcccatccagcggtctaaaggaggt

SEQ ID NO: 1377046 - DNA, 25 bp, Homo sapien
aaggaggtcggtcctgatactctag

SEQ ID NO: 1377047 - DNA, 25 bp, Homo sapien
gactctcccatccagcggtctaaag

SEQ ID NO: 1377048 - DNA, 25 bp, Homo sapien
cagcggtctaaaggaggtcggtcct

SEQ ID NO: 1377049 - DNA, 25 bp, Homo sapien
gtttcatggcttaatctctgttccc

SEQ ID NO: 1377050 - DNA, 25 bp, Homo sapien
ttcatggcttaatctctgttcccca

SEQ ID NO: 1377051 - DNA, 25 bp, Homo sapien
ggcactcattttcgtgtttcatggc

SEQ ID NO: 1377052 - DNA, 25 bp, Homo sapien
ttgtggcactcattttcgtgtttca

SEQ ID NO: 1377053 - DNA, 25 bp, Homo sapien
caaaatgtgaggatgccaggaagca

SEQ ID NO: 1377054 - DNA, 25 bp, Homo sapien
tggtctcaactacatgcacaagtgg

SEQ ID NO: 1377055 - DNA, 25 bp, Homo sapien
gatgtgaacctctggcatgtgctag

SEQ ID NO: 1377056 - DNA, 25 bp, Homo sapien
gaagacgccagattgctccatgcct

SEQ ID NO: 1377057 - DNA, 25 bp, Homo sapien
tgaacctgtgccataaagacacaag

SEQ ID NO: 1377058 - DNA, 25 bp, Homo sapien
gcaacctatgccattttcactgtag

SEQ ID NO: 1377059 - DNA, 25 bp, Homo sapien
gaaagtagcagcagacccactatta

SEQ ID NO: 1377060 - DNA, 25 bp, Homo sapien
tactaacgggataagatacaactct

SEQ ID NO: 1377061 - DNA, 25 bp, Homo sapien
taaaactggaataggctgagtcttc

SEQ ID NO: 1377062 - DNA, 25 bp, Homo sapien
cattgtcgcaaagctgaattctagc

SEQ ID NO: 1377063 - DNA, 25 bp, Homo sapien
tgcacaccgccgaaactgttttgaa

SEQ ID NO: 1377064 - DNA, 25 bp, Homo sapien
cagattgtgttgctggtcagagtcc

SEQ ID NO: 1377065 - DNA, 25 bp, Homo sapien
ctgggaaactggaggttcatgaaga

SEQ ID NO: 1377066 - DNA, 25 bp, Homo sapien
caacatcagtaaaatcctcagcatg

SEQ ID NO: 1377067 - DNA, 25 bp, Homo sapien
taactgaagtctttgtacaacatca

SEQ ID NO: 1377068 - DNA, 25 bp, Homo sapien
ctttggttatgcgaggttggtcact

SEQ ID NO: 1377069 - DNA, 25 bp, Homo sapien
tcaaagagaacttcgcggggttcac

SEQ ID NO: 1377070 - DNA, 25 bp, Homo sapien
cagtcaaacccctgaccgacatgat

SEQ ID NO: 1377071 - DNA, 25 bp, Homo sapien
agcagccgtactctgccagtcaaac

SEQ ID NO: 1377072 - DNA, 25 bp, Homo sapien
catgatcagcatgagctctagtcct

SEQ ID NO: 1377073 - DNA, 25 bp, Homo sapien
tggaaaatgatcctagtacctgaga

SEQ ID NO: 1377074 - DNA, 25 bp, Homo sapien
gattcaagattgcaaaccaggcatc

SEQ ID NO: 1377075 - DNA, 25 bp, Homo sapien
cagaccttggaaaagcctgagtcca

SEQ ID NO: 1377076 - DNA, 25 bp, Homo sapien
aatacacaagaagggatcagcagcc

SEQ ID NO: 1377077 - DNA, 25 bp, Homo sapien
tacctggaaaaacatgtaaatctct

SEQ ID NO: 1377078 - DNA, 25 bp, Homo sapien
ggtacagctgcctaactacctggaa

SEQ ID NO: 1377079 - DNA, 25 bp, Homo sapien
tctcttcctctatactgaagccaat

SEQ ID NO: 1377080 - DNA, 25 bp, Homo sapien
tgctaaaggagaaacctcaaaggat

SEQ ID NO: 1377081 - DNA, 25 bp, Homo sapien
ctgctgtagggatcatctgttctcc

SEQ ID NO: 1377082 - DNA, 25 bp, Homo sapien
cgtcgtcttttgaagggtgactttg

SEQ ID NO: 1377083 - DNA, 25 bp, Homo sapien
tagggatcatctgttctcctggcct

SEQ ID NO: 1377084 - DNA, 25 bp, Homo sapien
tgactttggcatatctgctgtaggg

SEQ ID NO: 1377085 - DNA, 25 bp, Homo sapien
gacctacactggagtcggaggctag

SEQ ID NO: 1377086 - DNA, 25 bp, Homo sapien
gaggctagaaagtgtaccccagggc

SEQ ID NO: 1377087 - DNA, 25 bp, Homo sapien
ggacctacactggagtcggaggcta

SEQ ID NO: 1377088 - DNA, 25 bp, Homo sapien
acctacactggagtcggaggctaga

SEQ ID NO: 1377089 - DNA, 25 bp, Homo sapien
tcggtaggtgccacagcagtatgtc

SEQ ID NO: 1377090 - DNA, 25 bp, Homo sapien
tatctgccgcataggacctgctcgg

SEQ ID NO: 1377091 - DNA, 25 bp, Homo sapien
tactgctccaacgagacttatctgc

SEQ ID NO: 1377092 - DNA, 25 bp, Homo sapien
aacttcttcatctactgctccaacg

SEQ ID NO: 1377093 - DNA, 25 bp, Homo sapien
tttggaacctgaaagagcaactact

SEQ ID NO: 1377094 - DNA, 25 bp, Homo sapien
tggaggaggatcaggtttcactgtt

SEQ ID NO: 1377095 - DNA, 25 bp, Homo sapien
tgaaagagcaactactctctcttct

SEQ ID NO: 1377096 - DNA, 25 bp, Homo sapien
gaacctgaaagagcaactactctct

SEQ ID NO: 1377097 - DNA, 25 bp, Homo sapien
tcaaatgaaaggaactagagtaatg

SEQ ID NO: 1377098 - DNA, 25 bp, Homo sapien
tagagtaatggtagatggtatatgg

SEQ ID NO: 1377099 - DNA, 25 bp, Homo sapien
tttgtagaggtcagataagattatc

SEQ ID NO: 1377100 - DNA, 25 bp, Homo sapien
gatggtatatggtttaaaacagtgt

SEQ ID NO: 1377101 - DNA, 25 bp, Homo sapien
gatcagagtgcatataacaagccca

SEQ ID NO: 1377102 - DNA, 25 bp, Homo sapien
aggagaatccgttgagaccaggtgc

SEQ ID NO: 1377103 - DNA, 25 bp, Homo sapien
tacagattttgagacctatatggcc

SEQ ID NO: 1377104 - DNA, 25 bp, Homo sapien
tccgaacatgctaggaggccaaagc

SEQ ID NO: 1377105 - DNA, 25 bp, Homo sapien
cacagaaaccggctttttcaaccat

SEQ ID NO: 1377106 - DNA, 25 bp, Homo sapien
aactgagctcatcaacaccctctag

SEQ ID NO: 1377107 - DNA, 25 bp, Homo sapien
tgtattggctttgaccagcatcgcc

SEQ ID NO: 1377108 - DNA, 25 bp, Homo sapien
aggttcaagccagcatcccaagcag

SEQ ID NO: 1377109 - DNA, 25 bp, Homo sapien
gacttcaggtaagtccacactgccc

SEQ ID NO: 1377110 - DNA, 25 bp, Homo sapien
tcaaagtttagtcggctaatccaac

SEQ ID NO: 1377111 - DNA, 25 bp, Homo sapien
tgcatgctgtttcacacggagatac

SEQ ID NO: 1377112 - DNA, 25 bp, Homo sapien
gcactaatctcttctccatggtaaa

SEQ ID NO: 1377113 - DNA, 25 bp, Homo sapien
gacgaagccctttattgcacatggt

SEQ ID NO: 1377114 - DNA, 25 bp, Homo sapien
ctggttgtggtaataaggccaaaat

SEQ ID NO: 1377115 - DNA, 25 bp, Homo sapien
atggtgttccaacatcttgggcagc

SEQ ID NO: 1377116 - DNA, 25 bp, Homo sapien
taaggccaaaatccaagacgaagcc

SEQ ID NO: 1377117 - DNA, 25 bp, Homo sapien
ggatactcccctcattggaggcaaa

SEQ ID NO: 1377118 - DNA, 25 bp, Homo sapien
gagagaacttcaattagagaaattc

SEQ ID NO: 1377119 - DNA, 25 bp, Homo sapien
ctgcagagagaacttcaattagaga

SEQ ID NO: 1377120 - DNA, 25 bp, Homo sapien
ctggatactcccctcattggaggca

SEQ ID NO: 1377121 - DNA, 25 bp, Homo sapien
acaacaatgtataggcagaaggagc

SEQ ID NO: 1377122 - DNA, 25 bp, Homo sapien
ttaagcctagctgcccatgcaaggc

SEQ ID NO: 1377123 - DNA, 25 bp, Homo sapien
tggttaagaagcagacgtttccctg

SEQ ID NO: 1377124 - DNA, 25 bp, Homo sapien
gagcagaggctatggcggtcttcct

SEQ ID NO: 1377125 - DNA, 25 bp, Homo sapien
tcaaaaatgtgctggtatgtgctgt

SEQ ID NO: 1377126 - DNA, 25 bp, Homo sapien
gaggttaattctgtttagaatcgta

SEQ ID NO: 1377127 - DNA, 25 bp, Homo sapien
gctgtgcgacagaaagaggttaatt

SEQ ID NO: 1377128 - DNA, 25 bp, Homo sapien
tgctggtatgtgctgtgcgacagaa

SEQ ID NO: 1377129 - DNA, 25 bp, Homo sapien
tgtttcaatatctttcttgcccaga

SEQ ID NO: 1377130 - DNA, 25 bp, Homo sapien
ctgagtgtgaaaatttgaaatggtg

SEQ ID NO: 1377131 - DNA, 25 bp, Homo sapien
tgtgaaaatttgaaatggtggttgt

SEQ ID NO: 1377132 - DNA, 25 bp, Homo sapien
ttcttgcccagaatttccattttca

SEQ ID NO: 1377133 - DNA, 25 bp, Homo sapien
tggagtgttggggaaattaaaagca

SEQ ID NO: 1377134 - DNA, 25 bp, Homo sapien
attaaaagcaaagtagtccaagaag

SEQ ID NO: 1377135 - DNA, 25 bp, Homo sapien
gccgctccatgcactattgctaaag

SEQ ID NO: 1377136 - DNA, 25 bp, Homo sapien
tgaatgtcaaagcaagaaactcctc

SEQ ID NO: 1377137 - DNA, 25 bp, Homo sapien
gcagccgctccatgcactattgcta

SEQ ID NO: 1377138 - DNA, 25 bp, Homo sapien
taaagcatagtaagcagcatttttc

SEQ ID NO: 1377139 - DNA, 25 bp, Homo sapien
tgaataaagttgctaaatttagtac

SEQ ID NO: 1377140 - DNA, 25 bp, Homo sapien
cctcatgaataaagttgctaaattt

SEQ ID NO: 1377141 - DNA, 25 bp, Homo sapien
tcatgaataaagttgctaaatttag

SEQ ID NO: 1377142 - DNA, 25 bp, Homo sapien
cattggactggtgttcctcatgaat

SEQ ID NO: 1377143 - DNA, 25 bp, Homo sapien
cataaaaggtgtttgtactccctgg

SEQ ID NO: 1377144 - DNA, 25 bp, Homo sapien
cattttaaggcgtcttcctcgcatg

SEQ ID NO: 1377145 - DNA, 25 bp, Homo sapien
tcaggccagcacagacggtttgtac

SEQ ID NO: 1377146 - DNA, 25 bp, Homo sapien
aagacaaaatcatcggctctctggg

SEQ ID NO: 1377147 - DNA, 25 bp, Homo sapien
gctgtcagcctatgaattactatga

SEQ ID NO: 1377148 - DNA, 25 bp, Homo sapien
ggactagtgtcaacatacaagcttc

SEQ ID NO: 1377149 - DNA, 25 bp, Homo sapien
ggtacttgatctcattaaatagcct

SEQ ID NO: 1377150 - DNA, 25 bp, Homo sapien
tgaatttgctattacaacttacgtg

SEQ ID NO: 1377151 - DNA, 25 bp, Homo sapien
cttaacacatgtacattctgatccc

SEQ ID NO: 1377152 - DNA, 25 bp, Homo sapien
tctcctgagcacttaacacatgtac

SEQ ID NO: 1377153 - DNA, 25 bp, Homo sapien
ctttctctcctgagcacttaacaca

SEQ ID NO: 1377154 - DNA, 25 bp, Homo sapien
taacacatgtacattctgatcccat

SEQ ID NO: 1377155 - DNA, 25 bp, Homo sapien
agaacccaagccgggcagtttgcct

SEQ ID NO: 1377156 - DNA, 25 bp, Homo sapien
gaacccaagccgggcagtttgcctg

SEQ ID NO: 1377157 - DNA, 25 bp, Homo sapien
ctagaacccaagccgggcagtttgc

SEQ ID NO: 1377158 - DNA, 25 bp, Homo sapien
tagaacccaagccgggcagtttgcc

SEQ ID NO: 1377159 - DNA, 25 bp, Homo sapien
tttgatcagaggcacccctccagtc

SEQ ID NO: 1377160 - DNA, 25 bp, Homo sapien
tagatcggcgctgccgtttaactcc

SEQ ID NO: 1377161 - DNA, 25 bp, Homo sapien
cgctcaccgtcagaggcgagaaggt

SEQ ID NO: 1377162 - DNA, 25 bp, Homo sapien
tccttgtgcttgagatcggttccgc

SEQ ID NO: 1377163 - DNA, 25 bp, Homo sapien
cccccgtccgcgcatcgcgcaagcg

SEQ ID NO: 1377164 - DNA, 25 bp, Homo sapien
ccgcgcatcgcgcaagcgccgcccg

SEQ ID NO: 1377165 - DNA, 25 bp, Homo sapien
ccgtccgcgcatcgcgcaagcgccg

SEQ ID NO: 1377166 - DNA, 25 bp, Homo sapien
gaccgcccccccgtccgcgcatcgc

SEQ ID NO: 1377167 - DNA, 25 bp, Homo sapien
ctccgccctccacttgtcggccgtt

SEQ ID NO: 1377168 - DNA, 25 bp, Homo sapien
ttgtcggccgttcttcgtccagaga

SEQ ID NO: 1377169 - DNA, 25 bp, Homo sapien
gccgttcttcgtccagagatgaaca

SEQ ID NO: 1377170 - DNA, 25 bp, Homo sapien
cacttgtcggccgttcttcgtccag

SEQ ID NO: 1377171 - DNA, 25 bp, Homo sapien
tattgtaaagcaccctatgccgcgc

SEQ ID NO: 1377172 - DNA, 25 bp, Homo sapien
gaagcggccgttcccagcttttctc

SEQ ID NO: 1377173 - DNA, 25 bp, Homo sapien
tatgccgcgcaaagcgtcatgggag

SEQ ID NO: 1377174 - DNA, 25 bp, Homo sapien
aggcctctccaaccgagcttctatt

SEQ ID NO: 1377175 - DNA, 25 bp, Homo sapien
gcttctggctgcgacgcaaccgccg

SEQ ID NO: 1377176 - DNA, 25 bp, Homo sapien
tggctgcgacgcaaccgccgctggg

SEQ ID NO: 1377177 - DNA, 25 bp, Homo sapien
gctgggcggtgagttgccgccaacc

SEQ ID NO: 1377178 - DNA, 25 bp, Homo sapien
gggcggtgagttgccgccaaccgcc

SEQ ID NO: 1377179 - DNA, 25 bp, Homo sapien
gtctggcggcgcgttcccattatca

SEQ ID NO: 1377180 - DNA, 25 bp, Homo sapien
taacggccgaaacaatgttaatggc

SEQ ID NO: 1377181 - DNA, 25 bp, Homo sapien
ggcgcgttcccattatcatcttcct

SEQ ID NO: 1377182 - DNA, 25 bp, Homo sapien
gctttcagagtctggcggcgcgttc

SEQ ID NO: 1377183 - DNA, 25 bp, Homo sapien
gggcggggctcggtgtctcaggccg

SEQ ID NO: 1377184 - DNA, 25 bp, Homo sapien
gagttccagatcagcgttggtaaca

SEQ ID NO: 1377185 - DNA, 25 bp, Homo sapien
ggggctcggtgtctcaggccggtaa

SEQ ID NO: 1377186 - DNA, 25 bp, Homo sapien
tccagatcagcgttggtaacatagt

SEQ ID NO: 1377187 - DNA, 25 bp, Homo sapien
caaggtatactccatttaggcaaaa

SEQ ID NO: 1377188 - DNA, 25 bp, Homo sapien
taggcaaaaataactgtcagggaat

SEQ ID NO: 1377189 - DNA, 25 bp, Homo sapien
tcaagagcagtttgtattgcaaccc

SEQ ID NO: 1377190 - DNA, 25 bp, Homo sapien
tgagtgtctgttggatacattgtac

SEQ ID NO: 1377191 - DNA, 25 bp, Homo sapien
tatgaaaatgcaaaactggcactta

SEQ ID NO: 1377192 - DNA, 25 bp, Homo sapien
aaactggcacttattggcattttgc

SEQ ID NO: 1377193 - DNA, 25 bp, Homo sapien
tattaacacattagcatatcttcat

SEQ ID NO: 1377194 - DNA, 25 bp, Homo sapien
tgatattatgcatatagagcactta

SEQ ID NO: 1377195 - DNA, 25 bp, Homo sapien
tccaagttggtggtggattccttgg

SEQ ID NO: 1377196 - DNA, 25 bp, Homo sapien
tattccaagttggtggtggattcct

SEQ ID NO: 1377197 - DNA, 25 bp, Homo sapien
aatattccaagttggtggtggattc

SEQ ID NO: 1377198 - DNA, 25 bp, Homo sapien
ttccaagttggtggtggattccttg

SEQ ID NO: 1377199 - DNA, 25 bp, Homo sapien
tcagaaatgagctggagttatttga

SEQ ID NO: 1377200 - DNA, 25 bp, Homo sapien
tgcaggcttgtttggtgggcaagaa

SEQ ID NO: 1377201 - DNA, 25 bp, Homo sapien
tgagctggagttatttgactgaaca

SEQ ID NO: 1377202 - DNA, 25 bp, Homo sapien
tctgcaggcttgtttggtgggcaag

SEQ ID NO: 1377203 - DNA, 25 bp, Homo sapien
atgttaacaaaatgtaggtgcttac

SEQ ID NO: 1377204 - DNA, 25 bp, Homo sapien
gatcagatcacatataattgttaag

SEQ ID NO: 1377205 - DNA, 25 bp, Homo sapien
gggaaagactaaagacagactcaga

SEQ ID NO: 1377206 - DNA, 25 bp, Homo sapien
ctcagatgactgttgatcagatcac

SEQ ID NO: 1377207 - DNA, 25 bp, Homo sapien
ttgttccctctatctgaaatactct

SEQ ID NO: 1377208 - DNA, 25 bp, Homo sapien
gctgctccttcatgttttgggttca

SEQ ID NO: 1377209 - DNA, 25 bp, Homo sapien
ttttgttccctctatctgaaatact

SEQ ID NO: 1377210 - DNA, 25 bp, Homo sapien
gattttgttccctctatctgaaata

SEQ ID NO: 1377211 - DNA, 25 bp, Homo sapien
tttttcatgtttcgcaaaattttca

SEQ ID NO: 1377212 - DNA, 25 bp, Homo sapien
ttcatgtttcgcaaaattttcaaac

SEQ ID NO: 1377213 - DNA, 25 bp, Homo sapien
tttcatgtttcgcaaaattttcaaa

SEQ ID NO: 1377214 - DNA, 25 bp, Homo sapien
tcatgtttcgcaaaattttcaaact

SEQ ID NO: 1377215 - DNA, 25 bp, Homo sapien
ccatgctgggcctatcatgccattt

SEQ ID NO: 1377216 - DNA, 25 bp, Homo sapien
tattcgaatatctgctaaggtgact

SEQ ID NO: 1377217 - DNA, 25 bp, Homo sapien
ccattttaattgaggctttgccata

SEQ ID NO: 1377218 - DNA, 25 bp, Homo sapien
atttgcaggtttctgactagtcctg

SEQ ID NO: 1377219 - DNA, 25 bp, Homo sapien
cagtaagggaaagtttccggcatgt

SEQ ID NO: 1377220 - DNA, 25 bp, Homo sapien
tcagtaagggaaagtttccggcatg

SEQ ID NO: 1377221 - DNA, 25 bp, Homo sapien
tccggcatgtttcccaaaactctta

SEQ ID NO: 1377222 - DNA, 25 bp, Homo sapien
catgtttcccaaaactcttatcttc

SEQ ID NO: 1377223 - DNA, 25 bp, Homo sapien
tgtgaaactttttccaggagtcttc

SEQ ID NO: 1377224 - DNA, 25 bp, Homo sapien
cttgtgaaactttttccaggagtct

SEQ ID NO: 1377225 - DNA, 25 bp, Homo sapien
tgaaactttttccaggagtcttcag

SEQ ID NO: 1377226 - DNA, 25 bp, Homo sapien
gtgaaactttttccaggagtcttca

SEQ ID NO: 1377227 - DNA, 25 bp, Homo sapien
gaatatgtttctatagattgggcct

SEQ ID NO: 1377228 - DNA, 25 bp, Homo sapien
gtttctatagattgggcctgcatac

SEQ ID NO: 1377229 - DNA, 25 bp, Homo sapien
tatgtttctatagattgggcctgca

SEQ ID NO: 1377230 - DNA, 25 bp, Homo sapien
tgtttctatagattgggcctgcata

SEQ ID NO: 1377231 - DNA, 25 bp, Homo sapien
aatcttcatcggcaagaaagaagga

SEQ ID NO: 1377232 - DNA, 25 bp, Homo sapien
tcttcatcggcaagaaagaaggact

SEQ ID NO: 1377233 - DNA, 25 bp, Homo sapien
ggggagaagaacgatcttgatgtag

SEQ ID NO: 1377234 - DNA, 25 bp, Homo sapien
ggagaagaacgatcttgatgtagtt

SEQ ID NO: 1377235 - DNA, 25 bp, Homo sapien
aatactggaagctattatgggaacc

SEQ ID NO: 1377236 - DNA, 25 bp, Homo sapien
ttctagtctgggaaagccagaaata

SEQ ID NO: 1377237 - DNA, 25 bp, Homo sapien
tgaagtgaattactctaaacttaac

SEQ ID NO: 1377238 - DNA, 25 bp, Homo sapien
ggaaccaagtaacttcctgaagtga

SEQ ID NO: 1377239 - DNA, 25 bp, Homo sapien
tgatttaggacttcggagttttaca

SEQ ID NO: 1377240 - DNA, 25 bp, Homo sapien
cagtgatgttccaatttttaccttc

SEQ ID NO: 1377241 - DNA, 25 bp, Homo sapien
cttgcttggtctaagtatcacagag

SEQ ID NO: 1377242 - DNA, 25 bp, Homo sapien
tctttggttcagatgttccacccca

SEQ ID NO: 1377243 - DNA, 25 bp, Homo sapien
tggtctaagtatcacagagtcatca

SEQ ID NO: 1377244 - DNA, 25 bp, Homo sapien
taaggatttgggaacatttggtgag

SEQ ID NO: 1377245 - DNA, 25 bp, Homo sapien
ctgaggataaggatttgggaacatt

SEQ ID NO: 1377246 - DNA, 25 bp, Homo sapien
ttgggaacatttggtgagaattctc

SEQ ID NO: 1377247 - DNA, 25 bp, Homo sapien
gaggataaggatttgggaacatttg

SEQ ID NO: 1377248 - DNA, 25 bp, Homo sapien
caaactcaaggctcacacatcagct

SEQ ID NO: 1377249 - DNA, 25 bp, Homo sapien
ctcaatgaactcctcaaactcaagg

SEQ ID NO: 1377250 - DNA, 25 bp, Homo sapien
tgcccatcccacactttattttata

SEQ ID NO: 1377251 - DNA, 25 bp, Homo sapien
tcctggcctcaatgaactcctcaaa

SEQ ID NO: 1377252 - DNA, 25 bp, Homo sapien
attcaggtgtccatacaggaagtgg

SEQ ID NO: 1377253 - DNA, 25 bp, Homo sapien
ataaatgattcaggtgtccatacag

SEQ ID NO: 1377254 - DNA, 25 bp, Homo sapien
aatgattcaggtgtccatacaggaa

SEQ ID NO: 1377255 - DNA, 25 bp, Homo sapien
cctcaaccacaataaatgattcagg

SEQ ID NO: 1377256 - DNA, 25 bp, Homo sapien
tggtaccacttggaggccatgatga

SEQ ID NO: 1377257 - DNA, 25 bp, Homo sapien
tttagcagggtgcaaaactagctct

SEQ ID NO: 1377258 - DNA, 25 bp, Homo sapien
tacaccaagagcactagagtcatgg

SEQ ID NO: 1377259 - DNA, 25 bp, Homo sapien
tctgaagaggctccccaactattgg

SEQ ID NO: 1377260 - DNA, 25 bp, Homo sapien
taagagtctgcttggagagtgtgat

SEQ ID NO: 1377261 - DNA, 25 bp, Homo sapien
ctcaggaatacaatgctttgcttga

SEQ ID NO: 1377262 - DNA, 25 bp, Homo sapien
gaataagagtctgcttggagagtgt

SEQ ID NO: 1377263 - DNA, 25 bp, Homo sapien
caggaatacaatgctttgcttgact

SEQ ID NO: 1377264 - DNA, 25 bp, Homo sapien
tctctgataacatccatctgtctct

SEQ ID NO: 1377265 - DNA, 25 bp, Homo sapien
tccatctgtctcttaaatagttcta

SEQ ID NO: 1377266 - DNA, 25 bp, Homo sapien
tagttctaatacagcattgtagacc

SEQ ID NO: 1377267 - DNA, 25 bp, Homo sapien
taatacagcattgtagaccagttca

SEQ ID NO: 1377268 - DNA, 25 bp, Homo sapien
aaggcctctgtgtccgcatttcccg

SEQ ID NO: 1377269 - DNA, 25 bp, Homo sapien
gcatttcccggatcaaactgaaaac

SEQ ID NO: 1377270 - DNA, 25 bp, Homo sapien
ctgcgtttgaactaatgaaggcctc

SEQ ID NO: 1377271 - DNA, 25 bp, Homo sapien
gcgtttgaactaatgaaggcctctg

SEQ ID NO: 1377272 - DNA, 25 bp, Homo sapien
tttagcaacatccatgtataatcaa

SEQ ID NO: 1377273 - DNA, 25 bp, Homo sapien
acatccatgtataatcaatagcaca

SEQ ID NO: 1377274 - DNA, 25 bp, Homo sapien
agcaacatccatgtataatcaatag

SEQ ID NO: 1377275 - DNA, 25 bp, Homo sapien
caacatccatgtataatcaatagca

SEQ ID NO: 1377276 - DNA, 25 bp, Homo sapien
aaagatcacagtagcatgtatgcat

SEQ ID NO: 1377277 - DNA, 25 bp, Homo sapien
agatcacagtagcatgtatgcatgt

SEQ ID NO: 1377278 - DNA, 25 bp, Homo sapien
aagatcacagtagcatgtatgcatg

SEQ ID NO: 1377279 - DNA, 25 bp, Homo sapien
gaaagatcacagtagcatgtatgca

SEQ ID NO: 1377280 - DNA, 25 bp, Homo sapien
gaatgcatatgggaacactgtcatc

SEQ ID NO: 1377281 - DNA, 25 bp, Homo sapien
tggtaacaacgtacatcccagatga

SEQ ID NO: 1377282 - DNA, 25 bp, Homo sapien
tagggtctatagatgaaggtacatc

SEQ ID NO: 1377283 - DNA, 25 bp, Homo sapien
gatgagctcaagaatagggtctata

SEQ ID NO: 1377284 - DNA, 25 bp, Homo sapien
cacttactattggtttgtccccatc

SEQ ID NO: 1377285 - DNA, 25 bp, Homo sapien
caactggtatgcctccaatgtgtca

SEQ ID NO: 1377286 - DNA, 25 bp, Homo sapien
agtgatttcaggtcacttactattg

SEQ ID NO: 1377287 - DNA, 25 bp, Homo sapien
gaggaaatagctagatatgaaaata

SEQ ID NO: 1377288 - DNA, 25 bp, Homo sapien
cttaacttttagagtcctgattata

SEQ ID NO: 1377289 - DNA, 25 bp, Homo sapien
taacttttagagtcctgattatata

SEQ ID NO: 1377290 - DNA, 25 bp, Homo sapien
cttttagagtcctgattatataatc

SEQ ID NO: 1377291 - DNA, 25 bp, Homo sapien
tttagagtcctgattatataatcag

SEQ ID NO: 1377292 - DNA, 25 bp, Homo sapien
tcagcccagtagcgctcacactttt

SEQ ID NO: 1377293 - DNA, 25 bp, Homo sapien
cagcccagtagcgctcacacttttt

SEQ ID NO: 1377294 - DNA, 25 bp, Homo sapien
tgtctactaaaacagctgcacaagc

SEQ ID NO: 1377295 - DNA, 25 bp, Homo sapien
tgcgtctaacccctttgggcttcaa

SEQ ID NO: 1377296 - DNA, 25 bp, Homo sapien
tagaattgtcaactcagaatggcaa

SEQ ID NO: 1377297 - DNA, 25 bp, Homo sapien
tcagctctatgtccttcaccttagg

SEQ ID NO: 1377298 - DNA, 25 bp, Homo sapien
catttcatactccatgcatgccata

SEQ ID NO: 1377299 - DNA, 25 bp, Homo sapien
ctttcccatttcatactccatgcat

SEQ ID NO: 1377300 - DNA, 25 bp, Homo sapien
tactccatgcatgccataacaatga

SEQ ID NO: 1377301 - DNA, 25 bp, Homo sapien
ttcatactccatgcatgccataaca

SEQ ID NO: 1377302 - DNA, 25 bp, Homo sapien
aaggacactatattcccaaatcatc

SEQ ID NO: 1377303 - DNA, 25 bp, Homo sapien
ctgggtggcaatataagccttgggt

SEQ ID NO: 1377304 - DNA, 25 bp, Homo sapien
ggcaatataagccttgggtccataa

SEQ ID NO: 1377305 - DNA, 25 bp, Homo sapien
tataagccttgggtccataaactcc

SEQ ID NO: 1377306 - DNA, 25 bp, Homo sapien
gggatagttctacccggctataatc

SEQ ID NO: 1377307 - DNA, 25 bp, Homo sapien
catcagaggttatcagggatagttc

SEQ ID NO: 1377308 - DNA, 25 bp, Homo sapien
atcagggatagttctacccggctat

SEQ ID NO: 1377309 - DNA, 25 bp, Homo sapien
aatcctcatcagaggttatcaggga

SEQ ID NO: 1377310 - DNA, 25 bp, Homo sapien
gccttgtacttggtagattgccttt

SEQ ID NO: 1377311 - DNA, 25 bp, Homo sapien
tgtctgccttgtacttggtagattg

SEQ ID NO: 1377312 - DNA, 25 bp, Homo sapien
agttgtaggataggttttgtctgcc

SEQ ID NO: 1377313 - DNA, 25 bp, Homo sapien
cttctcagccacagttgtaggatag

SEQ ID NO: 1377314 - DNA, 25 bp, Homo sapien
aaggaagtggagactgaaatctgaa

SEQ ID NO: 1377315 - DNA, 25 bp, Homo sapien
gccatctgtattgttctctgtacaa

SEQ ID NO: 1377316 - DNA, 25 bp, Homo sapien
ctgtacaaagatgtatggccaagaa

SEQ ID NO: 1377317 - DNA, 25 bp, Homo sapien
gaaatctgaaccatggacctgggga

SEQ ID NO: 1377318 - DNA, 25 bp, Homo sapien
tctgcagaatttctctttggtccat

SEQ ID NO: 1377319 - DNA, 25 bp, Homo sapien
cagaaattcattggcaaactcctct

SEQ ID NO: 1377320 - DNA, 25 bp, Homo sapien
taattttcttgctttgggcctcatc

SEQ ID NO: 1377321 - DNA, 25 bp, Homo sapien
attggcaaactcctctttagtaatt

SEQ ID NO: 1377322 - DNA, 25 bp, Homo sapien
tgacttcatcacaagccctagagga

SEQ ID NO: 1377323 - DNA, 25 bp, Homo sapien
aaatgtgtgtcatggccgagacacc

SEQ ID NO: 1377324 - DNA, 25 bp, Homo sapien
tgccgcctgagcagagcatgctgaa

SEQ ID NO: 1377325 - DNA, 25 bp, Homo sapien
attagtacgtaaccaccttctgtgg

SEQ ID NO: 1377326 - DNA, 25 bp, Homo sapien
ggactgttcatcgaaaggtttcttg

SEQ ID NO: 1377327 - DNA, 25 bp, Homo sapien
tcatcgaaaggtttcttgtcagtgt

SEQ ID NO: 1377328 - DNA, 25 bp, Homo sapien
ccggactgttcatcgaaaggtttct

SEQ ID NO: 1377329 - DNA, 25 bp, Homo sapien
tgttcatcgaaaggtttcttgtcag

SEQ ID NO: 1377330 - DNA, 25 bp, Homo sapien
tcctttatctctagagtaggcttgt

SEQ ID NO: 1377331 - DNA, 25 bp, Homo sapien
ggtgtcaatactgagcttcagagtc

SEQ ID NO: 1377332 - DNA, 25 bp, Homo sapien
tatgaaaggaatggtgtcaatactg

SEQ ID NO: 1377333 - DNA, 25 bp, Homo sapien
ctattattatgaaaggaatggtgtc

SEQ ID NO: 1377334 - DNA, 25 bp, Homo sapien
gcagctttagtgactggctcggtta

SEQ ID NO: 1377335 - DNA, 25 bp, Homo sapien
caaaagttcaaggaggcaaagacca

SEQ ID NO: 1377336 - DNA, 25 bp, Homo sapien
tatagggcagttagggccagatact

SEQ ID NO: 1377337 - DNA, 25 bp, Homo sapien
gatgtctacaggtagagcctcagaa

SEQ ID NO: 1377338 - DNA, 25 bp, Homo sapien
tgatgtgaaagtaaagccattaaga

SEQ ID NO: 1377339 - DNA, 25 bp, Homo sapien
gatgtgaaagtaaagccattaagag

SEQ ID NO: 1377340 - DNA, 25 bp, Homo sapien
ttgatgtgaaagtaaagccattaag

SEQ ID NO: 1377341 - DNA, 25 bp, Homo sapien
attgatgtgaaagtaaagccattaa

SEQ ID NO: 1377342 - DNA, 25 bp, Homo sapien
tacaagtttcttaactggtagccaa

SEQ ID NO: 1377343 - DNA, 25 bp, Homo sapien
gagaaacaggacacatcatttatgg

SEQ ID NO: 1377344 - DNA, 25 bp, Homo sapien
tttgcctagtataatccccgtgggc

SEQ ID NO: 1377345 - DNA, 25 bp, Homo sapien
gccagagctgcttaacgcatttgcc

SEQ ID NO: 1377346 - DNA, 25 bp, Homo sapien
atgagccactgcgccaggacaaagc

SEQ ID NO: 1377347 - DNA, 25 bp, Homo sapien
gcaagccagatttgacgcgtgggtt

SEQ ID NO: 1377348 - DNA, 25 bp, Homo sapien
cacaaaagcggccatggacaatatg

SEQ ID NO: 1377349 - DNA, 25 bp, Homo sapien
tggactactcaggagctacagagct

SEQ ID NO: 1377350 - DNA, 25 bp, Homo sapien
cactctcacttgtagggccagagaa

SEQ ID NO: 1377351 - DNA, 25 bp, Homo sapien
caaaagacagggctacatctgaaga

SEQ ID NO: 1377352 - DNA, 25 bp, Homo sapien
acaaaaaccaactctgcaggcctct

SEQ ID NO: 1377353 - DNA, 25 bp, Homo sapien
tctctgtggtttgcattaagttgac

SEQ ID NO: 1377354 - DNA, 25 bp, Homo sapien
gctgctcccaactttaacaatcagt

SEQ ID NO: 1377355 - DNA, 25 bp, Homo sapien
acccaatcagtcaacaaggaagtga

SEQ ID NO: 1377356 - DNA, 25 bp, Homo sapien
cagtctcgtgaatagctccaactct

SEQ ID NO: 1377357 - DNA, 25 bp, Homo sapien
tgaattcccaggaatcaatcaccca

SEQ ID NO: 1377358 - DNA, 25 bp, Homo sapien
gatgttcagtctcgtgaatagctcc

SEQ ID NO: 1377359 - DNA, 25 bp, Homo sapien
aaaatcctacagtcaaaggaattgc

SEQ ID NO: 1377360 - DNA, 25 bp, Homo sapien
ggaaatgtagctcttattaaggctt

SEQ ID NO: 1377361 - DNA, 25 bp, Homo sapien
aatgatctgcagatagctccaggaa

SEQ ID NO: 1377362 - DNA, 25 bp, Homo sapien
attaaggctttcactgaccctgtaa

SEQ ID NO: 1377363 - DNA, 25 bp, Homo sapien
cactacttcaggagcaatgtgagcc

SEQ ID NO: 1377364 - DNA, 25 bp, Homo sapien
tggccctggatgaactcccggatgg

SEQ ID NO: 1377365 - DNA, 25 bp, Homo sapien
caagaagtttcactgacactgccag

SEQ ID NO: 1377366 - DNA, 25 bp, Homo sapien
cacagtgtcctggagtatagctcct

SEQ ID NO: 1377367 - DNA, 25 bp, Homo sapien
tattaagtatgtgatagtccagctg

SEQ ID NO: 1377368 - DNA, 25 bp, Homo sapien
tcactcaaaaagtgcaggaggctgc

SEQ ID NO: 1377369 - DNA, 25 bp, Homo sapien
caactggtggtaactaaggaaatct

SEQ ID NO: 1377370 - DNA, 25 bp, Homo sapien
tgcaggaatccagtaaagcaattgt

SEQ ID NO: 1377371 - DNA, 25 bp, Homo sapien
tccgaaggcgaccagcaatgatagc

SEQ ID NO: 1377372 - DNA, 25 bp, Homo sapien
aactggtcacccaacatccgaaggc

SEQ ID NO: 1377373 - DNA, 25 bp, Homo sapien
gacgtttttggcagaagcttccaat

SEQ ID NO: 1377374 - DNA, 25 bp, Homo sapien
caatgatagccacatcaaaagaaca

SEQ ID NO: 1377375 - DNA, 25 bp, Homo sapien
tcatctacacagcataggttccggc

SEQ ID NO: 1377376 - DNA, 25 bp, Homo sapien
aacctgcaatgttgggctcaagaag

SEQ ID NO: 1377377 - DNA, 25 bp, Homo sapien
gaagtccatgagtagagtgttcaca

SEQ ID NO: 1377378 - DNA, 25 bp, Homo sapien
aacaagcagttttcagcccagcagg

SEQ ID NO: 1377379 - DNA, 25 bp, Homo sapien
tgcttaacttttatcgttaggtagc

SEQ ID NO: 1377380 - DNA, 25 bp, Homo sapien
ctttaggttctctatctcagaccac

SEQ ID NO: 1377381 - DNA, 25 bp, Homo sapien
ttaaagactttaggttctctatctc

SEQ ID NO: 1377382 - DNA, 25 bp, Homo sapien
cacaccctaaccacataaaattaat

SEQ ID NO: 1377383 - DNA, 25 bp, Homo sapien
ctactttgatagcttgagggaggcc

SEQ ID NO: 1377384 - DNA, 25 bp, Homo sapien
actgctagaggtatgctctggctac

SEQ ID NO: 1377385 - DNA, 25 bp, Homo sapien
gagggaggcccctaatgaaggcagt

SEQ ID NO: 1377386 - DNA, 25 bp, Homo sapien
gccataagttgcttcaatgtacaaa

SEQ ID NO: 1377387 - DNA, 25 bp, Homo sapien
gaatcaatgttctttggccaaaaac

SEQ ID NO: 1377388 - DNA, 25 bp, Homo sapien
gacttactggcagctctaataggaa

SEQ ID NO: 1377389 - DNA, 25 bp, Homo sapien
gttattcatcttactctagacaagc

SEQ ID NO: 1377390 - DNA, 25 bp, Homo sapien
tcaattgccaataggaatgaaagga

SEQ ID NO: 1377391 - DNA, 25 bp, Homo sapien
gccctactcattgcgatggtctgga

SEQ ID NO: 1377392 - DNA, 25 bp, Homo sapien
cactgaggtatgctttccatggccg

SEQ ID NO: 1377393 - DNA, 25 bp, Homo sapien
gaacagacagccagtatcatcctga

SEQ ID NO: 1377394 - DNA, 25 bp, Homo sapien
tgagcaactttaaggctaagccaag

SEQ ID NO: 1377395 - DNA, 25 bp, Homo sapien
tctgaggtttagtgctaagatactc

SEQ ID NO: 1377396 - DNA, 25 bp, Homo sapien
tcaaattcaggcaacagtctgaggt

SEQ ID NO: 1377397 - DNA, 25 bp, Homo sapien
tccaccaatcattgaaaaggtaaag

SEQ ID NO: 1377398 - DNA, 25 bp, Homo sapien
tgaaataaccagtgacgaacctctt

SEQ ID NO: 1377399 - DNA, 25 bp, Homo sapien
gataatagaagagacctcggtcccg

SEQ ID NO: 1377400 - DNA, 25 bp, Homo sapien
caaaagtccaagagtagggtcagat

SEQ ID NO: 1377401 - DNA, 25 bp, Homo sapien
gatttagggctacacagaatccgct

SEQ ID NO: 1377402 - DNA, 25 bp, Homo sapien
tttagagatagttgcccagtgggct

SEQ ID NO: 1377403 - DNA, 25 bp, Homo sapien
cccagacgtgactcaccaaacaatg

SEQ ID NO: 1377404 - DNA, 25 bp, Homo sapien
ctactcttgtgccaaccataatagg

SEQ ID NO: 1377405 - DNA, 25 bp, Homo sapien
tcttgtgccaaccataataggagaa

SEQ ID NO: 1377406 - DNA, 25 bp, Homo sapien
tcgggtcccagacgtgactcaccaa

SEQ ID NO: 1377407 - DNA, 25 bp, Homo sapien
cctctaacacataaggagcattagg

SEQ ID NO: 1377408 - DNA, 25 bp, Homo sapien
cactcagcaggtcgggagaggaaaa

SEQ ID NO: 1377409 - DNA, 25 bp, Homo sapien
ccatggacaccaagtagccaaataa

SEQ ID NO: 1377410 - DNA, 25 bp, Homo sapien
tgcagtaatacaacaaacgtcctag

SEQ ID NO: 1377411 - DNA, 25 bp, Homo sapien
tactaacctagagtgcacatcagag

SEQ ID NO: 1377412 - DNA, 25 bp, Homo sapien
tgggcaactctatctcaagcaaagc

SEQ ID NO: 1377413 - DNA, 25 bp, Homo sapien
aaatgtatctgtcagccgggcacgg

SEQ ID NO: 1377414 - DNA, 25 bp, Homo sapien
gagtgcccacttcaaacacagggta

SEQ ID NO: 1377415 - DNA, 25 bp, Homo sapien
tgacatacagcttcagtacactgag

SEQ ID NO: 1377416 - DNA, 25 bp, Homo sapien
agtacactgaggacacaaccaaacc

SEQ ID NO: 1377417 - DNA, 25 bp, Homo sapien
aggtctcggaaagtctgcaccacca

SEQ ID NO: 1377418 - DNA, 25 bp, Homo sapien
gacacaaccaaaccaggtctcggaa

SEQ ID NO: 1377419 - DNA, 25 bp, Homo sapien
caatacaggccagggtacaagagca

SEQ ID NO: 1377420 - DNA, 25 bp, Homo sapien
gaacagtcatgtattcagactcatg

SEQ ID NO: 1377421 - DNA, 25 bp, Homo sapien
caggtaggcaggaatcttaagaaca

SEQ ID NO: 1377422 - DNA, 25 bp, Homo sapien
gctcttatcagattgacatgaggat

SEQ ID NO: 1377423 - DNA, 25 bp, Homo sapien
acattgatctgtgtaagtcctggca

SEQ ID NO: 1377424 - DNA, 25 bp, Homo sapien
gaagacccagcaactctgttaaaat

SEQ ID NO: 1377425 - DNA, 25 bp, Homo sapien
tgtcgaagacccagcaactctgtta

SEQ ID NO: 1377426 - DNA, 25 bp, Homo sapien
tgctcttgtcgaagacccagcaact

SEQ ID NO: 1377427 - DNA, 25 bp, Homo sapien
ttcaaattccagacagggtactatg

SEQ ID NO: 1377428 - DNA, 25 bp, Homo sapien
ttgacagcagtctcctaaggatttc

SEQ ID NO: 1377429 - DNA, 25 bp, Homo sapien
ctcctcctgtacttgaaatccttca

SEQ ID NO: 1377430 - DNA, 25 bp, Homo sapien
tattccaaatatgagggttgctcct

SEQ ID NO: 1377431 - DNA, 25 bp, Homo sapien
tgcaaagtccgcagacacatccgtg

SEQ ID NO: 1377432 - DNA, 25 bp, Homo sapien
gtgcagtaccctcgaagctcctcta

SEQ ID NO: 1377433 - DNA, 25 bp, Homo sapien
taaactatgcaagatctggcgtaca

SEQ ID NO: 1377434 - DNA, 25 bp, Homo sapien
tagtggctgctaaagtgacctggta

SEQ ID NO: 1377435 - DNA, 25 bp, Homo sapien
tgacccgcacaaggacatcagtttg

SEQ ID NO: 1377436 - DNA, 25 bp, Homo sapien
gctagcaaaggtcccttgacccgca

SEQ ID NO: 1377437 - DNA, 25 bp, Homo sapien
ggctactgctcttgaggaaactatc

SEQ ID NO: 1377438 - DNA, 25 bp, Homo sapien
aagtttggtagctcccatcaccaca

SEQ ID NO: 1377439 - DNA, 25 bp, Homo sapien
ggttggtagcgtagcagaaagttca

SEQ ID NO: 1377440 - DNA, 25 bp, Homo sapien
gaaagttcaatacttcagcctggcc

SEQ ID NO: 1377441 - DNA, 25 bp, Homo sapien
gcagaaagttcaatacttcagcctg

SEQ ID NO: 1377442 - DNA, 25 bp, Homo sapien
aagttcaatacttcagcctggcccc

SEQ ID NO: 1377443 - DNA, 25 bp, Homo sapien
tagcagatctcataataaaaagagt

SEQ ID NO: 1377444 - DNA, 25 bp, Homo sapien
ataaaaagagtgctgaggcatccaa

SEQ ID NO: 1377445 - DNA, 25 bp, Homo sapien
tcccacaaggtagcagatctcataa

SEQ ID NO: 1377446 - DNA, 25 bp, Homo sapien
acatcaacaagatcccacaaggtag

SEQ ID NO: 1377447 - DNA, 25 bp, Homo sapien
acaattggatcctggtcacgcagca

SEQ ID NO: 1377448 - DNA, 25 bp, Homo sapien
cgatttaagagatggtgagcaatgg

SEQ ID NO: 1377449 - DNA, 25 bp, Homo sapien
gcttattgatgacaacgcctccttc

SEQ ID NO: 1377450 - DNA, 25 bp, Homo sapien
caagcagttcacaactacaattgga

SEQ ID NO: 1377451 - DNA, 25 bp, Homo sapien
tcccgcagaccattgagaataggct

SEQ ID NO: 1377452 - DNA, 25 bp, Homo sapien
gttgtatatactcctgcacaccagg

SEQ ID NO: 1377453 - DNA, 25 bp, Homo sapien
tcagagtctccatgaagattatgca

SEQ ID NO: 1377454 - DNA, 25 bp, Homo sapien
gacatatgaagccttatcccgcaga

SEQ ID NO: 1377455 - DNA, 25 bp, Homo sapien
gatgctgcacccatcagatcatgaa

SEQ ID NO: 1377456 - DNA, 25 bp, Homo sapien
taagcaacacatcctggagttagcc

SEQ ID NO: 1377457 - DNA, 25 bp, Homo sapien
gatatttaaccaaaactgaggacta

SEQ ID NO: 1377458 - DNA, 25 bp, Homo sapien
catttggaataatgatgcacaggca

SEQ ID NO: 1377459 - DNA, 25 bp, Homo sapien
tttgcacagcgtattgatggccagg

SEQ ID NO: 1377460 - DNA, 25 bp, Homo sapien
tgaggctacacatgctccgtaacgc

SEQ ID NO: 1377461 - DNA, 25 bp, Homo sapien
ccagccctcgcaccattggattggg

SEQ ID NO: 1377462 - DNA, 25 bp, Homo sapien
tggacaatatctacagtggcactgg

SEQ ID NO: 1377463 - DNA, 25 bp, Homo sapien
gtgtggtctcaaacctctaggaact

SEQ ID NO: 1377464 - DNA, 25 bp, Homo sapien
tattgaatccctagtactttggtga

SEQ ID NO: 1377465 - DNA, 25 bp, Homo sapien
catccagggacatgctcttgggaca

SEQ ID NO: 1377466 - DNA, 25 bp, Homo sapien
ttaatgagccagatgagaataccgt

SEQ ID NO: 1377467 - DNA, 25 bp, Homo sapien
tcaagcccgtgatatggaggaaact

SEQ ID NO: 1377468 - DNA, 25 bp, Homo sapien
caggtgtcctcaaggttggctccca

SEQ ID NO: 1377469 - DNA, 25 bp, Homo sapien
caaagtggcctactagtaagctgct

SEQ ID NO: 1377470 - DNA, 25 bp, Homo sapien
gctttattgatgaaggcctggacca

SEQ ID NO: 1377471 - DNA, 25 bp, Homo sapien
tgaatgtgaggattgcacagagcct

SEQ ID NO: 1377472 - DNA, 25 bp, Homo sapien
cgtcctcggagccaaggtacggcat

SEQ ID NO: 1377473 - DNA, 25 bp, Homo sapien
taatcactcgctggatgacattccg

SEQ ID NO: 1377474 - DNA, 25 bp, Homo sapien
gcgcagcctatcagcttgaatgtga

SEQ ID NO: 1377475 - DNA, 25 bp, Homo sapien
cacggtaactcgagggctccttctc

SEQ ID NO: 1377476 - DNA, 25 bp, Homo sapien
acagctcccacggtaactcgagggc

SEQ ID NO: 1377477 - DNA, 25 bp, Homo sapien
taactcgagggctccttctcgtcct

SEQ ID NO: 1377478 - DNA, 25 bp, Homo sapien
gagggctccttctcgtcctgatgtg

SEQ ID NO: 1377479 - DNA, 25 bp, Homo sapien
aaggcgagatctcgcctcaggctcg

SEQ ID NO: 1377480 - DNA, 25 bp, Homo sapien
tcggcttccgtagggccggcacgct

SEQ ID NO: 1377481 - DNA, 25 bp, Homo sapien
tggccctgacacacttccacgccct

SEQ ID NO: 1377482 - DNA, 25 bp, Homo sapien
ctcaggctcggcttccgtagggccg

SEQ ID NO: 1377483 - DNA, 25 bp, Homo sapien
tcggccggcaggccgttcgccccgc

SEQ ID NO: 1377484 - DNA, 25 bp, Homo sapien
gccggcaggccgttcgccccgccca

SEQ ID NO: 1377485 - DNA, 25 bp, Homo sapien
taggtcctccgccggatttccagcg

SEQ ID NO: 1377486 - DNA, 25 bp, Homo sapien
agcgccgcgtccgactgaccgcaga

SEQ ID NO: 1377487 - DNA, 25 bp, Homo sapien
tcatcgcggataggcccaatcttgc

SEQ ID NO: 1377488 - DNA, 25 bp, Homo sapien
agatcgctcccgctacttctaggtc

SEQ ID NO: 1377489 - DNA, 25 bp, Homo sapien
cgctgccggtctccccgcgagcgag

SEQ ID NO: 1377490 - DNA, 25 bp, Homo sapien
caagagaccaaacagaagaccgctg

SEQ ID NO: 1377491 - DNA, 25 bp, Homo sapien
agaccgctgccggtctccccgcgag

SEQ ID NO: 1377492 - DNA, 25 bp, Homo sapien
cttgtcaagagaccaaacagaagac

SEQ ID NO: 1377493 - DNA, 25 bp, Homo sapien
cagcatgacttttatcgggacgccg

SEQ ID NO: 1377494 - DNA, 25 bp, Homo sapien
tctggtaacttattgctctgctggg

SEQ ID NO: 1377495 - DNA, 25 bp, Homo sapien
ctccagcgggcagggtgacttcctt

SEQ ID NO: 1377496 - DNA, 25 bp, Homo sapien
gcgggcaatcggaaatcggctactt

SEQ ID NO: 1377497 - DNA, 25 bp, Homo sapien
aatggggtcctgatcccccatacgc

SEQ ID NO: 1377498 - DNA, 25 bp, Homo sapien
gggtcctgatcccccatacgcccat

SEQ ID NO: 1377499 - DNA, 25 bp, Homo sapien
gaatggggtcctgatcccccatacg

SEQ ID NO: 1377500 - DNA, 25 bp, Homo sapien
tggggtcctgatcccccatacgccc

SEQ ID NO: 1377501 - DNA, 25 bp, Homo sapien
actccatcacctgttagatacaata

SEQ ID NO: 1377502 - DNA, 25 bp, Homo sapien
catcacctgttagatacaatactgt

SEQ ID NO: 1377503 - DNA, 25 bp, Homo sapien
cctgttagatacaatactgtatact

SEQ ID NO: 1377504 - DNA, 25 bp, Homo sapien
cacctgttagatacaatactgtata

SEQ ID NO: 1377505 - DNA, 25 bp, Homo sapien
gaatgacaacattgagcccacactg

SEQ ID NO: 1377506 - DNA, 25 bp, Homo sapien
gaagccacagggaatcagagtgcct

SEQ ID NO: 1377507 - DNA, 25 bp, Homo sapien
ttacaagactcttatgggcccaccg

SEQ ID NO: 1377508 - DNA, 25 bp, Homo sapien
ggtgactatgttgacggccccactg

SEQ ID NO: 1377509 - DNA, 25 bp, Homo sapien
taacccctgtcactctcatgctaga

SEQ ID NO: 1377510 - DNA, 25 bp, Homo sapien
ttgtccttcatgaaaccagatgagg

SEQ ID NO: 1377511 - DNA, 25 bp, Homo sapien
catcatttctgctaggacccagtcc

SEQ ID NO: 1377512 - DNA, 25 bp, Homo sapien
catcagcatgctctagtttcacctc

SEQ ID NO: 1377513 - DNA, 25 bp, Homo sapien
ttgaataggcaacggacagtgtctg

SEQ ID NO: 1377514 - DNA, 25 bp, Homo sapien
tctctgctaaggatactcaaaagga

SEQ ID NO: 1377515 - DNA, 25 bp, Homo sapien
tctaccattcagctggaccaggcca

SEQ ID NO: 1377516 - DNA, 25 bp, Homo sapien
taatacctaaggcttgcaacctgag

SEQ ID NO: 1377517 - DNA, 25 bp, Homo sapien
tgcttccgattgctaactgctccac

SEQ ID NO: 1377518 - DNA, 25 bp, Homo sapien
tatttcacatatctgccccttctcg

SEQ ID NO: 1377519 - DNA, 25 bp, Homo sapien
cctgaatgaaacttgaatgcttccg

SEQ ID NO: 1377520 - DNA, 25 bp, Homo sapien
ctctgacttggtttaggaggatgta

SEQ ID NO: 1377521 - DNA, 25 bp, Homo sapien
tgtgcctggctacctgtgcgaataa

SEQ ID NO: 1377522 - DNA, 25 bp, Homo sapien
tgcaacttctctgcttaactgtaag

SEQ ID NO: 1377523 - DNA, 25 bp, Homo sapien
gaaacttctttgaccttactatgct

SEQ ID NO: 1377524 - DNA, 25 bp, Homo sapien
ggttcttctgcttaagcctccaggg

SEQ ID NO: 1377525 - DNA, 25 bp, Homo sapien
gaaagggacataacttgagagagca

SEQ ID NO: 1377526 - DNA, 25 bp, Homo sapien
ttcccgaaagggtgaattctgagag

SEQ ID NO: 1377527 - DNA, 25 bp, Homo sapien
gagtcaatcagcaaaggttcccgaa

SEQ ID NO: 1377528 - DNA, 25 bp, Homo sapien
catgtcagagagttaggttgaacca

SEQ ID NO: 1377529 - DNA, 25 bp, Homo sapien
cccaggtcagcccaatgtgaggact

SEQ ID NO: 1377530 - DNA, 25 bp, Homo sapien
cccaatgtgaggactttaagtagta

SEQ ID NO: 1377531 - DNA, 25 bp, Homo sapien
ttttttctggctcatcaagcaggca

SEQ ID NO: 1377532 - DNA, 25 bp, Homo sapien
ggcatgtttacccactctttttatc

SEQ ID NO: 1377533 - DNA, 25 bp, Homo sapien
tgctccccgtgttgttaagccagag

SEQ ID NO: 1377534 - DNA, 25 bp, Homo sapien
aaaactgccttgtgggatcgaacat

SEQ ID NO: 1377535 - DNA, 25 bp, Homo sapien
gagaaagccaaatgacttcccttaa

SEQ ID NO: 1377536 - DNA, 25 bp, Homo sapien
cccttaaaaggtacttcagcgcatt

SEQ ID NO: 1377537 - DNA, 25 bp, Homo sapien
ctcttgacgtacagggagacttcca

SEQ ID NO: 1377538 - DNA, 25 bp, Homo sapien
gatgtcacattgctagaacgtctct

SEQ ID NO: 1377539 - DNA, 25 bp, Homo sapien
tttacacagcaggagatacatcgga

SEQ ID NO: 1377540 - DNA, 25 bp, Homo sapien
tctcagaatgttgtgcccaacgcgt

SEQ ID NO: 1377541 - DNA, 25 bp, Homo sapien
tctgctaggcactgtcgtcccgtac

SEQ ID NO: 1377542 - DNA, 25 bp, Homo sapien
ggtgatgtcacactagctgggatga

SEQ ID NO: 1377543 - DNA, 25 bp, Homo sapien
caggcacctttaaatcaccgcagag

SEQ ID NO: 1377544 - DNA, 25 bp, Homo sapien
agttggatcccgtaccaccgccagg

SEQ ID NO: 1377545 - DNA, 25 bp, Homo sapien
agggacggccgctcggcattccgtt

SEQ ID NO: 1377546 - DNA, 25 bp, Homo sapien
acttccgcctcagtaggtgtcatgg

SEQ ID NO: 1377547 - DNA, 25 bp, Homo sapien
tcgtcctagagagtccattcagctg

SEQ ID NO: 1377548 - DNA, 25 bp, Homo sapien
tccgttcgtcgggtctggcgacaac

SEQ ID NO: 1377549 - DNA, 25 bp, Homo sapien
tttccccggctgtcgtggcaggttc

SEQ ID NO: 1377550 - DNA, 25 bp, Homo sapien
tgtgcgtgtgtacttcacagctccg

SEQ ID NO: 1377551 - DNA, 25 bp, Homo sapien
caccatggttttgggttatttgtgc

SEQ ID NO: 1377552 - DNA, 25 bp, Homo sapien
cacagctccgcttatcaccatggtt

SEQ ID NO: 1377553 - DNA, 25 bp, Homo sapien
cgttttccttcagcctttgctggca

SEQ ID NO: 1377554 - DNA, 25 bp, Homo sapien
cccgttttccttcagcctttgctgg

SEQ ID NO: 1377555 - DNA, 25 bp, Homo sapien
gttttccttcagcctttgctggcat

SEQ ID NO: 1377556 - DNA, 25 bp, Homo sapien
tcccgttttccttcagcctttgctg

SEQ ID NO: 1377557 - DNA, 25 bp, Homo sapien
tcttttgttctgttgccgtagtcat

SEQ ID NO: 1377558 - DNA, 25 bp, Homo sapien
tttcttttgttctgttgccgtagtc

SEQ ID NO: 1377559 - DNA, 25 bp, Homo sapien
ttcttttgttctgttgccgtagtca

SEQ ID NO: 1377560 - DNA, 25 bp, Homo sapien
ccagttaagctgtttaagtatggga

SEQ ID NO: 1377561 - DNA, 25 bp, Homo sapien
gagagtacaatttggaggaaaccag

SEQ ID NO: 1377562 - DNA, 25 bp, Homo sapien
agagatttaggtgttctgttgggaa

SEQ ID NO: 1377563 - DNA, 25 bp, Homo sapien
gaacgaaccatgatcgtgtactgca

SEQ ID NO: 1377564 - DNA, 25 bp, Homo sapien
caccttagcctttcgggtacctgag

SEQ ID NO: 1377565 - DNA, 25 bp, Homo sapien
accgggcccggtcaataatagccat

SEQ ID NO: 1377566 - DNA, 25 bp, Homo sapien
tttcgggtacctgagactacgggca

SEQ ID NO: 1377567 - DNA, 25 bp, Homo sapien
caccgggcccggtcaataatagcca

SEQ ID NO: 1377568 - DNA, 25 bp, Homo sapien
tcctcaggagggactaggcagacca

SEQ ID NO: 1377569 - DNA, 25 bp, Homo sapien
tacaggtgcactgaagaattcagcg

SEQ ID NO: 1377570 - DNA, 25 bp, Homo sapien
aattcagcgcagcatcccattttga

SEQ ID NO: 1377571 - DNA, 25 bp, Homo sapien
gtgcctgcaggtgttctttaactat

SEQ ID NO: 1377572 - DNA, 25 bp, Homo sapien
aactgatgatattggtggttccacc

SEQ ID NO: 1377573 - DNA, 25 bp, Homo sapien
tatgctgccctccaattgatgcttt

SEQ ID NO: 1377574 - DNA, 25 bp, Homo sapien
taatgcgcctgtcaaacttgtgcag

SEQ ID NO: 1377575 - DNA, 25 bp, Homo sapien
gtgcctctagccacctgcaacagga

SEQ ID NO: 1377576 - DNA, 25 bp, Homo sapien
tgtgacatactgggtcgctaagata

SEQ ID NO: 1377577 - DNA, 25 bp, Homo sapien
tgtcatttacaatgtctgcatggta

SEQ ID NO: 1377578 - DNA, 25 bp, Homo sapien
atatctttacttgtccgtaaataca

SEQ ID NO: 1377579 - DNA, 25 bp, Homo sapien
tctaccttgtcatttacaatgtctg

SEQ ID NO: 1377580 - DNA, 25 bp, Homo sapien
tacttgtccgtaaatacacttctac

SEQ ID NO: 1377581 - DNA, 25 bp, Homo sapien
tatcactgttgaaagggtagctaga

SEQ ID NO: 1377582 - DNA, 25 bp, Homo sapien
gctgtatcattacttgcatgtttat

SEQ ID NO: 1377583 - DNA, 25 bp, Homo sapien
ttaggaactgtgctgtatcattact

SEQ ID NO: 1377584 - DNA, 25 bp, Homo sapien
gctagatatcaaggtcacatctctc

SEQ ID NO: 1377585 - DNA, 25 bp, Homo sapien
aaatgtagagcaattgcaatgcatc

SEQ ID NO: 1377586 - DNA, 25 bp, Homo sapien
aaaataatctcactacatgtagcag

SEQ ID NO: 1377587 - DNA, 25 bp, Homo sapien
tgatagatggtgcagcatgtctaca

SEQ ID NO: 1377588 - DNA, 25 bp, Homo sapien
taatgtgtggtttcaattcagcttg

SEQ ID NO: 1377589 - DNA, 25 bp, Homo sapien
tttccccgcagatatggtgcccatg

SEQ ID NO: 1377590 - DNA, 25 bp, Homo sapien
tttgggctgtctatgccacccggga

SEQ ID NO: 1377591 - DNA, 25 bp, Homo sapien
cagtggtggacagctcagtattccc

SEQ ID NO: 1377592 - DNA, 25 bp, Homo sapien
acctggcaaaccgaacagtggtgga

SEQ ID NO: 1377593 - DNA, 25 bp, Homo sapien
gatgttggccttacacggtctgcag

SEQ ID NO: 1377594 - DNA, 25 bp, Homo sapien
gattttcctgctgccacggcgtctg

SEQ ID NO: 1377595 - DNA, 25 bp, Homo sapien
cacaatcattcttggtctggaccgc

SEQ ID NO: 1377596 - DNA, 25 bp, Homo sapien
cagtgaccgtgtcccagatgttggc

SEQ ID NO: 1377597 - DNA, 25 bp, Homo sapien
tctccttgaacaggcaccccttccc

SEQ ID NO: 1377598 - DNA, 25 bp, Homo sapien
tgaggtcacggcacacttctggctc

SEQ ID NO: 1377599 - DNA, 25 bp, Homo sapien
ccatcaatcctgaggtcacggcaca

SEQ ID NO: 1377600 - DNA, 25 bp, Homo sapien
ggtcacggcacacttctggctcttg

SEQ ID NO: 1377601 - DNA, 25 bp, Homo sapien
atcctgaggtcacggcacacttctg

SEQ ID NO: 1377602 - DNA, 25 bp, Homo sapien
aagttaatatgagtggatttctgtt

SEQ ID NO: 1377603 - DNA, 25 bp, Homo sapien
taagttaatatgagtggatttctgt

SEQ ID NO: 1377604 - DNA, 25 bp, Homo sapien
ttctgtaggaagacgtggcaccttt

SEQ ID NO: 1377605 - DNA, 25 bp, Homo sapien
cacagatctctgtgttatcagtaac

SEQ ID NO: 1377606 - DNA, 25 bp, Homo sapien
cagcagggttgacaggtgccttgca

SEQ ID NO: 1377607 - DNA, 25 bp, Homo sapien
ccttctccatttgtacactgttctg

SEQ ID NO: 1377608 - DNA, 25 bp, Homo sapien
ggattttggcagatcctttggtgcc

SEQ ID NO: 1377609 - DNA, 25 bp, Homo sapien
tgtggattttggcagatcctttggt

SEQ ID NO: 1377610 - DNA, 25 bp, Homo sapien
attttggcagatcctttggtgccat

SEQ ID NO: 1377611 - DNA, 25 bp, Homo sapien
actgtggattttggcagatcctttg

SEQ ID NO: 1377612 - DNA, 25 bp, Homo sapien
tttccttccctgagtaaatcctggc

SEQ ID NO: 1377613 - DNA, 25 bp, Homo sapien
ctgctacttctagccagcttcgtga

SEQ ID NO: 1377614 - DNA, 25 bp, Homo sapien
tctgcgtatctgtcagttttctcca

SEQ ID NO: 1377615 - DNA, 25 bp, Homo sapien
cttcgtgagtcaggcaccccaggca

SEQ ID NO: 1377616 - DNA, 25 bp, Homo sapien
tcccaggagcggcttcacattcagt

SEQ ID NO: 1377617 - DNA, 25 bp, Homo sapien
agcggcttcacattcagtcgctgca

SEQ ID NO: 1377618 - DNA, 25 bp, Homo sapien
gaacattttagtgtgctgggcttgg

SEQ ID NO: 1377619 - DNA, 25 bp, Homo sapien
aatgtcaccgtgctctttccaaagt

SEQ ID NO: 1377620 - DNA, 25 bp, Homo sapien
tctgtatcagtaaggttgcacaggg

SEQ ID NO: 1377621 - DNA, 25 bp, Homo sapien
aattccctctgtatcagtaaggttg

SEQ ID NO: 1377622 - DNA, 25 bp, Homo sapien
ttccctctgtatcagtaaggttgca

SEQ ID NO: 1377623 - DNA, 25 bp, Homo sapien
ccctctgtatcagtaaggttgcaca

SEQ ID NO: 1377624 - DNA, 25 bp, Homo sapien
ctggagggggcagaagagcagacat

SEQ ID NO: 1377625 - DNA, 25 bp, Homo sapien
ttctgtaagatactcgtatatccat

SEQ ID NO: 1377626 - DNA, 25 bp, Homo sapien
tctgtaagatactcgtatatccata

SEQ ID NO: 1377627 - DNA, 25 bp, Homo sapien
taagatactcgtatatccatatcat

SEQ ID NO: 1377628 - DNA, 25 bp, Homo sapien
tgtaagatactcgtatatccatatc

SEQ ID NO: 1377629 - DNA, 25 bp, Homo sapien
tgttgggtaagcagttcccactgtc

SEQ ID NO: 1377630 - DNA, 25 bp, Homo sapien
gacttctgacaacataggagctgaa

SEQ ID NO: 1377631 - DNA, 25 bp, Homo sapien
cagaactgaatctgacttctgacaa

SEQ ID NO: 1377632 - DNA, 25 bp, Homo sapien
gttgggtaagcagttcccactgtct

SEQ ID NO: 1377633 - DNA, 25 bp, Homo sapien
aagcaacccaggcacgtgtcttggg

SEQ ID NO: 1377634 - DNA, 25 bp, Homo sapien
ggacagcgctgcgagctacccctga

SEQ ID NO: 1377635 - DNA, 25 bp, Homo sapien
aatagcattgctccaaagcaaccca

SEQ ID NO: 1377636 - DNA, 25 bp, Homo sapien
tgctccaaagcaacccaggcacgtg

SEQ ID NO: 1377637 - DNA, 25 bp, Homo sapien
gcaggcccaagattgtttgctatta

SEQ ID NO: 1377638 - DNA, 25 bp, Homo sapien
gggagcaggcccaagattgtttgct

SEQ ID NO: 1377639 - DNA, 25 bp, Homo sapien
ggcccaagattgtttgctattagca

SEQ ID NO: 1377640 - DNA, 25 bp, Homo sapien
cccaagattgtttgctattagcaac

SEQ ID NO: 1377641 - DNA, 25 bp, Homo sapien
ccttgaagagggtcgatggctgtca

SEQ ID NO: 1377642 - DNA, 25 bp, Homo sapien
tctatgcaagcccaagccaactgct

SEQ ID NO: 1377643 - DNA, 25 bp, Homo sapien
cttcccttgaagagggtcgatggct

SEQ ID NO: 1377644 - DNA, 25 bp, Homo sapien
tgctcaatgagaagttttaccacaa

SEQ ID NO: 1377645 - DNA, 25 bp, Homo sapien
tcttaatcttagactctgctctcag

SEQ ID NO: 1377646 - DNA, 25 bp, Homo sapien
caacccagacaaccccataaatgat

SEQ ID NO: 1377647 - DNA, 25 bp, Homo sapien
tgctctcagggaacccaactgagat

SEQ ID NO: 1377648 - DNA, 25 bp, Homo sapien
tgcatccaggtcttaatcttagact

SEQ ID NO: 1377649 - DNA, 25 bp, Homo sapien
catgtgtcttgtaacgttaccctga

SEQ ID NO: 1377650 - DNA, 25 bp, Homo sapien
tctctttccctagttgccatgtgtc

SEQ ID NO: 1377651 - DNA, 25 bp, Homo sapien
agttcaactcctcttgccttctgag

SEQ ID NO: 1377652 - DNA, 25 bp, Homo sapien
ggctccttttacactcctctctagt

SEQ ID NO: 1377653 - DNA, 25 bp, Homo sapien
tgcacgggcactctaaaagctggtt

SEQ ID NO: 1377654 - DNA, 25 bp, Homo sapien
gctgcacgggcactctaaaagctgg

SEQ ID NO: 1377655 - DNA, 25 bp, Homo sapien
tggctgcacgggcactctaaaagct

SEQ ID NO: 1377656 - DNA, 25 bp, Homo sapien
cacgggcactctaaaagctggttcc

SEQ ID NO: 1377657 - DNA, 25 bp, Homo sapien
gagaagccatctgacaagctctcag

SEQ ID NO: 1377658 - DNA, 25 bp, Homo sapien
tctgacaagctctcagaattgtcta

SEQ ID NO: 1377659 - DNA, 25 bp, Homo sapien
aagtgagctactcgctgattgcctg

SEQ ID NO: 1377660 - DNA, 25 bp, Homo sapien
ggttgcataggactgcctgagaagc

SEQ ID NO: 1377661 - DNA, 25 bp, Homo sapien
tattggaaggtcttacaaactcagg

SEQ ID NO: 1377662 - DNA, 25 bp, Homo sapien
caagccactgactactgccagtaac

SEQ ID NO: 1377663 - DNA, 25 bp, Homo sapien
tgccagtaactgatggacgttggta

SEQ ID NO: 1377664 - DNA, 25 bp, Homo sapien
ttgggcccgtatgtaagttgctgaa

SEQ ID NO: 1377665 - DNA, 25 bp, Homo sapien
gaggagcagaatatgacttcaagtt

SEQ ID NO: 1377666 - DNA, 25 bp, Homo sapien
tgaatgaggagcagaatatgacttc

SEQ ID NO: 1377667 - DNA, 25 bp, Homo sapien
ggagcagaatatgacttcaagttat

SEQ ID NO: 1377668 - DNA, 25 bp, Homo sapien
atgaggagcagaatatgacttcaag

SEQ ID NO: 1377669 - DNA, 25 bp, Homo sapien
cagctcgtaaaagctcctgtctcat

SEQ ID NO: 1377670 - DNA, 25 bp, Homo sapien
catctcattaacagctcgtaaaagc

SEQ ID NO: 1377671 - DNA, 25 bp, Homo sapien
tccatctcattaacagctcgtaaaa

SEQ ID NO: 1377672 - DNA, 25 bp, Homo sapien
taaaagctcctgtctcatatttcta

SEQ ID NO: 1377673 - DNA, 25 bp, Homo sapien
gacaccaggtactgcctcgcagagg

SEQ ID NO: 1377674 - DNA, 25 bp, Homo sapien
cagaggtgctcgacaccaggtactg

SEQ ID NO: 1377675 - DNA, 25 bp, Homo sapien
agcacttgcggtctggggactgtca

SEQ ID NO: 1377676 - DNA, 25 bp, Homo sapien
actgtcagtggcacaggcccgggta

SEQ ID NO: 1377677 - DNA, 25 bp, Homo sapien
tcactgtgtcttccctgaacggctg

SEQ ID NO: 1377678 - DNA, 25 bp, Homo sapien
tgtgcagaatagtcaggatggcagc

SEQ ID NO: 1377679 - DNA, 25 bp, Homo sapien
gagaatatgggttggaaacacgtcc

SEQ ID NO: 1377680 - DNA, 25 bp, Homo sapien
agctgagctgttcatagttgtccca

SEQ ID NO: 1377681 - DNA, 25 bp, Homo sapien
gttgtttttagcatgtaccttccag

SEQ ID NO: 1377682 - DNA, 25 bp, Homo sapien
tgggacagaattgttgtttttagca

SEQ ID NO: 1377683 - DNA, 25 bp, Homo sapien
ttgttgtttttagcatgtaccttcc

SEQ ID NO: 1377684 - DNA, 25 bp, Homo sapien
aattgttgtttttagcatgtacctt

SEQ ID NO: 1377685 - DNA, 25 bp, Homo sapien
tctgatgtgtcaccaaacttcccca

SEQ ID NO: 1377686 - DNA, 25 bp, Homo sapien
acattggtgctctgtgtatctctgg

SEQ ID NO: 1377687 - DNA, 25 bp, Homo sapien
cattggtgctctgtgtatctctgga

SEQ ID NO: 1377688 - DNA, 25 bp, Homo sapien
tctctggataatctctgatgtgtca

SEQ ID NO: 1377689 - DNA, 25 bp, Homo sapien
caaactgagtttggcccaaatggga

SEQ ID NO: 1377690 - DNA, 25 bp, Homo sapien
tttggcccaaatgggactcatcact

SEQ ID NO: 1377691 - DNA, 25 bp, Homo sapien
tgcagctgtctgctagacatccctc

SEQ ID NO: 1377692 - DNA, 25 bp, Homo sapien
cctccagcatctcaaactgagtttg

SEQ ID NO: 1377693 - DNA, 25 bp, Homo sapien
cctgttccttctactaaggaatcag

SEQ ID NO: 1377694 - DNA, 25 bp, Homo sapien
actccctcttgagtggacggccaca

SEQ ID NO: 1377695 - DNA, 25 bp, Homo sapien
tgagtggacggccacaactgcctgc

SEQ ID NO: 1377696 - DNA, 25 bp, Homo sapien
acatgggcttgctgctatgaaccag

SEQ ID NO: 1377697 - DNA, 25 bp, Homo sapien
tggactccttatgacccagggaact

SEQ ID NO: 1377698 - DNA, 25 bp, Homo sapien
tatgtcctgccagcgaagagcttca

SEQ ID NO: 1377699 - DNA, 25 bp, Homo sapien
tgaaataggcttacgctgactcggt

SEQ ID NO: 1377700 - DNA, 25 bp, Homo sapien
ttaacgtcctgggtaagcgcagagg

SEQ ID NO: 1377701 - DNA, 25 bp, Homo sapien
ctgcacaacactgtttagacggttg

SEQ ID NO: 1377702 - DNA, 25 bp, Homo sapien
catttgtgttatttggctgcacatc

SEQ ID NO: 1377703 - DNA, 25 bp, Homo sapien
taagactctggagtgacggacggct

SEQ ID NO: 1377704 - DNA, 25 bp, Homo sapien
tagacggttgaacaagtgcaaagag

SEQ ID NO: 1377705 - DNA, 25 bp, Homo sapien
tgtcgaagctagcagctcggccctg

SEQ ID NO: 1377706 - DNA, 25 bp, Homo sapien
tggtttcggagatgggcacgagctc

SEQ ID NO: 1377707 - DNA, 25 bp, Homo sapien
gggcacgagctctcactgtcgaagc

SEQ ID NO: 1377708 - DNA, 25 bp, Homo sapien
ttggaggtggtttcggagatgggca

SEQ ID NO: 1377709 - DNA, 25 bp, Homo sapien
gcctgactctaacccttctgtgaaa

SEQ ID NO: 1377710 - DNA, 25 bp, Homo sapien
tgtccttactgccaagaacccatgg

SEQ ID NO: 1377711 - DNA, 25 bp, Homo sapien
agaatgaggtgctctgactgggcca

SEQ ID NO: 1377712 - DNA, 25 bp, Homo sapien
caatttgtctgggagctgacagtac

SEQ ID NO: 1377713 - DNA, 25 bp, Homo sapien
taactccaggtggcagtctctctgc

SEQ ID NO: 1377714 - DNA, 25 bp, Homo sapien
tcctaactccaggtggcagtctctc

SEQ ID NO: 1377715 - DNA, 25 bp, Homo sapien
gcttgcagcatccacgtgaatgaaa

SEQ ID NO: 1377716 - DNA, 25 bp, Homo sapien
tctctctgcttgcagcatccacgtg

SEQ ID NO: 1377717 - DNA, 25 bp, Homo sapien
ccctgggttgaaccaacacagcctt

SEQ ID NO: 1377718 - DNA, 25 bp, Homo sapien
cagccttcagtgaggtgctggatgc

SEQ ID NO: 1377719 - DNA, 25 bp, Homo sapien
tgcaggttgtctagcgttctgccca

SEQ ID NO: 1377720 - DNA, 25 bp, Homo sapien
cagtgcctcctgtattgtgggctcc

SEQ ID NO: 1377721 - DNA, 25 bp, Homo sapien
gctttctcctaaaggacagacttgg

SEQ ID NO: 1377722 - DNA, 25 bp, Homo sapien
ttggggctttctcctaaaggacaga

SEQ ID NO: 1377723 - DNA, 25 bp, Homo sapien
acagacttggccaagggctttgtga

SEQ ID NO: 1377724 - DNA, 25 bp, Homo sapien
caggggtagaatgtcttgccaagct

SEQ ID NO: 1377725 - DNA, 25 bp, Homo sapien
cattaagaactcagtgttgctttca

SEQ ID NO: 1377726 - DNA, 25 bp, Homo sapien
tggcctattacacactgggtaagaa

SEQ ID NO: 1377727 - DNA, 25 bp, Homo sapien
cttttggcctattacacactgggta

SEQ ID NO: 1377728 - DNA, 25 bp, Homo sapien
tccttttggcctattacacactggg

SEQ ID NO: 1377729 - DNA, 25 bp, Homo sapien
acaaaaggccgagggtgtcactgca

SEQ ID NO: 1377730 - DNA, 25 bp, Homo sapien
tttccacaaaaggccgagggtgtca

SEQ ID NO: 1377731 - DNA, 25 bp, Homo sapien
tccacaaaaggccgagggtgtcact

SEQ ID NO: 1377732 - DNA, 25 bp, Homo sapien
cacaaaaggccgagggtgtcactgc

SEQ ID NO: 1377733 - DNA, 25 bp, Homo sapien
caaggagtgccagtgtgcgatgggc

SEQ ID NO: 1377734 - DNA, 25 bp, Homo sapien
ttcagcagtgatccccacacgacag

SEQ ID NO: 1377735 - DNA, 25 bp, Homo sapien
agcatctcgttccagtggtccctgc

SEQ ID NO: 1377736 - DNA, 25 bp, Homo sapien
actcctatgatctcattgtggccca

SEQ ID NO: 1377737 - DNA, 25 bp, Homo sapien
tcattgtagacaggattgagagtgt

SEQ ID NO: 1377738 - DNA, 25 bp, Homo sapien
gctgacttgatccatgttttccggg

SEQ ID NO: 1377739 - DNA, 25 bp, Homo sapien
gcctccgcccatcacagagcaagga

SEQ ID NO: 1377740 - DNA, 25 bp, Homo sapien
gagcaaggacactttcacataggga

SEQ ID NO: 1377741 - DNA, 25 bp, Homo sapien
gaggttccgacacttaatcactgtg

SEQ ID NO: 1377742 - DNA, 25 bp, Homo sapien
gtccatcgccttgaggttccgacac

SEQ ID NO: 1377743 - DNA, 25 bp, Homo sapien
cagtgggcaggtagcaaagggagaa

SEQ ID NO: 1377744 - DNA, 25 bp, Homo sapien
ctgaatagcctgtgatgtccatcgc

SEQ ID NO: 1377745 - DNA, 25 bp, Homo sapien
gagacacatagcaagtgccctgtgc

SEQ ID NO: 1377746 - DNA, 25 bp, Homo sapien
caccctcgacatgcagatggtctag

SEQ ID NO: 1377747 - DNA, 25 bp, Homo sapien
catgtctcacataggcactgaggtg

SEQ ID NO: 1377748 - DNA, 25 bp, Homo sapien
ctttgtggagagtatgcagtcccca

SEQ ID NO: 1377749 - DNA, 25 bp, Homo sapien
ggacagggtccttgccttgcacctg

SEQ ID NO: 1377750 - DNA, 25 bp, Homo sapien
ttttgggacagggtccttgccttgc

SEQ ID NO: 1377751 - DNA, 25 bp, Homo sapien
ctagtgacgagagccccttttggga

SEQ ID NO: 1377752 - DNA, 25 bp, Homo sapien
gtgccccccagcatctagtgacgag

SEQ ID NO: 1377753 - DNA, 25 bp, Homo sapien
tgagggttagggctgccgaggaccg

SEQ ID NO: 1377754 - DNA, 25 bp, Homo sapien
cttctgtccctggttattgagggtt

SEQ ID NO: 1377755 - DNA, 25 bp, Homo sapien
ctgtccctggttattgagggttagg

SEQ ID NO: 1377756 - DNA, 25 bp, Homo sapien
ctgccgaggaccgtgtaggttttga

SEQ ID NO: 1377757 - DNA, 25 bp, Homo sapien
ggtgtagttatattcctcactgtta

SEQ ID NO: 1377758 - DNA, 25 bp, Homo sapien
atgaaaaagttttgagccagtgaag

SEQ ID NO: 1377759 - DNA, 25 bp, Homo sapien
tgggaggaggaaacccacatatgaa

SEQ ID NO: 1377760 - DNA, 25 bp, Homo sapien
tttgagccagtgaagtgtttcccct

SEQ ID NO: 1377761 - DNA, 25 bp, Homo sapien
tacaggccgcatgttctgccagagc

SEQ ID NO: 1377762 - DNA, 25 bp, Homo sapien
tgccagagccagctaatgtctctca

SEQ ID NO: 1377763 - DNA, 25 bp, Homo sapien
tctcattggtaagcaggtgacacta

SEQ ID NO: 1377764 - DNA, 25 bp, Homo sapien
ccaggagcacgatgataaagcgcca

SEQ ID NO: 1377765 - DNA, 25 bp, Homo sapien
tgagcttggctgttccgcgtgccct

SEQ ID NO: 1377766 - DNA, 25 bp, Homo sapien
ccagctgactttcagctagttcctc

SEQ ID NO: 1377767 - DNA, 25 bp, Homo sapien
gactttcagctagttcctctgatgt

SEQ ID NO: 1377768 - DNA, 25 bp, Homo sapien
ctctgagcttggctgttccgcgtgc

SEQ ID NO: 1377769 - DNA, 25 bp, Homo sapien
tggcagctttgtaaggccatttctt

SEQ ID NO: 1377770 - DNA, 25 bp, Homo sapien
gctagggaactcatcaagagtgaaa

SEQ ID NO: 1377771 - DNA, 25 bp, Homo sapien
caagagtgaaagtggaactgtctcc

SEQ ID NO: 1377772 - DNA, 25 bp, Homo sapien
gctgtctggaggctagggaactcat

SEQ ID NO: 1377773 - DNA, 25 bp, Homo sapien
cgtgtaaccctgatttgccctgctg

SEQ ID NO: 1377774 - DNA, 25 bp, Homo sapien
ccactggggcttccgtgtaaccctg

SEQ ID NO: 1377775 - DNA, 25 bp, Homo sapien
tgtaaccctgatttgccctgctggc

SEQ ID NO: 1377776 - DNA, 25 bp, Homo sapien
tccgtgtaaccctgatttgccctgc

SEQ ID NO: 1377777 - DNA, 25 bp, Homo sapien
gcttttctagagcaatctcatctga

SEQ ID NO: 1377778 - DNA, 25 bp, Homo sapien
tgtgttgtaagcatcctgaactggt

SEQ ID NO: 1377779 - DNA, 25 bp, Homo sapien
tgtcatcaacatagcctggcctaaa

SEQ ID NO: 1377780 - DNA, 25 bp, Homo sapien
tcatgtctcctaacacttctgcaca

SEQ ID NO: 1377781 - DNA, 25 bp, Homo sapien
ctgagctcaggtccaaagggcagct

SEQ ID NO: 1377782 - DNA, 25 bp, Homo sapien
cagaagctgccagattcctgagctc

SEQ ID NO: 1377783 - DNA, 25 bp, Homo sapien
tgtttttcagaagctgccagattcc

SEQ ID NO: 1377784 - DNA, 25 bp, Homo sapien
tcaggtgtttttcagaagctgccag

SEQ ID NO: 1377785 - DNA, 25 bp, Homo sapien
cctgagaactctacctgctggtggg

SEQ ID NO: 1377786 - DNA, 25 bp, Homo sapien
atgagcctgctcctgagaactctac

SEQ ID NO: 1377787 - DNA, 25 bp, Homo sapien
ggtgatgagcctgctcctgagaact

SEQ ID NO: 1377788 - DNA, 25 bp, Homo sapien
gcagggtgatgagcctgctcctgag

SEQ ID NO: 1377789 - DNA, 25 bp, Homo sapien
ggacactagctatacctgcaggatg

SEQ ID NO: 1377790 - DNA, 25 bp, Homo sapien
tgagtattgactatccaagcgggag

SEQ ID NO: 1377791 - DNA, 25 bp, Homo sapien
ccactggagcttggagggaatgccc

SEQ ID NO: 1377792 - DNA, 25 bp, Homo sapien
tcagcacaagctatgagaatggcgt

SEQ ID NO: 1377793 - DNA, 25 bp, Homo sapien
ctaggaagtgagggtttggggacat

SEQ ID NO: 1377794 - DNA, 25 bp, Homo sapien
agtgagggtttggggacatgtccca

SEQ ID NO: 1377795 - DNA, 25 bp, Homo sapien
gaagtgagggtttggggacatgtcc

SEQ ID NO: 1377796 - DNA, 25 bp, Homo sapien
ggaagtgagggtttggggacatgtc

SEQ ID NO: 1377797 - DNA, 25 bp, Homo sapien
cacaaatcctcaagaagccaaggaa

SEQ ID NO: 1377798 - DNA, 25 bp, Homo sapien
aaatcctcaagaagccaaggaacag

SEQ ID NO: 1377799 - DNA, 25 bp, Homo sapien
aacccagaaccacaaatcctcaaga

SEQ ID NO: 1377800 - DNA, 25 bp, Homo sapien
gaaccacaaatcctcaagaagccaa

SEQ ID NO: 1377801 - DNA, 25 bp, Homo sapien
tagagctcaggcttgatgcggccaa

SEQ ID NO: 1377802 - DNA, 25 bp, Homo sapien
gagcttccacaaaagtccttggcag

SEQ ID NO: 1377803 - DNA, 25 bp, Homo sapien
tctacactggagacatgcatctgcc

SEQ ID NO: 1377804 - DNA, 25 bp, Homo sapien
gatacgcacaatcagggtctcggtc

SEQ ID NO: 1377805 - DNA, 25 bp, Homo sapien
gctctgtagtttgccgctgcagccg

SEQ ID NO: 1377806 - DNA, 25 bp, Homo sapien
ccgggtgtgacgcatgatgtgctcc

SEQ ID NO: 1377807 - DNA, 25 bp, Homo sapien
catctgcacctcagctgggatatct

SEQ ID NO: 1377808 - DNA, 25 bp, Homo sapien
gcttgtccgccatgttgcctctgaa

SEQ ID NO: 1377809 - DNA, 25 bp, Homo sapien
gaaagagaaaaactgccaccagggc

SEQ ID NO: 1377810 - DNA, 25 bp, Homo sapien
agggccacgccacacacaataacta

SEQ ID NO: 1377811 - DNA, 25 bp, Homo sapien
agaaaaactgccaccagggccacgc

SEQ ID NO: 1377812 - DNA, 25 bp, Homo sapien
gccacgccacacacaataactacaa

SEQ ID NO: 1377813 - DNA, 25 bp, Homo sapien
gggaagtcaccacagctatatgtgt

SEQ ID NO: 1377814 - DNA, 25 bp, Homo sapien
gagggcatggttttttggaatcagc

SEQ ID NO: 1377815 - DNA, 25 bp, Homo sapien
ctctgttacagctgttctggatgca

SEQ ID NO: 1377816 - DNA, 25 bp, Homo sapien
cctagtgggctcaccagggaagtca

SEQ ID NO: 1377817 - DNA, 25 bp, Homo sapien
ttctaatgggctcccacatcagaaa

SEQ ID NO: 1377818 - DNA, 25 bp, Homo sapien
cagcaattcttattgcttgctattg

SEQ ID NO: 1377819 - DNA, 25 bp, Homo sapien
gctaacagattgtaattgaagagat

SEQ ID NO: 1377820 - DNA, 25 bp, Homo sapien
gtaacaggcgttcttgctaacagat

SEQ ID NO: 1377821 - DNA, 25 bp, Homo sapien
tgttacagctaacagaacattggca

SEQ ID NO: 1377822 - DNA, 25 bp, Homo sapien
ccaagctttatgactgggcgctcac

SEQ ID NO: 1377823 - DNA, 25 bp, Homo sapien
gagacaatgccaagctaattacggc

SEQ ID NO: 1377824 - DNA, 25 bp, Homo sapien
tcagagctaaatcggagactaatgt

SEQ ID NO: 1377825 - DNA, 25 bp, Homo sapien
tttgtacctgcaactagtgagagga

SEQ ID NO: 1377826 - DNA, 25 bp, Homo sapien
gcatgtggcccttctgaatgtggga

SEQ ID NO: 1377827 - DNA, 25 bp, Homo sapien
ccctctatgcttctctccctgtttg

SEQ ID NO: 1377828 - DNA, 25 bp, Homo sapien
ttctgaatgtgggatcaaggctgga

SEQ ID NO: 1377829 - DNA, 25 bp, Homo sapien
tgctcctaggcccagcgctactggg

SEQ ID NO: 1377830 - DNA, 25 bp, Homo sapien
cgcgccagcggtgcagagccactga

SEQ ID NO: 1377831 - DNA, 25 bp, Homo sapien
tgagcaactcccgagtgctcctagg

SEQ ID NO: 1377832 - DNA, 25 bp, Homo sapien
cctggcttctcgtccctggagcagc

SEQ ID NO: 1377833 - DNA, 25 bp, Homo sapien
gggaagggagatcgcaggacggata

SEQ ID NO: 1377834 - DNA, 25 bp, Homo sapien
gagatcgcaggacggatatccagga

SEQ ID NO: 1377835 - DNA, 25 bp, Homo sapien
atcgcaggacggatatccaggaagg

SEQ ID NO: 1377836 - DNA, 25 bp, Homo sapien
aagggagatcgcaggacggatatcc

SEQ ID NO: 1377837 - DNA, 25 bp, Homo sapien
gcagctcgaagctccgacaagtctc

SEQ ID NO: 1377838 - DNA, 25 bp, Homo sapien
gctgcagctcgaagctccgacaagt

SEQ ID NO: 1377839 - DNA, 25 bp, Homo sapien
tcgaagctccgacaagtctccacgt

SEQ ID NO: 1377840 - DNA, 25 bp, Homo sapien
aggaccgcgagcgcctcctggcacc

SEQ ID NO: 1377841 - DNA, 25 bp, Homo sapien
gacacccaggcttgccgagcagcag

SEQ ID NO: 1377842 - DNA, 25 bp, Homo sapien
gcggctccgctctgcttttaatcac

SEQ ID NO: 1377843 - DNA, 25 bp, Homo sapien
cggccccaagaagaccctccctgca

SEQ ID NO: 1377844 - DNA, 25 bp, Homo sapien
tgcttttaatcacttccccgcaggg

SEQ ID NO: 1377845 - DNA, 25 bp, Homo sapien
gcacgacggccccaagaagaccctc

SEQ ID NO: 1377846 - DNA, 25 bp, Homo sapien
tggcatcccgcggcagctggcgagt

SEQ ID NO: 1377847 - DNA, 25 bp, Homo sapien
gtggcatcccgcggcagctggcgag

SEQ ID NO: 1377848 - DNA, 25 bp, Homo sapien
ccgccccctctacactcagggactg

SEQ ID NO: 1377849 - DNA, 25 bp, Homo sapien
ggccgccccctctacactcagggac

SEQ ID NO: 1377850 - DNA, 25 bp, Homo sapien
cgccccctctacactcagggactgg

SEQ ID NO: 1377851 - DNA, 25 bp, Homo sapien
gcggccgccccctctacactcaggg

SEQ ID NO: 1377852 - DNA, 25 bp, Homo sapien
gagccttagctcctggcggtctcca

SEQ ID NO: 1377853 - DNA, 25 bp, Homo sapien
tctgtgccaaccggcccttggactt

SEQ ID NO: 1377854 - DNA, 25 bp, Homo sapien
gcggtctccactgcgcgccatctgt

SEQ ID NO: 1377855 - DNA, 25 bp, Homo sapien
ttccggagggaggagattcggagcc

SEQ ID NO: 1377856 - DNA, 25 bp, Homo sapien
ggacgagggagaggcaattgttgaa

SEQ ID NO: 1377857 - DNA, 25 bp, Homo sapien
cagttggtgctaccatcgcgtgggc

SEQ ID NO: 1377858 - DNA, 25 bp, Homo sapien
ccatcgcgtgggcataagtttaggg

SEQ ID NO: 1377859 - DNA, 25 bp, Homo sapien
ttgttgaaggttcgcagcttccacc

SEQ ID NO: 1377860 - DNA, 25 bp, Homo sapien
ttgcctttgcagagaatgaaaaaac

SEQ ID NO: 1377861 - DNA, 25 bp, Homo sapien
cacaggaccattccaagggcccaga

SEQ ID NO: 1377862 - DNA, 25 bp, Homo sapien
gcctttgcagagaatgaaaaaacac

SEQ ID NO: 1377863 - DNA, 25 bp, Homo sapien
tgcctttgcagagaatgaaaaaaca

SEQ ID NO: 1377864 - DNA, 25 bp, Homo sapien
tctcaatctagcagtgtgaaggagc

SEQ ID NO: 1377865 - DNA, 25 bp, Homo sapien
gcagctccggacctggcatttctca

SEQ ID NO: 1377866 - DNA, 25 bp, Homo sapien
tccacactcggcaggcgcttctgca

SEQ ID NO: 1377867 - DNA, 25 bp, Homo sapien
caggtggcaggagccgagaattaac

SEQ ID NO: 1377868 - DNA, 25 bp, Homo sapien
gaagatgcagaagacgttgcagagc

SEQ ID NO: 1377869 - DNA, 25 bp, Homo sapien
ggtcaatgcctaggtgctttttgaa

SEQ ID NO: 1377870 - DNA, 25 bp, Homo sapien
gcagaagacgttgcagagctcaagg

SEQ ID NO: 1377871 - DNA, 25 bp, Homo sapien
cagagctcaaggtcaatgcctaggt

SEQ ID NO: 1377872 - DNA, 25 bp, Homo sapien
tttattgttattcagtgcaaaacaa

SEQ ID NO: 1377873 - DNA, 25 bp, Homo sapien
tattttattgttattcagtgcaaaa

SEQ ID NO: 1377874 - DNA, 25 bp, Homo sapien
ttttattgttattcagtgcaaaaca

SEQ ID NO: 1377875 - DNA, 25 bp, Homo sapien
ttttattttattgttattcagtgca

SEQ ID NO: 1377876 - DNA, 25 bp, Homo sapien
ggtgcattctcagcacagcacaact

SEQ ID NO: 1377877 - DNA, 25 bp, Homo sapien
agttgggtgcattctcagcacagca

SEQ ID NO: 1377878 - DNA, 25 bp, Homo sapien
ggctaagttgggtgcattctcagca

SEQ ID NO: 1377879 - DNA, 25 bp, Homo sapien
tcaataggctaagttgggtgcattc

SEQ ID NO: 1377880 - DNA, 25 bp, Homo sapien
ccaggcaggtaaaattgggacacag

SEQ ID NO: 1377881 - DNA, 25 bp, Homo sapien
cctccctgggacacatggcggtgat

SEQ ID NO: 1377882 - DNA, 25 bp, Homo sapien
ctgtagcctctctgtagatactcca

SEQ ID NO: 1377883 - DNA, 25 bp, Homo sapien
tgtagatactccaagaacccacctc

SEQ ID NO: 1377884 - DNA, 25 bp, Homo sapien
cattggaactgccaaagagctgccc

SEQ ID NO: 1377885 - DNA, 25 bp, Homo sapien
gtgaacactcgcctacatcgataca

SEQ ID NO: 1377886 - DNA, 25 bp, Homo sapien
gatcgggaggtaaccacacttctag

SEQ ID NO: 1377887 - DNA, 25 bp, Homo sapien
tgagtcattatcagtgaacactcgc

SEQ ID NO: 1377888 - DNA, 25 bp, Homo sapien
tcactaaagtggattcaggactggg

SEQ ID NO: 1377889 - DNA, 25 bp, Homo sapien
tctcactaaagtggattcaggactg

SEQ ID NO: 1377890 - DNA, 25 bp, Homo sapien
tgttctcactaaagtggattcagga

SEQ ID NO: 1377891 - DNA, 25 bp, Homo sapien
ctgtgttctcactaaagtggattca

SEQ ID NO: 1377892 - DNA, 25 bp, Homo sapien
cgatttgatgattccaagacaccat

SEQ ID NO: 1377893 - DNA, 25 bp, Homo sapien
gtcttgtgggtccacgatttgatga

SEQ ID NO: 1377894 - DNA, 25 bp, Homo sapien
ctcatcaaatcatagtcttgtgggt

SEQ ID NO: 1377895 - DNA, 25 bp, Homo sapien
aaatcatagtcttgtgggtccacga

SEQ ID NO: 1377896 - DNA, 25 bp, Homo sapien
aaaataactgaagttgcaggcagcc

SEQ ID NO: 1377897 - DNA, 25 bp, Homo sapien
ctaacaatgcattcgagacccctgg

SEQ ID NO: 1377898 - DNA, 25 bp, Homo sapien
ggagcttgccgatctgctctgtttc

SEQ ID NO: 1377899 - DNA, 25 bp, Homo sapien
ctggctcctcaaaggagcttgccga

SEQ ID NO: 1377900 - DNA, 25 bp, Homo sapien
tacttggaatgtgctgatctcctcc

SEQ ID NO: 1377901 - DNA, 25 bp, Homo sapien
ctctgctcaattgcctctgctggtg

SEQ ID NO: 1377902 - DNA, 25 bp, Homo sapien
ctgctcaattgcctctgctggtggg

SEQ ID NO: 1377903 - DNA, 25 bp, Homo sapien
tctgctcaattgcctctgctggtgg

SEQ ID NO: 1377904 - DNA, 25 bp, Homo sapien
ggctcagctagaagaggatctgcct

SEQ ID NO: 1377905 - DNA, 25 bp, Homo sapien
tgtggcttatctgcatccctttggc

SEQ ID NO: 1377906 - DNA, 25 bp, Homo sapien
ggatctgcctccgagatcacgcagg

SEQ ID NO: 1377907 - DNA, 25 bp, Homo sapien
ggtcctcaccggctgttaggtgaag

SEQ ID NO: 1377908 - DNA, 25 bp, Homo sapien
cgcagttgacagcaatatcacccat

SEQ ID NO: 1377909 - DNA, 25 bp, Homo sapien
aggctgctcccccagtcagagcttt

SEQ ID NO: 1377910 - DNA, 25 bp, Homo sapien
tgagaggacgagtcaaggctgctcc

SEQ ID NO: 1377911 - DNA, 25 bp, Homo sapien
actggctgcaggctcatggacaaat

SEQ ID NO: 1377912 - DNA, 25 bp, Homo sapien
tgcagggcactatcagggcaacaaa

SEQ ID NO: 1377913 - DNA, 25 bp, Homo sapien
tatgctgctaaaatctcccctctgt

SEQ ID NO: 1377914 - DNA, 25 bp, Homo sapien
tgttttctcactacaattcagaaac

SEQ ID NO: 1377915 - DNA, 25 bp, Homo sapien
ccctctgtgtttccggttgcagggc

SEQ ID NO: 1377916 - DNA, 25 bp, Homo sapien
gaaccctggcttgtgcatattctgc

SEQ ID NO: 1377917 - DNA, 25 bp, Homo sapien
tggcttgtgcatattctgcctcttc

SEQ ID NO: 1377918 - DNA, 25 bp, Homo sapien
ttaatgctctgatccatcccagaac

SEQ ID NO: 1377919 - DNA, 25 bp, Homo sapien
atcccagaaccctggcttgtgcata

SEQ ID NO: 1377920 - DNA, 25 bp, Homo sapien
ggacaggaaaaatagccagggcagt

SEQ ID NO: 1377921 - DNA, 25 bp, Homo sapien
tttttaaagcgcaagagtggaaggc

SEQ ID NO: 1377922 - DNA, 25 bp, Homo sapien
tttaaagcgcaagagtggaaggctg

SEQ ID NO: 1377923 - DNA, 25 bp, Homo sapien
tgtacatccctttcgttttcaggga

SEQ ID NO: 1377924 - DNA, 25 bp, Homo sapien
gcagcaaggtagaggagacaacagc

SEQ ID NO: 1377925 - DNA, 25 bp, Homo sapien
caaggtagaggagacaacagcacac

SEQ ID NO: 1377926 - DNA, 25 bp, Homo sapien
cagcaaggtagaggagacaacagca

SEQ ID NO: 1377927 - DNA, 25 bp, Homo sapien
gcaaggtagaggagacaacagcaca

SEQ ID NO: 1377928 - DNA, 25 bp, Homo sapien
ttgtagattcatccgtgctcccctg

SEQ ID NO: 1377929 - DNA, 25 bp, Homo sapien
ccctttgtagattcatccgtgctcc

SEQ ID NO: 1377930 - DNA, 25 bp, Homo sapien
gtagattcatccgtgctcccctgac

SEQ ID NO: 1377931 - DNA, 25 bp, Homo sapien
ggcccctttgtagattcatccgtgc

SEQ ID NO: 1377932 - DNA, 25 bp, Homo sapien
tcctgtttccaggtcgcagatgaga

SEQ ID NO: 1377933 - DNA, 25 bp, Homo sapien
taactgaagtcaccctgatatggag

SEQ ID NO: 1377934 - DNA, 25 bp, Homo sapien
aagtcaccctgatatggaggtgcca

SEQ ID NO: 1377935 - DNA, 25 bp, Homo sapien
agatgagatgaaatcctctttgtgg

SEQ ID NO: 1377936 - DNA, 25 bp, Homo sapien
gttctctctttgaatcataagtcta

SEQ ID NO: 1377937 - DNA, 25 bp, Homo sapien
tctttgaatcataagtctattgcgc

SEQ ID NO: 1377938 - DNA, 25 bp, Homo sapien
tttgaatcataagtctattgcgcac

SEQ ID NO: 1377939 - DNA, 25 bp, Homo sapien
tctctttgaatcataagtctattgc

SEQ ID NO: 1377940 - DNA, 25 bp, Homo sapien
tgcagtcccagtgatctcactccga

SEQ ID NO: 1377941 - DNA, 25 bp, Homo sapien
ggaatttttgtagccagcgtcccca

SEQ ID NO: 1377942 - DNA, 25 bp, Homo sapien
cactccgaggaatttttgtagccag

SEQ ID NO: 1377943 - DNA, 25 bp, Homo sapien
taaaccaaatgttggtgatgcagtc

SEQ ID NO: 1377944 - DNA, 25 bp, Homo sapien
gagaagtgacttaggaacttgggaa

SEQ ID NO: 1377945 - DNA, 25 bp, Homo sapien
tgcaggagaagtgacttaggaactt

SEQ ID NO: 1377946 - DNA, 25 bp, Homo sapien
ctgtgaaatgcaggagaagtgactt

SEQ ID NO: 1377947 - DNA, 25 bp, Homo sapien
gaaatgcaggagaagtgacttagga

SEQ ID NO: 1377948 - DNA, 25 bp, Homo sapien
gaaggccccacagctgagcgtggca

SEQ ID NO: 1377949 - DNA, 25 bp, Homo sapien
cagagtgatgaagacctgaaccaac

SEQ ID NO: 1377950 - DNA, 25 bp, Homo sapien
aggcggcatctaggaacaagggtct

SEQ ID NO: 1377951 - DNA, 25 bp, Homo sapien
cagggcaccaagcatcagagcctgg

SEQ ID NO: 1377952 - DNA, 25 bp, Homo sapien
ctgtgtgggctacccaaaaggcaga

SEQ ID NO: 1377953 - DNA, 25 bp, Homo sapien
tgtgtgggctacccaaaaggcagaa

SEQ ID NO: 1377954 - DNA, 25 bp, Homo sapien
ctagtaaattctgggaactgcccca

SEQ ID NO: 1377955 - DNA, 25 bp, Homo sapien
cagcagcaccaaccacagggggctg

SEQ ID NO: 1377956 - DNA, 25 bp, Homo sapien
aaagcttcacgttgggcacaggcca

SEQ ID NO: 1377957 - DNA, 25 bp, Homo sapien
gggctgccctgaggtgcctcttcct

SEQ ID NO: 1377958 - DNA, 25 bp, Homo sapien
gcagcttgaaaacgccttcaaaggc

SEQ ID NO: 1377959 - DNA, 25 bp, Homo sapien
taagcagcttgaaaacgccttcaaa

SEQ ID NO: 1377960 - DNA, 25 bp, Homo sapien
ttgaaaacgccttcaaaggccacca

SEQ ID NO: 1377961 - DNA, 25 bp, Homo sapien
gcttgaaaacgccttcaaaggccac

SEQ ID NO: 1377962 - DNA, 25 bp, Homo sapien
catggatggattacattatctacct

SEQ ID NO: 1377963 - DNA, 25 bp, Homo sapien
cattatctacctctgcttcatttag

SEQ ID NO: 1377964 - DNA, 25 bp, Homo sapien
tcatttagatgatcaacggcatgca

SEQ ID NO: 1377965 - DNA, 25 bp, Homo sapien
catttagatgatcaacggcatgcag

SEQ ID NO: 1377966 - DNA, 25 bp, Homo sapien
cttttccattatgatgtcgcttgct

SEQ ID NO: 1377967 - DNA, 25 bp, Homo sapien
ccattatgatgtcgcttgctggcag

SEQ ID NO: 1377968 - DNA, 25 bp, Homo sapien
tgatgtcgcttgctggcagatgtcc

SEQ ID NO: 1377969 - DNA, 25 bp, Homo sapien
ttatgatgtcgcttgctggcagatg

SEQ ID NO: 1377970 - DNA, 25 bp, Homo sapien
tatgacgcatctggcagagtgacca

SEQ ID NO: 1377971 - DNA, 25 bp, Homo sapien
tcagcatcaccatgtaatgagcctc

SEQ ID NO: 1377972 - DNA, 25 bp, Homo sapien
aagtggtagcttactctgagtgtcc

SEQ ID NO: 1377973 - DNA, 25 bp, Homo sapien
caattgagccaaacaacgacctgct

SEQ ID NO: 1377974 - DNA, 25 bp, Homo sapien
gttgggggctgctacagcctcaccc

SEQ ID NO: 1377975 - DNA, 25 bp, Homo sapien
ttcctggttgggggctgctacagcc

SEQ ID NO: 1377976 - DNA, 25 bp, Homo sapien
ggtttcctggttgggggctgctaca

SEQ ID NO: 1377977 - DNA, 25 bp, Homo sapien
tggttgggggctgctacagcctcac

SEQ ID NO: 1377978 - DNA, 25 bp, Homo sapien
gattgagttgtgacacactttgagt

SEQ ID NO: 1377979 - DNA, 25 bp, Homo sapien
gttgtgacacactttgagtctcccc

SEQ ID NO: 1377980 - DNA, 25 bp, Homo sapien
ctggattgagttgtgacacactttg

SEQ ID NO: 1377981 - DNA, 25 bp, Homo sapien
agttgtgacacactttgagtctccc

SEQ ID NO: 1377982 - DNA, 25 bp, Homo sapien
tgttgccaacctggaaggtgccagg

SEQ ID NO: 1377983 - DNA, 25 bp, Homo sapien
ggtcatagtctattttagcaccagg

SEQ ID NO: 1377984 - DNA, 25 bp, Homo sapien
cagggtcatagtctattttagcacc

SEQ ID NO: 1377985 - DNA, 25 bp, Homo sapien
gtgccagggtcatagtctattttag

SEQ ID NO: 1377986 - DNA, 25 bp, Homo sapien
cccctgcaaagtgatgagcactaga

SEQ ID NO: 1377987 - DNA, 25 bp, Homo sapien
gatgagcactagacatccttttctg

SEQ ID NO: 1377988 - DNA, 25 bp, Homo sapien
gcatacagggaagtcttaccccctg

SEQ ID NO: 1377989 - DNA, 25 bp, Homo sapien
aagtcttaccccctgcaaagtgatg

SEQ ID NO: 1377990 - DNA, 25 bp, Homo sapien
aatattggccgctttcacagcctca

SEQ ID NO: 1377991 - DNA, 25 bp, Homo sapien
aaatattggccgctttcacagcctc

SEQ ID NO: 1377992 - DNA, 25 bp, Homo sapien
agcactgctgtactcttgtcccaca

SEQ ID NO: 1377993 - DNA, 25 bp, Homo sapien
tcttgtcccacagtcaggtagggca

SEQ ID NO: 1377994 - DNA, 25 bp, Homo sapien
gctcggccagtagtgtttctccaca

SEQ ID NO: 1377995 - DNA, 25 bp, Homo sapien
tgctggtgcttccctgatccactgc

SEQ ID NO: 1377996 - DNA, 25 bp, Homo sapien
gtagtgtttctccacatggttcaca

SEQ ID NO: 1377997 - DNA, 25 bp, Homo sapien
ccacatggttcacagctgctggtgc

SEQ ID NO: 1377998 - DNA, 25 bp, Homo sapien
aagactgccctggattgccaactaa

SEQ ID NO: 1377999 - DNA, 25 bp, Homo sapien
tggattgccaactaaactttcatca

SEQ ID NO: 1378000 - DNA, 25 bp, Homo sapien
tcatcagtgatagcctgtgaaccat

SEQ ID NO: 1378001 - DNA, 25 bp, Homo sapien
tcctgacagcaaggttctgtgcccc

SEQ ID NO: 1378002 - DNA, 25 bp, Homo sapien
tggtggtgaaagcccctaacctgtg

SEQ ID NO: 1378003 - DNA, 25 bp, Homo sapien
gaaagcccctaacctgtgaggaaga

SEQ ID NO: 1378004 - DNA, 25 bp, Homo sapien
gaggaagaggctcatccctaggttt

SEQ ID NO: 1378005 - DNA, 25 bp, Homo sapien
taggtttggccttacaaagacagca

SEQ ID NO: 1378006 - DNA, 25 bp, Homo sapien
actgcaaaacagcacgttgatttat

SEQ ID NO: 1378007 - DNA, 25 bp, Homo sapien
tgcaaaacagcacgttgatttatgc

SEQ ID NO: 1378008 - DNA, 25 bp, Homo sapien
tgtaaactgcaaaacagcacgttga

SEQ ID NO: 1378009 - DNA, 25 bp, Homo sapien
aaaacagcacgttgatttatgcttt

SEQ ID NO: 1378010 - DNA, 25 bp, Homo sapien
agaaataccaagagtcctgagcctg

SEQ ID NO: 1378011 - DNA, 25 bp, Homo sapien
taccaagagtcctgagcctgcacgg

SEQ ID NO: 1378012 - DNA, 25 bp, Homo sapien
aataccaagagtcctgagcctgcac

SEQ ID NO: 1378013 - DNA, 25 bp, Homo sapien
ccaagagtcctgagcctgcacgggc

SEQ ID NO: 1378014 - DNA, 25 bp, Homo sapien
ctgcctcttcgggactgtcttgcga

SEQ ID NO: 1378015 - DNA, 25 bp, Homo sapien
ctcttcgggactgtcttgcgaggaa

SEQ ID NO: 1378016 - DNA, 25 bp, Homo sapien
tcagagctgcctcttcgggactgtc

SEQ ID NO: 1378017 - DNA, 25 bp, Homo sapien
cttcgggactgtcttgcgaggaagc

SEQ ID NO: 1378018 - DNA, 25 bp, Homo sapien
gcatttcttgggtgactgagtcgaa

SEQ ID NO: 1378019 - DNA, 25 bp, Homo sapien
ttagaagggcaattgcaaccaaggg

SEQ ID NO: 1378020 - DNA, 25 bp, Homo sapien
ttatcggattctaccttaagagtgg

SEQ ID NO: 1378021 - DNA, 25 bp, Homo sapien
gaactggtgctcgtcgtggctgcat

SEQ ID NO: 1378022 - DNA, 25 bp, Homo sapien
gaagatcaagtcctctggtcaagaa

SEQ ID NO: 1378023 - DNA, 25 bp, Homo sapien
caagtcctctggtcaagaaataggc

SEQ ID NO: 1378024 - DNA, 25 bp, Homo sapien
ggtcaagaaataggctcctgggagc

SEQ ID NO: 1378025 - DNA, 25 bp, Homo sapien
tcctctggtcaagaaataggctcct

SEQ ID NO: 1378026 - DNA, 25 bp, Homo sapien
agtccatcttgtgaccatccctata

SEQ ID NO: 1378027 - DNA, 25 bp, Homo sapien
ttgtgaccatccctataaccagctc

SEQ ID NO: 1378028 - DNA, 25 bp, Homo sapien
aagtgagagaggcctgcggcagtga

SEQ ID NO: 1378029 - DNA, 25 bp, Homo sapien
catcttgtgaccatccctataacca

SEQ ID NO: 1378030 - DNA, 25 bp, Homo sapien
ggtgagatgcgatagggcccgtgtc

SEQ ID NO: 1378031 - DNA, 25 bp, Homo sapien
gccagacaaatctggatcgatataa

SEQ ID NO: 1378032 - DNA, 25 bp, Homo sapien
tataagagtggaagactatgaattc

SEQ ID NO: 1378033 - DNA, 25 bp, Homo sapien
ttcgtgtaaagtactgagtttcagg

SEQ ID NO: 1378034 - DNA, 25 bp, Homo sapien
ccttcctaacactggtcctaactag

SEQ ID NO: 1378035 - DNA, 25 bp, Homo sapien
gcactcaacagacatccttatctgg

SEQ ID NO: 1378036 - DNA, 25 bp, Homo sapien
acactggtcctaactagttcttgaa

SEQ ID NO: 1378037 - DNA, 25 bp, Homo sapien
tatctggccttgagttttgctgcat

SEQ ID NO: 1378038 - DNA, 25 bp, Homo sapien
gctactggatgaggcctgtacagga

SEQ ID NO: 1378039 - DNA, 25 bp, Homo sapien
caagtgagccgatcaagggaaaggc

SEQ ID NO: 1378040 - DNA, 25 bp, Homo sapien
cagggtcggcttgcatgacaggcct

SEQ ID NO: 1378041 - DNA, 25 bp, Homo sapien
gaagggcaccgcattgccagaagag

SEQ ID NO: 1378042 - DNA, 25 bp, Homo sapien
tcctgttcggcagtgtccattagag

SEQ ID NO: 1378043 - DNA, 25 bp, Homo sapien
tccaccagtctgtgccgcctgcaag

SEQ ID NO: 1378044 - DNA, 25 bp, Homo sapien
agtgtccattagagggcgccagcgc

SEQ ID NO: 1378045 - DNA, 25 bp, Homo sapien
tcagcagcgccgtggcgtcctgttc

SEQ ID NO: 1378046 - DNA, 25 bp, Homo sapien
acacgcggatgggtatggacagcac

SEQ ID NO: 1378047 - DNA, 25 bp, Homo sapien
gacagcaccagatctcttccggaca

SEQ ID NO: 1378048 - DNA, 25 bp, Homo sapien
tcgctgatacctcgcagaccaatat

SEQ ID NO: 1378049 - DNA, 25 bp, Homo sapien
tactaaactgtaccagccacacaac

SEQ ID NO: 1378050 - DNA, 25 bp, Homo sapien
tcatgtgctgtgttgggtgtgagca

SEQ ID NO: 1378051 - DNA, 25 bp, Homo sapien
tgagcattgccgtggacgggcaacc

SEQ ID NO: 1378052 - DNA, 25 bp, Homo sapien
catatctctgaggtttcgtgaagct

SEQ ID NO: 1378053 - DNA, 25 bp, Homo sapien
aagcagaagggccattgccaagaag

SEQ ID NO: 1378054 - DNA, 25 bp, Homo sapien
ttcagggatggttcccctgtgccta

SEQ ID NO: 1378055 - DNA, 25 bp, Homo sapien
tcagggatggttcccctgtgcctac

SEQ ID NO: 1378056 - DNA, 25 bp, Homo sapien
tccttcagggatggttcccctgtgc

SEQ ID NO: 1378057 - DNA, 25 bp, Homo sapien
ttgtccttcagggatggttcccctg

SEQ ID NO: 1378058 - DNA, 25 bp, Homo sapien
gagacgtgtctctcctgaaaactca

SEQ ID NO: 1378059 - DNA, 25 bp, Homo sapien
ttggccagtcttcagcaggctccca

SEQ ID NO: 1378060 - DNA, 25 bp, Homo sapien
cagacacgaggcctgttggccagtc

SEQ ID NO: 1378061 - DNA, 25 bp, Homo sapien
gaggcagacacatggcaaggtggga

SEQ ID NO: 1378062 - DNA, 25 bp, Homo sapien
ttcgtggccaccattccacaggtgt

SEQ ID NO: 1378063 - DNA, 25 bp, Homo sapien
cattccacaggtgttgccaactgta

SEQ ID NO: 1378064 - DNA, 25 bp, Homo sapien
cctggccaaacagggatcttcgtgg

SEQ ID NO: 1378065 - DNA, 25 bp, Homo sapien
gccaactgtaggaacagtgcctgct

SEQ ID NO: 1378066 - DNA, 25 bp, Homo sapien
gcagtttctctagctccgtacacct

SEQ ID NO: 1378067 - DNA, 25 bp, Homo sapien
tttctcctaaaatggtcagctgttg

SEQ ID NO: 1378068 - DNA, 25 bp, Homo sapien
caaattactatctggagtcccttgc

SEQ ID NO: 1378069 - DNA, 25 bp, Homo sapien
tctctgaggccatgttcacttttaa

SEQ ID NO: 1378070 - DNA, 25 bp, Homo sapien
tggtttgcttatcaagagtttcacc

SEQ ID NO: 1378071 - DNA, 25 bp, Homo sapien
ggtttcccacgttgtctgtcatcta

SEQ ID NO: 1378072 - DNA, 25 bp, Homo sapien
tacaaattagctcaatgggtctaca

SEQ ID NO: 1378073 - DNA, 25 bp, Homo sapien
tgattcctcaaatgcaaggatgact

SEQ ID NO: 1378074 - DNA, 25 bp, Homo sapien
cactgatccgatgctgagtatgcaa

SEQ ID NO: 1378075 - DNA, 25 bp, Homo sapien
cacaaatttaggtcagcggaacaga

SEQ ID NO: 1378076 - DNA, 25 bp, Homo sapien
catacagtaggccacaatccaaggg

SEQ ID NO: 1378077 - DNA, 25 bp, Homo sapien
tccaggtccggtacatgatcaaact

SEQ ID NO: 1378078 - DNA, 25 bp, Homo sapien
tgacctcttagacaattacgtgaaa

SEQ ID NO: 1378079 - DNA, 25 bp, Homo sapien
gagccaagttggtttatcggcctcg

SEQ ID NO: 1378080 - DNA, 25 bp, Homo sapien
agatgagtaatctaaccccaccggg

SEQ ID NO: 1378081 - DNA, 25 bp, Homo sapien
ttactccagtaaccattcaagtggg

SEQ ID NO: 1378082 - DNA, 25 bp, Homo sapien
gcatatattacaaatccattcttga

SEQ ID NO: 1378083 - DNA, 25 bp, Homo sapien
gaatacacattagcttaaaaaacag

SEQ ID NO: 1378084 - DNA, 25 bp, Homo sapien
ttgataggaacattagtaagaatac

SEQ ID NO: 1378085 - DNA, 25 bp, Homo sapien
aaatgttgctgatctgccaaaagtt

SEQ ID NO: 1378086 - DNA, 25 bp, Homo sapien
taataactgtgcgacctagtccaaa

SEQ ID NO: 1378087 - DNA, 25 bp, Homo sapien
gaaaactgacatgaaggaagactgg

SEQ ID NO: 1378088 - DNA, 25 bp, Homo sapien
tggaaaagagccagttgtcaccttc

SEQ ID NO: 1378089 - DNA, 25 bp, Homo sapien
tgccaatagtggtctatcagaaaac

SEQ ID NO: 1378090 - DNA, 25 bp, Homo sapien
tttaggcgttttctgcggggctgta

SEQ ID NO: 1378091 - DNA, 25 bp, Homo sapien
ttttctgcggggctgtataaagtct

SEQ ID NO: 1378092 - DNA, 25 bp, Homo sapien
tcatctgactttaggcgttttctgc

SEQ ID NO: 1378093 - DNA, 25 bp, Homo sapien
catctgactttaggcgttttctgcg

SEQ ID NO: 1378094 - DNA, 25 bp, Homo sapien
gcaaaggtgcgaaggtcctgtctga

SEQ ID NO: 1378095 - DNA, 25 bp, Homo sapien
ctcaaactctggcaaaggtgcgaag

SEQ ID NO: 1378096 - DNA, 25 bp, Homo sapien
tctgagtagatctctgtgagtttat

SEQ ID NO: 1378097 - DNA, 25 bp, Homo sapien
caaagtacaatgcaactgctttccc

SEQ ID NO: 1378098 - DNA, 25 bp, Homo sapien
ggaatattcacctattggtaatgca

SEQ ID NO: 1378099 - DNA, 25 bp, Homo sapien
ggtaatgcatattccttcaccaagt

SEQ ID NO: 1378100 - DNA, 25 bp, Homo sapien
aaagataggaatattcacctattgg

SEQ ID NO: 1378101 - DNA, 25 bp, Homo sapien
cttcaccaagtttgcatggtctgaa

SEQ ID NO: 1378102 - DNA, 25 bp, Homo sapien
tcaaattaatctcttgtgtgtctgc

SEQ ID NO: 1378103 - DNA, 25 bp, Homo sapien
tcctttctaaagttatgagactgca

SEQ ID NO: 1378104 - DNA, 25 bp, Homo sapien
gaacaaattgctataaccagataaa

SEQ ID NO: 1378105 - DNA, 25 bp, Homo sapien
taggattggcgacgaaaagtcagcc

SEQ ID NO: 1378106 - DNA, 25 bp, Homo sapien
gccatactagggagaacaaattgct

SEQ ID NO: 1378107 - DNA, 25 bp, Homo sapien
cacagttcttgaagatcaaacggac

SEQ ID NO: 1378108 - DNA, 25 bp, Homo sapien
agtcatccgggatttggtagtgttg

SEQ ID NO: 1378109 - DNA, 25 bp, Homo sapien
tcaaacggacatcggccacaaagtc

SEQ ID NO: 1378110 - DNA, 25 bp, Homo sapien
tctttttcacggtggataaatccat

SEQ ID NO: 1378111 - DNA, 25 bp, Homo sapien
tttggaaaacataacagggaatatc

SEQ ID NO: 1378112 - DNA, 25 bp, Homo sapien
cacgaagtcttgacttagtaacaga

SEQ ID NO: 1378113 - DNA, 25 bp, Homo sapien
taaccatttagtgttcacgctaggg

SEQ ID NO: 1378114 - DNA, 25 bp, Homo sapien
ggaatatcatttacatcacgaagtc

SEQ ID NO: 1378115 - DNA, 25 bp, Homo sapien
taaaatccctgcacttaaagatgag

SEQ ID NO: 1378116 - DNA, 25 bp, Homo sapien
gaagagcttattccagaaggctgag

SEQ ID NO: 1378117 - DNA, 25 bp, Homo sapien
taatattctctaacaggcctggtat

SEQ ID NO: 1378118 - DNA, 25 bp, Homo sapien
gtattatgagacttccccaccgagc

SEQ ID NO: 1378119 - DNA, 25 bp, Homo sapien
ggtaaagcagaagacgttcacattt

SEQ ID NO: 1378120 - DNA, 25 bp, Homo sapien
gctcctggaattcaatacttaattc

SEQ ID NO: 1378121 - DNA, 25 bp, Homo sapien
tcatggcaatagaggtaaagcagaa

SEQ ID NO: 1378122 - DNA, 25 bp, Homo sapien
cttaattcatggcaatagaggtaaa

SEQ ID NO: 1378123 - DNA, 25 bp, Homo sapien
tggcccaaacaaggaaaggaaagca

SEQ ID NO: 1378124 - DNA, 25 bp, Homo sapien
aaggaaaggaaagcacatgaaatat

SEQ ID NO: 1378125 - DNA, 25 bp, Homo sapien
gaaaggaaagcacatgaaatatttt

SEQ ID NO: 1378126 - DNA, 25 bp, Homo sapien
acaaggaaaggaaagcacatgaaat

SEQ ID NO: 1378127 - DNA, 25 bp, Homo sapien
aatggtggtatcattcaattaaggg

SEQ ID NO: 1378128 - DNA, 25 bp, Homo sapien
ggagagcagttaagagatcactaca

SEQ ID NO: 1378129 - DNA, 25 bp, Homo sapien
aataggtttctaacctgagcaacag

SEQ ID NO: 1378130 - DNA, 25 bp, Homo sapien
tataaaggtcaagagcagaagcggg

SEQ ID NO: 1378131 - DNA, 25 bp, Homo sapien
cacggggcttaacccctgcgcagtt

SEQ ID NO: 1378132 - DNA, 25 bp, Homo sapien
ttccccttcttactatgttgcaaat

SEQ ID NO: 1378133 - DNA, 25 bp, Homo sapien
tccacggggcttaacccctgcgcag

SEQ ID NO: 1378134 - DNA, 25 bp, Homo sapien
gtccacggggcttaacccctgcgca

SEQ ID NO: 1378135 - DNA, 25 bp, Homo sapien
acaaaatgtgcatatccagtcccca

SEQ ID NO: 1378136 - DNA, 25 bp, Homo sapien
tacaaaatgtgcatatccagtcccc

SEQ ID NO: 1378137 - DNA, 25 bp, Homo sapien
ctacaaaatgtgcatatccagtccc

SEQ ID NO: 1378138 - DNA, 25 bp, Homo sapien
aaaatggcacctccgcattaaaagg

SEQ ID NO: 1378139 - DNA, 25 bp, Homo sapien
aatctcgtcaggtgaagtcatgtga

SEQ ID NO: 1378140 - DNA, 25 bp, Homo sapien
taaattttcctagtcacgcatcaat

SEQ ID NO: 1378141 - DNA, 25 bp, Homo sapien
cgcatcaattgattactttctggaa

SEQ ID NO: 1378142 - DNA, 25 bp, Homo sapien
ttcgtggtcaaaacctagaacacac

SEQ ID NO: 1378143 - DNA, 25 bp, Homo sapien
caagagacaagaggttgcatgaaca

SEQ ID NO: 1378144 - DNA, 25 bp, Homo sapien
tgcaccatcatgaccggcagatttt

SEQ ID NO: 1378145 - DNA, 25 bp, Homo sapien
gttaacactttcaaagagggcacta

SEQ ID NO: 1378146 - DNA, 25 bp, Homo sapien
accaaaagaataacaggctccctgt

SEQ ID NO: 1378147 - DNA, 25 bp, Homo sapien
cactggttagaaggccatctgccct

SEQ ID NO: 1378148 - DNA, 25 bp, Homo sapien
tagtttctctggaagctaataccaa

SEQ ID NO: 1378149 - DNA, 25 bp, Homo sapien
gttttatagaaatactgtgcactgg

SEQ ID NO: 1378150 - DNA, 25 bp, Homo sapien
catgacaagttagatgaaagacctt

SEQ ID NO: 1378151 - DNA, 25 bp, Homo sapien
gatctcctccgttttggcagacagc

SEQ ID NO: 1378152 - DNA, 25 bp, Homo sapien
ttttcgcagcacaagagatctcctc

SEQ ID NO: 1378153 - DNA, 25 bp, Homo sapien
aaagacctttggacatttttcgcag

SEQ ID NO: 1378154 - DNA, 25 bp, Homo sapien
actttctagatgcaggttggttgag

SEQ ID NO: 1378155 - DNA, 25 bp, Homo sapien
tttccattaacaaggctgctgagcc

SEQ ID NO: 1378156 - DNA, 25 bp, Homo sapien
ggtgtcaagctactctcaggactgc

SEQ ID NO: 1378157 - DNA, 25 bp, Homo sapien
caatccttgccgacctgtgcatgag

SEQ ID NO: 1378158 - DNA, 25 bp, Homo sapien
tttccttgagagagctaattatggc

SEQ ID NO: 1378159 - DNA, 25 bp, Homo sapien
taattatggcacaccccttttcaca

SEQ ID NO: 1378160 - DNA, 25 bp, Homo sapien
tattcaggcacgctaacatatgatt

SEQ ID NO: 1378161 - DNA, 25 bp, Homo sapien
tgctcctctgataatgtctcactca

SEQ ID NO: 1378162 - DNA, 25 bp, Homo sapien
tcctcctgccatcctctgttttttc

SEQ ID NO: 1378163 - DNA, 25 bp, Homo sapien
ctcctgccatcctctgttttttctt

SEQ ID NO: 1378164 - DNA, 25 bp, Homo sapien
actcctcctgccatcctctgttttt

SEQ ID NO: 1378165 - DNA, 25 bp, Homo sapien
agcactcctcctgccatcctctgtt

SEQ ID NO: 1378166 - DNA, 25 bp, Homo sapien
tcctgaaaagctacatatttcatct

SEQ ID NO: 1378167 - DNA, 25 bp, Homo sapien
ttgaccttcacctgatcagatttga

SEQ ID NO: 1378168 - DNA, 25 bp, Homo sapien
tcttgcttgaccttcacctgatcag

SEQ ID NO: 1378169 - DNA, 25 bp, Homo sapien
tcttcagtcccaggttcttgcttga

SEQ ID NO: 1378170 - DNA, 25 bp, Homo sapien
ctaagacttgtcttctcagcagttc

SEQ ID NO: 1378171 - DNA, 25 bp, Homo sapien
cttctcagcagttcttcctgatgac

SEQ ID NO: 1378172 - DNA, 25 bp, Homo sapien
ctcagcagttcttcctgatgaccca

SEQ ID NO: 1378173 - DNA, 25 bp, Homo sapien
agcagttcttcctgatgacccacag

SEQ ID NO: 1378174 - DNA, 25 bp, Homo sapien
tgctaacactaccagaacttcctgg

SEQ ID NO: 1378175 - DNA, 25 bp, Homo sapien
tagcaaaaggactaaggagcaagcc

SEQ ID NO: 1378176 - DNA, 25 bp, Homo sapien
tcacaggaaacatggaagcttaaaa

SEQ ID NO: 1378177 - DNA, 25 bp, Homo sapien
tatgcagcaactttcagaagaccct

SEQ ID NO: 1378178 - DNA, 25 bp, Homo sapien
catttgttgcaaaaattgggaacac

SEQ ID NO: 1378179 - DNA, 25 bp, Homo sapien
tactgaaacagtcacgagtgaaatg

SEQ ID NO: 1378180 - DNA, 25 bp, Homo sapien
caagatggagaaatcgggaaaacac

SEQ ID NO: 1378181 - DNA, 25 bp, Homo sapien
taaacattaactggatctctactga

SEQ ID NO: 1378182 - DNA, 25 bp, Homo sapien
cacaggtgtgtgagaattggataaa

SEQ ID NO: 1378183 - DNA, 25 bp, Homo sapien
acaggtgtgtgagaattggataaac

SEQ ID NO: 1378184 - DNA, 25 bp, Homo sapien
tgccagtactagaagtacttggggg

SEQ ID NO: 1378185 - DNA, 25 bp, Homo sapien
tcacaggtgtgtgagaattggataa

SEQ ID NO: 1378186 - DNA, 25 bp, Homo sapien
taccggtcacagaactcaagattat

SEQ ID NO: 1378187 - DNA, 25 bp, Homo sapien
aaagtagtaagtcaaaatgaatatc

SEQ ID NO: 1378188 - DNA, 25 bp, Homo sapien
agaatatttggaattctacctaccg

SEQ ID NO: 1378189 - DNA, 25 bp, Homo sapien
caaaatgaatatcaatgcatataag

SEQ ID NO: 1378190 - DNA, 25 bp, Homo sapien
gttatctgccatccctcaacaagtt

SEQ ID NO: 1378191 - DNA, 25 bp, Homo sapien
tggaagagagctacatatcatggct

SEQ ID NO: 1378192 - DNA, 25 bp, Homo sapien
taagattaaacccatgaaagactgt

SEQ ID NO: 1378193 - DNA, 25 bp, Homo sapien
caagagtcccaattgaatcactgag

SEQ ID NO: 1378194 - DNA, 25 bp, Homo sapien
tgactgcctgagatgtatctactta

SEQ ID NO: 1378195 - DNA, 25 bp, Homo sapien
aactacttgagccagcatcttccaa

SEQ ID NO: 1378196 - DNA, 25 bp, Homo sapien
gaaggattcatggtgcttgtaggct

SEQ ID NO: 1378197 - DNA, 25 bp, Homo sapien
gattatctaaactacttgagccagc

SEQ ID NO: 1378198 - DNA, 25 bp, Homo sapien
cagtacgataaagccagaagaccca

SEQ ID NO: 1378199 - DNA, 25 bp, Homo sapien
cacctatattgcagaactccgatga

SEQ ID NO: 1378200 - DNA, 25 bp, Homo sapien
taattatgttagtacccagctctga

SEQ ID NO: 1378201 - DNA, 25 bp, Homo sapien
gagcccttcccttacttagaggcag

SEQ ID NO: 1378202 - DNA, 25 bp, Homo sapien
ggtgaatccctagctgcaactcaag

SEQ ID NO: 1378203 - DNA, 25 bp, Homo sapien
caatagcagttgtgttaccctgtgg

SEQ ID NO: 1378204 - DNA, 25 bp, Homo sapien
gggatgcatcccacctaaaaacaga

SEQ ID NO: 1378205 - DNA, 25 bp, Homo sapien
gctgttggccaaggatgcacttgca

SEQ ID NO: 1378206 - DNA, 25 bp, Homo sapien
gcaatttgtatcttttgctagaaag

SEQ ID NO: 1378207 - DNA, 25 bp, Homo sapien
ctgcaatttgtatcttttgctagaa

SEQ ID NO: 1378208 - DNA, 25 bp, Homo sapien
tgtatcttttgctagaaagataact

SEQ ID NO: 1378209 - DNA, 25 bp, Homo sapien
tttgtatcttttgctagaaagataa

SEQ ID NO: 1378210 - DNA, 25 bp, Homo sapien
tgagcatccctgaataagtacatgg

SEQ ID NO: 1378211 - DNA, 25 bp, Homo sapien
acctgtgggtttcactagacatgga

SEQ ID NO: 1378212 - DNA, 25 bp, Homo sapien
ccaacagataggtgctaactgaagc

SEQ ID NO: 1378213 - DNA, 25 bp, Homo sapien
tgatgtcattataacctccaacaga

SEQ ID NO: 1378214 - DNA, 25 bp, Homo sapien
agttactattctattatatgaacac

SEQ ID NO: 1378215 - DNA, 25 bp, Homo sapien
tgctataaacatttgagtacgaatc

SEQ ID NO: 1378216 - DNA, 25 bp, Homo sapien
gctgaatcattatgacagatacacg

SEQ ID NO: 1378217 - DNA, 25 bp, Homo sapien
catttgagtacgaatctttgtatag

SEQ ID NO: 1378218 - DNA, 25 bp, Homo sapien
aaaagtgcccagttccttcagacct

SEQ ID NO: 1378219 - DNA, 25 bp, Homo sapien
ggaatacaggtccatgccaagatgc

SEQ ID NO: 1378220 - DNA, 25 bp, Homo sapien
caaaagcgtaatagtggtccttcct

SEQ ID NO: 1378221 - DNA, 25 bp, Homo sapien
tatgcagcttacaaaggccctacct

SEQ ID NO: 1378222 - DNA, 25 bp, Homo sapien
tttaaccttcatgctgatattaatt

SEQ ID NO: 1378223 - DNA, 25 bp, Homo sapien
tctggaggtcataatatagacaact

SEQ ID NO: 1378224 - DNA, 25 bp, Homo sapien
ggtgttgacataaaggactgccagc

SEQ ID NO: 1378225 - DNA, 25 bp, Homo sapien
tggtttacataatagcccttcccca

SEQ ID NO: 1378226 - DNA, 25 bp, Homo sapien
ggtcttctctctggctccaaactca

SEQ ID NO: 1378227 - DNA, 25 bp, Homo sapien
cacattttggtcctgggtcttctct

SEQ ID NO: 1378228 - DNA, 25 bp, Homo sapien
gggtcttctctctggctccaaactc

SEQ ID NO: 1378229 - DNA, 25 bp, Homo sapien
cttctctctggctccaaactcatac

SEQ ID NO: 1378230 - DNA, 25 bp, Homo sapien
ggagtgcatcatcggaacaacgttt

SEQ ID NO: 1378231 - DNA, 25 bp, Homo sapien
aggagtgcatcatcggaacaacgtt

SEQ ID NO: 1378232 - DNA, 25 bp, Homo sapien
agtgcatcatcggaacaacgtttgc

SEQ ID NO: 1378233 - DNA, 25 bp, Homo sapien
caggagtgcatcatcggaacaacgt

SEQ ID NO: 1378234 - DNA, 25 bp, Homo sapien
tgaagcctcattcaactcaaataca

SEQ ID NO: 1378235 - DNA, 25 bp, Homo sapien
gaagcctcattcaactcaaatacaa

SEQ ID NO: 1378236 - DNA, 25 bp, Homo sapien
taatgaagcctcattcaactcaaat

SEQ ID NO: 1378237 - DNA, 25 bp, Homo sapien
tttaatgaagcctcattcaactcaa

SEQ ID NO: 1378238 - DNA, 25 bp, Homo sapien
ccatagttgctgtagtagggctcgt

SEQ ID NO: 1378239 - DNA, 25 bp, Homo sapien
tatctggcagcgatggaaggttttc

SEQ ID NO: 1378240 - DNA, 25 bp, Homo sapien
gctggtgggacctcggtttgcattt

SEQ ID NO: 1378241 - DNA, 25 bp, Homo sapien
tgttgtgtaccgatactacgggaaa

SEQ ID NO: 1378242 - DNA, 25 bp, Homo sapien
tacgcagattgacctgagagactta

SEQ ID NO: 1378243 - DNA, 25 bp, Homo sapien
tctttctgggcgtacatggaccaaa

SEQ ID NO: 1378244 - DNA, 25 bp, Homo sapien
gccaagaagcgcattattttaaaaa

SEQ ID NO: 1378245 - DNA, 25 bp, Homo sapien
ttcagtggttatggctaggaatcca

SEQ ID NO: 1378246 - DNA, 25 bp, Homo sapien
cctgggtatccctggtattctggca

SEQ ID NO: 1378247 - DNA, 25 bp, Homo sapien
gatgggcttgaaaagctccacagtt

SEQ ID NO: 1378248 - DNA, 25 bp, Homo sapien
gtctcatctgatgggcttgaaaagc

SEQ ID NO: 1378249 - DNA, 25 bp, Homo sapien
gcatcatggaatattgagggccgct

SEQ ID NO: 1378250 - DNA, 25 bp, Homo sapien
tgaggggctgcttgtctaggatgct

SEQ ID NO: 1378251 - DNA, 25 bp, Homo sapien
gttgttgtaacatctgaggggctgc

SEQ ID NO: 1378252 - DNA, 25 bp, Homo sapien
gctgcttgtctaggatgctgttgtg

SEQ ID NO: 1378253 - DNA, 25 bp, Homo sapien
ctgttgttgtaacatctgaggggct

SEQ ID NO: 1378254 - DNA, 25 bp, Homo sapien
gttgtagttggtacaggtgctggtg

SEQ ID NO: 1378255 - DNA, 25 bp, Homo sapien
tgcatcctcatctgttgcaactgct

SEQ ID NO: 1378256 - DNA, 25 bp, Homo sapien
gcatcctcatctgttgcaactgctg

SEQ ID NO: 1378257 - DNA, 25 bp, Homo sapien
tgttgtagttggtacaggtgctggt

SEQ ID NO: 1378258 - DNA, 25 bp, Homo sapien
ttgcatgtgctggagtcgaagctgt

SEQ ID NO: 1378259 - DNA, 25 bp, Homo sapien
ggagtcgaagctgtgctaagttaat

SEQ ID NO: 1378260 - DNA, 25 bp, Homo sapien
tgttgttgcatgtgctggagtcgaa

SEQ ID NO: 1378261 - DNA, 25 bp, Homo sapien
tgtgctggagtcgaagctgtgctaa

SEQ ID NO: 1378262 - DNA, 25 bp, Homo sapien
gaacttgcccaactacaacattagg

SEQ ID NO: 1378263 - DNA, 25 bp, Homo sapien
ccaggagctggtttactctctatta

SEQ ID NO: 1378264 - DNA, 25 bp, Homo sapien
gctggtttactctctattactagat

SEQ ID NO: 1378265 - DNA, 25 bp, Homo sapien
caacattaggagtataaccaggagc

SEQ ID NO: 1378266 - DNA, 25 bp, Homo sapien
cattcctcaggacctaactactgga

SEQ ID NO: 1378267 - DNA, 25 bp, Homo sapien
ccacagctaaagtgagtttccaatg

SEQ ID NO: 1378268 - DNA, 25 bp, Homo sapien
gagtagacgctcaactttcttaaga

SEQ ID NO: 1378269 - DNA, 25 bp, Homo sapien
ggtctttaggtccatactacgctgt

SEQ ID NO: 1378270 - DNA, 25 bp, Homo sapien
gatcacaccgtgctttcaaaatatg

SEQ ID NO: 1378271 - DNA, 25 bp, Homo sapien
aaggtgggatcacaatggaaacgta

SEQ ID NO: 1378272 - DNA, 25 bp, Homo sapien
gaaacgtattgctccattagcagca

SEQ ID NO: 1378273 - DNA, 25 bp, Homo sapien
gacaggatcacaccgtgctttcaaa

SEQ ID NO: 1378274 - DNA, 25 bp, Homo sapien
gctgtatagtagtgctgtgctgctg

SEQ ID NO: 1378275 - DNA, 25 bp, Homo sapien
cctgccgggaaaggcctgtgatgtc

SEQ ID NO: 1378276 - DNA, 25 bp, Homo sapien
cagtcgcttgctgtatagtagtgct

SEQ ID NO: 1378277 - DNA, 25 bp, Homo sapien
agttcataacatgcttcacctgccg

SEQ ID NO: 1378278 - DNA, 25 bp, Homo sapien
gattttcatctagaaacttacacct

SEQ ID NO: 1378279 - DNA, 25 bp, Homo sapien
aatttagatttcatgaactgactag

SEQ ID NO: 1378280 - DNA, 25 bp, Homo sapien
gaacctagttaagagcatgaaatct

SEQ ID NO: 1378281 - DNA, 25 bp, Homo sapien
aataaatcaaatcggcagtggagac

SEQ ID NO: 1378282 - DNA, 25 bp, Homo sapien
tttcattgataagggtgaaaatggc

SEQ ID NO: 1378283 - DNA, 25 bp, Homo sapien
ctcgtttgttagtctcatttacttc

SEQ ID NO: 1378284 - DNA, 25 bp, Homo sapien
cactttaatttcctgttctactcgt

SEQ ID NO: 1378285 - DNA, 25 bp, Homo sapien
tattaatttcattgataagggtgaa

SEQ ID NO: 1378286 - DNA, 25 bp, Homo sapien
tcaaccccgtgcaatcttgtaacag

SEQ ID NO: 1378287 - DNA, 25 bp, Homo sapien
cagattctggaacacgtgtacaaaa

SEQ ID NO: 1378288 - DNA, 25 bp, Homo sapien
tcctttgaaagagacatccatctat

SEQ ID NO: 1378289 - DNA, 25 bp, Homo sapien
gccctacttttgtatacagattctg

SEQ ID NO: 1378290 - DNA, 25 bp, Homo sapien
gtagattctcaattgcacccttctg

SEQ ID NO: 1378291 - DNA, 25 bp, Homo sapien
caattgcacccttctgattttgaaa

SEQ ID NO: 1378292 - DNA, 25 bp, Homo sapien
cttctcaagaagtttcgccagtaga

SEQ ID NO: 1378293 - DNA, 25 bp, Homo sapien
gaagtttcgccagtagattctcaat

SEQ ID NO: 1378294 - DNA, 25 bp, Homo sapien
tatctcaacagcaacttttaactgg

SEQ ID NO: 1378295 - DNA, 25 bp, Homo sapien
gcaacttttaactggcaatcaccca

SEQ ID NO: 1378296 - DNA, 25 bp, Homo sapien
acagcaacttttaactggcaatcac

SEQ ID NO: 1378297 - DNA, 25 bp, Homo sapien
caacttttaactggcaatcacccat

SEQ ID NO: 1378298 - DNA, 25 bp, Homo sapien
tccaactctgaccctgaaaggccat

SEQ ID NO: 1378299 - DNA, 25 bp, Homo sapien
ctccctccaactctgaccctgaaag

SEQ ID NO: 1378300 - DNA, 25 bp, Homo sapien
tccctccaactctgaccctgaaagg

SEQ ID NO: 1378301 - DNA, 25 bp, Homo sapien
cctccaactctgaccctgaaaggcc

SEQ ID NO: 1378302 - DNA, 25 bp, Homo sapien
tggtacagccaaacaaacaagctgg

SEQ ID NO: 1378303 - DNA, 25 bp, Homo sapien
tgtgaagggccaagtatagcacact

SEQ ID NO: 1378304 - DNA, 25 bp, Homo sapien
tatgtgtcagttatggcaaggtcca

SEQ ID NO: 1378305 - DNA, 25 bp, Homo sapien
catatcagagatcagggtacagtac

SEQ ID NO: 1378306 - DNA, 25 bp, Homo sapien
tgggcaatagcacaagactcctcta

SEQ ID NO: 1378307 - DNA, 25 bp, Homo sapien
tagatagcatgtctgtgacttccag

SEQ ID NO: 1378308 - DNA, 25 bp, Homo sapien
gctgcagtcactagtctcagggtca

SEQ ID NO: 1378309 - DNA, 25 bp, Homo sapien
ccagttacaaggaggtagtctaggt

SEQ ID NO: 1378310 - DNA, 25 bp, Homo sapien
tcctggtaagcaattatgatttctg

SEQ ID NO: 1378311 - DNA, 25 bp, Homo sapien
tagtatttcctggtaagcaattatg

SEQ ID NO: 1378312 - DNA, 25 bp, Homo sapien
gaagaatgactttacaagcactttt

SEQ ID NO: 1378313 - DNA, 25 bp, Homo sapien
agaagaagaatgactttacaagcac

SEQ ID NO: 1378314 - DNA, 25 bp, Homo sapien
gtcaatctatcacatgtttcacaga

SEQ ID NO: 1378315 - DNA, 25 bp, Homo sapien
gacagtctctacatgtcaatctatc

SEQ ID NO: 1378316 - DNA, 25 bp, Homo sapien
tcttgtttgtgtacagggcagaaaa

SEQ ID NO: 1378317 - DNA, 25 bp, Homo sapien
acagggcgttgaccagatgctccaa

SEQ ID NO: 1378318 - DNA, 25 bp, Homo sapien
ctgatcaagtgatctttagtaaatt

SEQ ID NO: 1378319 - DNA, 25 bp, Homo sapien
tactctttgatgtgcttcgatacat

SEQ ID NO: 1378320 - DNA, 25 bp, Homo sapien
tagccactctccacattctacacaa

SEQ ID NO: 1378321 - DNA, 25 bp, Homo sapien
gatacatgtcttacatagccactct

SEQ ID NO: 1378322 - DNA, 25 bp, Homo sapien
tggacagcagtagtgcaatcacggc

SEQ ID NO: 1378323 - DNA, 25 bp, Homo sapien
cctccctaagtgctgcgacaacagg

SEQ ID NO: 1378324 - DNA, 25 bp, Homo sapien
gctggacagcagtagtgcaatcacg

SEQ ID NO: 1378325 - DNA, 25 bp, Homo sapien
tccctaagtgctgcgacaacaggcg

SEQ ID NO: 1378326 - DNA, 25 bp, Homo sapien
tatccacaaggtctatctgtctgca

SEQ ID NO: 1378327 - DNA, 25 bp, Homo sapien
gtctgcattcttggcggcatactgg

SEQ ID NO: 1378328 - DNA, 25 bp, Homo sapien
gcatactgggcaccgtattacacca

SEQ ID NO: 1378329 - DNA, 25 bp, Homo sapien
gatttttcatcagaactgctaggag

SEQ ID NO: 1378330 - DNA, 25 bp, Homo sapien
ctacaacataaaataacaacatttt

SEQ ID NO: 1378331 - DNA, 25 bp, Homo sapien
atattcttcaggaataaagaaattg

SEQ ID NO: 1378332 - DNA, 25 bp, Homo sapien
aaatattcttcaggaataaagaaat

SEQ ID NO: 1378333 - DNA, 25 bp, Homo sapien
ttaaaatattcttcaggaataaaga

SEQ ID NO: 1378334 - DNA, 25 bp, Homo sapien
gcaatgcccaacaattaacaggccc

SEQ ID NO: 1378335 - DNA, 25 bp, Homo sapien
aactgtattgcctcattcaagtggg

SEQ ID NO: 1378336 - DNA, 25 bp, Homo sapien
ttggctcacaggtcatacaaaacca

SEQ ID NO: 1378337 - DNA, 25 bp, Homo sapien
gatcatctattgctcgaggaagcct

SEQ ID NO: 1378338 - DNA, 25 bp, Homo sapien
aaaattcacgttcattaatatcacc

SEQ ID NO: 1378339 - DNA, 25 bp, Homo sapien
tgcacttaacatcatgcatttctca

SEQ ID NO: 1378340 - DNA, 25 bp, Homo sapien
tcctggaaatgacaggctcaattca

SEQ ID NO: 1378341 - DNA, 25 bp, Homo sapien
caataagctacgcagatctttgaaa

SEQ ID NO: 1378342 - DNA, 25 bp, Homo sapien
catttaggacccactgacagcagaa

SEQ ID NO: 1378343 - DNA, 25 bp, Homo sapien
taattcacgcagaggtgatggcagt

SEQ ID NO: 1378344 - DNA, 25 bp, Homo sapien
tgcacctctaaaagggtctcagtga

SEQ ID NO: 1378345 - DNA, 25 bp, Homo sapien
cctaactagggcttttgatgtacaa

SEQ ID NO: 1378346 - DNA, 25 bp, Homo sapien
gggcttcccatgtaagctcccaata

SEQ ID NO: 1378347 - DNA, 25 bp, Homo sapien
tcagcaatcttggacacatcgttaa

SEQ ID NO: 1378348 - DNA, 25 bp, Homo sapien
gaattcaggtagtttgaccacaatg

SEQ ID NO: 1378349 - DNA, 25 bp, Homo sapien
tgaccacaatgctagacagaagttg

SEQ ID NO: 1378350 - DNA, 25 bp, Homo sapien
gggatgggcacgctgagctggcgct

SEQ ID NO: 1378351 - DNA, 25 bp, Homo sapien
atgggcacgctgagctggcgctccg

SEQ ID NO: 1378352 - DNA, 25 bp, Homo sapien
agcagcttgggctccgcctcacgcc

SEQ ID NO: 1378353 - DNA, 25 bp, Homo sapien
ggcacgctgagctggcgctccggct

SEQ ID NO: 1378354 - DNA, 25 bp, Homo sapien
tgacacacggcgcaggtgtccagga

SEQ ID NO: 1378355 - DNA, 25 bp, Homo sapien
tgctgacacacggcgcaggtgtcca

SEQ ID NO: 1378356 - DNA, 25 bp, Homo sapien
gctgacacacggcgcaggtgtccag

SEQ ID NO: 1378357 - DNA, 25 bp, Homo sapien
gacacacggcgcaggtgtccaggag

SEQ ID NO: 1378358 - DNA, 25 bp, Homo sapien
tgcgcccccggcaactccagtgccc

SEQ ID NO: 1378359 - DNA, 25 bp, Homo sapien
tggagccggcgtcgatactgcgccc

SEQ ID NO: 1378360 - DNA, 25 bp, Homo sapien
atactgcgcccccggcaactccagt

SEQ ID NO: 1378361 - DNA, 25 bp, Homo sapien
ctgcgcccccggcaactccagtgcc

SEQ ID NO: 1378362 - DNA, 25 bp, Homo sapien
agcctgggccgagcccgaggaggcc

SEQ ID NO: 1378363 - DNA, 25 bp, Homo sapien
cagcaccgcggtgagaggcggctcc

SEQ ID NO: 1378364 - DNA, 25 bp, Homo sapien
gccccggcagttaccggcgcgctgc

SEQ ID NO: 1378365 - DNA, 25 bp, Homo sapien
accgcggtgagaggcggctccgcct

SEQ ID NO: 1378366 - DNA, 25 bp, Homo sapien
cgccgcccgccgcccgcgtcgccgc

SEQ ID NO: 1378367 - DNA, 25 bp, Homo sapien
ccgccgccgcccccagccccagccg

SEQ ID NO: 1378368 - DNA, 25 bp, Homo sapien
ccgccgcccccagccccagccgcag

SEQ ID NO: 1378369 - DNA, 25 bp, Homo sapien
gccgcccgccgcccgcgtcgccgcc

SEQ ID NO: 1378370 - DNA, 25 bp, Homo sapien
gcacggacgtcctcccgagggaggc

SEQ ID NO: 1378371 - DNA, 25 bp, Homo sapien
tacgcacggacgtcctcccgaggga

SEQ ID NO: 1378372 - DNA, 25 bp, Homo sapien
acgcacggacgtcctcccgagggag

SEQ ID NO: 1378373 - DNA, 25 bp, Homo sapien
cacggacgtcctcccgagggaggcg

SEQ ID NO: 1378374 - DNA, 25 bp, Homo sapien
aaagtaatgggattccggccatgat

SEQ ID NO: 1378375 - DNA, 25 bp, Homo sapien
caaatacagcaccttagcatttgag

SEQ ID NO: 1378376 - DNA, 25 bp, Homo sapien
gcaggtaggtcactcttgcttcttc

SEQ ID NO: 1378377 - DNA, 25 bp, Homo sapien
gaagcagctcataagaacctcattt

SEQ ID NO: 1378378 - DNA, 25 bp, Homo sapien
acattgtaagttgaaggtaccccat

SEQ ID NO: 1378379 - DNA, 25 bp, Homo sapien
atgttatcctcataaaatgttgaga

SEQ ID NO: 1378380 - DNA, 25 bp, Homo sapien
aaaatgttgagacattgtaagttga

SEQ ID NO: 1378381 - DNA, 25 bp, Homo sapien
gagacattgtaagttgaaggtaccc

SEQ ID NO: 1378382 - DNA, 25 bp, Homo sapien
tgtagcccaaatcggtcagcactgg

SEQ ID NO: 1378383 - DNA, 25 bp, Homo sapien
aaactggtggttcctcgggcagcaa

SEQ ID NO: 1378384 - DNA, 25 bp, Homo sapien
ttggctctggatactaaaggacctg

SEQ ID NO: 1378385 - DNA, 25 bp, Homo sapien
catgtgcacagccacggaaagcttt

SEQ ID NO: 1378386 - DNA, 25 bp, Homo sapien
ttcagaggtttgatgaaatcctaga

SEQ ID NO: 1378387 - DNA, 25 bp, Homo sapien
tcaacacaatcgagaatcatgtggg

SEQ ID NO: 1378388 - DNA, 25 bp, Homo sapien
gggttcagaggtttgatgaaatcct

SEQ ID NO: 1378389 - DNA, 25 bp, Homo sapien
atcaagacaatcaacacaatcgaga

SEQ ID NO: 1378390 - DNA, 25 bp, Homo sapien
gatgattgggcgttgcagctgagct

SEQ ID NO: 1378391 - DNA, 25 bp, Homo sapien
ctgggaagcctatctgtgacagtga

SEQ ID NO: 1378392 - DNA, 25 bp, Homo sapien
gtactgaatggagccgactgcatca

SEQ ID NO: 1378393 - DNA, 25 bp, Homo sapien
cagaggatgatgattgggcgttgca

SEQ ID NO: 1378394 - DNA, 25 bp, Homo sapien
gcttcaccaacaccatgcgtgttgt

SEQ ID NO: 1378395 - DNA, 25 bp, Homo sapien
cgggtggcgccctggctctggcttc

SEQ ID NO: 1378396 - DNA, 25 bp, Homo sapien
ttcaccaacaccatgcgtgttgttc

SEQ ID NO: 1378397 - DNA, 25 bp, Homo sapien
ccctggctctggcttcaccaacacc

SEQ ID NO: 1378398 - DNA, 25 bp, Homo sapien
accttgagccagaagtgcccagcta

SEQ ID NO: 1378399 - DNA, 25 bp, Homo sapien
tgccctgattctcgacctggacaaa

SEQ ID NO: 1378400 - DNA, 25 bp, Homo sapien
gactgtaatctcatgagagaccttg

SEQ ID NO: 1378401 - DNA, 25 bp, Homo sapien
gaatcttcacatgagactgcagccc

SEQ ID NO: 1378402 - DNA, 25 bp, Homo sapien
tgcacaacatgagctgtaacctctt

SEQ ID NO: 1378403 - DNA, 25 bp, Homo sapien
tcaggaaggaatgctagtaatgttg

SEQ ID NO: 1378404 - DNA, 25 bp, Homo sapien
tcctgacttgggtagtgcttaatac

SEQ ID NO: 1378405 - DNA, 25 bp, Homo sapien
caatatttattgcttccctgccatg

SEQ ID NO: 1378406 - DNA, 25 bp, Homo sapien
tctcagtcctgtagctaaagtttgc

SEQ ID NO: 1378407 - DNA, 25 bp, Homo sapien
tgacttgccacccttaaagatacct

SEQ ID NO: 1378408 - DNA, 25 bp, Homo sapien
ggaagctttcaagacttatgctact

SEQ ID NO: 1378409 - DNA, 25 bp, Homo sapien
taacattctgtcatcctcattcgca

SEQ ID NO: 1378410 - DNA, 25 bp, Homo sapien
aggtgtttgtctctaacctttatgt

SEQ ID NO: 1378411 - DNA, 25 bp, Homo sapien
aaggtgtttgtctctaacctttatg

SEQ ID NO: 1378412 - DNA, 25 bp, Homo sapien
gatgctattataagagtaggtttag

SEQ ID NO: 1378413 - DNA, 25 bp, Homo sapien
gtacaattgctggatgctattataa

SEQ ID NO: 1378414 - DNA, 25 bp, Homo sapien
caggtttctgtaaggatgtaagttt

SEQ ID NO: 1378415 - DNA, 25 bp, Homo sapien
tgaagtacagcttggttgctttaaa

SEQ ID NO: 1378416 - DNA, 25 bp, Homo sapien
tgttatttagggtgaaggcgctttg

SEQ ID NO: 1378417 - DNA, 25 bp, Homo sapien
ctctaggccatgttctcatcggaag

SEQ ID NO: 1378418 - DNA, 25 bp, Homo sapien
tctggttgatgtagtatcagttgac

SEQ ID NO: 1378419 - DNA, 25 bp, Homo sapien
tattttttctctaggccatgttctc

SEQ ID NO: 1378420 - DNA, 25 bp, Homo sapien
aggtcactggtgctaccaaatcctg

SEQ ID NO: 1378421 - DNA, 25 bp, Homo sapien
actggtgctaccaaatcctgggtcc

SEQ ID NO: 1378422 - DNA, 25 bp, Homo sapien
ccagaaggttgtgtggataaacaaa

SEQ ID NO: 1378423 - DNA, 25 bp, Homo sapien
cctgggtccagaaggttgtgtggat

SEQ ID NO: 1378424 - DNA, 25 bp, Homo sapien
caatttcttgctgttgtctcatctc

SEQ ID NO: 1378425 - DNA, 25 bp, Homo sapien
tcttctccaatttcttgctgttgtc

SEQ ID NO: 1378426 - DNA, 25 bp, Homo sapien
ccatttgcattccatcttctccaat

SEQ ID NO: 1378427 - DNA, 25 bp, Homo sapien
gctgttgtctcatctctcattttct

SEQ ID NO: 1378428 - DNA, 25 bp, Homo sapien
gccagtgagagtcagcgtactttgg

SEQ ID NO: 1378429 - DNA, 25 bp, Homo sapien
tttctcggtactgccaggaaaggtg

SEQ ID NO: 1378430 - DNA, 25 bp, Homo sapien
ctccttggttttctcggtactgcca

SEQ ID NO: 1378431 - DNA, 25 bp, Homo sapien
gtgagagtcagcgtactttggcacc

SEQ ID NO: 1378432 - DNA, 25 bp, Homo sapien
ggagctgtcagtcgcaatactgctg

SEQ ID NO: 1378433 - DNA, 25 bp, Homo sapien
gagaatcttgcagagcatccaggtg

SEQ ID NO: 1378434 - DNA, 25 bp, Homo sapien
cagatcaggattagtgtgccatttc

SEQ ID NO: 1378435 - DNA, 25 bp, Homo sapien
taaatgaataggatttggtgcccag

SEQ ID NO: 1378436 - DNA, 25 bp, Homo sapien
tcctgaattatgtacccttaaagtc

SEQ ID NO: 1378437 - DNA, 25 bp, Homo sapien
ccaaatgtttttaagatctagagaa

SEQ ID NO: 1378438 - DNA, 25 bp, Homo sapien
taagaccactttgttgtacacacat

SEQ ID NO: 1378439 - DNA, 25 bp, Homo sapien
catttagttgtaaagtgtggaggaa

SEQ ID NO: 1378440 - DNA, 25 bp, Homo sapien
ttatatgtaacaatccgcccctccg

SEQ ID NO: 1378441 - DNA, 25 bp, Homo sapien
tatctcacaagtaacatgctccgga

SEQ ID NO: 1378442 - DNA, 25 bp, Homo sapien
gtgcagtgaccttttgactctggaa

SEQ ID NO: 1378443 - DNA, 25 bp, Homo sapien
gcttgggtgttctcatatctcacaa

SEQ ID NO: 1378444 - DNA, 25 bp, Homo sapien
cctgactgacaactttctataaaaa

SEQ ID NO: 1378445 - DNA, 25 bp, Homo sapien
tgttatttaactggtgtctgttaca

SEQ ID NO: 1378446 - DNA, 25 bp, Homo sapien
gactattgggttcaaaacctgactg

SEQ ID NO: 1378447 - DNA, 25 bp, Homo sapien
catatgagaaaaacagtaaccgcct

SEQ ID NO: 1378448 - DNA, 25 bp, Homo sapien
tttattcacatacatctagttcatc

SEQ ID NO: 1378449 - DNA, 25 bp, Homo sapien
tctacctaaagtgttcagaacaatg

SEQ ID NO: 1378450 - DNA, 25 bp, Homo sapien
gaacaatgttcagcacatattaagc

SEQ ID NO: 1378451 - DNA, 25 bp, Homo sapien
ttaagcttgatataactgttaccta

SEQ ID NO: 1378452 - DNA, 25 bp, Homo sapien
tacaaaatatggtccacatggctga

SEQ ID NO: 1378453 - DNA, 25 bp, Homo sapien
acacaatattattctaaagtcatcc

SEQ ID NO: 1378454 - DNA, 25 bp, Homo sapien
acaatattattctaaagtcatcctt

SEQ ID NO: 1378455 - DNA, 25 bp, Homo sapien
atacaaaatatggtccacatggctg

SEQ ID NO: 1378456 - DNA, 25 bp, Homo sapien
tctagctgaacaatagtccgttcaa

SEQ ID NO: 1378457 - DNA, 25 bp, Homo sapien
gctgaacaatagtccgttcaatctc

SEQ ID NO: 1378458 - DNA, 25 bp, Homo sapien
tagctgaacaatagtccgttcaatc

SEQ ID NO: 1378459 - DNA, 25 bp, Homo sapien
ctgaacaatagtccgttcaatctca

SEQ ID NO: 1378460 - DNA, 25 bp, Homo sapien
tgccagtttaaatcttgaatatgtt

SEQ ID NO: 1378461 - DNA, 25 bp, Homo sapien
atttctctcaatttagatccagctg

SEQ ID NO: 1378462 - DNA, 25 bp, Homo sapien
tcaatttagatccagctgtgagttg

SEQ ID NO: 1378463 - DNA, 25 bp, Homo sapien
ctgtgagttgcatgttctttctctg

SEQ ID NO: 1378464 - DNA, 25 bp, Homo sapien
aagttccttctgtgcgtgttcaatc

SEQ ID NO: 1378465 - DNA, 25 bp, Homo sapien
gttccttctgtgcgtgttcaatcat

SEQ ID NO: 1378466 - DNA, 25 bp, Homo sapien
tgaagttccttctgtgcgtgttcaa

SEQ ID NO: 1378467 - DNA, 25 bp, Homo sapien
acttctgaagttccttctgtgcgtg

SEQ ID NO: 1378468 - DNA, 25 bp, Homo sapien
tttcagctgaggatgaacaaggagg

SEQ ID NO: 1378469 - DNA, 25 bp, Homo sapien
gctagagctagttacatggaacaga

SEQ ID NO: 1378470 - DNA, 25 bp, Homo sapien
tcatggacatgtgcacagtggtgaa

SEQ ID NO: 1378471 - DNA, 25 bp, Homo sapien
aatctaaccacggaattttgcaagc

SEQ ID NO: 1378472 - DNA, 25 bp, Homo sapien
ttgccatgcagtaatgtcatttttt

SEQ ID NO: 1378473 - DNA, 25 bp, Homo sapien
catccatgctgtgacattagttcca

SEQ ID NO: 1378474 - DNA, 25 bp, Homo sapien
taactgcttgatgctctaactgggc

SEQ ID NO: 1378475 - DNA, 25 bp, Homo sapien
ccagattctcaattctaactgcttg

SEQ ID NO: 1378476 - DNA, 25 bp, Homo sapien
tcaattggttgtcgagcagccagtc

SEQ ID NO: 1378477 - DNA, 25 bp, Homo sapien
tcatactgagcaattcaattggttg

SEQ ID NO: 1378478 - DNA, 25 bp, Homo sapien
gagcaattcaattggttgtcgagca

SEQ ID NO: 1378479 - DNA, 25 bp, Homo sapien
gcagccagtctttcaaattcatttc

SEQ ID NO: 1378480 - DNA, 25 bp, Homo sapien
cataaataaacgattaggtataatg

SEQ ID NO: 1378481 - DNA, 25 bp, Homo sapien
tcataaataaacgattaggtataat

SEQ ID NO: 1378482 - DNA, 25 bp, Homo sapien
atacttgaatccaataatttagaaa

SEQ ID NO: 1378483 - DNA, 25 bp, Homo sapien
ctttcataaataaacgattaggtat

SEQ ID NO: 1378484 - DNA, 25 bp, Homo sapien
taagtagtagctatgcaggcaatgg

SEQ ID NO: 1378485 - DNA, 25 bp, Homo sapien
caggaattctcgttcacacctaggc

SEQ ID NO: 1378486 - DNA, 25 bp, Homo sapien
cattaagtgagttgtggagccccag

SEQ ID NO: 1378487 - DNA, 25 bp, Homo sapien
gagggtccctttgagaatttacgca

SEQ ID NO: 1378488 - DNA, 25 bp, Homo sapien
taggtcggtatctgcgagtttcctc

SEQ ID NO: 1378489 - DNA, 25 bp, Homo sapien
aaaggcagaataatccggggctgtc

SEQ ID NO: 1378490 - DNA, 25 bp, Homo sapien
aggcagaataatccggggctgtcag

SEQ ID NO: 1378491 - DNA, 25 bp, Homo sapien
gtcggtatctgcgagtttcctcctc

SEQ ID NO: 1378492 - DNA, 25 bp, Homo sapien
tctttcagtaccgagccagctagca

SEQ ID NO: 1378493 - DNA, 25 bp, Homo sapien
tttctttcagtaccgagccagctag

SEQ ID NO: 1378494 - DNA, 25 bp, Homo sapien
gagaatagggaccagggtagaagtg

SEQ ID NO: 1378495 - DNA, 25 bp, Homo sapien
atgtttctttcagtaccgagccagc

SEQ ID NO: 1378496 - DNA, 25 bp, Homo sapien
cgcttcccgcacaccaggggcttca

SEQ ID NO: 1378497 - DNA, 25 bp, Homo sapien
tcccgcacaccaggggcttcataac

SEQ ID NO: 1378498 - DNA, 25 bp, Homo sapien
gcttcccgcacaccaggggcttcat

SEQ ID NO: 1378499 - DNA, 25 bp, Homo sapien
ttcccgcacaccaggggcttcataa

SEQ ID NO: 1378500 - DNA, 25 bp, Homo sapien
tcaaaatacggcagcgcatccacca

SEQ ID NO: 1378501 - DNA, 25 bp, Homo sapien
tgatcaaaatacggcagcgcatcca

SEQ ID NO: 1378502 - DNA, 25 bp, Homo sapien
cttgatcaaaatacggcagcgcatc

SEQ ID NO: 1378503 - DNA, 25 bp, Homo sapien
atcaaaatacggcagcgcatccacc

SEQ ID NO: 1378504 - DNA, 25 bp, Homo sapien
aggacctcaggtttgcctgcgtttt

SEQ ID NO: 1378505 - DNA, 25 bp, Homo sapien
tgaggacctcaggtttgcctgcgtt

SEQ ID NO: 1378506 - DNA, 25 bp, Homo sapien
tctgaggacctcaggtttgcctgcg

SEQ ID NO: 1378507 - DNA, 25 bp, Homo sapien
gaggacctcaggtttgcctgcgttt

SEQ ID NO: 1378508 - DNA, 25 bp, Homo sapien
cgaatggcggcgatttgaagttggg

SEQ ID NO: 1378509 - DNA, 25 bp, Homo sapien
ttgcctgcgaatggcggcgatttga

SEQ ID NO: 1378510 - DNA, 25 bp, Homo sapien
cctttttttgcctgcgaatggcggc

SEQ ID NO: 1378511 - DNA, 25 bp, Homo sapien
ttttttgcctgcgaatggcggcgat

SEQ ID NO: 1378512 - DNA, 25 bp, Homo sapien
tcaggctgcgaggatgaagacacca

SEQ ID NO: 1378513 - DNA, 25 bp, Homo sapien
gacaggctcagttctattccctgga

SEQ ID NO: 1378514 - DNA, 25 bp, Homo sapien
cattgctgaagcaaaggtctcctcc

SEQ ID NO: 1378515 - DNA, 25 bp, Homo sapien
gatgtctagtagaagccccactggg

SEQ ID NO: 1378516 - DNA, 25 bp, Homo sapien
tctgtgttgtacaactttgggcaac

SEQ ID NO: 1378517 - DNA, 25 bp, Homo sapien
aagagtctcatctaggcacctataa

SEQ ID NO: 1378518 - DNA, 25 bp, Homo sapien
tctgtgtccataaaagtcttggctt

SEQ ID NO: 1378519 - DNA, 25 bp, Homo sapien
gaaatttccatctgtaggactaacc

SEQ ID NO: 1378520 - DNA, 25 bp, Homo sapien
cctcaaatgatccactcgccttgga

SEQ ID NO: 1378521 - DNA, 25 bp, Homo sapien
ctcaaatgatccactcgccttggac

SEQ ID NO: 1378522 - DNA, 25 bp, Homo sapien
ggtggctcccatgcccttgaaagga

SEQ ID NO: 1378523 - DNA, 25 bp, Homo sapien
tgcatccagcctccacaaagtttaa

SEQ ID NO: 1378524 - DNA, 25 bp, Homo sapien
taatattacaagtagggcttcctcc

SEQ ID NO: 1378525 - DNA, 25 bp, Homo sapien
gcatggcacatggtggacactaaaa

SEQ ID NO: 1378526 - DNA, 25 bp, Homo sapien
cactttctgttgtatattcaggatg

SEQ ID NO: 1378527 - DNA, 25 bp, Homo sapien
gcactttctgttgtatattcaggat

SEQ ID NO: 1378528 - DNA, 25 bp, Homo sapien
ggcactttctgttgtatattcagga

SEQ ID NO: 1378529 - DNA, 25 bp, Homo sapien
tttcttttgcagaaatttcattttg

SEQ ID NO: 1378530 - DNA, 25 bp, Homo sapien
tcttttgcagaaatttcattttgct

SEQ ID NO: 1378531 - DNA, 25 bp, Homo sapien
tcatttcttttgcagaaatttcatt

SEQ ID NO: 1378532 - DNA, 25 bp, Homo sapien
ttttgcagaaatttcattttgcttc

SEQ ID NO: 1378533 - DNA, 25 bp, Homo sapien
ttcagaacagcccaagagttaagct

SEQ ID NO: 1378534 - DNA, 25 bp, Homo sapien
taattgtagcggcagaaaagaactc

SEQ ID NO: 1378535 - DNA, 25 bp, Homo sapien
tcagctagtgaaggacagggcctaa

SEQ ID NO: 1378536 - DNA, 25 bp, Homo sapien
gggattaacaggtcagtcattcaga

SEQ ID NO: 1378537 - DNA, 25 bp, Homo sapien
tcaagcaaacctccttacttgacct

SEQ ID NO: 1378538 - DNA, 25 bp, Homo sapien
tctgtcatctgtggcaagatcatct

SEQ ID NO: 1378539 - DNA, 25 bp, Homo sapien
accgcgcctggtcttcagccacatt

SEQ ID NO: 1378540 - DNA, 25 bp, Homo sapien
aacctccttacttgacctcgcaaag

SEQ ID NO: 1378541 - DNA, 25 bp, Homo sapien
tggatggcccggatctcaaacaaac

SEQ ID NO: 1378542 - DNA, 25 bp, Homo sapien
ggctccgactcaggaattgtttcca

SEQ ID NO: 1378543 - DNA, 25 bp, Homo sapien
ccgactcaggaattgtttccaaata

SEQ ID NO: 1378544 - DNA, 25 bp, Homo sapien
ccactgggctccgactcaggaattg

SEQ ID NO: 1378545 - DNA, 25 bp, Homo sapien
tagagagggagaactttataatgaa

SEQ ID NO: 1378546 - DNA, 25 bp, Homo sapien
ggtattcactaaatagagagggaga

SEQ ID NO: 1378547 - DNA, 25 bp, Homo sapien
tatagtaaaatctttcaaggtattc

SEQ ID NO: 1378548 - DNA, 25 bp, Homo sapien
tcaaggtattcactaaatagagagg

SEQ ID NO: 1378549 - DNA, 25 bp, Homo sapien
taactccacttttccgaagctctcg

SEQ ID NO: 1378550 - DNA, 25 bp, Homo sapien
aagagatccaggaagtggcgtacac

SEQ ID NO: 1378551 - DNA, 25 bp, Homo sapien
tacacttcgggaggtgtgggactta

SEQ ID NO: 1378552 - DNA, 25 bp, Homo sapien
ccaggaagtggcgtacacttcggga

SEQ ID NO: 1378553 - DNA, 25 bp, Homo sapien
ttcggacaccagagagttgagtgtc

SEQ ID NO: 1378554 - DNA, 25 bp, Homo sapien
aagaataatgtcctaccaactccac

SEQ ID NO: 1378555 - DNA, 25 bp, Homo sapien
gacaccagagagttgagtgtcacat

SEQ ID NO: 1378556 - DNA, 25 bp, Homo sapien
cagtcatgttcaaagaataatgtcc

SEQ ID NO: 1378557 - DNA, 25 bp, Homo sapien
tccgtaaagggctaactggcacaga

SEQ ID NO: 1378558 - DNA, 25 bp, Homo sapien
gcatttgtgctaactacctcctcat

SEQ ID NO: 1378559 - DNA, 25 bp, Homo sapien
ctttaagctccatgctgcatttgtg

SEQ ID NO: 1378560 - DNA, 25 bp, Homo sapien
tagagctggctatgataatactgta

SEQ ID NO: 1378561 - DNA, 25 bp, Homo sapien
tttgagtgctaaaggtatgttgtac

SEQ ID NO: 1378562 - DNA, 25 bp, Homo sapien
tggctgtcccattagcacataagtt

SEQ ID NO: 1378563 - DNA, 25 bp, Homo sapien
acattttcaggctacctacgggtgg

SEQ ID NO: 1378564 - DNA, 25 bp, Homo sapien
taagttccatctgtctaaaggtcac

SEQ ID NO: 1378565 - DNA, 25 bp, Homo sapien
ttggtggtagaatttcatcctcatc

SEQ ID NO: 1378566 - DNA, 25 bp, Homo sapien
cagggcagcttgaagttttggtggt

SEQ ID NO: 1378567 - DNA, 25 bp, Homo sapien
tgagtcaagatttcatttcgttctt

SEQ ID NO: 1378568 - DNA, 25 bp, Homo sapien
ctgctcctgagtcaagatttcattt

SEQ ID NO: 1378569 - DNA, 25 bp, Homo sapien
tcgacccacctggagttgaagggtg

SEQ ID NO: 1378570 - DNA, 25 bp, Homo sapien
taattaaattagaggcttatgtgtc

SEQ ID NO: 1378571 - DNA, 25 bp, Homo sapien
cctcctttgggataggcagctataa

SEQ ID NO: 1378572 - DNA, 25 bp, Homo sapien
gtggttttacctcttttgagaatga

SEQ ID NO: 1378573 - DNA, 25 bp, Homo sapien
tgtaagaacttgtctgcacagagat

SEQ ID NO: 1378574 - DNA, 25 bp, Homo sapien
gtctgcacagagatcaactatcagc

SEQ ID NO: 1378575 - DNA, 25 bp, Homo sapien
tcctgtaagaacttgtctgcacaga

SEQ ID NO: 1378576 - DNA, 25 bp, Homo sapien
ctgcacagagatcaactatcagcac

SEQ ID NO: 1378577 - DNA, 25 bp, Homo sapien
tatgctgccaggtgaacggatacag

SEQ ID NO: 1378578 - DNA, 25 bp, Homo sapien
tacagtgtagctaccacagcatggc

SEQ ID NO: 1378579 - DNA, 25 bp, Homo sapien
tgtcaatcatagatgctggcaggac

SEQ ID NO: 1378580 - DNA, 25 bp, Homo sapien
tgtaggtgagcacacgatgtcaatc

SEQ ID NO: 1378581 - DNA, 25 bp, Homo sapien
acaccagtgtgaagtaacatatttc

SEQ ID NO: 1378582 - DNA, 25 bp, Homo sapien
caccagtgtgaagtaacatatttca

SEQ ID NO: 1378583 - DNA, 25 bp, Homo sapien
ccagtgtgaagtaacatatttcact

SEQ ID NO: 1378584 - DNA, 25 bp, Homo sapien
aacaccagtgtgaagtaacatattt

SEQ ID NO: 1378585 - DNA, 25 bp, Homo sapien
ttggcaacaaagattaccctacgct

SEQ ID NO: 1378586 - DNA, 25 bp, Homo sapien
agagaggcacagacccggatgagat

SEQ ID NO: 1378587 - DNA, 25 bp, Homo sapien
taaaatcaacatgttccaatcggga

SEQ ID NO: 1378588 - DNA, 25 bp, Homo sapien
cactcaggcacttaaagagacattt

SEQ ID NO: 1378589 - DNA, 25 bp, Homo sapien
tcatctccagccccagggaggtaac

SEQ ID NO: 1378590 - DNA, 25 bp, Homo sapien
catctccagccccagggaggtaact

SEQ ID NO: 1378591 - DNA, 25 bp, Homo sapien
tctccagccccagggaggtaactct

SEQ ID NO: 1378592 - DNA, 25 bp, Homo sapien
tccagccccagggaggtaactctta

SEQ ID NO: 1378593 - DNA, 25 bp, Homo sapien
gaatgggtaaacaagggctggagac

SEQ ID NO: 1378594 - DNA, 25 bp, Homo sapien
gacacttcgcatgaatgggtaaaca

SEQ ID NO: 1378595 - DNA, 25 bp, Homo sapien
ttccatgacacttcgcatgaatggg

SEQ ID NO: 1378596 - DNA, 25 bp, Homo sapien
tgtgatggtgcgtccaggagctggg

SEQ ID NO: 1378597 - DNA, 25 bp, Homo sapien
aaaagattgaagcagcctaggcgac

SEQ ID NO: 1378598 - DNA, 25 bp, Homo sapien
taaccatgcagtatacctcagggag

SEQ ID NO: 1378599 - DNA, 25 bp, Homo sapien
tcagggagtcgctttcctttgccta

SEQ ID NO: 1378600 - DNA, 25 bp, Homo sapien
gcctaggcgactaaccatgcagtat

SEQ ID NO: 1378601 - DNA, 25 bp, Homo sapien
tattccttgaccaaccctgtctgta

SEQ ID NO: 1378602 - DNA, 25 bp, Homo sapien
tacacagatcattgagcatccctca

SEQ ID NO: 1378603 - DNA, 25 bp, Homo sapien
taatacagcttccttaatacacaga

SEQ ID NO: 1378604 - DNA, 25 bp, Homo sapien
tctagaacactccatggttaacccc

SEQ ID NO: 1378605 - DNA, 25 bp, Homo sapien
cagtaaccaaaccaccggcttccat

SEQ ID NO: 1378606 - DNA, 25 bp, Homo sapien
caagagcttcttacagtaaccaaac

SEQ ID NO: 1378607 - DNA, 25 bp, Homo sapien
accaaaccaccggcttccatcttca

SEQ ID NO: 1378608 - DNA, 25 bp, Homo sapien
aaagagccaatagttagtttaggat

SEQ ID NO: 1378609 - DNA, 25 bp, Homo sapien
tttaggatccaaacaattacttatg

SEQ ID NO: 1378610 - DNA, 25 bp, Homo sapien
acaattacttatggcattctccatg

SEQ ID NO: 1378611 - DNA, 25 bp, Homo sapien
ctgaaaaaagagccaatagttagtt

SEQ ID NO: 1378612 - DNA, 25 bp, Homo sapien
ggcaaactgaagagactctcaaatt

SEQ ID NO: 1378613 - DNA, 25 bp, Homo sapien
catagcttcactaatggctgtaccc

SEQ ID NO: 1378614 - DNA, 25 bp, Homo sapien
tttaagccccacataggaaatgttc

SEQ ID NO: 1378615 - DNA, 25 bp, Homo sapien
cacatccttgacttgccacagtatt

SEQ ID NO: 1378616 - DNA, 25 bp, Homo sapien
tccatgtctttggactgcttatagc

SEQ ID NO: 1378617 - DNA, 25 bp, Homo sapien
ttccatgtctttggactgcttatag

SEQ ID NO: 1378618 - DNA, 25 bp, Homo sapien
ccatgtctttggactgcttatagcc

SEQ ID NO: 1378619 - DNA, 25 bp, Homo sapien
cttccatgtctttggactgcttata

SEQ ID NO: 1378620 - DNA, 25 bp, Homo sapien
cacggaactagtaagtgggaaatgc

SEQ ID NO: 1378621 - DNA, 25 bp, Homo sapien
gctgggttgcagctcatacctaaca

SEQ ID NO: 1378622 - DNA, 25 bp, Homo sapien
tattattcccctccttaaggatgag

SEQ ID NO: 1378623 - DNA, 25 bp, Homo sapien
tgttttcaaagccaccagatcctac

SEQ ID NO: 1378624 - DNA, 25 bp, Homo sapien
tcttggaagacggttgcagttgtgc

SEQ ID NO: 1378625 - DNA, 25 bp, Homo sapien
tccaaggtctggtagtgaggattcc

SEQ ID NO: 1378626 - DNA, 25 bp, Homo sapien
gtagagacaccaccacaaaaagttc

SEQ ID NO: 1378627 - DNA, 25 bp, Homo sapien
aattcaataagatcccgctccaagg

SEQ ID NO: 1378628 - DNA, 25 bp, Homo sapien
ctgttaaggctgtgacatactaggg

SEQ ID NO: 1378629 - DNA, 25 bp, Homo sapien
ttcagcatccagaggtcatgaccca

SEQ ID NO: 1378630 - DNA, 25 bp, Homo sapien
gcatctgccacatagacatacctgt

SEQ ID NO: 1378631 - DNA, 25 bp, Homo sapien
catgacccacataggattaatcttc

SEQ ID NO: 1378632 - DNA, 25 bp, Homo sapien
ctttggcagatactcggcatcactt

SEQ ID NO: 1378633 - DNA, 25 bp, Homo sapien
tctttggcagatactcggcatcact

SEQ ID NO: 1378634 - DNA, 25 bp, Homo sapien
tcggcatcactttcgttcccactgg

SEQ ID NO: 1378635 - DNA, 25 bp, Homo sapien
atcactttcgttcccactggtttca

SEQ ID NO: 1378636 - DNA, 25 bp, Homo sapien
tcaaatatgtcatctattttcaata

SEQ ID NO: 1378637 - DNA, 25 bp, Homo sapien
tgtcggaggtaattcctttccagtg

SEQ ID NO: 1378638 - DNA, 25 bp, Homo sapien
tttccagtgtaagaatgtaacttta

SEQ ID NO: 1378639 - DNA, 25 bp, Homo sapien
atatgtcatctattttcaatacaag

SEQ ID NO: 1378640 - DNA, 25 bp, Homo sapien
tttgaccgcaaataagcctgtgagt

SEQ ID NO: 1378641 - DNA, 25 bp, Homo sapien
taaagtgaccggcaaagttgtatct

SEQ ID NO: 1378642 - DNA, 25 bp, Homo sapien
tgtttgcaacttcaccagctcggaa

SEQ ID NO: 1378643 - DNA, 25 bp, Homo sapien
tgtgagttctttacttccatagtct

SEQ ID NO: 1378644 - DNA, 25 bp, Homo sapien
aaagcacttttagcgggtggtagct

SEQ ID NO: 1378645 - DNA, 25 bp, Homo sapien
gctgaaggggatctccacataggta

SEQ ID NO: 1378646 - DNA, 25 bp, Homo sapien
cttttagcgggtggtagcttccatg

SEQ ID NO: 1378647 - DNA, 25 bp, Homo sapien
tagcttccatgctgaaggggatctc

SEQ ID NO: 1378648 - DNA, 25 bp, Homo sapien
cataattaaatgcaaagataaccac

SEQ ID NO: 1378649 - DNA, 25 bp, Homo sapien
atgaacataattaaatgcaaagata

SEQ ID NO: 1378650 - DNA, 25 bp, Homo sapien
gaacataattaaatgcaaagataac

SEQ ID NO: 1378651 - DNA, 25 bp, Homo sapien
taattaaatgcaaagataaccacag

SEQ ID NO: 1378652 - DNA, 25 bp, Homo sapien
taactgcaaagttgtcaacacctac

SEQ ID NO: 1378653 - DNA, 25 bp, Homo sapien
catgtacttataagctgagcagtct

SEQ ID NO: 1378654 - DNA, 25 bp, Homo sapien
gcttatgggttcaacagagctaaaa

SEQ ID NO: 1378655 - DNA, 25 bp, Homo sapien
caccaaacgtttccatgctaaagag

SEQ ID NO: 1378656 - DNA, 25 bp, Homo sapien
agactgtgtgtaataaagtgctgac

SEQ ID NO: 1378657 - DNA, 25 bp, Homo sapien
tcatagatattgtcctcagactgtg

SEQ ID NO: 1378658 - DNA, 25 bp, Homo sapien
atcttcatagatattgtcctcagac

SEQ ID NO: 1378659 - DNA, 25 bp, Homo sapien
ttgtcctcagactgtgtgtaataaa

SEQ ID NO: 1378660 - DNA, 25 bp, Homo sapien
ccgatttcgaaagtgctgaatatcc

SEQ ID NO: 1378661 - DNA, 25 bp, Homo sapien
cgtctgtgagttccgatttcgaaag

SEQ ID NO: 1378662 - DNA, 25 bp, Homo sapien
tcacgaatcgtctgtgagttccgat

SEQ ID NO: 1378663 - DNA, 25 bp, Homo sapien
cttccaagttcttcacgaatcgtct

SEQ ID NO: 1378664 - DNA, 25 bp, Homo sapien
aattggatgcttgtagccaatcaca

SEQ ID NO: 1378665 - DNA, 25 bp, Homo sapien
tcattgggttcctttattaagctca

SEQ ID NO: 1378666 - DNA, 25 bp, Homo sapien
gaacaccatgagaaaattggatgct

SEQ ID NO: 1378667 - DNA, 25 bp, Homo sapien
tcacattcatgttcttcattgggtt

SEQ ID NO: 1378668 - DNA, 25 bp, Homo sapien
taatcaacacctgcatgttcaaagc

SEQ ID NO: 1378669 - DNA, 25 bp, Homo sapien
cgctggcccagattcttaaagatat

SEQ ID NO: 1378670 - DNA, 25 bp, Homo sapien
ggtgttctgatgctcttatgtcaac

SEQ ID NO: 1378671 - DNA, 25 bp, Homo sapien
caacagattatcttagctattacta

SEQ ID NO: 1378672 - DNA, 25 bp, Homo sapien
tacctacaagtctttatctgtagga

SEQ ID NO: 1378673 - DNA, 25 bp, Homo sapien
tacaagtctttatctgtaggataaa

SEQ ID NO: 1378674 - DNA, 25 bp, Homo sapien
gaaaatacctacaagtctttatctg

SEQ ID NO: 1378675 - DNA, 25 bp, Homo sapien
ctgtaaggaaaatacctacaagtct

SEQ ID NO: 1378676 - DNA, 25 bp, Homo sapien
gcaaaggatttatggaaggtccaca

SEQ ID NO: 1378677 - DNA, 25 bp, Homo sapien
taaatatctgaatgtcctacgaggt

SEQ ID NO: 1378678 - DNA, 25 bp, Homo sapien
tatacggcgtaacaccagattcgga

SEQ ID NO: 1378679 - DNA, 25 bp, Homo sapien
ggttattccgtatgaactatccaga

SEQ ID NO: 1378680 - DNA, 25 bp, Homo sapien
tatatctagacccacattttcacgg

SEQ ID NO: 1378681 - DNA, 25 bp, Homo sapien
tttgacccgagaacatacccagttg

SEQ ID NO: 1378682 - DNA, 25 bp, Homo sapien
gacggatctcttggtgacagttata

SEQ ID NO: 1378683 - DNA, 25 bp, Homo sapien
ttttcacggctggttacatccaagt

SEQ ID NO: 1378684 - DNA, 25 bp, Homo sapien
cttcttgacagtgtctgaacagtag

SEQ ID NO: 1378685 - DNA, 25 bp, Homo sapien
gacagtgtctgaacagtagtacgag

SEQ ID NO: 1378686 - DNA, 25 bp, Homo sapien
tagtacgagaaaaaccaacatccat

SEQ ID NO: 1378687 - DNA, 25 bp, Homo sapien
tctgaacagtagtacgagaaaaacc

SEQ ID NO: 1378688 - DNA, 25 bp, Homo sapien
ggttccattacaagtaaatgtgaaa

SEQ ID NO: 1378689 - DNA, 25 bp, Homo sapien
ttcccaactgggtgaatgacaagtg

SEQ ID NO: 1378690 - DNA, 25 bp, Homo sapien
gtattctttatcctgtcagaatcca

SEQ ID NO: 1378691 - DNA, 25 bp, Homo sapien
gaaaatggctacaacctgatcttga

SEQ ID NO: 1378692 - DNA, 25 bp, Homo sapien
aattcaactacataaaggcactcct

SEQ ID NO: 1378693 - DNA, 25 bp, Homo sapien
tacctgtaatctattaagtaattca

SEQ ID NO: 1378694 - DNA, 25 bp, Homo sapien
cctgtaatctattaagtaattcaac

SEQ ID NO: 1378695 - DNA, 25 bp, Homo sapien
tacataaaggcactcctaagatggt

SEQ ID NO: 1378696 - DNA, 25 bp, Homo sapien
tgatggagtagctgaactaggcttg

SEQ ID NO: 1378697 - DNA, 25 bp, Homo sapien
gtagctgaactaggcttgcctttcc

SEQ ID NO: 1378698 - DNA, 25 bp, Homo sapien
aaataagtgctttcagatactggat

SEQ ID NO: 1378699 - DNA, 25 bp, Homo sapien
taagtgctttcagatactggataac

SEQ ID NO: 1378700 - DNA, 25 bp, Homo sapien
gagaatatcaatctctggcgtttga

SEQ ID NO: 1378701 - DNA, 25 bp, Homo sapien
tctggcgtttgaaccactcaatctg

SEQ ID NO: 1378702 - DNA, 25 bp, Homo sapien
tgttggcaccttgatgttagatttc

SEQ ID NO: 1378703 - DNA, 25 bp, Homo sapien
caatctgcggtatttggttatggta

SEQ ID NO: 1378704 - DNA, 25 bp, Homo sapien
gcatctgtgtaggagggctgcctac

SEQ ID NO: 1378705 - DNA, 25 bp, Homo sapien
gtatcagagcctaaacaaggtaagg

SEQ ID NO: 1378706 - DNA, 25 bp, Homo sapien
cacacttgcctcatgctaaggagca

SEQ ID NO: 1378707 - DNA, 25 bp, Homo sapien
ccctaattaggcaaagcagagtaag

SEQ ID NO: 1378708 - DNA, 25 bp, Homo sapien
tgcttagggaacagtgacaagcaaa

SEQ ID NO: 1378709 - DNA, 25 bp, Homo sapien
cctcattgcccaacctgaagtgtag

SEQ ID NO: 1378710 - DNA, 25 bp, Homo sapien
tactattatactgtattgcttaggg

SEQ ID NO: 1378711 - DNA, 25 bp, Homo sapien
ctcctcattgcccaacctgaagtgt

SEQ ID NO: 1378712 - DNA, 25 bp, Homo sapien
acctcaacgttgtctcctgtggcca

SEQ ID NO: 1378713 - DNA, 25 bp, Homo sapien
ccaagctagtctcccgggtatcact

SEQ ID NO: 1378714 - DNA, 25 bp, Homo sapien
tagtctcccgggtatcactcgggtc

SEQ ID NO: 1378715 - DNA, 25 bp, Homo sapien
caacgttgtctcctgtggccaagct

SEQ ID NO: 1378716 - DNA, 25 bp, Homo sapien
tatgcttcatgtgaaggtttactct

SEQ ID NO: 1378717 - DNA, 25 bp, Homo sapien
ggagacggccctatgcttcatgtga

SEQ ID NO: 1378718 - DNA, 25 bp, Homo sapien
ggacctcggtcactgcagttccagc

SEQ ID NO: 1378719 - DNA, 25 bp, Homo sapien
ggcgaccagtgtcaccgtcgtccgg

SEQ ID NO: 1378720 - DNA, 25 bp, Homo sapien
ccggatatcatttccagcagggcct

SEQ ID NO: 1378721 - DNA, 25 bp, Homo sapien
caccaggtttcatagcgataggcca

SEQ ID NO: 1378722 - DNA, 25 bp, Homo sapien
tcctcaaggtaattgtcgcccagaa

SEQ ID NO: 1378723 - DNA, 25 bp, Homo sapien
ggctacatttgtcctccggatatca

SEQ ID NO: 1378724 - DNA, 25 bp, Homo sapien
aagggaagccatttgaagacaggtc

SEQ ID NO: 1378725 - DNA, 25 bp, Homo sapien
tcagaagggaagccatttgaagaca

SEQ ID NO: 1378726 - DNA, 25 bp, Homo sapien
ggaagccatttgaagacaggtctac

SEQ ID NO: 1378727 - DNA, 25 bp, Homo sapien
cctatactcagaagggaagccattt

SEQ ID NO: 1378728 - DNA, 25 bp, Homo sapien
acttcgcacatatcacaggtgctca

SEQ ID NO: 1378729 - DNA, 25 bp, Homo sapien
gcaatagcatattcttccattaggg

SEQ ID NO: 1378730 - DNA, 25 bp, Homo sapien
gcttgaagacttgtgcagcaatagc

SEQ ID NO: 1378731 - DNA, 25 bp, Homo sapien
tatcacaggtgctcagcttgaagac

SEQ ID NO: 1378732 - DNA, 25 bp, Homo sapien
ttttggcatactctagaaataggct

SEQ ID NO: 1378733 - DNA, 25 bp, Homo sapien
tgtagacagtgagatcattagccct

SEQ ID NO: 1378734 - DNA, 25 bp, Homo sapien
ttacttagtggtgacatggcgatgg

SEQ ID NO: 1378735 - DNA, 25 bp, Homo sapien
cattagccctttctgaaggaaatcc

SEQ ID NO: 1378736 - DNA, 25 bp, Homo sapien
cagaaacgtattcatgcctcgttcc

SEQ ID NO: 1378737 - DNA, 25 bp, Homo sapien
aatttaggccatgagagatatcatc

SEQ ID NO: 1378738 - DNA, 25 bp, Homo sapien
acagtgaggtcggaacagaaacgta

SEQ ID NO: 1378739 - DNA, 25 bp, Homo sapien
ttaaatttaggccatgagagatatc

SEQ ID NO: 1378740 - DNA, 25 bp, Homo sapien
ttcttttccaatgtccactcctggg

SEQ ID NO: 1378741 - DNA, 25 bp, Homo sapien
gcatagtaagtgtaagatggattct

SEQ ID NO: 1378742 - DNA, 25 bp, Homo sapien
tgatgtttgcatacatgtagtaggc

SEQ ID NO: 1378743 - DNA, 25 bp, Homo sapien
catgtagtaggcatagtaagtgtaa

SEQ ID NO: 1378744 - DNA, 25 bp, Homo sapien
gaattagtcatgaccaggtaggaag

SEQ ID NO: 1378745 - DNA, 25 bp, Homo sapien
taggaaggctggttcatgagcagca

SEQ ID NO: 1378746 - DNA, 25 bp, Homo sapien
acaaactttcaggtccaaaggcaca

SEQ ID NO: 1378747 - DNA, 25 bp, Homo sapien
aacataaagagataagcaccaagaa

SEQ ID NO: 1378748 - DNA, 25 bp, Homo sapien
gaaattcttggaacggaacacatca

SEQ ID NO: 1378749 - DNA, 25 bp, Homo sapien
atggtggcctcaaacactggcatga

SEQ ID NO: 1378750 - DNA, 25 bp, Homo sapien
aggaaattcttggaacggaacacat

SEQ ID NO: 1378751 - DNA, 25 bp, Homo sapien
ggcctcaaacactggcatgaaaata

SEQ ID NO: 1378752 - DNA, 25 bp, Homo sapien
cgattgcagacgaaccaggaggaga

SEQ ID NO: 1378753 - DNA, 25 bp, Homo sapien
agcatgctggtacttggcctccacc

SEQ ID NO: 1378754 - DNA, 25 bp, Homo sapien
tttgctccactcatcaggactgcgg

SEQ ID NO: 1378755 - DNA, 25 bp, Homo sapien
cagtggatgcgattgcagacgaacc

SEQ ID NO: 1378756 - DNA, 25 bp, Homo sapien
agtagaggtcccgtagctcacttgc

SEQ ID NO: 1378757 - DNA, 25 bp, Homo sapien
gctcacttgctcctacaggattata

SEQ ID NO: 1378758 - DNA, 25 bp, Homo sapien
ttatcaaaacgctggaaggtctggc

SEQ ID NO: 1378759 - DNA, 25 bp, Homo sapien
cattgaacttatcaaaacgctggaa

SEQ ID NO: 1378760 - DNA, 25 bp, Homo sapien
gcatgaacatccagagaatcaacag

SEQ ID NO: 1378761 - DNA, 25 bp, Homo sapien
agaatcaacagtcaggtcataagga

SEQ ID NO: 1378762 - DNA, 25 bp, Homo sapien
tggtgctatagaccactctgtcagc

SEQ ID NO: 1378763 - DNA, 25 bp, Homo sapien
tgtttctggttcatgcaagcggctg

SEQ ID NO: 1378764 - DNA, 25 bp, Homo sapien
agctcctttaactcgtccatctcgt

SEQ ID NO: 1378765 - DNA, 25 bp, Homo sapien
ttaagcatctgatggacctggaact

SEQ ID NO: 1378766 - DNA, 25 bp, Homo sapien
tcaggcgccggtgggtataggtctt

SEQ ID NO: 1378767 - DNA, 25 bp, Homo sapien
gaggagaggaacttcaggcgccggt

SEQ ID NO: 1378768 - DNA, 25 bp, Homo sapien
tcatatcgtctaagaaggtgtccag

SEQ ID NO: 1378769 - DNA, 25 bp, Homo sapien
gctgcttcattaggatagacgtaaa

SEQ ID NO: 1378770 - DNA, 25 bp, Homo sapien
tccagatttgggtaaggaagtggct

SEQ ID NO: 1378771 - DNA, 25 bp, Homo sapien
tacaccgtccttcattttgaggtga

SEQ ID NO: 1378772 - DNA, 25 bp, Homo sapien
ctgcatgtatttctcacgtatgcat

SEQ ID NO: 1378773 - DNA, 25 bp, Homo sapien
tagggaacctctgaaacgacttctg

SEQ ID NO: 1378774 - DNA, 25 bp, Homo sapien
caatgttccgcaagtatttggaagg

SEQ ID NO: 1378775 - DNA, 25 bp, Homo sapien
catagtgcccgatacagacctttgc

SEQ ID NO: 1378776 - DNA, 25 bp, Homo sapien
cctaagtgggtcagttacatgagaa

SEQ ID NO: 1378777 - DNA, 25 bp, Homo sapien
gggacccagcactggtcattaaaac

SEQ ID NO: 1378778 - DNA, 25 bp, Homo sapien
gcagtttcaccaatatgatgctgat

SEQ ID NO: 1378779 - DNA, 25 bp, Homo sapien
atcgacggacggctgcacagcagtt

SEQ ID NO: 1378780 - DNA, 25 bp, Homo sapien
cagtcttccgtccttggaaacgctt

SEQ ID NO: 1378781 - DNA, 25 bp, Homo sapien
cacttagtggaatggacaaattaac

SEQ ID NO: 1378782 - DNA, 25 bp, Homo sapien
cccagaggcatagtcaccagtaatc

SEQ ID NO: 1378783 - DNA, 25 bp, Homo sapien
cagtttggtggaagatgtttcactt

SEQ ID NO: 1378784 - DNA, 25 bp, Homo sapien
ttgtcttcatcaggcgtttcattgt

SEQ ID NO: 1378785 - DNA, 25 bp, Homo sapien
gaaatcggacagatctcatccacat

SEQ ID NO: 1378786 - DNA, 25 bp, Homo sapien
tccagatggaatatgtgtgcttgca

SEQ ID NO: 1378787 - DNA, 25 bp, Homo sapien
cttgcatctcatgatgagaaatcgg

SEQ ID NO: 1378788 - DNA, 25 bp, Homo sapien
cttctgtggaggtggacagagtctc

SEQ ID NO: 1378789 - DNA, 25 bp, Homo sapien
tatgtgaacaactttctgtaatcat

SEQ ID NO: 1378790 - DNA, 25 bp, Homo sapien
aatccttgattctaggatagcacag

SEQ ID NO: 1378791 - DNA, 25 bp, Homo sapien
atccttgattctaggatagcacagt

SEQ ID NO: 1378792 - DNA, 25 bp, Homo sapien
tgaaatccttgattctaggatagca

SEQ ID NO: 1378793 - DNA, 25 bp, Homo sapien
gaaatccttgattctaggatagcac

SEQ ID NO: 1378794 - DNA, 25 bp, Homo sapien
tgcccccggaaatttgattcttctc

SEQ ID NO: 1378795 - DNA, 25 bp, Homo sapien
tgctttgcccccggaaatttgattc

SEQ ID NO: 1378796 - DNA, 25 bp, Homo sapien
acttgatcagcatagattgctatag

SEQ ID NO: 1378797 - DNA, 25 bp, Homo sapien
agggtgtagtggttattgacaggag

SEQ ID NO: 1378798 - DNA, 25 bp, Homo sapien
gtggttattgacaggagtgatccta

SEQ ID NO: 1378799 - DNA, 25 bp, Homo sapien
gatcagcatagattgctatagccca

SEQ ID NO: 1378800 - DNA, 25 bp, Homo sapien
agccgttcagcctctctgcaaagtc

SEQ ID NO: 1378801 - DNA, 25 bp, Homo sapien
aggagcagaaccacagccgttcagc

SEQ ID NO: 1378802 - DNA, 25 bp, Homo sapien
gagcagaaccacagccgttcagcct

SEQ ID NO: 1378803 - DNA, 25 bp, Homo sapien
cgttcagcctctctgcaaagtcttc

SEQ ID NO: 1378804 - DNA, 25 bp, Homo sapien
cagatccggcatggtagccttcaga

SEQ ID NO: 1378805 - DNA, 25 bp, Homo sapien
cattctatagtaagccgttggagca

SEQ ID NO: 1378806 - DNA, 25 bp, Homo sapien
taacaggttcatttacagatccggc

SEQ ID NO: 1378807 - DNA, 25 bp, Homo sapien
gacagtactgtgaaagctcccagaa

SEQ ID NO: 1378808 - DNA, 25 bp, Homo sapien
tcacgtttgcggtttggttctctgt

SEQ ID NO: 1378809 - DNA, 25 bp, Homo sapien
ctggggtggcagaggtgtgtttgtg

SEQ ID NO: 1378810 - DNA, 25 bp, Homo sapien
ttgtactaaactactgagagctggg

SEQ ID NO: 1378811 - DNA, 25 bp, Homo sapien
agaacccagggcagaaaaataacag

SEQ ID NO: 1378812 - DNA, 25 bp, Homo sapien
tctggtcagacagccaagtgaggag

SEQ ID NO: 1378813 - DNA, 25 bp, Homo sapien
taacagggagtaacaagaggtgcat

SEQ ID NO: 1378814 - DNA, 25 bp, Homo sapien
ttgaaagtggctcttttctgacaaa

SEQ ID NO: 1378815 - DNA, 25 bp, Homo sapien
tggctcttttctgacaaaactttaa

SEQ ID NO: 1378816 - DNA, 25 bp, Homo sapien
aagtggctcttttctgacaaaactt

SEQ ID NO: 1378817 - DNA, 25 bp, Homo sapien
cttgaaagtggctcttttctgacaa

SEQ ID NO: 1378818 - DNA, 25 bp, Homo sapien
tgagttttttcattcggtactggcg

SEQ ID NO: 1378819 - DNA, 25 bp, Homo sapien
ggtactggcgtatttctcttaccag

SEQ ID NO: 1378820 - DNA, 25 bp, Homo sapien
ctcttaccagtgtgtaaaaagcatc

SEQ ID NO: 1378821 - DNA, 25 bp, Homo sapien
ggcgtatttctcttaccagtgtgta

SEQ ID NO: 1378822 - DNA, 25 bp, Homo sapien
gagtcttttactcgcttaatctgct

SEQ ID NO: 1378823 - DNA, 25 bp, Homo sapien
tagcaccataggtacatcatccgag

SEQ ID NO: 1378824 - DNA, 25 bp, Homo sapien
tgtccttgttggcaaatcacacttg

SEQ ID NO: 1378825 - DNA, 25 bp, Homo sapien
gaatggaatcccgtaactcttggcc

SEQ ID NO: 1378826 - DNA, 25 bp, Homo sapien
gtagctgccaccatgtgtgactaat

SEQ ID NO: 1378827 - DNA, 25 bp, Homo sapien
ggtttcaccatctataaccacttgt

SEQ ID NO: 1378828 - DNA, 25 bp, Homo sapien
tgtagaggttaatatccgcaaatga

SEQ ID NO: 1378829 - DNA, 25 bp, Homo sapien
caaatgacttgctattattgatggc

SEQ ID NO: 1378830 - DNA, 25 bp, Homo sapien
cttcgcctgtcctcatgtattggtc

SEQ ID NO: 1378831 - DNA, 25 bp, Homo sapien
caaccaccaccagtttgtactcagt

SEQ ID NO: 1378832 - DNA, 25 bp, Homo sapien
gctggattgtcagtgcgcttttccc

SEQ ID NO: 1378833 - DNA, 25 bp, Homo sapien
gggatcatattcatctacaaagtgg

SEQ ID NO: 1378834 - DNA, 25 bp, Homo sapien
tgtcagtgcgcttttcccaacacca

SEQ ID NO: 1378835 - DNA, 25 bp, Homo sapien
taatcagggttaattggcgagccac

SEQ ID NO: 1378836 - DNA, 25 bp, Homo sapien
tcagggttaattggcgagccacatc

SEQ ID NO: 1378837 - DNA, 25 bp, Homo sapien
ctgttggaaaccagtaatcagggtt

SEQ ID NO: 1378838 - DNA, 25 bp, Homo sapien
gttaattggcgagccacatctacag

SEQ ID NO: 1378839 - DNA, 25 bp, Homo sapien
tgcctctgctttggacagatttagg

SEQ ID NO: 1378840 - DNA, 25 bp, Homo sapien
gaccacagccgggaaaaatgttgga

SEQ ID NO: 1378841 - DNA, 25 bp, Homo sapien
atgttggagaccccggaaccgccat

SEQ ID NO: 1378842 - DNA, 25 bp, Homo sapien
cagatttaggaccacagccgggaaa

SEQ ID NO: 1378843 - DNA, 25 bp, Homo sapien
gctacgtaatcagtcggcgccccag

SEQ ID NO: 1378844 - DNA, 25 bp, Homo sapien
ggcctccgaaccacgagtcatgcgg

SEQ ID NO: 1378845 - DNA, 25 bp, Homo sapien
caaggagcggcacttccggccccgc

SEQ ID NO: 1378846 - DNA, 25 bp, Homo sapien
ggccccgcccgctacgtaatcagtc

SEQ ID NO: 1378847 - DNA, 25 bp, Homo sapien
gacgtttcaataatgaaagcgctag

SEQ ID NO: 1378848 - DNA, 25 bp, Homo sapien
cacgggacgtttcaataatgaaagc

SEQ ID NO: 1378849 - DNA, 25 bp, Homo sapien
tttcaataatgaaagcgctaggtgc

SEQ ID NO: 1378850 - DNA, 25 bp, Homo sapien
ctcccacacgggacgtttcaataat

SEQ ID NO: 1378851 - DNA, 25 bp, Homo sapien
gcttccattctttcgccattaacag

SEQ ID NO: 1378852 - DNA, 25 bp, Homo sapien
aactttattcgcttccattctttcg

SEQ ID NO: 1378853 - DNA, 25 bp, Homo sapien
ccattctttcgccattaacagaaaa

SEQ ID NO: 1378854 - DNA, 25 bp, Homo sapien
tttattcgcttccattctttcgcca

SEQ ID NO: 1378855 - DNA, 25 bp, Homo sapien
agataaacggcctctttacccagag

SEQ ID NO: 1378856 - DNA, 25 bp, Homo sapien
gagatcaaaacctcaaacgacaagg

SEQ ID NO: 1378857 - DNA, 25 bp, Homo sapien
aacggcctctttacccagagatcaa

SEQ ID NO: 1378858 - DNA, 25 bp, Homo sapien
cagagatcaaaacctcaaacgacaa

SEQ ID NO: 1378859 - DNA, 25 bp, Homo sapien
ccagggaccctgtatatggccaatt

SEQ ID NO: 1378860 - DNA, 25 bp, Homo sapien
cagaagctacaccaagggtcaagtg

SEQ ID NO: 1378861 - DNA, 25 bp, Homo sapien
tttacaggacacagtaaccaggcgg

SEQ ID NO: 1378862 - DNA, 25 bp, Homo sapien
ccaattcaagaagagggccaagaaa

SEQ ID NO: 1378863 - DNA, 25 bp, Homo sapien
agaaaccgggtcctagaagctgcag

SEQ ID NO: 1378864 - DNA, 25 bp, Homo sapien
aagaaaccgggtcctagaagctgca

SEQ ID NO: 1378865 - DNA, 25 bp, Homo sapien
agctgcagtgatctaagcagcagca

SEQ ID NO: 1378866 - DNA, 25 bp, Homo sapien
tgcaactgagtgctaaggcagaaca

SEQ ID NO: 1378867 - DNA, 25 bp, Homo sapien
aaaattgatactataaggcgccacc

SEQ ID NO: 1378868 - DNA, 25 bp, Homo sapien
catagggccaacaagataacagtct

SEQ ID NO: 1378869 - DNA, 25 bp, Homo sapien
taccagttgcgttaaatgcaccaaa

SEQ ID NO: 1378870 - DNA, 25 bp, Homo sapien
ggtgtaatagctcaatagaataagt

SEQ ID NO: 1378871 - DNA, 25 bp, Homo sapien
gctcaatagaataagtattccagat

SEQ ID NO: 1378872 - DNA, 25 bp, Homo sapien
aatagctcaatagaataagtattcc

SEQ ID NO: 1378873 - DNA, 25 bp, Homo sapien
tgtaatagctcaatagaataagtat

SEQ ID NO: 1378874 - DNA, 25 bp, Homo sapien
tgacggatctttctttctgcaccaa

SEQ ID NO: 1378875 - DNA, 25 bp, Homo sapien
ggatctttctttctgcaccaaaccc

SEQ ID NO: 1378876 - DNA, 25 bp, Homo sapien
acggatctttctttctgcaccaaac

SEQ ID NO: 1378877 - DNA, 25 bp, Homo sapien
cagcttgacggatctttctttctgc

SEQ ID NO: 1378878 - DNA, 25 bp, Homo sapien
tatgttggtctatcagttggcctcc

SEQ ID NO: 1378879 - DNA, 25 bp, Homo sapien
tcttactgtaagcaaccattaggtt

SEQ ID NO: 1378880 - DNA, 25 bp, Homo sapien
ttctttcctagaggagaaaatccac

SEQ ID NO: 1378881 - DNA, 25 bp, Homo sapien
gatttgagcgcacaacaatcatagt

SEQ ID NO: 1378882 - DNA, 25 bp, Homo sapien
ccaaccgatcaggtcgaggagctgc

SEQ ID NO: 1378883 - DNA, 25 bp, Homo sapien
tgaccaaccgatcaggtcgaggagc

SEQ ID NO: 1378884 - DNA, 25 bp, Homo sapien
aggtcgaggagctgcaacagccttg

SEQ ID NO: 1378885 - DNA, 25 bp, Homo sapien
ccgatcaggtcgaggagctgcaaca

SEQ ID NO: 1378886 - DNA, 25 bp, Homo sapien
ctgtaattaagtcaaaagatgagaa

SEQ ID NO: 1378887 - DNA, 25 bp, Homo sapien
attaagtcaaaagatgagaagaaac

SEQ ID NO: 1378888 - DNA, 25 bp, Homo sapien
taattaagtcaaaagatgagaagaa

SEQ ID NO: 1378889 - DNA, 25 bp, Homo sapien
tgtaattaagtcaaaagatgagaag

SEQ ID NO: 1378890 - DNA, 25 bp, Homo sapien
tgagtcgtgatagcgcctgggtaac

SEQ ID NO: 1378891 - DNA, 25 bp, Homo sapien
cctgggtaaccgaatcagactgtga

SEQ ID NO: 1378892 - DNA, 25 bp, Homo sapien
cactttttatgatgggactcttgcc

SEQ ID NO: 1378893 - DNA, 25 bp, Homo sapien
gaatcatttgcagaccctagacttg

SEQ ID NO: 1378894 - DNA, 25 bp, Homo sapien
gttgagacactccagggtagttact

SEQ ID NO: 1378895 - DNA, 25 bp, Homo sapien
aagttgagacactccagggtagtta

SEQ ID NO: 1378896 - DNA, 25 bp, Homo sapien
aaagttgagacactccagggtagtt

SEQ ID NO: 1378897 - DNA, 25 bp, Homo sapien
cagggtagttactaatcaaaccaca

SEQ ID NO: 1378898 - DNA, 25 bp, Homo sapien
gactcgccaaacattacaggcgctg

SEQ ID NO: 1378899 - DNA, 25 bp, Homo sapien
tgcctgtagctcaatgccatcctga

SEQ ID NO: 1378900 - DNA, 25 bp, Homo sapien
gcacttgccagtgcgctgattaaga

SEQ ID NO: 1378901 - DNA, 25 bp, Homo sapien
tgattaagaatcactgagaactcca

SEQ ID NO: 1378902 - DNA, 25 bp, Homo sapien
tattaatgttgatactccagtccag

SEQ ID NO: 1378903 - DNA, 25 bp, Homo sapien
gaattaagcaaactcatcaggaagc

SEQ ID NO: 1378904 - DNA, 25 bp, Homo sapien
caatgcctgcccctatctaaaagga

SEQ ID NO: 1378905 - DNA, 25 bp, Homo sapien
tggatcccctctagaattaagctgg

SEQ ID NO: 1378906 - DNA, 25 bp, Homo sapien
gctctaagcaaaagtgtacaaaacc

SEQ ID NO: 1378907 - DNA, 25 bp, Homo sapien
agactaagtttgtttgccctaagct

SEQ ID NO: 1378908 - DNA, 25 bp, Homo sapien
gttaccaactcatagaaggatcaaa

SEQ ID NO: 1378909 - DNA, 25 bp, Homo sapien
tgtgatatgcaaaagaagctctaag

SEQ ID NO: 1378910 - DNA, 25 bp, Homo sapien
tttgttggccatcccaacgatgcca

SEQ ID NO: 1378911 - DNA, 25 bp, Homo sapien
tctgcaggcaatcccctttgttggc

SEQ ID NO: 1378912 - DNA, 25 bp, Homo sapien
ggcccaggacacacaattggaactt

SEQ ID NO: 1378913 - DNA, 25 bp, Homo sapien
ggaacttgacgctctcccctttctg

SEQ ID NO: 1378914 - DNA, 25 bp, Homo sapien
tcctctgctgatgaccctaggaagt

SEQ ID NO: 1378915 - DNA, 25 bp, Homo sapien
tgagaatgtcacagctcccatcagt

SEQ ID NO: 1378916 - DNA, 25 bp, Homo sapien
cagtactttattagctgatgaacaa

SEQ ID NO: 1378917 - DNA, 25 bp, Homo sapien
gtttatataactgctaaaaatgtgt

SEQ ID NO: 1378918 - DNA, 25 bp, Homo sapien
caaaaaactttgaggagataatcca

SEQ ID NO: 1378919 - DNA, 25 bp, Homo sapien
caagtcatgggaagagtgattagag

SEQ ID NO: 1378920 - DNA, 25 bp, Homo sapien
caaagagatcaagtcatgggaagag

SEQ ID NO: 1378921 - DNA, 25 bp, Homo sapien
ctctcgaccccagctgacttttaat

SEQ ID NO: 1378922 - DNA, 25 bp, Homo sapien
ggttggaatactcaagccctctcat

SEQ ID NO: 1378923 - DNA, 25 bp, Homo sapien
tggaatactcaagccctctcatcta

SEQ ID NO: 1378924 - DNA, 25 bp, Homo sapien
tttggttggaatactcaagccctct

SEQ ID NO: 1378925 - DNA, 25 bp, Homo sapien
catctttggttggaatactcaagcc

SEQ ID NO: 1378926 - DNA, 25 bp, Homo sapien
taggtgctcatctgaagttatggca

SEQ ID NO: 1378927 - DNA, 25 bp, Homo sapien
gcaagcatgagagaggtcacttttc

SEQ ID NO: 1378928 - DNA, 25 bp, Homo sapien
ggcaaatttcaaacagcctgatagt

SEQ ID NO: 1378929 - DNA, 25 bp, Homo sapien
caaacagcctgatagtgatgatcct

SEQ ID NO: 1378930 - DNA, 25 bp, Homo sapien
tactcagtctgtgttggatcaacac

SEQ ID NO: 1378931 - DNA, 25 bp, Homo sapien
taaatggtgggatcagcttcctcag

SEQ ID NO: 1378932 - DNA, 25 bp, Homo sapien
tccacaatctcaatcattccttggt

SEQ ID NO: 1378933 - DNA, 25 bp, Homo sapien
gggcgaattactttgccagagtaaa

SEQ ID NO: 1378934 - DNA, 25 bp, Homo sapien
aaaggcaggtacatctttcaatttt

SEQ ID NO: 1378935 - DNA, 25 bp, Homo sapien
caaaggcaggtacatctttcaattt

SEQ ID NO: 1378936 - DNA, 25 bp, Homo sapien
agtctgccccatattttccaccaaa

SEQ ID NO: 1378937 - DNA, 25 bp, Homo sapien
cacttaagagttcagatgagagcca

SEQ ID NO: 1378938 - DNA, 25 bp, Homo sapien
gcctttcctggtctctaaaatgtaa

SEQ ID NO: 1378939 - DNA, 25 bp, Homo sapien
cagtattttactcctctagtctgcc

SEQ ID NO: 1378940 - DNA, 25 bp, Homo sapien
cctttgcctttggacaagctatact

SEQ ID NO: 1378941 - DNA, 25 bp, Homo sapien
gacaagctatactcgaccatgtccc

SEQ ID NO: 1378942 - DNA, 25 bp, Homo sapien
cactttttctgcactgactttgttg

SEQ ID NO: 1378943 - DNA, 25 bp, Homo sapien
agttccaggctatcaacatcaccag

SEQ ID NO: 1378944 - DNA, 25 bp, Homo sapien
tcttggagttagaattacgacctaa

SEQ ID NO: 1378945 - DNA, 25 bp, Homo sapien
gagttgccacataacccaagagcct

SEQ ID NO: 1378946 - DNA, 25 bp, Homo sapien
aaattatccttcagagttgccacat

SEQ ID NO: 1378947 - DNA, 25 bp, Homo sapien
taaaagtcgcacacaagttgcaacc

SEQ ID NO: 1378948 - DNA, 25 bp, Homo sapien
tttgaggagaagtagatccttccac

SEQ ID NO: 1378949 - DNA, 25 bp, Homo sapien
atccttggcttgaaaagcaatagtc

SEQ ID NO: 1378950 - DNA, 25 bp, Homo sapien
catcataagcaataatgccatcctc

SEQ ID NO: 1378951 - DNA, 25 bp, Homo sapien
cataagcaataatgccatcctcagc

SEQ ID NO: 1378952 - DNA, 25 bp, Homo sapien
aagcaatagtcagtttcaccccaca

SEQ ID NO: 1378953 - DNA, 25 bp, Homo sapien
taccaaggttacaaaacccagcgca

SEQ ID NO: 1378954 - DNA, 25 bp, Homo sapien
gaatcacaccgttaagtaatgacag

SEQ ID NO: 1378955 - DNA, 25 bp, Homo sapien
gataatgcccatgtccctactctag

SEQ ID NO: 1378956 - DNA, 25 bp, Homo sapien
cagtgcagcagagacagattcatta

SEQ ID NO: 1378957 - DNA, 25 bp, Homo sapien
gtgcccagaaaacggtgatctgaat

SEQ ID NO: 1378958 - DNA, 25 bp, Homo sapien
ggcttctttttctaccgtgcccaga

SEQ ID NO: 1378959 - DNA, 25 bp, Homo sapien
aatgaaatgaaaccgtgcccttggg

SEQ ID NO: 1378960 - DNA, 25 bp, Homo sapien
aacggtgatctgaatgggaatgaaa

SEQ ID NO: 1378961 - DNA, 25 bp, Homo sapien
cgaacatcacgatccacacacttga

SEQ ID NO: 1378962 - DNA, 25 bp, Homo sapien
ggaaccacagtaaactctacttcat

SEQ ID NO: 1378963 - DNA, 25 bp, Homo sapien
ttcactgaagtggaagaacatacga

SEQ ID NO: 1378964 - DNA, 25 bp, Homo sapien
tcatctgcaatatggagctggttcc

SEQ ID NO: 1378965 - DNA, 25 bp, Homo sapien
catttctcgggcttcattagtgaac

SEQ ID NO: 1378966 - DNA, 25 bp, Homo sapien
taatttgtcacgtcggtctgttgaa

SEQ ID NO: 1378967 - DNA, 25 bp, Homo sapien
ggatttcgtatctttgtctccaaag

SEQ ID NO: 1378968 - DNA, 25 bp, Homo sapien
cttctatattggttgctcgctctaa

SEQ ID NO: 1378969 - DNA, 25 bp, Homo sapien
tgttgaaatattaaacctaacatgg

SEQ ID NO: 1378970 - DNA, 25 bp, Homo sapien
tcttcaaaaatgactgttccttgag

SEQ ID NO: 1378971 - DNA, 25 bp, Homo sapien
gaggcaatagtctgacatctgttgc

SEQ ID NO: 1378972 - DNA, 25 bp, Homo sapien
ttccttgaggcaatagtctgacatc

SEQ ID NO: 1378973 - DNA, 25 bp, Homo sapien
gataactttggttacagttccttca

SEQ ID NO: 1378974 - DNA, 25 bp, Homo sapien
caggctgtaaggtttctaagtcacc

SEQ ID NO: 1378975 - DNA, 25 bp, Homo sapien
tatctcttttacaacatcacctctt

SEQ ID NO: 1378976 - DNA, 25 bp, Homo sapien
atttctgtccttgattgtgaattcc

SEQ ID NO: 1378977 - DNA, 25 bp, Homo sapien
atcatcgccaggctgtaaggtttct

SEQ ID NO: 1378978 - DNA, 25 bp, Homo sapien
ggcacaaactactccctgacagcgg

SEQ ID NO: 1378979 - DNA, 25 bp, Homo sapien
gcacaaactactccctgacagcggg

SEQ ID NO: 1378980 - DNA, 25 bp, Homo sapien
tttcaacagcataatgttgcgagca

SEQ ID NO: 1378981 - DNA, 25 bp, Homo sapien
gttgcgagcacttacagcaccagta

SEQ ID NO: 1378982 - DNA, 25 bp, Homo sapien
tccagtttccagctgaacgttccct

SEQ ID NO: 1378983 - DNA, 25 bp, Homo sapien
tcttcaggggtgtaagtcagataaa

SEQ ID NO: 1378984 - DNA, 25 bp, Homo sapien
gaacgttcccttcgacatcttcagg

SEQ ID NO: 1378985 - DNA, 25 bp, Homo sapien
cagctgaacgttcccttcgacatct

SEQ ID NO: 1378986 - DNA, 25 bp, Homo sapien
gaattttaaagtacgcttatagatc

SEQ ID NO: 1378987 - DNA, 25 bp, Homo sapien
aacaattgcagcttacgttttctat

SEQ ID NO: 1378988 - DNA, 25 bp, Homo sapien
cgcttatagatcacatggtggatca

SEQ ID NO: 1378989 - DNA, 25 bp, Homo sapien
tggatcaggcaaaggtttaagaaaa

SEQ ID NO: 1378990 - DNA, 25 bp, Homo sapien
gggcagctggagatttactctctaa

SEQ ID NO: 1378991 - DNA, 25 bp, Homo sapien
tgttggactctgacccggggcagct

SEQ ID NO: 1378992 - DNA, 25 bp, Homo sapien
taagttgtgaggaacagcgcacaca

SEQ ID NO: 1378993 - DNA, 25 bp, Homo sapien
cgtagcatacactccctgttggact

SEQ ID NO: 1378994 - DNA, 25 bp, Homo sapien
cctctatactatatacagggatgca

SEQ ID NO: 1378995 - DNA, 25 bp, Homo sapien
gactgtaagcattgactcagggtta

SEQ ID NO: 1378996 - DNA, 25 bp, Homo sapien
ttcaggtcaagaaatgccagtgctt

SEQ ID NO: 1378997 - DNA, 25 bp, Homo sapien
tccacaagaggatgtcatgctgcca

SEQ ID NO: 1378998 - DNA, 25 bp, Homo sapien
aaaacacaaagcatcaaagtcacta

SEQ ID NO: 1378999 - DNA, 25 bp, Homo sapien
tgcaaatgcagggccctaaaaaaac

SEQ ID NO: 1379000 - DNA, 25 bp, Homo sapien
tatagctctctttcgtgcaaactga

SEQ ID NO: 1379001 - DNA, 25 bp, Homo sapien
ccttttctaatgtgaaagatatgca

SEQ ID NO: 1379002 - DNA, 25 bp, Homo sapien
cattcgttcttcagggaggatttct

SEQ ID NO: 1379003 - DNA, 25 bp, Homo sapien
gtttcccagtccgtcggtccgatga

SEQ ID NO: 1379004 - DNA, 25 bp, Homo sapien
ttgtccattcattcgttcttcaggg

SEQ ID NO: 1379005 - DNA, 25 bp, Homo sapien
tcttcaccagtttaacagcaatggg

SEQ ID NO: 1379006 - DNA, 25 bp, Homo sapien
caggcacatgtcacgttcctcagct

SEQ ID NO: 1379007 - DNA, 25 bp, Homo sapien
cacatgtcacgttcctcagctaatt

SEQ ID NO: 1379008 - DNA, 25 bp, Homo sapien
gcacatgtcacgttcctcagctaat

SEQ ID NO: 1379009 - DNA, 25 bp, Homo sapien
acaggcacatgtcacgttcctcagc

SEQ ID NO: 1379010 - DNA, 25 bp, Homo sapien
ctcctacttttaagtcttgcaggtt

SEQ ID NO: 1379011 - DNA, 25 bp, Homo sapien
cttttaagtcttgcaggttgccatt

SEQ ID NO: 1379012 - DNA, 25 bp, Homo sapien
tacttttaagtcttgcaggttgcca

SEQ ID NO: 1379013 - DNA, 25 bp, Homo sapien
ttaagtcttgcaggttgccattata

SEQ ID NO: 1379014 - DNA, 25 bp, Homo sapien
tcaataaccccagtttcacgcagtg

SEQ ID NO: 1379015 - DNA, 25 bp, Homo sapien
tggagaaggtttggatcaaagctca

SEQ ID NO: 1379016 - DNA, 25 bp, Homo sapien
ccattatgtccattgttgtggagaa

SEQ ID NO: 1379017 - DNA, 25 bp, Homo sapien
gaaaagtctagcttgacgttctgaa

SEQ ID NO: 1379018 - DNA, 25 bp, Homo sapien
tatactttgggcagtaagaccctaa

SEQ ID NO: 1379019 - DNA, 25 bp, Homo sapien
cacacctgtaggtggttacgtccta

SEQ ID NO: 1379020 - DNA, 25 bp, Homo sapien
tggtcaaatcacgtaaatcaaagcc

SEQ ID NO: 1379021 - DNA, 25 bp, Homo sapien
taaaatcagactcagtaggtatggg

SEQ ID NO: 1379022 - DNA, 25 bp, Homo sapien
gtagaagatgaagataagggtaaag

SEQ ID NO: 1379023 - DNA, 25 bp, Homo sapien
ggatgaggatctgatgacacagtaa

SEQ ID NO: 1379024 - DNA, 25 bp, Homo sapien
gatctctgataagttggggtcctct

SEQ ID NO: 1379025 - DNA, 25 bp, Homo sapien
tgaggatctgatgacacagtaaaaa

SEQ ID NO: 1379026 - DNA, 25 bp, Homo sapien
tagtacagacggagcttctctaaga

SEQ ID NO: 1379027 - DNA, 25 bp, Homo sapien
cagacgtcagtagcaaatatcacca

SEQ ID NO: 1379028 - DNA, 25 bp, Homo sapien
gaccagcaagtcgagagatcagcat

SEQ ID NO: 1379029 - DNA, 25 bp, Homo sapien
gaccctcatagaaagactgcaatgc

SEQ ID NO: 1379030 - DNA, 25 bp, Homo sapien
tcttctttttcagcacacgtttcaa

SEQ ID NO: 1379031 - DNA, 25 bp, Homo sapien
tttcagcacacgtttcaaaggatga

SEQ ID NO: 1379032 - DNA, 25 bp, Homo sapien
tttttcagcacacgtttcaaaggat

SEQ ID NO: 1379033 - DNA, 25 bp, Homo sapien
tctttttcagcacacgtttcaaagg

SEQ ID NO: 1379034 - DNA, 25 bp, Homo sapien
aacaaagactactagcagcgttggg

SEQ ID NO: 1379035 - DNA, 25 bp, Homo sapien
taccgggcaatctcacagtacagca

SEQ ID NO: 1379036 - DNA, 25 bp, Homo sapien
aatacaactgctgctgtaccgggca

SEQ ID NO: 1379037 - DNA, 25 bp, Homo sapien
cagcgttgggaagtgctctttcaaa

SEQ ID NO: 1379038 - DNA, 25 bp, Homo sapien
tcaggtggtaaagtctgttctgtta

SEQ ID NO: 1379039 - DNA, 25 bp, Homo sapien
caggtggtaaagtctgttctgttac

SEQ ID NO: 1379040 - DNA, 25 bp, Homo sapien
ggtggtaaagtctgttctgttacac

SEQ ID NO: 1379041 - DNA, 25 bp, Homo sapien
aggtggtaaagtctgttctgttaca

SEQ ID NO: 1379042 - DNA, 25 bp, Homo sapien
taaataatcatctcgatggtaaaca

SEQ ID NO: 1379043 - DNA, 25 bp, Homo sapien
cagctgcaaaaccaaactattacct

SEQ ID NO: 1379044 - DNA, 25 bp, Homo sapien
tctcgatggtaaacatccagaacag

SEQ ID NO: 1379045 - DNA, 25 bp, Homo sapien
gctgcaaaaccaaactattaccttc

SEQ ID NO: 1379046 - DNA, 25 bp, Homo sapien
gtgagttaagcaagacggccgccat

SEQ ID NO: 1379047 - DNA, 25 bp, Homo sapien
agcctgtttcagggagcgttctctg

SEQ ID NO: 1379048 - DNA, 25 bp, Homo sapien
ctctgcttcacctgtgagttaagca

SEQ ID NO: 1379049 - DNA, 25 bp, Homo sapien
cagatattctttgcagattcaagcc

SEQ ID NO: 1379050 - DNA, 25 bp, Homo sapien
tcaactcctcgtttcagctctgcga

SEQ ID NO: 1379051 - DNA, 25 bp, Homo sapien
gagcctccattttcgctccctcccc

SEQ ID NO: 1379052 - DNA, 25 bp, Homo sapien
tgtcggagcctccattttcgctccc

SEQ ID NO: 1379053 - DNA, 25 bp, Homo sapien
cagccggctggcctcaactcctcgt

SEQ ID NO: 1379054 - DNA, 25 bp, Homo sapien
gacgtatgaaaaagcccagggcagg

SEQ ID NO: 1379055 - DNA, 25 bp, Homo sapien
cgggagacgtatgaaaaagcccagg

SEQ ID NO: 1379056 - DNA, 25 bp, Homo sapien
cagttgaacgggagacgtatgaaaa

SEQ ID NO: 1379057 - DNA, 25 bp, Homo sapien
cccaggcagttgaacgggagacgta

SEQ ID NO: 1379058 - DNA, 25 bp, Homo sapien
tcagcccttcccctgggtttctgct

SEQ ID NO: 1379059 - DNA, 25 bp, Homo sapien
cagcccttcccctgggtttctgcta

SEQ ID NO: 1379060 - DNA, 25 bp, Homo sapien
cagttggaccctgaggtcgtactca

SEQ ID NO: 1379061 - DNA, 25 bp, Homo sapien
ccagttggaccctgaggtcgtactc

SEQ ID NO: 1379062 - DNA, 25 bp, Homo sapien
cccagttggaccctgaggtcgtact

SEQ ID NO: 1379063 - DNA, 25 bp, Homo sapien
agttggaccctgaggtcgtactcac

SEQ ID NO: 1379064 - DNA, 25 bp, Homo sapien
gaataaatctcgcttctctcgcgag

SEQ ID NO: 1379065 - DNA, 25 bp, Homo sapien
ctctcaacacgcttgcgcagcaggg

SEQ ID NO: 1379066 - DNA, 25 bp, Homo sapien
gcggagtgaagcgtactctcaacac

SEQ ID NO: 1379067 - DNA, 25 bp, Homo sapien
cagcacggcccggtacgtaggaata

SEQ ID NO: 1379068 - DNA, 25 bp, Homo sapien
tgcgggaagcaatctcggtgtttac

SEQ ID NO: 1379069 - DNA, 25 bp, Homo sapien
gctttaggcgtctctagtcttcgag

SEQ ID NO: 1379070 - DNA, 25 bp, Homo sapien
aaaatccggaaggacctcacactcg

SEQ ID NO: 1379071 - DNA, 25 bp, Homo sapien
tacattccttcttgggtgtgctgcg

SEQ ID NO: 1379072 - DNA, 25 bp, Homo sapien
caagaattagaggttacaggccagg

SEQ ID NO: 1379073 - DNA, 25 bp, Homo sapien
tatctgcatggctgttcctaaaact

SEQ ID NO: 1379074 - DNA, 25 bp, Homo sapien
gagttcttggttttaggcaattcag

SEQ ID NO: 1379075 - DNA, 25 bp, Homo sapien
tagaggttatcgctaactaaatcac

SEQ ID NO: 1379076 - DNA, 25 bp, Homo sapien
gaatgcagtagtgttgttaatcacc

SEQ ID NO: 1379077 - DNA, 25 bp, Homo sapien
tgaatgcagtagtgttgttaatcac

SEQ ID NO: 1379078 - DNA, 25 bp, Homo sapien
tgcagtagtgttgttaatcaccatc

SEQ ID NO: 1379079 - DNA, 25 bp, Homo sapien
aatgcagtagtgttgttaatcacca

SEQ ID NO: 1379080 - DNA, 25 bp, Homo sapien
caggagttaggatactgggcagcca

SEQ ID NO: 1379081 - DNA, 25 bp, Homo sapien
taaggtatacttcgaggcagatggc

SEQ ID NO: 1379082 - DNA, 25 bp, Homo sapien
tatgacaactatagcatcactgggc

SEQ ID NO: 1379083 - DNA, 25 bp, Homo sapien
gaaatgctctgcctcattaggtgag

SEQ ID NO: 1379084 - DNA, 25 bp, Homo sapien
ggcaagacacttaatggacagtact

SEQ ID NO: 1379085 - DNA, 25 bp, Homo sapien
tctccagccatcattcagagttcag

SEQ ID NO: 1379086 - DNA, 25 bp, Homo sapien
gccacctgatacctttaattaagat

SEQ ID NO: 1379087 - DNA, 25 bp, Homo sapien
gacagtaacttccttccttgataga

SEQ ID NO: 1379088 - DNA, 25 bp, Homo sapien
cactgctgatggacaataattctcg

SEQ ID NO: 1379089 - DNA, 25 bp, Homo sapien
ttgatggcttgggaagcagtgtcca

SEQ ID NO: 1379090 - DNA, 25 bp, Homo sapien
ggacaataattctcgaagttcctta

SEQ ID NO: 1379091 - DNA, 25 bp, Homo sapien
gcagtgtccattgagttttcctttc

SEQ ID NO: 1379092 - DNA, 25 bp, Homo sapien
catttcacagattctgtcaatctga

SEQ ID NO: 1379093 - DNA, 25 bp, Homo sapien
aatcttacaaaactggtcatcatcc

SEQ ID NO: 1379094 - DNA, 25 bp, Homo sapien
ttcacagattctgtcaatctgactc

SEQ ID NO: 1379095 - DNA, 25 bp, Homo sapien
tcttacaaaactggtcatcatccac

SEQ ID NO: 1379096 - DNA, 25 bp, Homo sapien
taggtgggaattgaacaatgagaac

SEQ ID NO: 1379097 - DNA, 25 bp, Homo sapien
gagcaaactatcacaaagacagaaa

SEQ ID NO: 1379098 - DNA, 25 bp, Homo sapien
tctgagcaaactatcacaaagacag

SEQ ID NO: 1379099 - DNA, 25 bp, Homo sapien
accaaacaccgcatgttctcactca

SEQ ID NO: 1379100 - DNA, 25 bp, Homo sapien
tataaaaggtttactgactgcctgc

SEQ ID NO: 1379101 - DNA, 25 bp, Homo sapien
ccaaccaagtgtttaccaggcagct

SEQ ID NO: 1379102 - DNA, 25 bp, Homo sapien
ttcatgcgccttacaagcaaggagc

SEQ ID NO: 1379103 - DNA, 25 bp, Homo sapien
catctcacagaagtagtaggctcca

SEQ ID NO: 1379104 - DNA, 25 bp, Homo sapien
tgcagagtgagactggtgagctttc

SEQ ID NO: 1379105 - DNA, 25 bp, Homo sapien
ctttcaggactggttcagcatccac

SEQ ID NO: 1379106 - DNA, 25 bp, Homo sapien
cagcatccaccgcttttttagcaac

SEQ ID NO: 1379107 - DNA, 25 bp, Homo sapien
taacatctgtttccgatatttgctc

SEQ ID NO: 1379108 - DNA, 25 bp, Homo sapien
ctgttgcaagtctctaatctgtgtg

SEQ ID NO: 1379109 - DNA, 25 bp, Homo sapien
tgtgaggtttgtatttggacatgtc

SEQ ID NO: 1379110 - DNA, 25 bp, Homo sapien
tcatatcggatgcatcctcttgata

SEQ ID NO: 1379111 - DNA, 25 bp, Homo sapien
acatgtccttcatatcggatgcatc

SEQ ID NO: 1379112 - DNA, 25 bp, Homo sapien
gaataaattccaggccgagttccca

SEQ ID NO: 1379113 - DNA, 25 bp, Homo sapien
gagaacagcggcagatgcaactgaa

SEQ ID NO: 1379114 - DNA, 25 bp, Homo sapien
cagccccgacccaggaaaatggtct

SEQ ID NO: 1379115 - DNA, 25 bp, Homo sapien
ctgaagaggcagaagttagggctcc

SEQ ID NO: 1379116 - DNA, 25 bp, Homo sapien
agtgcccagaatccgagagcactgg

SEQ ID NO: 1379117 - DNA, 25 bp, Homo sapien
tgcccagaatccgagagcactggac

SEQ ID NO: 1379118 - DNA, 25 bp, Homo sapien
tcagtgcccagaatccgagagcact

SEQ ID NO: 1379119 - DNA, 25 bp, Homo sapien
cttcagtgcccagaatccgagagca

SEQ ID NO: 1379120 - DNA, 25 bp, Homo sapien
ggatcttctcgatggtgcagctcat

SEQ ID NO: 1379121 - DNA, 25 bp, Homo sapien
agcgactcggcggccgcatcgtgct

SEQ ID NO: 1379122 - DNA, 25 bp, Homo sapien
gcatagctgctacccgccggtgcag

SEQ ID NO: 1379123 - DNA, 25 bp, Homo sapien
cagcagcgtcttggcgtctgtcagg

SEQ ID NO: 1379124 - DNA, 25 bp, Homo sapien
tcagctacgcgactcgctcagatct

SEQ ID NO: 1379125 - DNA, 25 bp, Homo sapien
tgccgggctcagctacgcgactcgc

SEQ ID NO: 1379126 - DNA, 25 bp, Homo sapien
gctcagctacgcgactcgctcagat

SEQ ID NO: 1379127 - DNA, 25 bp, Homo sapien
acgcgactcgctcagatcttctggg

SEQ ID NO: 1379128 - DNA, 25 bp, Homo sapien
tgccaagagaaatgctgtaggtctc

SEQ ID NO: 1379129 - DNA, 25 bp, Homo sapien
aaatcgggtgagagtcatatgacac

SEQ ID NO: 1379130 - DNA, 25 bp, Homo sapien
gattctagaagagctatgccaagag

SEQ ID NO: 1379131 - DNA, 25 bp, Homo sapien
ttaatagacataaacaagcagccga

SEQ ID NO: 1379132 - DNA, 25 bp, Homo sapien
ttttctacatgctaaccagtactta

SEQ ID NO: 1379133 - DNA, 25 bp, Homo sapien
cccaccaggagtgcgtgagatttat

SEQ ID NO: 1379134 - DNA, 25 bp, Homo sapien
cttgtttctactgcattgaaccatt

SEQ ID NO: 1379135 - DNA, 25 bp, Homo sapien
ttttatagtcatgctagtgggtgtg

SEQ ID NO: 1379136 - DNA, 25 bp, Homo sapien
ttgaacaattaagtattcctggatc

SEQ ID NO: 1379137 - DNA, 25 bp, Homo sapien
ggatccttctatagccaattttgaa

SEQ ID NO: 1379138 - DNA, 25 bp, Homo sapien
taccaatcttggtggcagaattttg

SEQ ID NO: 1379139 - DNA, 25 bp, Homo sapien
ttagcattgctttggatactgtaag

SEQ ID NO: 1379140 - DNA, 25 bp, Homo sapien
gtataaggcagtaggaatgttggca

SEQ ID NO: 1379141 - DNA, 25 bp, Homo sapien
catgtacatgcgtagaaaatgtcaa

SEQ ID NO: 1379142 - DNA, 25 bp, Homo sapien
tcaagagtgcagactgaaaaagtat

SEQ ID NO: 1379143 - DNA, 25 bp, Homo sapien
aatgttggcagaatgtaagtgccat

SEQ ID NO: 1379144 - DNA, 25 bp, Homo sapien
agcatcggaaaagcctggcgtcagg

SEQ ID NO: 1379145 - DNA, 25 bp, Homo sapien
ggcccttctgaagcatcggaaaagc

SEQ ID NO: 1379146 - DNA, 25 bp, Homo sapien
aaagcctggcgtcaggaaaggcaat

SEQ ID NO: 1379147 - DNA, 25 bp, Homo sapien
agaggcccttctgaagcatcggaaa

SEQ ID NO: 1379148 - DNA, 25 bp, Homo sapien
aaccgggttcttgtcgcaggatcag

SEQ ID NO: 1379149 - DNA, 25 bp, Homo sapien
ccgggttcttgtcgcaggatcagga

SEQ ID NO: 1379150 - DNA, 25 bp, Homo sapien
tgcagacactttaaagggtgagtag

SEQ ID NO: 1379151 - DNA, 25 bp, Homo sapien
gggttcttgtcgcaggatcaggaaa

SEQ ID NO: 1379152 - DNA, 25 bp, Homo sapien
cagtgtgcacagatatgcagaggca

SEQ ID NO: 1379153 - DNA, 25 bp, Homo sapien
gatgaagttcagaccgagatgtaca

SEQ ID NO: 1379154 - DNA, 25 bp, Homo sapien
taacccgagttaaggcatgaatgca

SEQ ID NO: 1379155 - DNA, 25 bp, Homo sapien
caaaaggcatgctagcgcttggctc

SEQ ID NO: 1379156 - DNA, 25 bp, Homo sapien
tactatgatgtgattcatcttcagg

SEQ ID NO: 1379157 - DNA, 25 bp, Homo sapien
tctcagccgtggctaccagcacctt

SEQ ID NO: 1379158 - DNA, 25 bp, Homo sapien
agtggagctatcaggctttaggctg

SEQ ID NO: 1379159 - DNA, 25 bp, Homo sapien
ggagtgtctgtgaagagtactatga

SEQ ID NO: 1379160 - DNA, 25 bp, Homo sapien
ttttggccttacatgtgggcaagcg

SEQ ID NO: 1379161 - DNA, 25 bp, Homo sapien
gagagagtgtgcttattgcctaacc

SEQ ID NO: 1379162 - DNA, 25 bp, Homo sapien
tacaatgcacatcgaaaggagagag

SEQ ID NO: 1379163 - DNA, 25 bp, Homo sapien
tgagttagccccttaacaccagttg

SEQ ID NO: 1379164 - DNA, 25 bp, Homo sapien
gaatctactcagcacaatggatacg

SEQ ID NO: 1379165 - DNA, 25 bp, Homo sapien
tgtagaaataccaggatgcccactc

SEQ ID NO: 1379166 - DNA, 25 bp, Homo sapien
tagtgactgcatacatgaagccatc

SEQ ID NO: 1379167 - DNA, 25 bp, Homo sapien
tctttccccaggatatcaatggcaa

SEQ ID NO: 1379168 - DNA, 25 bp, Homo sapien
aacaccgctcacagggtaaggagaa

SEQ ID NO: 1379169 - DNA, 25 bp, Homo sapien
gctttgaaggcccatgagtgttctc

SEQ ID NO: 1379170 - DNA, 25 bp, Homo sapien
ggatgagcccgaactaagataatgc

SEQ ID NO: 1379171 - DNA, 25 bp, Homo sapien
tggttcccctatccccaggagataa

SEQ ID NO: 1379172 - DNA, 25 bp, Homo sapien
tgtatctgtggatttaaccgactac

SEQ ID NO: 1379173 - DNA, 25 bp, Homo sapien
agtatacaggaggagctaggaagtg

SEQ ID NO: 1379174 - DNA, 25 bp, Homo sapien
gtggatttaaccgactacagattaa

SEQ ID NO: 1379175 - DNA, 25 bp, Homo sapien
gctggaatagaaccctgcagtgata

SEQ ID NO: 1379176 - DNA, 25 bp, Homo sapien
tggcagtagtgtttacctatcatta

SEQ ID NO: 1379177 - DNA, 25 bp, Homo sapien
aaagcgagagagagataaacaacat

SEQ ID NO: 1379178 - DNA, 25 bp, Homo sapien
tgtaaacatggaccaaattctccaa

SEQ ID NO: 1379179 - DNA, 25 bp, Homo sapien
tattaccagggaagataaccacaga

SEQ ID NO: 1379180 - DNA, 25 bp, Homo sapien
tgtgggagctataaaaattgatctc

SEQ ID NO: 1379181 - DNA, 25 bp, Homo sapien
cagcaacatcatagaattggaggat

SEQ ID NO: 1379182 - DNA, 25 bp, Homo sapien
atgaagagggattgattactgggta

SEQ ID NO: 1379183 - DNA, 25 bp, Homo sapien
tctcatggaggtagtaaatacaatg

SEQ ID NO: 1379184 - DNA, 25 bp, Homo sapien
tagggtgttgcttttaagtcaacta

SEQ ID NO: 1379185 - DNA, 25 bp, Homo sapien
gataagttgcgtgaaggtttgtaga

SEQ ID NO: 1379186 - DNA, 25 bp, Homo sapien
taggactttaagataaatcaaacaa

SEQ ID NO: 1379187 - DNA, 25 bp, Homo sapien
tagcaaattatagaagggttaccac

SEQ ID NO: 1379188 - DNA, 25 bp, Homo sapien
caacattaagaagtcttaattcagt

SEQ ID NO: 1379189 - DNA, 25 bp, Homo sapien
ttcaacattaagaagtcttaattca

SEQ ID NO: 1379190 - DNA, 25 bp, Homo sapien
aacattaagaagtcttaattcagtg

SEQ ID NO: 1379191 - DNA, 25 bp, Homo sapien
tcaacattaagaagtcttaattcag

SEQ ID NO: 1379192 - DNA, 25 bp, Homo sapien
ggcacattaatcgtacatggaacag

SEQ ID NO: 1379193 - DNA, 25 bp, Homo sapien
gaacccgagtatgcacttgggcctg

SEQ ID NO: 1379194 - DNA, 25 bp, Homo sapien
taaactcacttttgtggaatcagag

SEQ ID NO: 1379195 - DNA, 25 bp, Homo sapien
gattctgagttggaaagaacccgag

SEQ ID NO: 1379196 - DNA, 25 bp, Homo sapien
gcagtagtttacagcagggtcagaa

SEQ ID NO: 1379197 - DNA, 25 bp, Homo sapien
cagaagagtttgacataaaagtccc

SEQ ID NO: 1379198 - DNA, 25 bp, Homo sapien
cacacaactaggagaagatgctttt

SEQ ID NO: 1379199 - DNA, 25 bp, Homo sapien
tccagaaacacgcagatcacacatg

SEQ ID NO: 1379200 - DNA, 25 bp, Homo sapien
tcatatcacatctcgtgagtttcgt

SEQ ID NO: 1379201 - DNA, 25 bp, Homo sapien
gaggaccatgctgaatatcatgcca

SEQ ID NO: 1379202 - DNA, 25 bp, Homo sapien
ccatgctgaatatcatgccaaagat

SEQ ID NO: 1379203 - DNA, 25 bp, Homo sapien
tcgtatcgcacagcagaggaccatg

SEQ ID NO: 1379204 - DNA, 25 bp, Homo sapien
ttcagaattatagaaccgttctgaa

SEQ ID NO: 1379205 - DNA, 25 bp, Homo sapien
tcagaattatagaaccgttctgaat

SEQ ID NO: 1379206 - DNA, 25 bp, Homo sapien
cagaattatagaaccgttctgaata

SEQ ID NO: 1379207 - DNA, 25 bp, Homo sapien
agaattatagaaccgttctgaatac

SEQ ID NO: 1379208 - DNA, 25 bp, Homo sapien
ctctgagaagttaaatacttgagtg

SEQ ID NO: 1379209 - DNA, 25 bp, Homo sapien
tacttgagtgaaatcaatatccact

SEQ ID NO: 1379210 - DNA, 25 bp, Homo sapien
caattttgtagagcccatggaaccc

SEQ ID NO: 1379211 - DNA, 25 bp, Homo sapien
aaagagtcttcttgtccgctattat

SEQ ID NO: 1379212 - DNA, 25 bp, Homo sapien
tatggtctcaatttcatcgatgcaa

SEQ ID NO: 1379213 - DNA, 25 bp, Homo sapien
aataccgacaattccaatgagctgg

SEQ ID NO: 1379214 - DNA, 25 bp, Homo sapien
gagctggagcttaacactgattatg

SEQ ID NO: 1379215 - DNA, 25 bp, Homo sapien
cgtcagacctgcaattccaataccg

SEQ ID NO: 1379216 - DNA, 25 bp, Homo sapien
gacctgttcggagctttcttttcca

SEQ ID NO: 1379217 - DNA, 25 bp, Homo sapien
cctagaagctcctttgggcatgtag

SEQ ID NO: 1379218 - DNA, 25 bp, Homo sapien
tagaagctcctttgggcatgtaggt

SEQ ID NO: 1379219 - DNA, 25 bp, Homo sapien
catgtaggttggacctgttcggagc

SEQ ID NO: 1379220 - DNA, 25 bp, Homo sapien
agccttctgtgattaactgcatgta

SEQ ID NO: 1379221 - DNA, 25 bp, Homo sapien
ctgagcactccacggacagcacagt

SEQ ID NO: 1379222 - DNA, 25 bp, Homo sapien
tcttcatatcacagtgtctaaaaaa

SEQ ID NO: 1379223 - DNA, 25 bp, Homo sapien
taactgcatgtagctctgagcactc

SEQ ID NO: 1379224 - DNA, 25 bp, Homo sapien
acatggtctgaacatgtcggatagc

SEQ ID NO: 1379225 - DNA, 25 bp, Homo sapien
taaggtaatcattgtaagcctcttc

SEQ ID NO: 1379226 - DNA, 25 bp, Homo sapien
gtaagcctcttcatacatggtctga

SEQ ID NO: 1379227 - DNA, 25 bp, Homo sapien
gtctttaaggtaatcattgtaagcc

SEQ ID NO: 1379228 - DNA, 25 bp, Homo sapien
tacttcagcagcaaatatcaccagg

SEQ ID NO: 1379229 - DNA, 25 bp, Homo sapien
ctccagtggttacttcagcagcaaa

SEQ ID NO: 1379230 - DNA, 25 bp, Homo sapien
ttgcctataaaagcaaatactccag

SEQ ID NO: 1379231 - DNA, 25 bp, Homo sapien
ccccttgcctataaaagcaaatact

SEQ ID NO: 1379232 - DNA, 25 bp, Homo sapien
tccaaatgtctctgttatcacggac

SEQ ID NO: 1379233 - DNA, 25 bp, Homo sapien
ccttggtgctgactattcagtggtg

SEQ ID NO: 1379234 - DNA, 25 bp, Homo sapien
tgatgtaaaaatcccaccacctaga

SEQ ID NO: 1379235 - DNA, 25 bp, Homo sapien
tatcacggaccttggattggacaga

SEQ ID NO: 1379236 - DNA, 25 bp, Homo sapien
tagtaaatacttgacgaacacaaaa

SEQ ID NO: 1379237 - DNA, 25 bp, Homo sapien
taaatacttgacgaacacaaaagac

SEQ ID NO: 1379238 - DNA, 25 bp, Homo sapien
gtaaatacttgacgaacacaaaaga

SEQ ID NO: 1379239 - DNA, 25 bp, Homo sapien
ttagtaaatacttgacgaacacaaa

SEQ ID NO: 1379240 - DNA, 25 bp, Homo sapien
gagcatcactgatgcggcctgggca

SEQ ID NO: 1379241 - DNA, 25 bp, Homo sapien
gctctgatcaaactaagttcagtga

SEQ ID NO: 1379242 - DNA, 25 bp, Homo sapien
ccttctggatggatttctgttctgg

SEQ ID NO: 1379243 - DNA, 25 bp, Homo sapien
ggatttctgttctggtctatggatt

SEQ ID NO: 1379244 - DNA, 25 bp, Homo sapien
agcacacattgcgactcccgcatgg

SEQ ID NO: 1379245 - DNA, 25 bp, Homo sapien
cccggctccaaccagaacatacagc

SEQ ID NO: 1379246 - DNA, 25 bp, Homo sapien
agggccccggctccaaccagaacat

SEQ ID NO: 1379247 - DNA, 25 bp, Homo sapien
gcatggctccgcagcacccgaagaa

SEQ ID NO: 1379248 - DNA, 25 bp, Homo sapien
aaatctagagtcttagtccacttag

SEQ ID NO: 1379249 - DNA, 25 bp, Homo sapien
tttgaaatctagagtcttagtccac

SEQ ID NO: 1379250 - DNA, 25 bp, Homo sapien
aaaacagccagtatatgggggtgcc

SEQ ID NO: 1379251 - DNA, 25 bp, Homo sapien
cagccagtatatgggggtgccacct

SEQ ID NO: 1379252 - DNA, 25 bp, Homo sapien
tccaaaagcaatgacggccgatcca

SEQ ID NO: 1379253 - DNA, 25 bp, Homo sapien
gggacttgtcctctgatgataactc

SEQ ID NO: 1379254 - DNA, 25 bp, Homo sapien
tgataactcctttatggcacctccg

SEQ ID NO: 1379255 - DNA, 25 bp, Homo sapien
gaaccgaaaccatagtccaaaagca

SEQ ID NO: 1379256 - DNA, 25 bp, Homo sapien
cgatgctgtgtttgttaaggagagt

SEQ ID NO: 1379257 - DNA, 25 bp, Homo sapien
tcgatgctgtgtttgttaaggagag

SEQ ID NO: 1379258 - DNA, 25 bp, Homo sapien
ctcgatgctgtgtttgttaaggaga

SEQ ID NO: 1379259 - DNA, 25 bp, Homo sapien
gctgtgagaactacgaactcactgt

SEQ ID NO: 1379260 - DNA, 25 bp, Homo sapien
ggtcagacatagcagggagccaaag

SEQ ID NO: 1379261 - DNA, 25 bp, Homo sapien
ctgaggaccagggacaggacaccag

SEQ ID NO: 1379262 - DNA, 25 bp, Homo sapien
agggaaaggcttgaatggctgagga

SEQ ID NO: 1379263 - DNA, 25 bp, Homo sapien
aaggctgtgttagtctggaaatgca

SEQ ID NO: 1379264 - DNA, 25 bp, Homo sapien
aggcaggactgtggcagcctgtggc

SEQ ID NO: 1379265 - DNA, 25 bp, Homo sapien
tcatcaggaccaggtgagtgggaac

SEQ ID NO: 1379266 - DNA, 25 bp, Homo sapien
tgtggcgatgagaaggctgtgttag

SEQ ID NO: 1379267 - DNA, 25 bp, Homo sapien
cctttaggtaccagtgtttctgatc

SEQ ID NO: 1379268 - DNA, 25 bp, Homo sapien
gctcctttaggtaccagtgtttctg

SEQ ID NO: 1379269 - DNA, 25 bp, Homo sapien
cagctcctttaggtaccagtgtttc

SEQ ID NO: 1379270 - DNA, 25 bp, Homo sapien
ggcagctcctttaggtaccagtgtt

SEQ ID NO: 1379271 - DNA, 25 bp, Homo sapien
taaatccccacgtgtacaaaggcca

SEQ ID NO: 1379272 - DNA, 25 bp, Homo sapien
aggccatgtgtctctttaaagttca

SEQ ID NO: 1379273 - DNA, 25 bp, Homo sapien
agaaacgcctctccctatagtatgc

SEQ ID NO: 1379274 - DNA, 25 bp, Homo sapien
ccactgctgaaggatactgaagagc

SEQ ID NO: 1379275 - DNA, 25 bp, Homo sapien
tccaggaaagagccacacggtgtct

SEQ ID NO: 1379276 - DNA, 25 bp, Homo sapien
ggaaagagccacacggtgtctctcc

SEQ ID NO: 1379277 - DNA, 25 bp, Homo sapien
caggaaagagccacacggtgtctct

SEQ ID NO: 1379278 - DNA, 25 bp, Homo sapien
gaaagagccacacggtgtctctccc

SEQ ID NO: 1379279 - DNA, 25 bp, Homo sapien
gcagcaggtacttgatgcaccgcag

SEQ ID NO: 1379280 - DNA, 25 bp, Homo sapien
ggttgaagccaagcagcaggtactt

SEQ ID NO: 1379281 - DNA, 25 bp, Homo sapien
gcaggttgaagccaagcagcaggta

SEQ ID NO: 1379282 - DNA, 25 bp, Homo sapien
aggtacttgatgcaccgcaggcccc

SEQ ID NO: 1379283 - DNA, 25 bp, Homo sapien
ctgcggcccggcggcgggatcccca

SEQ ID NO: 1379284 - DNA, 25 bp, Homo sapien
tgcggcccggcggcgggatccccag

SEQ ID NO: 1379285 - DNA, 25 bp, Homo sapien
gcggcgggatccccagtccccaggc

SEQ ID NO: 1379286 - DNA, 25 bp, Homo sapien
cggcggcgggatccccagtccccag

SEQ ID NO: 1379287 - DNA, 25 bp, Homo sapien
gcacttggtctcgtggctatggaaa

SEQ ID NO: 1379288 - DNA, 25 bp, Homo sapien
ttaatcagcgccctgtgcggagacc

SEQ ID NO: 1379289 - DNA, 25 bp, Homo sapien
ttgccccgaagctggcaggaccagt

SEQ ID NO: 1379290 - DNA, 25 bp, Homo sapien
tgacctcgggtagaagagctaagtg

SEQ ID NO: 1379291 - DNA, 25 bp, Homo sapien
tctgacccacaatgcctgtgagagt

SEQ ID NO: 1379292 - DNA, 25 bp, Homo sapien
gttgtgaatctgacccacaatgcct

SEQ ID NO: 1379293 - DNA, 25 bp, Homo sapien
cctgtgagagtggtgttttctctgg

SEQ ID NO: 1379294 - DNA, 25 bp, Homo sapien
gtgaatctgacccacaatgcctgtg

SEQ ID NO: 1379295 - DNA, 25 bp, Homo sapien
gctcctggtggtttgaagcttccct

SEQ ID NO: 1379296 - DNA, 25 bp, Homo sapien
gctgtggtcgtggattctgccatga

SEQ ID NO: 1379297 - DNA, 25 bp, Homo sapien
catcttgtcctgggttcttgctcct

SEQ ID NO: 1379298 - DNA, 25 bp, Homo sapien
cctggattttgagcacagtggcacc

SEQ ID NO: 1379299 - DNA, 25 bp, Homo sapien
gagaatttgatagtccttgactttt

SEQ ID NO: 1379300 - DNA, 25 bp, Homo sapien
tgcctggaccattacaatagttact

SEQ ID NO: 1379301 - DNA, 25 bp, Homo sapien
cctggaccattacaatagttactaa

SEQ ID NO: 1379302 - DNA, 25 bp, Homo sapien
ttttgcctggaccattacaatagtt

SEQ ID NO: 1379303 - DNA, 25 bp, Homo sapien
ttgcctggaccattacaatagttac

SEQ ID NO: 1379304 - DNA, 25 bp, Homo sapien
aaatgaccgttgtgagtgtgtggaa

SEQ ID NO: 1379305 - DNA, 25 bp, Homo sapien
tgatagaaatgaccgttgtgagtgt

SEQ ID NO: 1379306 - DNA, 25 bp, Homo sapien
ttctagcacagctaggtgatagaaa

SEQ ID NO: 1379307 - DNA, 25 bp, Homo sapien
taggtgatagaaatgaccgttgtga

SEQ ID NO: 1379308 - DNA, 25 bp, Homo sapien
cctgagagatgaacctgtgttccta

SEQ ID NO: 1379309 - DNA, 25 bp, Homo sapien
cacaatacgatttctgagcttcctc

SEQ ID NO: 1379310 - DNA, 25 bp, Homo sapien
tagccttcttctcacaatacgattt

SEQ ID NO: 1379311 - DNA, 25 bp, Homo sapien
tctggtctgcactagcatttgatgg

SEQ ID NO: 1379312 - DNA, 25 bp, Homo sapien
tgcggcaggtagatttttcccagac

SEQ ID NO: 1379313 - DNA, 25 bp, Homo sapien
tacattcctcagcaccaattgtctg

SEQ ID NO: 1379314 - DNA, 25 bp, Homo sapien
gacttggagcctggctcacaaacca

SEQ ID NO: 1379315 - DNA, 25 bp, Homo sapien
tgtctggattttttgcggcaggtag

SEQ ID NO: 1379316 - DNA, 25 bp, Homo sapien
aataaagggtcgctcgatgtccgca

SEQ ID NO: 1379317 - DNA, 25 bp, Homo sapien
ggacagaaaataaagggtcgctcga

SEQ ID NO: 1379318 - DNA, 25 bp, Homo sapien
tgtccgcagggtactgctgagcctg

SEQ ID NO: 1379319 - DNA, 25 bp, Homo sapien
gtcgctcgatgtccgcagggtactg

SEQ ID NO: 1379320 - DNA, 25 bp, Homo sapien
aaaccacagggaccttggtgctgtt

SEQ ID NO: 1379321 - DNA, 25 bp, Homo sapien
gtttgcctgctcaagggaccatatt

SEQ ID NO: 1379322 - DNA, 25 bp, Homo sapien
cttgtgaacgaggtaggtcccctcg

SEQ ID NO: 1379323 - DNA, 25 bp, Homo sapien
cagggaccttggtgctgtttgcctg

SEQ ID NO: 1379324 - DNA, 25 bp, Homo sapien
ttttgctgcatatcaaccccccaag

SEQ ID NO: 1379325 - DNA, 25 bp, Homo sapien
ccttagaatcctccgttggaacttg

SEQ ID NO: 1379326 - DNA, 25 bp, Homo sapien
acatcgttatcaccctttttgctgc

SEQ ID NO: 1379327 - DNA, 25 bp, Homo sapien
tcctccgttggaacttgcccacagt

SEQ ID NO: 1379328 - DNA, 25 bp, Homo sapien
cactggagtgctgcttggctcgtaa

SEQ ID NO: 1379329 - DNA, 25 bp, Homo sapien
gtgctgcttggctcgtaaccattct

SEQ ID NO: 1379330 - DNA, 25 bp, Homo sapien
tggctcgtaaccattctttctcttc

SEQ ID NO: 1379331 - DNA, 25 bp, Homo sapien
gcttggctcgtaaccattctttctc

SEQ ID NO: 1379332 - DNA, 25 bp, Homo sapien
actcaggctgaggagagattgtcct

SEQ ID NO: 1379333 - DNA, 25 bp, Homo sapien
caactgcaagtaatgacgcttttgt

SEQ ID NO: 1379334 - DNA, 25 bp, Homo sapien
cctgagtgggcctgccagattcttg

SEQ ID NO: 1379335 - DNA, 25 bp, Homo sapien
tcttggagagggtaggctgtcctgc

SEQ ID NO: 1379336 - DNA, 25 bp, Homo sapien
gagaggttgagtcaggctctgtctt

SEQ ID NO: 1379337 - DNA, 25 bp, Homo sapien
cattatggaaactcttgtgctggca

SEQ ID NO: 1379338 - DNA, 25 bp, Homo sapien
ccccttgctgttccttagaagttcg

SEQ ID NO: 1379339 - DNA, 25 bp, Homo sapien
cggaccacatctgaattgagtatcc

SEQ ID NO: 1379340 - DNA, 25 bp, Homo sapien
gaattgagtatccttgagccttggt

SEQ ID NO: 1379341 - DNA, 25 bp, Homo sapien
ttggtgtgaggtcccaacagctgcc

SEQ ID NO: 1379342 - DNA, 25 bp, Homo sapien
ccagtggcatggctcgtttgaaaag

SEQ ID NO: 1379343 - DNA, 25 bp, Homo sapien
tggccaagccacattccccactaag

SEQ ID NO: 1379344 - DNA, 25 bp, Homo sapien
agcattgggactgacgctgcaggat

SEQ ID NO: 1379345 - DNA, 25 bp, Homo sapien
taatccagaggcttgccagtggcat

SEQ ID NO: 1379346 - DNA, 25 bp, Homo sapien
ctttataatgaaggccaagctctcc

SEQ ID NO: 1379347 - DNA, 25 bp, Homo sapien
taaatctgcaaaattgattgatgcc

SEQ ID NO: 1379348 - DNA, 25 bp, Homo sapien
tgctccctttaccagagtgatcctt

SEQ ID NO: 1379349 - DNA, 25 bp, Homo sapien
tgtggcttcctgtcatctttataat

SEQ ID NO: 1379350 - DNA, 25 bp, Homo sapien
agcatgagggtctgctctcttggga

SEQ ID NO: 1379351 - DNA, 25 bp, Homo sapien
tccaatttgtgctaatgcccatccc

SEQ ID NO: 1379352 - DNA, 25 bp, Homo sapien
cagaacatctccaatttgtgctaat

SEQ ID NO: 1379353 - DNA, 25 bp, Homo sapien
cagcatgagggtctgctctcttggg

SEQ ID NO: 1379354 - DNA, 25 bp, Homo sapien
gcttgaggttattaccaaatttgaa

SEQ ID NO: 1379355 - DNA, 25 bp, Homo sapien
tcttgggcctatgaatgtggcctga

SEQ ID NO: 1379356 - DNA, 25 bp, Homo sapien
tgattctgagcaatactgagcgtga

SEQ ID NO: 1379357 - DNA, 25 bp, Homo sapien
tgaggtctgacgatgctgcacacca

SEQ ID NO: 1379358 - DNA, 25 bp, Homo sapien
cacagtgttcggaaggatagggctc

SEQ ID NO: 1379359 - DNA, 25 bp, Homo sapien
gatcagctctgttgacaaaatctca

SEQ ID NO: 1379360 - DNA, 25 bp, Homo sapien
tgagcactgcagattcccacagtgt

SEQ ID NO: 1379361 - DNA, 25 bp, Homo sapien
gataccaaagctacagcaatgccag

SEQ ID NO: 1379362 - DNA, 25 bp, Homo sapien
cataacagtgtactaccatggccat

SEQ ID NO: 1379363 - DNA, 25 bp, Homo sapien
ttcataacagtgtactaccatggcc

SEQ ID NO: 1379364 - DNA, 25 bp, Homo sapien
tcataacagtgtactaccatggcca

SEQ ID NO: 1379365 - DNA, 25 bp, Homo sapien
tctagcagaattagacaatttatcc

SEQ ID NO: 1379366 - DNA, 25 bp, Homo sapien
tgccaacttttgtttatcataaatt

SEQ ID NO: 1379367 - DNA, 25 bp, Homo sapien
ttagacaatttatcctttgtgaggg

SEQ ID NO: 1379368 - DNA, 25 bp, Homo sapien
gaagaagaaggcacatctagcagaa

SEQ ID NO: 1379369 - DNA, 25 bp, Homo sapien
tacagacatggcttccggaagcttg

SEQ ID NO: 1379370 - DNA, 25 bp, Homo sapien
acagacatggcttccggaagcttgt

SEQ ID NO: 1379371 - DNA, 25 bp, Homo sapien
gtacagacatggcttccggaagctt

SEQ ID NO: 1379372 - DNA, 25 bp, Homo sapien
gtgtcagggacaagacatttctagg

SEQ ID NO: 1379373 - DNA, 25 bp, Homo sapien
cagtgtcagggacaagacatttcta

SEQ ID NO: 1379374 - DNA, 25 bp, Homo sapien
ccagtgtcagggacaagacatttct

SEQ ID NO: 1379375 - DNA, 25 bp, Homo sapien
agtgtcagggacaagacatttctag

SEQ ID NO: 1379376 - DNA, 25 bp, Homo sapien
cacttcctggtggtgactggtcggc

SEQ ID NO: 1379377 - DNA, 25 bp, Homo sapien
gactggtcggctccctagtttcctg

SEQ ID NO: 1379378 - DNA, 25 bp, Homo sapien
gagcagccggatcttctcctacgta

SEQ ID NO: 1379379 - DNA, 25 bp, Homo sapien
cctagtttcctggtctggcctgagc

SEQ ID NO: 1379380 - DNA, 25 bp, Homo sapien
ttgatagctaaagggccgcttgcgt

SEQ ID NO: 1379381 - DNA, 25 bp, Homo sapien
ccactacgtgggtagtaatgtggga

SEQ ID NO: 1379382 - DNA, 25 bp, Homo sapien
agagtaagtctgcttccttccacta

SEQ ID NO: 1379383 - DNA, 25 bp, Homo sapien
taatgtgggagtgttttgatagcta

SEQ ID NO: 1379384 - DNA, 25 bp, Homo sapien
aaatttcgctttttagcatcagagg

SEQ ID NO: 1379385 - DNA, 25 bp, Homo sapien
ttttcccgagcaatcaaatttcgct

SEQ ID NO: 1379386 - DNA, 25 bp, Homo sapien
gaagttactttttcccgagcaatca

SEQ ID NO: 1379387 - DNA, 25 bp, Homo sapien
tttttagcatcagaggagcaagaag

SEQ ID NO: 1379388 - DNA, 25 bp, Homo sapien
gggacactgtaaagattgctccgtg

SEQ ID NO: 1379389 - DNA, 25 bp, Homo sapien
ctcttgttgctcacatgcagggtcc

SEQ ID NO: 1379390 - DNA, 25 bp, Homo sapien
agattgctccgtgcctcttgttgct

SEQ ID NO: 1379391 - DNA, 25 bp, Homo sapien
tccatatctcctcactagctgcctg

SEQ ID NO: 1379392 - DNA, 25 bp, Homo sapien
caagttcggtccaatattccatccc

SEQ ID NO: 1379393 - DNA, 25 bp, Homo sapien
ccacaggagtgtagtgagtagctcc

SEQ ID NO: 1379394 - DNA, 25 bp, Homo sapien
tcataaaagcatagagggcagttct

SEQ ID NO: 1379395 - DNA, 25 bp, Homo sapien
gagtagctcctctatgccagctgac

SEQ ID NO: 1379396 - DNA, 25 bp, Homo sapien
tgtaggcacagtagaccacagactt

SEQ ID NO: 1379397 - DNA, 25 bp, Homo sapien
gagcagcaaacttcctgactgaaag

SEQ ID NO: 1379398 - DNA, 25 bp, Homo sapien
taaaggaatcagtgcttatgctgac

SEQ ID NO: 1379399 - DNA, 25 bp, Homo sapien
gctgacttgtttgtactgctttgac

SEQ ID NO: 1379400 - DNA, 25 bp, Homo sapien
ttcttggccttataggaaggagcca

SEQ ID NO: 1379401 - DNA, 25 bp, Homo sapien
tttcctatctgccctgtctgtgctc

SEQ ID NO: 1379402 - DNA, 25 bp, Homo sapien
ccttggtgtggaacggggagcattg

SEQ ID NO: 1379403 - DNA, 25 bp, Homo sapien
gagaacaatgatcggtgccttggtg

SEQ ID NO: 1379404 - DNA, 25 bp, Homo sapien
taaacagagctataggccctggaat

SEQ ID NO: 1379405 - DNA, 25 bp, Homo sapien
tgctgattaaacagagctataggcc

SEQ ID NO: 1379406 - DNA, 25 bp, Homo sapien
tctgctgtatgctgattaaacagag

SEQ ID NO: 1379407 - DNA, 25 bp, Homo sapien
ctataggccctggaatgtttctgca

SEQ ID NO: 1379408 - DNA, 25 bp, Homo sapien
tcgctgcatttatcatgtgactcca

SEQ ID NO: 1379409 - DNA, 25 bp, Homo sapien
ttactgcctcgctgcatttatcatg

SEQ ID NO: 1379410 - DNA, 25 bp, Homo sapien
gcctcgctgcatttatcatgtgact

SEQ ID NO: 1379411 - DNA, 25 bp, Homo sapien
accatttactgcctcgctgcattta

SEQ ID NO: 1379412 - DNA, 25 bp, Homo sapien
caatccagggaaatcagcagatggc

SEQ ID NO: 1379413 - DNA, 25 bp, Homo sapien
catcgcagatctgaggagctggcct

SEQ ID NO: 1379414 - DNA, 25 bp, Homo sapien
aggaggcaaacgtggcccaatccag

SEQ ID NO: 1379415 - DNA, 25 bp, Homo sapien
catggccatcgcagatctgaggagc

SEQ ID NO: 1379416 - DNA, 25 bp, Homo sapien
cacatgacaaacattcaaggtgaat

SEQ ID NO: 1379417 - DNA, 25 bp, Homo sapien
atgacaaacattcaaggtgaattag

SEQ ID NO: 1379418 - DNA, 25 bp, Homo sapien
acatgacaaacattcaaggtgaatt

SEQ ID NO: 1379419 - DNA, 25 bp, Homo sapien
catgacaaacattcaaggtgaatta

SEQ ID NO: 1379420 - DNA, 25 bp, Homo sapien
tagccacagtggggatttggtccat

SEQ ID NO: 1379421 - DNA, 25 bp, Homo sapien
caacaagaatggttggctatcttca

SEQ ID NO: 1379422 - DNA, 25 bp, Homo sapien
cttttggacaacaagaatggttggc

SEQ ID NO: 1379423 - DNA, 25 bp, Homo sapien
tggacaacaagaatggttggctatc

SEQ ID NO: 1379424 - DNA, 25 bp, Homo sapien
tgctctacttttggacaacaagaat

SEQ ID NO: 1379425 - DNA, 25 bp, Homo sapien
tttgtgctgctgagagtccggtcca

SEQ ID NO: 1379426 - DNA, 25 bp, Homo sapien
tgagatgtcaagactgctgcttccc

SEQ ID NO: 1379427 - DNA, 25 bp, Homo sapien
tcaagataacagaatgggccacagt

SEQ ID NO: 1379428 - DNA, 25 bp, Homo sapien
ctaacacgtcccagatttgtgctgc

SEQ ID NO: 1379429 - DNA, 25 bp, Homo sapien
ttagtgtagctgccggaggtttccc

SEQ ID NO: 1379430 - DNA, 25 bp, Homo sapien
ctgtggtgagaatttgtcaaatgag

SEQ ID NO: 1379431 - DNA, 25 bp, Homo sapien
tccactcccagtttccacgtgcatt

SEQ ID NO: 1379432 - DNA, 25 bp, Homo sapien
tagctgccggaggtttcccactgtc

SEQ ID NO: 1379433 - DNA, 25 bp, Homo sapien
gagatcctctctccaagaacggctt

SEQ ID NO: 1379434 - DNA, 25 bp, Homo sapien
tctctccaagaacggcttttgctgc

SEQ ID NO: 1379435 - DNA, 25 bp, Homo sapien
aagcagagagatcctctctccaaga

SEQ ID NO: 1379436 - DNA, 25 bp, Homo sapien
caagaacggcttttgctgccctctg

SEQ ID NO: 1379437 - DNA, 25 bp, Homo sapien
gagagctgtggtctcagcccttgga

SEQ ID NO: 1379438 - DNA, 25 bp, Homo sapien
caatgaggccgatcttcctgggttc

SEQ ID NO: 1379439 - DNA, 25 bp, Homo sapien
cttgccatgaaggtgccgagagctg

SEQ ID NO: 1379440 - DNA, 25 bp, Homo sapien
gcattccatgtgttggccttgccca

SEQ ID NO: 1379441 - DNA, 25 bp, Homo sapien
gctaagggatgatgaccagctgtgg

SEQ ID NO: 1379442 - DNA, 25 bp, Homo sapien
taagggatgatgaccagctgtggct

SEQ ID NO: 1379443 - DNA, 25 bp, Homo sapien
ttgggatagggcagctaagggatga

SEQ ID NO: 1379444 - DNA, 25 bp, Homo sapien
tcaaagttgggatagggcagctaag

SEQ ID NO: 1379445 - DNA, 25 bp, Homo sapien
gtgtcttgcagtgccgcgggcagca

SEQ ID NO: 1379446 - DNA, 25 bp, Homo sapien
agtgccgcgggcagcactccaggac

SEQ ID NO: 1379447 - DNA, 25 bp, Homo sapien
tgctcacaagccaaccttcctgatg

SEQ ID NO: 1379448 - DNA, 25 bp, Homo sapien
acattttttagatgtcccagtgtct

SEQ ID NO: 1379449 - DNA, 25 bp, Homo sapien
taaattaccatgcagtccttataat

SEQ ID NO: 1379450 - DNA, 25 bp, Homo sapien
ccaggagagtgtagaaggggcaggg

SEQ ID NO: 1379451 - DNA, 25 bp, Homo sapien
actataaattaccatgcagtcctta

SEQ ID NO: 1379452 - DNA, 25 bp, Homo sapien
ttaccatgcagtccttataatttaa

SEQ ID NO: 1379453 - DNA, 25 bp, Homo sapien
cttctcacagccttcctgctgagca

SEQ ID NO: 1379454 - DNA, 25 bp, Homo sapien
tcaggctcttctcacagccttcctg

SEQ ID NO: 1379455 - DNA, 25 bp, Homo sapien
gctcttctcacagccttcctgctga

SEQ ID NO: 1379456 - DNA, 25 bp, Homo sapien
aggctcttctcacagccttcctgct

SEQ ID NO: 1379457 - DNA, 25 bp, Homo sapien
gagaattcgcccctgtggaagatgg

SEQ ID NO: 1379458 - DNA, 25 bp, Homo sapien
tatctatccggataaaccgccaggc

SEQ ID NO: 1379459 - DNA, 25 bp, Homo sapien
ttgggtcccggcacttggtctcaaa

SEQ ID NO: 1379460 - DNA, 25 bp, Homo sapien
cacagtaatgttgcgggtctgcccc

SEQ ID NO: 1379461 - DNA, 25 bp, Homo sapien
tgtagatgtgtagcaaacgtcagct

SEQ ID NO: 1379462 - DNA, 25 bp, Homo sapien
tgtgtagcaaacgtcagctcctctg

SEQ ID NO: 1379463 - DNA, 25 bp, Homo sapien
tagcaaacgtcagctcctctgtaaa

SEQ ID NO: 1379464 - DNA, 25 bp, Homo sapien
caaacgtcagctcctctgtaaagct

SEQ ID NO: 1379465 - DNA, 25 bp, Homo sapien
agccatttttattgtctcaccctga

SEQ ID NO: 1379466 - DNA, 25 bp, Homo sapien
cagcagtttgtgcataaccctatca

SEQ ID NO: 1379467 - DNA, 25 bp, Homo sapien
tactcgagggtggagccgtgtctca

SEQ ID NO: 1379468 - DNA, 25 bp, Homo sapien
ccacttgtgtatctgggcactccat

SEQ ID NO: 1379469 - DNA, 25 bp, Homo sapien
gtggtttcttttggcctttgtgcat

SEQ ID NO: 1379470 - DNA, 25 bp, Homo sapien
tgtgtggtttcttttggcctttgtg

SEQ ID NO: 1379471 - DNA, 25 bp, Homo sapien
tttccatcacagtgtgtggtttctt

SEQ ID NO: 1379472 - DNA, 25 bp, Homo sapien
ctttccatcacagtgtgtggtttct

SEQ ID NO: 1379473 - DNA, 25 bp, Homo sapien
tctaaggagcccatcgaaatttctg

SEQ ID NO: 1379474 - DNA, 25 bp, Homo sapien
ctcctcttctaaggagcccatcgaa

SEQ ID NO: 1379475 - DNA, 25 bp, Homo sapien
ggagcccatcgaaatttctgtgcaa

SEQ ID NO: 1379476 - DNA, 25 bp, Homo sapien
cccatcgaaatttctgtgcaattga

SEQ ID NO: 1379477 - DNA, 25 bp, Homo sapien
caaggtacttcagaggtgtcctggg

SEQ ID NO: 1379478 - DNA, 25 bp, Homo sapien
ttgtaaaggctcgaatactcttggg

SEQ ID NO: 1379479 - DNA, 25 bp, Homo sapien
ctgtcttcagttgtaaaggctcgaa

SEQ ID NO: 1379480 - DNA, 25 bp, Homo sapien
ccagcaaggtacttcagaggtgtcc

SEQ ID NO: 1379481 - DNA, 25 bp, Homo sapien
gactgacgctgtctattcgaggtcc

SEQ ID NO: 1379482 - DNA, 25 bp, Homo sapien
ctcagtcggaccagagagttgtgtg

SEQ ID NO: 1379483 - DNA, 25 bp, Homo sapien
aactttagacccttgatgcagctca

SEQ ID NO: 1379484 - DNA, 25 bp, Homo sapien
tttgcaagttccctgctcagtcgga

SEQ ID NO: 1379485 - DNA, 25 bp, Homo sapien
cagtgtggccaggatagaaagctgc

SEQ ID NO: 1379486 - DNA, 25 bp, Homo sapien
gccaggatagaaagctgctcccttg

SEQ ID NO: 1379487 - DNA, 25 bp, Homo sapien
aactgttattgggtccggacgctga

SEQ ID NO: 1379488 - DNA, 25 bp, Homo sapien
ttggactgcacgaccactggccaaa

SEQ ID NO: 1379489 - DNA, 25 bp, Homo sapien
cactgctgtagaccacctgcttgaa

SEQ ID NO: 1379490 - DNA, 25 bp, Homo sapien
ccacctgcttgaatgtaactttcca

SEQ ID NO: 1379491 - DNA, 25 bp, Homo sapien
caaagttatgttgtgggcttcttcc

SEQ ID NO: 1379492 - DNA, 25 bp, Homo sapien
tactcctaggacttatcatctcaga

SEQ ID NO: 1379493 - DNA, 25 bp, Homo sapien
agctccctaggtgatcccaatataa

SEQ ID NO: 1379494 - DNA, 25 bp, Homo sapien
gtgatcccaatataaagccagggct

SEQ ID NO: 1379495 - DNA, 25 bp, Homo sapien
tcattgacctggagtgctgcctggg

SEQ ID NO: 1379496 - DNA, 25 bp, Homo sapien
ttcattgacctggagtgctgcctgg

SEQ ID NO: 1379497 - DNA, 25 bp, Homo sapien
gcggctgccctggtatctttgatgt

SEQ ID NO: 1379498 - DNA, 25 bp, Homo sapien
gcaagctgctcttgggactagccat

SEQ ID NO: 1379499 - DNA, 25 bp, Homo sapien
tctcctgggcagaaactaggagaaa

SEQ ID NO: 1379500 - DNA, 25 bp, Homo sapien
atgtagtgcaagctgctcttgggac

SEQ ID NO: 1379501 - DNA, 25 bp, Homo sapien
gattcccgttaggagccatcctggg

SEQ ID NO: 1379502 - DNA, 25 bp, Homo sapien
tttccatcagcttggagcttgttga

SEQ ID NO: 1379503 - DNA, 25 bp, Homo sapien
tattggtaccgatgattgatggccc

SEQ ID NO: 1379504 - DNA, 25 bp, Homo sapien
gtgtcattttccatcagcttggagc

SEQ ID NO: 1379505 - DNA, 25 bp, Homo sapien
gaggctgtctcagggatgtgcttcc

SEQ ID NO: 1379506 - DNA, 25 bp, Homo sapien
tgatgaaggctataggctctgccca

SEQ ID NO: 1379507 - DNA, 25 bp, Homo sapien
tgtgcagttggtcagtgaacaggct

SEQ ID NO: 1379508 - DNA, 25 bp, Homo sapien
tgcatcattgctttaccaggtacca

SEQ ID NO: 1379509 - DNA, 25 bp, Homo sapien
gccaggctggtattgttctttatca

SEQ ID NO: 1379510 - DNA, 25 bp, Homo sapien
gccactgtgtttgtcacccacgtat

SEQ ID NO: 1379511 - DNA, 25 bp, Homo sapien
gaagagagtagttgctgttggaccc

SEQ ID NO: 1379512 - DNA, 25 bp, Homo sapien
gacccagagccttttggagcttaaa

SEQ ID NO: 1379513 - DNA, 25 bp, Homo sapien
gcatagtaagtggttgcgttccaca

SEQ ID NO: 1379514 - DNA, 25 bp, Homo sapien
ctaaaggtcagcatagtaagtggtt

SEQ ID NO: 1379515 - DNA, 25 bp, Homo sapien
tcagcatagtaagtggttgcgttcc

SEQ ID NO: 1379516 - DNA, 25 bp, Homo sapien
taagtggttgcgttccacagtgtct

SEQ ID NO: 1379517 - DNA, 25 bp, Homo sapien
gctgagagatgaccagagagaaggg

SEQ ID NO: 1379518 - DNA, 25 bp, Homo sapien
ccatctcatagccttgtctggctgc

SEQ ID NO: 1379519 - DNA, 25 bp, Homo sapien
ttcttaaccagacccggtgactggc

SEQ ID NO: 1379520 - DNA, 25 bp, Homo sapien
ctggctgcttccttcgcaccctgca

SEQ ID NO: 1379521 - DNA, 25 bp, Homo sapien
gctgcttagaatctgcccctgggat

SEQ ID NO: 1379522 - DNA, 25 bp, Homo sapien
cagagatcatgcttcaatggagcag

SEQ ID NO: 1379523 - DNA, 25 bp, Homo sapien
gagtatgggtctgagccttcatcag

SEQ ID NO: 1379524 - DNA, 25 bp, Homo sapien
tgagagaacttgacagctgcttaga

SEQ ID NO: 1379525 - DNA, 25 bp, Homo sapien
tctcttccatcagagcctggacccc

SEQ ID NO: 1379526 - DNA, 25 bp, Homo sapien
cctgagcccttcagcttgggtctct

SEQ ID NO: 1379527 - DNA, 25 bp, Homo sapien
ttccatcagagcctggacccctgag

SEQ ID NO: 1379528 - DNA, 25 bp, Homo sapien
ctgagcccttcagcttgggtctctg

SEQ ID NO: 1379529 - DNA, 25 bp, Homo sapien
tgtgtctacaaccaagatgtttccc

SEQ ID NO: 1379530 - DNA, 25 bp, Homo sapien
tctgtgtctacaaccaagatgtttc

SEQ ID NO: 1379531 - DNA, 25 bp, Homo sapien
ctgtgtctacaaccaagatgtttcc

SEQ ID NO: 1379532 - DNA, 25 bp, Homo sapien
agagtcagtccaggaaaccatccag

SEQ ID NO: 1379533 - DNA, 25 bp, Homo sapien
tataatcactcatctcaggcactga

SEQ ID NO: 1379534 - DNA, 25 bp, Homo sapien
tgggcagcatctcgcttctgaggca

SEQ ID NO: 1379535 - DNA, 25 bp, Homo sapien
gcagctaattgtgtactctggacca

SEQ ID NO: 1379536 - DNA, 25 bp, Homo sapien
tgaaatcagcgccaagctctgcagt

SEQ ID NO: 1379537 - DNA, 25 bp, Homo sapien
tccctcgagtgtagtgttgctagcc

SEQ ID NO: 1379538 - DNA, 25 bp, Homo sapien
cctacttgtaatgagttgggcatga

SEQ ID NO: 1379539 - DNA, 25 bp, Homo sapien
tgtgatccacttagcaaaggaggga

SEQ ID NO: 1379540 - DNA, 25 bp, Homo sapien
gctgcgctcccctccggctcccagc

SEQ ID NO: 1379541 - DNA, 25 bp, Homo sapien
tcccctccggctcccagcgctctct

SEQ ID NO: 1379542 - DNA, 25 bp, Homo sapien
cgctcccctccggctcccagcgctc

SEQ ID NO: 1379543 - DNA, 25 bp, Homo sapien
cgctgcgctcccctccggctcccag

SEQ ID NO: 1379544 - DNA, 25 bp, Homo sapien
gcccagcagctttccatggtggaac

SEQ ID NO: 1379545 - DNA, 25 bp, Homo sapien
aatttcctggtctgtcccatccagg

SEQ ID NO: 1379546 - DNA, 25 bp, Homo sapien
cactgagaatggttcgtgttcctaa

SEQ ID NO: 1379547 - DNA, 25 bp, Homo sapien
tctgattctgtgcaaggcccatggg

SEQ ID NO: 1379548 - DNA, 25 bp, Homo sapien
aggtctgacaagcacttgtaagtcc

SEQ ID NO: 1379549 - DNA, 25 bp, Homo sapien
aaagacttatgatacaggagccaaa

SEQ ID NO: 1379550 - DNA, 25 bp, Homo sapien
tgctccttctaggaaagaccctttc

SEQ ID NO: 1379551 - DNA, 25 bp, Homo sapien
gcgatgatgaaataaggtctgacaa

SEQ ID NO: 1379552 - DNA, 25 bp, Homo sapien
gcctgcatgtggtgtgactcctggt

SEQ ID NO: 1379553 - DNA, 25 bp, Homo sapien
ccgaggggctcttccaagttggttg

SEQ ID NO: 1379554 - DNA, 25 bp, Homo sapien
caaaagtcctcaactggaacctgtg

SEQ ID NO: 1379555 - DNA, 25 bp, Homo sapien
tgccttcaggccagcaaccgagggg

SEQ ID NO: 1379556 - DNA, 25 bp, Homo sapien
gggtgggagactgctcgcagcatac

SEQ ID NO: 1379557 - DNA, 25 bp, Homo sapien
gacggagctcctcatccgatggagc

SEQ ID NO: 1379558 - DNA, 25 bp, Homo sapien
aagaatatgacggagctcctcatcc

SEQ ID NO: 1379559 - DNA, 25 bp, Homo sapien
cctatgacatgcctagctctctggg

SEQ ID NO: 1379560 - DNA, 25 bp, Homo sapien
tatgacggagctcctcatccgatgg

SEQ ID NO: 1379561 - DNA, 25 bp, Homo sapien
agtcttcccagaccactatgtccaa

SEQ ID NO: 1379562 - DNA, 25 bp, Homo sapien
caagtcaggtttatgggagaagtct

SEQ ID NO: 1379563 - DNA, 25 bp, Homo sapien
ttctgtccatcctgctataacctct

SEQ ID NO: 1379564 - DNA, 25 bp, Homo sapien
aacctctccagttagatggatgaaa

SEQ ID NO: 1379565 - DNA, 25 bp, Homo sapien
gatggttttctgttgtagctaaaga

SEQ ID NO: 1379566 - DNA, 25 bp, Homo sapien
aaagattttgctattactgatgtgg

SEQ ID NO: 1379567 - DNA, 25 bp, Homo sapien
ctggtaaaaagagaaggacgagatg

SEQ ID NO: 1379568 - DNA, 25 bp, Homo sapien
attctgttgtaagatgatggttttc

SEQ ID NO: 1379569 - DNA, 25 bp, Homo sapien
gccaaggtaggagtggaaggttcca

SEQ ID NO: 1379570 - DNA, 25 bp, Homo sapien
ttgtactggggctttgagacactga

SEQ ID NO: 1379571 - DNA, 25 bp, Homo sapien
atatctgccaaggtaggagtggaag

SEQ ID NO: 1379572 - DNA, 25 bp, Homo sapien
gaaggttccattggcgattgtactg

SEQ ID NO: 1379573 - DNA, 25 bp, Homo sapien
cttatcagcaaccccatttttagcc

SEQ ID NO: 1379574 - DNA, 25 bp, Homo sapien
ttatcagcaaccccatttttagcca

SEQ ID NO: 1379575 - DNA, 25 bp, Homo sapien
tatcagcaaccccatttttagccat

SEQ ID NO: 1379576 - DNA, 25 bp, Homo sapien
tcctcagtgttggttttttcccagc

SEQ ID NO: 1379577 - DNA, 25 bp, Homo sapien
actccagagagtcctcagtgttggt

SEQ ID NO: 1379578 - DNA, 25 bp, Homo sapien
tccagagagtcctcagtgttggttt

SEQ ID NO: 1379579 - DNA, 25 bp, Homo sapien
ctccagagagtcctcagtgttggtt

SEQ ID NO: 1379580 - DNA, 25 bp, Homo sapien
aggccagggatttaccacgaggtgc

SEQ ID NO: 1379581 - DNA, 25 bp, Homo sapien
taccacgaggtgcagtttgaggtgt

SEQ ID NO: 1379582 - DNA, 25 bp, Homo sapien
ttgaggtgtgtcagaggcctccctt

SEQ ID NO: 1379583 - DNA, 25 bp, Homo sapien
gtttgaggtgtgtcagaggcctccc

SEQ ID NO: 1379584 - DNA, 25 bp, Homo sapien
actgttgaaagagtagcttgcccaa

SEQ ID NO: 1379585 - DNA, 25 bp, Homo sapien
taaacggcactagtggccttctctc

SEQ ID NO: 1379586 - DNA, 25 bp, Homo sapien
ttttctggaggcaattcaggcactg

SEQ ID NO: 1379587 - DNA, 25 bp, Homo sapien
cacttttgactctagtaaacggcac

SEQ ID NO: 1379588 - DNA, 25 bp, Homo sapien
gctcctgtgattgggatctttgagg

SEQ ID NO: 1379589 - DNA, 25 bp, Homo sapien
tgatgtctacccatgactgcataca

SEQ ID NO: 1379590 - DNA, 25 bp, Homo sapien
gttttcagaccaacccacagttgaa

SEQ ID NO: 1379591 - DNA, 25 bp, Homo sapien
ggtggaggacatctgatgtctaccc

SEQ ID NO: 1379592 - DNA, 25 bp, Homo sapien
tccagacccattggatcagtgacaa

SEQ ID NO: 1379593 - DNA, 25 bp, Homo sapien
tatctccagacccattggatcagtg

SEQ ID NO: 1379594 - DNA, 25 bp, Homo sapien
cagacccattggatcagtgacaaat

SEQ ID NO: 1379595 - DNA, 25 bp, Homo sapien
gacccattggatcagtgacaaattc

SEQ ID NO: 1379596 - DNA, 25 bp, Homo sapien
tgtgctccttggtgctccagggcag

SEQ ID NO: 1379597 - DNA, 25 bp, Homo sapien
gctctgctggatgcactgtactcaa

SEQ ID NO: 1379598 - DNA, 25 bp, Homo sapien
tcctaagtgtcccatcgaggacaag

SEQ ID NO: 1379599 - DNA, 25 bp, Homo sapien
aagtccccgatctgctcctaagtgt

SEQ ID NO: 1379600 - DNA, 25 bp, Homo sapien
catcctttctctaatgacaccaaag

SEQ ID NO: 1379601 - DNA, 25 bp, Homo sapien
ctttctctaatgacaccaaagaccg

SEQ ID NO: 1379602 - DNA, 25 bp, Homo sapien
ttctctaatgacaccaaagaccgag

SEQ ID NO: 1379603 - DNA, 25 bp, Homo sapien
ctctaatgacaccaaagaccgagcc

SEQ ID NO: 1379604 - DNA, 25 bp, Homo sapien
tctcttccattctatccctactttg

SEQ ID NO: 1379605 - DNA, 25 bp, Homo sapien
tccattctatccctactttgtgacc

SEQ ID NO: 1379606 - DNA, 25 bp, Homo sapien
tactttgtgaccttccagctcccac

SEQ ID NO: 1379607 - DNA, 25 bp, Homo sapien
tatccctactttgtgaccttccagc

SEQ ID NO: 1379608 - DNA, 25 bp, Homo sapien
agcagccacaggagcacgggcagat

SEQ ID NO: 1379609 - DNA, 25 bp, Homo sapien
tttttccccatgcagtccagagacc

SEQ ID NO: 1379610 - DNA, 25 bp, Homo sapien
tgcagtccagagacccctgcagcag

SEQ ID NO: 1379611 - DNA, 25 bp, Homo sapien
ccaggccacaacagcaaatgtccac

SEQ ID NO: 1379612 - DNA, 25 bp, Homo sapien
actgcttagcttgaccatccttggt

SEQ ID NO: 1379613 - DNA, 25 bp, Homo sapien
taggccataaagcacgacctcctca

SEQ ID NO: 1379614 - DNA, 25 bp, Homo sapien
ggctatacttgtgaacagacccctg

SEQ ID NO: 1379615 - DNA, 25 bp, Homo sapien
tcattgctggcatgtctctgaccac

SEQ ID NO: 1379616 - DNA, 25 bp, Homo sapien
ttgaggttttctgagaggaagaagg

SEQ ID NO: 1379617 - DNA, 25 bp, Homo sapien
gcaaagctgtgtagacttctgtgag

SEQ ID NO: 1379618 - DNA, 25 bp, Homo sapien
caagttgaggttttctgagaggaag

SEQ ID NO: 1379619 - DNA, 25 bp, Homo sapien
ggcaaagctgtgtagacttctgtga

SEQ ID NO: 1379620 - DNA, 25 bp, Homo sapien
gaacacgtcaaggatgttagtgtcc

SEQ ID NO: 1379621 - DNA, 25 bp, Homo sapien
gggctgaagaacacgtcaaggatgt

SEQ ID NO: 1379622 - DNA, 25 bp, Homo sapien
caaggatgttagtgtccacatggga

SEQ ID NO: 1379623 - DNA, 25 bp, Homo sapien
gatgtctgggctgaagaacacgtca

SEQ ID NO: 1379624 - DNA, 25 bp, Homo sapien
ttctgttctcgtggaagatgaagtt

SEQ ID NO: 1379625 - DNA, 25 bp, Homo sapien
cagatgtaacagaagcggttcttct

SEQ ID NO: 1379626 - DNA, 25 bp, Homo sapien
agcggttcttctgttctcgtggaag

SEQ ID NO: 1379627 - DNA, 25 bp, Homo sapien
gatgtaacagaagcggttcttctgt

SEQ ID NO: 1379628 - DNA, 25 bp, Homo sapien
tgtctgggttgtctatcttcaccat

SEQ ID NO: 1379629 - DNA, 25 bp, Homo sapien
cttattgtctgggttgtctatcttc

SEQ ID NO: 1379630 - DNA, 25 bp, Homo sapien
tattgtctgggttgtctatcttcac

SEQ ID NO: 1379631 - DNA, 25 bp, Homo sapien
ttgtctgggttgtctatcttcacca

SEQ ID NO: 1379632 - DNA, 25 bp, Homo sapien
agacaaagtggaattggctgcgaga

SEQ ID NO: 1379633 - DNA, 25 bp, Homo sapien
taggagagttgccaagggcttataa

SEQ ID NO: 1379634 - DNA, 25 bp, Homo sapien
gcgagagtggtcacttcagctgcag

SEQ ID NO: 1379635 - DNA, 25 bp, Homo sapien
gccaagggcttataagagacaaagt

SEQ ID NO: 1379636 - DNA, 25 bp, Homo sapien
gattgacagagcacagcagtgtgtg

SEQ ID NO: 1379637 - DNA, 25 bp, Homo sapien
tggcatcagctggcacttgagctgg

SEQ ID NO: 1379638 - DNA, 25 bp, Homo sapien
ctgaagctggcttggattgacagag

SEQ ID NO: 1379639 - DNA, 25 bp, Homo sapien
ttgagctggcttctgaagctggctt

SEQ ID NO: 1379640 - DNA, 25 bp, Homo sapien
gtatccaggtaagtcatatttgcca

SEQ ID NO: 1379641 - DNA, 25 bp, Homo sapien
cactggtatccaggtaagtcatatt

SEQ ID NO: 1379642 - DNA, 25 bp, Homo sapien
ccatgagtaagccactggtatccag

SEQ ID NO: 1379643 - DNA, 25 bp, Homo sapien
taagccactggtatccaggtaagtc

SEQ ID NO: 1379644 - DNA, 25 bp, Homo sapien
gggtacgctatgaggcccacagaga

SEQ ID NO: 1379645 - DNA, 25 bp, Homo sapien
ccccttcgctacacacagcccatgg

SEQ ID NO: 1379646 - DNA, 25 bp, Homo sapien
actggcatgggtacgctatgaggcc

SEQ ID NO: 1379647 - DNA, 25 bp, Homo sapien
agtttacactggcatgggtacgcta

SEQ ID NO: 1379648 - DNA, 25 bp, Homo sapien
tcaatgacaacaaggctgccaaagt

SEQ ID NO: 1379649 - DNA, 25 bp, Homo sapien
gagatctctatctgacattgggtcc

SEQ ID NO: 1379650 - DNA, 25 bp, Homo sapien
ggatcccacttttgcgacctgagat

SEQ ID NO: 1379651 - DNA, 25 bp, Homo sapien
ggctgtagtcttggcaggatcccac

SEQ ID NO: 1379652 - DNA, 25 bp, Homo sapien
tggcgggacaccagtgactggcgcg

SEQ ID NO: 1379653 - DNA, 25 bp, Homo sapien
ggcgggacaccagtgactggcgcgc

SEQ ID NO: 1379654 - DNA, 25 bp, Homo sapien
ctggcgggacaccagtgactggcgc

SEQ ID NO: 1379655 - DNA, 25 bp, Homo sapien
tcccctgaaacacccccacattcag

SEQ ID NO: 1379656 - DNA, 25 bp, Homo sapien
ccacattcagcaccttgtttcttca

SEQ ID NO: 1379657 - DNA, 25 bp, Homo sapien
cattcagcaccttgtttcttcagac

SEQ ID NO: 1379658 - DNA, 25 bp, Homo sapien
tgcctctccttcccctgaaacaccc

SEQ ID NO: 1379659 - DNA, 25 bp, Homo sapien
ggctgcctgagtcagcaacatctgc

SEQ ID NO: 1379660 - DNA, 25 bp, Homo sapien
ctgcctgagtcagcaacatctgctc

SEQ ID NO: 1379661 - DNA, 25 bp, Homo sapien
cctgagtgctgatttgggtgaatag

SEQ ID NO: 1379662 - DNA, 25 bp, Homo sapien
ggtgaatagaccattggctttaccc

SEQ ID NO: 1379663 - DNA, 25 bp, Homo sapien
aataaaagaatcattgggtttgtca

SEQ ID NO: 1379664 - DNA, 25 bp, Homo sapien
ataaaagaatcattgggtttgtcac

SEQ ID NO: 1379665 - DNA, 25 bp, Homo sapien
atgtttggtggtttataggccacaa

SEQ ID NO: 1379666 - DNA, 25 bp, Homo sapien
cagtgacctgcatgatgtttggtgg

SEQ ID NO: 1379667 - DNA, 25 bp, Homo sapien
gatgtttggtggtttataggccaca

SEQ ID NO: 1379668 - DNA, 25 bp, Homo sapien
tgacctgcatgatgtttggtggttt

SEQ ID NO: 1379669 - DNA, 25 bp, Homo sapien
tctgcccgctcctttccagcccatg

SEQ ID NO: 1379670 - DNA, 25 bp, Homo sapien
tgcccgctcctttccagcccatgcc

SEQ ID NO: 1379671 - DNA, 25 bp, Homo sapien
aaacacacacggtttcctctggtct

SEQ ID NO: 1379672 - DNA, 25 bp, Homo sapien
tgaacatgactttaggagagaattc

SEQ ID NO: 1379673 - DNA, 25 bp, Homo sapien
cactgtcattatcataacatattat

SEQ ID NO: 1379674 - DNA, 25 bp, Homo sapien
tccttcatacgatttgctaaacact

SEQ ID NO: 1379675 - DNA, 25 bp, Homo sapien
tggtgaaggaggttctttctgacat

SEQ ID NO: 1379676 - DNA, 25 bp, Homo sapien
gctgtattggtggtgtatggcaatt

SEQ ID NO: 1379677 - DNA, 25 bp, Homo sapien
tgattccctccagacttatgtgttg

SEQ ID NO: 1379678 - DNA, 25 bp, Homo sapien
gaatgaatggtaagggtaaatacac

SEQ ID NO: 1379679 - DNA, 25 bp, Homo sapien
aaatacaccctaactgggattagag

SEQ ID NO: 1379680 - DNA, 25 bp, Homo sapien
ctggaagaaggaaccctgttgagct

SEQ ID NO: 1379681 - DNA, 25 bp, Homo sapien
ctgttgagctgagactagctctggg

SEQ ID NO: 1379682 - DNA, 25 bp, Homo sapien
ttgcagtttcagcttccagcggctg

SEQ ID NO: 1379683 - DNA, 25 bp, Homo sapien
tgcagtttcagcttccagcggctgg

SEQ ID NO: 1379684 - DNA, 25 bp, Homo sapien
aaggagaaacagtacctgctccttc

SEQ ID NO: 1379685 - DNA, 25 bp, Homo sapien
ccttcctcaagcgcaagccctccat

SEQ ID NO: 1379686 - DNA, 25 bp, Homo sapien
aggagaaacagtacctgctccttcc

SEQ ID NO: 1379687 - DNA, 25 bp, Homo sapien
tgctccttcctcaagcgcaagccct

SEQ ID NO: 1379688 - DNA, 25 bp, Homo sapien
gatctagcgttcaaggttgctgcca

SEQ ID NO: 1379689 - DNA, 25 bp, Homo sapien
ctctgaagacaagtaggtcaccgct

SEQ ID NO: 1379690 - DNA, 25 bp, Homo sapien
tatttggagtcaggccatgctgcca

SEQ ID NO: 1379691 - DNA, 25 bp, Homo sapien
catgtctgtgcaccaaaaatctggg

SEQ ID NO: 1379692 - DNA, 25 bp, Homo sapien
atcgctcctccctgtacgactggtt

SEQ ID NO: 1379693 - DNA, 25 bp, Homo sapien
cgctcctccctgtacgactggttga

SEQ ID NO: 1379694 - DNA, 25 bp, Homo sapien
ccctgtacgactggttgagctgcac

SEQ ID NO: 1379695 - DNA, 25 bp, Homo sapien
tcctccctgtacgactggttgagct

SEQ ID NO: 1379696 - DNA, 25 bp, Homo sapien
tgcaggccaggtcccgtattctcca

SEQ ID NO: 1379697 - DNA, 25 bp, Homo sapien
tttcatggtctcctgagggcccctg

SEQ ID NO: 1379698 - DNA, 25 bp, Homo sapien
ggttttcatggtctcctgagggccc

SEQ ID NO: 1379699 - DNA, 25 bp, Homo sapien
actccctgaatgctgtgctgttggt

SEQ ID NO: 1379700 - DNA, 25 bp, Homo sapien
ttctctcacgtttgcattcatctgc

SEQ ID NO: 1379701 - DNA, 25 bp, Homo sapien
gttgtccctgtccactgaccctcct

SEQ ID NO: 1379702 - DNA, 25 bp, Homo sapien
gcctgggcagccgtcagtactggcc

SEQ ID NO: 1379703 - DNA, 25 bp, Homo sapien
tggcctcctttggttgtccctgtcc

SEQ ID NO: 1379704 - DNA, 25 bp, Homo sapien
ccaggtgagaccttcagggcaagca

SEQ ID NO: 1379705 - DNA, 25 bp, Homo sapien
caggaagagctctcgtgacacacaa

SEQ ID NO: 1379706 - DNA, 25 bp, Homo sapien
taaactgagtcttacagccatgtgg

SEQ ID NO: 1379707 - DNA, 25 bp, Homo sapien
tgtggagggagcctcagaaagccca

SEQ ID NO: 1379708 - DNA, 25 bp, Homo sapien
cctgcaggcaagtccattaaactct

SEQ ID NO: 1379709 - DNA, 25 bp, Homo sapien
tgctgtcctgcaggcaagtccatta

SEQ ID NO: 1379710 - DNA, 25 bp, Homo sapien
cagcactgtcttctggggagcctgc

SEQ ID NO: 1379711 - DNA, 25 bp, Homo sapien
ttagcacagcactgtcttctgggga

SEQ ID NO: 1379712 - DNA, 25 bp, Homo sapien
gctggcttgggcaagatgcgtgcct

SEQ ID NO: 1379713 - DNA, 25 bp, Homo sapien
gggcaagatgcgtgccttgggcctt

SEQ ID NO: 1379714 - DNA, 25 bp, Homo sapien
cttgggcaagatgcgtgccttgggc

SEQ ID NO: 1379715 - DNA, 25 bp, Homo sapien
ctggcttgggcaagatgcgtgcctt

SEQ ID NO: 1379716 - DNA, 25 bp, Homo sapien
gcaacattatgccccaaacttcttc

SEQ ID NO: 1379717 - DNA, 25 bp, Homo sapien
cctggttggagtgagaggggctgtc

SEQ ID NO: 1379718 - DNA, 25 bp, Homo sapien
ggcaacattatgccccaaacttctt

SEQ ID NO: 1379719 - DNA, 25 bp, Homo sapien
tacactttgtgctatcatttggata

SEQ ID NO: 1379720 - DNA, 25 bp, Homo sapien
gaacttgagaacttgggtcatggga

SEQ ID NO: 1379721 - DNA, 25 bp, Homo sapien
agtgggtactcgctctgttagttcc

SEQ ID NO: 1379722 - DNA, 25 bp, Homo sapien
taaaccctgctaatacactttgtgc

SEQ ID NO: 1379723 - DNA, 25 bp, Homo sapien
taaatgggaaggctcactagcagct

SEQ ID NO: 1379724 - DNA, 25 bp, Homo sapien
tatgcctgtgagttagaaagctgtc

SEQ ID NO: 1379725 - DNA, 25 bp, Homo sapien
ggagggatcccaactgatgttcgag

SEQ ID NO: 1379726 - DNA, 25 bp, Homo sapien
tatgtgagacttgccaactagaggg

SEQ ID NO: 1379727 - DNA, 25 bp, Homo sapien
aacaagatctgttccgtgacagtca

SEQ ID NO: 1379728 - DNA, 25 bp, Homo sapien
gacagtcaagacagtcaacatggga

SEQ ID NO: 1379729 - DNA, 25 bp, Homo sapien
tagactgccatgttcaggcactgcc

SEQ ID NO: 1379730 - DNA, 25 bp, Homo sapien
cccttgatggtccagcaaagaacaa

SEQ ID NO: 1379731 - DNA, 25 bp, Homo sapien
gtagtgggtgctgtgattttgtttt

SEQ ID NO: 1379732 - DNA, 25 bp, Homo sapien
ctgtatggtagtgggtgctgtgatt

SEQ ID NO: 1379733 - DNA, 25 bp, Homo sapien
gtctgtatggtagtgggtgctgtga

SEQ ID NO: 1379734 - DNA, 25 bp, Homo sapien
tatggtagtgggtgctgtgattttg

SEQ ID NO: 1379735 - DNA, 25 bp, Homo sapien
atcatcttcagtgtttatctttcca

SEQ ID NO: 1379736 - DNA, 25 bp, Homo sapien
cagttggaagatcgtcatcatctgg

SEQ ID NO: 1379737 - DNA, 25 bp, Homo sapien
tggaagatcgtcatcatctggaatc

SEQ ID NO: 1379738 - DNA, 25 bp, Homo sapien
tcctcagcagttggaagatcgtcat

SEQ ID NO: 1379739 - DNA, 25 bp, Homo sapien
cagcagttggaagatcgtcatcatc

SEQ ID NO: 1379740 - DNA, 25 bp, Homo sapien
gccaagggtgcctgagcaagccttc

SEQ ID NO: 1379741 - DNA, 25 bp, Homo sapien
ggccaagggtgcctgagcaagcctt

SEQ ID NO: 1379742 - DNA, 25 bp, Homo sapien
gtggcctgaataggtcaatcttgaa

SEQ ID NO: 1379743 - DNA, 25 bp, Homo sapien
gaaagtcttctcccagtaggcaacg

SEQ ID NO: 1379744 - DNA, 25 bp, Homo sapien
aagtcttctcccagtaggcaacgag

SEQ ID NO: 1379745 - DNA, 25 bp, Homo sapien
aatctgtggcctgaataggtcaatc

SEQ ID NO: 1379746 - DNA, 25 bp, Homo sapien
cagaggaaagtcgtccgggtcgatc

SEQ ID NO: 1379747 - DNA, 25 bp, Homo sapien
ttgtcccgggcaacctgtttcagga

SEQ ID NO: 1379748 - DNA, 25 bp, Homo sapien
tccgggtcgatccacaggatgctca

SEQ ID NO: 1379749 - DNA, 25 bp, Homo sapien
aggatctccaggaattcgtagccat

SEQ ID NO: 1379750 - DNA, 25 bp, Homo sapien
tgtggacactatgggtcgtcctttg

SEQ ID NO: 1379751 - DNA, 25 bp, Homo sapien
tggacactatgggtcgtcctttggc

SEQ ID NO: 1379752 - DNA, 25 bp, Homo sapien
gtgtggacactatgggtcgtccttt

SEQ ID NO: 1379753 - DNA, 25 bp, Homo sapien
ggacactatgggtcgtcctttggcc

SEQ ID NO: 1379754 - DNA, 25 bp, Homo sapien
cttggagtcctgagagaccatgacc

SEQ ID NO: 1379755 - DNA, 25 bp, Homo sapien
ttggagtcctgagagaccatgaccc

SEQ ID NO: 1379756 - DNA, 25 bp, Homo sapien
ggtttcccacggcaagcgactggcc

SEQ ID NO: 1379757 - DNA, 25 bp, Homo sapien
cgactggcctctgggaatcacatct

SEQ ID NO: 1379758 - DNA, 25 bp, Homo sapien
ccaagggatgcacgttgaaccagga

SEQ ID NO: 1379759 - DNA, 25 bp, Homo sapien
tggtgggaatgagccttcaccaagc

SEQ ID NO: 1379760 - DNA, 25 bp, Homo sapien
cccgtgagagtcagacatccgcgta

SEQ ID NO: 1379761 - DNA, 25 bp, Homo sapien
gtcacccgtgagagtcagacatccg

SEQ ID NO: 1379762 - DNA, 25 bp, Homo sapien
agagtcagacatccgcgtaggacag

SEQ ID NO: 1379763 - DNA, 25 bp, Homo sapien
gaagtcacccgtgagagtcagacat

SEQ ID NO: 1379764 - DNA, 25 bp, Homo sapien
caatctcggtcaaacaggttcttac

SEQ ID NO: 1379765 - DNA, 25 bp, Homo sapien
gattcattacagcagcaatctcggt

SEQ ID NO: 1379766 - DNA, 25 bp, Homo sapien
tacagcagcaatctcggtcaaacag

SEQ ID NO: 1379767 - DNA, 25 bp, Homo sapien
gaggtggaagtagtttctggagctt

SEQ ID NO: 1379768 - DNA, 25 bp, Homo sapien
gcttcctttgctatttgctcctcca

SEQ ID NO: 1379769 - DNA, 25 bp, Homo sapien
caggctgctgcctatggcaactgca

SEQ ID NO: 1379770 - DNA, 25 bp, Homo sapien
tgttcacataacaccagggatccga

SEQ ID NO: 1379771 - DNA, 25 bp, Homo sapien
aaccttaggcaattggcttcctttg

SEQ ID NO: 1379772 - DNA, 25 bp, Homo sapien
cacaatgtggatcccattcaaatca

SEQ ID NO: 1379773 - DNA, 25 bp, Homo sapien
tgtatgagaaaagtaacaaaagtta

SEQ ID NO: 1379774 - DNA, 25 bp, Homo sapien
tatgagaaaagtaacaaaagttaca

SEQ ID NO: 1379775 - DNA, 25 bp, Homo sapien
ctgtatgagaaaagtaacaaaagtt

SEQ ID NO: 1379776 - DNA, 25 bp, Homo sapien
tctgaggctgcaggaattgtctgga

SEQ ID NO: 1379777 - DNA, 25 bp, Homo sapien
agtccttgcccagtcagtataggcc

SEQ ID NO: 1379778 - DNA, 25 bp, Homo sapien
gggacactgctagaagtggcctcta

SEQ ID NO: 1379779 - DNA, 25 bp, Homo sapien
tataggcctccagtgcatttctgag

SEQ ID NO: 1379780 - DNA, 25 bp, Homo sapien
ctgtgggggcaggggcaggaagaag

SEQ ID NO: 1379781 - DNA, 25 bp, Homo sapien
tgtgggggcaggggcaggaagaaga

SEQ ID NO: 1379782 - DNA, 25 bp, Homo sapien
gtgggggcaggggcaggaagaagaa

SEQ ID NO: 1379783 - DNA, 25 bp, Homo sapien
tgggggcaggggcaggaagaagaac

SEQ ID NO: 1379784 - DNA, 25 bp, Homo sapien
tctgagctcttaaggacaggacagc

SEQ ID NO: 1379785 - DNA, 25 bp, Homo sapien
gctgggctggcgttatatgtcttga

SEQ ID NO: 1379786 - DNA, 25 bp, Homo sapien
taactgagtgcaagatttcccaaag

SEQ ID NO: 1379787 - DNA, 25 bp, Homo sapien
caatggagtgacctagatgcttgtc

SEQ ID NO: 1379788 - DNA, 25 bp, Homo sapien
tctgggcgcaggcgacgtagagtgg

SEQ ID NO: 1379789 - DNA, 25 bp, Homo sapien
ctgggcgcaggcgacgtagagtggg

SEQ ID NO: 1379790 - DNA, 25 bp, Homo sapien
tgggcgcaggcgacgtagagtgggt

SEQ ID NO: 1379791 - DNA, 25 bp, Homo sapien
ttctgggcgcaggcgacgtagagtg

SEQ ID NO: 1379792 - DNA, 25 bp, Homo sapien
tcatagaagtcaacctcattcatct

SEQ ID NO: 1379793 - DNA, 25 bp, Homo sapien
ggctcatccataaatggctcataga

SEQ ID NO: 1379794 - DNA, 25 bp, Homo sapien
aatggctcatagaagtcaacctcat

SEQ ID NO: 1379795 - DNA, 25 bp, Homo sapien
aatgggctcatccataaatggctca

SEQ ID NO: 1379796 - DNA, 25 bp, Homo sapien
cagagctgtggttcaagaaagcgca

SEQ ID NO: 1379797 - DNA, 25 bp, Homo sapien
cactgtggtggtaacccgtggtgcc

SEQ ID NO: 1379798 - DNA, 25 bp, Homo sapien
aaagcgcagggatgaacagtggttc

SEQ ID NO: 1379799 - DNA, 25 bp, Homo sapien
ggcctggaatgtgcaacgctctata

SEQ ID NO: 1379800 - DNA, 25 bp, Homo sapien
tctccaactccaaggctcatgcaat

SEQ ID NO: 1379801 - DNA, 25 bp, Homo sapien
caactccaaggctcatgcaatccac

SEQ ID NO: 1379802 - DNA, 25 bp, Homo sapien
ccaactccaaggctcatgcaatcca

SEQ ID NO: 1379803 - DNA, 25 bp, Homo sapien
tggtctccaactccaaggctcatgc

SEQ ID NO: 1379804 - DNA, 25 bp, Homo sapien
gcaaagaatttgatgtaaggctgga

SEQ ID NO: 1379805 - DNA, 25 bp, Homo sapien
agctgcttcttcaaaagccttgtag

SEQ ID NO: 1379806 - DNA, 25 bp, Homo sapien
cctttgtcaaaggtggcaaagaatt

SEQ ID NO: 1379807 - DNA, 25 bp, Homo sapien
tgatgtaaggctggaagtgttcagc

SEQ ID NO: 1379808 - DNA, 25 bp, Homo sapien
gagtttgatgtagtcttcaatgcgt

SEQ ID NO: 1379809 - DNA, 25 bp, Homo sapien
tgcgttcgaaggcttggacttccag

SEQ ID NO: 1379810 - DNA, 25 bp, Homo sapien
gatgatctccactgggtcttcaatt

SEQ ID NO: 1379811 - DNA, 25 bp, Homo sapien
tgctgatgatctccactgggtcttc

SEQ ID NO: 1379812 - DNA, 25 bp, Homo sapien
gctggtagataaagaatcatcggca

SEQ ID NO: 1379813 - DNA, 25 bp, Homo sapien
gaatgatagaccactgggtactggc

SEQ ID NO: 1379814 - DNA, 25 bp, Homo sapien
tccctctggtttttgacactgtaga

SEQ ID NO: 1379815 - DNA, 25 bp, Homo sapien
gaatcatcggcatggatgctcaaca

SEQ ID NO: 1379816 - DNA, 25 bp, Homo sapien
tgtgcgatcacccttaagaatatac

SEQ ID NO: 1379817 - DNA, 25 bp, Homo sapien
aagacatcagctgcaaactcgccat

SEQ ID NO: 1379818 - DNA, 25 bp, Homo sapien
aagaggaactccaccaagacatcag

SEQ ID NO: 1379819 - DNA, 25 bp, Homo sapien
aactcgccatcaaactctattgtgc

SEQ ID NO: 1379820 - DNA, 25 bp, Homo sapien
ttcttggcatccaccatcacaaagc

SEQ ID NO: 1379821 - DNA, 25 bp, Homo sapien
ttatgttcaaggacctgggccacaa

SEQ ID NO: 1379822 - DNA, 25 bp, Homo sapien
tttatgttcaaggacctgggccaca

SEQ ID NO: 1379823 - DNA, 25 bp, Homo sapien
catcacaaagcctatagctttatgt

SEQ ID NO: 1379824 - DNA, 25 bp, Homo sapien
ctgaagaaacaaatggaaagatgag

SEQ ID NO: 1379825 - DNA, 25 bp, Homo sapien
gaagaaacaaatggaaagatgagtg

SEQ ID NO: 1379826 - DNA, 25 bp, Homo sapien
agaaacaaatggaaagatgagtgtg

SEQ ID NO: 1379827 - DNA, 25 bp, Homo sapien
tgaagaaacaaatggaaagatgagt

SEQ ID NO: 1379828 - DNA, 25 bp, Homo sapien
tttctgcccttggagtagataaaac

SEQ ID NO: 1379829 - DNA, 25 bp, Homo sapien
cagtttctgcccttggagtagataa

SEQ ID NO: 1379830 - DNA, 25 bp, Homo sapien
gtttctgcccttggagtagataaaa

SEQ ID NO: 1379831 - DNA, 25 bp, Homo sapien
agtttctgcccttggagtagataaa

SEQ ID NO: 1379832 - DNA, 25 bp, Homo sapien
tctatgtttgtttctttgatatctt

SEQ ID NO: 1379833 - DNA, 25 bp, Homo sapien
ctatgtttgtttctttgatatcttc

SEQ ID NO: 1379834 - DNA, 25 bp, Homo sapien
tgtttctttgatatcttcttcattt

SEQ ID NO: 1379835 - DNA, 25 bp, Homo sapien
gtttgtttctttgatatcttcttca

SEQ ID NO: 1379836 - DNA, 25 bp, Homo sapien
ctaactgtttcccttcttcgaagag

SEQ ID NO: 1379837 - DNA, 25 bp, Homo sapien
ttgtgagcagaagcaccaagagcag

SEQ ID NO: 1379838 - DNA, 25 bp, Homo sapien
agcaaggattgtgagcagaagcacc

SEQ ID NO: 1379839 - DNA, 25 bp, Homo sapien
ccttcttcgaagagcaaggattgtg

SEQ ID NO: 1379840 - DNA, 25 bp, Homo sapien
agctccatctgcagattcactcaac

SEQ ID NO: 1379841 - DNA, 25 bp, Homo sapien
gctccatctgcagattcactcaact

SEQ ID NO: 1379842 - DNA, 25 bp, Homo sapien
cctccccagcgtttccacgcagctc

SEQ ID NO: 1379843 - DNA, 25 bp, Homo sapien
tattccctccccagcgtttccacgc

SEQ ID NO: 1379844 - DNA, 25 bp, Homo sapien
ctcttggatcaaaggtgtctggagg

SEQ ID NO: 1379845 - DNA, 25 bp, Homo sapien
tgggccggcacccactgtgaaaagg

SEQ ID NO: 1379846 - DNA, 25 bp, Homo sapien
gaagtttctgttcatgattttgcat

SEQ ID NO: 1379847 - DNA, 25 bp, Homo sapien
tggagggatggtaagcccaggggaa

SEQ ID NO: 1379848 - DNA, 25 bp, Homo sapien
agctctgccctaaagtcacaccaag

SEQ ID NO: 1379849 - DNA, 25 bp, Homo sapien
tctgccctaaagtcacaccaagaac

SEQ ID NO: 1379850 - DNA, 25 bp, Homo sapien
tcagctctgccctaaagtcacacca

SEQ ID NO: 1379851 - DNA, 25 bp, Homo sapien
tgccctaaagtcacaccaagaactt

SEQ ID NO: 1379852 - DNA, 25 bp, Homo sapien
gacccacccctcattgttcacacat

SEQ ID NO: 1379853 - DNA, 25 bp, Homo sapien
tcatttgaagagttaggacccaccc

SEQ ID NO: 1379854 - DNA, 25 bp, Homo sapien
agcacgtttggtcctcttcatttga

SEQ ID NO: 1379855 - DNA, 25 bp, Homo sapien
tcagacccatcgtagtgtagcacgt

SEQ ID NO: 1379856 - DNA, 25 bp, Homo sapien
caccggctcatggtagtagaggcaa

SEQ ID NO: 1379857 - DNA, 25 bp, Homo sapien
tctcggaaagacttaccactcggtc

SEQ ID NO: 1379858 - DNA, 25 bp, Homo sapien
tgtttttgcgtgaccttatctgaag

SEQ ID NO: 1379859 - DNA, 25 bp, Homo sapien
caagcacgatttctttcagttggaa

SEQ ID NO: 1379860 - DNA, 25 bp, Homo sapien
acaataaacaagtgagttctcttca

SEQ ID NO: 1379861 - DNA, 25 bp, Homo sapien
caataaacaagtgagttctcttcat

SEQ ID NO: 1379862 - DNA, 25 bp, Homo sapien
cacaataaacaagtgagttctcttc

SEQ ID NO: 1379863 - DNA, 25 bp, Homo sapien
agactgttagaggccttgttgagcc

SEQ ID NO: 1379864 - DNA, 25 bp, Homo sapien
aaaagtgactcttcacctccttggg

SEQ ID NO: 1379865 - DNA, 25 bp, Homo sapien
tgtgcagaatagaggacagaagact

SEQ ID NO: 1379866 - DNA, 25 bp, Homo sapien
gtttctcgttcccaaatatgctgtg

SEQ ID NO: 1379867 - DNA, 25 bp, Homo sapien
tcagcctctgtctcattaggaactc

SEQ ID NO: 1379868 - DNA, 25 bp, Homo sapien
agcctctgtctcattaggaactcca

SEQ ID NO: 1379869 - DNA, 25 bp, Homo sapien
gctcagcctctgtctcattaggaac

SEQ ID NO: 1379870 - DNA, 25 bp, Homo sapien
atagctctgctcagcctctgtctca

SEQ ID NO: 1379871 - DNA, 25 bp, Homo sapien
cagtccaaccctagtccagtcatgt

SEQ ID NO: 1379872 - DNA, 25 bp, Homo sapien
gtccaaccctagtccagtcatgtct

SEQ ID NO: 1379873 - DNA, 25 bp, Homo sapien
cttcaaaggcatctagggcattcat

SEQ ID NO: 1379874 - DNA, 25 bp, Homo sapien
tctcttccagtccaaccctagtcca

SEQ ID NO: 1379875 - DNA, 25 bp, Homo sapien
cccttcttctcgtagtagccttctg

SEQ ID NO: 1379876 - DNA, 25 bp, Homo sapien
tctcgtagtagccttctgccagcag

SEQ ID NO: 1379877 - DNA, 25 bp, Homo sapien
ctcgtagtagccttctgccagcagc

SEQ ID NO: 1379878 - DNA, 25 bp, Homo sapien
tcttctcgtagtagccttctgccag

SEQ ID NO: 1379879 - DNA, 25 bp, Homo sapien
gagccgtccactggccaggtgtttg

SEQ ID NO: 1379880 - DNA, 25 bp, Homo sapien
taccatcactggttttaaccctcat

SEQ ID NO: 1379881 - DNA, 25 bp, Homo sapien
tctgtgagtgaataaggacggattg

SEQ ID NO: 1379882 - DNA, 25 bp, Homo sapien
ggtttcttattaagcagccctggct

SEQ ID NO: 1379883 - DNA, 25 bp, Homo sapien
cacactggagttacttccctcggat

SEQ ID NO: 1379884 - DNA, 25 bp, Homo sapien
gcgaaacctgcttgtattaatgacc

SEQ ID NO: 1379885 - DNA, 25 bp, Homo sapien
gatgtatgtgttccccaacaagcag

SEQ ID NO: 1379886 - DNA, 25 bp, Homo sapien
tttcagaattcctgcagcatgagat

SEQ ID NO: 1379887 - DNA, 25 bp, Homo sapien
tctcggtacatcaggtctcaatggc

SEQ ID NO: 1379888 - DNA, 25 bp, Homo sapien
gagctgtcccgtttctgagtccctg

SEQ ID NO: 1379889 - DNA, 25 bp, Homo sapien
cgttgatacggtgatgtgggtcttc

SEQ ID NO: 1379890 - DNA, 25 bp, Homo sapien
tctcaatggcaatggagtgggagct

SEQ ID NO: 1379891 - DNA, 25 bp, Homo sapien
gttctgcctgagtgtggaatcagct

SEQ ID NO: 1379892 - DNA, 25 bp, Homo sapien
tgcatgccacaatctttgggggccc

SEQ ID NO: 1379893 - DNA, 25 bp, Homo sapien
tttgggggcccttctatctctatgg

SEQ ID NO: 1379894 - DNA, 25 bp, Homo sapien
gctctgggcactagcctccctttgt

SEQ ID NO: 1379895 - DNA, 25 bp, Homo sapien
gacagcctccgagtgacttccaagg

SEQ ID NO: 1379896 - DNA, 25 bp, Homo sapien
ttatcgccggttacgtccgacagcc

SEQ ID NO: 1379897 - DNA, 25 bp, Homo sapien
ctgccgcagacagcgaggtgtcatc

SEQ ID NO: 1379898 - DNA, 25 bp, Homo sapien
tggagggacgctctcccgagactgc

SEQ ID NO: 1379899 - DNA, 25 bp, Homo sapien
tccgagtggcaccagaggacaagtc

SEQ ID NO: 1379900 - DNA, 25 bp, Homo sapien
ttcggactctccgagtggcaccaga

SEQ ID NO: 1379901 - DNA, 25 bp, Homo sapien
cctttgaagtttcggactctccgag

SEQ ID NO: 1379902 - DNA, 25 bp, Homo sapien
gacaagtccactgagcagggcccat

SEQ ID NO: 1379903 - DNA, 25 bp, Homo sapien
tggcaattgctcgtacacacacatt

SEQ ID NO: 1379904 - DNA, 25 bp, Homo sapien
attgctcgtacacacacattggatg

SEQ ID NO: 1379905 - DNA, 25 bp, Homo sapien
tgctcgtacacacacattggatgtg

SEQ ID NO: 1379906 - DNA, 25 bp, Homo sapien
ctttggcaattgctcgtacacacac

SEQ ID NO: 1379907 - DNA, 25 bp, Homo sapien
ccaatacttttacccttgttctctg

SEQ ID NO: 1379908 - DNA, 25 bp, Homo sapien
tttccgggcagtggtagaagtgagg

SEQ ID NO: 1379909 - DNA, 25 bp, Homo sapien
caatggcctggcaagttgttgagtg

SEQ ID NO: 1379910 - DNA, 25 bp, Homo sapien
gaaatattcagcacaggcagtcttg

SEQ ID NO: 1379911 - DNA, 25 bp, Homo sapien
tatactagccacaggtttttgcaga

SEQ ID NO: 1379912 - DNA, 25 bp, Homo sapien
tcttcttatctcaaggttggtccag

SEQ ID NO: 1379913 - DNA, 25 bp, Homo sapien
taagtgccatgaggattgagagtca

SEQ ID NO: 1379914 - DNA, 25 bp, Homo sapien
cttgtttgcggatgccctgtcttga

SEQ ID NO: 1379915 - DNA, 25 bp, Homo sapien
ggaattgagtccattaagatatttc

SEQ ID NO: 1379916 - DNA, 25 bp, Homo sapien
gactgatccacgtccaaatttgagc

SEQ ID NO: 1379917 - DNA, 25 bp, Homo sapien
taagatatttcatgctcagctaaca

SEQ ID NO: 1379918 - DNA, 25 bp, Homo sapien
gattttgttgtgcttaccagttcct

SEQ ID NO: 1379919 - DNA, 25 bp, Homo sapien
gaaaaactcgtcagatagaaaccag

SEQ ID NO: 1379920 - DNA, 25 bp, Homo sapien
acagcgcaccattcatgagatatga

SEQ ID NO: 1379921 - DNA, 25 bp, Homo sapien
cagattatatctattttcactacaa

SEQ ID NO: 1379922 - DNA, 25 bp, Homo sapien
tttatatgcaaaacagcgcaccatt

SEQ ID NO: 1379923 - DNA, 25 bp, Homo sapien
gaacaggtagcgagcttcttccccg

SEQ ID NO: 1379924 - DNA, 25 bp, Homo sapien
gatagcctaaagttatgagcctgca

SEQ ID NO: 1379925 - DNA, 25 bp, Homo sapien
tttttctaactgcacctatgggtcc

SEQ ID NO: 1379926 - DNA, 25 bp, Homo sapien
gaagtggctcatctcgggtgtctcc

SEQ ID NO: 1379927 - DNA, 25 bp, Homo sapien
cgccgagctgggatggtccgaatct

SEQ ID NO: 1379928 - DNA, 25 bp, Homo sapien
cagcaatttgcggagctcggcgaag

SEQ ID NO: 1379929 - DNA, 25 bp, Homo sapien
gaatctgctgcttggtccggactca

SEQ ID NO: 1379930 - DNA, 25 bp, Homo sapien
gacacgctgccgagcaccttggtgt

SEQ ID NO: 1379931 - DNA, 25 bp, Homo sapien
taatcagtaaaaggaatcagggtat

SEQ ID NO: 1379932 - DNA, 25 bp, Homo sapien
aggaatcagggtattttgctggaag

SEQ ID NO: 1379933 - DNA, 25 bp, Homo sapien
tgaggaggggtcggaaaattaatca

SEQ ID NO: 1379934 - DNA, 25 bp, Homo sapien
taccacgccggtcctcccagcggac

SEQ ID NO: 1379935 - DNA, 25 bp, Homo sapien
gacgcggttgacccaggccgcatac

SEQ ID NO: 1379936 - DNA, 25 bp, Homo sapien
gggacgcggttgacccaggccgcat

SEQ ID NO: 1379937 - DNA, 25 bp, Homo sapien
ggggacgcggttgacccaggccgca

SEQ ID NO: 1379938 - DNA, 25 bp, Homo sapien
ggacgcggttgacccaggccgcata

SEQ ID NO: 1379939 - DNA, 25 bp, Homo sapien
cttcccggacaaacgagcgatttcg

SEQ ID NO: 1379940 - DNA, 25 bp, Homo sapien
aagaaaattgactccgatgccctcg

SEQ ID NO: 1379941 - DNA, 25 bp, Homo sapien
ggtcgcgactgggtttttgtgcctc

SEQ ID NO: 1379942 - DNA, 25 bp, Homo sapien
caacgaatacatctgggttttcacg

SEQ ID NO: 1379943 - DNA, 25 bp, Homo sapien
gacacggcgacgtgggatcagacaa

SEQ ID NO: 1379944 - DNA, 25 bp, Homo sapien
gtcacgcagacagccacacacatag

SEQ ID NO: 1379945 - DNA, 25 bp, Homo sapien
tctggcgaccaccttgcgggaaaat

SEQ ID NO: 1379946 - DNA, 25 bp, Homo sapien
cacataggggacctagggacacggc

SEQ ID NO: 1379947 - DNA, 25 bp, Homo sapien
cgggcatgtcggtgcttagccttcc

SEQ ID NO: 1379948 - DNA, 25 bp, Homo sapien
catctctgccggcaaagttcgggcg

SEQ ID NO: 1379949 - DNA, 25 bp, Homo sapien
ttaactgtgccctcttggaaacgcc

SEQ ID NO: 1379950 - DNA, 25 bp, Homo sapien
tggcctggccaagtccgggcatgtc

SEQ ID NO: 1379951 - DNA, 25 bp, Homo sapien
gcttctctggggcgcctggagcact

SEQ ID NO: 1379952 - DNA, 25 bp, Homo sapien
actggcccggactgtgcgccttctg

SEQ ID NO: 1379953 - DNA, 25 bp, Homo sapien
gggccgctcagaaccgctgggcttc

SEQ ID NO: 1379954 - DNA, 25 bp, Homo sapien
tcgggcttcgagaaagggcccggca

SEQ ID NO: 1379955 - DNA, 25 bp, Homo sapien
ctccacgacgctcggcacgggagaa

SEQ ID NO: 1379956 - DNA, 25 bp, Homo sapien
ggagaaatccgcgtcggcgacgtat

SEQ ID NO: 1379957 - DNA, 25 bp, Homo sapien
ggcgtgggcagcctccacgacgctc

SEQ ID NO: 1379958 - DNA, 25 bp, Homo sapien
tcggcgacgtataggagcgtttgct

SEQ ID NO: 1379959 - DNA, 25 bp, Homo sapien
aacagctttaatttccctgcgagga

SEQ ID NO: 1379960 - DNA, 25 bp, Homo sapien
cctgggttgccctcaaagcacatta

SEQ ID NO: 1379961 - DNA, 25 bp, Homo sapien
cctacacagtcagcttgaaagggca

SEQ ID NO: 1379962 - DNA, 25 bp, Homo sapien
cacttgcagaggagcgaattgggcc

SEQ ID NO: 1379963 - DNA, 25 bp, Homo sapien
aagcctttttgataatctgttctcc

SEQ ID NO: 1379964 - DNA, 25 bp, Homo sapien
tgcaaaagcctttttgataatctgt

SEQ ID NO: 1379965 - DNA, 25 bp, Homo sapien
gcctttttgataatctgttctccaa

SEQ ID NO: 1379966 - DNA, 25 bp, Homo sapien
caaaagcctttttgataatctgttc

SEQ ID NO: 1379967 - DNA, 25 bp, Homo sapien
tccgcagcgagggacaataatatct

SEQ ID NO: 1379968 - DNA, 25 bp, Homo sapien
gaaaaagcagctgtcatctcgctgg

SEQ ID NO: 1379969 - DNA, 25 bp, Homo sapien
gatgtgttgaaaagtctcgtgcctt

SEQ ID NO: 1379970 - DNA, 25 bp, Homo sapien
caggatgtagacgatatgaatgatt

SEQ ID NO: 1379971 - DNA, 25 bp, Homo sapien
taatacggctgagcagaaactggga

SEQ ID NO: 1379972 - DNA, 25 bp, Homo sapien
gattcctccactttctaatagcgga

SEQ ID NO: 1379973 - DNA, 25 bp, Homo sapien
tgtaactaggagctaaggttgcctc

SEQ ID NO: 1379974 - DNA, 25 bp, Homo sapien
gatggttaagataagattccgctcc

SEQ ID NO: 1379975 - DNA, 25 bp, Homo sapien
taccaattgattcagcctggagatg

SEQ ID NO: 1379976 - DNA, 25 bp, Homo sapien
ttggtgaaaagtgaacgtctcctgg

SEQ ID NO: 1379977 - DNA, 25 bp, Homo sapien
tatatagtcagtggcttggagatgc

SEQ ID NO: 1379978 - DNA, 25 bp, Homo sapien
gaaacctggacatgagtcacttaat

SEQ ID NO: 1379979 - DNA, 25 bp, Homo sapien
tccacaagtactatttgcctttgcc

SEQ ID NO: 1379980 - DNA, 25 bp, Homo sapien
catggcttccacaagtactatttgc

SEQ ID NO: 1379981 - DNA, 25 bp, Homo sapien
gcttccacaagtactatttgccttt

SEQ ID NO: 1379982 - DNA, 25 bp, Homo sapien
caagtactatttgcctttgcccaca

SEQ ID NO: 1379983 - DNA, 25 bp, Homo sapien
attccaaaaactacctccatgacca

SEQ ID NO: 1379984 - DNA, 25 bp, Homo sapien
tccaaaaactacctccatgaccacc

SEQ ID NO: 1379985 - DNA, 25 bp, Homo sapien
tcattccaaaaactacctccatgac

SEQ ID NO: 1379986 - DNA, 25 bp, Homo sapien
ctcggtcagttattatttcaatcag

SEQ ID NO: 1379987 - DNA, 25 bp, Homo sapien
tcgacctcgtgtggcctcgcattca

SEQ ID NO: 1379988 - DNA, 25 bp, Homo sapien
cgtcgacctcgtgtggcctcgcatt

SEQ ID NO: 1379989 - DNA, 25 bp, Homo sapien
ttccacaactcttccgtcgacctcg

SEQ ID NO: 1379990 - DNA, 25 bp, Homo sapien
aactcttccgtcgacctcgtgtggc

SEQ ID NO: 1379991 - DNA, 25 bp, Homo sapien
gctctcgttggttgtttcaaaactc

SEQ ID NO: 1379992 - DNA, 25 bp, Homo sapien
aaactcaatcctccaatgaagagct

SEQ ID NO: 1379993 - DNA, 25 bp, Homo sapien
ctcaggctctcgttggttgtttcaa

SEQ ID NO: 1379994 - DNA, 25 bp, Homo sapien
tcgttggttgtttcaaaactcaatc

SEQ ID NO: 1379995 - DNA, 25 bp, Homo sapien
ccctgcagttaactcatcattatct

SEQ ID NO: 1379996 - DNA, 25 bp, Homo sapien
tccctgcagttaactcatcattatc

SEQ ID NO: 1379997 - DNA, 25 bp, Homo sapien
ttccctgcagttaactcatcattat

SEQ ID NO: 1379998 - DNA, 25 bp, Homo sapien
ttttccctgcagttaactcatcatt

SEQ ID NO: 1379999 - DNA, 25 bp, Homo sapien
aagggtggcaatcgcaactgcatac

SEQ ID NO: 1380000 - DNA, 25 bp, Homo sapien
gatatgcaatttaccagaaagacca

SEQ ID NO: 1380001 - DNA, 25 bp, Homo sapien
gaatcatctatctgaaagggtggca

SEQ ID NO: 1380002 - DNA, 25 bp, Homo sapien
tcaactgggaatgataccatgtact

SEQ ID NO: 1380003 - DNA, 25 bp, Homo sapien
gcaacttcagagctggatatctctc

SEQ ID NO: 1380004 - DNA, 25 bp, Homo sapien
tgctggatgcaatacgggggagccg

SEQ ID NO: 1380005 - DNA, 25 bp, Homo sapien
gggctttcagtggagattcaaagcc

SEQ ID NO: 1380006 - DNA, 25 bp, Homo sapien
agccgttagggctttcagtggagat

SEQ ID NO: 1380007 - DNA, 25 bp, Homo sapien
actcttctggtggcataaagctgtg

SEQ ID NO: 1380008 - DNA, 25 bp, Homo sapien
tcttctggtggcataaagctgtgga

SEQ ID NO: 1380009 - DNA, 25 bp, Homo sapien
ttctgtgagggccttggatgtgtgt

SEQ ID NO: 1380010 - DNA, 25 bp, Homo sapien
ttctggtggcataaagctgtggacc

SEQ ID NO: 1380011 - DNA, 25 bp, Homo sapien
tctgattgcgtagagccctcatgga

SEQ ID NO: 1380012 - DNA, 25 bp, Homo sapien
ctgcttggacaaccagggtgacctg

SEQ ID NO: 1380013 - DNA, 25 bp, Homo sapien
taggcacgggcccagtcttgtttgc

SEQ ID NO: 1380014 - DNA, 25 bp, Homo sapien
caagaggctcgatcaataggcacgg

SEQ ID NO: 1380015 - DNA, 25 bp, Homo sapien
ccagttctggcctgcacggttgtaa

SEQ ID NO: 1380016 - DNA, 25 bp, Homo sapien
tacctgttcatggatgactcgcccc

SEQ ID NO: 1380017 - DNA, 25 bp, Homo sapien
agcagcttttcttgatgtacgccag

SEQ ID NO: 1380018 - DNA, 25 bp, Homo sapien
tccaggcatctatatccagcatgaa

SEQ ID NO: 1380019 - DNA, 25 bp, Homo sapien
tgtgagttggcatccctgtgtcaac

SEQ ID NO: 1380020 - DNA, 25 bp, Homo sapien
tgttctgaatctgtgagttggcatc

SEQ ID NO: 1380021 - DNA, 25 bp, Homo sapien
tccccagttcactaggatctgtcag

SEQ ID NO: 1380022 - DNA, 25 bp, Homo sapien
gctggttgtcaacccattgttctga

SEQ ID NO: 1380023 - DNA, 25 bp, Homo sapien
tcttacaagactaggagggaaggag

SEQ ID NO: 1380024 - DNA, 25 bp, Homo sapien
gatgtactttgagccatgatgactg

SEQ ID NO: 1380025 - DNA, 25 bp, Homo sapien
tgtcaagacctttatcaatccagtc

SEQ ID NO: 1380026 - DNA, 25 bp, Homo sapien
tttgcatagagatgtccagaagctg

SEQ ID NO: 1380027 - DNA, 25 bp, Homo sapien
acttgagatagtggtgttttaacca

SEQ ID NO: 1380028 - DNA, 25 bp, Homo sapien
catacattcaaattgctgtgttacc

SEQ ID NO: 1380029 - DNA, 25 bp, Homo sapien
taaccagagaatggttgctttctct

SEQ ID NO: 1380030 - DNA, 25 bp, Homo sapien
tcatctccaggacgctttcaacatt

SEQ ID NO: 1380031 - DNA, 25 bp, Homo sapien
tatgacccagctttactcatgagaa

SEQ ID NO: 1380032 - DNA, 25 bp, Homo sapien
tacagagaccgcaagtgttggtgat

SEQ ID NO: 1380033 - DNA, 25 bp, Homo sapien
gagaagtggaaacctagatccacac

SEQ ID NO: 1380034 - DNA, 25 bp, Homo sapien
gttggtgataaagaggaactgtaac

SEQ ID NO: 1380035 - DNA, 25 bp, Homo sapien
tcaaggatggcagttctttagcctg

SEQ ID NO: 1380036 - DNA, 25 bp, Homo sapien
tatagtgcctccatacagttctgaa

SEQ ID NO: 1380037 - DNA, 25 bp, Homo sapien
ggagctatcctgaccctatcatgga

SEQ ID NO: 1380038 - DNA, 25 bp, Homo sapien
tcccagagatcatttgcaatcaagc

SEQ ID NO: 1380039 - DNA, 25 bp, Homo sapien
gctggtgccttgagtcccacagatg

SEQ ID NO: 1380040 - DNA, 25 bp, Homo sapien
ggaaaagccagatataccaaagcgg

SEQ ID NO: 1380041 - DNA, 25 bp, Homo sapien
cctgctgattgacttgggctgctgg

SEQ ID NO: 1380042 - DNA, 25 bp, Homo sapien
tcttagctgatgaaatatgagtcct

SEQ ID NO: 1380043 - DNA, 25 bp, Homo sapien
gttgggctcttcataaacagaggcc

SEQ ID NO: 1380044 - DNA, 25 bp, Homo sapien
ggagattgtggaactcctcccagta

SEQ ID NO: 1380045 - DNA, 25 bp, Homo sapien
cagaacattggcgtagacacagtaa

SEQ ID NO: 1380046 - DNA, 25 bp, Homo sapien
caaactccaagcaaatctgacccaa

SEQ ID NO: 1380047 - DNA, 25 bp, Homo sapien
cactgggttcgattgcctctggcta

SEQ ID NO: 1380048 - DNA, 25 bp, Homo sapien
cgtccaacatcgaaagaaaaccagt

SEQ ID NO: 1380049 - DNA, 25 bp, Homo sapien
tacttaataaggctaggctggccat

SEQ ID NO: 1380050 - DNA, 25 bp, Homo sapien
ccatttgaagactaattgggagtcc

SEQ ID NO: 1380051 - DNA, 25 bp, Homo sapien
gaaaatgttttatactgtgacacac

SEQ ID NO: 1380052 - DNA, 25 bp, Homo sapien
aaggctgaaaatgtacatagtctag

SEQ ID NO: 1380053 - DNA, 25 bp, Homo sapien
catcaactaggttgtcattagcaag

SEQ ID NO: 1380054 - DNA, 25 bp, Homo sapien
gtgacacacagtacacacacctaca

SEQ ID NO: 1380055 - DNA, 25 bp, Homo sapien
gattaggctccttctggacgaaggc

SEQ ID NO: 1380056 - DNA, 25 bp, Homo sapien
gaagccaaggcttggacattttgat

SEQ ID NO: 1380057 - DNA, 25 bp, Homo sapien
attttgattaggctccttctggacg

SEQ ID NO: 1380058 - DNA, 25 bp, Homo sapien
atgaagccaaggcttggacattttg

SEQ ID NO: 1380059 - DNA, 25 bp, Homo sapien
ttcctttccaccatttgcttcatca

SEQ ID NO: 1380060 - DNA, 25 bp, Homo sapien
cctttccaccatttgcttcatcatt

SEQ ID NO: 1380061 - DNA, 25 bp, Homo sapien
tcatcatttatcttgtccccaccaa

SEQ ID NO: 1380062 - DNA, 25 bp, Homo sapien
atcttgtccccaccaattaaaaatg

SEQ ID NO: 1380063 - DNA, 25 bp, Homo sapien
gcaccaccaagtgtcttctcaatgg

SEQ ID NO: 1380064 - DNA, 25 bp, Homo sapien
gaaaagaacattgaggcaccaccaa

SEQ ID NO: 1380065 - DNA, 25 bp, Homo sapien
agcctggcacctgctacatagtagg

SEQ ID NO: 1380066 - DNA, 25 bp, Homo sapien
tcatctccccggcatcttgggaagg

SEQ ID NO: 1380067 - DNA, 25 bp, Homo sapien
ttccttagcatgtgggtcagtggct

SEQ ID NO: 1380068 - DNA, 25 bp, Homo sapien
ttgcacctgatgagttagtgagcct

SEQ ID NO: 1380069 - DNA, 25 bp, Homo sapien
caaagtgttcctggttggttgagta

SEQ ID NO: 1380070 - DNA, 25 bp, Homo sapien
ttgcatcctggatcggtacccacag

SEQ ID NO: 1380071 - DNA, 25 bp, Homo sapien
ggtgtcacacttctcagcccgtaac

SEQ ID NO: 1380072 - DNA, 25 bp, Homo sapien
ggaacacatatgaaaggagccaggt

SEQ ID NO: 1380073 - DNA, 25 bp, Homo sapien
gtattcccaattcttgccagcagag

SEQ ID NO: 1380074 - DNA, 25 bp, Homo sapien
tgcgccacagtctgattccggtaga

SEQ ID NO: 1380075 - DNA, 25 bp, Homo sapien
taggctggagagaatagaagaatct

SEQ ID NO: 1380076 - DNA, 25 bp, Homo sapien
tccatgtagactcaaggcctctcct

SEQ ID NO: 1380077 - DNA, 25 bp, Homo sapien
ccaatttactgtgcccgtagctggc

SEQ ID NO: 1380078 - DNA, 25 bp, Homo sapien
ccatatctctaagggacaccgatca

SEQ ID NO: 1380079 - DNA, 25 bp, Homo sapien
agttagccccatccattatctttga

SEQ ID NO: 1380080 - DNA, 25 bp, Homo sapien
gaacccagctcatagattccattat

SEQ ID NO: 1380081 - DNA, 25 bp, Homo sapien
taggtttagcctggtcgagtcaccc

SEQ ID NO: 1380082 - DNA, 25 bp, Homo sapien
tcacccttggtagaaggatccttgg

SEQ ID NO: 1380083 - DNA, 25 bp, Homo sapien
caactggggaaaggccgactccaga

SEQ ID NO: 1380084 - DNA, 25 bp, Homo sapien
tcctgaagtcttgtcctgcaggggg

SEQ ID NO: 1380085 - DNA, 25 bp, Homo sapien
tgctctaacccggttggtcaactgg

SEQ ID NO: 1380086 - DNA, 25 bp, Homo sapien
ggaaaggccgactccagaccccaga

SEQ ID NO: 1380087 - DNA, 25 bp, Homo sapien
cactgtttgtccagaagctactgtc

SEQ ID NO: 1380088 - DNA, 25 bp, Homo sapien
tcactgtttgtccagaagctactgt

SEQ ID NO: 1380089 - DNA, 25 bp, Homo sapien
tgtttgtccagaagctactgtctgc

SEQ ID NO: 1380090 - DNA, 25 bp, Homo sapien
ttgtccagaagctactgtctgctgc

SEQ ID NO: 1380091 - DNA, 25 bp, Homo sapien
tctgggaaatgaaatttatgtctcc

SEQ ID NO: 1380092 - DNA, 25 bp, Homo sapien
gggaaatgaaatttatgtctcctgg

SEQ ID NO: 1380093 - DNA, 25 bp, Homo sapien
cttctgggaaatgaaatttatgtct

SEQ ID NO: 1380094 - DNA, 25 bp, Homo sapien
gaaatgaaatttatgtctcctggca

SEQ ID NO: 1380095 - DNA, 25 bp, Homo sapien
caatgactttttgggcagaatttac

SEQ ID NO: 1380096 - DNA, 25 bp, Homo sapien
tcaatgactttttgggcagaattta

SEQ ID NO: 1380097 - DNA, 25 bp, Homo sapien
tcagctcagtccttgatggtgctac

SEQ ID NO: 1380098 - DNA, 25 bp, Homo sapien
ttccttgacactcatgacgctgtct

SEQ ID NO: 1380099 - DNA, 25 bp, Homo sapien
cttgacactcatgacgctgtctcag

SEQ ID NO: 1380100 - DNA, 25 bp, Homo sapien
tgacactcatgacgctgtctcagct

SEQ ID NO: 1380101 - DNA, 25 bp, Homo sapien
ctgtcccatggagcttgcgttgtgt

SEQ ID NO: 1380102 - DNA, 25 bp, Homo sapien
tgtgtccccagttcactgtctcaac

SEQ ID NO: 1380103 - DNA, 25 bp, Homo sapien
tgttgggcttcacactaagtgcagc

SEQ ID NO: 1380104 - DNA, 25 bp, Homo sapien
cctgggcatctattgggtactcctg

SEQ ID NO: 1380105 - DNA, 25 bp, Homo sapien
tcaggaaactgacactgatagtcac

SEQ ID NO: 1380106 - DNA, 25 bp, Homo sapien
gtcaggaaactgacactgatagtca

SEQ ID NO: 1380107 - DNA, 25 bp, Homo sapien
ggtcaggaaactgacactgatagtc

SEQ ID NO: 1380108 - DNA, 25 bp, Homo sapien
aggtcaggaaactgacactgatagt

SEQ ID NO: 1380109 - DNA, 25 bp, Homo sapien
ttctctgcattctgtatttccacga

SEQ ID NO: 1380110 - DNA, 25 bp, Homo sapien
tgtatttccacgagcacagcacact

SEQ ID NO: 1380111 - DNA, 25 bp, Homo sapien
tgcattctgtatttccacgagcaca

SEQ ID NO: 1380112 - DNA, 25 bp, Homo sapien
attctgtatttccacgagcacagca

SEQ ID NO: 1380113 - DNA, 25 bp, Homo sapien
atgtgggggaagtatccagttccca

SEQ ID NO: 1380114 - DNA, 25 bp, Homo sapien
gatgtgggggaagtatccagttccc

SEQ ID NO: 1380115 - DNA, 25 bp, Homo sapien
ggatgtgggggaagtatccagttcc

SEQ ID NO: 1380116 - DNA, 25 bp, Homo sapien
atccagttcccagcttctttcatag

SEQ ID NO: 1380117 - DNA, 25 bp, Homo sapien
caagtcatgttagctaaggatgctc

SEQ ID NO: 1380118 - DNA, 25 bp, Homo sapien
gattccaaggtcacattcacacact

SEQ ID NO: 1380119 - DNA, 25 bp, Homo sapien
gatgctctattctcggattccaagg

SEQ ID NO: 1380120 - DNA, 25 bp, Homo sapien
tcctactcccttccaagtcatgtta

SEQ ID NO: 1380121 - DNA, 25 bp, Homo sapien
ttaggcgagtggtccacatgaatgt

SEQ ID NO: 1380122 - DNA, 25 bp, Homo sapien
taggcgagtggtccacatgaatgtc

SEQ ID NO: 1380123 - DNA, 25 bp, Homo sapien
tgttaccacttccttgacccgctgt

SEQ ID NO: 1380124 - DNA, 25 bp, Homo sapien
gctgtcttccggcttctctccgcct

SEQ ID NO: 1380125 - DNA, 25 bp, Homo sapien
cttctgttaccacttccttgacccg

SEQ ID NO: 1380126 - DNA, 25 bp, Homo sapien
tttcctgatgagacgctttgcttcc

SEQ ID NO: 1380127 - DNA, 25 bp, Homo sapien
cctctgcctttggtgtttttggagc

SEQ ID NO: 1380128 - DNA, 25 bp, Homo sapien
ttcctctgcctttggtgtttttgga

SEQ ID NO: 1380129 - DNA, 25 bp, Homo sapien
ctgcctttggtgtttttggagcagc

SEQ ID NO: 1380130 - DNA, 25 bp, Homo sapien
ctctgcctttggtgtttttggagca

SEQ ID NO: 1380131 - DNA, 25 bp, Homo sapien
cgtgtgtccccgtattttctcccat

SEQ ID NO: 1380132 - DNA, 25 bp, Homo sapien
tgaacctttctatggacagtacacg

SEQ ID NO: 1380133 - DNA, 25 bp, Homo sapien
agaaatatgccctccgtgtgcacgg

SEQ ID NO: 1380134 - DNA, 25 bp, Homo sapien
gaggcacatgtgttcgtgtgtcccc

SEQ ID NO: 1380135 - DNA, 25 bp, Homo sapien
taaaatcttgagtgggtgcagcctg

SEQ ID NO: 1380136 - DNA, 25 bp, Homo sapien
tccctgagcttttgaagggcgttga

SEQ ID NO: 1380137 - DNA, 25 bp, Homo sapien
acactctaacaatggaaggatgtcc

SEQ ID NO: 1380138 - DNA, 25 bp, Homo sapien
gtggtgtggctggacactctaacaa

SEQ ID NO: 1380139 - DNA, 25 bp, Homo sapien
tcagaaactgtgatgggaaggatac

SEQ ID NO: 1380140 - DNA, 25 bp, Homo sapien
gaatcatgttgggaatggaaggcac

SEQ ID NO: 1380141 - DNA, 25 bp, Homo sapien
tgtggcagccctatgtcacctatgg

SEQ ID NO: 1380142 - DNA, 25 bp, Homo sapien
cattgaatcctgaagtagagagtgt

SEQ ID NO: 1380143 - DNA, 25 bp, Homo sapien
tcacctatgggaagtgggcgactat

SEQ ID NO: 1380144 - DNA, 25 bp, Homo sapien
tcccacatcattaatatctctatga

SEQ ID NO: 1380145 - DNA, 25 bp, Homo sapien
atcccacatcattaatatctctatg

SEQ ID NO: 1380146 - DNA, 25 bp, Homo sapien
catcccacatcattaatatctctat

SEQ ID NO: 1380147 - DNA, 25 bp, Homo sapien
ccacatcattaatatctctatgatg

SEQ ID NO: 1380148 - DNA, 25 bp, Homo sapien
gtattttctcttgattataagagca

SEQ ID NO: 1380149 - DNA, 25 bp, Homo sapien
cttgattataagagcaaaacctgtt

SEQ ID NO: 1380150 - DNA, 25 bp, Homo sapien
tgattataagagcaaaacctgttat

SEQ ID NO: 1380151 - DNA, 25 bp, Homo sapien
ttctcttgattataagagcaaaacc

SEQ ID NO: 1380152 - DNA, 25 bp, Homo sapien
aaacagtgccctggtgagtgaggac

SEQ ID NO: 1380153 - DNA, 25 bp, Homo sapien
tttcagccagaaggagtttgaccac

SEQ ID NO: 1380154 - DNA, 25 bp, Homo sapien
tacctgaagctacatgagtgagacc

SEQ ID NO: 1380155 - DNA, 25 bp, Homo sapien
gcacacccatggaataagcccctta

SEQ ID NO: 1380156 - DNA, 25 bp, Homo sapien
caatccatcatgttccattctccaa

SEQ ID NO: 1380157 - DNA, 25 bp, Homo sapien
tgagaggtatctgaggtgaaagaac

SEQ ID NO: 1380158 - DNA, 25 bp, Homo sapien
agtgagaggtatctgaggtgaaaga

SEQ ID NO: 1380159 - DNA, 25 bp, Homo sapien
catcatgttccattctccaaatgca

SEQ ID NO: 1380160 - DNA, 25 bp, Homo sapien
gcgtgagtcctagtactggtggcca

SEQ ID NO: 1380161 - DNA, 25 bp, Homo sapien
cagtgcgtgagtcctagtactggtg

SEQ ID NO: 1380162 - DNA, 25 bp, Homo sapien
tctgctccgactgcacattgcccag

SEQ ID NO: 1380163 - DNA, 25 bp, Homo sapien
tgagtcctagtactggtggccacat

SEQ ID NO: 1380164 - DNA, 25 bp, Homo sapien
gcagacacggctattgtcccaagta

SEQ ID NO: 1380165 - DNA, 25 bp, Homo sapien
tatggagctgattgtggcagacacg

SEQ ID NO: 1380166 - DNA, 25 bp, Homo sapien
tgtgctgcggctatggaacaaggca

SEQ ID NO: 1380167 - DNA, 25 bp, Homo sapien
tatggctgcccagctagagctgcat

SEQ ID NO: 1380168 - DNA, 25 bp, Homo sapien
gaatggccatccttggtctggaaaa

SEQ ID NO: 1380169 - DNA, 25 bp, Homo sapien
aagaggaacccagctagccagtgaa

SEQ ID NO: 1380170 - DNA, 25 bp, Homo sapien
tgaccaaccacatggcttctaaggg

SEQ ID NO: 1380171 - DNA, 25 bp, Homo sapien
gattccagctaggaacaatgccact

SEQ ID NO: 1380172 - DNA, 25 bp, Homo sapien
tcctgaagccctagagcccttaagc

SEQ ID NO: 1380173 - DNA, 25 bp, Homo sapien
aacttctctaagagctggtgttggg

SEQ ID NO: 1380174 - DNA, 25 bp, Homo sapien
agagcccttaagcttgggcaggaga

SEQ ID NO: 1380175 - DNA, 25 bp, Homo sapien
ggctccatagagcacgtcttctggg

SEQ ID NO: 1380176 - DNA, 25 bp, Homo sapien
ctaccaagtcactctctcatgtgga

SEQ ID NO: 1380177 - DNA, 25 bp, Homo sapien
taccaagtcactctctcatgtggac

SEQ ID NO: 1380178 - DNA, 25 bp, Homo sapien
gctgccaaaagcaatcaagagctgc

SEQ ID NO: 1380179 - DNA, 25 bp, Homo sapien
tgccaaaagcaatcaagagctgcag

SEQ ID NO: 1380180 - DNA, 25 bp, Homo sapien
gaaaatgaacagtgttatgtatcag

SEQ ID NO: 1380181 - DNA, 25 bp, Homo sapien
ccaaaagcaatcaagagctgcagct

SEQ ID NO: 1380182 - DNA, 25 bp, Homo sapien
gatgctcagcaaacagctgatcagg

SEQ ID NO: 1380183 - DNA, 25 bp, Homo sapien
ggtctttgatgctcagcaaacagct

SEQ ID NO: 1380184 - DNA, 25 bp, Homo sapien
tgttcacctggactctctggccaca

SEQ ID NO: 1380185 - DNA, 25 bp, Homo sapien
cttcctgttgttcacctggactctc

SEQ ID NO: 1380186 - DNA, 25 bp, Homo sapien
tggatgttaacaaggtgaccatggc

SEQ ID NO: 1380187 - DNA, 25 bp, Homo sapien
cagtcctcctcgcatgtgaaaatgc

SEQ ID NO: 1380188 - DNA, 25 bp, Homo sapien
gacctgatatgtggaaactgttttt

SEQ ID NO: 1380189 - DNA, 25 bp, Homo sapien
ctgtttttcaataagaacctgcaaa

SEQ ID NO: 1380190 - DNA, 25 bp, Homo sapien
tatgaagggacctgatatgtggaaa

SEQ ID NO: 1380191 - DNA, 25 bp, Homo sapien
agcaactcatctatacttttaaaca

SEQ ID NO: 1380192 - DNA, 25 bp, Homo sapien
tccaaagcagaatttgtgtttccct

SEQ ID NO: 1380193 - DNA, 25 bp, Homo sapien
ctgatctccaccagtccagcctccc

SEQ ID NO: 1380194 - DNA, 25 bp, Homo sapien
tctctgatctccaccagtccagcct

SEQ ID NO: 1380195 - DNA, 25 bp, Homo sapien
ttctctgatctccaccagtccagcc

SEQ ID NO: 1380196 - DNA, 25 bp, Homo sapien
ctctgatctccaccagtccagcctc

SEQ ID NO: 1380197 - DNA, 25 bp, Homo sapien
cagcttgctctaggccaaaaagggc

SEQ ID NO: 1380198 - DNA, 25 bp, Homo sapien
acttctggttcagcttgctctaggc

SEQ ID NO: 1380199 - DNA, 25 bp, Homo sapien
ctggactttgacagcacccacttct

SEQ ID NO: 1380200 - DNA, 25 bp, Homo sapien
gactttgacagcacccacttctggt

SEQ ID NO: 1380201 - DNA, 25 bp, Homo sapien
tttatatcggcttggtcagctggaa

SEQ ID NO: 1380202 - DNA, 25 bp, Homo sapien
tgctacacccaggagataaaacaac

SEQ ID NO: 1380203 - DNA, 25 bp, Homo sapien
caaccaatatgtttgaaggaagcag

SEQ ID NO: 1380204 - DNA, 25 bp, Homo sapien
cagcaatcgcgggagggaaagtaaa

SEQ ID NO: 1380205 - DNA, 25 bp, Homo sapien
tagactagttccaattgccaatgcc

SEQ ID NO: 1380206 - DNA, 25 bp, Homo sapien
aggtcagaagcttggccttttcctt

SEQ ID NO: 1380207 - DNA, 25 bp, Homo sapien
gctgccaaagagcaactagttagac

SEQ ID NO: 1380208 - DNA, 25 bp, Homo sapien
tcctgtttgggccccttaagatgcc

SEQ ID NO: 1380209 - DNA, 25 bp, Homo sapien
aaccttctcttcaaggcccactcca

SEQ ID NO: 1380210 - DNA, 25 bp, Homo sapien
cagcttaaccacttggttaaacagg

SEQ ID NO: 1380211 - DNA, 25 bp, Homo sapien
tgccagaacctgctatcagcagcag

SEQ ID NO: 1380212 - DNA, 25 bp, Homo sapien
tgagaggaccactggggtgacaaca

SEQ ID NO: 1380213 - DNA, 25 bp, Homo sapien
atttggctcttgttccgtgatttga

SEQ ID NO: 1380214 - DNA, 25 bp, Homo sapien
gagttgctagtaagtactcaccagg

SEQ ID NO: 1380215 - DNA, 25 bp, Homo sapien
gactgaacaaatatggagttgctag

SEQ ID NO: 1380216 - DNA, 25 bp, Homo sapien
tccgtgatttgaagactgaacaaat

SEQ ID NO: 1380217 - DNA, 25 bp, Homo sapien
ttaaatgtgactcatgcagcaggtg

SEQ ID NO: 1380218 - DNA, 25 bp, Homo sapien
ggtggtggtggacccagtcactaga

SEQ ID NO: 1380219 - DNA, 25 bp, Homo sapien
tggtggtggtggacccagtcactag

SEQ ID NO: 1380220 - DNA, 25 bp, Homo sapien
tggtggtggacccagtcactagagt

SEQ ID NO: 1380221 - DNA, 25 bp, Homo sapien
gtggtggtggacccagtcactagag

SEQ ID NO: 1380222 - DNA, 25 bp, Homo sapien
tagaggcccgtgacagatccctctg

SEQ ID NO: 1380223 - DNA, 25 bp, Homo sapien
cttttgattagaggcccgtgacaga

SEQ ID NO: 1380224 - DNA, 25 bp, Homo sapien
tggcattccttttgattagaggccc

SEQ ID NO: 1380225 - DNA, 25 bp, Homo sapien
cattccttttgattagaggcccgtg

SEQ ID NO: 1380226 - DNA, 25 bp, Homo sapien
gtcaaagccacagcaactatggacc

SEQ ID NO: 1380227 - DNA, 25 bp, Homo sapien
ggttttcaagctcatggattgtgat

SEQ ID NO: 1380228 - DNA, 25 bp, Homo sapien
tatggaccccatccataaagattcc

SEQ ID NO: 1380229 - DNA, 25 bp, Homo sapien
tatttgcacaatttgtgtcaaagcc

SEQ ID NO: 1380230 - DNA, 25 bp, Homo sapien
ggttggcaccaagccccattgtgag

SEQ ID NO: 1380231 - DNA, 25 bp, Homo sapien
tatttgccacaggtagcgacttgcc

SEQ ID NO: 1380232 - DNA, 25 bp, Homo sapien
taggctgggtcacattcactttgca

SEQ ID NO: 1380233 - DNA, 25 bp, Homo sapien
cattgtgagtgaaccataggctggg

SEQ ID NO: 1380234 - DNA, 25 bp, Homo sapien
gcgctcccgcctgcaattattgtgg

SEQ ID NO: 1380235 - DNA, 25 bp, Homo sapien
ggcttttgatagttgtggtcctcag

SEQ ID NO: 1380236 - DNA, 25 bp, Homo sapien
tggcgttcctcatacttcccagtgc

SEQ ID NO: 1380237 - DNA, 25 bp, Homo sapien
agttattgtcaactggcgctcccgc

SEQ ID NO: 1380238 - DNA, 25 bp, Homo sapien
cagggtgtgctgacacctaggccag

SEQ ID NO: 1380239 - DNA, 25 bp, Homo sapien
gatgctccatctgattgtctacaga

SEQ ID NO: 1380240 - DNA, 25 bp, Homo sapien
aggaatcctgcacgccaacagtcag

SEQ ID NO: 1380241 - DNA, 25 bp, Homo sapien
cctaggccagtgttctcggagtcca

SEQ ID NO: 1380242 - DNA, 25 bp, Homo sapien
atgaaggtatgcacctacacccagc

SEQ ID NO: 1380243 - DNA, 25 bp, Homo sapien
ccatttgccactctcgccacctcct

SEQ ID NO: 1380244 - DNA, 25 bp, Homo sapien
tccatttgccactctcgccacctcc

SEQ ID NO: 1380245 - DNA, 25 bp, Homo sapien
aggtgacagctgtaagtgatcctta

SEQ ID NO: 1380246 - DNA, 25 bp, Homo sapien
gaattgatgtattgggaaggtgaca

SEQ ID NO: 1380247 - DNA, 25 bp, Homo sapien
tagcgcaggtctgtgcttcactcat

SEQ ID NO: 1380248 - DNA, 25 bp, Homo sapien
actccattgtctttgaattgatgta

SEQ ID NO: 1380249 - DNA, 25 bp, Homo sapien
ttacaagggaactagcaaatgctgc

SEQ ID NO: 1380250 - DNA, 25 bp, Homo sapien
aatgctgctgcagcgaatctttggg

SEQ ID NO: 1380251 - DNA, 25 bp, Homo sapien
gctgcagcgaatctttgggaacaga

SEQ ID NO: 1380252 - DNA, 25 bp, Homo sapien
cgaatctttgggaacagatggattt

SEQ ID NO: 1380253 - DNA, 25 bp, Homo sapien
gaggtcccaaaacaacattctgctc

SEQ ID NO: 1380254 - DNA, 25 bp, Homo sapien
ccaaaacaacattctgctcatagat

SEQ ID NO: 1380255 - DNA, 25 bp, Homo sapien
ctgaggtcccaaaacaacattctgc

SEQ ID NO: 1380256 - DNA, 25 bp, Homo sapien
tcccaaaacaacattctgctcatag

SEQ ID NO: 1380257 - DNA, 25 bp, Homo sapien
tccaagtcactagagtgaccctctg

SEQ ID NO: 1380258 - DNA, 25 bp, Homo sapien
tcttccaagtcactagagtgaccct

SEQ ID NO: 1380259 - DNA, 25 bp, Homo sapien
ttccaagtcactagagtgaccctct

SEQ ID NO: 1380260 - DNA, 25 bp, Homo sapien
ttcttccaagtcactagagtgaccc

SEQ ID NO: 1380261 - DNA, 25 bp, Homo sapien
cctgcaatacctcctcttcccttag

SEQ ID NO: 1380262 - DNA, 25 bp, Homo sapien
ctcctgcaatacctcctcttccctt

SEQ ID NO: 1380263 - DNA, 25 bp, Homo sapien
tgcaatacctcctcttcccttaggc

SEQ ID NO: 1380264 - DNA, 25 bp, Homo sapien
caatacctcctcttcccttaggctt

SEQ ID NO: 1380265 - DNA, 25 bp, Homo sapien
gaacagaactcaaacgaacacggcc

SEQ ID NO: 1380266 - DNA, 25 bp, Homo sapien
gtgaacagaactcaaacgaacacgg

SEQ ID NO: 1380267 - DNA, 25 bp, Homo sapien
acagaactcaaacgaacacggccag

SEQ ID NO: 1380268 - DNA, 25 bp, Homo sapien
agaactcaaacgaacacggccagca

SEQ ID NO: 1380269 - DNA, 25 bp, Homo sapien
taaagtgtaacgaatccttccatgc

SEQ ID NO: 1380270 - DNA, 25 bp, Homo sapien
ccatgcttctaattcgtagggagga

SEQ ID NO: 1380271 - DNA, 25 bp, Homo sapien
ggatagctagacagagtttgacctc

SEQ ID NO: 1380272 - DNA, 25 bp, Homo sapien
aaatgctgcattacgctgtctggat

SEQ ID NO: 1380273 - DNA, 25 bp, Homo sapien
caattggaccttcgcttagacttcc

SEQ ID NO: 1380274 - DNA, 25 bp, Homo sapien
gaagttttccgcaaagccgctctac

SEQ ID NO: 1380275 - DNA, 25 bp, Homo sapien
gctcattcctccaattggaccttcg

SEQ ID NO: 1380276 - DNA, 25 bp, Homo sapien
tgaggatttgaagttttccgcaaag

SEQ ID NO: 1380277 - DNA, 25 bp, Homo sapien
tcaccatcaacttctactaagccct

SEQ ID NO: 1380278 - DNA, 25 bp, Homo sapien
ctgagggcctcctcttgggatactt

SEQ ID NO: 1380279 - DNA, 25 bp, Homo sapien
aacttctactaagccctcctcactg

SEQ ID NO: 1380280 - DNA, 25 bp, Homo sapien
gggcctcctcttgggatactttgcc

SEQ ID NO: 1380281 - DNA, 25 bp, Homo sapien
caaggtgtctctctcatatctgaga

SEQ ID NO: 1380282 - DNA, 25 bp, Homo sapien
aaggtgtctctctcatatctgagat

SEQ ID NO: 1380283 - DNA, 25 bp, Homo sapien
tccaaggtgtctctctcatatctga

SEQ ID NO: 1380284 - DNA, 25 bp, Homo sapien
tttccaaggtgtctctctcatatct

SEQ ID NO: 1380285 - DNA, 25 bp, Homo sapien
tggctgcaatcacacccgagcgcca

SEQ ID NO: 1380286 - DNA, 25 bp, Homo sapien
gttccgcccacgacttctggtgccg

SEQ ID NO: 1380287 - DNA, 25 bp, Homo sapien
ctggtgccgggtcggcggcgactgg

SEQ ID NO: 1380288 - DNA, 25 bp, Homo sapien
tcgccgaagcgctggaaaagccgtt

SEQ ID NO: 1380289 - DNA, 25 bp, Homo sapien
ggctggtgccagaaagggtgtgtct

SEQ ID NO: 1380290 - DNA, 25 bp, Homo sapien
gtgcgaagccggctgggcgggctgg

SEQ ID NO: 1380291 - DNA, 25 bp, Homo sapien
tcttcactgccctaagatggccttt

SEQ ID NO: 1380292 - DNA, 25 bp, Homo sapien
gcgggctggtgccagaaagggtgtg

SEQ ID NO: 1380293 - DNA, 25 bp, Homo sapien
atgcaccgatggcaactggagttgt

SEQ ID NO: 1380294 - DNA, 25 bp, Homo sapien
aactggagttgtcatccgatggtgg

SEQ ID NO: 1380295 - DNA, 25 bp, Homo sapien
tgggccactttccgtaaacacagga

SEQ ID NO: 1380296 - DNA, 25 bp, Homo sapien
acaggatgcaccgatggcaactgga

SEQ ID NO: 1380297 - DNA, 25 bp, Homo sapien
tcgcggaagcaccaaagggcggtcc

SEQ ID NO: 1380298 - DNA, 25 bp, Homo sapien
caatacggtggtaggaatctctgcc

SEQ ID NO: 1380299 - DNA, 25 bp, Homo sapien
actggaggctgcaggcaatacggtg

SEQ ID NO: 1380300 - DNA, 25 bp, Homo sapien
gaatctctgccggtttccagcgtcg

SEQ ID NO: 1380301 - DNA, 25 bp, Homo sapien
tattacccgtgcaggagactgggcc

SEQ ID NO: 1380302 - DNA, 25 bp, Homo sapien
agccaaagtctagttgagaaaaatt

SEQ ID NO: 1380303 - DNA, 25 bp, Homo sapien
ggaatatcgtcacaacgccgctgtc

SEQ ID NO: 1380304 - DNA, 25 bp, Homo sapien
tctgtagcgaagacttgattacccc

SEQ ID NO: 1380305 - DNA, 25 bp, Homo sapien
ttaatttgtagtgttccctgccagt

SEQ ID NO: 1380306 - DNA, 25 bp, Homo sapien
gcttgtaacactctagtgactcacc

SEQ ID NO: 1380307 - DNA, 25 bp, Homo sapien
aatttgtagtgttccctgccagtaa

SEQ ID NO: 1380308 - DNA, 25 bp, Homo sapien
tccctgccagtaagcttgtaacact

SEQ ID NO: 1380309 - DNA, 25 bp, Homo sapien
cttttcggccttctgtgatgagagg

SEQ ID NO: 1380310 - DNA, 25 bp, Homo sapien
gaaggactttgttcgcggttgatga

SEQ ID NO: 1380311 - DNA, 25 bp, Homo sapien
ataaaatgggcttttcggccttctg

SEQ ID NO: 1380312 - DNA, 25 bp, Homo sapien
gacttcttctagctgccgagggctc

SEQ ID NO: 1380313 - DNA, 25 bp, Homo sapien
tgctcctgcagtgatgtgctgctgc

SEQ ID NO: 1380314 - DNA, 25 bp, Homo sapien
actgctgctcctgcagtgatgtgct

SEQ ID NO: 1380315 - DNA, 25 bp, Homo sapien
gctgctggggctggatagcagccat

SEQ ID NO: 1380316 - DNA, 25 bp, Homo sapien
tgcagagaactgctgctcctgcagt

SEQ ID NO: 1380317 - DNA, 25 bp, Homo sapien
ttattgggaggtggctaaaatgcac

SEQ ID NO: 1380318 - DNA, 25 bp, Homo sapien
tcagtgaatcttgggtttaaggccc

SEQ ID NO: 1380319 - DNA, 25 bp, Homo sapien
taaggcccattagaaaaatagcagg

SEQ ID NO: 1380320 - DNA, 25 bp, Homo sapien
tgagagcttatatgtaattgcctgc

SEQ ID NO: 1380321 - DNA, 25 bp, Homo sapien
taccttggctctctagcttgggaca

SEQ ID NO: 1380322 - DNA, 25 bp, Homo sapien
ttattgcaaccgtccagctaccagg

SEQ ID NO: 1380323 - DNA, 25 bp, Homo sapien
tgcagctgagatcctggcgcgagat

SEQ ID NO: 1380324 - DNA, 25 bp, Homo sapien
cagagcacagcgattcatgttggca

SEQ ID NO: 1380325 - DNA, 25 bp, Homo sapien
gattttactatgctgcccaagtgaa

SEQ ID NO: 1380326 - DNA, 25 bp, Homo sapien
gcttggatgtaactcagatgccttc

SEQ ID NO: 1380327 - DNA, 25 bp, Homo sapien
tgaagatgcagtctcagaaggatca

SEQ ID NO: 1380328 - DNA, 25 bp, Homo sapien
ccttctgtgatgaggatagggttca

SEQ ID NO: 1380329 - DNA, 25 bp, Homo sapien
acagttatgattagaatgcacagtc

SEQ ID NO: 1380330 - DNA, 25 bp, Homo sapien
cagttcacatccttcaggcccagtt

SEQ ID NO: 1380331 - DNA, 25 bp, Homo sapien
ttttgcacagttatgattagaatgc

SEQ ID NO: 1380332 - DNA, 25 bp, Homo sapien
tcagttcacatccttcaggcccagt

SEQ ID NO: 1380333 - DNA, 25 bp, Homo sapien
gaaagatacgccaaaatcgtcgaga

SEQ ID NO: 1380334 - DNA, 25 bp, Homo sapien
gatgatgtctctgttcacagcgggc

SEQ ID NO: 1380335 - DNA, 25 bp, Homo sapien
caggtctgaagatcgatgggtacac

SEQ ID NO: 1380336 - DNA, 25 bp, Homo sapien
tttgagacttttcagtaggccaggg

SEQ ID NO: 1380337 - DNA, 25 bp, Homo sapien
gataacctggtaacagagtgcctgg

SEQ ID NO: 1380338 - DNA, 25 bp, Homo sapien
tcggagaacgagtcctaggtatgca

SEQ ID NO: 1380339 - DNA, 25 bp, Homo sapien
gacgcctttcagaacgcctatttgg

SEQ ID NO: 1380340 - DNA, 25 bp, Homo sapien
aaaggatcctagaccgttgcagctc

SEQ ID NO: 1380341 - DNA, 25 bp, Homo sapien
ccttaaccagtaacattcccgagat

SEQ ID NO: 1380342 - DNA, 25 bp, Homo sapien
gctgacatgattcttctggatgaca

SEQ ID NO: 1380343 - DNA, 25 bp, Homo sapien
tgcctcaattgtgactggagtagag

SEQ ID NO: 1380344 - DNA, 25 bp, Homo sapien
ccagtgtgcttgtctcataagctaa

SEQ ID NO: 1380345 - DNA, 25 bp, Homo sapien
tcagtattaccactcttcaaggcag

SEQ ID NO: 1380346 - DNA, 25 bp, Homo sapien
cagtatccagtgtgtgtcccaatcc

SEQ ID NO: 1380347 - DNA, 25 bp, Homo sapien
tgtcacaacagtcacagatcgatag

SEQ ID NO: 1380348 - DNA, 25 bp, Homo sapien
caatcccggcttcacagaatcagta

SEQ ID NO: 1380349 - DNA, 25 bp, Homo sapien
gaagactaggtctctggtggtttag

SEQ ID NO: 1380350 - DNA, 25 bp, Homo sapien
gcagcgtggttaaattggatgccag

SEQ ID NO: 1380351 - DNA, 25 bp, Homo sapien
tctggtggtttaggatgaaaccctg

SEQ ID NO: 1380352 - DNA, 25 bp, Homo sapien
ggcaacaaagtaattggctggtggc

SEQ ID NO: 1380353 - DNA, 25 bp, Homo sapien
ctccgagtggactgggatgaccgct

SEQ ID NO: 1380354 - DNA, 25 bp, Homo sapien
ggctgagaacggcttcctcccaatt

SEQ ID NO: 1380355 - DNA, 25 bp, Homo sapien
aattcacctgttgggcctccgagtg

SEQ ID NO: 1380356 - DNA, 25 bp, Homo sapien
gatgaccgctggatcaacgatgtgg

SEQ ID NO: 1380357 - DNA, 25 bp, Homo sapien
ctcatcttcgtatatgacgaagtca

SEQ ID NO: 1380358 - DNA, 25 bp, Homo sapien
tatgacgaagtcagaaaactcatca

SEQ ID NO: 1380359 - DNA, 25 bp, Homo sapien
tcttcgtatatgacgaagtcagaaa

SEQ ID NO: 1380360 - DNA, 25 bp, Homo sapien
tatatgacgaagtcagaaaactcat

SEQ ID NO: 1380361 - DNA, 25 bp, Homo sapien
ggaaggtactttactggcccagctg

SEQ ID NO: 1380362 - DNA, 25 bp, Homo sapien
tctaccctggtaggaaagcaccgca

SEQ ID NO: 1380363 - DNA, 25 bp, Homo sapien
tatactaaactgcagatgaggccct

SEQ ID NO: 1380364 - DNA, 25 bp, Homo sapien
catctcaagtgtctctagcccaggg

SEQ ID NO: 1380365 - DNA, 25 bp, Homo sapien
ccaacgcacatacgctgctgcgatg

SEQ ID NO: 1380366 - DNA, 25 bp, Homo sapien
gactccctgtatgtctactttcggc

SEQ ID NO: 1380367 - DNA, 25 bp, Homo sapien
gcactggtggtatccgtactgcgac

SEQ ID NO: 1380368 - DNA, 25 bp, Homo sapien
ctgcgatgaaggtcatgggcatttc

SEQ ID NO: 1380369 - DNA, 25 bp, Homo sapien
ctgatgcaaaagatttgaaacactc

SEQ ID NO: 1380370 - DNA, 25 bp, Homo sapien
aagatttgaaacactctgagacttt

SEQ ID NO: 1380371 - DNA, 25 bp, Homo sapien
aaaagatttgaaacactctgagact

SEQ ID NO: 1380372 - DNA, 25 bp, Homo sapien
gatttgaaacactctgagactttag

SEQ ID NO: 1380373 - DNA, 25 bp, Homo sapien
gaaagttctacagccaaacatttga

SEQ ID NO: 1380374 - DNA, 25 bp, Homo sapien
gctgctcttcatgggtaaagctggc

SEQ ID NO: 1380375 - DNA, 25 bp, Homo sapien
tgacaatcctttgaatagaaagttc

SEQ ID NO: 1380376 - DNA, 25 bp, Homo sapien
tgctgtgggttagagctttcccaac

SEQ ID NO: 1380377 - DNA, 25 bp, Homo sapien
ctgaaaccagacctcccgtctttct

SEQ ID NO: 1380378 - DNA, 25 bp, Homo sapien
tgagccccagatgtacaaatccagt

SEQ ID NO: 1380379 - DNA, 25 bp, Homo sapien
tgctcgacccctcgtttcctcaggg

SEQ ID NO: 1380380 - DNA, 25 bp, Homo sapien
cagctctgatctggtcctctcctga

SEQ ID NO: 1380381 - DNA, 25 bp, Homo sapien
ggggatgtgtcccttgcctcctgtg

SEQ ID NO: 1380382 - DNA, 25 bp, Homo sapien
gggatgtgtcccttgcctcctgtgg

SEQ ID NO: 1380383 - DNA, 25 bp, Homo sapien
tgcagagaggcctcctctgcgttca

SEQ ID NO: 1380384 - DNA, 25 bp, Homo sapien
cctcctgtgggctgcagagaggcct

SEQ ID NO: 1380385 - DNA, 25 bp, Homo sapien
cagatgcatggtggaagaaatagga

SEQ ID NO: 1380386 - DNA, 25 bp, Homo sapien
ataggaaggccctcaagcagtggtt

SEQ ID NO: 1380387 - DNA, 25 bp, Homo sapien
catggtggaagaaataggaaggccc

SEQ ID NO: 1380388 - DNA, 25 bp, Homo sapien
gaagaaataggaaggccctcaagca

SEQ ID NO: 1380389 - DNA, 25 bp, Homo sapien
ttagcatacatgcttccaaagccag

SEQ ID NO: 1380390 - DNA, 25 bp, Homo sapien
gggtcatggtcatctctgtgtggtt

SEQ ID NO: 1380391 - DNA, 25 bp, Homo sapien
cacaggggtcatggtcatctctgtg

SEQ ID NO: 1380392 - DNA, 25 bp, Homo sapien
gtcatggtcatctctgtgtggttcc

SEQ ID NO: 1380393 - DNA, 25 bp, Homo sapien
tcttcacttttttcaccacactcag

SEQ ID NO: 1380394 - DNA, 25 bp, Homo sapien
cacactcagctctccttcctttctt

SEQ ID NO: 1380395 - DNA, 25 bp, Homo sapien
actcagctctccttcctttcttctc

SEQ ID NO: 1380396 - DNA, 25 bp, Homo sapien
ccacactcagctctccttcctttct

SEQ ID NO: 1380397 - DNA, 25 bp, Homo sapien
tatttcaatgtgttcttgcaacatg

SEQ ID NO: 1380398 - DNA, 25 bp, Homo sapien
atgtgttcttgcaacatgggtattg

SEQ ID NO: 1380399 - DNA, 25 bp, Homo sapien
cttatttcaatgtgttcttgcaaca

SEQ ID NO: 1380400 - DNA, 25 bp, Homo sapien
tgttcttgcaacatgggtattgttt

SEQ ID NO: 1380401 - DNA, 25 bp, Homo sapien
tagattgagccaggatttctgacac

SEQ ID NO: 1380402 - DNA, 25 bp, Homo sapien
gagtgttctctggatatgacatgga

SEQ ID NO: 1380403 - DNA, 25 bp, Homo sapien
gaggataaaacccaccatgaaggca

SEQ ID NO: 1380404 - DNA, 25 bp, Homo sapien
tctacaacatagtgaattcagccag

SEQ ID NO: 1380405 - DNA, 25 bp, Homo sapien
ccaagtgtgaccacagagtgagccc

SEQ ID NO: 1380406 - DNA, 25 bp, Homo sapien
gaaagaatactgtacagaggccctc

SEQ ID NO: 1380407 - DNA, 25 bp, Homo sapien
aaacattgctctaggtctcaggcct

SEQ ID NO: 1380408 - DNA, 25 bp, Homo sapien
tgtctaatgtgctcagatagcctct

SEQ ID NO: 1380409 - DNA, 25 bp, Homo sapien
tgtggtgccaagctcacaaattcag

SEQ ID NO: 1380410 - DNA, 25 bp, Homo sapien
caaaggccatatcagggccactgca

SEQ ID NO: 1380411 - DNA, 25 bp, Homo sapien
tccctaaccaaagcctgtcatgtgt

SEQ ID NO: 1380412 - DNA, 25 bp, Homo sapien
cacataagggtgaaagcataggaca

SEQ ID NO: 1380413 - DNA, 25 bp, Homo sapien
ggtgggcaccgtcacagtgccatct

SEQ ID NO: 1380414 - DNA, 25 bp, Homo sapien
gtgggcaccgtcacagtgccatctc

SEQ ID NO: 1380415 - DNA, 25 bp, Homo sapien
tgcacgatttcactcggccctcaca

SEQ ID NO: 1380416 - DNA, 25 bp, Homo sapien
tcggccctcacacaccccacgaggt

SEQ ID NO: 1380417 - DNA, 25 bp, Homo sapien
cattataaatttggagatgtgctcc

SEQ ID NO: 1380418 - DNA, 25 bp, Homo sapien
tgatgaagacaagagtttattattt

SEQ ID NO: 1380419 - DNA, 25 bp, Homo sapien
cagccaaggccatgaagtcccactt

SEQ ID NO: 1380420 - DNA, 25 bp, Homo sapien
tccagggacttgttatttcgtcttc

SEQ ID NO: 1380421 - DNA, 25 bp, Homo sapien
tattgctgagactggatgcttgaag

SEQ ID NO: 1380422 - DNA, 25 bp, Homo sapien
ctgagactggatgcttgaagcggta

SEQ ID NO: 1380423 - DNA, 25 bp, Homo sapien
ttgaagcggtaagcactgttcactt

SEQ ID NO: 1380424 - DNA, 25 bp, Homo sapien
actggatgcttgaagcggtaagcac

SEQ ID NO: 1380425 - DNA, 25 bp, Homo sapien
gcagaggctgaataagaactagttt

SEQ ID NO: 1380426 - DNA, 25 bp, Homo sapien
tacaggagctgctatcagcgactct

SEQ ID NO: 1380427 - DNA, 25 bp, Homo sapien
tgctatcagcgactcttttccacat

SEQ ID NO: 1380428 - DNA, 25 bp, Homo sapien
aagaatacaggagctgctatcagcg

SEQ ID NO: 1380429 - DNA, 25 bp, Homo sapien
tcagccttgttgactggaagatcct

SEQ ID NO: 1380430 - DNA, 25 bp, Homo sapien
tttgtccctccgaccacttcaagga

SEQ ID NO: 1380431 - DNA, 25 bp, Homo sapien
gttgtcaaacaaatgagtgcctctg

SEQ ID NO: 1380432 - DNA, 25 bp, Homo sapien
gcacctgcctccaaaattagttgtc

SEQ ID NO: 1380433 - DNA, 25 bp, Homo sapien
cattggcaagggctctgttcaggaa

SEQ ID NO: 1380434 - DNA, 25 bp, Homo sapien
gaatcttgcctatgcttcttctgta

SEQ ID NO: 1380435 - DNA, 25 bp, Homo sapien
tgtaagttggcacatcagagtccat

SEQ ID NO: 1380436 - DNA, 25 bp, Homo sapien
ccatgccccgtttcctagggatcag

SEQ ID NO: 1380437 - DNA, 25 bp, Homo sapien
aagagcagctgatccggcctggatc

SEQ ID NO: 1380438 - DNA, 25 bp, Homo sapien
cctggatcaggagtgcccacgtgca

SEQ ID NO: 1380439 - DNA, 25 bp, Homo sapien
tattactggctgtgctcagcgggca

SEQ ID NO: 1380440 - DNA, 25 bp, Homo sapien
tattgtgatggcgaaggaggaaaca

SEQ ID NO: 1380441 - DNA, 25 bp, Homo sapien
tgtgcatctcagagtgaaagctccc

SEQ ID NO: 1380442 - DNA, 25 bp, Homo sapien
ggagcaacccgacagtgcaggtcat

SEQ ID NO: 1380443 - DNA, 25 bp, Homo sapien
tattattgatgtatcccgctgccca

SEQ ID NO: 1380444 - DNA, 25 bp, Homo sapien
tctctgcggaaagccactcagtgca

SEQ ID NO: 1380445 - DNA, 25 bp, Homo sapien
ctcacacctcagtccagatagaaca

SEQ ID NO: 1380446 - DNA, 25 bp, Homo sapien
gaacaagggcagccttgctcagaag

SEQ ID NO: 1380447 - DNA, 25 bp, Homo sapien
tgggttcccctaccgcctcctcaca

SEQ ID NO: 1380448 - DNA, 25 bp, Homo sapien
ctcagtccagatagaacaagggcag

SEQ ID NO: 1380449 - DNA, 25 bp, Homo sapien
aatatctgacggagagagggctgaa

SEQ ID NO: 1380450 - DNA, 25 bp, Homo sapien
caattgcataggaatatctgacgga

SEQ ID NO: 1380451 - DNA, 25 bp, Homo sapien
taggtgaaactgtagtgcaattgca

SEQ ID NO: 1380452 - DNA, 25 bp, Homo sapien
gggtgtatatgcccaaggaatccta

SEQ ID NO: 1380453 - DNA, 25 bp, Homo sapien
cattgatcttccagcatcatcaaca

SEQ ID NO: 1380454 - DNA, 25 bp, Homo sapien
tcaacatgccacatcactttgcaaa

SEQ ID NO: 1380455 - DNA, 25 bp, Homo sapien
tccttgcagcattctgagctcttcc

SEQ ID NO: 1380456 - DNA, 25 bp, Homo sapien
tctctctattgaatgcaggccaagc

SEQ ID NO: 1380457 - DNA, 25 bp, Homo sapien
atcgcttgaactggggaggggaagt

SEQ ID NO: 1380458 - DNA, 25 bp, Homo sapien
ggaggggaagttcagtgagccgaga

SEQ ID NO: 1380459 - DNA, 25 bp, Homo sapien
gcctgggcgacagagcgagactcca

SEQ ID NO: 1380460 - DNA, 25 bp, Homo sapien
cctgggcgacagagcgagactccat

SEQ ID NO: 1380461 - DNA, 25 bp, Homo sapien
agtgaatttattggccaaaaccata

SEQ ID NO: 1380462 - DNA, 25 bp, Homo sapien
ccatagatatagatagggttagcaa

SEQ ID NO: 1380463 - DNA, 25 bp, Homo sapien
gaattgactatttgtcatctcttga

SEQ ID NO: 1380464 - DNA, 25 bp, Homo sapien
tgtcatctcttgagacttcaagttc

SEQ ID NO: 1380465 - DNA, 25 bp, Homo sapien
tgtaagtcctccctgaactgttgcc

SEQ ID NO: 1380466 - DNA, 25 bp, Homo sapien
tgccccgaagggacatcagagccat

SEQ ID NO: 1380467 - DNA, 25 bp, Homo sapien
gcttgtaagtcctccctgaactgtt

SEQ ID NO: 1380468 - DNA, 25 bp, Homo sapien
ctgaactgttgcctgccccgaaggg

SEQ ID NO: 1380469 - DNA, 25 bp, Homo sapien
tgacctcgtgttttatctcatgccc

SEQ ID NO: 1380470 - DNA, 25 bp, Homo sapien
gcagatgacctcgtgttttatctca

SEQ ID NO: 1380471 - DNA, 25 bp, Homo sapien
agtgccattgcagatgacctcgtgt

SEQ ID NO: 1380472 - DNA, 25 bp, Homo sapien
ccattgcagatgacctcgtgtttta

SEQ ID NO: 1380473 - DNA, 25 bp, Homo sapien
aatcaaacagagacacagtaagttc

SEQ ID NO: 1380474 - DNA, 25 bp, Homo sapien
tcaatcaaacagagacacagtaagt

SEQ ID NO: 1380475 - DNA, 25 bp, Homo sapien
caatcaaacagagacacagtaagtt

SEQ ID NO: 1380476 - DNA, 25 bp, Homo sapien
ctcaatcaaacagagacacagtaag

SEQ ID NO: 1380477 - DNA, 25 bp, Homo sapien
tgggttgctttgcttgaagcttaag

SEQ ID NO: 1380478 - DNA, 25 bp, Homo sapien
tgcggctcgaaagaaaagccaaggg

SEQ ID NO: 1380479 - DNA, 25 bp, Homo sapien
catttgcaatctgtctgcggctcga

SEQ ID NO: 1380480 - DNA, 25 bp, Homo sapien
tcattgcagcgttgcttgggttgct

SEQ ID NO: 1380481 - DNA, 25 bp, Homo sapien
gaggctttaagatcaggggccaatc

SEQ ID NO: 1380482 - DNA, 25 bp, Homo sapien
agacccagaggctttaagatcaggg

SEQ ID NO: 1380483 - DNA, 25 bp, Homo sapien
agatcaggggccaatctggaatcat

SEQ ID NO: 1380484 - DNA, 25 bp, Homo sapien
gctttaagatcaggggccaatctgg

SEQ ID NO: 1380485 - DNA, 25 bp, Homo sapien
ctaacttggcttgtgggtccctatg

SEQ ID NO: 1380486 - DNA, 25 bp, Homo sapien
gatctaacttggcttgtgggtccct

SEQ ID NO: 1380487 - DNA, 25 bp, Homo sapien
tccactgaagatctaacttggcttg

SEQ ID NO: 1380488 - DNA, 25 bp, Homo sapien
ctgaagatctaacttggcttgtggg

SEQ ID NO: 1380489 - DNA, 25 bp, Homo sapien
gcatctgggatcatgagggtatcgt

SEQ ID NO: 1380490 - DNA, 25 bp, Homo sapien
tatcgtgttggagtgagctgggcta

SEQ ID NO: 1380491 - DNA, 25 bp, Homo sapien
cacagattcctgcttcacgattggc

SEQ ID NO: 1380492 - DNA, 25 bp, Homo sapien
agtatgatcgctctacccttggcct

SEQ ID NO: 1380493 - DNA, 25 bp, Homo sapien
acacaccctggcgaatacttgatgc

SEQ ID NO: 1380494 - DNA, 25 bp, Homo sapien
tggaacagggagaactctacaaatg

SEQ ID NO: 1380495 - DNA, 25 bp, Homo sapien
caaatggaattcaagtaggattgcc

SEQ ID NO: 1380496 - DNA, 25 bp, Homo sapien
gatagaaccatccaatgtttccaag

SEQ ID NO: 1380497 - DNA, 25 bp, Homo sapien
gggtgaccagcagaagagaatcctg

SEQ ID NO: 1380498 - DNA, 25 bp, Homo sapien
gtgtcgtgtgagaattcgagcttcc

SEQ ID NO: 1380499 - DNA, 25 bp, Homo sapien
agtgctgcaagggtgtcgtgtgaga

SEQ ID NO: 1380500 - DNA, 25 bp, Homo sapien
gcttccgtctcttcatttgtacagg

SEQ ID NO: 1380501 - DNA, 25 bp, Homo sapien
cccagtcatcctcactgtaccacct

SEQ ID NO: 1380502 - DNA, 25 bp, Homo sapien
tttcttgtcccagtcatcctcactg

SEQ ID NO: 1380503 - DNA, 25 bp, Homo sapien
cagcttctttcttgtcccagtcatc

SEQ ID NO: 1380504 - DNA, 25 bp, Homo sapien
tcttgtcccagtcatcctcactgta

SEQ ID NO: 1380505 - DNA, 25 bp, Homo sapien
ccttctgaaccttgcctgttcgttc

SEQ ID NO: 1380506 - DNA, 25 bp, Homo sapien
tctgaaccttgcctgttcgttcctt

SEQ ID NO: 1380507 - DNA, 25 bp, Homo sapien
tgaaccttgcctgttcgttccttcc

SEQ ID NO: 1380508 - DNA, 25 bp, Homo sapien
gtggctcccttctgaaccttgcctg

SEQ ID NO: 1380509 - DNA, 25 bp, Homo sapien
cctttcgccttgtttatgccatcag

SEQ ID NO: 1380510 - DNA, 25 bp, Homo sapien
ggctggttacaagcctcagaggccc

SEQ ID NO: 1380511 - DNA, 25 bp, Homo sapien
gccatggaggactgttgttgccgaa

SEQ ID NO: 1380512 - DNA, 25 bp, Homo sapien
tctgatttgctaccaagcctttcgc

SEQ ID NO: 1380513 - DNA, 25 bp, Homo sapien
tcagcagacggtggaggcccctgct

SEQ ID NO: 1380514 - DNA, 25 bp, Homo sapien
aaaggaaggcttctggagacacata

SEQ ID NO: 1380515 - DNA, 25 bp, Homo sapien
cctgctcggccctggacctgcaggc

SEQ ID NO: 1380516 - DNA, 25 bp, Homo sapien
gcaggccttcttccaacaactgtca

SEQ ID NO: 1380517 - DNA, 25 bp, Homo sapien
cagctgacatggtattttcctccgg

SEQ ID NO: 1380518 - DNA, 25 bp, Homo sapien
ggaaacaggaaagcgatgtgagaac

SEQ ID NO: 1380519 - DNA, 25 bp, Homo sapien
tcaaatccatattgcaggagaggga

SEQ ID NO: 1380520 - DNA, 25 bp, Homo sapien
gaagcacagtggaattttagcagtt

SEQ ID NO: 1380521 - DNA, 25 bp, Homo sapien
aaaaccctgggttcagctgacggtg

SEQ ID NO: 1380522 - DNA, 25 bp, Homo sapien
taaggttctacatgtcgggaggtca

SEQ ID NO: 1380523 - DNA, 25 bp, Homo sapien
gaaagatgacaatggcgtcagccac

SEQ ID NO: 1380524 - DNA, 25 bp, Homo sapien
gggttggatcaaacaggctcgagca

SEQ ID NO: 1380525 - DNA, 25 bp, Homo sapien
gaacatgctccgcagtcttgagacc

SEQ ID NO: 1380526 - DNA, 25 bp, Homo sapien
tcttgagaccattacacggctggac

SEQ ID NO: 1380527 - DNA, 25 bp, Homo sapien
tccagtgcccctacatgaagtggtg

SEQ ID NO: 1380528 - DNA, 25 bp, Homo sapien
tgcaaatgagtcctccaaagccaag

SEQ ID NO: 1380529 - DNA, 25 bp, Homo sapien
tatggcctaccaagcttaaatcgtc

SEQ ID NO: 1380530 - DNA, 25 bp, Homo sapien
agtaggtgaaagagtgagccaattc

SEQ ID NO: 1380531 - DNA, 25 bp, Homo sapien
caacaggtcaacaacaaacactagt

SEQ ID NO: 1380532 - DNA, 25 bp, Homo sapien
cactagtttacatactcagtaggtg

SEQ ID NO: 1380533 - DNA, 25 bp, Homo sapien
caaagtctgacaaatcactgcccag

SEQ ID NO: 1380534 - DNA, 25 bp, Homo sapien
cactgcccaggtgtactcatgcaaa

SEQ ID NO: 1380535 - DNA, 25 bp, Homo sapien
cctgggacaagtatggcaactctac

SEQ ID NO: 1380536 - DNA, 25 bp, Homo sapien
ggtttaagatggtcactggagctcc

SEQ ID NO: 1380537 - DNA, 25 bp, Homo sapien
ccagggtgaagacaccatcagttct

SEQ ID NO: 1380538 - DNA, 25 bp, Homo sapien
tacacagagatttgtgcactgctga

SEQ ID NO: 1380539 - DNA, 25 bp, Homo sapien
tttctcagatgaagaccctcagtcc

SEQ ID NO: 1380540 - DNA, 25 bp, Homo sapien
tgcttgccgtcataaaaccagttta

SEQ ID NO: 1380541 - DNA, 25 bp, Homo sapien
ggcactcagaggacttctggaataa

SEQ ID NO: 1380542 - DNA, 25 bp, Homo sapien
tgtttatctacttctacaagggcac

SEQ ID NO: 1380543 - DNA, 25 bp, Homo sapien
ttctacaagggcactcagaggactt

SEQ ID NO: 1380544 - DNA, 25 bp, Homo sapien
ccttttggtcttaaatgcagctttc

SEQ ID NO: 1380545 - DNA, 25 bp, Homo sapien
ggcaaattagacagctctggatata

SEQ ID NO: 1380546 - DNA, 25 bp, Homo sapien
ttacctcctgaggatcagtatgcct

SEQ ID NO: 1380547 - DNA, 25 bp, Homo sapien
gcttcatttgcctaaaacgtcctca

SEQ ID NO: 1380548 - DNA, 25 bp, Homo sapien
caagccaagcttggctgaccacagg

SEQ ID NO: 1380549 - DNA, 25 bp, Homo sapien
gagaacctgggcctgttccaaagtg

SEQ ID NO: 1380550 - DNA, 25 bp, Homo sapien
aacccttagggttcacatgcagtga

SEQ ID NO: 1380551 - DNA, 25 bp, Homo sapien
cactgaaggaccttgcgggactgtc

SEQ ID NO: 1380552 - DNA, 25 bp, Homo sapien
ctttataggacaaggttaagctcac

SEQ ID NO: 1380553 - DNA, 25 bp, Homo sapien
gtgccgagcccgtgaacttcccttg

SEQ ID NO: 1380554 - DNA, 25 bp, Homo sapien
gggcaatatccttacatccgggacc

SEQ ID NO: 1380555 - DNA, 25 bp, Homo sapien
aaacatgagttgtggacttggggcc

SEQ ID NO: 1380556 - DNA, 25 bp, Homo sapien
ctttcctttgtctaacgggcaatat

SEQ ID NO: 1380557 - DNA, 25 bp, Homo sapien
tcaccaggaaaaggcgcaaggcaaa

SEQ ID NO: 1380558 - DNA, 25 bp, Homo sapien
tgcctctagtgtggagtcgacgcta

SEQ ID NO: 1380559 - DNA, 25 bp, Homo sapien
tccccagatggaagtaagctgatac

SEQ ID NO: 1380560 - DNA, 25 bp, Homo sapien
cagtgaggtcgtccttctgaggcct

SEQ ID NO: 1380561 - DNA, 25 bp, Homo sapien
cactcactgctaggagaggccagaa

SEQ ID NO: 1380562 - DNA, 25 bp, Homo sapien
actgctaggagaggccagaactcca

SEQ ID NO: 1380563 - DNA, 25 bp, Homo sapien
tccaacactgtcactcactgctagg

SEQ ID NO: 1380564 - DNA, 25 bp, Homo sapien
tgtcactcactgctaggagaggcca

SEQ ID NO: 1380565 - DNA, 25 bp, Homo sapien
agctttagagctgatggcgccttca

SEQ ID NO: 1380566 - DNA, 25 bp, Homo sapien
tcaatgagttcttcccgggagagag

SEQ ID NO: 1380567 - DNA, 25 bp, Homo sapien
taaaggagaccttgcaggccagaac

SEQ ID NO: 1380568 - DNA, 25 bp, Homo sapien
gctgatttgctctgacaggccggcg

SEQ ID NO: 1380569 - DNA, 25 bp, Homo sapien
gctctgaattgggtctggcgggagt

SEQ ID NO: 1380570 - DNA, 25 bp, Homo sapien
tctgaattgggtctggcgggagttg

SEQ ID NO: 1380571 - DNA, 25 bp, Homo sapien
tgaattgggtctggcgggagttgga

SEQ ID NO: 1380572 - DNA, 25 bp, Homo sapien
cagctctgaattgggtctggcggga

SEQ ID NO: 1380573 - DNA, 25 bp, Homo sapien
agactgaaaggttaatatgaaacca

SEQ ID NO: 1380574 - DNA, 25 bp, Homo sapien
gaaaggttaatatgaaaccagctga

SEQ ID NO: 1380575 - DNA, 25 bp, Homo sapien
ctgaaaggttaatatgaaaccagct

SEQ ID NO: 1380576 - DNA, 25 bp, Homo sapien
aaggttaatatgaaaccagctgata

SEQ ID NO: 1380577 - DNA, 25 bp, Homo sapien
caggccaggcctttgtctgaacaga

SEQ ID NO: 1380578 - DNA, 25 bp, Homo sapien
cgagacattccgagccaataaggag

SEQ ID NO: 1380579 - DNA, 25 bp, Homo sapien
tgaagttcctcgatgaccccatgac

SEQ ID NO: 1380580 - DNA, 25 bp, Homo sapien
gctcttatccgacacctgggcaggt

SEQ ID NO: 1380581 - DNA, 25 bp, Homo sapien
ctaacagcattttgtcttggggtca

SEQ ID NO: 1380582 - DNA, 25 bp, Homo sapien
gagagaaggagtgaaaacacgacca

SEQ ID NO: 1380583 - DNA, 25 bp, Homo sapien
agagaaggagtgaaaacacgaccag

SEQ ID NO: 1380584 - DNA, 25 bp, Homo sapien
gagagagaaggagtgaaaacacgac

SEQ ID NO: 1380585 - DNA, 25 bp, Homo sapien
aggagagagaaggagtgaaaacacg

SEQ ID NO: 1380586 - DNA, 25 bp, Homo sapien
tgggctgactttcctgcaatgctct

SEQ ID NO: 1380587 - DNA, 25 bp, Homo sapien
caggcaggccccctgatactcaggg

SEQ ID NO: 1380588 - DNA, 25 bp, Homo sapien
cctgcaatgctctagagcggagcca

SEQ ID NO: 1380589 - DNA, 25 bp, Homo sapien
caagaagccggtggtaaatactcgc

SEQ ID NO: 1380590 - DNA, 25 bp, Homo sapien
tgccacggtctgagagagacaaact

SEQ ID NO: 1380591 - DNA, 25 bp, Homo sapien
tgtgaagcgtggaatatatctcctg

SEQ ID NO: 1380592 - DNA, 25 bp, Homo sapien
gaagccgctcccgaaaggtggcaat

SEQ ID NO: 1380593 - DNA, 25 bp, Homo sapien
ccgaaaggtggcaattgtgaagcgt

SEQ ID NO: 1380594 - DNA, 25 bp, Homo sapien
cttgaacagaaactcttaagattct

SEQ ID NO: 1380595 - DNA, 25 bp, Homo sapien
gaacagaaactcttaagattctcac

SEQ ID NO: 1380596 - DNA, 25 bp, Homo sapien
ttgaacagaaactcttaagattctc

SEQ ID NO: 1380597 - DNA, 25 bp, Homo sapien
tgaacagaaactcttaagattctca

SEQ ID NO: 1380598 - DNA, 25 bp, Homo sapien
gattcctttggcaagctggctggct

SEQ ID NO: 1380599 - DNA, 25 bp, Homo sapien
tgtgcagagaatgtctccaagccca

SEQ ID NO: 1380600 - DNA, 25 bp, Homo sapien
gtgcagagaatgtctccaagcccag

SEQ ID NO: 1380601 - DNA, 25 bp, Homo sapien
cactgtgcagagaatgtctccaagc

SEQ ID NO: 1380602 - DNA, 25 bp, Homo sapien
tggcttctgttaaacatttaacaac

SEQ ID NO: 1380603 - DNA, 25 bp, Homo sapien
ctaaaagccaagtttggcttctgtt

SEQ ID NO: 1380604 - DNA, 25 bp, Homo sapien
taaacatttaacaacaggtcgtcac

SEQ ID NO: 1380605 - DNA, 25 bp, Homo sapien
tctgttaaacatttaacaacaggtc

SEQ ID NO: 1380606 - DNA, 25 bp, Homo sapien
tggagacgtggactgcccttggatc

SEQ ID NO: 1380607 - DNA, 25 bp, Homo sapien
ggagacgtggactgcccttggatcc

SEQ ID NO: 1380608 - DNA, 25 bp, Homo sapien
atggagacgtggactgcccttggat

SEQ ID NO: 1380609 - DNA, 25 bp, Homo sapien
catggagacgtggactgcccttgga

SEQ ID NO: 1380610 - DNA, 25 bp, Homo sapien
gcagatctgacttcccagaacagct

SEQ ID NO: 1380611 - DNA, 25 bp, Homo sapien
gcacctgattttattatgacctttc

SEQ ID NO: 1380612 - DNA, 25 bp, Homo sapien
gatctgacttcccagaacagcttgg

SEQ ID NO: 1380613 - DNA, 25 bp, Homo sapien
ctgacttcccagaacagcttggtct

SEQ ID NO: 1380614 - DNA, 25 bp, Homo sapien
gttgccctctttggacaggtaagga

SEQ ID NO: 1380615 - DNA, 25 bp, Homo sapien
catttaacccagtgagataggtatc

SEQ ID NO: 1380616 - DNA, 25 bp, Homo sapien
gtcagggtcagtaaatgtcaggatc

SEQ ID NO: 1380617 - DNA, 25 bp, Homo sapien
tgcattgccttgttggtccctagag

SEQ ID NO: 1380618 - DNA, 25 bp, Homo sapien
tctgggcctcaactctaagacagca

SEQ ID NO: 1380619 - DNA, 25 bp, Homo sapien
caagtcatgaagtaagcaaagcgtc

SEQ ID NO: 1380620 - DNA, 25 bp, Homo sapien
tgttaaagacactggaatatcctcc

SEQ ID NO: 1380621 - DNA, 25 bp, Homo sapien
gcagtactcagatcttcccgcaggg

SEQ ID NO: 1380622 - DNA, 25 bp, Homo sapien
cctaaaaggcttgtgagacactgtg

SEQ ID NO: 1380623 - DNA, 25 bp, Homo sapien
tcttaaaaccatatgagggctacca

SEQ ID NO: 1380624 - DNA, 25 bp, Homo sapien
aaaacatcctttgctgtgtcccgta

SEQ ID NO: 1380625 - DNA, 25 bp, Homo sapien
gtgtcccgtacattcaagctcttga

SEQ ID NO: 1380626 - DNA, 25 bp, Homo sapien
gtttctagtcgcttttgcttcccca

SEQ ID NO: 1380627 - DNA, 25 bp, Homo sapien
cactggcaccatgaacctatcagat

SEQ ID NO: 1380628 - DNA, 25 bp, Homo sapien
ccccagtgcctagatgcctaattca

SEQ ID NO: 1380629 - DNA, 25 bp, Homo sapien
tatttgatgaacatacctctacctc

SEQ ID NO: 1380630 - DNA, 25 bp, Homo sapien
tcagcagatgcatgctgatgaagcg

SEQ ID NO: 1380631 - DNA, 25 bp, Homo sapien
ctcccaagccaaccgctgtaatgtt

SEQ ID NO: 1380632 - DNA, 25 bp, Homo sapien
ggtatcatgagccatccctcccaag

SEQ ID NO: 1380633 - DNA, 25 bp, Homo sapien
accgctgtaatgttcacagcctgaa

SEQ ID NO: 1380634 - DNA, 25 bp, Homo sapien
cagctgcatagcccagaagccagtg

SEQ ID NO: 1380635 - DNA, 25 bp, Homo sapien
agctgcatagcccagaagccagtgc

SEQ ID NO: 1380636 - DNA, 25 bp, Homo sapien
tcatataataagttgatgacagcca

SEQ ID NO: 1380637 - DNA, 25 bp, Homo sapien
tttacaaaagtatctacatcatcag

SEQ ID NO: 1380638 - DNA, 25 bp, Homo sapien
ataatttagttatgctgttgtcttc

SEQ ID NO: 1380639 - DNA, 25 bp, Homo sapien
tgacagccaaaactaatgcttgttc

SEQ ID NO: 1380640 - DNA, 25 bp, Homo sapien
tctgagtaacacttgaagaacagcc

SEQ ID NO: 1380641 - DNA, 25 bp, Homo sapien
gagctgagactgttagacccacatg

SEQ ID NO: 1380642 - DNA, 25 bp, Homo sapien
tctcggagaaataggactccctgct

SEQ ID NO: 1380643 - DNA, 25 bp, Homo sapien
tagtcacctctgtggcaacgacaga

SEQ ID NO: 1380644 - DNA, 25 bp, Homo sapien
cctgctcaagaacctataatggctg

SEQ ID NO: 1380645 - DNA, 25 bp, Homo sapien
tacttcaactcgatgccaggcaggt

SEQ ID NO: 1380646 - DNA, 25 bp, Homo sapien
tccctagaatgccaccttagagagg

SEQ ID NO: 1380647 - DNA, 25 bp, Homo sapien
caattcctctgcgttggttgctcag

SEQ ID NO: 1380648 - DNA, 25 bp, Homo sapien
tctgtctggttttctgtcacatttc

SEQ ID NO: 1380649 - DNA, 25 bp, Homo sapien
tggttttctgtcacatttcagaata

SEQ ID NO: 1380650 - DNA, 25 bp, Homo sapien
gtctggttttctgtcacatttcaga

SEQ ID NO: 1380651 - DNA, 25 bp, Homo sapien
ggttttctgtcacatttcagaatac

SEQ ID NO: 1380652 - DNA, 25 bp, Homo sapien
gaagaaattgtcttctcaattaaag

SEQ ID NO: 1380653 - DNA, 25 bp, Homo sapien
aaaatgaagaaattgtcttctcaat

SEQ ID NO: 1380654 - DNA, 25 bp, Homo sapien
agaaattgtcttctcaattaaagaa

SEQ ID NO: 1380655 - DNA, 25 bp, Homo sapien
aatgaagaaattgtcttctcaatta

SEQ ID NO: 1380656 - DNA, 25 bp, Homo sapien
gcatccgcctgaccctagaactatg

SEQ ID NO: 1380657 - DNA, 25 bp, Homo sapien
cagcacatgataatttggactccca

SEQ ID NO: 1380658 - DNA, 25 bp, Homo sapien
tatttcagacattaagacactgctc

SEQ ID NO: 1380659 - DNA, 25 bp, Homo sapien
gaactatgctagtggttcagaagct

SEQ ID NO: 1380660 - DNA, 25 bp, Homo sapien
gaagttctatggaaactcagtgcca

SEQ ID NO: 1380661 - DNA, 25 bp, Homo sapien
ggagccccattcgtgttatatgaca

SEQ ID NO: 1380662 - DNA, 25 bp, Homo sapien
tctttggaggaacctagcatgctca

SEQ ID NO: 1380663 - DNA, 25 bp, Homo sapien
cctgtaaagctctctgtggcctaag

SEQ ID NO: 1380664 - DNA, 25 bp, Homo sapien
tgtaattactgctaatggtatgggt

SEQ ID NO: 1380665 - DNA, 25 bp, Homo sapien
taagtgcatatctgtgtcttgaatg

SEQ ID NO: 1380666 - DNA, 25 bp, Homo sapien
gcacaatacatgttgtaattactgc

SEQ ID NO: 1380667 - DNA, 25 bp, Homo sapien
tggtatgggtataagtgcatatctg

SEQ ID NO: 1380668 - DNA, 25 bp, Homo sapien
gaaattcgggtgctgaaactgggaa

SEQ ID NO: 1380669 - DNA, 25 bp, Homo sapien
gcatgaactgagcacaactgatgtg

SEQ ID NO: 1380670 - DNA, 25 bp, Homo sapien
gtaacactggtcactcaaatctggg

SEQ ID NO: 1380671 - DNA, 25 bp, Homo sapien
cagagggaacctcttcagagtggct

SEQ ID NO: 1380672 - DNA, 25 bp, Homo sapien
tgtcctccttaaaccattggctgta

SEQ ID NO: 1380673 - DNA, 25 bp, Homo sapien
tataactggcctattggactacccc

SEQ ID NO: 1380674 - DNA, 25 bp, Homo sapien
gtcaacaatgacctcctaagtgcca

SEQ ID NO: 1380675 - DNA, 25 bp, Homo sapien
ggaatctggttcctaccctcatcta

SEQ ID NO: 1380676 - DNA, 25 bp, Homo sapien
ggtaagtaacaactgtctggccaat

SEQ ID NO: 1380677 - DNA, 25 bp, Homo sapien
tttgctaaaggagagcaggctagtc

SEQ ID NO: 1380678 - DNA, 25 bp, Homo sapien
cgtatagagagtcaggatggtatca

SEQ ID NO: 1380679 - DNA, 25 bp, Homo sapien
ccaatacttaagtgaccctgggcaa

SEQ ID NO: 1380680 - DNA, 25 bp, Homo sapien
gacttgacgctcatatgctcaaatg

SEQ ID NO: 1380681 - DNA, 25 bp, Homo sapien
tacaggcctggtcagcgcggacaag

SEQ ID NO: 1380682 - DNA, 25 bp, Homo sapien
ccatccccggctgccacagagcgct

SEQ ID NO: 1380683 - DNA, 25 bp, Homo sapien
caccaaccggtcacaccaaccagga

SEQ ID NO: 1380684 - DNA, 25 bp, Homo sapien
tgtgtcacgaggacaggctcgcgtc

SEQ ID NO: 1380685 - DNA, 25 bp, Homo sapien
gaagcagtgtttcttccgcacagcc

SEQ ID NO: 1380686 - DNA, 25 bp, Homo sapien
acgagcgacagcaaaaggccgcagt

SEQ ID NO: 1380687 - DNA, 25 bp, Homo sapien
caccagggtggttcagaaatggcaa

SEQ ID NO: 1380688 - DNA, 25 bp, Homo sapien
aagggtccaggcaagtccagagcta

SEQ ID NO: 1380689 - DNA, 25 bp, Homo sapien
taagcgctgtcgacgggattgtgcc

SEQ ID NO: 1380690 - DNA, 25 bp, Homo sapien
gcatgcggcaaagactgaggcctcc

SEQ ID NO: 1380691 - DNA, 25 bp, Homo sapien
gctgcagagggtattggacaaaacc

SEQ ID NO: 1380692 - DNA, 25 bp, Homo sapien
acagcacagcctgtggtccgctcac

SEQ ID NO: 1380693 - DNA, 25 bp, Homo sapien
tcatcctttaaggcctccccagcga

SEQ ID NO: 1380694 - DNA, 25 bp, Homo sapien
atcctttaaggcctccccagcgaag

SEQ ID NO: 1380695 - DNA, 25 bp, Homo sapien
cccagcgaagtacagcacagcctgt

SEQ ID NO: 1380696 - DNA, 25 bp, Homo sapien
ggctaatacgaattcagaatcttta

SEQ ID NO: 1380697 - DNA, 25 bp, Homo sapien
cgaattcagaatctttatccagtga

SEQ ID NO: 1380698 - DNA, 25 bp, Homo sapien
agtgattctccgtccccagatgctt

SEQ ID NO: 1380699 - DNA, 25 bp, Homo sapien
cagatgctttcagtggattgaagaa

SEQ ID NO: 1380700 - DNA, 25 bp, Homo sapien
ttggcaaagcagtcattgggttgaa

SEQ ID NO: 1380701 - DNA, 25 bp, Homo sapien
caatagtacacccatcgcagtccat

SEQ ID NO: 1380702 - DNA, 25 bp, Homo sapien
tcgcagtccatgatctcaggacctg

SEQ ID NO: 1380703 - DNA, 25 bp, Homo sapien
agcagtcattgggttgaaagtggaa

SEQ ID NO: 1380704 - DNA, 25 bp, Homo sapien
gctgtccagggtcagaaaacttcac

SEQ ID NO: 1380705 - DNA, 25 bp, Homo sapien
aggctgtccagggtcagaaaacttc

SEQ ID NO: 1380706 - DNA, 25 bp, Homo sapien
ggctgtccagggtcagaaaacttca

SEQ ID NO: 1380707 - DNA, 25 bp, Homo sapien
ataggctgtccagggtcagaaaact

SEQ ID NO: 1380708 - DNA, 25 bp, Homo sapien
ggtatttcaagattggttcatcata

SEQ ID NO: 1380709 - DNA, 25 bp, Homo sapien
tcatcatattcctggactaattcac

SEQ ID NO: 1380710 - DNA, 25 bp, Homo sapien
tttaatatcctgcaggtatttcaag

SEQ ID NO: 1380711 - DNA, 25 bp, Homo sapien
agattggttcatcatattcctggac

SEQ ID NO: 1380712 - DNA, 25 bp, Homo sapien
tcagatgttggttcaacatcaccgg

SEQ ID NO: 1380713 - DNA, 25 bp, Homo sapien
tcacggtgccattctgattccatat

SEQ ID NO: 1380714 - DNA, 25 bp, Homo sapien
tatcagatgttggttcaacatcacc

SEQ ID NO: 1380715 - DNA, 25 bp, Homo sapien
gatgttggttcaacatcaccggtga

SEQ ID NO: 1380716 - DNA, 25 bp, Homo sapien
ggctggtataatgctgcatattttc

SEQ ID NO: 1380717 - DNA, 25 bp, Homo sapien
tcttctctcgtcaaagagaggctgg

SEQ ID NO: 1380718 - DNA, 25 bp, Homo sapien
tctctcgtcaaagagaggctggtat

SEQ ID NO: 1380719 - DNA, 25 bp, Homo sapien
agaggctggtataatgctgcatatt

SEQ ID NO: 1380720 - DNA, 25 bp, Homo sapien
ccgtgagcttttccgtcttacttgc

SEQ ID NO: 1380721 - DNA, 25 bp, Homo sapien
cctgatccgtgagcttttccgtctt

SEQ ID NO: 1380722 - DNA, 25 bp, Homo sapien
gatccgtgagcttttccgtcttact

SEQ ID NO: 1380723 - DNA, 25 bp, Homo sapien
tgatccgtgagcttttccgtcttac

SEQ ID NO: 1380724 - DNA, 25 bp, Homo sapien
aaaaactgttatctgccatctgaat

SEQ ID NO: 1380725 - DNA, 25 bp, Homo sapien
aactgttatctgccatctgaatgtt

SEQ ID NO: 1380726 - DNA, 25 bp, Homo sapien
ctgttatctgccatctgaatgtttt

SEQ ID NO: 1380727 - DNA, 25 bp, Homo sapien
ctgaaaaactgttatctgccatctg

SEQ ID NO: 1380728 - DNA, 25 bp, Homo sapien
cagctgagatgcaatgccaaggact

SEQ ID NO: 1380729 - DNA, 25 bp, Homo sapien
ctaggctaaggcactcaggccagtc

SEQ ID NO: 1380730 - DNA, 25 bp, Homo sapien
cccgtgagtaactaggctaaggcac

SEQ ID NO: 1380731 - DNA, 25 bp, Homo sapien
tcccaacagctgagatgcaatgcca

SEQ ID NO: 1380732 - DNA, 25 bp, Homo sapien
tcgtccacacgaaacttacaatcaa

SEQ ID NO: 1380733 - DNA, 25 bp, Homo sapien
gccctcgtccacacgaaacttacaa

SEQ ID NO: 1380734 - DNA, 25 bp, Homo sapien
acatgccctcgtccacacgaaactt

SEQ ID NO: 1380735 - DNA, 25 bp, Homo sapien
ctcgtccacacgaaacttacaatca

SEQ ID NO: 1380736 - DNA, 25 bp, Homo sapien
cctctacgcctcctccgctgggccg

SEQ ID NO: 1380737 - DNA, 25 bp, Homo sapien
cgggaagcctgaatgctcctccggg

SEQ ID NO: 1380738 - DNA, 25 bp, Homo sapien
gaggaagccgcccgcagcgcagaac

SEQ ID NO: 1380739 - DNA, 25 bp, Homo sapien
aagcctgaatgctcctccgggtgcg

SEQ ID NO: 1380740 - DNA, 25 bp, Homo sapien
tggctgttgtaatgctctggtatca

SEQ ID NO: 1380741 - DNA, 25 bp, Homo sapien
tctggtatcatgcattggacttcaa

SEQ ID NO: 1380742 - DNA, 25 bp, Homo sapien
agttacgtttacattgctccatagg

SEQ ID NO: 1380743 - DNA, 25 bp, Homo sapien
gtacattataagtcctcgatggctg

SEQ ID NO: 1380744 - DNA, 25 bp, Homo sapien
ttccataggacctcttttaaaggca

SEQ ID NO: 1380745 - DNA, 25 bp, Homo sapien
tagtgaggctacctgacacagtgtc

SEQ ID NO: 1380746 - DNA, 25 bp, Homo sapien
tggcgattccatttcatactcatct

SEQ ID NO: 1380747 - DNA, 25 bp, Homo sapien
gcttggtacatggaaagttacattc

SEQ ID NO: 1380748 - DNA, 25 bp, Homo sapien
tgctaggcaaagtggttcaagagac

SEQ ID NO: 1380749 - DNA, 25 bp, Homo sapien
tcaagagacattagggaggtaaaac

SEQ ID NO: 1380750 - DNA, 25 bp, Homo sapien
gagatccatcagacagcaatttcag

SEQ ID NO: 1380751 - DNA, 25 bp, Homo sapien
tcagactggtcaagaggcagcattg

SEQ ID NO: 1380752 - DNA, 25 bp, Homo sapien
tttaaagcctcgtgcaagcccagag

SEQ ID NO: 1380753 - DNA, 25 bp, Homo sapien
tggcaatctgggaagcaacatctct

SEQ ID NO: 1380754 - DNA, 25 bp, Homo sapien
tatgggtcactgagcacagccttgt

SEQ ID NO: 1380755 - DNA, 25 bp, Homo sapien
catttatagtattgaggagcggcca

SEQ ID NO: 1380756 - DNA, 25 bp, Homo sapien
tgcgggtacttttgagtctatctca

SEQ ID NO: 1380757 - DNA, 25 bp, Homo sapien
aacactgacttatctgatcgtgcgg

SEQ ID NO: 1380758 - DNA, 25 bp, Homo sapien
agcggacgctgagcaaacggacgga

SEQ ID NO: 1380759 - DNA, 25 bp, Homo sapien
tgtcttccatagatgcacacgcgca

SEQ ID NO: 1380760 - DNA, 25 bp, Homo sapien
gctatggcctgactggggccaatgt

SEQ ID NO: 1380761 - DNA, 25 bp, Homo sapien
tatggcctgactggggccaatgtgt

SEQ ID NO: 1380762 - DNA, 25 bp, Homo sapien
ctatggcctgactggggccaatgtg

SEQ ID NO: 1380763 - DNA, 25 bp, Homo sapien
tggcctgactggggccaatgtgtgg

SEQ ID NO: 1380764 - DNA, 25 bp, Homo sapien
tccgctgaagcgctcagcgacgtta

SEQ ID NO: 1380765 - DNA, 25 bp, Homo sapien
gtcgccctcgagcaggtggcatccg

SEQ ID NO: 1380766 - DNA, 25 bp, Homo sapien
tcctctctgctgatacggcggacgc

SEQ ID NO: 1380767 - DNA, 25 bp, Homo sapien
ggcgattctgaaaagtcctctctgc

SEQ ID NO: 1380768 - DNA, 25 bp, Homo sapien
cagcaggcagaccacgctgaggacc

SEQ ID NO: 1380769 - DNA, 25 bp, Homo sapien
ggcagaccacgctgaggacccccag

SEQ ID NO: 1380770 - DNA, 25 bp, Homo sapien
gcaggcagaccacgctgaggacccc

SEQ ID NO: 1380771 - DNA, 25 bp, Homo sapien
gcagcaggcagaccacgctgaggac

SEQ ID NO: 1380772 - DNA, 25 bp, Homo sapien
cggcctctgcgcgagtgcccagcca

SEQ ID NO: 1380773 - DNA, 25 bp, Homo sapien
taagttcaagcaccgcctacgcggt

SEQ ID NO: 1380774 - DNA, 25 bp, Homo sapien
cacaagcagccctaagttcaagcac

SEQ ID NO: 1380775 - DNA, 25 bp, Homo sapien
gccacaagcagccctaagttcaagc

SEQ ID NO: 1380776 - DNA, 25 bp, Homo sapien
tcagcaaagtatctgccgagcagcc

SEQ ID NO: 1380777 - DNA, 25 bp, Homo sapien
cccatttagacagaggaaacgccag

SEQ ID NO: 1380778 - DNA, 25 bp, Homo sapien
tgacaaagggctgcgtctggactgc

SEQ ID NO: 1380779 - DNA, 25 bp, Homo sapien
gacccttgaaggatcagcacagaca

SEQ ID NO: 1380780 - DNA, 25 bp, Homo sapien
cattcttcccatcagagttcttgct

SEQ ID NO: 1380781 - DNA, 25 bp, Homo sapien
cttgctggagttccggctcttgaaa

SEQ ID NO: 1380782 - DNA, 25 bp, Homo sapien
tcttgaaacgcaccagaaggatggt

SEQ ID NO: 1380783 - DNA, 25 bp, Homo sapien
ccctggatggatactgagaacaggg

SEQ ID NO: 1380784 - DNA, 25 bp, Homo sapien
gtcctcccaaccatacaagatccac

SEQ ID NO: 1380785 - DNA, 25 bp, Homo sapien
tcccaaccatacaagatccacctca

SEQ ID NO: 1380786 - DNA, 25 bp, Homo sapien
cctcccaaccatacaagatccacct

SEQ ID NO: 1380787 - DNA, 25 bp, Homo sapien
caaccatacaagatccacctcaacc

SEQ ID NO: 1380788 - DNA, 25 bp, Homo sapien
cttccagacacagttggaaccaaca

SEQ ID NO: 1380789 - DNA, 25 bp, Homo sapien
gttggaaccaacagtgacatcctcc

SEQ ID NO: 1380790 - DNA, 25 bp, Homo sapien
agttggaaccaacagtgacatcctc

SEQ ID NO: 1380791 - DNA, 25 bp, Homo sapien
cctcctccgtcagccggtaccattc

SEQ ID NO: 1380792 - DNA, 25 bp, Homo sapien
ttgcctgtatcttgggggcttgcct

SEQ ID NO: 1380793 - DNA, 25 bp, Homo sapien
ttgtatctagaacacggatgccgat

SEQ ID NO: 1380794 - DNA, 25 bp, Homo sapien
catggcaggagtaattgcctgtatc

SEQ ID NO: 1380795 - DNA, 25 bp, Homo sapien
tctggaagcgaagcctgccctccca

SEQ ID NO: 1380796 - DNA, 25 bp, Homo sapien
ctggaagcgaagcctgccctcccaa

SEQ ID NO: 1380797 - DNA, 25 bp, Homo sapien
tggaagcgaagcctgccctcccaag

SEQ ID NO: 1380798 - DNA, 25 bp, Homo sapien
ctctggaagcgaagcctgccctccc

SEQ ID NO: 1380799 - DNA, 25 bp, Homo sapien
aagacagcatctgggcccacgctca

SEQ ID NO: 1380800 - DNA, 25 bp, Homo sapien
gggccaaagacagcatctgggccca

SEQ ID NO: 1380801 - DNA, 25 bp, Homo sapien
cccacgctcagcagggccgtccgct

SEQ ID NO: 1380802 - DNA, 25 bp, Homo sapien
ctgggccaaagacagcatctgggcc

SEQ ID NO: 1380803 - DNA, 25 bp, Homo sapien
tccccccagctttagtcctcaggga

SEQ ID NO: 1380804 - DNA, 25 bp, Homo sapien
agggctgctccttttccccccagct

SEQ ID NO: 1380805 - DNA, 25 bp, Homo sapien
cccagctttagtcctcagggaatac

SEQ ID NO: 1380806 - DNA, 25 bp, Homo sapien
cttcctgttcttccaggccagggct

SEQ ID NO: 1380807 - DNA, 25 bp, Homo sapien
agtcctggctggagcgggacacgat

SEQ ID NO: 1380808 - DNA, 25 bp, Homo sapien
gctgccttctcagagaccgtggcat

SEQ ID NO: 1380809 - DNA, 25 bp, Homo sapien
caggccacagcgaagcgggagtcct

SEQ ID NO: 1380810 - DNA, 25 bp, Homo sapien
acgatgctacagtccagctggaaag

SEQ ID NO: 1380811 - DNA, 25 bp, Homo sapien
tccaaggccattagagagccctact

SEQ ID NO: 1380812 - DNA, 25 bp, Homo sapien
caactcctcagttgtaactccaagg

SEQ ID NO: 1380813 - DNA, 25 bp, Homo sapien
ctcctggtgactggctaaggtgtca

SEQ ID NO: 1380814 - DNA, 25 bp, Homo sapien
tccagagtctaacatagtatcccca

SEQ ID NO: 1380815 - DNA, 25 bp, Homo sapien
ctccatctgggagcctcagtgtgct

SEQ ID NO: 1380816 - DNA, 25 bp, Homo sapien
gggatgtagctgtactcaataaaca

SEQ ID NO: 1380817 - DNA, 25 bp, Homo sapien
actccatctgggagcctcagtgtgc

SEQ ID NO: 1380818 - DNA, 25 bp, Homo sapien
ctgtggctgggatgtagctgtactc

SEQ ID NO: 1380819 - DNA, 25 bp, Homo sapien
cataaaacagtatacttaaatggga

SEQ ID NO: 1380820 - DNA, 25 bp, Homo sapien
aaactaattttatccagtgcataaa

SEQ ID NO: 1380821 - DNA, 25 bp, Homo sapien
ctaattttatccagtgcataaaaca

SEQ ID NO: 1380822 - DNA, 25 bp, Homo sapien
ataaactaattttatccagtgcata

SEQ ID NO: 1380823 - DNA, 25 bp, Homo sapien
ggaagcttggggacgtggaccctca

SEQ ID NO: 1380824 - DNA, 25 bp, Homo sapien
tggaagcttggggacgtggaccctc

SEQ ID NO: 1380825 - DNA, 25 bp, Homo sapien
gaagcttggggacgtggaccctcac

SEQ ID NO: 1380826 - DNA, 25 bp, Homo sapien
ggaaggactctccaaatgcagccgc

SEQ ID NO: 1380827 - DNA, 25 bp, Homo sapien
tatgctggtgcggttgagaaccaca

SEQ ID NO: 1380828 - DNA, 25 bp, Homo sapien
tctggatgaagagacggtacacgcc

SEQ ID NO: 1380829 - DNA, 25 bp, Homo sapien
tctccatagtggaaggtggcgtcac

SEQ ID NO: 1380830 - DNA, 25 bp, Homo sapien
ccaaatacagaaggacggcagcaca

SEQ ID NO: 1380831 - DNA, 25 bp, Homo sapien
aacgtttctcagatgtggctcccta

SEQ ID NO: 1380832 - DNA, 25 bp, Homo sapien
cctttcccagggtaggtgaatggat

SEQ ID NO: 1380833 - DNA, 25 bp, Homo sapien
tctgagttccttgatcgtgtgtcgg

SEQ ID NO: 1380834 - DNA, 25 bp, Homo sapien
catgagtctgccgtcagcatcagga

SEQ ID NO: 1380835 - DNA, 25 bp, Homo sapien
gctccttggtgaagatggtatccac

SEQ ID NO: 1380836 - DNA, 25 bp, Homo sapien
ccttggtgaagatggtatccacaga

SEQ ID NO: 1380837 - DNA, 25 bp, Homo sapien
cttccatgagtctgccgtcagcatc

SEQ ID NO: 1380838 - DNA, 25 bp, Homo sapien
ccatcggcatccgagggcttgtgga

SEQ ID NO: 1380839 - DNA, 25 bp, Homo sapien
caggataagcttgccatcggcatcc

SEQ ID NO: 1380840 - DNA, 25 bp, Homo sapien
taagcttgccatcggcatccgaggg

SEQ ID NO: 1380841 - DNA, 25 bp, Homo sapien
gcttgccatcggcatccgagggctt

SEQ ID NO: 1380842 - DNA, 25 bp, Homo sapien
cacacttagtttttccgccacaggg

SEQ ID NO: 1380843 - DNA, 25 bp, Homo sapien
cttcacacttagtttttccgccaca

SEQ ID NO: 1380844 - DNA, 25 bp, Homo sapien
ttcacacttagtttttccgccacag

SEQ ID NO: 1380845 - DNA, 25 bp, Homo sapien
tcacacttagtttttccgccacagg

SEQ ID NO: 1380846 - DNA, 25 bp, Homo sapien
ggttgattgagtcccatgcatcaca

SEQ ID NO: 1380847 - DNA, 25 bp, Homo sapien
gcttaagcttggtttggcagcatca

SEQ ID NO: 1380848 - DNA, 25 bp, Homo sapien
gaaagccacagactgccacttggtc

SEQ ID NO: 1380849 - DNA, 25 bp, Homo sapien
cagcatcaagggttgattgagtccc

SEQ ID NO: 1380850 - DNA, 25 bp, Homo sapien
aagtgccccggtgttaccatgacaa

SEQ ID NO: 1380851 - DNA, 25 bp, Homo sapien
ttgatgccaataacaagtgccccgg

SEQ ID NO: 1380852 - DNA, 25 bp, Homo sapien
tgccaataacaagtgccccggtgtt

SEQ ID NO: 1380853 - DNA, 25 bp, Homo sapien
gctctcctcttagggctcttgcact

SEQ ID NO: 1380854 - DNA, 25 bp, Homo sapien
ggcacagacaacaggcagaagccac

SEQ ID NO: 1380855 - DNA, 25 bp, Homo sapien
tggcacagacaacaggcagaagcca

SEQ ID NO: 1380856 - DNA, 25 bp, Homo sapien
ttggcacagacaacaggcagaagcc

SEQ ID NO: 1380857 - DNA, 25 bp, Homo sapien
cttggcacagacaacaggcagaagc

SEQ ID NO: 1380858 - DNA, 25 bp, Homo sapien
tgttccaaatctggtacagaacaga

SEQ ID NO: 1380859 - DNA, 25 bp, Homo sapien
ttgttccaaatctggtacagaacag

SEQ ID NO: 1380860 - DNA, 25 bp, Homo sapien
tgggcacatagcccacaggtccgca

SEQ ID NO: 1380861 - DNA, 25 bp, Homo sapien
gggcacatagcccacaggtccgcag

SEQ ID NO: 1380862 - DNA, 25 bp, Homo sapien
gacgttgttgctggactcagccttc

SEQ ID NO: 1380863 - DNA, 25 bp, Homo sapien
caggttggaggtcctctccgccagt

SEQ ID NO: 1380864 - DNA, 25 bp, Homo sapien
gggtttgatgatacactgcaagtca

SEQ ID NO: 1380865 - DNA, 25 bp, Homo sapien
gaaggtcaccaagtcatggaactcc

SEQ ID NO: 1380866 - DNA, 25 bp, Homo sapien
ggtgttgcatgagggtggtgtagga

SEQ ID NO: 1380867 - DNA, 25 bp, Homo sapien
tgttgcatgagggtggtgtaggaca

SEQ ID NO: 1380868 - DNA, 25 bp, Homo sapien
aggtgttgcatgagggtggtgtagg

SEQ ID NO: 1380869 - DNA, 25 bp, Homo sapien
taggtgttgcatgagggtggtgtag

SEQ ID NO: 1380870 - DNA, 25 bp, Homo sapien
ccatcccggtctagccacatgatat

SEQ ID NO: 1380871 - DNA, 25 bp, Homo sapien
cattcagtcacatggcattcatact

SEQ ID NO: 1380872 - DNA, 25 bp, Homo sapien
aagctgctgcgctcccagtaggacg

SEQ ID NO: 1380873 - DNA, 25 bp, Homo sapien
gacgagcctggctgcacggtgccat

SEQ ID NO: 1380874 - DNA, 25 bp, Homo sapien
ggtaatctattcagctggagttcag

SEQ ID NO: 1380875 - DNA, 25 bp, Homo sapien
gagcctcagagggtcaaaaacactc

SEQ ID NO: 1380876 - DNA, 25 bp, Homo sapien
tcatattcaggtacggtgagcctca

SEQ ID NO: 1380877 - DNA, 25 bp, Homo sapien
aacactctgaccctagttgctgcaa

SEQ ID NO: 1380878 - DNA, 25 bp, Homo sapien
ggctcctgaacagtcaccatctata

SEQ ID NO: 1380879 - DNA, 25 bp, Homo sapien
gattcatagagatgatcaggctcct

SEQ ID NO: 1380880 - DNA, 25 bp, Homo sapien
tacttcttagggcatgacattgaga

SEQ ID NO: 1380881 - DNA, 25 bp, Homo sapien
tcttattatagtgaggatgcctgct

SEQ ID NO: 1380882 - DNA, 25 bp, Homo sapien
ccaagtggccttgggacaggagctg

SEQ ID NO: 1380883 - DNA, 25 bp, Homo sapien
aagtggccttgggacaggagctggt

SEQ ID NO: 1380884 - DNA, 25 bp, Homo sapien
gctggtggtgctgggggactttaac

SEQ ID NO: 1380885 - DNA, 25 bp, Homo sapien
tggtggtgctgggggactttaacta

SEQ ID NO: 1380886 - DNA, 25 bp, Homo sapien
cagtcacccggcagttgtatttccc

SEQ ID NO: 1380887 - DNA, 25 bp, Homo sapien
cgatgagcgagctgttgaaggccca

SEQ ID NO: 1380888 - DNA, 25 bp, Homo sapien
ccaggagacagcaaagtaacggtcg

SEQ ID NO: 1380889 - DNA, 25 bp, Homo sapien
ggcttcccggtgagcaaattcgctg

SEQ ID NO: 1380890 - DNA, 25 bp, Homo sapien
ctgagagaacaagtaagaaaagaga

SEQ ID NO: 1380891 - DNA, 25 bp, Homo sapien
tgagagaacaagtaagaaaagagac

SEQ ID NO: 1380892 - DNA, 25 bp, Homo sapien
gaacaagtaagaaaagagacacatc

SEQ ID NO: 1380893 - DNA, 25 bp, Homo sapien
gagaacaagtaagaaaagagacaca

SEQ ID NO: 1380894 - DNA, 25 bp, Homo sapien
agccaactaaaccacattagcacat

SEQ ID NO: 1380895 - DNA, 25 bp, Homo sapien
tgggtgaatgagggccccagccaac

SEQ ID NO: 1380896 - DNA, 25 bp, Homo sapien
gcacattcccactatccttcctctt

SEQ ID NO: 1380897 - DNA, 25 bp, Homo sapien
ttagcacattcccactatccttcct

SEQ ID NO: 1380898 - DNA, 25 bp, Homo sapien
tatcttcaagatcttgcccattcat

SEQ ID NO: 1380899 - DNA, 25 bp, Homo sapien
ccccatgccttggtgacaccttcat

SEQ ID NO: 1380900 - DNA, 25 bp, Homo sapien
tggctttcttctttcggcggccaaa

SEQ ID NO: 1380901 - DNA, 25 bp, Homo sapien
cggcggccaaagactcttctcatct

SEQ ID NO: 1380902 - DNA, 25 bp, Homo sapien
cttctcatctcaagggaatcccccc

SEQ ID NO: 1380903 - DNA, 25 bp, Homo sapien
gctccctcggaacgctttcgggtca

SEQ ID NO: 1380904 - DNA, 25 bp, Homo sapien
atagcataccacgacccatccggat

SEQ ID NO: 1380905 - DNA, 25 bp, Homo sapien
agtgaagcatgaaatctcggctcag

SEQ ID NO: 1380906 - DNA, 25 bp, Homo sapien
aaatctcggctcagggagatgacct

SEQ ID NO: 1380907 - DNA, 25 bp, Homo sapien
gtggtctgcagggagtctgggatca

SEQ ID NO: 1380908 - DNA, 25 bp, Homo sapien
cagtggtctgcagggagtctgggat

SEQ ID NO: 1380909 - DNA, 25 bp, Homo sapien
agtggtctgcagggagtctgggatc

SEQ ID NO: 1380910 - DNA, 25 bp, Homo sapien
cctgctgggacacagactagttaga

SEQ ID NO: 1380911 - DNA, 25 bp, Homo sapien
tgctgggacacagactagttagaga

SEQ ID NO: 1380912 - DNA, 25 bp, Homo sapien
gctgggacacagactagttagagaa

SEQ ID NO: 1380913 - DNA, 25 bp, Homo sapien
gggacacagactagttagagaaagt

SEQ ID NO: 1380914 - DNA, 25 bp, Homo sapien
tggcaacgtgaagacagcttctcct

SEQ ID NO: 1380915 - DNA, 25 bp, Homo sapien
caggccagacgctggcaacgtgaag

SEQ ID NO: 1380916 - DNA, 25 bp, Homo sapien
tcaggccagacgctggcaacgtgaa

SEQ ID NO: 1380917 - DNA, 25 bp, Homo sapien
caacgtgaagacagcttctccttac

SEQ ID NO: 1380918 - DNA, 25 bp, Homo sapien
accagatagtgatgtgggagccctc

SEQ ID NO: 1380919 - DNA, 25 bp, Homo sapien
tacaagggtccttcctgaacggtga

SEQ ID NO: 1380920 - DNA, 25 bp, Homo sapien
tgaacggtgacctgccgctgtgctg

SEQ ID NO: 1380921 - DNA, 25 bp, Homo sapien
tcccgggcctgaagatctgtgatgt

SEQ ID NO: 1380922 - DNA, 25 bp, Homo sapien
ttcccactcaagactcccccgctga

SEQ ID NO: 1380923 - DNA, 25 bp, Homo sapien
tttcccactcaagactcccccgctg

SEQ ID NO: 1380924 - DNA, 25 bp, Homo sapien
tcccactcaagactcccccgctgac

SEQ ID NO: 1380925 - DNA, 25 bp, Homo sapien
tggctcagatactgttctccaaggt

SEQ ID NO: 1380926 - DNA, 25 bp, Homo sapien
ccttctggctcagatactgttctcc

SEQ ID NO: 1380927 - DNA, 25 bp, Homo sapien
tgttctccaaggtcacttctgcctg

SEQ ID NO: 1380928 - DNA, 25 bp, Homo sapien
tctccaaggtcacttctgcctgcct

SEQ ID NO: 1380929 - DNA, 25 bp, Homo sapien
tcttcatttcggcagtggtcacgta

SEQ ID NO: 1380930 - DNA, 25 bp, Homo sapien
catgggttccgatgctggctttgtc

SEQ ID NO: 1380931 - DNA, 25 bp, Homo sapien
caggtgagttacaggcgcagctttg

SEQ ID NO: 1380932 - DNA, 25 bp, Homo sapien
ccttggagaggactagcatgggttc

SEQ ID NO: 1380933 - DNA, 25 bp, Homo sapien
tggacctaggataccccagtttctc

SEQ ID NO: 1380934 - DNA, 25 bp, Homo sapien
tcctaaagaggactggaataacttc

SEQ ID NO: 1380935 - DNA, 25 bp, Homo sapien
agcagtgcgcctctcaatgctctca

SEQ ID NO: 1380936 - DNA, 25 bp, Homo sapien
gcatctgcaggcagcgtcaggatgt

SEQ ID NO: 1380937 - DNA, 25 bp, Homo sapien
gtcaaatggttaatcagttgccctc

SEQ ID NO: 1380938 - DNA, 25 bp, Homo sapien
aatgattgcaaaattggctggagcc

SEQ ID NO: 1380939 - DNA, 25 bp, Homo sapien
gcttcataattaggaccaacagtca

SEQ ID NO: 1380940 - DNA, 25 bp, Homo sapien
gctacttaatgcacaagggcctggt

SEQ ID NO: 1380941 - DNA, 25 bp, Homo sapien
gagccaaggacgtgacatacagcat

SEQ ID NO: 1380942 - DNA, 25 bp, Homo sapien
agagccaaggacgtgacatacagca

SEQ ID NO: 1380943 - DNA, 25 bp, Homo sapien
cttactttaatctcacagccaccct

SEQ ID NO: 1380944 - DNA, 25 bp, Homo sapien
ctcggaaaaattgtcagtgggatac

SEQ ID NO: 1380945 - DNA, 25 bp, Homo sapien
aaacccacaatctctgactctaagc

SEQ ID NO: 1380946 - DNA, 25 bp, Homo sapien
accctgtgagggaagtgtacattcc

SEQ ID NO: 1380947 - DNA, 25 bp, Homo sapien
catcaactgcagaccctataactcc

SEQ ID NO: 1380948 - DNA, 25 bp, Homo sapien
gcagaccctataactcccaaataag

SEQ ID NO: 1380949 - DNA, 25 bp, Homo sapien
tcgccacaaagttcaagacacagaa

SEQ ID NO: 1380950 - DNA, 25 bp, Homo sapien
caaataagctccactcgccacaaag

SEQ ID NO: 1380951 - DNA, 25 bp, Homo sapien
aacttgcacaactcaaccagtgaag

SEQ ID NO: 1380952 - DNA, 25 bp, Homo sapien
caaacttgcacaactcaaccagtga

SEQ ID NO: 1380953 - DNA, 25 bp, Homo sapien
acttgcacaactcaaccagtgaagg

SEQ ID NO: 1380954 - DNA, 25 bp, Homo sapien
tccaaacttgcacaactcaaccagt

SEQ ID NO: 1380955 - DNA, 25 bp, Homo sapien
ataacaggagttatcagttgctttt

SEQ ID NO: 1380956 - DNA, 25 bp, Homo sapien
gataacaggagttatcagttgcttt

SEQ ID NO: 1380957 - DNA, 25 bp, Homo sapien
tgataacaggagttatcagttgctt

SEQ ID NO: 1380958 - DNA, 25 bp, Homo sapien
gattttttgccactgagcttgacca

SEQ ID NO: 1380959 - DNA, 25 bp, Homo sapien
cccttgagtcaccaattccagatat

SEQ ID NO: 1380960 - DNA, 25 bp, Homo sapien
tgccactgagcttgaccaagccctt

SEQ ID NO: 1380961 - DNA, 25 bp, Homo sapien
catgttcctattctcactgattttt

SEQ ID NO: 1380962 - DNA, 25 bp, Homo sapien
tcccaagaagaattccccataccga

SEQ ID NO: 1380963 - DNA, 25 bp, Homo sapien
ctgagagccgctccacaatcacctt

SEQ ID NO: 1380964 - DNA, 25 bp, Homo sapien
gaattccccataccgagtctaccat

SEQ ID NO: 1380965 - DNA, 25 bp, Homo sapien
gccagtcatcaaacaaagcctcttg

SEQ ID NO: 1380966 - DNA, 25 bp, Homo sapien
ttccctgatcaaagttgctttcaca

SEQ ID NO: 1380967 - DNA, 25 bp, Homo sapien
cctgatcaaagttgctttcacaggc

SEQ ID NO: 1380968 - DNA, 25 bp, Homo sapien
tccctgatcaaagttgctttcacag

SEQ ID NO: 1380969 - DNA, 25 bp, Homo sapien
tgatcaaagttgctttcacaggcat

SEQ ID NO: 1380970 - DNA, 25 bp, Homo sapien
aggctgcaaagctctatctatgcct

SEQ ID NO: 1380971 - DNA, 25 bp, Homo sapien
gaggctgcaaagctctatctatgcc

SEQ ID NO: 1380972 - DNA, 25 bp, Homo sapien
ggctgcaaagctctatctatgcctg

SEQ ID NO: 1380973 - DNA, 25 bp, Homo sapien
gctgcaaagctctatctatgcctgc

SEQ ID NO: 1380974 - DNA, 25 bp, Homo sapien
gctcttgctcccagaggttttaaag

SEQ ID NO: 1380975 - DNA, 25 bp, Homo sapien
taaaaatcaggtctaaaggtgagcc

SEQ ID NO: 1380976 - DNA, 25 bp, Homo sapien
atcaggtctaaaggtgagccatcca

SEQ ID NO: 1380977 - DNA, 25 bp, Homo sapien
agccatccaagaaactgctcttgct

SEQ ID NO: 1380978 - DNA, 25 bp, Homo sapien
gcttgattttgatgcaaccactcat

SEQ ID NO: 1380979 - DNA, 25 bp, Homo sapien
caaatataagcttgattttgatgca

SEQ ID NO: 1380980 - DNA, 25 bp, Homo sapien
tcagttaataaagggttcttgatga

SEQ ID NO: 1380981 - DNA, 25 bp, Homo sapien
tagtcagttaataaagggttcttga

SEQ ID NO: 1380982 - DNA, 25 bp, Homo sapien
cctttaaagccaccttgatgctcat

SEQ ID NO: 1380983 - DNA, 25 bp, Homo sapien
tgcccctttaaagccaccttgatgc

SEQ ID NO: 1380984 - DNA, 25 bp, Homo sapien
actgtgcccctttaaagccaccttg

SEQ ID NO: 1380985 - DNA, 25 bp, Homo sapien
ttaaagccaccttgatgctcatttt

SEQ ID NO: 1380986 - DNA, 25 bp, Homo sapien
ttctgaatgcagaggaccgagcctt

SEQ ID NO: 1380987 - DNA, 25 bp, Homo sapien
taagttccctacgtgcaagacacct

SEQ ID NO: 1380988 - DNA, 25 bp, Homo sapien
gacaatgcatggaagcaatctccac

SEQ ID NO: 1380989 - DNA, 25 bp, Homo sapien
cctgttacctactgcaagggtgtag

SEQ ID NO: 1380990 - DNA, 25 bp, Homo sapien
tgtgttctaagacagcacgctgaag

SEQ ID NO: 1380991 - DNA, 25 bp, Homo sapien
ggtcctgcatctgcaccttaagagg

SEQ ID NO: 1380992 - DNA, 25 bp, Homo sapien
tgaagacagtgctcaatggcataaa

SEQ ID NO: 1380993 - DNA, 25 bp, Homo sapien
tctcagggccatagtttcttcttcc

SEQ ID NO: 1380994 - DNA, 25 bp, Homo sapien
ccaaaccaactttcgagacagaggg

SEQ ID NO: 1380995 - DNA, 25 bp, Homo sapien
gagacacaggactagtgccctcaca

SEQ ID NO: 1380996 - DNA, 25 bp, Homo sapien
gaactacgatctaagcttccttggt

SEQ ID NO: 1380997 - DNA, 25 bp, Homo sapien
gaccactcaggtaggcaaagcatcc

SEQ ID NO: 1380998 - DNA, 25 bp, Homo sapien
ggccaagacagacactttaagaaca

SEQ ID NO: 1380999 - DNA, 25 bp, Homo sapien
tccctaaaccacagatgtgcagatg

SEQ ID NO: 1381000 - DNA, 25 bp, Homo sapien
gacagacactttaagaacagcaaat

SEQ ID NO: 1381001 - DNA, 25 bp, Homo sapien
agccatgtgaagtccctaaaccaca

SEQ ID NO: 1381002 - DNA, 25 bp, Homo sapien
gaaccacgagaaattacaggaacca

SEQ ID NO: 1381003 - DNA, 25 bp, Homo sapien
tcgattgcactgataagcagagcca

SEQ ID NO: 1381004 - DNA, 25 bp, Homo sapien
tgctcttgggttagaaacgggcctc

SEQ ID NO: 1381005 - DNA, 25 bp, Homo sapien
ggttaaactttcacatcgattgcac

SEQ ID NO: 1381006 - DNA, 25 bp, Homo sapien
gctcagcaccgggaaaaagcacttc

SEQ ID NO: 1381007 - DNA, 25 bp, Homo sapien
agctcagcaccgggaaaaagcactt

SEQ ID NO: 1381008 - DNA, 25 bp, Homo sapien
tccaggagacacaacacaaggcgct

SEQ ID NO: 1381009 - DNA, 25 bp, Homo sapien
cctccaggagacacaacacaaggcg

SEQ ID NO: 1381010 - DNA, 25 bp, Homo sapien
agcctccaggagacacaacacaagg

SEQ ID NO: 1381011 - DNA, 25 bp, Homo sapien
ccaggagacacaacacaaggcgctt

SEQ ID NO: 1381012 - DNA, 25 bp, Homo sapien
ggattaatcctccagaagcacggaa

SEQ ID NO: 1381013 - DNA, 25 bp, Homo sapien
aagcaagttggcgttcggcagccct

SEQ ID NO: 1381014 - DNA, 25 bp, Homo sapien
ggcaatccacttatagctccagaga

SEQ ID NO: 1381015 - DNA, 25 bp, Homo sapien
gaaaactcccctatgctacaggaag

SEQ ID NO: 1381016 - DNA, 25 bp, Homo sapien
gcgtcggaccgtccttcagtccatc

SEQ ID NO: 1381017 - DNA, 25 bp, Homo sapien
cctccgcgcgcgtcggaccgtcctt

SEQ ID NO: 1381018 - DNA, 25 bp, Homo sapien
ctcccgcaacggcaccagcagccgc

SEQ ID NO: 1381019 - DNA, 25 bp, Homo sapien
catccaggcgcacgcctcaggggac

SEQ ID NO: 1381020 - DNA, 25 bp, Homo sapien
caccgcagagccatttcagcctgtg

SEQ ID NO: 1381021 - DNA, 25 bp, Homo sapien
cagagccatttcagcctgtgtaggg

SEQ ID NO: 1381022 - DNA, 25 bp, Homo sapien
ggggcctaatcttgcctgaggacag

SEQ ID NO: 1381023 - DNA, 25 bp, Homo sapien
tgagtggggcctaatcttgcctgag

SEQ ID NO: 1381024 - DNA, 25 bp, Homo sapien
tggaaactctgccagatggcctagc

SEQ ID NO: 1381025 - DNA, 25 bp, Homo sapien
agggccacttgccaatggctggcag

SEQ ID NO: 1381026 - DNA, 25 bp, Homo sapien
acagtcaggactagacactccaggg

SEQ ID NO: 1381027 - DNA, 25 bp, Homo sapien
gatgagcacagtcaggactagacac

SEQ ID NO: 1381028 - DNA, 25 bp, Homo sapien
gactgcttagaatcattcacttgtt

SEQ ID NO: 1381029 - DNA, 25 bp, Homo sapien
tacagtttatagagcatttttgcac

SEQ ID NO: 1381030 - DNA, 25 bp, Homo sapien
tcctttcatccagaccacatgccag

SEQ ID NO: 1381031 - DNA, 25 bp, Homo sapien
tttcattgtccaagaagtaagactg

SEQ ID NO: 1381032 - DNA, 25 bp, Homo sapien
agggaccgccattgtgaacacaggg

SEQ ID NO: 1381033 - DNA, 25 bp, Homo sapien
aggcaccagggaccgccattgtgaa

SEQ ID NO: 1381034 - DNA, 25 bp, Homo sapien
accagggaccgccattgtgaacaca

SEQ ID NO: 1381035 - DNA, 25 bp, Homo sapien
gcaggcaccagggaccgccattgtg

SEQ ID NO: 1381036 - DNA, 25 bp, Homo sapien
gattataggcaagcttcaaaggcaa

SEQ ID NO: 1381037 - DNA, 25 bp, Homo sapien
ctgccgagtgttcgattaagctgct

SEQ ID NO: 1381038 - DNA, 25 bp, Homo sapien
tttatgtgtcagattataggcaagc

SEQ ID NO: 1381039 - DNA, 25 bp, Homo sapien
cgagtgttcgattaagctgcttagg

SEQ ID NO: 1381040 - DNA, 25 bp, Homo sapien
attgagtcctgtggagctcaggttc

SEQ ID NO: 1381041 - DNA, 25 bp, Homo sapien
cattgagtcctgtggagctcaggtt

SEQ ID NO: 1381042 - DNA, 25 bp, Homo sapien
agttgctttttcattgagtcctgtg

SEQ ID NO: 1381043 - DNA, 25 bp, Homo sapien
atggcttggcatgcagaagatgtct

SEQ ID NO: 1381044 - DNA, 25 bp, Homo sapien
ctgatggcttggcatgcagaagatg

SEQ ID NO: 1381045 - DNA, 25 bp, Homo sapien
cttggcatgcagaagatgtctttgt

SEQ ID NO: 1381046 - DNA, 25 bp, Homo sapien
gcttggcatgcagaagatgtctttg

SEQ ID NO: 1381047 - DNA, 25 bp, Homo sapien
tagaaaaatgtgtcccctctcccca

SEQ ID NO: 1381048 - DNA, 25 bp, Homo sapien
tcactggggctggtggtctgggggt

SEQ ID NO: 1381049 - DNA, 25 bp, Homo sapien
ctgtcactggggctggtggtctggg

SEQ ID NO: 1381050 - DNA, 25 bp, Homo sapien
tcatgctgtcactggggctggtggt

SEQ ID NO: 1381051 - DNA, 25 bp, Homo sapien
cactggggctggtggtctgggggtc

SEQ ID NO: 1381052 - DNA, 25 bp, Homo sapien
cagccccagtatcaaaggtggagga

SEQ ID NO: 1381053 - DNA, 25 bp, Homo sapien
ccccagtatcaaaggtggaggagtg

SEQ ID NO: 1381054 - DNA, 25 bp, Homo sapien
gccccagtatcaaaggtggaggagt

SEQ ID NO: 1381055 - DNA, 25 bp, Homo sapien
gccagccccagtatcaaaggtggag

SEQ ID NO: 1381056 - DNA, 25 bp, Homo sapien
gacagcctggtgctcagtgtaggcc

SEQ ID NO: 1381057 - DNA, 25 bp, Homo sapien
ctgttgaagtcggaggagacagcct

SEQ ID NO: 1381058 - DNA, 25 bp, Homo sapien
gagacagcctggtgctcagtgtagg

SEQ ID NO: 1381059 - DNA, 25 bp, Homo sapien
cagcctggtgctcagtgtaggccag

SEQ ID NO: 1381060 - DNA, 25 bp, Homo sapien
tttttccagacagcaggtcaggttc

SEQ ID NO: 1381061 - DNA, 25 bp, Homo sapien
tgagggggccctctgatgctgcttc

SEQ ID NO: 1381062 - DNA, 25 bp, Homo sapien
cttgagggggccctctgatgctgct

SEQ ID NO: 1381063 - DNA, 25 bp, Homo sapien
atatgtggcaggtttttccagacag

SEQ ID NO: 1381064 - DNA, 25 bp, Homo sapien
tcagaaggccatgccagtgagcttc

SEQ ID NO: 1381065 - DNA, 25 bp, Homo sapien
ccatgccagtgagcttcccattcag

SEQ ID NO: 1381066 - DNA, 25 bp, Homo sapien
atgccagtgagcttcccattcagct

SEQ ID NO: 1381067 - DNA, 25 bp, Homo sapien
cagtgagcttcccattcagctcagg

SEQ ID NO: 1381068 - DNA, 25 bp, Homo sapien
tctggagagccctgcggctgttatg

SEQ ID NO: 1381069 - DNA, 25 bp, Homo sapien
ggagagccctgcggctgttatgaca

SEQ ID NO: 1381070 - DNA, 25 bp, Homo sapien
ctggagagccctgcggctgttatga

SEQ ID NO: 1381071 - DNA, 25 bp, Homo sapien
agagccctgcggctgttatgacaca

SEQ ID NO: 1381072 - DNA, 25 bp, Homo sapien
tggtcacgagtccctccacagtacc

SEQ ID NO: 1381073 - DNA, 25 bp, Homo sapien
tgctaagcagttgatggcacaggaa

SEQ ID NO: 1381074 - DNA, 25 bp, Homo sapien
gtggtcacgagtccctccacagtac

SEQ ID NO: 1381075 - DNA, 25 bp, Homo sapien
gatgtcagtggacttcacaacatac

SEQ ID NO: 1381076 - DNA, 25 bp, Homo sapien
catgatgaagatgtcagtggacttc

SEQ ID NO: 1381077 - DNA, 25 bp, Homo sapien
ctccatgatgaagatgtcagtggac

SEQ ID NO: 1381078 - DNA, 25 bp, Homo sapien
ttctccatgatgaagatgtcagtgg

SEQ ID NO: 1381079 - DNA, 25 bp, Homo sapien
tgaccacgcacccaatacagcctaa

SEQ ID NO: 1381080 - DNA, 25 bp, Homo sapien
ggtcattgaaggcatcattgatggc

SEQ ID NO: 1381081 - DNA, 25 bp, Homo sapien
aatacagcctaatccattgactcca

SEQ ID NO: 1381082 - DNA, 25 bp, Homo sapien
tctggtggaatctagctcctggaag

SEQ ID NO: 1381083 - DNA, 25 bp, Homo sapien
gacagtgccacgtccctccattggg

SEQ ID NO: 1381084 - DNA, 25 bp, Homo sapien
ccacattgtctgacagtgccacgtc

SEQ ID NO: 1381085 - DNA, 25 bp, Homo sapien
actggtacctccaatggcccttggg

SEQ ID NO: 1381086 - DNA, 25 bp, Homo sapien
ggcctgttgattatcaaagtatcag

SEQ ID NO: 1381087 - DNA, 25 bp, Homo sapien
ttattcagtgtcacatgtaatagat

SEQ ID NO: 1381088 - DNA, 25 bp, Homo sapien
cagcgggggcttctaatcggaaaat

SEQ ID NO: 1381089 - DNA, 25 bp, Homo sapien
taatagataaaacagcgggggcttc

SEQ ID NO: 1381090 - DNA, 25 bp, Homo sapien
ttcagtgtcacatgtaatagataaa

SEQ ID NO: 1381091 - DNA, 25 bp, Homo sapien
aaactcagtttttgccttggaggag

SEQ ID NO: 1381092 - DNA, 25 bp, Homo sapien
ctggcactgtgggccgattctgtcc

SEQ ID NO: 1381093 - DNA, 25 bp, Homo sapien
aactcagtttttgccttggaggaga

SEQ ID NO: 1381094 - DNA, 25 bp, Homo sapien
actgtgggccgattctgtcctctct

SEQ ID NO: 1381095 - DNA, 25 bp, Homo sapien
ttgcctggcagtgacaatgtttgtg

SEQ ID NO: 1381096 - DNA, 25 bp, Homo sapien
tttgcctggcagtgacaatgtttgt

SEQ ID NO: 1381097 - DNA, 25 bp, Homo sapien
tgaaactggacacaggtggaaagtg

SEQ ID NO: 1381098 - DNA, 25 bp, Homo sapien
gaagcaattgaaactggacacaggt

SEQ ID NO: 1381099 - DNA, 25 bp, Homo sapien
gtatttacgtatggcatttggcatg

SEQ ID NO: 1381100 - DNA, 25 bp, Homo sapien
agtcaagtatttacgtatggcattt

SEQ ID NO: 1381101 - DNA, 25 bp, Homo sapien
ctaatgaagttcctgtttgaagagg

SEQ ID NO: 1381102 - DNA, 25 bp, Homo sapien
ttcctgtttgaagagggaggccctg

SEQ ID NO: 1381103 - DNA, 25 bp, Homo sapien
gagggaggccctgtcatctaagcag

SEQ ID NO: 1381104 - DNA, 25 bp, Homo sapien
aagagggaggccctgtcatctaagc

SEQ ID NO: 1381105 - DNA, 25 bp, Homo sapien
ttactctgatccttgagctccagga

SEQ ID NO: 1381106 - DNA, 25 bp, Homo sapien
tttctttggctgctccagacattcc

SEQ ID NO: 1381107 - DNA, 25 bp, Homo sapien
aaaaattgcattactctgatccttg

SEQ ID NO: 1381108 - DNA, 25 bp, Homo sapien
tgagctccaggacccttttgagttt

SEQ ID NO: 1381109 - DNA, 25 bp, Homo sapien
tctgtgctggaggatttttcagcct

SEQ ID NO: 1381110 - DNA, 25 bp, Homo sapien
cttggcagccttgtcttctgtggcc

SEQ ID NO: 1381111 - DNA, 25 bp, Homo sapien
ctgtggccttctctggaggcctgct

SEQ ID NO: 1381112 - DNA, 25 bp, Homo sapien
ctggaggcctgctgtctttttggtc

SEQ ID NO: 1381113 - DNA, 25 bp, Homo sapien
tttgagagggtcgtctttggctttg

SEQ ID NO: 1381114 - DNA, 25 bp, Homo sapien
gttcactgagctcctttgagagggt

SEQ ID NO: 1381115 - DNA, 25 bp, Homo sapien
cttaggttcactgagctcctttgag

SEQ ID NO: 1381116 - DNA, 25 bp, Homo sapien
tcctttgagagggtcgtctttggct

SEQ ID NO: 1381117 - DNA, 25 bp, Homo sapien
ggtttagcgtcttccttcacctcca

SEQ ID NO: 1381118 - DNA, 25 bp, Homo sapien
tgggtttagcgtcttccttcacctc

SEQ ID NO: 1381119 - DNA, 25 bp, Homo sapien
tctttgggtttagcgtcttccttca

SEQ ID NO: 1381120 - DNA, 25 bp, Homo sapien
ctgtttttggcgtggcggtagcttt

SEQ ID NO: 1381121 - DNA, 25 bp, Homo sapien
tttgcaggctctttgacttttacgt

SEQ ID NO: 1381122 - DNA, 25 bp, Homo sapien
ttggcgtggcggtagctttctcttc

SEQ ID NO: 1381123 - DNA, 25 bp, Homo sapien
aggctctttgacttttacgtcctgg

SEQ ID NO: 1381124 - DNA, 25 bp, Homo sapien
catcaagagtcttggccttctcagg

SEQ ID NO: 1381125 - DNA, 25 bp, Homo sapien
gacttcaccttctctgggaacttga

SEQ ID NO: 1381126 - DNA, 25 bp, Homo sapien
gggaacttgacctcctctttgacag

SEQ ID NO: 1381127 - DNA, 25 bp, Homo sapien
ctttgctggagtgttggcttctgga

SEQ ID NO: 1381128 - DNA, 25 bp, Homo sapien
tcccggggggacttgatctcagctg

SEQ ID NO: 1381129 - DNA, 25 bp, Homo sapien
ttcccggggggacttgatctcagct

SEQ ID NO: 1381130 - DNA, 25 bp, Homo sapien
cccggggggacttgatctcagctgg

SEQ ID NO: 1381131 - DNA, 25 bp, Homo sapien
cttcccggggggacttgatctcagc

SEQ ID NO: 1381132 - DNA, 25 bp, Homo sapien
gattttgcttcctccttctctgggg

SEQ ID NO: 1381133 - DNA, 25 bp, Homo sapien
cagctggggattttgcttcctcctt

SEQ ID NO: 1381134 - DNA, 25 bp, Homo sapien
ttttgcttcctccttctctggggac

SEQ ID NO: 1381135 - DNA, 25 bp, Homo sapien
ctcagctggggattttgcttcctcc

SEQ ID NO: 1381136 - DNA, 25 bp, Homo sapien
tccttctctggggatgtggcctctt

SEQ ID NO: 1381137 - DNA, 25 bp, Homo sapien
ttggcctcagccggtgactttgcct

SEQ ID NO: 1381138 - DNA, 25 bp, Homo sapien
tcttccttcactggggacttggctt

SEQ ID NO: 1381139 - DNA, 25 bp, Homo sapien
gcctcagccggtgactttgcctctt

SEQ ID NO: 1381140 - DNA, 25 bp, Homo sapien
ttgggtctcctctgtctgttcctcc

SEQ ID NO: 1381141 - DNA, 25 bp, Homo sapien
gttcctccacaatcacagtttcttt

SEQ ID NO: 1381142 - DNA, 25 bp, Homo sapien
tttttcagtcacttgggtctcctct

SEQ ID NO: 1381143 - DNA, 25 bp, Homo sapien
tctcagacttctctaccactttgat

SEQ ID NO: 1381144 - DNA, 25 bp, Homo sapien
gtgagaaaggaattgggccaaagcc

SEQ ID NO: 1381145 - DNA, 25 bp, Homo sapien
ggcatttggaggagtccttctggaa

SEQ ID NO: 1381146 - DNA, 25 bp, Homo sapien
tgtgagtggacatggagggcatttg

SEQ ID NO: 1381147 - DNA, 25 bp, Homo sapien
gccaaagccagtctgacattcctca

SEQ ID NO: 1381148 - DNA, 25 bp, Homo sapien
gtagtactctcgcagctgggccgcc

SEQ ID NO: 1381149 - DNA, 25 bp, Homo sapien
tggtagtactctcgcagctgggccg

SEQ ID NO: 1381150 - DNA, 25 bp, Homo sapien
ctggtagtactctcgcagctgggcc

SEQ ID NO: 1381151 - DNA, 25 bp, Homo sapien
cctggtagtactctcgcagctgggc

SEQ ID NO: 1381152 - DNA, 25 bp, Homo sapien
ttggtgttccagcgtccagctgctg

SEQ ID NO: 1381153 - DNA, 25 bp, Homo sapien
tggcttcctggtaggaggcaatgtc

SEQ ID NO: 1381154 - DNA, 25 bp, Homo sapien
gtgttccagcgtccagctgctgagt

SEQ ID NO: 1381155 - DNA, 25 bp, Homo sapien
taggaggcaatgtcggcctgatgac

SEQ ID NO: 1381156 - DNA, 25 bp, Homo sapien
gtgagtcgatggtgctcttcagtgc

SEQ ID NO: 1381157 - DNA, 25 bp, Homo sapien
ggtctcggccggaagctgacgctga

SEQ ID NO: 1381158 - DNA, 25 bp, Homo sapien
tctgtggtctcggccggaagctgac

SEQ ID NO: 1381159 - DNA, 25 bp, Homo sapien
gcctgtccagtgagtcgatggtgct

SEQ ID NO: 1381160 - DNA, 25 bp, Homo sapien
agtcggtccatcctcacttggaacc

SEQ ID NO: 1381161 - DNA, 25 bp, Homo sapien
agacagtcggtccatcctcacttgg

SEQ ID NO: 1381162 - DNA, 25 bp, Homo sapien
gacagtcggtccatcctcacttgga

SEQ ID NO: 1381163 - DNA, 25 bp, Homo sapien
tcagacagtcggtccatcctcactt

SEQ ID NO: 1381164 - DNA, 25 bp, Homo sapien
cctgcgcctgcgaggcgccgcagcc

SEQ ID NO: 1381165 - DNA, 25 bp, Homo sapien
agccctgcatctggccgagcagctc

SEQ ID NO: 1381166 - DNA, 25 bp, Homo sapien
gcgaggcgccgcagccctgcatctg

SEQ ID NO: 1381167 - DNA, 25 bp, Homo sapien
tgcatctggccgagcagctcgccca

SEQ ID NO: 1381168 - DNA, 25 bp, Homo sapien
aagccgccaacagcacaagccttga

SEQ ID NO: 1381169 - DNA, 25 bp, Homo sapien
ggtagctacactcctcttgcagtgc

SEQ ID NO: 1381170 - DNA, 25 bp, Homo sapien
gcaagaagccgccaacagcacaagc

SEQ ID NO: 1381171 - DNA, 25 bp, Homo sapien
cctgctggcggtgccacaggtagct

SEQ ID NO: 1381172 - DNA, 25 bp, Homo sapien
tgggcctcatcatggaggcaccggt

SEQ ID NO: 1381173 - DNA, 25 bp, Homo sapien
cctcatcatggaggcaccggtgcac

SEQ ID NO: 1381174 - DNA, 25 bp, Homo sapien
ggcctcatcatggaggcaccggtgc

SEQ ID NO: 1381175 - DNA, 25 bp, Homo sapien
tgctgggcctcatcatggaggcacc

SEQ ID NO: 1381176 - DNA, 25 bp, Homo sapien
cagccgagcgccttctgcttgtgct

SEQ ID NO: 1381177 - DNA, 25 bp, Homo sapien
cttgtgctgccctttagggtcagcg

SEQ ID NO: 1381178 - DNA, 25 bp, Homo sapien
agctcatggacatccgtgtccatga

SEQ ID NO: 1381179 - DNA, 25 bp, Homo sapien
ccctttagggtcagcgtgtagtgga

SEQ ID NO: 1381180 - DNA, 25 bp, Homo sapien
gtgggtcagccactcacaaacagga

SEQ ID NO: 1381181 - DNA, 25 bp, Homo sapien
gccttgacacactggagttggatgg

SEQ ID NO: 1381182 - DNA, 25 bp, Homo sapien
ggcagctggtgggtcagccactcac

SEQ ID NO: 1381183 - DNA, 25 bp, Homo sapien
gacacactggagttggatggcagct

SEQ ID NO: 1381184 - DNA, 25 bp, Homo sapien
gatagaaactgtctttttcaataaa

SEQ ID NO: 1381185 - DNA, 25 bp, Homo sapien
tcgttcccaggcacctagtcatcgt

SEQ ID NO: 1381186 - DNA, 25 bp, Homo sapien
tcagccatgtggtcaacatctggag

SEQ ID NO: 1381187 - DNA, 25 bp, Homo sapien
cagacctcgagttcagccaaaacct

SEQ ID NO: 1381188 - DNA, 25 bp, Homo sapien
tttgactcctgtttatcaacacctg

SEQ ID NO: 1381189 - DNA, 25 bp, Homo sapien
tcacatgatcctataagtagataca

SEQ ID NO: 1381190 - DNA, 25 bp, Homo sapien
ctatacattacaaccaagtgggatt

SEQ ID NO: 1381191 - DNA, 25 bp, Homo sapien
gggattaatctcaggtatgcaaagc

SEQ ID NO: 1381192 - DNA, 25 bp, Homo sapien
tccttcataaagtcatagcctcctg

SEQ ID NO: 1381193 - DNA, 25 bp, Homo sapien
gatttcctatgtacccacttccttc

SEQ ID NO: 1381194 - DNA, 25 bp, Homo sapien
actgatcttttcgacttctccatag

SEQ ID NO: 1381195 - DNA, 25 bp, Homo sapien
cattcgttacaatgatgaacccaca

SEQ ID NO: 1381196 - DNA, 25 bp, Homo sapien
tctcttggtaagggacccatcaaag

SEQ ID NO: 1381197 - DNA, 25 bp, Homo sapien
tcaatgctgattacactgatgtggt

SEQ ID NO: 1381198 - DNA, 25 bp, Homo sapien
gggaacccactcaatgctgattaca

SEQ ID NO: 1381199 - DNA, 25 bp, Homo sapien
tggcctcttgccgataatcacacat

SEQ ID NO: 1381200 - DNA, 25 bp, Homo sapien
ggaaccctaaagtcaggaatcatgc

SEQ ID NO: 1381201 - DNA, 25 bp, Homo sapien
tagacaggaagttccctagggacca

SEQ ID NO: 1381202 - DNA, 25 bp, Homo sapien
gtgcatcttccaacatcctagacag

SEQ ID NO: 1381203 - DNA, 25 bp, Homo sapien
cctgccggtcctctttctgtaggtg

SEQ ID NO: 1381204 - DNA, 25 bp, Homo sapien
aggtgatgttttgtcaggatatccc

SEQ ID NO: 1381205 - DNA, 25 bp, Homo sapien
cagatacccacagggactcaggccc

SEQ ID NO: 1381206 - DNA, 25 bp, Homo sapien
gatgttttgtcaggatatcccaatt

SEQ ID NO: 1381207 - DNA, 25 bp, Homo sapien
aaatgtcaggtgatgttttgtcagg

SEQ ID NO: 1381208 - DNA, 25 bp, Homo sapien
ccaatacccaaaaactcacatgcag

SEQ ID NO: 1381209 - DNA, 25 bp, Homo sapien
tccaatacccaaaaactcacatgca

SEQ ID NO: 1381210 - DNA, 25 bp, Homo sapien
gctccaatacccaaaaactcacatg

SEQ ID NO: 1381211 - DNA, 25 bp, Homo sapien
ctgctccaatacccaaaaactcaca

SEQ ID NO: 1381212 - DNA, 25 bp, Homo sapien
cctgggccaatgagaagcagagccg

SEQ ID NO: 1381213 - DNA, 25 bp, Homo sapien
cagcccctgggccaatgagaagcag

SEQ ID NO: 1381214 - DNA, 25 bp, Homo sapien
cagagccgtgggaaagaggccaacc

SEQ ID NO: 1381215 - DNA, 25 bp, Homo sapien
aagaggccaaccctcctgagaggga

SEQ ID NO: 1381216 - DNA, 25 bp, Homo sapien
gggacatcattactgtgtagctggc

SEQ ID NO: 1381217 - DNA, 25 bp, Homo sapien
tgtgtagctggcacagaagggaact

SEQ ID NO: 1381218 - DNA, 25 bp, Homo sapien
tcagacacggggacatcattactgt

SEQ ID NO: 1381219 - DNA, 25 bp, Homo sapien
cagaagggaactccaagaaagaatt

SEQ ID NO: 1381220 - DNA, 25 bp, Homo sapien
cacagacactggggtaccacacccc

SEQ ID NO: 1381221 - DNA, 25 bp, Homo sapien
cagacactggggtaccacaccccct

SEQ ID NO: 1381222 - DNA, 25 bp, Homo sapien
taccacacccccttcacgggtatgc

SEQ ID NO: 1381223 - DNA, 25 bp, Homo sapien
ccacacccccttcacgggtatgcca

SEQ ID NO: 1381224 - DNA, 25 bp, Homo sapien
ggcgtacttgaatgcttcccatcat

SEQ ID NO: 1381225 - DNA, 25 bp, Homo sapien
gataacacgtaagatgtttttcctg

SEQ ID NO: 1381226 - DNA, 25 bp, Homo sapien
tcatccctgatgtgctgcgttgtta

SEQ ID NO: 1381227 - DNA, 25 bp, Homo sapien
ccctcccttgtgttcgtattaactg

SEQ ID NO: 1381228 - DNA, 25 bp, Homo sapien
atgtaaacacagtcatggtaattta

SEQ ID NO: 1381229 - DNA, 25 bp, Homo sapien
tggtaatttactagcagcaagacct

SEQ ID NO: 1381230 - DNA, 25 bp, Homo sapien
gtaatttactagcagcaagacctgt

SEQ ID NO: 1381231 - DNA, 25 bp, Homo sapien
aaacacagtcatggtaatttactag

SEQ ID NO: 1381232 - DNA, 25 bp, Homo sapien
gatctgttgttcctgaaacagccac

SEQ ID NO: 1381233 - DNA, 25 bp, Homo sapien
gcaagcccaaatcaaggatctgttg

SEQ ID NO: 1381234 - DNA, 25 bp, Homo sapien
aaccacgttgtccaccagaaacaga

SEQ ID NO: 1381235 - DNA, 25 bp, Homo sapien
gcagaaatacctcagggaggccact

SEQ ID NO: 1381236 - DNA, 25 bp, Homo sapien
ttctccctcttgagcactggacttg

SEQ ID NO: 1381237 - DNA, 25 bp, Homo sapien
ttctccccacgcttccacaatgctg

SEQ ID NO: 1381238 - DNA, 25 bp, Homo sapien
cttctccccacgcttccacaatgct

SEQ ID NO: 1381239 - DNA, 25 bp, Homo sapien
ccttctccccacgcttccacaatgc

SEQ ID NO: 1381240 - DNA, 25 bp, Homo sapien
ggaggacctgtttgcctggaagccc

SEQ ID NO: 1381241 - DNA, 25 bp, Homo sapien
ttctttcacacgcagatctgcatgt

SEQ ID NO: 1381242 - DNA, 25 bp, Homo sapien
taagtggaggacctgtttgcctgga

SEQ ID NO: 1381243 - DNA, 25 bp, Homo sapien
tcacacgcagatctgcatgtaagtg

SEQ ID NO: 1381244 - DNA, 25 bp, Homo sapien
aactcctgacctcttattttctgag

SEQ ID NO: 1381245 - DNA, 25 bp, Homo sapien
ctcctgacctcttattttctgagac

SEQ ID NO: 1381246 - DNA, 25 bp, Homo sapien
ttattttctgagacagtttctcact

SEQ ID NO: 1381247 - DNA, 25 bp, Homo sapien
attttctgagacagtttctcactgt

SEQ ID NO: 1381248 - DNA, 25 bp, Homo sapien
catgagcatgagcattcggacaggt

SEQ ID NO: 1381249 - DNA, 25 bp, Homo sapien
gctggagcagaattgccttcacatg

SEQ ID NO: 1381250 - DNA, 25 bp, Homo sapien
tctccaggttggctgtcagtccggc

SEQ ID NO: 1381251 - DNA, 25 bp, Homo sapien
ttcggacaggtctggacttgtccct

SEQ ID NO: 1381252 - DNA, 25 bp, Homo sapien
ctgacaaggaggaagcggtggcagg

SEQ ID NO: 1381253 - DNA, 25 bp, Homo sapien
gacaaggaggaagcggtggcaggaa

SEQ ID NO: 1381254 - DNA, 25 bp, Homo sapien
aagcggtggcaggaagcctgtgggc

SEQ ID NO: 1381255 - DNA, 25 bp, Homo sapien
ggaggaagcggtggcaggaagcctg

SEQ ID NO: 1381256 - DNA, 25 bp, Homo sapien
tcccttcttgcagccaactgaggca

SEQ ID NO: 1381257 - DNA, 25 bp, Homo sapien
tccttggaagggataaccagcctct

SEQ ID NO: 1381258 - DNA, 25 bp, Homo sapien
agagtcgattggcacagggcagcca

SEQ ID NO: 1381259 - DNA, 25 bp, Homo sapien
tggacagtgggccttaagcgagcct

SEQ ID NO: 1381260 - DNA, 25 bp, Homo sapien
aaatgggccacatccactaaggtag

SEQ ID NO: 1381261 - DNA, 25 bp, Homo sapien
ctaaggtagcagtagtagaagggca

SEQ ID NO: 1381262 - DNA, 25 bp, Homo sapien
gaccaggtggaaagtggaagcccat

SEQ ID NO: 1381263 - DNA, 25 bp, Homo sapien
cataggctgatagccttcacaggac

SEQ ID NO: 1381264 - DNA, 25 bp, Homo sapien
ctaggatctggtcccaggtgtctgc

SEQ ID NO: 1381265 - DNA, 25 bp, Homo sapien
tgctactcctaggatctggtcccag

SEQ ID NO: 1381266 - DNA, 25 bp, Homo sapien
ggatctggtcccaggtgtctgcact

SEQ ID NO: 1381267 - DNA, 25 bp, Homo sapien
ctcctaggatctggtcccaggtgtc

SEQ ID NO: 1381268 - DNA, 25 bp, Homo sapien
tctaaatgtgatcagcacagcattc

SEQ ID NO: 1381269 - DNA, 25 bp, Homo sapien
tttgtctaaatgtgatcagcacagc

SEQ ID NO: 1381270 - DNA, 25 bp, Homo sapien
ctaaatgtgatcagcacagcattct

SEQ ID NO: 1381271 - DNA, 25 bp, Homo sapien
tgtctaaatgtgatcagcacagcat

SEQ ID NO: 1381272 - DNA, 25 bp, Homo sapien
tctgcatctgactctttctttagga

SEQ ID NO: 1381273 - DNA, 25 bp, Homo sapien
ctttaatcctccagatatgccttga

SEQ ID NO: 1381274 - DNA, 25 bp, Homo sapien
ttctttaggatgactccttttccaa

SEQ ID NO: 1381275 - DNA, 25 bp, Homo sapien
tggccctccatgtaagtagtctctg

SEQ ID NO: 1381276 - DNA, 25 bp, Homo sapien
gtggatgggactgtcaggccttcag

SEQ ID NO: 1381277 - DNA, 25 bp, Homo sapien
gatgggccagtggatgggactgtca

SEQ ID NO: 1381278 - DNA, 25 bp, Homo sapien
ctggagggagctatatgttgcatca

SEQ ID NO: 1381279 - DNA, 25 bp, Homo sapien
catttcatctgtgctggatgggcca

SEQ ID NO: 1381280 - DNA, 25 bp, Homo sapien
gtgacaccagccgtaacattttcca

SEQ ID NO: 1381281 - DNA, 25 bp, Homo sapien
tggtgacaccagccgtaacattttc

SEQ ID NO: 1381282 - DNA, 25 bp, Homo sapien
gacaccagccgtaacattttccagg

SEQ ID NO: 1381283 - DNA, 25 bp, Homo sapien
tgacaccagccgtaacattttccag

SEQ ID NO: 1381284 - DNA, 25 bp, Homo sapien
gagcaccaaagcagaacactcagag

SEQ ID NO: 1381285 - DNA, 25 bp, Homo sapien
acactcagagggtgcggctaaggcc

SEQ ID NO: 1381286 - DNA, 25 bp, Homo sapien
agaacactcagagggtgcggctaag

SEQ ID NO: 1381287 - DNA, 25 bp, Homo sapien
tcggggagcaccaaagcagaacact

SEQ ID NO: 1381288 - DNA, 25 bp, Homo sapien
atcatggcatcaaggatcatggaaa

SEQ ID NO: 1381289 - DNA, 25 bp, Homo sapien
gatcatggaaacgttacaccagcca

SEQ ID NO: 1381290 - DNA, 25 bp, Homo sapien
aacgttacaccagccactcttttct

SEQ ID NO: 1381291 - DNA, 25 bp, Homo sapien
catcaaggatcatggaaacgttaca

SEQ ID NO: 1381292 - DNA, 25 bp, Homo sapien
agtggtacgcttctgtttttctcgg

SEQ ID NO: 1381293 - DNA, 25 bp, Homo sapien
gtgccaaacgctgcagcacaaggat

SEQ ID NO: 1381294 - DNA, 25 bp, Homo sapien
ttttttaatactagcacacagtgag

SEQ ID NO: 1381295 - DNA, 25 bp, Homo sapien
tcatcataagctttggctgtccctg

SEQ ID NO: 1381296 - DNA, 25 bp, Homo sapien
tgttgactgcatagaatcgggcaca

SEQ ID NO: 1381297 - DNA, 25 bp, Homo sapien
ccttgagttctagggcggctgacac

SEQ ID NO: 1381298 - DNA, 25 bp, Homo sapien
taggagagtcaactatctgctgctc

SEQ ID NO: 1381299 - DNA, 25 bp, Homo sapien
caggagctcctgtgactctagtgga

SEQ ID NO: 1381300 - DNA, 25 bp, Homo sapien
tgttctaatcagtgccacaggcgcc

SEQ ID NO: 1381301 - DNA, 25 bp, Homo sapien
aggaaggagacaggcccaccctagc

SEQ ID NO: 1381302 - DNA, 25 bp, Homo sapien
cttgggcacctcaccgaaacactta

SEQ ID NO: 1381303 - DNA, 25 bp, Homo sapien
aaaatgagtctttattggcaatcag

SEQ ID NO: 1381304 - DNA, 25 bp, Homo sapien
actcccggcccggaaggtgctgcgg

SEQ ID NO: 1381305 - DNA, 25 bp, Homo sapien
gtgagcctttgatatgccccgccat

SEQ ID NO: 1381306 - DNA, 25 bp, Homo sapien
ctcgagagcggaaatgtgagccttt

SEQ ID NO: 1381307 - DNA, 25 bp, Homo sapien
gtcctcggctcgagagcggaaatgt

SEQ ID NO: 1381308 - DNA, 25 bp, Homo sapien
cgggccgaaatgcaactgcctctgg

SEQ ID NO: 1381309 - DNA, 25 bp, Homo sapien
gctctgaggacgggccgaaatgcaa

SEQ ID NO: 1381310 - DNA, 25 bp, Homo sapien
gacgggccgaaatgcaactgcctct

SEQ ID NO: 1381311 - DNA, 25 bp, Homo sapien
tgaggacgggccgaaatgcaactgc

SEQ ID NO: 1381312 - DNA, 25 bp, Homo sapien
ggcagcaggctagtcggcatttatg

SEQ ID NO: 1381313 - DNA, 25 bp, Homo sapien
ttgttttagcgatgagctgctgagc

SEQ ID NO: 1381314 - DNA, 25 bp, Homo sapien
tctgtcgatgtgtgtctgcgtctca

SEQ ID NO: 1381315 - DNA, 25 bp, Homo sapien
cattttcatattggcactgcgtctg

SEQ ID NO: 1381316 - DNA, 25 bp, Homo sapien
gctgttttgtttaattgcattggtt

SEQ ID NO: 1381317 - DNA, 25 bp, Homo sapien
ctgttttgtttaattgcattggttt

SEQ ID NO: 1381318 - DNA, 25 bp, Homo sapien
agctgttttgtttaattgcattggt

SEQ ID NO: 1381319 - DNA, 25 bp, Homo sapien
taaaggcagggttgcaagggtcatt

SEQ ID NO: 1381320 - DNA, 25 bp, Homo sapien
ggtcatttgactctgctttgggaaa

SEQ ID NO: 1381321 - DNA, 25 bp, Homo sapien
cttaaaggcagggttgcaagggtca

SEQ ID NO: 1381322 - DNA, 25 bp, Homo sapien
agggtcatttgactctgctttggga

SEQ ID NO: 1381323 - DNA, 25 bp, Homo sapien
agatgtcagaaagtggacgattgag

SEQ ID NO: 1381324 - DNA, 25 bp, Homo sapien
gacgattgagatgagggtcaagggc

SEQ ID NO: 1381325 - DNA, 25 bp, Homo sapien
tcagaaagtggacgattgagatgag

SEQ ID NO: 1381326 - DNA, 25 bp, Homo sapien
tgtcagaaagtggacgattgagatg

SEQ ID NO: 1381327 - DNA, 25 bp, Homo sapien
ttctaggagtagtcagggaacggaa

SEQ ID NO: 1381328 - DNA, 25 bp, Homo sapien
agcacgctgtcggaagccaagcaga

SEQ ID NO: 1381329 - DNA, 25 bp, Homo sapien
gagggattggtcacatgctgctaca

SEQ ID NO: 1381330 - DNA, 25 bp, Homo sapien
tggacttgttaaagagggattggtc

SEQ ID NO: 1381331 - DNA, 25 bp, Homo sapien
ggctctggaaattgttcggtccttg

SEQ ID NO: 1381332 - DNA, 25 bp, Homo sapien
tgcacactaaggatctttccctgtg

SEQ ID NO: 1381333 - DNA, 25 bp, Homo sapien
tgctgcctgattgcagcccatttcc

SEQ ID NO: 1381334 - DNA, 25 bp, Homo sapien
ccttgtgtaggcgactgctgcctga

SEQ ID NO: 1381335 - DNA, 25 bp, Homo sapien
catcaactttccgtgatgatgtggt

SEQ ID NO: 1381336 - DNA, 25 bp, Homo sapien
tgtttcatctttatcgactctgacg

SEQ ID NO: 1381337 - DNA, 25 bp, Homo sapien
aggtgttagctcatcaactttccgt

SEQ ID NO: 1381338 - DNA, 25 bp, Homo sapien
tctttatcgactctgacgcttggcc

SEQ ID NO: 1381339 - DNA, 25 bp, Homo sapien
cctcatcagggaagctcggcataga

SEQ ID NO: 1381340 - DNA, 25 bp, Homo sapien
ggcttctagcactgtgtctacaaat

SEQ ID NO: 1381341 - DNA, 25 bp, Homo sapien
gggaagctcggcatagacccctcat

SEQ ID NO: 1381342 - DNA, 25 bp, Homo sapien
cactgtgtctacaaatgagaagggc

SEQ ID NO: 1381343 - DNA, 25 bp, Homo sapien
acagtcaaataacgggagagaggac

SEQ ID NO: 1381344 - DNA, 25 bp, Homo sapien
gtcaaataacgggagagaggacaga

SEQ ID NO: 1381345 - DNA, 25 bp, Homo sapien
gggaacagtcaaataacgggagaga

SEQ ID NO: 1381346 - DNA, 25 bp, Homo sapien
ctagggaacagtcaaataacgggag

SEQ ID NO: 1381347 - DNA, 25 bp, Homo sapien
agttgacccttcctctgttgtggct

SEQ ID NO: 1381348 - DNA, 25 bp, Homo sapien
cagttgacccttcctctgttgtggc

SEQ ID NO: 1381349 - DNA, 25 bp, Homo sapien
gctgccttttgattcctgtcattgc

SEQ ID NO: 1381350 - DNA, 25 bp, Homo sapien
gttgacccttcctctgttgtggctc

SEQ ID NO: 1381351 - DNA, 25 bp, Homo sapien
gggtccctgaatgatctctgggcct

SEQ ID NO: 1381352 - DNA, 25 bp, Homo sapien
ccaccattgatagagggtccctgaa

SEQ ID NO: 1381353 - DNA, 25 bp, Homo sapien
ctctccccaccattgatagagggtc

SEQ ID NO: 1381354 - DNA, 25 bp, Homo sapien
ggtccctgaatgatctctgggcctc

SEQ ID NO: 1381355 - DNA, 25 bp, Homo sapien
agaaattctcccatccagatactaa

SEQ ID NO: 1381356 - DNA, 25 bp, Homo sapien
caagatcagacgagatcaggcgggt

SEQ ID NO: 1381357 - DNA, 25 bp, Homo sapien
aagatcagacgagatcaggcgggtt

SEQ ID NO: 1381358 - DNA, 25 bp, Homo sapien
accagaaattctcccatccagatac

SEQ ID NO: 1381359 - DNA, 25 bp, Homo sapien
tcttattgagcccaactgctttttt

SEQ ID NO: 1381360 - DNA, 25 bp, Homo sapien
ccctggaatctacaatttggctctc

SEQ ID NO: 1381361 - DNA, 25 bp, Homo sapien
gagagcactgaaatggcagccctgg

SEQ ID NO: 1381362 - DNA, 25 bp, Homo sapien
tataacttcttattgagcccaactg

SEQ ID NO: 1381363 - DNA, 25 bp, Homo sapien
ttatcttgccaccttagccttaaga

SEQ ID NO: 1381364 - DNA, 25 bp, Homo sapien
cttgccaccttagccttaagaatga

SEQ ID NO: 1381365 - DNA, 25 bp, Homo sapien
tatcttgccaccttagccttaagaa

SEQ ID NO: 1381366 - DNA, 25 bp, Homo sapien
tcttgccaccttagccttaagaatg

SEQ ID NO: 1381367 - DNA, 25 bp, Homo sapien
tgcaaggaaggggaggatggggaca

SEQ ID NO: 1381368 - DNA, 25 bp, Homo sapien
caaggaaggggaggatggggacaag

SEQ ID NO: 1381369 - DNA, 25 bp, Homo sapien
ctgcaaggaaggggaggatggggac

SEQ ID NO: 1381370 - DNA, 25 bp, Homo sapien
gcaaggaaggggaggatggggacaa

SEQ ID NO: 1381371 - DNA, 25 bp, Homo sapien
aagagggatcccacgaagttattct

SEQ ID NO: 1381372 - DNA, 25 bp, Homo sapien
gctccagtagttgtgaggccactgt

SEQ ID NO: 1381373 - DNA, 25 bp, Homo sapien
ctgctccagtagttgtgaggccact

SEQ ID NO: 1381374 - DNA, 25 bp, Homo sapien
gagcagaagagggatcccacgaagt

SEQ ID NO: 1381375 - DNA, 25 bp, Homo sapien
gcattggtcaccaagagtcttgcag

SEQ ID NO: 1381376 - DNA, 25 bp, Homo sapien
caggtcattttaaggtccactgcag

SEQ ID NO: 1381377 - DNA, 25 bp, Homo sapien
cgtgcttgggctccttaacctgaag

SEQ ID NO: 1381378 - DNA, 25 bp, Homo sapien
gacatgaaggaaacccagcaatttg

SEQ ID NO: 1381379 - DNA, 25 bp, Homo sapien
gccggatgagttgtgctcctcctgg

SEQ ID NO: 1381380 - DNA, 25 bp, Homo sapien
accatgggccggatgagttgtgctc

SEQ ID NO: 1381381 - DNA, 25 bp, Homo sapien
tgggccggatgagttgtgctcctcc

SEQ ID NO: 1381382 - DNA, 25 bp, Homo sapien
catgggccggatgagttgtgctcct

SEQ ID NO: 1381383 - DNA, 25 bp, Homo sapien
gttctgcacttatcaccgagtcgcc

SEQ ID NO: 1381384 - DNA, 25 bp, Homo sapien
ccatgcacatggtagaaacattaga

SEQ ID NO: 1381385 - DNA, 25 bp, Homo sapien
tagattctgcattgacagtagcctt

SEQ ID NO: 1381386 - DNA, 25 bp, Homo sapien
ccaccaaggggaccatgcacatggt

SEQ ID NO: 1381387 - DNA, 25 bp, Homo sapien
tgccccatgtccactgggctgccca

SEQ ID NO: 1381388 - DNA, 25 bp, Homo sapien
gtccactgggctgcccaagctgcat

SEQ ID NO: 1381389 - DNA, 25 bp, Homo sapien
catgtccactgggctgcccaagctg

SEQ ID NO: 1381390 - DNA, 25 bp, Homo sapien
ctgccccatgtccactgggctgccc

SEQ ID NO: 1381391 - DNA, 25 bp, Homo sapien
ttgttgtaccaaatagggctcccca

SEQ ID NO: 1381392 - DNA, 25 bp, Homo sapien
tcatgggacagtagaactctgactc

SEQ ID NO: 1381393 - DNA, 25 bp, Homo sapien
tcccagggcattgtaccaaggacct

SEQ ID NO: 1381394 - DNA, 25 bp, Homo sapien
gccccagaaagagcctaagctatgt

SEQ ID NO: 1381395 - DNA, 25 bp, Homo sapien
ccggtggcccttgcttcttgctttg

SEQ ID NO: 1381396 - DNA, 25 bp, Homo sapien
gatcttggtagaggaggcccctcct

SEQ ID NO: 1381397 - DNA, 25 bp, Homo sapien
tcctgcccagaccttcgtttgtttc

SEQ ID NO: 1381398 - DNA, 25 bp, Homo sapien
tccccggtggcccttgcttcttgct

SEQ ID NO: 1381399 - DNA, 25 bp, Homo sapien
caagtcaaggagagctccaggtttc

SEQ ID NO: 1381400 - DNA, 25 bp, Homo sapien
ggttgtaagcagtggccgtgaccca

SEQ ID NO: 1381401 - DNA, 25 bp, Homo sapien
tactaagagtgcattcagaaaacca

SEQ ID NO: 1381402 - DNA, 25 bp, Homo sapien
catgtgtactgtcctttctgggtga

SEQ ID NO: 1381403 - DNA, 25 bp, Homo sapien
ggctactgtagagggagttcaccca

SEQ ID NO: 1381404 - DNA, 25 bp, Homo sapien
gaatgtagcatcttgtcccggtcca

SEQ ID NO: 1381405 - DNA, 25 bp, Homo sapien
caagcacaggtagcactaggactag

SEQ ID NO: 1381406 - DNA, 25 bp, Homo sapien
tgtttacccacgtttgaaggcagat

SEQ ID NO: 1381407 - DNA, 25 bp, Homo sapien
cagaagttttctcctgagtgccagg

SEQ ID NO: 1381408 - DNA, 25 bp, Homo sapien
tatctaccgcgagctcatggtcagg

SEQ ID NO: 1381409 - DNA, 25 bp, Homo sapien
tactggaccgaaaatgtgactgagc

SEQ ID NO: 1381410 - DNA, 25 bp, Homo sapien
taaatatcgggagcatctgacaggt

SEQ ID NO: 1381411 - DNA, 25 bp, Homo sapien
gagctgccagcctaatgttcagtga

SEQ ID NO: 1381412 - DNA, 25 bp, Homo sapien
tgttcagtgatgatctgtactttgt

SEQ ID NO: 1381413 - DNA, 25 bp, Homo sapien
tactttgtatagcatgatggcagcc

SEQ ID NO: 1381414 - DNA, 25 bp, Homo sapien
tgtgtggaatgtactcatgcaattg

SEQ ID NO: 1381415 - DNA, 25 bp, Homo sapien
caggaggtgagcgaatgtctagatt

SEQ ID NO: 1381416 - DNA, 25 bp, Homo sapien
tcttgactatcatcaaagagatgtt

SEQ ID NO: 1381417 - DNA, 25 bp, Homo sapien
caaagagatgttctttaacatgtag

SEQ ID NO: 1381418 - DNA, 25 bp, Homo sapien
taacatgtaggattcgtcggcaatg

SEQ ID NO: 1381419 - DNA, 25 bp, Homo sapien
tctgtctcaggagttgaccaaccag

SEQ ID NO: 1381420 - DNA, 25 bp, Homo sapien
aaatttgccctgatccagttcagca

SEQ ID NO: 1381421 - DNA, 25 bp, Homo sapien
ggctgctttcacgataaaaatggca

SEQ ID NO: 1381422 - DNA, 25 bp, Homo sapien
tatactggaatatggtcactcccat

SEQ ID NO: 1381423 - DNA, 25 bp, Homo sapien
ttcactggcagaggaagtattagct

SEQ ID NO: 1381424 - DNA, 25 bp, Homo sapien
aacaaactactgacataatgacagc

SEQ ID NO: 1381425 - DNA, 25 bp, Homo sapien
caatccccttgtttatcgataggtg

SEQ ID NO: 1381426 - DNA, 25 bp, Homo sapien
gctgagaagtagcatgaaggaacct

SEQ ID NO: 1381427 - DNA, 25 bp, Homo sapien
tccaggtcttgctaaagcactctgc

SEQ ID NO: 1381428 - DNA, 25 bp, Homo sapien
aagacagcaggcttgtcaagttgac

SEQ ID NO: 1381429 - DNA, 25 bp, Homo sapien
taggagatggcactaataagtcagt

SEQ ID NO: 1381430 - DNA, 25 bp, Homo sapien
caacttggatgaagggaaagacagc

SEQ ID NO: 1381431 - DNA, 25 bp, Homo sapien
cccttctgtggtttccacgttgcgg

SEQ ID NO: 1381432 - DNA, 25 bp, Homo sapien
ttctgtggtttccacgttgcggctg

SEQ ID NO: 1381433 - DNA, 25 bp, Homo sapien
tggtttccacgttgcggctggtaac

SEQ ID NO: 1381434 - DNA, 25 bp, Homo sapien
tgtggtttccacgttgcggctggta

SEQ ID NO: 1381435 - DNA, 25 bp, Homo sapien
ctagagaacatccagtacacacagg

SEQ ID NO: 1381436 - DNA, 25 bp, Homo sapien
tagagaacatccagtacacacagga

SEQ ID NO: 1381437 - DNA, 25 bp, Homo sapien
agagaacatccagtacacacaggaa

SEQ ID NO: 1381438 - DNA, 25 bp, Homo sapien
tccgtatttgatttcggcgcgcgcc

SEQ ID NO: 1381439 - DNA, 25 bp, Homo sapien
cccctggctccgtatttgatttcgg

SEQ ID NO: 1381440 - DNA, 25 bp, Homo sapien
cgtatttgatttcggcgcgcgccat

SEQ ID NO: 1381441 - DNA, 25 bp, Homo sapien
tggctccgtatttgatttcggcgcg

SEQ ID NO: 1381442 - DNA, 25 bp, Homo sapien
gaaaaaccctgacaatgattgcgct

SEQ ID NO: 1381443 - DNA, 25 bp, Homo sapien
cacagagtagtgacggagtggcact

SEQ ID NO: 1381444 - DNA, 25 bp, Homo sapien
caagtgctagggttctgctgaataa

SEQ ID NO: 1381445 - DNA, 25 bp, Homo sapien
gacgtggctctccaaagatggtaga

SEQ ID NO: 1381446 - DNA, 25 bp, Homo sapien
tccagccactctgtgaaagcacatt

SEQ ID NO: 1381447 - DNA, 25 bp, Homo sapien
taaagtcagtcaagaggaagaggta

SEQ ID NO: 1381448 - DNA, 25 bp, Homo sapien
taggaaatgatccagctttcacttc

SEQ ID NO: 1381449 - DNA, 25 bp, Homo sapien
tcacactgaggtcatgtgccaccca

SEQ ID NO: 1381450 - DNA, 25 bp, Homo sapien
tagtagggtaacttgtagacactgc

SEQ ID NO: 1381451 - DNA, 25 bp, Homo sapien
cctctctgaattaggcatatcattt

SEQ ID NO: 1381452 - DNA, 25 bp, Homo sapien
gaatgtactagttgaccgattagaa

SEQ ID NO: 1381453 - DNA, 25 bp, Homo sapien
gagcctaacttgtttggtatttaga

SEQ ID NO: 1381454 - DNA, 25 bp, Homo sapien
actctggcagaattgtatataagct

SEQ ID NO: 1381455 - DNA, 25 bp, Homo sapien
cagtaaagttcaaaaagcgggccag

SEQ ID NO: 1381456 - DNA, 25 bp, Homo sapien
taagcttcagtaaagttcaaaaagc

SEQ ID NO: 1381457 - DNA, 25 bp, Homo sapien
tgagtggtatggaaaccaattgatt

SEQ ID NO: 1381458 - DNA, 25 bp, Homo sapien
ttctcctgcactaataggataagca

SEQ ID NO: 1381459 - DNA, 25 bp, Homo sapien
cctgcactaataggataagcatgga

SEQ ID NO: 1381460 - DNA, 25 bp, Homo sapien
cagattctcctgcactaataggata

SEQ ID NO: 1381461 - DNA, 25 bp, Homo sapien
gccagattctcctgcactaatagga

SEQ ID NO: 1381462 - DNA, 25 bp, Homo sapien
gcaagacagctcagttaaattgagt

SEQ ID NO: 1381463 - DNA, 25 bp, Homo sapien
agcaggcaagacagctcagttaaat

SEQ ID NO: 1381464 - DNA, 25 bp, Homo sapien
agtcttgggctctgttgatcactga

SEQ ID NO: 1381465 - DNA, 25 bp, Homo sapien
caggcaagacagctcagttaaattg

SEQ ID NO: 1381466 - DNA, 25 bp, Homo sapien
gaggcaccagtgctgtgtacatcct

SEQ ID NO: 1381467 - DNA, 25 bp, Homo sapien
caagagtttcagaagaacacacaaa

SEQ ID NO: 1381468 - DNA, 25 bp, Homo sapien
tttaatacatgctgagtttattgcc

SEQ ID NO: 1381469 - DNA, 25 bp, Homo sapien
tgccatataagaaatcaagagtttc

SEQ ID NO: 1381470 - DNA, 25 bp, Homo sapien
ctgtcatggcatagagacggagtag

SEQ ID NO: 1381471 - DNA, 25 bp, Homo sapien
tcctgtggtagaaaaagaacgttgc

SEQ ID NO: 1381472 - DNA, 25 bp, Homo sapien
tcagtgccaatggaatagatacctc

SEQ ID NO: 1381473 - DNA, 25 bp, Homo sapien
gaaaaaggtcataataggccaggtg

SEQ ID NO: 1381474 - DNA, 25 bp, Homo sapien
aatgtagaggtggttttttgtgctc

SEQ ID NO: 1381475 - DNA, 25 bp, Homo sapien
atgtagaggtggttttttgtgctca

SEQ ID NO: 1381476 - DNA, 25 bp, Homo sapien
aaatgtagaggtggttttttgtgct

SEQ ID NO: 1381477 - DNA, 25 bp, Homo sapien
gaaatgtagaggtggttttttgtgc

SEQ ID NO: 1381478 - DNA, 25 bp, Homo sapien
tagaatgaacgaaggtctgggtcct

SEQ ID NO: 1381479 - DNA, 25 bp, Homo sapien
ctctggaaatctcaagtggtgctgc

SEQ ID NO: 1381480 - DNA, 25 bp, Homo sapien
gcaagataaggcactttgtttttaa

SEQ ID NO: 1381481 - DNA, 25 bp, Homo sapien
cagtctctttagaatgaacgaaggt

SEQ ID NO: 1381482 - DNA, 25 bp, Homo sapien
cacagtcctaagtagactcctcggt

SEQ ID NO: 1381483 - DNA, 25 bp, Homo sapien
aagtagactcctcggtgcgctctgc

SEQ ID NO: 1381484 - DNA, 25 bp, Homo sapien
tcctaagtagactcctcggtgcgct

SEQ ID NO: 1381485 - DNA, 25 bp, Homo sapien
cagagagccacagtcctaagtagac

SEQ ID NO: 1381486 - DNA, 25 bp, Homo sapien
tccatggccacagcctaggtaccca

SEQ ID NO: 1381487 - DNA, 25 bp, Homo sapien
gatgacctgggtggcctttgtgtcc

SEQ ID NO: 1381488 - DNA, 25 bp, Homo sapien
taaattttccacagcatgaccagtg

SEQ ID NO: 1381489 - DNA, 25 bp, Homo sapien
tgtccatgtgcattcagatttctca

SEQ ID NO: 1381490 - DNA, 25 bp, Homo sapien
agttttcacactgcttaggccgctg

SEQ ID NO: 1381491 - DNA, 25 bp, Homo sapien
ctgcttaggccgctggaaagggaca

SEQ ID NO: 1381492 - DNA, 25 bp, Homo sapien
gtccatagttttcacactgcttagg

SEQ ID NO: 1381493 - DNA, 25 bp, Homo sapien
gaataagatgggtccatagttttca

SEQ ID NO: 1381494 - DNA, 25 bp, Homo sapien
aagggcccgtcgcttgattcccact

SEQ ID NO: 1381495 - DNA, 25 bp, Homo sapien
agggcccgtcgcttgattcccactg

SEQ ID NO: 1381496 - DNA, 25 bp, Homo sapien
ggaagggcccgtcgcttgattccca

SEQ ID NO: 1381497 - DNA, 25 bp, Homo sapien
ggcccgtcgcttgattcccactgct

SEQ ID NO: 1381498 - DNA, 25 bp, Homo sapien
gcgcagcgagcggttttctggcccc

SEQ ID NO: 1381499 - DNA, 25 bp, Homo sapien
agtgtgggcggtgctttctcctcac

SEQ ID NO: 1381500 - DNA, 25 bp, Homo sapien
ctggcatggtgcctccacaggcgca

SEQ ID NO: 1381501 - DNA, 25 bp, Homo sapien
ggtgcagcagtgaaacacgcctgag

SEQ ID NO: 1381502 - DNA, 25 bp, Homo sapien
tacgagttaacaggatgtgctgcgc

SEQ ID NO: 1381503 - DNA, 25 bp, Homo sapien
tatgtgctaaacagagtctgaggca

SEQ ID NO: 1381504 - DNA, 25 bp, Homo sapien
gcaatgaacagcatcttacgagtta

SEQ ID NO: 1381505 - DNA, 25 bp, Homo sapien
tcagaccaaaagcaatgaacagcat

SEQ ID NO: 1381506 - DNA, 25 bp, Homo sapien
gacgtaggtactgatttattccatg

SEQ ID NO: 1381507 - DNA, 25 bp, Homo sapien
gcttttcaccgcagatgctaagtac

SEQ ID NO: 1381508 - DNA, 25 bp, Homo sapien
cagtgacatctgtattagctgggaa

SEQ ID NO: 1381509 - DNA, 25 bp, Homo sapien
ttattccatgtagctgaacctgctg

SEQ ID NO: 1381510 - DNA, 25 bp, Homo sapien
tcacaaccacaaagataggacattc

SEQ ID NO: 1381511 - DNA, 25 bp, Homo sapien
tccaatttctcagccatgtacctct

SEQ ID NO: 1381512 - DNA, 25 bp, Homo sapien
tttctcagccatgtacctcttctca

SEQ ID NO: 1381513 - DNA, 25 bp, Homo sapien
agataggacattctgtggtcccttc

SEQ ID NO: 1381514 - DNA, 25 bp, Homo sapien
atcctggacatgacttatctgttta

SEQ ID NO: 1381515 - DNA, 25 bp, Homo sapien
tccatcctggacatgacttatctgt

SEQ ID NO: 1381516 - DNA, 25 bp, Homo sapien
ccatcctggacatgacttatctgtt

SEQ ID NO: 1381517 - DNA, 25 bp, Homo sapien
ttccatcctggacatgacttatctg

SEQ ID NO: 1381518 - DNA, 25 bp, Homo sapien
tgctgttctttgatgcagacccaca

SEQ ID NO: 1381519 - DNA, 25 bp, Homo sapien
gacccacacagtatagacgccaggt

SEQ ID NO: 1381520 - DNA, 25 bp, Homo sapien
tatcctggaccattgttctgactgg

SEQ ID NO: 1381521 - DNA, 25 bp, Homo sapien
ggaaatgtagtatgtcccatccttg

SEQ ID NO: 1381522 - DNA, 25 bp, Homo sapien
atgatttctcctgcggcatccttac

SEQ ID NO: 1381523 - DNA, 25 bp, Homo sapien
agggacaacggcaacttgaacgttg

SEQ ID NO: 1381524 - DNA, 25 bp, Homo sapien
ccatgatttctcctgcggcatcctt

SEQ ID NO: 1381525 - DNA, 25 bp, Homo sapien
cagggtgaaagaggccgtctgtttc

SEQ ID NO: 1381526 - DNA, 25 bp, Homo sapien
tcaacctctttggtattaatcgtac

SEQ ID NO: 1381527 - DNA, 25 bp, Homo sapien
cttctccttgtaggacacatttggc

SEQ ID NO: 1381528 - DNA, 25 bp, Homo sapien
ggatcaacctctttggtattaatcg

SEQ ID NO: 1381529 - DNA, 25 bp, Homo sapien
taggacacatttggctggatcaacc

SEQ ID NO: 1381530 - DNA, 25 bp, Homo sapien
tccaggacgggtgctatattgaact

SEQ ID NO: 1381531 - DNA, 25 bp, Homo sapien
gatgggcttcccaatccggctgtag

SEQ ID NO: 1381532 - DNA, 25 bp, Homo sapien
taatgtagccctccgagaatgtccg

SEQ ID NO: 1381533 - DNA, 25 bp, Homo sapien
gatgaggatctccaagtctgagccg

SEQ ID NO: 1381534 - DNA, 25 bp, Homo sapien
gtcgttgcacaggtcacacaccagg

SEQ ID NO: 1381535 - DNA, 25 bp, Homo sapien
gccaggtggtctatggttaaagcct

SEQ ID NO: 1381536 - DNA, 25 bp, Homo sapien
cagcatcacatcattcacggccagg

SEQ ID NO: 1381537 - DNA, 25 bp, Homo sapien
ggttaaagccttcactccacccatg

SEQ ID NO: 1381538 - DNA, 25 bp, Homo sapien
caaaggatgccgatctgcgactgca

SEQ ID NO: 1381539 - DNA, 25 bp, Homo sapien
ctcagagcttgtgtcagagtctccc

SEQ ID NO: 1381540 - DNA, 25 bp, Homo sapien
tcctggaatattgacccctcagagc

SEQ ID NO: 1381541 - DNA, 25 bp, Homo sapien
gacttcgtggcttgagttcctggaa

SEQ ID NO: 1381542 - DNA, 25 bp, Homo sapien
caaagcccagcagcggttttctgtt

SEQ ID NO: 1381543 - DNA, 25 bp, Homo sapien
gcagtcccactagtgagtttgctta

SEQ ID NO: 1381544 - DNA, 25 bp, Homo sapien
gagttcccaagtgcagtcccactag

SEQ ID NO: 1381545 - DNA, 25 bp, Homo sapien
ggcagtgagtcttgcctgagttccc

SEQ ID NO: 1381546 - DNA, 25 bp, Homo sapien
cgtttgtgaccaatattagaaaggg

SEQ ID NO: 1381547 - DNA, 25 bp, Homo sapien
cacgtttgtgaccaatattagaaag

SEQ ID NO: 1381548 - DNA, 25 bp, Homo sapien
ctcacgtttgtgaccaatattagaa

SEQ ID NO: 1381549 - DNA, 25 bp, Homo sapien
actcctcacgtttgtgaccaatatt

SEQ ID NO: 1381550 - DNA, 25 bp, Homo sapien
gggactccctcgctgacaaataaaa

SEQ ID NO: 1381551 - DNA, 25 bp, Homo sapien
gaggcgtcctcgaaggaatcaccca

SEQ ID NO: 1381552 - DNA, 25 bp, Homo sapien
tttagtagcaggtgattaagcccac

SEQ ID NO: 1381553 - DNA, 25 bp, Homo sapien
gaatcacccacagatctactcagga

SEQ ID NO: 1381554 - DNA, 25 bp, Homo sapien
aattgcaagccgccggcgggcttct

SEQ ID NO: 1381555 - DNA, 25 bp, Homo sapien
gcgcgcgccgggtgagggaattgca

SEQ ID NO: 1381556 - DNA, 25 bp, Homo sapien
cgcacgatgaggtaggggccctctt

SEQ ID NO: 1381557 - DNA, 25 bp, Homo sapien
gctccttccctctgcgaaaggcgcg

SEQ ID NO: 1381558 - DNA, 25 bp, Homo sapien
cccagcccggtctactccggcgagt

SEQ ID NO: 1381559 - DNA, 25 bp, Homo sapien
aatcccagcccggtctactccggcg

SEQ ID NO: 1381560 - DNA, 25 bp, Homo sapien
agcccggtctactccggcgagtcca

SEQ ID NO: 1381561 - DNA, 25 bp, Homo sapien
ggtctactccggcgagtccaatcac

SEQ ID NO: 1381562 - DNA, 25 bp, Homo sapien
agcggcggccctcgccgctccgggc

SEQ ID NO: 1381563 - DNA, 25 bp, Homo sapien
cgtccgagagcggcggccctcgccg

SEQ ID NO: 1381564 - DNA, 25 bp, Homo sapien
gagcggcggccctcgccgctccggg

SEQ ID NO: 1381565 - DNA, 25 bp, Homo sapien
ccgagagcggcggccctcgccgctc

SEQ ID NO: 1381566 - DNA, 25 bp, Homo sapien
gacgccactaagcatccaataagtt

SEQ ID NO: 1381567 - DNA, 25 bp, Homo sapien
gaaattccacatcttcgccagtcca

SEQ ID NO: 1381568 - DNA, 25 bp, Homo sapien
ccagagtgacgccactaagcatcca

SEQ ID NO: 1381569 - DNA, 25 bp, Homo sapien
gagtgacgccactaagcatccaata

SEQ ID NO: 1381570 - DNA, 25 bp, Homo sapien
gcgtcaccgtttcacagggactgtc

SEQ ID NO: 1381571 - DNA, 25 bp, Homo sapien
ggccaaggctcggagcgagcggcat

SEQ ID NO: 1381572 - DNA, 25 bp, Homo sapien
ccgaagggcttagagtgcggcggga

SEQ ID NO: 1381573 - DNA, 25 bp, Homo sapien
cgagcggcatagtgtagtcagcgtc

SEQ ID NO: 1381574 - DNA, 25 bp, Homo sapien
ttctcccattggtggatggcactgt

SEQ ID NO: 1381575 - DNA, 25 bp, Homo sapien
tctcccattggtggatggcactgtc

SEQ ID NO: 1381576 - DNA, 25 bp, Homo sapien
ctcccattggtggatggcactgtca

SEQ ID NO: 1381577 - DNA, 25 bp, Homo sapien
cgggagaccgtggagccgaggtgtc

SEQ ID NO: 1381578 - DNA, 25 bp, Homo sapien
ccgtggagccgaggtgtcgaatgga

SEQ ID NO: 1381579 - DNA, 25 bp, Homo sapien
ccgaggtgtcgaatggagggcttac

SEQ ID NO: 1381580 - DNA, 25 bp, Homo sapien
cggttcgggagaccgtggagccgag

SEQ ID NO: 1381581 - DNA, 25 bp, Homo sapien
caccctccttgtcgggctcgggaag

SEQ ID NO: 1381582 - DNA, 25 bp, Homo sapien
gccaccctccttgtcgggctcggga

SEQ ID NO: 1381583 - DNA, 25 bp, Homo sapien
ttccggtccggggggagtgcagatg

SEQ ID NO: 1381584 - DNA, 25 bp, Homo sapien
gagttgaatgtcacccgggattcca

SEQ ID NO: 1381585 - DNA, 25 bp, Homo sapien
gaatgtcacccgggattccacagtc

SEQ ID NO: 1381586 - DNA, 25 bp, Homo sapien
aggagttgaatgtcacccgggattc

SEQ ID NO: 1381587 - DNA, 25 bp, Homo sapien
ctaaggagttgaatgtcacccggga

SEQ ID NO: 1381588 - DNA, 25 bp, Homo sapien
caggcgtctcctgattctccaaaat

SEQ ID NO: 1381589 - DNA, 25 bp, Homo sapien
tctactgggccctcactgctttctt

SEQ ID NO: 1381590 - DNA, 25 bp, Homo sapien
tgttgttatctccagttgcgtcagc

SEQ ID NO: 1381591 - DNA, 25 bp, Homo sapien
tgcgtcagcttgtctactgggccct

SEQ ID NO: 1381592 - DNA, 25 bp, Homo sapien
ggatagtgcagaccataagtgatat

SEQ ID NO: 1381593 - DNA, 25 bp, Homo sapien
tctcagaattagttcggtgtcttct

SEQ ID NO: 1381594 - DNA, 25 bp, Homo sapien
ttcttccatgctcacacattgcttc

SEQ ID NO: 1381595 - DNA, 25 bp, Homo sapien
cacaggacgagagaggatttgttaa

SEQ ID NO: 1381596 - DNA, 25 bp, Homo sapien
tatatatggtttcccatgaccctgc

SEQ ID NO: 1381597 - DNA, 25 bp, Homo sapien
tacttattctgcttcggacactctg

SEQ ID NO: 1381598 - DNA, 25 bp, Homo sapien
tacccgtggtactgtgatgatctct

SEQ ID NO: 1381599 - DNA, 25 bp, Homo sapien
tgggaactcttaagcacaagggacc

SEQ ID NO: 1381600 - DNA, 25 bp, Homo sapien
gagagatgttatcctggtgcccgat

SEQ ID NO: 1381601 - DNA, 25 bp, Homo sapien
cagacagatttgttggctcccctct

SEQ ID NO: 1381602 - DNA, 25 bp, Homo sapien
gccaatgactaatgtgaggaagcag

SEQ ID NO: 1381603 - DNA, 25 bp, Homo sapien
taatttgaattgtggccaggcaggg

SEQ ID NO: 1381604 - DNA, 25 bp, Homo sapien
gaaaactgaggtcttagctgtccac

SEQ ID NO: 1381605 - DNA, 25 bp, Homo sapien
cctggaccattcacggatgaacatc

SEQ ID NO: 1381606 - DNA, 25 bp, Homo sapien
tatccactagttggtagtagcactg

SEQ ID NO: 1381607 - DNA, 25 bp, Homo sapien
cctgtacatggtaggaggttgagca

SEQ ID NO: 1381608 - DNA, 25 bp, Homo sapien
tatttataaaatcggtgtcgccgac

SEQ ID NO: 1381609 - DNA, 25 bp, Homo sapien
tcaattagcagcgtcttagggtaca

SEQ ID NO: 1381610 - DNA, 25 bp, Homo sapien
cccctgagttgcgaagtggcagtca

SEQ ID NO: 1381611 - DNA, 25 bp, Homo sapien
gagacaaagaacatgcactatcctg

SEQ ID NO: 1381612 - DNA, 25 bp, Homo sapien
tataaaactaggtcatatctggtgg

SEQ ID NO: 1381613 - DNA, 25 bp, Homo sapien
tattttcccaacttctaatatgtct

SEQ ID NO: 1381614 - DNA, 25 bp, Homo sapien
tcttgttcatattggagccttctgc

SEQ ID NO: 1381615 - DNA, 25 bp, Homo sapien
tgtttgctcactccagacttctaga

SEQ ID NO: 1381616 - DNA, 25 bp, Homo sapien
agcaggagggctagttggtgagtca

SEQ ID NO: 1381617 - DNA, 25 bp, Homo sapien
caggagggctagttggtgagtcatc

SEQ ID NO: 1381618 - DNA, 25 bp, Homo sapien
tctcagcaggagggctagttggtga

SEQ ID NO: 1381619 - DNA, 25 bp, Homo sapien
ggagggctagttggtgagtcatctg

SEQ ID NO: 1381620 - DNA, 25 bp, Homo sapien
tgttgtaacaatgactttgcatgct

SEQ ID NO: 1381621 - DNA, 25 bp, Homo sapien
gtaacaatgactttgcatgcttttt

SEQ ID NO: 1381622 - DNA, 25 bp, Homo sapien
tttgcatgcttttttgtggccgagg

SEQ ID NO: 1381623 - DNA, 25 bp, Homo sapien
catgcttttttgtggccgaggcaca

SEQ ID NO: 1381624 - DNA, 25 bp, Homo sapien
gcctttgagtttagcagctgtaggt

SEQ ID NO: 1381625 - DNA, 25 bp, Homo sapien
aagcctttgagtttagcagctgtag

SEQ ID NO: 1381626 - DNA, 25 bp, Homo sapien
gaagcctttgagtttagcagctgta

SEQ ID NO: 1381627 - DNA, 25 bp, Homo sapien
cctttgagtttagcagctgtaggtg

SEQ ID NO: 1381628 - DNA, 25 bp, Homo sapien
ccagtgaacactcagccgaatgaaa

SEQ ID NO: 1381629 - DNA, 25 bp, Homo sapien
cagtgaacactcagccgaatgaaaa

SEQ ID NO: 1381630 - DNA, 25 bp, Homo sapien
cgtaactggcttaaaagtagagctt

SEQ ID NO: 1381631 - DNA, 25 bp, Homo sapien
ctctccgtaactggcttaaaagtag

SEQ ID NO: 1381632 - DNA, 25 bp, Homo sapien
aaatataggaatgcttggcaatcac

SEQ ID NO: 1381633 - DNA, 25 bp, Homo sapien
cactctcttgagtaagagattttta

SEQ ID NO: 1381634 - DNA, 25 bp, Homo sapien
tggcaatcacgtcttgccatatgga

SEQ ID NO: 1381635 - DNA, 25 bp, Homo sapien
aatgcttggcaatcacgtcttgcca

SEQ ID NO: 1381636 - DNA, 25 bp, Homo sapien
tcgacccacgaagtccggctggctc

SEQ ID NO: 1381637 - DNA, 25 bp, Homo sapien
cacgaagtccggctggctccatatc

SEQ ID NO: 1381638 - DNA, 25 bp, Homo sapien
tgttttgatgacactttatactatt

SEQ ID NO: 1381639 - DNA, 25 bp, Homo sapien
taattgttttgatgacactttatac

SEQ ID NO: 1381640 - DNA, 25 bp, Homo sapien
cctggtcaacttgggatgcccagac

SEQ ID NO: 1381641 - DNA, 25 bp, Homo sapien
tctgagctggcattatagtccacat

SEQ ID NO: 1381642 - DNA, 25 bp, Homo sapien
ccacattcacttccggcatgctgaa

SEQ ID NO: 1381643 - DNA, 25 bp, Homo sapien
catcggggagcctcacaccgcaagg

SEQ ID NO: 1381644 - DNA, 25 bp, Homo sapien
gttgcacgtttttcagccgcaaaga

SEQ ID NO: 1381645 - DNA, 25 bp, Homo sapien
gtgagttgcacgtttttcagccgca

SEQ ID NO: 1381646 - DNA, 25 bp, Homo sapien
tctgtgagttgcacgtttttcagcc

SEQ ID NO: 1381647 - DNA, 25 bp, Homo sapien
gcacgtttttcagccgcaaagaggc

SEQ ID NO: 1381648 - DNA, 25 bp, Homo sapien
agtgcagctcaggattccatcctcc

SEQ ID NO: 1381649 - DNA, 25 bp, Homo sapien
ggcgacagtagtgactgtgatggag

SEQ ID NO: 1381650 - DNA, 25 bp, Homo sapien
ctgaggcgacagtagtgactgtgat

SEQ ID NO: 1381651 - DNA, 25 bp, Homo sapien
gaggcgacagtagtgactgtgatgg

SEQ ID NO: 1381652 - DNA, 25 bp, Homo sapien
gtagtgactgtgatggagtgtctcc

SEQ ID NO: 1381653 - DNA, 25 bp, Homo sapien
caaagatcaatgctaagggaagcct

SEQ ID NO: 1381654 - DNA, 25 bp, Homo sapien
ggaagccttggaacttctacaacca

SEQ ID NO: 1381655 - DNA, 25 bp, Homo sapien
tctacaaccaaacccttcattgctg

SEQ ID NO: 1381656 - DNA, 25 bp, Homo sapien
caaccaaacccttcattgctgaaag

SEQ ID NO: 1381657 - DNA, 25 bp, Homo sapien
aattaattatccagcttgtgagggc

SEQ ID NO: 1381658 - DNA, 25 bp, Homo sapien
ggctagaggcaggtacctattgata

SEQ ID NO: 1381659 - DNA, 25 bp, Homo sapien
caaaggacaaaaggaccccatggag

SEQ ID NO: 1381660 - DNA, 25 bp, Homo sapien
cacacagtgggagtactattcaatc

SEQ ID NO: 1381661 - DNA, 25 bp, Homo sapien
aaagacaggttcgtacattccagta

SEQ ID NO: 1381662 - DNA, 25 bp, Homo sapien
gcccacagcgctggataaaacctgg

SEQ ID NO: 1381663 - DNA, 25 bp, Homo sapien
gatgggcaccacagtacatggctta

SEQ ID NO: 1381664 - DNA, 25 bp, Homo sapien
cattccagtagcatagagagcatgc

SEQ ID NO: 1381665 - DNA, 25 bp, Homo sapien
gcctgcaaggcaaaccataaaacac

SEQ ID NO: 1381666 - DNA, 25 bp, Homo sapien
tgcaaggcaaaccataaaacaccct

SEQ ID NO: 1381667 - DNA, 25 bp, Homo sapien
aactctgtgtgaacgttgtcattgg

SEQ ID NO: 1381668 - DNA, 25 bp, Homo sapien
ccttctccactacaactctgtgtga

SEQ ID NO: 1381669 - DNA, 25 bp, Homo sapien
aaagccaatgatgagtgcaattgct

SEQ ID NO: 1381670 - DNA, 25 bp, Homo sapien
gatgagtgcaattgctccagccaga

SEQ ID NO: 1381671 - DNA, 25 bp, Homo sapien
tccagccagaataatgatgatgcta

SEQ ID NO: 1381672 - DNA, 25 bp, Homo sapien
gctccagccagaataatgatgatgc

SEQ ID NO: 1381673 - DNA, 25 bp, Homo sapien
aacagaaaattagttctccattcct

SEQ ID NO: 1381674 - DNA, 25 bp, Homo sapien
gctgctttgcaactggggtacaaat

SEQ ID NO: 1381675 - DNA, 25 bp, Homo sapien
tgctgctttgcaactggggtacaaa

SEQ ID NO: 1381676 - DNA, 25 bp, Homo sapien
cgcgaggtcagcggcttcattcttg

SEQ ID NO: 1381677 - DNA, 25 bp, Homo sapien
ataatcttggcatccccttgctctc

SEQ ID NO: 1381678 - DNA, 25 bp, Homo sapien
cataatcttggcatccccttgctct

SEQ ID NO: 1381679 - DNA, 25 bp, Homo sapien
cagccatagataagggcaggagcac

SEQ ID NO: 1381680 - DNA, 25 bp, Homo sapien
agcccagccatagataagggcagga

SEQ ID NO: 1381681 - DNA, 25 bp, Homo sapien
ttgcaacaccctaaagccaccgtga

SEQ ID NO: 1381682 - DNA, 25 bp, Homo sapien
caccctaaagccaccgtgactgttt

SEQ ID NO: 1381683 - DNA, 25 bp, Homo sapien
agccaccgtgactgttttgaatttc

SEQ ID NO: 1381684 - DNA, 25 bp, Homo sapien
cctaaagccaccgtgactgttttga

SEQ ID NO: 1381685 - DNA, 25 bp, Homo sapien
tccagcattagccaagcaggagtgg

SEQ ID NO: 1381686 - DNA, 25 bp, Homo sapien
gctgtgcagcagtccaagctatcaa

SEQ ID NO: 1381687 - DNA, 25 bp, Homo sapien
cactgggctatctgcgaggctgact

SEQ ID NO: 1381688 - DNA, 25 bp, Homo sapien
caggagtggcaacctgtctctgcca

SEQ ID NO: 1381689 - DNA, 25 bp, Homo sapien
cccaggaaagaccaagttgtggcag

SEQ ID NO: 1381690 - DNA, 25 bp, Homo sapien
ctctctgaagttcacttcctcgtct

SEQ ID NO: 1381691 - DNA, 25 bp, Homo sapien
ctctgaagttcacttcctcgtctct

SEQ ID NO: 1381692 - DNA, 25 bp, Homo sapien
tctctgaagttcacttcctcgtctc

SEQ ID NO: 1381693 - DNA, 25 bp, Homo sapien
tgcatgatttactccattgaactcg

SEQ ID NO: 1381694 - DNA, 25 bp, Homo sapien
cattgaactcgtaattgtgagttgg

SEQ ID NO: 1381695 - DNA, 25 bp, Homo sapien
gttttctctgcatgatttactccat

SEQ ID NO: 1381696 - DNA, 25 bp, Homo sapien
agttggagaatgtggagatttagca

SEQ ID NO: 1381697 - DNA, 25 bp, Homo sapien
tgtcagcaaatgaaaggaacaccta

SEQ ID NO: 1381698 - DNA, 25 bp, Homo sapien
cacctataaactaagatgagaataa

SEQ ID NO: 1381699 - DNA, 25 bp, Homo sapien
ctggtagttgtcagcaaatgaaagg

SEQ ID NO: 1381700 - DNA, 25 bp, Homo sapien
tgaaaggaacacctataaactaaga

SEQ ID NO: 1381701 - DNA, 25 bp, Homo sapien
tgagactgtcatagcccaagagaat

SEQ ID NO: 1381702 - DNA, 25 bp, Homo sapien
gaccagaaaggcacagtaactcggg

SEQ ID NO: 1381703 - DNA, 25 bp, Homo sapien
ccttgcatactgtccttctggagga

SEQ ID NO: 1381704 - DNA, 25 bp, Homo sapien
aatcacagagctgccgaccagaaag

SEQ ID NO: 1381705 - DNA, 25 bp, Homo sapien
agtaagtacccaagagatatagccc

SEQ ID NO: 1381706 - DNA, 25 bp, Homo sapien
ggcatgagtaagtacccaagagata

SEQ ID NO: 1381707 - DNA, 25 bp, Homo sapien
tgagtaagtacccaagagatatagc

SEQ ID NO: 1381708 - DNA, 25 bp, Homo sapien
ctggcatgagtaagtacccaagaga

SEQ ID NO: 1381709 - DNA, 25 bp, Homo sapien
gctggccccaaggtgaaggtgacca

SEQ ID NO: 1381710 - DNA, 25 bp, Homo sapien
cacagagctggccccaaggtgaagg

SEQ ID NO: 1381711 - DNA, 25 bp, Homo sapien
tttatggggaagcacccacagagct

SEQ ID NO: 1381712 - DNA, 25 bp, Homo sapien
ctttatggggaagcacccacagagc

SEQ ID NO: 1381713 - DNA, 25 bp, Homo sapien
tggcttttcctttgttttcatcaag

SEQ ID NO: 1381714 - DNA, 25 bp, Homo sapien
tagaaacttcatggcttttcctttg

SEQ ID NO: 1381715 - DNA, 25 bp, Homo sapien
ttcctttgttttcatcaagacccat

SEQ ID NO: 1381716 - DNA, 25 bp, Homo sapien
gcttttcctttgttttcatcaagac

SEQ ID NO: 1381717 - DNA, 25 bp, Homo sapien
gaattcttctgccatgacagtcact

SEQ ID NO: 1381718 - DNA, 25 bp, Homo sapien
gccagtgatgaagggttctgcttaa

SEQ ID NO: 1381719 - DNA, 25 bp, Homo sapien
tttgccagtgatgaagggttctgct

SEQ ID NO: 1381720 - DNA, 25 bp, Homo sapien
cttcccgtggccagctaagaattct

SEQ ID NO: 1381721 - DNA, 25 bp, Homo sapien
ggatggcaggccctttcatgagcgt

SEQ ID NO: 1381722 - DNA, 25 bp, Homo sapien
catgatcacctccaggagaggtatt

SEQ ID NO: 1381723 - DNA, 25 bp, Homo sapien
ggccctttcatgagcgttccaacat

SEQ ID NO: 1381724 - DNA, 25 bp, Homo sapien
aacatcaccactgtcatgatcacct

SEQ ID NO: 1381725 - DNA, 25 bp, Homo sapien
catggacagtcgctgcttctgaaac

SEQ ID NO: 1381726 - DNA, 25 bp, Homo sapien
tgctcattggccctcttcctggagg

SEQ ID NO: 1381727 - DNA, 25 bp, Homo sapien
aaaggatctgccaccctcatggaca

SEQ ID NO: 1381728 - DNA, 25 bp, Homo sapien
caagaggagtctctgttgattccag

SEQ ID NO: 1381729 - DNA, 25 bp, Homo sapien
agaagaggatctgccccagggaagc

SEQ ID NO: 1381730 - DNA, 25 bp, Homo sapien
ggaaggttcccagcgtatctgggta

SEQ ID NO: 1381731 - DNA, 25 bp, Homo sapien
gaaggttcccagcgtatctgggtac

SEQ ID NO: 1381732 - DNA, 25 bp, Homo sapien
ctgccttccttggtgactcacaacc

SEQ ID NO: 1381733 - DNA, 25 bp, Homo sapien
gctgagtggagctgccgctgccttc

SEQ ID NO: 1381734 - DNA, 25 bp, Homo sapien
tggctgagtggagctgccgctgcct

SEQ ID NO: 1381735 - DNA, 25 bp, Homo sapien
cgctgccttccttggtgactcacaa

SEQ ID NO: 1381736 - DNA, 25 bp, Homo sapien
gcaaatggacagtactctggttctg

SEQ ID NO: 1381737 - DNA, 25 bp, Homo sapien
aaatggacagtactctggttctgac

SEQ ID NO: 1381738 - DNA, 25 bp, Homo sapien
caaatggacagtactctggttctga

SEQ ID NO: 1381739 - DNA, 25 bp, Homo sapien
aagcaaatggacagtactctggttc

SEQ ID NO: 1381740 - DNA, 25 bp, Homo sapien
ccatgtcccccaacaccccataact

SEQ ID NO: 1381741 - DNA, 25 bp, Homo sapien
tgtctttcatcatcatacctctttc

SEQ ID NO: 1381742 - DNA, 25 bp, Homo sapien
tcactggtcatcgcagccagctttt

SEQ ID NO: 1381743 - DNA, 25 bp, Homo sapien
cagccagcttttacttcaatttgtc

SEQ ID NO: 1381744 - DNA, 25 bp, Homo sapien
tagccttatgggatattcttggctc

SEQ ID NO: 1381745 - DNA, 25 bp, Homo sapien
gatattcttggctcgtggccttcct

SEQ ID NO: 1381746 - DNA, 25 bp, Homo sapien
tggctcgtggccttcctgaggtaga

SEQ ID NO: 1381747 - DNA, 25 bp, Homo sapien
ccaaaccaaagcaggctatcaagca

SEQ ID NO: 1381748 - DNA, 25 bp, Homo sapien
cttcttgcccgaaaaccgcagcttc

SEQ ID NO: 1381749 - DNA, 25 bp, Homo sapien
gtccctcatctggttagtaacataa

SEQ ID NO: 1381750 - DNA, 25 bp, Homo sapien
tagtaacataaccgtccaccttgac

SEQ ID NO: 1381751 - DNA, 25 bp, Homo sapien
tctggttagtaacataaccgtccac

SEQ ID NO: 1381752 - DNA, 25 bp, Homo sapien
tggtcttccattcccgggaagtcac

SEQ ID NO: 1381753 - DNA, 25 bp, Homo sapien
ggaagtcactatattggtgatgaac

SEQ ID NO: 1381754 - DNA, 25 bp, Homo sapien
ttccattcccgggaagtcactatat

SEQ ID NO: 1381755 - DNA, 25 bp, Homo sapien
tcttccattcccgggaagtcactat

SEQ ID NO: 1381756 - DNA, 25 bp, Homo sapien
agaacaatgagtggctcacaccggg

SEQ ID NO: 1381757 - DNA, 25 bp, Homo sapien
tagtccagggtatagagctctgcag

SEQ ID NO: 1381758 - DNA, 25 bp, Homo sapien
tgggccctggaatacaagatctctt

SEQ ID NO: 1381759 - DNA, 25 bp, Homo sapien
cactcctctcttgaggagatcagaa

SEQ ID NO: 1381760 - DNA, 25 bp, Homo sapien
agtttctattgggtccacatcctaa

SEQ ID NO: 1381761 - DNA, 25 bp, Homo sapien
tctaagaacctcaattggtatctgg

SEQ ID NO: 1381762 - DNA, 25 bp, Homo sapien
taggctcagttcagtcaagttggcc

SEQ ID NO: 1381763 - DNA, 25 bp, Homo sapien
tggccttctcatagaggtctctaag

SEQ ID NO: 1381764 - DNA, 25 bp, Homo sapien
actcagagatggtgacaggccagag

SEQ ID NO: 1381765 - DNA, 25 bp, Homo sapien
gacaggccagagggaattaagagac

SEQ ID NO: 1381766 - DNA, 25 bp, Homo sapien
tgacaggccagagggaattaagaga

SEQ ID NO: 1381767 - DNA, 25 bp, Homo sapien
ctcaggacataacccacagtgagca

SEQ ID NO: 1381768 - DNA, 25 bp, Homo sapien
taaaccaagcaggtcttctcaggac

SEQ ID NO: 1381769 - DNA, 25 bp, Homo sapien
cacaggatcagagatgtatttcttt

SEQ ID NO: 1381770 - DNA, 25 bp, Homo sapien
tctttcatgggtaccacagctgcta

SEQ ID NO: 1381771 - DNA, 25 bp, Homo sapien
taggatgcaggaacatgtgcagggc

SEQ ID NO: 1381772 - DNA, 25 bp, Homo sapien
ttaggatgcaggaacatgtgcaggg

SEQ ID NO: 1381773 - DNA, 25 bp, Homo sapien
gttaggatgcaggaacatgtgcagg

SEQ ID NO: 1381774 - DNA, 25 bp, Homo sapien
aggatgcaggaacatgtgcagggct

SEQ ID NO: 1381775 - DNA, 25 bp, Homo sapien
tctcctttcgttggcatggttttcc

SEQ ID NO: 1381776 - DNA, 25 bp, Homo sapien
cctttcgttggcatggttttccttg

SEQ ID NO: 1381777 - DNA, 25 bp, Homo sapien
ttctctctcctttcgttggcatggt

SEQ ID NO: 1381778 - DNA, 25 bp, Homo sapien
tggttttccttggattcatcttttc

SEQ ID NO: 1381779 - DNA, 25 bp, Homo sapien
caggtctactggccttgcttcactg

SEQ ID NO: 1381780 - DNA, 25 bp, Homo sapien
tgcaatctccaggtctactggcctt

SEQ ID NO: 1381781 - DNA, 25 bp, Homo sapien
aatctccaggtctactggccttgct

SEQ ID NO: 1381782 - DNA, 25 bp, Homo sapien
cttgggaactgttgctgcaatctcc

SEQ ID NO: 1381783 - DNA, 25 bp, Homo sapien
gatgatctcctggtactccccgact

SEQ ID NO: 1381784 - DNA, 25 bp, Homo sapien
ctgatgatctcctggtactccccga

SEQ ID NO: 1381785 - DNA, 25 bp, Homo sapien
gatctcctggtactccccgacttta

SEQ ID NO: 1381786 - DNA, 25 bp, Homo sapien
tgatctcctggtactccccgacttt

SEQ ID NO: 1381787 - DNA, 25 bp, Homo sapien
aggacatccttcatcctagcatgcc

SEQ ID NO: 1381788 - DNA, 25 bp, Homo sapien
tcatcctagcatgcccgtttttcac

SEQ ID NO: 1381789 - DNA, 25 bp, Homo sapien
tggagagttccaatcatcagagcct

SEQ ID NO: 1381790 - DNA, 25 bp, Homo sapien
tggaggggaaactcaatggacagat

SEQ ID NO: 1381791 - DNA, 25 bp, Homo sapien
catcagaggtattctcaaaagatcc

SEQ ID NO: 1381792 - DNA, 25 bp, Homo sapien
caaaagatccattctcttggaaaaa

SEQ ID NO: 1381793 - DNA, 25 bp, Homo sapien
aagctctgaaatggattgtaaccac

SEQ ID NO: 1381794 - DNA, 25 bp, Homo sapien
gaagcagagccagtataattcagca

SEQ ID NO: 1381795 - DNA, 25 bp, Homo sapien
gcttcataacccatccagttgtgta

SEQ ID NO: 1381796 - DNA, 25 bp, Homo sapien
cttcataacccatccagttgtgtaa

SEQ ID NO: 1381797 - DNA, 25 bp, Homo sapien
ctgcttcataacccatccagttgtg

SEQ ID NO: 1381798 - DNA, 25 bp, Homo sapien
tgcttcataacccatccagttgtgt

SEQ ID NO: 1381799 - DNA, 25 bp, Homo sapien
cactgccctgttggcagctaggaga

SEQ ID NO: 1381800 - DNA, 25 bp, Homo sapien
agctaggagagccataggatcccag

SEQ ID NO: 1381801 - DNA, 25 bp, Homo sapien
gagtaggaaagaggcacactgccct

SEQ ID NO: 1381802 - DNA, 25 bp, Homo sapien
cagctcccatcagcttgcatcatgg

SEQ ID NO: 1381803 - DNA, 25 bp, Homo sapien
agtgaagaaacacttatgtaaagct

SEQ ID NO: 1381804 - DNA, 25 bp, Homo sapien
tctggtcctggccataaaatagaag

SEQ ID NO: 1381805 - DNA, 25 bp, Homo sapien
gccaggacagctcttatcaaaatat

SEQ ID NO: 1381806 - DNA, 25 bp, Homo sapien
aaagcaagaactactgccaggacag

SEQ ID NO: 1381807 - DNA, 25 bp, Homo sapien
ttctggggttttgatagctacaatt

SEQ ID NO: 1381808 - DNA, 25 bp, Homo sapien
ggggttttgatagctacaattatag

SEQ ID NO: 1381809 - DNA, 25 bp, Homo sapien
gttttgatagctacaattatagttg

SEQ ID NO: 1381810 - DNA, 25 bp, Homo sapien
tctggggttttgatagctacaatta

SEQ ID NO: 1381811 - DNA, 25 bp, Homo sapien
aagtgttagtttatctttatctgtg

SEQ ID NO: 1381812 - DNA, 25 bp, Homo sapien
tcagtacacgtgatgttctgatgtt

SEQ ID NO: 1381813 - DNA, 25 bp, Homo sapien
tgttagtttatctttatctgtgtgc

SEQ ID NO: 1381814 - DNA, 25 bp, Homo sapien
gtgtgctcagtacacgtgatgttct

SEQ ID NO: 1381815 - DNA, 25 bp, Homo sapien
aaaactcagacttgcctttagaaga

SEQ ID NO: 1381816 - DNA, 25 bp, Homo sapien
tacttgtcaactaggttatgtcagg

SEQ ID NO: 1381817 - DNA, 25 bp, Homo sapien
taaaattgctggctgcatttggaca

SEQ ID NO: 1381818 - DNA, 25 bp, Homo sapien
tggacatctgcaataacccctaaat

SEQ ID NO: 1381819 - DNA, 25 bp, Homo sapien
caagtaaatcggatgcaagagtcta

SEQ ID NO: 1381820 - DNA, 25 bp, Homo sapien
gaccgggcactccttgcttaccagt

SEQ ID NO: 1381821 - DNA, 25 bp, Homo sapien
caagtgtgccaatgaacatgagact

SEQ ID NO: 1381822 - DNA, 25 bp, Homo sapien
gcttctagaaataatgcagactggg

SEQ ID NO: 1381823 - DNA, 25 bp, Homo sapien
gtaggataccacctctgaacctggg

SEQ ID NO: 1381824 - DNA, 25 bp, Homo sapien
tcaggtgtttcggacgctattgccc

SEQ ID NO: 1381825 - DNA, 25 bp, Homo sapien
cctgtttgcagacgtccgtgggaga

SEQ ID NO: 1381826 - DNA, 25 bp, Homo sapien
gagcgtaaacgatgactaccccagc

SEQ ID NO: 1381827 - DNA, 25 bp, Homo sapien
gcattgcctaggacatctactacaa

SEQ ID NO: 1381828 - DNA, 25 bp, Homo sapien
ttactgcattgcctaggacatctac

SEQ ID NO: 1381829 - DNA, 25 bp, Homo sapien
ttgcctaggacatctactacaaagt

SEQ ID NO: 1381830 - DNA, 25 bp, Homo sapien
ctgcattgcctaggacatctactac

SEQ ID NO: 1381831 - DNA, 25 bp, Homo sapien
tggtctgctcctttaactctccacc

SEQ ID NO: 1381832 - DNA, 25 bp, Homo sapien
ctccacctttcgtacccataagatt

SEQ ID NO: 1381833 - DNA, 25 bp, Homo sapien
taactctccacctttcgtacccata

SEQ ID NO: 1381834 - DNA, 25 bp, Homo sapien
actctccacctttcgtacccataag

SEQ ID NO: 1381835 - DNA, 25 bp, Homo sapien
catatattgctctgtgccaagagaa

SEQ ID NO: 1381836 - DNA, 25 bp, Homo sapien
actcccaacccaagttgcttcactg

SEQ ID NO: 1381837 - DNA, 25 bp, Homo sapien
tgatatatggagtcaggagatagcc

SEQ ID NO: 1381838 - DNA, 25 bp, Homo sapien
ggatcagaactctatctataaaaag

SEQ ID NO: 1381839 - DNA, 25 bp, Homo sapien
gctccatggaaggatatggccaagt

SEQ ID NO: 1381840 - DNA, 25 bp, Homo sapien
gtatacgcttgttctcgttccttag

SEQ ID NO: 1381841 - DNA, 25 bp, Homo sapien
tcaggatcatcgtcagaatcagaca

SEQ ID NO: 1381842 - DNA, 25 bp, Homo sapien
tctcgttccttagttttgtgacaga

SEQ ID NO: 1381843 - DNA, 25 bp, Homo sapien
ggtaatcctgctgttcgatgaaagc

SEQ ID NO: 1381844 - DNA, 25 bp, Homo sapien
tatctgctgttctccggtgatgacc

SEQ ID NO: 1381845 - DNA, 25 bp, Homo sapien
tatacctgaccaaaacatgttctga

SEQ ID NO: 1381846 - DNA, 25 bp, Homo sapien
caacatgacagggtgaaactattcc

SEQ ID NO: 1381847 - DNA, 25 bp, Homo sapien
tagaagaatgcagagtaaagggacc

SEQ ID NO: 1381848 - DNA, 25 bp, Homo sapien
tctgcaggaacttctcaagggatga

SEQ ID NO: 1381849 - DNA, 25 bp, Homo sapien
tagccttcctcgtaaaagtagcaca

SEQ ID NO: 1381850 - DNA, 25 bp, Homo sapien
gatgcagggccagttacaatagtcc

SEQ ID NO: 1381851 - DNA, 25 bp, Homo sapien
tttctgtatgagagtagctcacaac

SEQ ID NO: 1381852 - DNA, 25 bp, Homo sapien
tgtgaacgaacatttatgaagtatc

SEQ ID NO: 1381853 - DNA, 25 bp, Homo sapien
tgaagtatctaacatgtgccaagca

SEQ ID NO: 1381854 - DNA, 25 bp, Homo sapien
taaatgtttccaatatgaatcgtgt

SEQ ID NO: 1381855 - DNA, 25 bp, Homo sapien
tcttccacattataaatgaactgcc

SEQ ID NO: 1381856 - DNA, 25 bp, Homo sapien
tgctgtcaggttgcttcagctcggt

SEQ ID NO: 1381857 - DNA, 25 bp, Homo sapien
tgcctttccaggtccaacatgctgt

SEQ ID NO: 1381858 - DNA, 25 bp, Homo sapien
cttcagctcggtgtgaatgtaagtg

SEQ ID NO: 1381859 - DNA, 25 bp, Homo sapien
gcaggaccagcttttttcggcactg

SEQ ID NO: 1381860 - DNA, 25 bp, Homo sapien
ccaaagacatgtcaggcagggatgt

SEQ ID NO: 1381861 - DNA, 25 bp, Homo sapien
tcacctggctccagtagagatggca

SEQ ID NO: 1381862 - DNA, 25 bp, Homo sapien
acccgtgtgacgcaatccgcagttc

SEQ ID NO: 1381863 - DNA, 25 bp, Homo sapien
ttattttgcccctttgatgaaatgt

SEQ ID NO: 1381864 - DNA, 25 bp, Homo sapien
tttattttgcccctttgatgaaatg

SEQ ID NO: 1381865 - DNA, 25 bp, Homo sapien
tgcattgacccctcatatttgggat

SEQ ID NO: 1381866 - DNA, 25 bp, Homo sapien
agctccatgtgcagaggatgcattg

SEQ ID NO: 1381867 - DNA, 25 bp, Homo sapien
tcactccgcatagctccatgtgcag

SEQ ID NO: 1381868 - DNA, 25 bp, Homo sapien
atgcattgacccctcatatttggga

SEQ ID NO: 1381869 - DNA, 25 bp, Homo sapien
ctagctagctttcccataaggtctc

SEQ ID NO: 1381870 - DNA, 25 bp, Homo sapien
ttttgtttgctctcacttgtgccat

SEQ ID NO: 1381871 - DNA, 25 bp, Homo sapien
ctagctttcccataaggtctcctgg

SEQ ID NO: 1381872 - DNA, 25 bp, Homo sapien
ctggtccccacttcaaacccaggag

SEQ ID NO: 1381873 - DNA, 25 bp, Homo sapien
catctggttgcacagttcccctttc

SEQ ID NO: 1381874 - DNA, 25 bp, Homo sapien
ttgctttccataccacctcgctgag

SEQ ID NO: 1381875 - DNA, 25 bp, Homo sapien
gccagccaccatgtggggattccag

SEQ ID NO: 1381876 - DNA, 25 bp, Homo sapien
caggcattgttccatcgtttctccg

SEQ ID NO: 1381877 - DNA, 25 bp, Homo sapien
gggtgtcagtcgtccacactgtggc

SEQ ID NO: 1381878 - DNA, 25 bp, Homo sapien
gggatggtccttgcacaaggtttgt

SEQ ID NO: 1381879 - DNA, 25 bp, Homo sapien
gctggagcttgataagggccactgt

SEQ ID NO: 1381880 - DNA, 25 bp, Homo sapien
tgtggcatcccactaactgtcctgc

SEQ ID NO: 1381881 - DNA, 25 bp, Homo sapien
gatgtaggcacaagagctcatttgc

SEQ ID NO: 1381882 - DNA, 25 bp, Homo sapien
gactcatgcttggagatgtaggcac

SEQ ID NO: 1381883 - DNA, 25 bp, Homo sapien
taggcacaagagctcatttgcagaa

SEQ ID NO: 1381884 - DNA, 25 bp, Homo sapien
cttggagatgtaggcacaagagctc

SEQ ID NO: 1381885 - DNA, 25 bp, Homo sapien
ctaagcttcttgatgggagctgagg

SEQ ID NO: 1381886 - DNA, 25 bp, Homo sapien
gaaggtcactaagcttcttgatggg

SEQ ID NO: 1381887 - DNA, 25 bp, Homo sapien
ggctctcaggaaggtcactaagctt

SEQ ID NO: 1381888 - DNA, 25 bp, Homo sapien
tctcaggaaggtcactaagcttctt

SEQ ID NO: 1381889 - DNA, 25 bp, Homo sapien
gtgatgttgactcagctgtgaggag

SEQ ID NO: 1381890 - DNA, 25 bp, Homo sapien
ctgcagatggtgatgttgactcagc

SEQ ID NO: 1381891 - DNA, 25 bp, Homo sapien
gatggtgatgttgactcagctgtga

SEQ ID NO: 1381892 - DNA, 25 bp, Homo sapien
atggtgatgttgactcagctgtgag

SEQ ID NO: 1381893 - DNA, 25 bp, Homo sapien
gcctgtgcaaacaggcatatggagc

SEQ ID NO: 1381894 - DNA, 25 bp, Homo sapien
tagcctgtgcaaacaggcatatgga

SEQ ID NO: 1381895 - DNA, 25 bp, Homo sapien
aaggagggtgtgagtatacccaggg

SEQ ID NO: 1381896 - DNA, 25 bp, Homo sapien
aatagcctgtgcaaacaggcatatg

SEQ ID NO: 1381897 - DNA, 25 bp, Homo sapien
ctggctgcttgtagatacggatgtg

SEQ ID NO: 1381898 - DNA, 25 bp, Homo sapien
gacagctcaattcagccgtgaaccc

SEQ ID NO: 1381899 - DNA, 25 bp, Homo sapien
gccgtgaaccctcgggcttttggca

SEQ ID NO: 1381900 - DNA, 25 bp, Homo sapien
atacggatgtgtccatggagctgac

SEQ ID NO: 1381901 - DNA, 25 bp, Homo sapien
tccttgacacttgagaaacatcgat

SEQ ID NO: 1381902 - DNA, 25 bp, Homo sapien
gacctggcacatgcgtcggcttaaa

SEQ ID NO: 1381903 - DNA, 25 bp, Homo sapien
gaagttactctgttctaggacctgg

SEQ ID NO: 1381904 - DNA, 25 bp, Homo sapien
taaatgcccatcacgctgcttgtgg

SEQ ID NO: 1381905 - DNA, 25 bp, Homo sapien
tgagcaaacagtcgtcccctctcgg

SEQ ID NO: 1381906 - DNA, 25 bp, Homo sapien
taattatagacttctcggctgctga

SEQ ID NO: 1381907 - DNA, 25 bp, Homo sapien
taaatctgcctgttacacaagcgcc

SEQ ID NO: 1381908 - DNA, 25 bp, Homo sapien
gaaccactggaggactttactgatg

SEQ ID NO: 1381909 - DNA, 25 bp, Homo sapien
ctgctgccatgctgtacttgagcct

SEQ ID NO: 1381910 - DNA, 25 bp, Homo sapien
tgctgccatgctgtacttgagcctg

SEQ ID NO: 1381911 - DNA, 25 bp, Homo sapien
gctgccatgctgtacttgagcctgc

SEQ ID NO: 1381912 - DNA, 25 bp, Homo sapien
tgccatgctgtacttgagcctgctg

SEQ ID NO: 1381913 - DNA, 25 bp, Homo sapien
tatgtgaacactctatgaaccagga

SEQ ID NO: 1381914 - DNA, 25 bp, Homo sapien
gaaatctcatatcactggttggaac

SEQ ID NO: 1381915 - DNA, 25 bp, Homo sapien
caccaacagtaggatgagtacacaa

SEQ ID NO: 1381916 - DNA, 25 bp, Homo sapien
cataaatgaatgctatgtccaccaa

SEQ ID NO: 1381917 - DNA, 25 bp, Homo sapien
tgtcctatcgcattaaagttcctgg

SEQ ID NO: 1381918 - DNA, 25 bp, Homo sapien
tactgaatgttatacctcaaaaaca

SEQ ID NO: 1381919 - DNA, 25 bp, Homo sapien
tatgtcttgatttcgcgtctaacaa

SEQ ID NO: 1381920 - DNA, 25 bp, Homo sapien
acaataggatcactggctttcccta

SEQ ID NO: 1381921 - DNA, 25 bp, Homo sapien
aggagatgtaaatactgcatctggg

SEQ ID NO: 1381922 - DNA, 25 bp, Homo sapien
gttggaagagtagggcggaggagat

SEQ ID NO: 1381923 - DNA, 25 bp, Homo sapien
ccctcgctgggaaagacatatttga

SEQ ID NO: 1381924 - DNA, 25 bp, Homo sapien
gagaaccacacttatttcaggcagg

SEQ ID NO: 1381925 - DNA, 25 bp, Homo sapien
tgaatggatggtgtccaagccctgc

SEQ ID NO: 1381926 - DNA, 25 bp, Homo sapien
tcctacagataggagacgcaggttg

SEQ ID NO: 1381927 - DNA, 25 bp, Homo sapien
caagtgctgtggcattccgaatggg

SEQ ID NO: 1381928 - DNA, 25 bp, Homo sapien
gaacctgggctgtaaaccactcgct

SEQ ID NO: 1381929 - DNA, 25 bp, Homo sapien
caacgcgaaaatccccagagaggcg

SEQ ID NO: 1381930 - DNA, 25 bp, Homo sapien
aggcgtgggcgttacccgcctcact

SEQ ID NO: 1381931 - DNA, 25 bp, Homo sapien
ggcagggagaaccaacgcgaaaatc

SEQ ID NO: 1381932 - DNA, 25 bp, Homo sapien
gtaggcgtgggcgttacccgcctca

SEQ ID NO: 1381933 - DNA, 25 bp, Homo sapien
gagttatgcggcaggaatagcagaa

SEQ ID NO: 1381934 - DNA, 25 bp, Homo sapien
aagagagagttatgcggcaggaata

SEQ ID NO: 1381935 - DNA, 25 bp, Homo sapien
cggcaggaatagcagaaaagcgtac

SEQ ID NO: 1381936 - DNA, 25 bp, Homo sapien
gcagaaaagcgtactaagcaaaaag

SEQ ID NO: 1381937 - DNA, 25 bp, Homo sapien
tgtggacaccatgagcagcaaaggg

SEQ ID NO: 1381938 - DNA, 25 bp, Homo sapien
cagcaaagggatccaagccagtgac

SEQ ID NO: 1381939 - DNA, 25 bp, Homo sapien
ttaatgcgctcacatcagactgtgg

SEQ ID NO: 1381940 - DNA, 25 bp, Homo sapien
caagtgggtcgactcggacggatac

SEQ ID NO: 1381941 - DNA, 25 bp, Homo sapien
ctgaagaatacaggttggtagcctg

SEQ ID NO: 1381942 - DNA, 25 bp, Homo sapien
ggttggtagcctgcacacctgaact

SEQ ID NO: 1381943 - DNA, 25 bp, Homo sapien
gaatacaggttggtagcctgcacac

SEQ ID NO: 1381944 - DNA, 25 bp, Homo sapien
ggtagcctgcacacctgaactcaac

SEQ ID NO: 1381945 - DNA, 25 bp, Homo sapien
tattgtttcccactgtcatcactga

SEQ ID NO: 1381946 - DNA, 25 bp, Homo sapien
ttattgtttcccactgtcatcactg

SEQ ID NO: 1381947 - DNA, 25 bp, Homo sapien
attgtttcccactgtcatcactgac

SEQ ID NO: 1381948 - DNA, 25 bp, Homo sapien
tctggctagttctacagtctgtgca

SEQ ID NO: 1381949 - DNA, 25 bp, Homo sapien
ttggaactccatccaagcgcacagg

SEQ ID NO: 1381950 - DNA, 25 bp, Homo sapien
gggcccgtagacaggaacttgatga

SEQ ID NO: 1381951 - DNA, 25 bp, Homo sapien
cttgatgagggcagtaagtgagtcc

SEQ ID NO: 1381952 - DNA, 25 bp, Homo sapien
gtttctgcccggttatctgctgctg

SEQ ID NO: 1381953 - DNA, 25 bp, Homo sapien
tcgtttctgcccggttatctgctgc

SEQ ID NO: 1381954 - DNA, 25 bp, Homo sapien
ttctgcccggttatctgctgctgca

SEQ ID NO: 1381955 - DNA, 25 bp, Homo sapien
ttctcgtttctgcccggttatctgc

SEQ ID NO: 1381956 - DNA, 25 bp, Homo sapien
ttttctcacttgagcccgggtaggc

SEQ ID NO: 1381957 - DNA, 25 bp, Homo sapien
aaaggacccgtattacagtgccacg

SEQ ID NO: 1381958 - DNA, 25 bp, Homo sapien
cctgtcagcggagtggagaatgtca

SEQ ID NO: 1381959 - DNA, 25 bp, Homo sapien
gaaaacgctacaggaagcatgacct

SEQ ID NO: 1381960 - DNA, 25 bp, Homo sapien
tttagaatctaacctgctgtcttcg

SEQ ID NO: 1381961 - DNA, 25 bp, Homo sapien
gaatttcggtagaactgagtgacct

SEQ ID NO: 1381962 - DNA, 25 bp, Homo sapien
tcaggaatttcggtagaactgagtg

SEQ ID NO: 1381963 - DNA, 25 bp, Homo sapien
gaatctaacctgctgtcttcgtgct

SEQ ID NO: 1381964 - DNA, 25 bp, Homo sapien
tagacctattcaagagctatcaggg

SEQ ID NO: 1381965 - DNA, 25 bp, Homo sapien
caacccctgggctagtgatgtctct

SEQ ID NO: 1381966 - DNA, 25 bp, Homo sapien
cacagaagttgcgagaaagacccag

SEQ ID NO: 1381967 - DNA, 25 bp, Homo sapien
gggccctggaaactctagctgaaac

SEQ ID NO: 1381968 - DNA, 25 bp, Homo sapien
tgcataggaaggtgagatgaccatc

SEQ ID NO: 1381969 - DNA, 25 bp, Homo sapien
gaaatatttcttagtgcctaggagg

SEQ ID NO: 1381970 - DNA, 25 bp, Homo sapien
gcgtgtgtgtgttcaagtgcctaaa

SEQ ID NO: 1381971 - DNA, 25 bp, Homo sapien
tcctctttcgtggtggtcactaacc

SEQ ID NO: 1381972 - DNA, 25 bp, Homo sapien
caaggatgtgcatgctctggagtct

SEQ ID NO: 1381973 - DNA, 25 bp, Homo sapien
ggtaggtgtggagtccttccaatca

SEQ ID NO: 1381974 - DNA, 25 bp, Homo sapien
taagtaaccctcactcctcttaagc

SEQ ID NO: 1381975 - DNA, 25 bp, Homo sapien
ggcatgtttactcaataagtaaccc

SEQ ID NO: 1381976 - DNA, 25 bp, Homo sapien
ccccagtgttgaagggagacttcca

SEQ ID NO: 1381977 - DNA, 25 bp, Homo sapien
gaggcgaaggtgaccaagctgctct

SEQ ID NO: 1381978 - DNA, 25 bp, Homo sapien
ggttcctagagccagcggagacaag

SEQ ID NO: 1381979 - DNA, 25 bp, Homo sapien
taagatttgacatccgcacagcagg

SEQ ID NO: 1381980 - DNA, 25 bp, Homo sapien
gatgggacccggttactatcaccat

SEQ ID NO: 1381981 - DNA, 25 bp, Homo sapien
ctccactgatgggacccggttacta

SEQ ID NO: 1381982 - DNA, 25 bp, Homo sapien
ggctgctgtccgagcctccactgat

SEQ ID NO: 1381983 - DNA, 25 bp, Homo sapien
tggctgctgtccgagcctccactga

SEQ ID NO: 1381984 - DNA, 25 bp, Homo sapien
gcctgctcgtcacaatggaaataca

SEQ ID NO: 1381985 - DNA, 25 bp, Homo sapien
tgctcgtcacaatggaaatacatca

SEQ ID NO: 1381986 - DNA, 25 bp, Homo sapien
tcgtcacaatggaaatacatcaagg

SEQ ID NO: 1381987 - DNA, 25 bp, Homo sapien
cgtcacaatggaaatacatcaaggc

SEQ ID NO: 1381988 - DNA, 25 bp, Homo sapien
caagcaaggtttactaaagcatcaa

SEQ ID NO: 1381989 - DNA, 25 bp, Homo sapien
ggtggagtgtagctgaccccagtca

SEQ ID NO: 1381990 - DNA, 25 bp, Homo sapien
gcagacagggtgagcttcacaccag

SEQ ID NO: 1381991 - DNA, 25 bp, Homo sapien
aatggaagcaatgggtttcaactga

SEQ ID NO: 1381992 - DNA, 25 bp, Homo sapien
aaagttaacatcacggccaagcttt

SEQ ID NO: 1381993 - DNA, 25 bp, Homo sapien
agttaacatcacggccaagctttac

SEQ ID NO: 1381994 - DNA, 25 bp, Homo sapien
aagttaacatcacggccaagcttta

SEQ ID NO: 1381995 - DNA, 25 bp, Homo sapien
gaagctagtatctaatatcattttc

SEQ ID NO: 1381996 - DNA, 25 bp, Homo sapien
tatatttggactccaagatcccagt

SEQ ID NO: 1381997 - DNA, 25 bp, Homo sapien
gtgaaagtcaaatcatacttgcacc

SEQ ID NO: 1381998 - DNA, 25 bp, Homo sapien
atgtttggtgagaagctagtatcta

SEQ ID NO: 1381999 - DNA, 25 bp, Homo sapien
agactttaagaattccacgccacca

SEQ ID NO: 1382000 - DNA, 25 bp, Homo sapien
aattccacgccaccacatgactttg

SEQ ID NO: 1382001 - DNA, 25 bp, Homo sapien
cctttgttgaaaccctctctgggag

SEQ ID NO: 1382002 - DNA, 25 bp, Homo sapien
ctctgggagctttgacaaggtgagc

SEQ ID NO: 1382003 - DNA, 25 bp, Homo sapien
ccacatgggagggactagcctcttt

SEQ ID NO: 1382004 - DNA, 25 bp, Homo sapien
ttagtaccccacacatagaatcagc

SEQ ID NO: 1382005 - DNA, 25 bp, Homo sapien
tagcctctttccctctgtaaccagt

SEQ ID NO: 1382006 - DNA, 25 bp, Homo sapien
caatactgtagagtagaagggagcc

SEQ ID NO: 1382007 - DNA, 25 bp, Homo sapien
ggaaattgtctttgcttggagcaca

SEQ ID NO: 1382008 - DNA, 25 bp, Homo sapien
ttggagcacaatgacgcacaggggt

SEQ ID NO: 1382009 - DNA, 25 bp, Homo sapien
ctgtgccatgggcttccaagggcta

SEQ ID NO: 1382010 - DNA, 25 bp, Homo sapien
gcttccaagggctacagaacaatgg

SEQ ID NO: 1382011 - DNA, 25 bp, Homo sapien
caggcagaagggaagtgcagaggct

SEQ ID NO: 1382012 - DNA, 25 bp, Homo sapien
ctgccaggcagaagggaagtgcaga

SEQ ID NO: 1382013 - DNA, 25 bp, Homo sapien
tggccctggtgcagggtcacagaga

SEQ ID NO: 1382014 - DNA, 25 bp, Homo sapien
ccctggtgcagggtcacagagatct

SEQ ID NO: 1382015 - DNA, 25 bp, Homo sapien
ctgagtaagcagaaggtcctggatg

SEQ ID NO: 1382016 - DNA, 25 bp, Homo sapien
cacagaggcgggaggcagaacagca

SEQ ID NO: 1382017 - DNA, 25 bp, Homo sapien
aggcgggaggcagaacagcagagac

SEQ ID NO: 1382018 - DNA, 25 bp, Homo sapien
agaggcgggaggcagaacagcagag

SEQ ID NO: 1382019 - DNA, 25 bp, Homo sapien
agccacagaggcgggaggcagaaca

SEQ ID NO: 1382020 - DNA, 25 bp, Homo sapien
gaaggataggagtgactcttcaaga

SEQ ID NO: 1382021 - DNA, 25 bp, Homo sapien
tgggatggagagagttctgcgtgtg

SEQ ID NO: 1382022 - DNA, 25 bp, Homo sapien
ctgcgtgtgttgtcgggcaccctga

SEQ ID NO: 1382023 - DNA, 25 bp, Homo sapien
gagagttctgcgtgtgttgtcgggc

SEQ ID NO: 1382024 - DNA, 25 bp, Homo sapien
tgtgttgtcgggcaccctgagccat

SEQ ID NO: 1382025 - DNA, 25 bp, Homo sapien
cagaagcttggaaaaagttccttgc

SEQ ID NO: 1382026 - DNA, 25 bp, Homo sapien
tgttccatactctgtgccacctctg

SEQ ID NO: 1382027 - DNA, 25 bp, Homo sapien
gaagcttgtgccaaagcagcaggaa

SEQ ID NO: 1382028 - DNA, 25 bp, Homo sapien
gccacctctgattgcgtcttgaata

SEQ ID NO: 1382029 - DNA, 25 bp, Homo sapien
cacagacagccatggtctttagacc

SEQ ID NO: 1382030 - DNA, 25 bp, Homo sapien
catccaggagaaacctccctaggtt

SEQ ID NO: 1382031 - DNA, 25 bp, Homo sapien
gaaattagacccacaaaacatagag

SEQ ID NO: 1382032 - DNA, 25 bp, Homo sapien
cctaggtttgtgagctgttgggatc

SEQ ID NO: 1382033 - DNA, 25 bp, Homo sapien
tgggaagctatgcagaatacagtgt

SEQ ID NO: 1382034 - DNA, 25 bp, Homo sapien
ttctttcacatgactgcccttacaa

SEQ ID NO: 1382035 - DNA, 25 bp, Homo sapien
cagttccttcaacttagggaagagt

SEQ ID NO: 1382036 - DNA, 25 bp, Homo sapien
tttgggccccactccagaatcctat

SEQ ID NO: 1382037 - DNA, 25 bp, Homo sapien
gggatcttttgctgccccttccaca

SEQ ID NO: 1382038 - DNA, 25 bp, Homo sapien
agggatcttttgctgccccttccac

SEQ ID NO: 1382039 - DNA, 25 bp, Homo sapien
ggttgctcagtctctgataagccca

SEQ ID NO: 1382040 - DNA, 25 bp, Homo sapien
cttgaggggttgctcagtctctgat

SEQ ID NO: 1382041 - DNA, 25 bp, Homo sapien
catcttgaggggttgctcagtctct

SEQ ID NO: 1382042 - DNA, 25 bp, Homo sapien
gggttgctcagtctctgataagccc

SEQ ID NO: 1382043 - DNA, 25 bp, Homo sapien
ttaggtcttggttaagtctgagttc

SEQ ID NO: 1382044 - DNA, 25 bp, Homo sapien
taggtcttggttaagtctgagttct

SEQ ID NO: 1382045 - DNA, 25 bp, Homo sapien
cacagccacttctacaggtaccatg

SEQ ID NO: 1382046 - DNA, 25 bp, Homo sapien
tggcacagtgtcagtccttgaggag

SEQ ID NO: 1382047 - DNA, 25 bp, Homo sapien
acttctacaggtaccatggctattg

SEQ ID NO: 1382048 - DNA, 25 bp, Homo sapien
gttgaaaagtggcacagtgtcagtc

SEQ ID NO: 1382049 - DNA, 25 bp, Homo sapien
tggatcctcggaagatgctgccact

SEQ ID NO: 1382050 - DNA, 25 bp, Homo sapien
tgcctacaccagtcaccattcattg

SEQ ID NO: 1382051 - DNA, 25 bp, Homo sapien
cagtcaccattcattggccctatca

SEQ ID NO: 1382052 - DNA, 25 bp, Homo sapien
ttggccctatcactggatcctcgga

SEQ ID NO: 1382053 - DNA, 25 bp, Homo sapien
aatgagatcccttaatgccatggaa

SEQ ID NO: 1382054 - DNA, 25 bp, Homo sapien
aaggcatttgagtttatgacagtgc

SEQ ID NO: 1382055 - DNA, 25 bp, Homo sapien
gacagtgctatcaacttttgttgaa

SEQ ID NO: 1382056 - DNA, 25 bp, Homo sapien
tgagtttatgacagtgctatcaact

SEQ ID NO: 1382057 - DNA, 25 bp, Homo sapien
cttttgttgaaagtggctgtggaaa

SEQ ID NO: 1382058 - DNA, 25 bp, Homo sapien
agcagagcattggtgtgtgctcgca

SEQ ID NO: 1382059 - DNA, 25 bp, Homo sapien
cctgtgggtcgtccttgcagagtga

SEQ ID NO: 1382060 - DNA, 25 bp, Homo sapien
tgtgctcgcatttcagacgctttgg

SEQ ID NO: 1382061 - DNA, 25 bp, Homo sapien
actctgttgtgccaggtgttcctgt

SEQ ID NO: 1382062 - DNA, 25 bp, Homo sapien
gctgctgatcacacgactcagcttc

SEQ ID NO: 1382063 - DNA, 25 bp, Homo sapien
tggtgctgctgatcacacgactcag

SEQ ID NO: 1382064 - DNA, 25 bp, Homo sapien
gtgctgctgatcacacgactcagct

SEQ ID NO: 1382065 - DNA, 25 bp, Homo sapien
tgctgatcacacgactcagcttcca

SEQ ID NO: 1382066 - DNA, 25 bp, Homo sapien
tattttttgcacttctctataagtc

SEQ ID NO: 1382067 - DNA, 25 bp, Homo sapien
ttattttttgcacttctctataagt

SEQ ID NO: 1382068 - DNA, 25 bp, Homo sapien
tatcaaaacccttactaaacaatga

SEQ ID NO: 1382069 - DNA, 25 bp, Homo sapien
acccttactaaacaatgagttctgg

SEQ ID NO: 1382070 - DNA, 25 bp, Homo sapien
gttgggcacgtgaagtcagcttgaa

SEQ ID NO: 1382071 - DNA, 25 bp, Homo sapien
tattggggcgtgactgtataactgg

SEQ ID NO: 1382072 - DNA, 25 bp, Homo sapien
taacttctaagtagaatgcaagcta

SEQ ID NO: 1382073 - DNA, 25 bp, Homo sapien
aactgtcaggaacttattcaaaaca

SEQ ID NO: 1382074 - DNA, 25 bp, Homo sapien
gagcctccagtattaattgtatcca

SEQ ID NO: 1382075 - DNA, 25 bp, Homo sapien
gtatccaggaatttgcaagggccct

SEQ ID NO: 1382076 - DNA, 25 bp, Homo sapien
gggtcttgacaactgccatgtggag

SEQ ID NO: 1382077 - DNA, 25 bp, Homo sapien
ttctgcaacacatctttggctttgg

SEQ ID NO: 1382078 - DNA, 25 bp, Homo sapien
acctctgatctccactgagaggcct

SEQ ID NO: 1382079 - DNA, 25 bp, Homo sapien
aacctctgatctccactgagaggcc

SEQ ID NO: 1382080 - DNA, 25 bp, Homo sapien
cctctgatctccactgagaggcctc

SEQ ID NO: 1382081 - DNA, 25 bp, Homo sapien
gatgtcaggtaccaactgagctcct

SEQ ID NO: 1382082 - DNA, 25 bp, Homo sapien
gcaaaagggatgtcaggtaccaact

SEQ ID NO: 1382083 - DNA, 25 bp, Homo sapien
gaaggcaaaagggatgtcaggtacc

SEQ ID NO: 1382084 - DNA, 25 bp, Homo sapien
ctgtgaaggcaaaagggatgtcagg

SEQ ID NO: 1382085 - DNA, 25 bp, Homo sapien
cagttttgtgccttgtggacggata

SEQ ID NO: 1382086 - DNA, 25 bp, Homo sapien
cggatagtgggtccatcccatggga

SEQ ID NO: 1382087 - DNA, 25 bp, Homo sapien
tcacagttttgtgccttgtggacgg

SEQ ID NO: 1382088 - DNA, 25 bp, Homo sapien
ccttgtggacggatagtgggtccat

SEQ ID NO: 1382089 - DNA, 25 bp, Homo sapien
tggctttccaggctccttttgtttc

SEQ ID NO: 1382090 - DNA, 25 bp, Homo sapien
ccttttgtttcctggatgagctgct

SEQ ID NO: 1382091 - DNA, 25 bp, Homo sapien
ctgtggctttccaggctccttttgt

SEQ ID NO: 1382092 - DNA, 25 bp, Homo sapien
tttgtttcctggatgagctgctcct

SEQ ID NO: 1382093 - DNA, 25 bp, Homo sapien
ctggaagatcatagaaaacagagat

SEQ ID NO: 1382094 - DNA, 25 bp, Homo sapien
tgggtcctaattctgggagtagaac

SEQ ID NO: 1382095 - DNA, 25 bp, Homo sapien
gagatctagcactctgtactgaaca

SEQ ID NO: 1382096 - DNA, 25 bp, Homo sapien
tgtactgaacagcacttgggtccta

SEQ ID NO: 1382097 - DNA, 25 bp, Homo sapien
gggagtgagtcctggactagagttg

SEQ ID NO: 1382098 - DNA, 25 bp, Homo sapien
gactagagttgcaagccacatttcc

SEQ ID NO: 1382099 - DNA, 25 bp, Homo sapien
tgtctagagcagctgcaccgaaacc

SEQ ID NO: 1382100 - DNA, 25 bp, Homo sapien
aaaccagtgccccttccagaagtga

SEQ ID NO: 1382101 - DNA, 25 bp, Homo sapien
tctgaggctaaagcgcttcagagcc

SEQ ID NO: 1382102 - DNA, 25 bp, Homo sapien
tgaggctaaagcgcttcagagccct

SEQ ID NO: 1382103 - DNA, 25 bp, Homo sapien
gaggctaaagcgcttcagagccctc

SEQ ID NO: 1382104 - DNA, 25 bp, Homo sapien
tctctgaggctaaagcgcttcagag

SEQ ID NO: 1382105 - DNA, 25 bp, Homo sapien
cagtccacggtcttacattcagcaa

SEQ ID NO: 1382106 - DNA, 25 bp, Homo sapien
tggcaccatactcgaaactacctgt

SEQ ID NO: 1382107 - DNA, 25 bp, Homo sapien
taagtggtccattgggttgcaccta

SEQ ID NO: 1382108 - DNA, 25 bp, Homo sapien
tacactggcactttagcacaagggc

SEQ ID NO: 1382109 - DNA, 25 bp, Homo sapien
ttaagttgcactgatactaccatta

SEQ ID NO: 1382110 - DNA, 25 bp, Homo sapien
cactgatactaccattatatcacag

SEQ ID NO: 1382111 - DNA, 25 bp, Homo sapien
ctaccattatatcacagtgcacaca

SEQ ID NO: 1382112 - DNA, 25 bp, Homo sapien
cattaattagttctacacaaataga

SEQ ID NO: 1382113 - DNA, 25 bp, Homo sapien
tgataagctagaattccaactttga

SEQ ID NO: 1382114 - DNA, 25 bp, Homo sapien
gaagaacacttggtgatggcggctc

SEQ ID NO: 1382115 - DNA, 25 bp, Homo sapien
gatggcggctcactaaatttggcac

SEQ ID NO: 1382116 - DNA, 25 bp, Homo sapien
taaatttggcaccagcatagttctg

SEQ ID NO: 1382117 - DNA, 25 bp, Homo sapien
gctgttgttggttcttactaacatt

SEQ ID NO: 1382118 - DNA, 25 bp, Homo sapien
tgaggggctggaatgttatacctct

SEQ ID NO: 1382119 - DNA, 25 bp, Homo sapien
ttgaggggctggaatgttatacctc

SEQ ID NO: 1382120 - DNA, 25 bp, Homo sapien
gaggggctggaatgttatacctctc

SEQ ID NO: 1382121 - DNA, 25 bp, Homo sapien
ggggctggaatgttatacctctctc

SEQ ID NO: 1382122 - DNA, 25 bp, Homo sapien
gaggccaacatctgagtctcctcag

SEQ ID NO: 1382123 - DNA, 25 bp, Homo sapien
aggagctgaggccaacatctgagtc

SEQ ID NO: 1382124 - DNA, 25 bp, Homo sapien
gattgcaggatctccactacctgtc

SEQ ID NO: 1382125 - DNA, 25 bp, Homo sapien
gcttttcagattgcaggatctccac

SEQ ID NO: 1382126 - DNA, 25 bp, Homo sapien
agagacgaggcacggaccgacaaag

SEQ ID NO: 1382127 - DNA, 25 bp, Homo sapien
gacaaagcccacgaacaccgatgag

SEQ ID NO: 1382128 - DNA, 25 bp, Homo sapien
cgaacaccgatgagcgagctgccgg

SEQ ID NO: 1382129 - DNA, 25 bp, Homo sapien
gagctgccggccaccccagcttcta

SEQ ID NO: 1382130 - DNA, 25 bp, Homo sapien
tctttatcgccactatgggaagcta

SEQ ID NO: 1382131 - DNA, 25 bp, Homo sapien
tgagtgctaacaagggcctccagtg

SEQ ID NO: 1382132 - DNA, 25 bp, Homo sapien
taaatggagcgctcaaaagtccatc

SEQ ID NO: 1382133 - DNA, 25 bp, Homo sapien
tccatctggcgctgtgtgcttgctg

SEQ ID NO: 1382134 - DNA, 25 bp, Homo sapien
aatcagagctcatcagttaatgcaa

SEQ ID NO: 1382135 - DNA, 25 bp, Homo sapien
taaatgtgcatgaagcttagctgaa

SEQ ID NO: 1382136 - DNA, 25 bp, Homo sapien
tccatagaggtaggttcaaacttgt

SEQ ID NO: 1382137 - DNA, 25 bp, Homo sapien
tatcagattgatacaccgagaccta

SEQ ID NO: 1382138 - DNA, 25 bp, Homo sapien
tctatttacgaaaaatactcgcttc

SEQ ID NO: 1382139 - DNA, 25 bp, Homo sapien
gaggagatgtgtacaattcttcctt

SEQ ID NO: 1382140 - DNA, 25 bp, Homo sapien
tacgaaaaatactcgcttcctccag

SEQ ID NO: 1382141 - DNA, 25 bp, Homo sapien
cctctatttacgaaaaatactcgct

SEQ ID NO: 1382142 - DNA, 25 bp, Homo sapien
ttagatcaacaaaaggctctcttta

SEQ ID NO: 1382143 - DNA, 25 bp, Homo sapien
tagatcaacaaaaggctctctttac

SEQ ID NO: 1382144 - DNA, 25 bp, Homo sapien
gaaggtacttccatattacagcagg

SEQ ID NO: 1382145 - DNA, 25 bp, Homo sapien
tgggctcctctggtgaactgtgttg

SEQ ID NO: 1382146 - DNA, 25 bp, Homo sapien
caggttaccagagtgttctgggctc

SEQ ID NO: 1382147 - DNA, 25 bp, Homo sapien
agcagcaggtcaacagccataccct

SEQ ID NO: 1382148 - DNA, 25 bp, Homo sapien
gcaactggaccaaccctcaaatggt

SEQ ID NO: 1382149 - DNA, 25 bp, Homo sapien
tagcagctgcaactggaccaaccct

SEQ ID NO: 1382150 - DNA, 25 bp, Homo sapien
ggacaaagcctctagcagctgcaac

SEQ ID NO: 1382151 - DNA, 25 bp, Homo sapien
aaagcctctagcagctgcaactgga

SEQ ID NO: 1382152 - DNA, 25 bp, Homo sapien
ttgctaagcgatagaaccaccaggg

SEQ ID NO: 1382153 - DNA, 25 bp, Homo sapien
cagtgatgacacttaccccagggat

SEQ ID NO: 1382154 - DNA, 25 bp, Homo sapien
catcggttagcaaaaggagggcaat

SEQ ID NO: 1382155 - DNA, 25 bp, Homo sapien
taatttagggcccaagctgcgtgct

SEQ ID NO: 1382156 - DNA, 25 bp, Homo sapien
catcagcgcatatgtgtagccctgc

SEQ ID NO: 1382157 - DNA, 25 bp, Homo sapien
caagccggtggctatgtctgcagcc

SEQ ID NO: 1382158 - DNA, 25 bp, Homo sapien
caagggtagatgagcaacaagccgg

SEQ ID NO: 1382159 - DNA, 25 bp, Homo sapien
tatattgctcaatcatgccagcggc

SEQ ID NO: 1382160 - DNA, 25 bp, Homo sapien
tgccggcgcgtttacctaactcaca

SEQ ID NO: 1382161 - DNA, 25 bp, Homo sapien
agctgcagccactaatgaagggagg

SEQ ID NO: 1382162 - DNA, 25 bp, Homo sapien
cagcttctctatcagaggtggagca

SEQ ID NO: 1382163 - DNA, 25 bp, Homo sapien
tgtcccaaagatggagtaaccaggc

SEQ ID NO: 1382164 - DNA, 25 bp, Homo sapien
caggacggcgtgtacagttagtatc

SEQ ID NO: 1382165 - DNA, 25 bp, Homo sapien
tgatatctctggaaactaccataag

SEQ ID NO: 1382166 - DNA, 25 bp, Homo sapien
gaacacttatacacctgttacccag

SEQ ID NO: 1382167 - DNA, 25 bp, Homo sapien
aaattacataagcatctctgcaaaa

SEQ ID NO: 1382168 - DNA, 25 bp, Homo sapien
tggcccctgatggaagtacatactg

SEQ ID NO: 1382169 - DNA, 25 bp, Homo sapien
cttgcagggcatgcttccgaggctc

SEQ ID NO: 1382170 - DNA, 25 bp, Homo sapien
ctgggtcagatagggtactagtcct

SEQ ID NO: 1382171 - DNA, 25 bp, Homo sapien
ccaatgtcagctggcttctggtaga

SEQ ID NO: 1382172 - DNA, 25 bp, Homo sapien
aattgagtgcaagaggagccagtct

SEQ ID NO: 1382173 - DNA, 25 bp, Homo sapien
gagcatataaaggagaccctctggt

SEQ ID NO: 1382174 - DNA, 25 bp, Homo sapien
gatttgtgacaagggtgccattgca

SEQ ID NO: 1382175 - DNA, 25 bp, Homo sapien
cgtattttacgagatcagcacattc

SEQ ID NO: 1382176 - DNA, 25 bp, Homo sapien
aataaatgcatatgtcgacccaaag

SEQ ID NO: 1382177 - DNA, 25 bp, Homo sapien
gatgcctgcctgaaacactgacagc

SEQ ID NO: 1382178 - DNA, 25 bp, Homo sapien
caatggtagccaggaattcccttcc

SEQ ID NO: 1382179 - DNA, 25 bp, Homo sapien
gaaaggttcagttccctgggcagtg

SEQ ID NO: 1382180 - DNA, 25 bp, Homo sapien
ttcggcatcctccagaaatactctg

SEQ ID NO: 1382181 - DNA, 25 bp, Homo sapien
ggaccatgtagtgagatggcctgaa

SEQ ID NO: 1382182 - DNA, 25 bp, Homo sapien
tatatactttcttcgcatctggagc

SEQ ID NO: 1382183 - DNA, 25 bp, Homo sapien
tttactcaggagaaagtgcttcggg

SEQ ID NO: 1382184 - DNA, 25 bp, Homo sapien
acctccgggtcagttgccaaagcat

SEQ ID NO: 1382185 - DNA, 25 bp, Homo sapien
tcccacctccgggtcagttgccaaa

SEQ ID NO: 1382186 - DNA, 25 bp, Homo sapien
tcaggacgtatctacttgaggaatc

SEQ ID NO: 1382187 - DNA, 25 bp, Homo sapien
cgtatctacttgaggaatcttgatg

SEQ ID NO: 1382188 - DNA, 25 bp, Homo sapien
tgatacaaaccagcatgatgaaagg

SEQ ID NO: 1382189 - DNA, 25 bp, Homo sapien
agaggggtcccacaccaacttggat

SEQ ID NO: 1382190 - DNA, 25 bp, Homo sapien
ccaacttggatcacacaagcagctg

SEQ ID NO: 1382191 - DNA, 25 bp, Homo sapien
acacaagcagctgggtgatacaaac

SEQ ID NO: 1382192 - DNA, 25 bp, Homo sapien
caatcagaagagatgttggccatag

SEQ ID NO: 1382193 - DNA, 25 bp, Homo sapien
catagttttggagtagggtcctgga

SEQ ID NO: 1382194 - DNA, 25 bp, Homo sapien
ctggaaggacatgaggtattaactc

SEQ ID NO: 1382195 - DNA, 25 bp, Homo sapien
aactctttgcttgttcgattgtggg

SEQ ID NO: 1382196 - DNA, 25 bp, Homo sapien
aactagctgacagattggctggctc

SEQ ID NO: 1382197 - DNA, 25 bp, Homo sapien
ctcccttcaccaggataaagtaggt

SEQ ID NO: 1382198 - DNA, 25 bp, Homo sapien
taggcaagggagtaattaatatagc

SEQ ID NO: 1382199 - DNA, 25 bp, Homo sapien
taaagtaggtatgggttggagatct

SEQ ID NO: 1382200 - DNA, 25 bp, Homo sapien
tgagcaccccttagttctggtcttg

SEQ ID NO: 1382201 - DNA, 25 bp, Homo sapien
aaagtaagccatcccataacatcag

SEQ ID NO: 1382202 - DNA, 25 bp, Homo sapien
aagaaaacaactgtgaagcatgctc

SEQ ID NO: 1382203 - DNA, 25 bp, Homo sapien
caagttttgacatagatgggaacag

SEQ ID NO: 1382204 - DNA, 25 bp, Homo sapien
tattagggcttattaggacaaacac

SEQ ID NO: 1382205 - DNA, 25 bp, Homo sapien
taaagaatgtctagatgctcctcca

SEQ ID NO: 1382206 - DNA, 25 bp, Homo sapien
taaagtccattaagcagtcagtgtc

SEQ ID NO: 1382207 - DNA, 25 bp, Homo sapien
ctgctagtaaatgccagagccagga

SEQ ID NO: 1382208 - DNA, 25 bp, Homo sapien
tagcagacagcccaaaagtttattg

SEQ ID NO: 1382209 - DNA, 25 bp, Homo sapien
tcagttcagtgtcccaagttatacc

SEQ ID NO: 1382210 - DNA, 25 bp, Homo sapien
cagaagtggtatgtgccacctccag

SEQ ID NO: 1382211 - DNA, 25 bp, Homo sapien
taacctattagcctgtatgtgcaca

SEQ ID NO: 1382212 - DNA, 25 bp, Homo sapien
tttcttagtgttacttggttgccca

SEQ ID NO: 1382213 - DNA, 25 bp, Homo sapien
agaggtgattctaaatgctgctttc

SEQ ID NO: 1382214 - DNA, 25 bp, Homo sapien
cagttttctaggtggtgtaagttca

SEQ ID NO: 1382215 - DNA, 25 bp, Homo sapien
gcacttgatagggtatcactgccca

SEQ ID NO: 1382216 - DNA, 25 bp, Homo sapien
tgagtgtgtcagaagccaaagcgcc

SEQ ID NO: 1382217 - DNA, 25 bp, Homo sapien
gcacaatctggcatgactgccttta

SEQ ID NO: 1382218 - DNA, 25 bp, Homo sapien
tatttctaatcaaagcagtggtggc

SEQ ID NO: 1382219 - DNA, 25 bp, Homo sapien
taaagagcttagcagcgttcaaggc

SEQ ID NO: 1382220 - DNA, 25 bp, Homo sapien
gtgttgggtgtaggaaagtgcccat

SEQ ID NO: 1382221 - DNA, 25 bp, Homo sapien
ttgggtgtaggaaagtgcccatgaa

SEQ ID NO: 1382222 - DNA, 25 bp, Homo sapien
tgttgggtgtaggaaagtgcccatg

SEQ ID NO: 1382223 - DNA, 25 bp, Homo sapien
gttgggtgtaggaaagtgcccatga

SEQ ID NO: 1382224 - DNA, 25 bp, Homo sapien
cagacttttaaggtacagtgcccaa

SEQ ID NO: 1382225 - DNA, 25 bp, Homo sapien
tattgacttccctgttaaggcccag

SEQ ID NO: 1382226 - DNA, 25 bp, Homo sapien
tgagaaaactggtctacacggtcgg

SEQ ID NO: 1382227 - DNA, 25 bp, Homo sapien
cgatgaacgttagagtgcctggacc

SEQ ID NO: 1382228 - DNA, 25 bp, Homo sapien
gagaattcggtgtccttcaggaaac

SEQ ID NO: 1382229 - DNA, 25 bp, Homo sapien
tttcaccccacactgttgagatcgg

SEQ ID NO: 1382230 - DNA, 25 bp, Homo sapien
tgtgtgcagttcagaatggcctacc

SEQ ID NO: 1382231 - DNA, 25 bp, Homo sapien
gatcggaactgtggcaatcttaaca

SEQ ID NO: 1382232 - DNA, 25 bp, Homo sapien
accaagaagcactgaaagatggcag

SEQ ID NO: 1382233 - DNA, 25 bp, Homo sapien
ccaagaagcactgaaagatggcagg

SEQ ID NO: 1382234 - DNA, 25 bp, Homo sapien
ggaagtggcatcctgggaaccaaga

SEQ ID NO: 1382235 - DNA, 25 bp, Homo sapien
ctattcgtggaggaagtggcatcct

SEQ ID NO: 1382236 - DNA, 25 bp, Homo sapien
atgatgtatagtaaggcccgttttc

SEQ ID NO: 1382237 - DNA, 25 bp, Homo sapien
aagcctgctttataggcccttaagt

SEQ ID NO: 1382238 - DNA, 25 bp, Homo sapien
cattttctactccagcaatctgcag

SEQ ID NO: 1382239 - DNA, 25 bp, Homo sapien
tccagatactagctatgaattgtct

SEQ ID NO: 1382240 - DNA, 25 bp, Homo sapien
cattaagatgagtgatgtagagttc

SEQ ID NO: 1382241 - DNA, 25 bp, Homo sapien
gctctgtgtagatggaaagccattc

SEQ ID NO: 1382242 - DNA, 25 bp, Homo sapien
cagcttgatgagcttttggccaagt

SEQ ID NO: 1382243 - DNA, 25 bp, Homo sapien
taaagactactgagataggccacat

SEQ ID NO: 1382244 - DNA, 25 bp, Homo sapien
tgatgaaattcacgagtagtcctgt

SEQ ID NO: 1382245 - DNA, 25 bp, Homo sapien
tggagaaaatgcctctcttgggaca

SEQ ID NO: 1382246 - DNA, 25 bp, Homo sapien
ggagaaaatgcctctcttgggacaa

SEQ ID NO: 1382247 - DNA, 25 bp, Homo sapien
tctggagaaaatgcctctcttggga

SEQ ID NO: 1382248 - DNA, 25 bp, Homo sapien
tatctggagaaaatgcctctcttgg

SEQ ID NO: 1382249 - DNA, 25 bp, Homo sapien
tacattaatatctggtaatgacagg

SEQ ID NO: 1382250 - DNA, 25 bp, Homo sapien
tatcatagggaaagtatgttaaatg

SEQ ID NO: 1382251 - DNA, 25 bp, Homo sapien
ctggtaatgacaggatgttgtgctc

SEQ ID NO: 1382252 - DNA, 25 bp, Homo sapien
gtttattaagactcactaatttaca

SEQ ID NO: 1382253 - DNA, 25 bp, Homo sapien
gagggagaacttctggtacttctta

SEQ ID NO: 1382254 - DNA, 25 bp, Homo sapien
ttaatataccataccaggtgaggga

SEQ ID NO: 1382255 - DNA, 25 bp, Homo sapien
taccataccaggtgagggagaactt

SEQ ID NO: 1382256 - DNA, 25 bp, Homo sapien
aatataccataccaggtgagggaga

SEQ ID NO: 1382257 - DNA, 25 bp, Homo sapien
aaggaggaaagtcaatctgttctgg

SEQ ID NO: 1382258 - DNA, 25 bp, Homo sapien
ggaggaaagtcaatctgttctggtg

SEQ ID NO: 1382259 - DNA, 25 bp, Homo sapien
gaggaaagtcaatctgttctggtga

SEQ ID NO: 1382260 - DNA, 25 bp, Homo sapien
aaaaggaggaaagtcaatctgttct

SEQ ID NO: 1382261 - DNA, 25 bp, Homo sapien
tttgaacgaaatgtgggatgtacaa

SEQ ID NO: 1382262 - DNA, 25 bp, Homo sapien
ctttgaacgaaatgtgggatgtaca

SEQ ID NO: 1382263 - DNA, 25 bp, Homo sapien
gaatacaaagcaatgtttgccactg

SEQ ID NO: 1382264 - DNA, 25 bp, Homo sapien
gagggtctcctatgattgaagtatc

SEQ ID NO: 1382265 - DNA, 25 bp, Homo sapien
tccaagtcagtaacctgggttcaag

SEQ ID NO: 1382266 - DNA, 25 bp, Homo sapien
tgcagaatgtcaatatcttccatct

SEQ ID NO: 1382267 - DNA, 25 bp, Homo sapien
tttcttcaggaagtcggagtccagg

SEQ ID NO: 1382268 - DNA, 25 bp, Homo sapien
tactccttcacagcaatgtgatcca

SEQ ID NO: 1382269 - DNA, 25 bp, Homo sapien
aacaacatcgtagagtttcttcagg

SEQ ID NO: 1382270 - DNA, 25 bp, Homo sapien
tgtattcgctggtcagggtgtgaaa

SEQ ID NO: 1382271 - DNA, 25 bp, Homo sapien
aactgatgtgctaggattctctaca

SEQ ID NO: 1382272 - DNA, 25 bp, Homo sapien
attatcttgtgggttcaattgtccc

SEQ ID NO: 1382273 - DNA, 25 bp, Homo sapien
gtgtcagggcctatagctacttcca

SEQ ID NO: 1382274 - DNA, 25 bp, Homo sapien
gcctccaaatgaagggattatagaa

SEQ ID NO: 1382275 - DNA, 25 bp, Homo sapien
taccaccatcactgttcgaccacag

SEQ ID NO: 1382276 - DNA, 25 bp, Homo sapien
catcactgttcgaccacagttatca

SEQ ID NO: 1382277 - DNA, 25 bp, Homo sapien
actgttcgaccacagttatcaacac

SEQ ID NO: 1382278 - DNA, 25 bp, Homo sapien
tctattaatgttacaggaatgtttc

SEQ ID NO: 1382279 - DNA, 25 bp, Homo sapien
tcttgcttgacataaccagcgatta

SEQ ID NO: 1382280 - DNA, 25 bp, Homo sapien
ctcagatcttgcttgacataaccag

SEQ ID NO: 1382281 - DNA, 25 bp, Homo sapien
tttagagaagcaatatcagacagat

SEQ ID NO: 1382282 - DNA, 25 bp, Homo sapien
tgcttgacataaccagcgattataa

SEQ ID NO: 1382283 - DNA, 25 bp, Homo sapien
taattgaaaacactcgcataactgg

SEQ ID NO: 1382284 - DNA, 25 bp, Homo sapien
tagccaattcctagggtagttcctg

SEQ ID NO: 1382285 - DNA, 25 bp, Homo sapien
cataactggtatatgcatggtccac

SEQ ID NO: 1382286 - DNA, 25 bp, Homo sapien
tgtgctacttcccaccgttatctgg

SEQ ID NO: 1382287 - DNA, 25 bp, Homo sapien
gacctttagtttcgctactgatgga

SEQ ID NO: 1382288 - DNA, 25 bp, Homo sapien
aagaccctaagctccatgcaggcgg

SEQ ID NO: 1382289 - DNA, 25 bp, Homo sapien
caaggcagtgctacgaaaggagtga

SEQ ID NO: 1382290 - DNA, 25 bp, Homo sapien
ttaccagtagtatccagcacaacat

SEQ ID NO: 1382291 - DNA, 25 bp, Homo sapien
gccttaccacaaatcaaggcagtgg

SEQ ID NO: 1382292 - DNA, 25 bp, Homo sapien
aggcagtggcaccaataaacaaaaa

SEQ ID NO: 1382293 - DNA, 25 bp, Homo sapien
aaaacagctggtaatagccttacca

SEQ ID NO: 1382294 - DNA, 25 bp, Homo sapien
gaatgtcttcgatgtagaagtaaag

SEQ ID NO: 1382295 - DNA, 25 bp, Homo sapien
tgaagtgtgaagttgccttgaagaa

SEQ ID NO: 1382296 - DNA, 25 bp, Homo sapien
tgagttgtgagctggactagttgct

SEQ ID NO: 1382297 - DNA, 25 bp, Homo sapien
gactggcaaactgtagttattcaac

SEQ ID NO: 1382298 - DNA, 25 bp, Homo sapien
atgaataaagtgaccctgacatttc

SEQ ID NO: 1382299 - DNA, 25 bp, Homo sapien
catggatacagtttgagattctgca

SEQ ID NO: 1382300 - DNA, 25 bp, Homo sapien
tgtgtcaatacttggagctctgaat

SEQ ID NO: 1382301 - DNA, 25 bp, Homo sapien
taaaatctgtccaaagtacagaaca

SEQ ID NO: 1382302 - DNA, 25 bp, Homo sapien
tttccaaaaagctaacgtatcatgt

SEQ ID NO: 1382303 - DNA, 25 bp, Homo sapien
gcattatatatacacgtagctcatg

SEQ ID NO: 1382304 - DNA, 25 bp, Homo sapien
ctcatgcatcagatgcaaggttcct

SEQ ID NO: 1382305 - DNA, 25 bp, Homo sapien
tgtccttatgtatctaacagtcctg

SEQ ID NO: 1382306 - DNA, 25 bp, Homo sapien
tatcttcctcactgattgtcatgaa

SEQ ID NO: 1382307 - DNA, 25 bp, Homo sapien
ttgtccctgaaggatcagttttctt

SEQ ID NO: 1382308 - DNA, 25 bp, Homo sapien
cattcgagcaaaagcatgagagcca

SEQ ID NO: 1382309 - DNA, 25 bp, Homo sapien
gataattgtccctgaaggatcagtt

SEQ ID NO: 1382310 - DNA, 25 bp, Homo sapien
tatctccttccattcgagcaaaagc

SEQ ID NO: 1382311 - DNA, 25 bp, Homo sapien
taggtagggcaatgatcgattctcc

SEQ ID NO: 1382312 - DNA, 25 bp, Homo sapien
tctgtcgttcaggtaccacaggctc

SEQ ID NO: 1382313 - DNA, 25 bp, Homo sapien
tttccaatatctgcaggtaggtagg

SEQ ID NO: 1382314 - DNA, 25 bp, Homo sapien
cacttattctaatctgtcgttcagg

SEQ ID NO: 1382315 - DNA, 25 bp, Homo sapien
aagtagagaggtagcagcttttggt

SEQ ID NO: 1382316 - DNA, 25 bp, Homo sapien
tagagaggtagcagcttttggtaag

SEQ ID NO: 1382317 - DNA, 25 bp, Homo sapien
ggaagtagagaggtagcagcttttg

SEQ ID NO: 1382318 - DNA, 25 bp, Homo sapien
cttgggaagtagagaggtagcagct

SEQ ID NO: 1382319 - DNA, 25 bp, Homo sapien
gctctatagttttctggcaggtagt

SEQ ID NO: 1382320 - DNA, 25 bp, Homo sapien
tactggacagagttgagaattcgta

SEQ ID NO: 1382321 - DNA, 25 bp, Homo sapien
tgataagatcatgccgtctgcaaat

SEQ ID NO: 1382322 - DNA, 25 bp, Homo sapien
tgtaaccccactggaactctattag

SEQ ID NO: 1382323 - DNA, 25 bp, Homo sapien
gcactgtggtgcataccttagcaga

SEQ ID NO: 1382324 - DNA, 25 bp, Homo sapien
taagcacaatggttcgctgagcctc

SEQ ID NO: 1382325 - DNA, 25 bp, Homo sapien
tgtcatggtaagttgccacggcact

SEQ ID NO: 1382326 - DNA, 25 bp, Homo sapien
tagcagagcatttggcacactgtag

SEQ ID NO: 1382327 - DNA, 25 bp, Homo sapien
ctcttcaagatcagagacagcaaat

SEQ ID NO: 1382328 - DNA, 25 bp, Homo sapien
tactttttcaatggtttccccatga

SEQ ID NO: 1382329 - DNA, 25 bp, Homo sapien
catgaatctctaggaatcttcttac

SEQ ID NO: 1382330 - DNA, 25 bp, Homo sapien
atctctaggaatcttcttacagtgc

SEQ ID NO: 1382331 - DNA, 25 bp, Homo sapien
acctcaaatgctgatggctcccaaa

SEQ ID NO: 1382332 - DNA, 25 bp, Homo sapien
aaagacccaaattacctgatgccta

SEQ ID NO: 1382333 - DNA, 25 bp, Homo sapien
tagccaaatttgaccccaacaggtc

SEQ ID NO: 1382334 - DNA, 25 bp, Homo sapien
cactgatgtgctggataggtattac

SEQ ID NO: 1382335 - DNA, 25 bp, Homo sapien
tctaaaggataaccacgttttgcag

SEQ ID NO: 1382336 - DNA, 25 bp, Homo sapien
gaagtgctatgtgtgttgcatcctc

SEQ ID NO: 1382337 - DNA, 25 bp, Homo sapien
ttgcatcctctaaaggataaccacg

SEQ ID NO: 1382338 - DNA, 25 bp, Homo sapien
ttgcagaattgatgacacagaagcc

SEQ ID NO: 1382339 - DNA, 25 bp, Homo sapien
gaagtacgtttctgtagcagctata

SEQ ID NO: 1382340 - DNA, 25 bp, Homo sapien
ctcagctgctgtgcgatagcggctt

SEQ ID NO: 1382341 - DNA, 25 bp, Homo sapien
gaaccgggcagctagattgaatcct

SEQ ID NO: 1382342 - DNA, 25 bp, Homo sapien
agcagctataaagggaactctcagc

SEQ ID NO: 1382343 - DNA, 25 bp, Homo sapien
tccaagaaattgagaggcccaaacc

SEQ ID NO: 1382344 - DNA, 25 bp, Homo sapien
caataaaataacaggcaggagtccc

SEQ ID NO: 1382345 - DNA, 25 bp, Homo sapien
ttaacagtgaaaggtctagccctct

SEQ ID NO: 1382346 - DNA, 25 bp, Homo sapien
catctaggcttacactcctggagga

SEQ ID NO: 1382347 - DNA, 25 bp, Homo sapien
gacacccatgtgtacaaagtttccc

SEQ ID NO: 1382348 - DNA, 25 bp, Homo sapien
ccattcagcctaggatactttgtta

SEQ ID NO: 1382349 - DNA, 25 bp, Homo sapien
tatagcagcctgaaatgacttagac

SEQ ID NO: 1382350 - DNA, 25 bp, Homo sapien
acttaaggatcaccagaaagtgaga

SEQ ID NO: 1382351 - DNA, 25 bp, Homo sapien
aggctggcagcacatactatgggtg

SEQ ID NO: 1382352 - DNA, 25 bp, Homo sapien
tcaagtgcaaaactggaaaggagct

SEQ ID NO: 1382353 - DNA, 25 bp, Homo sapien
gagaagagatcagtttggctcaagc

SEQ ID NO: 1382354 - DNA, 25 bp, Homo sapien
ggctcaagcatggtaaggaaaggaa

SEQ ID NO: 1382355 - DNA, 25 bp, Homo sapien
ggataggattaagtatgcagccctt

SEQ ID NO: 1382356 - DNA, 25 bp, Homo sapien
taacctaaaggttggcactgattca

SEQ ID NO: 1382357 - DNA, 25 bp, Homo sapien
cagaggtgaagtaaccagtcttaag

SEQ ID NO: 1382358 - DNA, 25 bp, Homo sapien
ctgattcattaaacagacaactggg

SEQ ID NO: 1382359 - DNA, 25 bp, Homo sapien
gagactttcattgctggtattcaca

SEQ ID NO: 1382360 - DNA, 25 bp, Homo sapien
tggagatcttccttcaaatcaggcc

SEQ ID NO: 1382361 - DNA, 25 bp, Homo sapien
aaatcaggccctgcaagcatgaaga

SEQ ID NO: 1382362 - DNA, 25 bp, Homo sapien
gcatgaagatactttctgacacagg

SEQ ID NO: 1382363 - DNA, 25 bp, Homo sapien
tccacatccacaaactgggaaggtg

SEQ ID NO: 1382364 - DNA, 25 bp, Homo sapien
cagcttggtagtgtatccacatcca

SEQ ID NO: 1382365 - DNA, 25 bp, Homo sapien
cacttttccattgacgtccttatta

SEQ ID NO: 1382366 - DNA, 25 bp, Homo sapien
aaaaggtgatcgaacagtgtcttcc

SEQ ID NO: 1382367 - DNA, 25 bp, Homo sapien
ttgtcttttcccaaaatcctcagca

SEQ ID NO: 1382368 - DNA, 25 bp, Homo sapien
ttttcccaaaatcctcagcaattca

SEQ ID NO: 1382369 - DNA, 25 bp, Homo sapien
gcaattcaatattcactggagactt

SEQ ID NO: 1382370 - DNA, 25 bp, Homo sapien
aatcctcagcaattcaatattcact

SEQ ID NO: 1382371 - DNA, 25 bp, Homo sapien
atacattccgtgatgtttcctgctg

SEQ ID NO: 1382372 - DNA, 25 bp, Homo sapien
caaaacaagcatgcccttccacaat

SEQ ID NO: 1382373 - DNA, 25 bp, Homo sapien
tataagtgagaccataggtaggtgg

SEQ ID NO: 1382374 - DNA, 25 bp, Homo sapien
tatggttttcacgtttgttgtcaaa

SEQ ID NO: 1382375 - DNA, 25 bp, Homo sapien
ggtgctctcggttccgtagaatgtc

SEQ ID NO: 1382376 - DNA, 25 bp, Homo sapien
ggttccgtagaatgtccagtccaca

SEQ ID NO: 1382377 - DNA, 25 bp, Homo sapien
tgggactacaaccagcaagagctcc

SEQ ID NO: 1382378 - DNA, 25 bp, Homo sapien
cacaggaacggcaacacggacttgt

SEQ ID NO: 1382379 - DNA, 25 bp, Homo sapien
tagaaggcggccgagcgacatctcc

SEQ ID NO: 1382380 - DNA, 25 bp, Homo sapien
tctgggctgcgaaacaccggcttcc

SEQ ID NO: 1382381 - DNA, 25 bp, Homo sapien
gagtacggcgagtcaaagtcccagg

SEQ ID NO: 1382382 - DNA, 25 bp, Homo sapien
agcactctggtggtcccatccgggc

SEQ ID NO: 1382383 - DNA, 25 bp, Homo sapien
gacaaccatttggaccacgcattga

SEQ ID NO: 1382384 - DNA, 25 bp, Homo sapien
caactggctccgctgataggaatgt

SEQ ID NO: 1382385 - DNA, 25 bp, Homo sapien
gataaccctatgtcaaggcacagca

SEQ ID NO: 1382386 - DNA, 25 bp, Homo sapien
gatggagcactcatagcaactggct

SEQ ID NO: 1382387 - DNA, 25 bp, Homo sapien
tgagtccatgacactcagtctcttc

SEQ ID NO: 1382388 - DNA, 25 bp, Homo sapien
cctgaatctctttgatcaatatgtg

SEQ ID NO: 1382389 - DNA, 25 bp, Homo sapien
ttcagagtgtctagatatcatccca

SEQ ID NO: 1382390 - DNA, 25 bp, Homo sapien
ttgtaaccaaagatgggagtagtcc

SEQ ID NO: 1382391 - DNA, 25 bp, Homo sapien
cgtctttattaaacagattgaagct

SEQ ID NO: 1382392 - DNA, 25 bp, Homo sapien
gctattgagttgtaccgagaagaaa

SEQ ID NO: 1382393 - DNA, 25 bp, Homo sapien
ttttggcactctattcgcacgtctt

SEQ ID NO: 1382394 - DNA, 25 bp, Homo sapien
ctgagaggattatggaggctattga

SEQ ID NO: 1382395 - DNA, 25 bp, Homo sapien
tgaaagcgaaggaaaggaaattaca

SEQ ID NO: 1382396 - DNA, 25 bp, Homo sapien
cacgttctatgttggtttgggaggc

SEQ ID NO: 1382397 - DNA, 25 bp, Homo sapien
taagttacagtatcaataaagggaa

SEQ ID NO: 1382398 - DNA, 25 bp, Homo sapien
ttgtcttgagtagaaacccacgttc

SEQ ID NO: 1382399 - DNA, 25 bp, Homo sapien
tgacttgtagcatagttggtaaggg

SEQ ID NO: 1382400 - DNA, 25 bp, Homo sapien
gggcagagttcagttgtcaacccag

SEQ ID NO: 1382401 - DNA, 25 bp, Homo sapien
aaggaatctggcttgacttgtagca

SEQ ID NO: 1382402 - DNA, 25 bp, Homo sapien
tctgactgactctaaactcatgcag

SEQ ID NO: 1382403 - DNA, 25 bp, Homo sapien
aaattacccagaacagcgtcctcag

SEQ ID NO: 1382404 - DNA, 25 bp, Homo sapien
caacatgagattatgggctggctcc

SEQ ID NO: 1382405 - DNA, 25 bp, Homo sapien
tactgcctattgagacaaccaggtg

SEQ ID NO: 1382406 - DNA, 25 bp, Homo sapien
gcagtgtcatggatcttagagctaa

SEQ ID NO: 1382407 - DNA, 25 bp, Homo sapien
tgtgtattacagttcattttatgca

SEQ ID NO: 1382408 - DNA, 25 bp, Homo sapien
attttaagtgcatacgcacaacact

SEQ ID NO: 1382409 - DNA, 25 bp, Homo sapien
agtgcatacgcacaacacttgagct

SEQ ID NO: 1382410 - DNA, 25 bp, Homo sapien
gagttgttcatgcacaggtgattag

SEQ ID NO: 1382411 - DNA, 25 bp, Homo sapien
ccaactcttacatagggcctggcag

SEQ ID NO: 1382412 - DNA, 25 bp, Homo sapien
tgaggtttttgggatccaagcagcc

SEQ ID NO: 1382413 - DNA, 25 bp, Homo sapien
cactgaattctaccttgcatgagca

SEQ ID NO: 1382414 - DNA, 25 bp, Homo sapien
gggtcggacctagtgactggcttct

SEQ ID NO: 1382415 - DNA, 25 bp, Homo sapien
gaatgcttgacaatcaaattcccat

SEQ ID NO: 1382416 - DNA, 25 bp, Homo sapien
taggtttctgactataagaagaggg

SEQ ID NO: 1382417 - DNA, 25 bp, Homo sapien
cctggggtctaatacctcaaatttg

SEQ ID NO: 1382418 - DNA, 25 bp, Homo sapien
caggtggcttataggtttctgacta

SEQ ID NO: 1382419 - DNA, 25 bp, Homo sapien
taatgtggagaaactttacgagaca

SEQ ID NO: 1382420 - DNA, 25 bp, Homo sapien
ttgtagaagttctctggaccattgg

SEQ ID NO: 1382421 - DNA, 25 bp, Homo sapien
gaaagtcttttggtcgtttatcata

SEQ ID NO: 1382422 - DNA, 25 bp, Homo sapien
catgaagactccaagtgtggaggaa

SEQ ID NO: 1382423 - DNA, 25 bp, Homo sapien
gaatgtcttctgttctccctagtgt

SEQ ID NO: 1382424 - DNA, 25 bp, Homo sapien
catctaataacctgtgtggagaggg

SEQ ID NO: 1382425 - DNA, 25 bp, Homo sapien
taagggcacttgatttagttaccag

SEQ ID NO: 1382426 - DNA, 25 bp, Homo sapien
gccatcagtatggtcaagccccaaa

SEQ ID NO: 1382427 - DNA, 25 bp, Homo sapien
gctacataaaggcaggcgtttcggc

SEQ ID NO: 1382428 - DNA, 25 bp, Homo sapien
aagctacataaaggcaggcgtttcg

SEQ ID NO: 1382429 - DNA, 25 bp, Homo sapien
taagctacataaaggcaggcgtttc

SEQ ID NO: 1382430 - DNA, 25 bp, Homo sapien
tacataaaggcaggcgtttcggcat

SEQ ID NO: 1382431 - DNA, 25 bp, Homo sapien
gcacacaattcatgccactggagaa

SEQ ID NO: 1382432 - DNA, 25 bp, Homo sapien
agttcttgtcctcacacatggccca

SEQ ID NO: 1382433 - DNA, 25 bp, Homo sapien
catgtcctgcacaataaccctggat

SEQ ID NO: 1382434 - DNA, 25 bp, Homo sapien
aatagcatccgtcaattgtgtccgt

SEQ ID NO: 1382435 - DNA, 25 bp, Homo sapien
gttcttgatatctatctaatatctg

SEQ ID NO: 1382436 - DNA, 25 bp, Homo sapien
tcttgatatctatctaatatctgtt

SEQ ID NO: 1382437 - DNA, 25 bp, Homo sapien
aggttcttgatatctatctaatatc

SEQ ID NO: 1382438 - DNA, 25 bp, Homo sapien
cttggaggtaataggttcttgatat

SEQ ID NO: 1382439 - DNA, 25 bp, Homo sapien
tattcaatctgaagttactgcacat

SEQ ID NO: 1382440 - DNA, 25 bp, Homo sapien
tctgtctgatattccgtagatagcc

SEQ ID NO: 1382441 - DNA, 25 bp, Homo sapien
tagatttggctaggtgctttcaaag

SEQ ID NO: 1382442 - DNA, 25 bp, Homo sapien
gcataattcagtgaatacccaacct

SEQ ID NO: 1382443 - DNA, 25 bp, Homo sapien
ctcgatattgtgagagatgtgtgct

SEQ ID NO: 1382444 - DNA, 25 bp, Homo sapien
agttctgtctgcataccagctgcca

SEQ ID NO: 1382445 - DNA, 25 bp, Homo sapien
ctcatgctctgtcataatctcgata

SEQ ID NO: 1382446 - DNA, 25 bp, Homo sapien
gctgtggcaaataactctatattca

SEQ ID NO: 1382447 - DNA, 25 bp, Homo sapien
cactccagtctggtgacagggcaaa

SEQ ID NO: 1382448 - DNA, 25 bp, Homo sapien
ctccagtctggtgacagggcaaaac

SEQ ID NO: 1382449 - DNA, 25 bp, Homo sapien
agtctggtgacagggcaaaactcca

SEQ ID NO: 1382450 - DNA, 25 bp, Homo sapien
ccagtctggtgacagggcaaaactc

SEQ ID NO: 1382451 - DNA, 25 bp, Homo sapien
ggtccaggtttgtaagtcactttca

SEQ ID NO: 1382452 - DNA, 25 bp, Homo sapien
gtaagtcactttcagtcctgtgctg

SEQ ID NO: 1382453 - DNA, 25 bp, Homo sapien
gtgctgggtgggggctgctttactt

SEQ ID NO: 1382454 - DNA, 25 bp, Homo sapien
gctgggtgggggctgctttacttta

SEQ ID NO: 1382455 - DNA, 25 bp, Homo sapien
gtagctgccagcatgaacgcaaatg

SEQ ID NO: 1382456 - DNA, 25 bp, Homo sapien
gctggcagccgggtcattaagttga

SEQ ID NO: 1382457 - DNA, 25 bp, Homo sapien
tactggttgctgacgagcagcccag

SEQ ID NO: 1382458 - DNA, 25 bp, Homo sapien
tggtgcgtgcatttcagcgtagctg

SEQ ID NO: 1382459 - DNA, 25 bp, Homo sapien
ggtgcttattgatctctctcccttc

SEQ ID NO: 1382460 - DNA, 25 bp, Homo sapien
gcttgaaggttaaagacctggagta

SEQ ID NO: 1382461 - DNA, 25 bp, Homo sapien
attaaaatgccaaggaaagcctgcc

SEQ ID NO: 1382462 - DNA, 25 bp, Homo sapien
tctgaccccaacactgcttcttcct

SEQ ID NO: 1382463 - DNA, 25 bp, Homo sapien
aaccttgctgtctgctctatcgtgg

SEQ ID NO: 1382464 - DNA, 25 bp, Homo sapien
cattcttgagctttacaactgtggc

SEQ ID NO: 1382465 - DNA, 25 bp, Homo sapien
taggtatgtccttccttaagcactc

SEQ ID NO: 1382466 - DNA, 25 bp, Homo sapien
gaagatggaacccaaaaagggatga

SEQ ID NO: 1382467 - DNA, 25 bp, Homo sapien
tacaactgtggcataggtatgtcct

SEQ ID NO: 1382468 - DNA, 25 bp, Homo sapien
gaggttgagacttaggcttggaact

SEQ ID NO: 1382469 - DNA, 25 bp, Homo sapien
ggttgagacttaggcttggaactca

SEQ ID NO: 1382470 - DNA, 25 bp, Homo sapien
ttgagacttaggcttggaactcagc

SEQ ID NO: 1382471 - DNA, 25 bp, Homo sapien
aggttgagacttaggcttggaactc

SEQ ID NO: 1382472 - DNA, 25 bp, Homo sapien
tcttttcttgtttgtcccgcaacat

SEQ ID NO: 1382473 - DNA, 25 bp, Homo sapien
ttgtcccgcaacatcctgcagcaag

SEQ ID NO: 1382474 - DNA, 25 bp, Homo sapien
tttcttgtttgtcccgcaacatcct

SEQ ID NO: 1382475 - DNA, 25 bp, Homo sapien
ttgtttgtcccgcaacatcctgcag

SEQ ID NO: 1382476 - DNA, 25 bp, Homo sapien
gaattttcacgggctcataagattc

SEQ ID NO: 1382477 - DNA, 25 bp, Homo sapien
ggttggaattttcacgggctcataa

SEQ ID NO: 1382478 - DNA, 25 bp, Homo sapien
ttggaattttcacgggctcataaga

SEQ ID NO: 1382479 - DNA, 25 bp, Homo sapien
attttcacgggctcataagattctg

SEQ ID NO: 1382480 - DNA, 25 bp, Homo sapien
caataaatcatacaagttctcagag

SEQ ID NO: 1382481 - DNA, 25 bp, Homo sapien
agctgcatagctccaggatccgtga

SEQ ID NO: 1382482 - DNA, 25 bp, Homo sapien
tatttgagatacttcgatgtgctaa

SEQ ID NO: 1382483 - DNA, 25 bp, Homo sapien
gatgtgctaagaagcctttgcaaag

SEQ ID NO: 1382484 - DNA, 25 bp, Homo sapien
tggttctgagcagtgaaatccttct

SEQ ID NO: 1382485 - DNA, 25 bp, Homo sapien
ttggttctgagcagtgaaatccttc

SEQ ID NO: 1382486 - DNA, 25 bp, Homo sapien
tctgaaaccttatgtggcttgaaat

SEQ ID NO: 1382487 - DNA, 25 bp, Homo sapien
tctgttctgaaaccttatgtggctt

SEQ ID NO: 1382488 - DNA, 25 bp, Homo sapien
aagaaggtgttttacaatgaatgag

SEQ ID NO: 1382489 - DNA, 25 bp, Homo sapien
aacattgaagaaggtgttttacaat

SEQ ID NO: 1382490 - DNA, 25 bp, Homo sapien
aatgatataatgactactaatgttt

SEQ ID NO: 1382491 - DNA, 25 bp, Homo sapien
tgaagaaggtgttttacaatgaatg

SEQ ID NO: 1382492 - DNA, 25 bp, Homo sapien
tgaacagctgtttcgtttgcatctt

SEQ ID NO: 1382493 - DNA, 25 bp, Homo sapien
cttgaacagctgtttcgtttgcatc

SEQ ID NO: 1382494 - DNA, 25 bp, Homo sapien
tcttgaacagctgtttcgtttgcat

SEQ ID NO: 1382495 - DNA, 25 bp, Homo sapien
ttgaacagctgtttcgtttgcatct

SEQ ID NO: 1382496 - DNA, 25 bp, Homo sapien
agggtggtattatgcggttcttaat

SEQ ID NO: 1382497 - DNA, 25 bp, Homo sapien
ccattaggtaattctgtgttgtctc

SEQ ID NO: 1382498 - DNA, 25 bp, Homo sapien
gcggttcttaatatccattaggtaa

SEQ ID NO: 1382499 - DNA, 25 bp, Homo sapien
ggtattatgcggttcttaatatcca

SEQ ID NO: 1382500 - DNA, 25 bp, Homo sapien
ttcaggtccttatgtgcgttttggg

SEQ ID NO: 1382501 - DNA, 25 bp, Homo sapien
gggccctttcaggtccttatgtgcg

SEQ ID NO: 1382502 - DNA, 25 bp, Homo sapien
gccctttcaggtccttatgtgcgtt

SEQ ID NO: 1382503 - DNA, 25 bp, Homo sapien
ctttcaggtccttatgtgcgttttg

SEQ ID NO: 1382504 - DNA, 25 bp, Homo sapien
tttccagcgttttgaggatgctgtg

SEQ ID NO: 1382505 - DNA, 25 bp, Homo sapien
ccagcgttttgaggatgctgtgtgt

SEQ ID NO: 1382506 - DNA, 25 bp, Homo sapien
tcttttctttccagcgttttgagga

SEQ ID NO: 1382507 - DNA, 25 bp, Homo sapien
tttctttccagcgttttgaggatgc

SEQ ID NO: 1382508 - DNA, 25 bp, Homo sapien
accaaaaaccctcaccactatatga

SEQ ID NO: 1382509 - DNA, 25 bp, Homo sapien
caaaaaccctcaccactatatgatg

SEQ ID NO: 1382510 - DNA, 25 bp, Homo sapien
aaaaccctcaccactatatgatgaa

SEQ ID NO: 1382511 - DNA, 25 bp, Homo sapien
aaccctcaccactatatgatgaatt

SEQ ID NO: 1382512 - DNA, 25 bp, Homo sapien
gaggcgtagccaaagactgcttgaa

SEQ ID NO: 1382513 - DNA, 25 bp, Homo sapien
tgggcattttggaggcgtagccaaa

SEQ ID NO: 1382514 - DNA, 25 bp, Homo sapien
gaaatctttaccaaatgtgtctggt

SEQ ID NO: 1382515 - DNA, 25 bp, Homo sapien
gaataaatcagttaggtgagctgca

SEQ ID NO: 1382516 - DNA, 25 bp, Homo sapien
cagtaacatgactttttgtagtttc

SEQ ID NO: 1382517 - DNA, 25 bp, Homo sapien
cttcagtaacatgactttttgtagt

SEQ ID NO: 1382518 - DNA, 25 bp, Homo sapien
tcagtaacatgactttttgtagttt

SEQ ID NO: 1382519 - DNA, 25 bp, Homo sapien
ttcagtaacatgactttttgtagtt

SEQ ID NO: 1382520 - DNA, 25 bp, Homo sapien
tctggaatctttaaccatcatttcc

SEQ ID NO: 1382521 - DNA, 25 bp, Homo sapien
gaatctttaaccatcatttcctgca

SEQ ID NO: 1382522 - DNA, 25 bp, Homo sapien
atctttaaccatcatttcctgcagc

SEQ ID NO: 1382523 - DNA, 25 bp, Homo sapien
tggaatctttaaccatcatttcctg

SEQ ID NO: 1382524 - DNA, 25 bp, Homo sapien
tctttatgacctcatgctgaatgaa

SEQ ID NO: 1382525 - DNA, 25 bp, Homo sapien
tcttgagtatggcacccggggcact

SEQ ID NO: 1382526 - DNA, 25 bp, Homo sapien
ggcactcactagctgtttggactca

SEQ ID NO: 1382527 - DNA, 25 bp, Homo sapien
aattggcgcatctgtagcacactgg

SEQ ID NO: 1382528 - DNA, 25 bp, Homo sapien
tggaaagggcgaaggactgtgatgg

SEQ ID NO: 1382529 - DNA, 25 bp, Homo sapien
tgaccggagattaggagggacaatt

SEQ ID NO: 1382530 - DNA, 25 bp, Homo sapien
cgaaggactgtgatggttagggtgc

SEQ ID NO: 1382531 - DNA, 25 bp, Homo sapien
tgccatggtgatgcttcatggaaag

SEQ ID NO: 1382532 - DNA, 25 bp, Homo sapien
gagaacaacagtatttgattcttta

SEQ ID NO: 1382533 - DNA, 25 bp, Homo sapien
tatatgccaaagatagatattcttc

SEQ ID NO: 1382534 - DNA, 25 bp, Homo sapien
tgtctcgaagaagttccattcctga

SEQ ID NO: 1382535 - DNA, 25 bp, Homo sapien
atgtcactgtctcgaagaagttcca

SEQ ID NO: 1382536 - DNA, 25 bp, Homo sapien
tcttttcaaggtgcatagaggacag

SEQ ID NO: 1382537 - DNA, 25 bp, Homo sapien
gcatagaggacagactatcatagcc

SEQ ID NO: 1382538 - DNA, 25 bp, Homo sapien
aatatagttgatatgctaccatcag

SEQ ID NO: 1382539 - DNA, 25 bp, Homo sapien
gggacatgttcaccatagatttgct

SEQ ID NO: 1382540 - DNA, 25 bp, Homo sapien
tagggtgctgattttagatatttcc

SEQ ID NO: 1382541 - DNA, 25 bp, Homo sapien
tgttaagtttccatatatttgtgtg

SEQ ID NO: 1382542 - DNA, 25 bp, Homo sapien
gaacaagttgttaagtttccatata

SEQ ID NO: 1382543 - DNA, 25 bp, Homo sapien
cattcaggaacaagttgttaagttt

SEQ ID NO: 1382544 - DNA, 25 bp, Homo sapien
cagctgctcacgcttttgaaaagga

SEQ ID NO: 1382545 - DNA, 25 bp, Homo sapien
gtatgcctcatgatgtacctgccag

SEQ ID NO: 1382546 - DNA, 25 bp, Homo sapien
agaacctcacagataacctctgaag

SEQ ID NO: 1382547 - DNA, 25 bp, Homo sapien
tgcttgactcatggcagtacacagc

SEQ ID NO: 1382548 - DNA, 25 bp, Homo sapien
ggtggcacagcagctactgtcctca

SEQ ID NO: 1382549 - DNA, 25 bp, Homo sapien
acctgcctggtgacagtccgaggac

SEQ ID NO: 1382550 - DNA, 25 bp, Homo sapien
tgtcctcacagttggcgataacagt

SEQ ID NO: 1382551 - DNA, 25 bp, Homo sapien
cgataacagtggcatagcgtgagct

SEQ ID NO: 1382552 - DNA, 25 bp, Homo sapien
acaagcaaatgcaaggtaagcagat

SEQ ID NO: 1382553 - DNA, 25 bp, Homo sapien
tacaagcaaatgcaaggtaagcaga

SEQ ID NO: 1382554 - DNA, 25 bp, Homo sapien
ctacaagcaaatgcaaggtaagcag

SEQ ID NO: 1382555 - DNA, 25 bp, Homo sapien
cactatccgagtaccatctttcctt

SEQ ID NO: 1382556 - DNA, 25 bp, Homo sapien
taaacttgataaaaggttgtgattc

SEQ ID NO: 1382557 - DNA, 25 bp, Homo sapien
tctggtaccatcagcatgatccact

SEQ ID NO: 1382558 - DNA, 25 bp, Homo sapien
tgtttcttgatcatctggcagaata

SEQ ID NO: 1382559 - DNA, 25 bp, Homo sapien
tggtgccgatccgatttccttcagg

SEQ ID NO: 1382560 - DNA, 25 bp, Homo sapien
ttgtaaaccaggtgcctatgtgaac

SEQ ID NO: 1382561 - DNA, 25 bp, Homo sapien
aacaatggggtcaagtctgctattc

SEQ ID NO: 1382562 - DNA, 25 bp, Homo sapien
ttccttcaggtgtggttgtaaacca

SEQ ID NO: 1382563 - DNA, 25 bp, Homo sapien
cacaggagttacagtttgaactgcc

SEQ ID NO: 1382564 - DNA, 25 bp, Homo sapien
ctccacaggagttacagtttgaact

SEQ ID NO: 1382565 - DNA, 25 bp, Homo sapien
acaggagttacagtttgaactgcct

SEQ ID NO: 1382566 - DNA, 25 bp, Homo sapien
ccacaggagttacagtttgaactgc

SEQ ID NO: 1382567 - DNA, 25 bp, Homo sapien
cacccttatgggccattgatgactg

SEQ ID NO: 1382568 - DNA, 25 bp, Homo sapien
tttcacccttatgggccattgatga

SEQ ID NO: 1382569 - DNA, 25 bp, Homo sapien
tcacccttatgggccattgatgact

SEQ ID NO: 1382570 - DNA, 25 bp, Homo sapien
acccttatgggccattgatgactga

SEQ ID NO: 1382571 - DNA, 25 bp, Homo sapien
ctttgtgttggtaatctcagatggt

SEQ ID NO: 1382572 - DNA, 25 bp, Homo sapien
ttctgctgagaaatagagtccatca

SEQ ID NO: 1382573 - DNA, 25 bp, Homo sapien
ctcagatggtatcgtttctgatttc

SEQ ID NO: 1382574 - DNA, 25 bp, Homo sapien
aatctccactgtgaggcgttgctgg

SEQ ID NO: 1382575 - DNA, 25 bp, Homo sapien
ataatttctctaacacattctttta

SEQ ID NO: 1382576 - DNA, 25 bp, Homo sapien
ttggaacagggaagaataatttctc

SEQ ID NO: 1382577 - DNA, 25 bp, Homo sapien
acagggaagaataatttctctaaca

SEQ ID NO: 1382578 - DNA, 25 bp, Homo sapien
taatttctctaacacattcttttac

SEQ ID NO: 1382579 - DNA, 25 bp, Homo sapien
tagctctgacggaccatgatgtccc

SEQ ID NO: 1382580 - DNA, 25 bp, Homo sapien
tgctctgcgggtggcatcaccgttt

SEQ ID NO: 1382581 - DNA, 25 bp, Homo sapien
agaactcatagtgcttcaccctctg

SEQ ID NO: 1382582 - DNA, 25 bp, Homo sapien
gactggtgataacccttgaagcctc

SEQ ID NO: 1382583 - DNA, 25 bp, Homo sapien
tgtccaatgaaagtcaacaggagcc

SEQ ID NO: 1382584 - DNA, 25 bp, Homo sapien
tgtagattcttgtccaatgaaagtc

SEQ ID NO: 1382585 - DNA, 25 bp, Homo sapien
gaaggtgggaacatccaaagtctct

SEQ ID NO: 1382586 - DNA, 25 bp, Homo sapien
gcccactggggcaagacacatttag

SEQ ID NO: 1382587 - DNA, 25 bp, Homo sapien
caagggacgttaatgtatctgcaca

SEQ ID NO: 1382588 - DNA, 25 bp, Homo sapien
tcaaagttgagactacaagggacgt

SEQ ID NO: 1382589 - DNA, 25 bp, Homo sapien
tgtctcctggagtggtaacccaact

SEQ ID NO: 1382590 - DNA, 25 bp, Homo sapien
taaggaatggcagaaacttgaccaa

SEQ ID NO: 1382591 - DNA, 25 bp, Homo sapien
caatattgtttctaaatcaggatcc

SEQ ID NO: 1382592 - DNA, 25 bp, Homo sapien
gagtgctgaagggatattcaatatt

SEQ ID NO: 1382593 - DNA, 25 bp, Homo sapien
ttagctttgctttgaggaacggtca

SEQ ID NO: 1382594 - DNA, 25 bp, Homo sapien
gaacggtcactataacaggaaccac

SEQ ID NO: 1382595 - DNA, 25 bp, Homo sapien
cacttatccttgctgttgtgttcat

SEQ ID NO: 1382596 - DNA, 25 bp, Homo sapien
gctgtggggcacacttatccttgct

SEQ ID NO: 1382597 - DNA, 25 bp, Homo sapien
gggcacacttatccttgctgttgtg

SEQ ID NO: 1382598 - DNA, 25 bp, Homo sapien
caatgaggagcattaaatcataaca

SEQ ID NO: 1382599 - DNA, 25 bp, Homo sapien
atttgatccatagtaacttatcgag

SEQ ID NO: 1382600 - DNA, 25 bp, Homo sapien
ttgatccatagtaacttatcgagag

SEQ ID NO: 1382601 - DNA, 25 bp, Homo sapien
atccatagtaacttatcgagaggca

SEQ ID NO: 1382602 - DNA, 25 bp, Homo sapien
attccattttctaaggtggcagaaa

SEQ ID NO: 1382603 - DNA, 25 bp, Homo sapien
aagctttattctttgcatctgatac

SEQ ID NO: 1382604 - DNA, 25 bp, Homo sapien
gaaagctttattctttgcatctgat

SEQ ID NO: 1382605 - DNA, 25 bp, Homo sapien
gctttattctttgcatctgatactt

SEQ ID NO: 1382606 - DNA, 25 bp, Homo sapien
ctgaaagctttattctttgcatctg

SEQ ID NO: 1382607 - DNA, 25 bp, Homo sapien
tcttcctcttctaaataataatccc

SEQ ID NO: 1382608 - DNA, 25 bp, Homo sapien
tcacaatttccttagggtcatttaa

SEQ ID NO: 1382609 - DNA, 25 bp, Homo sapien
tcctttaccactctcactttgataa

SEQ ID NO: 1382610 - DNA, 25 bp, Homo sapien
tgaatcataaaattgtggttgtcct

SEQ ID NO: 1382611 - DNA, 25 bp, Homo sapien
tatttcccatattgtatccgtgaaa

SEQ ID NO: 1382612 - DNA, 25 bp, Homo sapien
agaaggatacaggtagtaatttgac

SEQ ID NO: 1382613 - DNA, 25 bp, Homo sapien
gatttgagtgggtatatttcccata

SEQ ID NO: 1382614 - DNA, 25 bp, Homo sapien
ggtagtaatttgaccctgagatttg

SEQ ID NO: 1382615 - DNA, 25 bp, Homo sapien
atcctctttctctgcgttatccttg

SEQ ID NO: 1382616 - DNA, 25 bp, Homo sapien
ttaagcgctcctcttctgctaatcg

SEQ ID NO: 1382617 - DNA, 25 bp, Homo sapien
agttatcttaggttctggttggtgg

SEQ ID NO: 1382618 - DNA, 25 bp, Homo sapien
aatcgatgttgctcttctttccatg

SEQ ID NO: 1382619 - DNA, 25 bp, Homo sapien
cttgagagagccttctaaaatgaaa

SEQ ID NO: 1382620 - DNA, 25 bp, Homo sapien
ctctgttttgctgattcctttgtta

SEQ ID NO: 1382621 - DNA, 25 bp, Homo sapien
gagagagccttctaaaatgaaagga

SEQ ID NO: 1382622 - DNA, 25 bp, Homo sapien
tctttttcttgatctgatatctctg

SEQ ID NO: 1382623 - DNA, 25 bp, Homo sapien
tttgctagcagaagtaagtttggca

SEQ ID NO: 1382624 - DNA, 25 bp, Homo sapien
tagcagaagatttcaattccagctc

SEQ ID NO: 1382625 - DNA, 25 bp, Homo sapien
taatccaatcttgaatagattttgc

SEQ ID NO: 1382626 - DNA, 25 bp, Homo sapien
ttgaatagattttgcaacaagttcc

SEQ ID NO: 1382627 - DNA, 25 bp, Homo sapien
ggagtggagagcaatgttccaatat

SEQ ID NO: 1382628 - DNA, 25 bp, Homo sapien
gagagcaatgttccaatattcacaa

SEQ ID NO: 1382629 - DNA, 25 bp, Homo sapien
tgtctattcattggattgtgaaaga

SEQ ID NO: 1382630 - DNA, 25 bp, Homo sapien
tattcacaatgcaaacgttgtctat

SEQ ID NO: 1382631 - DNA, 25 bp, Homo sapien
tgggtgtggtagtaagaatcaacac

SEQ ID NO: 1382632 - DNA, 25 bp, Homo sapien
ggtgtggtagtaagaatcaacacac

SEQ ID NO: 1382633 - DNA, 25 bp, Homo sapien
cttgggtgtggtagtaagaatcaac

SEQ ID NO: 1382634 - DNA, 25 bp, Homo sapien
tgtcttgggtgtggtagtaagaatc

SEQ ID NO: 1382635 - DNA, 25 bp, Homo sapien
tattgcttatgggcttcttgaagga

SEQ ID NO: 1382636 - DNA, 25 bp, Homo sapien
tatattgcttatgggcttcttgaag

SEQ ID NO: 1382637 - DNA, 25 bp, Homo sapien
ctatattgcttatgggcttcttgaa

SEQ ID NO: 1382638 - DNA, 25 bp, Homo sapien
attgcttatgggcttcttgaaggac

SEQ ID NO: 1382639 - DNA, 25 bp, Homo sapien
ctagagaatcacagtccataaatac

SEQ ID NO: 1382640 - DNA, 25 bp, Homo sapien
cgtctcctagagaatcacagtccat

SEQ ID NO: 1382641 - DNA, 25 bp, Homo sapien
tcctagagaatcacagtccataaat

SEQ ID NO: 1382642 - DNA, 25 bp, Homo sapien
tctcctagagaatcacagtccataa

SEQ ID NO: 1382643 - DNA, 25 bp, Homo sapien
ctgtgttttctttatgtcctctaaa

SEQ ID NO: 1382644 - DNA, 25 bp, Homo sapien
tatgtcctctaaatctgcttccacc

SEQ ID NO: 1382645 - DNA, 25 bp, Homo sapien
ctccagtccattagactgcgctgct

SEQ ID NO: 1382646 - DNA, 25 bp, Homo sapien
aaatgttcagtaaaactccagtcca

SEQ ID NO: 1382647 - DNA, 25 bp, Homo sapien
ttgatctcattgtttgtggtctgct

SEQ ID NO: 1382648 - DNA, 25 bp, Homo sapien
cagcctttgtgactgcatcatcttt

SEQ ID NO: 1382649 - DNA, 25 bp, Homo sapien
cttttcatgagaatcagcctttgtg

SEQ ID NO: 1382650 - DNA, 25 bp, Homo sapien
tcatctttgatctcattgtttgtgg

SEQ ID NO: 1382651 - DNA, 25 bp, Homo sapien
tgtccttgaagcaattgatatgaaa

SEQ ID NO: 1382652 - DNA, 25 bp, Homo sapien
gaaggtgacagcatgaacgttccat

SEQ ID NO: 1382653 - DNA, 25 bp, Homo sapien
accatacagccaattcagttcagca

SEQ ID NO: 1382654 - DNA, 25 bp, Homo sapien
gctactagttccatcttgccttggg

SEQ ID NO: 1382655 - DNA, 25 bp, Homo sapien
tcatggaggtgccactgaatcctag

SEQ ID NO: 1382656 - DNA, 25 bp, Homo sapien
gaagtgtagcttaattatgaccctg

SEQ ID NO: 1382657 - DNA, 25 bp, Homo sapien
tgaccctggaatgctaagagaggca

SEQ ID NO: 1382658 - DNA, 25 bp, Homo sapien
gcaggctgtgcagagtaaataggcc

SEQ ID NO: 1382659 - DNA, 25 bp, Homo sapien
gatgttcactgagcattgattttga

SEQ ID NO: 1382660 - DNA, 25 bp, Homo sapien
gtaatagcctgagccataagtggga

SEQ ID NO: 1382661 - DNA, 25 bp, Homo sapien
tattttgcagatagtaggaagcctt

SEQ ID NO: 1382662 - DNA, 25 bp, Homo sapien
gacagtgatgtgtaaggtagctcag

SEQ ID NO: 1382663 - DNA, 25 bp, Homo sapien
cacacacacacacactttaacttac

SEQ ID NO: 1382664 - DNA, 25 bp, Homo sapien
aatagtgtcttacacacacacacac

SEQ ID NO: 1382665 - DNA, 25 bp, Homo sapien
taatagtgtcttacacacacacaca

SEQ ID NO: 1382666 - DNA, 25 bp, Homo sapien
tcattatcttgcacagacattgaca

SEQ ID NO: 1382667 - DNA, 25 bp, Homo sapien
taacagctgtctattatcagggact

SEQ ID NO: 1382668 - DNA, 25 bp, Homo sapien
tctgatccacaaatagtgttctgtc

SEQ ID NO: 1382669 - DNA, 25 bp, Homo sapien
tgttagcatcacactgactaggatc

SEQ ID NO: 1382670 - DNA, 25 bp, Homo sapien
ggttgtcccacggtatgttgaacat

SEQ ID NO: 1382671 - DNA, 25 bp, Homo sapien
tctggcagggttgtcccacggtatg

SEQ ID NO: 1382672 - DNA, 25 bp, Homo sapien
tctgtttagcaaatctggcagggtt

SEQ ID NO: 1382673 - DNA, 25 bp, Homo sapien
tagcaaatctggcagggttgtccca

SEQ ID NO: 1382674 - DNA, 25 bp, Homo sapien
gaaggctcgttctacttcattccag

SEQ ID NO: 1382675 - DNA, 25 bp, Homo sapien
caccttgaaggctcgttctacttca

SEQ ID NO: 1382676 - DNA, 25 bp, Homo sapien
ccttgaaggctcgttctacttcatt

SEQ ID NO: 1382677 - DNA, 25 bp, Homo sapien
aaacaccttgaaggctcgttctact

SEQ ID NO: 1382678 - DNA, 25 bp, Homo sapien
aattgtagctagacgtttagtgttg

SEQ ID NO: 1382679 - DNA, 25 bp, Homo sapien
gacgtttagtgttgttccatggtgg

SEQ ID NO: 1382680 - DNA, 25 bp, Homo sapien
tcgtacaaaagtgcataagctcatg

SEQ ID NO: 1382681 - DNA, 25 bp, Homo sapien
gcatctcctgctcaatttgaactgg

SEQ ID NO: 1382682 - DNA, 25 bp, Homo sapien
gcatcatgatagttcagtaggaggg

SEQ ID NO: 1382683 - DNA, 25 bp, Homo sapien
gtgcatcatgatagttcagtaggag

SEQ ID NO: 1382684 - DNA, 25 bp, Homo sapien
ctgtagtgcgtacttcttgtgggcg

SEQ ID NO: 1382685 - DNA, 25 bp, Homo sapien
atcatgatagttcagtaggaggggg

SEQ ID NO: 1382686 - DNA, 25 bp, Homo sapien
cgagatcttcttcagttgcaacaac

SEQ ID NO: 1382687 - DNA, 25 bp, Homo sapien
cagaagggacacaatgtgagctgcg

SEQ ID NO: 1382688 - DNA, 25 bp, Homo sapien
actgggtgggacgagatcttcttca

SEQ ID NO: 1382689 - DNA, 25 bp, Homo sapien
gattctgtggtctagcccgtctgct

SEQ ID NO: 1382690 - DNA, 25 bp, Homo sapien
tgaaatcaacaatgagaggaattgg

SEQ ID NO: 1382691 - DNA, 25 bp, Homo sapien
gggtccgctctttagtgatactcac

SEQ ID NO: 1382692 - DNA, 25 bp, Homo sapien
gacccaagtaccactgatgacacaa

SEQ ID NO: 1382693 - DNA, 25 bp, Homo sapien
cactgcttagtaagaaccagtccat

SEQ ID NO: 1382694 - DNA, 25 bp, Homo sapien
agacacagagtattgaggatatgtt

SEQ ID NO: 1382695 - DNA, 25 bp, Homo sapien
taaaatgacaccagacacagagtat

SEQ ID NO: 1382696 - DNA, 25 bp, Homo sapien
tgacaccagacacagagtattgagg

SEQ ID NO: 1382697 - DNA, 25 bp, Homo sapien
attaaaatgacaccagacacagagt

SEQ ID NO: 1382698 - DNA, 25 bp, Homo sapien
gaaatgaattcctctcgaattggat

SEQ ID NO: 1382699 - DNA, 25 bp, Homo sapien
tgaattcctctcgaattggattcag

SEQ ID NO: 1382700 - DNA, 25 bp, Homo sapien
cctctcgaattggattcagcaaata

SEQ ID NO: 1382701 - DNA, 25 bp, Homo sapien
gtaatatctcatgtctacttcagtt

SEQ ID NO: 1382702 - DNA, 25 bp, Homo sapien
agcttgcggttcttcatactgtgct

SEQ ID NO: 1382703 - DNA, 25 bp, Homo sapien
ctttccaaatagtgctggtgctgcc

SEQ ID NO: 1382704 - DNA, 25 bp, Homo sapien
gatgtcatacatcaagcaggcaata

SEQ ID NO: 1382705 - DNA, 25 bp, Homo sapien
ttgtggaacattaataagctgcatg

SEQ ID NO: 1382706 - DNA, 25 bp, Homo sapien
ctgaagttggcatggcttctaatac

SEQ ID NO: 1382707 - DNA, 25 bp, Homo sapien
ccagaaagttttaagctcttttatg

SEQ ID NO: 1382708 - DNA, 25 bp, Homo sapien
gctttgaccatgtactcaagtcgag

SEQ ID NO: 1382709 - DNA, 25 bp, Homo sapien
caagtcgagcaacatcaaagagatt

SEQ ID NO: 1382710 - DNA, 25 bp, Homo sapien
gaaagttttaagctcttttatggca

SEQ ID NO: 1382711 - DNA, 25 bp, Homo sapien
gtaatgttgggcaccatcatctggc

SEQ ID NO: 1382712 - DNA, 25 bp, Homo sapien
gtgtctgcagaggttcataattctc

SEQ ID NO: 1382713 - DNA, 25 bp, Homo sapien
taatagctgaggattgttaaagccc

SEQ ID NO: 1382714 - DNA, 25 bp, Homo sapien
ctgaagatattttaatcacgctggt

SEQ ID NO: 1382715 - DNA, 25 bp, Homo sapien
cctctccgctttaactgggtggtct

SEQ ID NO: 1382716 - DNA, 25 bp, Homo sapien
aacgattggtgtggtcgtcttctcc

SEQ ID NO: 1382717 - DNA, 25 bp, Homo sapien
cactggtgcatttgcctcaggctga

SEQ ID NO: 1382718 - DNA, 25 bp, Homo sapien
ttggcacttggagcctttttctcct

SEQ ID NO: 1382719 - DNA, 25 bp, Homo sapien
ccatgcagaaggacattaggaataa

SEQ ID NO: 1382720 - DNA, 25 bp, Homo sapien
cattaggaataatctctggatgtcc

SEQ ID NO: 1382721 - DNA, 25 bp, Homo sapien
aagagattcccccagagactgagcc

SEQ ID NO: 1382722 - DNA, 25 bp, Homo sapien
gaaggacattaggaataatctctgg

SEQ ID NO: 1382723 - DNA, 25 bp, Homo sapien
taatctggagaagttgaaatttcaa

SEQ ID NO: 1382724 - DNA, 25 bp, Homo sapien
tcttttcattttcccgtcgctgttg

SEQ ID NO: 1382725 - DNA, 25 bp, Homo sapien
ctgttggtccttaaatttaatctgg

SEQ ID NO: 1382726 - DNA, 25 bp, Homo sapien
ctatcagtggtaaggttaatttctc

SEQ ID NO: 1382727 - DNA, 25 bp, Homo sapien
cagtgcttggggagtaattaggcaa

SEQ ID NO: 1382728 - DNA, 25 bp, Homo sapien
taagagaacatgtgagcagcgagct

SEQ ID NO: 1382729 - DNA, 25 bp, Homo sapien
gctagccagggctatagttataggg

SEQ ID NO: 1382730 - DNA, 25 bp, Homo sapien
gggtaagctagccagggctatagtt

SEQ ID NO: 1382731 - DNA, 25 bp, Homo sapien
atcatgtcaccttccttcataggag

SEQ ID NO: 1382732 - DNA, 25 bp, Homo sapien
cagactagaggttgctgattgctcc

SEQ ID NO: 1382733 - DNA, 25 bp, Homo sapien
gctgattgctcctccatcatgtcac

SEQ ID NO: 1382734 - DNA, 25 bp, Homo sapien
catgttccacttctcagactagagg

SEQ ID NO: 1382735 - DNA, 25 bp, Homo sapien
tgcctggacttctacgtctgcatgc

SEQ ID NO: 1382736 - DNA, 25 bp, Homo sapien
cttctacgtctgcatgccagtacat

SEQ ID NO: 1382737 - DNA, 25 bp, Homo sapien
gaagcctgcctggacttctacgtct

SEQ ID NO: 1382738 - DNA, 25 bp, Homo sapien
ggacttctacgtctgcatgccagta

SEQ ID NO: 1382739 - DNA, 25 bp, Homo sapien
ctggagtgggatttctgctaatgtc

SEQ ID NO: 1382740 - DNA, 25 bp, Homo sapien
gagtcctggagtgggatttctgcta

SEQ ID NO: 1382741 - DNA, 25 bp, Homo sapien
gtcctggagtgggatttctgctaat

SEQ ID NO: 1382742 - DNA, 25 bp, Homo sapien
tggagtcctggagtgggatttctgc

SEQ ID NO: 1382743 - DNA, 25 bp, Homo sapien
ggattttctatagctggactcttcc

SEQ ID NO: 1382744 - DNA, 25 bp, Homo sapien
ggactcttcctgtggtgcaacctgg

SEQ ID NO: 1382745 - DNA, 25 bp, Homo sapien
ctcttttcatgaactgttgagatgg

SEQ ID NO: 1382746 - DNA, 25 bp, Homo sapien
ttcatgaactgttgagatggagcca

SEQ ID NO: 1382747 - DNA, 25 bp, Homo sapien
tatgggattcactcttgatagcttc

SEQ ID NO: 1382748 - DNA, 25 bp, Homo sapien
cgatctgccaaattcttccttctaa

SEQ ID NO: 1382749 - DNA, 25 bp, Homo sapien
tctctcaggccagaactatgggatt

SEQ ID NO: 1382750 - DNA, 25 bp, Homo sapien
atctcacaagggcaccgatctgcca

SEQ ID NO: 1382751 - DNA, 25 bp, Homo sapien
ttctaaatgtggagtgccgaggccc

SEQ ID NO: 1382752 - DNA, 25 bp, Homo sapien
actgatgtggaacggaaagatccgc

SEQ ID NO: 1382753 - DNA, 25 bp, Homo sapien
tctgctattttgatagtggtttcta

SEQ ID NO: 1382754 - DNA, 25 bp, Homo sapien
tgtgggccacgttctgtaggcatcc

SEQ ID NO: 1382755 - DNA, 25 bp, Homo sapien
gaatttcaacaagttcctaagacat

SEQ ID NO: 1382756 - DNA, 25 bp, Homo sapien
caggcttgccttaatcaagctgtgc

SEQ ID NO: 1382757 - DNA, 25 bp, Homo sapien
taagacatgaccttccctttccgaa

SEQ ID NO: 1382758 - DNA, 25 bp, Homo sapien
ctttccgaaaatcacgttggccagg

SEQ ID NO: 1382759 - DNA, 25 bp, Homo sapien
agtgaagttaaactaactggcctgc

SEQ ID NO: 1382760 - DNA, 25 bp, Homo sapien
caatttcctggtgtgtccctaagct

SEQ ID NO: 1382761 - DNA, 25 bp, Homo sapien
aagtgaagttaaactaactggcctg

SEQ ID NO: 1382762 - DNA, 25 bp, Homo sapien
caagtgaagttaaactaactggcct

SEQ ID NO: 1382763 - DNA, 25 bp, Homo sapien
tccatttccccgtgcacacaatgga

SEQ ID NO: 1382764 - DNA, 25 bp, Homo sapien
tccccgtgcacacaatggagatttt

SEQ ID NO: 1382765 - DNA, 25 bp, Homo sapien
tcattttgctagtgagcagacttcc

SEQ ID NO: 1382766 - DNA, 25 bp, Homo sapien
tagtgagcagacttcctaccttctc

SEQ ID NO: 1382767 - DNA, 25 bp, Homo sapien
agaagagtgtatgtgagcgagtgtg

SEQ ID NO: 1382768 - DNA, 25 bp, Homo sapien
gaatgtggtagagccagatgtgaaa

SEQ ID NO: 1382769 - DNA, 25 bp, Homo sapien
tcttttcttctggaaccattcagaa

SEQ ID NO: 1382770 - DNA, 25 bp, Homo sapien
gggaggcttattgcccaaatgctcc

SEQ ID NO: 1382771 - DNA, 25 bp, Homo sapien
tggaacggaccattaatccgaagag

SEQ ID NO: 1382772 - DNA, 25 bp, Homo sapien
gattaaagtgggatataaaccgtgc

SEQ ID NO: 1382773 - DNA, 25 bp, Homo sapien
gcaccaagttcacaaactgatggaa

SEQ ID NO: 1382774 - DNA, 25 bp, Homo sapien
tgggtcagccaagccagattttata

SEQ ID NO: 1382775 - DNA, 25 bp, Homo sapien
caggaacaaatatctccaatgagga

SEQ ID NO: 1382776 - DNA, 25 bp, Homo sapien
gaacaaatatctccaatgaggagca

SEQ ID NO: 1382777 - DNA, 25 bp, Homo sapien
ggaacaaatatctccaatgaggagc

SEQ ID NO: 1382778 - DNA, 25 bp, Homo sapien
aggaacaaatatctccaatgaggag

SEQ ID NO: 1382779 - DNA, 25 bp, Homo sapien
aatataaaggagcattaccacctac

SEQ ID NO: 1382780 - DNA, 25 bp, Homo sapien
agcagatccaacaagtgtatttatt

SEQ ID NO: 1382781 - DNA, 25 bp, Homo sapien
gcctttttagatgaagcagatccaa

SEQ ID NO: 1382782 - DNA, 25 bp, Homo sapien
aggagcattaccacctacaggtttt

SEQ ID NO: 1382783 - DNA, 25 bp, Homo sapien
cacaaaagcaatggaggcctgccaa

SEQ ID NO: 1382784 - DNA, 25 bp, Homo sapien
gtcttgccacgacaccatactgaag

SEQ ID NO: 1382785 - DNA, 25 bp, Homo sapien
aatctggttcccaaccacaaaagca

SEQ ID NO: 1382786 - DNA, 25 bp, Homo sapien
tgagggacctggacagccacggtaa

SEQ ID NO: 1382787 - DNA, 25 bp, Homo sapien
ctgcttcctcagtcaaagctgcaac

SEQ ID NO: 1382788 - DNA, 25 bp, Homo sapien
gcttcctcagtcaaagctgcaactg

SEQ ID NO: 1382789 - DNA, 25 bp, Homo sapien
tgcttcctcagtcaaagctgcaact

SEQ ID NO: 1382790 - DNA, 25 bp, Homo sapien
ttactagagcaaatgacctcttctc

SEQ ID NO: 1382791 - DNA, 25 bp, Homo sapien
tgttgggctgaagaagacattctga

SEQ ID NO: 1382792 - DNA, 25 bp, Homo sapien
taactgtgttccttcaattttccca

SEQ ID NO: 1382793 - DNA, 25 bp, Homo sapien
tctccctcgcctcgccttgttttca

SEQ ID NO: 1382794 - DNA, 25 bp, Homo sapien
cattaccagatatggttgccttgcc

SEQ ID NO: 1382795 - DNA, 25 bp, Homo sapien
tggctgttccttctctgaccatcag

SEQ ID NO: 1382796 - DNA, 25 bp, Homo sapien
tgcctattctcccaaggtgtttgta

SEQ ID NO: 1382797 - DNA, 25 bp, Homo sapien
ttgactcttatgacaccaccccgtt

SEQ ID NO: 1382798 - DNA, 25 bp, Homo sapien
gaaaggacccaaaattccatgacat

SEQ ID NO: 1382799 - DNA, 25 bp, Homo sapien
tagaaaggacccaaaattccatgac

SEQ ID NO: 1382800 - DNA, 25 bp, Homo sapien
aaaggacccaaaattccatgacatc

SEQ ID NO: 1382801 - DNA, 25 bp, Homo sapien
tatagaaaggacccaaaattccatg

SEQ ID NO: 1382802 - DNA, 25 bp, Homo sapien
agcatcaggagtatcacaactactt

SEQ ID NO: 1382803 - DNA, 25 bp, Homo sapien
aaggcgtcgcctaggagggtctggc

SEQ ID NO: 1382804 - DNA, 25 bp, Homo sapien
atacggaagagagggcgagccttaa

SEQ ID NO: 1382805 - DNA, 25 bp, Homo sapien
taagttccgttcgtttatcaagcac

SEQ ID NO: 1382806 - DNA, 25 bp, Homo sapien
tcaggccacggagagatacggaaga

SEQ ID NO: 1382807 - DNA, 25 bp, Homo sapien
ggagggcttaaagggctcaaggctc

SEQ ID NO: 1382808 - DNA, 25 bp, Homo sapien
agggcttaaagggctcaaggctcac

SEQ ID NO: 1382809 - DNA, 25 bp, Homo sapien
gagggcttaaagggctcaaggctca

SEQ ID NO: 1382810 - DNA, 25 bp, Homo sapien
tgattgaactgtgcagctatgagcg

SEQ ID NO: 1382811 - DNA, 25 bp, Homo sapien
tgagcgagggttcccatatcttaga

SEQ ID NO: 1382812 - DNA, 25 bp, Homo sapien
ccatatcttagaactggtgttcaca

SEQ ID NO: 1382813 - DNA, 25 bp, Homo sapien
tagaactggtgttcacagttcctcc

SEQ ID NO: 1382814 - DNA, 25 bp, Homo sapien
gacgggagaagcattggcctctaaa

SEQ ID NO: 1382815 - DNA, 25 bp, Homo sapien
caaaggacgggagaagcattggcct

SEQ ID NO: 1382816 - DNA, 25 bp, Homo sapien
gggcgcaggccctgcctaagcgtcc

SEQ ID NO: 1382817 - DNA, 25 bp, Homo sapien
gaagcattggcctctaaactgggcg

SEQ ID NO: 1382818 - DNA, 25 bp, Homo sapien
ttaagcatgttttgtgaatgcatca

SEQ ID NO: 1382819 - DNA, 25 bp, Homo sapien
taagcatgttttgtgaatgcatcag

SEQ ID NO: 1382820 - DNA, 25 bp, Homo sapien
aagcatgttttgtgaatgcatcagt

SEQ ID NO: 1382821 - DNA, 25 bp, Homo sapien
tttgatattcccatacattggaatc

SEQ ID NO: 1382822 - DNA, 25 bp, Homo sapien
gacaccagaactctttcatacccaa

SEQ ID NO: 1382823 - DNA, 25 bp, Homo sapien
gaaagtactacctgtagcctaccat

SEQ ID NO: 1382824 - DNA, 25 bp, Homo sapien
taaaagctagttcctttcactgaca

SEQ ID NO: 1382825 - DNA, 25 bp, Homo sapien
gagtcctccatggataggctatgta

SEQ ID NO: 1382826 - DNA, 25 bp, Homo sapien
gacaggttgacttggagggatcccc

SEQ ID NO: 1382827 - DNA, 25 bp, Homo sapien
tccaatggtaaggattccaaatggg

SEQ ID NO: 1382828 - DNA, 25 bp, Homo sapien
gaagggcctctatgttggtgatacc

SEQ ID NO: 1382829 - DNA, 25 bp, Homo sapien
ccagcagatcgggagcaacatctgg

SEQ ID NO: 1382830 - DNA, 25 bp, Homo sapien
tagtaaaccagcagatcgggagcaa

SEQ ID NO: 1382831 - DNA, 25 bp, Homo sapien
acttgaatagtaaaccagcagatcg

SEQ ID NO: 1382832 - DNA, 25 bp, Homo sapien
agcagatcgggagcaacatctggag

SEQ ID NO: 1382833 - DNA, 25 bp, Homo sapien
gaagaggcttgactggaagcctgca

SEQ ID NO: 1382834 - DNA, 25 bp, Homo sapien
gcttctttgtaacatgctggcaggg

SEQ ID NO: 1382835 - DNA, 25 bp, Homo sapien
gaactgggagcctggctgaccattt

SEQ ID NO: 1382836 - DNA, 25 bp, Homo sapien
ctgaccatttatgtgagagagggac

SEQ ID NO: 1382837 - DNA, 25 bp, Homo sapien
tagtggctattgaaagctccttgcc

SEQ ID NO: 1382838 - DNA, 25 bp, Homo sapien
caaaaacacagctttgtagccacca

SEQ ID NO: 1382839 - DNA, 25 bp, Homo sapien
agtggctattgaaagctccttgcca

SEQ ID NO: 1382840 - DNA, 25 bp, Homo sapien
cagtaaaaccatcataatacaaaaa

SEQ ID NO: 1382841 - DNA, 25 bp, Homo sapien
tcggactttctaacttttcctctgc

SEQ ID NO: 1382842 - DNA, 25 bp, Homo sapien
tacacagcacctttgatggactcag

SEQ ID NO: 1382843 - DNA, 25 bp, Homo sapien
tatgcgtggaccacatagagctgct

SEQ ID NO: 1382844 - DNA, 25 bp, Homo sapien
ccttgctcaggcaaactatgcgtgg

SEQ ID NO: 1382845 - DNA, 25 bp, Homo sapien
gaggatagaccttctgtcccttgct

SEQ ID NO: 1382846 - DNA, 25 bp, Homo sapien
tttagctcagtactattaattatca

SEQ ID NO: 1382847 - DNA, 25 bp, Homo sapien
ctttagctcagtactattaattatc

SEQ ID NO: 1382848 - DNA, 25 bp, Homo sapien
ttagctcagtactattaattatcat

SEQ ID NO: 1382849 - DNA, 25 bp, Homo sapien
gaggacctgcttatggcctgcttct

SEQ ID NO: 1382850 - DNA, 25 bp, Homo sapien
tgtgctgatgctgggctgatacagc

SEQ ID NO: 1382851 - DNA, 25 bp, Homo sapien
gtgacaatgatgcctctcagagctg

SEQ ID NO: 1382852 - DNA, 25 bp, Homo sapien
ttcttcccttggcaaatgagaggag

SEQ ID NO: 1382853 - DNA, 25 bp, Homo sapien
ttctggcatcttcccttagtcccag

SEQ ID NO: 1382854 - DNA, 25 bp, Homo sapien
ctgaagctccctttttctggcatct

SEQ ID NO: 1382855 - DNA, 25 bp, Homo sapien
cctgtgcaggaataggccttgccac

SEQ ID NO: 1382856 - DNA, 25 bp, Homo sapien
tgtctcctgtgcaggaataggcctt

SEQ ID NO: 1382857 - DNA, 25 bp, Homo sapien
caaagagggttgtgccttctctggg

SEQ ID NO: 1382858 - DNA, 25 bp, Homo sapien
gtcacatagtttaccccttacagtc

SEQ ID NO: 1382859 - DNA, 25 bp, Homo sapien
gctagcagcgaaatatcaaggcagg

SEQ ID NO: 1382860 - DNA, 25 bp, Homo sapien
tatctgccatttgctgaaccctgaa

SEQ ID NO: 1382861 - DNA, 25 bp, Homo sapien
tgcagcaaatatacaggatcctgtg

SEQ ID NO: 1382862 - DNA, 25 bp, Homo sapien
caaatatacaggatcctgtggcctt

SEQ ID NO: 1382863 - DNA, 25 bp, Homo sapien
atatacaggatcctgtggccttcat

SEQ ID NO: 1382864 - DNA, 25 bp, Homo sapien
ctgcagcaaatatacaggatcctgt

SEQ ID NO: 1382865 - DNA, 25 bp, Homo sapien
gatattgagcgctttcagggtgtta

SEQ ID NO: 1382866 - DNA, 25 bp, Homo sapien
agatgagatgatattgagcgctttc

SEQ ID NO: 1382867 - DNA, 25 bp, Homo sapien
ctttcagggtgttatgactgtaggc

SEQ ID NO: 1382868 - DNA, 25 bp, Homo sapien
aaatcacctcttatttcctcattat

SEQ ID NO: 1382869 - DNA, 25 bp, Homo sapien
tgaaacaacgtcatcttttgtgaag

SEQ ID NO: 1382870 - DNA, 25 bp, Homo sapien
catgctgaagaatgttcaatttgtc

SEQ ID NO: 1382871 - DNA, 25 bp, Homo sapien
tgcttatagtactttgtaacaactt

SEQ ID NO: 1382872 - DNA, 25 bp, Homo sapien
tgtgaagattttacgatcgattttc

SEQ ID NO: 1382873 - DNA, 25 bp, Homo sapien
gagacagttactaagacagggatcc

SEQ ID NO: 1382874 - DNA, 25 bp, Homo sapien
gggagacagttactaagacagggat

SEQ ID NO: 1382875 - DNA, 25 bp, Homo sapien
gaagggagacagttactaagacagg

SEQ ID NO: 1382876 - DNA, 25 bp, Homo sapien
agacagttactaagacagggatccc

SEQ ID NO: 1382877 - DNA, 25 bp, Homo sapien
cagtggagagactgcctcttggttc

SEQ ID NO: 1382878 - DNA, 25 bp, Homo sapien
tgcaaaacccgtgagatagaggaat

SEQ ID NO: 1382879 - DNA, 25 bp, Homo sapien
gagactgcctcttggttctgtgcaa

SEQ ID NO: 1382880 - DNA, 25 bp, Homo sapien
gttctgtgcaaaacccgtgagatag

SEQ ID NO: 1382881 - DNA, 25 bp, Homo sapien
atcaagtcccttgtggcccttggca

SEQ ID NO: 1382882 - DNA, 25 bp, Homo sapien
aggctttccttctctcgatggaaaa

SEQ ID NO: 1382883 - DNA, 25 bp, Homo sapien
ccatcaagtcccttgtggcccttgg

SEQ ID NO: 1382884 - DNA, 25 bp, Homo sapien
ttccttctctcgatggaaaagagat

SEQ ID NO: 1382885 - DNA, 25 bp, Homo sapien
gtcactgtgcagaggcttccgccaa

SEQ ID NO: 1382886 - DNA, 25 bp, Homo sapien
cagtttgccttctgaagtgtcactg

SEQ ID NO: 1382887 - DNA, 25 bp, Homo sapien
gtgcagaggcttccgccaacactcg

SEQ ID NO: 1382888 - DNA, 25 bp, Homo sapien
aagaagtagccagggccagtttgcc

SEQ ID NO: 1382889 - DNA, 25 bp, Homo sapien
tagagaaggcccccgagttctggac

SEQ ID NO: 1382890 - DNA, 25 bp, Homo sapien
ctagagaaggcccccgagttctgga

SEQ ID NO: 1382891 - DNA, 25 bp, Homo sapien
tcctttagaatttgcagcatttggg

SEQ ID NO: 1382892 - DNA, 25 bp, Homo sapien
cccttgttcgtaaggcggctctgct

SEQ ID NO: 1382893 - DNA, 25 bp, Homo sapien
cactggtcttgtgagcgttctgctt

SEQ ID NO: 1382894 - DNA, 25 bp, Homo sapien
ctccacctgccagcattgcttgggt

SEQ ID NO: 1382895 - DNA, 25 bp, Homo sapien
atagttttgttgacagatacttttc

SEQ ID NO: 1382896 - DNA, 25 bp, Homo sapien
tagttttgttgacagatacttttca

SEQ ID NO: 1382897 - DNA, 25 bp, Homo sapien
tttccattaaatctatactgtgcct

SEQ ID NO: 1382898 - DNA, 25 bp, Homo sapien
ccattaaatctatactgtgcctctt

SEQ ID NO: 1382899 - DNA, 25 bp, Homo sapien
tctcatccacatcgaggagagcaca

SEQ ID NO: 1382900 - DNA, 25 bp, Homo sapien
tcatccacatcgaggagagcacagg

SEQ ID NO: 1382901 - DNA, 25 bp, Homo sapien
aataccttacccatcaacagtgaaa

SEQ ID NO: 1382902 - DNA, 25 bp, Homo sapien
caggatttcggtaacttgcctccca

SEQ ID NO: 1382903 - DNA, 25 bp, Homo sapien
aaccagtagcaaataccttacccat

SEQ ID NO: 1382904 - DNA, 25 bp, Homo sapien
cgaccccacacaaccagtagcaaat

SEQ ID NO: 1382905 - DNA, 25 bp, Homo sapien
gacattgcttggtgcctaggggcca

SEQ ID NO: 1382906 - DNA, 25 bp, Homo sapien
tagagtcaggctgttggtggtcaca

SEQ ID NO: 1382907 - DNA, 25 bp, Homo sapien
ccagtggagcttagagtcaggctgt

SEQ ID NO: 1382908 - DNA, 25 bp, Homo sapien
tggtggtcacaaggacccatgattt

SEQ ID NO: 1382909 - DNA, 25 bp, Homo sapien
ggatatggtattcctctcggtttcc

SEQ ID NO: 1382910 - DNA, 25 bp, Homo sapien
tcctgtcccaaactgagatccatgg

SEQ ID NO: 1382911 - DNA, 25 bp, Homo sapien
ttggatatggtattcctctcggttt

SEQ ID NO: 1382912 - DNA, 25 bp, Homo sapien
tccatgggattgtggtgtggctgca

SEQ ID NO: 1382913 - DNA, 25 bp, Homo sapien
aagaggcttatgcacagcttggata

SEQ ID NO: 1382914 - DNA, 25 bp, Homo sapien
caagaggcttatgcacagcttggat

SEQ ID NO: 1382915 - DNA, 25 bp, Homo sapien
ggggtggatgaagcaagaggcttat

SEQ ID NO: 1382916 - DNA, 25 bp, Homo sapien
ggtggatgaagcaagaggcttatgc

SEQ ID NO: 1382917 - DNA, 25 bp, Homo sapien
atgctgtagtggtgacgtgtactga

SEQ ID NO: 1382918 - DNA, 25 bp, Homo sapien
ggactagagcccatgtggttacttg

SEQ ID NO: 1382919 - DNA, 25 bp, Homo sapien
gctttagctgtgtggactagagccc

SEQ ID NO: 1382920 - DNA, 25 bp, Homo sapien
ctatctcctggaatgtcatgggctt

SEQ ID NO: 1382921 - DNA, 25 bp, Homo sapien
tcaggacggtaagctctgaaattac

SEQ ID NO: 1382922 - DNA, 25 bp, Homo sapien
caaaccaagtgagaatgaactgctg

SEQ ID NO: 1382923 - DNA, 25 bp, Homo sapien
tgttttaatcaggacggtaagctct

SEQ ID NO: 1382924 - DNA, 25 bp, Homo sapien
acttggtgagtatgaacaactgtca

SEQ ID NO: 1382925 - DNA, 25 bp, Homo sapien
agtctactgctagcaactggattcc

SEQ ID NO: 1382926 - DNA, 25 bp, Homo sapien
tgctagcaactggattcctgctttg

SEQ ID NO: 1382927 - DNA, 25 bp, Homo sapien
caaaggagtgactaacagtgggaat

SEQ ID NO: 1382928 - DNA, 25 bp, Homo sapien
gagactcaatactcccaaatgctcc

SEQ ID NO: 1382929 - DNA, 25 bp, Homo sapien
ccaactgcccctggatcagggacat

SEQ ID NO: 1382930 - DNA, 25 bp, Homo sapien
ctttgttttactaagtgacagaaga

SEQ ID NO: 1382931 - DNA, 25 bp, Homo sapien
catcttagcatattggcagttatgg

SEQ ID NO: 1382932 - DNA, 25 bp, Homo sapien
tctctttgttttactaagtgacaga

SEQ ID NO: 1382933 - DNA, 25 bp, Homo sapien
tgacagaagacatcttagcatattg

SEQ ID NO: 1382934 - DNA, 25 bp, Homo sapien
tactgagtatgggattcagctggtg

SEQ ID NO: 1382935 - DNA, 25 bp, Homo sapien
ctgagtatgggattcagctggtgtc

SEQ ID NO: 1382936 - DNA, 25 bp, Homo sapien
ctactgagtatgggattcagctggt

SEQ ID NO: 1382937 - DNA, 25 bp, Homo sapien
actgagtatgggattcagctggtgt

SEQ ID NO: 1382938 - DNA, 25 bp, Homo sapien
tctcctcttcttagtgaactattgg

SEQ ID NO: 1382939 - DNA, 25 bp, Homo sapien
ggaggagtgaacaatttcttctgtc

SEQ ID NO: 1382940 - DNA, 25 bp, Homo sapien
cttctgtctgatgccctccaagttg

SEQ ID NO: 1382941 - DNA, 25 bp, Homo sapien
tccaagttgcctcatcaaggatccc

SEQ ID NO: 1382942 - DNA, 25 bp, Homo sapien
tgtgttgctgtttcaagtgtccatc

SEQ ID NO: 1382943 - DNA, 25 bp, Homo sapien
ctgtgttgctgtttcaagtgtccat

SEQ ID NO: 1382944 - DNA, 25 bp, Homo sapien
gtgttgctgtttcaagtgtccatca

SEQ ID NO: 1382945 - DNA, 25 bp, Homo sapien
gcagatcacctggaacagaattatt

SEQ ID NO: 1382946 - DNA, 25 bp, Homo sapien
caaactttggtttgcagatcacctg

SEQ ID NO: 1382947 - DNA, 25 bp, Homo sapien
aactttggtttgcagatcacctgga

SEQ ID NO: 1382948 - DNA, 25 bp, Homo sapien
tattttcaaactttggtttgcagat

SEQ ID NO: 1382949 - DNA, 25 bp, Homo sapien
ctgtttggaatttgatccattggcc

SEQ ID NO: 1382950 - DNA, 25 bp, Homo sapien
gggtcattgtcagtatacatccctg

SEQ ID NO: 1382951 - DNA, 25 bp, Homo sapien
tacatccctgaagattcctgtttgg

SEQ ID NO: 1382952 - DNA, 25 bp, Homo sapien
ctgcttgagtggaatgggtcattgt

SEQ ID NO: 1382953 - DNA, 25 bp, Homo sapien
actggcctaggcagtcagatctgga

SEQ ID NO: 1382954 - DNA, 25 bp, Homo sapien
atcaactatggcaataaaggagatg

SEQ ID NO: 1382955 - DNA, 25 bp, Homo sapien
gcagtcagatctggaaaatcaacta

SEQ ID NO: 1382956 - DNA, 25 bp, Homo sapien
ggataaagcagacactggcctaggc

SEQ ID NO: 1382957 - DNA, 25 bp, Homo sapien
tgggacagtgtactgctctgtgtcc

SEQ ID NO: 1382958 - DNA, 25 bp, Homo sapien
ttagcatcagctgatttttcatttc

SEQ ID NO: 1382959 - DNA, 25 bp, Homo sapien
gaaggagatctgtttagcatcagct

SEQ ID NO: 1382960 - DNA, 25 bp, Homo sapien
tccgtgggacagtgtactgctctgt

SEQ ID NO: 1382961 - DNA, 25 bp, Homo sapien
ggtccttacgaccacccacactgcc

SEQ ID NO: 1382962 - DNA, 25 bp, Homo sapien
ttatgggtccttacgaccacccaca

SEQ ID NO: 1382963 - DNA, 25 bp, Homo sapien
tgggtccttacgaccacccacactg

SEQ ID NO: 1382964 - DNA, 25 bp, Homo sapien
tccttacgaccacccacactgccat

SEQ ID NO: 1382965 - DNA, 25 bp, Homo sapien
tatgagctgtcgcttgattcgttcc

SEQ ID NO: 1382966 - DNA, 25 bp, Homo sapien
cccagcaggtgtattgctcagctca

SEQ ID NO: 1382967 - DNA, 25 bp, Homo sapien
cagctgttttggcttcttggagccc

SEQ ID NO: 1382968 - DNA, 25 bp, Homo sapien
ctggagccccaagtagcaagcttct

SEQ ID NO: 1382969 - DNA, 25 bp, Homo sapien
tcttctcgtatttccttgctagcct

SEQ ID NO: 1382970 - DNA, 25 bp, Homo sapien
ccttgctagccttcttacatctttt

SEQ ID NO: 1382971 - DNA, 25 bp, Homo sapien
actgacttcttcttctcgtatttcc

SEQ ID NO: 1382972 - DNA, 25 bp, Homo sapien
ttaactgacttcttcttctcgtatt

SEQ ID NO: 1382973 - DNA, 25 bp, Homo sapien
gctgagcttgtagggttctgctgct

SEQ ID NO: 1382974 - DNA, 25 bp, Homo sapien
tgctgctccctgcaaccagtctctc

SEQ ID NO: 1382975 - DNA, 25 bp, Homo sapien
tgctccctgcaaccagtctctctca

SEQ ID NO: 1382976 - DNA, 25 bp, Homo sapien
ggtgctgagcttgtagggttctgct

SEQ ID NO: 1382977 - DNA, 25 bp, Homo sapien
gaagcacaaaacttgggagtatatt

SEQ ID NO: 1382978 - DNA, 25 bp, Homo sapien
tgggagtatattgtatatgtggtac

SEQ ID NO: 1382979 - DNA, 25 bp, Homo sapien
tagcagaagcacaaaacttgggagt

SEQ ID NO: 1382980 - DNA, 25 bp, Homo sapien
gaattagcagaagcacaaaacttgg

SEQ ID NO: 1382981 - DNA, 25 bp, Homo sapien
cataaatcaagcctgcactgttgta

SEQ ID NO: 1382982 - DNA, 25 bp, Homo sapien
cagctttagctcaatgaagttcatg

SEQ ID NO: 1382983 - DNA, 25 bp, Homo sapien
tgccagccaggatcagggaaaaaac

SEQ ID NO: 1382984 - DNA, 25 bp, Homo sapien
gaagttcatgtgtatgggataaagg

SEQ ID NO: 1382985 - DNA, 25 bp, Homo sapien
gacttggttctaggaaggagaggaa

SEQ ID NO: 1382986 - DNA, 25 bp, Homo sapien
ttactagagagagtgaggcagattg

SEQ ID NO: 1382987 - DNA, 25 bp, Homo sapien
ctgaattactagagagagtgaggca

SEQ ID NO: 1382988 - DNA, 25 bp, Homo sapien
cggctgaattactagagagagtgag

SEQ ID NO: 1382989 - DNA, 25 bp, Homo sapien
gctttgttgacataggaaaggaagg

SEQ ID NO: 1382990 - DNA, 25 bp, Homo sapien
ttaggaaacgaaggctttgttgaca

SEQ ID NO: 1382991 - DNA, 25 bp, Homo sapien
ctccctaagggaaatatcttgttgc

SEQ ID NO: 1382992 - DNA, 25 bp, Homo sapien
caagttgttaacacaagtgctgctg

SEQ ID NO: 1382993 - DNA, 25 bp, Homo sapien
ttgtggaacctgggctaggctgtcc

SEQ ID NO: 1382994 - DNA, 25 bp, Homo sapien
tgtggaacctgggctaggctgtcct

SEQ ID NO: 1382995 - DNA, 25 bp, Homo sapien
ctccatcacatgctgctgatggtga

SEQ ID NO: 1382996 - DNA, 25 bp, Homo sapien
atggtgaagggcgaaggtcctggaa

SEQ ID NO: 1382997 - DNA, 25 bp, Homo sapien
tggtgaagggcgaaggtcctggaat

SEQ ID NO: 1382998 - DNA, 25 bp, Homo sapien
gctgactccatcacatgctgctgat

SEQ ID NO: 1382999 - DNA, 25 bp, Homo sapien
gctgcatgctcaggcatattttgta

SEQ ID NO: 1383000 - DNA, 25 bp, Homo sapien
ttgctttggctgcatgctcaggcat

SEQ ID NO: 1383001 - DNA, 25 bp, Homo sapien
ctttggctgcatgctcaggcatatt

SEQ ID NO: 1383002 - DNA, 25 bp, Homo sapien
tggctgcatgctcaggcatattttg

SEQ ID NO: 1383003 - DNA, 25 bp, Homo sapien
tggcagtattgttcccattgccgca

SEQ ID NO: 1383004 - DNA, 25 bp, Homo sapien
gaggccctttgagactgagattcct

SEQ ID NO: 1383005 - DNA, 25 bp, Homo sapien
catggaggccctttgagactgagat

SEQ ID NO: 1383006 - DNA, 25 bp, Homo sapien
cattgccgcatattccatggaggcc

SEQ ID NO: 1383007 - DNA, 25 bp, Homo sapien
gagatttcaccagtcagggcctgag

SEQ ID NO: 1383008 - DNA, 25 bp, Homo sapien
ctgagagagatttcaccagtcaggg

SEQ ID NO: 1383009 - DNA, 25 bp, Homo sapien
tacatagttggcttccttcgtactt

SEQ ID NO: 1383010 - DNA, 25 bp, Homo sapien
tcagggcctgagctatacatagttg

SEQ ID NO: 1383011 - DNA, 25 bp, Homo sapien
gctcagtgttgcatccataagatga

SEQ ID NO: 1383012 - DNA, 25 bp, Homo sapien
tgccctagaagtacatcgcttgttt

SEQ ID NO: 1383013 - DNA, 25 bp, Homo sapien
ccataagatgatgccctagaagtac

SEQ ID NO: 1383014 - DNA, 25 bp, Homo sapien
catcgcttgttttccaatgatgctt

SEQ ID NO: 1383015 - DNA, 25 bp, Homo sapien
gactccttgaaaagttcaatggaac

SEQ ID NO: 1383016 - DNA, 25 bp, Homo sapien
cttgaaaagttcaatggaacccagc

SEQ ID NO: 1383017 - DNA, 25 bp, Homo sapien
gcccgactccttgaaaagttcaatg

SEQ ID NO: 1383018 - DNA, 25 bp, Homo sapien
gaaaagttcaatggaacccagcaac

SEQ ID NO: 1383019 - DNA, 25 bp, Homo sapien
gggcaaatcaagttccagactgcta

SEQ ID NO: 1383020 - DNA, 25 bp, Homo sapien
gataaaagctgcagccctaagtcct

SEQ ID NO: 1383021 - DNA, 25 bp, Homo sapien
aatcgctaaggtgatcaatcctggc

SEQ ID NO: 1383022 - DNA, 25 bp, Homo sapien
caagttccagactgctaagagataa

SEQ ID NO: 1383023 - DNA, 25 bp, Homo sapien
gccatggacaggggcttgagcttct

SEQ ID NO: 1383024 - DNA, 25 bp, Homo sapien
catggacaggggcttgagcttctac

SEQ ID NO: 1383025 - DNA, 25 bp, Homo sapien
caggggcttgagcttctacatccat

SEQ ID NO: 1383026 - DNA, 25 bp, Homo sapien
ggacaggggcttgagcttctacatc

SEQ ID NO: 1383027 - DNA, 25 bp, Homo sapien
gaatgctgaggtgataaatgatgcc

SEQ ID NO: 1383028 - DNA, 25 bp, Homo sapien
aatgctgaggtgataaatgatgcca

SEQ ID NO: 1383029 - DNA, 25 bp, Homo sapien
atgctgaggtgataaatgatgccac

SEQ ID NO: 1383030 - DNA, 25 bp, Homo sapien
actttatctgccatccatgggactg

SEQ ID NO: 1383031 - DNA, 25 bp, Homo sapien
cactttatctgccatccatgggact

SEQ ID NO: 1383032 - DNA, 25 bp, Homo sapien
ccactttatctgccatccatgggac

SEQ ID NO: 1383033 - DNA, 25 bp, Homo sapien
cagtcttataggaggatgtaatgtc

SEQ ID NO: 1383034 - DNA, 25 bp, Homo sapien
tgaaggctttgcttgatgctcttcc

SEQ ID NO: 1383035 - DNA, 25 bp, Homo sapien
tcatgatcagcttgagtcgccagct

SEQ ID NO: 1383036 - DNA, 25 bp, Homo sapien
gacatggaggagtgagtcttcagtc

SEQ ID NO: 1383037 - DNA, 25 bp, Homo sapien
tggatgcaataagtggacccataga

SEQ ID NO: 1383038 - DNA, 25 bp, Homo sapien
tgagaatcttgcattgaatactgga

SEQ ID NO: 1383039 - DNA, 25 bp, Homo sapien
tgaatactggatgcaataagtggac

SEQ ID NO: 1383040 - DNA, 25 bp, Homo sapien
ataagtggacccatagaaagagtgg

SEQ ID NO: 1383041 - DNA, 25 bp, Homo sapien
taacactgacgtgacattagcattt

SEQ ID NO: 1383042 - DNA, 25 bp, Homo sapien
tcccaaaaatagctcggagcccagg

SEQ ID NO: 1383043 - DNA, 25 bp, Homo sapien
cccaaaaatagctcggagcccaggc

SEQ ID NO: 1383044 - DNA, 25 bp, Homo sapien
caggccctaacactgacgtgacatt

SEQ ID NO: 1383045 - DNA, 25 bp, Homo sapien
cccagtatcctggagcgacagtgta

SEQ ID NO: 1383046 - DNA, 25 bp, Homo sapien
taatcagccatggaatacagtccat

SEQ ID NO: 1383047 - DNA, 25 bp, Homo sapien
tcaaagtttgaagcaaccccagtat

SEQ ID NO: 1383048 - DNA, 25 bp, Homo sapien
tgatgtactcagaaagaatacttct

SEQ ID NO: 1383049 - DNA, 25 bp, Homo sapien
ctaggcaccgcttattgcaccagtt

SEQ ID NO: 1383050 - DNA, 25 bp, Homo sapien
cgcttattgcaccagttcctagaaa

SEQ ID NO: 1383051 - DNA, 25 bp, Homo sapien
gcaccgcttattgcaccagttccta

SEQ ID NO: 1383052 - DNA, 25 bp, Homo sapien
taggcaccgcttattgcaccagttc

SEQ ID NO: 1383053 - DNA, 25 bp, Homo sapien
acagaccagcttctctacatgttac

SEQ ID NO: 1383054 - DNA, 25 bp, Homo sapien
taatcaaatcgtccagggttgtatc

SEQ ID NO: 1383055 - DNA, 25 bp, Homo sapien
gccataatcaaatcgtccagggttg

SEQ ID NO: 1383056 - DNA, 25 bp, Homo sapien
tcaggaagggggaactcgatatttc

SEQ ID NO: 1383057 - DNA, 25 bp, Homo sapien
tcaaatcgtccagggttgtatcatc

SEQ ID NO: 1383058 - DNA, 25 bp, Homo sapien
acaatggatggtgcatgctcttcag

SEQ ID NO: 1383059 - DNA, 25 bp, Homo sapien
acacaatggatggtgcatgctcttc

SEQ ID NO: 1383060 - DNA, 25 bp, Homo sapien
aataaacacaatggatggtgcatgc

SEQ ID NO: 1383061 - DNA, 25 bp, Homo sapien
atttttgttccaatggcatcaattt

SEQ ID NO: 1383062 - DNA, 25 bp, Homo sapien
cctgctgctatggctaacaagattt

SEQ ID NO: 1383063 - DNA, 25 bp, Homo sapien
gctgctatggctaacaagattttac

SEQ ID NO: 1383064 - DNA, 25 bp, Homo sapien
ctgctgctatggctaacaagatttt

SEQ ID NO: 1383065 - DNA, 25 bp, Homo sapien
tgctgctatggctaacaagatttta

SEQ ID NO: 1383066 - DNA, 25 bp, Homo sapien
tgagcaggaccaagcatccaggttt

SEQ ID NO: 1383067 - DNA, 25 bp, Homo sapien
cccagtattggcacagatctcctgg

SEQ ID NO: 1383068 - DNA, 25 bp, Homo sapien
accccatcacagcatgcaccttgtg

SEQ ID NO: 1383069 - DNA, 25 bp, Homo sapien
cttgtggctgagcaggaccaagcat

SEQ ID NO: 1383070 - DNA, 25 bp, Homo sapien
gggtcccactcagatcatccacttt

SEQ ID NO: 1383071 - DNA, 25 bp, Homo sapien
attggggtcccactcagatcatcca

SEQ ID NO: 1383072 - DNA, 25 bp, Homo sapien
cactcagatcatccacttttgatct

SEQ ID NO: 1383073 - DNA, 25 bp, Homo sapien
gtcccactcagatcatccacttttg

SEQ ID NO: 1383074 - DNA, 25 bp, Homo sapien
tcacaataagcggctgactgggaaa

SEQ ID NO: 1383075 - DNA, 25 bp, Homo sapien
cacaataagcggctgactgggaaac

SEQ ID NO: 1383076 - DNA, 25 bp, Homo sapien
gctctcaggttttggacgggatgta

SEQ ID NO: 1383077 - DNA, 25 bp, Homo sapien
ggatgagtcaatgaagaattgtgct

SEQ ID NO: 1383078 - DNA, 25 bp, Homo sapien
tttggacgggatgtatagctgcacc

SEQ ID NO: 1383079 - DNA, 25 bp, Homo sapien
tagctgcaccttgcaattcacatgc

SEQ ID NO: 1383080 - DNA, 25 bp, Homo sapien
gacttctccaattgaggaagcaacc

SEQ ID NO: 1383081 - DNA, 25 bp, Homo sapien
acttgtgggatttttcaccactgac

SEQ ID NO: 1383082 - DNA, 25 bp, Homo sapien
gaaacctgagttattaattggcacc

SEQ ID NO: 1383083 - DNA, 25 bp, Homo sapien
cttggattgtccataaggtctgact

SEQ ID NO: 1383084 - DNA, 25 bp, Homo sapien
gtcccttcccatgtgtaacattcat

SEQ ID NO: 1383085 - DNA, 25 bp, Homo sapien
ttttattcagtgttccataattggc

SEQ ID NO: 1383086 - DNA, 25 bp, Homo sapien
aactgctcacatgttggctctttca

SEQ ID NO: 1383087 - DNA, 25 bp, Homo sapien
tgctcacatgttggctctttcacag

SEQ ID NO: 1383088 - DNA, 25 bp, Homo sapien
ctctctagatctatcgacagagaca

SEQ ID NO: 1383089 - DNA, 25 bp, Homo sapien
ctagatctatcgacagagacaaacc

SEQ ID NO: 1383090 - DNA, 25 bp, Homo sapien
tctagatctatcgacagagacaaac

SEQ ID NO: 1383091 - DNA, 25 bp, Homo sapien
tctctagatctatcgacagagacaa

SEQ ID NO: 1383092 - DNA, 25 bp, Homo sapien
gggctggaaagtcgaagcataactg

SEQ ID NO: 1383093 - DNA, 25 bp, Homo sapien
tgctactgggtagtgtggttgcaat

SEQ ID NO: 1383094 - DNA, 25 bp, Homo sapien
gaaagtcgaagcataactgaaggaa

SEQ ID NO: 1383095 - DNA, 25 bp, Homo sapien
gaaatcatgctgctactgggtagtg

SEQ ID NO: 1383096 - DNA, 25 bp, Homo sapien
tctggttggtccacagaatagatct

SEQ ID NO: 1383097 - DNA, 25 bp, Homo sapien
gttggtccacagaatagatctctct

SEQ ID NO: 1383098 - DNA, 25 bp, Homo sapien
agcaaactctggttggtccacagaa

SEQ ID NO: 1383099 - DNA, 25 bp, Homo sapien
tttccacagcaaactctggttggtc

SEQ ID NO: 1383100 - DNA, 25 bp, Homo sapien
gacttcagtgagacattgatcaacg

SEQ ID NO: 1383101 - DNA, 25 bp, Homo sapien
cagttttgtgtgaaacttgacttca

SEQ ID NO: 1383102 - DNA, 25 bp, Homo sapien
gattgttagctgacttacagaaagg

SEQ ID NO: 1383103 - DNA, 25 bp, Homo sapien
ctagagcatcagtgctaaattgtac

SEQ ID NO: 1383104 - DNA, 25 bp, Homo sapien
cacacacagctttctgtgggcctca

SEQ ID NO: 1383105 - DNA, 25 bp, Homo sapien
tcacacacagctttctgtgggcctc

SEQ ID NO: 1383106 - DNA, 25 bp, Homo sapien
cacacagctttctgtgggcctcaaa

SEQ ID NO: 1383107 - DNA, 25 bp, Homo sapien
acacagctttctgtgggcctcaaac

SEQ ID NO: 1383108 - DNA, 25 bp, Homo sapien
ccctccttgattttccttccatctc

SEQ ID NO: 1383109 - DNA, 25 bp, Homo sapien
cactccattccttgattttcaactc

SEQ ID NO: 1383110 - DNA, 25 bp, Homo sapien
cagatggttttctccttcaaatccc

SEQ ID NO: 1383111 - DNA, 25 bp, Homo sapien
tcctgctttgctctccagatggttt

SEQ ID NO: 1383112 - DNA, 25 bp, Homo sapien
caggattttgcaatttggttgtacc

SEQ ID NO: 1383113 - DNA, 25 bp, Homo sapien
tcgtgacaacgagcttccagaagca

SEQ ID NO: 1383114 - DNA, 25 bp, Homo sapien
atttggttgtaccaaatattgctca

SEQ ID NO: 1383115 - DNA, 25 bp, Homo sapien
tccagaagcataaagggatgtccca

SEQ ID NO: 1383116 - DNA, 25 bp, Homo sapien
gaacgtcttgatttagtttagcata

SEQ ID NO: 1383117 - DNA, 25 bp, Homo sapien
cctgaaatgatgagggaacgtcttg

SEQ ID NO: 1383118 - DNA, 25 bp, Homo sapien
tagcacattaactagcacctgaaat

SEQ ID NO: 1383119 - DNA, 25 bp, Homo sapien
ttatggtcataaaattccacaccat

SEQ ID NO: 1383120 - DNA, 25 bp, Homo sapien
ggagacctggttccaattgcaaggc

SEQ ID NO: 1383121 - DNA, 25 bp, Homo sapien
gtgaaaggtgccgacaaagaggccc

SEQ ID NO: 1383122 - DNA, 25 bp, Homo sapien
aggccattcctgcaacaatctctgg

SEQ ID NO: 1383123 - DNA, 25 bp, Homo sapien
aaggtgccgacaaagaggccctctc

SEQ ID NO: 1383124 - DNA, 25 bp, Homo sapien
caccagcatggcacatgtatacata

SEQ ID NO: 1383125 - DNA, 25 bp, Homo sapien
tgtaactaacctgcacaatgtgcac

SEQ ID NO: 1383126 - DNA, 25 bp, Homo sapien
agatgacacgttagtgggtgcagcg

SEQ ID NO: 1383127 - DNA, 25 bp, Homo sapien
tacctaatgctagatgacacgttag

SEQ ID NO: 1383128 - DNA, 25 bp, Homo sapien
gctcatttctcgttgttccagattt

SEQ ID NO: 1383129 - DNA, 25 bp, Homo sapien
gttccagatttttcaatcttgtctt

SEQ ID NO: 1383130 - DNA, 25 bp, Homo sapien
ttttcaatcttgtcttcaggccagt

SEQ ID NO: 1383131 - DNA, 25 bp, Homo sapien
ctgctcatttctcgttgttccagat

SEQ ID NO: 1383132 - DNA, 25 bp, Homo sapien
catactgcatcacgtggcagtgggc

SEQ ID NO: 1383133 - DNA, 25 bp, Homo sapien
ggcatactgcatcacgtggcagtgg

SEQ ID NO: 1383134 - DNA, 25 bp, Homo sapien
actgcatcacgtggcagtgggcttc

SEQ ID NO: 1383135 - DNA, 25 bp, Homo sapien
tactgcatcacgtggcagtgggctt

SEQ ID NO: 1383136 - DNA, 25 bp, Homo sapien
gaggatctgaccacggagactctgg

SEQ ID NO: 1383137 - DNA, 25 bp, Homo sapien
acagagttcacccagttcagagtca

SEQ ID NO: 1383138 - DNA, 25 bp, Homo sapien
tatttcctgccacagggatagcggg

SEQ ID NO: 1383139 - DNA, 25 bp, Homo sapien
aaacagagttccgtgcataagggca

SEQ ID NO: 1383140 - DNA, 25 bp, Homo sapien
cctgcatgacatactgaaactggga

SEQ ID NO: 1383141 - DNA, 25 bp, Homo sapien
tactgccggccatcacaagtgttgg

SEQ ID NO: 1383142 - DNA, 25 bp, Homo sapien
tgagaggcgctcagtttttccgggc

SEQ ID NO: 1383143 - DNA, 25 bp, Homo sapien
taaaccatgtgcacggacatctggg

SEQ ID NO: 1383144 - DNA, 25 bp, Homo sapien
tctgtctctgaggagtgctgattca

SEQ ID NO: 1383145 - DNA, 25 bp, Homo sapien
ctcttctctcgtataattcaatggc

SEQ ID NO: 1383146 - DNA, 25 bp, Homo sapien
ttcgttccatgagccagactcttct

SEQ ID NO: 1383147 - DNA, 25 bp, Homo sapien
cactgtgtatccttgagaagtcttc

SEQ ID NO: 1383148 - DNA, 25 bp, Homo sapien
gtgagtgtgcgcacaggaggtctcc

SEQ ID NO: 1383149 - DNA, 25 bp, Homo sapien
ggtctccagaatgcatatgtctcca

SEQ ID NO: 1383150 - DNA, 25 bp, Homo sapien
gtgaagtcttcgaaggtgagtgtgc

SEQ ID NO: 1383151 - DNA, 25 bp, Homo sapien
tcttcgaaggtgagtgtgcgcacag

SEQ ID NO: 1383152 - DNA, 25 bp, Homo sapien
ttagctccattgacaacataggccg

SEQ ID NO: 1383153 - DNA, 25 bp, Homo sapien
acaacataggccgtatccaaaccac

SEQ ID NO: 1383154 - DNA, 25 bp, Homo sapien
cattttttccctgttagctccattg

SEQ ID NO: 1383155 - DNA, 25 bp, Homo sapien
gacggtcaagttggcaagtgtcccc

SEQ ID NO: 1383156 - DNA, 25 bp, Homo sapien
aggctgctcactagccaaaccaaca

SEQ ID NO: 1383157 - DNA, 25 bp, Homo sapien
gctcactagccaaaccaacagaatg

SEQ ID NO: 1383158 - DNA, 25 bp, Homo sapien
ctgctcactagccaaaccaacagaa

SEQ ID NO: 1383159 - DNA, 25 bp, Homo sapien
ctcactagccaaaccaacagaatgt

SEQ ID NO: 1383160 - DNA, 25 bp, Homo sapien
ggtggttctttataaacatggccat

SEQ ID NO: 1383161 - DNA, 25 bp, Homo sapien
aacaggggacgcctatttgtgccca

SEQ ID NO: 1383162 - DNA, 25 bp, Homo sapien
tggccctccaacaggggacgcctat

SEQ ID NO: 1383163 - DNA, 25 bp, Homo sapien
tctttataaacatggccatgggaca

SEQ ID NO: 1383164 - DNA, 25 bp, Homo sapien
cagtcttagatcagcatcctctgac

SEQ ID NO: 1383165 - DNA, 25 bp, Homo sapien
gtaaaaggacactaggcaccaagaa

SEQ ID NO: 1383166 - DNA, 25 bp, Homo sapien
gctggaaatatctggaggaaactgt

SEQ ID NO: 1383167 - DNA, 25 bp, Homo sapien
cacttgggccctatcatgggaccaa

SEQ ID NO: 1383168 - DNA, 25 bp, Homo sapien
aactgtgtcagatgggacagtccca

SEQ ID NO: 1383169 - DNA, 25 bp, Homo sapien
tacagaagggccattccacttgggc

SEQ ID NO: 1383170 - DNA, 25 bp, Homo sapien
gggctacactcggatggttctgagt

SEQ ID NO: 1383171 - DNA, 25 bp, Homo sapien
gcttcggaggacatagttgtcagcc

SEQ ID NO: 1383172 - DNA, 25 bp, Homo sapien
gagagagactctcataggcatttga

SEQ ID NO: 1383173 - DNA, 25 bp, Homo sapien
caagcactcttttctatgcttcgga

SEQ ID NO: 1383174 - DNA, 25 bp, Homo sapien
tctctgaatcctttagcaaaagggt

SEQ ID NO: 1383175 - DNA, 25 bp, Homo sapien
tttctcccagaatctctgaatcctt

SEQ ID NO: 1383176 - DNA, 25 bp, Homo sapien
ctctgaatcctttagcaaaagggtt

SEQ ID NO: 1383177 - DNA, 25 bp, Homo sapien
ctgtttctcccagaatctctgaatc

SEQ ID NO: 1383178 - DNA, 25 bp, Homo sapien
ctatttcacaggcctcctaaccgtt

SEQ ID NO: 1383179 - DNA, 25 bp, Homo sapien
gctgaagtctttgcgaatcacatga

SEQ ID NO: 1383180 - DNA, 25 bp, Homo sapien
gataggccgtaactgtggtgaacac

SEQ ID NO: 1383181 - DNA, 25 bp, Homo sapien
cacagtctcaggaaagttgaacgtt

SEQ ID NO: 1383182 - DNA, 25 bp, Homo sapien
acaggaacaggcttagtgggtgaaa

SEQ ID NO: 1383183 - DNA, 25 bp, Homo sapien
caggtgtctccagaagctagagaat

SEQ ID NO: 1383184 - DNA, 25 bp, Homo sapien
gagtttgtcaaaactgaccacctgt

SEQ ID NO: 1383185 - DNA, 25 bp, Homo sapien
ccaactcattgttggtaagcttgag

SEQ ID NO: 1383186 - DNA, 25 bp, Homo sapien
ggaatcagcattgccagccaccatc

SEQ ID NO: 1383187 - DNA, 25 bp, Homo sapien
tgctgatgtggatctaggccagtga

SEQ ID NO: 1383188 - DNA, 25 bp, Homo sapien
caggcacaatgtccattgctatgta

SEQ ID NO: 1383189 - DNA, 25 bp, Homo sapien
ctatgtagtactgctgatgtggatc

SEQ ID NO: 1383190 - DNA, 25 bp, Homo sapien
tgtccattgctatgtagtactgctg

SEQ ID NO: 1383191 - DNA, 25 bp, Homo sapien
agtgtgagtactgaaggagcaggaa

SEQ ID NO: 1383192 - DNA, 25 bp, Homo sapien
aaggagcaggaagtccgctcagtga

SEQ ID NO: 1383193 - DNA, 25 bp, Homo sapien
gaaccgcttccagaggtcagcacat

SEQ ID NO: 1383194 - DNA, 25 bp, Homo sapien
ttcagttccaatatcatggaaccgc

SEQ ID NO: 1383195 - DNA, 25 bp, Homo sapien
ctgtgaaagatacaccccattgttc

SEQ ID NO: 1383196 - DNA, 25 bp, Homo sapien
atatctaacagctgtgtcaaagcca

SEQ ID NO: 1383197 - DNA, 25 bp, Homo sapien
cagcatctctggcaagaatatctaa

SEQ ID NO: 1383198 - DNA, 25 bp, Homo sapien
agatacaccccattgttcctttact

SEQ ID NO: 1383199 - DNA, 25 bp, Homo sapien
aggtcccctacacatctggtgtctc

SEQ ID NO: 1383200 - DNA, 25 bp, Homo sapien
caggtcccctacacatctggtgtct

SEQ ID NO: 1383201 - DNA, 25 bp, Homo sapien
agaggcagctccacagggaaagctg

SEQ ID NO: 1383202 - DNA, 25 bp, Homo sapien
acagtgagtaagtgaggctgcccca

SEQ ID NO: 1383203 - DNA, 25 bp, Homo sapien
ggtaggcctgccaaggctttcctaa

SEQ ID NO: 1383204 - DNA, 25 bp, Homo sapien
cctcatgtcctctaaggcaatgtct

SEQ ID NO: 1383205 - DNA, 25 bp, Homo sapien
ggcagaggccacttgatgtggtctc

SEQ ID NO: 1383206 - DNA, 25 bp, Homo sapien
gaacagtctgaaatgaacagtcaag

SEQ ID NO: 1383207 - DNA, 25 bp, Homo sapien
tgaggaggcagtgaacttaacgaga

SEQ ID NO: 1383208 - DNA, 25 bp, Homo sapien
tgagctacctatagtgtcctttgcc

SEQ ID NO: 1383209 - DNA, 25 bp, Homo sapien
cttaacgagaatattgtgagctacc

SEQ ID NO: 1383210 - DNA, 25 bp, Homo sapien
agtaacactaattagttgtaacagg

SEQ ID NO: 1383211 - DNA, 25 bp, Homo sapien
cactaattagttgtaacagggtgtt

SEQ ID NO: 1383212 - DNA, 25 bp, Homo sapien
acagtaacactaattagttgtaaca

SEQ ID NO: 1383213 - DNA, 25 bp, Homo sapien
aacactaattagttgtaacagggtg

SEQ ID NO: 1383214 - DNA, 25 bp, Homo sapien
aatgcccgctttctgggcgtcagcg

SEQ ID NO: 1383215 - DNA, 25 bp, Homo sapien
gattaaaagttcttcaagccagcgg

SEQ ID NO: 1383216 - DNA, 25 bp, Homo sapien
tctttgtctcggtgggcaatgcccg

SEQ ID NO: 1383217 - DNA, 25 bp, Homo sapien
gactagctacgatatatactgaccc

SEQ ID NO: 1383218 - DNA, 25 bp, Homo sapien
taattagagctaagaacagccgcca

SEQ ID NO: 1383219 - DNA, 25 bp, Homo sapien
gcccagggtccccacatttctccag

SEQ ID NO: 1383220 - DNA, 25 bp, Homo sapien
tctccaggatgtaattagagctaag

SEQ ID NO: 1383221 - DNA, 25 bp, Homo sapien
gggtccccacatttctccaggatgt

SEQ ID NO: 1383222 - DNA, 25 bp, Homo sapien
cactagcagttgagctgacgggtgc

SEQ ID NO: 1383223 - DNA, 25 bp, Homo sapien
gtttacattatttcgctccgcggga

SEQ ID NO: 1383224 - DNA, 25 bp, Homo sapien
aggcctctggaacgcagctgctgtg

SEQ ID NO: 1383225 - DNA, 25 bp, Homo sapien
cgtgtacgcggagtgtcgatctgcc

SEQ ID NO: 1383226 - DNA, 25 bp, Homo sapien
gagtgagtgcctacaacgcgcaggc

SEQ ID NO: 1383227 - DNA, 25 bp, Homo sapien
caaaagactgagagtgccggcgtag

SEQ ID NO: 1383228 - DNA, 25 bp, Homo sapien
tcgggcgccaactaaagccagctct

SEQ ID NO: 1383229 - DNA, 25 bp, Homo sapien
cagctctgtccagacgcggaaagaa

SEQ ID NO: 1383230 - DNA, 25 bp, Homo sapien
ctagagttgtctaaagatcgcggaa

SEQ ID NO: 1383231 - DNA, 25 bp, Homo sapien
gaattttgaagctccggcagagcgg

SEQ ID NO: 1383232 - DNA, 25 bp, Homo sapien
tggtgagaatactctaggcatgaac

SEQ ID NO: 1383233 - DNA, 25 bp, Homo sapien
gcagagcggactaaaaaacggtgct

SEQ ID NO: 1383234 - DNA, 25 bp, Homo sapien
taatcgcattattattagcctcggg

SEQ ID NO: 1383235 - DNA, 25 bp, Homo sapien
gcaggtcacccgctaatcgcattat

SEQ ID NO: 1383236 - DNA, 25 bp, Homo sapien
gggagcatggaaattgaactgtcac

SEQ ID NO: 1383237 - DNA, 25 bp, Homo sapien
tattattagcctcgggagcatggaa

SEQ ID NO: 1383238 - DNA, 25 bp, Homo sapien
ctcccagtctcgcagtttccgtttt

SEQ ID NO: 1383239 - DNA, 25 bp, Homo sapien
tccgttttttatttgagccgatcaa

SEQ ID NO: 1383240 - DNA, 25 bp, Homo sapien
gggctcagcgcctccatagacaggt

SEQ ID NO: 1383241 - DNA, 25 bp, Homo sapien
cgatcaaggcttcaacggagaaggc

SEQ ID NO: 1383242 - DNA, 25 bp, Homo sapien
ctgcagatcttctcctttcactcat

SEQ ID NO: 1383243 - DNA, 25 bp, Homo sapien
gagtgcagagaaagctcaaaccggc

SEQ ID NO: 1383244 - DNA, 25 bp, Homo sapien
aacgtctcggatttcgcggacagcg

SEQ ID NO: 1383245 - DNA, 25 bp, Homo sapien
tcctagtgccctggtcgagacggtt

SEQ ID NO: 1383246 - DNA, 25 bp, Homo sapien
tagccaagctgaaaaaacgtctcgg

SEQ ID NO: 1383247 - DNA, 25 bp, Homo sapien
cattcactgctaccgggcttcagca

SEQ ID NO: 1383248 - DNA, 25 bp, Homo sapien
cagggagcacgaacatgaactctgg

SEQ ID NO: 1383249 - DNA, 25 bp, Homo sapien
tccaggagtcgtcgctgaaagtcag

SEQ ID NO: 1383250 - DNA, 25 bp, Homo sapien
cagtcagcatttggcgttgcttcca

SEQ ID NO: 1383251 - DNA, 25 bp, Homo sapien
tggggccggcctctagactttccca

SEQ ID NO: 1383252 - DNA, 25 bp, Homo sapien
caatggggccggcctctagactttc

SEQ ID NO: 1383253 - DNA, 25 bp, Homo sapien
gtagcaatggggccggcctctagac

SEQ ID NO: 1383254 - DNA, 25 bp, Homo sapien
gcaatggggccggcctctagacttt

SEQ ID NO: 1383255 - DNA, 25 bp, Homo sapien
tgagagctctttctgcggaacctgc

SEQ ID NO: 1383256 - DNA, 25 bp, Homo sapien
tgctcgaaagtgtagctgggacgcc

SEQ ID NO: 1383257 - DNA, 25 bp, Homo sapien
agagcgcggctgtctttcccggaaa

SEQ ID NO: 1383258 - DNA, 25 bp, Homo sapien
ccggaaagacccaagtgcgcgatgt

SEQ ID NO: 1383259 - DNA, 25 bp, Homo sapien
cgcggttcgtccggccgaggggcag

SEQ ID NO: 1383260 - DNA, 25 bp, Homo sapien
cagccgcggttcgtccggccgaggg

SEQ ID NO: 1383261 - DNA, 25 bp, Homo sapien
ggcagccgcggttcgtccggccgag

SEQ ID NO: 1383262 - DNA, 25 bp, Homo sapien
gcagccgcggttcgtccggccgagg

SEQ ID NO: 1383263 - DNA, 25 bp, Homo sapien
cgacttctcaagctcagcattttca

SEQ ID NO: 1383264 - DNA, 25 bp, Homo sapien
cctgggtgaccgttagcaattgtgg

SEQ ID NO: 1383265 - DNA, 25 bp, Homo sapien
atttgtccctgggtgaccgttagca

SEQ ID NO: 1383266 - DNA, 25 bp, Homo sapien
ccaaatagtgtaaggaattcgactt

SEQ ID NO: 1383267 - DNA, 25 bp, Homo sapien
gctagcaactagcaaagcccttctg

SEQ ID NO: 1383268 - DNA, 25 bp, Homo sapien
taagatgcctttgggctgtcaccac

SEQ ID NO: 1383269 - DNA, 25 bp, Homo sapien
gcttccaatcagaggtctcagtagg

SEQ ID NO: 1383270 - DNA, 25 bp, Homo sapien
ttctgggccgtagcctctgatgtgg

SEQ ID NO: 1383271 - DNA, 25 bp, Homo sapien
tttactggctgactgacaggctttg

SEQ ID NO: 1383272 - DNA, 25 bp, Homo sapien
tttgcttttactggctgactgacag

SEQ ID NO: 1383273 - DNA, 25 bp, Homo sapien
tactggctgactgacaggctttggt

SEQ ID NO: 1383274 - DNA, 25 bp, Homo sapien
cttttactggctgactgacaggctt

SEQ ID NO: 1383275 - DNA, 25 bp, Homo sapien
tgccagaggtggcaacaagtctgct

SEQ ID NO: 1383276 - DNA, 25 bp, Homo sapien
actcagacttcaggatacacacaca

SEQ ID NO: 1383277 - DNA, 25 bp, Homo sapien
actctgagtgatgggactcagactt

SEQ ID NO: 1383278 - DNA, 25 bp, Homo sapien
cacacacactttgggtcaatgccag

SEQ ID NO: 1383279 - DNA, 25 bp, Homo sapien
tccctttactaacatcgctcttgtt

SEQ ID NO: 1383280 - DNA, 25 bp, Homo sapien
taaccgcgtatgatcgtttccactg

SEQ ID NO: 1383281 - DNA, 25 bp, Homo sapien
tagcctcaatcttaaccgcgtatga

SEQ ID NO: 1383282 - DNA, 25 bp, Homo sapien
tccatttagtctttgggaacgtagc

SEQ ID NO: 1383283 - DNA, 25 bp, Homo sapien
tatccccgtggcgtcggatctctaa

SEQ ID NO: 1383284 - DNA, 25 bp, Homo sapien
aaattatctaatctggcggctgcgt

SEQ ID NO: 1383285 - DNA, 25 bp, Homo sapien
gagagacaggcgcatatccccgtgg

SEQ ID NO: 1383286 - DNA, 25 bp, Homo sapien
tgcgtacgactcagggaaagccctg

SEQ ID NO: 1383287 - DNA, 25 bp, Homo sapien
gcgcgccggagccaggcgggaaagg

SEQ ID NO: 1383288 - DNA, 25 bp, Homo sapien
cgcccgccgttgtagcgcaggaagc

SEQ ID NO: 1383289 - DNA, 25 bp, Homo sapien
aggaagcgggcggtgccaacacaca

SEQ ID NO: 1383290 - DNA, 25 bp, Homo sapien
ccaggcgggaaagggactacagccg

SEQ ID NO: 1383291 - DNA, 25 bp, Homo sapien
tagagcctccgtgtgaagctccgtc

SEQ ID NO: 1383292 - DNA, 25 bp, Homo sapien
cacgttcttcgtgtcttggaggaga

SEQ ID NO: 1383293 - DNA, 25 bp, Homo sapien
cacctgacgaagaggagggcgtctt

SEQ ID NO: 1383294 - DNA, 25 bp, Homo sapien
gatgttaagacgcagacccgctgct

SEQ ID NO: 1383295 - DNA, 25 bp, Homo sapien
cgctcggtccgtgggccacttcgga

SEQ ID NO: 1383296 - DNA, 25 bp, Homo sapien
caaacgcgccgctcggtccgtgggc

SEQ ID NO: 1383297 - DNA, 25 bp, Homo sapien
gtccgtgggccacttcggacctgac

SEQ ID NO: 1383298 - DNA, 25 bp, Homo sapien
tctgcgcccaaacgcgccgctcggt

SEQ ID NO: 1383299 - DNA, 25 bp, Homo sapien
aattcacgcgctccgggacgcgcgg

SEQ ID NO: 1383300 - DNA, 25 bp, Homo sapien
tgaattcacgcgctccgggacgcgc

SEQ ID NO: 1383301 - DNA, 25 bp, Homo sapien
ccggtgaattcacgcgctccgggac

SEQ ID NO: 1383302 - DNA, 25 bp, Homo sapien
gctgccggtgaattcacgcgctccg

SEQ ID NO: 1383303 - DNA, 25 bp, Homo sapien
tcggcagccggcgatgtggcaaaaa

SEQ ID NO: 1383304 - DNA, 25 bp, Homo sapien
tggccgcgttacctccccaggtgag

SEQ ID NO: 1383305 - DNA, 25 bp, Homo sapien
aggcaacctcgccttatttctaggg

SEQ ID NO: 1383306 - DNA, 25 bp, Homo sapien
atgaagagcggctgagtgtccccgt

SEQ ID NO: 1383307 - DNA, 25 bp, Homo sapien
gtcgtggttaacgccgaggccaagc

SEQ ID NO: 1383308 - DNA, 25 bp, Homo sapien
agttctctgcctgacgttttgtccc

SEQ ID NO: 1383309 - DNA, 25 bp, Homo sapien
ctcaggaagtgtcccttcccgactt

SEQ ID NO: 1383310 - DNA, 25 bp, Homo sapien
cgccgaggccaagcccttcgaagaa

SEQ ID NO: 1383311 - DNA, 25 bp, Homo sapien
ggaggaaggagaagtgttcctccac

SEQ ID NO: 1383312 - DNA, 25 bp, Homo sapien
gaaggagaagtgttcctccactgct

SEQ ID NO: 1383313 - DNA, 25 bp, Homo sapien
tccactgctgttctgtggagcggga

SEQ ID NO: 1383314 - DNA, 25 bp, Homo sapien
ccactgctgttctgtggagcgggac

SEQ ID NO: 1383315 - DNA, 25 bp, Homo sapien
gctctcgggagcctgtactccggct

SEQ ID NO: 1383316 - DNA, 25 bp, Homo sapien
gggagcctgtactccggctcgcacg

SEQ ID NO: 1383317 - DNA, 25 bp, Homo sapien
tttgttcggcctccctgctctcggg

SEQ ID NO: 1383318 - DNA, 25 bp, Homo sapien
tactccggctcgcacgcctgactgc

SEQ ID NO: 1383319 - DNA, 25 bp, Homo sapien
acaaggcgaagccccgacgcccaga

SEQ ID NO: 1383320 - DNA, 25 bp, Homo sapien
aaggcgaagccccgacgcccagagg

SEQ ID NO: 1383321 - DNA, 25 bp, Homo sapien
ggacaaggcgaagccccgacgccca

SEQ ID NO: 1383322 - DNA, 25 bp, Homo sapien
aggcgaagccccgacgcccagaggg

SEQ ID NO: 1383323 - DNA, 25 bp, Homo sapien
caccacgaagggttgaggtagcctg

SEQ ID NO: 1383324 - DNA, 25 bp, Homo sapien
caggaaacgggaaaggccactgtct

SEQ ID NO: 1383325 - DNA, 25 bp, Homo sapien
ggtcacacgggctctcaatgctaat

SEQ ID NO: 1383326 - DNA, 25 bp, Homo sapien
gattctatccgctggcacgcgaagg

SEQ ID NO: 1383327 - DNA, 25 bp, Homo sapien
ttccttttgatattggatcctttat

SEQ ID NO: 1383328 - DNA, 25 bp, Homo sapien
ctttatgggcccctagcttcatgct

SEQ ID NO: 1383329 - DNA, 25 bp, Homo sapien
ttggatcctttatgggcccctagct

SEQ ID NO: 1383330 - DNA, 25 bp, Homo sapien
atattggatcctttatgggccccta

SEQ ID NO: 1383331 - DNA, 25 bp, Homo sapien
ttgctggctaatgtgggtgcgctct

SEQ ID NO: 1383332 - DNA, 25 bp, Homo sapien
gctggctaatgtgggtgcgctctgg

SEQ ID NO: 1383333 - DNA, 25 bp, Homo sapien
tgctggctaatgtgggtgcgctctg

SEQ ID NO: 1383334 - DNA, 25 bp, Homo sapien
ctggctaatgtgggtgcgctctggg

SEQ ID NO: 1383335 - DNA, 25 bp, Homo sapien
actcctaacccttccatatctgttg

SEQ ID NO: 1383336 - DNA, 25 bp, Homo sapien
ccaaactcctaacccttccatatct

SEQ ID NO: 1383337 - DNA, 25 bp, Homo sapien
gcctggccaacttctactttcaggt

SEQ ID NO: 1383338 - DNA, 25 bp, Homo sapien
caggtagacaagtgatcaattaaca

SEQ ID NO: 1383339 - DNA, 25 bp, Homo sapien
cattggctagaacgaatttacaggc

SEQ ID NO: 1383340 - DNA, 25 bp, Homo sapien
catgctgtttcaggatgtgtgggca

SEQ ID NO: 1383341 - DNA, 25 bp, Homo sapien
tactggatagaagaggatgatctcc

SEQ ID NO: 1383342 - DNA, 25 bp, Homo sapien
taaagtactggaacccagagatccc

SEQ ID NO: 1383343 - DNA, 25 bp, Homo sapien
aagtgattgtgacatctagaggcca

SEQ ID NO: 1383344 - DNA, 25 bp, Homo sapien
catctctacatagacaaggagcctg

SEQ ID NO: 1383345 - DNA, 25 bp, Homo sapien
tgaatccacatggaactgccagtgt

SEQ ID NO: 1383346 - DNA, 25 bp, Homo sapien
taatgcacaggagagggacaagact

SEQ ID NO: 1383347 - DNA, 25 bp, Homo sapien
gaactacattaagcaagtaactcag

SEQ ID NO: 1383348 - DNA, 25 bp, Homo sapien
caattgctgggttcatcctctaggt

SEQ ID NO: 1383349 - DNA, 25 bp, Homo sapien
agttcagcatgccatcagtatcacc

SEQ ID NO: 1383350 - DNA, 25 bp, Homo sapien
ggaaggcgaagacaccaattgctgg

SEQ ID NO: 1383351 - DNA, 25 bp, Homo sapien
tatgtacaaatggtgatcatggtcc

SEQ ID NO: 1383352 - DNA, 25 bp, Homo sapien
tgttctgacacaaggactactctac

SEQ ID NO: 1383353 - DNA, 25 bp, Homo sapien
gaggttctaggacttacagacatcc

SEQ ID NO: 1383354 - DNA, 25 bp, Homo sapien
gatccaggctagctccaagaatcct

SEQ ID NO: 1383355 - DNA, 25 bp, Homo sapien
tcttggtgtataagttaggattatc

SEQ ID NO: 1383356 - DNA, 25 bp, Homo sapien
aagtgcagaaaagctaggtttcagg

SEQ ID NO: 1383357 - DNA, 25 bp, Homo sapien
agtgcagaaaagctaggtttcaggg

SEQ ID NO: 1383358 - DNA, 25 bp, Homo sapien
ctaacaggtcttggtgtataagtta

SEQ ID NO: 1383359 - DNA, 25 bp, Homo sapien
tgcaatgagcgtagaggagagaact

SEQ ID NO: 1383360 - DNA, 25 bp, Homo sapien
tagagtctaaaaaacgctgcctttc

SEQ ID NO: 1383361 - DNA, 25 bp, Homo sapien
tgtgaccacggttctgtgaatccag

SEQ ID NO: 1383362 - DNA, 25 bp, Homo sapien
tatattaaatcaggcaccgtctcag

SEQ ID NO: 1383363 - DNA, 25 bp, Homo sapien
cagaatgcatggagtgcaaggcaca

SEQ ID NO: 1383364 - DNA, 25 bp, Homo sapien
aaagccttgctgtgattcgttgaaa

SEQ ID NO: 1383365 - DNA, 25 bp, Homo sapien
tgatgggatttggaacactgtcgta

SEQ ID NO: 1383366 - DNA, 25 bp, Homo sapien
gaaagctgccgttatcagaatgcat

SEQ ID NO: 1383367 - DNA, 25 bp, Homo sapien
tattcggacggtggccagtttgtca

SEQ ID NO: 1383368 - DNA, 25 bp, Homo sapien
ccagcttgtagcgagcagtgttcat

SEQ ID NO: 1383369 - DNA, 25 bp, Homo sapien
gcatgcaccgccactatgttggaca

SEQ ID NO: 1383370 - DNA, 25 bp, Homo sapien
gaagtctgtcacagccttgcggaat

SEQ ID NO: 1383371 - DNA, 25 bp, Homo sapien
aggttaaaaacaccaacacacacat

SEQ ID NO: 1383372 - DNA, 25 bp, Homo sapien
ggttaaaaacaccaacacacacata

SEQ ID NO: 1383373 - DNA, 25 bp, Homo sapien
taggttaaaaacaccaacacacaca

SEQ ID NO: 1383374 - DNA, 25 bp, Homo sapien
gttaaaaacaccaacacacacatac

SEQ ID NO: 1383375 - DNA, 25 bp, Homo sapien
tgaaaccttgtgctagatcctgaac

SEQ ID NO: 1383376 - DNA, 25 bp, Homo sapien
tagatcctgaactagttccatgtgc

SEQ ID NO: 1383377 - DNA, 25 bp, Homo sapien
gatcctccccaacaggaacgtgtgt

SEQ ID NO: 1383378 - DNA, 25 bp, Homo sapien
ccccatacttcttgttgaaaccttg

SEQ ID NO: 1383379 - DNA, 25 bp, Homo sapien
agtcctggtgctgggtactgtgaaa

SEQ ID NO: 1383380 - DNA, 25 bp, Homo sapien
tacttattgaagacccacgatgtga

SEQ ID NO: 1383381 - DNA, 25 bp, Homo sapien
tagtgtccagatgaataaacgttgc

SEQ ID NO: 1383382 - DNA, 25 bp, Homo sapien
taaacgttgcctacatatatctgct

SEQ ID NO: 1383383 - DNA, 25 bp, Homo sapien
tccctcaaggccatgtatagtgccc

SEQ ID NO: 1383384 - DNA, 25 bp, Homo sapien
tagtgccctttttccggatcagtgg

SEQ ID NO: 1383385 - DNA, 25 bp, Homo sapien
tagcagttagtagatgcctggcaaa

SEQ ID NO: 1383386 - DNA, 25 bp, Homo sapien
tcatagccctattgtgagaactgaa

SEQ ID NO: 1383387 - DNA, 25 bp, Homo sapien
acaacagaatgtcggctgcctggag

SEQ ID NO: 1383388 - DNA, 25 bp, Homo sapien
caccgtgccatcgtgcttctgcttg

SEQ ID NO: 1383389 - DNA, 25 bp, Homo sapien
ttgtacaacagaatgtcggctgcct

SEQ ID NO: 1383390 - DNA, 25 bp, Homo sapien
cgtgccatcgtgcttctgcttggta

SEQ ID NO: 1383391 - DNA, 25 bp, Homo sapien
tgatgtaaatgttgtaatcgaggta

SEQ ID NO: 1383392 - DNA, 25 bp, Homo sapien
tgtaaatgttgtaatcgaggtagtc

SEQ ID NO: 1383393 - DNA, 25 bp, Homo sapien
gttgtaatcgaggtagtctgaccat

SEQ ID NO: 1383394 - DNA, 25 bp, Homo sapien
aatgttgtaatcgaggtagtctgac

SEQ ID NO: 1383395 - DNA, 25 bp, Homo sapien
aggaaaggatccaacttaattgtgt

SEQ ID NO: 1383396 - DNA, 25 bp, Homo sapien
gcaggaaaggatccaacttaattgt

SEQ ID NO: 1383397 - DNA, 25 bp, Homo sapien
ccaacttaattgtgtgtgttcagac

SEQ ID NO: 1383398 - DNA, 25 bp, Homo sapien
aacttaattgtgtgtgttcagacac

SEQ ID NO: 1383399 - DNA, 25 bp, Homo sapien
tacaagtacctgtcaccacatccgg

SEQ ID NO: 1383400 - DNA, 25 bp, Homo sapien
gattacaagtacctgtcaccacatc

SEQ ID NO: 1383401 - DNA, 25 bp, Homo sapien
ttacaagtacctgtcaccacatccg

SEQ ID NO: 1383402 - DNA, 25 bp, Homo sapien
ggattacaagtacctgtcaccacat

SEQ ID NO: 1383403 - DNA, 25 bp, Homo sapien
cacaggagcatagatccaggcaagg

SEQ ID NO: 1383404 - DNA, 25 bp, Homo sapien
ccattgtgagctgaaagagcaccta

SEQ ID NO: 1383405 - DNA, 25 bp, Homo sapien
gagcacctattgttggtagcgaaca

SEQ ID NO: 1383406 - DNA, 25 bp, Homo sapien
tagactctctgtccagtttaaggcc

SEQ ID NO: 1383407 - DNA, 25 bp, Homo sapien
gctctgccgaaggacagctgggtct

SEQ ID NO: 1383408 - DNA, 25 bp, Homo sapien
taatggagtggaggtcaacaatgct

SEQ ID NO: 1383409 - DNA, 25 bp, Homo sapien
ctgagattgttggaaaaggatgctt

SEQ ID NO: 1383410 - DNA, 25 bp, Homo sapien
tataatacagagtcatattcatcct

SEQ ID NO: 1383411 - DNA, 25 bp, Homo sapien
ggctcccaggtaattgcccaggtgg

SEQ ID NO: 1383412 - DNA, 25 bp, Homo sapien
ggaaaatactcgcttcttgctgtct

SEQ ID NO: 1383413 - DNA, 25 bp, Homo sapien
gaggattcctgtaggttgaatgccg

SEQ ID NO: 1383414 - DNA, 25 bp, Homo sapien
ggttgaatgccggaaaatactcgct

SEQ ID NO: 1383415 - DNA, 25 bp, Homo sapien
aggaaaacaagcatatttgcttttg

SEQ ID NO: 1383416 - DNA, 25 bp, Homo sapien
ctggaacaaaggaaaacaagcatat

SEQ ID NO: 1383417 - DNA, 25 bp, Homo sapien
agaatcccatgaatcctatgcccat

SEQ ID NO: 1383418 - DNA, 25 bp, Homo sapien
tatttgcttttgaggcagaatccca

SEQ ID NO: 1383419 - DNA, 25 bp, Homo sapien
catagctatgggagctagttatatt

SEQ ID NO: 1383420 - DNA, 25 bp, Homo sapien
aactacaatctgacagtcatcatca

SEQ ID NO: 1383421 - DNA, 25 bp, Homo sapien
tttgtaaactacaatctgacagtca

SEQ ID NO: 1383422 - DNA, 25 bp, Homo sapien
gttatcatagctatgggagctagtt

SEQ ID NO: 1383423 - DNA, 25 bp, Homo sapien
aactcagaaattattccccaggaga

SEQ ID NO: 1383424 - DNA, 25 bp, Homo sapien
caaactcagaaattattccccagga

SEQ ID NO: 1383425 - DNA, 25 bp, Homo sapien
actcagaaattattccccaggagaa

SEQ ID NO: 1383426 - DNA, 25 bp, Homo sapien
ttcaaactcagaaattattccccag

SEQ ID NO: 1383427 - DNA, 25 bp, Homo sapien
aaatgcctctattggcaattaagga

SEQ ID NO: 1383428 - DNA, 25 bp, Homo sapien
tcttgaaaatgcctctattggcaat

SEQ ID NO: 1383429 - DNA, 25 bp, Homo sapien
ctctattggcaattaaggattgaag

SEQ ID NO: 1383430 - DNA, 25 bp, Homo sapien
gcctctattggcaattaaggattga

SEQ ID NO: 1383431 - DNA, 25 bp, Homo sapien
tctagggaaggacactgctaagtta

SEQ ID NO: 1383432 - DNA, 25 bp, Homo sapien
tccttctatcatgtgatggaatgct

SEQ ID NO: 1383433 - DNA, 25 bp, Homo sapien
tgccctggccctttcatgtacttca

SEQ ID NO: 1383434 - DNA, 25 bp, Homo sapien
tcatctcatgtagtgaaggtaggaa

SEQ ID NO: 1383435 - DNA, 25 bp, Homo sapien
taactggaaaggtcccacgatgctg

SEQ ID NO: 1383436 - DNA, 25 bp, Homo sapien
tcacatcaagctgtccaaaccgagt

SEQ ID NO: 1383437 - DNA, 25 bp, Homo sapien
gctgtccaaaccgagtaactggaaa

SEQ ID NO: 1383438 - DNA, 25 bp, Homo sapien
tggaaaggtcccacgatgctgagct

SEQ ID NO: 1383439 - DNA, 25 bp, Homo sapien
cctctgtccttatccctggtctttt

SEQ ID NO: 1383440 - DNA, 25 bp, Homo sapien
tgtccttatccctggtcttttcttc

SEQ ID NO: 1383441 - DNA, 25 bp, Homo sapien
ctccgccctctgtccttatccctgg

SEQ ID NO: 1383442 - DNA, 25 bp, Homo sapien
gccctctgtccttatccctggtctt

SEQ ID NO: 1383443 - DNA, 25 bp, Homo sapien
ttttcatcttcagagctctcagaca

SEQ ID NO: 1383444 - DNA, 25 bp, Homo sapien
tcatcttcagagctctcagacaaac

SEQ ID NO: 1383445 - DNA, 25 bp, Homo sapien
tgttggtttttcatcttcagagctc

SEQ ID NO: 1383446 - DNA, 25 bp, Homo sapien
ggtttttcatcttcagagctctcag

SEQ ID NO: 1383447 - DNA, 25 bp, Homo sapien
tctgagtccttaggaacgcaatagt

SEQ ID NO: 1383448 - DNA, 25 bp, Homo sapien
agtccttaggaacgcaatagttaga

SEQ ID NO: 1383449 - DNA, 25 bp, Homo sapien
tgatccactcggatagttcttcctt

SEQ ID NO: 1383450 - DNA, 25 bp, Homo sapien
gatccactcggatagttcttccttt

SEQ ID NO: 1383451 - DNA, 25 bp, Homo sapien
atgatccactcggatagttcttcct

SEQ ID NO: 1383452 - DNA, 25 bp, Homo sapien
aggaagccctcccaggaagatccag

SEQ ID NO: 1383453 - DNA, 25 bp, Homo sapien
tggacctctcgctcattcagctcat

SEQ ID NO: 1383454 - DNA, 25 bp, Homo sapien
aagctggacctctcgctcattcagc

SEQ ID NO: 1383455 - DNA, 25 bp, Homo sapien
gacctctcgctcattcagctcattg

SEQ ID NO: 1383456 - DNA, 25 bp, Homo sapien
ctcgctcattcagctcattgatcag

SEQ ID NO: 1383457 - DNA, 25 bp, Homo sapien
gaatcactgctgacatgtgcaactg

SEQ ID NO: 1383458 - DNA, 25 bp, Homo sapien
gctgacatgtgcaactgggaagatt

SEQ ID NO: 1383459 - DNA, 25 bp, Homo sapien
gacatgtgcaactgggaagattgat

SEQ ID NO: 1383460 - DNA, 25 bp, Homo sapien
tcactgctgacatgtgcaactggga

SEQ ID NO: 1383461 - DNA, 25 bp, Homo sapien
acaatctgctttcttacccacagaa

SEQ ID NO: 1383462 - DNA, 25 bp, Homo sapien
cttaatctctccacaatctgctttc

SEQ ID NO: 1383463 - DNA, 25 bp, Homo sapien
tacccacagaattactaaagctctt

SEQ ID NO: 1383464 - DNA, 25 bp, Homo sapien
cttacccacagaattactaaagctc

SEQ ID NO: 1383465 - DNA, 25 bp, Homo sapien
cagtttcagggctaaccttaatgga

SEQ ID NO: 1383466 - DNA, 25 bp, Homo sapien
tctactgtatccagatggcaaatgg

SEQ ID NO: 1383467 - DNA, 25 bp, Homo sapien
gatagtgtccagcaacccaatgtag

SEQ ID NO: 1383468 - DNA, 25 bp, Homo sapien
caagtgcctcaagcctttgatgccc

SEQ ID NO: 1383469 - DNA, 25 bp, Homo sapien
ttatttgccactattaaaagtctga

SEQ ID NO: 1383470 - DNA, 25 bp, Homo sapien
tatttgccactattaaaagtctgaa

SEQ ID NO: 1383471 - DNA, 25 bp, Homo sapien
tttatttgccactattaaaagtctg

SEQ ID NO: 1383472 - DNA, 25 bp, Homo sapien
tttgccactattaaaagtctgaact

SEQ ID NO: 1383473 - DNA, 25 bp, Homo sapien
cacgaagctccataagttttcccaa

SEQ ID NO: 1383474 - DNA, 25 bp, Homo sapien
aaactattaccttcaccacgaagct

SEQ ID NO: 1383475 - DNA, 25 bp, Homo sapien
tcagacagattcttggactagtggt

SEQ ID NO: 1383476 - DNA, 25 bp, Homo sapien
tccaaaactattaccttcaccacga

SEQ ID NO: 1383477 - DNA, 25 bp, Homo sapien
cttattgaccacctctttccagtca

SEQ ID NO: 1383478 - DNA, 25 bp, Homo sapien
tcttccagatttggaggacctgttg

SEQ ID NO: 1383479 - DNA, 25 bp, Homo sapien
tccagatttggaggacctgttggtg

SEQ ID NO: 1383480 - DNA, 25 bp, Homo sapien
tcttcttccagatttggaggacctg

SEQ ID NO: 1383481 - DNA, 25 bp, Homo sapien
ccagatttggaggacctgttggtgc

SEQ ID NO: 1383482 - DNA, 25 bp, Homo sapien
acagatgaagcaatcattgtctgcc

SEQ ID NO: 1383483 - DNA, 25 bp, Homo sapien
gaacagatgaagcaatcattgtctg

SEQ ID NO: 1383484 - DNA, 25 bp, Homo sapien
cagaacagatgaagcaatcattgtc

SEQ ID NO: 1383485 - DNA, 25 bp, Homo sapien
acagaacagatgaagcaatcattgt

SEQ ID NO: 1383486 - DNA, 25 bp, Homo sapien
cttcatcattctgcaaatcagtaag

SEQ ID NO: 1383487 - DNA, 25 bp, Homo sapien
cattctgcaaatcagtaagactcac

SEQ ID NO: 1383488 - DNA, 25 bp, Homo sapien
ttcatcattctgcaaatcagtaaga

SEQ ID NO: 1383489 - DNA, 25 bp, Homo sapien
caacttcatcattctgcaaatcagt

SEQ ID NO: 1383490 - DNA, 25 bp, Homo sapien
aatccttcttcgaaaatggatcgac

SEQ ID NO: 1383491 - DNA, 25 bp, Homo sapien
ccaatccttcttcgaaaatggatcg

SEQ ID NO: 1383492 - DNA, 25 bp, Homo sapien
cttcttcgaaaatggatcgaccact

SEQ ID NO: 1383493 - DNA, 25 bp, Homo sapien
tccttcttcgaaaatggatcgacca

SEQ ID NO: 1383494 - DNA, 25 bp, Homo sapien
cataaggcgcttgttcttgccaacc

SEQ ID NO: 1383495 - DNA, 25 bp, Homo sapien
taaggcgcttgttcttgccaacctc

SEQ ID NO: 1383496 - DNA, 25 bp, Homo sapien
aaggcgcttgttcttgccaacctcc

SEQ ID NO: 1383497 - DNA, 25 bp, Homo sapien
tttcataaggcgcttgttcttgcca

SEQ ID NO: 1383498 - DNA, 25 bp, Homo sapien
ttcgcactgcacacttaccctcagc

SEQ ID NO: 1383499 - DNA, 25 bp, Homo sapien
ggactccaacttcgcactgcacact

SEQ ID NO: 1383500 - DNA, 25 bp, Homo sapien
tctggtcctttacatctcccttggg

SEQ ID NO: 1383501 - DNA, 25 bp, Homo sapien
aaatttatgaactggctgctcagac

SEQ ID NO: 1383502 - DNA, 25 bp, Homo sapien
ccaaatctgcgatttgagtaaacag

SEQ ID NO: 1383503 - DNA, 25 bp, Homo sapien
gaatccaaatctgcgatttgagtaa

SEQ ID NO: 1383504 - DNA, 25 bp, Homo sapien
gcgatttgagtaaacagctccattt

SEQ ID NO: 1383505 - DNA, 25 bp, Homo sapien
tctgcgatttgagtaaacagctcca

SEQ ID NO: 1383506 - DNA, 25 bp, Homo sapien
tagtggtcccttggtcagccatcaa

SEQ ID NO: 1383507 - DNA, 25 bp, Homo sapien
gcaggttgcccttttagctatagac

SEQ ID NO: 1383508 - DNA, 25 bp, Homo sapien
cacagggtttggaatcaggctagct

SEQ ID NO: 1383509 - DNA, 25 bp, Homo sapien
ccttgggactcatgtgttaaaagcc

SEQ ID NO: 1383510 - DNA, 25 bp, Homo sapien
aaaaatctacacctatcatctcaag

SEQ ID NO: 1383511 - DNA, 25 bp, Homo sapien
aaatctacacctatcatctcaagaa

SEQ ID NO: 1383512 - DNA, 25 bp, Homo sapien
acacctatcatctcaagaaaatggg

SEQ ID NO: 1383513 - DNA, 25 bp, Homo sapien
tctacacctatcatctcaagaaaat

SEQ ID NO: 1383514 - DNA, 25 bp, Homo sapien
ctccatcctcagtgagtcacaatca

SEQ ID NO: 1383515 - DNA, 25 bp, Homo sapien
ctcagtgagtcacaatcagaacatg

SEQ ID NO: 1383516 - DNA, 25 bp, Homo sapien
cctcagtgagtcacaatcagaacat

SEQ ID NO: 1383517 - DNA, 25 bp, Homo sapien
taaaaatcagattggcttcactctg

SEQ ID NO: 1383518 - DNA, 25 bp, Homo sapien
aaaaatcagattggcttcactctgc

SEQ ID NO: 1383519 - DNA, 25 bp, Homo sapien
gtaagaatatccatgaattaaaaat

SEQ ID NO: 1383520 - DNA, 25 bp, Homo sapien
ttaaaaatcagattggcttcactct

SEQ ID NO: 1383521 - DNA, 25 bp, Homo sapien
cagaactcaggtgatgggtcagtgc

SEQ ID NO: 1383522 - DNA, 25 bp, Homo sapien
gaaatctgtgaagcctctgaactgg

SEQ ID NO: 1383523 - DNA, 25 bp, Homo sapien
ggctgagcagcttctaccctaaagg

SEQ ID NO: 1383524 - DNA, 25 bp, Homo sapien
tcaattagaaatggagcagtagctc

SEQ ID NO: 1383525 - DNA, 25 bp, Homo sapien
gtttgactgctattatctcatgtac

SEQ ID NO: 1383526 - DNA, 25 bp, Homo sapien
agaaagttgtttgactgctattatc

SEQ ID NO: 1383527 - DNA, 25 bp, Homo sapien
tctcatgtactcttatgtagcttaa

SEQ ID NO: 1383528 - DNA, 25 bp, Homo sapien
tgtagcttaagatcaatagaatact

SEQ ID NO: 1383529 - DNA, 25 bp, Homo sapien
aatccatccatcatatgtggtcctg

SEQ ID NO: 1383530 - DNA, 25 bp, Homo sapien
caagcagggctaaaaatactcctct

SEQ ID NO: 1383531 - DNA, 25 bp, Homo sapien
cactcatttacggtgcagctcctta

SEQ ID NO: 1383532 - DNA, 25 bp, Homo sapien
ccaaaattgtgtggcactgtctcag

SEQ ID NO: 1383533 - DNA, 25 bp, Homo sapien
actgtgtcactgctatttacttact

SEQ ID NO: 1383534 - DNA, 25 bp, Homo sapien
tgataaaagactactggtaaggtgg

SEQ ID NO: 1383535 - DNA, 25 bp, Homo sapien
ttacttactctgtgacttgggaaaa

SEQ ID NO: 1383536 - DNA, 25 bp, Homo sapien
taaggtgggaaaagcataggcaaga

SEQ ID NO: 1383537 - DNA, 25 bp, Homo sapien
cactagctgttagttccttttctga

SEQ ID NO: 1383538 - DNA, 25 bp, Homo sapien
gaaagacatggaatatagagataga

SEQ ID NO: 1383539 - DNA, 25 bp, Homo sapien
catagcaggcactagctgttagttc

SEQ ID NO: 1383540 - DNA, 25 bp, Homo sapien
tctgaaagacatggaatatagagat

SEQ ID NO: 1383541 - DNA, 25 bp, Homo sapien
acttgcagtcattcgaaagatatac

SEQ ID NO: 1383542 - DNA, 25 bp, Homo sapien
tctgtaacttgcagtcattcgaaag

SEQ ID NO: 1383543 - DNA, 25 bp, Homo sapien
tgcagacagctcttctgtaacttgc

SEQ ID NO: 1383544 - DNA, 25 bp, Homo sapien
gaaagatatactgagcaagaatttg

SEQ ID NO: 1383545 - DNA, 25 bp, Homo sapien
tagagtggatccacgcaacaccttt

SEQ ID NO: 1383546 - DNA, 25 bp, Homo sapien
aaaagtcagtgggaacactatgcca

SEQ ID NO: 1383547 - DNA, 25 bp, Homo sapien
caaactggcagagtaatcaactagc

SEQ ID NO: 1383548 - DNA, 25 bp, Homo sapien
ttaaacaaataagactcaccgactg

SEQ ID NO: 1383549 - DNA, 25 bp, Homo sapien
tctctgtactaattttgcaactctg

SEQ ID NO: 1383550 - DNA, 25 bp, Homo sapien
gaaaatgtatgcattagaagagaca

SEQ ID NO: 1383551 - DNA, 25 bp, Homo sapien
gctaaatgcattgtgggaccctgga

SEQ ID NO: 1383552 - DNA, 25 bp, Homo sapien
tcttggactaaggaaagggacagtg

SEQ ID NO: 1383553 - DNA, 25 bp, Homo sapien
tcttggtttttgatggaaccattca

SEQ ID NO: 1383554 - DNA, 25 bp, Homo sapien
tacacctaagggagtaagtgcacag

SEQ ID NO: 1383555 - DNA, 25 bp, Homo sapien
catagcactgttatggctcattcac

SEQ ID NO: 1383556 - DNA, 25 bp, Homo sapien
tctggtttaagaatccaatgcctct

SEQ ID NO: 1383557 - DNA, 25 bp, Homo sapien
caacagttacaataggtgcgacatc

SEQ ID NO: 1383558 - DNA, 25 bp, Homo sapien
tgaataactgaaagggtatcccctc

SEQ ID NO: 1383559 - DNA, 25 bp, Homo sapien
aattcccaataagaccaggccgcga

SEQ ID NO: 1383560 - DNA, 25 bp, Homo sapien
tgagcaggccgacagtcatagacga

SEQ ID NO: 1383561 - DNA, 25 bp, Homo sapien
taggcgagggaaggcatgtactttc

SEQ ID NO: 1383562 - DNA, 25 bp, Homo sapien
aggcgagggaaggcatgtactttcc

SEQ ID NO: 1383563 - DNA, 25 bp, Homo sapien
ttaggcgagggaaggcatgtacttt

SEQ ID NO: 1383564 - DNA, 25 bp, Homo sapien
agcagctgcggatcccttatgaagt

SEQ ID NO: 1383565 - DNA, 25 bp, Homo sapien
cccttatgaagtgcccggatgaagc

SEQ ID NO: 1383566 - DNA, 25 bp, Homo sapien
gcggatcccttatgaagtgcccgga

SEQ ID NO: 1383567 - DNA, 25 bp, Homo sapien
aagtgcccggatgaagctccagcgc

SEQ ID NO: 1383568 - DNA, 25 bp, Homo sapien
acgcgctttccgcattgagtgcagc

SEQ ID NO: 1383569 - DNA, 25 bp, Homo sapien
ctttccgcattgagtgcagcgccat

SEQ ID NO: 1383570 - DNA, 25 bp, Homo sapien
tcacgcgctttccgcattgagtgca

SEQ ID NO: 1383571 - DNA, 25 bp, Homo sapien
cgctttccgcattgagtgcagcgcc

SEQ ID NO: 1383572 - DNA, 25 bp, Homo sapien
cgctatcgggcggactgcagttctt

SEQ ID NO: 1383573 - DNA, 25 bp, Homo sapien
gttcagagagccaatcccagtctcg

SEQ ID NO: 1383574 - DNA, 25 bp, Homo sapien
gtctcgcgactcctgcttgctgggc

SEQ ID NO: 1383575 - DNA, 25 bp, Homo sapien
gcggagccgtcttgtttggaatgac

SEQ ID NO: 1383576 - DNA, 25 bp, Homo sapien
agctcagtatatttaacgtatttta

SEQ ID NO: 1383577 - DNA, 25 bp, Homo sapien
tcagctcagtatatttaacgtattt

SEQ ID NO: 1383578 - DNA, 25 bp, Homo sapien
ttcagctcagtatatttaacgtatt

SEQ ID NO: 1383579 - DNA, 25 bp, Homo sapien
attcagctcagtatatttaacgtat

SEQ ID NO: 1383580 - DNA, 25 bp, Homo sapien
ccactgtgtccagcgaagctcaact

SEQ ID NO: 1383581 - DNA, 25 bp, Homo sapien
taaacatctattgtcaagtttatcc

SEQ ID NO: 1383582 - DNA, 25 bp, Homo sapien
tacaacagaagcaattagaaattga

SEQ ID NO: 1383583 - DNA, 25 bp, Homo sapien
tattttgtagtttgcagtaaccaaa

SEQ ID NO: 1383584 - DNA, 25 bp, Homo sapien
aggttaatgtaatttgctgtggtta

SEQ ID NO: 1383585 - DNA, 25 bp, Homo sapien
gttaggaaatctgctaggttaatgt

SEQ ID NO: 1383586 - DNA, 25 bp, Homo sapien
aggaaatctgctaggttaatgtaat

SEQ ID NO: 1383587 - DNA, 25 bp, Homo sapien
ggttaatgtaatttgctgtggttaa

SEQ ID NO: 1383588 - DNA, 25 bp, Homo sapien
ttcaagtccagggtgatgtccccat

SEQ ID NO: 1383589 - DNA, 25 bp, Homo sapien
gattcaagtccagggtgatgtcccc

SEQ ID NO: 1383590 - DNA, 25 bp, Homo sapien
agtccagggtgatgtccccatggct

SEQ ID NO: 1383591 - DNA, 25 bp, Homo sapien
cagggatcagattcaagtccagggt

SEQ ID NO: 1383592 - DNA, 25 bp, Homo sapien
ggatctgagcagggacggccatgag

SEQ ID NO: 1383593 - DNA, 25 bp, Homo sapien
agcagggacggccatgagcaggggg

SEQ ID NO: 1383594 - DNA, 25 bp, Homo sapien
gcagggacggccatgagcagggggc

SEQ ID NO: 1383595 - DNA, 25 bp, Homo sapien
tggccacccacatcaggagacattc

SEQ ID NO: 1383596 - DNA, 25 bp, Homo sapien
ccctcttaagagcagtcatctcagt

SEQ ID NO: 1383597 - DNA, 25 bp, Homo sapien
gcctggtgtgaacgcctcatagcat

SEQ ID NO: 1383598 - DNA, 25 bp, Homo sapien
ttttctggcccctgatttcctggcc

SEQ ID NO: 1383599 - DNA, 25 bp, Homo sapien
attctcaattccaagtttttccaag

SEQ ID NO: 1383600 - DNA, 25 bp, Homo sapien
tctcaattccaagtttttccaagaa

SEQ ID NO: 1383601 - DNA, 25 bp, Homo sapien
ttctcaattccaagtttttccaaga

SEQ ID NO: 1383602 - DNA, 25 bp, Homo sapien
gtcttgttttgatattgagttatgc

SEQ ID NO: 1383603 - DNA, 25 bp, Homo sapien
attgagttatgctcataaatgacac

SEQ ID NO: 1383604 - DNA, 25 bp, Homo sapien
tgatattgagttatgctcataaatg

SEQ ID NO: 1383605 - DNA, 25 bp, Homo sapien
ttttgatattgagttatgctcataa

SEQ ID NO: 1383606 - DNA, 25 bp, Homo sapien
gaacactaccaaatatgtcacccag

SEQ ID NO: 1383607 - DNA, 25 bp, Homo sapien
agttttggaatgaccctttactgct

SEQ ID NO: 1383608 - DNA, 25 bp, Homo sapien
cctttactgcttgcatccacctgag

SEQ ID NO: 1383609 - DNA, 25 bp, Homo sapien
gcatccacctgagaacactaccaaa

SEQ ID NO: 1383610 - DNA, 25 bp, Homo sapien
tgcttgtccagtgtaataagtgatc

SEQ ID NO: 1383611 - DNA, 25 bp, Homo sapien
atcattctgcttgtccagtgtaata

SEQ ID NO: 1383612 - DNA, 25 bp, Homo sapien
tccagtgtaataagtgatctcccca

SEQ ID NO: 1383613 - DNA, 25 bp, Homo sapien
ttcactcttgtttctgcctccatca

SEQ ID NO: 1383614 - DNA, 25 bp, Homo sapien
tgtgtctaagtgaccaatccaggtc

SEQ ID NO: 1383615 - DNA, 25 bp, Homo sapien
tgcaaaatttgtgagtccgcagctt

SEQ ID NO: 1383616 - DNA, 25 bp, Homo sapien
tagaattagcgggttgcttccccac

SEQ ID NO: 1383617 - DNA, 25 bp, Homo sapien
caattctggttgaggtgcaatgaca

SEQ ID NO: 1383618 - DNA, 25 bp, Homo sapien
cttgctcctgtggtgtccaatgagg

SEQ ID NO: 1383619 - DNA, 25 bp, Homo sapien
ttctcacgtgccaactgaagggtat

SEQ ID NO: 1383620 - DNA, 25 bp, Homo sapien
ctcttgctcctgtggtgtccaatga

SEQ ID NO: 1383621 - DNA, 25 bp, Homo sapien
ctcacgtgccaactgaagggtattt

SEQ ID NO: 1383622 - DNA, 25 bp, Homo sapien
gttgttactaattctctctaggttc

SEQ ID NO: 1383623 - DNA, 25 bp, Homo sapien
tacgtgaagaagactgtacagcaga

SEQ ID NO: 1383624 - DNA, 25 bp, Homo sapien
aaagtcccaagagtgttctgcatcc

SEQ ID NO: 1383625 - DNA, 25 bp, Homo sapien
tgaccacttacgtatcttctttgga

SEQ ID NO: 1383626 - DNA, 25 bp, Homo sapien
tgccttgtcactgggaggcttctga

SEQ ID NO: 1383627 - DNA, 25 bp, Homo sapien
gctgcccagggcacaaagaaagatg

SEQ ID NO: 1383628 - DNA, 25 bp, Homo sapien
aatccatcgtcatctgctaggagag

SEQ ID NO: 1383629 - DNA, 25 bp, Homo sapien
gcagtgatgcccacataggtgcaga

SEQ ID NO: 1383630 - DNA, 25 bp, Homo sapien
tcgattaaaacagtgaggccccaac

SEQ ID NO: 1383631 - DNA, 25 bp, Homo sapien
tatatgtagctcagattgcatgccc

SEQ ID NO: 1383632 - DNA, 25 bp, Homo sapien
tagaatatctaagagagcatccctt

SEQ ID NO: 1383633 - DNA, 25 bp, Homo sapien
tatagaggtatgcttctgcagcagc

SEQ ID NO: 1383634 - DNA, 25 bp, Homo sapien
cattggaagctaaggatctgggaaa

SEQ ID NO: 1383635 - DNA, 25 bp, Homo sapien
gttcagtgtgcaccagccctctttc

SEQ ID NO: 1383636 - DNA, 25 bp, Homo sapien
cataggaagcttctaattccaattc

SEQ ID NO: 1383637 - DNA, 25 bp, Homo sapien
ctacttaagttcagtgtgcaccagc

SEQ ID NO: 1383638 - DNA, 25 bp, Homo sapien
tccaggatcccataggaagcttcta

SEQ ID NO: 1383639 - DNA, 25 bp, Homo sapien
aggaggagggtcaattcagcatcac

SEQ ID NO: 1383640 - DNA, 25 bp, Homo sapien
ggagggtcaattcagcatcactgag

SEQ ID NO: 1383641 - DNA, 25 bp, Homo sapien
aggctaccgtgtgccacaaggcagg

SEQ ID NO: 1383642 - DNA, 25 bp, Homo sapien
gttcctgaaggctaccgtgtgccac

SEQ ID NO: 1383643 - DNA, 25 bp, Homo sapien
tgaaattcacttcttgacaccctga

SEQ ID NO: 1383644 - DNA, 25 bp, Homo sapien
ttcacttcttgacaccctgaactct

SEQ ID NO: 1383645 - DNA, 25 bp, Homo sapien
ctgagaatttggcttctcgtgtaat

SEQ ID NO: 1383646 - DNA, 25 bp, Homo sapien
tccatgctcagcatgcaaccttctg

SEQ ID NO: 1383647 - DNA, 25 bp, Homo sapien
ctgtttcccggacttgtgatgctct

SEQ ID NO: 1383648 - DNA, 25 bp, Homo sapien
cagcagagccaatcaatgtttgcat

SEQ ID NO: 1383649 - DNA, 25 bp, Homo sapien
ctgaatcctaatctcttagagccca

SEQ ID NO: 1383650 - DNA, 25 bp, Homo sapien
tgaatcctaatctcttagagcccat

SEQ ID NO: 1383651 - DNA, 25 bp, Homo sapien
taggagcatgtgtgctcacacttac

SEQ ID NO: 1383652 - DNA, 25 bp, Homo sapien
tcctgttaataggtaaacaaaagca

SEQ ID NO: 1383653 - DNA, 25 bp, Homo sapien
cattggtatccagtggtctatgggc

SEQ ID NO: 1383654 - DNA, 25 bp, Homo sapien
acattcaatacacagcacacccaga

SEQ ID NO: 1383655 - DNA, 25 bp, Homo sapien
gaggacactactgtggctcatggcc

SEQ ID NO: 1383656 - DNA, 25 bp, Homo sapien
gacctcttgacaatcttgagcgtgg

SEQ ID NO: 1383657 - DNA, 25 bp, Homo sapien
tgagtaaagagttaactagccatcc

SEQ ID NO: 1383658 - DNA, 25 bp, Homo sapien
tctactttaaggtcaggcgattagc

SEQ ID NO: 1383659 - DNA, 25 bp, Homo sapien
tcatcaaaccatgaccggtggaaac

SEQ ID NO: 1383660 - DNA, 25 bp, Homo sapien
atcaaaccatgaccggtggaaacca

SEQ ID NO: 1383661 - DNA, 25 bp, Homo sapien
atgctcatcaaaccatgaccggtgg

SEQ ID NO: 1383662 - DNA, 25 bp, Homo sapien
gctcatcaaaccatgaccggtggaa

SEQ ID NO: 1383663 - DNA, 25 bp, Homo sapien
acataaacatacagccatccatcac

SEQ ID NO: 1383664 - DNA, 25 bp, Homo sapien
gaaaccaagtaaacataaacataca

SEQ ID NO: 1383665 - DNA, 25 bp, Homo sapien
accaagtaaacataaacatacagcc

SEQ ID NO: 1383666 - DNA, 25 bp, Homo sapien
taaacatacagccatccatcactgc

SEQ ID NO: 1383667 - DNA, 25 bp, Homo sapien
ggccttacttcagtatttatttgtg

SEQ ID NO: 1383668 - DNA, 25 bp, Homo sapien
gatcccagaccagcctttctgtcag

SEQ ID NO: 1383669 - DNA, 25 bp, Homo sapien
tcctgttaggccttacttcagtatt

SEQ ID NO: 1383670 - DNA, 25 bp, Homo sapien
ttatttgtgtagctggagatcccag

SEQ ID NO: 1383671 - DNA, 25 bp, Homo sapien
ggtcactcaagagataggtgcccat

SEQ ID NO: 1383672 - DNA, 25 bp, Homo sapien
aggtcactcaagagataggtgccca

SEQ ID NO: 1383673 - DNA, 25 bp, Homo sapien
agcagtagcagtatggtaacacttc

SEQ ID NO: 1383674 - DNA, 25 bp, Homo sapien
ttaagcagtagcagtatggtaacac

SEQ ID NO: 1383675 - DNA, 25 bp, Homo sapien
cagtagcagtatggtaacacttctc

SEQ ID NO: 1383676 - DNA, 25 bp, Homo sapien
gtagcagtatggtaacacttctcaa

SEQ ID NO: 1383677 - DNA, 25 bp, Homo sapien
tcttcccagcgatgttctcaggtag

SEQ ID NO: 1383678 - DNA, 25 bp, Homo sapien
tttgcttggaactctgatgctgtga

SEQ ID NO: 1383679 - DNA, 25 bp, Homo sapien
tctcaggtagacttaattctggttg

SEQ ID NO: 1383680 - DNA, 25 bp, Homo sapien
gtcttgctggcctacagtgcccctt

SEQ ID NO: 1383681 - DNA, 25 bp, Homo sapien
aaccagtttctcacccaagccatgt

SEQ ID NO: 1383682 - DNA, 25 bp, Homo sapien
caagccatgtccaaacaggtctggt

SEQ ID NO: 1383683 - DNA, 25 bp, Homo sapien
tcacccaagccatgtccaaacaggt

SEQ ID NO: 1383684 - DNA, 25 bp, Homo sapien
tgtccaaacaggtctggtccccaga

SEQ ID NO: 1383685 - DNA, 25 bp, Homo sapien
gagctgccagttctttcaccctcat

SEQ ID NO: 1383686 - DNA, 25 bp, Homo sapien
tgagctgccagttctttcaccctca

SEQ ID NO: 1383687 - DNA, 25 bp, Homo sapien
ctgagctgccagttctttcaccctc

SEQ ID NO: 1383688 - DNA, 25 bp, Homo sapien
tcttaatgcctcacactcttccttt

SEQ ID NO: 1383689 - DNA, 25 bp, Homo sapien
ttcgagttaggccaaagcactgaac

SEQ ID NO: 1383690 - DNA, 25 bp, Homo sapien
gaacaggccctcttgcagttccctg

SEQ ID NO: 1383691 - DNA, 25 bp, Homo sapien
cttagcggcaccacttcgagttagg

SEQ ID NO: 1383692 - DNA, 25 bp, Homo sapien
acgtccattatcactctcacctgga

SEQ ID NO: 1383693 - DNA, 25 bp, Homo sapien
gttcaaatccgtaagttcacgtcca

SEQ ID NO: 1383694 - DNA, 25 bp, Homo sapien
gtagatgttattatcagtggcctgc

SEQ ID NO: 1383695 - DNA, 25 bp, Homo sapien
gatcttgactgatcttcaaaaagtt

SEQ ID NO: 1383696 - DNA, 25 bp, Homo sapien
gactggtggaatcgaatcttgacca

SEQ ID NO: 1383697 - DNA, 25 bp, Homo sapien
cttcctcatcggctctgtaaagact

SEQ ID NO: 1383698 - DNA, 25 bp, Homo sapien
gacttgcctggactggtggaatcga

SEQ ID NO: 1383699 - DNA, 25 bp, Homo sapien
ggctctgtaaagacttgcctggact

SEQ ID NO: 1383700 - DNA, 25 bp, Homo sapien
tgaatattaaaagcccgaggctgga

SEQ ID NO: 1383701 - DNA, 25 bp, Homo sapien
ttggtcatccatggcgattcaagat

SEQ ID NO: 1383702 - DNA, 25 bp, Homo sapien
aagcgaaaggaagcacaagcagtag

SEQ ID NO: 1383703 - DNA, 25 bp, Homo sapien
cccaaagtagctgcaaagaggacgt

SEQ ID NO: 1383704 - DNA, 25 bp, Homo sapien
gtacaaccgtagtgcaatggataag

SEQ ID NO: 1383705 - DNA, 25 bp, Homo sapien
ctcggaaaatcttcgtgatcatggt

SEQ ID NO: 1383706 - DNA, 25 bp, Homo sapien
tgcaaagctatagtaaatcacaggg

SEQ ID NO: 1383707 - DNA, 25 bp, Homo sapien
ataagccttgccctcggaaaatctt

SEQ ID NO: 1383708 - DNA, 25 bp, Homo sapien
agacaacctgatggatcatctcata

SEQ ID NO: 1383709 - DNA, 25 bp, Homo sapien
gacaacctgatggatcatctcataa

SEQ ID NO: 1383710 - DNA, 25 bp, Homo sapien
ctgatctctcaaggctaggactgtt

SEQ ID NO: 1383711 - DNA, 25 bp, Homo sapien
agtcctgacaacacatgcccagggt

SEQ ID NO: 1383712 - DNA, 25 bp, Homo sapien
cagatttgtactgagagttcccagc

SEQ ID NO: 1383713 - DNA, 25 bp, Homo sapien
aaagttgaggatgcacctgtgacat

SEQ ID NO: 1383714 - DNA, 25 bp, Homo sapien
agtcagaaaccctgtacggggactg

SEQ ID NO: 1383715 - DNA, 25 bp, Homo sapien
cacaagtcagaaaccctgtacgggg

SEQ ID NO: 1383716 - DNA, 25 bp, Homo sapien
agtttccacagtctgaagaaatcag

SEQ ID NO: 1383717 - DNA, 25 bp, Homo sapien
tcataggagtatactgagttgttag

SEQ ID NO: 1383718 - DNA, 25 bp, Homo sapien
cctgtttggtgatccttaaatcctt

SEQ ID NO: 1383719 - DNA, 25 bp, Homo sapien
aaatccttttacatatggaattgtg

SEQ ID NO: 1383720 - DNA, 25 bp, Homo sapien
ttgtggaccctgtatcagtttttaa

SEQ ID NO: 1383721 - DNA, 25 bp, Homo sapien
ctttctccttgcagagcttcagcaa

SEQ ID NO: 1383722 - DNA, 25 bp, Homo sapien
atgcagccaggtgaaacagggttag

SEQ ID NO: 1383723 - DNA, 25 bp, Homo sapien
agggttagggtgaacagccacagaa

SEQ ID NO: 1383724 - DNA, 25 bp, Homo sapien
ggttagggtgaacagccacagaaag

SEQ ID NO: 1383725 - DNA, 25 bp, Homo sapien
taaaccacttcttctctagcaatgc

SEQ ID NO: 1383726 - DNA, 25 bp, Homo sapien
gattggttagcgtagctcctcagtg

SEQ ID NO: 1383727 - DNA, 25 bp, Homo sapien
aattttaactacctcagcaaggcca

SEQ ID NO: 1383728 - DNA, 25 bp, Homo sapien
aagtcctaggttatggtgcctccag

SEQ ID NO: 1383729 - DNA, 25 bp, Homo sapien
catttataactttacgcgtccacgc

SEQ ID NO: 1383730 - DNA, 25 bp, Homo sapien
atttcatcagttctaggaacagagc

SEQ ID NO: 1383731 - DNA, 25 bp, Homo sapien
ggtgggatctgggtcagaaaggctt

SEQ ID NO: 1383732 - DNA, 25 bp, Homo sapien
tgggatctgggtcagaaaggctttg

SEQ ID NO: 1383733 - DNA, 25 bp, Homo sapien
tcatcagttctaggaacagagctgt

SEQ ID NO: 1383734 - DNA, 25 bp, Homo sapien
ttctgcttccacataaacaacaagg

SEQ ID NO: 1383735 - DNA, 25 bp, Homo sapien
cttctgcttccacataaacaacaag

SEQ ID NO: 1383736 - DNA, 25 bp, Homo sapien
tgtacagctgatgtgcatcatccct

SEQ ID NO: 1383737 - DNA, 25 bp, Homo sapien
tcttctgcctggaaagtccctgtct

SEQ ID NO: 1383738 - DNA, 25 bp, Homo sapien
gccagcggcagggatgcaacttgct

SEQ ID NO: 1383739 - DNA, 25 bp, Homo sapien
gctttgagtcccctgacgccagcgg

SEQ ID NO: 1383740 - DNA, 25 bp, Homo sapien
taaggtggtgccacgggaccagaaa

SEQ ID NO: 1383741 - DNA, 25 bp, Homo sapien
gaaaccataaggtggtgccacggga

SEQ ID NO: 1383742 - DNA, 25 bp, Homo sapien
accataaggtggtgccacgggacca

SEQ ID NO: 1383743 - DNA, 25 bp, Homo sapien
ctgaaaccataaggtggtgccacgg

SEQ ID NO: 1383744 - DNA, 25 bp, Homo sapien
ccactgactggatgaagcaaaagtt

SEQ ID NO: 1383745 - DNA, 25 bp, Homo sapien
actccactgactggatgaagcaaaa

SEQ ID NO: 1383746 - DNA, 25 bp, Homo sapien
ttattccgtattccaacttcaagtg

SEQ ID NO: 1383747 - DNA, 25 bp, Homo sapien
cgtattccaacttcaagtggagctc

SEQ ID NO: 1383748 - DNA, 25 bp, Homo sapien
ctgctgttcctgggcatccaaattc

SEQ ID NO: 1383749 - DNA, 25 bp, Homo sapien
gctgttcctgggcatccaaattctt

SEQ ID NO: 1383750 - DNA, 25 bp, Homo sapien
cttccccctgccctctcttccccat

SEQ ID NO: 1383751 - DNA, 25 bp, Homo sapien
gttcctgggcatccaaattcttccc

SEQ ID NO: 1383752 - DNA, 25 bp, Homo sapien
tgatgctttgacagaagtggtggct

SEQ ID NO: 1383753 - DNA, 25 bp, Homo sapien
tctggcccttggagctaagtgcatt

SEQ ID NO: 1383754 - DNA, 25 bp, Homo sapien
ggtgagagtggcaaagcaaaccagc

SEQ ID NO: 1383755 - DNA, 25 bp, Homo sapien
ctggcaatgatgtgctgaaggctct

SEQ ID NO: 1383756 - DNA, 25 bp, Homo sapien
tctgtgctttcctttattcccaagg

SEQ ID NO: 1383757 - DNA, 25 bp, Homo sapien
aagcccattgcaaatgttcaatagc

SEQ ID NO: 1383758 - DNA, 25 bp, Homo sapien
catcccctatctttgtctctgtgct

SEQ ID NO: 1383759 - DNA, 25 bp, Homo sapien
gttcaatagctttcatcccctatct

SEQ ID NO: 1383760 - DNA, 25 bp, Homo sapien
agaaaggaaagtgcttccagaggat

SEQ ID NO: 1383761 - DNA, 25 bp, Homo sapien
gaaaagcatgcaaactaacaaaaca

SEQ ID NO: 1383762 - DNA, 25 bp, Homo sapien
ggctggacccaggactaatacttcc

SEQ ID NO: 1383763 - DNA, 25 bp, Homo sapien
atttctgctcccagtttagtggtcc

SEQ ID NO: 1383764 - DNA, 25 bp, Homo sapien
gggatttatagggtccttgcatttg

SEQ ID NO: 1383765 - DNA, 25 bp, Homo sapien
tatagggtccttgcatttgggcaag

SEQ ID NO: 1383766 - DNA, 25 bp, Homo sapien
tttatagggtccttgcatttgggca

SEQ ID NO: 1383767 - DNA, 25 bp, Homo sapien
ccattggggatttatagggtccttg

SEQ ID NO: 1383768 - DNA, 25 bp, Homo sapien
tattctggagagacctgtgatcgtc

SEQ ID NO: 1383769 - DNA, 25 bp, Homo sapien
gcagtgatggtgtgcaccatgatca

SEQ ID NO: 1383770 - DNA, 25 bp, Homo sapien
ccatgatcacgagtccttccacgat

SEQ ID NO: 1383771 - DNA, 25 bp, Homo sapien
tgtgatcgtcatgccacagcttccc

SEQ ID NO: 1383772 - DNA, 25 bp, Homo sapien
ggtagtgaagacactgatggactcc

SEQ ID NO: 1383773 - DNA, 25 bp, Homo sapien
tgaagacactgatggactccacaat

SEQ ID NO: 1383774 - DNA, 25 bp, Homo sapien
agtgaagacactgatggactccaca

SEQ ID NO: 1383775 - DNA, 25 bp, Homo sapien
aagacactgatggactccacaatgt

SEQ ID NO: 1383776 - DNA, 25 bp, Homo sapien
taggatctagctttccattaatgac

SEQ ID NO: 1383777 - DNA, 25 bp, Homo sapien
ttttggtaggatctagctttccatt

SEQ ID NO: 1383778 - DNA, 25 bp, Homo sapien
ggtaggatctagctttccattaatg

SEQ ID NO: 1383779 - DNA, 25 bp, Homo sapien
ttggtaggatctagctttccattaa

SEQ ID NO: 1383780 - DNA, 25 bp, Homo sapien
ttgacagtgccatggaattcgccat

SEQ ID NO: 1383781 - DNA, 25 bp, Homo sapien
cttgacagtgccatggaattcgcca

SEQ ID NO: 1383782 - DNA, 25 bp, Homo sapien
gccttgacagtgccatggaattcgc

SEQ ID NO: 1383783 - DNA, 25 bp, Homo sapien
gacagtgccatggaattcgccatgg

SEQ ID NO: 1383784 - DNA, 25 bp, Homo sapien
gatctggcatataagccactttaca

SEQ ID NO: 1383785 - DNA, 25 bp, Homo sapien
caagaaggctcagcgagatctggca

SEQ ID NO: 1383786 - DNA, 25 bp, Homo sapien
gaaggccccaagtgtcctaggacag

SEQ ID NO: 1383787 - DNA, 25 bp, Homo sapien
tcttttattcctgatgtactggatt

SEQ ID NO: 1383788 - DNA, 25 bp, Homo sapien
gtccattttcttcaccagggtggct

SEQ ID NO: 1383789 - DNA, 25 bp, Homo sapien
tcaccagggtggctctgcaaggtac

SEQ ID NO: 1383790 - DNA, 25 bp, Homo sapien
ttcaccagggtggctctgcaaggta

SEQ ID NO: 1383791 - DNA, 25 bp, Homo sapien
cttttgggtccattttcttcaccag

SEQ ID NO: 1383792 - DNA, 25 bp, Homo sapien
tctctgcttagagggtgcccagctc

SEQ ID NO: 1383793 - DNA, 25 bp, Homo sapien
gcttttacgtcaacccaggccagta

SEQ ID NO: 1383794 - DNA, 25 bp, Homo sapien
caggccagtacacggcattctctct

SEQ ID NO: 1383795 - DNA, 25 bp, Homo sapien
ctactttgtgcctcaacaattttcc

SEQ ID NO: 1383796 - DNA, 25 bp, Homo sapien
tgaggggatcctctgatgtctgctt

SEQ ID NO: 1383797 - DNA, 25 bp, Homo sapien
agcttcccgttcagcccatggatct

SEQ ID NO: 1383798 - DNA, 25 bp, Homo sapien
ttcagcccatggatctcattgccca

SEQ ID NO: 1383799 - DNA, 25 bp, Homo sapien
gaccaacatattggtggtgggtaca

SEQ ID NO: 1383800 - DNA, 25 bp, Homo sapien
gacggcgccagtagatgcaaagatg

SEQ ID NO: 1383801 - DNA, 25 bp, Homo sapien
tgacggcgccagtagatgcaaagat

SEQ ID NO: 1383802 - DNA, 25 bp, Homo sapien
cggcgccagtagatgcaaagatgag

SEQ ID NO: 1383803 - DNA, 25 bp, Homo sapien
cttgacggcgccagtagatgcaaag

SEQ ID NO: 1383804 - DNA, 25 bp, Homo sapien
tagcagcgatagcgctgactgtggt

SEQ ID NO: 1383805 - DNA, 25 bp, Homo sapien
cttctgggtagcagcgatagcgctg

SEQ ID NO: 1383806 - DNA, 25 bp, Homo sapien
ctgggtagcagcgatagcgctgact

SEQ ID NO: 1383807 - DNA, 25 bp, Homo sapien
cagcgatagcgctgactgtggtcat

SEQ ID NO: 1383808 - DNA, 25 bp, Homo sapien
gaatcatcttggctagaggtgctat

SEQ ID NO: 1383809 - DNA, 25 bp, Homo sapien
tcttggctagaggtgctatacagtt

SEQ ID NO: 1383810 - DNA, 25 bp, Homo sapien
tcatacccattataaacatgggggt

SEQ ID NO: 1383811 - DNA, 25 bp, Homo sapien
ctagaggtgctatacagttggtggt

SEQ ID NO: 1383812 - DNA, 25 bp, Homo sapien
cttgcaagtgatctccagccttttc

SEQ ID NO: 1383813 - DNA, 25 bp, Homo sapien
agtgaagacaccagtggactctatg

SEQ ID NO: 1383814 - DNA, 25 bp, Homo sapien
gaagacaccagtggactctatgatg

SEQ ID NO: 1383815 - DNA, 25 bp, Homo sapien
agacaccagtggactctatgatgta

SEQ ID NO: 1383816 - DNA, 25 bp, Homo sapien
tgagctctatgaaggggtgattgat

SEQ ID NO: 1383817 - DNA, 25 bp, Homo sapien
gggtgattgatggtgagaatattca

SEQ ID NO: 1383818 - DNA, 25 bp, Homo sapien
tcataggtggactcatactggaaca

SEQ ID NO: 1383819 - DNA, 25 bp, Homo sapien
gatctagcttttggatgatggtggt

SEQ ID NO: 1383820 - DNA, 25 bp, Homo sapien
tgttatggtaattgagtttctctga

SEQ ID NO: 1383821 - DNA, 25 bp, Homo sapien
agatgagtaattgttacttggttac

SEQ ID NO: 1383822 - DNA, 25 bp, Homo sapien
ttcctcatgtgagggtcggggtcct

SEQ ID NO: 1383823 - DNA, 25 bp, Homo sapien
tctctgatatttacctgaagggtgc

SEQ ID NO: 1383824 - DNA, 25 bp, Homo sapien
gctgagtacttgtgggagacattac

SEQ ID NO: 1383825 - DNA, 25 bp, Homo sapien
gaaatcaccagctgagtacttgtgg

SEQ ID NO: 1383826 - DNA, 25 bp, Homo sapien
catctctttgatcctgaaatcacca

SEQ ID NO: 1383827 - DNA, 25 bp, Homo sapien
tacttgtgggagacattacagattg

SEQ ID NO: 1383828 - DNA, 25 bp, Homo sapien
tattctttgaaggccatgtgggcaa

SEQ ID NO: 1383829 - DNA, 25 bp, Homo sapien
ctttgaaggccatgtgggcaatgag

SEQ ID NO: 1383830 - DNA, 25 bp, Homo sapien
ttattctttgaaggccatgtgggca

SEQ ID NO: 1383831 - DNA, 25 bp, Homo sapien
ttctttgaaggccatgtgggcaatg

SEQ ID NO: 1383832 - DNA, 25 bp, Homo sapien
tcaccaccctgttgttgtagtcaaa

SEQ ID NO: 1383833 - DNA, 25 bp, Homo sapien
catcgaaggtggaaaagtgcatgat

SEQ ID NO: 1383834 - DNA, 25 bp, Homo sapien
ccagtcccagcatcgaaggtggaaa

SEQ ID NO: 1383835 - DNA, 25 bp, Homo sapien
tcccagcatcgaaggtggaaaagtg

SEQ ID NO: 1383836 - DNA, 25 bp, Homo sapien
ggtgctcattgtagcccaggatgcc

SEQ ID NO: 1383837 - DNA, 25 bp, Homo sapien
tggtgctcattgtagcccaggatgc

SEQ ID NO: 1383838 - DNA, 25 bp, Homo sapien
ctggtgctcattgtagcccaggatg

SEQ ID NO: 1383839 - DNA, 25 bp, Homo sapien
tgagggagccttccaattctgcttc

SEQ ID NO: 1383840 - DNA, 25 bp, Homo sapien
gagggagccttccaattctgcttca

SEQ ID NO: 1383841 - DNA, 25 bp, Homo sapien
cttgagggagccttccaattctgct

SEQ ID NO: 1383842 - DNA, 25 bp, Homo sapien
agggagccttccaattctgcttcac

SEQ ID NO: 1383843 - DNA, 25 bp, Homo sapien
ttggcaggtattttctgatggcagg

SEQ ID NO: 1383844 - DNA, 25 bp, Homo sapien
tgacagcagatgtagtgatgatgtt

SEQ ID NO: 1383845 - DNA, 25 bp, Homo sapien
tttggcaggtattttctgatggcag

SEQ ID NO: 1383846 - DNA, 25 bp, Homo sapien
gcagtgacagcagatgtagtgatga

SEQ ID NO: 1383847 - DNA, 25 bp, Homo sapien
ctggagaaccccatgtccattatgc

SEQ ID NO: 1383848 - DNA, 25 bp, Homo sapien
tatgccagtttcctgaaggagctat

SEQ ID NO: 1383849 - DNA, 25 bp, Homo sapien
gaaccccatgtccattatgccagtt

SEQ ID NO: 1383850 - DNA, 25 bp, Homo sapien
tgccagtttcctgaaggagctatcc

SEQ ID NO: 1383851 - DNA, 25 bp, Homo sapien
tggtgatacaggatgtattgctgat

SEQ ID NO: 1383852 - DNA, 25 bp, Homo sapien
cacaaacgtggggatgtcagcagcg

SEQ ID NO: 1383853 - DNA, 25 bp, Homo sapien
catgagtcttcccataacaacaaag

SEQ ID NO: 1383854 - DNA, 25 bp, Homo sapien
ctatggtcatgagtcttcccataac

SEQ ID NO: 1383855 - DNA, 25 bp, Homo sapien
ggtggtgaagacaccagtggactcc

SEQ ID NO: 1383856 - DNA, 25 bp, Homo sapien
ccatggtggtgaagacaccagtgga

SEQ ID NO: 1383857 - DNA, 25 bp, Homo sapien
tggtgaagacaccagtggactccat

SEQ ID NO: 1383858 - DNA, 25 bp, Homo sapien
atggtggtgaagacaccagtggact

SEQ ID NO: 1383859 - DNA, 25 bp, Homo sapien
ggtgtactcagtgccagcattacca

SEQ ID NO: 1383860 - DNA, 25 bp, Homo sapien
tactcagtgccagcattaccatatt

SEQ ID NO: 1383861 - DNA, 25 bp, Homo sapien
tgtactcagtgccagcattaccata

SEQ ID NO: 1383862 - DNA, 25 bp, Homo sapien
tcagtgccagcattaccatatttga

SEQ ID NO: 1383863 - DNA, 25 bp, Homo sapien
aagatggtgatggaatttccattga

SEQ ID NO: 1383864 - DNA, 25 bp, Homo sapien
tggtgatggaatttccattgatgac

SEQ ID NO: 1383865 - DNA, 25 bp, Homo sapien
gatggtgatggaatttccattgatg

SEQ ID NO: 1383866 - DNA, 25 bp, Homo sapien
ctagaagatggtgatggaatttcca

SEQ ID NO: 1383867 - DNA, 25 bp, Homo sapien
tctcagccttgggagtgccatggaa

SEQ ID NO: 1383868 - DNA, 25 bp, Homo sapien
gcttcccgttctcagccttgggagt

SEQ ID NO: 1383869 - DNA, 25 bp, Homo sapien
ccgttctcagccttgggagtgccat

SEQ ID NO: 1383870 - DNA, 25 bp, Homo sapien
agccttgggagtgccatggaatttg

SEQ ID NO: 1383871 - DNA, 25 bp, Homo sapien
agggcatgaagttaaggtcaatgaa

SEQ ID NO: 1383872 - DNA, 25 bp, Homo sapien
gtagggcatgaagttaaggtcaatg

SEQ ID NO: 1383873 - DNA, 25 bp, Homo sapien
tagggcatgaagttaaggtcaatga

SEQ ID NO: 1383874 - DNA, 25 bp, Homo sapien
tgtagggcatgaagttaaggtcaat

SEQ ID NO: 1383875 - DNA, 25 bp, Homo sapien
gtgaccaggagcctaaatatggcca

SEQ ID NO: 1383876 - DNA, 25 bp, Homo sapien
agcccttgtgaccaggagcctaaat

SEQ ID NO: 1383877 - DNA, 25 bp, Homo sapien
ttgtgaccaggagcctaaatatggc

SEQ ID NO: 1383878 - DNA, 25 bp, Homo sapien
ccttgtgaccaggagcctaaatatg

SEQ ID NO: 1383879 - DNA, 25 bp, Homo sapien
ttggctcactgccaggaaccagaga

SEQ ID NO: 1383880 - DNA, 25 bp, Homo sapien
ccagctatttcatgtattttaatag

SEQ ID NO: 1383881 - DNA, 25 bp, Homo sapien
agaccccagcctccatttatcctcc

SEQ ID NO: 1383882 - DNA, 25 bp, Homo sapien
tcctgcgctccagtgatccatccat

SEQ ID NO: 1383883 - DNA, 25 bp, Homo sapien
gaggccctgaacaacaatgggatcc

SEQ ID NO: 1383884 - DNA, 25 bp, Homo sapien
tctgctagtataaacgaggccctga

SEQ ID NO: 1383885 - DNA, 25 bp, Homo sapien
aggccccaagcatccgaggacagtt

SEQ ID NO: 1383886 - DNA, 25 bp, Homo sapien
tatgttggcaatgtggcctgggccc

SEQ ID NO: 1383887 - DNA, 25 bp, Homo sapien
ggtcgttttgactactagagctcca

SEQ ID NO: 1383888 - DNA, 25 bp, Homo sapien
tcattggcccaacaagaaggtttct

SEQ ID NO: 1383889 - DNA, 25 bp, Homo sapien
gctgttaccaaatctcagtagctga

SEQ ID NO: 1383890 - DNA, 25 bp, Homo sapien
catgtcatcaaaacctgcgcagtca

SEQ ID NO: 1383891 - DNA, 25 bp, Homo sapien
gaatggcattatggagagccccgcg

SEQ ID NO: 1383892 - DNA, 25 bp, Homo sapien
ttttggatccctcctgcaagcgagc

SEQ ID NO: 1383893 - DNA, 25 bp, Homo sapien
cgatgtgtggactgtcgccataagt

SEQ ID NO: 1383894 - DNA, 25 bp, Homo sapien
ggttcatgcgcgtctcagatatggg

SEQ ID NO: 1383895 - DNA, 25 bp, Homo sapien
tttcagctttgacggtgtcatggaa

SEQ ID NO: 1383896 - DNA, 25 bp, Homo sapien
cgttttcagctttgacggtgtcatg

SEQ ID NO: 1383897 - DNA, 25 bp, Homo sapien
cccgttttcagctttgacggtgtca

SEQ ID NO: 1383898 - DNA, 25 bp, Homo sapien
tcccgttttcagctttgacggtgtc

SEQ ID NO: 1383899 - DNA, 25 bp, Homo sapien
gaccacgtagtcgaggtcaatgatg

SEQ ID NO: 1383900 - DNA, 25 bp, Homo sapien
atggggtcattgatggcaacagtat

SEQ ID NO: 1383901 - DNA, 25 bp, Homo sapien
tagaccacgtagtcgaggtcaatga

SEQ ID NO: 1383902 - DNA, 25 bp, Homo sapien
ccacgtagtcgaggtcaatgatggg

SEQ ID NO: 1383903 - DNA, 25 bp, Homo sapien
cccaatatagccaaaccaattgact

SEQ ID NO: 1383904 - DNA, 25 bp, Homo sapien
tagccaaaccaattgactccaggct

SEQ ID NO: 1383905 - DNA, 25 bp, Homo sapien
caatatagccaaaccaattgactcc

SEQ ID NO: 1383906 - DNA, 25 bp, Homo sapien
tatagccaaaccaattgactccagg

SEQ ID NO: 1383907 - DNA, 25 bp, Homo sapien
gctaagggaatgagtgaccctctcc

SEQ ID NO: 1383908 - DNA, 25 bp, Homo sapien
cgatggggattgttaaggtgcactc

SEQ ID NO: 1383909 - DNA, 25 bp, Homo sapien
gaccctctcctgaaggcgatgggga

SEQ ID NO: 1383910 - DNA, 25 bp, Homo sapien
tccagaactctcaactgctaaggga

SEQ ID NO: 1383911 - DNA, 25 bp, Homo sapien
ccatgtgagccatgaggttccccac

SEQ ID NO: 1383912 - DNA, 25 bp, Homo sapien
ggccatgtgagccatgaggttcccc

SEQ ID NO: 1383913 - DNA, 25 bp, Homo sapien
gaggccatgtgagccatgaggttcc

SEQ ID NO: 1383914 - DNA, 25 bp, Homo sapien
gctggtggtctagaggtcttactcc

SEQ ID NO: 1383915 - DNA, 25 bp, Homo sapien
ttccaggatccaaggtagaagagtg

SEQ ID NO: 1383916 - DNA, 25 bp, Homo sapien
tgtcagtggttaagctggagacaac

SEQ ID NO: 1383917 - DNA, 25 bp, Homo sapien
ggtgtcagtggttaagctggagaca

SEQ ID NO: 1383918 - DNA, 25 bp, Homo sapien
tccaggatccaaggtagaagagtgg

SEQ ID NO: 1383919 - DNA, 25 bp, Homo sapien
cagggtggcaatgatagcattgact

SEQ ID NO: 1383920 - DNA, 25 bp, Homo sapien
ccaacatgatggtggtaggtacatg

SEQ ID NO: 1383921 - DNA, 25 bp, Homo sapien
ccttccaccatatcagagttgtcat

SEQ ID NO: 1383922 - DNA, 25 bp, Homo sapien
tatactcgcttacagccttgacagt

SEQ ID NO: 1383923 - DNA, 25 bp, Homo sapien
ggatctagcttttggaggatggtgg

SEQ ID NO: 1383924 - DNA, 25 bp, Homo sapien
ggtgggatttctatttatgaaaagc

SEQ ID NO: 1383925 - DNA, 25 bp, Homo sapien
atggtggtgggatttctatttatga

SEQ ID NO: 1383926 - DNA, 25 bp, Homo sapien
tatttatgaaaagcttcctgttctc

SEQ ID NO: 1383927 - DNA, 25 bp, Homo sapien
gaaatacacttacaactacgcaaca

SEQ ID NO: 1383928 - DNA, 25 bp, Homo sapien
tgaataaactaatgggagctatcca

SEQ ID NO: 1383929 - DNA, 25 bp, Homo sapien
tacagtgagacaccacttcttaccc

SEQ ID NO: 1383930 - DNA, 25 bp, Homo sapien
actcacgcattgttgatgggacatg

SEQ ID NO: 1383931 - DNA, 25 bp, Homo sapien
gggatctgtaaggtgcactctagca

SEQ ID NO: 1383932 - DNA, 25 bp, Homo sapien
acagcatagggaatgtctggcccca

SEQ ID NO: 1383933 - DNA, 25 bp, Homo sapien
tcagaaagtcaattagaggttgcct

SEQ ID NO: 1383934 - DNA, 25 bp, Homo sapien
tagcatgtgctatagcaggcaaagg

SEQ ID NO: 1383935 - DNA, 25 bp, Homo sapien
gtttcatgaggttgtccaggctgat

SEQ ID NO: 1383936 - DNA, 25 bp, Homo sapien
ggcatgcaaaggcatgatctctgct

SEQ ID NO: 1383937 - DNA, 25 bp, Homo sapien
tatgggcatgcaccaatacgcctgg

SEQ ID NO: 1383938 - DNA, 25 bp, Homo sapien
gccttccaagcagccaggactatgg

SEQ ID NO: 1383939 - DNA, 25 bp, Homo sapien
ttactgagatcttcatggcacaact

SEQ ID NO: 1383940 - DNA, 25 bp, Homo sapien
ggagtagtccagtttaagacaacac

SEQ ID NO: 1383941 - DNA, 25 bp, Homo sapien
aaatgaattgtgtgttggactttcc

SEQ ID NO: 1383942 - DNA, 25 bp, Homo sapien
ctctgtacaaggtgctaaggatcaa

SEQ ID NO: 1383943 - DNA, 25 bp, Homo sapien
ccagtcccaggattgaaggtggaag

SEQ ID NO: 1383944 - DNA, 25 bp, Homo sapien
aatgagcttaacaaagtggtcactg

SEQ ID NO: 1383945 - DNA, 25 bp, Homo sapien
gagcttaacaaagtggtcactgagg

SEQ ID NO: 1383946 - DNA, 25 bp, Homo sapien
caatgccagtcccaggattgaaggt

SEQ ID NO: 1383947 - DNA, 25 bp, Homo sapien
gtgttgcacaggatgcccttatggg

SEQ ID NO: 1383948 - DNA, 25 bp, Homo sapien
cccttatgggggccttctgatgctg

SEQ ID NO: 1383949 - DNA, 25 bp, Homo sapien
gctggaggaggcaacctggttctca

SEQ ID NO: 1383950 - DNA, 25 bp, Homo sapien
ctggttctcagtgttgcacaggatg

SEQ ID NO: 1383951 - DNA, 25 bp, Homo sapien
agctcattgatatacttgcccacag

SEQ ID NO: 1383952 - DNA, 25 bp, Homo sapien
tgagtccttccactaaatcggagtt

SEQ ID NO: 1383953 - DNA, 25 bp, Homo sapien
catatttggcatgcttttcctgagg

SEQ ID NO: 1383954 - DNA, 25 bp, Homo sapien
tctgggtggcaatcatagcatttac

SEQ ID NO: 1383955 - DNA, 25 bp, Homo sapien
agatgatgatccatttaactggccc

SEQ ID NO: 1383956 - DNA, 25 bp, Homo sapien
tgaagacgacactggagtctatgat

SEQ ID NO: 1383957 - DNA, 25 bp, Homo sapien
tctatgatgtacttggtgccagcat

SEQ ID NO: 1383958 - DNA, 25 bp, Homo sapien
gacactggagtctatgatgtacttg

SEQ ID NO: 1383959 - DNA, 25 bp, Homo sapien
tggagtctatgatgtacttggtgcc

SEQ ID NO: 1383960 - DNA, 25 bp, Homo sapien
tgggatttagcttttggaagatcgt

SEQ ID NO: 1383961 - DNA, 25 bp, Homo sapien
gtgggatttagcttttggaagatcg

SEQ ID NO: 1383962 - DNA, 25 bp, Homo sapien
gaatcatactggaatacatagacca

SEQ ID NO: 1383963 - DNA, 25 bp, Homo sapien
cacgggtggaatcatactggaatac

SEQ ID NO: 1383964 - DNA, 25 bp, Homo sapien
tggaatcatactggaatacatagac

SEQ ID NO: 1383965 - DNA, 25 bp, Homo sapien
ggtggaatcatactggaatacatag

SEQ ID NO: 1383966 - DNA, 25 bp, Homo sapien
ggaatttgtagactatgaaggggtc

SEQ ID NO: 1383967 - DNA, 25 bp, Homo sapien
tggaatttgtagactatgaaggggt

SEQ ID NO: 1383968 - DNA, 25 bp, Homo sapien
taagtagccttggtaaccaggcaac

SEQ ID NO: 1383969 - DNA, 25 bp, Homo sapien
ccttggtaaccaggcaaccaatggg

SEQ ID NO: 1383970 - DNA, 25 bp, Homo sapien
tagccttggtaaccaggcaaccaat

SEQ ID NO: 1383971 - DNA, 25 bp, Homo sapien
cagttataagtagccttggtaacca

SEQ ID NO: 1383972 - DNA, 25 bp, Homo sapien
ccagggcctgtagctatcggagaac

SEQ ID NO: 1383973 - DNA, 25 bp, Homo sapien
caggtcccaagtagcagttgaatgt

SEQ ID NO: 1383974 - DNA, 25 bp, Homo sapien
cacctgggtggttcagatagtgctc

SEQ ID NO: 1383975 - DNA, 25 bp, Homo sapien
tgaagcattggtagtcaggtcccaa

SEQ ID NO: 1383976 - DNA, 25 bp, Homo sapien
cagttctcaggtatacgctcaagga

SEQ ID NO: 1383977 - DNA, 25 bp, Homo sapien
tcaaactaaacacgagctctgggca

SEQ ID NO: 1383978 - DNA, 25 bp, Homo sapien
gagtcattggagcatacaaccacaa

SEQ ID NO: 1383979 - DNA, 25 bp, Homo sapien
gaaagtagctgcctaccagggtaaa

SEQ ID NO: 1383980 - DNA, 25 bp, Homo sapien
cttggacaaggccttcagaccggaa

SEQ ID NO: 1383981 - DNA, 25 bp, Homo sapien
tttggattggccatgacaggctgga

SEQ ID NO: 1383982 - DNA, 25 bp, Homo sapien
taagtaaacttgattcatgggtgtg

SEQ ID NO: 1383983 - DNA, 25 bp, Homo sapien
tatcatccgcctcttggtggaggag

SEQ ID NO: 1383984 - DNA, 25 bp, Homo sapien
gaacttgagaggcaaccactttgga

SEQ ID NO: 1383985 - DNA, 25 bp, Homo sapien
ttaatgtgtagcagacctcagacca

SEQ ID NO: 1383986 - DNA, 25 bp, Homo sapien
ggacaccatttacctgaagacctca

SEQ ID NO: 1383987 - DNA, 25 bp, Homo sapien
gaaaaggagtcatatccaactggac

SEQ ID NO: 1383988 - DNA, 25 bp, Homo sapien
tatgttaatgccaagtaccacggga

SEQ ID NO: 1383989 - DNA, 25 bp, Homo sapien
cagctcttgtaaggcgtgcgcacga

SEQ ID NO: 1383990 - DNA, 25 bp, Homo sapien
gaaaatgacagatctccgacgggca

SEQ ID NO: 1383991 - DNA, 25 bp, Homo sapien
caaacgcctcgcagtgttgtggcca

SEQ ID NO: 1383992 - DNA, 25 bp, Homo sapien
tgaacgctggccactgaagtaggaa

SEQ ID NO: 1383993 - DNA, 25 bp, Homo sapien
gagtctgtcaaatccctggtgtagc

SEQ ID NO: 1383994 - DNA, 25 bp, Homo sapien
taggaatacccttctcacgagcctg

SEQ ID NO: 1383995 - DNA, 25 bp, Homo sapien
cctattgctgacctatcgtgggtaa

SEQ ID NO: 1383996 - DNA, 25 bp, Homo sapien
tgtgtggcaaagaagaatgacatgg

SEQ ID NO: 1383997 - DNA, 25 bp, Homo sapien
gaaagaaatactgggtgtggcacac

SEQ ID NO: 1383998 - DNA, 25 bp, Homo sapien
ggagtctcgcatcccaaaaaagtga

SEQ ID NO: 1383999 - DNA, 25 bp, Homo sapien
tatatttgatgcagacgagaccagg

SEQ ID NO: 1384000 - DNA, 25 bp, Homo sapien
cctaattaggcgacaaagaccagct

SEQ ID NO: 1384001 - DNA, 25 bp, Homo sapien
gcaagtatagcaccgggaaagacca

SEQ ID NO: 1384002 - DNA, 25 bp, Homo sapien
caattcttccgtggagaggaggcaa

SEQ ID NO: 1384003 - DNA, 25 bp, Homo sapien
catcgcggcctaccctagtctattg

SEQ ID NO: 1384004 - DNA, 25 bp, Homo sapien
gtatttaaggaagtcatcaccccaa

SEQ ID NO: 1384005 - DNA, 25 bp, Homo sapien
gcttctcgcactggccacagcggaa

SEQ ID NO: 1384006 - DNA, 25 bp, Homo sapien
tgctgcgcgaggtgcgttttatagc

SEQ ID NO: 1384007 - DNA, 25 bp, Homo sapien
tatagcggaagcctttgccgcagcc

SEQ ID NO: 1384008 - DNA, 25 bp, Homo sapien
gagaagtcgctgaagcgcttctcgc

SEQ ID NO: 1384009 - DNA, 25 bp, Homo sapien
acgcgctggtgcttcaccaagtccg

SEQ ID NO: 1384010 - DNA, 25 bp, Homo sapien
ttcaccaagtccgagcgccagctga

SEQ ID NO: 1384011 - DNA, 25 bp, Homo sapien
agtccgagcgccagctgaagcgctt

SEQ ID NO: 1384012 - DNA, 25 bp, Homo sapien
tcgccacagccgtgcggcttctcgc

SEQ ID NO: 1384013 - DNA, 25 bp, Homo sapien
gtggttggccaggtgcgaacggcgc

SEQ ID NO: 1384014 - DNA, 25 bp, Homo sapien
ggttggccaggtgcgaacggcgcac

SEQ ID NO: 1384015 - DNA, 25 bp, Homo sapien
ttggccaggtgcgaacggcgcacga

SEQ ID NO: 1384016 - DNA, 25 bp, Homo sapien
ccaggtgcgaacggcgcacgaagcc

SEQ ID NO: 1384017 - DNA, 25 bp, Homo sapien
caacagatgcgagctgaggctgaag

SEQ ID NO: 1384018 - DNA, 25 bp, Homo sapien
tgcgcgcgccggtggctcaacagat

SEQ ID NO: 1384019 - DNA, 25 bp, Homo sapien
tggctcaacagatgcgagctgaggc

SEQ ID NO: 1384020 - DNA, 25 bp, Homo sapien
gccggtggctcaacagatgcgagct

SEQ ID NO: 1384021 - DNA, 25 bp, Homo sapien
aggtcggcgcgccagctgaagctct

SEQ ID NO: 1384022 - DNA, 25 bp, Homo sapien
gtgcttgagcaggtcggcgcgccag

SEQ ID NO: 1384023 - DNA, 25 bp, Homo sapien
cagtcggcgcacaggttgggccgct

SEQ ID NO: 1384024 - DNA, 25 bp, Homo sapien
tggtcaggtaggtgttgcggctgaa

SEQ ID NO: 1384025 - DNA, 25 bp, Homo sapien
cgggcttgtcacctcggtgccgact

SEQ ID NO: 1384026 - DNA, 25 bp, Homo sapien
gagccggtggaagcggcggtgggcg

SEQ ID NO: 1384027 - DNA, 25 bp, Homo sapien
tgggcgcgtccatgatgctggccac

SEQ ID NO: 1384028 - DNA, 25 bp, Homo sapien
tcagccaggcggtgaatgcgctggt

SEQ ID NO: 1384029 - DNA, 25 bp, Homo sapien
ccgggatatgctgtcagactcagac

SEQ ID NO: 1384030 - DNA, 25 bp, Homo sapien
ggacagaaacgccttcttcctcact

SEQ ID NO: 1384031 - DNA, 25 bp, Homo sapien
tgggaacatcgccatgtcagctaca

SEQ ID NO: 1384032 - DNA, 25 bp, Homo sapien
gctacaccggattggtcatcctctt

SEQ ID NO: 1384033 - DNA, 25 bp, Homo sapien
ttggtctctggctgcgtatccccaa

SEQ ID NO: 1384034 - DNA, 25 bp, Homo sapien
tctctggctgcgtatccccaagcag

SEQ ID NO: 1384035 - DNA, 25 bp, Homo sapien
tggtctctggctgcgtatccccaag

SEQ ID NO: 1384036 - DNA, 25 bp, Homo sapien
ctggctgcgtatccccaagcagagg

SEQ ID NO: 1384037 - DNA, 25 bp, Homo sapien
tagaggagctagaagtaagtgtaac

SEQ ID NO: 1384038 - DNA, 25 bp, Homo sapien
gctagttatgattctagaggagcta

SEQ ID NO: 1384039 - DNA, 25 bp, Homo sapien
agagaatgctgtcgctagttatgat

SEQ ID NO: 1384040 - DNA, 25 bp, Homo sapien
gattctagaggagctagaagtaagt

SEQ ID NO: 1384041 - DNA, 25 bp, Homo sapien
tgggttggagcccatctccggctcc

SEQ ID NO: 1384042 - DNA, 25 bp, Homo sapien
tgtcttctgagtcctggtgtgcaca

SEQ ID NO: 1384043 - DNA, 25 bp, Homo sapien
gagtcctcaaaatcagaacccatcc

SEQ ID NO: 1384044 - DNA, 25 bp, Homo sapien
catgtggattagagcccatttctct

SEQ ID NO: 1384045 - DNA, 25 bp, Homo sapien
aaaagagcaagggaggtgaccagga

SEQ ID NO: 1384046 - DNA, 25 bp, Homo sapien
ctatgcactgcagcgggtccatctc

SEQ ID NO: 1384047 - DNA, 25 bp, Homo sapien
caggcggcgtctctctcaggtagag

SEQ ID NO: 1384048 - DNA, 25 bp, Homo sapien
tttgactccagtaactgagaggtaa

SEQ ID NO: 1384049 - DNA, 25 bp, Homo sapien
tcagggtgacccgtttgacgtgtaa

SEQ ID NO: 1384050 - DNA, 25 bp, Homo sapien
gatcaggaatagcacaaatgccctt

SEQ ID NO: 1384051 - DNA, 25 bp, Homo sapien
caccagtttgaggctccttccaatc

SEQ ID NO: 1384052 - DNA, 25 bp, Homo sapien
caggaatagcacaaatgcccttggg

SEQ ID NO: 1384053 - DNA, 25 bp, Homo sapien
gcaccagtttgaggctccttccaat

SEQ ID NO: 1384054 - DNA, 25 bp, Homo sapien
tgtccttttccggaggcagcagcac

SEQ ID NO: 1384055 - DNA, 25 bp, Homo sapien
tcaaagcatgggttacagtctgtcc

SEQ ID NO: 1384056 - DNA, 25 bp, Homo sapien
taagctcgggagtgcaagatcagcc

SEQ ID NO: 1384057 - DNA, 25 bp, Homo sapien
tcagaaacccctaagtgacttggtc

SEQ ID NO: 1384058 - DNA, 25 bp, Homo sapien
tcagcccagggttcatgtagtaagg

SEQ ID NO: 1384059 - DNA, 25 bp, Homo sapien
aacatgcccactacaaggacaggga

SEQ ID NO: 1384060 - DNA, 25 bp, Homo sapien
taccagacgctcagtcttgagggag

SEQ ID NO: 1384061 - DNA, 25 bp, Homo sapien
tacaggttaaggacaaacatgccca

SEQ ID NO: 1384062 - DNA, 25 bp, Homo sapien
ctggaggcacgaacagacaaggcaa

SEQ ID NO: 1384063 - DNA, 25 bp, Homo sapien
tgggcttggtttctccgagggtctc

SEQ ID NO: 1384064 - DNA, 25 bp, Homo sapien
actaggacccaagatgacctgccgc

SEQ ID NO: 1384065 - DNA, 25 bp, Homo sapien
ggcacacatttcattcactaggacc

SEQ ID NO: 1384066 - DNA, 25 bp, Homo sapien
agctagggcaccgagcgccccggcc

SEQ ID NO: 1384067 - DNA, 25 bp, Homo sapien
gcgcggcgaggagctagggcaccga

SEQ ID NO: 1384068 - DNA, 25 bp, Homo sapien
ggcgaggagctagggcaccgagcgc

SEQ ID NO: 1384069 - DNA, 25 bp, Homo sapien
ctggcgcggcgaggagctagggcac

SEQ ID NO: 1384070 - DNA, 25 bp, Homo sapien
cggcggctgcagcggccgctgggtg

SEQ ID NO: 1384071 - DNA, 25 bp, Homo sapien
cggctgcagcggccgctgggtggcc

SEQ ID NO: 1384072 - DNA, 25 bp, Homo sapien
gcggctgcagcggccgctgggtggc

SEQ ID NO: 1384073 - DNA, 25 bp, Homo sapien
ggcggctgcagcggccgctgggtgg

SEQ ID NO: 1384074 - DNA, 25 bp, Homo sapien
gggacctggtctatcaagtagtgca

SEQ ID NO: 1384075 - DNA, 25 bp, Homo sapien
ccactgtgttagaatcagggacctg

SEQ ID NO: 1384076 - DNA, 25 bp, Homo sapien
acttcaaaagctgcccggttcctct

SEQ ID NO: 1384077 - DNA, 25 bp, Homo sapien
ggctgatttgactcctcagtcagct

SEQ ID NO: 1384078 - DNA, 25 bp, Homo sapien
tgtgagtaatgaggctgcttgccaa

SEQ ID NO: 1384079 - DNA, 25 bp, Homo sapien
cagggttgtgagtaatgaggctgct

SEQ ID NO: 1384080 - DNA, 25 bp, Homo sapien
ggttgtgagtaatgaggctgcttgc

SEQ ID NO: 1384081 - DNA, 25 bp, Homo sapien
gaagcagggttgtgagtaatgaggc

SEQ ID NO: 1384082 - DNA, 25 bp, Homo sapien
cttccaggaatgctagcccccagtg

SEQ ID NO: 1384083 - DNA, 25 bp, Homo sapien
catgtggcccattccactttgttga

SEQ ID NO: 1384084 - DNA, 25 bp, Homo sapien
gctcagctcataaagccttccagga

SEQ ID NO: 1384085 - DNA, 25 bp, Homo sapien
tagtctatccttcttaaggctcagc

SEQ ID NO: 1384086 - DNA, 25 bp, Homo sapien
caactgcggcctgaaagtatgagaa

SEQ ID NO: 1384087 - DNA, 25 bp, Homo sapien
aggctctggagcctggttagaaaag

SEQ ID NO: 1384088 - DNA, 25 bp, Homo sapien
gagggcaactgcggcctgaaagtat

SEQ ID NO: 1384089 - DNA, 25 bp, Homo sapien
agcctggttagaaaaggatgctgcc

SEQ ID NO: 1384090 - DNA, 25 bp, Homo sapien
cttttgcagcaagtacctctgctct

SEQ ID NO: 1384091 - DNA, 25 bp, Homo sapien
tgctctccataggtctttctgattc

SEQ ID NO: 1384092 - DNA, 25 bp, Homo sapien
gctctccataggtctttctgattca

SEQ ID NO: 1384093 - DNA, 25 bp, Homo sapien
gcagcaagtacctctgctctccata

SEQ ID NO: 1384094 - DNA, 25 bp, Homo sapien
aaccattttgtagccttgcctgttt

SEQ ID NO: 1384095 - DNA, 25 bp, Homo sapien
ctgcagacagggagcccttaaacca

SEQ ID NO: 1384096 - DNA, 25 bp, Homo sapien
cattttgtagccttgcctgttttct

SEQ ID NO: 1384097 - DNA, 25 bp, Homo sapien
ttaaaccattttgtagccttgcctg

SEQ ID NO: 1384098 - DNA, 25 bp, Homo sapien
gcaagacacttcatgagcagcccct

SEQ ID NO: 1384099 - DNA, 25 bp, Homo sapien
aactcctcctcagggcaagacactt

SEQ ID NO: 1384100 - DNA, 25 bp, Homo sapien
tcctcagggcaagacacttcatgag

SEQ ID NO: 1384101 - DNA, 25 bp, Homo sapien
cagggcaagacacttcatgagcagc

SEQ ID NO: 1384102 - DNA, 25 bp, Homo sapien
tggtatcccactggcatcccccaca

SEQ ID NO: 1384103 - DNA, 25 bp, Homo sapien
tcctggtatcccactggcatccccc

SEQ ID NO: 1384104 - DNA, 25 bp, Homo sapien
ctcctggtatcccactggcatcccc

SEQ ID NO: 1384105 - DNA, 25 bp, Homo sapien
tcccactggcatcccccacagccat

SEQ ID NO: 1384106 - DNA, 25 bp, Homo sapien
tatttccgtccaatcaaaaggagac

SEQ ID NO: 1384107 - DNA, 25 bp, Homo sapien
gaattcccttcaacgtctagcacag

SEQ ID NO: 1384108 - DNA, 25 bp, Homo sapien
ggtctctagggcaacctccatggaa

SEQ ID NO: 1384109 - DNA, 25 bp, Homo sapien
taggtacttctactcacagcggccg

SEQ ID NO: 1384110 - DNA, 25 bp, Homo sapien
taagatgatgactctgggtggtccc

SEQ ID NO: 1384111 - DNA, 25 bp, Homo sapien
tgaagaaggatggacccttaaggcc

SEQ ID NO: 1384112 - DNA, 25 bp, Homo sapien
caagggagtgattggtagagcctct

SEQ ID NO: 1384113 - DNA, 25 bp, Homo sapien
tctggaacttgatgctagagagaca

SEQ ID NO: 1384114 - DNA, 25 bp, Homo sapien
taacagcggcaaggaatgaccaaga

SEQ ID NO: 1384115 - DNA, 25 bp, Homo sapien
aaaacttgttaacctttgcgctgtg

SEQ ID NO: 1384116 - DNA, 25 bp, Homo sapien
tctgacccacaaggtctagcaggct

SEQ ID NO: 1384117 - DNA, 25 bp, Homo sapien
tattctgggttccaagaaacgcagg

SEQ ID NO: 1384118 - DNA, 25 bp, Homo sapien
gaaggcaacagctgatctgcatgca

SEQ ID NO: 1384119 - DNA, 25 bp, Homo sapien
tgctagcatacgtttcccaggaagc

SEQ ID NO: 1384120 - DNA, 25 bp, Homo sapien
agatggctcctcactctacagggct

SEQ ID NO: 1384121 - DNA, 25 bp, Homo sapien
tgaagggcccgctagagatggctcc

SEQ ID NO: 1384122 - DNA, 25 bp, Homo sapien
catctgcctgtgataggagagcagg

SEQ ID NO: 1384123 - DNA, 25 bp, Homo sapien
gacacctgagggatctgtgcccaat

SEQ ID NO: 1384124 - DNA, 25 bp, Homo sapien
tacctgcttcttgcccgaggtgtgg

SEQ ID NO: 1384125 - DNA, 25 bp, Homo sapien
tgcagagacctgtagagctccacca

SEQ ID NO: 1384126 - DNA, 25 bp, Homo sapien
catactttcggcgatgctgctcgtc

SEQ ID NO: 1384127 - DNA, 25 bp, Homo sapien
cctgggaaaaggctgtttgtgtcac

SEQ ID NO: 1384128 - DNA, 25 bp, Homo sapien
ggacgccgggcatactttcggcgat

SEQ ID NO: 1384129 - DNA, 25 bp, Homo sapien
gctgctcgtccactcgctccaggta

SEQ ID NO: 1384130 - DNA, 25 bp, Homo sapien
ccttatggtagaattgctctctttg

SEQ ID NO: 1384131 - DNA, 25 bp, Homo sapien
gatgtgctggacaccaacttgtcca

SEQ ID NO: 1384132 - DNA, 25 bp, Homo sapien
tatttctgtgaactcctcaggagac

SEQ ID NO: 1384133 - DNA, 25 bp, Homo sapien
cacactttcgggaggctaggcgttt

SEQ ID NO: 1384134 - DNA, 25 bp, Homo sapien
caggttctgtgggaggttacaccct

SEQ ID NO: 1384135 - DNA, 25 bp, Homo sapien
cattatcactattgccaatcacgag

SEQ ID NO: 1384136 - DNA, 25 bp, Homo sapien
ttacaccctggaggaacgtgtggtg

SEQ ID NO: 1384137 - DNA, 25 bp, Homo sapien
aatcacgagttcaacagagagccag

SEQ ID NO: 1384138 - DNA, 25 bp, Homo sapien
gcagcatcctgggatactcgaaatg

SEQ ID NO: 1384139 - DNA, 25 bp, Homo sapien
ttgctgctaaaccagagccataaga

SEQ ID NO: 1384140 - DNA, 25 bp, Homo sapien
cataagagaaggcaccaatcctgga

SEQ ID NO: 1384141 - DNA, 25 bp, Homo sapien
cctgggatactcgaaatgaaaagaa

SEQ ID NO: 1384142 - DNA, 25 bp, Homo sapien
cacccaagctatagtgcagtagctc

SEQ ID NO: 1384143 - DNA, 25 bp, Homo sapien
tcccacctcaggattcaggatcctg

SEQ ID NO: 1384144 - DNA, 25 bp, Homo sapien
tcacccaagctatagtgcagtagct

SEQ ID NO: 1384145 - DNA, 25 bp, Homo sapien
tcctcccacctcaggattcaggatc

SEQ ID NO: 1384146 - DNA, 25 bp, Homo sapien
aactttgttgaccctgcagcccacg

SEQ ID NO: 1384147 - DNA, 25 bp, Homo sapien
ccaactttgttgaccctgcagccca

SEQ ID NO: 1384148 - DNA, 25 bp, Homo sapien
ctttgttgaccctgcagcccacggg

SEQ ID NO: 1384149 - DNA, 25 bp, Homo sapien
acccaactttgttgaccctgcagcc

SEQ ID NO: 1384150 - DNA, 25 bp, Homo sapien
ggacagaagcgaggccaggcacccg

SEQ ID NO: 1384151 - DNA, 25 bp, Homo sapien
acagaagcgaggccaggcacccgta

SEQ ID NO: 1384152 - DNA, 25 bp, Homo sapien
cagaagcgaggccaggcacccgtac

SEQ ID NO: 1384153 - DNA, 25 bp, Homo sapien
gacagaagcgaggccaggcacccgt

SEQ ID NO: 1384154 - DNA, 25 bp, Homo sapien
aagtgctttatccaggtccttgttg

SEQ ID NO: 1384155 - DNA, 25 bp, Homo sapien
gaagccttggttttcttgtcgaaca

SEQ ID NO: 1384156 - DNA, 25 bp, Homo sapien
tgttcccattgtgagtggagaggta

SEQ ID NO: 1384157 - DNA, 25 bp, Homo sapien
tcctgagaggcctttagaagtgctt

SEQ ID NO: 1384158 - DNA, 25 bp, Homo sapien
gtgctggtggtctagacttaaggca

SEQ ID NO: 1384159 - DNA, 25 bp, Homo sapien
catgaagaagcctccttcttgctca

SEQ ID NO: 1384160 - DNA, 25 bp, Homo sapien
aaatcccccatgtttccctgcaata

SEQ ID NO: 1384161 - DNA, 25 bp, Homo sapien
tctgctggaggattgccatttgtcc

SEQ ID NO: 1384162 - DNA, 25 bp, Homo sapien
gaccatcttgcaaaagggtgtatga

SEQ ID NO: 1384163 - DNA, 25 bp, Homo sapien
tcatgtactgtaaatcgtcaagggt

SEQ ID NO: 1384164 - DNA, 25 bp, Homo sapien
tgaacatcaggcgagccagagactt

SEQ ID NO: 1384165 - DNA, 25 bp, Homo sapien
tccagccccttatataagctggttt

SEQ ID NO: 1384166 - DNA, 25 bp, Homo sapien
aactgtgccgagtttctccaggcct

SEQ ID NO: 1384167 - DNA, 25 bp, Homo sapien
actgtgccgagtttctccaggcctc

SEQ ID NO: 1384168 - DNA, 25 bp, Homo sapien
tggggcatgaggggcgagccattta

SEQ ID NO: 1384169 - DNA, 25 bp, Homo sapien
catgaggggcgagccatttagatat

SEQ ID NO: 1384170 - DNA, 25 bp, Homo sapien
catctcatggcctttgggtacaaac

SEQ ID NO: 1384171 - DNA, 25 bp, Homo sapien
caaacccttggcctatgtaaataga

SEQ ID NO: 1384172 - DNA, 25 bp, Homo sapien
aaccactgtcgaatgtgactgccca

SEQ ID NO: 1384173 - DNA, 25 bp, Homo sapien
gattttagcatagacccagggaaga

SEQ ID NO: 1384174 - DNA, 25 bp, Homo sapien
ccaaggcccgcaagtagcactggat

SEQ ID NO: 1384175 - DNA, 25 bp, Homo sapien
atgtgtaacatcgatccaaggcccg

SEQ ID NO: 1384176 - DNA, 25 bp, Homo sapien
aaagcttcccatccactattgggta

SEQ ID NO: 1384177 - DNA, 25 bp, Homo sapien
ctccgaggccaaatttggtttgtag

SEQ ID NO: 1384178 - DNA, 25 bp, Homo sapien
gtttcagagactacacaatgcagcc

SEQ ID NO: 1384179 - DNA, 25 bp, Homo sapien
caatgcagcctaccttgagcacaaa

SEQ ID NO: 1384180 - DNA, 25 bp, Homo sapien
agatgagagaaccatataaaggagg

SEQ ID NO: 1384181 - DNA, 25 bp, Homo sapien
tggtcattatctgtgtcccatgccc

SEQ ID NO: 1384182 - DNA, 25 bp, Homo sapien
catcatctgcaccactcattccatg

SEQ ID NO: 1384183 - DNA, 25 bp, Homo sapien
gcatcgttatcccaatgcctgatga

SEQ ID NO: 1384184 - DNA, 25 bp, Homo sapien
cctgatgatgcaagagaggaagcct

SEQ ID NO: 1384185 - DNA, 25 bp, Homo sapien
agagaggaagcctcgcggattcccc

SEQ ID NO: 1384186 - DNA, 25 bp, Homo sapien
ggccttgggcccaatcagcatagcc

SEQ ID NO: 1384187 - DNA, 25 bp, Homo sapien
gccttgggcccaatcagcatagcca

SEQ ID NO: 1384188 - DNA, 25 bp, Homo sapien
ccttgggcccaatcagcatagccac

SEQ ID NO: 1384189 - DNA, 25 bp, Homo sapien
gggccttgggcccaatcagcatagc

SEQ ID NO: 1384190 - DNA, 25 bp, Homo sapien
ggatagacggcaatgtctccacaga

SEQ ID NO: 1384191 - DNA, 25 bp, Homo sapien
taccactgggatagacggcaatgtc

SEQ ID NO: 1384192 - DNA, 25 bp, Homo sapien
ctgtgggacgagcattaccactggg

SEQ ID NO: 1384193 - DNA, 25 bp, Homo sapien
gagcattaccactgggatagacggc

SEQ ID NO: 1384194 - DNA, 25 bp, Homo sapien
tactgtttcccttgaatcatttctt

SEQ ID NO: 1384195 - DNA, 25 bp, Homo sapien
gtactgtttcccttgaatcatttct

SEQ ID NO: 1384196 - DNA, 25 bp, Homo sapien
tgtactgtttcccttgaatcatttc

SEQ ID NO: 1384197 - DNA, 25 bp, Homo sapien
actgtttcccttgaatcatttcttg

SEQ ID NO: 1384198 - DNA, 25 bp, Homo sapien
ttcccgaacatctaaacttgcatac

SEQ ID NO: 1384199 - DNA, 25 bp, Homo sapien
cccgaacatctaaacttgcatacat

SEQ ID NO: 1384200 - DNA, 25 bp, Homo sapien
agtctatcttgtggttttctgggcc

SEQ ID NO: 1384201 - DNA, 25 bp, Homo sapien
tttttcccgaacatctaaacttgca

SEQ ID NO: 1384202 - DNA, 25 bp, Homo sapien
gaatatattgtccttccttcactag

SEQ ID NO: 1384203 - DNA, 25 bp, Homo sapien
aatatattgtccttccttcactaga

SEQ ID NO: 1384204 - DNA, 25 bp, Homo sapien
ctaagtggttattgtgggatgatag

SEQ ID NO: 1384205 - DNA, 25 bp, Homo sapien
tggttattgtgggatgatagcagca

SEQ ID NO: 1384206 - DNA, 25 bp, Homo sapien
gtaatattcagcctccaattccagc

SEQ ID NO: 1384207 - DNA, 25 bp, Homo sapien
aaactggtaatattcagcctccaat

SEQ ID NO: 1384208 - DNA, 25 bp, Homo sapien
aatattcagcctccaattccagcac

SEQ ID NO: 1384209 - DNA, 25 bp, Homo sapien
tggtaatattcagcctccaattcca

SEQ ID NO: 1384210 - DNA, 25 bp, Homo sapien
ggaggcagtaccaccgtagcaggca

SEQ ID NO: 1384211 - DNA, 25 bp, Homo sapien
ggcagtaccaccgtagcaggcattg

SEQ ID NO: 1384212 - DNA, 25 bp, Homo sapien
cagtaccaccgtagcaggcattggt

SEQ ID NO: 1384213 - DNA, 25 bp, Homo sapien
gcagcattgaagagggaggcagtac

SEQ ID NO: 1384214 - DNA, 25 bp, Homo sapien
aatatcagtattgcctgaatcctgg

SEQ ID NO: 1384215 - DNA, 25 bp, Homo sapien
ctcaatatcagtattgcctgaatcc

SEQ ID NO: 1384216 - DNA, 25 bp, Homo sapien
agtattgcctgaatcctggaagagt

SEQ ID NO: 1384217 - DNA, 25 bp, Homo sapien
tcagtattgcctgaatcctggaaga

SEQ ID NO: 1384218 - DNA, 25 bp, Homo sapien
tgtatgcgctccatcagccgttgca

SEQ ID NO: 1384219 - DNA, 25 bp, Homo sapien
tgtcaatgatggtctcagtgcctac

SEQ ID NO: 1384220 - DNA, 25 bp, Homo sapien
ggtccacatattgggctgggaagta

SEQ ID NO: 1384221 - DNA, 25 bp, Homo sapien
ggatgcccacgtcctttggccaagt

SEQ ID NO: 1384222 - DNA, 25 bp, Homo sapien
tgcaccgctcttgtcagttgcagaa

SEQ ID NO: 1384223 - DNA, 25 bp, Homo sapien
tgtgagggaggtttcctgcaccgct

SEQ ID NO: 1384224 - DNA, 25 bp, Homo sapien
tcactggagtcaacagacgctgcat

SEQ ID NO: 1384225 - DNA, 25 bp, Homo sapien
agcaggcgagcaggtgtgagggagg

SEQ ID NO: 1384226 - DNA, 25 bp, Homo sapien
ctccagaggagcaagcagaaaccca

SEQ ID NO: 1384227 - DNA, 25 bp, Homo sapien
gaaacccagcagttcagaaacccag

SEQ ID NO: 1384228 - DNA, 25 bp, Homo sapien
aggagcaagcagaaacccagcagtt

SEQ ID NO: 1384229 - DNA, 25 bp, Homo sapien
ccagcagttcagaaacccagcagaa

SEQ ID NO: 1384230 - DNA, 25 bp, Homo sapien
tgctctgtacagctccctggaagtt

SEQ ID NO: 1384231 - DNA, 25 bp, Homo sapien
tgctgtcagctgttagctgcatccc

SEQ ID NO: 1384232 - DNA, 25 bp, Homo sapien
taaacgtgtgcgcatctctgctctg

SEQ ID NO: 1384233 - DNA, 25 bp, Homo sapien
ccttggtggtcaggccaatcaggga

SEQ ID NO: 1384234 - DNA, 25 bp, Homo sapien
cacgctcagccagtattccctgaag

SEQ ID NO: 1384235 - DNA, 25 bp, Homo sapien
caaggtgtttccatgcttgggatct

SEQ ID NO: 1384236 - DNA, 25 bp, Homo sapien
gtttgcagaatcagccatgggctga

SEQ ID NO: 1384237 - DNA, 25 bp, Homo sapien
gagggagacatcttgtcaaggtgtt

SEQ ID NO: 1384238 - DNA, 25 bp, Homo sapien
tggagctgcttaggcagatgatcca

SEQ ID NO: 1384239 - DNA, 25 bp, Homo sapien
ggagctgcttaggcagatgatccat

SEQ ID NO: 1384240 - DNA, 25 bp, Homo sapien
tctggagctgcttaggcagatgatc

SEQ ID NO: 1384241 - DNA, 25 bp, Homo sapien
ctggagctgcttaggcagatgatcc

SEQ ID NO: 1384242 - DNA, 25 bp, Homo sapien
aaatgactgtcctcaagtaggatac

SEQ ID NO: 1384243 - DNA, 25 bp, Homo sapien
tggttccaagatagcctgaaatgac

SEQ ID NO: 1384244 - DNA, 25 bp, Homo sapien
cctgcttatatgtctgtactgtctg

SEQ ID NO: 1384245 - DNA, 25 bp, Homo sapien
tgacttagggaagtacacgatccag

SEQ ID NO: 1384246 - DNA, 25 bp, Homo sapien
ttccacattcaccattactgaactg

SEQ ID NO: 1384247 - DNA, 25 bp, Homo sapien
cacattcaccattactgaactggaa

SEQ ID NO: 1384248 - DNA, 25 bp, Homo sapien
tggtcttatttcacttttccacatt

SEQ ID NO: 1384249 - DNA, 25 bp, Homo sapien
tcttggtcttatttcacttttccac

SEQ ID NO: 1384250 - DNA, 25 bp, Homo sapien
acacaatggtttattaaaggaatgt

SEQ ID NO: 1384251 - DNA, 25 bp, Homo sapien
tgtacacaatggtttattaaaggaa

SEQ ID NO: 1384252 - DNA, 25 bp, Homo sapien
atgtacacaatggtttattaaagga

SEQ ID NO: 1384253 - DNA, 25 bp, Homo sapien
tacacaatggtttattaaaggaatg

SEQ ID NO: 1384254 - DNA, 25 bp, Homo sapien
aggaaaaacaagcaggagttgagtg

SEQ ID NO: 1384255 - DNA, 25 bp, Homo sapien
ggaaaaacaagcaggagttgagtgg

SEQ ID NO: 1384256 - DNA, 25 bp, Homo sapien
tagactgctcgagacagccagagac

SEQ ID NO: 1384257 - DNA, 25 bp, Homo sapien
tagccaggctagcagaaaggaagag

SEQ ID NO: 1384258 - DNA, 25 bp, Homo sapien
tgtttcataggctggagatgcactc

SEQ ID NO: 1384259 - DNA, 25 bp, Homo sapien
ttagagctagaagccactactgggc

SEQ ID NO: 1384260 - DNA, 25 bp, Homo sapien
gcttgttgcattcgttgctgctcca

SEQ ID NO: 1384261 - DNA, 25 bp, Homo sapien
tgttggcgcttgttgcattcgttgc

SEQ ID NO: 1384262 - DNA, 25 bp, Homo sapien
gaagtgttggcgcttgttgcattcg

SEQ ID NO: 1384263 - DNA, 25 bp, Homo sapien
tgcattcgttgctgctccaagttaa

SEQ ID NO: 1384264 - DNA, 25 bp, Homo sapien
tttttgaggtgagatccaactattt

SEQ ID NO: 1384265 - DNA, 25 bp, Homo sapien
aagtatttttgaggtgagatccaac

SEQ ID NO: 1384266 - DNA, 25 bp, Homo sapien
gagagagcccaaggcggaggtggcc

SEQ ID NO: 1384267 - DNA, 25 bp, Homo sapien
aggagagagcccaaggcggaggtgg

SEQ ID NO: 1384268 - DNA, 25 bp, Homo sapien
ctggctaggtgtctgcttgggccct

SEQ ID NO: 1384269 - DNA, 25 bp, Homo sapien
tgcagcagagcgaggagttgttccc

SEQ ID NO: 1384270 - DNA, 25 bp, Homo sapien
tgttccctggctaggtgtctgcttg

SEQ ID NO: 1384271 - DNA, 25 bp, Homo sapien
aggagttgttccctggctaggtgtc

SEQ ID NO: 1384272 - DNA, 25 bp, Homo sapien
gccctgttcccagtgcgtgtgggtg

SEQ ID NO: 1384273 - DNA, 25 bp, Homo sapien
cctgttcccagtgcgtgtgggtggg

SEQ ID NO: 1384274 - DNA, 25 bp, Homo sapien
tggccctgttcccagtgcgtgtggg

SEQ ID NO: 1384275 - DNA, 25 bp, Homo sapien
tctggccctgttcccagtgcgtgtg

SEQ ID NO: 1384276 - DNA, 25 bp, Homo sapien
cagccacgagctgggtaagtaacca

SEQ ID NO: 1384277 - DNA, 25 bp, Homo sapien
gagagcttcaggcttctggttccca

SEQ ID NO: 1384278 - DNA, 25 bp, Homo sapien
aacccaaagacgtgctgttctcaga

SEQ ID NO: 1384279 - DNA, 25 bp, Homo sapien
gatcatcgactcacagggaaaggac

SEQ ID NO: 1384280 - DNA, 25 bp, Homo sapien
agtgcttgttcccacccatggactt

SEQ ID NO: 1384281 - DNA, 25 bp, Homo sapien
tattggagctcatctcagcacagtg

SEQ ID NO: 1384282 - DNA, 25 bp, Homo sapien
ccaggatctgtacagatacatggcc

SEQ ID NO: 1384283 - DNA, 25 bp, Homo sapien
tgttcccacccatggacttgccaga

SEQ ID NO: 1384284 - DNA, 25 bp, Homo sapien
cgtgaaagaggttgaacgaatgtgt

SEQ ID NO: 1384285 - DNA, 25 bp, Homo sapien
atattcgtgaaagaggttgaacgaa

SEQ ID NO: 1384286 - DNA, 25 bp, Homo sapien
aagaggttgaacgaatgtgtggtat

SEQ ID NO: 1384287 - DNA, 25 bp, Homo sapien
tgaacgaatgtgtggtatcttcagc

SEQ ID NO: 1384288 - DNA, 25 bp, Homo sapien
acttatgtactctgctatggtgctg

SEQ ID NO: 1384289 - DNA, 25 bp, Homo sapien
tgccaggtgggctccgtttccgtaa

SEQ ID NO: 1384290 - DNA, 25 bp, Homo sapien
ttctgtgggtcgtgcaggccaatcc

SEQ ID NO: 1384291 - DNA, 25 bp, Homo sapien
aatccatatcggctggcttctctga

SEQ ID NO: 1384292 - DNA, 25 bp, Homo sapien
gaagtatgtacgtgatagcctccct

SEQ ID NO: 1384293 - DNA, 25 bp, Homo sapien
tctcaagctcaaggtcggatgtcca

SEQ ID NO: 1384294 - DNA, 25 bp, Homo sapien
ttctcaggcccatgaggcatgccag

SEQ ID NO: 1384295 - DNA, 25 bp, Homo sapien
tctataccagccacagaagatcctg

SEQ ID NO: 1384296 - DNA, 25 bp, Homo sapien
ggtcctctttggcttcgctgtccta

SEQ ID NO: 1384297 - DNA, 25 bp, Homo sapien
agccaagggcggtagcaacactggc

SEQ ID NO: 1384298 - DNA, 25 bp, Homo sapien
aacactggcgaggaatcagggagcc

SEQ ID NO: 1384299 - DNA, 25 bp, Homo sapien
tttggcttcgctgtcctagcaccct

SEQ ID NO: 1384300 - DNA, 25 bp, Homo sapien
agaaagtctattcctctccacgagc

SEQ ID NO: 1384301 - DNA, 25 bp, Homo sapien
tcagtgtcaatcctgtgggctgttc

SEQ ID NO: 1384302 - DNA, 25 bp, Homo sapien
cctgaattggcatctaccatgtggc

SEQ ID NO: 1384303 - DNA, 25 bp, Homo sapien
cctgacaagtccatgaggtaaaaag

SEQ ID NO: 1384304 - DNA, 25 bp, Homo sapien
gtaagaccgcataggcccagatcat

SEQ ID NO: 1384305 - DNA, 25 bp, Homo sapien
gatcatgccaaatgtacctatatgg

SEQ ID NO: 1384306 - DNA, 25 bp, Homo sapien
cactccccatatgtggctgagataa

SEQ ID NO: 1384307 - DNA, 25 bp, Homo sapien
catgtggtaggtgcttcgttcttgt

SEQ ID NO: 1384308 - DNA, 25 bp, Homo sapien
agcggctccaaggtgtctgctccag

SEQ ID NO: 1384309 - DNA, 25 bp, Homo sapien
ggtaaatcttgtacagaaactccat

SEQ ID NO: 1384310 - DNA, 25 bp, Homo sapien
tgtagagcagcggaaaagtttccac

SEQ ID NO: 1384311 - DNA, 25 bp, Homo sapien
cctttactgacagtgagcttgctga

SEQ ID NO: 1384312 - DNA, 25 bp, Homo sapien
tgtagcccatctagggtctggcata

SEQ ID NO: 1384313 - DNA, 25 bp, Homo sapien
gggctctggctggtcctttgctcta

SEQ ID NO: 1384314 - DNA, 25 bp, Homo sapien
tgtatccgtatgtgcttgtagccca

SEQ ID NO: 1384315 - DNA, 25 bp, Homo sapien
gtgcccaggaaggacacttgatcct

SEQ ID NO: 1384316 - DNA, 25 bp, Homo sapien
ctcggcatcagaccagttcctcagc

SEQ ID NO: 1384317 - DNA, 25 bp, Homo sapien
tagcaattggacttgtggtaaaacc

SEQ ID NO: 1384318 - DNA, 25 bp, Homo sapien
gcacagctgggtctcatgatgatat

SEQ ID NO: 1384319 - DNA, 25 bp, Homo sapien
agcttcctgaagtaaccatagcaat

SEQ ID NO: 1384320 - DNA, 25 bp, Homo sapien
cagagccttgcactctcttgcatgg

SEQ ID NO: 1384321 - DNA, 25 bp, Homo sapien
tcctgagcagcctgcgatagttcag

SEQ ID NO: 1384322 - DNA, 25 bp, Homo sapien
tgcatggctgagttccacaggtcct

SEQ ID NO: 1384323 - DNA, 25 bp, Homo sapien
tgtagggttgaagacaaagagccat

SEQ ID NO: 1384324 - DNA, 25 bp, Homo sapien
agctcagcaataggagcagccgcat

SEQ ID NO: 1384325 - DNA, 25 bp, Homo sapien
cagctcagcaataggagcagccgca

SEQ ID NO: 1384326 - DNA, 25 bp, Homo sapien
aggcagctcagcaataggagcagcc

SEQ ID NO: 1384327 - DNA, 25 bp, Homo sapien
gcagctcagcaataggagcagccgc

SEQ ID NO: 1384328 - DNA, 25 bp, Homo sapien
gctagtgcaaggatctcagagacct

SEQ ID NO: 1384329 - DNA, 25 bp, Homo sapien
taccctgaggatgtagctagtgcaa

SEQ ID NO: 1384330 - DNA, 25 bp, Homo sapien
actagcgcttctttgaaactcctgg

SEQ ID NO: 1384331 - DNA, 25 bp, Homo sapien
atctcagagaccttactagcgcttc

SEQ ID NO: 1384332 - DNA, 25 bp, Homo sapien
cagtgccagagatctaactatagca

SEQ ID NO: 1384333 - DNA, 25 bp, Homo sapien
cagtttcatagtctgcatggaggca

SEQ ID NO: 1384334 - DNA, 25 bp, Homo sapien
gaggcaatttgtaaaccaccgagca

SEQ ID NO: 1384335 - DNA, 25 bp, Homo sapien
tcacaggtaagacggatatgggcat

SEQ ID NO: 1384336 - DNA, 25 bp, Homo sapien
tgtttggcaaccaagactctaaggg

SEQ ID NO: 1384337 - DNA, 25 bp, Homo sapien
ctttagtcacaaagcgataatatta

SEQ ID NO: 1384338 - DNA, 25 bp, Homo sapien
caacgtttctggagcttttatatct

SEQ ID NO: 1384339 - DNA, 25 bp, Homo sapien
cagtggtcccagtcaacgtttctgg

SEQ ID NO: 1384340 - DNA, 25 bp, Homo sapien
tgttgtagtttttttcatcgagcag

SEQ ID NO: 1384341 - DNA, 25 bp, Homo sapien
ttcatcgagcagaaaagctactttt

SEQ ID NO: 1384342 - DNA, 25 bp, Homo sapien
tggaattgaacttggtttgctgttg

SEQ ID NO: 1384343 - DNA, 25 bp, Homo sapien
gtgtttggaattgaacttggtttgc

SEQ ID NO: 1384344 - DNA, 25 bp, Homo sapien
tgatgcccatgtgtgttgtcagctg

SEQ ID NO: 1384345 - DNA, 25 bp, Homo sapien
catggtcactacaagaagtcgtaac

SEQ ID NO: 1384346 - DNA, 25 bp, Homo sapien
ccttcacaaggttggtaagattggg

SEQ ID NO: 1384347 - DNA, 25 bp, Homo sapien
caactagtgccaagaaagtgccttc

SEQ ID NO: 1384348 - DNA, 25 bp, Homo sapien
ggaattggagtgttcgctggctaca

SEQ ID NO: 1384349 - DNA, 25 bp, Homo sapien
ctcttcctcatcatcattttgattt

SEQ ID NO: 1384350 - DNA, 25 bp, Homo sapien
cttcctcttcctcatcatcattttg

SEQ ID NO: 1384351 - DNA, 25 bp, Homo sapien
tcctcttcctcatcatcattttgat

SEQ ID NO: 1384352 - DNA, 25 bp, Homo sapien
ctgggggggcactggcgctttccct

SEQ ID NO: 1384353 - DNA, 25 bp, Homo sapien
gccattcatcttgagaagattcact

SEQ ID NO: 1384354 - DNA, 25 bp, Homo sapien
aagattcactgtctacaaccagaat

SEQ ID NO: 1384355 - DNA, 25 bp, Homo sapien
gaagattcactgtctacaaccagaa

SEQ ID NO: 1384356 - DNA, 25 bp, Homo sapien
tttatcaagctccttggttttatca

SEQ ID NO: 1384357 - DNA, 25 bp, Homo sapien
tcctgtactttatcaagctccttgg

SEQ ID NO: 1384358 - DNA, 25 bp, Homo sapien
attcctgtactttatcaagctcctt

SEQ ID NO: 1384359 - DNA, 25 bp, Homo sapien
tgtactttatcaagctccttggttt

SEQ ID NO: 1384360 - DNA, 25 bp, Homo sapien
ccctgggagttgtcatgcttatccg

SEQ ID NO: 1384361 - DNA, 25 bp, Homo sapien
ttctcggaagtcctgcccctgggag

SEQ ID NO: 1384362 - DNA, 25 bp, Homo sapien
catgcttatccggagtgagaagagc

SEQ ID NO: 1384363 - DNA, 25 bp, Homo sapien
cttgtggacaaggtgccgtgccagc

SEQ ID NO: 1384364 - DNA, 25 bp, Homo sapien
ctcctccttgaactgcagctcttcc

SEQ ID NO: 1384365 - DNA, 25 bp, Homo sapien
cctccttgaactgcagctcttccct

SEQ ID NO: 1384366 - DNA, 25 bp, Homo sapien
tgcagctcttccctcagcatagatt

SEQ ID NO: 1384367 - DNA, 25 bp, Homo sapien
tatgaggtctttgcactcctcatac

SEQ ID NO: 1384368 - DNA, 25 bp, Homo sapien
catttgagttacaagaaatttctgc

SEQ ID NO: 1384369 - DNA, 25 bp, Homo sapien
aagccggccatttgagttacaagaa

SEQ ID NO: 1384370 - DNA, 25 bp, Homo sapien
tttctcactggaccaggggccggca

SEQ ID NO: 1384371 - DNA, 25 bp, Homo sapien
atttctgcttcatgtttctgaactg

SEQ ID NO: 1384372 - DNA, 25 bp, Homo sapien
ctggggagaagaaacgcaaacacat

SEQ ID NO: 1384373 - DNA, 25 bp, Homo sapien
agccagcagcactacctaattccaa

SEQ ID NO: 1384374 - DNA, 25 bp, Homo sapien
gagtgagccacttaggctagccctg

SEQ ID NO: 1384375 - DNA, 25 bp, Homo sapien
tactacagtataattcatgtatcac

SEQ ID NO: 1384376 - DNA, 25 bp, Homo sapien
cacctatgggctgtcactctgcaat

SEQ ID NO: 1384377 - DNA, 25 bp, Homo sapien
ctccatggagcatccgtggcctgta

SEQ ID NO: 1384378 - DNA, 25 bp, Homo sapien
cctcatgagtcatcatgagtgttct

SEQ ID NO: 1384379 - DNA, 25 bp, Homo sapien
ctcatgagtcatcatgagtgttctg

SEQ ID NO: 1384380 - DNA, 25 bp, Homo sapien
tcatgagtcatcatgagtgttctgt

SEQ ID NO: 1384381 - DNA, 25 bp, Homo sapien
catgttcaattatgtgttgaagaat

SEQ ID NO: 1384382 - DNA, 25 bp, Homo sapien
aatttgacttaaactgccaggtggc

SEQ ID NO: 1384383 - DNA, 25 bp, Homo sapien
ttcaattatgtgttgaagaatacac

SEQ ID NO: 1384384 - DNA, 25 bp, Homo sapien
ttgacttaaactgccaggtggcatt

SEQ ID NO: 1384385 - DNA, 25 bp, Homo sapien
atgaggccccagagtcagttgcagc

SEQ ID NO: 1384386 - DNA, 25 bp, Homo sapien
catgaggccccagagtcagttgcag

SEQ ID NO: 1384387 - DNA, 25 bp, Homo sapien
tgaggccccagagtcagttgcagca

SEQ ID NO: 1384388 - DNA, 25 bp, Homo sapien
aggccccagagtcagttgcagcaac

SEQ ID NO: 1384389 - DNA, 25 bp, Homo sapien
gagacagacagcaaacttgcatgtt

SEQ ID NO: 1384390 - DNA, 25 bp, Homo sapien
aacttgcatgttataaattgtatca

SEQ ID NO: 1384391 - DNA, 25 bp, Homo sapien
ttgtgtgtacataaagggaggagac

SEQ ID NO: 1384392 - DNA, 25 bp, Homo sapien
actgaaccaattctatgaccatctg

SEQ ID NO: 1384393 - DNA, 25 bp, Homo sapien
ttgatccataggctcacatttgatc

SEQ ID NO: 1384394 - DNA, 25 bp, Homo sapien
aggctcacatttgatcccaactggc

SEQ ID NO: 1384395 - DNA, 25 bp, Homo sapien
tccataggctcacatttgatcccaa

SEQ ID NO: 1384396 - DNA, 25 bp, Homo sapien
cataggctcacatttgatcccaact

SEQ ID NO: 1384397 - DNA, 25 bp, Homo sapien
gttcacttgagtgccctgtgtggcc

SEQ ID NO: 1384398 - DNA, 25 bp, Homo sapien
tgttcacttgagtgccctgtgtggc

SEQ ID NO: 1384399 - DNA, 25 bp, Homo sapien
ttccctccttggtgaaagagaaagc

SEQ ID NO: 1384400 - DNA, 25 bp, Homo sapien
ggtgaaagagaaagctcttccccaa

SEQ ID NO: 1384401 - DNA, 25 bp, Homo sapien
tcttccccaagtgagggacattttc

SEQ ID NO: 1384402 - DNA, 25 bp, Homo sapien
ccaagtgagggacattttctcttaa

SEQ ID NO: 1384403 - DNA, 25 bp, Homo sapien
caaccccgtcaatgggcagtatatt

SEQ ID NO: 1384404 - DNA, 25 bp, Homo sapien
ctggatgatgcacgcatcagcaatc

SEQ ID NO: 1384405 - DNA, 25 bp, Homo sapien
gtcttctggatgatgcacgcatcag

SEQ ID NO: 1384406 - DNA, 25 bp, Homo sapien
ctgtgtgacaccaaccccgtcaatg

SEQ ID NO: 1384407 - DNA, 25 bp, Homo sapien
gccacaggtaagtttctcctcactc

SEQ ID NO: 1384408 - DNA, 25 bp, Homo sapien
cgatcacccgaatagctatgaatgc

SEQ ID NO: 1384409 - DNA, 25 bp, Homo sapien
tgccagtgtgccacaggtaagtttc

SEQ ID NO: 1384410 - DNA, 25 bp, Homo sapien
acccgaatagctatgaatgccagtg

SEQ ID NO: 1384411 - DNA, 25 bp, Homo sapien
gattctcagaatacccacaacttgg

SEQ ID NO: 1384412 - DNA, 25 bp, Homo sapien
gatgttcacatggatcaagttgagg

SEQ ID NO: 1384413 - DNA, 25 bp, Homo sapien
acactcgagaagtagaatgcactgg

SEQ ID NO: 1384414 - DNA, 25 bp, Homo sapien
aaagccattagagcatgattctcag

SEQ ID NO: 1384415 - DNA, 25 bp, Homo sapien
aaatgattagctggttaaataaatg

SEQ ID NO: 1384416 - DNA, 25 bp, Homo sapien
gaagaatggaaagcctttggataaa

SEQ ID NO: 1384417 - DNA, 25 bp, Homo sapien
gagaagaatggaaagcctttggata

SEQ ID NO: 1384418 - DNA, 25 bp, Homo sapien
tttggataaatgattagctggttaa

SEQ ID NO: 1384419 - DNA, 25 bp, Homo sapien
ttttttgtttcttgacactctttgc

SEQ ID NO: 1384420 - DNA, 25 bp, Homo sapien
ttttgtttcttgacactctttgctt

SEQ ID NO: 1384421 - DNA, 25 bp, Homo sapien
gacactctttgctttgggtcgttta

SEQ ID NO: 1384422 - DNA, 25 bp, Homo sapien
ttgacactctttgctttgggtcgtt

SEQ ID NO: 1384423 - DNA, 25 bp, Homo sapien
ttcttcctgtccagtttttgcttta

SEQ ID NO: 1384424 - DNA, 25 bp, Homo sapien
tcttcctgtccagtttttgctttag

SEQ ID NO: 1384425 - DNA, 25 bp, Homo sapien
attcttcctgtccagtttttgcttt

SEQ ID NO: 1384426 - DNA, 25 bp, Homo sapien
gtggtttcctatcacttgccggaaa

SEQ ID NO: 1384427 - DNA, 25 bp, Homo sapien
tttttgctttggatagtggcatttt

SEQ ID NO: 1384428 - DNA, 25 bp, Homo sapien
ttcctatcacttgccggaaaaacac

SEQ ID NO: 1384429 - DNA, 25 bp, Homo sapien
tgctttggatagtggcattttttcc

SEQ ID NO: 1384430 - DNA, 25 bp, Homo sapien
ccaaattgacgagggaatcgcccct

SEQ ID NO: 1384431 - DNA, 25 bp, Homo sapien
tgacgagggaatcgcccctctgagc

SEQ ID NO: 1384432 - DNA, 25 bp, Homo sapien
tatgatggacacaacccaaattgac

SEQ ID NO: 1384433 - DNA, 25 bp, Homo sapien
aaaataaggcgaaacattatgatgg

SEQ ID NO: 1384434 - DNA, 25 bp, Homo sapien
ttcctcacagaatggaggtgcccac

SEQ ID NO: 1384435 - DNA, 25 bp, Homo sapien
caccccgggtattgcatttctcagg

SEQ ID NO: 1384436 - DNA, 25 bp, Homo sapien
catacatgcagtggcagttttttct

SEQ ID NO: 1384437 - DNA, 25 bp, Homo sapien
tctgttgttgcaaacaccccgggta

SEQ ID NO: 1384438 - DNA, 25 bp, Homo sapien
ctgcaggactgagctattgacgcaa

SEQ ID NO: 1384439 - DNA, 25 bp, Homo sapien
gcaggactgagctattgacgcaatt

SEQ ID NO: 1384440 - DNA, 25 bp, Homo sapien
caggactgagctattgacgcaattt

SEQ ID NO: 1384441 - DNA, 25 bp, Homo sapien
gactgagctattgacgcaatttttt

SEQ ID NO: 1384442 - DNA, 25 bp, Homo sapien
cacaggaggtgccatcatttatcat

SEQ ID NO: 1384443 - DNA, 25 bp, Homo sapien
caggaggtgccatcatttatcatac

SEQ ID NO: 1384444 - DNA, 25 bp, Homo sapien
ctccacaggaggtgccatcatttat

SEQ ID NO: 1384445 - DNA, 25 bp, Homo sapien
cttctccacaggaggtgccatcatt

SEQ ID NO: 1384446 - DNA, 25 bp, Homo sapien
ggatagatgatagcctgtgccccag

SEQ ID NO: 1384447 - DNA, 25 bp, Homo sapien
caggtattcccatgggtttcatgga

SEQ ID NO: 1384448 - DNA, 25 bp, Homo sapien
gaaattatagtcgtatgctctggca

SEQ ID NO: 1384449 - DNA, 25 bp, Homo sapien
acatttatacactgtagcctgccac

SEQ ID NO: 1384450 - DNA, 25 bp, Homo sapien
tgcctacacacgtatccagatggac

SEQ ID NO: 1384451 - DNA, 25 bp, Homo sapien
tagcactcactaggagcctccatgg

SEQ ID NO: 1384452 - DNA, 25 bp, Homo sapien
tggacgaaaccgacaatcatgacag

SEQ ID NO: 1384453 - DNA, 25 bp, Homo sapien
tataaacgtcatttgggcaggaact

SEQ ID NO: 1384454 - DNA, 25 bp, Homo sapien
tcctgggatattatttagacatgtt

SEQ ID NO: 1384455 - DNA, 25 bp, Homo sapien
tagacatgttgctcccgaagagata

SEQ ID NO: 1384456 - DNA, 25 bp, Homo sapien
cttaagcacataacctagtcctggg

SEQ ID NO: 1384457 - DNA, 25 bp, Homo sapien
taagcacataacctagtcctgggat

SEQ ID NO: 1384458 - DNA, 25 bp, Homo sapien
catgatgcaattaagcctaccccta

SEQ ID NO: 1384459 - DNA, 25 bp, Homo sapien
tgcaattgctaaacccagtgcgtcc

SEQ ID NO: 1384460 - DNA, 25 bp, Homo sapien
ctcatgagcagaccaggtagcaggg

SEQ ID NO: 1384461 - DNA, 25 bp, Homo sapien
cagtgcgtcctgagcccatgatgca

SEQ ID NO: 1384462 - DNA, 25 bp, Homo sapien
tttccaaacgaccatgcaagagcat

SEQ ID NO: 1384463 - DNA, 25 bp, Homo sapien
taggatccaggaaagtcccttagcc

SEQ ID NO: 1384464 - DNA, 25 bp, Homo sapien
ggtgtccataatcccagtcaaaaga

SEQ ID NO: 1384465 - DNA, 25 bp, Homo sapien
aatgtgcccaatctgatgacaggcg

SEQ ID NO: 1384466 - DNA, 25 bp, Homo sapien
aactgctctttcttcaggagataga

SEQ ID NO: 1384467 - DNA, 25 bp, Homo sapien
ctgattcccaaactgctctttcttc

SEQ ID NO: 1384468 - DNA, 25 bp, Homo sapien
tcccaaactgctctttcttcaggag

SEQ ID NO: 1384469 - DNA, 25 bp, Homo sapien
actgctctttcttcaggagatagac

SEQ ID NO: 1384470 - DNA, 25 bp, Homo sapien
tatagtagctttagagtccagagac

SEQ ID NO: 1384471 - DNA, 25 bp, Homo sapien
tgaaggagaaaacgcgcagatgtcg

SEQ ID NO: 1384472 - DNA, 25 bp, Homo sapien
tcacggagcccatgtagttgcagtc

SEQ ID NO: 1384473 - DNA, 25 bp, Homo sapien
gcaacagaagtctcttgggccacaa

SEQ ID NO: 1384474 - DNA, 25 bp, Homo sapien
gacttcatacgagtcaaactcccct

SEQ ID NO: 1384475 - DNA, 25 bp, Homo sapien
cagcttctcaggaatggtgacttca

SEQ ID NO: 1384476 - DNA, 25 bp, Homo sapien
acatcttcgccaagagacttaagga

SEQ ID NO: 1384477 - DNA, 25 bp, Homo sapien
cttcgccaagagacttaaggagcat

SEQ ID NO: 1384478 - DNA, 25 bp, Homo sapien
agaaggagcaaacggcattgggaga

SEQ ID NO: 1384479 - DNA, 25 bp, Homo sapien
agaggaagatctgcactgacctcat

SEQ ID NO: 1384480 - DNA, 25 bp, Homo sapien
gcctcagtttgctattcagtccctg

SEQ ID NO: 1384481 - DNA, 25 bp, Homo sapien
tggcctcgcgagtcagatttctggg

SEQ ID NO: 1384482 - DNA, 25 bp, Homo sapien
gctagaggcgcctgagctcaaaacc

SEQ ID NO: 1384483 - DNA, 25 bp, Homo sapien
ttgctattcagtccctgcaactctg

SEQ ID NO: 1384484 - DNA, 25 bp, Homo sapien
acttggagtcggcaaacagagagcc

SEQ ID NO: 1384485 - DNA, 25 bp, Homo sapien
gttccccacaggctaaggtatccag

SEQ ID NO: 1384486 - DNA, 25 bp, Homo sapien
catatttgcaggcttccacttggag

SEQ ID NO: 1384487 - DNA, 25 bp, Homo sapien
cacaactgtgtgtcggtccctgaca

SEQ ID NO: 1384488 - DNA, 25 bp, Homo sapien
ccctctccttgggtcgtgaagcttt

SEQ ID NO: 1384489 - DNA, 25 bp, Homo sapien
gggcattaaggaggttgttctgata

SEQ ID NO: 1384490 - DNA, 25 bp, Homo sapien
tagttgcatgactgaggcactagcc

SEQ ID NO: 1384491 - DNA, 25 bp, Homo sapien
ggtggcacttggcttcggccctact

SEQ ID NO: 1384492 - DNA, 25 bp, Homo sapien
caccagctatggctagtgcacagaa

SEQ ID NO: 1384493 - DNA, 25 bp, Homo sapien
tcatgaggtaacactgccaggccat

SEQ ID NO: 1384494 - DNA, 25 bp, Homo sapien
tacttcgcatttccattggaaggca

SEQ ID NO: 1384495 - DNA, 25 bp, Homo sapien
gctctctcagcaaattatgacatca

SEQ ID NO: 1384496 - DNA, 25 bp, Homo sapien
catcttaactacctttagaatgaaa

SEQ ID NO: 1384497 - DNA, 25 bp, Homo sapien
ggtcttgccctataacatgctggta

SEQ ID NO: 1384498 - DNA, 25 bp, Homo sapien
tgtgagactccaagggataccggga

SEQ ID NO: 1384499 - DNA, 25 bp, Homo sapien
tattatgccaacagacacgcagggt

SEQ ID NO: 1384500 - DNA, 25 bp, Homo sapien
gaagttgcagtgtagccatggacca

SEQ ID NO: 1384501 - DNA, 25 bp, Homo sapien
gatgaacttgaccactggtcaggag

SEQ ID NO: 1384502 - DNA, 25 bp, Homo sapien
tcacgcataaacctgcatgttgttg

SEQ ID NO: 1384503 - DNA, 25 bp, Homo sapien
taaacctgcatgttgttgtgtggtg

SEQ ID NO: 1384504 - DNA, 25 bp, Homo sapien
tgtggtggctcagacatgtgtgtcc

SEQ ID NO: 1384505 - DNA, 25 bp, Homo sapien
taggcatggtactcttggcactggg

SEQ ID NO: 1384506 - DNA, 25 bp, Homo sapien
tctggaatctggtacatggtgggca

SEQ ID NO: 1384507 - DNA, 25 bp, Homo sapien
cactgtgactgggtgttcgctcagc

SEQ ID NO: 1384508 - DNA, 25 bp, Homo sapien
actgggactggatggagcctactca

SEQ ID NO: 1384509 - DNA, 25 bp, Homo sapien
aacaaaagagttgcctccacattat

SEQ ID NO: 1384510 - DNA, 25 bp, Homo sapien
aacaacaaaagagttgcctccacat

SEQ ID NO: 1384511 - DNA, 25 bp, Homo sapien
tgtcctgcatgtctcggttggcccc

SEQ ID NO: 1384512 - DNA, 25 bp, Homo sapien
tgttgtcctgcatgtctcggttggc

SEQ ID NO: 1384513 - DNA, 25 bp, Homo sapien
attcatcctggcatctagatcagtt

SEQ ID NO: 1384514 - DNA, 25 bp, Homo sapien
gggtgtagtaccatcattcatcctg

SEQ ID NO: 1384515 - DNA, 25 bp, Homo sapien
tcagttactcggttgcgaatcagaa

SEQ ID NO: 1384516 - DNA, 25 bp, Homo sapien
catccgcttggcagttgatcagttc

SEQ ID NO: 1384517 - DNA, 25 bp, Homo sapien
tcctcggagagaagccaacatcaat

SEQ ID NO: 1384518 - DNA, 25 bp, Homo sapien
cccatgttgtcctgggcattggcat

SEQ ID NO: 1384519 - DNA, 25 bp, Homo sapien
tggcaccctggtagaccaagtctgt

SEQ ID NO: 1384520 - DNA, 25 bp, Homo sapien
gcttggcagcatcagcccgtgagta

SEQ ID NO: 1384521 - DNA, 25 bp, Homo sapien
cattttatcagcctgtttagtctca

SEQ ID NO: 1384522 - DNA, 25 bp, Homo sapien
tgaagcaatgtgaaatccttccctt

SEQ ID NO: 1384523 - DNA, 25 bp, Homo sapien
gtggctacattccttaagcattcat

SEQ ID NO: 1384524 - DNA, 25 bp, Homo sapien
ttcatttcctcgagctgatttagag

SEQ ID NO: 1384525 - DNA, 25 bp, Homo sapien
tgagagccagcgatggtgtcctacg

SEQ ID NO: 1384526 - DNA, 25 bp, Homo sapien
ctgagagtaaggcctcatcttcagc

SEQ ID NO: 1384527 - DNA, 25 bp, Homo sapien
cgatggtgtcctacggatgtctgca

SEQ ID NO: 1384528 - DNA, 25 bp, Homo sapien
ctgctgtgtccatggccgtcgatca

SEQ ID NO: 1384529 - DNA, 25 bp, Homo sapien
tcatcatcgacccagtgttcacttg

SEQ ID NO: 1384530 - DNA, 25 bp, Homo sapien
gggcccttcatcatcgacccagtgt

SEQ ID NO: 1384531 - DNA, 25 bp, Homo sapien
taccaattaggttagcttctgagac

SEQ ID NO: 1384532 - DNA, 25 bp, Homo sapien
ttcacttgttccagtaccaattagg

SEQ ID NO: 1384533 - DNA, 25 bp, Homo sapien
gtcccactggctcacgacgcttgtg

SEQ ID NO: 1384534 - DNA, 25 bp, Homo sapien
tgattgcttgcatctcggcgaagag

SEQ ID NO: 1384535 - DNA, 25 bp, Homo sapien
taaacagaatgatgacaacagcaac

SEQ ID NO: 1384536 - DNA, 25 bp, Homo sapien
gcagccagagagagccatgcttacg

SEQ ID NO: 1384537 - DNA, 25 bp, Homo sapien
atgaaaattgttcccccaattgaca

SEQ ID NO: 1384538 - DNA, 25 bp, Homo sapien
atagagggctacataatgaaaattg

SEQ ID NO: 1384539 - DNA, 25 bp, Homo sapien
agggcaactttgacctcaacagtcc

SEQ ID NO: 1384540 - DNA, 25 bp, Homo sapien
gacctcaacagtcctgaaaaaatag

SEQ ID NO: 1384541 - DNA, 25 bp, Homo sapien
tctgagtcttgaacacactggcggt

SEQ ID NO: 1384542 - DNA, 25 bp, Homo sapien
catccgtgttcttgaagcagtggtc

SEQ ID NO: 1384543 - DNA, 25 bp, Homo sapien
acagggtcccctgtatggcgtgaga

SEQ ID NO: 1384544 - DNA, 25 bp, Homo sapien
tgacgacagacacaagagggtatga

SEQ ID NO: 1384545 - DNA, 25 bp, Homo sapien
aagaagctgcgagcatcctggagca

SEQ ID NO: 1384546 - DNA, 25 bp, Homo sapien
tcaccaggaagggatctgcgtgtca

SEQ ID NO: 1384547 - DNA, 25 bp, Homo sapien
tgggagtcccgcttaatgcgcaggt

SEQ ID NO: 1384548 - DNA, 25 bp, Homo sapien
aataaccagggtaccttctgccagg

SEQ ID NO: 1384549 - DNA, 25 bp, Homo sapien
tcacagcggctacccgagaatggtg

SEQ ID NO: 1384550 - DNA, 25 bp, Homo sapien
tccagaggcggtgtgcacacactgc

SEQ ID NO: 1384551 - DNA, 25 bp, Homo sapien
aagttgtcaaacaggcactcgaccg

SEQ ID NO: 1384552 - DNA, 25 bp, Homo sapien
cactggcaggagtaataaggaggct

SEQ ID NO: 1384553 - DNA, 25 bp, Homo sapien
caacggcaaatgaaaccatcaggca

SEQ ID NO: 1384554 - DNA, 25 bp, Homo sapien
acaacggcaaatgaaaccatcaggc

SEQ ID NO: 1384555 - DNA, 25 bp, Homo sapien
tcgacgaaggtttcacagtgccggc

SEQ ID NO: 1384556 - DNA, 25 bp, Homo sapien
gggacacacatcgacgaaggtttca

SEQ ID NO: 1384557 - DNA, 25 bp, Homo sapien
catcgacgaaggtttcacagtgccg

SEQ ID NO: 1384558 - DNA, 25 bp, Homo sapien
cacacatcgacgaaggtttcacagt

SEQ ID NO: 1384559 - DNA, 25 bp, Homo sapien
cagggagcttccatattgcagaatc

SEQ ID NO: 1384560 - DNA, 25 bp, Homo sapien
ggctgtgggatactacttcaaagtg

SEQ ID NO: 1384561 - DNA, 25 bp, Homo sapien
tgggctcaggatgtagcagagttca

SEQ ID NO: 1384562 - DNA, 25 bp, Homo sapien
caaagtgcagtttggccaatacgag

SEQ ID NO: 1384563 - DNA, 25 bp, Homo sapien
tgatctttggttaaacacacttgaa

SEQ ID NO: 1384564 - DNA, 25 bp, Homo sapien
cacttgaatttggacctgccccctt

SEQ ID NO: 1384565 - DNA, 25 bp, Homo sapien
ccacatcaactgatctttggttaaa

SEQ ID NO: 1384566 - DNA, 25 bp, Homo sapien
tgccccctttaagtatctaagcagg

SEQ ID NO: 1384567 - DNA, 25 bp, Homo sapien
atttgttcactaaaaccatcctcca

SEQ ID NO: 1384568 - DNA, 25 bp, Homo sapien
ggcagagtggccaggaggctagaga

SEQ ID NO: 1384569 - DNA, 25 bp, Homo sapien
tttgttcactaaaaccatcctccaa

SEQ ID NO: 1384570 - DNA, 25 bp, Homo sapien
tgagctgtatacagtccaggctgcc

SEQ ID NO: 1384571 - DNA, 25 bp, Homo sapien
aagccaggcaagcagcgacaactgt

SEQ ID NO: 1384572 - DNA, 25 bp, Homo sapien
tgcactgaccaccattaaggcaatg

SEQ ID NO: 1384573 - DNA, 25 bp, Homo sapien
aaggcactacggcaaacacacaggt

SEQ ID NO: 1384574 - DNA, 25 bp, Homo sapien
taacttaagacaatgccctggatgg

SEQ ID NO: 1384575 - DNA, 25 bp, Homo sapien
caacatcagagctagcaagagatgg

SEQ ID NO: 1384576 - DNA, 25 bp, Homo sapien
caagaaatcttactgaccaggctaa

SEQ ID NO: 1384577 - DNA, 25 bp, Homo sapien
taaaatggcttgaattactaggatg

SEQ ID NO: 1384578 - DNA, 25 bp, Homo sapien
ggctgattctggcactcatccactt

SEQ ID NO: 1384579 - DNA, 25 bp, Homo sapien
gttcacaaggtcaatacaggtgcct

SEQ ID NO: 1384580 - DNA, 25 bp, Homo sapien
ccgagtgcctggtgggcaagagcac

SEQ ID NO: 1384581 - DNA, 25 bp, Homo sapien
gcaagagcacttgaaatggttcaca

SEQ ID NO: 1384582 - DNA, 25 bp, Homo sapien
tatacatgtaacgtttagcatgatg

SEQ ID NO: 1384583 - DNA, 25 bp, Homo sapien
atatatacatgtaacgtttagcatg

SEQ ID NO: 1384584 - DNA, 25 bp, Homo sapien
atatacatgtaacgtttagcatgat

SEQ ID NO: 1384585 - DNA, 25 bp, Homo sapien
tatatacatgtaacgtttagcatga

SEQ ID NO: 1384586 - DNA, 25 bp, Homo sapien
gagtgctggcacaagtgttcaacaa

SEQ ID NO: 1384587 - DNA, 25 bp, Homo sapien
cagtagctcccagtatagcccaggg

SEQ ID NO: 1384588 - DNA, 25 bp, Homo sapien
gttggacgcacactcatcgagttgc

SEQ ID NO: 1384589 - DNA, 25 bp, Homo sapien
cactgacagtaatgcgtgttgccag

SEQ ID NO: 1384590 - DNA, 25 bp, Homo sapien
tcacaagagacattgggcacgtcac

SEQ ID NO: 1384591 - DNA, 25 bp, Homo sapien
ttgtttttacatggagaccgactgc

SEQ ID NO: 1384592 - DNA, 25 bp, Homo sapien
ctggaggctgctatgtcacaagaga

SEQ ID NO: 1384593 - DNA, 25 bp, Homo sapien
caccagcccatccagatggacatag

SEQ ID NO: 1384594 - DNA, 25 bp, Homo sapien
cagaggcaggggtgtacatacatca

SEQ ID NO: 1384595 - DNA, 25 bp, Homo sapien
gaaacagaggcaggggtgtacatac

SEQ ID NO: 1384596 - DNA, 25 bp, Homo sapien
ctgaaacagaggcaggggtgtacat

SEQ ID NO: 1384597 - DNA, 25 bp, Homo sapien
gaggcaggggtgtacatacatcaaa

SEQ ID NO: 1384598 - DNA, 25 bp, Homo sapien
aatcccatcaacacatgtgccacca

SEQ ID NO: 1384599 - DNA, 25 bp, Homo sapien
cagctgcagcggtaggtacccaggc

SEQ ID NO: 1384600 - DNA, 25 bp, Homo sapien
tgacagtttttcccagtgtagccca

SEQ ID NO: 1384601 - DNA, 25 bp, Homo sapien
caagcaagagaaggagttaatccca

SEQ ID NO: 1384602 - DNA, 25 bp, Homo sapien
ttgacgtagtcagagcaggtccctc

SEQ ID NO: 1384603 - DNA, 25 bp, Homo sapien
tcttacagggttcactcagacactc

SEQ ID NO: 1384604 - DNA, 25 bp, Homo sapien
tcctgcctggcacttgcaagtgtaa

SEQ ID NO: 1384605 - DNA, 25 bp, Homo sapien
gatgttgttctcacaatggactcca

SEQ ID NO: 1384606 - DNA, 25 bp, Homo sapien
atccccagtgaaacccggaaggcag

SEQ ID NO: 1384607 - DNA, 25 bp, Homo sapien
ggcaggagaaagtattcactccatc

SEQ ID NO: 1384608 - DNA, 25 bp, Homo sapien
catccatacaggaacctccattctg

SEQ ID NO: 1384609 - DNA, 25 bp, Homo sapien
tgtctggcacttatccccagtgaaa

SEQ ID NO: 1384610 - DNA, 25 bp, Homo sapien
tatttatcttatcactgccggcacc

SEQ ID NO: 1384611 - DNA, 25 bp, Homo sapien
tccctaacagactatgagcttcatg

SEQ ID NO: 1384612 - DNA, 25 bp, Homo sapien
tggtggcctctatatgataatctga

SEQ ID NO: 1384613 - DNA, 25 bp, Homo sapien
tacaagtaactaaggatcggtcagt

SEQ ID NO: 1384614 - DNA, 25 bp, Homo sapien
ccaatgtcaggcgtgaaaggcggca

SEQ ID NO: 1384615 - DNA, 25 bp, Homo sapien
tgctggataaatgaccggtatgccc

SEQ ID NO: 1384616 - DNA, 25 bp, Homo sapien
taaaacactactgttaaatatgctg

SEQ ID NO: 1384617 - DNA, 25 bp, Homo sapien
gcttaagagctgactggcatactca

SEQ ID NO: 1384618 - DNA, 25 bp, Homo sapien
tgccctgggtgttatggcagagacc

SEQ ID NO: 1384619 - DNA, 25 bp, Homo sapien
catgcagggcttggagatacactcg

SEQ ID NO: 1384620 - DNA, 25 bp, Homo sapien
tcgtcaatgtcaatggtacaccgct

SEQ ID NO: 1384621 - DNA, 25 bp, Homo sapien
cactgaagcctggtggacattcaca

SEQ ID NO: 1384622 - DNA, 25 bp, Homo sapien
aaatttggtgactctttgcaaacag

SEQ ID NO: 1384623 - DNA, 25 bp, Homo sapien
cagcattctcacaagggtttgggga

SEQ ID NO: 1384624 - DNA, 25 bp, Homo sapien
acagggagccaatactgtctgacaa

SEQ ID NO: 1384625 - DNA, 25 bp, Homo sapien
ataactctcaaaatttggtgactct

SEQ ID NO: 1384626 - DNA, 25 bp, Homo sapien
cggagtctcactctgactctcaggc

SEQ ID NO: 1384627 - DNA, 25 bp, Homo sapien
ccatgttagccaggatggctgtgat

SEQ ID NO: 1384628 - DNA, 25 bp, Homo sapien
agccaggatggctgtgatctcctga

SEQ ID NO: 1384629 - DNA, 25 bp, Homo sapien
tgttagccaggatggctgtgatctc

SEQ ID NO: 1384630 - DNA, 25 bp, Homo sapien
caccgtgcctggcctactatttctt

SEQ ID NO: 1384631 - DNA, 25 bp, Homo sapien
gctattaacagctcaagactccagg

SEQ ID NO: 1384632 - DNA, 25 bp, Homo sapien
gggaagtaataactcagccatgctc

SEQ ID NO: 1384633 - DNA, 25 bp, Homo sapien
tgcatgccgcaacctgatgaaacag

SEQ ID NO: 1384634 - DNA, 25 bp, Homo sapien
tcacaagaaggcgataataagccag

SEQ ID NO: 1384635 - DNA, 25 bp, Homo sapien
cttctcagttgtaacagccatcgaa

SEQ ID NO: 1384636 - DNA, 25 bp, Homo sapien
gtcttctcagttgtaacagccatcg

SEQ ID NO: 1384637 - DNA, 25 bp, Homo sapien
taacagccatcgaaggggtgacacc

SEQ ID NO: 1384638 - DNA, 25 bp, Homo sapien
tcgaaggggtgacacctctgagtga

SEQ ID NO: 1384639 - DNA, 25 bp, Homo sapien
gacaaagcaaggtcaagtatcccct

SEQ ID NO: 1384640 - DNA, 25 bp, Homo sapien
aagcaaggtcaagtatcccctctgg

SEQ ID NO: 1384641 - DNA, 25 bp, Homo sapien
ggcactgacaaagcaaggtcaagta

SEQ ID NO: 1384642 - DNA, 25 bp, Homo sapien
caaggtcaagtatcccctctggtcc

SEQ ID NO: 1384643 - DNA, 25 bp, Homo sapien
gtagccacttatgtcatcaaagcag

SEQ ID NO: 1384644 - DNA, 25 bp, Homo sapien
ttcatcaatattcacctggcagtta

SEQ ID NO: 1384645 - DNA, 25 bp, Homo sapien
agcacacagtggcaagtgtagccac

SEQ ID NO: 1384646 - DNA, 25 bp, Homo sapien
caggttccttggttcaggcatggat

SEQ ID NO: 1384647 - DNA, 25 bp, Homo sapien
atagactcaaacctggaccaggaag

SEQ ID NO: 1384648 - DNA, 25 bp, Homo sapien
cctccggtgtagaccaaagatgact

SEQ ID NO: 1384649 - DNA, 25 bp, Homo sapien
cacttggccaatgctgtaaaactgg

SEQ ID NO: 1384650 - DNA, 25 bp, Homo sapien
gtaaaactggagtcttaactgctca

SEQ ID NO: 1384651 - DNA, 25 bp, Homo sapien
tccattcaccagattgtcacaagtt

SEQ ID NO: 1384652 - DNA, 25 bp, Homo sapien
cattctggcatggattcgaaaggca

SEQ ID NO: 1384653 - DNA, 25 bp, Homo sapien
tcgaaaggcattcatttttgtccac

SEQ ID NO: 1384654 - DNA, 25 bp, Homo sapien
ttttgtccacttcacagttgatgcc

SEQ ID NO: 1384655 - DNA, 25 bp, Homo sapien
cagggattgctcaggcattcgttca

SEQ ID NO: 1384656 - DNA, 25 bp, Homo sapien
tatacagcggaaaccattcacaccg

SEQ ID NO: 1384657 - DNA, 25 bp, Homo sapien
gttgatacatgttgcacccttgcga

SEQ ID NO: 1384658 - DNA, 25 bp, Homo sapien
ccttgcgacagggattggaggcaca

SEQ ID NO: 1384659 - DNA, 25 bp, Homo sapien
tacttgcacagtcatcaaaattaat

SEQ ID NO: 1384660 - DNA, 25 bp, Homo sapien
atgccatccatacagattccatgga

SEQ ID NO: 1384661 - DNA, 25 bp, Homo sapien
caactgtagcgattaatgccatcca

SEQ ID NO: 1384662 - DNA, 25 bp, Homo sapien
tggtgagcagacacaactgtagcga

SEQ ID NO: 1384663 - DNA, 25 bp, Homo sapien
tatctgagcatatgccaacagtctg

SEQ ID NO: 1384664 - DNA, 25 bp, Homo sapien
gagaaacagtgaaaaccccatacca

SEQ ID NO: 1384665 - DNA, 25 bp, Homo sapien
tcagattggcagagctattgtctct

SEQ ID NO: 1384666 - DNA, 25 bp, Homo sapien
cataccaaacataaacagagtgggc

SEQ ID NO: 1384667 - DNA, 25 bp, Homo sapien
gcagcgaccatcgttcaggcaaggg

SEQ ID NO: 1384668 - DNA, 25 bp, Homo sapien
cagttgcactggtagccattgacca

SEQ ID NO: 1384669 - DNA, 25 bp, Homo sapien
catgtacccgggattgcagatgcag

SEQ ID NO: 1384670 - DNA, 25 bp, Homo sapien
tcctgacactgaccatggtggcaag

SEQ ID NO: 1384671 - DNA, 25 bp, Homo sapien
cattcgggtgatcgatacactttgc

SEQ ID NO: 1384672 - DNA, 25 bp, Homo sapien
cagacacggagtactggaacagtca

SEQ ID NO: 1384673 - DNA, 25 bp, Homo sapien
ctggcattcatagccattcgggtga

SEQ ID NO: 1384674 - DNA, 25 bp, Homo sapien
atcaatatcaatctggcaaactggc

SEQ ID NO: 1384675 - DNA, 25 bp, Homo sapien
cactgcccattgttcacacaagggt

SEQ ID NO: 1384676 - DNA, 25 bp, Homo sapien
caggcactggaaacgattgacttta

SEQ ID NO: 1384677 - DNA, 25 bp, Homo sapien
tctaattcacaatgcacacctttga

SEQ ID NO: 1384678 - DNA, 25 bp, Homo sapien
cattgttcacacaagggttgctctg

SEQ ID NO: 1384679 - DNA, 25 bp, Homo sapien
tggaaggcgccatccgtgttcacac

SEQ ID NO: 1384680 - DNA, 25 bp, Homo sapien
tgatgtccatctcacaacgaggtcc

SEQ ID NO: 1384681 - DNA, 25 bp, Homo sapien
aacgaggtcctgcataacccttcag

SEQ ID NO: 1384682 - DNA, 25 bp, Homo sapien
tccaatcttatccagacaggtagca

SEQ ID NO: 1384683 - DNA, 25 bp, Homo sapien
tgtgcagtcagcccctttgtagcct

SEQ ID NO: 1384684 - DNA, 25 bp, Homo sapien
ctgtgcagtcagcccctttgtagcc

SEQ ID NO: 1384685 - DNA, 25 bp, Homo sapien
tctgtgcagtcagcccctttgtagc

SEQ ID NO: 1384686 - DNA, 25 bp, Homo sapien
cagtcagcccctttgtagccttgtg

SEQ ID NO: 1384687 - DNA, 25 bp, Homo sapien
gccgttgacacatacacagccatag

SEQ ID NO: 1384688 - DNA, 25 bp, Homo sapien
tacaggaggcgaaggcacaatcatc

SEQ ID NO: 1384689 - DNA, 25 bp, Homo sapien
catagcctccattgcggttggcaca

SEQ ID NO: 1384690 - DNA, 25 bp, Homo sapien
ctctgggcacatgcaagagaaggag

SEQ ID NO: 1384691 - DNA, 25 bp, Homo sapien
tgacaattacaacacatctcaattc

SEQ ID NO: 1384692 - DNA, 25 bp, Homo sapien
gggccaccatatagaataggatgaa

SEQ ID NO: 1384693 - DNA, 25 bp, Homo sapien
gcataatagctgttggcagaacaaa

SEQ ID NO: 1384694 - DNA, 25 bp, Homo sapien
tgtgcccggccatactaagtcttca

SEQ ID NO: 1384695 - DNA, 25 bp, Homo sapien
taccaatccatatcccattctggtg

SEQ ID NO: 1384696 - DNA, 25 bp, Homo sapien
tatcccattctggtggattctccac

SEQ ID NO: 1384697 - DNA, 25 bp, Homo sapien
tcccattctggtggattctccacac

SEQ ID NO: 1384698 - DNA, 25 bp, Homo sapien
tccatatcccattctggtggattct

SEQ ID NO: 1384699 - DNA, 25 bp, Homo sapien
tctgacacctgtggttagggcagtc

SEQ ID NO: 1384700 - DNA, 25 bp, Homo sapien
ggcagtcatcaatattcctctcaca

SEQ ID NO: 1384701 - DNA, 25 bp, Homo sapien
cacacaaacccctccattctgacac

SEQ ID NO: 1384702 - DNA, 25 bp, Homo sapien
gcagttgtaagtgttgaccccatcc

SEQ ID NO: 1384703 - DNA, 25 bp, Homo sapien
cagtgaaagtgactcattgtgccaa

SEQ ID NO: 1384704 - DNA, 25 bp, Homo sapien
tctcatacagaagaaacgacctgct

SEQ ID NO: 1384705 - DNA, 25 bp, Homo sapien
tctggcctcaagcatagctagacag

SEQ ID NO: 1384706 - DNA, 25 bp, Homo sapien
gaatagacccgcttcatgacttcag

SEQ ID NO: 1384707 - DNA, 25 bp, Homo sapien
tactgggacttacattaggcactgg

SEQ ID NO: 1384708 - DNA, 25 bp, Homo sapien
cctgcaagctattcgtacatggtaa

SEQ ID NO: 1384709 - DNA, 25 bp, Homo sapien
gattacatatttggcttcctcgaaa

SEQ ID NO: 1384710 - DNA, 25 bp, Homo sapien
ttcactctaactgcccacagtgtgg

SEQ ID NO: 1384711 - DNA, 25 bp, Homo sapien
cggctagtaagtaggaataagtact

SEQ ID NO: 1384712 - DNA, 25 bp, Homo sapien
ctattgtattaagggaaaaagcact

SEQ ID NO: 1384713 - DNA, 25 bp, Homo sapien
gccacatggctgacttgaccaagat

SEQ ID NO: 1384714 - DNA, 25 bp, Homo sapien
tgtggtgatggttactcctatctac

SEQ ID NO: 1384715 - DNA, 25 bp, Homo sapien
gtggtatgatcatttctgcatctgc

SEQ ID NO: 1384716 - DNA, 25 bp, Homo sapien
taatacaccctggaaagtggtatga

SEQ ID NO: 1384717 - DNA, 25 bp, Homo sapien
tcaaaggagctaaaataatacaccc

SEQ ID NO: 1384718 - DNA, 25 bp, Homo sapien
catcaggtaaaacagacttagggcc

SEQ ID NO: 1384719 - DNA, 25 bp, Homo sapien
ttactttaatgatatagggatatca

SEQ ID NO: 1384720 - DNA, 25 bp, Homo sapien
taaactgcctcggtttcaggaccca

SEQ ID NO: 1384721 - DNA, 25 bp, Homo sapien
tacaaccagagaataagagacagcc

SEQ ID NO: 1384722 - DNA, 25 bp, Homo sapien
taagcatggaagtacctggcacagt

SEQ ID NO: 1384723 - DNA, 25 bp, Homo sapien
gactacagtatcctttgcagggaaa

SEQ ID NO: 1384724 - DNA, 25 bp, Homo sapien
ttaaagcactttattaaccacacat

SEQ ID NO: 1384725 - DNA, 25 bp, Homo sapien
tcagtttaaagcactttattaacca

SEQ ID NO: 1384726 - DNA, 25 bp, Homo sapien
tcaattcagtttaaagcactttatt

SEQ ID NO: 1384727 - DNA, 25 bp, Homo sapien
aagcactttattaaccacacataca

SEQ ID NO: 1384728 - DNA, 25 bp, Homo sapien
taattctcatcgtgttcttttccat

SEQ ID NO: 1384729 - DNA, 25 bp, Homo sapien
ctaattctcatcgtgttcttttcca

SEQ ID NO: 1384730 - DNA, 25 bp, Homo sapien
ggaaggcagttgcactcaaaagtga

SEQ ID NO: 1384731 - DNA, 25 bp, Homo sapien
aagtgaagtcaccagtctgccgaca

SEQ ID NO: 1384732 - DNA, 25 bp, Homo sapien
cagggcacatacaggctgtcacagt

SEQ ID NO: 1384733 - DNA, 25 bp, Homo sapien
acagtactggcctgtgaagccctga

SEQ ID NO: 1384734 - DNA, 25 bp, Homo sapien
gagctagtaagctgactgaggtata

SEQ ID NO: 1384735 - DNA, 25 bp, Homo sapien
gagatgagctagtaagctgactgag

SEQ ID NO: 1384736 - DNA, 25 bp, Homo sapien
ctagtaagctgactgaggtatagtg

SEQ ID NO: 1384737 - DNA, 25 bp, Homo sapien
agtggagatgagctagtaagctgac

SEQ ID NO: 1384738 - DNA, 25 bp, Homo sapien
aaggatgactttgatctgtgatgat

SEQ ID NO: 1384739 - DNA, 25 bp, Homo sapien
caaaaggatgactttgatctgtgat

SEQ ID NO: 1384740 - DNA, 25 bp, Homo sapien
aaaggatgactttgatctgtgatga

SEQ ID NO: 1384741 - DNA, 25 bp, Homo sapien
accaaaaggatgactttgatctgtg

SEQ ID NO: 1384742 - DNA, 25 bp, Homo sapien
tcaggactgctacggacctccacca

SEQ ID NO: 1384743 - DNA, 25 bp, Homo sapien
tttcaggtcctaacatttgtgctca

SEQ ID NO: 1384744 - DNA, 25 bp, Homo sapien
ttcaggtcctaacatttgtgctcat

SEQ ID NO: 1384745 - DNA, 25 bp, Homo sapien
ggagaacatacaaaggatagctaga

SEQ ID NO: 1384746 - DNA, 25 bp, Homo sapien
aaggatagctagaaacatgagcctg

SEQ ID NO: 1384747 - DNA, 25 bp, Homo sapien
catacaaaggatagctagaaacatg

SEQ ID NO: 1384748 - DNA, 25 bp, Homo sapien
caaaggatagctagaaacatgagcc

SEQ ID NO: 1384749 - DNA, 25 bp, Homo sapien
tgtaaacccgacttgacaggtgcac

SEQ ID NO: 1384750 - DNA, 25 bp, Homo sapien
catatggcatgtgccgccattcagg

SEQ ID NO: 1384751 - DNA, 25 bp, Homo sapien
tcgagacacaaagcatggatgagat

SEQ ID NO: 1384752 - DNA, 25 bp, Homo sapien
taggtatcccggctgagcatatggc

SEQ ID NO: 1384753 - DNA, 25 bp, Homo sapien
cccagagctgcataagataagcatg

SEQ ID NO: 1384754 - DNA, 25 bp, Homo sapien
gagcggctaaggctctgggcatctt

SEQ ID NO: 1384755 - DNA, 25 bp, Homo sapien
agcaaggagcggctaaggctctggg

SEQ ID NO: 1384756 - DNA, 25 bp, Homo sapien
cagagctgcataagataagcatggc

SEQ ID NO: 1384757 - DNA, 25 bp, Homo sapien
gagaattgctaaccactccacgcac

SEQ ID NO: 1384758 - DNA, 25 bp, Homo sapien
tcctctagtcaagttcagtggtctc

SEQ ID NO: 1384759 - DNA, 25 bp, Homo sapien
tcaaaacccagtgaagtcttagtct

SEQ ID NO: 1384760 - DNA, 25 bp, Homo sapien
ggcttctatgactccctctgtctaa

SEQ ID NO: 1384761 - DNA, 25 bp, Homo sapien
tcctcatatttacgtgaaggcaaaa

SEQ ID NO: 1384762 - DNA, 25 bp, Homo sapien
aactggatagaatgctctagttgaa

SEQ ID NO: 1384763 - DNA, 25 bp, Homo sapien
ttctcctcatatttacgtgaaggca

SEQ ID NO: 1384764 - DNA, 25 bp, Homo sapien
tgtgttcgctgaataatatcaccca

SEQ ID NO: 1384765 - DNA, 25 bp, Homo sapien
tacaccccagttcatgcagcagaag

SEQ ID NO: 1384766 - DNA, 25 bp, Homo sapien
tacccatggtccaaagaaggagcag

SEQ ID NO: 1384767 - DNA, 25 bp, Homo sapien
cagactgatagggtacttaggctcc

SEQ ID NO: 1384768 - DNA, 25 bp, Homo sapien
caattaacaagtagccagggacaga

SEQ ID NO: 1384769 - DNA, 25 bp, Homo sapien
gctcaagaaccagtaacattccaca

SEQ ID NO: 1384770 - DNA, 25 bp, Homo sapien
tatacattaactagccactcactga

SEQ ID NO: 1384771 - DNA, 25 bp, Homo sapien
tattagccaattatctggcatccac

SEQ ID NO: 1384772 - DNA, 25 bp, Homo sapien
taacagtaagatagtaagaagttct

SEQ ID NO: 1384773 - DNA, 25 bp, Homo sapien
acacagggttcatagccatctcgac

SEQ ID NO: 1384774 - DNA, 25 bp, Homo sapien
ggttcatagccatctcgacactgca

SEQ ID NO: 1384775 - DNA, 25 bp, Homo sapien
tcatagccatctcgacactgcaatg

SEQ ID NO: 1384776 - DNA, 25 bp, Homo sapien
agggttcatagccatctcgacactg

SEQ ID NO: 1384777 - DNA, 25 bp, Homo sapien
tccctgtaaggctcaaatgctccct

SEQ ID NO: 1384778 - DNA, 25 bp, Homo sapien
ttcccacactgataagcccaatgca

SEQ ID NO: 1384779 - DNA, 25 bp, Homo sapien
aggctgcaggcccaaacaggcaaat

SEQ ID NO: 1384780 - DNA, 25 bp, Homo sapien
caggcaaattcaggaagagggtcat

SEQ ID NO: 1384781 - DNA, 25 bp, Homo sapien
cttccagaagcactacttgtaacat

SEQ ID NO: 1384782 - DNA, 25 bp, Homo sapien
acattaggttctaataagctcagaa

SEQ ID NO: 1384783 - DNA, 25 bp, Homo sapien
cattaggttctaataagctcagaaa

SEQ ID NO: 1384784 - DNA, 25 bp, Homo sapien
taggttctaataagctcagaaacta

SEQ ID NO: 1384785 - DNA, 25 bp, Homo sapien
gaaatatctaaatatggagattata

SEQ ID NO: 1384786 - DNA, 25 bp, Homo sapien
tcaataaacagtaggactgttgtca

SEQ ID NO: 1384787 - DNA, 25 bp, Homo sapien
acagtaggactgttgtcaggttaac

SEQ ID NO: 1384788 - DNA, 25 bp, Homo sapien
gcatcaataaacagtaggactgttg

SEQ ID NO: 1384789 - DNA, 25 bp, Homo sapien
taaacagtaggactgttgtcaggtt

SEQ ID NO: 1384790 - DNA, 25 bp, Homo sapien
tgagcccagtaatttctatagaacc

SEQ ID NO: 1384791 - DNA, 25 bp, Homo sapien
tatttgtatcactagattgagccca

SEQ ID NO: 1384792 - DNA, 25 bp, Homo sapien
tgtgtccataggtggcttaatagca

SEQ ID NO: 1384793 - DNA, 25 bp, Homo sapien
agacctggctttggagtcatgtgac

SEQ ID NO: 1384794 - DNA, 25 bp, Homo sapien
tccagttggattgctgtgagagtca

SEQ ID NO: 1384795 - DNA, 25 bp, Homo sapien
tgtgctagataaaagtggccttcag

SEQ ID NO: 1384796 - DNA, 25 bp, Homo sapien
cagtaagcttctgtacactggacaa

SEQ ID NO: 1384797 - DNA, 25 bp, Homo sapien
tcaggagtagcccttctatcaaagc

SEQ ID NO: 1384798 - DNA, 25 bp, Homo sapien
gggaaagaatactcgaattctgctc

SEQ ID NO: 1384799 - DNA, 25 bp, Homo sapien
taggaaccagggacaactgattaac

SEQ ID NO: 1384800 - DNA, 25 bp, Homo sapien
tcccttaagctatttgagactgatt

SEQ ID NO: 1384801 - DNA, 25 bp, Homo sapien
taaccatatggtctaaaggaattcc

SEQ ID NO: 1384802 - DNA, 25 bp, Homo sapien
gaggaagtccagtatgtttgaaaga

SEQ ID NO: 1384803 - DNA, 25 bp, Homo sapien
ggaagtccagtatgtttgaaagaac

SEQ ID NO: 1384804 - DNA, 25 bp, Homo sapien
taaggaggaagtccagtatgtttga

SEQ ID NO: 1384805 - DNA, 25 bp, Homo sapien
aggaggaagtccagtatgtttgaaa

SEQ ID NO: 1384806 - DNA, 25 bp, Homo sapien
gagcaacgaatgtcaaaaccagcgg

SEQ ID NO: 1384807 - DNA, 25 bp, Homo sapien
ctaaatatggtaatagctggcagac

SEQ ID NO: 1384808 - DNA, 25 bp, Homo sapien
ccaaacacttgagacctgcagggct

SEQ ID NO: 1384809 - DNA, 25 bp, Homo sapien
gacagccagcccagtaaattccaat

SEQ ID NO: 1384810 - DNA, 25 bp, Homo sapien
tcggagaccagaaactgccctaggc

SEQ ID NO: 1384811 - DNA, 25 bp, Homo sapien
taccatggctggagcgacgtagctg

SEQ ID NO: 1384812 - DNA, 25 bp, Homo sapien
gaaacaggttctgcaacacccatag

SEQ ID NO: 1384813 - DNA, 25 bp, Homo sapien
caacaatgagtccatcttggcaaga

SEQ ID NO: 1384814 - DNA, 25 bp, Homo sapien
tgtgactaagacctgctgctcagtt

SEQ ID NO: 1384815 - DNA, 25 bp, Homo sapien
gaatttggggcacatgccagacaag

SEQ ID NO: 1384816 - DNA, 25 bp, Homo sapien
catagatgctgtgactaagacctgc

SEQ ID NO: 1384817 - DNA, 25 bp, Homo sapien
tgggaaagcaggagtcatagatgct

SEQ ID NO: 1384818 - DNA, 25 bp, Homo sapien
tcagcaactacaatccaggtgaacc

SEQ ID NO: 1384819 - DNA, 25 bp, Homo sapien
caagcatatcccactgaatttaaac

SEQ ID NO: 1384820 - DNA, 25 bp, Homo sapien
tgctctgaaccatccaagcatatcc

SEQ ID NO: 1384821 - DNA, 25 bp, Homo sapien
taagatgtattgtaaggctgctctg

SEQ ID NO: 1384822 - DNA, 25 bp, Homo sapien
attggtgatcgtcacaccacattcc

SEQ ID NO: 1384823 - DNA, 25 bp, Homo sapien
caggttggaggaattggtgatcgtc

SEQ ID NO: 1384824 - DNA, 25 bp, Homo sapien
ggaattggtgatcgtcacaccacat

SEQ ID NO: 1384825 - DNA, 25 bp, Homo sapien
tggaggaattggtgatcgtcacacc

SEQ ID NO: 1384826 - DNA, 25 bp, Homo sapien
gaaacagcagcagagctccgcgcct

SEQ ID NO: 1384827 - DNA, 25 bp, Homo sapien
gcctcagcatgcagccacaccagtt

SEQ ID NO: 1384828 - DNA, 25 bp, Homo sapien
aaagaataacagcagttgagatttt

SEQ ID NO: 1384829 - DNA, 25 bp, Homo sapien
agaataacagcagttgagattttta

SEQ ID NO: 1384830 - DNA, 25 bp, Homo sapien
tcaaaactcaggcgcgccgcaaaac

SEQ ID NO: 1384831 - DNA, 25 bp, Homo sapien
gctctccacgccagaatctggcatt

SEQ ID NO: 1384832 - DNA, 25 bp, Homo sapien
gccgtttggcttggcggccctgccc

SEQ ID NO: 1384833 - DNA, 25 bp, Homo sapien
agaatctggcattccttcgctcagc

SEQ ID NO: 1384834 - DNA, 25 bp, Homo sapien
atgtgccgccccctggcaaaggcga

SEQ ID NO: 1384835 - DNA, 25 bp, Homo sapien
ctgaagggcaaaactgcccacctcc

SEQ ID NO: 1384836 - DNA, 25 bp, Homo sapien
ctgcccacctccctgcaccctggca

SEQ ID NO: 1384837 - DNA, 25 bp, Homo sapien
tgaagggcaaaactgcccacctccc

SEQ ID NO: 1384838 - DNA, 25 bp, Homo sapien
aaactgcccacctccctgcaccctg

SEQ ID NO: 1384839 - DNA, 25 bp, Homo sapien
gtttctgagacttgctgccggcctc

SEQ ID NO: 1384840 - DNA, 25 bp, Homo sapien
ggagtttctgagacttgctgccggc

SEQ ID NO: 1384841 - DNA, 25 bp, Homo sapien
ctccctcctgccgaggaggcgtgta

SEQ ID NO: 1384842 - DNA, 25 bp, Homo sapien
ccctcctgccgaggaggcgtgtaag

SEQ ID NO: 1384843 - DNA, 25 bp, Homo sapien
tgggaacccagcgagtggcctcgct

SEQ ID NO: 1384844 - DNA, 25 bp, Homo sapien
ctcttgggaacccagcgagtggcct

SEQ ID NO: 1384845 - DNA, 25 bp, Homo sapien
caaactcttgggaacccagcgagtg

SEQ ID NO: 1384846 - DNA, 25 bp, Homo sapien
ccccggcgatgtccaaactcttggg

SEQ ID NO: 1384847 - DNA, 25 bp, Homo sapien
acacagagaaggaccgagggggaga

SEQ ID NO: 1384848 - DNA, 25 bp, Homo sapien
cacagagaaggaccgagggggagaa

SEQ ID NO: 1384849 - DNA, 25 bp, Homo sapien
gcgcagcacagccagagcgccagca

SEQ ID NO: 1384850 - DNA, 25 bp, Homo sapien
agcgcccacagcagagcggggcgca

SEQ ID NO: 1384851 - DNA, 25 bp, Homo sapien
catgcgcgggggccgcgcagcacag

SEQ ID NO: 1384852 - DNA, 25 bp, Homo sapien
cagcagagcggggcgcagggcgggc

SEQ ID NO: 1384853 - DNA, 25 bp, Homo sapien
cgccgccgccgcctgggcagatcca

SEQ ID NO: 1384854 - DNA, 25 bp, Homo sapien
gccgccgccgccgcctgggcagatc

SEQ ID NO: 1384855 - DNA, 25 bp, Homo sapien
cgccgccgcctgggcagatccacat

SEQ ID NO: 1384856 - DNA, 25 bp, Homo sapien
cttctcggtcgcctcctcctccgcc

SEQ ID NO: 1384857 - DNA, 25 bp, Homo sapien
tctcgggtgtgcaacgaagcagcct

SEQ ID NO: 1384858 - DNA, 25 bp, Homo sapien
cgggtgtgcaacgaagcagcctcgt

SEQ ID NO: 1384859 - DNA, 25 bp, Homo sapien
tgtgcaacgaagcagcctcgtgtgt

SEQ ID NO: 1384860 - DNA, 25 bp, Homo sapien
tttctcgggtgtgcaacgaagcagc

SEQ ID NO: 1384861 - DNA, 25 bp, Homo sapien
tgcagaattgggcacttatttgttc

SEQ ID NO: 1384862 - DNA, 25 bp, Homo sapien
ttgcctcggtttctatcacataagt

SEQ ID NO: 1384863 - DNA, 25 bp, Homo sapien
tgtcctctcagagccgataagctgt

SEQ ID NO: 1384864 - DNA, 25 bp, Homo sapien
tatgaataagggctaccaattgttt

SEQ ID NO: 1384865 - DNA, 25 bp, Homo sapien
ttcctacttcactaaagacatctcc

SEQ ID NO: 1384866 - DNA, 25 bp, Homo sapien
ctaaagacatctcctagttcaaata

SEQ ID NO: 1384867 - DNA, 25 bp, Homo sapien
aagacatctcctagttcaaatatca

SEQ ID NO: 1384868 - DNA, 25 bp, Homo sapien
cttcctacttcactaaagacatctc

SEQ ID NO: 1384869 - DNA, 25 bp, Homo sapien
agagggtgaaccacaggctatttcc

SEQ ID NO: 1384870 - DNA, 25 bp, Homo sapien
caaggtacttgctggaggacttatc

SEQ ID NO: 1384871 - DNA, 25 bp, Homo sapien
gatttgttagctctgtggactggag

SEQ ID NO: 1384872 - DNA, 25 bp, Homo sapien
gcagctgcctttctcgctttcaaca

SEQ ID NO: 1384873 - DNA, 25 bp, Homo sapien
tggctgtagattctaagtggacact

SEQ ID NO: 1384874 - DNA, 25 bp, Homo sapien
aagagttggctgtagattctaagtg

SEQ ID NO: 1384875 - DNA, 25 bp, Homo sapien
gagttggctgtagattctaagtgga

SEQ ID NO: 1384876 - DNA, 25 bp, Homo sapien
gttggctgtagattctaagtggaca

SEQ ID NO: 1384877 - DNA, 25 bp, Homo sapien
ctggcccttctgatttggatggtca

SEQ ID NO: 1384878 - DNA, 25 bp, Homo sapien
aaccccttggagtaccacagtggag

SEQ ID NO: 1384879 - DNA, 25 bp, Homo sapien
gagtctgcaacaccagctaatgggc

SEQ ID NO: 1384880 - DNA, 25 bp, Homo sapien
tctgatttggatggtcatctgccct

SEQ ID NO: 1384881 - DNA, 25 bp, Homo sapien
tgtattgttatagttagccagacac

SEQ ID NO: 1384882 - DNA, 25 bp, Homo sapien
ttgttatagttagccagacaccaag

SEQ ID NO: 1384883 - DNA, 25 bp, Homo sapien
catcatgtgtattgttatagttagc

SEQ ID NO: 1384884 - DNA, 25 bp, Homo sapien
catgtgtattgttatagttagccag

SEQ ID NO: 1384885 - DNA, 25 bp, Homo sapien
ccttcctcaaccaacggtgctctct

SEQ ID NO: 1384886 - DNA, 25 bp, Homo sapien
tccttcctcaaccaacggtgctctc

SEQ ID NO: 1384887 - DNA, 25 bp, Homo sapien
cttcctcaaccaacggtgctctctc

SEQ ID NO: 1384888 - DNA, 25 bp, Homo sapien
ttcctcaaccaacggtgctctctcc

SEQ ID NO: 1384889 - DNA, 25 bp, Homo sapien
aacaagccaactccaaacaggtaat

SEQ ID NO: 1384890 - DNA, 25 bp, Homo sapien
acaagccaactccaaacaggtaata

SEQ ID NO: 1384891 - DNA, 25 bp, Homo sapien
cttcatcagatttaccccagctttc

SEQ ID NO: 1384892 - DNA, 25 bp, Homo sapien
tttactaaggctcctgtgctcttca

SEQ ID NO: 1384893 - DNA, 25 bp, Homo sapien
ccggatttactaaggctcctgtgct

SEQ ID NO: 1384894 - DNA, 25 bp, Homo sapien
tcatcagatttaccccagctttcca

SEQ ID NO: 1384895 - DNA, 25 bp, Homo sapien
cactgaagcctgatgatgaatagag

SEQ ID NO: 1384896 - DNA, 25 bp, Homo sapien
catccgcatgcctgcttagcagcaa

SEQ ID NO: 1384897 - DNA, 25 bp, Homo sapien
aagcctgatgatgaatagaggtaca

SEQ ID NO: 1384898 - DNA, 25 bp, Homo sapien
agtgctgagcagcatccgcatgcct

SEQ ID NO: 1384899 - DNA, 25 bp, Homo sapien
catcaggttggtccccctttcaaat

SEQ ID NO: 1384900 - DNA, 25 bp, Homo sapien
tcaggttggtccccctttcaaatga

SEQ ID NO: 1384901 - DNA, 25 bp, Homo sapien
ctccatcaggttggtccccctttca

SEQ ID NO: 1384902 - DNA, 25 bp, Homo sapien
tggtccccctttcaaatgacccatc

SEQ ID NO: 1384903 - DNA, 25 bp, Homo sapien
tttcagggaggtagcaaaggcattt

SEQ ID NO: 1384904 - DNA, 25 bp, Homo sapien
cagtacccggtgatactcatggtga

SEQ ID NO: 1384905 - DNA, 25 bp, Homo sapien
tgctcgccacgcttgactgtgtagg

SEQ ID NO: 1384906 - DNA, 25 bp, Homo sapien
cggcttgggtcatgctgggcactca

SEQ ID NO: 1384907 - DNA, 25 bp, Homo sapien
gtctgagcagctctatttaaccgca

SEQ ID NO: 1384908 - DNA, 25 bp, Homo sapien
cacagcagctaccactgcatgcaaa

SEQ ID NO: 1384909 - DNA, 25 bp, Homo sapien
ctatttaaccgcagcctcacagcag

SEQ ID NO: 1384910 - DNA, 25 bp, Homo sapien
tgctttcctgttgcagtctgagcag

SEQ ID NO: 1384911 - DNA, 25 bp, Homo sapien
aggagactgctagaagtcagctgga

SEQ ID NO: 1384912 - DNA, 25 bp, Homo sapien
ggagactgctagaagtcagctggaa

SEQ ID NO: 1384913 - DNA, 25 bp, Homo sapien
ctaggggcaagtatagggcaaccag

SEQ ID NO: 1384914 - DNA, 25 bp, Homo sapien
caagtatagggcaaccagagggtaa

SEQ ID NO: 1384915 - DNA, 25 bp, Homo sapien
ctatttggtaaatcttgctcattcc

SEQ ID NO: 1384916 - DNA, 25 bp, Homo sapien
tttcacgctgtccctatttggtaaa

SEQ ID NO: 1384917 - DNA, 25 bp, Homo sapien
ttcacgctgtccctatttggtaaat

SEQ ID NO: 1384918 - DNA, 25 bp, Homo sapien
cctatttggtaaatcttgctcattc

SEQ ID NO: 1384919 - DNA, 25 bp, Homo sapien
ccagactgcgaatggcaaacaagta

SEQ ID NO: 1384920 - DNA, 25 bp, Homo sapien
caggaggtaagtctagaatggcaca

SEQ ID NO: 1384921 - DNA, 25 bp, Homo sapien
cacagagtgagccaaggcacaaggt

SEQ ID NO: 1384922 - DNA, 25 bp, Homo sapien
tatctggtgggttctcatgactgcc

SEQ ID NO: 1384923 - DNA, 25 bp, Homo sapien
cacttacggctcaaaaaatgaagga

SEQ ID NO: 1384924 - DNA, 25 bp, Homo sapien
tttatactgctaggtcaacgctgcc

SEQ ID NO: 1384925 - DNA, 25 bp, Homo sapien
ccttaattgtatggccatcagcacc

SEQ ID NO: 1384926 - DNA, 25 bp, Homo sapien
tatgagaactgagtgactacattgc

SEQ ID NO: 1384927 - DNA, 25 bp, Homo sapien
ccctatatgtgcagaaatgattgtc

SEQ ID NO: 1384928 - DNA, 25 bp, Homo sapien
tttattaaaccctatatgtgcagaa

SEQ ID NO: 1384929 - DNA, 25 bp, Homo sapien
gaaaatataaatctcaagctcctta

SEQ ID NO: 1384930 - DNA, 25 bp, Homo sapien
taaatctcaagctccttaaatgtga

SEQ ID NO: 1384931 - DNA, 25 bp, Homo sapien
ccacatcctttatctctggagctct

SEQ ID NO: 1384932 - DNA, 25 bp, Homo sapien
gagttccacatcctttatctctgga

SEQ ID NO: 1384933 - DNA, 25 bp, Homo sapien
catcctttatctctggagctcttaa

SEQ ID NO: 1384934 - DNA, 25 bp, Homo sapien
ctttgagttccacatcctttatctc

SEQ ID NO: 1384935 - DNA, 25 bp, Homo sapien
gaagttcagcgtcacaataaccaga

SEQ ID NO: 1384936 - DNA, 25 bp, Homo sapien
tctttaacccatatggcaatctggc

SEQ ID NO: 1384937 - DNA, 25 bp, Homo sapien
aataaccagagtgtacagtgtccaa

SEQ ID NO: 1384938 - DNA, 25 bp, Homo sapien
tttgaacagcctgaaacagtatgtg

SEQ ID NO: 1384939 - DNA, 25 bp, Homo sapien
cacttgaaatctgcctaagtttcat

SEQ ID NO: 1384940 - DNA, 25 bp, Homo sapien
tctgcctttgatggctccttatttt

SEQ ID NO: 1384941 - DNA, 25 bp, Homo sapien
aatctgcctaagtttcattctgcct

SEQ ID NO: 1384942 - DNA, 25 bp, Homo sapien
gtttcattctgcctttgatggctcc

SEQ ID NO: 1384943 - DNA, 25 bp, Homo sapien
taggttgttctccttatcacatata

SEQ ID NO: 1384944 - DNA, 25 bp, Homo sapien
tggaacaaagagactccataaacta

SEQ ID NO: 1384945 - DNA, 25 bp, Homo sapien
tatctgtgtgctcaactggaacaaa

SEQ ID NO: 1384946 - DNA, 25 bp, Homo sapien
aacctaaagaaaatggcacgcgtga

SEQ ID NO: 1384947 - DNA, 25 bp, Homo sapien
aatgagagccaactcctgtttgttg

SEQ ID NO: 1384948 - DNA, 25 bp, Homo sapien
gcttggctgcgatgataactccttc

SEQ ID NO: 1384949 - DNA, 25 bp, Homo sapien
ttcctgcttggctgcgatgataact

SEQ ID NO: 1384950 - DNA, 25 bp, Homo sapien
gcgatgataactccttcagattttt

SEQ ID NO: 1384951 - DNA, 25 bp, Homo sapien
ggctgcgatgataactccttcagat

SEQ ID NO: 1384952 - DNA, 25 bp, Homo sapien
acccgcatgacgctcagtttgccca

SEQ ID NO: 1384953 - DNA, 25 bp, Homo sapien
aacccgcatgacgctcagtttgccc

SEQ ID NO: 1384954 - DNA, 25 bp, Homo sapien
caacccgcatgacgctcagtttgcc

SEQ ID NO: 1384955 - DNA, 25 bp, Homo sapien
cccgcatgacgctcagtttgcccat

SEQ ID NO: 1384956 - DNA, 25 bp, Homo sapien
tgtctaccaattaatgtacttgtag

SEQ ID NO: 1384957 - DNA, 25 bp, Homo sapien
aaattgtgcatctaatgtctaccaa

SEQ ID NO: 1384958 - DNA, 25 bp, Homo sapien
gatgtatcttatcttaacttgagtc

SEQ ID NO: 1384959 - DNA, 25 bp, Homo sapien
taatgtgtctagagtgttgggcaga

SEQ ID NO: 1384960 - DNA, 25 bp, Homo sapien
cattcttgtatacctattaaggtag

SEQ ID NO: 1384961 - DNA, 25 bp, Homo sapien
tggtgtcactattaccattgcaaat

SEQ ID NO: 1384962 - DNA, 25 bp, Homo sapien
tcactattaccattgcaaatgtact

SEQ ID NO: 1384963 - DNA, 25 bp, Homo sapien
cactttaacaatgccttccctttgg

SEQ ID NO: 1384964 - DNA, 25 bp, Homo sapien
tggaacaaggacttgagtagaaggt

SEQ ID NO: 1384965 - DNA, 25 bp, Homo sapien
tttgctgcttcccaggcctaatgaa

SEQ ID NO: 1384966 - DNA, 25 bp, Homo sapien
gcctaatgaattagccagaaggaac

SEQ ID NO: 1384967 - DNA, 25 bp, Homo sapien
tagcacacagtgtcaaactggtaag

SEQ ID NO: 1384968 - DNA, 25 bp, Homo sapien
cacaatggaaatcatggagccacag

SEQ ID NO: 1384969 - DNA, 25 bp, Homo sapien
aagggcacaagtgttacagaatcct

SEQ ID NO: 1384970 - DNA, 25 bp, Homo sapien
aaagggcacaagtgttacagaatcc

SEQ ID NO: 1384971 - DNA, 25 bp, Homo sapien
caaagggcacaagtgttacagaatc

SEQ ID NO: 1384972 - DNA, 25 bp, Homo sapien
agggcacaagtgttacagaatcctg

SEQ ID NO: 1384973 - DNA, 25 bp, Homo sapien
tgggttgcgactgtacccgggttca

SEQ ID NO: 1384974 - DNA, 25 bp, Homo sapien
gttagctgtgcacacgatgcccagg

SEQ ID NO: 1384975 - DNA, 25 bp, Homo sapien
caggctcatctggtgtcaagctttg

SEQ ID NO: 1384976 - DNA, 25 bp, Homo sapien
tttctctacagcttggaccccttca

SEQ ID NO: 1384977 - DNA, 25 bp, Homo sapien
tgtgggtttgttgcttcatgatctc

SEQ ID NO: 1384978 - DNA, 25 bp, Homo sapien
caggcagaagctgtaaggtctctca

SEQ ID NO: 1384979 - DNA, 25 bp, Homo sapien
gcaggcacccagaaggactctagtg

SEQ ID NO: 1384980 - DNA, 25 bp, Homo sapien
atgatcatccctcagaagtcccaga

SEQ ID NO: 1384981 - DNA, 25 bp, Homo sapien
ggatgccatattgttgggtcttgcc

SEQ ID NO: 1384982 - DNA, 25 bp, Homo sapien
tggcagtctctgtcttaagtagagt

SEQ ID NO: 1384983 - DNA, 25 bp, Homo sapien
tgtaactaatcattgctaaggttgg

SEQ ID NO: 1384984 - DNA, 25 bp, Homo sapien
ctagtgttaacatctctgttgaagc

SEQ ID NO: 1384985 - DNA, 25 bp, Homo sapien
agtaattctagtttgatgtctcact

SEQ ID NO: 1384986 - DNA, 25 bp, Homo sapien
tagtaattctagtttgatgtctcac

SEQ ID NO: 1384987 - DNA, 25 bp, Homo sapien
gtaattctagtttgatgtctcactt

SEQ ID NO: 1384988 - DNA, 25 bp, Homo sapien
ctagtaattctagtttgatgtctca

SEQ ID NO: 1384989 - DNA, 25 bp, Homo sapien
ctggtcttattctgcttatctctgc

SEQ ID NO: 1384990 - DNA, 25 bp, Homo sapien
tggtcttattctgcttatctctgct

SEQ ID NO: 1384991 - DNA, 25 bp, Homo sapien
tctggtcttattctgcttatctctg

SEQ ID NO: 1384992 - DNA, 25 bp, Homo sapien
gaaatgtcccattggtggggcagtc

SEQ ID NO: 1384993 - DNA, 25 bp, Homo sapien
ggctaagtgtttgttgcatgagttc

SEQ ID NO: 1384994 - DNA, 25 bp, Homo sapien
catgcaactcttctttcgcttgaac

SEQ ID NO: 1384995 - DNA, 25 bp, Homo sapien
gagaaagagaaatgtcccattggtg

SEQ ID NO: 1384996 - DNA, 25 bp, Homo sapien
caggtctcctggcaacaagtttctt

SEQ ID NO: 1384997 - DNA, 25 bp, Homo sapien
caggtttcagttatatatcttttgt

SEQ ID NO: 1384998 - DNA, 25 bp, Homo sapien
gacaggtctcctggcaacaagtttc

SEQ ID NO: 1384999 - DNA, 25 bp, Homo sapien
aaaatgttgatccaggtttcagtta

SEQ ID NO: 1385000 - DNA, 25 bp, Homo sapien
tgaatatagcgacagcagcagtctt

SEQ ID NO: 1385001 - DNA, 25 bp, Homo sapien
ttggtgtttggtgaaggtcaaacat

SEQ ID NO: 1385002 - DNA, 25 bp, Homo sapien
tcaaacattcagacactcgcaatga

SEQ ID NO: 1385003 - DNA, 25 bp, Homo sapien
cactcgcaatgaatatagcgacagc

SEQ ID NO: 1385004 - DNA, 25 bp, Homo sapien
agggacatattcagaccacggcagc

SEQ ID NO: 1385005 - DNA, 25 bp, Homo sapien
tgttctagaatggtatgtgaaggac

SEQ ID NO: 1385006 - DNA, 25 bp, Homo sapien
taagactctcgtagcagtgtcctgg

SEQ ID NO: 1385007 - DNA, 25 bp, Homo sapien
acatattcagaccacggcagcagtg

SEQ ID NO: 1385008 - DNA, 25 bp, Homo sapien
ggagaagcattcagagcacagcagg

SEQ ID NO: 1385009 - DNA, 25 bp, Homo sapien
ggataagcattcagaccctcgtagc

SEQ ID NO: 1385010 - DNA, 25 bp, Homo sapien
ataagcattcagaccctcgtagcag

SEQ ID NO: 1385011 - DNA, 25 bp, Homo sapien
gataagcattcagaccctcgtagca

SEQ ID NO: 1385012 - DNA, 25 bp, Homo sapien
gcctggagcctacccaacctgacgc

SEQ ID NO: 1385013 - DNA, 25 bp, Homo sapien
gtgcctggagcctacccaacctgac

SEQ ID NO: 1385014 - DNA, 25 bp, Homo sapien
gtgagagtgcctggagcctacccaa

SEQ ID NO: 1385015 - DNA, 25 bp, Homo sapien
gagagtgcctggagcctacccaacc

SEQ ID NO: 1385016 - DNA, 25 bp, Homo sapien
taggtcccatgtgcccagtcctcca

SEQ ID NO: 1385017 - DNA, 25 bp, Homo sapien
cttgacctggtcaccagtgccccag

SEQ ID NO: 1385018 - DNA, 25 bp, Homo sapien
tgaccagaccagcactgagccccag

SEQ ID NO: 1385019 - DNA, 25 bp, Homo sapien
tgaccaggtctccactgatcaagcc

SEQ ID NO: 1385020 - DNA, 25 bp, Homo sapien
tcctgttcctgtgataatgacacca

SEQ ID NO: 1385021 - DNA, 25 bp, Homo sapien
ctgttcctgtgataatgacaccatc

SEQ ID NO: 1385022 - DNA, 25 bp, Homo sapien
gttcctgtgataatgacaccatcag

SEQ ID NO: 1385023 - DNA, 25 bp, Homo sapien
aaatcctgttcctgtgataatgaca

SEQ ID NO: 1385024 - DNA, 25 bp, Homo sapien
gtccttcctggactgattggcaagg

SEQ ID NO: 1385025 - DNA, 25 bp, Homo sapien
actgattggcaaggagcttactgat

SEQ ID NO: 1385026 - DNA, 25 bp, Homo sapien
ttcctggactgattggcaaggagct

SEQ ID NO: 1385027 - DNA, 25 bp, Homo sapien
tggactgattggcaaggagcttact

SEQ ID NO: 1385028 - DNA, 25 bp, Homo sapien
ttcagtgctggtgggatacatcaga

SEQ ID NO: 1385029 - DNA, 25 bp, Homo sapien
tgctggtgggatacatcagaaagtg

SEQ ID NO: 1385030 - DNA, 25 bp, Homo sapien
cttcagtgctggtgggatacatcag

SEQ ID NO: 1385031 - DNA, 25 bp, Homo sapien
cagtgctggtgggatacatcagaaa

SEQ ID NO: 1385032 - DNA, 25 bp, Homo sapien
acgtcactcgctgctggtaaggtta

SEQ ID NO: 1385033 - DNA, 25 bp, Homo sapien
gctgctggtaaggttacatcagttc

SEQ ID NO: 1385034 - DNA, 25 bp, Homo sapien
cggtggaccggccaccaacgtcact

SEQ ID NO: 1385035 - DNA, 25 bp, Homo sapien
cacagacttgagcatgccgggcaag

SEQ ID NO: 1385036 - DNA, 25 bp, Homo sapien
tccgagccagcttgtcctgccttgg

SEQ ID NO: 1385037 - DNA, 25 bp, Homo sapien
agccagcttgtcctgccttgggcca

SEQ ID NO: 1385038 - DNA, 25 bp, Homo sapien
gctccgagccagcttgtcctgcctt

SEQ ID NO: 1385039 - DNA, 25 bp, Homo sapien
ccgagccagcttgtcctgccttggg

SEQ ID NO: 1385040 - DNA, 25 bp, Homo sapien
atatctgtctctgccatactacgtg

SEQ ID NO: 1385041 - DNA, 25 bp, Homo sapien
catgttattatatggtatatctgtc

SEQ ID NO: 1385042 - DNA, 25 bp, Homo sapien
tattatatggtatatctgtctctgc

SEQ ID NO: 1385043 - DNA, 25 bp, Homo sapien
tgccatactacgtgaaatttctttt

SEQ ID NO: 1385044 - DNA, 25 bp, Homo sapien
gatagttccaatggtggactggctg

SEQ ID NO: 1385045 - DNA, 25 bp, Homo sapien
tggctggatagttccaatggtggac

SEQ ID NO: 1385046 - DNA, 25 bp, Homo sapien
tggatagttccaatggtggactggc

SEQ ID NO: 1385047 - DNA, 25 bp, Homo sapien
ctactggctggatagttccaatggt

SEQ ID NO: 1385048 - DNA, 25 bp, Homo sapien
tgggggactgctctcagaccctggc

SEQ ID NO: 1385049 - DNA, 25 bp, Homo sapien
gggcagcgccgtcccatcccagaac

SEQ ID NO: 1385050 - DNA, 25 bp, Homo sapien
tccctggaccccggctgggtgatgt

SEQ ID NO: 1385051 - DNA, 25 bp, Homo sapien
catcccagaactggactttctgagt

SEQ ID NO: 1385052 - DNA, 25 bp, Homo sapien
acaggttcctcgataacatgcattt

SEQ ID NO: 1385053 - DNA, 25 bp, Homo sapien
cgataacatgcatttcccctgacat

SEQ ID NO: 1385054 - DNA, 25 bp, Homo sapien
agctgtccacaggttcctcgataac

SEQ ID NO: 1385055 - DNA, 25 bp, Homo sapien
ctcgataacatgcatttcccctgac

SEQ ID NO: 1385056 - DNA, 25 bp, Homo sapien
ggtcacccataagaacacaagctgt

SEQ ID NO: 1385057 - DNA, 25 bp, Homo sapien
cagccagcttctttgctaaggccaa

SEQ ID NO: 1385058 - DNA, 25 bp, Homo sapien
cacaagctgttcaatgtaggcagga

SEQ ID NO: 1385059 - DNA, 25 bp, Homo sapien
cactgtcttggcgttttgcactggg

SEQ ID NO: 1385060 - DNA, 25 bp, Homo sapien
ggatagcatcaaggtgatggttctt

SEQ ID NO: 1385061 - DNA, 25 bp, Homo sapien
agcatcaaggtgatggttctttatc

SEQ ID NO: 1385062 - DNA, 25 bp, Homo sapien
gaggatgagatctgttaaacaacca

SEQ ID NO: 1385063 - DNA, 25 bp, Homo sapien
gagcaggaggatgagatctgttaaa

SEQ ID NO: 1385064 - DNA, 25 bp, Homo sapien
cataattcaatcacattataccagg

SEQ ID NO: 1385065 - DNA, 25 bp, Homo sapien
ataattcaatcacattataccagga

SEQ ID NO: 1385066 - DNA, 25 bp, Homo sapien
gtatgatttagttcacgattgctac

SEQ ID NO: 1385067 - DNA, 25 bp, Homo sapien
catagtatgatttagttcacgattg

SEQ ID NO: 1385068 - DNA, 25 bp, Homo sapien
tcagccaaagtggccaaagaaatcc

SEQ ID NO: 1385069 - DNA, 25 bp, Homo sapien
aagtggccaaagaaatcctgttcct

SEQ ID NO: 1385070 - DNA, 25 bp, Homo sapien
gtggccaaagaaatcctgttcctgt

SEQ ID NO: 1385071 - DNA, 25 bp, Homo sapien
gccaaagtggccaaagaaatcctgt

SEQ ID NO: 1385072 - DNA, 25 bp, Homo sapien
gagtggaaggcatctatactgaagt

SEQ ID NO: 1385073 - DNA, 25 bp, Homo sapien
gcatctatactgaagtggatggcct

SEQ ID NO: 1385074 - DNA, 25 bp, Homo sapien
ggcatctatactgaagtggatggcc

SEQ ID NO: 1385075 - DNA, 25 bp, Homo sapien
ctgacagagtggaaggcatctatac

SEQ ID NO: 1385076 - DNA, 25 bp, Homo sapien
cttgccctgtctccaggctatctct

SEQ ID NO: 1385077 - DNA, 25 bp, Homo sapien
cctgtctccaggctatctcttcagt

SEQ ID NO: 1385078 - DNA, 25 bp, Homo sapien
ttgccctgtctccaggctatctctt

SEQ ID NO: 1385079 - DNA, 25 bp, Homo sapien
gccctgtctccaggctatctcttca

SEQ ID NO: 1385080 - DNA, 25 bp, Homo sapien
tagaagccccgatgcttggactgga

SEQ ID NO: 1385081 - DNA, 25 bp, Homo sapien
agccccgatgcttggactggagccc

SEQ ID NO: 1385082 - DNA, 25 bp, Homo sapien
gctgtagaagccccgatgcttggac

SEQ ID NO: 1385083 - DNA, 25 bp, Homo sapien
ccaaaggcggcacacaccccagttc

SEQ ID NO: 1385084 - DNA, 25 bp, Homo sapien
tggctgccagggctgttgggatgca

SEQ ID NO: 1385085 - DNA, 25 bp, Homo sapien
gttgggtgagaatatgtatggcatg

SEQ ID NO: 1385086 - DNA, 25 bp, Homo sapien
cagggctgttgggatgcacgttcac

SEQ ID NO: 1385087 - DNA, 25 bp, Homo sapien
tatgtatggcatgctgctggctgcc

SEQ ID NO: 1385088 - DNA, 25 bp, Homo sapien
cttcagggacctcaaagtgaccagc

SEQ ID NO: 1385089 - DNA, 25 bp, Homo sapien
caggagccatttggggctgcagagc

SEQ ID NO: 1385090 - DNA, 25 bp, Homo sapien
aagtgaccagcttcccctttatgaa

SEQ ID NO: 1385091 - DNA, 25 bp, Homo sapien
tttatgaatgacttccaaggcccag

SEQ ID NO: 1385092 - DNA, 25 bp, Homo sapien
agagaaaatacaagctgagcttaga

SEQ ID NO: 1385093 - DNA, 25 bp, Homo sapien
cagagctggcgcagagaaaatacaa

SEQ ID NO: 1385094 - DNA, 25 bp, Homo sapien
gagaaaatacaagctgagcttagaa

SEQ ID NO: 1385095 - DNA, 25 bp, Homo sapien
gaaaatacaagctgagcttagaaca

SEQ ID NO: 1385096 - DNA, 25 bp, Homo sapien
tgggagcaagtgtccaatacagcaa

SEQ ID NO: 1385097 - DNA, 25 bp, Homo sapien
tagatgggagcaagtgtccaataca

SEQ ID NO: 1385098 - DNA, 25 bp, Homo sapien
gagcaagtgtccaatacagcaacag

SEQ ID NO: 1385099 - DNA, 25 bp, Homo sapien
aagtagatgggagcaagtgtccaat

SEQ ID NO: 1385100 - DNA, 25 bp, Homo sapien
aataaagttagcaaatggatatctc

SEQ ID NO: 1385101 - DNA, 25 bp, Homo sapien
gaataaagttagcaaatggatatct

SEQ ID NO: 1385102 - DNA, 25 bp, Homo sapien
gatctttacttcacatgcaaaagtc

SEQ ID NO: 1385103 - DNA, 25 bp, Homo sapien
ataaagttagcaaatggatatctct

SEQ ID NO: 1385104 - DNA, 25 bp, Homo sapien
ggcagttatttgaagtctgaggttt

SEQ ID NO: 1385105 - DNA, 25 bp, Homo sapien
cagtcaagtagttctggcagttatt

SEQ ID NO: 1385106 - DNA, 25 bp, Homo sapien
ttatttgaagtctgaggtttgaagt

SEQ ID NO: 1385107 - DNA, 25 bp, Homo sapien
cagttatttgaagtctgaggtttga

SEQ ID NO: 1385108 - DNA, 25 bp, Homo sapien
tctccataaagagctgatactgatc

SEQ ID NO: 1385109 - DNA, 25 bp, Homo sapien
tccataaagagctgatactgatcat

SEQ ID NO: 1385110 - DNA, 25 bp, Homo sapien
gctctttctccataaagagctgata

SEQ ID NO: 1385111 - DNA, 25 bp, Homo sapien
agagctgatactgatcattgctatt

SEQ ID NO: 1385112 - DNA, 25 bp, Homo sapien
tgctgcaaagccttccttatattct

SEQ ID NO: 1385113 - DNA, 25 bp, Homo sapien
gaactgttagctttcaatgctgctg

SEQ ID NO: 1385114 - DNA, 25 bp, Homo sapien
cttatattcttctaactcagttgta

SEQ ID NO: 1385115 - DNA, 25 bp, Homo sapien
attcttctaactcagttgtaacctc

SEQ ID NO: 1385116 - DNA, 25 bp, Homo sapien
tatttagtgaagctgtattatatcc

SEQ ID NO: 1385117 - DNA, 25 bp, Homo sapien
ttagtgaagctgtattatatccttg

SEQ ID NO: 1385118 - DNA, 25 bp, Homo sapien
agtgaagctgtattatatccttgtt

SEQ ID NO: 1385119 - DNA, 25 bp, Homo sapien
cttatttagtgaagctgtattatat

SEQ ID NO: 1385120 - DNA, 25 bp, Homo sapien
acttctgttgaaaaacttgattctc

SEQ ID NO: 1385121 - DNA, 25 bp, Homo sapien
taacttctgttgaaaaacttgattc

SEQ ID NO: 1385122 - DNA, 25 bp, Homo sapien
ttccttctccaccataagatcatca

SEQ ID NO: 1385123 - DNA, 25 bp, Homo sapien
tctgttgaaaaacttgattctcttt

SEQ ID NO: 1385124 - DNA, 25 bp, Homo sapien
gtacagataccgtattaggaggaga

SEQ ID NO: 1385125 - DNA, 25 bp, Homo sapien
cagacgtgaaccatggcacccagcc

SEQ ID NO: 1385126 - DNA, 25 bp, Homo sapien
tacagacgtgaaccatggcacccag

SEQ ID NO: 1385127 - DNA, 25 bp, Homo sapien
gacgtgaaccatggcacccagccct

SEQ ID NO: 1385128 - DNA, 25 bp, Homo sapien
tgaaccatggcacccagccctcttt

SEQ ID NO: 1385129 - DNA, 25 bp, Homo sapien
agctgcacccagaactgttcagctg

SEQ ID NO: 1385130 - DNA, 25 bp, Homo sapien
gacaagctgcacccagaactgttca

SEQ ID NO: 1385131 - DNA, 25 bp, Homo sapien
caagctgcacccagaactgttcagc

SEQ ID NO: 1385132 - DNA, 25 bp, Homo sapien
acaagctgcacccagaactgttcag

SEQ ID NO: 1385133 - DNA, 25 bp, Homo sapien
tggcccgcctcatcagagcaataca

SEQ ID NO: 1385134 - DNA, 25 bp, Homo sapien
tctctgatttaatctggcccgcctc

SEQ ID NO: 1385135 - DNA, 25 bp, Homo sapien
tggaacattccatgaaacattcttc

SEQ ID NO: 1385136 - DNA, 25 bp, Homo sapien
caaaagtcagttttctatgaggaat

SEQ ID NO: 1385137 - DNA, 25 bp, Homo sapien
gataatgtgatatgccttccagtgg

SEQ ID NO: 1385138 - DNA, 25 bp, Homo sapien
ttcttttttgggacctgtgtctcat

SEQ ID NO: 1385139 - DNA, 25 bp, Homo sapien
ttttttgggacctgtgtctcatcca

SEQ ID NO: 1385140 - DNA, 25 bp, Homo sapien
tgtgataatgtgatatgccttccag

SEQ ID NO: 1385141 - DNA, 25 bp, Homo sapien
gtccatttactgagttgtgcagcca

SEQ ID NO: 1385142 - DNA, 25 bp, Homo sapien
tgtccctatacgtttatcttttctg

SEQ ID NO: 1385143 - DNA, 25 bp, Homo sapien
tagcagtcactaccagctttcagcc

SEQ ID NO: 1385144 - DNA, 25 bp, Homo sapien
agccctttgcaaacattagtctact

SEQ ID NO: 1385145 - DNA, 25 bp, Homo sapien
gttcaatgcacggattttcatgttg

SEQ ID NO: 1385146 - DNA, 25 bp, Homo sapien
atctagttgctgttcaatgcacgga

SEQ ID NO: 1385147 - DNA, 25 bp, Homo sapien
aatgcacggattttcatgttggaga

SEQ ID NO: 1385148 - DNA, 25 bp, Homo sapien
tccagtggaattattcactttatct

SEQ ID NO: 1385149 - DNA, 25 bp, Homo sapien
tgtttggcttaggtcgtttggagag

SEQ ID NO: 1385150 - DNA, 25 bp, Homo sapien
ctgtgtttggcttaggtcgtttgga

SEQ ID NO: 1385151 - DNA, 25 bp, Homo sapien
ctgctgtgtttggcttaggtcgttt

SEQ ID NO: 1385152 - DNA, 25 bp, Homo sapien
tgctgtgtttggcttaggtcgtttg

SEQ ID NO: 1385153 - DNA, 25 bp, Homo sapien
attcttatcttctacttcggaaata

SEQ ID NO: 1385154 - DNA, 25 bp, Homo sapien
ttctacttcggaaatatcagaactc

SEQ ID NO: 1385155 - DNA, 25 bp, Homo sapien
tcttatcttctacttcggaaatatc

SEQ ID NO: 1385156 - DNA, 25 bp, Homo sapien
tatcttctacttcggaaatatcaga

SEQ ID NO: 1385157 - DNA, 25 bp, Homo sapien
gagatcattaagctcttgttgatac

SEQ ID NO: 1385158 - DNA, 25 bp, Homo sapien
tgagatcattaagctcttgttgata

SEQ ID NO: 1385159 - DNA, 25 bp, Homo sapien
ttttccacattgtcatttttcattg

SEQ ID NO: 1385160 - DNA, 25 bp, Homo sapien
gagtatagcaatatctgtcttcaaa

SEQ ID NO: 1385161 - DNA, 25 bp, Homo sapien
acttttcaagggcagcatttgtttt

SEQ ID NO: 1385162 - DNA, 25 bp, Homo sapien
gtgcatatttcctgtctgagtatag

SEQ ID NO: 1385163 - DNA, 25 bp, Homo sapien
taacatatcatgattacctccgaag

SEQ ID NO: 1385164 - DNA, 25 bp, Homo sapien
gcacatccatatactaaaaaggtta

SEQ ID NO: 1385165 - DNA, 25 bp, Homo sapien
tccgaagttaaagagtaacctgcac

SEQ ID NO: 1385166 - DNA, 25 bp, Homo sapien
cacacgcacaccagagaatttttaa

SEQ ID NO: 1385167 - DNA, 25 bp, Homo sapien
agggctcatgatcactggacattca

SEQ ID NO: 1385168 - DNA, 25 bp, Homo sapien
gatctgaagagtacacaacaccgtg

SEQ ID NO: 1385169 - DNA, 25 bp, Homo sapien
ctttagtagcagtttcattcaagga

SEQ ID NO: 1385170 - DNA, 25 bp, Homo sapien
cattcaaggatgtccaagaggtaaa

SEQ ID NO: 1385171 - DNA, 25 bp, Homo sapien
caaggaaggatgttttgcaggaggc

SEQ ID NO: 1385172 - DNA, 25 bp, Homo sapien
aaggaaggatgttttgcaggaggcc

SEQ ID NO: 1385173 - DNA, 25 bp, Homo sapien
cttcaaggaaggatgttttgcagga

SEQ ID NO: 1385174 - DNA, 25 bp, Homo sapien
ttcaaggaaggatgttttgcaggag

SEQ ID NO: 1385175 - DNA, 25 bp, Homo sapien
ctttttcatgagaaggtccacgtaa

SEQ ID NO: 1385176 - DNA, 25 bp, Homo sapien
tcatgagaaggtccacgtaaaggct

SEQ ID NO: 1385177 - DNA, 25 bp, Homo sapien
tcctttttcatgagaaggtccacgt

SEQ ID NO: 1385178 - DNA, 25 bp, Homo sapien
tttcatgagaaggtccacgtaaagg

SEQ ID NO: 1385179 - DNA, 25 bp, Homo sapien
taaaaaatgttttgaccgtgtgctc

SEQ ID NO: 1385180 - DNA, 25 bp, Homo sapien
cactaggtgtttgttatgtgattct

SEQ ID NO: 1385181 - DNA, 25 bp, Homo sapien
gcataactggacttcaaaataggat

SEQ ID NO: 1385182 - DNA, 25 bp, Homo sapien
cttcacgatgaagatcactaggtgt

SEQ ID NO: 1385183 - DNA, 25 bp, Homo sapien
cagggtgtaaataaggaggttcact

SEQ ID NO: 1385184 - DNA, 25 bp, Homo sapien
tacacaggcagcataaaattctctt

SEQ ID NO: 1385185 - DNA, 25 bp, Homo sapien
gtgtccacccagggtgaacacagcc

SEQ ID NO: 1385186 - DNA, 25 bp, Homo sapien
aataaggaggttcactaagtacagg

SEQ ID NO: 1385187 - DNA, 25 bp, Homo sapien
cacatccgttatgatgatctgtgat

SEQ ID NO: 1385188 - DNA, 25 bp, Homo sapien
tatcacatccgttatgatgatctgt

SEQ ID NO: 1385189 - DNA, 25 bp, Homo sapien
cagccccccattccccgagatacaa

SEQ ID NO: 1385190 - DNA, 25 bp, Homo sapien
gttatcacatccgttatgatgatct

SEQ ID NO: 1385191 - DNA, 25 bp, Homo sapien
tttctctcctatatgggtttgttga

SEQ ID NO: 1385192 - DNA, 25 bp, Homo sapien
gtttgttgatgcctgctgaggtgtg

SEQ ID NO: 1385193 - DNA, 25 bp, Homo sapien
gttgatgcctgctgaggtgtgactt

SEQ ID NO: 1385194 - DNA, 25 bp, Homo sapien
ctcctatatgggtttgttgatgcct

SEQ ID NO: 1385195 - DNA, 25 bp, Homo sapien
tctgatgtatactgaggcctgactt

SEQ ID NO: 1385196 - DNA, 25 bp, Homo sapien
tctctgatgtatactgaggcctgac

SEQ ID NO: 1385197 - DNA, 25 bp, Homo sapien
tgttctctgatgtatactgaggcct

SEQ ID NO: 1385198 - DNA, 25 bp, Homo sapien
gatgtatactgaggcctgacttctg

SEQ ID NO: 1385199 - DNA, 25 bp, Homo sapien
tgagttctgtgctgtacaaagggtt

SEQ ID NO: 1385200 - DNA, 25 bp, Homo sapien
tgtgtgagttctgtgctgtacaaag

SEQ ID NO: 1385201 - DNA, 25 bp, Homo sapien
aaggttttcttacattcaaatgtct

SEQ ID NO: 1385202 - DNA, 25 bp, Homo sapien
gtgctgtacaaagggttttgactcc

SEQ ID NO: 1385203 - DNA, 25 bp, Homo sapien
ctcccctgtgtgaatatctggatgc

SEQ ID NO: 1385204 - DNA, 25 bp, Homo sapien
tggttacatccatactgtttctccc

SEQ ID NO: 1385205 - DNA, 25 bp, Homo sapien
tatctggatgcttccgaagatttgc

SEQ ID NO: 1385206 - DNA, 25 bp, Homo sapien
gtgaatatctggatgcttccgaaga

SEQ ID NO: 1385207 - DNA, 25 bp, Homo sapien
cctgatgtgtgctgagatttgactt

SEQ ID NO: 1385208 - DNA, 25 bp, Homo sapien
tccctgatgtgtgctgagatttgac

SEQ ID NO: 1385209 - DNA, 25 bp, Homo sapien
agttccctgatgtgtgctgagattt

SEQ ID NO: 1385210 - DNA, 25 bp, Homo sapien
tgagttccctgatgtgtgctgagat

SEQ ID NO: 1385211 - DNA, 25 bp, Homo sapien
cacattcattactttcatagggttt

SEQ ID NO: 1385212 - DNA, 25 bp, Homo sapien
tccacattcattactttcatagggt

SEQ ID NO: 1385213 - DNA, 25 bp, Homo sapien
cattcattactttcatagggttttt

SEQ ID NO: 1385214 - DNA, 25 bp, Homo sapien
attttccacattcattactttcata

SEQ ID NO: 1385215 - DNA, 25 bp, Homo sapien
gcatatgttttttccccagtatgag

SEQ ID NO: 1385216 - DNA, 25 bp, Homo sapien
atgcatatgttttttccccagtatg

SEQ ID NO: 1385217 - DNA, 25 bp, Homo sapien
catatgttttttccccagtatgagt

SEQ ID NO: 1385218 - DNA, 25 bp, Homo sapien
atatgttttttccccagtatgagtt

SEQ ID NO: 1385219 - DNA, 25 bp, Homo sapien
gaggaatgacatatggtgaaaggtt

SEQ ID NO: 1385220 - DNA, 25 bp, Homo sapien
gaatgacatatggtgaaaggttttc

SEQ ID NO: 1385221 - DNA, 25 bp, Homo sapien
agtgaggaatgacatatggtgaaag

SEQ ID NO: 1385222 - DNA, 25 bp, Homo sapien
tgaggaatgacatatggtgaaaggt

SEQ ID NO: 1385223 - DNA, 25 bp, Homo sapien
tttttcgcctttgtgagtcctttga

SEQ ID NO: 1385224 - DNA, 25 bp, Homo sapien
cagtgaggaacgacttttggtgaaa

SEQ ID NO: 1385225 - DNA, 25 bp, Homo sapien
atggacagtgaggaacgacttttgg

SEQ ID NO: 1385226 - DNA, 25 bp, Homo sapien
ttttcgcctttgtgagtcctttgat

SEQ ID NO: 1385227 - DNA, 25 bp, Homo sapien
tgaggtttgacttattgataaaggg

SEQ ID NO: 1385228 - DNA, 25 bp, Homo sapien
cctgaggtttgacttattgataaag

SEQ ID NO: 1385229 - DNA, 25 bp, Homo sapien
ctgaggtttgacttattgataaagg

SEQ ID NO: 1385230 - DNA, 25 bp, Homo sapien
ttctctgatggacagtaagctttga

SEQ ID NO: 1385231 - DNA, 25 bp, Homo sapien
tgtgttctctgatggacagtaagct

SEQ ID NO: 1385232 - DNA, 25 bp, Homo sapien
gtgtgttctctgatggacagtaagc

SEQ ID NO: 1385233 - DNA, 25 bp, Homo sapien
tgttctctgatggacagtaagcttt

SEQ ID NO: 1385234 - DNA, 25 bp, Homo sapien
ttcacaatggtcacatgcatagggc

SEQ ID NO: 1385235 - DNA, 25 bp, Homo sapien
tcacaatggtcacatgcatagggct

SEQ ID NO: 1385236 - DNA, 25 bp, Homo sapien
acaatggtcacatgcatagggcttt

SEQ ID NO: 1385237 - DNA, 25 bp, Homo sapien
cacaatggtcacatgcatagggctt

SEQ ID NO: 1385238 - DNA, 25 bp, Homo sapien
tgatgtaaagtgaggaatgacttac

SEQ ID NO: 1385239 - DNA, 25 bp, Homo sapien
ctgtgatgtaaagtgagaagtgatt

SEQ ID NO: 1385240 - DNA, 25 bp, Homo sapien
tgagaagtgatttacagtgaagttt

SEQ ID NO: 1385241 - DNA, 25 bp, Homo sapien
ctgatgtaaagtgaggaatgactta

SEQ ID NO: 1385242 - DNA, 25 bp, Homo sapien
tgaggctggacttatagctgaacaa

SEQ ID NO: 1385243 - DNA, 25 bp, Homo sapien
tagctgaacaatttttcacaccagt

SEQ ID NO: 1385244 - DNA, 25 bp, Homo sapien
cacaccagttacaggcataaggttt

SEQ ID NO: 1385245 - DNA, 25 bp, Homo sapien
tttgctaatggagggtttctcacat

SEQ ID NO: 1385246 - DNA, 25 bp, Homo sapien
agtcagactttctacagcaagttgg

SEQ ID NO: 1385247 - DNA, 25 bp, Homo sapien
tgaagtcagactttctacagcaagt

SEQ ID NO: 1385248 - DNA, 25 bp, Homo sapien
aagtcagactttctacagcaagttg

SEQ ID NO: 1385249 - DNA, 25 bp, Homo sapien
gaagtcagactttctacagcaagtt

SEQ ID NO: 1385250 - DNA, 25 bp, Homo sapien
tgagttattacaggctttctcatat

SEQ ID NO: 1385251 - DNA, 25 bp, Homo sapien
ctgagttattacaggctttctcata

SEQ ID NO: 1385252 - DNA, 25 bp, Homo sapien
atgaaccctcttatgtataaagaac

SEQ ID NO: 1385253 - DNA, 25 bp, Homo sapien
ggttttcccttgttcattacattga

SEQ ID NO: 1385254 - DNA, 25 bp, Homo sapien
tgaaaaggctgcagcagagtttgaa

SEQ ID NO: 1385255 - DNA, 25 bp, Homo sapien
gatgctgagtaagatgttcatgatg

SEQ ID NO: 1385256 - DNA, 25 bp, Homo sapien
tgcctccatgttgaaggttttccct

SEQ ID NO: 1385257 - DNA, 25 bp, Homo sapien
ggttatatcagggatatgaggtttc

SEQ ID NO: 1385258 - DNA, 25 bp, Homo sapien
tggttatatcagggatatgaggttt

SEQ ID NO: 1385259 - DNA, 25 bp, Homo sapien
gttatatcagggatatgaggtttct

SEQ ID NO: 1385260 - DNA, 25 bp, Homo sapien
taggtaaaagcacgttctggcaaac

SEQ ID NO: 1385261 - DNA, 25 bp, Homo sapien
ggtaaaagcacgttctggcaaacat

SEQ ID NO: 1385262 - DNA, 25 bp, Homo sapien
taaaagcacgttctggcaaacatta

SEQ ID NO: 1385263 - DNA, 25 bp, Homo sapien
ataggtaaaagcacgttctggcaaa

SEQ ID NO: 1385264 - DNA, 25 bp, Homo sapien
aaagtggtgaaaacaagataacact

SEQ ID NO: 1385265 - DNA, 25 bp, Homo sapien
tgctccttgctctagcttgaagatc

SEQ ID NO: 1385266 - DNA, 25 bp, Homo sapien
ctctgctccttgctctagcttgaag

SEQ ID NO: 1385267 - DNA, 25 bp, Homo sapien
tctgctccttgctctagcttgaaga

SEQ ID NO: 1385268 - DNA, 25 bp, Homo sapien
tccttgctctagcttgaagatcatc

SEQ ID NO: 1385269 - DNA, 25 bp, Homo sapien
taggtctccacaatcacgtccctgt

SEQ ID NO: 1385270 - DNA, 25 bp, Homo sapien
ccaatgataccaggctgctgtaggt

SEQ ID NO: 1385271 - DNA, 25 bp, Homo sapien
acaatcacgtccctgtagagggtcc

SEQ ID NO: 1385272 - DNA, 25 bp, Homo sapien
gggtcctctgagcatcatccaggcc

SEQ ID NO: 1385273 - DNA, 25 bp, Homo sapien
agtaacagaataacataatctgtac

SEQ ID NO: 1385274 - DNA, 25 bp, Homo sapien
ctgaaagtaacagaataacataatc

SEQ ID NO: 1385275 - DNA, 25 bp, Homo sapien
aaagtaacagaataacataatctgt

SEQ ID NO: 1385276 - DNA, 25 bp, Homo sapien
gaaagtaacagaataacataatctg

SEQ ID NO: 1385277 - DNA, 25 bp, Homo sapien
tgcccaacgtattgaggatgaactg

SEQ ID NO: 1385278 - DNA, 25 bp, Homo sapien
ctgcagcatgactgtttgcccaacg

SEQ ID NO: 1385279 - DNA, 25 bp, Homo sapien
atgaccatgaccctggcccaagtaa

SEQ ID NO: 1385280 - DNA, 25 bp, Homo sapien
tgaatgaccatgaccctggcccaag

SEQ ID NO: 1385281 - DNA, 25 bp, Homo sapien
cagagatttattcgtttcttattgc

SEQ ID NO: 1385282 - DNA, 25 bp, Homo sapien
tattgctcttggaaacacccacagg

SEQ ID NO: 1385283 - DNA, 25 bp, Homo sapien
tgctcttggaaacacccacaggaca

SEQ ID NO: 1385284 - DNA, 25 bp, Homo sapien
atttattcgtttcttattgctcttg

SEQ ID NO: 1385285 - DNA, 25 bp, Homo sapien
atggggaacgtctcccgagaactgt

SEQ ID NO: 1385286 - DNA, 25 bp, Homo sapien
aatggggaacgtctcccgagaactg

SEQ ID NO: 1385287 - DNA, 25 bp, Homo sapien
cacacagacccatagggacatagaa

SEQ ID NO: 1385288 - DNA, 25 bp, Homo sapien
tcaggcctcgctcgcctgtgatgcg

SEQ ID NO: 1385289 - DNA, 25 bp, Homo sapien
gaccccaagcgtgtcctcccagcac

SEQ ID NO: 1385290 - DNA, 25 bp, Homo sapien
gacccatagggacatagaacaaagc

SEQ ID NO: 1385291 - DNA, 25 bp, Homo sapien
ggacagtgaatataaaggacccttg

SEQ ID NO: 1385292 - DNA, 25 bp, Homo sapien
ggtcagagctcttcctactcagaca

SEQ ID NO: 1385293 - DNA, 25 bp, Homo sapien
tcactaggtgctgcaggtcagagct

SEQ ID NO: 1385294 - DNA, 25 bp, Homo sapien
tgtagctgccattcgagttaaagcc

SEQ ID NO: 1385295 - DNA, 25 bp, Homo sapien
tcctggcaacggtccacagactcct

SEQ ID NO: 1385296 - DNA, 25 bp, Homo sapien
ctcctggcaacggtccacagactcc

SEQ ID NO: 1385297 - DNA, 25 bp, Homo sapien
aatcccattgtccctcctggcaacg

SEQ ID NO: 1385298 - DNA, 25 bp, Homo sapien
cctcctggcaacggtccacagactc

SEQ ID NO: 1385299 - DNA, 25 bp, Homo sapien
cagtcaccagggcaactacttttca

SEQ ID NO: 1385300 - DNA, 25 bp, Homo sapien
gtcaccagggcaactacttttcacc

SEQ ID NO: 1385301 - DNA, 25 bp, Homo sapien
cagggcaactacttttcacccagtg

SEQ ID NO: 1385302 - DNA, 25 bp, Homo sapien
accagggcaactacttttcacccag

SEQ ID NO: 1385303 - DNA, 25 bp, Homo sapien
caaatttgtgtttatgattgtgttg

SEQ ID NO: 1385304 - DNA, 25 bp, Homo sapien
aatttgtgtttatgattgtgttggg

SEQ ID NO: 1385305 - DNA, 25 bp, Homo sapien
aaatttgtgtttatgattgtgttgg

SEQ ID NO: 1385306 - DNA, 25 bp, Homo sapien
tagccttttgtgttgttgtggccca

SEQ ID NO: 1385307 - DNA, 25 bp, Homo sapien
ttgacagaatccaaaccagtagttg

SEQ ID NO: 1385308 - DNA, 25 bp, Homo sapien
gatacgtctttgacaattgatggaa

SEQ ID NO: 1385309 - DNA, 25 bp, Homo sapien
cccaggatgacaatgttgacagaat

SEQ ID NO: 1385310 - DNA, 25 bp, Homo sapien
gtgccttgtttcacctgcggtgatg

SEQ ID NO: 1385311 - DNA, 25 bp, Homo sapien
gccttgtttcacctgcggtgatgac

SEQ ID NO: 1385312 - DNA, 25 bp, Homo sapien
tttctgtgtaatagtttatcagcat

SEQ ID NO: 1385313 - DNA, 25 bp, Homo sapien
ggtagttgctacctagggctgaggg

SEQ ID NO: 1385314 - DNA, 25 bp, Homo sapien
tgagacagaatgaggagtgactaat

SEQ ID NO: 1385315 - DNA, 25 bp, Homo sapien
agttgctacctagggctgagggtca

SEQ ID NO: 1385316 - DNA, 25 bp, Homo sapien
tttgagacagaatgaggagtgacta

SEQ ID NO: 1385317 - DNA, 25 bp, Homo sapien
cacgggaaccgtggagaaatggcca

SEQ ID NO: 1385318 - DNA, 25 bp, Homo sapien
acgccgacctgctggagcgtcgtgc

SEQ ID NO: 1385319 - DNA, 25 bp, Homo sapien
cctgctggagcgtcgtgccagcatg

SEQ ID NO: 1385320 - DNA, 25 bp, Homo sapien
ccctcacgggaaccgtggagaaatg

SEQ ID NO: 1385321 - DNA, 25 bp, Homo sapien
ggctggtagattggccagggcttcg

SEQ ID NO: 1385322 - DNA, 25 bp, Homo sapien
ctggtagattggccagggcttcgaa

SEQ ID NO: 1385323 - DNA, 25 bp, Homo sapien
gtgggctggtagattggccagggct

SEQ ID NO: 1385324 - DNA, 25 bp, Homo sapien
tgggctggtagattggccagggctt

SEQ ID NO: 1385325 - DNA, 25 bp, Homo sapien
ctggagagtaattgagtgaaattgg

SEQ ID NO: 1385326 - DNA, 25 bp, Homo sapien
agagtaattgagtgaaattggtgag

SEQ ID NO: 1385327 - DNA, 25 bp, Homo sapien
gagagtaattgagtgaaattggtga

SEQ ID NO: 1385328 - DNA, 25 bp, Homo sapien
agactggagagtaattgagtgaaat

SEQ ID NO: 1385329 - DNA, 25 bp, Homo sapien
ccctgcgggatgatgtagaggactt

SEQ ID NO: 1385330 - DNA, 25 bp, Homo sapien
aagttgtggaattctgttgatgatg

SEQ ID NO: 1385331 - DNA, 25 bp, Homo sapien
tgtagaggacttccacatccctggt

SEQ ID NO: 1385332 - DNA, 25 bp, Homo sapien
gtaaagttgtggaattctgttgatg

SEQ ID NO: 1385333 - DNA, 25 bp, Homo sapien
gattcctcagagtccccacgttcat

SEQ ID NO: 1385334 - DNA, 25 bp, Homo sapien
tttccctgtcctcaccgtgatgggc

SEQ ID NO: 1385335 - DNA, 25 bp, Homo sapien
ctcagagtccccacgttcatcaata

SEQ ID NO: 1385336 - DNA, 25 bp, Homo sapien
tgtcatcaccagaatcccacaagct

SEQ ID NO: 1385337 - DNA, 25 bp, Homo sapien
ggcttcaccactctcacatccatca

SEQ ID NO: 1385338 - DNA, 25 bp, Homo sapien
tcccgcagggcttcaccactctcac

SEQ ID NO: 1385339 - DNA, 25 bp, Homo sapien
agggcttcaccactctcacatccat

SEQ ID NO: 1385340 - DNA, 25 bp, Homo sapien
gcagggcttcaccactctcacatcc

SEQ ID NO: 1385341 - DNA, 25 bp, Homo sapien
tgtccatctacttgctactgtcaca

SEQ ID NO: 1385342 - DNA, 25 bp, Homo sapien
attccgtcctcacacgcaggcctgt

SEQ ID NO: 1385343 - DNA, 25 bp, Homo sapien
tggccatttctccacggttcccgtg

SEQ ID NO: 1385344 - DNA, 25 bp, Homo sapien
cacaagagcccctcctgcattccgt

SEQ ID NO: 1385345 - DNA, 25 bp, Homo sapien
cacccagtctatcctccccccacag

SEQ ID NO: 1385346 - DNA, 25 bp, Homo sapien
ccccacagctgtgcagcgggaacct

SEQ ID NO: 1385347 - DNA, 25 bp, Homo sapien
cacagctgtgcagcgggaacctcct

SEQ ID NO: 1385348 - DNA, 25 bp, Homo sapien
cccagtctatcctccccccacagct

SEQ ID NO: 1385349 - DNA, 25 bp, Homo sapien
ctaccggtgatatggctagcgtgat

SEQ ID NO: 1385350 - DNA, 25 bp, Homo sapien
gatatggctagcgtgatcctcgttc

SEQ ID NO: 1385351 - DNA, 25 bp, Homo sapien
gtgatcctcgttccttgcaatgaca

SEQ ID NO: 1385352 - DNA, 25 bp, Homo sapien
gctagcgtgatcctcgttccttgca

SEQ ID NO: 1385353 - DNA, 25 bp, Homo sapien
tgaaccccagtttcacatctgtcat

SEQ ID NO: 1385354 - DNA, 25 bp, Homo sapien
catctgtcatttgtaaataggacca

SEQ ID NO: 1385355 - DNA, 25 bp, Homo sapien
ccccagtttcacatctgtcatttgt

SEQ ID NO: 1385356 - DNA, 25 bp, Homo sapien
cacatctgtcatttgtaaataggac

SEQ ID NO: 1385357 - DNA, 25 bp, Homo sapien
cagacaccgcttcgcggcgcatttt

SEQ ID NO: 1385358 - DNA, 25 bp, Homo sapien
cacaccctgggcgtgaaccagggat

SEQ ID NO: 1385359 - DNA, 25 bp, Homo sapien
ggtacccctagtcgcctgaggcaca

SEQ ID NO: 1385360 - DNA, 25 bp, Homo sapien
tggatgacccagacaccgcttcgcg

SEQ ID NO: 1385361 - DNA, 25 bp, Homo sapien
gggcacccgcgatccagaggctgcc

SEQ ID NO: 1385362 - DNA, 25 bp, Homo sapien
ggggcacccgcgatccagaggctgc

SEQ ID NO: 1385363 - DNA, 25 bp, Homo sapien
aggggcacccgcgatccagaggctg

SEQ ID NO: 1385364 - DNA, 25 bp, Homo sapien
caggggcacccgcgatccagaggct

SEQ ID NO: 1385365 - DNA, 25 bp, Homo sapien
ggcgcccagctacaggcgccgggcg

SEQ ID NO: 1385366 - DNA, 25 bp, Homo sapien
tgggcgcccagctacaggcgccggg

SEQ ID NO: 1385367 - DNA, 25 bp, Homo sapien
cgcccagctacaggcgccgggcgac

SEQ ID NO: 1385368 - DNA, 25 bp, Homo sapien
ctgggcgcccagctacaggcgccgg

SEQ ID NO: 1385369 - DNA, 25 bp, Homo sapien
gctgcagacggcccctggggtggcc

SEQ ID NO: 1385370 - DNA, 25 bp, Homo sapien
accaagccaggcggtctgcccaggg

SEQ ID NO: 1385371 - DNA, 25 bp, Homo sapien
caggaaccgaccctcagcaccatcc

SEQ ID NO: 1385372 - DNA, 25 bp, Homo sapien
ctagatgtcgccgtggctgcgacca

SEQ ID NO: 1385373 - DNA, 25 bp, Homo sapien
gggatcatggcacaagttgcagttt

SEQ ID NO: 1385374 - DNA, 25 bp, Homo sapien
cacagggatcatggcacaagttgca

SEQ ID NO: 1385375 - DNA, 25 bp, Homo sapien
ttttgcacagggatcatggcacaag

SEQ ID NO: 1385376 - DNA, 25 bp, Homo sapien
tacttttttgcacagggatcatggc

SEQ ID NO: 1385377 - DNA, 25 bp, Homo sapien
tctgttgaagatgattccgtggaga

SEQ ID NO: 1385378 - DNA, 25 bp, Homo sapien
aacatttctcatatcagctctcgag

SEQ ID NO: 1385379 - DNA, 25 bp, Homo sapien
gatgagtagtccattgaagatgagg

SEQ ID NO: 1385380 - DNA, 25 bp, Homo sapien
gagtccatggaagatgagtagtcca

SEQ ID NO: 1385381 - DNA, 25 bp, Homo sapien
gacacaagttgcaggttccaccctg

SEQ ID NO: 1385382 - DNA, 25 bp, Homo sapien
cattcctgtcagctctcgcctccat

SEQ ID NO: 1385383 - DNA, 25 bp, Homo sapien
tgtgcaaggatcatgacacaagttg

SEQ ID NO: 1385384 - DNA, 25 bp, Homo sapien
ttttcctgtgcaaggatcatgacac

SEQ ID NO: 1385385 - DNA, 25 bp, Homo sapien
acttcttagttagtagatttgtggt

SEQ ID NO: 1385386 - DNA, 25 bp, Homo sapien
gacttcttagttagtagatttgtgg

SEQ ID NO: 1385387 - DNA, 25 bp, Homo sapien
tggtcctgaagttttggcctcaaac

SEQ ID NO: 1385388 - DNA, 25 bp, Homo sapien
ccagacttcttagttagtagatttg

SEQ ID NO: 1385389 - DNA, 25 bp, Homo sapien
cctgtagaacctgttacttaggttg

SEQ ID NO: 1385390 - DNA, 25 bp, Homo sapien
aaaatataattatcccggcatagtg

SEQ ID NO: 1385391 - DNA, 25 bp, Homo sapien
ttatcccggcatagtggtattttcc

SEQ ID NO: 1385392 - DNA, 25 bp, Homo sapien
cctgttacttaggttgttgaggtgg

SEQ ID NO: 1385393 - DNA, 25 bp, Homo sapien
tctgcctgcttcagcttccggaagt

SEQ ID NO: 1385394 - DNA, 25 bp, Homo sapien
ggtgttgtcatgtagcccaggtttg

SEQ ID NO: 1385395 - DNA, 25 bp, Homo sapien
ggtgcatgctatcatgtgcagctga

SEQ ID NO: 1385396 - DNA, 25 bp, Homo sapien
gcccgactggtgtaaccactttgga

SEQ ID NO: 1385397 - DNA, 25 bp, Homo sapien
aaacaacatcatcccagtaacaatg

SEQ ID NO: 1385398 - DNA, 25 bp, Homo sapien
gaaacaacatcatcccagtaacaat

SEQ ID NO: 1385399 - DNA, 25 bp, Homo sapien
agaaacaacatcatcccagtaacaa

SEQ ID NO: 1385400 - DNA, 25 bp, Homo sapien
ttttcaattaatccaggccgggtgc

SEQ ID NO: 1385401 - DNA, 25 bp, Homo sapien
aatggcttgaatcccggaaggtgga

SEQ ID NO: 1385402 - DNA, 25 bp, Homo sapien
taaacttccatagcccaatttgaga

SEQ ID NO: 1385403 - DNA, 25 bp, Homo sapien
gaccaatgtggtgaatccctgcctt

SEQ ID NO: 1385404 - DNA, 25 bp, Homo sapien
gaaagtacagagagtcctcaactta

SEQ ID NO: 1385405 - DNA, 25 bp, Homo sapien
gtacagagagtcctcaacttacagt

SEQ ID NO: 1385406 - DNA, 25 bp, Homo sapien
gcagagattgtggagagccgaaatt

SEQ ID NO: 1385407 - DNA, 25 bp, Homo sapien
agattgtggagagccgaaattgtgc

SEQ ID NO: 1385408 - DNA, 25 bp, Homo sapien
ggcagagattgtggagagccgaaat

SEQ ID NO: 1385409 - DNA, 25 bp, Homo sapien
agagattgtggagagccgaaattgt

SEQ ID NO: 1385410 - DNA, 25 bp, Homo sapien
ttttccacaaactcggcaccgtctg

SEQ ID NO: 1385411 - DNA, 25 bp, Homo sapien
agaggctgatctctccaaccactgc

SEQ ID NO: 1385412 - DNA, 25 bp, Homo sapien
ccatgggtttccaggcttgtgggca

SEQ ID NO: 1385413 - DNA, 25 bp, Homo sapien
ggtctggggcatatatgggtacagg

SEQ ID NO: 1385414 - DNA, 25 bp, Homo sapien
gctatcaaaactttggaaatcatgg

SEQ ID NO: 1385415 - DNA, 25 bp, Homo sapien
tttttcggatgctatcaaaactttg

SEQ ID NO: 1385416 - DNA, 25 bp, Homo sapien
ttactgtttttcggatgctatcaaa

SEQ ID NO: 1385417 - DNA, 25 bp, Homo sapien
ttcggatgctatcaaaactttggaa

SEQ ID NO: 1385418 - DNA, 25 bp, Homo sapien
acacccttggtcaattgaatacaga

SEQ ID NO: 1385419 - DNA, 25 bp, Homo sapien
cccttggtcaattgaatacagatca

SEQ ID NO: 1385420 - DNA, 25 bp, Homo sapien
cagaacacccttggtcaattgaata

SEQ ID NO: 1385421 - DNA, 25 bp, Homo sapien
atacagaacacccttggtcaattga

SEQ ID NO: 1385422 - DNA, 25 bp, Homo sapien
agctaaactccctagtcaactggtt

SEQ ID NO: 1385423 - DNA, 25 bp, Homo sapien
acttaacagctaaactccctagtca

SEQ ID NO: 1385424 - DNA, 25 bp, Homo sapien
ctaaattgatgagacttaaacccat

SEQ ID NO: 1385425 - DNA, 25 bp, Homo sapien
tccctagtcaactggtttgaatcta

SEQ ID NO: 1385426 - DNA, 25 bp, Homo sapien
caattcaacatgaaaatcaccttgg

SEQ ID NO: 1385427 - DNA, 25 bp, Homo sapien
gcttctttgaatttacaattcaaca

SEQ ID NO: 1385428 - DNA, 25 bp, Homo sapien
agcaggattgaagctgcttctttga

SEQ ID NO: 1385429 - DNA, 25 bp, Homo sapien
attcaacatgaaaatcaccttggga

SEQ ID NO: 1385430 - DNA, 25 bp, Homo sapien
caggcgttgacctctgtttttagat

SEQ ID NO: 1385431 - DNA, 25 bp, Homo sapien
tttagatgtacagtctaatgcccta

SEQ ID NO: 1385432 - DNA, 25 bp, Homo sapien
tgtacagtctaatgccctactcagt

SEQ ID NO: 1385433 - DNA, 25 bp, Homo sapien
aacaggcgttgacctctgtttttag

SEQ ID NO: 1385434 - DNA, 25 bp, Homo sapien
atcctcatcccactgggctttggga

SEQ ID NO: 1385435 - DNA, 25 bp, Homo sapien
tgggactgccttctaaccgtgtgaa

SEQ ID NO: 1385436 - DNA, 25 bp, Homo sapien
gacatgagactccaggttcttacgc

SEQ ID NO: 1385437 - DNA, 25 bp, Homo sapien
ggccctcggcctcatactgaagact

SEQ ID NO: 1385438 - DNA, 25 bp, Homo sapien
tgggacttgtaccagcggcttcccc

SEQ ID NO: 1385439 - DNA, 25 bp, Homo sapien
tgaccgcaagactcaacaagtgact

SEQ ID NO: 1385440 - DNA, 25 bp, Homo sapien
taggcgctagccacctgtaactgtt

SEQ ID NO: 1385441 - DNA, 25 bp, Homo sapien
gcaaaccctgctgagaagaggtctg

SEQ ID NO: 1385442 - DNA, 25 bp, Homo sapien
gacacaggaggccaagtacacaaaa

SEQ ID NO: 1385443 - DNA, 25 bp, Homo sapien
taatgaccacatgttgttactttgg

SEQ ID NO: 1385444 - DNA, 25 bp, Homo sapien
tattgtgctaaagccctgcttagaa

SEQ ID NO: 1385445 - DNA, 25 bp, Homo sapien
agggtcaccgtgtcttgcttaaata

SEQ ID NO: 1385446 - DNA, 25 bp, Homo sapien
gagatcctgggatgcatagacagtg

SEQ ID NO: 1385447 - DNA, 25 bp, Homo sapien
tatacttacaactggttatgatggt

SEQ ID NO: 1385448 - DNA, 25 bp, Homo sapien
tctagaaatctgctacacaacactg

SEQ ID NO: 1385449 - DNA, 25 bp, Homo sapien
tacttacaactggttatgatggtaa

SEQ ID NO: 1385450 - DNA, 25 bp, Homo sapien
atacttacaactggttatgatggta

SEQ ID NO: 1385451 - DNA, 25 bp, Homo sapien
cagttagaactgatatacacatccg

SEQ ID NO: 1385452 - DNA, 25 bp, Homo sapien
gatcacaagtagaaccttgatctga

SEQ ID NO: 1385453 - DNA, 25 bp, Homo sapien
cttgatctgaaacatggcatgtggc

SEQ ID NO: 1385454 - DNA, 25 bp, Homo sapien
cagctatctgaaataggaagcgtaa

SEQ ID NO: 1385455 - DNA, 25 bp, Homo sapien
gagaactgtaacaggctcaggtgct

SEQ ID NO: 1385456 - DNA, 25 bp, Homo sapien
ctgagaactgtaacaggctcaggtg

SEQ ID NO: 1385457 - DNA, 25 bp, Homo sapien
tgagaactgtaacaggctcaggtgc

SEQ ID NO: 1385458 - DNA, 25 bp, Homo sapien
agaactgtaacaggctcaggtgctt

SEQ ID NO: 1385459 - DNA, 25 bp, Homo sapien
ttttaagagtttgcatgcaggcatc

SEQ ID NO: 1385460 - DNA, 25 bp, Homo sapien
taagagtttgcatgcaggcatctct

SEQ ID NO: 1385461 - DNA, 25 bp, Homo sapien
atgttttaagagtttgcatgcaggc

SEQ ID NO: 1385462 - DNA, 25 bp, Homo sapien
ttaagagtttgcatgcaggcatctc

SEQ ID NO: 1385463 - DNA, 25 bp, Homo sapien
tagagacaaactaagaaaaagtgtg

SEQ ID NO: 1385464 - DNA, 25 bp, Homo sapien
gagacaaactaagaaaaagtgtgga

SEQ ID NO: 1385465 - DNA, 25 bp, Homo sapien
agagacaaactaagaaaaagtgtgg

SEQ ID NO: 1385466 - DNA, 25 bp, Homo sapien
acaacacactgtgctttagcggaag

SEQ ID NO: 1385467 - DNA, 25 bp, Homo sapien
caacacactgtgctttagcggaaga

SEQ ID NO: 1385468 - DNA, 25 bp, Homo sapien
gcatgttctcttctcgggttccact

SEQ ID NO: 1385469 - DNA, 25 bp, Homo sapien
gttctcttctcgggttccactccaa

SEQ ID NO: 1385470 - DNA, 25 bp, Homo sapien
ttctcttctcgggttccactccaat

SEQ ID NO: 1385471 - DNA, 25 bp, Homo sapien
atgttctcttctcgggttccactcc

SEQ ID NO: 1385472 - DNA, 25 bp, Homo sapien
ttcctttttaattcacagacaccca

SEQ ID NO: 1385473 - DNA, 25 bp, Homo sapien
tatatctacaggtcagctttatctt

SEQ ID NO: 1385474 - DNA, 25 bp, Homo sapien
ctatatctacaggtcagctttatct

SEQ ID NO: 1385475 - DNA, 25 bp, Homo sapien
agatttattcgtttcctgttgctct

SEQ ID NO: 1385476 - DNA, 25 bp, Homo sapien
cagagatttattcgtttcctgttgc

SEQ ID NO: 1385477 - DNA, 25 bp, Homo sapien
tgctcttggaaacacccagaggaca

SEQ ID NO: 1385478 - DNA, 25 bp, Homo sapien
gaaacacccagaggacactggaaac

SEQ ID NO: 1385479 - DNA, 25 bp, Homo sapien
cgctgggaaaaacgagctaaggttg

SEQ ID NO: 1385480 - DNA, 25 bp, Homo sapien
gtttaatatatctcagacgctggga

SEQ ID NO: 1385481 - DNA, 25 bp, Homo sapien
gaatatttcctaggtccttgcctgt

SEQ ID NO: 1385482 - DNA, 25 bp, Homo sapien
caaatcttgtgcattctagggagta

SEQ ID NO: 1385483 - DNA, 25 bp, Homo sapien
taaccgggtccctcagcggcaggac

SEQ ID NO: 1385484 - DNA, 25 bp, Homo sapien
tcatgcaggttggtaaccgggtccc

SEQ ID NO: 1385485 - DNA, 25 bp, Homo sapien
ggcaggacaggagcgcggcctgcag

SEQ ID NO: 1385486 - DNA, 25 bp, Homo sapien
ggcccagggccaccggcctcgccta

SEQ ID NO: 1385487 - DNA, 25 bp, Homo sapien
tctagaacccgcttcactgccggga

SEQ ID NO: 1385488 - DNA, 25 bp, Homo sapien
cgctcctgcgcctctagaacccgct

SEQ ID NO: 1385489 - DNA, 25 bp, Homo sapien
tgcgcctctagaacccgcttcactg

SEQ ID NO: 1385490 - DNA, 25 bp, Homo sapien
ccccgccagggtccgctgcccgcac

SEQ ID NO: 1385491 - DNA, 25 bp, Homo sapien
cgcccacgcgtctgctcccacaact

SEQ ID NO: 1385492 - DNA, 25 bp, Homo sapien
gcccgcgatgcgcccacgcgtctgc

SEQ ID NO: 1385493 - DNA, 25 bp, Homo sapien
gcgcccacgcgtctgctcccacaac

SEQ ID NO: 1385494 - DNA, 25 bp, Homo sapien
gacgcacttccggatgaaaatggcg

SEQ ID NO: 1385495 - DNA, 25 bp, Homo sapien
cccgctacaagaccgcctctgggtg

SEQ ID NO: 1385496 - DNA, 25 bp, Homo sapien
gcacttccggatgaaaatggcggag

SEQ ID NO: 1385497 - DNA, 25 bp, Homo sapien
aagaccgcctctgggtgacgcactt

SEQ ID NO: 1385498 - DNA, 25 bp, Homo sapien
gacctgtataggagccccagcttcc

SEQ ID NO: 1385499 - DNA, 25 bp, Homo sapien
tgacctgtataggagccccagcttc

SEQ ID NO: 1385500 - DNA, 25 bp, Homo sapien
gtgacctgtataggagccccagctt

SEQ ID NO: 1385501 - DNA, 25 bp, Homo sapien
ctattcctttacatcagtgggctta

SEQ ID NO: 1385502 - DNA, 25 bp, Homo sapien
gggcttagaataactctgctcctgg

SEQ ID NO: 1385503 - DNA, 25 bp, Homo sapien
taactctgctcctggaactgggaaa

SEQ ID NO: 1385504 - DNA, 25 bp, Homo sapien
tacatcagtgggcttagaataactc

SEQ ID NO: 1385505 - DNA, 25 bp, Homo sapien
tttctttccagtcccatgctcattt

SEQ ID NO: 1385506 - DNA, 25 bp, Homo sapien
cttttctttccagtcccatgctcat

SEQ ID NO: 1385507 - DNA, 25 bp, Homo sapien
ctttccagtcccatgctcattttct

SEQ ID NO: 1385508 - DNA, 25 bp, Homo sapien
tccttttctttccagtcccatgctc

SEQ ID NO: 1385509 - DNA, 25 bp, Homo sapien
caaatttgtgtttatgattgtgttg

SEQ ID NO: 1385510 - DNA, 25 bp, Homo sapien
aatttgtgtttatgattgtgttggg

SEQ ID NO: 1385511 - DNA, 25 bp, Homo sapien
aaatttgtgtttatgattgtgttgg

SEQ ID NO: 1385512 - DNA, 25 bp, Homo sapien
gcacagaatccgtttccacctcttc

SEQ ID NO: 1385513 - DNA, 25 bp, Homo sapien
atcatgcacagaatccgtttccacc

SEQ ID NO: 1385514 - DNA, 25 bp, Homo sapien
tcatgcacagaatccgtttccacct

SEQ ID NO: 1385515 - DNA, 25 bp, Homo sapien
cacagaatccgtttccacctcttca

SEQ ID NO: 1385516 - DNA, 25 bp, Homo sapien
atactaaccttaaatgtagatgggt

SEQ ID NO: 1385517 - DNA, 25 bp, Homo sapien
ccaatccctctataaccttggagat

SEQ ID NO: 1385518 - DNA, 25 bp, Homo sapien
tccaatccctctataaccttggaga

SEQ ID NO: 1385519 - DNA, 25 bp, Homo sapien
tatttgcccgacttctatcatctga

SEQ ID NO: 1385520 - DNA, 25 bp, Homo sapien
tttcaaaattatcaacattggttcc

SEQ ID NO: 1385521 - DNA, 25 bp, Homo sapien
tattaaacctgggatatttgcccga

SEQ ID NO: 1385522 - DNA, 25 bp, Homo sapien
tatcaacattggttccaacatcatt

SEQ ID NO: 1385523 - DNA, 25 bp, Homo sapien
agaaggtctccagagtgttgctcta

SEQ ID NO: 1385524 - DNA, 25 bp, Homo sapien
aatgcctcaaaagaaggtctccaga

SEQ ID NO: 1385525 - DNA, 25 bp, Homo sapien
gaaggtctccagagtgttgctctac

SEQ ID NO: 1385526 - DNA, 25 bp, Homo sapien
tctggtggtgaaatgcctcaaaaga

SEQ ID NO: 1385527 - DNA, 25 bp, Homo sapien
cttgcatgcaaatctccaactcgga

SEQ ID NO: 1385528 - DNA, 25 bp, Homo sapien
tgttgggaatatcatttcaacctcc

SEQ ID NO: 1385529 - DNA, 25 bp, Homo sapien
tcctgctccgcccaatcctattgct

SEQ ID NO: 1385530 - DNA, 25 bp, Homo sapien
ttgctttcactcttccacaggtgtt

SEQ ID NO: 1385531 - DNA, 25 bp, Homo sapien
cagcaagctagacaaaagtgggatt

SEQ ID NO: 1385532 - DNA, 25 bp, Homo sapien
gcaagctagacaaaagtgggattta

SEQ ID NO: 1385533 - DNA, 25 bp, Homo sapien
agcaagctagacaaaagtgggattt

SEQ ID NO: 1385534 - DNA, 25 bp, Homo sapien
caagctagacaaaagtgggatttag

SEQ ID NO: 1385535 - DNA, 25 bp, Homo sapien
tatctgtgtgctcaactggaacaaa

SEQ ID NO: 1385536 - DNA, 25 bp, Homo sapien
tggaacaaagagactccataaacta

SEQ ID NO: 1385537 - DNA, 25 bp, Homo sapien
aacctaaagaaaatggcacgcgtga

SEQ ID NO: 1385538 - DNA, 25 bp, Homo sapien
aatgagagccaactcctgtttgttg

SEQ ID NO: 1385539 - DNA, 25 bp, Homo sapien
gaatgtccggcgtgcgttcctaacg

SEQ ID NO: 1385540 - DNA, 25 bp, Homo sapien
atgtccggcgtgcgttcctaacggg

SEQ ID NO: 1385541 - DNA, 25 bp, Homo sapien
aatgtccggcgtgcgttcctaacgg

SEQ ID NO: 1385542 - DNA, 25 bp, Homo sapien
tcttatgactattgggataacacca

SEQ ID NO: 1385543 - DNA, 25 bp, Homo sapien
tggctgcatgcaaacttttgaaaca

SEQ ID NO: 1385544 - DNA, 25 bp, Homo sapien
tgcaaacttttgaaacatttgagta

SEQ ID NO: 1385545 - DNA, 25 bp, Homo sapien
tttgaaacatttgagtaagtacagt

SEQ ID NO: 1385546 - DNA, 25 bp, Homo sapien
cacagtatagctccagaggccctag

SEQ ID NO: 1385547 - DNA, 25 bp, Homo sapien
gtatagctccagaggccctagcagt

SEQ ID NO: 1385548 - DNA, 25 bp, Homo sapien
agtatagctccagaggccctagcag

SEQ ID NO: 1385549 - DNA, 25 bp, Homo sapien
ccctagcagtcctgctcccacggat

SEQ ID NO: 1385550 - DNA, 25 bp, Homo sapien
ggctcatctggtgtcaagccttgtt

SEQ ID NO: 1385551 - DNA, 25 bp, Homo sapien
cagccagtgacccaaaatgggatgt

SEQ ID NO: 1385552 - DNA, 25 bp, Homo sapien
tctcttccttatgtgtatggcatta

SEQ ID NO: 1385553 - DNA, 25 bp, Homo sapien
tccttatgtgtatggcattactacc

SEQ ID NO: 1385554 - DNA, 25 bp, Homo sapien
tgagaacggcgtttgtgtcctttta

SEQ ID NO: 1385555 - DNA, 25 bp, Homo sapien
tacagttctgtgattagtgcccagt

SEQ ID NO: 1385556 - DNA, 25 bp, Homo sapien
ttacagttctgtgattagtgcccag

SEQ ID NO: 1385557 - DNA, 25 bp, Homo sapien
ttgtccctgagaacggcgtttgtgt

SEQ ID NO: 1385558 - DNA, 25 bp, Homo sapien
ctgagtttgggtatgtcatggtttc

SEQ ID NO: 1385559 - DNA, 25 bp, Homo sapien
taatgaaacacataatggattgtgc

SEQ ID NO: 1385560 - DNA, 25 bp, Homo sapien
tcatggtttcgttttcatttgctta

SEQ ID NO: 1385561 - DNA, 25 bp, Homo sapien
gcattcttaactcagaaatgtaaat

SEQ ID NO: 1385562 - DNA, 25 bp, Homo sapien
cttaaaatactgtgagaatgaccga

SEQ ID NO: 1385563 - DNA, 25 bp, Homo sapien
tttgatagactctgacaatctctat

SEQ ID NO: 1385564 - DNA, 25 bp, Homo sapien
aatactgtgagaatgaccgaaatgt

SEQ ID NO: 1385565 - DNA, 25 bp, Homo sapien
ctgtgagaatgaccgaaatgtgaca

SEQ ID NO: 1385566 - DNA, 25 bp, Homo sapien
ttgagggacagacattgagacccca

SEQ ID NO: 1385567 - DNA, 25 bp, Homo sapien
gttctggaatcctacgtgagacaca

SEQ ID NO: 1385568 - DNA, 25 bp, Homo sapien
cacaaacattcgtaccacagcagaa

SEQ ID NO: 1385569 - DNA, 25 bp, Homo sapien
ctggaatcctacgtgagacacaaac

SEQ ID NO: 1385570 - DNA, 25 bp, Homo sapien
tattcagaccctcatagcagagttc

SEQ ID NO: 1385571 - DNA, 25 bp, Homo sapien
aatattcagaccctcatagcagagt

SEQ ID NO: 1385572 - DNA, 25 bp, Homo sapien
gacaaatattcagaccctcatagca

SEQ ID NO: 1385573 - DNA, 25 bp, Homo sapien
gggacaaatattcagaccctcatag

SEQ ID NO: 1385574 - DNA, 25 bp, Homo sapien
gtgacggacaaacgttcagaccata

SEQ ID NO: 1385575 - DNA, 25 bp, Homo sapien
tgtgacggacaaacgttcagaccat

SEQ ID NO: 1385576 - DNA, 25 bp, Homo sapien
cctatgtcagggacattcagtcccc

SEQ ID NO: 1385577 - DNA, 25 bp, Homo sapien
tggaatcctatatgacggaccaaca

SEQ ID NO: 1385578 - DNA, 25 bp, Homo sapien
tggaatactaggtgagggagaaata

SEQ ID NO: 1385579 - DNA, 25 bp, Homo sapien
ggaccaacattcagacccttgcaac

SEQ ID NO: 1385580 - DNA, 25 bp, Homo sapien
acagtgttctggaatactaggtgag

SEQ ID NO: 1385581 - DNA, 25 bp, Homo sapien
atgtgagtgacaaacttccagactc

SEQ ID NO: 1385582 - DNA, 25 bp, Homo sapien
gtgagtgacaaacttccagactcca

SEQ ID NO: 1385583 - DNA, 25 bp, Homo sapien
gagtgacaaacttccagactccagc

SEQ ID NO: 1385584 - DNA, 25 bp, Homo sapien
tgagtgacaaacttccagactccag

SEQ ID NO: 1385585 - DNA, 25 bp, Homo sapien
ccacagggccttcaataatgcacat

SEQ ID NO: 1385586 - DNA, 25 bp, Homo sapien
tggcttatccaagcagtgctcagca

SEQ ID NO: 1385587 - DNA, 25 bp, Homo sapien
cattggcaaagagcttactgatgtt

SEQ ID NO: 1385588 - DNA, 25 bp, Homo sapien
ggtcattcctggactcattggcaaa

SEQ ID NO: 1385589 - DNA, 25 bp, Homo sapien
ataatgacgccatcagcctctgcat

SEQ ID NO: 1385590 - DNA, 25 bp, Homo sapien
tcctgttcctgtgataatgacgcca

SEQ ID NO: 1385591 - DNA, 25 bp, Homo sapien
tgttggtgggatacgtcagaaagcg

SEQ ID NO: 1385592 - DNA, 25 bp, Homo sapien
ttggtgggatacgtcagaaagcgat

SEQ ID NO: 1385593 - DNA, 25 bp, Homo sapien
gttggtgggatacgtcagaaagcga

SEQ ID NO: 1385594 - DNA, 25 bp, Homo sapien
gtgttggtgggatacgtcagaaagc

SEQ ID NO: 1385595 - DNA, 25 bp, Homo sapien
gagccacaaaggcagtgcacgcccc

SEQ ID NO: 1385596 - DNA, 25 bp, Homo sapien
acacttgttgcagcgaggcttgtgt

SEQ ID NO: 1385597 - DNA, 25 bp, Homo sapien
tgcacgccccgttcctgagcctgct

SEQ ID NO: 1385598 - DNA, 25 bp, Homo sapien
cacacttgttgcagcgaggcttgtg

SEQ ID NO: 1385599 - DNA, 25 bp, Homo sapien
cttgggccaaattctgtcaggccag

SEQ ID NO: 1385600 - DNA, 25 bp, Homo sapien
atatggcttcatttgtagcacggtt

SEQ ID NO: 1385601 - DNA, 25 bp, Homo sapien
tatatggcttcatttgtagcacggt

SEQ ID NO: 1385602 - DNA, 25 bp, Homo sapien
gagagtccgtttggctccgctgctc

SEQ ID NO: 1385603 - DNA, 25 bp, Homo sapien
gctgagagtccgtttggctccgctg

SEQ ID NO: 1385604 - DNA, 25 bp, Homo sapien
cagccatggaattatgagggatgga

SEQ ID NO: 1385605 - DNA, 25 bp, Homo sapien
acagctgagagtccgtttggctccg

SEQ ID NO: 1385606 - DNA, 25 bp, Homo sapien
catgttctatggagctgtgggccgt

SEQ ID NO: 1385607 - DNA, 25 bp, Homo sapien
tagacatgttctatggagctgtggg

SEQ ID NO: 1385608 - DNA, 25 bp, Homo sapien
tgttctatggagctgtgggccgtct

SEQ ID NO: 1385609 - DNA, 25 bp, Homo sapien
ccgtgtagacatgttctatggagct

SEQ ID NO: 1385610 - DNA, 25 bp, Homo sapien
ctgcggctcccgaagccgaataact

SEQ ID NO: 1385611 - DNA, 25 bp, Homo sapien
ggctcccgaagccgaataacttcat

SEQ ID NO: 1385612 - DNA, 25 bp, Homo sapien
gcggctcccgaagccgaataacttc

SEQ ID NO: 1385613 - DNA, 25 bp, Homo sapien
tgcggctcccgaagccgaataactt

SEQ ID NO: 1385614 - DNA, 25 bp, Homo sapien
caaatctgtgatctactccacagtc

SEQ ID NO: 1385615 - DNA, 25 bp, Homo sapien
cccaaatctgtgatctactccacag

SEQ ID NO: 1385616 - DNA, 25 bp, Homo sapien
tcccaaatctgtgatctactccaca

SEQ ID NO: 1385617 - DNA, 25 bp, Homo sapien
atcccaaatctgtgatctactccac

SEQ ID NO: 1385618 - DNA, 25 bp, Homo sapien
tgggctggcgccgatgagctcgcag

SEQ ID NO: 1385619 - DNA, 25 bp, Homo sapien
tggcgccgatgagctcgcaggtcct

SEQ ID NO: 1385620 - DNA, 25 bp, Homo sapien
tgagctcgcaggtcctcttgggatc

SEQ ID NO: 1385621 - DNA, 25 bp, Homo sapien
cgcaggtcctcttgggatcgcccgg

SEQ ID NO: 1385622 - DNA, 25 bp, Homo sapien
gcctggcttcacgctgaggctctgg

SEQ ID NO: 1385623 - DNA, 25 bp, Homo sapien
atggcctggcttcacgctgaggctc

SEQ ID NO: 1385624 - DNA, 25 bp, Homo sapien
ggcctggcttcacgctgaggctctg

SEQ ID NO: 1385625 - DNA, 25 bp, Homo sapien
tggcctggcttcacgctgaggctct

SEQ ID NO: 1385626 - DNA, 25 bp, Homo sapien
gggacggcggagcttcccttggatg

SEQ ID NO: 1385627 - DNA, 25 bp, Homo sapien
gtgccccacgcacagtttgcagctg

SEQ ID NO: 1385628 - DNA, 25 bp, Homo sapien
tctggcactggcgtgggacggcgga

SEQ ID NO: 1385629 - DNA, 25 bp, Homo sapien
actggcgtgggacggcggagcttcc

SEQ ID NO: 1385630 - DNA, 25 bp, Homo sapien
ctgcggctccgatgtcggcgtcagc

SEQ ID NO: 1385631 - DNA, 25 bp, Homo sapien
caccacgtctagactgcagctgcgg

SEQ ID NO: 1385632 - DNA, 25 bp, Homo sapien
tgcggctccgatgtcggcgtcagct

SEQ ID NO: 1385633 - DNA, 25 bp, Homo sapien
gctgcggctccgatgtcggcgtcag

SEQ ID NO: 1385634 - DNA, 25 bp, Homo sapien
gatggtattgagcagcaggttttca

SEQ ID NO: 1385635 - DNA, 25 bp, Homo sapien
ggatggtattgagcagcaggttttc

SEQ ID NO: 1385636 - DNA, 25 bp, Homo sapien
cgggatggtattgagcagcaggttt

SEQ ID NO: 1385637 - DNA, 25 bp, Homo sapien
atggtattgagcagcaggttttcac

SEQ ID NO: 1385638 - DNA, 25 bp, Homo sapien
ggcaggtgtgtgtgcgggtagggtg

SEQ ID NO: 1385639 - DNA, 25 bp, Homo sapien
tgtgtgcgggtagggtgagtggcac

SEQ ID NO: 1385640 - DNA, 25 bp, Homo sapien
gtgtgtgcgggtagggtgagtggca

SEQ ID NO: 1385641 - DNA, 25 bp, Homo sapien
gcaggtgtgtgtgcgggtagggtga

SEQ ID NO: 1385642 - DNA, 25 bp, Homo sapien
ttaaatgtatctccgggtgaacgct

SEQ ID NO: 1385643 - DNA, 25 bp, Homo sapien
gtggccactgcacggaccccgtcga

SEQ ID NO: 1385644 - DNA, 25 bp, Homo sapien
ggaccccgtcgatggcgcccagtac

SEQ ID NO: 1385645 - DNA, 25 bp, Homo sapien
tgtatctccgggtgaacgctgtggc

SEQ ID NO: 1385646 - DNA, 25 bp, Homo sapien
cacgtgaatgcggagcgcagcattc

SEQ ID NO: 1385647 - DNA, 25 bp, Homo sapien
cgtgaatgcggagcgcagcattcac

SEQ ID NO: 1385648 - DNA, 25 bp, Homo sapien
tgggacctgtcccgcgtccacgtga

SEQ ID NO: 1385649 - DNA, 25 bp, Homo sapien
cgtccacgtgaatgcggagcgcagc

SEQ ID NO: 1385650 - DNA, 25 bp, Homo sapien
ctgggcaagggggagcccagcccct

SEQ ID NO: 1385651 - DNA, 25 bp, Homo sapien
gggagcccagcccctgcacgggccg

SEQ ID NO: 1385652 - DNA, 25 bp, Homo sapien
gggggagcccagcccctgcacgggc

SEQ ID NO: 1385653 - DNA, 25 bp, Homo sapien
gagcccagcccctgcacgggccgcc

SEQ ID NO: 1385654 - DNA, 25 bp, Homo sapien
cggcggtgacgcaggaagagctcgc

SEQ ID NO: 1385655 - DNA, 25 bp, Homo sapien
ccgccagaacttgagcgacttggga

SEQ ID NO: 1385656 - DNA, 25 bp, Homo sapien
gaacttgagcgacttgggaaggcac

SEQ ID NO: 1385657 - DNA, 25 bp, Homo sapien
ctcgaggccgttccgccagaacttg

SEQ ID NO: 1385658 - DNA, 25 bp, Homo sapien
gaaggcacagtgtcctgcccttgaa

SEQ ID NO: 1385659 - DNA, 25 bp, Homo sapien
tttcccgtccgcagaggagagctgt

SEQ ID NO: 1385660 - DNA, 25 bp, Homo sapien
tgaggacaccgcagaggcgagtgac

SEQ ID NO: 1385661 - DNA, 25 bp, Homo sapien
gctggctttcccgtccgcagaggag

SEQ ID NO: 1385662 - DNA, 25 bp, Homo sapien
tctcggcctccgatggggagtggac

SEQ ID NO: 1385663 - DNA, 25 bp, Homo sapien
gaagccaaggattccaaggcgcaca

SEQ ID NO: 1385664 - DNA, 25 bp, Homo sapien
cctcgggcaggactaatggacttaa

SEQ ID NO: 1385665 - DNA, 25 bp, Homo sapien
actctcacacgtcctggaagatggg

SEQ ID NO: 1385666 - DNA, 25 bp, Homo sapien
tgaaggtggtccagacgtgaagcca

SEQ ID NO: 1385667 - DNA, 25 bp, Homo sapien
catttccctcctccacctgtctgac

SEQ ID NO: 1385668 - DNA, 25 bp, Homo sapien
cccatttccctcctccacctgtctg

SEQ ID NO: 1385669 - DNA, 25 bp, Homo sapien
cttgacctgtgccccatttccctcc

SEQ ID NO: 1385670 - DNA, 25 bp, Homo sapien
gccccatttccctcctccacctgtc

SEQ ID NO: 1385671 - DNA, 25 bp, Homo sapien
tcctatttcgggagaccagaagtgg

SEQ ID NO: 1385672 - DNA, 25 bp, Homo sapien
cctatttcgggagaccagaagtggg

SEQ ID NO: 1385673 - DNA, 25 bp, Homo sapien
ggatatataccccagaaataagaaa

SEQ ID NO: 1385674 - DNA, 25 bp, Homo sapien
accactgttgacaatagctaagatt

SEQ ID NO: 1385675 - DNA, 25 bp, Homo sapien
cccttggtcaattgaatacagatca

SEQ ID NO: 1385676 - DNA, 25 bp, Homo sapien
acacccttggtcaattgaatacaga

SEQ ID NO: 1385677 - DNA, 25 bp, Homo sapien
cagaacacccttggtcaattgaata

SEQ ID NO: 1385678 - DNA, 25 bp, Homo sapien
atacagaacacccttggtcaattga

SEQ ID NO: 1385679 - DNA, 25 bp, Homo sapien
agctaaactccctagtcaactggtt

SEQ ID NO: 1385680 - DNA, 25 bp, Homo sapien
tccctagtcaactggtttgaatcta

SEQ ID NO: 1385681 - DNA, 25 bp, Homo sapien
acttaacagctaaactccctagtca

SEQ ID NO: 1385682 - DNA, 25 bp, Homo sapien
ctaaattgatgagacttaaacccat

SEQ ID NO: 1385683 - DNA, 25 bp, Homo sapien
agcaggattgaagctgcttctttga

SEQ ID NO: 1385684 - DNA, 25 bp, Homo sapien
caattcaacatgaaaatcaccttgg

SEQ ID NO: 1385685 - DNA, 25 bp, Homo sapien
attcaacatgaaaatcaccttggga

SEQ ID NO: 1385686 - DNA, 25 bp, Homo sapien
gcttctttgaatttacaattcaaca

SEQ ID NO: 1385687 - DNA, 25 bp, Homo sapien
caggcgttgacctctgtttttagat

SEQ ID NO: 1385688 - DNA, 25 bp, Homo sapien
tgtacagtctaatgccctactcagt

SEQ ID NO: 1385689 - DNA, 25 bp, Homo sapien
tttagatgtacagtctaatgcccta

SEQ ID NO: 1385690 - DNA, 25 bp, Homo sapien
aacaggcgttgacctctgtttttag

SEQ ID NO: 1385691 - DNA, 25 bp, Homo sapien
tcaatgcactgaaactgcagtgtcc

SEQ ID NO: 1385692 - DNA, 25 bp, Homo sapien
tttaaatcatgattcatcgcattgc

SEQ ID NO: 1385693 - DNA, 25 bp, Homo sapien
ttcaatgcactgaaactgcagtgtc

SEQ ID NO: 1385694 - DNA, 25 bp, Homo sapien
gctttggctaggatgacttgtatac

SEQ ID NO: 1385695 - DNA, 25 bp, Homo sapien
ttggctaggatgacttgtatacttc

SEQ ID NO: 1385696 - DNA, 25 bp, Homo sapien
atctcataggctttggctaggatga

SEQ ID NO: 1385697 - DNA, 25 bp, Homo sapien
cataggctttggctaggatgacttg

SEQ ID NO: 1385698 - DNA, 25 bp, Homo sapien
gatctaaagcatacacacaagtgtg

SEQ ID NO: 1385699 - DNA, 25 bp, Homo sapien
tgtgcagcccttggatcaaagtata

SEQ ID NO: 1385700 - DNA, 25 bp, Homo sapien
tagctggcctacagtttgaccatca

SEQ ID NO: 1385701 - DNA, 25 bp, Homo sapien
gatcccatagttaacaaagtagctg

SEQ ID NO: 1385702 - DNA, 25 bp, Homo sapien
tgttgggaattatctacaaaggcac

SEQ ID NO: 1385703 - DNA, 25 bp, Homo sapien
cactggattggataggagtacggac

SEQ ID NO: 1385704 - DNA, 25 bp, Homo sapien
actacatagatgtgtggcacagggc

SEQ ID NO: 1385705 - DNA, 25 bp, Homo sapien
gagaatggaattagctggtgaaccc

SEQ ID NO: 1385706 - DNA, 25 bp, Homo sapien
ttcatacactgaagatttaaagatt

SEQ ID NO: 1385707 - DNA, 25 bp, Homo sapien
tatagagagctcctactcctggtca

SEQ ID NO: 1385708 - DNA, 25 bp, Homo sapien
tgtatagctggtggcaggtgatgga

SEQ ID NO: 1385709 - DNA, 25 bp, Homo sapien
cactgaagatttaaagattggagac

SEQ ID NO: 1385710 - DNA, 25 bp, Homo sapien
catacacatggctagttgattcaaa

SEQ ID NO: 1385711 - DNA, 25 bp, Homo sapien
tgtggattcattgcctacattggat

SEQ ID NO: 1385712 - DNA, 25 bp, Homo sapien
aaatttagcagtggtttacctatca

SEQ ID NO: 1385713 - DNA, 25 bp, Homo sapien
gctactaaggtaaagtggtctcttg

SEQ ID NO: 1385714 - DNA, 25 bp, Homo sapien
tgcagtaatcatggaatcctcctgg

SEQ ID NO: 1385715 - DNA, 25 bp, Homo sapien
tcctgtataaaccttcagtggatca

SEQ ID NO: 1385716 - DNA, 25 bp, Homo sapien
cagagactcttaataccaatatggt

SEQ ID NO: 1385717 - DNA, 25 bp, Homo sapien
gcaaataaccagttctagaagcaga

SEQ ID NO: 1385718 - DNA, 25 bp, Homo sapien
tggtggtgcacactgcttatctcaa

SEQ ID NO: 1385719 - DNA, 25 bp, Homo sapien
ttagcatgacatgatggtatgcacc

SEQ ID NO: 1385720 - DNA, 25 bp, Homo sapien
caccttcatgcctgactccttttgg

SEQ ID NO: 1385721 - DNA, 25 bp, Homo sapien
ccagcctgggaggtataatgaggcc

SEQ ID NO: 1385722 - DNA, 25 bp, Homo sapien
gtgtgtccccaagaaagtgtcagag

SEQ ID NO: 1385723 - DNA, 25 bp, Homo sapien
agtgtgtccccaagaaagtgtcaga

SEQ ID NO: 1385724 - DNA, 25 bp, Homo sapien
attgctgtggagagtactggagaca

SEQ ID NO: 1385725 - DNA, 25 bp, Homo sapien
tctgagcatgattctagccacaggg

SEQ ID NO: 1385726 - DNA, 25 bp, Homo sapien
tccagttgcttcagcatatgcccag

SEQ ID NO: 1385727 - DNA, 25 bp, Homo sapien
cccagtctcacaaaagaggttattg

SEQ ID NO: 1385728 - DNA, 25 bp, Homo sapien
tcaaatgtactttgtgtttactccc

SEQ ID NO: 1385729 - DNA, 25 bp, Homo sapien
tttgtgtttactccccttatgcagc

SEQ ID NO: 1385730 - DNA, 25 bp, Homo sapien
taaaaagtcattttgtggtcaaatg

SEQ ID NO: 1385731 - DNA, 25 bp, Homo sapien
cattttgtggtcaaatgtactttgt

SEQ ID NO: 1385732 - DNA, 25 bp, Homo sapien
caaatgacatgacctttcagactat

SEQ ID NO: 1385733 - DNA, 25 bp, Homo sapien
caaggtaacatgaagtattgggtca

SEQ ID NO: 1385734 - DNA, 25 bp, Homo sapien
taaactagtgttaaaggagtcatca

SEQ ID NO: 1385735 - DNA, 25 bp, Homo sapien
tttaacaacaatggccactgagtta

SEQ ID NO: 1385736 - DNA, 25 bp, Homo sapien
tcccataatttaagagtagcaacac

SEQ ID NO: 1385737 - DNA, 25 bp, Homo sapien
cactctttctggtatgctgaggtaa

SEQ ID NO: 1385738 - DNA, 25 bp, Homo sapien
aacagacactgagagttcagcttgc

SEQ ID NO: 1385739 - DNA, 25 bp, Homo sapien
tgtttctgtcctatgttaagccaag

SEQ ID NO: 1385740 - DNA, 25 bp, Homo sapien
gtggcagtccaggcagcgcctgaac

SEQ ID NO: 1385741 - DNA, 25 bp, Homo sapien
gtaaagaacccagtaattatgattg

SEQ ID NO: 1385742 - DNA, 25 bp, Homo sapien
gacacacagcttgtttctaacacag

SEQ ID NO: 1385743 - DNA, 25 bp, Homo sapien
gtccctgaaatacacttaccagtca

SEQ ID NO: 1385744 - DNA, 25 bp, Homo sapien
tatgtgtgccacctatccttgcata

SEQ ID NO: 1385745 - DNA, 25 bp, Homo sapien
cttctttgagaccttgacacagtaa

SEQ ID NO: 1385746 - DNA, 25 bp, Homo sapien
tatcaaagccaacccaattagtcta

SEQ ID NO: 1385747 - DNA, 25 bp, Homo sapien
tacaggagactcgttcaatcacatg

SEQ ID NO: 1385748 - DNA, 25 bp, Homo sapien
tgtttcatgttagtccccagttaaa

SEQ ID NO: 1385749 - DNA, 25 bp, Homo sapien
atgttagtccccagttaaacacctg

SEQ ID NO: 1385750 - DNA, 25 bp, Homo sapien
taagtgtttcatgttagtccccagt

SEQ ID NO: 1385751 - DNA, 25 bp, Homo sapien
cttctaagtgtttcatgttagtccc

SEQ ID NO: 1385752 - DNA, 25 bp, Homo sapien
tgaacacgccatgcaattcactcat

SEQ ID NO: 1385753 - DNA, 25 bp, Homo sapien
aatgaacacgccatgcaattcactc

SEQ ID NO: 1385754 - DNA, 25 bp, Homo sapien
taatgaacacgccatgcaattcact

SEQ ID NO: 1385755 - DNA, 25 bp, Homo sapien
atgaacacgccatgcaattcactca

SEQ ID NO: 1385756 - DNA, 25 bp, Homo sapien
gacccttccgtatctgcataggcat

SEQ ID NO: 1385757 - DNA, 25 bp, Homo sapien
tgctgtctcctcctaatacggtatc

SEQ ID NO: 1385758 - DNA, 25 bp, Homo sapien
tgtctcctcctaatacggtatctgt

SEQ ID NO: 1385759 - DNA, 25 bp, Homo sapien
ccggggacccttccgtatctgcata

SEQ ID NO: 1385760 - DNA, 25 bp, Homo sapien
tttgtgtcacaaaggagtctctggc

SEQ ID NO: 1385761 - DNA, 25 bp, Homo sapien
gagaagtttaagtctgagccaccag

SEQ ID NO: 1385762 - DNA, 25 bp, Homo sapien
catcggctgtaaacttggttgggac

SEQ ID NO: 1385763 - DNA, 25 bp, Homo sapien
tctaagacatgatcagacgccaggc

SEQ ID NO: 1385764 - DNA, 25 bp, Homo sapien
aaacagtctgagatagggaagccac

SEQ ID NO: 1385765 - DNA, 25 bp, Homo sapien
gctctcacaattggggctgggttcc

SEQ ID NO: 1385766 - DNA, 25 bp, Homo sapien
ggaagccacatggtatccctttcac

SEQ ID NO: 1385767 - DNA, 25 bp, Homo sapien
agggaaaacagtctgagatagggaa

SEQ ID NO: 1385768 - DNA, 25 bp, Homo sapien
ttaacctacattaaggagtacaaca

SEQ ID NO: 1385769 - DNA, 25 bp, Homo sapien
cctgttgagccatacatcactgata

SEQ ID NO: 1385770 - DNA, 25 bp, Homo sapien
tcttcagaatcttccaagtagagcc

SEQ ID NO: 1385771 - DNA, 25 bp, Homo sapien
gtagaaatcaccttagaaacaatgg

SEQ ID NO: 1385772 - DNA, 25 bp, Homo sapien
ccagcccatgccacttttaaagttt

SEQ ID NO: 1385773 - DNA, 25 bp, Homo sapien
agcccatgccacttttaaagtttct

SEQ ID NO: 1385774 - DNA, 25 bp, Homo sapien
cagcccatgccacttttaaagtttc

SEQ ID NO: 1385775 - DNA, 25 bp, Homo sapien
cgtgttggcaggcatgtgtaatctc

SEQ ID NO: 1385776 - DNA, 25 bp, Homo sapien
gaatgattagcatccaaacactttg

SEQ ID NO: 1385777 - DNA, 25 bp, Homo sapien
caactgaatgattagcatccaaaca

SEQ ID NO: 1385778 - DNA, 25 bp, Homo sapien
aaaagtttatttgcaccatctcaat

SEQ ID NO: 1385779 - DNA, 25 bp, Homo sapien
tttgctctagcaccaaactggatgg

SEQ ID NO: 1385780 - DNA, 25 bp, Homo sapien
tctgtgttccagtagtgccctgctg

SEQ ID NO: 1385781 - DNA, 25 bp, Homo sapien
cttatgactgttgagaggtggacca

SEQ ID NO: 1385782 - DNA, 25 bp, Homo sapien
gactctatatggacattgcctgcct

SEQ ID NO: 1385783 - DNA, 25 bp, Homo sapien
actctgataaagttctcaagtcttt

SEQ ID NO: 1385784 - DNA, 25 bp, Homo sapien
taactctgataaagttctcaagtct

SEQ ID NO: 1385785 - DNA, 25 bp, Homo sapien
attaactctgataaagttctcaagt

SEQ ID NO: 1385786 - DNA, 25 bp, Homo sapien
tctgataaagttctcaagtctttag

SEQ ID NO: 1385787 - DNA, 25 bp, Homo sapien
tggacacttgctcccatctactttc

SEQ ID NO: 1385788 - DNA, 25 bp, Homo sapien
ctactttcttctctagaatccacgg

SEQ ID NO: 1385789 - DNA, 25 bp, Homo sapien
cccatctactttcttctctagaatc

SEQ ID NO: 1385790 - DNA, 25 bp, Homo sapien
catctactttcttctctagaatcca

SEQ ID NO: 1385791 - DNA, 25 bp, Homo sapien
actgaagtaggatatttttgtatca

SEQ ID NO: 1385792 - DNA, 25 bp, Homo sapien
tttactgaagtaggatatttttgta

SEQ ID NO: 1385793 - DNA, 25 bp, Homo sapien
tactgaagtaggatatttttgtatc

SEQ ID NO: 1385794 - DNA, 25 bp, Homo sapien
ctgaagtaggatatttttgtatcat

SEQ ID NO: 1385795 - DNA, 25 bp, Homo sapien
ttagcatttcatggatgacttgtgt

SEQ ID NO: 1385796 - DNA, 25 bp, Homo sapien
ttcatggatgacttgtgtttgaaca

SEQ ID NO: 1385797 - DNA, 25 bp, Homo sapien
tgtagttcaaccgtattttgtatgg

SEQ ID NO: 1385798 - DNA, 25 bp, Homo sapien
gttcaaccgtattttgtatggagat

SEQ ID NO: 1385799 - DNA, 25 bp, Homo sapien
taggccagtagtagacattccaagc

SEQ ID NO: 1385800 - DNA, 25 bp, Homo sapien
tagtcattggaagcctggtcagtgg

SEQ ID NO: 1385801 - DNA, 25 bp, Homo sapien
cagctgggtactcgttcatggagaa

SEQ ID NO: 1385802 - DNA, 25 bp, Homo sapien
tacacaatatatcacgggcctggtc

SEQ ID NO: 1385803 - DNA, 25 bp, Homo sapien
agccctctcagcattatgcagtgcc

SEQ ID NO: 1385804 - DNA, 25 bp, Homo sapien
tctcagcattatgcagtgcccctcc

SEQ ID NO: 1385805 - DNA, 25 bp, Homo sapien
cagcattatgcagtgcccctcctct

SEQ ID NO: 1385806 - DNA, 25 bp, Homo sapien
ccagccctctcagcattatgcagtg

SEQ ID NO: 1385807 - DNA, 25 bp, Homo sapien
cacctatagaggctctaatgctcta

SEQ ID NO: 1385808 - DNA, 25 bp, Homo sapien
agaggctctaatgctctaaggtgac

SEQ ID NO: 1385809 - DNA, 25 bp, Homo sapien
tatagaggctctaatgctctaaggt

SEQ ID NO: 1385810 - DNA, 25 bp, Homo sapien
agcacctatagaggctctaatgctc

SEQ ID NO: 1385811 - DNA, 25 bp, Homo sapien
tgactgggtccagatcctgcctggg

SEQ ID NO: 1385812 - DNA, 25 bp, Homo sapien
gtggatgatgtccagaatgttggcc

SEQ ID NO: 1385813 - DNA, 25 bp, Homo sapien
ccagatcctgcctgggctgatgggc

SEQ ID NO: 1385814 - DNA, 25 bp, Homo sapien
ggtccagatcctgcctgggctgatg

SEQ ID NO: 1385815 - DNA, 25 bp, Homo sapien
agcaaagtaattggctacacagtga

SEQ ID NO: 1385816 - DNA, 25 bp, Homo sapien
gctgaagagttgtccggcctacgtc

SEQ ID NO: 1385817 - DNA, 25 bp, Homo sapien
aaggccaggcttgtaaggtctcaga

SEQ ID NO: 1385818 - DNA, 25 bp, Homo sapien
tctgtgaaactgaactttagggtga

SEQ ID NO: 1385819 - DNA, 25 bp, Homo sapien
tctggaggatcgtggcctcttgtgt

SEQ ID NO: 1385820 - DNA, 25 bp, Homo sapien
ctgttggtgggcttattaatctgga

SEQ ID NO: 1385821 - DNA, 25 bp, Homo sapien
tgggcttattaatctggagtctgga

SEQ ID NO: 1385822 - DNA, 25 bp, Homo sapien
tgtgagctgttggtgggcttattaa

SEQ ID NO: 1385823 - DNA, 25 bp, Homo sapien
ctgtactctgacttgagaaaagttg

SEQ ID NO: 1385824 - DNA, 25 bp, Homo sapien
tgtactctgacttgagaaaagttgg

SEQ ID NO: 1385825 - DNA, 25 bp, Homo sapien
attgcccagcagagatcaggtccca

SEQ ID NO: 1385826 - DNA, 25 bp, Homo sapien
gggctggtctgatatcagcactcct

SEQ ID NO: 1385827 - DNA, 25 bp, Homo sapien
accatcagagctatccagccagtag

SEQ ID NO: 1385828 - DNA, 25 bp, Homo sapien
tgatatcagcactcctttgtctgct

SEQ ID NO: 1385829 - DNA, 25 bp, Homo sapien
atggcagagaacgatcaccagcctg

SEQ ID NO: 1385830 - DNA, 25 bp, Homo sapien
tctggttgagatctaagtttgattt

SEQ ID NO: 1385831 - DNA, 25 bp, Homo sapien
accaacaggataatttgctgaggtt

SEQ ID NO: 1385832 - DNA, 25 bp, Homo sapien
gagaacgatcaccagcctgagcctt

SEQ ID NO: 1385833 - DNA, 25 bp, Homo sapien
actcagtaatcatatgaattgtgca

SEQ ID NO: 1385834 - DNA, 25 bp, Homo sapien
ctcagtaatcatatgaattgtgcat

SEQ ID NO: 1385835 - DNA, 25 bp, Homo sapien
ctgcacctggcaatttttaaatata

SEQ ID NO: 1385836 - DNA, 25 bp, Homo sapien
cagatgcatgctatcaagcctggct

SEQ ID NO: 1385837 - DNA, 25 bp, Homo sapien
gatgcatgctatcaagcctggctaa

SEQ ID NO: 1385838 - DNA, 25 bp, Homo sapien
tacagatgcatgctatcaagcctgg

SEQ ID NO: 1385839 - DNA, 25 bp, Homo sapien
cactactcgaagtgacctaggttca

SEQ ID NO: 1385840 - DNA, 25 bp, Homo sapien
tcgaagtgacctaggttcaatacaa

SEQ ID NO: 1385841 - DNA, 25 bp, Homo sapien
tactcgaagtgacctaggttcaata

SEQ ID NO: 1385842 - DNA, 25 bp, Homo sapien
tcaacactactcgaagtgacctagg

SEQ ID NO: 1385843 - DNA, 25 bp, Homo sapien
gccaacccaggattaggccctgcag

SEQ ID NO: 1385844 - DNA, 25 bp, Homo sapien
tgccaacccaggattaggccctgca

SEQ ID NO: 1385845 - DNA, 25 bp, Homo sapien
ctgccaacccaggattaggccctgc

SEQ ID NO: 1385846 - DNA, 25 bp, Homo sapien
tctgccaacccaggattaggccctg

SEQ ID NO: 1385847 - DNA, 25 bp, Homo sapien
gggcatcaagactcttggtcagtgc

SEQ ID NO: 1385848 - DNA, 25 bp, Homo sapien
caaggagaccattcatgcaacctgg

SEQ ID NO: 1385849 - DNA, 25 bp, Homo sapien
taactgggcctcaaggagaccattc

SEQ ID NO: 1385850 - DNA, 25 bp, Homo sapien
cattcatgcaacctggaagggcatc

SEQ ID NO: 1385851 - DNA, 25 bp, Homo sapien
tgctgagaactgtaatggacccagt

SEQ ID NO: 1385852 - DNA, 25 bp, Homo sapien
gaactgtaatggacccagttgcttc

SEQ ID NO: 1385853 - DNA, 25 bp, Homo sapien
ggtcactggctgcacggtagtaatg

SEQ ID NO: 1385854 - DNA, 25 bp, Homo sapien
gctgcacggtagtaatgccatacac

SEQ ID NO: 1385855 - DNA, 25 bp, Homo sapien
tttgcatgcagccatctctaaaatg

SEQ ID NO: 1385856 - DNA, 25 bp, Homo sapien
tcaaatgttttaagagtttgcatgc

SEQ ID NO: 1385857 - DNA, 25 bp, Homo sapien
ctctaaaatgtcaaatggtatctct

SEQ ID NO: 1385858 - DNA, 25 bp, Homo sapien
aaaatgtcaaatggtatctcttcat

SEQ ID NO: 1385859 - DNA, 25 bp, Homo sapien
accatttccactgcacaacacgcca

SEQ ID NO: 1385860 - DNA, 25 bp, Homo sapien
gaccatttccactgtacaacatgct

SEQ ID NO: 1385861 - DNA, 25 bp, Homo sapien
catttccactgcacaacacgccgtg

SEQ ID NO: 1385862 - DNA, 25 bp, Homo sapien
tccactgcacaacacgccatgcttt

SEQ ID NO: 1385863 - DNA, 25 bp, Homo sapien
gaaacacccagaggacactggaaac

SEQ ID NO: 1385864 - DNA, 25 bp, Homo sapien
tcttgttgctcttggaaacacccag

SEQ ID NO: 1385865 - DNA, 25 bp, Homo sapien
cagagatttattcgtttcttgttgc

SEQ ID NO: 1385866 - DNA, 25 bp, Homo sapien
tgctcttggaaacacccagaggaca

SEQ ID NO: 1385867 - DNA, 25 bp, Homo sapien
gaccttttatcctcctctgaagcac

SEQ ID NO: 1385868 - DNA, 25 bp, Homo sapien
tgagaggttagaccacagggctgtt

SEQ ID NO: 1385869 - DNA, 25 bp, Homo sapien
ggctgttctttcaagtgcgcttctt

SEQ ID NO: 1385870 - DNA, 25 bp, Homo sapien
gcttcttattcatagggaaccctcc

SEQ ID NO: 1385871 - DNA, 25 bp, Homo sapien
gttcctccatggaaactaggtctct

SEQ ID NO: 1385872 - DNA, 25 bp, Homo sapien
aagaccatcatccagtaccccatct

SEQ ID NO: 1385873 - DNA, 25 bp, Homo sapien
aaacttccataaatgcaatccagga

SEQ ID NO: 1385874 - DNA, 25 bp, Homo sapien
ctggcggaatcagtgagttcctcca

SEQ ID NO: 1385875 - DNA, 25 bp, Homo sapien
acgcccagcttaagactagaggcac

SEQ ID NO: 1385876 - DNA, 25 bp, Homo sapien
ctgagctacatgagggttggtaacc

SEQ ID NO: 1385877 - DNA, 25 bp, Homo sapien
aacgcccagcttaagactagaggca

SEQ ID NO: 1385878 - DNA, 25 bp, Homo sapien
gcccgcgatgcgcccacgcgtctgc

SEQ ID NO: 1385879 - DNA, 25 bp, Homo sapien
acgaccaccgctgggatccgcactt

SEQ ID NO: 1385880 - DNA, 25 bp, Homo sapien
cacgaccaccgctgggatccgcact

SEQ ID NO: 1385881 - DNA, 25 bp, Homo sapien
tcagctacacgaccaccgctgggat

SEQ ID NO: 1385882 - DNA, 25 bp, Homo sapien
gcctgctcagctacacgaccaccgc

SEQ ID NO: 1385883 - DNA, 25 bp, Homo sapien
cccggacttaatggatcaggactgg

SEQ ID NO: 1385884 - DNA, 25 bp, Homo sapien
ctggagacccggacttaatggatca

SEQ ID NO: 1385885 - DNA, 25 bp, Homo sapien
tggtccctacccacgtgacacagat

SEQ ID NO: 1385886 - DNA, 25 bp, Homo sapien
taatggatcaggactggtccctacc

SEQ ID NO: 1385887 - DNA, 25 bp, Homo sapien
cagtgaactttgtaggtgggtagat

SEQ ID NO: 1385888 - DNA, 25 bp, Homo sapien
gctttcaggtaagaggcacagagga

SEQ ID NO: 1385889 - DNA, 25 bp, Homo sapien
cggctaccaccgaggttcctaacag

SEQ ID NO: 1385890 - DNA, 25 bp, Homo sapien
ttgatgtgggagtgcgtgtgaaacg

SEQ ID NO: 1385891 - DNA, 25 bp, Homo sapien
gctagctgccatataagtttctccc

SEQ ID NO: 1385892 - DNA, 25 bp, Homo sapien
cctaaagttattccgtcatcgatga

SEQ ID NO: 1385893 - DNA, 25 bp, Homo sapien
tatggcttcagctagttcattcgct

SEQ ID NO: 1385894 - DNA, 25 bp, Homo sapien
tcatcgatgactatcctggctaaag

SEQ ID NO: 1385895 - DNA, 25 bp, Homo sapien
ggttgacagatttctaattatacgt

SEQ ID NO: 1385896 - DNA, 25 bp, Homo sapien
acgttcatgagaggttactccccac

SEQ ID NO: 1385897 - DNA, 25 bp, Homo sapien
gagtggttgacagatttctaattat

SEQ ID NO: 1385898 - DNA, 25 bp, Homo sapien
ctagagtggttgacagatttctaat

SEQ ID NO: 1385899 - DNA, 25 bp, Homo sapien
tctgccaaacattggccaaaattca

SEQ ID NO: 1385900 - DNA, 25 bp, Homo sapien
acctccttggtttgcaggtatggtt

SEQ ID NO: 1385901 - DNA, 25 bp, Homo sapien
cacctccttggtttgcaggtatggt

SEQ ID NO: 1385902 - DNA, 25 bp, Homo sapien
tgacttctgccaaacattggccaaa

SEQ ID NO: 1385903 - DNA, 25 bp, Homo sapien
atttcgatgaactacttcagtgttc

SEQ ID NO: 1385904 - DNA, 25 bp, Homo sapien
taaagtaatttcgatgaactacttc

SEQ ID NO: 1385905 - DNA, 25 bp, Homo sapien
ctgtaaagtaatttcgatgaactac

SEQ ID NO: 1385906 - DNA, 25 bp, Homo sapien
gtaatttcgatgaactacttcagtg

SEQ ID NO: 1385907 - DNA, 25 bp, Homo sapien
tcccatgctcgttttctctatcaca

SEQ ID NO: 1385908 - DNA, 25 bp, Homo sapien
gctcgttttctctatcacattctac

SEQ ID NO: 1385909 - DNA, 25 bp, Homo sapien
agtcccatgctcgttttctctatca

SEQ ID NO: 1385910 - DNA, 25 bp, Homo sapien
tttccagtcccatgctcgttttctc

SEQ ID NO: 1385911 - DNA, 25 bp, Homo sapien
aaatttgtgtttatgattgtgttgg

SEQ ID NO: 1385912 - DNA, 25 bp, Homo sapien
caaatttgtgtttatgattgtgttg

SEQ ID NO: 1385913 - DNA, 25 bp, Homo sapien
aatttgtgtttatgattgtgttggg

SEQ ID NO: 1385914 - DNA, 25 bp, Homo sapien
atcatgcacagaatccgtttccacc

SEQ ID NO: 1385915 - DNA, 25 bp, Homo sapien
cacagaatccgtttccacctcttca

SEQ ID NO: 1385916 - DNA, 25 bp, Homo sapien
tcatgcacagaatccgtttccacct

SEQ ID NO: 1385917 - DNA, 25 bp, Homo sapien
gcacagaatccgtttccacctcttc

SEQ ID NO: 1385918 - DNA, 25 bp, Homo sapien
catctttataatccatctgttacaa

SEQ ID NO: 1385919 - DNA, 25 bp, Homo sapien
tataatccatctgttacaattccac

SEQ ID NO: 1385920 - DNA, 25 bp, Homo sapien
caagtaattgtgaagtttcccctca

SEQ ID NO: 1385921 - DNA, 25 bp, Homo sapien
aagtaattgtgaagtttcccctcat

SEQ ID NO: 1385922 - DNA, 25 bp, Homo sapien
gaaagaaggagtttattgaggcact

SEQ ID NO: 1385923 - DNA, 25 bp, Homo sapien
agaaagaaggagtttattgaggcac

SEQ ID NO: 1385924 - DNA, 25 bp, Homo sapien
aagaaagaaggagtttattgaggca

SEQ ID NO: 1385925 - DNA, 25 bp, Homo sapien
aatccagagtgcgatttcttcttgc

SEQ ID NO: 1385926 - DNA, 25 bp, Homo sapien
aacataggaggcaggcattctggcc

SEQ ID NO: 1385927 - DNA, 25 bp, Homo sapien
taactcagggccaatttgggacatg

SEQ ID NO: 1385928 - DNA, 25 bp, Homo sapien
gcgtcttcccactttgtaatccaga

SEQ ID NO: 1385929 - DNA, 25 bp, Homo sapien
aagttgctcttcagtactgcatata

SEQ ID NO: 1385930 - DNA, 25 bp, Homo sapien
gaagttgctcttcagtactgcatat

SEQ ID NO: 1385931 - DNA, 25 bp, Homo sapien
agttgctcttcagtactgcatataa

SEQ ID NO: 1385932 - DNA, 25 bp, Homo sapien
gaatagcttgaacctgggaggctga

SEQ ID NO: 1385933 - DNA, 25 bp, Homo sapien
cgtggtggtgaatgcctttagtcct

SEQ ID NO: 1385934 - DNA, 25 bp, Homo sapien
agctactcaggaggctaaggcagga

SEQ ID NO: 1385935 - DNA, 25 bp, Homo sapien
tgagccaagatagagccactacatt

SEQ ID NO: 1385936 - DNA, 25 bp, Homo sapien
cgcttccagagtgaggcaatgtgtc

SEQ ID NO: 1385937 - DNA, 25 bp, Homo sapien
ccagagtgaggcaatgtgtcgccct

SEQ ID NO: 1385938 - DNA, 25 bp, Homo sapien
cttccagagtgaggcaatgtgtcgc

SEQ ID NO: 1385939 - DNA, 25 bp, Homo sapien
tgctttggctcacgcacagtgcact

SEQ ID NO: 1385940 - DNA, 25 bp, Homo sapien
gaatgaggttagtggagtgaacaca

SEQ ID NO: 1385941 - DNA, 25 bp, Homo sapien
tacaagtaggtcactttgcctttaa

SEQ ID NO: 1385942 - DNA, 25 bp, Homo sapien
gagatattctgaagtatactggcag

SEQ ID NO: 1385943 - DNA, 25 bp, Homo sapien
caatactaatgaggaataagtcccc

SEQ ID NO: 1385944 - DNA, 25 bp, Homo sapien
tgaagtatcctacttttgaaggtaa

SEQ ID NO: 1385945 - DNA, 25 bp, Homo sapien
caagcactgacaacttttcgtgtcg

SEQ ID NO: 1385946 - DNA, 25 bp, Homo sapien
tattacaactatacagacctgcacc

SEQ ID NO: 1385947 - DNA, 25 bp, Homo sapien
ttacattatctagtatcctgtggca

SEQ ID NO: 1385948 - DNA, 25 bp, Homo sapien
gggacattattttctataccattgc

SEQ ID NO: 1385949 - DNA, 25 bp, Homo sapien
cattattttctataccattgctatc

SEQ ID NO: 1385950 - DNA, 25 bp, Homo sapien
gacattattttctataccattgcta

SEQ ID NO: 1385951 - DNA, 25 bp, Homo sapien
attttctataccattgctatcatct

SEQ ID NO: 1385952 - DNA, 25 bp, Homo sapien
atctgctcaaattctttcccctcat

SEQ ID NO: 1385953 - DNA, 25 bp, Homo sapien
agctgttcaatctgctcaaattctt

SEQ ID NO: 1385954 - DNA, 25 bp, Homo sapien
caatctgctcaaattctttcccctc

SEQ ID NO: 1385955 - DNA, 25 bp, Homo sapien
tgttcaatctgctcaaattctttcc

SEQ ID NO: 1385956 - DNA, 25 bp, Homo sapien
gcaccaaatagctcagcaccacaag

SEQ ID NO: 1385957 - DNA, 25 bp, Homo sapien
gcaccacaagctcaatgtgttcttc

SEQ ID NO: 1385958 - DNA, 25 bp, Homo sapien
tattcatttgaacaccaacaggaac

SEQ ID NO: 1385959 - DNA, 25 bp, Homo sapien
ttagcatatgttccattgatcacat

SEQ ID NO: 1385960 - DNA, 25 bp, Homo sapien
tacactcccattactactgtaccag

SEQ ID NO: 1385961 - DNA, 25 bp, Homo sapien
catgtcaagacagtagaatccccta

SEQ ID NO: 1385962 - DNA, 25 bp, Homo sapien
cctacgtaagagatcaatggcttgt

SEQ ID NO: 1385963 - DNA, 25 bp, Homo sapien
tcccattactactgtaccaggtcca

SEQ ID NO: 1385964 - DNA, 25 bp, Homo sapien
tgagaataaaatagagaaatgtatg

SEQ ID NO: 1385965 - DNA, 25 bp, Homo sapien
ctgagaataaaatagagaaatgtat

SEQ ID NO: 1385966 - DNA, 25 bp, Homo sapien
gagaataaaatagagaaatgtatgt

SEQ ID NO: 1385967 - DNA, 25 bp, Homo sapien
gaataaaatagagaaatgtatgtta

SEQ ID NO: 1385968 - DNA, 25 bp, Homo sapien
aagcatactggaagctgcaaggggc

SEQ ID NO: 1385969 - DNA, 25 bp, Homo sapien
gcatactggaagctgcaaggggctt

SEQ ID NO: 1385970 - DNA, 25 bp, Homo sapien
agcatactggaagctgcaaggggct

SEQ ID NO: 1385971 - DNA, 25 bp, Homo sapien
ggaagcatactggaagctgcaaggg

SEQ ID NO: 1385972 - DNA, 25 bp, Homo sapien
aaatcagcttagtcatctcaaaaca

SEQ ID NO: 1385973 - DNA, 25 bp, Homo sapien
gccaaaatcagcttagtcatctcaa

SEQ ID NO: 1385974 - DNA, 25 bp, Homo sapien
accagccaaaatcagcttagtcatc

SEQ ID NO: 1385975 - DNA, 25 bp, Homo sapien
caaaatcagcttagtcatctcaaaa

SEQ ID NO: 1385976 - DNA, 25 bp, Homo sapien
agaaacaagaataacttcccatttg

SEQ ID NO: 1385977 - DNA, 25 bp, Homo sapien
ttgtttgctgttaatgatggtgaac

SEQ ID NO: 1385978 - DNA, 25 bp, Homo sapien
tttcctctcagaagaaacaagaata

SEQ ID NO: 1385979 - DNA, 25 bp, Homo sapien
gaataacttcccatttgtttgctgt

SEQ ID NO: 1385980 - DNA, 25 bp, Homo sapien
tttttttctactggcatactagaat

SEQ ID NO: 1385981 - DNA, 25 bp, Homo sapien
gttgtgaactggcatgtgagattta

SEQ ID NO: 1385982 - DNA, 25 bp, Homo sapien
ttttctactggcatactagaatgtt

SEQ ID NO: 1385983 - DNA, 25 bp, Homo sapien
tgtgaactggcatgtgagatttaca

SEQ ID NO: 1385984 - DNA, 25 bp, Homo sapien
accagtcctgtgatgcgccctgtag

SEQ ID NO: 1385985 - DNA, 25 bp, Homo sapien
tccaccagtcctgtgatgcgccctg

SEQ ID NO: 1385986 - DNA, 25 bp, Homo sapien
agcctgtccaccagtcctgtgatgc

SEQ ID NO: 1385987 - DNA, 25 bp, Homo sapien
cagtcctgtgatgcgccctgtagtg

SEQ ID NO: 1385988 - DNA, 25 bp, Homo sapien
tcactaggacttgtcttggatgggc

SEQ ID NO: 1385989 - DNA, 25 bp, Homo sapien
cgatcactaggacttgtcttggatg

SEQ ID NO: 1385990 - DNA, 25 bp, Homo sapien
tgtcttggatgggctcaacagggac

SEQ ID NO: 1385991 - DNA, 25 bp, Homo sapien
ttgtcttggatgggctcaacaggga

SEQ ID NO: 1385992 - DNA, 25 bp, Homo sapien
aaatttccatatagcattctatatg

SEQ ID NO: 1385993 - DNA, 25 bp, Homo sapien
tcttaatcattgctagaaaatttcc

SEQ ID NO: 1385994 - DNA, 25 bp, Homo sapien
cctttcttaatcattgctagaaaat

SEQ ID NO: 1385995 - DNA, 25 bp, Homo sapien
cattgctagaaaatttccatatagc

SEQ ID NO: 1385996 - DNA, 25 bp, Homo sapien
cgtccgccgagcttgggcgcgcggc

SEQ ID NO: 1385997 - DNA, 25 bp, Homo sapien
tggggcactgccgtccgccgagctt

SEQ ID NO: 1385998 - DNA, 25 bp, Homo sapien
ctgccgtccgccgagcttgggcgcg

SEQ ID NO: 1385999 - DNA, 25 bp, Homo sapien
gggcactgccgtccgccgagcttgg

SEQ ID NO: 1386000 - DNA, 25 bp, Homo sapien
cgcctcagttctcgtggagactgct

SEQ ID NO: 1386001 - DNA, 25 bp, Homo sapien
cgcgggtgtccggaatccctccgca

SEQ ID NO: 1386002 - DNA, 25 bp, Homo sapien
agagggtccgcctcagttctcgtgg

SEQ ID NO: 1386003 - DNA, 25 bp, Homo sapien
ggaatccctccgcacactcgcaggt

SEQ ID NO: 1386004 - DNA, 25 bp, Homo sapien
ggccttccatcagttatgcagccct

SEQ ID NO: 1386005 - DNA, 25 bp, Homo sapien
ttgccctactccccgagacgctctt

SEQ ID NO: 1386006 - DNA, 25 bp, Homo sapien
cccggccttccatcagttatgcagc

SEQ ID NO: 1386007 - DNA, 25 bp, Homo sapien
cttgccctactccccgagacgctct

SEQ ID NO: 1386008 - DNA, 25 bp, Homo sapien
agttgatgctgatccccactgttgc

SEQ ID NO: 1386009 - DNA, 25 bp, Homo sapien
caagttgatgctgatccccactgtt

SEQ ID NO: 1386010 - DNA, 25 bp, Homo sapien
ttgcccaagttgatgctgatcccca

SEQ ID NO: 1386011 - DNA, 25 bp, Homo sapien
atgctgatccccactgttgcttttg

SEQ ID NO: 1386012 - DNA, 25 bp, Homo sapien
aaattgataccacaatccattccag

SEQ ID NO: 1386013 - DNA, 25 bp, Homo sapien
tagtatagacgcttcacctactggg

SEQ ID NO: 1386014 - DNA, 25 bp, Homo sapien
ggtagctagtatagacgcttcacct

SEQ ID NO: 1386015 - DNA, 25 bp, Homo sapien
aattacatgtcctttacaggctaat

SEQ ID NO: 1386016 - DNA, 25 bp, Homo sapien
caaaatggccccaacagatcatcaa

SEQ ID NO: 1386017 - DNA, 25 bp, Homo sapien
tcaaaatggccccaacagatcatca

SEQ ID NO: 1386018 - DNA, 25 bp, Homo sapien
ttcaaaatggccccaacagatcatc

SEQ ID NO: 1386019 - DNA, 25 bp, Homo sapien
aaatggccccaacagatcatcaaca

SEQ ID NO: 1386020 - DNA, 25 bp, Homo sapien
ttagctcaggttctacttcaagaat

SEQ ID NO: 1386021 - DNA, 25 bp, Homo sapien
cctccagtcaaaacttcacatgccc

SEQ ID NO: 1386022 - DNA, 25 bp, Homo sapien
tctccagcctataattccctctgcc

SEQ ID NO: 1386023 - DNA, 25 bp, Homo sapien
ttcacatgcccttagctcaggttct

SEQ ID NO: 1386024 - DNA, 25 bp, Homo sapien
ttacaaagcagtttaggccgggtgc

SEQ ID NO: 1386025 - DNA, 25 bp, Homo sapien
cttacaaagcagtttaggccgggtg

SEQ ID NO: 1386026 - DNA, 25 bp, Homo sapien
tgtagggtcatttctccagaggata

SEQ ID NO: 1386027 - DNA, 25 bp, Homo sapien
gagtagaagcccatagagtatcagg

SEQ ID NO: 1386028 - DNA, 25 bp, Homo sapien
ttccttaggacagccaatttgggcc

SEQ ID NO: 1386029 - DNA, 25 bp, Homo sapien
gaacccacaaggttttattgtctga

SEQ ID NO: 1386030 - DNA, 25 bp, Homo sapien
gcacaggtatgcacaacagagttga

SEQ ID NO: 1386031 - DNA, 25 bp, Homo sapien
gatctgagagtacccttgagctccg

SEQ ID NO: 1386032 - DNA, 25 bp, Homo sapien
tcagcaagaaagcagtgagcgccat

SEQ ID NO: 1386033 - DNA, 25 bp, Homo sapien
tcttggagcttatcaacgatctact

SEQ ID NO: 1386034 - DNA, 25 bp, Homo sapien
caaaagctgagcaccttagtcctac

SEQ ID NO: 1386035 - DNA, 25 bp, Homo sapien
caactaatgaacttagaagaggccc

SEQ ID NO: 1386036 - DNA, 25 bp, Homo sapien
gagactcgagcataacacccagtaa

SEQ ID NO: 1386037 - DNA, 25 bp, Homo sapien
gatcacagcctgagctaacaccttg

SEQ ID NO: 1386038 - DNA, 25 bp, Homo sapien
attccagaggagccagagctcctgg

SEQ ID NO: 1386039 - DNA, 25 bp, Homo sapien
tcattccagaggagccagagctcct

SEQ ID NO: 1386040 - DNA, 25 bp, Homo sapien
gagccagagctcctggccactgtgc

SEQ ID NO: 1386041 - DNA, 25 bp, Homo sapien
gaggagccagagctcctggccactg

SEQ ID NO: 1386042 - DNA, 25 bp, Homo sapien
tactgtgtgtgggtcattcgagtgc

SEQ ID NO: 1386043 - DNA, 25 bp, Homo sapien
tgtgtgtgggtcattcgagtgccaa

SEQ ID NO: 1386044 - DNA, 25 bp, Homo sapien
gtgtgtgggtcattcgagtgccaac

SEQ ID NO: 1386045 - DNA, 25 bp, Homo sapien
actgtgtgtgggtcattcgagtgcc

SEQ ID NO: 1386046 - DNA, 25 bp, Homo sapien
tgagaaccaggaactttaattccgc

SEQ ID NO: 1386047 - DNA, 25 bp, Homo sapien
ttctccttgagaaccaggaacttta

SEQ ID NO: 1386048 - DNA, 25 bp, Homo sapien
aagtggcactgatgtctcaatgtta

SEQ ID NO: 1386049 - DNA, 25 bp, Homo sapien
ccaggaactttaattccgcagaagc

SEQ ID NO: 1386050 - DNA, 25 bp, Homo sapien
gaaagctagatttaggcacagccgc

SEQ ID NO: 1386051 - DNA, 25 bp, Homo sapien
ttcaaattacaaacagtggagtccc

SEQ ID NO: 1386052 - DNA, 25 bp, Homo sapien
caaagatggcttaccagcaggcagt

SEQ ID NO: 1386053 - DNA, 25 bp, Homo sapien
tgctctattagacacccagtgtggg

SEQ ID NO: 1386054 - DNA, 25 bp, Homo sapien
ggaagtctcaccgaaattagaacag

SEQ ID NO: 1386055 - DNA, 25 bp, Homo sapien
actgaaggcaattcaaagtgaggcc

SEQ ID NO: 1386056 - DNA, 25 bp, Homo sapien
tatcaatgggttagtccaggaggac

SEQ ID NO: 1386057 - DNA, 25 bp, Homo sapien
tcctgacagtaaaagattgcattgc

SEQ ID NO: 1386058 - DNA, 25 bp, Homo sapien
ggaaaagatgctaaactgggccaac

SEQ ID NO: 1386059 - DNA, 25 bp, Homo sapien
tcctgacgtagccaagacacatgac

SEQ ID NO: 1386060 - DNA, 25 bp, Homo sapien
gaagaaaggtcctaccctgatggaa

SEQ ID NO: 1386061 - DNA, 25 bp, Homo sapien
ttggcattggaaaacagcatcggct

SEQ ID NO: 1386062 - DNA, 25 bp, Homo sapien
tcttgacttgacaaaccattatgag

SEQ ID NO: 1386063 - DNA, 25 bp, Homo sapien
tgacaaaccattatgagcagtctgg

SEQ ID NO: 1386064 - DNA, 25 bp, Homo sapien
tcatgcaccatagctctcaacccac

SEQ ID NO: 1386065 - DNA, 25 bp, Homo sapien
tatgagcagtctggctctcatgcac

SEQ ID NO: 1386066 - DNA, 25 bp, Homo sapien
tggaagctccatatttaattaccaa

SEQ ID NO: 1386067 - DNA, 25 bp, Homo sapien
ccaatgagtcagtaatgttattaag

SEQ ID NO: 1386068 - DNA, 25 bp, Homo sapien
gcataaaaaccttcattagtagttc

SEQ ID NO: 1386069 - DNA, 25 bp, Homo sapien
cacttagctgggctgataacatatt

SEQ ID NO: 1386070 - DNA, 25 bp, Homo sapien
tgtccagatcctcacattcaagtct

SEQ ID NO: 1386071 - DNA, 25 bp, Homo sapien
gatcctcacattcaagtctgctttg

SEQ ID NO: 1386072 - DNA, 25 bp, Homo sapien
tctgctttgatagcctgctcattgg

SEQ ID NO: 1386073 - DNA, 25 bp, Homo sapien
cattcaagtctgctttgatagcctg

SEQ ID NO: 1386074 - DNA, 25 bp, Homo sapien
tttactatggagaaaagatcctata

SEQ ID NO: 1386075 - DNA, 25 bp, Homo sapien
cactttacagtttaatgagtcctga

SEQ ID NO: 1386076 - DNA, 25 bp, Homo sapien
agagttcccttgtgaccttttgcag

SEQ ID NO: 1386077 - DNA, 25 bp, Homo sapien
tgagtcctgacaaatacgtatatcc

SEQ ID NO: 1386078 - DNA, 25 bp, Homo sapien
tgagactcatccatagagttgtgtg

SEQ ID NO: 1386079 - DNA, 25 bp, Homo sapien
tttggctcttaccaatgaagctgct

SEQ ID NO: 1386080 - DNA, 25 bp, Homo sapien
tccagttgttccacgtctttcccaa

SEQ ID NO: 1386081 - DNA, 25 bp, Homo sapien
tagttgtacccacaagcaatgtgca

SEQ ID NO: 1386082 - DNA, 25 bp, Homo sapien
tccaatgtcatatcctcaaacgtac

SEQ ID NO: 1386083 - DNA, 25 bp, Homo sapien
tactgggcatcttgtaatctgtaaa

SEQ ID NO: 1386084 - DNA, 25 bp, Homo sapien
gaaagctggcagaatctactgggca

SEQ ID NO: 1386085 - DNA, 25 bp, Homo sapien
cacttttaagcaatagaaagctggc

SEQ ID NO: 1386086 - DNA, 25 bp, Homo sapien
tggatattccaaggagccatacaga

SEQ ID NO: 1386087 - DNA, 25 bp, Homo sapien
taagccttcctagataaatgtatgc

SEQ ID NO: 1386088 - DNA, 25 bp, Homo sapien
taccgggctcattgggagactaggc

SEQ ID NO: 1386089 - DNA, 25 bp, Homo sapien
caaggttagcctacgtgtactgggc

SEQ ID NO: 1386090 - DNA, 25 bp, Homo sapien
tctaaatctagtttagccagacaca

SEQ ID NO: 1386091 - DNA, 25 bp, Homo sapien
aatttacagtttcgtttcacagcag

SEQ ID NO: 1386092 - DNA, 25 bp, Homo sapien
tctcataaaacacgcctagaaaatt

SEQ ID NO: 1386093 - DNA, 25 bp, Homo sapien
tatgaaataccattgtgactaggca

SEQ ID NO: 1386094 - DNA, 25 bp, Homo sapien
tatactgaatgcaaataagagtgcc

SEQ ID NO: 1386095 - DNA, 25 bp, Homo sapien
taactgtagcagaatgatagctctg

SEQ ID NO: 1386096 - DNA, 25 bp, Homo sapien
aagaccagatcttgcagtgatttgc

SEQ ID NO: 1386097 - DNA, 25 bp, Homo sapien
tgtaattcatacacaagacagggat

SEQ ID NO: 1386098 - DNA, 25 bp, Homo sapien
tttcagttgtcccatgtcatgtcac

SEQ ID NO: 1386099 - DNA, 25 bp, Homo sapien
gaagaccaaccccaagatttctgag

SEQ ID NO: 1386100 - DNA, 25 bp, Homo sapien
catgcaactttgtgtcttgaagacc

SEQ ID NO: 1386101 - DNA, 25 bp, Homo sapien
tgtcactcttttgcaggactgcagc

SEQ ID NO: 1386102 - DNA, 25 bp, Homo sapien
aagattttgtctctctaaagtaatt

SEQ ID NO: 1386103 - DNA, 25 bp, Homo sapien
tgtctctctaaagtaatttagttct

SEQ ID NO: 1386104 - DNA, 25 bp, Homo sapien
ctgcaaagattttgtctctctaaag

SEQ ID NO: 1386105 - DNA, 25 bp, Homo sapien
gattttgtctctctaaagtaattta

SEQ ID NO: 1386106 - DNA, 25 bp, Homo sapien
aattaccattaccataagtcaagag

SEQ ID NO: 1386107 - DNA, 25 bp, Homo sapien
cataagcctaactcttgcaaaaatc

SEQ ID NO: 1386108 - DNA, 25 bp, Homo sapien
gtatctcttaaggatgtactcccag

SEQ ID NO: 1386109 - DNA, 25 bp, Homo sapien
gaatttgttactctacgaattgaaa

SEQ ID NO: 1386110 - DNA, 25 bp, Homo sapien
agctcagtgcaggatcaagtgctcc

SEQ ID NO: 1386111 - DNA, 25 bp, Homo sapien
gagtacactggtgagatcagagctc

SEQ ID NO: 1386112 - DNA, 25 bp, Homo sapien
caggaaaggataacaggtgggagcc

SEQ ID NO: 1386113 - DNA, 25 bp, Homo sapien
cacacctggctatgtgcatgaactt

SEQ ID NO: 1386114 - DNA, 25 bp, Homo sapien
catgacatacaccagatggctctcc

SEQ ID NO: 1386115 - DNA, 25 bp, Homo sapien
agctaggaaagcaaacccatttgct

SEQ ID NO: 1386116 - DNA, 25 bp, Homo sapien
caggagtgaactggggcccccgaag

SEQ ID NO: 1386117 - DNA, 25 bp, Homo sapien
ggtgacgtgggctcaaagatgcaac

SEQ ID NO: 1386118 - DNA, 25 bp, Homo sapien
cgaaggaggtgtccgggccgctcct

SEQ ID NO: 1386119 - DNA, 25 bp, Homo sapien
tccaagggggtgacgtgggctcaaa

SEQ ID NO: 1386120 - DNA, 25 bp, Homo sapien
acaggctgccaatgaagatgacgat

SEQ ID NO: 1386121 - DNA, 25 bp, Homo sapien
gtgccaccctccgtggccgccgcat

SEQ ID NO: 1386122 - DNA, 25 bp, Homo sapien
gcacaggctgccaatgaagatgacg

SEQ ID NO: 1386123 - DNA, 25 bp, Homo sapien
cgcagcccctgtgccaccctccgtg

SEQ ID NO: 1386124 - DNA, 25 bp, Homo sapien
tccttcttctctcccaccgcctcca

SEQ ID NO: 1386125 - DNA, 25 bp, Homo sapien
tcttctctcccaccgcctccacagg

SEQ ID NO: 1386126 - DNA, 25 bp, Homo sapien
ctccttcttctctcccaccgcctcc

SEQ ID NO: 1386127 - DNA, 25 bp, Homo sapien
cttcttctctcccaccgcctccaca

SEQ ID NO: 1386128 - DNA, 25 bp, Homo sapien
gccacaggggcctaggcaaggagcc

SEQ ID NO: 1386129 - DNA, 25 bp, Homo sapien
ggccacaggggcctaggcaaggagc

SEQ ID NO: 1386130 - DNA, 25 bp, Homo sapien
aggccacaggggcctaggcaaggag

SEQ ID NO: 1386131 - DNA, 25 bp, Homo sapien
accggggcaaaaagtcgcggcagca

SEQ ID NO: 1386132 - DNA, 25 bp, Homo sapien
aaagtcgcggtgacaaaaagcggcg

SEQ ID NO: 1386133 - DNA, 25 bp, Homo sapien
ggcaaagaatccctgagccaggaga

SEQ ID NO: 1386134 - DNA, 25 bp, Homo sapien
cggcgacagcggcaaaaagccgtgg

SEQ ID NO: 1386135 - DNA, 25 bp, Homo sapien
ggaaaactctagtctcttgagcaga

SEQ ID NO: 1386136 - DNA, 25 bp, Homo sapien
tttttgactcagagacgtggcaagc

SEQ ID NO: 1386137 - DNA, 25 bp, Homo sapien
cgtggcaagctagtgaatcaccatt

SEQ ID NO: 1386138 - DNA, 25 bp, Homo sapien
gcagattatgattgattcctaaaca

SEQ ID NO: 1386139 - DNA, 25 bp, Homo sapien
tccagtaacgtattccataaatatt

SEQ ID NO: 1386140 - DNA, 25 bp, Homo sapien
tattcctgtatgctcagctgcccaa

SEQ ID NO: 1386141 - DNA, 25 bp, Homo sapien
ttttattcctgtatgctcagctgcc

SEQ ID NO: 1386142 - DNA, 25 bp, Homo sapien
gctgcccaataacagtctgaggatt

SEQ ID NO: 1386143 - DNA, 25 bp, Homo sapien
tcctgtatgctcagctgcccaataa

SEQ ID NO: 1386144 - DNA, 25 bp, Homo sapien
catgtacgtgaatgaggcatgcgcc

SEQ ID NO: 1386145 - DNA, 25 bp, Homo sapien
tacgtgtgactttgtagactctccc

SEQ ID NO: 1386146 - DNA, 25 bp, Homo sapien
gtacgtgaatgaggcatgcgccacc

SEQ ID NO: 1386147 - DNA, 25 bp, Homo sapien
tatgaatacgtgtgactttgtagac

SEQ ID NO: 1386148 - DNA, 25 bp, Homo sapien
caatagatcctacttggcaagctca

SEQ ID NO: 1386149 - DNA, 25 bp, Homo sapien
aacgctaactacaaaccagggagtg

SEQ ID NO: 1386150 - DNA, 25 bp, Homo sapien
aaagaccagtagtgacttccaaagg

SEQ ID NO: 1386151 - DNA, 25 bp, Homo sapien
ggctatatttcatctcacatctgca

SEQ ID NO: 1386152 - DNA, 25 bp, Homo sapien
ggcggatccctgttagacatataca

SEQ ID NO: 1386153 - DNA, 25 bp, Homo sapien
cacttaacaaggactctgagttcca

SEQ ID NO: 1386154 - DNA, 25 bp, Homo sapien
tttccagtgaaagcctactagctag

SEQ ID NO: 1386155 - DNA, 25 bp, Homo sapien
tggtctctgagtatgcccacattcg

SEQ ID NO: 1386156 - DNA, 25 bp, Homo sapien
ctgtctcttgctggttggctctcct

SEQ ID NO: 1386157 - DNA, 25 bp, Homo sapien
tgtgaaataaaactgctctgtctct

SEQ ID NO: 1386158 - DNA, 25 bp, Homo sapien
tctcttgctggttggctctcctctt

SEQ ID NO: 1386159 - DNA, 25 bp, Homo sapien
tgaaataaaactgctctgtctcttg

SEQ ID NO: 1386160 - DNA, 25 bp, Homo sapien
atgaaggtttcagagaccgtggact

SEQ ID NO: 1386161 - DNA, 25 bp, Homo sapien
tggagttgctgtactggaagcagtc

SEQ ID NO: 1386162 - DNA, 25 bp, Homo sapien
tcaaagtcctcgacagtcacaatgt

SEQ ID NO: 1386163 - DNA, 25 bp, Homo sapien
gacttgacggactccatggagttgc

SEQ ID NO: 1386164 - DNA, 25 bp, Homo sapien
cagggaaactaagagtgtggctttg

SEQ ID NO: 1386165 - DNA, 25 bp, Homo sapien
tcccagacgggcagcagcaaaagtt

SEQ ID NO: 1386166 - DNA, 25 bp, Homo sapien
agtttcaacagggaaactaagagtg

SEQ ID NO: 1386167 - DNA, 25 bp, Homo sapien
tggctttgagcctcctaaggaagaa

SEQ ID NO: 1386168 - DNA, 25 bp, Homo sapien
tggataagcgagactgcagttgttg

SEQ ID NO: 1386169 - DNA, 25 bp, Homo sapien
tttagagtggataagcgagactgca

SEQ ID NO: 1386170 - DNA, 25 bp, Homo sapien
agcgagactgcagttgttggcatct

SEQ ID NO: 1386171 - DNA, 25 bp, Homo sapien
tagagtggataagcgagactgcagt

SEQ ID NO: 1386172 - DNA, 25 bp, Homo sapien
cagagttcccattactggcaatgaa

SEQ ID NO: 1386173 - DNA, 25 bp, Homo sapien
catattcaaggtataaggctcgtgg

SEQ ID NO: 1386174 - DNA, 25 bp, Homo sapien
ctggagaagagtgcctcaggcagct

SEQ ID NO: 1386175 - DNA, 25 bp, Homo sapien
cccaaagccaacttgtgtgagcctc

SEQ ID NO: 1386176 - DNA, 25 bp, Homo sapien
cactcatatgaaggctaggctagaa

SEQ ID NO: 1386177 - DNA, 25 bp, Homo sapien
tacacttcagctgcactccggagta

SEQ ID NO: 1386178 - DNA, 25 bp, Homo sapien
tagttcaacgacttccaggcagctc

SEQ ID NO: 1386179 - DNA, 25 bp, Homo sapien
caagctgtttggctcagaaggcaac

SEQ ID NO: 1386180 - DNA, 25 bp, Homo sapien
ttgcatggtagcctaagtcacaaca

SEQ ID NO: 1386181 - DNA, 25 bp, Homo sapien
gtagagcccggttcagacttgcatg

SEQ ID NO: 1386182 - DNA, 25 bp, Homo sapien
tgcttgtcactggtggcatccaggt

SEQ ID NO: 1386183 - DNA, 25 bp, Homo sapien
gaccctcatgcttcgactgttccag

SEQ ID NO: 1386184 - DNA, 25 bp, Homo sapien
tcacctgttggaattggaccagatc

SEQ ID NO: 1386185 - DNA, 25 bp, Homo sapien
aaatgtttcctatgcctctcacctg

SEQ ID NO: 1386186 - DNA, 25 bp, Homo sapien
tgaatactgacctaagtcaagtggg

SEQ ID NO: 1386187 - DNA, 25 bp, Homo sapien
tacatccctcagcattaggccttgc

SEQ ID NO: 1386188 - DNA, 25 bp, Homo sapien
caggcagattcggaagaggttctcc

SEQ ID NO: 1386189 - DNA, 25 bp, Homo sapien
tctccagagtcttgactatctatat

SEQ ID NO: 1386190 - DNA, 25 bp, Homo sapien
tagccaaccaggcagattcggaaga

SEQ ID NO: 1386191 - DNA, 25 bp, Homo sapien
tccagagtcttgactatctatatac

SEQ ID NO: 1386192 - DNA, 25 bp, Homo sapien
cccaataagtacaggaagcacatta

SEQ ID NO: 1386193 - DNA, 25 bp, Homo sapien
ttcagcgaagaagcaatatctggca

SEQ ID NO: 1386194 - DNA, 25 bp, Homo sapien
ggaaacagtcagaaaccgagccttc

SEQ ID NO: 1386195 - DNA, 25 bp, Homo sapien
tctggcaaggttgggtaaatgagat

SEQ ID NO: 1386196 - DNA, 25 bp, Homo sapien
gatatcttcacccagagactccaca

SEQ ID NO: 1386197 - DNA, 25 bp, Homo sapien
ggacaaagcaggctttccatggctt

SEQ ID NO: 1386198 - DNA, 25 bp, Homo sapien
taagaagttaatgacagcccatcca

SEQ ID NO: 1386199 - DNA, 25 bp, Homo sapien
cttgagttgatagctcattaaccct

SEQ ID NO: 1386200 - DNA, 25 bp, Homo sapien
aaacacttggttatacctgatggag

SEQ ID NO: 1386201 - DNA, 25 bp, Homo sapien
cccctgagatcagtatttcggtgaa

SEQ ID NO: 1386202 - DNA, 25 bp, Homo sapien
tagggaagttgccttgagtacaaaa

SEQ ID NO: 1386203 - DNA, 25 bp, Homo sapien
tgtggctgatacagcagtaacccct

SEQ ID NO: 1386204 - DNA, 25 bp, Homo sapien
ccaaatgcgagataaatagcagaaa

SEQ ID NO: 1386205 - DNA, 25 bp, Homo sapien
ttgtgcataagaaagaatggattct

SEQ ID NO: 1386206 - DNA, 25 bp, Homo sapien
aatttttaccaaatgcgagataaat

SEQ ID NO: 1386207 - DNA, 25 bp, Homo sapien
tgtgcataagaaagaatggattctc

SEQ ID NO: 1386208 - DNA, 25 bp, Homo sapien
caaatggcaggcctccgagatgaga

SEQ ID NO: 1386209 - DNA, 25 bp, Homo sapien
cagagactgggatgctaaattggct

SEQ ID NO: 1386210 - DNA, 25 bp, Homo sapien
tgagatacacttgaagccccagaga

SEQ ID NO: 1386211 - DNA, 25 bp, Homo sapien
ccaaatcccatatgatgttgtgagg

SEQ ID NO: 1386212 - DNA, 25 bp, Homo sapien
gattggagtctgtaggtgagagggc

SEQ ID NO: 1386213 - DNA, 25 bp, Homo sapien
gggccagattggagtctgtaggtga

SEQ ID NO: 1386214 - DNA, 25 bp, Homo sapien
ttggagtctgtaggtgagagggctt

SEQ ID NO: 1386215 - DNA, 25 bp, Homo sapien
ccagattggagtctgtaggtgagag

SEQ ID NO: 1386216 - DNA, 25 bp, Homo sapien
aaggccaagaataactcacaggcaa

SEQ ID NO: 1386217 - DNA, 25 bp, Homo sapien
acaaggccaagaataactcacaggc

SEQ ID NO: 1386218 - DNA, 25 bp, Homo sapien
gaaaaacaaggccaagaataactca

SEQ ID NO: 1386219 - DNA, 25 bp, Homo sapien
gcagcaggaaaaacaaggccaagaa

SEQ ID NO: 1386220 - DNA, 25 bp, Homo sapien
agatgcattggttgcctccaaagcc

SEQ ID NO: 1386221 - DNA, 25 bp, Homo sapien
acagatgcattggttgcctccaaag

SEQ ID NO: 1386222 - DNA, 25 bp, Homo sapien
ataaggtcagataggtcatggatgt

SEQ ID NO: 1386223 - DNA, 25 bp, Homo sapien
aaggtcagataggtcatggatgtag

SEQ ID NO: 1386224 - DNA, 25 bp, Homo sapien
cctcaatgcgaacgttggccgtgga

SEQ ID NO: 1386225 - DNA, 25 bp, Homo sapien
tccgcctcctttagtttgctctgag

SEQ ID NO: 1386226 - DNA, 25 bp, Homo sapien
gatgctgtcggcattgtacatgtga

SEQ ID NO: 1386227 - DNA, 25 bp, Homo sapien
tgccggtcctcctgctttaccgatt

SEQ ID NO: 1386228 - DNA, 25 bp, Homo sapien
taaaaaagaggtcaaagaatagcgc

SEQ ID NO: 1386229 - DNA, 25 bp, Homo sapien
gaatagcgctaccaagtcaacaaat

SEQ ID NO: 1386230 - DNA, 25 bp, Homo sapien
gagtaaaacgctactttgcctaaga

SEQ ID NO: 1386231 - DNA, 25 bp, Homo sapien
gtggttgcccaaatgactgaatgac

SEQ ID NO: 1386232 - DNA, 25 bp, Homo sapien
cactgtaggattttagcagcacccc

SEQ ID NO: 1386233 - DNA, 25 bp, Homo sapien
ctttctaatggcctacagactctgg

SEQ ID NO: 1386234 - DNA, 25 bp, Homo sapien
taattcaggagactctagtcactag

SEQ ID NO: 1386235 - DNA, 25 bp, Homo sapien
tagtcactagaccagcatttctcaa

SEQ ID NO: 1386236 - DNA, 25 bp, Homo sapien
tatgaagagacataggaccctgggt

SEQ ID NO: 1386237 - DNA, 25 bp, Homo sapien
cacacctaggcttctggatcagcaa

SEQ ID NO: 1386238 - DNA, 25 bp, Homo sapien
gctgtatgttgaccatggcctcaca

SEQ ID NO: 1386239 - DNA, 25 bp, Homo sapien
aatattgggctgtcttaagtctgca

SEQ ID NO: 1386240 - DNA, 25 bp, Homo sapien
agagccaagcaacccatctgattta

SEQ ID NO: 1386241 - DNA, 25 bp, Homo sapien
aagagccaagcaacccatctgattt

SEQ ID NO: 1386242 - DNA, 25 bp, Homo sapien
ggagctgctggccgacttctttact

SEQ ID NO: 1386243 - DNA, 25 bp, Homo sapien
tcaggaccttcatcaaatcatcttg

SEQ ID NO: 1386244 - DNA, 25 bp, Homo sapien
ttggagctgctggccgacttcttta

SEQ ID NO: 1386245 - DNA, 25 bp, Homo sapien
tggagctgctggccgacttctttac

SEQ ID NO: 1386246 - DNA, 25 bp, Homo sapien
gctaggtgatggtgggcactgtgtc

SEQ ID NO: 1386247 - DNA, 25 bp, Homo sapien
caaaataggtggtacagtgtgaggc

SEQ ID NO: 1386248 - DNA, 25 bp, Homo sapien
ggctaaaaggaatgactgtttggta

SEQ ID NO: 1386249 - DNA, 25 bp, Homo sapien
tctctcagctaacttgggccaccaa

SEQ ID NO: 1386250 - DNA, 25 bp, Homo sapien
tctaaggcccaatacctgtttcagg

SEQ ID NO: 1386251 - DNA, 25 bp, Homo sapien
gaccacatgcagtattaaaagagag

SEQ ID NO: 1386252 - DNA, 25 bp, Homo sapien
gttcaccaatgagccctaaaagttg

SEQ ID NO: 1386253 - DNA, 25 bp, Homo sapien
tcagaggttagccacaatgagctcc

SEQ ID NO: 1386254 - DNA, 25 bp, Homo sapien
ttcccaggcaggattgtagctgaat

SEQ ID NO: 1386255 - DNA, 25 bp, Homo sapien
ccagtttcagtaagaactaaatgac

SEQ ID NO: 1386256 - DNA, 25 bp, Homo sapien
ccaggcaggattgtagctgaattcc

SEQ ID NO: 1386257 - DNA, 25 bp, Homo sapien
gtaagaactaaatgactctgtaaga

SEQ ID NO: 1386258 - DNA, 25 bp, Homo sapien
agttgttcatttcccaggacgtggt

SEQ ID NO: 1386259 - DNA, 25 bp, Homo sapien
ttcccaggacgtggtaaccaaagca

SEQ ID NO: 1386260 - DNA, 25 bp, Homo sapien
tcatttcccaggacgtggtaaccaa

SEQ ID NO: 1386261 - DNA, 25 bp, Homo sapien
cccaggacgtggtaaccaaagcatt

SEQ ID NO: 1386262 - DNA, 25 bp, Homo sapien
tgaagagtcctcacacattccggtg

SEQ ID NO: 1386263 - DNA, 25 bp, Homo sapien
aagagtcctcacacattccggtgct

SEQ ID NO: 1386264 - DNA, 25 bp, Homo sapien
ctctgaagagtcctcacacattccg

SEQ ID NO: 1386265 - DNA, 25 bp, Homo sapien
tctgaagagtcctcacacattccgg

SEQ ID NO: 1386266 - DNA, 25 bp, Homo sapien
tttcagaaacccagtaagactccag

SEQ ID NO: 1386267 - DNA, 25 bp, Homo sapien
taccccggccctgagttgatttgtg

SEQ ID NO: 1386268 - DNA, 25 bp, Homo sapien
tattgtttcatgacccacaagggca

SEQ ID NO: 1386269 - DNA, 25 bp, Homo sapien
taatcagctcacatcagcagcggca

SEQ ID NO: 1386270 - DNA, 25 bp, Homo sapien
tccaaacatagcctaaatggctctt

SEQ ID NO: 1386271 - DNA, 25 bp, Homo sapien
ggcaaatctgtccatggcactctct

SEQ ID NO: 1386272 - DNA, 25 bp, Homo sapien
tctatagcacaaaatgtaaaccctg

SEQ ID NO: 1386273 - DNA, 25 bp, Homo sapien
ggccccgctcttgaatgaactactg

SEQ ID NO: 1386274 - DNA, 25 bp, Homo sapien
caataacattacaggggcttctgct

SEQ ID NO: 1386275 - DNA, 25 bp, Homo sapien
atcgcttgccactcccctacaaggg

SEQ ID NO: 1386276 - DNA, 25 bp, Homo sapien
aagggacctgtgtgcagccatcctc

SEQ ID NO: 1386277 - DNA, 25 bp, Homo sapien
tcacctattatacttccttgctttc

SEQ ID NO: 1386278 - DNA, 25 bp, Homo sapien
aataccacaggatgtgtacaggcag

SEQ ID NO: 1386279 - DNA, 25 bp, Homo sapien
gaaggcctgattttccaactaagag

SEQ ID NO: 1386280 - DNA, 25 bp, Homo sapien
tgctaaaacgagctgaatcaccagg

SEQ ID NO: 1386281 - DNA, 25 bp, Homo sapien
tacatcttgtgaggaatgcgcagcc

SEQ ID NO: 1386282 - DNA, 25 bp, Homo sapien
tgtccctgggccttactaataacta

SEQ ID NO: 1386283 - DNA, 25 bp, Homo sapien
ccaagggctgggcttaaaagcaaag

SEQ ID NO: 1386284 - DNA, 25 bp, Homo sapien
tcttgagaccatgaagagggatggt

SEQ ID NO: 1386285 - DNA, 25 bp, Homo sapien
caattgaaaaaaccctaagctgaag

SEQ ID NO: 1386286 - DNA, 25 bp, Homo sapien
tgatgagattaaataggttaataca

SEQ ID NO: 1386287 - DNA, 25 bp, Homo sapien
tattgctgtgattcttaataataac

SEQ ID NO: 1386288 - DNA, 25 bp, Homo sapien
aattgacaccttgtcagcttgcaca

SEQ ID NO: 1386289 - DNA, 25 bp, Homo sapien
tagcacagtccctaggcatggttag

SEQ ID NO: 1386290 - DNA, 25 bp, Homo sapien
catatgagggttctggccaacttcc

SEQ ID NO: 1386291 - DNA, 25 bp, Homo sapien
taatgtcataagaaactgccactat

SEQ ID NO: 1386292 - DNA, 25 bp, Homo sapien
taacttgcgtttccatcacgagtga

SEQ ID NO: 1386293 - DNA, 25 bp, Homo sapien
tcttgggtagatgcctataaatacc

SEQ ID NO: 1386294 - DNA, 25 bp, Homo sapien
tatttcattcccaacttccagctgc

SEQ ID NO: 1386295 - DNA, 25 bp, Homo sapien
tgcccctgaggagtgtaaacatgct

SEQ ID NO: 1386296 - DNA, 25 bp, Homo sapien
gaaaatgttggattctagagccagg

SEQ ID NO: 1386297 - DNA, 25 bp, Homo sapien
caggtgactggagttaaacgttagc

SEQ ID NO: 1386298 - DNA, 25 bp, Homo sapien
ccttcataaaacagcgatgatgaca

SEQ ID NO: 1386299 - DNA, 25 bp, Homo sapien
tctttaagccatagtttcttccttc

SEQ ID NO: 1386300 - DNA, 25 bp, Homo sapien
cataaaacagcgatgatgacaatag

SEQ ID NO: 1386301 - DNA, 25 bp, Homo sapien
taacacgatacctggcacatagagg

SEQ ID NO: 1386302 - DNA, 25 bp, Homo sapien
tatgcatagggcacttgaagagcca

SEQ ID NO: 1386303 - DNA, 25 bp, Homo sapien
taaggaagtcaaccctgagcccatg

SEQ ID NO: 1386304 - DNA, 25 bp, Homo sapien
taagagcagagctaggcccaagaga

SEQ ID NO: 1386305 - DNA, 25 bp, Homo sapien
tgatagcacaaagcaaatccccggg

SEQ ID NO: 1386306 - DNA, 25 bp, Homo sapien
gattttgtcacctggaaactgatga

SEQ ID NO: 1386307 - DNA, 25 bp, Homo sapien
caagaggctggttccatcgttgaca

SEQ ID NO: 1386308 - DNA, 25 bp, Homo sapien
cgctgtctgtaacccaacctcatga

SEQ ID NO: 1386309 - DNA, 25 bp, Homo sapien
gagaactggaaagctgatcaagagc

SEQ ID NO: 1386310 - DNA, 25 bp, Homo sapien
attgctccacccaagaacctctgtg

SEQ ID NO: 1386311 - DNA, 25 bp, Homo sapien
taaaaattgtgtcattgctccaccc

SEQ ID NO: 1386312 - DNA, 25 bp, Homo sapien
cctctgtgaagaaatatctctgtac

SEQ ID NO: 1386313 - DNA, 25 bp, Homo sapien
cacccaggtaatcaacataatatct

SEQ ID NO: 1386314 - DNA, 25 bp, Homo sapien
tcgctgacttgtacaaatcgaggaa

SEQ ID NO: 1386315 - DNA, 25 bp, Homo sapien
gtatggtccctgctttcccgcttca

SEQ ID NO: 1386316 - DNA, 25 bp, Homo sapien
tcttcctgagtcctcgctgacttgt

SEQ ID NO: 1386317 - DNA, 25 bp, Homo sapien
ttattcaggtagatgtcactcaggg

SEQ ID NO: 1386318 - DNA, 25 bp, Homo sapien
gtttaagaggagattccagcagttg

SEQ ID NO: 1386319 - DNA, 25 bp, Homo sapien
ttaagaggagattccagcagttgac

SEQ ID NO: 1386320 - DNA, 25 bp, Homo sapien
ctggtttaagaggagattccagcag

SEQ ID NO: 1386321 - DNA, 25 bp, Homo sapien
aagaggagattccagcagttgactg

SEQ ID NO: 1386322 - DNA, 25 bp, Homo sapien
ggccctagatgctcatttctaatga

SEQ ID NO: 1386323 - DNA, 25 bp, Homo sapien
gccctagatgctcatttctaatgaa

SEQ ID NO: 1386324 - DNA, 25 bp, Homo sapien
ccctagatgctcatttctaatgaaa

SEQ ID NO: 1386325 - DNA, 25 bp, Homo sapien
gatttctatggaaatcaaaaatata

SEQ ID NO: 1386326 - DNA, 25 bp, Homo sapien
atttctatggaaatcaaaaatatac

SEQ ID NO: 1386327 - DNA, 25 bp, Homo sapien
ttcccagccaacacgaacaaagatg

SEQ ID NO: 1386328 - DNA, 25 bp, Homo sapien
cacacaatatttctggtcctttgag

SEQ ID NO: 1386329 - DNA, 25 bp, Homo sapien
catattcttcctttcaactgaggtg

SEQ ID NO: 1386330 - DNA, 25 bp, Homo sapien
aaaaccagcactagatcctgttggc

SEQ ID NO: 1386331 - DNA, 25 bp, Homo sapien
gcctttaaaggaaagggtctgcatc

SEQ ID NO: 1386332 - DNA, 25 bp, Homo sapien
ccccagagccttaggttgtataata

SEQ ID NO: 1386333 - DNA, 25 bp, Homo sapien
aaaaagcagacaaaatacctaggag

SEQ ID NO: 1386334 - DNA, 25 bp, Homo sapien
cttaggttgtataatacttgggcct

SEQ ID NO: 1386335 - DNA, 25 bp, Homo sapien
aaggagacccggaaagtcacatgct

SEQ ID NO: 1386336 - DNA, 25 bp, Homo sapien
agagggaatgactctggagtcgaaa

SEQ ID NO: 1386337 - DNA, 25 bp, Homo sapien
gaatgactctggagtcgaaaggaga

SEQ ID NO: 1386338 - DNA, 25 bp, Homo sapien
tctggagtcgaaaggagacccggaa

SEQ ID NO: 1386339 - DNA, 25 bp, Homo sapien
taaaatggacacgtgccctattggt

SEQ ID NO: 1386340 - DNA, 25 bp, Homo sapien
tatggctgtaaaatcctagacgctc

SEQ ID NO: 1386341 - DNA, 25 bp, Homo sapien
ttagcttcgaagacattagcccagc

SEQ ID NO: 1386342 - DNA, 25 bp, Homo sapien
gagccaagtctataaaggtccaagt

SEQ ID NO: 1386343 - DNA, 25 bp, Homo sapien
aatggtttgagtaagacagcagcaa

SEQ ID NO: 1386344 - DNA, 25 bp, Homo sapien
taatggtttgagtaagacagcagca

SEQ ID NO: 1386345 - DNA, 25 bp, Homo sapien
gcaattaacaaagcagccgtaaggc

SEQ ID NO: 1386346 - DNA, 25 bp, Homo sapien
caattaacaaagcagccgtaaggct

SEQ ID NO: 1386347 - DNA, 25 bp, Homo sapien
cttcagcgttgccagcaatgagatc

SEQ ID NO: 1386348 - DNA, 25 bp, Homo sapien
tggcttcagcgttgccagcaatgag

SEQ ID NO: 1386349 - DNA, 25 bp, Homo sapien
ttctctgggcttatcacagctttgg

SEQ ID NO: 1386350 - DNA, 25 bp, Homo sapien
tctgggcttatcacagctttggctt

SEQ ID NO: 1386351 - DNA, 25 bp, Homo sapien
tttcctgctcctaaactgtgcatca

SEQ ID NO: 1386352 - DNA, 25 bp, Homo sapien
ggctttcctgctcctaaactgtgca

SEQ ID NO: 1386353 - DNA, 25 bp, Homo sapien
gctttcctgctcctaaactgtgcat

SEQ ID NO: 1386354 - DNA, 25 bp, Homo sapien
tcctggatccaagacatggctttcc

SEQ ID NO: 1386355 - DNA, 25 bp, Homo sapien
gcggagaagtttgatctacagccag

SEQ ID NO: 1386356 - DNA, 25 bp, Homo sapien
tctggcaccaggcatgagcggagaa

SEQ ID NO: 1386357 - DNA, 25 bp, Homo sapien
gtaaccacccccttaagagcaagca

SEQ ID NO: 1386358 - DNA, 25 bp, Homo sapien
tcctcctggctagcaaattgtactg

SEQ ID NO: 1386359 - DNA, 25 bp, Homo sapien
attaaaagaactagaaaagcaagag

SEQ ID NO: 1386360 - DNA, 25 bp, Homo sapien
aaaagctagcagaaggcaagaaata

SEQ ID NO: 1386361 - DNA, 25 bp, Homo sapien
tgaaggaaatagagacacaaaaaac

SEQ ID NO: 1386362 - DNA, 25 bp, Homo sapien
actaaaatcagagcagaactgaagg

SEQ ID NO: 1386363 - DNA, 25 bp, Homo sapien
atacctaatgctagatgacgagtta

SEQ ID NO: 1386364 - DNA, 25 bp, Homo sapien
acctaatgctagatgacgagttagt

SEQ ID NO: 1386365 - DNA, 25 bp, Homo sapien
ctaatgctagatgacgagttagtgg

SEQ ID NO: 1386366 - DNA, 25 bp, Homo sapien
tatcacactctggggactgtggtgg

SEQ ID NO: 1386367 - DNA, 25 bp, Homo sapien
gagtcagatgatccccactagtatc

SEQ ID NO: 1386368 - DNA, 25 bp, Homo sapien
aaagcagttttgaatcccaccccat

SEQ ID NO: 1386369 - DNA, 25 bp, Homo sapien
tccccaagcatgtgatctgaagcct

SEQ ID NO: 1386370 - DNA, 25 bp, Homo sapien
taagtgtgaggcttcaagaccccaa

SEQ ID NO: 1386371 - DNA, 25 bp, Homo sapien
gaaagcagttggcaaattcccagaa

SEQ ID NO: 1386372 - DNA, 25 bp, Homo sapien
ttagggtgactaggaatgccaaagc

SEQ ID NO: 1386373 - DNA, 25 bp, Homo sapien
caatgtctgttcacagtgggcaccc

SEQ ID NO: 1386374 - DNA, 25 bp, Homo sapien
taagtggtccaactacgatgattgt

SEQ ID NO: 1386375 - DNA, 25 bp, Homo sapien
tttgaacttaagctgtacacaagat

SEQ ID NO: 1386376 - DNA, 25 bp, Homo sapien
gcagcactgaccaggttatatgtgt

SEQ ID NO: 1386377 - DNA, 25 bp, Homo sapien
tacacaagattcagaacagctggaa

SEQ ID NO: 1386378 - DNA, 25 bp, Homo sapien
tggcacagcatctaggatactttgg

SEQ ID NO: 1386379 - DNA, 25 bp, Homo sapien
caactttctgtacactctaggactg

SEQ ID NO: 1386380 - DNA, 25 bp, Homo sapien
gcccagcctgggttagtaattctga

SEQ ID NO: 1386381 - DNA, 25 bp, Homo sapien
taaaagcaaccgaggctctctgaaa

SEQ ID NO: 1386382 - DNA, 25 bp, Homo sapien
tctaggactgagcaattaagtgaaa

SEQ ID NO: 1386383 - DNA, 25 bp, Homo sapien
tcagaaggcactaagggaagtgcac

SEQ ID NO: 1386384 - DNA, 25 bp, Homo sapien
agacaaagcccataacaataacccg

SEQ ID NO: 1386385 - DNA, 25 bp, Homo sapien
tctagcaaaaccaacactgagaaag

SEQ ID NO: 1386386 - DNA, 25 bp, Homo sapien
cctgagttgcgtccttcagaaggca

SEQ ID NO: 1386387 - DNA, 25 bp, Homo sapien
tccatggagctgaacgcctgaggta

SEQ ID NO: 1386388 - DNA, 25 bp, Homo sapien
tgacattccagtggcaaatcctagg

SEQ ID NO: 1386389 - DNA, 25 bp, Homo sapien
tgtcaaggaacgtgatcactactgt

SEQ ID NO: 1386390 - DNA, 25 bp, Homo sapien
gcacactagcactgttgtcaaggaa

SEQ ID NO: 1386391 - DNA, 25 bp, Homo sapien
ccatttatgcagaagcttgggagct

SEQ ID NO: 1386392 - DNA, 25 bp, Homo sapien
aaacaacccagtaaaccacatactg

SEQ ID NO: 1386393 - DNA, 25 bp, Homo sapien
taaaccacatactgttatgttcatg

SEQ ID NO: 1386394 - DNA, 25 bp, Homo sapien
ctcttatcattccctaccctaaaag

SEQ ID NO: 1386395 - DNA, 25 bp, Homo sapien
gaagacaaattcatggcattgctag

SEQ ID NO: 1386396 - DNA, 25 bp, Homo sapien
attgctagcccaacagctgctacag

SEQ ID NO: 1386397 - DNA, 25 bp, Homo sapien
gttgaatagtttccacgtccctgag

SEQ ID NO: 1386398 - DNA, 25 bp, Homo sapien
cgtccctgagatgggtctgttcaga

SEQ ID NO: 1386399 - DNA, 25 bp, Homo sapien
cccactgagatgttctgggcagaga

SEQ ID NO: 1386400 - DNA, 25 bp, Homo sapien
gtcctccaatcagaagaaatctctc

SEQ ID NO: 1386401 - DNA, 25 bp, Homo sapien
ttctttgtgcacctgtggcactctg

SEQ ID NO: 1386402 - DNA, 25 bp, Homo sapien
ctttgtgcacctgtggcactctgta

SEQ ID NO: 1386403 - DNA, 25 bp, Homo sapien
agtcctccaatcagaagaaatctct

SEQ ID NO: 1386404 - DNA, 25 bp, Homo sapien
tatactatttacatagctcttttcc

SEQ ID NO: 1386405 - DNA, 25 bp, Homo sapien
tccactgctcttgaaaatagctgtg

SEQ ID NO: 1386406 - DNA, 25 bp, Homo sapien
tcttactttgtgtgtagattactcc

SEQ ID NO: 1386407 - DNA, 25 bp, Homo sapien
tctgcttgctatcaaagggctatca

SEQ ID NO: 1386408 - DNA, 25 bp, Homo sapien
taagtcaccatgctccgcttaaaca

SEQ ID NO: 1386409 - DNA, 25 bp, Homo sapien
agtcaccatgctccgcttaaacagg

SEQ ID NO: 1386410 - DNA, 25 bp, Homo sapien
ccatgctccgcttaaacaggaattc

SEQ ID NO: 1386411 - DNA, 25 bp, Homo sapien
gtttatgttagttcctataggaatc

SEQ ID NO: 1386412 - DNA, 25 bp, Homo sapien
ttcatgacaactttccagactattc

SEQ ID NO: 1386413 - DNA, 25 bp, Homo sapien
agactattccagaacctttaaccat

SEQ ID NO: 1386414 - DNA, 25 bp, Homo sapien
cagactattccagaacctttaacca

SEQ ID NO: 1386415 - DNA, 25 bp, Homo sapien
ctgcttcatgacaactttccagact

SEQ ID NO: 1386416 - DNA, 25 bp, Homo sapien
cagctctactatttactaggggtgt

SEQ ID NO: 1386417 - DNA, 25 bp, Homo sapien
aaatatagaccctgcagcccaattc

SEQ ID NO: 1386418 - DNA, 25 bp, Homo sapien
aaaaatatagaccctgcagcccaat

SEQ ID NO: 1386419 - DNA, 25 bp, Homo sapien
ctactatttactaggggtgtgtgag

SEQ ID NO: 1386420 - DNA, 25 bp, Homo sapien
tgtaaagcccttagtagcatgcctg

SEQ ID NO: 1386421 - DNA, 25 bp, Homo sapien
gctttcaaccaatctgaagccaggg

SEQ ID NO: 1386422 - DNA, 25 bp, Homo sapien
tcagctggatctaagtggcataccc

SEQ ID NO: 1386423 - DNA, 25 bp, Homo sapien
gatagaccctgagttaagcccctta

SEQ ID NO: 1386424 - DNA, 25 bp, Homo sapien
gttgcacccgaagctcacactgctg

SEQ ID NO: 1386425 - DNA, 25 bp, Homo sapien
tgtcttggccaggaagcgttctgcc

SEQ ID NO: 1386426 - DNA, 25 bp, Homo sapien
ctggaggtcctgcaacagttgcacc

SEQ ID NO: 1386427 - DNA, 25 bp, Homo sapien
tccaggttgcgggagtagtccatct

SEQ ID NO: 1386428 - DNA, 25 bp, Homo sapien
cctaaataaaccaccatgcatgcca

SEQ ID NO: 1386429 - DNA, 25 bp, Homo sapien
agccctaaataaaccaccatgcatg

SEQ ID NO: 1386430 - DNA, 25 bp, Homo sapien
aagacagccctaaataaaccaccat

SEQ ID NO: 1386431 - DNA, 25 bp, Homo sapien
tcagaaagacagccctaaataaacc

SEQ ID NO: 1386432 - DNA, 25 bp, Homo sapien
cctgcagtaacctcacctgaactga

SEQ ID NO: 1386433 - DNA, 25 bp, Homo sapien
ggaggattgtttcaagcagacagaa

SEQ ID NO: 1386434 - DNA, 25 bp, Homo sapien
aactgagctccggaggattgtttca

SEQ ID NO: 1386435 - DNA, 25 bp, Homo sapien
tctctctccctgtcaaccaccaatg

SEQ ID NO: 1386436 - DNA, 25 bp, Homo sapien
cagcttagggggaagtgcttttctt

SEQ ID NO: 1386437 - DNA, 25 bp, Homo sapien
aatctgtccacaaccacactggatc

SEQ ID NO: 1386438 - DNA, 25 bp, Homo sapien
cagctagctctgtttcaatctgtcc

SEQ ID NO: 1386439 - DNA, 25 bp, Homo sapien
tctacaggacagcttagggggaagt

SEQ ID NO: 1386440 - DNA, 25 bp, Homo sapien
gatgagaatacttgggagctatgga

SEQ ID NO: 1386441 - DNA, 25 bp, Homo sapien
cacatctggtttacagttggatgag

SEQ ID NO: 1386442 - DNA, 25 bp, Homo sapien
cacgataccaactcaagaagacttt

SEQ ID NO: 1386443 - DNA, 25 bp, Homo sapien
catgcttcacgataccaactcaaga

SEQ ID NO: 1386444 - DNA, 25 bp, Homo sapien
ctttagagcccatgactctatagta

SEQ ID NO: 1386445 - DNA, 25 bp, Homo sapien
aacaccaatcattagcaataacacg

SEQ ID NO: 1386446 - DNA, 25 bp, Homo sapien
taacacgtactttagagcccatgac

SEQ ID NO: 1386447 - DNA, 25 bp, Homo sapien
tagcaataacacgtactttagagcc

SEQ ID NO: 1386448 - DNA, 25 bp, Homo sapien
ctggagccataagagacatccttgg

SEQ ID NO: 1386449 - DNA, 25 bp, Homo sapien
taagacagtaatcttggtgggagga

SEQ ID NO: 1386450 - DNA, 25 bp, Homo sapien
ccataagagacatccttgggttcaa

SEQ ID NO: 1386451 - DNA, 25 bp, Homo sapien
atccttgggttcaaaggtaagacag

SEQ ID NO: 1386452 - DNA, 25 bp, Homo sapien
tggctgaaacagtctgcccagttcc

SEQ ID NO: 1386453 - DNA, 25 bp, Homo sapien
aacagtctgcccagttcctattgca

SEQ ID NO: 1386454 - DNA, 25 bp, Homo sapien
ccagttcctattgcaatggctgttc

SEQ ID NO: 1386455 - DNA, 25 bp, Homo sapien
tgttcctgggccttcatatgttgtt

SEQ ID NO: 1386456 - DNA, 25 bp, Homo sapien
cgtgcccgacttatatacatttctg

SEQ ID NO: 1386457 - DNA, 25 bp, Homo sapien
caccgtgcccgacttatatacattt

SEQ ID NO: 1386458 - DNA, 25 bp, Homo sapien
cataaaatctatcccataggttctt

SEQ ID NO: 1386459 - DNA, 25 bp, Homo sapien
atctatcccataggttctttgatcc

SEQ ID NO: 1386460 - DNA, 25 bp, Homo sapien
cagaggagctagacgtaaaggattg

SEQ ID NO: 1386461 - DNA, 25 bp, Homo sapien
gagctagacgtaaaggattggaatt

SEQ ID NO: 1386462 - DNA, 25 bp, Homo sapien
tcagcaagaggctcgcagaggagct

SEQ ID NO: 1386463 - DNA, 25 bp, Homo sapien
ggctcgcagaggagctagacgtaaa

SEQ ID NO: 1386464 - DNA, 25 bp, Homo sapien
tactcagctgctgtgcaattaacaa

SEQ ID NO: 1386465 - DNA, 25 bp, Homo sapien
caaattcagaatccgcagcttgctt

SEQ ID NO: 1386466 - DNA, 25 bp, Homo sapien
aacagcttggatatccaatcctgga

SEQ ID NO: 1386467 - DNA, 25 bp, Homo sapien
tggaacttcaacaggactaggcagc

SEQ ID NO: 1386468 - DNA, 25 bp, Homo sapien
gagctgcctgctgtatttctgtact

SEQ ID NO: 1386469 - DNA, 25 bp, Homo sapien
accactcttgttgggagatgaatgc

SEQ ID NO: 1386470 - DNA, 25 bp, Homo sapien
tcagggcttcaaaacaaagccaaag

SEQ ID NO: 1386471 - DNA, 25 bp, Homo sapien
caaatgttctccagtgatgcagagc

SEQ ID NO: 1386472 - DNA, 25 bp, Homo sapien
tccaacagaaacatctgttccttcc

SEQ ID NO: 1386473 - DNA, 25 bp, Homo sapien
gagagagccttctaatgataattca

SEQ ID NO: 1386474 - DNA, 25 bp, Homo sapien
tgttacctgggcctgggctcatagg

SEQ ID NO: 1386475 - DNA, 25 bp, Homo sapien
ataggaagcacacgccacagcgagg

SEQ ID NO: 1386476 - DNA, 25 bp, Homo sapien
atctgtgtatatgccccttcccttt

SEQ ID NO: 1386477 - DNA, 25 bp, Homo sapien
aatactaactgtgtaaacaagcatc

SEQ ID NO: 1386478 - DNA, 25 bp, Homo sapien
tcaagaaatactaactgtgtaaaca

SEQ ID NO: 1386479 - DNA, 25 bp, Homo sapien
aagcatctgtgtatatgccccttcc

SEQ ID NO: 1386480 - DNA, 25 bp, Homo sapien
agcatcgctagtgctctgaaagccc

SEQ ID NO: 1386481 - DNA, 25 bp, Homo sapien
taagggtgaccatgatacggattac

SEQ ID NO: 1386482 - DNA, 25 bp, Homo sapien
tactatcaccatagattggtcctgc

SEQ ID NO: 1386483 - DNA, 25 bp, Homo sapien
tataggatgcactcttgtttcatgc

SEQ ID NO: 1386484 - DNA, 25 bp, Homo sapien
agagcactgaactgtcccatactgg

SEQ ID NO: 1386485 - DNA, 25 bp, Homo sapien
catcaccaaggcaagaaaagagagc

SEQ ID NO: 1386486 - DNA, 25 bp, Homo sapien
caagagctcagattgacagaggttc

SEQ ID NO: 1386487 - DNA, 25 bp, Homo sapien
caaaatttcagtggcttaacctcac

SEQ ID NO: 1386488 - DNA, 25 bp, Homo sapien
caaagtaatacatgcgaacaaaagc

SEQ ID NO: 1386489 - DNA, 25 bp, Homo sapien
caaagaaggcctgcacatcattctg

SEQ ID NO: 1386490 - DNA, 25 bp, Homo sapien
tggtggcagcatttaggcccactaa

SEQ ID NO: 1386491 - DNA, 25 bp, Homo sapien
caaaagcaatcaactggtggcagca

SEQ ID NO: 1386492 - DNA, 25 bp, Homo sapien
tttctctagagcacatctcttggta

SEQ ID NO: 1386493 - DNA, 25 bp, Homo sapien
gaactttctctagagcacatctctt

SEQ ID NO: 1386494 - DNA, 25 bp, Homo sapien
tctctagagcacatctcttggtatt

SEQ ID NO: 1386495 - DNA, 25 bp, Homo sapien
actttctctagagcacatctcttgg

SEQ ID NO: 1386496 - DNA, 25 bp, Homo sapien
tagaagaccctctgttaataatatt

SEQ ID NO: 1386497 - DNA, 25 bp, Homo sapien
cctattgagggccaactttatttct

SEQ ID NO: 1386498 - DNA, 25 bp, Homo sapien
tattaatagtatcagctaccaccta

SEQ ID NO: 1386499 - DNA, 25 bp, Homo sapien
gctccaaaactatcatgagattctt

SEQ ID NO: 1386500 - DNA, 25 bp, Homo sapien
ctggcaggcagccactcaccacttt

SEQ ID NO: 1386501 - DNA, 25 bp, Homo sapien
ggaaaggagacataacatgaaggct

SEQ ID NO: 1386502 - DNA, 25 bp, Homo sapien
gatcagctctggtaaaaaggttagg

SEQ ID NO: 1386503 - DNA, 25 bp, Homo sapien
aaatgcaacttagggattctccatg

SEQ ID NO: 1386504 - DNA, 25 bp, Homo sapien
tcaacattcattaaggccaaagaga

SEQ ID NO: 1386505 - DNA, 25 bp, Homo sapien
ttcctgtcaaggatctgcctatatc

SEQ ID NO: 1386506 - DNA, 25 bp, Homo sapien
tcaacatgggaatcaagaaccaacc

SEQ ID NO: 1386507 - DNA, 25 bp, Homo sapien
gaaccaaccattcaaatgggccctg

SEQ ID NO: 1386508 - DNA, 25 bp, Homo sapien
aaccattcaaatgggccctgctgcc

SEQ ID NO: 1386509 - DNA, 25 bp, Homo sapien
cgtcaaaaggccatgggagtcaact

SEQ ID NO: 1386510 - DNA, 25 bp, Homo sapien
taatccgggtgttgagtacatggag

SEQ ID NO: 1386511 - DNA, 25 bp, Homo sapien
agtccaacaggatcacgtcaaaagg

SEQ ID NO: 1386512 - DNA, 25 bp, Homo sapien
tatgagctcattacgatattcagga

SEQ ID NO: 1386513 - DNA, 25 bp, Homo sapien
caagacagaatgtgagctaagcagc

SEQ ID NO: 1386514 - DNA, 25 bp, Homo sapien
aggggtaatattagtcctgatgggc

SEQ ID NO: 1386515 - DNA, 25 bp, Homo sapien
ggcttctgcctacaagagagactag

SEQ ID NO: 1386516 - DNA, 25 bp, Homo sapien
gctaagcagcttagggtttaggcaa

SEQ ID NO: 1386517 - DNA, 25 bp, Homo sapien
taaaggaaacaccatgagcccagtg

SEQ ID NO: 1386518 - DNA, 25 bp, Homo sapien
gagaggccggatgcagttaccaaac

SEQ ID NO: 1386519 - DNA, 25 bp, Homo sapien
tatttggagaccgagacctagacag

SEQ ID NO: 1386520 - DNA, 25 bp, Homo sapien
tatagtgcgacttgtagagccccag

SEQ ID NO: 1386521 - DNA, 25 bp, Homo sapien
tcacaatgtgtcagatgaagggcaa

SEQ ID NO: 1386522 - DNA, 25 bp, Homo sapien
caagttctctgggattgcatcagta

SEQ ID NO: 1386523 - DNA, 25 bp, Homo sapien
gacattcgaagtgacaattccaggc

SEQ ID NO: 1386524 - DNA, 25 bp, Homo sapien
gaaaatatccggtgaccttcagcct

SEQ ID NO: 1386525 - DNA, 25 bp, Homo sapien
tggaggtaataccacaatttcaggc

SEQ ID NO: 1386526 - DNA, 25 bp, Homo sapien
aagttcgcttggaggtaataccaca

SEQ ID NO: 1386527 - DNA, 25 bp, Homo sapien
attaaatggtttatatacagacccg

SEQ ID NO: 1386528 - DNA, 25 bp, Homo sapien
tacagacccgatccctttcataaag

SEQ ID NO: 1386529 - DNA, 25 bp, Homo sapien
aataaaatgctagctagatgatgac

SEQ ID NO: 1386530 - DNA, 25 bp, Homo sapien
gaattaactgaccaattactagtcc

SEQ ID NO: 1386531 - DNA, 25 bp, Homo sapien
tactagtccaattgccccagataag

SEQ ID NO: 1386532 - DNA, 25 bp, Homo sapien
agactctctgttttaactgactttt

SEQ ID NO: 1386533 - DNA, 25 bp, Homo sapien
gatggttctccaaactatcaacaag

SEQ ID NO: 1386534 - DNA, 25 bp, Homo sapien
taacattagtcaagacacaggttgc

SEQ ID NO: 1386535 - DNA, 25 bp, Homo sapien
gctgatggaattaccctgctaggga

SEQ ID NO: 1386536 - DNA, 25 bp, Homo sapien
gaaataaagttcctgtcgtccacac

SEQ ID NO: 1386537 - DNA, 25 bp, Homo sapien
gggacagatattgagacagccctca

SEQ ID NO: 1386538 - DNA, 25 bp, Homo sapien
tactggacaagcactggaaaagaga

SEQ ID NO: 1386539 - DNA, 25 bp, Homo sapien
gcctgaggcagagttaactacacag

SEQ ID NO: 1386540 - DNA, 25 bp, Homo sapien
cagatttccttgaggttactggaca

SEQ ID NO: 1386541 - DNA, 25 bp, Homo sapien
caaattgtgtaagggcaacctgaac

SEQ ID NO: 1386542 - DNA, 25 bp, Homo sapien
tcaagtatggcccagaaagcaacag

SEQ ID NO: 1386543 - DNA, 25 bp, Homo sapien
gggttcactgtaacacggcacgtca

SEQ ID NO: 1386544 - DNA, 25 bp, Homo sapien
gaaggtgcgtgttcatctatctcgc

SEQ ID NO: 1386545 - DNA, 25 bp, Homo sapien
tataaatggctttagcctgatcccc

SEQ ID NO: 1386546 - DNA, 25 bp, Homo sapien
tgagaatagaatacattaagttcaa

SEQ ID NO: 1386547 - DNA, 25 bp, Homo sapien
tattcaaattaaggagatcaaccac

SEQ ID NO: 1386548 - DNA, 25 bp, Homo sapien
gcaccagcaccacctagtcatgttt

SEQ ID NO: 1386549 - DNA, 25 bp, Homo sapien
tagcgggacacccaatatcgtgaac

SEQ ID NO: 1386550 - DNA, 25 bp, Homo sapien
aacccaagatgagagacgaaaccct

SEQ ID NO: 1386551 - DNA, 25 bp, Homo sapien
tgatcacagacaataaggactaggc

SEQ ID NO: 1386552 - DNA, 25 bp, Homo sapien
tccactgagggaagacacactgcct

SEQ ID NO: 1386553 - DNA, 25 bp, Homo sapien
ggaacatctacacatcaattattag

SEQ ID NO: 1386554 - DNA, 25 bp, Homo sapien
tgataaactaaatctgggagcaggt

SEQ ID NO: 1386555 - DNA, 25 bp, Homo sapien
taatcgtcaacaatgagtaaacaga

SEQ ID NO: 1386556 - DNA, 25 bp, Homo sapien
gggagcaggtattgcaacctataat

SEQ ID NO: 1386557 - DNA, 25 bp, Homo sapien
aattggcccagcgtggtggcacgca

SEQ ID NO: 1386558 - DNA, 25 bp, Homo sapien
cggtggctcacacctgtaatcccag

SEQ ID NO: 1386559 - DNA, 25 bp, Homo sapien
aaaaattggcccagcgtggtggcac

SEQ ID NO: 1386560 - DNA, 25 bp, Homo sapien
ttaagaactactctgaggccgggca

SEQ ID NO: 1386561 - DNA, 25 bp, Homo sapien
catgtatcttccctagtaagatgca

SEQ ID NO: 1386562 - DNA, 25 bp, Homo sapien
tattatgccagtttcttgataagga

SEQ ID NO: 1386563 - DNA, 25 bp, Homo sapien
caccctgggatgtaggcagaacata

SEQ ID NO: 1386564 - DNA, 25 bp, Homo sapien
tcagtccaaagggagagaaatatac

SEQ ID NO: 1386565 - DNA, 25 bp, Homo sapien
cattggttgaatatggtacaataca

SEQ ID NO: 1386566 - DNA, 25 bp, Homo sapien
gaatgcactcttttgagattcaccc

SEQ ID NO: 1386567 - DNA, 25 bp, Homo sapien
gtttgatgacatgtctactactcca

SEQ ID NO: 1386568 - DNA, 25 bp, Homo sapien
tactactccagaaggtcctcttgtg

SEQ ID NO: 1386569 - DNA, 25 bp, Homo sapien
gggtttctgcaccgcaccctagtcg

SEQ ID NO: 1386570 - DNA, 25 bp, Homo sapien
ttctgcaccgcaccctagtcgggat

SEQ ID NO: 1386571 - DNA, 25 bp, Homo sapien
tgcaccgcaccctagtcgggatggc

SEQ ID NO: 1386572 - DNA, 25 bp, Homo sapien
ccgcaccctagtcgggatggcagag

SEQ ID NO: 1386573 - DNA, 25 bp, Homo sapien
caacggctgacgcttgttccttctc

SEQ ID NO: 1386574 - DNA, 25 bp, Homo sapien
tgataaacaggctcacaacggctga

SEQ ID NO: 1386575 - DNA, 25 bp, Homo sapien
ggaaaagctatgcagccttcgcgct

SEQ ID NO: 1386576 - DNA, 25 bp, Homo sapien
ttctccagcgaggacaacgacatgc

SEQ ID NO: 1386577 - DNA, 25 bp, Homo sapien
ggggaaacggcaggggtcagcacat

SEQ ID NO: 1386578 - DNA, 25 bp, Homo sapien
tgcaatggataagcctctccctggg

SEQ ID NO: 1386579 - DNA, 25 bp, Homo sapien
agaggacagcgcgaacgcagtcccc

SEQ ID NO: 1386580 - DNA, 25 bp, Homo sapien
cggagtgcaatggataagcctctcc

SEQ ID NO: 1386581 - DNA, 25 bp, Homo sapien
ccgcttgacattggaagtcgttcga

SEQ ID NO: 1386582 - DNA, 25 bp, Homo sapien
tctctagaccttggcgcttacctca

SEQ ID NO: 1386583 - DNA, 25 bp, Homo sapien
gacacgcagacatggtgccggagtt

SEQ ID NO: 1386584 - DNA, 25 bp, Homo sapien
taatgcgcaaactagaaagttcagg

SEQ ID NO: 1386585 - DNA, 25 bp, Homo sapien
ctcaagtagcaggaattgtaggcat

SEQ ID NO: 1386586 - DNA, 25 bp, Homo sapien
gagaagttctgtgtctgatgccacc

SEQ ID NO: 1386587 - DNA, 25 bp, Homo sapien
gatggcttgacctgatgaaatcaga

SEQ ID NO: 1386588 - DNA, 25 bp, Homo sapien
gaccaggaattttgatgatggccaa

SEQ ID NO: 1386589 - DNA, 25 bp, Homo sapien
aaatgattgtccttgctctccggaa

SEQ ID NO: 1386590 - DNA, 25 bp, Homo sapien
tttcagatgaccaaggcctgcgatg

SEQ ID NO: 1386591 - DNA, 25 bp, Homo sapien
actgtttctaaccaccaggtggcca

SEQ ID NO: 1386592 - DNA, 25 bp, Homo sapien
cacagtgtggtgcttatgaagtcac

SEQ ID NO: 1386593 - DNA, 25 bp, Homo sapien
tcctacagataacaccggagttgtg

SEQ ID NO: 1386594 - DNA, 25 bp, Homo sapien
ttgcctgactgtgacccaaaccttc

SEQ ID NO: 1386595 - DNA, 25 bp, Homo sapien
gcctgactgtgacccaaaccttctg

SEQ ID NO: 1386596 - DNA, 25 bp, Homo sapien
cagaacttcctgctgaggaatagag

SEQ ID NO: 1386597 - DNA, 25 bp, Homo sapien
aacttcctgctgaggaatagaggca

SEQ ID NO: 1386598 - DNA, 25 bp, Homo sapien
tgaaaaggacactcaagcaaactcc

SEQ ID NO: 1386599 - DNA, 25 bp, Homo sapien
ccccttatagactaagacagactgt

SEQ ID NO: 1386600 - DNA, 25 bp, Homo sapien
cctctgttctagaaagggagagctg

SEQ ID NO: 1386601 - DNA, 25 bp, Homo sapien
gagtcagtactcgaaggcttcagag

SEQ ID NO: 1386602 - DNA, 25 bp, Homo sapien
tgggctctaaccaccaacctctaga

SEQ ID NO: 1386603 - DNA, 25 bp, Homo sapien
gcatccctcagtgggctctaaccac

SEQ ID NO: 1386604 - DNA, 25 bp, Homo sapien
taaccaccaacctctagattaacag

SEQ ID NO: 1386605 - DNA, 25 bp, Homo sapien
aacctctagattaacagccgaacgc

SEQ ID NO: 1386606 - DNA, 25 bp, Homo sapien
tcatcaaaagctgccggaaacgccc

SEQ ID NO: 1386607 - DNA, 25 bp, Homo sapien
tggtgaatcgtgttagtctcattgg

SEQ ID NO: 1386608 - DNA, 25 bp, Homo sapien
agattctggaaccaggacgaccttg

SEQ ID NO: 1386609 - DNA, 25 bp, Homo sapien
cagacagtacaactgtgcaaggctt

SEQ ID NO: 1386610 - DNA, 25 bp, Homo sapien
gttgaattaatccatcctcgccttt

SEQ ID NO: 1386611 - DNA, 25 bp, Homo sapien
ttgttgaattaatccatcctcgcct

SEQ ID NO: 1386612 - DNA, 25 bp, Homo sapien
tctgcccagtcacttttgaggccgc

SEQ ID NO: 1386613 - DNA, 25 bp, Homo sapien
tttgaggccgctgaggaacttccgc

SEQ ID NO: 1386614 - DNA, 25 bp, Homo sapien
tctgagcaaattgaataaacgcccc

SEQ ID NO: 1386615 - DNA, 25 bp, Homo sapien
ctgtgcctcgtgggatctgagcaaa

SEQ ID NO: 1386616 - DNA, 25 bp, Homo sapien
gatctgagcaaattgaataaacgcc

SEQ ID NO: 1386617 - DNA, 25 bp, Homo sapien
ggatctgagcaaattgaataaacgc

SEQ ID NO: 1386618 - DNA, 25 bp, Homo sapien
tatttctaggtcagtggtgaggcac

SEQ ID NO: 1386619 - DNA, 25 bp, Homo sapien
tcgttctgacatgttttgccctgga

SEQ ID NO: 1386620 - DNA, 25 bp, Homo sapien
ggcaggacagggcaactcgttctga

SEQ ID NO: 1386621 - DNA, 25 bp, Homo sapien
ctggaaggccttgagcactgcggtc

SEQ ID NO: 1386622 - DNA, 25 bp, Homo sapien
tcccatacaaagagcaaggatgtta

SEQ ID NO: 1386623 - DNA, 25 bp, Homo sapien
catcggcaccagttccaagtacaat

SEQ ID NO: 1386624 - DNA, 25 bp, Homo sapien
gcaggacttgatgccctggcgcagg

SEQ ID NO: 1386625 - DNA, 25 bp, Homo sapien
tgtctacaacccatcggcaccagtt

SEQ ID NO: 1386626 - DNA, 25 bp, Homo sapien
gatgagcctcaaccttaggatgaac

SEQ ID NO: 1386627 - DNA, 25 bp, Homo sapien
taggggagataacagagaacagcac

SEQ ID NO: 1386628 - DNA, 25 bp, Homo sapien
caaccttaggatgaaccactattgg

SEQ ID NO: 1386629 - DNA, 25 bp, Homo sapien
tgaaccactattggtgaccatagga

SEQ ID NO: 1386630 - DNA, 25 bp, Homo sapien
ccacagctccatacgcctcaccttt

SEQ ID NO: 1386631 - DNA, 25 bp, Homo sapien
cccaccacagctccatacgcctcac

SEQ ID NO: 1386632 - DNA, 25 bp, Homo sapien
cacagctccatacgcctcaccttta

SEQ ID NO: 1386633 - DNA, 25 bp, Homo sapien
caccacagctccatacgcctcacct

SEQ ID NO: 1386634 - DNA, 25 bp, Homo sapien
tcctcagtgggagaagcgacatctt

SEQ ID NO: 1386635 - DNA, 25 bp, Homo sapien
aaaaagtagcccttagagtacagcg

SEQ ID NO: 1386636 - DNA, 25 bp, Homo sapien
tgtttgtgttaaggctgacgctccc

SEQ ID NO: 1386637 - DNA, 25 bp, Homo sapien
gctgtacggccttcgcgctagtttg

SEQ ID NO: 1386638 - DNA, 25 bp, Homo sapien
ggaaagcgcgaacgcagtaccacta

SEQ ID NO: 1386639 - DNA, 25 bp, Homo sapien
gttatctcccctgccaagtaaatat

SEQ ID NO: 1386640 - DNA, 25 bp, Homo sapien
catgttatctcccctgccaagtaaa

SEQ ID NO: 1386641 - DNA, 25 bp, Homo sapien
gggaaagcgcgaacgcagtaccact

SEQ ID NO: 1386642 - DNA, 25 bp, Homo sapien
cacctggccaggagtttattaagta

SEQ ID NO: 1386643 - DNA, 25 bp, Homo sapien
ctcccgcctctgcgtctctgagagc

SEQ ID NO: 1386644 - DNA, 25 bp, Homo sapien
acacctggccaggagtttattaagt

SEQ ID NO: 1386645 - DNA, 25 bp, Homo sapien
ccgcctctgcgtctctgagagctgg

SEQ ID NO: 1386646 - DNA, 25 bp, Homo sapien
tgagtactagccttccacaatcttc

SEQ ID NO: 1386647 - DNA, 25 bp, Homo sapien
gctctagtggctgcacttagctgat

SEQ ID NO: 1386648 - DNA, 25 bp, Homo sapien
gtagcctgcctaaacctataccaag

SEQ ID NO: 1386649 - DNA, 25 bp, Homo sapien
cacgatgcattatgactctcaggat

SEQ ID NO: 1386650 - DNA, 25 bp, Homo sapien
cctggctcatagttcactattgaaa

SEQ ID NO: 1386651 - DNA, 25 bp, Homo sapien
ccaccctggctcatagttcactatt

SEQ ID NO: 1386652 - DNA, 25 bp, Homo sapien
agccaccaccctggctcatagttca

SEQ ID NO: 1386653 - DNA, 25 bp, Homo sapien
ggctcatagttcactattgaaacaa

SEQ ID NO: 1386654 - DNA, 25 bp, Homo sapien
gaccggagagtcgcagctgtgtgtt

SEQ ID NO: 1386655 - DNA, 25 bp, Homo sapien
accggagagtcgcagctgtgtgtta

SEQ ID NO: 1386656 - DNA, 25 bp, Homo sapien
tgtgtgttagggctaggatggctcc

SEQ ID NO: 1386657 - DNA, 25 bp, Homo sapien
cttgcgtgtaaagggtgaggaatat

SEQ ID NO: 1386658 - DNA, 25 bp, Homo sapien
cgtgtaaagggtgaggaatatgagg

SEQ ID NO: 1386659 - DNA, 25 bp, Homo sapien
tgcgtgtaaagggtgaggaatatga

SEQ ID NO: 1386660 - DNA, 25 bp, Homo sapien
gcgtgtaaagggtgaggaatatgag

SEQ ID NO: 1386661 - DNA, 25 bp, Homo sapien
gaacttaaaccagattggatgtgac

SEQ ID NO: 1386662 - DNA, 25 bp, Homo sapien
gctggaatcctgcaacttctaacct

SEQ ID NO: 1386663 - DNA, 25 bp, Homo sapien
tagatcaagaagcaaaacacccacc

SEQ ID NO: 1386664 - DNA, 25 bp, Homo sapien
tggatgtgacaaaaccctgctggaa

SEQ ID NO: 1386665 - DNA, 25 bp, Homo sapien
tcatttctgcaactgtcactggccc

SEQ ID NO: 1386666 - DNA, 25 bp, Homo sapien
gatggaagacgagaattctcaagaa

SEQ ID NO: 1386667 - DNA, 25 bp, Homo sapien
tatgatagcgaggatgatggaagac

SEQ ID NO: 1386668 - DNA, 25 bp, Homo sapien
tcactggccctagctggtatttgta

SEQ ID NO: 1386669 - DNA, 25 bp, Homo sapien
cagtgaggacaccacgggttctggt

SEQ ID NO: 1386670 - DNA, 25 bp, Homo sapien
cgggttctggtccttcccacgcgcg

SEQ ID NO: 1386671 - DNA, 25 bp, Homo sapien
gtgaggacaccacgggttctggtcc

SEQ ID NO: 1386672 - DNA, 25 bp, Homo sapien
cacgggttctggtccttcccacgcg

SEQ ID NO: 1386673 - DNA, 25 bp, Homo sapien
tgggaaagagagtgactttcgcctg

SEQ ID NO: 1386674 - DNA, 25 bp, Homo sapien
gaaagagagtgactttcgcctgaga

SEQ ID NO: 1386675 - DNA, 25 bp, Homo sapien
tcgcctgagaagctgcagttgtcgc

SEQ ID NO: 1386676 - DNA, 25 bp, Homo sapien
agagagtgactttcgcctgagaagc

SEQ ID NO: 1386677 - DNA, 25 bp, Homo sapien
tccaaagtgcccaaagactcgactc

SEQ ID NO: 1386678 - DNA, 25 bp, Homo sapien
gtagaacgtccaaagtgcccaaaga

SEQ ID NO: 1386679 - DNA, 25 bp, Homo sapien
tttggccgttggagtcccccagctg

SEQ ID NO: 1386680 - DNA, 25 bp, Homo sapien
gtgcccaaagactcgactcttggct

SEQ ID NO: 1386681 - DNA, 25 bp, Homo sapien
tgcacctatttcatcacctcctgaa

SEQ ID NO: 1386682 - DNA, 25 bp, Homo sapien
gaagctgggtttttacaattgcaca

SEQ ID NO: 1386683 - DNA, 25 bp, Homo sapien
cctgaagctgggtttttacaattgc

SEQ ID NO: 1386684 - DNA, 25 bp, Homo sapien
tttcatcacctcctgaagctgggtt

SEQ ID NO: 1386685 - DNA, 25 bp, Homo sapien
taaaaatatcgagattcccaaagga

SEQ ID NO: 1386686 - DNA, 25 bp, Homo sapien
tctagataaaaatatcgagattccc

SEQ ID NO: 1386687 - DNA, 25 bp, Homo sapien
gactgttgattctttaccaattatg

SEQ ID NO: 1386688 - DNA, 25 bp, Homo sapien
ttagtcttgcaaccatttctctcac

SEQ ID NO: 1386689 - DNA, 25 bp, Homo sapien
tgagccaatatactcaggtttgact

SEQ ID NO: 1386690 - DNA, 25 bp, Homo sapien
tactcaggtttgactataggtttgt

SEQ ID NO: 1386691 - DNA, 25 bp, Homo sapien
ttcctgatggttacacactggagca

SEQ ID NO: 1386692 - DNA, 25 bp, Homo sapien
tttgttcctgatggttacacactgg

SEQ ID NO: 1386693 - DNA, 25 bp, Homo sapien
catagagaagatggatgccgttctg

SEQ ID NO: 1386694 - DNA, 25 bp, Homo sapien
catccaccatgctgggtactcagtg

SEQ ID NO: 1386695 - DNA, 25 bp, Homo sapien
ggaggtatcattccaaagatgttta

SEQ ID NO: 1386696 - DNA, 25 bp, Homo sapien
cccaaaagcctatagaatcttctac

SEQ ID NO: 1386697 - DNA, 25 bp, Homo sapien
tctgccaggtttgcgaaggcaccaa

SEQ ID NO: 1386698 - DNA, 25 bp, Homo sapien
catggcctcaggatttcaagtgaag

SEQ ID NO: 1386699 - DNA, 25 bp, Homo sapien
tcttcatgtgatctctctagcaggc

SEQ ID NO: 1386700 - DNA, 25 bp, Homo sapien
ggtaatcctcccatgtgcaagcctc

SEQ ID NO: 1386701 - DNA, 25 bp, Homo sapien
gttgtagtacctgatgaaagccttc

SEQ ID NO: 1386702 - DNA, 25 bp, Homo sapien
gatctcccatctcctaagttgtagt

SEQ ID NO: 1386703 - DNA, 25 bp, Homo sapien
ccctgaattttcattggtcaggaag

SEQ ID NO: 1386704 - DNA, 25 bp, Homo sapien
aatgctagttggctcagtgattggc

SEQ ID NO: 1386705 - DNA, 25 bp, Homo sapien
ccacagacagtaccttagagtctaa

SEQ ID NO: 1386706 - DNA, 25 bp, Homo sapien
tcttttgactcatttaaatcctttg

SEQ ID NO: 1386707 - DNA, 25 bp, Homo sapien
tcagagttgcgggatgctgatgaaa

SEQ ID NO: 1386708 - DNA, 25 bp, Homo sapien
tctaagcttaggtacctttgtcttg

SEQ ID NO: 1386709 - DNA, 25 bp, Homo sapien
cacttgttttggtccaagggcagaa

SEQ ID NO: 1386710 - DNA, 25 bp, Homo sapien
tagtataccctatctgccttgaagg

SEQ ID NO: 1386711 - DNA, 25 bp, Homo sapien
caaacttcaatagcagacacggaga

SEQ ID NO: 1386712 - DNA, 25 bp, Homo sapien
gcagaaatatagtaggtcccaaagg

SEQ ID NO: 1386713 - DNA, 25 bp, Homo sapien
tgtctctctctgagtatcaacttta

SEQ ID NO: 1386714 - DNA, 25 bp, Homo sapien
gtctctctctgagtatcaactttac

SEQ ID NO: 1386715 - DNA, 25 bp, Homo sapien
actacctctttggatggtggtgacg

SEQ ID NO: 1386716 - DNA, 25 bp, Homo sapien
gcatataccctagggccaaatttcc

SEQ ID NO: 1386717 - DNA, 25 bp, Homo sapien
tgcagtgattaaagagcatataccc

SEQ ID NO: 1386718 - DNA, 25 bp, Homo sapien
tggtaatagagtaggaactacctct

SEQ ID NO: 1386719 - DNA, 25 bp, Homo sapien
ggtgcattggctcacttactgcaat

SEQ ID NO: 1386720 - DNA, 25 bp, Homo sapien
ttcttagtatcttcccaaacacaca

SEQ ID NO: 1386721 - DNA, 25 bp, Homo sapien
aaattggccttaagatttgaagtca

SEQ ID NO: 1386722 - DNA, 25 bp, Homo sapien
gctgtaaggcttggtaaattggcct

SEQ ID NO: 1386723 - DNA, 25 bp, Homo sapien
cacactagctgatggaaacaccaag

SEQ ID NO: 1386724 - DNA, 25 bp, Homo sapien
aacaccaagtgttgcaagctctgtg

SEQ ID NO: 1386725 - DNA, 25 bp, Homo sapien
taaggtggaggacaaatctagtccc

SEQ ID NO: 1386726 - DNA, 25 bp, Homo sapien
gattctaagccagtgatctcccaca

SEQ ID NO: 1386727 - DNA, 25 bp, Homo sapien
ggtcccaatagactgtccaaatctt

SEQ ID NO: 1386728 - DNA, 25 bp, Homo sapien
gaagctggtgttagaaaagttgatt

SEQ ID NO: 1386729 - DNA, 25 bp, Homo sapien
cacaacagggacagacttgaaggta

SEQ ID NO: 1386730 - DNA, 25 bp, Homo sapien
caggctctgtatatagtagaagctg

SEQ ID NO: 1386731 - DNA, 25 bp, Homo sapien
ggtaggacagggctatttgtcctct

SEQ ID NO: 1386732 - DNA, 25 bp, Homo sapien
gtgagtagctatgggacaaacagtc

SEQ ID NO: 1386733 - DNA, 25 bp, Homo sapien
tcctctggttttggagtagaggtag

SEQ ID NO: 1386734 - DNA, 25 bp, Homo sapien
tcctctcagagactggagcaggttc

SEQ ID NO: 1386735 - DNA, 25 bp, Homo sapien
ctggagaagtccaaagggcagccag

SEQ ID NO: 1386736 - DNA, 25 bp, Homo sapien
ggaaggttacaactggagaagtcca

SEQ ID NO: 1386737 - DNA, 25 bp, Homo sapien
gaaggttacaactggagaagtccaa

SEQ ID NO: 1386738 - DNA, 25 bp, Homo sapien
tgcaggtgtatgaaagtccagctcc

SEQ ID NO: 1386739 - DNA, 25 bp, Homo sapien
ggagtttatgtcaatcccacagcac

SEQ ID NO: 1386740 - DNA, 25 bp, Homo sapien
tttacccatgattgacaggtgcagg

SEQ ID NO: 1386741 - DNA, 25 bp, Homo sapien
ggagtcatttagtcacaagcttgcc

SEQ ID NO: 1386742 - DNA, 25 bp, Homo sapien
ggtggtagagacctagctaactcat

SEQ ID NO: 1386743 - DNA, 25 bp, Homo sapien
ggctttgacattctagggctcttcc

SEQ ID NO: 1386744 - DNA, 25 bp, Homo sapien
gctaactcatctgcagcggctttga

SEQ ID NO: 1386745 - DNA, 25 bp, Homo sapien
tgaggctaagcaaatcccttcctgg

SEQ ID NO: 1386746 - DNA, 25 bp, Homo sapien
tcacacatgtacactcctgtgaaat

SEQ ID NO: 1386747 - DNA, 25 bp, Homo sapien
tttgtagcgtgggaaatttctccca

SEQ ID NO: 1386748 - DNA, 25 bp, Homo sapien
cacatgtacactcctgtgaaatcca

SEQ ID NO: 1386749 - DNA, 25 bp, Homo sapien
ctcccagactgtagtctccttggct

SEQ ID NO: 1386750 - DNA, 25 bp, Homo sapien
taacttccaggccattgccaaggtg

SEQ ID NO: 1386751 - DNA, 25 bp, Homo sapien
catttgtaaactggccatggtccca

SEQ ID NO: 1386752 - DNA, 25 bp, Homo sapien
cagagttggtgcctgtgggctacta

SEQ ID NO: 1386753 - DNA, 25 bp, Homo sapien
tagaccctgcctagcactggagagg

SEQ ID NO: 1386754 - DNA, 25 bp, Homo sapien
ccaagtgtctgctggtagagattcc

SEQ ID NO: 1386755 - DNA, 25 bp, Homo sapien
ctcataacaatctttgagggccggg

SEQ ID NO: 1386756 - DNA, 25 bp, Homo sapien
cagggcaaagcagtaagagggaaaa

SEQ ID NO: 1386757 - DNA, 25 bp, Homo sapien
tcttccgggcgtttgcaaatatagg

SEQ ID NO: 1386758 - DNA, 25 bp, Homo sapien
catgaacatagatgtggagttccac

SEQ ID NO: 1386759 - DNA, 25 bp, Homo sapien
caggcgggaggcctagtgtgggtcg

SEQ ID NO: 1386760 - DNA, 25 bp, Homo sapien
tggccgccgcatcatgaacatagat

SEQ ID NO: 1386761 - DNA, 25 bp, Homo sapien
tgtgggtcgcggtcgtggcccccgc

SEQ ID NO: 1386762 - DNA, 25 bp, Homo sapien
acagtcattaagtggagatggctca

SEQ ID NO: 1386763 - DNA, 25 bp, Homo sapien
tggagatggctcatcatggaggtct

SEQ ID NO: 1386764 - DNA, 25 bp, Homo sapien
ctggaacaagttgccggccaatgtg

SEQ ID NO: 1386765 - DNA, 25 bp, Homo sapien
gccggccaatgtgagacagtcatta

SEQ ID NO: 1386766 - DNA, 25 bp, Homo sapien
tgaaaagcaggttgtcctgtacagt

SEQ ID NO: 1386767 - DNA, 25 bp, Homo sapien
aggaagaaaatcccagtcgtctttg

SEQ ID NO: 1386768 - DNA, 25 bp, Homo sapien
aaaagcaggttgtcctgtacagtat

SEQ ID NO: 1386769 - DNA, 25 bp, Homo sapien
gaagaaaatcccagtcgtctttgaa

SEQ ID NO: 1386770 - DNA, 25 bp, Homo sapien
taattcaggagcatggtctgcatgg

SEQ ID NO: 1386771 - DNA, 25 bp, Homo sapien
cacgatgttgaatgatgctttaaca

SEQ ID NO: 1386772 - DNA, 25 bp, Homo sapien
tttaattcaggagcatggtctgcat

SEQ ID NO: 1386773 - DNA, 25 bp, Homo sapien
ctcaaatgtgctcacgatgttgaat

SEQ ID NO: 1386774 - DNA, 25 bp, Homo sapien
ggttctggagaggatgtggagaaat

SEQ ID NO: 1386775 - DNA, 25 bp, Homo sapien
atcattaaaaagtcaggaaacaaca

SEQ ID NO: 1386776 - DNA, 25 bp, Homo sapien
ccatctcacaccggttggaatggca

SEQ ID NO: 1386777 - DNA, 25 bp, Homo sapien
aggaacacttttacactgttggtgg

SEQ ID NO: 1386778 - DNA, 25 bp, Homo sapien
tactttcgcttgctcagactgagag

SEQ ID NO: 1386779 - DNA, 25 bp, Homo sapien
aagatcaactattgctgagaccagc

SEQ ID NO: 1386780 - DNA, 25 bp, Homo sapien
tctcctgggagttaactgcactact

SEQ ID NO: 1386781 - DNA, 25 bp, Homo sapien
cagcctcatgggaaattgtgtacag

SEQ ID NO: 1386782 - DNA, 25 bp, Homo sapien
catgttcttggtagaagtcctttta

SEQ ID NO: 1386783 - DNA, 25 bp, Homo sapien
gggaaagattaaagggacacaagca

SEQ ID NO: 1386784 - DNA, 25 bp, Homo sapien
catttctgcagtaacaaggcagtta

SEQ ID NO: 1386785 - DNA, 25 bp, Homo sapien
taagtagagttaatattagcacatg

SEQ ID NO: 1386786 - DNA, 25 bp, Homo sapien
cattcacatattacaggcaacaagc

SEQ ID NO: 1386787 - DNA, 25 bp, Homo sapien
gagacaggacaaagtacagattagg

SEQ ID NO: 1386788 - DNA, 25 bp, Homo sapien
tagggcttgaagtgcccctgaccag

SEQ ID NO: 1386789 - DNA, 25 bp, Homo sapien
gcaaccacatggaataatgactcat

SEQ ID NO: 1386790 - DNA, 25 bp, Homo sapien
tagtccttcaactgacagcttaaag

SEQ ID NO: 1386791 - DNA, 25 bp, Homo sapien
ggatcaaatgctccacaactagttg

SEQ ID NO: 1386792 - DNA, 25 bp, Homo sapien
ctagtccttcaactgacagcttaaa

SEQ ID NO: 1386793 - DNA, 25 bp, Homo sapien
ccacaactagttgaaactggaatta

SEQ ID NO: 1386794 - DNA, 25 bp, Homo sapien
tcatgttgctcacaacaagaaatgg

SEQ ID NO: 1386795 - DNA, 25 bp, Homo sapien
gactttcaaatcagttagggtggtc

SEQ ID NO: 1386796 - DNA, 25 bp, Homo sapien
aggccctgtgctgaataccgtctgc

SEQ ID NO: 1386797 - DNA, 25 bp, Homo sapien
gaaaaaattgtagactttcaaatca

SEQ ID NO: 1386798 - DNA, 25 bp, Homo sapien
acctttgaaatgtagcatatcccaa

SEQ ID NO: 1386799 - DNA, 25 bp, Homo sapien
catcaaatattgaggatactggaac

SEQ ID NO: 1386800 - DNA, 25 bp, Homo sapien
tatcccaaaatgcaacccagaggct

SEQ ID NO: 1386801 - DNA, 25 bp, Homo sapien
tgctgatgacttacagctggaaagg

SEQ ID NO: 1386802 - DNA, 25 bp, Homo sapien
atatggtgaattctcctctcgactc

SEQ ID NO: 1386803 - DNA, 25 bp, Homo sapien
cttggataataacaacctgtacttg

SEQ ID NO: 1386804 - DNA, 25 bp, Homo sapien
attctcctctcgactcaaaatacaa

SEQ ID NO: 1386805 - DNA, 25 bp, Homo sapien
caattcttggataataacaacctgt

SEQ ID NO: 1386806 - DNA, 25 bp, Homo sapien
gttatggaattacatactgcaggcc

SEQ ID NO: 1386807 - DNA, 25 bp, Homo sapien
aaaggccctttagcaatcaagtaga

SEQ ID NO: 1386808 - DNA, 25 bp, Homo sapien
tctggagtgggcacgtttgatcttc

SEQ ID NO: 1386809 - DNA, 25 bp, Homo sapien
actgcatatgccaagatttctggag

SEQ ID NO: 1386810 - DNA, 25 bp, Homo sapien
agtaatattttcacactaccttctt

SEQ ID NO: 1386811 - DNA, 25 bp, Homo sapien
gtaatattttcacactaccttcttg

SEQ ID NO: 1386812 - DNA, 25 bp, Homo sapien
taatattttcacactaccttcttgg

SEQ ID NO: 1386813 - DNA, 25 bp, Homo sapien
gtttcttctaccactaactccatgt

SEQ ID NO: 1386814 - DNA, 25 bp, Homo sapien
taccactaactccatgtctgactgc

SEQ ID NO: 1386815 - DNA, 25 bp, Homo sapien
tcccctcagtagctgtcaccatgca

SEQ ID NO: 1386816 - DNA, 25 bp, Homo sapien
actccatgtctgactgcaagtgaaa

SEQ ID NO: 1386817 - DNA, 25 bp, Homo sapien
gcatggacacaatcgactcttggca

SEQ ID NO: 1386818 - DNA, 25 bp, Homo sapien
gacaatttattaggccacttgccag

SEQ ID NO: 1386819 - DNA, 25 bp, Homo sapien
cactactggagaagaaggtctcggg

SEQ ID NO: 1386820 - DNA, 25 bp, Homo sapien
gatgaaatacgtttacatggcagct

SEQ ID NO: 1386821 - DNA, 25 bp, Homo sapien
accaggaaaatcaacacttgtgatc

SEQ ID NO: 1386822 - DNA, 25 bp, Homo sapien
aacatggaaacacgcagccccaact

SEQ ID NO: 1386823 - DNA, 25 bp, Homo sapien
gaaaacatggaaacacgcagcccca

SEQ ID NO: 1386824 - DNA, 25 bp, Homo sapien
gaaaatcaacacttgtgatcaaact

SEQ ID NO: 1386825 - DNA, 25 bp, Homo sapien
ggcgctgggtgccttgggaatccga

SEQ ID NO: 1386826 - DNA, 25 bp, Homo sapien
tctctttgccagtcggaggggacta

SEQ ID NO: 1386827 - DNA, 25 bp, Homo sapien
tgccttgggaatccgaggaatccct

SEQ ID NO: 1386828 - DNA, 25 bp, Homo sapien
gggccggagatgggccgagcgctgc

SEQ ID NO: 1386829 - DNA, 25 bp, Homo sapien
gctcgggccactcgggttctgcctt

SEQ ID NO: 1386830 - DNA, 25 bp, Homo sapien
gggccactcgggttctgccttcaaa

SEQ ID NO: 1386831 - DNA, 25 bp, Homo sapien
tcgggttctgccttcaaagctagta

SEQ ID NO: 1386832 - DNA, 25 bp, Homo sapien
cttcaaagctagtagctgccccaga

SEQ ID NO: 1386833 - DNA, 25 bp, Homo sapien
caagtggtttcggaagtgatcctgg

SEQ ID NO: 1386834 - DNA, 25 bp, Homo sapien
tccatttccagatgtgaccgcccag

SEQ ID NO: 1386835 - DNA, 25 bp, Homo sapien
gccaagtggtttcggaagtgatcct

SEQ ID NO: 1386836 - DNA, 25 bp, Homo sapien
tgaaggccaagtggtttcggaagtg

SEQ ID NO: 1386837 - DNA, 25 bp, Homo sapien
ggccggagagcgatcaccggctggg

SEQ ID NO: 1386838 - DNA, 25 bp, Homo sapien
gcggcggcagccgtgcccaggctgc

SEQ ID NO: 1386839 - DNA, 25 bp, Homo sapien
cgcgggcggcggcagccgtgcccag

SEQ ID NO: 1386840 - DNA, 25 bp, Homo sapien
ccaggctgctgcagcgccacccgcc

SEQ ID NO: 1386841 - DNA, 25 bp, Homo sapien
cccaggctgctgcagcgccacccgc

SEQ ID NO: 1386842 - DNA, 25 bp, Homo sapien
cgtgacaacatgatgttcagcacgg

SEQ ID NO: 1386843 - DNA, 25 bp, Homo sapien
tcagcacggtaggaatgactgccat

SEQ ID NO: 1386844 - DNA, 25 bp, Homo sapien
tgatgttcagcacggtaggaatgac

SEQ ID NO: 1386845 - DNA, 25 bp, Homo sapien
caacatgatgttcagcacggtagga

SEQ ID NO: 1386846 - DNA, 25 bp, Homo sapien
gcttatgtcaagtcatccagtttca

SEQ ID NO: 1386847 - DNA, 25 bp, Homo sapien
gagctatcgggcctttaatgtggga

SEQ ID NO: 1386848 - DNA, 25 bp, Homo sapien
tttgaatgccataaagatgggccac

SEQ ID NO: 1386849 - DNA, 25 bp, Homo sapien
tagttggaacgaactataaagacag

SEQ ID NO: 1386850 - DNA, 25 bp, Homo sapien
ccaagatggtactttattggttcca

SEQ ID NO: 1386851 - DNA, 25 bp, Homo sapien
ctgtaagtctgggaaccctagagcc

SEQ ID NO: 1386852 - DNA, 25 bp, Homo sapien
agtctgggaaccctagagccagttt

SEQ ID NO: 1386853 - DNA, 25 bp, Homo sapien
ttccaagatggtactttattggttc

SEQ ID NO: 1386854 - DNA, 25 bp, Homo sapien
agttcagcagaaaagaaacgggtct

SEQ ID NO: 1386855 - DNA, 25 bp, Homo sapien
gggactcagagaatagaccactcag

SEQ ID NO: 1386856 - DNA, 25 bp, Homo sapien
gcccagaggattgctttcaaaagaa

SEQ ID NO: 1386857 - DNA, 25 bp, Homo sapien
gagaattctagtctagggactcaga

SEQ ID NO: 1386858 - DNA, 25 bp, Homo sapien
gcagagaatgtaaaggtgaaataat

SEQ ID NO: 1386859 - DNA, 25 bp, Homo sapien
taactagtaacctcggctgcagcag

SEQ ID NO: 1386860 - DNA, 25 bp, Homo sapien
ggagagttgacaccaaactgcacca

SEQ ID NO: 1386861 - DNA, 25 bp, Homo sapien
taaatgtcacaaaatagtagagtat

SEQ ID NO: 1386862 - DNA, 25 bp, Homo sapien
tattggcagggaaaacctagaacac

SEQ ID NO: 1386863 - DNA, 25 bp, Homo sapien
tggcagggaaaacctagaacacaaa

SEQ ID NO: 1386864 - DNA, 25 bp, Homo sapien
tgcctcagcccaattagttttaaag

SEQ ID NO: 1386865 - DNA, 25 bp, Homo sapien
taaagacgctgcatatattggcagg

SEQ ID NO: 1386866 - DNA, 25 bp, Homo sapien
ggaatgggtctggtggtgaaaataa

SEQ ID NO: 1386867 - DNA, 25 bp, Homo sapien
gaatgggtctggtggtgaaaataaa

SEQ ID NO: 1386868 - DNA, 25 bp, Homo sapien
cagaacctgtatgctttcggatgag

SEQ ID NO: 1386869 - DNA, 25 bp, Homo sapien
gaacctgtatgctttcggatgaggt

SEQ ID NO: 1386870 - DNA, 25 bp, Homo sapien
aacctgtatgctttcggatgaggtt

SEQ ID NO: 1386871 - DNA, 25 bp, Homo sapien
agaacctgtatgctttcggatgagg

SEQ ID NO: 1386872 - DNA, 25 bp, Homo sapien
ctgagagtgacttcatattgtggcc

SEQ ID NO: 1386873 - DNA, 25 bp, Homo sapien
ctcttctccaatttgcaagagtggg

SEQ ID NO: 1386874 - DNA, 25 bp, Homo sapien
gtgtggctcgcaccgaaatactgta

SEQ ID NO: 1386875 - DNA, 25 bp, Homo sapien
tcttagagctacttattcctggagc

SEQ ID NO: 1386876 - DNA, 25 bp, Homo sapien
gcttatggttcttctggcccagcac

SEQ ID NO: 1386877 - DNA, 25 bp, Homo sapien
ctatcttagcctagggagaaaaccg

SEQ ID NO: 1386878 - DNA, 25 bp, Homo sapien
tgtattatcatgtccaatggctgca

SEQ ID NO: 1386879 - DNA, 25 bp, Homo sapien
tatacacgtttgcttaagagaatgc

SEQ ID NO: 1386880 - DNA, 25 bp, Homo sapien
tgtgatgacgttctagcttttctca

SEQ ID NO: 1386881 - DNA, 25 bp, Homo sapien
gctgctgtgatgacgttctagcttt

SEQ ID NO: 1386882 - DNA, 25 bp, Homo sapien
atcaaagctgctgtgatgacgttct

SEQ ID NO: 1386883 - DNA, 25 bp, Homo sapien
aaagctgctgtgatgacgttctagc

SEQ ID NO: 1386884 - DNA, 25 bp, Homo sapien
agatttgtacatgcgcggcagtagt

SEQ ID NO: 1386885 - DNA, 25 bp, Homo sapien
aaacagatttgtacatgcgcggcag

SEQ ID NO: 1386886 - DNA, 25 bp, Homo sapien
acagatttgtacatgcgcggcagta

SEQ ID NO: 1386887 - DNA, 25 bp, Homo sapien
aacagatttgtacatgcgcggcagt

SEQ ID NO: 1386888 - DNA, 25 bp, Homo sapien
aggtgaggacaggaacagagcaaat

SEQ ID NO: 1386889 - DNA, 25 bp, Homo sapien
ggtgaggacaggaacagagcaaatt

SEQ ID NO: 1386890 - DNA, 25 bp, Homo sapien
tgaggacaggaacagagcaaattac

SEQ ID NO: 1386891 - DNA, 25 bp, Homo sapien
tgaggtgaggacaggaacagagcaa

SEQ ID NO: 1386892 - DNA, 25 bp, Homo sapien
tggaatgagtcaaatactgttcatc

SEQ ID NO: 1386893 - DNA, 25 bp, Homo sapien
agacaagggattaaaccaaggcagc

SEQ ID NO: 1386894 - DNA, 25 bp, Homo sapien
ccaggtgaagtaggcaagacaaggg

SEQ ID NO: 1386895 - DNA, 25 bp, Homo sapien
tgaagtaggcaagacaagggattaa

SEQ ID NO: 1386896 - DNA, 25 bp, Homo sapien
taggcaagacaagggattaaaccaa

SEQ ID NO: 1386897 - DNA, 25 bp, Homo sapien
gaggaagtatacagtccacttttga

SEQ ID NO: 1386898 - DNA, 25 bp, Homo sapien
aaagggaccatcacatcaaagagga

SEQ ID NO: 1386899 - DNA, 25 bp, Homo sapien
ctggaaccacatagctagttctgat

SEQ ID NO: 1386900 - DNA, 25 bp, Homo sapien
tagttctgatctgaagctcatggaa

SEQ ID NO: 1386901 - DNA, 25 bp, Homo sapien
ctctagatttggtcagtccattatc

SEQ ID NO: 1386902 - DNA, 25 bp, Homo sapien
tctggaattctctctagatttggtc

SEQ ID NO: 1386903 - DNA, 25 bp, Homo sapien
cagccccttcatcatgtagagttac

SEQ ID NO: 1386904 - DNA, 25 bp, Homo sapien
atcagccccttcatcatgtagagtt

SEQ ID NO: 1386905 - DNA, 25 bp, Homo sapien
ggagccagtggcttttgcctgtctt

SEQ ID NO: 1386906 - DNA, 25 bp, Homo sapien
ccagtggcttttgcctgtcttcatt

SEQ ID NO: 1386907 - DNA, 25 bp, Homo sapien
ctgggagccagtggcttttgcctgt

SEQ ID NO: 1386908 - DNA, 25 bp, Homo sapien
tcatttttcttaccattgtgatttt

SEQ ID NO: 1386909 - DNA, 25 bp, Homo sapien
tgtgtctttagagaagtggcctggc

SEQ ID NO: 1386910 - DNA, 25 bp, Homo sapien
ggcctggcaggcttgccttagccca

SEQ ID NO: 1386911 - DNA, 25 bp, Homo sapien
cagggtgttcctgatatggtgaatc

SEQ ID NO: 1386912 - DNA, 25 bp, Homo sapien
tgctctgtgagaattattgcaggag

SEQ ID NO: 1386913 - DNA, 25 bp, Homo sapien
tctactccaaaaccagaggactgcc

SEQ ID NO: 1386914 - DNA, 25 bp, Homo sapien
ctctactccaaaaccagaggactgc

SEQ ID NO: 1386915 - DNA, 25 bp, Homo sapien
ctcagatgttgttgggggtaattct

SEQ ID NO: 1386916 - DNA, 25 bp, Homo sapien
tgggtcttcccattctaacaagctg

SEQ ID NO: 1386917 - DNA, 25 bp, Homo sapien
tatacagtgcctgaactaaccccaa

SEQ ID NO: 1386918 - DNA, 25 bp, Homo sapien
gcagccttggaattatgatttgacc

SEQ ID NO: 1386919 - DNA, 25 bp, Homo sapien
taaatacagtgctgagactagagcc

SEQ ID NO: 1386920 - DNA, 25 bp, Homo sapien
gaaagattaatcaattccaagacat

SEQ ID NO: 1386921 - DNA, 25 bp, Homo sapien
gccataggtaagactatgtatgtca

SEQ ID NO: 1386922 - DNA, 25 bp, Homo sapien
tgagaactataagcatgcagatgca

SEQ ID NO: 1386923 - DNA, 25 bp, Homo sapien
tgaacagaccattagtcagctgtgg

SEQ ID NO: 1386924 - DNA, 25 bp, Homo sapien
tgactgtgttcttcacatgctgggt

SEQ ID NO: 1386925 - DNA, 25 bp, Homo sapien
tggcaagttttctgacaaggatctc

SEQ ID NO: 1386926 - DNA, 25 bp, Homo sapien
gagaaggccctcaaaagacttgact

SEQ ID NO: 1386927 - DNA, 25 bp, Homo sapien
gaatctctgtctctggtagtaggca

SEQ ID NO: 1386928 - DNA, 25 bp, Homo sapien
cggagccttgcagctgacctcggca

SEQ ID NO: 1386929 - DNA, 25 bp, Homo sapien
ttgcagctgacctcggcaattcggc

SEQ ID NO: 1386930 - DNA, 25 bp, Homo sapien
gctgacctcggcaattcggccagct

SEQ ID NO: 1386931 - DNA, 25 bp, Homo sapien
cagattctataaggtctttgcactc

SEQ ID NO: 1386932 - DNA, 25 bp, Homo sapien
caaaacaagtggtggcagatactgc

SEQ ID NO: 1386933 - DNA, 25 bp, Homo sapien
gagcgcaagtactgattggtttcca

SEQ ID NO: 1386934 - DNA, 25 bp, Homo sapien
ttctgtttgcacttttccagttcag

SEQ ID NO: 1386935 - DNA, 25 bp, Homo sapien
aggcagtagctttggatgtcaggaa

SEQ ID NO: 1386936 - DNA, 25 bp, Homo sapien
gcctgatgcacctgccgtttcaacg

SEQ ID NO: 1386937 - DNA, 25 bp, Homo sapien
tgcagctggctttctgaacagacat

SEQ ID NO: 1386938 - DNA, 25 bp, Homo sapien
aaggaaagacttggctgcatcaatg

SEQ ID NO: 1386939 - DNA, 25 bp, Homo sapien
taaatgaaaccttacaggcagcagc

SEQ ID NO: 1386940 - DNA, 25 bp, Homo sapien
caaaggagtctcctgatacaggcgg

SEQ ID NO: 1386941 - DNA, 25 bp, Homo sapien
tcaattttctaggagcccacgaggc

SEQ ID NO: 1386942 - DNA, 25 bp, Homo sapien
cattttctttgagactaccggacca

SEQ ID NO: 1386943 - DNA, 25 bp, Homo sapien
tcgcagtagggatccgaaaaaggtc

SEQ ID NO: 1386944 - DNA, 25 bp, Homo sapien
cagatgtgaggaagatcactcagct

SEQ ID NO: 1386945 - DNA, 25 bp, Homo sapien
cacttccttgaagtaagagtatttg

SEQ ID NO: 1386946 - DNA, 25 bp, Homo sapien
acatgtcagcaggtaggtttgaccc

SEQ ID NO: 1386947 - DNA, 25 bp, Homo sapien
agaaaccggctttatgccattttca

SEQ ID NO: 1386948 - DNA, 25 bp, Homo sapien
gcaataggtcctcgagtttggggct

SEQ ID NO: 1386949 - DNA, 25 bp, Homo sapien
gggagcaataggtcctcgagtttgg

SEQ ID NO: 1386950 - DNA, 25 bp, Homo sapien
attcttggggagcaataggtcctcg

SEQ ID NO: 1386951 - DNA, 25 bp, Homo sapien
agacgcctagttttctgtctagttc

SEQ ID NO: 1386952 - DNA, 25 bp, Homo sapien
aacaaaaacaattctcacttccaga

SEQ ID NO: 1386953 - DNA, 25 bp, Homo sapien
tacaatagataaacaaacaaaaaca

SEQ ID NO: 1386954 - DNA, 25 bp, Homo sapien
caaacaaaaacaattctcacttcca

SEQ ID NO: 1386955 - DNA, 25 bp, Homo sapien
caaaaacaattctcacttccagaag

SEQ ID NO: 1386956 - DNA, 25 bp, Homo sapien
ggatgtctggttcacaactcccctg

SEQ ID NO: 1386957 - DNA, 25 bp, Homo sapien
tctggatgtctggttcacaactccc

SEQ ID NO: 1386958 - DNA, 25 bp, Homo sapien
gtctggatgtctggttcacaactcc

SEQ ID NO: 1386959 - DNA, 25 bp, Homo sapien
tggatgtctggttcacaactcccct

SEQ ID NO: 1386960 - DNA, 25 bp, Homo sapien
aggcgacaagggattcattcgacaa

SEQ ID NO: 1386961 - DNA, 25 bp, Homo sapien
agctaaaggcgacaagggattcatt

SEQ ID NO: 1386962 - DNA, 25 bp, Homo sapien
taaaggcgacaagggattcattcga

SEQ ID NO: 1386963 - DNA, 25 bp, Homo sapien
aaagctaaaggcgacaagggattca

SEQ ID NO: 1386964 - DNA, 25 bp, Homo sapien
agcagcccaacagcgactgggcagg

SEQ ID NO: 1386965 - DNA, 25 bp, Homo sapien
gcgtctcgggctgggtcgccgaccg

SEQ ID NO: 1386966 - DNA, 25 bp, Homo sapien
ttgggaccccaggcgtctcgggctg

SEQ ID NO: 1386967 - DNA, 25 bp, Homo sapien
gggtctctccctctggctccagaat

SEQ ID NO: 1386968 - DNA, 25 bp, Homo sapien
tggggtctctccctctggctccaga

SEQ ID NO: 1386969 - DNA, 25 bp, Homo sapien
cagcgcgattcaccgctctaatatc

SEQ ID NO: 1386970 - DNA, 25 bp, Homo sapien
ccagcgcgattcaccgctctaatat

SEQ ID NO: 1386971 - DNA, 25 bp, Homo sapien
accagcgcgattcaccgctctaata

SEQ ID NO: 1386972 - DNA, 25 bp, Homo sapien
catccctggatgggcttgcaccacc

SEQ ID NO: 1386973 - DNA, 25 bp, Homo sapien
ctctggagacccgaggatagtgcgg

SEQ ID NO: 1386974 - DNA, 25 bp, Homo sapien
gtctttcccacgctcacgtccactg

SEQ ID NO: 1386975 - DNA, 25 bp, Homo sapien
acgctcacgtccactggcccaggcc

SEQ ID NO: 1386976 - DNA, 25 bp, Homo sapien
gcaccgcgggttctggtctttccca

SEQ ID NO: 1386977 - DNA, 25 bp, Homo sapien
aagattcccacattcggggaaatca

SEQ ID NO: 1386978 - DNA, 25 bp, Homo sapien
cttacctggatccagataaagcaga

SEQ ID NO: 1386979 - DNA, 25 bp, Homo sapien
gactgtgttgcctattgcactgcct

SEQ ID NO: 1386980 - DNA, 25 bp, Homo sapien
gatgttgttggccattgcagtgcct

SEQ ID NO: 1386981 - DNA, 25 bp, Homo sapien
taatctccctgacaaaaggacagct

SEQ ID NO: 1386982 - DNA, 25 bp, Homo sapien
ttaaggggttgttcttattatgcag

SEQ ID NO: 1386983 - DNA, 25 bp, Homo sapien
gaaagggattccctgtagcatgtag

SEQ ID NO: 1386984 - DNA, 25 bp, Homo sapien
gtgcctagattagggaaaagacctg

SEQ ID NO: 1386985 - DNA, 25 bp, Homo sapien
gtagcatgtagactttccccacaag

SEQ ID NO: 1386986 - DNA, 25 bp, Homo sapien
ggttctggagaggatgtggagaaat

SEQ ID NO: 1386987 - DNA, 25 bp, Homo sapien
atcattaaaaagtcaggaaacaaca

SEQ ID NO: 1386988 - DNA, 25 bp, Homo sapien
ccatctcacaccggttggaatggca

SEQ ID NO: 1386989 - DNA, 25 bp, Homo sapien
aggaacacttttacactgttggtgg

SEQ ID NO: 1386990 - DNA, 25 bp, Homo sapien
tctgacagtatgacaaatggtccca

SEQ ID NO: 1386991 - DNA, 25 bp, Homo sapien
ggtcccatgtgcgatattcacactg

SEQ ID NO: 1386992 - DNA, 25 bp, Homo sapien
cgatattcacactgcattgcagtca

SEQ ID NO: 1386993 - DNA, 25 bp, Homo sapien
gacaaatggtcccatgtgcgatatt

SEQ ID NO: 1386994 - DNA, 25 bp, Homo sapien
gagacaggacaaagtacagattagg

SEQ ID NO: 1386995 - DNA, 25 bp, Homo sapien
cattcacatattacaggcaacaagc

SEQ ID NO: 1386996 - DNA, 25 bp, Homo sapien
gcaaccacatggaataatgactcat

SEQ ID NO: 1386997 - DNA, 25 bp, Homo sapien
tagggcttgaagtgcccctgaccag

SEQ ID NO: 1386998 - DNA, 25 bp, Homo sapien
ggatcaaatgctccacaactagttg

SEQ ID NO: 1386999 - DNA, 25 bp, Homo sapien
tagtccttcaactgacagcttaaag

SEQ ID NO: 1387000 - DNA, 25 bp, Homo sapien
ccacaactagttgaaactggaatta

SEQ ID NO: 1387001 - DNA, 25 bp, Homo sapien
tatgaagttcctagatgatttaaag

SEQ ID NO: 1387002 - DNA, 25 bp, Homo sapien
agaataatgaatcataagaaaactt

SEQ ID NO: 1387003 - DNA, 25 bp, Homo sapien
gaataatgaatcataagaaaacttg

SEQ ID NO: 1387004 - DNA, 25 bp, Homo sapien
aagaataatgaatcataagaaaact

SEQ ID NO: 1387005 - DNA, 25 bp, Homo sapien
tgttgggtaagaccaggatgcaccg

SEQ ID NO: 1387006 - DNA, 25 bp, Homo sapien
cacacaggctttctaaggatatggc

SEQ ID NO: 1387007 - DNA, 25 bp, Homo sapien
tctgcgtcacctgcactggagtcac

SEQ ID NO: 1387008 - DNA, 25 bp, Homo sapien
ggatatggcccaagaggaaggctct

SEQ ID NO: 1387009 - DNA, 25 bp, Homo sapien
taactcagcaggtcttgtttgccca

SEQ ID NO: 1387010 - DNA, 25 bp, Homo sapien
gactttcaaatcagttagggtggtc

SEQ ID NO: 1387011 - DNA, 25 bp, Homo sapien
aggccctgtgctgaataccgtctgc

SEQ ID NO: 1387012 - DNA, 25 bp, Homo sapien
taccgtctgcatatgtataggaaag

SEQ ID NO: 1387013 - DNA, 25 bp, Homo sapien
ccagtcaatatctacgagtctcttc

SEQ ID NO: 1387014 - DNA, 25 bp, Homo sapien
actgcatcagcttatatccatggag

SEQ ID NO: 1387015 - DNA, 25 bp, Homo sapien
aagctacagagtatttagatagaaa

SEQ ID NO: 1387016 - DNA, 25 bp, Homo sapien
tattactgtgtccacaggagtacac

SEQ ID NO: 1387017 - DNA, 25 bp, Homo sapien
aaagtatttgaacatgtgacccaga

SEQ ID NO: 1387018 - DNA, 25 bp, Homo sapien
gactaggcaacttctgtcacactgg

SEQ ID NO: 1387019 - DNA, 25 bp, Homo sapien
gggaccctgaagtgtttgagtatct

SEQ ID NO: 1387020 - DNA, 25 bp, Homo sapien
gaggacttacaacttgactaggcaa

SEQ ID NO: 1387021 - DNA, 25 bp, Homo sapien
aattccttcttgtctaccaggtctt

SEQ ID NO: 1387022 - DNA, 25 bp, Homo sapien
gtttcttctaccactaactccatgt

SEQ ID NO: 1387023 - DNA, 25 bp, Homo sapien
taatattttcacactaccttcttgg

SEQ ID NO: 1387024 - DNA, 25 bp, Homo sapien
tcccctcagtagctgtcaccatgca

SEQ ID NO: 1387025 - DNA, 25 bp, Homo sapien
actccatgtctgactgcaagtgaaa

SEQ ID NO: 1387026 - DNA, 25 bp, Homo sapien
tggtagtgtctgcatgctcaaaaag

SEQ ID NO: 1387027 - DNA, 25 bp, Homo sapien
cactactggagaagaaggtctcggg

SEQ ID NO: 1387028 - DNA, 25 bp, Homo sapien
tgtaactctcaagtatgtctctaca

SEQ ID NO: 1387029 - DNA, 25 bp, Homo sapien
tgaaatacgtttacatggcagcttc

SEQ ID NO: 1387030 - DNA, 25 bp, Homo sapien
taaactgaggccaaaagaactgagg

SEQ ID NO: 1387031 - DNA, 25 bp, Homo sapien
gaaagaagtcatccactccagctac

SEQ ID NO: 1387032 - DNA, 25 bp, Homo sapien
tgtcaagtcttaacagcagggctgg

SEQ ID NO: 1387033 - DNA, 25 bp, Homo sapien
tagttagttgaaaagtccacctgtc

SEQ ID NO: 1387034 - DNA, 25 bp, Homo sapien
cttctggggccgccaacataggtaa

SEQ ID NO: 1387035 - DNA, 25 bp, Homo sapien
ctggggccgccaacataggtaaaag

SEQ ID NO: 1387036 - DNA, 25 bp, Homo sapien
taaaagtaaaggtggagtctgagta

SEQ ID NO: 1387037 - DNA, 25 bp, Homo sapien
aaggtggagtctgagtatctgaaat

SEQ ID NO: 1387038 - DNA, 25 bp, Homo sapien
tgaaacagaaagtcctgtcaaaagc

SEQ ID NO: 1387039 - DNA, 25 bp, Homo sapien
ctgaaacagaaagtcctgtcaaaag

SEQ ID NO: 1387040 - DNA, 25 bp, Homo sapien
acgcactgccccttcgcctagaccc

SEQ ID NO: 1387041 - DNA, 25 bp, Homo sapien
aggcttcgggcactacgcggggctg

SEQ ID NO: 1387042 - DNA, 25 bp, Homo sapien
cggggctggaaataccacgcactgc

SEQ ID NO: 1387043 - DNA, 25 bp, Homo sapien
gcttcgggcactacgcggggctgga

SEQ ID NO: 1387044 - DNA, 25 bp, Homo sapien
ggacttctggatcacgacgtcgata

SEQ ID NO: 1387045 - DNA, 25 bp, Homo sapien
gatcacgacgtcgatatccttctga

SEQ ID NO: 1387046 - DNA, 25 bp, Homo sapien
cgacgtcgatatccttctgaattcg

SEQ ID NO: 1387047 - DNA, 25 bp, Homo sapien
ctcagctctggacttctggatcacg

SEQ ID NO: 1387048 - DNA, 25 bp, Homo sapien
tggcgatggattggtgatgaaaccg

SEQ ID NO: 1387049 - DNA, 25 bp, Homo sapien
ggcgatggattggtgatgaaaccga

SEQ ID NO: 1387050 - DNA, 25 bp, Homo sapien
cgatggattggtgatgaaaccgagt

SEQ ID NO: 1387051 - DNA, 25 bp, Homo sapien
ctcgccgctgctggattccaatttc

SEQ ID NO: 1387052 - DNA, 25 bp, Homo sapien
ggccggagagcgatcaccggctggg

SEQ ID NO: 1387053 - DNA, 25 bp, Homo sapien
gcggcggcagccgtgcccaggctgc

SEQ ID NO: 1387054 - DNA, 25 bp, Homo sapien
cccaggctgctgcagcgccacccgc

SEQ ID NO: 1387055 - DNA, 25 bp, Homo sapien
cgcgggcggcggcagccgtgcccag

SEQ ID NO: 1387056 - DNA, 25 bp, Homo sapien
ccaggctgctgcagcgccacccgcc

SEQ ID NO: 1387057 - DNA, 25 bp, Homo sapien
gccgccggggctcgcagagtgtcag

SEQ ID NO: 1387058 - DNA, 25 bp, Homo sapien
cgccggggctcgcagagtgtcagcc

SEQ ID NO: 1387059 - DNA, 25 bp, Homo sapien
ccggggctcgcagagtgtcagccat

SEQ ID NO: 1387060 - DNA, 25 bp, Homo sapien
ggccgccggggctcgcagagtgtca

SEQ ID NO: 1387061 - DNA, 25 bp, Homo sapien
ggagctgagcggcagtgtaggtagt

SEQ ID NO: 1387062 - DNA, 25 bp, Homo sapien
cggcagtgtaggtagtgaagactcc

SEQ ID NO: 1387063 - DNA, 25 bp, Homo sapien
ctccactcgcgccgggagctgagcg

SEQ ID NO: 1387064 - DNA, 25 bp, Homo sapien
gctgagcggcagtgtaggtagtgaa

SEQ ID NO: 1387065 - DNA, 25 bp, Homo sapien
agatgacgagttagtgggtgcagcg

SEQ ID NO: 1387066 - DNA, 25 bp, Homo sapien
tgcacatgtaccctaaaacttaaag

SEQ ID NO: 1387067 - DNA, 25 bp, Homo sapien
caccagcatggcacatgtatacata

SEQ ID NO: 1387068 - DNA, 25 bp, Homo sapien
tgtaactaacctgcacaatgtgcac

SEQ ID NO: 1387069 - DNA, 25 bp, Homo sapien
ggaatgggtctggtggtgaaaataa

SEQ ID NO: 1387070 - DNA, 25 bp, Homo sapien
gaatgggtctggtggtgaaaataaa

SEQ ID NO: 1387071 - DNA, 25 bp, Homo sapien
cgacggtgatgtcaaaaaagacgac

SEQ ID NO: 1387072 - DNA, 25 bp, Homo sapien
gacggtgatgtcaaaaaagacgacg

SEQ ID NO: 1387073 - DNA, 25 bp, Homo sapien
ctcacagtgatggtggcgtctgcaa

SEQ ID NO: 1387074 - DNA, 25 bp, Homo sapien
tgatggtggcgtctgcaaagataac

SEQ ID NO: 1387075 - DNA, 25 bp, Homo sapien
cagggctcacagtgatggtggcgtc

SEQ ID NO: 1387076 - DNA, 25 bp, Homo sapien
tggcgtctgcaaagataaccactga

SEQ ID NO: 1387077 - DNA, 25 bp, Homo sapien
gcaccacatcaactttaaacagaat

SEQ ID NO: 1387078 - DNA, 25 bp, Homo sapien
gcttaggaagtattgctgcctaatt

SEQ ID NO: 1387079 - DNA, 25 bp, Homo sapien
ttatagtatttattagcgccagaac

SEQ ID NO: 1387080 - DNA, 25 bp, Homo sapien
tagcgccagaactctgtgactgttt

SEQ ID NO: 1387081 - DNA, 25 bp, Homo sapien
aagtccaatatcaaggcagattcag

SEQ ID NO: 1387082 - DNA, 25 bp, Homo sapien
gggaagtccaatatcaaggcagatt

SEQ ID NO: 1387083 - DNA, 25 bp, Homo sapien
gaagtccaatatcaaggcagattca

SEQ ID NO: 1387084 - DNA, 25 bp, Homo sapien
ggaagtccaatatcaaggcagattc

SEQ ID NO: 1387085 - DNA, 25 bp, Homo sapien
gaggtagctgcacatttgggacact

SEQ ID NO: 1387086 - DNA, 25 bp, Homo sapien
tgggctttcatacacctgcacctgt

SEQ ID NO: 1387087 - DNA, 25 bp, Homo sapien
gctggcgacttgacattctagtaga

SEQ ID NO: 1387088 - DNA, 25 bp, Homo sapien
ttgggacactcctatgctggcgact

SEQ ID NO: 1387089 - DNA, 25 bp, Homo sapien
gcttatggttcttctggcccagcac

SEQ ID NO: 1387090 - DNA, 25 bp, Homo sapien
tgtattatcatgtccaatggctgca

SEQ ID NO: 1387091 - DNA, 25 bp, Homo sapien
tatacacgtttgcttaagagaatgc

SEQ ID NO: 1387092 - DNA, 25 bp, Homo sapien
ctatcttagcctagggagaaaaccg

SEQ ID NO: 1387093 - DNA, 25 bp, Homo sapien
cattccaccaggacatggaatgaga

SEQ ID NO: 1387094 - DNA, 25 bp, Homo sapien
tgttgatgaaaagggtctccttcag

SEQ ID NO: 1387095 - DNA, 25 bp, Homo sapien
tcatcttctgcagccattccaccag

SEQ ID NO: 1387096 - DNA, 25 bp, Homo sapien
aatgagatgggaagtgaagatgctg

SEQ ID NO: 1387097 - DNA, 25 bp, Homo sapien
aaacagatttgtacatgcgcggcag

SEQ ID NO: 1387098 - DNA, 25 bp, Homo sapien
acagatttgtacatgcgcggcagta

SEQ ID NO: 1387099 - DNA, 25 bp, Homo sapien
aacagatttgtacatgcgcggcagt

SEQ ID NO: 1387100 - DNA, 25 bp, Homo sapien
agatttgtacatgcgcggcagtagt

SEQ ID NO: 1387101 - DNA, 25 bp, Homo sapien
tgaggtgaggacaggaacagagcaa

SEQ ID NO: 1387102 - DNA, 25 bp, Homo sapien
ggtgaggacaggaacagagcaaatt

SEQ ID NO: 1387103 - DNA, 25 bp, Homo sapien
tgaggacaggaacagagcaaattac

SEQ ID NO: 1387104 - DNA, 25 bp, Homo sapien
aggtgaggacaggaacagagcaaat

SEQ ID NO: 1387105 - DNA, 25 bp, Homo sapien
tggaatgagtcaaatactgttcatc

SEQ ID NO: 1387106 - DNA, 25 bp, Homo sapien
agacaagggattaaaccaaggcagc

SEQ ID NO: 1387107 - DNA, 25 bp, Homo sapien
tgaagtaggcaagacaagggattaa

SEQ ID NO: 1387108 - DNA, 25 bp, Homo sapien
taggcaagacaagggattaaaccaa

SEQ ID NO: 1387109 - DNA, 25 bp, Homo sapien
ccaggtgaagtaggcaagacaaggg

SEQ ID NO: 1387110 - DNA, 25 bp, Homo sapien
ctcactttggtttgtaaccctatag

SEQ ID NO: 1387111 - DNA, 25 bp, Homo sapien
tgtgcagaaaccagataggcatctc

SEQ ID NO: 1387112 - DNA, 25 bp, Homo sapien
ccctagctctaaatacttggtatgg

SEQ ID NO: 1387113 - DNA, 25 bp, Homo sapien
aaaaggacacattgtataatcagtc

SEQ ID NO: 1387114 - DNA, 25 bp, Homo sapien
tcatttttcttaccattgtgatttt

SEQ ID NO: 1387115 - DNA, 25 bp, Homo sapien
ccagtggcttttgcctgtcttcatt

SEQ ID NO: 1387116 - DNA, 25 bp, Homo sapien
ggagccagtggcttttgcctgtctt

SEQ ID NO: 1387117 - DNA, 25 bp, Homo sapien
ctgggagccagtggcttttgcctgt

SEQ ID NO: 1387118 - DNA, 25 bp, Homo sapien
caatgctcaatgtctaaccccaaat

SEQ ID NO: 1387119 - DNA, 25 bp, Homo sapien
tattaaagaagctaggccagtgtgg

SEQ ID NO: 1387120 - DNA, 25 bp, Homo sapien
gatgagagaatctgtagataagcac

SEQ ID NO: 1387121 - DNA, 25 bp, Homo sapien
taaactgacttagaaaggacacatc

SEQ ID NO: 1387122 - DNA, 25 bp, Homo sapien
tgaacagaccattagtcagctgtgg

SEQ ID NO: 1387123 - DNA, 25 bp, Homo sapien
gccataggtaagactatgtatgtca

SEQ ID NO: 1387124 - DNA, 25 bp, Homo sapien
tgagaactataagcatgcagatgca

SEQ ID NO: 1387125 - DNA, 25 bp, Homo sapien
gaaagattaatcaattccaagacat

SEQ ID NO: 1387126 - DNA, 25 bp, Homo sapien
tgactgtgttcttcacatgctgggt

SEQ ID NO: 1387127 - DNA, 25 bp, Homo sapien
tggcaagttttctgacaaggatctc

SEQ ID NO: 1387128 - DNA, 25 bp, Homo sapien
gagaaggccctcaaaagacttgact

SEQ ID NO: 1387129 - DNA, 25 bp, Homo sapien
gaatctctgtctctggtagtaggca

SEQ ID NO: 1387130 - DNA, 25 bp, Homo sapien
cggagccttgcagctgacctcggca

SEQ ID NO: 1387131 - DNA, 25 bp, Homo sapien
gctgacctcggcaattcggccagct

SEQ ID NO: 1387132 - DNA, 25 bp, Homo sapien
cagattctataaggtctttgcactc

SEQ ID NO: 1387133 - DNA, 25 bp, Homo sapien
ttgcagctgacctcggcaattcggc

SEQ ID NO: 1387134 - DNA, 25 bp, Homo sapien
gagcgcaagtactgattggtttcca

SEQ ID NO: 1387135 - DNA, 25 bp, Homo sapien
ttctgtttgcacttttccagttcag

SEQ ID NO: 1387136 - DNA, 25 bp, Homo sapien
caaaacaagtggtggcagatactgc

SEQ ID NO: 1387137 - DNA, 25 bp, Homo sapien
aggcagtagctttggatgtcaggaa

SEQ ID NO: 1387138 - DNA, 25 bp, Homo sapien
cgttggagaccaaaccagttgactt

SEQ ID NO: 1387139 - DNA, 25 bp, Homo sapien
tcctacaattaagccaaaagaacag

SEQ ID NO: 1387140 - DNA, 25 bp, Homo sapien
gaaccgagttccgatctacgttgga

SEQ ID NO: 1387141 - DNA, 25 bp, Homo sapien
ccgggtcctcaggtcgctggtgaac

SEQ ID NO: 1387142 - DNA, 25 bp, Homo sapien
gggagcaataggtcctcgagtttgg

SEQ ID NO: 1387143 - DNA, 25 bp, Homo sapien
agacgcctagttttctgtctagttc

SEQ ID NO: 1387144 - DNA, 25 bp, Homo sapien
attcttggggagcaataggtcctcg

SEQ ID NO: 1387145 - DNA, 25 bp, Homo sapien
gcaataggtcctcgagtttggggct

SEQ ID NO: 1387146 - DNA, 25 bp, Homo sapien
ggatgtctggttcacaactcccctg

SEQ ID NO: 1387147 - DNA, 25 bp, Homo sapien
tctggatgtctggttcacaactccc

SEQ ID NO: 1387148 - DNA, 25 bp, Homo sapien
tggatgtctggttcacaactcccct

SEQ ID NO: 1387149 - DNA, 25 bp, Homo sapien
gtctggatgtctggttcacaactcc

SEQ ID NO: 1387150 - DNA, 25 bp, Homo sapien
aggcgacaagggattcattcgacaa

SEQ ID NO: 1387151 - DNA, 25 bp, Homo sapien
agctaaaggcgacaagggattcatt

SEQ ID NO: 1387152 - DNA, 25 bp, Homo sapien
aaagctaaaggcgacaagggattca

SEQ ID NO: 1387153 - DNA, 25 bp, Homo sapien
taaaggcgacaagggattcattcga

SEQ ID NO: 1387154 - DNA, 25 bp, Homo sapien
agcagcccaacagcgactgggcagg

SEQ ID NO: 1387155 - DNA, 25 bp, Homo sapien
gggtctctccctctggctccagaat

SEQ ID NO: 1387156 - DNA, 25 bp, Homo sapien
tggggtctctccctctggctccaga

SEQ ID NO: 1387157 - DNA, 25 bp, Homo sapien
ttgggaccccaggcgtctcgggctg

SEQ ID NO: 1387158 - DNA, 25 bp, Homo sapien
gcgtctcgggctgggtcgccgaccg

SEQ ID NO: 1387159 - DNA, 25 bp, Homo sapien
ccagcgcgattcaccgctctaatat

SEQ ID NO: 1387160 - DNA, 25 bp, Homo sapien
cagcgcgattcaccgctctaatatc

SEQ ID NO: 1387161 - DNA, 25 bp, Homo sapien
accagcgcgattcaccgctctaata

SEQ ID NO: 1387162 - DNA, 25 bp, Homo sapien
catccctggatgggcttgcaccacc

SEQ ID NO: 1387163 - DNA, 25 bp, Homo sapien
aagattcccacattcggggaaatca

SEQ ID NO: 1387164 - DNA, 25 bp, Homo sapien
gatgttgttggccattgcagtgcct

SEQ ID NO: 1387165 - DNA, 25 bp, Homo sapien
cttacctggatccagataaagcaga

SEQ ID NO: 1387166 - DNA, 25 bp, Homo sapien
taatctccctgacaaaaggacagct

SEQ ID NO: 1387167 - DNA, 25 bp, Homo sapien
gactgtgttgcctattgcactgcct

SEQ ID NO: 1387168 - DNA, 25 bp, Homo sapien
tttctttatagctggctcacatttc

SEQ ID NO: 1387169 - DNA, 25 bp, Homo sapien
tctctttccatactacttgttttct

SEQ ID NO: 1387170 - DNA, 25 bp, Homo sapien
tttctttctttatagctggctcaca

SEQ ID NO: 1387171 - DNA, 25 bp, Homo sapien
tctttctttatagctggctcacatt

SEQ ID NO: 1387172 - DNA, 25 bp, Homo sapien
gtagcatgtagactttccccacaag

SEQ ID NO: 1387173 - DNA, 25 bp, Homo sapien
gaaagggattccctgtagcatgtag

SEQ ID NO: 1387174 - DNA, 25 bp, Homo sapien
ttaaggggttgttcttattatgcag

SEQ ID NO: 1387175 - DNA, 25 bp, Homo sapien
gtgcctagattagggaaaagacctg

SEQ ID NO: 1387176 - DNA, 25 bp, Homo sapien
taatcagcgtctgaaaggacgtccc

SEQ ID NO: 1387177 - DNA, 25 bp, Homo sapien
gaaacaatgctagctcacaggaagg

SEQ ID NO: 1387178 - DNA, 25 bp, Homo sapien
taagcgcctcaaataagacatgccc

SEQ ID NO: 1387179 - DNA, 25 bp, Homo sapien
agctgccttgcaatcccatgggaaa

SEQ ID NO: 1387180 - DNA, 25 bp, Homo sapien
ccatctcacaccggttggaatggca

SEQ ID NO: 1387181 - DNA, 25 bp, Homo sapien
ggttctggagaggatgtggagaaat

SEQ ID NO: 1387182 - DNA, 25 bp, Homo sapien
aggaacacttttacactgttggtgg

SEQ ID NO: 1387183 - DNA, 25 bp, Homo sapien
atcattaaaaagtcaggaaacaaca

SEQ ID NO: 1387184 - DNA, 25 bp, Homo sapien
ggtcccatgtgcgatattcacactg

SEQ ID NO: 1387185 - DNA, 25 bp, Homo sapien
tctgacagtatgacaaatggtccca

SEQ ID NO: 1387186 - DNA, 25 bp, Homo sapien
cgatattcacactgcattgcagtca

SEQ ID NO: 1387187 - DNA, 25 bp, Homo sapien
gacaaatggtcccatgtgcgatatt

SEQ ID NO: 1387188 - DNA, 25 bp, Homo sapien
cattcacatattacaggcaacaagc

SEQ ID NO: 1387189 - DNA, 25 bp, Homo sapien
gcaaccacatggaataatgactcat

SEQ ID NO: 1387190 - DNA, 25 bp, Homo sapien
gagacaggacaaagtacagattagg

SEQ ID NO: 1387191 - DNA, 25 bp, Homo sapien
tagggcttgaagtgcccctgaccag

SEQ ID NO: 1387192 - DNA, 25 bp, Homo sapien
ggatcaaatgctccacaactagttg

SEQ ID NO: 1387193 - DNA, 25 bp, Homo sapien
tatgaagttcctagatgatttaaag

SEQ ID NO: 1387194 - DNA, 25 bp, Homo sapien
ccacaactagttgaaactggaatta

SEQ ID NO: 1387195 - DNA, 25 bp, Homo sapien
tagtccttcaactgacagcttaaag

SEQ ID NO: 1387196 - DNA, 25 bp, Homo sapien
tcaagaatgcctcagatcagtgacc

SEQ ID NO: 1387197 - DNA, 25 bp, Homo sapien
gctgctacagatatcaaaaaggaat

SEQ ID NO: 1387198 - DNA, 25 bp, Homo sapien
ggaagtcctaaccacatcaagaatg

SEQ ID NO: 1387199 - DNA, 25 bp, Homo sapien
tcagatactgggagaacaaatctca

SEQ ID NO: 1387200 - DNA, 25 bp, Homo sapien
cttgccttttatagcaactatagca

SEQ ID NO: 1387201 - DNA, 25 bp, Homo sapien
actatagcaacagccatgagagtca

SEQ ID NO: 1387202 - DNA, 25 bp, Homo sapien
tgttgggtaagaccaggatgcaccg

SEQ ID NO: 1387203 - DNA, 25 bp, Homo sapien
ggatatggcccaagaggaaggctct

SEQ ID NO: 1387204 - DNA, 25 bp, Homo sapien
cacacaggctttctaaggatatggc

SEQ ID NO: 1387205 - DNA, 25 bp, Homo sapien
tctgcgtcacctgcactggagtcac

SEQ ID NO: 1387206 - DNA, 25 bp, Homo sapien
taccgtctgcatatgtataggaaag

SEQ ID NO: 1387207 - DNA, 25 bp, Homo sapien
gactttcaaatcagttagggtggtc

SEQ ID NO: 1387208 - DNA, 25 bp, Homo sapien
taactcagcaggtcttgtttgccca

SEQ ID NO: 1387209 - DNA, 25 bp, Homo sapien
aggccctgtgctgaataccgtctgc

SEQ ID NO: 1387210 - DNA, 25 bp, Homo sapien
tgctgatgacttacagctggaaagg

SEQ ID NO: 1387211 - DNA, 25 bp, Homo sapien
catcaaatattgaggatactggaac

SEQ ID NO: 1387212 - DNA, 25 bp, Homo sapien
tatcccaaaatgcaacccagaggct

SEQ ID NO: 1387213 - DNA, 25 bp, Homo sapien
acctttgaaatgtagcatatcccaa

SEQ ID NO: 1387214 - DNA, 25 bp, Homo sapien
ctttaaagcagggacttcactcttc

SEQ ID NO: 1387215 - DNA, 25 bp, Homo sapien
tacactttaaagcagggacttcact

SEQ ID NO: 1387216 - DNA, 25 bp, Homo sapien
gagtacactttaaagcagggacttc

SEQ ID NO: 1387217 - DNA, 25 bp, Homo sapien
cactttaaagcagggacttcactct

SEQ ID NO: 1387218 - DNA, 25 bp, Homo sapien
tccaaactctccagtgtgccacagt

SEQ ID NO: 1387219 - DNA, 25 bp, Homo sapien
gtttgcttgatcaacagagtgctgt

SEQ ID NO: 1387220 - DNA, 25 bp, Homo sapien
catttttaagggcatagtattgttt

SEQ ID NO: 1387221 - DNA, 25 bp, Homo sapien
tgaattaattactcttggagtccaa

SEQ ID NO: 1387222 - DNA, 25 bp, Homo sapien
taatattttcacactaccttcttgg

SEQ ID NO: 1387223 - DNA, 25 bp, Homo sapien
tcccctcagtagctgtcaccatgca

SEQ ID NO: 1387224 - DNA, 25 bp, Homo sapien
gtttcttctaccactaactccatgt

SEQ ID NO: 1387225 - DNA, 25 bp, Homo sapien
actccatgtctgactgcaagtgaaa

SEQ ID NO: 1387226 - DNA, 25 bp, Homo sapien
ttttaagagtctgactgaaatgtca

SEQ ID NO: 1387227 - DNA, 25 bp, Homo sapien
tccttcaatgaagtctagttcacct

SEQ ID NO: 1387228 - DNA, 25 bp, Homo sapien
aaatattggcttctaatgtcggtaa

SEQ ID NO: 1387229 - DNA, 25 bp, Homo sapien
gccattaggtacaaatcataaaggg

SEQ ID NO: 1387230 - DNA, 25 bp, Homo sapien
taaaagtaaaggtggagtctgagta

SEQ ID NO: 1387231 - DNA, 25 bp, Homo sapien
cttctggggccgccaacataggtaa

SEQ ID NO: 1387232 - DNA, 25 bp, Homo sapien
aaggtggagtctgagtatctgaaat

SEQ ID NO: 1387233 - DNA, 25 bp, Homo sapien
ctggggccgccaacataggtaaaag

SEQ ID NO: 1387234 - DNA, 25 bp, Homo sapien
tgggccctccatttggtggagtcag

SEQ ID NO: 1387235 - DNA, 25 bp, Homo sapien
aggacttgggccctccatttggtgg

SEQ ID NO: 1387236 - DNA, 25 bp, Homo sapien
ggcgggaggcgagggctagagggcg

SEQ ID NO: 1387237 - DNA, 25 bp, Homo sapien
ccgatcaggacttgggccctccatt

SEQ ID NO: 1387238 - DNA, 25 bp, Homo sapien
ggacttctggatcacgacgtcgata

SEQ ID NO: 1387239 - DNA, 25 bp, Homo sapien
gatcacgacgtcgatatccttctga

SEQ ID NO: 1387240 - DNA, 25 bp, Homo sapien
ctcagctctggacttctggatcacg

SEQ ID NO: 1387241 - DNA, 25 bp, Homo sapien
cgacgtcgatatccttctgaattcg

SEQ ID NO: 1387242 - DNA, 25 bp, Homo sapien
ggccggagagcgatcaccggctggg

SEQ ID NO: 1387243 - DNA, 25 bp, Homo sapien
cccaggctgctgcagcgccacccgc

SEQ ID NO: 1387244 - DNA, 25 bp, Homo sapien
gcggcggcagccgtgcccaggctgc

SEQ ID NO: 1387245 - DNA, 25 bp, Homo sapien
cgcgggcggcggcagccgtgcccag

SEQ ID NO: 1387246 - DNA, 25 bp, Homo sapien
ccaggctgctgcagcgccacccgcc

SEQ ID NO: 1387247 - DNA, 25 bp, Homo sapien
gccttgaaattaccccagatgtgca

SEQ ID NO: 1387248 - DNA, 25 bp, Homo sapien
tttggggcgccgtttgcgaaacaca

SEQ ID NO: 1387249 - DNA, 25 bp, Homo sapien
cgccgtttgcgaaacacagcccctt

SEQ ID NO: 1387250 - DNA, 25 bp, Homo sapien
cacctcagataacacggaaaaagcc

SEQ ID NO: 1387251 - DNA, 25 bp, Homo sapien
cagggaaagctacaatccaggtgtt

SEQ ID NO: 1387252 - DNA, 25 bp, Homo sapien
gaaagctacaatccaggtgttcaga

SEQ ID NO: 1387253 - DNA, 25 bp, Homo sapien
ttcatgagaaattgtcagaatcaac

SEQ ID NO: 1387254 - DNA, 25 bp, Homo sapien
tcaactggcacgttccagggtcttc

SEQ ID NO: 1387255 - DNA, 25 bp, Homo sapien
aattttctttaacacttatgtagtg

SEQ ID NO: 1387256 - DNA, 25 bp, Homo sapien
tcttctgtctttgcactaccattat

SEQ ID NO: 1387257 - DNA, 25 bp, Homo sapien
ccattatcatacactttacttcaaa

SEQ ID NO: 1387258 - DNA, 25 bp, Homo sapien
ttaacacttatgtagtgcaaatgtg

SEQ ID NO: 1387259 - DNA, 25 bp, Homo sapien
atgcatctgacctcacaccgggata

SEQ ID NO: 1387260 - DNA, 25 bp, Homo sapien
gtgaccagttccaaagacgtcttct

SEQ ID NO: 1387261 - DNA, 25 bp, Homo sapien
tcttctcagtttagttccaggacaa

SEQ ID NO: 1387262 - DNA, 25 bp, Homo sapien
ggatacttctccctgtgtgaccagt

SEQ ID NO: 1387263 - DNA, 25 bp, Homo sapien
tggaggatagttttcgaattttgtg

SEQ ID NO: 1387264 - DNA, 25 bp, Homo sapien
aatatgatggaggatagttttcgaa

SEQ ID NO: 1387265 - DNA, 25 bp, Homo sapien
attttgtgtcgcagtttttgcaaag

SEQ ID NO: 1387266 - DNA, 25 bp, Homo sapien
tcgaattttgtgtcgcagtttttgc

SEQ ID NO: 1387267 - DNA, 25 bp, Homo sapien
ttcactatctttcttcacctttgac

SEQ ID NO: 1387268 - DNA, 25 bp, Homo sapien
cactatctttcttcacctttgacat

SEQ ID NO: 1387269 - DNA, 25 bp, Homo sapien
tcactatctttcttcacctttgaca

SEQ ID NO: 1387270 - DNA, 25 bp, Homo sapien
cttcactatctttcttcacctttga

SEQ ID NO: 1387271 - DNA, 25 bp, Homo sapien
tattcaaggccgctttccttctctg

SEQ ID NO: 1387272 - DNA, 25 bp, Homo sapien
acagtgaacactgttgggtgtggtt

SEQ ID NO: 1387273 - DNA, 25 bp, Homo sapien
agtaagatcatggatgacagtgaac

SEQ ID NO: 1387274 - DNA, 25 bp, Homo sapien
cgttggactttcttattcaaggccg

SEQ ID NO: 1387275 - DNA, 25 bp, Homo sapien
attgagaggctttagccctactcct

SEQ ID NO: 1387276 - DNA, 25 bp, Homo sapien
gcctccacttgataccaatacttag

SEQ ID NO: 1387277 - DNA, 25 bp, Homo sapien
gaggctttagccctactcctctcag

SEQ ID NO: 1387278 - DNA, 25 bp, Homo sapien
cttcagcctccacttgataccaata

SEQ ID NO: 1387279 - DNA, 25 bp, Homo sapien
accctgaggagccagctggcgcagg

SEQ ID NO: 1387280 - DNA, 25 bp, Homo sapien
cctgacgcgctgagcgggaccctga

SEQ ID NO: 1387281 - DNA, 25 bp, Homo sapien
gccttgggctctcctgacgcgctga

SEQ ID NO: 1387282 - DNA, 25 bp, Homo sapien
ttgggctctcctgacgcgctgagcg

SEQ ID NO: 1387283 - DNA, 25 bp, Homo sapien
gggtcgcgaggctgcgtgagcatct

SEQ ID NO: 1387284 - DNA, 25 bp, Homo sapien
ggtcgcgaggctgcgtgagcatctg

SEQ ID NO: 1387285 - DNA, 25 bp, Homo sapien
ggcgccaggagcgggccgaggcgcg

SEQ ID NO: 1387286 - DNA, 25 bp, Homo sapien
gcgccaggagcgggccgaggcgcgg

SEQ ID NO: 1387287 - DNA, 25 bp, Homo sapien
tggcgccaggagcgggccgaggcgc

SEQ ID NO: 1387288 - DNA, 25 bp, Homo sapien
cgccaggagcgggccgaggcgcggc

SEQ ID NO: 1387289 - DNA, 25 bp, Homo sapien
tgccgtctggatgggaagttacggt

SEQ ID NO: 1387290 - DNA, 25 bp, Homo sapien
tctggatgggaagttacggtttaca

SEQ ID NO: 1387291 - DNA, 25 bp, Homo sapien
ctgggtcgagctgcggctgtcgcaa

SEQ ID NO: 1387292 - DNA, 25 bp, Homo sapien
gatgggaagttacggtttacagcga

SEQ ID NO: 1387293 - DNA, 25 bp, Homo sapien
agacgtttggcgtggttttcttgct

SEQ ID NO: 1387294 - DNA, 25 bp, Homo sapien
gcgtttgtagccatcactgaatcac

SEQ ID NO: 1387295 - DNA, 25 bp, Homo sapien
actgaatcacctcatgactagcggg

SEQ ID NO: 1387296 - DNA, 25 bp, Homo sapien
tgatgggcaacacatgaggcgcgtt

SEQ ID NO: 1387297 - DNA, 25 bp, Homo sapien
cgctcttttaatggtgcttattcat

SEQ ID NO: 1387298 - DNA, 25 bp, Homo sapien
tgaatggagattctctaactttttt

SEQ ID NO: 1387299 - DNA, 25 bp, Homo sapien
gtagcttgccttttcgctcttttaa

SEQ ID NO: 1387300 - DNA, 25 bp, Homo sapien
gccttttcgctcttttaatggtgct

SEQ ID NO: 1387301 - DNA, 25 bp, Homo sapien
tactgtagcttaatgtaagtcctga

SEQ ID NO: 1387302 - DNA, 25 bp, Homo sapien
taagtcctgaagttggtagtgccaa

SEQ ID NO: 1387303 - DNA, 25 bp, Homo sapien
cttttccatgcatctatatgtgtgt

SEQ ID NO: 1387304 - DNA, 25 bp, Homo sapien
acttcatcatgagaacctggttgag

SEQ ID NO: 1387305 - DNA, 25 bp, Homo sapien
caagtgcctgaaatacccctcattg

SEQ ID NO: 1387306 - DNA, 25 bp, Homo sapien
cagccacataaaggtgagggcaata

SEQ ID NO: 1387307 - DNA, 25 bp, Homo sapien
tcttcttcaggtggcaagggctctg

SEQ ID NO: 1387308 - DNA, 25 bp, Homo sapien
aaattcaagaggagagacaggcacc

SEQ ID NO: 1387309 - DNA, 25 bp, Homo sapien
caaacggacctgaagtgacagtggc

SEQ ID NO: 1387310 - DNA, 25 bp, Homo sapien
taattgaaccactcagtcggtactg

SEQ ID NO: 1387311 - DNA, 25 bp, Homo sapien
cagtctgttgtaccgaaattatgcc

SEQ ID NO: 1387312 - DNA, 25 bp, Homo sapien
acaaggcccctaaaagcaattggtg

SEQ ID NO: 1387313 - DNA, 25 bp, Homo sapien
gccacacacaggaggggtatgggtg

SEQ ID NO: 1387314 - DNA, 25 bp, Homo sapien
gaaggaacaaaggaggtcagtactg

SEQ ID NO: 1387315 - DNA, 25 bp, Homo sapien
aaggaacaaaggaggtcagtactgg

SEQ ID NO: 1387316 - DNA, 25 bp, Homo sapien
ttgtcgatgaaattgccatggatac

SEQ ID NO: 1387317 - DNA, 25 bp, Homo sapien
tcttcatacgaagatccgtggtcaa

SEQ ID NO: 1387318 - DNA, 25 bp, Homo sapien
atacgaagatccgtggtcaattccc

SEQ ID NO: 1387319 - DNA, 25 bp, Homo sapien
tcatacgaagatccgtggtcaattc

SEQ ID NO: 1387320 - DNA, 25 bp, Homo sapien
tgctcttcatacgaagatccgtggt

SEQ ID NO: 1387321 - DNA, 25 bp, Homo sapien
acctcagctggcgtgatgttgagga

SEQ ID NO: 1387322 - DNA, 25 bp, Homo sapien
caaagcttgaccagtctttgccaac

SEQ ID NO: 1387323 - DNA, 25 bp, Homo sapien
gacaaagcttgaccagtctttgcca

SEQ ID NO: 1387324 - DNA, 25 bp, Homo sapien
ggcgtgatgttgaggaaggttttcc

SEQ ID NO: 1387325 - DNA, 25 bp, Homo sapien
gcccagatggaaggcgggtccttgt

SEQ ID NO: 1387326 - DNA, 25 bp, Homo sapien
ggcggcccagatggaaggcgggtcc

SEQ ID NO: 1387327 - DNA, 25 bp, Homo sapien
ggacggcggcccagatggaaggcgg

SEQ ID NO: 1387328 - DNA, 25 bp, Homo sapien
ccagatggaaggcgggtccttgtta

SEQ ID NO: 1387329 - DNA, 25 bp, Homo sapien
ggtcccgtccgccacgaggctgtag

SEQ ID NO: 1387330 - DNA, 25 bp, Homo sapien
cgtccgccacgaggctgtagatgga

SEQ ID NO: 1387331 - DNA, 25 bp, Homo sapien
tcccgtccgccacgaggctgtagat

SEQ ID NO: 1387332 - DNA, 25 bp, Homo sapien
ccgtccgccacgaggctgtagatgg

SEQ ID NO: 1387333 - DNA, 25 bp, Homo sapien
gtcctcctcgccacgactctgctag

SEQ ID NO: 1387334 - DNA, 25 bp, Homo sapien
tgtcctcctcgccacgactctgcta

SEQ ID NO: 1387335 - DNA, 25 bp, Homo sapien
ctcctcgccacgactctgctagctg

SEQ ID NO: 1387336 - DNA, 25 bp, Homo sapien
ctcgccacgactctgctagctgtgc

SEQ ID NO: 1387337 - DNA, 25 bp, Homo sapien
aggcacctcgaaccttgtttttgtg

SEQ ID NO: 1387338 - DNA, 25 bp, Homo sapien
cacctcgaaccttgtttttgtggtg

SEQ ID NO: 1387339 - DNA, 25 bp, Homo sapien
cacctcttctgccacaaacgtcagc

SEQ ID NO: 1387340 - DNA, 25 bp, Homo sapien
tccacctcttctgccacaaacgtca

SEQ ID NO: 1387341 - DNA, 25 bp, Homo sapien
cctcttctgccacaaacgtcagcat

SEQ ID NO: 1387342 - DNA, 25 bp, Homo sapien
acctcttctgccacaaacgtcagca

SEQ ID NO: 1387343 - DNA, 25 bp, Homo sapien
gtgatgaatgatgtcctgtcttctc

SEQ ID NO: 1387344 - DNA, 25 bp, Homo sapien
cttctctctgagacactaaatgctc

SEQ ID NO: 1387345 - DNA, 25 bp, Homo sapien
gtcatgaaagtgatgaatgatgtcc

SEQ ID NO: 1387346 - DNA, 25 bp, Homo sapien
tctgagacactaaatgctctctcca

SEQ ID NO: 1387347 - DNA, 25 bp, Homo sapien
ctgttttctccaagaggctcaatca

SEQ ID NO: 1387348 - DNA, 25 bp, Homo sapien
tgttttctccaagaggctcaatcat

SEQ ID NO: 1387349 - DNA, 25 bp, Homo sapien
ccatggcagccatggtctgttgcag

SEQ ID NO: 1387350 - DNA, 25 bp, Homo sapien
tgcactgaataccagctgctctctt

SEQ ID NO: 1387351 - DNA, 25 bp, Homo sapien
ccagtgcactgaataccagctgctc

SEQ ID NO: 1387352 - DNA, 25 bp, Homo sapien
atggcagccatggtctgttgcagag

SEQ ID NO: 1387353 - DNA, 25 bp, Homo sapien
cctggttcacgctcaggaacgagag

SEQ ID NO: 1387354 - DNA, 25 bp, Homo sapien
tgtttaactttgactcaggcaggga

SEQ ID NO: 1387355 - DNA, 25 bp, Homo sapien
tataagtccgtatcgcagcaacact

SEQ ID NO: 1387356 - DNA, 25 bp, Homo sapien
tgccatcagatgagccaggtgaact

SEQ ID NO: 1387357 - DNA, 25 bp, Homo sapien
catgttacctggtgatataagtccg

SEQ ID NO: 1387358 - DNA, 25 bp, Homo sapien
ccacgtatctctgggtagctacaaa

SEQ ID NO: 1387359 - DNA, 25 bp, Homo sapien
gtatctctgggtagctacaaaattc

SEQ ID NO: 1387360 - DNA, 25 bp, Homo sapien
ttaatttgaaccacgtatctctggg

SEQ ID NO: 1387361 - DNA, 25 bp, Homo sapien
gctacaaaattcctcagggatttca

SEQ ID NO: 1387362 - DNA, 25 bp, Homo sapien
ggaatagaagttgaaactaacataa

SEQ ID NO: 1387363 - DNA, 25 bp, Homo sapien
cccagtatagggctaaatggaatcc

SEQ ID NO: 1387364 - DNA, 25 bp, Homo sapien
tagggctaaatggaatccctgaagg

SEQ ID NO: 1387365 - DNA, 25 bp, Homo sapien
tttaaaacatactggatgaaagatt

SEQ ID NO: 1387366 - DNA, 25 bp, Homo sapien
cagcatggaattctcaggcctatga

SEQ ID NO: 1387367 - DNA, 25 bp, Homo sapien
tctcaggcctatgacatcctagggc

SEQ ID NO: 1387368 - DNA, 25 bp, Homo sapien
tatgacatcctagggcctcatccac

SEQ ID NO: 1387369 - DNA, 25 bp, Homo sapien
gaattctcaggcctatgacatccta

SEQ ID NO: 1387370 - DNA, 25 bp, Homo sapien
tgggaaagtggatgacttcagatcc

SEQ ID NO: 1387371 - DNA, 25 bp, Homo sapien
gaggagtctcccactgacttggccc

SEQ ID NO: 1387372 - DNA, 25 bp, Homo sapien
gcctcaatgctttaggagcccccag

SEQ ID NO: 1387373 - DNA, 25 bp, Homo sapien
ggccctgggtcaatgcccaaacatg

SEQ ID NO: 1387374 - DNA, 25 bp, Homo sapien
gaatcacagctatggtgaagccaca

SEQ ID NO: 1387375 - DNA, 25 bp, Homo sapien
gagaatgacagaacgtgaatcacag

SEQ ID NO: 1387376 - DNA, 25 bp, Homo sapien
tgtccaatgggctaaatcagaacac

SEQ ID NO: 1387377 - DNA, 25 bp, Homo sapien
gatgaaaaacctaatctgccagggt

SEQ ID NO: 1387378 - DNA, 25 bp, Homo sapien
gctgggtcaattgctacattgttat

SEQ ID NO: 1387379 - DNA, 25 bp, Homo sapien
tttgctgggtcaattgctacattgt

SEQ ID NO: 1387380 - DNA, 25 bp, Homo sapien
tgctgggtcaattgctacattgtta

SEQ ID NO: 1387381 - DNA, 25 bp, Homo sapien
gggtcaattgctacattgttataac

SEQ ID NO: 1387382 - DNA, 25 bp, Homo sapien
tcaggcactctctccttgagcaggg

SEQ ID NO: 1387383 - DNA, 25 bp, Homo sapien
ggagagcgggacatcttcatgtgta

SEQ ID NO: 1387384 - DNA, 25 bp, Homo sapien
cttcatgtgtagtaccaggaagaca

SEQ ID NO: 1387385 - DNA, 25 bp, Homo sapien
acatcttcatgtgtagtaccaggaa

SEQ ID NO: 1387386 - DNA, 25 bp, Homo sapien
tggtgaggggactgtcctggtcacc

SEQ ID NO: 1387387 - DNA, 25 bp, Homo sapien
gaaagaacaggacatctccttaagg

SEQ ID NO: 1387388 - DNA, 25 bp, Homo sapien
accagacagaaatggggtctgggcc

SEQ ID NO: 1387389 - DNA, 25 bp, Homo sapien
taaggaaaggtcctgagtcaggtct

SEQ ID NO: 1387390 - DNA, 25 bp, Homo sapien
cagtaaaagaacgacagcagtaaag

SEQ ID NO: 1387391 - DNA, 25 bp, Homo sapien
ttcagtaaaagaacgacagcagtaa

SEQ ID NO: 1387392 - DNA, 25 bp, Homo sapien
agtaaaagaacgacagcagtaaagg

SEQ ID NO: 1387393 - DNA, 25 bp, Homo sapien
tcagtaaaagaacgacagcagtaaa

SEQ ID NO: 1387394 - DNA, 25 bp, Homo sapien
tggtcgctgggtccgggactccaat

SEQ ID NO: 1387395 - DNA, 25 bp, Homo sapien
tgggtccgggactccaattgcacac

SEQ ID NO: 1387396 - DNA, 25 bp, Homo sapien
ctggtcgctgggtccgggactccaa

SEQ ID NO: 1387397 - DNA, 25 bp, Homo sapien
gggactccaattgcacacagccagt

SEQ ID NO: 1387398 - DNA, 25 bp, Homo sapien
tcactgtattcagagtccaaagtgc

SEQ ID NO: 1387399 - DNA, 25 bp, Homo sapien
actgtattcagagtccaaagtgctc

SEQ ID NO: 1387400 - DNA, 25 bp, Homo sapien
gacttgaactctgatcactgtattc

SEQ ID NO: 1387401 - DNA, 25 bp, Homo sapien
aaggtcccagtgagacttgaactct

SEQ ID NO: 1387402 - DNA, 25 bp, Homo sapien
taatggctgacaccaagcaagtggg

SEQ ID NO: 1387403 - DNA, 25 bp, Homo sapien
tgattgtgagaacaggacttgggac

SEQ ID NO: 1387404 - DNA, 25 bp, Homo sapien
aaatttctgcaaaccgtagtgctat

SEQ ID NO: 1387405 - DNA, 25 bp, Homo sapien
cagagaagagcccttgaggcctccc

SEQ ID NO: 1387406 - DNA, 25 bp, Homo sapien
cagggcatatctgaataacaggcag

SEQ ID NO: 1387407 - DNA, 25 bp, Homo sapien
tgcctgacagccctaaaggcagcag

SEQ ID NO: 1387408 - DNA, 25 bp, Homo sapien
taaaggcagcagtagttctcccagc

SEQ ID NO: 1387409 - DNA, 25 bp, Homo sapien
catcatacaagtgggtgccccgctg

SEQ ID NO: 1387410 - DNA, 25 bp, Homo sapien
agctcaccgagcatgagctgaagca

SEQ ID NO: 1387411 - DNA, 25 bp, Homo sapien
acccaggggctgttccaagatggct

SEQ ID NO: 1387412 - DNA, 25 bp, Homo sapien
gggtcactcccatgctaatacagca

SEQ ID NO: 1387413 - DNA, 25 bp, Homo sapien
gtgcagctcaccgagcatgagctga

SEQ ID NO: 1387414 - DNA, 25 bp, Homo sapien
gggctaatattcgacattcgtaaag

SEQ ID NO: 1387415 - DNA, 25 bp, Homo sapien
gctaatattcgacattcgtaaagaa

SEQ ID NO: 1387416 - DNA, 25 bp, Homo sapien
gagggagtgggggctaatattcgac

SEQ ID NO: 1387417 - DNA, 25 bp, Homo sapien
tgggggctaatattcgacattcgta

SEQ ID NO: 1387418 - DNA, 25 bp, Homo sapien
catttttgtactacagggcacccta

SEQ ID NO: 1387419 - DNA, 25 bp, Homo sapien
taggcccaggtacactgcaattctt

SEQ ID NO: 1387420 - DNA, 25 bp, Homo sapien
caaagtgggctgacgagttccctaa

SEQ ID NO: 1387421 - DNA, 25 bp, Homo sapien
gaaggataaggtatttattccagcc

SEQ ID NO: 1387422 - DNA, 25 bp, Homo sapien
atcagtctgcaatttccccgagata

SEQ ID NO: 1387423 - DNA, 25 bp, Homo sapien
ttgggaccacgtgcccctttcatcg

SEQ ID NO: 1387424 - DNA, 25 bp, Homo sapien
ccgagataagatagggtgacaaaat

SEQ ID NO: 1387425 - DNA, 25 bp, Homo sapien
cagcattgggaccacgtgccccttt

SEQ ID NO: 1387426 - DNA, 25 bp, Homo sapien
tgctgggccaagtggaccttggcta

SEQ ID NO: 1387427 - DNA, 25 bp, Homo sapien
agtgctgggccaagtggaccttggc

SEQ ID NO: 1387428 - DNA, 25 bp, Homo sapien
gctgggccaagtggaccttggctaa

SEQ ID NO: 1387429 - DNA, 25 bp, Homo sapien
ttagtgctgggccaagtggaccttg

SEQ ID NO: 1387430 - DNA, 25 bp, Homo sapien
accaggatacatctctgactccctc

SEQ ID NO: 1387431 - DNA, 25 bp, Homo sapien
ttggaggaatgaggcccagatgctc

SEQ ID NO: 1387432 - DNA, 25 bp, Homo sapien
agctccaccaggatacatctctgac

SEQ ID NO: 1387433 - DNA, 25 bp, Homo sapien
cttctggaccctcccgtggacttgg

SEQ ID NO: 1387434 - DNA, 25 bp, Homo sapien
ctgcacaaaagggggacaggcccac

SEQ ID NO: 1387435 - DNA, 25 bp, Homo sapien
gacttctggtggctgcgcttcttgc

SEQ ID NO: 1387436 - DNA, 25 bp, Homo sapien
taaggacttctggtggctgcgcttc

SEQ ID NO: 1387437 - DNA, 25 bp, Homo sapien
tttaaggacttctggtggctgcgct

SEQ ID NO: 1387438 - DNA, 25 bp, Homo sapien
gctgttttaaggacttctggtggct

SEQ ID NO: 1387439 - DNA, 25 bp, Homo sapien
ctggaaggcaagggtcacaaggctg

SEQ ID NO: 1387440 - DNA, 25 bp, Homo sapien
caaggctggagtacatggcagagcc

SEQ ID NO: 1387441 - DNA, 25 bp, Homo sapien
gaaggcaagggtcacaaggctggag

SEQ ID NO: 1387442 - DNA, 25 bp, Homo sapien
acaaggctggagtacatggcagagc

SEQ ID NO: 1387443 - DNA, 25 bp, Homo sapien
taagagcatgcgctgcagtctggag

SEQ ID NO: 1387444 - DNA, 25 bp, Homo sapien
caggagcacggtgagagccagttaa

SEQ ID NO: 1387445 - DNA, 25 bp, Homo sapien
tgtccagttgccataatgagggtgt

SEQ ID NO: 1387446 - DNA, 25 bp, Homo sapien
gagtgagagctacgtggtgaccaaa

SEQ ID NO: 1387447 - DNA, 25 bp, Homo sapien
gaaccaagatacaggggcaggagct

SEQ ID NO: 1387448 - DNA, 25 bp, Homo sapien
tgatggggacagaaactagcaggat

SEQ ID NO: 1387449 - DNA, 25 bp, Homo sapien
gggacagaaactagcaggatgctca

SEQ ID NO: 1387450 - DNA, 25 bp, Homo sapien
aaggagagatgatgacaatgtgaga

SEQ ID NO: 1387451 - DNA, 25 bp, Homo sapien
gacctgtgatcttgcaagtggaccc

SEQ ID NO: 1387452 - DNA, 25 bp, Homo sapien
ggacctgtgatcttgcaagtggacc

SEQ ID NO: 1387453 - DNA, 25 bp, Homo sapien
gccttctttaaaacatcatgtgttc

SEQ ID NO: 1387454 - DNA, 25 bp, Homo sapien
tctaagttagtccttgccttcttta

SEQ ID NO: 1387455 - DNA, 25 bp, Homo sapien
ctctaagttagtccttgccttcttt

SEQ ID NO: 1387456 - DNA, 25 bp, Homo sapien
tttaaaacatcatgtgttctggtta

SEQ ID NO: 1387457 - DNA, 25 bp, Homo sapien
ccctacttgcttagcatgagaattc

SEQ ID NO: 1387458 - DNA, 25 bp, Homo sapien
caccagcagaaattaaccctacttg

SEQ ID NO: 1387459 - DNA, 25 bp, Homo sapien
ttctttctggctattcagcttggag

SEQ ID NO: 1387460 - DNA, 25 bp, Homo sapien
accacagagtagaaaccaccagcag

SEQ ID NO: 1387461 - DNA, 25 bp, Homo sapien
ttgtgctctgaaggagtcgctcctg

SEQ ID NO: 1387462 - DNA, 25 bp, Homo sapien
ttggcgttcttcagatgctcagttg

SEQ ID NO: 1387463 - DNA, 25 bp, Homo sapien
caatgaactgttccatgctctcctt

SEQ ID NO: 1387464 - DNA, 25 bp, Homo sapien
gctcagttgtgctctgaaggagtcg

SEQ ID NO: 1387465 - DNA, 25 bp, Homo sapien
tacagtcttctcaactctcttgaac

SEQ ID NO: 1387466 - DNA, 25 bp, Homo sapien
caactctcttgaactggatttcctc

SEQ ID NO: 1387467 - DNA, 25 bp, Homo sapien
tgtggctctttccaattcaaagaag

SEQ ID NO: 1387468 - DNA, 25 bp, Homo sapien
caaagaaggattctacagtcttctc

SEQ ID NO: 1387469 - DNA, 25 bp, Homo sapien
tcatgaatacctttgctgcctagca

SEQ ID NO: 1387470 - DNA, 25 bp, Homo sapien
gctgactcctctagggcatggtgca

SEQ ID NO: 1387471 - DNA, 25 bp, Homo sapien
agggccgctctccagaacatggtga

SEQ ID NO: 1387472 - DNA, 25 bp, Homo sapien
ggtgctgctccgaagctcatgaata

SEQ ID NO: 1387473 - DNA, 25 bp, Homo sapien
caggagcggagagattactttcttc

SEQ ID NO: 1387474 - DNA, 25 bp, Homo sapien
acaggagcggagagattactttctt

SEQ ID NO: 1387475 - DNA, 25 bp, Homo sapien
aggagcggagagattactttcttcc

SEQ ID NO: 1387476 - DNA, 25 bp, Homo sapien
cacaggagcggagagattactttct

SEQ ID NO: 1387477 - DNA, 25 bp, Homo sapien
tgctccctttaccaggaatgccttc

SEQ ID NO: 1387478 - DNA, 25 bp, Homo sapien
tctcagaactaaggtgctgctccct

SEQ ID NO: 1387479 - DNA, 25 bp, Homo sapien
tttgcagctctcagaactaaggtgc

SEQ ID NO: 1387480 - DNA, 25 bp, Homo sapien
ctaaggtgctgctccctttaccagg

SEQ ID NO: 1387481 - DNA, 25 bp, Homo sapien
ttgggcttcaaggccagggaagctg

SEQ ID NO: 1387482 - DNA, 25 bp, Homo sapien
tgggcttcaaggccagggaagctgc

SEQ ID NO: 1387483 - DNA, 25 bp, Homo sapien
aagagacactatctttttgaccagc

SEQ ID NO: 1387484 - DNA, 25 bp, Homo sapien
gctgtcttagggcactgtagtcatc

SEQ ID NO: 1387485 - DNA, 25 bp, Homo sapien
cttagggcactgtagtcatcaatgt

SEQ ID NO: 1387486 - DNA, 25 bp, Homo sapien
gagacactatctttttgaccagcag

SEQ ID NO: 1387487 - DNA, 25 bp, Homo sapien
catttgctctgttgattatgggcgt

SEQ ID NO: 1387488 - DNA, 25 bp, Homo sapien
tttctgagccaggagtagaggaagc

SEQ ID NO: 1387489 - DNA, 25 bp, Homo sapien
ttgctctgttgattatgggcgtttc

SEQ ID NO: 1387490 - DNA, 25 bp, Homo sapien
gagccaggagtagaggaagcagagc

SEQ ID NO: 1387491 - DNA, 25 bp, Homo sapien
acatcccggactggaggggacacag

SEQ ID NO: 1387492 - DNA, 25 bp, Homo sapien
cggactggaggggacacagctgaat

SEQ ID NO: 1387493 - DNA, 25 bp, Homo sapien
cccggactggaggggacacagctga

SEQ ID NO: 1387494 - DNA, 25 bp, Homo sapien
caacatcccggactggaggggacac

SEQ ID NO: 1387495 - DNA, 25 bp, Homo sapien
ctgggaagttctggttaatggagga

SEQ ID NO: 1387496 - DNA, 25 bp, Homo sapien
ctgcttgtttccagggtcagtgctg

SEQ ID NO: 1387497 - DNA, 25 bp, Homo sapien
gcagctgcttgtttccagggtcagt

SEQ ID NO: 1387498 - DNA, 25 bp, Homo sapien
ggctgggaagttctggttaatggag

SEQ ID NO: 1387499 - DNA, 25 bp, Homo sapien
gcagacaattgttcccctgaatgct

SEQ ID NO: 1387500 - DNA, 25 bp, Homo sapien
agagctcgtacctctgccaccaggt

SEQ ID NO: 1387501 - DNA, 25 bp, Homo sapien
tcaaagggatttggtgacaggcatc

SEQ ID NO: 1387502 - DNA, 25 bp, Homo sapien
cagctgcagtcgcagacaattgttc

SEQ ID NO: 1387503 - DNA, 25 bp, Homo sapien
taattaggaatgatcaggccggatc

SEQ ID NO: 1387504 - DNA, 25 bp, Homo sapien
tacttaagctattcgcccagcctgg

SEQ ID NO: 1387505 - DNA, 25 bp, Homo sapien
tgagcgccagatgtcactagggaaa

SEQ ID NO: 1387506 - DNA, 25 bp, Homo sapien
tgtttgagagctcctactgggagcc

SEQ ID NO: 1387507 - DNA, 25 bp, Homo sapien
ctctgactggagggactcaaagagc

SEQ ID NO: 1387508 - DNA, 25 bp, Homo sapien
caacttgggagtgacaaggcattcc

SEQ ID NO: 1387509 - DNA, 25 bp, Homo sapien
tacagggcttatgctgggaccaagc

SEQ ID NO: 1387510 - DNA, 25 bp, Homo sapien
tacagttagggttacatctgagccc

SEQ ID NO: 1387511 - DNA, 25 bp, Homo sapien
tctaattggaagcatgggaaccctt

SEQ ID NO: 1387512 - DNA, 25 bp, Homo sapien
tggagggaaagacgttcctccctga

SEQ ID NO: 1387513 - DNA, 25 bp, Homo sapien
cctccctgaaatgcaagacctcttg

SEQ ID NO: 1387514 - DNA, 25 bp, Homo sapien
ggtgggatcgagaggacagcagagc

SEQ ID NO: 1387515 - DNA, 25 bp, Homo sapien
tccagctcttgaaggtgggatcgag

SEQ ID NO: 1387516 - DNA, 25 bp, Homo sapien
ttttgttatcgtcccccagcagtga

SEQ ID NO: 1387517 - DNA, 25 bp, Homo sapien
aacttttgttatcgtcccccagcag

SEQ ID NO: 1387518 - DNA, 25 bp, Homo sapien
gttatcgtcccccagcagtgacctt

SEQ ID NO: 1387519 - DNA, 25 bp, Homo sapien
taacttttgttatcgtcccccagca

SEQ ID NO: 1387520 - DNA, 25 bp, Homo sapien
ccaggccctgactgtagaagttaga

SEQ ID NO: 1387521 - DNA, 25 bp, Homo sapien
cattgcagagctgaggtatggactc

SEQ ID NO: 1387522 - DNA, 25 bp, Homo sapien
ctcattgcagagctgaggtatggac

SEQ ID NO: 1387523 - DNA, 25 bp, Homo sapien
ggactccaggccctgactgtagaag

SEQ ID NO: 1387524 - DNA, 25 bp, Homo sapien
ccagaaagtagacatttgggtaaca

SEQ ID NO: 1387525 - DNA, 25 bp, Homo sapien
tgtcccagaaagtagacatttgggt

SEQ ID NO: 1387526 - DNA, 25 bp, Homo sapien
tcccagaaagtagacatttgggtaa

SEQ ID NO: 1387527 - DNA, 25 bp, Homo sapien
ctgtcccagaaagtagacatttggg

SEQ ID NO: 1387528 - DNA, 25 bp, Homo sapien
gaggacccttacagacctggttcca

SEQ ID NO: 1387529 - DNA, 25 bp, Homo sapien
tagggatgacagtacttgcccacct

SEQ ID NO: 1387530 - DNA, 25 bp, Homo sapien
cacatgccgtaactgcaatggtgca

SEQ ID NO: 1387531 - DNA, 25 bp, Homo sapien
taggcaggacaacaacatatggaaa

SEQ ID NO: 1387532 - DNA, 25 bp, Homo sapien
gaggtcagccggtgttccagttgct

SEQ ID NO: 1387533 - DNA, 25 bp, Homo sapien
ttccacgagcagtagaggtcagccg

SEQ ID NO: 1387534 - DNA, 25 bp, Homo sapien
cccttccacgagcagtagaggtcag

SEQ ID NO: 1387535 - DNA, 25 bp, Homo sapien
agcagtagaggtcagccggtgttcc

SEQ ID NO: 1387536 - DNA, 25 bp, Homo sapien
tgggagatggagaatcctggttact

SEQ ID NO: 1387537 - DNA, 25 bp, Homo sapien
cggccaaaccaccaggacatgaaga

SEQ ID NO: 1387538 - DNA, 25 bp, Homo sapien
gtggggctcggctaggggacctgca

SEQ ID NO: 1387539 - DNA, 25 bp, Homo sapien
acctgcagcaagacctgtaaatatc

SEQ ID NO: 1387540 - DNA, 25 bp, Homo sapien
aggtagtaggaagagtcggcttcca

SEQ ID NO: 1387541 - DNA, 25 bp, Homo sapien
aggaagagtcggcttccaagtcgtt

SEQ ID NO: 1387542 - DNA, 25 bp, Homo sapien
agttgaggtagtaggaagagtcggc

SEQ ID NO: 1387543 - DNA, 25 bp, Homo sapien
gagtcggcttccaagtcgttgctca

SEQ ID NO: 1387544 - DNA, 25 bp, Homo sapien
ctgtggaagcaggaggaacagtgct

SEQ ID NO: 1387545 - DNA, 25 bp, Homo sapien
tgtggaagcaggaggaacagtgctg

SEQ ID NO: 1387546 - DNA, 25 bp, Homo sapien
gtggaagcaggaggaacagtgctgg

SEQ ID NO: 1387547 - DNA, 25 bp, Homo sapien
tggtgtctcacagcagccaaggagg

SEQ ID NO: 1387548 - DNA, 25 bp, Homo sapien
gtgtctcacagcagccaaggaggag

SEQ ID NO: 1387549 - DNA, 25 bp, Homo sapien
tgcagcatctgtagctcctgctgag

SEQ ID NO: 1387550 - DNA, 25 bp, Homo sapien
tcagccaaggagaccactggtgtct

SEQ ID NO: 1387551 - DNA, 25 bp, Homo sapien
ttgggtatggagtgaaaatgaaagc

SEQ ID NO: 1387552 - DNA, 25 bp, Homo sapien
agcttgggtatggagtgaaaatgaa

SEQ ID NO: 1387553 - DNA, 25 bp, Homo sapien
cagcttgggtatggagtgaaaatga

SEQ ID NO: 1387554 - DNA, 25 bp, Homo sapien
gcttgggtatggagtgaaaatgaaa

SEQ ID NO: 1387555 - DNA, 25 bp, Homo sapien
atatatcctctgtgttcatcttgaa

SEQ ID NO: 1387556 - DNA, 25 bp, Homo sapien
catatatcctctgtgttcatcttga

SEQ ID NO: 1387557 - DNA, 25 bp, Homo sapien
gcatatatcctctgtgttcatcttg

SEQ ID NO: 1387558 - DNA, 25 bp, Homo sapien
gttggattcggccttagccccctga

SEQ ID NO: 1387559 - DNA, 25 bp, Homo sapien
tgttggattcggccttagccccctg

SEQ ID NO: 1387560 - DNA, 25 bp, Homo sapien
ctgttggattcggccttagccccct

SEQ ID NO: 1387561 - DNA, 25 bp, Homo sapien
ctttcttctcttcatagtgtgtgta

SEQ ID NO: 1387562 - DNA, 25 bp, Homo sapien
tcttctcttcatagtgtgtgtactc

SEQ ID NO: 1387563 - DNA, 25 bp, Homo sapien
gagggtgtgagggaccgagcatcca

SEQ ID NO: 1387564 - DNA, 25 bp, Homo sapien
ctcttcatagtgtgtgtactcgctg

SEQ ID NO: 1387565 - DNA, 25 bp, Homo sapien
ctgagggccagtggctcaagtccag

SEQ ID NO: 1387566 - DNA, 25 bp, Homo sapien
tgatctttctcacttttatgatcct

SEQ ID NO: 1387567 - DNA, 25 bp, Homo sapien
tcaagtccagcttgatctttctcac

SEQ ID NO: 1387568 - DNA, 25 bp, Homo sapien
aagtccagcttgatctttctcactt

SEQ ID NO: 1387569 - DNA, 25 bp, Homo sapien
caatgtagcccttgaactactgcag

SEQ ID NO: 1387570 - DNA, 25 bp, Homo sapien
ctttactcccttggatagtcgctgg

SEQ ID NO: 1387571 - DNA, 25 bp, Homo sapien
ggctcccaagtctgatcctacttta

SEQ ID NO: 1387572 - DNA, 25 bp, Homo sapien
gaaattctgagtagaagaccccaat

SEQ ID NO: 1387573 - DNA, 25 bp, Homo sapien
gccgggtgataagataacaaatacc

SEQ ID NO: 1387574 - DNA, 25 bp, Homo sapien
catgccgggtgataagataacaaat

SEQ ID NO: 1387575 - DNA, 25 bp, Homo sapien
tgccgggtgataagataacaaatac

SEQ ID NO: 1387576 - DNA, 25 bp, Homo sapien
cgggtgataagataacaaatacctc

SEQ ID NO: 1387577 - DNA, 25 bp, Homo sapien
ccaccacgcctggtcagcagttgta

SEQ ID NO: 1387578 - DNA, 25 bp, Homo sapien
accacgcctggtcagcagttgtatt

SEQ ID NO: 1387579 - DNA, 25 bp, Homo sapien
caccacgcctggtcagcagttgtat

SEQ ID NO: 1387580 - DNA, 25 bp, Homo sapien
tgttgagccccggcgtccctgctca

SEQ ID NO: 1387581 - DNA, 25 bp, Homo sapien
tagccagtgttgagccccggcgtcc

SEQ ID NO: 1387582 - DNA, 25 bp, Homo sapien
agtgttgagccccggcgtccctgct

SEQ ID NO: 1387583 - DNA, 25 bp, Homo sapien
ttgagccccggcgtccctgctcaga

SEQ ID NO: 1387584 - DNA, 25 bp, Homo sapien
aataaaagttggatgtgctgttgtg

SEQ ID NO: 1387585 - DNA, 25 bp, Homo sapien
taaaagttggatgtgctgttgtggc

SEQ ID NO: 1387586 - DNA, 25 bp, Homo sapien
agttggatgtgctgttgtggccact

SEQ ID NO: 1387587 - DNA, 25 bp, Homo sapien
aaagttggatgtgctgttgtggcca

SEQ ID NO: 1387588 - DNA, 25 bp, Homo sapien
tcccgttcagcctcattctcgcttc

SEQ ID NO: 1387589 - DNA, 25 bp, Homo sapien
tcattctcgcttcggccacaagtct

SEQ ID NO: 1387590 - DNA, 25 bp, Homo sapien
cgttcagcctcattctcgcttcggc

SEQ ID NO: 1387591 - DNA, 25 bp, Homo sapien
ctcgcttcggccacaagtctcatag

SEQ ID NO: 1387592 - DNA, 25 bp, Homo sapien
cttttgaggcacggaaggcagatcc

SEQ ID NO: 1387593 - DNA, 25 bp, Homo sapien
aggcacggaaggcagatccacagtg

SEQ ID NO: 1387594 - DNA, 25 bp, Homo sapien
tgaggcacggaaggcagatccacag

SEQ ID NO: 1387595 - DNA, 25 bp, Homo sapien
tttgaggcacggaaggcagatccac

SEQ ID NO: 1387596 - DNA, 25 bp, Homo sapien
aagacagtggcttctgatagcagca

SEQ ID NO: 1387597 - DNA, 25 bp, Homo sapien
ggagatcttgatagcgttgtttgca

SEQ ID NO: 1387598 - DNA, 25 bp, Homo sapien
cttgatagcgttgtttgcattgtga

SEQ ID NO: 1387599 - DNA, 25 bp, Homo sapien
ttctcctggagatcttgatagcgtt

SEQ ID NO: 1387600 - DNA, 25 bp, Homo sapien
gtaggctaaacgctgactgaggccc

SEQ ID NO: 1387601 - DNA, 25 bp, Homo sapien
tggtaggctaaacgctgactgaggc

SEQ ID NO: 1387602 - DNA, 25 bp, Homo sapien
cctggtaggctaaacgctgactgag

SEQ ID NO: 1387603 - DNA, 25 bp, Homo sapien
taggctaaacgctgactgaggccca

SEQ ID NO: 1387604 - DNA, 25 bp, Homo sapien
tctttcaatggtgctggtcagatgc

SEQ ID NO: 1387605 - DNA, 25 bp, Homo sapien
gctactcagcacaagttgttctttg

SEQ ID NO: 1387606 - DNA, 25 bp, Homo sapien
tgaaggctactctcactcagaccct

SEQ ID NO: 1387607 - DNA, 25 bp, Homo sapien
cagttttccctggagctttctgaac

SEQ ID NO: 1387608 - DNA, 25 bp, Homo sapien
atctcccatccatcagacattgctt

SEQ ID NO: 1387609 - DNA, 25 bp, Homo sapien
gatctcccatccatcagacattgct

SEQ ID NO: 1387610 - DNA, 25 bp, Homo sapien
cgatctcccatccatcagacattgc

SEQ ID NO: 1387611 - DNA, 25 bp, Homo sapien
tcgatctcccatccatcagacattg

SEQ ID NO: 1387612 - DNA, 25 bp, Homo sapien
catactagggttgagtggaagcaaa

SEQ ID NO: 1387613 - DNA, 25 bp, Homo sapien
ttatgtctggctcacgtgatagaga

SEQ ID NO: 1387614 - DNA, 25 bp, Homo sapien
cacaacaacaaactcatactagggt

SEQ ID NO: 1387615 - DNA, 25 bp, Homo sapien
gctaatttgcaccaagacattccag

SEQ ID NO: 1387616 - DNA, 25 bp, Homo sapien
gacatgaggctagatgcctgggccc

SEQ ID NO: 1387617 - DNA, 25 bp, Homo sapien
gcctgggcccttttcaaagtgctaa

SEQ ID NO: 1387618 - DNA, 25 bp, Homo sapien
cagctatgaaacaacgacatgaggc

SEQ ID NO: 1387619 - DNA, 25 bp, Homo sapien
tagacgttagaaattgggagccaca

SEQ ID NO: 1387620 - DNA, 25 bp, Homo sapien
tactgtcccctcccatcggagaagg

SEQ ID NO: 1387621 - DNA, 25 bp, Homo sapien
tgtcccctcccatcggagaaggagg

SEQ ID NO: 1387622 - DNA, 25 bp, Homo sapien
actgtcccctcccatcggagaagga

SEQ ID NO: 1387623 - DNA, 25 bp, Homo sapien
ctgtcccctcccatcggagaaggag

SEQ ID NO: 1387624 - DNA, 25 bp, Homo sapien
cacacctgttggagtggcatttatc

SEQ ID NO: 1387625 - DNA, 25 bp, Homo sapien
gcttcgtatctgtcccaatgttaag

SEQ ID NO: 1387626 - DNA, 25 bp, Homo sapien
tttgtgtgctgggttcccatctgcc

SEQ ID NO: 1387627 - DNA, 25 bp, Homo sapien
tcagttctcaacattaaggcattaa

SEQ ID NO: 1387628 - DNA, 25 bp, Homo sapien
tatagatgcacactacctgggcctg

SEQ ID NO: 1387629 - DNA, 25 bp, Homo sapien
ggaaaattactatcatggccagact

SEQ ID NO: 1387630 - DNA, 25 bp, Homo sapien
ggctgagtccaaaacataaggagca

SEQ ID NO: 1387631 - DNA, 25 bp, Homo sapien
gatcttacatctgcttgagaataga

SEQ ID NO: 1387632 - DNA, 25 bp, Homo sapien
tgggatgtgtctgttaggaaaagca

SEQ ID NO: 1387633 - DNA, 25 bp, Homo sapien
taggaagggaacttggtgtcaggca

SEQ ID NO: 1387634 - DNA, 25 bp, Homo sapien
cttggagtaggaagggaacttggtg

SEQ ID NO: 1387635 - DNA, 25 bp, Homo sapien
gatgtgtctgttaggaaaagcatat

SEQ ID NO: 1387636 - DNA, 25 bp, Homo sapien
caaggacataacaaggagaagctca

SEQ ID NO: 1387637 - DNA, 25 bp, Homo sapien
cttccaaggacataacaaggagaag

SEQ ID NO: 1387638 - DNA, 25 bp, Homo sapien
tccaaggacataacaaggagaagct

SEQ ID NO: 1387639 - DNA, 25 bp, Homo sapien
ggacataacaaggagaagctcaaaa

SEQ ID NO: 1387640 - DNA, 25 bp, Homo sapien
atttaattggtagcaggagagtcac

SEQ ID NO: 1387641 - DNA, 25 bp, Homo sapien
gaaaaatggtgctcgcccaagagat

SEQ ID NO: 1387642 - DNA, 25 bp, Homo sapien
cagattctccatgctaggctacagg

SEQ ID NO: 1387643 - DNA, 25 bp, Homo sapien
ttgtctatcatgagtcaagccctga

SEQ ID NO: 1387644 - DNA, 25 bp, Homo sapien
gaatgtgtccatcgtcttgcaagta

SEQ ID NO: 1387645 - DNA, 25 bp, Homo sapien
ggagctcatgcaagcactcaaggga

SEQ ID NO: 1387646 - DNA, 25 bp, Homo sapien
caaccatcggtaaggaggactcagg

SEQ ID NO: 1387647 - DNA, 25 bp, Homo sapien
gagaatatgacgtatcccagacaac

SEQ ID NO: 1387648 - DNA, 25 bp, Homo sapien
tgtaaaaagatatcttctcactaag

SEQ ID NO: 1387649 - DNA, 25 bp, Homo sapien
caaaccaaagggtggattggagaga

SEQ ID NO: 1387650 - DNA, 25 bp, Homo sapien
aaaaatggagtgaagatatgggttg

SEQ ID NO: 1387651 - DNA, 25 bp, Homo sapien
ttctcactaagtccgcaagggctgc

SEQ ID NO: 1387652 - DNA, 25 bp, Homo sapien
ggaagtcccagaccctgacactgac

SEQ ID NO: 1387653 - DNA, 25 bp, Homo sapien
ctggaagtcccagaccctgacactg

SEQ ID NO: 1387654 - DNA, 25 bp, Homo sapien
tcagacctcagaagggctgtgtgct

SEQ ID NO: 1387655 - DNA, 25 bp, Homo sapien
ggctgtgtgctgtccaccctggaag

SEQ ID NO: 1387656 - DNA, 25 bp, Homo sapien
gcctcctcctcaatactgtcagtga

SEQ ID NO: 1387657 - DNA, 25 bp, Homo sapien
agcctcctcctcaatactgtcagtg

SEQ ID NO: 1387658 - DNA, 25 bp, Homo sapien
ctcctcctcaatactgtcagtgaac

SEQ ID NO: 1387659 - DNA, 25 bp, Homo sapien
cagcctcctcctcaatactgtcagt

SEQ ID NO: 1387660 - DNA, 25 bp, Homo sapien
ctccaagaccaaagaaccttctgtt

SEQ ID NO: 1387661 - DNA, 25 bp, Homo sapien
ttttccttctggtgacaaatctgat

SEQ ID NO: 1387662 - DNA, 25 bp, Homo sapien
tctggtgacaaatctgatctttatc

SEQ ID NO: 1387663 - DNA, 25 bp, Homo sapien
caagaccaaagaaccttctgttgag

SEQ ID NO: 1387664 - DNA, 25 bp, Homo sapien
tccgtaaggaattcgacggagacaa

SEQ ID NO: 1387665 - DNA, 25 bp, Homo sapien
ggaattcgacggagacaaataaatg

SEQ ID NO: 1387666 - DNA, 25 bp, Homo sapien
cttatctccgtaaggaattcgacgg

SEQ ID NO: 1387667 - DNA, 25 bp, Homo sapien
taaggaattcgacggagacaaataa

SEQ ID NO: 1387668 - DNA, 25 bp, Homo sapien
tgccacacaggggttttgtttcttc

SEQ ID NO: 1387669 - DNA, 25 bp, Homo sapien
tcgacactgccacacaggggttttg

SEQ ID NO: 1387670 - DNA, 25 bp, Homo sapien
tgtttcttccccttcattctctctt

SEQ ID NO: 1387671 - DNA, 25 bp, Homo sapien
ctcatctcgacactgccacacaggg

SEQ ID NO: 1387672 - DNA, 25 bp, Homo sapien
acagtcttcttccattatggcagct

SEQ ID NO: 1387673 - DNA, 25 bp, Homo sapien
gcagctttaagggttgctcagcctt

SEQ ID NO: 1387674 - DNA, 25 bp, Homo sapien
cttttttaagctagctcacagtctt

SEQ ID NO: 1387675 - DNA, 25 bp, Homo sapien
taagggttgctcagccttttaccaa

SEQ ID NO: 1387676 - DNA, 25 bp, Homo sapien
gtaagttatctcatacaaggtccat

SEQ ID NO: 1387677 - DNA, 25 bp, Homo sapien
aagttatctcatacaaggtccatac

SEQ ID NO: 1387678 - DNA, 25 bp, Homo sapien
taagttatctcatacaaggtccata

SEQ ID NO: 1387679 - DNA, 25 bp, Homo sapien
gataattttattggatcagtaacaa

SEQ ID NO: 1387680 - DNA, 25 bp, Homo sapien
aaatggtcctggaaataatgtaatg

SEQ ID NO: 1387681 - DNA, 25 bp, Homo sapien
agatagctaaaattctaacacttat

SEQ ID NO: 1387682 - DNA, 25 bp, Homo sapien
gaaataatgtaatgccaagtttctg

SEQ ID NO: 1387683 - DNA, 25 bp, Homo sapien
aactaattcttatgatgaggaactc

SEQ ID NO: 1387684 - DNA, 25 bp, Homo sapien
gatgaggaactcatatcctctacag

SEQ ID NO: 1387685 - DNA, 25 bp, Homo sapien
cctctacaggttaagattttctgga

SEQ ID NO: 1387686 - DNA, 25 bp, Homo sapien
ttttttatgtacatcggccacagag

SEQ ID NO: 1387687 - DNA, 25 bp, Homo sapien
gaagaataaactttattggcccaca

SEQ ID NO: 1387688 - DNA, 25 bp, Homo sapien
tctggttagtgcaaacaaggttttc

SEQ ID NO: 1387689 - DNA, 25 bp, Homo sapien
cagttctatcattagtaagtcaccg

SEQ ID NO: 1387690 - DNA, 25 bp, Homo sapien
ccatgtaggctaaagtgagtttcac

SEQ ID NO: 1387691 - DNA, 25 bp, Homo sapien
taagtcaccgtttaattctgccaaa

SEQ ID NO: 1387692 - DNA, 25 bp, Homo sapien
taggcatgcttgtgatgaattcgca

SEQ ID NO: 1387693 - DNA, 25 bp, Homo sapien
gtaggcatgcttgtgatgaattcgc

SEQ ID NO: 1387694 - DNA, 25 bp, Homo sapien
tcagtaggcatgcttgtgatgaatt

SEQ ID NO: 1387695 - DNA, 25 bp, Homo sapien
gcatgcttgtgatgaattcgcacac

SEQ ID NO: 1387696 - DNA, 25 bp, Homo sapien
tccaatggcggccagggtctccagc

SEQ ID NO: 1387697 - DNA, 25 bp, Homo sapien
aagaacttcttctagccgactgcgt

SEQ ID NO: 1387698 - DNA, 25 bp, Homo sapien
ggtctccagcctgtttaagcgctcc

SEQ ID NO: 1387699 - DNA, 25 bp, Homo sapien
ttctagccgactgcgtaacacctga

SEQ ID NO: 1387700 - DNA, 25 bp, Homo sapien
ctgcagagttcggtctctctcagag

SEQ ID NO: 1387701 - DNA, 25 bp, Homo sapien
ctgattaaacatgccacatggaagg

SEQ ID NO: 1387702 - DNA, 25 bp, Homo sapien
ctgtagtgagtccacatttgtttcc

SEQ ID NO: 1387703 - DNA, 25 bp, Homo sapien
cacatggaaggaaagtggattagcc

SEQ ID NO: 1387704 - DNA, 25 bp, Homo sapien
gaaagtggattagccatcaactgta

SEQ ID NO: 1387705 - DNA, 25 bp, Homo sapien
ctttgagccacacgactttgtaaag

SEQ ID NO: 1387706 - DNA, 25 bp, Homo sapien
gccacacgactttgtaaagtaattg

SEQ ID NO: 1387707 - DNA, 25 bp, Homo sapien
ttgagccacacgactttgtaaagta

SEQ ID NO: 1387708 - DNA, 25 bp, Homo sapien
gagccacacgactttgtaaagtaat

SEQ ID NO: 1387709 - DNA, 25 bp, Homo sapien
caaatgacaaagtgggtagccccgg

SEQ ID NO: 1387710 - DNA, 25 bp, Homo sapien
tagaacagcctttaacaggacatgg

SEQ ID NO: 1387711 - DNA, 25 bp, Homo sapien
gctgtgtgaaacaggcactaatccc

SEQ ID NO: 1387712 - DNA, 25 bp, Homo sapien
cttaagattttgacactgaggctca

SEQ ID NO: 1387713 - DNA, 25 bp, Homo sapien
ctctctgcttgtaaggcctcattga

SEQ ID NO: 1387714 - DNA, 25 bp, Homo sapien
gagccgactccgttcatctactagt

SEQ ID NO: 1387715 - DNA, 25 bp, Homo sapien
ttcaccagactgctatagagctgtc

SEQ ID NO: 1387716 - DNA, 25 bp, Homo sapien
tctggatgggcatggaacttcacca

SEQ ID NO: 1387717 - DNA, 25 bp, Homo sapien
aaagcccactatcttagtacttaag

SEQ ID NO: 1387718 - DNA, 25 bp, Homo sapien
agagaggaagcaatacgcaaatggc

SEQ ID NO: 1387719 - DNA, 25 bp, Homo sapien
caatacgcaaatggcacagtgagac

SEQ ID NO: 1387720 - DNA, 25 bp, Homo sapien
tgtactatgacttaaaaagcccact

SEQ ID NO: 1387721 - DNA, 25 bp, Homo sapien
tgagattgacagctttaccatggtt

SEQ ID NO: 1387722 - DNA, 25 bp, Homo sapien
tctatagctgctaccgaccaaagta

SEQ ID NO: 1387723 - DNA, 25 bp, Homo sapien
gagggataactattggtatgtgtcc

SEQ ID NO: 1387724 - DNA, 25 bp, Homo sapien
cagtagaaaaataaggtttgagccg

SEQ ID NO: 1387725 - DNA, 25 bp, Homo sapien
ctgttgtcttcggtttcctgaaatt

SEQ ID NO: 1387726 - DNA, 25 bp, Homo sapien
tcttcggtttcctgaaatttcttga

SEQ ID NO: 1387727 - DNA, 25 bp, Homo sapien
ggtcaggcgttccatagctggtatg

SEQ ID NO: 1387728 - DNA, 25 bp, Homo sapien
caggcgttccatagctggtatgtct

SEQ ID NO: 1387729 - DNA, 25 bp, Homo sapien
cctgggtcaggcgttccatagctgg

SEQ ID NO: 1387730 - DNA, 25 bp, Homo sapien
gcgttccatagctggtatgtcttca

SEQ ID NO: 1387731 - DNA, 25 bp, Homo sapien
tggtcagagactccatatcagcagc

SEQ ID NO: 1387732 - DNA, 25 bp, Homo sapien
ggtcagagactccatatcagcagcc

SEQ ID NO: 1387733 - DNA, 25 bp, Homo sapien
ctgcacagccatcatggactgtaga

SEQ ID NO: 1387734 - DNA, 25 bp, Homo sapien
catggactgtagagcagaaagttcc

SEQ ID NO: 1387735 - DNA, 25 bp, Homo sapien
cagccatcatggactgtagagcaga

SEQ ID NO: 1387736 - DNA, 25 bp, Homo sapien
catcatggactgtagagcagaaagt

SEQ ID NO: 1387737 - DNA, 25 bp, Homo sapien
aacagctgctaacatcacgagagat

SEQ ID NO: 1387738 - DNA, 25 bp, Homo sapien
gggataaggcatcaaacagcaacag

SEQ ID NO: 1387739 - DNA, 25 bp, Homo sapien
cacgagagatcaccaaacattacat

SEQ ID NO: 1387740 - DNA, 25 bp, Homo sapien
cattacatgactcctgatggaagaa

SEQ ID NO: 1387741 - DNA, 25 bp, Homo sapien
ttttttagccatgagttcaagttcc

SEQ ID NO: 1387742 - DNA, 25 bp, Homo sapien
tgagttcaagttcctctttggcatt

SEQ ID NO: 1387743 - DNA, 25 bp, Homo sapien
agccctgcaactgtgtccaagtctc

SEQ ID NO: 1387744 - DNA, 25 bp, Homo sapien
tggcattactcagttctttttccag

SEQ ID NO: 1387745 - DNA, 25 bp, Homo sapien
tcatctctggaaggtatctgcattg

SEQ ID NO: 1387746 - DNA, 25 bp, Homo sapien
gaagtgctatcatctctggaaggta

SEQ ID NO: 1387747 - DNA, 25 bp, Homo sapien
tgctatcatctctggaaggtatctg

SEQ ID NO: 1387748 - DNA, 25 bp, Homo sapien
ctatcatctctggaaggtatctgca

SEQ ID NO: 1387749 - DNA, 25 bp, Homo sapien
aaggcttgcaccaacttctctgcag

SEQ ID NO: 1387750 - DNA, 25 bp, Homo sapien
tctccctcctaaatattggcgcagg

SEQ ID NO: 1387751 - DNA, 25 bp, Homo sapien
ggcgcagggcctgtaattctgaatt

SEQ ID NO: 1387752 - DNA, 25 bp, Homo sapien
gatcagtctgttttccaagacagcc

SEQ ID NO: 1387753 - DNA, 25 bp, Homo sapien
gctccctggtgctcacagactgaag

SEQ ID NO: 1387754 - DNA, 25 bp, Homo sapien
ttccagcacttgtttatttcgatca

SEQ ID NO: 1387755 - DNA, 25 bp, Homo sapien
ccctggtgctcacagactgaagcag

SEQ ID NO: 1387756 - DNA, 25 bp, Homo sapien
tccctggtgctcacagactgaagca

SEQ ID NO: 1387757 - DNA, 25 bp, Homo sapien
gcacaggcctgctacacagaagtct

SEQ ID NO: 1387758 - DNA, 25 bp, Homo sapien
gaaaggacactgtaagcttctggag

SEQ ID NO: 1387759 - DNA, 25 bp, Homo sapien
cctaggttgatactggatctgctac

SEQ ID NO: 1387760 - DNA, 25 bp, Homo sapien
tgttttaccagatctagcacaggcc

SEQ ID NO: 1387761 - DNA, 25 bp, Homo sapien
catgaagagacgtctgtaactgctg

SEQ ID NO: 1387762 - DNA, 25 bp, Homo sapien
tttgttcctatcatgaagagacgtc

SEQ ID NO: 1387763 - DNA, 25 bp, Homo sapien
tccttctgccaacggctaaatttgg

SEQ ID NO: 1387764 - DNA, 25 bp, Homo sapien
cactggaggttttgacaggtagtag

SEQ ID NO: 1387765 - DNA, 25 bp, Homo sapien
gcttcaggctcaggatacaagtggg

SEQ ID NO: 1387766 - DNA, 25 bp, Homo sapien
caccaagtcagagataggttttgct

SEQ ID NO: 1387767 - DNA, 25 bp, Homo sapien
ttgacaatgatggaactagtaactg

SEQ ID NO: 1387768 - DNA, 25 bp, Homo sapien
taattgcaccctggtaatgcttcag

SEQ ID NO: 1387769 - DNA, 25 bp, Homo sapien
gaggagaggacatcgcgcagtctct

SEQ ID NO: 1387770 - DNA, 25 bp, Homo sapien
gcgcagtctctctaagtcatgatct

SEQ ID NO: 1387771 - DNA, 25 bp, Homo sapien
gtcatgatctcgctctctcacagca

SEQ ID NO: 1387772 - DNA, 25 bp, Homo sapien
tctcacagcaagacgaagctggcgc

SEQ ID NO: 1387773 - DNA, 25 bp, Homo sapien
tcctgatcactcttattcaacaaga

SEQ ID NO: 1387774 - DNA, 25 bp, Homo sapien
gcagcaaatttaagcaaacacaaat

SEQ ID NO: 1387775 - DNA, 25 bp, Homo sapien
tagtgggcgaaatgatgatacatac

SEQ ID NO: 1387776 - DNA, 25 bp, Homo sapien
gtagatagaataatccatagcatag

SEQ ID NO: 1387777 - DNA, 25 bp, Homo sapien
catgtattcgctggcgaagtttctc

SEQ ID NO: 1387778 - DNA, 25 bp, Homo sapien
gctttatcatgtattcgctggcgaa

SEQ ID NO: 1387779 - DNA, 25 bp, Homo sapien
caacagctttatcatgtattcgctg

SEQ ID NO: 1387780 - DNA, 25 bp, Homo sapien
attcgctggcgaagtttctcaagca

SEQ ID NO: 1387781 - DNA, 25 bp, Homo sapien
tgctccttgtgactcagactatggt

SEQ ID NO: 1387782 - DNA, 25 bp, Homo sapien
gaagctgttggctcttattctgcaa

SEQ ID NO: 1387783 - DNA, 25 bp, Homo sapien
tagctgctgcaaggcttttcgcaat

SEQ ID NO: 1387784 - DNA, 25 bp, Homo sapien
gactcagactatggtttaggtgctg

SEQ ID NO: 1387785 - DNA, 25 bp, Homo sapien
cacatggttattagatacagaggcc

SEQ ID NO: 1387786 - DNA, 25 bp, Homo sapien
ggttattagatacagaggccttaaa

SEQ ID NO: 1387787 - DNA, 25 bp, Homo sapien
aaattgtcacatggttattagatac

SEQ ID NO: 1387788 - DNA, 25 bp, Homo sapien
tctaaaattgtcacatggttattag

SEQ ID NO: 1387789 - DNA, 25 bp, Homo sapien
tgttcactctcgtgtgctgcagcct

SEQ ID NO: 1387790 - DNA, 25 bp, Homo sapien
gaagatcaagcagagctacctgttg

SEQ ID NO: 1387791 - DNA, 25 bp, Homo sapien
tctttctgtcgtaccaccctctgga

SEQ ID NO: 1387792 - DNA, 25 bp, Homo sapien
tttggcatcagccagttggcgctct

SEQ ID NO: 1387793 - DNA, 25 bp, Homo sapien
gctttgccattgtgtcattttgacc

SEQ ID NO: 1387794 - DNA, 25 bp, Homo sapien
cttcaattacctggtacaactcctc

SEQ ID NO: 1387795 - DNA, 25 bp, Homo sapien
caattacctggtacaactcctcagt

SEQ ID NO: 1387796 - DNA, 25 bp, Homo sapien
ctttgccattgtgtcattttgacct

SEQ ID NO: 1387797 - DNA, 25 bp, Homo sapien
ctgaattgtaccatcttgcttttga

SEQ ID NO: 1387798 - DNA, 25 bp, Homo sapien
gcttttgagacgactcctgagcaca

SEQ ID NO: 1387799 - DNA, 25 bp, Homo sapien
cctgagcacactttagttcatagct

SEQ ID NO: 1387800 - DNA, 25 bp, Homo sapien
ttgaggttctgaattgtaccatctt

SEQ ID NO: 1387801 - DNA, 25 bp, Homo sapien
tccacatggaccaagtaggcaagtg

SEQ ID NO: 1387802 - DNA, 25 bp, Homo sapien
cactgtgatctctctatgatggcag

SEQ ID NO: 1387803 - DNA, 25 bp, Homo sapien
tgatggcagccatactaggaacttg

SEQ ID NO: 1387804 - DNA, 25 bp, Homo sapien
gagagggcactataagggcacccag

SEQ ID NO: 1387805 - DNA, 25 bp, Homo sapien
tatagtggtctcatgtgaattcagc

SEQ ID NO: 1387806 - DNA, 25 bp, Homo sapien
cagactgctgagttatagtggtctc

SEQ ID NO: 1387807 - DNA, 25 bp, Homo sapien
gttatagtggtctcatgtgaattca

SEQ ID NO: 1387808 - DNA, 25 bp, Homo sapien
tagtggtctcatgtgaattcagctt

SEQ ID NO: 1387809 - DNA, 25 bp, Homo sapien
ttaaatcccttcctgccagcaactg

SEQ ID NO: 1387810 - DNA, 25 bp, Homo sapien
cttaaatcccttcctgccagcaact

SEQ ID NO: 1387811 - DNA, 25 bp, Homo sapien
taaatcccttcctgccagcaactga

SEQ ID NO: 1387812 - DNA, 25 bp, Homo sapien
cactcaggttgggaatgtatctctc

SEQ ID NO: 1387813 - DNA, 25 bp, Homo sapien
tagcttttctagttcagggccagac

SEQ ID NO: 1387814 - DNA, 25 bp, Homo sapien
tcagaaaagagaaccgcttccaggc

SEQ ID NO: 1387815 - DNA, 25 bp, Homo sapien
tatgaactatgtcacaccatgggca

SEQ ID NO: 1387816 - DNA, 25 bp, Homo sapien
tagaaagcgcttcaatccgggcaat

SEQ ID NO: 1387817 - DNA, 25 bp, Homo sapien
cagagtatctcgcatcgggtaagac

SEQ ID NO: 1387818 - DNA, 25 bp, Homo sapien
tgtgattacacccatgctgcggagc

SEQ ID NO: 1387819 - DNA, 25 bp, Homo sapien
aacctggagattgagcttggacgcc

SEQ ID NO: 1387820 - DNA, 25 bp, Homo sapien
cgtggaaacgcctaagaggatgctg

SEQ ID NO: 1387821 - DNA, 25 bp, Homo sapien
tccggctctgcgcatgcgaggtagc

SEQ ID NO: 1387822 - DNA, 25 bp, Homo sapien
agccagccgctttcatctgctaaga

SEQ ID NO: 1387823 - DNA, 25 bp, Homo sapien
ggcggctactgggtgaccactcaat

SEQ ID NO: 1387824 - DNA, 25 bp, Homo sapien
tgaaagtcgcaccagtgccctcaag

SEQ ID NO: 1387825 - DNA, 25 bp, Homo sapien
cccgcctgggttctaagggcctgag

SEQ ID NO: 1387826 - DNA, 25 bp, Homo sapien
ggagaaagacgaatcccctccctgc

SEQ ID NO: 1387827 - DNA, 25 bp, Homo sapien
ctcccgcctctgcaggatgtcgagg

SEQ ID NO: 1387828 - DNA, 25 bp, Homo sapien
catgctttggaatctatggtgatct

SEQ ID NO: 1387829 - DNA, 25 bp, Homo sapien
taccctgctgtacccagtcttaagt

SEQ ID NO: 1387830 - DNA, 25 bp, Homo sapien
gactcaccctgactgatggaaagac

SEQ ID NO: 1387831 - DNA, 25 bp, Homo sapien
gcctctaggtatgtgagcttcaaag

SEQ ID NO: 1387832 - DNA, 25 bp, Homo sapien
caaacacttatgattggaggaaggc

SEQ ID NO: 1387833 - DNA, 25 bp, Homo sapien
gaaggcatgttgttaaggtgagact

SEQ ID NO: 1387834 - DNA, 25 bp, Homo sapien
actgcgccccaccttaggataatat

SEQ ID NO: 1387835 - DNA, 25 bp, Homo sapien
tagtgaaggcacataacgaaaagtt

SEQ ID NO: 1387836 - DNA, 25 bp, Homo sapien
aacttgggttaaacacagtgctagc

SEQ ID NO: 1387837 - DNA, 25 bp, Homo sapien
cggaacttgggttaaacacagtgct

SEQ ID NO: 1387838 - DNA, 25 bp, Homo sapien
cacggaacttgggttaaacacagtg

SEQ ID NO: 1387839 - DNA, 25 bp, Homo sapien
gaacttgggttaaacacagtgctag

SEQ ID NO: 1387840 - DNA, 25 bp, Homo sapien
tagaaggtaattctctagtgcctac

SEQ ID NO: 1387841 - DNA, 25 bp, Homo sapien
cagatatcactctccctcaaagaaa

SEQ ID NO: 1387842 - DNA, 25 bp, Homo sapien
tagtgcctaccatgacagcaccatt

SEQ ID NO: 1387843 - DNA, 25 bp, Homo sapien
cagcaccattgcctagtcatggtag

SEQ ID NO: 1387844 - DNA, 25 bp, Homo sapien
tgaagactctgaagtgaacttcctg

SEQ ID NO: 1387845 - DNA, 25 bp, Homo sapien
ggcccaactgtttgtggtattctca

SEQ ID NO: 1387846 - DNA, 25 bp, Homo sapien
gactttcatactgggatcacttgag

SEQ ID NO: 1387847 - DNA, 25 bp, Homo sapien
gcgttcttcacttggacaattcaga

SEQ ID NO: 1387848 - DNA, 25 bp, Homo sapien
gatgaggagattctttagcctctga

SEQ ID NO: 1387849 - DNA, 25 bp, Homo sapien
atgaggagattctttagcctctgaa

SEQ ID NO: 1387850 - DNA, 25 bp, Homo sapien
gagatgaggagattctttagcctct

SEQ ID NO: 1387851 - DNA, 25 bp, Homo sapien
tggagatgaggagattctttagcct

SEQ ID NO: 1387852 - DNA, 25 bp, Homo sapien
cttccacattgtaagggtctttctt

SEQ ID NO: 1387853 - DNA, 25 bp, Homo sapien
ggcagacaaggtttgagtagaatac

SEQ ID NO: 1387854 - DNA, 25 bp, Homo sapien
agacaaggtttgagtagaatacagt

SEQ ID NO: 1387855 - DNA, 25 bp, Homo sapien
atggcagacaaggtttgagtagaat

SEQ ID NO: 1387856 - DNA, 25 bp, Homo sapien
gcagacaaggtttgagtagaataca

SEQ ID NO: 1387857 - DNA, 25 bp, Homo sapien
ggatgctgtacttattcttgttcta

SEQ ID NO: 1387858 - DNA, 25 bp, Homo sapien
tggtcatgcaatattatcccctgga

SEQ ID NO: 1387859 - DNA, 25 bp, Homo sapien
catccttttagagtagaatataaat

SEQ ID NO: 1387860 - DNA, 25 bp, Homo sapien
tcagtgcttaccaaagatgatgaaa

SEQ ID NO: 1387861 - DNA, 25 bp, Homo sapien
tagtggcctaagcacccaaattggc

SEQ ID NO: 1387862 - DNA, 25 bp, Homo sapien
tgctttccaaccaaaatggagctgc

SEQ ID NO: 1387863 - DNA, 25 bp, Homo sapien
taatcaggatggaatcgcttctcgg

SEQ ID NO: 1387864 - DNA, 25 bp, Homo sapien
ccatatgtgaaccagtaaagtaaac

SEQ ID NO: 1387865 - DNA, 25 bp, Homo sapien
gagatagctgttctacaagcctctc

SEQ ID NO: 1387866 - DNA, 25 bp, Homo sapien
tccatgctagttggctcctccaaca

SEQ ID NO: 1387867 - DNA, 25 bp, Homo sapien
ggctcctccaacagatgtagcagtt

SEQ ID NO: 1387868 - DNA, 25 bp, Homo sapien
gttgtttctcccgagatagctgttc

SEQ ID NO: 1387869 - DNA, 25 bp, Homo sapien
acttaaaaacattgggctgggtatg

SEQ ID NO: 1387870 - DNA, 25 bp, Homo sapien
tgaaaatctgctgggtactaaatga

SEQ ID NO: 1387871 - DNA, 25 bp, Homo sapien
tatattggaacatgaaccttccagg

SEQ ID NO: 1387872 - DNA, 25 bp, Homo sapien
tgtgctaggcatattctctgtttgt

SEQ ID NO: 1387873 - DNA, 25 bp, Homo sapien
gatttaatcacctcctaatggctcc

SEQ ID NO: 1387874 - DNA, 25 bp, Homo sapien
cctcacatggtagaatgggctaact

SEQ ID NO: 1387875 - DNA, 25 bp, Homo sapien
actctggctcataacggtgcattcc

SEQ ID NO: 1387876 - DNA, 25 bp, Homo sapien
gctcagatttcgcttcctctaggaa

SEQ ID NO: 1387877 - DNA, 25 bp, Homo sapien
gcttgccgctatttgcccactgaat

SEQ ID NO: 1387878 - DNA, 25 bp, Homo sapien
caagcgacaaaaagagcaccgaagg

SEQ ID NO: 1387879 - DNA, 25 bp, Homo sapien
gaatctatgtctcttgcttgccgct

SEQ ID NO: 1387880 - DNA, 25 bp, Homo sapien
gaatgtcttcggttgtgggcccata

SEQ ID NO: 1387881 - DNA, 25 bp, Homo sapien
cagtttttggtgactcccttcagtt

SEQ ID NO: 1387882 - DNA, 25 bp, Homo sapien
cttcattctttgctagcctggattc

SEQ ID NO: 1387883 - DNA, 25 bp, Homo sapien
cctcagtgtattggtcgggcttgac

SEQ ID NO: 1387884 - DNA, 25 bp, Homo sapien
gagctgccatccgcgcagcttcatt

SEQ ID NO: 1387885 - DNA, 25 bp, Homo sapien
ggatcttattctccaagagctcata

SEQ ID NO: 1387886 - DNA, 25 bp, Homo sapien
tattctccaagagctcataaacatg

SEQ ID NO: 1387887 - DNA, 25 bp, Homo sapien
ctgctgtcgctcctcaaactggcgt

SEQ ID NO: 1387888 - DNA, 25 bp, Homo sapien
ctggcgtcggagctcagcttcattc

SEQ ID NO: 1387889 - DNA, 25 bp, Homo sapien
gtagattaccttcggcaatatggcc

SEQ ID NO: 1387890 - DNA, 25 bp, Homo sapien
catgcctggtgaaatgctactgatt

SEQ ID NO: 1387891 - DNA, 25 bp, Homo sapien
tgtgatctcactcttcctcagtata

SEQ ID NO: 1387892 - DNA, 25 bp, Homo sapien
agaaaaatatcaagtcttctcccta

SEQ ID NO: 1387893 - DNA, 25 bp, Homo sapien
ggttccaaatctattgctctcagat

SEQ ID NO: 1387894 - DNA, 25 bp, Homo sapien
actcactggtagtgtatgagagtgc

SEQ ID NO: 1387895 - DNA, 25 bp, Homo sapien
ggtccatctgacctagtaatagaga

SEQ ID NO: 1387896 - DNA, 25 bp, Homo sapien
cagtcttaggtctggtggatttacc

SEQ ID NO: 1387897 - DNA, 25 bp, Homo sapien
tgtcctggagttctcgtttcaagct

SEQ ID NO: 1387898 - DNA, 25 bp, Homo sapien
gagttctcgtttcaagctctccact

SEQ ID NO: 1387899 - DNA, 25 bp, Homo sapien
gtttcaagctctccacttcaacctt

SEQ ID NO: 1387900 - DNA, 25 bp, Homo sapien
ccacttcaaccttcagctcaatgtt

SEQ ID NO: 1387901 - DNA, 25 bp, Homo sapien
gatcagaggttgacagagagactga

SEQ ID NO: 1387902 - DNA, 25 bp, Homo sapien
taaccaccaacacctagacttctag

SEQ ID NO: 1387903 - DNA, 25 bp, Homo sapien
ggaggattttactttactatcgcca

SEQ ID NO: 1387904 - DNA, 25 bp, Homo sapien
agtccaaggcaacatacaatagcag

SEQ ID NO: 1387905 - DNA, 25 bp, Homo sapien
ttccatgcagggtggtcgaaacaca

SEQ ID NO: 1387906 - DNA, 25 bp, Homo sapien
gaccaaggttagaacatagattcag

SEQ ID NO: 1387907 - DNA, 25 bp, Homo sapien
gaaggcatttcataacccatgtttc

SEQ ID NO: 1387908 - DNA, 25 bp, Homo sapien
tactgagaagaatgtttgttcccct

SEQ ID NO: 1387909 - DNA, 25 bp, Homo sapien
cccaacttgaactgtgccctctgat

SEQ ID NO: 1387910 - DNA, 25 bp, Homo sapien
cttacccaacttgaactgtgccctc

SEQ ID NO: 1387911 - DNA, 25 bp, Homo sapien
tacccaacttgaactgtgccctctg

SEQ ID NO: 1387912 - DNA, 25 bp, Homo sapien
acccaacttgaactgtgccctctga

SEQ ID NO: 1387913 - DNA, 25 bp, Homo sapien
ctggccagtgagaaaacatacacat

SEQ ID NO: 1387914 - DNA, 25 bp, Homo sapien
gaatcttggtcgtgtcccagaggcc

SEQ ID NO: 1387915 - DNA, 25 bp, Homo sapien
gagttcccaagatacattctgctgt

SEQ ID NO: 1387916 - DNA, 25 bp, Homo sapien
gatgtggcccaactgagctggccag

SEQ ID NO: 1387917 - DNA, 25 bp, Homo sapien
ggagcccctgtaatgccccaggaca

SEQ ID NO: 1387918 - DNA, 25 bp, Homo sapien
caaaagccaggggtaagtctggagc

SEQ ID NO: 1387919 - DNA, 25 bp, Homo sapien
ggcctggctgggcttaatttagcaa

SEQ ID NO: 1387920 - DNA, 25 bp, Homo sapien
gctgggcttaatttagcaaagggca

SEQ ID NO: 1387921 - DNA, 25 bp, Homo sapien
catagcatcttggagagttttgtgg

SEQ ID NO: 1387922 - DNA, 25 bp, Homo sapien
acagttaatcctgtggtctcatagc

SEQ ID NO: 1387923 - DNA, 25 bp, Homo sapien
tgtggtctcatagcatcttggagag

SEQ ID NO: 1387924 - DNA, 25 bp, Homo sapien
cacagttaatcctgtggtctcatag

SEQ ID NO: 1387925 - DNA, 25 bp, Homo sapien
acaattctccctgcaagaacttcct

SEQ ID NO: 1387926 - DNA, 25 bp, Homo sapien
aaacaattctccctgcaagaacttc

SEQ ID NO: 1387927 - DNA, 25 bp, Homo sapien
ttgaaaaacaattctccctgcaaga

SEQ ID NO: 1387928 - DNA, 25 bp, Homo sapien
agctctcttgaaaaacaattctccc

SEQ ID NO: 1387929 - DNA, 25 bp, Homo sapien
tccaccaacccctcttgcagagact

SEQ ID NO: 1387930 - DNA, 25 bp, Homo sapien
ccagtaaaaggtgaaggttcaactg

SEQ ID NO: 1387931 - DNA, 25 bp, Homo sapien
tggagacctccaaagtcggctgggc

SEQ ID NO: 1387932 - DNA, 25 bp, Homo sapien
gaaggttcaactggagacctccaaa

SEQ ID NO: 1387933 - DNA, 25 bp, Homo sapien
gaggctccaaatggttttgtcagca

SEQ ID NO: 1387934 - DNA, 25 bp, Homo sapien
gcaagctgagcttccccacaatccc

SEQ ID NO: 1387935 - DNA, 25 bp, Homo sapien
caaatggttttgtcagcaagctgag

SEQ ID NO: 1387936 - DNA, 25 bp, Homo sapien
cctagtcttctgaggctccaaatgg

SEQ ID NO: 1387937 - DNA, 25 bp, Homo sapien
gctagccacacgtaagagaactaaa

SEQ ID NO: 1387938 - DNA, 25 bp, Homo sapien
tagccacacgtaagagaactaaact

SEQ ID NO: 1387939 - DNA, 25 bp, Homo sapien
tggctagccacacgtaagagaacta

SEQ ID NO: 1387940 - DNA, 25 bp, Homo sapien
attggctagccacacgtaagagaac

SEQ ID NO: 1387941 - DNA, 25 bp, Homo sapien
ttcaggcccttgaccagtgcctaga

SEQ ID NO: 1387942 - DNA, 25 bp, Homo sapien
gaccagtgcctagaccctctttctg

SEQ ID NO: 1387943 - DNA, 25 bp, Homo sapien
acctgaaagaactggctgacttcag

SEQ ID NO: 1387944 - DNA, 25 bp, Homo sapien
gatcatagccatcatgctggcagcc

SEQ ID NO: 1387945 - DNA, 25 bp, Homo sapien
tgaagaggtggcttgtagccctttg

SEQ ID NO: 1387946 - DNA, 25 bp, Homo sapien
aagaggtggcttgtagccctttgca

SEQ ID NO: 1387947 - DNA, 25 bp, Homo sapien
tgcatgaagaggtggcttgtagccc

SEQ ID NO: 1387948 - DNA, 25 bp, Homo sapien
tgtgtgcatgaagaggtggcttgta

SEQ ID NO: 1387949 - DNA, 25 bp, Homo sapien
ctggtaaccgcactagatttccctg

SEQ ID NO: 1387950 - DNA, 25 bp, Homo sapien
caaaaaagtagccagtctcaagaaa

SEQ ID NO: 1387951 - DNA, 25 bp, Homo sapien
taggtttttaacataactctctagc

SEQ ID NO: 1387952 - DNA, 25 bp, Homo sapien
tctgtcggtacagagggtaagcagc

SEQ ID NO: 1387953 - DNA, 25 bp, Homo sapien
tctctagctttgacaactcctctta

SEQ ID NO: 1387954 - DNA, 25 bp, Homo sapien
gggatcacaatatgaataacaagaa

SEQ ID NO: 1387955 - DNA, 25 bp, Homo sapien
ctaatctcgtgggatcacaatatga

SEQ ID NO: 1387956 - DNA, 25 bp, Homo sapien
taacaagaatgaacatcagacacat

SEQ ID NO: 1387957 - DNA, 25 bp, Homo sapien
aataacaagaatgaacatcagacac

SEQ ID NO: 1387958 - DNA, 25 bp, Homo sapien
gctggcctcatacttctgttgcatg

SEQ ID NO: 1387959 - DNA, 25 bp, Homo sapien
cgcttgtagatgtcctcccggctgg

SEQ ID NO: 1387960 - DNA, 25 bp, Homo sapien
aagtagatgcgcagcttgaggctga

SEQ ID NO: 1387961 - DNA, 25 bp, Homo sapien
cctcatacttctgttgcatgcgctc

SEQ ID NO: 1387962 - DNA, 25 bp, Homo sapien
gacagagtgcgatatccattagaca

SEQ ID NO: 1387963 - DNA, 25 bp, Homo sapien
ctgggacagagtgcgatatccatta

SEQ ID NO: 1387964 - DNA, 25 bp, Homo sapien
acagagtgcgatatccattagacat

SEQ ID NO: 1387965 - DNA, 25 bp, Homo sapien
gggacagagtgcgatatccattaga

SEQ ID NO: 1387966 - DNA, 25 bp, Homo sapien
gatgggcaacccatggggaggagcg

SEQ ID NO: 1387967 - DNA, 25 bp, Homo sapien
ccccctcaacccaggaacatggtgc

SEQ ID NO: 1387968 - DNA, 25 bp, Homo sapien
agctgcaccgcagcatgaagccagc

SEQ ID NO: 1387969 - DNA, 25 bp, Homo sapien
ggaggagcgtgcccgattgccccct

SEQ ID NO: 1387970 - DNA, 25 bp, Homo sapien
ggactcgggactgggctcactgctc

SEQ ID NO: 1387971 - DNA, 25 bp, Homo sapien
tattgctggagctctctccgggact

SEQ ID NO: 1387972 - DNA, 25 bp, Homo sapien
gctggagcgcagcacactttccttt

SEQ ID NO: 1387973 - DNA, 25 bp, Homo sapien
gggctacggcgacatggcccctatt

SEQ ID NO: 1387974 - DNA, 25 bp, Homo sapien
tgcgtgaactcagacacaagtggtg

SEQ ID NO: 1387975 - DNA, 25 bp, Homo sapien
cagacacaagtggtgtaacccgact

SEQ ID NO: 1387976 - DNA, 25 bp, Homo sapien
catgctgcgtgaactcagacacaag

SEQ ID NO: 1387977 - DNA, 25 bp, Homo sapien
tgtaacccgactccaagccaggact

SEQ ID NO: 1387978 - DNA, 25 bp, Homo sapien
tcctgagtactcaccaggtaggaca

SEQ ID NO: 1387979 - DNA, 25 bp, Homo sapien
cataatcattccagtcaacaactcc

SEQ ID NO: 1387980 - DNA, 25 bp, Homo sapien
cagtcaacaactcctgagtactcac

SEQ ID NO: 1387981 - DNA, 25 bp, Homo sapien
tactcaccaggtaggacattgggca

SEQ ID NO: 1387982 - DNA, 25 bp, Homo sapien
aggtgataacccagttaatatcacc

SEQ ID NO: 1387983 - DNA, 25 bp, Homo sapien
taagctcttcaaggtgataacccag

SEQ ID NO: 1387984 - DNA, 25 bp, Homo sapien
ccctttcctggtctaagctcttcaa

SEQ ID NO: 1387985 - DNA, 25 bp, Homo sapien
ctaagctcttcaaggtgataaccca

SEQ ID NO: 1387986 - DNA, 25 bp, Homo sapien
tccaacagcattcatcccattgtgc

SEQ ID NO: 1387987 - DNA, 25 bp, Homo sapien
gggctatactttcaccttcgaaaca

SEQ ID NO: 1387988 - DNA, 25 bp, Homo sapien
taaatgatggtaagtcctcagcctt

SEQ ID NO: 1387989 - DNA, 25 bp, Homo sapien
caagatctagccgtacatattcaac

SEQ ID NO: 1387990 - DNA, 25 bp, Homo sapien
agatgcacacggcaacctactagct

SEQ ID NO: 1387991 - DNA, 25 bp, Homo sapien
caaacatcagcgctgcatgtggaaa

SEQ ID NO: 1387992 - DNA, 25 bp, Homo sapien
cctactagctcatggcaaacaggcc

SEQ ID NO: 1387993 - DNA, 25 bp, Homo sapien
tataacatctttactctggtctcag

SEQ ID NO: 1387994 - DNA, 25 bp, Homo sapien
gaatgcccactagctctcctgtagc

SEQ ID NO: 1387995 - DNA, 25 bp, Homo sapien
ggccagtgagagaactatcactttg

SEQ ID NO: 1387996 - DNA, 25 bp, Homo sapien
cctgtagccctaaaaggtaatgaga

SEQ ID NO: 1387997 - DNA, 25 bp, Homo sapien
gaaacgctcctaccaaaggccagtg

SEQ ID NO: 1387998 - DNA, 25 bp, Homo sapien
aagtgcatgtaaaggacgccatatt

SEQ ID NO: 1387999 - DNA, 25 bp, Homo sapien
taagtgcatgtaaaggacgccatat

SEQ ID NO: 1388000 - DNA, 25 bp, Homo sapien
agtgcatgtaaaggacgccatattt

SEQ ID NO: 1388001 - DNA, 25 bp, Homo sapien
gtaagtgcatgtaaaggacgccata

SEQ ID NO: 1388002 - DNA, 25 bp, Homo sapien
gtaacaatgactcaaggatgatgcc

SEQ ID NO: 1388003 - DNA, 25 bp, Homo sapien
ggatgatgcccaatagacgatttaa

SEQ ID NO: 1388004 - DNA, 25 bp, Homo sapien
aaatgtctggggagtatttcctgct

SEQ ID NO: 1388005 - DNA, 25 bp, Homo sapien
cctatgggaagggtacacaaatgtc

SEQ ID NO: 1388006 - DNA, 25 bp, Homo sapien
tactgcatacgcatcagggccttaa

SEQ ID NO: 1388007 - DNA, 25 bp, Homo sapien
ctgagaaagcggaggagcacagact

SEQ ID NO: 1388008 - DNA, 25 bp, Homo sapien
gactgtatgacccttctgagcctgg

SEQ ID NO: 1388009 - DNA, 25 bp, Homo sapien
cctgggattcacttgcaactgggta

SEQ ID NO: 1388010 - DNA, 25 bp, Homo sapien
cctggaataaccagatgttatcttc

SEQ ID NO: 1388011 - DNA, 25 bp, Homo sapien
gaataaccagatgttatcttcatca

SEQ ID NO: 1388012 - DNA, 25 bp, Homo sapien
acacccccaatcctggaataaccag

SEQ ID NO: 1388013 - DNA, 25 bp, Homo sapien
ggaataaccagatgttatcttcatc

SEQ ID NO: 1388014 - DNA, 25 bp, Homo sapien
gagagcaccccacacagttttgagg

SEQ ID NO: 1388015 - DNA, 25 bp, Homo sapien
caaaagcctcttgattaccatgcaa

SEQ ID NO: 1388016 - DNA, 25 bp, Homo sapien
cagctgttcggaggtttagtcttca

SEQ ID NO: 1388017 - DNA, 25 bp, Homo sapien
gactttgggccttatatctgccacc

SEQ ID NO: 1388018 - DNA, 25 bp, Homo sapien
tgggctatttaaatcccagtagaca

SEQ ID NO: 1388019 - DNA, 25 bp, Homo sapien
tagacatgctctcttgtacagactt

SEQ ID NO: 1388020 - DNA, 25 bp, Homo sapien
caagagtataagaaattccggctgc

SEQ ID NO: 1388021 - DNA, 25 bp, Homo sapien
gggaatctgtattacattatcagtt

SEQ ID NO: 1388022 - DNA, 25 bp, Homo sapien
ggacaaacatatgaagaagcagagc

SEQ ID NO: 1388023 - DNA, 25 bp, Homo sapien
aggacaaacatatgaagaagcagag

SEQ ID NO: 1388024 - DNA, 25 bp, Homo sapien
aatggttgttactgtgccaccccac

SEQ ID NO: 1388025 - DNA, 25 bp, Homo sapien
aaacaaatggttgttactgtgccac

SEQ ID NO: 1388026 - DNA, 25 bp, Homo sapien
caaatggttgttactgtgccacccc

SEQ ID NO: 1388027 - DNA, 25 bp, Homo sapien
ggttgttactgtgccaccccacact

SEQ ID NO: 1388028 - DNA, 25 bp, Homo sapien
tcgagagaggtccaagctagcaaca

SEQ ID NO: 1388029 - DNA, 25 bp, Homo sapien
tttaatactagctgctggaccggga

SEQ ID NO: 1388030 - DNA, 25 bp, Homo sapien
cagagaatttaatactagctgctgg

SEQ ID NO: 1388031 - DNA, 25 bp, Homo sapien
gttgcagctacagattctcagaatg

SEQ ID NO: 1388032 - DNA, 25 bp, Homo sapien
cagcacacagctgacagagcatatg

SEQ ID NO: 1388033 - DNA, 25 bp, Homo sapien
gattgttgcagtatcacagcgcttg

SEQ ID NO: 1388034 - DNA, 25 bp, Homo sapien
gatgaggcagcatttactggtacag

SEQ ID NO: 1388035 - DNA, 25 bp, Homo sapien
gtatatatcgcccaccagttagtca

SEQ ID NO: 1388036 - DNA, 25 bp, Homo sapien
ttctcaaagtctcgaagagcctggg

SEQ ID NO: 1388037 - DNA, 25 bp, Homo sapien
aaatgctctcaaggaatatgtctgc

SEQ ID NO: 1388038 - DNA, 25 bp, Homo sapien
tatgtctgcacaaacgggacctttt

SEQ ID NO: 1388039 - DNA, 25 bp, Homo sapien
tggagggcctcgatctttagtgtca

SEQ ID NO: 1388040 - DNA, 25 bp, Homo sapien
ttcagtcaacttcttagaattcttc

SEQ ID NO: 1388041 - DNA, 25 bp, Homo sapien
tttttttatgttcagaaaagatgga

SEQ ID NO: 1388042 - DNA, 25 bp, Homo sapien
cagaaggagcccaagaaaaagcacc

SEQ ID NO: 1388043 - DNA, 25 bp, Homo sapien
aaggagcccaagaaaaagcacccag

SEQ ID NO: 1388044 - DNA, 25 bp, Homo sapien
gaaaaccaagaattggccaagtgcc

SEQ ID NO: 1388045 - DNA, 25 bp, Homo sapien
tgggtgtattgcttcaggtcagaca

SEQ ID NO: 1388046 - DNA, 25 bp, Homo sapien
gccttgcaattacagaatcgttaaa

SEQ ID NO: 1388047 - DNA, 25 bp, Homo sapien
taattctcgtgtgaaattgctacag

SEQ ID NO: 1388048 - DNA, 25 bp, Homo sapien
tgctgtgtgactcgttctgggtacc

SEQ ID NO: 1388049 - DNA, 25 bp, Homo sapien
gctgtgtgactcgttctgggtacca

SEQ ID NO: 1388050 - DNA, 25 bp, Homo sapien
tgtgtgactcgttctgggtaccatc

SEQ ID NO: 1388051 - DNA, 25 bp, Homo sapien
ctgctgtgtgactcgttctgggtac

SEQ ID NO: 1388052 - DNA, 25 bp, Homo sapien
cccacacccactctgagcacactgc

SEQ ID NO: 1388053 - DNA, 25 bp, Homo sapien
tctgagcacactgcctgcctgatat

SEQ ID NO: 1388054 - DNA, 25 bp, Homo sapien
ctgcctgcctgatatgaatcaataa

SEQ ID NO: 1388055 - DNA, 25 bp, Homo sapien
gagcacactgcctgcctgatatgaa

SEQ ID NO: 1388056 - DNA, 25 bp, Homo sapien
agtaccaagcattttccaagtacaa

SEQ ID NO: 1388057 - DNA, 25 bp, Homo sapien
caagctgttcacctgcttgatttct

SEQ ID NO: 1388058 - DNA, 25 bp, Homo sapien
caagtacaacctactcacaagctgt

SEQ ID NO: 1388059 - DNA, 25 bp, Homo sapien
cattattttgctttcggaagtacca

SEQ ID NO: 1388060 - DNA, 25 bp, Homo sapien
tgtggcacccgaattgtaaaaacac

SEQ ID NO: 1388061 - DNA, 25 bp, Homo sapien
gccccagatgcagaacgttaagact

SEQ ID NO: 1388062 - DNA, 25 bp, Homo sapien
ggctgacttggcaccgatacagaaa

SEQ ID NO: 1388063 - DNA, 25 bp, Homo sapien
catgctgactaagtgtgggctgact

SEQ ID NO: 1388064 - DNA, 25 bp, Homo sapien
tagctcagggtaaattaagtcgcaa

SEQ ID NO: 1388065 - DNA, 25 bp, Homo sapien
gcagagcgtgttctggctacaccca

SEQ ID NO: 1388066 - DNA, 25 bp, Homo sapien
tgctcctgtggtgccaataacctga

SEQ ID NO: 1388067 - DNA, 25 bp, Homo sapien
gtgaagcattttaccctagagaagg

SEQ ID NO: 1388068 - DNA, 25 bp, Homo sapien
tatttatacactatagaagcctatt

SEQ ID NO: 1388069 - DNA, 25 bp, Homo sapien
ctggaaattgcccaagtgcctatta

SEQ ID NO: 1388070 - DNA, 25 bp, Homo sapien
ggactacagtaccatataacagtat

SEQ ID NO: 1388071 - DNA, 25 bp, Homo sapien
taacagtatagaactccaaaagcaa

SEQ ID NO: 1388072 - DNA, 25 bp, Homo sapien
tagcctttgcctgagtaactccagg

SEQ ID NO: 1388073 - DNA, 25 bp, Homo sapien
tgcccaggcagctaacttgttagaa

SEQ ID NO: 1388074 - DNA, 25 bp, Homo sapien
gagcaaaaggccctgatacactcac

SEQ ID NO: 1388075 - DNA, 25 bp, Homo sapien
catcaagtggtcatctagcctttgc

SEQ ID NO: 1388076 - DNA, 25 bp, Homo sapien
ctggccagaaagctttttctttaca

SEQ ID NO: 1388077 - DNA, 25 bp, Homo sapien
ctcggctcaccacaaacttctcctc

SEQ ID NO: 1388078 - DNA, 25 bp, Homo sapien
tgcacctggccagaaagctttttct

SEQ ID NO: 1388079 - DNA, 25 bp, Homo sapien
ggctcaccacaaacttctcctcccg

SEQ ID NO: 1388080 - DNA, 25 bp, Homo sapien
tcaaggcatggctttgagttccctc

SEQ ID NO: 1388081 - DNA, 25 bp, Homo sapien
gagtcagagcgctcatttggcccca

SEQ ID NO: 1388082 - DNA, 25 bp, Homo sapien
tgatgcccagaactaagcacagccc

SEQ ID NO: 1388083 - DNA, 25 bp, Homo sapien
tagacagaatctagacagcctactt

SEQ ID NO: 1388084 - DNA, 25 bp, Homo sapien
gcttcattttaaagtgtgtctgggg

SEQ ID NO: 1388085 - DNA, 25 bp, Homo sapien
ctttccttgaatggggcttcatttt

SEQ ID NO: 1388086 - DNA, 25 bp, Homo sapien
tcattttaaagtgtgtctgggggaa

SEQ ID NO: 1388087 - DNA, 25 bp, Homo sapien
cctttccttgaatggggcttcattt

SEQ ID NO: 1388088 - DNA, 25 bp, Homo sapien
acgactggctggcacgagttgctcg

SEQ ID NO: 1388089 - DNA, 25 bp, Homo sapien
gaaaatggatttgacgtggccgaac

SEQ ID NO: 1388090 - DNA, 25 bp, Homo sapien
aaatgagaagccttgcccacgaatc

SEQ ID NO: 1388091 - DNA, 25 bp, Homo sapien
gagttgctcggcaccagctgagctg

SEQ ID NO: 1388092 - DNA, 25 bp, Homo sapien
tgcgtactgcttccctaattttgac

SEQ ID NO: 1388093 - DNA, 25 bp, Homo sapien
gaggtaggctctagttaatgcccac

SEQ ID NO: 1388094 - DNA, 25 bp, Homo sapien
tggagcacagggaggtaaattatac

SEQ ID NO: 1388095 - DNA, 25 bp, Homo sapien
tttgacacgtaacattggctgggac

SEQ ID NO: 1388096 - DNA, 25 bp, Homo sapien
tcagttctgctccaaagtgctccct

SEQ ID NO: 1388097 - DNA, 25 bp, Homo sapien
cattggcaaggaagctgaataagtg

SEQ ID NO: 1388098 - DNA, 25 bp, Homo sapien
gaataagtggatttcctcacttgct

SEQ ID NO: 1388099 - DNA, 25 bp, Homo sapien
tatcatgtgagaccaaagcattggc

SEQ ID NO: 1388100 - DNA, 25 bp, Homo sapien
ttcttggcagtttagaacagctgtt

SEQ ID NO: 1388101 - DNA, 25 bp, Homo sapien
gaattacttaactaaaatcaggagc

SEQ ID NO: 1388102 - DNA, 25 bp, Homo sapien
gagctaccctctgctagatatttgg

SEQ ID NO: 1388103 - DNA, 25 bp, Homo sapien
ggctcacatctgtacaaccaaaagt

SEQ ID NO: 1388104 - DNA, 25 bp, Homo sapien
tagtccaggcccaacttgttcatcc

SEQ ID NO: 1388105 - DNA, 25 bp, Homo sapien
gccacatctttaggtgtctcctctg

SEQ ID NO: 1388106 - DNA, 25 bp, Homo sapien
tgaatggttggacatcaggtggcac

SEQ ID NO: 1388107 - DNA, 25 bp, Homo sapien
tctctagtgctatgttctgctgacc

SEQ ID NO: 1388108 - DNA, 25 bp, Homo sapien
tcacattgtgtacgggtagttctgg

SEQ ID NO: 1388109 - DNA, 25 bp, Homo sapien
ttcttttcacattgtgtacgggtag

SEQ ID NO: 1388110 - DNA, 25 bp, Homo sapien
cattgtgtacgggtagttctggaaa

SEQ ID NO: 1388111 - DNA, 25 bp, Homo sapien
ttttcacattgtgtacgggtagttc

SEQ ID NO: 1388112 - DNA, 25 bp, Homo sapien
taaggcacgcaagaagacactgaag

SEQ ID NO: 1388113 - DNA, 25 bp, Homo sapien
ttgaagggatgactgaggcaagcag

SEQ ID NO: 1388114 - DNA, 25 bp, Homo sapien
tggagccatagatgtgaaccttagc

SEQ ID NO: 1388115 - DNA, 25 bp, Homo sapien
ttccagcggtggttgaagggatgac

SEQ ID NO: 1388116 - DNA, 25 bp, Homo sapien
gatggccaacagctgacaattcact

SEQ ID NO: 1388117 - DNA, 25 bp, Homo sapien
gaatgtgcaatctgctgggcttcaa

SEQ ID NO: 1388118 - DNA, 25 bp, Homo sapien
ggaaatgagctactgatacccacaa

SEQ ID NO: 1388119 - DNA, 25 bp, Homo sapien
aagcacacattgaggcagatggcca

SEQ ID NO: 1388120 - DNA, 25 bp, Homo sapien
taagaaacagacttggctgggtgca

SEQ ID NO: 1388121 - DNA, 25 bp, Homo sapien
ttaagaaacagacttggctgggtgc

SEQ ID NO: 1388122 - DNA, 25 bp, Homo sapien
gataagaagaattcaccccgtgtgc

SEQ ID NO: 1388123 - DNA, 25 bp, Homo sapien
caagacttatcattacatcaacgaa

SEQ ID NO: 1388124 - DNA, 25 bp, Homo sapien
tctgcaggattaatgctgctttcca

SEQ ID NO: 1388125 - DNA, 25 bp, Homo sapien
ccccgtgtgcgtaaggtgattaagg

SEQ ID NO: 1388126 - DNA, 25 bp, Homo sapien
tgctgctacacgaagaaaattgagc

SEQ ID NO: 1388127 - DNA, 25 bp, Homo sapien
tatgttactgctgctacacgaagaa

SEQ ID NO: 1388128 - DNA, 25 bp, Homo sapien
gcctgcagcacaatctatctcttct

SEQ ID NO: 1388129 - DNA, 25 bp, Homo sapien
tatctcttctcccaaaaatcgtatg

SEQ ID NO: 1388130 - DNA, 25 bp, Homo sapien
taatatgttcggtcttccaggccaa

SEQ ID NO: 1388131 - DNA, 25 bp, Homo sapien
ctaatatgttcggtcttccaggcca

SEQ ID NO: 1388132 - DNA, 25 bp, Homo sapien
aatatgttcggtcttccaggccaaa

SEQ ID NO: 1388133 - DNA, 25 bp, Homo sapien
gccaaagcaaaggattgattttaga

SEQ ID NO: 1388134 - DNA, 25 bp, Homo sapien
cgtgcgttgccacccccatcgcgtt

SEQ ID NO: 1388135 - DNA, 25 bp, Homo sapien
cgttgccacccccatcgcgttcctc

SEQ ID NO: 1388136 - DNA, 25 bp, Homo sapien
acccccatcgcgttcctcagcctcc

SEQ ID NO: 1388137 - DNA, 25 bp, Homo sapien
ttgccacccccatcgcgttcctcag

SEQ ID NO: 1388138 - DNA, 25 bp, Homo sapien
ctttcccggctcggggtctgccgtg

SEQ ID NO: 1388139 - DNA, 25 bp, Homo sapien
tcatccagggtgtggccgccgcagc

SEQ ID NO: 1388140 - DNA, 25 bp, Homo sapien
ctcatccagggtgtggccgccgcag

SEQ ID NO: 1388141 - DNA, 25 bp, Homo sapien
gaccggtaaggcgtgtagtgagccc

SEQ ID NO: 1388142 - DNA, 25 bp, Homo sapien
ggcgtgtagtgagcccggcgggacg

SEQ ID NO: 1388143 - DNA, 25 bp, Homo sapien
ccggaccggtaaggcgtgtagtgag

SEQ ID NO: 1388144 - DNA, 25 bp, Homo sapien
gtaaggcgtgtagtgagcccggcgg

SEQ ID NO: 1388145 - DNA, 25 bp, Homo sapien
agcaggacccgctgtctgtgccctt

SEQ ID NO: 1388146 - DNA, 25 bp, Homo sapien
cagcaggacccgctgtctgtgccct

SEQ ID NO: 1388147 - DNA, 25 bp, Homo sapien
gcaggacccgctgtctgtgcccttc

SEQ ID NO: 1388148 - DNA, 25 bp, Homo sapien
tgagcatccccgtcagttccctggg

SEQ ID NO: 1388149 - DNA, 25 bp, Homo sapien
tggccaccccagtcctagctacggt

SEQ ID NO: 1388150 - DNA, 25 bp, Homo sapien
ttcctggtgtcttccgggactgcca

SEQ ID NO: 1388151 - DNA, 25 bp, Homo sapien
tagctacggttcctgcttgttttcc

SEQ ID NO: 1388152 - DNA, 25 bp, Homo sapien
tttctatccgctccaatgtcacctt

SEQ ID NO: 1388153 - DNA, 25 bp, Homo sapien
cctctgtcgtctccccattctctct

SEQ ID NO: 1388154 - DNA, 25 bp, Homo sapien
attcccagatcccacgccgtttctt

SEQ ID NO: 1388155 - DNA, 25 bp, Homo sapien
tgctccgcccagattgctttggtcc

SEQ ID NO: 1388156 - DNA, 25 bp, Homo sapien
aatttcctggcatataacttctcat

SEQ ID NO: 1388157 - DNA, 25 bp, Homo sapien
tgggctcctctttgtggaacattaa

SEQ ID NO: 1388158 - DNA, 25 bp, Homo sapien
tcctgaatcagtttgggtagcttgt

SEQ ID NO: 1388159 - DNA, 25 bp, Homo sapien
tccacaggttggtaataatgtcccc

SEQ ID NO: 1388160 - DNA, 25 bp, Homo sapien
ttccctgggggtagctaatggccat

SEQ ID NO: 1388161 - DNA, 25 bp, Homo sapien
attccctgggggtagctaatggcca

SEQ ID NO: 1388162 - DNA, 25 bp, Homo sapien
tctaattccctgggggtagctaatg

SEQ ID NO: 1388163 - DNA, 25 bp, Homo sapien
taattccctgggggtagctaatggc

SEQ ID NO: 1388164 - DNA, 25 bp, Homo sapien
cacataatcgatacactggatgcaa

SEQ ID NO: 1388165 - DNA, 25 bp, Homo sapien
tattaactataatctgtactcaaat

SEQ ID NO: 1388166 - DNA, 25 bp, Homo sapien
caaaattaatttgtgcgtattatag

SEQ ID NO: 1388167 - DNA, 25 bp, Homo sapien
ttgcctttcttaaaggttcacagat

SEQ ID NO: 1388168 - DNA, 25 bp, Homo sapien
tctattggcccctgtagaaagttaa

SEQ ID NO: 1388169 - DNA, 25 bp, Homo sapien
tgaaagttaattgctgtgctccaca

SEQ ID NO: 1388170 - DNA, 25 bp, Homo sapien
caagtataggatatggagaggcccc

SEQ ID NO: 1388171 - DNA, 25 bp, Homo sapien
gccttttaaacaagactccagtatg

SEQ ID NO: 1388172 - DNA, 25 bp, Homo sapien
tagcgtctctaaccagtcaaacatt

SEQ ID NO: 1388173 - DNA, 25 bp, Homo sapien
gtttgccattcgcagtctggcccca

SEQ ID NO: 1388174 - DNA, 25 bp, Homo sapien
aaactcacgttgtagttcaattgcc

SEQ ID NO: 1388175 - DNA, 25 bp, Homo sapien
taccttgtgccttggctcactctgt

SEQ ID NO: 1388176 - DNA, 25 bp, Homo sapien
tgaccagaaatgtagagtccagagg

SEQ ID NO: 1388177 - DNA, 25 bp, Homo sapien
tcaccatgagtatcaccgggtactg

SEQ ID NO: 1388178 - DNA, 25 bp, Homo sapien
gacctaagaagctgggtgatgacag

SEQ ID NO: 1388179 - DNA, 25 bp, Homo sapien
acccgaaatgaatgactgtagacca

SEQ ID NO: 1388180 - DNA, 25 bp, Homo sapien
gcagggcacccgtcaccataattaa

SEQ ID NO: 1388181 - DNA, 25 bp, Homo sapien
cctttattccctctagtcctagaca

SEQ ID NO: 1388182 - DNA, 25 bp, Homo sapien
tttcagtatatctatttagcagggc

SEQ ID NO: 1388183 - DNA, 25 bp, Homo sapien
tccctctagtcctagacaaacacta

SEQ ID NO: 1388184 - DNA, 25 bp, Homo sapien
gaaattactgcctaactcaaagtca

SEQ ID NO: 1388185 - DNA, 25 bp, Homo sapien
tctagtcccttaacagatagtataa

SEQ ID NO: 1388186 - DNA, 25 bp, Homo sapien
taatcctttgcccattcccaactta

SEQ ID NO: 1388187 - DNA, 25 bp, Homo sapien
tatttgtgctcttgatgttgcatca

SEQ ID NO: 1388188 - DNA, 25 bp, Homo sapien
ggagaatcgtgaagaacccctcatg

SEQ ID NO: 1388189 - DNA, 25 bp, Homo sapien
tatcatgtacaagatgggcactccc

SEQ ID NO: 1388190 - DNA, 25 bp, Homo sapien
tagatttcaagactccactcctgtg

SEQ ID NO: 1388191 - DNA, 25 bp, Homo sapien
taacggttctaaggtattctgcata

SEQ ID NO: 1388192 - DNA, 25 bp, Homo sapien
tacactagatggcaacccagaggtc

SEQ ID NO: 1388193 - DNA, 25 bp, Homo sapien
taaaccacagactgatgtcaaatgg

SEQ ID NO: 1388194 - DNA, 25 bp, Homo sapien
ggtgtggcacagttaaggcatctaa

SEQ ID NO: 1388195 - DNA, 25 bp, Homo sapien
aaattcagacagtttgcaagcgtca

SEQ ID NO: 1388196 - DNA, 25 bp, Homo sapien
ggactgtagaatttccattggctgg

SEQ ID NO: 1388197 - DNA, 25 bp, Homo sapien
tatgttctgtgctttcggtcttggt

SEQ ID NO: 1388198 - DNA, 25 bp, Homo sapien
tcataaacttccctcacggcagcac

SEQ ID NO: 1388199 - DNA, 25 bp, Homo sapien
cagtgactgttagaacataaacata

SEQ ID NO: 1388200 - DNA, 25 bp, Homo sapien
caatcttctaatatttcagtgactg

SEQ ID NO: 1388201 - DNA, 25 bp, Homo sapien
ccactggtctgggtaccggctgcta

SEQ ID NO: 1388202 - DNA, 25 bp, Homo sapien
aatccactggtctgggtaccggctg

SEQ ID NO: 1388203 - DNA, 25 bp, Homo sapien
tcctcctgggacaatccactggtct

SEQ ID NO: 1388204 - DNA, 25 bp, Homo sapien
gggacaatccactggtctgggtacc

SEQ ID NO: 1388205 - DNA, 25 bp, Homo sapien
agttgtccgccgctctccatggagc

SEQ ID NO: 1388206 - DNA, 25 bp, Homo sapien
gacgctagcgcgggtcactggaacc

SEQ ID NO: 1388207 - DNA, 25 bp, Homo sapien
aaccagggtgccgagatgaaagctc

SEQ ID NO: 1388208 - DNA, 25 bp, Homo sapien
ggagacagttgcgaagacccgctcc

SEQ ID NO: 1388209 - DNA, 25 bp, Homo sapien
agccactgtcagcaagtttgtagcc

SEQ ID NO: 1388210 - DNA, 25 bp, Homo sapien
cactgtcagcaagtttgtagcccca

SEQ ID NO: 1388211 - DNA, 25 bp, Homo sapien
tcagcaagtttgtagccccagcttc

SEQ ID NO: 1388212 - DNA, 25 bp, Homo sapien
tgtcagcaagtttgtagccccagct

SEQ ID NO: 1388213 - DNA, 25 bp, Homo sapien
aatatttgtaataagtagcaccagt

SEQ ID NO: 1388214 - DNA, 25 bp, Homo sapien
ttgtaataagtagcaccagtttctt

SEQ ID NO: 1388215 - DNA, 25 bp, Homo sapien
tttgtaataagtagcaccagtttct

SEQ ID NO: 1388216 - DNA, 25 bp, Homo sapien
tatttgtaataagtagcaccagttt

SEQ ID NO: 1388217 - DNA, 25 bp, Homo sapien
cgaacattctatggaggattgggcc

SEQ ID NO: 1388218 - DNA, 25 bp, Homo sapien
tactgcattagagccttggctgaag

SEQ ID NO: 1388219 - DNA, 25 bp, Homo sapien
gaagcaaatctgcatcttgatactg

SEQ ID NO: 1388220 - DNA, 25 bp, Homo sapien
agtactaataatacccgaacattct

SEQ ID NO: 1388221 - DNA, 25 bp, Homo sapien
aactcttattgagtaattttgggca

SEQ ID NO: 1388222 - DNA, 25 bp, Homo sapien
tcttattgagtaattttgggcaact

SEQ ID NO: 1388223 - DNA, 25 bp, Homo sapien
tattgagtaattttgggcaacttga

SEQ ID NO: 1388224 - DNA, 25 bp, Homo sapien
ttgagtaattttgggcaacttgagt

SEQ ID NO: 1388225 - DNA, 25 bp, Homo sapien
gccatgacaatcttctctgtatcct

SEQ ID NO: 1388226 - DNA, 25 bp, Homo sapien
ttagcatatgtgcagctgaagtgag

SEQ ID NO: 1388227 - DNA, 25 bp, Homo sapien
tgtgcaggggccatgacaatcttct

SEQ ID NO: 1388228 - DNA, 25 bp, Homo sapien
tggaatgcttcatgcatgtcatcct

SEQ ID NO: 1388229 - DNA, 25 bp, Homo sapien
ctggacagaccggaaagcttttctt

SEQ ID NO: 1388230 - DNA, 25 bp, Homo sapien
aggagactggacagaccggaaagct

SEQ ID NO: 1388231 - DNA, 25 bp, Homo sapien
cagacaatggtatgtgggtgagaaa

SEQ ID NO: 1388232 - DNA, 25 bp, Homo sapien
ggatccattccaagccagacaatgg

SEQ ID NO: 1388233 - DNA, 25 bp, Homo sapien
tctggccttatctgtgataagttgt

SEQ ID NO: 1388234 - DNA, 25 bp, Homo sapien
cttctggccttatctgtgataagtt

SEQ ID NO: 1388235 - DNA, 25 bp, Homo sapien
ggccttatctgtgataagttgttct

SEQ ID NO: 1388236 - DNA, 25 bp, Homo sapien
tggccttatctgtgataagttgttc

SEQ ID NO: 1388237 - DNA, 25 bp, Homo sapien
agctttggataagtcctccagcaag

SEQ ID NO: 1388238 - DNA, 25 bp, Homo sapien
gctgacaaatcactgtgtcatcaaa

SEQ ID NO: 1388239 - DNA, 25 bp, Homo sapien
gaatcatgggaaatagcctgtggtt

SEQ ID NO: 1388240 - DNA, 25 bp, Homo sapien
gaaaggcagctgcataactctccag

SEQ ID NO: 1388241 - DNA, 25 bp, Homo sapien
cttcagggaggtatcttaagagccg

SEQ ID NO: 1388242 - DNA, 25 bp, Homo sapien
tcactgctggaacaatgctgtgggc

SEQ ID NO: 1388243 - DNA, 25 bp, Homo sapien
ggcacattgaattctttggagggac

SEQ ID NO: 1388244 - DNA, 25 bp, Homo sapien
tttctcctcaaaaccaagtggtgga

SEQ ID NO: 1388245 - DNA, 25 bp, Homo sapien
aggttgtttctgtacaaggcagcga

SEQ ID NO: 1388246 - DNA, 25 bp, Homo sapien
caggttgtttctgtacaaggcagcg

SEQ ID NO: 1388247 - DNA, 25 bp, Homo sapien
taacttcagcactcagagtttacat

SEQ ID NO: 1388248 - DNA, 25 bp, Homo sapien
tcttctaacttcagcactcagagtt

SEQ ID NO: 1388249 - DNA, 25 bp, Homo sapien
ttcagcactcagagtttacataagt

SEQ ID NO: 1388250 - DNA, 25 bp, Homo sapien
tgtcttctaacttcagcactcagag

SEQ ID NO: 1388251 - DNA, 25 bp, Homo sapien
tgaggtagctatatcttgcaaaaga

SEQ ID NO: 1388252 - DNA, 25 bp, Homo sapien
gattccaggccataagagtttgatc

SEQ ID NO: 1388253 - DNA, 25 bp, Homo sapien
tcagcagaaacgcaaggattccagg

SEQ ID NO: 1388254 - DNA, 25 bp, Homo sapien
caaccattgtctttagtaagtactc

SEQ ID NO: 1388255 - DNA, 25 bp, Homo sapien
ctttttctgcttagactgttagtac

SEQ ID NO: 1388256 - DNA, 25 bp, Homo sapien
cttctttttctgcttagactgttag

SEQ ID NO: 1388257 - DNA, 25 bp, Homo sapien
tctttttctgcttagactgttagta

SEQ ID NO: 1388258 - DNA, 25 bp, Homo sapien
gttcttctttttctgcttagactgt

SEQ ID NO: 1388259 - DNA, 25 bp, Homo sapien
aaagaaaaatggttggatcagtggt

SEQ ID NO: 1388260 - DNA, 25 bp, Homo sapien
tgaaagaaaaatggttggatcagtg

SEQ ID NO: 1388261 - DNA, 25 bp, Homo sapien
ctgttataagaggaaaggaggcaaa

SEQ ID NO: 1388262 - DNA, 25 bp, Homo sapien
gaaaggaggcaaaagtgtgaaagaa

SEQ ID NO: 1388263 - DNA, 25 bp, Homo sapien
gatgtacttttagctttgtcagaaa

SEQ ID NO: 1388264 - DNA, 25 bp, Homo sapien
tgatgtacttttagctttgtcagaa

SEQ ID NO: 1388265 - DNA, 25 bp, Homo sapien
taatgatgtacttttagctttgtca

SEQ ID NO: 1388266 - DNA, 25 bp, Homo sapien
caatttcacattccattccacattg

SEQ ID NO: 1388267 - DNA, 25 bp, Homo sapien
ctctctcatacttagttaaccattt

SEQ ID NO: 1388268 - DNA, 25 bp, Homo sapien
cctctctcatacttagttaaccatt

SEQ ID NO: 1388269 - DNA, 25 bp, Homo sapien
ctctcatacttagttaaccattttg

SEQ ID NO: 1388270 - DNA, 25 bp, Homo sapien
tctctcatacttagttaaccatttt

SEQ ID NO: 1388271 - DNA, 25 bp, Homo sapien
aaactatgtcaacaagcccactgta

SEQ ID NO: 1388272 - DNA, 25 bp, Homo sapien
aaatgcagcagtggtaacatggttc

SEQ ID NO: 1388273 - DNA, 25 bp, Homo sapien
aatgcagcagtggtaacatggttca

SEQ ID NO: 1388274 - DNA, 25 bp, Homo sapien
cataaaagggcaaaactatgtcaac

SEQ ID NO: 1388275 - DNA, 25 bp, Homo sapien
aatatcatcttggatgtgcttcaca

SEQ ID NO: 1388276 - DNA, 25 bp, Homo sapien
cattgttgcacaaaggtacagtgga

SEQ ID NO: 1388277 - DNA, 25 bp, Homo sapien
tacttatttaaccttgggcaagata

SEQ ID NO: 1388278 - DNA, 25 bp, Homo sapien
gcctatttcccacgattgttttgag

SEQ ID NO: 1388279 - DNA, 25 bp, Homo sapien
tacttttagctcttttcttagccca

SEQ ID NO: 1388280 - DNA, 25 bp, Homo sapien
tgtacctttgctttcacgagggctc

SEQ ID NO: 1388281 - DNA, 25 bp, Homo sapien
gctctttcctggaatgatatgtcca

SEQ ID NO: 1388282 - DNA, 25 bp, Homo sapien
cttagcccacttgtacccaggtttg

SEQ ID NO: 1388283 - DNA, 25 bp, Homo sapien
gggccagtgactcgtagtagatccc

SEQ ID NO: 1388284 - DNA, 25 bp, Homo sapien
cctgatcgagttaaggcgcggcggc

SEQ ID NO: 1388285 - DNA, 25 bp, Homo sapien
gccgctggagaaggatgcggacggg

SEQ ID NO: 1388286 - DNA, 25 bp, Homo sapien
ctcgtagtagatccctccgcgcgga

SEQ ID NO: 1388287 - DNA, 25 bp, Homo sapien
gctgggcttcggagcgtagcgccag

SEQ ID NO: 1388288 - DNA, 25 bp, Homo sapien
cttcggagcgtagcgccagggcctg

SEQ ID NO: 1388289 - DNA, 25 bp, Homo sapien
agtcgaggcatttgcgctgggcttc

SEQ ID NO: 1388290 - DNA, 25 bp, Homo sapien
agtttcagccaaacttcgggcggcg

SEQ ID NO: 1388291 - DNA, 25 bp, Homo sapien
cccatgtggatctgcccaggcggcg

SEQ ID NO: 1388292 - DNA, 25 bp, Homo sapien
tccccatgtggatctgcccaggcgg

SEQ ID NO: 1388293 - DNA, 25 bp, Homo sapien
gagtggggctcctctatcgggaccc

SEQ ID NO: 1388294 - DNA, 25 bp, Homo sapien
gagagagtggggctcctctatcggg

SEQ ID NO: 1388295 - DNA, 25 bp, Homo sapien
tgtgctgcgcgacccccgcgcatgg

SEQ ID NO: 1388296 - DNA, 25 bp, Homo sapien
ccccgcgcatggtgagtatcgggct

SEQ ID NO: 1388297 - DNA, 25 bp, Homo sapien
tgcgccccgctctgctgtgggcgct

SEQ ID NO: 1388298 - DNA, 25 bp, Homo sapien
agtatcgggctgaggggcgctgtcc

SEQ ID NO: 1388299 - DNA, 25 bp, Homo sapien
ggagcgaggccactcgctgggttcc

SEQ ID NO: 1388300 - DNA, 25 bp, Homo sapien
tctgtgtgggaaggccaggctcggc

SEQ ID NO: 1388301 - DNA, 25 bp, Homo sapien
gcgcggagcgaggccactcgctggg

SEQ ID NO: 1388302 - DNA, 25 bp, Homo sapien
gcggagcgaggccactcgctgggtt

SEQ ID NO: 1388303 - DNA, 25 bp, Homo sapien
gttagcttggtcagagaacaagatg

SEQ ID NO: 1388304 - DNA, 25 bp, Homo sapien
tgggtctagccagttagcttggtca

SEQ ID NO: 1388305 - DNA, 25 bp, Homo sapien
gcttggtcagagaacaagatgacta

SEQ ID NO: 1388306 - DNA, 25 bp, Homo sapien
gtacagtgggtctagccagttagct

SEQ ID NO: 1388307 - DNA, 25 bp, Homo sapien
agcaacctgttgttttggcaaccca

SEQ ID NO: 1388308 - DNA, 25 bp, Homo sapien
gtaggacagaactgactgaagcaac

SEQ ID NO: 1388309 - DNA, 25 bp, Homo sapien
cagaactgactgaagcaacctgttg

SEQ ID NO: 1388310 - DNA, 25 bp, Homo sapien
caaattgattagttgtaggacagaa

SEQ ID NO: 1388311 - DNA, 25 bp, Homo sapien
ttttgacattcgttgctccagctga

SEQ ID NO: 1388312 - DNA, 25 bp, Homo sapien
taaggcaccccgctggttttgacat

SEQ ID NO: 1388313 - DNA, 25 bp, Homo sapien
gccctgcaggtctcaagtgtttggt

SEQ ID NO: 1388314 - DNA, 25 bp, Homo sapien
tgaggacatttctgatcaaccaagg

SEQ ID NO: 1388315 - DNA, 25 bp, Homo sapien
tcaggcatgcgaagtggcctatgtc

SEQ ID NO: 1388316 - DNA, 25 bp, Homo sapien
tgcgaagtggcctatgtcggatttc

SEQ ID NO: 1388317 - DNA, 25 bp, Homo sapien
aagtggcctatgtcggatttctgag

SEQ ID NO: 1388318 - DNA, 25 bp, Homo sapien
gcttatctgatcaggcatgcgaagt

SEQ ID NO: 1388319 - DNA, 25 bp, Homo sapien
aggggccaggctgtagattttcagc

SEQ ID NO: 1388320 - DNA, 25 bp, Homo sapien
cattaggtgggtgattttggtttct

SEQ ID NO: 1388321 - DNA, 25 bp, Homo sapien
tcagcatggtgaggtgataatacat

SEQ ID NO: 1388322 - DNA, 25 bp, Homo sapien
agtatattgctgatttggatcaggg

SEQ ID NO: 1388323 - DNA, 25 bp, Homo sapien
tccctttgtaagtccctcttgttca

SEQ ID NO: 1388324 - DNA, 25 bp, Homo sapien
tcttgttaatgtgatgaggtgatga

SEQ ID NO: 1388325 - DNA, 25 bp, Homo sapien
cactgggcccgaagtggtgaaactg

SEQ ID NO: 1388326 - DNA, 25 bp, Homo sapien
ggtgatgatgggaaggacattccca

SEQ ID NO: 1388327 - DNA, 25 bp, Homo sapien
actttataagcatgaagctgccttc

SEQ ID NO: 1388328 - DNA, 25 bp, Homo sapien
cactttcatggcttcaggttatcaa

SEQ ID NO: 1388329 - DNA, 25 bp, Homo sapien
gaaatgaggtctgtcccggtctcac

SEQ ID NO: 1388330 - DNA, 25 bp, Homo sapien
ttttgctcctgagtaaagccacgag

SEQ ID NO: 1388331 - DNA, 25 bp, Homo sapien
tcactgttgggaagaagtccaatag

SEQ ID NO: 1388332 - DNA, 25 bp, Homo sapien
ggagaggacacctaagggtcactgt

SEQ ID NO: 1388333 - DNA, 25 bp, Homo sapien
tggactgttgggctgctagtctcat

SEQ ID NO: 1388334 - DNA, 25 bp, Homo sapien
tgttgggaagaagtccaatagttct

SEQ ID NO: 1388335 - DNA, 25 bp, Homo sapien
tgtctgacagtgaatgcagtttctc

SEQ ID NO: 1388336 - DNA, 25 bp, Homo sapien
gaatgcagtttctcctgcataagac

SEQ ID NO: 1388337 - DNA, 25 bp, Homo sapien
aatgcagtttctcctgcataagaca

SEQ ID NO: 1388338 - DNA, 25 bp, Homo sapien
ccagagactgtctgacagtgaatgc

SEQ ID NO: 1388339 - DNA, 25 bp, Homo sapien
gcacatgttaacttgaacgtttgga

SEQ ID NO: 1388340 - DNA, 25 bp, Homo sapien
catgttaacttgaacgtttggaggt

SEQ ID NO: 1388341 - DNA, 25 bp, Homo sapien
cacatgttaacttgaacgtttggag

SEQ ID NO: 1388342 - DNA, 25 bp, Homo sapien
ttagcacatgttaacttgaacgttt

SEQ ID NO: 1388343 - DNA, 25 bp, Homo sapien
gatcccctgcttggagtgggacagt

SEQ ID NO: 1388344 - DNA, 25 bp, Homo sapien
ggtcaagacatatacaaccacaaac

SEQ ID NO: 1388345 - DNA, 25 bp, Homo sapien
cttggagtgggacagtggtcaagac

SEQ ID NO: 1388346 - DNA, 25 bp, Homo sapien
agtggtcaagacatatacaaccaca

SEQ ID NO: 1388347 - DNA, 25 bp, Homo sapien
gaaactctggtggaggtccgtagca

SEQ ID NO: 1388348 - DNA, 25 bp, Homo sapien
ggcatgagcacaaatgttaggacct

SEQ ID NO: 1388349 - DNA, 25 bp, Homo sapien
cctgatgtgcaaatcggtcatccaa

SEQ ID NO: 1388350 - DNA, 25 bp, Homo sapien
gacctgaaaggtggtgaactctgcc

SEQ ID NO: 1388351 - DNA, 25 bp, Homo sapien
gggatcctctgttaatcagtgagca

SEQ ID NO: 1388352 - DNA, 25 bp, Homo sapien
tatatgagagactatgcgtggcaca

SEQ ID NO: 1388353 - DNA, 25 bp, Homo sapien
ttatccacctaaatgcacccagctg

SEQ ID NO: 1388354 - DNA, 25 bp, Homo sapien
cactttttgatgagctgatagatga

SEQ ID NO: 1388355 - DNA, 25 bp, Homo sapien
agacggagcatcgctctttctccca

SEQ ID NO: 1388356 - DNA, 25 bp, Homo sapien
gttatactgatcgtatatttgcagg

SEQ ID NO: 1388357 - DNA, 25 bp, Homo sapien
gcttttgtgacagacttcttctggg

SEQ ID NO: 1388358 - DNA, 25 bp, Homo sapien
cctggccgcatgtgtcattttcttg

SEQ ID NO: 1388359 - DNA, 25 bp, Homo sapien
aaattagctggcatgttacttggcg

SEQ ID NO: 1388360 - DNA, 25 bp, Homo sapien
gctggcatgttacttggcgcttgta

SEQ ID NO: 1388361 - DNA, 25 bp, Homo sapien
ggcatgttacttggcgcttgtaatc

SEQ ID NO: 1388362 - DNA, 25 bp, Homo sapien
tagctggcatgttacttggcgcttg

SEQ ID NO: 1388363 - DNA, 25 bp, Homo sapien
cattgtggttgaatcatcttgtcaa

SEQ ID NO: 1388364 - DNA, 25 bp, Homo sapien
tcttgtcaacttccttgatgtgccc

SEQ ID NO: 1388365 - DNA, 25 bp, Homo sapien
tgaagagtaaagatgtggaaatccc

SEQ ID NO: 1388366 - DNA, 25 bp, Homo sapien
tccctgtctagaccctggtactggg

SEQ ID NO: 1388367 - DNA, 25 bp, Homo sapien
tcttgcactgagaatagttatgtcc

SEQ ID NO: 1388368 - DNA, 25 bp, Homo sapien
gactcaggcagggaatatggcatta

SEQ ID NO: 1388369 - DNA, 25 bp, Homo sapien
tatggcattatggtctacacgtaga

SEQ ID NO: 1388370 - DNA, 25 bp, Homo sapien
gcttaatgtgacctgcttctctgaa

SEQ ID NO: 1388371 - DNA, 25 bp, Homo sapien
gcttcgccctttacgtggacaatag

SEQ ID NO: 1388372 - DNA, 25 bp, Homo sapien
tttgaggaacagcacatcagcttcg

SEQ ID NO: 1388373 - DNA, 25 bp, Homo sapien
gcacatcagcttcgccctttacgtg

SEQ ID NO: 1388374 - DNA, 25 bp, Homo sapien
ttgaggaacagcacatcagcttcgc

SEQ ID NO: 1388375 - DNA, 25 bp, Homo sapien
tgggtcagtgggcatggctctattc

SEQ ID NO: 1388376 - DNA, 25 bp, Homo sapien
tttggaagcccagacataggatggg

SEQ ID NO: 1388377 - DNA, 25 bp, Homo sapien
tgtgcagcacatgccgggagtgatc

SEQ ID NO: 1388378 - DNA, 25 bp, Homo sapien
ggtgtgacacgttcacataactgtg

SEQ ID NO: 1388379 - DNA, 25 bp, Homo sapien
tggtttcaatgaacctaacctcatt

SEQ ID NO: 1388380 - DNA, 25 bp, Homo sapien
cctggtttcaatgaacctaacctca

SEQ ID NO: 1388381 - DNA, 25 bp, Homo sapien
ctggtttcaatgaacctaacctcat

SEQ ID NO: 1388382 - DNA, 25 bp, Homo sapien
catcaccattatgatatcaggactg

SEQ ID NO: 1388383 - DNA, 25 bp, Homo sapien
tattctaatgatcatcctctaaaca

SEQ ID NO: 1388384 - DNA, 25 bp, Homo sapien
tccatcaccattatgatatcaggac

SEQ ID NO: 1388385 - DNA, 25 bp, Homo sapien
aatatcctgtattctaatgatcatc

SEQ ID NO: 1388386 - DNA, 25 bp, Homo sapien
gacccctacagctctgaagtgtatg

SEQ ID NO: 1388387 - DNA, 25 bp, Homo sapien
gaacacacccttattcattggctgg

SEQ ID NO: 1388388 - DNA, 25 bp, Homo sapien
tcagctgttatcatcctaggtggac

SEQ ID NO: 1388389 - DNA, 25 bp, Homo sapien
gactgaatcgtataatagaacacac

SEQ ID NO: 1388390 - DNA, 25 bp, Homo sapien
tgcatgaggcccacccctattaagg

SEQ ID NO: 1388391 - DNA, 25 bp, Homo sapien
gcaccctggtgctcggtcacagtga

SEQ ID NO: 1388392 - DNA, 25 bp, Homo sapien
tcatgtttggccaaatgtcctggca

SEQ ID NO: 1388393 - DNA, 25 bp, Homo sapien
tcccaatgttaatcgtatctgaaag

SEQ ID NO: 1388394 - DNA, 25 bp, Homo sapien
tgtcaatccattgggtggttgagac

SEQ ID NO: 1388395 - DNA, 25 bp, Homo sapien
tagtttatatttagttgcataatcc

SEQ ID NO: 1388396 - DNA, 25 bp, Homo sapien
gagttagtattgaggttcaggtgaa

SEQ ID NO: 1388397 - DNA, 25 bp, Homo sapien
tcctggtgtttggacagagagacag

SEQ ID NO: 1388398 - DNA, 25 bp, Homo sapien
gatggtgtgatcctatgcatagaaa

SEQ ID NO: 1388399 - DNA, 25 bp, Homo sapien
gcactaaatataaggatggcataag

SEQ ID NO: 1388400 - DNA, 25 bp, Homo sapien
tgctgggattcgaagccaagcctgg

SEQ ID NO: 1388401 - DNA, 25 bp, Homo sapien
tctggatgccattgagagtctggct

SEQ ID NO: 1388402 - DNA, 25 bp, Homo sapien
ataatacatatccttaaactatata

SEQ ID NO: 1388403 - DNA, 25 bp, Homo sapien
atgaactaatgcctactaggtgagg

SEQ ID NO: 1388404 - DNA, 25 bp, Homo sapien
tgaactaatgcctactaggtgaggg

SEQ ID NO: 1388405 - DNA, 25 bp, Homo sapien
aactaatgcctactaggtgaggggc

SEQ ID NO: 1388406 - DNA, 25 bp, Homo sapien
actaatgcctactaggtgaggggct

SEQ ID NO: 1388407 - DNA, 25 bp, Homo sapien
gatggccatgaaattgctccaatgt

SEQ ID NO: 1388408 - DNA, 25 bp, Homo sapien
tattattacaaatacaactgcaggg

SEQ ID NO: 1388409 - DNA, 25 bp, Homo sapien
aactgcagggaccagactgacacat

SEQ ID NO: 1388410 - DNA, 25 bp, Homo sapien
ggccatgaaattgctccaatgtgta

SEQ ID NO: 1388411 - DNA, 25 bp, Homo sapien
gccaaaactgggaagtacttgccta

SEQ ID NO: 1388412 - DNA, 25 bp, Homo sapien
accatttcctctgaactcacttttg

SEQ ID NO: 1388413 - DNA, 25 bp, Homo sapien
tgccaacatttgtgtagtcatacag

SEQ ID NO: 1388414 - DNA, 25 bp, Homo sapien
tagtcatacagtgggatcacattgt

SEQ ID NO: 1388415 - DNA, 25 bp, Homo sapien
tagtaaaatagcagtccccttgtgt

SEQ ID NO: 1388416 - DNA, 25 bp, Homo sapien
tgattttcaagtttaggcactacct

SEQ ID NO: 1388417 - DNA, 25 bp, Homo sapien
tcacatagaagcaattatttcgtta

SEQ ID NO: 1388418 - DNA, 25 bp, Homo sapien
ttcgttatttatctccttatgtcta

SEQ ID NO: 1388419 - DNA, 25 bp, Homo sapien
cctccaacacgtttgtgtcctcgtt

SEQ ID NO: 1388420 - DNA, 25 bp, Homo sapien
acacgtttgtgtcctcgtttgctgg

SEQ ID NO: 1388421 - DNA, 25 bp, Homo sapien
tgtgtcctcgtttgctgggtcaatt

SEQ ID NO: 1388422 - DNA, 25 bp, Homo sapien
cgtttgtgtcctcgtttgctgggtc

SEQ ID NO: 1388423 - DNA, 25 bp, Homo sapien
aagtactggatctgatgggcccagc

SEQ ID NO: 1388424 - DNA, 25 bp, Homo sapien
agtactggatctgatgggcccagct

SEQ ID NO: 1388425 - DNA, 25 bp, Homo sapien
tcaggcactctctccttgagcaggg

SEQ ID NO: 1388426 - DNA, 25 bp, Homo sapien
acatcttcatgtgtagtaccaggaa

SEQ ID NO: 1388427 - DNA, 25 bp, Homo sapien
cttcatgtgtagtaccaggaagaca

SEQ ID NO: 1388428 - DNA, 25 bp, Homo sapien
ggagagcgggacatcttcatgtgta

SEQ ID NO: 1388429 - DNA, 25 bp, Homo sapien
gctgaagatggttggccagatgagg

SEQ ID NO: 1388430 - DNA, 25 bp, Homo sapien
agatgagggcactgaaatccatgtc

SEQ ID NO: 1388431 - DNA, 25 bp, Homo sapien
gagggcactgaaatccatgtcctct

SEQ ID NO: 1388432 - DNA, 25 bp, Homo sapien
atgagggcactgaaatccatgtcct

SEQ ID NO: 1388433 - DNA, 25 bp, Homo sapien
gggcaatggcccaatgacgtgaaca

SEQ ID NO: 1388434 - DNA, 25 bp, Homo sapien
caaagagacatagggcaatggccca

SEQ ID NO: 1388435 - DNA, 25 bp, Homo sapien
ccaaagagacatagggcaatggccc

SEQ ID NO: 1388436 - DNA, 25 bp, Homo sapien
ggcccaatgacgtgaacaaaagaaa

SEQ ID NO: 1388437 - DNA, 25 bp, Homo sapien
ctggtcgctgggtccgggactccaa

SEQ ID NO: 1388438 - DNA, 25 bp, Homo sapien
tggtcgctgggtccgggactccaat

SEQ ID NO: 1388439 - DNA, 25 bp, Homo sapien
gggactccaattgcacacagccagt

SEQ ID NO: 1388440 - DNA, 25 bp, Homo sapien
tgggtccgggactccaattgcacac

SEQ ID NO: 1388441 - DNA, 25 bp, Homo sapien
tctgcttatggagcaatagagagga

SEQ ID NO: 1388442 - DNA, 25 bp, Homo sapien
tttcccccattctgcttatggagca

SEQ ID NO: 1388443 - DNA, 25 bp, Homo sapien
cattctgcttatggagcaatagaga

SEQ ID NO: 1388444 - DNA, 25 bp, Homo sapien
ccccattctgcttatggagcaatag

SEQ ID NO: 1388445 - DNA, 25 bp, Homo sapien
gacttgaactctgatcactgtattc

SEQ ID NO: 1388446 - DNA, 25 bp, Homo sapien
aaggtcccagtgagacttgaactct

SEQ ID NO: 1388447 - DNA, 25 bp, Homo sapien
actgtattcagagtccaaagtgctc

SEQ ID NO: 1388448 - DNA, 25 bp, Homo sapien
tcactgtattcagagtccaaagtgc

SEQ ID NO: 1388449 - DNA, 25 bp, Homo sapien
atacttagcagccatagttcccaca

SEQ ID NO: 1388450 - DNA, 25 bp, Homo sapien
ttctgatccctcaagcaacaccaag

SEQ ID NO: 1388451 - DNA, 25 bp, Homo sapien
cacacctatgttaaggcatttcttc

SEQ ID NO: 1388452 - DNA, 25 bp, Homo sapien
cacactagcttataactggaggtaa

SEQ ID NO: 1388453 - DNA, 25 bp, Homo sapien
agctggtcgccgaaagcttgctccg

SEQ ID NO: 1388454 - DNA, 25 bp, Homo sapien
tatatgcggaatgctacatcacaag

SEQ ID NO: 1388455 - DNA, 25 bp, Homo sapien
gccattgttcgaagaagggtgccca

SEQ ID NO: 1388456 - DNA, 25 bp, Homo sapien
gcttgctccgcaatacaggctaagg

SEQ ID NO: 1388457 - DNA, 25 bp, Homo sapien
ttccccttgccggctccggcagcgg

SEQ ID NO: 1388458 - DNA, 25 bp, Homo sapien
cgctggtcggacctgagtgtcccag

SEQ ID NO: 1388459 - DNA, 25 bp, Homo sapien
gcagcgggttggtcggctgagcggc

SEQ ID NO: 1388460 - DNA, 25 bp, Homo sapien
gctgagcggcagaaaggcagacggg

SEQ ID NO: 1388461 - DNA, 25 bp, Homo sapien
gggaaatgtgcattcagcttggcaa

SEQ ID NO: 1388462 - DNA, 25 bp, Homo sapien
taacctagagctatctaaagatggc

SEQ ID NO: 1388463 - DNA, 25 bp, Homo sapien
gatcatgcctgagctgtaacaacgc

SEQ ID NO: 1388464 - DNA, 25 bp, Homo sapien
tgtaacagccactcgaattctatct

SEQ ID NO: 1388465 - DNA, 25 bp, Homo sapien
cctttgagaaacagttcaggtctct

SEQ ID NO: 1388466 - DNA, 25 bp, Homo sapien
taggactaaacgcttaacgttcaca

SEQ ID NO: 1388467 - DNA, 25 bp, Homo sapien
tctatattccagacttcctagtagg

SEQ ID NO: 1388468 - DNA, 25 bp, Homo sapien
cgcttaacgttcacacgggaattca

SEQ ID NO: 1388469 - DNA, 25 bp, Homo sapien
cgtggggctcgaacccacgaccctg

SEQ ID NO: 1388470 - DNA, 25 bp, Homo sapien
ggctcgaacccacgaccctgagatt

SEQ ID NO: 1388471 - DNA, 25 bp, Homo sapien
tcatgctctaccgactgagctagcc

SEQ ID NO: 1388472 - DNA, 25 bp, Homo sapien
tcgaacccacgaccctgagattaag

SEQ ID NO: 1388473 - DNA, 25 bp, Homo sapien
tgccgtgactcggattcgaaccgag

SEQ ID NO: 1388474 - DNA, 25 bp, Homo sapien
tgactcggattcgaaccgaggttgc

SEQ ID NO: 1388475 - DNA, 25 bp, Homo sapien
ttcgaaccgaggttgctgcggccac

SEQ ID NO: 1388476 - DNA, 25 bp, Homo sapien
ctcggattcgaaccgaggttgctgc

SEQ ID NO: 1388477 - DNA, 25 bp, Homo sapien
attgtgggagcttgtgctgacttcc

SEQ ID NO: 1388478 - DNA, 25 bp, Homo sapien
cattgtgggagcttgtgctgacttc

SEQ ID NO: 1388479 - DNA, 25 bp, Homo sapien
acaagaagcgctgtgtactctctgg

SEQ ID NO: 1388480 - DNA, 25 bp, Homo sapien
tatgctcaccactataccaccaacg

SEQ ID NO: 1388481 - DNA, 25 bp, Homo sapien
atcgaacccgggtcaactgcttgga

SEQ ID NO: 1388482 - DNA, 25 bp, Homo sapien
gcttggaaggcagctatgctcacca

SEQ ID NO: 1388483 - DNA, 25 bp, Homo sapien
gaatcgaacccgggtcaactgcttg

SEQ ID NO: 1388484 - DNA, 25 bp, Homo sapien
gggccgcggcggtgagagcgccgaa

SEQ ID NO: 1388485 - DNA, 25 bp, Homo sapien
cccgggccgcggcggtgagagcgcc

SEQ ID NO: 1388486 - DNA, 25 bp, Homo sapien
atcgaacccgggccgcggcggtgag

SEQ ID NO: 1388487 - DNA, 25 bp, Homo sapien
gccgcggcggtgagagcgccgaatc

SEQ ID NO: 1388488 - DNA, 25 bp, Homo sapien
caaccctaagaagactgaaatgtgg

SEQ ID NO: 1388489 - DNA, 25 bp, Homo sapien
caggaatgaggcagtctagcaaaac

SEQ ID NO: 1388490 - DNA, 25 bp, Homo sapien
gagagtcaggactttcacccaaact

SEQ ID NO: 1388491 - DNA, 25 bp, Homo sapien
aaattactcaatctgggtcaggcgc

SEQ ID NO: 1388492 - DNA, 25 bp, Homo sapien
taataatcttctgataccccagcac

SEQ ID NO: 1388493 - DNA, 25 bp, Homo sapien
gaatttatagtgctctgttgaccga

SEQ ID NO: 1388494 - DNA, 25 bp, Homo sapien
taagttctcagtactcagctcctaa

SEQ ID NO: 1388495 - DNA, 25 bp, Homo sapien
catctgacagctggccaaacgaaac

SEQ ID NO: 1388496 - DNA, 25 bp, Homo sapien
ggagtacctgcgctatgaagacacg

SEQ ID NO: 1388497 - DNA, 25 bp, Homo sapien
tgacttcgcttagtgtaaccagcgg

SEQ ID NO: 1388498 - DNA, 25 bp, Homo sapien
gggatcccagcagtgcaaacagact

SEQ ID NO: 1388499 - DNA, 25 bp, Homo sapien
gaagttactcgtgtcaaagccgtta

SEQ ID NO: 1388500 - DNA, 25 bp, Homo sapien
gagatggtgatcatgagacctggaa

SEQ ID NO: 1388501 - DNA, 25 bp, Homo sapien
atgagatggtgatcatgagacctgg

SEQ ID NO: 1388502 - DNA, 25 bp, Homo sapien
gatggtgatcatgagacctggaaac

SEQ ID NO: 1388503 - DNA, 25 bp, Homo sapien
tgagatggtgatcatgagacctgga

SEQ ID NO: 1388504 - DNA, 25 bp, Homo sapien
tattatctcagggacatgcgcatca

SEQ ID NO: 1388505 - DNA, 25 bp, Homo sapien
gaagatcaccgattggagagcccaa

SEQ ID NO: 1388506 - DNA, 25 bp, Homo sapien
catgttcccgaattgtggtccccaa

SEQ ID NO: 1388507 - DNA, 25 bp, Homo sapien
cactgtgacttcaaacccaaggagg

SEQ ID NO: 1388508 - DNA, 25 bp, Homo sapien
caattgagatgtttgtcctttgcac

SEQ ID NO: 1388509 - DNA, 25 bp, Homo sapien
tgtatcctaaagaaagacacgaggg

SEQ ID NO: 1388510 - DNA, 25 bp, Homo sapien
cagggaacagacagattatatgaac

SEQ ID NO: 1388511 - DNA, 25 bp, Homo sapien
ttatatgaactctgaccaaatgatt

SEQ ID NO: 1388512 - DNA, 25 bp, Homo sapien
tatagcctcgtccatattgtcatca

SEQ ID NO: 1388513 - DNA, 25 bp, Homo sapien
tcagtatatagcctcgtccatattg

SEQ ID NO: 1388514 - DNA, 25 bp, Homo sapien
gtatatagcctcgtccatattgtca

SEQ ID NO: 1388515 - DNA, 25 bp, Homo sapien
agcctcgtccatattgtcatcactg

SEQ ID NO: 1388516 - DNA, 25 bp, Homo sapien
aagtaaaagtcaatttggcattcac

SEQ ID NO: 1388517 - DNA, 25 bp, Homo sapien
aaagtaaaagtcaatttggcattca

SEQ ID NO: 1388518 - DNA, 25 bp, Homo sapien
tcctgtgtaccagacccctttcctc

SEQ ID NO: 1388519 - DNA, 25 bp, Homo sapien
cctgtgtaccagacccctttcctct

SEQ ID NO: 1388520 - DNA, 25 bp, Homo sapien
taccctggggggcactatctctgtt

SEQ ID NO: 1388521 - DNA, 25 bp, Homo sapien
ctgtagtttgtagaaggggggcaga

SEQ ID NO: 1388522 - DNA, 25 bp, Homo sapien
ggcactatctctgttggcatgccaa

SEQ ID NO: 1388523 - DNA, 25 bp, Homo sapien
tgttggcatgccaaccctctgagga

SEQ ID NO: 1388524 - DNA, 25 bp, Homo sapien
ctcctctgaagttacttcttcttcc

SEQ ID NO: 1388525 - DNA, 25 bp, Homo sapien
catcctcctctgaagttacttcttc

SEQ ID NO: 1388526 - DNA, 25 bp, Homo sapien
ctcatcctcctctgaagttacttct

SEQ ID NO: 1388527 - DNA, 25 bp, Homo sapien
tcctcctctgaagttacttcttctt

SEQ ID NO: 1388528 - DNA, 25 bp, Homo sapien
tcatgtggggatgaataggaataga

SEQ ID NO: 1388529 - DNA, 25 bp, Homo sapien
ctcatgtggggatgaataggaatag

SEQ ID NO: 1388530 - DNA, 25 bp, Homo sapien
atgtggggatgaataggaatagaaa

SEQ ID NO: 1388531 - DNA, 25 bp, Homo sapien
catgtggggatgaataggaatagaa

SEQ ID NO: 1388532 - DNA, 25 bp, Homo sapien
gaggtctctatgcacacttcctcct

SEQ ID NO: 1388533 - DNA, 25 bp, Homo sapien
ggtctctatgcacacttcctcctca

SEQ ID NO: 1388534 - DNA, 25 bp, Homo sapien
aggaggtctctatgcacacttcctc

SEQ ID NO: 1388535 - DNA, 25 bp, Homo sapien
tgaggcacacatgggccaagagaga

SEQ ID NO: 1388536 - DNA, 25 bp, Homo sapien
tctgtattgtttcctccttatcttc

SEQ ID NO: 1388537 - DNA, 25 bp, Homo sapien
ctgtattgtttcctccttatcttct

SEQ ID NO: 1388538 - DNA, 25 bp, Homo sapien
tgtattgtttcctccttatcttctg

SEQ ID NO: 1388539 - DNA, 25 bp, Homo sapien
tcatgtggccactatgacatctagc

SEQ ID NO: 1388540 - DNA, 25 bp, Homo sapien
gatcaaaaggtaaaccttcagagag

SEQ ID NO: 1388541 - DNA, 25 bp, Homo sapien
cacttggtagattgggtataggaac

SEQ ID NO: 1388542 - DNA, 25 bp, Homo sapien
agcaaattttgccagctttatagcc

SEQ ID NO: 1388543 - DNA, 25 bp, Homo sapien
tagcttccgcactcggatctttagc

SEQ ID NO: 1388544 - DNA, 25 bp, Homo sapien
tcggatctttagctcccggggtaga

SEQ ID NO: 1388545 - DNA, 25 bp, Homo sapien
gttccttctgtagcttccgcactcg

SEQ ID NO: 1388546 - DNA, 25 bp, Homo sapien
agctcccggggtagacgccgccaat

SEQ ID NO: 1388547 - DNA, 25 bp, Homo sapien
ttgtcaatcggacctgacatctgat

SEQ ID NO: 1388548 - DNA, 25 bp, Homo sapien
tatttgtctgaataacgctccacat

SEQ ID NO: 1388549 - DNA, 25 bp, Homo sapien
cagggttccaatcgatggcattgtc

SEQ ID NO: 1388550 - DNA, 25 bp, Homo sapien
acctgacatctgatatttgtctgaa

SEQ ID NO: 1388551 - DNA, 25 bp, Homo sapien
ataagaaaccaggatttcagtattc

SEQ ID NO: 1388552 - DNA, 25 bp, Homo sapien
cctacttatacacgtgaaatgggat

SEQ ID NO: 1388553 - DNA, 25 bp, Homo sapien
cagtggaaagtatgctagggaataa

SEQ ID NO: 1388554 - DNA, 25 bp, Homo sapien
ttgttggttggtgcttataatatcc

SEQ ID NO: 1388555 - DNA, 25 bp, Homo sapien
ggcaaaggtactgggcggaactcca

SEQ ID NO: 1388556 - DNA, 25 bp, Homo sapien
cctcgcctgagggcaaaggtactgg

SEQ ID NO: 1388557 - DNA, 25 bp, Homo sapien
ggacagctggccggatgaagtaggg

SEQ ID NO: 1388558 - DNA, 25 bp, Homo sapien
ttgcttcagtgccaggacatattcc

SEQ ID NO: 1388559 - DNA, 25 bp, Homo sapien
tctaacactcccactgagcagaggg

SEQ ID NO: 1388560 - DNA, 25 bp, Homo sapien
tgctagtacaaatttaggaagaccc

SEQ ID NO: 1388561 - DNA, 25 bp, Homo sapien
cagagggccaaatgacaatcgaggg

SEQ ID NO: 1388562 - DNA, 25 bp, Homo sapien
cagaatcatgtacagtcagccaggg

SEQ ID NO: 1388563 - DNA, 25 bp, Homo sapien
aagcatcccctttcccaatgcccac

SEQ ID NO: 1388564 - DNA, 25 bp, Homo sapien
cacgttgaaggtcaactggccccgg

SEQ ID NO: 1388565 - DNA, 25 bp, Homo sapien
gttgaaggtcaactggccccggcca

SEQ ID NO: 1388566 - DNA, 25 bp, Homo sapien
cctccacgttgaaggtcaactggcc

SEQ ID NO: 1388567 - DNA, 25 bp, Homo sapien
tgggtattcagagatccagtgaata

SEQ ID NO: 1388568 - DNA, 25 bp, Homo sapien
gtattcagagatccagtgaataaac

SEQ ID NO: 1388569 - DNA, 25 bp, Homo sapien
gggtattcagagatccagtgaataa

SEQ ID NO: 1388570 - DNA, 25 bp, Homo sapien
ctgggtattcagagatccagtgaat

SEQ ID NO: 1388571 - DNA, 25 bp, Homo sapien
aagttactgagaggcaggtttcaac

SEQ ID NO: 1388572 - DNA, 25 bp, Homo sapien
gattctatggatatagcagtgtgca

SEQ ID NO: 1388573 - DNA, 25 bp, Homo sapien
catcaaatttaaggaaggcagtaca

SEQ ID NO: 1388574 - DNA, 25 bp, Homo sapien
agacaaaaacatgctgcacccacgg

SEQ ID NO: 1388575 - DNA, 25 bp, Homo sapien
ggtgagttttctcggccaatgcagg

SEQ ID NO: 1388576 - DNA, 25 bp, Homo sapien
cgaccaacttgaaatgtactgggct

SEQ ID NO: 1388577 - DNA, 25 bp, Homo sapien
tactgggcttcctcaagtcggtggc

SEQ ID NO: 1388578 - DNA, 25 bp, Homo sapien
cctcccggagctccctattggtgag

SEQ ID NO: 1388579 - DNA, 25 bp, Homo sapien
ccaagtttctctgcgatgggtgttc

SEQ ID NO: 1388580 - DNA, 25 bp, Homo sapien
ttatctaagaggtctacataaggga

SEQ ID NO: 1388581 - DNA, 25 bp, Homo sapien
attaaactacaggaagaaagccaca

SEQ ID NO: 1388582 - DNA, 25 bp, Homo sapien
gctggaccgtgatctccttcacaat

SEQ ID NO: 1388583 - DNA, 25 bp, Homo sapien
gcctgtccctggagcgccgccgata

SEQ ID NO: 1388584 - DNA, 25 bp, Homo sapien
gatacagcgcctccccgttgaccct

SEQ ID NO: 1388585 - DNA, 25 bp, Homo sapien
gccgccgatacagcgcctccccgtt

SEQ ID NO: 1388586 - DNA, 25 bp, Homo sapien
tggagcgccgccgatacagcgcctc

SEQ ID NO: 1388587 - DNA, 25 bp, Homo sapien
gctccggggcgctactccattggcg

SEQ ID NO: 1388588 - DNA, 25 bp, Homo sapien
gatggagactatgcgagcgcagcgg

SEQ ID NO: 1388589 - DNA, 25 bp, Homo sapien
gcgctactccattggcggccgggat

SEQ ID NO: 1388590 - DNA, 25 bp, Homo sapien
ggaccgttagctcggcaggctggca

SEQ ID NO: 1388591 - DNA, 25 bp, Homo sapien
gatacttgcataggccatgggttgc

SEQ ID NO: 1388592 - DNA, 25 bp, Homo sapien
cagaggactcaggtggatacttgca

SEQ ID NO: 1388593 - DNA, 25 bp, Homo sapien
gaacacttatagaacccacagcttg

SEQ ID NO: 1388594 - DNA, 25 bp, Homo sapien
gaaggtagtacctcatccctcaata

SEQ ID NO: 1388595 - DNA, 25 bp, Homo sapien
actttttaagcaacagcactataga

SEQ ID NO: 1388596 - DNA, 25 bp, Homo sapien
cagcactatagagcaggccagcaag

SEQ ID NO: 1388597 - DNA, 25 bp, Homo sapien
taagcaacagcactatagagcaggc

SEQ ID NO: 1388598 - DNA, 25 bp, Homo sapien
ctctttatccactttggcaggtgaa

SEQ ID NO: 1388599 - DNA, 25 bp, Homo sapien
tatttactctctttatttacaactg

SEQ ID NO: 1388600 - DNA, 25 bp, Homo sapien
gatgatgataagaataaccataatt

SEQ ID NO: 1388601 - DNA, 25 bp, Homo sapien
cataattagccagacgcggtgtctc

SEQ ID NO: 1388602 - DNA, 25 bp, Homo sapien
tgataagaataaccataattagcca

SEQ ID NO: 1388603 - DNA, 25 bp, Homo sapien
tcccattattctttgccccagtcaa

SEQ ID NO: 1388604 - DNA, 25 bp, Homo sapien
tatttaggacccagctgtttttctc

SEQ ID NO: 1388605 - DNA, 25 bp, Homo sapien
tccctctgttatttaggacccagct

SEQ ID NO: 1388606 - DNA, 25 bp, Homo sapien
tttctcccattattctttgccccag

SEQ ID NO: 1388607 - DNA, 25 bp, Homo sapien
gaataaggattatgtgccccaccct

SEQ ID NO: 1388608 - DNA, 25 bp, Homo sapien
tccagattaactgtgtagccatttc

SEQ ID NO: 1388609 - DNA, 25 bp, Homo sapien
gattaactctagtgttcatgtgtcc

SEQ ID NO: 1388610 - DNA, 25 bp, Homo sapien
tcttggactcaaacagggtatgagt

SEQ ID NO: 1388611 - DNA, 25 bp, Homo sapien
cctttctctgggacgtgtggattaa

SEQ ID NO: 1388612 - DNA, 25 bp, Homo sapien
ccatgaaacacgtcgggttggagta

SEQ ID NO: 1388613 - DNA, 25 bp, Homo sapien
agaattgccctcgtacctcctggat

SEQ ID NO: 1388614 - DNA, 25 bp, Homo sapien
tattagtgcttgaaacgggcttcct

SEQ ID NO: 1388615 - DNA, 25 bp, Homo sapien
gccgagactgagtgattgcactcca

SEQ ID NO: 1388616 - DNA, 25 bp, Homo sapien
agtgagccgagactgagtgattgca

SEQ ID NO: 1388617 - DNA, 25 bp, Homo sapien
tccagcctggacatcagggtgagac

SEQ ID NO: 1388618 - DNA, 25 bp, Homo sapien
ccagcctggacatcagggtgagact

SEQ ID NO: 1388619 - DNA, 25 bp, Homo sapien
tacagtatttatcagcagctgccgc

SEQ ID NO: 1388620 - DNA, 25 bp, Homo sapien
gccgggcctcactgttaatagtaca

SEQ ID NO: 1388621 - DNA, 25 bp, Homo sapien
cagctgccgcggttaagaggaagcc

SEQ ID NO: 1388622 - DNA, 25 bp, Homo sapien
tgggatgaagagacgtaaagaagcc

SEQ ID NO: 1388623 - DNA, 25 bp, Homo sapien
tgattggtcagcttgactggcgacc

SEQ ID NO: 1388624 - DNA, 25 bp, Homo sapien
gatggccacagaaacacttccggta

SEQ ID NO: 1388625 - DNA, 25 bp, Homo sapien
tgcgtgtttttaccgtgcagaggga

SEQ ID NO: 1388626 - DNA, 25 bp, Homo sapien
gcttgcgatctgttcaagatggcca

SEQ ID NO: 1388627 - DNA, 25 bp, Homo sapien
gaaggtgcgagagaaggctataata

SEQ ID NO: 1388628 - DNA, 25 bp, Homo sapien
tcgtaaggatgggaatcgaggaacc

SEQ ID NO: 1388629 - DNA, 25 bp, Homo sapien
cttgctggtagtgtattgggaaaga

SEQ ID NO: 1388630 - DNA, 25 bp, Homo sapien
gagacgattgttacaaatgactgtc

SEQ ID NO: 1388631 - DNA, 25 bp, Homo sapien
cccgagcgcggatgcgtgaggatta

SEQ ID NO: 1388632 - DNA, 25 bp, Homo sapien
gaaaggaggagttttcggtgatctc

SEQ ID NO: 1388633 - DNA, 25 bp, Homo sapien
cggtgatctcgtgtatgtcccttat

SEQ ID NO: 1388634 - DNA, 25 bp, Homo sapien
cgtgtatgtcccttatagaagaggg

SEQ ID NO: 1388635 - DNA, 25 bp, Homo sapien
ttacccagggtggattgcagctgat

SEQ ID NO: 1388636 - DNA, 25 bp, Homo sapien
tacctgggctagttatgtgagtttc

SEQ ID NO: 1388637 - DNA, 25 bp, Homo sapien
gacatagtctcaagtttcaggtagg

SEQ ID NO: 1388638 - DNA, 25 bp, Homo sapien
gtgaagatacttctagggactgaac

SEQ ID NO: 1388639 - DNA, 25 bp, Homo sapien
gaagagtctatactaagttcttggt

SEQ ID NO: 1388640 - DNA, 25 bp, Homo sapien
tccagctgtctaaaggcatgaatct

SEQ ID NO: 1388641 - DNA, 25 bp, Homo sapien
cccttcttgatgtcacagttttttg

SEQ ID NO: 1388642 - DNA, 25 bp, Homo sapien
tcagatagatgttatagaaatgcct

SEQ ID NO: 1388643 - DNA, 25 bp, Homo sapien
cctcttcggcagccaagggtgaagg

SEQ ID NO: 1388644 - DNA, 25 bp, Homo sapien
ccctcttcggcagccaagggtgaag

SEQ ID NO: 1388645 - DNA, 25 bp, Homo sapien
ctcttcggcagccaagggtgaaggc

SEQ ID NO: 1388646 - DNA, 25 bp, Homo sapien
gtaataaggtgtccagcagaggatg

SEQ ID NO: 1388647 - DNA, 25 bp, Homo sapien
gacgaacacggggacaattgtcaaa

SEQ ID NO: 1388648 - DNA, 25 bp, Homo sapien
cagtaggtaataaggtgtccagcag

SEQ ID NO: 1388649 - DNA, 25 bp, Homo sapien
gcgggggagggcaaattcaccagca

SEQ ID NO: 1388650 - DNA, 25 bp, Homo sapien
gaaatatgaagccaccaagtctaga

SEQ ID NO: 1388651 - DNA, 25 bp, Homo sapien
cccaacctgggactatatgatttct

SEQ ID NO: 1388652 - DNA, 25 bp, Homo sapien
tgattgcctccctagtccttgtcca

SEQ ID NO: 1388653 - DNA, 25 bp, Homo sapien
ggcatagctagtgagacagagctca

SEQ ID NO: 1388654 - DNA, 25 bp, Homo sapien
actggtagatagctattaggtaggt

SEQ ID NO: 1388655 - DNA, 25 bp, Homo sapien
gactggtagatagctattaggtagg

SEQ ID NO: 1388656 - DNA, 25 bp, Homo sapien
tggacacactgaggacaatgcggct

SEQ ID NO: 1388657 - DNA, 25 bp, Homo sapien
tggtctcttgccattgagccttgaa

SEQ ID NO: 1388658 - DNA, 25 bp, Homo sapien
tagcagatggccatggcagtcagtg

SEQ ID NO: 1388659 - DNA, 25 bp, Homo sapien
agaggttataggtggtctcttgcca

SEQ ID NO: 1388660 - DNA, 25 bp, Homo sapien
cagctcagtggaccgtgtggaacag

SEQ ID NO: 1388661 - DNA, 25 bp, Homo sapien
gggccagctcagtggaccgtgtgga

SEQ ID NO: 1388662 - DNA, 25 bp, Homo sapien
ctcagtggaccgtgtggaacaggaa

SEQ ID NO: 1388663 - DNA, 25 bp, Homo sapien
cagtggaccgtgtggaacaggaaca

SEQ ID NO: 1388664 - DNA, 25 bp, Homo sapien
aggaggcggagcttgcagtgagcag

SEQ ID NO: 1388665 - DNA, 25 bp, Homo sapien
ccagctacttgggaactcgggaggc

SEQ ID NO: 1388666 - DNA, 25 bp, Homo sapien
tgaggcaggagaatgacctgaaccc

SEQ ID NO: 1388667 - DNA, 25 bp, Homo sapien
ggcggagcttgcagtgagcagagat

SEQ ID NO: 1388668 - DNA, 25 bp, Homo sapien
cagagatgctgttgtatcctgcccc

SEQ ID NO: 1388669 - DNA, 25 bp, Homo sapien
agatttgattaacctagtactcagg

SEQ ID NO: 1388670 - DNA, 25 bp, Homo sapien
ccccaaccccatgatagtgatagtg

SEQ ID NO: 1388671 - DNA, 25 bp, Homo sapien
taattctaatcctacagtctcagag

SEQ ID NO: 1388672 - DNA, 25 bp, Homo sapien
cggtcctgagtcctaggtcactcac

SEQ ID NO: 1388673 - DNA, 25 bp, Homo sapien
ccaaatccctgtcctgcccggtcct

SEQ ID NO: 1388674 - DNA, 25 bp, Homo sapien
aaatccctgtcctgcccggtcctga

SEQ ID NO: 1388675 - DNA, 25 bp, Homo sapien
tgcccggtcctgagtcctaggtcac

SEQ ID NO: 1388676 - DNA, 25 bp, Homo sapien
ggaacatcagtgtccgacatgcgat

SEQ ID NO: 1388677 - DNA, 25 bp, Homo sapien
gttgagtactgctgcctggcggtcc

SEQ ID NO: 1388678 - DNA, 25 bp, Homo sapien
cctgaacgggatccaagcgggttga

SEQ ID NO: 1388679 - DNA, 25 bp, Homo sapien
tgaacagtgatattccaggtggcat

SEQ ID NO: 1388680 - DNA, 25 bp, Homo sapien
tgctaaatggatgaagagtctcctg

SEQ ID NO: 1388681 - DNA, 25 bp, Homo sapien
acaaacagcacaatggtcactccca

SEQ ID NO: 1388682 - DNA, 25 bp, Homo sapien
caaaagtgactagtaagtcggcggc

SEQ ID NO: 1388683 - DNA, 25 bp, Homo sapien
gtcactgaccacaggactgccaggt

SEQ ID NO: 1388684 - DNA, 25 bp, Homo sapien
cccaaggggtgccgttgcctgcaga

SEQ ID NO: 1388685 - DNA, 25 bp, Homo sapien
caaggggtgccgttgcctgcagaca

SEQ ID NO: 1388686 - DNA, 25 bp, Homo sapien
ccaaggggtgccgttgcctgcagac

SEQ ID NO: 1388687 - DNA, 25 bp, Homo sapien
aaggggtgccgttgcctgcagacat

SEQ ID NO: 1388688 - DNA, 25 bp, Homo sapien
ggatctggagctgattattgcgaat

SEQ ID NO: 1388689 - DNA, 25 bp, Homo sapien
tatgaagcggttagctttggccact

SEQ ID NO: 1388690 - DNA, 25 bp, Homo sapien
gaggaggtcacttgttcaactgtca

SEQ ID NO: 1388691 - DNA, 25 bp, Homo sapien
tgattcttcgccctccttttcagga

SEQ ID NO: 1388692 - DNA, 25 bp, Homo sapien
ctggtaccaatcacgctcctttttc

SEQ ID NO: 1388693 - DNA, 25 bp, Homo sapien
cagcctgggcttcaggcctctactg

SEQ ID NO: 1388694 - DNA, 25 bp, Homo sapien
agcctgggcttcaggcctctactga

SEQ ID NO: 1388695 - DNA, 25 bp, Homo sapien
tacagccctggattcagtcggggcc

SEQ ID NO: 1388696 - DNA, 25 bp, Homo sapien
gtgtatttgtgaggttctgccaggc

SEQ ID NO: 1388697 - DNA, 25 bp, Homo sapien
gaggttctgccaggcgcacacctat

SEQ ID NO: 1388698 - DNA, 25 bp, Homo sapien
tccaagacgtggagatcactgcggc

SEQ ID NO: 1388699 - DNA, 25 bp, Homo sapien
gagtttcgcgtcctgaaattccgct

SEQ ID NO: 1388700 - DNA, 25 bp, Homo sapien
gcaccgttgggtcgcgcagtaggcg

SEQ ID NO: 1388701 - DNA, 25 bp, Homo sapien
tttgtccctcgcgaggcaccgttgg

SEQ ID NO: 1388702 - DNA, 25 bp, Homo sapien
ctgaaattccgcttccagggccaag

SEQ ID NO: 1388703 - DNA, 25 bp, Homo sapien
aatctctaatttgctcaacattcag

SEQ ID NO: 1388704 - DNA, 25 bp, Homo sapien
ggcctcatcattgtcaaatctctaa

SEQ ID NO: 1388705 - DNA, 25 bp, Homo sapien
gctcaacattcagtagtgctcccca

SEQ ID NO: 1388706 - DNA, 25 bp, Homo sapien
atgctcacgctgatgtgcttgtgat

SEQ ID NO: 1388707 - DNA, 25 bp, Homo sapien
tcatttggctctgcacttaccctct

SEQ ID NO: 1388708 - DNA, 25 bp, Homo sapien
tccttcctgtaccctctctgttctt

SEQ ID NO: 1388709 - DNA, 25 bp, Homo sapien
atttggctctgcacttaccctctgc

SEQ ID NO: 1388710 - DNA, 25 bp, Homo sapien
tttctcatttggctctgcacttacc

SEQ ID NO: 1388711 - DNA, 25 bp, Homo sapien
tctggacaaactaggcctctggcgc

SEQ ID NO: 1388712 - DNA, 25 bp, Homo sapien
tgctagacgtggtcagaaatgcctg

SEQ ID NO: 1388713 - DNA, 25 bp, Homo sapien
tgagatggaatcttagatcgtcccc

SEQ ID NO: 1388714 - DNA, 25 bp, Homo sapien
taatctatccctggctacgactcaa

SEQ ID NO: 1388715 - DNA, 25 bp, Homo sapien
tgtgtaaatagctgtggcctatgcc

SEQ ID NO: 1388716 - DNA, 25 bp, Homo sapien
gccaataatgaagagcaagcctttc

SEQ ID NO: 1388717 - DNA, 25 bp, Homo sapien
gatttcagagctttattccccagtc

SEQ ID NO: 1388718 - DNA, 25 bp, Homo sapien
tatatctctgcaccacaagttgttg

SEQ ID NO: 1388719 - DNA, 25 bp, Homo sapien
ggatcctagtgttccactgccgcca

SEQ ID NO: 1388720 - DNA, 25 bp, Homo sapien
gaaaactactcttctgtccacgcag

SEQ ID NO: 1388721 - DNA, 25 bp, Homo sapien
cttggaggtggttcagacccggcct

SEQ ID NO: 1388722 - DNA, 25 bp, Homo sapien
gaacgaaggcatctccatcaggcag

SEQ ID NO: 1388723 - DNA, 25 bp, Homo sapien
tcagataagtctgagagctactggc

SEQ ID NO: 1388724 - DNA, 25 bp, Homo sapien
ctcagataagtctgagagctactgg

SEQ ID NO: 1388725 - DNA, 25 bp, Homo sapien
aagtctgagagctactggcaaggtt

SEQ ID NO: 1388726 - DNA, 25 bp, Homo sapien
gataagtctgagagctactggcaag

SEQ ID NO: 1388727 - DNA, 25 bp, Homo sapien
tcttgcctctgattgagcagggcgg

SEQ ID NO: 1388728 - DNA, 25 bp, Homo sapien
cagggcgggttctgaggcggatcgt

SEQ ID NO: 1388729 - DNA, 25 bp, Homo sapien
cgaccccggccatgaagcgtatctt

SEQ ID NO: 1388730 - DNA, 25 bp, Homo sapien
agccgcagccaagtccggtgggttc

SEQ ID NO: 1388731 - DNA, 25 bp, Homo sapien
tgcttgctgtgagttaatattgcag

SEQ ID NO: 1388732 - DNA, 25 bp, Homo sapien
ttgcagtctggtcagcctcacaggc

SEQ ID NO: 1388733 - DNA, 25 bp, Homo sapien
ctactctgcccagtggtcgccagtc

SEQ ID NO: 1388734 - DNA, 25 bp, Homo sapien
tgtgagttaatattgcagtctggtc

SEQ ID NO: 1388735 - DNA, 25 bp, Homo sapien
tccttctctctctacttgctggtgt

SEQ ID NO: 1388736 - DNA, 25 bp, Homo sapien
tctctctacttgctggtgtgcttcc

SEQ ID NO: 1388737 - DNA, 25 bp, Homo sapien
tacagcagaagtcattccttctctc

SEQ ID NO: 1388738 - DNA, 25 bp, Homo sapien
ctgacctacagcagaagtcattcct

SEQ ID NO: 1388739 - DNA, 25 bp, Homo sapien
gtctgcactacttgatgctaatgtt

SEQ ID NO: 1388740 - DNA, 25 bp, Homo sapien
tacttgatgctaatgttcacttaaa

SEQ ID NO: 1388741 - DNA, 25 bp, Homo sapien
aggaaataggaatcatcacagtaga

SEQ ID NO: 1388742 - DNA, 25 bp, Homo sapien
cacttaaatgttagtttgcacttta

SEQ ID NO: 1388743 - DNA, 25 bp, Homo sapien
atttgattccaacaactcagagcgg

SEQ ID NO: 1388744 - DNA, 25 bp, Homo sapien
ctcagagcggtccagtaggatggat

SEQ ID NO: 1388745 - DNA, 25 bp, Homo sapien
gttacagaactctggctactgttct

SEQ ID NO: 1388746 - DNA, 25 bp, Homo sapien
aaagctcttttacataccttgtgtt

SEQ ID NO: 1388747 - DNA, 25 bp, Homo sapien
cctttgggtatgttaacctaggcag

SEQ ID NO: 1388748 - DNA, 25 bp, Homo sapien
tcccttcggccaaacagacaggtgg

SEQ ID NO: 1388749 - DNA, 25 bp, Homo sapien
ctaggagaagggctgaaccctcagc

SEQ ID NO: 1388750 - DNA, 25 bp, Homo sapien
ttgactatgtctagagcctcttggg

SEQ ID NO: 1388751 - DNA, 25 bp, Homo sapien
tatgacagaggaggatgtaaggcct

SEQ ID NO: 1388752 - DNA, 25 bp, Homo sapien
taaggccttagccatgatctgcagg

SEQ ID NO: 1388753 - DNA, 25 bp, Homo sapien
ccctgggtccaggtaagctgcactt

SEQ ID NO: 1388754 - DNA, 25 bp, Homo sapien
gctcgccaaggcctaggacctatgt

SEQ ID NO: 1388755 - DNA, 25 bp, Homo sapien
ccatggttgggatcatccgcaggag

SEQ ID NO: 1388756 - DNA, 25 bp, Homo sapien
tggacatgtgcaggaccagaggtcg

SEQ ID NO: 1388757 - DNA, 25 bp, Homo sapien
caggaccagaggtcgggctcttcca

SEQ ID NO: 1388758 - DNA, 25 bp, Homo sapien
ctctgccatggttgggatcatccgc

SEQ ID NO: 1388759 - DNA, 25 bp, Homo sapien
ggtgtcagccacataagggcgctca

SEQ ID NO: 1388760 - DNA, 25 bp, Homo sapien
ctctgtcccatcctctgcggcagcc

SEQ ID NO: 1388761 - DNA, 25 bp, Homo sapien
gagaagtccgggtgtctctgtccca

SEQ ID NO: 1388762 - DNA, 25 bp, Homo sapien
agggcgctcacctcatttgggtttg

SEQ ID NO: 1388763 - DNA, 25 bp, Homo sapien
gagatcacgagtagatacagaacaa

SEQ ID NO: 1388764 - DNA, 25 bp, Homo sapien
tggtatttgggtaaaccccagctca

SEQ ID NO: 1388765 - DNA, 25 bp, Homo sapien
ctgggagatcacgagtagatacaga

SEQ ID NO: 1388766 - DNA, 25 bp, Homo sapien
tatttgggtaaaccccagctcagcc

SEQ ID NO: 1388767 - DNA, 25 bp, Homo sapien
tggggcaggtgtagtccactctcct

SEQ ID NO: 1388768 - DNA, 25 bp, Homo sapien
ctggggcaggtgtagtccactctcc

SEQ ID NO: 1388769 - DNA, 25 bp, Homo sapien
aggtgtagtccactctcctcccaaa

SEQ ID NO: 1388770 - DNA, 25 bp, Homo sapien
ggcaggtgtagtccactctcctccc

SEQ ID NO: 1388771 - DNA, 25 bp, Homo sapien
cacacccaagatggtcccaggcatg

SEQ ID NO: 1388772 - DNA, 25 bp, Homo sapien
caagatggtcccaggcatgggtctc

SEQ ID NO: 1388773 - DNA, 25 bp, Homo sapien
cccaggcatgggtctcttggctcag

SEQ ID NO: 1388774 - DNA, 25 bp, Homo sapien
cagagaagacacatcagaggggcca

SEQ ID NO: 1388775 - DNA, 25 bp, Homo sapien
tcctcctcaagttccacgtgcccac

SEQ ID NO: 1388776 - DNA, 25 bp, Homo sapien
ctcctcctcaagttccacgtgccca

SEQ ID NO: 1388777 - DNA, 25 bp, Homo sapien
ccagtaggtgaatggtggtggtctt

SEQ ID NO: 1388778 - DNA, 25 bp, Homo sapien
ctgcaacaacagtggggccagtagg

SEQ ID NO: 1388779 - DNA, 25 bp, Homo sapien
gtggtcttggccagggagcccccac

SEQ ID NO: 1388780 - DNA, 25 bp, Homo sapien
ggccagtaggtgaatggtggtggtc

SEQ ID NO: 1388781 - DNA, 25 bp, Homo sapien
acacagagggagttgcagtcccttg

SEQ ID NO: 1388782 - DNA, 25 bp, Homo sapien
ttggggcccactttatccttctgag

SEQ ID NO: 1388783 - DNA, 25 bp, Homo sapien
agtcccttgtgactatgaacatgcc

SEQ ID NO: 1388784 - DNA, 25 bp, Homo sapien
gactatgaacatgccacattttggg

SEQ ID NO: 1388785 - DNA, 25 bp, Homo sapien
gctggactgcagaatgacggccaca

SEQ ID NO: 1388786 - DNA, 25 bp, Homo sapien
ggaaacgctcagggtgcgtgccctt

SEQ ID NO: 1388787 - DNA, 25 bp, Homo sapien
gcaagacagtcttgtcgctggactg

SEQ ID NO: 1388788 - DNA, 25 bp, Homo sapien
gtgcccttcgggttagcaagacagt

SEQ ID NO: 1388789 - DNA, 25 bp, Homo sapien
cgccagttcccacccgatttcagtc

SEQ ID NO: 1388790 - DNA, 25 bp, Homo sapien
gatttcagtccccatctttggccct

SEQ ID NO: 1388791 - DNA, 25 bp, Homo sapien
ccagctgggttaaggcttcagaagg

SEQ ID NO: 1388792 - DNA, 25 bp, Homo sapien
aaatggggctacaccgcgcgttggg

SEQ ID NO: 1388793 - DNA, 25 bp, Homo sapien
agcggaagcctagcggaggcgcctg

SEQ ID NO: 1388794 - DNA, 25 bp, Homo sapien
cctgctcgagaggacaagccgtcct

SEQ ID NO: 1388795 - DNA, 25 bp, Homo sapien
gaggacaagccgtcctcgcttcaag

SEQ ID NO: 1388796 - DNA, 25 bp, Homo sapien
aagggcctgctcgagaggacaagcc

SEQ ID NO: 1388797 - DNA, 25 bp, Homo sapien
ggccacacacactccgtgcgaagct

SEQ ID NO: 1388798 - DNA, 25 bp, Homo sapien
aggagcagctgcacccgcacctcgg

SEQ ID NO: 1388799 - DNA, 25 bp, Homo sapien
aatgggccacgtcccgagccctggt

SEQ ID NO: 1388800 - DNA, 25 bp, Homo sapien
gtgcgaagctcaccgactccggacg

SEQ ID NO: 1388801 - DNA, 25 bp, Homo sapien
taagccttcctcgtattttgcctga

SEQ ID NO: 1388802 - DNA, 25 bp, Homo sapien
gcactatgcacacctgttacagcag

SEQ ID NO: 1388803 - DNA, 25 bp, Homo sapien
agttcattctctacagtgctgccag

SEQ ID NO: 1388804 - DNA, 25 bp, Homo sapien
ctagagaagcttccccacggaacgt

SEQ ID NO: 1388805 - DNA, 25 bp, Homo sapien
tgactgcttgggacaatccacctgc

SEQ ID NO: 1388806 - DNA, 25 bp, Homo sapien
tgtgattgcgctattacaccccagc

SEQ ID NO: 1388807 - DNA, 25 bp, Homo sapien
tggcttcagtccacagattctagtg

SEQ ID NO: 1388808 - DNA, 25 bp, Homo sapien
tgtagcacccctaatacttcctggt

SEQ ID NO: 1388809 - DNA, 25 bp, Homo sapien
tattgccagggatataggtaaccat

SEQ ID NO: 1388810 - DNA, 25 bp, Homo sapien
gatttaaggttcttcccactgccaa

SEQ ID NO: 1388811 - DNA, 25 bp, Homo sapien
taacttctttatgggaacagatgca

SEQ ID NO: 1388812 - DNA, 25 bp, Homo sapien
tacagcaatggatctaaatatgcca

SEQ ID NO: 1388813 - DNA, 25 bp, Homo sapien
gtttagttgaagactctgcgactta

SEQ ID NO: 1388814 - DNA, 25 bp, Homo sapien
gactctgcgacttatcccactgcaa

SEQ ID NO: 1388815 - DNA, 25 bp, Homo sapien
gttgaagactctgcgacttatccca

SEQ ID NO: 1388816 - DNA, 25 bp, Homo sapien
gaagactctgcgacttatcccactg

SEQ ID NO: 1388817 - DNA, 25 bp, Homo sapien
cccagatcttctgaggaagatgctt

SEQ ID NO: 1388818 - DNA, 25 bp, Homo sapien
ccagatcttctgaggaagatgcttc

SEQ ID NO: 1388819 - DNA, 25 bp, Homo sapien
ccagcaggaagatggtttcgtccac

SEQ ID NO: 1388820 - DNA, 25 bp, Homo sapien
tcactgtctcttcatggtgcactca

SEQ ID NO: 1388821 - DNA, 25 bp, Homo sapien
gaagatggtttcgtccacctggatc

SEQ ID NO: 1388822 - DNA, 25 bp, Homo sapien
tcatggtgcactcaatgtaagactc

SEQ ID NO: 1388823 - DNA, 25 bp, Homo sapien
catttgcaatcaggaaaacgaacgt

SEQ ID NO: 1388824 - DNA, 25 bp, Homo sapien
tgctcatgctaagctggagggttac

SEQ ID NO: 1388825 - DNA, 25 bp, Homo sapien
tgaaataagcgaccactaaactagt

SEQ ID NO: 1388826 - DNA, 25 bp, Homo sapien
gaaaggccagatttgagacacatga

SEQ ID NO: 1388827 - DNA, 25 bp, Homo sapien
agatgcaatgatggcttctaccctc

SEQ ID NO: 1388828 - DNA, 25 bp, Homo sapien
ggtctctagctgctgacgttcagga

SEQ ID NO: 1388829 - DNA, 25 bp, Homo sapien
gacattacgtttcagggtctctagc

SEQ ID NO: 1388830 - DNA, 25 bp, Homo sapien
tgcaccagtagcctgcatagatgca

SEQ ID NO: 1388831 - DNA, 25 bp, Homo sapien
tcttgaaagatgtaaataactcaac

SEQ ID NO: 1388832 - DNA, 25 bp, Homo sapien
ggcccagcgtctattgattcctatt

SEQ ID NO: 1388833 - DNA, 25 bp, Homo sapien
atttcccctgaggcccttgatcttg

SEQ ID NO: 1388834 - DNA, 25 bp, Homo sapien
ccaggcccagcgtctattgattcct

SEQ ID NO: 1388835 - DNA, 25 bp, Homo sapien
tcctttctatcaagttggctatgct

SEQ ID NO: 1388836 - DNA, 25 bp, Homo sapien
cctcctttctatcaagttggctatg

SEQ ID NO: 1388837 - DNA, 25 bp, Homo sapien
ttgcctcctttctatcaagttggct

SEQ ID NO: 1388838 - DNA, 25 bp, Homo sapien
attgcctcctttctatcaagttggc

SEQ ID NO: 1388839 - DNA, 25 bp, Homo sapien
tcagggcgaagtgggcacatgaggg

SEQ ID NO: 1388840 - DNA, 25 bp, Homo sapien
tttcagcagctcagggcgaagtggg

SEQ ID NO: 1388841 - DNA, 25 bp, Homo sapien
tacttgaccgtatggaggaaatggg

SEQ ID NO: 1388842 - DNA, 25 bp, Homo sapien
agacaaggaatgcacatagttctat

SEQ ID NO: 1388843 - DNA, 25 bp, Homo sapien
cacctgtgcaacaacattcgggcag

SEQ ID NO: 1388844 - DNA, 25 bp, Homo sapien
atataaatagaaggtcctggatggg

SEQ ID NO: 1388845 - DNA, 25 bp, Homo sapien
cctgtgcaacaacattcgggcagct

SEQ ID NO: 1388846 - DNA, 25 bp, Homo sapien
cagctgacaggatgttcacagtata

SEQ ID NO: 1388847 - DNA, 25 bp, Homo sapien
cctgtttcctagtcattcagtacct

SEQ ID NO: 1388848 - DNA, 25 bp, Homo sapien
ttcctgtttcctagtcattcagtac

SEQ ID NO: 1388849 - DNA, 25 bp, Homo sapien
tcctgtttcctagtcattcagtacc

SEQ ID NO: 1388850 - DNA, 25 bp, Homo sapien
cttctgcaaaactagacggaatatt

SEQ ID NO: 1388851 - DNA, 25 bp, Homo sapien
tctgagagcatcttatatagcatat

SEQ ID NO: 1388852 - DNA, 25 bp, Homo sapien
cttatatagcatatcctttgcctcc

SEQ ID NO: 1388853 - DNA, 25 bp, Homo sapien
tcttctgcaaaactagacggaatat

SEQ ID NO: 1388854 - DNA, 25 bp, Homo sapien
tcctgtacgacggactccagagtgg

SEQ ID NO: 1388855 - DNA, 25 bp, Homo sapien
gagtggctgtggctagggatgctaa

SEQ ID NO: 1388856 - DNA, 25 bp, Homo sapien
ctgtacgacggactccagagtggct

SEQ ID NO: 1388857 - DNA, 25 bp, Homo sapien
ctctcctgtacgacggactccagag

SEQ ID NO: 1388858 - DNA, 25 bp, Homo sapien
tatgtagagaattaaggtcactcag

SEQ ID NO: 1388859 - DNA, 25 bp, Homo sapien
ttatgtagagaattaaggtcactca

SEQ ID NO: 1388860 - DNA, 25 bp, Homo sapien
gtagagaattaaggtcactcagtaa

SEQ ID NO: 1388861 - DNA, 25 bp, Homo sapien
tgtagagaattaaggtcactcagta

SEQ ID NO: 1388862 - DNA, 25 bp, Homo sapien
gtcgccagactttccaacaaactct

SEQ ID NO: 1388863 - DNA, 25 bp, Homo sapien
cgccagactttccaacaaactctag

SEQ ID NO: 1388864 - DNA, 25 bp, Homo sapien
cactgtcgccagactttccaacaaa

SEQ ID NO: 1388865 - DNA, 25 bp, Homo sapien
ttcctccaccactgtcgccagactt

SEQ ID NO: 1388866 - DNA, 25 bp, Homo sapien
agaacttgcttagagatgttatagc

SEQ ID NO: 1388867 - DNA, 25 bp, Homo sapien
gaacttgcttagagatgttatagcc

SEQ ID NO: 1388868 - DNA, 25 bp, Homo sapien
ttttgctctgttgtttaagctggag

SEQ ID NO: 1388869 - DNA, 25 bp, Homo sapien
gagctgctgcgtccggccttttttt

SEQ ID NO: 1388870 - DNA, 25 bp, Homo sapien
tgtgagctgctgcgtccggcctttt

SEQ ID NO: 1388871 - DNA, 25 bp, Homo sapien
ggttttgctctgttgtttaagctgg

SEQ ID NO: 1388872 - DNA, 25 bp, Homo sapien
cacagatgctactgcgttacaactg

SEQ ID NO: 1388873 - DNA, 25 bp, Homo sapien
tagcctgagcgtgtagaccatcaca

SEQ ID NO: 1388874 - DNA, 25 bp, Homo sapien
gctccattcatgttaagtgcactaa

SEQ ID NO: 1388875 - DNA, 25 bp, Homo sapien
gaagccataggctatcccgttcagt

SEQ ID NO: 1388876 - DNA, 25 bp, Homo sapien
gagcatggttcgcacaatctcgctg

SEQ ID NO: 1388877 - DNA, 25 bp, Homo sapien
ctcattggaagacaatggctgggtg

SEQ ID NO: 1388878 - DNA, 25 bp, Homo sapien
ggagcactagaggaagtggtaatct

SEQ ID NO: 1388879 - DNA, 25 bp, Homo sapien
ggtaatctcactcattcggagcatg

SEQ ID NO: 1388880 - DNA, 25 bp, Homo sapien
tggtccatcctgttagcaactgcgc

SEQ ID NO: 1388881 - DNA, 25 bp, Homo sapien
tagcaactgcgctcacaatggcttg

SEQ ID NO: 1388882 - DNA, 25 bp, Homo sapien
gcttggtcacggaagtgttggtgga

SEQ ID NO: 1388883 - DNA, 25 bp, Homo sapien
aatctgtcaaggttggcctgccaat

SEQ ID NO: 1388884 - DNA, 25 bp, Homo sapien
tggcgttactttgaacctttctggc

SEQ ID NO: 1388885 - DNA, 25 bp, Homo sapien
gggtaattttatctgctctccaggc

SEQ ID NO: 1388886 - DNA, 25 bp, Homo sapien
ttttactctacatgctctacttggg

SEQ ID NO: 1388887 - DNA, 25 bp, Homo sapien
tgggcctggccgacaccattttttc

SEQ ID NO: 1388888 - DNA, 25 bp, Homo sapien
gaccaggctcatctcgaactctgac

SEQ ID NO: 1388889 - DNA, 25 bp, Homo sapien
aggttcaggccattatcctgccgca

SEQ ID NO: 1388890 - DNA, 25 bp, Homo sapien
aggcacctaccaccatggccggtta

SEQ ID NO: 1388891 - DNA, 25 bp, Homo sapien
gcacctaccaccatggccggttaat

SEQ ID NO: 1388892 - DNA, 25 bp, Homo sapien
tcatcagatgatctcctccttttac

SEQ ID NO: 1388893 - DNA, 25 bp, Homo sapien
cagcatcttcatcagatgatctcct

SEQ ID NO: 1388894 - DNA, 25 bp, Homo sapien
gcatcttcatcagatgatctcctcc

SEQ ID NO: 1388895 - DNA, 25 bp, Homo sapien
agcatcttcatcagatgatctcctc

SEQ ID NO: 1388896 - DNA, 25 bp, Homo sapien
caccgtttaatgatatatcgatgtg

SEQ ID NO: 1388897 - DNA, 25 bp, Homo sapien
gattttccgattaatgtatgtctcc

SEQ ID NO: 1388898 - DNA, 25 bp, Homo sapien
tacaccacgatgtctggcacatagc

SEQ ID NO: 1388899 - DNA, 25 bp, Homo sapien
tgtctcctatactaaagccccatgg

SEQ ID NO: 1388900 - DNA, 25 bp, Homo sapien
caagctgagtttaggaaccaggtac

SEQ ID NO: 1388901 - DNA, 25 bp, Homo sapien
taccgaagggcagcgttgtacaaag

SEQ ID NO: 1388902 - DNA, 25 bp, Homo sapien
ctgaattctcagtggtaggtaccga

SEQ ID NO: 1388903 - DNA, 25 bp, Homo sapien
caaagtgtgtgtctgccagtcgcac

SEQ ID NO: 1388904 - DNA, 25 bp, Homo sapien
ctcaacaatcagctctccagtgtca

SEQ ID NO: 1388905 - DNA, 25 bp, Homo sapien
cattgtcagtttgccgttcaacaga

SEQ ID NO: 1388906 - DNA, 25 bp, Homo sapien
actttcttcacaacagctgacattg

SEQ ID NO: 1388907 - DNA, 25 bp, Homo sapien
tccatggtctctgtgagccggtctg

SEQ ID NO: 1388908 - DNA, 25 bp, Homo sapien
ctgtacagagttttggtagtataga

SEQ ID NO: 1388909 - DNA, 25 bp, Homo sapien
taagcattcgcaatacccggctgca

SEQ ID NO: 1388910 - DNA, 25 bp, Homo sapien
agttttggtagtatagatgtaccgg

SEQ ID NO: 1388911 - DNA, 25 bp, Homo sapien
tgtaccggggatatctaagcattcg

SEQ ID NO: 1388912 - DNA, 25 bp, Homo sapien
tatgttggacgaggacacacagggc

SEQ ID NO: 1388913 - DNA, 25 bp, Homo sapien
gttatgttggacgaggacacacagg

SEQ ID NO: 1388914 - DNA, 25 bp, Homo sapien
aggttatgttggacgaggacacaca

SEQ ID NO: 1388915 - DNA, 25 bp, Homo sapien
tgttggacgaggacacacagggctt

SEQ ID NO: 1388916 - DNA, 25 bp, Homo sapien
gctggctgccggttcttatcagatg

SEQ ID NO: 1388917 - DNA, 25 bp, Homo sapien
agtgatgttcctgtgtcatgggcaa

SEQ ID NO: 1388918 - DNA, 25 bp, Homo sapien
gcaacaaagaacagagcttaatttc

SEQ ID NO: 1388919 - DNA, 25 bp, Homo sapien
aattactcttagtggctggctgccg

SEQ ID NO: 1388920 - DNA, 25 bp, Homo sapien
cctttgccatcctcggaaagggctt

SEQ ID NO: 1388921 - DNA, 25 bp, Homo sapien
ggcgcttggctcctagctctacact

SEQ ID NO: 1388922 - DNA, 25 bp, Homo sapien
gcttccaaggcgcttggctcctagc

SEQ ID NO: 1388923 - DNA, 25 bp, Homo sapien
gtccatccacatatctttggagaag

SEQ ID NO: 1388924 - DNA, 25 bp, Homo sapien
gccctttctaggacgcggatcgcca

SEQ ID NO: 1388925 - DNA, 25 bp, Homo sapien
tcgccaccgaagaagacgcggaaaa

SEQ ID NO: 1388926 - DNA, 25 bp, Homo sapien
gaaaagcaaaaagcgcgtgccactc

SEQ ID NO: 1388927 - DNA, 25 bp, Homo sapien
gccttctaggccgaggtggagccca

SEQ ID NO: 1388928 - DNA, 25 bp, Homo sapien
ctttctttcttctcgctggaagact

SEQ ID NO: 1388929 - DNA, 25 bp, Homo sapien
aggaccagcgaggggctgtttgtgg

SEQ ID NO: 1388930 - DNA, 25 bp, Homo sapien
gggctgtttgtggagccggcgggcg

SEQ ID NO: 1388931 - DNA, 25 bp, Homo sapien
cagcgaggggctgtttgtggagccg

SEQ ID NO: 1388932 - DNA, 25 bp, Homo sapien
ctgcagctcgggaggtagcggcctg

SEQ ID NO: 1388933 - DNA, 25 bp, Homo sapien
tcacgtgaccgacgcgggctctgaa

SEQ ID NO: 1388934 - DNA, 25 bp, Homo sapien
gcaaaaatggcggaggcttcggcgg

SEQ ID NO: 1388935 - DNA, 25 bp, Homo sapien
tgtagccgcccaccggtttttctgc

SEQ ID NO: 1388936 - DNA, 25 bp, Homo sapien
attggtggtaatgtcagttttgtca

SEQ ID NO: 1388937 - DNA, 25 bp, Homo sapien
gggattggtggtaatgtcagttttg

SEQ ID NO: 1388938 - DNA, 25 bp, Homo sapien
gattggtggtaatgtcagttttgtc

SEQ ID NO: 1388939 - DNA, 25 bp, Homo sapien
ccaggaatttatctggaattttagg

SEQ ID NO: 1388940 - DNA, 25 bp, Homo sapien
ttcgggtgacttctcgctgagtcat

SEQ ID NO: 1388941 - DNA, 25 bp, Homo sapien
gtttcataagctccagaaattttgt

SEQ ID NO: 1388942 - DNA, 25 bp, Homo sapien
tgagagggtatattggagttattaa

SEQ ID NO: 1388943 - DNA, 25 bp, Homo sapien
tctaaaattcttcgggtgacttctc

SEQ ID NO: 1388944 - DNA, 25 bp, Homo sapien
taccatcttccagaagtttcatttt

SEQ ID NO: 1388945 - DNA, 25 bp, Homo sapien
agtaccatcttccagaagtttcatt

SEQ ID NO: 1388946 - DNA, 25 bp, Homo sapien
atcttccagaagtttcattttgctt

SEQ ID NO: 1388947 - DNA, 25 bp, Homo sapien
ccatcttccagaagtttcattttgc

SEQ ID NO: 1388948 - DNA, 25 bp, Homo sapien
cttttgctggattaactgagacctg

SEQ ID NO: 1388949 - DNA, 25 bp, Homo sapien
caatgatgctgatcttctagcccgt

SEQ ID NO: 1388950 - DNA, 25 bp, Homo sapien
aatccacaggtaatacagcttttct

SEQ ID NO: 1388951 - DNA, 25 bp, Homo sapien
tctagcccgttaattctcagacctc

SEQ ID NO: 1388952 - DNA, 25 bp, Homo sapien
ggatgtggcacagtagaaactctta

SEQ ID NO: 1388953 - DNA, 25 bp, Homo sapien
aatatagaaactctggtacctctgc

SEQ ID NO: 1388954 - DNA, 25 bp, Homo sapien
gggccatttggatcacacgatgttt

SEQ ID NO: 1388955 - DNA, 25 bp, Homo sapien
tcctgtgacatcaagtgcttgccag

SEQ ID NO: 1388956 - DNA, 25 bp, Homo sapien
ggaactcactcaacaataactaatc

SEQ ID NO: 1388957 - DNA, 25 bp, Homo sapien
gaacagtggacttaacatgaaattt

SEQ ID NO: 1388958 - DNA, 25 bp, Homo sapien
tccactcacaggagattcatctctt

SEQ ID NO: 1388959 - DNA, 25 bp, Homo sapien
gagagcatgcatgagcaagaaagaa

SEQ ID NO: 1388960 - DNA, 25 bp, Homo sapien
tctacaggtcattgtgtcctgccac

SEQ ID NO: 1388961 - DNA, 25 bp, Homo sapien
tcatttggttatagattgtggctac

SEQ ID NO: 1388962 - DNA, 25 bp, Homo sapien
gctacttttgtgctacgtcagcaga

SEQ ID NO: 1388963 - DNA, 25 bp, Homo sapien
ggaacttttctgaccaagggttgca

SEQ ID NO: 1388964 - DNA, 25 bp, Homo sapien
tgttgccttgtaacggatgtttcca

SEQ ID NO: 1388965 - DNA, 25 bp, Homo sapien
gaatcagggctgtggtaatcatctt

SEQ ID NO: 1388966 - DNA, 25 bp, Homo sapien
agctaaagaccacacctgaatcagg

SEQ ID NO: 1388967 - DNA, 25 bp, Homo sapien
tgaaacttaattatgtagggctccc

SEQ ID NO: 1388968 - DNA, 25 bp, Homo sapien
gacatagaacaactgttggtgtacc

SEQ ID NO: 1388969 - DNA, 25 bp, Homo sapien
ggttctggctatacttggactcaaa

SEQ ID NO: 1388970 - DNA, 25 bp, Homo sapien
tcagcctagtagtgtcccatgcaca

SEQ ID NO: 1388971 - DNA, 25 bp, Homo sapien
tgtgatcatgtccaaaacagcttgg

SEQ ID NO: 1388972 - DNA, 25 bp, Homo sapien
ctcattgtacataacctttagggtc

SEQ ID NO: 1388973 - DNA, 25 bp, Homo sapien
tctctcattgtacataacctttagg

SEQ ID NO: 1388974 - DNA, 25 bp, Homo sapien
cctgagttctctggtatggggcact

SEQ ID NO: 1388975 - DNA, 25 bp, Homo sapien
tctcattgtacataacctttagggt

SEQ ID NO: 1388976 - DNA, 25 bp, Homo sapien
agtattcagccagcgagccactgag

SEQ ID NO: 1388977 - DNA, 25 bp, Homo sapien
gctttccaggatcaaaatagagccc

SEQ ID NO: 1388978 - DNA, 25 bp, Homo sapien
tagagcccttgtctgatcccattga

SEQ ID NO: 1388979 - DNA, 25 bp, Homo sapien
taatgtcagtgtctcagtattcagc

SEQ ID NO: 1388980 - DNA, 25 bp, Homo sapien
gaggactatactacccactttggtg

SEQ ID NO: 1388981 - DNA, 25 bp, Homo sapien
caatcactggatctggctgtcttcc

SEQ ID NO: 1388982 - DNA, 25 bp, Homo sapien
caagtatttagatgaagctgggcag

SEQ ID NO: 1388983 - DNA, 25 bp, Homo sapien
tagtctgtggtgctcttggtctgca

SEQ ID NO: 1388984 - DNA, 25 bp, Homo sapien
ttatttactggagcttaggagggaa

SEQ ID NO: 1388985 - DNA, 25 bp, Homo sapien
tatatttagcatctcttcccctgtg

SEQ ID NO: 1388986 - DNA, 25 bp, Homo sapien
gaaagatactaagccatagtcagac

SEQ ID NO: 1388987 - DNA, 25 bp, Homo sapien
caaggattacactgatttgccccag

SEQ ID NO: 1388988 - DNA, 25 bp, Homo sapien
aatacctgatataatgaagtctcac

SEQ ID NO: 1388989 - DNA, 25 bp, Homo sapien
taacttagaatagcaacaaaatacc

SEQ ID NO: 1388990 - DNA, 25 bp, Homo sapien
tataacttagaatagcaacaaaata

SEQ ID NO: 1388991 - DNA, 25 bp, Homo sapien
ataacttagaatagcaacaaaatac

SEQ ID NO: 1388992 - DNA, 25 bp, Homo sapien
agatgcgtgcgtgataggccctcat

SEQ ID NO: 1388993 - DNA, 25 bp, Homo sapien
ctgtcctgagatgcgtgcgtgatag

SEQ ID NO: 1388994 - DNA, 25 bp, Homo sapien
atgcgtgcgtgataggccctcatga

SEQ ID NO: 1388995 - DNA, 25 bp, Homo sapien
tgtcctgagatgcgtgcgtgatagg

SEQ ID NO: 1388996 - DNA, 25 bp, Homo sapien
agcctttgatcgctccttgctggaa

SEQ ID NO: 1388997 - DNA, 25 bp, Homo sapien
aactagttcatgagctgagagaggc

SEQ ID NO: 1388998 - DNA, 25 bp, Homo sapien
ggcacagtggtaagacaaggatatt

SEQ ID NO: 1388999 - DNA, 25 bp, Homo sapien
cacgtatagctctgaattgttggca

SEQ ID NO: 1389000 - DNA, 25 bp, Homo sapien
aatagggaatgtttaggtggtcctg

SEQ ID NO: 1389001 - DNA, 25 bp, Homo sapien
ttgcaaataagggactggaataggg

SEQ ID NO: 1389002 - DNA, 25 bp, Homo sapien
ggattacagataaggtctctgtttt

SEQ ID NO: 1389003 - DNA, 25 bp, Homo sapien
caaggattacagataaggtctctgt

SEQ ID NO: 1389004 - DNA, 25 bp, Homo sapien
gctgtgacaggcaacaattaactct

SEQ ID NO: 1389005 - DNA, 25 bp, Homo sapien
aacttgtagccctctgttcatgcag

SEQ ID NO: 1389006 - DNA, 25 bp, Homo sapien
gaggagccgcattgttcaaaaccca

SEQ ID NO: 1389007 - DNA, 25 bp, Homo sapien
taagagcctgccatatgtgtgggac

SEQ ID NO: 1389008 - DNA, 25 bp, Homo sapien
ttcctccttagtgcctttggatcag

SEQ ID NO: 1389009 - DNA, 25 bp, Homo sapien
tagccagggcttgagtaacattttt

SEQ ID NO: 1389010 - DNA, 25 bp, Homo sapien
cagggcttgagtaacatttttctct

SEQ ID NO: 1389011 - DNA, 25 bp, Homo sapien
gccagggcttgagtaacatttttct

SEQ ID NO: 1389012 - DNA, 25 bp, Homo sapien
gtgcttacggctcttttggacatac

SEQ ID NO: 1389013 - DNA, 25 bp, Homo sapien
ctggagaataaccaaggtggcagaa

SEQ ID NO: 1389014 - DNA, 25 bp, Homo sapien
atagcaccctcattgcttggggtgc

SEQ ID NO: 1389015 - DNA, 25 bp, Homo sapien
gagaataaccaaggtggcagaaata

SEQ ID NO: 1389016 - DNA, 25 bp, Homo sapien
ctggtgaccagcattacccagacct

SEQ ID NO: 1389017 - DNA, 25 bp, Homo sapien
gctggtgaccagcattacccagacc

SEQ ID NO: 1389018 - DNA, 25 bp, Homo sapien
tggtgaccagcattacccagacctt

SEQ ID NO: 1389019 - DNA, 25 bp, Homo sapien
ctttgtttcaatcccgtcactgtgt

SEQ ID NO: 1389020 - DNA, 25 bp, Homo sapien
tgtttcaatcccgtcactgtgtagt

SEQ ID NO: 1389021 - DNA, 25 bp, Homo sapien
tgaactgagagtgccttcattatgg

SEQ ID NO: 1389022 - DNA, 25 bp, Homo sapien
cttcattatggctgaactcaaggtg

SEQ ID NO: 1389023 - DNA, 25 bp, Homo sapien
caggagctagaactcatgagggcca

SEQ ID NO: 1389024 - DNA, 25 bp, Homo sapien
tagaacttccttgttagactccttg

SEQ ID NO: 1389025 - DNA, 25 bp, Homo sapien
gagcatgcatagagtgaaagacaga

SEQ ID NO: 1389026 - DNA, 25 bp, Homo sapien
tatgccaaagtagtaatggagcagg

SEQ ID NO: 1389027 - DNA, 25 bp, Homo sapien
agaaaaaatggccctgaaggcggat

SEQ ID NO: 1389028 - DNA, 25 bp, Homo sapien
gaaaaaatggccctgaaggcggata

SEQ ID NO: 1389029 - DNA, 25 bp, Homo sapien
ggcttatggtgaacatcaactgaga

SEQ ID NO: 1389030 - DNA, 25 bp, Homo sapien
tggtaggtcccactgtgcaacggtg

SEQ ID NO: 1389031 - DNA, 25 bp, Homo sapien
taaactggtctcaggagaacagtct

SEQ ID NO: 1389032 - DNA, 25 bp, Homo sapien
tgcaacggtgtgacttggcttatgg

SEQ ID NO: 1389033 - DNA, 25 bp, Homo sapien
tacagattaagtttagtcgcgttcc

SEQ ID NO: 1389034 - DNA, 25 bp, Homo sapien
cagattaagtttagtcgcgttcctt

SEQ ID NO: 1389035 - DNA, 25 bp, Homo sapien
gccatacagtacagattaagtttag

SEQ ID NO: 1389036 - DNA, 25 bp, Homo sapien
tacagtacagattaagtttagtcgc

SEQ ID NO: 1389037 - DNA, 25 bp, Homo sapien
ctggatgtccacaattgccagcagg

SEQ ID NO: 1389038 - DNA, 25 bp, Homo sapien
agcctctgccgggttccaacagcat

SEQ ID NO: 1389039 - DNA, 25 bp, Homo sapien
gatgtccacaattgccagcaggatg

SEQ ID NO: 1389040 - DNA, 25 bp, Homo sapien
gtccacaattgccagcaggatggcc

SEQ ID NO: 1389041 - DNA, 25 bp, Homo sapien
ctctgctggtatccttggcttcagt

SEQ ID NO: 1389042 - DNA, 25 bp, Homo sapien
aacttgaagcaaatgttggctctgc

SEQ ID NO: 1389043 - DNA, 25 bp, Homo sapien
acttgaagcaaatgttggctctgct

SEQ ID NO: 1389044 - DNA, 25 bp, Homo sapien
gggagttcacggatgtagtgaggta

SEQ ID NO: 1389045 - DNA, 25 bp, Homo sapien
gagttcacggatgtagtgaggtatg

SEQ ID NO: 1389046 - DNA, 25 bp, Homo sapien
ccgggagttcacggatgtagtgagg

SEQ ID NO: 1389047 - DNA, 25 bp, Homo sapien
tcacggatgtagtgaggtatgatct

SEQ ID NO: 1389048 - DNA, 25 bp, Homo sapien
gagccggcggcgctgatttcgcact

SEQ ID NO: 1389049 - DNA, 25 bp, Homo sapien
gctagagggcgctgcctttcagcca

SEQ ID NO: 1389050 - DNA, 25 bp, Homo sapien
gagcaccctgttgtgatgcaggcgg

SEQ ID NO: 1389051 - DNA, 25 bp, Homo sapien
gatttcgcactctggccgctagagg

SEQ ID NO: 1389052 - DNA, 25 bp, Homo sapien
gcgttggcccgcgtcactccagcca

SEQ ID NO: 1389053 - DNA, 25 bp, Homo sapien
ctgccccgcgttggcccgcgtcact

SEQ ID NO: 1389054 - DNA, 25 bp, Homo sapien
ccgcgttggcccgcgtcactccagc

SEQ ID NO: 1389055 - DNA, 25 bp, Homo sapien
gttggcccgcgtcactccagccatg

SEQ ID NO: 1389056 - DNA, 25 bp, Homo sapien
cagtcctcagattgtccttgcatct

SEQ ID NO: 1389057 - DNA, 25 bp, Homo sapien
actgggggctcacgttgaaatggct

SEQ ID NO: 1389058 - DNA, 25 bp, Homo sapien
acgttgaaatggctctcagtcctca

SEQ ID NO: 1389059 - DNA, 25 bp, Homo sapien
tcagattgtccttgcatcttgttaa

SEQ ID NO: 1389060 - DNA, 25 bp, Homo sapien
tcaaaagtgaatcgcagcgcgcttc

SEQ ID NO: 1389061 - DNA, 25 bp, Homo sapien
tctcacaaggttattgtgtgccagg

SEQ ID NO: 1389062 - DNA, 25 bp, Homo sapien
tgtctgtccatcctgcaaacggttg

SEQ ID NO: 1389063 - DNA, 25 bp, Homo sapien
tgcttttggtcgcttctcacaaggt

SEQ ID NO: 1389064 - DNA, 25 bp, Homo sapien
ctgtcaaggcgagcacactgctgag

SEQ ID NO: 1389065 - DNA, 25 bp, Homo sapien
tcaaggcgagcacactgctgagaga

SEQ ID NO: 1389066 - DNA, 25 bp, Homo sapien
ggcgagcacactgctgagagaggcc

SEQ ID NO: 1389067 - DNA, 25 bp, Homo sapien
caaggcgagcacactgctgagagag

SEQ ID NO: 1389068 - DNA, 25 bp, Homo sapien
tcttgtccctctccggtcatagagg

SEQ ID NO: 1389069 - DNA, 25 bp, Homo sapien
ggacaccaagttcctttgcggccag

SEQ ID NO: 1389070 - DNA, 25 bp, Homo sapien
tccggtcatagaggacaccaagttc

SEQ ID NO: 1389071 - DNA, 25 bp, Homo sapien
cctctccggtcatagaggacaccaa

SEQ ID NO: 1389072 - DNA, 25 bp, Homo sapien
gctgaagaagttggggaaactggtc

SEQ ID NO: 1389073 - DNA, 25 bp, Homo sapien
tgaagaagttggggaaactggtctc

SEQ ID NO: 1389074 - DNA, 25 bp, Homo sapien
gggaaactggtctcccacacttggc

SEQ ID NO: 1389075 - DNA, 25 bp, Homo sapien
cagtgccgggagcaatctcttgccc

SEQ ID NO: 1389076 - DNA, 25 bp, Homo sapien
cagtgagaaggccagtgatagaatt

SEQ ID NO: 1389077 - DNA, 25 bp, Homo sapien
cctgatttgcattgtgggctgagga

SEQ ID NO: 1389078 - DNA, 25 bp, Homo sapien
gatcagctgctgatcatggctaggg

SEQ ID NO: 1389079 - DNA, 25 bp, Homo sapien
gttttataggctactgctccttggg

SEQ ID NO: 1389080 - DNA, 25 bp, Homo sapien
gggactggaggatcctaacaggatt

SEQ ID NO: 1389081 - DNA, 25 bp, Homo sapien
gaggcctcagtgattgaggatactc

SEQ ID NO: 1389082 - DNA, 25 bp, Homo sapien
gatactcctgtatgagcctcggccc

SEQ ID NO: 1389083 - DNA, 25 bp, Homo sapien
ctccaggtaagaactgctcgtgtcc

SEQ ID NO: 1389084 - DNA, 25 bp, Homo sapien
gaattcctgagtgaacgaacagagc

SEQ ID NO: 1389085 - DNA, 25 bp, Homo sapien
caggtaagaactgctcgtgtcctcc

SEQ ID NO: 1389086 - DNA, 25 bp, Homo sapien
ctgagtgaacgaacagagcagctcc

SEQ ID NO: 1389087 - DNA, 25 bp, Homo sapien
aatgagcactgggattggaaacctg

SEQ ID NO: 1389088 - DNA, 25 bp, Homo sapien
tcctgatggtatttcattgcatctg

SEQ ID NO: 1389089 - DNA, 25 bp, Homo sapien
atggtatttcattgcatctggccat

SEQ ID NO: 1389090 - DNA, 25 bp, Homo sapien
tgggctgtttctttcctgatggtat

SEQ ID NO: 1389091 - DNA, 25 bp, Homo sapien
tgatggtatttcattgcatctggcc

SEQ ID NO: 1389092 - DNA, 25 bp, Homo sapien
cagtaaagtacattgagacctcgtc

SEQ ID NO: 1389093 - DNA, 25 bp, Homo sapien
tgaaactgaactgatgctcgcaggt

SEQ ID NO: 1389094 - DNA, 25 bp, Homo sapien
ctggatgtgactcaactctggtgat

SEQ ID NO: 1389095 - DNA, 25 bp, Homo sapien
catagatgtgaactcaagctgaaac

SEQ ID NO: 1389096 - DNA, 25 bp, Homo sapien
tggttgagaagtgtagcccagcaga

SEQ ID NO: 1389097 - DNA, 25 bp, Homo sapien
ttcctgcgaattgagaaggacaccg

SEQ ID NO: 1389098 - DNA, 25 bp, Homo sapien
gaacatatgcaggtgaatgagacat

SEQ ID NO: 1389099 - DNA, 25 bp, Homo sapien
taggatcaatggtgtctttgtggac

SEQ ID NO: 1389100 - DNA, 25 bp, Homo sapien
aagaactgtacacattactcttgga

SEQ ID NO: 1389101 - DNA, 25 bp, Homo sapien
ccaagaactgtacacattactcttg

SEQ ID NO: 1389102 - DNA, 25 bp, Homo sapien
atgaggaaccaagaactgtacacat

SEQ ID NO: 1389103 - DNA, 25 bp, Homo sapien
ctatgaggaaccaagaactgtacac

SEQ ID NO: 1389104 - DNA, 25 bp, Homo sapien
ttagcttgctaacatgttcctgctg

SEQ ID NO: 1389105 - DNA, 25 bp, Homo sapien
tatatgggagagtctggccttacct

SEQ ID NO: 1389106 - DNA, 25 bp, Homo sapien
catgcacacgggaggaatggttaca

SEQ ID NO: 1389107 - DNA, 25 bp, Homo sapien
tctagggcagcgctcctctctagaa

SEQ ID NO: 1389108 - DNA, 25 bp, Homo sapien
aaattgaccaaccttctctttgtag

SEQ ID NO: 1389109 - DNA, 25 bp, Homo sapien
gaagtgggagataaccgagattttc

SEQ ID NO: 1389110 - DNA, 25 bp, Homo sapien
tacaataagttcactgttgagccgt

SEQ ID NO: 1389111 - DNA, 25 bp, Homo sapien
tagaatgattttttgacgtggaccc

SEQ ID NO: 1389112 - DNA, 25 bp, Homo sapien
gaatttgtgaatataactgcaggct

SEQ ID NO: 1389113 - DNA, 25 bp, Homo sapien
aaatctatggagaatataagcctgg

SEQ ID NO: 1389114 - DNA, 25 bp, Homo sapien
caggcttactcttggtgatctgaga

SEQ ID NO: 1389115 - DNA, 25 bp, Homo sapien
tatcaactgcacataaaagcctaga

SEQ ID NO: 1389116 - DNA, 25 bp, Homo sapien
aagccatagggagctagcttttggc

SEQ ID NO: 1389117 - DNA, 25 bp, Homo sapien
taaggtgtcctatggggcacaacag

SEQ ID NO: 1389118 - DNA, 25 bp, Homo sapien
ggcttaagaaccaactgaagctgcc

SEQ ID NO: 1389119 - DNA, 25 bp, Homo sapien
ggtataagccaacacgcccgggcca

SEQ ID NO: 1389120 - DNA, 25 bp, Homo sapien
gtagagaatgaggtttcaccatttt

SEQ ID NO: 1389121 - DNA, 25 bp, Homo sapien
cccaccttgtactcccaaagtgctg

SEQ ID NO: 1389122 - DNA, 25 bp, Homo sapien
ccaccttgtactcccaaagtgctgg

SEQ ID NO: 1389123 - DNA, 25 bp, Homo sapien
tagagaatgaggtttcaccattttg

SEQ ID NO: 1389124 - DNA, 25 bp, Homo sapien
caaaagagcctgaatcggatgatct

SEQ ID NO: 1389125 - DNA, 25 bp, Homo sapien
ttatcagtattgtaatgggaacccc

SEQ ID NO: 1389126 - DNA, 25 bp, Homo sapien
gaatgtgctagatgaaccctatgag

SEQ ID NO: 1389127 - DNA, 25 bp, Homo sapien
tttactagagtatgggtacagtccc

SEQ ID NO: 1389128 - DNA, 25 bp, Homo sapien
tgctttaaccttcatttgcctctag

SEQ ID NO: 1389129 - DNA, 25 bp, Homo sapien
tgcatgtctgagtgttctaaaaatt

SEQ ID NO: 1389130 - DNA, 25 bp, Homo sapien
ggaaacatcactaccgaattgaaag

SEQ ID NO: 1389131 - DNA, 25 bp, Homo sapien
catttgcctctagaaacccaaaaca

SEQ ID NO: 1389132 - DNA, 25 bp, Homo sapien
tgataaaatgaacgtaaggcaaaag

SEQ ID NO: 1389133 - DNA, 25 bp, Homo sapien
atgttagatcacacaagcataataa

SEQ ID NO: 1389134 - DNA, 25 bp, Homo sapien
ggttattttaatggggcaggatcag

SEQ ID NO: 1389135 - DNA, 25 bp, Homo sapien
ccaagctatgcttgataaaatgaac

SEQ ID NO: 1389136 - DNA, 25 bp, Homo sapien
aatcctacgtgtttggctcagctac

SEQ ID NO: 1389137 - DNA, 25 bp, Homo sapien
tgttctggctgatgctactcatggt

SEQ ID NO: 1389138 - DNA, 25 bp, Homo sapien
gcaaagctataaccttttccatgtg

SEQ ID NO: 1389139 - DNA, 25 bp, Homo sapien
gattttaatgagtcaatctcaaggc

SEQ ID NO: 1389140 - DNA, 25 bp, Homo sapien
gagtatgctatgaaggtgaaaaatg

SEQ ID NO: 1389141 - DNA, 25 bp, Homo sapien
ctatgaaggtgaaaaatgctaccat

SEQ ID NO: 1389142 - DNA, 25 bp, Homo sapien
gaaggtgaaaaatgctaccatagca

SEQ ID NO: 1389143 - DNA, 25 bp, Homo sapien
aggagtatgctatgaaggtgaaaaa

SEQ ID NO: 1389144 - DNA, 25 bp, Homo sapien
ctaacagtctgtagtaggcttaagt

SEQ ID NO: 1389145 - DNA, 25 bp, Homo sapien
ctctaacagtctgtagtaggcttaa

SEQ ID NO: 1389146 - DNA, 25 bp, Homo sapien
tctaacagtctgtagtaggcttaag

SEQ ID NO: 1389147 - DNA, 25 bp, Homo sapien
gagtatgctagagagagcgctgacc

SEQ ID NO: 1389148 - DNA, 25 bp, Homo sapien
tactcattcggatcagcagcacaga

SEQ ID NO: 1389149 - DNA, 25 bp, Homo sapien
caaggacttcagtgattatggtgcg

SEQ ID NO: 1389150 - DNA, 25 bp, Homo sapien
tgagccaaatagaggaagagtatgc

SEQ ID NO: 1389151 - DNA, 25 bp, Homo sapien
ctgtaagtcaaatgaattaatccag

SEQ ID NO: 1389152 - DNA, 25 bp, Homo sapien
caaatgaattaatccagaagtgact

SEQ ID NO: 1389153 - DNA, 25 bp, Homo sapien
aagtcaaatgaattaatccagaagt

SEQ ID NO: 1389154 - DNA, 25 bp, Homo sapien
tcaaatgaattaatccagaagtgac

SEQ ID NO: 1389155 - DNA, 25 bp, Homo sapien
ctgaatgtagtgaggaacaggacaa

SEQ ID NO: 1389156 - DNA, 25 bp, Homo sapien
atgtagtgaggaacaggacaaagga

SEQ ID NO: 1389157 - DNA, 25 bp, Homo sapien
tgaatgtagtgaggaacaggacaaa

SEQ ID NO: 1389158 - DNA, 25 bp, Homo sapien
gaatgtagtgaggaacaggacaaag

SEQ ID NO: 1389159 - DNA, 25 bp, Homo sapien
ggacaatgacattggaggacttact

SEQ ID NO: 1389160 - DNA, 25 bp, Homo sapien
ctaatagcaggacaatgacattgga

SEQ ID NO: 1389161 - DNA, 25 bp, Homo sapien
gacttactgctagagatggcataaa

SEQ ID NO: 1389162 - DNA, 25 bp, Homo sapien
cattatctgtgctaatagcaggaca

SEQ ID NO: 1389163 - DNA, 25 bp, Homo sapien
aagagacttaaaatagactgctgaa

SEQ ID NO: 1389164 - DNA, 25 bp, Homo sapien
agactataaagaagagacttaaaat

SEQ ID NO: 1389165 - DNA, 25 bp, Homo sapien
tgccacaatcctgtatagaacaatt

SEQ ID NO: 1389166 - DNA, 25 bp, Homo sapien
tcttccatgccacaatcctgtatag

SEQ ID NO: 1389167 - DNA, 25 bp, Homo sapien
aagagtgatcagcaatcctctgatg

SEQ ID NO: 1389168 - DNA, 25 bp, Homo sapien
taagagtgatcagcaatcctctgat

SEQ ID NO: 1389169 - DNA, 25 bp, Homo sapien
tatacaaattagaatcttaacaatg

SEQ ID NO: 1389170 - DNA, 25 bp, Homo sapien
gaagcaagtacctaaagtatacaaa

SEQ ID NO: 1389171 - DNA, 25 bp, Homo sapien
gacaaaccaggatcttgatataaca

SEQ ID NO: 1389172 - DNA, 25 bp, Homo sapien
tacgtcaaaatatacagagtgggaa

SEQ ID NO: 1389173 - DNA, 25 bp, Homo sapien
attcccagataattcacagtgatct

SEQ ID NO: 1389174 - DNA, 25 bp, Homo sapien
ttcccagataattcacagtgatctc

SEQ ID NO: 1389175 - DNA, 25 bp, Homo sapien
tcccagataattcacagtgatctca

SEQ ID NO: 1389176 - DNA, 25 bp, Homo sapien
tggattcccagataattcacagtga

SEQ ID NO: 1389177 - DNA, 25 bp, Homo sapien
taatcactgtaacatatcttacagg

SEQ ID NO: 1389178 - DNA, 25 bp, Homo sapien
agtgactgaaactaatgaattaatc

SEQ ID NO: 1389179 - DNA, 25 bp, Homo sapien
catatcttacaggtcaatgttccta

SEQ ID NO: 1389180 - DNA, 25 bp, Homo sapien
ggagcatcttaacaatcacttacta

SEQ ID NO: 1389181 - DNA, 25 bp, Homo sapien
gctcactgaggccttggacttctgg

SEQ ID NO: 1389182 - DNA, 25 bp, Homo sapien
aatttttattgttttgctgagatgg

SEQ ID NO: 1389183 - DNA, 25 bp, Homo sapien
agcggcgtgataatagctcactgag

SEQ ID NO: 1389184 - DNA, 25 bp, Homo sapien
tcactgaggccttggacttctgggc

SEQ ID NO: 1389185 - DNA, 25 bp, Homo sapien
gactggatgctatctccctaagagc

SEQ ID NO: 1389186 - DNA, 25 bp, Homo sapien
ggtgaccaactagaagtagctgctg

SEQ ID NO: 1389187 - DNA, 25 bp, Homo sapien
aggtaaccaggttctctcattggga

SEQ ID NO: 1389188 - DNA, 25 bp, Homo sapien
tgctgttggctgctcctatcaagaa

SEQ ID NO: 1389189 - DNA, 25 bp, Homo sapien
acctagcaatacaggccagaacttc

SEQ ID NO: 1389190 - DNA, 25 bp, Homo sapien
cctagcaatacaggccagaacttct

SEQ ID NO: 1389191 - DNA, 25 bp, Homo sapien
aacctagcaatacaggccagaactt

SEQ ID NO: 1389192 - DNA, 25 bp, Homo sapien
caacctagcaatacaggccagaact

SEQ ID NO: 1389193 - DNA, 25 bp, Homo sapien
aggttttggagtattctattctctc

SEQ ID NO: 1389194 - DNA, 25 bp, Homo sapien
gaaggttttggagtattctattctc

SEQ ID NO: 1389195 - DNA, 25 bp, Homo sapien
ccttgaaggttttggagtattctat

SEQ ID NO: 1389196 - DNA, 25 bp, Homo sapien
ttttccaaacacagtaaatagagaa

SEQ ID NO: 1389197 - DNA, 25 bp, Homo sapien
catccatggcagataggtgtctact

SEQ ID NO: 1389198 - DNA, 25 bp, Homo sapien
taataacagtagttgtggccagcat

SEQ ID NO: 1389199 - DNA, 25 bp, Homo sapien
aagtagctaccatctttatcccagg

SEQ ID NO: 1389200 - DNA, 25 bp, Homo sapien
taaaatagggctaggccatccatgg

SEQ ID NO: 1389201 - DNA, 25 bp, Homo sapien
gcatatagatcagctgtttccagaa

SEQ ID NO: 1389202 - DNA, 25 bp, Homo sapien
tggtagcatatagatcagctgtttc

SEQ ID NO: 1389203 - DNA, 25 bp, Homo sapien
tagcatatagatcagctgtttccag

SEQ ID NO: 1389204 - DNA, 25 bp, Homo sapien
gtagcatatagatcagctgtttcca

SEQ ID NO: 1389205 - DNA, 25 bp, Homo sapien
tgggcatcaaggttttaatcacata

SEQ ID NO: 1389206 - DNA, 25 bp, Homo sapien
ggcacagaatgggcatcaaggtttt

SEQ ID NO: 1389207 - DNA, 25 bp, Homo sapien
gaatgggcatcaaggttttaatcac

SEQ ID NO: 1389208 - DNA, 25 bp, Homo sapien
cagaatgggcatcaaggttttaatc

SEQ ID NO: 1389209 - DNA, 25 bp, Homo sapien
actgtgttctaatataggctaggat

SEQ ID NO: 1389210 - DNA, 25 bp, Homo sapien
tctcctacattatctgaatataatg

SEQ ID NO: 1389211 - DNA, 25 bp, Homo sapien
tgttctaatataggctaggatttac

SEQ ID NO: 1389212 - DNA, 25 bp, Homo sapien
caaatgtaatgttcaagattgtaaa

SEQ ID NO: 1389213 - DNA, 25 bp, Homo sapien
tcttttatatcttatcttcatggga

SEQ ID NO: 1389214 - DNA, 25 bp, Homo sapien
tatcttcatgggattgtcttatgcc

SEQ ID NO: 1389215 - DNA, 25 bp, Homo sapien
tgccatggtgttatccattttgcac

SEQ ID NO: 1389216 - DNA, 25 bp, Homo sapien
gggattgtcttatgccatggtgtta

SEQ ID NO: 1389217 - DNA, 25 bp, Homo sapien
ttgacctaatagcaccagagccaca

SEQ ID NO: 1389218 - DNA, 25 bp, Homo sapien
caggtgctggaaagatgactgtaca

SEQ ID NO: 1389219 - DNA, 25 bp, Homo sapien
gactttttaggaccacttcagctca

SEQ ID NO: 1389220 - DNA, 25 bp, Homo sapien
tacacatggtatttcctaagcctag

SEQ ID NO: 1389221 - DNA, 25 bp, Homo sapien
gctgaagtggtaacactttttatca

SEQ ID NO: 1389222 - DNA, 25 bp, Homo sapien
cctgatggtttgttatgcacttccc

SEQ ID NO: 1389223 - DNA, 25 bp, Homo sapien
tttcacttcctgatgctgaagtggt

SEQ ID NO: 1389224 - DNA, 25 bp, Homo sapien
gcacttcccccttctggaacattgt

SEQ ID NO: 1389225 - DNA, 25 bp, Homo sapien
gtcctacaggtgaataaatcaacag

SEQ ID NO: 1389226 - DNA, 25 bp, Homo sapien
cctacaggtgaataaatcaacagga

SEQ ID NO: 1389227 - DNA, 25 bp, Homo sapien
ctgtcctacaggtgaataaatcaac

SEQ ID NO: 1389228 - DNA, 25 bp, Homo sapien
cttctgcaatctgtcctacaggtga

SEQ ID NO: 1389229 - DNA, 25 bp, Homo sapien
gaccgactagtacagtggtagctgc

SEQ ID NO: 1389230 - DNA, 25 bp, Homo sapien
gaggaccgactagtacagtggtagc

SEQ ID NO: 1389231 - DNA, 25 bp, Homo sapien
ccgactagtacagtggtagctgctg

SEQ ID NO: 1389232 - DNA, 25 bp, Homo sapien
ctgtggaggaccgactagtacagtg

SEQ ID NO: 1389233 - DNA, 25 bp, Homo sapien
cttttacagagcgaaagtgttaaat

SEQ ID NO: 1389234 - DNA, 25 bp, Homo sapien
cgggccttaacagtcttttacagag

SEQ ID NO: 1389235 - DNA, 25 bp, Homo sapien
tcaagtaaagaactttttgtgtagc

SEQ ID NO: 1389236 - DNA, 25 bp, Homo sapien
ttaacagtcttttacagagcgaaag

SEQ ID NO: 1389237 - DNA, 25 bp, Homo sapien
tcttactacagaaaagtgttgaagg

SEQ ID NO: 1389238 - DNA, 25 bp, Homo sapien
tgctcctggcctttatgtctaatgt

SEQ ID NO: 1389239 - DNA, 25 bp, Homo sapien
aatactcatgcaattcaaaacctgt

SEQ ID NO: 1389240 - DNA, 25 bp, Homo sapien
ttaacttgactatgggtcttactac

SEQ ID NO: 1389241 - DNA, 25 bp, Homo sapien
tccatggtttgcagcagtcgccgtt

SEQ ID NO: 1389242 - DNA, 25 bp, Homo sapien
tccagggctagaatatccgtgtcag

SEQ ID NO: 1389243 - DNA, 25 bp, Homo sapien
agcagtcgccgttccagggctagaa

SEQ ID NO: 1389244 - DNA, 25 bp, Homo sapien
tagaatatccgtgtcagtcacattc

SEQ ID NO: 1389245 - DNA, 25 bp, Homo sapien
catttaggatgtatgtttaagcaca

SEQ ID NO: 1389246 - DNA, 25 bp, Homo sapien
tactgttctgttaatatctaggagg

SEQ ID NO: 1389247 - DNA, 25 bp, Homo sapien
taaaggcaagccgtacaagtgataa

SEQ ID NO: 1389248 - DNA, 25 bp, Homo sapien
agaaagatttccaggtcaatgccca

SEQ ID NO: 1389249 - DNA, 25 bp, Homo sapien
aaagaagagccatgagagtcactcc

SEQ ID NO: 1389250 - DNA, 25 bp, Homo sapien
ggaagtaagacatgtaagtgtatgg

SEQ ID NO: 1389251 - DNA, 25 bp, Homo sapien
tgggcagttgacagcaccaaatcca

SEQ ID NO: 1389252 - DNA, 25 bp, Homo sapien
tccagaaagaagagccatgagagtc

SEQ ID NO: 1389253 - DNA, 25 bp, Homo sapien
gaaaaaagcagtcgttgtttatgca

SEQ ID NO: 1389254 - DNA, 25 bp, Homo sapien
ggaaaaaagcagtcgttgtttatgc

SEQ ID NO: 1389255 - DNA, 25 bp, Homo sapien
aggaaaaaagcagtcgttgtttatg

SEQ ID NO: 1389256 - DNA, 25 bp, Homo sapien
tgctcacaataaaatagccaatgta

SEQ ID NO: 1389257 - DNA, 25 bp, Homo sapien
tgaaaaccaggatcagcagaattac

SEQ ID NO: 1389258 - DNA, 25 bp, Homo sapien
cattttccagtgaaaataacgggag

SEQ ID NO: 1389259 - DNA, 25 bp, Homo sapien
gcagaattacacacaggttcatttt

SEQ ID NO: 1389260 - DNA, 25 bp, Homo sapien
taggaccctgttgatacctttgtgg

SEQ ID NO: 1389261 - DNA, 25 bp, Homo sapien
ctagtcggtcctccacagactgaga

SEQ ID NO: 1389262 - DNA, 25 bp, Homo sapien
gagctgggacatgccagcagctacc

SEQ ID NO: 1389263 - DNA, 25 bp, Homo sapien
cagcagctaccactgtactagtcgg

SEQ ID NO: 1389264 - DNA, 25 bp, Homo sapien
atgtgccatgtggcaccaagaagaa

SEQ ID NO: 1389265 - DNA, 25 bp, Homo sapien
ttgggtagagagttctgtagatatc

SEQ ID NO: 1389266 - DNA, 25 bp, Homo sapien
gaggaagttccattgtaatcatagt

SEQ ID NO: 1389267 - DNA, 25 bp, Homo sapien
atagaagtggtaggattagtcatcc

SEQ ID NO: 1389268 - DNA, 25 bp, Homo sapien
tagtctgctatagttgattatattc

SEQ ID NO: 1389269 - DNA, 25 bp, Homo sapien
tagggagatagcatccagtctcacc

SEQ ID NO: 1389270 - DNA, 25 bp, Homo sapien
gcagctgtcacctatacagagttat

SEQ ID NO: 1389271 - DNA, 25 bp, Homo sapien
gcacaattttaataggcttatctgc

SEQ ID NO: 1389272 - DNA, 25 bp, Homo sapien
gctaagatgcttttataagcagctg

SEQ ID NO: 1389273 - DNA, 25 bp, Homo sapien
gcaaccacaacattgttacaaaagc

SEQ ID NO: 1389274 - DNA, 25 bp, Homo sapien
taaattagccgtctgcaatagccgc

SEQ ID NO: 1389275 - DNA, 25 bp, Homo sapien
aaaaatctagctcttgccttatctc

SEQ ID NO: 1389276 - DNA, 25 bp, Homo sapien
tatctcttcctaagttaagcataaa

SEQ ID NO: 1389277 - DNA, 25 bp, Homo sapien
tagaagtaagagacatcatcataca

SEQ ID NO: 1389278 - DNA, 25 bp, Homo sapien
ataaacagccaaagctattacttgt

SEQ ID NO: 1389279 - DNA, 25 bp, Homo sapien
tcacacatggtgaatggtttccagt

SEQ ID NO: 1389280 - DNA, 25 bp, Homo sapien
taaacagccaaagctattacttgtt

SEQ ID NO: 1389281 - DNA, 25 bp, Homo sapien
cacacatggtgaatggtttccagtg

SEQ ID NO: 1389282 - DNA, 25 bp, Homo sapien
tctctgtatcttcagaattggaaga

SEQ ID NO: 1389283 - DNA, 25 bp, Homo sapien
catctctgtatcttcagaattggaa

SEQ ID NO: 1389284 - DNA, 25 bp, Homo sapien
cacatctctgtatcttcagaattgg

SEQ ID NO: 1389285 - DNA, 25 bp, Homo sapien
tcacatctctgtatcttcagaattg

SEQ ID NO: 1389286 - DNA, 25 bp, Homo sapien
tcacagcatgcagttgacagcaatt

SEQ ID NO: 1389287 - DNA, 25 bp, Homo sapien
cagcatgcagttgacagcaattgtg

SEQ ID NO: 1389288 - DNA, 25 bp, Homo sapien
tgcagttgacagcaattgtgtagag

SEQ ID NO: 1389289 - DNA, 25 bp, Homo sapien
catgcagttgacagcaattgtgtag

SEQ ID NO: 1389290 - DNA, 25 bp, Homo sapien
tctttccacagactagaagtgtgac

SEQ ID NO: 1389291 - DNA, 25 bp, Homo sapien
acaatagggattttcttagcttgga

SEQ ID NO: 1389292 - DNA, 25 bp, Homo sapien
gcttggaaataatcataggccttct

SEQ ID NO: 1389293 - DNA, 25 bp, Homo sapien
caagtcagcaggaccgcccttctgt

SEQ ID NO: 1389294 - DNA, 25 bp, Homo sapien
cccgaatcgcatttaagtgaaagcc

SEQ ID NO: 1389295 - DNA, 25 bp, Homo sapien
gaccccgaatcgcatttaagtgaaa

SEQ ID NO: 1389296 - DNA, 25 bp, Homo sapien
taagtgaaagccatagccattttca

SEQ ID NO: 1389297 - DNA, 25 bp, Homo sapien
ctggcagaccccgaatcgcatttaa

SEQ ID NO: 1389298 - DNA, 25 bp, Homo sapien
gacagagccattgggcagttcttga

SEQ ID NO: 1389299 - DNA, 25 bp, Homo sapien
tatctggtggacttgagacttccag

SEQ ID NO: 1389300 - DNA, 25 bp, Homo sapien
cagttcttgactttgatagtagaga

SEQ ID NO: 1389301 - DNA, 25 bp, Homo sapien
ctggagcctccttgacagagccatt

SEQ ID NO: 1389302 - DNA, 25 bp, Homo sapien
cagtctgtacatgttgtccgtctct

SEQ ID NO: 1389303 - DNA, 25 bp, Homo sapien
agggtttccacagactcgccgttga

SEQ ID NO: 1389304 - DNA, 25 bp, Homo sapien
tctttgtctaccaccaacagtgaag

SEQ ID NO: 1389305 - DNA, 25 bp, Homo sapien
tctaccacactgtcatgatccaggg

SEQ ID NO: 1389306 - DNA, 25 bp, Homo sapien
agattttctgctggagcccaaagcc

SEQ ID NO: 1389307 - DNA, 25 bp, Homo sapien
aacagattttctgctggagcccaaa

SEQ ID NO: 1389308 - DNA, 25 bp, Homo sapien
cagattttctgctggagcccaaagc

SEQ ID NO: 1389309 - DNA, 25 bp, Homo sapien
aaaacagattttctgctggagccca

SEQ ID NO: 1389310 - DNA, 25 bp, Homo sapien
tcatctccacaattcggggctggtg

SEQ ID NO: 1389311 - DNA, 25 bp, Homo sapien
tatcttctgctcaacatgacgcttg

SEQ ID NO: 1389312 - DNA, 25 bp, Homo sapien
cagcaggaacatgacacggcttcct

SEQ ID NO: 1389313 - DNA, 25 bp, Homo sapien
ttctgagcctgccctcagatagaaa

SEQ ID NO: 1389314 - DNA, 25 bp, Homo sapien
caccttgaggtgtaatatcagtcat

SEQ ID NO: 1389315 - DNA, 25 bp, Homo sapien
tcaagtgatcatcagccagaactcc

SEQ ID NO: 1389316 - DNA, 25 bp, Homo sapien
gtgatcatcagccagaactccagct

SEQ ID NO: 1389317 - DNA, 25 bp, Homo sapien
tggctggcatcctctacattctctc

SEQ ID NO: 1389318 - DNA, 25 bp, Homo sapien
ttagccagagctcaaagatgcacct

SEQ ID NO: 1389319 - DNA, 25 bp, Homo sapien
gaaggaatcgaccagctaacacagc

SEQ ID NO: 1389320 - DNA, 25 bp, Homo sapien
tattctcagcaaaggtaacagtgcc

SEQ ID NO: 1389321 - DNA, 25 bp, Homo sapien
cctaagagggctagaagcatcaacc

SEQ ID NO: 1389322 - DNA, 25 bp, Homo sapien
tgaattcccactctttctgaccaga

SEQ ID NO: 1389323 - DNA, 25 bp, Homo sapien
ggctgggtccaagtttgcacacctc

SEQ ID NO: 1389324 - DNA, 25 bp, Homo sapien
tccttcacgagatagcagagccggg

SEQ ID NO: 1389325 - DNA, 25 bp, Homo sapien
gaatccccatccagaactagtaaag

SEQ ID NO: 1389326 - DNA, 25 bp, Homo sapien
gacacccaagtagaagcaggtagtt

SEQ ID NO: 1389327 - DNA, 25 bp, Homo sapien
tgacacccaagtagaagcaggtagt

SEQ ID NO: 1389328 - DNA, 25 bp, Homo sapien
acacccaagtagaagcaggtagttc

SEQ ID NO: 1389329 - DNA, 25 bp, Homo sapien
ttgacacccaagtagaagcaggtag

SEQ ID NO: 1389330 - DNA, 25 bp, Homo sapien
aagaaatcttggagtgaaattttca

SEQ ID NO: 1389331 - DNA, 25 bp, Homo sapien
cttgtcctaaaccttctgttgtttg

SEQ ID NO: 1389332 - DNA, 25 bp, Homo sapien
gaagaaatcttggagtgaaattttc

SEQ ID NO: 1389333 - DNA, 25 bp, Homo sapien
gggcacacccctgagtaatccaaag

SEQ ID NO: 1389334 - DNA, 25 bp, Homo sapien
tggaagctaaacctgccacctctgg

SEQ ID NO: 1389335 - DNA, 25 bp, Homo sapien
aaaggccatcagacggattctcgtg

SEQ ID NO: 1389336 - DNA, 25 bp, Homo sapien
tagtgaaaccgcactcagtggagca

SEQ ID NO: 1389337 - DNA, 25 bp, Homo sapien
cgactacggtggacaagggatgatt

SEQ ID NO: 1389338 - DNA, 25 bp, Homo sapien
tacttaacctcgtcaaccactgtgg

SEQ ID NO: 1389339 - DNA, 25 bp, Homo sapien
gacagagtctcacgcacaggtatgc

SEQ ID NO: 1389340 - DNA, 25 bp, Homo sapien
ttcgtgagtcggagagccatcagcg

SEQ ID NO: 1389341 - DNA, 25 bp, Homo sapien
tcacttgttattcgtaaagtctctt

SEQ ID NO: 1389342 - DNA, 25 bp, Homo sapien
cttgttattcgtaaagtctctttgt

SEQ ID NO: 1389343 - DNA, 25 bp, Homo sapien
cttcacttgttattcgtaaagtctc

SEQ ID NO: 1389344 - DNA, 25 bp, Homo sapien
ttattcgtaaagtctctttgtaatc

SEQ ID NO: 1389345 - DNA, 25 bp, Homo sapien
gagcatttatgcaatcttacatgca

SEQ ID NO: 1389346 - DNA, 25 bp, Homo sapien
tattgagcatttatgcaatcttaca

SEQ ID NO: 1389347 - DNA, 25 bp, Homo sapien
tttatgcaatcttacatgcattacc

SEQ ID NO: 1389348 - DNA, 25 bp, Homo sapien
gcatttatgcaatcttacatgcatt

SEQ ID NO: 1389349 - DNA, 25 bp, Homo sapien
cagactaagtggtcaaacgcgcaga

SEQ ID NO: 1389350 - DNA, 25 bp, Homo sapien
tccgcaggagcatttcccgagtgtc

SEQ ID NO: 1389351 - DNA, 25 bp, Homo sapien
tagaagagccacagtagaagagaga

SEQ ID NO: 1389352 - DNA, 25 bp, Homo sapien
ctgcaagccgctggatagcacggcg

SEQ ID NO: 1389353 - DNA, 25 bp, Homo sapien
tgaggagcagtgcgggagatgccca

SEQ ID NO: 1389354 - DNA, 25 bp, Homo sapien
ctgaggagcagtgcgggagatgccc

SEQ ID NO: 1389355 - DNA, 25 bp, Homo sapien
gaggagcagtgcgggagatgcccat

SEQ ID NO: 1389356 - DNA, 25 bp, Homo sapien
cccctggaccggctgtgccaagaga

SEQ ID NO: 1389357 - DNA, 25 bp, Homo sapien
tggaccggctgtgccaagagaagca

SEQ ID NO: 1389358 - DNA, 25 bp, Homo sapien
tcctggggttaagagacgtgcatcc

SEQ ID NO: 1389359 - DNA, 25 bp, Homo sapien
tgtcctcctggggttaagagacgtg

SEQ ID NO: 1389360 - DNA, 25 bp, Homo sapien
ctgggggccttgctgtcccaaggac

SEQ ID NO: 1389361 - DNA, 25 bp, Homo sapien
gggctgggggccttgctgtcccaag

SEQ ID NO: 1389362 - DNA, 25 bp, Homo sapien
tgggggccttgctgtcccaaggacg

SEQ ID NO: 1389363 - DNA, 25 bp, Homo sapien
gctgggggccttgctgtcccaagga

SEQ ID NO: 1389364 - DNA, 25 bp, Homo sapien
acccaggagcctccgtgcggagcca

SEQ ID NO: 1389365 - DNA, 25 bp, Homo sapien
aagactgtagggagaccttctcgcc

SEQ ID NO: 1389366 - DNA, 25 bp, Homo sapien
tccaaagactgtagggagaccttct

SEQ ID NO: 1389367 - DNA, 25 bp, Homo sapien
ggaaagcgacgtctcccatgctttc

SEQ ID NO: 1389368 - DNA, 25 bp, Homo sapien
cgggatccaagagccgccgttgcag

SEQ ID NO: 1389369 - DNA, 25 bp, Homo sapien
tcgtgtgcaggtccgaaggagaccc

SEQ ID NO: 1389370 - DNA, 25 bp, Homo sapien
ggtccgaaggagacccaagctcttg

SEQ ID NO: 1389371 - DNA, 25 bp, Homo sapien
tgccacggttccacgctgggtggac

SEQ ID NO: 1389372 - DNA, 25 bp, Homo sapien
ggcgatatccacatcggcggtgagc

SEQ ID NO: 1389373 - DNA, 25 bp, Homo sapien
gtccctggcggcgatatccacatcg

SEQ ID NO: 1389374 - DNA, 25 bp, Homo sapien
cggtgagaacaccaaggaagcgcac

SEQ ID NO: 1389375 - DNA, 25 bp, Homo sapien
cgcactcaagattcgtaggagggcg

SEQ ID NO: 1389376 - DNA, 25 bp, Homo sapien
tgcgcgaacccagccgccggatagc

SEQ ID NO: 1389377 - DNA, 25 bp, Homo sapien
cgagggccccgcatgtggagaaatc

SEQ ID NO: 1389378 - DNA, 25 bp, Homo sapien
tcagcggagccgaagtgtggtggac

SEQ ID NO: 1389379 - DNA, 25 bp, Homo sapien
accactgtatgtcccccgccacata

SEQ ID NO: 1389380 - DNA, 25 bp, Homo sapien
cggtggctccgcctagcattggatg

SEQ ID NO: 1389381 - DNA, 25 bp, Homo sapien
ttgttctgcaaaagacggtggctcc

SEQ ID NO: 1389382 - DNA, 25 bp, Homo sapien
gagggtcgactgtccgtatgtcgca

SEQ ID NO: 1389383 - DNA, 25 bp, Homo sapien
caagtctggagttggctggttcaag

SEQ ID NO: 1389384 - DNA, 25 bp, Homo sapien
attctttcgtcccaagatctcagcc

SEQ ID NO: 1389385 - DNA, 25 bp, Homo sapien
tcgtcccaagatctcagccagaaag

SEQ ID NO: 1389386 - DNA, 25 bp, Homo sapien
agccagaaagagagatccgcgcggc

SEQ ID NO: 1389387 - DNA, 25 bp, Homo sapien
tcagccagaaagagagatccgcgcg

SEQ ID NO: 1389388 - DNA, 25 bp, Homo sapien
ctgagagcggttacgaaggactgaa

SEQ ID NO: 1389389 - DNA, 25 bp, Homo sapien
gaactaagatgtcactccaggcgct

SEQ ID NO: 1389390 - DNA, 25 bp, Homo sapien
cctgatgggtcttgggagcgaacta

SEQ ID NO: 1389391 - DNA, 25 bp, Homo sapien
ttcagagcacttgggatgaggttcc

SEQ ID NO: 1389392 - DNA, 25 bp, Homo sapien
gagccctgcggccacttagtgttaa

SEQ ID NO: 1389393 - DNA, 25 bp, Homo sapien
tagtgttaaaagagctcacggcggc

SEQ ID NO: 1389394 - DNA, 25 bp, Homo sapien
ccatcattgcgactgtaaggagaac

SEQ ID NO: 1389395 - DNA, 25 bp, Homo sapien
tgcaggcctcggtgaacatgagcaa

SEQ ID NO: 1389396 - DNA, 25 bp, Homo sapien
tcaggggaaagcgcggacgcagtcc

SEQ ID NO: 1389397 - DNA, 25 bp, Homo sapien
catccggagtgcaatggataagcct

SEQ ID NO: 1389398 - DNA, 25 bp, Homo sapien
gacgcagtcccccactaccacaaat

SEQ ID NO: 1389399 - DNA, 25 bp, Homo sapien
agtgcaatggataagcctcgccctg

SEQ ID NO: 1389400 - DNA, 25 bp, Homo sapien
tgtttccagtaagcgacatctccag

SEQ ID NO: 1389401 - DNA, 25 bp, Homo sapien
tcctttattaatttggagctcttca

SEQ ID NO: 1389402 - DNA, 25 bp, Homo sapien
ccagtttataggcatagtttttgat

SEQ ID NO: 1389403 - DNA, 25 bp, Homo sapien
cagctcattatgaaaggcatccttt

SEQ ID NO: 1389404 - DNA, 25 bp, Homo sapien
cgcgctaaccgattgcgccacagag

SEQ ID NO: 1389405 - DNA, 25 bp, Homo sapien
ctttcagttaacagccgaacgcgct

SEQ ID NO: 1389406 - DNA, 25 bp, Homo sapien
ttcagttaacagccgaacgcgctaa

SEQ ID NO: 1389407 - DNA, 25 bp, Homo sapien
cagttaacagccgaacgcgctaacc

SEQ ID NO: 1389408 - DNA, 25 bp, Homo sapien
tgcgctatgggaagggcgccttcaa

SEQ ID NO: 1389409 - DNA, 25 bp, Homo sapien
accggagcgattagagcggtgaatc

SEQ ID NO: 1389410 - DNA, 25 bp, Homo sapien
gaactactgcttttactgtgcgcta

SEQ ID NO: 1389411 - DNA, 25 bp, Homo sapien
ctcagggcttgtccggcaggatgac

SEQ ID NO: 1389412 - DNA, 25 bp, Homo sapien
tgaggtaaatgctatggccaaggca

SEQ ID NO: 1389413 - DNA, 25 bp, Homo sapien
gaagcagaccttcccattgaatggg

SEQ ID NO: 1389414 - DNA, 25 bp, Homo sapien
gaacacaattatggctctgaagcag

SEQ ID NO: 1389415 - DNA, 25 bp, Homo sapien
taaattgcttagattagaggcgccc

SEQ ID NO: 1389416 - DNA, 25 bp, Homo sapien
gcctttctgacagctatggaatacg

SEQ ID NO: 1389417 - DNA, 25 bp, Homo sapien
attttgtcgtcctatcttacctcgg

SEQ ID NO: 1389418 - DNA, 25 bp, Homo sapien
taaaagcacactacggagcagcggt

SEQ ID NO: 1389419 - DNA, 25 bp, Homo sapien
tacgattagccaaggtccacttggc

SEQ ID NO: 1389420 - DNA, 25 bp, Homo sapien
gaggcctaatgggaaacaaatgctt

SEQ ID NO: 1389421 - DNA, 25 bp, Homo sapien
gattaacattgggatgggcagacta

SEQ ID NO: 1389422 - DNA, 25 bp, Homo sapien
ggaaatcaccaatatgacaaagggc

SEQ ID NO: 1389423 - DNA, 25 bp, Homo sapien
ttgtcactgtgaccgagcaccaggg

SEQ ID NO: 1389424 - DNA, 25 bp, Homo sapien
gcactggctactggggaattgaaag

SEQ ID NO: 1389425 - DNA, 25 bp, Homo sapien
tcagaaagcgagtgtggagaaacat

SEQ ID NO: 1389426 - DNA, 25 bp, Homo sapien
aacatagatcatgcctgagacctgg

SEQ ID NO: 1389427 - DNA, 25 bp, Homo sapien
tgagacctggtggattagagcactg

SEQ ID NO: 1389428 - DNA, 25 bp, Homo sapien
atcagtacccaccaaaaccaatcag

SEQ ID NO: 1389429 - DNA, 25 bp, Homo sapien
catcagtacccaccaaaaccaatca

SEQ ID NO: 1389430 - DNA, 25 bp, Homo sapien
aaccaagtaaccagtcctgatatca

SEQ ID NO: 1389431 - DNA, 25 bp, Homo sapien
agtaaggtgtctctaaaagggacag

SEQ ID NO: 1389432 - DNA, 25 bp, Homo sapien
accaagtaaccagtcctgatatcat

SEQ ID NO: 1389433 - DNA, 25 bp, Homo sapien
tggacaaactagaccttctctgccc

SEQ ID NO: 1389434 - DNA, 25 bp, Homo sapien
tgatatggactatgtgaaggagaca

SEQ ID NO: 1389435 - DNA, 25 bp, Homo sapien
gaaatgcagctacattatcttttta

SEQ ID NO: 1389436 - DNA, 25 bp, Homo sapien
gtgtgatttgtggtgatatggacta

SEQ ID NO: 1389437 - DNA, 25 bp, Homo sapien
agaaatgcagctacattatcttttt

SEQ ID NO: 1389438 - DNA, 25 bp, Homo sapien
gcaccggcagagtcctgggtgacat

SEQ ID NO: 1389439 - DNA, 25 bp, Homo sapien
ccggcagagtcctgggtgacatgct

SEQ ID NO: 1389440 - DNA, 25 bp, Homo sapien
taagtactgacaccaattggaggct

SEQ ID NO: 1389441 - DNA, 25 bp, Homo sapien
cttcctaagtactgacaccaattgg

SEQ ID NO: 1389442 - DNA, 25 bp, Homo sapien
ggttctgaaatacaatcctcagcca

SEQ ID NO: 1389443 - DNA, 25 bp, Homo sapien
tggttctgaaatacaatcctcagcc

SEQ ID NO: 1389444 - DNA, 25 bp, Homo sapien
aaccagggtaacacctttggatgag

SEQ ID NO: 1389445 - DNA, 25 bp, Homo sapien
agggtaacacctttggatgagctaa

SEQ ID NO: 1389446 - DNA, 25 bp, Homo sapien
ccagggtaacacctttggatgagct

SEQ ID NO: 1389447 - DNA, 25 bp, Homo sapien
cagggtaacacctttggatgagcta

SEQ ID NO: 1389448 - DNA, 25 bp, Homo sapien
gagtcaggtagttcaaagtacattg

SEQ ID NO: 1389449 - DNA, 25 bp, Homo sapien
agtcaggtagttcaaagtacattga

SEQ ID NO: 1389450 - DNA, 25 bp, Homo sapien
aatgagtcaggtagttcaaagtaca

SEQ ID NO: 1389451 - DNA, 25 bp, Homo sapien
tgagtcaggtagttcaaagtacatt

SEQ ID NO: 1389452 - DNA, 25 bp, Homo sapien
attgcctttatgttgggatagaaca

SEQ ID NO: 1389453 - DNA, 25 bp, Homo sapien
ttatgttgggatagaacagggccag

SEQ ID NO: 1389454 - DNA, 25 bp, Homo sapien
ggacagatccattaatgaggtaaca

SEQ ID NO: 1389455 - DNA, 25 bp, Homo sapien
ctttatgttgggatagaacagggcc

SEQ ID NO: 1389456 - DNA, 25 bp, Homo sapien
caggtgacatactggtaagggagtc

SEQ ID NO: 1389457 - DNA, 25 bp, Homo sapien
gctcaaaattcgatgcagtggccat

SEQ ID NO: 1389458 - DNA, 25 bp, Homo sapien
caatgacagtaggagtaattcagcc

SEQ ID NO: 1389459 - DNA, 25 bp, Homo sapien
cagtggccatgagagtacagctttt

SEQ ID NO: 1389460 - DNA, 25 bp, Homo sapien
ctggggcatggtgggttttgatctt

SEQ ID NO: 1389461 - DNA, 25 bp, Homo sapien
ttcttctttgatcttcttccccttc

SEQ ID NO: 1389462 - DNA, 25 bp, Homo sapien
gggcatggtgggttttgatcttctt

SEQ ID NO: 1389463 - DNA, 25 bp, Homo sapien
tcttttcttctttgatcttcttccc

SEQ ID NO: 1389464 - DNA, 25 bp, Homo sapien
aatggccacttggagcaggaatatg

SEQ ID NO: 1389465 - DNA, 25 bp, Homo sapien
tggccacttggagcaggaatatgat

SEQ ID NO: 1389466 - DNA, 25 bp, Homo sapien
cagctcagtaatggccacttggagc

SEQ ID NO: 1389467 - DNA, 25 bp, Homo sapien
ctcagtaatggccacttggagcagg

SEQ ID NO: 1389468 - DNA, 25 bp, Homo sapien
tggaaggagttgaataacatccagt

SEQ ID NO: 1389469 - DNA, 25 bp, Homo sapien
tgcataaaaggaacttccgtagggc

SEQ ID NO: 1389470 - DNA, 25 bp, Homo sapien
caatgcataaaaggaacttccgtag

SEQ ID NO: 1389471 - DNA, 25 bp, Homo sapien
tccaatgcataaaaggaacttccgt

SEQ ID NO: 1389472 - DNA, 25 bp, Homo sapien
aacagagccccaactaggtttcatg

SEQ ID NO: 1389473 - DNA, 25 bp, Homo sapien
acacaacagagccccaactaggttt

SEQ ID NO: 1389474 - DNA, 25 bp, Homo sapien
agccccaactaggtttcatgggtag

SEQ ID NO: 1389475 - DNA, 25 bp, Homo sapien
cagagccccaactaggtttcatggg

SEQ ID NO: 1389476 - DNA, 25 bp, Homo sapien
ccttggtcttcttcctcttcttggt

SEQ ID NO: 1389477 - DNA, 25 bp, Homo sapien
ggccttggtcttcttcctcttcttg

SEQ ID NO: 1389478 - DNA, 25 bp, Homo sapien
cttggtcttcttcctcttcttggtc

SEQ ID NO: 1389479 - DNA, 25 bp, Homo sapien
tggtcttcttcctcttcttggtcct

SEQ ID NO: 1389480 - DNA, 25 bp, Homo sapien
ataacatctatccagtgagtcctgc

SEQ ID NO: 1389481 - DNA, 25 bp, Homo sapien
aataacatctatccagtgagtcctg

SEQ ID NO: 1389482 - DNA, 25 bp, Homo sapien
taacatctatccagtgagtcctgca

SEQ ID NO: 1389483 - DNA, 25 bp, Homo sapien
gcatgatgggtcttggtcttcttcc

SEQ ID NO: 1389484 - DNA, 25 bp, Homo sapien
gggcatgatgggtcttggtcttctt

SEQ ID NO: 1389485 - DNA, 25 bp, Homo sapien
catgatgggtcttggtcttcttcca

SEQ ID NO: 1389486 - DNA, 25 bp, Homo sapien
gatgggtcttggtcttcttccactt

SEQ ID NO: 1389487 - DNA, 25 bp, Homo sapien
aataacatctatccagtgagtcctg

SEQ ID NO: 1389488 - DNA, 25 bp, Homo sapien
ataacatctatccagtgagtcctgc

SEQ ID NO: 1389489 - DNA, 25 bp, Homo sapien
taacatctatccagtgagtcctgca

SEQ ID NO: 1389490 - DNA, 25 bp, Homo sapien
gttgcctcttggtcctcctttttca

SEQ ID NO: 1389491 - DNA, 25 bp, Homo sapien
acctgttgcctcttggtcctccttt

SEQ ID NO: 1389492 - DNA, 25 bp, Homo sapien
tttttcacttgatcccaccgatgtc

SEQ ID NO: 1389493 - DNA, 25 bp, Homo sapien
ctgggacctgttgcctcttggtcct

SEQ ID NO: 1389494 - DNA, 25 bp, Homo sapien
cacacagaaacattcctctgtccaa

SEQ ID NO: 1389495 - DNA, 25 bp, Homo sapien
cacagaaacattcctctgtccaatc

SEQ ID NO: 1389496 - DNA, 25 bp, Homo sapien
gcaaataaattcagatggggcctct

SEQ ID NO: 1389497 - DNA, 25 bp, Homo sapien
gggcctcttacattaagcagttctt

SEQ ID NO: 1389498 - DNA, 25 bp, Homo sapien
gtacacaaatgagcaattttttccc

SEQ ID NO: 1389499 - DNA, 25 bp, Homo sapien
tacacaaatgagcaattttttcccc

SEQ ID NO: 1389500 - DNA, 25 bp, Homo sapien
acacaaatgagcaattttttcccca

SEQ ID NO: 1389501 - DNA, 25 bp, Homo sapien
atgtacacaaatgagcaattttttc

SEQ ID NO: 1389502 - DNA, 25 bp, Homo sapien
ggacagatgagctaaaacaagcgaa

SEQ ID NO: 1389503 - DNA, 25 bp, Homo sapien
gatgagctaaaacaagcgaacttag

SEQ ID NO: 1389504 - DNA, 25 bp, Homo sapien
cagatgagctaaaacaagcgaactt

SEQ ID NO: 1389505 - DNA, 25 bp, Homo sapien
gacagatgagctaaaacaagcgaac

SEQ ID NO: 1389506 - DNA, 25 bp, Homo sapien
gcaggtaaagaaccacacagacatg

SEQ ID NO: 1389507 - DNA, 25 bp, Homo sapien
tgggcaggtaaagaaccacacagac

SEQ ID NO: 1389508 - DNA, 25 bp, Homo sapien
gggcaggtaaagaaccacacagaca

SEQ ID NO: 1389509 - DNA, 25 bp, Homo sapien
cttgggcaggtaaagaaccacacag

SEQ ID NO: 1389510 - DNA, 25 bp, Homo sapien
gaaatctacattgatatataggttc

SEQ ID NO: 1389511 - DNA, 25 bp, Homo sapien
ctgggccatgaactggagctttatc

SEQ ID NO: 1389512 - DNA, 25 bp, Homo sapien
ctggagctttatcaccttcacaatg

SEQ ID NO: 1389513 - DNA, 25 bp, Homo sapien
aactggagctttatcaccttcacaa

SEQ ID NO: 1389514 - DNA, 25 bp, Homo sapien
ggagctttatcaccttcacaatgga

SEQ ID NO: 1389515 - DNA, 25 bp, Homo sapien
atgtgctgctgtaagactggtacga

SEQ ID NO: 1389516 - DNA, 25 bp, Homo sapien
gctgtaagactggtacgaggccaac

SEQ ID NO: 1389517 - DNA, 25 bp, Homo sapien
gcctatgtcaacagccatgcagact

SEQ ID NO: 1389518 - DNA, 25 bp, Homo sapien
gctgttcctctaatgagtgaaatgt

SEQ ID NO: 1389519 - DNA, 25 bp, Homo sapien
ttcaggaggaattgagagagtcgaa

SEQ ID NO: 1389520 - DNA, 25 bp, Homo sapien
caggaggaattgagagagtcgaata

SEQ ID NO: 1389521 - DNA, 25 bp, Homo sapien
ggaggaattgagagagtcgaataac

SEQ ID NO: 1389522 - DNA, 25 bp, Homo sapien
ctttcaggaggaattgagagagtcg

SEQ ID NO: 1389523 - DNA, 25 bp, Homo sapien
ctcctcttcagactcctgcagattc

SEQ ID NO: 1389524 - DNA, 25 bp, Homo sapien
caggactcctgggggacttcctcct

SEQ ID NO: 1389525 - DNA, 25 bp, Homo sapien
ttcatcccaggactcctgggggact

SEQ ID NO: 1389526 - DNA, 25 bp, Homo sapien
cctcctcttcagactcctgcagatt

SEQ ID NO: 1389527 - DNA, 25 bp, Homo sapien
ttcctcttcctcatcatcactttca

SEQ ID NO: 1389528 - DNA, 25 bp, Homo sapien
ctgggagacactggccctttttctt

SEQ ID NO: 1389529 - DNA, 25 bp, Homo sapien
tcttcctcatcatcactttcatttt

SEQ ID NO: 1389530 - DNA, 25 bp, Homo sapien
ctcttcctcatcatcactttcattt

SEQ ID NO: 1389531 - DNA, 25 bp, Homo sapien
ttgcctggggtcgagtaacttgata

SEQ ID NO: 1389532 - DNA, 25 bp, Homo sapien
tactgaatcgaagttaggaggcctg

SEQ ID NO: 1389533 - DNA, 25 bp, Homo sapien
tatgagattgtcacacttgcctggg

SEQ ID NO: 1389534 - DNA, 25 bp, Homo sapien
ctaaatcacagatgacaagagatac

SEQ ID NO: 1389535 - DNA, 25 bp, Homo sapien
tggctggttggagtcataagggcca

SEQ ID NO: 1389536 - DNA, 25 bp, Homo sapien
agccacctcaacttgaacatcttca

SEQ ID NO: 1389537 - DNA, 25 bp, Homo sapien
ctgggggaagacgatttctgcactt

SEQ ID NO: 1389538 - DNA, 25 bp, Homo sapien
tcttcatcgtcatcgttatcatttt

SEQ ID NO: 1389539 - DNA, 25 bp, Homo sapien
gggaagacgatttctgcactttctc

SEQ ID NO: 1389540 - DNA, 25 bp, Homo sapien
caactgtcattgtgaaagtatggag

SEQ ID NO: 1389541 - DNA, 25 bp, Homo sapien
catgggtttcccatctccgttctta

SEQ ID NO: 1389542 - DNA, 25 bp, Homo sapien
gaagtcctggtcatgtcatggccac

SEQ ID NO: 1389543 - DNA, 25 bp, Homo sapien
gttttgggtcatcagggcctatggc

SEQ ID NO: 1389544 - DNA, 25 bp, Homo sapien
gacaaggtgctgtgccagtctacac

SEQ ID NO: 1389545 - DNA, 25 bp, Homo sapien
ttcttggaggtcctgcccctgggac

SEQ ID NO: 1389546 - DNA, 25 bp, Homo sapien
ggacttgtccggctcatccggagtg

SEQ ID NO: 1389547 - DNA, 25 bp, Homo sapien
ctcattcaatgagcgggaggcatct

SEQ ID NO: 1389548 - DNA, 25 bp, Homo sapien
aaaatggtttacaggcttcctctgt

SEQ ID NO: 1389549 - DNA, 25 bp, Homo sapien
tagaaaatggtttacaggcttcctc

SEQ ID NO: 1389550 - DNA, 25 bp, Homo sapien
agaaaatggtttacaggcttcctct

SEQ ID NO: 1389551 - DNA, 25 bp, Homo sapien
gaaaatggtttacaggcttcctctg

SEQ ID NO: 1389552 - DNA, 25 bp, Homo sapien
gtacttcagagatttacacacctgc

SEQ ID NO: 1389553 - DNA, 25 bp, Homo sapien
acttcagagatttacacacctgccc

SEQ ID NO: 1389554 - DNA, 25 bp, Homo sapien
tggcccagcttagctcttacgtctc

SEQ ID NO: 1389555 - DNA, 25 bp, Homo sapien
cagcttagctcttacgtctccccac

SEQ ID NO: 1389556 - DNA, 25 bp, Homo sapien
tgaactgtcgctcattcctcagcat

SEQ ID NO: 1389557 - DNA, 25 bp, Homo sapien
gggtctagacagggatttccacgtc

SEQ ID NO: 1389558 - DNA, 25 bp, Homo sapien
cagggtctagacagggatttccacg

SEQ ID NO: 1389559 - DNA, 25 bp, Homo sapien
agggtctagacagggatttccacgt

SEQ ID NO: 1389560 - DNA, 25 bp, Homo sapien
ttgaagcccctcagagcgggtactg

SEQ ID NO: 1389561 - DNA, 25 bp, Homo sapien
gaggattcttgaaaacacgattgag

SEQ ID NO: 1389562 - DNA, 25 bp, Homo sapien
tatttgtctgcaggatcttatgtgg

SEQ ID NO: 1389563 - DNA, 25 bp, Homo sapien
caggacttcgttcatcactttcgtg

SEQ ID NO: 1389564 - DNA, 25 bp, Homo sapien
gctgcttggccaggaagcaggccac

SEQ ID NO: 1389565 - DNA, 25 bp, Homo sapien
cttggccaggaagcaggccacttga

SEQ ID NO: 1389566 - DNA, 25 bp, Homo sapien
ggaagcaggccacttgagttacaaa

SEQ ID NO: 1389567 - DNA, 25 bp, Homo sapien
aggccacttgagttacaaaacattt

SEQ ID NO: 1389568 - DNA, 25 bp, Homo sapien
gaggattctctgtctacaaccagag

SEQ ID NO: 1389569 - DNA, 25 bp, Homo sapien
atgagaggattctctgtctacaacc

SEQ ID NO: 1389570 - DNA, 25 bp, Homo sapien
gggcagatgattccagtactttctc

SEQ ID NO: 1389571 - DNA, 25 bp, Homo sapien
tcctcctcaacttgaacatcttcat

SEQ ID NO: 1389572 - DNA, 25 bp, Homo sapien
gatgattccagtactttctcatcct

SEQ ID NO: 1389573 - DNA, 25 bp, Homo sapien
ctgggggcagatgattccagtactt

SEQ ID NO: 1389574 - DNA, 25 bp, Homo sapien
ctcattcaatgagcgggaggcatct

SEQ ID NO: 1389575 - DNA, 25 bp, Homo sapien
gacaaggtgctgtgccagtctacac

SEQ ID NO: 1389576 - DNA, 25 bp, Homo sapien
ggacttgtccggctcatccggagtg

SEQ ID NO: 1389577 - DNA, 25 bp, Homo sapien
ttcttggaggtcctgcccctgggac

SEQ ID NO: 1389578 - DNA, 25 bp, Homo sapien
gtgaaaagcattgagtgatccgttc

SEQ ID NO: 1389579 - DNA, 25 bp, Homo sapien
aatttaacagtgaaaagcattgagt

SEQ ID NO: 1389580 - DNA, 25 bp, Homo sapien
tatttgtgtgtcatgagcctgccat

SEQ ID NO: 1389581 - DNA, 25 bp, Homo sapien
cagagatttctgagacaatgttctc

SEQ ID NO: 1389582 - DNA, 25 bp, Homo sapien
tgaactgtcgctcattcctcagcat

SEQ ID NO: 1389583 - DNA, 25 bp, Homo sapien
tcaggaaggcccctaggactatggg

SEQ ID NO: 1389584 - DNA, 25 bp, Homo sapien
cacaacgaagtggagtcagaactca

SEQ ID NO: 1389585 - DNA, 25 bp, Homo sapien
caagggcgcatcaaggaagttgaca

SEQ ID NO: 1389586 - DNA, 25 bp, Homo sapien
agggtctagacagggatttccacat

SEQ ID NO: 1389587 - DNA, 25 bp, Homo sapien
cagagctttgcctgttgggcctcaa

SEQ ID NO: 1389588 - DNA, 25 bp, Homo sapien
tgtctgcaggatcttatatggtaca

SEQ ID NO: 1389589 - DNA, 25 bp, Homo sapien
ctcttggagaaaacaggtcgttctg

SEQ ID NO: 1389590 - DNA, 25 bp, Homo sapien
tagtcctagacatttagaacaacag

SEQ ID NO: 1389591 - DNA, 25 bp, Homo sapien
gaagccggccagttgagttagaaaa

SEQ ID NO: 1389592 - DNA, 25 bp, Homo sapien
tcgctggaccaagggccggctgata

SEQ ID NO: 1389593 - DNA, 25 bp, Homo sapien
aactgggggcgcaatttctcgttga

SEQ ID NO: 1389594 - DNA, 25 bp, Homo sapien
tcttctgtcggttggccaggaagcc

SEQ ID NO: 1389595 - DNA, 25 bp, Homo sapien
gctgacgtttgtggcagaagaggtg

SEQ ID NO: 1389596 - DNA, 25 bp, Homo sapien
gtggcagaagaggtggagtcaggga

SEQ ID NO: 1389597 - DNA, 25 bp, Homo sapien
tgacgtttgtggcagaagaggtgga

SEQ ID NO: 1389598 - DNA, 25 bp, Homo sapien
tttgtggcagaagaggtggagtcag

SEQ ID NO: 1389599 - DNA, 25 bp, Homo sapien
agctgaaagcactgctcagactctg

SEQ ID NO: 1389600 - DNA, 25 bp, Homo sapien
ctgaaagcactgctcagactctgat

SEQ ID NO: 1389601 - DNA, 25 bp, Homo sapien
tgaaagcactgctcagactctgata

SEQ ID NO: 1389602 - DNA, 25 bp, Homo sapien
gctgaaagcactgctcagactctga

SEQ ID NO: 1389603 - DNA, 25 bp, Homo sapien
taactactgtgcataagtaactatg

SEQ ID NO: 1389604 - DNA, 25 bp, Homo sapien
ttctgatgggagacaggtttacttg

SEQ ID NO: 1389605 - DNA, 25 bp, Homo sapien
gttgctctacattcccacacactta

SEQ ID NO: 1389606 - DNA, 25 bp, Homo sapien
tatctatagctagggatggagttgc

SEQ ID NO: 1389607 - DNA, 25 bp, Homo sapien
gagcgagggctactgcacagctagc

SEQ ID NO: 1389608 - DNA, 25 bp, Homo sapien
ggagcgagggctactgcacagctag

SEQ ID NO: 1389609 - DNA, 25 bp, Homo sapien
atctacagcctcgtggcggacggga

SEQ ID NO: 1389610 - DNA, 25 bp, Homo sapien
ggccaggtggacacctccatctaca

SEQ ID NO: 1389611 - DNA, 25 bp, Homo sapien
tccatctacagcctcgtggcggacg

SEQ ID NO: 1389612 - DNA, 25 bp, Homo sapien
gcagcgaccagaggagcccctgcag

SEQ ID NO: 1389613 - DNA, 25 bp, Homo sapien
gacacggccattgtgggcaacaagg

SEQ ID NO: 1389614 - DNA, 25 bp, Homo sapien
ggccattgtgggcaacaaggaccca

SEQ ID NO: 1389615 - DNA, 25 bp, Homo sapien
ctgttaggacacggccattgtgggc

SEQ ID NO: 1389616 - DNA, 25 bp, Homo sapien
taggacacggccattgtgggcaaca

SEQ ID NO: 1389617 - DNA, 25 bp, Homo sapien
ccagggaaaaccttcctcaacatca

SEQ ID NO: 1389618 - DNA, 25 bp, Homo sapien
ttcctcaacatcacgccagctgagg

SEQ ID NO: 1389619 - DNA, 25 bp, Homo sapien
tcctcaacatcacgccagctgaggt

SEQ ID NO: 1389620 - DNA, 25 bp, Homo sapien
gggaaaaccttcctcaacatcacgc

SEQ ID NO: 1389621 - DNA, 25 bp, Homo sapien
gaccacggatctttgtatgaagagc

SEQ ID NO: 1389622 - DNA, 25 bp, Homo sapien
ttgaccacggatctttgtatgaaga

SEQ ID NO: 1389623 - DNA, 25 bp, Homo sapien
accacggatctttgtatgaagagca

SEQ ID NO: 1389624 - DNA, 25 bp, Homo sapien
ccacggatctttgtatgaagagcat

SEQ ID NO: 1389625 - DNA, 25 bp, Homo sapien
caaggagccactgtcacttcaggtc

SEQ ID NO: 1389626 - DNA, 25 bp, Homo sapien
tgtacccctttgcagttcatcagcc

SEQ ID NO: 1389627 - DNA, 25 bp, Homo sapien
tcatgagcatccatacgtagcaggc

SEQ ID NO: 1389628 - DNA, 25 bp, Homo sapien
taaagcatgacgaaataacgaaggc

SEQ ID NO: 1389629 - DNA, 25 bp, Homo sapien
gttgcactgattgatctccctgatg

SEQ ID NO: 1389630 - DNA, 25 bp, Homo sapien
tcctatgctaattgaccattcatgt

SEQ ID NO: 1389631 - DNA, 25 bp, Homo sapien
tctcattgttgcactgattgatctc

SEQ ID NO: 1389632 - DNA, 25 bp, Homo sapien
gactaaacagtggagcatcttttcc

SEQ ID NO: 1389633 - DNA, 25 bp, Homo sapien
tgtatgaccacgtaatcatacgagt

SEQ ID NO: 1389634 - DNA, 25 bp, Homo sapien
tgaccacgtaatcatacgagttttc

SEQ ID NO: 1389635 - DNA, 25 bp, Homo sapien
cacgtaatcatacgagttttctctt

SEQ ID NO: 1389636 - DNA, 25 bp, Homo sapien
tgtgtatgaccacgtaatcatacga

SEQ ID NO: 1389637 - DNA, 25 bp, Homo sapien
tcaaggaaatccctcccgccttgtc

SEQ ID NO: 1389638 - DNA, 25 bp, Homo sapien
caaggaaatccctcccgccttgtct

SEQ ID NO: 1389639 - DNA, 25 bp, Homo sapien
cagggagggcaaatccatgcagcat

SEQ ID NO: 1389640 - DNA, 25 bp, Homo sapien
ccctgttgttctgacagcagggagg

SEQ ID NO: 1389641 - DNA, 25 bp, Homo sapien
gggcaaatccatgcagcatctcccg

SEQ ID NO: 1389642 - DNA, 25 bp, Homo sapien
aaccctgttgttctgacagcaggga

SEQ ID NO: 1389643 - DNA, 25 bp, Homo sapien
gcccacattgctaaacctaactaga

SEQ ID NO: 1389644 - DNA, 25 bp, Homo sapien
cacattgctaaacctaactagaagt

SEQ ID NO: 1389645 - DNA, 25 bp, Homo sapien
acattgctaaacctaactagaagtg

SEQ ID NO: 1389646 - DNA, 25 bp, Homo sapien
ccacattgctaaacctaactagaag

SEQ ID NO: 1389647 - DNA, 25 bp, Homo sapien
caacaatctccaatgaattgtgggc

SEQ ID NO: 1389648 - DNA, 25 bp, Homo sapien
ttcttcaccacaacaatctccaatg

SEQ ID NO: 1389649 - DNA, 25 bp, Homo sapien
acagaaggcagacccatccctgctt

SEQ ID NO: 1389650 - DNA, 25 bp, Homo sapien
ccaatgaattgtgggcacagaaggc

SEQ ID NO: 1389651 - DNA, 25 bp, Homo sapien
tgtatcctaaggcatcctgttgaaa

SEQ ID NO: 1389652 - DNA, 25 bp, Homo sapien
ctaaggcatcctgttgaaaaacctt

SEQ ID NO: 1389653 - DNA, 25 bp, Homo sapien
atcctaaggcatcctgttgaaaaac

SEQ ID NO: 1389654 - DNA, 25 bp, Homo sapien
ttttggaagcatgtatcctaaggca

SEQ ID NO: 1389655 - DNA, 25 bp, Homo sapien
tcagataagacactcttgggttgct

SEQ ID NO: 1389656 - DNA, 25 bp, Homo sapien
taagacactcttgggttgctgcact

SEQ ID NO: 1389657 - DNA, 25 bp, Homo sapien
gacactcttgggttgctgcactcac

SEQ ID NO: 1389658 - DNA, 25 bp, Homo sapien
agataagacactcttgggttgctgc

SEQ ID NO: 1389659 - DNA, 25 bp, Homo sapien
gaccatctgtttcatggccacctgt

SEQ ID NO: 1389660 - DNA, 25 bp, Homo sapien
tatgaccatctgtttcatggccacc

SEQ ID NO: 1389661 - DNA, 25 bp, Homo sapien
acaattctatgaccatctgtttcat

SEQ ID NO: 1389662 - DNA, 25 bp, Homo sapien
ctgaaacaattctatgaccatctgt

SEQ ID NO: 1389663 - DNA, 25 bp, Homo sapien
actcagctaagcatatgggctagat

SEQ ID NO: 1389664 - DNA, 25 bp, Homo sapien
gaatgcccataaaattattatctaa

SEQ ID NO: 1389665 - DNA, 25 bp, Homo sapien
tgttgaacaagggacatcatcattt

SEQ ID NO: 1389666 - DNA, 25 bp, Homo sapien
aaatttaagcctaatgcaataaaga

SEQ ID NO: 1389667 - DNA, 25 bp, Homo sapien
ttgatccataggctcacatttgatc

SEQ ID NO: 1389668 - DNA, 25 bp, Homo sapien
tccataggctcacatttgatcccaa

SEQ ID NO: 1389669 - DNA, 25 bp, Homo sapien
cataggctcacatttgatcccaact

SEQ ID NO: 1389670 - DNA, 25 bp, Homo sapien
aggctcacatttgatcccaactggc

SEQ ID NO: 1389671 - DNA, 25 bp, Homo sapien
cctgagagaagctcatactggtcac

SEQ ID NO: 1389672 - DNA, 25 bp, Homo sapien
ggattctttacatgattaaactcct

SEQ ID NO: 1389673 - DNA, 25 bp, Homo sapien
ctttacatgattaaactccttcctg

SEQ ID NO: 1389674 - DNA, 25 bp, Homo sapien
tacatgattaaactccttcctgaat

SEQ ID NO: 1389675 - DNA, 25 bp, Homo sapien
tgtcaaggatctgcacttaatggac

SEQ ID NO: 1389676 - DNA, 25 bp, Homo sapien
ttaatggacactctcggaagcctca

SEQ ID NO: 1389677 - DNA, 25 bp, Homo sapien
tttgagtgcaataggagccatacgc

SEQ ID NO: 1389678 - DNA, 25 bp, Homo sapien
gttcagtttcacaggtcgacagagg

SEQ ID NO: 1389679 - DNA, 25 bp, Homo sapien
acagccagcccattcccggatttta

SEQ ID NO: 1389680 - DNA, 25 bp, Homo sapien
gcctctggagtcagagtagactgtc

SEQ ID NO: 1389681 - DNA, 25 bp, Homo sapien
gagtagactgtctccccgctgacag

SEQ ID NO: 1389682 - DNA, 25 bp, Homo sapien
tggttgaaagatgaaacagacaggt

SEQ ID NO: 1389683 - DNA, 25 bp, Homo sapien
gtggctgttccagagcccttgccac

SEQ ID NO: 1389684 - DNA, 25 bp, Homo sapien
tatgtggctgttccagagcccttgc

SEQ ID NO: 1389685 - DNA, 25 bp, Homo sapien
tgtggctgttccagagcccttgcca

SEQ ID NO: 1389686 - DNA, 25 bp, Homo sapien
ttatgtggctgttccagagcccttg

SEQ ID NO: 1389687 - DNA, 25 bp, Homo sapien
caatgaggggtatttcaggcacttg

SEQ ID NO: 1389688 - DNA, 25 bp, Homo sapien
agaagacaatgaggggtatttcagg

SEQ ID NO: 1389689 - DNA, 25 bp, Homo sapien
aagaagacaatgaggggtatttcag

SEQ ID NO: 1389690 - DNA, 25 bp, Homo sapien
agacaatgaggggtatttcaggcac

SEQ ID NO: 1389691 - DNA, 25 bp, Homo sapien
ttcccatgaggctgtatttcagact

SEQ ID NO: 1389692 - DNA, 25 bp, Homo sapien
tggaatatacaatcgggctttacac

SEQ ID NO: 1389693 - DNA, 25 bp, Homo sapien
ctttcccttcccatgaggctgtatt

SEQ ID NO: 1389694 - DNA, 25 bp, Homo sapien
ggaatatacaatcgggctttacacc

SEQ ID NO: 1389695 - DNA, 25 bp, Homo sapien
ttttccccacagttcaggtcaggcc

SEQ ID NO: 1389696 - DNA, 25 bp, Homo sapien
tgtgctcaccagacaaggtttggta

SEQ ID NO: 1389697 - DNA, 25 bp, Homo sapien
gaaaaccatccctagaatgcaatct

SEQ ID NO: 1389698 - DNA, 25 bp, Homo sapien
taacaaataccagtcaccagcacag

SEQ ID NO: 1389699 - DNA, 25 bp, Homo sapien
caaggagagccataaacaggactac

SEQ ID NO: 1389700 - DNA, 25 bp, Homo sapien
aaatgactacaaacaggttcaaggg

SEQ ID NO: 1389701 - DNA, 25 bp, Homo sapien
caattcgataaatcaacttacatca

SEQ ID NO: 1389702 - DNA, 25 bp, Homo sapien
ctacaaacaggttcaagggaatttg

SEQ ID NO: 1389703 - DNA, 25 bp, Homo sapien
atggctgcacaattcgataaatcaa

SEQ ID NO: 1389704 - DNA, 25 bp, Homo sapien
atcaccataaacctatcagaatggc

SEQ ID NO: 1389705 - DNA, 25 bp, Homo sapien
gaaatcaaaagtgtagtcactttgg

SEQ ID NO: 1389706 - DNA, 25 bp, Homo sapien
acaaccagaactctccatagctagt

SEQ ID NO: 1389707 - DNA, 25 bp, Homo sapien
tcaggaacaaccagaactctccata

SEQ ID NO: 1389708 - DNA, 25 bp, Homo sapien
gtacttggcattgaagtgcaccaac

SEQ ID NO: 1389709 - DNA, 25 bp, Homo sapien
agtacttggcattgaagtgcaccaa

SEQ ID NO: 1389710 - DNA, 25 bp, Homo sapien
ttagtacttggcattgaagtgcacc

SEQ ID NO: 1389711 - DNA, 25 bp, Homo sapien
tagtacttggcattgaagtgcacca

SEQ ID NO: 1389712 - DNA, 25 bp, Homo sapien
atgcctatgccatttacctctaacc

SEQ ID NO: 1389713 - DNA, 25 bp, Homo sapien
ggagatttcaatgcctatgccattt

SEQ ID NO: 1389714 - DNA, 25 bp, Homo sapien
agcagttggagatttcaatgcctat

SEQ ID NO: 1389715 - DNA, 25 bp, Homo sapien
gttggagatttcaatgcctatgcca

SEQ ID NO: 1389716 - DNA, 25 bp, Homo sapien
taatatctgtttgatgccaggcaag

SEQ ID NO: 1389717 - DNA, 25 bp, Homo sapien
caaggccctgtgatgtttagggccc

SEQ ID NO: 1389718 - DNA, 25 bp, Homo sapien
gcggcacacgctgtgaatatttgtt

SEQ ID NO: 1389719 - DNA, 25 bp, Homo sapien
actgcaagtccagggcggcacacgc

SEQ ID NO: 1389720 - DNA, 25 bp, Homo sapien
cataatagaaagaggactctctgac

SEQ ID NO: 1389721 - DNA, 25 bp, Homo sapien
tcataatagaaagaggactctctga

SEQ ID NO: 1389722 - DNA, 25 bp, Homo sapien
ccatcgagctggcaatgcctcagga

SEQ ID NO: 1389723 - DNA, 25 bp, Homo sapien
catcgagctggcaatgcctcaggat

SEQ ID NO: 1389724 - DNA, 25 bp, Homo sapien
gctggcaatgcctcaggatttttac

SEQ ID NO: 1389725 - DNA, 25 bp, Homo sapien
cgagctggcaatgcctcaggatttt

SEQ ID NO: 1389726 - DNA, 25 bp, Homo sapien
aatgggtaagtttctacatcggtgc

SEQ ID NO: 1389727 - DNA, 25 bp, Homo sapien
tgggtaagtttctacatcggtgcct

SEQ ID NO: 1389728 - DNA, 25 bp, Homo sapien
actgaatgggtaagtttctacatcg

SEQ ID NO: 1389729 - DNA, 25 bp, Homo sapien
gtaagtttctacatcggtgcctcgg

SEQ ID NO: 1389730 - DNA, 25 bp, Homo sapien
ctcaggagaatgataagggacaatc

SEQ ID NO: 1389731 - DNA, 25 bp, Homo sapien
gaatgataagggacaatctgctcat

SEQ ID NO: 1389732 - DNA, 25 bp, Homo sapien
tcctcaggagaatgataagggacaa

SEQ ID NO: 1389733 - DNA, 25 bp, Homo sapien
taagggacaatctgctcatgagagc

SEQ ID NO: 1389734 - DNA, 25 bp, Homo sapien
caaaatctctaatttccaggagctt

SEQ ID NO: 1389735 - DNA, 25 bp, Homo sapien
tgccaaggtgtgacaatcaactgag

SEQ ID NO: 1389736 - DNA, 25 bp, Homo sapien
aagtgtttgaaactagtctgggcac

SEQ ID NO: 1389737 - DNA, 25 bp, Homo sapien
tgtttcatgccaggcgaggtcaagt

SEQ ID NO: 1389738 - DNA, 25 bp, Homo sapien
tagaaaggatgcatatccagaataa

SEQ ID NO: 1389739 - DNA, 25 bp, Homo sapien
cctagaaaggatgcatatccagaat

SEQ ID NO: 1389740 - DNA, 25 bp, Homo sapien
tcctagaaaggatgcatatccagaa

SEQ ID NO: 1389741 - DNA, 25 bp, Homo sapien
tatcctagaaaggatgcatatccag

SEQ ID NO: 1389742 - DNA, 25 bp, Homo sapien
aggccttccgagaggaacctctatg

SEQ ID NO: 1389743 - DNA, 25 bp, Homo sapien
caggtacacggtcctcttctcgcac

SEQ ID NO: 1389744 - DNA, 25 bp, Homo sapien
gtctcctgcatgtatgttcgctgcg

SEQ ID NO: 1389745 - DNA, 25 bp, Homo sapien
ttccagtacagccagcgcgagctgg

SEQ ID NO: 1389746 - DNA, 25 bp, Homo sapien
agggcgaccctgggggcagctcagc

SEQ ID NO: 1389747 - DNA, 25 bp, Homo sapien
tgagggcgaccctgggggcagctca

SEQ ID NO: 1389748 - DNA, 25 bp, Homo sapien
ggtgagggcgaccctgggggcagct

SEQ ID NO: 1389749 - DNA, 25 bp, Homo sapien
ctgcgcaccaggtgagggcgaccct

SEQ ID NO: 1389750 - DNA, 25 bp, Homo sapien
gggtggtggtctgggggtctgtgca

SEQ ID NO: 1389751 - DNA, 25 bp, Homo sapien
ctggcgggagggagtgggtggtggt

SEQ ID NO: 1389752 - DNA, 25 bp, Homo sapien
gcgggagggagtgggtggtggtctg

SEQ ID NO: 1389753 - DNA, 25 bp, Homo sapien
gagtgggtggtggtctgggggtctg

SEQ ID NO: 1389754 - DNA, 25 bp, Homo sapien
atccaggtccggaggactggcccat

SEQ ID NO: 1389755 - DNA, 25 bp, Homo sapien
gctgctgcatccaggtccggaggac

SEQ ID NO: 1389756 - DNA, 25 bp, Homo sapien
cacttggggccaagtgaggcgaggc

SEQ ID NO: 1389757 - DNA, 25 bp, Homo sapien
ctgcatccaggtccggaggactggc

SEQ ID NO: 1389758 - DNA, 25 bp, Homo sapien
gttcgtttgagtggtgacatccagg

SEQ ID NO: 1389759 - DNA, 25 bp, Homo sapien
ttcgtttgagtggtgacatccaggt

SEQ ID NO: 1389760 - DNA, 25 bp, Homo sapien
tggggccacaggcaccagccaggca

SEQ ID NO: 1389761 - DNA, 25 bp, Homo sapien
catggctgccagggagcaggccggg

SEQ ID NO: 1389762 - DNA, 25 bp, Homo sapien
ggctgccagggagcaggccggggag

SEQ ID NO: 1389763 - DNA, 25 bp, Homo sapien
gccacaggcaccagccaggcagcat

SEQ ID NO: 1389764 - DNA, 25 bp, Homo sapien
tgccttgcaagagggcgtctgcctg

SEQ ID NO: 1389765 - DNA, 25 bp, Homo sapien
ggccttgtaactggtgctggatcag

SEQ ID NO: 1389766 - DNA, 25 bp, Homo sapien
tcctgccttgcaagagggcgtctgc

SEQ ID NO: 1389767 - DNA, 25 bp, Homo sapien
catgctcctgccttgcaagagggcg

SEQ ID NO: 1389768 - DNA, 25 bp, Homo sapien
tgaggtggccgaggacttgtccact

SEQ ID NO: 1389769 - DNA, 25 bp, Homo sapien
gccgaggacttgtccactcccaagg

SEQ ID NO: 1389770 - DNA, 25 bp, Homo sapien
aggtggccgaggacttgtccactcc

SEQ ID NO: 1389771 - DNA, 25 bp, Homo sapien
tggccgaggacttgtccactcccaa

SEQ ID NO: 1389772 - DNA, 25 bp, Homo sapien
gaaggtatgaagcattcaggatgtg

SEQ ID NO: 1389773 - DNA, 25 bp, Homo sapien
ggaggaagagtgtccgctgtcctgg

SEQ ID NO: 1389774 - DNA, 25 bp, Homo sapien
aagagtgtccgctgtcctggccagt

SEQ ID NO: 1389775 - DNA, 25 bp, Homo sapien
gcaggaaggtatgaagcattcagga

SEQ ID NO: 1389776 - DNA, 25 bp, Homo sapien
ctggtgtggagcctgagcctgaccc

SEQ ID NO: 1389777 - DNA, 25 bp, Homo sapien
tcgggactggtgtggagcctgagcc

SEQ ID NO: 1389778 - DNA, 25 bp, Homo sapien
ggtggccctcgggactggtgtggag

SEQ ID NO: 1389779 - DNA, 25 bp, Homo sapien
ccctcgggactggtgtggagcctga

SEQ ID NO: 1389780 - DNA, 25 bp, Homo sapien
tgcttcgacgccttccctaacatcg

SEQ ID NO: 1389781 - DNA, 25 bp, Homo sapien
agactggagggtcgcatccggagct

SEQ ID NO: 1389782 - DNA, 25 bp, Homo sapien
cctaacatcgagaaggtgtccaaga

SEQ ID NO: 1389783 - DNA, 25 bp, Homo sapien
tcacctcgggcatgcgcgtcgcctt

SEQ ID NO: 1389784 - DNA, 25 bp, Homo sapien
gggtaactggaatattccctgctaa

SEQ ID NO: 1389785 - DNA, 25 bp, Homo sapien
atatagctctaaaaccaacaatgcc

SEQ ID NO: 1389786 - DNA, 25 bp, Homo sapien
tactgcacctctacgagaataacaa

SEQ ID NO: 1389787 - DNA, 25 bp, Homo sapien
caggaaaatggaagttgaaaccgca

SEQ ID NO: 1389788 - DNA, 25 bp, Homo sapien
tattaatgcataacagctcagaaca

SEQ ID NO: 1389789 - DNA, 25 bp, Homo sapien
agatcacctgcacgtttaaaattgt

SEQ ID NO: 1389790 - DNA, 25 bp, Homo sapien
ttaaagctagcattttagaatagaa

SEQ ID NO: 1389791 - DNA, 25 bp, Homo sapien
acgcccagatcacctgcacgtttaa

SEQ ID NO: 1389792 - DNA, 25 bp, Homo sapien
gaggaaagcgaggaaaccattcctc

SEQ ID NO: 1389793 - DNA, 25 bp, Homo sapien
tcgcttggttaactcttgggtgaaa

SEQ ID NO: 1389794 - DNA, 25 bp, Homo sapien
tgcagtgacaagatatctccgctca

SEQ ID NO: 1389795 - DNA, 25 bp, Homo sapien
cagctccaccagcaaaaggtaggag

SEQ ID NO: 1389796 - DNA, 25 bp, Homo sapien
cgcccggcctggcgcggcgccctca

SEQ ID NO: 1389797 - DNA, 25 bp, Homo sapien
cccgcccggcctggcgcggcgccct

SEQ ID NO: 1389798 - DNA, 25 bp, Homo sapien
ctcccgcccggcctggcgcggcgcc

SEQ ID NO: 1389799 - DNA, 25 bp, Homo sapien
gcccggcctggcgcggcgccctcac

SEQ ID NO: 1389800 - DNA, 25 bp, Homo sapien
ctgggtggacttcgcagtaaacttg

SEQ ID NO: 1389801 - DNA, 25 bp, Homo sapien
gggtggacttcgcagtaaacttgaa

SEQ ID NO: 1389802 - DNA, 25 bp, Homo sapien
tggacttcgcagtaaacttgaactt

SEQ ID NO: 1389803 - DNA, 25 bp, Homo sapien
ggtggacttcgcagtaaacttgaac

SEQ ID NO: 1389804 - DNA, 25 bp, Homo sapien
tgaaccgcccctgccaggttaaaga

SEQ ID NO: 1389805 - DNA, 25 bp, Homo sapien
gcccttgaccctgcaattcgctgat

SEQ ID NO: 1389806 - DNA, 25 bp, Homo sapien
tgcctctaccgcacagcgggttcgg

SEQ ID NO: 1389807 - DNA, 25 bp, Homo sapien
gctacccagcgtttaggactgcagg

SEQ ID NO: 1389808 - DNA, 25 bp, Homo sapien
gagactccaaagacgcatctgagga

SEQ ID NO: 1389809 - DNA, 25 bp, Homo sapien
gattcttggactttactagagactc

SEQ ID NO: 1389810 - DNA, 25 bp, Homo sapien
gacacaaaagttggatgacagtcgt

SEQ ID NO: 1389811 - DNA, 25 bp, Homo sapien
gatgactgtgccactcgacatagcc

SEQ ID NO: 1389812 - DNA, 25 bp, Homo sapien
caaggaaatgagcaacctgtggcgg

SEQ ID NO: 1389813 - DNA, 25 bp, Homo sapien
ccaggatagaagagccgcagtaggc

SEQ ID NO: 1389814 - DNA, 25 bp, Homo sapien
aaataacagatgtcaattactgagc

SEQ ID NO: 1389815 - DNA, 25 bp, Homo sapien
agcgagattcggtccccaaagagaa

SEQ ID NO: 1389816 - DNA, 25 bp, Homo sapien
taatgcctccggttctatgaggagc

SEQ ID NO: 1389817 - DNA, 25 bp, Homo sapien
gatgagcggacggaagattcacacc

SEQ ID NO: 1389818 - DNA, 25 bp, Homo sapien
gattcacaccgaagtggtcgagcgc

SEQ ID NO: 1389819 - DNA, 25 bp, Homo sapien
tagtttcccttgagacgctgcaaag

SEQ ID NO: 1389820 - DNA, 25 bp, Homo sapien
cggaagggtctctagcggcgatatc

SEQ ID NO: 1389821 - DNA, 25 bp, Homo sapien
ttttcctgctagtgtctgaccgcca

SEQ ID NO: 1389822 - DNA, 25 bp, Homo sapien
gcagctctggctataaccggtaggg

SEQ ID NO: 1389823 - DNA, 25 bp, Homo sapien
gagcttcagtcggaacaacaaggaa

SEQ ID NO: 1389824 - DNA, 25 bp, Homo sapien
cgcagacaagcgccccgcgtgtagg

SEQ ID NO: 1389825 - DNA, 25 bp, Homo sapien
gagctcccttcttgaccacggtctg

SEQ ID NO: 1389826 - DNA, 25 bp, Homo sapien
aagcgccccgcgtgtagggaaatcg

SEQ ID NO: 1389827 - DNA, 25 bp, Homo sapien
agctcccttcttgaccacggtctgt

SEQ ID NO: 1389828 - DNA, 25 bp, Homo sapien
tgggcttcttgggtacacctccagg

SEQ ID NO: 1389829 - DNA, 25 bp, Homo sapien
taaagccccttctgcgaatggtgga

SEQ ID NO: 1389830 - DNA, 25 bp, Homo sapien
taaagaaagattactgcgggtgggc

SEQ ID NO: 1389831 - DNA, 25 bp, Homo sapien
cagtcaataaatgggcggtcctgga

SEQ ID NO: 1389832 - DNA, 25 bp, Homo sapien
cccgggatgcggtggtgaaaggact

SEQ ID NO: 1389833 - DNA, 25 bp, Homo sapien
aatcgaacccgggatgcggtggtga

SEQ ID NO: 1389834 - DNA, 25 bp, Homo sapien
tgaccggtaatcgaacccgggatgc

SEQ ID NO: 1389835 - DNA, 25 bp, Homo sapien
gtggtgaaaggactgaatcacagcc

SEQ ID NO: 1389836 - DNA, 25 bp, Homo sapien
tcgctggtcgctcctggagtcgtct

SEQ ID NO: 1389837 - DNA, 25 bp, Homo sapien
taagtgactgtttctgagtgcgctg

SEQ ID NO: 1389838 - DNA, 25 bp, Homo sapien
gggcacgggagagtctttctcaacc

SEQ ID NO: 1389839 - DNA, 25 bp, Homo sapien
tctgagtgcgctgggaggacttggg

SEQ ID NO: 1389840 - DNA, 25 bp, Homo sapien
gattcccgagtcctggagcgagttg

SEQ ID NO: 1389841 - DNA, 25 bp, Homo sapien
gaccactgacctagagatgtgcctt

SEQ ID NO: 1389842 - DNA, 25 bp, Homo sapien
cctttgcgaagtggcagcgcatgga

SEQ ID NO: 1389843 - DNA, 25 bp, Homo sapien
tggcagcgcatggagaaacagtagc

SEQ ID NO: 1389844 - DNA, 25 bp, Homo sapien
cttaaacaataagaactggctggat

SEQ ID NO: 1389845 - DNA, 25 bp, Homo sapien
gaaatgagactttacggtcagagac

SEQ ID NO: 1389846 - DNA, 25 bp, Homo sapien
cacccgttctcaggtgggccatgtg

SEQ ID NO: 1389847 - DNA, 25 bp, Homo sapien
gtgatctccttcgtcagtctcccgg

SEQ ID NO: 1389848 - DNA, 25 bp, Homo sapien
tgcaattagataagagaaatcagtg

SEQ ID NO: 1389849 - DNA, 25 bp, Homo sapien
ctactaacatcagaagcaagagata

SEQ ID NO: 1389850 - DNA, 25 bp, Homo sapien
gctgttagagatattagccagtgca

SEQ ID NO: 1389851 - DNA, 25 bp, Homo sapien
caaccacctcgtgtacatgtcatca

SEQ ID NO: 1389852 - DNA, 25 bp, Homo sapien
gtaagagtagcacctgattgggcac

SEQ ID NO: 1389853 - DNA, 25 bp, Homo sapien
tgttagaagagccagacagaaccta

SEQ ID NO: 1389854 - DNA, 25 bp, Homo sapien
agattgactggtccgaagacaccca

SEQ ID NO: 1389855 - DNA, 25 bp, Homo sapien
tagctaccgctgttatcccaatggg

SEQ ID NO: 1389856 - DNA, 25 bp, Homo sapien
gcaacatgatggattccatcgccag

SEQ ID NO: 1389857 - DNA, 25 bp, Homo sapien
aacatgatggattccatcgccagca

SEQ ID NO: 1389858 - DNA, 25 bp, Homo sapien
atgatggattccatcgccagcagcc

SEQ ID NO: 1389859 - DNA, 25 bp, Homo sapien
tcagcaacatgatggattccatcgc

SEQ ID NO: 1389860 - DNA, 25 bp, Homo sapien
gtacttctgtttggcgaaactttca

SEQ ID NO: 1389861 - DNA, 25 bp, Homo sapien
aactttcaagcacgcagagcaacgt

SEQ ID NO: 1389862 - DNA, 25 bp, Homo sapien
tggcgaaactttcaagcacgcagag

SEQ ID NO: 1389863 - DNA, 25 bp, Homo sapien
tctgtttggcgaaactttcaagcac

SEQ ID NO: 1389864 - DNA, 25 bp, Homo sapien
agaggagctgcgcagcatcctggag

SEQ ID NO: 1389865 - DNA, 25 bp, Homo sapien
ctgatagatagtgcagagaggagct

SEQ ID NO: 1389866 - DNA, 25 bp, Homo sapien
aaagtcacggatgttgtggcccgaa

SEQ ID NO: 1389867 - DNA, 25 bp, Homo sapien
catcctggagccgaaagttacaagg

SEQ ID NO: 1389868 - DNA, 25 bp, Homo sapien
gcagcagtggctagaatgccccaca

SEQ ID NO: 1389869 - DNA, 25 bp, Homo sapien
gactgttgacctacaacagcattgc

SEQ ID NO: 1389870 - DNA, 25 bp, Homo sapien
ctgcagagcttaatcagggccatat

SEQ ID NO: 1389871 - DNA, 25 bp, Homo sapien
cacacttaacaacttccgggacaca

SEQ ID NO: 1389872 - DNA, 25 bp, Homo sapien
attcaagattacagtgtgctatggc

SEQ ID NO: 1389873 - DNA, 25 bp, Homo sapien
tgccagtagtccagaaattcaagat

SEQ ID NO: 1389874 - DNA, 25 bp, Homo sapien
ggtggtgtatgccagtagtccagaa

SEQ ID NO: 1389875 - DNA, 25 bp, Homo sapien
tcaagattacagtgtgctatggcac

SEQ ID NO: 1389876 - DNA, 25 bp, Homo sapien
ggctgcatgcagtctagggttctcc

SEQ ID NO: 1389877 - DNA, 25 bp, Homo sapien
tgtgcatggctgcatgcagtctagg

SEQ ID NO: 1389878 - DNA, 25 bp, Homo sapien
gcagtctagggttctccaccaacag

SEQ ID NO: 1389879 - DNA, 25 bp, Homo sapien
tcatgtgcatggctgcatgcagtct

SEQ ID NO: 1389880 - DNA, 25 bp, Homo sapien
ttaccttcaagaagtccacagaagc

SEQ ID NO: 1389881 - DNA, 25 bp, Homo sapien
gcaatctcttaccctcaacaaattt

SEQ ID NO: 1389882 - DNA, 25 bp, Homo sapien
taccttcaagaagtccacagaagca

SEQ ID NO: 1389883 - DNA, 25 bp, Homo sapien
caagaagtccacagaagcaatctgc

SEQ ID NO: 1389884 - DNA, 25 bp, Homo sapien
gccctgctacaatccagatttccaa

SEQ ID NO: 1389885 - DNA, 25 bp, Homo sapien
aatgccctgctacaatccagatttc

SEQ ID NO: 1389886 - DNA, 25 bp, Homo sapien
atgccctgctacaatccagatttcc

SEQ ID NO: 1389887 - DNA, 25 bp, Homo sapien
cctgctacaatccagatttccaaaa

SEQ ID NO: 1389888 - DNA, 25 bp, Homo sapien
ttgccatacacctggactgaaaggg

SEQ ID NO: 1389889 - DNA, 25 bp, Homo sapien
ttcatactgtttaaggaggcattcc

SEQ ID NO: 1389890 - DNA, 25 bp, Homo sapien
gatgagtaagtccatgccccttgat

SEQ ID NO: 1389891 - DNA, 25 bp, Homo sapien
ctctccagtagtgggaagggcatgc

SEQ ID NO: 1389892 - DNA, 25 bp, Homo sapien
ggacgagcatccgaaacagacagct

SEQ ID NO: 1389893 - DNA, 25 bp, Homo sapien
tctgactcctgtcttcgccatgcta

SEQ ID NO: 1389894 - DNA, 25 bp, Homo sapien
acagacagctgacatgctttaggca

SEQ ID NO: 1389895 - DNA, 25 bp, Homo sapien
tacacgtggtaggacgagcatccga

SEQ ID NO: 1389896 - DNA, 25 bp, Homo sapien
tgttctagagctaacacacatagga

SEQ ID NO: 1389897 - DNA, 25 bp, Homo sapien
tctcacaacattttgcctatgaggc

SEQ ID NO: 1389898 - DNA, 25 bp, Homo sapien
gtgatgtgagacataatttattgtg

SEQ ID NO: 1389899 - DNA, 25 bp, Homo sapien
aaaagaactaagtgccaagtgcttt

SEQ ID NO: 1389900 - DNA, 25 bp, Homo sapien
ggcccgactgagcatgaccttttga

SEQ ID NO: 1389901 - DNA, 25 bp, Homo sapien
aataggactcactcaatctgtagac

SEQ ID NO: 1389902 - DNA, 25 bp, Homo sapien
caaagaatactgtaaggcccatccc

SEQ ID NO: 1389903 - DNA, 25 bp, Homo sapien
cttaaccagcttctagggccaaggc

SEQ ID NO: 1389904 - DNA, 25 bp, Homo sapien
ggtagaaatctgaggcactggtagc

SEQ ID NO: 1389905 - DNA, 25 bp, Homo sapien
tgaaatcccacaccaaggccttagg

SEQ ID NO: 1389906 - DNA, 25 bp, Homo sapien
gctgacctaagaccatctagaactg

SEQ ID NO: 1389907 - DNA, 25 bp, Homo sapien
cacacgcggtcaagtcaagcagggt

SEQ ID NO: 1389908 - DNA, 25 bp, Homo sapien
gcatccaatttaggaattctttgat

SEQ ID NO: 1389909 - DNA, 25 bp, Homo sapien
ctctgggaacttttggacttattca

SEQ ID NO: 1389910 - DNA, 25 bp, Homo sapien
tcatagcatccaatttaggaattct

SEQ ID NO: 1389911 - DNA, 25 bp, Homo sapien
tggacttattcatagcatccaattt

SEQ ID NO: 1389912 - DNA, 25 bp, Homo sapien
cctgggaaggacctagatttgttca

SEQ ID NO: 1389913 - DNA, 25 bp, Homo sapien
cagtcagctgattttgagacctagg

SEQ ID NO: 1389914 - DNA, 25 bp, Homo sapien
tatggctctcaaaaacatgtgacac

SEQ ID NO: 1389915 - DNA, 25 bp, Homo sapien
catcacacccagcttgtcacaggga

SEQ ID NO: 1389916 - DNA, 25 bp, Homo sapien
gcagttgcagctcagtttattttta

SEQ ID NO: 1389917 - DNA, 25 bp, Homo sapien
tttaatcaatgagaaaggattatta

SEQ ID NO: 1389918 - DNA, 25 bp, Homo sapien
tgttagttatcattattcctgtttg

SEQ ID NO: 1389919 - DNA, 25 bp, Homo sapien
ttcctgtttgcagaaaaggaaactg

SEQ ID NO: 1389920 - DNA, 25 bp, Homo sapien
tccggcgtgatcattaaaggaattc

SEQ ID NO: 1389921 - DNA, 25 bp, Homo sapien
ccaagctcatttgtgcctgcagaaa

SEQ ID NO: 1389922 - DNA, 25 bp, Homo sapien
tccaaagtctatatagtccggcgtg

SEQ ID NO: 1389923 - DNA, 25 bp, Homo sapien
caaagtgtcaaagttggtaaatggc

SEQ ID NO: 1389924 - DNA, 25 bp, Homo sapien
gaaactgagggtaccaatgccagac

SEQ ID NO: 1389925 - DNA, 25 bp, Homo sapien
aaaaagagcttgctacccagggaga

SEQ ID NO: 1389926 - DNA, 25 bp, Homo sapien
catggattgagacacttacagcttc

SEQ ID NO: 1389927 - DNA, 25 bp, Homo sapien
tgagtactcctagggcagttcagct

SEQ ID NO: 1389928 - DNA, 25 bp, Homo sapien
tgaggccctgaatctccgcagccag

SEQ ID NO: 1389929 - DNA, 25 bp, Homo sapien
caaggcctcaactatggtgtcattg

SEQ ID NO: 1389930 - DNA, 25 bp, Homo sapien
agcaaggcctcaactatggtgtcat

SEQ ID NO: 1389931 - DNA, 25 bp, Homo sapien
tggtgtcattgaggccctgaatctc

SEQ ID NO: 1389932 - DNA, 25 bp, Homo sapien
gaggcgataggagccaatgagggct

SEQ ID NO: 1389933 - DNA, 25 bp, Homo sapien
atgggaggcgataggagccaatgag

SEQ ID NO: 1389934 - DNA, 25 bp, Homo sapien
tagagattaagataggccattccac

SEQ ID NO: 1389935 - DNA, 25 bp, Homo sapien
tccacttattagagcagtgctgcta

SEQ ID NO: 1389936 - DNA, 25 bp, Homo sapien
tacatcaggctgaaaagtggtcttc

SEQ ID NO: 1389937 - DNA, 25 bp, Homo sapien
tttatatactttaggccgacaggcg

SEQ ID NO: 1389938 - DNA, 25 bp, Homo sapien
tcaggtgtcgtgatgccctcttcat

SEQ ID NO: 1389939 - DNA, 25 bp, Homo sapien
tgttttagggcttatagtccaccaa

SEQ ID NO: 1389940 - DNA, 25 bp, Homo sapien
ttattgttacctctctgcagggtgc

SEQ ID NO: 1389941 - DNA, 25 bp, Homo sapien
gagttgtttgaaatcagcacccttc

SEQ ID NO: 1389942 - DNA, 25 bp, Homo sapien
taattttgacaggacatgcatagga

SEQ ID NO: 1389943 - DNA, 25 bp, Homo sapien
tggattggcagctcttggtaaagga

SEQ ID NO: 1389944 - DNA, 25 bp, Homo sapien
tgtggctaatgccattggattggca

SEQ ID NO: 1389945 - DNA, 25 bp, Homo sapien
ctcttggtaaaggaaatcgatggcc

SEQ ID NO: 1389946 - DNA, 25 bp, Homo sapien
aatcgatggccatgtataaacaatg

SEQ ID NO: 1389947 - DNA, 25 bp, Homo sapien
caaactacgttgtgtgaatctgagg

SEQ ID NO: 1389948 - DNA, 25 bp, Homo sapien
tgctctgggcatactccgtcacaaa

SEQ ID NO: 1389949 - DNA, 25 bp, Homo sapien
cgttgtgtgaatctgaggactgctt

SEQ ID NO: 1389950 - DNA, 25 bp, Homo sapien
gaaatgagttcccaaattgctcaag

SEQ ID NO: 1389951 - DNA, 25 bp, Homo sapien
tgagattagagcagcgaagagactt

SEQ ID NO: 1389952 - DNA, 25 bp, Homo sapien
tcacctctgaggagtgagattagag

SEQ ID NO: 1389953 - DNA, 25 bp, Homo sapien
gcagcgaagagactttcaattctta

SEQ ID NO: 1389954 - DNA, 25 bp, Homo sapien
cacctctgaggagtgagattagagc

SEQ ID NO: 1389955 - DNA, 25 bp, Homo sapien
ccagcagctagcactttcatccaat

SEQ ID NO: 1389956 - DNA, 25 bp, Homo sapien
cactttcatccaatgccagggcttt

SEQ ID NO: 1389957 - DNA, 25 bp, Homo sapien
gctagcactttcatccaatgccagg

SEQ ID NO: 1389958 - DNA, 25 bp, Homo sapien
aaaggaggggtagcattcccagcag

SEQ ID NO: 1389959 - DNA, 25 bp, Homo sapien
gtaacgagcactttctgggtccgtg

SEQ ID NO: 1389960 - DNA, 25 bp, Homo sapien
cttgaggtaacgagcactttctggg

SEQ ID NO: 1389961 - DNA, 25 bp, Homo sapien
aggtaacgagcactttctgggtccg

SEQ ID NO: 1389962 - DNA, 25 bp, Homo sapien
ggtcacttgaggtaacgagcacttt

SEQ ID NO: 1389963 - DNA, 25 bp, Homo sapien
gggatgcgtagtccctgacacgtgc

SEQ ID NO: 1389964 - DNA, 25 bp, Homo sapien
gataacttcgagtatttaaactgat

SEQ ID NO: 1389965 - DNA, 25 bp, Homo sapien
gtagtccctgacacgtgccctgata

SEQ ID NO: 1389966 - DNA, 25 bp, Homo sapien
cacgtgccctgataacttcgagtat

SEQ ID NO: 1389967 - DNA, 25 bp, Homo sapien
tccgtgaacgagctgggcatttgat

SEQ ID NO: 1389968 - DNA, 25 bp, Homo sapien
tctaaaattcttgcatccgtgaacg

SEQ ID NO: 1389969 - DNA, 25 bp, Homo sapien
gattttgggataacgatctaccaga

SEQ ID NO: 1389970 - DNA, 25 bp, Homo sapien
catttgatgagacagggccgaatac

SEQ ID NO: 1389971 - DNA, 25 bp, Homo sapien
tccgtgaacgagctgggcatttgat

SEQ ID NO: 1389972 - DNA, 25 bp, Homo sapien
tctaaaattcttgcatccgtgaacg

SEQ ID NO: 1389973 - DNA, 25 bp, Homo sapien
gattttgggataacgatctaccaga

SEQ ID NO: 1389974 - DNA, 25 bp, Homo sapien
catttgatgagacagggccgaatac

SEQ ID NO: 1389975 - DNA, 25 bp, Homo sapien
gattttgggataacgatctaccaga

SEQ ID NO: 1389976 - DNA, 25 bp, Homo sapien
tctaaaattcttgcatccgtgaacg

SEQ ID NO: 1389977 - DNA, 25 bp, Homo sapien
tccgtgaacgagctgggcatttgat

SEQ ID NO: 1389978 - DNA, 25 bp, Homo sapien
catttgatgagacagggccgaatac

SEQ ID NO: 1389979 - DNA, 25 bp, Homo sapien
catttgatgagacagggccgaatac

SEQ ID NO: 1389980 - DNA, 25 bp, Homo sapien
tctaaaattcttgcatccgtgaacg

SEQ ID NO: 1389981 - DNA, 25 bp, Homo sapien
gattttgggataacgatctaccaga

SEQ ID NO: 1389982 - DNA, 25 bp, Homo sapien
tccgtgaacgagctgggcatttgat

SEQ ID NO: 1389983 - DNA, 25 bp, Homo sapien
gctaggctcctttggttagagaagc

SEQ ID NO: 1389984 - DNA, 25 bp, Homo sapien
ttcagcctccaattggtgtcagtac

SEQ ID NO: 1389985 - DNA, 25 bp, Homo sapien
gaggattgtatttcagaaccaccaa

SEQ ID NO: 1389986 - DNA, 25 bp, Homo sapien
gacaattgttaacccgctaggctcc

SEQ ID NO: 1389987 - DNA, 25 bp, Homo sapien
gaacattgctcgaggagattcagga

SEQ ID NO: 1389988 - DNA, 25 bp, Homo sapien
tacacagacaactacagaacattgc

SEQ ID NO: 1389989 - DNA, 25 bp, Homo sapien
tcaggaagacctaaatcaatggaca

SEQ ID NO: 1389990 - DNA, 25 bp, Homo sapien
tgtccatgggttggaagttgtaaca

SEQ ID NO: 1389991 - DNA, 25 bp, Homo sapien
cagcatggaattctcaggcctatga

SEQ ID NO: 1389992 - DNA, 25 bp, Homo sapien
tctcaggcctatgacatcctagggc

SEQ ID NO: 1389993 - DNA, 25 bp, Homo sapien
tatgacatcctagggcctcatccac

SEQ ID NO: 1389994 - DNA, 25 bp, Homo sapien
gaattctcaggcctatgacatccta

SEQ ID NO: 1389995 - DNA, 25 bp, Homo sapien
tatgggtgctctagcttggcaacgg

SEQ ID NO: 1389996 - DNA, 25 bp, Homo sapien
gagaatacttccttgtgctactaaa

SEQ ID NO: 1389997 - DNA, 25 bp, Homo sapien
atatttgacaattacggatgacaca

SEQ ID NO: 1389998 - DNA, 25 bp, Homo sapien
ggatgacacaattgagcaacagctt

SEQ ID NO: 1389999 - DNA, 25 bp, Homo sapien
ggagccaatgcctgtcacgtagtaa

SEQ ID NO: 1390000 - DNA, 25 bp, Homo sapien
tggagccaatgcctgtcacgtagta

SEQ ID NO: 1390001 - DNA, 25 bp, Homo sapien
agccaatgcctgtcacgtagtaatt

SEQ ID NO: 1390002 - DNA, 25 bp, Homo sapien
ccaatgcctgtcacgtagtaattgg

SEQ ID NO: 1390003 - DNA, 25 bp, Homo sapien
cattgtatgcaagacatcaaactca

SEQ ID NO: 1390004 - DNA, 25 bp, Homo sapien
gtatgcaagacatcaaactcaaatc

SEQ ID NO: 1390005 - DNA, 25 bp, Homo sapien
gggatcacattgtatgcaagacatc

SEQ ID NO: 1390006 - DNA, 25 bp, Homo sapien
gatcacattgtatgcaagacatcaa

SEQ ID NO: 1390007 - DNA, 25 bp, Homo sapien
tttgctgggtcaattgctacattgt

SEQ ID NO: 1390008 - DNA, 25 bp, Homo sapien
gctgggtcaattgctacattgttat

SEQ ID NO: 1390009 - DNA, 25 bp, Homo sapien
tgctgggtcaattgctacattgtta

SEQ ID NO: 1390010 - DNA, 25 bp, Homo sapien
gggtcaattgctacattgttataac

SEQ ID NO: 1390011 - DNA, 25 bp, Homo sapien
acatcttcatgtgcagtaccaggaa

SEQ ID NO: 1390012 - DNA, 25 bp, Homo sapien
ggagagcgggacatcttcatgtgca

SEQ ID NO: 1390013 - DNA, 25 bp, Homo sapien
cttcatgtgcagtaccaggaagaca

SEQ ID NO: 1390014 - DNA, 25 bp, Homo sapien
tcaggcactctctccttgagcaggg

SEQ ID NO: 1390015 - DNA, 25 bp, Homo sapien
ttcagtaaaagaacgacagcagtaa

SEQ ID NO: 1390016 - DNA, 25 bp, Homo sapien
cagtaaaagaacgacagcagtaaag

SEQ ID NO: 1390017 - DNA, 25 bp, Homo sapien
agtaaaagaacgacagcagtaaagg

SEQ ID NO: 1390018 - DNA, 25 bp, Homo sapien
tcagtaaaagaacgacagcagtaaa

SEQ ID NO: 1390019 - DNA, 25 bp, Homo sapien
tccaggccctgtcttgcaggcaatc

SEQ ID NO: 1390020 - DNA, 25 bp, Homo sapien
ctgtggccttgggtgccctggcctc

SEQ ID NO: 1390021 - DNA, 25 bp, Homo sapien
gtggccttgggtgccctggcctcca

SEQ ID NO: 1390022 - DNA, 25 bp, Homo sapien
gcctccaggccctgtcttgcaggca

SEQ ID NO: 1390023 - DNA, 25 bp, Homo sapien
gaggggatcccatgaaaacaagatg

SEQ ID NO: 1390024 - DNA, 25 bp, Homo sapien
gaaacgcgtgcattagtactggaac

SEQ ID NO: 1390025 - DNA, 25 bp, Homo sapien
gtactggaaccaagatcaggagatg

SEQ ID NO: 1390026 - DNA, 25 bp, Homo sapien
aacaagatgaaacgcgtgcattagt

SEQ ID NO: 1390027 - DNA, 25 bp, Homo sapien
tgggtccgggactccaattgcacac

SEQ ID NO: 1390028 - DNA, 25 bp, Homo sapien
gggactccaattgcacacagccagt

SEQ ID NO: 1390029 - DNA, 25 bp, Homo sapien
tggtcgctgggtccgggactccaat

SEQ ID NO: 1390030 - DNA, 25 bp, Homo sapien
ctggtcgctgggtccgggactccaa

SEQ ID NO: 1390031 - DNA, 25 bp, Homo sapien
tattcagagtccaaagtggtcacca

SEQ ID NO: 1390032 - DNA, 25 bp, Homo sapien
cactgtattcagagtccaaagtggt

SEQ ID NO: 1390033 - DNA, 25 bp, Homo sapien
ggttccagtgagacttgaactctga

SEQ ID NO: 1390034 - DNA, 25 bp, Homo sapien
ctgtattcagagtccaaagtggtca

SEQ ID NO: 1390035 - DNA, 25 bp, Homo sapien
caagcacattctatcaaaactgtga

SEQ ID NO: 1390036 - DNA, 25 bp, Homo sapien
actaggctttactatggctgggggc

SEQ ID NO: 1390037 - DNA, 25 bp, Homo sapien
gataggacgacaaaatgggacaaga

SEQ ID NO: 1390038 - DNA, 25 bp, Homo sapien
ttccccgaggtaagataggacgaca

SEQ ID NO: 1390039 - DNA, 25 bp, Homo sapien
tgtgctcttgctagttcccaagctg

SEQ ID NO: 1390040 - DNA, 25 bp, Homo sapien
gtgctcttgctagttcccaagctgc

SEQ ID NO: 1390041 - DNA, 25 bp, Homo sapien
gctgggccaagtggaccttggctaa

SEQ ID NO: 1390042 - DNA, 25 bp, Homo sapien
cctcagcagataggtagctgcacaa

SEQ ID NO: 1390043 - DNA, 25 bp, Homo sapien
agtgctgggccaagtggaccttggc

SEQ ID NO: 1390044 - DNA, 25 bp, Homo sapien
ttagtgctgggccaagtggaccttg

SEQ ID NO: 1390045 - DNA, 25 bp, Homo sapien
cctgatgttttaaggacttccggtg

SEQ ID NO: 1390046 - DNA, 25 bp, Homo sapien
ccggtggctgcacttcttgcatggt

SEQ ID NO: 1390047 - DNA, 25 bp, Homo sapien
ctgatgttttaaggacttccggtgg

SEQ ID NO: 1390048 - DNA, 25 bp, Homo sapien
gacttccggtggctgcacttcttgc

SEQ ID NO: 1390049 - DNA, 25 bp, Homo sapien
gaaggcaagggtcacaaggctggag

SEQ ID NO: 1390050 - DNA, 25 bp, Homo sapien
atggcagagcccttagggatttcac

SEQ ID NO: 1390051 - DNA, 25 bp, Homo sapien
gctggagtacatggcagagccctta

SEQ ID NO: 1390052 - DNA, 25 bp, Homo sapien
tggaaggcaagggtcacaaggctgg

SEQ ID NO: 1390053 - DNA, 25 bp, Homo sapien
ggaaatcttctcctggaaggcgaaa

SEQ ID NO: 1390054 - DNA, 25 bp, Homo sapien
gaaggcgaaagcaggccaagcgtca

SEQ ID NO: 1390055 - DNA, 25 bp, Homo sapien
agtggactggaaatcttctcctgga

SEQ ID NO: 1390056 - DNA, 25 bp, Homo sapien
aaggcgaaagcaggccaagcgtcac

SEQ ID NO: 1390057 - DNA, 25 bp, Homo sapien
cctctgactggtgcagtagtttcct

SEQ ID NO: 1390058 - DNA, 25 bp, Homo sapien
tctgactggtgcagtagtttcctta

SEQ ID NO: 1390059 - DNA, 25 bp, Homo sapien
gcctctgactggtgcagtagtttcc

SEQ ID NO: 1390060 - DNA, 25 bp, Homo sapien
tgcctctgactggtgcagtagtttc

SEQ ID NO: 1390061 - DNA, 25 bp, Homo sapien
tctctttctgctggttgtcgatctt

SEQ ID NO: 1390062 - DNA, 25 bp, Homo sapien
gtcgatcttcagatgctcagctgtg

SEQ ID NO: 1390063 - DNA, 25 bp, Homo sapien
ttgtcgatcttcagatgctcagctg

SEQ ID NO: 1390064 - DNA, 25 bp, Homo sapien
tctttctgctggttgtcgatcttca

SEQ ID NO: 1390065 - DNA, 25 bp, Homo sapien
gctttgtggctctttccagttcaaa

SEQ ID NO: 1390066 - DNA, 25 bp, Homo sapien
tccttcacagcctcgaatacctcca

SEQ ID NO: 1390067 - DNA, 25 bp, Homo sapien
caatcttctcaactcccctgaactg

SEQ ID NO: 1390068 - DNA, 25 bp, Homo sapien
cagttcaaagaaggattctacaatc

SEQ ID NO: 1390069 - DNA, 25 bp, Homo sapien
catgaatgcctttgctgcctagcac

SEQ ID NO: 1390070 - DNA, 25 bp, Homo sapien
ccgactcctctagggcatggtgcag

SEQ ID NO: 1390071 - DNA, 25 bp, Homo sapien
agggccgctctccagaacatggtga

SEQ ID NO: 1390072 - DNA, 25 bp, Homo sapien
tgctgctccgaagctcatgaatgcc

SEQ ID NO: 1390073 - DNA, 25 bp, Homo sapien
cttccccttgcatgggctcaagttc

SEQ ID NO: 1390074 - DNA, 25 bp, Homo sapien
gaagccgtcgcacaaccatttgcag

SEQ ID NO: 1390075 - DNA, 25 bp, Homo sapien
gttgctccctttaccaggaatgcct

SEQ ID NO: 1390076 - DNA, 25 bp, Homo sapien
tttgcagctctcagaactaaggtgt

SEQ ID NO: 1390077 - DNA, 25 bp, Homo sapien
taaggtgttgctccctttaccagga

SEQ ID NO: 1390078 - DNA, 25 bp, Homo sapien
tgggcttcaaggccagggaagctgc

SEQ ID NO: 1390079 - DNA, 25 bp, Homo sapien
ttgggcttcaaggccagggaagctg

SEQ ID NO: 1390080 - DNA, 25 bp, Homo sapien
cttagggcactgtagtcatcaatgt

SEQ ID NO: 1390081 - DNA, 25 bp, Homo sapien
gagacactatctttttgaccagcag

SEQ ID NO: 1390082 - DNA, 25 bp, Homo sapien
aagagacactatctttttgaccagc

SEQ ID NO: 1390083 - DNA, 25 bp, Homo sapien
gctgtcttagggcactgtagtcatc

SEQ ID NO: 1390084 - DNA, 25 bp, Homo sapien
atttgttctgttgattatggccgtt

SEQ ID NO: 1390085 - DNA, 25 bp, Homo sapien
tctgttgattatggccgtttctgag

SEQ ID NO: 1390086 - DNA, 25 bp, Homo sapien
agccagaagtagaggaagcagagct

SEQ ID NO: 1390087 - DNA, 25 bp, Homo sapien
gattatggccgtttctgagccagaa

SEQ ID NO: 1390088 - DNA, 25 bp, Homo sapien
ggaattcataccaacatcccggact

SEQ ID NO: 1390089 - DNA, 25 bp, Homo sapien
gggaattcataccaacatcccggac

SEQ ID NO: 1390090 - DNA, 25 bp, Homo sapien
cttggaagaaagacaaggttggatg

SEQ ID NO: 1390091 - DNA, 25 bp, Homo sapien
tggaagaaagacaaggttggatgtg

SEQ ID NO: 1390092 - DNA, 25 bp, Homo sapien
ttggaagaaagacaaggttggatgt

SEQ ID NO: 1390093 - DNA, 25 bp, Homo sapien
ggaagaaagacaaggttggatgtgt

SEQ ID NO: 1390094 - DNA, 25 bp, Homo sapien
ggacataacaaggagaagctcaaaa

SEQ ID NO: 1390095 - DNA, 25 bp, Homo sapien
cttccaaggacataacaaggagaag

SEQ ID NO: 1390096 - DNA, 25 bp, Homo sapien
tccaaggacataacaaggagaagct

SEQ ID NO: 1390097 - DNA, 25 bp, Homo sapien
caaggacataacaaggagaagctca

SEQ ID NO: 1390098 - DNA, 25 bp, Homo sapien
ctggaaacaagcaaacaaattttga

SEQ ID NO: 1390099 - DNA, 25 bp, Homo sapien
aaacaagcaaacaaattttgagaat

SEQ ID NO: 1390100 - DNA, 25 bp, Homo sapien
ggaaacaagcaaacaaattttgaga

SEQ ID NO: 1390101 - DNA, 25 bp, Homo sapien
tggaaacaagcaaacaaattttgag

SEQ ID NO: 1390102 - DNA, 25 bp, Homo sapien
gagcagcccttcgatgactccctgt

SEQ ID NO: 1390103 - DNA, 25 bp, Homo sapien
acctccccgagcagcccttcgatga

SEQ ID NO: 1390104 - DNA, 25 bp, Homo sapien
gccacctccccgagcagcccttcga

SEQ ID NO: 1390105 - DNA, 25 bp, Homo sapien
ccccgagcagcccttcgatgactcc

SEQ ID NO: 1390106 - DNA, 25 bp, Homo sapien
ggtgtgcggcctcctcaataatgtc

SEQ ID NO: 1390107 - DNA, 25 bp, Homo sapien
ctatggtgtgcggcctcctcaataa

SEQ ID NO: 1390108 - DNA, 25 bp, Homo sapien
tgtgcggcctcctcaataatgtcag

SEQ ID NO: 1390109 - DNA, 25 bp, Homo sapien
cggcctcctcaataatgtcagtgaa

SEQ ID NO: 1390110 - DNA, 25 bp, Homo sapien
caagtccagtaaagaaaagtgattc

SEQ ID NO: 1390111 - DNA, 25 bp, Homo sapien
tcccttcacagatggcttccagaga

SEQ ID NO: 1390112 - DNA, 25 bp, Homo sapien
ccagagagcaggttaaattatactc

SEQ ID NO: 1390113 - DNA, 25 bp, Homo sapien
aattatactctttttgccagctgcc

SEQ ID NO: 1390114 - DNA, 25 bp, Homo sapien
tcttggaagtttctgggctctgaac

SEQ ID NO: 1390115 - DNA, 25 bp, Homo sapien
tggaggtgataccaagatgtccgtt

SEQ ID NO: 1390116 - DNA, 25 bp, Homo sapien
gaacatgaactatggagatagactg

SEQ ID NO: 1390117 - DNA, 25 bp, Homo sapien
tcgttagttatgtcaccttaggcaa

SEQ ID NO: 1390118 - DNA, 25 bp, Homo sapien
tcaaacgtctgtcgtgctttctgct

SEQ ID NO: 1390119 - DNA, 25 bp, Homo sapien
ttaaacatgcctcacagaaggaaaa

SEQ ID NO: 1390120 - DNA, 25 bp, Homo sapien
aatgccattttgagccacacgattt

SEQ ID NO: 1390121 - DNA, 25 bp, Homo sapien
gcttattaaacatgcctcacagaag

SEQ ID NO: 1390122 - DNA, 25 bp, Homo sapien
gccattttgagccacacgattttgt

SEQ ID NO: 1390123 - DNA, 25 bp, Homo sapien
tctggatgggcatggaacttcacca

SEQ ID NO: 1390124 - DNA, 25 bp, Homo sapien
ctctctgcttgtaaggcctcattga

SEQ ID NO: 1390125 - DNA, 25 bp, Homo sapien
gagccgactccgttcatctactagt

SEQ ID NO: 1390126 - DNA, 25 bp, Homo sapien
ttcaccagactgctatagagctgtc

SEQ ID NO: 1390127 - DNA, 25 bp, Homo sapien
tctttggtttcctgaaatttcttga

SEQ ID NO: 1390128 - DNA, 25 bp, Homo sapien
ctgttgtctttggtttcctgaaatt

SEQ ID NO: 1390129 - DNA, 25 bp, Homo sapien
cctgggtcaggcgtttcatagctct

SEQ ID NO: 1390130 - DNA, 25 bp, Homo sapien
caggcgtttcatagctcttatgtct

SEQ ID NO: 1390131 - DNA, 25 bp, Homo sapien
gtttcatagctcttatgtcttcagg

SEQ ID NO: 1390132 - DNA, 25 bp, Homo sapien
ggtcaggcgtttcatagctcttatg

SEQ ID NO: 1390133 - DNA, 25 bp, Homo sapien
gtattctgagctgtgaacatttcca

SEQ ID NO: 1390134 - DNA, 25 bp, Homo sapien
agtattctgagctgtgaacatttcc

SEQ ID NO: 1390135 - DNA, 25 bp, Homo sapien
ctgcagctcttcttcctgcacagcc

SEQ ID NO: 1390136 - DNA, 25 bp, Homo sapien
tgcagctcttcttcctgcacagcca

SEQ ID NO: 1390137 - DNA, 25 bp, Homo sapien
gcagctcttcttcctgcacagccat

SEQ ID NO: 1390138 - DNA, 25 bp, Homo sapien
catggactgtagagcagaaagttcc

SEQ ID NO: 1390139 - DNA, 25 bp, Homo sapien
agccctacaactgtgtccaagtctc

SEQ ID NO: 1390140 - DNA, 25 bp, Homo sapien
tccactttggcattactcagttctt

SEQ ID NO: 1390141 - DNA, 25 bp, Homo sapien
tactcagttctttgtccagccctac

SEQ ID NO: 1390142 - DNA, 25 bp, Homo sapien
tagccatgagttcaagttccacttt

SEQ ID NO: 1390143 - DNA, 25 bp, Homo sapien
aagccattataccaccagactgcaa

SEQ ID NO: 1390144 - DNA, 25 bp, Homo sapien
ttataccaccagactgcaatgccag

SEQ ID NO: 1390145 - DNA, 25 bp, Homo sapien
ccagactgcaatgccagtttcctct

SEQ ID NO: 1390146 - DNA, 25 bp, Homo sapien
taccaccagactgcaatgccagttt

SEQ ID NO: 1390147 - DNA, 25 bp, Homo sapien
ccggaaaaaagtcagctcatggctc

SEQ ID NO: 1390148 - DNA, 25 bp, Homo sapien
tcatgtaggtgacgtcaagttacag

SEQ ID NO: 1390149 - DNA, 25 bp, Homo sapien
gttacagtgagtggccccagacttg

SEQ ID NO: 1390150 - DNA, 25 bp, Homo sapien
agatacccggaaaaaagtcagctca

SEQ ID NO: 1390151 - DNA, 25 bp, Homo sapien
gaagtgctatcatctctggaaggta

SEQ ID NO: 1390152 - DNA, 25 bp, Homo sapien
tcatctctggaaggtatctgcattg

SEQ ID NO: 1390153 - DNA, 25 bp, Homo sapien
ctatcatctctggaaggtatctgca

SEQ ID NO: 1390154 - DNA, 25 bp, Homo sapien
tgctatcatctctggaaggtatctg

SEQ ID NO: 1390155 - DNA, 25 bp, Homo sapien
tttcctgctccccggtgcgcataga

SEQ ID NO: 1390156 - DNA, 25 bp, Homo sapien
gcatagaccaaagcaggccttgaat

SEQ ID NO: 1390157 - DNA, 25 bp, Homo sapien
gcgcatagaccaaagcaggccttga

SEQ ID NO: 1390158 - DNA, 25 bp, Homo sapien
tgctccccggtgcgcatagaccaaa

SEQ ID NO: 1390159 - DNA, 25 bp, Homo sapien
tccaagtttgcagagcaatgttgca

SEQ ID NO: 1390160 - DNA, 25 bp, Homo sapien
caagtttgcagagcaatgttgcact

SEQ ID NO: 1390161 - DNA, 25 bp, Homo sapien
gtttgcagagcaatgttgcactaag

SEQ ID NO: 1390162 - DNA, 25 bp, Homo sapien
ctggtccaagtttgcagagcaatgt

SEQ ID NO: 1390163 - DNA, 25 bp, Homo sapien
gattgaatttgagggtatacaggtg

SEQ ID NO: 1390164 - DNA, 25 bp, Homo sapien
ataggcaaaattggaaaagttgcct

SEQ ID NO: 1390165 - DNA, 25 bp, Homo sapien
ggaaaagttgccttgcttgtataaa

SEQ ID NO: 1390166 - DNA, 25 bp, Homo sapien
ctcagattgaatttgagggtataca

SEQ ID NO: 1390167 - DNA, 25 bp, Homo sapien
tctatggtcttgtcctgatgacatc

SEQ ID NO: 1390168 - DNA, 25 bp, Homo sapien
tgacatctcccagcacgatgtcgtt

SEQ ID NO: 1390169 - DNA, 25 bp, Homo sapien
tgtcgttttgcaaaggtgatctcaa

SEQ ID NO: 1390170 - DNA, 25 bp, Homo sapien
gacagccacatctatggtcttgtcc

SEQ ID NO: 1390171 - DNA, 25 bp, Homo sapien
acttctcaggggagtaggtcttttg

SEQ ID NO: 1390172 - DNA, 25 bp, Homo sapien
ctacttctcaggggagtaggtcttt

SEQ ID NO: 1390173 - DNA, 25 bp, Homo sapien
caggggagtaggtcttttgtatgga

SEQ ID NO: 1390174 - DNA, 25 bp, Homo sapien
ttctcaggggagtaggtcttttgta

SEQ ID NO: 1390175 - DNA, 25 bp, Homo sapien
tgcgacacacgaatggacagtcaac

SEQ ID NO: 1390176 - DNA, 25 bp, Homo sapien
cgactgcgacacacgaatggacagt

SEQ ID NO: 1390177 - DNA, 25 bp, Homo sapien
actgcgacacacgaatggacagtca

SEQ ID NO: 1390178 - DNA, 25 bp, Homo sapien
cccgactgcgacacacgaatggaca

SEQ ID NO: 1390179 - DNA, 25 bp, Homo sapien
aacactaggcagagccaccgccttt

SEQ ID NO: 1390180 - DNA, 25 bp, Homo sapien
aagggcagcggaatggccttagccc

SEQ ID NO: 1390181 - DNA, 25 bp, Homo sapien
gcgcatcttgctggctacggttgaa

SEQ ID NO: 1390182 - DNA, 25 bp, Homo sapien
tcagaaaaccggagaggcgcatctt

SEQ ID NO: 1390183 - DNA, 25 bp, Homo sapien
ggcgtcagagccagcgtcccgggaa

SEQ ID NO: 1390184 - DNA, 25 bp, Homo sapien
atatatgcttctcaacagatcagcc

SEQ ID NO: 1390185 - DNA, 25 bp, Homo sapien
gatgcctagtagctgattcggggcc

SEQ ID NO: 1390186 - DNA, 25 bp, Homo sapien
tgcttctcaacagatcagcccttaa

SEQ ID NO: 1390187 - DNA, 25 bp, Homo sapien
gattcggggcccattgtcgtaggct

SEQ ID NO: 1390188 - DNA, 25 bp, Homo sapien
tccagccactggaggaccgggagga

SEQ ID NO: 1390189 - DNA, 25 bp, Homo sapien
tctccagccactggaggaccgggag

SEQ ID NO: 1390190 - DNA, 25 bp, Homo sapien
accgggaggaccttcagaggaggtg

SEQ ID NO: 1390191 - DNA, 25 bp, Homo sapien
cttcagaggaggtgaggtcgacttc

SEQ ID NO: 1390192 - DNA, 25 bp, Homo sapien
gactcgccgcctttctttccggtca

SEQ ID NO: 1390193 - DNA, 25 bp, Homo sapien
ccaacgggacaggactcgccgcctt

SEQ ID NO: 1390194 - DNA, 25 bp, Homo sapien
tcgccgcctttctttccggtcagaa

SEQ ID NO: 1390195 - DNA, 25 bp, Homo sapien
cccaacgggacaggactcgccgcct

SEQ ID NO: 1390196 - DNA, 25 bp, Homo sapien
gacaggaccgaaatgagcagcttgt

SEQ ID NO: 1390197 - DNA, 25 bp, Homo sapien
ccggacaggaccgaaatgagcagct

SEQ ID NO: 1390198 - DNA, 25 bp, Homo sapien
caggaccgaaatgagcagcttgttt

SEQ ID NO: 1390199 - DNA, 25 bp, Homo sapien
ccgaaatgagcagcttgttttccct

SEQ ID NO: 1390200 - DNA, 25 bp, Homo sapien
tgtccttttgggcctgggcttcttg

SEQ ID NO: 1390201 - DNA, 25 bp, Homo sapien
ctgtccttttgggcctgggcttctt

SEQ ID NO: 1390202 - DNA, 25 bp, Homo sapien
cttttgggcctgggcttcttgggag

SEQ ID NO: 1390203 - DNA, 25 bp, Homo sapien
tctacaggccaaaccgaaagaggcc

SEQ ID NO: 1390204 - DNA, 25 bp, Homo sapien
aaggcttctctacaggccaaaccga

SEQ ID NO: 1390205 - DNA, 25 bp, Homo sapien
gatcctcggtgagcgaacccagcct

SEQ ID NO: 1390206 - DNA, 25 bp, Homo sapien
ttctctacaggccaaaccgaaagag

SEQ ID NO: 1390207 - DNA, 25 bp, Homo sapien
gaccagttcgatcttggccctgagg

SEQ ID NO: 1390208 - DNA, 25 bp, Homo sapien
attggtgaccagttcgatcttggcc

SEQ ID NO: 1390209 - DNA, 25 bp, Homo sapien
cagttcgatcttggccctgaggaaa

SEQ ID NO: 1390210 - DNA, 25 bp, Homo sapien
gtgaccagttcgatcttggccctga

SEQ ID NO: 1390211 - DNA, 25 bp, Homo sapien
gagatcggagaccagttcagggccc

SEQ ID NO: 1390212 - DNA, 25 bp, Homo sapien
cgttgcagtatagcctaagatggga

SEQ ID NO: 1390213 - DNA, 25 bp, Homo sapien
gctttgcccagagcatacggaaggg

SEQ ID NO: 1390214 - DNA, 25 bp, Homo sapien
cagcccgtcttggtttccgcatatg

SEQ ID NO: 1390215 - DNA, 25 bp, Homo sapien
gctgcaactggctccgggacttgtg

SEQ ID NO: 1390216 - DNA, 25 bp, Homo sapien
tccttggtgagcctagcggagtgct

SEQ ID NO: 1390217 - DNA, 25 bp, Homo sapien
tggttacccagtgcgcggctctggc

SEQ ID NO: 1390218 - DNA, 25 bp, Homo sapien
tctaggtcggtggtcaggttctgcc

SEQ ID NO: 1390219 - DNA, 25 bp, Homo sapien
acggccttgtgagacgactccagga

SEQ ID NO: 1390220 - DNA, 25 bp, Homo sapien
aacggccttgtgagacgactccagg

SEQ ID NO: 1390221 - DNA, 25 bp, Homo sapien
gaacggccttgtgagacgactccag

SEQ ID NO: 1390222 - DNA, 25 bp, Homo sapien
cgtctttgccgcctctgccgtcccg

SEQ ID NO: 1390223 - DNA, 25 bp, Homo sapien
gtcccggaggcgccgatcgggctga

SEQ ID NO: 1390224 - DNA, 25 bp, Homo sapien
cctctgccgtcccggaggcgccgat

SEQ ID NO: 1390225 - DNA, 25 bp, Homo sapien
tgccgtcccggaggcgccgatcggg

SEQ ID NO: 1390226 - DNA, 25 bp, Homo sapien
aggggacggtcagtggagcctcctc

SEQ ID NO: 1390227 - DNA, 25 bp, Homo sapien
gggacggtcagtggagcctcctcac

SEQ ID NO: 1390228 - DNA, 25 bp, Homo sapien
ggggacggtcagtggagcctcctca

SEQ ID NO: 1390229 - DNA, 25 bp, Homo sapien
gcgatgcccgcgaggttggaagtgg

SEQ ID NO: 1390230 - DNA, 25 bp, Homo sapien
agaagaagcgactggaggcgatgcc

SEQ ID NO: 1390231 - DNA, 25 bp, Homo sapien
ggccctccaggaccgctcgtttgta

SEQ ID NO: 1390232 - DNA, 25 bp, Homo sapien
ggtgaggccctccaggaccgctcgt

SEQ ID NO: 1390233 - DNA, 25 bp, Homo sapien
tgagcggtaaagggaggcgatgttt

SEQ ID NO: 1390234 - DNA, 25 bp, Homo sapien
gagcggtaaagggaggcgatgtttg

SEQ ID NO: 1390235 - DNA, 25 bp, Homo sapien
ctgagcggtaaagggaggcgatgtt

SEQ ID NO: 1390236 - DNA, 25 bp, Homo sapien
aatcccgcaatgtctgtctacactc

SEQ ID NO: 1390237 - DNA, 25 bp, Homo sapien
agtcaaatcccgcaatgtctgtcta

SEQ ID NO: 1390238 - DNA, 25 bp, Homo sapien
tctaccaagcaattgcgcacgtttc

SEQ ID NO: 1390239 - DNA, 25 bp, Homo sapien
gcaattgcgcacgtttccccttttc

SEQ ID NO: 1390240 - DNA, 25 bp, Homo sapien
tcctgagggcgcttccttggtgttc

SEQ ID NO: 1390241 - DNA, 25 bp, Homo sapien
gtccacagagtgtggaaccgccgca

SEQ ID NO: 1390242 - DNA, 25 bp, Homo sapien
gaagctctcgaacagacagatgtga

SEQ ID NO: 1390243 - DNA, 25 bp, Homo sapien
tccaagcgcggctcttggctcgctg

SEQ ID NO: 1390244 - DNA, 25 bp, Homo sapien
agctgtccttgggacagcaaggccc

SEQ ID NO: 1390245 - DNA, 25 bp, Homo sapien
cacttgtagagggagtcggatgcac

SEQ ID NO: 1390246 - DNA, 25 bp, Homo sapien
tgctttacacatctcagccggcttc

SEQ ID NO: 1390247 - DNA, 25 bp, Homo sapien
ccagcccgtaggaaagacctagcct

SEQ ID NO: 1390248 - DNA, 25 bp, Homo sapien
gctctgcgcgcttgaccacttcggg

SEQ ID NO: 1390249 - DNA, 25 bp, Homo sapien
cggggtgaagcttccgtccgcccat

SEQ ID NO: 1390250 - DNA, 25 bp, Homo sapien
accgggaaatgctcctgcggaagct

SEQ ID NO: 1390251 - DNA, 25 bp, Homo sapien
catgagagacaccgggaaatgctcc

SEQ ID NO: 1390252 - DNA, 25 bp, Homo sapien
tttgcagtgtctcaaccgagaccag

SEQ ID NO: 1390253 - DNA, 25 bp, Homo sapien
tgtctcaaccgagaccagaggaaag

SEQ ID NO: 1390254 - DNA, 25 bp, Homo sapien
aggagggtgcgtcttcctggaagaa

SEQ ID NO: 1390255 - DNA, 25 bp, Homo sapien
tccaggacgatgccctttgcagtgt

SEQ ID NO: 1390256 - DNA, 25 bp, Homo sapien
tctttaccagacctaggatgggcag

SEQ ID NO: 1390257 - DNA, 25 bp, Homo sapien
ttctttaccagacctaggatgggca

SEQ ID NO: 1390258 - DNA, 25 bp, Homo sapien
aagcatccaatcttctcttctagag

SEQ ID NO: 1390259 - DNA, 25 bp, Homo sapien
atcatctaaatcacctgaaaacttc

SEQ ID NO: 1390260 - DNA, 25 bp, Homo sapien
aggatgtgtaaatcttctctacagg

SEQ ID NO: 1390261 - DNA, 25 bp, Homo sapien
tggctttacccaacgcttccttgtc

SEQ ID NO: 1390262 - DNA, 25 bp, Homo sapien
cttctaacttttgatttgcttcttg

SEQ ID NO: 1390263 - DNA, 25 bp, Homo sapien
ttcagcatcttcttctaacttttga

SEQ ID NO: 1390264 - DNA, 25 bp, Homo sapien
tctaacttttgatttgcttcttgct

SEQ ID NO: 1390265 - DNA, 25 bp, Homo sapien
cagcatcttcttctaacttttgatt

SEQ ID NO: 1390266 - DNA, 25 bp, Homo sapien
gtattagcaggcctgtgtctgtact

SEQ ID NO: 1390267 - DNA, 25 bp, Homo sapien
agcaggcctgtgtctgtacttctgg

SEQ ID NO: 1390268 - DNA, 25 bp, Homo sapien
aaaagtattagcaggcctgtgtctg

SEQ ID NO: 1390269 - DNA, 25 bp, Homo sapien
ttagcaggcctgtgtctgtacttct

SEQ ID NO: 1390270 - DNA, 25 bp, Homo sapien
taatataaacagatctgtttcttta

SEQ ID NO: 1390271 - DNA, 25 bp, Homo sapien
ttaatataaacagatctgtttcttt

SEQ ID NO: 1390272 - DNA, 25 bp, Homo sapien
aatataaacagatctgtttctttac

SEQ ID NO: 1390273 - DNA, 25 bp, Homo sapien
ccagtcccatagagccgtgccacag

SEQ ID NO: 1390274 - DNA, 25 bp, Homo sapien
atagagccgtgccacaggctcacaa

SEQ ID NO: 1390275 - DNA, 25 bp, Homo sapien
gcaacagcaatgactcctggagtgg

SEQ ID NO: 1390276 - DNA, 25 bp, Homo sapien
taaaaacttgtctcctggcaaattg

SEQ ID NO: 1390277 - DNA, 25 bp, Homo sapien
ttaagttgatcgaagtgtgagttga

SEQ ID NO: 1390278 - DNA, 25 bp, Homo sapien
caattaagttgatcgaagtgtgagt

SEQ ID NO: 1390279 - DNA, 25 bp, Homo sapien
tttacaattaagttgatcgaagtgt

SEQ ID NO: 1390280 - DNA, 25 bp, Homo sapien
tacaattaagttgatcgaagtgtga

SEQ ID NO: 1390281 - DNA, 25 bp, Homo sapien
gaccacgggccaatctctgctaaaa

SEQ ID NO: 1390282 - DNA, 25 bp, Homo sapien
aggctgcggaaaaacacgaagattt

SEQ ID NO: 1390283 - DNA, 25 bp, Homo sapien
taaaggtaactctagaggctgcgga

SEQ ID NO: 1390284 - DNA, 25 bp, Homo sapien
tataaactcctgtggggcagcggtt

SEQ ID NO: 1390285 - DNA, 25 bp, Homo sapien
tcggctgaccttataatttctccgg

SEQ ID NO: 1390286 - DNA, 25 bp, Homo sapien
tttctccggcggcaaggacaacaac

SEQ ID NO: 1390287 - DNA, 25 bp, Homo sapien
cttataatttctccggcggcaagga

SEQ ID NO: 1390288 - DNA, 25 bp, Homo sapien
ggcaaggacaacaaccaacgcgtta

SEQ ID NO: 1390289 - DNA, 25 bp, Homo sapien
ggaaaagagcgaacgcagtctccca

SEQ ID NO: 1390290 - DNA, 25 bp, Homo sapien
tcgtaaacacgatttttcttctgct

SEQ ID NO: 1390291 - DNA, 25 bp, Homo sapien
ccacatttggggaagttgcacgaat

SEQ ID NO: 1390292 - DNA, 25 bp, Homo sapien
cacgaattagcttcgccctgcgaaa

SEQ ID NO: 1390293 - DNA, 25 bp, Homo sapien
ttcatctgggcatcagtctccttag

SEQ ID NO: 1390294 - DNA, 25 bp, Homo sapien
taagttcacttctcatcaaaggatc

SEQ ID NO: 1390295 - DNA, 25 bp, Homo sapien
cagcatttcatggtcttaagttcac

SEQ ID NO: 1390296 - DNA, 25 bp, Homo sapien
gaggctggtgggttaaaatcatcaa

SEQ ID NO: 1390297 - DNA, 25 bp, Homo sapien
tgatgcccatgtgtgttgtcagctg

SEQ ID NO: 1390298 - DNA, 25 bp, Homo sapien
cattggttcccaggatcaccgttgg

SEQ ID NO: 1390299 - DNA, 25 bp, Homo sapien
ccattggttcccaggatcaccgttg

SEQ ID NO: 1390300 - DNA, 25 bp, Homo sapien
gccattggttcccaggatcaccgtt

SEQ ID NO: 1390301 - DNA, 25 bp, Homo sapien
aaggcccgtgaggacaggccacctg

SEQ ID NO: 1390302 - DNA, 25 bp, Homo sapien
agtctccactccaaggcccgtgagg

SEQ ID NO: 1390303 - DNA, 25 bp, Homo sapien
gaaggggcttcagtaggaacgctct

SEQ ID NO: 1390304 - DNA, 25 bp, Homo sapien
catgcccagaacacccatctctgac

SEQ ID NO: 1390305 - DNA, 25 bp, Homo sapien
ctgaggtaagccacccagtggccca

SEQ ID NO: 1390306 - DNA, 25 bp, Homo sapien
tgaggtaagccacccagtggcccag

SEQ ID NO: 1390307 - DNA, 25 bp, Homo sapien
agagctggcccatatcacagacatc

SEQ ID NO: 1390308 - DNA, 25 bp, Homo sapien
cagagctggcccatatcacagacat

SEQ ID NO: 1390309 - DNA, 25 bp, Homo sapien
agagaatctggcttgaaacacagga

SEQ ID NO: 1390310 - DNA, 25 bp, Homo sapien
aagggcgctgctcaggatatgtgat

SEQ ID NO: 1390311 - DNA, 25 bp, Homo sapien
catgaaacagccctccaaaataatg

SEQ ID NO: 1390312 - DNA, 25 bp, Homo sapien
atatgtgatgagaagggtgctgctc

SEQ ID NO: 1390313 - DNA, 25 bp, Homo sapien
gaatagtagagctttgtgaccttca

SEQ ID NO: 1390314 - DNA, 25 bp, Homo sapien
cagaacatatagaggccacctagga

SEQ ID NO: 1390315 - DNA, 25 bp, Homo sapien
gagctttgtgaccttcaggctggag

SEQ ID NO: 1390316 - DNA, 25 bp, Homo sapien
ccacctaggagaatagtagagcttt

SEQ ID NO: 1390317 - DNA, 25 bp, Homo sapien
tcctccaatgagtacaacgtgctgt

SEQ ID NO: 1390318 - DNA, 25 bp, Homo sapien
caacgtgctgttgtaaggttgctgg

SEQ ID NO: 1390319 - DNA, 25 bp, Homo sapien
gagtcctgtgggacgtcctgttcct

SEQ ID NO: 1390320 - DNA, 25 bp, Homo sapien
ggctacatcgagagcaaagcaggtg

SEQ ID NO: 1390321 - DNA, 25 bp, Homo sapien
gcattgtgggtcttggtcttcttct

SEQ ID NO: 1390322 - DNA, 25 bp, Homo sapien
ggggcattgtgggtcttggtcttct

SEQ ID NO: 1390323 - DNA, 25 bp, Homo sapien
ggcattgtgggtcttggtcttcttc

SEQ ID NO: 1390324 - DNA, 25 bp, Homo sapien
ctggggcattgtgggtcttggtctt

SEQ ID NO: 1390325 - DNA, 25 bp, Homo sapien
attaagtctattcccctattcatgc

SEQ ID NO: 1390326 - DNA, 25 bp, Homo sapien
aagtctattcccctattcatgcaac

SEQ ID NO: 1390327 - DNA, 25 bp, Homo sapien
tattcccctattcatgcaacaatcc

SEQ ID NO: 1390328 - DNA, 25 bp, Homo sapien
gacacattaagtctattcccctatt

SEQ ID NO: 1390329 - DNA, 25 bp, Homo sapien
ccttggtcttcttcctcttcttggt

SEQ ID NO: 1390330 - DNA, 25 bp, Homo sapien
tggtcttcttcctcttcttggtcct

SEQ ID NO: 1390331 - DNA, 25 bp, Homo sapien
cttggtcttcttcctcttcttggtc

SEQ ID NO: 1390332 - DNA, 25 bp, Homo sapien
ggccttggtcttcttcctcttcttg

SEQ ID NO: 1390333 - DNA, 25 bp, Homo sapien
ataactggtaggagtcgaataatat

SEQ ID NO: 1390334 - DNA, 25 bp, Homo sapien
ctgggacatgttgcctctcgatcgt

SEQ ID NO: 1390335 - DNA, 25 bp, Homo sapien
gacatgttgcctctcgatcgtcctt

SEQ ID NO: 1390336 - DNA, 25 bp, Homo sapien
ctctcgatcgtcctttttcacttga

SEQ ID NO: 1390337 - DNA, 25 bp, Homo sapien
gttgcctctcgatcgtcctttttca

SEQ ID NO: 1390338 - DNA, 25 bp, Homo sapien
aataaattcagatggggcctcttac

SEQ ID NO: 1390339 - DNA, 25 bp, Homo sapien
gggcctcttacattaagcagttctt

SEQ ID NO: 1390340 - DNA, 25 bp, Homo sapien
gcaaataaattcagatggggcctct

SEQ ID NO: 1390341 - DNA, 25 bp, Homo sapien
ttcagatggggcctcttacattaag

SEQ ID NO: 1390342 - DNA, 25 bp, Homo sapien
gaagacacagaaaatggagataaat

SEQ ID NO: 1390343 - DNA, 25 bp, Homo sapien
gatgagctaaaacaagccaacttag

SEQ ID NO: 1390344 - DNA, 25 bp, Homo sapien
tcagtgaaacctgggtcacatcttc

SEQ ID NO: 1390345 - DNA, 25 bp, Homo sapien
gcaagatgatggacagatgagctaa

SEQ ID NO: 1390346 - DNA, 25 bp, Homo sapien
agaggtagacaagggtgacactggc

SEQ ID NO: 1390347 - DNA, 25 bp, Homo sapien
cttgagttcaatgtcgtgacagtca

SEQ ID NO: 1390348 - DNA, 25 bp, Homo sapien
agtcagtccaggttggcatgggcat

SEQ ID NO: 1390349 - DNA, 25 bp, Homo sapien
caatgtcgtgacagtcagtccaggt

SEQ ID NO: 1390350 - DNA, 25 bp, Homo sapien
cgtgacagtcagtccaggttggcat

SEQ ID NO: 1390351 - DNA, 25 bp, Homo sapien
ctgggatgctaactggagctttatc

SEQ ID NO: 1390352 - DNA, 25 bp, Homo sapien
cggctctcgggcctgggagtgaaca

SEQ ID NO: 1390353 - DNA, 25 bp, Homo sapien
ttgtcctgtaactgggccggctctc

SEQ ID NO: 1390354 - DNA, 25 bp, Homo sapien
gttgtcagaatcatcaggagtgagg

SEQ ID NO: 1390355 - DNA, 25 bp, Homo sapien
ctcgggcctgggagtgaacagagac

SEQ ID NO: 1390356 - DNA, 25 bp, Homo sapien
tattcagtgactggacacaaagccg

SEQ ID NO: 1390357 - DNA, 25 bp, Homo sapien
tgactggacacaaagccgtgcacag

SEQ ID NO: 1390358 - DNA, 25 bp, Homo sapien
catcgtgcattattcagtgactgga

SEQ ID NO: 1390359 - DNA, 25 bp, Homo sapien
gttcaaatacacatcgtgcattatt

SEQ ID NO: 1390360 - DNA, 25 bp, Homo sapien
ccttgaactgcagctcatccctcag

SEQ ID NO: 1390361 - DNA, 25 bp, Homo sapien
tcctccttgaactgcagctcatccc

SEQ ID NO: 1390362 - DNA, 25 bp, Homo sapien
ctgagctttccagcttgcctgagct

SEQ ID NO: 1390363 - DNA, 25 bp, Homo sapien
tgcagctcatccctcagcctagatt

SEQ ID NO: 1390364 - DNA, 25 bp, Homo sapien
tgagggggaccattcgttcagcagt

SEQ ID NO: 1390365 - DNA, 25 bp, Homo sapien
tgagggtcaccattgagggggacca

SEQ ID NO: 1390366 - DNA, 25 bp, Homo sapien
attgagggggaccattcgttcagca

SEQ ID NO: 1390367 - DNA, 25 bp, Homo sapien
agggggaccattcgttcagcagtca

SEQ ID NO: 1390368 - DNA, 25 bp, Homo sapien
tttgtgtacttttgtgacaatgcca

SEQ ID NO: 1390369 - DNA, 25 bp, Homo sapien
ttgtgtacttttgtgacaatgccac

SEQ ID NO: 1390370 - DNA, 25 bp, Homo sapien
atttgtgtacttttgtgacaatgcc

SEQ ID NO: 1390371 - DNA, 25 bp, Homo sapien
gaaatttgaattcttagccatatga

SEQ ID NO: 1390372 - DNA, 25 bp, Homo sapien
tgaaatttgaattcttagccatatg

SEQ ID NO: 1390373 - DNA, 25 bp, Homo sapien
tcttgtaagctgagcagcttaggaa

SEQ ID NO: 1390374 - DNA, 25 bp, Homo sapien
tgctgaaatttgaattcttagccat

SEQ ID NO: 1390375 - DNA, 25 bp, Homo sapien
ccagatctcaagtggagcagcctct

SEQ ID NO: 1390376 - DNA, 25 bp, Homo sapien
agatctcaagtggagcagcctcttc

SEQ ID NO: 1390377 - DNA, 25 bp, Homo sapien
cagatctcaagtggagcagcctctt

SEQ ID NO: 1390378 - DNA, 25 bp, Homo sapien
tatattccaaaggttttgcaaccat

SEQ ID NO: 1390379 - DNA, 25 bp, Homo sapien
ctatattccaaaggttttgcaacca

SEQ ID NO: 1390380 - DNA, 25 bp, Homo sapien
tactatattccaaaggttttgcaac

SEQ ID NO: 1390381 - DNA, 25 bp, Homo sapien
tatgcatgtggattatcatattcat

SEQ ID NO: 1390382 - DNA, 25 bp, Homo sapien
tcattaaccaactcccatcatctct

SEQ ID NO: 1390383 - DNA, 25 bp, Homo sapien
tatatccgaataccactctgttttg

SEQ ID NO: 1390384 - DNA, 25 bp, Homo sapien
tcaaatcaggtagagctagccctcc

SEQ ID NO: 1390385 - DNA, 25 bp, Homo sapien
ggtgaatcacaaggtcacattccca

SEQ ID NO: 1390386 - DNA, 25 bp, Homo sapien
ctgggtgaatcacaaggtcacattc

SEQ ID NO: 1390387 - DNA, 25 bp, Homo sapien
aatcacaaggtcacattcccagtgg

SEQ ID NO: 1390388 - DNA, 25 bp, Homo sapien
tgaatcacaaggtcacattcccagt

SEQ ID NO: 1390389 - DNA, 25 bp, Homo sapien
gaaatgctgccgtgtaataccaacc

SEQ ID NO: 1390390 - DNA, 25 bp, Homo sapien
gacactctggtaaagtctgcctgac

SEQ ID NO: 1390391 - DNA, 25 bp, Homo sapien
tgaaaagcagctctgtacctcagca

SEQ ID NO: 1390392 - DNA, 25 bp, Homo sapien
aatttccaggtgtgtcagagtccag

SEQ ID NO: 1390393 - DNA, 25 bp, Homo sapien
ggagaccttctgatagccctagtgt

SEQ ID NO: 1390394 - DNA, 25 bp, Homo sapien
tagagaacccatgcaagaaaaactg

SEQ ID NO: 1390395 - DNA, 25 bp, Homo sapien
gaatccaagaggtctacaagtccaa

SEQ ID NO: 1390396 - DNA, 25 bp, Homo sapien
ttaagtagggcagcggtctagcaca

SEQ ID NO: 1390397 - DNA, 25 bp, Homo sapien
cttgtatagcagagtagtaacatac

SEQ ID NO: 1390398 - DNA, 25 bp, Homo sapien
tcaaatgggcttgtatagcagagta

SEQ ID NO: 1390399 - DNA, 25 bp, Homo sapien
aatgggcttgtatagcagagtagta

SEQ ID NO: 1390400 - DNA, 25 bp, Homo sapien
tgggcttgtatagcagagtagtaac

SEQ ID NO: 1390401 - DNA, 25 bp, Homo sapien
gttgcgctaaggaccatcacactgt

SEQ ID NO: 1390402 - DNA, 25 bp, Homo sapien
tagcgatgggttgcgctaaggacca

SEQ ID NO: 1390403 - DNA, 25 bp, Homo sapien
tcttgtagcgatgggttgcgctaag

SEQ ID NO: 1390404 - DNA, 25 bp, Homo sapien
gatgggttgcgctaaggaccatcac

SEQ ID NO: 1390405 - DNA, 25 bp, Homo sapien
ttatccaccatgaatgcttctcggg

SEQ ID NO: 1390406 - DNA, 25 bp, Homo sapien
tctcgggttaacactccagagtcat

SEQ ID NO: 1390407 - DNA, 25 bp, Homo sapien
ccccgtactgtattatccaccatga

SEQ ID NO: 1390408 - DNA, 25 bp, Homo sapien
ccatgaatgcttctcgggttaacac

SEQ ID NO: 1390409 - DNA, 25 bp, Homo sapien
gaccttctctgagccttagtttctt

SEQ ID NO: 1390410 - DNA, 25 bp, Homo sapien
tggcaatttgaccttctctgagcct

SEQ ID NO: 1390411 - DNA, 25 bp, Homo sapien
cttctctgagccttagtttctttat

SEQ ID NO: 1390412 - DNA, 25 bp, Homo sapien
ggcaatttgaccttctctgagcctt

SEQ ID NO: 1390413 - DNA, 25 bp, Homo sapien
tagagatggttcagcataacatggt

SEQ ID NO: 1390414 - DNA, 25 bp, Homo sapien
tggttgggctcagggagtaaggctg

SEQ ID NO: 1390415 - DNA, 25 bp, Homo sapien
cttaatggacaatgcatagagatgg

SEQ ID NO: 1390416 - DNA, 25 bp, Homo sapien
gttcagcataacatggttgggctca

SEQ ID NO: 1390417 - DNA, 25 bp, Homo sapien
gaaacgcatacatttcttgaccata

SEQ ID NO: 1390418 - DNA, 25 bp, Homo sapien
tcctcagatcgaaacgcatacattt

SEQ ID NO: 1390419 - DNA, 25 bp, Homo sapien
gatcgaaacgcatacatttcttgac

SEQ ID NO: 1390420 - DNA, 25 bp, Homo sapien
atctttcctcagatcgaaacgcata

SEQ ID NO: 1390421 - DNA, 25 bp, Homo sapien
tttatacaaatatgagaaagagttg

SEQ ID NO: 1390422 - DNA, 25 bp, Homo sapien
tacaaatatgagaaagagttggaga

SEQ ID NO: 1390423 - DNA, 25 bp, Homo sapien
caaatatgagaaagagttggagaat

SEQ ID NO: 1390424 - DNA, 25 bp, Homo sapien
tatacaaatatgagaaagagttgga

SEQ ID NO: 1390425 - DNA, 25 bp, Homo sapien
gtgccaagctgactggtaaccacag

SEQ ID NO: 1390426 - DNA, 25 bp, Homo sapien
gatttcttgacatggatcaaattgt

SEQ ID NO: 1390427 - DNA, 25 bp, Homo sapien
caaattgttaattgtgccaagctga

SEQ ID NO: 1390428 - DNA, 25 bp, Homo sapien
taactttaaagcatcgaacacctca

SEQ ID NO: 1390429 - DNA, 25 bp, Homo sapien
tctgatggatcatgaacccactgtc

SEQ ID NO: 1390430 - DNA, 25 bp, Homo sapien
aagaacttgtattggtgctctccct

SEQ ID NO: 1390431 - DNA, 25 bp, Homo sapien
agaacttgtattggtgctctccctc

SEQ ID NO: 1390432 - DNA, 25 bp, Homo sapien
atgaacccactgtccatccacaaag

SEQ ID NO: 1390433 - DNA, 25 bp, Homo sapien
tcagaccagcggataacagtgggcc

SEQ ID NO: 1390434 - DNA, 25 bp, Homo sapien
gctgtgtgggctttacggagtcctc

SEQ ID NO: 1390435 - DNA, 25 bp, Homo sapien
tcagtggaatcttggtgctccaatt

SEQ ID NO: 1390436 - DNA, 25 bp, Homo sapien
tgctgccatgatacaaactctttgt

SEQ ID NO: 1390437 - DNA, 25 bp, Homo sapien
taaactgtgacccaagaattctaaa

SEQ ID NO: 1390438 - DNA, 25 bp, Homo sapien
aataaactgtgacccaagaattcta

SEQ ID NO: 1390439 - DNA, 25 bp, Homo sapien
tagaataaactgtgacccaagaatt

SEQ ID NO: 1390440 - DNA, 25 bp, Homo sapien
gaataaactgtgacccaagaattct

SEQ ID NO: 1390441 - DNA, 25 bp, Homo sapien
tatctcatccagtcagtctacctgg

SEQ ID NO: 1390442 - DNA, 25 bp, Homo sapien
tacttgtatttcatgctgacagctc

SEQ ID NO: 1390443 - DNA, 25 bp, Homo sapien
ttccctgggaagtgatgaaatgata

SEQ ID NO: 1390444 - DNA, 25 bp, Homo sapien
gatgatgttatcaattgagatccaa

SEQ ID NO: 1390445 - DNA, 25 bp, Homo sapien
ttttagccacgcaacattttgaagt

SEQ ID NO: 1390446 - DNA, 25 bp, Homo sapien
gagagcaaggtcttcagggcagctg

SEQ ID NO: 1390447 - DNA, 25 bp, Homo sapien
caagtcgtggaatcattggctcttc

SEQ ID NO: 1390448 - DNA, 25 bp, Homo sapien
gagtgaaaacaagttgttctcttcc

SEQ ID NO: 1390449 - DNA, 25 bp, Homo sapien
gctgaacacgctggggtcgtccgta

SEQ ID NO: 1390450 - DNA, 25 bp, Homo sapien
accatgatcttgtgctccttccccg

SEQ ID NO: 1390451 - DNA, 25 bp, Homo sapien
agcgtgcagccttggcgccgtggcg

SEQ ID NO: 1390452 - DNA, 25 bp, Homo sapien
tgcgccctcggagcgtgcagccttg

SEQ ID NO: 1390453 - DNA, 25 bp, Homo sapien
tcctcctaaaatggctacaaggccg

SEQ ID NO: 1390454 - DNA, 25 bp, Homo sapien
tattgaaattgaagccgcacccctc

SEQ ID NO: 1390455 - DNA, 25 bp, Homo sapien
tgcagatcaggccaccaataaagtt

SEQ ID NO: 1390456 - DNA, 25 bp, Homo sapien
tgatgtgatggctgttctgcagatc

SEQ ID NO: 1390457 - DNA, 25 bp, Homo sapien
cctcaggtgcgccagcacgttttct

SEQ ID NO: 1390458 - DNA, 25 bp, Homo sapien
aggagcggcacggctttctaccccg

SEQ ID NO: 1390459 - DNA, 25 bp, Homo sapien
cggcagaagggacgtccccaaatga

SEQ ID NO: 1390460 - DNA, 25 bp, Homo sapien
tgggctccggtgctcggtgccggga

SEQ ID NO: 1390461 - DNA, 25 bp, Homo sapien
tagcaaaggctgattgcactgccaa

SEQ ID NO: 1390462 - DNA, 25 bp, Homo sapien
tgagtatgaagctgcagctaccaga

SEQ ID NO: 1390463 - DNA, 25 bp, Homo sapien
taccagattaaaaggaatagtccca

SEQ ID NO: 1390464 - DNA, 25 bp, Homo sapien
caagagacttgctcctgagtatgaa

SEQ ID NO: 1390465 - DNA, 25 bp, Homo sapien
tttattccgggacaatttctcagac

SEQ ID NO: 1390466 - DNA, 25 bp, Homo sapien
tctgccagaccatagctctgggtca

SEQ ID NO: 1390467 - DNA, 25 bp, Homo sapien
tagatgttatgtctccttaggcccc

SEQ ID NO: 1390468 - DNA, 25 bp, Homo sapien
tctgggtcaaatcctgagccaaaaa

SEQ ID NO: 1390469 - DNA, 25 bp, Homo sapien
cactttacgacatgagaaaaactgg

SEQ ID NO: 1390470 - DNA, 25 bp, Homo sapien
aaaggcattccacaggtaaattcgg

SEQ ID NO: 1390471 - DNA, 25 bp, Homo sapien
tcttgataacctagccgagatagtg

SEQ ID NO: 1390472 - DNA, 25 bp, Homo sapien
aaagggccggcaattgttcaaatgt

SEQ ID NO: 1390473 - DNA, 25 bp, Homo sapien
taaaagagtacctgagctcccagtc

SEQ ID NO: 1390474 - DNA, 25 bp, Homo sapien
ccctatcagaagaagagttacgtgg

SEQ ID NO: 1390475 - DNA, 25 bp, Homo sapien
cccagtctagggattaccacaagga

SEQ ID NO: 1390476 - DNA, 25 bp, Homo sapien
tataccgatgctgacttactctccc

SEQ ID NO: 1390477 - DNA, 25 bp, Homo sapien
aagtaagctataattatagcaaaga

SEQ ID NO: 1390478 - DNA, 25 bp, Homo sapien
tagaagtaagctataattatagcaa

SEQ ID NO: 1390479 - DNA, 25 bp, Homo sapien
ctagaagtaagctataattatagca

SEQ ID NO: 1390480 - DNA, 25 bp, Homo sapien
gtcattgttgaagtcatagaactac

SEQ ID NO: 1390481 - DNA, 25 bp, Homo sapien
ttgtcattgttgaagtcatagaact

SEQ ID NO: 1390482 - DNA, 25 bp, Homo sapien
ctattgtcattgttgaagtcataga

SEQ ID NO: 1390483 - DNA, 25 bp, Homo sapien
tattgtcattgttgaagtcatagaa

SEQ ID NO: 1390484 - DNA, 25 bp, Homo sapien
cccagtaataagtgtaatgccagct

SEQ ID NO: 1390485 - DNA, 25 bp, Homo sapien
tgaggatagcttttcgagccccatc

SEQ ID NO: 1390486 - DNA, 25 bp, Homo sapien
ttccagggccctgtacacgatagtg

SEQ ID NO: 1390487 - DNA, 25 bp, Homo sapien
tctccctgaatggtatggcgttggc

SEQ ID NO: 1390488 - DNA, 25 bp, Homo sapien
tcctcttgagctttagatatttctg

SEQ ID NO: 1390489 - DNA, 25 bp, Homo sapien
ttgagctttagatatttctgccatc

SEQ ID NO: 1390490 - DNA, 25 bp, Homo sapien
caatttcctcttgagctttagatat

SEQ ID NO: 1390491 - DNA, 25 bp, Homo sapien
tcttgagctttagatatttctgcca

SEQ ID NO: 1390492 - DNA, 25 bp, Homo sapien
tcactctgtgagggcaatgtcttta

SEQ ID NO: 1390493 - DNA, 25 bp, Homo sapien
cactctgtgagggcaatgtctttag

SEQ ID NO: 1390494 - DNA, 25 bp, Homo sapien
actctgtgagggcaatgtctttaga

SEQ ID NO: 1390495 - DNA, 25 bp, Homo sapien
ctctgtgagggcaatgtctttagac

SEQ ID NO: 1390496 - DNA, 25 bp, Homo sapien
taaatttaagtaagatgcacaaaca

SEQ ID NO: 1390497 - DNA, 25 bp, Homo sapien
taatcacattttatgcctaaagtcc

SEQ ID NO: 1390498 - DNA, 25 bp, Homo sapien
acatgtttctttgataagagtaggg

SEQ ID NO: 1390499 - DNA, 25 bp, Homo sapien
tgtaggaattatacaccaaggacag

SEQ ID NO: 1390500 - DNA, 25 bp, Homo sapien
aatgggcataatggctcctaagggc

SEQ ID NO: 1390501 - DNA, 25 bp, Homo sapien
caaatatggcagctgtctccgtgaa

SEQ ID NO: 1390502 - DNA, 25 bp, Homo sapien
tccagaaacggaaagtcaaagctat

SEQ ID NO: 1390503 - DNA, 25 bp, Homo sapien
tgaccactttgacggaatcttccag

SEQ ID NO: 1390504 - DNA, 25 bp, Homo sapien
tgataaggccacaggtcaatagttt

SEQ ID NO: 1390505 - DNA, 25 bp, Homo sapien
tctaatttatactaggttggcacag

SEQ ID NO: 1390506 - DNA, 25 bp, Homo sapien
taatcttccccttggtctatgcatg

SEQ ID NO: 1390507 - DNA, 25 bp, Homo sapien
caagatcagatctgaagttggaccc

SEQ ID NO: 1390508 - DNA, 25 bp, Homo sapien
tccaaacctactccttttcaccagc

SEQ ID NO: 1390509 - DNA, 25 bp, Homo sapien
aaaacatcacgcgattcttagaata

SEQ ID NO: 1390510 - DNA, 25 bp, Homo sapien
catcacgcgattcttagaatactac

SEQ ID NO: 1390511 - DNA, 25 bp, Homo sapien
cacgcgattcttagaatactactac

SEQ ID NO: 1390512 - DNA, 25 bp, Homo sapien
taagaaaacatcacgcgattcttag

SEQ ID NO: 1390513 - DNA, 25 bp, Homo sapien
cagcctcagtatctaatccaacatt

SEQ ID NO: 1390514 - DNA, 25 bp, Homo sapien
gattacctgacccactctaagtaca

SEQ ID NO: 1390515 - DNA, 25 bp, Homo sapien
acaccagcttccaacatgtccgtta

SEQ ID NO: 1390516 - DNA, 25 bp, Homo sapien
gcgagtttgatagaccagtgttttc

SEQ ID NO: 1390517 - DNA, 25 bp, Homo sapien
ctgcataaagtttagagattacttc

SEQ ID NO: 1390518 - DNA, 25 bp, Homo sapien
ttttctccagagtatttctgccagt

SEQ ID NO: 1390519 - DNA, 25 bp, Homo sapien
agttttctccagagtatttctgcca

SEQ ID NO: 1390520 - DNA, 25 bp, Homo sapien
agagttttctccagagtatttctgc

SEQ ID NO: 1390521 - DNA, 25 bp, Homo sapien
ccagagttttctccagagtatttct

SEQ ID NO: 1390522 - DNA, 25 bp, Homo sapien
gcttcaaacgcctcagcaaacttct

SEQ ID NO: 1390523 - DNA, 25 bp, Homo sapien
gggaatagcttcaaacgcctcagca

SEQ ID NO: 1390524 - DNA, 25 bp, Homo sapien
aatagcttcaaacgcctcagcaaac

SEQ ID NO: 1390525 - DNA, 25 bp, Homo sapien
agcttcaaacgcctcagcaaacttc

SEQ ID NO: 1390526 - DNA, 25 bp, Homo sapien
catccatcagattgtctgtagagcc

SEQ ID NO: 1390527 - DNA, 25 bp, Homo sapien
tgtgatctgtttggctaattcaatt

SEQ ID NO: 1390528 - DNA, 25 bp, Homo sapien
ttaaaaaccaccacctgagtatctc

SEQ ID NO: 1390529 - DNA, 25 bp, Homo sapien
tgatgtgatctgtttggctaattca

SEQ ID NO: 1390530 - DNA, 25 bp, Homo sapien
gagtttagcttcactaacatcatat

SEQ ID NO: 1390531 - DNA, 25 bp, Homo sapien
gttttacagagtcttcagacatccc

SEQ ID NO: 1390532 - DNA, 25 bp, Homo sapien
tgttttacagagtcttcagacatcc

SEQ ID NO: 1390533 - DNA, 25 bp, Homo sapien
actgttttacagagtcttcagacat

SEQ ID NO: 1390534 - DNA, 25 bp, Homo sapien
catcaaaaggacaagagtacactgc

SEQ ID NO: 1390535 - DNA, 25 bp, Homo sapien
tgttatcatgccatcaaaaggacaa

SEQ ID NO: 1390536 - DNA, 25 bp, Homo sapien
aaaggacaagagtacactgctattt

SEQ ID NO: 1390537 - DNA, 25 bp, Homo sapien
cttagtttctgttatcatgccatca

SEQ ID NO: 1390538 - DNA, 25 bp, Homo sapien
agaattttacaaactctgatgttat

SEQ ID NO: 1390539 - DNA, 25 bp, Homo sapien
taagcttggccagaaatacttcatt

SEQ ID NO: 1390540 - DNA, 25 bp, Homo sapien
caataagcttggccagaaatacttc

SEQ ID NO: 1390541 - DNA, 25 bp, Homo sapien
ttttacaaactctgatgttatcaac

SEQ ID NO: 1390542 - DNA, 25 bp, Homo sapien
tcattccatttcgtccatatgctgt

SEQ ID NO: 1390543 - DNA, 25 bp, Homo sapien
attccatttcgtccatatgctgtac

SEQ ID NO: 1390544 - DNA, 25 bp, Homo sapien
cattccatttcgtccatatgctgta

SEQ ID NO: 1390545 - DNA, 25 bp, Homo sapien
gaaagcccatgtcaaagagagaatt

SEQ ID NO: 1390546 - DNA, 25 bp, Homo sapien
agactctctacaaaacaatgccttg

SEQ ID NO: 1390547 - DNA, 25 bp, Homo sapien
tgtgacccactaagatcaacatgtc

SEQ ID NO: 1390548 - DNA, 25 bp, Homo sapien
tcaccccactgattaacttcaacgg

SEQ ID NO: 1390549 - DNA, 25 bp, Homo sapien
ggtttgcatagacctcctcactgtg

SEQ ID NO: 1390550 - DNA, 25 bp, Homo sapien
ttcgctctgaagtatgtgtgcccct

SEQ ID NO: 1390551 - DNA, 25 bp, Homo sapien
tgacttctgatcaaccctggtttcg

SEQ ID NO: 1390552 - DNA, 25 bp, Homo sapien
cctgtggtatatcatccctgggtca

SEQ ID NO: 1390553 - DNA, 25 bp, Homo sapien
tttgttgttgggtatcatgcaaaaa

SEQ ID NO: 1390554 - DNA, 25 bp, Homo sapien
ttgttgggtatcatgcaaaaagaac

SEQ ID NO: 1390555 - DNA, 25 bp, Homo sapien
gttgggtatcatgcaaaaagaactg

SEQ ID NO: 1390556 - DNA, 25 bp, Homo sapien
tgttgttgggtatcatgcaaaaaga

SEQ ID NO: 1390557 - DNA, 25 bp, Homo sapien
ttcttaatgtatgggtagaggtggc

SEQ ID NO: 1390558 - DNA, 25 bp, Homo sapien
tggctttactattagccagtgtgaa

SEQ ID NO: 1390559 - DNA, 25 bp, Homo sapien
tttggccactatccctgcactccca

SEQ ID NO: 1390560 - DNA, 25 bp, Homo sapien
gtagaggtggctttactattagcca

SEQ ID NO: 1390561 - DNA, 25 bp, Homo sapien
aaaatgtgtaagtcgagaagagaac

SEQ ID NO: 1390562 - DNA, 25 bp, Homo sapien
gagaacaacacatcagcaggatatc

SEQ ID NO: 1390563 - DNA, 25 bp, Homo sapien
taatgattggccacagatcttccat

SEQ ID NO: 1390564 - DNA, 25 bp, Homo sapien
aggatatccgtagtcccctacacga

SEQ ID NO: 1390565 - DNA, 25 bp, Homo sapien
tgcaattccccagagcaggtaaggc

SEQ ID NO: 1390566 - DNA, 25 bp, Homo sapien
taaagatggctctcgccatgggtcc

SEQ ID NO: 1390567 - DNA, 25 bp, Homo sapien
tagaactgcccatttgacaagccaa

SEQ ID NO: 1390568 - DNA, 25 bp, Homo sapien
tgttatgtggcaacctgcaattccc
